United States Patent Application Publication US 2014/0004565 A1 - sequence listing, part 33

SEQ ID NO: 726794 - RNA, 19 nt, Artificial Sequence
  Description of Artificial Sequence: Synthetic oligonucleotide
ucgaaaggugaccucagcc

SEQ ID NO: 726795 - RNA, 19 nt, Artificial Sequence
  Description of Artificial Sequence: Synthetic oligonucleotide
ucaaugaugggauuucgaa

SEQ ID NO: 726796 - RNA, 19 nt, Artificial Sequence
  Description of Artificial Sequence: Synthetic oligonucleotide
acagcauuagggaugaguc

SEQ ID NO: 726797 - RNA, 19 nt, Artificial Sequence
  Description of Artificial Sequence: Synthetic oligonucleotide
cauggauauaucuccagug

SEQ ID NO: 726798 - RNA, 19 nt, Artificial Sequence
  Description of Artificial Sequence: Synthetic oligonucleotide
acagaaagcggggauagcg

SEQ ID NO: 726799 - RNA, 19 nt, Artificial Sequence
  Description of Artificial Sequence: Synthetic oligonucleotide
aaccaagaacucuugggca

SEQ ID NO: 726800 - RNA, 19 nt, Artificial Sequence
  Description of Artificial Sequence: Synthetic oligonucleotide
agaagugguggauucauga

SEQ ID NO: 726801 - RNA, 19 nt, Artificial Sequence
  Description of Artificial Sequence: Synthetic oligonucleotide
aaauccgcuucucacacau

SEQ ID NO: 726802 - RNA, 19 nt, Artificial Sequence
  Description of Artificial Sequence: Synthetic oligonucleotide
cucaagcuauacaaugugg

SEQ ID NO: 726803 - RNA, 19 nt, Artificial Sequence
  Description of Artificial Sequence: Synthetic oligonucleotide
aaagcacacgugcucuggg

SEQ ID NO: 726804 - RNA, 19 nt, Artificial Sequence
  Description of Artificial Sequence: Synthetic oligonucleotide
agcauuagggaugagucuc

SEQ ID NO: 726805 - RNA, 19 nt, Artificial Sequence
  Description of Artificial Sequence: Synthetic oligonucleotide
aggguaaagcucugguccc

SEQ ID NO: 726806 - RNA, 19 nt, Artificial Sequence
  Description of Artificial Sequence: Synthetic oligonucleotide
caagcuauacaauguggag

SEQ ID NO: 726807 - RNA, 19 nt, Artificial Sequence
  Description of Artificial Sequence: Synthetic oligonucleotide
gaagugguggauucaugag

SEQ ID NO: 726808 - RNA, 19 nt, Artificial Sequence
  Description of Artificial Sequence: Synthetic oligonucleotide
aaagggguacggcugucag

SEQ ID NO: 726809 - RNA, 19 nt, Artificial Sequence
  Description of Artificial Sequence: Synthetic oligonucleotide
auggauauaucuccagugu

SEQ ID NO: 726810 - RNA, 19 nt, Artificial Sequence
  Description of Artificial Sequence: Synthetic oligonucleotide
uccucaagacucagggacg

SEQ ID NO: 726811 - RNA, 19 nt, Artificial Sequence
  Description of Artificial Sequence: Synthetic oligonucleotide
aguugcugacgucugugcg

SEQ ID NO: 726812 - RNA, 19 nt, Artificial Sequence
  Description of Artificial Sequence: Synthetic oligonucleotide
ugcuccgcagcugugaggg

SEQ ID NO: 726813 - RNA, 19 nt, Artificial Sequence
  Description of Artificial Sequence: Synthetic oligonucleotide
ugggauuucgaaaggugac

SEQ ID NO: 726814 - RNA, 19 nt, Artificial Sequence
  Description of Artificial Sequence: Synthetic oligonucleotide
aagcacacgugcucugggg

SEQ ID NO: 726815 - RNA, 19 nt, Artificial Sequence
  Description of Artificial Sequence: Synthetic oligonucleotide
guagccucccgccacaaag

SEQ ID NO: 726816 - RNA, 19 nt, Artificial Sequence
  Description of Artificial Sequence: Synthetic oligonucleotide
ucuggcacgcugaaaugcc

SEQ ID NO: 726817 - RNA, 19 nt, Artificial Sequence
  Description of Artificial Sequence: Synthetic oligonucleotide
ccgaauagaagacagcccg

SEQ ID NO: 726818 - RNA, 19 nt, Artificial Sequence
  Description of Artificial Sequence: Synthetic oligonucleotide
gucacggccgccaaaaucc

SEQ ID NO: 726819 - RNA, 19 nt, Artificial Sequence
  Description of Artificial Sequence: Synthetic oligonucleotide
auuucgaaaggugaccuca

SEQ ID NO: 726820 - RNA, 19 nt, Artificial Sequence
  Description of Artificial Sequence: Synthetic oligonucleotide
auccgcuucucacacauca

SEQ ID NO: 726821 - RNA, 19 nt, Artificial Sequence
  Description of Artificial Sequence: Synthetic oligonucleotide
augaccucggcccagcacu

SEQ ID NO: 726822 - RNA, 19 nt, Artificial Sequence
  Description of Artificial Sequence: Synthetic oligonucleotide
ucguugacaaugcugucaa

SEQ ID NO: 726823 - RNA, 19 nt, Artificial Sequence
  Description of Artificial Sequence: Synthetic oligonucleotide
ucccuguacacaaucuugu

SEQ ID NO: 726824 - RNA, 19 nt, Artificial Sequence
  Description of Artificial Sequence: Synthetic oligonucleotide
agcagccuucucaugaugc

SEQ ID NO: 726825 - RNA, 19 nt, Artificial Sequence
  Description of Artificial Sequence: Synthetic oligonucleotide
aguggaucccaaccuccgc

SEQ ID NO: 726826 - RNA, 19 nt, Artificial Sequence
  Description of Artificial Sequence: Synthetic oligonucleotide
ucaucucgggcuacaaugu

SEQ ID NO: 726827 - RNA, 19 nt, Artificial Sequence
  Description of Artificial Sequence: Synthetic oligonucleotide
cacuaaggcuuccacuucg

SEQ ID NO: 726828 - RNA, 19 nt, Artificial Sequence
  Description of Artificial Sequence: Synthetic oligonucleotide
agcaccuucccaaaaugac

SEQ ID NO: 726829 - RNA, 19 nt, Artificial Sequence
  Description of Artificial Sequence: Synthetic oligonucleotide
ugcugaguacuccaucaca

SEQ ID NO: 726830 - RNA, 19 nt, Artificial Sequence
  Description of Artificial Sequence: Synthetic oligonucleotide
uaccacucguacuuccagg

SEQ ID NO: 726831 - RNA, 19 nt, Artificial Sequence
  Description of Artificial Sequence: Synthetic oligonucleotide
acagccgaaaagguucacc

SEQ ID NO: 726832 - RNA, 19 nt, Artificial Sequence
  Description of Artificial Sequence: Synthetic oligonucleotide
ucaucguccccagggaacg

SEQ ID NO: 726833 - RNA, 19 nt, Artificial Sequence
  Description of Artificial Sequence: Synthetic oligonucleotide
caggccgaauagaagacag

SEQ ID NO: 726834 - RNA, 19 nt, Artificial Sequence
  Description of Artificial Sequence: Synthetic oligonucleotide
ucucgggcuacaaugucac

SEQ ID NO: 726835 - RNA, 19 nt, Artificial Sequence
  Description of Artificial Sequence: Synthetic oligonucleotide
auuagggaugagucuccgg

SEQ ID NO: 726836 - RNA, 19 nt, Artificial Sequence
  Description of Artificial Sequence: Synthetic oligonucleotide
uguccuaccacugcauugu

SEQ ID NO: 726837 - RNA, 19 nt, Artificial Sequence
  Description of Artificial Sequence: Synthetic oligonucleotide
ucggcuauaaaggccccgg

SEQ ID NO: 726838 - RNA, 19 nt, Artificial Sequence
  Description of Artificial Sequence: Synthetic oligonucleotide
acugcucgcguguaggaug

SEQ ID NO: 726839 - RNA, 19 nt, Artificial Sequence
  Description of Artificial Sequence: Synthetic oligonucleotide
gccgaaaagguucaccagg

SEQ ID NO: 726840 - RNA, 19 nt, Artificial Sequence
  Description of Artificial Sequence: Synthetic oligonucleotide
auggggcaaaccccaaagg

SEQ ID NO: 726841 - RNA, 19 nt, Artificial Sequence
  Description of Artificial Sequence: Synthetic oligonucleotide
ugggcaacucuccagugaa

SEQ ID NO: 726842 - RNA, 19 nt, Artificial Sequence
  Description of Artificial Sequence: Synthetic oligonucleotide
agucgaaaucccggaaggc

SEQ ID NO: 726843 - RNA, 19 nt, Artificial Sequence
  Description of Artificial Sequence: Synthetic oligonucleotide
uuccgcgucgcguucagug

SEQ ID NO: 726844 - RNA, 19 nt, Artificial Sequence
  Description of Artificial Sequence: Synthetic oligonucleotide
ugcuccguccacuaaggcu

SEQ ID NO: 726845 - RNA, 19 nt, Artificial Sequence
  Description of Artificial Sequence: Synthetic oligonucleotide
ugguccggucuccauagcc

SEQ ID NO: 726846 - RNA, 19 nt, Artificial Sequence
  Description of Artificial Sequence: Synthetic oligonucleotide
auagcgaaccucaucguug

SEQ ID NO: 726847 - RNA, 19 nt, Artificial Sequence
  Description of Artificial Sequence: Synthetic oligonucleotide
ucagcgugggcaacucucc

SEQ ID NO: 726848 - RNA, 19 nt, Artificial Sequence
  Description of Artificial Sequence: Synthetic oligonucleotide
ucgggcuacaaugucaccu

SEQ ID NO: 726849 - RNA, 19 nt, Artificial Sequence
  Description of Artificial Sequence: Synthetic oligonucleotide
cuucccuugcuguuuggag

SEQ ID NO: 726850 - RNA, 19 nt, Artificial Sequence
  Description of Artificial Sequence: Synthetic oligonucleotide
uggggucuggaaacagccg

SEQ ID NO: 726851 - RNA, 19 nt, Artificial Sequence
  Description of Artificial Sequence: Synthetic oligonucleotide
ucaagacucagggacgacu

SEQ ID NO: 726852 - RNA, 19 nt, Artificial Sequence
  Description of Artificial Sequence: Synthetic oligonucleotide
acucagggacgacuucccc

SEQ ID NO: 726853 - RNA, 19 nt, Artificial Sequence
  Description of Artificial Sequence: Synthetic oligonucleotide
gacgucccagcccagaguc

SEQ ID NO: 726854 - RNA, 19 nt, Artificial Sequence
  Description of Artificial Sequence: Synthetic oligonucleotide
guugccacaucaauguuca

SEQ ID NO: 726855 - RNA, 19 nt, Artificial Sequence
  Description of Artificial Sequence: Synthetic oligonucleotide
cuauaaaggccccgggcug

SEQ ID NO: 726856 - RNA, 19 nt, Artificial Sequence
  Description of Artificial Sequence: Synthetic oligonucleotide
aaaauccgcuucucacaca

SEQ ID NO: 726857 - RNA, 19 nt, Artificial Sequence
  Description of Artificial Sequence: Synthetic oligonucleotide
uguccugcccuggucacgg

SEQ ID NO: 726858 - RNA, 19 nt, Artificial Sequence
  Description of Artificial Sequence: Synthetic oligonucleotide
cuuaggaaagggguacggc

SEQ ID NO: 726859 - RNA, 19 nt, Artificial Sequence
  Description of Artificial Sequence: Synthetic oligonucleotide
accucaucguugacaaugc

SEQ ID NO: 726860 - RNA, 19 nt, Artificial Sequence
  Description of Artificial Sequence: Synthetic oligonucleotide
agaaacuugagcgcacaca

SEQ ID NO: 726861 - RNA, 19 nt, Artificial Sequence
  Description of Artificial Sequence: Synthetic oligonucleotide
uagcgaaccucaucguuga

SEQ ID NO: 726862 - RNA, 19 nt, Artificial Sequence
  Description of Artificial Sequence: Synthetic oligonucleotide
agcagccgcacccaaguug

SEQ ID NO: 726863 - RNA, 19 nt, Artificial Sequence
  Description of Artificial Sequence: Synthetic oligonucleotide
ucgcguguaggauguaucu

SEQ ID NO: 726864 - RNA, 19 nt, Artificial Sequence
  Description of Artificial Sequence: Synthetic oligonucleotide
auacaauguggagggcagc

SEQ ID NO: 726865 - RNA, 19 nt, Artificial Sequence
  Description of Artificial Sequence: Synthetic oligonucleotide
gcuucagaaacuugagcgc

SEQ ID NO: 726866 - RNA, 19 nt, Artificial Sequence
  Description of Artificial Sequence: Synthetic oligonucleotide
uccgcgucgcguucagugg

SEQ ID NO: 726867 - RNA, 19 nt, Artificial Sequence
  Description of Artificial Sequence: Synthetic oligonucleotide
cuauacaauguggagggca

SEQ ID NO: 726868 - RNA, 19 nt, Artificial Sequence
  Description of Artificial Sequence: Synthetic oligonucleotide
agcguaggcacgaagggug

SEQ ID NO: 726869 - RNA, 19 nt, Artificial Sequence
  Description of Artificial Sequence: Synthetic oligonucleotide
caguggaucccaaccuccg

SEQ ID NO: 726870 - RNA, 19 nt, Artificial Sequence
  Description of Artificial Sequence: Synthetic oligonucleotide
aaggugaccucagccacca

SEQ ID NO: 726871 - RNA, 19 nt, Artificial Sequence
  Description of Artificial Sequence: Synthetic oligonucleotide
uccacuggagcggaauuca

SEQ ID NO: 726872 - RNA, 19 nt, Artificial Sequence
  Description of Artificial Sequence: Synthetic oligonucleotide
gauuucgaaaggugaccuc

SEQ ID NO: 726873 - RNA, 19 nt, Artificial Sequence
  Description of Artificial Sequence: Synthetic oligonucleotide
cacucguacuuccaggguc

SEQ ID NO: 726874 - RNA, 19 nt, Artificial Sequence
  Description of Artificial Sequence: Synthetic oligonucleotide
ucagaaacuugagcgcaca

SEQ ID NO: 726875 - RNA, 19 nt, Artificial Sequence
  Description of Artificial Sequence: Synthetic oligonucleotide
agcacgccuaguccccacc

SEQ ID NO: 726876 - RNA, 19 nt, Artificial Sequence
  Description of Artificial Sequence: Synthetic oligonucleotide
uuauggggcaaaccccaaa

SEQ ID NO: 726877 - RNA, 19 nt, Artificial Sequence
  Description of Artificial Sequence: Synthetic oligonucleotide
ccaaguugccacaucaaug

SEQ ID NO: 726878 - RNA, 19 nt, Artificial Sequence
  Description of Artificial Sequence: Synthetic oligonucleotide
ggccgaauagaagacagcc

SEQ ID NO: 726879 - RNA, 19 nt, Artificial Sequence
  Description of Artificial Sequence: Synthetic oligonucleotide
caccacacaggccgaauag

SEQ ID NO: 726880 - RNA, 19 nt, Artificial Sequence
  Description of Artificial Sequence: Synthetic oligonucleotide
agcaucaggucuccgccug

SEQ ID NO: 726881 - RNA, 19 nt, Artificial Sequence
  Description of Artificial Sequence: Synthetic oligonucleotide
caugaguuggagaacucaa

SEQ ID NO: 726882 - RNA, 19 nt, Artificial Sequence
  Description of Artificial Sequence: Synthetic oligonucleotide
uugcugacgucugugcgcc

SEQ ID NO: 726883 - RNA, 19 nt, Artificial Sequence
  Description of Artificial Sequence: Synthetic oligonucleotide
caccucgugccucucauug

SEQ ID NO: 726884 - RNA, 19 nt, Artificial Sequence
  Description of Artificial Sequence: Synthetic oligonucleotide
augaguuggagaacucaag

SEQ ID NO: 726885 - RNA, 19 nt, Artificial Sequence
  Description of Artificial Sequence: Synthetic oligonucleotide
cauugggacugaaggugcc

SEQ ID NO: 726886 - RNA, 19 nt, Artificial Sequence
  Description of Artificial Sequence: Synthetic oligonucleotide
cagccgaaaagguucacca

SEQ ID NO: 726887 - RNA, 19 nt, Artificial Sequence
  Description of Artificial Sequence: Synthetic oligonucleotide
uugacguagcccucaguau

SEQ ID NO: 726888 - RNA, 19 nt, Artificial Sequence
  Description of Artificial Sequence: Synthetic oligonucleotide
aagcguaggcacgaagggu

SEQ ID NO: 726889 - RNA, 19 nt, Artificial Sequence
  Description of Artificial Sequence: Synthetic oligonucleotide
aaacagccgaaaagguuca

SEQ ID NO: 726890 - RNA, 19 nt, Artificial Sequence
  Description of Artificial Sequence: Synthetic oligonucleotide
cacaggccgaauagaagac

SEQ ID NO: 726891 - RNA, 19 nt, Artificial Sequence
  Description of Artificial Sequence: Synthetic oligonucleotide
gggacgagcugucagaguc

SEQ ID NO: 726892 - RNA, 19 nt, Artificial Sequence
  Description of Artificial Sequence: Synthetic oligonucleotide
uuuauggggcaaaccccaa

SEQ ID NO: 726893 - RNA, 19 nt, Artificial Sequence
  Description of Artificial Sequence: Synthetic oligonucleotide
gccaaaauccgcuucucac

SEQ ID NO: 726894 - RNA, 19 nt, Artificial Sequence
  Description of Artificial Sequence: Synthetic oligonucleotide
cuaaggcuuccacuucggc

SEQ ID NO: 726895 - RNA, 19 nt, Artificial Sequence
  Description of Artificial Sequence: Synthetic oligonucleotide
gagccuagggauccgcuca

SEQ ID NO: 726896 - RNA, 19 nt, Artificial Sequence
  Description of Artificial Sequence: Synthetic oligonucleotide
gacgagcugucagagucag

SEQ ID NO: 726897 - RNA, 19 nt, Artificial Sequence
  Description of Artificial Sequence: Synthetic oligonucleotide
agcacacgugcucuggggu

SEQ ID NO: 726898 - RNA, 19 nt, Artificial Sequence
  Description of Artificial Sequence: Synthetic oligonucleotide
uucggcuauaaaggccccg

SEQ ID NO: 726899 - RNA, 19 nt, Artificial Sequence
  Description of Artificial Sequence: Synthetic oligonucleotide
ucgugccucucauugucca

SEQ ID NO: 726900 - RNA, 19 nt, Artificial Sequence
  Description of Artificial Sequence: Synthetic oligonucleotide
cucuggucccgccagaaca

SEQ ID NO: 726901 - RNA, 19 nt, Artificial Sequence
  Description of Artificial Sequence: Synthetic oligonucleotide
uccgcagcagccuucucau

SEQ ID NO: 726902 - RNA, 19 nt, Artificial Sequence
  Description of Artificial Sequence: Synthetic oligonucleotide
gucuggcacgcugaaaugc

SEQ ID NO: 726903 - RNA, 19 nt, Artificial Sequence
  Description of Artificial Sequence: Synthetic oligonucleotide
aggacgucccagcccagag

SEQ ID NO: 726904 - RNA, 19 nt, Artificial Sequence
  Description of Artificial Sequence: Synthetic oligonucleotide
ccucucauuguccaagaag

SEQ ID NO: 726905 - RNA, 19 nt, Artificial Sequence
  Description of Artificial Sequence: Synthetic oligonucleotide
agccucccgccacaaaguc

SEQ ID NO: 726906 - RNA, 19 nt, Artificial Sequence
  Description of Artificial Sequence: Synthetic oligonucleotide
cauuagggaugagucuccg

SEQ ID NO: 726907 - RNA, 19 nt, Artificial Sequence
  Description of Artificial Sequence: Synthetic oligonucleotide
cucaaugaugggauuucga

SEQ ID NO: 726908 - RNA, 19 nt, Artificial Sequence
  Description of Artificial Sequence: Synthetic oligonucleotide
augagucuccggagcagcc

SEQ ID NO: 726909 - RNA, 19 nt, Artificial Sequence
  Description of Artificial Sequence: Synthetic oligonucleotide
guaggcacgaagggugggg

SEQ ID NO: 726910 - RNA, 19 nt, Artificial Sequence
  Description of Artificial Sequence: Synthetic oligonucleotide
cugccgacagaaagcgggg

SEQ ID NO: 726911 - RNA, 19 nt, Artificial Sequence
  Description of Artificial Sequence: Synthetic oligonucleotide
ggcuauaaaggccccgggc

SEQ ID NO: 726912 - RNA, 19 nt, Artificial Sequence
  Description of Artificial Sequence: Synthetic oligonucleotide
aacucuccagugaacuccu

SEQ ID NO: 726913 - RNA, 19 nt, Artificial Sequence
  Description of Artificial Sequence: Synthetic oligonucleotide
cugucagcacuuccggcgc

SEQ ID NO: 726914 - RNA, 19 nt, Artificial Sequence
  Description of Artificial Sequence: Synthetic oligonucleotide
gagcucuccacuggagcgg

SEQ ID NO: 726915 - RNA, 19 nt, Artificial Sequence
  Description of Artificial Sequence: Synthetic oligonucleotide
cucgcguguaggauguauc

SEQ ID NO: 726916 - RNA, 19 nt, Artificial Sequence
  Description of Artificial Sequence: Synthetic oligonucleotide
uagccucccgccacaaagu

SEQ ID NO: 726917 - RNA, 19 nt, Artificial Sequence
  Description of Artificial Sequence: Synthetic oligonucleotide
uuuggagccuagggauccg

SEQ ID NO: 726918 - RNA, 19 nt, Artificial Sequence
  Description of Artificial Sequence: Synthetic oligonucleotide
aucuugacguagcccucag

SEQ ID NO: 726919 - RNA, 19 nt, Artificial Sequence
  Description of Artificial Sequence: Synthetic oligonucleotide
gcagcaucaggucuccgcc

SEQ ID NO: 726920 - RNA, 19 nt, Artificial Sequence
  Description of Artificial Sequence: Synthetic oligonucleotide
gucccgccagaacacagcc

SEQ ID NO: 726921 - RNA, 19 nt, Artificial Sequence
  Description of Artificial Sequence: Synthetic oligonucleotide
gcgacgagccagcaggacg

SEQ ID NO: 726922 - RNA, 19 nt, Artificial Sequence
  Description of Artificial Sequence: Synthetic oligonucleotide
gucugugcgccccgaaagc

SEQ ID NO: 726923 - RNA, 19 nt, Artificial Sequence
  Description of Artificial Sequence: Synthetic oligonucleotide
agcacuuccggcgccagga

SEQ ID NO: 726924 - RNA, 19 nt, Artificial Sequence
  Description of Artificial Sequence: Synthetic oligonucleotide
cucgugccucucauugucc

SEQ ID NO: 726925 - RNA, 19 nt, Artificial Sequence
  Description of Artificial Sequence: Synthetic oligonucleotide
aggccgaauagaagacagc

SEQ ID NO: 726926 - RNA, 19 nt, Artificial Sequence
  Description of Artificial Sequence: Synthetic oligonucleotide
ucuuccgcgucgcguucag

SEQ ID NO: 726927 - RNA, 19 nt, Artificial Sequence
  Description of Artificial Sequence: Synthetic oligonucleotide
gagcggaauucagacagca

SEQ ID NO: 726928 - RNA, 19 nt, Artificial Sequence
  Description of Artificial Sequence: Synthetic oligonucleotide
ugccucucauuguccaaga

SEQ ID NO: 726929 - RNA, 19 nt, Artificial Sequence
  Description of Artificial Sequence: Synthetic oligonucleotide
uggggcuaguagccucccg

SEQ ID NO: 726930 - RNA, 19 nt, Artificial Sequence
  Description of Artificial Sequence: Synthetic oligonucleotide
ggcuuugauggcaaagagc

SEQ ID NO: 726931 - RNA, 19 nt, Artificial Sequence
  Description of Artificial Sequence: Synthetic oligonucleotide
ugucagcacuuccggcgcc

SEQ ID NO: 726932 - RNA, 19 nt, Artificial Sequence
  Description of Artificial Sequence: Synthetic oligonucleotide
agcccgaggcucugagaac

SEQ ID NO: 726933 - RNA, 19 nt, Artificial Sequence
  Description of Artificial Sequence: Synthetic oligonucleotide
gcugguccggucuccauag

SEQ ID NO: 726934 - RNA, 19 nt, Artificial Sequence
  Description of Artificial Sequence: Synthetic oligonucleotide
ggggcuaguagccucccgc

SEQ ID NO: 726935 - RNA, 19 nt, Artificial Sequence
  Description of Artificial Sequence: Synthetic oligonucleotide
cguucaguggaucccaacc

SEQ ID NO: 726936 - RNA, 19 nt, Artificial Sequence
  Description of Artificial Sequence: Synthetic oligonucleotide
acuuccggcgccaggaacu

SEQ ID NO: 726937 - RNA, 19 nt, Artificial Sequence
  Description of Artificial Sequence: Synthetic oligonucleotide
ugugcgccccgaaagcgua

SEQ ID NO: 726938 - RNA, 19 nt, Artificial Sequence
  Description of Artificial Sequence: Synthetic oligonucleotide
cagaaacuugagcgcacac

SEQ ID NO: 726939 - RNA, 19 nt, Artificial Sequence
  Description of Artificial Sequence: Synthetic oligonucleotide
ugaccucggcccagcacug

SEQ ID NO: 726940 - RNA, 19 nt, Artificial Sequence
  Description of Artificial Sequence: Synthetic oligonucleotide
caggucuccgccugcugag

SEQ ID NO: 726941 - RNA, 19 nt, Artificial Sequence
  Description of Artificial Sequence: Synthetic oligonucleotide
cuucggcuauaaaggcccc

SEQ ID NO: 726942 - RNA, 19 nt, Artificial Sequence
  Description of Artificial Sequence: Synthetic oligonucleotide
gggauuucgaaaggugacc

SEQ ID NO: 726943 - RNA, 19 nt, Artificial Sequence
  Description of Artificial Sequence: Synthetic oligonucleotide
gauagcgaaccucaucguu

SEQ ID NO: 726944 - RNA, 19 nt, Artificial Sequence
  Description of Artificial Sequence: Synthetic oligonucleotide
ugccggaccucagagccug

SEQ ID NO: 726945 - RNA, 19 nt, Artificial Sequence
  Description of Artificial Sequence: Synthetic oligonucleotide
ccaacucuagcucccgugc

SEQ ID NO: 726946 - RNA, 19 nt, Artificial Sequence
  Description of Artificial Sequence: Synthetic oligonucleotide
ggcugcuccguccacuaag

SEQ ID NO: 726947 - RNA, 19 nt, Artificial Sequence
  Description of Artificial Sequence: Synthetic oligonucleotide
auaucuccagugugccgga

SEQ ID NO: 726948 - RNA, 19 nt, Artificial Sequence
  Description of Artificial Sequence: Synthetic oligonucleotide
cugcugaguacuccaucac

SEQ ID NO: 726949 - RNA, 19 nt, Artificial Sequence
  Description of Artificial Sequence: Synthetic oligonucleotide
gcuauaaaggccccgggcu

SEQ ID NO: 726950 - RNA, 19 nt, Artificial Sequence
  Description of Artificial Sequence: Synthetic oligonucleotide
acgccuaguccccaccagu

SEQ ID NO: 726951 - RNA, 19 nt, Artificial Sequence
  Description of Artificial Sequence: Synthetic oligonucleotide
cugggacgagcugucagag

SEQ ID NO: 726952 - RNA, 19 nt, Artificial Sequence
  Description of Artificial Sequence: Synthetic oligonucleotide
gcuuaggaaagggguacgg

SEQ ID NO: 726953 - RNA, 19 nt, Artificial Sequence
  Description of Artificial Sequence: Synthetic oligonucleotide
ugcgccccgaaagcguagg

SEQ ID NO: 726954 - RNA, 19 nt, Artificial Sequence
  Description of Artificial Sequence: Synthetic oligonucleotide
acaggccgaauagaagaca

SEQ ID NO: 726955 - RNA, 19 nt, Artificial Sequence
  Description of Artificial Sequence: Synthetic oligonucleotide
gucgcguucaguggauccc

SEQ ID NO: 726956 - RNA, 19 nt, Artificial Sequence
  Description of Artificial Sequence: Synthetic oligonucleotide
cucugccgacagaaagcgg

SEQ ID NO: 726957 - RNA, 19 nt, Artificial Sequence
  Description of Artificial Sequence: Synthetic oligonucleotide
ucuagcucccgugcccucu

SEQ ID NO: 726958 - RNA, 19 nt, Artificial Sequence
  Description of Artificial Sequence: Synthetic oligonucleotide
gugguggauucaugaguug

SEQ ID NO: 726959 - RNA, 19 nt, Artificial Sequence
  Description of Artificial Sequence: Synthetic oligonucleotide
gaaagggguacggcuguca

SEQ ID NO: 726960 - RNA, 19 nt, Artificial Sequence
  Description of Artificial Sequence: Synthetic oligonucleotide
cuccauagcccauccccuc

SEQ ID NO: 726961 - RNA, 19 nt, Artificial Sequence
  Description of Artificial Sequence: Synthetic oligonucleotide
gugggcaacucuccaguga

SEQ ID NO: 726962 - RNA, 19 nt, Artificial Sequence
  Description of Artificial Sequence: Synthetic oligonucleotide
uccgccugcugaguacucc

SEQ ID NO: 726963 - RNA, 19 nt, Artificial Sequence
  Description of Artificial Sequence: Synthetic oligonucleotide
accacacaggccgaauaga

SEQ ID NO: 726964 - RNA, 19 nt, Artificial Sequence
  Description of Artificial Sequence: Synthetic oligonucleotide
caucucgggcuacaauguc

SEQ ID NO: 726965 - RNA, 19 nt, Artificial Sequence
  Description of Artificial Sequence: Synthetic oligonucleotide
cacuggagcggaauucaga

SEQ ID NO: 726966 - RNA, 19 nt, Artificial Sequence
  Description of Artificial Sequence: Synthetic oligonucleotide
ucgcguucaguggauccca

SEQ ID NO: 726967 - RNA, 19 nt, Artificial Sequence
  Description of Artificial Sequence: Synthetic oligonucleotide
gcuaguagccucccgccac

SEQ ID NO: 726968 - RNA, 19 nt, Artificial Sequence
  Description of Artificial Sequence: Synthetic oligonucleotide
ccucugccgacagaaagcg

SEQ ID NO: 726969 - RNA, 19 nt, Artificial Sequence
  Description of Artificial Sequence: Synthetic oligonucleotide
cuccgcagcagccuucuca

SEQ ID NO: 726970 - RNA, 19 nt, Artificial Sequence
  Description of Artificial Sequence: Synthetic oligonucleotide
agcggaauucagacagcag

SEQ ID NO: 726971 - RNA, 19 nt, Artificial Sequence
  Description of Artificial Sequence: Synthetic oligonucleotide
gcagccgcacccaaguugc

SEQ ID NO: 726972 - RNA, 19 nt, Artificial Sequence
  Description of Artificial Sequence: Synthetic oligonucleotide
cugaguacuccaucacaaa

SEQ ID NO: 726973 - RNA, 19 nt, Artificial Sequence
  Description of Artificial Sequence: Synthetic oligonucleotide
cugacgucugugcgccccg

SEQ ID NO: 726974 - RNA, 19 nt, Artificial Sequence
  Description of Artificial Sequence: Synthetic oligonucleotide
acgucuuccgcgucgcguu

SEQ ID NO: 726975 - RNA, 19 nt, Artificial Sequence
  Description of Artificial Sequence: Synthetic oligonucleotide
aagcggggauagcgaaccu

SEQ ID NO: 726976 - RNA, 19 nt, Artificial Sequence
  Description of Artificial Sequence: Synthetic oligonucleotide
cagcccgaggcucugagaa

SEQ ID NO: 726977 - RNA, 19 nt, Artificial Sequence
  Description of Artificial Sequence: Synthetic oligonucleotide
gccccgaaagcguaggcac

SEQ ID NO: 726978 - RNA, 19 nt, Artificial Sequence
  Description of Artificial Sequence: Synthetic oligonucleotide
cgccacaaagucgaaaucc

SEQ ID NO: 726979 - RNA, 19 nt, Artificial Sequence
  Description of Artificial Sequence: Synthetic oligonucleotide
ggaauucagacagcagcac

SEQ ID NO: 726980 - RNA, 19 nt, Artificial Sequence
  Description of Artificial Sequence: Synthetic oligonucleotide
guccggucuccauagccca

SEQ ID NO: 726981 - RNA, 19 nt, Artificial Sequence
  Description of Artificial Sequence: Synthetic oligonucleotide
gccaacucuagcucccgug

SEQ ID NO: 726982 - RNA, 19 nt, Artificial Sequence
  Description of Artificial Sequence: Synthetic oligonucleotide
caaccuccgcucuggguuc

SEQ ID NO: 726983 - RNA, 19 nt, Artificial Sequence
  Description of Artificial Sequence: Synthetic oligonucleotide
gcugaccucaguuguguuc

SEQ ID NO: 726984 - RNA, 19 nt, Artificial Sequence
  Description of Artificial Sequence: Synthetic oligonucleotide
ggucacggccgccaaaauc

SEQ ID NO: 726985 - RNA, 19 nt, Artificial Sequence
  Description of Artificial Sequence: Synthetic oligonucleotide
gcugcuccguccacuaagg

SEQ ID NO: 726986 - RNA, 19 nt, Artificial Sequence
  Description of Artificial Sequence: Synthetic oligonucleotide
acggccgccaaaauccgcu

SEQ ID NO: 726987 - RNA, 19 nt, Artificial Sequence
  Description of Artificial Sequence: Synthetic oligonucleotide
uucugccuuuggagccuag

SEQ ID NO: 726988 - RNA, 19 nt, Artificial Sequence
  Description of Artificial Sequence: Synthetic oligonucleotide
ugcccguggugacagcauu

SEQ ID NO: 726989 - RNA, 19 nt, Artificial Sequence
  Description of Artificial Sequence: Synthetic oligonucleotide
ggcuuaggaaagggguacg

SEQ ID NO: 726990 - RNA, 19 nt, Artificial Sequence
  Description of Artificial Sequence: Synthetic oligonucleotide
gccgaauagaagacagccc

SEQ ID NO: 726991 - RNA, 19 nt, Artificial Sequence
  Description of Artificial Sequence: Synthetic oligonucleotide
cugcuccguccacuaaggc

SEQ ID NO: 726992 - RNA, 19 nt, Artificial Sequence
  Description of Artificial Sequence: Synthetic oligonucleotide
cucgggcuacaaugucacc

SEQ ID NO: 726993 - RNA, 19 nt, Artificial Sequence
  Description of Artificial Sequence: Synthetic oligonucleotide
cuggagcggaauucagaca

SEQ ID NO: 726994 - RNA, 19 nt, Artificial Sequence
  Description of Artificial Sequence: Synthetic oligonucleotide
auguccugcccuggucacg

SEQ ID NO: 726995 - RNA, 19 nt, Artificial Sequence
  Description of Artificial Sequence: Synthetic oligonucleotide
ccaggguaaagcucugguc

SEQ ID NO: 726996 - RNA, 19 nt, Artificial Sequence
  Description of Artificial Sequence: Synthetic oligonucleotide
gguggauucaugaguugga

SEQ ID NO: 726997 - RNA, 19 nt, Artificial Sequence
  Description of Artificial Sequence: Synthetic oligonucleotide
cacggccgccaaaauccgc

SEQ ID NO: 726998 - RNA, 19 nt, Artificial Sequence
  Description of Artificial Sequence: Synthetic oligonucleotide
ugccgacagaaagcgggga

SEQ ID NO: 726999 - RNA, 19 nt, Artificial Sequence
  Description of Artificial Sequence: Synthetic oligonucleotide
gagcacggugcugaccuca

SEQ ID NO: 727000 - RNA, 19 nt, Artificial Sequence
  Description of Artificial Sequence: Synthetic oligonucleotide
guggagggcucagcguggg

SEQ ID NO: 727001 - RNA, 19 nt, Artificial Sequence
  Description of Artificial Sequence: Synthetic oligonucleotide
gcguguaggauguaucugu

SEQ ID NO: 727002 - RNA, 19 nt, Artificial Sequence
  Description of Artificial Sequence: Synthetic oligonucleotide
uggagggcucagcgugggc

SEQ ID NO: 727003 - RNA, 19 nt, Artificial Sequence
  Description of Artificial Sequence: Synthetic oligonucleotide
ccuugaggcugcuccgucc

SEQ ID NO: 727004 - RNA, 19 nt, Artificial Sequence
  Description of Artificial Sequence: Synthetic oligonucleotide
ccgaaaagguucaccagga

SEQ ID NO: 727005 - RNA, 19 nt, Artificial Sequence
  Description of Artificial Sequence: Synthetic oligonucleotide
ccuagggauccgcucaaug

SEQ ID NO: 727006 - RNA, 19 nt, Artificial Sequence
  Description of Artificial Sequence: Synthetic oligonucleotide
ggggauagcgaaccucauc

SEQ ID NO: 727007 - RNA, 19 nt, Artificial Sequence
  Description of Artificial Sequence: Synthetic oligonucleotide
ggggauggucucuggaaga

SEQ ID NO: 727008 - RNA, 19 nt, Artificial Sequence
  Description of Artificial Sequence: Synthetic oligonucleotide
uccgcucaaugaugggauu

SEQ ID NO: 727009 - RNA, 19 nt, Artificial Sequence
  Description of Artificial Sequence: Synthetic oligonucleotide
gcauuagggaugagucucc

SEQ ID NO: 727010 - RNA, 19 nt, Artificial Sequence
  Description of Artificial Sequence: Synthetic oligonucleotide
gggccuggagucuccuggg

SEQ ID NO: 727011 - RNA, 19 nt, Artificial Sequence
  Description of Artificial Sequence: Synthetic oligonucleotide
ggauuucgaaaggugaccu

SEQ ID NO: 727012 - RNA, 19 nt, Artificial Sequence
  Description of Artificial Sequence: Synthetic oligonucleotide
gccuaccacucguacuucc

SEQ ID NO: 727013 - RNA, 19 nt, Artificial Sequence
  Description of Artificial Sequence: Synthetic oligonucleotide
uccccuccuugcagaggcc

SEQ ID NO: 727014 - RNA, 19 nt, Artificial Sequence
  Description of Artificial Sequence: Synthetic oligonucleotide
ccguggagggcucagcgug

SEQ ID NO: 727015 - RNA, 19 nt, Artificial Sequence
  Description of Artificial Sequence: Synthetic oligonucleotide
caagacucagggacgacuu

SEQ ID NO: 727016 - RNA, 19 nt, Artificial Sequence
  Description of Artificial Sequence: Synthetic oligonucleotide
uuggggcuaguagccuccc

SEQ ID NO: 727017 - RNA, 19 nt, Artificial Sequence
  Description of Artificial Sequence: Synthetic oligonucleotide
uccggucuccauagcccau

SEQ ID NO: 727018 - RNA, 19 nt, Artificial Sequence
  Description of Artificial Sequence: Synthetic oligonucleotide
agccuagggauccgcucaa

SEQ ID NO: 727019 - RNA, 19 nt, Artificial Sequence
  Description of Artificial Sequence: Synthetic oligonucleotide
ccgcgcaucccguggaggg

SEQ ID NO: 727020 - RNA, 19 nt, Artificial Sequence
  Description of Artificial Sequence: Synthetic oligonucleotide
cucguacuuccaggguccc

SEQ ID NO: 727021 - RNA, 19 nt, Artificial Sequence
  Description of Artificial Sequence: Synthetic oligonucleotide
gccgcacccaaguugccac

SEQ ID NO: 727022 - RNA, 19 nt, Artificial Sequence
  Description of Artificial Sequence: Synthetic oligonucleotide
cuagcucccgugcccucuc

SEQ ID NO: 727023 - RNA, 19 nt, Artificial Sequence
  Description of Artificial Sequence: Synthetic oligonucleotide
agcacggugcugaccucag

SEQ ID NO: 727024 - RNA, 19 nt, Artificial Sequence
  Description of Artificial Sequence: Synthetic oligonucleotide
ccaagaacucuugggcaag

SEQ ID NO: 727025 - RNA, 19 nt, Artificial Sequence
  Description of Artificial Sequence: Synthetic oligonucleotide
agcucuccacuggagcgga

SEQ ID NO: 727026 - RNA, 19 nt, Artificial Sequence
  Description of Artificial Sequence: Synthetic oligonucleotide
uggucacggccgccaaaau

SEQ ID NO: 727027 - RNA, 19 nt, Artificial Sequence
  Description of Artificial Sequence: Synthetic oligonucleotide
ccucgugccucucauuguc

SEQ ID NO: 727028 - RNA, 19 nt, Artificial Sequence
  Description of Artificial Sequence: Synthetic oligonucleotide
cgaaaucccggaaggccgc

SEQ ID NO: 727029 - RNA, 19 nt, Artificial Sequence
  Description of Artificial Sequence: Synthetic oligonucleotide
ccccgaaagcguaggcacg

SEQ ID NO: 727030 - RNA, 19 nt, Artificial Sequence
  Description of Artificial Sequence: Synthetic oligonucleotide
caucguccccagggaacgg

SEQ ID NO: 727031 - RNA, 19 nt, Artificial Sequence
  Description of Artificial Sequence: Synthetic oligonucleotide
cucaagacucagggacgac

SEQ ID NO: 727032 - RNA, 19 nt, Artificial Sequence
  Description of Artificial Sequence: Synthetic oligonucleotide
guacggcugucaggggucc

SEQ ID NO: 727033 - RNA, 19 nt, Artificial Sequence
  Description of Artificial Sequence: Synthetic oligonucleotide
cagccuaccacucguacuu

SEQ ID NO: 727034 - RNA, 19 nt, Artificial Sequence
  Description of Artificial Sequence: Synthetic oligonucleotide
ucguacuuccagggucccu

SEQ ID NO: 727035 - RNA, 19 nt, Artificial Sequence
  Description of Artificial Sequence: Synthetic oligonucleotide
gguacggcugucagggguc

SEQ ID NO: 727036 - RNA, 19 nt, Artificial Sequence
  Description of Artificial Sequence: Synthetic oligonucleotide
ggggccgcgcaucccgugg

SEQ ID NO: 727037 - RNA, 19 nt, Artificial Sequence
  Description of Artificial Sequence: Synthetic oligonucleotide
cuccguccacuaaggcuuc

SEQ ID NO: 727038 - RNA, 19 nt, Artificial Sequence
  Description of Artificial Sequence: Synthetic oligonucleotide
cugguccggucuccauagc

SEQ ID NO: 727039 - RNA, 19 nt, Artificial Sequence
  Description of Artificial Sequence: Synthetic oligonucleotide
ccuaguccccaccagucca

SEQ ID NO: 727040 - RNA, 19 nt, Artificial Sequence
  Description of Artificial Sequence: Synthetic oligonucleotide
gcggggauagcgaaccuca

SEQ ID NO: 727041 - RNA, 19 nt, Artificial Sequence
  Description of Artificial Sequence: Synthetic oligonucleotide
gggcaaaccccaaagggcu

SEQ ID NO: 727042 - RNA, 19 nt, Artificial Sequence
  Description of Artificial Sequence: Synthetic oligonucleotide
ccucaucgaaguugcugac

SEQ ID NO: 727043 - RNA, 19 nt, Artificial Sequence
  Description of Artificial Sequence: Synthetic oligonucleotide
gcucccgugcccucuccag

SEQ ID NO: 727044 - RNA, 19 nt, Artificial Sequence
  Description of Artificial Sequence: Synthetic oligonucleotide
cgaaagcguaggcacgaag

SEQ ID NO: 727045 - RNA, 19 nt, Artificial Sequence
  Description of Artificial Sequence: Synthetic oligonucleotide
gggcggcuuaggaaagggg

SEQ ID NO: 727046 - RNA, 19 nt, Artificial Sequence
  Description of Artificial Sequence: Synthetic oligonucleotide
gcuauacaauguggagggc

SEQ ID NO: 727047 - RNA, 19 nt, Artificial Sequence
  Description of Artificial Sequence: Synthetic oligonucleotide
gcguaggcacgaagggugg

SEQ ID NO: 727048 - RNA, 19 nt, Artificial Sequence
  Description of Artificial Sequence: Synthetic oligonucleotide
cgucgcguucaguggaucc

SEQ ID NO: 727049 - RNA, 19 nt, Artificial Sequence
  Description of Artificial Sequence: Synthetic oligonucleotide
ggcggcuuaggaaaggggu

SEQ ID NO: 727050 - RNA, 19 nt, Artificial Sequence
  Description of Artificial Sequence: Synthetic oligonucleotide
gcacacgugcucugggguc

SEQ ID NO: 727051 - RNA, 19 nt, Artificial Sequence
  Description of Artificial Sequence: Synthetic oligonucleotide
gccucccgccacaaagucg

SEQ ID NO: 727052 - RNA, 19 nt, Artificial Sequence
  Description of Artificial Sequence: Synthetic oligonucleotide
cagugugccggaccucaga

SEQ ID NO: 727053 - RNA, 19 nt, Artificial Sequence
  Description of Artificial Sequence: Synthetic oligonucleotide
caucccguggagggcucag

SEQ ID NO: 727054 - RNA, 19 nt, Artificial Sequence
  Description of Artificial Sequence: Synthetic oligonucleotide
ggagcggaauucagacagc

SEQ ID NO: 727055 - RNA, 19 nt, Artificial Sequence
  Description of Artificial Sequence: Synthetic oligonucleotide
ggcuaguagccucccgcca

SEQ ID NO: 727056 - RNA, 19 nt, Artificial Sequence
  Description of Artificial Sequence: Synthetic oligonucleotide
ugacgucugugcgccccga

SEQ ID NO: 727057 - RNA, 19 nt, Artificial Sequence
  Description of Artificial Sequence: Synthetic oligonucleotide
ccguggugacagcauuagg

SEQ ID NO: 727058 - RNA, 19 nt, Artificial Sequence
  Description of Artificial Sequence: Synthetic oligonucleotide
uacggcugucagggguccc

SEQ ID NO: 727059 - RNA, 19 nt, Artificial Sequence
  Description of Artificial Sequence: Synthetic oligonucleotide
cugcucgcguguaggaugu

SEQ ID NO: 727060 - RNA, 19 nt, Artificial Sequence
  Description of Artificial Sequence: Synthetic oligonucleotide
gacgucugugcgccccgaa

SEQ ID NO: 727061 - RNA, 19 nt, Artificial Sequence
  Description of Artificial Sequence: Synthetic oligonucleotide
ggugcccguggugacagca

SEQ ID NO: 727062 - RNA, 19 nt, Artificial Sequence
  Description of Artificial Sequence: Synthetic oligonucleotide
gcccgaggcucugagaaca

SEQ ID NO: 727063 - RNA, 19 nt, Artificial Sequence
  Description of Artificial Sequence: Synthetic oligonucleotide
cucuagcucccgugcccuc

SEQ ID NO: 727064 - RNA, 19 nt, Artificial Sequence
  Description of Artificial Sequence: Synthetic oligonucleotide
cagccgcacccaaguugcc

SEQ ID NO: 727065 - RNA, 19 nt, Artificial Sequence
  Description of Artificial Sequence: Synthetic oligonucleotide
gugcugaccucaguugugu

SEQ ID NO: 727066 - RNA, 19 nt, Artificial Sequence
  Description of Artificial Sequence: Synthetic oligonucleotide
gcuccguccacuaaggcuu

SEQ ID NO: 727067 - RNA, 19 nt, Artificial Sequence
  Description of Artificial Sequence: Synthetic oligonucleotide
gcguucaguggaucccaac

SEQ ID NO: 727068 - RNA, 19 nt, Artificial Sequence
  Description of Artificial Sequence: Synthetic oligonucleotide
cuuccacuucggcuauaaa

SEQ ID NO: 727069 - RNA, 19 nt, Artificial Sequence
  Description of Artificial Sequence: Synthetic oligonucleotide
cuggcacgcugaaaugccu

SEQ ID NO: 727070 - RNA, 19 nt, Artificial Sequence
  Description of Artificial Sequence: Synthetic oligonucleotide
cgaauagaagacagcccga

SEQ ID NO: 727071 - RNA, 19 nt, Artificial Sequence
  Description of Artificial Sequence: Synthetic oligonucleotide
ggauagcgaaccucaucgu

SEQ ID NO: 727072 - RNA, 19 nt, Artificial Sequence
  Description of Artificial Sequence: Synthetic oligonucleotide
gccccucuggucccgccag

SEQ ID NO: 727073 - RNA, 19 nt, Artificial Sequence
  Description of Artificial Sequence: Synthetic oligonucleotide
ccauggauauaucuccagu

SEQ ID NO: 727074 - RNA, 19 nt, Artificial Sequence
  Description of Artificial Sequence: Synthetic oligonucleotide
cuccgccugcugaguacuc

SEQ ID NO: 727075 - RNA, 19 nt, Artificial Sequence
  Description of Artificial Sequence: Synthetic oligonucleotide
aggucuccgccugcugagu

SEQ ID NO: 727076 - RNA, 19 nt, Artificial Sequence
  Description of Artificial Sequence: Synthetic oligonucleotide
ggccgccaaaauccgcuuc

SEQ ID NO: 727077 - RNA, 19 nt, Artificial Sequence
  Description of Artificial Sequence: Synthetic oligonucleotide
cugugcgccccgaaagcgu

SEQ ID NO: 727078 - RNA, 19 nt, Artificial Sequence
  Description of Artificial Sequence: Synthetic oligonucleotide
ggguaaagcucugguccca

SEQ ID NO: 727079 - RNA, 19 nt, Artificial Sequence
  Description of Artificial Sequence: Synthetic oligonucleotide
gacgagccagcaggacguc

SEQ ID NO: 727080 - RNA, 19 nt, Artificial Sequence
  Description of Artificial Sequence: Synthetic oligonucleotide
cggcuuaggaaagggguac

SEQ ID NO: 727081 - RNA, 19 nt, Artificial Sequence
  Description of Artificial Sequence: Synthetic oligonucleotide
cggcuauaaaggccccggg

SEQ ID NO: 727082 - RNA, 19 nt, Artificial Sequence
  Description of Artificial Sequence: Synthetic oligonucleotide
gugcgccccgaaagcguag

SEQ ID NO: 727083 - RNA, 19 nt, Artificial Sequence
  Description of Artificial Sequence: Synthetic oligonucleotide
ccaaccuccgcucuggguu

SEQ ID NO: 727084 - RNA, 19 nt, Artificial Sequence
  Description of Artificial Sequence: Synthetic oligonucleotide
uuccggcgccaggaacucu

SEQ ID NO: 727085 - RNA, 19 nt, Artificial Sequence
  Description of Artificial Sequence: Synthetic oligonucleotide
ccucaagacucagggacga

SEQ ID NO: 727086 - RNA, 19 nt, Artificial Sequence
  Description of Artificial Sequence: Synthetic oligonucleotide
aggcgacgagccagcagga

SEQ ID NO: 727087 - RNA, 19 nt, Artificial Sequence
  Description of Artificial Sequence: Synthetic oligonucleotide
ccgccacaaagucgaaauc

SEQ ID NO: 727088 - RNA, 19 nt, Artificial Sequence
  Description of Artificial Sequence: Synthetic oligonucleotide
gcgugggcaacucuccagu

SEQ ID NO: 727089 - RNA, 19 nt, Artificial Sequence
  Description of Artificial Sequence: Synthetic oligonucleotide
cacacgugcucuggggucu

SEQ ID NO: 727090 - RNA, 19 nt, Artificial Sequence
  Description of Artificial Sequence: Synthetic oligonucleotide
gggucuggaaacagccgaa

SEQ ID NO: 727091 - RNA, 19 nt, Artificial Sequence
  Description of Artificial Sequence: Synthetic oligonucleotide
gggccgcauggcuuccaug

SEQ ID NO: 727092 - RNA, 19 nt, Artificial Sequence
  Description of Artificial Sequence: Synthetic oligonucleotide
cagcaucaggucuccgccu

SEQ ID NO: 727093 - RNA, 19 nt, Artificial Sequence
  Description of Artificial Sequence: Synthetic oligonucleotide
uggggccgcauggcuucca

SEQ ID NO: 727094 - RNA, 19 nt, Artificial Sequence
  Description of Artificial Sequence: Synthetic oligonucleotide
guccugcccuggucacggc

SEQ ID NO: 727095 - RNA, 19 nt, Artificial Sequence
  Description of Artificial Sequence: Synthetic oligonucleotide
cuggucccgccagaacaca

SEQ ID NO: 727096 - RNA, 19 nt, Artificial Sequence
  Description of Artificial Sequence: Synthetic oligonucleotide
ggaucccaaccuccgcucu

SEQ ID NO: 727097 - RNA, 19 nt, Artificial Sequence
  Description of Artificial Sequence: Synthetic oligonucleotide
ggaaagggguacggcuguc

SEQ ID NO: 727098 - RNA, 19 nt, Artificial Sequence
  Description of Artificial Sequence: Synthetic oligonucleotide
cacgucuuccgcgucgcgu

SEQ ID NO: 727099 - RNA, 19 nt, Artificial Sequence
  Description of Artificial Sequence: Synthetic oligonucleotide
ccggcgccaggaacucugg

SEQ ID NO: 727100 - RNA, 19 nt, Artificial Sequence
  Description of Artificial Sequence: Synthetic oligonucleotide
cugcagccuaccacucgua

SEQ ID NO: 727101 - RNA, 19 nt, Artificial Sequence
  Description of Artificial Sequence: Synthetic oligonucleotide
gcggcuuaggaaaggggua

SEQ ID NO: 727102 - RNA, 19 nt, Artificial Sequence
  Description of Artificial Sequence: Synthetic oligonucleotide
cgcguguaggauguaucug

SEQ ID NO: 727103 - RNA, 19 nt, Artificial Sequence
  Description of Artificial Sequence: Synthetic oligonucleotide
cccgaaagcguaggcacga

SEQ ID NO: 727104 - RNA, 19 nt, Artificial Sequence
  Description of Artificial Sequence: Synthetic oligonucleotide
ccugcagccuaccacucgu

SEQ ID NO: 727105 - RNA, 19 nt, Artificial Sequence
  Description of Artificial Sequence: Synthetic oligonucleotide
ccacugcucgcguguagga

SEQ ID NO: 727106 - RNA, 19 nt, Artificial Sequence
  Description of Artificial Sequence: Synthetic oligonucleotide
ggcgacgagccagcaggac

SEQ ID NO: 727107 - RNA, 19 nt, Artificial Sequence
  Description of Artificial Sequence: Synthetic oligonucleotide
gcgccccgaaagcguaggc

SEQ ID NO: 727108 - RNA, 19 nt, Artificial Sequence
  Description of Artificial Sequence: Synthetic oligonucleotide
ggacgucccagcccagagu

SEQ ID NO: 727109 - RNA, 19 nt, Artificial Sequence
  Description of Artificial Sequence: Synthetic oligonucleotide
gggcaggcgacgagccagc

SEQ ID NO: 727110 - RNA, 19 nt, Artificial Sequence
  Description of Artificial Sequence: Synthetic oligonucleotide
gggauggucucuggaagau

SEQ ID NO: 727111 - RNA, 19 nt, Artificial Sequence
  Description of Artificial Sequence: Synthetic oligonucleotide
ccgcucuggguuccuccgc

SEQ ID NO: 727112 - RNA, 19 nt, Artificial Sequence
  Description of Artificial Sequence: Synthetic oligonucleotide
ggcucagcgugggcaacuc

SEQ ID NO: 727113 - RNA, 19 nt, Artificial Sequence
  Description of Artificial Sequence: Synthetic oligonucleotide
ccgccagaacacagccaac

SEQ ID NO: 727114 - RNA, 19 nt, Artificial Sequence
  Description of Artificial Sequence: Synthetic oligonucleotide
cgacgagccagcaggacgu

SEQ ID NO: 727115 - RNA, 19 nt, Artificial Sequence
  Description of Artificial Sequence: Synthetic oligonucleotide
gagcagccgcacccaaguu

SEQ ID NO: 727116 - RNA, 19 nt, Artificial Sequence
  Description of Artificial Sequence: Synthetic oligonucleotide
ccgacagaaagcggggaua

SEQ ID NO: 727117 - RNA, 19 nt, Artificial Sequence
  Description of Artificial Sequence: Synthetic oligonucleotide
ccgcgucgcguucagugga

SEQ ID NO: 727118 - RNA, 19 nt, Artificial Sequence
  Description of Artificial Sequence: Synthetic oligonucleotide
gggccgcgcaucccgugga

SEQ ID NO: 727119 - RNA, 19 nt, Artificial Sequence
  Description of Artificial Sequence: Synthetic oligonucleotide
ugcucgcguguaggaugua

SEQ ID NO: 727120 - RNA, 19 nt, Artificial Sequence
  Description of Artificial Sequence: Synthetic oligonucleotide
cacugcucgcguguaggau

SEQ ID NO: 727121 - RNA, 19 nt, Artificial Sequence
  Description of Artificial Sequence: Synthetic oligonucleotide
gcacuuccggcgccaggaa

SEQ ID NO: 727122 - RNA, 19 nt, Artificial Sequence
  Description of Artificial Sequence: Synthetic oligonucleotide
ccucaguuguguucuccau

SEQ ID NO: 727123 - RNA, 19 nt, Artificial Sequence
  Description of Artificial Sequence: Synthetic oligonucleotide
gcucgcguguaggauguau

SEQ ID NO: 727124 - RNA, 19 nt, Artificial Sequence
  Description of Artificial Sequence: Synthetic oligonucleotide
ccguccacuaaggcuucca

SEQ ID NO: 727125 - RNA, 19 nt, Artificial Sequence
  Description of Artificial Sequence: Synthetic oligonucleotide
cgcgcaucccguggagggc

SEQ ID NO: 727126 - RNA, 19 nt, Artificial Sequence
  Description of Artificial Sequence: Synthetic oligonucleotide
gccggaccucagagccugg

SEQ ID NO: 727127 - RNA, 19 nt, Artificial Sequence
  Description of Artificial Sequence: Synthetic oligonucleotide
gcgucgcguucaguggauc

SEQ ID NO: 727128 - RNA, 19 nt, Artificial Sequence
  Description of Artificial Sequence: Synthetic oligonucleotide
ccgcacccaaguugccaca

SEQ ID NO: 727129 - RNA, 19 nt, Artificial Sequence
  Description of Artificial Sequence: Synthetic oligonucleotide
ccacucguacuuccagggu

SEQ ID NO: 727130 - RNA, 19 nt, Artificial Sequence
  Description of Artificial Sequence: Synthetic oligonucleotide
gcgcaucccguggagggcu

SEQ ID NO: 727131 - RNA, 19 nt, Artificial Sequence
  Description of Artificial Sequence: Synthetic oligonucleotide
cgucuuccgcgucgcguuc

SEQ ID NO: 727132 - RNA, 19 nt, Artificial Sequence
  Description of Artificial Sequence: Synthetic oligonucleotide
gcaucccguggagggcuca

SEQ ID NO: 727133 - RNA, 19 nt, Artificial Sequence
  Description of Artificial Sequence: Synthetic oligonucleotide
cgccccgaaagcguaggca

SEQ ID NO: 727134 - RNA, 19 nt, Artificial Sequence
  Description of Artificial Sequence: Synthetic oligonucleotide
ggcaaaccccaaagggcuu

SEQ ID NO: 727135 - RNA, 19 nt, Artificial Sequence
  Description of Artificial Sequence: Synthetic oligonucleotide
cccaaccuccgcucugggu

SEQ ID NO: 727136 - RNA, 19 nt, Artificial Sequence
  Description of Artificial Sequence: Synthetic oligonucleotide
ggggccgcauggcuuccau

SEQ ID NO: 727137 - RNA, 19 nt, Artificial Sequence
  Description of Artificial Sequence: Synthetic oligonucleotide
ccucaguauccaggagcaa

SEQ ID NO: 727138 - RNA, 19 nt, Artificial Sequence
  Description of Artificial Sequence: Synthetic oligonucleotide
cuuccgcgucgcguucagu

SEQ ID NO: 727139 - RNA, 19 nt, Artificial Sequence
  Description of Artificial Sequence: Synthetic oligonucleotide
ccgcucaaugaugggauuu

SEQ ID NO: 727140 - RNA, 19 nt, Artificial Sequence
  Description of Artificial Sequence: Synthetic oligonucleotide
ccgaaagcguaggcacgaa

SEQ ID NO: 727141 - RNA, 19 nt, Artificial Sequence
  Description of Artificial Sequence: Synthetic oligonucleotide
cgcguucaguggaucccaa

SEQ ID NO: 727142 - RNA, 19 nt, Artificial Sequence
  Description of Artificial Sequence: Synthetic oligonucleotide
gcaccucgugccucucauu

SEQ ID NO: 727143 - RNA, 19 nt, Artificial Sequence
  Description of Artificial Sequence: Synthetic oligonucleotide
gcucuccacuggagcggaa

SEQ ID NO: 727144 - RNA, 19 nt, Artificial Sequence
  Description of Artificial Sequence: Synthetic oligonucleotide
cggggauagcgaaccucau

SEQ ID NO: 727145 - RNA, 19 nt, Artificial Sequence
  Description of Artificial Sequence: Synthetic oligonucleotide
cgcgucgcguucaguggau

SEQ ID NO: 727146 - RNA, 19 nt, Artificial Sequence
  Description of Artificial Sequence: Synthetic oligonucleotide
cggccgccaaaauccgcuu

SEQ ID NO: 727147 - RNA, 19 nt, Artificial Sequence
  Description of Artificial Sequence: Synthetic oligonucleotide
uuuuauaucgauuuuaggg

SEQ ID NO: 727148 - RNA, 19 nt, Artificial Sequence
  Description of Artificial Sequence: Synthetic oligonucleotide
aagguaaacauguuguuac

SEQ ID NO: 727149 - RNA, 19 nt, Artificial Sequence
  Description of Artificial Sequence: Synthetic oligonucleotide
acauaugugagguuaaacc

SEQ ID NO: 727150 - RNA, 19 nt, Artificial Sequence
  Description of Artificial Sequence: Synthetic oligonucleotide
uuuauaucgauuuuagggc

SEQ ID NO: 727151 - RNA, 19 nt, Artificial Sequence
  Description of Artificial Sequence: Synthetic oligonucleotide
uucacuuuggcaauuauug

SEQ ID NO: 727152 - RNA, 19 nt, Artificial Sequence
  Description of Artificial Sequence: Synthetic oligonucleotide
aaaaguguccuuuucaaca

SEQ ID NO: 727153 - RNA, 19 nt, Artificial Sequence
  Description of Artificial Sequence: Synthetic oligonucleotide
auaguaaaguuccauggcc

SEQ ID NO: 727154 - RNA, 19 nt, Artificial Sequence
  Description of Artificial Sequence: Synthetic oligonucleotide
acauguuagagacagcacc

SEQ ID NO: 727155 - RNA, 19 nt, Artificial Sequence
  Description of Artificial Sequence: Synthetic oligonucleotide
aacaugucguaauaaaauc

SEQ ID NO: 727156 - RNA, 19 nt, Artificial Sequence
  Description of Artificial Sequence: Synthetic oligonucleotide
acgaugaaugaucacaggc

SEQ ID NO: 727157 - RNA, 19 nt, Artificial Sequence
  Description of Artificial Sequence: Synthetic oligonucleotide
aagcuacugaaauuucucc

SEQ ID NO: 727158 - RNA, 19 nt, Artificial Sequence
  Description of Artificial Sequence: Synthetic oligonucleotide
ucucguauuguaaacagug

SEQ ID NO: 727159 - RNA, 19 nt, Artificial Sequence
  Description of Artificial Sequence: Synthetic oligonucleotide
uucaauugaaaggagaagc

SEQ ID NO: 727160 - RNA, 19 nt, Artificial Sequence
  Description of Artificial Sequence: Synthetic oligonucleotide
uguucgaacauuuacugca

SEQ ID NO: 727161 - RNA, 19 nt, Artificial Sequence
  Description of Artificial Sequence: Synthetic oligonucleotide
uuagucucagaacacaaug

SEQ ID NO: 727162 - RNA, 19 nt, Artificial Sequence
  Description of Artificial Sequence: Synthetic oligonucleotide
uuugaugauaguuuuacau

SEQ ID NO: 727163 - RNA, 19 nt, Artificial Sequence
  Description of Artificial Sequence: Synthetic oligonucleotide
aaacguugaguaaacagac

SEQ ID NO: 727164 - RNA, 19 nt, Artificial Sequence
  Description of Artificial Sequence: Synthetic oligonucleotide
uuugauaauucucacuagu

SEQ ID NO: 727165 - RNA, 19 nt, Artificial Sequence
  Description of Artificial Sequence: Synthetic oligonucleotide
auuuuagggccauagaaug

SEQ ID NO: 727166 - RNA, 19 nt, Artificial Sequence
  Description of Artificial Sequence: Synthetic oligonucleotide
acauauauuuuccagggca

SEQ ID NO: 727167 - RNA, 19 nt, Artificial Sequence
  Description of Artificial Sequence: Synthetic oligonucleotide
cuacugagaaacaacacag

SEQ ID NO: 727168 - RNA, 19 nt, Artificial Sequence
  Description of Artificial Sequence: Synthetic oligonucleotide
ucaauugaaaggagaagcc

SEQ ID NO: 727169 - RNA, 19 nt, Artificial Sequence
  Description of Artificial Sequence: Synthetic oligonucleotide
uuauuuaguguacaacucu

SEQ ID NO: 727170 - RNA, 19 nt, Artificial Sequence
  Description of Artificial Sequence: Synthetic oligonucleotide
guuacuguaaugcugccag

SEQ ID NO: 727171 - RNA, 19 nt, Artificial Sequence
  Description of Artificial Sequence: Synthetic oligonucleotide
aaaauuauacugagccagc

SEQ ID NO: 727172 - RNA, 19 nt, Artificial Sequence
  Description of Artificial Sequence: Synthetic oligonucleotide
aauggcuagcauccuuucc

SEQ ID NO: 727173 - RNA, 19 nt, Artificial Sequence
  Description of Artificial Sequence: Synthetic oligonucleotide
uuacuguuguacauguuag

SEQ ID NO: 727174 - RNA, 19 nt, Artificial Sequence
  Description of Artificial Sequence: Synthetic oligonucleotide
uuauaucgauuuuagggcc

SEQ ID NO: 727175 - RNA, 19 nt, Artificial Sequence
  Description of Artificial Sequence: Synthetic oligonucleotide
guauuguaaacaguggucg

SEQ ID NO: 727176 - RNA, 19 nt, Artificial Sequence
  Description of Artificial Sequence: Synthetic oligonucleotide
uuguacauguuagagacag

SEQ ID NO: 727177 - RNA, 19 nt, Artificial Sequence
  Description of Artificial Sequence: Synthetic oligonucleotide
ugauaauucucacuagugu

SEQ ID NO: 727178 - RNA, 19 nt, Artificial Sequence
  Description of Artificial Sequence: Synthetic oligonucleotide
aauggcacgaugaaugauc

SEQ ID NO: 727179 - RNA, 19 nt, Artificial Sequence
  Description of Artificial Sequence: Synthetic oligonucleotide
uguacaacucucaucuaag

SEQ ID NO: 727180 - RNA, 19 nt, Artificial Sequence
  Description of Artificial Sequence: Synthetic oligonucleotide
ucuuguucgaacauuuacu

SEQ ID NO: 727181 - RNA, 19 nt, Artificial Sequence
  Description of Artificial Sequence: Synthetic oligonucleotide
uguuguuacuguaaugcug

SEQ ID NO: 727182 - RNA, 19 nt, Artificial Sequence
  Description of Artificial Sequence: Synthetic oligonucleotide
acaugucguaauaaaaucc

SEQ ID NO: 727183 - RNA, 19 nt, Artificial Sequence
  Description of Artificial Sequence: Synthetic oligonucleotide
acuuugauaauucucacua

SEQ ID NO: 727184 - RNA, 19 nt, Artificial Sequence
  Description of Artificial Sequence: Synthetic oligonucleotide
uguuuguugguugagaggu

SEQ ID NO: 727185 - RNA, 19 nt, Artificial Sequence
  Description of Artificial Sequence: Synthetic oligonucleotide
ugacuacugagaaacaaca

SEQ ID NO: 727186 - RNA, 19 nt, Artificial Sequence
  Description of Artificial Sequence: Synthetic oligonucleotide
auaacuuugauaauucuca

SEQ ID NO: 727187 - RNA, 19 nt, Artificial Sequence
  Description of Artificial Sequence: Synthetic oligonucleotide
ugaugauaguuuuacauau

SEQ ID NO: 727188 - RNA, 19 nt, Artificial Sequence
  Description of Artificial Sequence: Synthetic oligonucleotide
ugaauuguagcacacugau

SEQ ID NO: 727189 - RNA, 19 nt, Artificial Sequence
  Description of Artificial Sequence: Synthetic oligonucleotide
ucguugucaaacaucagca

SEQ ID NO: 727190 - RNA, 19 nt, Artificial Sequence
  Description of Artificial Sequence: Synthetic oligonucleotide
aauuauacugagccagcug

SEQ ID NO: 727191 - RNA, 19 nt, Artificial Sequence
  Description of Artificial Sequence: Synthetic oligonucleotide
gguuaaaccuaauaggcag

SEQ ID NO: 727192 - RNA, 19 nt, Artificial Sequence
  Description of Artificial Sequence: Synthetic oligonucleotide
acguugaguaaacagacug

SEQ ID NO: 727193 - RNA, 19 nt, Artificial Sequence
  Description of Artificial Sequence: Synthetic oligonucleotide
ucauuaguagccccaagga

SEQ ID NO: 727194 - RNA, 19 nt, Artificial Sequence
  Description of Artificial Sequence: Synthetic oligonucleotide
gucguaauaaaauccauuc

SEQ ID NO: 727195 - RNA, 19 nt, Artificial Sequence
  Description of Artificial Sequence: Synthetic oligonucleotide
cucauuaguagccccaagg

SEQ ID NO: 727196 - RNA, 19 nt, Artificial Sequence
  Description of Artificial Sequence: Synthetic oligonucleotide
uccuuacuaacauauguga

SEQ ID NO: 727197 - RNA, 19 nt, Artificial Sequence
  Description of Artificial Sequence: Synthetic oligonucleotide
uacaggaaugaccauuacc

SEQ ID NO: 727198 - RNA, 19 nt, Artificial Sequence
  Description of Artificial Sequence: Synthetic oligonucleotide
ucagcauuuagaguacgcg

SEQ ID NO: 727199 - RNA, 19 nt, Artificial Sequence
  Description of Artificial Sequence: Synthetic oligonucleotide
ucguauuguaaacaguggu

SEQ ID NO: 727200 - RNA, 19 nt, Artificial Sequence
  Description of Artificial Sequence: Synthetic oligonucleotide
aacuuugauaauucucacu

SEQ ID NO: 727201 - RNA, 19 nt, Artificial Sequence
  Description of Artificial Sequence: Synthetic oligonucleotide
cucguugucaaacaucagc

SEQ ID NO: 727202 - RNA, 19 nt, Artificial Sequence
  Description of Artificial Sequence: Synthetic oligonucleotide
augaccauuaccuggcgag

SEQ ID NO: 727203 - RNA, 19 nt, Artificial Sequence
  Description of Artificial Sequence: Synthetic oligonucleotide
caagcuauucugcaguugc

SEQ ID NO: 727204 - RNA, 19 nt, Artificial Sequence
  Description of Artificial Sequence: Synthetic oligonucleotide
uccuuaucuucuuauuuag

SEQ ID NO: 727205 - RNA, 19 nt, Artificial Sequence
  Description of Artificial Sequence: Synthetic oligonucleotide
aaugaucacaggccugcuc

SEQ ID NO: 727206 - RNA, 19 nt, Artificial Sequence
  Description of Artificial Sequence: Synthetic oligonucleotide
uauuuaguguacaacucuc

SEQ ID NO: 727207 - RNA, 19 nt, Artificial Sequence
  Description of Artificial Sequence: Synthetic oligonucleotide
uggaccuacaggaaugacc

SEQ ID NO: 727208 - RNA, 19 nt, Artificial Sequence
  Description of Artificial Sequence: Synthetic oligonucleotide
uuauugcauuuucagcuag

SEQ ID NO: 727209 - RNA, 19 nt, Artificial Sequence
  Description of Artificial Sequence: Synthetic oligonucleotide
cauaguaaaguuccauggc

SEQ ID NO: 727210 - RNA, 19 nt, Artificial Sequence
  Description of Artificial Sequence: Synthetic oligonucleotide
guuguuacuguaaugcugc

SEQ ID NO: 727211 - RNA, 19 nt, Artificial Sequence
  Description of Artificial Sequence: Synthetic oligonucleotide
uuaguagccccaaggaaca

SEQ ID NO: 727212 - RNA, 19 nt, Artificial Sequence
  Description of Artificial Sequence: Synthetic oligonucleotide
aguaaaguuccauggccuc

SEQ ID NO: 727213 - RNA, 19 nt, Artificial Sequence
  Description of Artificial Sequence: Synthetic oligonucleotide
uuuuagggccauagaaugc

SEQ ID NO: 727214 - RNA, 19 nt, Artificial Sequence
  Description of Artificial Sequence: Synthetic oligonucleotide
uaguaaaguuccauggccu

SEQ ID NO: 727215 - RNA, 19 nt, Artificial Sequence
  Description of Artificial Sequence: Synthetic oligonucleotide
aaagccuucuucaaaacau

SEQ ID NO: 727216 - RNA, 19 nt, Artificial Sequence
  Description of Artificial Sequence: Synthetic oligonucleotide
ggaguguugacuuuucucc

SEQ ID NO: 727217 - RNA, 19 nt, Artificial Sequence
  Description of Artificial Sequence: Synthetic oligonucleotide
agccagagaggccauuucc

SEQ ID NO: 727218 - RNA, 19 nt, Artificial Sequence
  Description of Artificial Sequence: Synthetic oligonucleotide
caaacguugaguaaacaga

SEQ ID NO: 727219 - RNA, 19 nt, Artificial Sequence
  Description of Artificial Sequence: Synthetic oligonucleotide
aguuuacuguuguacaugu

SEQ ID NO: 727220 - RNA, 19 nt, Artificial Sequence
  Description of Artificial Sequence: Synthetic oligonucleotide
aauugaaaggagaagccaa

SEQ ID NO: 727221 - RNA, 19 nt, Artificial Sequence
  Description of Artificial Sequence: Synthetic oligonucleotide
uaaacagacugcagaaagu

SEQ ID NO: 727222 - RNA, 19 nt, Artificial Sequence
  Description of Artificial Sequence: Synthetic oligonucleotide
acuuaaaguucccgacagc

SEQ ID NO: 727223 - RNA, 19 nt, Artificial Sequence
  Description of Artificial Sequence: Synthetic oligonucleotide
uaugugagguuaaaccuaa

SEQ ID NO: 727224 - RNA, 19 nt, Artificial Sequence
  Description of Artificial Sequence: Synthetic oligonucleotide
gcucuuaucauccccaucc

SEQ ID NO: 727225 - RNA, 19 nt, Artificial Sequence
  Description of Artificial Sequence: Synthetic oligonucleotide
ugaagugcauaauuuucac

SEQ ID NO: 727226 - RNA, 19 nt, Artificial Sequence
  Description of Artificial Sequence: Synthetic oligonucleotide
uguuagagacagcaccuca

SEQ ID NO: 727227 - RNA, 19 nt, Artificial Sequence
  Description of Artificial Sequence: Synthetic oligonucleotide
uugaguaaacagacugcag

SEQ ID NO: 727228 - RNA, 19 nt, Artificial Sequence
  Description of Artificial Sequence: Synthetic oligonucleotide
uccuauuuagucucagaac

SEQ ID NO: 727229 - RNA, 19 nt, Artificial Sequence
  Description of Artificial Sequence: Synthetic oligonucleotide
ugugagguuaaaccuaaua

SEQ ID NO: 727230 - RNA, 19 nt, Artificial Sequence
  Description of Artificial Sequence: Synthetic oligonucleotide
cucguauuguaaacagugg

SEQ ID NO: 727231 - RNA, 19 nt, Artificial Sequence
  Description of Artificial Sequence: Synthetic oligonucleotide
uucagaauccggcacuuaa

SEQ ID NO: 727232 - RNA, 19 nt, Artificial Sequence
  Description of Artificial Sequence: Synthetic oligonucleotide
ucuccuaggaagugcuccg

SEQ ID NO: 727233 - RNA, 19 nt, Artificial Sequence
  Description of Artificial Sequence: Synthetic oligonucleotide
augacuacugagaaacaac

SEQ ID NO: 727234 - RNA, 19 nt, Artificial Sequence
  Description of Artificial Sequence: Synthetic oligonucleotide
caugucguaauaaaaucca

SEQ ID NO: 727235 - RNA, 19 nt, Artificial Sequence
  Description of Artificial Sequence: Synthetic oligonucleotide
aguuacgcuugugauauuc

SEQ ID NO: 727236 - RNA, 19 nt, Artificial Sequence
  Description of Artificial Sequence: Synthetic oligonucleotide
agugcauaauuuucacaag

SEQ ID NO: 727237 - RNA, 19 nt, Artificial Sequence
  Description of Artificial Sequence: Synthetic oligonucleotide
cacuuaaaguucccgacag

SEQ ID NO: 727238 - RNA, 19 nt, Artificial Sequence
  Description of Artificial Sequence: Synthetic oligonucleotide
aguaugugagcacuggaau

SEQ ID NO: 727239 - RNA, 19 nt, Artificial Sequence
  Description of Artificial Sequence: Synthetic oligonucleotide
caaacaucagcaacucuac

SEQ ID NO: 727240 - RNA, 19 nt, Artificial Sequence
  Description of Artificial Sequence: Synthetic oligonucleotide
uucccgacagcucauuucu

SEQ ID NO: 727241 - RNA, 19 nt, Artificial Sequence
  Description of Artificial Sequence: Synthetic oligonucleotide
acuaacauaugugagguua

SEQ ID NO: 727242 - RNA, 19 nt, Artificial Sequence
  Description of Artificial Sequence: Synthetic oligonucleotide
ugucguaauaaaauccauu

SEQ ID NO: 727243 - RNA, 19 nt, Artificial Sequence
  Description of Artificial Sequence: Synthetic oligonucleotide
uuccuuaucuucuuauuua

SEQ ID NO: 727244 - RNA, 19 nt, Artificial Sequence
  Description of Artificial Sequence: Synthetic oligonucleotide
cuggaaugccaguacacag

SEQ ID NO: 727245 - RNA, 19 nt, Artificial Sequence
  Description of Artificial Sequence: Synthetic oligonucleotide
aucgauuuuagggccauag

SEQ ID NO: 727246 - RNA, 19 nt, Artificial Sequence
  Description of Artificial Sequence: Synthetic oligonucleotide
aggaccgugggcgaugugc

SEQ ID NO: 727247 - RNA, 19 nt, Artificial Sequence
  Description of Artificial Sequence: Synthetic oligonucleotide
ucagcaaaccgaacaggca

SEQ ID NO: 727248 - RNA, 19 nt, Artificial Sequence
  Description of Artificial Sequence: Synthetic oligonucleotide
guacauguuagagacagca

SEQ ID NO: 727249 - RNA, 19 nt, Artificial Sequence
  Description of Artificial Sequence: Synthetic oligonucleotide
uauuguaaacaguggucgu

SEQ ID NO: 727250 - RNA, 19 nt, Artificial Sequence
  Description of Artificial Sequence: Synthetic oligonucleotide
aguguuucccucuuugaau

SEQ ID NO: 727251 - RNA, 19 nt, Artificial Sequence
  Description of Artificial Sequence: Synthetic oligonucleotide
gaugaaugaucacaggccu

SEQ ID NO: 727252 - RNA, 19 nt, Artificial Sequence
  Description of Artificial Sequence: Synthetic oligonucleotide
agaagccaaacguugagua

SEQ ID NO: 727253 - RNA, 19 nt, Artificial Sequence
  Description of Artificial Sequence: Synthetic oligonucleotide
cucagugaaguuacgcuug

SEQ ID NO: 727254 - RNA, 19 nt, Artificial Sequence
  Description of Artificial Sequence: Synthetic oligonucleotide
ugcccuggacaguucaugg

SEQ ID NO: 727255 - RNA, 19 nt, Artificial Sequence
  Description of Artificial Sequence: Synthetic oligonucleotide
gaauccggcacuuaaauuu

SEQ ID NO: 727256 - RNA, 19 nt, Artificial Sequence
  Description of Artificial Sequence: Synthetic oligonucleotide
acgcuugugauauuccucu

SEQ ID NO: 727257 - RNA, 19 nt, Artificial Sequence
  Description of Artificial Sequence: Synthetic oligonucleotide
ugaaguuacgcuugugaua

SEQ ID NO: 727258 - RNA, 19 nt, Artificial Sequence
  Description of Artificial Sequence: Synthetic oligonucleotide
gauaauucucacuaguguu

SEQ ID NO: 727259 - RNA, 19 nt, Artificial Sequence
  Description of Artificial Sequence: Synthetic oligonucleotide
uuaaaguucccgacagcuc

SEQ ID NO: 727260 - RNA, 19 nt, Artificial Sequence
  Description of Artificial Sequence: Synthetic oligonucleotide
caccguaguucucugaaag

SEQ ID NO: 727261 - RNA, 19 nt, Artificial Sequence
  Description of Artificial Sequence: Synthetic oligonucleotide
uuacgcuugugauauuccu

SEQ ID NO: 727262 - RNA, 19 nt, Artificial Sequence
  Description of Artificial Sequence: Synthetic oligonucleotide
aaucuuucaaacggcugcu

SEQ ID NO: 727263 - RNA, 19 nt, Artificial Sequence
  Description of Artificial Sequence: Synthetic oligonucleotide
aagccaaacguugaguaaa

SEQ ID NO: 727264 - RNA, 19 nt, Artificial Sequence
  Description of Artificial Sequence: Synthetic oligonucleotide
uacauguuagagacagcac

SEQ ID NO: 727265 - RNA, 19 nt, Artificial Sequence
  Description of Artificial Sequence: Synthetic oligonucleotide
gcauaauuuucacaaguug

SEQ ID NO: 727266 - RNA, 19 nt, Artificial Sequence
  Description of Artificial Sequence: Synthetic oligonucleotide
agugcaagcaccccuuuau

SEQ ID NO: 727267 - RNA, 19 nt, Artificial Sequence
  Description of Artificial Sequence: Synthetic oligonucleotide
cauaugugagguuaaaccu

SEQ ID NO: 727268 - RNA, 19 nt, Artificial Sequence
  Description of Artificial Sequence: Synthetic oligonucleotide
accucagugaaguuacgcu

SEQ ID NO: 727269 - RNA, 19 nt, Artificial Sequence
  Description of Artificial Sequence: Synthetic oligonucleotide
guugaguaaacagacugca

SEQ ID NO: 727270 - RNA, 19 nt, Artificial Sequence
  Description of Artificial Sequence: Synthetic oligonucleotide
ucgauuuuagggccauaga

SEQ ID NO: 727271 - RNA, 19 nt, Artificial Sequence
  Description of Artificial Sequence: Synthetic oligonucleotide
agugaggucucugaagucu

SEQ ID NO: 727272 - RNA, 19 nt, Artificial Sequence
  Description of Artificial Sequence: Synthetic oligonucleotide
aggccugcucuuaucaucc

SEQ ID NO: 727273 - RNA, 19 nt, Artificial Sequence
  Description of Artificial Sequence: Synthetic oligonucleotide
gaaguuacgcuugugauau

SEQ ID NO: 727274 - RNA, 19 nt, Artificial Sequence
  Description of Artificial Sequence: Synthetic oligonucleotide
cuugacuaaucucggccgc

SEQ ID NO: 727275 - RNA, 19 nt, Artificial Sequence
  Description of Artificial Sequence: Synthetic oligonucleotide
caacucuacaguggaaucc

SEQ ID NO: 727276 - RNA, 19 nt, Artificial Sequence
  Description of Artificial Sequence: Synthetic oligonucleotide
auccuuacuaacauaugug

SEQ ID NO: 727277 - RNA, 19 nt, Artificial Sequence
  Description of Artificial Sequence: Synthetic oligonucleotide
acggauccaagaauggcac

SEQ ID NO: 727278 - RNA, 19 nt, Artificial Sequence
  Description of Artificial Sequence: Synthetic oligonucleotide
guugucucuuguucgaaca

SEQ ID NO: 727279 - RNA, 19 nt, Artificial Sequence
  Description of Artificial Sequence: Synthetic oligonucleotide
uggacucauuaguagcccc

SEQ ID NO: 727280 - RNA, 19 nt, Artificial Sequence
  Description of Artificial Sequence: Synthetic oligonucleotide
uacgcuugugauauuccuc

SEQ ID NO: 727281 - RNA, 19 nt, Artificial Sequence
  Description of Artificial Sequence: Synthetic oligonucleotide
uggcaauuauugcauuuuc

SEQ ID NO: 727282 - RNA, 19 nt, Artificial Sequence
  Description of Artificial Sequence: Synthetic oligonucleotide
aucuucuuauuuaguguac

SEQ ID NO: 727283 - RNA, 19 nt, Artificial Sequence
  Description of Artificial Sequence: Synthetic oligonucleotide
uugacagguucaauugaaa

SEQ ID NO: 727284 - RNA, 19 nt, Artificial Sequence
  Description of Artificial Sequence: Synthetic oligonucleotide
uguugucucuuguucgaac

SEQ ID NO: 727285 - RNA, 19 nt, Artificial Sequence
  Description of Artificial Sequence: Synthetic oligonucleotide
uguacauguuagagacagc

SEQ ID NO: 727286 - RNA, 19 nt, Artificial Sequence
  Description of Artificial Sequence: Synthetic oligonucleotide
cuguaaucacacugcuugc

SEQ ID NO: 727287 - RNA, 19 nt, Artificial Sequence
  Description of Artificial Sequence: Synthetic oligonucleotide
uguuacuguaaugcugcca

SEQ ID NO: 727288 - RNA, 19 nt, Artificial Sequence
  Description of Artificial Sequence: Synthetic oligonucleotide
agccacuuaaaguucccga

SEQ ID NO: 727289 - RNA, 19 nt, Artificial Sequence
  Description of Artificial Sequence: Synthetic oligonucleotide
cacgaugaaugaucacagg

SEQ ID NO: 727290 - RNA, 19 nt, Artificial Sequence
  Description of Artificial Sequence: Synthetic oligonucleotide
acaccugaagugcauaauu

SEQ ID NO: 727291 - RNA, 19 nt, Artificial Sequence
  Description of Artificial Sequence: Synthetic oligonucleotide
gguuaagccacuuaaaguu

SEQ ID NO: 727292 - RNA, 19 nt, Artificial Sequence
  Description of Artificial Sequence: Synthetic oligonucleotide
ucagcuaguucuugacuaa

SEQ ID NO: 727293 - RNA, 19 nt, Artificial Sequence
  Description of Artificial Sequence: Synthetic oligonucleotide
ugaccauuaccuggcgagg

SEQ ID NO: 727294 - RNA, 19 nt, Artificial Sequence
  Description of Artificial Sequence: Synthetic oligonucleotide
uccucucguauuguaaaca

SEQ ID NO: 727295 - RNA, 19 nt, Artificial Sequence
  Description of Artificial Sequence: Synthetic oligonucleotide
caacucucaucuaagucca

SEQ ID NO: 727296 - RNA, 19 nt, Artificial Sequence
  Description of Artificial Sequence: Synthetic oligonucleotide
agacaacucagugcuggac

SEQ ID NO: 727297 - RNA, 19 nt, Artificial Sequence
  Description of Artificial Sequence: Synthetic oligonucleotide
uuaaaccuaauaggcaguu

SEQ ID NO: 727298 - RNA, 19 nt, Artificial Sequence
  Description of Artificial Sequence: Synthetic oligonucleotide
uucccucuuugaaugaaua

SEQ ID NO: 727299 - RNA, 19 nt, Artificial Sequence
  Description of Artificial Sequence: Synthetic oligonucleotide
guucuugacuaaucucggc

SEQ ID NO: 727300 - RNA, 19 nt, Artificial Sequence
  Description of Artificial Sequence: Synthetic oligonucleotide
cacggauccaagaauggca

SEQ ID NO: 727301 - RNA, 19 nt, Artificial Sequence
  Description of Artificial Sequence: Synthetic oligonucleotide
cgaugugcaaacauuagac

SEQ ID NO: 727302 - RNA, 19 nt, Artificial Sequence
  Description of Artificial Sequence: Synthetic oligonucleotide
ucaaaaggaccauggcuuu

SEQ ID NO: 727303 - RNA, 19 nt, Artificial Sequence
  Description of Artificial Sequence: Synthetic oligonucleotide
auuguagcacacugauggu

SEQ ID NO: 727304 - RNA, 19 nt, Artificial Sequence
  Description of Artificial Sequence: Synthetic oligonucleotide
ucggccgccacuugauaag

SEQ ID NO: 727305 - RNA, 19 nt, Artificial Sequence
  Description of Artificial Sequence: Synthetic oligonucleotide
uguuucccucuuugaauga

SEQ ID NO: 727306 - RNA, 19 nt, Artificial Sequence
  Description of Artificial Sequence: Synthetic oligonucleotide
cacuggaaugccaguacac

SEQ ID NO: 727307 - RNA, 19 nt, Artificial Sequence
  Description of Artificial Sequence: Synthetic oligonucleotide
uaauaggcaguuggaaguc

SEQ ID NO: 727308 - RNA, 19 nt, Artificial Sequence
  Description of Artificial Sequence: Synthetic oligonucleotide
cagcauuuagaguacgcga

SEQ ID NO: 727309 - RNA, 19 nt, Artificial Sequence
  Description of Artificial Sequence: Synthetic oligonucleotide
acuggaaugccaguacaca

SEQ ID NO: 727310 - RNA, 19 nt, Artificial Sequence
  Description of Artificial Sequence: Synthetic oligonucleotide
cauccuuacuaacauaugu

SEQ ID NO: 727311 - RNA, 19 nt, Artificial Sequence
  Description of Artificial Sequence: Synthetic oligonucleotide
aaccuaauaggcaguugga

SEQ ID NO: 727312 - RNA, 19 nt, Artificial Sequence
  Description of Artificial Sequence: Synthetic oligonucleotide
cgaugaaugaucacaggcc

SEQ ID NO: 727313 - RNA, 19 nt, Artificial Sequence
  Description of Artificial Sequence: Synthetic oligonucleotide
aacggcugcuucucuuuga

SEQ ID NO: 727314 - RNA, 19 nt, Artificial Sequence
  Description of Artificial Sequence: Synthetic oligonucleotide
gaagccaaacguugaguaa

SEQ ID NO: 727315 - RNA, 19 nt, Artificial Sequence
  Description of Artificial Sequence: Synthetic oligonucleotide
uccuuuuagauggacucau

SEQ ID NO: 727316 - RNA, 19 nt, Artificial Sequence
  Description of Artificial Sequence: Synthetic oligonucleotide
uugugaauuucuccagcuu

SEQ ID NO: 727317 - RNA, 19 nt, Artificial Sequence
  Description of Artificial Sequence: Synthetic oligonucleotide
ggaccuacaggaaugacca

SEQ ID NO: 727318 - RNA, 19 nt, Artificial Sequence
  Description of Artificial Sequence: Synthetic oligonucleotide
agcauuuagaguacgcgau

SEQ ID NO: 727319 - RNA, 19 nt, Artificial Sequence
  Description of Artificial Sequence: Synthetic oligonucleotide
acuaaucucggccgccacu

SEQ ID NO: 727320 - RNA, 19 nt, Artificial Sequence
  Description of Artificial Sequence: Synthetic oligonucleotide
cuuaaaguucccgacagcu

SEQ ID NO: 727321 - RNA, 19 nt, Artificial Sequence
  Description of Artificial Sequence: Synthetic oligonucleotide
ugguaucugccaauagcau

SEQ ID NO: 727322 - RNA, 19 nt, Artificial Sequence
  Description of Artificial Sequence: Synthetic oligonucleotide
cuuuccacggauccaagaa

SEQ ID NO: 727323 - RNA, 19 nt, Artificial Sequence
  Description of Artificial Sequence: Synthetic oligonucleotide
agguuaaaccuaauaggca

SEQ ID NO: 727324 - RNA, 19 nt, Artificial Sequence
  Description of Artificial Sequence: Synthetic oligonucleotide
ccaugguuuuccaaauucc

SEQ ID NO: 727325 - RNA, 19 nt, Artificial Sequence
  Description of Artificial Sequence: Synthetic oligonucleotide
aacguugaguaaacagacu

SEQ ID NO: 727326 - RNA, 19 nt, Artificial Sequence
  Description of Artificial Sequence: Synthetic oligonucleotide
ugggcgaugugcaaacauu

SEQ ID NO: 727327 - RNA, 19 nt, Artificial Sequence
  Description of Artificial Sequence: Synthetic oligonucleotide
agcaccccuuuauuucuuc

SEQ ID NO: 727328 - RNA, 19 nt, Artificial Sequence
  Description of Artificial Sequence: Synthetic oligonucleotide
guuaagccacuuaaaguuc

SEQ ID NO: 727329 - RNA, 19 nt, Artificial Sequence
  Description of Artificial Sequence: Synthetic oligonucleotide
uuguuacuguaaugcugcc

SEQ ID NO: 727330 - RNA, 19 nt, Artificial Sequence
  Description of Artificial Sequence: Synthetic oligonucleotide
ggagaagccaaacguugag

SEQ ID NO: 727331 - RNA, 19 nt, Artificial Sequence
  Description of Artificial Sequence: Synthetic oligonucleotide
guuacgcuugugauauucc

SEQ ID NO: 727332 - RNA, 19 nt, Artificial Sequence
  Description of Artificial Sequence: Synthetic oligonucleotide
cuuugaugauaguuuuaca

SEQ ID NO: 727333 - RNA, 19 nt, Artificial Sequence
  Description of Artificial Sequence: Synthetic oligonucleotide
cauguuagagacagcaccu

SEQ ID NO: 727334 - RNA, 19 nt, Artificial Sequence
  Description of Artificial Sequence: Synthetic oligonucleotide
uugacuaaucucggccgcc

SEQ ID NO: 727335 - RNA, 19 nt, Artificial Sequence
  Description of Artificial Sequence: Synthetic oligonucleotide
auaugugagguuaaaccua

SEQ ID NO: 727336 - RNA, 19 nt, Artificial Sequence
  Description of Artificial Sequence: Synthetic oligonucleotide
agaauccggcacuuaaauu

SEQ ID NO: 727337 - RNA, 19 nt, Artificial Sequence
  Description of Artificial Sequence: Synthetic oligonucleotide
ugaccuccauaguaaaguu

SEQ ID NO: 727338 - RNA, 19 nt, Artificial Sequence
  Description of Artificial Sequence: Synthetic oligonucleotide
cuaacauaugugagguuaa

SEQ ID NO: 727339 - RNA, 19 nt, Artificial Sequence
  Description of Artificial Sequence: Synthetic oligonucleotide
ggcacgaugaaugaucaca

SEQ ID NO: 727340 - RNA, 19 nt, Artificial Sequence
  Description of Artificial Sequence: Synthetic oligonucleotide
agacuucaaaagucuuccu

SEQ ID NO: 727341 - RNA, 19 nt, Artificial Sequence
  Description of Artificial Sequence: Synthetic oligonucleotide
ucaaacggcugcuucucuu

SEQ ID NO: 727342 - RNA, 19 nt, Artificial Sequence
  Description of Artificial Sequence: Synthetic oligonucleotide
acagcauaacuuugauaau

SEQ ID NO: 727343 - RNA, 19 nt, Artificial Sequence
  Description of Artificial Sequence: Synthetic oligonucleotide
auugcauuuucagcuaguu

SEQ ID NO: 727344 - RNA, 19 nt, Artificial Sequence
  Description of Artificial Sequence: Synthetic oligonucleotide
auauuccucucguauugua

SEQ ID NO: 727345 - RNA, 19 nt, Artificial Sequence
  Description of Artificial Sequence: Synthetic oligonucleotide
guaaacaguggucguugga

SEQ ID NO: 727346 - RNA, 19 nt, Artificial Sequence
  Description of Artificial Sequence: Synthetic oligonucleotide
uggcuagcauccuuuccac

SEQ ID NO: 727347 - RNA, 19 nt, Artificial Sequence
  Description of Artificial Sequence: Synthetic oligonucleotide
uuagggccauagaaugcuc

SEQ ID NO: 727348 - RNA, 19 nt, Artificial Sequence
  Description of Artificial Sequence: Synthetic oligonucleotide
gcuacccucacuguaauca

SEQ ID NO: 727349 - RNA, 19 nt, Artificial Sequence
  Description of Artificial Sequence: Synthetic oligonucleotide
cagaagcuacugaaauuuc

SEQ ID NO: 727350 - RNA, 19 nt, Artificial Sequence
  Description of Artificial Sequence: Synthetic oligonucleotide
guucccgacagcucauuuc

SEQ ID NO: 727351 - RNA, 19 nt, Artificial Sequence
  Description of Artificial Sequence: Synthetic oligonucleotide
cauucucaauggguggccc

SEQ ID NO: 727352 - RNA, 19 nt, Artificial Sequence
  Description of Artificial Sequence: Synthetic oligonucleotide
ccagaguuuacuguuguac

SEQ ID NO: 727353 - RNA, 19 nt, Artificial Sequence
  Description of Artificial Sequence: Synthetic oligonucleotide
guugacagguucaauugaa

SEQ ID NO: 727354 - RNA, 19 nt, Artificial Sequence
  Description of Artificial Sequence: Synthetic oligonucleotide
ugacuaaucucggccgcca

SEQ ID NO: 727355 - RNA, 19 nt, Artificial Sequence
  Description of Artificial Sequence: Synthetic oligonucleotide
uucgaacauuuacugcauu

SEQ ID NO: 727356 - RNA, 19 nt, Artificial Sequence
  Description of Artificial Sequence: Synthetic oligonucleotide
agcuacccucacuguaauc

SEQ ID NO: 727357 - RNA, 19 nt, Artificial Sequence
  Description of Artificial Sequence: Synthetic oligonucleotide
ugcucuuaucauccccauc

SEQ ID NO: 727358 - RNA, 19 nt, Artificial Sequence
  Description of Artificial Sequence: Synthetic oligonucleotide
auggcacgaugaaugauca

SEQ ID NO: 727359 - RNA, 19 nt, Artificial Sequence
  Description of Artificial Sequence: Synthetic oligonucleotide
uccuugcacuguuuuccca

SEQ ID NO: 727360 - RNA, 19 nt, Artificial Sequence
  Description of Artificial Sequence: Synthetic oligonucleotide
accagcuacccucacugua

SEQ ID NO: 727361 - RNA, 19 nt, Artificial Sequence
  Description of Artificial Sequence: Synthetic oligonucleotide
uaaucucggccgccacuug

SEQ ID NO: 727362 - RNA, 19 nt, Artificial Sequence
  Description of Artificial Sequence: Synthetic oligonucleotide
cguugaguaaacagacugc

SEQ ID NO: 727363 - RNA, 19 nt, Artificial Sequence
  Description of Artificial Sequence: Synthetic oligonucleotide
gugaaguuacgcuugugau

SEQ ID NO: 727364 - RNA, 19 nt, Artificial Sequence
  Description of Artificial Sequence: Synthetic oligonucleotide
ucacuaguguuucccucuu

SEQ ID NO: 727365 - RNA, 19 nt, Artificial Sequence
  Description of Artificial Sequence: Synthetic oligonucleotide
aagcgccugacccggguua

SEQ ID NO: 727366 - RNA, 19 nt, Artificial Sequence
  Description of Artificial Sequence: Synthetic oligonucleotide
aggagaagccaaacguuga

SEQ ID NO: 727367 - RNA, 19 nt, Artificial Sequence
  Description of Artificial Sequence: Synthetic oligonucleotide
gacuaaucucggccgccac

SEQ ID NO: 727368 - RNA, 19 nt, Artificial Sequence
  Description of Artificial Sequence: Synthetic oligonucleotide
cggguuaagccacuuaaag

SEQ ID NO: 727369 - RNA, 19 nt, Artificial Sequence
  Description of Artificial Sequence: Synthetic oligonucleotide
ccuaggaagugcuccggcc

SEQ ID NO: 727370 - RNA, 19 nt, Artificial Sequence
  Description of Artificial Sequence: Synthetic oligonucleotide
gcgaugugcaaacauuaga

SEQ ID NO: 727371 - RNA, 19 nt, Artificial Sequence
  Description of Artificial Sequence: Synthetic oligonucleotide
cauuagacagugcccugga

SEQ ID NO: 727372 - RNA, 19 nt, Artificial Sequence
  Description of Artificial Sequence: Synthetic oligonucleotide
uccaacgggcgguccaggu

SEQ ID NO: 727373 - RNA, 19 nt, Artificial Sequence
  Description of Artificial Sequence: Synthetic oligonucleotide
agcauccuuuccacggauc

SEQ ID NO: 727374 - RNA, 19 nt, Artificial Sequence
  Description of Artificial Sequence: Synthetic oligonucleotide
agcugaauuguagcacacu

SEQ ID NO: 727375 - RNA, 19 nt, Artificial Sequence
  Description of Artificial Sequence: Synthetic oligonucleotide
cucacuaguguuucccucu

SEQ ID NO: 727376 - RNA, 19 nt, Artificial Sequence
  Description of Artificial Sequence: Synthetic oligonucleotide
aaaguucccgacagcucau

SEQ ID NO: 727377 - RNA, 19 nt, Artificial Sequence
  Description of Artificial Sequence: Synthetic oligonucleotide
uccccuuccaacgggcggu

SEQ ID NO: 727378 - RNA, 19 nt, Artificial Sequence
  Description of Artificial Sequence: Synthetic oligonucleotide
ucccgacagcucauuucug

SEQ ID NO: 727379 - RNA, 19 nt, Artificial Sequence
  Description of Artificial Sequence: Synthetic oligonucleotide
ggguuaagccacuuaaagu

SEQ ID NO: 727380 - RNA, 19 nt, Artificial Sequence
  Description of Artificial Sequence: Synthetic oligonucleotide
augucguaauaaaauccau

SEQ ID NO: 727381 - RNA, 19 nt, Artificial Sequence
  Description of Artificial Sequence: Synthetic oligonucleotide
gcaacucuacaguggaauc

SEQ ID NO: 727382 - RNA, 19 nt, Artificial Sequence
  Description of Artificial Sequence: Synthetic oligonucleotide
guuggaccuacaggaauga

SEQ ID NO: 727383 - RNA, 19 nt, Artificial Sequence
  Description of Artificial Sequence: Synthetic oligonucleotide
gcaauugcuggggaugagc

SEQ ID NO: 727384 - RNA, 19 nt, Artificial Sequence
  Description of Artificial Sequence: Synthetic oligonucleotide
ggcuagcauccuuuccacg

SEQ ID NO: 727385 - RNA, 19 nt, Artificial Sequence
  Description of Artificial Sequence: Synthetic oligonucleotide
ggugaccuccauaguaaag

SEQ ID NO: 727386 - RNA, 19 nt, Artificial Sequence
  Description of Artificial Sequence: Synthetic oligonucleotide
cuuccaacgggcgguccag

SEQ ID NO: 727387 - RNA, 19 nt, Artificial Sequence
  Description of Artificial Sequence: Synthetic oligonucleotide
aguucccgacagcucauuu

SEQ ID NO: 727388 - RNA, 19 nt, Artificial Sequence
  Description of Artificial Sequence: Synthetic oligonucleotide
uggaagcgccugacccggg

SEQ ID NO: 727389 - RNA, 19 nt, Artificial Sequence
  Description of Artificial Sequence: Synthetic oligonucleotide
gccgccacuugauaaggug

SEQ ID NO: 727390 - RNA, 19 nt, Artificial Sequence
  Description of Artificial Sequence: Synthetic oligonucleotide
uaguagccccaaggaacag

SEQ ID NO: 727391 - RNA, 19 nt, Artificial Sequence
  Description of Artificial Sequence: Synthetic oligonucleotide
aguguacaacucucaucua

SEQ ID NO: 727392 - RNA, 19 nt, Artificial Sequence
  Description of Artificial Sequence: Synthetic oligonucleotide
cagcaaaccgaacaggcau

SEQ ID NO: 727393 - RNA, 19 nt, Artificial Sequence
  Description of Artificial Sequence: Synthetic oligonucleotide
agugcuccggccgcguuga

SEQ ID NO: 727394 - RNA, 19 nt, Artificial Sequence
  Description of Artificial Sequence: Synthetic oligonucleotide
auuaccuggcgaggagaca

SEQ ID NO: 727395 - RNA, 19 nt, Artificial Sequence
  Description of Artificial Sequence: Synthetic oligonucleotide
cuguagucacaaaccuaca

SEQ ID NO: 727396 - RNA, 19 nt, Artificial Sequence
  Description of Artificial Sequence: Synthetic oligonucleotide
uggcacgaugaaugaucac

SEQ ID NO: 727397 - RNA, 19 nt, Artificial Sequence
  Description of Artificial Sequence: Synthetic oligonucleotide
uggacaccacucugucuuc

SEQ ID NO: 727398 - RNA, 19 nt, Artificial Sequence
  Description of Artificial Sequence: Synthetic oligonucleotide
guuguacauguuagagaca

SEQ ID NO: 727399 - RNA, 19 nt, Artificial Sequence
  Description of Artificial Sequence: Synthetic oligonucleotide
aacauuccuuggacaccug

SEQ ID NO: 727400 - RNA, 19 nt, Artificial Sequence
  Description of Artificial Sequence: Synthetic oligonucleotide
ucccaccguaguucucuga

SEQ ID NO: 727401 - RNA, 19 nt, Artificial Sequence
  Description of Artificial Sequence: Synthetic oligonucleotide
cauuucccaccguaguucu

SEQ ID NO: 727402 - RNA, 19 nt, Artificial Sequence
  Description of Artificial Sequence: Synthetic oligonucleotide
cagaauccggcacuuaaau

SEQ ID NO: 727403 - RNA, 19 nt, Artificial Sequence
  Description of Artificial Sequence: Synthetic oligonucleotide
uggacaccugaagugcaua

SEQ ID NO: 727404 - RNA, 19 nt, Artificial Sequence
  Description of Artificial Sequence: Synthetic oligonucleotide
cucggccgccacuugauaa

SEQ ID NO: 727405 - RNA, 19 nt, Artificial Sequence
  Description of Artificial Sequence: Synthetic oligonucleotide
ugacccggguuaagccacu

SEQ ID NO: 727406 - RNA, 19 nt, Artificial Sequence
  Description of Artificial Sequence: Synthetic oligonucleotide
ccauuucccaccguaguuc

SEQ ID NO: 727407 - RNA, 19 nt, Artificial Sequence
  Description of Artificial Sequence: Synthetic oligonucleotide
cucuacaguggaauccccu

SEQ ID NO: 727408 - RNA, 19 nt, Artificial Sequence
  Description of Artificial Sequence: Synthetic oligonucleotide
gccauaaagccuucuucaa

SEQ ID NO: 727409 - RNA, 19 nt, Artificial Sequence
  Description of Artificial Sequence: Synthetic oligonucleotide
gcacuggaaugccaguaca

SEQ ID NO: 727410 - RNA, 19 nt, Artificial Sequence
  Description of Artificial Sequence: Synthetic oligonucleotide
aaguuacgcuugugauauu

SEQ ID NO: 727411 - RNA, 19 nt, Artificial Sequence
  Description of Artificial Sequence: Synthetic oligonucleotide
ucguuggaguguugacuuu

SEQ ID NO: 727412 - RNA, 19 nt, Artificial Sequence
  Description of Artificial Sequence: Synthetic oligonucleotide
gcauaacuuugauaauucu

SEQ ID NO: 727413 - RNA, 19 nt, Artificial Sequence
  Description of Artificial Sequence: Synthetic oligonucleotide
ccgacagcucauuucugug

SEQ ID NO: 727414 - RNA, 19 nt, Artificial Sequence
  Description of Artificial Sequence: Synthetic oligonucleotide
ggacaccugaagugcauaa

SEQ ID NO: 727415 - RNA, 19 nt, Artificial Sequence
  Description of Artificial Sequence: Synthetic oligonucleotide
caaaccgaacaggcauuuc

SEQ ID NO: 727416 - RNA, 19 nt, Artificial Sequence
  Description of Artificial Sequence: Synthetic oligonucleotide
ccgaacaggcauuucccuc

SEQ ID NO: 727417 - RNA, 19 nt, Artificial Sequence
  Description of Artificial Sequence: Synthetic oligonucleotide
ccacuuaaaguucccgaca

SEQ ID NO: 727418 - RNA, 19 nt, Artificial Sequence
  Description of Artificial Sequence: Synthetic oligonucleotide
ccacggauccaagaauggc

SEQ ID NO: 727419 - RNA, 19 nt, Artificial Sequence
  Description of Artificial Sequence: Synthetic oligonucleotide
ggacucauuaguagcccca

SEQ ID NO: 727420 - RNA, 19 nt, Artificial Sequence
  Description of Artificial Sequence: Synthetic oligonucleotide
cugaugguaucugccaaua

SEQ ID NO: 727421 - RNA, 19 nt, Artificial Sequence
  Description of Artificial Sequence: Synthetic oligonucleotide
gcccauagcacaggugacc

SEQ ID NO: 727422 - RNA, 19 nt, Artificial Sequence
  Description of Artificial Sequence: Synthetic oligonucleotide
cauuuagaguacgcgauuu

SEQ ID NO: 727423 - RNA, 19 nt, Artificial Sequence
  Description of Artificial Sequence: Synthetic oligonucleotide
aaguucccgacagcucauu

SEQ ID NO: 727424 - RNA, 19 nt, Artificial Sequence
  Description of Artificial Sequence: Synthetic oligonucleotide
aucuuucaaacggcugcuu

SEQ ID NO: 727425 - RNA, 19 nt, Artificial Sequence
  Description of Artificial Sequence: Synthetic oligonucleotide
agaggccauuucccaccgu

SEQ ID NO: 727426 - RNA, 19 nt, Artificial Sequence
  Description of Artificial Sequence: Synthetic oligonucleotide
gacaccugaagugcauaau

SEQ ID NO: 727427 - RNA, 19 nt, Artificial Sequence
  Description of Artificial Sequence: Synthetic oligonucleotide
gugggcgaugugcaaacau

SEQ ID NO: 727428 - RNA, 19 nt, Artificial Sequence
  Description of Artificial Sequence: Synthetic oligonucleotide
cccggguuaagccacuuaa

SEQ ID NO: 727429 - RNA, 19 nt, Artificial Sequence
  Description of Artificial Sequence: Synthetic oligonucleotide
ccguaguucucugaaagaa

SEQ ID NO: 727430 - RNA, 19 nt, Artificial Sequence
  Description of Artificial Sequence: Synthetic oligonucleotide
guucgaacauuuacugcau

SEQ ID NO: 727431 - RNA, 19 nt, Artificial Sequence
  Description of Artificial Sequence: Synthetic oligonucleotide
gaaugaucacaggccugcu

SEQ ID NO: 727432 - RNA, 19 nt, Artificial Sequence
  Description of Artificial Sequence: Synthetic oligonucleotide
gggcgaugugcaaacauua

SEQ ID NO: 727433 - RNA, 19 nt, Artificial Sequence
  Description of Artificial Sequence: Synthetic oligonucleotide
acccggguuaagccacuua

SEQ ID NO: 727434 - RNA, 19 nt, Artificial Sequence
  Description of Artificial Sequence: Synthetic oligonucleotide
ccgugggcgaugugcaaac

SEQ ID NO: 727435 - RNA, 19 nt, Artificial Sequence
  Description of Artificial Sequence: Synthetic oligonucleotide
ggaccgugggcgaugugca

SEQ ID NO: 727436 - RNA, 19 nt, Artificial Sequence
  Description of Artificial Sequence: Synthetic oligonucleotide
aguggucguuggaguguug

SEQ ID NO: 727437 - RNA, 19 nt, Artificial Sequence
  Description of Artificial Sequence: Synthetic oligonucleotide
cauccugcuggaagcgccu

SEQ ID NO: 727438 - RNA, 19 nt, Artificial Sequence
  Description of Artificial Sequence: Synthetic oligonucleotide
cacuguaaucacacugcuu

SEQ ID NO: 727439 - RNA, 19 nt, Artificial Sequence
  Description of Artificial Sequence: Synthetic oligonucleotide
augugagguuaaaccuaau

SEQ ID NO: 727440 - RNA, 19 nt, Artificial Sequence
  Description of Artificial Sequence: Synthetic oligonucleotide
agcgccugacccggguuaa

SEQ ID NO: 727441 - RNA, 19 nt, Artificial Sequence
  Description of Artificial Sequence: Synthetic oligonucleotide
caccccuuuauuucuucuu

SEQ ID NO: 727442 - RNA, 19 nt, Artificial Sequence
  Description of Artificial Sequence: Synthetic oligonucleotide
gaagcgccugacccggguu

SEQ ID NO: 727443 - RNA, 19 nt, Artificial Sequence
  Description of Artificial Sequence: Synthetic oligonucleotide
gccccaaggaacagacuuc

SEQ ID NO: 727444 - RNA, 19 nt, Artificial Sequence
  Description of Artificial Sequence: Synthetic oligonucleotide
gcauuuagaguacgcgauu

SEQ ID NO: 727445 - RNA, 19 nt, Artificial Sequence
  Description of Artificial Sequence: Synthetic oligonucleotide
ggcccauagcacaggugac

SEQ ID NO: 727446 - RNA, 19 nt, Artificial Sequence
  Description of Artificial Sequence: Synthetic oligonucleotide
ccucagugaaguuacgcuu

SEQ ID NO: 727447 - RNA, 19 nt, Artificial Sequence
  Description of Artificial Sequence: Synthetic oligonucleotide
ggcagacaacucagugcug

SEQ ID NO: 727448 - RNA, 19 nt, Artificial Sequence
  Description of Artificial Sequence: Synthetic oligonucleotide
cuucagaauccggcacuua

SEQ ID NO: 727449 - RNA, 19 nt, Artificial Sequence
  Description of Artificial Sequence: Synthetic oligonucleotide
ccggguuaagccacuuaaa

SEQ ID NO: 727450 - RNA, 19 nt, Artificial Sequence
  Description of Artificial Sequence: Synthetic oligonucleotide
cccgacagcucauuucugu

SEQ ID NO: 727451 - RNA, 19 nt, Artificial Sequence
  Description of Artificial Sequence: Synthetic oligonucleotide
ccgccacuugauaaggugu

SEQ ID NO: 727452 - RNA, 19 nt, Artificial Sequence
  Description of Artificial Sequence: Synthetic oligonucleotide
ggccgcguugacagguuca

SEQ ID NO: 727453 - RNA, 19 nt, Artificial Sequence
  Description of Artificial Sequence: Synthetic oligonucleotide
ggaagcgccugacccgggu

SEQ ID NO: 727454 - RNA, 19 nt, Artificial Sequence
  Description of Artificial Sequence: Synthetic oligonucleotide
ccugagcuuccucguuguc

SEQ ID NO: 727455 - RNA, 19 nt, Artificial Sequence
  Description of Artificial Sequence: Synthetic oligonucleotide
ccaccguaguucucugaaa

SEQ ID NO: 727456 - RNA, 19 nt, Artificial Sequence
  Description of Artificial Sequence: Synthetic oligonucleotide
cgcguugacagguucaauu

SEQ ID NO: 727457 - RNA, 19 nt, Artificial Sequence
  Description of Artificial Sequence: Synthetic oligonucleotide
cccauagcacaggugaccu

SEQ ID NO: 727458 - RNA, 19 nt, Artificial Sequence
  Description of Artificial Sequence: Synthetic oligonucleotide
gccgcguugacagguucaa

SEQ ID NO: 727459 - RNA, 19 nt, Artificial Sequence
  Description of Artificial Sequence: Synthetic oligonucleotide
gcaaaccgaacaggcauuu

SEQ ID NO: 727460 - RNA, 19 nt, Artificial Sequence
  Description of Artificial Sequence: Synthetic oligonucleotide
cccagaguuuacuguugua

SEQ ID NO: 727461 - RNA, 19 nt, Artificial Sequence
  Description of Artificial Sequence: Synthetic oligonucleotide
caguggucguuggaguguu

SEQ ID NO: 727462 - RNA, 19 nt, Artificial Sequence
  Description of Artificial Sequence: Synthetic oligonucleotide
gugcuccggccgcguugac

SEQ ID NO: 727463 - RNA, 19 nt, Artificial Sequence
  Description of Artificial Sequence: Synthetic oligonucleotide
gacccggguuaagccacuu

SEQ ID NO: 727464 - RNA, 19 nt, Artificial Sequence
  Description of Artificial Sequence: Synthetic oligonucleotide
ccgagguuucccagaguuu

SEQ ID NO: 727465 - RNA, 19 nt, Artificial Sequence
  Description of Artificial Sequence: Synthetic oligonucleotide
cggccgcguugacagguuc

SEQ ID NO: 727466 - RNA, 19 nt, Artificial Sequence
  Description of Artificial Sequence: Synthetic oligonucleotide
ccccuuccaacgggcgguc

SEQ ID NO: 727467 - RNA, 19 nt, Artificial Sequence
  Description of Artificial Sequence: Synthetic oligonucleotide
ccaggaccgugggcgaugu

SEQ ID NO: 727468 - RNA, 19 nt, Artificial Sequence
  Description of Artificial Sequence: Synthetic oligonucleotide
ccgcguugacagguucaau

SEQ ID NO: 727469 - RNA, 19 nt, Artificial Sequence
  Description of Artificial Sequence: Synthetic oligonucleotide
aguaaaacaagguugaagg

SEQ ID NO: 727470 - RNA, 19 nt, Artificial Sequence
  Description of Artificial Sequence: Synthetic oligonucleotide
aaugacuauacugauaccc

SEQ ID NO: 727471 - RNA, 19 nt, Artificial Sequence
  Description of Artificial Sequence: Synthetic oligonucleotide
agaaugacuauacugauac

SEQ ID NO: 727472 - RNA, 19 nt, Artificial Sequence
  Description of Artificial Sequence: Synthetic oligonucleotide
cuauacuuaacuaagugcc

SEQ ID NO: 727473 - RNA, 19 nt, Artificial Sequence
  Description of Artificial Sequence: Synthetic oligonucleotide
auuugcuugagccaguggc

SEQ ID NO: 727474 - RNA, 19 nt, Artificial Sequence
  Description of Artificial Sequence: Synthetic oligonucleotide
aacaguguuauguaaaacu

SEQ ID NO: 727475 - RNA, 19 nt, Artificial Sequence
  Description of Artificial Sequence: Synthetic oligonucleotide
uguaauaggaaccaaccca

SEQ ID NO: 727476 - RNA, 19 nt, Artificial Sequence
  Description of Artificial Sequence: Synthetic oligonucleotide
uuuggaaaccaccauagcc

SEQ ID NO: 727477 - RNA, 19 nt, Artificial Sequence
  Description of Artificial Sequence: Synthetic oligonucleotide
auagccaccaccuugguag

SEQ ID NO: 727478 - RNA, 19 nt, Artificial Sequence
  Description of Artificial Sequence: Synthetic oligonucleotide
agagauggcagauucaggg

SEQ ID NO: 727479 - RNA, 19 nt, Artificial Sequence
  Description of Artificial Sequence: Synthetic oligonucleotide
guaucuauuguccugcugg

SEQ ID NO: 727480 - RNA, 19 nt, Artificial Sequence
  Description of Artificial Sequence: Synthetic oligonucleotide
cuacuggucaauuaaaggc

SEQ ID NO: 727481 - RNA, 19 nt, Artificial Sequence
  Description of Artificial Sequence: Synthetic oligonucleotide
uagguuguuaauaugagaa

SEQ ID NO: 727482 - RNA, 19 nt, Artificial Sequence
  Description of Artificial Sequence: Synthetic oligonucleotide
uugauuagcagcuuccucc

SEQ ID NO: 727483 - RNA, 19 nt, Artificial Sequence
  Description of Artificial Sequence: Synthetic oligonucleotide
uauuacuugagcucuagca

SEQ ID NO: 727484 - RNA, 19 nt, Artificial Sequence
  Description of Artificial Sequence: Synthetic oligonucleotide
uguuauguaaaacuguuua

SEQ ID NO: 727485 - RNA, 19 nt, Artificial Sequence
  Description of Artificial Sequence: Synthetic oligonucleotide
uuguuaauaugagaaaggg

SEQ ID NO: 727486 - RNA, 19 nt, Artificial Sequence
  Description of Artificial Sequence: Synthetic oligonucleotide
ucuacuggucaauuaaagg

SEQ ID NO: 727487 - RNA, 19 nt, Artificial Sequence
  Description of Artificial Sequence: Synthetic oligonucleotide
aaaggcaacuuaaauugcc

SEQ ID NO: 727488 - RNA, 19 nt, Artificial Sequence
  Description of Artificial Sequence: Synthetic oligonucleotide
uauacugauacccuccgug

SEQ ID NO: 727489 - RNA, 19 nt, Artificial Sequence
  Description of Artificial Sequence: Synthetic oligonucleotide
caaacguuugauuagcagc

SEQ ID NO: 727490 - RNA, 19 nt, Artificial Sequence
  Description of Artificial Sequence: Synthetic oligonucleotide
uuggaaaccaccauagcca

SEQ ID NO: 727491 - RNA, 19 nt, Artificial Sequence
  Description of Artificial Sequence: Synthetic oligonucleotide
caaacuaacuuguauuugc

SEQ ID NO: 727492 - RNA, 19 nt, Artificial Sequence
  Description of Artificial Sequence: Synthetic oligonucleotide
agauauauguuucuuaaau

SEQ ID NO: 727493 - RNA, 19 nt, Artificial Sequence
  Description of Artificial Sequence: Synthetic oligonucleotide
aagauguuuggaaaccacc

SEQ ID NO: 727494 - RNA, 19 nt, Artificial Sequence
  Description of Artificial Sequence: Synthetic oligonucleotide
uaacucgugcauaaaacag

SEQ ID NO: 727495 - RNA, 19 nt, Artificial Sequence
  Description of Artificial Sequence: Synthetic oligonucleotide
ugcauauugaaaacaugag

SEQ ID NO: 727496 - RNA, 19 nt, Artificial Sequence
  Description of Artificial Sequence: Synthetic oligonucleotide
ugagcaacggaaauguuac

SEQ ID NO: 727497 - RNA, 19 nt, Artificial Sequence
  Description of Artificial Sequence: Synthetic oligonucleotide
uccuuucacagcuugacag

SEQ ID NO: 727498 - RNA, 19 nt, Artificial Sequence
  Description of Artificial Sequence: Synthetic oligonucleotide
uuaacuaagugccuacaga

SEQ ID NO: 727499 - RNA, 19 nt, Artificial Sequence
  Description of Artificial Sequence: Synthetic oligonucleotide
gauacuagaguucacaacu

SEQ ID NO: 727500 - RNA, 19 nt, Artificial Sequence
  Description of Artificial Sequence: Synthetic oligonucleotide
  modified_base (2)..(2): a, c, u, g, unknown or other
unuuuguuccucuuccucc

SEQ ID NO: 727501 - RNA, 19 nt, Artificial Sequence
  Description of Artificial Sequence: Synthetic oligonucleotide
uuaacucgugcauaaaaca

SEQ ID NO: 727502 - RNA, 19 nt, Artificial Sequence
  Description of Artificial Sequence: Synthetic oligonucleotide
ugcuauacuuaacuaagug

SEQ ID NO: 727503 - RNA, 19 nt, Artificial Sequence
  Description of Artificial Sequence: Synthetic oligonucleotide
ugguuaauggcuucuaucu

SEQ ID NO: 727504 - RNA, 19 nt, Artificial Sequence
  Description of Artificial Sequence: Synthetic oligonucleotide
uuggagaacacacaucaga

SEQ ID NO: 727505 - RNA, 19 nt, Artificial Sequence
  Description of Artificial Sequence: Synthetic oligonucleotide
auuaacucgugcauaaaac

SEQ ID NO: 727506 - RNA, 19 nt, Artificial Sequence
  Description of Artificial Sequence: Synthetic oligonucleotide
gacaaaacccggcagcagg

SEQ ID NO: 727507 - RNA, 19 nt, Artificial Sequence
  Description of Artificial Sequence: Synthetic oligonucleotide
ucuuguaauaggaaccaac

SEQ ID NO: 727508 - RNA, 19 nt, Artificial Sequence
  Description of Artificial Sequence: Synthetic oligonucleotide
agauacuagaguucacaac

SEQ ID NO: 727509 - RNA, 19 nt, Artificial Sequence
  Description of Artificial Sequence: Synthetic oligonucleotide
aaucucgguacccaccauc

SEQ ID NO: 727510 - RNA, 19 nt, Artificial Sequence
  Description of Artificial Sequence: Synthetic oligonucleotide
aacgcuuuggcugguaaac

SEQ ID NO: 727511 - RNA, 19 nt, Artificial Sequence
  Description of Artificial Sequence: Synthetic oligonucleotide
ucuuagcucugucagacca

SEQ ID NO: 727512 - RNA, 19 nt, Artificial Sequence
  Description of Artificial Sequence: Synthetic oligonucleotide
ggaaauguuaccuuuagga

SEQ ID NO: 727513 - RNA, 19 nt, Artificial Sequence
  Description of Artificial Sequence: Synthetic oligonucleotide
uuuccuagaaaggagauau

SEQ ID NO: 727514 - RNA, 19 nt, Artificial Sequence
  Description of Artificial Sequence: Synthetic oligonucleotide
uacuggucaauuaaaggca

SEQ ID NO: 727515 - RNA, 19 nt, Artificial Sequence
  Description of Artificial Sequence: Synthetic oligonucleotide
guauccaccgcccugauac

SEQ ID NO: 727516 - RNA, 19 nt, Artificial Sequence
  Description of Artificial Sequence: Synthetic oligonucleotide
  modified_base (5)..(5): a, c, u, g, unknown or other
uggunuuuguuccucuucc

SEQ ID NO: 727517 - RNA, 19 nt, Artificial Sequence
  Description of Artificial Sequence: Synthetic oligonucleotide
aauguguuaucugcaaaag

SEQ ID NO: 727518 - RNA, 19 nt, Artificial Sequence
  Description of Artificial Sequence: Synthetic oligonucleotide
uguuaauaugagaaagggu

SEQ ID NO: 727519 - RNA, 19 nt, Artificial Sequence
  Description of Artificial Sequence: Synthetic oligonucleotide
uuguaauaggaaccaaccc

SEQ ID NO: 727520 - RNA, 19 nt, Artificial Sequence
  Description of Artificial Sequence: Synthetic oligonucleotide
cugcauaugaagauguuug

SEQ ID NO: 727521 - RNA, 19 nt, Artificial Sequence
  Description of Artificial Sequence: Synthetic oligonucleotide
aaagucuaggcaaauccuc

SEQ ID NO: 727522 - RNA, 19 nt, Artificial Sequence
  Description of Artificial Sequence: Synthetic oligonucleotide
auguacagauacuuuauug

SEQ ID NO: 727523 - RNA, 19 nt, Artificial Sequence
  Description of Artificial Sequence: Synthetic oligonucleotide
acugccucgauccccaugg

SEQ ID NO: 727524 - RNA, 19 nt, Artificial Sequence
  Description of Artificial Sequence: Synthetic oligonucleotide
guugcuauacuuaacuaag

SEQ ID NO: 727525 - RNA, 19 nt, Artificial Sequence
  Description of Artificial Sequence: Synthetic oligonucleotide
guucaauuucauugggucg

SEQ ID NO: 727526 - RNA, 19 nt, Artificial Sequence
  Description of Artificial Sequence: Synthetic oligonucleotide
acuaguauaaugucucccu

SEQ ID NO: 727527 - RNA, 19 nt, Artificial Sequence
  Description of Artificial Sequence: Synthetic oligonucleotide
aagcaaacuaacuuguauu

SEQ ID NO: 727528 - RNA, 19 nt, Artificial Sequence
  Description of Artificial Sequence: Synthetic oligonucleotide
uggauuagucuacugguca

SEQ ID NO: 727529 - RNA, 19 nt, Artificial Sequence
  Description of Artificial Sequence: Synthetic oligonucleotide
uuuuggaggagcauauggu

SEQ ID NO: 727530 - RNA, 19 nt, Artificial Sequence
  Description of Artificial Sequence: Synthetic oligonucleotide
caguauuccaccaacagga

SEQ ID NO: 727531 - RNA, 19 nt, Artificial Sequence
  Description of Artificial Sequence: Synthetic oligonucleotide
ucucuuauggacccacugc

SEQ ID NO: 727532 - RNA, 19 nt, Artificial Sequence
  Description of Artificial Sequence: Synthetic oligonucleotide
agacugaacgcuuuggcug

SEQ ID NO: 727533 - RNA, 19 nt, Artificial Sequence
  Description of Artificial Sequence: Synthetic oligonucleotide
ucuauuguccugcugguau

SEQ ID NO: 727534 - RNA, 19 nt, Artificial Sequence
  Description of Artificial Sequence: Synthetic oligonucleotide
ugauuagcagcuuccuccg

SEQ ID NO: 727535 - RNA, 19 nt, Artificial Sequence
  Description of Artificial Sequence: Synthetic oligonucleotide
aaucgaaugaagaccaaca

SEQ ID NO: 727536 - RNA, 19 nt, Artificial Sequence
  Description of Artificial Sequence: Synthetic oligonucleotide
uauugcucaccucucacac

SEQ ID NO: 727537 - RNA, 19 nt, Artificial Sequence
  Description of Artificial Sequence: Synthetic oligonucleotide
gcauguauguucuaacugg

SEQ ID NO: 727538 - RNA, 19 nt, Artificial Sequence
  Description of Artificial Sequence: Synthetic oligonucleotide
gauaaggcuacugaaugug

SEQ ID NO: 727539 - RNA, 19 nt, Artificial Sequence
  Description of Artificial Sequence: Synthetic oligonucleotide
acuauacugauacccuccg

SEQ ID NO: 727540 - RNA, 19 nt, Artificial Sequence
  Description of Artificial Sequence: Synthetic oligonucleotide
guagccacuacuguggccg

SEQ ID NO: 727541 - RNA, 19 nt, Artificial Sequence
  Description of Artificial Sequence: Synthetic oligonucleotide
agauacuuuauugcucacc

SEQ ID NO: 727542 - RNA, 19 nt, Artificial Sequence
  Description of Artificial Sequence: Synthetic oligonucleotide
uugccuaaagcaaacuaac

SEQ ID NO: 727543 - RNA, 19 nt, Artificial Sequence
  Description of Artificial Sequence: Synthetic oligonucleotide
uguauguucuaacuggauu

SEQ ID NO: 727544 - RNA, 19 nt, Artificial Sequence
  Description of Artificial Sequence: Synthetic oligonucleotide
aaaucuuugacagguccug

SEQ ID NO: 727545 - RNA, 19 nt, Artificial Sequence
  Description of Artificial Sequence: Synthetic oligonucleotide
aguugcuauacuuaacuaa

SEQ ID NO: 727546 - RNA, 19 nt, Artificial Sequence
  Description of Artificial Sequence: Synthetic oligonucleotide
agugccuacagauacuaga

SEQ ID NO: 727547 - RNA, 19 nt, Artificial Sequence
  Description of Artificial Sequence: Synthetic oligonucleotide
ugaaucucgguacccacca

SEQ ID NO: 727548 - RNA, 19 nt, Artificial Sequence
  Description of Artificial Sequence: Synthetic oligonucleotide
aguggcauuaacucgugca

SEQ ID NO: 727549 - RNA, 19 nt, Artificial Sequence
  Description of Artificial Sequence: Synthetic oligonucleotide
uguagccucaacuaguaua

SEQ ID NO: 727550 - RNA, 19 nt, Artificial Sequence
  Description of Artificial Sequence: Synthetic oligonucleotide
auaugguacaguauuccac

SEQ ID NO: 727551 - RNA, 19 nt, Artificial Sequence
  Description of Artificial Sequence: Synthetic oligonucleotide
uagucuacuggucaauuaa

SEQ ID NO: 727552 - RNA, 19 nt, Artificial Sequence
  Description of Artificial Sequence: Synthetic oligonucleotide
gcuauacuuaacuaagugc

SEQ ID NO: 727553 - RNA, 19 nt, Artificial Sequence
  Description of Artificial Sequence: Synthetic oligonucleotide
uggcugguaaaccuuagcu

SEQ ID NO: 727554 - RNA, 19 nt, Artificial Sequence
  Description of Artificial Sequence: Synthetic oligonucleotide
ucgaaugaagaccaacaaa

SEQ ID NO: 727555 - RNA, 19 nt, Artificial Sequence
  Description of Artificial Sequence: Synthetic oligonucleotide
acccagaaugacuauacug

SEQ ID NO: 727556 - RNA, 19 nt, Artificial Sequence
  Description of Artificial Sequence: Synthetic oligonucleotide
ucuagcaaaauagaaguuu

SEQ ID NO: 727557 - RNA, 19 nt, Artificial Sequence
  Description of Artificial Sequence: Synthetic oligonucleotide
gacugaacgcuuuggcugg

SEQ ID NO: 727558 - RNA, 19 nt, Artificial Sequence
  Description of Artificial Sequence: Synthetic oligonucleotide
guaagggauguggagagcg

SEQ ID NO: 727559 - RNA, 19 nt, Artificial Sequence
  Description of Artificial Sequence: Synthetic oligonucleotide
aacacacauagguuguuaa

SEQ ID NO: 727560 - RNA, 19 nt, Artificial Sequence
  Description of Artificial Sequence: Synthetic oligonucleotide
aauguacagauacuuuauu

SEQ ID NO: 727561 - RNA, 19 nt, Artificial Sequence
  Description of Artificial Sequence: Synthetic oligonucleotide
agagagggagaaucgaaug

SEQ ID NO: 727562 - RNA, 19 nt, Artificial Sequence
  Description of Artificial Sequence: Synthetic oligonucleotide
uucuaucuuuucccagugg

SEQ ID NO: 727563 - RNA, 19 nt, Artificial Sequence
  Description of Artificial Sequence: Synthetic oligonucleotide
cuggaaaccugaaucucgg

SEQ ID NO: 727564 - RNA, 19 nt, Artificial Sequence
  Description of Artificial Sequence: Synthetic oligonucleotide
augaagaccaacaaauggu

SEQ ID NO: 727565 - RNA, 19 nt, Artificial Sequence
  Description of Artificial Sequence: Synthetic oligonucleotide
auacccuccguguuggaag

SEQ ID NO: 727566 - RNA, 19 nt, Artificial Sequence
  Description of Artificial Sequence: Synthetic oligonucleotide
agaugagcaacggaaaugu

SEQ ID NO: 727567 - RNA, 19 nt, Artificial Sequence
  Description of Artificial Sequence: Synthetic oligonucleotide
cuuauggacccacugcuug

SEQ ID NO: 727568 - RNA, 19 nt, Artificial Sequence
  Description of Artificial Sequence: Synthetic oligonucleotide
uugguuaauggcuucuauc

SEQ ID NO: 727569 - RNA, 19 nt, Artificial Sequence
  Description of Artificial Sequence: Synthetic oligonucleotide
ucuugccuaaagcaaacua

SEQ ID NO: 727570 - RNA, 19 nt, Artificial Sequence
  Description of Artificial Sequence: Synthetic oligonucleotide
agcaaacuaacuuguauuu

SEQ ID NO: 727571 - RNA, 19 nt, Artificial Sequence
  Description of Artificial Sequence: Synthetic oligonucleotide
guauguucuaacuggauua

SEQ ID NO: 727572 - RNA, 19 nt, Artificial Sequence
  Description of Artificial Sequence: Synthetic oligonucleotide
gauaaagggccuccugcgc

SEQ ID NO: 727573 - RNA, 19 nt, Artificial Sequence
  Description of Artificial Sequence: Synthetic oligonucleotide
acguuugauuagcagcuuc

SEQ ID NO: 727574 - RNA, 19 nt, Artificial Sequence
  Description of Artificial Sequence: Synthetic oligonucleotide
gacuauacugauacccucc

SEQ ID NO: 727575 - RNA, 19 nt, Artificial Sequence
  Description of Artificial Sequence: Synthetic oligonucleotide
caguaagggauguggagag

SEQ ID NO: 727576 - RNA, 19 nt, Artificial Sequence
  Description of Artificial Sequence: Synthetic oligonucleotide
ggagaaucgaaugaagacc

SEQ ID NO: 727577 - RNA, 19 nt, Artificial Sequence
  Description of Artificial Sequence: Synthetic oligonucleotide
aaccugaaucucgguaccc

SEQ ID NO: 727578 - RNA, 19 nt, Artificial Sequence
  Description of Artificial Sequence: Synthetic oligonucleotide
ugcgcugagcaguacuggg

SEQ ID NO: 727579 - RNA, 19 nt, Artificial Sequence
  Description of Artificial Sequence: Synthetic oligonucleotide
ucgaccaccucugucaggc

SEQ ID NO: 727580 - RNA, 19 nt, Artificial Sequence
  Description of Artificial Sequence: Synthetic oligonucleotide
cuugccuaaagcaaacuaa

SEQ ID NO: 727581 - RNA, 19 nt, Artificial Sequence
  Description of Artificial Sequence: Synthetic oligonucleotide
ucguauucauuggcuaugg

SEQ ID NO: 727582 - RNA, 19 nt, Artificial Sequence
  Description of Artificial Sequence: Synthetic oligonucleotide
agagcuaugcuuggagaac

SEQ ID NO: 727583 - RNA, 19 nt, Artificial Sequence
  Description of Artificial Sequence: Synthetic oligonucleotide
aacucgugcauaaaacaga

SEQ ID NO: 727584 - RNA, 19 nt, Artificial Sequence
  Description of Artificial Sequence: Synthetic oligonucleotide
uacuuaacuaagugccuac

SEQ ID NO: 727585 - RNA, 19 nt, Artificial Sequence
  Description of Artificial Sequence: Synthetic oligonucleotide
auguguuaucugcaaaaga

SEQ ID NO: 727586 - RNA, 19 nt, Artificial Sequence
  Description of Artificial Sequence: Synthetic oligonucleotide
ugccuaaagcaaacuaacu

SEQ ID NO: 727587 - RNA, 19 nt, Artificial Sequence
  Description of Artificial Sequence: Synthetic oligonucleotide
uugcuauacuuaacuaagu

SEQ ID NO: 727588 - RNA, 19 nt, Artificial Sequence
  Description of Artificial Sequence: Synthetic oligonucleotide
auacugauacccuccgugu

SEQ ID NO: 727589 - RNA, 19 nt, Artificial Sequence
  Description of Artificial Sequence: Synthetic oligonucleotide
  modified_base (6)..(6): a, c, u, g, unknown or other
uuggunuuuguuccucuuc

SEQ ID NO: 727590 - RNA, 19 nt, Artificial Sequence
  Description of Artificial Sequence: Synthetic oligonucleotide
uugaaaacaugagaacuau

SEQ ID NO: 727591 - RNA, 19 nt, Artificial Sequence
  Description of Artificial Sequence: Synthetic oligonucleotide
aaggguucccagcaguaaa

SEQ ID NO: 727592 - RNA, 19 nt, Artificial Sequence
  Description of Artificial Sequence: Synthetic oligonucleotide
aaggcuacugaauguguua

SEQ ID NO: 727593 - RNA, 19 nt, Artificial Sequence
  Description of Artificial Sequence: Synthetic oligonucleotide
acaaaacccggcagcaggc

SEQ ID NO: 727594 - RNA, 19 nt, Artificial Sequence
  Description of Artificial Sequence: Synthetic oligonucleotide
aucgaaugaagaccaacaa

SEQ ID NO: 727595 - RNA, 19 nt, Artificial Sequence
  Description of Artificial Sequence: Synthetic oligonucleotide
gaaccaacccaacaggucu

SEQ ID NO: 727596 - RNA, 19 nt, Artificial Sequence
  Description of Artificial Sequence: Synthetic oligonucleotide
uucguauucauuggcuaug

SEQ ID NO: 727597 - RNA, 19 nt, Artificial Sequence
  Description of Artificial Sequence: Synthetic oligonucleotide
gaaucgaaugaagaccaac

SEQ ID NO: 727598 - RNA, 19 nt, Artificial Sequence
  Description of Artificial Sequence: Synthetic oligonucleotide
agauguuuggaaaccacca

SEQ ID NO: 727599 - RNA, 19 nt, Artificial Sequence
  Description of Artificial Sequence: Synthetic oligonucleotide
uguagugcacuuccaucac

SEQ ID NO: 727600 - RNA, 19 nt, Artificial Sequence
  Description of Artificial Sequence: Synthetic oligonucleotide
gacaagacugaacgcuuug

SEQ ID NO: 727601 - RNA, 19 nt, Artificial Sequence
  Description of Artificial Sequence: Synthetic oligonucleotide
ugacuauacugauacccuc

SEQ ID NO: 727602 - RNA, 19 nt, Artificial Sequence
  Description of Artificial Sequence: Synthetic oligonucleotide
acaagacugaacgcuuugg

SEQ ID NO: 727603 - RNA, 19 nt, Artificial Sequence
  Description of Artificial Sequence: Synthetic oligonucleotide
uccguguuggaagugcugc

SEQ ID NO: 727604 - RNA, 19 nt, Artificial Sequence
  Description of Artificial Sequence: Synthetic oligonucleotide
uuggcugguaaaccuuagc

SEQ ID NO: 727605 - RNA, 19 nt, Artificial Sequence
  Description of Artificial Sequence: Synthetic oligonucleotide
uaaagcaaacuaacuugua

SEQ ID NO: 727606 - RNA, 19 nt, Artificial Sequence
  Description of Artificial Sequence: Synthetic oligonucleotide
gaaugacuauacugauacc

SEQ ID NO: 727607 - RNA, 19 nt, Artificial Sequence
  Description of Artificial Sequence: Synthetic oligonucleotide
uuuguuucggauggaugca

SEQ ID NO: 727608 - RNA, 19 nt, Artificial Sequence
  Description of Artificial Sequence: Synthetic oligonucleotide
uccaaacguuugauuagca

SEQ ID NO: 727609 - RNA, 19 nt, Artificial Sequence
  Description of Artificial Sequence: Synthetic oligonucleotide
aguguuauguaaaacuguu

SEQ ID NO: 727610 - RNA, 19 nt, Artificial Sequence
  Description of Artificial Sequence: Synthetic oligonucleotide
gucuacuggucaauuaaag

SEQ ID NO: 727611 - RNA, 19 nt, Artificial Sequence
  Description of Artificial Sequence: Synthetic oligonucleotide
cugaaucucgguacccacc

SEQ ID NO: 727612 - RNA, 19 nt, Artificial Sequence
  Description of Artificial Sequence: Synthetic oligonucleotide
uuagucuacuggucaauua

SEQ ID NO: 727613 - RNA, 19 nt, Artificial Sequence
  Description of Artificial Sequence: Synthetic oligonucleotide
gguacaguauuccaccaac

SEQ ID NO: 727614 - RNA, 19 nt, Artificial Sequence
  Description of Artificial Sequence: Synthetic oligonucleotide
cacauagguuguuaauaug

SEQ ID NO: 727615 - RNA, 19 nt, Artificial Sequence
  Description of Artificial Sequence: Synthetic oligonucleotide
caucuguccagccuccuug

SEQ ID NO: 727616 - RNA, 19 nt, Artificial Sequence
  Description of Artificial Sequence: Synthetic oligonucleotide
gucccaagcagguguaugc

SEQ ID NO: 727617 - RNA, 19 nt, Artificial Sequence
  Description of Artificial Sequence: Synthetic oligonucleotide
cauaugguacaguauucca

SEQ ID NO: 727618 - RNA, 19 nt, Artificial Sequence
  Description of Artificial Sequence: Synthetic oligonucleotide
ccugauacccacuuccugc

SEQ ID NO: 727619 - RNA, 19 nt, Artificial Sequence
  Description of Artificial Sequence: Synthetic oligonucleotide
guaauaggaaccaacccaa

SEQ ID NO: 727620 - RNA, 19 nt, Artificial Sequence
  Description of Artificial Sequence: Synthetic oligonucleotide
acccacuuccugcauauga

SEQ ID NO: 727621 - RNA, 19 nt, Artificial Sequence
  Description of Artificial Sequence: Synthetic oligonucleotide
cuucuaucuuuucccagug

SEQ ID NO: 727622 - RNA, 19 nt, Artificial Sequence
  Description of Artificial Sequence: Synthetic oligonucleotide
cuauuacuugagcucuagc

SEQ ID NO: 727623 - RNA, 19 nt, Artificial Sequence
  Description of Artificial Sequence: Synthetic oligonucleotide
uguauuugcuugagccagu

SEQ ID NO: 727624 - RNA, 19 nt, Artificial Sequence
  Description of Artificial Sequence: Synthetic oligonucleotide
uuauggacccacugcuugu

SEQ ID NO: 727625 - RNA, 19 nt, Artificial Sequence
  Description of Artificial Sequence: Synthetic oligonucleotide
aagagagggagaaucgaau

SEQ ID NO: 727626 - RNA, 19 nt, Artificial Sequence
  Description of Artificial Sequence: Synthetic oligonucleotide
acuucguauucauuggcua

SEQ ID NO: 727627 - RNA, 19 nt, Artificial Sequence
  Description of Artificial Sequence: Synthetic oligonucleotide
uuauggauuuuggccaugu

SEQ ID NO: 727628 - RNA, 19 nt, Artificial Sequence
  Description of Artificial Sequence: Synthetic oligonucleotide
aaaacccggcagcaggcau

SEQ ID NO: 727629 - RNA, 19 nt, Artificial Sequence
  Description of Artificial Sequence: Synthetic oligonucleotide
ucaauaccuuauugauggc

SEQ ID NO: 727630 - RNA, 19 nt, Artificial Sequence
  Description of Artificial Sequence: Synthetic oligonucleotide
guagccaccaggcuggaaa

SEQ ID NO: 727631 - RNA, 19 nt, Artificial Sequence
  Description of Artificial Sequence: Synthetic oligonucleotide
aguaagggauguggagagc

SEQ ID NO: 727632 - RNA, 19 nt, Artificial Sequence
  Description of Artificial Sequence: Synthetic oligonucleotide
gauuagcagcuuccuccgg

SEQ ID NO: 727633 - RNA, 19 nt, Artificial Sequence
  Description of Artificial Sequence: Synthetic oligonucleotide
cuacagauacuagaguuca

SEQ ID NO: 727634 - RNA, 19 nt, Artificial Sequence
  Description of Artificial Sequence: Synthetic oligonucleotide
augacuauacugauacccu

SEQ ID NO: 727635 - RNA, 19 nt, Artificial Sequence
  Description of Artificial Sequence: Synthetic oligonucleotide
guuaccuuuaggagacaag

SEQ ID NO: 727636 - RNA, 19 nt, Artificial Sequence
  Description of Artificial Sequence: Synthetic oligonucleotide
uaaagggccuccugcgcug

SEQ ID NO: 727637 - RNA, 19 nt, Artificial Sequence
  Description of Artificial Sequence: Synthetic oligonucleotide
cuggauuagucuacugguc

SEQ ID NO: 727638 - RNA, 19 nt, Artificial Sequence
  Description of Artificial Sequence: Synthetic oligonucleotide
uaacuggauuagucuacug

SEQ ID NO: 727639 - RNA, 19 nt, Artificial Sequence
  Description of Artificial Sequence: Synthetic oligonucleotide
uguuaccuuuaggagacaa

SEQ ID NO: 727640 - RNA, 19 nt, Artificial Sequence
  Description of Artificial Sequence: Synthetic oligonucleotide
auaccuuauugauggcaca

SEQ ID NO: 727641 - RNA, 19 nt, Artificial Sequence
  Description of Artificial Sequence: Synthetic oligonucleotide
aacccggcagcaggcaugg

SEQ ID NO: 727642 - RNA, 19 nt, Artificial Sequence
  Description of Artificial Sequence: Synthetic oligonucleotide
acugaauguguuaucugca

SEQ ID NO: 727643 - RNA, 19 nt, Artificial Sequence
  Description of Artificial Sequence: Synthetic oligonucleotide
acgcuuuggcugguaaacc

SEQ ID NO: 727644 - RNA, 19 nt, Artificial Sequence
  Description of Artificial Sequence: Synthetic oligonucleotide
cugauacccuccguguugg

SEQ ID NO: 727645 - RNA, 19 nt, Artificial Sequence
  Description of Artificial Sequence: Synthetic oligonucleotide
caccucucacaccaaacac

SEQ ID NO: 727646 - RNA, 19 nt, Artificial Sequence
  Description of Artificial Sequence: Synthetic oligonucleotide
ccggacuucguauucauug

SEQ ID NO: 727647 - RNA, 19 nt, Artificial Sequence
  Description of Artificial Sequence: Synthetic oligonucleotide
acacacauagguuguuaau

SEQ ID NO: 727648 - RNA, 19 nt, Artificial Sequence
  Description of Artificial Sequence: Synthetic oligonucleotide
uuucucuuauggacccacu

SEQ ID NO: 727649 - RNA, 19 nt, Artificial Sequence
  Description of Artificial Sequence: Synthetic oligonucleotide
ucacaacuuaaguuugcuu

SEQ ID NO: 727650 - RNA, 19 nt, Artificial Sequence
  Description of Artificial Sequence: Synthetic oligonucleotide
aaacacacauagguuguua

SEQ ID NO: 727651 - RNA, 19 nt, Artificial Sequence
  Description of Artificial Sequence: Synthetic oligonucleotide
uuuuccuagaaaggagaua

SEQ ID NO: 727652 - RNA, 19 nt, Artificial Sequence
  Description of Artificial Sequence: Synthetic oligonucleotide
cugacucuuagcucuguca

SEQ ID NO: 727653 - RNA, 19 nt, Artificial Sequence
  Description of Artificial Sequence: Synthetic oligonucleotide
aaaggguucccagcaguaa

SEQ ID NO: 727654 - RNA, 19 nt, Artificial Sequence
  Description of Artificial Sequence: Synthetic oligonucleotide
augagcaacggaaauguua

SEQ ID NO: 727655 - RNA, 19 nt, Artificial Sequence
  Description of Artificial Sequence: Synthetic oligonucleotide
uccugcgcugagcaguacu

SEQ ID NO: 727656 - RNA, 19 nt, Artificial Sequence
  Description of Artificial Sequence: Synthetic oligonucleotide
ugucccaagcagguguaug

SEQ ID NO: 727657 - RNA, 19 nt, Artificial Sequence
  Description of Artificial Sequence: Synthetic oligonucleotide
ccaaacguuugauuagcag

SEQ ID NO: 727658 - RNA, 19 nt, Artificial Sequence
  Description of Artificial Sequence: Synthetic oligonucleotide
uugacagguccugucuagc

SEQ ID NO: 727659 - RNA, 19 nt, Artificial Sequence
  Description of Artificial Sequence: Synthetic oligonucleotide
uacugauacccuccguguu

SEQ ID NO: 727660 - RNA, 19 nt, Artificial Sequence
  Description of Artificial Sequence: Synthetic oligonucleotide
acucgugcauaaaacagau

SEQ ID NO: 727661 - RNA, 19 nt, Artificial Sequence
  Description of Artificial Sequence: Synthetic oligonucleotide
ggaggaacuuuuguuucgg

SEQ ID NO: 727662 - RNA, 19 nt, Artificial Sequence
  Description of Artificial Sequence: Synthetic oligonucleotide
auugggucgaccaccucug

SEQ ID NO: 727663 - RNA, 19 nt, Artificial Sequence
  Description of Artificial Sequence: Synthetic oligonucleotide
aacuaagugccuacagaua

SEQ ID NO: 727664 - RNA, 19 nt, Artificial Sequence
  Description of Artificial Sequence: Synthetic oligonucleotide
ucccaagcagguguaugcc

SEQ ID NO: 727665 - RNA, 19 nt, Artificial Sequence
  Description of Artificial Sequence: Synthetic oligonucleotide
ggacuucguauucauuggc

SEQ ID NO: 727666 - RNA, 19 nt, Artificial Sequence
  Description of Artificial Sequence: Synthetic oligonucleotide
aaaggacuguacagugaca

SEQ ID NO: 727667 - RNA, 19 nt, Artificial Sequence
  Description of Artificial Sequence: Synthetic oligonucleotide
cucacaccaaacacaccuc

SEQ ID NO: 727668 - RNA, 19 nt, Artificial Sequence
  Description of Artificial Sequence: Synthetic oligonucleotide
auaaggcuacugaaugugu

SEQ ID NO: 727669 - RNA, 19 nt, Artificial Sequence
  Description of Artificial Sequence: Synthetic oligonucleotide
accuugguagccacuacug

SEQ ID NO: 727670 - RNA, 19 nt, Artificial Sequence
  Description of Artificial Sequence: Synthetic oligonucleotide
gauacccacuuccugcaua

SEQ ID NO: 727671 - RNA, 19 nt, Artificial Sequence
  Description of Artificial Sequence: Synthetic oligonucleotide
caagguugaaggaggaacu

SEQ ID NO: 727672 - RNA, 19 nt, Artificial Sequence
  Description of Artificial Sequence: Synthetic oligonucleotide
cucuuagcucugucagacc

SEQ ID NO: 727673 - RNA, 19 nt, Artificial Sequence
  Description of Artificial Sequence: Synthetic oligonucleotide
auuagucuacuggucaauu

SEQ ID NO: 727674 - RNA, 19 nt, Artificial Sequence
  Description of Artificial Sequence: Synthetic oligonucleotide
guguuggaagugcugcuca

SEQ ID NO: 727675 - RNA, 19 nt, Artificial Sequence
  Description of Artificial Sequence: Synthetic oligonucleotide
cguuugauuagcagcuucc

SEQ ID NO: 727676 - RNA, 19 nt, Artificial Sequence
  Description of Artificial Sequence: Synthetic oligonucleotide
gucacaaagcugugugaca

SEQ ID NO: 727677 - RNA, 19 nt, Artificial Sequence
  Description of Artificial Sequence: Synthetic oligonucleotide
aagugccuacagauacuag

SEQ ID NO: 727678 - RNA, 19 nt, Artificial Sequence
  Description of Artificial Sequence: Synthetic oligonucleotide
cacacauagguuguuaaua

SEQ ID NO: 727679 - RNA, 19 nt, Artificial Sequence
  Description of Artificial Sequence: Synthetic oligonucleotide
uacccuccguguuggaagu

SEQ ID NO: 727680 - RNA, 19 nt, Artificial Sequence
  Description of Artificial Sequence: Synthetic oligonucleotide
agcuaugcuuggagaacac

SEQ ID NO: 727681 - RNA, 19 nt, Artificial Sequence
  Description of Artificial Sequence: Synthetic oligonucleotide
gcaaacuaacuuguauuug

SEQ ID NO: 727682 - RNA, 19 nt, Artificial Sequence
  Description of Artificial Sequence: Synthetic oligonucleotide
cucuuauggacccacugcu

SEQ ID NO: 727683 - RNA, 19 nt, Artificial Sequence
  Description of Artificial Sequence: Synthetic oligonucleotide
gguaucuauuguccugcug

SEQ ID NO: 727684 - RNA, 19 nt, Artificial Sequence
  Description of Artificial Sequence: Synthetic oligonucleotide
caacaaaugguugucccaa

SEQ ID NO: 727685 - RNA, 19 nt, Artificial Sequence
  Description of Artificial Sequence: Synthetic oligonucleotide
cacaucagaaagauaguau

SEQ ID NO: 727686 - RNA, 19 nt, Artificial Sequence
  Description of Artificial Sequence: Synthetic oligonucleotide
guauaaugucucccuuguc

SEQ ID NO: 727687 - RNA, 19 nt, Artificial Sequence
  Description of Artificial Sequence: Synthetic oligonucleotide
uauccaccgcccugauacc

SEQ ID NO: 727688 - RNA, 19 nt, Artificial Sequence
  Description of Artificial Sequence: Synthetic oligonucleotide
gaggaacuuuuguuucgga

SEQ ID NO: 727689 - RNA, 19 nt, Artificial Sequence
  Description of Artificial Sequence: Synthetic oligonucleotide
ccugauugcugcuggggcc

SEQ ID NO: 727690 - RNA, 19 nt, Artificial Sequence
  Description of Artificial Sequence: Synthetic oligonucleotide
ugguaucuauuguccugcu

SEQ ID NO: 727691 - RNA, 19 nt, Artificial Sequence
  Description of Artificial Sequence: Synthetic oligonucleotide
ggucugacuuuguagugca

SEQ ID NO: 727692 - RNA, 19 nt, Artificial Sequence
  Description of Artificial Sequence: Synthetic oligonucleotide
uauggacccacugcuuguc

SEQ ID NO: 727693 - RNA, 19 nt, Artificial Sequence
  Description of Artificial Sequence: Synthetic oligonucleotide
ggcaaauccucauuuucaa

SEQ ID NO: 727694 - RNA, 19 nt, Artificial Sequence
  Description of Artificial Sequence: Synthetic oligonucleotide
ugggucgaccaccucuguc

SEQ ID NO: 727695 - RNA, 19 nt, Artificial Sequence
  Description of Artificial Sequence: Synthetic oligonucleotide
  modified_base (9)..(9): a, c, u, g, unknown or other
uccuuggunuuuguuccuc

SEQ ID NO: 727696 - RNA, 19 nt, Artificial Sequence
  Description of Artificial Sequence: Synthetic oligonucleotide
aggcuacugaauguguuau

SEQ ID NO: 727697 - RNA, 19 nt, Artificial Sequence
  Description of Artificial Sequence: Synthetic oligonucleotide
aauugccuuuaaaguuugu

SEQ ID NO: 727698 - RNA, 19 nt, Artificial Sequence
  Description of Artificial Sequence: Synthetic oligonucleotide
caacaggauaaggcuacug

SEQ ID NO: 727699 - RNA, 19 nt, Artificial Sequence
  Description of Artificial Sequence: Synthetic oligonucleotide
uggcauuaacucgugcaua

SEQ ID NO: 727700 - RNA, 19 nt, Artificial Sequence
  Description of Artificial Sequence: Synthetic oligonucleotide
uccugcauaugaagauguu

SEQ ID NO: 727701 - RNA, 19 nt, Artificial Sequence
  Description of Artificial Sequence: Synthetic oligonucleotide
ggugguaagucuggcuucc

SEQ ID NO: 727702 - RNA, 19 nt, Artificial Sequence
  Description of Artificial Sequence: Synthetic oligonucleotide
gcaggucuguuugaguugc

SEQ ID NO: 727703 - RNA, 19 nt, Artificial Sequence
  Description of Artificial Sequence: Synthetic oligonucleotide
gauacccuccguguuggaa

SEQ ID NO: 727704 - RNA, 19 nt, Artificial Sequence
  Description of Artificial Sequence: Synthetic oligonucleotide
aacguuugauuagcagcuu

SEQ ID NO: 727705 - RNA, 19 nt, Artificial Sequence
  Description of Artificial Sequence: Synthetic oligonucleotide
auguucuaacuggauuagu

SEQ ID NO: 727706 - RNA, 19 nt, Artificial Sequence
  Description of Artificial Sequence: Synthetic oligonucleotide
cuccguguuggaagugcug

SEQ ID NO: 727707 - RNA, 19 nt, Artificial Sequence
  Description of Artificial Sequence: Synthetic oligonucleotide
ggauuagucuacuggucaa

SEQ ID NO: 727708 - RNA, 19 nt, Artificial Sequence
  Description of Artificial Sequence: Synthetic oligonucleotide
gguugucccaagcaggugu

SEQ ID NO: 727709 - RNA, 19 nt, Artificial Sequence
  Description of Artificial Sequence: Synthetic oligonucleotide
caguggcauuaacucgugc

SEQ ID NO: 727710 - RNA, 19 nt, Artificial Sequence
  Description of Artificial Sequence: Synthetic oligonucleotide
aacacaccuccagccauuu

SEQ ID NO: 727711 - RNA, 19 nt, Artificial Sequence
  Description of Artificial Sequence: Synthetic oligonucleotide
cggacuucguauucauugg

SEQ ID NO: 727712 - RNA, 19 nt, Artificial Sequence
  Description of Artificial Sequence: Synthetic oligonucleotide
cuucguauucauuggcuau

SEQ ID NO: 727713 - RNA, 19 nt, Artificial Sequence
  Description of Artificial Sequence: Synthetic oligonucleotide
gucgaccaccucugucagg

SEQ ID NO: 727714 - RNA, 19 nt, Artificial Sequence
  Description of Artificial Sequence: Synthetic oligonucleotide
guggcauuaacucgugcau

SEQ ID NO: 727715 - RNA, 19 nt, Artificial Sequence
  Description of Artificial Sequence: Synthetic oligonucleotide
cagcuugacaguguuuaca

SEQ ID NO: 727716 - RNA, 19 nt, Artificial Sequence
  Description of Artificial Sequence: Synthetic oligonucleotide
ggucgaccaccucugucag

SEQ ID NO: 727717 - RNA, 19 nt, Artificial Sequence
  Description of Artificial Sequence: Synthetic oligonucleotide
cuuuguagugcacuuccau

SEQ ID NO: 727718 - RNA, 19 nt, Artificial Sequence
  Description of Artificial Sequence: Synthetic oligonucleotide
auguauguucuaacuggau

SEQ ID NO: 727719 - RNA, 19 nt, Artificial Sequence
  Description of Artificial Sequence: Synthetic oligonucleotide
ggauaaggcuacugaaugu

SEQ ID NO: 727720 - RNA, 19 nt, Artificial Sequence
  Description of Artificial Sequence: Synthetic oligonucleotide
uugggucgaccaccucugu

SEQ ID NO: 727721 - RNA, 19 nt, Artificial Sequence
  Description of Artificial Sequence: Synthetic oligonucleotide
uccggacuucguauucauu

SEQ ID NO: 727722 - RNA, 19 nt, Artificial Sequence
  Description of Artificial Sequence: Synthetic oligonucleotide
  modified_base (4)..(4): a, c, u, g, unknown or other
ggunuuuguuccucuuccu

SEQ ID NO: 727723 - RNA, 19 nt, Artificial Sequence
  Description of Artificial Sequence: Synthetic oligonucleotide
gauuagucuacuggucaau

SEQ ID NO: 727724 - RNA, 19 nt, Artificial Sequence
  Description of Artificial Sequence: Synthetic oligonucleotide
ucccaucggcuucuucaau

SEQ ID NO: 727725 - RNA, 19 nt, Artificial Sequence
  Description of Artificial Sequence: Synthetic oligonucleotide
ccaacaaaugguuguccca

SEQ ID NO: 727726 - RNA, 19 nt, Artificial Sequence
  Description of Artificial Sequence: Synthetic oligonucleotide
aaucaggggcagagcuaug

SEQ ID NO: 727727 - RNA, 19 nt, Artificial Sequence
  Description of Artificial Sequence: Synthetic oligonucleotide
ugauacccuccguguugga

SEQ ID NO: 727728 - RNA, 19 nt, Artificial Sequence
  Description of Artificial Sequence: Synthetic oligonucleotide
gcacccugcccaucaauac

SEQ ID NO: 727729 - RNA, 19 nt, Artificial Sequence
  Description of Artificial Sequence: Synthetic oligonucleotide
ugcuugagccaguggcauu

SEQ ID NO: 727730 - RNA, 19 nt, Artificial Sequence
  Description of Artificial Sequence: Synthetic oligonucleotide
agacaagacugaacgcuuu

SEQ ID NO: 727731 - RNA, 19 nt, Artificial Sequence
  Description of Artificial Sequence: Synthetic oligonucleotide
cuaacuggauuagucuacu

SEQ ID NO: 727732 - RNA, 19 nt, Artificial Sequence
  Description of Artificial Sequence: Synthetic oligonucleotide
cuaguauaaugucucccuu

SEQ ID NO: 727733 - RNA, 19 nt, Artificial Sequence
  Description of Artificial Sequence: Synthetic oligonucleotide
gagacaagacugaacgcuu

SEQ ID NO: 727734 - RNA, 19 nt, Artificial Sequence
  Description of Artificial Sequence: Synthetic oligonucleotide
cacuacuguggccgccaug

SEQ ID NO: 727735 - RNA, 19 nt, Artificial Sequence
  Description of Artificial Sequence: Synthetic oligonucleotide
ggcuacugaauguguuauc

SEQ ID NO: 727736 - RNA, 19 nt, Artificial Sequence
  Description of Artificial Sequence: Synthetic oligonucleotide
aucuauuguccugcuggua

SEQ ID NO: 727737 - RNA, 19 nt, Artificial Sequence
  Description of Artificial Sequence: Synthetic oligonucleotide
gguguaugccugccaccug

SEQ ID NO: 727738 - RNA, 19 nt, Artificial Sequence
  Description of Artificial Sequence: Synthetic oligonucleotide
ccaaacacaccuccagcca

SEQ ID NO: 727739 - RNA, 19 nt, Artificial Sequence
  Description of Artificial Sequence: Synthetic oligonucleotide
caaucaggggcagagcuau

SEQ ID NO: 727740 - RNA, 19 nt, Artificial Sequence
  Description of Artificial Sequence: Synthetic oligonucleotide
aggcacccugcccaucaau

SEQ ID NO: 727741 - RNA, 19 nt, Artificial Sequence
  Description of Artificial Sequence: Synthetic oligonucleotide
ggaaaccaccauagccacc

SEQ ID NO: 727742 - RNA, 19 nt, Artificial Sequence
  Description of Artificial Sequence: Synthetic oligonucleotide
caaaacccggcagcaggca

SEQ ID NO: 727743 - RNA, 19 nt, Artificial Sequence
  Description of Artificial Sequence: Synthetic oligonucleotide
accuguggucuuacauuca

SEQ ID NO: 727744 - RNA, 19 nt, Artificial Sequence
  Description of Artificial Sequence: Synthetic oligonucleotide
cccugauacccacuuccug

SEQ ID NO: 727745 - RNA, 19 nt, Artificial Sequence
  Description of Artificial Sequence: Synthetic oligonucleotide
ggauguggagagcgacuca

SEQ ID NO: 727746 - RNA, 19 nt, Artificial Sequence
  Description of Artificial Sequence: Synthetic oligonucleotide
cucuuguaauaggaaccaa

SEQ ID NO: 727747 - RNA, 19 nt, Artificial Sequence
  Description of Artificial Sequence: Synthetic oligonucleotide
cguauucauuggcuauggc

SEQ ID NO: 727748 - RNA, 19 nt, Artificial Sequence
  Description of Artificial Sequence: Synthetic oligonucleotide
gcuugagccaguggcauua

SEQ ID NO: 727749 - RNA, 19 nt, Artificial Sequence
  Description of Artificial Sequence: Synthetic oligonucleotide
ccaguggcauuaacucgug

SEQ ID NO: 727750 - RNA, 19 nt, Artificial Sequence
  Description of Artificial Sequence: Synthetic oligonucleotide
cccuccguguuggaagugc

SEQ ID NO: 727751 - RNA, 19 nt, Artificial Sequence
  Description of Artificial Sequence: Synthetic oligonucleotide
gcugugugacaaaaccucu

SEQ ID NO: 727752 - RNA, 19 nt, Artificial Sequence
  Description of Artificial Sequence: Synthetic oligonucleotide
cccaucggcuucuucaaua

SEQ ID NO: 727753 - RNA, 19 nt, Artificial Sequence
  Description of Artificial Sequence: Synthetic oligonucleotide
ccuccccuaaccaccucuc

SEQ ID NO: 727754 - RNA, 19 nt, Artificial Sequence
  Description of Artificial Sequence: Synthetic oligonucleotide
gacccacugcuuguccuua

SEQ ID NO: 727755 - RNA, 19 nt, Artificial Sequence
  Description of Artificial Sequence: Synthetic oligonucleotide
gaggagcauaugguacagu

SEQ ID NO: 727756 - RNA, 19 nt, Artificial Sequence
  Description of Artificial Sequence: Synthetic oligonucleotide
cugccaccuguggucuuac

SEQ ID NO: 727757 - RNA, 19 nt, Artificial Sequence
  Description of Artificial Sequence: Synthetic oligonucleotide
ggagagcgacucagccagg

SEQ ID NO: 727758 - RNA, 19 nt, Artificial Sequence
  Description of Artificial Sequence: Synthetic oligonucleotide
acccuccguguuggaagug

SEQ ID NO: 727759 - RNA, 19 nt, Artificial Sequence
  Description of Artificial Sequence: Synthetic oligonucleotide
cuugagccaguggcauuaa

SEQ ID NO: 727760 - RNA, 19 nt, Artificial Sequence
  Description of Artificial Sequence: Synthetic oligonucleotide
  modified_base (8)..(8): a, c, u, g, unknown or other
ccuuggunuuuguuccucu

SEQ ID NO: 727761 - RNA, 19 nt, Artificial Sequence
  Description of Artificial Sequence: Synthetic oligonucleotide
cucgugcauaaaacagauu

SEQ ID NO: 727762 - RNA, 19 nt, Artificial Sequence
  Description of Artificial Sequence: Synthetic oligonucleotide
ccugcauaugaagauguuu

SEQ ID NO: 727763 - RNA, 19 nt, Artificial Sequence
  Description of Artificial Sequence: Synthetic oligonucleotide
gguggagguucaauuucau

SEQ ID NO: 727764 - RNA, 19 nt, Artificial Sequence
  Description of Artificial Sequence: Synthetic oligonucleotide
ccuccggacuucguauuca

SEQ ID NO: 727765 - RNA, 19 nt, Artificial Sequence
  Description of Artificial Sequence: Synthetic oligonucleotide
gcuuuggcugguaaaccuu

SEQ ID NO: 727766 - RNA, 19 nt, Artificial Sequence
  Description of Artificial Sequence: Synthetic oligonucleotide
caggcacccugcccaucaa

SEQ ID NO: 727767 - RNA, 19 nt, Artificial Sequence
  Description of Artificial Sequence: Synthetic oligonucleotide
caccgcccugauacccacu

SEQ ID NO: 727768 - RNA, 19 nt, Artificial Sequence
  Description of Artificial Sequence: Synthetic oligonucleotide
ccacuacuguggccgccau

SEQ ID NO: 727769 - RNA, 19 nt, Artificial Sequence
  Description of Artificial Sequence: Synthetic oligonucleotide
gccugccaccuguggucuu

SEQ ID NO: 727770 - RNA, 19 nt, Artificial Sequence
  Description of Artificial Sequence: Synthetic oligonucleotide
aauguaaccccuuaaguca

SEQ ID NO: 727771 - RNA, 19 nt, Artificial Sequence
  Description of Artificial Sequence: Synthetic oligonucleotide
aaccccuuaagucagagga

SEQ ID NO: 727772 - RNA, 19 nt, Artificial Sequence
  Description of Artificial Sequence: Synthetic oligonucleotide
ugagaugugcaugugaagg

SEQ ID NO: 727773 - RNA, 19 nt, Artificial Sequence
  Description of Artificial Sequence: Synthetic oligonucleotide
gaaaagggcacucauuggc

SEQ ID NO: 727774 - RNA, 19 nt, Artificial Sequence
  Description of Artificial Sequence: Synthetic oligonucleotide
guguguugcaguuuuaggg

SEQ ID NO: 727775 - RNA, 19 nt, Artificial Sequence
  Description of Artificial Sequence: Synthetic oligonucleotide
aaugacacaacaaacacuu

SEQ ID NO: 727776 - RNA, 19 nt, Artificial Sequence
  Description of Artificial Sequence: Synthetic oligonucleotide
aacaugacuagacacuagu

SEQ ID NO: 727777 - RNA, 19 nt, Artificial Sequence
  Description of Artificial Sequence: Synthetic oligonucleotide
ucucauaccgauccccucg

SEQ ID NO: 727778 - RNA, 19 nt, Artificial Sequence
  Description of Artificial Sequence: Synthetic oligonucleotide
aacaugucucucgaagucc

SEQ ID NO: 727779 - RNA, 19 nt, Artificial Sequence
  Description of Artificial Sequence: Synthetic oligonucleotide
agcacauagucccggaagc

SEQ ID NO: 727780 - RNA, 19 nt, Artificial Sequence
  Description of Artificial Sequence: Synthetic oligonucleotide
uccggaaugggcuucuugg

SEQ ID NO: 727781 - RNA, 19 nt, Artificial Sequence
  Description of Artificial Sequence: Synthetic oligonucleotide
aucagcagaagguucauug

SEQ ID NO: 727782 - RNA, 19 nt, Artificial Sequence
  Description of Artificial Sequence: Synthetic oligonucleotide
uugguacaagcucugcugg

SEQ ID NO: 727783 - RNA, 19 nt, Artificial Sequence
  Description of Artificial Sequence: Synthetic oligonucleotide
aguuuuagggugcuaagca

SEQ ID NO: 727784 - RNA, 19 nt, Artificial Sequence
  Description of Artificial Sequence: Synthetic oligonucleotide
guuauagcgcuucugggag

SEQ ID NO: 727785 - RNA, 19 nt, Artificial Sequence
  Description of Artificial Sequence: Synthetic oligonucleotide
gaagcuucccaauguaacc

SEQ ID NO: 727786 - RNA, 19 nt, Artificial Sequence
  Description of Artificial Sequence: Synthetic oligonucleotide
uugguuacuucacuggcca

SEQ ID NO: 727787 - RNA, 19 nt, Artificial Sequence
  Description of Artificial Sequence: Synthetic oligonucleotide
gagacuagaguccaggcuc

SEQ ID NO: 727788 - RNA, 19 nt, Artificial Sequence
  Description of Artificial Sequence: Synthetic oligonucleotide
guuagugcgggaaugaaug

SEQ ID NO: 727789 - RNA, 19 nt, Artificial Sequence
  Description of Artificial Sequence: Synthetic oligonucleotide
aguuauagcgcuucuggga

SEQ ID NO: 727790 - RNA, 19 nt, Artificial Sequence
  Description of Artificial Sequence: Synthetic oligonucleotide
acaugcugggcccaggcgg

SEQ ID NO: 727791 - RNA, 19 nt, Artificial Sequence
  Description of Artificial Sequence: Synthetic oligonucleotide
uccauuagguuagugcggg

SEQ ID NO: 727792 - RNA, 19 nt, Artificial Sequence
  Description of Artificial Sequence: Synthetic oligonucleotide
cagaucaaaaguccgaguc

SEQ ID NO: 727793 - RNA, 19 nt, Artificial Sequence
  Description of Artificial Sequence: Synthetic oligonucleotide
uuugggguaggcuaccugu

SEQ ID NO: 727794 - RNA, 19 nt, Artificial Sequence
  Description of Artificial Sequence: Synthetic oligonucleotide
augacuagacacuaguaaa

SEQ ID NO: 727795 - RNA, 19 nt, Artificial Sequence
  Description of Artificial Sequence: Synthetic oligonucleotide
ugacuagacacuaguaaaa

SEQ ID NO: 727796 - RNA, 19 nt, Artificial Sequence
  Description of Artificial Sequence: Synthetic oligonucleotide
uauguuugggguaggcuac

SEQ ID NO: 727797 - RNA, 19 nt, Artificial Sequence
  Description of Artificial Sequence: Synthetic oligonucleotide
ugcgggaaugaauggaucc

SEQ ID NO: 727798 - RNA, 19 nt, Artificial Sequence
  Description of Artificial Sequence: Synthetic oligonucleotide
uuuagggugcuaagcagga

SEQ ID NO: 727799 - RNA, 19 nt, Artificial Sequence
  Description of Artificial Sequence: Synthetic oligonucleotide
ugaggucaaaagccaaacc

SEQ ID NO: 727800 - RNA, 19 nt, Artificial Sequence
  Description of Artificial Sequence: Synthetic oligonucleotide
guuuuagggugcuaagcag

SEQ ID NO: 727801 - RNA, 19 nt, Artificial Sequence
  Description of Artificial Sequence: Synthetic oligonucleotide
auaccgauccccucgaccu

SEQ ID NO: 727802 - RNA, 19 nt, Artificial Sequence
  Description of Artificial Sequence: Synthetic oligonucleotide
ugagagcgccagaaaaggg

SEQ ID NO: 727803 - RNA, 19 nt, Artificial Sequence
  Description of Artificial Sequence: Synthetic oligonucleotide
uuagugcgggaaugaaugg

SEQ ID NO: 727804 - RNA, 19 nt, Artificial Sequence
  Description of Artificial Sequence: Synthetic oligonucleotide
aggucaaaagccaaacccg

SEQ ID NO: 727805 - RNA, 19 nt, Artificial Sequence
  Description of Artificial Sequence: Synthetic oligonucleotide
agagucaugacuccucgga

SEQ ID NO: 727806 - RNA, 19 nt, Artificial Sequence
  Description of Artificial Sequence: Synthetic oligonucleotide
gcaguuauagcgcuucugg

SEQ ID NO: 727807 - RNA, 19 nt, Artificial Sequence
  Description of Artificial Sequence: Synthetic oligonucleotide
cuugguuacuucacuggcc

SEQ ID NO: 727808 - RNA, 19 nt, Artificial Sequence
  Description of Artificial Sequence: Synthetic oligonucleotide
agucccggaagcuacgcuc

SEQ ID NO: 727809 - RNA, 19 nt, Artificial Sequence
  Description of Artificial Sequence: Synthetic oligonucleotide
uggacauacagaagaaaua

SEQ ID NO: 727810 - RNA, 19 nt, Artificial Sequence
  Description of Artificial Sequence: Synthetic oligonucleotide
uguugcaguuuuagggugc

SEQ ID NO: 727811 - RNA, 19 nt, Artificial Sequence
  Description of Artificial Sequence: Synthetic oligonucleotide
cuaccaggcacuucugccg

SEQ ID NO: 727812 - RNA, 19 nt, Artificial Sequence
  Description of Artificial Sequence: Synthetic oligonucleotide
aagagaguucuguccccac

SEQ ID NO: 727813 - RNA, 19 nt, Artificial Sequence
  Description of Artificial Sequence: Synthetic oligonucleotide
gaagcuacgcucccacucc

SEQ ID NO: 727814 - RNA, 19 nt, Artificial Sequence
  Description of Artificial Sequence: Synthetic oligonucleotide
ucaguaguaaggugugugu

SEQ ID NO: 727815 - RNA, 19 nt, Artificial Sequence
  Description of Artificial Sequence: Synthetic oligonucleotide
guucacgccgcuuagagaa

SEQ ID NO: 727816 - RNA, 19 nt, Artificial Sequence
  Description of Artificial Sequence: Synthetic oligonucleotide
ccuccauuagguuagugcg

SEQ ID NO: 727817 - RNA, 19 nt, Artificial Sequence
  Description of Artificial Sequence: Synthetic oligonucleotide
aacccaauggucacauuag

SEQ ID NO: 727818 - RNA, 19 nt, Artificial Sequence
  Description of Artificial Sequence: Synthetic oligonucleotide
uaaggugugugugugugug

SEQ ID NO: 727819 - RNA, 19 nt, Artificial Sequence
  Description of Artificial Sequence: Synthetic oligonucleotide
ucuccgagccaccauuuug

SEQ ID NO: 727820 - RNA, 19 nt, Artificial Sequence
  Description of Artificial Sequence: Synthetic oligonucleotide
uuagguuagugcgggaaug

SEQ ID NO: 727821 - RNA, 19 nt, Artificial Sequence
  Description of Artificial Sequence: Synthetic oligonucleotide
caguuauagcgcuucuggg

SEQ ID NO: 727822 - RNA, 19 nt, Artificial Sequence
  Description of Artificial Sequence: Synthetic oligonucleotide
uccugaggcaguauggcuc

SEQ ID NO: 727823 - RNA, 19 nt, Artificial Sequence
  Description of Artificial Sequence: Synthetic oligonucleotide
gagagcgccagaaaagggc

SEQ ID NO: 727824 - RNA, 19 nt, Artificial Sequence
  Description of Artificial Sequence: Synthetic oligonucleotide
uguggugugugugugugug

SEQ ID NO: 727825 - RNA, 19 nt, Artificial Sequence
  Description of Artificial Sequence: Synthetic oligonucleotide
cuuuuggucugagagcgcc

SEQ ID NO: 727826 - RNA, 19 nt, Artificial Sequence
  Description of Artificial Sequence: Synthetic oligonucleotide
ugugugugugugugugugg

SEQ ID NO: 727827 - RNA, 19 nt, Artificial Sequence
  Description of Artificial Sequence: Synthetic oligonucleotide
aguaaggugugugugugug

SEQ ID NO: 727828 - RNA, 19 nt, Artificial Sequence
  Description of Artificial Sequence: Synthetic oligonucleotide
ugaggaguagccucccaca

SEQ ID NO: 727829 - RNA, 19 nt, Artificial Sequence
  Description of Artificial Sequence: Synthetic oligonucleotide
cuccauuagguuagugcgg

SEQ ID NO: 727830 - RNA, 19 nt, Artificial Sequence
  Description of Artificial Sequence: Synthetic oligonucleotide
cugagagcgccagaaaagg

SEQ ID NO: 727831 - RNA, 19 nt, Artificial Sequence
  Description of Artificial Sequence: Synthetic oligonucleotide
aagcuacgcucccacuccg

SEQ ID NO: 727832 - RNA, 19 nt, Artificial Sequence
  Description of Artificial Sequence: Synthetic oligonucleotide
aaauaacaugucucucgaa

SEQ ID NO: 727833 - RNA, 19 nt, Artificial Sequence
  Description of Artificial Sequence: Synthetic oligonucleotide
gaagcuccggagcuggccc

SEQ ID NO: 727834 - RNA, 19 nt, Artificial Sequence
  Description of Artificial Sequence: Synthetic oligonucleotide
caugacuagacacuaguaa

SEQ ID NO: 727835 - RNA, 19 nt, Artificial Sequence
  Description of Artificial Sequence: Synthetic oligonucleotide
ucacucagaaguccagggu

SEQ ID NO: 727836 - RNA, 19 nt, Artificial Sequence
  Description of Artificial Sequence: Synthetic oligonucleotide
ugcaguuuuagggugcuaa

SEQ ID NO: 727837 - RNA, 19 nt, Artificial Sequence
  Description of Artificial Sequence: Synthetic oligonucleotide
aggugcucauggcaaugcc

SEQ ID NO: 727838 - RNA, 19 nt, Artificial Sequence
  Description of Artificial Sequence: Synthetic oligonucleotide
cauaccgauccccucgacc

SEQ ID NO: 727839 - RNA, 19 nt, Artificial Sequence
  Description of Artificial Sequence: Synthetic oligonucleotide
ggucaucacaacuacccag

SEQ ID NO: 727840 - RNA, 19 nt, Artificial Sequence
  Description of Artificial Sequence: Synthetic oligonucleotide
ugugugguguguguggugu

SEQ ID NO: 727841 - RNA, 19 nt, Artificial Sequence
  Description of Artificial Sequence: Synthetic oligonucleotide
uguguguguguguugcagu

SEQ ID NO: 727842 - RNA, 19 nt, Artificial Sequence
  Description of Artificial Sequence: Synthetic oligonucleotide
cagauugaucuucuccacc

SEQ ID NO: 727843 - RNA, 19 nt, Artificial Sequence
  Description of Artificial Sequence: Synthetic oligonucleotide
gacucuauuggguggggca

SEQ ID NO: 727844 - RNA, 19 nt, Artificial Sequence
  Description of Artificial Sequence: Synthetic oligonucleotide
uguguggugugugugugug

SEQ ID NO: 727845 - RNA, 19 nt, Artificial Sequence
  Description of Artificial Sequence: Synthetic oligonucleotide
guucuguccccacuuagac

SEQ ID NO: 727846 - RNA, 19 nt, Artificial Sequence
  Description of Artificial Sequence: Synthetic oligonucleotide
guaaugucaccccugccuc

SEQ ID NO: 727847 - RNA, 19 nt, Artificial Sequence
  Description of Artificial Sequence: Synthetic oligonucleotide
auuagguuagugcgggaau

SEQ ID NO: 727848 - RNA, 19 nt, Artificial Sequence
  Description of Artificial Sequence: Synthetic oligonucleotide
agcuacagaagcuucccaa

SEQ ID NO: 727849 - RNA, 19 nt, Artificial Sequence
  Description of Artificial Sequence: Synthetic oligonucleotide
cuucuuccggcccaagcgc

SEQ ID NO: 727850 - RNA, 19 nt, Artificial Sequence
  Description of Artificial Sequence: Synthetic oligonucleotide
auacagaaguuggaagaag

SEQ ID NO: 727851 - RNA, 19 nt, Artificial Sequence
  Description of Artificial Sequence: Synthetic oligonucleotide
guguguguggugugugugg

SEQ ID NO: 727852 - RNA, 19 nt, Artificial Sequence
  Description of Artificial Sequence: Synthetic oligonucleotide
gagcagaaccagucucucg

SEQ ID NO: 727853 - RNA, 19 nt, Artificial Sequence
  Description of Artificial Sequence: Synthetic oligonucleotide
cagucucucgccuggagac

SEQ ID NO: 727854 - RNA, 19 nt, Artificial Sequence
  Description of Artificial Sequence: Synthetic oligonucleotide
ucgaccuggaacccagcca

SEQ ID NO: 727855 - RNA, 19 nt, Artificial Sequence
  Description of Artificial Sequence: Synthetic oligonucleotide
ggcaguauggcuccucucc

SEQ ID NO: 727856 - RNA, 19 nt, Artificial Sequence
  Description of Artificial Sequence: Synthetic oligonucleotide
caguucacgccgcuuagag

SEQ ID NO: 727857 - RNA, 19 nt, Artificial Sequence
  Description of Artificial Sequence: Synthetic oligonucleotide
gggguuggagacuagaguc

SEQ ID NO: 727858 - RNA, 19 nt, Artificial Sequence
  Description of Artificial Sequence: Synthetic oligonucleotide
cucauggcaaugccagugc

SEQ ID NO: 727859 - RNA, 19 nt, Artificial Sequence
  Description of Artificial Sequence: Synthetic oligonucleotide
caguuuuagggugcuaagc

SEQ ID NO: 727860 - RNA, 19 nt, Artificial Sequence
  Description of Artificial Sequence: Synthetic oligonucleotide
gacaugcugggcccaggcg

SEQ ID NO: 727861 - RNA, 19 nt, Artificial Sequence
  Description of Artificial Sequence: Synthetic oligonucleotide
uguguguguggugugugug

SEQ ID NO: 727862 - RNA, 19 nt, Artificial Sequence
  Description of Artificial Sequence: Synthetic oligonucleotide
uguggguugcuaugaacau

SEQ ID NO: 727863 - RNA, 19 nt, Artificial Sequence
  Description of Artificial Sequence: Synthetic oligonucleotide
cacuagggagaaauggguc

SEQ ID NO: 727864 - RNA, 19 nt, Artificial Sequence
  Description of Artificial Sequence: Synthetic oligonucleotide
accuguugagagcaguuau

SEQ ID NO: 727865 - RNA, 19 nt, Artificial Sequence
  Description of Artificial Sequence: Synthetic oligonucleotide
uguguguggugugugugug

SEQ ID NO: 727866 - RNA, 19 nt, Artificial Sequence
  Description of Artificial Sequence: Synthetic oligonucleotide
agacucuauuggguggggc

SEQ ID NO: 727867 - RNA, 19 nt, Artificial Sequence
  Description of Artificial Sequence: Synthetic oligonucleotide
ucuggacagaagggguugg

SEQ ID NO: 727868 - RNA, 19 nt, Artificial Sequence
  Description of Artificial Sequence: Synthetic oligonucleotide
ucacgccgcuuagagaagg

SEQ ID NO: 727869 - RNA, 19 nt, Artificial Sequence
  Description of Artificial Sequence: Synthetic oligonucleotide
uuuuggucugagagcgcca

SEQ ID NO: 727870 - RNA, 19 nt, Artificial Sequence
  Description of Artificial Sequence: Synthetic oligonucleotide
uguguguguguguguguug

SEQ ID NO: 727871 - RNA, 19 nt, Artificial Sequence
  Description of Artificial Sequence: Synthetic oligonucleotide
uggugugugugugugugug

SEQ ID NO: 727872 - RNA, 19 nt, Artificial Sequence
  Description of Artificial Sequence: Synthetic oligonucleotide
ggacauacagaagaaauaa

SEQ ID NO: 727873 - RNA, 19 nt, Artificial Sequence
  Description of Artificial Sequence: Synthetic oligonucleotide
gccuccauuagguuagugc

SEQ ID NO: 727874 - RNA, 19 nt, Artificial Sequence
  Description of Artificial Sequence: Synthetic oligonucleotide
uguguguguguguggugug

SEQ ID NO: 727875 - RNA, 19 nt, Artificial Sequence
  Description of Artificial Sequence: Synthetic oligonucleotide
acucuauuggguggggcag

SEQ ID NO: 727876 - RNA, 19 nt, Artificial Sequence
  Description of Artificial Sequence: Synthetic oligonucleotide
cagacgugggcuugguuac

SEQ ID NO: 727877 - RNA, 19 nt, Artificial Sequence
  Description of Artificial Sequence: Synthetic oligonucleotide
guguguguguguguguugc

SEQ ID NO: 727878 - RNA, 19 nt, Artificial Sequence
  Description of Artificial Sequence: Synthetic oligonucleotide
auguaaccccuuaagucag

SEQ ID NO: 727879 - RNA, 19 nt, Artificial Sequence
  Description of Artificial Sequence: Synthetic oligonucleotide
cucccugucggcaggacuc

SEQ ID NO: 727880 - RNA, 19 nt, Artificial Sequence
  Description of Artificial Sequence: Synthetic oligonucleotide
aaggugugugugugugugu

SEQ ID NO: 727881 - RNA, 19 nt, Artificial Sequence
  Description of Artificial Sequence: Synthetic oligonucleotide
uagugcgggaaugaaugga

SEQ ID NO: 727882 - RNA, 19 nt, Artificial Sequence
  Description of Artificial Sequence: Synthetic oligonucleotide
uguagcaguucacgccgcu

SEQ ID NO: 727883 - RNA, 19 nt, Artificial Sequence
  Description of Artificial Sequence: Synthetic oligonucleotide
uagguuagugcgggaauga

SEQ ID NO: 727884 - RNA, 19 nt, Artificial Sequence
  Description of Artificial Sequence: Synthetic oligonucleotide
uguguguguguggugugug

SEQ ID NO: 727885 - RNA, 19 nt, Artificial Sequence
  Description of Artificial Sequence: Synthetic oligonucleotide
uucuuccggcccaagcgcu

SEQ ID NO: 727886 - RNA, 19 nt, Artificial Sequence
  Description of Artificial Sequence: Synthetic oligonucleotide
uguguguguguguguggug

SEQ ID NO: 727887 - RNA, 19 nt, Artificial Sequence
  Description of Artificial Sequence: Synthetic oligonucleotide
cucgaccuggaacccagcc

SEQ ID NO: 727888 - RNA, 19 nt, Artificial Sequence
  Description of Artificial Sequence: Synthetic oligonucleotide
ucccaauguaaccccuuaa

SEQ ID NO: 727889 - RNA, 19 nt, Artificial Sequence
  Description of Artificial Sequence: Synthetic oligonucleotide
uguaaccccuuaagucaga

SEQ ID NO: 727890 - RNA, 19 nt, Artificial Sequence
  Description of Artificial Sequence: Synthetic oligonucleotide
uuugauccuuuuggguuca

SEQ ID NO: 727891 - RNA, 19 nt, Artificial Sequence
  Description of Artificial Sequence: Synthetic oligonucleotide
ugugugugguguguguggu

SEQ ID NO: 727892 - RNA, 19 nt, Artificial Sequence
  Description of Artificial Sequence: Synthetic oligonucleotide
cuggguaaugucaccccug

SEQ ID NO: 727893 - RNA, 19 nt, Artificial Sequence
  Description of Artificial Sequence: Synthetic oligonucleotide
auguuugggguaggcuacc

SEQ ID NO: 727894 - RNA, 19 nt, Artificial Sequence
  Description of Artificial Sequence: Synthetic oligonucleotide
gguaaugucaccccugccu

SEQ ID NO: 727895 - RNA, 19 nt, Artificial Sequence
  Description of Artificial Sequence: Synthetic oligonucleotide
ugugugugugugugugugu

SEQ ID NO: 727896 - RNA, 19 nt, Artificial Sequence
  Description of Artificial Sequence: Synthetic oligonucleotide
aguucacgccgcuuagaga

SEQ ID NO: 727897 - RNA, 19 nt, Artificial Sequence
  Description of Artificial Sequence: Synthetic oligonucleotide
gaauggaucccagcaccug

SEQ ID NO: 727898 - RNA, 19 nt, Artificial Sequence
  Description of Artificial Sequence: Synthetic oligonucleotide
ggcagaucaaaaguccgag

SEQ ID NO: 727899 - RNA, 19 nt, Artificial Sequence
  Description of Artificial Sequence: Synthetic oligonucleotide
cagagucaugacuccucgg

SEQ ID NO: 727900 - RNA, 19 nt, Artificial Sequence
  Description of Artificial Sequence: Synthetic oligonucleotide
ucgucacucuguccaguca

SEQ ID NO: 727901 - RNA, 19 nt, Artificial Sequence
  Description of Artificial Sequence: Synthetic oligonucleotide
guguguguguguguugcag

SEQ ID NO: 727902 - RNA, 19 nt, Artificial Sequence
  Description of Artificial Sequence: Synthetic oligonucleotide
aggugugugugugugugug

SEQ ID NO: 727903 - RNA, 19 nt, Artificial Sequence
  Description of Artificial Sequence: Synthetic oligonucleotide
ucgccuguuccccaagcau

SEQ ID NO: 727904 - RNA, 19 nt, Artificial Sequence
  Description of Artificial Sequence: Synthetic oligonucleotide
uguguguguguguguugca

SEQ ID NO: 727905 - RNA, 19 nt, Artificial Sequence
  Description of Artificial Sequence: Synthetic oligonucleotide
ccuagcugaagcuacagaa

SEQ ID NO: 727906 - RNA, 19 nt, Artificial Sequence
  Description of Artificial Sequence: Synthetic oligonucleotide
uggucugguggaacugaga

SEQ ID NO: 727907 - RNA, 19 nt, Artificial Sequence
  Description of Artificial Sequence: Synthetic oligonucleotide
gugugugugugugugugug

SEQ ID NO: 727908 - RNA, 19 nt, Artificial Sequence
  Description of Artificial Sequence: Synthetic oligonucleotide
uaguaaggugugugugugu

SEQ ID NO: 727909 - RNA, 19 nt, Artificial Sequence
  Description of Artificial Sequence: Synthetic oligonucleotide
uugcuggcggccuucucac

SEQ ID NO: 727910 - RNA, 19 nt, Artificial Sequence
  Description of Artificial Sequence: Synthetic oligonucleotide
agcaguuauagcgcuucug

SEQ ID NO: 727911 - RNA, 19 nt, Artificial Sequence
  Description of Artificial Sequence: Synthetic oligonucleotide
ugugguguguguggugugu

SEQ ID NO: 727912 - RNA, 19 nt, Artificial Sequence
  Description of Artificial Sequence: Synthetic oligonucleotide
ggaagcuacgcucccacuc

SEQ ID NO: 727913 - RNA, 19 nt, Artificial Sequence
  Description of Artificial Sequence: Synthetic oligonucleotide
guuacuucacuggccacca

SEQ ID NO: 727914 - RNA, 19 nt, Artificial Sequence
  Description of Artificial Sequence: Synthetic oligonucleotide
ccgauucuugaucucacag

SEQ ID NO: 727915 - RNA, 19 nt, Artificial Sequence
  Description of Artificial Sequence: Synthetic oligonucleotide
uucucauaccgauccccuc

SEQ ID NO: 727916 - RNA, 19 nt, Artificial Sequence
  Description of Artificial Sequence: Synthetic oligonucleotide
gcaguuuuagggugcuaag

SEQ ID NO: 727917 - RNA, 19 nt, Artificial Sequence
  Description of Artificial Sequence: Synthetic oligonucleotide
gauauguuugggguaggcu

SEQ ID NO: 727918 - RNA, 19 nt, Artificial Sequence
  Description of Artificial Sequence: Synthetic oligonucleotide
gccagacucuauugggugg

SEQ ID NO: 727919 - RNA, 19 nt, Artificial Sequence
  Description of Artificial Sequence: Synthetic oligonucleotide
cagaagguucauugagguc

SEQ ID NO: 727920 - RNA, 19 nt, Artificial Sequence
  Description of Artificial Sequence: Synthetic oligonucleotide
cuucuugguaggcaaccca

SEQ ID NO: 727921 - RNA, 19 nt, Artificial Sequence
  Description of Artificial Sequence: Synthetic oligonucleotide
cagcuucuaaggcauccug

SEQ ID NO: 727922 - RNA, 19 nt, Artificial Sequence
  Description of Artificial Sequence: Synthetic oligonucleotide
aggcaguauggcuccucuc

SEQ ID NO: 727923 - RNA, 19 nt, Artificial Sequence
  Description of Artificial Sequence: Synthetic oligonucleotide
ugugcaugugaaggagaga

SEQ ID NO: 727924 - RNA, 19 nt, Artificial Sequence
  Description of Artificial Sequence: Synthetic oligonucleotide
agugcgggaaugaauggau

SEQ ID NO: 727925 - RNA, 19 nt, Artificial Sequence
  Description of Artificial Sequence: Synthetic oligonucleotide
ggggcagaucaaaaguccg

SEQ ID NO: 727926 - RNA, 19 nt, Artificial Sequence
  Description of Artificial Sequence: Synthetic oligonucleotide
ggggacuaggcucuggaca

SEQ ID NO: 727927 - RNA, 19 nt, Artificial Sequence
  Description of Artificial Sequence: Synthetic oligonucleotide
accgauccccucgaccugg

SEQ ID NO: 727928 - RNA, 19 nt, Artificial Sequence
  Description of Artificial Sequence: Synthetic oligonucleotide
gguggcgaagcuccggagc

SEQ ID NO: 727929 - RNA, 19 nt, Artificial Sequence
  Description of Artificial Sequence: Synthetic oligonucleotide
ugguguguguggugugugu

SEQ ID NO: 727930 - RNA, 19 nt, Artificial Sequence
  Description of Artificial Sequence: Synthetic oligonucleotide
ggaguagccucccacaaua

SEQ ID NO: 727931 - RNA, 19 nt, Artificial Sequence
  Description of Artificial Sequence: Synthetic oligonucleotide
guggguugcuaugaacaug

SEQ ID NO: 727932 - RNA, 19 nt, Artificial Sequence
  Description of Artificial Sequence: Synthetic oligonucleotide
uagucccggaagcuacgcu

SEQ ID NO: 727933 - RNA, 19 nt, Artificial Sequence
  Description of Artificial Sequence: Synthetic oligonucleotide
gccucaaccagccacaggu

SEQ ID NO: 727934 - RNA, 19 nt, Artificial Sequence
  Description of Artificial Sequence: Synthetic oligonucleotide
cacuccgccugguugaaga

SEQ ID NO: 727935 - RNA, 19 nt, Artificial Sequence
  Description of Artificial Sequence: Synthetic oligonucleotide
acgugggcuugguuacuuc

SEQ ID NO: 727936 - RNA, 19 nt, Artificial Sequence
  Description of Artificial Sequence: Synthetic oligonucleotide
acaguccggaaugggcuuc

SEQ ID NO: 727937 - RNA, 19 nt, Artificial Sequence
  Description of Artificial Sequence: Synthetic oligonucleotide
ccccacuuagacaaaggac

SEQ ID NO: 727938 - RNA, 19 nt, Artificial Sequence
  Description of Artificial Sequence: Synthetic oligonucleotide
uggggacuaggcucuggac

SEQ ID NO: 727939 - RNA, 19 nt, Artificial Sequence
  Description of Artificial Sequence: Synthetic oligonucleotide
caaccagccacagguuggc

SEQ ID NO: 727940 - RNA, 19 nt, Artificial Sequence
  Description of Artificial Sequence: Synthetic oligonucleotide
cauuagguuagugcgggaa

SEQ ID NO: 727941 - RNA, 19 nt, Artificial Sequence
  Description of Artificial Sequence: Synthetic oligonucleotide
uaccgauccccucgaccug

SEQ ID NO: 727942 - RNA, 19 nt, Artificial Sequence
  Description of Artificial Sequence: Synthetic oligonucleotide
gcaacugaggcagccgagg

SEQ ID NO: 727943 - RNA, 19 nt, Artificial Sequence
  Description of Artificial Sequence: Synthetic oligonucleotide
cauuagccuggcacagcac

SEQ ID NO: 727944 - RNA, 19 nt, Artificial Sequence
  Description of Artificial Sequence: Synthetic oligonucleotide
ugucggcaggacucgccug

SEQ ID NO: 727945 - RNA, 19 nt, Artificial Sequence
  Description of Artificial Sequence: Synthetic oligonucleotide
cccuuaagucagaggaucc

SEQ ID NO: 727946 - RNA, 19 nt, Artificial Sequence
  Description of Artificial Sequence: Synthetic oligonucleotide
cuguagcaguucacgccgc

SEQ ID NO: 727947 - RNA, 19 nt, Artificial Sequence
  Description of Artificial Sequence: Synthetic oligonucleotide
aggaguagccucccacaau

SEQ ID NO: 727948 - RNA, 19 nt, Artificial Sequence
  Description of Artificial Sequence: Synthetic oligonucleotide
ggagacugagcucaguagu

SEQ ID NO: 727949 - RNA, 19 nt, Artificial Sequence
  Description of Artificial Sequence: Synthetic oligonucleotide
gguggaacugagaugugca

SEQ ID NO: 727950 - RNA, 19 nt, Artificial Sequence
  Description of Artificial Sequence: Synthetic oligonucleotide
ucauaccgauccccucgac

SEQ ID NO: 727951 - RNA, 19 nt, Artificial Sequence
  Description of Artificial Sequence: Synthetic oligonucleotide
gggcuugguuacuucacug

SEQ ID NO: 727952 - RNA, 19 nt, Artificial Sequence
  Description of Artificial Sequence: Synthetic oligonucleotide
agaguucuguccccacuua

SEQ ID NO: 727953 - RNA, 19 nt, Artificial Sequence
  Description of Artificial Sequence: Synthetic oligonucleotide
agacugagcucaguaguaa

SEQ ID NO: 727954 - RNA, 19 nt, Artificial Sequence
  Description of Artificial Sequence: Synthetic oligonucleotide
gcggaggagacaucagcag

SEQ ID NO: 727955 - RNA, 19 nt, Artificial Sequence
  Description of Artificial Sequence: Synthetic oligonucleotide
ucccugucggcaggacucg

SEQ ID NO: 727956 - RNA, 19 nt, Artificial Sequence
  Description of Artificial Sequence: Synthetic oligonucleotide
gagacugagcucaguagua

SEQ ID NO: 727957 - RNA, 19 nt, Artificial Sequence
  Description of Artificial Sequence: Synthetic oligonucleotide
guccggaaugggcuucuug

SEQ ID NO: 727958 - RNA, 19 nt, Artificial Sequence
  Description of Artificial Sequence: Synthetic oligonucleotide
agcgccagaaaagggcacu

SEQ ID NO: 727959 - RNA, 19 nt, Artificial Sequence
  Description of Artificial Sequence: Synthetic oligonucleotide
cacgccgcuuagagaaggc

SEQ ID NO: 727960 - RNA, 19 nt, Artificial Sequence
  Description of Artificial Sequence: Synthetic oligonucleotide
gucucucgccuggagacug

SEQ ID NO: 727961 - RNA, 19 nt, Artificial Sequence
  Description of Artificial Sequence: Synthetic oligonucleotide
aaacccgccacagguccau

SEQ ID NO: 727962 - RNA, 19 nt, Artificial Sequence
  Description of Artificial Sequence: Synthetic oligonucleotide
acaugacuagacacuagua

SEQ ID NO: 727963 - RNA, 19 nt, Artificial Sequence
  Description of Artificial Sequence: Synthetic oligonucleotide
ggguuggagacuagagucc

SEQ ID NO: 727964 - RNA, 19 nt, Artificial Sequence
  Description of Artificial Sequence: Synthetic oligonucleotide
agcuacgcucccacuccgc

SEQ ID NO: 727965 - RNA, 19 nt, Artificial Sequence
  Description of Artificial Sequence: Synthetic oligonucleotide
uagcgcuucugggaguggu

SEQ ID NO: 727966 - RNA, 19 nt, Artificial Sequence
  Description of Artificial Sequence: Synthetic oligonucleotide
ucucucgccuggagacuga

SEQ ID NO: 727967 - RNA, 19 nt, Artificial Sequence
  Description of Artificial Sequence: Synthetic oligonucleotide
ucccggaagcuacgcuccc

SEQ ID NO: 727968 - RNA, 19 nt, Artificial Sequence
  Description of Artificial Sequence: Synthetic oligonucleotide
gagaguucuguccccacuu

SEQ ID NO: 727969 - RNA, 19 nt, Artificial Sequence
  Description of Artificial Sequence: Synthetic oligonucleotide
gguguguguggugugugug

SEQ ID NO: 727970 - RNA, 19 nt, Artificial Sequence
  Description of Artificial Sequence: Synthetic oligonucleotide
caggugcgccuccagauga

SEQ ID NO: 727971 - RNA, 19 nt, Artificial Sequence
  Description of Artificial Sequence: Synthetic oligonucleotide
agucagccugcaccaggug

SEQ ID NO: 727972 - RNA, 19 nt, Artificial Sequence
  Description of Artificial Sequence: Synthetic oligonucleotide
cuucucauaccgauccccu

SEQ ID NO: 727973 - RNA, 19 nt, Artificial Sequence
  Description of Artificial Sequence: Synthetic oligonucleotide
aggacucgccuguucccca

SEQ ID NO: 727974 - RNA, 19 nt, Artificial Sequence
  Description of Artificial Sequence: Synthetic oligonucleotide
gcuacgcucccacuccgcc

SEQ ID NO: 727975 - RNA, 19 nt, Artificial Sequence
  Description of Artificial Sequence: Synthetic oligonucleotide
gugugugguguguguggug

SEQ ID NO: 727976 - RNA, 19 nt, Artificial Sequence
  Description of Artificial Sequence: Synthetic oligonucleotide
cucauaccgauccccucga

SEQ ID NO: 727977 - RNA, 19 nt, Artificial Sequence
  Description of Artificial Sequence: Synthetic oligonucleotide
gguuggagacuagagucca

SEQ ID NO: 727978 - RNA, 19 nt, Artificial Sequence
  Description of Artificial Sequence: Synthetic oligonucleotide
gaaccgcgcugguggcagg

SEQ ID NO: 727979 - RNA, 19 nt, Artificial Sequence
  Description of Artificial Sequence: Synthetic oligonucleotide
acccgccacagguccauca

SEQ ID NO: 727980 - RNA, 19 nt, Artificial Sequence
  Description of Artificial Sequence: Synthetic oligonucleotide
cagacucuauugggugggg

SEQ ID NO: 727981 - RNA, 19 nt, Artificial Sequence
  Description of Artificial Sequence: Synthetic oligonucleotide
gagucaugacuccucggau

SEQ ID NO: 727982 - RNA, 19 nt, Artificial Sequence
  Description of Artificial Sequence: Synthetic oligonucleotide
agcgcuucugggagugguc

SEQ ID NO: 727983 - RNA, 19 nt, Artificial Sequence
  Description of Artificial Sequence: Synthetic oligonucleotide
gcgggaaugaauggauccc

SEQ ID NO: 727984 - RNA, 19 nt, Artificial Sequence
  Description of Artificial Sequence: Synthetic oligonucleotide
gaacagagucaugacuccu

SEQ ID NO: 727985 - RNA, 19 nt, Artificial Sequence
  Description of Artificial Sequence: Synthetic oligonucleotide
gugugguguguguggugug

SEQ ID NO: 727986 - RNA, 19 nt, Artificial Sequence
  Description of Artificial Sequence: Synthetic oligonucleotide
guguguguguguguggugu

SEQ ID NO: 727987 - RNA, 19 nt, Artificial Sequence
  Description of Artificial Sequence: Synthetic oligonucleotide
caguauggcuccucuccga

SEQ ID NO: 727988 - RNA, 19 nt, Artificial Sequence
  Description of Artificial Sequence: Synthetic oligonucleotide
ucucuagcucuggggagau

SEQ ID NO: 727989 - RNA, 19 nt, Artificial Sequence
  Description of Artificial Sequence: Synthetic oligonucleotide
gugguguguguggugugug

SEQ ID NO: 727990 - RNA, 19 nt, Artificial Sequence
  Description of Artificial Sequence: Synthetic oligonucleotide
ggaaccgcgcugguggcag

SEQ ID NO: 727991 - RNA, 19 nt, Artificial Sequence
  Description of Artificial Sequence: Synthetic oligonucleotide
auagcgcuucugggagugg

SEQ ID NO: 727992 - RNA, 19 nt, Artificial Sequence
  Description of Artificial Sequence: Synthetic oligonucleotide
cugucugguucuugaaugu

SEQ ID NO: 727993 - RNA, 19 nt, Artificial Sequence
  Description of Artificial Sequence: Synthetic oligonucleotide
ugggccgauucuugaucuc

SEQ ID NO: 727994 - RNA, 19 nt, Artificial Sequence
  Description of Artificial Sequence: Synthetic oligonucleotide
cugguggaacugagaugug

SEQ ID NO: 727995 - RNA, 19 nt, Artificial Sequence
  Description of Artificial Sequence: Synthetic oligonucleotide
cuuaagucagaggauccau

SEQ ID NO: 727996 - RNA, 19 nt, Artificial Sequence
  Description of Artificial Sequence: Synthetic oligonucleotide
guaaggugugugugugugu

SEQ ID NO: 727997 - RNA, 19 nt, Artificial Sequence
  Description of Artificial Sequence: Synthetic oligonucleotide
ggagcucggccuccauuag

SEQ ID NO: 727998 - RNA, 19 nt, Artificial Sequence
  Description of Artificial Sequence: Synthetic oligonucleotide
gugcuaagcaggaaacagu

SEQ ID NO: 727999 - RNA, 19 nt, Artificial Sequence
  Description of Artificial Sequence: Synthetic oligonucleotide
aaccagucucucgccugga

SEQ ID NO: 728000 - RNA, 19 nt, Artificial Sequence
  Description of Artificial Sequence: Synthetic oligonucleotide
guguguguggugugugugu

SEQ ID NO: 728001 - RNA, 19 nt, Artificial Sequence
  Description of Artificial Sequence: Synthetic oligonucleotide
gugcaugcugaaggagagc

SEQ ID NO: 728002 - RNA, 19 nt, Artificial Sequence
  Description of Artificial Sequence: Synthetic oligonucleotide
ccccuuaagucagaggauc

SEQ ID NO: 728003 - RNA, 19 nt, Artificial Sequence
  Description of Artificial Sequence: Synthetic oligonucleotide
uuccggcccaagcgcuucu

SEQ ID NO: 728004 - RNA, 19 nt, Artificial Sequence
  Description of Artificial Sequence: Synthetic oligonucleotide
gagcgccagaaaagggcac

SEQ ID NO: 728005 - RNA, 19 nt, Artificial Sequence
  Description of Artificial Sequence: Synthetic oligonucleotide
accgcgcugguggcagggc

SEQ ID NO: 728006 - RNA, 19 nt, Artificial Sequence
  Description of Artificial Sequence: Synthetic oligonucleotide
guguguguguguguguggu

SEQ ID NO: 728007 - RNA, 19 nt, Artificial Sequence
  Description of Artificial Sequence: Synthetic oligonucleotide
caaacccgccacaggucca

SEQ ID NO: 728008 - RNA, 19 nt, Artificial Sequence
  Description of Artificial Sequence: Synthetic oligonucleotide
gcccaagcgcuucucuagc

SEQ ID NO: 728009 - RNA, 19 nt, Artificial Sequence
  Description of Artificial Sequence: Synthetic oligonucleotide
uccccucgaccuggaaccc

SEQ ID NO: 728010 - RNA, 19 nt, Artificial Sequence
  Description of Artificial Sequence: Synthetic oligonucleotide
guguguguguguugcaguu

SEQ ID NO: 728011 - RNA, 19 nt, Artificial Sequence
  Description of Artificial Sequence: Synthetic oligonucleotide
accccuuaagucagaggau

SEQ ID NO: 728012 - RNA, 19 nt, Artificial Sequence
  Description of Artificial Sequence: Synthetic oligonucleotide
gguaggcuaccuguugaga

SEQ ID NO: 728013 - RNA, 19 nt, Artificial Sequence
  Description of Artificial Sequence: Synthetic oligonucleotide
cucugccauuccugccuug

SEQ ID NO: 728014 - RNA, 19 nt, Artificial Sequence
  Description of Artificial Sequence: Synthetic oligonucleotide
gucggcaggacucgccugu

SEQ ID NO: 728015 - RNA, 19 nt, Artificial Sequence
  Description of Artificial Sequence: Synthetic oligonucleotide
guggaacugagaugugcau

SEQ ID NO: 728016 - RNA, 19 nt, Artificial Sequence
  Description of Artificial Sequence: Synthetic oligonucleotide
cacuuagacaaaggacaaa

SEQ ID NO: 728017 - RNA, 19 nt, Artificial Sequence
  Description of Artificial Sequence: Synthetic oligonucleotide
guugcaguuuuagggugcu

SEQ ID NO: 728018 - RNA, 19 nt, Artificial Sequence
  Description of Artificial Sequence: Synthetic oligonucleotide
gcuacagaagcuucccaau

SEQ ID NO: 728019 - RNA, 19 nt, Artificial Sequence
  Description of Artificial Sequence: Synthetic oligonucleotide
gagcaguuauagcgcuucu

SEQ ID NO: 728020 - RNA, 19 nt, Artificial Sequence
  Description of Artificial Sequence: Synthetic oligonucleotide
cucuauuggguggggcaga

SEQ ID NO: 728021 - RNA, 19 nt, Artificial Sequence
  Description of Artificial Sequence: Synthetic oligonucleotide
ccggaagcuacgcucccac

SEQ ID NO: 728022 - RNA, 19 nt, Artificial Sequence
  Description of Artificial Sequence: Synthetic oligonucleotide
guguguguguggugugugu

SEQ ID NO: 728023 - RNA, 19 nt, Artificial Sequence
  Description of Artificial Sequence: Synthetic oligonucleotide
gccgauucuugaucucaca

SEQ ID NO: 728024 - RNA, 19 nt, Artificial Sequence
  Description of Artificial Sequence: Synthetic oligonucleotide
gcgucccugagcccagacc

SEQ ID NO: 728025 - RNA, 19 nt, Artificial Sequence
  Description of Artificial Sequence: Synthetic oligonucleotide
gggccgauucuugaucuca

SEQ ID NO: 728026 - RNA, 19 nt, Artificial Sequence
  Description of Artificial Sequence: Synthetic oligonucleotide
augacacaacaaacacuuu

SEQ ID NO: 728027 - RNA, 19 nt, Artificial Sequence
  Description of Artificial Sequence: Synthetic oligonucleotide
ccuuaagucagaggaucca

SEQ ID NO: 728028 - RNA, 19 nt, Artificial Sequence
  Description of Artificial Sequence: Synthetic oligonucleotide
ccuggcccggguucuguag

SEQ ID NO: 728029 - RNA, 19 nt, Artificial Sequence
  Description of Artificial Sequence: Synthetic oligonucleotide
ggugcgccuccagaugagc

SEQ ID NO: 728030 - RNA, 19 nt, Artificial Sequence
  Description of Artificial Sequence: Synthetic oligonucleotide
aggaaccgcgcugguggca

SEQ ID NO: 728031 - RNA, 19 nt, Artificial Sequence
  Description of Artificial Sequence: Synthetic oligonucleotide
gcacuagggagaaaugggu

SEQ ID NO: 728032 - RNA, 19 nt, Artificial Sequence
  Description of Artificial Sequence: Synthetic oligonucleotide
cuggacagaagggguugga

SEQ ID NO: 728033 - RNA, 19 nt, Artificial Sequence
  Description of Artificial Sequence: Synthetic oligonucleotide
ggccgauucuugaucucac

SEQ ID NO: 728034 - RNA, 19 nt, Artificial Sequence
  Description of Artificial Sequence: Synthetic oligonucleotide
caggggugacagacacauc

SEQ ID NO: 728035 - RNA, 19 nt, Artificial Sequence
  Description of Artificial Sequence: Synthetic oligonucleotide
cugucggcaggacucgccu

SEQ ID NO: 728036 - RNA, 19 nt, Artificial Sequence
  Description of Artificial Sequence: Synthetic oligonucleotide
ugccagacgugggcuuggu

SEQ ID NO: 728037 - RNA, 19 nt, Artificial Sequence
  Description of Artificial Sequence: Synthetic oligonucleotide
uugcaguuuuagggugcua

SEQ ID NO: 728038 - RNA, 19 nt, Artificial Sequence
  Description of Artificial Sequence: Synthetic oligonucleotide
guguguguguguguguguu

SEQ ID NO: 728039 - RNA, 19 nt, Artificial Sequence
  Description of Artificial Sequence: Synthetic oligonucleotide
guguguggugugugugugu

SEQ ID NO: 728040 - RNA, 19 nt, Artificial Sequence
  Description of Artificial Sequence: Synthetic oligonucleotide
cuacgcucccacuccgccu

SEQ ID NO: 728041 - RNA, 19 nt, Artificial Sequence
  Description of Artificial Sequence: Synthetic oligonucleotide
guggugugugugugugugu

SEQ ID NO: 728042 - RNA, 19 nt, Artificial Sequence
  Description of Artificial Sequence: Synthetic oligonucleotide
cgugggcuugguuacuuca

SEQ ID NO: 728043 - RNA, 19 nt, Artificial Sequence
  Description of Artificial Sequence: Synthetic oligonucleotide
ggugugugugugugugugu

SEQ ID NO: 728044 - RNA, 19 nt, Artificial Sequence
  Description of Artificial Sequence: Synthetic oligonucleotide
guguguguguguggugugu

SEQ ID NO: 728045 - RNA, 19 nt, Artificial Sequence
  Description of Artificial Sequence: Synthetic oligonucleotide
cgauucuugaucucacagu

SEQ ID NO: 728046 - RNA, 19 nt, Artificial Sequence
  Description of Artificial Sequence: Synthetic oligonucleotide
uccggcccaagcgcuucuc

SEQ ID NO: 728047 - RNA, 19 nt, Artificial Sequence
  Description of Artificial Sequence: Synthetic oligonucleotide
guguggugugugugugugu

SEQ ID NO: 728048 - RNA, 19 nt, Artificial Sequence
  Description of Artificial Sequence: Synthetic oligonucleotide
uccccacuggauggacaua

SEQ ID NO: 728049 - RNA, 19 nt, Artificial Sequence
  Description of Artificial Sequence: Synthetic oligonucleotide
cacaguccggaaugggcuu

SEQ ID NO: 728050 - RNA, 19 nt, Artificial Sequence
  Description of Artificial Sequence: Synthetic oligonucleotide
gacgugggcuugguuacuu

SEQ ID NO: 728051 - RNA, 19 nt, Artificial Sequence
  Description of Artificial Sequence: Synthetic oligonucleotide
ggcgucccugagcccagac

SEQ ID NO: 728052 - RNA, 19 nt, Artificial Sequence
  Description of Artificial Sequence: Synthetic oligonucleotide
ucggcaggacucgccuguu

SEQ ID NO: 728053 - RNA, 19 nt, Artificial Sequence
  Description of Artificial Sequence: Synthetic oligonucleotide
ccgcgcugguggcagggcc

SEQ ID NO: 728054 - RNA, 19 nt, Artificial Sequence
  Description of Artificial Sequence: Synthetic oligonucleotide
gcaguucacgccgcuuaga

SEQ ID NO: 728055 - RNA, 19 nt, Artificial Sequence
  Description of Artificial Sequence: Synthetic oligonucleotide
cucuagcucuggggagauc

SEQ ID NO: 728056 - RNA, 19 nt, Artificial Sequence
  Description of Artificial Sequence: Synthetic oligonucleotide
ggacucgccuguuccccaa

SEQ ID NO: 728057 - RNA, 19 nt, Artificial Sequence
  Description of Artificial Sequence: Synthetic oligonucleotide
ggcaacccaauggucacau

SEQ ID NO: 728058 - RNA, 19 nt, Artificial Sequence
  Description of Artificial Sequence: Synthetic oligonucleotide
ccgcuuagagaaggccuug

SEQ ID NO: 728059 - RNA, 19 nt, Artificial Sequence
  Description of Artificial Sequence: Synthetic oligonucleotide
ccauuagguuagugcggga

SEQ ID NO: 728060 - RNA, 19 nt, Artificial Sequence
  Description of Artificial Sequence: Synthetic oligonucleotide
ggcagccgaggaaccgcgc

SEQ ID NO: 728061 - RNA, 19 nt, Artificial Sequence
  Description of Artificial Sequence: Synthetic oligonucleotide
cccacuggauggacauaca

SEQ ID NO: 728062 - RNA, 19 nt, Artificial Sequence
  Description of Artificial Sequence: Synthetic oligonucleotide
ccgaggaaccgcgcuggug

SEQ ID NO: 728063 - RNA, 19 nt, Artificial Sequence
  Description of Artificial Sequence: Synthetic oligonucleotide
ccgggguggcgaagcuccg

SEQ ID NO: 728064 - RNA, 19 nt, Artificial Sequence
  Description of Artificial Sequence: Synthetic oligonucleotide
aguccggaaugggcuucuu

SEQ ID NO: 728065 - RNA, 19 nt, Artificial Sequence
  Description of Artificial Sequence: Synthetic oligonucleotide
cucuccgagccaccauuuu

SEQ ID NO: 728066 - RNA, 19 nt, Artificial Sequence
  Description of Artificial Sequence: Synthetic oligonucleotide
gcccggguucuguagcagu

SEQ ID NO: 728067 - RNA, 19 nt, Artificial Sequence
  Description of Artificial Sequence: Synthetic oligonucleotide
cgccgcuuagagaaggccu

SEQ ID NO: 728068 - RNA, 19 nt, Artificial Sequence
  Description of Artificial Sequence: Synthetic oligonucleotide
gccgcuuagagaaggccuu

SEQ ID NO: 728069 - RNA, 19 nt, Artificial Sequence
  Description of Artificial Sequence: Synthetic oligonucleotide
caggcgcagcaugguuuca

SEQ ID NO: 728070 - RNA, 19 nt, Artificial Sequence
  Description of Artificial Sequence: Synthetic oligonucleotide
caguccggaaugggcuucu

SEQ ID NO: 728071 - RNA, 19 nt, Artificial Sequence
  Description of Artificial Sequence: Synthetic oligonucleotide
cccaagcgcuucucuagcu

SEQ ID NO: 728072 - RNA, 19 nt, Artificial Sequence
  Description of Artificial Sequence: Synthetic oligonucleotide
cgggguggcgaagcuccgg

SEQ ID NO: 728073 - RNA, 19 nt, Artificial Sequence
  Description of Artificial Sequence: Synthetic oligonucleotide
gcuccggagcuggccccag

SEQ ID NO: 728074 - RNA, 19 nt, Artificial Sequence
  Description of Artificial Sequence: Synthetic oligonucleotide
ccacuccgccugguugaag

SEQ ID NO: 728075 - RNA, 19 nt, Artificial Sequence
  Description of Artificial Sequence: Synthetic oligonucleotide
ggcggccuucucacucaga

SEQ ID NO: 728076 - RNA, 19 nt, Artificial Sequence
  Description of Artificial Sequence: Synthetic oligonucleotide
cccggguucuguagcaguu

SEQ ID NO: 728077 - RNA, 19 nt, Artificial Sequence
  Description of Artificial Sequence: Synthetic oligonucleotide
ccgauccccucgaccugga

SEQ ID NO: 728078 - RNA, 19 nt, Artificial Sequence
  Description of Artificial Sequence: Synthetic oligonucleotide
cccgccacagguccaucau

SEQ ID NO: 728079 - RNA, 19 nt, Artificial Sequence
  Description of Artificial Sequence: Synthetic oligonucleotide
gcucccacuccgccugguu

SEQ ID NO: 728080 - RNA, 19 nt, Artificial Sequence
  Description of Artificial Sequence: Synthetic oligonucleotide
ccccucgaccuggaaccca

SEQ ID NO: 728081 - RNA, 19 nt, Artificial Sequence
  Description of Artificial Sequence: Synthetic oligonucleotide
gccagacgugggcuugguu

SEQ ID NO: 728082 - RNA, 19 nt, Artificial Sequence
  Description of Artificial Sequence: Synthetic oligonucleotide
ccggcccaagcgcuucucu

SEQ ID NO: 728083 - RNA, 19 nt, Artificial Sequence
  Description of Artificial Sequence: Synthetic oligonucleotide
ccccaagcauuugcagcua

SEQ ID NO: 728084 - RNA, 19 nt, Artificial Sequence
  Description of Artificial Sequence: Synthetic oligonucleotide
cggaagcuacgcucccacu

SEQ ID NO: 728085 - RNA, 19 nt, Artificial Sequence
  Description of Artificial Sequence: Synthetic oligonucleotide
cccuaggggcugaggcacu

SEQ ID NO: 728086 - RNA, 19 nt, Artificial Sequence
  Description of Artificial Sequence: Synthetic oligonucleotide
cccacuccgccugguugaa

SEQ ID NO: 728087 - RNA, 19 nt, Artificial Sequence
  Description of Artificial Sequence: Synthetic oligonucleotide
aaaauuucuagcccuaagc

SEQ ID NO: 728088 - RNA, 19 nt, Artificial Sequence
  Description of Artificial Sequence: Synthetic oligonucleotide
ucgaaugagauacacaucg

SEQ ID NO: 728089 - RNA, 19 nt, Artificial Sequence
  Description of Artificial Sequence: Synthetic oligonucleotide
aaaaguuaagaacaucuuc

SEQ ID NO: 728090 - RNA, 19 nt, Artificial Sequence
  Description of Artificial Sequence: Synthetic oligonucleotide
uaagcaauuaaauacagac

SEQ ID NO: 728091 - RNA, 19 nt, Artificial Sequence
  Description of Artificial Sequence: Synthetic oligonucleotide
aacuaaguuacauaaacca

SEQ ID NO: 728092 - RNA, 19 nt, Artificial Sequence
  Description of Artificial Sequence: Synthetic oligonucleotide
auaucuacaauguucaguc

SEQ ID NO: 728093 - RNA, 19 nt, Artificial Sequence
  Description of Artificial Sequence: Synthetic oligonucleotide
aaagccuuuaggucaaggc

SEQ ID NO: 728094 - RNA, 19 nt, Artificial Sequence
  Description of Artificial Sequence: Synthetic oligonucleotide
uauacuuccacauagcgcu

SEQ ID NO: 728095 - RNA, 19 nt, Artificial Sequence
  Description of Artificial Sequence: Synthetic oligonucleotide
agagcucucaaccauaggc

SEQ ID NO: 728096 - RNA, 19 nt, Artificial Sequence
  Description of Artificial Sequence: Synthetic oligonucleotide
uuuaggucaaggcuuaggg

SEQ ID NO: 728097 - RNA, 19 nt, Artificial Sequence
  Description of Artificial Sequence: Synthetic oligonucleotide
ucucaagcgaaccacaccg

SEQ ID NO: 728098 - RNA, 19 nt, Artificial Sequence
  Description of Artificial Sequence: Synthetic oligonucleotide
aguucuaucucuuuaucac

SEQ ID NO: 728099 - RNA, 19 nt, Artificial Sequence
  Description of Artificial Sequence: Synthetic oligonucleotide
aguuacauaaaccagacuu

SEQ ID NO: 728100 - RNA, 19 nt, Artificial Sequence
  Description of Artificial Sequence: Synthetic oligonucleotide
agauuugacauguaggcuc

SEQ ID NO: 728101 - RNA, 19 nt, Artificial Sequence
  Description of Artificial Sequence: Synthetic oligonucleotide
cuauuuaguauuaaagcag

SEQ ID NO: 728102 - RNA, 19 nt, Artificial Sequence
  Description of Artificial Sequence: Synthetic oligonucleotide
cuuguucuaaaauaugggg

SEQ ID NO: 728103 - RNA, 19 nt, Artificial Sequence
  Description of Artificial Sequence: Synthetic oligonucleotide
aucucuauguaucuguuac

SEQ ID NO: 728104 - RNA, 19 nt, Artificial Sequence
  Description of Artificial Sequence: Synthetic oligonucleotide
ucuguuaccaauuucuucu

SEQ ID NO: 728105 - RNA, 19 nt, Artificial Sequence
  Description of Artificial Sequence: Synthetic oligonucleotide
auuaaauacagacaaacua

SEQ ID NO: 728106 - RNA, 19 nt, Artificial Sequence
  Description of Artificial Sequence: Synthetic oligonucleotide
aaaguuaaguuuauuaaug

SEQ ID NO: 728107 - RNA, 19 nt, Artificial Sequence
  Description of Artificial Sequence: Synthetic oligonucleotide
uauacauaaaguuaaguuu

SEQ ID NO: 728108 - RNA, 19 nt, Artificial Sequence
  Description of Artificial Sequence: Synthetic oligonucleotide
uuaagaacaucuuccacag

SEQ ID NO: 728109 - RNA, 19 nt, Artificial Sequence
  Description of Artificial Sequence: Synthetic oligonucleotide
aggacaugaauuuaggaag

SEQ ID NO: 728110 - RNA, 19 nt, Artificial Sequence
  Description of Artificial Sequence: Synthetic oligonucleotide
ucaaauaccacuucuggcu

SEQ ID NO: 728111 - RNA, 19 nt, Artificial Sequence
  Description of Artificial Sequence: Synthetic oligonucleotide
ucaacucguacucagguag

SEQ ID NO: 728112 - RNA, 19 nt, Artificial Sequence
  Description of Artificial Sequence: Synthetic oligonucleotide
aaaccagacuuucucaauc

SEQ ID NO: 728113 - RNA, 19 nt, Artificial Sequence
  Description of Artificial Sequence: Synthetic oligonucleotide
agagaugugcaaaugaggc

SEQ ID NO: 728114 - RNA, 19 nt, Artificial Sequence
  Description of Artificial Sequence: Synthetic oligonucleotide
uauuuaguauuaaagcaga

SEQ ID NO: 728115 - RNA, 19 nt, Artificial Sequence
  Description of Artificial Sequence: Synthetic oligonucleotide
cauuguuuaucucauauac

SEQ ID NO: 728116 - RNA, 19 nt, Artificial Sequence
  Description of Artificial Sequence: Synthetic oligonucleotide
aaggaaguccucucaagcg

SEQ ID NO: 728117 - RNA, 19 nt, Artificial Sequence
  Description of Artificial Sequence: Synthetic oligonucleotide
uuuaggacaugaauuuagg

SEQ ID NO: 728118 - RNA, 19 nt, Artificial Sequence
  Description of Artificial Sequence: Synthetic oligonucleotide
aaagcgaaugaggagacuc

SEQ ID NO: 728119 - RNA, 19 nt, Artificial Sequence
  Description of Artificial Sequence: Synthetic oligonucleotide
aaauaugggguagcuaccc

SEQ ID NO: 728120 - RNA, 19 nt, Artificial Sequence
  Description of Artificial Sequence: Synthetic oligonucleotide
ucaauuaaggcaucgcccc

SEQ ID NO: 728121 - RNA, 19 nt, Artificial Sequence
  Description of Artificial Sequence: Synthetic oligonucleotide
uguagcuuauuucauaauc

SEQ ID NO: 728122 - RNA, 19 nt, Artificial Sequence
  Description of Artificial Sequence: Synthetic oligonucleotide
gguaucaaagugcacaucg

SEQ ID NO: 728123 - RNA, 19 nt, Artificial Sequence
  Description of Artificial Sequence: Synthetic oligonucleotide
uguaggcucuucauuaagg

SEQ ID NO: 728124 - RNA, 19 nt, Artificial Sequence
  Description of Artificial Sequence: Synthetic oligonucleotide
ucuaaagacaaaacugcca

SEQ ID NO: 728125 - RNA, 19 nt, Artificial Sequence
  Description of Artificial Sequence: Synthetic oligonucleotide
aauaugggguagcuacccc

SEQ ID NO: 728126 - RNA, 19 nt, Artificial Sequence
  Description of Artificial Sequence: Synthetic oligonucleotide
aagacaggcacccacauua

SEQ ID NO: 728127 - RNA, 19 nt, Artificial Sequence
  Description of Artificial Sequence: Synthetic oligonucleotide
ugaauuuaggaagagcuca

SEQ ID NO: 728128 - RNA, 19 nt, Artificial Sequence
  Description of Artificial Sequence: Synthetic oligonucleotide
ugugacauauccuccauga

SEQ ID NO: 728129 - RNA, 19 nt, Artificial Sequence
  Description of Artificial Sequence: Synthetic oligonucleotide
uaaguuacauaaaccagac

SEQ ID NO: 728130 - RNA, 19 nt, Artificial Sequence
  Description of Artificial Sequence: Synthetic oligonucleotide
uuguuuaucucauauacuu

SEQ ID NO: 728131 - RNA, 19 nt, Artificial Sequence
  Description of Artificial Sequence: Synthetic oligonucleotide
cuauaguccaucacaaaag

SEQ ID NO: 728132 - RNA, 19 nt, Artificial Sequence
  Description of Artificial Sequence: Synthetic oligonucleotide
auaggugaagauuugacau

SEQ ID NO: 728133 - RNA, 19 nt, Artificial Sequence
  Description of Artificial Sequence: Synthetic oligonucleotide
uucaaacugaacauaggcu

SEQ ID NO: 728134 - RNA, 19 nt, Artificial Sequence
  Description of Artificial Sequence: Synthetic oligonucleotide
aggaaacuaaguuacauaa

SEQ ID NO: 728135 - RNA, 19 nt, Artificial Sequence
  Description of Artificial Sequence: Synthetic oligonucleotide
ucaaacugaacauaggcuu

SEQ ID NO: 728136 - RNA, 19 nt, Artificial Sequence
  Description of Artificial Sequence: Synthetic oligonucleotide
aaaauaugggguagcuacc

SEQ ID NO: 728137 - RNA, 19 nt, Artificial Sequence
  Description of Artificial Sequence: Synthetic oligonucleotide
uaggacaugaauuuaggaa

SEQ ID NO: 728138 - RNA, 19 nt, Artificial Sequence
  Description of Artificial Sequence: Synthetic oligonucleotide
ggagugaaggcauugaucc

SEQ ID NO: 728139 - RNA, 19 nt, Artificial Sequence
  Description of Artificial Sequence: Synthetic oligonucleotide
cucaauuaaggcaucgccc

SEQ ID NO: 728140 - RNA, 19 nt, Artificial Sequence
  Description of Artificial Sequence: Synthetic oligonucleotide
ucaucugagguucugcuga

SEQ ID NO: 728141 - RNA, 19 nt, Artificial Sequence
  Description of Artificial Sequence: Synthetic oligonucleotide
caagugaccacuuaugcuc

SEQ ID NO: 728142 - RNA, 19 nt, Artificial Sequence
  Description of Artificial Sequence: Synthetic oligonucleotide
cuauguugaacaugggacc

SEQ ID NO: 728143 - RNA, 19 nt, Artificial Sequence
  Description of Artificial Sequence: Synthetic oligonucleotide
aauagagcaucaucuguga

SEQ ID NO: 728144 - RNA, 19 nt, Artificial Sequence
  Description of Artificial Sequence: Synthetic oligonucleotide
cuuucuggcucuaaacacg

SEQ ID NO: 728145 - RNA, 19 nt, Artificial Sequence
  Description of Artificial Sequence: Synthetic oligonucleotide
uuaccauaggugaagauuu

SEQ ID NO: 728146 - RNA, 19 nt, Artificial Sequence
  Description of Artificial Sequence: Synthetic oligonucleotide
agguucaagagagaugugc

SEQ ID NO: 728147 - RNA, 19 nt, Artificial Sequence
  Description of Artificial Sequence: Synthetic oligonucleotide
ugaauagagcaucaucugu

SEQ ID NO: 728148 - RNA, 19 nt, Artificial Sequence
  Description of Artificial Sequence: Synthetic oligonucleotide
uauguugaacaugggaccg

SEQ ID NO: 728149 - RNA, 19 nt, Artificial Sequence
  Description of Artificial Sequence: Synthetic oligonucleotide
cuaaguuacauaaaccaga

SEQ ID NO: 728150 - RNA, 19 nt, Artificial Sequence
  Description of Artificial Sequence: Synthetic oligonucleotide
acugaauagagcaucaucu

SEQ ID NO: 728151 - RNA, 19 nt, Artificial Sequence
  Description of Artificial Sequence: Synthetic oligonucleotide
aaugcuaguuuuauuuaag

SEQ ID NO: 728152 - RNA, 19 nt, Artificial Sequence
  Description of Artificial Sequence: Synthetic oligonucleotide
cucaguuauauauuuagca

SEQ ID NO: 728153 - RNA, 19 nt, Artificial Sequence
  Description of Artificial Sequence: Synthetic oligonucleotide
ucuggcucuaaacacgaug

SEQ ID NO: 728154 - RNA, 19 nt, Artificial Sequence
  Description of Artificial Sequence: Synthetic oligonucleotide
acagaaauacagcucuauc

SEQ ID NO: 728155 - RNA, 19 nt, Artificial Sequence
  Description of Artificial Sequence: Synthetic oligonucleotide
ucuacaauguucaguccug

SEQ ID NO: 728156 - RNA, 19 nt, Artificial Sequence
  Description of Artificial Sequence: Synthetic oligonucleotide
gagaugugcaaaugaggcg

SEQ ID NO: 728157 - RNA, 19 nt, Artificial Sequence
  Description of Artificial Sequence: Synthetic oligonucleotide
acagcucuauccauaaacc

SEQ ID NO: 728158 - RNA, 19 nt, Artificial Sequence
  Description of Artificial Sequence: Synthetic oligonucleotide
gacaaaguggagugaaggc

SEQ ID NO: 728159 - RNA, 19 nt, Artificial Sequence
  Description of Artificial Sequence: Synthetic oligonucleotide
ucuagagcugguuuaauua

SEQ ID NO: 728160 - RNA, 19 nt, Artificial Sequence
  Description of Artificial Sequence: Synthetic oligonucleotide
guagcuuauuucauaaucc

SEQ ID NO: 728161 - RNA, 19 nt, Artificial Sequence
  Description of Artificial Sequence: Synthetic oligonucleotide
cugagcucgaaugagauac

SEQ ID NO: 728162 - RNA, 19 nt, Artificial Sequence
  Description of Artificial Sequence: Synthetic oligonucleotide
aaagagcagcacugaauag

SEQ ID NO: 728163 - RNA, 19 nt, Artificial Sequence
  Description of Artificial Sequence: Synthetic oligonucleotide
uguucaguccugcaaagaa

SEQ ID NO: 728164 - RNA, 19 nt, Artificial Sequence
  Description of Artificial Sequence: Synthetic oligonucleotide
aucuguuaccaauuucuuc

SEQ ID NO: 728165 - RNA, 19 nt, Artificial Sequence
  Description of Artificial Sequence: Synthetic oligonucleotide
cuuagggaggcaaaguuuc

SEQ ID NO: 728166 - RNA, 19 nt, Artificial Sequence
  Description of Artificial Sequence: Synthetic oligonucleotide
aucuacaauguucaguccu

SEQ ID NO: 728167 - RNA, 19 nt, Artificial Sequence
  Description of Artificial Sequence: Synthetic oligonucleotide
acaugaauuuaggaagagc

SEQ ID NO: 728168 - RNA, 19 nt, Artificial Sequence
  Description of Artificial Sequence: Synthetic oligonucleotide
uuaggaagagcucaauaua

SEQ ID NO: 728169 - RNA, 19 nt, Artificial Sequence
  Description of Artificial Sequence: Synthetic oligonucleotide
caugaauuuaggaagagcu

SEQ ID NO: 728170 - RNA, 19 nt, Artificial Sequence
  Description of Artificial Sequence: Synthetic oligonucleotide
  modified_base (3)..(3): a, c, u, g, unknown or other
acnguuucggauucugcag

SEQ ID NO: 728171 - RNA, 19 nt, Artificial Sequence
  Description of Artificial Sequence: Synthetic oligonucleotide
aguuuuacaucagagcucu

SEQ ID NO: 728172 - RNA, 19 nt, Artificial Sequence
  Description of Artificial Sequence: Synthetic oligonucleotide
ucgacaaugucuuucucgu

SEQ ID NO: 728173 - RNA, 19 nt, Artificial Sequence
  Description of Artificial Sequence: Synthetic oligonucleotide
auuuaagcaaggcaccccu

SEQ ID NO: 728174 - RNA, 19 nt, Artificial Sequence
  Description of Artificial Sequence: Synthetic oligonucleotide
uuagccuagacuucccaug

SEQ ID NO: 728175 - RNA, 19 nt, Artificial Sequence
  Description of Artificial Sequence: Synthetic oligonucleotide
aauccucucauguggacaa

SEQ ID NO: 728176 - RNA, 19 nt, Artificial Sequence
  Description of Artificial Sequence: Synthetic oligonucleotide
uuuacaucagagcucucaa

SEQ ID NO: 728177 - RNA, 19 nt, Artificial Sequence
  Description of Artificial Sequence: Synthetic oligonucleotide
augagauacacaucgucca

SEQ ID NO: 728178 - RNA, 19 nt, Artificial Sequence
  Description of Artificial Sequence: Synthetic oligonucleotide
uuauagcccagguucaaga

SEQ ID NO: 728179 - RNA, 19 nt, Artificial Sequence
  Description of Artificial Sequence: Synthetic oligonucleotide
auuaaggcaucgccccucc

SEQ ID NO: 728180 - RNA, 19 nt, Artificial Sequence
  Description of Artificial Sequence: Synthetic oligonucleotide
ucuuuauagcccagguuca

SEQ ID NO: 728181 - RNA, 19 nt, Artificial Sequence
  Description of Artificial Sequence: Synthetic oligonucleotide
ugaacauaggcuuccccug

SEQ ID NO: 728182 - RNA, 19 nt, Artificial Sequence
  Description of Artificial Sequence: Synthetic oligonucleotide
uuauuuaagcaaggcaccc

SEQ ID NO: 728183 - RNA, 19 nt, Artificial Sequence
  Description of Artificial Sequence: Synthetic oligonucleotide
uaauuagagagaagcuaca

SEQ ID NO: 728184 - RNA, 19 nt, Artificial Sequence
  Description of Artificial Sequence: Synthetic oligonucleotide
aagucgacaaugucuuucu

SEQ ID NO: 728185 - RNA, 19 nt, Artificial Sequence
  Description of Artificial Sequence: Synthetic oligonucleotide
acugaacauaggcuucccc

SEQ ID NO: 728186 - RNA, 19 nt, Artificial Sequence
  Description of Artificial Sequence: Synthetic oligonucleotide
aauuaaggcaucgccccuc

SEQ ID NO: 728187 - RNA, 19 nt, Artificial Sequence
  Description of Artificial Sequence: Synthetic oligonucleotide
ucagauccaggacuguuca

SEQ ID NO: 728188 - RNA, 19 nt, Artificial Sequence
  Description of Artificial Sequence: Synthetic oligonucleotide
uuuaccauaggugaagauu

SEQ ID NO: 728189 - RNA, 19 nt, Artificial Sequence
  Description of Artificial Sequence: Synthetic oligonucleotide
aaguccucucaagcgaacc

SEQ ID NO: 728190 - RNA, 19 nt, Artificial Sequence
  Description of Artificial Sequence: Synthetic oligonucleotide
uagcuuauuucauaauccu

SEQ ID NO: 728191 - RNA, 19 nt, Artificial Sequence
  Description of Artificial Sequence: Synthetic oligonucleotide
uuaagcaaggcaccccuac

SEQ ID NO: 728192 - RNA, 19 nt, Artificial Sequence
  Description of Artificial Sequence: Synthetic oligonucleotide
auagcgcugccccauguac

SEQ ID NO: 728193 - RNA, 19 nt, Artificial Sequence
  Description of Artificial Sequence: Synthetic oligonucleotide
uccucaaauaccacuucug

SEQ ID NO: 728194 - RNA, 19 nt, Artificial Sequence
  Description of Artificial Sequence: Synthetic oligonucleotide
uccuuaggcaguucuaucu

SEQ ID NO: 728195 - RNA, 19 nt, Artificial Sequence
  Description of Artificial Sequence: Synthetic oligonucleotide
aaaagcgcuugguuggcca

SEQ ID NO: 728196 - RNA, 19 nt, Artificial Sequence
  Description of Artificial Sequence: Synthetic oligonucleotide
augggaccgauccuugagc

SEQ ID NO: 728197 - RNA, 19 nt, Artificial Sequence
  Description of Artificial Sequence: Synthetic oligonucleotide
ucugagguucugcugacgu

SEQ ID NO: 728198 - RNA, 19 nt, Artificial Sequence
  Description of Artificial Sequence: Synthetic oligonucleotide
accgucauuuaccauaggu

SEQ ID NO: 728199 - RNA, 19 nt, Artificial Sequence
  Description of Artificial Sequence: Synthetic oligonucleotide
aagcaauuaaauacagaca

SEQ ID NO: 728200 - RNA, 19 nt, Artificial Sequence
  Description of Artificial Sequence: Synthetic oligonucleotide
gcuacaauguccuuaccag

SEQ ID NO: 728201 - RNA, 19 nt, Artificial Sequence
  Description of Artificial Sequence: Synthetic oligonucleotide
acacuacuugaccaaauca

SEQ ID NO: 728202 - RNA, 19 nt, Artificial Sequence
  Description of Artificial Sequence: Synthetic oligonucleotide
ucuaaaauaugggguagcu

SEQ ID NO: 728203 - RNA, 19 nt, Artificial Sequence
  Description of Artificial Sequence: Synthetic oligonucleotide
auagagcaucaucugugac

SEQ ID NO: 728204 - RNA, 19 nt, Artificial Sequence
  Description of Artificial Sequence: Synthetic oligonucleotide
ggcucaguuauauauuuag

SEQ ID NO: 728205 - RNA, 19 nt, Artificial Sequence
  Description of Artificial Sequence: Synthetic oligonucleotide
acgagcggaaauaagguuc

SEQ ID NO: 728206 - RNA, 19 nt, Artificial Sequence
  Description of Artificial Sequence: Synthetic oligonucleotide
cuuaugagauccaacaugu

SEQ ID NO: 728207 - RNA, 19 nt, Artificial Sequence
  Description of Artificial Sequence: Synthetic oligonucleotide
uaggugaagauuugacaug

SEQ ID NO: 728208 - RNA, 19 nt, Artificial Sequence
  Description of Artificial Sequence: Synthetic oligonucleotide
aagauuugacauguaggcu

SEQ ID NO: 728209 - RNA, 19 nt, Artificial Sequence
  Description of Artificial Sequence: Synthetic oligonucleotide
ucggaaauaucucuaugua

SEQ ID NO: 728210 - RNA, 19 nt, Artificial Sequence
  Description of Artificial Sequence: Synthetic oligonucleotide
aaacgagcggaaauaaggu

SEQ ID NO: 728211 - RNA, 19 nt, Artificial Sequence
  Description of Artificial Sequence: Synthetic oligonucleotide
uuaggucaaggcuuaggga

SEQ ID NO: 728212 - RNA, 19 nt, Artificial Sequence
  Description of Artificial Sequence: Synthetic oligonucleotide
uccuguccuaacuuggaug

SEQ ID NO: 728213 - RNA, 19 nt, Artificial Sequence
  Description of Artificial Sequence: Synthetic oligonucleotide
accaaggcagucccugagc

SEQ ID NO: 728214 - RNA, 19 nt, Artificial Sequence
  Description of Artificial Sequence: Synthetic oligonucleotide
ucucuauguaucuguuacc

SEQ ID NO: 728215 - RNA, 19 nt, Artificial Sequence
  Description of Artificial Sequence: Synthetic oligonucleotide
ugagauacacaucguccac

SEQ ID NO: 728216 - RNA, 19 nt, Artificial Sequence
  Description of Artificial Sequence: Synthetic oligonucleotide
uauuuaagcaaggcacccc

SEQ ID NO: 728217 - RNA, 19 nt, Artificial Sequence
  Description of Artificial Sequence: Synthetic oligonucleotide
ugagguucugcugacgucu

SEQ ID NO: 728218 - RNA, 19 nt, Artificial Sequence
  Description of Artificial Sequence: Synthetic oligonucleotide
ugcagcuauaaggaagucc

SEQ ID NO: 728219 - RNA, 19 nt, Artificial Sequence
  Description of Artificial Sequence: Synthetic oligonucleotide
aaaugaggcgcucccugcu

SEQ ID NO: 728220 - RNA, 19 nt, Artificial Sequence
  Description of Artificial Sequence: Synthetic oligonucleotide
ucauaggccgaauauccuc

SEQ ID NO: 728221 - RNA, 19 nt, Artificial Sequence
  Description of Artificial Sequence: Synthetic oligonucleotide
acucaacucguacucaggu

SEQ ID NO: 728222 - RNA, 19 nt, Artificial Sequence
  Description of Artificial Sequence: Synthetic oligonucleotide
uuucuaaggccuucugaac

SEQ ID NO: 728223 - RNA, 19 nt, Artificial Sequence
  Description of Artificial Sequence: Synthetic oligonucleotide
uggagugaaggcauugauc

SEQ ID NO: 728224 - RNA, 19 nt, Artificial Sequence
  Description of Artificial Sequence: Synthetic oligonucleotide
ucuauccauaaacccuuca

SEQ ID NO: 728225 - RNA, 19 nt, Artificial Sequence
  Description of Artificial Sequence: Synthetic oligonucleotide
aagcgaaugaggagacucg

SEQ ID NO: 728226 - RNA, 19 nt, Artificial Sequence
  Description of Artificial Sequence: Synthetic oligonucleotide
aagcuacaauguccuuacc

SEQ ID NO: 728227 - RNA, 19 nt, Artificial Sequence
  Description of Artificial Sequence: Synthetic oligonucleotide
ccauaaacccuucacacag

SEQ ID NO: 728228 - RNA, 19 nt, Artificial Sequence
  Description of Artificial Sequence: Synthetic oligonucleotide
accacuuaugcucaauaau

SEQ ID NO: 728229 - RNA, 19 nt, Artificial Sequence
  Description of Artificial Sequence: Synthetic oligonucleotide
cagcucuauccauaaaccc

SEQ ID NO: 728230 - RNA, 19 nt, Artificial Sequence
  Description of Artificial Sequence: Synthetic oligonucleotide
uuuagcaguaggagaugac

SEQ ID NO: 728231 - RNA, 19 nt, Artificial Sequence
  Description of Artificial Sequence: Synthetic oligonucleotide
auuucuagcccuaagcaau

SEQ ID NO: 728232 - RNA, 19 nt, Artificial Sequence
  Description of Artificial Sequence: Synthetic oligonucleotide
aaggcuuagggaggcaaag

SEQ ID NO: 728233 - RNA, 19 nt, Artificial Sequence
  Description of Artificial Sequence: Synthetic oligonucleotide
aaguuacauaaaccagacu

SEQ ID NO: 728234 - RNA, 19 nt, Artificial Sequence
  Description of Artificial Sequence: Synthetic oligonucleotide
acuagagcuguacuccaug

SEQ ID NO: 728235 - RNA, 19 nt, Artificial Sequence
  Description of Artificial Sequence: Synthetic oligonucleotide
uuaucaucugagguucugc

SEQ ID NO: 728236 - RNA, 19 nt, Artificial Sequence
  Description of Artificial Sequence: Synthetic oligonucleotide
aagcgaaccacaccgucau

SEQ ID NO: 728237 - RNA, 19 nt, Artificial Sequence
  Description of Artificial Sequence: Synthetic oligonucleotide
uagccuagacuucccauga

SEQ ID NO: 728238 - RNA, 19 nt, Artificial Sequence
  Description of Artificial Sequence: Synthetic oligonucleotide
aacguccugcuccgacucc

SEQ ID NO: 728239 - RNA, 19 nt, Artificial Sequence
  Description of Artificial Sequence: Synthetic oligonucleotide
uagcccuaagcaauuaaau

SEQ ID NO: 728240 - RNA, 19 nt, Artificial Sequence
  Description of Artificial Sequence: Synthetic oligonucleotide
ccuguccuaacuuggaugg

SEQ ID NO: 728241 - RNA, 19 nt, Artificial Sequence
  Description of Artificial Sequence: Synthetic oligonucleotide
uaaggcaucgccccuccgu

SEQ ID NO: 728242 - RNA, 19 nt, Artificial Sequence
  Description of Artificial Sequence: Synthetic oligonucleotide
  modified_base (5)..(5): a, c, u, g, unknown or other
ucacnguuucggauucugc

SEQ ID NO: 728243 - RNA, 19 nt, Artificial Sequence
  Description of Artificial Sequence: Synthetic oligonucleotide
uccuuaucaucugagguuc

SEQ ID NO: 728244 - RNA, 19 nt, Artificial Sequence
  Description of Artificial Sequence: Synthetic oligonucleotide
auaugggguagcuacccca

SEQ ID NO: 728245 - RNA, 19 nt, Artificial Sequence
  Description of Artificial Sequence: Synthetic oligonucleotide
uuaugagauccaacaugug

SEQ ID NO: 728246 - RNA, 19 nt, Artificial Sequence
  Description of Artificial Sequence: Synthetic oligonucleotide
cacacaguuauauauuaaa

SEQ ID NO: 728247 - RNA, 19 nt, Artificial Sequence
  Description of Artificial Sequence: Synthetic oligonucleotide
  modified_base (4)..(4): a, c, u, g, unknown or other
cacnguuucggauucugca

SEQ ID NO: 728248 - RNA, 19 nt, Artificial Sequence
  Description of Artificial Sequence: Synthetic oligonucleotide
aacgagcggaaauaagguu

SEQ ID NO: 728249 - RNA, 19 nt, Artificial Sequence
  Description of Artificial Sequence: Synthetic oligonucleotide
uuaccagucugguuagccu

SEQ ID NO: 728250 - RNA, 19 nt, Artificial Sequence
  Description of Artificial Sequence: Synthetic oligonucleotide
ggaaaagcgaaugaggaga

SEQ ID NO: 728251 - RNA, 19 nt, Artificial Sequence
  Description of Artificial Sequence: Synthetic oligonucleotide
  modified_base (9)..(9): a, c, u, g, unknown or other
auucucacnguuucggauu

SEQ ID NO: 728252 - RNA, 19 nt, Artificial Sequence
  Description of Artificial Sequence: Synthetic oligonucleotide
uaugggguagcuaccccac

SEQ ID NO: 728253 - RNA, 19 nt, Artificial Sequence
  Description of Artificial Sequence: Synthetic oligonucleotide
guagcuaccccacuggaaa

SEQ ID NO: 728254 - RNA, 19 nt, Artificial Sequence
  Description of Artificial Sequence: Synthetic oligonucleotide
uaccccacuggaaaagcga

SEQ ID NO: 728255 - RNA, 19 nt, Artificial Sequence
  Description of Artificial Sequence: Synthetic oligonucleotide
gacaugaauuuaggaagag

SEQ ID NO: 728256 - RNA, 19 nt, Artificial Sequence
  Description of Artificial Sequence: Synthetic oligonucleotide
guaucuguuaccaauuucu

SEQ ID NO: 728257 - RNA, 19 nt, Artificial Sequence
  Description of Artificial Sequence: Synthetic oligonucleotide
uauccuccaugacaggaaa

SEQ ID NO: 728258 - RNA, 19 nt, Artificial Sequence
  Description of Artificial Sequence: Synthetic oligonucleotide
cacuacuugaccaaaucaa

SEQ ID NO: 728259 - RNA, 19 nt, Artificial Sequence
  Description of Artificial Sequence: Synthetic oligonucleotide
gagcauagcugcaacagca

SEQ ID NO: 728260 - RNA, 19 nt, Artificial Sequence
  Description of Artificial Sequence: Synthetic oligonucleotide
cuuuaggucaaggcuuagg

SEQ ID NO: 728261 - RNA, 19 nt, Artificial Sequence
  Description of Artificial Sequence: Synthetic oligonucleotide
ucaagcgaaccacaccguc

SEQ ID NO: 728262 - RNA, 19 nt, Artificial Sequence
  Description of Artificial Sequence: Synthetic oligonucleotide
ucuagcccuaagcaauuaa

SEQ ID NO: 728263 - RNA, 19 nt, Artificial Sequence
  Description of Artificial Sequence: Synthetic oligonucleotide
agcuauaaggaaguccucu

SEQ ID NO: 728264 - RNA, 19 nt, Artificial Sequence
  Description of Artificial Sequence: Synthetic oligonucleotide
aggugaagauuugacaugu

SEQ ID NO: 728265 - RNA, 19 nt, Artificial Sequence
  Description of Artificial Sequence: Synthetic oligonucleotide
agcucuauccauaaacccu

SEQ ID NO: 728266 - RNA, 19 nt, Artificial Sequence
  Description of Artificial Sequence: Synthetic oligonucleotide
gaaaagcgaaugaggagac

SEQ ID NO: 728267 - RNA, 19 nt, Artificial Sequence
  Description of Artificial Sequence: Synthetic oligonucleotide
aaagcugucauaggccgaa

SEQ ID NO: 728268 - RNA, 19 nt, Artificial Sequence
  Description of Artificial Sequence: Synthetic oligonucleotide
uacaauguucaguccugca

SEQ ID NO: 728269 - RNA, 19 nt, Artificial Sequence
  Description of Artificial Sequence: Synthetic oligonucleotide
  modified_base (18)..(18): a, c, u, g, unknown or other
ucggauucugcagucugng

SEQ ID NO: 728270 - RNA, 19 nt, Artificial Sequence
  Description of Artificial Sequence: Synthetic oligonucleotide
cuaccccacuggaaaagcg

SEQ ID NO: 728271 - RNA, 19 nt, Artificial Sequence
  Description of Artificial Sequence: Synthetic oligonucleotide
uaagcaaggcaccccuacu

SEQ ID NO: 728272 - RNA, 19 nt, Artificial Sequence
  Description of Artificial Sequence: Synthetic oligonucleotide
  modified_base (8)..(8): a, c, u, g, unknown or other
uucucacnguuucggauuc

SEQ ID NO: 728273 - RNA, 19 nt, Artificial Sequence
  Description of Artificial Sequence: Synthetic oligonucleotide
auccggugcuuuucuaagg

SEQ ID NO: 728274 - RNA, 19 nt, Artificial Sequence
  Description of Artificial Sequence: Synthetic oligonucleotide
cuaagcaauuaaauacaga

SEQ ID NO: 728275 - RNA, 19 nt, Artificial Sequence
  Description of Artificial Sequence: Synthetic oligonucleotide
auuguuuaucucauauacu

SEQ ID NO: 728276 - RNA, 19 nt, Artificial Sequence
  Description of Artificial Sequence: Synthetic oligonucleotide
ugaccacuuaugcucaaua

SEQ ID NO: 728277 - RNA, 19 nt, Artificial Sequence
  Description of Artificial Sequence: Synthetic oligonucleotide
ugggaccgauccuugagca

SEQ ID NO: 728278 - RNA, 19 nt, Artificial Sequence
  Description of Artificial Sequence: Synthetic oligonucleotide
uacacaucguccaccuccu

SEQ ID NO: 728279 - RNA, 19 nt, Artificial Sequence
  Description of Artificial Sequence: Synthetic oligonucleotide
accacaccgucauuuacca

SEQ ID NO: 728280 - RNA, 19 nt, Artificial Sequence
  Description of Artificial Sequence: Synthetic oligonucleotide
ucuauguaucuguuaccaa

SEQ ID NO: 728281 - RNA, 19 nt, Artificial Sequence
  Description of Artificial Sequence: Synthetic oligonucleotide
aucagauccaggacuguuc

SEQ ID NO: 728282 - RNA, 19 nt, Artificial Sequence
  Description of Artificial Sequence: Synthetic oligonucleotide
ucugguuagccuagacuuc

SEQ ID NO: 728283 - RNA, 19 nt, Artificial Sequence
  Description of Artificial Sequence: Synthetic oligonucleotide
cauccggugcuuuucuaag

SEQ ID NO: 728284 - RNA, 19 nt, Artificial Sequence
  Description of Artificial Sequence: Synthetic oligonucleotide
auccaacauguguucgaac

SEQ ID NO: 728285 - RNA, 19 nt, Artificial Sequence
  Description of Artificial Sequence: Synthetic oligonucleotide
uuaaaagcgcuugguuggc

SEQ ID NO: 728286 - RNA, 19 nt, Artificial Sequence
  Description of Artificial Sequence: Synthetic oligonucleotide
cugguuagccuagacuucc

SEQ ID NO: 728287 - RNA, 19 nt, Artificial Sequence
  Description of Artificial Sequence: Synthetic oligonucleotide
ccuuaugagauccaacaug

SEQ ID NO: 728288 - RNA, 19 nt, Artificial Sequence
  Description of Artificial Sequence: Synthetic oligonucleotide
uccuuaccagucugguuag

SEQ ID NO: 728289 - RNA, 19 nt, Artificial Sequence
  Description of Artificial Sequence: Synthetic oligonucleotide
aggccgaauauccucauuu

SEQ ID NO: 728290 - RNA, 19 nt, Artificial Sequence
  Description of Artificial Sequence: Synthetic oligonucleotide
uauuuagcaguaggagaug

SEQ ID NO: 728291 - RNA, 19 nt, Artificial Sequence
  Description of Artificial Sequence: Synthetic oligonucleotide
agcucaauauaccuauguu

SEQ ID NO: 728292 - RNA, 19 nt, Artificial Sequence
  Description of Artificial Sequence: Synthetic oligonucleotide
uucugcucggaaauaucuc

SEQ ID NO: 728293 - RNA, 19 nt, Artificial Sequence
  Description of Artificial Sequence: Synthetic oligonucleotide
ugaacguccugcuccgacu

SEQ ID NO: 728294 - RNA, 19 nt, Artificial Sequence
  Description of Artificial Sequence: Synthetic oligonucleotide
aguccugcaaagaagucga

SEQ ID NO: 728295 - RNA, 19 nt, Artificial Sequence
  Description of Artificial Sequence: Synthetic oligonucleotide
uuugccuuaugagauccaa

SEQ ID NO: 728296 - RNA, 19 nt, Artificial Sequence
  Description of Artificial Sequence: Synthetic oligonucleotide
cucuauguaucuguuacca

SEQ ID NO: 728297 - RNA, 19 nt, Artificial Sequence
  Description of Artificial Sequence: Synthetic oligonucleotide
aaucaaaaucagacuggcu

SEQ ID NO: 728298 - RNA, 19 nt, Artificial Sequence
  Description of Artificial Sequence: Synthetic oligonucleotide
uaaacacuacuugaccaaa

SEQ ID NO: 728299 - RNA, 19 nt, Artificial Sequence
  Description of Artificial Sequence: Synthetic oligonucleotide
aauuuaggaagagcucaau

SEQ ID NO: 728300 - RNA, 19 nt, Artificial Sequence
  Description of Artificial Sequence: Synthetic oligonucleotide
acgucuuauuuuccuuuag

SEQ ID NO: 728301 - RNA, 19 nt, Artificial Sequence
  Description of Artificial Sequence: Synthetic oligonucleotide
uucuaaagagcagcacuga

SEQ ID NO: 728302 - RNA, 19 nt, Artificial Sequence
  Description of Artificial Sequence: Synthetic oligonucleotide
agcgaaugaggagacucgg

SEQ ID NO: 728303 - RNA, 19 nt, Artificial Sequence
  Description of Artificial Sequence: Synthetic oligonucleotide
uagagcuguacuccauggu

SEQ ID NO: 728304 - RNA, 19 nt, Artificial Sequence
  Description of Artificial Sequence: Synthetic oligonucleotide
ccuaagcaauuaaauacag

SEQ ID NO: 728305 - RNA, 19 nt, Artificial Sequence
  Description of Artificial Sequence: Synthetic oligonucleotide
caugggaccgauccuugag

SEQ ID NO: 728306 - RNA, 19 nt, Artificial Sequence
  Description of Artificial Sequence: Synthetic oligonucleotide
uccucucaagcgaaccaca

SEQ ID NO: 728307 - RNA, 19 nt, Artificial Sequence
  Description of Artificial Sequence: Synthetic oligonucleotide
uggugaguguuuagcaaaa

SEQ ID NO: 728308 - RNA, 19 nt, Artificial Sequence
  Description of Artificial Sequence: Synthetic oligonucleotide
auaagguucuaaagagcag

SEQ ID NO: 728309 - RNA, 19 nt, Artificial Sequence
  Description of Artificial Sequence: Synthetic oligonucleotide
uugccuuaugagauccaac

SEQ ID NO: 728310 - RNA, 19 nt, Artificial Sequence
  Description of Artificial Sequence: Synthetic oligonucleotide
agacuggcuuauuaaaguu

SEQ ID NO: 728311 - RNA, 19 nt, Artificial Sequence
  Description of Artificial Sequence: Synthetic oligonucleotide
cuacuugaccaaaucaaaa

SEQ ID NO: 728312 - RNA, 19 nt, Artificial Sequence
  Description of Artificial Sequence: Synthetic oligonucleotide
uaccuauguugaacauggg

SEQ ID NO: 728313 - RNA, 19 nt, Artificial Sequence
  Description of Artificial Sequence: Synthetic oligonucleotide
acacaguuauauauuaaau

SEQ ID NO: 728314 - RNA, 19 nt, Artificial Sequence
  Description of Artificial Sequence: Synthetic oligonucleotide
cauaggccgaauauccuca

SEQ ID NO: 728315 - RNA, 19 nt, Artificial Sequence
  Description of Artificial Sequence: Synthetic oligonucleotide
gauggacucaacucguacu

SEQ ID NO: 728316 - RNA, 19 nt, Artificial Sequence
  Description of Artificial Sequence: Synthetic oligonucleotide
cucucaagcgaaccacacc

SEQ ID NO: 728317 - RNA, 19 nt, Artificial Sequence
  Description of Artificial Sequence: Synthetic oligonucleotide
gagcaaagaaauuuauaau

SEQ ID NO: 728318 - RNA, 19 nt, Artificial Sequence
  Description of Artificial Sequence: Synthetic oligonucleotide
ugaaaauuucuagcccuaa

SEQ ID NO: 728319 - RNA, 19 nt, Artificial Sequence
  Description of Artificial Sequence: Synthetic oligonucleotide
uguacauccggugcuuuuc

SEQ ID NO: 728320 - RNA, 19 nt, Artificial Sequence
  Description of Artificial Sequence: Synthetic oligonucleotide
agaagcuacaauguccuua

SEQ ID NO: 728321 - RNA, 19 nt, Artificial Sequence
  Description of Artificial Sequence: Synthetic oligonucleotide
agguucuaaagagcagcac

SEQ ID NO: 728322 - RNA, 19 nt, Artificial Sequence
  Description of Artificial Sequence: Synthetic oligonucleotide
uccuaacuuggauggacuc

SEQ ID NO: 728323 - RNA, 19 nt, Artificial Sequence
  Description of Artificial Sequence: Synthetic oligonucleotide
cacaccgucauuuaccaua

SEQ ID NO: 728324 - RNA, 19 nt, Artificial Sequence
  Description of Artificial Sequence: Synthetic oligonucleotide
cuauguaucuguuaccaau

SEQ ID NO: 728325 - RNA, 19 nt, Artificial Sequence
  Description of Artificial Sequence: Synthetic oligonucleotide
cugguuuaauuagagagaa

SEQ ID NO: 728326 - RNA, 19 nt, Artificial Sequence
  Description of Artificial Sequence: Synthetic oligonucleotide
cucggaaauaucucuaugu

SEQ ID NO: 728327 - RNA, 19 nt, Artificial Sequence
  Description of Artificial Sequence: Synthetic oligonucleotide
acuacuugaccaaaucaaa

SEQ ID NO: 728328 - RNA, 19 nt, Artificial Sequence
  Description of Artificial Sequence: Synthetic oligonucleotide
agcucucaaccauaggcaa

SEQ ID NO: 728329 - RNA, 19 nt, Artificial Sequence
  Description of Artificial Sequence: Synthetic oligonucleotide
ucccugagcucgaaugaga

SEQ ID NO: 728330 - RNA, 19 nt, Artificial Sequence
  Description of Artificial Sequence: Synthetic oligonucleotide
auuuaccauaggugaagau

SEQ ID NO: 728331 - RNA, 19 nt, Artificial Sequence
  Description of Artificial Sequence: Synthetic oligonucleotide
uuaaggcaucgccccuccg

SEQ ID NO: 728332 - RNA, 19 nt, Artificial Sequence
  Description of Artificial Sequence: Synthetic oligonucleotide
augaggcgcucccugcuuc

SEQ ID NO: 728333 - RNA, 19 nt, Artificial Sequence
  Description of Artificial Sequence: Synthetic oligonucleotide
aaagcgcuugguuggccau

SEQ ID NO: 728334 - RNA, 19 nt, Artificial Sequence
  Description of Artificial Sequence: Synthetic oligonucleotide
gccaagugaccacuuaugc

SEQ ID NO: 728335 - RNA, 19 nt, Artificial Sequence
  Description of Artificial Sequence: Synthetic oligonucleotide
gucugguuagccuagacuu

SEQ ID NO: 728336 - RNA, 19 nt, Artificial Sequence
  Description of Artificial Sequence: Synthetic oligonucleotide
gagcucucaaccauaggca

SEQ ID NO: 728337 - RNA, 19 nt, Artificial Sequence
  Description of Artificial Sequence: Synthetic oligonucleotide
ugagcucgaaugagauaca

SEQ ID NO: 728338 - RNA, 19 nt, Artificial Sequence
  Description of Artificial Sequence: Synthetic oligonucleotide
ucuaucucuuuaucacuuu

SEQ ID NO: 728339 - RNA, 19 nt, Artificial Sequence
  Description of Artificial Sequence: Synthetic oligonucleotide
ugcucggaaauaucucuau

SEQ ID NO: 728340 - RNA, 19 nt, Artificial Sequence
  Description of Artificial Sequence: Synthetic oligonucleotide
cuagcccuaagcaauuaaa

SEQ ID NO: 728341 - RNA, 19 nt, Artificial Sequence
  Description of Artificial Sequence: Synthetic oligonucleotide
uccugucuagagcugguuu

SEQ ID NO: 728342 - RNA, 19 nt, Artificial Sequence
  Description of Artificial Sequence: Synthetic oligonucleotide
ggacucaacucguacucag

SEQ ID NO: 728343 - RNA, 19 nt, Artificial Sequence
  Description of Artificial Sequence: Synthetic oligonucleotide
gagcucaauauaccuaugu

SEQ ID NO: 728344 - RNA, 19 nt, Artificial Sequence
  Description of Artificial Sequence: Synthetic oligonucleotide
agccuagacuucccaugac

SEQ ID NO: 728345 - RNA, 19 nt, Artificial Sequence
  Description of Artificial Sequence: Synthetic oligonucleotide
uuuaagcaaggcaccccua

SEQ ID NO: 728346 - RNA, 19 nt, Artificial Sequence
  Description of Artificial Sequence: Synthetic oligonucleotide
uagcgcugccccauguaca

SEQ ID NO: 728347 - RNA, 19 nt, Artificial Sequence
  Description of Artificial Sequence: Synthetic oligonucleotide
auaaugucuugggcauugg

SEQ ID NO: 728348 - RNA, 19 nt, Artificial Sequence
  Description of Artificial Sequence: Synthetic oligonucleotide
gaauuuaggaagagcucaa

SEQ ID NO: 728349 - RNA, 19 nt, Artificial Sequence
  Description of Artificial Sequence: Synthetic oligonucleotide
aaacacuacuugaccaaau

SEQ ID NO: 728350 - RNA, 19 nt, Artificial Sequence
  Description of Artificial Sequence: Synthetic oligonucleotide
gaacguccugcuccgacuc

SEQ ID NO: 728351 - RNA, 19 nt, Artificial Sequence
  Description of Artificial Sequence: Synthetic oligonucleotide
ugguuagccuagacuuccc

SEQ ID NO: 728352 - RNA, 19 nt, Artificial Sequence
  Description of Artificial Sequence: Synthetic oligonucleotide
gcucgaaugagauacacau

SEQ ID NO: 728353 - RNA, 19 nt, Artificial Sequence
  Description of Artificial Sequence: Synthetic oligonucleotide
ugcccagauccuuucucca

SEQ ID NO: 728354 - RNA, 19 nt, Artificial Sequence
  Description of Artificial Sequence: Synthetic oligonucleotide
uaaaagcgcuugguuggcc

SEQ ID NO: 728355 - RNA, 19 nt, Artificial Sequence
  Description of Artificial Sequence: Synthetic oligonucleotide
uguugaacaugggaccgau

SEQ ID NO: 728356 - RNA, 19 nt, Artificial Sequence
  Description of Artificial Sequence: Synthetic oligonucleotide
guucaagagagaugugcaa

SEQ ID NO: 728357 - RNA, 19 nt, Artificial Sequence
  Description of Artificial Sequence: Synthetic oligonucleotide
aggacuguucaaauggaau

SEQ ID NO: 728358 - RNA, 19 nt, Artificial Sequence
  Description of Artificial Sequence: Synthetic oligonucleotide
cguugcagcuauaaggaag

SEQ ID NO: 728359 - RNA, 19 nt, Artificial Sequence
  Description of Artificial Sequence: Synthetic oligonucleotide
caagcgaaccacaccguca

SEQ ID NO: 728360 - RNA, 19 nt, Artificial Sequence
  Description of Artificial Sequence: Synthetic oligonucleotide
cuaaacacgaugcccagau

SEQ ID NO: 728361 - RNA, 19 nt, Artificial Sequence
  Description of Artificial Sequence: Synthetic oligonucleotide
  modified_base (6)..(6): a, c, u, g, unknown or other
cucacnguuucggauucug

SEQ ID NO: 728362 - RNA, 19 nt, Artificial Sequence
  Description of Artificial Sequence: Synthetic oligonucleotide
cuuccucuauaguccauca

SEQ ID NO: 728363 - RNA, 19 nt, Artificial Sequence
  Description of Artificial Sequence: Synthetic oligonucleotide
ccucauggguaucaaagug

SEQ ID NO: 728364 - RNA, 19 nt, Artificial Sequence
  Description of Artificial Sequence: Synthetic oligonucleotide
gcuauaaggaaguccucuc

SEQ ID NO: 728365 - RNA, 19 nt, Artificial Sequence
  Description of Artificial Sequence: Synthetic oligonucleotide
cugaacguccugcuccgac

SEQ ID NO: 728366 - RNA, 19 nt, Artificial Sequence
  Description of Artificial Sequence: Synthetic oligonucleotide
gacgucuuauuuuccuuua

SEQ ID NO: 728367 - RNA, 19 nt, Artificial Sequence
  Description of Artificial Sequence: Synthetic oligonucleotide
gcauugauccaaaaucaac

SEQ ID NO: 728368 - RNA, 19 nt, Artificial Sequence
  Description of Artificial Sequence: Synthetic oligonucleotide
cgucauuuaccauagguga

SEQ ID NO: 728369 - RNA, 19 nt, Artificial Sequence
  Description of Artificial Sequence: Synthetic oligonucleotide
guugcagcuauaaggaagu

SEQ ID NO: 728370 - RNA, 19 nt, Artificial Sequence
  Description of Artificial Sequence: Synthetic oligonucleotide
gauuugacauguaggcucu

SEQ ID NO: 728371 - RNA, 19 nt, Artificial Sequence
  Description of Artificial Sequence: Synthetic oligonucleotide
agcacugaauagagcauca

SEQ ID NO: 728372 - RNA, 19 nt, Artificial Sequence
  Description of Artificial Sequence: Synthetic oligonucleotide
cgauccuugagcauagcug

SEQ ID NO: 728373 - RNA, 19 nt, Artificial Sequence
  Description of Artificial Sequence: Synthetic oligonucleotide
gcagcuauaaggaaguccu

SEQ ID NO: 728374 - RNA, 19 nt, Artificial Sequence
  Description of Artificial Sequence: Synthetic oligonucleotide
agcggaaauaagguucuaa

SEQ ID NO: 728375 - RNA, 19 nt, Artificial Sequence
  Description of Artificial Sequence: Synthetic oligonucleotide
cccuaagcaauuaaauaca

SEQ ID NO: 728376 - RNA, 19 nt, Artificial Sequence
  Description of Artificial Sequence: Synthetic oligonucleotide
ggauggacucaacucguac

SEQ ID NO: 728377 - RNA, 19 nt, Artificial Sequence
  Description of Artificial Sequence: Synthetic oligonucleotide
gccgaauauccucauuuac

SEQ ID NO: 728378 - RNA, 19 nt, Artificial Sequence
  Description of Artificial Sequence: Synthetic oligonucleotide
gcggaaauaagguucuaaa

SEQ ID NO: 728379 - RNA, 19 nt, Artificial Sequence
  Description of Artificial Sequence: Synthetic oligonucleotide
gcucaguuauauauuuagc

SEQ ID NO: 728380 - RNA, 19 nt, Artificial Sequence
  Description of Artificial Sequence: Synthetic oligonucleotide
ugcaaaugaggcgcucccu

SEQ ID NO: 728381 - RNA, 19 nt, Artificial Sequence
  Description of Artificial Sequence: Synthetic oligonucleotide
acaagcuauuuaguauuaa

SEQ ID NO: 728382 - RNA, 19 nt, Artificial Sequence
  Description of Artificial Sequence: Synthetic oligonucleotide
acauaaaguuaaguuuauu

SEQ ID NO: 728383 - RNA, 19 nt, Artificial Sequence
  Description of Artificial Sequence: Synthetic oligonucleotide
gaucuuuauagcccagguu

SEQ ID NO: 728384 - RNA, 19 nt, Artificial Sequence
  Description of Artificial Sequence: Synthetic oligonucleotide
acaugggaccgauccuuga

SEQ ID NO: 728385 - RNA, 19 nt, Artificial Sequence
  Description of Artificial Sequence: Synthetic oligonucleotide
gacauguaggcucuucauu

SEQ ID NO: 728386 - RNA, 19 nt, Artificial Sequence
  Description of Artificial Sequence: Synthetic oligonucleotide
cauguaggcucuucauuaa

SEQ ID NO: 728387 - RNA, 19 nt, Artificial Sequence
  Description of Artificial Sequence: Synthetic oligonucleotide
cucguacucagguaguggu

SEQ ID NO: 728388 - RNA, 19 nt, Artificial Sequence
  Description of Artificial Sequence: Synthetic oligonucleotide
aucugagguucugcugacg

SEQ ID NO: 728389 - RNA, 19 nt, Artificial Sequence
  Description of Artificial Sequence: Synthetic oligonucleotide
cuagacuucccaugacaaa

SEQ ID NO: 728390 - RNA, 19 nt, Artificial Sequence
  Description of Artificial Sequence: Synthetic oligonucleotide
cugagguucugcugacguc

SEQ ID NO: 728391 - RNA, 19 nt, Artificial Sequence
  Description of Artificial Sequence: Synthetic oligonucleotide
acugccaagugaccacuua

SEQ ID NO: 728392 - RNA, 19 nt, Artificial Sequence
  Description of Artificial Sequence: Synthetic oligonucleotide
ggacaugaauuuaggaaga

SEQ ID NO: 728393 - RNA, 19 nt, Artificial Sequence
  Description of Artificial Sequence: Synthetic oligonucleotide
caauccucucauguggaca

SEQ ID NO: 728394 - RNA, 19 nt, Artificial Sequence
  Description of Artificial Sequence: Synthetic oligonucleotide
gcucggaaauaucucuaug

SEQ ID NO: 728395 - RNA, 19 nt, Artificial Sequence
  Description of Artificial Sequence: Synthetic oligonucleotide
guccucucaagcgaaccac

SEQ ID NO: 728396 - RNA, 19 nt, Artificial Sequence
  Description of Artificial Sequence: Synthetic oligonucleotide
auaggccgaauauccucau

SEQ ID NO: 728397 - RNA, 19 nt, Artificial Sequence
  Description of Artificial Sequence: Synthetic oligonucleotide
agcugucauaggccgaaua

SEQ ID NO: 728398 - RNA, 19 nt, Artificial Sequence
  Description of Artificial Sequence: Synthetic oligonucleotide
auguacauccggugcuuuu

SEQ ID NO: 728399 - RNA, 19 nt, Artificial Sequence
  Description of Artificial Sequence: Synthetic oligonucleotide
agcucgaaugagauacaca

SEQ ID NO: 728400 - RNA, 19 nt, Artificial Sequence
  Description of Artificial Sequence: Synthetic oligonucleotide
cuaaaauaugggguagcua

SEQ ID NO: 728401 - RNA, 19 nt, Artificial Sequence
  Description of Artificial Sequence: Synthetic oligonucleotide
gacagaaauacagcucuau

SEQ ID NO: 728402 - RNA, 19 nt, Artificial Sequence
  Description of Artificial Sequence: Synthetic oligonucleotide
aaaguggagugaaggcauu

SEQ ID NO: 728403 - RNA, 19 nt, Artificial Sequence
  Description of Artificial Sequence: Synthetic oligonucleotide
  modified_base (7)..(7): a, c, u, g, unknown or other
ucucacnguuucggauucu

SEQ ID NO: 728404 - RNA, 19 nt, Artificial Sequence
  Description of Artificial Sequence: Synthetic oligonucleotide
gacaggcacccacauuaaa

SEQ ID NO: 728405 - RNA, 19 nt, Artificial Sequence
  Description of Artificial Sequence: Synthetic oligonucleotide
agagcucaauauaccuaug

SEQ ID NO: 728406 - RNA, 19 nt, Artificial Sequence
  Description of Artificial Sequence: Synthetic oligonucleotide
ggacuguucaaauggaauu

SEQ ID NO: 728407 - RNA, 19 nt, Artificial Sequence
  Description of Artificial Sequence: Synthetic oligonucleotide
guuagccuagacuucccau

SEQ ID NO: 728408 - RNA, 19 nt, Artificial Sequence
  Description of Artificial Sequence: Synthetic oligonucleotide
gccuagacuucccaugaca

SEQ ID NO: 728409 - RNA, 19 nt, Artificial Sequence
  Description of Artificial Sequence: Synthetic oligonucleotide
aggcgcucccugcuucauc

SEQ ID NO: 728410 - RNA, 19 nt, Artificial Sequence
  Description of Artificial Sequence: Synthetic oligonucleotide
caucucuaggaaauggauu

SEQ ID NO: 728411 - RNA, 19 nt, Artificial Sequence
  Description of Artificial Sequence: Synthetic oligonucleotide
ggaucuuuauagcccaggu

SEQ ID NO: 728412 - RNA, 19 nt, Artificial Sequence
  Description of Artificial Sequence: Synthetic oligonucleotide
agaagucgacaaugucuuu

SEQ ID NO: 728413 - RNA, 19 nt, Artificial Sequence
  Description of Artificial Sequence: Synthetic oligonucleotide
cucaacucguacucaggua

SEQ ID NO: 728414 - RNA, 19 nt, Artificial Sequence
  Description of Artificial Sequence: Synthetic oligonucleotide
aggcuuagggaggcaaagu

SEQ ID NO: 728415 - RNA, 19 nt, Artificial Sequence
  Description of Artificial Sequence: Synthetic oligonucleotide
ccuagacuucccaugacaa

SEQ ID NO: 728416 - RNA, 19 nt, Artificial Sequence
  Description of Artificial Sequence: Synthetic oligonucleotide
ccccauguacauccggugc

SEQ ID NO: 728417 - RNA, 19 nt, Artificial Sequence
  Description of Artificial Sequence: Synthetic oligonucleotide
ugucuagagcugguuuaau

SEQ ID NO: 728418 - RNA, 19 nt, Artificial Sequence
  Description of Artificial Sequence: Synthetic oligonucleotide
uaggccgaauauccucauu

SEQ ID NO: 728419 - RNA, 19 nt, Artificial Sequence
  Description of Artificial Sequence: Synthetic oligonucleotide
ccuuaggcaguucuaucuc

SEQ ID NO: 728420 - RNA, 19 nt, Artificial Sequence
  Description of Artificial Sequence: Synthetic oligonucleotide
ccucuauaguccaucacaa

SEQ ID NO: 728421 - RNA, 19 nt, Artificial Sequence
  Description of Artificial Sequence: Synthetic oligonucleotide
gguuagccuagacuuccca

SEQ ID NO: 728422 - RNA, 19 nt, Artificial Sequence
  Description of Artificial Sequence: Synthetic oligonucleotide
gcgaaugaggagacucggg

SEQ ID NO: 728423 - RNA, 19 nt, Artificial Sequence
  Description of Artificial Sequence: Synthetic oligonucleotide
  modified_base (2)..(2): a, c, u, g, unknown or other
cnguuucggauucugcagu

SEQ ID NO: 728424 - RNA, 19 nt, Artificial Sequence
  Description of Artificial Sequence: Synthetic oligonucleotide
uucuagcccuaagcaauua

SEQ ID NO: 728425 - RNA, 19 nt, Artificial Sequence
  Description of Artificial Sequence: Synthetic oligonucleotide
ccgaauauccucauuuacu

SEQ ID NO: 728426 - RNA, 19 nt, Artificial Sequence
  Description of Artificial Sequence: Synthetic oligonucleotide
cugcucggaaauaucucua

SEQ ID NO: 728427 - RNA, 19 nt, Artificial Sequence
  Description of Artificial Sequence: Synthetic oligonucleotide
ugauucucacaggcuucaa

SEQ ID NO: 728428 - RNA, 19 nt, Artificial Sequence
  Description of Artificial Sequence: Synthetic oligonucleotide
gcugucauaggccgaauau

SEQ ID NO: 728429 - RNA, 19 nt, Artificial Sequence
  Description of Artificial Sequence: Synthetic oligonucleotide
caauaaucugugguuugua

SEQ ID NO: 728430 - RNA, 19 nt, Artificial Sequence
  Description of Artificial Sequence: Synthetic oligonucleotide
accccacuggaaaagcgaa

SEQ ID NO: 728431 - RNA, 19 nt, Artificial Sequence
  Description of Artificial Sequence: Synthetic oligonucleotide
guacauccggugcuuuucu

SEQ ID NO: 728432 - RNA, 19 nt, Artificial Sequence
  Description of Artificial Sequence: Synthetic oligonucleotide
gaugugcaaaugaggcgcu

SEQ ID NO: 728433 - RNA, 19 nt, Artificial Sequence
  Description of Artificial Sequence: Synthetic oligonucleotide
caccgucauuuaccauagg

SEQ ID NO: 728434 - RNA, 19 nt, Artificial Sequence
  Description of Artificial Sequence: Synthetic oligonucleotide
ucugaacguccugcuccga

SEQ ID NO: 728435 - RNA, 19 nt, Artificial Sequence
  Description of Artificial Sequence: Synthetic oligonucleotide
cugucuagagcugguuuaa

SEQ ID NO: 728436 - RNA, 19 nt, Artificial Sequence
  Description of Artificial Sequence: Synthetic oligonucleotide
acauguguucgaacuucau

SEQ ID NO: 728437 - RNA, 19 nt, Artificial Sequence
  Description of Artificial Sequence: Synthetic oligonucleotide
ggaccgauccuugagcaua

SEQ ID NO: 728438 - RNA, 19 nt, Artificial Sequence
  Description of Artificial Sequence: Synthetic oligonucleotide
ggcuucaauggagcaaaga

SEQ ID NO: 728439 - RNA, 19 nt, Artificial Sequence
  Description of Artificial Sequence: Synthetic oligonucleotide
aagcgcuugguuggccauu

SEQ ID NO: 728440 - RNA, 19 nt, Artificial Sequence
  Description of Artificial Sequence: Synthetic oligonucleotide
ggcaauccucucaugugga

SEQ ID NO: 728441 - RNA, 19 nt, Artificial Sequence
  Description of Artificial Sequence: Synthetic oligonucleotide
ccugucuagagcugguuua

SEQ ID NO: 728442 - RNA, 19 nt, Artificial Sequence
  Description of Artificial Sequence: Synthetic oligonucleotide
aagcugucauaggccgaau

SEQ ID NO: 728443 - RNA, 19 nt, Artificial Sequence
  Description of Artificial Sequence: Synthetic oligonucleotide
gucauaggccgaauauccu

SEQ ID NO: 728444 - RNA, 19 nt, Artificial Sequence
  Description of Artificial Sequence: Synthetic oligonucleotide
ggccgaauauccucauuua

SEQ ID NO: 728445 - RNA, 19 nt, Artificial Sequence
  Description of Artificial Sequence: Synthetic oligonucleotide
cauagcgcugccccaugua

SEQ ID NO: 728446 - RNA, 19 nt, Artificial Sequence
  Description of Artificial Sequence: Synthetic oligonucleotide
aggcuucaauggagcaaag

SEQ ID NO: 728447 - RNA, 19 nt, Artificial Sequence
  Description of Artificial Sequence: Synthetic oligonucleotide
ggguagcuaccccacugga

SEQ ID NO: 728448 - RNA, 19 nt, Artificial Sequence
  Description of Artificial Sequence: Synthetic oligonucleotide
ggcuuagggaggcaaaguu

SEQ ID NO: 728449 - RNA, 19 nt, Artificial Sequence
  Description of Artificial Sequence: Synthetic oligonucleotide
caacucguacucagguagu

SEQ ID NO: 728450 - RNA, 19 nt, Artificial Sequence
  Description of Artificial Sequence: Synthetic oligonucleotide
caccccuacuuguucuaaa

SEQ ID NO: 728451 - RNA, 19 nt, Artificial Sequence
  Description of Artificial Sequence: Synthetic oligonucleotide
gguagcuaccccacuggaa

SEQ ID NO: 728452 - RNA, 19 nt, Artificial Sequence
  Description of Artificial Sequence: Synthetic oligonucleotide
guuucggauucugcagucu

SEQ ID NO: 728453 - RNA, 19 nt, Artificial Sequence
  Description of Artificial Sequence: Synthetic oligonucleotide
cucaagcgaaccacaccgu

SEQ ID NO: 728454 - RNA, 19 nt, Artificial Sequence
  Description of Artificial Sequence: Synthetic oligonucleotide
cagauccaggacuguucaa

SEQ ID NO: 728455 - RNA, 19 nt, Artificial Sequence
  Description of Artificial Sequence: Synthetic oligonucleotide
aggcaucgccccuccguuu

SEQ ID NO: 728456 - RNA, 19 nt, Artificial Sequence
  Description of Artificial Sequence: Synthetic oligonucleotide
ggagacucggguugguuuu

SEQ ID NO: 728457 - RNA, 19 nt, Artificial Sequence
  Description of Artificial Sequence: Synthetic oligonucleotide
gcucaauaaucugugguuu

SEQ ID NO: 728458 - RNA, 19 nt, Artificial Sequence
  Description of Artificial Sequence: Synthetic oligonucleotide
ccagcgguugcugccaauc

SEQ ID NO: 728459 - RNA, 19 nt, Artificial Sequence
  Description of Artificial Sequence: Synthetic oligonucleotide
cugcuccgacuccaucuca

SEQ ID NO: 728460 - RNA, 19 nt, Artificial Sequence
  Description of Artificial Sequence: Synthetic oligonucleotide
guuuuacaucagagcucuc

SEQ ID NO: 728461 - RNA, 19 nt, Artificial Sequence
  Description of Artificial Sequence: Synthetic oligonucleotide
agcgaaccacaccgucauu

SEQ ID NO: 728462 - RNA, 19 nt, Artificial Sequence
  Description of Artificial Sequence: Synthetic oligonucleotide
caaggcaccccuacuuguu

SEQ ID NO: 728463 - RNA, 19 nt, Artificial Sequence
  Description of Artificial Sequence: Synthetic oligonucleotide
cgaaugaggagacucgggu

SEQ ID NO: 728464 - RNA, 19 nt, Artificial Sequence
  Description of Artificial Sequence: Synthetic oligonucleotide
cuuucucguugcagcuaua

SEQ ID NO: 728465 - RNA, 19 nt, Artificial Sequence
  Description of Artificial Sequence: Synthetic oligonucleotide
cacuagagcuguacuccau

SEQ ID NO: 728466 - RNA, 19 nt, Artificial Sequence
  Description of Artificial Sequence: Synthetic oligonucleotide
ccuuuaggucaaggcuuag

SEQ ID NO: 728467 - RNA, 19 nt, Artificial Sequence
  Description of Artificial Sequence: Synthetic oligonucleotide
gagcggaaauaagguucua

SEQ ID NO: 728468 - RNA, 19 nt, Artificial Sequence
  Description of Artificial Sequence: Synthetic oligonucleotide
ggugaagauuugacaugua

SEQ ID NO: 728469 - RNA, 19 nt, Artificial Sequence
  Description of Artificial Sequence: Synthetic oligonucleotide
cgagcggaaauaagguucu

SEQ ID NO: 728470 - RNA, 19 nt, Artificial Sequence
  Description of Artificial Sequence: Synthetic oligonucleotide
ccugagcucgaaugagaua

SEQ ID NO: 728471 - RNA, 19 nt, Artificial Sequence
  Description of Artificial Sequence: Synthetic oligonucleotide
ccaacauguguucgaacuu

SEQ ID NO: 728472 - RNA, 19 nt, Artificial Sequence
  Description of Artificial Sequence: Synthetic oligonucleotide
cccugagcucgaaugagau

SEQ ID NO: 728473 - RNA, 19 nt, Artificial Sequence
  Description of Artificial Sequence: Synthetic oligonucleotide
cgaaugagauacacaucgu

SEQ ID NO: 728474 - RNA, 19 nt, Artificial Sequence
  Description of Artificial Sequence: Synthetic oligonucleotide
caggaccaaggcagucccu

SEQ ID NO: 728475 - RNA, 19 nt, Artificial Sequence
  Description of Artificial Sequence: Synthetic oligonucleotide
cccuccguuucccaucucu

SEQ ID NO: 728476 - RNA, 19 nt, Artificial Sequence
  Description of Artificial Sequence: Synthetic oligonucleotide
gggaccgauccuugagcau

SEQ ID NO: 728477 - RNA, 19 nt, Artificial Sequence
  Description of Artificial Sequence: Synthetic oligonucleotide
gcaccccuacuuguucuaa

SEQ ID NO: 728478 - RNA, 19 nt, Artificial Sequence
  Description of Artificial Sequence: Synthetic oligonucleotide
ccccuacuuguucuaaaau

SEQ ID NO: 728479 - RNA, 19 nt, Artificial Sequence
  Description of Artificial Sequence: Synthetic oligonucleotide
gaggcgcucccugcuucau

SEQ ID NO: 728480 - RNA, 19 nt, Artificial Sequence
  Description of Artificial Sequence: Synthetic oligonucleotide
ggcagucccugagcucgaa

SEQ ID NO: 728481 - RNA, 19 nt, Artificial Sequence
  Description of Artificial Sequence: Synthetic oligonucleotide
gcuguacuccauggugauu

SEQ ID NO: 728482 - RNA, 19 nt, Artificial Sequence
  Description of Artificial Sequence: Synthetic oligonucleotide
ccauguacauccggugcuu

SEQ ID NO: 728483 - RNA, 19 nt, Artificial Sequence
  Description of Artificial Sequence: Synthetic oligonucleotide
ccacaccgucauuuaccau

SEQ ID NO: 728484 - RNA, 19 nt, Artificial Sequence
  Description of Artificial Sequence: Synthetic oligonucleotide
aaacuuugcaguuaaaagc

SEQ ID NO: 728485 - RNA, 19 nt, Artificial Sequence
  Description of Artificial Sequence: Synthetic oligonucleotide
uguucuaucacaaaguagg

SEQ ID NO: 728486 - RNA, 19 nt, Artificial Sequence
  Description of Artificial Sequence: Synthetic oligonucleotide
aacauagcaacuuacagag

SEQ ID NO: 728487 - RNA, 19 nt, Artificial Sequence
  Description of Artificial Sequence: Synthetic oligonucleotide
uguaguaugauuaaucagc

SEQ ID NO: 728488 - RNA, 19 nt, Artificial Sequence
  Description of Artificial Sequence: Synthetic oligonucleotide
gauaacagaucucauaugg

SEQ ID NO: 728489 - RNA, 19 nt, Artificial Sequence
  Description of Artificial Sequence: Synthetic oligonucleotide
ucugguaaaagacugagcc

SEQ ID NO: 728490 - RNA, 19 nt, Artificial Sequence
  Description of Artificial Sequence: Synthetic oligonucleotide
uguauauaaauuaaaggga

SEQ ID NO: 728491 - RNA, 19 nt, Artificial Sequence
  Description of Artificial Sequence: Synthetic oligonucleotide
ugaaccuagaucaaucugg

SEQ ID NO: 728492 - RNA, 19 nt, Artificial Sequence
  Description of Artificial Sequence: Synthetic oligonucleotide
aggacuucgauauucauac

SEQ ID NO: 728493 - RNA, 19 nt, Artificial Sequence
  Description of Artificial Sequence: Synthetic oligonucleotide
aaauuaaagggacuuuuag

SEQ ID NO: 728494 - RNA, 19 nt, Artificial Sequence
  Description of Artificial Sequence: Synthetic oligonucleotide
uuuuaagugguauuuagug

SEQ ID NO: 728495 - RNA, 19 nt, Artificial Sequence
  Description of Artificial Sequence: Synthetic oligonucleotide
aggauaaaauggcauaucc

SEQ ID NO: 728496 - RNA, 19 nt, Artificial Sequence
  Description of Artificial Sequence: Synthetic oligonucleotide
uaugaaagacaacugggcg

SEQ ID NO: 728497 - RNA, 19 nt, Artificial Sequence
  Description of Artificial Sequence: Synthetic oligonucleotide
uuaagugguauuuaguggc

SEQ ID NO: 728498 - RNA, 19 nt, Artificial Sequence
  Description of Artificial Sequence: Synthetic oligonucleotide
uuuaagugguauuuagugg

SEQ ID NO: 728499 - RNA, 19 nt, Artificial Sequence
  Description of Artificial Sequence: Synthetic oligonucleotide
uuuagcagacaucagcagg

SEQ ID NO: 728500 - RNA, 19 nt, Artificial Sequence
  Description of Artificial Sequence: Synthetic oligonucleotide
acaguuggaaguuaguggg

SEQ ID NO: 728501 - RNA, 19 nt, Artificial Sequence
  Description of Artificial Sequence: Synthetic oligonucleotide
ucuaucacaaaguagguuc

SEQ ID NO: 728502 - RNA, 19 nt, Artificial Sequence
  Description of Artificial Sequence: Synthetic oligonucleotide
cauagcaacuuacagagcc

SEQ ID NO: 728503 - RNA, 19 nt, Artificial Sequence
  Description of Artificial Sequence: Synthetic oligonucleotide
uuaagguguacucuuuccg

SEQ ID NO: 728504 - RNA, 19 nt, Artificial Sequence
  Description of Artificial Sequence: Synthetic oligonucleotide
uaugucagaugaaugaagc

SEQ ID NO: 728505 - RNA, 19 nt, Artificial Sequence
  Description of Artificial Sequence: Synthetic oligonucleotide
ucaaucugguaaaagacug

SEQ ID NO: 728506 - RNA, 19 nt, Artificial Sequence
  Description of Artificial Sequence: Synthetic oligonucleotide
aaaacuuauauaauguagu

SEQ ID NO: 728507 - RNA, 19 nt, Artificial Sequence
  Description of Artificial Sequence: Synthetic oligonucleotide
aaaugcuguagcaaaacgg

SEQ ID NO: 728508 - RNA, 19 nt, Artificial Sequence
  Description of Artificial Sequence: Synthetic oligonucleotide
guugauacacaccaggaag

SEQ ID NO: 728509 - RNA, 19 nt, Artificial Sequence
  Description of Artificial Sequence: Synthetic oligonucleotide
aagacugagccacucaaag

SEQ ID NO: 728510 - RNA, 19 nt, Artificial Sequence
  Description of Artificial Sequence: Synthetic oligonucleotide
aacgguuauccauucuggc

SEQ ID NO: 728511 - RNA, 19 nt, Artificial Sequence
  Description of Artificial Sequence: Synthetic oligonucleotide
uguagcaaaacgguuaucc

SEQ ID NO: 728512 - RNA, 19 nt, Artificial Sequence
  Description of Artificial Sequence: Synthetic oligonucleotide
aguaugauuaaucagcuuu

SEQ ID NO: 728513 - RNA, 19 nt, Artificial Sequence
  Description of Artificial Sequence: Synthetic oligonucleotide
ugauuaaucagcuuuucuc

SEQ ID NO: 728514 - RNA, 19 nt, Artificial Sequence
  Description of Artificial Sequence: Synthetic oligonucleotide
ucuucuaaugcucuguuaa

SEQ ID NO: 728515 - RNA, 19 nt, Artificial Sequence
  Description of Artificial Sequence: Synthetic oligonucleotide
gaaguuuugacagugauaa

SEQ ID NO: 728516 - RNA, 19 nt, Artificial Sequence
  Description of Artificial Sequence: Synthetic oligonucleotide
agucugugccuauugaggc

SEQ ID NO: 728517 - RNA, 19 nt, Artificial Sequence
  Description of Artificial Sequence: Synthetic oligonucleotide
aauuaguuucuaguucagc

SEQ ID NO: 728518 - RNA, 19 nt, Artificial Sequence
  Description of Artificial Sequence: Synthetic oligonucleotide
cucauauggaauuaguuuc

SEQ ID NO: 728519 - RNA, 19 nt, Artificial Sequence
  Description of Artificial Sequence: Synthetic oligonucleotide
augaaugaagcaauguacc

SEQ ID NO: 728520 - RNA, 19 nt, Artificial Sequence
  Description of Artificial Sequence: Synthetic oligonucleotide
ugaggcuaaguacacaagc

SEQ ID NO: 728521 - RNA, 19 nt, Artificial Sequence
  Description of Artificial Sequence: Synthetic oligonucleotide
aguuuagggacaaggaugc

SEQ ID NO: 728522 - RNA, 19 nt, Artificial Sequence
  Description of Artificial Sequence: Synthetic oligonucleotide
agaucaaucugguaaaaga

SEQ ID NO: 728523 - RNA, 19 nt, Artificial Sequence
  Description of Artificial Sequence: Synthetic oligonucleotide
uaaucagcuuuucucauug

SEQ ID NO: 728524 - RNA, 19 nt, Artificial Sequence
  Description of Artificial Sequence: Synthetic oligonucleotide
caggaaauuaaacaugaag

SEQ ID NO: 728525 - RNA, 19 nt, Artificial Sequence
  Description of Artificial Sequence: Synthetic oligonucleotide
uucacaaugguuugguggc

SEQ ID NO: 728526 - RNA, 19 nt, Artificial Sequence
  Description of Artificial Sequence: Synthetic oligonucleotide
aaaauaugaaagacaacug

SEQ ID NO: 728527 - RNA, 19 nt, Artificial Sequence
  Description of Artificial Sequence: Synthetic oligonucleotide
acucaugcauuuuguaacc

SEQ ID NO: 728528 - RNA, 19 nt, Artificial Sequence
  Description of Artificial Sequence: Synthetic oligonucleotide
cuaacgaaagguaaaagga

SEQ ID NO: 728529 - RNA, 19 nt, Artificial Sequence
  Description of Artificial Sequence: Synthetic oligonucleotide
aaugaguuucaguuuaaaa

SEQ ID NO: 728530 - RNA, 19 nt, Artificial Sequence
  Description of Artificial Sequence: Synthetic oligonucleotide
cauuuuaagugguauuuag

SEQ ID NO: 728531 - RNA, 19 nt, Artificial Sequence
  Description of Artificial Sequence: Synthetic oligonucleotide
aaacucaugcauuuuguaa

SEQ ID NO: 728532 - RNA, 19 nt, Artificial Sequence
  Description of Artificial Sequence: Synthetic oligonucleotide
auuguaucggaacagugca

SEQ ID NO: 728533 - RNA, 19 nt, Artificial Sequence
  Description of Artificial Sequence: Synthetic oligonucleotide
ucuaguucagcacauguua

SEQ ID NO: 728534 - RNA, 19 nt, Artificial Sequence
  Description of Artificial Sequence: Synthetic oligonucleotide
ugcauuagaagacauuaaa

SEQ ID NO: 728535 - RNA, 19 nt, Artificial Sequence
  Description of Artificial Sequence: Synthetic oligonucleotide
acuguaagggagccgagac

SEQ ID NO: 728536 - RNA, 19 nt, Artificial Sequence
  Description of Artificial Sequence: Synthetic oligonucleotide
gcuaacgaaagguaaaagg

SEQ ID NO: 728537 - RNA, 19 nt, Artificial Sequence
  Description of Artificial Sequence: Synthetic oligonucleotide
guauauaaauuaaagggac

SEQ ID NO: 728538 - RNA, 19 nt, Artificial Sequence
  Description of Artificial Sequence: Synthetic oligonucleotide
aacugggcgauagacaagg

SEQ ID NO: 728539 - RNA, 19 nt, Artificial Sequence
  Description of Artificial Sequence: Synthetic oligonucleotide
ugacagugauaacagaucu

SEQ ID NO: 728540 - RNA, 19 nt, Artificial Sequence
  Description of Artificial Sequence: Synthetic oligonucleotide
uuuaggaacacugguacug

SEQ ID NO: 728541 - RNA, 19 nt, Artificial Sequence
  Description of Artificial Sequence: Synthetic oligonucleotide
cauuguaucggaacagugc

SEQ ID NO: 728542 - RNA, 19 nt, Artificial Sequence
  Description of Artificial Sequence: Synthetic oligonucleotide
uguaagggagccgagacgc

SEQ ID NO: 728543 - RNA, 19 nt, Artificial Sequence
  Description of Artificial Sequence: Synthetic oligonucleotide
accuagaucaaucugguaa

SEQ ID NO: 728544 - RNA, 19 nt, Artificial Sequence
  Description of Artificial Sequence: Synthetic oligonucleotide
uuaguggguagccacagcu

SEQ ID NO: 728545 - RNA, 19 nt, Artificial Sequence
  Description of Artificial Sequence: Synthetic oligonucleotide
auagguccgaagcagauca

SEQ ID NO: 728546 - RNA, 19 nt, Artificial Sequence
  Description of Artificial Sequence: Synthetic oligonucleotide
uuuaggauaaaauggcaua

SEQ ID NO: 728547 - RNA, 19 nt, Artificial Sequence
  Description of Artificial Sequence: Synthetic oligonucleotide
uggaguaaauaaauaagau

SEQ ID NO: 728548 - RNA, 19 nt, Artificial Sequence
  Description of Artificial Sequence: Synthetic oligonucleotide
cacaguuggaaguuagugg

SEQ ID NO: 728549 - RNA, 19 nt, Artificial Sequence
  Description of Artificial Sequence: Synthetic oligonucleotide
acuuacagagcccagugug

SEQ ID NO: 728550 - RNA, 19 nt, Artificial Sequence
  Description of Artificial Sequence: Synthetic oligonucleotide
cuuuauucgaaucacuuga

SEQ ID NO: 728551 - RNA, 19 nt, Artificial Sequence
  Description of Artificial Sequence: Synthetic oligonucleotide
ugguguaguaguucaaugc

SEQ ID NO: 728552 - RNA, 19 nt, Artificial Sequence
  Description of Artificial Sequence: Synthetic oligonucleotide
uauuuaguggcacuguaua

SEQ ID NO: 728553 - RNA, 19 nt, Artificial Sequence
  Description of Artificial Sequence: Synthetic oligonucleotide
uguuacuacacuacugcgu

SEQ ID NO: 728554 - RNA, 19 nt, Artificial Sequence
  Description of Artificial Sequence: Synthetic oligonucleotide
guaaaaggaacuggcaacg

SEQ ID NO: 728555 - RNA, 19 nt, Artificial Sequence
  Description of Artificial Sequence: Synthetic oligonucleotide
acugccaauguucuaucac

SEQ ID NO: 728556 - RNA, 19 nt, Artificial Sequence
  Description of Artificial Sequence: Synthetic oligonucleotide
aaagacaacugggcgauag

SEQ ID NO: 728557 - RNA, 19 nt, Artificial Sequence
  Description of Artificial Sequence: Synthetic oligonucleotide
auccuaaugaguuucaguu

SEQ ID NO: 728558 - RNA, 19 nt, Artificial Sequence
  Description of Artificial Sequence: Synthetic oligonucleotide
aagcagaucaauuccacua

SEQ ID NO: 728559 - RNA, 19 nt, Artificial Sequence
  Description of Artificial Sequence: Synthetic oligonucleotide
uuaguuucuaguucagcac

SEQ ID NO: 728560 - RNA, 19 nt, Artificial Sequence
  Description of Artificial Sequence: Synthetic oligonucleotide
aauuccacuauugugguuu

SEQ ID NO: 728561 - RNA, 19 nt, Artificial Sequence
  Description of Artificial Sequence: Synthetic oligonucleotide
cauugaauugaaacuuugc

SEQ ID NO: 728562 - RNA, 19 nt, Artificial Sequence
  Description of Artificial Sequence: Synthetic oligonucleotide
uucgauauucauaccagaa

SEQ ID NO: 728563 - RNA, 19 nt, Artificial Sequence
  Description of Artificial Sequence: Synthetic oligonucleotide
gaaguuaguggguagccac

SEQ ID NO: 728564 - RNA, 19 nt, Artificial Sequence
  Description of Artificial Sequence: Synthetic oligonucleotide
auguaguaugauuaaucag

SEQ ID NO: 728565 - RNA, 19 nt, Artificial Sequence
  Description of Artificial Sequence: Synthetic oligonucleotide
uggaauuaguuucuaguuc

SEQ ID NO: 728566 - RNA, 19 nt, Artificial Sequence
  Description of Artificial Sequence: Synthetic oligonucleotide
ugggcgauagacaagggaa

SEQ ID NO: 728567 - RNA, 19 nt, Artificial Sequence
  Description of Artificial Sequence: Synthetic oligonucleotide
gacuucgauauucauacca

SEQ ID NO: 728568 - RNA, 19 nt, Artificial Sequence
  Description of Artificial Sequence: Synthetic oligonucleotide
ccacuuaguacuuagcugg

SEQ ID NO: 728569 - RNA, 19 nt, Artificial Sequence
  Description of Artificial Sequence: Synthetic oligonucleotide
uaaagggacuuuuaggaua

SEQ ID NO: 728570 - RNA, 19 nt, Artificial Sequence
  Description of Artificial Sequence: Synthetic oligonucleotide
augaaagacaacugggcga

SEQ ID NO: 728571 - RNA, 19 nt, Artificial Sequence
  Description of Artificial Sequence: Synthetic oligonucleotide
cuuaguacuuagcuggaac

SEQ ID NO: 728572 - RNA, 19 nt, Artificial Sequence
  Description of Artificial Sequence: Synthetic oligonucleotide
auguuacuacacuacugcg

SEQ ID NO: 728573 - RNA, 19 nt, Artificial Sequence
  Description of Artificial Sequence: Synthetic oligonucleotide
gauuugggcacggaaaggc

SEQ ID NO: 728574 - RNA, 19 nt, Artificial Sequence
  Description of Artificial Sequence: Synthetic oligonucleotide
ucccacuuaguacuuagcu

SEQ ID NO: 728575 - RNA, 19 nt, Artificial Sequence
  Description of Artificial Sequence: Synthetic oligonucleotide
cacuauugugguuuccugg

SEQ ID NO: 728576 - RNA, 19 nt, Artificial Sequence
  Description of Artificial Sequence: Synthetic oligonucleotide
aaacccaagcuaacgaaag

SEQ ID NO: 728577 - RNA, 19 nt, Artificial Sequence
  Description of Artificial Sequence: Synthetic oligonucleotide
auauggaauuaguuucuag

SEQ ID NO: 728578 - RNA, 19 nt, Artificial Sequence
  Description of Artificial Sequence: Synthetic oligonucleotide
auggaguaaauaaauaaga

SEQ ID NO: 728579 - RNA, 19 nt, Artificial Sequence
  Description of Artificial Sequence: Synthetic oligonucleotide
ugauacaccgucuccacaa

SEQ ID NO: 728580 - RNA, 19 nt, Artificial Sequence
  Description of Artificial Sequence: Synthetic oligonucleotide
ucuccggacacauucucag

SEQ ID NO: 728581 - RNA, 19 nt, Artificial Sequence
  Description of Artificial Sequence: Synthetic oligonucleotide
uaugugcacacaucuuuag

SEQ ID NO: 728582 - RNA, 19 nt, Artificial Sequence
  Description of Artificial Sequence: Synthetic oligonucleotide
agcuuuauaucuuguggug

SEQ ID NO: 728583 - RNA, 19 nt, Artificial Sequence
  Description of Artificial Sequence: Synthetic oligonucleotide
uaauaagccuggugugugg

SEQ ID NO: 728584 - RNA, 19 nt, Artificial Sequence
  Description of Artificial Sequence: Synthetic oligonucleotide
ucgauaggccuucauuaag

SEQ ID NO: 728585 - RNA, 19 nt, Artificial Sequence
  Description of Artificial Sequence: Synthetic oligonucleotide
aacgccaaagauagguccg

SEQ ID NO: 728586 - RNA, 19 nt, Artificial Sequence
  Description of Artificial Sequence: Synthetic oligonucleotide
uucugaaccuagaucaauc

SEQ ID NO: 728587 - RNA, 19 nt, Artificial Sequence
  Description of Artificial Sequence: Synthetic oligonucleotide
caacgccaaagauaggucc

SEQ ID NO: 728588 - RNA, 19 nt, Artificial Sequence
  Description of Artificial Sequence: Synthetic oligonucleotide
ggaauuaguuucuaguuca

SEQ ID NO: 728589 - RNA, 19 nt, Artificial Sequence
  Description of Artificial Sequence: Synthetic oligonucleotide
cauugugccauuguaucgg

SEQ ID NO: 728590 - RNA, 19 nt, Artificial Sequence
  Description of Artificial Sequence: Synthetic oligonucleotide
uuuauucgaaucacuugaa

SEQ ID NO: 728591 - RNA, 19 nt, Artificial Sequence
  Description of Artificial Sequence: Synthetic oligonucleotide
ucugaauucugaaccuaga

SEQ ID NO: 728592 - RNA, 19 nt, Artificial Sequence
  Description of Artificial Sequence: Synthetic oligonucleotide
gguguaguaguucaaugcc

SEQ ID NO: 728593 - RNA, 19 nt, Artificial Sequence
  Description of Artificial Sequence: Synthetic oligonucleotide
agugauaacagaucucaua

SEQ ID NO: 728594 - RNA, 19 nt, Artificial Sequence
  Description of Artificial Sequence: Synthetic oligonucleotide
uuaggauaaaauggcauau

SEQ ID NO: 728595 - RNA, 19 nt, Artificial Sequence
  Description of Artificial Sequence: Synthetic oligonucleotide
ugcuguagcaaaacgguua

SEQ ID NO: 728596 - RNA, 19 nt, Artificial Sequence
  Description of Artificial Sequence: Synthetic oligonucleotide
aguauaaacagcugccaua

SEQ ID NO: 728597 - RNA, 19 nt, Artificial Sequence
  Description of Artificial Sequence: Synthetic oligonucleotide
uuaaagggacuuuuaggau

SEQ ID NO: 728598 - RNA, 19 nt, Artificial Sequence
  Description of Artificial Sequence: Synthetic oligonucleotide
auucacgccacucgauagg

SEQ ID NO: 728599 - RNA, 19 nt, Artificial Sequence
  Description of Artificial Sequence: Synthetic oligonucleotide
aagugguauuuaguggcac

SEQ ID NO: 728600 - RNA, 19 nt, Artificial Sequence
  Description of Artificial Sequence: Synthetic oligonucleotide
ggaccauccaaauucuccg

SEQ ID NO: 728601 - RNA, 19 nt, Artificial Sequence
  Description of Artificial Sequence: Synthetic oligonucleotide
cuuacagagcccagugugc

SEQ ID NO: 728602 - RNA, 19 nt, Artificial Sequence
  Description of Artificial Sequence: Synthetic oligonucleotide
caacauagcaacuuacaga

SEQ ID NO: 728603 - RNA, 19 nt, Artificial Sequence
  Description of Artificial Sequence: Synthetic oligonucleotide
auguagaugguggaaauga

SEQ ID NO: 728604 - RNA, 19 nt, Artificial Sequence
  Description of Artificial Sequence: Synthetic oligonucleotide
gccauugucaagcaggcag

SEQ ID NO: 728605 - RNA, 19 nt, Artificial Sequence
  Description of Artificial Sequence: Synthetic oligonucleotide
caaucacaaaugcuguagc

SEQ ID NO: 728606 - RNA, 19 nt, Artificial Sequence
  Description of Artificial Sequence: Synthetic oligonucleotide
acuacugcguuuagcagac

SEQ ID NO: 728607 - RNA, 19 nt, Artificial Sequence
  Description of Artificial Sequence: Synthetic oligonucleotide
aguaguucaaugccggcaa

SEQ ID NO: 728608 - RNA, 19 nt, Artificial Sequence
  Description of Artificial Sequence: Synthetic oligonucleotide
uauaucuugugguggugga

SEQ ID NO: 728609 - RNA, 19 nt, Artificial Sequence
  Description of Artificial Sequence: Synthetic oligonucleotide
uaagugguauuuaguggca

SEQ ID NO: 728610 - RNA, 19 nt, Artificial Sequence
  Description of Artificial Sequence: Synthetic oligonucleotide
accggcuucgcccuccagc

SEQ ID NO: 728611 - RNA, 19 nt, Artificial Sequence
  Description of Artificial Sequence: Synthetic oligonucleotide
auuuuaugucagaugaaug

SEQ ID NO: 728612 - RNA, 19 nt, Artificial Sequence
  Description of Artificial Sequence: Synthetic oligonucleotide
aaagacagauuuaggauuu

SEQ ID NO: 728613 - RNA, 19 nt, Artificial Sequence
  Description of Artificial Sequence: Synthetic oligonucleotide
uuauucgaaucacuugaau

SEQ ID NO: 728614 - RNA, 19 nt, Artificial Sequence
  Description of Artificial Sequence: Synthetic oligonucleotide
cuaguuucugguguaguag

SEQ ID NO: 728615 - RNA, 19 nt, Artificial Sequence
  Description of Artificial Sequence: Synthetic oligonucleotide
uggcacuguauauaaauua

SEQ ID NO: 728616 - RNA, 19 nt, Artificial Sequence
  Description of Artificial Sequence: Synthetic oligonucleotide
caaucacaguauaaacagc

SEQ ID NO: 728617 - RNA, 19 nt, Artificial Sequence
  Description of Artificial Sequence: Synthetic oligonucleotide
acucgauaggccuucauua

SEQ ID NO: 728618 - RNA, 19 nt, Artificial Sequence
  Description of Artificial Sequence: Synthetic oligonucleotide
auagcaacuuacagagccc

SEQ ID NO: 728619 - RNA, 19 nt, Artificial Sequence
  Description of Artificial Sequence: Synthetic oligonucleotide
caaagcaguugggaaaugg

SEQ ID NO: 728620 - RNA, 19 nt, Artificial Sequence
  Description of Artificial Sequence: Synthetic oligonucleotide
uuuaguggcacuguauaua

SEQ ID NO: 728621 - RNA, 19 nt, Artificial Sequence
  Description of Artificial Sequence: Synthetic oligonucleotide
gcaacauagcaacuuacag

SEQ ID NO: 728622 - RNA, 19 nt, Artificial Sequence
  Description of Artificial Sequence: Synthetic oligonucleotide
ucggaacagugcaucauug

SEQ ID NO: 728623 - RNA, 19 nt, Artificial Sequence
  Description of Artificial Sequence: Synthetic oligonucleotide
aaucccauugugccauugu

SEQ ID NO: 728624 - RNA, 19 nt, Artificial Sequence
  Description of Artificial Sequence: Synthetic oligonucleotide
aacuuacagagcccagugu

SEQ ID NO: 728625 - RNA, 19 nt, Artificial Sequence
  Description of Artificial Sequence: Synthetic oligonucleotide
gauggugauacaccgucuc

SEQ ID NO: 728626 - RNA, 19 nt, Artificial Sequence
  Description of Artificial Sequence: Synthetic oligonucleotide
guuuagcagacaucagcag

SEQ ID NO: 728627 - RNA, 19 nt, Artificial Sequence
  Description of Artificial Sequence: Synthetic oligonucleotide
guguaguaguucaaugccg

SEQ ID NO: 728628 - RNA, 19 nt, Artificial Sequence
  Description of Artificial Sequence: Synthetic oligonucleotide
uguaucggaacagugcauc

SEQ ID NO: 728629 - RNA, 19 nt, Artificial Sequence
  Description of Artificial Sequence: Synthetic oligonucleotide
gguaggaccucccacuuag

SEQ ID NO: 728630 - RNA, 19 nt, Artificial Sequence
  Description of Artificial Sequence: Synthetic oligonucleotide
cauucacgccacucgauag

SEQ ID NO: 728631 - RNA, 19 nt, Artificial Sequence
  Description of Artificial Sequence: Synthetic oligonucleotide
acuucgauauucauaccag

SEQ ID NO: 728632 - RNA, 19 nt, Artificial Sequence
  Description of Artificial Sequence: Synthetic oligonucleotide
aauaaagaccacaguugga

SEQ ID NO: 728633 - RNA, 19 nt, Artificial Sequence
  Description of Artificial Sequence: Synthetic oligonucleotide
uucgaaucacuugaauucu

SEQ ID NO: 728634 - RNA, 19 nt, Artificial Sequence
  Description of Artificial Sequence: Synthetic oligonucleotide
agacagauuuaggauuugg

SEQ ID NO: 728635 - RNA, 19 nt, Artificial Sequence
  Description of Artificial Sequence: Synthetic oligonucleotide
ugccuauugaggcagccau

SEQ ID NO: 728636 - RNA, 19 nt, Artificial Sequence
  Description of Artificial Sequence: Synthetic oligonucleotide
acgguuauccauucuggca

SEQ ID NO: 728637 - RNA, 19 nt, Artificial Sequence
  Description of Artificial Sequence: Synthetic oligonucleotide
uaucuuguggugguggaac

SEQ ID NO: 728638 - RNA, 19 nt, Artificial Sequence
  Description of Artificial Sequence: Synthetic oligonucleotide
ugauucuucuaaugcucug

SEQ ID NO: 728639 - RNA, 19 nt, Artificial Sequence
  Description of Artificial Sequence: Synthetic oligonucleotide
ggaaaugaggcuaaguaca

SEQ ID NO: 728640 - RNA, 19 nt, Artificial Sequence
  Description of Artificial Sequence: Synthetic oligonucleotide
aauaagccuggugugugga

SEQ ID NO: 728641 - RNA, 19 nt, Artificial Sequence
  Description of Artificial Sequence: Synthetic oligonucleotide
aagguaaaaggaacuggca

SEQ ID NO: 728642 - RNA, 19 nt, Artificial Sequence
  Description of Artificial Sequence: Synthetic oligonucleotide
ugguaucaacaacaggaaa

SEQ ID NO: 728643 - RNA, 19 nt, Artificial Sequence
  Description of Artificial Sequence: Synthetic oligonucleotide
auuuaguggcacuguauau

SEQ ID NO: 728644 - RNA, 19 nt, Artificial Sequence
  Description of Artificial Sequence: Synthetic oligonucleotide
caggcuucggcagauacag

SEQ ID NO: 728645 - RNA, 19 nt, Artificial Sequence
  Description of Artificial Sequence: Synthetic oligonucleotide
guuggaaguuaguggguag

SEQ ID NO: 728646 - RNA, 19 nt, Artificial Sequence
  Description of Artificial Sequence: Synthetic oligonucleotide
uacugcguuuagcagacau

SEQ ID NO: 728647 - RNA, 19 nt, Artificial Sequence
  Description of Artificial Sequence: Synthetic oligonucleotide
agcacauguuacuacacua

SEQ ID NO: 728648 - RNA, 19 nt, Artificial Sequence
  Description of Artificial Sequence: Synthetic oligonucleotide
caacuuacagagcccagug

SEQ ID NO: 728649 - RNA, 19 nt, Artificial Sequence
  Description of Artificial Sequence: Synthetic oligonucleotide
gaaaugaggcuaaguacac

SEQ ID NO: 728650 - RNA, 19 nt, Artificial Sequence
  Description of Artificial Sequence: Synthetic oligonucleotide
cacagcuuuauaucuugug

SEQ ID NO: 728651 - RNA, 19 nt, Artificial Sequence
  Description of Artificial Sequence: Synthetic oligonucleotide
uucuaguucagcacauguu

SEQ ID NO: 728652 - RNA, 19 nt, Artificial Sequence
  Description of Artificial Sequence: Synthetic oligonucleotide
uuggaaguuaguggguagc

SEQ ID NO: 728653 - RNA, 19 nt, Artificial Sequence
  Description of Artificial Sequence: Synthetic oligonucleotide
aagcuaacgaaagguaaaa

SEQ ID NO: 728654 - RNA, 19 nt, Artificial Sequence
  Description of Artificial Sequence: Synthetic oligonucleotide
cugaaccuagaucaaucug

SEQ ID NO: 728655 - RNA, 19 nt, Artificial Sequence
  Description of Artificial Sequence: Synthetic oligonucleotide
agcagaucaauuccacuau

SEQ ID NO: 728656 - RNA, 19 nt, Artificial Sequence
  Description of Artificial Sequence: Synthetic oligonucleotide
cauccucucacuccaccgg

SEQ ID NO: 728657 - RNA, 19 nt, Artificial Sequence
  Description of Artificial Sequence: Synthetic oligonucleotide
uggaaguuaguggguagcc

SEQ ID NO: 728658 - RNA, 19 nt, Artificial Sequence
  Description of Artificial Sequence: Synthetic oligonucleotide
caaagauagguccgaagca

SEQ ID NO: 728659 - RNA, 19 nt, Artificial Sequence
  Description of Artificial Sequence: Synthetic oligonucleotide
cauuaagguguacucuuuc

SEQ ID NO: 728660 - RNA, 19 nt, Artificial Sequence
  Description of Artificial Sequence: Synthetic oligonucleotide
aggcuaaguacacaagcaa

SEQ ID NO: 728661 - RNA, 19 nt, Artificial Sequence
  Description of Artificial Sequence: Synthetic oligonucleotide
auuccacuauugugguuuc

SEQ ID NO: 728662 - RNA, 19 nt, Artificial Sequence
  Description of Artificial Sequence: Synthetic oligonucleotide
gggauuugggcacggaaag

SEQ ID NO: 728663 - RNA, 19 nt, Artificial Sequence
  Description of Artificial Sequence: Synthetic oligonucleotide
caugaacuguaagggagcc

SEQ ID NO: 728664 - RNA, 19 nt, Artificial Sequence
  Description of Artificial Sequence: Synthetic oligonucleotide
acaguauaaacagcugcca

SEQ ID NO: 728665 - RNA, 19 nt, Artificial Sequence
  Description of Artificial Sequence: Synthetic oligonucleotide
guagcaaaacgguuaucca

SEQ ID NO: 728666 - RNA, 19 nt, Artificial Sequence
  Description of Artificial Sequence: Synthetic oligonucleotide
cuucggcagauacaggcac

SEQ ID NO: 728667 - RNA, 19 nt, Artificial Sequence
  Description of Artificial Sequence: Synthetic oligonucleotide
gaaauuacugaguuacauu

SEQ ID NO: 728668 - RNA, 19 nt, Artificial Sequence
  Description of Artificial Sequence: Synthetic oligonucleotide
ugcguuuagcagacaucag

SEQ ID NO: 728669 - RNA, 19 nt, Artificial Sequence
  Description of Artificial Sequence: Synthetic oligonucleotide
agacugagccacucaaagu

SEQ ID NO: 728670 - RNA, 19 nt, Artificial Sequence
  Description of Artificial Sequence: Synthetic oligonucleotide
ugccauauuuuaugucaga

SEQ ID NO: 728671 - RNA, 19 nt, Artificial Sequence
  Description of Artificial Sequence: Synthetic oligonucleotide
acgaaagguaaaaggaacu

SEQ ID NO: 728672 - RNA, 19 nt, Artificial Sequence
  Description of Artificial Sequence: Synthetic oligonucleotide
aguuaguggguagccacag

SEQ ID NO: 728673 - RNA, 19 nt, Artificial Sequence
  Description of Artificial Sequence: Synthetic oligonucleotide
gcguuuagcagacaucagc

SEQ ID NO: 728674 - RNA, 19 nt, Artificial Sequence
  Description of Artificial Sequence: Synthetic oligonucleotide
gggucaauuuuccacugcc

SEQ ID NO: 728675 - RNA, 19 nt, Artificial Sequence
  Description of Artificial Sequence: Synthetic oligonucleotide
gauggaggaugcccguggc

SEQ ID NO: 728676 - RNA, 19 nt, Artificial Sequence
  Description of Artificial Sequence: Synthetic oligonucleotide
agcuaacgaaagguaaaag

SEQ ID NO: 728677 - RNA, 19 nt, Artificial Sequence
  Description of Artificial Sequence: Synthetic oligonucleotide
acaagcaaucacaaaugcu

SEQ ID NO: 728678 - RNA, 19 nt, Artificial Sequence
  Description of Artificial Sequence: Synthetic oligonucleotide
aagauagguccgaagcaga

SEQ ID NO: 728679 - RNA, 19 nt, Artificial Sequence
  Description of Artificial Sequence: Synthetic oligonucleotide
gugggauacaggcuucggc

SEQ ID NO: 728680 - RNA, 19 nt, Artificial Sequence
  Description of Artificial Sequence: Synthetic oligonucleotide
uaguacuuagcuggaacaa

SEQ ID NO: 728681 - RNA, 19 nt, Artificial Sequence
  Description of Artificial Sequence: Synthetic oligonucleotide
acccaagcuaacgaaaggu

SEQ ID NO: 728682 - RNA, 19 nt, Artificial Sequence
  Description of Artificial Sequence: Synthetic oligonucleotide
ucucuacaguucuucuugu

SEQ ID NO: 728683 - RNA, 19 nt, Artificial Sequence
  Description of Artificial Sequence: Synthetic oligonucleotide
uacuacacuacugcguuua

SEQ ID NO: 728684 - RNA, 19 nt, Artificial Sequence
  Description of Artificial Sequence: Synthetic oligonucleotide
auaagccugguguguggag

SEQ ID NO: 728685 - RNA, 19 nt, Artificial Sequence
  Description of Artificial Sequence: Synthetic oligonucleotide
caagcuaacgaaagguaaa

SEQ ID NO: 728686 - RNA, 19 nt, Artificial Sequence
  Description of Artificial Sequence: Synthetic oligonucleotide
cuuguggugguggaacccc

SEQ ID NO: 728687 - RNA, 19 nt, Artificial Sequence
  Description of Artificial Sequence: Synthetic oligonucleotide
gaguauaccaguauguguu

SEQ ID NO: 728688 - RNA, 19 nt, Artificial Sequence
  Description of Artificial Sequence: Synthetic oligonucleotide
auaacagaucucauaugga

SEQ ID NO: 728689 - RNA, 19 nt, Artificial Sequence
  Description of Artificial Sequence: Synthetic oligonucleotide
uaggauaaaauggcauauc

SEQ ID NO: 728690 - RNA, 19 nt, Artificial Sequence
  Description of Artificial Sequence: Synthetic oligonucleotide
cugcguuuagcagacauca

SEQ ID NO: 728691 - RNA, 19 nt, Artificial Sequence
  Description of Artificial Sequence: Synthetic oligonucleotide
uaguucaaugccggcaaca

SEQ ID NO: 728692 - RNA, 19 nt, Artificial Sequence
  Description of Artificial Sequence: Synthetic oligonucleotide
ccaaucaaagccccaaaac

SEQ ID NO: 728693 - RNA, 19 nt, Artificial Sequence
  Description of Artificial Sequence: Synthetic oligonucleotide
ucuuguggugguggaaccc

SEQ ID NO: 728694 - RNA, 19 nt, Artificial Sequence
  Description of Artificial Sequence: Synthetic oligonucleotide
uaggaccucccacuuagua

SEQ ID NO: 728695 - RNA, 19 nt, Artificial Sequence
  Description of Artificial Sequence: Synthetic oligonucleotide
acuacacuacugcguuuag

SEQ ID NO: 728696 - RNA, 19 nt, Artificial Sequence
  Description of Artificial Sequence: Synthetic oligonucleotide
cuucgauauucauaccaga

SEQ ID NO: 728697 - RNA, 19 nt, Artificial Sequence
  Description of Artificial Sequence: Synthetic oligonucleotide
aacuguucauuuagugaga

SEQ ID NO: 728698 - RNA, 19 nt, Artificial Sequence
  Description of Artificial Sequence: Synthetic oligonucleotide
acugcguuuagcagacauc

SEQ ID NO: 728699 - RNA, 19 nt, Artificial Sequence
  Description of Artificial Sequence: Synthetic oligonucleotide
ggcacggaaaggcacauca

SEQ ID NO: 728700 - RNA, 19 nt, Artificial Sequence
  Description of Artificial Sequence: Synthetic oligonucleotide
guuacuacacuacugcguu

SEQ ID NO: 728701 - RNA, 19 nt, Artificial Sequence
  Description of Artificial Sequence: Synthetic oligonucleotide
uucuaucacaaaguagguu

SEQ ID NO: 728702 - RNA, 19 nt, Artificial Sequence
  Description of Artificial Sequence: Synthetic oligonucleotide
auugugccauuguaucgga

SEQ ID NO: 728703 - RNA, 19 nt, Artificial Sequence
  Description of Artificial Sequence: Synthetic oligonucleotide
aagacagauuuaggauuug

SEQ ID NO: 728704 - RNA, 19 nt, Artificial Sequence
  Description of Artificial Sequence: Synthetic oligonucleotide
aaguuaguggguagccaca

SEQ ID NO: 728705 - RNA, 19 nt, Artificial Sequence
  Description of Artificial Sequence: Synthetic oligonucleotide
aguauaccaguauguguuu

SEQ ID NO: 728706 - RNA, 19 nt, Artificial Sequence
  Description of Artificial Sequence: Synthetic oligonucleotide
cacaucucuacaguucuuc

SEQ ID NO: 728707 - RNA, 19 nt, Artificial Sequence
  Description of Artificial Sequence: Synthetic oligonucleotide
acauagcaacuuacagagc

SEQ ID NO: 728708 - RNA, 19 nt, Artificial Sequence
  Description of Artificial Sequence: Synthetic oligonucleotide
agcaaaacgguuauccauu

SEQ ID NO: 728709 - RNA, 19 nt, Artificial Sequence
  Description of Artificial Sequence: Synthetic oligonucleotide
cauguagaugguggaaaug

SEQ ID NO: 728710 - RNA, 19 nt, Artificial Sequence
  Description of Artificial Sequence: Synthetic oligonucleotide
aguacuuagcuggaacaaa

SEQ ID NO: 728711 - RNA, 19 nt, Artificial Sequence
  Description of Artificial Sequence: Synthetic oligonucleotide
guugguaggaccucccacu

SEQ ID NO: 728712 - RNA, 19 nt, Artificial Sequence
  Description of Artificial Sequence: Synthetic oligonucleotide
agacgccaugaacuguaag

SEQ ID NO: 728713 - RNA, 19 nt, Artificial Sequence
  Description of Artificial Sequence: Synthetic oligonucleotide
cgauaggccuucauuaagg

SEQ ID NO: 728714 - RNA, 19 nt, Artificial Sequence
  Description of Artificial Sequence: Synthetic oligonucleotide
caaucugguaaaagacuga

SEQ ID NO: 728715 - RNA, 19 nt, Artificial Sequence
  Description of Artificial Sequence: Synthetic oligonucleotide
acaaugguuugguggcacu

SEQ ID NO: 728716 - RNA, 19 nt, Artificial Sequence
  Description of Artificial Sequence: Synthetic oligonucleotide
cauccaaauucuccggaca

SEQ ID NO: 728717 - RNA, 19 nt, Artificial Sequence
  Description of Artificial Sequence: Synthetic oligonucleotide
guaguaugauuaaucagcu

SEQ ID NO: 728718 - RNA, 19 nt, Artificial Sequence
  Description of Artificial Sequence: Synthetic oligonucleotide
cuacacuacugcguuuagc

SEQ ID NO: 728719 - RNA, 19 nt, Artificial Sequence
  Description of Artificial Sequence: Synthetic oligonucleotide
gacagugauaacagaucuc

SEQ ID NO: 728720 - RNA, 19 nt, Artificial Sequence
  Description of Artificial Sequence: Synthetic oligonucleotide
ggauaaaauggcauaucca

SEQ ID NO: 728721 - RNA, 19 nt, Artificial Sequence
  Description of Artificial Sequence: Synthetic oligonucleotide
cuccggacacauucucagg

SEQ ID NO: 728722 - RNA, 19 nt, Artificial Sequence
  Description of Artificial Sequence: Synthetic oligonucleotide
gauagguccgaagcagauc

SEQ ID NO: 728723 - RNA, 19 nt, Artificial Sequence
  Description of Artificial Sequence: Synthetic oligonucleotide
guaucggaacagugcauca

SEQ ID NO: 728724 - RNA, 19 nt, Artificial Sequence
  Description of Artificial Sequence: Synthetic oligonucleotide
aucccauugugccauugua

SEQ ID NO: 728725 - RNA, 19 nt, Artificial Sequence
  Description of Artificial Sequence: Synthetic oligonucleotide
guuaguggguagccacagc

SEQ ID NO: 728726 - RNA, 19 nt, Artificial Sequence
  Description of Artificial Sequence: Synthetic oligonucleotide
uaguaugauuaaucagcuu

SEQ ID NO: 728727 - RNA, 19 nt, Artificial Sequence
  Description of Artificial Sequence: Synthetic oligonucleotide
aguuggaaguuagugggua

SEQ ID NO: 728728 - RNA, 19 nt, Artificial Sequence
  Description of Artificial Sequence: Synthetic oligonucleotide
cagcuuuauaucuuguggu

SEQ ID NO: 728729 - RNA, 19 nt, Artificial Sequence
  Description of Artificial Sequence: Synthetic oligonucleotide
aaccuagaucaaucuggua

SEQ ID NO: 728730 - RNA, 19 nt, Artificial Sequence
  Description of Artificial Sequence: Synthetic oligonucleotide
cccacuuaguacuuagcug

SEQ ID NO: 728731 - RNA, 19 nt, Artificial Sequence
  Description of Artificial Sequence: Synthetic oligonucleotide
uaucggaacagugcaucau

SEQ ID NO: 728732 - RNA, 19 nt, Artificial Sequence
  Description of Artificial Sequence: Synthetic oligonucleotide
ucacgccacucgauaggcc

SEQ ID NO: 728733 - RNA, 19 nt, Artificial Sequence
  Description of Artificial Sequence: Synthetic oligonucleotide
ugguuugguggcacugaaa

SEQ ID NO: 728734 - RNA, 19 nt, Artificial Sequence
  Description of Artificial Sequence: Synthetic oligonucleotide
acggaaaggcacaucauuu

SEQ ID NO: 728735 - RNA, 19 nt, Artificial Sequence
  Description of Artificial Sequence: Synthetic oligonucleotide
acaggacuucgauauucau

SEQ ID NO: 728736 - RNA, 19 nt, Artificial Sequence
  Description of Artificial Sequence: Synthetic oligonucleotide
ggaacagugcaucauugua

SEQ ID NO: 728737 - RNA, 19 nt, Artificial Sequence
  Description of Artificial Sequence: Synthetic oligonucleotide
ggugauacaccgucuccac

SEQ ID NO: 728738 - RNA, 19 nt, Artificial Sequence
  Description of Artificial Sequence: Synthetic oligonucleotide
augaggcuaaguacacaag

SEQ ID NO: 728739 - RNA, 19 nt, Artificial Sequence
  Description of Artificial Sequence: Synthetic oligonucleotide
cucgauaggccuucauuaa

SEQ ID NO: 728740 - RNA, 19 nt, Artificial Sequence
  Description of Artificial Sequence: Synthetic oligonucleotide
uggcacugaaaauccuaau

SEQ ID NO: 728741 - RNA, 19 nt, Artificial Sequence
  Description of Artificial Sequence: Synthetic oligonucleotide
aggaagggauuugggcacg

SEQ ID NO: 728742 - RNA, 19 nt, Artificial Sequence
  Description of Artificial Sequence: Synthetic oligonucleotide
cacaaugguuugguggcac

SEQ ID NO: 728743 - RNA, 19 nt, Artificial Sequence
  Description of Artificial Sequence: Synthetic oligonucleotide
ggcacuguauauaaauuaa

SEQ ID NO: 728744 - RNA, 19 nt, Artificial Sequence
  Description of Artificial Sequence: Synthetic oligonucleotide
guaguucaaugccggcaac

SEQ ID NO: 728745 - RNA, 19 nt, Artificial Sequence
  Description of Artificial Sequence: Synthetic oligonucleotide
ggauuugggcacggaaagg

SEQ ID NO: 728746 - RNA, 19 nt, Artificial Sequence
  Description of Artificial Sequence: Synthetic oligonucleotide
gucacuguugguaggaccu

SEQ ID NO: 728747 - RNA, 19 nt, Artificial Sequence
  Description of Artificial Sequence: Synthetic oligonucleotide
gagauggaggaugcccgug

SEQ ID NO: 728748 - RNA, 19 nt, Artificial Sequence
  Description of Artificial Sequence: Synthetic oligonucleotide
cugggcgauagacaaggga

SEQ ID NO: 728749 - RNA, 19 nt, Artificial Sequence
  Description of Artificial Sequence: Synthetic oligonucleotide
uccuuucugguggaguaua

SEQ ID NO: 728750 - RNA, 19 nt, Artificial Sequence
  Description of Artificial Sequence: Synthetic oligonucleotide
gguauuuaguggcacugua

SEQ ID NO: 728751 - RNA, 19 nt, Artificial Sequence
  Description of Artificial Sequence: Synthetic oligonucleotide
gcacauguuacuacacuac

SEQ ID NO: 728752 - RNA, 19 nt, Artificial Sequence
  Description of Artificial Sequence: Synthetic oligonucleotide
ggaccucccacuuaguacu

SEQ ID NO: 728753 - RNA, 19 nt, Artificial Sequence
  Description of Artificial Sequence: Synthetic oligonucleotide
uuacuacacuacugcguuu

SEQ ID NO: 728754 - RNA, 19 nt, Artificial Sequence
  Description of Artificial Sequence: Synthetic oligonucleotide
uggcaacgccaaagauagg

SEQ ID NO: 728755 - RNA, 19 nt, Artificial Sequence
  Description of Artificial Sequence: Synthetic oligonucleotide
gaaucacuugaauucucuu

SEQ ID NO: 728756 - RNA, 19 nt, Artificial Sequence
  Description of Artificial Sequence: Synthetic oligonucleotide
caugaacuguucauuuagu

SEQ ID NO: 728757 - RNA, 19 nt, Artificial Sequence
  Description of Artificial Sequence: Synthetic oligonucleotide
agauagguccgaagcagau

SEQ ID NO: 728758 - RNA, 19 nt, Artificial Sequence
  Description of Artificial Sequence: Synthetic oligonucleotide
guacucuuuccgguuggug

SEQ ID NO: 728759 - RNA, 19 nt, Artificial Sequence
  Description of Artificial Sequence: Synthetic oligonucleotide
cacuuaguacuuagcugga

SEQ ID NO: 728760 - RNA, 19 nt, Artificial Sequence
  Description of Artificial Sequence: Synthetic oligonucleotide
ccacaguuggaaguuagug

SEQ ID NO: 728761 - RNA, 19 nt, Artificial Sequence
  Description of Artificial Sequence: Synthetic oligonucleotide
gugauacaccgucuccaca

SEQ ID NO: 728762 - RNA, 19 nt, Artificial Sequence
  Description of Artificial Sequence: Synthetic oligonucleotide
uuccacuauugugguuucc

SEQ ID NO: 728763 - RNA, 19 nt, Artificial Sequence
  Description of Artificial Sequence: Synthetic oligonucleotide
guggaguauaccaguaugu

SEQ ID NO: 728764 - RNA, 19 nt, Artificial Sequence
  Description of Artificial Sequence: Synthetic oligonucleotide
ccaagcuaacgaaagguaa

SEQ ID NO: 728765 - RNA, 19 nt, Artificial Sequence
  Description of Artificial Sequence: Synthetic oligonucleotide
agcaacuuacagagcccag

SEQ ID NO: 728766 - RNA, 19 nt, Artificial Sequence
  Description of Artificial Sequence: Synthetic oligonucleotide
aagucaucccaggccacuu

SEQ ID NO: 728767 - RNA, 19 nt, Artificial Sequence
  Description of Artificial Sequence: Synthetic oligonucleotide
cuuuaggaacacugguacu

SEQ ID NO: 728768 - RNA, 19 nt, Artificial Sequence
  Description of Artificial Sequence: Synthetic oligonucleotide
ugguaggaccucccacuua

SEQ ID NO: 728769 - RNA, 19 nt, Artificial Sequence
  Description of Artificial Sequence: Synthetic oligonucleotide
gggacuuuuaggauaaaau

SEQ ID NO: 728770 - RNA, 19 nt, Artificial Sequence
  Description of Artificial Sequence: Synthetic oligonucleotide
cgauauucauaccagaagu

SEQ ID NO: 728771 - RNA, 19 nt, Artificial Sequence
  Description of Artificial Sequence: Synthetic oligonucleotide
uagguccgaagcagaucaa

SEQ ID NO: 728772 - RNA, 19 nt, Artificial Sequence
  Description of Artificial Sequence: Synthetic oligonucleotide
caaagugagccacauccau

SEQ ID NO: 728773 - RNA, 19 nt, Artificial Sequence
  Description of Artificial Sequence: Synthetic oligonucleotide
cacugccaauguucuauca

SEQ ID NO: 728774 - RNA, 19 nt, Artificial Sequence
  Description of Artificial Sequence: Synthetic oligonucleotide
gugauucuucuaaugcucu

SEQ ID NO: 728775 - RNA, 19 nt, Artificial Sequence
  Description of Artificial Sequence: Synthetic oligonucleotide
cucucacuccaccggcuuc

SEQ ID NO: 728776 - RNA, 19 nt, Artificial Sequence
  Description of Artificial Sequence: Synthetic oligonucleotide
guauuuaguggcacuguau

SEQ ID NO: 728777 - RNA, 19 nt, Artificial Sequence
  Description of Artificial Sequence: Synthetic oligonucleotide
cacgccacucgauaggccu

SEQ ID NO: 728778 - RNA, 19 nt, Artificial Sequence
  Description of Artificial Sequence: Synthetic oligonucleotide
ugccggcaacauagcaacu

SEQ ID NO: 728779 - RNA, 19 nt, Artificial Sequence
  Description of Artificial Sequence: Synthetic oligonucleotide
cugugccuauugaggcagc

SEQ ID NO: 728780 - RNA, 19 nt, Artificial Sequence
  Description of Artificial Sequence: Synthetic oligonucleotide
accacaguuggaaguuagu

SEQ ID NO: 728781 - RNA, 19 nt, Artificial Sequence
  Description of Artificial Sequence: Synthetic oligonucleotide
caaucccauugugccauug

SEQ ID NO: 728782 - RNA, 19 nt, Artificial Sequence
  Description of Artificial Sequence: Synthetic oligonucleotide
agcccuaguuucuggugua

SEQ ID NO: 728783 - RNA, 19 nt, Artificial Sequence
  Description of Artificial Sequence: Synthetic oligonucleotide
ggacuucgauauucauacc

SEQ ID NO: 728784 - RNA, 19 nt, Artificial Sequence
  Description of Artificial Sequence: Synthetic oligonucleotide
guucuaucacaaaguaggu

SEQ ID NO: 728785 - RNA, 19 nt, Artificial Sequence
  Description of Artificial Sequence: Synthetic oligonucleotide
ggauacaggcuucggcaga

SEQ ID NO: 728786 - RNA, 19 nt, Artificial Sequence
  Description of Artificial Sequence: Synthetic oligonucleotide
ggugggauacaggcuucgg

SEQ ID NO: 728787 - RNA, 19 nt, Artificial Sequence
  Description of Artificial Sequence: Synthetic oligonucleotide
acgccaaagauagguccga

SEQ ID NO: 728788 - RNA, 19 nt, Artificial Sequence
  Description of Artificial Sequence: Synthetic oligonucleotide
cuguucauuuagugagaaa

SEQ ID NO: 728789 - RNA, 19 nt, Artificial Sequence
  Description of Artificial Sequence: Synthetic oligonucleotide
ggaaguuaguggguagcca

SEQ ID NO: 728790 - RNA, 19 nt, Artificial Sequence
  Description of Artificial Sequence: Synthetic oligonucleotide
gauacaggcuucggcagau

SEQ ID NO: 728791 - RNA, 19 nt, Artificial Sequence
  Description of Artificial Sequence: Synthetic oligonucleotide
gcgauagacaagggaaaac

SEQ ID NO: 728792 - RNA, 19 nt, Artificial Sequence
  Description of Artificial Sequence: Synthetic oligonucleotide
gguuggugugggcagccca

SEQ ID NO: 728793 - RNA, 19 nt, Artificial Sequence
  Description of Artificial Sequence: Synthetic oligonucleotide
cuguugguaggaccuccca

SEQ ID NO: 728794 - RNA, 19 nt, Artificial Sequence
  Description of Artificial Sequence: Synthetic oligonucleotide
ccuuucugguggaguauac

SEQ ID NO: 728795 - RNA, 19 nt, Artificial Sequence
  Description of Artificial Sequence: Synthetic oligonucleotide
gaagggauuugggcacgga

SEQ ID NO: 728796 - RNA, 19 nt, Artificial Sequence
  Description of Artificial Sequence: Synthetic oligonucleotide
gaguccaaucaaagcccca

SEQ ID NO: 728797 - RNA, 19 nt, Artificial Sequence
  Description of Artificial Sequence: Synthetic oligonucleotide
augcuguagcaaaacgguu

SEQ ID NO: 728798 - RNA, 19 nt, Artificial Sequence
  Description of Artificial Sequence: Synthetic oligonucleotide
cacggaaaggcacaucauu

SEQ ID NO: 728799 - RNA, 19 nt, Artificial Sequence
  Description of Artificial Sequence: Synthetic oligonucleotide
gacugcucgcccauccucu

SEQ ID NO: 728800 - RNA, 19 nt, Artificial Sequence
  Description of Artificial Sequence: Synthetic oligonucleotide
ggcgauagacaagggaaaa

SEQ ID NO: 728801 - RNA, 19 nt, Artificial Sequence
  Description of Artificial Sequence: Synthetic oligonucleotide
gcuguagcaaaacgguuau

SEQ ID NO: 728802 - RNA, 19 nt, Artificial Sequence
  Description of Artificial Sequence: Synthetic oligonucleotide
cuguagcaaaacgguuauc

SEQ ID NO: 728803 - RNA, 19 nt, Artificial Sequence
  Description of Artificial Sequence: Synthetic oligonucleotide
cagcccuaguuucuggugu

SEQ ID NO: 728804 - RNA, 19 nt, Artificial Sequence
  Description of Artificial Sequence: Synthetic oligonucleotide
cacucgauaggccuucauu

SEQ ID NO: 728805 - RNA, 19 nt, Artificial Sequence
  Description of Artificial Sequence: Synthetic oligonucleotide
aagggacuuuuaggauaaa

SEQ ID NO: 728806 - RNA, 19 nt, Artificial Sequence
  Description of Artificial Sequence: Synthetic oligonucleotide
gcccauucacgccacucga

SEQ ID NO: 728807 - RNA, 19 nt, Artificial Sequence
  Description of Artificial Sequence: Synthetic oligonucleotide
agaccacaguuggaaguua

SEQ ID NO: 728808 - RNA, 19 nt, Artificial Sequence
  Description of Artificial Sequence: Synthetic oligonucleotide
cccaagcuaacgaaaggua

SEQ ID NO: 728809 - RNA, 19 nt, Artificial Sequence
  Description of Artificial Sequence: Synthetic oligonucleotide
cggcaacauagcaacuuac

SEQ ID NO: 728810 - RNA, 19 nt, Artificial Sequence
  Description of Artificial Sequence: Synthetic oligonucleotide
gcagacgccaugaacugua

SEQ ID NO: 728811 - RNA, 19 nt, Artificial Sequence
  Description of Artificial Sequence: Synthetic oligonucleotide
gcaacuuacagagcccagu

SEQ ID NO: 728812 - RNA, 19 nt, Artificial Sequence
  Description of Artificial Sequence: Synthetic oligonucleotide
gccuauugaggcagccaug

SEQ ID NO: 728813 - RNA, 19 nt, Artificial Sequence
  Description of Artificial Sequence: Synthetic oligonucleotide
cagaaggaccauccaaauu

SEQ ID NO: 728814 - RNA, 19 nt, Artificial Sequence
  Description of Artificial Sequence: Synthetic oligonucleotide
cgauagacaagggaaaacu

SEQ ID NO: 728815 - RNA, 19 nt, Artificial Sequence
  Description of Artificial Sequence: Synthetic oligonucleotide
gggcgauagacaagggaaa

SEQ ID NO: 728816 - RNA, 19 nt, Artificial Sequence
  Description of Artificial Sequence: Synthetic oligonucleotide
ccuauugaggcagccaugu

SEQ ID NO: 728817 - RNA, 19 nt, Artificial Sequence
  Description of Artificial Sequence: Synthetic oligonucleotide
gcccuaguuucugguguag

SEQ ID NO: 728818 - RNA, 19 nt, Artificial Sequence
  Description of Artificial Sequence: Synthetic oligonucleotide
gaaagacaacugggcgaua

SEQ ID NO: 728819 - RNA, 19 nt, Artificial Sequence
  Description of Artificial Sequence: Synthetic oligonucleotide
cgaaucacuugaauucucu

SEQ ID NO: 728820 - RNA, 19 nt, Artificial Sequence
  Description of Artificial Sequence: Synthetic oligonucleotide
gccauuguaucggaacagu

SEQ ID NO: 728821 - RNA, 19 nt, Artificial Sequence
  Description of Artificial Sequence: Synthetic oligonucleotide
gcagaucaauuccacuauu

SEQ ID NO: 728822 - RNA, 19 nt, Artificial Sequence
  Description of Artificial Sequence: Synthetic oligonucleotide
guuuagggacaaggaugcu

SEQ ID NO: 728823 - RNA, 19 nt, Artificial Sequence
  Description of Artificial Sequence: Synthetic oligonucleotide
ccauguagaugguggaaau

SEQ ID NO: 728824 - RNA, 19 nt, Artificial Sequence
  Description of Artificial Sequence: Synthetic oligonucleotide
auacaggcuucggcagaua

SEQ ID NO: 728825 - RNA, 19 nt, Artificial Sequence
  Description of Artificial Sequence: Synthetic oligonucleotide
ccggcaacauagcaacuua

SEQ ID NO: 728826 - RNA, 19 nt, Artificial Sequence
  Description of Artificial Sequence: Synthetic oligonucleotide
gguccgaagcagaucaauu

SEQ ID NO: 728827 - RNA, 19 nt, Artificial Sequence
  Description of Artificial Sequence: Synthetic oligonucleotide
ccgguuggugugggcagcc

SEQ ID NO: 728828 - RNA, 19 nt, Artificial Sequence
  Description of Artificial Sequence: Synthetic oligonucleotide
aggcccuguucugggucaa

SEQ ID NO: 728829 - RNA, 19 nt, Artificial Sequence
  Description of Artificial Sequence: Synthetic oligonucleotide
gccggcaacauagcaacuu

SEQ ID NO: 728830 - RNA, 19 nt, Artificial Sequence
  Description of Artificial Sequence: Synthetic oligonucleotide
gcccguggcaaugguggga

SEQ ID NO: 728831 - RNA, 19 nt, Artificial Sequence
  Description of Artificial Sequence: Synthetic oligonucleotide
cggaacagugcaucauugu

SEQ ID NO: 728832 - RNA, 19 nt, Artificial Sequence
  Description of Artificial Sequence: Synthetic oligonucleotide
gggcacggaaaggcacauc

SEQ ID NO: 728833 - RNA, 19 nt, Artificial Sequence
  Description of Artificial Sequence: Synthetic oligonucleotide
cccuguucugggucaauuu

SEQ ID NO: 728834 - RNA, 19 nt, Artificial Sequence
  Description of Artificial Sequence: Synthetic oligonucleotide
gcacggaaaggcacaucau

SEQ ID NO: 728835 - RNA, 19 nt, Artificial Sequence
  Description of Artificial Sequence: Synthetic oligonucleotide
gccacucgauaggccuuca

SEQ ID NO: 728836 - RNA, 19 nt, Artificial Sequence
  Description of Artificial Sequence: Synthetic oligonucleotide
gcugcccauucacgccacu

SEQ ID NO: 728837 - RNA, 19 nt, Artificial Sequence
  Description of Artificial Sequence: Synthetic oligonucleotide
cgccaaagauagguccgaa

SEQ ID NO: 728838 - RNA, 19 nt, Artificial Sequence
  Description of Artificial Sequence: Synthetic oligonucleotide
aauaguauaucaucuucac

SEQ ID NO: 728839 - RNA, 19 nt, Artificial Sequence
  Description of Artificial Sequence: Synthetic oligonucleotide
gauguuagaucacugaacg

SEQ ID NO: 728840 - RNA, 19 nt, Artificial Sequence
  Description of Artificial Sequence: Synthetic oligonucleotide
acgcuuuccacacagaggc

SEQ ID NO: 728841 - RNA, 19 nt, Artificial Sequence
  Description of Artificial Sequence: Synthetic oligonucleotide
uaguauaucaucuucacaa

SEQ ID NO: 728842 - RNA, 19 nt, Artificial Sequence
  Description of Artificial Sequence: Synthetic oligonucleotide
gaagaguucauucacuacc

SEQ ID NO: 728843 - RNA, 19 nt, Artificial Sequence
  Description of Artificial Sequence: Synthetic oligonucleotide
auuguuuccguagaguucc

SEQ ID NO: 728844 - RNA, 19 nt, Artificial Sequence
  Description of Artificial Sequence: Synthetic oligonucleotide
aaaagcauucccaggaggc

SEQ ID NO: 728845 - RNA, 19 nt, Artificial Sequence
  Description of Artificial Sequence: Synthetic oligonucleotide
uagguggucauucagguag

SEQ ID NO: 728846 - RNA, 19 nt, Artificial Sequence
  Description of Artificial Sequence: Synthetic oligonucleotide
ucuagcucuagacuggagg

SEQ ID NO: 728847 - RNA, 19 nt, Artificial Sequence
  Description of Artificial Sequence: Synthetic oligonucleotide
uguuagaucacugaacgcc

SEQ ID NO: 728848 - RNA, 19 nt, Artificial Sequence
  Description of Artificial Sequence: Synthetic oligonucleotide
ucgaauauguacagcagag

SEQ ID NO: 728849 - RNA, 19 nt, Artificial Sequence
  Description of Artificial Sequence: Synthetic oligonucleotide
uagaaagcuaacugcaagg

SEQ ID NO: 728850 - RNA, 19 nt, Artificial Sequence
  Description of Artificial Sequence: Synthetic oligonucleotide
uucaccuucacacaaacua

SEQ ID NO: 728851 - RNA, 19 nt, Artificial Sequence
  Description of Artificial Sequence: Synthetic oligonucleotide
cacacaaacuauuucaaag

SEQ ID NO: 728852 - RNA, 19 nt, Artificial Sequence
  Description of Artificial Sequence: Synthetic oligonucleotide
aguggcuccauuuaccgcg

SEQ ID NO: 728853 - RNA, 19 nt, Artificial Sequence
  Description of Artificial Sequence: Synthetic oligonucleotide
acgaaagugucccagccgc

SEQ ID NO: 728854 - RNA, 19 nt, Artificial Sequence
  Description of Artificial Sequence: Synthetic oligonucleotide
uucacuucugggcugaggc

SEQ ID NO: 728855 - RNA, 19 nt, Artificial Sequence
  Description of Artificial Sequence: Synthetic oligonucleotide
aauaccugcaucuccuugu

SEQ ID NO: 728856 - RNA, 19 nt, Artificial Sequence
  Description of Artificial Sequence: Synthetic oligonucleotide
aaagcuaacugcaagggga

SEQ ID NO: 728857 - RNA, 19 nt, Artificial Sequence
  Description of Artificial Sequence: Synthetic oligonucleotide
aaugcgaccccaguuuacc

SEQ ID NO: 728858 - RNA, 19 nt, Artificial Sequence
  Description of Artificial Sequence: Synthetic oligonucleotide
uaugaagcugggauguuag

SEQ ID NO: 728859 - RNA, 19 nt, Artificial Sequence
  Description of Artificial Sequence: Synthetic oligonucleotide
agcuuugguaugcaguccc

SEQ ID NO: 728860 - RNA, 19 nt, Artificial Sequence
  Description of Artificial Sequence: Synthetic oligonucleotide
aagucauuaacagcucugg

SEQ ID NO: 728861 - RNA, 19 nt, Artificial Sequence
  Description of Artificial Sequence: Synthetic oligonucleotide
aagugaggcagcugaaguc

SEQ ID NO: 728862 - RNA, 19 nt, Artificial Sequence
  Description of Artificial Sequence: Synthetic oligonucleotide
uuugguaugcagucccugg

SEQ ID NO: 728863 - RNA, 19 nt, Artificial Sequence
  Description of Artificial Sequence: Synthetic oligonucleotide
caaucuagccucuuucugg

SEQ ID NO: 728864 - RNA, 19 nt, Artificial Sequence
  Description of Artificial Sequence: Synthetic oligonucleotide
agucaugcccgucaggaac

SEQ ID NO: 728865 - RNA, 19 nt, Artificial Sequence
  Description of Artificial Sequence: Synthetic oligonucleotide
uuuacggcugccaugggga

SEQ ID NO: 728866 - RNA, 19 nt, Artificial Sequence
  Description of Artificial Sequence: Synthetic oligonucleotide
uuuaccgcggggcuguccg

SEQ ID NO: 728867 - RNA, 19 nt, Artificial Sequence
  Description of Artificial Sequence: Synthetic oligonucleotide
uuugaggccaagugaauug

SEQ ID NO: 728868 - RNA, 19 nt, Artificial Sequence
  Description of Artificial Sequence: Synthetic oligonucleotide
aauuuugaggccaagugaa

SEQ ID NO: 728869 - RNA, 19 nt, Artificial Sequence
  Description of Artificial Sequence: Synthetic oligonucleotide
acacaaacuauuucaaaga

SEQ ID NO: 728870 - RNA, 19 nt, Artificial Sequence
  Description of Artificial Sequence: Synthetic oligonucleotide
aagucucgaauauguacag

SEQ ID NO: 728871 - RNA, 19 nt, Artificial Sequence
  Description of Artificial Sequence: Synthetic oligonucleotide
ugcuuuacggcugccaugg

SEQ ID NO: 728872 - RNA, 19 nt, Artificial Sequence
  Description of Artificial Sequence: Synthetic oligonucleotide
uagggaaauccccaggggc

SEQ ID NO: 728873 - RNA, 19 nt, Artificial Sequence
  Description of Artificial Sequence: Synthetic oligonucleotide
uaauaaggguuccccaacc

SEQ ID NO: 728874 - RNA, 19 nt, Artificial Sequence
  Description of Artificial Sequence: Synthetic oligonucleotide
uccgacugaagagagagcc

SEQ ID NO: 728875 - RNA, 19 nt, Artificial Sequence
  Description of Artificial Sequence: Synthetic oligonucleotide
auucacuaccuguucaaag

SEQ ID NO: 728876 - RNA, 19 nt, Artificial Sequence
  Description of Artificial Sequence: Synthetic oligonucleotide
ugucuugucacuuccgacu

SEQ ID NO: 728877 - RNA, 19 nt, Artificial Sequence
  Description of Artificial Sequence: Synthetic oligonucleotide
agaaagcuaacugcaaggg

SEQ ID NO: 728878 - RNA, 19 nt, Artificial Sequence
  Description of Artificial Sequence: Synthetic oligonucleotide
uuuccguagaguuccacga

SEQ ID NO: 728879 - RNA, 19 nt, Artificial Sequence
  Description of Artificial Sequence: Synthetic oligonucleotide
uucauucacuaccuguuca

SEQ ID NO: 728880 - RNA, 19 nt, Artificial Sequence
  Description of Artificial Sequence: Synthetic oligonucleotide
auguuagaucacugaacgc

SEQ ID NO: 728881 - RNA, 19 nt, Artificial Sequence
  Description of Artificial Sequence: Synthetic oligonucleotide
uuagaucacugaacgcccg

SEQ ID NO: 728882 - RNA, 19 nt, Artificial Sequence
  Description of Artificial Sequence: Synthetic oligonucleotide
cugaauuucuaauuaguca

SEQ ID NO: 728883 - RNA, 19 nt, Artificial Sequence
  Description of Artificial Sequence: Synthetic oligonucleotide
aaggggacucggucuaggc

SEQ ID NO: 728884 - RNA, 19 nt, Artificial Sequence
  Description of Artificial Sequence: Synthetic oligonucleotide
uugguaugcagucccuggg

SEQ ID NO: 728885 - RNA, 19 nt, Artificial Sequence
  Description of Artificial Sequence: Synthetic oligonucleotide
ucucgaauauguacagcag

SEQ ID NO: 728886 - RNA, 19 nt, Artificial Sequence
  Description of Artificial Sequence: Synthetic oligonucleotide
gucacuuccgacugaagag

SEQ ID NO: 728887 - RNA, 19 nt, Artificial Sequence
  Description of Artificial Sequence: Synthetic oligonucleotide
uccaccgaaggagaaaagg

SEQ ID NO: 728888 - RNA, 19 nt, Artificial Sequence
  Description of Artificial Sequence: Synthetic oligonucleotide
guuuccguagaguuccacg

SEQ ID NO: 728889 - RNA, 19 nt, Artificial Sequence
  Description of Artificial Sequence: Synthetic oligonucleotide
uaaggguuccccaaccaga

SEQ ID NO: 728890 - RNA, 19 nt, Artificial Sequence
  Description of Artificial Sequence: Synthetic oligonucleotide
agucccugggguuauauga

SEQ ID NO: 728891 - RNA, 19 nt, Artificial Sequence
  Description of Artificial Sequence: Synthetic oligonucleotide
gaugggaaaugaucaauuc

SEQ ID NO: 728892 - RNA, 19 nt, Artificial Sequence
  Description of Artificial Sequence: Synthetic oligonucleotide
auaaggguuccccaaccag

SEQ ID NO: 728893 - RNA, 19 nt, Artificial Sequence
  Description of Artificial Sequence: Synthetic oligonucleotide
uccccgugcauccaaacug

SEQ ID NO: 728894 - RNA, 19 nt, Artificial Sequence
  Description of Artificial Sequence: Synthetic oligonucleotide
auuaacagcucuggggcac

SEQ ID NO: 728895 - RNA, 19 nt, Artificial Sequence
  Description of Artificial Sequence: Synthetic oligonucleotide
ugguaugcagucccugggg

SEQ ID NO: 728896 - RNA, 19 nt, Artificial Sequence
  Description of Artificial Sequence: Synthetic oligonucleotide
uugucuacgcuuuccacac

SEQ ID NO: 728897 - RNA, 19 nt, Artificial Sequence
  Description of Artificial Sequence: Synthetic oligonucleotide
agaaaagcauucccaggag

SEQ ID NO: 728898 - RNA, 19 nt, Artificial Sequence
  Description of Artificial Sequence: Synthetic oligonucleotide
agccacucuagcucuagac

SEQ ID NO: 728899 - RNA, 19 nt, Artificial Sequence
  Description of Artificial Sequence: Synthetic oligonucleotide
ucuagccucuuucugggga

SEQ ID NO: 728900 - RNA, 19 nt, Artificial Sequence
  Description of Artificial Sequence: Synthetic oligonucleotide
caccgaaggagaaaaggcc

SEQ ID NO: 728901 - RNA, 19 nt, Artificial Sequence
  Description of Artificial Sequence: Synthetic oligonucleotide
caauucugaggccacacac

SEQ ID NO: 728902 - RNA, 19 nt, Artificial Sequence
  Description of Artificial Sequence: Synthetic oligonucleotide
auaguauaucaucuucaca

SEQ ID NO: 728903 - RNA, 19 nt, Artificial Sequence
  Description of Artificial Sequence: Synthetic oligonucleotide
aucuugcaggaagugaggc

SEQ ID NO: 728904 - RNA, 19 nt, Artificial Sequence
  Description of Artificial Sequence: Synthetic oligonucleotide
cuuuccggcucucagcugc

SEQ ID NO: 728905 - RNA, 19 nt, Artificial Sequence
  Description of Artificial Sequence: Synthetic oligonucleotide
aggcaaucuagccucuuuc

SEQ ID NO: 728906 - RNA, 19 nt, Artificial Sequence
  Description of Artificial Sequence: Synthetic oligonucleotide
uuauuacugaacugcacuu

SEQ ID NO: 728907 - RNA, 19 nt, Artificial Sequence
  Description of Artificial Sequence: Synthetic oligonucleotide
gagagagccacucuagcuc

SEQ ID NO: 728908 - RNA, 19 nt, Artificial Sequence
  Description of Artificial Sequence: Synthetic oligonucleotide
auacagacacgcuuaacaa

SEQ ID NO: 728909 - RNA, 19 nt, Artificial Sequence
  Description of Artificial Sequence: Synthetic oligonucleotide
cuuuacggcugccaugggg

SEQ ID NO: 728910 - RNA, 19 nt, Artificial Sequence
  Description of Artificial Sequence: Synthetic oligonucleotide
aggcccaacccuucgauag

SEQ ID NO: 728911 - RNA, 19 nt, Artificial Sequence
  Description of Artificial Sequence: Synthetic oligonucleotide
cuacgcuuuccacacagag

SEQ ID NO: 728912 - RNA, 19 nt, Artificial Sequence
  Description of Artificial Sequence: Synthetic oligonucleotide
acagaggcuccaccgaagg

SEQ ID NO: 728913 - RNA, 19 nt, Artificial Sequence
  Description of Artificial Sequence: Synthetic oligonucleotide
uuuaccccaucccggaaga

SEQ ID NO: 728914 - RNA, 19 nt, Artificial Sequence
  Description of Artificial Sequence: Synthetic oligonucleotide
caagugaauugagaugugg

SEQ ID NO: 728915 - RNA, 19 nt, Artificial Sequence
  Description of Artificial Sequence: Synthetic oligonucleotide
ugggauguuagaucacuga

SEQ ID NO: 728916 - RNA, 19 nt, Artificial Sequence
  Description of Artificial Sequence: Synthetic oligonucleotide
ucuugggcccaguuggucc

SEQ ID NO: 728917 - RNA, 19 nt, Artificial Sequence
  Description of Artificial Sequence: Synthetic oligonucleotide
cucagcgcuugcuuuacgg

SEQ ID NO: 728918 - RNA, 19 nt, Artificial Sequence
  Description of Artificial Sequence: Synthetic oligonucleotide
cugagguagggaaaucccc

SEQ ID NO: 728919 - RNA, 19 nt, Artificial Sequence
  Description of Artificial Sequence: Synthetic oligonucleotide
gaaagugucccagccgccg

SEQ ID NO: 728920 - RNA, 19 nt, Artificial Sequence
  Description of Artificial Sequence: Synthetic oligonucleotide
auaaauacagacacgcuua

SEQ ID NO: 728921 - RNA, 19 nt, Artificial Sequence
  Description of Artificial Sequence: Synthetic oligonucleotide
ugugaguagguggucacug

SEQ ID NO: 728922 - RNA, 19 nt, Artificial Sequence
  Description of Artificial Sequence: Synthetic oligonucleotide
cuagccagaagccucagga

SEQ ID NO: 728923 - RNA, 19 nt, Artificial Sequence
  Description of Artificial Sequence: Synthetic oligonucleotide
aagugugguagguucuaga

SEQ ID NO: 728924 - RNA, 19 nt, Artificial Sequence
  Description of Artificial Sequence: Synthetic oligonucleotide
agugugguagguucuagaa

SEQ ID NO: 728925 - RNA, 19 nt, Artificial Sequence
  Description of Artificial Sequence: Synthetic oligonucleotide
agcacacccuuucccacgc

SEQ ID NO: 728926 - RNA, 19 nt, Artificial Sequence
  Description of Artificial Sequence: Synthetic oligonucleotide
ggagaaaaggccacaaugc

SEQ ID NO: 728927 - RNA, 19 nt, Artificial Sequence
  Description of Artificial Sequence: Synthetic oligonucleotide
agaggcuccaccgaaggag

SEQ ID NO: 728928 - RNA, 19 nt, Artificial Sequence
  Description of Artificial Sequence: Synthetic oligonucleotide
aguugugguggggauaggg

SEQ ID NO: 728929 - RNA, 19 nt, Artificial Sequence
  Description of Artificial Sequence: Synthetic oligonucleotide
guaauaaggguuccccaac

SEQ ID NO: 728930 - RNA, 19 nt, Artificial Sequence
  Description of Artificial Sequence: Synthetic oligonucleotide
aucacugaacgcccgccgg

SEQ ID NO: 728931 - RNA, 19 nt, Artificial Sequence
  Description of Artificial Sequence: Synthetic oligonucleotide
guuagaucacugaacgccc

SEQ ID NO: 728932 - RNA, 19 nt, Artificial Sequence
  Description of Artificial Sequence: Synthetic oligonucleotide
guagggaaauccccagggg

SEQ ID NO: 728933 - RNA, 19 nt, Artificial Sequence
  Description of Artificial Sequence: Synthetic oligonucleotide
ucauucacuaccuguucaa

SEQ ID NO: 728934 - RNA, 19 nt, Artificial Sequence
  Description of Artificial Sequence: Synthetic oligonucleotide
agucgacaccguuuauuac

SEQ ID NO: 728935 - RNA, 19 nt, Artificial Sequence
  Description of Artificial Sequence: Synthetic oligonucleotide
gucuacgcuuuccacacag

SEQ ID NO: 728936 - RNA, 19 nt, Artificial Sequence
  Description of Artificial Sequence: Synthetic oligonucleotide
ugcccgucaggaaccagcg

SEQ ID NO: 728937 - RNA, 19 nt, Artificial Sequence
  Description of Artificial Sequence: Synthetic oligonucleotide
aggccaagugaauugagau

SEQ ID NO: 728938 - RNA, 19 nt, Artificial Sequence
  Description of Artificial Sequence: Synthetic oligonucleotide
ucuagccagaagccucagg

SEQ ID NO: 728939 - RNA, 19 nt, Artificial Sequence
  Description of Artificial Sequence: Synthetic oligonucleotide
uacagacacgcuuaacaaa

SEQ ID NO: 728940 - RNA, 19 nt, Artificial Sequence
  Description of Artificial Sequence: Synthetic oligonucleotide
gaggcgagaugugaguagg

SEQ ID NO: 728941 - RNA, 19 nt, Artificial Sequence
  Description of Artificial Sequence: Synthetic oligonucleotide
acaucaaaccaaggcaauc

SEQ ID NO: 728942 - RNA, 19 nt, Artificial Sequence
  Description of Artificial Sequence: Synthetic oligonucleotide
aagcagucugaauuucuaa

SEQ ID NO: 728943 - RNA, 19 nt, Artificial Sequence
  Description of Artificial Sequence: Synthetic oligonucleotide
cuugcgauccgacucacca

SEQ ID NO: 728944 - RNA, 19 nt, Artificial Sequence
  Description of Artificial Sequence: Synthetic oligonucleotide
ugaggccaagugaauugag

SEQ ID NO: 728945 - RNA, 19 nt, Artificial Sequence
  Description of Artificial Sequence: Synthetic oligonucleotide
cauuguuuccguagaguuc

SEQ ID NO: 728946 - RNA, 19 nt, Artificial Sequence
  Description of Artificial Sequence: Synthetic oligonucleotide
accguuuauuacugaacug

SEQ ID NO: 728947 - RNA, 19 nt, Artificial Sequence
  Description of Artificial Sequence: Synthetic oligonucleotide
auagcuccccuucacuucu

SEQ ID NO: 728948 - RNA, 19 nt, Artificial Sequence
  Description of Artificial Sequence: Synthetic oligonucleotide
cauucagaccaggaguggg

SEQ ID NO: 728949 - RNA, 19 nt, Artificial Sequence
  Description of Artificial Sequence: Synthetic oligonucleotide
agagagccacucuagcucu

SEQ ID NO: 728950 - RNA, 19 nt, Artificial Sequence
  Description of Artificial Sequence: Synthetic oligonucleotide
agugaggcagcugaaguca

SEQ ID NO: 728951 - RNA, 19 nt, Artificial Sequence
  Description of Artificial Sequence: Synthetic oligonucleotide
acaccguuuauuacugaac

SEQ ID NO: 728952 - RNA, 19 nt, Artificial Sequence
  Description of Artificial Sequence: Synthetic oligonucleotide
cuagcucuagacuggagga

SEQ ID NO: 728953 - RNA, 19 nt, Artificial Sequence
  Description of Artificial Sequence: Synthetic oligonucleotide
augcgaccccaguuuaccc

SEQ ID NO: 728954 - RNA, 19 nt, Artificial Sequence
  Description of Artificial Sequence: Synthetic oligonucleotide
ugcgauccgacucaccaau

SEQ ID NO: 728955 - RNA, 19 nt, Artificial Sequence
  Description of Artificial Sequence: Synthetic oligonucleotide
ucggucuaggcccaacccu

SEQ ID NO: 728956 - RNA, 19 nt, Artificial Sequence
  Description of Artificial Sequence: Synthetic oligonucleotide
cuaacugcaaggggacucg

SEQ ID NO: 728957 - RNA, 19 nt, Artificial Sequence
  Description of Artificial Sequence: Synthetic oligonucleotide
uccgacucaccaauaccug

SEQ ID NO: 728958 - RNA, 19 nt, Artificial Sequence
  Description of Artificial Sequence: Synthetic oligonucleotide
ggauccaaggcucuaggug

SEQ ID NO: 728959 - RNA, 19 nt, Artificial Sequence
  Description of Artificial Sequence: Synthetic oligonucleotide
uccguagaguuccacgaaa

SEQ ID NO: 728960 - RNA, 19 nt, Artificial Sequence
  Description of Artificial Sequence: Synthetic oligonucleotide
uagaucacugaacgcccgc

SEQ ID NO: 728961 - RNA, 19 nt, Artificial Sequence
  Description of Artificial Sequence: Synthetic oligonucleotide
auggggaucaccuccccgu

SEQ ID NO: 728962 - RNA, 19 nt, Artificial Sequence
  Description of Artificial Sequence: Synthetic oligonucleotide
cugcuagccuccaagggac

SEQ ID NO: 728963 - RNA, 19 nt, Artificial Sequence
  Description of Artificial Sequence: Synthetic oligonucleotide
gcgagaugugaguaggugg

SEQ ID NO: 728964 - RNA, 19 nt, Artificial Sequence
  Description of Artificial Sequence: Synthetic oligonucleotide
aaguguagggugaggggag

SEQ ID NO: 728965 - RNA, 19 nt, Artificial Sequence
  Description of Artificial Sequence: Synthetic oligonucleotide
guugggcuggccucuagcc

SEQ ID NO: 728966 - RNA, 19 nt, Artificial Sequence
  Description of Artificial Sequence: Synthetic oligonucleotide
ugcgaccccaguuuacccc

SEQ ID NO: 728967 - RNA, 19 nt, Artificial Sequence
  Description of Artificial Sequence: Synthetic oligonucleotide
gacaccguuuauuacugaa

SEQ ID NO: 728968 - RNA, 19 nt, Artificial Sequence
  Description of Artificial Sequence: Synthetic oligonucleotide
gugaauugagaugugggga

SEQ ID NO: 728969 - RNA, 19 nt, Artificial Sequence
  Description of Artificial Sequence: Synthetic oligonucleotide
cacgaaagugucccagccg

SEQ ID NO: 728970 - RNA, 19 nt, Artificial Sequence
  Description of Artificial Sequence: Synthetic oligonucleotide
acaaucuugugaauuuuga

SEQ ID NO: 728971 - RNA, 19 nt, Artificial Sequence
  Description of Artificial Sequence: Synthetic oligonucleotide
cucgaauauguacagcaga

SEQ ID NO: 728972 - RNA, 19 nt, Artificial Sequence
  Description of Artificial Sequence: Synthetic oligonucleotide
ugcauuguuuccguagagu

SEQ ID NO: 728973 - RNA, 19 nt, Artificial Sequence
  Description of Artificial Sequence: Synthetic oligonucleotide
aauugagauguggggagaa

SEQ ID NO: 728974 - RNA, 19 nt, Artificial Sequence
  Description of Artificial Sequence: Synthetic oligonucleotide
ccguuuauuacugaacugc

SEQ ID NO: 728975 - RNA, 19 nt, Artificial Sequence
  Description of Artificial Sequence: Synthetic oligonucleotide
caaccagacaggucccucc

SEQ ID NO: 728976 - RNA, 19 nt, Artificial Sequence
  Description of Artificial Sequence: Synthetic oligonucleotide
ugcucuguauagcuccccu

SEQ ID NO: 728977 - RNA, 19 nt, Artificial Sequence
  Description of Artificial Sequence: Synthetic oligonucleotide
uccaacuugcgauccgacu

SEQ ID NO: 728978 - RNA, 19 nt, Artificial Sequence
  Description of Artificial Sequence: Synthetic oligonucleotide
cuugugaauuuugaggcca

SEQ ID NO: 728979 - RNA, 19 nt, Artificial Sequence
  Description of Artificial Sequence: Synthetic oligonucleotide
auccgacucaccaauaccu

SEQ ID NO: 728980 - RNA, 19 nt, Artificial Sequence
  Description of Artificial Sequence: Synthetic oligonucleotide
gccucuuuaucccaagcag

SEQ ID NO: 728981 - RNA, 19 nt, Artificial Sequence
  Description of Artificial Sequence: Synthetic oligonucleotide
aaggcaaucuagccucuuu

SEQ ID NO: 728982 - RNA, 19 nt, Artificial Sequence
  Description of Artificial Sequence: Synthetic oligonucleotide
cacgcgcacagcaagccag

SEQ ID NO: 728983 - RNA, 19 nt, Artificial Sequence
  Description of Artificial Sequence: Synthetic oligonucleotide
gugaguugcauguaguggu

SEQ ID NO: 728984 - RNA, 19 nt, Artificial Sequence
  Description of Artificial Sequence: Synthetic oligonucleotide
acacaucaaaccaaggcaa

SEQ ID NO: 728985 - RNA, 19 nt, Artificial Sequence
  Description of Artificial Sequence: Synthetic oligonucleotide
cuggauccaaggcucuagg

SEQ ID NO: 728986 - RNA, 19 nt, Artificial Sequence
  Description of Artificial Sequence: Synthetic oligonucleotide
gaagugaggcagcugaagu

SEQ ID NO: 728987 - RNA, 19 nt, Artificial Sequence
  Description of Artificial Sequence: Synthetic oligonucleotide
agggguaauaaggguuccc

SEQ ID NO: 728988 - RNA, 19 nt, Artificial Sequence
  Description of Artificial Sequence: Synthetic oligonucleotide
ggggacucggucuaggccc

SEQ ID NO: 728989 - RNA, 19 nt, Artificial Sequence
  Description of Artificial Sequence: Synthetic oligonucleotide
ucauucagguagguggcca

SEQ ID NO: 728990 - RNA, 19 nt, Artificial Sequence
  Description of Artificial Sequence: Synthetic oligonucleotide
cauaaauacagacacgcuu

SEQ ID NO: 728991 - RNA, 19 nt, Artificial Sequence
  Description of Artificial Sequence: Synthetic oligonucleotide
gagauguggggagaagaug

SEQ ID NO: 728992 - RNA, 19 nt, Artificial Sequence
  Description of Artificial Sequence: Synthetic oligonucleotide
ugugaauuuugaggccaag

SEQ ID NO: 728993 - RNA, 19 nt, Artificial Sequence
  Description of Artificial Sequence: Synthetic oligonucleotide
ucuaggcccaacccuucga

SEQ ID NO: 728994 - RNA, 19 nt, Artificial Sequence
  Description of Artificial Sequence: Synthetic oligonucleotide
ucccugggguuauaugaag

SEQ ID NO: 728995 - RNA, 19 nt, Artificial Sequence
  Description of Artificial Sequence: Synthetic oligonucleotide
aacuugcgauccgacucac

SEQ ID NO: 728996 - RNA, 19 nt, Artificial Sequence
  Description of Artificial Sequence: Synthetic oligonucleotide
ugaacgcccgccgguaccg

SEQ ID NO: 728997 - RNA, 19 nt, Artificial Sequence
  Description of Artificial Sequence: Synthetic oligonucleotide
acugaacgcccgccgguac

SEQ ID NO: 728998 - RNA, 19 nt, Artificial Sequence
  Description of Artificial Sequence: Synthetic oligonucleotide
cuugggcccaguugguccc

SEQ ID NO: 728999 - RNA, 19 nt, Artificial Sequence
  Description of Artificial Sequence: Synthetic oligonucleotide
uauuacugaacugcacuuu

SEQ ID NO: 729000 - RNA, 19 nt, Artificial Sequence
  Description of Artificial Sequence: Synthetic oligonucleotide
cagucauggucaugggagc

SEQ ID NO: 729001 - RNA, 19 nt, Artificial Sequence
  Description of Artificial Sequence: Synthetic oligonucleotide
ccaccgaaggagaaaaggc

SEQ ID NO: 729002 - RNA, 19 nt, Artificial Sequence
  Description of Artificial Sequence: Synthetic oligonucleotide
gcagcuaagccccuccucc

SEQ ID NO: 729003 - RNA, 19 nt, Artificial Sequence
  Description of Artificial Sequence: Synthetic oligonucleotide
agaugugaguaggugguca

SEQ ID NO: 729004 - RNA, 19 nt, Artificial Sequence
  Description of Artificial Sequence: Synthetic oligonucleotide
ugguaacugccucuuuauc

SEQ ID NO: 729005 - RNA, 19 nt, Artificial Sequence
  Description of Artificial Sequence: Synthetic oligonucleotide
uggauccaaggcucuaggu

SEQ ID NO: 729006 - RNA, 19 nt, Artificial Sequence
  Description of Artificial Sequence: Synthetic oligonucleotide
accgaaggagaaaaggcca

SEQ ID NO: 729007 - RNA, 19 nt, Artificial Sequence
  Description of Artificial Sequence: Synthetic oligonucleotide
gguaauaaggguuccccaa

SEQ ID NO: 729008 - RNA, 19 nt, Artificial Sequence
  Description of Artificial Sequence: Synthetic oligonucleotide
gaagugugguagguucuag

SEQ ID NO: 729009 - RNA, 19 nt, Artificial Sequence
  Description of Artificial Sequence: Synthetic oligonucleotide
ucucagcgcuugcuuuacg

SEQ ID NO: 729010 - RNA, 19 nt, Artificial Sequence
  Description of Artificial Sequence: Synthetic oligonucleotide
ggcucagggguaauaaggg

SEQ ID NO: 729011 - RNA, 19 nt, Artificial Sequence
  Description of Artificial Sequence: Synthetic oligonucleotide
cccaguuuaccccaucccg

SEQ ID NO: 729012 - RNA, 19 nt, Artificial Sequence
  Description of Artificial Sequence: Synthetic oligonucleotide
acgccugcuagccuccaag

SEQ ID NO: 729013 - RNA, 19 nt, Artificial Sequence
  Description of Artificial Sequence: Synthetic oligonucleotide
ugcaaggggacucggucua

SEQ ID NO: 729014 - RNA, 19 nt, Artificial Sequence
  Description of Artificial Sequence: Synthetic oligonucleotide
ccacucuagcucuagacug

SEQ ID NO: 729015 - RNA, 19 nt, Artificial Sequence
  Description of Artificial Sequence: Synthetic oligonucleotide
cacugucuugucacuuccg

SEQ ID NO: 729016 - RNA, 19 nt, Artificial Sequence
  Description of Artificial Sequence: Synthetic oligonucleotide
ucacugaacgcccgccggu

SEQ ID NO: 729017 - RNA, 19 nt, Artificial Sequence
  Description of Artificial Sequence: Synthetic oligonucleotide
ugaguugcauguagugguu

SEQ ID NO: 729018 - RNA, 19 nt, Artificial Sequence
  Description of Artificial Sequence: Synthetic oligonucleotide
uccauuuaccgcggggcug

SEQ ID NO: 729019 - RNA, 19 nt, Artificial Sequence
  Description of Artificial Sequence: Synthetic oligonucleotide
agcugagagagccacucua

SEQ ID NO: 729020 - RNA, 19 nt, Artificial Sequence
  Description of Artificial Sequence: Synthetic oligonucleotide
caaguguagggugagggga

SEQ ID NO: 729021 - RNA, 19 nt, Artificial Sequence
  Description of Artificial Sequence: Synthetic oligonucleotide
uuccgacugaagagagagc

SEQ ID NO: 729022 - RNA, 19 nt, Artificial Sequence
  Description of Artificial Sequence: Synthetic oligonucleotide
agcucuagacuggaggacu

SEQ ID NO: 729023 - RNA, 19 nt, Artificial Sequence
  Description of Artificial Sequence: Synthetic oligonucleotide
aucuagccucuuucugggg

SEQ ID NO: 729024 - RNA, 19 nt, Artificial Sequence
  Description of Artificial Sequence: Synthetic oligonucleotide
uaucuugggcccaguuggu

SEQ ID NO: 729025 - RNA, 19 nt, Artificial Sequence
  Description of Artificial Sequence: Synthetic oligonucleotide
ggauguuagaucacugaac

SEQ ID NO: 729026 - RNA, 19 nt, Artificial Sequence
  Description of Artificial Sequence: Synthetic oligonucleotide
gcaaucuagccucuuucug

SEQ ID NO: 729027 - RNA, 19 nt, Artificial Sequence
  Description of Artificial Sequence: Synthetic oligonucleotide
cagucugaauuucuaauua

SEQ ID NO: 729028 - RNA, 19 nt, Artificial Sequence
  Description of Artificial Sequence: Synthetic oligonucleotide
cuuucccacgccugcuagc

SEQ ID NO: 729029 - RNA, 19 nt, Artificial Sequence
  Description of Artificial Sequence: Synthetic oligonucleotide
acaaugcgaccccaguuua

SEQ ID NO: 729030 - RNA, 19 nt, Artificial Sequence
  Description of Artificial Sequence: Synthetic oligonucleotide
ugggaggcgagaugugagu

SEQ ID NO: 729031 - RNA, 19 nt, Artificial Sequence
  Description of Artificial Sequence: Synthetic oligonucleotide
uaccgcagcucaaacucau

SEQ ID NO: 729032 - RNA, 19 nt, Artificial Sequence
  Description of Artificial Sequence: Synthetic oligonucleotide
aggacuuucugcagcuaag

SEQ ID NO: 729033 - RNA, 19 nt, Artificial Sequence
  Description of Artificial Sequence: Synthetic oligonucleotide
auuuaccgcggggcugucc

SEQ ID NO: 729034 - RNA, 19 nt, Artificial Sequence
  Description of Artificial Sequence: Synthetic oligonucleotide
ugcacgcgcacagcaagcc

SEQ ID NO: 729035 - RNA, 19 nt, Artificial Sequence
  Description of Artificial Sequence: Synthetic oligonucleotide
cuuugguaugcagucccug

SEQ ID NO: 729036 - RNA, 19 nt, Artificial Sequence
  Description of Artificial Sequence: Synthetic oligonucleotide
ucaucgccggccucucuca

SEQ ID NO: 729037 - RNA, 19 nt, Artificial Sequence
  Description of Artificial Sequence: Synthetic oligonucleotide
ucccugcagaaaagcauuc

SEQ ID NO: 729038 - RNA, 19 nt, Artificial Sequence
  Description of Artificial Sequence: Synthetic oligonucleotide
gggguaauaaggguucccc

SEQ ID NO: 729039 - RNA, 19 nt, Artificial Sequence
  Description of Artificial Sequence: Synthetic oligonucleotide
uugcaguccuccucaccug

SEQ ID NO: 729040 - RNA, 19 nt, Artificial Sequence
  Description of Artificial Sequence: Synthetic oligonucleotide
gaauugagauguggggaga

SEQ ID NO: 729041 - RNA, 19 nt, Artificial Sequence
  Description of Artificial Sequence: Synthetic oligonucleotide
gacaggccaaggguggagc

SEQ ID NO: 729042 - RNA, 19 nt, Artificial Sequence
  Description of Artificial Sequence: Synthetic oligonucleotide
gggauguuagaucacugaa

SEQ ID NO: 729043 - RNA, 19 nt, Artificial Sequence
  Description of Artificial Sequence: Synthetic oligonucleotide
gaggccaagugaauugaga

SEQ ID NO: 729044 - RNA, 19 nt, Artificial Sequence
  Description of Artificial Sequence: Synthetic oligonucleotide
aacucaucgccggccucuc

SEQ ID NO: 729045 - RNA, 19 nt, Artificial Sequence
  Description of Artificial Sequence: Synthetic oligonucleotide
caccguuuauuacugaacu

SEQ ID NO: 729046 - RNA, 19 nt, Artificial Sequence
  Description of Artificial Sequence: Synthetic oligonucleotide
caaugcgaccccaguuuac

SEQ ID NO: 729047 - RNA, 19 nt, Artificial Sequence
  Description of Artificial Sequence: Synthetic oligonucleotide
auaugaagcugggauguua

SEQ ID NO: 729048 - RNA, 19 nt, Artificial Sequence
  Description of Artificial Sequence: Synthetic oligonucleotide
ccaagggaccgauuugggg

SEQ ID NO: 729049 - RNA, 19 nt, Artificial Sequence
  Description of Artificial Sequence: Synthetic oligonucleotide
ggaggcgagaugugaguag

SEQ ID NO: 729050 - RNA, 19 nt, Artificial Sequence
  Description of Artificial Sequence: Synthetic oligonucleotide
cauuaacagcucuggggca

SEQ ID NO: 729051 - RNA, 19 nt, Artificial Sequence
  Description of Artificial Sequence: Synthetic oligonucleotide
ucacagagucgacaccguu

SEQ ID NO: 729052 - RNA, 19 nt, Artificial Sequence
  Description of Artificial Sequence: Synthetic oligonucleotide
guagguggucacugucuug

SEQ ID NO: 729053 - RNA, 19 nt, Artificial Sequence
  Description of Artificial Sequence: Synthetic oligonucleotide
caacuugcgauccgacuca

SEQ ID NO: 729054 - RNA, 19 nt, Artificial Sequence
  Description of Artificial Sequence: Synthetic oligonucleotide
cucaucgccggccucucuc

SEQ ID NO: 729055 - RNA, 19 nt, Artificial Sequence
  Description of Artificial Sequence: Synthetic oligonucleotide
cugaacgcccgccgguacc

SEQ ID NO: 729056 - RNA, 19 nt, Artificial Sequence
  Description of Artificial Sequence: Synthetic oligonucleotide
agacaggucccuccucccu

SEQ ID NO: 729057 - RNA, 19 nt, Artificial Sequence
  Description of Artificial Sequence: Synthetic oligonucleotide
cagacaggucccuccuccc

SEQ ID NO: 729058 - RNA, 19 nt, Artificial Sequence
  Description of Artificial Sequence: Synthetic oligonucleotide
auccaacuugcgauccgac

SEQ ID NO: 729059 - RNA, 19 nt, Artificial Sequence
  Description of Artificial Sequence: Synthetic oligonucleotide
ugcuagccuccaagggacc

SEQ ID NO: 729060 - RNA, 19 nt, Artificial Sequence
  Description of Artificial Sequence: Synthetic oligonucleotide
uagcucuagacuggaggac

SEQ ID NO: 729061 - RNA, 19 nt, Artificial Sequence
  Description of Artificial Sequence: Synthetic oligonucleotide
uugcgauccgacucaccaa

SEQ ID NO: 729062 - RNA, 19 nt, Artificial Sequence
  Description of Artificial Sequence: Synthetic oligonucleotide
ugucuacgcuuuccacaca

SEQ ID NO: 729063 - RNA, 19 nt, Artificial Sequence
  Description of Artificial Sequence: Synthetic oligonucleotide
ggaagugaggcagcugaag

SEQ ID NO: 729064 - RNA, 19 nt, Artificial Sequence
  Description of Artificial Sequence: Synthetic oligonucleotide
gugugguagguucuagaaa

SEQ ID NO: 729065 - RNA, 19 nt, Artificial Sequence
  Description of Artificial Sequence: Synthetic oligonucleotide
ccuaucuugggcccaguug

SEQ ID NO: 729066 - RNA, 19 nt, Artificial Sequence
  Description of Artificial Sequence: Synthetic oligonucleotide
uguuuccguagaguuccac

SEQ ID NO: 729067 - RNA, 19 nt, Artificial Sequence
  Description of Artificial Sequence: Synthetic oligonucleotide
agcgcuugcuuuacggcug

SEQ ID NO: 729068 - RNA, 19 nt, Artificial Sequence
  Description of Artificial Sequence: Synthetic oligonucleotide
cugaucuugcaggaaguga

SEQ ID NO: 729069 - RNA, 19 nt, Artificial Sequence
  Description of Artificial Sequence: Synthetic oligonucleotide
uucugaggccacacacauc

SEQ ID NO: 729070 - RNA, 19 nt, Artificial Sequence
  Description of Artificial Sequence: Synthetic oligonucleotide
gcuccauuuaccgcggggc

SEQ ID NO: 729071 - RNA, 19 nt, Artificial Sequence
  Description of Artificial Sequence: Synthetic oligonucleotide
ccguagaguuccacgaaag

SEQ ID NO: 729072 - RNA, 19 nt, Artificial Sequence
  Description of Artificial Sequence: Synthetic oligonucleotide
ggcuccauuuaccgcgggg

SEQ ID NO: 729073 - RNA, 19 nt, Artificial Sequence
  Description of Artificial Sequence: Synthetic oligonucleotide
ggagaacauucagaccagg

SEQ ID NO: 729074 - RNA, 19 nt, Artificial Sequence
  Description of Artificial Sequence: Synthetic oligonucleotide
acuugcgauccgacucacc

SEQ ID NO: 729075 - RNA, 19 nt, Artificial Sequence
  Description of Artificial Sequence: Synthetic oligonucleotide
gugggcgugaguugcaugu

SEQ ID NO: 729076 - RNA, 19 nt, Artificial Sequence
  Description of Artificial Sequence: Synthetic oligonucleotide
gauagggugggaggcgaga

SEQ ID NO: 729077 - RNA, 19 nt, Artificial Sequence
  Description of Artificial Sequence: Synthetic oligonucleotide
caaggggacucggucuagg

SEQ ID NO: 729078 - RNA, 19 nt, Artificial Sequence
  Description of Artificial Sequence: Synthetic oligonucleotide
uuguuuccguagaguucca

SEQ ID NO: 729079 - RNA, 19 nt, Artificial Sequence
  Description of Artificial Sequence: Synthetic oligonucleotide
gcugcauuguuuccguaga

SEQ ID NO: 729080 - RNA, 19 nt, Artificial Sequence
  Description of Artificial Sequence: Synthetic oligonucleotide
aguuuaccccaucccggaa

SEQ ID NO: 729081 - RNA, 19 nt, Artificial Sequence
  Description of Artificial Sequence: Synthetic oligonucleotide
gcgugaguugcauguagug

SEQ ID NO: 729082 - RNA, 19 nt, Artificial Sequence
  Description of Artificial Sequence: Synthetic oligonucleotide
aucccugcagaaaagcauu

SEQ ID NO: 729083 - RNA, 19 nt, Artificial Sequence
  Description of Artificial Sequence: Synthetic oligonucleotide
cuccaccgaaggagaaaag

SEQ ID NO: 729084 - RNA, 19 nt, Artificial Sequence
  Description of Artificial Sequence: Synthetic oligonucleotide
agccccuccuccugaguug

SEQ ID NO: 729085 - RNA, 19 nt, Artificial Sequence
  Description of Artificial Sequence: Synthetic oligonucleotide
ccacgaaagugucccagcc

SEQ ID NO: 729086 - RNA, 19 nt, Artificial Sequence
  Description of Artificial Sequence: Synthetic oligonucleotide
uggcuccauuuaccgcggg

SEQ ID NO: 729087 - RNA, 19 nt, Artificial Sequence
  Description of Artificial Sequence: Synthetic oligonucleotide
ggacaggugccucucaaaa

SEQ ID NO: 729088 - RNA, 19 nt, Artificial Sequence
  Description of Artificial Sequence: Synthetic oligonucleotide
ccgacucaccaauaccugc

SEQ ID NO: 729089 - RNA, 19 nt, Artificial Sequence
  Description of Artificial Sequence: Synthetic oligonucleotide
cgugaguugcauguagugg

SEQ ID NO: 729090 - RNA, 19 nt, Artificial Sequence
  Description of Artificial Sequence: Synthetic oligonucleotide
uauaugaagcugggauguu

SEQ ID NO: 729091 - RNA, 19 nt, Artificial Sequence
  Description of Artificial Sequence: Synthetic oligonucleotide
guauagcuccccuucacuu

SEQ ID NO: 729092 - RNA, 19 nt, Artificial Sequence
  Description of Artificial Sequence: Synthetic oligonucleotide
gccugagguagggaaaucc

SEQ ID NO: 729093 - RNA, 19 nt, Artificial Sequence
  Description of Artificial Sequence: Synthetic oligonucleotide
gaguugggcuggccucuag

SEQ ID NO: 729094 - RNA, 19 nt, Artificial Sequence
  Description of Artificial Sequence: Synthetic oligonucleotide
gggcgugaguugcauguag

SEQ ID NO: 729095 - RNA, 19 nt, Artificial Sequence
  Description of Artificial Sequence: Synthetic oligonucleotide
gugaauuuugaggccaagu

SEQ ID NO: 729096 - RNA, 19 nt, Artificial Sequence
  Description of Artificial Sequence: Synthetic oligonucleotide
cagggguaauaaggguucc

SEQ ID NO: 729097 - RNA, 19 nt, Artificial Sequence
  Description of Artificial Sequence: Synthetic oligonucleotide
agaagugugguagguucua

SEQ ID NO: 729098 - RNA, 19 nt, Artificial Sequence
  Description of Artificial Sequence: Synthetic oligonucleotide
gcuaacugcaaggggacuc

SEQ ID NO: 729099 - RNA, 19 nt, Artificial Sequence
  Description of Artificial Sequence: Synthetic oligonucleotide
uaggcccaacccuucgaua

SEQ ID NO: 729100 - RNA, 19 nt, Artificial Sequence
  Description of Artificial Sequence: Synthetic oligonucleotide
acgcgcacagcaagccagc

SEQ ID NO: 729101 - RNA, 19 nt, Artificial Sequence
  Description of Artificial Sequence: Synthetic oligonucleotide
uuacggcugccauggggau

SEQ ID NO: 729102 - RNA, 19 nt, Artificial Sequence
  Description of Artificial Sequence: Synthetic oligonucleotide
cuagacuggaggacuuucu

SEQ ID NO: 729103 - RNA, 19 nt, Artificial Sequence
  Description of Artificial Sequence: Synthetic oligonucleotide
cccaguuggucccucaguc

SEQ ID NO: 729104 - RNA, 19 nt, Artificial Sequence
  Description of Artificial Sequence: Synthetic oligonucleotide
caggaaccagcgguugaag

SEQ ID NO: 729105 - RNA, 19 nt, Artificial Sequence
  Description of Artificial Sequence: Synthetic oligonucleotide
gcuagccuccaagggaccg

SEQ ID NO: 729106 - RNA, 19 nt, Artificial Sequence
  Description of Artificial Sequence: Synthetic oligonucleotide
gguuccccaaccagacagg

SEQ ID NO: 729107 - RNA, 19 nt, Artificial Sequence
  Description of Artificial Sequence: Synthetic oligonucleotide
gggaugagacaggccaagg

SEQ ID NO: 729108 - RNA, 19 nt, Artificial Sequence
  Description of Artificial Sequence: Synthetic oligonucleotide
cuauuucaaagagcuggaa

SEQ ID NO: 729109 - RNA, 19 nt, Artificial Sequence
  Description of Artificial Sequence: Synthetic oligonucleotide
gcauuguuuccguagaguu

SEQ ID NO: 729110 - RNA, 19 nt, Artificial Sequence
  Description of Artificial Sequence: Synthetic oligonucleotide
ccccgugcauccaaacugc

SEQ ID NO: 729111 - RNA, 19 nt, Artificial Sequence
  Description of Artificial Sequence: Synthetic oligonucleotide
aguuggucccucagucaug

SEQ ID NO: 729112 - RNA, 19 nt, Artificial Sequence
  Description of Artificial Sequence: Synthetic oligonucleotide
cacaaugcgaccccaguuu

SEQ ID NO: 729113 - RNA, 19 nt, Artificial Sequence
  Description of Artificial Sequence: Synthetic oligonucleotide
uaccgcggggcuguccgcc

SEQ ID NO: 729114 - RNA, 19 nt, Artificial Sequence
  Description of Artificial Sequence: Synthetic oligonucleotide
uagcuccccuucacuucug

SEQ ID NO: 729115 - RNA, 19 nt, Artificial Sequence
  Description of Artificial Sequence: Synthetic oligonucleotide
ccgacugaagagagagccc

SEQ ID NO: 729116 - RNA, 19 nt, Artificial Sequence
  Description of Artificial Sequence: Synthetic oligonucleotide
ggaucccugcagaaaagca

SEQ ID NO: 729117 - RNA, 19 nt, Artificial Sequence
  Description of Artificial Sequence: Synthetic oligonucleotide
uuaccgcggggcuguccgc

SEQ ID NO: 729118 - RNA, 19 nt, Artificial Sequence
  Description of Artificial Sequence: Synthetic oligonucleotide
ggcaaucuagccucuuucu

SEQ ID NO: 729119 - RNA, 19 nt, Artificial Sequence
  Description of Artificial Sequence: Synthetic oligonucleotide
agcuaacugcaaggggacu

SEQ ID NO: 729120 - RNA, 19 nt, Artificial Sequence
  Description of Artificial Sequence: Synthetic oligonucleotide
cgcagcucaaacucaucgc

SEQ ID NO: 729121 - RNA, 19 nt, Artificial Sequence
  Description of Artificial Sequence: Synthetic oligonucleotide
cagcuccucacacauaaau

SEQ ID NO: 729122 - RNA, 19 nt, Artificial Sequence
  Description of Artificial Sequence: Synthetic oligonucleotide
cuagguggucauucaggua

SEQ ID NO: 729123 - RNA, 19 nt, Artificial Sequence
  Description of Artificial Sequence: Synthetic oligonucleotide
ccuguucaaagcuuuggua

SEQ ID NO: 729124 - RNA, 19 nt, Artificial Sequence
  Description of Artificial Sequence: Synthetic oligonucleotide
cacagcaagccagcagcuc

SEQ ID NO: 729125 - RNA, 19 nt, Artificial Sequence
  Description of Artificial Sequence: Synthetic oligonucleotide
agcucuccacgugcacgcg

SEQ ID NO: 729126 - RNA, 19 nt, Artificial Sequence
  Description of Artificial Sequence: Synthetic oligonucleotide
auccaaggcucuagguggu

SEQ ID NO: 729127 - RNA, 19 nt, Artificial Sequence
  Description of Artificial Sequence: Synthetic oligonucleotide
ccauccaacuugcgauccg

SEQ ID NO: 729128 - RNA, 19 nt, Artificial Sequence
  Description of Artificial Sequence: Synthetic oligonucleotide
guaccgcagcucaaacuca

SEQ ID NO: 729129 - RNA, 19 nt, Artificial Sequence
  Description of Artificial Sequence: Synthetic oligonucleotide
gacucaccaauaccugcau

SEQ ID NO: 729130 - RNA, 19 nt, Artificial Sequence
  Description of Artificial Sequence: Synthetic oligonucleotide
caucgccggccucucucag

SEQ ID NO: 729131 - RNA, 19 nt, Artificial Sequence
  Description of Artificial Sequence: Synthetic oligonucleotide
gguaugcagucccuggggu

SEQ ID NO: 729132 - RNA, 19 nt, Artificial Sequence
  Description of Artificial Sequence: Synthetic oligonucleotide
cugcaaggggacucggucu

SEQ ID NO: 729133 - RNA, 19 nt, Artificial Sequence
  Description of Artificial Sequence: Synthetic oligonucleotide
ggugggcgugaguugcaug

SEQ ID NO: 729134 - RNA, 19 nt, Artificial Sequence
  Description of Artificial Sequence: Synthetic oligonucleotide
caguuggucccucagucau

SEQ ID NO: 729135 - RNA, 19 nt, Artificial Sequence
  Description of Artificial Sequence: Synthetic oligonucleotide
gccacucuagcucuagacu

SEQ ID NO: 729136 - RNA, 19 nt, Artificial Sequence
  Description of Artificial Sequence: Synthetic oligonucleotide
gaccccaguuuaccccauc

SEQ ID NO: 729137 - RNA, 19 nt, Artificial Sequence
  Description of Artificial Sequence: Synthetic oligonucleotide
ggcucuagguggucauuca

SEQ ID NO: 729138 - RNA, 19 nt, Artificial Sequence
  Description of Artificial Sequence: Synthetic oligonucleotide
ggccauccaacuugcgauc

SEQ ID NO: 729139 - RNA, 19 nt, Artificial Sequence
  Description of Artificial Sequence: Synthetic oligonucleotide
gucccugggguuauaugaa

SEQ ID NO: 729140 - RNA, 19 nt, Artificial Sequence
  Description of Artificial Sequence: Synthetic oligonucleotide
cgugcacgcgcacagcaag

SEQ ID NO: 729141 - RNA, 19 nt, Artificial Sequence
  Description of Artificial Sequence: Synthetic oligonucleotide
gggcaccuaucuugggccc

SEQ ID NO: 729142 - RNA, 19 nt, Artificial Sequence
  Description of Artificial Sequence: Synthetic oligonucleotide
cgauccgacucaccaauac

SEQ ID NO: 729143 - RNA, 19 nt, Artificial Sequence
  Description of Artificial Sequence: Synthetic oligonucleotide
ggcccaguuggucccucag

SEQ ID NO: 729144 - RNA, 19 nt, Artificial Sequence
  Description of Artificial Sequence: Synthetic oligonucleotide
ggggaucaccuccccgugc

SEQ ID NO: 729145 - RNA, 19 nt, Artificial Sequence
  Description of Artificial Sequence: Synthetic oligonucleotide
cccacgggaugagacaggc

SEQ ID NO: 729146 - RNA, 19 nt, Artificial Sequence
  Description of Artificial Sequence: Synthetic oligonucleotide
acucaucgccggccucucu

SEQ ID NO: 729147 - RNA, 19 nt, Artificial Sequence
  Description of Artificial Sequence: Synthetic oligonucleotide
ggggaucccugcagaaaag

SEQ ID NO: 729148 - RNA, 19 nt, Artificial Sequence
  Description of Artificial Sequence: Synthetic oligonucleotide
cucuagccagaagccucag

SEQ ID NO: 729149 - RNA, 19 nt, Artificial Sequence
  Description of Artificial Sequence: Synthetic oligonucleotide
uccaaggcucuaggugguc

SEQ ID NO: 729150 - RNA, 19 nt, Artificial Sequence
  Description of Artificial Sequence: Synthetic oligonucleotide
gacucggucuaggcccaac

SEQ ID NO: 729151 - RNA, 19 nt, Artificial Sequence
  Description of Artificial Sequence: Synthetic oligonucleotide
ccgugcauccaaacugcug

SEQ ID NO: 729152 - RNA, 19 nt, Artificial Sequence
  Description of Artificial Sequence: Synthetic oligonucleotide
gcgaccccaguuuacccca

SEQ ID NO: 729153 - RNA, 19 nt, Artificial Sequence
  Description of Artificial Sequence: Synthetic oligonucleotide
ccagcgguugaagcgcucc

SEQ ID NO: 729154 - RNA, 19 nt, Artificial Sequence
  Description of Artificial Sequence: Synthetic oligonucleotide
ggucuaggguggugcuaag

SEQ ID NO: 729155 - RNA, 19 nt, Artificial Sequence
  Description of Artificial Sequence: Synthetic oligonucleotide
cucucacagaaguguggua

SEQ ID NO: 729156 - RNA, 19 nt, Artificial Sequence
  Description of Artificial Sequence: Synthetic oligonucleotide
caccagccacagucaugcc

SEQ ID NO: 729157 - RNA, 19 nt, Artificial Sequence
  Description of Artificial Sequence: Synthetic oligonucleotide
cuccauuuaccgcggggcu

SEQ ID NO: 729158 - RNA, 19 nt, Artificial Sequence
  Description of Artificial Sequence: Synthetic oligonucleotide
cauucagguagguggccau

SEQ ID NO: 729159 - RNA, 19 nt, Artificial Sequence
  Description of Artificial Sequence: Synthetic oligonucleotide
acccuuucccacgccugcu

SEQ ID NO: 729160 - RNA, 19 nt, Artificial Sequence
  Description of Artificial Sequence: Synthetic oligonucleotide
guaugcagucccugggguu

SEQ ID NO: 729161 - RNA, 19 nt, Artificial Sequence
  Description of Artificial Sequence: Synthetic oligonucleotide
gcuuuacggcugccauggg

SEQ ID NO: 729162 - RNA, 19 nt, Artificial Sequence
  Description of Artificial Sequence: Synthetic oligonucleotide
ccugggguuauaugaagcu

SEQ ID NO: 729163 - RNA, 19 nt, Artificial Sequence
  Description of Artificial Sequence: Synthetic oligonucleotide
aggcgagaugugaguaggu

SEQ ID NO: 729164 - RNA, 19 nt, Artificial Sequence
  Description of Artificial Sequence: Synthetic oligonucleotide
cuaggcccaacccuucgau

SEQ ID NO: 729165 - RNA, 19 nt, Artificial Sequence
  Description of Artificial Sequence: Synthetic oligonucleotide
cgacucaccaauaccugca

SEQ ID NO: 729166 - RNA, 19 nt, Artificial Sequence
  Description of Artificial Sequence: Synthetic oligonucleotide
ggauagggugggaggcgag

SEQ ID NO: 729167 - RNA, 19 nt, Artificial Sequence
  Description of Artificial Sequence: Synthetic oligonucleotide
cgaaagugucccagccgcc

SEQ ID NO: 729168 - RNA, 19 nt, Artificial Sequence
  Description of Artificial Sequence: Synthetic oligonucleotide
caucaggcugucagucucu

SEQ ID NO: 729169 - RNA, 19 nt, Artificial Sequence
  Description of Artificial Sequence: Synthetic oligonucleotide
ugaguugggcuggccucua

SEQ ID NO: 729170 - RNA, 19 nt, Artificial Sequence
  Description of Artificial Sequence: Synthetic oligonucleotide
gaagcgcuccuggccuuuc

SEQ ID NO: 729171 - RNA, 19 nt, Artificial Sequence
  Description of Artificial Sequence: Synthetic oligonucleotide
gcaccuaucuugggcccag

SEQ ID NO: 729172 - RNA, 19 nt, Artificial Sequence
  Description of Artificial Sequence: Synthetic oligonucleotide
cgagaugugaguagguggu

SEQ ID NO: 729173 - RNA, 19 nt, Artificial Sequence
  Description of Artificial Sequence: Synthetic oligonucleotide
gcugggauguuagaucacu

SEQ ID NO: 729174 - RNA, 19 nt, Artificial Sequence
  Description of Artificial Sequence: Synthetic oligonucleotide
cgccugcuagccuccaagg

SEQ ID NO: 729175 - RNA, 19 nt, Artificial Sequence
  Description of Artificial Sequence: Synthetic oligonucleotide
gggauagggugggaggcga

SEQ ID NO: 729176 - RNA, 19 nt, Artificial Sequence
  Description of Artificial Sequence: Synthetic oligonucleotide
cuccccgugcauccaaacu

SEQ ID NO: 729177 - RNA, 19 nt, Artificial Sequence
  Description of Artificial Sequence: Synthetic oligonucleotide
gggcuguccgccaggugcc

SEQ ID NO: 729178 - RNA, 19 nt, Artificial Sequence
  Description of Artificial Sequence: Synthetic oligonucleotide
gcccgucaggaaccagcgg

SEQ ID NO: 729179 - RNA, 19 nt, Artificial Sequence
  Description of Artificial Sequence: Synthetic oligonucleotide
ggggacaaucuugugaauu

SEQ ID NO: 729180 - RNA, 19 nt, Artificial Sequence
  Description of Artificial Sequence: Synthetic oligonucleotide
uugggcccaguuggucccu

SEQ ID NO: 729181 - RNA, 19 nt, Artificial Sequence
  Description of Artificial Sequence: Synthetic oligonucleotide
acgugcacgcgcacagcaa

SEQ ID NO: 729182 - RNA, 19 nt, Artificial Sequence
  Description of Artificial Sequence: Synthetic oligonucleotide
gcaaggggacucggucuag

SEQ ID NO: 729183 - RNA, 19 nt, Artificial Sequence
  Description of Artificial Sequence: Synthetic oligonucleotide
ccgguaccgcagcucaaac

SEQ ID NO: 729184 - RNA, 19 nt, Artificial Sequence
  Description of Artificial Sequence: Synthetic oligonucleotide
ccuccccgugcauccaaac

SEQ ID NO: 729185 - RNA, 19 nt, Artificial Sequence
  Description of Artificial Sequence: Synthetic oligonucleotide
gggaggcgagaugugagua

SEQ ID NO: 729186 - RNA, 19 nt, Artificial Sequence
  Description of Artificial Sequence: Synthetic oligonucleotide
ccaaccagacaggucccuc

SEQ ID NO: 729187 - RNA, 19 nt, Artificial Sequence
  Description of Artificial Sequence: Synthetic oligonucleotide
cagugggaugggaaaugau

SEQ ID NO: 729188 - RNA, 19 nt, Artificial Sequence
  Description of Artificial Sequence: Synthetic oligonucleotide
caggcugaucuugcaggaa

SEQ ID NO: 729189 - RNA, 19 nt, Artificial Sequence
  Description of Artificial Sequence: Synthetic oligonucleotide
cuggccuuuccggcucuca

SEQ ID NO: 729190 - RNA, 19 nt, Artificial Sequence
  Description of Artificial Sequence: Synthetic oligonucleotide
ggcaccuaucuugggccca

SEQ ID NO: 729191 - RNA, 19 nt, Artificial Sequence
  Description of Artificial Sequence: Synthetic oligonucleotide
cacugaacgcccgccggua

SEQ ID NO: 729192 - RNA, 19 nt, Artificial Sequence
  Description of Artificial Sequence: Synthetic oligonucleotide
ggcgugaguugcauguagu

SEQ ID NO: 729193 - RNA, 19 nt, Artificial Sequence
  Description of Artificial Sequence: Synthetic oligonucleotide
aggcuccaccgaaggagaa

SEQ ID NO: 729194 - RNA, 19 nt, Artificial Sequence
  Description of Artificial Sequence: Synthetic oligonucleotide
cauuuaccgcggggcuguc

SEQ ID NO: 729195 - RNA, 19 nt, Artificial Sequence
  Description of Artificial Sequence: Synthetic oligonucleotide
cugcagcuaagccccuccu

SEQ ID NO: 729196 - RNA, 19 nt, Artificial Sequence
  Description of Artificial Sequence: Synthetic oligonucleotide
accuccccgugcauccaaa

SEQ ID NO: 729197 - RNA, 19 nt, Artificial Sequence
  Description of Artificial Sequence: Synthetic oligonucleotide
caccuccccgugcauccaa

SEQ ID NO: 729198 - RNA, 19 nt, Artificial Sequence
  Description of Artificial Sequence: Synthetic oligonucleotide
ggggccucucaauggcucu

SEQ ID NO: 729199 - RNA, 19 nt, Artificial Sequence
  Description of Artificial Sequence: Synthetic oligonucleotide
ccgccgguaccgcagcuca

SEQ ID NO: 729200 - RNA, 19 nt, Artificial Sequence
  Description of Artificial Sequence: Synthetic oligonucleotide
gcucuguauagcuccccuu

SEQ ID NO: 729201 - RNA, 19 nt, Artificial Sequence
  Description of Artificial Sequence: Synthetic oligonucleotide
cacgccugcuagccuccaa

SEQ ID NO: 729202 - RNA, 19 nt, Artificial Sequence
  Description of Artificial Sequence: Synthetic oligonucleotide
ccauuuaccgcggggcugu

SEQ ID NO: 729203 - RNA, 19 nt, Artificial Sequence
  Description of Artificial Sequence: Synthetic oligonucleotide
gcuuugguaugcagucccu

SEQ ID NO: 729204 - RNA, 19 nt, Artificial Sequence
  Description of Artificial Sequence: Synthetic oligonucleotide
ccacgugcacgcgcacagc

SEQ ID NO: 729205 - RNA, 19 nt, Artificial Sequence
  Description of Artificial Sequence: Synthetic oligonucleotide
ggaggacuuucugcagcua

SEQ ID NO: 729206 - RNA, 19 nt, Artificial Sequence
  Description of Artificial Sequence: Synthetic oligonucleotide
ccacaaugcgaccccaguu

SEQ ID NO: 729207 - RNA, 19 nt, Artificial Sequence
  Description of Artificial Sequence: Synthetic oligonucleotide
cgacaccguuuauuacuga

SEQ ID NO: 729208 - RNA, 19 nt, Artificial Sequence
  Description of Artificial Sequence: Synthetic oligonucleotide
caaggcaaucuagccucuu

SEQ ID NO: 729209 - RNA, 19 nt, Artificial Sequence
  Description of Artificial Sequence: Synthetic oligonucleotide
cagccgccguuguccugga

SEQ ID NO: 729210 - RNA, 19 nt, Artificial Sequence
  Description of Artificial Sequence: Synthetic oligonucleotide
cccgccgguaccgcagcuc

SEQ ID NO: 729211 - RNA, 19 nt, Artificial Sequence
  Description of Artificial Sequence: Synthetic oligonucleotide
gcgauccgacucaccaaua

SEQ ID NO: 729212 - RNA, 19 nt, Artificial Sequence
  Description of Artificial Sequence: Synthetic oligonucleotide
guccgccaggugccaggau

SEQ ID NO: 729213 - RNA, 19 nt, Artificial Sequence
  Description of Artificial Sequence: Synthetic oligonucleotide
ggacucggucuaggcccaa

SEQ ID NO: 729214 - RNA, 19 nt, Artificial Sequence
  Description of Artificial Sequence: Synthetic oligonucleotide
cccaaccagacaggucccu

SEQ ID NO: 729215 - RNA, 19 nt, Artificial Sequence
  Description of Artificial Sequence: Synthetic oligonucleotide
gcccgccgguaccgcagcu

SEQ ID NO: 729216 - RNA, 19 nt, Artificial Sequence
  Description of Artificial Sequence: Synthetic oligonucleotide
cgaccccaguuuaccccau

SEQ ID NO: 729217 - RNA, 19 nt, Artificial Sequence
  Description of Artificial Sequence: Synthetic oligonucleotide
uuaaauacggaacacaacg

SEQ ID NO: 729218 - RNA, 19 nt, Artificial Sequence
  Description of Artificial Sequence: Synthetic oligonucleotide
uuauuuaguuuacagaagg

SEQ ID NO: 729219 - RNA, 19 nt, Artificial Sequence
  Description of Artificial Sequence: Synthetic oligonucleotide
aaaaguagaaguuccgugg

SEQ ID NO: 729220 - RNA, 19 nt, Artificial Sequence
  Description of Artificial Sequence: Synthetic oligonucleotide
aauauuuucguagaucuac

SEQ ID NO: 729221 - RNA, 19 nt, Artificial Sequence
  Description of Artificial Sequence: Synthetic oligonucleotide
uuuagaugaaauuagcuca

SEQ ID NO: 729222 - RNA, 19 nt, Artificial Sequence
  Description of Artificial Sequence: Synthetic oligonucleotide
uuuaauucugaucaguaug

SEQ ID NO: 729223 - RNA, 19 nt, Artificial Sequence
  Description of Artificial Sequence: Synthetic oligonucleotide
uuuaauguugccgagagcc

SEQ ID NO: 729224 - RNA, 19 nt, Artificial Sequence
  Description of Artificial Sequence: Synthetic oligonucleotide
aaccugauugcauuuaaac

SEQ ID NO: 729225 - RNA, 19 nt, Artificial Sequence
  Description of Artificial Sequence: Synthetic oligonucleotide
agaucuacugcauauaaag

SEQ ID NO: 729226 - RNA, 19 nt, Artificial Sequence
  Description of Artificial Sequence: Synthetic oligonucleotide
auuuucguagaucuacugc

SEQ ID NO: 729227 - RNA, 19 nt, Artificial Sequence
  Description of Artificial Sequence: Synthetic oligonucleotide
uguggcuacacaucgagcg

SEQ ID NO: 729228 - RNA, 19 nt, Artificial Sequence
  Description of Artificial Sequence: Synthetic oligonucleotide
uuuaucaacgcauuaacaa

SEQ ID NO: 729229 - RNA, 19 nt, Artificial Sequence
  Description of Artificial Sequence: Synthetic oligonucleotide
ugauaaaugagucgcagga

SEQ ID NO: 729230 - RNA, 19 nt, Artificial Sequence
  Description of Artificial Sequence: Synthetic oligonucleotide
aauugcaagcacugauucc

SEQ ID NO: 729231 - RNA, 19 nt, Artificial Sequence
  Description of Artificial Sequence: Synthetic oligonucleotide
agaugaaauuagcucaugc

SEQ ID NO: 729232 - RNA, 19 nt, Artificial Sequence
  Description of Artificial Sequence: Synthetic oligonucleotide
uuuagugcugugcaaauug

SEQ ID NO: 729233 - RNA, 19 nt, Artificial Sequence
  Description of Artificial Sequence: Synthetic oligonucleotide
uauauuugcauucuacagu

SEQ ID NO: 729234 - RNA, 19 nt, Artificial Sequence
  Description of Artificial Sequence: Synthetic oligonucleotide
aaagccucuuuaucaacgc

SEQ ID NO: 729235 - RNA, 19 nt, Artificial Sequence
  Description of Artificial Sequence: Synthetic oligonucleotide
agaccauugacauuuaaug

SEQ ID NO: 729236 - RNA, 19 nt, Artificial Sequence
  Description of Artificial Sequence: Synthetic oligonucleotide
aguuagauauuuuaugucu

SEQ ID NO: 729237 - RNA, 19 nt, Artificial Sequence
  Description of Artificial Sequence: Synthetic oligonucleotide
uaaagccucuuuaucaacg

SEQ ID NO: 729238 - RNA, 19 nt, Artificial Sequence
  Description of Artificial Sequence: Synthetic oligonucleotide
uggucuauaugcuacacgc

SEQ ID NO: 729239 - RNA, 19 nt, Artificial Sequence
  Description of Artificial Sequence: Synthetic oligonucleotide
uugacauuuaauguugccg

SEQ ID NO: 729240 - RNA, 19 nt, Artificial Sequence
  Description of Artificial Sequence: Synthetic oligonucleotide
uuuucguagaucuacugca

SEQ ID NO: 729241 - RNA, 19 nt, Artificial Sequence
  Description of Artificial Sequence: Synthetic oligonucleotide
aacuacauaaaguaacaaa

SEQ ID NO: 729242 - RNA, 19 nt, Artificial Sequence
  Description of Artificial Sequence: Synthetic oligonucleotide
cauuuaaacaaagaugacc

SEQ ID NO: 729243 - RNA, 19 nt, Artificial Sequence
  Description of Artificial Sequence: Synthetic oligonucleotide
uaucaacgcauuaacaaug

SEQ ID NO: 729244 - RNA, 19 nt, Artificial Sequence
  Description of Artificial Sequence: Synthetic oligonucleotide
aaauacggaacacaacgca

SEQ ID NO: 729245 - RNA, 19 nt, Artificial Sequence
  Description of Artificial Sequence: Synthetic oligonucleotide
aauacaauugcaagcacug

SEQ ID NO: 729246 - RNA, 19 nt, Artificial Sequence
  Description of Artificial Sequence: Synthetic oligonucleotide
ucugccuugauaaaugagu

SEQ ID NO: 729247 - RNA, 19 nt, Artificial Sequence
  Description of Artificial Sequence: Synthetic oligonucleotide
uugagagugggccagaggu

SEQ ID NO: 729248 - RNA, 19 nt, Artificial Sequence
  Description of Artificial Sequence: Synthetic oligonucleotide
guuuagaugaaauuagcuc

SEQ ID NO: 729249 - RNA, 19 nt, Artificial Sequence
  Description of Artificial Sequence: Synthetic oligonucleotide
ucuacugcauauaaagccu

SEQ ID NO: 729250 - RNA, 19 nt, Artificial Sequence
  Description of Artificial Sequence: Synthetic oligonucleotide
ggaauaaaggaccagauga

SEQ ID NO: 729251 - RNA, 19 nt, Artificial Sequence
  Description of Artificial Sequence: Synthetic oligonucleotide
gaugccucauuaaauacgg

SEQ ID NO: 729252 - RNA, 19 nt, Artificial Sequence
  Description of Artificial Sequence: Synthetic oligonucleotide
aacgcauuaacaaugaaua

SEQ ID NO: 729253 - RNA, 19 nt, Artificial Sequence
  Description of Artificial Sequence: Synthetic oligonucleotide
uaaauacggaacacaacgc

SEQ ID NO: 729254 - RNA, 19 nt, Artificial Sequence
  Description of Artificial Sequence: Synthetic oligonucleotide
aucaguaugaacaauauuu

SEQ ID NO: 729255 - RNA, 19 nt, Artificial Sequence
  Description of Artificial Sequence: Synthetic oligonucleotide
aguaacaaaauuaguaucu

SEQ ID NO: 729256 - RNA, 19 nt, Artificial Sequence
  Description of Artificial Sequence: Synthetic oligonucleotide
aggaucacgcagcaguugc

SEQ ID NO: 729257 - RNA, 19 nt, Artificial Sequence
  Description of Artificial Sequence: Synthetic oligonucleotide
aaaguaaccugauugcauu

SEQ ID NO: 729258 - RNA, 19 nt, Artificial Sequence
  Description of Artificial Sequence: Synthetic oligonucleotide
aaauuuaauucugaucagu

SEQ ID NO: 729259 - RNA, 19 nt, Artificial Sequence
  Description of Artificial Sequence: Synthetic oligonucleotide
uacaaauuuaauucugauc

SEQ ID NO: 729260 - RNA, 19 nt, Artificial Sequence
  Description of Artificial Sequence: Synthetic oligonucleotide
aagauuucuucccagugaa

SEQ ID NO: 729261 - RNA, 19 nt, Artificial Sequence
  Description of Artificial Sequence: Synthetic oligonucleotide
uaaugugacguuuccaugu

SEQ ID NO: 729262 - RNA, 19 nt, Artificial Sequence
  Description of Artificial Sequence: Synthetic oligonucleotide
gauaaugguguugauauga

SEQ ID NO: 729263 - RNA, 19 nt, Artificial Sequence
  Description of Artificial Sequence: Synthetic oligonucleotide
agucgcaggauguuugggc

SEQ ID NO: 729264 - RNA, 19 nt, Artificial Sequence
  Description of Artificial Sequence: Synthetic oligonucleotide
agaauggugcuacuaauca

SEQ ID NO: 729265 - RNA, 19 nt, Artificial Sequence
  Description of Artificial Sequence: Synthetic oligonucleotide
aauacggaacacaacgcag

SEQ ID NO: 729266 - RNA, 19 nt, Artificial Sequence
  Description of Artificial Sequence: Synthetic oligonucleotide
aagaauggugcuacuaauc

SEQ ID NO: 729267 - RNA, 19 nt, Artificial Sequence
  Description of Artificial Sequence: Synthetic oligonucleotide
aaccgggccgaaccgagcc

SEQ ID NO: 729268 - RNA, 19 nt, Artificial Sequence
  Description of Artificial Sequence: Synthetic oligonucleotide
augcaaacuacauaaagua

SEQ ID NO: 729269 - RNA, 19 nt, Artificial Sequence
  Description of Artificial Sequence: Synthetic oligonucleotide
gaguaauucagccccauga

SEQ ID NO: 729270 - RNA, 19 nt, Artificial Sequence
  Description of Artificial Sequence: Synthetic oligonucleotide
uuaucaacgcauuaacaau

SEQ ID NO: 729271 - RNA, 19 nt, Artificial Sequence
  Description of Artificial Sequence: Synthetic oligonucleotide
uuaaacaaagaugaccauc

SEQ ID NO: 729272 - RNA, 19 nt, Artificial Sequence
  Description of Artificial Sequence: Synthetic oligonucleotide
gcgcaaauuaaucauaucc

SEQ ID NO: 729273 - RNA, 19 nt, Artificial Sequence
  Description of Artificial Sequence: Synthetic oligonucleotide
auuaaucauauccgccggg

SEQ ID NO: 729274 - RNA, 19 nt, Artificial Sequence
  Description of Artificial Sequence: Synthetic oligonucleotide
aucuauauuugcauucuac

SEQ ID NO: 729275 - RNA, 19 nt, Artificial Sequence
  Description of Artificial Sequence: Synthetic oligonucleotide
uacaauugcaagcacugau

SEQ ID NO: 729276 - RNA, 19 nt, Artificial Sequence
  Description of Artificial Sequence: Synthetic oligonucleotide
aggaugccucauuaaauac

SEQ ID NO: 729277 - RNA, 19 nt, Artificial Sequence
  Description of Artificial Sequence: Synthetic oligonucleotide
gcaaauuguuuauuuauag

SEQ ID NO: 729278 - RNA, 19 nt, Artificial Sequence
  Description of Artificial Sequence: Synthetic oligonucleotide
ugugacguuuccauguaga

SEQ ID NO: 729279 - RNA, 19 nt, Artificial Sequence
  Description of Artificial Sequence: Synthetic oligonucleotide
uuuauagcauaucaaucuu

SEQ ID NO: 729280 - RNA, 19 nt, Artificial Sequence
  Description of Artificial Sequence: Synthetic oligonucleotide
aguagaaguuccgugggcg

SEQ ID NO: 729281 - RNA, 19 nt, Artificial Sequence
  Description of Artificial Sequence: Synthetic oligonucleotide
caggcggugauucacacgc

SEQ ID NO: 729282 - RNA, 19 nt, Artificial Sequence
  Description of Artificial Sequence: Synthetic oligonucleotide
uuaaugcuccuaaugugac

SEQ ID NO: 729283 - RNA, 19 nt, Artificial Sequence
  Description of Artificial Sequence: Synthetic oligonucleotide
uauuuucguagaucuacug

SEQ ID NO: 729284 - RNA, 19 nt, Artificial Sequence
  Description of Artificial Sequence: Synthetic oligonucleotide
auaaaggaccagaugagag

SEQ ID NO: 729285 - RNA, 19 nt, Artificial Sequence
  Description of Artificial Sequence: Synthetic oligonucleotide
auugcaagcacugauucca

SEQ ID NO: 729286 - RNA, 19 nt, Artificial Sequence
  Description of Artificial Sequence: Synthetic oligonucleotide
gacaugacuggacaucuug

SEQ ID NO: 729287 - RNA, 19 nt, Artificial Sequence
  Description of Artificial Sequence: Synthetic oligonucleotide
gaauggugcuacuaaucag

SEQ ID NO: 729288 - RNA, 19 nt, Artificial Sequence
  Description of Artificial Sequence: Synthetic oligonucleotide
uuagaugaaauuagcucau

SEQ ID NO: 729289 - RNA, 19 nt, Artificial Sequence
  Description of Artificial Sequence: Synthetic oligonucleotide
aauuuaauucugaucagua

SEQ ID NO: 729290 - RNA, 19 nt, Artificial Sequence
  Description of Artificial Sequence: Synthetic oligonucleotide
uucgucuuuccacucacca

SEQ ID NO: 729291 - RNA, 19 nt, Artificial Sequence
  Description of Artificial Sequence: Synthetic oligonucleotide
ugcaaacuacauaaaguaa

SEQ ID NO: 729292 - RNA, 19 nt, Artificial Sequence
  Description of Artificial Sequence: Synthetic oligonucleotide
auucacacgcccucgcgac

SEQ ID NO: 729293 - RNA, 19 nt, Artificial Sequence
  Description of Artificial Sequence: Synthetic oligonucleotide
caaauuuaauucugaucag

SEQ ID NO: 729294 - RNA, 19 nt, Artificial Sequence
  Description of Artificial Sequence: Synthetic oligonucleotide
auuuaauucugaucaguau

SEQ ID NO: 729295 - RNA, 19 nt, Artificial Sequence
  Description of Artificial Sequence: Synthetic oligonucleotide
ugccucauuaaauacggaa

SEQ ID NO: 729296 - RNA, 19 nt, Artificial Sequence
  Description of Artificial Sequence: Synthetic oligonucleotide
uaugcuacacgccaaucua

SEQ ID NO: 729297 - RNA, 19 nt, Artificial Sequence
  Description of Artificial Sequence: Synthetic oligonucleotide
ugaucaguaugaacaauau

SEQ ID NO: 729298 - RNA, 19 nt, Artificial Sequence
  Description of Artificial Sequence: Synthetic oligonucleotide
aauucagccccaugaugug

SEQ ID NO: 729299 - RNA, 19 nt, Artificial Sequence
  Description of Artificial Sequence: Synthetic oligonucleotide
uacacgccaaucuauauuu

SEQ ID NO: 729300 - RNA, 19 nt, Artificial Sequence
  Description of Artificial Sequence: Synthetic oligonucleotide
gacauuuaauguugccgag

SEQ ID NO: 729301 - RNA, 19 nt, Artificial Sequence
  Description of Artificial Sequence: Synthetic oligonucleotide
cuugauaaaugagucgcag

SEQ ID NO: 729302 - RNA, 19 nt, Artificial Sequence
  Description of Artificial Sequence: Synthetic oligonucleotide
cuuuagaaaggcuggauaa

SEQ ID NO: 729303 - RNA, 19 nt, Artificial Sequence
  Description of Artificial Sequence: Synthetic oligonucleotide
ugauucacacgcccucgcg

SEQ ID NO: 729304 - RNA, 19 nt, Artificial Sequence
  Description of Artificial Sequence: Synthetic oligonucleotide
ucaucuaggaagauuucuu

SEQ ID NO: 729305 - RNA, 19 nt, Artificial Sequence
  Description of Artificial Sequence: Synthetic oligonucleotide
guuaaaugcgccguccucc

SEQ ID NO: 729306 - RNA, 19 nt, Artificial Sequence
  Description of Artificial Sequence: Synthetic oligonucleotide
acacaucacaggaucacgc

SEQ ID NO: 729307 - RNA, 19 nt, Artificial Sequence
  Description of Artificial Sequence: Synthetic oligonucleotide
augaggcgcaaauuaauca

SEQ ID NO: 729308 - RNA, 19 nt, Artificial Sequence
  Description of Artificial Sequence: Synthetic oligonucleotide
acuggcgacacaucacagg

SEQ ID NO: 729309 - RNA, 19 nt, Artificial Sequence
  Description of Artificial Sequence: Synthetic oligonucleotide
gaucuacugcauauaaagc

SEQ ID NO: 729310 - RNA, 19 nt, Artificial Sequence
  Description of Artificial Sequence: Synthetic oligonucleotide
uccgugggcgcacaagagg

SEQ ID NO: 729311 - RNA, 19 nt, Artificial Sequence
  Description of Artificial Sequence: Synthetic oligonucleotide
ugaggcgcaaauuaaucau

SEQ ID NO: 729312 - RNA, 19 nt, Artificial Sequence
  Description of Artificial Sequence: Synthetic oligonucleotide
uacuaaucagguaugccuu

SEQ ID NO: 729313 - RNA, 19 nt, Artificial Sequence
  Description of Artificial Sequence: Synthetic oligonucleotide
acaucacaggaucacgcag

SEQ ID NO: 729314 - RNA, 19 nt, Artificial Sequence
  Description of Artificial Sequence: Synthetic oligonucleotide
gucuauaugcuacacgcca

SEQ ID NO: 729315 - RNA, 19 nt, Artificial Sequence
  Description of Artificial Sequence: Synthetic oligonucleotide
cagauaacuauguggcuac

SEQ ID NO: 729316 - RNA, 19 nt, Artificial Sequence
  Description of Artificial Sequence: Synthetic oligonucleotide
aauuaguaucuggagacuu

SEQ ID NO: 729317 - RNA, 19 nt, Artificial Sequence
  Description of Artificial Sequence: Synthetic oligonucleotide
ucuauaugcuacacgccaa

SEQ ID NO: 729318 - RNA, 19 nt, Artificial Sequence
  Description of Artificial Sequence: Synthetic oligonucleotide
auaaaguaaccugauugca

SEQ ID NO: 729319 - RNA, 19 nt, Artificial Sequence
  Description of Artificial Sequence: Synthetic oligonucleotide
uuaauguugccgagagcca

SEQ ID NO: 729320 - RNA, 19 nt, Artificial Sequence
  Description of Artificial Sequence: Synthetic oligonucleotide
aucgagaccauugacauuu

SEQ ID NO: 729321 - RNA, 19 nt, Artificial Sequence
  Description of Artificial Sequence: Synthetic oligonucleotide
uaauguugccgagagccag

SEQ ID NO: 729322 - RNA, 19 nt, Artificial Sequence
  Description of Artificial Sequence: Synthetic oligonucleotide
aguaauucagccccaugau

SEQ ID NO: 729323 - RNA, 19 nt, Artificial Sequence
  Description of Artificial Sequence: Synthetic oligonucleotide
guucccgaguaauucagcc

SEQ ID NO: 729324 - RNA, 19 nt, Artificial Sequence
  Description of Artificial Sequence: Synthetic oligonucleotide
uuagugcugugcaaauugu

SEQ ID NO: 729325 - RNA, 19 nt, Artificial Sequence
  Description of Artificial Sequence: Synthetic oligonucleotide
gauuccucugaccuuguga

SEQ ID NO: 729326 - RNA, 19 nt, Artificial Sequence
  Description of Artificial Sequence: Synthetic oligonucleotide
uguagcacauacuggcgac

SEQ ID NO: 729327 - RNA, 19 nt, Artificial Sequence
  Description of Artificial Sequence: Synthetic oligonucleotide
auacuggcgacacaucaca

SEQ ID NO: 729328 - RNA, 19 nt, Artificial Sequence
  Description of Artificial Sequence: Synthetic oligonucleotide
aaauuaguaucuggagacu

SEQ ID NO: 729329 - RNA, 19 nt, Artificial Sequence
  Description of Artificial Sequence: Synthetic oligonucleotide
ugagucgcaggauguuugg

SEQ ID NO: 729330 - RNA, 19 nt, Artificial Sequence
  Description of Artificial Sequence: Synthetic oligonucleotide
cacgccaaucuauauuugc

SEQ ID NO: 729331 - RNA, 19 nt, Artificial Sequence
  Description of Artificial Sequence: Synthetic oligonucleotide
aaacaaagaugaccaucga

SEQ ID NO: 729332 - RNA, 19 nt, Artificial Sequence
  Description of Artificial Sequence: Synthetic oligonucleotide
ugguguugauaugaaauac

SEQ ID NO: 729333 - RNA, 19 nt, Artificial Sequence
  Description of Artificial Sequence: Synthetic oligonucleotide
caguuagauauuuuauguc

SEQ ID NO: 729334 - RNA, 19 nt, Artificial Sequence
  Description of Artificial Sequence: Synthetic oligonucleotide
auaaaguaacaaaauuagu

SEQ ID NO: 729335 - RNA, 19 nt, Artificial Sequence
  Description of Artificial Sequence: Synthetic oligonucleotide
cuaaugugacguuuccaug

SEQ ID NO: 729336 - RNA, 19 nt, Artificial Sequence
  Description of Artificial Sequence: Synthetic oligonucleotide
accagucuucucccgauuc

SEQ ID NO: 729337 - RNA, 19 nt, Artificial Sequence
  Description of Artificial Sequence: Synthetic oligonucleotide
uacacaucgagcgcggggc

SEQ ID NO: 729338 - RNA, 19 nt, Artificial Sequence
  Description of Artificial Sequence: Synthetic oligonucleotide
ugaccaucgagaccauuga

SEQ ID NO: 729339 - RNA, 19 nt, Artificial Sequence
  Description of Artificial Sequence: Synthetic oligonucleotide
auacacgugcuuugcaaug

SEQ ID NO: 729340 - RNA, 19 nt, Artificial Sequence
  Description of Artificial Sequence: Synthetic oligonucleotide
uggacaucuugccuuuuga

SEQ ID NO: 729341 - RNA, 19 nt, Artificial Sequence
  Description of Artificial Sequence: Synthetic oligonucleotide
uugacuucgccgguagccg

SEQ ID NO: 729342 - RNA, 19 nt, Artificial Sequence
  Description of Artificial Sequence: Synthetic oligonucleotide
aacgcagucugcaacuuca

SEQ ID NO: 729343 - RNA, 19 nt, Artificial Sequence
  Description of Artificial Sequence: Synthetic oligonucleotide
gaggggagcagaucgucag

SEQ ID NO: 729344 - RNA, 19 nt, Artificial Sequence
  Description of Artificial Sequence: Synthetic oligonucleotide
ugagccgaagugacacacg

SEQ ID NO: 729345 - RNA, 19 nt, Artificial Sequence
  Description of Artificial Sequence: Synthetic oligonucleotide
agaguucccgaguaauuca

SEQ ID NO: 729346 - RNA, 19 nt, Artificial Sequence
  Description of Artificial Sequence: Synthetic oligonucleotide
gcuauuuacauucauuuua

SEQ ID NO: 729347 - RNA, 19 nt, Artificial Sequence
  Description of Artificial Sequence: Synthetic oligonucleotide
aaucuauauuugcauucua

SEQ ID NO: 729348 - RNA, 19 nt, Artificial Sequence
  Description of Artificial Sequence: Synthetic oligonucleotide
uuagugcuauuuacauuca

SEQ ID NO: 729349 - RNA, 19 nt, Artificial Sequence
  Description of Artificial Sequence: Synthetic oligonucleotide
uaaucauauccgccgggac

SEQ ID NO: 729350 - RNA, 19 nt, Artificial Sequence
  Description of Artificial Sequence: Synthetic oligonucleotide
uucccgaguaauucagccc

SEQ ID NO: 729351 - RNA, 19 nt, Artificial Sequence
  Description of Artificial Sequence: Synthetic oligonucleotide
aaugugacguuuccaugua

SEQ ID NO: 729352 - RNA, 19 nt, Artificial Sequence
  Description of Artificial Sequence: Synthetic oligonucleotide
uggcuacacaucgagcgcg

SEQ ID NO: 729353 - RNA, 19 nt, Artificial Sequence
  Description of Artificial Sequence: Synthetic oligonucleotide
uuaaaugcgccguccuccu

SEQ ID NO: 729354 - RNA, 19 nt, Artificial Sequence
  Description of Artificial Sequence: Synthetic oligonucleotide
cuacuaaucagguaugccu

SEQ ID NO: 729355 - RNA, 19 nt, Artificial Sequence
  Description of Artificial Sequence: Synthetic oligonucleotide
ugcgccguccuccuucccg

SEQ ID NO: 729356 - RNA, 19 nt, Artificial Sequence
  Description of Artificial Sequence: Synthetic oligonucleotide
gaugaggcgcaaauuaauc

SEQ ID NO: 729357 - RNA, 19 nt, Artificial Sequence
  Description of Artificial Sequence: Synthetic oligonucleotide
cucauuaaauacggaacac

SEQ ID NO: 729358 - RNA, 19 nt, Artificial Sequence
  Description of Artificial Sequence: Synthetic oligonucleotide
cucauuaaagccccggcga

SEQ ID NO: 729359 - RNA, 19 nt, Artificial Sequence
  Description of Artificial Sequence: Synthetic oligonucleotide
uuucguagaucuacugcau

SEQ ID NO: 729360 - RNA, 19 nt, Artificial Sequence
  Description of Artificial Sequence: Synthetic oligonucleotide
guagaaaucugccuugaua

SEQ ID NO: 729361 - RNA, 19 nt, Artificial Sequence
  Description of Artificial Sequence: Synthetic oligonucleotide
gauaacuauguggcuacac

SEQ ID NO: 729362 - RNA, 19 nt, Artificial Sequence
  Description of Artificial Sequence: Synthetic oligonucleotide
uacagauaacuauguggcu

SEQ ID NO: 729363 - RNA, 19 nt, Artificial Sequence
  Description of Artificial Sequence: Synthetic oligonucleotide
gaccauugacauuuaaugu

SEQ ID NO: 729364 - RNA, 19 nt, Artificial Sequence
  Description of Artificial Sequence: Synthetic oligonucleotide
uuuagaaaggcuggauaau

SEQ ID NO: 729365 - RNA, 19 nt, Artificial Sequence
  Description of Artificial Sequence: Synthetic oligonucleotide
acagauaacuauguggcua

SEQ ID NO: 729366 - RNA, 19 nt, Artificial Sequence
  Description of Artificial Sequence: Synthetic oligonucleotide
cacacggacauggagcggg

SEQ ID NO: 729367 - RNA, 19 nt, Artificial Sequence
  Description of Artificial Sequence: Synthetic oligonucleotide
gauguuugggcugcucacc

SEQ ID NO: 729368 - RNA, 19 nt, Artificial Sequence
  Description of Artificial Sequence: Synthetic oligonucleotide
gugacacacggacauggag

SEQ ID NO: 729369 - RNA, 19 nt, Artificial Sequence
  Description of Artificial Sequence: Synthetic oligonucleotide
ugacuguccgacaggugug

SEQ ID NO: 729370 - RNA, 19 nt, Artificial Sequence
  Description of Artificial Sequence: Synthetic oligonucleotide
guugaaccuccucuguccc

SEQ ID NO: 729371 - RNA, 19 nt, Artificial Sequence
  Description of Artificial Sequence: Synthetic oligonucleotide
cacgugcuuugcaaugucg

SEQ ID NO: 729372 - RNA, 19 nt, Artificial Sequence
  Description of Artificial Sequence: Synthetic oligonucleotide
ggugcuacuaaucagguau

SEQ ID NO: 729373 - RNA, 19 nt, Artificial Sequence
  Description of Artificial Sequence: Synthetic oligonucleotide
cugaucaguaugaacaaua

SEQ ID NO: 729374 - RNA, 19 nt, Artificial Sequence
  Description of Artificial Sequence: Synthetic oligonucleotide
cuacacaucgagcgcgggg

SEQ ID NO: 729375 - RNA, 19 nt, Artificial Sequence
  Description of Artificial Sequence: Synthetic oligonucleotide
ccauugacauuuaauguug

SEQ ID NO: 729376 - RNA, 19 nt, Artificial Sequence
  Description of Artificial Sequence: Synthetic oligonucleotide
uacggaacacaacgcaguc

SEQ ID NO: 729377 - RNA, 19 nt, Artificial Sequence
  Description of Artificial Sequence: Synthetic oligonucleotide
gauucacacgcccucgcga

SEQ ID NO: 729378 - RNA, 19 nt, Artificial Sequence
  Description of Artificial Sequence: Synthetic oligonucleotide
uacuggcgacacaucacag

SEQ ID NO: 729379 - RNA, 19 nt, Artificial Sequence
  Description of Artificial Sequence: Synthetic oligonucleotide
ucugaccuugugaguuggg

SEQ ID NO: 729380 - RNA, 19 nt, Artificial Sequence
  Description of Artificial Sequence: Synthetic oligonucleotide
ugcuacuaaucagguaugc

SEQ ID NO: 729381 - RNA, 19 nt, Artificial Sequence
  Description of Artificial Sequence: Synthetic oligonucleotide
ccaaucuauauuugcauuc

SEQ ID NO: 729382 - RNA, 19 nt, Artificial Sequence
  Description of Artificial Sequence: Synthetic oligonucleotide
acgugcuuugcaaugucgg

SEQ ID NO: 729383 - RNA, 19 nt, Artificial Sequence
  Description of Artificial Sequence: Synthetic oligonucleotide
gcucucaccagucuucucc

SEQ ID NO: 729384 - RNA, 19 nt, Artificial Sequence
  Description of Artificial Sequence: Synthetic oligonucleotide
uuaguaucuggagacuuuu

SEQ ID NO: 729385 - RNA, 19 nt, Artificial Sequence
  Description of Artificial Sequence: Synthetic oligonucleotide
uucgccgguagccgagccg

SEQ ID NO: 729386 - RNA, 19 nt, Artificial Sequence
  Description of Artificial Sequence: Synthetic oligonucleotide
aaugagucgcaggauguuu

SEQ ID NO: 729387 - RNA, 19 nt, Artificial Sequence
  Description of Artificial Sequence: Synthetic oligonucleotide
agacuguagcacauacugg

SEQ ID NO: 729388 - RNA, 19 nt, Artificial Sequence
  Description of Artificial Sequence: Synthetic oligonucleotide
uaaucagguaugccuuaaa

SEQ ID NO: 729389 - RNA, 19 nt, Artificial Sequence
  Description of Artificial Sequence: Synthetic oligonucleotide
uguagaaaucugccuugau

SEQ ID NO: 729390 - RNA, 19 nt, Artificial Sequence
  Description of Artificial Sequence: Synthetic oligonucleotide
accaucgagaccauugaca

SEQ ID NO: 729391 - RNA, 19 nt, Artificial Sequence
  Description of Artificial Sequence: Synthetic oligonucleotide
cacucaccaagaugaggcg

SEQ ID NO: 729392 - RNA, 19 nt, Artificial Sequence
  Description of Artificial Sequence: Synthetic oligonucleotide
ucaacgcauuaacaaugaa

SEQ ID NO: 729393 - RNA, 19 nt, Artificial Sequence
  Description of Artificial Sequence: Synthetic oligonucleotide
acauuuaauguugccgaga

SEQ ID NO: 729394 - RNA, 19 nt, Artificial Sequence
  Description of Artificial Sequence: Synthetic oligonucleotide
acacgugcuuugcaauguc

SEQ ID NO: 729395 - RNA, 19 nt, Artificial Sequence
  Description of Artificial Sequence: Synthetic oligonucleotide
ugcuacacgccaaucuaua

SEQ ID NO: 729396 - RNA, 19 nt, Artificial Sequence
  Description of Artificial Sequence: Synthetic oligonucleotide
uuccgugggcgcacaagag

SEQ ID NO: 729397 - RNA, 19 nt, Artificial Sequence
  Description of Artificial Sequence: Synthetic oligonucleotide
cuccuaaugugacguuucc

SEQ ID NO: 729398 - RNA, 19 nt, Artificial Sequence
  Description of Artificial Sequence: Synthetic oligonucleotide
uuccgcggcgucuuccggg

SEQ ID NO: 729399 - RNA, 19 nt, Artificial Sequence
  Description of Artificial Sequence: Synthetic oligonucleotide
aggaaucuauuaaguacag

SEQ ID NO: 729400 - RNA, 19 nt, Artificial Sequence
  Description of Artificial Sequence: Synthetic oligonucleotide
gccgaagugacacacggac

SEQ ID NO: 729401 - RNA, 19 nt, Artificial Sequence
  Description of Artificial Sequence: Synthetic oligonucleotide
uccgcuucgcugccuuccg

SEQ ID NO: 729402 - RNA, 19 nt, Artificial Sequence
  Description of Artificial Sequence: Synthetic oligonucleotide
acgcauuaacaaugaauaa

SEQ ID NO: 729403 - RNA, 19 nt, Artificial Sequence
  Description of Artificial Sequence: Synthetic oligonucleotide
agucauucggggagaagag

SEQ ID NO: 729404 - RNA, 19 nt, Artificial Sequence
  Description of Artificial Sequence: Synthetic oligonucleotide
uauccgccgggacaugacu

SEQ ID NO: 729405 - RNA, 19 nt, Artificial Sequence
  Description of Artificial Sequence: Synthetic oligonucleotide
auacggaacacaacgcagu

SEQ ID NO: 729406 - RNA, 19 nt, Artificial Sequence
  Description of Artificial Sequence: Synthetic oligonucleotide
uccucugaccuugugaguu

SEQ ID NO: 729407 - RNA, 19 nt, Artificial Sequence
  Description of Artificial Sequence: Synthetic oligonucleotide
agguuuacgcagaaaacaa

SEQ ID NO: 729408 - RNA, 19 nt, Artificial Sequence
  Description of Artificial Sequence: Synthetic oligonucleotide
uaagagagacaggaauaaa

SEQ ID NO: 729409 - RNA, 19 nt, Artificial Sequence
  Description of Artificial Sequence: Synthetic oligonucleotide
uagugcuauuuacauucau

SEQ ID NO: 729410 - RNA, 19 nt, Artificial Sequence
  Description of Artificial Sequence: Synthetic oligonucleotide
uccuaaugugacguuucca

SEQ ID NO: 729411 - RNA, 19 nt, Artificial Sequence
  Description of Artificial Sequence: Synthetic oligonucleotide
aucaacgcauuaacaauga

SEQ ID NO: 729412 - RNA, 19 nt, Artificial Sequence
  Description of Artificial Sequence: Synthetic oligonucleotide
aucgucagcagcaguagca

SEQ ID NO: 729413 - RNA, 19 nt, Artificial Sequence
  Description of Artificial Sequence: Synthetic oligonucleotide
uauaugcuacacgccaauc

SEQ ID NO: 729414 - RNA, 19 nt, Artificial Sequence
  Description of Artificial Sequence: Synthetic oligonucleotide
gaccagaugagaguguucu

SEQ ID NO: 729415 - RNA, 19 nt, Artificial Sequence
  Description of Artificial Sequence: Synthetic oligonucleotide
guggcuacacaucgagcgc

SEQ ID NO: 729416 - RNA, 19 nt, Artificial Sequence
  Description of Artificial Sequence: Synthetic oligonucleotide
auguggcuacacaucgagc

SEQ ID NO: 729417 - RNA, 19 nt, Artificial Sequence
  Description of Artificial Sequence: Synthetic oligonucleotide
uccgcggcgucuuccgggg

SEQ ID NO: 729418 - RNA, 19 nt, Artificial Sequence
  Description of Artificial Sequence: Synthetic oligonucleotide
acuaaucagguaugccuua

SEQ ID NO: 729419 - RNA, 19 nt, Artificial Sequence
  Description of Artificial Sequence: Synthetic oligonucleotide
caggaugccucauuaaaua

SEQ ID NO: 729420 - RNA, 19 nt, Artificial Sequence
  Description of Artificial Sequence: Synthetic oligonucleotide
aucacgcagcaguugcucu

SEQ ID NO: 729421 - RNA, 19 nt, Artificial Sequence
  Description of Artificial Sequence: Synthetic oligonucleotide
augagucgcaggauguuug

SEQ ID NO: 729422 - RNA, 19 nt, Artificial Sequence
  Description of Artificial Sequence: Synthetic oligonucleotide
caacgcauuaacaaugaau

SEQ ID NO: 729423 - RNA, 19 nt, Artificial Sequence
  Description of Artificial Sequence: Synthetic oligonucleotide
caugggccaguugucauac

SEQ ID NO: 729424 - RNA, 19 nt, Artificial Sequence
  Description of Artificial Sequence: Synthetic oligonucleotide
aaaugagucgcaggauguu

SEQ ID NO: 729425 - RNA, 19 nt, Artificial Sequence
  Description of Artificial Sequence: Synthetic oligonucleotide
aaagccccggcgacgaagu

SEQ ID NO: 729426 - RNA, 19 nt, Artificial Sequence
  Description of Artificial Sequence: Synthetic oligonucleotide
cuucgucuuuccacucacc

SEQ ID NO: 729427 - RNA, 19 nt, Artificial Sequence
  Description of Artificial Sequence: Synthetic oligonucleotide
ggcgacacaucacaggauc

SEQ ID NO: 729428 - RNA, 19 nt, Artificial Sequence
  Description of Artificial Sequence: Synthetic oligonucleotide
ugcucaccuguucuucuuc

SEQ ID NO: 729429 - RNA, 19 nt, Artificial Sequence
  Description of Artificial Sequence: Synthetic oligonucleotide
cugagccgaagugacacac

SEQ ID NO: 729430 - RNA, 19 nt, Artificial Sequence
  Description of Artificial Sequence: Synthetic oligonucleotide
ccucauuaaauacggaaca

SEQ ID NO: 729431 - RNA, 19 nt, Artificial Sequence
  Description of Artificial Sequence: Synthetic oligonucleotide
gagucgcaggauguuuggg

SEQ ID NO: 729432 - RNA, 19 nt, Artificial Sequence
  Description of Artificial Sequence: Synthetic oligonucleotide
gccucauuaaauacggaac

SEQ ID NO: 729433 - RNA, 19 nt, Artificial Sequence
  Description of Artificial Sequence: Synthetic oligonucleotide
aucugccuugauaaaugag

SEQ ID NO: 729434 - RNA, 19 nt, Artificial Sequence
  Description of Artificial Sequence: Synthetic oligonucleotide
acgccaaucuauauuugca

SEQ ID NO: 729435 - RNA, 19 nt, Artificial Sequence
  Description of Artificial Sequence: Synthetic oligonucleotide
cuacaguuagauauuuuau

SEQ ID NO: 729436 - RNA, 19 nt, Artificial Sequence
  Description of Artificial Sequence: Synthetic oligonucleotide
ucgcaggauguuugggcug

SEQ ID NO: 729437 - RNA, 19 nt, Artificial Sequence
  Description of Artificial Sequence: Synthetic oligonucleotide
gguggacugagccgaagug

SEQ ID NO: 729438 - RNA, 19 nt, Artificial Sequence
  Description of Artificial Sequence: Synthetic oligonucleotide
auacaauugcaagcacuga

SEQ ID NO: 729439 - RNA, 19 nt, Artificial Sequence
  Description of Artificial Sequence: Synthetic oligonucleotide
cucugaccuugugaguugg

SEQ ID NO: 729440 - RNA, 19 nt, Artificial Sequence
  Description of Artificial Sequence: Synthetic oligonucleotide
ggugauucacacgcccucg

SEQ ID NO: 729441 - RNA, 19 nt, Artificial Sequence
  Description of Artificial Sequence: Synthetic oligonucleotide
gucggaggcagagucauuc

SEQ ID NO: 729442 - RNA, 19 nt, Artificial Sequence
  Description of Artificial Sequence: Synthetic oligonucleotide
ugacuucgccgguagccga

SEQ ID NO: 729443 - RNA, 19 nt, Artificial Sequence
  Description of Artificial Sequence: Synthetic oligonucleotide
agaugaggcgcaaauuaau

SEQ ID NO: 729444 - RNA, 19 nt, Artificial Sequence
  Description of Artificial Sequence: Synthetic oligonucleotide
uugcaagcacugauuccaa

SEQ ID NO: 729445 - RNA, 19 nt, Artificial Sequence
  Description of Artificial Sequence: Synthetic oligonucleotide
cagaucgucagcagcagua

SEQ ID NO: 729446 - RNA, 19 nt, Artificial Sequence
  Description of Artificial Sequence: Synthetic oligonucleotide
auuaguaucuggagacuuu

SEQ ID NO: 729447 - RNA, 19 nt, Artificial Sequence
  Description of Artificial Sequence: Synthetic oligonucleotide
agccucuuuaucaacgcau

SEQ ID NO: 729448 - RNA, 19 nt, Artificial Sequence
  Description of Artificial Sequence: Synthetic oligonucleotide
auauccgccgggacaugac

SEQ ID NO: 729449 - RNA, 19 nt, Artificial Sequence
  Description of Artificial Sequence: Synthetic oligonucleotide
gcuacuaaucagguaugcc

SEQ ID NO: 729450 - RNA, 19 nt, Artificial Sequence
  Description of Artificial Sequence: Synthetic oligonucleotide
gguaagagagacaggaaua

SEQ ID NO: 729451 - RNA, 19 nt, Artificial Sequence
  Description of Artificial Sequence: Synthetic oligonucleotide
ugggcgcacaagagguucu

SEQ ID NO: 729452 - RNA, 19 nt, Artificial Sequence
  Description of Artificial Sequence: Synthetic oligonucleotide
aguuccgugggcgcacaag

SEQ ID NO: 729453 - RNA, 19 nt, Artificial Sequence
  Description of Artificial Sequence: Synthetic oligonucleotide
gagaccauugacauuuaau

SEQ ID NO: 729454 - RNA, 19 nt, Artificial Sequence
  Description of Artificial Sequence: Synthetic oligonucleotide
gaucaguaugaacaauauu

SEQ ID NO: 729455 - RNA, 19 nt, Artificial Sequence
  Description of Artificial Sequence: Synthetic oligonucleotide
ucgccgguagccgagccga

SEQ ID NO: 729456 - RNA, 19 nt, Artificial Sequence
  Description of Artificial Sequence: Synthetic oligonucleotide
uucacacgcccucgcgacu

SEQ ID NO: 729457 - RNA, 19 nt, Artificial Sequence
  Description of Artificial Sequence: Synthetic oligonucleotide
aggcgcaaauuaaucauau

SEQ ID NO: 729458 - RNA, 19 nt, Artificial Sequence
  Description of Artificial Sequence: Synthetic oligonucleotide
auggugcuacuaaucaggu

SEQ ID NO: 729459 - RNA, 19 nt, Artificial Sequence
  Description of Artificial Sequence: Synthetic oligonucleotide
ggcggugauucacacgccc

SEQ ID NO: 729460 - RNA, 19 nt, Artificial Sequence
  Description of Artificial Sequence: Synthetic oligonucleotide
acuucgccgguagccgagc

SEQ ID NO: 729461 - RNA, 19 nt, Artificial Sequence
  Description of Artificial Sequence: Synthetic oligonucleotide
acagacuguagcacauacu

SEQ ID NO: 729462 - RNA, 19 nt, Artificial Sequence
  Description of Artificial Sequence: Synthetic oligonucleotide
cacgcucaagggcauugac

SEQ ID NO: 729463 - RNA, 19 nt, Artificial Sequence
  Description of Artificial Sequence: Synthetic oligonucleotide
gguuaaaugcgccguccuc

SEQ ID NO: 729464 - RNA, 19 nt, Artificial Sequence
  Description of Artificial Sequence: Synthetic oligonucleotide
cuugugaguugggcucugg

SEQ ID NO: 729465 - RNA, 19 nt, Artificial Sequence
  Description of Artificial Sequence: Synthetic oligonucleotide
cuauguggcuacacaucga

SEQ ID NO: 729466 - RNA, 19 nt, Artificial Sequence
  Description of Artificial Sequence: Synthetic oligonucleotide
ggucuauaugcuacacgcc

SEQ ID NO: 729467 - RNA, 19 nt, Artificial Sequence
  Description of Artificial Sequence: Synthetic oligonucleotide
gacuucgccgguagccgag

SEQ ID NO: 729468 - RNA, 19 nt, Artificial Sequence
  Description of Artificial Sequence: Synthetic oligonucleotide
uggugcuacuaaucaggua

SEQ ID NO: 729469 - RNA, 19 nt, Artificial Sequence
  Description of Artificial Sequence: Synthetic oligonucleotide
caagggcauugacuucgcc

SEQ ID NO: 729470 - RNA, 19 nt, Artificial Sequence
  Description of Artificial Sequence: Synthetic oligonucleotide
gucgcaggauguuugggcu

SEQ ID NO: 729471 - RNA, 19 nt, Artificial Sequence
  Description of Artificial Sequence: Synthetic oligonucleotide
acgcucaagggcauugacu

SEQ ID NO: 729472 - RNA, 19 nt, Artificial Sequence
  Description of Artificial Sequence: Synthetic oligonucleotide
acggaacacaacgcagucu

SEQ ID NO: 729473 - RNA, 19 nt, Artificial Sequence
  Description of Artificial Sequence: Synthetic oligonucleotide
gaggcgcaaauuaaucaua

SEQ ID NO: 729474 - RNA, 19 nt, Artificial Sequence
  Description of Artificial Sequence: Synthetic oligonucleotide
cacaacgcagucugcaacu

SEQ ID NO: 729475 - RNA, 19 nt, Artificial Sequence
  Description of Artificial Sequence: Synthetic oligonucleotide
cauucuacaguuagauauu

SEQ ID NO: 729476 - RNA, 19 nt, Artificial Sequence
  Description of Artificial Sequence: Synthetic oligonucleotide
ccggcgacgaaguguacag

SEQ ID NO: 729477 - RNA, 19 nt, Artificial Sequence
  Description of Artificial Sequence: Synthetic oligonucleotide
ccuuuugagagugggccag

SEQ ID NO: 729478 - RNA, 19 nt, Artificial Sequence
  Description of Artificial Sequence: Synthetic oligonucleotide
acacaucgagcgcggggcu

SEQ ID NO: 729479 - RNA, 19 nt, Artificial Sequence
  Description of Artificial Sequence: Synthetic oligonucleotide
cucagcgcagccgcgcggc

SEQ ID NO: 729480 - RNA, 19 nt, Artificial Sequence
  Description of Artificial Sequence: Synthetic oligonucleotide
gaaccuccucugucccagc

SEQ ID NO: 729481 - RNA, 19 nt, Artificial Sequence
  Description of Artificial Sequence: Synthetic oligonucleotide
uuaaagccccggcgacgaa

SEQ ID NO: 729482 - RNA, 19 nt, Artificial Sequence
  Description of Artificial Sequence: Synthetic oligonucleotide
gggguuaaaugcgccgucc

SEQ ID NO: 729483 - RNA, 19 nt, Artificial Sequence
  Description of Artificial Sequence: Synthetic oligonucleotide
cuucgccgguagccgagcc

SEQ ID NO: 729484 - RNA, 19 nt, Artificial Sequence
  Description of Artificial Sequence: Synthetic oligonucleotide
gcuucgcugccuuccgcgg

SEQ ID NO: 729485 - RNA, 19 nt, Artificial Sequence
  Description of Artificial Sequence: Synthetic oligonucleotide
ggaaguuuuaaugcuccua

SEQ ID NO: 729486 - RNA, 19 nt, Artificial Sequence
  Description of Artificial Sequence: Synthetic oligonucleotide
augcuacacgccaaucuau

SEQ ID NO: 729487 - RNA, 19 nt, Artificial Sequence
  Description of Artificial Sequence: Synthetic oligonucleotide
acaucgagcgcggggcuga

SEQ ID NO: 729488 - RNA, 19 nt, Artificial Sequence
  Description of Artificial Sequence: Synthetic oligonucleotide
aggcuggauaaugguguug

SEQ ID NO: 729489 - RNA, 19 nt, Artificial Sequence
  Description of Artificial Sequence: Synthetic oligonucleotide
acacgccaaucuauauuug

SEQ ID NO: 729490 - RNA, 19 nt, Artificial Sequence
  Description of Artificial Sequence: Synthetic oligonucleotide
gccaaaaggaaguuuuaau

SEQ ID NO: 729491 - RNA, 19 nt, Artificial Sequence
  Description of Artificial Sequence: Synthetic oligonucleotide
ggcgcaaauuaaucauauc

SEQ ID NO: 729492 - RNA, 19 nt, Artificial Sequence
  Description of Artificial Sequence: Synthetic oligonucleotide
auguugccgagagccagga

SEQ ID NO: 729493 - RNA, 19 nt, Artificial Sequence
  Description of Artificial Sequence: Synthetic oligonucleotide
gugggcgcacaagagguuc

SEQ ID NO: 729494 - RNA, 19 nt, Artificial Sequence
  Description of Artificial Sequence: Synthetic oligonucleotide
guagcacauacuggcgaca

SEQ ID NO: 729495 - RNA, 19 nt, Artificial Sequence
  Description of Artificial Sequence: Synthetic oligonucleotide
gaaccgagccgagcgcaac

SEQ ID NO: 729496 - RNA, 19 nt, Artificial Sequence
  Description of Artificial Sequence: Synthetic oligonucleotide
uaaaugcgccguccuccuu

SEQ ID NO: 729497 - RNA, 19 nt, Artificial Sequence
  Description of Artificial Sequence: Synthetic oligonucleotide
ccuucgucuuuccacucac

SEQ ID NO: 729498 - RNA, 19 nt, Artificial Sequence
  Description of Artificial Sequence: Synthetic oligonucleotide
cauauccgccgggacauga

SEQ ID NO: 729499 - RNA, 19 nt, Artificial Sequence
  Description of Artificial Sequence: Synthetic oligonucleotide
gguuuacgcagaaaacaaa

SEQ ID NO: 729500 - RNA, 19 nt, Artificial Sequence
  Description of Artificial Sequence: Synthetic oligonucleotide
aaguuccgugggcgcacaa

SEQ ID NO: 729501 - RNA, 19 nt, Artificial Sequence
  Description of Artificial Sequence: Synthetic oligonucleotide
ucgagaccauugacauuua

SEQ ID NO: 729502 - RNA, 19 nt, Artificial Sequence
  Description of Artificial Sequence: Synthetic oligonucleotide
uccggccgccuccgcuucg

SEQ ID NO: 729503 - RNA, 19 nt, Artificial Sequence
  Description of Artificial Sequence: Synthetic oligonucleotide
ccgguagccgagccgagcc

SEQ ID NO: 729504 - RNA, 19 nt, Artificial Sequence
  Description of Artificial Sequence: Synthetic oligonucleotide
cgcauuaacaaugaauaaa

SEQ ID NO: 729505 - RNA, 19 nt, Artificial Sequence
  Description of Artificial Sequence: Synthetic oligonucleotide
uguugccgagagccaggau

SEQ ID NO: 729506 - RNA, 19 nt, Artificial Sequence
  Description of Artificial Sequence: Synthetic oligonucleotide
cccgauuccucugaccuug

SEQ ID NO: 729507 - RNA, 19 nt, Artificial Sequence
  Description of Artificial Sequence: Synthetic oligonucleotide
cuacacgccaaucuauauu

SEQ ID NO: 729508 - RNA, 19 nt, Artificial Sequence
  Description of Artificial Sequence: Synthetic oligonucleotide
agccccggcgacgaagugu

SEQ ID NO: 729509 - RNA, 19 nt, Artificial Sequence
  Description of Artificial Sequence: Synthetic oligonucleotide
ggcuacacaucgagcgcgg

SEQ ID NO: 729510 - RNA, 19 nt, Artificial Sequence
  Description of Artificial Sequence: Synthetic oligonucleotide
ucccgauuccucugaccuu

SEQ ID NO: 729511 - RNA, 19 nt, Artificial Sequence
  Description of Artificial Sequence: Synthetic oligonucleotide
ucauauccgccgggacaug

SEQ ID NO: 729512 - RNA, 19 nt, Artificial Sequence
  Description of Artificial Sequence: Synthetic oligonucleotide
cgccgagaggcucagcgcg

SEQ ID NO: 729513 - RNA, 19 nt, Artificial Sequence
  Description of Artificial Sequence: Synthetic oligonucleotide
gccgggacaugacuggaca

SEQ ID NO: 729514 - RNA, 19 nt, Artificial Sequence
  Description of Artificial Sequence: Synthetic oligonucleotide
ggcgacgaaguguacagau

SEQ ID NO: 729515 - RNA, 19 nt, Artificial Sequence
  Description of Artificial Sequence: Synthetic oligonucleotide
guccgacaggugugggaug

SEQ ID NO: 729516 - RNA, 19 nt, Artificial Sequence
  Description of Artificial Sequence: Synthetic oligonucleotide
caucgcguccccggcuccg

SEQ ID NO: 729517 - RNA, 19 nt, Artificial Sequence
  Description of Artificial Sequence: Synthetic oligonucleotide
gcuccuaaugugacguuuc

SEQ ID NO: 729518 - RNA, 19 nt, Artificial Sequence
  Description of Artificial Sequence: Synthetic oligonucleotide
acaacgcagucugcaacuu

SEQ ID NO: 729519 - RNA, 19 nt, Artificial Sequence
  Description of Artificial Sequence: Synthetic oligonucleotide
ggaacacaacgcagucugc

SEQ ID NO: 729520 - RNA, 19 nt, Artificial Sequence
  Description of Artificial Sequence: Synthetic oligonucleotide
aucgcguccccggcuccgg

SEQ ID NO: 729521 - RNA, 19 nt, Artificial Sequence
  Description of Artificial Sequence: Synthetic oligonucleotide
ucgcgacucagguccucau

SEQ ID NO: 729522 - RNA, 19 nt, Artificial Sequence
  Description of Artificial Sequence: Synthetic oligonucleotide
cgcuucgcugccuuccgcg

SEQ ID NO: 729523 - RNA, 19 nt, Artificial Sequence
  Description of Artificial Sequence: Synthetic oligonucleotide
cuuuugagagugggccaga

SEQ ID NO: 729524 - RNA, 19 nt, Artificial Sequence
  Description of Artificial Sequence: Synthetic oligonucleotide
ugucggaggcagagucauu

SEQ ID NO: 729525 - RNA, 19 nt, Artificial Sequence
  Description of Artificial Sequence: Synthetic oligonucleotide
cugugcauuucagacugcu

SEQ ID NO: 729526 - RNA, 19 nt, Artificial Sequence
  Description of Artificial Sequence: Synthetic oligonucleotide
gccaaucuauauuugcauu

SEQ ID NO: 729527 - RNA, 19 nt, Artificial Sequence
  Description of Artificial Sequence: Synthetic oligonucleotide
gcuacacaucgagcgcggg

SEQ ID NO: 729528 - RNA, 19 nt, Artificial Sequence
  Description of Artificial Sequence: Synthetic oligonucleotide
augggccaguugucauaca

SEQ ID NO: 729529 - RNA, 19 nt, Artificial Sequence
  Description of Artificial Sequence: Synthetic oligonucleotide
agccgaagugacacacgga

SEQ ID NO: 729530 - RNA, 19 nt, Artificial Sequence
  Description of Artificial Sequence: Synthetic oligonucleotide
gccucagcgcagccgcgcg

SEQ ID NO: 729531 - RNA, 19 nt, Artificial Sequence
  Description of Artificial Sequence: Synthetic oligonucleotide
gguagccgagccgagccga

SEQ ID NO: 729532 - RNA, 19 nt, Artificial Sequence
  Description of Artificial Sequence: Synthetic oligonucleotide
ggguuaaaugcgccguccu

SEQ ID NO: 729533 - RNA, 19 nt, Artificial Sequence
  Description of Artificial Sequence: Synthetic oligonucleotide
gccgaaccgagccgagcgc

SEQ ID NO: 729534 - RNA, 19 nt, Artificial Sequence
  Description of Artificial Sequence: Synthetic oligonucleotide
cucgcgacucagguccuca

SEQ ID NO: 729535 - RNA, 19 nt, Artificial Sequence
  Description of Artificial Sequence: Synthetic oligonucleotide
gcuuuagugcugugcaaau

SEQ ID NO: 729536 - RNA, 19 nt, Artificial Sequence
  Description of Artificial Sequence: Synthetic oligonucleotide
cgaguaauucagccccaug

SEQ ID NO: 729537 - RNA, 19 nt, Artificial Sequence
  Description of Artificial Sequence: Synthetic oligonucleotide
gcgacacaucacaggauca

SEQ ID NO: 729538 - RNA, 19 nt, Artificial Sequence
  Description of Artificial Sequence: Synthetic oligonucleotide
gcuacacgccaaucuauau

SEQ ID NO: 729539 - RNA, 19 nt, Artificial Sequence
  Description of Artificial Sequence: Synthetic oligonucleotide
gcgagaggcgcgaggggag

SEQ ID NO: 729540 - RNA, 19 nt, Artificial Sequence
  Description of Artificial Sequence: Synthetic oligonucleotide
ccgccgagaggcucagcgc

SEQ ID NO: 729541 - RNA, 19 nt, Artificial Sequence
  Description of Artificial Sequence: Synthetic oligonucleotide
agagugggccagagguuua

SEQ ID NO: 729542 - RNA, 19 nt, Artificial Sequence
  Description of Artificial Sequence: Synthetic oligonucleotide
cggugauucacacgcccuc

SEQ ID NO: 729543 - RNA, 19 nt, Artificial Sequence
  Description of Artificial Sequence: Synthetic oligonucleotide
ccucuuuaucaacgcauua

SEQ ID NO: 729544 - RNA, 19 nt, Artificial Sequence
  Description of Artificial Sequence: Synthetic oligonucleotide
ccgagaggcucagcgcgcg

SEQ ID NO: 729545 - RNA, 19 nt, Artificial Sequence
  Description of Artificial Sequence: Synthetic oligonucleotide
gcucaugcuuuagugcugu

SEQ ID NO: 729546 - RNA, 19 nt, Artificial Sequence
  Description of Artificial Sequence: Synthetic oligonucleotide
gcucagcgcgcgcggcgcg

SEQ ID NO: 729547 - RNA, 19 nt, Artificial Sequence
  Description of Artificial Sequence: Synthetic oligonucleotide
caucgagcgcggggcugag

SEQ ID NO: 729548 - RNA, 19 nt, Artificial Sequence
  Description of Artificial Sequence: Synthetic oligonucleotide
cgcucaagggcauugacuu

SEQ ID NO: 729549 - RNA, 19 nt, Artificial Sequence
  Description of Artificial Sequence: Synthetic oligonucleotide
cagagucauucggggagaa

SEQ ID NO: 729550 - RNA, 19 nt, Artificial Sequence
  Description of Artificial Sequence: Synthetic oligonucleotide
ccucagcgcagccgcgcgg

SEQ ID NO: 729551 - RNA, 19 nt, Artificial Sequence
  Description of Artificial Sequence: Synthetic oligonucleotide
ccgagccgagcgcaacgcc

SEQ ID NO: 729552 - RNA, 19 nt, Artificial Sequence
  Description of Artificial Sequence: Synthetic oligonucleotide
gagaguguucuugguucuu

SEQ ID NO: 729553 - RNA, 19 nt, Artificial Sequence
  Description of Artificial Sequence: Synthetic oligonucleotide
cuccggccgccuccgcuuc

SEQ ID NO: 729554 - RNA, 19 nt, Artificial Sequence
  Description of Artificial Sequence: Synthetic oligonucleotide
guagccgagccgagccgaa

SEQ ID NO: 729555 - RNA, 19 nt, Artificial Sequence
  Description of Artificial Sequence: Synthetic oligonucleotide
gcgacgaaguguacagaua

SEQ ID NO: 729556 - RNA, 19 nt, Artificial Sequence
  Description of Artificial Sequence: Synthetic oligonucleotide
cgguagccgagccgagccg

SEQ ID NO: 729557 - RNA, 19 nt, Artificial Sequence
  Description of Artificial Sequence: Synthetic oligonucleotide
gggccgaaccgagccgagc

SEQ ID NO: 729558 - RNA, 19 nt, Artificial Sequence
  Description of Artificial Sequence: Synthetic oligonucleotide
ggcgcgaggggagcagauc

SEQ ID NO: 729559 - RNA, 19 nt, Artificial Sequence
  Description of Artificial Sequence: Synthetic oligonucleotide
gccccggcgacgaagugua

SEQ ID NO: 729560 - RNA, 19 nt, Artificial Sequence
  Description of Artificial Sequence: Synthetic oligonucleotide
cgccaaucuauauuugcau

SEQ ID NO: 729561 - RNA, 19 nt, Artificial Sequence
  Description of Artificial Sequence: Synthetic oligonucleotide
ccgcuucgcugccuuccgc

SEQ ID NO: 729562 - RNA, 19 nt, Artificial Sequence
  Description of Artificial Sequence: Synthetic oligonucleotide
ccgaaccgagccgagcgca

SEQ ID NO: 729563 - RNA, 19 nt, Artificial Sequence
  Description of Artificial Sequence: Synthetic oligonucleotide
cccggcgacgaaguguaca

SEQ ID NO: 729564 - RNA, 19 nt, Artificial Sequence
  Description of Artificial Sequence: Synthetic oligonucleotide
cugcaucgcguccccggcu

SEQ ID NO: 729565 - RNA, 19 nt, Artificial Sequence
  Description of Artificial Sequence: Synthetic oligonucleotide
gcggugauucacacgcccu

SEQ ID NO: 729566 - RNA, 19 nt, Artificial Sequence
  Description of Artificial Sequence: Synthetic oligonucleotide
agccacgcucaagggcauu

SEQ ID NO: 729567 - RNA, 19 nt, Artificial Sequence
  Description of Artificial Sequence: Synthetic oligonucleotide
cacgcccuggccgucuccu

SEQ ID NO: 729568 - RNA, 19 nt, Artificial Sequence
  Description of Artificial Sequence: Synthetic oligonucleotide
gggcauugacuucgccggu

SEQ ID NO: 729569 - RNA, 19 nt, Artificial Sequence
  Description of Artificial Sequence: Synthetic oligonucleotide
cgagaggcucagcgcgcgc

SEQ ID NO: 729570 - RNA, 19 nt, Artificial Sequence
  Description of Artificial Sequence: Synthetic oligonucleotide
ccgcgggcgccucagcgca

SEQ ID NO: 729571 - RNA, 19 nt, Artificial Sequence
  Description of Artificial Sequence: Synthetic oligonucleotide
gcgcgcagccacgcucaag

SEQ ID NO: 729572 - RNA, 19 nt, Artificial Sequence
  Description of Artificial Sequence: Synthetic oligonucleotide
ccacgcucaagggcauuga

SEQ ID NO: 729573 - RNA, 19 nt, Artificial Sequence
  Description of Artificial Sequence: Synthetic oligonucleotide
ccgaaccgggccgaaccga

SEQ ID NO: 729574 - RNA, 19 nt, Artificial Sequence
  Description of Artificial Sequence: Synthetic oligonucleotide
cagccacgcucaagggcau

SEQ ID NO: 729575 - RNA, 19 nt, Artificial Sequence
  Description of Artificial Sequence: Synthetic oligonucleotide
cgggccgaaccgagccgag

SEQ ID NO: 729576 - RNA, 19 nt, Artificial Sequence
  Description of Artificial Sequence: Synthetic oligonucleotide
ccgggacaugacuggacau

SEQ ID NO: 729577 - RNA, 19 nt, Artificial Sequence
  Description of Artificial Sequence: Synthetic oligonucleotide
cgaaccgagccgagcgcaa

SEQ ID NO: 729578 - RNA, 19 nt, Artificial Sequence
  Description of Artificial Sequence: Synthetic oligonucleotide
ccucgcgacucagguccuc

SEQ ID NO: 729579 - RNA, 19 nt, Artificial Sequence
  Description of Artificial Sequence: Synthetic oligonucleotide
cgccgguagccgagccgag

SEQ ID NO: 729580 - RNA, 19 nt, Artificial Sequence
  Description of Artificial Sequence: Synthetic oligonucleotide
ccccggcgacgaaguguac

SEQ ID NO: 729581 - RNA, 19 nt, Artificial Sequence
  Description of Artificial Sequence: Synthetic oligonucleotide
cgggcgccucagcgcagcc

SEQ ID NO: 729582 - RNA, 19 nt, Artificial Sequence
  Description of Artificial Sequence: Synthetic oligonucleotide
gccgcgccagguggacuga

SEQ ID NO: 729583 - RNA, 19 nt, Artificial Sequence
  Description of Artificial Sequence: Synthetic oligonucleotide
ccgaguaauucagccccau

SEQ ID NO: 729584 - RNA, 19 nt, Artificial Sequence
  Description of Artificial Sequence: Synthetic oligonucleotide
cggcugcaucgcguccccg

SEQ ID NO: 729585 - RNA, 19 nt, Artificial Sequence
  Description of Artificial Sequence: Synthetic oligonucleotide
cggcgacgaaguguacaga

SEQ ID NO: 729586 - RNA, 19 nt, Artificial Sequence
  Description of Artificial Sequence: Synthetic oligonucleotide
cccucgcgacucagguccu

SEQ ID NO: 729587 - RNA, 19 nt, Artificial Sequence
  Description of Artificial Sequence: Synthetic oligonucleotide
ugucauucagaauagaugg

SEQ ID NO: 729588 - RNA, 19 nt, Artificial Sequence
  Description of Artificial Sequence: Synthetic oligonucleotide
aaaauugacuuucaaaucu

SEQ ID NO: 729589 - RNA, 19 nt, Artificial Sequence
  Description of Artificial Sequence: Synthetic oligonucleotide
auuauguuccuucauacac

SEQ ID NO: 729590 - RNA, 19 nt, Artificial Sequence
  Description of Artificial Sequence: Synthetic oligonucleotide
auuaguuuguacuacacag

SEQ ID NO: 729591 - RNA, 19 nt, Artificial Sequence
  Description of Artificial Sequence: Synthetic oligonucleotide
agaauuauuauguuccuuc

SEQ ID NO: 729592 - RNA, 19 nt, Artificial Sequence
  Description of Artificial Sequence: Synthetic oligonucleotide
aaaacuagcuuccgaagcg

SEQ ID NO: 729593 - RNA, 19 nt, Artificial Sequence
  Description of Artificial Sequence: Synthetic oligonucleotide
uucaaauuauccugaaggg

SEQ ID NO: 729594 - RNA, 19 nt, Artificial Sequence
  Description of Artificial Sequence: Synthetic oligonucleotide
ugcaaugugguguagacug

SEQ ID NO: 729595 - RNA, 19 nt, Artificial Sequence
  Description of Artificial Sequence: Synthetic oligonucleotide
  modified_base (16)..(16): a, c, u, g, unknown or other
acaagcauggcuugunacg

SEQ ID NO: 729596 - RNA, 19 nt, Artificial Sequence
  Description of Artificial Sequence: Synthetic oligonucleotide
ugcaagaugauucauugcu

SEQ ID NO: 729597 - RNA, 19 nt, Artificial Sequence
  Description of Artificial Sequence: Synthetic oligonucleotide
ugguuuucggacaugagcc

SEQ ID NO: 729598 - RNA, 19 nt, Artificial Sequence
  Description of Artificial Sequence: Synthetic oligonucleotide
auuguauucauaaagcuug

SEQ ID NO: 729599 - RNA, 19 nt, Artificial Sequence
  Description of Artificial Sequence: Synthetic oligonucleotide
uucucaacaaucugaagag

SEQ ID NO: 729600 - RNA, 19 nt, Artificial Sequence
  Description of Artificial Sequence: Synthetic oligonucleotide
uguaagaacacuguugagc

SEQ ID NO: 729601 - RNA, 19 nt, Artificial Sequence
  Description of Artificial Sequence: Synthetic oligonucleotide
aaacugauagcgugggcac

SEQ ID NO: 729602 - RNA, 19 nt, Artificial Sequence
  Description of Artificial Sequence: Synthetic oligonucleotide
uccgaagcgauuuuguggg

SEQ ID NO: 729603 - RNA, 19 nt, Artificial Sequence
  Description of Artificial Sequence: Synthetic oligonucleotide
ugaguuaauuccuaccuca

SEQ ID NO: 729604 - RNA, 19 nt, Artificial Sequence
  Description of Artificial Sequence: Synthetic oligonucleotide
uugguuuucggacaugagc

SEQ ID NO: 729605 - RNA, 19 nt, Artificial Sequence
  Description of Artificial Sequence: Synthetic oligonucleotide
cuuuauaguggucacuggg

SEQ ID NO: 729606 - RNA, 19 nt, Artificial Sequence
  Description of Artificial Sequence: Synthetic oligonucleotide
ucaacauaagucuggacac

SEQ ID NO: 729607 - RNA, 19 nt, Artificial Sequence
  Description of Artificial Sequence: Synthetic oligonucleotide
uuguggguugcuuagaucu

SEQ ID NO: 729608 - RNA, 19 nt, Artificial Sequence
  Description of Artificial Sequence: Synthetic oligonucleotide
cuuuaggagaauuauuaug

SEQ ID NO: 729609 - RNA, 19 nt, Artificial Sequence
  Description of Artificial Sequence: Synthetic oligonucleotide
uguacuacacagcugucug

SEQ ID NO: 729610 - RNA, 19 nt, Artificial Sequence
  Description of Artificial Sequence: Synthetic oligonucleotide
aacauaagucuggacacac

SEQ ID NO: 729611 - RNA, 19 nt, Artificial Sequence
  Description of Artificial Sequence: Synthetic oligonucleotide
cuuaaucuuuccuguaacg

SEQ ID NO: 729612 - RNA, 19 nt, Artificial Sequence
  Description of Artificial Sequence: Synthetic oligonucleotide
auaagugccaaucuggcau

SEQ ID NO: 729613 - RNA, 19 nt, Artificial Sequence
  Description of Artificial Sequence: Synthetic oligonucleotide
agaauagauggcaugcugc

SEQ ID NO: 729614 - RNA, 19 nt, Artificial Sequence
  Description of Artificial Sequence: Synthetic oligonucleotide
uuccgaagcgauuuugugg

SEQ ID NO: 729615 - RNA, 19 nt, Artificial Sequence
  Description of Artificial Sequence: Synthetic oligonucleotide
uuuauaguggucacugggu

SEQ ID NO: 729616 - RNA, 19 nt, Artificial Sequence
  Description of Artificial Sequence: Synthetic oligonucleotide
ucagacuuauuuuaagcac

SEQ ID NO: 729617 - RNA, 19 nt, Artificial Sequence
  Description of Artificial Sequence: Synthetic oligonucleotide
uucugaggguacuauaucc

SEQ ID NO: 729618 - RNA, 19 nt, Artificial Sequence
  Description of Artificial Sequence: Synthetic oligonucleotide
ugaugaguggaucucuuug

SEQ ID NO: 729619 - RNA, 19 nt, Artificial Sequence
  Description of Artificial Sequence: Synthetic oligonucleotide
aaacucaauuucucuucac

SEQ ID NO: 729620 - RNA, 19 nt, Artificial Sequence
  Description of Artificial Sequence: Synthetic oligonucleotide
aaauugacuuucaaaucuc

SEQ ID NO: 729621 - RNA, 19 nt, Artificial Sequence
  Description of Artificial Sequence: Synthetic oligonucleotide
aaucaggaaagguuugggu

SEQ ID NO: 729622 - RNA, 19 nt, Artificial Sequence
  Description of Artificial Sequence: Synthetic oligonucleotide
uaguagugauuccagauuc

SEQ ID NO: 729623 - RNA, 19 nt, Artificial Sequence
  Description of Artificial Sequence: Synthetic oligonucleotide
uuaaucuuuccuguaacga

SEQ ID NO: 729624 - RNA, 19 nt, Artificial Sequence
  Description of Artificial Sequence: Synthetic oligonucleotide
gaauagcugaccuaugguc

SEQ ID NO: 729625 - RNA, 19 nt, Artificial Sequence
  Description of Artificial Sequence: Synthetic oligonucleotide
aauaagugccaaucuggca

SEQ ID NO: 729626 - RNA, 19 nt, Artificial Sequence
  Description of Artificial Sequence: Synthetic oligonucleotide
cuuguaagaacacuguuga

SEQ ID NO: 729627 - RNA, 19 nt, Artificial Sequence
  Description of Artificial Sequence: Synthetic oligonucleotide
gcacuuaucagacuuauug

SEQ ID NO: 729628 - RNA, 19 nt, Artificial Sequence
  Description of Artificial Sequence: Synthetic oligonucleotide
aauagcugaccuaugguca

SEQ ID NO: 729629 - RNA, 19 nt, Artificial Sequence
  Description of Artificial Sequence: Synthetic oligonucleotide
uucgacuuuauagugguca

SEQ ID NO: 729630 - RNA, 19 nt, Artificial Sequence
  Description of Artificial Sequence: Synthetic oligonucleotide
acugcaaucagugaugagu

SEQ ID NO: 729631 - RNA, 19 nt, Artificial Sequence
  Description of Artificial Sequence: Synthetic oligonucleotide
  modified_base (14)..(14): a, c, u, g, unknown or other
aagcauggcuugunacggg

SEQ ID NO: 729632 - RNA, 19 nt, Artificial Sequence
  Description of Artificial Sequence: Synthetic oligonucleotide
uucaugguugcucccaggc

SEQ ID NO: 729633 - RNA, 19 nt, Artificial Sequence
  Description of Artificial Sequence: Synthetic oligonucleotide
aaauuauccugaaggguag

SEQ ID NO: 729634 - RNA, 19 nt, Artificial Sequence
  Description of Artificial Sequence: Synthetic oligonucleotide
  modified_base (4)..(4): a, c, u, g, unknown or other
  modified_base (10)..(10): a, c, u, g, unknown or other
ugunacgggnguuucucaa

SEQ ID NO: 729635 - RNA, 19 nt, Artificial Sequence
  Description of Artificial Sequence: Synthetic oligonucleotide
uuugucagacuuauuuuaa

SEQ ID NO: 729636 - RNA, 19 nt, Artificial Sequence
  Description of Artificial Sequence: Synthetic oligonucleotide
uguugagccgcagagcggg

SEQ ID NO: 729637 - RNA, 19 nt, Artificial Sequence
  Description of Artificial Sequence: Synthetic oligonucleotide
ucaaauuauccugaagggu

SEQ ID NO: 729638 - RNA, 19 nt, Artificial Sequence
  Description of Artificial Sequence: Synthetic oligonucleotide
ugaccuauggucacauucu

SEQ ID NO: 729639 - RNA, 19 nt, Artificial Sequence
  Description of Artificial Sequence: Synthetic oligonucleotide
auagcugaccuauggucac

SEQ ID NO: 729640 - RNA, 19 nt, Artificial Sequence
  Description of Artificial Sequence: Synthetic oligonucleotide
cuggacuuaaucuuuccug

SEQ ID NO: 729641 - RNA, 19 nt, Artificial Sequence
  Description of Artificial Sequence: Synthetic oligonucleotide
ucuauuuugucagacuuau

SEQ ID NO: 729642 - RNA, 19 nt, Artificial Sequence
  Description of Artificial Sequence: Synthetic oligonucleotide
uaggagaauuauuauguuc

SEQ ID NO: 729643 - RNA, 19 nt, Artificial Sequence
  Description of Artificial Sequence: Synthetic oligonucleotide
uuauaguggucacuggguc

SEQ ID NO: 729644 - RNA, 19 nt, Artificial Sequence
  Description of Artificial Sequence: Synthetic oligonucleotide
aggaauggaguucagcaga

SEQ ID NO: 729645 - RNA, 19 nt, Artificial Sequence
  Description of Artificial Sequence: Synthetic oligonucleotide
gucagacuuauuuuaagca

SEQ ID NO: 729646 - RNA, 19 nt, Artificial Sequence
  Description of Artificial Sequence: Synthetic oligonucleotide
  modified_base (2)..(2): a, c, u, g, unknown or other
  modified_base (8)..(8): a, c, u, g, unknown or other
unacgggnguuucucaaca

SEQ ID NO: 729647 - RNA, 19 nt, Artificial Sequence
  Description of Artificial Sequence: Synthetic oligonucleotide
acuauauccgccucucugu

SEQ ID NO: 729648 - RNA, 19 nt, Artificial Sequence
  Description of Artificial Sequence: Synthetic oligonucleotide
ugaggguacuauauccgcc

SEQ ID NO: 729649 - RNA, 19 nt, Artificial Sequence
  Description of Artificial Sequence: Synthetic oligonucleotide
acuuaucagacuuauugua

SEQ ID NO: 729650 - RNA, 19 nt, Artificial Sequence
  Description of Artificial Sequence: Synthetic oligonucleotide
gaaucaggaaagguuuggg

SEQ ID NO: 729651 - RNA, 19 nt, Artificial Sequence
  Description of Artificial Sequence: Synthetic oligonucleotide
ucgauuucagaguuacugu

SEQ ID NO: 729652 - RNA, 19 nt, Artificial Sequence
  Description of Artificial Sequence: Synthetic oligonucleotide
ugacuuuggguccccauga

SEQ ID NO: 729653 - RNA, 19 nt, Artificial Sequence
  Description of Artificial Sequence: Synthetic oligonucleotide
uugaaucaggaaagguuug

SEQ ID NO: 729654 - RNA, 19 nt, Artificial Sequence
  Description of Artificial Sequence: Synthetic oligonucleotide
uguaacgaggaauggaguu

SEQ ID NO: 729655 - RNA, 19 nt, Artificial Sequence
  Description of Artificial Sequence: Synthetic oligonucleotide
uggcggcccauaaagauug

SEQ ID NO: 729656 - RNA, 19 nt, Artificial Sequence
  Description of Artificial Sequence: Synthetic oligonucleotide
aggcauucgacuuuauagu

SEQ ID NO: 729657 - RNA, 19 nt, Artificial Sequence
  Description of Artificial Sequence: Synthetic oligonucleotide
cuuauuuuaagcacugugu

SEQ ID NO: 729658 - RNA, 19 nt, Artificial Sequence
  Description of Artificial Sequence: Synthetic oligonucleotide
acuuuauaguggucacugg

SEQ ID NO: 729659 - RNA, 19 nt, Artificial Sequence
  Description of Artificial Sequence: Synthetic oligonucleotide
ugcugaaaucaucaaugcu

SEQ ID NO: 729660 - RNA, 19 nt, Artificial Sequence
  Description of Artificial Sequence: Synthetic oligonucleotide
auaugcugcugccaauauc

SEQ ID NO: 729661 - RNA, 19 nt, Artificial Sequence
  Description of Artificial Sequence: Synthetic oligonucleotide
cugaccuauggucacauuc

SEQ ID NO: 729662 - RNA, 19 nt, Artificial Sequence
  Description of Artificial Sequence: Synthetic oligonucleotide
caucuggcggcccauaaag

SEQ ID NO: 729663 - RNA, 19 nt, Artificial Sequence
  Description of Artificial Sequence: Synthetic oligonucleotide
ucuuggugagucugggaag

SEQ ID NO: 729664 - RNA, 19 nt, Artificial Sequence
  Description of Artificial Sequence: Synthetic oligonucleotide
  modified_base (15)..(15): a, c, u, g, unknown or other
caagcauggcuugunacgg

SEQ ID NO: 729665 - RNA, 19 nt, Artificial Sequence
  Description of Artificial Sequence: Synthetic oligonucleotide
ugcagcuaugcuuucuucu

SEQ ID NO: 729666 - RNA, 19 nt, Artificial Sequence
  Description of Artificial Sequence: Synthetic oligonucleotide
caugccuugacaaaggacu

SEQ ID NO: 729667 - RNA, 19 nt, Artificial Sequence
  Description of Artificial Sequence: Synthetic oligonucleotide
uaauuccuaccucagccuc

SEQ ID NO: 729668 - RNA, 19 nt, Artificial Sequence
  Description of Artificial Sequence: Synthetic oligonucleotide
aacugauagcgugggcacc

SEQ ID NO: 729669 - RNA, 19 nt, Artificial Sequence
  Description of Artificial Sequence: Synthetic oligonucleotide
guauucauaaagcuugucu

SEQ ID NO: 729670 - RNA, 19 nt, Artificial Sequence
  Description of Artificial Sequence: Synthetic oligonucleotide
cuuucguaguagcuggggc

SEQ ID NO: 729671 - RNA, 19 nt, Artificial Sequence
  Description of Artificial Sequence: Synthetic oligonucleotide
uguccgugaguuaauuccu

SEQ ID NO: 729672 - RNA, 19 nt, Artificial Sequence
  Description of Artificial Sequence: Synthetic oligonucleotide
cuggacuuaguagugauuc

SEQ ID NO: 729673 - RNA, 19 nt, Artificial Sequence
  Description of Artificial Sequence: Synthetic oligonucleotide
uuuuaagcacuguguguca

SEQ ID NO: 729674 - RNA, 19 nt, Artificial Sequence
  Description of Artificial Sequence: Synthetic oligonucleotide
guugcugguugauacaauc

SEQ ID NO: 729675 - RNA, 19 nt, Artificial Sequence
  Description of Artificial Sequence: Synthetic oligonucleotide
ucuuugucuugaauaugcu

SEQ ID NO: 729676 - RNA, 19 nt, Artificial Sequence
  Description of Artificial Sequence: Synthetic oligonucleotide
cuugacauggcuguccgug

SEQ ID NO: 729677 - RNA, 19 nt, Artificial Sequence
  Description of Artificial Sequence: Synthetic oligonucleotide
aagucaucggacauguuau

SEQ ID NO: 729678 - RNA, 19 nt, Artificial Sequence
  Description of Artificial Sequence: Synthetic oligonucleotide
agaugauucauugcuguga

SEQ ID NO: 729679 - RNA, 19 nt, Artificial Sequence
  Description of Artificial Sequence: Synthetic oligonucleotide
gaagcgauuuugugggcug

SEQ ID NO: 729680 - RNA, 19 nt, Artificial Sequence
  Description of Artificial Sequence: Synthetic oligonucleotide
uucaugccuugacaaagga

SEQ ID NO: 729681 - RNA, 19 nt, Artificial Sequence
  Description of Artificial Sequence: Synthetic oligonucleotide
gcugcaagaugauucauug

SEQ ID NO: 729682 - RNA, 19 nt, Artificial Sequence
  Description of Artificial Sequence: Synthetic oligonucleotide
acugauagcgugggcaccg

SEQ ID NO: 729683 - RNA, 19 nt, Artificial Sequence
  Description of Artificial Sequence: Synthetic oligonucleotide
ucaacuuagcucugcacuu

SEQ ID NO: 729684 - RNA, 19 nt, Artificial Sequence
  Description of Artificial Sequence: Synthetic oligonucleotide
gacuuaguagugauuccag

SEQ ID NO: 729685 - RNA, 19 nt, Artificial Sequence
  Description of Artificial Sequence: Synthetic oligonucleotide
uuucaugguugcucccagg

SEQ ID NO: 729686 - RNA, 19 nt, Artificial Sequence
  Description of Artificial Sequence: Synthetic oligonucleotide
ccuguaacgaggaauggag

SEQ ID NO: 729687 - RNA, 19 nt, Artificial Sequence
  Description of Artificial Sequence: Synthetic oligonucleotide
uggucucuaggacgaagag

SEQ ID NO: 729688 - RNA, 19 nt, Artificial Sequence
  Description of Artificial Sequence: Synthetic oligonucleotide
uaggacgaagagcagcuuc

SEQ ID NO: 729689 - RNA, 19 nt, Artificial Sequence
  Description of Artificial Sequence: Synthetic oligonucleotide
uaaugcuguggccucuucu

SEQ ID NO: 729690 - RNA, 19 nt, Artificial Sequence
  Description of Artificial Sequence: Synthetic oligonucleotide
auaagucuggacacacugg

SEQ ID NO: 729691 - RNA, 19 nt, Artificial Sequence
  Description of Artificial Sequence: Synthetic oligonucleotide
auugucauucagaauagau

SEQ ID NO: 729692 - RNA, 19 nt, Artificial Sequence
  Description of Artificial Sequence: Synthetic oligonucleotide
gugcugaaaucaucaaugc

SEQ ID NO: 729693 - RNA, 19 nt, Artificial Sequence
  Description of Artificial Sequence: Synthetic oligonucleotide
ucccuuguaagaacacugu

SEQ ID NO: 729694 - RNA, 19 nt, Artificial Sequence
  Description of Artificial Sequence: Synthetic oligonucleotide
ggcccauaaagauuguugc

SEQ ID NO: 729695 - RNA, 19 nt, Artificial Sequence
  Description of Artificial Sequence: Synthetic oligonucleotide
ugucacacggcugcucugg

SEQ ID NO: 729696 - RNA, 19 nt, Artificial Sequence
  Description of Artificial Sequence: Synthetic oligonucleotide
ugguguagacugaccauga

SEQ ID NO: 729697 - RNA, 19 nt, Artificial Sequence
  Description of Artificial Sequence: Synthetic oligonucleotide
uggacuuaguagugauucc

SEQ ID NO: 729698 - RNA, 19 nt, Artificial Sequence
  Description of Artificial Sequence: Synthetic oligonucleotide
cacugugugucacuauuag

SEQ ID NO: 729699 - RNA, 19 nt, Artificial Sequence
  Description of Artificial Sequence: Synthetic oligonucleotide
ucuggcggcccauaaagau

SEQ ID NO: 729700 - RNA, 19 nt, Artificial Sequence
  Description of Artificial Sequence: Synthetic oligonucleotide
ucgacuuuauaguggucac

SEQ ID NO: 729701 - RNA, 19 nt, Artificial Sequence
  Description of Artificial Sequence: Synthetic oligonucleotide
auuguugcugguugauaca

SEQ ID NO: 729702 - RNA, 19 nt, Artificial Sequence
  Description of Artificial Sequence: Synthetic oligonucleotide
caucggacauguuaugguc

SEQ ID NO: 729703 - RNA, 19 nt, Artificial Sequence
  Description of Artificial Sequence: Synthetic oligonucleotide
uucccugacuucaguaugu

SEQ ID NO: 729704 - RNA, 19 nt, Artificial Sequence
  Description of Artificial Sequence: Synthetic oligonucleotide
uuaggagaauuauuauguu

SEQ ID NO: 729705 - RNA, 19 nt, Artificial Sequence
  Description of Artificial Sequence: Synthetic oligonucleotide
uggucaaguguucaacaua

SEQ ID NO: 729706 - RNA, 19 nt, Artificial Sequence
  Description of Artificial Sequence: Synthetic oligonucleotide
ccuuguaagaacacuguug

SEQ ID NO: 729707 - RNA, 19 nt, Artificial Sequence
  Description of Artificial Sequence: Synthetic oligonucleotide
aaacuagcuuccgaagcga

SEQ ID NO: 729708 - RNA, 19 nt, Artificial Sequence
  Description of Artificial Sequence: Synthetic oligonucleotide
ugcugcacgagcuuuccuc

SEQ ID NO: 729709 - RNA, 19 nt, Artificial Sequence
  Description of Artificial Sequence: Synthetic oligonucleotide
acgaggaauggaguucagc

SEQ ID NO: 729710 - RNA, 19 nt, Artificial Sequence
  Description of Artificial Sequence: Synthetic oligonucleotide
aguguucaacauaagucug

SEQ ID NO: 729711 - RNA, 19 nt, Artificial Sequence
  Description of Artificial Sequence: Synthetic oligonucleotide
guuugggucugcaaacugc

SEQ ID NO: 729712 - RNA, 19 nt, Artificial Sequence
  Description of Artificial Sequence: Synthetic oligonucleotide
  modified_base (6)..(6): a, c, u, g, unknown or other
  modified_base (12)..(12): a, c, u, g, unknown or other
cuugunacgggnguuucuc

SEQ ID NO: 729713 - RNA, 19 nt, Artificial Sequence
  Description of Artificial Sequence: Synthetic oligonucleotide
aucaaagucaucggacaug

SEQ ID NO: 729714 - RNA, 19 nt, Artificial Sequence
  Description of Artificial Sequence: Synthetic oligonucleotide
ugaaaucaucaaugcuuga

SEQ ID NO: 729715 - RNA, 19 nt, Artificial Sequence
  Description of Artificial Sequence: Synthetic oligonucleotide
  modified_base (5)..(5): a, c, u, g, unknown or other
  modified_base (11)..(11): a, c, u, g, unknown or other
uugunacgggnguuucuca

SEQ ID NO: 729716 - RNA, 19 nt, Artificial Sequence
  Description of Artificial Sequence: Synthetic oligonucleotide
uuuaagcacugugugucac

SEQ ID NO: 729717 - RNA, 19 nt, Artificial Sequence
  Description of Artificial Sequence: Synthetic oligonucleotide
auguucuugugucaguauu

SEQ ID NO: 729718 - RNA, 19 nt, Artificial Sequence
  Description of Artificial Sequence: Synthetic oligonucleotide
agacuuauuuuaagcacug

SEQ ID NO: 729719 - RNA, 19 nt, Artificial Sequence
  Description of Artificial Sequence: Synthetic oligonucleotide
caguuugauucaaauuauc

SEQ ID NO: 729720 - RNA, 19 nt, Artificial Sequence
  Description of Artificial Sequence: Synthetic oligonucleotide
aguauguucuugugucagu

SEQ ID NO: 729721 - RNA, 19 nt, Artificial Sequence
  Description of Artificial Sequence: Synthetic oligonucleotide
ggcauucgacuuuauagug

SEQ ID NO: 729722 - RNA, 19 nt, Artificial Sequence
  Description of Artificial Sequence: Synthetic oligonucleotide
uacucuugcugugacgugu

SEQ ID NO: 729723 - RNA, 19 nt, Artificial Sequence
  Description of Artificial Sequence: Synthetic oligonucleotide
ugagcccuucuuuucagau

SEQ ID NO: 729724 - RNA, 19 nt, Artificial Sequence
  Description of Artificial Sequence: Synthetic oligonucleotide
cugcaagaugauucauugc

SEQ ID NO: 729725 - RNA, 19 nt, Artificial Sequence
  Description of Artificial Sequence: Synthetic oligonucleotide
  modified_base (3)..(3): a, c, u, g, unknown or other
  modified_base (9)..(9): a, c, u, g, unknown or other
gunacgggnguuucucaac

SEQ ID NO: 729726 - RNA, 19 nt, Artificial Sequence
  Description of Artificial Sequence: Synthetic oligonucleotide
ugugguguagacugaccau

SEQ ID NO: 729727 - RNA, 19 nt, Artificial Sequence
  Description of Artificial Sequence: Synthetic oligonucleotide
uccgugaguuaauuccuac

SEQ ID NO: 729728 - RNA, 19 nt, Artificial Sequence
  Description of Artificial Sequence: Synthetic oligonucleotide
gacuuauuguauucauaaa

SEQ ID NO: 729729 - RNA, 19 nt, Artificial Sequence
  Description of Artificial Sequence: Synthetic oligonucleotide
cacuauuaguuuguacuac

SEQ ID NO: 729730 - RNA, 19 nt, Artificial Sequence
  Description of Artificial Sequence: Synthetic oligonucleotide
ugaguggaucucuuugcaa

SEQ ID NO: 729731 - RNA, 19 nt, Artificial Sequence
  Description of Artificial Sequence: Synthetic oligonucleotide
aguucugaggguacuauau

SEQ ID NO: 729732 - RNA, 19 nt, Artificial Sequence
  Description of Artificial Sequence: Synthetic oligonucleotide
uuaaaucagugguucuguu

SEQ ID NO: 729733 - RNA, 19 nt, Artificial Sequence
  Description of Artificial Sequence: Synthetic oligonucleotide
ccauuauuccauuauuguc

SEQ ID NO: 729734 - RNA, 19 nt, Artificial Sequence
  Description of Artificial Sequence: Synthetic oligonucleotide
aauuauccugaaggguaga

SEQ ID NO: 729735 - RNA, 19 nt, Artificial Sequence
  Description of Artificial Sequence: Synthetic oligonucleotide
cuauauccgccucucugug

SEQ ID NO: 729736 - RNA, 19 nt, Artificial Sequence
  Description of Artificial Sequence: Synthetic oligonucleotide
gugguguagacugaccaug

SEQ ID NO: 729737 - RNA, 19 nt, Artificial Sequence
  Description of Artificial Sequence: Synthetic oligonucleotide
cauuucaacuuagcucugc

SEQ ID NO: 729738 - RNA, 19 nt, Artificial Sequence
  Description of Artificial Sequence: Synthetic oligonucleotide
aucaaugcuugagauggcu

SEQ ID NO: 729739 - RNA, 19 nt, Artificial Sequence
  Description of Artificial Sequence: Synthetic oligonucleotide
gugaguuaauuccuaccuc

SEQ ID NO: 729740 - RNA, 19 nt, Artificial Sequence
  Description of Artificial Sequence: Synthetic oligonucleotide
aauuccuaccucagccuca

SEQ ID NO: 729741 - RNA, 19 nt, Artificial Sequence
  Description of Artificial Sequence: Synthetic oligonucleotide
agucaucggacauguuaug

SEQ ID NO: 729742 - RNA, 19 nt, Artificial Sequence
  Description of Artificial Sequence: Synthetic oligonucleotide
ucggacauguuauggucuc

SEQ ID NO: 729743 - RNA, 19 nt, Artificial Sequence
  Description of Artificial Sequence: Synthetic oligonucleotide
ucgccaagggcgcggacgc

SEQ ID NO: 729744 - RNA, 19 nt, Artificial Sequence
  Description of Artificial Sequence: Synthetic oligonucleotide
aggguacuauauccgccuc

SEQ ID NO: 729745 - RNA, 19 nt, Artificial Sequence
  Description of Artificial Sequence: Synthetic oligonucleotide
uggguugcuuagaucucug

SEQ ID NO: 729746 - RNA, 19 nt, Artificial Sequence
  Description of Artificial Sequence: Synthetic oligonucleotide
uauauccgccucucugugu

SEQ ID NO: 729747 - RNA, 19 nt, Artificial Sequence
  Description of Artificial Sequence: Synthetic oligonucleotide
ugcucccuaucucccagca

SEQ ID NO: 729748 - RNA, 19 nt, Artificial Sequence
  Description of Artificial Sequence: Synthetic oligonucleotide
ugaauaugcugcugccaau

SEQ ID NO: 729749 - RNA, 19 nt, Artificial Sequence
  Description of Artificial Sequence: Synthetic oligonucleotide
cagacuuauuuuaagcacu

SEQ ID NO: 729750 - RNA, 19 nt, Artificial Sequence
  Description of Artificial Sequence: Synthetic oligonucleotide
ccugccuucagauaaauua

SEQ ID NO: 729751 - RNA, 19 nt, Artificial Sequence
  Description of Artificial Sequence: Synthetic oligonucleotide
gcauucgacuuuauagugg

SEQ ID NO: 729752 - RNA, 19 nt, Artificial Sequence
  Description of Artificial Sequence: Synthetic oligonucleotide
guucugaggguacuauauc

SEQ ID NO: 729753 - RNA, 19 nt, Artificial Sequence
  Description of Artificial Sequence: Synthetic oligonucleotide
uuacucuugcugugacgug

SEQ ID NO: 729754 - RNA, 19 nt, Artificial Sequence
  Description of Artificial Sequence: Synthetic oligonucleotide
gguuccuggacuuaguagu

SEQ ID NO: 729755 - RNA, 19 nt, Artificial Sequence
  Description of Artificial Sequence: Synthetic oligonucleotide
cauucgacuuuauaguggu

SEQ ID NO: 729756 - RNA, 19 nt, Artificial Sequence
  Description of Artificial Sequence: Synthetic oligonucleotide
gaggguacuauauccgccu

SEQ ID NO: 729757 - RNA, 19 nt, Artificial Sequence
  Description of Artificial Sequence: Synthetic oligonucleotide
cuaucucccagcaaugagu

SEQ ID NO: 729758 - RNA, 19 nt, Artificial Sequence
  Description of Artificial Sequence: Synthetic oligonucleotide
gauagcgugggcaccggca

SEQ ID NO: 729759 - RNA, 19 nt, Artificial Sequence
  Description of Artificial Sequence: Synthetic oligonucleotide
uuuucggacaugagcccuu

SEQ ID NO: 729760 - RNA, 19 nt, Artificial Sequence
  Description of Artificial Sequence: Synthetic oligonucleotide
acgugugcugcucccuauc

SEQ ID NO: 729761 - RNA, 19 nt, Artificial Sequence
  Description of Artificial Sequence: Synthetic oligonucleotide
cacgccaccgccaccgcgc

SEQ ID NO: 729762 - RNA, 19 nt, Artificial Sequence
  Description of Artificial Sequence: Synthetic oligonucleotide
accuauggucacauucuuc

SEQ ID NO: 729763 - RNA, 19 nt, Artificial Sequence
  Description of Artificial Sequence: Synthetic oligonucleotide
uuccaucuauuuugucaga

SEQ ID NO: 729764 - RNA, 19 nt, Artificial Sequence
  Description of Artificial Sequence: Synthetic oligonucleotide
  modified_base (6)..(6): a, c, u, g, unknown or other
acgggnguuucucaacaau

SEQ ID NO: 729765 - RNA, 19 nt, Artificial Sequence
  Description of Artificial Sequence: Synthetic oligonucleotide
aauaaugcuguggccucuu

SEQ ID NO: 729766 - RNA, 19 nt, Artificial Sequence
  Description of Artificial Sequence: Synthetic oligonucleotide
caaugugguguagacugac

SEQ ID NO: 729767 - RNA, 19 nt, Artificial Sequence
  Description of Artificial Sequence: Synthetic oligonucleotide
uuauccugaaggguagauu

SEQ ID NO: 729768 - RNA, 19 nt, Artificial Sequence
  Description of Artificial Sequence: Synthetic oligonucleotide
aguuuguacuacacagcug

SEQ ID NO: 729769 - RNA, 19 nt, Artificial Sequence
  Description of Artificial Sequence: Synthetic oligonucleotide
ucgcggcaucgccacaggg

SEQ ID NO: 729770 - RNA, 19 nt, Artificial Sequence
  Description of Artificial Sequence: Synthetic oligonucleotide
auuauccugaaggguagau

SEQ ID NO: 729771 - RNA, 19 nt, Artificial Sequence
  Description of Artificial Sequence: Synthetic oligonucleotide
cucgccaagggcgcggacg

SEQ ID NO: 729772 - RNA, 19 nt, Artificial Sequence
  Description of Artificial Sequence: Synthetic oligonucleotide
gaccaugaggccugccuuc

SEQ ID NO: 729773 - RNA, 19 nt, Artificial Sequence
  Description of Artificial Sequence: Synthetic oligonucleotide
agagauugcuuuccaucua

SEQ ID NO: 729774 - RNA, 19 nt, Artificial Sequence
  Description of Artificial Sequence: Synthetic oligonucleotide
ugcugccaauauccaaacu

SEQ ID NO: 729775 - RNA, 19 nt, Artificial Sequence
  Description of Artificial Sequence: Synthetic oligonucleotide
cacuuaucagacuuauugu

SEQ ID NO: 729776 - RNA, 19 nt, Artificial Sequence
  Description of Artificial Sequence: Synthetic oligonucleotide
gaaggguagauuucuucau

SEQ ID NO: 729777 - RNA, 19 nt, Artificial Sequence
  Description of Artificial Sequence: Synthetic oligonucleotide
ugcuuagaucucugcucug

SEQ ID NO: 729778 - RNA, 19 nt, Artificial Sequence
  Description of Artificial Sequence: Synthetic oligonucleotide
aguagugauuccagauucu

SEQ ID NO: 729779 - RNA, 19 nt, Artificial Sequence
  Description of Artificial Sequence: Synthetic oligonucleotide
gagauugcuuuccaucuau

SEQ ID NO: 729780 - RNA, 19 nt, Artificial Sequence
  Description of Artificial Sequence: Synthetic oligonucleotide
ucacacggcugcucugggc

SEQ ID NO: 729781 - RNA, 19 nt, Artificial Sequence
  Description of Artificial Sequence: Synthetic oligonucleotide
uuccuggacuuaguaguga

SEQ ID NO: 729782 - RNA, 19 nt, Artificial Sequence
  Description of Artificial Sequence: Synthetic oligonucleotide
  modified_base (13)..(13): a, c, u, g, unknown or other
  modified_base (19)..(19): a, c, u, g, unknown or other
agcauggcuugunacgggn

SEQ ID NO: 729783 - RNA, 19 nt, Artificial Sequence
  Description of Artificial Sequence: Synthetic oligonucleotide
uggcccacccuuucguagu

SEQ ID NO: 729784 - RNA, 19 nt, Artificial Sequence
  Description of Artificial Sequence: Synthetic oligonucleotide
gcugcacgagcuuuccucc

SEQ ID NO: 729785 - RNA, 19 nt, Artificial Sequence
  Description of Artificial Sequence: Synthetic oligonucleotide
agacugaccaugaggccug

SEQ ID NO: 729786 - RNA, 19 nt, Artificial Sequence
  Description of Artificial Sequence: Synthetic oligonucleotide
ggacuuaguagugauucca

SEQ ID NO: 729787 - RNA, 19 nt, Artificial Sequence
  Description of Artificial Sequence: Synthetic oligonucleotide
agcgauuuugugggcuguc

SEQ ID NO: 729788 - RNA, 19 nt, Artificial Sequence
  Description of Artificial Sequence: Synthetic oligonucleotide
cagagcggguuuugcuucc

SEQ ID NO: 729789 - RNA, 19 nt, Artificial Sequence
  Description of Artificial Sequence: Synthetic oligonucleotide
ugcacuuaucagacuuauu

SEQ ID NO: 729790 - RNA, 19 nt, Artificial Sequence
  Description of Artificial Sequence: Synthetic oligonucleotide
aguucuuuguggguugcuu

SEQ ID NO: 729791 - RNA, 19 nt, Artificial Sequence
  Description of Artificial Sequence: Synthetic oligonucleotide
cagacuuauuguauucaua

SEQ ID NO: 729792 - RNA, 19 nt, Artificial Sequence
  Description of Artificial Sequence: Synthetic oligonucleotide
ugacgugugcugcucccua

SEQ ID NO: 729793 - RNA, 19 nt, Artificial Sequence
  Description of Artificial Sequence: Synthetic oligonucleotide
gguacuauauccgccucuc

SEQ ID NO: 729794 - RNA, 19 nt, Artificial Sequence
  Description of Artificial Sequence: Synthetic oligonucleotide
acaucuggcggcccauaaa

SEQ ID NO: 729795 - RNA, 19 nt, Artificial Sequence
  Description of Artificial Sequence: Synthetic oligonucleotide
agcuuccgaagcgauuuug

SEQ ID NO: 729796 - RNA, 19 nt, Artificial Sequence
  Description of Artificial Sequence: Synthetic oligonucleotide
ccgugaguuaauuccuacc

SEQ ID NO: 729797 - RNA, 19 nt, Artificial Sequence
  Description of Artificial Sequence: Synthetic oligonucleotide
ccuaucucccagcaaugag

SEQ ID NO: 729798 - RNA, 19 nt, Artificial Sequence
  Description of Artificial Sequence: Synthetic oligonucleotide
gucacacggcugcucuggg

SEQ ID NO: 729799 - RNA, 19 nt, Artificial Sequence
  Description of Artificial Sequence: Synthetic oligonucleotide
uggucacauucuucuguaa

SEQ ID NO: 729800 - RNA, 19 nt, Artificial Sequence
  Description of Artificial Sequence: Synthetic oligonucleotide
ccuauggucacauucuucu

SEQ ID NO: 729801 - RNA, 19 nt, Artificial Sequence
  Description of Artificial Sequence: Synthetic oligonucleotide
agguuugggucugcaaacu

SEQ ID NO: 729802 - RNA, 19 nt, Artificial Sequence
  Description of Artificial Sequence: Synthetic oligonucleotide
auucgacuuuauagugguc

SEQ ID NO: 729803 - RNA, 19 nt, Artificial Sequence
  Description of Artificial Sequence: Synthetic oligonucleotide
augauucauugcugugaau

SEQ ID NO: 729804 - RNA, 19 nt, Artificial Sequence
  Description of Artificial Sequence: Synthetic oligonucleotide
gguugcuuagaucucugcu

SEQ ID NO: 729805 - RNA, 19 nt, Artificial Sequence
  Description of Artificial Sequence: Synthetic oligonucleotide
acauaagucuggacacacu

SEQ ID NO: 729806 - RNA, 19 nt, Artificial Sequence
  Description of Artificial Sequence: Synthetic oligonucleotide
ugucucuuucaugguugcu

SEQ ID NO: 729807 - RNA, 19 nt, Artificial Sequence
  Description of Artificial Sequence: Synthetic oligonucleotide
uccugccuucagauaaauu

SEQ ID NO: 729808 - RNA, 19 nt, Artificial Sequence
  Description of Artificial Sequence: Synthetic oligonucleotide
agcggguuuugcuuccauu

SEQ ID NO: 729809 - RNA, 19 nt, Artificial Sequence
  Description of Artificial Sequence: Synthetic oligonucleotide
gucguggcgcacgccaccg

SEQ ID NO: 729810 - RNA, 19 nt, Artificial Sequence
  Description of Artificial Sequence: Synthetic oligonucleotide
cauaaagauuguugcuggu

SEQ ID NO: 729811 - RNA, 19 nt, Artificial Sequence
  Description of Artificial Sequence: Synthetic oligonucleotide
gaacacuguugagccgcag

SEQ ID NO: 729812 - RNA, 19 nt, Artificial Sequence
  Description of Artificial Sequence: Synthetic oligonucleotide
  modified_base (9)..(9): a, c, u, g, unknown or other
  modified_base (15)..(15): a, c, u, g, unknown or other
uggcuugunacgggnguuu

SEQ ID NO: 729813 - RNA, 19 nt, Artificial Sequence
  Description of Artificial Sequence: Synthetic oligonucleotide
uuccucagacaagcauggc

SEQ ID NO: 729814 - RNA, 19 nt, Artificial Sequence
  Description of Artificial Sequence: Synthetic oligonucleotide
uuucggacaugagcccuuc

SEQ ID NO: 729815 - RNA, 19 nt, Artificial Sequence
  Description of Artificial Sequence: Synthetic oligonucleotide
ggguagauuucuucauuaa

SEQ ID NO: 729816 - RNA, 19 nt, Artificial Sequence
  Description of Artificial Sequence: Synthetic oligonucleotide
  modified_base (4)..(4): a, c, u, g, unknown or other
gggnguuucucaacaaucu

SEQ ID NO: 729817 - RNA, 19 nt, Artificial Sequence
  Description of Artificial Sequence: Synthetic oligonucleotide
  modified_base (5)..(5): a, c, u, g, unknown or other
cgggnguuucucaacaauc

SEQ ID NO: 729818 - RNA, 19 nt, Artificial Sequence
  Description of Artificial Sequence: Synthetic oligonucleotide
ggagaauuauuauguuccu

SEQ ID NO: 729819 - RNA, 19 nt, Artificial Sequence
  Description of Artificial Sequence: Synthetic oligonucleotide
acgcgguggggucguggcg

SEQ ID NO: 729820 - RNA, 19 nt, Artificial Sequence
  Description of Artificial Sequence: Synthetic oligonucleotide
guggucaaguguucaacau

SEQ ID NO: 729821 - RNA, 19 nt, Artificial Sequence
  Description of Artificial Sequence: Synthetic oligonucleotide
uggcgcacgccaccgccac

SEQ ID NO: 729822 - RNA, 19 nt, Artificial Sequence
  Description of Artificial Sequence: Synthetic oligonucleotide
ccugaucccucugaucugc

SEQ ID NO: 729823 - RNA, 19 nt, Artificial Sequence
  Description of Artificial Sequence: Synthetic oligonucleotide
cuagcuuccgaagcgauuu

SEQ ID NO: 729824 - RNA, 19 nt, Artificial Sequence
  Description of Artificial Sequence: Synthetic oligonucleotide
ccuuucguaguagcugggg

SEQ ID NO: 729825 - RNA, 19 nt, Artificial Sequence
  Description of Artificial Sequence: Synthetic oligonucleotide
uagcugaccuauggucaca

SEQ ID NO: 729826 - RNA, 19 nt, Artificial Sequence
  Description of Artificial Sequence: Synthetic oligonucleotide
gcagagcggguuuugcuuc

SEQ ID NO: 729827 - RNA, 19 nt, Artificial Sequence
  Description of Artificial Sequence: Synthetic oligonucleotide
uuccugccuucagauaaau

SEQ ID NO: 729828 - RNA, 19 nt, Artificial Sequence
  Description of Artificial Sequence: Synthetic oligonucleotide
guuuucggacaugagcccu

SEQ ID NO: 729829 - RNA, 19 nt, Artificial Sequence
  Description of Artificial Sequence: Synthetic oligonucleotide
augguugcucccaggcuga

SEQ ID NO: 729830 - RNA, 19 nt, Artificial Sequence
  Description of Artificial Sequence: Synthetic oligonucleotide
ggcauuuguucagauuguc

SEQ ID NO: 729831 - RNA, 19 nt, Artificial Sequence
  Description of Artificial Sequence: Synthetic oligonucleotide
cuguaacgaggaauggagu

SEQ ID NO: 729832 - RNA, 19 nt, Artificial Sequence
  Description of Artificial Sequence: Synthetic oligonucleotide
caucaaagucaucggacau

SEQ ID NO: 729833 - RNA, 19 nt, Artificial Sequence
  Description of Artificial Sequence: Synthetic oligonucleotide
cucgcggcaucgccacagg

SEQ ID NO: 729834 - RNA, 19 nt, Artificial Sequence
  Description of Artificial Sequence: Synthetic oligonucleotide
guaguagcuggggcucgcc

SEQ ID NO: 729835 - RNA, 19 nt, Artificial Sequence
  Description of Artificial Sequence: Synthetic oligonucleotide
gcuguccgugaguuaauuc

SEQ ID NO: 729836 - RNA, 19 nt, Artificial Sequence
  Description of Artificial Sequence: Synthetic oligonucleotide
agcugaccuauggucacau

SEQ ID NO: 729837 - RNA, 19 nt, Artificial Sequence
  Description of Artificial Sequence: Synthetic oligonucleotide
uuauggucucuaggacgaa

SEQ ID NO: 729838 - RNA, 19 nt, Artificial Sequence
  Description of Artificial Sequence: Synthetic oligonucleotide
caguucugaggguacuaua

SEQ ID NO: 729839 - RNA, 19 nt, Artificial Sequence
  Description of Artificial Sequence: Synthetic oligonucleotide
aucuggcggcccauaaaga

SEQ ID NO: 729840 - RNA, 19 nt, Artificial Sequence
  Description of Artificial Sequence: Synthetic oligonucleotide
  modified_base (12)..(12): a, c, u, g, unknown or other
  modified_base (18)..(18): a, c, u, g, unknown or other
gcauggcuugunacgggng

SEQ ID NO: 729841 - RNA, 19 nt, Artificial Sequence
  Description of Artificial Sequence: Synthetic oligonucleotide
agaacacuguugagccgca

SEQ ID NO: 729842 - RNA, 19 nt, Artificial Sequence
  Description of Artificial Sequence: Synthetic oligonucleotide
ucguggcgcacgccaccgc

SEQ ID NO: 729843 - RNA, 19 nt, Artificial Sequence
  Description of Artificial Sequence: Synthetic oligonucleotide
guggggucguggcgcacgc

SEQ ID NO: 729844 - RNA, 19 nt, Artificial Sequence
  Description of Artificial Sequence: Synthetic oligonucleotide
agauugcuuuccaucuauu

SEQ ID NO: 729845 - RNA, 19 nt, Artificial Sequence
  Description of Artificial Sequence: Synthetic oligonucleotide
  modified_base (8)..(8): a, c, u, g, unknown or other
  modified_base (14)..(14): a, c, u, g, unknown or other
ggcuugunacgggnguuuc

SEQ ID NO: 729846 - RNA, 19 nt, Artificial Sequence
  Description of Artificial Sequence: Synthetic oligonucleotide
gcugugaauagcugaccua

SEQ ID NO: 729847 - RNA, 19 nt, Artificial Sequence
  Description of Artificial Sequence: Synthetic oligonucleotide
cgugaguuaauuccuaccu

SEQ ID NO: 729848 - RNA, 19 nt, Artificial Sequence
  Description of Artificial Sequence: Synthetic oligonucleotide
ucccugacuucaguauguu

SEQ ID NO: 729849 - RNA, 19 nt, Artificial Sequence
  Description of Artificial Sequence: Synthetic oligonucleotide
ggucguggcgcacgccacc

SEQ ID NO: 729850 - RNA, 19 nt, Artificial Sequence
  Description of Artificial Sequence: Synthetic oligonucleotide
gggauugcagcuaugcuuu

SEQ ID NO: 729851 - RNA, 19 nt, Artificial Sequence
  Description of Artificial Sequence: Synthetic oligonucleotide
ggagcuggcccacccuuuc

SEQ ID NO: 729852 - RNA, 19 nt, Artificial Sequence
  Description of Artificial Sequence: Synthetic oligonucleotide
guacuauauccgccucucu

SEQ ID NO: 729853 - RNA, 19 nt, Artificial Sequence
  Description of Artificial Sequence: Synthetic oligonucleotide
gagcccuucuuuucagauu

SEQ ID NO: 729854 - RNA, 19 nt, Artificial Sequence
  Description of Artificial Sequence: Synthetic oligonucleotide
gcccauaaagauuguugcu

SEQ ID NO: 729855 - RNA, 19 nt, Artificial Sequence
  Description of Artificial Sequence: Synthetic oligonucleotide
uggugacuuugggucccca

SEQ ID NO: 729856 - RNA, 19 nt, Artificial Sequence
  Description of Artificial Sequence: Synthetic oligonucleotide
gugaugaguggaucucuuu

SEQ ID NO: 729857 - RNA, 19 nt, Artificial Sequence
  Description of Artificial Sequence: Synthetic oligonucleotide
agagcggguuuugcuucca

SEQ ID NO: 729858 - RNA, 19 nt, Artificial Sequence
  Description of Artificial Sequence: Synthetic oligonucleotide
ccucagacaagcauggcuu

SEQ ID NO: 729859 - RNA, 19 nt, Artificial Sequence
  Description of Artificial Sequence: Synthetic oligonucleotide
cuguccuugugucuucaau

SEQ ID NO: 729860 - RNA, 19 nt, Artificial Sequence
  Description of Artificial Sequence: Synthetic oligonucleotide
cccugacuucaguauguuc

SEQ ID NO: 729861 - RNA, 19 nt, Artificial Sequence
  Description of Artificial Sequence: Synthetic oligonucleotide
cagcuucgauuucagaguu

SEQ ID NO: 729862 - RNA, 19 nt, Artificial Sequence
  Description of Artificial Sequence: Synthetic oligonucleotide
ggguacuauauccgccucu

SEQ ID NO: 729863 - RNA, 19 nt, Artificial Sequence
  Description of Artificial Sequence: Synthetic oligonucleotide
gcuuagaucucugcucugu

SEQ ID NO: 729864 - RNA, 19 nt, Artificial Sequence
  Description of Artificial Sequence: Synthetic oligonucleotide
cuggcggcccauaaagauu

SEQ ID NO: 729865 - RNA, 19 nt, Artificial Sequence
  Description of Artificial Sequence: Synthetic oligonucleotide
  modified_base (7)..(7): a, c, u, g, unknown or other
  modified_base (13)..(13): a, c, u, g, unknown or other
gcuugunacgggnguuucu

SEQ ID NO: 729866 - RNA, 19 nt, Artificial Sequence
  Description of Artificial Sequence: Synthetic oligonucleotide
cugcacuuaucagacuuau

SEQ ID NO: 729867 - RNA, 19 nt, Artificial Sequence
  Description of Artificial Sequence: Synthetic oligonucleotide
caauaaugcuguggccucu

SEQ ID NO: 729868 - RNA, 19 nt, Artificial Sequence
  Description of Artificial Sequence: Synthetic oligonucleotide
cgaagagcagcuucgauuu

SEQ ID NO: 729869 - RNA, 19 nt, Artificial Sequence
  Description of Artificial Sequence: Synthetic oligonucleotide
ccgaagcgauuuugugggc

SEQ ID NO: 729870 - RNA, 19 nt, Artificial Sequence
  Description of Artificial Sequence: Synthetic oligonucleotide
gcaaugugguguagacuga

SEQ ID NO: 729871 - RNA, 19 nt, Artificial Sequence
  Description of Artificial Sequence: Synthetic oligonucleotide
agccgcagagcggguuuug

SEQ ID NO: 729872 - RNA, 19 nt, Artificial Sequence
  Description of Artificial Sequence: Synthetic oligonucleotide
agcuucgauuucagaguua

SEQ ID NO: 729873 - RNA, 19 nt, Artificial Sequence
  Description of Artificial Sequence: Synthetic oligonucleotide
uggggucguggcgcacgcc

SEQ ID NO: 729874 - RNA, 19 nt, Artificial Sequence
  Description of Artificial Sequence: Synthetic oligonucleotide
cguggcgcacgccaccgcc

SEQ ID NO: 729875 - RNA, 19 nt, Artificial Sequence
  Description of Artificial Sequence: Synthetic oligonucleotide
ggucaggaauugaacaguu

SEQ ID NO: 729876 - RNA, 19 nt, Artificial Sequence
  Description of Artificial Sequence: Synthetic oligonucleotide
ugguugcucccaggcugaa

SEQ ID NO: 729877 - RNA, 19 nt, Artificial Sequence
  Description of Artificial Sequence: Synthetic oligonucleotide
gguugcucccaggcugaac

SEQ ID NO: 729878 - RNA, 19 nt, Artificial Sequence
  Description of Artificial Sequence: Synthetic oligonucleotide
gccgcagagcggguuuugc

SEQ ID NO: 729879 - RNA, 19 nt, Artificial Sequence
  Description of Artificial Sequence: Synthetic oligonucleotide
gcacugugugucacuauua

SEQ ID NO: 729880 - RNA, 19 nt, Artificial Sequence
  Description of Artificial Sequence: Synthetic oligonucleotide
guggcgcacgccaccgcca

SEQ ID NO: 729881 - RNA, 19 nt, Artificial Sequence
  Description of Artificial Sequence: Synthetic oligonucleotide
cugcacgagcuuuccuccu

SEQ ID NO: 729882 - RNA, 19 nt, Artificial Sequence
  Description of Artificial Sequence: Synthetic oligonucleotide
gagcggguuuugcuuccau

SEQ ID NO: 729883 - RNA, 19 nt, Artificial Sequence
  Description of Artificial Sequence: Synthetic oligonucleotide
gugacgugugcugcucccu

SEQ ID NO: 729884 - RNA, 19 nt, Artificial Sequence
  Description of Artificial Sequence: Synthetic oligonucleotide
gcccacccuuucguaguag

SEQ ID NO: 729885 - RNA, 19 nt, Artificial Sequence
  Description of Artificial Sequence: Synthetic oligonucleotide
gcgauuuugugggcugucu

SEQ ID NO: 729886 - RNA, 19 nt, Artificial Sequence
  Description of Artificial Sequence: Synthetic oligonucleotide
gcuggcccacccuuucgua

SEQ ID NO: 729887 - RNA, 19 nt, Artificial Sequence
  Description of Artificial Sequence: Synthetic oligonucleotide
ccacccuuucguaguagcu

SEQ ID NO: 729888 - RNA, 19 nt, Artificial Sequence
  Description of Artificial Sequence: Synthetic oligonucleotide
gggucguggcgcacgccac

SEQ ID NO: 729889 - RNA, 19 nt, Artificial Sequence
  Description of Artificial Sequence: Synthetic oligonucleotide
ggcgcacgccaccgccacc

SEQ ID NO: 729890 - RNA, 19 nt, Artificial Sequence
  Description of Artificial Sequence: Synthetic oligonucleotide
cugcuggaacugucacacu

SEQ ID NO: 729891 - RNA, 19 nt, Artificial Sequence
  Description of Artificial Sequence: Synthetic oligonucleotide
ggcccacccuuucguagua

SEQ ID NO: 729892 - RNA, 19 nt, Artificial Sequence
  Description of Artificial Sequence: Synthetic oligonucleotide
accggcaggcuggcucuuu

SEQ ID NO: 729893 - RNA, 19 nt, Artificial Sequence
  Description of Artificial Sequence: Synthetic oligonucleotide
gggcugucuuugucuugaa

SEQ ID NO: 729894 - RNA, 19 nt, Artificial Sequence
  Description of Artificial Sequence: Synthetic oligonucleotide
cuaggacgaagagcagcuu

SEQ ID NO: 729895 - RNA, 19 nt, Artificial Sequence
  Description of Artificial Sequence: Synthetic oligonucleotide
guugagccgcagagcgggu

SEQ ID NO: 729896 - RNA, 19 nt, Artificial Sequence
  Description of Artificial Sequence: Synthetic oligonucleotide
cggcaucgccacagggcag

SEQ ID NO: 729897 - RNA, 19 nt, Artificial Sequence
  Description of Artificial Sequence: Synthetic oligonucleotide
cgaagcgauuuugugggcu

SEQ ID NO: 729898 - RNA, 19 nt, Artificial Sequence
  Description of Artificial Sequence: Synthetic oligonucleotide
gcucgccaagggcgcggac

SEQ ID NO: 729899 - RNA, 19 nt, Artificial Sequence
  Description of Artificial Sequence: Synthetic oligonucleotide
cgugugcugcucccuaucu

SEQ ID NO: 729900 - RNA, 19 nt, Artificial Sequence
  Description of Artificial Sequence: Synthetic oligonucleotide
ggcuguccgugaguuaauu

SEQ ID NO: 729901 - RNA, 19 nt, Artificial Sequence
  Description of Artificial Sequence: Synthetic oligonucleotide
cgcagagcggguuuugcuu

SEQ ID NO: 729902 - RNA, 19 nt, Artificial Sequence
  Description of Artificial Sequence: Synthetic oligonucleotide
cgauuuugugggcugucuu

SEQ ID NO: 729903 - RNA, 19 nt, Artificial Sequence
  Description of Artificial Sequence: Synthetic oligonucleotide
gcggcccauaaagauuguu

SEQ ID NO: 729904 - RNA, 19 nt, Artificial Sequence
  Description of Artificial Sequence: Synthetic oligonucleotide
cgcacgccaccgccaccgc

SEQ ID NO: 729905 - RNA, 19 nt, Artificial Sequence
  Description of Artificial Sequence: Synthetic oligonucleotide
ggcggcccauaaagauugu

SEQ ID NO: 729906 - RNA, 19 nt, Artificial Sequence
  Description of Artificial Sequence: Synthetic oligonucleotide
caccgcgcccucgcggcau

SEQ ID NO: 729907 - RNA, 19 nt, Artificial Sequence
  Description of Artificial Sequence: Synthetic oligonucleotide
ccaccgcgcccucgcggca

SEQ ID NO: 729908 - RNA, 19 nt, Artificial Sequence
  Description of Artificial Sequence: Synthetic oligonucleotide
gcggacgcgguggggucgu

SEQ ID NO: 729909 - RNA, 19 nt, Artificial Sequence
  Description of Artificial Sequence: Synthetic oligonucleotide
cggacgcgguggggucgug

SEQ ID NO: 729910 - RNA, 19 nt, Artificial Sequence
  Description of Artificial Sequence: Synthetic oligonucleotide
  modified_base (1)..(1): a, c, u, g, unknown or other
  modified_base (7)..(7): a, c, u, g, unknown or other
nacgggnguuucucaacaa

SEQ ID NO: 729911 - RNA, 19 nt, Artificial Sequence
  Description of Artificial Sequence: Synthetic oligonucleotide
aaaauuuaaaagcucaggg

SEQ ID NO: 729912 - RNA, 19 nt, Artificial Sequence
  Description of Artificial Sequence: Synthetic oligonucleotide
aaaagggugcaccagagcg

SEQ ID NO: 729913 - RNA, 19 nt, Artificial Sequence
  Description of Artificial Sequence: Synthetic oligonucleotide
aaagcaaacgccuaucauc

SEQ ID NO: 729914 - RNA, 19 nt, Artificial Sequence
  Description of Artificial Sequence: Synthetic oligonucleotide
uuuguaagaaagcaaacgc

SEQ ID NO: 729915 - RNA, 19 nt, Artificial Sequence
  Description of Artificial Sequence: Synthetic oligonucleotide
aauuuaaaagcucagggau

SEQ ID NO: 729916 - RNA, 19 nt, Artificial Sequence
  Description of Artificial Sequence: Synthetic oligonucleotide
agaaguuggaaauaacagc

SEQ ID NO: 729917 - RNA, 19 nt, Artificial Sequence
  Description of Artificial Sequence: Synthetic oligonucleotide
uguauuagacuccaggucc

SEQ ID NO: 729918 - RNA, 19 nt, Artificial Sequence
  Description of Artificial Sequence: Synthetic oligonucleotide
uaugcuucgagacagcucc

SEQ ID NO: 729919 - RNA, 19 nt, Artificial Sequence
  Description of Artificial Sequence: Synthetic oligonucleotide
uauaacugcacaaucaacu

SEQ ID NO: 729920 - RNA, 19 nt, Artificial Sequence
  Description of Artificial Sequence: Synthetic oligonucleotide
aaauuuaaaagcucaggga

SEQ ID NO: 729921 - RNA, 19 nt, Artificial Sequence
  Description of Artificial Sequence: Synthetic oligonucleotide
uuuaucacaucuuguaggg

SEQ ID NO: 729922 - RNA, 19 nt, Artificial Sequence
  Description of Artificial Sequence: Synthetic oligonucleotide
acaaucaacuuaucgaugg

SEQ ID NO: 729923 - RNA, 19 nt, Artificial Sequence
  Description of Artificial Sequence: Synthetic oligonucleotide
auuauauaacugcacaauc

SEQ ID NO: 729924 - RNA, 19 nt, Artificial Sequence
  Description of Artificial Sequence: Synthetic oligonucleotide
aaaugagcacauccaaccc

SEQ ID NO: 729925 - RNA, 19 nt, Artificial Sequence
  Description of Artificial Sequence: Synthetic oligonucleotide
gaaguuggaaauaacagcc

SEQ ID NO: 729926 - RNA, 19 nt, Artificial Sequence
  Description of Artificial Sequence: Synthetic oligonucleotide
acaaauuugauggagucac

SEQ ID NO: 729927 - RNA, 19 nt, Artificial Sequence
  Description of Artificial Sequence: Synthetic oligonucleotide
uguaagaaagcaaacgccu

SEQ ID NO: 729928 - RNA, 19 nt, Artificial Sequence
  Description of Artificial Sequence: Synthetic oligonucleotide
uaugauuggcuucaguugc

SEQ ID NO: 729929 - RNA, 19 nt, Artificial Sequence
  Description of Artificial Sequence: Synthetic oligonucleotide
ucagaaguuggaaauaaca

SEQ ID NO: 729930 - RNA, 19 nt, Artificial Sequence
  Description of Artificial Sequence: Synthetic oligonucleotide
gauuuuacgugacagaaga

SEQ ID NO: 729931 - RNA, 19 nt, Artificial Sequence
  Description of Artificial Sequence: Synthetic oligonucleotide
aaagauuauauaacugcac

SEQ ID NO: 729932 - RNA, 19 nt, Artificial Sequence
  Description of Artificial Sequence: Synthetic oligonucleotide
uacguauugcaaaaggaag

SEQ ID NO: 729933 - RNA, 19 nt, Artificial Sequence
  Description of Artificial Sequence: Synthetic oligonucleotide
ugcacaaucaacuuaucga

SEQ ID NO: 729934 - RNA, 19 nt, Artificial Sequence
  Description of Artificial Sequence: Synthetic oligonucleotide
uuaucagagaccacaagca

SEQ ID NO: 729935 - RNA, 19 nt, Artificial Sequence
  Description of Artificial Sequence: Synthetic oligonucleotide
ugucauaugcaucuggcug

SEQ ID NO: 729936 - RNA, 19 nt, Artificial Sequence
  Description of Artificial Sequence: Synthetic oligonucleotide
agcaccuuuaaauucccgc

SEQ ID NO: 729937 - RNA, 19 nt, Artificial Sequence
  Description of Artificial Sequence: Synthetic oligonucleotide
ugagccuucauuucaaagc

SEQ ID NO: 729938 - RNA, 19 nt, Artificial Sequence
  Description of Artificial Sequence: Synthetic oligonucleotide
uuuaaauucccgcuugugu

SEQ ID NO: 729939 - RNA, 19 nt, Artificial Sequence
  Description of Artificial Sequence: Synthetic oligonucleotide
aguuggaaauaacagcccg

SEQ ID NO: 729940 - RNA, 19 nt, Artificial Sequence
  Description of Artificial Sequence: Synthetic oligonucleotide
uuaugucauaugcaucugg

SEQ ID NO: 729941 - RNA, 19 nt, Artificial Sequence
  Description of Artificial Sequence: Synthetic oligonucleotide
uuaucuaguauaaauccau

SEQ ID NO: 729942 - RNA, 19 nt, Artificial Sequence
  Description of Artificial Sequence: Synthetic oligonucleotide
ucuaguauaaauccaucau

SEQ ID NO: 729943 - RNA, 19 nt, Artificial Sequence
  Description of Artificial Sequence: Synthetic oligonucleotide
uaugucauaugcaucuggc

SEQ ID NO: 729944 - RNA, 19 nt, Artificial Sequence
  Description of Artificial Sequence: Synthetic oligonucleotide
cagaaguuggaaauaacag

SEQ ID NO: 729945 - RNA, 19 nt, Artificial Sequence
  Description of Artificial Sequence: Synthetic oligonucleotide
aauaaugcccggccuuugg

SEQ ID NO: 729946 - RNA, 19 nt, Artificial Sequence
  Description of Artificial Sequence: Synthetic oligonucleotide
uccuacguauugcaaaagg

SEQ ID NO: 729947 - RNA, 19 nt, Artificial Sequence
  Description of Artificial Sequence: Synthetic oligonucleotide
uuuacgugacagaagaguc

SEQ ID NO: 729948 - RNA, 19 nt, Artificial Sequence
  Description of Artificial Sequence: Synthetic oligonucleotide
uauugcaaaaggaagccaa

SEQ ID NO: 729949 - RNA, 19 nt, Artificial Sequence
  Description of Artificial Sequence: Synthetic oligonucleotide
acacuuaguaagcaucugg

SEQ ID NO: 729950 - RNA, 19 nt, Artificial Sequence
  Description of Artificial Sequence: Synthetic oligonucleotide
ucuaaaagggugcaccaga

SEQ ID NO: 729951 - RNA, 19 nt, Artificial Sequence
  Description of Artificial Sequence: Synthetic oligonucleotide
uucccaagugcucuaaaag

SEQ ID NO: 729952 - RNA, 19 nt, Artificial Sequence
  Description of Artificial Sequence: Synthetic oligonucleotide
aaugagcacauccaacccu

SEQ ID NO: 729953 - RNA, 19 nt, Artificial Sequence
  Description of Artificial Sequence: Synthetic oligonucleotide
uggcucaugcacaucaggg

SEQ ID NO: 729954 - RNA, 19 nt, Artificial Sequence
  Description of Artificial Sequence: Synthetic oligonucleotide
uuuggaguugcuauguaaa

SEQ ID NO: 729955 - RNA, 19 nt, Artificial Sequence
  Description of Artificial Sequence: Synthetic oligonucleotide
gaggcuacaguucacaaga

SEQ ID NO: 729956 - RNA, 19 nt, Artificial Sequence
  Description of Artificial Sequence: Synthetic oligonucleotide
acguauugcaaaaggaagc

SEQ ID NO: 729957 - RNA, 19 nt, Artificial Sequence
  Description of Artificial Sequence: Synthetic oligonucleotide
uuuuacgugacagaagagu

SEQ ID NO: 729958 - RNA, 19 nt, Artificial Sequence
  Description of Artificial Sequence: Synthetic oligonucleotide
uguggauuagucuuuuccu

SEQ ID NO: 729959 - RNA, 19 nt, Artificial Sequence
  Description of Artificial Sequence: Synthetic oligonucleotide
ucugacaguaugcuucgag

SEQ ID NO: 729960 - RNA, 19 nt, Artificial Sequence
  Description of Artificial Sequence: Synthetic oligonucleotide
ucuucguugagccugucuc

SEQ ID NO: 729961 - RNA, 19 nt, Artificial Sequence
  Description of Artificial Sequence: Synthetic oligonucleotide
aagaaucccaagaagaaaa

SEQ ID NO: 729962 - RNA, 19 nt, Artificial Sequence
  Description of Artificial Sequence: Synthetic oligonucleotide
accauuaugucauaugcau

SEQ ID NO: 729963 - RNA, 19 nt, Artificial Sequence
  Description of Artificial Sequence: Synthetic oligonucleotide
ucauuuaagucaucugcug

SEQ ID NO: 729964 - RNA, 19 nt, Artificial Sequence
  Description of Artificial Sequence: Synthetic oligonucleotide
aucuaguauaaauccauca

SEQ ID NO: 729965 - RNA, 19 nt, Artificial Sequence
  Description of Artificial Sequence: Synthetic oligonucleotide
cuuagugcugccuuguuuc

SEQ ID NO: 729966 - RNA, 19 nt, Artificial Sequence
  Description of Artificial Sequence: Synthetic oligonucleotide
uacauuacaaaaccauuua

SEQ ID NO: 729967 - RNA, 19 nt, Artificial Sequence
  Description of Artificial Sequence: Synthetic oligonucleotide
cacuuaguaagcaucuggc

SEQ ID NO: 729968 - RNA, 19 nt, Artificial Sequence
  Description of Artificial Sequence: Synthetic oligonucleotide
cuucugaucaucacuuggc

SEQ ID NO: 729969 - RNA, 19 nt, Artificial Sequence
  Description of Artificial Sequence: Synthetic oligonucleotide
ucgagacagcuccugaagg

SEQ ID NO: 729970 - RNA, 19 nt, Artificial Sequence
  Description of Artificial Sequence: Synthetic oligonucleotide
guugcuauguaaagaaucc

SEQ ID NO: 729971 - RNA, 19 nt, Artificial Sequence
  Description of Artificial Sequence: Synthetic oligonucleotide
uguguuuguggauuagucu

SEQ ID NO: 729972 - RNA, 19 nt, Artificial Sequence
  Description of Artificial Sequence: Synthetic oligonucleotide
gucacuugcagauucagga

SEQ ID NO: 729973 - RNA, 19 nt, Artificial Sequence
  Description of Artificial Sequence: Synthetic oligonucleotide
guaugauuggcuucaguug

SEQ ID NO: 729974 - RNA, 19 nt, Artificial Sequence
  Description of Artificial Sequence: Synthetic oligonucleotide
gacaggacgggacacuuag

SEQ ID NO: 729975 - RNA, 19 nt, Artificial Sequence
  Description of Artificial Sequence: Synthetic oligonucleotide
ucauuucaaagccaagcuc

SEQ ID NO: 729976 - RNA, 19 nt, Artificial Sequence
  Description of Artificial Sequence: Synthetic oligonucleotide
uccgaauucuucccaagug

SEQ ID NO: 729977 - RNA, 19 nt, Artificial Sequence
  Description of Artificial Sequence: Synthetic oligonucleotide
caaagauuauauaacugca

SEQ ID NO: 729978 - RNA, 19 nt, Artificial Sequence
  Description of Artificial Sequence: Synthetic oligonucleotide
uguagccaaaucuccuacg

SEQ ID NO: 729979 - RNA, 19 nt, Artificial Sequence
  Description of Artificial Sequence: Synthetic oligonucleotide
uucgagacagcuccugaag

SEQ ID NO: 729980 - RNA, 19 nt, Artificial Sequence
  Description of Artificial Sequence: Synthetic oligonucleotide
aacgccuaucaucuuuauc

SEQ ID NO: 729981 - RNA, 19 nt, Artificial Sequence
  Description of Artificial Sequence: Synthetic oligonucleotide
ugcaagacuuggaugguug

SEQ ID NO: 729982 - RNA, 19 nt, Artificial Sequence
  Description of Artificial Sequence: Synthetic oligonucleotide
ugagauuuuacgugacaga

SEQ ID NO: 729983 - RNA, 19 nt, Artificial Sequence
  Description of Artificial Sequence: Synthetic oligonucleotide
gcugcaaagacauagggca

SEQ ID NO: 729984 - RNA, 19 nt, Artificial Sequence
  Description of Artificial Sequence: Synthetic oligonucleotide
aacagcuuuagcgggacug

SEQ ID NO: 729985 - RNA, 19 nt, Artificial Sequence
  Description of Artificial Sequence: Synthetic oligonucleotide
ugagggaggcuacaguuca

SEQ ID NO: 729986 - RNA, 19 nt, Artificial Sequence
  Description of Artificial Sequence: Synthetic oligonucleotide
uugauggagucacuugcag

SEQ ID NO: 729987 - RNA, 19 nt, Artificial Sequence
  Description of Artificial Sequence: Synthetic oligonucleotide
aaagcucagggaugaaccu

SEQ ID NO: 729988 - RNA, 19 nt, Artificial Sequence
  Description of Artificial Sequence: Synthetic oligonucleotide
cuaaaagggugcaccagag

SEQ ID NO: 729989 - RNA, 19 nt, Artificial Sequence
  Description of Artificial Sequence: Synthetic oligonucleotide
ucugguaugauuggcuuca

SEQ ID NO: 729990 - RNA, 19 nt, Artificial Sequence
  Description of Artificial Sequence: Synthetic oligonucleotide
ggaaauaacagcccgguga

SEQ ID NO: 729991 - RNA, 19 nt, Artificial Sequence
  Description of Artificial Sequence: Synthetic oligonucleotide
aaucagaaguuggaaauaa

SEQ ID NO: 729992 - RNA, 19 nt, Artificial Sequence
  Description of Artificial Sequence: Synthetic oligonucleotide
aauucucuccaccaccaaa

SEQ ID NO: 729993 - RNA, 19 nt, Artificial Sequence
  Description of Artificial Sequence: Synthetic oligonucleotide
auacacuguacaugagcac

SEQ ID NO: 729994 - RNA, 19 nt, Artificial Sequence
  Description of Artificial Sequence: Synthetic oligonucleotide
gaaaucagaaguuggaaau

SEQ ID NO: 729995 - RNA, 19 nt, Artificial Sequence
  Description of Artificial Sequence: Synthetic oligonucleotide
auagucugguaugauuggc

SEQ ID NO: 729996 - RNA, 19 nt, Artificial Sequence
  Description of Artificial Sequence: Synthetic oligonucleotide
cuggaaauaaugcccggcc

SEQ ID NO: 729997 - RNA, 19 nt, Artificial Sequence
  Description of Artificial Sequence: Synthetic oligonucleotide
ugcucuaaaagggugcacc

SEQ ID NO: 729998 - RNA, 19 nt, Artificial Sequence
  Description of Artificial Sequence: Synthetic oligonucleotide
aaugcccggccuuuggucu

SEQ ID NO: 729999 - RNA, 19 nt, Artificial Sequence
  Description of Artificial Sequence: Synthetic oligonucleotide
uucugaucaucacuuggca

SEQ ID NO: 730000 - RNA, 19 nt, Artificial Sequence
  Description of Artificial Sequence: Synthetic oligonucleotide
cugagauuuuacgugacag

SEQ ID NO: 730001 - RNA, 19 nt, Artificial Sequence
  Description of Artificial Sequence: Synthetic oligonucleotide
cauggcaucacggagaaca

SEQ ID NO: 730002 - RNA, 19 nt, Artificial Sequence
  Description of Artificial Sequence: Synthetic oligonucleotide
uccucauaggauucaggag

SEQ ID NO: 730003 - RNA, 19 nt, Artificial Sequence
  Description of Artificial Sequence: Synthetic oligonucleotide
uccaacccuggaaauaaug

SEQ ID NO: 730004 - RNA, 19 nt, Artificial Sequence
  Description of Artificial Sequence: Synthetic oligonucleotide
gcuacaguucacaagaugc

SEQ ID NO: 730005 - RNA, 19 nt, Artificial Sequence
  Description of Artificial Sequence: Synthetic oligonucleotide
aagcaauuccgaauucuuc

SEQ ID NO: 730006 - RNA, 19 nt, Artificial Sequence
  Description of Artificial Sequence: Synthetic oligonucleotide
agccaaaucuccuacguau

SEQ ID NO: 730007 - RNA, 19 nt, Artificial Sequence
  Description of Artificial Sequence: Synthetic oligonucleotide
agcacuuugacuagcuggg

SEQ ID NO: 730008 - RNA, 19 nt, Artificial Sequence
  Description of Artificial Sequence: Synthetic oligonucleotide
uuacgugacagaagagucu

SEQ ID NO: 730009 - RNA, 19 nt, Artificial Sequence
  Description of Artificial Sequence: Synthetic oligonucleotide
agaaagcaaacgccuauca

SEQ ID NO: 730010 - RNA, 19 nt, Artificial Sequence
  Description of Artificial Sequence: Synthetic oligonucleotide
ucacauaucaguggcuggc

SEQ ID NO: 730011 - RNA, 19 nt, Artificial Sequence
  Description of Artificial Sequence: Synthetic oligonucleotide
aaagggugcaccagagcgg

SEQ ID NO: 730012 - RNA, 19 nt, Artificial Sequence
  Description of Artificial Sequence: Synthetic oligonucleotide
uaucagagaccacaagcaa

SEQ ID NO: 730013 - RNA, 19 nt, Artificial Sequence
  Description of Artificial Sequence: Synthetic oligonucleotide
ugugagcucaagguuaucu

SEQ ID NO: 730014 - RNA, 19 nt, Artificial Sequence
  Description of Artificial Sequence: Synthetic oligonucleotide
acuuaguaagcaucuggcu

SEQ ID NO: 730015 - RNA, 19 nt, Artificial Sequence
  Description of Artificial Sequence: Synthetic oligonucleotide
accuuuaaauucccgcuug

SEQ ID NO: 730016 - RNA, 19 nt, Artificial Sequence
  Description of Artificial Sequence: Synthetic oligonucleotide
uggaaauaaugcccggccu

SEQ ID NO: 730017 - RNA, 19 nt, Artificial Sequence
  Description of Artificial Sequence: Synthetic oligonucleotide
uacgugacagaagagucug

SEQ ID NO: 730018 - RNA, 19 nt, Artificial Sequence
  Description of Artificial Sequence: Synthetic oligonucleotide
aucuuuguaagaaagcaaa

SEQ ID NO: 730019 - RNA, 19 nt, Artificial Sequence
  Description of Artificial Sequence: Synthetic oligonucleotide
ggaugaaccuccgagacag

SEQ ID NO: 730020 - RNA, 19 nt, Artificial Sequence
  Description of Artificial Sequence: Synthetic oligonucleotide
ggcaauacacuguacauga

SEQ ID NO: 730021 - RNA, 19 nt, Artificial Sequence
  Description of Artificial Sequence: Synthetic oligonucleotide
uuguuuccguccaaacuca

SEQ ID NO: 730022 - RNA, 19 nt, Artificial Sequence
  Description of Artificial Sequence: Synthetic oligonucleotide
aucacggagaacaaauuug

SEQ ID NO: 730023 - RNA, 19 nt, Artificial Sequence
  Description of Artificial Sequence: Synthetic oligonucleotide
ucuccuacguauugcaaaa

SEQ ID NO: 730024 - RNA, 19 nt, Artificial Sequence
  Description of Artificial Sequence: Synthetic oligonucleotide
uagucugguaugauuggcu

SEQ ID NO: 730025 - RNA, 19 nt, Artificial Sequence
  Description of Artificial Sequence: Synthetic oligonucleotide
ucaagguuaucuucuucgu

SEQ ID NO: 730026 - RNA, 19 nt, Artificial Sequence
  Description of Artificial Sequence: Synthetic oligonucleotide
augguugcauuucugaauu

SEQ ID NO: 730027 - RNA, 19 nt, Artificial Sequence
  Description of Artificial Sequence: Synthetic oligonucleotide
uuagacuccagguccgagu

SEQ ID NO: 730028 - RNA, 19 nt, Artificial Sequence
  Description of Artificial Sequence: Synthetic oligonucleotide
uacuuugcgcuuucuuucc

SEQ ID NO: 730029 - RNA, 19 nt, Artificial Sequence
  Description of Artificial Sequence: Synthetic oligonucleotide
cugauuguccuuucggauc

SEQ ID NO: 730030 - RNA, 19 nt, Artificial Sequence
  Description of Artificial Sequence: Synthetic oligonucleotide
aauaaagaccuuagcuccu

SEQ ID NO: 730031 - RNA, 19 nt, Artificial Sequence
  Description of Artificial Sequence: Synthetic oligonucleotide
ggacgggacacuuaguaag

SEQ ID NO: 730032 - RNA, 19 nt, Artificial Sequence
  Description of Artificial Sequence: Synthetic oligonucleotide
cuacguauugcaaaaggaa

SEQ ID NO: 730033 - RNA, 19 nt, Artificial Sequence
  Description of Artificial Sequence: Synthetic oligonucleotide
ucagucuacuugcccagug

SEQ ID NO: 730034 - RNA, 19 nt, Artificial Sequence
  Description of Artificial Sequence: Synthetic oligonucleotide
uccguccaaacucaagcac

SEQ ID NO: 730035 - RNA, 19 nt, Artificial Sequence
  Description of Artificial Sequence: Synthetic oligonucleotide
uguacugucuguagccaaa

SEQ ID NO: 730036 - RNA, 19 nt, Artificial Sequence
  Description of Artificial Sequence: Synthetic oligonucleotide
aguauaaauccaucauuua

SEQ ID NO: 730037 - RNA, 19 nt, Artificial Sequence
  Description of Artificial Sequence: Synthetic oligonucleotide
acacaaacaggccuuuuau

SEQ ID NO: 730038 - RNA, 19 nt, Artificial Sequence
  Description of Artificial Sequence: Synthetic oligonucleotide
ucugaucaucacuuggcaa

SEQ ID NO: 730039 - RNA, 19 nt, Artificial Sequence
  Description of Artificial Sequence: Synthetic oligonucleotide
agcccggugauuuucaaau

SEQ ID NO: 730040 - RNA, 19 nt, Artificial Sequence
  Description of Artificial Sequence: Synthetic oligonucleotide
uuccgaauucuucccaagu

SEQ ID NO: 730041 - RNA, 19 nt, Artificial Sequence
  Description of Artificial Sequence: Synthetic oligonucleotide
accagagcggaaccuuggc

SEQ ID NO: 730042 - RNA, 19 nt, Artificial Sequence
  Description of Artificial Sequence: Synthetic oligonucleotide
agucuacuugcccagugca

SEQ ID NO: 730043 - RNA, 19 nt, Artificial Sequence
  Description of Artificial Sequence: Synthetic oligonucleotide
uuuccgacugcaagacuug

SEQ ID NO: 730044 - RNA, 19 nt, Artificial Sequence
  Description of Artificial Sequence: Synthetic oligonucleotide
gauggagucacuugcagau

SEQ ID NO: 730045 - RNA, 19 nt, Artificial Sequence
  Description of Artificial Sequence: Synthetic oligonucleotide
ugcaaagacauagggcagc

SEQ ID NO: 730046 - RNA, 19 nt, Artificial Sequence
  Description of Artificial Sequence: Synthetic oligonucleotide
caaaucuccuacguauugc

SEQ ID NO: 730047 - RNA, 19 nt, Artificial Sequence
  Description of Artificial Sequence: Synthetic oligonucleotide
gacaguaugcuucgagaca

SEQ ID NO: 730048 - RNA, 19 nt, Artificial Sequence
  Description of Artificial Sequence: Synthetic oligonucleotide
cucacauaucaguggcugg

SEQ ID NO: 730049 - RNA, 19 nt, Artificial Sequence
  Description of Artificial Sequence: Synthetic oligonucleotide
augaaccuccgagacaggg

SEQ ID NO: 730050 - RNA, 19 nt, Artificial Sequence
  Description of Artificial Sequence: Synthetic oligonucleotide
cauuuaagucaucugcuga

SEQ ID NO: 730051 - RNA, 19 nt, Artificial Sequence
  Description of Artificial Sequence: Synthetic oligonucleotide
guauuagacuccagguccg

SEQ ID NO: 730052 - RNA, 19 nt, Artificial Sequence
  Description of Artificial Sequence: Synthetic oligonucleotide
aucuccuacguauugcaaa

SEQ ID NO: 730053 - RNA, 19 nt, Artificial Sequence
  Description of Artificial Sequence: Synthetic oligonucleotide
uuugcgcuuucuuuccgca

SEQ ID NO: 730054 - RNA, 19 nt, Artificial Sequence
  Description of Artificial Sequence: Synthetic oligonucleotide
ucuuaguguuuggaguugc

SEQ ID NO: 730055 - RNA, 19 nt, Artificial Sequence
  Description of Artificial Sequence: Synthetic oligonucleotide
cacaaucaacuuaucgaug

SEQ ID NO: 730056 - RNA, 19 nt, Artificial Sequence
  Description of Artificial Sequence: Synthetic oligonucleotide
uuucauccuguuagagggc

SEQ ID NO: 730057 - RNA, 19 nt, Artificial Sequence
  Description of Artificial Sequence: Synthetic oligonucleotide
agaugcucugucaggaggg

SEQ ID NO: 730058 - RNA, 19 nt, Artificial Sequence
  Description of Artificial Sequence: Synthetic oligonucleotide
uuccauucaccuucuugug

SEQ ID NO: 730059 - RNA, 19 nt, Artificial Sequence
  Description of Artificial Sequence: Synthetic oligonucleotide
auaaagaccuuagcuccuc

SEQ ID NO: 730060 - RNA, 19 nt, Artificial Sequence
  Description of Artificial Sequence: Synthetic oligonucleotide
uccgcaucccguuccauga

SEQ ID NO: 730061 - RNA, 19 nt, Artificial Sequence
  Description of Artificial Sequence: Synthetic oligonucleotide
cagagcggaaccuuggcuc

SEQ ID NO: 730062 - RNA, 19 nt, Artificial Sequence
  Description of Artificial Sequence: Synthetic oligonucleotide
cuacuugcccagugcaagg

SEQ ID NO: 730063 - RNA, 19 nt, Artificial Sequence
  Description of Artificial Sequence: Synthetic oligonucleotide
uuuugccaauuccucuucu

SEQ ID NO: 730064 - RNA, 19 nt, Artificial Sequence
  Description of Artificial Sequence: Synthetic oligonucleotide
uggaaauaacagcccggug

SEQ ID NO: 730065 - RNA, 19 nt, Artificial Sequence
  Description of Artificial Sequence: Synthetic oligonucleotide
uggauuagucuuuuccuuu

SEQ ID NO: 730066 - RNA, 19 nt, Artificial Sequence
  Description of Artificial Sequence: Synthetic oligonucleotide
ugccacguggccauaucug

SEQ ID NO: 730067 - RNA, 19 nt, Artificial Sequence
  Description of Artificial Sequence: Synthetic oligonucleotide
ggaguugcuauguaaagaa

SEQ ID NO: 730068 - RNA, 19 nt, Artificial Sequence
  Description of Artificial Sequence: Synthetic oligonucleotide
aagacauagggcagcucag

SEQ ID NO: 730069 - RNA, 19 nt, Artificial Sequence
  Description of Artificial Sequence: Synthetic oligonucleotide
uaaauucccgcuuguguuu

SEQ ID NO: 730070 - RNA, 19 nt, Artificial Sequence
  Description of Artificial Sequence: Synthetic oligonucleotide
uuagugcugccuuguuucc

SEQ ID NO: 730071 - RNA, 19 nt, Artificial Sequence
  Description of Artificial Sequence: Synthetic oligonucleotide
gccuccaauuucuugagcc

SEQ ID NO: 730072 - RNA, 19 nt, Artificial Sequence
  Description of Artificial Sequence: Synthetic oligonucleotide
uguuagagggcugagccuu

SEQ ID NO: 730073 - RNA, 19 nt, Artificial Sequence
  Description of Artificial Sequence: Synthetic oligonucleotide
acaagcaauuccgaauucu

SEQ ID NO: 730074 - RNA, 19 nt, Artificial Sequence
  Description of Artificial Sequence: Synthetic oligonucleotide
cuuugcgcuuucuuuccgc

SEQ ID NO: 730075 - RNA, 19 nt, Artificial Sequence
  Description of Artificial Sequence: Synthetic oligonucleotide
uuuagcgggacuggcuugc

SEQ ID NO: 730076 - RNA, 19 nt, Artificial Sequence
  Description of Artificial Sequence: Synthetic oligonucleotide
uucugagauuuuacgugac

SEQ ID NO: 730077 - RNA, 19 nt, Artificial Sequence
  Description of Artificial Sequence: Synthetic oligonucleotide
acucaagcacuuugacuag

SEQ ID NO: 730078 - RNA, 19 nt, Artificial Sequence
  Description of Artificial Sequence: Synthetic oligonucleotide
cucaugcacaucagggcag

SEQ ID NO: 730079 - RNA, 19 nt, Artificial Sequence
  Description of Artificial Sequence: Synthetic oligonucleotide
acuuugcgcuuucuuuccg

SEQ ID NO: 730080 - RNA, 19 nt, Artificial Sequence
  Description of Artificial Sequence: Synthetic oligonucleotide
ccaacccuggaaauaaugc

SEQ ID NO: 730081 - RNA, 19 nt, Artificial Sequence
  Description of Artificial Sequence: Synthetic oligonucleotide
ucacuugcagauucaggaa

SEQ ID NO: 730082 - RNA, 19 nt, Artificial Sequence
  Description of Artificial Sequence: Synthetic oligonucleotide
agauuuuacgugacagaag

SEQ ID NO: 730083 - RNA, 19 nt, Artificial Sequence
  Description of Artificial Sequence: Synthetic oligonucleotide
ucaugcacaucagggcagg

SEQ ID NO: 730084 - RNA, 19 nt, Artificial Sequence
  Description of Artificial Sequence: Synthetic oligonucleotide
uucccgcuuguguuugugg

SEQ ID NO: 730085 - RNA, 19 nt, Artificial Sequence
  Description of Artificial Sequence: Synthetic oligonucleotide
cuuuaaauucccgcuugug

SEQ ID NO: 730086 - RNA, 19 nt, Artificial Sequence
  Description of Artificial Sequence: Synthetic oligonucleotide
cuccaauuucuugagccgc

SEQ ID NO: 730087 - RNA, 19 nt, Artificial Sequence
  Description of Artificial Sequence: Synthetic oligonucleotide
uucauccuguuagagggcu

SEQ ID NO: 730088 - RNA, 19 nt, Artificial Sequence
  Description of Artificial Sequence: Synthetic oligonucleotide
acaguucacaagaugcucu

SEQ ID NO: 730089 - RNA, 19 nt, Artificial Sequence
  Description of Artificial Sequence: Synthetic oligonucleotide
aggucugguguacugucug

SEQ ID NO: 730090 - RNA, 19 nt, Artificial Sequence
  Description of Artificial Sequence: Synthetic oligonucleotide
uaugcaucuggcugggguu

SEQ ID NO: 730091 - RNA, 19 nt, Artificial Sequence
  Description of Artificial Sequence: Synthetic oligonucleotide
cugacaguaugcuucgaga

SEQ ID NO: 730092 - RNA, 19 nt, Artificial Sequence
  Description of Artificial Sequence: Synthetic oligonucleotide
uguguccucccuacucuca

SEQ ID NO: 730093 - RNA, 19 nt, Artificial Sequence
  Description of Artificial Sequence: Synthetic oligonucleotide
auaaugcccggccuuuggu

SEQ ID NO: 730094 - RNA, 19 nt, Artificial Sequence
  Description of Artificial Sequence: Synthetic oligonucleotide
guuuggaguugcuauguaa

SEQ ID NO: 730095 - RNA, 19 nt, Artificial Sequence
  Description of Artificial Sequence: Synthetic oligonucleotide
aggcaggauagucugguau

SEQ ID NO: 730096 - RNA, 19 nt, Artificial Sequence
  Description of Artificial Sequence: Synthetic oligonucleotide
agucacuugcagauucagg

SEQ ID NO: 730097 - RNA, 19 nt, Artificial Sequence
  Description of Artificial Sequence: Synthetic oligonucleotide
uuccgcaucccguuccaug

SEQ ID NO: 730098 - RNA, 19 nt, Artificial Sequence
  Description of Artificial Sequence: Synthetic oligonucleotide
agucugguaugauuggcuu

SEQ ID NO: 730099 - RNA, 19 nt, Artificial Sequence
  Description of Artificial Sequence: Synthetic oligonucleotide
auuaugucauaugcaucug

SEQ ID NO: 730100 - RNA, 19 nt, Artificial Sequence
  Description of Artificial Sequence: Synthetic oligonucleotide
auggaaggagggcaauaca

SEQ ID NO: 730101 - RNA, 19 nt, Artificial Sequence
  Description of Artificial Sequence: Synthetic oligonucleotide
caagaugcucugucaggag

SEQ ID NO: 730102 - RNA, 19 nt, Artificial Sequence
  Description of Artificial Sequence: Synthetic oligonucleotide
agagcggaaccuuggcucu

SEQ ID NO: 730103 - RNA, 19 nt, Artificial Sequence
  Description of Artificial Sequence: Synthetic oligonucleotide
ggccuuuuaucacaucuug

SEQ ID NO: 730104 - RNA, 19 nt, Artificial Sequence
  Description of Artificial Sequence: Synthetic oligonucleotide
aguaugcuucgagacagcu

SEQ ID NO: 730105 - RNA, 19 nt, Artificial Sequence
  Description of Artificial Sequence: Synthetic oligonucleotide
ccuucugaucaucacuugg

SEQ ID NO: 730106 - RNA, 19 nt, Artificial Sequence
  Description of Artificial Sequence: Synthetic oligonucleotide
augagcacauccaacccug

SEQ ID NO: 730107 - RNA, 19 nt, Artificial Sequence
  Description of Artificial Sequence: Synthetic oligonucleotide
uccgacugcaagacuugga

SEQ ID NO: 730108 - RNA, 19 nt, Artificial Sequence
  Description of Artificial Sequence: Synthetic oligonucleotide
ggaggcuacaguucacaag

SEQ ID NO: 730109 - RNA, 19 nt, Artificial Sequence
  Description of Artificial Sequence: Synthetic oligonucleotide
cagucuacuugcccagugc

SEQ ID NO: 730110 - RNA, 19 nt, Artificial Sequence
  Description of Artificial Sequence: Synthetic oligonucleotide
uaaugcccggccuuugguc

SEQ ID NO: 730111 - RNA, 19 nt, Artificial Sequence
  Description of Artificial Sequence: Synthetic oligonucleotide
gcaauuccgaauucuuccc

SEQ ID NO: 730112 - RNA, 19 nt, Artificial Sequence
  Description of Artificial Sequence: Synthetic oligonucleotide
gagucacuugcagauucag

SEQ ID NO: 730113 - RNA, 19 nt, Artificial Sequence
  Description of Artificial Sequence: Synthetic oligonucleotide
uucccaucuuuguaagaaa

SEQ ID NO: 730114 - RNA, 19 nt, Artificial Sequence
  Description of Artificial Sequence: Synthetic oligonucleotide
ccgaauucuucccaagugc

SEQ ID NO: 730115 - RNA, 19 nt, Artificial Sequence
  Description of Artificial Sequence: Synthetic oligonucleotide
auuuuacgugacagaagag

SEQ ID NO: 730116 - RNA, 19 nt, Artificial Sequence
  Description of Artificial Sequence: Synthetic oligonucleotide
cucccuacucucaucucac

SEQ ID NO: 730117 - RNA, 19 nt, Artificial Sequence
  Description of Artificial Sequence: Synthetic oligonucleotide
uuccgacugcaagacuugg

SEQ ID NO: 730118 - RNA, 19 nt, Artificial Sequence
  Description of Artificial Sequence: Synthetic oligonucleotide
caucgcuuucuucuguguc

SEQ ID NO: 730119 - RNA, 19 nt, Artificial Sequence
  Description of Artificial Sequence: Synthetic oligonucleotide
cucuaaaagggugcaccag

SEQ ID NO: 730120 - RNA, 19 nt, Artificial Sequence
  Description of Artificial Sequence: Synthetic oligonucleotide
ggaucucccggacagcacc

SEQ ID NO: 730121 - RNA, 19 nt, Artificial Sequence
  Description of Artificial Sequence: Synthetic oligonucleotide
uguuuggaguugcuaugua

SEQ ID NO: 730122 - RNA, 19 nt, Artificial Sequence
  Description of Artificial Sequence: Synthetic oligonucleotide
guacaugagcacacagugc

SEQ ID NO: 730123 - RNA, 19 nt, Artificial Sequence
  Description of Artificial Sequence: Synthetic oligonucleotide
aaacgccuaucaucuuuau

SEQ ID NO: 730124 - RNA, 19 nt, Artificial Sequence
  Description of Artificial Sequence: Synthetic oligonucleotide
gucaucugcugacauaugu

SEQ ID NO: 730125 - RNA, 19 nt, Artificial Sequence
  Description of Artificial Sequence: Synthetic oligonucleotide
cuaguauaaauccaucauu

SEQ ID NO: 730126 - RNA, 19 nt, Artificial Sequence
  Description of Artificial Sequence: Synthetic oligonucleotide
guguuuguggauuagucuu

SEQ ID NO: 730127 - RNA, 19 nt, Artificial Sequence
  Description of Artificial Sequence: Synthetic oligonucleotide
auuagacuccagguccgag

SEQ ID NO: 730128 - RNA, 19 nt, Artificial Sequence
  Description of Artificial Sequence: Synthetic oligonucleotide
gguaugauuggcuucaguu

SEQ ID NO: 730129 - RNA, 19 nt, Artificial Sequence
  Description of Artificial Sequence: Synthetic oligonucleotide
uuccauugaucuuccugau

SEQ ID NO: 730130 - RNA, 19 nt, Artificial Sequence
  Description of Artificial Sequence: Synthetic oligonucleotide
uagccaaaucuccuacgua

SEQ ID NO: 730131 - RNA, 19 nt, Artificial Sequence
  Description of Artificial Sequence: Synthetic oligonucleotide
aggacgggacacuuaguaa

SEQ ID NO: 730132 - RNA, 19 nt, Artificial Sequence
  Description of Artificial Sequence: Synthetic oligonucleotide
ggauuagucuuuuccuuuc

SEQ ID NO: 730133 - RNA, 19 nt, Artificial Sequence
  Description of Artificial Sequence: Synthetic oligonucleotide
ucguugagccugucucucc

SEQ ID NO: 730134 - RNA, 19 nt, Artificial Sequence
  Description of Artificial Sequence: Synthetic oligonucleotide
guuuccguccaaacucaag

SEQ ID NO: 730135 - RNA, 19 nt, Artificial Sequence
  Description of Artificial Sequence: Synthetic oligonucleotide
guagccaaaucuccuacgu

SEQ ID NO: 730136 - RNA, 19 nt, Artificial Sequence
  Description of Artificial Sequence: Synthetic oligonucleotide
aggauucaggagcugcaaa

SEQ ID NO: 730137 - RNA, 19 nt, Artificial Sequence
  Description of Artificial Sequence: Synthetic oligonucleotide
cucaagcacuuugacuagc

SEQ ID NO: 730138 - RNA, 19 nt, Artificial Sequence
  Description of Artificial Sequence: Synthetic oligonucleotide
cuuagcuccucauaggauu

SEQ ID NO: 730139 - RNA, 19 nt, Artificial Sequence
  Description of Artificial Sequence: Synthetic oligonucleotide
aauucccgcuuguguuugu

SEQ ID NO: 730140 - RNA, 19 nt, Artificial Sequence
  Description of Artificial Sequence: Synthetic oligonucleotide
uguuuccguccaaacucaa

SEQ ID NO: 730141 - RNA, 19 nt, Artificial Sequence
  Description of Artificial Sequence: Synthetic oligonucleotide
ggcuacaguucacaagaug

SEQ ID NO: 730142 - RNA, 19 nt, Artificial Sequence
  Description of Artificial Sequence: Synthetic oligonucleotide
uauuagacuccagguccga

SEQ ID NO: 730143 - RNA, 19 nt, Artificial Sequence
  Description of Artificial Sequence: Synthetic oligonucleotide
aucccguuccaugauuucu

SEQ ID NO: 730144 - RNA, 19 nt, Artificial Sequence
  Description of Artificial Sequence: Synthetic oligonucleotide
cagcaccuuuaaauucccg

SEQ ID NO: 730145 - RNA, 19 nt, Artificial Sequence
  Description of Artificial Sequence: Synthetic oligonucleotide
ccgaguggcugucugagcc

SEQ ID NO: 730146 - RNA, 19 nt, Artificial Sequence
  Description of Artificial Sequence: Synthetic oligonucleotide
cacuugcagauucaggaaa

SEQ ID NO: 730147 - RNA, 19 nt, Artificial Sequence
  Description of Artificial Sequence: Synthetic oligonucleotide
gccuaucaucuuuaucuag

SEQ ID NO: 730148 - RNA, 19 nt, Artificial Sequence
  Description of Artificial Sequence: Synthetic oligonucleotide
uucguugagccugucucuc

SEQ ID NO: 730149 - RNA, 19 nt, Artificial Sequence
  Description of Artificial Sequence: Synthetic oligonucleotide
ugaucaucacuuggcaauu

SEQ ID NO: 730150 - RNA, 19 nt, Artificial Sequence
  Description of Artificial Sequence: Synthetic oligonucleotide
ucccuacucucaucucacc

SEQ ID NO: 730151 - RNA, 19 nt, Artificial Sequence
  Description of Artificial Sequence: Synthetic oligonucleotide
cagggaugaaccuccgaga

SEQ ID NO: 730152 - RNA, 19 nt, Artificial Sequence
  Description of Artificial Sequence: Synthetic oligonucleotide
gugcucagucuacuugccc

SEQ ID NO: 730153 - RNA, 19 nt, Artificial Sequence
  Description of Artificial Sequence: Synthetic oligonucleotide
ucugccacguggccauauc

SEQ ID NO: 730154 - RNA, 19 nt, Artificial Sequence
  Description of Artificial Sequence: Synthetic oligonucleotide
caaacgccuaucaucuuua

SEQ ID NO: 730155 - RNA, 19 nt, Artificial Sequence
  Description of Artificial Sequence: Synthetic oligonucleotide
ccaaaucuccuacguauug

SEQ ID NO: 730156 - RNA, 19 nt, Artificial Sequence
  Description of Artificial Sequence: Synthetic oligonucleotide
auaacagcccggugauuuu

SEQ ID NO: 730157 - RNA, 19 nt, Artificial Sequence
  Description of Artificial Sequence: Synthetic oligonucleotide
gaggccaggcaggauaguc

SEQ ID NO: 730158 - RNA, 19 nt, Artificial Sequence
  Description of Artificial Sequence: Synthetic oligonucleotide
ucccggacagcaccuuuaa

SEQ ID NO: 730159 - RNA, 19 nt, Artificial Sequence
  Description of Artificial Sequence: Synthetic oligonucleotide
cagugcaaggagaggcuuc

SEQ ID NO: 730160 - RNA, 19 nt, Artificial Sequence
  Description of Artificial Sequence: Synthetic oligonucleotide
cucauaggauucaggagcu

SEQ ID NO: 730161 - RNA, 19 nt, Artificial Sequence
  Description of Artificial Sequence: Synthetic oligonucleotide
caguaugcuucgagacagc

SEQ ID NO: 730162 - RNA, 19 nt, Artificial Sequence
  Description of Artificial Sequence: Synthetic oligonucleotide
ggugcaccagagcggaacc

SEQ ID NO: 730163 - RNA, 19 nt, Artificial Sequence
  Description of Artificial Sequence: Synthetic oligonucleotide
agguccgaguggcugucug

SEQ ID NO: 730164 - RNA, 19 nt, Artificial Sequence
  Description of Artificial Sequence: Synthetic oligonucleotide
caggacgggacacuuagua

SEQ ID NO: 730165 - RNA, 19 nt, Artificial Sequence
  Description of Artificial Sequence: Synthetic oligonucleotide
cccuacucucaucucaccc

SEQ ID NO: 730166 - RNA, 19 nt, Artificial Sequence
  Description of Artificial Sequence: Synthetic oligonucleotide
cgaaccauuaugucauaug

SEQ ID NO: 730167 - RNA, 19 nt, Artificial Sequence
  Description of Artificial Sequence: Synthetic oligonucleotide
agccaucgcuuucuucugu

SEQ ID NO: 730168 - RNA, 19 nt, Artificial Sequence
  Description of Artificial Sequence: Synthetic oligonucleotide
gcuauguaaagaaucccaa

SEQ ID NO: 730169 - RNA, 19 nt, Artificial Sequence
  Description of Artificial Sequence: Synthetic oligonucleotide
gcucuaaaagggugcacca

SEQ ID NO: 730170 - RNA, 19 nt, Artificial Sequence
  Description of Artificial Sequence: Synthetic oligonucleotide
cuccuacguauugcaaaag

SEQ ID NO: 730171 - RNA, 19 nt, Artificial Sequence
  Description of Artificial Sequence: Synthetic oligonucleotide
caucccguuccaugauuuc

SEQ ID NO: 730172 - RNA, 19 nt, Artificial Sequence
  Description of Artificial Sequence: Synthetic oligonucleotide
guaugcuucgagacagcuc

SEQ ID NO: 730173 - RNA, 19 nt, Artificial Sequence
  Description of Artificial Sequence: Synthetic oligonucleotide
acugcaagacuuggauggu

SEQ ID NO: 730174 - RNA, 19 nt, Artificial Sequence
  Description of Artificial Sequence: Synthetic oligonucleotide
aaauaacagcccggugauu

SEQ ID NO: 730175 - RNA, 19 nt, Artificial Sequence
  Description of Artificial Sequence: Synthetic oligonucleotide
acgaaccauuaugucauau

SEQ ID NO: 730176 - RNA, 19 nt, Artificial Sequence
  Description of Artificial Sequence: Synthetic oligonucleotide
cauccuguuagagggcuga

SEQ ID NO: 730177 - RNA, 19 nt, Artificial Sequence
  Description of Artificial Sequence: Synthetic oligonucleotide
cauaucaguggcuggcagu

SEQ ID NO: 730178 - RNA, 19 nt, Artificial Sequence
  Description of Artificial Sequence: Synthetic oligonucleotide
caucuggcugggguuuucc

SEQ ID NO: 730179 - RNA, 19 nt, Artificial Sequence
  Description of Artificial Sequence: Synthetic oligonucleotide
augccagaaaucagaaguu

SEQ ID NO: 730180 - RNA, 19 nt, Artificial Sequence
  Description of Artificial Sequence: Synthetic oligonucleotide
ugcaccagagcggaaccuu

SEQ ID NO: 730181 - RNA, 19 nt, Artificial Sequence
  Description of Artificial Sequence: Synthetic oligonucleotide
ccuggaaauaaugcccggc

SEQ ID NO: 730182 - RNA, 19 nt, Artificial Sequence
  Description of Artificial Sequence: Synthetic oligonucleotide
auucccgcuuguguuugug

SEQ ID NO: 730183 - RNA, 19 nt, Artificial Sequence
  Description of Artificial Sequence: Synthetic oligonucleotide
guggauuagucuuuuccuu

SEQ ID NO: 730184 - RNA, 19 nt, Artificial Sequence
  Description of Artificial Sequence: Synthetic oligonucleotide
uugcgcuuucuuuccgcau

SEQ ID NO: 730185 - RNA, 19 nt, Artificial Sequence
  Description of Artificial Sequence: Synthetic oligonucleotide
acgggacacuuaguaagca

SEQ ID NO: 730186 - RNA, 19 nt, Artificial Sequence
  Description of Artificial Sequence: Synthetic oligonucleotide
caugcacaucagggcaggg

SEQ ID NO: 730187 - RNA, 19 nt, Artificial Sequence
  Description of Artificial Sequence: Synthetic oligonucleotide
aggccaggcaggauagucu

SEQ ID NO: 730188 - RNA, 19 nt, Artificial Sequence
  Description of Artificial Sequence: Synthetic oligonucleotide
uggcaucacggagaacaaa

SEQ ID NO: 730189 - RNA, 19 nt, Artificial Sequence
  Description of Artificial Sequence: Synthetic oligonucleotide
gcucacgaaccauuauguc

SEQ ID NO: 730190 - RNA, 19 nt, Artificial Sequence
  Description of Artificial Sequence: Synthetic oligonucleotide
ggugggguuugaugauggc

SEQ ID NO: 730191 - RNA, 19 nt, Artificial Sequence
  Description of Artificial Sequence: Synthetic oligonucleotide
cuucguugagccugucucu

SEQ ID NO: 730192 - RNA, 19 nt, Artificial Sequence
  Description of Artificial Sequence: Synthetic oligonucleotide
ggaaauaaugcccggccuu

SEQ ID NO: 730193 - RNA, 19 nt, Artificial Sequence
  Description of Artificial Sequence: Synthetic oligonucleotide
cuucuuguguggccaagcu

SEQ ID NO: 730194 - RNA, 19 nt, Artificial Sequence
  Description of Artificial Sequence: Synthetic oligonucleotide
cacauaucaguggcuggca

SEQ ID NO: 730195 - RNA, 19 nt, Artificial Sequence
  Description of Artificial Sequence: Synthetic oligonucleotide
caggaauaagcagcacaca

SEQ ID NO: 730196 - RNA, 19 nt, Artificial Sequence
  Description of Artificial Sequence: Synthetic oligonucleotide
caucuuuaucuaguauaaa

SEQ ID NO: 730197 - RNA, 19 nt, Artificial Sequence
  Description of Artificial Sequence: Synthetic oligonucleotide
uccucccuacucucaucuc

SEQ ID NO: 730198 - RNA, 19 nt, Artificial Sequence
  Description of Artificial Sequence: Synthetic oligonucleotide
uucugacaguaugcuucga

SEQ ID NO: 730199 - RNA, 19 nt, Artificial Sequence
  Description of Artificial Sequence: Synthetic oligonucleotide
gcaauacacuguacaugag

SEQ ID NO: 730200 - RNA, 19 nt, Artificial Sequence
  Description of Artificial Sequence: Synthetic oligonucleotide
caaucaacuuaucgauggu

SEQ ID NO: 730201 - RNA, 19 nt, Artificial Sequence
  Description of Artificial Sequence: Synthetic oligonucleotide
acguggccauaucugcuuu

SEQ ID NO: 730202 - RNA, 19 nt, Artificial Sequence
  Description of Artificial Sequence: Synthetic oligonucleotide
gcuuguguuuguggauuag

SEQ ID NO: 730203 - RNA, 19 nt, Artificial Sequence
  Description of Artificial Sequence: Synthetic oligonucleotide
cugguaugauuggcuucag

SEQ ID NO: 730204 - RNA, 19 nt, Artificial Sequence
  Description of Artificial Sequence: Synthetic oligonucleotide
ggacacuuaguaagcaucu

SEQ ID NO: 730205 - RNA, 19 nt, Artificial Sequence
  Description of Artificial Sequence: Synthetic oligonucleotide
gucuguagccaaaucuccu

SEQ ID NO: 730206 - RNA, 19 nt, Artificial Sequence
  Description of Artificial Sequence: Synthetic oligonucleotide
aaccuccgagacagggcca

SEQ ID NO: 730207 - RNA, 19 nt, Artificial Sequence
  Description of Artificial Sequence: Synthetic oligonucleotide
cccuggaaauaaugcccgg

SEQ ID NO: 730208 - RNA, 19 nt, Artificial Sequence
  Description of Artificial Sequence: Synthetic oligonucleotide
gcaggauagucugguauga

SEQ ID NO: 730209 - RNA, 19 nt, Artificial Sequence
  Description of Artificial Sequence: Synthetic oligonucleotide
gcacuuugacuagcugggg

SEQ ID NO: 730210 - RNA, 19 nt, Artificial Sequence
  Description of Artificial Sequence: Synthetic oligonucleotide
gcuucgagacagcuccuga

SEQ ID NO: 730211 - RNA, 19 nt, Artificial Sequence
  Description of Artificial Sequence: Synthetic oligonucleotide
ggucagacaugaggccagg

SEQ ID NO: 730212 - RNA, 19 nt, Artificial Sequence
  Description of Artificial Sequence: Synthetic oligonucleotide
cguugagccugucucuccc

SEQ ID NO: 730213 - RNA, 19 nt, Artificial Sequence
  Description of Artificial Sequence: Synthetic oligonucleotide
uuagcgggacuggcuugcu

SEQ ID NO: 730214 - RNA, 19 nt, Artificial Sequence
  Description of Artificial Sequence: Synthetic oligonucleotide
gggugcaccagagcggaac

SEQ ID NO: 730215 - RNA, 19 nt, Artificial Sequence
  Description of Artificial Sequence: Synthetic oligonucleotide
ggaaggagggcaauacacu

SEQ ID NO: 730216 - RNA, 19 nt, Artificial Sequence
  Description of Artificial Sequence: Synthetic oligonucleotide
gaguugcuauguaaagaau

SEQ ID NO: 730217 - RNA, 19 nt, Artificial Sequence
  Description of Artificial Sequence: Synthetic oligonucleotide
cccggugauuuucaaauaa

SEQ ID NO: 730218 - RNA, 19 nt, Artificial Sequence
  Description of Artificial Sequence: Synthetic oligonucleotide
guuagagggcugagccuuc

SEQ ID NO: 730219 - RNA, 19 nt, Artificial Sequence
  Description of Artificial Sequence: Synthetic oligonucleotide
ccggacagcaccuuuaaau

SEQ ID NO: 730220 - RNA, 19 nt, Artificial Sequence
  Description of Artificial Sequence: Synthetic oligonucleotide
auggcaucacggagaacaa

SEQ ID NO: 730221 - RNA, 19 nt, Artificial Sequence
  Description of Artificial Sequence: Synthetic oligonucleotide
ccguuccaugauuucugag

SEQ ID NO: 730222 - RNA, 19 nt, Artificial Sequence
  Description of Artificial Sequence: Synthetic oligonucleotide
cuguuagagggcugagccu

SEQ ID NO: 730223 - RNA, 19 nt, Artificial Sequence
  Description of Artificial Sequence: Synthetic oligonucleotide
gcaaacgccuaucaucuuu

SEQ ID NO: 730224 - RNA, 19 nt, Artificial Sequence
  Description of Artificial Sequence: Synthetic oligonucleotide
gggaggcuacaguucacaa

SEQ ID NO: 730225 - RNA, 19 nt, Artificial Sequence
  Description of Artificial Sequence: Synthetic oligonucleotide
caccuuuaaauucccgcuu

SEQ ID NO: 730226 - RNA, 19 nt, Artificial Sequence
  Description of Artificial Sequence: Synthetic oligonucleotide
cacggagaacaaauuugau

SEQ ID NO: 730227 - RNA, 19 nt, Artificial Sequence
  Description of Artificial Sequence: Synthetic oligonucleotide
ccugcucuuccuuagugcu

SEQ ID NO: 730228 - RNA, 19 nt, Artificial Sequence
  Description of Artificial Sequence: Synthetic oligonucleotide
gguccgaguggcugucuga

SEQ ID NO: 730229 - RNA, 19 nt, Artificial Sequence
  Description of Artificial Sequence: Synthetic oligonucleotide
ccaccaaaagcugcucuuc

SEQ ID NO: 730230 - RNA, 19 nt, Artificial Sequence
  Description of Artificial Sequence: Synthetic oligonucleotide
acaggacgggacacuuagu

SEQ ID NO: 730231 - RNA, 19 nt, Artificial Sequence
  Description of Artificial Sequence: Synthetic oligonucleotide
gaacagcuuuagcgggacu

SEQ ID NO: 730232 - RNA, 19 nt, Artificial Sequence
  Description of Artificial Sequence: Synthetic oligonucleotide
gugcaaggagaggcuuccc

SEQ ID NO: 730233 - RNA, 19 nt, Artificial Sequence
  Description of Artificial Sequence: Synthetic oligonucleotide
cagcccggugauuuucaaa

SEQ ID NO: 730234 - RNA, 19 nt, Artificial Sequence
  Description of Artificial Sequence: Synthetic oligonucleotide
cugccacguggccauaucu

SEQ ID NO: 730235 - RNA, 19 nt, Artificial Sequence
  Description of Artificial Sequence: Synthetic oligonucleotide
gcuuuagcgggacuggcuu

SEQ ID NO: 730236 - RNA, 19 nt, Artificial Sequence
  Description of Artificial Sequence: Synthetic oligonucleotide
guguggccaagcuguuaaa

SEQ ID NO: 730237 - RNA, 19 nt, Artificial Sequence
  Description of Artificial Sequence: Synthetic oligonucleotide
ugcaucuggcugggguuuu

SEQ ID NO: 730238 - RNA, 19 nt, Artificial Sequence
  Description of Artificial Sequence: Synthetic oligonucleotide
aggcuacaguucacaagau

SEQ ID NO: 730239 - RNA, 19 nt, Artificial Sequence
  Description of Artificial Sequence: Synthetic oligonucleotide
ccucacucucuguauuaga

SEQ ID NO: 730240 - RNA, 19 nt, Artificial Sequence
  Description of Artificial Sequence: Synthetic oligonucleotide
ccguccaaacucaagcacu

SEQ ID NO: 730241 - RNA, 19 nt, Artificial Sequence
  Description of Artificial Sequence: Synthetic oligonucleotide
gcggaaccuuggcucuuag

SEQ ID NO: 730242 - RNA, 19 nt, Artificial Sequence
  Description of Artificial Sequence: Synthetic oligonucleotide
agcggaaccuuggcucuua

SEQ ID NO: 730243 - RNA, 19 nt, Artificial Sequence
  Description of Artificial Sequence: Synthetic oligonucleotide
ggagggcaauacacuguac

SEQ ID NO: 730244 - RNA, 19 nt, Artificial Sequence
  Description of Artificial Sequence: Synthetic oligonucleotide
cgugacagaagagucugga

SEQ ID NO: 730245 - RNA, 19 nt, Artificial Sequence
  Description of Artificial Sequence: Synthetic oligonucleotide
guacugucuguagccaaau

SEQ ID NO: 730246 - RNA, 19 nt, Artificial Sequence
  Description of Artificial Sequence: Synthetic oligonucleotide
augcuucgagacagcuccu

SEQ ID NO: 730247 - RNA, 19 nt, Artificial Sequence
  Description of Artificial Sequence: Synthetic oligonucleotide
caccuucuuguguggccaa

SEQ ID NO: 730248 - RNA, 19 nt, Artificial Sequence
  Description of Artificial Sequence: Synthetic oligonucleotide
ggucugguguacugucugu

SEQ ID NO: 730249 - RNA, 19 nt, Artificial Sequence
  Description of Artificial Sequence: Synthetic oligonucleotide
ccgacugcaagacuuggau

SEQ ID NO: 730250 - RNA, 19 nt, Artificial Sequence
  Description of Artificial Sequence: Synthetic oligonucleotide
cgagacagcuccugaaggu

SEQ ID NO: 730251 - RNA, 19 nt, Artificial Sequence
  Description of Artificial Sequence: Synthetic oligonucleotide
gcccggugauuuucaaaua

SEQ ID NO: 730252 - RNA, 19 nt, Artificial Sequence
  Description of Artificial Sequence: Synthetic oligonucleotide
caggauagucugguaugau

SEQ ID NO: 730253 - RNA, 19 nt, Artificial Sequence
  Description of Artificial Sequence: Synthetic oligonucleotide
cucagucuacuugcccagu

SEQ ID NO: 730254 - RNA, 19 nt, Artificial Sequence
  Description of Artificial Sequence: Synthetic oligonucleotide
ccagagcggaaccuuggcu

SEQ ID NO: 730255 - RNA, 19 nt, Artificial Sequence
  Description of Artificial Sequence: Synthetic oligonucleotide
gccaagcucacgaaccauu

SEQ ID NO: 730256 - RNA, 19 nt, Artificial Sequence
  Description of Artificial Sequence: Synthetic oligonucleotide
cgccuaucaucuuuaucua

SEQ ID NO: 730257 - RNA, 19 nt, Artificial Sequence
  Description of Artificial Sequence: Synthetic oligonucleotide
ccaucgcuuucuucugugu

SEQ ID NO: 730258 - RNA, 19 nt, Artificial Sequence
  Description of Artificial Sequence: Synthetic oligonucleotide
cgagacagggccacauagu

SEQ ID NO: 730259 - RNA, 19 nt, Artificial Sequence
  Description of Artificial Sequence: Synthetic oligonucleotide
ggacaggacgggacacuua

SEQ ID NO: 730260 - RNA, 19 nt, Artificial Sequence
  Description of Artificial Sequence: Synthetic oligonucleotide
gcauggcaucacggagaac

SEQ ID NO: 730261 - RNA, 19 nt, Artificial Sequence
  Description of Artificial Sequence: Synthetic oligonucleotide
gagcggaaccuuggcucuu

SEQ ID NO: 730262 - RNA, 19 nt, Artificial Sequence
  Description of Artificial Sequence: Synthetic oligonucleotide
cccgcuuguguuuguggau

SEQ ID NO: 730263 - RNA, 19 nt, Artificial Sequence
  Description of Artificial Sequence: Synthetic oligonucleotide
cccggacagcaccuuuaaa

SEQ ID NO: 730264 - RNA, 19 nt, Artificial Sequence
  Description of Artificial Sequence: Synthetic oligonucleotide
ccgcuuguguuuguggauu

SEQ ID NO: 730265 - RNA, 19 nt, Artificial Sequence
  Description of Artificial Sequence: Synthetic oligonucleotide
ccuccgagacagggccaca

SEQ ID NO: 730266 - RNA, 19 nt, Artificial Sequence
  Description of Artificial Sequence: Synthetic oligonucleotide
cgcaucccguuccaugauu

SEQ ID NO: 730267 - RNA, 19 nt, Artificial Sequence
  Description of Artificial Sequence: Synthetic oligonucleotide
uggacaauaacuaccaacg

SEQ ID NO: 730268 - RNA, 19 nt, Artificial Sequence
  Description of Artificial Sequence: Synthetic oligonucleotide
aaugaguggaaugagacgg

SEQ ID NO: 730269 - RNA, 19 nt, Artificial Sequence
  Description of Artificial Sequence: Synthetic oligonucleotide
  modified_base (2)..(2): a, c, u, g, unknown or other
anaggcuaucaucaaaggg

SEQ ID NO: 730270 - RNA, 19 nt, Artificial Sequence
  Description of Artificial Sequence: Synthetic oligonucleotide
aagaucguaagauggcacc

SEQ ID NO: 730271 - RNA, 19 nt, Artificial Sequence
  Description of Artificial Sequence: Synthetic oligonucleotide
uuuagugaggucuaggaca

SEQ ID NO: 730272 - RNA, 19 nt, Artificial Sequence
  Description of Artificial Sequence: Synthetic oligonucleotide
aacaugucuucaccgaccc

SEQ ID NO: 730273 - RNA, 19 nt, Artificial Sequence
  Description of Artificial Sequence: Synthetic oligonucleotide
agaaagugaagccucggcc

SEQ ID NO: 730274 - RNA, 19 nt, Artificial Sequence
  Description of Artificial Sequence: Synthetic oligonucleotide
aaugcugugguuccauacg

SEQ ID NO: 730275 - RNA, 19 nt, Artificial Sequence
  Description of Artificial Sequence: Synthetic oligonucleotide
uuuggaagcacacaaugcu

SEQ ID NO: 730276 - RNA, 19 nt, Artificial Sequence
  Description of Artificial Sequence: Synthetic oligonucleotide
uuugaaaugaguggaauga

SEQ ID NO: 730277 - RNA, 19 nt, Artificial Sequence
  Description of Artificial Sequence: Synthetic oligonucleotide
gaugccgccaaucucagag

SEQ ID NO: 730278 - RNA, 19 nt, Artificial Sequence
  Description of Artificial Sequence: Synthetic oligonucleotide
gacaauaacuaccaacggc

SEQ ID NO: 730279 - RNA, 19 nt, Artificial Sequence
  Description of Artificial Sequence: Synthetic oligonucleotide
aggugggacauugagaucc

SEQ ID NO: 730280 - RNA, 19 nt, Artificial Sequence
  Description of Artificial Sequence: Synthetic oligonucleotide
ucucagagucgcuaaagcg

SEQ ID NO: 730281 - RNA, 19 nt, Artificial Sequence
  Description of Artificial Sequence: Synthetic oligonucleotide
agugucuuaugguuucugc

SEQ ID NO: 730282 - RNA, 19 nt, Artificial Sequence
  Description of Artificial Sequence: Synthetic oligonucleotide
ugaucgaauggacaggucu

SEQ ID NO: 730283 - RNA, 19 nt, Artificial Sequence
  Description of Artificial Sequence: Synthetic oligonucleotide
cuugcauucgcccagccag

SEQ ID NO: 730284 - RNA, 19 nt, Artificial Sequence
  Description of Artificial Sequence: Synthetic oligonucleotide
aacugugaccaagacacac

SEQ ID NO: 730285 - RNA, 19 nt, Artificial Sequence
  Description of Artificial Sequence: Synthetic oligonucleotide
aucucagagucgcuaaagc

SEQ ID NO: 730286 - RNA, 19 nt, Artificial Sequence
  Description of Artificial Sequence: Synthetic oligonucleotide
auagagacagaagaggcuc

SEQ ID NO: 730287 - RNA, 19 nt, Artificial Sequence
  Description of Artificial Sequence: Synthetic oligonucleotide
acaugggcaauggugaugc

SEQ ID NO: 730288 - RNA, 19 nt, Artificial Sequence
  Description of Artificial Sequence: Synthetic oligonucleotide
  modified_base (3)..(3): a, c, u, g, unknown or other
ganaggcuaucaucaaagg

SEQ ID NO: 730289 - RNA, 19 nt, Artificial Sequence
  Description of Artificial Sequence: Synthetic oligonucleotide
gaagccgaugaucagccgg

SEQ ID NO: 730290 - RNA, 19 nt, Artificial Sequence
  Description of Artificial Sequence: Synthetic oligonucleotide
uggaaugagacgguggagg

SEQ ID NO: 730291 - RNA, 19 nt, Artificial Sequence
  Description of Artificial Sequence: Synthetic oligonucleotide
acauugagaucccagguug

SEQ ID NO: 730292 - RNA, 19 nt, Artificial Sequence
  Description of Artificial Sequence: Synthetic oligonucleotide
acaauaacuaccaacggca

SEQ ID NO: 730293 - RNA, 19 nt, Artificial Sequence
  Description of Artificial Sequence: Synthetic oligonucleotide
ucggagaaagcauuguccc

SEQ ID NO: 730294 - RNA, 19 nt, Artificial Sequence
  Description of Artificial Sequence: Synthetic oligonucleotide
ugaccaagacacacaacgg

SEQ ID NO: 730295 - RNA, 19 nt, Artificial Sequence
  Description of Artificial Sequence: Synthetic oligonucleotide
aaagguucagggcuagaca

SEQ ID NO: 730296 - RNA, 19 nt, Artificial Sequence
  Description of Artificial Sequence: Synthetic oligonucleotide
uuagugaggucuaggacac

SEQ ID NO: 730297 - RNA, 19 nt, Artificial Sequence
  Description of Artificial Sequence: Synthetic oligonucleotide
cuaccaacggcagagacag

SEQ ID NO: 730298 - RNA, 19 nt, Artificial Sequence
  Description of Artificial Sequence: Synthetic oligonucleotide
acaacggugcuggaaagcc

SEQ ID NO: 730299 - RNA, 19 nt, Artificial Sequence
  Description of Artificial Sequence: Synthetic oligonucleotide
uacauugauugacucuucc

SEQ ID NO: 730300 - RNA, 19 nt, Artificial Sequence
  Description of Artificial Sequence: Synthetic oligonucleotide
ucucguuccacagucaucu

SEQ ID NO: 730301 - RNA, 19 nt, Artificial Sequence
  Description of Artificial Sequence: Synthetic oligonucleotide
cacaaaaggcacucggucc

SEQ ID NO: 730302 - RNA, 19 nt, Artificial Sequence
  Description of Artificial Sequence: Synthetic oligonucleotide
guuguugucuugguuaccg

SEQ ID NO: 730303 - RNA, 19 nt, Artificial Sequence
  Description of Artificial Sequence: Synthetic oligonucleotide
ucagagucgcuaaagcgga

SEQ ID NO: 730304 - RNA, 19 nt, Artificial Sequence
  Description of Artificial Sequence: Synthetic oligonucleotide
uuuucuaucuguggggcgc

SEQ ID NO: 730305 - RNA, 19 nt, Artificial Sequence
  Description of Artificial Sequence: Synthetic oligonucleotide
ugggaguagauuuccacca

SEQ ID NO: 730306 - RNA, 19 nt, Artificial Sequence
  Description of Artificial Sequence: Synthetic oligonucleotide
aggucuuuagcagaaaaug

SEQ ID NO: 730307 - RNA, 19 nt, Artificial Sequence
  Description of Artificial Sequence: Synthetic oligonucleotide
ugcauggagguaucggagg

SEQ ID NO: 730308 - RNA, 19 nt, Artificial Sequence
  Description of Artificial Sequence: Synthetic oligonucleotide
ggagacagcguuuagugag

SEQ ID NO: 730309 - RNA, 19 nt, Artificial Sequence
  Description of Artificial Sequence: Synthetic oligonucleotide
uuaccguggacaauaacua

SEQ ID NO: 730310 - RNA, 19 nt, Artificial Sequence
  Description of Artificial Sequence: Synthetic oligonucleotide
aaucucagagucgcuaaag

SEQ ID NO: 730311 - RNA, 19 nt, Artificial Sequence
  Description of Artificial Sequence: Synthetic oligonucleotide
aguggaaugagacggugga

SEQ ID NO: 730312 - RNA, 19 nt, Artificial Sequence
  Description of Artificial Sequence: Synthetic oligonucleotide
accguggacaauaacuacc

SEQ ID NO: 730313 - RNA, 19 nt, Artificial Sequence
  Description of Artificial Sequence: Synthetic oligonucleotide
ugugguuccauacgccgcc

SEQ ID NO: 730314 - RNA, 19 nt, Artificial Sequence
  Description of Artificial Sequence: Synthetic oligonucleotide
aaagugaagccucggccca

SEQ ID NO: 730315 - RNA, 19 nt, Artificial Sequence
  Description of Artificial Sequence: Synthetic oligonucleotide
guggacaauaacuaccaac

SEQ ID NO: 730316 - RNA, 19 nt, Artificial Sequence
  Description of Artificial Sequence: Synthetic oligonucleotide
aaggaacagcuggagacgg

SEQ ID NO: 730317 - RNA, 19 nt, Artificial Sequence
  Description of Artificial Sequence: Synthetic oligonucleotide
auggacaggucuuuagcag

SEQ ID NO: 730318 - RNA, 19 nt, Artificial Sequence
  Description of Artificial Sequence: Synthetic oligonucleotide
ugucuuaugguuucugcau

SEQ ID NO: 730319 - RNA, 19 nt, Artificial Sequence
  Description of Artificial Sequence: Synthetic oligonucleotide
uacguaaccccucccgucc

SEQ ID NO: 730320 - RNA, 19 nt, Artificial Sequence
  Description of Artificial Sequence: Synthetic oligonucleotide
auugagaucccagguugcc

SEQ ID NO: 730321 - RNA, 19 nt, Artificial Sequence
  Description of Artificial Sequence: Synthetic oligonucleotide
gaaguacauugauugacuc

SEQ ID NO: 730322 - RNA, 19 nt, Artificial Sequence
  Description of Artificial Sequence: Synthetic oligonucleotide
ucguaagauggcaccgugg

SEQ ID NO: 730323 - RNA, 19 nt, Artificial Sequence
  Description of Artificial Sequence: Synthetic oligonucleotide
ugggacauugagaucccag

SEQ ID NO: 730324 - RNA, 19 nt, Artificial Sequence
  Description of Artificial Sequence: Synthetic oligonucleotide
aguacauugauugacucuu

SEQ ID NO: 730325 - RNA, 19 nt, Artificial Sequence
  Description of Artificial Sequence: Synthetic oligonucleotide
auuggccggacuuucuauc

SEQ ID NO: 730326 - RNA, 19 nt, Artificial Sequence
  Description of Artificial Sequence: Synthetic oligonucleotide
  modified_base (8)..(8): a, c, u, g, unknown or other
agcccganaggcuaucauc

SEQ ID NO: 730327 - RNA, 19 nt, Artificial Sequence
  Description of Artificial Sequence: Synthetic oligonucleotide
ucuuaugguuucugcaugu

SEQ ID NO: 730328 - RNA, 19 nt, Artificial Sequence
  Description of Artificial Sequence: Synthetic oligonucleotide
ucuugauggcagucgauac

SEQ ID NO: 730329 - RNA, 19 nt, Artificial Sequence
  Description of Artificial Sequence: Synthetic oligonucleotide
agcuuucacaccuuuucug

SEQ ID NO: 730330 - RNA, 19 nt, Artificial Sequence
  Description of Artificial Sequence: Synthetic oligonucleotide
auacguaaccccucccguc

SEQ ID NO: 730331 - RNA, 19 nt, Artificial Sequence
  Description of Artificial Sequence: Synthetic oligonucleotide
gagguucaggguuucacac

SEQ ID NO: 730332 - RNA, 19 nt, Artificial Sequence
  Description of Artificial Sequence: Synthetic oligonucleotide
agcggaggaggaaaguucc

SEQ ID NO: 730333 - RNA, 19 nt, Artificial Sequence
  Description of Artificial Sequence: Synthetic oligonucleotide
cuugugacguacuguuugc

SEQ ID NO: 730334 - RNA, 19 nt, Artificial Sequence
  Description of Artificial Sequence: Synthetic oligonucleotide
ggucuuuagcagaaaaugg

SEQ ID NO: 730335 - RNA, 19 nt, Artificial Sequence
  Description of Artificial Sequence: Synthetic oligonucleotide
gaguagauuuccaccaagc

SEQ ID NO: 730336 - RNA, 19 nt, Artificial Sequence
  Description of Artificial Sequence: Synthetic oligonucleotide
gguccguagguccaggugg

SEQ ID NO: 730337 - RNA, 19 nt, Artificial Sequence
  Description of Artificial Sequence: Synthetic oligonucleotide
uggcagucgauacguaacc

SEQ ID NO: 730338 - RNA, 19 nt, Artificial Sequence
  Description of Artificial Sequence: Synthetic oligonucleotide
ucguuccacagucaucuug

SEQ ID NO: 730339 - RNA, 19 nt, Artificial Sequence
  Description of Artificial Sequence: Synthetic oligonucleotide
guuuagugaggucuaggac

SEQ ID NO: 730340 - RNA, 19 nt, Artificial Sequence
  Description of Artificial Sequence: Synthetic oligonucleotide
cuaaagcggaggaggaaag

SEQ ID NO: 730341 - RNA, 19 nt, Artificial Sequence
  Description of Artificial Sequence: Synthetic oligonucleotide
agaucguaagauggcaccg

SEQ ID NO: 730342 - RNA, 19 nt, Artificial Sequence
  Description of Artificial Sequence: Synthetic oligonucleotide
caagaucguaagauggcac

SEQ ID NO: 730343 - RNA, 19 nt, Artificial Sequence
  Description of Artificial Sequence: Synthetic oligonucleotide
accaacugggguugguccg

SEQ ID NO: 730344 - RNA, 19 nt, Artificial Sequence
  Description of Artificial Sequence: Synthetic oligonucleotide
uggcucguugaggagaagg

SEQ ID NO: 730345 - RNA, 19 nt, Artificial Sequence
  Description of Artificial Sequence: Synthetic oligonucleotide
agcaagaucccggauucgg

SEQ ID NO: 730346 - RNA, 19 nt, Artificial Sequence
  Description of Artificial Sequence: Synthetic oligonucleotide
uccaggugggacauugaga

SEQ ID NO: 730347 - RNA, 19 nt, Artificial Sequence
  Description of Artificial Sequence: Synthetic oligonucleotide
guugcauggagguaucgga

SEQ ID NO: 730348 - RNA, 19 nt, Artificial Sequence
  Description of Artificial Sequence: Synthetic oligonucleotide
uccacgcuaaggcuguugu

SEQ ID NO: 730349 - RNA, 19 nt, Artificial Sequence
  Description of Artificial Sequence: Synthetic oligonucleotide
uccaccaagcuuucacacc

SEQ ID NO: 730350 - RNA, 19 nt, Artificial Sequence
  Description of Artificial Sequence: Synthetic oligonucleotide
uugguuaccguggacaaua

SEQ ID NO: 730351 - RNA, 19 nt, Artificial Sequence
  Description of Artificial Sequence: Synthetic oligonucleotide
ucuugguuaccguggacaa

SEQ ID NO: 730352 - RNA, 19 nt, Artificial Sequence
  Description of Artificial Sequence: Synthetic oligonucleotide
auggcagucgauacguaac

SEQ ID NO: 730353 - RNA, 19 nt, Artificial Sequence
  Description of Artificial Sequence: Synthetic oligonucleotide
guuaccguggacaauaacu

SEQ ID NO: 730354 - RNA, 19 nt, Artificial Sequence
  Description of Artificial Sequence: Synthetic oligonucleotide
gaaucaccaacugggguug

SEQ ID NO: 730355 - RNA, 19 nt, Artificial Sequence
  Description of Artificial Sequence: Synthetic oligonucleotide
ugaggucuaggacaccauc

SEQ ID NO: 730356 - RNA, 19 nt, Artificial Sequence
  Description of Artificial Sequence: Synthetic oligonucleotide
gauguguuuggaagcacac

SEQ ID NO: 730357 - RNA, 19 nt, Artificial Sequence
  Description of Artificial Sequence: Synthetic oligonucleotide
agugaucgaauggacaggu

SEQ ID NO: 730358 - RNA, 19 nt, Artificial Sequence
  Description of Artificial Sequence: Synthetic oligonucleotide
  modified_base (4)..(4): a, c, u, g, unknown or other
cganaggcuaucaucaaag

SEQ ID NO: 730359 - RNA, 19 nt, Artificial Sequence
  Description of Artificial Sequence: Synthetic oligonucleotide
ucggaggccauuccaagau

SEQ ID NO: 730360 - RNA, 19 nt, Artificial Sequence
  Description of Artificial Sequence: Synthetic oligonucleotide
caaagguucagggcuagac

SEQ ID NO: 730361 - RNA, 19 nt, Artificial Sequence
  Description of Artificial Sequence: Synthetic oligonucleotide
aucguaagauggcaccgug

SEQ ID NO: 730362 - RNA, 19 nt, Artificial Sequence
  Description of Artificial Sequence: Synthetic oligonucleotide
gucgauacguaaccccucc

SEQ ID NO: 730363 - RNA, 19 nt, Artificial Sequence
  Description of Artificial Sequence: Synthetic oligonucleotide
agugccauuggccggacuu

SEQ ID NO: 730364 - RNA, 19 nt, Artificial Sequence
  Description of Artificial Sequence: Synthetic oligonucleotide
caccaacugggguuggucc

SEQ ID NO: 730365 - RNA, 19 nt, Artificial Sequence
  Description of Artificial Sequence: Synthetic oligonucleotide
uuggccggacuuucuauca

SEQ ID NO: 730366 - RNA, 19 nt, Artificial Sequence
  Description of Artificial Sequence: Synthetic oligonucleotide
gcuugugacguacuguuug

SEQ ID NO: 730367 - RNA, 19 nt, Artificial Sequence
  Description of Artificial Sequence: Synthetic oligonucleotide
gagacagcguuuagugagg

SEQ ID NO: 730368 - RNA, 19 nt, Artificial Sequence
  Description of Artificial Sequence: Synthetic oligonucleotide
caaaggguaggcucaucug

SEQ ID NO: 730369 - RNA, 19 nt, Artificial Sequence
  Description of Artificial Sequence: Synthetic oligonucleotide
ggugagguccuguucagug

SEQ ID NO: 730370 - RNA, 19 nt, Artificial Sequence
  Description of Artificial Sequence: Synthetic oligonucleotide
gugucuuaugguuucugca

SEQ ID NO: 730371 - RNA, 19 nt, Artificial Sequence
  Description of Artificial Sequence: Synthetic oligonucleotide
ugugacguacuguuugcua

SEQ ID NO: 730372 - RNA, 19 nt, Artificial Sequence
  Description of Artificial Sequence: Synthetic oligonucleotide
caagaucccggauucgguc

SEQ ID NO: 730373 - RNA, 19 nt, Artificial Sequence
  Description of Artificial Sequence: Synthetic oligonucleotide
uaccguggacaauaacuac

SEQ ID NO: 730374 - RNA, 19 nt, Artificial Sequence
  Description of Artificial Sequence: Synthetic oligonucleotide
ucuggcucguugaggagaa

SEQ ID NO: 730375 - RNA, 19 nt, Artificial Sequence
  Description of Artificial Sequence: Synthetic oligonucleotide
ugguccguagguccaggug

SEQ ID NO: 730376 - RNA, 19 nt, Artificial Sequence
  Description of Artificial Sequence: Synthetic oligonucleotide
ggaguagauuuccaccaag

SEQ ID NO: 730377 - RNA, 19 nt, Artificial Sequence
  Description of Artificial Sequence: Synthetic oligonucleotide
gugacguacuguuugcuaa

SEQ ID NO: 730378 - RNA, 19 nt, Artificial Sequence
  Description of Artificial Sequence: Synthetic oligonucleotide
gagaaggcgcgucucccgc

SEQ ID NO: 730379 - RNA, 19 nt, Artificial Sequence
  Description of Artificial Sequence: Synthetic oligonucleotide
ugggacugacacugcaaca

SEQ ID NO: 730380 - RNA, 19 nt, Artificial Sequence
  Description of Artificial Sequence: Synthetic oligonucleotide
gaccaagacacacaacggu

SEQ ID NO: 730381 - RNA, 19 nt, Artificial Sequence
  Description of Artificial Sequence: Synthetic oligonucleotide
gaccccgaaugacaugggc

SEQ ID NO: 730382 - RNA, 19 nt, Artificial Sequence
  Description of Artificial Sequence: Synthetic oligonucleotide
acguacuguuugcuaauga

SEQ ID NO: 730383 - RNA, 19 nt, Artificial Sequence
  Description of Artificial Sequence: Synthetic oligonucleotide
cauaugaggcucuggagua

SEQ ID NO: 730384 - RNA, 19 nt, Artificial Sequence
  Description of Artificial Sequence: Synthetic oligonucleotide
aggucuaggacaccaucaa

SEQ ID NO: 730385 - RNA, 19 nt, Artificial Sequence
  Description of Artificial Sequence: Synthetic oligonucleotide
uggauccuuuucagcacca

SEQ ID NO: 730386 - RNA, 19 nt, Artificial Sequence
  Description of Artificial Sequence: Synthetic oligonucleotide
ugccgccaaucucagaguc

SEQ ID NO: 730387 - RNA, 19 nt, Artificial Sequence
  Description of Artificial Sequence: Synthetic oligonucleotide
guaagauggcaccguggug

SEQ ID NO: 730388 - RNA, 19 nt, Artificial Sequence
  Description of Artificial Sequence: Synthetic oligonucleotide
uggucagguccucgcuugg

SEQ ID NO: 730389 - RNA, 19 nt, Artificial Sequence
  Description of Artificial Sequence: Synthetic oligonucleotide
aucggaggccauuccaaga

SEQ ID NO: 730390 - RNA, 19 nt, Artificial Sequence
  Description of Artificial Sequence: Synthetic oligonucleotide
gauacguaaccccucccgu

SEQ ID NO: 730391 - RNA, 19 nt, Artificial Sequence
  Description of Artificial Sequence: Synthetic oligonucleotide
ugaguugcauggagguauc

SEQ ID NO: 730392 - RNA, 19 nt, Artificial Sequence
  Description of Artificial Sequence: Synthetic oligonucleotide
uguucaguggguggcagua

SEQ ID NO: 730393 - RNA, 19 nt, Artificial Sequence
  Description of Artificial Sequence: Synthetic oligonucleotide
cacgcuaaggcuguuguca

SEQ ID NO: 730394 - RNA, 19 nt, Artificial Sequence
  Description of Artificial Sequence: Synthetic oligonucleotide
uccugaccccgaaugacau

SEQ ID NO: 730395 - RNA, 19 nt, Artificial Sequence
  Description of Artificial Sequence: Synthetic oligonucleotide
gaaguccccggcugguccc

SEQ ID NO: 730396 - RNA, 19 nt, Artificial Sequence
  Description of Artificial Sequence: Synthetic oligonucleotide
ugaccccgaaugacauggg

SEQ ID NO: 730397 - RNA, 19 nt, Artificial Sequence
  Description of Artificial Sequence: Synthetic oligonucleotide
ucugaccaauagcuccgga

SEQ ID NO: 730398 - RNA, 19 nt, Artificial Sequence
  Description of Artificial Sequence: Synthetic oligonucleotide
ggcauaugaggcucuggag

SEQ ID NO: 730399 - RNA, 19 nt, Artificial Sequence
  Description of Artificial Sequence: Synthetic oligonucleotide
cacacaacggugcuggaaa

SEQ ID NO: 730400 - RNA, 19 nt, Artificial Sequence
  Description of Artificial Sequence: Synthetic oligonucleotide
acuaccaacggcagagaca

SEQ ID NO: 730401 - RNA, 19 nt, Artificial Sequence
  Description of Artificial Sequence: Synthetic oligonucleotide
cauacgccgccuugcauuc

SEQ ID NO: 730402 - RNA, 19 nt, Artificial Sequence
  Description of Artificial Sequence: Synthetic oligonucleotide
cacucgguccaccucggag

SEQ ID NO: 730403 - RNA, 19 nt, Artificial Sequence
  Description of Artificial Sequence: Synthetic oligonucleotide
uuucuaucuguggggcgcc

SEQ ID NO: 730404 - RNA, 19 nt, Artificial Sequence
  Description of Artificial Sequence: Synthetic oligonucleotide
uaaagcggaggaggaaagu

SEQ ID NO: 730405 - RNA, 19 nt, Artificial Sequence
  Description of Artificial Sequence: Synthetic oligonucleotide
uccggagacagcguuuagu

SEQ ID NO: 730406 - RNA, 19 nt, Artificial Sequence
  Description of Artificial Sequence: Synthetic oligonucleotide
cagugaucgaauggacagg

SEQ ID NO: 730407 - RNA, 19 nt, Artificial Sequence
  Description of Artificial Sequence: Synthetic oligonucleotide
uggcucaacacagcauccc

SEQ ID NO: 730408 - RNA, 19 nt, Artificial Sequence
  Description of Artificial Sequence: Synthetic oligonucleotide
caggcuuauaguggcuccg

SEQ ID NO: 730409 - RNA, 19 nt, Artificial Sequence
  Description of Artificial Sequence: Synthetic oligonucleotide
cauuccaagaucguaagau

SEQ ID NO: 730410 - RNA, 19 nt, Artificial Sequence
  Description of Artificial Sequence: Synthetic oligonucleotide
gagacgguggaggguaccc

SEQ ID NO: 730411 - RNA, 19 nt, Artificial Sequence
  Description of Artificial Sequence: Synthetic oligonucleotide
ugucuugguuaccguggac

SEQ ID NO: 730412 - RNA, 19 nt, Artificial Sequence
  Description of Artificial Sequence: Synthetic oligonucleotide
acugugaccaagacacaca

SEQ ID NO: 730413 - RNA, 19 nt, Artificial Sequence
  Description of Artificial Sequence: Synthetic oligonucleotide
cagcuaccacaaaaggcac

SEQ ID NO: 730414 - RNA, 19 nt, Artificial Sequence
  Description of Artificial Sequence: Synthetic oligonucleotide
aggcuuauaguggcuccgg

SEQ ID NO: 730415 - RNA, 19 nt, Artificial Sequence
  Description of Artificial Sequence: Synthetic oligonucleotide
agguccauagagacagaag

SEQ ID NO: 730416 - RNA, 19 nt, Artificial Sequence
  Description of Artificial Sequence: Synthetic oligonucleotide
agucgauacguaaccccuc

SEQ ID NO: 730417 - RNA, 19 nt, Artificial Sequence
  Description of Artificial Sequence: Synthetic oligonucleotide
gaguugcauggagguaucg

SEQ ID NO: 730418 - RNA, 19 nt, Artificial Sequence
  Description of Artificial Sequence: Synthetic oligonucleotide
gacgguggaggguacccca

SEQ ID NO: 730419 - RNA, 19 nt, Artificial Sequence
  Description of Artificial Sequence: Synthetic oligonucleotide
ccucgcuuggaccagugcc

SEQ ID NO: 730420 - RNA, 19 nt, Artificial Sequence
  Description of Artificial Sequence: Synthetic oligonucleotide
gggguugguccguaggucc

SEQ ID NO: 730421 - RNA, 19 nt, Artificial Sequence
  Description of Artificial Sequence: Synthetic oligonucleotide
uugcauucgcccagccagu

SEQ ID NO: 730422 - RNA, 19 nt, Artificial Sequence
  Description of Artificial Sequence: Synthetic oligonucleotide
cauagagacagaagaggcu

SEQ ID NO: 730423 - RNA, 19 nt, Artificial Sequence
  Description of Artificial Sequence: Synthetic oligonucleotide
cuggaaguacauugauuga

SEQ ID NO: 730424 - RNA, 19 nt, Artificial Sequence
  Description of Artificial Sequence: Synthetic oligonucleotide
cucgcuuggaccagugcca

SEQ ID NO: 730425 - RNA, 19 nt, Artificial Sequence
  Description of Artificial Sequence: Synthetic oligonucleotide
aaguccccggcuggucccc

SEQ ID NO: 730426 - RNA, 19 nt, Artificial Sequence
  Description of Artificial Sequence: Synthetic oligonucleotide
agugaagccucggcccaac

SEQ ID NO: 730427 - RNA, 19 nt, Artificial Sequence
  Description of Artificial Sequence: Synthetic oligonucleotide
ccggagacagcguuuagug

SEQ ID NO: 730428 - RNA, 19 nt, Artificial Sequence
  Description of Artificial Sequence: Synthetic oligonucleotide
accguggugggcauaugag

SEQ ID NO: 730429 - RNA, 19 nt, Artificial Sequence
  Description of Artificial Sequence: Synthetic oligonucleotide
gcggaacucuucuauaaca

SEQ ID NO: 730430 - RNA, 19 nt, Artificial Sequence
  Description of Artificial Sequence: Synthetic oligonucleotide
cuaccacaaaaggcacucg

SEQ ID NO: 730431 - RNA, 19 nt, Artificial Sequence
  Description of Artificial Sequence: Synthetic oligonucleotide
uccucgcuuggaccagugc

SEQ ID NO: 730432 - RNA, 19 nt, Artificial Sequence
  Description of Artificial Sequence: Synthetic oligonucleotide
uugugacguacuguuugcu

SEQ ID NO: 730433 - RNA, 19 nt, Artificial Sequence
  Description of Artificial Sequence: Synthetic oligonucleotide
aggcuaucaucaaagggau

SEQ ID NO: 730434 - RNA, 19 nt, Artificial Sequence
  Description of Artificial Sequence: Synthetic oligonucleotide
gagguaucggaggccauuc

SEQ ID NO: 730435 - RNA, 19 nt, Artificial Sequence
  Description of Artificial Sequence: Synthetic oligonucleotide
gaaggcgcgucucccgcac

SEQ ID NO: 730436 - RNA, 19 nt, Artificial Sequence
  Description of Artificial Sequence: Synthetic oligonucleotide
accccgaaugacaugggca

SEQ ID NO: 730437 - RNA, 19 nt, Artificial Sequence
  Description of Artificial Sequence: Synthetic oligonucleotide
aggcgcgucucccgcacuc

SEQ ID NO: 730438 - RNA, 19 nt, Artificial Sequence
  Description of Artificial Sequence: Synthetic oligonucleotide
guccguagguccagguggg

SEQ ID NO: 730439 - RNA, 19 nt, Artificial Sequence
  Description of Artificial Sequence: Synthetic oligonucleotide
ugguuaccguggacaauaa

SEQ ID NO: 730440 - RNA, 19 nt, Artificial Sequence
  Description of Artificial Sequence: Synthetic oligonucleotide
gcuaccacaaaaggcacuc

SEQ ID NO: 730441 - RNA, 19 nt, Artificial Sequence
  Description of Artificial Sequence: Synthetic oligonucleotide
uguggggcgccauccugac

SEQ ID NO: 730442 - RNA, 19 nt, Artificial Sequence
  Description of Artificial Sequence: Synthetic oligonucleotide
cuaucuguggggcgccauc

SEQ ID NO: 730443 - RNA, 19 nt, Artificial Sequence
  Description of Artificial Sequence: Synthetic oligonucleotide
gguuccauacgccgccuug

SEQ ID NO: 730444 - RNA, 19 nt, Artificial Sequence
  Description of Artificial Sequence: Synthetic oligonucleotide
guggaaugagacgguggag

SEQ ID NO: 730445 - RNA, 19 nt, Artificial Sequence
  Description of Artificial Sequence: Synthetic oligonucleotide
  modified_base (7)..(7): a, c, u, g, unknown or other
gcccganaggcuaucauca

SEQ ID NO: 730446 - RNA, 19 nt, Artificial Sequence
  Description of Artificial Sequence: Synthetic oligonucleotide
acgcuaaggcuguugucau

SEQ ID NO: 730447 - RNA, 19 nt, Artificial Sequence
  Description of Artificial Sequence: Synthetic oligonucleotide
uugguccguagguccaggu

SEQ ID NO: 730448 - RNA, 19 nt, Artificial Sequence
  Description of Artificial Sequence: Synthetic oligonucleotide
ugagacgguggaggguacc

SEQ ID NO: 730449 - RNA, 19 nt, Artificial Sequence
  Description of Artificial Sequence: Synthetic oligonucleotide
cgauacguaaccccucccg

SEQ ID NO: 730450 - RNA, 19 nt, Artificial Sequence
  Description of Artificial Sequence: Synthetic oligonucleotide
ccguggugggcauaugagg

SEQ ID NO: 730451 - RNA, 19 nt, Artificial Sequence
  Description of Artificial Sequence: Synthetic oligonucleotide
agcguuuagugaggucuag

SEQ ID NO: 730452 - RNA, 19 nt, Artificial Sequence
  Description of Artificial Sequence: Synthetic oligonucleotide
uucaccgacccaggugccc

SEQ ID NO: 730453 - RNA, 19 nt, Artificial Sequence
  Description of Artificial Sequence: Synthetic oligonucleotide
cuucaccgacccaggugcc

SEQ ID NO: 730454 - RNA, 19 nt, Artificial Sequence
  Description of Artificial Sequence: Synthetic oligonucleotide
gacagcguuuagugagguc

SEQ ID NO: 730455 - RNA, 19 nt, Artificial Sequence
  Description of Artificial Sequence: Synthetic oligonucleotide
uggccggacuuucuaucaa

SEQ ID NO: 730456 - RNA, 19 nt, Artificial Sequence
  Description of Artificial Sequence: Synthetic oligonucleotide
guucuuuccuccugaccaa

SEQ ID NO: 730457 - RNA, 19 nt, Artificial Sequence
  Description of Artificial Sequence: Synthetic oligonucleotide
ggccggacuuucuaucaag

SEQ ID NO: 730458 - RNA, 19 nt, Artificial Sequence
  Description of Artificial Sequence: Synthetic oligonucleotide
gguaccccauaucugagcu

SEQ ID NO: 730459 - RNA, 19 nt, Artificial Sequence
  Description of Artificial Sequence: Synthetic oligonucleotide
cuggaaagccuccacgcua

SEQ ID NO: 730460 - RNA, 19 nt, Artificial Sequence
  Description of Artificial Sequence: Synthetic oligonucleotide
cugauguguuuggaagcac

SEQ ID NO: 730461 - RNA, 19 nt, Artificial Sequence
  Description of Artificial Sequence: Synthetic oligonucleotide
acggugcuggaaagccucc

SEQ ID NO: 730462 - RNA, 19 nt, Artificial Sequence
  Description of Artificial Sequence: Synthetic oligonucleotide
cagucgauacguaaccccu

SEQ ID NO: 730463 - RNA, 19 nt, Artificial Sequence
  Description of Artificial Sequence: Synthetic oligonucleotide
gucugaccaauagcuccgg

SEQ ID NO: 730464 - RNA, 19 nt, Artificial Sequence
  Description of Artificial Sequence: Synthetic oligonucleotide
ggcggaacucuucuauaac

SEQ ID NO: 730465 - RNA, 19 nt, Artificial Sequence
  Description of Artificial Sequence: Synthetic oligonucleotide
guucaguggguggcaguag

SEQ ID NO: 730466 - RNA, 19 nt, Artificial Sequence
  Description of Artificial Sequence: Synthetic oligonucleotide
ucgaauggacaggucuuua

SEQ ID NO: 730467 - RNA, 19 nt, Artificial Sequence
  Description of Artificial Sequence: Synthetic oligonucleotide
gcguuguugucuugguuac

SEQ ID NO: 730468 - RNA, 19 nt, Artificial Sequence
  Description of Artificial Sequence: Synthetic oligonucleotide
uucucggagaaggcgcguc

SEQ ID NO: 730469 - RNA, 19 nt, Artificial Sequence
  Description of Artificial Sequence: Synthetic oligonucleotide
cugaguugcauggagguau

SEQ ID NO: 730470 - RNA, 19 nt, Artificial Sequence
  Description of Artificial Sequence: Synthetic oligonucleotide
gcuuauaguggcuccggaa

SEQ ID NO: 730471 - RNA, 19 nt, Artificial Sequence
  Description of Artificial Sequence: Synthetic oligonucleotide
auucggucucccagugauc

SEQ ID NO: 730472 - RNA, 19 nt, Artificial Sequence
  Description of Artificial Sequence: Synthetic oligonucleotide
auaucugagcugaguugca

SEQ ID NO: 730473 - RNA, 19 nt, Artificial Sequence
  Description of Artificial Sequence: Synthetic oligonucleotide
ggcuagacacagcaugcuc

SEQ ID NO: 730474 - RNA, 19 nt, Artificial Sequence
  Description of Artificial Sequence: Synthetic oligonucleotide
cagugucuuaugguuucug

SEQ ID NO: 730475 - RNA, 19 nt, Artificial Sequence
  Description of Artificial Sequence: Synthetic oligonucleotide
aucgaauggacaggucuuu

SEQ ID NO: 730476 - RNA, 19 nt, Artificial Sequence
  Description of Artificial Sequence: Synthetic oligonucleotide
acacacaacggugcuggaa

SEQ ID NO: 730477 - RNA, 19 nt, Artificial Sequence
  Description of Artificial Sequence: Synthetic oligonucleotide
caccguggugggcauauga

SEQ ID NO: 730478 - RNA, 19 nt, Artificial Sequence
  Description of Artificial Sequence: Synthetic oligonucleotide
ugccauuggccggacuuuc

SEQ ID NO: 730479 - RNA, 19 nt, Artificial Sequence
  Description of Artificial Sequence: Synthetic oligonucleotide
cguuuagugaggucuagga

SEQ ID NO: 730480 - RNA, 19 nt, Artificial Sequence
  Description of Artificial Sequence: Synthetic oligonucleotide
ggaacagcuggagacggga

SEQ ID NO: 730481 - RNA, 19 nt, Artificial Sequence
  Description of Artificial Sequence: Synthetic oligonucleotide
ggaaguacauugauugacu

SEQ ID NO: 730482 - RNA, 19 nt, Artificial Sequence
  Description of Artificial Sequence: Synthetic oligonucleotide
aucccagguugcccauaag

SEQ ID NO: 730483 - RNA, 19 nt, Artificial Sequence
  Description of Artificial Sequence: Synthetic oligonucleotide
accucggagaaagcauugu

SEQ ID NO: 730484 - RNA, 19 nt, Artificial Sequence
  Description of Artificial Sequence: Synthetic oligonucleotide
gugaugccgccaaucucag

SEQ ID NO: 730485 - RNA, 19 nt, Artificial Sequence
  Description of Artificial Sequence: Synthetic oligonucleotide
cuguggggcgccauccuga

SEQ ID NO: 730486 - RNA, 19 nt, Artificial Sequence
  Description of Artificial Sequence: Synthetic oligonucleotide
guacauugauugacucuuc

SEQ ID NO: 730487 - RNA, 19 nt, Artificial Sequence
  Description of Artificial Sequence: Synthetic oligonucleotide
gcguuuagugaggucuagg

SEQ ID NO: 730488 - RNA, 19 nt, Artificial Sequence
  Description of Artificial Sequence: Synthetic oligonucleotide
ugaugccgccaaucucaga

SEQ ID NO: 730489 - RNA, 19 nt, Artificial Sequence
  Description of Artificial Sequence: Synthetic oligonucleotide
gaucguaagauggcaccgu

SEQ ID NO: 730490 - RNA, 19 nt, Artificial Sequence
  Description of Artificial Sequence: Synthetic oligonucleotide
ccgcacucggugcugaagc

SEQ ID NO: 730491 - RNA, 19 nt, Artificial Sequence
  Description of Artificial Sequence: Synthetic oligonucleotide
augagacgguggaggguac

SEQ ID NO: 730492 - RNA, 19 nt, Artificial Sequence
  Description of Artificial Sequence: Synthetic oligonucleotide
gguuaccguggacaauaac

SEQ ID NO: 730493 - RNA, 19 nt, Artificial Sequence
  Description of Artificial Sequence: Synthetic oligonucleotide
gaucgaauggacaggucuu

SEQ ID NO: 730494 - RNA, 19 nt, Artificial Sequence
  Description of Artificial Sequence: Synthetic oligonucleotide
ggggcauuugcaggugagg

SEQ ID NO: 730495 - RNA, 19 nt, Artificial Sequence
  Description of Artificial Sequence: Synthetic oligonucleotide
uucuccccuugaaguauuu

SEQ ID NO: 730496 - RNA, 19 nt, Artificial Sequence
  Description of Artificial Sequence: Synthetic oligonucleotide
uuucucggagaaggcgcgu

SEQ ID NO: 730497 - RNA, 19 nt, Artificial Sequence
  Description of Artificial Sequence: Synthetic oligonucleotide
caggucuuuagcagaaaau

SEQ ID NO: 730498 - RNA, 19 nt, Artificial Sequence
  Description of Artificial Sequence: Synthetic oligonucleotide
ucuaucuguggggcgccau

SEQ ID NO: 730499 - RNA, 19 nt, Artificial Sequence
  Description of Artificial Sequence: Synthetic oligonucleotide
ggcaguaggggagggaaca

SEQ ID NO: 730500 - RNA, 19 nt, Artificial Sequence
  Description of Artificial Sequence: Synthetic oligonucleotide
ccgccaaucucagagucgc

SEQ ID NO: 730501 - RNA, 19 nt, Artificial Sequence
  Description of Artificial Sequence: Synthetic oligonucleotide
ccguggacaauaacuacca

SEQ ID NO: 730502 - RNA, 19 nt, Artificial Sequence
  Description of Artificial Sequence: Synthetic oligonucleotide
aggaaguguucugguagaa

SEQ ID NO: 730503 - RNA, 19 nt, Artificial Sequence
  Description of Artificial Sequence: Synthetic oligonucleotide
caaucucagagucgcuaaa

SEQ ID NO: 730504 - RNA, 19 nt, Artificial Sequence
  Description of Artificial Sequence: Synthetic oligonucleotide
aaggcgcgucucccgcacu

SEQ ID NO: 730505 - RNA, 19 nt, Artificial Sequence
  Description of Artificial Sequence: Synthetic oligonucleotide
cuuuggcguuguugucuug

SEQ ID NO: 730506 - RNA, 19 nt, Artificial Sequence
  Description of Artificial Sequence: Synthetic oligonucleotide
agacgggaggcaccugcau

SEQ ID NO: 730507 - RNA, 19 nt, Artificial Sequence
  Description of Artificial Sequence: Synthetic oligonucleotide
aagugaagccucggcccaa

SEQ ID NO: 730508 - RNA, 19 nt, Artificial Sequence
  Description of Artificial Sequence: Synthetic oligonucleotide
cugagcaagaucccggauu

SEQ ID NO: 730509 - RNA, 19 nt, Artificial Sequence
  Description of Artificial Sequence: Synthetic oligonucleotide
ccucggagaaagcauuguc

SEQ ID NO: 730510 - RNA, 19 nt, Artificial Sequence
  Description of Artificial Sequence: Synthetic oligonucleotide
gccggacuuucuaucaagc

SEQ ID NO: 730511 - RNA, 19 nt, Artificial Sequence
  Description of Artificial Sequence: Synthetic oligonucleotide
caggugggacauugagauc

SEQ ID NO: 730512 - RNA, 19 nt, Artificial Sequence
  Description of Artificial Sequence: Synthetic oligonucleotide
ucggcccaacaggaucucc

SEQ ID NO: 730513 - RNA, 19 nt, Artificial Sequence
  Description of Artificial Sequence: Synthetic oligonucleotide
uucuaucuguggggcgcca

SEQ ID NO: 730514 - RNA, 19 nt, Artificial Sequence
  Description of Artificial Sequence: Synthetic oligonucleotide
uggagguaucggaggccau

SEQ ID NO: 730515 - RNA, 19 nt, Artificial Sequence
  Description of Artificial Sequence: Synthetic oligonucleotide
cguacuguuugcuaaugaa

SEQ ID NO: 730516 - RNA, 19 nt, Artificial Sequence
  Description of Artificial Sequence: Synthetic oligonucleotide
auagcuccggagacagcgu

SEQ ID NO: 730517 - RNA, 19 nt, Artificial Sequence
  Description of Artificial Sequence: Synthetic oligonucleotide
gaaugagacgguggagggu

SEQ ID NO: 730518 - RNA, 19 nt, Artificial Sequence
  Description of Artificial Sequence: Synthetic oligonucleotide
ucgcuuggaccagugccau

SEQ ID NO: 730519 - RNA, 19 nt, Artificial Sequence
  Description of Artificial Sequence: Synthetic oligonucleotide
cuccugggacugacacugc

SEQ ID NO: 730520 - RNA, 19 nt, Artificial Sequence
  Description of Artificial Sequence: Synthetic oligonucleotide
ugguuccauacgccgccuu

SEQ ID NO: 730521 - RNA, 19 nt, Artificial Sequence
  Description of Artificial Sequence: Synthetic oligonucleotide
gagcaaagguucagggcua

SEQ ID NO: 730522 - RNA, 19 nt, Artificial Sequence
  Description of Artificial Sequence: Synthetic oligonucleotide
gaucagccggucugaccaa

SEQ ID NO: 730523 - RNA, 19 nt, Artificial Sequence
  Description of Artificial Sequence: Synthetic oligonucleotide
guaggggagggaacauguc

SEQ ID NO: 730524 - RNA, 19 nt, Artificial Sequence
  Description of Artificial Sequence: Synthetic oligonucleotide
ccaagaucguaagauggca

SEQ ID NO: 730525 - RNA, 19 nt, Artificial Sequence
  Description of Artificial Sequence: Synthetic oligonucleotide
auacgccgccuugcauucg

SEQ ID NO: 730526 - RNA, 19 nt, Artificial Sequence
  Description of Artificial Sequence: Synthetic oligonucleotide
cccagugaucgaauggaca

SEQ ID NO: 730527 - RNA, 19 nt, Artificial Sequence
  Description of Artificial Sequence: Synthetic oligonucleotide
ugcauucgcccagccaguu

SEQ ID NO: 730528 - RNA, 19 nt, Artificial Sequence
  Description of Artificial Sequence: Synthetic oligonucleotide
cuccggagacagcguuuag

SEQ ID NO: 730529 - RNA, 19 nt, Artificial Sequence
  Description of Artificial Sequence: Synthetic oligonucleotide
uccguagguccagguggga

SEQ ID NO: 730530 - RNA, 19 nt, Artificial Sequence
  Description of Artificial Sequence: Synthetic oligonucleotide
gugaucgaauggacagguc

SEQ ID NO: 730531 - RNA, 19 nt, Artificial Sequence
  Description of Artificial Sequence: Synthetic oligonucleotide
  modified_base (11)..(11): a, c, u, g, unknown or other
ugcagcccganaggcuauc

SEQ ID NO: 730532 - RNA, 19 nt, Artificial Sequence
  Description of Artificial Sequence: Synthetic oligonucleotide
cauuggccggacuuucuau

SEQ ID NO: 730533 - RNA, 19 nt, Artificial Sequence
  Description of Artificial Sequence: Synthetic oligonucleotide
augugugccccaggcccug

SEQ ID NO: 730534 - RNA, 19 nt, Artificial Sequence
  Description of Artificial Sequence: Synthetic oligonucleotide
gccgccuugcauucgccca

SEQ ID NO: 730535 - RNA, 19 nt, Artificial Sequence
  Description of Artificial Sequence: Synthetic oligonucleotide
cugcugccgcuuccaaauc

SEQ ID NO: 730536 - RNA, 19 nt, Artificial Sequence
  Description of Artificial Sequence: Synthetic oligonucleotide
auggcaccguggugggcau

SEQ ID NO: 730537 - RNA, 19 nt, Artificial Sequence
  Description of Artificial Sequence: Synthetic oligonucleotide
gugaagccucggcccaaca

SEQ ID NO: 730538 - RNA, 19 nt, Artificial Sequence
  Description of Artificial Sequence: Synthetic oligonucleotide
ggauucggucucccaguga

SEQ ID NO: 730539 - RNA, 19 nt, Artificial Sequence
  Description of Artificial Sequence: Synthetic oligonucleotide
  modified_base (5)..(5): a, c, u, g, unknown or other
ccganaggcuaucaucaaa

SEQ ID NO: 730540 - RNA, 19 nt, Artificial Sequence
  Description of Artificial Sequence: Synthetic oligonucleotide
gucaaaggguaggcucauc

SEQ ID NO: 730541 - RNA, 19 nt, Artificial Sequence
  Description of Artificial Sequence: Synthetic oligonucleotide
uucgcccagccaguucuuu

SEQ ID NO: 730542 - RNA, 19 nt, Artificial Sequence
  Description of Artificial Sequence: Synthetic oligonucleotide
caacggugcuggaaagccu

SEQ ID NO: 730543 - RNA, 19 nt, Artificial Sequence
  Description of Artificial Sequence: Synthetic oligonucleotide
guggggcgccauccugacc

SEQ ID NO: 730544 - RNA, 19 nt, Artificial Sequence
  Description of Artificial Sequence: Synthetic oligonucleotide
guccucgcuuggaccagug

SEQ ID NO: 730545 - RNA, 19 nt, Artificial Sequence
  Description of Artificial Sequence: Synthetic oligonucleotide
gcgcgucucccgcacucgg

SEQ ID NO: 730546 - RNA, 19 nt, Artificial Sequence
  Description of Artificial Sequence: Synthetic oligonucleotide
cguaagauggcaccguggu

SEQ ID NO: 730547 - RNA, 19 nt, Artificial Sequence
  Description of Artificial Sequence: Synthetic oligonucleotide
guagguccaggugggacau

SEQ ID NO: 730548 - RNA, 19 nt, Artificial Sequence
  Description of Artificial Sequence: Synthetic oligonucleotide
ggcgcgucucccgcacucg

SEQ ID NO: 730549 - RNA, 19 nt, Artificial Sequence
  Description of Artificial Sequence: Synthetic oligonucleotide
gcauucgcccagccaguuc

SEQ ID NO: 730550 - RNA, 19 nt, Artificial Sequence
  Description of Artificial Sequence: Synthetic oligonucleotide
ucccgcacucggugcugaa

SEQ ID NO: 730551 - RNA, 19 nt, Artificial Sequence
  Description of Artificial Sequence: Synthetic oligonucleotide
ccacgcuaaggcuguuguc

SEQ ID NO: 730552 - RNA, 19 nt, Artificial Sequence
  Description of Artificial Sequence: Synthetic oligonucleotide
  modified_base (10)..(10): a, c, u, g, unknown or other
gcagcccganaggcuauca

SEQ ID NO: 730553 - RNA, 19 nt, Artificial Sequence
  Description of Artificial Sequence: Synthetic oligonucleotide
agcuccggagacagcguuu

SEQ ID NO: 730554 - RNA, 19 nt, Artificial Sequence
  Description of Artificial Sequence: Synthetic oligonucleotide
cuggcucguugaggagaag

SEQ ID NO: 730555 - RNA, 19 nt, Artificial Sequence
  Description of Artificial Sequence: Synthetic oligonucleotide
acgguggaggguaccccau

SEQ ID NO: 730556 - RNA, 19 nt, Artificial Sequence
  Description of Artificial Sequence: Synthetic oligonucleotide
ggguugguccguaggucca

SEQ ID NO: 730557 - RNA, 19 nt, Artificial Sequence
  Description of Artificial Sequence: Synthetic oligonucleotide
cggauucggucucccagug

SEQ ID NO: 730558 - RNA, 19 nt, Artificial Sequence
  Description of Artificial Sequence: Synthetic oligonucleotide
ccauacgccgccuugcauu

SEQ ID NO: 730559 - RNA, 19 nt, Artificial Sequence
  Description of Artificial Sequence: Synthetic oligonucleotide
ggucagguccucgcuugga

SEQ ID NO: 730560 - RNA, 19 nt, Artificial Sequence
  Description of Artificial Sequence: Synthetic oligonucleotide
  modified_base (6)..(6): a, c, u, g, unknown or other
cccganaggcuaucaucaa

SEQ ID NO: 730561 - RNA, 19 nt, Artificial Sequence
  Description of Artificial Sequence: Synthetic oligonucleotide
ucgguccaccucggagaaa

SEQ ID NO: 730562 - RNA, 19 nt, Artificial Sequence
  Description of Artificial Sequence: Synthetic oligonucleotide
ccggacuuucuaucaagcu

SEQ ID NO: 730563 - RNA, 19 nt, Artificial Sequence
  Description of Artificial Sequence: Synthetic oligonucleotide
gcaagaucccggauucggu

SEQ ID NO: 730564 - RNA, 19 nt, Artificial Sequence
  Description of Artificial Sequence: Synthetic oligonucleotide
cuugguuaccguggacaau

SEQ ID NO: 730565 - RNA, 19 nt, Artificial Sequence
  Description of Artificial Sequence: Synthetic oligonucleotide
gcuccggagacagcguuua

SEQ ID NO: 730566 - RNA, 19 nt, Artificial Sequence
  Description of Artificial Sequence: Synthetic oligonucleotide
  modified_base (9)..(9): a, c, u, g, unknown or other
cagcccganaggcuaucau

SEQ ID NO: 730567 - RNA, 19 nt, Artificial Sequence
  Description of Artificial Sequence: Synthetic oligonucleotide
ccucggcccaacaggaucu

SEQ ID NO: 730568 - RNA, 19 nt, Artificial Sequence
  Description of Artificial Sequence: Synthetic oligonucleotide
cgccgccuugcauucgccc

SEQ ID NO: 730569 - RNA, 19 nt, Artificial Sequence
  Description of Artificial Sequence: Synthetic oligonucleotide
ccucccguccuuccccauc

SEQ ID NO: 730570 - RNA, 19 nt, Artificial Sequence
  Description of Artificial Sequence: Synthetic oligonucleotide
ccggcugguccccaccuca

SEQ ID NO: 730571 - RNA, 19 nt, Artificial Sequence
  Description of Artificial Sequence: Synthetic oligonucleotide
auucgcccagccaguucuu

SEQ ID NO: 730572 - RNA, 19 nt, Artificial Sequence
  Description of Artificial Sequence: Synthetic oligonucleotide
cccgcacucggugcugaag

SEQ ID NO: 730573 - RNA, 19 nt, Artificial Sequence
  Description of Artificial Sequence: Synthetic oligonucleotide
gcggaggaggaaaguucca

SEQ ID NO: 730574 - RNA, 19 nt, Artificial Sequence
  Description of Artificial Sequence: Synthetic oligonucleotide
ggagguaucggaggccauu

SEQ ID NO: 730575 - RNA, 19 nt, Artificial Sequence
  Description of Artificial Sequence: Synthetic oligonucleotide
ccggauucggucucccagu

SEQ ID NO: 730576 - RNA, 19 nt, Artificial Sequence
  Description of Artificial Sequence: Synthetic oligonucleotide
gcacucggugcugaagccu

SEQ ID NO: 730577 - RNA, 19 nt, Artificial Sequence
  Description of Artificial Sequence: Synthetic oligonucleotide
gugccauuggccggacuuu

SEQ ID NO: 730578 - RNA, 19 nt, Artificial Sequence
  Description of Artificial Sequence: Synthetic oligonucleotide
gugguuccauacgccgccu

SEQ ID NO: 730579 - RNA, 19 nt, Artificial Sequence
  Description of Artificial Sequence: Synthetic oligonucleotide
ggucaaaggguaggcucau

SEQ ID NO: 730580 - RNA, 19 nt, Artificial Sequence
  Description of Artificial Sequence: Synthetic oligonucleotide
gcgccauccugaccccgaa

SEQ ID NO: 730581 - RNA, 19 nt, Artificial Sequence
  Description of Artificial Sequence: Synthetic oligonucleotide
gccauuggccggacuuucu

SEQ ID NO: 730582 - RNA, 19 nt, Artificial Sequence
  Description of Artificial Sequence: Synthetic oligonucleotide
cggucucccagugaucgaa

SEQ ID NO: 730583 - RNA, 19 nt, Artificial Sequence
  Description of Artificial Sequence: Synthetic oligonucleotide
ccaucuguucaggcuuaua

SEQ ID NO: 730584 - RNA, 19 nt, Artificial Sequence
  Description of Artificial Sequence: Synthetic oligonucleotide
cguugaggagaaggcuugu

SEQ ID NO: 730585 - RNA, 19 nt, Artificial Sequence
  Description of Artificial Sequence: Synthetic oligonucleotide
cgcgucucccgcacucggu

SEQ ID NO: 730586 - RNA, 19 nt, Artificial Sequence
  Description of Artificial Sequence: Synthetic oligonucleotide
  modified_base (1)..(1): a, c, u, g, unknown or other
naggcuaucaucaaaggga

SEQ ID NO: 730587 - RNA, 19 nt, Artificial Sequence
  Description of Artificial Sequence: Synthetic oligonucleotide
uguauuauaauuaucauag

SEQ ID NO: 730588 - RNA, 19 nt, Artificial Sequence
  Description of Artificial Sequence: Synthetic oligonucleotide
ugaaguauaaacaacacug

SEQ ID NO: 730589 - RNA, 19 nt, Artificial Sequence
  Description of Artificial Sequence: Synthetic oligonucleotide
aauuggucaaaacggaucc

SEQ ID NO: 730590 - RNA, 19 nt, Artificial Sequence
  Description of Artificial Sequence: Synthetic oligonucleotide
uauauauauauauuuaaag

SEQ ID NO: 730591 - RNA, 19 nt, Artificial Sequence
  Description of Artificial Sequence: Synthetic oligonucleotide
aauauauauauauauauuu

SEQ ID NO: 730592 - RNA, 19 nt, Artificial Sequence
  Description of Artificial Sequence: Synthetic oligonucleotide
acuguguuagacuaaauac

SEQ ID NO: 730593 - RNA, 19 nt, Artificial Sequence
  Description of Artificial Sequence: Synthetic oligonucleotide
acuaauacauaacuggugg

SEQ ID NO: 730594 - RNA, 19 nt, Artificial Sequence
  Description of Artificial Sequence: Synthetic oligonucleotide
aauucaaggcaucuuaauc

SEQ ID NO: 730595 - RNA, 19 nt, Artificial Sequence
  Description of Artificial Sequence: Synthetic oligonucleotide
acagguaugcaauauaugg

SEQ ID NO: 730596 - RNA, 19 nt, Artificial Sequence
  Description of Artificial Sequence: Synthetic oligonucleotide
auauuauggcaauuuaucc

SEQ ID NO: 730597 - RNA, 19 nt, Artificial Sequence
  Description of Artificial Sequence: Synthetic oligonucleotide
uauagguagaaacagguug

SEQ ID NO: 730598 - RNA, 19 nt, Artificial Sequence
  Description of Artificial Sequence: Synthetic oligonucleotide
auauauauauauuuaaaga

SEQ ID NO: 730599 - RNA, 19 nt, Artificial Sequence
  Description of Artificial Sequence: Synthetic oligonucleotide
auaauauauauauauauau

SEQ ID NO: 730600 - RNA, 19 nt, Artificial Sequence
  Description of Artificial Sequence: Synthetic oligonucleotide
aaauacauuauuguauagg

SEQ ID NO: 730601 - RNA, 19 nt, Artificial Sequence
  Description of Artificial Sequence: Synthetic oligonucleotide
uagacuaaauacauuauug

SEQ ID NO: 730602 - RNA, 19 nt, Artificial Sequence
  Description of Artificial Sequence: Synthetic oligonucleotide
uucuaaguacacaauaucc

SEQ ID NO: 730603 - RNA, 19 nt, Artificial Sequence
  Description of Artificial Sequence: Synthetic oligonucleotide
uaaacaaucaacccaccag

SEQ ID NO: 730604 - RNA, 19 nt, Artificial Sequence
  Description of Artificial Sequence: Synthetic oligonucleotide
aguaaaauaaaagacugag

SEQ ID NO: 730605 - RNA, 19 nt, Artificial Sequence
  Description of Artificial Sequence: Synthetic oligonucleotide
auuauggcaauuuauccuc

SEQ ID NO: 730606 - RNA, 19 nt, Artificial Sequence
  Description of Artificial Sequence: Synthetic oligonucleotide
uauauauauauauauuuaa

SEQ ID NO: 730607 - RNA, 19 nt, Artificial Sequence
  Description of Artificial Sequence: Synthetic oligonucleotide
uguuaaauccaucauuaug

SEQ ID NO: 730608 - RNA, 19 nt, Artificial Sequence
  Description of Artificial Sequence: Synthetic oligonucleotide
ugcacuguaagcauauagg

SEQ ID NO: 730609 - RNA, 19 nt, Artificial Sequence
  Description of Artificial Sequence: Synthetic oligonucleotide
aucauuauggauaaaauug

SEQ ID NO: 730610 - RNA, 19 nt, Artificial Sequence
  Description of Artificial Sequence: Synthetic oligonucleotide
uauccuagacaauucaagg

SEQ ID NO: 730611 - RNA, 19 nt, Artificial Sequence
  Description of Artificial Sequence: Synthetic oligonucleotide
aauuacuauuauccacugc

SEQ ID NO: 730612 - RNA, 19 nt, Artificial Sequence
  Description of Artificial Sequence: Synthetic oligonucleotide
ucaacuaucgucagcagca

SEQ ID NO: 730613 - RNA, 19 nt, Artificial Sequence
  Description of Artificial Sequence: Synthetic oligonucleotide
uauuguauaggcugcauug

SEQ ID NO: 730614 - RNA, 19 nt, Artificial Sequence
  Description of Artificial Sequence: Synthetic oligonucleotide
uuuccuaagguucuugaag

SEQ ID NO: 730615 - RNA, 19 nt, Artificial Sequence
  Description of Artificial Sequence: Synthetic oligonucleotide
agcaauuacuauuauccac

SEQ ID NO: 730616 - RNA, 19 nt, Artificial Sequence
  Description of Artificial Sequence: Synthetic oligonucleotide
aaacaaucaacccaccaga

SEQ ID NO: 730617 - RNA, 19 nt, Artificial Sequence
  Description of Artificial Sequence: Synthetic oligonucleotide
uuuagaauauucuguaaac

SEQ ID NO: 730618 - RNA, 19 nt, Artificial Sequence
  Description of Artificial Sequence: Synthetic oligonucleotide
ucuacaaacgcauuucucu

SEQ ID NO: 730619 - RNA, 19 nt, Artificial Sequence
  Description of Artificial Sequence: Synthetic oligonucleotide
uaaaaugcguuguugagcu

SEQ ID NO: 730620 - RNA, 19 nt, Artificial Sequence
  Description of Artificial Sequence: Synthetic oligonucleotide
ucuaaguacacaauauccu

SEQ ID NO: 730621 - RNA, 19 nt, Artificial Sequence
  Description of Artificial Sequence: Synthetic oligonucleotide
auucaaggcaucuuaaucu

SEQ ID NO: 730622 - RNA, 19 nt, Artificial Sequence
  Description of Artificial Sequence: Synthetic oligonucleotide
cuuugauuaaaacuuuggc

SEQ ID NO: 730623 - RNA, 19 nt, Artificial Sequence
  Description of Artificial Sequence: Synthetic oligonucleotide
uaaguacacaauauccuag

SEQ ID NO: 730624 - RNA, 19 nt, Artificial Sequence
  Description of Artificial Sequence: Synthetic oligonucleotide
gugcaaauuggucaaaacg

SEQ ID NO: 730625 - RNA, 19 nt, Artificial Sequence
  Description of Artificial Sequence: Synthetic oligonucleotide
acuauuauccacugcaucu

SEQ ID NO: 730626 - RNA, 19 nt, Artificial Sequence
  Description of Artificial Sequence: Synthetic oligonucleotide
uauuauggcaauuuauccu

SEQ ID NO: 730627 - RNA, 19 nt, Artificial Sequence
  Description of Artificial Sequence: Synthetic oligonucleotide
uuugcaucauauuauggca

SEQ ID NO: 730628 - RNA, 19 nt, Artificial Sequence
  Description of Artificial Sequence: Synthetic oligonucleotide
gucaauagaguuuaaaaga

SEQ ID NO: 730629 - RNA, 19 nt, Artificial Sequence
  Description of Artificial Sequence: Synthetic oligonucleotide
cauagagaagcauaguuug

SEQ ID NO: 730630 - RNA, 19 nt, Artificial Sequence
  Description of Artificial Sequence: Synthetic oligonucleotide
uacguuauuaguaacuauc

SEQ ID NO: 730631 - RNA, 19 nt, Artificial Sequence
  Description of Artificial Sequence: Synthetic oligonucleotide
gagaauaauauauauauau

SEQ ID NO: 730632 - RNA, 19 nt, Artificial Sequence
  Description of Artificial Sequence: Synthetic oligonucleotide
ucaauguagucgauaacag

SEQ ID NO: 730633 - RNA, 19 nt, Artificial Sequence
  Description of Artificial Sequence: Synthetic oligonucleotide
uugucaugcuguuaaaucc

SEQ ID NO: 730634 - RNA, 19 nt, Artificial Sequence
  Description of Artificial Sequence: Synthetic oligonucleotide
uccuagacaauucaaggca

SEQ ID NO: 730635 - RNA, 19 nt, Artificial Sequence
  Description of Artificial Sequence: Synthetic oligonucleotide
agaguuuaaaagaucuugc

SEQ ID NO: 730636 - RNA, 19 nt, Artificial Sequence
  Description of Artificial Sequence: Synthetic oligonucleotide
aaauuggucaaaacggauc

SEQ ID NO: 730637 - RNA, 19 nt, Artificial Sequence
  Description of Artificial Sequence: Synthetic oligonucleotide
guuguuauccacuccauug

SEQ ID NO: 730638 - RNA, 19 nt, Artificial Sequence
  Description of Artificial Sequence: Synthetic oligonucleotide
uucuguaguucucauagug

SEQ ID NO: 730639 - RNA, 19 nt, Artificial Sequence
  Description of Artificial Sequence: Synthetic oligonucleotide
acuguaagcauauagguuu

SEQ ID NO: 730640 - RNA, 19 nt, Artificial Sequence
  Description of Artificial Sequence: Synthetic oligonucleotide
gaauaauauauauauauau

SEQ ID NO: 730641 - RNA, 19 nt, Artificial Sequence
  Description of Artificial Sequence: Synthetic oligonucleotide
ugaagcaguaaugagauuc

SEQ ID NO: 730642 - RNA, 19 nt, Artificial Sequence
  Description of Artificial Sequence: Synthetic oligonucleotide
aauaauauauauauauaua

SEQ ID NO: 730643 - RNA, 19 nt, Artificial Sequence
  Description of Artificial Sequence: Synthetic oligonucleotide
uggcaauuuauccucaaug

SEQ ID NO: 730644 - RNA, 19 nt, Artificial Sequence
  Description of Artificial Sequence: Synthetic oligonucleotide
uaauauauauauauauauu

SEQ ID NO: 730645 - RNA, 19 nt, Artificial Sequence
  Description of Artificial Sequence: Synthetic oligonucleotide
uagaauuaguaaaaucaca

SEQ ID NO: 730646 - RNA, 19 nt, Artificial Sequence
  Description of Artificial Sequence: Synthetic oligonucleotide
ugaguauagguagaaacag

SEQ ID NO: 730647 - RNA, 19 nt, Artificial Sequence
  Description of Artificial Sequence: Synthetic oligonucleotide
uagaguuuaaaagaucuug

SEQ ID NO: 730648 - RNA, 19 nt, Artificial Sequence
  Description of Artificial Sequence: Synthetic oligonucleotide
acuuagagcuguuaauuuc

SEQ ID NO: 730649 - RNA, 19 nt, Artificial Sequence
  Description of Artificial Sequence: Synthetic oligonucleotide
ugcauuuaaguaauccuca

SEQ ID NO: 730650 - RNA, 19 nt, Artificial Sequence
  Description of Artificial Sequence: Synthetic oligonucleotide
aaugaagcaguaaugagau

SEQ ID NO: 730651 - RNA, 19 nt, Artificial Sequence
  Description of Artificial Sequence: Synthetic oligonucleotide
uguuacguuauuaguaacu

SEQ ID NO: 730652 - RNA, 19 nt, Artificial Sequence
  Description of Artificial Sequence: Synthetic oligonucleotide
ugcaauauauggauacagc

SEQ ID NO: 730653 - RNA, 19 nt, Artificial Sequence
  Description of Artificial Sequence: Synthetic oligonucleotide
uuauccacuccauuguaag

SEQ ID NO: 730654 - RNA, 19 nt, Artificial Sequence
  Description of Artificial Sequence: Synthetic oligonucleotide
ggucaauagaguuuaaaag

SEQ ID NO: 730655 - RNA, 19 nt, Artificial Sequence
  Description of Artificial Sequence: Synthetic oligonucleotide
aaagaugcuauauucuauu

SEQ ID NO: 730656 - RNA, 19 nt, Artificial Sequence
  Description of Artificial Sequence: Synthetic oligonucleotide
cauuguaagucacugcugc

SEQ ID NO: 730657 - RNA, 19 nt, Artificial Sequence
  Description of Artificial Sequence: Synthetic oligonucleotide
ugaccuucaucucaaacac

SEQ ID NO: 730658 - RNA, 19 nt, Artificial Sequence
  Description of Artificial Sequence: Synthetic oligonucleotide
uguccuuuauucuuguugu

SEQ ID NO: 730659 - RNA, 19 nt, Artificial Sequence
  Description of Artificial Sequence: Synthetic oligonucleotide
aauacauaacuggugguca

SEQ ID NO: 730660 - RNA, 19 nt, Artificial Sequence
  Description of Artificial Sequence: Synthetic oligonucleotide
ucuggaaauucauauauuu

SEQ ID NO: 730661 - RNA, 19 nt, Artificial Sequence
  Description of Artificial Sequence: Synthetic oligonucleotide
uucuguaaacaaucaaccc

SEQ ID NO: 730662 - RNA, 19 nt, Artificial Sequence
  Description of Artificial Sequence: Synthetic oligonucleotide
ugggguaucaacuaucguc

SEQ ID NO: 730663 - RNA, 19 nt, Artificial Sequence
  Description of Artificial Sequence: Synthetic oligonucleotide
ugcuauauucuauuuuagc

SEQ ID NO: 730664 - RNA, 19 nt, Artificial Sequence
  Description of Artificial Sequence: Synthetic oligonucleotide
ucauauuauggcaauuuau

SEQ ID NO: 730665 - RNA, 19 nt, Artificial Sequence
  Description of Artificial Sequence: Synthetic oligonucleotide
aauucaauauccaaugguu

SEQ ID NO: 730666 - RNA, 19 nt, Artificial Sequence
  Description of Artificial Sequence: Synthetic oligonucleotide
uauaggcugcauugaaugg

SEQ ID NO: 730667 - RNA, 19 nt, Artificial Sequence
  Description of Artificial Sequence: Synthetic oligonucleotide
uuacugucaauguagucga

SEQ ID NO: 730668 - RNA, 19 nt, Artificial Sequence
  Description of Artificial Sequence: Synthetic oligonucleotide
uuccuaagguucuugaaga

SEQ ID NO: 730669 - RNA, 19 nt, Artificial Sequence
  Description of Artificial Sequence: Synthetic oligonucleotide
aauuugccuagaaauguuc

SEQ ID NO: 730670 - RNA, 19 nt, Artificial Sequence
  Description of Artificial Sequence: Synthetic oligonucleotide
aguacacaauauccuagac

SEQ ID NO: 730671 - RNA, 19 nt, Artificial Sequence
  Description of Artificial Sequence: Synthetic oligonucleotide
aaguacacaauauccuaga

SEQ ID NO: 730672 - RNA, 19 nt, Artificial Sequence
  Description of Artificial Sequence: Synthetic oligonucleotide
ucuaggugcacuguaagca

SEQ ID NO: 730673 - RNA, 19 nt, Artificial Sequence
  Description of Artificial Sequence: Synthetic oligonucleotide
uggagaauacaaaucugug

SEQ ID NO: 730674 - RNA, 19 nt, Artificial Sequence
  Description of Artificial Sequence: Synthetic oligonucleotide
uaguaaaaucacaauguuc

SEQ ID NO: 730675 - RNA, 19 nt, Artificial Sequence
  Description of Artificial Sequence: Synthetic oligonucleotide
cauauuggcaacuaauaca

SEQ ID NO: 730676 - RNA, 19 nt, Artificial Sequence
  Description of Artificial Sequence: Synthetic oligonucleotide
uccuucgagaacaacaaaa

SEQ ID NO: 730677 - RNA, 19 nt, Artificial Sequence
  Description of Artificial Sequence: Synthetic oligonucleotide
auagguagaaacagguugg

SEQ ID NO: 730678 - RNA, 19 nt, Artificial Sequence
  Description of Artificial Sequence: Synthetic oligonucleotide
aucuuaaucuccuucgaga

SEQ ID NO: 730679 - RNA, 19 nt, Artificial Sequence
  Description of Artificial Sequence: Synthetic oligonucleotide
gaaguauaaacaacacugc

SEQ ID NO: 730680 - RNA, 19 nt, Artificial Sequence
  Description of Artificial Sequence: Synthetic oligonucleotide
uaucuaaauuaaauguuau

SEQ ID NO: 730681 - RNA, 19 nt, Artificial Sequence
  Description of Artificial Sequence: Synthetic oligonucleotide
guagaagguacuuagagcu

SEQ ID NO: 730682 - RNA, 19 nt, Artificial Sequence
  Description of Artificial Sequence: Synthetic oligonucleotide
acaacauuguuuauuaugu

SEQ ID NO: 730683 - RNA, 19 nt, Artificial Sequence
  Description of Artificial Sequence: Synthetic oligonucleotide
cuauuaucgggcaucugcc

SEQ ID NO: 730684 - RNA, 19 nt, Artificial Sequence
  Description of Artificial Sequence: Synthetic oligonucleotide
uggcaacuaauacauaacu

SEQ ID NO: 730685 - RNA, 19 nt, Artificial Sequence
  Description of Artificial Sequence: Synthetic oligonucleotide
uaguguuacguuauuagua

SEQ ID NO: 730686 - RNA, 19 nt, Artificial Sequence
  Description of Artificial Sequence: Synthetic oligonucleotide
augaaguauaaacaacacu

SEQ ID NO: 730687 - RNA, 19 nt, Artificial Sequence
  Description of Artificial Sequence: Synthetic oligonucleotide
uuaaauccaucauuaugga

SEQ ID NO: 730688 - RNA, 19 nt, Artificial Sequence
  Description of Artificial Sequence: Synthetic oligonucleotide
agaauuaguaaaaucacaa

SEQ ID NO: 730689 - RNA, 19 nt, Artificial Sequence
  Description of Artificial Sequence: Synthetic oligonucleotide
ugugccagaggacucuuag

SEQ ID NO: 730690 - RNA, 19 nt, Artificial Sequence
  Description of Artificial Sequence: Synthetic oligonucleotide
acuaucuuucaaauccugc

SEQ ID NO: 730691 - RNA, 19 nt, Artificial Sequence
  Description of Artificial Sequence: Synthetic oligonucleotide
aaacguuucauaaauucaa

SEQ ID NO: 730692 - RNA, 19 nt, Artificial Sequence
  Description of Artificial Sequence: Synthetic oligonucleotide
ugucaugcuguuaaaucca

SEQ ID NO: 730693 - RNA, 19 nt, Artificial Sequence
  Description of Artificial Sequence: Synthetic oligonucleotide
aaacgcauuucucuuccug

SEQ ID NO: 730694 - RNA, 19 nt, Artificial Sequence
  Description of Artificial Sequence: Synthetic oligonucleotide
acaaucaacccaccagaac

SEQ ID NO: 730695 - RNA, 19 nt, Artificial Sequence
  Description of Artificial Sequence: Synthetic oligonucleotide
aaauccugcauguuguguu

SEQ ID NO: 730696 - RNA, 19 nt, Artificial Sequence
  Description of Artificial Sequence: Synthetic oligonucleotide
aguguuacguuauuaguaa

SEQ ID NO: 730697 - RNA, 19 nt, Artificial Sequence
  Description of Artificial Sequence: Synthetic oligonucleotide
caaucaacccaccagaaca

SEQ ID NO: 730698 - RNA, 19 nt, Artificial Sequence
  Description of Artificial Sequence: Synthetic oligonucleotide
cuaaaugcagaauggugac

SEQ ID NO: 730699 - RNA, 19 nt, Artificial Sequence
  Description of Artificial Sequence: Synthetic oligonucleotide
caauguagucgauaacagg

SEQ ID NO: 730700 - RNA, 19 nt, Artificial Sequence
  Description of Artificial Sequence: Synthetic oligonucleotide
aacuaauacauaacuggug

SEQ ID NO: 730701 - RNA, 19 nt, Artificial Sequence
  Description of Artificial Sequence: Synthetic oligonucleotide
guugguuccuaccauauga

SEQ ID NO: 730702 - RNA, 19 nt, Artificial Sequence
  Description of Artificial Sequence: Synthetic oligonucleotide
auaguguuacguuauuagu

SEQ ID NO: 730703 - RNA, 19 nt, Artificial Sequence
  Description of Artificial Sequence: Synthetic oligonucleotide
cacaauuugccuagaaaug

SEQ ID NO: 730704 - RNA, 19 nt, Artificial Sequence
  Description of Artificial Sequence: Synthetic oligonucleotide
uuuaaacaauggaaguguc

SEQ ID NO: 730705 - RNA, 19 nt, Artificial Sequence
  Description of Artificial Sequence: Synthetic oligonucleotide
uauuaucgggcaucugccg

SEQ ID NO: 730706 - RNA, 19 nt, Artificial Sequence
  Description of Artificial Sequence: Synthetic oligonucleotide
cuaaaaugcguuguugagc

SEQ ID NO: 730707 - RNA, 19 nt, Artificial Sequence
  Description of Artificial Sequence: Synthetic oligonucleotide
acucuuaguaaguuguccu

SEQ ID NO: 730708 - RNA, 19 nt, Artificial Sequence
  Description of Artificial Sequence: Synthetic oligonucleotide
uuguuauccacuccauugu

SEQ ID NO: 730709 - RNA, 19 nt, Artificial Sequence
  Description of Artificial Sequence: Synthetic oligonucleotide
gcuauauucuauuuuagca

SEQ ID NO: 730710 - RNA, 19 nt, Artificial Sequence
  Description of Artificial Sequence: Synthetic oligonucleotide
agguaugcaauauauggau

SEQ ID NO: 730711 - RNA, 19 nt, Artificial Sequence
  Description of Artificial Sequence: Synthetic oligonucleotide
gauacagcuaaaugcagaa

SEQ ID NO: 730712 - RNA, 19 nt, Artificial Sequence
  Description of Artificial Sequence: Synthetic oligonucleotide
aacuaucgucagcagcaac

SEQ ID NO: 730713 - RNA, 19 nt, Artificial Sequence
  Description of Artificial Sequence: Synthetic oligonucleotide
cauaguuugcaucauauua

SEQ ID NO: 730714 - RNA, 19 nt, Artificial Sequence
  Description of Artificial Sequence: Synthetic oligonucleotide
caucuuggcuacauguucc

SEQ ID NO: 730715 - RNA, 19 nt, Artificial Sequence
  Description of Artificial Sequence: Synthetic oligonucleotide
aaaugcagaauggugacuu

SEQ ID NO: 730716 - RNA, 19 nt, Artificial Sequence
  Description of Artificial Sequence: Synthetic oligonucleotide
aacggauccaacaaacacu

SEQ ID NO: 730717 - RNA, 19 nt, Artificial Sequence
  Description of Artificial Sequence: Synthetic oligonucleotide
aucacaacauuguuuauua

SEQ ID NO: 730718 - RNA, 19 nt, Artificial Sequence
  Description of Artificial Sequence: Synthetic oligonucleotide
cuguuaauuucuaaguaca

SEQ ID NO: 730719 - RNA, 19 nt, Artificial Sequence
  Description of Artificial Sequence: Synthetic oligonucleotide
cugaacgccaccuucuuug

SEQ ID NO: 730720 - RNA, 19 nt, Artificial Sequence
  Description of Artificial Sequence: Synthetic oligonucleotide
auauuggcaacuaauacau

SEQ ID NO: 730721 - RNA, 19 nt, Artificial Sequence
  Description of Artificial Sequence: Synthetic oligonucleotide
acaauuugccuagaaaugu

SEQ ID NO: 730722 - RNA, 19 nt, Artificial Sequence
  Description of Artificial Sequence: Synthetic oligonucleotide
aaugcguuguugagcuucc

SEQ ID NO: 730723 - RNA, 19 nt, Artificial Sequence
  Description of Artificial Sequence: Synthetic oligonucleotide
ucuccuucgagaacaacaa

SEQ ID NO: 730724 - RNA, 19 nt, Artificial Sequence
  Description of Artificial Sequence: Synthetic oligonucleotide
ccaacaaacacugaugucc

SEQ ID NO: 730725 - RNA, 19 nt, Artificial Sequence
  Description of Artificial Sequence: Synthetic oligonucleotide
gucaauguagucgauaaca

SEQ ID NO: 730726 - RNA, 19 nt, Artificial Sequence
  Description of Artificial Sequence: Synthetic oligonucleotide
uacagguaugcaauauaug

SEQ ID NO: 730727 - RNA, 19 nt, Artificial Sequence
  Description of Artificial Sequence: Synthetic oligonucleotide
uucauuugcucauggcgcc

SEQ ID NO: 730728 - RNA, 19 nt, Artificial Sequence
  Description of Artificial Sequence: Synthetic oligonucleotide
uuuaaguccauguccugaa

SEQ ID NO: 730729 - RNA, 19 nt, Artificial Sequence
  Description of Artificial Sequence: Synthetic oligonucleotide
ucuucaagaggccaugauu

SEQ ID NO: 730730 - RNA, 19 nt, Artificial Sequence
  Description of Artificial Sequence: Synthetic oligonucleotide
ggaguuaaaagaaaguuuc

SEQ ID NO: 730731 - RNA, 19 nt, Artificial Sequence
  Description of Artificial Sequence: Synthetic oligonucleotide
uugacauuccucuggugug

SEQ ID NO: 730732 - RNA, 19 nt, Artificial Sequence
  Description of Artificial Sequence: Synthetic oligonucleotide
cuaaaggggcacuaaauga

SEQ ID NO: 730733 - RNA, 19 nt, Artificial Sequence
  Description of Artificial Sequence: Synthetic oligonucleotide
ugcuacuuaccagaaagug

SEQ ID NO: 730734 - RNA, 19 nt, Artificial Sequence
  Description of Artificial Sequence: Synthetic oligonucleotide
auauauauauauauuuaaa

SEQ ID NO: 730735 - RNA, 19 nt, Artificial Sequence
  Description of Artificial Sequence: Synthetic oligonucleotide
uaauacauaacuggugguc

SEQ ID NO: 730736 - RNA, 19 nt, Artificial Sequence
  Description of Artificial Sequence: Synthetic oligonucleotide
ggcaucuuaaucuccuucg

SEQ ID NO: 730737 - RNA, 19 nt, Artificial Sequence
  Description of Artificial Sequence: Synthetic oligonucleotide
uguguucuuaucaaacauu

SEQ ID NO: 730738 - RNA, 19 nt, Artificial Sequence
  Description of Artificial Sequence: Synthetic oligonucleotide
uauucuauuuuagcagggc

SEQ ID NO: 730739 - RNA, 19 nt, Artificial Sequence
  Description of Artificial Sequence: Synthetic oligonucleotide
ucgggauucugcauuuaag

SEQ ID NO: 730740 - RNA, 19 nt, Artificial Sequence
  Description of Artificial Sequence: Synthetic oligonucleotide
augcaaacguuucauaaau

SEQ ID NO: 730741 - RNA, 19 nt, Artificial Sequence
  Description of Artificial Sequence: Synthetic oligonucleotide
auauauauauauauauuua

SEQ ID NO: 730742 - RNA, 19 nt, Artificial Sequence
  Description of Artificial Sequence: Synthetic oligonucleotide
uccaagcuggcauauuggc

SEQ ID NO: 730743 - RNA, 19 nt, Artificial Sequence
  Description of Artificial Sequence: Synthetic oligonucleotide
uggauacagcuaaaugcag

SEQ ID NO: 730744 - RNA, 19 nt, Artificial Sequence
  Description of Artificial Sequence: Synthetic oligonucleotide
ugcuguuaaauccaucauu

SEQ ID NO: 730745 - RNA, 19 nt, Artificial Sequence
  Description of Artificial Sequence: Synthetic oligonucleotide
uuagcagggccaauauaug

SEQ ID NO: 730746 - RNA, 19 nt, Artificial Sequence
  Description of Artificial Sequence: Synthetic oligonucleotide
uaccauaugaaagaugcua

SEQ ID NO: 730747 - RNA, 19 nt, Artificial Sequence
  Description of Artificial Sequence: Synthetic oligonucleotide
uguucacucgggauucugc

SEQ ID NO: 730748 - RNA, 19 nt, Artificial Sequence
  Description of Artificial Sequence: Synthetic oligonucleotide
ucucauaguguuacguuau

SEQ ID NO: 730749 - RNA, 19 nt, Artificial Sequence
  Description of Artificial Sequence: Synthetic oligonucleotide
cuacuuaccagaaagugua

SEQ ID NO: 730750 - RNA, 19 nt, Artificial Sequence
  Description of Artificial Sequence: Synthetic oligonucleotide
auggauacagcuaaaugca

SEQ ID NO: 730751 - RNA, 19 nt, Artificial Sequence
  Description of Artificial Sequence: Synthetic oligonucleotide
uucucauaguguuacguua

SEQ ID NO: 730752 - RNA, 19 nt, Artificial Sequence
  Description of Artificial Sequence: Synthetic oligonucleotide
caaacguuucauaaauuca

SEQ ID NO: 730753 - RNA, 19 nt, Artificial Sequence
  Description of Artificial Sequence: Synthetic oligonucleotide
uguauaggcugcauugaau

SEQ ID NO: 730754 - RNA, 19 nt, Artificial Sequence
  Description of Artificial Sequence: Synthetic oligonucleotide
uugcaucauauuauggcaa

SEQ ID NO: 730755 - RNA, 19 nt, Artificial Sequence
  Description of Artificial Sequence: Synthetic oligonucleotide
uuauuguauaggcugcauu

SEQ ID NO: 730756 - RNA, 19 nt, Artificial Sequence
  Description of Artificial Sequence: Synthetic oligonucleotide
uggcauauuggcaacuaau

SEQ ID NO: 730757 - RNA, 19 nt, Artificial Sequence
  Description of Artificial Sequence: Synthetic oligonucleotide
agcaguaaugagauucugg

SEQ ID NO: 730758 - RNA, 19 nt, Artificial Sequence
  Description of Artificial Sequence: Synthetic oligonucleotide
caccagaacaugauuguac

SEQ ID NO: 730759 - RNA, 19 nt, Artificial Sequence
  Description of Artificial Sequence: Synthetic oligonucleotide
ucguuagcuucacaauuug

SEQ ID NO: 730760 - RNA, 19 nt, Artificial Sequence
  Description of Artificial Sequence: Synthetic oligonucleotide
aagaugcuauauucuauuu

SEQ ID NO: 730761 - RNA, 19 nt, Artificial Sequence
  Description of Artificial Sequence: Synthetic oligonucleotide
gacucuuaguaaguugucc

SEQ ID NO: 730762 - RNA, 19 nt, Artificial Sequence
  Description of Artificial Sequence: Synthetic oligonucleotide
gaaacagguuggucguuag

SEQ ID NO: 730763 - RNA, 19 nt, Artificial Sequence
  Description of Artificial Sequence: Synthetic oligonucleotide
guaguucucauaguguuac

SEQ ID NO: 730764 - RNA, 19 nt, Artificial Sequence
  Description of Artificial Sequence: Synthetic oligonucleotide
auauucuauuuuagcaggg

SEQ ID NO: 730765 - RNA, 19 nt, Artificial Sequence
  Description of Artificial Sequence: Synthetic oligonucleotide
caucuuaaucuccuucgag

SEQ ID NO: 730766 - RNA, 19 nt, Artificial Sequence
  Description of Artificial Sequence: Synthetic oligonucleotide
auaguuugcaucauauuau

SEQ ID NO: 730767 - RNA, 19 nt, Artificial Sequence
  Description of Artificial Sequence: Synthetic oligonucleotide
gaguccuuuuauuuuagaa

SEQ ID NO: 730768 - RNA, 19 nt, Artificial Sequence
  Description of Artificial Sequence: Synthetic oligonucleotide
uucuacaaacgcauuucuc

SEQ ID NO: 730769 - RNA, 19 nt, Artificial Sequence
  Description of Artificial Sequence: Synthetic oligonucleotide
gcaaacguuucauaaauuc

SEQ ID NO: 730770 - RNA, 19 nt, Artificial Sequence
  Description of Artificial Sequence: Synthetic oligonucleotide
uccuaagguucuugaagag

SEQ ID NO: 730771 - RNA, 19 nt, Artificial Sequence
  Description of Artificial Sequence: Synthetic oligonucleotide
auaacaggcugccagcaau

SEQ ID NO: 730772 - RNA, 19 nt, Artificial Sequence
  Description of Artificial Sequence: Synthetic oligonucleotide
gaggacucuuaguaaguug

SEQ ID NO: 730773 - RNA, 19 nt, Artificial Sequence
  Description of Artificial Sequence: Synthetic oligonucleotide
ucgauaacaggcugccagc

SEQ ID NO: 730774 - RNA, 19 nt, Artificial Sequence
  Description of Artificial Sequence: Synthetic oligonucleotide
auuagugggaugauauuca

SEQ ID NO: 730775 - RNA, 19 nt, Artificial Sequence
  Description of Artificial Sequence: Synthetic oligonucleotide
uugccuagaaauguucuac

SEQ ID NO: 730776 - RNA, 19 nt, Artificial Sequence
  Description of Artificial Sequence: Synthetic oligonucleotide
aaacaauggaagugucaaa

SEQ ID NO: 730777 - RNA, 19 nt, Artificial Sequence
  Description of Artificial Sequence: Synthetic oligonucleotide
uagaagguacuuagagcug

SEQ ID NO: 730778 - RNA, 19 nt, Artificial Sequence
  Description of Artificial Sequence: Synthetic oligonucleotide
auuaucgggcaucugccgu

SEQ ID NO: 730779 - RNA, 19 nt, Artificial Sequence
  Description of Artificial Sequence: Synthetic oligonucleotide
uuuuccuaagguucuugaa

SEQ ID NO: 730780 - RNA, 19 nt, Artificial Sequence
  Description of Artificial Sequence: Synthetic oligonucleotide
agaauaauauauauauaua

SEQ ID NO: 730781 - RNA, 19 nt, Artificial Sequence
  Description of Artificial Sequence: Synthetic oligonucleotide
gcuaaaggggcacuaaaug

SEQ ID NO: 730782 - RNA, 19 nt, Artificial Sequence
  Description of Artificial Sequence: Synthetic oligonucleotide
gagaagcauaguuugcauc

SEQ ID NO: 730783 - RNA, 19 nt, Artificial Sequence
  Description of Artificial Sequence: Synthetic oligonucleotide
uuagugggaugauauucac

SEQ ID NO: 730784 - RNA, 19 nt, Artificial Sequence
  Description of Artificial Sequence: Synthetic oligonucleotide
agggccaauauauggaaaa

SEQ ID NO: 730785 - RNA, 19 nt, Artificial Sequence
  Description of Artificial Sequence: Synthetic oligonucleotide
uccuaccauaugaaagaug

SEQ ID NO: 730786 - RNA, 19 nt, Artificial Sequence
  Description of Artificial Sequence: Synthetic oligonucleotide
uagacaauucaaggcaucu

SEQ ID NO: 730787 - RNA, 19 nt, Artificial Sequence
  Description of Artificial Sequence: Synthetic oligonucleotide
ugccuagaaauguucuaca

SEQ ID NO: 730788 - RNA, 19 nt, Artificial Sequence
  Description of Artificial Sequence: Synthetic oligonucleotide
acuaucgucagcagcaacu

SEQ ID NO: 730789 - RNA, 19 nt, Artificial Sequence
  Description of Artificial Sequence: Synthetic oligonucleotide
gucaaaacggauccaacaa

SEQ ID NO: 730790 - RNA, 19 nt, Artificial Sequence
  Description of Artificial Sequence: Synthetic oligonucleotide
aggacucuuaguaaguugu

SEQ ID NO: 730791 - RNA, 19 nt, Artificial Sequence
  Description of Artificial Sequence: Synthetic oligonucleotide
cucuaggugcacuguaagc

SEQ ID NO: 730792 - RNA, 19 nt, Artificial Sequence
  Description of Artificial Sequence: Synthetic oligonucleotide
cuuaccagaaaguguaaaa

SEQ ID NO: 730793 - RNA, 19 nt, Artificial Sequence
  Description of Artificial Sequence: Synthetic oligonucleotide
aaauaggguccacuguguu

SEQ ID NO: 730794 - RNA, 19 nt, Artificial Sequence
  Description of Artificial Sequence: Synthetic oligonucleotide
agggaguuaaaagaaaguu

SEQ ID NO: 730795 - RNA, 19 nt, Artificial Sequence
  Description of Artificial Sequence: Synthetic oligonucleotide
uguugguuccuaccauaug

SEQ ID NO: 730796 - RNA, 19 nt, Artificial Sequence
  Description of Artificial Sequence: Synthetic oligonucleotide
augaaagaugcuauauucu

SEQ ID NO: 730797 - RNA, 19 nt, Artificial Sequence
  Description of Artificial Sequence: Synthetic oligonucleotide
acggauccaacaaacacug

SEQ ID NO: 730798 - RNA, 19 nt, Artificial Sequence
  Description of Artificial Sequence: Synthetic oligonucleotide
aguucucauaguguuacgu

SEQ ID NO: 730799 - RNA, 19 nt, Artificial Sequence
  Description of Artificial Sequence: Synthetic oligonucleotide
caacauuguuuauuaugug

SEQ ID NO: 730800 - RNA, 19 nt, Artificial Sequence
  Description of Artificial Sequence: Synthetic oligonucleotide
uuugccuagaaauguucua

SEQ ID NO: 730801 - RNA, 19 nt, Artificial Sequence
  Description of Artificial Sequence: Synthetic oligonucleotide
uacuuagagcuguuaauuu

SEQ ID NO: 730802 - RNA, 19 nt, Artificial Sequence
  Description of Artificial Sequence: Synthetic oligonucleotide
ugcaucauauuauggcaau

SEQ ID NO: 730803 - RNA, 19 nt, Artificial Sequence
  Description of Artificial Sequence: Synthetic oligonucleotide
uaguaaguuguccuuuauu

SEQ ID NO: 730804 - RNA, 19 nt, Artificial Sequence
  Description of Artificial Sequence: Synthetic oligonucleotide
uacaaacgcauuucucuuc

SEQ ID NO: 730805 - RNA, 19 nt, Artificial Sequence
  Description of Artificial Sequence: Synthetic oligonucleotide
agguacuuagagcuguuaa

SEQ ID NO: 730806 - RNA, 19 nt, Artificial Sequence
  Description of Artificial Sequence: Synthetic oligonucleotide
acguuauuaguaacuaucu

SEQ ID NO: 730807 - RNA, 19 nt, Artificial Sequence
  Description of Artificial Sequence: Synthetic oligonucleotide
ggauucugcauuuaaguaa

SEQ ID NO: 730808 - RNA, 19 nt, Artificial Sequence
  Description of Artificial Sequence: Synthetic oligonucleotide
uaucaacuaucgucagcag

SEQ ID NO: 730809 - RNA, 19 nt, Artificial Sequence
  Description of Artificial Sequence: Synthetic oligonucleotide
cuuaaucuccuucgagaac

SEQ ID NO: 730810 - RNA, 19 nt, Artificial Sequence
  Description of Artificial Sequence: Synthetic oligonucleotide
gcuaaaugcagaaugguga

SEQ ID NO: 730811 - RNA, 19 nt, Artificial Sequence
  Description of Artificial Sequence: Synthetic oligonucleotide
aacaacacugcacccuauu

SEQ ID NO: 730812 - RNA, 19 nt, Artificial Sequence
  Description of Artificial Sequence: Synthetic oligonucleotide
uuuaugagaagggccugga

SEQ ID NO: 730813 - RNA, 19 nt, Artificial Sequence
  Description of Artificial Sequence: Synthetic oligonucleotide
uguuauccacuccauugua

SEQ ID NO: 730814 - RNA, 19 nt, Artificial Sequence
  Description of Artificial Sequence: Synthetic oligonucleotide
caaauccugggguaucaac

SEQ ID NO: 730815 - RNA, 19 nt, Artificial Sequence
  Description of Artificial Sequence: Synthetic oligonucleotide
auacagguaugcaauauau

SEQ ID NO: 730816 - RNA, 19 nt, Artificial Sequence
  Description of Artificial Sequence: Synthetic oligonucleotide
caugauuguacaacaguaa

SEQ ID NO: 730817 - RNA, 19 nt, Artificial Sequence
  Description of Artificial Sequence: Synthetic oligonucleotide
gaauuaguaaaaucacaau

SEQ ID NO: 730818 - RNA, 19 nt, Artificial Sequence
  Description of Artificial Sequence: Synthetic oligonucleotide
gcauauuggcaacuaauac

SEQ ID NO: 730819 - RNA, 19 nt, Artificial Sequence
  Description of Artificial Sequence: Synthetic oligonucleotide
acguuucauaaauucaaua

SEQ ID NO: 730820 - RNA, 19 nt, Artificial Sequence
  Description of Artificial Sequence: Synthetic oligonucleotide
auuguaagucacugcugcu

SEQ ID NO: 730821 - RNA, 19 nt, Artificial Sequence
  Description of Artificial Sequence: Synthetic oligonucleotide
gaauggaaccucuguauua

SEQ ID NO: 730822 - RNA, 19 nt, Artificial Sequence
  Description of Artificial Sequence: Synthetic oligonucleotide
cagguaugcaauauaugga

SEQ ID NO: 730823 - RNA, 19 nt, Artificial Sequence
  Description of Artificial Sequence: Synthetic oligonucleotide
uagugggaugauauucacu

SEQ ID NO: 730824 - RNA, 19 nt, Artificial Sequence
  Description of Artificial Sequence: Synthetic oligonucleotide
uggucaaaacggauccaac

SEQ ID NO: 730825 - RNA, 19 nt, Artificial Sequence
  Description of Artificial Sequence: Synthetic oligonucleotide
uuggucaaaacggauccaa

SEQ ID NO: 730826 - RNA, 19 nt, Artificial Sequence
  Description of Artificial Sequence: Synthetic oligonucleotide
aagacugaguauagguaga

SEQ ID NO: 730827 - RNA, 19 nt, Artificial Sequence
  Description of Artificial Sequence: Synthetic oligonucleotide
uuuccuuguugguuccuac

SEQ ID NO: 730828 - RNA, 19 nt, Artificial Sequence
  Description of Artificial Sequence: Synthetic oligonucleotide
uuggcuacauguucccuuc

SEQ ID NO: 730829 - RNA, 19 nt, Artificial Sequence
  Description of Artificial Sequence: Synthetic oligonucleotide
auuguauaggcugcauuga

SEQ ID NO: 730830 - RNA, 19 nt, Artificial Sequence
  Description of Artificial Sequence: Synthetic oligonucleotide
acacugcacccuauuaucg

SEQ ID NO: 730831 - RNA, 19 nt, Artificial Sequence
  Description of Artificial Sequence: Synthetic oligonucleotide
auuugccuagaaauguucu

SEQ ID NO: 730832 - RNA, 19 nt, Artificial Sequence
  Description of Artificial Sequence: Synthetic oligonucleotide
cauguuguguucuuaucaa

SEQ ID NO: 730833 - RNA, 19 nt, Artificial Sequence
  Description of Artificial Sequence: Synthetic oligonucleotide
ggucaaaacggauccaaca

SEQ ID NO: 730834 - RNA, 19 nt, Artificial Sequence
  Description of Artificial Sequence: Synthetic oligonucleotide
cuauuauccacugcaucuc

SEQ ID NO: 730835 - RNA, 19 nt, Artificial Sequence
  Description of Artificial Sequence: Synthetic oligonucleotide
ucuuaguaaguuguccuuu

SEQ ID NO: 730836 - RNA, 19 nt, Artificial Sequence
  Description of Artificial Sequence: Synthetic oligonucleotide
uuagagcuguuaauuucua

SEQ ID NO: 730837 - RNA, 19 nt, Artificial Sequence
  Description of Artificial Sequence: Synthetic oligonucleotide
gcaauauauggauacagcu

SEQ ID NO: 730838 - RNA, 19 nt, Artificial Sequence
  Description of Artificial Sequence: Synthetic oligonucleotide
ucauuugcucauggcgccg

SEQ ID NO: 730839 - RNA, 19 nt, Artificial Sequence
  Description of Artificial Sequence: Synthetic oligonucleotide
ucauaguguuacguuauua

SEQ ID NO: 730840 - RNA, 19 nt, Artificial Sequence
  Description of Artificial Sequence: Synthetic oligonucleotide
agcauaguuugcaucauau

SEQ ID NO: 730841 - RNA, 19 nt, Artificial Sequence
  Description of Artificial Sequence: Synthetic oligonucleotide
accauaugaaagaugcuau

SEQ ID NO: 730842 - RNA, 19 nt, Artificial Sequence
  Description of Artificial Sequence: Synthetic oligonucleotide
uucaaacuggcgacguuuu

SEQ ID NO: 730843 - RNA, 19 nt, Artificial Sequence
  Description of Artificial Sequence: Synthetic oligonucleotide
aagcauaguuugcaucaua

SEQ ID NO: 730844 - RNA, 19 nt, Artificial Sequence
  Description of Artificial Sequence: Synthetic oligonucleotide
auuuuaugagaagggccug

SEQ ID NO: 730845 - RNA, 19 nt, Artificial Sequence
  Description of Artificial Sequence: Synthetic oligonucleotide
auacauaacugguggucaa

SEQ ID NO: 730846 - RNA, 19 nt, Artificial Sequence
  Description of Artificial Sequence: Synthetic oligonucleotide
aacaaucaacccaccagaa

SEQ ID NO: 730847 - RNA, 19 nt, Artificial Sequence
  Description of Artificial Sequence: Synthetic oligonucleotide
ugguggucaauagaguuua

SEQ ID NO: 730848 - RNA, 19 nt, Artificial Sequence
  Description of Artificial Sequence: Synthetic oligonucleotide
ccagaggacucuuaguaag

SEQ ID NO: 730849 - RNA, 19 nt, Artificial Sequence
  Description of Artificial Sequence: Synthetic oligonucleotide
ggcaacuaauacauaacug

SEQ ID NO: 730850 - RNA, 19 nt, Artificial Sequence
  Description of Artificial Sequence: Synthetic oligonucleotide
uggcuaaaggggcacuaaa

SEQ ID NO: 730851 - RNA, 19 nt, Artificial Sequence
  Description of Artificial Sequence: Synthetic oligonucleotide
ugcaaacguuucauaaauu

SEQ ID NO: 730852 - RNA, 19 nt, Artificial Sequence
  Description of Artificial Sequence: Synthetic oligonucleotide
acccaccagaacaugauug

SEQ ID NO: 730853 - RNA, 19 nt, Artificial Sequence
  Description of Artificial Sequence: Synthetic oligonucleotide
uccugggguaucaacuauc

SEQ ID NO: 730854 - RNA, 19 nt, Artificial Sequence
  Description of Artificial Sequence: Synthetic oligonucleotide
caacuaauacauaacuggu

SEQ ID NO: 730855 - RNA, 19 nt, Artificial Sequence
  Description of Artificial Sequence: Synthetic oligonucleotide
ugcacccuauuaucgggca

SEQ ID NO: 730856 - RNA, 19 nt, Artificial Sequence
  Description of Artificial Sequence: Synthetic oligonucleotide
uucucuucaagaggccaug

SEQ ID NO: 730857 - RNA, 19 nt, Artificial Sequence
  Description of Artificial Sequence: Synthetic oligonucleotide
uuaucgggcaucugccguc

SEQ ID NO: 730858 - RNA, 19 nt, Artificial Sequence
  Description of Artificial Sequence: Synthetic oligonucleotide
acgcauuucucuuccugcu

SEQ ID NO: 730859 - RNA, 19 nt, Artificial Sequence
  Description of Artificial Sequence: Synthetic oligonucleotide
gauucugcauuuaaguaau

SEQ ID NO: 730860 - RNA, 19 nt, Artificial Sequence
  Description of Artificial Sequence: Synthetic oligonucleotide
uuaugagaagggccuggau

SEQ ID NO: 730861 - RNA, 19 nt, Artificial Sequence
  Description of Artificial Sequence: Synthetic oligonucleotide
ccugggguaucaacuaucg

SEQ ID NO: 730862 - RNA, 19 nt, Artificial Sequence
  Description of Artificial Sequence: Synthetic oligonucleotide
guucacucgggauucugca

SEQ ID NO: 730863 - RNA, 19 nt, Artificial Sequence
  Description of Artificial Sequence: Synthetic oligonucleotide
guagaaacagguuggucgu

SEQ ID NO: 730864 - RNA, 19 nt, Artificial Sequence
  Description of Artificial Sequence: Synthetic oligonucleotide
cauuuaaguaauccucaaa

SEQ ID NO: 730865 - RNA, 19 nt, Artificial Sequence
  Description of Artificial Sequence: Synthetic oligonucleotide
agaguccuuuuauuuuaga

SEQ ID NO: 730866 - RNA, 19 nt, Artificial Sequence
  Description of Artificial Sequence: Synthetic oligonucleotide
ugaacgccaccuucuuuga

SEQ ID NO: 730867 - RNA, 19 nt, Artificial Sequence
  Description of Artificial Sequence: Synthetic oligonucleotide
cugcacccuauuaucgggc

SEQ ID NO: 730868 - RNA, 19 nt, Artificial Sequence
  Description of Artificial Sequence: Synthetic oligonucleotide
gcguuguugagcuucccag

SEQ ID NO: 730869 - RNA, 19 nt, Artificial Sequence
  Description of Artificial Sequence: Synthetic oligonucleotide
aacccaccagaacaugauu

SEQ ID NO: 730870 - RNA, 19 nt, Artificial Sequence
  Description of Artificial Sequence: Synthetic oligonucleotide
uacuuaccagaaaguguaa

SEQ ID NO: 730871 - RNA, 19 nt, Artificial Sequence
  Description of Artificial Sequence: Synthetic oligonucleotide
ccauguguacuuuuaaaca

SEQ ID NO: 730872 - RNA, 19 nt, Artificial Sequence
  Description of Artificial Sequence: Synthetic oligonucleotide
cauuauggauaaaauuggu

SEQ ID NO: 730873 - RNA, 19 nt, Artificial Sequence
  Description of Artificial Sequence: Synthetic oligonucleotide
cagcaauuacuauuaucca

SEQ ID NO: 730874 - RNA, 19 nt, Artificial Sequence
  Description of Artificial Sequence: Synthetic oligonucleotide
ucacaacauuguuuauuau

SEQ ID NO: 730875 - RNA, 19 nt, Artificial Sequence
  Description of Artificial Sequence: Synthetic oligonucleotide
gggguaucaacuaucguca

SEQ ID NO: 730876 - RNA, 19 nt, Artificial Sequence
  Description of Artificial Sequence: Synthetic oligonucleotide
aguaauccucaaauuuacu

SEQ ID NO: 730877 - RNA, 19 nt, Artificial Sequence
  Description of Artificial Sequence: Synthetic oligonucleotide
acuuaccagaaaguguaaa

SEQ ID NO: 730878 - RNA, 19 nt, Artificial Sequence
  Description of Artificial Sequence: Synthetic oligonucleotide
uauuggcaacuaauacaua

SEQ ID NO: 730879 - RNA, 19 nt, Artificial Sequence
  Description of Artificial Sequence: Synthetic oligonucleotide
ucucuucaagaggccauga

SEQ ID NO: 730880 - RNA, 19 nt, Artificial Sequence
  Description of Artificial Sequence: Synthetic oligonucleotide
gcaauuacuauuauccacu

SEQ ID NO: 730881 - RNA, 19 nt, Artificial Sequence
  Description of Artificial Sequence: Synthetic oligonucleotide
cugccagcaauuacuauua

SEQ ID NO: 730882 - RNA, 19 nt, Artificial Sequence
  Description of Artificial Sequence: Synthetic oligonucleotide
cuaauacauaacugguggu

SEQ ID NO: 730883 - RNA, 19 nt, Artificial Sequence
  Description of Artificial Sequence: Synthetic oligonucleotide
cacaauauccuagacaauu

SEQ ID NO: 730884 - RNA, 19 nt, Artificial Sequence
  Description of Artificial Sequence: Synthetic oligonucleotide
aaaaugcguuguugagcuu

SEQ ID NO: 730885 - RNA, 19 nt, Artificial Sequence
  Description of Artificial Sequence: Synthetic oligonucleotide
ucgggcaucugccgucugu

SEQ ID NO: 730886 - RNA, 19 nt, Artificial Sequence
  Description of Artificial Sequence: Synthetic oligonucleotide
uacauaacugguggucaau

SEQ ID NO: 730887 - RNA, 19 nt, Artificial Sequence
  Description of Artificial Sequence: Synthetic oligonucleotide
acugucaauguagucgaua

SEQ ID NO: 730888 - RNA, 19 nt, Artificial Sequence
  Description of Artificial Sequence: Synthetic oligonucleotide
acauaacugguggucaaua

SEQ ID NO: 730889 - RNA, 19 nt, Artificial Sequence
  Description of Artificial Sequence: Synthetic oligonucleotide
acgccaccuucuuugauua

SEQ ID NO: 730890 - RNA, 19 nt, Artificial Sequence
  Description of Artificial Sequence: Synthetic oligonucleotide
guuauccacuccauuguaa

SEQ ID NO: 730891 - RNA, 19 nt, Artificial Sequence
  Description of Artificial Sequence: Synthetic oligonucleotide
cacccuauuaucgggcauc

SEQ ID NO: 730892 - RNA, 19 nt, Artificial Sequence
  Description of Artificial Sequence: Synthetic oligonucleotide
agaaacagguuggucguua

SEQ ID NO: 730893 - RNA, 19 nt, Artificial Sequence
  Description of Artificial Sequence: Synthetic oligonucleotide
cauuauuguauaggcugca

SEQ ID NO: 730894 - RNA, 19 nt, Artificial Sequence
  Description of Artificial Sequence: Synthetic oligonucleotide
gucuguucacucgggauuc

SEQ ID NO: 730895 - RNA, 19 nt, Artificial Sequence
  Description of Artificial Sequence: Synthetic oligonucleotide
ggauacagcuaaaugcaga

SEQ ID NO: 730896 - RNA, 19 nt, Artificial Sequence
  Description of Artificial Sequence: Synthetic oligonucleotide
cuggauacucuggagaaua

SEQ ID NO: 730897 - RNA, 19 nt, Artificial Sequence
  Description of Artificial Sequence: Synthetic oligonucleotide
ucuuggcuacauguucccu

SEQ ID NO: 730898 - RNA, 19 nt, Artificial Sequence
  Description of Artificial Sequence: Synthetic oligonucleotide
aucaacccaccagaacaug

SEQ ID NO: 730899 - RNA, 19 nt, Artificial Sequence
  Description of Artificial Sequence: Synthetic oligonucleotide
guacuuagagcuguuaauu

SEQ ID NO: 730900 - RNA, 19 nt, Artificial Sequence
  Description of Artificial Sequence: Synthetic oligonucleotide
agcaacugaacgccaccuu

SEQ ID NO: 730901 - RNA, 19 nt, Artificial Sequence
  Description of Artificial Sequence: Synthetic oligonucleotide
agacaauucaaggcaucuu

SEQ ID NO: 730902 - RNA, 19 nt, Artificial Sequence
  Description of Artificial Sequence: Synthetic oligonucleotide
aaggagcaaugaaguauaa

SEQ ID NO: 730903 - RNA, 19 nt, Artificial Sequence
  Description of Artificial Sequence: Synthetic oligonucleotide
gguacuuagagcuguuaau

SEQ ID NO: 730904 - RNA, 19 nt, Artificial Sequence
  Description of Artificial Sequence: Synthetic oligonucleotide
gcaauuagugggaugauau

SEQ ID NO: 730905 - RNA, 19 nt, Artificial Sequence
  Description of Artificial Sequence: Synthetic oligonucleotide
uggcuacauguucccuucu

SEQ ID NO: 730906 - RNA, 19 nt, Artificial Sequence
  Description of Artificial Sequence: Synthetic oligonucleotide
ggcauauuggcaacuaaua

SEQ ID NO: 730907 - RNA, 19 nt, Artificial Sequence
  Description of Artificial Sequence: Synthetic oligonucleotide
auauauggauacagcuaaa

SEQ ID NO: 730908 - RNA, 19 nt, Artificial Sequence
  Description of Artificial Sequence: Synthetic oligonucleotide
ggccuggauacucuggaga

SEQ ID NO: 730909 - RNA, 19 nt, Artificial Sequence
  Description of Artificial Sequence: Synthetic oligonucleotide
uaucgggcaucugccgucu

SEQ ID NO: 730910 - RNA, 19 nt, Artificial Sequence
  Description of Artificial Sequence: Synthetic oligonucleotide
gcauuuaaguaauccucaa

SEQ ID NO: 730911 - RNA, 19 nt, Artificial Sequence
  Description of Artificial Sequence: Synthetic oligonucleotide
acccuauuaucgggcaucu

SEQ ID NO: 730912 - RNA, 19 nt, Artificial Sequence
  Description of Artificial Sequence: Synthetic oligonucleotide
augcguuguugagcuuccc

SEQ ID NO: 730913 - RNA, 19 nt, Artificial Sequence
  Description of Artificial Sequence: Synthetic oligonucleotide
caauucaaggcaucuuaau

SEQ ID NO: 730914 - RNA, 19 nt, Artificial Sequence
  Description of Artificial Sequence: Synthetic oligonucleotide
cuacaaacgcauuucucuu

SEQ ID NO: 730915 - RNA, 19 nt, Artificial Sequence
  Description of Artificial Sequence: Synthetic oligonucleotide
gcaucuuaaucuccuucga

SEQ ID NO: 730916 - RNA, 19 nt, Artificial Sequence
  Description of Artificial Sequence: Synthetic oligonucleotide
cucgggauucugcauuuaa

SEQ ID NO: 730917 - RNA, 19 nt, Artificial Sequence
  Description of Artificial Sequence: Synthetic oligonucleotide
aggugcacuguaagcauau

SEQ ID NO: 730918 - RNA, 19 nt, Artificial Sequence
  Description of Artificial Sequence: Synthetic oligonucleotide
cacuguaagcauauagguu

SEQ ID NO: 730919 - RNA, 19 nt, Artificial Sequence
  Description of Artificial Sequence: Synthetic oligonucleotide
auggaaccucuguauuaua

SEQ ID NO: 730920 - RNA, 19 nt, Artificial Sequence
  Description of Artificial Sequence: Synthetic oligonucleotide
ucuguucacucgggauucu

SEQ ID NO: 730921 - RNA, 19 nt, Artificial Sequence
  Description of Artificial Sequence: Synthetic oligonucleotide
gcuacuuaccagaaagugu

SEQ ID NO: 730922 - RNA, 19 nt, Artificial Sequence
  Description of Artificial Sequence: Synthetic oligonucleotide
gccuggauacucuggagaa

SEQ ID NO: 730923 - RNA, 19 nt, Artificial Sequence
  Description of Artificial Sequence: Synthetic oligonucleotide
cuaggugcacuguaagcau

SEQ ID NO: 730924 - RNA, 19 nt, Artificial Sequence
  Description of Artificial Sequence: Synthetic oligonucleotide
cuggcauauuggcaacuaa

SEQ ID NO: 730925 - RNA, 19 nt, Artificial Sequence
  Description of Artificial Sequence: Synthetic oligonucleotide
caauuugccuagaaauguu

SEQ ID NO: 730926 - RNA, 19 nt, Artificial Sequence
  Description of Artificial Sequence: Synthetic oligonucleotide
ggucguuagcuucacaauu

SEQ ID NO: 730927 - RNA, 19 nt, Artificial Sequence
  Description of Artificial Sequence: Synthetic oligonucleotide
ggccaauauauggaaaaua

SEQ ID NO: 730928 - RNA, 19 nt, Artificial Sequence
  Description of Artificial Sequence: Synthetic oligonucleotide
gguaugcaauauauggaua

SEQ ID NO: 730929 - RNA, 19 nt, Artificial Sequence
  Description of Artificial Sequence: Synthetic oligonucleotide
cucuuaguaaguuguccuu

SEQ ID NO: 730930 - RNA, 19 nt, Artificial Sequence
  Description of Artificial Sequence: Synthetic oligonucleotide
cuguugcucuaaaaugcgu

SEQ ID NO: 730931 - RNA, 19 nt, Artificial Sequence
  Description of Artificial Sequence: Synthetic oligonucleotide
ccaagcuggcauauuggca

SEQ ID NO: 730932 - RNA, 19 nt, Artificial Sequence
  Description of Artificial Sequence: Synthetic oligonucleotide
agucgauaacaggcugcca

SEQ ID NO: 730933 - RNA, 19 nt, Artificial Sequence
  Description of Artificial Sequence: Synthetic oligonucleotide
cuucaaacuggcgacguuu

SEQ ID NO: 730934 - RNA, 19 nt, Artificial Sequence
  Description of Artificial Sequence: Synthetic oligonucleotide
ggauaaaauuggugcaaau

SEQ ID NO: 730935 - RNA, 19 nt, Artificial Sequence
  Description of Artificial Sequence: Synthetic oligonucleotide
gucguuagcuucacaauuu

SEQ ID NO: 730936 - RNA, 19 nt, Artificial Sequence
  Description of Artificial Sequence: Synthetic oligonucleotide
acacaauauccuagacaau

SEQ ID NO: 730937 - RNA, 19 nt, Artificial Sequence
  Description of Artificial Sequence: Synthetic oligonucleotide
gccagaggacucuuaguaa

SEQ ID NO: 730938 - RNA, 19 nt, Artificial Sequence
  Description of Artificial Sequence: Synthetic oligonucleotide
agaggccaugauucccauu

SEQ ID NO: 730939 - RNA, 19 nt, Artificial Sequence
  Description of Artificial Sequence: Synthetic oligonucleotide
gaagcauaguuugcaucau

SEQ ID NO: 730940 - RNA, 19 nt, Artificial Sequence
  Description of Artificial Sequence: Synthetic oligonucleotide
caacccaccagaacaugau

SEQ ID NO: 730941 - RNA, 19 nt, Artificial Sequence
  Description of Artificial Sequence: Synthetic oligonucleotide
guauagguagaaacagguu

SEQ ID NO: 730942 - RNA, 19 nt, Artificial Sequence
  Description of Artificial Sequence: Synthetic oligonucleotide
ggcuugcuccaccuguaca

SEQ ID NO: 730943 - RNA, 19 nt, Artificial Sequence
  Description of Artificial Sequence: Synthetic oligonucleotide
ccauaugaaagaugcuaua

SEQ ID NO: 730944 - RNA, 19 nt, Artificial Sequence
  Description of Artificial Sequence: Synthetic oligonucleotide
ggacucuuaguaaguuguc

SEQ ID NO: 730945 - RNA, 19 nt, Artificial Sequence
  Description of Artificial Sequence: Synthetic oligonucleotide
ggcaauuagugggaugaua

SEQ ID NO: 730946 - RNA, 19 nt, Artificial Sequence
  Description of Artificial Sequence: Synthetic oligonucleotide
ggcacuaaaugagaauaau

SEQ ID NO: 730947 - RNA, 19 nt, Artificial Sequence
  Description of Artificial Sequence: Synthetic oligonucleotide
gggcacuaaaugagaauaa

SEQ ID NO: 730948 - RNA, 19 nt, Artificial Sequence
  Description of Artificial Sequence: Synthetic oligonucleotide
cuggcuaaaggggcacuaa

SEQ ID NO: 730949 - RNA, 19 nt, Artificial Sequence
  Description of Artificial Sequence: Synthetic oligonucleotide
aucgggcaucugccgucug

SEQ ID NO: 730950 - RNA, 19 nt, Artificial Sequence
  Description of Artificial Sequence: Synthetic oligonucleotide
caacuaucgucagcagcaa

SEQ ID NO: 730951 - RNA, 19 nt, Artificial Sequence
  Description of Artificial Sequence: Synthetic oligonucleotide
gcuacauguucccuucuuu

SEQ ID NO: 730952 - RNA, 19 nt, Artificial Sequence
  Description of Artificial Sequence: Synthetic oligonucleotide
gaacgccaccuucuuugau

SEQ ID NO: 730953 - RNA, 19 nt, Artificial Sequence
  Description of Artificial Sequence: Synthetic oligonucleotide
ccuagacaauucaaggcau

SEQ ID NO: 730954 - RNA, 19 nt, Artificial Sequence
  Description of Artificial Sequence: Synthetic oligonucleotide
gucaugcuguuaaauccau

SEQ ID NO: 730955 - RNA, 19 nt, Artificial Sequence
  Description of Artificial Sequence: Synthetic oligonucleotide
caaacgcauuucucuuccu

SEQ ID NO: 730956 - RNA, 19 nt, Artificial Sequence
  Description of Artificial Sequence: Synthetic oligonucleotide
ggcuaaaggggcacuaaau

SEQ ID NO: 730957 - RNA, 19 nt, Artificial Sequence
  Description of Artificial Sequence: Synthetic oligonucleotide
gaagguacuuagagcuguu

SEQ ID NO: 730958 - RNA, 19 nt, Artificial Sequence
  Description of Artificial Sequence: Synthetic oligonucleotide
gguuggucguuagcuucac

SEQ ID NO: 730959 - RNA, 19 nt, Artificial Sequence
  Description of Artificial Sequence: Synthetic oligonucleotide
gcauaguuugcaucauauu

SEQ ID NO: 730960 - RNA, 19 nt, Artificial Sequence
  Description of Artificial Sequence: Synthetic oligonucleotide
cucauaguguuacguuauu

SEQ ID NO: 730961 - RNA, 19 nt, Artificial Sequence
  Description of Artificial Sequence: Synthetic oligonucleotide
gccgucuguucacucggga

SEQ ID NO: 730962 - RNA, 19 nt, Artificial Sequence
  Description of Artificial Sequence: Synthetic oligonucleotide
cugggguaucaacuaucgu

SEQ ID NO: 730963 - RNA, 19 nt, Artificial Sequence
  Description of Artificial Sequence: Synthetic oligonucleotide
acucgggauucugcauuua

SEQ ID NO: 730964 - RNA, 19 nt, Artificial Sequence
  Description of Artificial Sequence: Synthetic oligonucleotide
ccuuccagaguccuuuuau

SEQ ID NO: 730965 - RNA, 19 nt, Artificial Sequence
  Description of Artificial Sequence: Synthetic oligonucleotide
cacucgggauucugcauuu

SEQ ID NO: 730966 - RNA, 19 nt, Artificial Sequence
  Description of Artificial Sequence: Synthetic oligonucleotide
gggccaauauauggaaaau

SEQ ID NO: 730967 - RNA, 19 nt, Artificial Sequence
  Description of Artificial Sequence: Synthetic oligonucleotide
cuauuuuagcagggccaau

SEQ ID NO: 730968 - RNA, 19 nt, Artificial Sequence
  Description of Artificial Sequence: Synthetic oligonucleotide
cgauaacaggcugccagca

SEQ ID NO: 730969 - RNA, 19 nt, Artificial Sequence
  Description of Artificial Sequence: Synthetic oligonucleotide
gguggucaauagaguuuaa

SEQ ID NO: 730970 - RNA, 19 nt, Artificial Sequence
  Description of Artificial Sequence: Synthetic oligonucleotide
cguuguugagcuucccagu

SEQ ID NO: 730971 - RNA, 19 nt, Artificial Sequence
  Description of Artificial Sequence: Synthetic oligonucleotide
caucugccgucuguucacu

SEQ ID NO: 730972 - RNA, 19 nt, Artificial Sequence
  Description of Artificial Sequence: Synthetic oligonucleotide
cccuauuaucgggcaucug

SEQ ID NO: 730973 - RNA, 19 nt, Artificial Sequence
  Description of Artificial Sequence: Synthetic oligonucleotide
gcacccuauuaucgggcau

SEQ ID NO: 730974 - RNA, 19 nt, Artificial Sequence
  Description of Artificial Sequence: Synthetic oligonucleotide
ccgucuguucacucgggau

SEQ ID NO: 730975 - RNA, 19 nt, Artificial Sequence
  Description of Artificial Sequence: Synthetic oligonucleotide
cgucuguucacucgggauu

SEQ ID NO: 730976 - RNA, 19 nt, Artificial Sequence
  Description of Artificial Sequence: Synthetic oligonucleotide
cgcauuucucuuccugcua

SEQ ID NO: 730977 - RNA, 19 nt, Artificial Sequence
  Description of Artificial Sequence: Synthetic oligonucleotide
acgaauacuaccuuguagc

SEQ ID NO: 730978 - RNA, 19 nt, Artificial Sequence
  Description of Artificial Sequence: Synthetic oligonucleotide
acuaaugagguugaaaagc

SEQ ID NO: 730979 - RNA, 19 nt, Artificial Sequence
  Description of Artificial Sequence: Synthetic oligonucleotide
auagcgagaguacacgggc

SEQ ID NO: 730980 - RNA, 19 nt, Artificial Sequence
  Description of Artificial Sequence: Synthetic oligonucleotide
gaacacacgaccuaccgag

SEQ ID NO: 730981 - RNA, 19 nt, Artificial Sequence
  Description of Artificial Sequence: Synthetic oligonucleotide
aacuaaugagguugaaaag

SEQ ID NO: 730982 - RNA, 19 nt, Artificial Sequence
  Description of Artificial Sequence: Synthetic oligonucleotide
ugacuuauagaggaagugg

SEQ ID NO: 730983 - RNA, 19 nt, Artificial Sequence
  Description of Artificial Sequence: Synthetic oligonucleotide
aaagaaguccucacggucg

SEQ ID NO: 730984 - RNA, 19 nt, Artificial Sequence
  Description of Artificial Sequence: Synthetic oligonucleotide
ucaacugcgcgccaguuag

SEQ ID NO: 730985 - RNA, 19 nt, Artificial Sequence
  Description of Artificial Sequence: Synthetic oligonucleotide
guagauguacaguagcucc

SEQ ID NO: 730986 - RNA, 19 nt, Artificial Sequence
  Description of Artificial Sequence: Synthetic oligonucleotide
uuauccgugauucgcuccg

SEQ ID NO: 730987 - RNA, 19 nt, Artificial Sequence
  Description of Artificial Sequence: Synthetic oligonucleotide
cuagguaagagaugugugc

SEQ ID NO: 730988 - RNA, 19 nt, Artificial Sequence
  Description of Artificial Sequence: Synthetic oligonucleotide
ucuagguaagagaugugug

SEQ ID NO: 730989 - RNA, 19 nt, Artificial Sequence
  Description of Artificial Sequence: Synthetic oligonucleotide
uggugaagaguccugagcu

SEQ ID NO: 730990 - RNA, 19 nt, Artificial Sequence
  Description of Artificial Sequence: Synthetic oligonucleotide
uuugacuuauagaggaagu

SEQ ID NO: 730991 - RNA, 19 nt, Artificial Sequence
  Description of Artificial Sequence: Synthetic oligonucleotide
aacuucguggggcuaccgc

SEQ ID NO: 730992 - RNA, 19 nt, Artificial Sequence
  Description of Artificial Sequence: Synthetic oligonucleotide
uagguaagagaugugugcg

SEQ ID NO: 730993 - RNA, 19 nt, Artificial Sequence
  Description of Artificial Sequence: Synthetic oligonucleotide
cugcgcgccaguuagaagg

SEQ ID NO: 730994 - RNA, 19 nt, Artificial Sequence
  Description of Artificial Sequence: Synthetic oligonucleotide
aagaaguccucacggucgg

SEQ ID NO: 730995 - RNA, 19 nt, Artificial Sequence
  Description of Artificial Sequence: Synthetic oligonucleotide
gacuuauagaggaaguggc

SEQ ID NO: 730996 - RNA, 19 nt, Artificial Sequence
  Description of Artificial Sequence: Synthetic oligonucleotide
ucuuuucggauccaucgca

SEQ ID NO: 730997 - RNA, 19 nt, Artificial Sequence
  Description of Artificial Sequence: Synthetic oligonucleotide
agcagguuauccgugauuc

SEQ ID NO: 730998 - RNA, 19 nt, Artificial Sequence
  Description of Artificial Sequence: Synthetic oligonucleotide
gagaaggcgccgcaggucg

SEQ ID NO: 730999 - RNA, 19 nt, Artificial Sequence
  Description of Artificial Sequence: Synthetic oligonucleotide
uuucggauccaucgcauca

SEQ ID NO: 731000 - RNA, 19 nt, Artificial Sequence
  Description of Artificial Sequence: Synthetic oligonucleotide
gaaguggcgaaggucaggg

SEQ ID NO: 731001 - RNA, 19 nt, Artificial Sequence
  Description of Artificial Sequence: Synthetic oligonucleotide
ucggaaggagccaacgugc

SEQ ID NO: 731002 - RNA, 19 nt, Artificial Sequence
  Description of Artificial Sequence: Synthetic oligonucleotide
ucuggcgcaugucuguagg

SEQ ID NO: 731003 - RNA, 19 nt, Artificial Sequence
  Description of Artificial Sequence: Synthetic oligonucleotide
uauaguagauggucuugag

SEQ ID NO: 731004 - RNA, 19 nt, Artificial Sequence
  Description of Artificial Sequence: Synthetic oligonucleotide
caggaauugguccuugcgg

SEQ ID NO: 731005 - RNA, 19 nt, Artificial Sequence
  Description of Artificial Sequence: Synthetic oligonucleotide
agcgcggcugugcagauac

SEQ ID NO: 731006 - RNA, 19 nt, Artificial Sequence
  Description of Artificial Sequence: Synthetic oligonucleotide
gaaccgaucucuccugccg

SEQ ID NO: 731007 - RNA, 19 nt, Artificial Sequence
  Description of Artificial Sequence: Synthetic oligonucleotide
agagaccgcaaagaagucc

SEQ ID NO: 731008 - RNA, 19 nt, Artificial Sequence
  Description of Artificial Sequence: Synthetic oligonucleotide
uaccuuguagccaucugca

SEQ ID NO: 731009 - RNA, 19 nt, Artificial Sequence
  Description of Artificial Sequence: Synthetic oligonucleotide
augugugcguggaagaagc

SEQ ID NO: 731010 - RNA, 19 nt, Artificial Sequence
  Description of Artificial Sequence: Synthetic oligonucleotide
ugggcaacgcuguaguaag

SEQ ID NO: 731011 - RNA, 19 nt, Artificial Sequence
  Description of Artificial Sequence: Synthetic oligonucleotide
ucgaaggcguuccuggaag

SEQ ID NO: 731012 - RNA, 19 nt, Artificial Sequence
  Description of Artificial Sequence: Synthetic oligonucleotide
cauagcgagaguacacggg

SEQ ID NO: 731013 - RNA, 19 nt, Artificial Sequence
  Description of Artificial Sequence: Synthetic oligonucleotide
gaagaagccggccgcauug

SEQ ID NO: 731014 - RNA, 19 nt, Artificial Sequence
  Description of Artificial Sequence: Synthetic oligonucleotide
cauaggaacgugcauggac

SEQ ID NO: 731015 - RNA, 19 nt, Artificial Sequence
  Description of Artificial Sequence: Synthetic oligonucleotide
cuuugacuuauagaggaag

SEQ ID NO: 731016 - RNA, 19 nt, Artificial Sequence
  Description of Artificial Sequence: Synthetic oligonucleotide
aaguccucacggucggugg

SEQ ID NO: 731017 - RNA, 19 nt, Artificial Sequence
  Description of Artificial Sequence: Synthetic oligonucleotide
gucggugucagguucuagg

SEQ ID NO: 731018 - RNA, 19 nt, Artificial Sequence
  Description of Artificial Sequence: Synthetic oligonucleotide
caguugggugcuuagcucg

SEQ ID NO: 731019 - RNA, 19 nt, Artificial Sequence
  Description of Artificial Sequence: Synthetic oligonucleotide
uugacuuauagaggaagug

SEQ ID NO: 731020 - RNA, 19 nt, Artificial Sequence
  Description of Artificial Sequence: Synthetic oligonucleotide
accgcaaagaaguccucac

SEQ ID NO: 731021 - RNA, 19 nt, Artificial Sequence
  Description of Artificial Sequence: Synthetic oligonucleotide
gggccuguauaguagaugg

SEQ ID NO: 731022 - RNA, 19 nt, Artificial Sequence
  Description of Artificial Sequence: Synthetic oligonucleotide
agugugccuucccacuucc

SEQ ID NO: 731023 - RNA, 19 nt, Artificial Sequence
  Description of Artificial Sequence: Synthetic oligonucleotide
aucgcaucagcuuauggau

SEQ ID NO: 731024 - RNA, 19 nt, Artificial Sequence
  Description of Artificial Sequence: Synthetic oligonucleotide
auaguagauggucuugagu

SEQ ID NO: 731025 - RNA, 19 nt, Artificial Sequence
  Description of Artificial Sequence: Synthetic oligonucleotide
uguauaguagauggucuug

SEQ ID NO: 731026 - RNA, 19 nt, Artificial Sequence
  Description of Artificial Sequence: Synthetic oligonucleotide
uuauagaggaaguggcgaa

SEQ ID NO: 731027 - RNA, 19 nt, Artificial Sequence
  Description of Artificial Sequence: Synthetic oligonucleotide
cacgaauacuaccuuguag

SEQ ID NO: 731028 - RNA, 19 nt, Artificial Sequence
  Description of Artificial Sequence: Synthetic oligonucleotide
uugcgggccagcagaaugg

SEQ ID NO: 731029 - RNA, 19 nt, Artificial Sequence
  Description of Artificial Sequence: Synthetic oligonucleotide
cuugcggcgcacuagcgcc

SEQ ID NO: 731030 - RNA, 19 nt, Artificial Sequence
  Description of Artificial Sequence: Synthetic oligonucleotide
acuuauagaggaaguggcg

SEQ ID NO: 731031 - RNA, 19 nt, Artificial Sequence
  Description of Artificial Sequence: Synthetic oligonucleotide
guaagagaugugugcgugg

SEQ ID NO: 731032 - RNA, 19 nt, Artificial Sequence
  Description of Artificial Sequence: Synthetic oligonucleotide
uagauguacaguagcuccu

SEQ ID NO: 731033 - RNA, 19 nt, Artificial Sequence
  Description of Artificial Sequence: Synthetic oligonucleotide
gagccaacgugccaucggg

SEQ ID NO: 731034 - RNA, 19 nt, Artificial Sequence
  Description of Artificial Sequence: Synthetic oligonucleotide
ucgguggagacuagcagca

SEQ ID NO: 731035 - RNA, 19 nt, Artificial Sequence
  Description of Artificial Sequence: Synthetic oligonucleotide
acacacgaccuaccgaggg

SEQ ID NO: 731036 - RNA, 19 nt, Artificial Sequence
  Description of Artificial Sequence: Synthetic oligonucleotide
gauaugaguguccagccgu

SEQ ID NO: 731037 - RNA, 19 nt, Artificial Sequence
  Description of Artificial Sequence: Synthetic oligonucleotide
acagcggaggaaccgaucu

SEQ ID NO: 731038 - RNA, 19 nt, Artificial Sequence
  Description of Artificial Sequence: Synthetic oligonucleotide
ccucuuuucggauccaucg

SEQ ID NO: 731039 - RNA, 19 nt, Artificial Sequence
  Description of Artificial Sequence: Synthetic oligonucleotide
aaggcguuccuggaagcgg

SEQ ID NO: 731040 - RNA, 19 nt, Artificial Sequence
  Description of Artificial Sequence: Synthetic oligonucleotide
aggaaccgaucucuccugc

SEQ ID NO: 731041 - RNA, 19 nt, Artificial Sequence
  Description of Artificial Sequence: Synthetic oligonucleotide
auguggcucaacugcgcgc

SEQ ID NO: 731042 - RNA, 19 nt, Artificial Sequence
  Description of Artificial Sequence: Synthetic oligonucleotide
ucucauuggggccuguaua

SEQ ID NO: 731043 - RNA, 19 nt, Artificial Sequence
  Description of Artificial Sequence: Synthetic oligonucleotide
gaugugugcguggaagaag

SEQ ID NO: 731044 - RNA, 19 nt, Artificial Sequence
  Description of Artificial Sequence: Synthetic oligonucleotide
auaggaacgugcauggaca

SEQ ID NO: 731045 - RNA, 19 nt, Artificial Sequence
  Description of Artificial Sequence: Synthetic oligonucleotide
aguggcgaaggucagggau

SEQ ID NO: 731046 - RNA, 19 nt, Artificial Sequence
  Description of Artificial Sequence: Synthetic oligonucleotide
acuugggcaacgcuguagu

SEQ ID NO: 731047 - RNA, 19 nt, Artificial Sequence
  Description of Artificial Sequence: Synthetic oligonucleotide
guugcgggccagcagaaug

SEQ ID NO: 731048 - RNA, 19 nt, Artificial Sequence
  Description of Artificial Sequence: Synthetic oligonucleotide
aacgugcauggacaaacau

SEQ ID NO: 731049 - RNA, 19 nt, Artificial Sequence
  Description of Artificial Sequence: Synthetic oligonucleotide
uggaaagugcuuccucaga

SEQ ID NO: 731050 - RNA, 19 nt, Artificial Sequence
  Description of Artificial Sequence: Synthetic oligonucleotide
ugaguguccagccgugccu

SEQ ID NO: 731051 - RNA, 19 nt, Artificial Sequence
  Description of Artificial Sequence: Synthetic oligonucleotide
ucuuugacuuauagaggaa

SEQ ID NO: 731052 - RNA, 19 nt, Artificial Sequence
  Description of Artificial Sequence: Synthetic oligonucleotide
uguacggggccucaaucuc

SEQ ID NO: 731053 - RNA, 19 nt, Artificial Sequence
  Description of Artificial Sequence: Synthetic oligonucleotide
cuuauagaggaaguggcga

SEQ ID NO: 731054 - RNA, 19 nt, Artificial Sequence
  Description of Artificial Sequence: Synthetic oligonucleotide
caggcugcgagcacgugcc

SEQ ID NO: 731055 - RNA, 19 nt, Artificial Sequence
  Description of Artificial Sequence: Synthetic oligonucleotide
acacccauagugcuggaaa

SEQ ID NO: 731056 - RNA, 19 nt, Artificial Sequence
  Description of Artificial Sequence: Synthetic oligonucleotide
guuauccgugauucgcucc

SEQ ID NO: 731057 - RNA, 19 nt, Artificial Sequence
  Description of Artificial Sequence: Synthetic oligonucleotide
uccugccgacccuuaaccg

SEQ ID NO: 731058 - RNA, 19 nt, Artificial Sequence
  Description of Artificial Sequence: Synthetic oligonucleotide
ucccucaauaggugagggg

SEQ ID NO: 731059 - RNA, 19 nt, Artificial Sequence
  Description of Artificial Sequence: Synthetic oligonucleotide
cucuuuucggauccaucgc

SEQ ID NO: 731060 - RNA, 19 nt, Artificial Sequence
  Description of Artificial Sequence: Synthetic oligonucleotide
uugugcccucuugagaggg

SEQ ID NO: 731061 - RNA, 19 nt, Artificial Sequence
  Description of Artificial Sequence: Synthetic oligonucleotide
gaaggcguuccuggaagcg

SEQ ID NO: 731062 - RNA, 19 nt, Artificial Sequence
  Description of Artificial Sequence: Synthetic oligonucleotide
ucaguugggugcuuagcuc

SEQ ID NO: 731063 - RNA, 19 nt, Artificial Sequence
  Description of Artificial Sequence: Synthetic oligonucleotide
uggaccguccuguuucuug

SEQ ID NO: 731064 - RNA, 19 nt, Artificial Sequence
  Description of Artificial Sequence: Synthetic oligonucleotide
ugccucacucaguacaaac

SEQ ID NO: 731065 - RNA, 19 nt, Artificial Sequence
  Description of Artificial Sequence: Synthetic oligonucleotide
aaccgaucucuccugccga

SEQ ID NO: 731066 - RNA, 19 nt, Artificial Sequence
  Description of Artificial Sequence: Synthetic oligonucleotide
caucugcauggauggagcg

SEQ ID NO: 731067 - RNA, 19 nt, Artificial Sequence
  Description of Artificial Sequence: Synthetic oligonucleotide
uggaaaagaccaggcugcg

SEQ ID NO: 731068 - RNA, 19 nt, Artificial Sequence
  Description of Artificial Sequence: Synthetic oligonucleotide
agugggcuguagcacaugu

SEQ ID NO: 731069 - RNA, 19 nt, Artificial Sequence
  Description of Artificial Sequence: Synthetic oligonucleotide
uagauggucuugagugggc

SEQ ID NO: 731070 - RNA, 19 nt, Artificial Sequence
  Description of Artificial Sequence: Synthetic oligonucleotide
ugugucaguccuggugugg

SEQ ID NO: 731071 - RNA, 19 nt, Artificial Sequence
  Description of Artificial Sequence: Synthetic oligonucleotide
ggauaugaguguccagccg

SEQ ID NO: 731072 - RNA, 19 nt, Artificial Sequence
  Description of Artificial Sequence: Synthetic oligonucleotide
ucacgggccaccccuguca

SEQ ID NO: 731073 - RNA, 19 nt, Artificial Sequence
  Description of Artificial Sequence: Synthetic oligonucleotide
uuaaccggccaccggcgca

SEQ ID NO: 731074 - RNA, 19 nt, Artificial Sequence
  Description of Artificial Sequence: Synthetic oligonucleotide
uugggcaacgcuguaguaa

SEQ ID NO: 731075 - RNA, 19 nt, Artificial Sequence
  Description of Artificial Sequence: Synthetic oligonucleotide
cuucccugucuucugacuc

SEQ ID NO: 731076 - RNA, 19 nt, Artificial Sequence
  Description of Artificial Sequence: Synthetic oligonucleotide
ccgcauugaacuuuggcag

SEQ ID NO: 731077 - RNA, 19 nt, Artificial Sequence
  Description of Artificial Sequence: Synthetic oligonucleotide
agacccauagcgagaguac

SEQ ID NO: 731078 - RNA, 19 nt, Artificial Sequence
  Description of Artificial Sequence: Synthetic oligonucleotide
uuucgaaggcguuccugga

SEQ ID NO: 731079 - RNA, 19 nt, Artificial Sequence
  Description of Artificial Sequence: Synthetic oligonucleotide
cuucccacgcccagugugc

SEQ ID NO: 731080 - RNA, 19 nt, Artificial Sequence
  Description of Artificial Sequence: Synthetic oligonucleotide
uucgaaggcguuccuggaa

SEQ ID NO: 731081 - RNA, 19 nt, Artificial Sequence
  Description of Artificial Sequence: Synthetic oligonucleotide
gccccuagaggauacaggc

SEQ ID NO: 731082 - RNA, 19 nt, Artificial Sequence
  Description of Artificial Sequence: Synthetic oligonucleotide
cugccgacccuuaaccggc

SEQ ID NO: 731083 - RNA, 19 nt, Artificial Sequence
  Description of Artificial Sequence: Synthetic oligonucleotide
uccgugauucgcuccgagc

SEQ ID NO: 731084 - RNA, 19 nt, Artificial Sequence
  Description of Artificial Sequence: Synthetic oligonucleotide
gcaggaauugguccuugcg

SEQ ID NO: 731085 - RNA, 19 nt, Artificial Sequence
  Description of Artificial Sequence: Synthetic oligonucleotide
uuuucggauccaucgcauc

SEQ ID NO: 731086 - RNA, 19 nt, Artificial Sequence
  Description of Artificial Sequence: Synthetic oligonucleotide
gaaguccucacggucggug

SEQ ID NO: 731087 - RNA, 19 nt, Artificial Sequence
  Description of Artificial Sequence: Synthetic oligonucleotide
gaggaaccgaucucuccug

SEQ ID NO: 731088 - RNA, 19 nt, Artificial Sequence
  Description of Artificial Sequence: Synthetic oligonucleotide
ugugugcguggaagaagcc

SEQ ID NO: 731089 - RNA, 19 nt, Artificial Sequence
  Description of Artificial Sequence: Synthetic oligonucleotide
agguaagagaugugugcgu

SEQ ID NO: 731090 - RNA, 19 nt, Artificial Sequence
  Description of Artificial Sequence: Synthetic oligonucleotide
guauaguagauggucuuga

SEQ ID NO: 731091 - RNA, 19 nt, Artificial Sequence
  Description of Artificial Sequence: Synthetic oligonucleotide
accgaucucuccugccgac

SEQ ID NO: 731092 - RNA, 19 nt, Artificial Sequence
  Description of Artificial Sequence: Synthetic oligonucleotide
ggggcuaccgccccuagag

SEQ ID NO: 731093 - RNA, 19 nt, Artificial Sequence
  Description of Artificial Sequence: Synthetic oligonucleotide
gccgcauugaacuuuggca

SEQ ID NO: 731094 - RNA, 19 nt, Artificial Sequence
  Description of Artificial Sequence: Synthetic oligonucleotide
gggauaugaguguccagcc

SEQ ID NO: 731095 - RNA, 19 nt, Artificial Sequence
  Description of Artificial Sequence: Synthetic oligonucleotide
ggaacgugcauggacaaac

SEQ ID NO: 731096 - RNA, 19 nt, Artificial Sequence
  Description of Artificial Sequence: Synthetic oligonucleotide
uugugagcgcggcugugca

SEQ ID NO: 731097 - RNA, 19 nt, Artificial Sequence
  Description of Artificial Sequence: Synthetic oligonucleotide
agaccaggcugcgagcacg

SEQ ID NO: 731098 - RNA, 19 nt, Artificial Sequence
  Description of Artificial Sequence: Synthetic oligonucleotide
cacggaaggaugaggagga

SEQ ID NO: 731099 - RNA, 19 nt, Artificial Sequence
  Description of Artificial Sequence: Synthetic oligonucleotide
acccauagcgagaguacac

SEQ ID NO: 731100 - RNA, 19 nt, Artificial Sequence
  Description of Artificial Sequence: Synthetic oligonucleotide
ucuguucccugugucaguc

SEQ ID NO: 731101 - RNA, 19 nt, Artificial Sequence
  Description of Artificial Sequence: Synthetic oligonucleotide
ugcaggaauugguccuugc

SEQ ID NO: 731102 - RNA, 19 nt, Artificial Sequence
  Description of Artificial Sequence: Synthetic oligonucleotide
gucguaguucugcuucugc

SEQ ID NO: 731103 - RNA, 19 nt, Artificial Sequence
  Description of Artificial Sequence: Synthetic oligonucleotide
ucgcccucacggaaggaug

SEQ ID NO: 731104 - RNA, 19 nt, Artificial Sequence
  Description of Artificial Sequence: Synthetic oligonucleotide
aggcguuccuggaagcggc

SEQ ID NO: 731105 - RNA, 19 nt, Artificial Sequence
  Description of Artificial Sequence: Synthetic oligonucleotide
aguugggugcuuagcucgc

SEQ ID NO: 731106 - RNA, 19 nt, Artificial Sequence
  Description of Artificial Sequence: Synthetic oligonucleotide
ugcgcgccaguuagaaggc

SEQ ID NO: 731107 - RNA, 19 nt, Artificial Sequence
  Description of Artificial Sequence: Synthetic oligonucleotide
guuagaaggcucaggaucu

SEQ ID NO: 731108 - RNA, 19 nt, Artificial Sequence
  Description of Artificial Sequence: Synthetic oligonucleotide
uccuugcggcgcacuagcg

SEQ ID NO: 731109 - RNA, 19 nt, Artificial Sequence
  Description of Artificial Sequence: Synthetic oligonucleotide
cagcuuauggauggcacug

SEQ ID NO: 731110 - RNA, 19 nt, Artificial Sequence
  Description of Artificial Sequence: Synthetic oligonucleotide
gacccuuaaccggccaccg

SEQ ID NO: 731111 - RNA, 19 nt, Artificial Sequence
  Description of Artificial Sequence: Synthetic oligonucleotide
ccgugauucgcuccgagcc

SEQ ID NO: 731112 - RNA, 19 nt, Artificial Sequence
  Description of Artificial Sequence: Synthetic oligonucleotide
uaccgagggugccagucac

SEQ ID NO: 731113 - RNA, 19 nt, Artificial Sequence
  Description of Artificial Sequence: Synthetic oligonucleotide
agcggaggaaccgaucucu

SEQ ID NO: 731114 - RNA, 19 nt, Artificial Sequence
  Description of Artificial Sequence: Synthetic oligonucleotide
acacgggcuucccugccuc

SEQ ID NO: 731115 - RNA, 19 nt, Artificial Sequence
  Description of Artificial Sequence: Synthetic oligonucleotide
uggggucucgagccauuag

SEQ ID NO: 731116 - RNA, 19 nt, Artificial Sequence
  Description of Artificial Sequence: Synthetic oligonucleotide
ggggucucgagccauuagc

SEQ ID NO: 731117 - RNA, 19 nt, Artificial Sequence
  Description of Artificial Sequence: Synthetic oligonucleotide
cucaccgugucccgcacug

SEQ ID NO: 731118 - RNA, 19 nt, Artificial Sequence
  Description of Artificial Sequence: Synthetic oligonucleotide
ugcaacuucguggggcuac

SEQ ID NO: 731119 - RNA, 19 nt, Artificial Sequence
  Description of Artificial Sequence: Synthetic oligonucleotide
caccggcgcaggaagacag

SEQ ID NO: 731120 - RNA, 19 nt, Artificial Sequence
  Description of Artificial Sequence: Synthetic oligonucleotide
cauccccuucaguugugcc

SEQ ID NO: 731121 - RNA, 19 nt, Artificial Sequence
  Description of Artificial Sequence: Synthetic oligonucleotide
aacugcgcgccaguuagaa

SEQ ID NO: 731122 - RNA, 19 nt, Artificial Sequence
  Description of Artificial Sequence: Synthetic oligonucleotide
acacgaccuaccgagggug

SEQ ID NO: 731123 - RNA, 19 nt, Artificial Sequence
  Description of Artificial Sequence: Synthetic oligonucleotide
uaaggcgugcgcagcgccu

SEQ ID NO: 731124 - RNA, 19 nt, Artificial Sequence
  Description of Artificial Sequence: Synthetic oligonucleotide
guaguaaggcgugcgcagc

SEQ ID NO: 731125 - RNA, 19 nt, Artificial Sequence
  Description of Artificial Sequence: Synthetic oligonucleotide
ucaauaggugaggggugug

SEQ ID NO: 731126 - RNA, 19 nt, Artificial Sequence
  Description of Artificial Sequence: Synthetic oligonucleotide
aagggcaggcaccgcgcug

SEQ ID NO: 731127 - RNA, 19 nt, Artificial Sequence
  Description of Artificial Sequence: Synthetic oligonucleotide
acgaccuaccgagggugcc

SEQ ID NO: 731128 - RNA, 19 nt, Artificial Sequence
  Description of Artificial Sequence: Synthetic oligonucleotide
agaguacacgggcuucccu

SEQ ID NO: 731129 - RNA, 19 nt, Artificial Sequence
  Description of Artificial Sequence: Synthetic oligonucleotide
gaggaacuaaugagguuga

SEQ ID NO: 731130 - RNA, 19 nt, Artificial Sequence
  Description of Artificial Sequence: Synthetic oligonucleotide
augggaugcaggaauuggu

SEQ ID NO: 731131 - RNA, 19 nt, Artificial Sequence
  Description of Artificial Sequence: Synthetic oligonucleotide
ccugccgacccuuaaccgg

SEQ ID NO: 731132 - RNA, 19 nt, Artificial Sequence
  Description of Artificial Sequence: Synthetic oligonucleotide
uccggcgcacgaauacuac

SEQ ID NO: 731133 - RNA, 19 nt, Artificial Sequence
  Description of Artificial Sequence: Synthetic oligonucleotide
ccuuguagccaucugcaug

SEQ ID NO: 731134 - RNA, 19 nt, Artificial Sequence
  Description of Artificial Sequence: Synthetic oligonucleotide
ugugcccucuugagagggc

SEQ ID NO: 731135 - RNA, 19 nt, Artificial Sequence
  Description of Artificial Sequence: Synthetic oligonucleotide
uucguggggcuaccgcccc

SEQ ID NO: 731136 - RNA, 19 nt, Artificial Sequence
  Description of Artificial Sequence: Synthetic oligonucleotide
gguugaaaagcaggugcag

SEQ ID NO: 731137 - RNA, 19 nt, Artificial Sequence
  Description of Artificial Sequence: Synthetic oligonucleotide
caccgugucccgcacugcc

SEQ ID NO: 731138 - RNA, 19 nt, Artificial Sequence
  Description of Artificial Sequence: Synthetic oligonucleotide
acccuuaaccggccaccgg

SEQ ID NO: 731139 - RNA, 19 nt, Artificial Sequence
  Description of Artificial Sequence: Synthetic oligonucleotide
guggaggcgccaugccucg

SEQ ID NO: 731140 - RNA, 19 nt, Artificial Sequence
  Description of Artificial Sequence: Synthetic oligonucleotide
acugcgcgccaguuagaag

SEQ ID NO: 731141 - RNA, 19 nt, Artificial Sequence
  Description of Artificial Sequence: Synthetic oligonucleotide
auaugaguguccagccgug

SEQ ID NO: 731142 - RNA, 19 nt, Artificial Sequence
  Description of Artificial Sequence: Synthetic oligonucleotide
aaguggcgaaggucaggga

SEQ ID NO: 731143 - RNA, 19 nt, Artificial Sequence
  Description of Artificial Sequence: Synthetic oligonucleotide
ugggcgcgaggcauuguga

SEQ ID NO: 731144 - RNA, 19 nt, Artificial Sequence
  Description of Artificial Sequence: Synthetic oligonucleotide
gaagccggccgcauugaac

SEQ ID NO: 731145 - RNA, 19 nt, Artificial Sequence
  Description of Artificial Sequence: Synthetic oligonucleotide
gcguggaagaagccggccg

SEQ ID NO: 731146 - RNA, 19 nt, Artificial Sequence
  Description of Artificial Sequence: Synthetic oligonucleotide
gcgcccaucaggaaacugg

SEQ ID NO: 731147 - RNA, 19 nt, Artificial Sequence
  Description of Artificial Sequence: Synthetic oligonucleotide
cuuagcucgcugaaguccu

SEQ ID NO: 731148 - RNA, 19 nt, Artificial Sequence
  Description of Artificial Sequence: Synthetic oligonucleotide
gugccaucggggcauucgc

SEQ ID NO: 731149 - RNA, 19 nt, Artificial Sequence
  Description of Artificial Sequence: Synthetic oligonucleotide
ggcaacgcuguaguaaggc

SEQ ID NO: 731150 - RNA, 19 nt, Artificial Sequence
  Description of Artificial Sequence: Synthetic oligonucleotide
gugggcgcgaggcauugug

SEQ ID NO: 731151 - RNA, 19 nt, Artificial Sequence
  Description of Artificial Sequence: Synthetic oligonucleotide
gacccauagcgagaguaca

SEQ ID NO: 731152 - RNA, 19 nt, Artificial Sequence
  Description of Artificial Sequence: Synthetic oligonucleotide
gucgaugggaugcaggaau

SEQ ID NO: 731153 - RNA, 19 nt, Artificial Sequence
  Description of Artificial Sequence: Synthetic oligonucleotide
ugccaucggggcauucgcu

SEQ ID NO: 731154 - RNA, 19 nt, Artificial Sequence
  Description of Artificial Sequence: Synthetic oligonucleotide
ggucuucauaggaacgugc

SEQ ID NO: 731155 - RNA, 19 nt, Artificial Sequence
  Description of Artificial Sequence: Synthetic oligonucleotide
ugauucgcuccgagccuga

SEQ ID NO: 731156 - RNA, 19 nt, Artificial Sequence
  Description of Artificial Sequence: Synthetic oligonucleotide
ucauaggaacgugcaugga

SEQ ID NO: 731157 - RNA, 19 nt, Artificial Sequence
  Description of Artificial Sequence: Synthetic oligonucleotide
cccuuaaccggccaccggc

SEQ ID NO: 731158 - RNA, 19 nt, Artificial Sequence
  Description of Artificial Sequence: Synthetic oligonucleotide
gaccgcaaagaaguccuca

SEQ ID NO: 731159 - RNA, 19 nt, Artificial Sequence
  Description of Artificial Sequence: Synthetic oligonucleotide
aaggucggugucagguucu

SEQ ID NO: 731160 - RNA, 19 nt, Artificial Sequence
  Description of Artificial Sequence: Synthetic oligonucleotide
caacgcuguaguaaggcgu

SEQ ID NO: 731161 - RNA, 19 nt, Artificial Sequence
  Description of Artificial Sequence: Synthetic oligonucleotide
uggcacucaccgugucccg

SEQ ID NO: 731162 - RNA, 19 nt, Artificial Sequence
  Description of Artificial Sequence: Synthetic oligonucleotide
auucgcuccgagccugaga

SEQ ID NO: 731163 - RNA, 19 nt, Artificial Sequence
  Description of Artificial Sequence: Synthetic oligonucleotide
gugauucgcuccgagccug

SEQ ID NO: 731164 - RNA, 19 nt, Artificial Sequence
  Description of Artificial Sequence: Synthetic oligonucleotide
ugggccgacugccgugugc

SEQ ID NO: 731165 - RNA, 19 nt, Artificial Sequence
  Description of Artificial Sequence: Synthetic oligonucleotide
ggucucgagccauuagcug

SEQ ID NO: 731166 - RNA, 19 nt, Artificial Sequence
  Description of Artificial Sequence: Synthetic oligonucleotide
acgcccagugugccuuccc

SEQ ID NO: 731167 - RNA, 19 nt, Artificial Sequence
  Description of Artificial Sequence: Synthetic oligonucleotide
gucuugagugggcgcgagg

SEQ ID NO: 731168 - RNA, 19 nt, Artificial Sequence
  Description of Artificial Sequence: Synthetic oligonucleotide
uagcacauguagagcucaa

SEQ ID NO: 731169 - RNA, 19 nt, Artificial Sequence
  Description of Artificial Sequence: Synthetic oligonucleotide
aagaagccggccgcauuga

SEQ ID NO: 731170 - RNA, 19 nt, Artificial Sequence
  Description of Artificial Sequence: Synthetic oligonucleotide
cacgaccuaccgagggugc

SEQ ID NO: 731171 - RNA, 19 nt, Artificial Sequence
  Description of Artificial Sequence: Synthetic oligonucleotide
augcccacuugggcaacgc

SEQ ID NO: 731172 - RNA, 19 nt, Artificial Sequence
  Description of Artificial Sequence: Synthetic oligonucleotide
gccuguauaguagaugguc

SEQ ID NO: 731173 - RNA, 19 nt, Artificial Sequence
  Description of Artificial Sequence: Synthetic oligonucleotide
gcuucccacgcccagugug

SEQ ID NO: 731174 - RNA, 19 nt, Artificial Sequence
  Description of Artificial Sequence: Synthetic oligonucleotide
gaacgugcauggacaaaca

SEQ ID NO: 731175 - RNA, 19 nt, Artificial Sequence
  Description of Artificial Sequence: Synthetic oligonucleotide
ccggucuuccucuuuucgg

SEQ ID NO: 731176 - RNA, 19 nt, Artificial Sequence
  Description of Artificial Sequence: Synthetic oligonucleotide
ugguguacggggccucaau

SEQ ID NO: 731177 - RNA, 19 nt, Artificial Sequence
  Description of Artificial Sequence: Synthetic oligonucleotide
cacuucccucaauagguga

SEQ ID NO: 731178 - RNA, 19 nt, Artificial Sequence
  Description of Artificial Sequence: Synthetic oligonucleotide
cauuggggccuguauagua

SEQ ID NO: 731179 - RNA, 19 nt, Artificial Sequence
  Description of Artificial Sequence: Synthetic oligonucleotide
ggcuccccgcuuucgaagg

SEQ ID NO: 731180 - RNA, 19 nt, Artificial Sequence
  Description of Artificial Sequence: Synthetic oligonucleotide
ggccgcauugaacuuuggc

SEQ ID NO: 731181 - RNA, 19 nt, Artificial Sequence
  Description of Artificial Sequence: Synthetic oligonucleotide
gaccuaccgagggugccag

SEQ ID NO: 731182 - RNA, 19 nt, Artificial Sequence
  Description of Artificial Sequence: Synthetic oligonucleotide
gguuauccgugauucgcuc

SEQ ID NO: 731183 - RNA, 19 nt, Artificial Sequence
  Description of Artificial Sequence: Synthetic oligonucleotide
cagcucucucaacaccuug

SEQ ID NO: 731184 - RNA, 19 nt, Artificial Sequence
  Description of Artificial Sequence: Synthetic oligonucleotide
ugcccacuugggcaacgcu

SEQ ID NO: 731185 - RNA, 19 nt, Artificial Sequence
  Description of Artificial Sequence: Synthetic oligonucleotide
ggaaccgaucucuccugcc

SEQ ID NO: 731186 - RNA, 19 nt, Artificial Sequence
  Description of Artificial Sequence: Synthetic oligonucleotide
gcgaaggucagggaugccc

SEQ ID NO: 731187 - RNA, 19 nt, Artificial Sequence
  Description of Artificial Sequence: Synthetic oligonucleotide
uccaucgcaucagcuuaug

SEQ ID NO: 731188 - RNA, 19 nt, Artificial Sequence
  Description of Artificial Sequence: Synthetic oligonucleotide
ugccgugugcgggccaccg

SEQ ID NO: 731189 - RNA, 19 nt, Artificial Sequence
  Description of Artificial Sequence: Synthetic oligonucleotide
ggaacacacgaccuaccga

SEQ ID NO: 731190 - RNA, 19 nt, Artificial Sequence
  Description of Artificial Sequence: Synthetic oligonucleotide
cgggauaugaguguccagc

SEQ ID NO: 731191 - RNA, 19 nt, Artificial Sequence
  Description of Artificial Sequence: Synthetic oligonucleotide
gccggucuuccucuuuucg

SEQ ID NO: 731192 - RNA, 19 nt, Artificial Sequence
  Description of Artificial Sequence: Synthetic oligonucleotide
gguguacggggccucaauc

SEQ ID NO: 731193 - RNA, 19 nt, Artificial Sequence
  Description of Artificial Sequence: Synthetic oligonucleotide
ggugaagaguccugagcuc

SEQ ID NO: 731194 - RNA, 19 nt, Artificial Sequence
  Description of Artificial Sequence: Synthetic oligonucleotide
guucuagguaagagaugug

SEQ ID NO: 731195 - RNA, 19 nt, Artificial Sequence
  Description of Artificial Sequence: Synthetic oligonucleotide
guguacggggccucaaucu

SEQ ID NO: 731196 - RNA, 19 nt, Artificial Sequence
  Description of Artificial Sequence: Synthetic oligonucleotide
cuccccgcuuucgaaggcg

SEQ ID NO: 731197 - RNA, 19 nt, Artificial Sequence
  Description of Artificial Sequence: Synthetic oligonucleotide
ccgcaaagaaguccucacg

SEQ ID NO: 731198 - RNA, 19 nt, Artificial Sequence
  Description of Artificial Sequence: Synthetic oligonucleotide
gggcgcgaggcauugugag

SEQ ID NO: 731199 - RNA, 19 nt, Artificial Sequence
  Description of Artificial Sequence: Synthetic oligonucleotide
uggcucaacugcgcgccag

SEQ ID NO: 731200 - RNA, 19 nt, Artificial Sequence
  Description of Artificial Sequence: Synthetic oligonucleotide
aggcgccaugccucgguag

SEQ ID NO: 731201 - RNA, 19 nt, Artificial Sequence
  Description of Artificial Sequence: Synthetic oligonucleotide
ggaggaaccgaucucuccu

SEQ ID NO: 731202 - RNA, 19 nt, Artificial Sequence
  Description of Artificial Sequence: Synthetic oligonucleotide
ggcuaccgccccuagagga

SEQ ID NO: 731203 - RNA, 19 nt, Artificial Sequence
  Description of Artificial Sequence: Synthetic oligonucleotide
gccaucggggcauucgcug

SEQ ID NO: 731204 - RNA, 19 nt, Artificial Sequence
  Description of Artificial Sequence: Synthetic oligonucleotide
gauucgcuccgagccugag

SEQ ID NO: 731205 - RNA, 19 nt, Artificial Sequence
  Description of Artificial Sequence: Synthetic oligonucleotide
ucgguagcguccuccucau

SEQ ID NO: 731206 - RNA, 19 nt, Artificial Sequence
  Description of Artificial Sequence: Synthetic oligonucleotide
aaggcgccgcaggucguag

SEQ ID NO: 731207 - RNA, 19 nt, Artificial Sequence
  Description of Artificial Sequence: Synthetic oligonucleotide
ccucacggaaggaugagga

SEQ ID NO: 731208 - RNA, 19 nt, Artificial Sequence
  Description of Artificial Sequence: Synthetic oligonucleotide
gagcacgugccugcugcag

SEQ ID NO: 731209 - RNA, 19 nt, Artificial Sequence
  Description of Artificial Sequence: Synthetic oligonucleotide
uggggcuaccgccccuaga

SEQ ID NO: 731210 - RNA, 19 nt, Artificial Sequence
  Description of Artificial Sequence: Synthetic oligonucleotide
caauaggugagggguguga

SEQ ID NO: 731211 - RNA, 19 nt, Artificial Sequence
  Description of Artificial Sequence: Synthetic oligonucleotide
uugcggcgcacuagcgcca

SEQ ID NO: 731212 - RNA, 19 nt, Artificial Sequence
  Description of Artificial Sequence: Synthetic oligonucleotide
ugccgacccuuaaccggcc

SEQ ID NO: 731213 - RNA, 19 nt, Artificial Sequence
  Description of Artificial Sequence: Synthetic oligonucleotide
cacagcggaggaaccgauc

SEQ ID NO: 731214 - RNA, 19 nt, Artificial Sequence
  Description of Artificial Sequence: Synthetic oligonucleotide
uucccacgcccagugugcc

SEQ ID NO: 731215 - RNA, 19 nt, Artificial Sequence
  Description of Artificial Sequence: Synthetic oligonucleotide
gcgcacgaauacuaccuug

SEQ ID NO: 731216 - RNA, 19 nt, Artificial Sequence
  Description of Artificial Sequence: Synthetic oligonucleotide
gugagcgcggcugugcaga

SEQ ID NO: 731217 - RNA, 19 nt, Artificial Sequence
  Description of Artificial Sequence: Synthetic oligonucleotide
accgugucccgcacugccg

SEQ ID NO: 731218 - RNA, 19 nt, Artificial Sequence
  Description of Artificial Sequence: Synthetic oligonucleotide
ccaucgcaucagcuuaugg

SEQ ID NO: 731219 - RNA, 19 nt, Artificial Sequence
  Description of Artificial Sequence: Synthetic oligonucleotide
agcacauguagagcucaaa

SEQ ID NO: 731220 - RNA, 19 nt, Artificial Sequence
  Description of Artificial Sequence: Synthetic oligonucleotide
caacuucguggggcuaccg

SEQ ID NO: 731221 - RNA, 19 nt, Artificial Sequence
  Description of Artificial Sequence: Synthetic oligonucleotide
agaagccggccgcauugaa

SEQ ID NO: 731222 - RNA, 19 nt, Artificial Sequence
  Description of Artificial Sequence: Synthetic oligonucleotide
cuguauaguagauggucuu

SEQ ID NO: 731223 - RNA, 19 nt, Artificial Sequence
  Description of Artificial Sequence: Synthetic oligonucleotide
cuaccgagggugccaguca

SEQ ID NO: 731224 - RNA, 19 nt, Artificial Sequence
  Description of Artificial Sequence: Synthetic oligonucleotide
gcacgugccugcugcaggc

SEQ ID NO: 731225 - RNA, 19 nt, Artificial Sequence
  Description of Artificial Sequence: Synthetic oligonucleotide
cuuuucggauccaucgcau

SEQ ID NO: 731226 - RNA, 19 nt, Artificial Sequence
  Description of Artificial Sequence: Synthetic oligonucleotide
ccaucggaaggagccaacg

SEQ ID NO: 731227 - RNA, 19 nt, Artificial Sequence
  Description of Artificial Sequence: Synthetic oligonucleotide
guacggggccucaaucuca

SEQ ID NO: 731228 - RNA, 19 nt, Artificial Sequence
  Description of Artificial Sequence: Synthetic oligonucleotide
acucaccgugucccgcacu

SEQ ID NO: 731229 - RNA, 19 nt, Artificial Sequence
  Description of Artificial Sequence: Synthetic oligonucleotide
gugcauggacaaacauggc

SEQ ID NO: 731230 - RNA, 19 nt, Artificial Sequence
  Description of Artificial Sequence: Synthetic oligonucleotide
ccaucggggcauucgcugc

SEQ ID NO: 731231 - RNA, 19 nt, Artificial Sequence
  Description of Artificial Sequence: Synthetic oligonucleotide
ccgagccugagagaaggcg

SEQ ID NO: 731232 - RNA, 19 nt, Artificial Sequence
  Description of Artificial Sequence: Synthetic oligonucleotide
uccucacggucgguggaga

SEQ ID NO: 731233 - RNA, 19 nt, Artificial Sequence
  Description of Artificial Sequence: Synthetic oligonucleotide
ggccaagugggcuccccgc

SEQ ID NO: 731234 - RNA, 19 nt, Artificial Sequence
  Description of Artificial Sequence: Synthetic oligonucleotide
ccuguauaguagauggucu

SEQ ID NO: 731235 - RNA, 19 nt, Artificial Sequence
  Description of Artificial Sequence: Synthetic oligonucleotide
ggcgcgaggcauugugagc

SEQ ID NO: 731236 - RNA, 19 nt, Artificial Sequence
  Description of Artificial Sequence: Synthetic oligonucleotide
gggcuccccgcuuucgaag

SEQ ID NO: 731237 - RNA, 19 nt, Artificial Sequence
  Description of Artificial Sequence: Synthetic oligonucleotide
ggcuccggcgcacgaauac

SEQ ID NO: 731238 - RNA, 19 nt, Artificial Sequence
  Description of Artificial Sequence: Synthetic oligonucleotide
ggaaggagccaacgugcca

SEQ ID NO: 731239 - RNA, 19 nt, Artificial Sequence
  Description of Artificial Sequence: Synthetic oligonucleotide
ccgcaccuggcucuguucc

SEQ ID NO: 731240 - RNA, 19 nt, Artificial Sequence
  Description of Artificial Sequence: Synthetic oligonucleotide
gggcuaccgccccuagagg

SEQ ID NO: 731241 - RNA, 19 nt, Artificial Sequence
  Description of Artificial Sequence: Synthetic oligonucleotide
cucaacugcgcgccaguua

SEQ ID NO: 731242 - RNA, 19 nt, Artificial Sequence
  Description of Artificial Sequence: Synthetic oligonucleotide
caggaaacuggggucucga

SEQ ID NO: 731243 - RNA, 19 nt, Artificial Sequence
  Description of Artificial Sequence: Synthetic oligonucleotide
ggauccaucgcaucagcuu

SEQ ID NO: 731244 - RNA, 19 nt, Artificial Sequence
  Description of Artificial Sequence: Synthetic oligonucleotide
aggaacuaaugagguugaa

SEQ ID NO: 731245 - RNA, 19 nt, Artificial Sequence
  Description of Artificial Sequence: Synthetic oligonucleotide
cgaucucuccugccgaccc

SEQ ID NO: 731246 - RNA, 19 nt, Artificial Sequence
  Description of Artificial Sequence: Synthetic oligonucleotide
ggcgggauaugagugucca

SEQ ID NO: 731247 - RNA, 19 nt, Artificial Sequence
  Description of Artificial Sequence: Synthetic oligonucleotide
ugagcgcggcugugcagau

SEQ ID NO: 731248 - RNA, 19 nt, Artificial Sequence
  Description of Artificial Sequence: Synthetic oligonucleotide
caucggaaggagccaacgu

SEQ ID NO: 731249 - RNA, 19 nt, Artificial Sequence
  Description of Artificial Sequence: Synthetic oligonucleotide
ucgcuccgagccugagaga

SEQ ID NO: 731250 - RNA, 19 nt, Artificial Sequence
  Description of Artificial Sequence: Synthetic oligonucleotide
aggaacgugcauggacaaa

SEQ ID NO: 731251 - RNA, 19 nt, Artificial Sequence
  Description of Artificial Sequence: Synthetic oligonucleotide
cacucaccgugucccgcac

SEQ ID NO: 731252 - RNA, 19 nt, Artificial Sequence
  Description of Artificial Sequence: Synthetic oligonucleotide
cuccggcgcacgaauacua

SEQ ID NO: 731253 - RNA, 19 nt, Artificial Sequence
  Description of Artificial Sequence: Synthetic oligonucleotide
auagugcuggaaagugcuu

SEQ ID NO: 731254 - RNA, 19 nt, Artificial Sequence
  Description of Artificial Sequence: Synthetic oligonucleotide
ucguggggcuaccgccccu

SEQ ID NO: 731255 - RNA, 19 nt, Artificial Sequence
  Description of Artificial Sequence: Synthetic oligonucleotide
ccgacugccgugugcgggc

SEQ ID NO: 731256 - RNA, 19 nt, Artificial Sequence
  Description of Artificial Sequence: Synthetic oligonucleotide
auccaucgcaucagcuuau

SEQ ID NO: 731257 - RNA, 19 nt, Artificial Sequence
  Description of Artificial Sequence: Synthetic oligonucleotide
cuugggcaacgcuguagua

SEQ ID NO: 731258 - RNA, 19 nt, Artificial Sequence
  Description of Artificial Sequence: Synthetic oligonucleotide
cgccccuagaggauacagg

SEQ ID NO: 731259 - RNA, 19 nt, Artificial Sequence
  Description of Artificial Sequence: Synthetic oligonucleotide
gcgggauaugaguguccag

SEQ ID NO: 731260 - RNA, 19 nt, Artificial Sequence
  Description of Artificial Sequence: Synthetic oligonucleotide
ccgcuuucgaaggcguucc

SEQ ID NO: 731261 - RNA, 19 nt, Artificial Sequence
  Description of Artificial Sequence: Synthetic oligonucleotide
ggaaaagaccaggcugcga

SEQ ID NO: 731262 - RNA, 19 nt, Artificial Sequence
  Description of Artificial Sequence: Synthetic oligonucleotide
ccuaccgagggugccaguc

SEQ ID NO: 731263 - RNA, 19 nt, Artificial Sequence
  Description of Artificial Sequence: Synthetic oligonucleotide
gggcaacgcuguaguaagg

SEQ ID NO: 731264 - RNA, 19 nt, Artificial Sequence
  Description of Artificial Sequence: Synthetic oligonucleotide
cacggucgguggagacuag

SEQ ID NO: 731265 - RNA, 19 nt, Artificial Sequence
  Description of Artificial Sequence: Synthetic oligonucleotide
gugugcgggccaccgccac

SEQ ID NO: 731266 - RNA, 19 nt, Artificial Sequence
  Description of Artificial Sequence: Synthetic oligonucleotide
cccucaauaggugaggggu

SEQ ID NO: 731267 - RNA, 19 nt, Artificial Sequence
  Description of Artificial Sequence: Synthetic oligonucleotide
cgugccaucggggcauucg

SEQ ID NO: 731268 - RNA, 19 nt, Artificial Sequence
  Description of Artificial Sequence: Synthetic oligonucleotide
ugcggcgcacuagcgccac

SEQ ID NO: 731269 - RNA, 19 nt, Artificial Sequence
  Description of Artificial Sequence: Synthetic oligonucleotide
gugucccgcacugccgcug

SEQ ID NO: 731270 - RNA, 19 nt, Artificial Sequence
  Description of Artificial Sequence: Synthetic oligonucleotide
gcaacuucguggggcuacc

SEQ ID NO: 731271 - RNA, 19 nt, Artificial Sequence
  Description of Artificial Sequence: Synthetic oligonucleotide
ccggccgcauugaacuuug

SEQ ID NO: 731272 - RNA, 19 nt, Artificial Sequence
  Description of Artificial Sequence: Synthetic oligonucleotide
cacacgaccuaccgagggu

SEQ ID NO: 731273 - RNA, 19 nt, Artificial Sequence
  Description of Artificial Sequence: Synthetic oligonucleotide
caaaggucggugucagguu

SEQ ID NO: 731274 - RNA, 19 nt, Artificial Sequence
  Description of Artificial Sequence: Synthetic oligonucleotide
ggcguuccuggaagcggcg

SEQ ID NO: 731275 - RNA, 19 nt, Artificial Sequence
  Description of Artificial Sequence: Synthetic oligonucleotide
cgagaguacacgggcuucc

SEQ ID NO: 731276 - RNA, 19 nt, Artificial Sequence
  Description of Artificial Sequence: Synthetic oligonucleotide
gggcuguagcacauguaga

SEQ ID NO: 731277 - RNA, 19 nt, Artificial Sequence
  Description of Artificial Sequence: Synthetic oligonucleotide
gugugccuucccacuuccc

SEQ ID NO: 731278 - RNA, 19 nt, Artificial Sequence
  Description of Artificial Sequence: Synthetic oligonucleotide
gcacgaauacuaccuugua

SEQ ID NO: 731279 - RNA, 19 nt, Artificial Sequence
  Description of Artificial Sequence: Synthetic oligonucleotide
caacugcgcgccaguuaga

SEQ ID NO: 731280 - RNA, 19 nt, Artificial Sequence
  Description of Artificial Sequence: Synthetic oligonucleotide
gggucucgagccauuagcu

SEQ ID NO: 731281 - RNA, 19 nt, Artificial Sequence
  Description of Artificial Sequence: Synthetic oligonucleotide
caugccucgguagcguccu

SEQ ID NO: 731282 - RNA, 19 nt, Artificial Sequence
  Description of Artificial Sequence: Synthetic oligonucleotide
ccucagacccauagcgaga

SEQ ID NO: 731283 - RNA, 19 nt, Artificial Sequence
  Description of Artificial Sequence: Synthetic oligonucleotide
ggucggugucagguucuag

SEQ ID NO: 731284 - RNA, 19 nt, Artificial Sequence
  Description of Artificial Sequence: Synthetic oligonucleotide
gaaggcgccgcaggucgua

SEQ ID NO: 731285 - RNA, 19 nt, Artificial Sequence
  Description of Artificial Sequence: Synthetic oligonucleotide
aggcugcgagcacgugccu

SEQ ID NO: 731286 - RNA, 19 nt, Artificial Sequence
  Description of Artificial Sequence: Synthetic oligonucleotide
ccgacccuuaaccggccac

SEQ ID NO: 731287 - RNA, 19 nt, Artificial Sequence
  Description of Artificial Sequence: Synthetic oligonucleotide
gcuccccgcuuucgaaggc

SEQ ID NO: 731288 - RNA, 19 nt, Artificial Sequence
  Description of Artificial Sequence: Synthetic oligonucleotide
ccaugacacccauagugcu

SEQ ID NO: 731289 - RNA, 19 nt, Artificial Sequence
  Description of Artificial Sequence: Synthetic oligonucleotide
gcgccaguuagaaggcuca

SEQ ID NO: 731290 - RNA, 19 nt, Artificial Sequence
  Description of Artificial Sequence: Synthetic oligonucleotide
uuggaccguccuguuucuu

SEQ ID NO: 731291 - RNA, 19 nt, Artificial Sequence
  Description of Artificial Sequence: Synthetic oligonucleotide
cgcgccaguuagaaggcuc

SEQ ID NO: 731292 - RNA, 19 nt, Artificial Sequence
  Description of Artificial Sequence: Synthetic oligonucleotide
cccgcuuucgaaggcguuc

SEQ ID NO: 731293 - RNA, 19 nt, Artificial Sequence
  Description of Artificial Sequence: Synthetic oligonucleotide
agaaggcgccgcaggucgu

SEQ ID NO: 731294 - RNA, 19 nt, Artificial Sequence
  Description of Artificial Sequence: Synthetic oligonucleotide
cgcgcugcgcccaucagga

SEQ ID NO: 731295 - RNA, 19 nt, Artificial Sequence
  Description of Artificial Sequence: Synthetic oligonucleotide
cgacccuuaaccggccacc

SEQ ID NO: 731296 - RNA, 19 nt, Artificial Sequence
  Description of Artificial Sequence: Synthetic oligonucleotide
ggccgacugccgugugcgg

SEQ ID NO: 731297 - RNA, 19 nt, Artificial Sequence
  Description of Artificial Sequence: Synthetic oligonucleotide
guggcucaacugcgcgcca

SEQ ID NO: 731298 - RNA, 19 nt, Artificial Sequence
  Description of Artificial Sequence: Synthetic oligonucleotide
caucggggcauucgcugcu

SEQ ID NO: 731299 - RNA, 19 nt, Artificial Sequence
  Description of Artificial Sequence: Synthetic oligonucleotide
acgugccaucggggcauuc

SEQ ID NO: 731300 - RNA, 19 nt, Artificial Sequence
  Description of Artificial Sequence: Synthetic oligonucleotide
gcgagaguacacgggcuuc

SEQ ID NO: 731301 - RNA, 19 nt, Artificial Sequence
  Description of Artificial Sequence: Synthetic oligonucleotide
agccggccgcauugaacuu

SEQ ID NO: 731302 - RNA, 19 nt, Artificial Sequence
  Description of Artificial Sequence: Synthetic oligonucleotide
ggggcucuagccagucuuc

SEQ ID NO: 731303 - RNA, 19 nt, Artificial Sequence
  Description of Artificial Sequence: Synthetic oligonucleotide
cucacggucgguggagacu

SEQ ID NO: 731304 - RNA, 19 nt, Artificial Sequence
  Description of Artificial Sequence: Synthetic oligonucleotide
gccaugccucgguagcguc

SEQ ID NO: 731305 - RNA, 19 nt, Artificial Sequence
  Description of Artificial Sequence: Synthetic oligonucleotide
accggccaccggcgcagga

SEQ ID NO: 731306 - RNA, 19 nt, Artificial Sequence
  Description of Artificial Sequence: Synthetic oligonucleotide
caacgugccaucggggcau

SEQ ID NO: 731307 - RNA, 19 nt, Artificial Sequence
  Description of Artificial Sequence: Synthetic oligonucleotide
cuaccgccccuagaggaua

SEQ ID NO: 731308 - RNA, 19 nt, Artificial Sequence
  Description of Artificial Sequence: Synthetic oligonucleotide
cgcacgaauacuaccuugu

SEQ ID NO: 731309 - RNA, 19 nt, Artificial Sequence
  Description of Artificial Sequence: Synthetic oligonucleotide
ccgccccuagaggauacag

SEQ ID NO: 731310 - RNA, 19 nt, Artificial Sequence
  Description of Artificial Sequence: Synthetic oligonucleotide
cgcggcugugcagauacug

SEQ ID NO: 731311 - RNA, 19 nt, Artificial Sequence
  Description of Artificial Sequence: Synthetic oligonucleotide
aucggggcauucgcugcuu

SEQ ID NO: 731312 - RNA, 19 nt, Artificial Sequence
  Description of Artificial Sequence: Synthetic oligonucleotide
guugggugcuuagcucgcu

SEQ ID NO: 731313 - RNA, 19 nt, Artificial Sequence
  Description of Artificial Sequence: Synthetic oligonucleotide
cugggccgacugccgugug

SEQ ID NO: 731314 - RNA, 19 nt, Artificial Sequence
  Description of Artificial Sequence: Synthetic oligonucleotide
aggucggugucagguucua

SEQ ID NO: 731315 - RNA, 19 nt, Artificial Sequence
  Description of Artificial Sequence: Synthetic oligonucleotide
ggccaucggaaggagccaa

SEQ ID NO: 731316 - RNA, 19 nt, Artificial Sequence
  Description of Artificial Sequence: Synthetic oligonucleotide
cugccucacucaguacaaa

SEQ ID NO: 731317 - RNA, 19 nt, Artificial Sequence
  Description of Artificial Sequence: Synthetic oligonucleotide
cagcagguuauccgugauu

SEQ ID NO: 731318 - RNA, 19 nt, Artificial Sequence
  Description of Artificial Sequence: Synthetic oligonucleotide
gccgugugcgggccaccgc

SEQ ID NO: 731319 - RNA, 19 nt, Artificial Sequence
  Description of Artificial Sequence: Synthetic oligonucleotide
cccgcaccuggcucuguuc

SEQ ID NO: 731320 - RNA, 19 nt, Artificial Sequence
  Description of Artificial Sequence: Synthetic oligonucleotide
cgcgaggcauugugagcgc

SEQ ID NO: 731321 - RNA, 19 nt, Artificial Sequence
  Description of Artificial Sequence: Synthetic oligonucleotide
ggcucaacugcgcgccagu

SEQ ID NO: 731322 - RNA, 19 nt, Artificial Sequence
  Description of Artificial Sequence: Synthetic oligonucleotide
cugguguacggggccucaa

SEQ ID NO: 731323 - RNA, 19 nt, Artificial Sequence
  Description of Artificial Sequence: Synthetic oligonucleotide
ggccuguauaguagauggu

SEQ ID NO: 731324 - RNA, 19 nt, Artificial Sequence
  Description of Artificial Sequence: Synthetic oligonucleotide
ggcggcagucagagaccgc

SEQ ID NO: 731325 - RNA, 19 nt, Artificial Sequence
  Description of Artificial Sequence: Synthetic oligonucleotide
ggucacgggccaccccugu

SEQ ID NO: 731326 - RNA, 19 nt, Artificial Sequence
  Description of Artificial Sequence: Synthetic oligonucleotide
gagcgcggcugugcagaua

SEQ ID NO: 731327 - RNA, 19 nt, Artificial Sequence
  Description of Artificial Sequence: Synthetic oligonucleotide
gcuaccgccccuagaggau

SEQ ID NO: 731328 - RNA, 19 nt, Artificial Sequence
  Description of Artificial Sequence: Synthetic oligonucleotide
cgugauucgcuccgagccu

SEQ ID NO: 731329 - RNA, 19 nt, Artificial Sequence
  Description of Artificial Sequence: Synthetic oligonucleotide
cggccgcauugaacuuugg

SEQ ID NO: 731330 - RNA, 19 nt, Artificial Sequence
  Description of Artificial Sequence: Synthetic oligonucleotide
ccaccggcgcaggaagaca

SEQ ID NO: 731331 - RNA, 19 nt, Artificial Sequence
  Description of Artificial Sequence: Synthetic oligonucleotide
gcggcgcacuagcgccacc

SEQ ID NO: 731332 - RNA, 19 nt, Artificial Sequence
  Description of Artificial Sequence: Synthetic oligonucleotide
cggauccaucgcaucagcu

SEQ ID NO: 731333 - RNA, 19 nt, Artificial Sequence
  Description of Artificial Sequence: Synthetic oligonucleotide
cgccgcaggucguaguucu

SEQ ID NO: 731334 - RNA, 19 nt, Artificial Sequence
  Description of Artificial Sequence: Synthetic oligonucleotide
cgugugcgggccaccgcca

SEQ ID NO: 731335 - RNA, 19 nt, Artificial Sequence
  Description of Artificial Sequence: Synthetic oligonucleotide
cacgugccugcugcaggcu

SEQ ID NO: 731336 - RNA, 19 nt, Artificial Sequence
  Description of Artificial Sequence: Synthetic oligonucleotide
cgaccuaccgagggugcca

SEQ ID NO: 731337 - RNA, 19 nt, Artificial Sequence
  Description of Artificial Sequence: Synthetic oligonucleotide
cggcgcacuagcgccacca

SEQ ID NO: 731338 - RNA, 19 nt, Artificial Sequence
  Description of Artificial Sequence: Synthetic oligonucleotide
ccacagcggaggaaccgau

SEQ ID NO: 731339 - RNA, 19 nt, Artificial Sequence
  Description of Artificial Sequence: Synthetic oligonucleotide
gccggccgcauugaacuuu

SEQ ID NO: 731340 - RNA, 19 nt, Artificial Sequence
  Description of Artificial Sequence: Synthetic oligonucleotide
ccggccaccggcgcaggaa

SEQ ID NO: 731341 - RNA, 19 nt, Artificial Sequence
  Description of Artificial Sequence: Synthetic oligonucleotide
gcgcugcgcccaucaggaa

SEQ ID NO: 731342 - RNA, 19 nt, Artificial Sequence
  Description of Artificial Sequence: Synthetic oligonucleotide
ccgugccuggccugaggcu

SEQ ID NO: 731343 - RNA, 19 nt, Artificial Sequence
  Description of Artificial Sequence: Synthetic oligonucleotide
cggggcauucgcugcuucu

SEQ ID NO: 731344 - RNA, 19 nt, Artificial Sequence
  Description of Artificial Sequence: Synthetic oligonucleotide
gcgcgccaguuagaaggcu

SEQ ID NO: 731345 - RNA, 19 nt, Artificial Sequence
  Description of Artificial Sequence: Synthetic oligonucleotide
cgccaugccucgguagcgu

SEQ ID NO: 731346 - RNA, 19 nt, Artificial Sequence
  Description of Artificial Sequence: Synthetic oligonucleotide
ccccgcuuucgaaggcguu

SEQ ID NO: 731347 - RNA, 19 nt, Artificial Sequence
  Description of Artificial Sequence: Synthetic oligonucleotide
gcgcggcugugcagauacu

SEQ ID NO: 731348 - RNA, 19 nt, Artificial Sequence
  Description of Artificial Sequence: Synthetic oligonucleotide
aacaguuugcuauacagcc

SEQ ID NO: 731349 - RNA, 19 nt, Artificial Sequence
  Description of Artificial Sequence: Synthetic oligonucleotide
aaucauauagccugaaagc

SEQ ID NO: 731350 - RNA, 19 nt, Artificial Sequence
  Description of Artificial Sequence: Synthetic oligonucleotide
aaaacuacaagaaggaccc

SEQ ID NO: 731351 - RNA, 19 nt, Artificial Sequence
  Description of Artificial Sequence: Synthetic oligonucleotide
agcaagaauaauuuggucc

SEQ ID NO: 731352 - RNA, 19 nt, Artificial Sequence
  Description of Artificial Sequence: Synthetic oligonucleotide
uuuaaugggacaauaaggc

SEQ ID NO: 731353 - RNA, 19 nt, Artificial Sequence
  Description of Artificial Sequence: Synthetic oligonucleotide
aauacaauuuuaaugggac

SEQ ID NO: 731354 - RNA, 19 nt, Artificial Sequence
  Description of Artificial Sequence: Synthetic oligonucleotide
aauuccguaaaggauaugg

SEQ ID NO: 731355 - RNA, 19 nt, Artificial Sequence
  Description of Artificial Sequence: Synthetic oligonucleotide
uguuuauacaccaaaggca

SEQ ID NO: 731356 - RNA, 19 nt, Artificial Sequence
  Description of Artificial Sequence: Synthetic oligonucleotide
agauaagucaggcacuucc

SEQ ID NO: 731357 - RNA, 19 nt, Artificial Sequence
  Description of Artificial Sequence: Synthetic oligonucleotide
gguacuuacaaauagagac

SEQ ID NO: 731358 - RNA, 19 nt, Artificial Sequence
  Description of Artificial Sequence: Synthetic oligonucleotide
aauacuaggaagcaagaau

SEQ ID NO: 731359 - RNA, 19 nt, Artificial Sequence
  Description of Artificial Sequence: Synthetic oligonucleotide
agauauaaaccaccggacc

SEQ ID NO: 731360 - RNA, 19 nt, Artificial Sequence
  Description of Artificial Sequence: Synthetic oligonucleotide
uuugcuauacagccaaggg

SEQ ID NO: 731361 - RNA, 19 nt, Artificial Sequence
  Description of Artificial Sequence: Synthetic oligonucleotide
aggauuaugaacugacuac

SEQ ID NO: 731362 - RNA, 19 nt, Artificial Sequence
  Description of Artificial Sequence: Synthetic oligonucleotide
uguccuuuagugaagaaac

SEQ ID NO: 731363 - RNA, 19 nt, Artificial Sequence
  Description of Artificial Sequence: Synthetic oligonucleotide
aaaggauauggcacuaucc

SEQ ID NO: 731364 - RNA, 19 nt, Artificial Sequence
  Description of Artificial Sequence: Synthetic oligonucleotide
uuugccacgcauaaaauuc

SEQ ID NO: 731365 - RNA, 19 nt, Artificial Sequence
  Description of Artificial Sequence: Synthetic oligonucleotide
gaggcauaaucuuagaaac

SEQ ID NO: 731366 - RNA, 19 nt, Artificial Sequence
  Description of Artificial Sequence: Synthetic oligonucleotide
cuguacucagaaaagaagc

SEQ ID NO: 731367 - RNA, 19 nt, Artificial Sequence
  Description of Artificial Sequence: Synthetic oligonucleotide
cagauuuacacagacacgg

SEQ ID NO: 731368 - RNA, 19 nt, Artificial Sequence
  Description of Artificial Sequence: Synthetic oligonucleotide
guagauauaaaccaccgga

SEQ ID NO: 731369 - RNA, 19 nt, Artificial Sequence
  Description of Artificial Sequence: Synthetic oligonucleotide
auuaugaacugacuacagg

SEQ ID NO: 731370 - RNA, 19 nt, Artificial Sequence
  Description of Artificial Sequence: Synthetic oligonucleotide
acaauucuuauauuacauc

SEQ ID NO: 731371 - RNA, 19 nt, Artificial Sequence
  Description of Artificial Sequence: Synthetic oligonucleotide
agagcagauuuacacagac

SEQ ID NO: 731372 - RNA, 19 nt, Artificial Sequence
  Description of Artificial Sequence: Synthetic oligonucleotide
ucuauuggugacaaugugu

SEQ ID NO: 731373 - RNA, 19 nt, Artificial Sequence
  Description of Artificial Sequence: Synthetic oligonucleotide
agagcaguaguauucuggg

SEQ ID NO: 731374 - RNA, 19 nt, Artificial Sequence
  Description of Artificial Sequence: Synthetic oligonucleotide
agaugguacuuacaaauag

SEQ ID NO: 731375 - RNA, 19 nt, Artificial Sequence
  Description of Artificial Sequence: Synthetic oligonucleotide
uuuaagacaccaaggacaa

SEQ ID NO: 731376 - RNA, 19 nt, Artificial Sequence
  Description of Artificial Sequence: Synthetic oligonucleotide
ucucaaacagaucaguauc

SEQ ID NO: 731377 - RNA, 19 nt, Artificial Sequence
  Description of Artificial Sequence: Synthetic oligonucleotide
ucacuauccugucacauug

SEQ ID NO: 731378 - RNA, 19 nt, Artificial Sequence
  Description of Artificial Sequence: Synthetic oligonucleotide
aaaccggaugcucauuuuc

SEQ ID NO: 731379 - RNA, 19 nt, Artificial Sequence
  Description of Artificial Sequence: Synthetic oligonucleotide
auguagacuccauccaucc

SEQ ID NO: 731380 - RNA, 19 nt, Artificial Sequence
  Description of Artificial Sequence: Synthetic oligonucleotide
cuuacaaauagagacccgg

SEQ ID NO: 731381 - RNA, 19 nt, Artificial Sequence
  Description of Artificial Sequence: Synthetic oligonucleotide
uccuuuagugaagaaaccg

SEQ ID NO: 731382 - RNA, 19 nt, Artificial Sequence
  Description of Artificial Sequence: Synthetic oligonucleotide
caagagcagauuuacacag

SEQ ID NO: 731383 - RNA, 19 nt, Artificial Sequence
  Description of Artificial Sequence: Synthetic oligonucleotide
gauauaaaccaccggacca

SEQ ID NO: 731384 - RNA, 19 nt, Artificial Sequence
  Description of Artificial Sequence: Synthetic oligonucleotide
uuagguagauauaaaccac

SEQ ID NO: 731385 - RNA, 19 nt, Artificial Sequence
  Description of Artificial Sequence: Synthetic oligonucleotide
auaucucuguucauaagcc

SEQ ID NO: 731386 - RNA, 19 nt, Artificial Sequence
  Description of Artificial Sequence: Synthetic oligonucleotide
uguaaaucaagaagccucu

SEQ ID NO: 731387 - RNA, 19 nt, Artificial Sequence
  Description of Artificial Sequence: Synthetic oligonucleotide
auagccugaaagcaaagug

SEQ ID NO: 731388 - RNA, 19 nt, Artificial Sequence
  Description of Artificial Sequence: Synthetic oligonucleotide
uacucuauuggugacaaug

SEQ ID NO: 731389 - RNA, 19 nt, Artificial Sequence
  Description of Artificial Sequence: Synthetic oligonucleotide
uacacucuacacaaggagc

SEQ ID NO: 731390 - RNA, 19 nt, Artificial Sequence
  Description of Artificial Sequence: Synthetic oligonucleotide
ucuacaagccucaccauga

SEQ ID NO: 731391 - RNA, 19 nt, Artificial Sequence
  Description of Artificial Sequence: Synthetic oligonucleotide
aaucaggggaagaugguac

SEQ ID NO: 731392 - RNA, 19 nt, Artificial Sequence
  Description of Artificial Sequence: Synthetic oligonucleotide
ugaggacuaagauaaguca

SEQ ID NO: 731393 - RNA, 19 nt, Artificial Sequence
  Description of Artificial Sequence: Synthetic oligonucleotide
uccguaaaggauauggcac

SEQ ID NO: 731394 - RNA, 19 nt, Artificial Sequence
  Description of Artificial Sequence: Synthetic oligonucleotide
uagguagauauaaaccacc

SEQ ID NO: 731395 - RNA, 19 nt, Artificial Sequence
  Description of Artificial Sequence: Synthetic oligonucleotide
cuacuaucacuucaguugg

SEQ ID NO: 731396 - RNA, 19 nt, Artificial Sequence
  Description of Artificial Sequence: Synthetic oligonucleotide
uacaaauagagacccggug

SEQ ID NO: 731397 - RNA, 19 nt, Artificial Sequence
  Description of Artificial Sequence: Synthetic oligonucleotide
aaccuuaacaaauuccgua

SEQ ID NO: 731398 - RNA, 19 nt, Artificial Sequence
  Description of Artificial Sequence: Synthetic oligonucleotide
acaagaaggaccccuacca

SEQ ID NO: 731399 - RNA, 19 nt, Artificial Sequence
  Description of Artificial Sequence: Synthetic oligonucleotide
ugucaaaacagcuacucua

SEQ ID NO: 731400 - RNA, 19 nt, Artificial Sequence
  Description of Artificial Sequence: Synthetic oligonucleotide
uuugaucacaaagucagac

SEQ ID NO: 731401 - RNA, 19 nt, Artificial Sequence
  Description of Artificial Sequence: Synthetic oligonucleotide
uugaggacuaagauaaguc

SEQ ID NO: 731402 - RNA, 19 nt, Artificial Sequence
  Description of Artificial Sequence: Synthetic oligonucleotide
uauggcacuauccccgucc

SEQ ID NO: 731403 - RNA, 19 nt, Artificial Sequence
  Description of Artificial Sequence: Synthetic oligonucleotide
uuaaugggacaauaaggca

SEQ ID NO: 731404 - RNA, 19 nt, Artificial Sequence
  Description of Artificial Sequence: Synthetic oligonucleotide
uacugguugcugaaaacag

SEQ ID NO: 731405 - RNA, 19 nt, Artificial Sequence
  Description of Artificial Sequence: Synthetic oligonucleotide
auagagacccggugggugc

SEQ ID NO: 731406 - RNA, 19 nt, Artificial Sequence
  Description of Artificial Sequence: Synthetic oligonucleotide
gagguuuaaaccaagcuga

SEQ ID NO: 731407 - RNA, 19 nt, Artificial Sequence
  Description of Artificial Sequence: Synthetic oligonucleotide
uucauaaagaauuccccaa

SEQ ID NO: 731408 - RNA, 19 nt, Artificial Sequence
  Description of Artificial Sequence: Synthetic oligonucleotide
uuggauagccuuccaaagc

SEQ ID NO: 731409 - RNA, 19 nt, Artificial Sequence
  Description of Artificial Sequence: Synthetic oligonucleotide
uaagaguuguacugguugc

SEQ ID NO: 731410 - RNA, 19 nt, Artificial Sequence
  Description of Artificial Sequence: Synthetic oligonucleotide
ugcagaguaaaugugggca

SEQ ID NO: 731411 - RNA, 19 nt, Artificial Sequence
  Description of Artificial Sequence: Synthetic oligonucleotide
aaaccaccggaccacucac

SEQ ID NO: 731412 - RNA, 19 nt, Artificial Sequence
  Description of Artificial Sequence: Synthetic oligonucleotide
uuccguaaaggauauggca

SEQ ID NO: 731413 - RNA, 19 nt, Artificial Sequence
  Description of Artificial Sequence: Synthetic oligonucleotide
uucuguaacgcccuguuua

SEQ ID NO: 731414 - RNA, 19 nt, Artificial Sequence
  Description of Artificial Sequence: Synthetic oligonucleotide
auucguaguaccuguagca

SEQ ID NO: 731415 - RNA, 19 nt, Artificial Sequence
  Description of Artificial Sequence: Synthetic oligonucleotide
auauaaaccaccggaccac

SEQ ID NO: 731416 - RNA, 19 nt, Artificial Sequence
  Description of Artificial Sequence: Synthetic oligonucleotide
acagaaauagacugagggu

SEQ ID NO: 731417 - RNA, 19 nt, Artificial Sequence
  Description of Artificial Sequence: Synthetic oligonucleotide
ggagguuuaaaccaagcug

SEQ ID NO: 731418 - RNA, 19 nt, Artificial Sequence
  Description of Artificial Sequence: Synthetic oligonucleotide
aaagaauuccccaauucau

SEQ ID NO: 731419 - RNA, 19 nt, Artificial Sequence
  Description of Artificial Sequence: Synthetic oligonucleotide
ucauauagccugaaagcaa

SEQ ID NO: 731420 - RNA, 19 nt, Artificial Sequence
  Description of Artificial Sequence: Synthetic oligonucleotide
ucuuggauagccuuccaaa

SEQ ID NO: 731421 - RNA, 19 nt, Artificial Sequence
  Description of Artificial Sequence: Synthetic oligonucleotide
ugcuucuaaaggaugugca

SEQ ID NO: 731422 - RNA, 19 nt, Artificial Sequence
  Description of Artificial Sequence: Synthetic oligonucleotide
cuacacucuacacaaggag

SEQ ID NO: 731423 - RNA, 19 nt, Artificial Sequence
  Description of Artificial Sequence: Synthetic oligonucleotide
gaagaucuuccacacugag

SEQ ID NO: 731424 - RNA, 19 nt, Artificial Sequence
  Description of Artificial Sequence: Synthetic oligonucleotide
agaauaucucuguucauaa

SEQ ID NO: 731425 - RNA, 19 nt, Artificial Sequence
  Description of Artificial Sequence: Synthetic oligonucleotide
uaaaggauauggcacuauc

SEQ ID NO: 731426 - RNA, 19 nt, Artificial Sequence
  Description of Artificial Sequence: Synthetic oligonucleotide
aaaggaugugcaguggucu

SEQ ID NO: 731427 - RNA, 19 nt, Artificial Sequence
  Description of Artificial Sequence: Synthetic oligonucleotide
aaccaccuaggagacaugg

SEQ ID NO: 731428 - RNA, 19 nt, Artificial Sequence
  Description of Artificial Sequence: Synthetic oligonucleotide
uaaaccaccggaccacuca

SEQ ID NO: 731429 - RNA, 19 nt, Artificial Sequence
  Description of Artificial Sequence: Synthetic oligonucleotide
gacaauaaggcacaacugu

SEQ ID NO: 731430 - RNA, 19 nt, Artificial Sequence
  Description of Artificial Sequence: Synthetic oligonucleotide
acggaauagaagcagccug

SEQ ID NO: 731431 - RNA, 19 nt, Artificial Sequence
  Description of Artificial Sequence: Synthetic oligonucleotide
uuuagugaagaaaccggau

SEQ ID NO: 731432 - RNA, 19 nt, Artificial Sequence
  Description of Artificial Sequence: Synthetic oligonucleotide
aagaauuccccaauucaug

SEQ ID NO: 731433 - RNA, 19 nt, Artificial Sequence
  Description of Artificial Sequence: Synthetic oligonucleotide
aucauauagccugaaagca

SEQ ID NO: 731434 - RNA, 19 nt, Artificial Sequence
  Description of Artificial Sequence: Synthetic oligonucleotide
aauagagacccggugggug

SEQ ID NO: 731435 - RNA, 19 nt, Artificial Sequence
  Description of Artificial Sequence: Synthetic oligonucleotide
accauguugucaaaacagc

SEQ ID NO: 731436 - RNA, 19 nt, Artificial Sequence
  Description of Artificial Sequence: Synthetic oligonucleotide
agaaauagacugaggguac

SEQ ID NO: 731437 - RNA, 19 nt, Artificial Sequence
  Description of Artificial Sequence: Synthetic oligonucleotide
uucaacaccgggaccagga

SEQ ID NO: 731438 - RNA, 19 nt, Artificial Sequence
  Description of Artificial Sequence: Synthetic oligonucleotide
uuacaaauagagacccggu

SEQ ID NO: 731439 - RNA, 19 nt, Artificial Sequence
  Description of Artificial Sequence: Synthetic oligonucleotide
gauuaugaacugacuacag

SEQ ID NO: 731440 - RNA, 19 nt, Artificial Sequence
  Description of Artificial Sequence: Synthetic oligonucleotide
ugguacuuacaaauagaga

SEQ ID NO: 731441 - RNA, 19 nt, Artificial Sequence
  Description of Artificial Sequence: Synthetic oligonucleotide
ggauuagguagauauaaac

SEQ ID NO: 731442 - RNA, 19 nt, Artificial Sequence
  Description of Artificial Sequence: Synthetic oligonucleotide
auuccguaaaggauauggc

SEQ ID NO: 731443 - RNA, 19 nt, Artificial Sequence
  Description of Artificial Sequence: Synthetic oligonucleotide
gagguagagagaccugggg

SEQ ID NO: 731444 - RNA, 19 nt, Artificial Sequence
  Description of Artificial Sequence: Synthetic oligonucleotide
augcuucuaaaggaugugc

SEQ ID NO: 731445 - RNA, 19 nt, Artificial Sequence
  Description of Artificial Sequence: Synthetic oligonucleotide
aguaguauucugggaaagg

SEQ ID NO: 731446 - RNA, 19 nt, Artificial Sequence
  Description of Artificial Sequence: Synthetic oligonucleotide
augaacugacuacagggcu

SEQ ID NO: 731447 - RNA, 19 nt, Artificial Sequence
  Description of Artificial Sequence: Synthetic oligonucleotide
guacuuacaaauagagacc

SEQ ID NO: 731448 - RNA, 19 nt, Artificial Sequence
  Description of Artificial Sequence: Synthetic oligonucleotide
accuuaacaaauuccguaa

SEQ ID NO: 731449 - RNA, 19 nt, Artificial Sequence
  Description of Artificial Sequence: Synthetic oligonucleotide
aagaccucuacuaucacuu

SEQ ID NO: 731450 - RNA, 19 nt, Artificial Sequence
  Description of Artificial Sequence: Synthetic oligonucleotide
acaaauuccguaaaggaua

SEQ ID NO: 731451 - RNA, 19 nt, Artificial Sequence
  Description of Artificial Sequence: Synthetic oligonucleotide
aaaggcaagucagugugga

SEQ ID NO: 731452 - RNA, 19 nt, Artificial Sequence
  Description of Artificial Sequence: Synthetic oligonucleotide
aggacuaagauaagucagg

SEQ ID NO: 731453 - RNA, 19 nt, Artificial Sequence
  Description of Artificial Sequence: Synthetic oligonucleotide
cuuuagugaagaaaccgga

SEQ ID NO: 731454 - RNA, 19 nt, Artificial Sequence
  Description of Artificial Sequence: Synthetic oligonucleotide
aaauacuaggaagcaagaa

SEQ ID NO: 731455 - RNA, 19 nt, Artificial Sequence
  Description of Artificial Sequence: Synthetic oligonucleotide
ggcccuaugcuucuaaagg

SEQ ID NO: 731456 - RNA, 19 nt, Artificial Sequence
  Description of Artificial Sequence: Synthetic oligonucleotide
gucaguguggacaggagag

SEQ ID NO: 731457 - RNA, 19 nt, Artificial Sequence
  Description of Artificial Sequence: Synthetic oligonucleotide
ucauguagacuccauccau

SEQ ID NO: 731458 - RNA, 19 nt, Artificial Sequence
  Description of Artificial Sequence: Synthetic oligonucleotide
aacuggcaggcauaagacu

SEQ ID NO: 731459 - RNA, 19 nt, Artificial Sequence
  Description of Artificial Sequence: Synthetic oligonucleotide
aggaagcaagaauaauuug

SEQ ID NO: 731460 - RNA, 19 nt, Artificial Sequence
  Description of Artificial Sequence: Synthetic oligonucleotide
uccaaaucauauagccuga

SEQ ID NO: 731461 - RNA, 19 nt, Artificial Sequence
  Description of Artificial Sequence: Synthetic oligonucleotide
uuaaaacaguuugcuauac

SEQ ID NO: 731462 - RNA, 19 nt, Artificial Sequence
  Description of Artificial Sequence: Synthetic oligonucleotide
gguagauauaaaccaccgg

SEQ ID NO: 731463 - RNA, 19 nt, Artificial Sequence
  Description of Artificial Sequence: Synthetic oligonucleotide
acacggaauagaagcagcc

SEQ ID NO: 731464 - RNA, 19 nt, Artificial Sequence
  Description of Artificial Sequence: Synthetic oligonucleotide
uaaaggaugugcagugguc

SEQ ID NO: 731465 - RNA, 19 nt, Artificial Sequence
  Description of Artificial Sequence: Synthetic oligonucleotide
ggacaauuuaauucuugag

SEQ ID NO: 731466 - RNA, 19 nt, Artificial Sequence
  Description of Artificial Sequence: Synthetic oligonucleotide
aggcauaagacuauuuucu

SEQ ID NO: 731467 - RNA, 19 nt, Artificial Sequence
  Description of Artificial Sequence: Synthetic oligonucleotide
ugucaugcaagagcaguag

SEQ ID NO: 731468 - RNA, 19 nt, Artificial Sequence
  Description of Artificial Sequence: Synthetic oligonucleotide
aacgcccuguuuauacacc

SEQ ID NO: 731469 - RNA, 19 nt, Artificial Sequence
  Description of Artificial Sequence: Synthetic oligonucleotide
uucguaguaccuguagcag

SEQ ID NO: 731470 - RNA, 19 nt, Artificial Sequence
  Description of Artificial Sequence: Synthetic oligonucleotide
agagcaggggaucaagaga

SEQ ID NO: 731471 - RNA, 19 nt, Artificial Sequence
  Description of Artificial Sequence: Synthetic oligonucleotide
acuauccccguccugguca

SEQ ID NO: 731472 - RNA, 19 nt, Artificial Sequence
  Description of Artificial Sequence: Synthetic oligonucleotide
cauaaucuuagaaacuuua

SEQ ID NO: 731473 - RNA, 19 nt, Artificial Sequence
  Description of Artificial Sequence: Synthetic oligonucleotide
agguagagagaccugggga

SEQ ID NO: 731474 - RNA, 19 nt, Artificial Sequence
  Description of Artificial Sequence: Synthetic oligonucleotide
guaccauucuguaacgccc

SEQ ID NO: 731475 - RNA, 19 nt, Artificial Sequence
  Description of Artificial Sequence: Synthetic oligonucleotide
aaauagacugaggguacca

SEQ ID NO: 731476 - RNA, 19 nt, Artificial Sequence
  Description of Artificial Sequence: Synthetic oligonucleotide
uauuggugacaaugugucc

SEQ ID NO: 731477 - RNA, 19 nt, Artificial Sequence
  Description of Artificial Sequence: Synthetic oligonucleotide
uugccacgcauaaaauuca

SEQ ID NO: 731478 - RNA, 19 nt, Artificial Sequence
  Description of Artificial Sequence: Synthetic oligonucleotide
gguaccauucuguaacgcc

SEQ ID NO: 731479 - RNA, 19 nt, Artificial Sequence
  Description of Artificial Sequence: Synthetic oligonucleotide
aguaagcaaacaccagaga

SEQ ID NO: 731480 - RNA, 19 nt, Artificial Sequence
  Description of Artificial Sequence: Synthetic oligonucleotide
uauagccugaaagcaaagu

SEQ ID NO: 731481 - RNA, 19 nt, Artificial Sequence
  Description of Artificial Sequence: Synthetic oligonucleotide
uaugcuucuaaaggaugug

SEQ ID NO: 731482 - RNA, 19 nt, Artificial Sequence
  Description of Artificial Sequence: Synthetic oligonucleotide
cagagguagagagaccugg

SEQ ID NO: 731483 - RNA, 19 nt, Artificial Sequence
  Description of Artificial Sequence: Synthetic oligonucleotide
uacaagccucaccaugacc

SEQ ID NO: 731484 - RNA, 19 nt, Artificial Sequence
  Description of Artificial Sequence: Synthetic oligonucleotide
cucaaacagaucaguauca

SEQ ID NO: 731485 - RNA, 19 nt, Artificial Sequence
  Description of Artificial Sequence: Synthetic oligonucleotide
aaacuacaagaaggacccc

SEQ ID NO: 731486 - RNA, 19 nt, Artificial Sequence
  Description of Artificial Sequence: Synthetic oligonucleotide
ugugauuaggaagcucaug

SEQ ID NO: 731487 - RNA, 19 nt, Artificial Sequence
  Description of Artificial Sequence: Synthetic oligonucleotide
uaacgcccuguuuauacac

SEQ ID NO: 731488 - RNA, 19 nt, Artificial Sequence
  Description of Artificial Sequence: Synthetic oligonucleotide
gucaacacuguacucagaa

SEQ ID NO: 731489 - RNA, 19 nt, Artificial Sequence
  Description of Artificial Sequence: Synthetic oligonucleotide
auacaccaaaggcaaguca

SEQ ID NO: 731490 - RNA, 19 nt, Artificial Sequence
  Description of Artificial Sequence: Synthetic oligonucleotide
cauguagacuccauccauc

SEQ ID NO: 731491 - RNA, 19 nt, Artificial Sequence
  Description of Artificial Sequence: Synthetic oligonucleotide
uggucccuguccuuuagug

SEQ ID NO: 731492 - RNA, 19 nt, Artificial Sequence
  Description of Artificial Sequence: Synthetic oligonucleotide
cuauacagccaagggaggc

SEQ ID NO: 731493 - RNA, 19 nt, Artificial Sequence
  Description of Artificial Sequence: Synthetic oligonucleotide
gaaauagacugaggguacc

SEQ ID NO: 731494 - RNA, 19 nt, Artificial Sequence
  Description of Artificial Sequence: Synthetic oligonucleotide
acuaucacuucaguuggug

SEQ ID NO: 731495 - RNA, 19 nt, Artificial Sequence
  Description of Artificial Sequence: Synthetic oligonucleotide
gaagcaagaauaauuuggu

SEQ ID NO: 731496 - RNA, 19 nt, Artificial Sequence
  Description of Artificial Sequence: Synthetic oligonucleotide
auuuauugauggacugagg

SEQ ID NO: 731497 - RNA, 19 nt, Artificial Sequence
  Description of Artificial Sequence: Synthetic oligonucleotide
gacuaagauaagucaggca

SEQ ID NO: 731498 - RNA, 19 nt, Artificial Sequence
  Description of Artificial Sequence: Synthetic oligonucleotide
gauggacugaggaauacaa

SEQ ID NO: 731499 - RNA, 19 nt, Artificial Sequence
  Description of Artificial Sequence: Synthetic oligonucleotide
gacacggaauagaagcagc

SEQ ID NO: 731500 - RNA, 19 nt, Artificial Sequence
  Description of Artificial Sequence: Synthetic oligonucleotide
uguagacuccauccaucca

SEQ ID NO: 731501 - RNA, 19 nt, Artificial Sequence
  Description of Artificial Sequence: Synthetic oligonucleotide
accccuaccauguugucaa

SEQ ID NO: 731502 - RNA, 19 nt, Artificial Sequence
  Description of Artificial Sequence: Synthetic oligonucleotide
ucuguaacgcccuguuuau

SEQ ID NO: 731503 - RNA, 19 nt, Artificial Sequence
  Description of Artificial Sequence: Synthetic oligonucleotide
acaugcuucuaagaguugu

SEQ ID NO: 731504 - RNA, 19 nt, Artificial Sequence
  Description of Artificial Sequence: Synthetic oligonucleotide
uugucaugcaagagcagua

SEQ ID NO: 731505 - RNA, 19 nt, Artificial Sequence
  Description of Artificial Sequence: Synthetic oligonucleotide
uaccauucuguaacgcccu

SEQ ID NO: 731506 - RNA, 19 nt, Artificial Sequence
  Description of Artificial Sequence: Synthetic oligonucleotide
cacgcauaaaauucauuca

SEQ ID NO: 731507 - RNA, 19 nt, Artificial Sequence
  Description of Artificial Sequence: Synthetic oligonucleotide
aggguaccauucuguaacg

SEQ ID NO: 731508 - RNA, 19 nt, Artificial Sequence
  Description of Artificial Sequence: Synthetic oligonucleotide
aagaguuguacugguugcu

SEQ ID NO: 731509 - RNA, 19 nt, Artificial Sequence
  Description of Artificial Sequence: Synthetic oligonucleotide
agacacggaauagaagcag

SEQ ID NO: 731510 - RNA, 19 nt, Artificial Sequence
  Description of Artificial Sequence: Synthetic oligonucleotide
aauagacugaggguaccau

SEQ ID NO: 731511 - RNA, 19 nt, Artificial Sequence
  Description of Artificial Sequence: Synthetic oligonucleotide
uugagcugggucauucaaa

SEQ ID NO: 731512 - RNA, 19 nt, Artificial Sequence
  Description of Artificial Sequence: Synthetic oligonucleotide
aggcccuaugcuucuaaag

SEQ ID NO: 731513 - RNA, 19 nt, Artificial Sequence
  Description of Artificial Sequence: Synthetic oligonucleotide
aagauaagucaggcacuuc

SEQ ID NO: 731514 - RNA, 19 nt, Artificial Sequence
  Description of Artificial Sequence: Synthetic oligonucleotide
ggcaaugucccagagacac

SEQ ID NO: 731515 - RNA, 19 nt, Artificial Sequence
  Description of Artificial Sequence: Synthetic oligonucleotide
acucuacacaaggagcuag

SEQ ID NO: 731516 - RNA, 19 nt, Artificial Sequence
  Description of Artificial Sequence: Synthetic oligonucleotide
agacaagcuugacagcaga

SEQ ID NO: 731517 - RNA, 19 nt, Artificial Sequence
  Description of Artificial Sequence: Synthetic oligonucleotide
acacucuacacaaggagcu

SEQ ID NO: 731518 - RNA, 19 nt, Artificial Sequence
  Description of Artificial Sequence: Synthetic oligonucleotide
uaagauaagucaggcacuu

SEQ ID NO: 731519 - RNA, 19 nt, Artificial Sequence
  Description of Artificial Sequence: Synthetic oligonucleotide
uggcccaaaaguugagcug

SEQ ID NO: 731520 - RNA, 19 nt, Artificial Sequence
  Description of Artificial Sequence: Synthetic oligonucleotide
uauacaccaaaggcaaguc

SEQ ID NO: 731521 - RNA, 19 nt, Artificial Sequence
  Description of Artificial Sequence: Synthetic oligonucleotide
aaaauuugccacgcauaaa

SEQ ID NO: 731522 - RNA, 19 nt, Artificial Sequence
  Description of Artificial Sequence: Synthetic oligonucleotide
ggcccaaaaguugagcugg

SEQ ID NO: 731523 - RNA, 19 nt, Artificial Sequence
  Description of Artificial Sequence: Synthetic oligonucleotide
cauaucccaugcugcagag

SEQ ID NO: 731524 - RNA, 19 nt, Artificial Sequence
  Description of Artificial Sequence: Synthetic oligonucleotide
ugacuacagggcuuccagc

SEQ ID NO: 731525 - RNA, 19 nt, Artificial Sequence
  Description of Artificial Sequence: Synthetic oligonucleotide
ccgauccucaccuuuaccc

SEQ ID NO: 731526 - RNA, 19 nt, Artificial Sequence
  Description of Artificial Sequence: Synthetic oligonucleotide
agaccucuacuaucacuuc

SEQ ID NO: 731527 - RNA, 19 nt, Artificial Sequence
  Description of Artificial Sequence: Synthetic oligonucleotide
ucuacacaaggagcuagga

SEQ ID NO: 731528 - RNA, 19 nt, Artificial Sequence
  Description of Artificial Sequence: Synthetic oligonucleotide
gaccucuacuaucacuuca

SEQ ID NO: 731529 - RNA, 19 nt, Artificial Sequence
  Description of Artificial Sequence: Synthetic oligonucleotide
cuuuacccuucccuuuugc

SEQ ID NO: 731530 - RNA, 19 nt, Artificial Sequence
  Description of Artificial Sequence: Synthetic oligonucleotide
aaauagagacccggugggu

SEQ ID NO: 731531 - RNA, 19 nt, Artificial Sequence
  Description of Artificial Sequence: Synthetic oligonucleotide
ggcauaagacuauuuucug

SEQ ID NO: 731532 - RNA, 19 nt, Artificial Sequence
  Description of Artificial Sequence: Synthetic oligonucleotide
gacaggauggaugcacggc

SEQ ID NO: 731533 - RNA, 19 nt, Artificial Sequence
  Description of Artificial Sequence: Synthetic oligonucleotide
agguuuaaaccaagcugac

SEQ ID NO: 731534 - RNA, 19 nt, Artificial Sequence
  Description of Artificial Sequence: Synthetic oligonucleotide
cacuauccugucacauugg

SEQ ID NO: 731535 - RNA, 19 nt, Artificial Sequence
  Description of Artificial Sequence: Synthetic oligonucleotide
caggauuagguagauauaa

SEQ ID NO: 731536 - RNA, 19 nt, Artificial Sequence
  Description of Artificial Sequence: Synthetic oligonucleotide
acucuauuggugacaaugu

SEQ ID NO: 731537 - RNA, 19 nt, Artificial Sequence
  Description of Artificial Sequence: Synthetic oligonucleotide
gcagaguaaaugugggcag

SEQ ID NO: 731538 - RNA, 19 nt, Artificial Sequence
  Description of Artificial Sequence: Synthetic oligonucleotide
gucauucaaagaccucuac

SEQ ID NO: 731539 - RNA, 19 nt, Artificial Sequence
  Description of Artificial Sequence: Synthetic oligonucleotide
agccugaaagcaaagugca

SEQ ID NO: 731540 - RNA, 19 nt, Artificial Sequence
  Description of Artificial Sequence: Synthetic oligonucleotide
auagacugaggguaccauu

SEQ ID NO: 731541 - RNA, 19 nt, Artificial Sequence
  Description of Artificial Sequence: Synthetic oligonucleotide
acuuacaaauagagacccg

SEQ ID NO: 731542 - RNA, 19 nt, Artificial Sequence
  Description of Artificial Sequence: Synthetic oligonucleotide
ucaucacgggagaucuugu

SEQ ID NO: 731543 - RNA, 19 nt, Artificial Sequence
  Description of Artificial Sequence: Synthetic oligonucleotide
agagguagagagaccuggg

SEQ ID NO: 731544 - RNA, 19 nt, Artificial Sequence
  Description of Artificial Sequence: Synthetic oligonucleotide
ugaugagagcaggggauca

SEQ ID NO: 731545 - RNA, 19 nt, Artificial Sequence
  Description of Artificial Sequence: Synthetic oligonucleotide
gaagcucaugagacaauac

SEQ ID NO: 731546 - RNA, 19 nt, Artificial Sequence
  Description of Artificial Sequence: Synthetic oligonucleotide
caccggaccacucacuauc

SEQ ID NO: 731547 - RNA, 19 nt, Artificial Sequence
  Description of Artificial Sequence: Synthetic oligonucleotide
acuggcaggcauaagacua

SEQ ID NO: 731548 - RNA, 19 nt, Artificial Sequence
  Description of Artificial Sequence: Synthetic oligonucleotide
aacugacuacagggcuucc

SEQ ID NO: 731549 - RNA, 19 nt, Artificial Sequence
  Description of Artificial Sequence: Synthetic oligonucleotide
ggauuaugaacugacuaca

SEQ ID NO: 731550 - RNA, 19 nt, Artificial Sequence
  Description of Artificial Sequence: Synthetic oligonucleotide
agacacguccaggauuagg

SEQ ID NO: 731551 - RNA, 19 nt, Artificial Sequence
  Description of Artificial Sequence: Synthetic oligonucleotide
caguuugcuauacagccaa

SEQ ID NO: 731552 - RNA, 19 nt, Artificial Sequence
  Description of Artificial Sequence: Synthetic oligonucleotide
ccuaccauguugucaaaac

SEQ ID NO: 731553 - RNA, 19 nt, Artificial Sequence
  Description of Artificial Sequence: Synthetic oligonucleotide
ucccuguccuuuagugaag

SEQ ID NO: 731554 - RNA, 19 nt, Artificial Sequence
  Description of Artificial Sequence: Synthetic oligonucleotide
ggacuaagauaagucaggc

SEQ ID NO: 731555 - RNA, 19 nt, Artificial Sequence
  Description of Artificial Sequence: Synthetic oligonucleotide
gguagagagaccuggggaa

SEQ ID NO: 731556 - RNA, 19 nt, Artificial Sequence
  Description of Artificial Sequence: Synthetic oligonucleotide
uccauaacacuagucuuuu

SEQ ID NO: 731557 - RNA, 19 nt, Artificial Sequence
  Description of Artificial Sequence: Synthetic oligonucleotide
caguaguauucugggaaag

SEQ ID NO: 731558 - RNA, 19 nt, Artificial Sequence
  Description of Artificial Sequence: Synthetic oligonucleotide
uccagggugccuagacucu

SEQ ID NO: 731559 - RNA, 19 nt, Artificial Sequence
  Description of Artificial Sequence: Synthetic oligonucleotide
guagacuccauccauccau

SEQ ID NO: 731560 - RNA, 19 nt, Artificial Sequence
  Description of Artificial Sequence: Synthetic oligonucleotide
acgcccuguuuauacacca

SEQ ID NO: 731561 - RNA, 19 nt, Artificial Sequence
  Description of Artificial Sequence: Synthetic oligonucleotide
agucagacagauauuucau

SEQ ID NO: 731562 - RNA, 19 nt, Artificial Sequence
  Description of Artificial Sequence: Synthetic oligonucleotide
aagagcagauuuacacaga

SEQ ID NO: 731563 - RNA, 19 nt, Artificial Sequence
  Description of Artificial Sequence: Synthetic oligonucleotide
cuaagauaagucaggcacu

SEQ ID NO: 731564 - RNA, 19 nt, Artificial Sequence
  Description of Artificial Sequence: Synthetic oligonucleotide
uacuaucacuucaguuggu

SEQ ID NO: 731565 - RNA, 19 nt, Artificial Sequence
  Description of Artificial Sequence: Synthetic oligonucleotide
agcccggagucauuuccuc

SEQ ID NO: 731566 - RNA, 19 nt, Artificial Sequence
  Description of Artificial Sequence: Synthetic oligonucleotide
gauggaugcacggcauuca

SEQ ID NO: 731567 - RNA, 19 nt, Artificial Sequence
  Description of Artificial Sequence: Synthetic oligonucleotide
ccaaaaguugagcuggguc

SEQ ID NO: 731568 - RNA, 19 nt, Artificial Sequence
  Description of Artificial Sequence: Synthetic oligonucleotide
auauagccugaaagcaaag

SEQ ID NO: 731569 - RNA, 19 nt, Artificial Sequence
  Description of Artificial Sequence: Synthetic oligonucleotide
accggaccacucacuaucc

SEQ ID NO: 731570 - RNA, 19 nt, Artificial Sequence
  Description of Artificial Sequence: Synthetic oligonucleotide
cagacacggaauagaagca

SEQ ID NO: 731571 - RNA, 19 nt, Artificial Sequence
  Description of Artificial Sequence: Synthetic oligonucleotide
cccuguuuauacaccaaag

SEQ ID NO: 731572 - RNA, 19 nt, Artificial Sequence
  Description of Artificial Sequence: Synthetic oligonucleotide
guaacgcccuguuuauaca

SEQ ID NO: 731573 - RNA, 19 nt, Artificial Sequence
  Description of Artificial Sequence: Synthetic oligonucleotide
accaucauucguaguaccu

SEQ ID NO: 731574 - RNA, 19 nt, Artificial Sequence
  Description of Artificial Sequence: Synthetic oligonucleotide
aaauuccguaaaggauaug

SEQ ID NO: 731575 - RNA, 19 nt, Artificial Sequence
  Description of Artificial Sequence: Synthetic oligonucleotide
caucuuuuauccaaaucau

SEQ ID NO: 731576 - RNA, 19 nt, Artificial Sequence
  Description of Artificial Sequence: Synthetic oligonucleotide
uuuacacaucuuggauagc

SEQ ID NO: 731577 - RNA, 19 nt, Artificial Sequence
  Description of Artificial Sequence: Synthetic oligonucleotide
ugccacgcauaaaauucau

SEQ ID NO: 731578 - RNA, 19 nt, Artificial Sequence
  Description of Artificial Sequence: Synthetic oligonucleotide
ucccaugcugcagaguaaa

SEQ ID NO: 731579 - RNA, 19 nt, Artificial Sequence
  Description of Artificial Sequence: Synthetic oligonucleotide
augcaagagcaguaguauu

SEQ ID NO: 731580 - RNA, 19 nt, Artificial Sequence
  Description of Artificial Sequence: Synthetic oligonucleotide
auaaaccaccggaccacuc

SEQ ID NO: 731581 - RNA, 19 nt, Artificial Sequence
  Description of Artificial Sequence: Synthetic oligonucleotide
ucaacaccgggaccaggau

SEQ ID NO: 731582 - RNA, 19 nt, Artificial Sequence
  Description of Artificial Sequence: Synthetic oligonucleotide
agacccggugggugcacac

SEQ ID NO: 731583 - RNA, 19 nt, Artificial Sequence
  Description of Artificial Sequence: Synthetic oligonucleotide
gguuuaaaccaagcugacc

SEQ ID NO: 731584 - RNA, 19 nt, Artificial Sequence
  Description of Artificial Sequence: Synthetic oligonucleotide
ccaaggacaauuuaauucu

SEQ ID NO: 731585 - RNA, 19 nt, Artificial Sequence
  Description of Artificial Sequence: Synthetic oligonucleotide
cauuaaaauuugccacgca

SEQ ID NO: 731586 - RNA, 19 nt, Artificial Sequence
  Description of Artificial Sequence: Synthetic oligonucleotide
guugucaugcaagagcagu

SEQ ID NO: 731587 - RNA, 19 nt, Artificial Sequence
  Description of Artificial Sequence: Synthetic oligonucleotide
ccuaugcuucuaaaggaug

SEQ ID NO: 731588 - RNA, 19 nt, Artificial Sequence
  Description of Artificial Sequence: Synthetic oligonucleotide
caucacgggagaucuuguc

SEQ ID NO: 731589 - RNA, 19 nt, Artificial Sequence
  Description of Artificial Sequence: Synthetic oligonucleotide
aggcauaaucuuagaaacu

SEQ ID NO: 731590 - RNA, 19 nt, Artificial Sequence
  Description of Artificial Sequence: Synthetic oligonucleotide
gguccugucugcaaugcug

SEQ ID NO: 731591 - RNA, 19 nt, Artificial Sequence
  Description of Artificial Sequence: Synthetic oligonucleotide
auucaacaccgggaccagg

SEQ ID NO: 731592 - RNA, 19 nt, Artificial Sequence
  Description of Artificial Sequence: Synthetic oligonucleotide
agauuuacacagacacgga

SEQ ID NO: 731593 - RNA, 19 nt, Artificial Sequence
  Description of Artificial Sequence: Synthetic oligonucleotide
ggauuaaaacaguuugcua

SEQ ID NO: 731594 - RNA, 19 nt, Artificial Sequence
  Description of Artificial Sequence: Synthetic oligonucleotide
cccaauucauguagacucc

SEQ ID NO: 731595 - RNA, 19 nt, Artificial Sequence
  Description of Artificial Sequence: Synthetic oligonucleotide
aucuuuuauccaaaucaua

SEQ ID NO: 731596 - RNA, 19 nt, Artificial Sequence
  Description of Artificial Sequence: Synthetic oligonucleotide
cuauccccguccuggucag

SEQ ID NO: 731597 - RNA, 19 nt, Artificial Sequence
  Description of Artificial Sequence: Synthetic oligonucleotide
caucauucguaguaccugu

SEQ ID NO: 731598 - RNA, 19 nt, Artificial Sequence
  Description of Artificial Sequence: Synthetic oligonucleotide
aggauuagguagauauaaa

SEQ ID NO: 731599 - RNA, 19 nt, Artificial Sequence
  Description of Artificial Sequence: Synthetic oligonucleotide
accaccggaccacucacua

SEQ ID NO: 731600 - RNA, 19 nt, Artificial Sequence
  Description of Artificial Sequence: Synthetic oligonucleotide
agcuacucuauuggugaca

SEQ ID NO: 731601 - RNA, 19 nt, Artificial Sequence
  Description of Artificial Sequence: Synthetic oligonucleotide
augcugcagaguaaaugug

SEQ ID NO: 731602 - RNA, 19 nt, Artificial Sequence
  Description of Artificial Sequence: Synthetic oligonucleotide
caaauuccguaaaggauau

SEQ ID NO: 731603 - RNA, 19 nt, Artificial Sequence
  Description of Artificial Sequence: Synthetic oligonucleotide
acguccaggauuagguaga

SEQ ID NO: 731604 - RNA, 19 nt, Artificial Sequence
  Description of Artificial Sequence: Synthetic oligonucleotide
ccaaccaucauucguagua

SEQ ID NO: 731605 - RNA, 19 nt, Artificial Sequence
  Description of Artificial Sequence: Synthetic oligonucleotide
cauucaacaccgggaccag

SEQ ID NO: 731606 - RNA, 19 nt, Artificial Sequence
  Description of Artificial Sequence: Synthetic oligonucleotide
gcccuaugcuucuaaagga

SEQ ID NO: 731607 - RNA, 19 nt, Artificial Sequence
  Description of Artificial Sequence: Synthetic oligonucleotide
cugggucauucaaagaccu

SEQ ID NO: 731608 - RNA, 19 nt, Artificial Sequence
  Description of Artificial Sequence: Synthetic oligonucleotide
cagcuacucuauuggugac

SEQ ID NO: 731609 - RNA, 19 nt, Artificial Sequence
  Description of Artificial Sequence: Synthetic oligonucleotide
caugcuucuaagaguugua

SEQ ID NO: 731610 - RNA, 19 nt, Artificial Sequence
  Description of Artificial Sequence: Synthetic oligonucleotide
ggaccaggauuaugaacug

SEQ ID NO: 731611 - RNA, 19 nt, Artificial Sequence
  Description of Artificial Sequence: Synthetic oligonucleotide
auuuggucccuguccuuua

SEQ ID NO: 731612 - RNA, 19 nt, Artificial Sequence
  Description of Artificial Sequence: Synthetic oligonucleotide
gaccccuaccauguuguca

SEQ ID NO: 731613 - RNA, 19 nt, Artificial Sequence
  Description of Artificial Sequence: Synthetic oligonucleotide
uucggcuguugagugguuc

SEQ ID NO: 731614 - RNA, 19 nt, Artificial Sequence
  Description of Artificial Sequence: Synthetic oligonucleotide
auacagccaagggaggcau

SEQ ID NO: 731615 - RNA, 19 nt, Artificial Sequence
  Description of Artificial Sequence: Synthetic oligonucleotide
aggagagacuucagguugu

SEQ ID NO: 731616 - RNA, 19 nt, Artificial Sequence
  Description of Artificial Sequence: Synthetic oligonucleotide
acgccaaccaucauucgua

SEQ ID NO: 731617 - RNA, 19 nt, Artificial Sequence
  Description of Artificial Sequence: Synthetic oligonucleotide
gggagguuuaaaccaagcu

SEQ ID NO: 731618 - RNA, 19 nt, Artificial Sequence
  Description of Artificial Sequence: Synthetic oligonucleotide
guugagugguucaggucca

SEQ ID NO: 731619 - RNA, 19 nt, Artificial Sequence
  Description of Artificial Sequence: Synthetic oligonucleotide
gggaggcauaaucuuagaa

SEQ ID NO: 731620 - RNA, 19 nt, Artificial Sequence
  Description of Artificial Sequence: Synthetic oligonucleotide
gaagccacauaaauauguu

SEQ ID NO: 731621 - RNA, 19 nt, Artificial Sequence
  Description of Artificial Sequence: Synthetic oligonucleotide
gcaguaguauucugggaaa

SEQ ID NO: 731622 - RNA, 19 nt, Artificial Sequence
  Description of Artificial Sequence: Synthetic oligonucleotide
uggcacuauccccguccug

SEQ ID NO: 731623 - RNA, 19 nt, Artificial Sequence
  Description of Artificial Sequence: Synthetic oligonucleotide
aguaccuguagcagcucau

SEQ ID NO: 731624 - RNA, 19 nt, Artificial Sequence
  Description of Artificial Sequence: Synthetic oligonucleotide
ccaccuuucuagaauaucu

SEQ ID NO: 731625 - RNA, 19 nt, Artificial Sequence
  Description of Artificial Sequence: Synthetic oligonucleotide
caugcaagagcaguaguau

SEQ ID NO: 731626 - RNA, 19 nt, Artificial Sequence
  Description of Artificial Sequence: Synthetic oligonucleotide
aggauggaugcacggcauu

SEQ ID NO: 731627 - RNA, 19 nt, Artificial Sequence
  Description of Artificial Sequence: Synthetic oligonucleotide
ggcauaucccaugcugcag

SEQ ID NO: 731628 - RNA, 19 nt, Artificial Sequence
  Description of Artificial Sequence: Synthetic oligonucleotide
cacggcauucagcagcaaa

SEQ ID NO: 731629 - RNA, 19 nt, Artificial Sequence
  Description of Artificial Sequence: Synthetic oligonucleotide
guagagagaccuggggaaa

SEQ ID NO: 731630 - RNA, 19 nt, Artificial Sequence
  Description of Artificial Sequence: Synthetic oligonucleotide
aaccaccggaccacucacu

SEQ ID NO: 731631 - RNA, 19 nt, Artificial Sequence
  Description of Artificial Sequence: Synthetic oligonucleotide
gcuguugagugguucaggu

SEQ ID NO: 731632 - RNA, 19 nt, Artificial Sequence
  Description of Artificial Sequence: Synthetic oligonucleotide
gcuacucuauuggugacaa

SEQ ID NO: 731633 - RNA, 19 nt, Artificial Sequence
  Description of Artificial Sequence: Synthetic oligonucleotide
ggaagcucaugagacaaua

SEQ ID NO: 731634 - RNA, 19 nt, Artificial Sequence
  Description of Artificial Sequence: Synthetic oligonucleotide
gaaaccggaugcucauuuu

SEQ ID NO: 731635 - RNA, 19 nt, Artificial Sequence
  Description of Artificial Sequence: Synthetic oligonucleotide
cacgccaaccaucauucgu

SEQ ID NO: 731636 - RNA, 19 nt, Artificial Sequence
  Description of Artificial Sequence: Synthetic oligonucleotide
cacucacuauccugucaca

SEQ ID NO: 731637 - RNA, 19 nt, Artificial Sequence
  Description of Artificial Sequence: Synthetic oligonucleotide
cacuauccccguccugguc

SEQ ID NO: 731638 - RNA, 19 nt, Artificial Sequence
  Description of Artificial Sequence: Synthetic oligonucleotide
gagacacguccaggauuag

SEQ ID NO: 731639 - RNA, 19 nt, Artificial Sequence
  Description of Artificial Sequence: Synthetic oligonucleotide
gcccuguuuauacaccaaa

SEQ ID NO: 731640 - RNA, 19 nt, Artificial Sequence
  Description of Artificial Sequence: Synthetic oligonucleotide
ggguaccauucuguaacgc

SEQ ID NO: 731641 - RNA, 19 nt, Artificial Sequence
  Description of Artificial Sequence: Synthetic oligonucleotide
aucauucguaguaccugua

SEQ ID NO: 731642 - RNA, 19 nt, Artificial Sequence
  Description of Artificial Sequence: Synthetic oligonucleotide
cucacuauccugucacauu

SEQ ID NO: 731643 - RNA, 19 nt, Artificial Sequence
  Description of Artificial Sequence: Synthetic oligonucleotide
gcaguuuguugcuucggcu

SEQ ID NO: 731644 - RNA, 19 nt, Artificial Sequence
  Description of Artificial Sequence: Synthetic oligonucleotide
caauucauguagacuccau

SEQ ID NO: 731645 - RNA, 19 nt, Artificial Sequence
  Description of Artificial Sequence: Synthetic oligonucleotide
ggcacaacuguggauuaaa

SEQ ID NO: 731646 - RNA, 19 nt, Artificial Sequence
  Description of Artificial Sequence: Synthetic oligonucleotide
cggaccacucacuauccug

SEQ ID NO: 731647 - RNA, 19 nt, Artificial Sequence
  Description of Artificial Sequence: Synthetic oligonucleotide
cagaucaguaucagacaau

SEQ ID NO: 731648 - RNA, 19 nt, Artificial Sequence
  Description of Artificial Sequence: Synthetic oligonucleotide
cggaauagaagcagccuga

SEQ ID NO: 731649 - RNA, 19 nt, Artificial Sequence
  Description of Artificial Sequence: Synthetic oligonucleotide
uggcaggcauaagacuauu

SEQ ID NO: 731650 - RNA, 19 nt, Artificial Sequence
  Description of Artificial Sequence: Synthetic oligonucleotide
gcaguggucuacacucuac

SEQ ID NO: 731651 - RNA, 19 nt, Artificial Sequence
  Description of Artificial Sequence: Synthetic oligonucleotide
gcccugugaugagagcagg

SEQ ID NO: 731652 - RNA, 19 nt, Artificial Sequence
  Description of Artificial Sequence: Synthetic oligonucleotide
aagcugaccuuggcccaaa

SEQ ID NO: 731653 - RNA, 19 nt, Artificial Sequence
  Description of Artificial Sequence: Synthetic oligonucleotide
cacggaauagaagcagccu

SEQ ID NO: 731654 - RNA, 19 nt, Artificial Sequence
  Description of Artificial Sequence: Synthetic oligonucleotide
caggcccuaugcuucuaaa

SEQ ID NO: 731655 - RNA, 19 nt, Artificial Sequence
  Description of Artificial Sequence: Synthetic oligonucleotide
ggucauucaaagaccucua

SEQ ID NO: 731656 - RNA, 19 nt, Artificial Sequence
  Description of Artificial Sequence: Synthetic oligonucleotide
ccuuuacccuucccuuuug

SEQ ID NO: 731657 - RNA, 19 nt, Artificial Sequence
  Description of Artificial Sequence: Synthetic oligonucleotide
cuggcaggcauaagacuau

SEQ ID NO: 731658 - RNA, 19 nt, Artificial Sequence
  Description of Artificial Sequence: Synthetic oligonucleotide
cagcaaaucaggggaagau

SEQ ID NO: 731659 - RNA, 19 nt, Artificial Sequence
  Description of Artificial Sequence: Synthetic oligonucleotide
ccugauucagggagguuua

SEQ ID NO: 731660 - RNA, 19 nt, Artificial Sequence
  Description of Artificial Sequence: Synthetic oligonucleotide
ccguaaaggauauggcacu

SEQ ID NO: 731661 - RNA, 19 nt, Artificial Sequence
  Description of Artificial Sequence: Synthetic oligonucleotide
ccaauucauguagacucca

SEQ ID NO: 731662 - RNA, 19 nt, Artificial Sequence
  Description of Artificial Sequence: Synthetic oligonucleotide
cuacagggcuuccagcauu

SEQ ID NO: 731663 - RNA, 19 nt, Artificial Sequence
  Description of Artificial Sequence: Synthetic oligonucleotide
cgccaaccaucauucguag

SEQ ID NO: 731664 - RNA, 19 nt, Artificial Sequence
  Description of Artificial Sequence: Synthetic oligonucleotide
cucagacaggauggaugca

SEQ ID NO: 731665 - RNA, 19 nt, Artificial Sequence
  Description of Artificial Sequence: Synthetic oligonucleotide
caccgggaccaggauuaug

SEQ ID NO: 731666 - RNA, 19 nt, Artificial Sequence
  Description of Artificial Sequence: Synthetic oligonucleotide
gagacccggugggugcaca

SEQ ID NO: 731667 - RNA, 19 nt, Artificial Sequence
  Description of Artificial Sequence: Synthetic oligonucleotide
ccaggauuagguagauaua

SEQ ID NO: 731668 - RNA, 19 nt, Artificial Sequence
  Description of Artificial Sequence: Synthetic oligonucleotide
gcccggagucauuuccuca

SEQ ID NO: 731669 - RNA, 19 nt, Artificial Sequence
  Description of Artificial Sequence: Synthetic oligonucleotide
gaccaccuuucuagaauau

SEQ ID NO: 731670 - RNA, 19 nt, Artificial Sequence
  Description of Artificial Sequence: Synthetic oligonucleotide
gcuucggcuguugaguggu

SEQ ID NO: 731671 - RNA, 19 nt, Artificial Sequence
  Description of Artificial Sequence: Synthetic oligonucleotide
caccuuuacccuucccuuu

SEQ ID NO: 731672 - RNA, 19 nt, Artificial Sequence
  Description of Artificial Sequence: Synthetic oligonucleotide
ggaauagaagcagccugau

SEQ ID NO: 731673 - RNA, 19 nt, Artificial Sequence
  Description of Artificial Sequence: Synthetic oligonucleotide
cugaggcauaucccaugcu

SEQ ID NO: 731674 - RNA, 19 nt, Artificial Sequence
  Description of Artificial Sequence: Synthetic oligonucleotide
gcauaaucuuagaaacuuu

SEQ ID NO: 731675 - RNA, 19 nt, Artificial Sequence
  Description of Artificial Sequence: Synthetic oligonucleotide
ggaccccuaccauguuguc

SEQ ID NO: 731676 - RNA, 19 nt, Artificial Sequence
  Description of Artificial Sequence: Synthetic oligonucleotide
acaccgggaccaggauuau

SEQ ID NO: 731677 - RNA, 19 nt, Artificial Sequence
  Description of Artificial Sequence: Synthetic oligonucleotide
gacccggugggugcacacu

SEQ ID NO: 731678 - RNA, 19 nt, Artificial Sequence
  Description of Artificial Sequence: Synthetic oligonucleotide
cgauccucaccuuuacccu

SEQ ID NO: 731679 - RNA, 19 nt, Artificial Sequence
  Description of Artificial Sequence: Synthetic oligonucleotide
cuacucuauuggugacaau

SEQ ID NO: 731680 - RNA, 19 nt, Artificial Sequence
  Description of Artificial Sequence: Synthetic oligonucleotide
gccaaccaucauucguagu

SEQ ID NO: 731681 - RNA, 19 nt, Artificial Sequence
  Description of Artificial Sequence: Synthetic oligonucleotide
gcacuauccccguccuggu

SEQ ID NO: 731682 - RNA, 19 nt, Artificial Sequence
  Description of Artificial Sequence: Synthetic oligonucleotide
gcucuacaagccucaccau

SEQ ID NO: 731683 - RNA, 19 nt, Artificial Sequence
  Description of Artificial Sequence: Synthetic oligonucleotide
ccgggaccaggauuaugaa

SEQ ID NO: 731684 - RNA, 19 nt, Artificial Sequence
  Description of Artificial Sequence: Synthetic oligonucleotide
gccacgcauaaaauucauu

SEQ ID NO: 731685 - RNA, 19 nt, Artificial Sequence
  Description of Artificial Sequence: Synthetic oligonucleotide
cuucggcuguugagugguu

SEQ ID NO: 731686 - RNA, 19 nt, Artificial Sequence
  Description of Artificial Sequence: Synthetic oligonucleotide
ccggaccacucacuauccu

SEQ ID NO: 731687 - RNA, 19 nt, Artificial Sequence
  Description of Artificial Sequence: Synthetic oligonucleotide
ccaccggaccacucacuau

SEQ ID NO: 731688 - RNA, 19 nt, Artificial Sequence
  Description of Artificial Sequence: Synthetic oligonucleotide
ccccuaccauguugucaaa

SEQ ID NO: 731689 - RNA, 19 nt, Artificial Sequence
  Description of Artificial Sequence: Synthetic oligonucleotide
aaaccauaacauuagcugc

SEQ ID NO: 731690 - RNA, 19 nt, Artificial Sequence
  Description of Artificial Sequence: Synthetic oligonucleotide
aauuccauuaacuaaagau

SEQ ID NO: 731691 - RNA, 19 nt, Artificial Sequence
  Description of Artificial Sequence: Synthetic oligonucleotide
auugacuagauccacuucc

SEQ ID NO: 731692 - RNA, 19 nt, Artificial Sequence
  Description of Artificial Sequence: Synthetic oligonucleotide
aaccccaagaauuauacag

SEQ ID NO: 731693 - RNA, 19 nt, Artificial Sequence
  Description of Artificial Sequence: Synthetic oligonucleotide
acuaaagaugguuaacccc

SEQ ID NO: 731694 - RNA, 19 nt, Artificial Sequence
  Description of Artificial Sequence: Synthetic oligonucleotide
uccauauacacacuuagug

SEQ ID NO: 731695 - RNA, 19 nt, Artificial Sequence
  Description of Artificial Sequence: Synthetic oligonucleotide
uaagcauuauacaucuugg

SEQ ID NO: 731696 - RNA, 19 nt, Artificial Sequence
  Description of Artificial Sequence: Synthetic oligonucleotide
uuaagguuugcccaaacug

SEQ ID NO: 731697 - RNA, 19 nt, Artificial Sequence
  Description of Artificial Sequence: Synthetic oligonucleotide
caauccauaagcauuauac

SEQ ID NO: 731698 - RNA, 19 nt, Artificial Sequence
  Description of Artificial Sequence: Synthetic oligonucleotide
uaauuuaugaugcacuccu

SEQ ID NO: 731699 - RNA, 19 nt, Artificial Sequence
  Description of Artificial Sequence: Synthetic oligonucleotide
aacgguuuggaacaucuuc

SEQ ID NO: 731700 - RNA, 19 nt, Artificial Sequence
  Description of Artificial Sequence: Synthetic oligonucleotide
aauacauuuagaacugcac

SEQ ID NO: 731701 - RNA, 19 nt, Artificial Sequence
  Description of Artificial Sequence: Synthetic oligonucleotide
ccuacaauugacuagaucc

SEQ ID NO: 731702 - RNA, 19 nt, Artificial Sequence
  Description of Artificial Sequence: Synthetic oligonucleotide
guagauaacauucuucacc

SEQ ID NO: 731703 - RNA, 19 nt, Artificial Sequence
  Description of Artificial Sequence: Synthetic oligonucleotide
agaaauuguacaauagccc

SEQ ID NO: 731704 - RNA, 19 nt, Artificial Sequence
  Description of Artificial Sequence: Synthetic oligonucleotide
aagugaagauuuguggucc

SEQ ID NO: 731705 - RNA, 19 nt, Artificial Sequence
  Description of Artificial Sequence: Synthetic oligonucleotide
uccuaugcaauacauuuag

SEQ ID NO: 731706 - RNA, 19 nt, Artificial Sequence
  Description of Artificial Sequence: Synthetic oligonucleotide
uuucaaacgguuuggaaca

SEQ ID NO: 731707 - RNA, 19 nt, Artificial Sequence
  Description of Artificial Sequence: Synthetic oligonucleotide
uaugaugcacuccugacac

SEQ ID NO: 731708 - RNA, 19 nt, Artificial Sequence
  Description of Artificial Sequence: Synthetic oligonucleotide
uauaccacuuaaaauuagc

SEQ ID NO: 731709 - RNA, 19 nt, Artificial Sequence
  Description of Artificial Sequence: Synthetic oligonucleotide
uacauuuagaacugcacca

SEQ ID NO: 731710 - RNA, 19 nt, Artificial Sequence
  Description of Artificial Sequence: Synthetic oligonucleotide
uuugacucuucacacaucu

SEQ ID NO: 731711 - RNA, 19 nt, Artificial Sequence
  Description of Artificial Sequence: Synthetic oligonucleotide
ugcuauauaaugccagucc

SEQ ID NO: 731712 - RNA, 19 nt, Artificial Sequence
  Description of Artificial Sequence: Synthetic oligonucleotide
uuaaccccaagaauuauac

SEQ ID NO: 731713 - RNA, 19 nt, Artificial Sequence
  Description of Artificial Sequence: Synthetic oligonucleotide
aauuauuguugcucacagg

SEQ ID NO: 731714 - RNA, 19 nt, Artificial Sequence
  Description of Artificial Sequence: Synthetic oligonucleotide
acuagaaauauacauuaga

SEQ ID NO: 731715 - RNA, 19 nt, Artificial Sequence
  Description of Artificial Sequence: Synthetic oligonucleotide
aauaacugcaaguauuguu

SEQ ID NO: 731716 - RNA, 19 nt, Artificial Sequence
  Description of Artificial Sequence: Synthetic oligonucleotide
uaggaauucccacauaaac

SEQ ID NO: 731717 - RNA, 19 nt, Artificial Sequence
  Description of Artificial Sequence: Synthetic oligonucleotide
cauuauacaucuuggggcc

SEQ ID NO: 731718 - RNA, 19 nt, Artificial Sequence
  Description of Artificial Sequence: Synthetic oligonucleotide
aaauccauuugaaugagcu

SEQ ID NO: 731719 - RNA, 19 nt, Artificial Sequence
  Description of Artificial Sequence: Synthetic oligonucleotide
aauaaaucgcuugauugug

SEQ ID NO: 731720 - RNA, 19 nt, Artificial Sequence
  Description of Artificial Sequence: Synthetic oligonucleotide
uaaagucuucuccuggcgg

SEQ ID NO: 731721 - RNA, 19 nt, Artificial Sequence
  Description of Artificial Sequence: Synthetic oligonucleotide
aggaauucccacauaaacc

SEQ ID NO: 731722 - RNA, 19 nt, Artificial Sequence
  Description of Artificial Sequence: Synthetic oligonucleotide
aauaacggaauuccugagu

SEQ ID NO: 731723 - RNA, 19 nt, Artificial Sequence
  Description of Artificial Sequence: Synthetic oligonucleotide
guaggcagcacccuguugg

SEQ ID NO: 731724 - RNA, 19 nt, Artificial Sequence
  Description of Artificial Sequence: Synthetic oligonucleotide
uauacauuagagacaguac

SEQ ID NO: 731725 - RNA, 19 nt, Artificial Sequence
  Description of Artificial Sequence: Synthetic oligonucleotide
uagugaucggucuaaauac

SEQ ID NO: 731726 - RNA, 19 nt, Artificial Sequence
  Description of Artificial Sequence: Synthetic oligonucleotide
uuuuaaggaauucucuuau

SEQ ID NO: 731727 - RNA, 19 nt, Artificial Sequence
  Description of Artificial Sequence: Synthetic oligonucleotide
gugaugauuucauuggucc

SEQ ID NO: 731728 - RNA, 19 nt, Artificial Sequence
  Description of Artificial Sequence: Synthetic oligonucleotide
aaauaacggaauuccugag

SEQ ID NO: 731729 - RNA, 19 nt, Artificial Sequence
  Description of Artificial Sequence: Synthetic oligonucleotide
ugcaaguauuguuucagag

SEQ ID NO: 731730 - RNA, 19 nt, Artificial Sequence
  Description of Artificial Sequence: Synthetic oligonucleotide
auagaaugcacaaugucuc

SEQ ID NO: 731731 - RNA, 19 nt, Artificial Sequence
  Description of Artificial Sequence: Synthetic oligonucleotide
gguugugucacauacauca

SEQ ID NO: 731732 - RNA, 19 nt, Artificial Sequence
  Description of Artificial Sequence: Synthetic oligonucleotide
uucugcuauauaaugccag

SEQ ID NO: 731733 - RNA, 19 nt, Artificial Sequence
  Description of Artificial Sequence: Synthetic oligonucleotide
cacaguauaaggaugcgug

SEQ ID NO: 731734 - RNA, 19 nt, Artificial Sequence
  Description of Artificial Sequence: Synthetic oligonucleotide
uuuaacaugcuccggggac

SEQ ID NO: 731735 - RNA, 19 nt, Artificial Sequence
  Description of Artificial Sequence: Synthetic oligonucleotide
ugaucaauccauaagcauu

SEQ ID NO: 731736 - RNA, 19 nt, Artificial Sequence
  Description of Artificial Sequence: Synthetic oligonucleotide
acuccauauacacacuuag

SEQ ID NO: 731737 - RNA, 19 nt, Artificial Sequence
  Description of Artificial Sequence: Synthetic oligonucleotide
gaugagguaacaugaaauc

SEQ ID NO: 731738 - RNA, 19 nt, Artificial Sequence
  Description of Artificial Sequence: Synthetic oligonucleotide
aguuaugaaccugaugugg

SEQ ID NO: 731739 - RNA, 19 nt, Artificial Sequence
  Description of Artificial Sequence: Synthetic oligonucleotide
agucacaguauaaggaugc

SEQ ID NO: 731740 - RNA, 19 nt, Artificial Sequence
  Description of Artificial Sequence: Synthetic oligonucleotide
aacggaauuccugaguaag

SEQ ID NO: 731741 - RNA, 19 nt, Artificial Sequence
  Description of Artificial Sequence: Synthetic oligonucleotide
aguccuaugcaauacauuu

SEQ ID NO: 731742 - RNA, 19 nt, Artificial Sequence
  Description of Artificial Sequence: Synthetic oligonucleotide
ugcgugguagauaacauuc

SEQ ID NO: 731743 - RNA, 19 nt, Artificial Sequence
  Description of Artificial Sequence: Synthetic oligonucleotide
uuaugaugcacuccugaca

SEQ ID NO: 731744 - RNA, 19 nt, Artificial Sequence
  Description of Artificial Sequence: Synthetic oligonucleotide
auuaacuaaagaugguuaa

SEQ ID NO: 731745 - RNA, 19 nt, Artificial Sequence
  Description of Artificial Sequence: Synthetic oligonucleotide
uaaaucgcuugauugugag

SEQ ID NO: 731746 - RNA, 19 nt, Artificial Sequence
  Description of Artificial Sequence: Synthetic oligonucleotide
acacuuagugucuguaaac

SEQ ID NO: 731747 - RNA, 19 nt, Artificial Sequence
  Description of Artificial Sequence: Synthetic oligonucleotide
gaggaguuaagguuugccc

SEQ ID NO: 731748 - RNA, 19 nt, Artificial Sequence
  Description of Artificial Sequence: Synthetic oligonucleotide
aucaucaaaucuagaaggc

SEQ ID NO: 731749 - RNA, 19 nt, Artificial Sequence
  Description of Artificial Sequence: Synthetic oligonucleotide
ucuggagugaucaauccau

SEQ ID NO: 731750 - RNA, 19 nt, Artificial Sequence
  Description of Artificial Sequence: Synthetic oligonucleotide
aaaguguggaggacugugc

SEQ ID NO: 731751 - RNA, 19 nt, Artificial Sequence
  Description of Artificial Sequence: Synthetic oligonucleotide
gaauuccugaguaagccag

SEQ ID NO: 731752 - RNA, 19 nt, Artificial Sequence
  Description of Artificial Sequence: Synthetic oligonucleotide
aagaauuauacaguaguua

SEQ ID NO: 731753 - RNA, 19 nt, Artificial Sequence
  Description of Artificial Sequence: Synthetic oligonucleotide
ucuugcucugauagaaugc

SEQ ID NO: 731754 - RNA, 19 nt, Artificial Sequence
  Description of Artificial Sequence: Synthetic oligonucleotide
uaucccaagagaaagucuu

SEQ ID NO: 731755 - RNA, 19 nt, Artificial Sequence
  Description of Artificial Sequence: Synthetic oligonucleotide
gaucggucuaaauaccagc

SEQ ID NO: 731756 - RNA, 19 nt, Artificial Sequence
  Description of Artificial Sequence: Synthetic oligonucleotide
gcuguuaaaaguguggagg

SEQ ID NO: 731757 - RNA, 19 nt, Artificial Sequence
  Description of Artificial Sequence: Synthetic oligonucleotide
ugcaucagauacaucuaag

SEQ ID NO: 731758 - RNA, 19 nt, Artificial Sequence
  Description of Artificial Sequence: Synthetic oligonucleotide
uuaucuucaugguugguau

SEQ ID NO: 731759 - RNA, 19 nt, Artificial Sequence
  Description of Artificial Sequence: Synthetic oligonucleotide
uaagugaagauuugugguc

SEQ ID NO: 731760 - RNA, 19 nt, Artificial Sequence
  Description of Artificial Sequence: Synthetic oligonucleotide
ugaucggucuaaauaccag

SEQ ID NO: 731761 - RNA, 19 nt, Artificial Sequence
  Description of Artificial Sequence: Synthetic oligonucleotide
caaauaacggaauuccuga

SEQ ID NO: 731762 - RNA, 19 nt, Artificial Sequence
  Description of Artificial Sequence: Synthetic oligonucleotide
ugaucagcugccaauaauu

SEQ ID NO: 731763 - RNA, 19 nt, Artificial Sequence
  Description of Artificial Sequence: Synthetic oligonucleotide
uagcagugaucccuaauag

SEQ ID NO: 731764 - RNA, 19 nt, Artificial Sequence
  Description of Artificial Sequence: Synthetic oligonucleotide
cuaugcaauacauuuagaa

SEQ ID NO: 731765 - RNA, 19 nt, Artificial Sequence
  Description of Artificial Sequence: Synthetic oligonucleotide
acuaggugaagucacagua

SEQ ID NO: 731766 - RNA, 19 nt, Artificial Sequence
  Description of Artificial Sequence: Synthetic oligonucleotide
caguguuuaacaugcuccg

SEQ ID NO: 731767 - RNA, 19 nt, Artificial Sequence
  Description of Artificial Sequence: Synthetic oligonucleotide
agugaagauuugugguccc

SEQ ID NO: 731768 - RNA, 19 nt, Artificial Sequence
  Description of Artificial Sequence: Synthetic oligonucleotide
ugcaauuuaucuucauggu

SEQ ID NO: 731769 - RNA, 19 nt, Artificial Sequence
  Description of Artificial Sequence: Synthetic oligonucleotide
uauuuugacucuucacaca

SEQ ID NO: 731770 - RNA, 19 nt, Artificial Sequence
  Description of Artificial Sequence: Synthetic oligonucleotide
uauauaaugccaguccuau

SEQ ID NO: 731771 - RNA, 19 nt, Artificial Sequence
  Description of Artificial Sequence: Synthetic oligonucleotide
acaaauaacggaauuccug

SEQ ID NO: 731772 - RNA, 19 nt, Artificial Sequence
  Description of Artificial Sequence: Synthetic oligonucleotide
uguaaauaguuacuccaua

SEQ ID NO: 731773 - RNA, 19 nt, Artificial Sequence
  Description of Artificial Sequence: Synthetic oligonucleotide
agaggaguuaagguuugcc

SEQ ID NO: 731774 - RNA, 19 nt, Artificial Sequence
  Description of Artificial Sequence: Synthetic oligonucleotide
auauaugugccagagggcu

SEQ ID NO: 731775 - RNA, 19 nt, Artificial Sequence
  Description of Artificial Sequence: Synthetic oligonucleotide
uuguggucccauauuuccg

SEQ ID NO: 731776 - RNA, 19 nt, Artificial Sequence
  Description of Artificial Sequence: Synthetic oligonucleotide
auauuuccgaucuucugga

SEQ ID NO: 731777 - RNA, 19 nt, Artificial Sequence
  Description of Artificial Sequence: Synthetic oligonucleotide
aucuagaaggcaucauauc

SEQ ID NO: 731778 - RNA, 19 nt, Artificial Sequence
  Description of Artificial Sequence: Synthetic oligonucleotide
auaacggaauuccugagua

SEQ ID NO: 731779 - RNA, 19 nt, Artificial Sequence
  Description of Artificial Sequence: Synthetic oligonucleotide
gcuguauaaguuaugaacc

SEQ ID NO: 731780 - RNA, 19 nt, Artificial Sequence
  Description of Artificial Sequence: Synthetic oligonucleotide
ucgggcaguggaauguugg

SEQ ID NO: 731781 - RNA, 19 nt, Artificial Sequence
  Description of Artificial Sequence: Synthetic oligonucleotide
caguccuuaaguuucaaca

SEQ ID NO: 731782 - RNA, 19 nt, Artificial Sequence
  Description of Artificial Sequence: Synthetic oligonucleotide
agaugguuaaccccaagaa

SEQ ID NO: 731783 - RNA, 19 nt, Artificial Sequence
  Description of Artificial Sequence: Synthetic oligonucleotide
uuucugcuauauaaugcca

SEQ ID NO: 731784 - RNA, 19 nt, Artificial Sequence
  Description of Artificial Sequence: Synthetic oligonucleotide
uaaaggcgcuuucuuagug

SEQ ID NO: 731785 - RNA, 19 nt, Artificial Sequence
  Description of Artificial Sequence: Synthetic oligonucleotide
augguugugucacauacau

SEQ ID NO: 731786 - RNA, 19 nt, Artificial Sequence
  Description of Artificial Sequence: Synthetic oligonucleotide
ucaguuugccaucucgccu

SEQ ID NO: 731787 - RNA, 19 nt, Artificial Sequence
  Description of Artificial Sequence: Synthetic oligonucleotide
cuaaagucuucuccuggcg

SEQ ID NO: 731788 - RNA, 19 nt, Artificial Sequence
  Description of Artificial Sequence: Synthetic oligonucleotide
ugagucugugacaaauaac

SEQ ID NO: 731789 - RNA, 19 nt, Artificial Sequence
  Description of Artificial Sequence: Synthetic oligonucleotide
uggucuguaaauaguuacu

SEQ ID NO: 731790 - RNA, 19 nt, Artificial Sequence
  Description of Artificial Sequence: Synthetic oligonucleotide
aguuaagguuugcccaaac

SEQ ID NO: 731791 - RNA, 19 nt, Artificial Sequence
  Description of Artificial Sequence: Synthetic oligonucleotide
caucauaucucuaaagucu

SEQ ID NO: 731792 - RNA, 19 nt, Artificial Sequence
  Description of Artificial Sequence: Synthetic oligonucleotide
agugaucccuaauaguuaa

SEQ ID NO: 731793 - RNA, 19 nt, Artificial Sequence
  Description of Artificial Sequence: Synthetic oligonucleotide
ggcgcuuucuuagugaucg

SEQ ID NO: 731794 - RNA, 19 nt, Artificial Sequence
  Description of Artificial Sequence: Synthetic oligonucleotide
ucugaccggcauaaaauaa

SEQ ID NO: 731795 - RNA, 19 nt, Artificial Sequence
  Description of Artificial Sequence: Synthetic oligonucleotide
auaacugcaaguauuguuu

SEQ ID NO: 731796 - RNA, 19 nt, Artificial Sequence
  Description of Artificial Sequence: Synthetic oligonucleotide
uccauuaacuaaagauggu

SEQ ID NO: 731797 - RNA, 19 nt, Artificial Sequence
  Description of Artificial Sequence: Synthetic oligonucleotide
ucaggcucauguauuuuga

SEQ ID NO: 731798 - RNA, 19 nt, Artificial Sequence
  Description of Artificial Sequence: Synthetic oligonucleotide
aaccauaacauuagcugca

SEQ ID NO: 731799 - RNA, 19 nt, Artificial Sequence
  Description of Artificial Sequence: Synthetic oligonucleotide
uugacuagauccacuuccu

SEQ ID NO: 731800 - RNA, 19 nt, Artificial Sequence
  Description of Artificial Sequence: Synthetic oligonucleotide
cagucuagaggccagguuc

SEQ ID NO: 731801 - RNA, 19 nt, Artificial Sequence
  Description of Artificial Sequence: Synthetic oligonucleotide
uuaggaauucccacauaaa

SEQ ID NO: 731802 - RNA, 19 nt, Artificial Sequence
  Description of Artificial Sequence: Synthetic oligonucleotide
guaguuuggcagucuagag

SEQ ID NO: 731803 - RNA, 19 nt, Artificial Sequence
  Description of Artificial Sequence: Synthetic oligonucleotide
gucaaaauugugcuguuaa

SEQ ID NO: 731804 - RNA, 19 nt, Artificial Sequence
  Description of Artificial Sequence: Synthetic oligonucleotide
ggagugaucaauccauaag

SEQ ID NO: 731805 - RNA, 19 nt, Artificial Sequence
  Description of Artificial Sequence: Synthetic oligonucleotide
ucauccgguagcaauccac

SEQ ID NO: 731806 - RNA, 19 nt, Artificial Sequence
  Description of Artificial Sequence: Synthetic oligonucleotide
gaguucaguauuuaauuua

SEQ ID NO: 731807 - RNA, 19 nt, Artificial Sequence
  Description of Artificial Sequence: Synthetic oligonucleotide
agaguucaguauuuaauuu

SEQ ID NO: 731808 - RNA, 19 nt, Artificial Sequence
  Description of Artificial Sequence: Synthetic oligonucleotide
aguaguuuggcagucuaga

SEQ ID NO: 731809 - RNA, 19 nt, Artificial Sequence
  Description of Artificial Sequence: Synthetic oligonucleotide
aguuugaucagcugccaau

SEQ ID NO: 731810 - RNA, 19 nt, Artificial Sequence
  Description of Artificial Sequence: Synthetic oligonucleotide
augguuaaccccaagaauu

SEQ ID NO: 731811 - RNA, 19 nt, Artificial Sequence
  Description of Artificial Sequence: Synthetic oligonucleotide
augauuucauugguccuac

SEQ ID NO: 731812 - RNA, 19 nt, Artificial Sequence
  Description of Artificial Sequence: Synthetic oligonucleotide
augagguaacaugaaaucu

SEQ ID NO: 731813 - RNA, 19 nt, Artificial Sequence
  Description of Artificial Sequence: Synthetic oligonucleotide
cuuaucccaagagaaaguc

SEQ ID NO: 731814 - RNA, 19 nt, Artificial Sequence
  Description of Artificial Sequence: Synthetic oligonucleotide
auuauacaucuuggggccc

SEQ ID NO: 731815 - RNA, 19 nt, Artificial Sequence
  Description of Artificial Sequence: Synthetic oligonucleotide
uuugaaugagcuguccaaa

SEQ ID NO: 731816 - RNA, 19 nt, Artificial Sequence
  Description of Artificial Sequence: Synthetic oligonucleotide
ugggaucguggucugcagg

SEQ ID NO: 731817 - RNA, 19 nt, Artificial Sequence
  Description of Artificial Sequence: Synthetic oligonucleotide
ugguaugagucugugacaa

SEQ ID NO: 731818 - RNA, 19 nt, Artificial Sequence
  Description of Artificial Sequence: Synthetic oligonucleotide
agaaagucuuguaggcagc

SEQ ID NO: 731819 - RNA, 19 nt, Artificial Sequence
  Description of Artificial Sequence: Synthetic oligonucleotide
ugaucccuaauaguuaaaa

SEQ ID NO: 731820 - RNA, 19 nt, Artificial Sequence
  Description of Artificial Sequence: Synthetic oligonucleotide
agaugagguaacaugaaau

SEQ ID NO: 731821 - RNA, 19 nt, Artificial Sequence
  Description of Artificial Sequence: Synthetic oligonucleotide
ggccguacaaaguaguuug

SEQ ID NO: 731822 - RNA, 19 nt, Artificial Sequence
  Description of Artificial Sequence: Synthetic oligonucleotide
uagauccacuuccugcuca

SEQ ID NO: 731823 - RNA, 19 nt, Artificial Sequence
  Description of Artificial Sequence: Synthetic oligonucleotide
auaccacuuaaaauuagca

SEQ ID NO: 731824 - RNA, 19 nt, Artificial Sequence
  Description of Artificial Sequence: Synthetic oligonucleotide
cagaagucuccuacugugg

SEQ ID NO: 731825 - RNA, 19 nt, Artificial Sequence
  Description of Artificial Sequence: Synthetic oligonucleotide
uggggaauaacugcaagua

SEQ ID NO: 731826 - RNA, 19 nt, Artificial Sequence
  Description of Artificial Sequence: Synthetic oligonucleotide
aaaaugguugugucacaua

SEQ ID NO: 731827 - RNA, 19 nt, Artificial Sequence
  Description of Artificial Sequence: Synthetic oligonucleotide
ugcguggucuguaaauagu

SEQ ID NO: 731828 - RNA, 19 nt, Artificial Sequence
  Description of Artificial Sequence: Synthetic oligonucleotide
uaugagucugugacaaaua

SEQ ID NO: 731829 - RNA, 19 nt, Artificial Sequence
  Description of Artificial Sequence: Synthetic oligonucleotide
aaggcgcuuucuuagugau

SEQ ID NO: 731830 - RNA, 19 nt, Artificial Sequence
  Description of Artificial Sequence: Synthetic oligonucleotide
augcguggucuguaaauag

SEQ ID NO: 731831 - RNA, 19 nt, Artificial Sequence
  Description of Artificial Sequence: Synthetic oligonucleotide
cuguuaaaaguguggagga

SEQ ID NO: 731832 - RNA, 19 nt, Artificial Sequence
  Description of Artificial Sequence: Synthetic oligonucleotide
uuugaucagcugccaauaa

SEQ ID NO: 731833 - RNA, 19 nt, Artificial Sequence
  Description of Artificial Sequence: Synthetic oligonucleotide
auaaugccaguccuaugca

SEQ ID NO: 731834 - RNA, 19 nt, Artificial Sequence
  Description of Artificial Sequence: Synthetic oligonucleotide
uuuagcagugaucccuaau

SEQ ID NO: 731835 - RNA, 19 nt, Artificial Sequence
  Description of Artificial Sequence: Synthetic oligonucleotide
uuaacaugcuccggggaca

SEQ ID NO: 731836 - RNA, 19 nt, Artificial Sequence
  Description of Artificial Sequence: Synthetic oligonucleotide
gcaguguuuaacaugcucc

SEQ ID NO: 731837 - RNA, 19 nt, Artificial Sequence
  Description of Artificial Sequence: Synthetic oligonucleotide
aguucaguauuuaauuuau

SEQ ID NO: 731838 - RNA, 19 nt, Artificial Sequence
  Description of Artificial Sequence: Synthetic oligonucleotide
uugaaugagcuguccaaau

SEQ ID NO: 731839 - RNA, 19 nt, Artificial Sequence
  Description of Artificial Sequence: Synthetic oligonucleotide
aguguuuaacaugcuccgg

SEQ ID NO: 731840 - RNA, 19 nt, Artificial Sequence
  Description of Artificial Sequence: Synthetic oligonucleotide
acggaauuccugaguaagc

SEQ ID NO: 731841 - RNA, 19 nt, Artificial Sequence
  Description of Artificial Sequence: Synthetic oligonucleotide
auaaaggcgcuuucuuagu

SEQ ID NO: 731842 - RNA, 19 nt, Artificial Sequence
  Description of Artificial Sequence: Synthetic oligonucleotide
uauuuccgaucuucuggag

SEQ ID NO: 731843 - RNA, 19 nt, Artificial Sequence
  Description of Artificial Sequence: Synthetic oligonucleotide
ugacuagauccacuuccug

SEQ ID NO: 731844 - RNA, 19 nt, Artificial Sequence
  Description of Artificial Sequence: Synthetic oligonucleotide
acauuagagacaguacccu

SEQ ID NO: 731845 - RNA, 19 nt, Artificial Sequence
  Description of Artificial Sequence: Synthetic oligonucleotide
guauuuaauuuaugaugca

SEQ ID NO: 731846 - RNA, 19 nt, Artificial Sequence
  Description of Artificial Sequence: Synthetic oligonucleotide
gacuuguucagaggggccc

SEQ ID NO: 731847 - RNA, 19 nt, Artificial Sequence
  Description of Artificial Sequence: Synthetic oligonucleotide
uacucuugauaaaggcgcu

SEQ ID NO: 731848 - RNA, 19 nt, Artificial Sequence
  Description of Artificial Sequence: Synthetic oligonucleotide
aaguaguuuggcagucuag

SEQ ID NO: 731849 - RNA, 19 nt, Artificial Sequence
  Description of Artificial Sequence: Synthetic oligonucleotide
uccuacaauugacuagauc

SEQ ID NO: 731850 - RNA, 19 nt, Artificial Sequence
  Description of Artificial Sequence: Synthetic oligonucleotide
auauaaugccaguccuaug

SEQ ID NO: 731851 - RNA, 19 nt, Artificial Sequence
  Description of Artificial Sequence: Synthetic oligonucleotide
ucaauccauaagcauuaua

SEQ ID NO: 731852 - RNA, 19 nt, Artificial Sequence
  Description of Artificial Sequence: Synthetic oligonucleotide
cuggacuuguucagagggg

SEQ ID NO: 731853 - RNA, 19 nt, Artificial Sequence
  Description of Artificial Sequence: Synthetic oligonucleotide
guaaauaguuacuccauau

SEQ ID NO: 731854 - RNA, 19 nt, Artificial Sequence
  Description of Artificial Sequence: Synthetic oligonucleotide
uguuaaaaguguggaggac

SEQ ID NO: 731855 - RNA, 19 nt, Artificial Sequence
  Description of Artificial Sequence: Synthetic oligonucleotide
cucacacuguccuuuagga

SEQ ID NO: 731856 - RNA, 19 nt, Artificial Sequence
  Description of Artificial Sequence: Synthetic oligonucleotide
aucgcuugauugugaguuc

SEQ ID NO: 731857 - RNA, 19 nt, Artificial Sequence
  Description of Artificial Sequence: Synthetic oligonucleotide
ucucgccugguguacucgg

SEQ ID NO: 731858 - RNA, 19 nt, Artificial Sequence
  Description of Artificial Sequence: Synthetic oligonucleotide
aaugguugugucacauaca

SEQ ID NO: 731859 - RNA, 19 nt, Artificial Sequence
  Description of Artificial Sequence: Synthetic oligonucleotide
acccuugcaaguugggugu

SEQ ID NO: 731860 - RNA, 19 nt, Artificial Sequence
  Description of Artificial Sequence: Synthetic oligonucleotide
guuaugaaccugaugugga

SEQ ID NO: 731861 - RNA, 19 nt, Artificial Sequence
  Description of Artificial Sequence: Synthetic oligonucleotide
acuuugaugcagcuguaua

SEQ ID NO: 731862 - RNA, 19 nt, Artificial Sequence
  Description of Artificial Sequence: Synthetic oligonucleotide
cgggauaaauaccacaucc

SEQ ID NO: 731863 - RNA, 19 nt, Artificial Sequence
  Description of Artificial Sequence: Synthetic oligonucleotide
ugcagcuguauaaguuaug

SEQ ID NO: 731864 - RNA, 19 nt, Artificial Sequence
  Description of Artificial Sequence: Synthetic oligonucleotide
acccagugcagguugaaaa

SEQ ID NO: 731865 - RNA, 19 nt, Artificial Sequence
  Description of Artificial Sequence: Synthetic oligonucleotide
caguacccuugcaaguugg

SEQ ID NO: 731866 - RNA, 19 nt, Artificial Sequence
  Description of Artificial Sequence: Synthetic oligonucleotide
gggaucguggucugcaggg

SEQ ID NO: 731867 - RNA, 19 nt, Artificial Sequence
  Description of Artificial Sequence: Synthetic oligonucleotide
gaugguuaaccccaagaau

SEQ ID NO: 731868 - RNA, 19 nt, Artificial Sequence
  Description of Artificial Sequence: Synthetic oligonucleotide
ucggucuaaauaccagcuc

SEQ ID NO: 731869 - RNA, 19 nt, Artificial Sequence
  Description of Artificial Sequence: Synthetic oligonucleotide
cagcauauaugugccagag

SEQ ID NO: 731870 - RNA, 19 nt, Artificial Sequence
  Description of Artificial Sequence: Synthetic oligonucleotide
agguugaaaaugguugugu

SEQ ID NO: 731871 - RNA, 19 nt, Artificial Sequence
  Description of Artificial Sequence: Synthetic oligonucleotide
cagcucugaucaugaaugg

SEQ ID NO: 731872 - RNA, 19 nt, Artificial Sequence
  Description of Artificial Sequence: Synthetic oligonucleotide
agcugccaauaauucaucu

SEQ ID NO: 731873 - RNA, 19 nt, Artificial Sequence
  Description of Artificial Sequence: Synthetic oligonucleotide
cuagguagaagagcugcac

SEQ ID NO: 731874 - RNA, 19 nt, Artificial Sequence
  Description of Artificial Sequence: Synthetic oligonucleotide
uuuugacucuucacacauc

SEQ ID NO: 731875 - RNA, 19 nt, Artificial Sequence
  Description of Artificial Sequence: Synthetic oligonucleotide
aucggucuaaauaccagcu

SEQ ID NO: 731876 - RNA, 19 nt, Artificial Sequence
  Description of Artificial Sequence: Synthetic oligonucleotide
acgguuuggaacaucuuca

SEQ ID NO: 731877 - RNA, 19 nt, Artificial Sequence
  Description of Artificial Sequence: Synthetic oligonucleotide
ugaaugggaucguggucug

SEQ ID NO: 731878 - RNA, 19 nt, Artificial Sequence
  Description of Artificial Sequence: Synthetic oligonucleotide
auugugaguucaucagaau

SEQ ID NO: 731879 - RNA, 19 nt, Artificial Sequence
  Description of Artificial Sequence: Synthetic oligonucleotide
cuugcucugauagaaugca

SEQ ID NO: 731880 - RNA, 19 nt, Artificial Sequence
  Description of Artificial Sequence: Synthetic oligonucleotide
cuucauccgguagcaaucc

SEQ ID NO: 731881 - RNA, 19 nt, Artificial Sequence
  Description of Artificial Sequence: Synthetic oligonucleotide
uccggccguacaaaguagu

SEQ ID NO: 731882 - RNA, 19 nt, Artificial Sequence
  Description of Artificial Sequence: Synthetic oligonucleotide
agccgggauaaauaccaca

SEQ ID NO: 731883 - RNA, 19 nt, Artificial Sequence
  Description of Artificial Sequence: Synthetic oligonucleotide
uaacggaauuccugaguaa

SEQ ID NO: 731884 - RNA, 19 nt, Artificial Sequence
  Description of Artificial Sequence: Synthetic oligonucleotide
acacacuuagugucuguaa

SEQ ID NO: 731885 - RNA, 19 nt, Artificial Sequence
  Description of Artificial Sequence: Synthetic oligonucleotide
ucgcuugauugugaguuca

SEQ ID NO: 731886 - RNA, 19 nt, Artificial Sequence
  Description of Artificial Sequence: Synthetic oligonucleotide
cuuucuuagugaucggucu

SEQ ID NO: 731887 - RNA, 19 nt, Artificial Sequence
  Description of Artificial Sequence: Synthetic oligonucleotide
caaacgguuuggaacaucu

SEQ ID NO: 731888 - RNA, 19 nt, Artificial Sequence
  Description of Artificial Sequence: Synthetic oligonucleotide
aguaguuauuucugcuaua

SEQ ID NO: 731889 - RNA, 19 nt, Artificial Sequence
  Description of Artificial Sequence: Synthetic oligonucleotide
auaaaucgcuugauuguga

SEQ ID NO: 731890 - RNA, 19 nt, Artificial Sequence
  Description of Artificial Sequence: Synthetic oligonucleotide
uuugcccaaacuggcuuca

SEQ ID NO: 731891 - RNA, 19 nt, Artificial Sequence
  Description of Artificial Sequence: Synthetic oligonucleotide
cacacuuagugucuguaaa

SEQ ID NO: 731892 - RNA, 19 nt, Artificial Sequence
  Description of Artificial Sequence: Synthetic oligonucleotide
cuauauaaugccaguccua

SEQ ID NO: 731893 - RNA, 19 nt, Artificial Sequence
  Description of Artificial Sequence: Synthetic oligonucleotide
ccgguagcaauccacacac

SEQ ID NO: 731894 - RNA, 19 nt, Artificial Sequence
  Description of Artificial Sequence: Synthetic oligonucleotide
accccaagaauuauacagu

SEQ ID NO: 731895 - RNA, 19 nt, Artificial Sequence
  Description of Artificial Sequence: Synthetic oligonucleotide
cauccgguagcaauccaca

SEQ ID NO: 731896 - RNA, 19 nt, Artificial Sequence
  Description of Artificial Sequence: Synthetic oligonucleotide
guuaagguuugcccaaacu

SEQ ID NO: 731897 - RNA, 19 nt, Artificial Sequence
  Description of Artificial Sequence: Synthetic oligonucleotide
guuugcccaaacuggcuuc

SEQ ID NO: 731898 - RNA, 19 nt, Artificial Sequence
  Description of Artificial Sequence: Synthetic oligonucleotide
cuguauaaguuaugaaccu

SEQ ID NO: 731899 - RNA, 19 nt, Artificial Sequence
  Description of Artificial Sequence: Synthetic oligonucleotide
ccaacaggucuucagcuag

SEQ ID NO: 731900 - RNA, 19 nt, Artificial Sequence
  Description of Artificial Sequence: Synthetic oligonucleotide
cugcuauauaaugccaguc

SEQ ID NO: 731901 - RNA, 19 nt, Artificial Sequence
  Description of Artificial Sequence: Synthetic oligonucleotide
uacucgggcaguggaaugu

SEQ ID NO: 731902 - RNA, 19 nt, Artificial Sequence
  Description of Artificial Sequence: Synthetic oligonucleotide
auaaggaugcguggucugu

SEQ ID NO: 731903 - RNA, 19 nt, Artificial Sequence
  Description of Artificial Sequence: Synthetic oligonucleotide
auacacacuuagugucugu

SEQ ID NO: 731904 - RNA, 19 nt, Artificial Sequence
  Description of Artificial Sequence: Synthetic oligonucleotide
gaugcguggucuguaaaua

SEQ ID NO: 731905 - RNA, 19 nt, Artificial Sequence
  Description of Artificial Sequence: Synthetic oligonucleotide
guaguuauuucugcuauau

SEQ ID NO: 731906 - RNA, 19 nt, Artificial Sequence
  Description of Artificial Sequence: Synthetic oligonucleotide
cagaguucaguauuuaauu

SEQ ID NO: 731907 - RNA, 19 nt, Artificial Sequence
  Description of Artificial Sequence: Synthetic oligonucleotide
ugaucaugaaugggaucgu

SEQ ID NO: 731908 - RNA, 19 nt, Artificial Sequence
  Description of Artificial Sequence: Synthetic oligonucleotide
ugguugugucacauacauc

SEQ ID NO: 731909 - RNA, 19 nt, Artificial Sequence
  Description of Artificial Sequence: Synthetic oligonucleotide
auaccagcucugaucauga

SEQ ID NO: 731910 - RNA, 19 nt, Artificial Sequence
  Description of Artificial Sequence: Synthetic oligonucleotide
agucuagaggccagguuca

SEQ ID NO: 731911 - RNA, 19 nt, Artificial Sequence
  Description of Artificial Sequence: Synthetic oligonucleotide
uaacaugcuccggggacac

SEQ ID NO: 731912 - RNA, 19 nt, Artificial Sequence
  Description of Artificial Sequence: Synthetic oligonucleotide
cacugcgugguagauaaca

SEQ ID NO: 731913 - RNA, 19 nt, Artificial Sequence
  Description of Artificial Sequence: Synthetic oligonucleotide
cuggcggccaguccuuaag

SEQ ID NO: 731914 - RNA, 19 nt, Artificial Sequence
  Description of Artificial Sequence: Synthetic oligonucleotide
gugaucaauccauaagcau

SEQ ID NO: 731915 - RNA, 19 nt, Artificial Sequence
  Description of Artificial Sequence: Synthetic oligonucleotide
guacucgggcaguggaaug

SEQ ID NO: 731916 - RNA, 19 nt, Artificial Sequence
  Description of Artificial Sequence: Synthetic oligonucleotide
cucugaccggcauaaaaua

SEQ ID NO: 731917 - RNA, 19 nt, Artificial Sequence
  Description of Artificial Sequence: Synthetic oligonucleotide
cucgccugguguacucggg

SEQ ID NO: 731918 - RNA, 19 nt, Artificial Sequence
  Description of Artificial Sequence: Synthetic oligonucleotide
ucuuagugaucggucuaaa

SEQ ID NO: 731919 - RNA, 19 nt, Artificial Sequence
  Description of Artificial Sequence: Synthetic oligonucleotide
ggucuaaauaccagcucug

SEQ ID NO: 731920 - RNA, 19 nt, Artificial Sequence
  Description of Artificial Sequence: Synthetic oligonucleotide
cagcuggggaauaacugca

SEQ ID NO: 731921 - RNA, 19 nt, Artificial Sequence
  Description of Artificial Sequence: Synthetic oligonucleotide
ucuagaggccagguucagu

SEQ ID NO: 731922 - RNA, 19 nt, Artificial Sequence
  Description of Artificial Sequence: Synthetic oligonucleotide
ugcucacaggugucaaaau

SEQ ID NO: 731923 - RNA, 19 nt, Artificial Sequence
  Description of Artificial Sequence: Synthetic oligonucleotide
guaugagucugugacaaau

SEQ ID NO: 731924 - RNA, 19 nt, Artificial Sequence
  Description of Artificial Sequence: Synthetic oligonucleotide
ggaguuaagguuugcccaa

SEQ ID NO: 731925 - RNA, 19 nt, Artificial Sequence
  Description of Artificial Sequence: Synthetic oligonucleotide
acaugcuccggggacacaa

SEQ ID NO: 731926 - RNA, 19 nt, Artificial Sequence
  Description of Artificial Sequence: Synthetic oligonucleotide
ucaaacgguuuggaacauc

SEQ ID NO: 731927 - RNA, 19 nt, Artificial Sequence
  Description of Artificial Sequence: Synthetic oligonucleotide
cugcaaguauuguuucaga

SEQ ID NO: 731928 - RNA, 19 nt, Artificial Sequence
  Description of Artificial Sequence: Synthetic oligonucleotide
caauugacuagauccacuu

SEQ ID NO: 731929 - RNA, 19 nt, Artificial Sequence
  Description of Artificial Sequence: Synthetic oligonucleotide
uaaggaugcguggucugua

SEQ ID NO: 731930 - RNA, 19 nt, Artificial Sequence
  Description of Artificial Sequence: Synthetic oligonucleotide
aucucgccugguguacucg

SEQ ID NO: 731931 - RNA, 19 nt, Artificial Sequence
  Description of Artificial Sequence: Synthetic oligonucleotide
cuguaaauaguuacuccau

SEQ ID NO: 731932 - RNA, 19 nt, Artificial Sequence
  Description of Artificial Sequence: Synthetic oligonucleotide
gagaggaguuaagguuugc

SEQ ID NO: 731933 - RNA, 19 nt, Artificial Sequence
  Description of Artificial Sequence: Synthetic oligonucleotide
cuggggaauaacugcaagu

SEQ ID NO: 731934 - RNA, 19 nt, Artificial Sequence
  Description of Artificial Sequence: Synthetic oligonucleotide
aucccaagagaaagucuug

SEQ ID NO: 731935 - RNA, 19 nt, Artificial Sequence
  Description of Artificial Sequence: Synthetic oligonucleotide
acugcgugguagauaacau

SEQ ID NO: 731936 - RNA, 19 nt, Artificial Sequence
  Description of Artificial Sequence: Synthetic oligonucleotide
uggcugucauuuccuccac

SEQ ID NO: 731937 - RNA, 19 nt, Artificial Sequence
  Description of Artificial Sequence: Synthetic oligonucleotide
cagugaucccuaauaguua

SEQ ID NO: 731938 - RNA, 19 nt, Artificial Sequence
  Description of Artificial Sequence: Synthetic oligonucleotide
cucggguuuccagaguuca

SEQ ID NO: 731939 - RNA, 19 nt, Artificial Sequence
  Description of Artificial Sequence: Synthetic oligonucleotide
gcaaguuggguguacuuua

SEQ ID NO: 731940 - RNA, 19 nt, Artificial Sequence
  Description of Artificial Sequence: Synthetic oligonucleotide
caaguuggguguacuuuaa

SEQ ID NO: 731941 - RNA, 19 nt, Artificial Sequence
  Description of Artificial Sequence: Synthetic oligonucleotide
cagcuagguagaagagcug

SEQ ID NO: 731942 - RNA, 19 nt, Artificial Sequence
  Description of Artificial Sequence: Synthetic oligonucleotide
uucaaacgguuuggaacau

SEQ ID NO: 731943 - RNA, 19 nt, Artificial Sequence
  Description of Artificial Sequence: Synthetic oligonucleotide
caguaguuauuucugcuau

SEQ ID NO: 731944 - RNA, 19 nt, Artificial Sequence
  Description of Artificial Sequence: Synthetic oligonucleotide
cucgggcaguggaauguug

SEQ ID NO: 731945 - RNA, 19 nt, Artificial Sequence
  Description of Artificial Sequence: Synthetic oligonucleotide
gacucggguuuccagaguu

SEQ ID NO: 731946 - RNA, 19 nt, Artificial Sequence
  Description of Artificial Sequence: Synthetic oligonucleotide
caucucgccugguguacuc

SEQ ID NO: 731947 - RNA, 19 nt, Artificial Sequence
  Description of Artificial Sequence: Synthetic oligonucleotide
aaacgguuuggaacaucuu

SEQ ID NO: 731948 - RNA, 19 nt, Artificial Sequence
  Description of Artificial Sequence: Synthetic oligonucleotide
cagcuguauaaguuaugaa

SEQ ID NO: 731949 - RNA, 19 nt, Artificial Sequence
  Description of Artificial Sequence: Synthetic oligonucleotide
uuccgaucuucuggaguga

SEQ ID NO: 731950 - RNA, 19 nt, Artificial Sequence
  Description of Artificial Sequence: Synthetic oligonucleotide
agcuccagccgggauaaau

SEQ ID NO: 731951 - RNA, 19 nt, Artificial Sequence
  Description of Artificial Sequence: Synthetic oligonucleotide
ucuuggggcccagguccgg

SEQ ID NO: 731952 - RNA, 19 nt, Artificial Sequence
  Description of Artificial Sequence: Synthetic oligonucleotide
cacaucgagggcacaccca

SEQ ID NO: 731953 - RNA, 19 nt, Artificial Sequence
  Description of Artificial Sequence: Synthetic oligonucleotide
gguccggccguacaaagua

SEQ ID NO: 731954 - RNA, 19 nt, Artificial Sequence
  Description of Artificial Sequence: Synthetic oligonucleotide
gacaguacccuugcaaguu

SEQ ID NO: 731955 - RNA, 19 nt, Artificial Sequence
  Description of Artificial Sequence: Synthetic oligonucleotide
aggugaagucacaguauaa

SEQ ID NO: 731956 - RNA, 19 nt, Artificial Sequence
  Description of Artificial Sequence: Synthetic oligonucleotide
cuuagugaucggucuaaau

SEQ ID NO: 731957 - RNA, 19 nt, Artificial Sequence
  Description of Artificial Sequence: Synthetic oligonucleotide
ccacaucgagggcacaccc

SEQ ID NO: 731958 - RNA, 19 nt, Artificial Sequence
  Description of Artificial Sequence: Synthetic oligonucleotide
gcugcacuaggugaaguca

SEQ ID NO: 731959 - RNA, 19 nt, Artificial Sequence
  Description of Artificial Sequence: Synthetic oligonucleotide
cagccgggauaaauaccac

SEQ ID NO: 731960 - RNA, 19 nt, Artificial Sequence
  Description of Artificial Sequence: Synthetic oligonucleotide
gccguacaaaguaguuugg

SEQ ID NO: 731961 - RNA, 19 nt, Artificial Sequence
  Description of Artificial Sequence: Synthetic oligonucleotide
gugaagauuugugguccca

SEQ ID NO: 731962 - RNA, 19 nt, Artificial Sequence
  Description of Artificial Sequence: Synthetic oligonucleotide
agccagaagcaguguuuaa

SEQ ID NO: 731963 - RNA, 19 nt, Artificial Sequence
  Description of Artificial Sequence: Synthetic oligonucleotide
ccuuagcagcauauaugug

SEQ ID NO: 731964 - RNA, 19 nt, Artificial Sequence
  Description of Artificial Sequence: Synthetic oligonucleotide
ggugcucugaccggcauaa

SEQ ID NO: 731965 - RNA, 19 nt, Artificial Sequence
  Description of Artificial Sequence: Synthetic oligonucleotide
caguauaaggaugcguggu

SEQ ID NO: 731966 - RNA, 19 nt, Artificial Sequence
  Description of Artificial Sequence: Synthetic oligonucleotide
guccggccguacaaaguag

SEQ ID NO: 731967 - RNA, 19 nt, Artificial Sequence
  Description of Artificial Sequence: Synthetic oligonucleotide
gucuagaggccagguucag

SEQ ID NO: 731968 - RNA, 19 nt, Artificial Sequence
  Description of Artificial Sequence: Synthetic oligonucleotide
gaguuaagguuugcccaaa

SEQ ID NO: 731969 - RNA, 19 nt, Artificial Sequence
  Description of Artificial Sequence: Synthetic oligonucleotide
acucuugauaaaggcgcuu

SEQ ID NO: 731970 - RNA, 19 nt, Artificial Sequence
  Description of Artificial Sequence: Synthetic oligonucleotide
cuggagugaucaauccaua

SEQ ID NO: 731971 - RNA, 19 nt, Artificial Sequence
  Description of Artificial Sequence: Synthetic oligonucleotide
guccuaugcaauacauuua

SEQ ID NO: 731972 - RNA, 19 nt, Artificial Sequence
  Description of Artificial Sequence: Synthetic oligonucleotide
ucacugcgugguagauaac

SEQ ID NO: 731973 - RNA, 19 nt, Artificial Sequence
  Description of Artificial Sequence: Synthetic oligonucleotide
cuccggggacacaaaaucu

SEQ ID NO: 731974 - RNA, 19 nt, Artificial Sequence
  Description of Artificial Sequence: Synthetic oligonucleotide
ccggggacacaaaaucuuc

SEQ ID NO: 731975 - RNA, 19 nt, Artificial Sequence
  Description of Artificial Sequence: Synthetic oligonucleotide
aggcgcuuucuuagugauc

SEQ ID NO: 731976 - RNA, 19 nt, Artificial Sequence
  Description of Artificial Sequence: Synthetic oligonucleotide
cuucuggacgcuugugggu

SEQ ID NO: 731977 - RNA, 19 nt, Artificial Sequence
  Description of Artificial Sequence: Synthetic oligonucleotide
gccaguccuaugcaauaca

SEQ ID NO: 731978 - RNA, 19 nt, Artificial Sequence
  Description of Artificial Sequence: Synthetic oligonucleotide
ggggaugaucugugugggc

SEQ ID NO: 731979 - RNA, 19 nt, Artificial Sequence
  Description of Artificial Sequence: Synthetic oligonucleotide
gcucauguauuuugacucu

SEQ ID NO: 731980 - RNA, 19 nt, Artificial Sequence
  Description of Artificial Sequence: Synthetic oligonucleotide
ccuaugcaauacauuuaga

SEQ ID NO: 731981 - RNA, 19 nt, Artificial Sequence
  Description of Artificial Sequence: Synthetic oligonucleotide
cauuuagaacugcaccauu

SEQ ID NO: 731982 - RNA, 19 nt, Artificial Sequence
  Description of Artificial Sequence: Synthetic oligonucleotide
agguccggccguacaaagu

SEQ ID NO: 731983 - RNA, 19 nt, Artificial Sequence
  Description of Artificial Sequence: Synthetic oligonucleotide
ccccaagaauuauacagua

SEQ ID NO: 731984 - RNA, 19 nt, Artificial Sequence
  Description of Artificial Sequence: Synthetic oligonucleotide
ccgggauaaauaccacauc

SEQ ID NO: 731985 - RNA, 19 nt, Artificial Sequence
  Description of Artificial Sequence: Synthetic oligonucleotide
ggggaauaacugcaaguau

SEQ ID NO: 731986 - RNA, 19 nt, Artificial Sequence
  Description of Artificial Sequence: Synthetic oligonucleotide
ccaauaauucaucuccaau

SEQ ID NO: 731987 - RNA, 19 nt, Artificial Sequence
  Description of Artificial Sequence: Synthetic oligonucleotide
gcgcuuucuuagugaucgg

SEQ ID NO: 731988 - RNA, 19 nt, Artificial Sequence
  Description of Artificial Sequence: Synthetic oligonucleotide
gguaugagucugugacaaa

SEQ ID NO: 731989 - RNA, 19 nt, Artificial Sequence
  Description of Artificial Sequence: Synthetic oligonucleotide
guguacucgggcaguggaa

SEQ ID NO: 731990 - RNA, 19 nt, Artificial Sequence
  Description of Artificial Sequence: Synthetic oligonucleotide
gugaucccuaauaguuaaa

SEQ ID NO: 731991 - RNA, 19 nt, Artificial Sequence
  Description of Artificial Sequence: Synthetic oligonucleotide
gccaacaggucuucagcua

SEQ ID NO: 731992 - RNA, 19 nt, Artificial Sequence
  Description of Artificial Sequence: Synthetic oligonucleotide
caugcuccggggacacaaa

SEQ ID NO: 731993 - RNA, 19 nt, Artificial Sequence
  Description of Artificial Sequence: Synthetic oligonucleotide
gccgggauaaauaccacau

SEQ ID NO: 731994 - RNA, 19 nt, Artificial Sequence
  Description of Artificial Sequence: Synthetic oligonucleotide
ccacauaaaccauaacauu

SEQ ID NO: 731995 - RNA, 19 nt, Artificial Sequence
  Description of Artificial Sequence: Synthetic oligonucleotide
cugcgugguagauaacauu

SEQ ID NO: 731996 - RNA, 19 nt, Artificial Sequence
  Description of Artificial Sequence: Synthetic oligonucleotide
ccauuaacuaaagaugguu

SEQ ID NO: 731997 - RNA, 19 nt, Artificial Sequence
  Description of Artificial Sequence: Synthetic oligonucleotide
cccauauuuccgaucuucu

SEQ ID NO: 731998 - RNA, 19 nt, Artificial Sequence
  Description of Artificial Sequence: Synthetic oligonucleotide
cgagggcacacccagugca

SEQ ID NO: 731999 - RNA, 19 nt, Artificial Sequence
  Description of Artificial Sequence: Synthetic oligonucleotide
gcuccagccgggauaaaua

SEQ ID NO: 732000 - RNA, 19 nt, Artificial Sequence
  Description of Artificial Sequence: Synthetic oligonucleotide
ccaacaucauagaggggcu

SEQ ID NO: 732001 - RNA, 19 nt, Artificial Sequence
  Description of Artificial Sequence: Synthetic oligonucleotide
gccaucucgccugguguac

SEQ ID NO: 732002 - RNA, 19 nt, Artificial Sequence
  Description of Artificial Sequence: Synthetic oligonucleotide
gcggccaguccuuaaguuu

SEQ ID NO: 732003 - RNA, 19 nt, Artificial Sequence
  Description of Artificial Sequence: Synthetic oligonucleotide
gcccuuguuuccagaauua

SEQ ID NO: 732004 - RNA, 19 nt, Artificial Sequence
  Description of Artificial Sequence: Synthetic oligonucleotide
caucgagggcacacccagu

SEQ ID NO: 732005 - RNA, 19 nt, Artificial Sequence
  Description of Artificial Sequence: Synthetic oligonucleotide
cgguuuggaacaucuucaa

SEQ ID NO: 732006 - RNA, 19 nt, Artificial Sequence
  Description of Artificial Sequence: Synthetic oligonucleotide
gcgugguagauaacauucu

SEQ ID NO: 732007 - RNA, 19 nt, Artificial Sequence
  Description of Artificial Sequence: Synthetic oligonucleotide
gcguggucuguaaauaguu

SEQ ID NO: 732008 - RNA, 19 nt, Artificial Sequence
  Description of Artificial Sequence: Synthetic oligonucleotide
gcaguggaauguuggccau

SEQ ID NO: 732009 - RNA, 19 nt, Artificial Sequence
  Description of Artificial Sequence: Synthetic oligonucleotide
gggugcucugaccggcaua

SEQ ID NO: 732010 - RNA, 19 nt, Artificial Sequence
  Description of Artificial Sequence: Synthetic oligonucleotide
gcacccuguuggcaauucu

SEQ ID NO: 732011 - RNA, 19 nt, Artificial Sequence
  Description of Artificial Sequence: Synthetic oligonucleotide
ggacucggguuuccagagu

SEQ ID NO: 732012 - RNA, 19 nt, Artificial Sequence
  Description of Artificial Sequence: Synthetic oligonucleotide
ggaucguggucugcagggu

SEQ ID NO: 732013 - RNA, 19 nt, Artificial Sequence
  Description of Artificial Sequence: Synthetic oligonucleotide
cgugguagauaacauucuu

SEQ ID NO: 732014 - RNA, 19 nt, Artificial Sequence
  Description of Artificial Sequence: Synthetic oligonucleotide
ccuggcggccaguccuuaa

SEQ ID NO: 732015 - RNA, 19 nt, Artificial Sequence
  Description of Artificial Sequence: Synthetic oligonucleotide
cgguagcaauccacacaca

SEQ ID NO: 732016 - RNA, 19 nt, Artificial Sequence
  Description of Artificial Sequence: Synthetic oligonucleotide
ccggccguacaaaguaguu

SEQ ID NO: 732017 - RNA, 19 nt, Artificial Sequence
  Description of Artificial Sequence: Synthetic oligonucleotide
ccaucucgccugguguacu

SEQ ID NO: 732018 - RNA, 19 nt, Artificial Sequence
  Description of Artificial Sequence: Synthetic oligonucleotide
cagcacccuguuggcaauu

SEQ ID NO: 732019 - RNA, 19 nt, Artificial Sequence
  Description of Artificial Sequence: Synthetic oligonucleotide
cggccguacaaaguaguuu

SEQ ID NO: 732020 - RNA, 19 nt, Artificial Sequence
  Description of Artificial Sequence: Synthetic oligonucleotide
uuuacuagaauuuaaggga

SEQ ID NO: 732021 - RNA, 19 nt, Artificial Sequence
  Description of Artificial Sequence: Synthetic oligonucleotide
aauccuauuuggcagaagg

SEQ ID NO: 732022 - RNA, 19 nt, Artificial Sequence
  Description of Artificial Sequence: Synthetic oligonucleotide
uuaggaauuuccaugaugc

SEQ ID NO: 732023 - RNA, 19 nt, Artificial Sequence
  Description of Artificial Sequence: Synthetic oligonucleotide
uguaauaauuucacaaggg

SEQ ID NO: 732024 - RNA, 19 nt, Artificial Sequence
  Description of Artificial Sequence: Synthetic oligonucleotide
aaaguuuagccucauaagu

SEQ ID NO: 732025 - RNA, 19 nt, Artificial Sequence
  Description of Artificial Sequence: Synthetic oligonucleotide
aaggaaaucaaguugagua

SEQ ID NO: 732026 - RNA, 19 nt, Artificial Sequence
  Description of Artificial Sequence: Synthetic oligonucleotide
aaucucaaggcagaguugc

SEQ ID NO: 732027 - RNA, 19 nt, Artificial Sequence
  Description of Artificial Sequence: Synthetic oligonucleotide
aaccaacuggcacugaggc

SEQ ID NO: 732028 - RNA, 19 nt, Artificial Sequence
  Description of Artificial Sequence: Synthetic oligonucleotide
aaguaaugcaccccuuucc

SEQ ID NO: 732029 - RNA, 19 nt, Artificial Sequence
  Description of Artificial Sequence: Synthetic oligonucleotide
ucaacaaaagcuuggaucu

SEQ ID NO: 732030 - RNA, 19 nt, Artificial Sequence
  Description of Artificial Sequence: Synthetic oligonucleotide
aguguauauauccugaaug

SEQ ID NO: 732031 - RNA, 19 nt, Artificial Sequence
  Description of Artificial Sequence: Synthetic oligonucleotide
uucacaagggcuuuuauca

SEQ ID NO: 732032 - RNA, 19 nt, Artificial Sequence
  Description of Artificial Sequence: Synthetic oligonucleotide
uaucccauugagaacauag

SEQ ID NO: 732033 - RNA, 19 nt, Artificial Sequence
  Description of Artificial Sequence: Synthetic oligonucleotide
uugaguaucccauugagaa

SEQ ID NO: 732034 - RNA, 19 nt, Artificial Sequence
  Description of Artificial Sequence: Synthetic oligonucleotide
uguucgaaccaccacauug

SEQ ID NO: 732035 - RNA, 19 nt, Artificial Sequence
  Description of Artificial Sequence: Synthetic oligonucleotide
aacuaggaaaaucaauucu

SEQ ID NO: 732036 - RNA, 19 nt, Artificial Sequence
  Description of Artificial Sequence: Synthetic oligonucleotide
aguuuagccucauaagugg

SEQ ID NO: 732037 - RNA, 19 nt, Artificial Sequence
  Description of Artificial Sequence: Synthetic oligonucleotide
aagguuucucauauaaccc

SEQ ID NO: 732038 - RNA, 19 nt, Artificial Sequence
  Description of Artificial Sequence: Synthetic oligonucleotide
caugaugcuaaauagccag

SEQ ID NO: 732039 - RNA, 19 nt, Artificial Sequence
  Description of Artificial Sequence: Synthetic oligonucleotide
aacagaugguugcugguac

SEQ ID NO: 732040 - RNA, 19 nt, Artificial Sequence
  Description of Artificial Sequence: Synthetic oligonucleotide
uagaauuuaagggagagaa

SEQ ID NO: 732041 - RNA, 19 nt, Artificial Sequence
  Description of Artificial Sequence: Synthetic oligonucleotide
ugcagcugcaaauauaagc

SEQ ID NO: 732042 - RNA, 19 nt, Artificial Sequence
  Description of Artificial Sequence: Synthetic oligonucleotide
aaugucaguauggagccac

SEQ ID NO: 732043 - RNA, 19 nt, Artificial Sequence
  Description of Artificial Sequence: Synthetic oligonucleotide
uaaauagccagucaaugaa

SEQ ID NO: 732044 - RNA, 19 nt, Artificial Sequence
  Description of Artificial Sequence: Synthetic oligonucleotide
uauauauccugaauguccu

SEQ ID NO: 732045 - RNA, 19 nt, Artificial Sequence
  Description of Artificial Sequence: Synthetic oligonucleotide
auucgugccugguauaagc

SEQ ID NO: 732046 - RNA, 19 nt, Artificial Sequence
  Description of Artificial Sequence: Synthetic oligonucleotide
aaacguguuuaucuggucu

SEQ ID NO: 732047 - RNA, 19 nt, Artificial Sequence
  Description of Artificial Sequence: Synthetic oligonucleotide
ucagagacgugcuuuaccc

SEQ ID NO: 732048 - RNA, 19 nt, Artificial Sequence
  Description of Artificial Sequence: Synthetic oligonucleotide
aaaucaaguugaguauccc

SEQ ID NO: 732049 - RNA, 19 nt, Artificial Sequence
  Description of Artificial Sequence: Synthetic oligonucleotide
aagcacggugaucaaaggg

SEQ ID NO: 732050 - RNA, 19 nt, Artificial Sequence
  Description of Artificial Sequence: Synthetic oligonucleotide
ugauguucaagcucagucc

SEQ ID NO: 732051 - RNA, 19 nt, Artificial Sequence
  Description of Artificial Sequence: Synthetic oligonucleotide
ucuauguuguccuuguuaa

SEQ ID NO: 732052 - RNA, 19 nt, Artificial Sequence
  Description of Artificial Sequence: Synthetic oligonucleotide
aaucaaguugaguauccca

SEQ ID NO: 732053 - RNA, 19 nt, Artificial Sequence
  Description of Artificial Sequence: Synthetic oligonucleotide
uuuagccucauaagugggg

SEQ ID NO: 732054 - RNA, 19 nt, Artificial Sequence
  Description of Artificial Sequence: Synthetic oligonucleotide
acuaggaaaaucaauucuc

SEQ ID NO: 732055 - RNA, 19 nt, Artificial Sequence
  Description of Artificial Sequence: Synthetic oligonucleotide
guauauauccugaaugucc

SEQ ID NO: 732056 - RNA, 19 nt, Artificial Sequence
  Description of Artificial Sequence: Synthetic oligonucleotide
agcaguagcaugcuacugg

SEQ ID NO: 732057 - RNA, 19 nt, Artificial Sequence
  Description of Artificial Sequence: Synthetic oligonucleotide
cacaagguuauuuuacuag

SEQ ID NO: 732058 - RNA, 19 nt, Artificial Sequence
  Description of Artificial Sequence: Synthetic oligonucleotide
ugaucaaagggugaggaug

SEQ ID NO: 732059 - RNA, 19 nt, Artificial Sequence
  Description of Artificial Sequence: Synthetic oligonucleotide
ugauaguguauauauccug

SEQ ID NO: 732060 - RNA, 19 nt, Artificial Sequence
  Description of Artificial Sequence: Synthetic oligonucleotide
gaauuuaagggagagaaaa

SEQ ID NO: 732061 - RNA, 19 nt, Artificial Sequence
  Description of Artificial Sequence: Synthetic oligonucleotide
uccgaauccuauuuggcag

SEQ ID NO: 732062 - RNA, 19 nt, Artificial Sequence
  Description of Artificial Sequence: Synthetic oligonucleotide
aaaacguguuuaucugguc

SEQ ID NO: 732063 - RNA, 19 nt, Artificial Sequence
  Description of Artificial Sequence: Synthetic oligonucleotide
uucuccgaauccuauuugg

SEQ ID NO: 732064 - RNA, 19 nt, Artificial Sequence
  Description of Artificial Sequence: Synthetic oligonucleotide
agagacgugcuuuacccac

SEQ ID NO: 732065 - RNA, 19 nt, Artificial Sequence
  Description of Artificial Sequence: Synthetic oligonucleotide
uucuguagcagcaguagca

SEQ ID NO: 732066 - RNA, 19 nt, Artificial Sequence
  Description of Artificial Sequence: Synthetic oligonucleotide
ucuaacuaggaaaaucaau

SEQ ID NO: 732067 - RNA, 19 nt, Artificial Sequence
  Description of Artificial Sequence: Synthetic oligonucleotide
ccugauaguguauauaucc

SEQ ID NO: 732068 - RNA, 19 nt, Artificial Sequence
  Description of Artificial Sequence: Synthetic oligonucleotide
aguugaguaucccauugag

SEQ ID NO: 732069 - RNA, 19 nt, Artificial Sequence
  Description of Artificial Sequence: Synthetic oligonucleotide
ucaaggauagcaguguggc

SEQ ID NO: 732070 - RNA, 19 nt, Artificial Sequence
  Description of Artificial Sequence: Synthetic oligonucleotide
gaucaaagggugaggaugg

SEQ ID NO: 732071 - RNA, 19 nt, Artificial Sequence
  Description of Artificial Sequence: Synthetic oligonucleotide
aaguuuagccucauaagug

SEQ ID NO: 732072 - RNA, 19 nt, Artificial Sequence
  Description of Artificial Sequence: Synthetic oligonucleotide
aagguuauuuuacuagaau

SEQ ID NO: 732073 - RNA, 19 nt, Artificial Sequence
  Description of Artificial Sequence: Synthetic oligonucleotide
ugcaaaggcuucauuagga

SEQ ID NO: 732074 - RNA, 19 nt, Artificial Sequence
  Description of Artificial Sequence: Synthetic oligonucleotide
uuccaugaugcuaaauagc

SEQ ID NO: 732075 - RNA, 19 nt, Artificial Sequence
  Description of Artificial Sequence: Synthetic oligonucleotide
ugcacaaguugaaauguca

SEQ ID NO: 732076 - RNA, 19 nt, Artificial Sequence
  Description of Artificial Sequence: Synthetic oligonucleotide
uuccugauaguguauauau

SEQ ID NO: 732077 - RNA, 19 nt, Artificial Sequence
  Description of Artificial Sequence: Synthetic oligonucleotide
ucaccaaucucagauacca

SEQ ID NO: 732078 - RNA, 19 nt, Artificial Sequence
  Description of Artificial Sequence: Synthetic oligonucleotide
aacucucaaggauagcagu

SEQ ID NO: 732079 - RNA, 19 nt, Artificial Sequence
  Description of Artificial Sequence: Synthetic oligonucleotide
aguucacuucuccgaaucc

SEQ ID NO: 732080 - RNA, 19 nt, Artificial Sequence
  Description of Artificial Sequence: Synthetic oligonucleotide
ucaguauggagccaccuuc

SEQ ID NO: 732081 - RNA, 19 nt, Artificial Sequence
  Description of Artificial Sequence: Synthetic oligonucleotide
acaagguuauuuuacuaga

SEQ ID NO: 732082 - RNA, 19 nt, Artificial Sequence
  Description of Artificial Sequence: Synthetic oligonucleotide
uccuugagagaucaaguac

SEQ ID NO: 732083 - RNA, 19 nt, Artificial Sequence
  Description of Artificial Sequence: Synthetic oligonucleotide
cacucugcgaugauggugc

SEQ ID NO: 732084 - RNA, 19 nt, Artificial Sequence
  Description of Artificial Sequence: Synthetic oligonucleotide
uaacuaggaaaaucaauuc

SEQ ID NO: 732085 - RNA, 19 nt, Artificial Sequence
  Description of Artificial Sequence: Synthetic oligonucleotide
agguuauuuuacuagaauu

SEQ ID NO: 732086 - RNA, 19 nt, Artificial Sequence
  Description of Artificial Sequence: Synthetic oligonucleotide
cuaugcaucggacucuugc

SEQ ID NO: 732087 - RNA, 19 nt, Artificial Sequence
  Description of Artificial Sequence: Synthetic oligonucleotide
uauaagcugugcagaauca

SEQ ID NO: 732088 - RNA, 19 nt, Artificial Sequence
  Description of Artificial Sequence: Synthetic oligonucleotide
gaaaucaaguugaguaucc

SEQ ID NO: 732089 - RNA, 19 nt, Artificial Sequence
  Description of Artificial Sequence: Synthetic oligonucleotide
acccugagcaacaagggcc

SEQ ID NO: 732090 - RNA, 19 nt, Artificial Sequence
  Description of Artificial Sequence: Synthetic oligonucleotide
ugaccucuaacuaggaaaa

SEQ ID NO: 732091 - RNA, 19 nt, Artificial Sequence
  Description of Artificial Sequence: Synthetic oligonucleotide
agcugcaaauauaagcagc

SEQ ID NO: 732092 - RNA, 19 nt, Artificial Sequence
  Description of Artificial Sequence: Synthetic oligonucleotide
ugacccugagcaacaaggg

SEQ ID NO: 732093 - RNA, 19 nt, Artificial Sequence
  Description of Artificial Sequence: Synthetic oligonucleotide
aauggcgcugguuccauga

SEQ ID NO: 732094 - RNA, 19 nt, Artificial Sequence
  Description of Artificial Sequence: Synthetic oligonucleotide
gacauggauaccagaaggg

SEQ ID NO: 732095 - RNA, 19 nt, Artificial Sequence
  Description of Artificial Sequence: Synthetic oligonucleotide
agaacucucaaggauagca

SEQ ID NO: 732096 - RNA, 19 nt, Artificial Sequence
  Description of Artificial Sequence: Synthetic oligonucleotide
aauagccagucaaugaacu

SEQ ID NO: 732097 - RNA, 19 nt, Artificial Sequence
  Description of Artificial Sequence: Synthetic oligonucleotide
guauaagcugugcagaauc

SEQ ID NO: 732098 - RNA, 19 nt, Artificial Sequence
  Description of Artificial Sequence: Synthetic oligonucleotide
uacgcaagguuucucauau

SEQ ID NO: 732099 - RNA, 19 nt, Artificial Sequence
  Description of Artificial Sequence: Synthetic oligonucleotide
uggcauggcucacaauucg

SEQ ID NO: 732100 - RNA, 19 nt, Artificial Sequence
  Description of Artificial Sequence: Synthetic oligonucleotide
accaaucucagauaccagu

SEQ ID NO: 732101 - RNA, 19 nt, Artificial Sequence
  Description of Artificial Sequence: Synthetic oligonucleotide
gauaguguauauauccuga

SEQ ID NO: 732102 - RNA, 19 nt, Artificial Sequence
  Description of Artificial Sequence: Synthetic oligonucleotide
uuggguacccaaguaaugc

SEQ ID NO: 732103 - RNA, 19 nt, Artificial Sequence
  Description of Artificial Sequence: Synthetic oligonucleotide
aguagcaugcuacugggaa

SEQ ID NO: 732104 - RNA, 19 nt, Artificial Sequence
  Description of Artificial Sequence: Synthetic oligonucleotide
uagcaugcuacugggaagg

SEQ ID NO: 732105 - RNA, 19 nt, Artificial Sequence
  Description of Artificial Sequence: Synthetic oligonucleotide
gacucuaugcaucggacuc

SEQ ID NO: 732106 - RNA, 19 nt, Artificial Sequence
  Description of Artificial Sequence: Synthetic oligonucleotide
uuucacaagggcuuuuauc

SEQ ID NO: 732107 - RNA, 19 nt, Artificial Sequence
  Description of Artificial Sequence: Synthetic oligonucleotide
uuuuaucaaaccaggcaua

SEQ ID NO: 732108 - RNA, 19 nt, Artificial Sequence
  Description of Artificial Sequence: Synthetic oligonucleotide
caauaagaugaccuacagc

SEQ ID NO: 732109 - RNA, 19 nt, Artificial Sequence
  Description of Artificial Sequence: Synthetic oligonucleotide
aaguugaguaucccauuga

SEQ ID NO: 732110 - RNA, 19 nt, Artificial Sequence
  Description of Artificial Sequence: Synthetic oligonucleotide
ucauaaguggggagaggag

SEQ ID NO: 732111 - RNA, 19 nt, Artificial Sequence
  Description of Artificial Sequence: Synthetic oligonucleotide
ucccaugaccucuaacuag

SEQ ID NO: 732112 - RNA, 19 nt, Artificial Sequence
  Description of Artificial Sequence: Synthetic oligonucleotide
auagcugaacucugcauga

SEQ ID NO: 732113 - RNA, 19 nt, Artificial Sequence
  Description of Artificial Sequence: Synthetic oligonucleotide
cucaaggauagcagugugg

SEQ ID NO: 732114 - RNA, 19 nt, Artificial Sequence
  Description of Artificial Sequence: Synthetic oligonucleotide
ucuccgaauccuauuuggc

SEQ ID NO: 732115 - RNA, 19 nt, Artificial Sequence
  Description of Artificial Sequence: Synthetic oligonucleotide
uucuguuccuauuucaguu

SEQ ID NO: 732116 - RNA, 19 nt, Artificial Sequence
  Description of Artificial Sequence: Synthetic oligonucleotide
ucaaaagauccuuggacuu

SEQ ID NO: 732117 - RNA, 19 nt, Artificial Sequence
  Description of Artificial Sequence: Synthetic oligonucleotide
ucucaaggauagcagugug

SEQ ID NO: 732118 - RNA, 19 nt, Artificial Sequence
  Description of Artificial Sequence: Synthetic oligonucleotide
uacuuggguacccaaguaa

SEQ ID NO: 732119 - RNA, 19 nt, Artificial Sequence
  Description of Artificial Sequence: Synthetic oligonucleotide
caaguugaguaucccauug

SEQ ID NO: 732120 - RNA, 19 nt, Artificial Sequence
  Description of Artificial Sequence: Synthetic oligonucleotide
acaagggcuuuuaucaaac

SEQ ID NO: 732121 - RNA, 19 nt, Artificial Sequence
  Description of Artificial Sequence: Synthetic oligonucleotide
cuaacuaggaaaaucaauu

SEQ ID NO: 732122 - RNA, 19 nt, Artificial Sequence
  Description of Artificial Sequence: Synthetic oligonucleotide
caauacuuggguacccaag

SEQ ID NO: 732123 - RNA, 19 nt, Artificial Sequence
  Description of Artificial Sequence: Synthetic oligonucleotide
gaugcuaaauagccaguca

SEQ ID NO: 732124 - RNA, 19 nt, Artificial Sequence
  Description of Artificial Sequence: Synthetic oligonucleotide
uccuauuuggcagaagguc

SEQ ID NO: 732125 - RNA, 19 nt, Artificial Sequence
  Description of Artificial Sequence: Synthetic oligonucleotide
gaggcacuuugcuacacug

SEQ ID NO: 732126 - RNA, 19 nt, Artificial Sequence
  Description of Artificial Sequence: Synthetic oligonucleotide
uguuccuauuucaguuucc

SEQ ID NO: 732127 - RNA, 19 nt, Artificial Sequence
  Description of Artificial Sequence: Synthetic oligonucleotide
accagaagggaucucuuga

SEQ ID NO: 732128 - RNA, 19 nt, Artificial Sequence
  Description of Artificial Sequence: Synthetic oligonucleotide
ucuguucccuccauggguc

SEQ ID NO: 732129 - RNA, 19 nt, Artificial Sequence
  Description of Artificial Sequence: Synthetic oligonucleotide
uaguguauauauccugaau

SEQ ID NO: 732130 - RNA, 19 nt, Artificial Sequence
  Description of Artificial Sequence: Synthetic oligonucleotide
auuccguggggaauggcgc

SEQ ID NO: 732131 - RNA, 19 nt, Artificial Sequence
  Description of Artificial Sequence: Synthetic oligonucleotide
gaacucucaaggauagcag

SEQ ID NO: 732132 - RNA, 19 nt, Artificial Sequence
  Description of Artificial Sequence: Synthetic oligonucleotide
cugcaaaggcuucauuagg

SEQ ID NO: 732133 - RNA, 19 nt, Artificial Sequence
  Description of Artificial Sequence: Synthetic oligonucleotide
acagaugguugcugguacg

SEQ ID NO: 732134 - RNA, 19 nt, Artificial Sequence
  Description of Artificial Sequence: Synthetic oligonucleotide
uaggggccgagcaaucagg

SEQ ID NO: 732135 - RNA, 19 nt, Artificial Sequence
  Description of Artificial Sequence: Synthetic oligonucleotide
guugcuguaucuccucacc

SEQ ID NO: 732136 - RNA, 19 nt, Artificial Sequence
  Description of Artificial Sequence: Synthetic oligonucleotide
guagcaugcuacugggaag

SEQ ID NO: 732137 - RNA, 19 nt, Artificial Sequence
  Description of Artificial Sequence: Synthetic oligonucleotide
ugcuuuacccacagugaca

SEQ ID NO: 732138 - RNA, 19 nt, Artificial Sequence
  Description of Artificial Sequence: Synthetic oligonucleotide
ucaccaaaguuuagccuca

SEQ ID NO: 732139 - RNA, 19 nt, Artificial Sequence
  Description of Artificial Sequence: Synthetic oligonucleotide
aagaacucucaaggauagc

SEQ ID NO: 732140 - RNA, 19 nt, Artificial Sequence
  Description of Artificial Sequence: Synthetic oligonucleotide
caaccaacuggcacugagg

SEQ ID NO: 732141 - RNA, 19 nt, Artificial Sequence
  Description of Artificial Sequence: Synthetic oligonucleotide
uuagccucauaagugggga

SEQ ID NO: 732142 - RNA, 19 nt, Artificial Sequence
  Description of Artificial Sequence: Synthetic oligonucleotide
ugguacgcaagguuucuca

SEQ ID NO: 732143 - RNA, 19 nt, Artificial Sequence
  Description of Artificial Sequence: Synthetic oligonucleotide
ugguguaucuuuucugaaa

SEQ ID NO: 732144 - RNA, 19 nt, Artificial Sequence
  Description of Artificial Sequence: Synthetic oligonucleotide
gaaguggagccucaugguc

SEQ ID NO: 732145 - RNA, 19 nt, Artificial Sequence
  Description of Artificial Sequence: Synthetic oligonucleotide
acuagguuuucaacaaaag

SEQ ID NO: 732146 - RNA, 19 nt, Artificial Sequence
  Description of Artificial Sequence: Synthetic oligonucleotide
ugaguaucccauugagaac

SEQ ID NO: 732147 - RNA, 19 nt, Artificial Sequence
  Description of Artificial Sequence: Synthetic oligonucleotide
accacuagguuuucaacaa

SEQ ID NO: 732148 - RNA, 19 nt, Artificial Sequence
  Description of Artificial Sequence: Synthetic oligonucleotide
ucucucgaugccauggcaa

SEQ ID NO: 732149 - RNA, 19 nt, Artificial Sequence
  Description of Artificial Sequence: Synthetic oligonucleotide
uguucaagcucaguccaug

SEQ ID NO: 732150 - RNA, 19 nt, Artificial Sequence
  Description of Artificial Sequence: Synthetic oligonucleotide
aacucaggauggcuaggug

SEQ ID NO: 732151 - RNA, 19 nt, Artificial Sequence
  Description of Artificial Sequence: Synthetic oligonucleotide
cuucaacacaccuguguug

SEQ ID NO: 732152 - RNA, 19 nt, Artificial Sequence
  Description of Artificial Sequence: Synthetic oligonucleotide
guucaaggcagccgucugg

SEQ ID NO: 732153 - RNA, 19 nt, Artificial Sequence
  Description of Artificial Sequence: Synthetic oligonucleotide
gcuuuuaucaaaccaggca

SEQ ID NO: 732154 - RNA, 19 nt, Artificial Sequence
  Description of Artificial Sequence: Synthetic oligonucleotide
guacccaaguaaugcaccc

SEQ ID NO: 732155 - RNA, 19 nt, Artificial Sequence
  Description of Artificial Sequence: Synthetic oligonucleotide
acaguuugacaaaggcagc

SEQ ID NO: 732156 - RNA, 19 nt, Artificial Sequence
  Description of Artificial Sequence: Synthetic oligonucleotide
ucacaagguuauuuuacua

SEQ ID NO: 732157 - RNA, 19 nt, Artificial Sequence
  Description of Artificial Sequence: Synthetic oligonucleotide
guuuagccucauaaguggg

SEQ ID NO: 732158 - RNA, 19 nt, Artificial Sequence
  Description of Artificial Sequence: Synthetic oligonucleotide
gacccuguaaggcacuuga

SEQ ID NO: 732159 - RNA, 19 nt, Artificial Sequence
  Description of Artificial Sequence: Synthetic oligonucleotide
ggggagucguccuugagag

SEQ ID NO: 732160 - RNA, 19 nt, Artificial Sequence
  Description of Artificial Sequence: Synthetic oligonucleotide
uaguccaaagccucaucga

SEQ ID NO: 732161 - RNA, 19 nt, Artificial Sequence
  Description of Artificial Sequence: Synthetic oligonucleotide
gcuacugggaaggagagug

SEQ ID NO: 732162 - RNA, 19 nt, Artificial Sequence
  Description of Artificial Sequence: Synthetic oligonucleotide
uggguacccaaguaaugca

SEQ ID NO: 732163 - RNA, 19 nt, Artificial Sequence
  Description of Artificial Sequence: Synthetic oligonucleotide
ucugagaggcacuuugcua

SEQ ID NO: 732164 - RNA, 19 nt, Artificial Sequence
  Description of Artificial Sequence: Synthetic oligonucleotide
gacccugagcaacaagggc

SEQ ID NO: 732165 - RNA, 19 nt, Artificial Sequence
  Description of Artificial Sequence: Synthetic oligonucleotide
uucgugccugguauaagcu

SEQ ID NO: 732166 - RNA, 19 nt, Artificial Sequence
  Description of Artificial Sequence: Synthetic oligonucleotide
agaaguggagccucauggu

SEQ ID NO: 732167 - RNA, 19 nt, Artificial Sequence
  Description of Artificial Sequence: Synthetic oligonucleotide
agcacggugaucaaagggu

SEQ ID NO: 732168 - RNA, 19 nt, Artificial Sequence
  Description of Artificial Sequence: Synthetic oligonucleotide
acuucuccgaauccuauuu

SEQ ID NO: 732169 - RNA, 19 nt, Artificial Sequence
  Description of Artificial Sequence: Synthetic oligonucleotide
ugaugcuaaauagccaguc

SEQ ID NO: 732170 - RNA, 19 nt, Artificial Sequence
  Description of Artificial Sequence: Synthetic oligonucleotide
cuguaaggcacuugagcac

SEQ ID NO: 732171 - RNA, 19 nt, Artificial Sequence
  Description of Artificial Sequence: Synthetic oligonucleotide
caauugcuggaagaaagac

SEQ ID NO: 732172 - RNA, 19 nt, Artificial Sequence
  Description of Artificial Sequence: Synthetic oligonucleotide
ugguauaagcugugcagaa

SEQ ID NO: 732173 - RNA, 19 nt, Artificial Sequence
  Description of Artificial Sequence: Synthetic oligonucleotide
aauucgugccugguauaag

SEQ ID NO: 732174 - RNA, 19 nt, Artificial Sequence
  Description of Artificial Sequence: Synthetic oligonucleotide
ccaggcauauuccuggugg

SEQ ID NO: 732175 - RNA, 19 nt, Artificial Sequence
  Description of Artificial Sequence: Synthetic oligonucleotide
caguauggagccaccuucc

SEQ ID NO: 732176 - RNA, 19 nt, Artificial Sequence
  Description of Artificial Sequence: Synthetic oligonucleotide
aucaaguugaguaucccau

SEQ ID NO: 732177 - RNA, 19 nt, Artificial Sequence
  Description of Artificial Sequence: Synthetic oligonucleotide
aaguucaaggcagccgucu

SEQ ID NO: 732178 - RNA, 19 nt, Artificial Sequence
  Description of Artificial Sequence: Synthetic oligonucleotide
cuguguucaagcacgguga

SEQ ID NO: 732179 - RNA, 19 nt, Artificial Sequence
  Description of Artificial Sequence: Synthetic oligonucleotide
uccugauaguguauauauc

SEQ ID NO: 732180 - RNA, 19 nt, Artificial Sequence
  Description of Artificial Sequence: Synthetic oligonucleotide
ugcuacacugauguacagc

SEQ ID NO: 732181 - RNA, 19 nt, Artificial Sequence
  Description of Artificial Sequence: Synthetic oligonucleotide
uucccaugaccucuaacua

SEQ ID NO: 732182 - RNA, 19 nt, Artificial Sequence
  Description of Artificial Sequence: Synthetic oligonucleotide
uucucucgaugccauggca

SEQ ID NO: 732183 - RNA, 19 nt, Artificial Sequence
  Description of Artificial Sequence: Synthetic oligonucleotide
aggcucaucaaggggaguc

SEQ ID NO: 732184 - RNA, 19 nt, Artificial Sequence
  Description of Artificial Sequence: Synthetic oligonucleotide
acguguuuaucuggucugc

SEQ ID NO: 732185 - RNA, 19 nt, Artificial Sequence
  Description of Artificial Sequence: Synthetic oligonucleotide
aggauacugguagcuuucc

SEQ ID NO: 732186 - RNA, 19 nt, Artificial Sequence
  Description of Artificial Sequence: Synthetic oligonucleotide
gugcuuuacccacagugac

SEQ ID NO: 732187 - RNA, 19 nt, Artificial Sequence
  Description of Artificial Sequence: Synthetic oligonucleotide
agcaauaagaugaccuaca

SEQ ID NO: 732188 - RNA, 19 nt, Artificial Sequence
  Description of Artificial Sequence: Synthetic oligonucleotide
caccacuagguuuucaaca

SEQ ID NO: 732189 - RNA, 19 nt, Artificial Sequence
  Description of Artificial Sequence: Synthetic oligonucleotide
uaggaauuuccaugaugcu

SEQ ID NO: 732190 - RNA, 19 nt, Artificial Sequence
  Description of Artificial Sequence: Synthetic oligonucleotide
ucuguuccuauuucaguuu

SEQ ID NO: 732191 - RNA, 19 nt, Artificial Sequence
  Description of Artificial Sequence: Synthetic oligonucleotide
uugcugguacgcaagguuu

SEQ ID NO: 732192 - RNA, 19 nt, Artificial Sequence
  Description of Artificial Sequence: Synthetic oligonucleotide
guacaguuugacaaaggca

SEQ ID NO: 732193 - RNA, 19 nt, Artificial Sequence
  Description of Artificial Sequence: Synthetic oligonucleotide
uacagccuucuucuuaaau

SEQ ID NO: 732194 - RNA, 19 nt, Artificial Sequence
  Description of Artificial Sequence: Synthetic oligonucleotide
caagcacggugaucaaagg

SEQ ID NO: 732195 - RNA, 19 nt, Artificial Sequence
  Description of Artificial Sequence: Synthetic oligonucleotide
aggggagucguccuugaga

SEQ ID NO: 732196 - RNA, 19 nt, Artificial Sequence
  Description of Artificial Sequence: Synthetic oligonucleotide
cgaaccaccacauugucac

SEQ ID NO: 732197 - RNA, 19 nt, Artificial Sequence
  Description of Artificial Sequence: Synthetic oligonucleotide
gauggcuagguggggaagc

SEQ ID NO: 732198 - RNA, 19 nt, Artificial Sequence
  Description of Artificial Sequence: Synthetic oligonucleotide
ucgugccugguauaagcug

SEQ ID NO: 732199 - RNA, 19 nt, Artificial Sequence
  Description of Artificial Sequence: Synthetic oligonucleotide
acggugaucaaagggugag

SEQ ID NO: 732200 - RNA, 19 nt, Artificial Sequence
  Description of Artificial Sequence: Synthetic oligonucleotide
aguucaaggcagccgucug

SEQ ID NO: 732201 - RNA, 19 nt, Artificial Sequence
  Description of Artificial Sequence: Synthetic oligonucleotide
cucauaaguggggagagga

SEQ ID NO: 732202 - RNA, 19 nt, Artificial Sequence
  Description of Artificial Sequence: Synthetic oligonucleotide
ggaauuuccaugaugcuaa

SEQ ID NO: 732203 - RNA, 19 nt, Artificial Sequence
  Description of Artificial Sequence: Synthetic oligonucleotide
gauaccagaagggaucucu

SEQ ID NO: 732204 - RNA, 19 nt, Artificial Sequence
  Description of Artificial Sequence: Synthetic oligonucleotide
uugccaagcaagguugcug

SEQ ID NO: 732205 - RNA, 19 nt, Artificial Sequence
  Description of Artificial Sequence: Synthetic oligonucleotide
uguccuuguuaaucuggga

SEQ ID NO: 732206 - RNA, 19 nt, Artificial Sequence
  Description of Artificial Sequence: Synthetic oligonucleotide
aggaauuuccaugaugcua

SEQ ID NO: 732207 - RNA, 19 nt, Artificial Sequence
  Description of Artificial Sequence: Synthetic oligonucleotide
ucacaauucgugccuggua

SEQ ID NO: 732208 - RNA, 19 nt, Artificial Sequence
  Description of Artificial Sequence: Synthetic oligonucleotide
uguguucaagcacggugau

SEQ ID NO: 732209 - RNA, 19 nt, Artificial Sequence
  Description of Artificial Sequence: Synthetic oligonucleotide
caguucacuucuccgaauc

SEQ ID NO: 732210 - RNA, 19 nt, Artificial Sequence
  Description of Artificial Sequence: Synthetic oligonucleotide
cucucgaugccauggcaac

SEQ ID NO: 732211 - RNA, 19 nt, Artificial Sequence
  Description of Artificial Sequence: Synthetic oligonucleotide
ccucuaacuaggaaaauca

SEQ ID NO: 732212 - RNA, 19 nt, Artificial Sequence
  Description of Artificial Sequence: Synthetic oligonucleotide
guaggggccgagcaaucag

SEQ ID NO: 732213 - RNA, 19 nt, Artificial Sequence
  Description of Artificial Sequence: Synthetic oligonucleotide
ucaaggggagucguccuug

SEQ ID NO: 732214 - RNA, 19 nt, Artificial Sequence
  Description of Artificial Sequence: Synthetic oligonucleotide
aggcuguucgaaccaccac

SEQ ID NO: 732215 - RNA, 19 nt, Artificial Sequence
  Description of Artificial Sequence: Synthetic oligonucleotide
cacuagguuuucaacaaaa

SEQ ID NO: 732216 - RNA, 19 nt, Artificial Sequence
  Description of Artificial Sequence: Synthetic oligonucleotide
cagcaauaagaugaccuac

SEQ ID NO: 732217 - RNA, 19 nt, Artificial Sequence
  Description of Artificial Sequence: Synthetic oligonucleotide
aaggggagucguccuugag

SEQ ID NO: 732218 - RNA, 19 nt, Artificial Sequence
  Description of Artificial Sequence: Synthetic oligonucleotide
aaccaggcauauuccuggu

SEQ ID NO: 732219 - RNA, 19 nt, Artificial Sequence
  Description of Artificial Sequence: Synthetic oligonucleotide
caagguuauuuuacuagaa

SEQ ID NO: 732220 - RNA, 19 nt, Artificial Sequence
  Description of Artificial Sequence: Synthetic oligonucleotide
cagccgucugguuuguggc

SEQ ID NO: 732221 - RNA, 19 nt, Artificial Sequence
  Description of Artificial Sequence: Synthetic oligonucleotide
uggauaccagaagggaucu

SEQ ID NO: 732222 - RNA, 19 nt, Artificial Sequence
  Description of Artificial Sequence: Synthetic oligonucleotide
cuucuccgaauccuauuug

SEQ ID NO: 732223 - RNA, 19 nt, Artificial Sequence
  Description of Artificial Sequence: Synthetic oligonucleotide
uagccucauaaguggggag

SEQ ID NO: 732224 - RNA, 19 nt, Artificial Sequence
  Description of Artificial Sequence: Synthetic oligonucleotide
agucucuucaacacaccug

SEQ ID NO: 732225 - RNA, 19 nt, Artificial Sequence
  Description of Artificial Sequence: Synthetic oligonucleotide
gcugaacucugcaugaccc

SEQ ID NO: 732226 - RNA, 19 nt, Artificial Sequence
  Description of Artificial Sequence: Synthetic oligonucleotide
auggucugcccacgccacc

SEQ ID NO: 732227 - RNA, 19 nt, Artificial Sequence
  Description of Artificial Sequence: Synthetic oligonucleotide
agggaguaggggccgagca

SEQ ID NO: 732228 - RNA, 19 nt, Artificial Sequence
  Description of Artificial Sequence: Synthetic oligonucleotide
uuccuauuucaguuuccaa

SEQ ID NO: 732229 - RNA, 19 nt, Artificial Sequence
  Description of Artificial Sequence: Synthetic oligonucleotide
ucggacucuugccaagcaa

SEQ ID NO: 732230 - RNA, 19 nt, Artificial Sequence
  Description of Artificial Sequence: Synthetic oligonucleotide
ucucagauaccagucccaa

SEQ ID NO: 732231 - RNA, 19 nt, Artificial Sequence
  Description of Artificial Sequence: Synthetic oligonucleotide
gggaaaucugguuggcacc

SEQ ID NO: 732232 - RNA, 19 nt, Artificial Sequence
  Description of Artificial Sequence: Synthetic oligonucleotide
ccauguucuuuuaggacag

SEQ ID NO: 732233 - RNA, 19 nt, Artificial Sequence
  Description of Artificial Sequence: Synthetic oligonucleotide
uacccaaguaaugcacccc

SEQ ID NO: 732234 - RNA, 19 nt, Artificial Sequence
  Description of Artificial Sequence: Synthetic oligonucleotide
guuccuauuucaguuucca

SEQ ID NO: 732235 - RNA, 19 nt, Artificial Sequence
  Description of Artificial Sequence: Synthetic oligonucleotide
gcaaccaacuggcacugag

SEQ ID NO: 732236 - RNA, 19 nt, Artificial Sequence
  Description of Artificial Sequence: Synthetic oligonucleotide
uguguuggcauggcucaca

SEQ ID NO: 732237 - RNA, 19 nt, Artificial Sequence
  Description of Artificial Sequence: Synthetic oligonucleotide
cagaugguugcugguacgc

SEQ ID NO: 732238 - RNA, 19 nt, Artificial Sequence
  Description of Artificial Sequence: Synthetic oligonucleotide
cuauggguuucaucaccac

SEQ ID NO: 732239 - RNA, 19 nt, Artificial Sequence
  Description of Artificial Sequence: Synthetic oligonucleotide
ugggucuguucccuccaug

SEQ ID NO: 732240 - RNA, 19 nt, Artificial Sequence
  Description of Artificial Sequence: Synthetic oligonucleotide
cuaagagccacuccagucu

SEQ ID NO: 732241 - RNA, 19 nt, Artificial Sequence
  Description of Artificial Sequence: Synthetic oligonucleotide
caucgagagccacacucug

SEQ ID NO: 732242 - RNA, 19 nt, Artificial Sequence
  Description of Artificial Sequence: Synthetic oligonucleotide
gcagccgucugguuugugg

SEQ ID NO: 732243 - RNA, 19 nt, Artificial Sequence
  Description of Artificial Sequence: Synthetic oligonucleotide
guugaguaucccauugaga

SEQ ID NO: 732244 - RNA, 19 nt, Artificial Sequence
  Description of Artificial Sequence: Synthetic oligonucleotide
agucguccuugagagauca

SEQ ID NO: 732245 - RNA, 19 nt, Artificial Sequence
  Description of Artificial Sequence: Synthetic oligonucleotide
ccuauuuggcagaagguca

SEQ ID NO: 732246 - RNA, 19 nt, Artificial Sequence
  Description of Artificial Sequence: Synthetic oligonucleotide
ggcuguucgaaccaccaca

SEQ ID NO: 732247 - RNA, 19 nt, Artificial Sequence
  Description of Artificial Sequence: Synthetic oligonucleotide
aggggccgagcaaucaggc

SEQ ID NO: 732248 - RNA, 19 nt, Artificial Sequence
  Description of Artificial Sequence: Synthetic oligonucleotide
cacaagcccagcagugcag

SEQ ID NO: 732249 - RNA, 19 nt, Artificial Sequence
  Description of Artificial Sequence: Synthetic oligonucleotide
cugcaugacccugagcaac

SEQ ID NO: 732250 - RNA, 19 nt, Artificial Sequence
  Description of Artificial Sequence: Synthetic oligonucleotide
ugucaguauggagccaccu

SEQ ID NO: 732251 - RNA, 19 nt, Artificial Sequence
  Description of Artificial Sequence: Synthetic oligonucleotide
gagaucaaguacaguuuga

SEQ ID NO: 732252 - RNA, 19 nt, Artificial Sequence
  Description of Artificial Sequence: Synthetic oligonucleotide
auaagcugugcagaaucau

SEQ ID NO: 732253 - RNA, 19 nt, Artificial Sequence
  Description of Artificial Sequence: Synthetic oligonucleotide
cugguauaagcugugcaga

SEQ ID NO: 732254 - RNA, 19 nt, Artificial Sequence
  Description of Artificial Sequence: Synthetic oligonucleotide
cugauaguguauauauccu

SEQ ID NO: 732255 - RNA, 19 nt, Artificial Sequence
  Description of Artificial Sequence: Synthetic oligonucleotide
ggugaucaaagggugagga

SEQ ID NO: 732256 - RNA, 19 nt, Artificial Sequence
  Description of Artificial Sequence: Synthetic oligonucleotide
cucuaacuaggaaaaucaa

SEQ ID NO: 732257 - RNA, 19 nt, Artificial Sequence
  Description of Artificial Sequence: Synthetic oligonucleotide
gguacccaaguaaugcacc

SEQ ID NO: 732258 - RNA, 19 nt, Artificial Sequence
  Description of Artificial Sequence: Synthetic oligonucleotide
guccuugagagaucaagua

SEQ ID NO: 732259 - RNA, 19 nt, Artificial Sequence
  Description of Artificial Sequence: Synthetic oligonucleotide
agccucauaaguggggaga

SEQ ID NO: 732260 - RNA, 19 nt, Artificial Sequence
  Description of Artificial Sequence: Synthetic oligonucleotide
augucaguauggagccacc

SEQ ID NO: 732261 - RNA, 19 nt, Artificial Sequence
  Description of Artificial Sequence: Synthetic oligonucleotide
acaccuguguuggcauggc

SEQ ID NO: 732262 - RNA, 19 nt, Artificial Sequence
  Description of Artificial Sequence: Synthetic oligonucleotide
accaaccauaugcucuggu

SEQ ID NO: 732263 - RNA, 19 nt, Artificial Sequence
  Description of Artificial Sequence: Synthetic oligonucleotide
caccaaucucagauaccag

SEQ ID NO: 732264 - RNA, 19 nt, Artificial Sequence
  Description of Artificial Sequence: Synthetic oligonucleotide
gaauccuauuuggcagaag

SEQ ID NO: 732265 - RNA, 19 nt, Artificial Sequence
  Description of Artificial Sequence: Synthetic oligonucleotide
ucuaugcaucggacucuug

SEQ ID NO: 732266 - RNA, 19 nt, Artificial Sequence
  Description of Artificial Sequence: Synthetic oligonucleotide
agaauuuaagggagagaaa

SEQ ID NO: 732267 - RNA, 19 nt, Artificial Sequence
  Description of Artificial Sequence: Synthetic oligonucleotide
cuagaauuuaagggagaga

SEQ ID NO: 732268 - RNA, 19 nt, Artificial Sequence
  Description of Artificial Sequence: Synthetic oligonucleotide
uggcgcugguuccaugacu

SEQ ID NO: 732269 - RNA, 19 nt, Artificial Sequence
  Description of Artificial Sequence: Synthetic oligonucleotide
auccuauuuggcagaaggu

SEQ ID NO: 732270 - RNA, 19 nt, Artificial Sequence
  Description of Artificial Sequence: Synthetic oligonucleotide
ggacucuugccaagcaagg

SEQ ID NO: 732271 - RNA, 19 nt, Artificial Sequence
  Description of Artificial Sequence: Synthetic oligonucleotide
caucggacucuugccaagc

SEQ ID NO: 732272 - RNA, 19 nt, Artificial Sequence
  Description of Artificial Sequence: Synthetic oligonucleotide
acaauucgugccugguaua

SEQ ID NO: 732273 - RNA, 19 nt, Artificial Sequence
  Description of Artificial Sequence: Synthetic oligonucleotide
gcuucauuaggaauuucca

SEQ ID NO: 732274 - RNA, 19 nt, Artificial Sequence
  Description of Artificial Sequence: Synthetic oligonucleotide
aucggacucuugccaagca

SEQ ID NO: 732275 - RNA, 19 nt, Artificial Sequence
  Description of Artificial Sequence: Synthetic oligonucleotide
cacaaguugaaaugucagu

SEQ ID NO: 732276 - RNA, 19 nt, Artificial Sequence
  Description of Artificial Sequence: Synthetic oligonucleotide
ugguuccugauaguguaua

SEQ ID NO: 732277 - RNA, 19 nt, Artificial Sequence
  Description of Artificial Sequence: Synthetic oligonucleotide
agggaucucuugauguuca

SEQ ID NO: 732278 - RNA, 19 nt, Artificial Sequence
  Description of Artificial Sequence: Synthetic oligonucleotide
ugcacucugcgaugauggu

SEQ ID NO: 732279 - RNA, 19 nt, Artificial Sequence
  Description of Artificial Sequence: Synthetic oligonucleotide
cacaauucgugccugguau

SEQ ID NO: 732280 - RNA, 19 nt, Artificial Sequence
  Description of Artificial Sequence: Synthetic oligonucleotide
aguggaggcaucacccaca

SEQ ID NO: 732281 - RNA, 19 nt, Artificial Sequence
  Description of Artificial Sequence: Synthetic oligonucleotide
acacaccuguguuggcaug

SEQ ID NO: 732282 - RNA, 19 nt, Artificial Sequence
  Description of Artificial Sequence: Synthetic oligonucleotide
ugcaccccuuuccuggcau

SEQ ID NO: 732283 - RNA, 19 nt, Artificial Sequence
  Description of Artificial Sequence: Synthetic oligonucleotide
ugauggugccugagucaca

SEQ ID NO: 732284 - RNA, 19 nt, Artificial Sequence
  Description of Artificial Sequence: Synthetic oligonucleotide
gcaaguucaaggcagccgu

SEQ ID NO: 732285 - RNA, 19 nt, Artificial Sequence
  Description of Artificial Sequence: Synthetic oligonucleotide
uggucugcccacgccacca

SEQ ID NO: 732286 - RNA, 19 nt, Artificial Sequence
  Description of Artificial Sequence: Synthetic oligonucleotide
agagcagacuccagaggug

SEQ ID NO: 732287 - RNA, 19 nt, Artificial Sequence
  Description of Artificial Sequence: Synthetic oligonucleotide
ccaaccauaugcucugguc

SEQ ID NO: 732288 - RNA, 19 nt, Artificial Sequence
  Description of Artificial Sequence: Synthetic oligonucleotide
ugccugagucacagcaauc

SEQ ID NO: 732289 - RNA, 19 nt, Artificial Sequence
  Description of Artificial Sequence: Synthetic oligonucleotide
uauuuggcagaaggucaaa

SEQ ID NO: 732290 - RNA, 19 nt, Artificial Sequence
  Description of Artificial Sequence: Synthetic oligonucleotide
aucucagauaccaguccca

SEQ ID NO: 732291 - RNA, 19 nt, Artificial Sequence
  Description of Artificial Sequence: Synthetic oligonucleotide
aguaggggccgagcaauca

SEQ ID NO: 732292 - RNA, 19 nt, Artificial Sequence
  Description of Artificial Sequence: Synthetic oligonucleotide
gaauggcgcugguuccaug

SEQ ID NO: 732293 - RNA, 19 nt, Artificial Sequence
  Description of Artificial Sequence: Synthetic oligonucleotide
guucgaaccaccacauugu

SEQ ID NO: 732294 - RNA, 19 nt, Artificial Sequence
  Description of Artificial Sequence: Synthetic oligonucleotide
ugccucauuccguggggaa

SEQ ID NO: 732295 - RNA, 19 nt, Artificial Sequence
  Description of Artificial Sequence: Synthetic oligonucleotide
auccuuggacuuugcugca

SEQ ID NO: 732296 - RNA, 19 nt, Artificial Sequence
  Description of Artificial Sequence: Synthetic oligonucleotide
gaacucugcaugacccuga

SEQ ID NO: 732297 - RNA, 19 nt, Artificial Sequence
  Description of Artificial Sequence: Synthetic oligonucleotide
agaugguugcugguacgca

SEQ ID NO: 732298 - RNA, 19 nt, Artificial Sequence
  Description of Artificial Sequence: Synthetic oligonucleotide
aucaaggggagucguccuu

SEQ ID NO: 732299 - RNA, 19 nt, Artificial Sequence
  Description of Artificial Sequence: Synthetic oligonucleotide
caugaccucuaacuaggaa

SEQ ID NO: 732300 - RNA, 19 nt, Artificial Sequence
  Description of Artificial Sequence: Synthetic oligonucleotide
gagagaucaaguacaguuu

SEQ ID NO: 732301 - RNA, 19 nt, Artificial Sequence
  Description of Artificial Sequence: Synthetic oligonucleotide
gcaaucaggccuguguuca

SEQ ID NO: 732302 - RNA, 19 nt, Artificial Sequence
  Description of Artificial Sequence: Synthetic oligonucleotide
gcagcaauaagaugaccua

SEQ ID NO: 732303 - RNA, 19 nt, Artificial Sequence
  Description of Artificial Sequence: Synthetic oligonucleotide
agccgucugguuuguggcu

SEQ ID NO: 732304 - RNA, 19 nt, Artificial Sequence
  Description of Artificial Sequence: Synthetic oligonucleotide
ggcucaucaaggggagucg

SEQ ID NO: 732305 - RNA, 19 nt, Artificial Sequence
  Description of Artificial Sequence: Synthetic oligonucleotide
uagcugaacucugcaugac

SEQ ID NO: 732306 - RNA, 19 nt, Artificial Sequence
  Description of Artificial Sequence: Synthetic oligonucleotide
cuucauccgucaucucuga

SEQ ID NO: 732307 - RNA, 19 nt, Artificial Sequence
  Description of Artificial Sequence: Synthetic oligonucleotide
guacgcaagguuucucaua

SEQ ID NO: 732308 - RNA, 19 nt, Artificial Sequence
  Description of Artificial Sequence: Synthetic oligonucleotide
ucauuccguggggaauggc

SEQ ID NO: 732309 - RNA, 19 nt, Artificial Sequence
  Description of Artificial Sequence: Synthetic oligonucleotide
gagcaaucaggccuguguu

SEQ ID NO: 732310 - RNA, 19 nt, Artificial Sequence
  Description of Artificial Sequence: Synthetic oligonucleotide
cacggugaucaaaggguga

SEQ ID NO: 732311 - RNA, 19 nt, Artificial Sequence
  Description of Artificial Sequence: Synthetic oligonucleotide
cagagacgugcuuuaccca

SEQ ID NO: 732312 - RNA, 19 nt, Artificial Sequence
  Description of Artificial Sequence: Synthetic oligonucleotide
caauucgugccugguauaa

SEQ ID NO: 732313 - RNA, 19 nt, Artificial Sequence
  Description of Artificial Sequence: Synthetic oligonucleotide
cuacugggaaggagaguga

SEQ ID NO: 732314 - RNA, 19 nt, Artificial Sequence
  Description of Artificial Sequence: Synthetic oligonucleotide
guaucuccucaccaaaguu

SEQ ID NO: 732315 - RNA, 19 nt, Artificial Sequence
  Description of Artificial Sequence: Synthetic oligonucleotide
auggcuagguggggaagcu

SEQ ID NO: 732316 - RNA, 19 nt, Artificial Sequence
  Description of Artificial Sequence: Synthetic oligonucleotide
aucgagagccacacucuga

SEQ ID NO: 732317 - RNA, 19 nt, Artificial Sequence
  Description of Artificial Sequence: Synthetic oligonucleotide
gcaauugcuggaagaaaga

SEQ ID NO: 732318 - RNA, 19 nt, Artificial Sequence
  Description of Artificial Sequence: Synthetic oligonucleotide
gccucauaaguggggagag

SEQ ID NO: 732319 - RNA, 19 nt, Artificial Sequence
  Description of Artificial Sequence: Synthetic oligonucleotide
ggguacccaaguaaugcac

SEQ ID NO: 732320 - RNA, 19 nt, Artificial Sequence
  Description of Artificial Sequence: Synthetic oligonucleotide
cuuuuaggacagcagcaau

SEQ ID NO: 732321 - RNA, 19 nt, Artificial Sequence
  Description of Artificial Sequence: Synthetic oligonucleotide
gcacggugaucaaagggug

SEQ ID NO: 732322 - RNA, 19 nt, Artificial Sequence
  Description of Artificial Sequence: Synthetic oligonucleotide
gggaggcaauugcuggaag

SEQ ID NO: 732323 - RNA, 19 nt, Artificial Sequence
  Description of Artificial Sequence: Synthetic oligonucleotide
aggaggauacugguagcuu

SEQ ID NO: 732324 - RNA, 19 nt, Artificial Sequence
  Description of Artificial Sequence: Synthetic oligonucleotide
ggucugccucauuccgugg

SEQ ID NO: 732325 - RNA, 19 nt, Artificial Sequence
  Description of Artificial Sequence: Synthetic oligonucleotide
gggccgagcaaucaggccu

SEQ ID NO: 732326 - RNA, 19 nt, Artificial Sequence
  Description of Artificial Sequence: Synthetic oligonucleotide
acccuguaaggcacuugag

SEQ ID NO: 732327 - RNA, 19 nt, Artificial Sequence
  Description of Artificial Sequence: Synthetic oligonucleotide
ccaugaugcuaaauagcca

SEQ ID NO: 732328 - RNA, 19 nt, Artificial Sequence
  Description of Artificial Sequence: Synthetic oligonucleotide
ggcacuuugcuacacugau

SEQ ID NO: 732329 - RNA, 19 nt, Artificial Sequence
  Description of Artificial Sequence: Synthetic oligonucleotide
gacucuugccaagcaaggu

SEQ ID NO: 732330 - RNA, 19 nt, Artificial Sequence
  Description of Artificial Sequence: Synthetic oligonucleotide
ugagaaccucuugcacagu

SEQ ID NO: 732331 - RNA, 19 nt, Artificial Sequence
  Description of Artificial Sequence: Synthetic oligonucleotide
auaccagaagggaucucuu

SEQ ID NO: 732332 - RNA, 19 nt, Artificial Sequence
  Description of Artificial Sequence: Synthetic oligonucleotide
caaggggagucguccuuga

SEQ ID NO: 732333 - RNA, 19 nt, Artificial Sequence
  Description of Artificial Sequence: Synthetic oligonucleotide
cagggaguaggggccgagc

SEQ ID NO: 732334 - RNA, 19 nt, Artificial Sequence
  Description of Artificial Sequence: Synthetic oligonucleotide
gcagacuccagagguggug

SEQ ID NO: 732335 - RNA, 19 nt, Artificial Sequence
  Description of Artificial Sequence: Synthetic oligonucleotide
gccucaucgagagccacac

SEQ ID NO: 732336 - RNA, 19 nt, Artificial Sequence
  Description of Artificial Sequence: Synthetic oligonucleotide
ccucauuccguggggaaug

SEQ ID NO: 732337 - RNA, 19 nt, Artificial Sequence
  Description of Artificial Sequence: Synthetic oligonucleotide
cgcaagguuucucauauaa

SEQ ID NO: 732338 - RNA, 19 nt, Artificial Sequence
  Description of Artificial Sequence: Synthetic oligonucleotide
gugccugagucacagcaau

SEQ ID NO: 732339 - RNA, 19 nt, Artificial Sequence
  Description of Artificial Sequence: Synthetic oligonucleotide
ccaagcaagguugcugcug

SEQ ID NO: 732340 - RNA, 19 nt, Artificial Sequence
  Description of Artificial Sequence: Synthetic oligonucleotide
cugguacgcaagguuucuc

SEQ ID NO: 732341 - RNA, 19 nt, Artificial Sequence
  Description of Artificial Sequence: Synthetic oligonucleotide
cgugcuuuacccacaguga

SEQ ID NO: 732342 - RNA, 19 nt, Artificial Sequence
  Description of Artificial Sequence: Synthetic oligonucleotide
cuccuuuagugcuugcauu

SEQ ID NO: 732343 - RNA, 19 nt, Artificial Sequence
  Description of Artificial Sequence: Synthetic oligonucleotide
ccugguggaaggaaaucaa

SEQ ID NO: 732344 - RNA, 19 nt, Artificial Sequence
  Description of Artificial Sequence: Synthetic oligonucleotide
guguucaagcacggugauc

SEQ ID NO: 732345 - RNA, 19 nt, Artificial Sequence
  Description of Artificial Sequence: Synthetic oligonucleotide
gagucguccuugagagauc

SEQ ID NO: 732346 - RNA, 19 nt, Artificial Sequence
  Description of Artificial Sequence: Synthetic oligonucleotide
agcaugcuacugggaagga

SEQ ID NO: 732347 - RNA, 19 nt, Artificial Sequence
  Description of Artificial Sequence: Synthetic oligonucleotide
augguuccugauaguguau

SEQ ID NO: 732348 - RNA, 19 nt, Artificial Sequence
  Description of Artificial Sequence: Synthetic oligonucleotide
ucaccacuuugaggaggga

SEQ ID NO: 732349 - RNA, 19 nt, Artificial Sequence
  Description of Artificial Sequence: Synthetic oligonucleotide
ccucauaaguggggagagg

SEQ ID NO: 732350 - RNA, 19 nt, Artificial Sequence
  Description of Artificial Sequence: Synthetic oligonucleotide
cccugagcaacaagggcca

SEQ ID NO: 732351 - RNA, 19 nt, Artificial Sequence
  Description of Artificial Sequence: Synthetic oligonucleotide
ccgaauccuauuuggcaga

SEQ ID NO: 732352 - RNA, 19 nt, Artificial Sequence
  Description of Artificial Sequence: Synthetic oligonucleotide
ucccuccaugggucuuucu

SEQ ID NO: 732353 - RNA, 19 nt, Artificial Sequence
  Description of Artificial Sequence: Synthetic oligonucleotide
ggcucacaauucgugccug

SEQ ID NO: 732354 - RNA, 19 nt, Artificial Sequence
  Description of Artificial Sequence: Synthetic oligonucleotide
acgcaagguuucucauaua

SEQ ID NO: 732355 - RNA, 19 nt, Artificial Sequence
  Description of Artificial Sequence: Synthetic oligonucleotide
gguacgcaagguuucucau

SEQ ID NO: 732356 - RNA, 19 nt, Artificial Sequence
  Description of Artificial Sequence: Synthetic oligonucleotide
ccucauggucugcccacgc

SEQ ID NO: 732357 - RNA, 19 nt, Artificial Sequence
  Description of Artificial Sequence: Synthetic oligonucleotide
uucccuccaugggucuuuc

SEQ ID NO: 732358 - RNA, 19 nt, Artificial Sequence
  Description of Artificial Sequence: Synthetic oligonucleotide
cuggucugccucauuccgu

SEQ ID NO: 732359 - RNA, 19 nt, Artificial Sequence
  Description of Artificial Sequence: Synthetic oligonucleotide
gggaguaggggccgagcaa

SEQ ID NO: 732360 - RNA, 19 nt, Artificial Sequence
  Description of Artificial Sequence: Synthetic oligonucleotide
ggaaggagagugagaaccu

SEQ ID NO: 732361 - RNA, 19 nt, Artificial Sequence
  Description of Artificial Sequence: Synthetic oligonucleotide
gccucauggucugcccacg

SEQ ID NO: 732362 - RNA, 19 nt, Artificial Sequence
  Description of Artificial Sequence: Synthetic oligonucleotide
ccacaagcccagcagugca

SEQ ID NO: 732363 - RNA, 19 nt, Artificial Sequence
  Description of Artificial Sequence: Synthetic oligonucleotide
ccagacccucgcagcaggc

SEQ ID NO: 732364 - RNA, 19 nt, Artificial Sequence
  Description of Artificial Sequence: Synthetic oligonucleotide
ccauucucucgaugccaug

SEQ ID NO: 732365 - RNA, 19 nt, Artificial Sequence
  Description of Artificial Sequence: Synthetic oligonucleotide
cugccucauuccgugggga

SEQ ID NO: 732366 - RNA, 19 nt, Artificial Sequence
  Description of Artificial Sequence: Synthetic oligonucleotide
gguauaagcugugcagaau

SEQ ID NO: 732367 - RNA, 19 nt, Artificial Sequence
  Description of Artificial Sequence: Synthetic oligonucleotide
cauugucacugcagcacuu

SEQ ID NO: 732368 - RNA, 19 nt, Artificial Sequence
  Description of Artificial Sequence: Synthetic oligonucleotide
gacgugcuuuacccacagu

SEQ ID NO: 732369 - RNA, 19 nt, Artificial Sequence
  Description of Artificial Sequence: Synthetic oligonucleotide
caacuggcacugaggccaa

SEQ ID NO: 732370 - RNA, 19 nt, Artificial Sequence
  Description of Artificial Sequence: Synthetic oligonucleotide
ccuccaugggucuuucugu

SEQ ID NO: 732371 - RNA, 19 nt, Artificial Sequence
  Description of Artificial Sequence: Synthetic oligonucleotide
gacccucgcagcaggcugu

SEQ ID NO: 732372 - RNA, 19 nt, Artificial Sequence
  Description of Artificial Sequence: Synthetic oligonucleotide
gcuguucgaaccaccacau

SEQ ID NO: 732373 - RNA, 19 nt, Artificial Sequence
  Description of Artificial Sequence: Synthetic oligonucleotide
ccaugaccucuaacuagga

SEQ ID NO: 732374 - RNA, 19 nt, Artificial Sequence
  Description of Artificial Sequence: Synthetic oligonucleotide
cgagcaaucaggccugugu

SEQ ID NO: 732375 - RNA, 19 nt, Artificial Sequence
  Description of Artificial Sequence: Synthetic oligonucleotide
ccgucugguuuguggcuug

SEQ ID NO: 732376 - RNA, 19 nt, Artificial Sequence
  Description of Artificial Sequence: Synthetic oligonucleotide
gggagucguccuugagaga

SEQ ID NO: 732377 - RNA, 19 nt, Artificial Sequence
  Description of Artificial Sequence: Synthetic oligonucleotide
ggcauggcucacaauucgu

SEQ ID NO: 732378 - RNA, 19 nt, Artificial Sequence
  Description of Artificial Sequence: Synthetic oligonucleotide
ggauaccagaagggaucuc

SEQ ID NO: 732379 - RNA, 19 nt, Artificial Sequence
  Description of Artificial Sequence: Synthetic oligonucleotide
ccuuguuaaucugggaaau

SEQ ID NO: 732380 - RNA, 19 nt, Artificial Sequence
  Description of Artificial Sequence: Synthetic oligonucleotide
ccacagugacauggauacc

SEQ ID NO: 732381 - RNA, 19 nt, Artificial Sequence
  Description of Artificial Sequence: Synthetic oligonucleotide
cgagagccacacucugaac

SEQ ID NO: 732382 - RNA, 19 nt, Artificial Sequence
  Description of Artificial Sequence: Synthetic oligonucleotide
gcugguacgcaagguuucu

SEQ ID NO: 732383 - RNA, 19 nt, Artificial Sequence
  Description of Artificial Sequence: Synthetic oligonucleotide
cagauccaucaggcucauc

SEQ ID NO: 732384 - RNA, 19 nt, Artificial Sequence
  Description of Artificial Sequence: Synthetic oligonucleotide
cugguccauacagccuucu

SEQ ID NO: 732385 - RNA, 19 nt, Artificial Sequence
  Description of Artificial Sequence: Synthetic oligonucleotide
cagacccucgcagcaggcu

SEQ ID NO: 732386 - RNA, 19 nt, Artificial Sequence
  Description of Artificial Sequence: Synthetic oligonucleotide
gucguccuugagagaucaa

SEQ ID NO: 732387 - RNA, 19 nt, Artificial Sequence
  Description of Artificial Sequence: Synthetic oligonucleotide
gcaugacccugagcaacaa

SEQ ID NO: 732388 - RNA, 19 nt, Artificial Sequence
  Description of Artificial Sequence: Synthetic oligonucleotide
cuguucgaaccaccacauu

SEQ ID NO: 732389 - RNA, 19 nt, Artificial Sequence
  Description of Artificial Sequence: Synthetic oligonucleotide
ggaauggcgcugguuccau

SEQ ID NO: 732390 - RNA, 19 nt, Artificial Sequence
  Description of Artificial Sequence: Synthetic oligonucleotide
ggcaaccaacuggcacuga

SEQ ID NO: 732391 - RNA, 19 nt, Artificial Sequence
  Description of Artificial Sequence: Synthetic oligonucleotide
ccgagcaaucaggccugug

SEQ ID NO: 732392 - RNA, 19 nt, Artificial Sequence
  Description of Artificial Sequence: Synthetic oligonucleotide
caggcucaucaaggggagu

SEQ ID NO: 732393 - RNA, 19 nt, Artificial Sequence
  Description of Artificial Sequence: Synthetic oligonucleotide
gcgcugguuccaugacugu

SEQ ID NO: 732394 - RNA, 19 nt, Artificial Sequence
  Description of Artificial Sequence: Synthetic oligonucleotide
caguugcuauggguuucau

SEQ ID NO: 732395 - RNA, 19 nt, Artificial Sequence
  Description of Artificial Sequence: Synthetic oligonucleotide
gccuguguucaagcacggu

SEQ ID NO: 732396 - RNA, 19 nt, Artificial Sequence
  Description of Artificial Sequence: Synthetic oligonucleotide
ccucaucgagagccacacu

SEQ ID NO: 732397 - RNA, 19 nt, Artificial Sequence
  Description of Artificial Sequence: Synthetic oligonucleotide
uuuagagugaguaugaacg

SEQ ID NO: 732398 - RNA, 19 nt, Artificial Sequence
  Description of Artificial Sequence: Synthetic oligonucleotide
uguaguuacuaaaugaugg

SEQ ID NO: 732399 - RNA, 19 nt, Artificial Sequence
  Description of Artificial Sequence: Synthetic oligonucleotide
uucaauaggacacuuaaag

SEQ ID NO: 732400 - RNA, 19 nt, Artificial Sequence
  Description of Artificial Sequence: Synthetic oligonucleotide
aggaauuuauuccaggggc

SEQ ID NO: 732401 - RNA, 19 nt, Artificial Sequence
  Description of Artificial Sequence: Synthetic oligonucleotide
aguuguacgguuuagagug

SEQ ID NO: 732402 - RNA, 19 nt, Artificial Sequence
  Description of Artificial Sequence: Synthetic oligonucleotide
aaguguaacuuguugacuc

SEQ ID NO: 732403 - RNA, 19 nt, Artificial Sequence
  Description of Artificial Sequence: Synthetic oligonucleotide
aauaauaggcauuuuaguu

SEQ ID NO: 732404 - RNA, 19 nt, Artificial Sequence
  Description of Artificial Sequence: Synthetic oligonucleotide
gauagaguaacaugaagag

SEQ ID NO: 732405 - RNA, 19 nt, Artificial Sequence
  Description of Artificial Sequence: Synthetic oligonucleotide
uguuauguaacagggaugg

SEQ ID NO: 732406 - RNA, 19 nt, Artificial Sequence
  Description of Artificial Sequence: Synthetic oligonucleotide
ugauagaguaacaugaaga

SEQ ID NO: 732407 - RNA, 19 nt, Artificial Sequence
  Description of Artificial Sequence: Synthetic oligonucleotide
uuaggaguuacucuuguag

SEQ ID NO: 732408 - RNA, 19 nt, Artificial Sequence
  Description of Artificial Sequence: Synthetic oligonucleotide
ugaaaugacuuuuaauucc

SEQ ID NO: 732409 - RNA, 19 nt, Artificial Sequence
  Description of Artificial Sequence: Synthetic oligonucleotide
cuagaugcuauccugauag

SEQ ID NO: 732410 - RNA, 19 nt, Artificial Sequence
  Description of Artificial Sequence: Synthetic oligonucleotide
uaauuuuauacacaaucca

SEQ ID NO: 732411 - RNA, 19 nt, Artificial Sequence
  Description of Artificial Sequence: Synthetic oligonucleotide
aacuuguugacucagccca

SEQ ID NO: 732412 - RNA, 19 nt, Artificial Sequence
  Description of Artificial Sequence: Synthetic oligonucleotide
aagaaaguguucuccacuc

SEQ ID NO: 732413 - RNA, 19 nt, Artificial Sequence
  Description of Artificial Sequence: Synthetic oligonucleotide
uguaacauaugugaucugg

SEQ ID NO: 732414 - RNA, 19 nt, Artificial Sequence
  Description of Artificial Sequence: Synthetic oligonucleotide
auuucauacuuccuuguac

SEQ ID NO: 732415 - RNA, 19 nt, Artificial Sequence
  Description of Artificial Sequence: Synthetic oligonucleotide
aguaaguuaaaaucucauc

SEQ ID NO: 732416 - RNA, 19 nt, Artificial Sequence
  Description of Artificial Sequence: Synthetic oligonucleotide
gaaguguuauguaacaggg

SEQ ID NO: 732417 - RNA, 19 nt, Artificial Sequence
  Description of Artificial Sequence: Synthetic oligonucleotide
uucauggaccuuaagauga

SEQ ID NO: 732418 - RNA, 19 nt, Artificial Sequence
  Description of Artificial Sequence: Synthetic oligonucleotide
guaaugcuaaaauaauagg

SEQ ID NO: 732419 - RNA, 19 nt, Artificial Sequence
  Description of Artificial Sequence: Synthetic oligonucleotide
cagacacuuaacuugaggg

SEQ ID NO: 732420 - RNA, 19 nt, Artificial Sequence
  Description of Artificial Sequence: Synthetic oligonucleotide
aaaacguguacagugcuuc

SEQ ID NO: 732421 - RNA, 19 nt, Artificial Sequence
  Description of Artificial Sequence: Synthetic oligonucleotide
uaggaauuuauuccagggg

SEQ ID NO: 732422 - RNA, 19 nt, Artificial Sequence
  Description of Artificial Sequence: Synthetic oligonucleotide
uuuugucacaaccaggaac

SEQ ID NO: 732423 - RNA, 19 nt, Artificial Sequence
  Description of Artificial Sequence: Synthetic oligonucleotide
uauuaaucauccaacccug

SEQ ID NO: 732424 - RNA, 19 nt, Artificial Sequence
  Description of Artificial Sequence: Synthetic oligonucleotide
aacgacaugguguuuauau

SEQ ID NO: 732425 - RNA, 19 nt, Artificial Sequence
  Description of Artificial Sequence: Synthetic oligonucleotide
ugaauugccaagaugguau

SEQ ID NO: 732426 - RNA, 19 nt, Artificial Sequence
  Description of Artificial Sequence: Synthetic oligonucleotide
guuuauauaaacuggaaua

SEQ ID NO: 732427 - RNA, 19 nt, Artificial Sequence
  Description of Artificial Sequence: Synthetic oligonucleotide
gacauguugagucccaucc

SEQ ID NO: 732428 - RNA, 19 nt, Artificial Sequence
  Description of Artificial Sequence: Synthetic oligonucleotide
  modified_base (9)..(9): a, c, u, g, unknown or other
ucugauguncuucuguaga

SEQ ID NO: 732429 - RNA, 19 nt, Artificial Sequence
  Description of Artificial Sequence: Synthetic oligonucleotide
uauguaacagggaugggac

SEQ ID NO: 732430 - RNA, 19 nt, Artificial Sequence
  Description of Artificial Sequence: Synthetic oligonucleotide
acaccuguaacauauguga

SEQ ID NO: 732431 - RNA, 19 nt, Artificial Sequence
  Description of Artificial Sequence: Synthetic oligonucleotide
aguguuauguaacagggau

SEQ ID NO: 732432 - RNA, 19 nt, Artificial Sequence
  Description of Artificial Sequence: Synthetic oligonucleotide
accgaaaugccuucucucc

SEQ ID NO: 732433 - RNA, 19 nt, Artificial Sequence
  Description of Artificial Sequence: Synthetic oligonucleotide
auauaaguguaacuuguug

SEQ ID NO: 732434 - RNA, 19 nt, Artificial Sequence
  Description of Artificial Sequence: Synthetic oligonucleotide
uauccugauagcuucuucc

SEQ ID NO: 732435 - RNA, 19 nt, Artificial Sequence
  Description of Artificial Sequence: Synthetic oligonucleotide
acuggguuacuguagcuac

SEQ ID NO: 732436 - RNA, 19 nt, Artificial Sequence
  Description of Artificial Sequence: Synthetic oligonucleotide
cucugaguauuaaucaucc

SEQ ID NO: 732437 - RNA, 19 nt, Artificial Sequence
  Description of Artificial Sequence: Synthetic oligonucleotide
uauuccaggggcuauguac

SEQ ID NO: 732438 - RNA, 19 nt, Artificial Sequence
  Description of Artificial Sequence: Synthetic oligonucleotide
aaacuccagacacuuaacu

SEQ ID NO: 732439 - RNA, 19 nt, Artificial Sequence
  Description of Artificial Sequence: Synthetic oligonucleotide
  modified_base (4)..(4): a, c, u, g, unknown or other
uguncuucuguagaucucc

SEQ ID NO: 732440 - RNA, 19 nt, Artificial Sequence
  Description of Artificial Sequence: Synthetic oligonucleotide
uuuuguaauucguugcgcu

SEQ ID NO: 732441 - RNA, 19 nt, Artificial Sequence
  Description of Artificial Sequence: Synthetic oligonucleotide
ugucauugugagcuguccg

SEQ ID NO: 732442 - RNA, 19 nt, Artificial Sequence
  Description of Artificial Sequence: Synthetic oligonucleotide
uuaaucauccaacccuggc

SEQ ID NO: 732443 - RNA, 19 nt, Artificial Sequence
  Description of Artificial Sequence: Synthetic oligonucleotide
aagcacuaaugguaucugg

SEQ ID NO: 732444 - RNA, 19 nt, Artificial Sequence
  Description of Artificial Sequence: Synthetic oligonucleotide
ggcauuuuaguuuugaaga

SEQ ID NO: 732445 - RNA, 19 nt, Artificial Sequence
  Description of Artificial Sequence: Synthetic oligonucleotide
aauggaacuuccgcucugc

SEQ ID NO: 732446 - RNA, 19 nt, Artificial Sequence
  Description of Artificial Sequence: Synthetic oligonucleotide
uuguaauucguugcgcugg

SEQ ID NO: 732447 - RNA, 19 nt, Artificial Sequence
  Description of Artificial Sequence: Synthetic oligonucleotide
gaugggacacuacaaauga

SEQ ID NO: 732448 - RNA, 19 nt, Artificial Sequence
  Description of Artificial Sequence: Synthetic oligonucleotide
guaacuuguugacucagcc

SEQ ID NO: 732449 - RNA, 19 nt, Artificial Sequence
  Description of Artificial Sequence: Synthetic oligonucleotide
uaggaguuacucuuguagc

SEQ ID NO: 732450 - RNA, 19 nt, Artificial Sequence
  Description of Artificial Sequence: Synthetic oligonucleotide
guaguuacuaaaugauggc

SEQ ID NO: 732451 - RNA, 19 nt, Artificial Sequence
  Description of Artificial Sequence: Synthetic oligonucleotide
uguaaaggaccgaccacag

SEQ ID NO: 732452 - RNA, 19 nt, Artificial Sequence
  Description of Artificial Sequence: Synthetic oligonucleotide
uacaccuguaacauaugug

SEQ ID NO: 732453 - RNA, 19 nt, Artificial Sequence
  Description of Artificial Sequence: Synthetic oligonucleotide
ugaagaguugcuguagugc

SEQ ID NO: 732454 - RNA, 19 nt, Artificial Sequence
  Description of Artificial Sequence: Synthetic oligonucleotide
aagaaguguuauguaacag

SEQ ID NO: 732455 - RNA, 19 nt, Artificial Sequence
  Description of Artificial Sequence: Synthetic oligonucleotide
uuuguaauucguugcgcug

SEQ ID NO: 732456 - RNA, 19 nt, Artificial Sequence
  Description of Artificial Sequence: Synthetic oligonucleotide
gauccuagaugcuauccug

SEQ ID NO: 732457 - RNA, 19 nt, Artificial Sequence
  Description of Artificial Sequence: Synthetic oligonucleotide
ugggauauaaguguaacuu

SEQ ID NO: 732458 - RNA, 19 nt, Artificial Sequence
  Description of Artificial Sequence: Synthetic oligonucleotide
guuggugucccucugaaga

SEQ ID NO: 732459 - RNA, 19 nt, Artificial Sequence
  Description of Artificial Sequence: Synthetic oligonucleotide
guauuaaucauccaacccu

SEQ ID NO: 732460 - RNA, 19 nt, Artificial Sequence
  Description of Artificial Sequence: Synthetic oligonucleotide
gauguuguaaaggaccgac

SEQ ID NO: 732461 - RNA, 19 nt, Artificial Sequence
  Description of Artificial Sequence: Synthetic oligonucleotide
gaagaaguguuauguaaca

SEQ ID NO: 732462 - RNA, 19 nt, Artificial Sequence
  Description of Artificial Sequence: Synthetic oligonucleotide
ucugggacccuuuaagaac

SEQ ID NO: 732463 - RNA, 19 nt, Artificial Sequence
  Description of Artificial Sequence: Synthetic oligonucleotide
uaauaggcauuuuaguuuu

SEQ ID NO: 732464 - RNA, 19 nt, Artificial Sequence
  Description of Artificial Sequence: Synthetic oligonucleotide
uuagagugaguaugaacga

SEQ ID NO: 732465 - RNA, 19 nt, Artificial Sequence
  Description of Artificial Sequence: Synthetic oligonucleotide
uuucacucccaucaaugga

SEQ ID NO: 732466 - RNA, 19 nt, Artificial Sequence
  Description of Artificial Sequence: Synthetic oligonucleotide
uguauagaguuuuccacau

SEQ ID NO: 732467 - RNA, 19 nt, Artificial Sequence
  Description of Artificial Sequence: Synthetic oligonucleotide
ugaaguuaugacuguuuga

SEQ ID NO: 732468 - RNA, 19 nt, Artificial Sequence
  Description of Artificial Sequence: Synthetic oligonucleotide
uguugagucccauccuggg

SEQ ID NO: 732469 - RNA, 19 nt, Artificial Sequence
  Description of Artificial Sequence: Synthetic oligonucleotide
uaacuuguugacucagccc

SEQ ID NO: 732470 - RNA, 19 nt, Artificial Sequence
  Description of Artificial Sequence: Synthetic oligonucleotide
uguacuuguuacacuuuca

SEQ ID NO: 732471 - RNA, 19 nt, Artificial Sequence
  Description of Artificial Sequence: Synthetic oligonucleotide
ugacucucuauagaccugg

SEQ ID NO: 732472 - RNA, 19 nt, Artificial Sequence
  Description of Artificial Sequence: Synthetic oligonucleotide
gacacuuaacuugagggac

SEQ ID NO: 732473 - RNA, 19 nt, Artificial Sequence
  Description of Artificial Sequence: Synthetic oligonucleotide
ugugauagaguaacaugaa

SEQ ID NO: 732474 - RNA, 19 nt, Artificial Sequence
  Description of Artificial Sequence: Synthetic oligonucleotide
aaguuaugacuguuugaca

SEQ ID NO: 732475 - RNA, 19 nt, Artificial Sequence
  Description of Artificial Sequence: Synthetic oligonucleotide
guaacauaugugaucuggg

SEQ ID NO: 732476 - RNA, 19 nt, Artificial Sequence
  Description of Artificial Sequence: Synthetic oligonucleotide
agauauguugacauguuga

SEQ ID NO: 732477 - RNA, 19 nt, Artificial Sequence
  Description of Artificial Sequence: Synthetic oligonucleotide
guucauggaccuuaagaug

SEQ ID NO: 732478 - RNA, 19 nt, Artificial Sequence
  Description of Artificial Sequence: Synthetic oligonucleotide
guuuagagugaguaugaac

SEQ ID NO: 732479 - RNA, 19 nt, Artificial Sequence
  Description of Artificial Sequence: Synthetic oligonucleotide
uagcuacuuguguagauac

SEQ ID NO: 732480 - RNA, 19 nt, Artificial Sequence
  Description of Artificial Sequence: Synthetic oligonucleotide
cuguaguuacuaaaugaug

SEQ ID NO: 732481 - RNA, 19 nt, Artificial Sequence
  Description of Artificial Sequence: Synthetic oligonucleotide
aauccaauguaaugcuaaa

SEQ ID NO: 732482 - RNA, 19 nt, Artificial Sequence
  Description of Artificial Sequence: Synthetic oligonucleotide
aaggcuugcauccuuuauu

SEQ ID NO: 732483 - RNA, 19 nt, Artificial Sequence
  Description of Artificial Sequence: Synthetic oligonucleotide
uccucaauaggcucugugu

SEQ ID NO: 732484 - RNA, 19 nt, Artificial Sequence
  Description of Artificial Sequence: Synthetic oligonucleotide
gugugauagaguaacauga

SEQ ID NO: 732485 - RNA, 19 nt, Artificial Sequence
  Description of Artificial Sequence: Synthetic oligonucleotide
uaauucguugcgcuggcaa

SEQ ID NO: 732486 - RNA, 19 nt, Artificial Sequence
  Description of Artificial Sequence: Synthetic oligonucleotide
guacuuguuacacuuucac

SEQ ID NO: 732487 - RNA, 19 nt, Artificial Sequence
  Description of Artificial Sequence: Synthetic oligonucleotide
uguacacaaaagugucaag

SEQ ID NO: 732488 - RNA, 19 nt, Artificial Sequence
  Description of Artificial Sequence: Synthetic oligonucleotide
acucccaucaauggacacc

SEQ ID NO: 732489 - RNA, 19 nt, Artificial Sequence
  Description of Artificial Sequence: Synthetic oligonucleotide
ugccaagaugguaucagac

SEQ ID NO: 732490 - RNA, 19 nt, Artificial Sequence
  Description of Artificial Sequence: Synthetic oligonucleotide
ugcuguagugcccuaauuu

SEQ ID NO: 732491 - RNA, 19 nt, Artificial Sequence
  Description of Artificial Sequence: Synthetic oligonucleotide
  modified_base (6)..(6): a, c, u, g, unknown or other
gauguncuucuguagaucu

SEQ ID NO: 732492 - RNA, 19 nt, Artificial Sequence
  Description of Artificial Sequence: Synthetic oligonucleotide
ugagacuuaggaguuacuc

SEQ ID NO: 732493 - RNA, 19 nt, Artificial Sequence
  Description of Artificial Sequence: Synthetic oligonucleotide
uguaauucguugcgcuggc

SEQ ID NO: 732494 - RNA, 19 nt, Artificial Sequence
  Description of Artificial Sequence: Synthetic oligonucleotide
uacuuguuacacuuucacu

SEQ ID NO: 732495 - RNA, 19 nt, Artificial Sequence
  Description of Artificial Sequence: Synthetic oligonucleotide
uagugcccuaauuucauac

SEQ ID NO: 732496 - RNA, 19 nt, Artificial Sequence
  Description of Artificial Sequence: Synthetic oligonucleotide
cuggaauauucuguaaacc

SEQ ID NO: 732497 - RNA, 19 nt, Artificial Sequence
  Description of Artificial Sequence: Synthetic oligonucleotide
acgguuuagagugaguaug

SEQ ID NO: 732498 - RNA, 19 nt, Artificial Sequence
  Description of Artificial Sequence: Synthetic oligonucleotide
uuuauugcucuguggcucu

SEQ ID NO: 732499 - RNA, 19 nt, Artificial Sequence
  Description of Artificial Sequence: Synthetic oligonucleotide
aauucguugcgcuggcaaa

SEQ ID NO: 732500 - RNA, 19 nt, Artificial Sequence
  Description of Artificial Sequence: Synthetic oligonucleotide
accauuggauguugccacc

SEQ ID NO: 732501 - RNA, 19 nt, Artificial Sequence
  Description of Artificial Sequence: Synthetic oligonucleotide
ucugguuucuguaguuacu

SEQ ID NO: 732502 - RNA, 19 nt, Artificial Sequence
  Description of Artificial Sequence: Synthetic oligonucleotide
acuuccgcucugcagggcg

SEQ ID NO: 732503 - RNA, 19 nt, Artificial Sequence
  Description of Artificial Sequence: Synthetic oligonucleotide
uguagugcccuaauuucau

SEQ ID NO: 732504 - RNA, 19 nt, Artificial Sequence
  Description of Artificial Sequence: Synthetic oligonucleotide
uggauguugccaccaaggu

SEQ ID NO: 732505 - RNA, 19 nt, Artificial Sequence
  Description of Artificial Sequence: Synthetic oligonucleotide
cauguugagucccauccug

SEQ ID NO: 732506 - RNA, 19 nt, Artificial Sequence
  Description of Artificial Sequence: Synthetic oligonucleotide
gaguuacucuuguagcaug

SEQ ID NO: 732507 - RNA, 19 nt, Artificial Sequence
  Description of Artificial Sequence: Synthetic oligonucleotide
uuuacaccgaaaugccuuc

SEQ ID NO: 732508 - RNA, 19 nt, Artificial Sequence
  Description of Artificial Sequence: Synthetic oligonucleotide
uccauaaccugucgcaaau

SEQ ID NO: 732509 - RNA, 19 nt, Artificial Sequence
  Description of Artificial Sequence: Synthetic oligonucleotide
aggucagaggucugguuuc

SEQ ID NO: 732510 - RNA, 19 nt, Artificial Sequence
  Description of Artificial Sequence: Synthetic oligonucleotide
gaccuuaagaugaugagcu

SEQ ID NO: 732511 - RNA, 19 nt, Artificial Sequence
  Description of Artificial Sequence: Synthetic oligonucleotide
uguauccucacaugguuuu

SEQ ID NO: 732512 - RNA, 19 nt, Artificial Sequence
  Description of Artificial Sequence: Synthetic oligonucleotide
aguuaaaaucucaucuuga

SEQ ID NO: 732513 - RNA, 19 nt, Artificial Sequence
  Description of Artificial Sequence: Synthetic oligonucleotide
ucauacuuccuuguacaca

SEQ ID NO: 732514 - RNA, 19 nt, Artificial Sequence
  Description of Artificial Sequence: Synthetic oligonucleotide
gaacuuccgcucugcaggg

SEQ ID NO: 732515 - RNA, 19 nt, Artificial Sequence
  Description of Artificial Sequence: Synthetic oligonucleotide
gucgcaaaugcuuucccac

SEQ ID NO: 732516 - RNA, 19 nt, Artificial Sequence
  Description of Artificial Sequence: Synthetic oligonucleotide
aguguaacuuguugacuca

SEQ ID NO: 732517 - RNA, 19 nt, Artificial Sequence
  Description of Artificial Sequence: Synthetic oligonucleotide
aaacguguacagugcuuca

SEQ ID NO: 732518 - RNA, 19 nt, Artificial Sequence
  Description of Artificial Sequence: Synthetic oligonucleotide
  modified_base (7)..(7): a, c, u, g, unknown or other
ugauguncuucuguagauc

SEQ ID NO: 732519 - RNA, 19 nt, Artificial Sequence
  Description of Artificial Sequence: Synthetic oligonucleotide
ugugccauccuguguuacc

SEQ ID NO: 732520 - RNA, 19 nt, Artificial Sequence
  Description of Artificial Sequence: Synthetic oligonucleotide
ugcaucgugaguggggacc

SEQ ID NO: 732521 - RNA, 19 nt, Artificial Sequence
  Description of Artificial Sequence: Synthetic oligonucleotide
agugcccuaauuucauacu

SEQ ID NO: 732522 - RNA, 19 nt, Artificial Sequence
  Description of Artificial Sequence: Synthetic oligonucleotide
ucuacaccuguaacauaug

SEQ ID NO: 732523 - RNA, 19 nt, Artificial Sequence
  Description of Artificial Sequence: Synthetic oligonucleotide
cagacuggguuacuguagc

SEQ ID NO: 732524 - RNA, 19 nt, Artificial Sequence
  Description of Artificial Sequence: Synthetic oligonucleotide
uagcaacagaguguguucc

SEQ ID NO: 732525 - RNA, 19 nt, Artificial Sequence
  Description of Artificial Sequence: Synthetic oligonucleotide
uuaagaugaugagcuguug

SEQ ID NO: 732526 - RNA, 19 nt, Artificial Sequence
  Description of Artificial Sequence: Synthetic oligonucleotide
cuguacuuguuacacuuuc

SEQ ID NO: 732527 - RNA, 19 nt, Artificial Sequence
  Description of Artificial Sequence: Synthetic oligonucleotide
ugacucagcccagacuggg

SEQ ID NO: 732528 - RNA, 19 nt, Artificial Sequence
  Description of Artificial Sequence: Synthetic oligonucleotide
acaugaagaguugcuguag

SEQ ID NO: 732529 - RNA, 19 nt, Artificial Sequence
  Description of Artificial Sequence: Synthetic oligonucleotide
ugugcaguaguaaggucuu

SEQ ID NO: 732530 - RNA, 19 nt, Artificial Sequence
  Description of Artificial Sequence: Synthetic oligonucleotide
guuguaaaggaccgaccac

SEQ ID NO: 732531 - RNA, 19 nt, Artificial Sequence
  Description of Artificial Sequence: Synthetic oligonucleotide
auguacacaaaagugucaa

SEQ ID NO: 732532 - RNA, 19 nt, Artificial Sequence
  Description of Artificial Sequence: Synthetic oligonucleotide
gguggauuccagaagucgg

SEQ ID NO: 732533 - RNA, 19 nt, Artificial Sequence
  Description of Artificial Sequence: Synthetic oligonucleotide
uggauccuagaugcuaucc

SEQ ID NO: 732534 - RNA, 19 nt, Artificial Sequence
  Description of Artificial Sequence: Synthetic oligonucleotide
auuaaucauccaacccugg

SEQ ID NO: 732535 - RNA, 19 nt, Artificial Sequence
  Description of Artificial Sequence: Synthetic oligonucleotide
uugacucucuauagaccug

SEQ ID NO: 732536 - RNA, 19 nt, Artificial Sequence
  Description of Artificial Sequence: Synthetic oligonucleotide
uguagcuacuuguguagau

SEQ ID NO: 732537 - RNA, 19 nt, Artificial Sequence
  Description of Artificial Sequence: Synthetic oligonucleotide
uagagugaguaugaacgac

SEQ ID NO: 732538 - RNA, 19 nt, Artificial Sequence
  Description of Artificial Sequence: Synthetic oligonucleotide
gagacuuaggaguuacucu

SEQ ID NO: 732539 - RNA, 19 nt, Artificial Sequence
  Description of Artificial Sequence: Synthetic oligonucleotide
cuuaacuugagggacaccu

SEQ ID NO: 732540 - RNA, 19 nt, Artificial Sequence
  Description of Artificial Sequence: Synthetic oligonucleotide
uguggaaugcugccagguc

SEQ ID NO: 732541 - RNA, 19 nt, Artificial Sequence
  Description of Artificial Sequence: Synthetic oligonucleotide
agcacuaaugguaucugga

SEQ ID NO: 732542 - RNA, 19 nt, Artificial Sequence
  Description of Artificial Sequence: Synthetic oligonucleotide
uuacuaaaugauggcuaug

SEQ ID NO: 732543 - RNA, 19 nt, Artificial Sequence
  Description of Artificial Sequence: Synthetic oligonucleotide
uguuggugucccucugaag

SEQ ID NO: 732544 - RNA, 19 nt, Artificial Sequence
  Description of Artificial Sequence: Synthetic oligonucleotide
gaucuguuuguaugucuuc

SEQ ID NO: 732545 - RNA, 19 nt, Artificial Sequence
  Description of Artificial Sequence: Synthetic oligonucleotide
ugguauugccaauggccug

SEQ ID NO: 732546 - RNA, 19 nt, Artificial Sequence
  Description of Artificial Sequence: Synthetic oligonucleotide
uuguacgguuuagagugag

SEQ ID NO: 732547 - RNA, 19 nt, Artificial Sequence
  Description of Artificial Sequence: Synthetic oligonucleotide
uguuggauccuagaugcua

SEQ ID NO: 732548 - RNA, 19 nt, Artificial Sequence
  Description of Artificial Sequence: Synthetic oligonucleotide
gacugcaucgugagugggg

SEQ ID NO: 732549 - RNA, 19 nt, Artificial Sequence
  Description of Artificial Sequence: Synthetic oligonucleotide
uacgguuuagagugaguau

SEQ ID NO: 732550 - RNA, 19 nt, Artificial Sequence
  Description of Artificial Sequence: Synthetic oligonucleotide
caagcugaacugcaaucug

SEQ ID NO: 732551 - RNA, 19 nt, Artificial Sequence
  Description of Artificial Sequence: Synthetic oligonucleotide
cuggcaaaugcccucccac

SEQ ID NO: 732552 - RNA, 19 nt, Artificial Sequence
  Description of Artificial Sequence: Synthetic oligonucleotide
uguggcucugaguauuaau

SEQ ID NO: 732553 - RNA, 19 nt, Artificial Sequence
  Description of Artificial Sequence: Synthetic oligonucleotide
ugcaguaguaaggucuuuc

SEQ ID NO: 732554 - RNA, 19 nt, Artificial Sequence
  Description of Artificial Sequence: Synthetic oligonucleotide
uggcaaaugcccucccaca

SEQ ID NO: 732555 - RNA, 19 nt, Artificial Sequence
  Description of Artificial Sequence: Synthetic oligonucleotide
uguggagaucuguuuguau

SEQ ID NO: 732556 - RNA, 19 nt, Artificial Sequence
  Description of Artificial Sequence: Synthetic oligonucleotide
ugaugagcuguuguauaga

SEQ ID NO: 732557 - RNA, 19 nt, Artificial Sequence
  Description of Artificial Sequence: Synthetic oligonucleotide
uguacgguuuagagugagu

SEQ ID NO: 732558 - RNA, 19 nt, Artificial Sequence
  Description of Artificial Sequence: Synthetic oligonucleotide
aggucuugagccacaauug

SEQ ID NO: 732559 - RNA, 19 nt, Artificial Sequence
  Description of Artificial Sequence: Synthetic oligonucleotide
uuccauaaccugucgcaaa

SEQ ID NO: 732560 - RNA, 19 nt, Artificial Sequence
  Description of Artificial Sequence: Synthetic oligonucleotide
gauacaauguccucuccuu

SEQ ID NO: 732561 - RNA, 19 nt, Artificial Sequence
  Description of Artificial Sequence: Synthetic oligonucleotide
aggagaugacugcaucgug

SEQ ID NO: 732562 - RNA, 19 nt, Artificial Sequence
  Description of Artificial Sequence: Synthetic oligonucleotide
acuaaaugauggcuauguu

SEQ ID NO: 732563 - RNA, 19 nt, Artificial Sequence
  Description of Artificial Sequence: Synthetic oligonucleotide
accuuaagaugaugagcug

SEQ ID NO: 732564 - RNA, 19 nt, Artificial Sequence
  Description of Artificial Sequence: Synthetic oligonucleotide
ucacaaccaggaacuguac

SEQ ID NO: 732565 - RNA, 19 nt, Artificial Sequence
  Description of Artificial Sequence: Synthetic oligonucleotide
accugucgcaaaugcuuuc

SEQ ID NO: 732566 - RNA, 19 nt, Artificial Sequence
  Description of Artificial Sequence: Synthetic oligonucleotide
guaaaggaccgaccacagc

SEQ ID NO: 732567 - RNA, 19 nt, Artificial Sequence
  Description of Artificial Sequence: Synthetic oligonucleotide
ugaacgacaugguguuuau

SEQ ID NO: 732568 - RNA, 19 nt, Artificial Sequence
  Description of Artificial Sequence: Synthetic oligonucleotide
ugaaucacuuuaggaauuu

SEQ ID NO: 732569 - RNA, 19 nt, Artificial Sequence
  Description of Artificial Sequence: Synthetic oligonucleotide
auccuguguuaccauggug

SEQ ID NO: 732570 - RNA, 19 nt, Artificial Sequence
  Description of Artificial Sequence: Synthetic oligonucleotide
auguaacagggaugggaca

SEQ ID NO: 732571 - RNA, 19 nt, Artificial Sequence
  Description of Artificial Sequence: Synthetic oligonucleotide
augggugugccauccugug

SEQ ID NO: 732572 - RNA, 19 nt, Artificial Sequence
  Description of Artificial Sequence: Synthetic oligonucleotide
caccgaaaugccuucucuc

SEQ ID NO: 732573 - RNA, 19 nt, Artificial Sequence
  Description of Artificial Sequence: Synthetic oligonucleotide
auaaccugucgcaaaugcu

SEQ ID NO: 732574 - RNA, 19 nt, Artificial Sequence
  Description of Artificial Sequence: Synthetic oligonucleotide
ggcugugugauagaguaac

SEQ ID NO: 732575 - RNA, 19 nt, Artificial Sequence
  Description of Artificial Sequence: Synthetic oligonucleotide
gcguucauggaccuuaaga

SEQ ID NO: 732576 - RNA, 19 nt, Artificial Sequence
  Description of Artificial Sequence: Synthetic oligonucleotide
ugcuauccugauagcuucu

SEQ ID NO: 732577 - RNA, 19 nt, Artificial Sequence
  Description of Artificial Sequence: Synthetic oligonucleotide
guaugaguucugaaaugac

SEQ ID NO: 732578 - RNA, 19 nt, Artificial Sequence
  Description of Artificial Sequence: Synthetic oligonucleotide
aguuacucuuguagcaugu

SEQ ID NO: 732579 - RNA, 19 nt, Artificial Sequence
  Description of Artificial Sequence: Synthetic oligonucleotide
auaaggccggucuccugug

SEQ ID NO: 732580 - RNA, 19 nt, Artificial Sequence
  Description of Artificial Sequence: Synthetic oligonucleotide
augaacgacaugguguuua

SEQ ID NO: 732581 - RNA, 19 nt, Artificial Sequence
  Description of Artificial Sequence: Synthetic oligonucleotide
agucggcugugugauagag

SEQ ID NO: 732582 - RNA, 19 nt, Artificial Sequence
  Description of Artificial Sequence: Synthetic oligonucleotide
gaauuuauuccaggggcua

SEQ ID NO: 732583 - RNA, 19 nt, Artificial Sequence
  Description of Artificial Sequence: Synthetic oligonucleotide
  modified_base (5)..(5): a, c, u, g, unknown or other
auguncuucuguagaucuc

SEQ ID NO: 732584 - RNA, 19 nt, Artificial Sequence
  Description of Artificial Sequence: Synthetic oligonucleotide
ggguggauuccagaagucg

SEQ ID NO: 732585 - RNA, 19 nt, Artificial Sequence
  Description of Artificial Sequence: Synthetic oligonucleotide
guacgguuuagagugagua

SEQ ID NO: 732586 - RNA, 19 nt, Artificial Sequence
  Description of Artificial Sequence: Synthetic oligonucleotide
cugucgcaaaugcuuuccc

SEQ ID NO: 732587 - RNA, 19 nt, Artificial Sequence
  Description of Artificial Sequence: Synthetic oligonucleotide
cuuuacaccgaaaugccuu

SEQ ID NO: 732588 - RNA, 19 nt, Artificial Sequence
  Description of Artificial Sequence: Synthetic oligonucleotide
gaaaguguucuccacucuu

SEQ ID NO: 732589 - RNA, 19 nt, Artificial Sequence
  Description of Artificial Sequence: Synthetic oligonucleotide
acgacaugguguuuauaua

SEQ ID NO: 732590 - RNA, 19 nt, Artificial Sequence
  Description of Artificial Sequence: Synthetic oligonucleotide
cacuuaacuugagggacac

SEQ ID NO: 732591 - RNA, 19 nt, Artificial Sequence
  Description of Artificial Sequence: Synthetic oligonucleotide
cugcuccaaagcacuaaug

SEQ ID NO: 732592 - RNA, 19 nt, Artificial Sequence
  Description of Artificial Sequence: Synthetic oligonucleotide
auuccauaaccugucgcaa

SEQ ID NO: 732593 - RNA, 19 nt, Artificial Sequence
  Description of Artificial Sequence: Synthetic oligonucleotide
guaugaacgacaugguguu

SEQ ID NO: 732594 - RNA, 19 nt, Artificial Sequence
  Description of Artificial Sequence: Synthetic oligonucleotide
uuauuccaggggcuaugua

SEQ ID NO: 732595 - RNA, 19 nt, Artificial Sequence
  Description of Artificial Sequence: Synthetic oligonucleotide
uucguugcgcuggcaaaug

SEQ ID NO: 732596 - RNA, 19 nt, Artificial Sequence
  Description of Artificial Sequence: Synthetic oligonucleotide
cuuccgcucugcagggcgg

SEQ ID NO: 732597 - RNA, 19 nt, Artificial Sequence
  Description of Artificial Sequence: Synthetic oligonucleotide
ggauguugccaccaagguc

SEQ ID NO: 732598 - RNA, 19 nt, Artificial Sequence
  Description of Artificial Sequence: Synthetic oligonucleotide
agacuggguuacuguagcu

SEQ ID NO: 732599 - RNA, 19 nt, Artificial Sequence
  Description of Artificial Sequence: Synthetic oligonucleotide
aaggaccgaccacagccuu

SEQ ID NO: 732600 - RNA, 19 nt, Artificial Sequence
  Description of Artificial Sequence: Synthetic oligonucleotide
ggauauaaguguaacuugu

SEQ ID NO: 732601 - RNA, 19 nt, Artificial Sequence
  Description of Artificial Sequence: Synthetic oligonucleotide
ugcgcuggcaaaugcccuc

SEQ ID NO: 732602 - RNA, 19 nt, Artificial Sequence
  Description of Artificial Sequence: Synthetic oligonucleotide
acacuuaacuugagggaca

SEQ ID NO: 732603 - RNA, 19 nt, Artificial Sequence
  Description of Artificial Sequence: Synthetic oligonucleotide
uggguguguagugggacaa

SEQ ID NO: 732604 - RNA, 19 nt, Artificial Sequence
  Description of Artificial Sequence: Synthetic oligonucleotide
cuuaagaugaugagcuguu

SEQ ID NO: 732605 - RNA, 19 nt, Artificial Sequence
  Description of Artificial Sequence: Synthetic oligonucleotide
gcuacuuguguagauacaa

SEQ ID NO: 732606 - RNA, 19 nt, Artificial Sequence
  Description of Artificial Sequence: Synthetic oligonucleotide
auucguugcgcuggcaaau

SEQ ID NO: 732607 - RNA, 19 nt, Artificial Sequence
  Description of Artificial Sequence: Synthetic oligonucleotide
agcguucauggaccuuaag

SEQ ID NO: 732608 - RNA, 19 nt, Artificial Sequence
  Description of Artificial Sequence: Synthetic oligonucleotide
uuacaccgaaaugccuucu

SEQ ID NO: 732609 - RNA, 19 nt, Artificial Sequence
  Description of Artificial Sequence: Synthetic oligonucleotide
uugcuguagugcccuaauu

SEQ ID NO: 732610 - RNA, 19 nt, Artificial Sequence
  Description of Artificial Sequence: Synthetic oligonucleotide
gaucuccuguccaguauga

SEQ ID NO: 732611 - RNA, 19 nt, Artificial Sequence
  Description of Artificial Sequence: Synthetic oligonucleotide
caguaaguuaaaaucucau

SEQ ID NO: 732612 - RNA, 19 nt, Artificial Sequence
  Description of Artificial Sequence: Synthetic oligonucleotide
uaaggccggucuccugugu

SEQ ID NO: 732613 - RNA, 19 nt, Artificial Sequence
  Description of Artificial Sequence: Synthetic oligonucleotide
uggguaccauuggauguug

SEQ ID NO: 732614 - RNA, 19 nt, Artificial Sequence
  Description of Artificial Sequence: Synthetic oligonucleotide
ugucagcuugagauauguu

SEQ ID NO: 732615 - RNA, 19 nt, Artificial Sequence
  Description of Artificial Sequence: Synthetic oligonucleotide
ccaacccuggcguuucucc

SEQ ID NO: 732616 - RNA, 19 nt, Artificial Sequence
  Description of Artificial Sequence: Synthetic oligonucleotide
cuacaccuguaacauaugu

SEQ ID NO: 732617 - RNA, 19 nt, Artificial Sequence
  Description of Artificial Sequence: Synthetic oligonucleotide
gacuggguuacuguagcua

SEQ ID NO: 732618 - RNA, 19 nt, Artificial Sequence
  Description of Artificial Sequence: Synthetic oligonucleotide
ugcgagcguucauggaccu

SEQ ID NO: 732619 - RNA, 19 nt, Artificial Sequence
  Description of Artificial Sequence: Synthetic oligonucleotide
acuuguugacucagcccag

SEQ ID NO: 732620 - RNA, 19 nt, Artificial Sequence
  Description of Artificial Sequence: Synthetic oligonucleotide
cuguagccagaaaaugaaa

SEQ ID NO: 732621 - RNA, 19 nt, Artificial Sequence
  Description of Artificial Sequence: Synthetic oligonucleotide
agggcucgaagaaggcuuc

SEQ ID NO: 732622 - RNA, 19 nt, Artificial Sequence
  Description of Artificial Sequence: Synthetic oligonucleotide
uaacagggaugggacacua

SEQ ID NO: 732623 - RNA, 19 nt, Artificial Sequence
  Description of Artificial Sequence: Synthetic oligonucleotide
guugacauguugaguccca

SEQ ID NO: 732624 - RNA, 19 nt, Artificial Sequence
  Description of Artificial Sequence: Synthetic oligonucleotide
guuacucuuguagcauguc

SEQ ID NO: 732625 - RNA, 19 nt, Artificial Sequence
  Description of Artificial Sequence: Synthetic oligonucleotide
cugggauauaaguguaacu

SEQ ID NO: 732626 - RNA, 19 nt, Artificial Sequence
  Description of Artificial Sequence: Synthetic oligonucleotide
uugacauguugagucccau

SEQ ID NO: 732627 - RNA, 19 nt, Artificial Sequence
  Description of Artificial Sequence: Synthetic oligonucleotide
uccccagugugcagcccug

SEQ ID NO: 732628 - RNA, 19 nt, Artificial Sequence
  Description of Artificial Sequence: Synthetic oligonucleotide
uuauugcucuguggcucug

SEQ ID NO: 732629 - RNA, 19 nt, Artificial Sequence
  Description of Artificial Sequence: Synthetic oligonucleotide
ccuguauggguucugaugu

SEQ ID NO: 732630 - RNA, 19 nt, Artificial Sequence
  Description of Artificial Sequence: Synthetic oligonucleotide
cuuaggaguuacucuugua

SEQ ID NO: 732631 - RNA, 19 nt, Artificial Sequence
  Description of Artificial Sequence: Synthetic oligonucleotide
ccugggauauaaguguaac

SEQ ID NO: 732632 - RNA, 19 nt, Artificial Sequence
  Description of Artificial Sequence: Synthetic oligonucleotide
aucgugaguggggaccgug

SEQ ID NO: 732633 - RNA, 19 nt, Artificial Sequence
  Description of Artificial Sequence: Synthetic oligonucleotide
cugaauugccaagauggua

SEQ ID NO: 732634 - RNA, 19 nt, Artificial Sequence
  Description of Artificial Sequence: Synthetic oligonucleotide
gaaggcuugcauccuuuau

SEQ ID NO: 732635 - RNA, 19 nt, Artificial Sequence
  Description of Artificial Sequence: Synthetic oligonucleotide
agaggcuguguggaaugcu

SEQ ID NO: 732636 - RNA, 19 nt, Artificial Sequence
  Description of Artificial Sequence: Synthetic oligonucleotide
cagaaaaugaaaggcuccu

SEQ ID NO: 732637 - RNA, 19 nt, Artificial Sequence
  Description of Artificial Sequence: Synthetic oligonucleotide
gaugggugugccauccugu

SEQ ID NO: 732638 - RNA, 19 nt, Artificial Sequence
  Description of Artificial Sequence: Synthetic oligonucleotide
gcaucgugaguggggaccg

SEQ ID NO: 732639 - RNA, 19 nt, Artificial Sequence
  Description of Artificial Sequence: Synthetic oligonucleotide
  modified_base (8)..(8): a, c, u, g, unknown or other
cugauguncuucuguagau

SEQ ID NO: 732640 - RNA, 19 nt, Artificial Sequence
  Description of Artificial Sequence: Synthetic oligonucleotide
cauccaacccuggcguuuc

SEQ ID NO: 732641 - RNA, 19 nt, Artificial Sequence
  Description of Artificial Sequence: Synthetic oligonucleotide
uggggaccgugaugggugu

SEQ ID NO: 732642 - RNA, 19 nt, Artificial Sequence
  Description of Artificial Sequence: Synthetic oligonucleotide
ccugucgcaaaugcuuucc

SEQ ID NO: 732643 - RNA, 19 nt, Artificial Sequence
  Description of Artificial Sequence: Synthetic oligonucleotide
aguugcuguagugcccuaa

SEQ ID NO: 732644 - RNA, 19 nt, Artificial Sequence
  Description of Artificial Sequence: Synthetic oligonucleotide
cucccaucaauggacaccu

SEQ ID NO: 732645 - RNA, 19 nt, Artificial Sequence
  Description of Artificial Sequence: Synthetic oligonucleotide
cgacaugguguuuauauaa

SEQ ID NO: 732646 - RNA, 19 nt, Artificial Sequence
  Description of Artificial Sequence: Synthetic oligonucleotide
cccucagcggugaccauag

SEQ ID NO: 732647 - RNA, 19 nt, Artificial Sequence
  Description of Artificial Sequence: Synthetic oligonucleotide
ugccauccuguguuaccau

SEQ ID NO: 732648 - RNA, 19 nt, Artificial Sequence
  Description of Artificial Sequence: Synthetic oligonucleotide
cacuacaaaugaggucuuc

SEQ ID NO: 732649 - RNA, 19 nt, Artificial Sequence
  Description of Artificial Sequence: Synthetic oligonucleotide
gguccuguggguggauucc

SEQ ID NO: 732650 - RNA, 19 nt, Artificial Sequence
  Description of Artificial Sequence: Synthetic oligonucleotide
guagugcccuaauuucaua

SEQ ID NO: 732651 - RNA, 19 nt, Artificial Sequence
  Description of Artificial Sequence: Synthetic oligonucleotide
ggaauuuauuccaggggcu

SEQ ID NO: 732652 - RNA, 19 nt, Artificial Sequence
  Description of Artificial Sequence: Synthetic oligonucleotide
ggacaccuuugcugcauac

SEQ ID NO: 732653 - RNA, 19 nt, Artificial Sequence
  Description of Artificial Sequence: Synthetic oligonucleotide
cauuggauguugccaccaa

SEQ ID NO: 732654 - RNA, 19 nt, Artificial Sequence
  Description of Artificial Sequence: Synthetic oligonucleotide
gaccgugaugggugugcca

SEQ ID NO: 732655 - RNA, 19 nt, Artificial Sequence
  Description of Artificial Sequence: Synthetic oligonucleotide
guuguacgguuuagaguga

SEQ ID NO: 732656 - RNA, 19 nt, Artificial Sequence
  Description of Artificial Sequence: Synthetic oligonucleotide
gguguguagugggacaaaa

SEQ ID NO: 732657 - RNA, 19 nt, Artificial Sequence
  Description of Artificial Sequence: Synthetic oligonucleotide
guccgcuugugcauagcca

SEQ ID NO: 732658 - RNA, 19 nt, Artificial Sequence
  Description of Artificial Sequence: Synthetic oligonucleotide
gcauguccuuguaagacaa

SEQ ID NO: 732659 - RNA, 19 nt, Artificial Sequence
  Description of Artificial Sequence: Synthetic oligonucleotide
uccgcucugcagggcgggg

SEQ ID NO: 732660 - RNA, 19 nt, Artificial Sequence
  Description of Artificial Sequence: Synthetic oligonucleotide
uccaacccuggcguuucuc

SEQ ID NO: 732661 - RNA, 19 nt, Artificial Sequence
  Description of Artificial Sequence: Synthetic oligonucleotide
accugaaggcuugcauccu

SEQ ID NO: 732662 - RNA, 19 nt, Artificial Sequence
  Description of Artificial Sequence: Synthetic oligonucleotide
gggaugggacacuacaaau

SEQ ID NO: 732663 - RNA, 19 nt, Artificial Sequence
  Description of Artificial Sequence: Synthetic oligonucleotide
gggaccgugaugggugugc

SEQ ID NO: 732664 - RNA, 19 nt, Artificial Sequence
  Description of Artificial Sequence: Synthetic oligonucleotide
auaugugaucugggacccu

SEQ ID NO: 732665 - RNA, 19 nt, Artificial Sequence
  Description of Artificial Sequence: Synthetic oligonucleotide
agaagucggcugugugaua

SEQ ID NO: 732666 - RNA, 19 nt, Artificial Sequence
  Description of Artificial Sequence: Synthetic oligonucleotide
gcacuaaugguaucuggau

SEQ ID NO: 732667 - RNA, 19 nt, Artificial Sequence
  Description of Artificial Sequence: Synthetic oligonucleotide
gugugcgagcguucaugga

SEQ ID NO: 732668 - RNA, 19 nt, Artificial Sequence
  Description of Artificial Sequence: Synthetic oligonucleotide
ggaccgaccacagccuuca

SEQ ID NO: 732669 - RNA, 19 nt, Artificial Sequence
  Description of Artificial Sequence: Synthetic oligonucleotide
caccuguaacauaugugau

SEQ ID NO: 732670 - RNA, 19 nt, Artificial Sequence
  Description of Artificial Sequence: Synthetic oligonucleotide
guaauucguugcgcuggca

SEQ ID NO: 732671 - RNA, 19 nt, Artificial Sequence
  Description of Artificial Sequence: Synthetic oligonucleotide
cagaagucggcugugugau

SEQ ID NO: 732672 - RNA, 19 nt, Artificial Sequence
  Description of Artificial Sequence: Synthetic oligonucleotide
gcuguuguauagaguuuuc

SEQ ID NO: 732673 - RNA, 19 nt, Artificial Sequence
  Description of Artificial Sequence: Synthetic oligonucleotide
ggccggucuccugugugcg

SEQ ID NO: 732674 - RNA, 19 nt, Artificial Sequence
  Description of Artificial Sequence: Synthetic oligonucleotide
guauugccaauggccugca

SEQ ID NO: 732675 - RNA, 19 nt, Artificial Sequence
  Description of Artificial Sequence: Synthetic oligonucleotide
gagcuguccgcuugugcau

SEQ ID NO: 732676 - RNA, 19 nt, Artificial Sequence
  Description of Artificial Sequence: Synthetic oligonucleotide
ccuuaagaugaugagcugu

SEQ ID NO: 732677 - RNA, 19 nt, Artificial Sequence
  Description of Artificial Sequence: Synthetic oligonucleotide
guaacagggaugggacacu

SEQ ID NO: 732678 - RNA, 19 nt, Artificial Sequence
  Description of Artificial Sequence: Synthetic oligonucleotide
gaacgacaugguguuuaua

SEQ ID NO: 732679 - RNA, 19 nt, Artificial Sequence
  Description of Artificial Sequence: Synthetic oligonucleotide
gcuggcaaaugcccuccca

SEQ ID NO: 732680 - RNA, 19 nt, Artificial Sequence
  Description of Artificial Sequence: Synthetic oligonucleotide
acacuacaaaugaggucuu

SEQ ID NO: 732681 - RNA, 19 nt, Artificial Sequence
  Description of Artificial Sequence: Synthetic oligonucleotide
cgguuuagagugaguauga

SEQ ID NO: 732682 - RNA, 19 nt, Artificial Sequence
  Description of Artificial Sequence: Synthetic oligonucleotide
ggaguuacucuuguagcau

SEQ ID NO: 732683 - RNA, 19 nt, Artificial Sequence
  Description of Artificial Sequence: Synthetic oligonucleotide
ggaccgugaugggugugcc

SEQ ID NO: 732684 - RNA, 19 nt, Artificial Sequence
  Description of Artificial Sequence: Synthetic oligonucleotide
gcaugucagcuugagauau

SEQ ID NO: 732685 - RNA, 19 nt, Artificial Sequence
  Description of Artificial Sequence: Synthetic oligonucleotide
agcuguccgcuugugcaua

SEQ ID NO: 732686 - RNA, 19 nt, Artificial Sequence
  Description of Artificial Sequence: Synthetic oligonucleotide
cugcugagacuuaggaguu

SEQ ID NO: 732687 - RNA, 19 nt, Artificial Sequence
  Description of Artificial Sequence: Synthetic oligonucleotide
gagcguucauggaccuuaa

SEQ ID NO: 732688 - RNA, 19 nt, Artificial Sequence
  Description of Artificial Sequence: Synthetic oligonucleotide
cuauguuguuggugucccu

SEQ ID NO: 732689 - RNA, 19 nt, Artificial Sequence
  Description of Artificial Sequence: Synthetic oligonucleotide
gcugaacugcaaucugggu

SEQ ID NO: 732690 - RNA, 19 nt, Artificial Sequence
  Description of Artificial Sequence: Synthetic oligonucleotide
gacucagcccagacugggu

SEQ ID NO: 732691 - RNA, 19 nt, Artificial Sequence
  Description of Artificial Sequence: Synthetic oligonucleotide
ccuagaugcuauccugaua

SEQ ID NO: 732692 - RNA, 19 nt, Artificial Sequence
  Description of Artificial Sequence: Synthetic oligonucleotide
ccauuggauguugccacca

SEQ ID NO: 732693 - RNA, 19 nt, Artificial Sequence
  Description of Artificial Sequence: Synthetic oligonucleotide
cuggguaccauuggauguu

SEQ ID NO: 732694 - RNA, 19 nt, Artificial Sequence
  Description of Artificial Sequence: Synthetic oligonucleotide
ggagggcucgaagaaggcu

SEQ ID NO: 732695 - RNA, 19 nt, Artificial Sequence
  Description of Artificial Sequence: Synthetic oligonucleotide
gggcucgaagaaggcuucc

SEQ ID NO: 732696 - RNA, 19 nt, Artificial Sequence
  Description of Artificial Sequence: Synthetic oligonucleotide
ccacaauugcaaaccugcu

SEQ ID NO: 732697 - RNA, 19 nt, Artificial Sequence
  Description of Artificial Sequence: Synthetic oligonucleotide
gcccagacuggguuacugu

SEQ ID NO: 732698 - RNA, 19 nt, Artificial Sequence
  Description of Artificial Sequence: Synthetic oligonucleotide
cgagcguucauggaccuua

SEQ ID NO: 732699 - RNA, 19 nt, Artificial Sequence
  Description of Artificial Sequence: Synthetic oligonucleotide
gaccgaccacagccuucaa

SEQ ID NO: 732700 - RNA, 19 nt, Artificial Sequence
  Description of Artificial Sequence: Synthetic oligonucleotide
gaugguccuguggguggau

SEQ ID NO: 732701 - RNA, 19 nt, Artificial Sequence
  Description of Artificial Sequence: Synthetic oligonucleotide
gccggucuccugugugcga

SEQ ID NO: 732702 - RNA, 19 nt, Artificial Sequence
  Description of Artificial Sequence: Synthetic oligonucleotide
gcuauccugauagcuucuu

SEQ ID NO: 732703 - RNA, 19 nt, Artificial Sequence
  Description of Artificial Sequence: Synthetic oligonucleotide
ggcggggccucaaggauuu

SEQ ID NO: 732704 - RNA, 19 nt, Artificial Sequence
  Description of Artificial Sequence: Synthetic oligonucleotide
caucgugaguggggaccgu

SEQ ID NO: 732705 - RNA, 19 nt, Artificial Sequence
  Description of Artificial Sequence: Synthetic oligonucleotide
gggcggggccucaaggauu

SEQ ID NO: 732706 - RNA, 19 nt, Artificial Sequence
  Description of Artificial Sequence: Synthetic oligonucleotide
ccugugugcgagcguucau

SEQ ID NO: 732707 - RNA, 19 nt, Artificial Sequence
  Description of Artificial Sequence: Synthetic oligonucleotide
gcggggccucaaggauuuc

SEQ ID NO: 732708 - RNA, 19 nt, Artificial Sequence
  Description of Artificial Sequence: Synthetic oligonucleotide
gcgagcguucauggaccuu

SEQ ID NO: 732709 - RNA, 19 nt, Artificial Sequence
  Description of Artificial Sequence: Synthetic oligonucleotide
aauacuaacagaaacaggg

SEQ ID NO: 732710 - RNA, 19 nt, Artificial Sequence
  Description of Artificial Sequence: Synthetic oligonucleotide
auaccaauaauguauuucc

SEQ ID NO: 732711 - RNA, 19 nt, Artificial Sequence
  Description of Artificial Sequence: Synthetic oligonucleotide
aauagacucgaacaugacc

SEQ ID NO: 732712 - RNA, 19 nt, Artificial Sequence
  Description of Artificial Sequence: Synthetic oligonucleotide
aagauuaccuccugaagcc

SEQ ID NO: 732713 - RNA, 19 nt, Artificial Sequence
  Description of Artificial Sequence: Synthetic oligonucleotide
aauggaacuuuauuucagc

SEQ ID NO: 732714 - RNA, 19 nt, Artificial Sequence
  Description of Artificial Sequence: Synthetic oligonucleotide
aagucuauaauauuagaga

SEQ ID NO: 732715 - RNA, 19 nt, Artificial Sequence
  Description of Artificial Sequence: Synthetic oligonucleotide
uaauauuagagaaugcaug

SEQ ID NO: 732716 - RNA, 19 nt, Artificial Sequence
  Description of Artificial Sequence: Synthetic oligonucleotide
uaagauuaccuccugaagc

SEQ ID NO: 732717 - RNA, 19 nt, Artificial Sequence
  Description of Artificial Sequence: Synthetic oligonucleotide
uuugaauuggaaguggugg

SEQ ID NO: 732718 - RNA, 19 nt, Artificial Sequence
  Description of Artificial Sequence: Synthetic oligonucleotide
cuucagauggccaaaauag

SEQ ID NO: 732719 - RNA, 19 nt, Artificial Sequence
  Description of Artificial Sequence: Synthetic oligonucleotide
aaugagaccaacugaacca

SEQ ID NO: 732720 - RNA, 19 nt, Artificial Sequence
  Description of Artificial Sequence: Synthetic oligonucleotide
agagcaguuaccuugcugg

SEQ ID NO: 732721 - RNA, 19 nt, Artificial Sequence
  Description of Artificial Sequence: Synthetic oligonucleotide
aaagucuauaauauuagag

SEQ ID NO: 732722 - RNA, 19 nt, Artificial Sequence
  Description of Artificial Sequence: Synthetic oligonucleotide
aaaccuuucugugaugggc

SEQ ID NO: 732723 - RNA, 19 nt, Artificial Sequence
  Description of Artificial Sequence: Synthetic oligonucleotide
ugagaucuaauuuagugac

SEQ ID NO: 732724 - RNA, 19 nt, Artificial Sequence
  Description of Artificial Sequence: Synthetic oligonucleotide
uuaaagugagacuacauau

SEQ ID NO: 732725 - RNA, 19 nt, Artificial Sequence
  Description of Artificial Sequence: Synthetic oligonucleotide
gaaacagggugacagaaag

SEQ ID NO: 732726 - RNA, 19 nt, Artificial Sequence
  Description of Artificial Sequence: Synthetic oligonucleotide
uaaugagaccaacugaacc

SEQ ID NO: 732727 - RNA, 19 nt, Artificial Sequence
  Description of Artificial Sequence: Synthetic oligonucleotide
uuuacuuuguggcugagau

SEQ ID NO: 732728 - RNA, 19 nt, Artificial Sequence
  Description of Artificial Sequence: Synthetic oligonucleotide
uggaauuuuaaagugagac

SEQ ID NO: 732729 - RNA, 19 nt, Artificial Sequence
  Description of Artificial Sequence: Synthetic oligonucleotide
uucauaugcgcacucaagc

SEQ ID NO: 732730 - RNA, 19 nt, Artificial Sequence
  Description of Artificial Sequence: Synthetic oligonucleotide
ucacuuuaggacaugcuag

SEQ ID NO: 732731 - RNA, 19 nt, Artificial Sequence
  Description of Artificial Sequence: Synthetic oligonucleotide
agauggccaaaauagacuc

SEQ ID NO: 732732 - RNA, 19 nt, Artificial Sequence
  Description of Artificial Sequence: Synthetic oligonucleotide
aacaugaagcaaauggaac

SEQ ID NO: 732733 - RNA, 19 nt, Artificial Sequence
  Description of Artificial Sequence: Synthetic oligonucleotide
gauccuuacaauuaaaaua

SEQ ID NO: 732734 - RNA, 19 nt, Artificial Sequence
  Description of Artificial Sequence: Synthetic oligonucleotide
uuuaaagugagacuacaua

SEQ ID NO: 732735 - RNA, 19 nt, Artificial Sequence
  Description of Artificial Sequence: Synthetic oligonucleotide
ugcaacuugacuuuaccug

SEQ ID NO: 732736 - RNA, 19 nt, Artificial Sequence
  Description of Artificial Sequence: Synthetic oligonucleotide
cauggaauuuuaaagugag

SEQ ID NO: 732737 - RNA, 19 nt, Artificial Sequence
  Description of Artificial Sequence: Synthetic oligonucleotide
agacaugacgaugacaggc

SEQ ID NO: 732738 - RNA, 19 nt, Artificial Sequence
  Description of Artificial Sequence: Synthetic oligonucleotide
uacuuuguggcugagaucu

SEQ ID NO: 732739 - RNA, 19 nt, Artificial Sequence
  Description of Artificial Sequence: Synthetic oligonucleotide
aaaauagacucgaacauga

SEQ ID NO: 732740 - RNA, 19 nt, Artificial Sequence
  Description of Artificial Sequence: Synthetic oligonucleotide
uguucugaugacagggugg

SEQ ID NO: 732741 - RNA, 19 nt, Artificial Sequence
  Description of Artificial Sequence: Synthetic oligonucleotide
accaauaauguauuuccuc

SEQ ID NO: 732742 - RNA, 19 nt, Artificial Sequence
  Description of Artificial Sequence: Synthetic oligonucleotide
acuuucacaagcauucugc

SEQ ID NO: 732743 - RNA, 19 nt, Artificial Sequence
  Description of Artificial Sequence: Synthetic oligonucleotide
uuuagugacaggacugaag

SEQ ID NO: 732744 - RNA, 19 nt, Artificial Sequence
  Description of Artificial Sequence: Synthetic oligonucleotide
cuuaaugccagagaauccg

SEQ ID NO: 732745 - RNA, 19 nt, Artificial Sequence
  Description of Artificial Sequence: Synthetic oligonucleotide
uauuagagaaugcauggaa

SEQ ID NO: 732746 - RNA, 19 nt, Artificial Sequence
  Description of Artificial Sequence: Synthetic oligonucleotide
uacccuuugguacuaauga

SEQ ID NO: 732747 - RNA, 19 nt, Artificial Sequence
  Description of Artificial Sequence: Synthetic oligonucleotide
ucuaauuuagugacaggac

SEQ ID NO: 732748 - RNA, 19 nt, Artificial Sequence
  Description of Artificial Sequence: Synthetic oligonucleotide
gaauucaggagcucccugg

SEQ ID NO: 732749 - RNA, 19 nt, Artificial Sequence
  Description of Artificial Sequence: Synthetic oligonucleotide
ucugauuugcaacuugacu

SEQ ID NO: 732750 - RNA, 19 nt, Artificial Sequence
  Description of Artificial Sequence: Synthetic oligonucleotide
cagugcauuauucagcagg

SEQ ID NO: 732751 - RNA, 19 nt, Artificial Sequence
  Description of Artificial Sequence: Synthetic oligonucleotide
gaugcuacgauacuuucuc

SEQ ID NO: 732752 - RNA, 19 nt, Artificial Sequence
  Description of Artificial Sequence: Synthetic oligonucleotide
ugccuuuucacuuuaggac

SEQ ID NO: 732753 - RNA, 19 nt, Artificial Sequence
  Description of Artificial Sequence: Synthetic oligonucleotide
cuaucacucuugaaaaggg

SEQ ID NO: 732754 - RNA, 19 nt, Artificial Sequence
  Description of Artificial Sequence: Synthetic oligonucleotide
aagacaguuuggcauuauc

SEQ ID NO: 732755 - RNA, 19 nt, Artificial Sequence
  Description of Artificial Sequence: Synthetic oligonucleotide
uuaguguguguauucaugu

SEQ ID NO: 732756 - RNA, 19 nt, Artificial Sequence
  Description of Artificial Sequence: Synthetic oligonucleotide
aaauuaccucuguacacug

SEQ ID NO: 732757 - RNA, 19 nt, Artificial Sequence
  Description of Artificial Sequence: Synthetic oligonucleotide
guagcuaucacucuugaaa

SEQ ID NO: 732758 - RNA, 19 nt, Artificial Sequence
  Description of Artificial Sequence: Synthetic oligonucleotide
uucgacagaucccacaacu

SEQ ID NO: 732759 - RNA, 19 nt, Artificial Sequence
  Description of Artificial Sequence: Synthetic oligonucleotide
aaggccgucuguuagugug

SEQ ID NO: 732760 - RNA, 19 nt, Artificial Sequence
  Description of Artificial Sequence: Synthetic oligonucleotide
aaaucuucuuccaaacuug

SEQ ID NO: 732761 - RNA, 19 nt, Artificial Sequence
  Description of Artificial Sequence: Synthetic oligonucleotide
ucacucuugaaaagggcag

SEQ ID NO: 732762 - RNA, 19 nt, Artificial Sequence
  Description of Artificial Sequence: Synthetic oligonucleotide
uguacacugguguuggccc

SEQ ID NO: 732763 - RNA, 19 nt, Artificial Sequence
  Description of Artificial Sequence: Synthetic oligonucleotide
cuaaaaucucaucuggcac

SEQ ID NO: 732764 - RNA, 19 nt, Artificial Sequence
  Description of Artificial Sequence: Synthetic oligonucleotide
uacgauacuuucucgaagu

SEQ ID NO: 732765 - RNA, 19 nt, Artificial Sequence
  Description of Artificial Sequence: Synthetic oligonucleotide
auagcccagagucuggcgg

SEQ ID NO: 732766 - RNA, 19 nt, Artificial Sequence
  Description of Artificial Sequence: Synthetic oligonucleotide
ucuuaaugccagagaaucc

SEQ ID NO: 732767 - RNA, 19 nt, Artificial Sequence
  Description of Artificial Sequence: Synthetic oligonucleotide
cuauaauauuagagaaugc

SEQ ID NO: 732768 - RNA, 19 nt, Artificial Sequence
  Description of Artificial Sequence: Synthetic oligonucleotide
ucucgaaguagccuugggc

SEQ ID NO: 732769 - RNA, 19 nt, Artificial Sequence
  Description of Artificial Sequence: Synthetic oligonucleotide
aaacuugacuugguuuccc

SEQ ID NO: 732770 - RNA, 19 nt, Artificial Sequence
  Description of Artificial Sequence: Synthetic oligonucleotide
aaagacugagcagugauuu

SEQ ID NO: 732771 - RNA, 19 nt, Artificial Sequence
  Description of Artificial Sequence: Synthetic oligonucleotide
ucuuuaagcucuucaccag

SEQ ID NO: 732772 - RNA, 19 nt, Artificial Sequence
  Description of Artificial Sequence: Synthetic oligonucleotide
uuacccuuugguacuaaug

SEQ ID NO: 732773 - RNA, 19 nt, Artificial Sequence
  Description of Artificial Sequence: Synthetic oligonucleotide
ugaaugggaccagagaagc

SEQ ID NO: 732774 - RNA, 19 nt, Artificial Sequence
  Description of Artificial Sequence: Synthetic oligonucleotide
agugauuugacaacgggca

SEQ ID NO: 732775 - RNA, 19 nt, Artificial Sequence
  Description of Artificial Sequence: Synthetic oligonucleotide
aaaacucacagcacacuag

SEQ ID NO: 732776 - RNA, 19 nt, Artificial Sequence
  Description of Artificial Sequence: Synthetic oligonucleotide
agaucccacaacuguaagg

SEQ ID NO: 732777 - RNA, 19 nt, Artificial Sequence
  Description of Artificial Sequence: Synthetic oligonucleotide
uugccuuuucacuuuagga

SEQ ID NO: 732778 - RNA, 19 nt, Artificial Sequence
  Description of Artificial Sequence: Synthetic oligonucleotide
uggugaaguuucauaugcg

SEQ ID NO: 732779 - RNA, 19 nt, Artificial Sequence
  Description of Artificial Sequence: Synthetic oligonucleotide
uaucacucuugaaaagggc

SEQ ID NO: 732780 - RNA, 19 nt, Artificial Sequence
  Description of Artificial Sequence: Synthetic oligonucleotide
aauuuagugacaggacuga

SEQ ID NO: 732781 - RNA, 19 nt, Artificial Sequence
  Description of Artificial Sequence: Synthetic oligonucleotide
uguuccuugaugugucucc

SEQ ID NO: 732782 - RNA, 19 nt, Artificial Sequence
  Description of Artificial Sequence: Synthetic oligonucleotide
guaagauuaccuccugaag

SEQ ID NO: 732783 - RNA, 19 nt, Artificial Sequence
  Description of Artificial Sequence: Synthetic oligonucleotide
cagugauuugacaacgggc

SEQ ID NO: 732784 - RNA, 19 nt, Artificial Sequence
  Description of Artificial Sequence: Synthetic oligonucleotide
auaugcgcacucaagcugc

SEQ ID NO: 732785 - RNA, 19 nt, Artificial Sequence
  Description of Artificial Sequence: Synthetic oligonucleotide
uggauccuuacaauuaaaa

SEQ ID NO: 732786 - RNA, 19 nt, Artificial Sequence
  Description of Artificial Sequence: Synthetic oligonucleotide
acacauaccaauaauguau

SEQ ID NO: 732787 - RNA, 19 nt, Artificial Sequence
  Description of Artificial Sequence: Synthetic oligonucleotide
ugaugugucuccuggcugc

SEQ ID NO: 732788 - RNA, 19 nt, Artificial Sequence
  Description of Artificial Sequence: Synthetic oligonucleotide
ucauaugcgcacucaagcu

SEQ ID NO: 732789 - RNA, 19 nt, Artificial Sequence
  Description of Artificial Sequence: Synthetic oligonucleotide
gcugagaucuaauuuagug

SEQ ID NO: 732790 - RNA, 19 nt, Artificial Sequence
  Description of Artificial Sequence: Synthetic oligonucleotide
ugcaaugcuaaaaucucau

SEQ ID NO: 732791 - RNA, 19 nt, Artificial Sequence
  Description of Artificial Sequence: Synthetic oligonucleotide
acuaaugagaccaacugaa

SEQ ID NO: 732792 - RNA, 19 nt, Artificial Sequence
  Description of Artificial Sequence: Synthetic oligonucleotide
ucuggcgggguccucacag

SEQ ID NO: 732793 - RNA, 19 nt, Artificial Sequence
  Description of Artificial Sequence: Synthetic oligonucleotide
agugcauuauucagcaggg

SEQ ID NO: 732794 - RNA, 19 nt, Artificial Sequence
  Description of Artificial Sequence: Synthetic oligonucleotide
uagcuaucacucuugaaaa

SEQ ID NO: 732795 - RNA, 19 nt, Artificial Sequence
  Description of Artificial Sequence: Synthetic oligonucleotide
gacgauucucaccauggug

SEQ ID NO: 732796 - RNA, 19 nt, Artificial Sequence
  Description of Artificial Sequence: Synthetic oligonucleotide
cauaccaauaauguauuuc

SEQ ID NO: 732797 - RNA, 19 nt, Artificial Sequence
  Description of Artificial Sequence: Synthetic oligonucleotide
auucucaccauggugaagu

SEQ ID NO: 732798 - RNA, 19 nt, Artificial Sequence
  Description of Artificial Sequence: Synthetic oligonucleotide
aaauagacucgaacaugac

SEQ ID NO: 732799 - RNA, 19 nt, Artificial Sequence
  Description of Artificial Sequence: Synthetic oligonucleotide
auaauauuagagaaugcau

SEQ ID NO: 732800 - RNA, 19 nt, Artificial Sequence
  Description of Artificial Sequence: Synthetic oligonucleotide
cugagaucuaauuuaguga

SEQ ID NO: 732801 - RNA, 19 nt, Artificial Sequence
  Description of Artificial Sequence: Synthetic oligonucleotide
agggcacauauuuuauuuc

SEQ ID NO: 732802 - RNA, 19 nt, Artificial Sequence
  Description of Artificial Sequence: Synthetic oligonucleotide
uugacaacgggcacaucug

SEQ ID NO: 732803 - RNA, 19 nt, Artificial Sequence
  Description of Artificial Sequence: Synthetic oligonucleotide
agaaagguggugugagguc

SEQ ID NO: 732804 - RNA, 19 nt, Artificial Sequence
  Description of Artificial Sequence: Synthetic oligonucleotide
ucuguuaguguguguauuc

SEQ ID NO: 732805 - RNA, 19 nt, Artificial Sequence
  Description of Artificial Sequence: Synthetic oligonucleotide
augaccaaacacuuuugca

SEQ ID NO: 732806 - RNA, 19 nt, Artificial Sequence
  Description of Artificial Sequence: Synthetic oligonucleotide
augaugcuacgauacuuuc

SEQ ID NO: 732807 - RNA, 19 nt, Artificial Sequence
  Description of Artificial Sequence: Synthetic oligonucleotide
ugcuacgauacuuucucga

SEQ ID NO: 732808 - RNA, 19 nt, Artificial Sequence
  Description of Artificial Sequence: Synthetic oligonucleotide
uggagacaaggcauuucgg

SEQ ID NO: 732809 - RNA, 19 nt, Artificial Sequence
  Description of Artificial Sequence: Synthetic oligonucleotide
uuaaagccugaaugggacc

SEQ ID NO: 732810 - RNA, 19 nt, Artificial Sequence
  Description of Artificial Sequence: Synthetic oligonucleotide
gaaccacacugcuaaagac

SEQ ID NO: 732811 - RNA, 19 nt, Artificial Sequence
  Description of Artificial Sequence: Synthetic oligonucleotide
uaaagccugaaugggacca

SEQ ID NO: 732812 - RNA, 19 nt, Artificial Sequence
  Description of Artificial Sequence: Synthetic oligonucleotide
gccaaaauagacucgaaca

SEQ ID NO: 732813 - RNA, 19 nt, Artificial Sequence
  Description of Artificial Sequence: Synthetic oligonucleotide
ggugaaguuucauaugcgc

SEQ ID NO: 732814 - RNA, 19 nt, Artificial Sequence
  Description of Artificial Sequence: Synthetic oligonucleotide
guuaaagccugaaugggac

SEQ ID NO: 732815 - RNA, 19 nt, Artificial Sequence
  Description of Artificial Sequence: Synthetic oligonucleotide
ugaagcaaauggaacuuua

SEQ ID NO: 732816 - RNA, 19 nt, Artificial Sequence
  Description of Artificial Sequence: Synthetic oligonucleotide
ugaugcuacgauacuuucu

SEQ ID NO: 732817 - RNA, 19 nt, Artificial Sequence
  Description of Artificial Sequence: Synthetic oligonucleotide
uugcaacuugacuuuaccu

SEQ ID NO: 732818 - RNA, 19 nt, Artificial Sequence
  Description of Artificial Sequence: Synthetic oligonucleotide
aauuaccucuguacacugg

SEQ ID NO: 732819 - RNA, 19 nt, Artificial Sequence
  Description of Artificial Sequence: Synthetic oligonucleotide
cauaugcgcacucaagcug

SEQ ID NO: 732820 - RNA, 19 nt, Artificial Sequence
  Description of Artificial Sequence: Synthetic oligonucleotide
ugcacaaaacucacagcac

SEQ ID NO: 732821 - RNA, 19 nt, Artificial Sequence
  Description of Artificial Sequence: Synthetic oligonucleotide
ugcucauuccccacuggcc

SEQ ID NO: 732822 - RNA, 19 nt, Artificial Sequence
  Description of Artificial Sequence: Synthetic oligonucleotide
uaccaauaauguauuuccu

SEQ ID NO: 732823 - RNA, 19 nt, Artificial Sequence
  Description of Artificial Sequence: Synthetic oligonucleotide
uccguuucugagcccagag

SEQ ID NO: 732824 - RNA, 19 nt, Artificial Sequence
  Description of Artificial Sequence: Synthetic oligonucleotide
ugguuuuacuuuguggcug

SEQ ID NO: 732825 - RNA, 19 nt, Artificial Sequence
  Description of Artificial Sequence: Synthetic oligonucleotide
cacacuaguuuccugggac

SEQ ID NO: 732826 - RNA, 19 nt, Artificial Sequence
  Description of Artificial Sequence: Synthetic oligonucleotide
agaugaagacaguuuggca

SEQ ID NO: 732827 - RNA, 19 nt, Artificial Sequence
  Description of Artificial Sequence: Synthetic oligonucleotide
uccaaacuugacuugguuu

SEQ ID NO: 732828 - RNA, 19 nt, Artificial Sequence
  Description of Artificial Sequence: Synthetic oligonucleotide
gcuaucacucuugaaaagg

SEQ ID NO: 732829 - RNA, 19 nt, Artificial Sequence
  Description of Artificial Sequence: Synthetic oligonucleotide
acgauucucaccaugguga

SEQ ID NO: 732830 - RNA, 19 nt, Artificial Sequence
  Description of Artificial Sequence: Synthetic oligonucleotide
cuacgauacuuucucgaag

SEQ ID NO: 732831 - RNA, 19 nt, Artificial Sequence
  Description of Artificial Sequence: Synthetic oligonucleotide
ugcacauagguaucucugu

SEQ ID NO: 732832 - RNA, 19 nt, Artificial Sequence
  Description of Artificial Sequence: Synthetic oligonucleotide
agcuaucacucuugaaaag

SEQ ID NO: 732833 - RNA, 19 nt, Artificial Sequence
  Description of Artificial Sequence: Synthetic oligonucleotide
gcaacuugacuuuaccugc

SEQ ID NO: 732834 - RNA, 19 nt, Artificial Sequence
  Description of Artificial Sequence: Synthetic oligonucleotide
uuaccugccugguuuagaa

SEQ ID NO: 732835 - RNA, 19 nt, Artificial Sequence
  Description of Artificial Sequence: Synthetic oligonucleotide
ugggcaguuuacccuuugg

SEQ ID NO: 732836 - RNA, 19 nt, Artificial Sequence
  Description of Artificial Sequence: Synthetic oligonucleotide
aucacaacccuguguaccu

SEQ ID NO: 732837 - RNA, 19 nt, Artificial Sequence
  Description of Artificial Sequence: Synthetic oligonucleotide
acgggcacaucugauuugc

SEQ ID NO: 732838 - RNA, 19 nt, Artificial Sequence
  Description of Artificial Sequence: Synthetic oligonucleotide
gauagcccagagucuggcg

SEQ ID NO: 732839 - RNA, 19 nt, Artificial Sequence
  Description of Artificial Sequence: Synthetic oligonucleotide
agacaguuuggcauuauca

SEQ ID NO: 732840 - RNA, 19 nt, Artificial Sequence
  Description of Artificial Sequence: Synthetic oligonucleotide
uugggcaugaugcuacgau

SEQ ID NO: 732841 - RNA, 19 nt, Artificial Sequence
  Description of Artificial Sequence: Synthetic oligonucleotide
uuccaggggugcuaaagca

SEQ ID NO: 732842 - RNA, 19 nt, Artificial Sequence
  Description of Artificial Sequence: Synthetic oligonucleotide
acccuuugguacuaaugag

SEQ ID NO: 732843 - RNA, 19 nt, Artificial Sequence
  Description of Artificial Sequence: Synthetic oligonucleotide
ugcccugcaaugcuaaaau

SEQ ID NO: 732844 - RNA, 19 nt, Artificial Sequence
  Description of Artificial Sequence: Synthetic oligonucleotide
guuaccuugcugggcaucg

SEQ ID NO: 732845 - RNA, 19 nt, Artificial Sequence
  Description of Artificial Sequence: Synthetic oligonucleotide
acuuuaggacaugcuaggg

SEQ ID NO: 732846 - RNA, 19 nt, Artificial Sequence
  Description of Artificial Sequence: Synthetic oligonucleotide
cugcuaaagacagugugug

SEQ ID NO: 732847 - RNA, 19 nt, Artificial Sequence
  Description of Artificial Sequence: Synthetic oligonucleotide
uuuugcccugcaaugcuaa

SEQ ID NO: 732848 - RNA, 19 nt, Artificial Sequence
  Description of Artificial Sequence: Synthetic oligonucleotide
acagucugccuucugcaug

SEQ ID NO: 732849 - RNA, 19 nt, Artificial Sequence
  Description of Artificial Sequence: Synthetic oligonucleotide
agcaguuaccuugcugggc

SEQ ID NO: 732850 - RNA, 19 nt, Artificial Sequence
  Description of Artificial Sequence: Synthetic oligonucleotide
uggugguuacagaugggac

SEQ ID NO: 732851 - RNA, 19 nt, Artificial Sequence
  Description of Artificial Sequence: Synthetic oligonucleotide
ugcuaaagacagugugugc

SEQ ID NO: 732852 - RNA, 19 nt, Artificial Sequence
  Description of Artificial Sequence: Synthetic oligonucleotide
ugacaacgggcacaucuga

SEQ ID NO: 732853 - RNA, 19 nt, Artificial Sequence
  Description of Artificial Sequence: Synthetic oligonucleotide
cuguaaggccgucuguuag

SEQ ID NO: 732854 - RNA, 19 nt, Artificial Sequence
  Description of Artificial Sequence: Synthetic oligonucleotide
ugcaggggauuccaggggu

SEQ ID NO: 732855 - RNA, 19 nt, Artificial Sequence
  Description of Artificial Sequence: Synthetic oligonucleotide
acggacauaggccuuucga

SEQ ID NO: 732856 - RNA, 19 nt, Artificial Sequence
  Description of Artificial Sequence: Synthetic oligonucleotide
aacgggcacaucugauuug

SEQ ID NO: 732857 - RNA, 19 nt, Artificial Sequence
  Description of Artificial Sequence: Synthetic oligonucleotide
agaauccguuucugagccc

SEQ ID NO: 732858 - RNA, 19 nt, Artificial Sequence
  Description of Artificial Sequence: Synthetic oligonucleotide
gagugcuggauccuuacaa

SEQ ID NO: 732859 - RNA, 19 nt, Artificial Sequence
  Description of Artificial Sequence: Synthetic oligonucleotide
gcagugauuugacaacggg

SEQ ID NO: 732860 - RNA, 19 nt, Artificial Sequence
  Description of Artificial Sequence: Synthetic oligonucleotide
guugugcuggcguacccag

SEQ ID NO: 732861 - RNA, 19 nt, Artificial Sequence
  Description of Artificial Sequence: Synthetic oligonucleotide
agacugagcagugauuuga

SEQ ID NO: 732862 - RNA, 19 nt, Artificial Sequence
  Description of Artificial Sequence: Synthetic oligonucleotide
cuuuaggacaugcuaggga

SEQ ID NO: 732863 - RNA, 19 nt, Artificial Sequence
  Description of Artificial Sequence: Synthetic oligonucleotide
augcuacgauacuuucucg

SEQ ID NO: 732864 - RNA, 19 nt, Artificial Sequence
  Description of Artificial Sequence: Synthetic oligonucleotide
auggccaaaauagacucga

SEQ ID NO: 732865 - RNA, 19 nt, Artificial Sequence
  Description of Artificial Sequence: Synthetic oligonucleotide
aacuguaaggccgucuguu

SEQ ID NO: 732866 - RNA, 19 nt, Artificial Sequence
  Description of Artificial Sequence: Synthetic oligonucleotide
gguaagauuaccuccugaa

SEQ ID NO: 732867 - RNA, 19 nt, Artificial Sequence
  Description of Artificial Sequence: Synthetic oligonucleotide
cugaucacaacccugugua

SEQ ID NO: 732868 - RNA, 19 nt, Artificial Sequence
  Description of Artificial Sequence: Synthetic oligonucleotide
agugcuggauccuuacaau

SEQ ID NO: 732869 - RNA, 19 nt, Artificial Sequence
  Description of Artificial Sequence: Synthetic oligonucleotide
gaccuaagcugcugggagc

SEQ ID NO: 732870 - RNA, 19 nt, Artificial Sequence
  Description of Artificial Sequence: Synthetic oligonucleotide
cugccuuacuucacugagg

SEQ ID NO: 732871 - RNA, 19 nt, Artificial Sequence
  Description of Artificial Sequence: Synthetic oligonucleotide
agauuaccuccugaagccg

SEQ ID NO: 732872 - RNA, 19 nt, Artificial Sequence
  Description of Artificial Sequence: Synthetic oligonucleotide
ugaagccggccuuggaucu

SEQ ID NO: 732873 - RNA, 19 nt, Artificial Sequence
  Description of Artificial Sequence: Synthetic oligonucleotide
uuuuacuuuguggcugaga

SEQ ID NO: 732874 - RNA, 19 nt, Artificial Sequence
  Description of Artificial Sequence: Synthetic oligonucleotide
uuuguggcugagaucuaau

SEQ ID NO: 732875 - RNA, 19 nt, Artificial Sequence
  Description of Artificial Sequence: Synthetic oligonucleotide
auccggucucugcacauag

SEQ ID NO: 732876 - RNA, 19 nt, Artificial Sequence
  Description of Artificial Sequence: Synthetic oligonucleotide
aaagccugaaugggaccag

SEQ ID NO: 732877 - RNA, 19 nt, Artificial Sequence
  Description of Artificial Sequence: Synthetic oligonucleotide
cuguacacugguguuggcc

SEQ ID NO: 732878 - RNA, 19 nt, Artificial Sequence
  Description of Artificial Sequence: Synthetic oligonucleotide
ugagaccaacugaaccaca

SEQ ID NO: 732879 - RNA, 19 nt, Artificial Sequence
  Description of Artificial Sequence: Synthetic oligonucleotide
ggugguuacagaugggaca

SEQ ID NO: 732880 - RNA, 19 nt, Artificial Sequence
  Description of Artificial Sequence: Synthetic oligonucleotide
ucccugguuagagauggcc

SEQ ID NO: 732881 - RNA, 19 nt, Artificial Sequence
  Description of Artificial Sequence: Synthetic oligonucleotide
ucacugccuuacuucacug

SEQ ID NO: 732882 - RNA, 19 nt, Artificial Sequence
  Description of Artificial Sequence: Synthetic oligonucleotide
uuucgacagaucccacaac

SEQ ID NO: 732883 - RNA, 19 nt, Artificial Sequence
  Description of Artificial Sequence: Synthetic oligonucleotide
cucgaaguagccuugggcu

SEQ ID NO: 732884 - RNA, 19 nt, Artificial Sequence
  Description of Artificial Sequence: Synthetic oligonucleotide
uuuacccuuugguacuaau

SEQ ID NO: 732885 - RNA, 19 nt, Artificial Sequence
  Description of Artificial Sequence: Synthetic oligonucleotide
uguagcuaucacucuugaa

SEQ ID NO: 732886 - RNA, 19 nt, Artificial Sequence
  Description of Artificial Sequence: Synthetic oligonucleotide
ggagacaaggcauuucgga

SEQ ID NO: 732887 - RNA, 19 nt, Artificial Sequence
  Description of Artificial Sequence: Synthetic oligonucleotide
uggggaagccccacucugc

SEQ ID NO: 732888 - RNA, 19 nt, Artificial Sequence
  Description of Artificial Sequence: Synthetic oligonucleotide
ugcuggcguacccagugga

SEQ ID NO: 732889 - RNA, 19 nt, Artificial Sequence
  Description of Artificial Sequence: Synthetic oligonucleotide
gugaaguuucauaugcgca

SEQ ID NO: 732890 - RNA, 19 nt, Artificial Sequence
  Description of Artificial Sequence: Synthetic oligonucleotide
uccggucucugcacauagg

SEQ ID NO: 732891 - RNA, 19 nt, Artificial Sequence
  Description of Artificial Sequence: Synthetic oligonucleotide
auacuaacagaaacagggu

SEQ ID NO: 732892 - RNA, 19 nt, Artificial Sequence
  Description of Artificial Sequence: Synthetic oligonucleotide
gcuaaagacagugugugca

SEQ ID NO: 732893 - RNA, 19 nt, Artificial Sequence
  Description of Artificial Sequence: Synthetic oligonucleotide
caggauagcccagagucug

SEQ ID NO: 732894 - RNA, 19 nt, Artificial Sequence
  Description of Artificial Sequence: Synthetic oligonucleotide
aggccuuucgacagauccc

SEQ ID NO: 732895 - RNA, 19 nt, Artificial Sequence
  Description of Artificial Sequence: Synthetic oligonucleotide
aaaugcauccagggcacau

SEQ ID NO: 732896 - RNA, 19 nt, Artificial Sequence
  Description of Artificial Sequence: Synthetic oligonucleotide
uguguguauucaugugguc

SEQ ID NO: 732897 - RNA, 19 nt, Artificial Sequence
  Description of Artificial Sequence: Synthetic oligonucleotide
ugaucacaacccuguguac

SEQ ID NO: 732898 - RNA, 19 nt, Artificial Sequence
  Description of Artificial Sequence: Synthetic oligonucleotide
cauuauucagcagggcauc

SEQ ID NO: 732899 - RNA, 19 nt, Artificial Sequence
  Description of Artificial Sequence: Synthetic oligonucleotide
gggacgauucucaccaugg

SEQ ID NO: 732900 - RNA, 19 nt, Artificial Sequence
  Description of Artificial Sequence: Synthetic oligonucleotide
uuuaccugccugguuuaga

SEQ ID NO: 732901 - RNA, 19 nt, Artificial Sequence
  Description of Artificial Sequence: Synthetic oligonucleotide
agaccaacugaaccacacu

SEQ ID NO: 732902 - RNA, 19 nt, Artificial Sequence
  Description of Artificial Sequence: Synthetic oligonucleotide
accuuucugugaugggcag

SEQ ID NO: 732903 - RNA, 19 nt, Artificial Sequence
  Description of Artificial Sequence: Synthetic oligonucleotide
caagcugccaggacggaca

SEQ ID NO: 732904 - RNA, 19 nt, Artificial Sequence
  Description of Artificial Sequence: Synthetic oligonucleotide
ccagaugaagacaguuugg

SEQ ID NO: 732905 - RNA, 19 nt, Artificial Sequence
  Description of Artificial Sequence: Synthetic oligonucleotide
caaaacucacagcacacua

SEQ ID NO: 732906 - RNA, 19 nt, Artificial Sequence
  Description of Artificial Sequence: Synthetic oligonucleotide
uggagugcuggauccuuac

SEQ ID NO: 732907 - RNA, 19 nt, Artificial Sequence
  Description of Artificial Sequence: Synthetic oligonucleotide
ugggcaugaugcuacgaua

SEQ ID NO: 732908 - RNA, 19 nt, Artificial Sequence
  Description of Artificial Sequence: Synthetic oligonucleotide
aacuuuggggcagggcugu

SEQ ID NO: 732909 - RNA, 19 nt, Artificial Sequence
  Description of Artificial Sequence: Synthetic oligonucleotide
ggugugaggucucuucagc

SEQ ID NO: 732910 - RNA, 19 nt, Artificial Sequence
  Description of Artificial Sequence: Synthetic oligonucleotide
agcagugauuugacaacgg

SEQ ID NO: 732911 - RNA, 19 nt, Artificial Sequence
  Description of Artificial Sequence: Synthetic oligonucleotide
uaugcgcacucaagcugcc

SEQ ID NO: 732912 - RNA, 19 nt, Artificial Sequence
  Description of Artificial Sequence: Synthetic oligonucleotide
aggacaugcuagggagucc

SEQ ID NO: 732913 - RNA, 19 nt, Artificial Sequence
  Description of Artificial Sequence: Synthetic oligonucleotide
aucacaguuggcccugcau

SEQ ID NO: 732914 - RNA, 19 nt, Artificial Sequence
  Description of Artificial Sequence: Synthetic oligonucleotide
aaugcauccagggcacaua

SEQ ID NO: 732915 - RNA, 19 nt, Artificial Sequence
  Description of Artificial Sequence: Synthetic oligonucleotide
gauucucaccauggugaag

SEQ ID NO: 732916 - RNA, 19 nt, Artificial Sequence
  Description of Artificial Sequence: Synthetic oligonucleotide
uugguacuaaugagaccaa

SEQ ID NO: 732917 - RNA, 19 nt, Artificial Sequence
  Description of Artificial Sequence: Synthetic oligonucleotide
uggcguacccaguggagaa

SEQ ID NO: 732918 - RNA, 19 nt, Artificial Sequence
  Description of Artificial Sequence: Synthetic oligonucleotide
ugggccauccggucucugc

SEQ ID NO: 732919 - RNA, 19 nt, Artificial Sequence
  Description of Artificial Sequence: Synthetic oligonucleotide
cagagcaguuaccuugcug

SEQ ID NO: 732920 - RNA, 19 nt, Artificial Sequence
  Description of Artificial Sequence: Synthetic oligonucleotide
ugguacuaaugagaccaac

SEQ ID NO: 732921 - RNA, 19 nt, Artificial Sequence
  Description of Artificial Sequence: Synthetic oligonucleotide
gcaguuaccuugcugggca

SEQ ID NO: 732922 - RNA, 19 nt, Artificial Sequence
  Description of Artificial Sequence: Synthetic oligonucleotide
agucuggcgggguccucac

SEQ ID NO: 732923 - RNA, 19 nt, Artificial Sequence
  Description of Artificial Sequence: Synthetic oligonucleotide
ccugaaugggaccagagaa

SEQ ID NO: 732924 - RNA, 19 nt, Artificial Sequence
  Description of Artificial Sequence: Synthetic oligonucleotide
ucaagcugccaggacggac

SEQ ID NO: 732925 - RNA, 19 nt, Artificial Sequence
  Description of Artificial Sequence: Synthetic oligonucleotide
gagccugggacugcagugc

SEQ ID NO: 732926 - RNA, 19 nt, Artificial Sequence
  Description of Artificial Sequence: Synthetic oligonucleotide
gagaaugcauggaauuuua

SEQ ID NO: 732927 - RNA, 19 nt, Artificial Sequence
  Description of Artificial Sequence: Synthetic oligonucleotide
ucacaguugugcuggcgua

SEQ ID NO: 732928 - RNA, 19 nt, Artificial Sequence
  Description of Artificial Sequence: Synthetic oligonucleotide
gagaagcuugguggggugc

SEQ ID NO: 732929 - RNA, 19 nt, Artificial Sequence
  Description of Artificial Sequence: Synthetic oligonucleotide
uuucggaggcagugcauua

SEQ ID NO: 732930 - RNA, 19 nt, Artificial Sequence
  Description of Artificial Sequence: Synthetic oligonucleotide
cuuccccgugaacaugaag

SEQ ID NO: 732931 - RNA, 19 nt, Artificial Sequence
  Description of Artificial Sequence: Synthetic oligonucleotide
uugcccugcaaugcuaaaa

SEQ ID NO: 732932 - RNA, 19 nt, Artificial Sequence
  Description of Artificial Sequence: Synthetic oligonucleotide
uaccuccugaagccggccu

SEQ ID NO: 732933 - RNA, 19 nt, Artificial Sequence
  Description of Artificial Sequence: Synthetic oligonucleotide
guuacagaugggacacaug

SEQ ID NO: 732934 - RNA, 19 nt, Artificial Sequence
  Description of Artificial Sequence: Synthetic oligonucleotide
auuucggaggcagugcauu

SEQ ID NO: 732935 - RNA, 19 nt, Artificial Sequence
  Description of Artificial Sequence: Synthetic oligonucleotide
cucauuccccacuggccac

SEQ ID NO: 732936 - RNA, 19 nt, Artificial Sequence
  Description of Artificial Sequence: Synthetic oligonucleotide
cacccgguucuuuaagcuc

SEQ ID NO: 732937 - RNA, 19 nt, Artificial Sequence
  Description of Artificial Sequence: Synthetic oligonucleotide
aggcaguuaaagccugaau

SEQ ID NO: 732938 - RNA, 19 nt, Artificial Sequence
  Description of Artificial Sequence: Synthetic oligonucleotide
acauaggccuuucgacaga

SEQ ID NO: 732939 - RNA, 19 nt, Artificial Sequence
  Description of Artificial Sequence: Synthetic oligonucleotide
gguggugugaggucucuuc

SEQ ID NO: 732940 - RNA, 19 nt, Artificial Sequence
  Description of Artificial Sequence: Synthetic oligonucleotide
ggcauuaucaacaucugau

SEQ ID NO: 732941 - RNA, 19 nt, Artificial Sequence
  Description of Artificial Sequence: Synthetic oligonucleotide
aguugugcuggcguaccca

SEQ ID NO: 732942 - RNA, 19 nt, Artificial Sequence
  Description of Artificial Sequence: Synthetic oligonucleotide
acuuuaccugccugguuua

SEQ ID NO: 732943 - RNA, 19 nt, Artificial Sequence
  Description of Artificial Sequence: Synthetic oligonucleotide
cccugguuagagauggccc

SEQ ID NO: 732944 - RNA, 19 nt, Artificial Sequence
  Description of Artificial Sequence: Synthetic oligonucleotide
ggaauucaggagcucccug

SEQ ID NO: 732945 - RNA, 19 nt, Artificial Sequence
  Description of Artificial Sequence: Synthetic oligonucleotide
cuuccucccuguucugaug

SEQ ID NO: 732946 - RNA, 19 nt, Artificial Sequence
  Description of Artificial Sequence: Synthetic oligonucleotide
cuugaugugucuccuggcu

SEQ ID NO: 732947 - RNA, 19 nt, Artificial Sequence
  Description of Artificial Sequence: Synthetic oligonucleotide
auuggaaguggugguuaca

SEQ ID NO: 732948 - RNA, 19 nt, Artificial Sequence
  Description of Artificial Sequence: Synthetic oligonucleotide
cuuucacaagcauucugcu

SEQ ID NO: 732949 - RNA, 19 nt, Artificial Sequence
  Description of Artificial Sequence: Synthetic oligonucleotide
auuuagugacaggacugaa

SEQ ID NO: 732950 - RNA, 19 nt, Artificial Sequence
  Description of Artificial Sequence: Synthetic oligonucleotide
uggccaaaauagacucgaa

SEQ ID NO: 732951 - RNA, 19 nt, Artificial Sequence
  Description of Artificial Sequence: Synthetic oligonucleotide
aagccugaaugggaccaga

SEQ ID NO: 732952 - RNA, 19 nt, Artificial Sequence
  Description of Artificial Sequence: Synthetic oligonucleotide
cauucugcuuggacccaug

SEQ ID NO: 732953 - RNA, 19 nt, Artificial Sequence
  Description of Artificial Sequence: Synthetic oligonucleotide
gauuugacaacgggcacau

SEQ ID NO: 732954 - RNA, 19 nt, Artificial Sequence
  Description of Artificial Sequence: Synthetic oligonucleotide
cugaacuuuggggcagggc

SEQ ID NO: 732955 - RNA, 19 nt, Artificial Sequence
  Description of Artificial Sequence: Synthetic oligonucleotide
cuuacuucacugaggaauu

SEQ ID NO: 732956 - RNA, 19 nt, Artificial Sequence
  Description of Artificial Sequence: Synthetic oligonucleotide
uuugcccugcaaugcuaaa

SEQ ID NO: 732957 - RNA, 19 nt, Artificial Sequence
  Description of Artificial Sequence: Synthetic oligonucleotide
ugguacagucugccuucug

SEQ ID NO: 732958 - RNA, 19 nt, Artificial Sequence
  Description of Artificial Sequence: Synthetic oligonucleotide
gggcaugaugcuacgauac

SEQ ID NO: 732959 - RNA, 19 nt, Artificial Sequence
  Description of Artificial Sequence: Synthetic oligonucleotide
acgauacuuucucgaagua

SEQ ID NO: 732960 - RNA, 19 nt, Artificial Sequence
  Description of Artificial Sequence: Synthetic oligonucleotide
ggacacaugugccagggcu

SEQ ID NO: 732961 - RNA, 19 nt, Artificial Sequence
  Description of Artificial Sequence: Synthetic oligonucleotide
cuuuaccugccugguuuag

SEQ ID NO: 732962 - RNA, 19 nt, Artificial Sequence
  Description of Artificial Sequence: Synthetic oligonucleotide
cugugcuuccucccuguuc

SEQ ID NO: 732963 - RNA, 19 nt, Artificial Sequence
  Description of Artificial Sequence: Synthetic oligonucleotide
gcaaugcuaaaaucucauc

SEQ ID NO: 732964 - RNA, 19 nt, Artificial Sequence
  Description of Artificial Sequence: Synthetic oligonucleotide
gugcuggcguacccagugg

SEQ ID NO: 732965 - RNA, 19 nt, Artificial Sequence
  Description of Artificial Sequence: Synthetic oligonucleotide
gggcacauauuuuauuucu

SEQ ID NO: 732966 - RNA, 19 nt, Artificial Sequence
  Description of Artificial Sequence: Synthetic oligonucleotide
gcuacgauacuuucucgaa

SEQ ID NO: 732967 - RNA, 19 nt, Artificial Sequence
  Description of Artificial Sequence: Synthetic oligonucleotide
gccaggacggacauaggcc

SEQ ID NO: 732968 - RNA, 19 nt, Artificial Sequence
  Description of Artificial Sequence: Synthetic oligonucleotide
uuaccuccugaagccggcc

SEQ ID NO: 732969 - RNA, 19 nt, Artificial Sequence
  Description of Artificial Sequence: Synthetic oligonucleotide
caguugugcuggcguaccc

SEQ ID NO: 732970 - RNA, 19 nt, Artificial Sequence
  Description of Artificial Sequence: Synthetic oligonucleotide
guuuuacuuuguggcugag

SEQ ID NO: 732971 - RNA, 19 nt, Artificial Sequence
  Description of Artificial Sequence: Synthetic oligonucleotide
aagccggccuuggaucucu

SEQ ID NO: 732972 - RNA, 19 nt, Artificial Sequence
  Description of Artificial Sequence: Synthetic oligonucleotide
gcauuucggaggcagugca

SEQ ID NO: 732973 - RNA, 19 nt, Artificial Sequence
  Description of Artificial Sequence: Synthetic oligonucleotide
ccugguacagucugccuuc

SEQ ID NO: 732974 - RNA, 19 nt, Artificial Sequence
  Description of Artificial Sequence: Synthetic oligonucleotide
gccuuggaucucuuccccg

SEQ ID NO: 732975 - RNA, 19 nt, Artificial Sequence
  Description of Artificial Sequence: Synthetic oligonucleotide
guucugaugacaggguggu

SEQ ID NO: 732976 - RNA, 19 nt, Artificial Sequence
  Description of Artificial Sequence: Synthetic oligonucleotide
guguguguauucauguggu

SEQ ID NO: 732977 - RNA, 19 nt, Artificial Sequence
  Description of Artificial Sequence: Synthetic oligonucleotide
ucggugucacugccuuacu

SEQ ID NO: 732978 - RNA, 19 nt, Artificial Sequence
  Description of Artificial Sequence: Synthetic oligonucleotide
cugcugccugguaagauua

SEQ ID NO: 732979 - RNA, 19 nt, Artificial Sequence
  Description of Artificial Sequence: Synthetic oligonucleotide
cggacauaggccuuucgac

SEQ ID NO: 732980 - RNA, 19 nt, Artificial Sequence
  Description of Artificial Sequence: Synthetic oligonucleotide
cugccugguaagauuaccu

SEQ ID NO: 732981 - RNA, 19 nt, Artificial Sequence
  Description of Artificial Sequence: Synthetic oligonucleotide
cacuaguuuccugggacga

SEQ ID NO: 732982 - RNA, 19 nt, Artificial Sequence
  Description of Artificial Sequence: Synthetic oligonucleotide
cacugccuuacuucacuga

SEQ ID NO: 732983 - RNA, 19 nt, Artificial Sequence
  Description of Artificial Sequence: Synthetic oligonucleotide
ucucaccauggugaaguuu

SEQ ID NO: 732984 - RNA, 19 nt, Artificial Sequence
  Description of Artificial Sequence: Synthetic oligonucleotide
uggcgggguccucacaguu

SEQ ID NO: 732985 - RNA, 19 nt, Artificial Sequence
  Description of Artificial Sequence: Synthetic oligonucleotide
guucuuggggacuguuucu

SEQ ID NO: 732986 - RNA, 19 nt, Artificial Sequence
  Description of Artificial Sequence: Synthetic oligonucleotide
cugugaugggcagucucuc

SEQ ID NO: 732987 - RNA, 19 nt, Artificial Sequence
  Description of Artificial Sequence: Synthetic oligonucleotide
acuaguuuccugggacgau

SEQ ID NO: 732988 - RNA, 19 nt, Artificial Sequence
  Description of Artificial Sequence: Synthetic oligonucleotide
uccucccuguucugaugac

SEQ ID NO: 732989 - RNA, 19 nt, Artificial Sequence
  Description of Artificial Sequence: Synthetic oligonucleotide
cccgugaacaugaagcaaa

SEQ ID NO: 732990 - RNA, 19 nt, Artificial Sequence
  Description of Artificial Sequence: Synthetic oligonucleotide
acaguuggcccugcaucca

SEQ ID NO: 732991 - RNA, 19 nt, Artificial Sequence
  Description of Artificial Sequence: Synthetic oligonucleotide
ugcccaccucuguagcuau

SEQ ID NO: 732992 - RNA, 19 nt, Artificial Sequence
  Description of Artificial Sequence: Synthetic oligonucleotide
ggccuuucgacagauccca

SEQ ID NO: 732993 - RNA, 19 nt, Artificial Sequence
  Description of Artificial Sequence: Synthetic oligonucleotide
gcuuaguggcaccuccuuc

SEQ ID NO: 732994 - RNA, 19 nt, Artificial Sequence
  Description of Artificial Sequence: Synthetic oligonucleotide
auccugaccuaagcugcug

SEQ ID NO: 732995 - RNA, 19 nt, Artificial Sequence
  Description of Artificial Sequence: Synthetic oligonucleotide
cccacccgguucuuuaagc

SEQ ID NO: 732996 - RNA, 19 nt, Artificial Sequence
  Description of Artificial Sequence: Synthetic oligonucleotide
auuugacaacgggcacauc

SEQ ID NO: 732997 - RNA, 19 nt, Artificial Sequence
  Description of Artificial Sequence: Synthetic oligonucleotide
ccuucagauggccaaaaua

SEQ ID NO: 732998 - RNA, 19 nt, Artificial Sequence
  Description of Artificial Sequence: Synthetic oligonucleotide
ggcaggaugggcaguuuac

SEQ ID NO: 732999 - RNA, 19 nt, Artificial Sequence
  Description of Artificial Sequence: Synthetic oligonucleotide
cuggcguacccaguggaga

SEQ ID NO: 733000 - RNA, 19 nt, Artificial Sequence
  Description of Artificial Sequence: Synthetic oligonucleotide
uuaccuugcugggcaucgu

SEQ ID NO: 733001 - RNA, 19 nt, Artificial Sequence
  Description of Artificial Sequence: Synthetic oligonucleotide
aguuuacccuuugguacua

SEQ ID NO: 733002 - RNA, 19 nt, Artificial Sequence
  Description of Artificial Sequence: Synthetic oligonucleotide
caccucuguagcuaucacu

SEQ ID NO: 733003 - RNA, 19 nt, Artificial Sequence
  Description of Artificial Sequence: Synthetic oligonucleotide
gugugugcaggagcccacc

SEQ ID NO: 733004 - RNA, 19 nt, Artificial Sequence
  Description of Artificial Sequence: Synthetic oligonucleotide
cuagggaguccuccacaga

SEQ ID NO: 733005 - RNA, 19 nt, Artificial Sequence
  Description of Artificial Sequence: Synthetic oligonucleotide
acaacccuguguaccuccu

SEQ ID NO: 733006 - RNA, 19 nt, Artificial Sequence
  Description of Artificial Sequence: Synthetic oligonucleotide
gcguacccaguggagaagc

SEQ ID NO: 733007 - RNA, 19 nt, Artificial Sequence
  Description of Artificial Sequence: Synthetic oligonucleotide
ggggugcuaaagcagacau

SEQ ID NO: 733008 - RNA, 19 nt, Artificial Sequence
  Description of Artificial Sequence: Synthetic oligonucleotide
gcugaucacaacccugugu

SEQ ID NO: 733009 - RNA, 19 nt, Artificial Sequence
  Description of Artificial Sequence: Synthetic oligonucleotide
auccguuucugagcccaga

SEQ ID NO: 733010 - RNA, 19 nt, Artificial Sequence
  Description of Artificial Sequence: Synthetic oligonucleotide
caacgggcacaucugauuu

SEQ ID NO: 733011 - RNA, 19 nt, Artificial Sequence
  Description of Artificial Sequence: Synthetic oligonucleotide
ccuuucgacagaucccaca

SEQ ID NO: 733012 - RNA, 19 nt, Artificial Sequence
  Description of Artificial Sequence: Synthetic oligonucleotide
ggagcucccugguuagaga

SEQ ID NO: 733013 - RNA, 19 nt, Artificial Sequence
  Description of Artificial Sequence: Synthetic oligonucleotide
ggcucugugcugaucacaa

SEQ ID NO: 733014 - RNA, 19 nt, Artificial Sequence
  Description of Artificial Sequence: Synthetic oligonucleotide
gcauuauucagcagggcau

SEQ ID NO: 733015 - RNA, 19 nt, Artificial Sequence
  Description of Artificial Sequence: Synthetic oligonucleotide
gggcaguuuacccuuuggu

SEQ ID NO: 733016 - RNA, 19 nt, Artificial Sequence
  Description of Artificial Sequence: Synthetic oligonucleotide
gguugccuuuucacuuuag

SEQ ID NO: 733017 - RNA, 19 nt, Artificial Sequence
  Description of Artificial Sequence: Synthetic oligonucleotide
gggccauccggucucugca

SEQ ID NO: 733018 - RNA, 19 nt, Artificial Sequence
  Description of Artificial Sequence: Synthetic oligonucleotide
aggacggacauaggccuuu

SEQ ID NO: 733019 - RNA, 19 nt, Artificial Sequence
  Description of Artificial Sequence: Synthetic oligonucleotide
acaugugccagggcuucuu

SEQ ID NO: 733020 - RNA, 19 nt, Artificial Sequence
  Description of Artificial Sequence: Synthetic oligonucleotide
guacacugguguuggcccu

SEQ ID NO: 733021 - RNA, 19 nt, Artificial Sequence
  Description of Artificial Sequence: Synthetic oligonucleotide
gacaugcuagggaguccuc

SEQ ID NO: 733022 - RNA, 19 nt, Artificial Sequence
  Description of Artificial Sequence: Synthetic oligonucleotide
gcuggcguacccaguggag

SEQ ID NO: 733023 - RNA, 19 nt, Artificial Sequence
  Description of Artificial Sequence: Synthetic oligonucleotide
gacacaugugccagggcuu

SEQ ID NO: 733024 - RNA, 19 nt, Artificial Sequence
  Description of Artificial Sequence: Synthetic oligonucleotide
gaagccggccuuggaucuc

SEQ ID NO: 733025 - RNA, 19 nt, Artificial Sequence
  Description of Artificial Sequence: Synthetic oligonucleotide
cugugcugaucacaacccu

SEQ ID NO: 733026 - RNA, 19 nt, Artificial Sequence
  Description of Artificial Sequence: Synthetic oligonucleotide
aggccgucuguuagugugu

SEQ ID NO: 733027 - RNA, 19 nt, Artificial Sequence
  Description of Artificial Sequence: Synthetic oligonucleotide
gcaucgugguggcugcauc

SEQ ID NO: 733028 - RNA, 19 nt, Artificial Sequence
  Description of Artificial Sequence: Synthetic oligonucleotide
ggaguccuccacagaggcc

SEQ ID NO: 733029 - RNA, 19 nt, Artificial Sequence
  Description of Artificial Sequence: Synthetic oligonucleotide
guuggcccugcauccagau

SEQ ID NO: 733030 - RNA, 19 nt, Artificial Sequence
  Description of Artificial Sequence: Synthetic oligonucleotide
ggcguacccaguggagaag

SEQ ID NO: 733031 - RNA, 19 nt, Artificial Sequence
  Description of Artificial Sequence: Synthetic oligonucleotide
cauccugaccuaagcugcu

SEQ ID NO: 733032 - RNA, 19 nt, Artificial Sequence
  Description of Artificial Sequence: Synthetic oligonucleotide
ccaggacggacauaggccu

SEQ ID NO: 733033 - RNA, 19 nt, Artificial Sequence
  Description of Artificial Sequence: Synthetic oligonucleotide
gaugugucuccuggcugcu

SEQ ID NO: 733034 - RNA, 19 nt, Artificial Sequence
  Description of Artificial Sequence: Synthetic oligonucleotide
gcccacccgguucuuuaag

SEQ ID NO: 733035 - RNA, 19 nt, Artificial Sequence
  Description of Artificial Sequence: Synthetic oligonucleotide
ggcaugaugcuacgauacu

SEQ ID NO: 733036 - RNA, 19 nt, Artificial Sequence
  Description of Artificial Sequence: Synthetic oligonucleotide
cuaguuuccugggacgauu

SEQ ID NO: 733037 - RNA, 19 nt, Artificial Sequence
  Description of Artificial Sequence: Synthetic oligonucleotide
guuuacccuuugguacuaa

SEQ ID NO: 733038 - RNA, 19 nt, Artificial Sequence
  Description of Artificial Sequence: Synthetic oligonucleotide
gccauccggucucugcaca

SEQ ID NO: 733039 - RNA, 19 nt, Artificial Sequence
  Description of Artificial Sequence: Synthetic oligonucleotide
cauuucggaggcagugcau

SEQ ID NO: 733040 - RNA, 19 nt, Artificial Sequence
  Description of Artificial Sequence: Synthetic oligonucleotide
agugggccauccggucucu

SEQ ID NO: 733041 - RNA, 19 nt, Artificial Sequence
  Description of Artificial Sequence: Synthetic oligonucleotide
gcuggguggccucgguguc

SEQ ID NO: 733042 - RNA, 19 nt, Artificial Sequence
  Description of Artificial Sequence: Synthetic oligonucleotide
ccgucuguuagugugugua

SEQ ID NO: 733043 - RNA, 19 nt, Artificial Sequence
  Description of Artificial Sequence: Synthetic oligonucleotide
ccggucucugcacauaggu

SEQ ID NO: 733044 - RNA, 19 nt, Artificial Sequence
  Description of Artificial Sequence: Synthetic oligonucleotide
ccuguucugaugacagggu

SEQ ID NO: 733045 - RNA, 19 nt, Artificial Sequence
  Description of Artificial Sequence: Synthetic oligonucleotide
ggcacauauuuuauuucuu

SEQ ID NO: 733046 - RNA, 19 nt, Artificial Sequence
  Description of Artificial Sequence: Synthetic oligonucleotide
ccuuuugcccugcaaugcu

SEQ ID NO: 733047 - RNA, 19 nt, Artificial Sequence
  Description of Artificial Sequence: Synthetic oligonucleotide
cuggguggccucgguguca

SEQ ID NO: 733048 - RNA, 19 nt, Artificial Sequence
  Description of Artificial Sequence: Synthetic oligonucleotide
gucuggcgggguccucaca

SEQ ID NO: 733049 - RNA, 19 nt, Artificial Sequence
  Description of Artificial Sequence: Synthetic oligonucleotide
cucaagcugccaggacgga

SEQ ID NO: 733050 - RNA, 19 nt, Artificial Sequence
  Description of Artificial Sequence: Synthetic oligonucleotide
agguggugugaggucucuu

SEQ ID NO: 733051 - RNA, 19 nt, Artificial Sequence
  Description of Artificial Sequence: Synthetic oligonucleotide
cccacaacuguaaggccgu

SEQ ID NO: 733052 - RNA, 19 nt, Artificial Sequence
  Description of Artificial Sequence: Synthetic oligonucleotide
ccacccgguucuuuaagcu

SEQ ID NO: 733053 - RNA, 19 nt, Artificial Sequence
  Description of Artificial Sequence: Synthetic oligonucleotide
ccaggauagcccagagucu

SEQ ID NO: 733054 - RNA, 19 nt, Artificial Sequence
  Description of Artificial Sequence: Synthetic oligonucleotide
gccuuacuucacugaggaa

SEQ ID NO: 733055 - RNA, 19 nt, Artificial Sequence
  Description of Artificial Sequence: Synthetic oligonucleotide
caguuaccuugcugggcau

SEQ ID NO: 733056 - RNA, 19 nt, Artificial Sequence
  Description of Artificial Sequence: Synthetic oligonucleotide
gccuuucgacagaucccac

SEQ ID NO: 733057 - RNA, 19 nt, Artificial Sequence
  Description of Artificial Sequence: Synthetic oligonucleotide
ccccacugcuugguuuuac

SEQ ID NO: 733058 - RNA, 19 nt, Artificial Sequence
  Description of Artificial Sequence: Synthetic oligonucleotide
caacccuguguaccuccuu

SEQ ID NO: 733059 - RNA, 19 nt, Artificial Sequence
  Description of Artificial Sequence: Synthetic oligonucleotide
ccgguucuuuaagcucuuc

SEQ ID NO: 733060 - RNA, 19 nt, Artificial Sequence
  Description of Artificial Sequence: Synthetic oligonucleotide
cugggacgauucucaccau

SEQ ID NO: 733061 - RNA, 19 nt, Artificial Sequence
  Description of Artificial Sequence: Synthetic oligonucleotide
gccgucuguuagugugugu

SEQ ID NO: 733062 - RNA, 19 nt, Artificial Sequence
  Description of Artificial Sequence: Synthetic oligonucleotide
ggcaucgugguggcugcau

SEQ ID NO: 733063 - RNA, 19 nt, Artificial Sequence
  Description of Artificial Sequence: Synthetic oligonucleotide
cgucuguuaguguguguau

SEQ ID NO: 733064 - RNA, 19 nt, Artificial Sequence
  Description of Artificial Sequence: Synthetic oligonucleotide
ccuuucugugaugggcagu

SEQ ID NO: 733065 - RNA, 19 nt, Artificial Sequence
  Description of Artificial Sequence: Synthetic oligonucleotide
gugcugugggcugcucauu

SEQ ID NO: 733066 - RNA, 19 nt, Artificial Sequence
  Description of Artificial Sequence: Synthetic oligonucleotide
cgggcacaucugauuugca

SEQ ID NO: 733067 - RNA, 19 nt, Artificial Sequence
  Description of Artificial Sequence: Synthetic oligonucleotide
agccggccuuggaucucuu

SEQ ID NO: 733068 - RNA, 19 nt, Artificial Sequence
  Description of Artificial Sequence: Synthetic oligonucleotide
cccucuccagugggccauc

SEQ ID NO: 733069 - RNA, 19 nt, Artificial Sequence
  Description of Artificial Sequence: Synthetic oligonucleotide
cccgguucuuuaagcucuu

SEQ ID NO: 733070 - RNA, 19 nt, Artificial Sequence
  Description of Artificial Sequence: Synthetic oligonucleotide
aaaguauauggugagaccc

SEQ ID NO: 733071 - RNA, 19 nt, Artificial Sequence
  Description of Artificial Sequence: Synthetic oligonucleotide
auaacugcagacuagguac

SEQ ID NO: 733072 - RNA, 19 nt, Artificial Sequence
  Description of Artificial Sequence: Synthetic oligonucleotide
aaaauguccaugcuucagc

SEQ ID NO: 733073 - RNA, 19 nt, Artificial Sequence
  Description of Artificial Sequence: Synthetic oligonucleotide
guauuaaucacuuuuaaca

SEQ ID NO: 733074 - RNA, 19 nt, Artificial Sequence
  Description of Artificial Sequence: Synthetic oligonucleotide
uggaagaaugcuaagaaac

SEQ ID NO: 733075 - RNA, 19 nt, Artificial Sequence
  Description of Artificial Sequence: Synthetic oligonucleotide
gcaacuacaagacaaaggg

SEQ ID NO: 733076 - RNA, 19 nt, Artificial Sequence
  Description of Artificial Sequence: Synthetic oligonucleotide
uuucacauaggacauggcc

SEQ ID NO: 733077 - RNA, 19 nt, Artificial Sequence
  Description of Artificial Sequence: Synthetic oligonucleotide
ugcaacuacaagacaaagg

SEQ ID NO: 733078 - RNA, 19 nt, Artificial Sequence
  Description of Artificial Sequence: Synthetic oligonucleotide
uuagaaauucaagucagag

SEQ ID NO: 733079 - RNA, 19 nt, Artificial Sequence
  Description of Artificial Sequence: Synthetic oligonucleotide
acuugaugcaacuacaaga

SEQ ID NO: 733080 - RNA, 19 nt, Artificial Sequence
  Description of Artificial Sequence: Synthetic oligonucleotide
cuugaugcaacuacaagac

SEQ ID NO: 733081 - RNA, 19 nt, Artificial Sequence
  Description of Artificial Sequence: Synthetic oligonucleotide
aaugcuggcgguaagagca

SEQ ID NO: 733082 - RNA, 19 nt, Artificial Sequence
  Description of Artificial Sequence: Synthetic oligonucleotide
aaucacauuggggugcacc

SEQ ID NO: 733083 - RNA, 19 nt, Artificial Sequence
  Description of Artificial Sequence: Synthetic oligonucleotide
uauggugagacccuucagc

SEQ ID NO: 733084 - RNA, 19 nt, Artificial Sequence
  Description of Artificial Sequence: Synthetic oligonucleotide
ucuuuaauguagaugcgga

SEQ ID NO: 733085 - RNA, 19 nt, Artificial Sequence
  Description of Artificial Sequence: Synthetic oligonucleotide
aaucacuuuuaacaaagaa

SEQ ID NO: 733086 - RNA, 19 nt, Artificial Sequence
  Description of Artificial Sequence: Synthetic oligonucleotide
aaggucaucagacaagaau

SEQ ID NO: 733087 - RNA, 19 nt, Artificial Sequence
  Description of Artificial Sequence: Synthetic oligonucleotide
uguauuaaucacuuuuaac

SEQ ID NO: 733088 - RNA, 19 nt, Artificial Sequence
  Description of Artificial Sequence: Synthetic oligonucleotide
acuuacuguggacagcccc

SEQ ID NO: 733089 - RNA, 19 nt, Artificial Sequence
  Description of Artificial Sequence: Synthetic oligonucleotide
uggaacgaaaacuaagugu

SEQ ID NO: 733090 - RNA, 19 nt, Artificial Sequence
  Description of Artificial Sequence: Synthetic oligonucleotide
uuugacuuacuguggacag

SEQ ID NO: 733091 - RNA, 19 nt, Artificial Sequence
  Description of Artificial Sequence: Synthetic oligonucleotide
aggaaauugacacugggau

SEQ ID NO: 733092 - RNA, 19 nt, Artificial Sequence
  Description of Artificial Sequence: Synthetic oligonucleotide
ucuacuugaugcaacuaca

SEQ ID NO: 733093 - RNA, 19 nt, Artificial Sequence
  Description of Artificial Sequence: Synthetic oligonucleotide
acuucaagaguucuccauc

SEQ ID NO: 733094 - RNA, 19 nt, Artificial Sequence
  Description of Artificial Sequence: Synthetic oligonucleotide
acacacugcacuuguagcg

SEQ ID NO: 733095 - RNA, 19 nt, Artificial Sequence
  Description of Artificial Sequence: Synthetic oligonucleotide
uaauucuuggucuguagga

SEQ ID NO: 733096 - RNA, 19 nt, Artificial Sequence
  Description of Artificial Sequence: Synthetic oligonucleotide
acuggauuguguccagugc

SEQ ID NO: 733097 - RNA, 19 nt, Artificial Sequence
  Description of Artificial Sequence: Synthetic oligonucleotide
agaaugcuaagaaacuggc

SEQ ID NO: 733098 - RNA, 19 nt, Artificial Sequence
  Description of Artificial Sequence: Synthetic oligonucleotide
cauuggaacgaaaacuaag

SEQ ID NO: 733099 - RNA, 19 nt, Artificial Sequence
  Description of Artificial Sequence: Synthetic oligonucleotide
gauuccggcaucuguagag

SEQ ID NO: 733100 - RNA, 19 nt, Artificial Sequence
  Description of Artificial Sequence: Synthetic oligonucleotide
uccgaugucguaauucuug

SEQ ID NO: 733101 - RNA, 19 nt, Artificial Sequence
  Description of Artificial Sequence: Synthetic oligonucleotide
uuggaacgaaaacuaagug

SEQ ID NO: 733102 - RNA, 19 nt, Artificial Sequence
  Description of Artificial Sequence: Synthetic oligonucleotide
aaaacuaagugugaaucau

SEQ ID NO: 733103 - RNA, 19 nt, Artificial Sequence
  Description of Artificial Sequence: Synthetic oligonucleotide
ugagcaguuaucagacucc

SEQ ID NO: 733104 - RNA, 19 nt, Artificial Sequence
  Description of Artificial Sequence: Synthetic oligonucleotide
ucucgcacggcccaggacc

SEQ ID NO: 733105 - RNA, 19 nt, Artificial Sequence
  Description of Artificial Sequence: Synthetic oligonucleotide
ugaauacuggauugugucc

SEQ ID NO: 733106 - RNA, 19 nt, Artificial Sequence
  Description of Artificial Sequence: Synthetic oligonucleotide
ggaacgaaaacuaagugug

SEQ ID NO: 733107 - RNA, 19 nt, Artificial Sequence
  Description of Artificial Sequence: Synthetic oligonucleotide
gagugacucgaucagucgg

SEQ ID NO: 733108 - RNA, 19 nt, Artificial Sequence
  Description of Artificial Sequence: Synthetic oligonucleotide
ugcucuaggaggacguggg

SEQ ID NO: 733109 - RNA, 19 nt, Artificial Sequence
  Description of Artificial Sequence: Synthetic oligonucleotide
ugguuaaagugcauaugcc

SEQ ID NO: 733110 - RNA, 19 nt, Artificial Sequence
  Description of Artificial Sequence: Synthetic oligonucleotide
ucucuuuaauguagaugcg

SEQ ID NO: 733111 - RNA, 19 nt, Artificial Sequence
  Description of Artificial Sequence: Synthetic oligonucleotide
cuucaagaguucuccaucc

SEQ ID NO: 733112 - RNA, 19 nt, Artificial Sequence
  Description of Artificial Sequence: Synthetic oligonucleotide
gucagagaaagcuaacaug

SEQ ID NO: 733113 - RNA, 19 nt, Artificial Sequence
  Description of Artificial Sequence: Synthetic oligonucleotide
auuacaggucauuuuagaa

SEQ ID NO: 733114 - RNA, 19 nt, Artificial Sequence
  Description of Artificial Sequence: Synthetic oligonucleotide
gguacggggaaacagcugg

SEQ ID NO: 733115 - RNA, 19 nt, Artificial Sequence
  Description of Artificial Sequence: Synthetic oligonucleotide
uggaguucaccuguggacg

SEQ ID NO: 733116 - RNA, 19 nt, Artificial Sequence
  Description of Artificial Sequence: Synthetic oligonucleotide
cuagguacggggaaacagc

SEQ ID NO: 733117 - RNA, 19 nt, Artificial Sequence
  Description of Artificial Sequence: Synthetic oligonucleotide
gacggguccacuucuuugg

SEQ ID NO: 733118 - RNA, 19 nt, Artificial Sequence
  Description of Artificial Sequence: Synthetic oligonucleotide
aacauuggaacgaaaacua

SEQ ID NO: 733119 - RNA, 19 nt, Artificial Sequence
  Description of Artificial Sequence: Synthetic oligonucleotide
uccugagcaguuaucagac

SEQ ID NO: 733120 - RNA, 19 nt, Artificial Sequence
  Description of Artificial Sequence: Synthetic oligonucleotide
uguggguccuuccugugag

SEQ ID NO: 733121 - RNA, 19 nt, Artificial Sequence
  Description of Artificial Sequence: Synthetic oligonucleotide
uuguuaaccucugaugagc

SEQ ID NO: 733122 - RNA, 19 nt, Artificial Sequence
  Description of Artificial Sequence: Synthetic oligonucleotide
uguuaaccucugaugagca

SEQ ID NO: 733123 - RNA, 19 nt, Artificial Sequence
  Description of Artificial Sequence: Synthetic oligonucleotide
uaacugcagacuagguacg

SEQ ID NO: 733124 - RNA, 19 nt, Artificial Sequence
  Description of Artificial Sequence: Synthetic oligonucleotide
cucuuuaauguagaugcgg

SEQ ID NO: 733125 - RNA, 19 nt, Artificial Sequence
  Description of Artificial Sequence: Synthetic oligonucleotide
uucaggaaauugacacugg

SEQ ID NO: 733126 - RNA, 19 nt, Artificial Sequence
  Description of Artificial Sequence: Synthetic oligonucleotide
auaacugucaguguauuaa

SEQ ID NO: 733127 - RNA, 19 nt, Artificial Sequence
  Description of Artificial Sequence: Synthetic oligonucleotide
aagugcauaugccacuuaa

SEQ ID NO: 733128 - RNA, 19 nt, Artificial Sequence
  Description of Artificial Sequence: Synthetic oligonucleotide
uccucaucgcgguagugcg

SEQ ID NO: 733129 - RNA, 19 nt, Artificial Sequence
  Description of Artificial Sequence: Synthetic oligonucleotide
gcauaugccacuuaauuac

SEQ ID NO: 733130 - RNA, 19 nt, Artificial Sequence
  Description of Artificial Sequence: Synthetic oligonucleotide
aagugugaaucauuauuaa

SEQ ID NO: 733131 - RNA, 19 nt, Artificial Sequence
  Description of Artificial Sequence: Synthetic oligonucleotide
auuggaacgaaaacuaagu

SEQ ID NO: 733132 - RNA, 19 nt, Artificial Sequence
  Description of Artificial Sequence: Synthetic oligonucleotide
agggaagcucagcucagcc

SEQ ID NO: 733133 - RNA, 19 nt, Artificial Sequence
  Description of Artificial Sequence: Synthetic oligonucleotide
auugucaguuccucaucac

SEQ ID NO: 733134 - RNA, 19 nt, Artificial Sequence
  Description of Artificial Sequence: Synthetic oligonucleotide
augucguaauucuuggucu

SEQ ID NO: 733135 - RNA, 19 nt, Artificial Sequence
  Description of Artificial Sequence: Synthetic oligonucleotide
gaagcggcggaucucucgg

SEQ ID NO: 733136 - RNA, 19 nt, Artificial Sequence
  Description of Artificial Sequence: Synthetic oligonucleotide
uugcaaccaucacaaauca

SEQ ID NO: 733137 - RNA, 19 nt, Artificial Sequence
  Description of Artificial Sequence: Synthetic oligonucleotide
agcuuccgaagccagcggc

SEQ ID NO: 733138 - RNA, 19 nt, Artificial Sequence
  Description of Artificial Sequence: Synthetic oligonucleotide
ucugauuccggcaucugua

SEQ ID NO: 733139 - RNA, 19 nt, Artificial Sequence
  Description of Artificial Sequence: Synthetic oligonucleotide
agagugacucgaucagucg

SEQ ID NO: 733140 - RNA, 19 nt, Artificial Sequence
  Description of Artificial Sequence: Synthetic oligonucleotide
aaugcccgccaccuuugac

SEQ ID NO: 733141 - RNA, 19 nt, Artificial Sequence
  Description of Artificial Sequence: Synthetic oligonucleotide
agucagagaaagcuaacau

SEQ ID NO: 733142 - RNA, 19 nt, Artificial Sequence
  Description of Artificial Sequence: Synthetic oligonucleotide
agacccuucagcugacuuc

SEQ ID NO: 733143 - RNA, 19 nt, Artificial Sequence
  Description of Artificial Sequence: Synthetic oligonucleotide
cuccuacugcuuuaaaggc

SEQ ID NO: 733144 - RNA, 19 nt, Artificial Sequence
  Description of Artificial Sequence: Synthetic oligonucleotide
aacgaaaacuaagugugaa

SEQ ID NO: 733145 - RNA, 19 nt, Artificial Sequence
  Description of Artificial Sequence: Synthetic oligonucleotide
uucaagucagagaaagcua

SEQ ID NO: 733146 - RNA, 19 nt, Artificial Sequence
  Description of Artificial Sequence: Synthetic oligonucleotide
auggugagacccuucagcu

SEQ ID NO: 733147 - RNA, 19 nt, Artificial Sequence
  Description of Artificial Sequence: Synthetic oligonucleotide
uccuacugcuuuaaaggcu

SEQ ID NO: 733148 - RNA, 19 nt, Artificial Sequence
  Description of Artificial Sequence: Synthetic oligonucleotide
caccuguagauucuggaag

SEQ ID NO: 733149 - RNA, 19 nt, Artificial Sequence
  Description of Artificial Sequence: Synthetic oligonucleotide
cugucaguguauuaaucac

SEQ ID NO: 733150 - RNA, 19 nt, Artificial Sequence
  Description of Artificial Sequence: Synthetic oligonucleotide
ugaagcggcggaucucucg

SEQ ID NO: 733151 - RNA, 19 nt, Artificial Sequence
  Description of Artificial Sequence: Synthetic oligonucleotide
cugagcaguuaucagacuc

SEQ ID NO: 733152 - RNA, 19 nt, Artificial Sequence
  Description of Artificial Sequence: Synthetic oligonucleotide
ccaaccaaaauguccaugc

SEQ ID NO: 733153 - RNA, 19 nt, Artificial Sequence
  Description of Artificial Sequence: Synthetic oligonucleotide
ggucuagagagcuuggccc

SEQ ID NO: 733154 - RNA, 19 nt, Artificial Sequence
  Description of Artificial Sequence: Synthetic oligonucleotide
aacuaagugugaaucauua

SEQ ID NO: 733155 - RNA, 19 nt, Artificial Sequence
  Description of Artificial Sequence: Synthetic oligonucleotide
ugucguaauucuuggucug

SEQ ID NO: 733156 - RNA, 19 nt, Artificial Sequence
  Description of Artificial Sequence: Synthetic oligonucleotide
gguaagagcaagugcagug

SEQ ID NO: 733157 - RNA, 19 nt, Artificial Sequence
  Description of Artificial Sequence: Synthetic oligonucleotide
aagggcgagcauccccugc

SEQ ID NO: 733158 - RNA, 19 nt, Artificial Sequence
  Description of Artificial Sequence: Synthetic oligonucleotide
aucacauuggggugcacca

SEQ ID NO: 733159 - RNA, 19 nt, Artificial Sequence
  Description of Artificial Sequence: Synthetic oligonucleotide
auaggacauggccauuguc

SEQ ID NO: 733160 - RNA, 19 nt, Artificial Sequence
  Description of Artificial Sequence: Synthetic oligonucleotide
ucggggaucagccucuggu

SEQ ID NO: 733161 - RNA, 19 nt, Artificial Sequence
  Description of Artificial Sequence: Synthetic oligonucleotide
gguuaaagugcauaugcca

SEQ ID NO: 733162 - RNA, 19 nt, Artificial Sequence
  Description of Artificial Sequence: Synthetic oligonucleotide
gaucagucggggaucagcc

SEQ ID NO: 733163 - RNA, 19 nt, Artificial Sequence
  Description of Artificial Sequence: Synthetic oligonucleotide
uuaucagacuccaucuguu

SEQ ID NO: 733164 - RNA, 19 nt, Artificial Sequence
  Description of Artificial Sequence: Synthetic oligonucleotide
accacaggcccguugcaac

SEQ ID NO: 733165 - RNA, 19 nt, Artificial Sequence
  Description of Artificial Sequence: Synthetic oligonucleotide
aaggcaaccaaguccccau

SEQ ID NO: 733166 - RNA, 19 nt, Artificial Sequence
  Description of Artificial Sequence: Synthetic oligonucleotide
uagguacggggaaacagcu

SEQ ID NO: 733167 - RNA, 19 nt, Artificial Sequence
  Description of Artificial Sequence: Synthetic oligonucleotide
caugcuucgggaugccucc

SEQ ID NO: 733168 - RNA, 19 nt, Artificial Sequence
  Description of Artificial Sequence: Synthetic oligonucleotide
uugaugcaacuacaagaca

SEQ ID NO: 733169 - RNA, 19 nt, Artificial Sequence
  Description of Artificial Sequence: Synthetic oligonucleotide
ugccacuuaauuacagguc

SEQ ID NO: 733170 - RNA, 19 nt, Artificial Sequence
  Description of Artificial Sequence: Synthetic oligonucleotide
cugacggaccagaagcugc

SEQ ID NO: 733171 - RNA, 19 nt, Artificial Sequence
  Description of Artificial Sequence: Synthetic oligonucleotide
uucaccuguggacgggucc

SEQ ID NO: 733172 - RNA, 19 nt, Artificial Sequence
  Description of Artificial Sequence: Synthetic oligonucleotide
ucagucggggaucagccuc

SEQ ID NO: 733173 - RNA, 19 nt, Artificial Sequence
  Description of Artificial Sequence: Synthetic oligonucleotide
gagagcagcugccacacuc

SEQ ID NO: 733174 - RNA, 19 nt, Artificial Sequence
  Description of Artificial Sequence: Synthetic oligonucleotide
uucgggaugccuccugagc

SEQ ID NO: 733175 - RNA, 19 nt, Artificial Sequence
  Description of Artificial Sequence: Synthetic oligonucleotide
cacacauucccaccuguag

SEQ ID NO: 733176 - RNA, 19 nt, Artificial Sequence
  Description of Artificial Sequence: Synthetic oligonucleotide
agaaagcuaacaugggguu

SEQ ID NO: 733177 - RNA, 19 nt, Artificial Sequence
  Description of Artificial Sequence: Synthetic oligonucleotide
ucguagucugggcacacac

SEQ ID NO: 733178 - RNA, 19 nt, Artificial Sequence
  Description of Artificial Sequence: Synthetic oligonucleotide
ugcucuacuugaugcaacu

SEQ ID NO: 733179 - RNA, 19 nt, Artificial Sequence
  Description of Artificial Sequence: Synthetic oligonucleotide
uucacacauucccaccugu

SEQ ID NO: 733180 - RNA, 19 nt, Artificial Sequence
  Description of Artificial Sequence: Synthetic oligonucleotide
agcuacuuggcugagugcu

SEQ ID NO: 733181 - RNA, 19 nt, Artificial Sequence
  Description of Artificial Sequence: Synthetic oligonucleotide
acaaauguguccagucauc

SEQ ID NO: 733182 - RNA, 19 nt, Artificial Sequence
  Description of Artificial Sequence: Synthetic oligonucleotide
agcaagugcaguguaccuc

SEQ ID NO: 733183 - RNA, 19 nt, Artificial Sequence
  Description of Artificial Sequence: Synthetic oligonucleotide
aagcugaagcggcggaucu

SEQ ID NO: 733184 - RNA, 19 nt, Artificial Sequence
  Description of Artificial Sequence: Synthetic oligonucleotide
uccuccugagcaguuauca

SEQ ID NO: 733185 - RNA, 19 nt, Artificial Sequence
  Description of Artificial Sequence: Synthetic oligonucleotide
ccucugacggaccagaagc

SEQ ID NO: 733186 - RNA, 19 nt, Artificial Sequence
  Description of Artificial Sequence: Synthetic oligonucleotide
agugacucgaucagucggg

SEQ ID NO: 733187 - RNA, 19 nt, Artificial Sequence
  Description of Artificial Sequence: Synthetic oligonucleotide
guagaugcggaagauguca

SEQ ID NO: 733188 - RNA, 19 nt, Artificial Sequence
  Description of Artificial Sequence: Synthetic oligonucleotide
gcaguuaucagacuccauc

SEQ ID NO: 733189 - RNA, 19 nt, Artificial Sequence
  Description of Artificial Sequence: Synthetic oligonucleotide
uccggcuccgggcuaaagc

SEQ ID NO: 733190 - RNA, 19 nt, Artificial Sequence
  Description of Artificial Sequence: Synthetic oligonucleotide
gcauguacacucuuggaac

SEQ ID NO: 733191 - RNA, 19 nt, Artificial Sequence
  Description of Artificial Sequence: Synthetic oligonucleotide
acaggucguagucugggca

SEQ ID NO: 733192 - RNA, 19 nt, Artificial Sequence
  Description of Artificial Sequence: Synthetic oligonucleotide
uguggacggguccacuucu

SEQ ID NO: 733193 - RNA, 19 nt, Artificial Sequence
  Description of Artificial Sequence: Synthetic oligonucleotide
uggcgguaagagcaagugc

SEQ ID NO: 733194 - RNA, 19 nt, Artificial Sequence
  Description of Artificial Sequence: Synthetic oligonucleotide
aggacgugggcuccaguuc

SEQ ID NO: 733195 - RNA, 19 nt, Artificial Sequence
  Description of Artificial Sequence: Synthetic oligonucleotide
cugauuccggcaucuguag

SEQ ID NO: 733196 - RNA, 19 nt, Artificial Sequence
  Description of Artificial Sequence: Synthetic oligonucleotide
agcuccgaugucguaauuc

SEQ ID NO: 733197 - RNA, 19 nt, Artificial Sequence
  Description of Artificial Sequence: Synthetic oligonucleotide
acgaaaacuaagugugaau

SEQ ID NO: 733198 - RNA, 19 nt, Artificial Sequence
  Description of Artificial Sequence: Synthetic oligonucleotide
ugugaggggucuagagagc

SEQ ID NO: 733199 - RNA, 19 nt, Artificial Sequence
  Description of Artificial Sequence: Synthetic oligonucleotide
agacuagguacggggaaac

SEQ ID NO: 733200 - RNA, 19 nt, Artificial Sequence
  Description of Artificial Sequence: Synthetic oligonucleotide
uaucagacuccaucuguuc

SEQ ID NO: 733201 - RNA, 19 nt, Artificial Sequence
  Description of Artificial Sequence: Synthetic oligonucleotide
agaggccccaaaugcccgc

SEQ ID NO: 733202 - RNA, 19 nt, Artificial Sequence
  Description of Artificial Sequence: Synthetic oligonucleotide
cucgucaggcuuguuaacc

SEQ ID NO: 733203 - RNA, 19 nt, Artificial Sequence
  Description of Artificial Sequence: Synthetic oligonucleotide
acuaagugugaaucauuau

SEQ ID NO: 733204 - RNA, 19 nt, Artificial Sequence
  Description of Artificial Sequence: Synthetic oligonucleotide
gaggggucuagagagcuug

SEQ ID NO: 733205 - RNA, 19 nt, Artificial Sequence
  Description of Artificial Sequence: Synthetic oligonucleotide
ucgucaggcuuguuaaccu

SEQ ID NO: 733206 - RNA, 19 nt, Artificial Sequence
  Description of Artificial Sequence: Synthetic oligonucleotide
agcgaguucccaccacagg

SEQ ID NO: 733207 - RNA, 19 nt, Artificial Sequence
  Description of Artificial Sequence: Synthetic oligonucleotide
aaugccuagagggcugaga

SEQ ID NO: 733208 - RNA, 19 nt, Artificial Sequence
  Description of Artificial Sequence: Synthetic oligonucleotide
aacuuucuggggagguggg

SEQ ID NO: 733209 - RNA, 19 nt, Artificial Sequence
  Description of Artificial Sequence: Synthetic oligonucleotide
gccacuuaauuacagguca

SEQ ID NO: 733210 - RNA, 19 nt, Artificial Sequence
  Description of Artificial Sequence: Synthetic oligonucleotide
ggcuuguuaaccucugaug

SEQ ID NO: 733211 - RNA, 19 nt, Artificial Sequence
  Description of Artificial Sequence: Synthetic oligonucleotide
cugacugcuggugcaaugc

SEQ ID NO: 733212 - RNA, 19 nt, Artificial Sequence
  Description of Artificial Sequence: Synthetic oligonucleotide
cuuucacauaggacauggc

SEQ ID NO: 733213 - RNA, 19 nt, Artificial Sequence
  Description of Artificial Sequence: Synthetic oligonucleotide
ucacaauggcggagggugc

SEQ ID NO: 733214 - RNA, 19 nt, Artificial Sequence
  Description of Artificial Sequence: Synthetic oligonucleotide
ugauuccggcaucuguaga

SEQ ID NO: 733215 - RNA, 19 nt, Artificial Sequence
  Description of Artificial Sequence: Synthetic oligonucleotide
cuuugacuuacuguggaca

SEQ ID NO: 733216 - RNA, 19 nt, Artificial Sequence
  Description of Artificial Sequence: Synthetic oligonucleotide
augcaacuacaagacaaag

SEQ ID NO: 733217 - RNA, 19 nt, Artificial Sequence
  Description of Artificial Sequence: Synthetic oligonucleotide
cuuuaaaggcuucacacau

SEQ ID NO: 733218 - RNA, 19 nt, Artificial Sequence
  Description of Artificial Sequence: Synthetic oligonucleotide
uagugcgccuggaagcccc

SEQ ID NO: 733219 - RNA, 19 nt, Artificial Sequence
  Description of Artificial Sequence: Synthetic oligonucleotide
cuaagugugaaucauuauu

SEQ ID NO: 733220 - RNA, 19 nt, Artificial Sequence
  Description of Artificial Sequence: Synthetic oligonucleotide
ugcggaagaugucaucuuu

SEQ ID NO: 733221 - RNA, 19 nt, Artificial Sequence
  Description of Artificial Sequence: Synthetic oligonucleotide
uguacacucuuggaacugu

SEQ ID NO: 733222 - RNA, 19 nt, Artificial Sequence
  Description of Artificial Sequence: Synthetic oligonucleotide
guagagacuggaguucacc

SEQ ID NO: 733223 - RNA, 19 nt, Artificial Sequence
  Description of Artificial Sequence: Synthetic oligonucleotide
gcagcuacuuggcugagug

SEQ ID NO: 733224 - RNA, 19 nt, Artificial Sequence
  Description of Artificial Sequence: Synthetic oligonucleotide
uccacuucuuuggaagaca

SEQ ID NO: 733225 - RNA, 19 nt, Artificial Sequence
  Description of Artificial Sequence: Synthetic oligonucleotide
cauaacugcagacuaggua

SEQ ID NO: 733226 - RNA, 19 nt, Artificial Sequence
  Description of Artificial Sequence: Synthetic oligonucleotide
ugcaaccaucacaaaucac

SEQ ID NO: 733227 - RNA, 19 nt, Artificial Sequence
  Description of Artificial Sequence: Synthetic oligonucleotide
aauguccaugcuucagcuu

SEQ ID NO: 733228 - RNA, 19 nt, Artificial Sequence
  Description of Artificial Sequence: Synthetic oligonucleotide
uuguagcgaguucccacca

SEQ ID NO: 733229 - RNA, 19 nt, Artificial Sequence
  Description of Artificial Sequence: Synthetic oligonucleotide
ucugacggaccagaagcug

SEQ ID NO: 733230 - RNA, 19 nt, Artificial Sequence
  Description of Artificial Sequence: Synthetic oligonucleotide
cagagggaagcucagcuca

SEQ ID NO: 733231 - RNA, 19 nt, Artificial Sequence
  Description of Artificial Sequence: Synthetic oligonucleotide
gcgaguucccaccacaggc

SEQ ID NO: 733232 - RNA, 19 nt, Artificial Sequence
  Description of Artificial Sequence: Synthetic oligonucleotide
caagcccgucacaauggcg

SEQ ID NO: 733233 - RNA, 19 nt, Artificial Sequence
  Description of Artificial Sequence: Synthetic oligonucleotide
ggcgucagcauguacacuc

SEQ ID NO: 733234 - RNA, 19 nt, Artificial Sequence
  Description of Artificial Sequence: Synthetic oligonucleotide
aaacuaagugugaaucauu

SEQ ID NO: 733235 - RNA, 19 nt, Artificial Sequence
  Description of Artificial Sequence: Synthetic oligonucleotide
uaauguagaugcggaagau

SEQ ID NO: 733236 - RNA, 19 nt, Artificial Sequence
  Description of Artificial Sequence: Synthetic oligonucleotide
uagaugcggaagaugucau

SEQ ID NO: 733237 - RNA, 19 nt, Artificial Sequence
  Description of Artificial Sequence: Synthetic oligonucleotide
cucaucgcgguagugcgcc

SEQ ID NO: 733238 - RNA, 19 nt, Artificial Sequence
  Description of Artificial Sequence: Synthetic oligonucleotide
cuuuaauguagaugcggaa

SEQ ID NO: 733239 - RNA, 19 nt, Artificial Sequence
  Description of Artificial Sequence: Synthetic oligonucleotide
gacccuucagcugacuuca

SEQ ID NO: 733240 - RNA, 19 nt, Artificial Sequence
  Description of Artificial Sequence: Synthetic oligonucleotide
uguagcgaguucccaccac

SEQ ID NO: 733241 - RNA, 19 nt, Artificial Sequence
  Description of Artificial Sequence: Synthetic oligonucleotide
acacugcacuuguagcgag

SEQ ID NO: 733242 - RNA, 19 nt, Artificial Sequence
  Description of Artificial Sequence: Synthetic oligonucleotide
ugcaaugcuggcgguaaga

SEQ ID NO: 733243 - RNA, 19 nt, Artificial Sequence
  Description of Artificial Sequence: Synthetic oligonucleotide
ggggaucagccucuggugg

SEQ ID NO: 733244 - RNA, 19 nt, Artificial Sequence
  Description of Artificial Sequence: Synthetic oligonucleotide
uugacuuacuguggacagc

SEQ ID NO: 733245 - RNA, 19 nt, Artificial Sequence
  Description of Artificial Sequence: Synthetic oligonucleotide
cucgcagacacugcacagg

SEQ ID NO: 733246 - RNA, 19 nt, Artificial Sequence
  Description of Artificial Sequence: Synthetic oligonucleotide
acugcagacuagguacggg

SEQ ID NO: 733247 - RNA, 19 nt, Artificial Sequence
  Description of Artificial Sequence: Synthetic oligonucleotide
uguuccucuggcuguccca

SEQ ID NO: 733248 - RNA, 19 nt, Artificial Sequence
  Description of Artificial Sequence: Synthetic oligonucleotide
ggcgguaagagcaagugca

SEQ ID NO: 733249 - RNA, 19 nt, Artificial Sequence
  Description of Artificial Sequence: Synthetic oligonucleotide
cugggucuguucucaggcg

SEQ ID NO: 733250 - RNA, 19 nt, Artificial Sequence
  Description of Artificial Sequence: Synthetic oligonucleotide
cauaauagcuuuauuuguu

SEQ ID NO: 733251 - RNA, 19 nt, Artificial Sequence
  Description of Artificial Sequence: Synthetic oligonucleotide
caggucguagucugggcac

SEQ ID NO: 733252 - RNA, 19 nt, Artificial Sequence
  Description of Artificial Sequence: Synthetic oligonucleotide
ggaacagcgaggccacccg

SEQ ID NO: 733253 - RNA, 19 nt, Artificial Sequence
  Description of Artificial Sequence: Synthetic oligonucleotide
ggaguucaccuguggacgg

SEQ ID NO: 733254 - RNA, 19 nt, Artificial Sequence
  Description of Artificial Sequence: Synthetic oligonucleotide
gcuuuaaaggcuucacaca

SEQ ID NO: 733255 - RNA, 19 nt, Artificial Sequence
  Description of Artificial Sequence: Synthetic oligonucleotide
ugccucgucaggcuuguua

SEQ ID NO: 733256 - RNA, 19 nt, Artificial Sequence
  Description of Artificial Sequence: Synthetic oligonucleotide
guagcgaguucccaccaca

SEQ ID NO: 733257 - RNA, 19 nt, Artificial Sequence
  Description of Artificial Sequence: Synthetic oligonucleotide
gggugcaccaugcuucggg

SEQ ID NO: 733258 - RNA, 19 nt, Artificial Sequence
  Description of Artificial Sequence: Synthetic oligonucleotide
caaauguguccagucauca

SEQ ID NO: 733259 - RNA, 19 nt, Artificial Sequence
  Description of Artificial Sequence: Synthetic oligonucleotide
cagaggccccaaaugcccg

SEQ ID NO: 733260 - RNA, 19 nt, Artificial Sequence
  Description of Artificial Sequence: Synthetic oligonucleotide
gggagagugacucgaucag

SEQ ID NO: 733261 - RNA, 19 nt, Artificial Sequence
  Description of Artificial Sequence: Synthetic oligonucleotide
cuacuugaugcaacuacaa

SEQ ID NO: 733262 - RNA, 19 nt, Artificial Sequence
  Description of Artificial Sequence: Synthetic oligonucleotide
acgccauaacugcagacua

SEQ ID NO: 733263 - RNA, 19 nt, Artificial Sequence
  Description of Artificial Sequence: Synthetic oligonucleotide
aaaugcccgccaccuuuga

SEQ ID NO: 733264 - RNA, 19 nt, Artificial Sequence
  Description of Artificial Sequence: Synthetic oligonucleotide
ggucauuuuagaaauucaa

SEQ ID NO: 733265 - RNA, 19 nt, Artificial Sequence
  Description of Artificial Sequence: Synthetic oligonucleotide
gaacgaaaacuaaguguga

SEQ ID NO: 733266 - RNA, 19 nt, Artificial Sequence
  Description of Artificial Sequence: Synthetic oligonucleotide
gacucgaucagucggggau

SEQ ID NO: 733267 - RNA, 19 nt, Artificial Sequence
  Description of Artificial Sequence: Synthetic oligonucleotide
cugcucuacuugaugcaac

SEQ ID NO: 733268 - RNA, 19 nt, Artificial Sequence
  Description of Artificial Sequence: Synthetic oligonucleotide
cuggcgguaagagcaagug

SEQ ID NO: 733269 - RNA, 19 nt, Artificial Sequence
  Description of Artificial Sequence: Synthetic oligonucleotide
uguccagugcagcuccgau

SEQ ID NO: 733270 - RNA, 19 nt, Artificial Sequence
  Description of Artificial Sequence: Synthetic oligonucleotide
uguguaggcccuuccccuc

SEQ ID NO: 733271 - RNA, 19 nt, Artificial Sequence
  Description of Artificial Sequence: Synthetic oligonucleotide
caguguauuaaucacuuuu

SEQ ID NO: 733272 - RNA, 19 nt, Artificial Sequence
  Description of Artificial Sequence: Synthetic oligonucleotide
caguuaucagacuccaucu

SEQ ID NO: 733273 - RNA, 19 nt, Artificial Sequence
  Description of Artificial Sequence: Synthetic oligonucleotide
ccgaugucguaauucuugg

SEQ ID NO: 733274 - RNA, 19 nt, Artificial Sequence
  Description of Artificial Sequence: Synthetic oligonucleotide
ucaguguauuaaucacuuu

SEQ ID NO: 733275 - RNA, 19 nt, Artificial Sequence
  Description of Artificial Sequence: Synthetic oligonucleotide
gaguucaccuguggacggg

SEQ ID NO: 733276 - RNA, 19 nt, Artificial Sequence
  Description of Artificial Sequence: Synthetic oligonucleotide
auuugcucugucagggacu

SEQ ID NO: 733277 - RNA, 19 nt, Artificial Sequence
  Description of Artificial Sequence: Synthetic oligonucleotide
uugcugugcucccugugua

SEQ ID NO: 733278 - RNA, 19 nt, Artificial Sequence
  Description of Artificial Sequence: Synthetic oligonucleotide
cuucgggaugccuccugag

SEQ ID NO: 733279 - RNA, 19 nt, Artificial Sequence
  Description of Artificial Sequence: Synthetic oligonucleotide
aggcaaccaaguccccauc

SEQ ID NO: 733280 - RNA, 19 nt, Artificial Sequence
  Description of Artificial Sequence: Synthetic oligonucleotide
cacaggucguagucugggc

SEQ ID NO: 733281 - RNA, 19 nt, Artificial Sequence
  Description of Artificial Sequence: Synthetic oligonucleotide
gacuucaagaguucuccau

SEQ ID NO: 733282 - RNA, 19 nt, Artificial Sequence
  Description of Artificial Sequence: Synthetic oligonucleotide
ucaaugccuagagggcuga

SEQ ID NO: 733283 - RNA, 19 nt, Artificial Sequence
  Description of Artificial Sequence: Synthetic oligonucleotide
acgcucuucaggaaauuga

SEQ ID NO: 733284 - RNA, 19 nt, Artificial Sequence
  Description of Artificial Sequence: Synthetic oligonucleotide
ggcaaccaaguccccaucc

SEQ ID NO: 733285 - RNA, 19 nt, Artificial Sequence
  Description of Artificial Sequence: Synthetic oligonucleotide
ugggauccucugacggacc

SEQ ID NO: 733286 - RNA, 19 nt, Artificial Sequence
  Description of Artificial Sequence: Synthetic oligonucleotide
gugacucgaucagucgggg

SEQ ID NO: 733287 - RNA, 19 nt, Artificial Sequence
  Description of Artificial Sequence: Synthetic oligonucleotide
uggacccaucucccaacca

SEQ ID NO: 733288 - RNA, 19 nt, Artificial Sequence
  Description of Artificial Sequence: Synthetic oligonucleotide
aguauauggugagacccuu

SEQ ID NO: 733289 - RNA, 19 nt, Artificial Sequence
  Description of Artificial Sequence: Synthetic oligonucleotide
ugacucgaucagucgggga

SEQ ID NO: 733290 - RNA, 19 nt, Artificial Sequence
  Description of Artificial Sequence: Synthetic oligonucleotide
gagcaguuaucagacucca

SEQ ID NO: 733291 - RNA, 19 nt, Artificial Sequence
  Description of Artificial Sequence: Synthetic oligonucleotide
cucgcacggcccaggaccc

SEQ ID NO: 733292 - RNA, 19 nt, Artificial Sequence
  Description of Artificial Sequence: Synthetic oligonucleotide
gacgccauaacugcagacu

SEQ ID NO: 733293 - RNA, 19 nt, Artificial Sequence
  Description of Artificial Sequence: Synthetic oligonucleotide
cuuggcccuucugauuccg

SEQ ID NO: 733294 - RNA, 19 nt, Artificial Sequence
  Description of Artificial Sequence: Synthetic oligonucleotide
agcauccccugcucuagga

SEQ ID NO: 733295 - RNA, 19 nt, Artificial Sequence
  Description of Artificial Sequence: Synthetic oligonucleotide
gugcauaugccacuuaauu

SEQ ID NO: 733296 - RNA, 19 nt, Artificial Sequence
  Description of Artificial Sequence: Synthetic oligonucleotide
uuccccgguggacccaucu

SEQ ID NO: 733297 - RNA, 19 nt, Artificial Sequence
  Description of Artificial Sequence: Synthetic oligonucleotide
cacacggugggcgaugguc

SEQ ID NO: 733298 - RNA, 19 nt, Artificial Sequence
  Description of Artificial Sequence: Synthetic oligonucleotide
cacgcucuucaggaaauug

SEQ ID NO: 733299 - RNA, 19 nt, Artificial Sequence
  Description of Artificial Sequence: Synthetic oligonucleotide
cauguacacucuuggaacu

SEQ ID NO: 733300 - RNA, 19 nt, Artificial Sequence
  Description of Artificial Sequence: Synthetic oligonucleotide
gccuagagggcugagagca

SEQ ID NO: 733301 - RNA, 19 nt, Artificial Sequence
  Description of Artificial Sequence: Synthetic oligonucleotide
aucagucggggaucagccu

SEQ ID NO: 733302 - RNA, 19 nt, Artificial Sequence
  Description of Artificial Sequence: Synthetic oligonucleotide
ugucacucuccuacugcuu

SEQ ID NO: 733303 - RNA, 19 nt, Artificial Sequence
  Description of Artificial Sequence: Synthetic oligonucleotide
uagagagcuuggcccuucu

SEQ ID NO: 733304 - RNA, 19 nt, Artificial Sequence
  Description of Artificial Sequence: Synthetic oligonucleotide
auuccggcaucuguagaga

SEQ ID NO: 733305 - RNA, 19 nt, Artificial Sequence
  Description of Artificial Sequence: Synthetic oligonucleotide
guacggggaaacagcuggg

SEQ ID NO: 733306 - RNA, 19 nt, Artificial Sequence
  Description of Artificial Sequence: Synthetic oligonucleotide
gggcuuuggcacaagcccg

SEQ ID NO: 733307 - RNA, 19 nt, Artificial Sequence
  Description of Artificial Sequence: Synthetic oligonucleotide
ucguaauucuuggucugua

SEQ ID NO: 733308 - RNA, 19 nt, Artificial Sequence
  Description of Artificial Sequence: Synthetic oligonucleotide
agcccuguggguccuuccu

SEQ ID NO: 733309 - RNA, 19 nt, Artificial Sequence
  Description of Artificial Sequence: Synthetic oligonucleotide
ggacggguccacuucuuug

SEQ ID NO: 733310 - RNA, 19 nt, Artificial Sequence
  Description of Artificial Sequence: Synthetic oligonucleotide
agugcauaugccacuuaau

SEQ ID NO: 733311 - RNA, 19 nt, Artificial Sequence
  Description of Artificial Sequence: Synthetic oligonucleotide
gucacagggcuuuggcaca

SEQ ID NO: 733312 - RNA, 19 nt, Artificial Sequence
  Description of Artificial Sequence: Synthetic oligonucleotide
ggcuucacacauucccacc

SEQ ID NO: 733313 - RNA, 19 nt, Artificial Sequence
  Description of Artificial Sequence: Synthetic oligonucleotide
cagcuacuuggcugagugc

SEQ ID NO: 733314 - RNA, 19 nt, Artificial Sequence
  Description of Artificial Sequence: Synthetic oligonucleotide
gggacugugaagugccuuc

SEQ ID NO: 733315 - RNA, 19 nt, Artificial Sequence
  Description of Artificial Sequence: Synthetic oligonucleotide
cuaggaggacgugggcucc

SEQ ID NO: 733316 - RNA, 19 nt, Artificial Sequence
  Description of Artificial Sequence: Synthetic oligonucleotide
ggacugugaagugccuucg

SEQ ID NO: 733317 - RNA, 19 nt, Artificial Sequence
  Description of Artificial Sequence: Synthetic oligonucleotide
agugcagcuccgaugucgu

SEQ ID NO: 733318 - RNA, 19 nt, Artificial Sequence
  Description of Artificial Sequence: Synthetic oligonucleotide
cacggugggcgaugguccc

SEQ ID NO: 733319 - RNA, 19 nt, Artificial Sequence
  Description of Artificial Sequence: Synthetic oligonucleotide
cuguggacggguccacuuc

SEQ ID NO: 733320 - RNA, 19 nt, Artificial Sequence
  Description of Artificial Sequence: Synthetic oligonucleotide
ugcccgccaccuuugacuu

SEQ ID NO: 733321 - RNA, 19 nt, Artificial Sequence
  Description of Artificial Sequence: Synthetic oligonucleotide
guaccucugcagcucccug

SEQ ID NO: 733322 - RNA, 19 nt, Artificial Sequence
  Description of Artificial Sequence: Synthetic oligonucleotide
uggacggguccacuucuuu

SEQ ID NO: 733323 - RNA, 19 nt, Artificial Sequence
  Description of Artificial Sequence: Synthetic oligonucleotide
gacuuacuguggacagccc

SEQ ID NO: 733324 - RNA, 19 nt, Artificial Sequence
  Description of Artificial Sequence: Synthetic oligonucleotide
agcugaagcggcggaucuc

SEQ ID NO: 733325 - RNA, 19 nt, Artificial Sequence
  Description of Artificial Sequence: Synthetic oligonucleotide
aguucaccuguggacgggu

SEQ ID NO: 733326 - RNA, 19 nt, Artificial Sequence
  Description of Artificial Sequence: Synthetic oligonucleotide
gauggucccgccggcacuc

SEQ ID NO: 733327 - RNA, 19 nt, Artificial Sequence
  Description of Artificial Sequence: Synthetic oligonucleotide
guauauggugagacccuuc

SEQ ID NO: 733328 - RNA, 19 nt, Artificial Sequence
  Description of Artificial Sequence: Synthetic oligonucleotide
gcaagugcaguguaccucu

SEQ ID NO: 733329 - RNA, 19 nt, Artificial Sequence
  Description of Artificial Sequence: Synthetic oligonucleotide
augcggaagaugucaucuu

SEQ ID NO: 733330 - RNA, 19 nt, Artificial Sequence
  Description of Artificial Sequence: Synthetic oligonucleotide
cuuuggcacaagcccguca

SEQ ID NO: 733331 - RNA, 19 nt, Artificial Sequence
  Description of Artificial Sequence: Synthetic oligonucleotide
ggguccuuccugugagggg

SEQ ID NO: 733332 - RNA, 19 nt, Artificial Sequence
  Description of Artificial Sequence: Synthetic oligonucleotide
guccccucaugucacucuc

SEQ ID NO: 733333 - RNA, 19 nt, Artificial Sequence
  Description of Artificial Sequence: Synthetic oligonucleotide
agcggccaugagagaagcc

SEQ ID NO: 733334 - RNA, 19 nt, Artificial Sequence
  Description of Artificial Sequence: Synthetic oligonucleotide
caguguaccucugcagcuc

SEQ ID NO: 733335 - RNA, 19 nt, Artificial Sequence
  Description of Artificial Sequence: Synthetic oligonucleotide
ggguuaggaaagaugagcu

SEQ ID NO: 733336 - RNA, 19 nt, Artificial Sequence
  Description of Artificial Sequence: Synthetic oligonucleotide
acggugagcgacgccauaa

SEQ ID NO: 733337 - RNA, 19 nt, Artificial Sequence
  Description of Artificial Sequence: Synthetic oligonucleotide
auguggguacaaggcagcu

SEQ ID NO: 733338 - RNA, 19 nt, Artificial Sequence
  Description of Artificial Sequence: Synthetic oligonucleotide
ccaugcuucgggaugccuc

SEQ ID NO: 733339 - RNA, 19 nt, Artificial Sequence
  Description of Artificial Sequence: Synthetic oligonucleotide
ucgccugccucgucaggcu

SEQ ID NO: 733340 - RNA, 19 nt, Artificial Sequence
  Description of Artificial Sequence: Synthetic oligonucleotide
gacuagguacggggaaaca

SEQ ID NO: 733341 - RNA, 19 nt, Artificial Sequence
  Description of Artificial Sequence: Synthetic oligonucleotide
aggcccguugcaaccauca

SEQ ID NO: 733342 - RNA, 19 nt, Artificial Sequence
  Description of Artificial Sequence: Synthetic oligonucleotide
aggggucuagagagcuugg

SEQ ID NO: 733343 - RNA, 19 nt, Artificial Sequence
  Description of Artificial Sequence: Synthetic oligonucleotide
cagcggccaugagagaagc

SEQ ID NO: 733344 - RNA, 19 nt, Artificial Sequence
  Description of Artificial Sequence: Synthetic oligonucleotide
uccccgguggacccaucuc

SEQ ID NO: 733345 - RNA, 19 nt, Artificial Sequence
  Description of Artificial Sequence: Synthetic oligonucleotide
cucaggcgucagcauguac

SEQ ID NO: 733346 - RNA, 19 nt, Artificial Sequence
  Description of Artificial Sequence: Synthetic oligonucleotide
gaggccccaaaugcccgcc

SEQ ID NO: 733347 - RNA, 19 nt, Artificial Sequence
  Description of Artificial Sequence: Synthetic oligonucleotide
cugagcacacggugggcga

SEQ ID NO: 733348 - RNA, 19 nt, Artificial Sequence
  Description of Artificial Sequence: Synthetic oligonucleotide
gucggggaucagccucugg

SEQ ID NO: 733349 - RNA, 19 nt, Artificial Sequence
  Description of Artificial Sequence: Synthetic oligonucleotide
cuguguaggcccuuccccu

SEQ ID NO: 733350 - RNA, 19 nt, Artificial Sequence
  Description of Artificial Sequence: Synthetic oligonucleotide
cuagagagcuuggcccuuc

SEQ ID NO: 733351 - RNA, 19 nt, Artificial Sequence
  Description of Artificial Sequence: Synthetic oligonucleotide
cugcacuuguagcgaguuc

SEQ ID NO: 733352 - RNA, 19 nt, Artificial Sequence
  Description of Artificial Sequence: Synthetic oligonucleotide
gaaggucaucagacaagaa

SEQ ID NO: 733353 - RNA, 19 nt, Artificial Sequence
  Description of Artificial Sequence: Synthetic oligonucleotide
ugacuccaaggcgaucuuu

SEQ ID NO: 733354 - RNA, 19 nt, Artificial Sequence
  Description of Artificial Sequence: Synthetic oligonucleotide
gcaccaugcuucgggaugc

SEQ ID NO: 733355 - RNA, 19 nt, Artificial Sequence
  Description of Artificial Sequence: Synthetic oligonucleotide
gcuccgaugucguaauucu

SEQ ID NO: 733356 - RNA, 19 nt, Artificial Sequence
  Description of Artificial Sequence: Synthetic oligonucleotide
gcuaacaugggguuucauu

SEQ ID NO: 733357 - RNA, 19 nt, Artificial Sequence
  Description of Artificial Sequence: Synthetic oligonucleotide
caagggcgagcauccccug

SEQ ID NO: 733358 - RNA, 19 nt, Artificial Sequence
  Description of Artificial Sequence: Synthetic oligonucleotide
ccccgguggacccaucucc

SEQ ID NO: 733359 - RNA, 19 nt, Artificial Sequence
  Description of Artificial Sequence: Synthetic oligonucleotide
gcgguaagagcaagugcag

SEQ ID NO: 733360 - RNA, 19 nt, Artificial Sequence
  Description of Artificial Sequence: Synthetic oligonucleotide
ugagacccuucagcugacu

SEQ ID NO: 733361 - RNA, 19 nt, Artificial Sequence
  Description of Artificial Sequence: Synthetic oligonucleotide
ccagcggccaugagagaag

SEQ ID NO: 733362 - RNA, 19 nt, Artificial Sequence
  Description of Artificial Sequence: Synthetic oligonucleotide
ggugcaaugcuggcgguaa

SEQ ID NO: 733363 - RNA, 19 nt, Artificial Sequence
  Description of Artificial Sequence: Synthetic oligonucleotide
gcagacuagguacggggaa

SEQ ID NO: 733364 - RNA, 19 nt, Artificial Sequence
  Description of Artificial Sequence: Synthetic oligonucleotide
uggugcaaugcuggcggua

SEQ ID NO: 733365 - RNA, 19 nt, Artificial Sequence
  Description of Artificial Sequence: Synthetic oligonucleotide
cagacuagguacggggaaa

SEQ ID NO: 733366 - RNA, 19 nt, Artificial Sequence
  Description of Artificial Sequence: Synthetic oligonucleotide
cucgaucagucggggauca

SEQ ID NO: 733367 - RNA, 19 nt, Artificial Sequence
  Description of Artificial Sequence: Synthetic oligonucleotide
caucgcgguagugcgccug

SEQ ID NO: 733368 - RNA, 19 nt, Artificial Sequence
  Description of Artificial Sequence: Synthetic oligonucleotide
gcauuaacauuggaacgaa

SEQ ID NO: 733369 - RNA, 19 nt, Artificial Sequence
  Description of Artificial Sequence: Synthetic oligonucleotide
cucucgcacggcccaggac

SEQ ID NO: 733370 - RNA, 19 nt, Artificial Sequence
  Description of Artificial Sequence: Synthetic oligonucleotide
agggacugugaagugccuu

SEQ ID NO: 733371 - RNA, 19 nt, Artificial Sequence
  Description of Artificial Sequence: Synthetic oligonucleotide
ucaucgcgguagugcgccu

SEQ ID NO: 733372 - RNA, 19 nt, Artificial Sequence
  Description of Artificial Sequence: Synthetic oligonucleotide
cccgguggacccaucuccc

SEQ ID NO: 733373 - RNA, 19 nt, Artificial Sequence
  Description of Artificial Sequence: Synthetic oligonucleotide
cacggcccaggacccgccg

SEQ ID NO: 733374 - RNA, 19 nt, Artificial Sequence
  Description of Artificial Sequence: Synthetic oligonucleotide
gccuucacggugagcgacg

SEQ ID NO: 733375 - RNA, 19 nt, Artificial Sequence
  Description of Artificial Sequence: Synthetic oligonucleotide
cugaagcggcggaucucuc

SEQ ID NO: 733376 - RNA, 19 nt, Artificial Sequence
  Description of Artificial Sequence: Synthetic oligonucleotide
cggagggugcuuugaauac

SEQ ID NO: 733377 - RNA, 19 nt, Artificial Sequence
  Description of Artificial Sequence: Synthetic oligonucleotide
cuguccccucaugucacuc

SEQ ID NO: 733378 - RNA, 19 nt, Artificial Sequence
  Description of Artificial Sequence: Synthetic oligonucleotide
caaugccuagagggcugag

SEQ ID NO: 733379 - RNA, 19 nt, Artificial Sequence
  Description of Artificial Sequence: Synthetic oligonucleotide
ccacuucuuuggaagacaa

SEQ ID NO: 733380 - RNA, 19 nt, Artificial Sequence
  Description of Artificial Sequence: Synthetic oligonucleotide
cuguggggcaagggcgagc

SEQ ID NO: 733381 - RNA, 19 nt, Artificial Sequence
  Description of Artificial Sequence: Synthetic oligonucleotide
gcaguguaccucugcagcu

SEQ ID NO: 733382 - RNA, 19 nt, Artificial Sequence
  Description of Artificial Sequence: Synthetic oligonucleotide
gucguaauucuuggucugu

SEQ ID NO: 733383 - RNA, 19 nt, Artificial Sequence
  Description of Artificial Sequence: Synthetic oligonucleotide
gcuuggcccuucugauucc

SEQ ID NO: 733384 - RNA, 19 nt, Artificial Sequence
  Description of Artificial Sequence: Synthetic oligonucleotide
gccccaaaugcccgccacc

SEQ ID NO: 733385 - RNA, 19 nt, Artificial Sequence
  Description of Artificial Sequence: Synthetic oligonucleotide
gggcggggaacagcgaggc

SEQ ID NO: 733386 - RNA, 19 nt, Artificial Sequence
  Description of Artificial Sequence: Synthetic oligonucleotide
cgccauaacugcagacuag

SEQ ID NO: 733387 - RNA, 19 nt, Artificial Sequence
  Description of Artificial Sequence: Synthetic oligonucleotide
caggcccguugcaaccauc

SEQ ID NO: 733388 - RNA, 19 nt, Artificial Sequence
  Description of Artificial Sequence: Synthetic oligonucleotide
ucgcacggcccaggacccg

SEQ ID NO: 733389 - RNA, 19 nt, Artificial Sequence
  Description of Artificial Sequence: Synthetic oligonucleotide
aguuccccgguggacccau

SEQ ID NO: 733390 - RNA, 19 nt, Artificial Sequence
  Description of Artificial Sequence: Synthetic oligonucleotide
ccucaucgcgguagugcgc

SEQ ID NO: 733391 - RNA, 19 nt, Artificial Sequence
  Description of Artificial Sequence: Synthetic oligonucleotide
guucaccuguggacggguc

SEQ ID NO: 733392 - RNA, 19 nt, Artificial Sequence
  Description of Artificial Sequence: Synthetic oligonucleotide
gcaaccaaguccccauccu

SEQ ID NO: 733393 - RNA, 19 nt, Artificial Sequence
  Description of Artificial Sequence: Synthetic oligonucleotide
caccaugcuucgggaugcc

SEQ ID NO: 733394 - RNA, 19 nt, Artificial Sequence
  Description of Artificial Sequence: Synthetic oligonucleotide
agcuaacaugggguuucau

SEQ ID NO: 733395 - RNA, 19 nt, Artificial Sequence
  Description of Artificial Sequence: Synthetic oligonucleotide
gugagacccuucagcugac

SEQ ID NO: 733396 - RNA, 19 nt, Artificial Sequence
  Description of Artificial Sequence: Synthetic oligonucleotide
ccgucacaauggcggaggg

SEQ ID NO: 733397 - RNA, 19 nt, Artificial Sequence
  Description of Artificial Sequence: Synthetic oligonucleotide
gcgauggucccgccggcac

SEQ ID NO: 733398 - RNA, 19 nt, Artificial Sequence
  Description of Artificial Sequence: Synthetic oligonucleotide
cuguagauucuggaagaau

SEQ ID NO: 733399 - RNA, 19 nt, Artificial Sequence
  Description of Artificial Sequence: Synthetic oligonucleotide
ccucgucaggcuuguuaac

SEQ ID NO: 733400 - RNA, 19 nt, Artificial Sequence
  Description of Artificial Sequence: Synthetic oligonucleotide
cacuuaauuacaggucauu

SEQ ID NO: 733401 - RNA, 19 nt, Artificial Sequence
  Description of Artificial Sequence: Synthetic oligonucleotide
agucggggaucagccucug

SEQ ID NO: 733402 - RNA, 19 nt, Artificial Sequence
  Description of Artificial Sequence: Synthetic oligonucleotide
guaggcccuuccccucgca

SEQ ID NO: 733403 - RNA, 19 nt, Artificial Sequence
  Description of Artificial Sequence: Synthetic oligonucleotide
cggggaucagccucuggug

SEQ ID NO: 733404 - RNA, 19 nt, Artificial Sequence
  Description of Artificial Sequence: Synthetic oligonucleotide
ccuucacggugagcgacgc

SEQ ID NO: 733405 - RNA, 19 nt, Artificial Sequence
  Description of Artificial Sequence: Synthetic oligonucleotide
cagucggggaucagccucu

SEQ ID NO: 733406 - RNA, 19 nt, Artificial Sequence
  Description of Artificial Sequence: Synthetic oligonucleotide
ccuguggguccuuccugug

SEQ ID NO: 733407 - RNA, 19 nt, Artificial Sequence
  Description of Artificial Sequence: Synthetic oligonucleotide
caucagagagguggccaaa

SEQ ID NO: 733408 - RNA, 19 nt, Artificial Sequence
  Description of Artificial Sequence: Synthetic oligonucleotide
gcugaagcggcggaucucu

SEQ ID NO: 733409 - RNA, 19 nt, Artificial Sequence
  Description of Artificial Sequence: Synthetic oligonucleotide
agccagcggccaugagaga

SEQ ID NO: 733410 - RNA, 19 nt, Artificial Sequence
  Description of Artificial Sequence: Synthetic oligonucleotide
gcgacgccauaacugcaga

SEQ ID NO: 733411 - RNA, 19 nt, Artificial Sequence
  Description of Artificial Sequence: Synthetic oligonucleotide
gggucuguucucaggcguc

SEQ ID NO: 733412 - RNA, 19 nt, Artificial Sequence
  Description of Artificial Sequence: Synthetic oligonucleotide
cggcggaucucucgggccg

SEQ ID NO: 733413 - RNA, 19 nt, Artificial Sequence
  Description of Artificial Sequence: Synthetic oligonucleotide
augcuucgggaugccuccu

SEQ ID NO: 733414 - RNA, 19 nt, Artificial Sequence
  Description of Artificial Sequence: Synthetic oligonucleotide
ggcccguugcaaccaucac

SEQ ID NO: 733415 - RNA, 19 nt, Artificial Sequence
  Description of Artificial Sequence: Synthetic oligonucleotide
gcaagggcgagcauccccu

SEQ ID NO: 733416 - RNA, 19 nt, Artificial Sequence
  Description of Artificial Sequence: Synthetic oligonucleotide
cccuacugaggcccugcug

SEQ ID NO: 733417 - RNA, 19 nt, Artificial Sequence
  Description of Artificial Sequence: Synthetic oligonucleotide
cacugcacuuguagcgagu

SEQ ID NO: 733418 - RNA, 19 nt, Artificial Sequence
  Description of Artificial Sequence: Synthetic oligonucleotide
cccaaccaggccaaccaaa

SEQ ID NO: 733419 - RNA, 19 nt, Artificial Sequence
  Description of Artificial Sequence: Synthetic oligonucleotide
ggagggugcuuugaauacu

SEQ ID NO: 733420 - RNA, 19 nt, Artificial Sequence
  Description of Artificial Sequence: Synthetic oligonucleotide
augcuggcgguaagagcaa

SEQ ID NO: 733421 - RNA, 19 nt, Artificial Sequence
  Description of Artificial Sequence: Synthetic oligonucleotide
ccccugcucuaggaggacg

SEQ ID NO: 733422 - RNA, 19 nt, Artificial Sequence
  Description of Artificial Sequence: Synthetic oligonucleotide
cggggaacagcgaggccac

SEQ ID NO: 733423 - RNA, 19 nt, Artificial Sequence
  Description of Artificial Sequence: Synthetic oligonucleotide
gcgagcauccccugcucua

SEQ ID NO: 733424 - RNA, 19 nt, Artificial Sequence
  Description of Artificial Sequence: Synthetic oligonucleotide
ccaaaugcccgccaccuuu

SEQ ID NO: 733425 - RNA, 19 nt, Artificial Sequence
  Description of Artificial Sequence: Synthetic oligonucleotide
cuccgaugucguaauucuu

SEQ ID NO: 733426 - RNA, 19 nt, Artificial Sequence
  Description of Artificial Sequence: Synthetic oligonucleotide
gcccgucacaauggcggag

SEQ ID NO: 733427 - RNA, 19 nt, Artificial Sequence
  Description of Artificial Sequence: Synthetic oligonucleotide
gccacccgacacagcagcc

SEQ ID NO: 733428 - RNA, 19 nt, Artificial Sequence
  Description of Artificial Sequence: Synthetic oligonucleotide
ccauaacugcagacuaggu

SEQ ID NO: 733429 - RNA, 19 nt, Artificial Sequence
  Description of Artificial Sequence: Synthetic oligonucleotide
ggggugcaccaugcuucgg

SEQ ID NO: 733430 - RNA, 19 nt, Artificial Sequence
  Description of Artificial Sequence: Synthetic oligonucleotide
ggcacaagcccgucacaau

SEQ ID NO: 733431 - RNA, 19 nt, Artificial Sequence
  Description of Artificial Sequence: Synthetic oligonucleotide
gcucuacuugaugcaacua

SEQ ID NO: 733432 - RNA, 19 nt, Artificial Sequence
  Description of Artificial Sequence: Synthetic oligonucleotide
gcacuccuucuucucuuua

SEQ ID NO: 733433 - RNA, 19 nt, Artificial Sequence
  Description of Artificial Sequence: Synthetic oligonucleotide
ggcggagggugcuuugaau

SEQ ID NO: 733434 - RNA, 19 nt, Artificial Sequence
  Description of Artificial Sequence: Synthetic oligonucleotide
ggcuuuggcacaagcccgu

SEQ ID NO: 733435 - RNA, 19 nt, Artificial Sequence
  Description of Artificial Sequence: Synthetic oligonucleotide
ccacuuaauuacaggucau

SEQ ID NO: 733436 - RNA, 19 nt, Artificial Sequence
  Description of Artificial Sequence: Synthetic oligonucleotide
cacaaguaccugggucugu

SEQ ID NO: 733437 - RNA, 19 nt, Artificial Sequence
  Description of Artificial Sequence: Synthetic oligonucleotide
cccugcucuaggaggacgu

SEQ ID NO: 733438 - RNA, 19 nt, Artificial Sequence
  Description of Artificial Sequence: Synthetic oligonucleotide
ccgccggcacuccuucuuc

SEQ ID NO: 733439 - RNA, 19 nt, Artificial Sequence
  Description of Artificial Sequence: Synthetic oligonucleotide
cugacuccaaggcgaucuu

SEQ ID NO: 733440 - RNA, 19 nt, Artificial Sequence
  Description of Artificial Sequence: Synthetic oligonucleotide
gcuggcgguaagagcaagu

SEQ ID NO: 733441 - RNA, 19 nt, Artificial Sequence
  Description of Artificial Sequence: Synthetic oligonucleotide
gugccuucgccugccucgu

SEQ ID NO: 733442 - RNA, 19 nt, Artificial Sequence
  Description of Artificial Sequence: Synthetic oligonucleotide
caauggcggagggugcuuu

SEQ ID NO: 733443 - RNA, 19 nt, Artificial Sequence
  Description of Artificial Sequence: Synthetic oligonucleotide
ccugagcaguuaucagacu

SEQ ID NO: 733444 - RNA, 19 nt, Artificial Sequence
  Description of Artificial Sequence: Synthetic oligonucleotide
cccacgcucuucaggaaau

SEQ ID NO: 733445 - RNA, 19 nt, Artificial Sequence
  Description of Artificial Sequence: Synthetic oligonucleotide
ccucucgcacggcccagga

SEQ ID NO: 733446 - RNA, 19 nt, Artificial Sequence
  Description of Artificial Sequence: Synthetic oligonucleotide
gcacggcccaggacccgcc

SEQ ID NO: 733447 - RNA, 19 nt, Artificial Sequence
  Description of Artificial Sequence: Synthetic oligonucleotide
cgaugucguaauucuuggu

SEQ ID NO: 733448 - RNA, 19 nt, Artificial Sequence
  Description of Artificial Sequence: Synthetic oligonucleotide
guuccccgguggacccauc

SEQ ID NO: 733449 - RNA, 19 nt, Artificial Sequence
  Description of Artificial Sequence: Synthetic oligonucleotide
cgguggacccaucucccaa

SEQ ID NO: 733450 - RNA, 19 nt, Artificial Sequence
  Description of Artificial Sequence: Synthetic oligonucleotide
guggacggguccacuucuu

SEQ ID NO: 733451 - RNA, 19 nt, Artificial Sequence
  Description of Artificial Sequence: Synthetic oligonucleotide
gcccuacugaggcccugcu

SEQ ID NO: 733452 - RNA, 19 nt, Artificial Sequence
  Description of Artificial Sequence: Synthetic oligonucleotide
ccguugcaaccaucacaaa

SEQ ID NO: 733453 - RNA, 19 nt, Artificial Sequence
  Description of Artificial Sequence: Synthetic oligonucleotide
ccacccgacacagcagccu

SEQ ID NO: 733454 - RNA, 19 nt, Artificial Sequence
  Description of Artificial Sequence: Synthetic oligonucleotide
cgauggucccgccggcacu

SEQ ID NO: 733455 - RNA, 19 nt, Artificial Sequence
  Description of Artificial Sequence: Synthetic oligonucleotide
cucgggccgccuccuccuu

SEQ ID NO: 733456 - RNA, 19 nt, Artificial Sequence
  Description of Artificial Sequence: Synthetic oligonucleotide
cccgccggcacuccuucuu

SEQ ID NO: 733457 - RNA, 19 nt, Artificial Sequence
  Description of Artificial Sequence: Synthetic oligonucleotide
ccacgcucuucaggaaauu

SEQ ID NO: 733458 - RNA, 19 nt, Artificial Sequence
  Description of Artificial Sequence: Synthetic oligonucleotide
ccgccaccuuugacuuacu

SEQ ID NO: 733459 - RNA, 19 nt, Artificial Sequence
  Description of Artificial Sequence: Synthetic oligonucleotide
cugccucgucaggcuuguu

SEQ ID NO: 733460 - RNA, 19 nt, Artificial Sequence
  Description of Artificial Sequence: Synthetic oligonucleotide
aaauaauacggcuucugcc

SEQ ID NO: 733461 - RNA, 19 nt, Artificial Sequence
  Description of Artificial Sequence: Synthetic oligonucleotide
uuaaguucaagccagacca

SEQ ID NO: 733462 - RNA, 19 nt, Artificial Sequence
  Description of Artificial Sequence: Synthetic oligonucleotide
aaugcuuuccgacagauga

SEQ ID NO: 733463 - RNA, 19 nt, Artificial Sequence
  Description of Artificial Sequence: Synthetic oligonucleotide
augcuuaucacauuuaauc

SEQ ID NO: 733464 - RNA, 19 nt, Artificial Sequence
  Description of Artificial Sequence: Synthetic oligonucleotide
uuuaaagagcccaauauac

SEQ ID NO: 733465 - RNA, 19 nt, Artificial Sequence
  Description of Artificial Sequence: Synthetic oligonucleotide
acagaugaaaaccuguggc

SEQ ID NO: 733466 - RNA, 19 nt, Artificial Sequence
  Description of Artificial Sequence: Synthetic oligonucleotide
aauaauacggcuucugccu

SEQ ID NO: 733467 - RNA, 19 nt, Artificial Sequence
  Description of Artificial Sequence: Synthetic oligonucleotide
ugaguaaucccaaagagaa

SEQ ID NO: 733468 - RNA, 19 nt, Artificial Sequence
  Description of Artificial Sequence: Synthetic oligonucleotide
ucacauuuaauccaaugcc

SEQ ID NO: 733469 - RNA, 19 nt, Artificial Sequence
  Description of Artificial Sequence: Synthetic oligonucleotide
uuuuauaugcuuaucacau

SEQ ID NO: 733470 - RNA, 19 nt, Artificial Sequence
  Description of Artificial Sequence: Synthetic oligonucleotide
uuaacaaccuaauacauau

SEQ ID NO: 733471 - RNA, 19 nt, Artificial Sequence
  Description of Artificial Sequence: Synthetic oligonucleotide
uccggcucaaauaauacgg

SEQ ID NO: 733472 - RNA, 19 nt, Artificial Sequence
  Description of Artificial Sequence: Synthetic oligonucleotide
auaguaaaggaucugagaa

SEQ ID NO: 733473 - RNA, 19 nt, Artificial Sequence
  Description of Artificial Sequence: Synthetic oligonucleotide
uuuaaguucaagccagacc

SEQ ID NO: 733474 - RNA, 19 nt, Artificial Sequence
  Description of Artificial Sequence: Synthetic oligonucleotide
ucauauucaaccaauguuu

SEQ ID NO: 733475 - RNA, 19 nt, Artificial Sequence
  Description of Artificial Sequence: Synthetic oligonucleotide
uauaucauaaugccacccc

SEQ ID NO: 733476 - RNA, 19 nt, Artificial Sequence
  Description of Artificial Sequence: Synthetic oligonucleotide
ucaugcacaacggugaagg

SEQ ID NO: 733477 - RNA, 19 nt, Artificial Sequence
  Description of Artificial Sequence: Synthetic oligonucleotide
aguaaaggaucugagaauc

SEQ ID NO: 733478 - RNA, 19 nt, Artificial Sequence
  Description of Artificial Sequence: Synthetic oligonucleotide
aacggugaaggguagcuuc

SEQ ID NO: 733479 - RNA, 19 nt, Artificial Sequence
  Description of Artificial Sequence: Synthetic oligonucleotide
ucaacguuguauaucauaa

SEQ ID NO: 733480 - RNA, 19 nt, Artificial Sequence
  Description of Artificial Sequence: Synthetic oligonucleotide
ugcuuaucacauuuaaucc

SEQ ID NO: 733481 - RNA, 19 nt, Artificial Sequence
  Description of Artificial Sequence: Synthetic oligonucleotide
agucaugaggccuucacuc

SEQ ID NO: 733482 - RNA, 19 nt, Artificial Sequence
  Description of Artificial Sequence: Synthetic oligonucleotide
uaaagagcccaauauacac

SEQ ID NO: 733483 - RNA, 19 nt, Artificial Sequence
  Description of Artificial Sequence: Synthetic oligonucleotide
uacugaucugggaauaagg

SEQ ID NO: 733484 - RNA, 19 nt, Artificial Sequence
  Description of Artificial Sequence: Synthetic oligonucleotide
aaaccuguggcuccaagug

SEQ ID NO: 733485 - RNA, 19 nt, Artificial Sequence
  Description of Artificial Sequence: Synthetic oligonucleotide
aucagggaaauacaagagg

SEQ ID NO: 733486 - RNA, 19 nt, Artificial Sequence
  Description of Artificial Sequence: Synthetic oligonucleotide
auugccuagugacaaugcc

SEQ ID NO: 733487 - RNA, 19 nt, Artificial Sequence
  Description of Artificial Sequence: Synthetic oligonucleotide
guugaguaaacugaaagug

SEQ ID NO: 733488 - RNA, 19 nt, Artificial Sequence
  Description of Artificial Sequence: Synthetic oligonucleotide
gauguugagggcuucccgg

SEQ ID NO: 733489 - RNA, 19 nt, Artificial Sequence
  Description of Artificial Sequence: Synthetic oligonucleotide
cacauuuaauccaaugccc

SEQ ID NO: 733490 - RNA, 19 nt, Artificial Sequence
  Description of Artificial Sequence: Synthetic oligonucleotide
ucauaaugccaccccagcg

SEQ ID NO: 733491 - RNA, 19 nt, Artificial Sequence
  Description of Artificial Sequence: Synthetic oligonucleotide
uguucggagaucauguaca

SEQ ID NO: 733492 - RNA, 19 nt, Artificial Sequence
  Description of Artificial Sequence: Synthetic oligonucleotide
uauagauagcaaauuucug

SEQ ID NO: 733493 - RNA, 19 nt, Artificial Sequence
  Description of Artificial Sequence: Synthetic oligonucleotide
uuaaagagcccaauauaca

SEQ ID NO: 733494 - RNA, 19 nt, Artificial Sequence
  Description of Artificial Sequence: Synthetic oligonucleotide
guaacuggcaccgugagcc

SEQ ID NO: 733495 - RNA, 19 nt, Artificial Sequence
  Description of Artificial Sequence: Synthetic oligonucleotide
aacaucgcauaguaaagga

SEQ ID NO: 733496 - RNA, 19 nt, Artificial Sequence
  Description of Artificial Sequence: Synthetic oligonucleotide
agcuagaugaggcuggguc

SEQ ID NO: 733497 - RNA, 19 nt, Artificial Sequence
  Description of Artificial Sequence: Synthetic oligonucleotide
acguuguauaucauaaugc

SEQ ID NO: 733498 - RNA, 19 nt, Artificial Sequence
  Description of Artificial Sequence: Synthetic oligonucleotide
uuuccgacagaugaaaacc

SEQ ID NO: 733499 - RNA, 19 nt, Artificial Sequence
  Description of Artificial Sequence: Synthetic oligonucleotide
augacaggugcccaagggc

SEQ ID NO: 733500 - RNA, 19 nt, Artificial Sequence
  Description of Artificial Sequence: Synthetic oligonucleotide
auuuggauuaugcgacggc

SEQ ID NO: 733501 - RNA, 19 nt, Artificial Sequence
  Description of Artificial Sequence: Synthetic oligonucleotide
ugaaggguagcuucaacug

SEQ ID NO: 733502 - RNA, 19 nt, Artificial Sequence
  Description of Artificial Sequence: Synthetic oligonucleotide
gauauagauagcaaauuuc

SEQ ID NO: 733503 - RNA, 19 nt, Artificial Sequence
  Description of Artificial Sequence: Synthetic oligonucleotide
aaaguugagcacaggguac

SEQ ID NO: 733504 - RNA, 19 nt, Artificial Sequence
  Description of Artificial Sequence: Synthetic oligonucleotide
uaucauaaugccaccccag

SEQ ID NO: 733505 - RNA, 19 nt, Artificial Sequence
  Description of Artificial Sequence: Synthetic oligonucleotide
ugcacauaccgcuggacgg

SEQ ID NO: 733506 - RNA, 19 nt, Artificial Sequence
  Description of Artificial Sequence: Synthetic oligonucleotide
acgucauuaaugcuuuccg

SEQ ID NO: 733507 - RNA, 19 nt, Artificial Sequence
  Description of Artificial Sequence: Synthetic oligonucleotide
caaauaauacggcuucugc

SEQ ID NO: 733508 - RNA, 19 nt, Artificial Sequence
  Description of Artificial Sequence: Synthetic oligonucleotide
ucaagccagaccaucaaac

SEQ ID NO: 733509 - RNA, 19 nt, Artificial Sequence
  Description of Artificial Sequence: Synthetic oligonucleotide
aaaaccuguggcuccaagu

SEQ ID NO: 733510 - RNA, 19 nt, Artificial Sequence
  Description of Artificial Sequence: Synthetic oligonucleotide
ugcauggccaaguaguagc

SEQ ID NO: 733511 - RNA, 19 nt, Artificial Sequence
  Description of Artificial Sequence: Synthetic oligonucleotide
ucugggaauaaggcgaacg

SEQ ID NO: 733512 - RNA, 19 nt, Artificial Sequence
  Description of Artificial Sequence: Synthetic oligonucleotide
uguacauugccuagugaca

SEQ ID NO: 733513 - RNA, 19 nt, Artificial Sequence
  Description of Artificial Sequence: Synthetic oligonucleotide
cccuauauaccucagaugc

SEQ ID NO: 733514 - RNA, 19 nt, Artificial Sequence
  Description of Artificial Sequence: Synthetic oligonucleotide
aauguuuauuaacaaccua

SEQ ID NO: 733515 - RNA, 19 nt, Artificial Sequence
  Description of Artificial Sequence: Synthetic oligonucleotide
uucaacucauauucaacca

SEQ ID NO: 733516 - RNA, 19 nt, Artificial Sequence
  Description of Artificial Sequence: Synthetic oligonucleotide
auuuaauccaaugcccuuc

SEQ ID NO: 733517 - RNA, 19 nt, Artificial Sequence
  Description of Artificial Sequence: Synthetic oligonucleotide
agaucuugaccagagacag

SEQ ID NO: 733518 - RNA, 19 nt, Artificial Sequence
  Description of Artificial Sequence: Synthetic oligonucleotide
cauuaaugcuuuccgacag

SEQ ID NO: 733519 - RNA, 19 nt, Artificial Sequence
  Description of Artificial Sequence: Synthetic oligonucleotide
ugacaaugccuccuccucg

SEQ ID NO: 733520 - RNA, 19 nt, Artificial Sequence
  Description of Artificial Sequence: Synthetic oligonucleotide
ucuaccucugacaugccac

SEQ ID NO: 733521 - RNA, 19 nt, Artificial Sequence
  Description of Artificial Sequence: Synthetic oligonucleotide
caucgcauaguaaaggauc

SEQ ID NO: 733522 - RNA, 19 nt, Artificial Sequence
  Description of Artificial Sequence: Synthetic oligonucleotide
uuuggauuaugcgacggcc

SEQ ID NO: 733523 - RNA, 19 nt, Artificial Sequence
  Description of Artificial Sequence: Synthetic oligonucleotide
aacuguaacuggcaccgug

SEQ ID NO: 733524 - RNA, 19 nt, Artificial Sequence
  Description of Artificial Sequence: Synthetic oligonucleotide
uuugggaucaacguuguau

SEQ ID NO: 733525 - RNA, 19 nt, Artificial Sequence
  Description of Artificial Sequence: Synthetic oligonucleotide
gagcaaucgguccagcucc

SEQ ID NO: 733526 - RNA, 19 nt, Artificial Sequence
  Description of Artificial Sequence: Synthetic oligonucleotide
aaguaguagcuagaugagg

SEQ ID NO: 733527 - RNA, 19 nt, Artificial Sequence
  Description of Artificial Sequence: Synthetic oligonucleotide
ucuccgguaggccuucugg

SEQ ID NO: 733528 - RNA, 19 nt, Artificial Sequence
  Description of Artificial Sequence: Synthetic oligonucleotide
agaugaaaaccuguggcuc

SEQ ID NO: 733529 - RNA, 19 nt, Artificial Sequence
  Description of Artificial Sequence: Synthetic oligonucleotide
uauuuggauuaugcgacgg

SEQ ID NO: 733530 - RNA, 19 nt, Artificial Sequence
  Description of Artificial Sequence: Synthetic oligonucleotide
uuuaauccaaugcccuucu

SEQ ID NO: 733531 - RNA, 19 nt, Artificial Sequence
  Description of Artificial Sequence: Synthetic oligonucleotide
caaccaauguuuauuaaca

SEQ ID NO: 733532 - RNA, 19 nt, Artificial Sequence
  Description of Artificial Sequence: Synthetic oligonucleotide
aaucgguccagcucccaag

SEQ ID NO: 733533 - RNA, 19 nt, Artificial Sequence
  Description of Artificial Sequence: Synthetic oligonucleotide
auggccaaguaguagcuag

SEQ ID NO: 733534 - RNA, 19 nt, Artificial Sequence
  Description of Artificial Sequence: Synthetic oligonucleotide
agaagcuucaacugagcca

SEQ ID NO: 733535 - RNA, 19 nt, Artificial Sequence
  Description of Artificial Sequence: Synthetic oligonucleotide
agaagucuaccucugacau

SEQ ID NO: 733536 - RNA, 19 nt, Artificial Sequence
  Description of Artificial Sequence: Synthetic oligonucleotide
ugcacaacggugaagggua

SEQ ID NO: 733537 - RNA, 19 nt, Artificial Sequence
  Description of Artificial Sequence: Synthetic oligonucleotide
gagcccaauauacacaaca

SEQ ID NO: 733538 - RNA, 19 nt, Artificial Sequence
  Description of Artificial Sequence: Synthetic oligonucleotide
ucaaauaauacggcuucug

SEQ ID NO: 733539 - RNA, 19 nt, Artificial Sequence
  Description of Artificial Sequence: Synthetic oligonucleotide
aucggagcuccacuugucc

SEQ ID NO: 733540 - RNA, 19 nt, Artificial Sequence
  Description of Artificial Sequence: Synthetic oligonucleotide
ucccgaguaaacacaacug

SEQ ID NO: 733541 - RNA, 19 nt, Artificial Sequence
  Description of Artificial Sequence: Synthetic oligonucleotide
acacaacuguaacuggcac

SEQ ID NO: 733542 - RNA, 19 nt, Artificial Sequence
  Description of Artificial Sequence: Synthetic oligonucleotide
auaucauaaugccacccca

SEQ ID NO: 733543 - RNA, 19 nt, Artificial Sequence
  Description of Artificial Sequence: Synthetic oligonucleotide
auaauacggcuucugccuc

SEQ ID NO: 733544 - RNA, 19 nt, Artificial Sequence
  Description of Artificial Sequence: Synthetic oligonucleotide
cugggaauaaggcgaacgg

SEQ ID NO: 733545 - RNA, 19 nt, Artificial Sequence
  Description of Artificial Sequence: Synthetic oligonucleotide
aaccaauguuuauuaacaa

SEQ ID NO: 733546 - RNA, 19 nt, Artificial Sequence
  Description of Artificial Sequence: Synthetic oligonucleotide
ccaaguaguagcuagauga

SEQ ID NO: 733547 - RNA, 19 nt, Artificial Sequence
  Description of Artificial Sequence: Synthetic oligonucleotide
aacucuaggucgguagccg

SEQ ID NO: 733548 - RNA, 19 nt, Artificial Sequence
  Description of Artificial Sequence: Synthetic oligonucleotide
gauuaugcgacggccaaug

SEQ ID NO: 733549 - RNA, 19 nt, Artificial Sequence
  Description of Artificial Sequence: Synthetic oligonucleotide
aagggaggaguguucggag

SEQ ID NO: 733550 - RNA, 19 nt, Artificial Sequence
  Description of Artificial Sequence: Synthetic oligonucleotide
gaggcauuauagauuuugg

SEQ ID NO: 733551 - RNA, 19 nt, Artificial Sequence
  Description of Artificial Sequence: Synthetic oligonucleotide
uugccuagugacaaugccu

SEQ ID NO: 733552 - RNA, 19 nt, Artificial Sequence
  Description of Artificial Sequence: Synthetic oligonucleotide
auaugcuuaucacauuuaa

SEQ ID NO: 733553 - RNA, 19 nt, Artificial Sequence
  Description of Artificial Sequence: Synthetic oligonucleotide
caagccagaccaucaaacc

SEQ ID NO: 733554 - RNA, 19 nt, Artificial Sequence
  Description of Artificial Sequence: Synthetic oligonucleotide
caaguaguagcuagaugag

SEQ ID NO: 733555 - RNA, 19 nt, Artificial Sequence
  Description of Artificial Sequence: Synthetic oligonucleotide
aagaucuugaccagagaca

SEQ ID NO: 733556 - RNA, 19 nt, Artificial Sequence
  Description of Artificial Sequence: Synthetic oligonucleotide
uuaucggagcuccacuugu

SEQ ID NO: 733557 - RNA, 19 nt, Artificial Sequence
  Description of Artificial Sequence: Synthetic oligonucleotide
aggaucugagaauccacag

SEQ ID NO: 733558 - RNA, 19 nt, Artificial Sequence
  Description of Artificial Sequence: Synthetic oligonucleotide
cuauuuggauuaugcgacg

SEQ ID NO: 733559 - RNA, 19 nt, Artificial Sequence
  Description of Artificial Sequence: Synthetic oligonucleotide
gcugaguaaucccaaagag

SEQ ID NO: 733560 - RNA, 19 nt, Artificial Sequence
  Description of Artificial Sequence: Synthetic oligonucleotide
gagaggccuccucuuaucg

SEQ ID NO: 733561 - RNA, 19 nt, Artificial Sequence
  Description of Artificial Sequence: Synthetic oligonucleotide
uggcccaacacuccuagcu

SEQ ID NO: 733562 - RNA, 19 nt, Artificial Sequence
  Description of Artificial Sequence: Synthetic oligonucleotide
ucaaagacauggccugggc

SEQ ID NO: 733563 - RNA, 19 nt, Artificial Sequence
  Description of Artificial Sequence: Synthetic oligonucleotide
cacguccuggggaagaagg

SEQ ID NO: 733564 - RNA, 19 nt, Artificial Sequence
  Description of Artificial Sequence: Synthetic oligonucleotide
ggaucaacguuguauauca

SEQ ID NO: 733565 - RNA, 19 nt, Artificial Sequence
  Description of Artificial Sequence: Synthetic oligonucleotide
aacagcgcggcgcgcuugc

SEQ ID NO: 733566 - RNA, 19 nt, Artificial Sequence
  Description of Artificial Sequence: Synthetic oligonucleotide
cagucaaagacauggccug

SEQ ID NO: 733567 - RNA, 19 nt, Artificial Sequence
  Description of Artificial Sequence: Synthetic oligonucleotide
aaagagcccaauauacaca

SEQ ID NO: 733568 - RNA, 19 nt, Artificial Sequence
  Description of Artificial Sequence: Synthetic oligonucleotide
caacaucgcauaguaaagg

SEQ ID NO: 733569 - RNA, 19 nt, Artificial Sequence
  Description of Artificial Sequence: Synthetic oligonucleotide
uuccgacagaugaaaaccu

SEQ ID NO: 733570 - RNA, 19 nt, Artificial Sequence
  Description of Artificial Sequence: Synthetic oligonucleotide
aaugucccaguggacauca

SEQ ID NO: 733571 - RNA, 19 nt, Artificial Sequence
  Description of Artificial Sequence: Synthetic oligonucleotide
agcccuauauaccucagau

SEQ ID NO: 733572 - RNA, 19 nt, Artificial Sequence
  Description of Artificial Sequence: Synthetic oligonucleotide
uugggaucaacguuguaua

SEQ ID NO: 733573 - RNA, 19 nt, Artificial Sequence
  Description of Artificial Sequence: Synthetic oligonucleotide
agcgcuggaucccagccgg

SEQ ID NO: 733574 - RNA, 19 nt, Artificial Sequence
  Description of Artificial Sequence: Synthetic oligonucleotide
uccgacagaugaaaaccug

SEQ ID NO: 733575 - RNA, 19 nt, Artificial Sequence
  Description of Artificial Sequence: Synthetic oligonucleotide
aacucauauucaaccaaug

SEQ ID NO: 733576 - RNA, 19 nt, Artificial Sequence
  Description of Artificial Sequence: Synthetic oligonucleotide
aacacaacuguaacuggca

SEQ ID NO: 733577 - RNA, 19 nt, Artificial Sequence
  Description of Artificial Sequence: Synthetic oligonucleotide
agauuuugggaucaacguu

SEQ ID NO: 733578 - RNA, 19 nt, Artificial Sequence
  Description of Artificial Sequence: Synthetic oligonucleotide
ucuccggcucaaauaauac

SEQ ID NO: 733579 - RNA, 19 nt, Artificial Sequence
  Description of Artificial Sequence: Synthetic oligonucleotide
uggaaucgacacuugauuu

SEQ ID NO: 733580 - RNA, 19 nt, Artificial Sequence
  Description of Artificial Sequence: Synthetic oligonucleotide
gaucauguacacagucagg

SEQ ID NO: 733581 - RNA, 19 nt, Artificial Sequence
  Description of Artificial Sequence: Synthetic oligonucleotide
uauauaccucagaugccac

SEQ ID NO: 733582 - RNA, 19 nt, Artificial Sequence
  Description of Artificial Sequence: Synthetic oligonucleotide
cuccggcucaaauaauacg

SEQ ID NO: 733583 - RNA, 19 nt, Artificial Sequence
  Description of Artificial Sequence: Synthetic oligonucleotide
gaggcugggucaaagcggg

SEQ ID NO: 733584 - RNA, 19 nt, Artificial Sequence
  Description of Artificial Sequence: Synthetic oligonucleotide
cccaauguagcucaucacg

SEQ ID NO: 733585 - RNA, 19 nt, Artificial Sequence
  Description of Artificial Sequence: Synthetic oligonucleotide
uguaacuggcaccgugagc

SEQ ID NO: 733586 - RNA, 19 nt, Artificial Sequence
  Description of Artificial Sequence: Synthetic oligonucleotide
uauagauuuugggaucaac

SEQ ID NO: 733587 - RNA, 19 nt, Artificial Sequence
  Description of Artificial Sequence: Synthetic oligonucleotide
uuaugcgacggccaaugau

SEQ ID NO: 733588 - RNA, 19 nt, Artificial Sequence
  Description of Artificial Sequence: Synthetic oligonucleotide
aggacuugugaguuuccag

SEQ ID NO: 733589 - RNA, 19 nt, Artificial Sequence
  Description of Artificial Sequence: Synthetic oligonucleotide
agcccaauauacacaacac

SEQ ID NO: 733590 - RNA, 19 nt, Artificial Sequence
  Description of Artificial Sequence: Synthetic oligonucleotide
agugacaaugccuccuccu

SEQ ID NO: 733591 - RNA, 19 nt, Artificial Sequence
  Description of Artificial Sequence: Synthetic oligonucleotide
acauuuaauccaaugcccu

SEQ ID NO: 733592 - RNA, 19 nt, Artificial Sequence
  Description of Artificial Sequence: Synthetic oligonucleotide
gcuauuuggauuaugcgac

SEQ ID NO: 733593 - RNA, 19 nt, Artificial Sequence
  Description of Artificial Sequence: Synthetic oligonucleotide
aucaacguuguauaucaua

SEQ ID NO: 733594 - RNA, 19 nt, Artificial Sequence
  Description of Artificial Sequence: Synthetic oligonucleotide
aaccuguggcuccaaguga

SEQ ID NO: 733595 - RNA, 19 nt, Artificial Sequence
  Description of Artificial Sequence: Synthetic oligonucleotide
cuauauaccucagaugcca

SEQ ID NO: 733596 - RNA, 19 nt, Artificial Sequence
  Description of Artificial Sequence: Synthetic oligonucleotide
uucuccggcucaaauaaua

SEQ ID NO: 733597 - RNA, 19 nt, Artificial Sequence
  Description of Artificial Sequence: Synthetic oligonucleotide
ucugagagugacgucauua

SEQ ID NO: 733598 - RNA, 19 nt, Artificial Sequence
  Description of Artificial Sequence: Synthetic oligonucleotide
ugagaagcgguaugcugug

SEQ ID NO: 733599 - RNA, 19 nt, Artificial Sequence
  Description of Artificial Sequence: Synthetic oligonucleotide
cauugccuagugacaaugc

SEQ ID NO: 733600 - RNA, 19 nt, Artificial Sequence
  Description of Artificial Sequence: Synthetic oligonucleotide
gaaucgacacuugauuuuc

SEQ ID NO: 733601 - RNA, 19 nt, Artificial Sequence
  Description of Artificial Sequence: Synthetic oligonucleotide
agugacgucauuaaugcuu

SEQ ID NO: 733602 - RNA, 19 nt, Artificial Sequence
  Description of Artificial Sequence: Synthetic oligonucleotide
guaugcugugcugacaggc

SEQ ID NO: 733603 - RNA, 19 nt, Artificial Sequence
  Description of Artificial Sequence: Synthetic oligonucleotide
aaggguagcuucaacuggu

SEQ ID NO: 733604 - RNA, 19 nt, Artificial Sequence
  Description of Artificial Sequence: Synthetic oligonucleotide
uggauuaugcgacggccaa

SEQ ID NO: 733605 - RNA, 19 nt, Artificial Sequence
  Description of Artificial Sequence: Synthetic oligonucleotide
uguacacagucagggagcc

SEQ ID NO: 733606 - RNA, 19 nt, Artificial Sequence
  Description of Artificial Sequence: Synthetic oligonucleotide
aucaaaccucacuuuggug

SEQ ID NO: 733607 - RNA, 19 nt, Artificial Sequence
  Description of Artificial Sequence: Synthetic oligonucleotide
uauaccucagaugccacau

SEQ ID NO: 733608 - RNA, 19 nt, Artificial Sequence
  Description of Artificial Sequence: Synthetic oligonucleotide
aggcagaugacaggugccc

SEQ ID NO: 733609 - RNA, 19 nt, Artificial Sequence
  Description of Artificial Sequence: Synthetic oligonucleotide
uuuauaugcuuaucacauu

SEQ ID NO: 733610 - RNA, 19 nt, Artificial Sequence
  Description of Artificial Sequence: Synthetic oligonucleotide
agagaagcuucaacugagc

SEQ ID NO: 733611 - RNA, 19 nt, Artificial Sequence
  Description of Artificial Sequence: Synthetic oligonucleotide
guccaaagcucuccgguag

SEQ ID NO: 733612 - RNA, 19 nt, Artificial Sequence
  Description of Artificial Sequence: Synthetic oligonucleotide
aaguugagcacaggguaca

SEQ ID NO: 733613 - RNA, 19 nt, Artificial Sequence
  Description of Artificial Sequence: Synthetic oligonucleotide
ggguucacucccaacaucg

SEQ ID NO: 733614 - RNA, 19 nt, Artificial Sequence
  Description of Artificial Sequence: Synthetic oligonucleotide
auauucaaccaauguuuau

SEQ ID NO: 733615 - RNA, 19 nt, Artificial Sequence
  Description of Artificial Sequence: Synthetic oligonucleotide
agcgcggcgcgcuugcccc

SEQ ID NO: 733616 - RNA, 19 nt, Artificial Sequence
  Description of Artificial Sequence: Synthetic oligonucleotide
gauuucucgcucaugcaca

SEQ ID NO: 733617 - RNA, 19 nt, Artificial Sequence
  Description of Artificial Sequence: Synthetic oligonucleotide
uucaaccaauguuuauuaa

SEQ ID NO: 733618 - RNA, 19 nt, Artificial Sequence
  Description of Artificial Sequence: Synthetic oligonucleotide
uccguggucuuccaccaga

SEQ ID NO: 733619 - RNA, 19 nt, Artificial Sequence
  Description of Artificial Sequence: Synthetic oligonucleotide
ucuuaucggagcuccacuu

SEQ ID NO: 733620 - RNA, 19 nt, Artificial Sequence
  Description of Artificial Sequence: Synthetic oligonucleotide
gcuuaucacauuuaaucca

SEQ ID NO: 733621 - RNA, 19 nt, Artificial Sequence
  Description of Artificial Sequence: Synthetic oligonucleotide
cuuuaaguucaagccagac

SEQ ID NO: 733622 - RNA, 19 nt, Artificial Sequence
  Description of Artificial Sequence: Synthetic oligonucleotide
caagucaugaggccuucac

SEQ ID NO: 733623 - RNA, 19 nt, Artificial Sequence
  Description of Artificial Sequence: Synthetic oligonucleotide
uaggccuucuggaaucgac

SEQ ID NO: 733624 - RNA, 19 nt, Artificial Sequence
  Description of Artificial Sequence: Synthetic oligonucleotide
cuuaucggagcuccacuug

SEQ ID NO: 733625 - RNA, 19 nt, Artificial Sequence
  Description of Artificial Sequence: Synthetic oligonucleotide
caccucaacuuucacuggc

SEQ ID NO: 733626 - RNA, 19 nt, Artificial Sequence
  Description of Artificial Sequence: Synthetic oligonucleotide
gacaagaagucuaccucug

SEQ ID NO: 733627 - RNA, 19 nt, Artificial Sequence
  Description of Artificial Sequence: Synthetic oligonucleotide
ggauuucucgcucaugcac

SEQ ID NO: 733628 - RNA, 19 nt, Artificial Sequence
  Description of Artificial Sequence: Synthetic oligonucleotide
aggcaaaggccuuuaaguu

SEQ ID NO: 733629 - RNA, 19 nt, Artificial Sequence
  Description of Artificial Sequence: Synthetic oligonucleotide
guguucggagaucauguac

SEQ ID NO: 733630 - RNA, 19 nt, Artificial Sequence
  Description of Artificial Sequence: Synthetic oligonucleotide
ucagagggauuucucgcuc

SEQ ID NO: 733631 - RNA, 19 nt, Artificial Sequence
  Description of Artificial Sequence: Synthetic oligonucleotide
agggcauucaggaaaggcu

SEQ ID NO: 733632 - RNA, 19 nt, Artificial Sequence
  Description of Artificial Sequence: Synthetic oligonucleotide
caaaccucacuuugguguc

SEQ ID NO: 733633 - RNA, 19 nt, Artificial Sequence
  Description of Artificial Sequence: Synthetic oligonucleotide
guaaacugaaagugaucuc

SEQ ID NO: 733634 - RNA, 19 nt, Artificial Sequence
  Description of Artificial Sequence: Synthetic oligonucleotide
auacaagagguggaggagu

SEQ ID NO: 733635 - RNA, 19 nt, Artificial Sequence
  Description of Artificial Sequence: Synthetic oligonucleotide
aauuuguauuucagaggga

SEQ ID NO: 733636 - RNA, 19 nt, Artificial Sequence
  Description of Artificial Sequence: Synthetic oligonucleotide
acacuuuuauaugcuuauc

SEQ ID NO: 733637 - RNA, 19 nt, Artificial Sequence
  Description of Artificial Sequence: Synthetic oligonucleotide
ucagccuacugaucuggga

SEQ ID NO: 733638 - RNA, 19 nt, Artificial Sequence
  Description of Artificial Sequence: Synthetic oligonucleotide
gaggccuccucuuaucgga

SEQ ID NO: 733639 - RNA, 19 nt, Artificial Sequence
  Description of Artificial Sequence: Synthetic oligonucleotide
caauguagcucaucacguc

SEQ ID NO: 733640 - RNA, 19 nt, Artificial Sequence
  Description of Artificial Sequence: Synthetic oligonucleotide
aucgcauaguaaaggaucu

SEQ ID NO: 733641 - RNA, 19 nt, Artificial Sequence
  Description of Artificial Sequence: Synthetic oligonucleotide
gaaagaucuugaccagaga

SEQ ID NO: 733642 - RNA, 19 nt, Artificial Sequence
  Description of Artificial Sequence: Synthetic oligonucleotide
gcucaaauaauacggcuuc

SEQ ID NO: 733643 - RNA, 19 nt, Artificial Sequence
  Description of Artificial Sequence: Synthetic oligonucleotide
uuaucacauuuaauccaau

SEQ ID NO: 733644 - RNA, 19 nt, Artificial Sequence
  Description of Artificial Sequence: Synthetic oligonucleotide
guaaaggaucugagaaucc

SEQ ID NO: 733645 - RNA, 19 nt, Artificial Sequence
  Description of Artificial Sequence: Synthetic oligonucleotide
ggacuugugaguuuccaga

SEQ ID NO: 733646 - RNA, 19 nt, Artificial Sequence
  Description of Artificial Sequence: Synthetic oligonucleotide
guccggguugaguaaacug

SEQ ID NO: 733647 - RNA, 19 nt, Artificial Sequence
  Description of Artificial Sequence: Synthetic oligonucleotide
cagccacagcccuauauac

SEQ ID NO: 733648 - RNA, 19 nt, Artificial Sequence
  Description of Artificial Sequence: Synthetic oligonucleotide
gaguaaucccaaagagaag

SEQ ID NO: 733649 - RNA, 19 nt, Artificial Sequence
  Description of Artificial Sequence: Synthetic oligonucleotide
caugcacaacggugaaggg

SEQ ID NO: 733650 - RNA, 19 nt, Artificial Sequence
  Description of Artificial Sequence: Synthetic oligonucleotide
agcggcacgucccagcaga

SEQ ID NO: 733651 - RNA, 19 nt, Artificial Sequence
  Description of Artificial Sequence: Synthetic oligonucleotide
ugacaggcuggaaggacaa

SEQ ID NO: 733652 - RNA, 19 nt, Artificial Sequence
  Description of Artificial Sequence: Synthetic oligonucleotide
uuuccaggacuugugaguu

SEQ ID NO: 733653 - RNA, 19 nt, Artificial Sequence
  Description of Artificial Sequence: Synthetic oligonucleotide
uguauuucagagggauuuc

SEQ ID NO: 733654 - RNA, 19 nt, Artificial Sequence
  Description of Artificial Sequence: Synthetic oligonucleotide
acaacggugaaggguagcu

SEQ ID NO: 733655 - RNA, 19 nt, Artificial Sequence
  Description of Artificial Sequence: Synthetic oligonucleotide
acuccuagcuuggccagac

SEQ ID NO: 733656 - RNA, 19 nt, Artificial Sequence
  Description of Artificial Sequence: Synthetic oligonucleotide
gaagggaggaguguucgga

SEQ ID NO: 733657 - RNA, 19 nt, Artificial Sequence
  Description of Artificial Sequence: Synthetic oligonucleotide
gaaaggcugcacauaccgc

SEQ ID NO: 733658 - RNA, 19 nt, Artificial Sequence
  Description of Artificial Sequence: Synthetic oligonucleotide
uccuccucgugguccaaag

SEQ ID NO: 733659 - RNA, 19 nt, Artificial Sequence
  Description of Artificial Sequence: Synthetic oligonucleotide
cagcucccaagucaugagg

SEQ ID NO: 733660 - RNA, 19 nt, Artificial Sequence
  Description of Artificial Sequence: Synthetic oligonucleotide
acagagucccgaguaaaca

SEQ ID NO: 733661 - RNA, 19 nt, Artificial Sequence
  Description of Artificial Sequence: Synthetic oligonucleotide
aggaaaggcugcacauacc

SEQ ID NO: 733662 - RNA, 19 nt, Artificial Sequence
  Description of Artificial Sequence: Synthetic oligonucleotide
aagaacagcgcggcgcgcu

SEQ ID NO: 733663 - RNA, 19 nt, Artificial Sequence
  Description of Artificial Sequence: Synthetic oligonucleotide
uaaguucaagccagaccau

SEQ ID NO: 733664 - RNA, 19 nt, Artificial Sequence
  Description of Artificial Sequence: Synthetic oligonucleotide
cauucagccuacugaucug

SEQ ID NO: 733665 - RNA, 19 nt, Artificial Sequence
  Description of Artificial Sequence: Synthetic oligonucleotide
cuagcuuggccagacaaga

SEQ ID NO: 733666 - RNA, 19 nt, Artificial Sequence
  Description of Artificial Sequence: Synthetic oligonucleotide
cuccucuuaucggagcucc

SEQ ID NO: 733667 - RNA, 19 nt, Artificial Sequence
  Description of Artificial Sequence: Synthetic oligonucleotide
uggccaaguaguagcuaga

SEQ ID NO: 733668 - RNA, 19 nt, Artificial Sequence
  Description of Artificial Sequence: Synthetic oligonucleotide
acacuccuagcuuggccag

SEQ ID NO: 733669 - RNA, 19 nt, Artificial Sequence
  Description of Artificial Sequence: Synthetic oligonucleotide
ccaagcuggacuugagagg

SEQ ID NO: 733670 - RNA, 19 nt, Artificial Sequence
  Description of Artificial Sequence: Synthetic oligonucleotide
gugacaaugccuccuccuc

SEQ ID NO: 733671 - RNA, 19 nt, Artificial Sequence
  Description of Artificial Sequence: Synthetic oligonucleotide
augcacaacggugaagggu

SEQ ID NO: 733672 - RNA, 19 nt, Artificial Sequence
  Description of Artificial Sequence: Synthetic oligonucleotide
gugucuuggcccaacacuc

SEQ ID NO: 733673 - RNA, 19 nt, Artificial Sequence
  Description of Artificial Sequence: Synthetic oligonucleotide
auuucucgcucaugcacaa

SEQ ID NO: 733674 - RNA, 19 nt, Artificial Sequence
  Description of Artificial Sequence: Synthetic oligonucleotide
cugugcauggccaaguagu

SEQ ID NO: 733675 - RNA, 19 nt, Artificial Sequence
  Description of Artificial Sequence: Synthetic oligonucleotide
caacucuaggucgguagcc

SEQ ID NO: 733676 - RNA, 19 nt, Artificial Sequence
  Description of Artificial Sequence: Synthetic oligonucleotide
uaacaaccuaauacauauu

SEQ ID NO: 733677 - RNA, 19 nt, Artificial Sequence
  Description of Artificial Sequence: Synthetic oligonucleotide
cauaccgcuggacggcccc

SEQ ID NO: 733678 - RNA, 19 nt, Artificial Sequence
  Description of Artificial Sequence: Synthetic oligonucleotide
caaugcccuucugagagug

SEQ ID NO: 733679 - RNA, 19 nt, Artificial Sequence
  Description of Artificial Sequence: Synthetic oligonucleotide
guagcuagaugaggcuggg

SEQ ID NO: 733680 - RNA, 19 nt, Artificial Sequence
  Description of Artificial Sequence: Synthetic oligonucleotide
auccaaugcccuucugaga

SEQ ID NO: 733681 - RNA, 19 nt, Artificial Sequence
  Description of Artificial Sequence: Synthetic oligonucleotide
ugggaucaacguuguauau

SEQ ID NO: 733682 - RNA, 19 nt, Artificial Sequence
  Description of Artificial Sequence: Synthetic oligonucleotide
accgagcccagagcaaucg

SEQ ID NO: 733683 - RNA, 19 nt, Artificial Sequence
  Description of Artificial Sequence: Synthetic oligonucleotide
acuggagccccauccuugu

SEQ ID NO: 733684 - RNA, 19 nt, Artificial Sequence
  Description of Artificial Sequence: Synthetic oligonucleotide
uaucggagcuccacuuguc

SEQ ID NO: 733685 - RNA, 19 nt, Artificial Sequence
  Description of Artificial Sequence: Synthetic oligonucleotide
agcuucaacuggucgucca

SEQ ID NO: 733686 - RNA, 19 nt, Artificial Sequence
  Description of Artificial Sequence: Synthetic oligonucleotide
ccuauauaccucagaugcc

SEQ ID NO: 733687 - RNA, 19 nt, Artificial Sequence
  Description of Artificial Sequence: Synthetic oligonucleotide
auuaugcgacggccaauga

SEQ ID NO: 733688 - RNA, 19 nt, Artificial Sequence
  Description of Artificial Sequence: Synthetic oligonucleotide
guagcuucaacuggucguc

SEQ ID NO: 733689 - RNA, 19 nt, Artificial Sequence
  Description of Artificial Sequence: Synthetic oligonucleotide
guagcucaucacguccugg

SEQ ID NO: 733690 - RNA, 19 nt, Artificial Sequence
  Description of Artificial Sequence: Synthetic oligonucleotide
cugccucauguacauugcc

SEQ ID NO: 733691 - RNA, 19 nt, Artificial Sequence
  Description of Artificial Sequence: Synthetic oligonucleotide
gucccgaguaaacacaacu

SEQ ID NO: 733692 - RNA, 19 nt, Artificial Sequence
  Description of Artificial Sequence: Synthetic oligonucleotide
aaucgacacuugauuuuca

SEQ ID NO: 733693 - RNA, 19 nt, Artificial Sequence
  Description of Artificial Sequence: Synthetic oligonucleotide
gaguguucggagaucaugu

SEQ ID NO: 733694 - RNA, 19 nt, Artificial Sequence
  Description of Artificial Sequence: Synthetic oligonucleotide
cacagcccuauauaccuca

SEQ ID NO: 733695 - RNA, 19 nt, Artificial Sequence
  Description of Artificial Sequence: Synthetic oligonucleotide
aaaccucacuuuggugucu

SEQ ID NO: 733696 - RNA, 19 nt, Artificial Sequence
  Description of Artificial Sequence: Synthetic oligonucleotide
agucuaccuucucaggcuu

SEQ ID NO: 733697 - RNA, 19 nt, Artificial Sequence
  Description of Artificial Sequence: Synthetic oligonucleotide
ucaggaaaggcugcacaua

SEQ ID NO: 733698 - RNA, 19 nt, Artificial Sequence
  Description of Artificial Sequence: Synthetic oligonucleotide
ucgcauaguaaaggaucug

SEQ ID NO: 733699 - RNA, 19 nt, Artificial Sequence
  Description of Artificial Sequence: Synthetic oligonucleotide
agccuacugaucugggaau

SEQ ID NO: 733700 - RNA, 19 nt, Artificial Sequence
  Description of Artificial Sequence: Synthetic oligonucleotide
cucuuugguccugaaagca

SEQ ID NO: 733701 - RNA, 19 nt, Artificial Sequence
  Description of Artificial Sequence: Synthetic oligonucleotide
gacuugagaggccuccucu

SEQ ID NO: 733702 - RNA, 19 nt, Artificial Sequence
  Description of Artificial Sequence: Synthetic oligonucleotide
ggcccaauguagcucauca

SEQ ID NO: 733703 - RNA, 19 nt, Artificial Sequence
  Description of Artificial Sequence: Synthetic oligonucleotide
ggaguguucggagaucaug

SEQ ID NO: 733704 - RNA, 19 nt, Artificial Sequence
  Description of Artificial Sequence: Synthetic oligonucleotide
aauacggcuucugccucau

SEQ ID NO: 733705 - RNA, 19 nt, Artificial Sequence
  Description of Artificial Sequence: Synthetic oligonucleotide
agcggggacuguggaaggc

SEQ ID NO: 733706 - RNA, 19 nt, Artificial Sequence
  Description of Artificial Sequence: Synthetic oligonucleotide
acucccaacaucgcauagu

SEQ ID NO: 733707 - RNA, 19 nt, Artificial Sequence
  Description of Artificial Sequence: Synthetic oligonucleotide
cagccuacugaucugggaa

SEQ ID NO: 733708 - RNA, 19 nt, Artificial Sequence
  Description of Artificial Sequence: Synthetic oligonucleotide
uagcuuggccagacaagaa

SEQ ID NO: 733709 - RNA, 19 nt, Artificial Sequence
  Description of Artificial Sequence: Synthetic oligonucleotide
aguguucggagaucaugua

SEQ ID NO: 733710 - RNA, 19 nt, Artificial Sequence
  Description of Artificial Sequence: Synthetic oligonucleotide
ugcagggcauucagccuac

SEQ ID NO: 733711 - RNA, 19 nt, Artificial Sequence
  Description of Artificial Sequence: Synthetic oligonucleotide
ucaugggacuugggguccg

SEQ ID NO: 733712 - RNA, 19 nt, Artificial Sequence
  Description of Artificial Sequence: Synthetic oligonucleotide
acgcucagaagaugucaca

SEQ ID NO: 733713 - RNA, 19 nt, Artificial Sequence
  Description of Artificial Sequence: Synthetic oligonucleotide
ugaccgagcccagagcaau

SEQ ID NO: 733714 - RNA, 19 nt, Artificial Sequence
  Description of Artificial Sequence: Synthetic oligonucleotide
gcauucagccuacugaucu

SEQ ID NO: 733715 - RNA, 19 nt, Artificial Sequence
  Description of Artificial Sequence: Synthetic oligonucleotide
gacaaugccuccuccucgu

SEQ ID NO: 733716 - RNA, 19 nt, Artificial Sequence
  Description of Artificial Sequence: Synthetic oligonucleotide
ccggaccaacucuaggucg

SEQ ID NO: 733717 - RNA, 19 nt, Artificial Sequence
  Description of Artificial Sequence: Synthetic oligonucleotide
ucccaacaucgcauaguaa

SEQ ID NO: 733718 - RNA, 19 nt, Artificial Sequence
  Description of Artificial Sequence: Synthetic oligonucleotide
gcgacggccaaugauguug

SEQ ID NO: 733719 - RNA, 19 nt, Artificial Sequence
  Description of Artificial Sequence: Synthetic oligonucleotide
uccucuuaucggagcucca

SEQ ID NO: 733720 - RNA, 19 nt, Artificial Sequence
  Description of Artificial Sequence: Synthetic oligonucleotide
caucaaaccucacuuuggu

SEQ ID NO: 733721 - RNA, 19 nt, Artificial Sequence
  Description of Artificial Sequence: Synthetic oligonucleotide
cacucccaacaucgcauag

SEQ ID NO: 733722 - RNA, 19 nt, Artificial Sequence
  Description of Artificial Sequence: Synthetic oligonucleotide
cagcacugagggcauucag

SEQ ID NO: 733723 - RNA, 19 nt, Artificial Sequence
  Description of Artificial Sequence: Synthetic oligonucleotide
cacugaccgagcccagagc

SEQ ID NO: 733724 - RNA, 19 nt, Artificial Sequence
  Description of Artificial Sequence: Synthetic oligonucleotide
gcccuauauaccucagaug

SEQ ID NO: 733725 - RNA, 19 nt, Artificial Sequence
  Description of Artificial Sequence: Synthetic oligonucleotide
aggcauuuuggaggcaccu

SEQ ID NO: 733726 - RNA, 19 nt, Artificial Sequence
  Description of Artificial Sequence: Synthetic oligonucleotide
ccaacucuaggucgguagc

SEQ ID NO: 733727 - RNA, 19 nt, Artificial Sequence
  Description of Artificial Sequence: Synthetic oligonucleotide
ccggcucaaauaauacggc

SEQ ID NO: 733728 - RNA, 19 nt, Artificial Sequence
  Description of Artificial Sequence: Synthetic oligonucleotide
acaaugccuccuccucgug

SEQ ID NO: 733729 - RNA, 19 nt, Artificial Sequence
  Description of Artificial Sequence: Synthetic oligonucleotide
uugccccggaccaacucua

SEQ ID NO: 733730 - RNA, 19 nt, Artificial Sequence
  Description of Artificial Sequence: Synthetic oligonucleotide
ucaucacguccuggggaag

SEQ ID NO: 733731 - RNA, 19 nt, Artificial Sequence
  Description of Artificial Sequence: Synthetic oligonucleotide
gaucugggaauaaggcgaa

SEQ ID NO: 733732 - RNA, 19 nt, Artificial Sequence
  Description of Artificial Sequence: Synthetic oligonucleotide
uuggcccaacacuccuagc

SEQ ID NO: 733733 - RNA, 19 nt, Artificial Sequence
  Description of Artificial Sequence: Synthetic oligonucleotide
accagagcggcacguccca

SEQ ID NO: 733734 - RNA, 19 nt, Artificial Sequence
  Description of Artificial Sequence: Synthetic oligonucleotide
acauaccgcuggacggccc

SEQ ID NO: 733735 - RNA, 19 nt, Artificial Sequence
  Description of Artificial Sequence: Synthetic oligonucleotide
ccaagugagaagcgguaug

SEQ ID NO: 733736 - RNA, 19 nt, Artificial Sequence
  Description of Artificial Sequence: Synthetic oligonucleotide
aggguagcuucaacugguc

SEQ ID NO: 733737 - RNA, 19 nt, Artificial Sequence
  Description of Artificial Sequence: Synthetic oligonucleotide
cucaggcccaauguagcuc

SEQ ID NO: 733738 - RNA, 19 nt, Artificial Sequence
  Description of Artificial Sequence: Synthetic oligonucleotide
gagggauuucucgcucaug

SEQ ID NO: 733739 - RNA, 19 nt, Artificial Sequence
  Description of Artificial Sequence: Synthetic oligonucleotide
gggaucaacguuguauauc

SEQ ID NO: 733740 - RNA, 19 nt, Artificial Sequence
  Description of Artificial Sequence: Synthetic oligonucleotide
cacauaccgcuggacggcc

SEQ ID NO: 733741 - RNA, 19 nt, Artificial Sequence
  Description of Artificial Sequence: Synthetic oligonucleotide
gcccaacacuccuagcuug

SEQ ID NO: 733742 - RNA, 19 nt, Artificial Sequence
  Description of Artificial Sequence: Synthetic oligonucleotide
gcacgucccagcagaaugg

SEQ ID NO: 733743 - RNA, 19 nt, Artificial Sequence
  Description of Artificial Sequence: Synthetic oligonucleotide
ccucagaugccacaucauc

SEQ ID NO: 733744 - RNA, 19 nt, Artificial Sequence
  Description of Artificial Sequence: Synthetic oligonucleotide
aucugagaauccacagaga

SEQ ID NO: 733745 - RNA, 19 nt, Artificial Sequence
  Description of Artificial Sequence: Synthetic oligonucleotide
cgacagaugaaaaccugug

SEQ ID NO: 733746 - RNA, 19 nt, Artificial Sequence
  Description of Artificial Sequence: Synthetic oligonucleotide
cuccgguaggccuucugga

SEQ ID NO: 733747 - RNA, 19 nt, Artificial Sequence
  Description of Artificial Sequence: Synthetic oligonucleotide
cgaagaacagcgcggcgcg

SEQ ID NO: 733748 - RNA, 19 nt, Artificial Sequence
  Description of Artificial Sequence: Synthetic oligonucleotide
cacgucccagcagaauggc

SEQ ID NO: 733749 - RNA, 19 nt, Artificial Sequence
  Description of Artificial Sequence: Synthetic oligonucleotide
gguaggccuucuggaaucg

SEQ ID NO: 733750 - RNA, 19 nt, Artificial Sequence
  Description of Artificial Sequence: Synthetic oligonucleotide
gagaagcgguaugcugugc

SEQ ID NO: 733751 - RNA, 19 nt, Artificial Sequence
  Description of Artificial Sequence: Synthetic oligonucleotide
cgaguaaacacaacuguaa

SEQ ID NO: 733752 - RNA, 19 nt, Artificial Sequence
  Description of Artificial Sequence: Synthetic oligonucleotide
cgguaugcugugcugacag

SEQ ID NO: 733753 - RNA, 19 nt, Artificial Sequence
  Description of Artificial Sequence: Synthetic oligonucleotide
ugggguccggguugaguaa

SEQ ID NO: 733754 - RNA, 19 nt, Artificial Sequence
  Description of Artificial Sequence: Synthetic oligonucleotide
aagcuucaacugagccagg

SEQ ID NO: 733755 - RNA, 19 nt, Artificial Sequence
  Description of Artificial Sequence: Synthetic oligonucleotide
ccagcggggacuguggaag

SEQ ID NO: 733756 - RNA, 19 nt, Artificial Sequence
  Description of Artificial Sequence: Synthetic oligonucleotide
ccuggggcugaguaauccc

SEQ ID NO: 733757 - RNA, 19 nt, Artificial Sequence
  Description of Artificial Sequence: Synthetic oligonucleotide
ugacgucauuaaugcuuuc

SEQ ID NO: 733758 - RNA, 19 nt, Artificial Sequence
  Description of Artificial Sequence: Synthetic oligonucleotide
gacaggcuggaaggacaag

SEQ ID NO: 733759 - RNA, 19 nt, Artificial Sequence
  Description of Artificial Sequence: Synthetic oligonucleotide
cucgugguccaaagcucuc

SEQ ID NO: 733760 - RNA, 19 nt, Artificial Sequence
  Description of Artificial Sequence: Synthetic oligonucleotide
acagcccuauauaccucag

SEQ ID NO: 733761 - RNA, 19 nt, Artificial Sequence
  Description of Artificial Sequence: Synthetic oligonucleotide
cagucuaccuucucaggcu

SEQ ID NO: 733762 - RNA, 19 nt, Artificial Sequence
  Description of Artificial Sequence: Synthetic oligonucleotide
cuccaagugagaagcggua

SEQ ID NO: 733763 - RNA, 19 nt, Artificial Sequence
  Description of Artificial Sequence: Synthetic oligonucleotide
acggugaaggguagcuuca

SEQ ID NO: 733764 - RNA, 19 nt, Artificial Sequence
  Description of Artificial Sequence: Synthetic oligonucleotide
gccaccgcggcgaagaaca

SEQ ID NO: 733765 - RNA, 19 nt, Artificial Sequence
  Description of Artificial Sequence: Synthetic oligonucleotide
gccucauguacauugccua

SEQ ID NO: 733766 - RNA, 19 nt, Artificial Sequence
  Description of Artificial Sequence: Synthetic oligonucleotide
aggcccaauguagcucauc

SEQ ID NO: 733767 - RNA, 19 nt, Artificial Sequence
  Description of Artificial Sequence: Synthetic oligonucleotide
gcgaacggggcccgguagg

SEQ ID NO: 733768 - RNA, 19 nt, Artificial Sequence
  Description of Artificial Sequence: Synthetic oligonucleotide
uaaggcgaacggggcccgg

SEQ ID NO: 733769 - RNA, 19 nt, Artificial Sequence
  Description of Artificial Sequence: Synthetic oligonucleotide
gaucccagccgggacucca

SEQ ID NO: 733770 - RNA, 19 nt, Artificial Sequence
  Description of Artificial Sequence: Synthetic oligonucleotide
gagugacgucauuaaugcu

SEQ ID NO: 733771 - RNA, 19 nt, Artificial Sequence
  Description of Artificial Sequence: Synthetic oligonucleotide
ugaaaaccuguggcuccaa

SEQ ID NO: 733772 - RNA, 19 nt, Artificial Sequence
  Description of Artificial Sequence: Synthetic oligonucleotide
ggaaucgacacuugauuuu

SEQ ID NO: 733773 - RNA, 19 nt, Artificial Sequence
  Description of Artificial Sequence: Synthetic oligonucleotide
caaugucccaguggacauc

SEQ ID NO: 733774 - RNA, 19 nt, Artificial Sequence
  Description of Artificial Sequence: Synthetic oligonucleotide
ccacugaccgagcccagag

SEQ ID NO: 733775 - RNA, 19 nt, Artificial Sequence
  Description of Artificial Sequence: Synthetic oligonucleotide
gcacauaccgcuggacggc

SEQ ID NO: 733776 - RNA, 19 nt, Artificial Sequence
  Description of Artificial Sequence: Synthetic oligonucleotide
cgcggcgaagaacagcgcg

SEQ ID NO: 733777 - RNA, 19 nt, Artificial Sequence
  Description of Artificial Sequence: Synthetic oligonucleotide
cucuuaucggagcuccacu

SEQ ID NO: 733778 - RNA, 19 nt, Artificial Sequence
  Description of Artificial Sequence: Synthetic oligonucleotide
agcucuccgguaggccuuc

SEQ ID NO: 733779 - RNA, 19 nt, Artificial Sequence
  Description of Artificial Sequence: Synthetic oligonucleotide
ccguacaacagcuguccuc

SEQ ID NO: 733780 - RNA, 19 nt, Artificial Sequence
  Description of Artificial Sequence: Synthetic oligonucleotide
gaacagcgcggcgcgcuug

SEQ ID NO: 733781 - RNA, 19 nt, Artificial Sequence
  Description of Artificial Sequence: Synthetic oligonucleotide
ggcgaacggggcccgguag

SEQ ID NO: 733782 - RNA, 19 nt, Artificial Sequence
  Description of Artificial Sequence: Synthetic oligonucleotide
aagcucuccgguaggccuu

SEQ ID NO: 733783 - RNA, 19 nt, Artificial Sequence
  Description of Artificial Sequence: Synthetic oligonucleotide
caaucgguccagcucccaa

SEQ ID NO: 733784 - RNA, 19 nt, Artificial Sequence
  Description of Artificial Sequence: Synthetic oligonucleotide
ggcccgguaggucuccgug

SEQ ID NO: 733785 - RNA, 19 nt, Artificial Sequence
  Description of Artificial Sequence: Synthetic oligonucleotide
ccgaguaaacacaacugua

SEQ ID NO: 733786 - RNA, 19 nt, Artificial Sequence
  Description of Artificial Sequence: Synthetic oligonucleotide
caucacguccuggggaaga

SEQ ID NO: 733787 - RNA, 19 nt, Artificial Sequence
  Description of Artificial Sequence: Synthetic oligonucleotide
uagcuagaugaggcugggu

SEQ ID NO: 733788 - RNA, 19 nt, Artificial Sequence
  Description of Artificial Sequence: Synthetic oligonucleotide
agaacagcgcggcgcgcuu

SEQ ID NO: 733789 - RNA, 19 nt, Artificial Sequence
  Description of Artificial Sequence: Synthetic oligonucleotide
cagcgcggcgcgcuugccc

SEQ ID NO: 733790 - RNA, 19 nt, Artificial Sequence
  Description of Artificial Sequence: Synthetic oligonucleotide
gccuagugacaaugccucc

SEQ ID NO: 733791 - RNA, 19 nt, Artificial Sequence
  Description of Artificial Sequence: Synthetic oligonucleotide
ggccagacaagaagucuac

SEQ ID NO: 733792 - RNA, 19 nt, Artificial Sequence
  Description of Artificial Sequence: Synthetic oligonucleotide
ggacuugagaggccuccuc

SEQ ID NO: 733793 - RNA, 19 nt, Artificial Sequence
  Description of Artificial Sequence: Synthetic oligonucleotide
gcccaauguagcucaucac

SEQ ID NO: 733794 - RNA, 19 nt, Artificial Sequence
  Description of Artificial Sequence: Synthetic oligonucleotide
gguccaaagcucuccggua

SEQ ID NO: 733795 - RNA, 19 nt, Artificial Sequence
  Description of Artificial Sequence: Synthetic oligonucleotide
aguggacaucaugggacuu

SEQ ID NO: 733796 - RNA, 19 nt, Artificial Sequence
  Description of Artificial Sequence: Synthetic oligonucleotide
cagcccuauauaccucaga

SEQ ID NO: 733797 - RNA, 19 nt, Artificial Sequence
  Description of Artificial Sequence: Synthetic oligonucleotide
gugacgucauuaaugcuuu

SEQ ID NO: 733798 - RNA, 19 nt, Artificial Sequence
  Description of Artificial Sequence: Synthetic oligonucleotide
ccucuuaucggagcuccac

SEQ ID NO: 733799 - RNA, 19 nt, Artificial Sequence
  Description of Artificial Sequence: Synthetic oligonucleotide
guacaacagcuguccucuc

SEQ ID NO: 733800 - RNA, 19 nt, Artificial Sequence
  Description of Artificial Sequence: Synthetic oligonucleotide
ugcgacggccaaugauguu

SEQ ID NO: 733801 - RNA, 19 nt, Artificial Sequence
  Description of Artificial Sequence: Synthetic oligonucleotide
gccagacaagaagucuacc

SEQ ID NO: 733802 - RNA, 19 nt, Artificial Sequence
  Description of Artificial Sequence: Synthetic oligonucleotide
agacaggcaaaggccuuua

SEQ ID NO: 733803 - RNA, 19 nt, Artificial Sequence
  Description of Artificial Sequence: Synthetic oligonucleotide
gccccggaccaacucuagg

SEQ ID NO: 733804 - RNA, 19 nt, Artificial Sequence
  Description of Artificial Sequence: Synthetic oligonucleotide
caccccagcggggacugug

SEQ ID NO: 733805 - RNA, 19 nt, Artificial Sequence
  Description of Artificial Sequence: Synthetic oligonucleotide
accucagaugccacaucau

SEQ ID NO: 733806 - RNA, 19 nt, Artificial Sequence
  Description of Artificial Sequence: Synthetic oligonucleotide
gaccgagcccagagcaauc

SEQ ID NO: 733807 - RNA, 19 nt, Artificial Sequence
  Description of Artificial Sequence: Synthetic oligonucleotide
ggcacagagucccgaguaa

SEQ ID NO: 733808 - RNA, 19 nt, Artificial Sequence
  Description of Artificial Sequence: Synthetic oligonucleotide
cccggaccaacucuagguc

SEQ ID NO: 733809 - RNA, 19 nt, Artificial Sequence
  Description of Artificial Sequence: Synthetic oligonucleotide
cccgaguaaacacaacugu

SEQ ID NO: 733810 - RNA, 19 nt, Artificial Sequence
  Description of Artificial Sequence: Synthetic oligonucleotide
ggcgcgcuugccccggacc

SEQ ID NO: 733811 - RNA, 19 nt, Artificial Sequence
  Description of Artificial Sequence: Synthetic oligonucleotide
cccaguggacaucauggga

SEQ ID NO: 733812 - RNA, 19 nt, Artificial Sequence
  Description of Artificial Sequence: Synthetic oligonucleotide
auccucagucaaagacaug

SEQ ID NO: 733813 - RNA, 19 nt, Artificial Sequence
  Description of Artificial Sequence: Synthetic oligonucleotide
ccuccucgugguccaaagc

SEQ ID NO: 733814 - RNA, 19 nt, Artificial Sequence
  Description of Artificial Sequence: Synthetic oligonucleotide
ccgagcccagagcaaucgg

SEQ ID NO: 733815 - RNA, 19 nt, Artificial Sequence
  Description of Artificial Sequence: Synthetic oligonucleotide
aggcgaacggggcccggua

SEQ ID NO: 733816 - RNA, 19 nt, Artificial Sequence
  Description of Artificial Sequence: Synthetic oligonucleotide
ccgacagaugaaaaccugu

SEQ ID NO: 733817 - RNA, 19 nt, Artificial Sequence
  Description of Artificial Sequence: Synthetic oligonucleotide
gaucaacguuguauaucau

SEQ ID NO: 733818 - RNA, 19 nt, Artificial Sequence
  Description of Artificial Sequence: Synthetic oligonucleotide
ggcuucccggugcauuauc

SEQ ID NO: 733819 - RNA, 19 nt, Artificial Sequence
  Description of Artificial Sequence: Synthetic oligonucleotide
gcuuuccgacagaugaaaa

SEQ ID NO: 733820 - RNA, 19 nt, Artificial Sequence
  Description of Artificial Sequence: Synthetic oligonucleotide
acggggcccgguaggucuc

SEQ ID NO: 733821 - RNA, 19 nt, Artificial Sequence
  Description of Artificial Sequence: Synthetic oligonucleotide
gcacagagucccgaguaaa

SEQ ID NO: 733822 - RNA, 19 nt, Artificial Sequence
  Description of Artificial Sequence: Synthetic oligonucleotide
cuggcaccgugagccggag

SEQ ID NO: 733823 - RNA, 19 nt, Artificial Sequence
  Description of Artificial Sequence: Synthetic oligonucleotide
aggaguguucggagaucau

SEQ ID NO: 733824 - RNA, 19 nt, Artificial Sequence
  Description of Artificial Sequence: Synthetic oligonucleotide
cuccuagcuuggccagaca

SEQ ID NO: 733825 - RNA, 19 nt, Artificial Sequence
  Description of Artificial Sequence: Synthetic oligonucleotide
cuucuccggcucaaauaau

SEQ ID NO: 733826 - RNA, 19 nt, Artificial Sequence
  Description of Artificial Sequence: Synthetic oligonucleotide
gagggcuucccggugcauu

SEQ ID NO: 733827 - RNA, 19 nt, Artificial Sequence
  Description of Artificial Sequence: Synthetic oligonucleotide
ccuagugacaaugccuccu

SEQ ID NO: 733828 - RNA, 19 nt, Artificial Sequence
  Description of Artificial Sequence: Synthetic oligonucleotide
cuggucguccaggggcaca

SEQ ID NO: 733829 - RNA, 19 nt, Artificial Sequence
  Description of Artificial Sequence: Synthetic oligonucleotide
cggcgaagaacagcgcggc

SEQ ID NO: 733830 - RNA, 19 nt, Artificial Sequence
  Description of Artificial Sequence: Synthetic oligonucleotide
gcggggacuguggaaggca

SEQ ID NO: 733831 - RNA, 19 nt, Artificial Sequence
  Description of Artificial Sequence: Synthetic oligonucleotide
ggccaaguaguagcuagau

SEQ ID NO: 733832 - RNA, 19 nt, Artificial Sequence
  Description of Artificial Sequence: Synthetic oligonucleotide
gccuacugaucugggaaua

SEQ ID NO: 733833 - RNA, 19 nt, Artificial Sequence
  Description of Artificial Sequence: Synthetic oligonucleotide
ccuacugaucugggaauaa

SEQ ID NO: 733834 - RNA, 19 nt, Artificial Sequence
  Description of Artificial Sequence: Synthetic oligonucleotide
cagcaagcacauccucagu

SEQ ID NO: 733835 - RNA, 19 nt, Artificial Sequence
  Description of Artificial Sequence: Synthetic oligonucleotide
ggguccggguugaguaaac

SEQ ID NO: 733836 - RNA, 19 nt, Artificial Sequence
  Description of Artificial Sequence: Synthetic oligonucleotide
ggcccaacacuccuagcuu

SEQ ID NO: 733837 - RNA, 19 nt, Artificial Sequence
  Description of Artificial Sequence: Synthetic oligonucleotide
ccaccgcggcgaagaacag

SEQ ID NO: 733838 - RNA, 19 nt, Artificial Sequence
  Description of Artificial Sequence: Synthetic oligonucleotide
gguccggguugaguaaacu

SEQ ID NO: 733839 - RNA, 19 nt, Artificial Sequence
  Description of Artificial Sequence: Synthetic oligonucleotide
ggccaccgcggcgaagaac

SEQ ID NO: 733840 - RNA, 19 nt, Artificial Sequence
  Description of Artificial Sequence: Synthetic oligonucleotide
ggaucccagccgggacucc

SEQ ID NO: 733841 - RNA, 19 nt, Artificial Sequence
  Description of Artificial Sequence: Synthetic oligonucleotide
ggauuaugcgacggccaau

SEQ ID NO: 733842 - RNA, 19 nt, Artificial Sequence
  Description of Artificial Sequence: Synthetic oligonucleotide
ccgcggcgaagaacagcgc

SEQ ID NO: 733843 - RNA, 19 nt, Artificial Sequence
  Description of Artificial Sequence: Synthetic oligonucleotide
caacggugaaggguagcuu

SEQ ID NO: 733844 - RNA, 19 nt, Artificial Sequence
  Description of Artificial Sequence: Synthetic oligonucleotide
ccagagcggcacgucccag

SEQ ID NO: 733845 - RNA, 19 nt, Artificial Sequence
  Description of Artificial Sequence: Synthetic oligonucleotide
gcgcggcgcgcuugccccg

SEQ ID NO: 733846 - RNA, 19 nt, Artificial Sequence
  Description of Artificial Sequence: Synthetic oligonucleotide
ccaagucaugaggccuuca

SEQ ID NO: 733847 - RNA, 19 nt, Artificial Sequence
  Description of Artificial Sequence: Synthetic oligonucleotide
ccgguaggucuccgugguc

SEQ ID NO: 733848 - RNA, 19 nt, Artificial Sequence
  Description of Artificial Sequence: Synthetic oligonucleotide
cccgguaggucuccguggu

SEQ ID NO: 733849 - RNA, 19 nt, Artificial Sequence
  Description of Artificial Sequence: Synthetic oligonucleotide
caacuguaacuggcaccgu

SEQ ID NO: 733850 - RNA, 19 nt, Artificial Sequence
  Description of Artificial Sequence: Synthetic oligonucleotide
ccgguaggccuucuggaau

SEQ ID NO: 733851 - RNA, 19 nt, Artificial Sequence
  Description of Artificial Sequence: Synthetic oligonucleotide
gcggcacgucccagcagaa

SEQ ID NO: 733852 - RNA, 19 nt, Artificial Sequence
  Description of Artificial Sequence: Synthetic oligonucleotide
cggugaaggguagcuucaa

SEQ ID NO: 733853 - RNA, 19 nt, Artificial Sequence
  Description of Artificial Sequence: Synthetic oligonucleotide
gggcuucccggugcauuau

SEQ ID NO: 733854 - RNA, 19 nt, Artificial Sequence
  Description of Artificial Sequence: Synthetic oligonucleotide
gggcaagcucaggcacaua

SEQ ID NO: 733855 - RNA, 19 nt, Artificial Sequence
  Description of Artificial Sequence: Synthetic oligonucleotide
cggcgcgcuugccccggac

SEQ ID NO: 733856 - RNA, 19 nt, Artificial Sequence
  Description of Artificial Sequence: Synthetic oligonucleotide
gcggcgcgcuugccccgga

SEQ ID NO: 733857 - RNA, 19 nt, Artificial Sequence
  Description of Artificial Sequence: Synthetic oligonucleotide
cggcacgucccagcagaau

SEQ ID NO: 733858 - RNA, 19 nt, Artificial Sequence
  Description of Artificial Sequence: Synthetic oligonucleotide
ccaccccagcggggacugu

SEQ ID NO: 733859 - RNA, 19 nt, Artificial Sequence
  Description of Artificial Sequence: Synthetic oligonucleotide
aucagaacaacuuaauugc

SEQ ID NO: 733860 - RNA, 19 nt, Artificial Sequence
  Description of Artificial Sequence: Synthetic oligonucleotide
uucaauaagaaauagaauu

SEQ ID NO: 733861 - RNA, 19 nt, Artificial Sequence
  Description of Artificial Sequence: Synthetic oligonucleotide
agcucaagaaaacaaaccc

SEQ ID NO: 733862 - RNA, 19 nt, Artificial Sequence
  Description of Artificial Sequence: Synthetic oligonucleotide
gacguuagcagucaaaggg

SEQ ID NO: 733863 - RNA, 19 nt, Artificial Sequence
  Description of Artificial Sequence: Synthetic oligonucleotide
aaauauagcguuucuuuuc

SEQ ID NO: 733864 - RNA, 19 nt, Artificial Sequence
  Description of Artificial Sequence: Synthetic oligonucleotide
uguagugcaaauaucuagg

SEQ ID NO: 733865 - RNA, 19 nt, Artificial Sequence
  Description of Artificial Sequence: Synthetic oligonucleotide
ugauuuauaguuaacuaca

SEQ ID NO: 733866 - RNA, 19 nt, Artificial Sequence
  Description of Artificial Sequence: Synthetic oligonucleotide
aaauaucuaggauggaguc

SEQ ID NO: 733867 - RNA, 19 nt, Artificial Sequence
  Description of Artificial Sequence: Synthetic oligonucleotide
uuagauuuagcuuacucug

SEQ ID NO: 733868 - RNA, 19 nt, Artificial Sequence
  Description of Artificial Sequence: Synthetic oligonucleotide
ucaaacguuagucacacug

SEQ ID NO: 733869 - RNA, 19 nt, Artificial Sequence
  Description of Artificial Sequence: Synthetic oligonucleotide
uuacguacuauucuaagug

SEQ ID NO: 733870 - RNA, 19 nt, Artificial Sequence
  Description of Artificial Sequence: Synthetic oligonucleotide
ucuaauguuccucugcuag

SEQ ID NO: 733871 - RNA, 19 nt, Artificial Sequence
  Description of Artificial Sequence: Synthetic oligonucleotide
aaaguugucagguaaugcu

SEQ ID NO: 733872 - RNA, 19 nt, Artificial Sequence
  Description of Artificial Sequence: Synthetic oligonucleotide
aaauagaauucuccauagc

SEQ ID NO: 733873 - RNA, 19 nt, Artificial Sequence
  Description of Artificial Sequence: Synthetic oligonucleotide
acuuaauugcacauuaugc

SEQ ID NO: 733874 - RNA, 19 nt, Artificial Sequence
  Description of Artificial Sequence: Synthetic oligonucleotide
aacgagagugccuuuuagc

SEQ ID NO: 733875 - RNA, 19 nt, Artificial Sequence
  Description of Artificial Sequence: Synthetic oligonucleotide
uacauuauaagcucaagaa

SEQ ID NO: 733876 - RNA, 19 nt, Artificial Sequence
  Description of Artificial Sequence: Synthetic oligonucleotide
uuugcauuaaaauggacaa

SEQ ID NO: 733877 - RNA, 19 nt, Artificial Sequence
  Description of Artificial Sequence: Synthetic oligonucleotide
aaccauuccauguacaaga

SEQ ID NO: 733878 - RNA, 19 nt, Artificial Sequence
  Description of Artificial Sequence: Synthetic oligonucleotide
caucagaacaacuuaauug

SEQ ID NO: 733879 - RNA, 19 nt, Artificial Sequence
  Description of Artificial Sequence: Synthetic oligonucleotide
uccucugcuagcuagagag

SEQ ID NO: 733880 - RNA, 19 nt, Artificial Sequence
  Description of Artificial Sequence: Synthetic oligonucleotide
uuagguuagauuuagcuua

SEQ ID NO: 733881 - RNA, 19 nt, Artificial Sequence
  Description of Artificial Sequence: Synthetic oligonucleotide
gaaauagaauucuccauag

SEQ ID NO: 733882 - RNA, 19 nt, Artificial Sequence
  Description of Artificial Sequence: Synthetic oligonucleotide
uguacugucugauacacac

SEQ ID NO: 733883 - RNA, 19 nt, Artificial Sequence
  Description of Artificial Sequence: Synthetic oligonucleotide
uguuuuauagugauauucu

SEQ ID NO: 733884 - RNA, 19 nt, Artificial Sequence
  Description of Artificial Sequence: Synthetic oligonucleotide
aaacccaacaauuaugcaa

SEQ ID NO: 733885 - RNA, 19 nt, Artificial Sequence
  Description of Artificial Sequence: Synthetic oligonucleotide
aucuaaguuccuuccaucc

SEQ ID NO: 733886 - RNA, 19 nt, Artificial Sequence
  Description of Artificial Sequence: Synthetic oligonucleotide
uaguuaacuacaaacauua

SEQ ID NO: 733887 - RNA, 19 nt, Artificial Sequence
  Description of Artificial Sequence: Synthetic oligonucleotide
aauauagcguuucuuuuca

SEQ ID NO: 733888 - RNA, 19 nt, Artificial Sequence
  Description of Artificial Sequence: Synthetic oligonucleotide
agagcauuagguuagauuu

SEQ ID NO: 733889 - RNA, 19 nt, Artificial Sequence
  Description of Artificial Sequence: Synthetic oligonucleotide
gaaaacuauagugagaaca

SEQ ID NO: 733890 - RNA, 19 nt, Artificial Sequence
  Description of Artificial Sequence: Synthetic oligonucleotide
ugggugaacaauccuaggg

SEQ ID NO: 733891 - RNA, 19 nt, Artificial Sequence
  Description of Artificial Sequence: Synthetic oligonucleotide
gguuacuuugccuugaccg

SEQ ID NO: 733892 - RNA, 19 nt, Artificial Sequence
  Description of Artificial Sequence: Synthetic oligonucleotide
ugcaauagaauuacaucag

SEQ ID NO: 733893 - RNA, 19 nt, Artificial Sequence
  Description of Artificial Sequence: Synthetic oligonucleotide
aagcucaagaaaacaaacc

SEQ ID NO: 733894 - RNA, 19 nt, Artificial Sequence
  Description of Artificial Sequence: Synthetic oligonucleotide
acguuauuuacagacaugg

SEQ ID NO: 733895 - RNA, 19 nt, Artificial Sequence
  Description of Artificial Sequence: Synthetic oligonucleotide
auaacagaaaaucuaaguu

SEQ ID NO: 733896 - RNA, 19 nt, Artificial Sequence
  Description of Artificial Sequence: Synthetic oligonucleotide
uccagguacauuauaagcu

SEQ ID NO: 733897 - RNA, 19 nt, Artificial Sequence
  Description of Artificial Sequence: Synthetic oligonucleotide
caaguaacguuauuuacag

SEQ ID NO: 733898 - RNA, 19 nt, Artificial Sequence
  Description of Artificial Sequence: Synthetic oligonucleotide
agaguuuccucacucaguc

SEQ ID NO: 733899 - RNA, 19 nt, Artificial Sequence
  Description of Artificial Sequence: Synthetic oligonucleotide
cuggccauaaaccacauug

SEQ ID NO: 733900 - RNA, 19 nt, Artificial Sequence
  Description of Artificial Sequence: Synthetic oligonucleotide
agaauuacaucagaacaac

SEQ ID NO: 733901 - RNA, 19 nt, Artificial Sequence
  Description of Artificial Sequence: Synthetic oligonucleotide
uaguguugcauacaaauau

SEQ ID NO: 733902 - RNA, 19 nt, Artificial Sequence
  Description of Artificial Sequence: Synthetic oligonucleotide
aauccuaggggccaacucu

SEQ ID NO: 733903 - RNA, 19 nt, Artificial Sequence
  Description of Artificial Sequence: Synthetic oligonucleotide
agauuuagcuuacucugac

SEQ ID NO: 733904 - RNA, 19 nt, Artificial Sequence
  Description of Artificial Sequence: Synthetic oligonucleotide
aacucagucugacacggag

SEQ ID NO: 733905 - RNA, 19 nt, Artificial Sequence
  Description of Artificial Sequence: Synthetic oligonucleotide
cugcauuagcuauagaaag

SEQ ID NO: 733906 - RNA, 19 nt, Artificial Sequence
  Description of Artificial Sequence: Synthetic oligonucleotide
uauuacguacuauucuaag

SEQ ID NO: 733907 - RNA, 19 nt, Artificial Sequence
  Description of Artificial Sequence: Synthetic oligonucleotide
aacuauagugagaacauca

SEQ ID NO: 733908 - RNA, 19 nt, Artificial Sequence
  Description of Artificial Sequence: Synthetic oligonucleotide
agucuuugguuaaaggucc

SEQ ID NO: 733909 - RNA, 19 nt, Artificial Sequence
  Description of Artificial Sequence: Synthetic oligonucleotide
aaaguugccaaguaacguu

SEQ ID NO: 733910 - RNA, 19 nt, Artificial Sequence
  Description of Artificial Sequence: Synthetic oligonucleotide
gucaguauuggguugcagg

SEQ ID NO: 733911 - RNA, 19 nt, Artificial Sequence
  Description of Artificial Sequence: Synthetic oligonucleotide
aucaauuaaaauggucccc

SEQ ID NO: 733912 - RNA, 19 nt, Artificial Sequence
  Description of Artificial Sequence: Synthetic oligonucleotide
uguauuacguacuauucua

SEQ ID NO: 733913 - RNA, 19 nt, Artificial Sequence
  Description of Artificial Sequence: Synthetic oligonucleotide
cucaaguuguauuacguac

SEQ ID NO: 733914 - RNA, 19 nt, Artificial Sequence
  Description of Artificial Sequence: Synthetic oligonucleotide
uuguauuacguacuauucu

SEQ ID NO: 733915 - RNA, 19 nt, Artificial Sequence
  Description of Artificial Sequence: Synthetic oligonucleotide
acaaauauagcguuucuuu

SEQ ID NO: 733916 - RNA, 19 nt, Artificial Sequence
  Description of Artificial Sequence: Synthetic oligonucleotide
acauuuugggcguuuauca

SEQ ID NO: 733917 - RNA, 19 nt, Artificial Sequence
  Description of Artificial Sequence: Synthetic oligonucleotide
uuccagguacauuauaagc

SEQ ID NO: 733918 - RNA, 19 nt, Artificial Sequence
  Description of Artificial Sequence: Synthetic oligonucleotide
ucaaguuguauuacguacu

SEQ ID NO: 733919 - RNA, 19 nt, Artificial Sequence
  Description of Artificial Sequence: Synthetic oligonucleotide
agcacggugacagacaacg

SEQ ID NO: 733920 - RNA, 19 nt, Artificial Sequence
  Description of Artificial Sequence: Synthetic oligonucleotide
cuagagagcauuagguuag

SEQ ID NO: 733921 - RNA, 19 nt, Artificial Sequence
  Description of Artificial Sequence: Synthetic oligonucleotide
uuagcuuacucugacaggu

SEQ ID NO: 733922 - RNA, 19 nt, Artificial Sequence
  Description of Artificial Sequence: Synthetic oligonucleotide
cuagguaaugcccuuuggg

SEQ ID NO: 733923 - RNA, 19 nt, Artificial Sequence
  Description of Artificial Sequence: Synthetic oligonucleotide
ugguuaaagguccacauuu

SEQ ID NO: 733924 - RNA, 19 nt, Artificial Sequence
  Description of Artificial Sequence: Synthetic oligonucleotide
guauauguuccucagggac

SEQ ID NO: 733925 - RNA, 19 nt, Artificial Sequence
  Description of Artificial Sequence: Synthetic oligonucleotide
ucugacacggagaagcaac

SEQ ID NO: 733926 - RNA, 19 nt, Artificial Sequence
  Description of Artificial Sequence: Synthetic oligonucleotide
guuacuuugccuugaccgg

SEQ ID NO: 733927 - RNA, 19 nt, Artificial Sequence
  Description of Artificial Sequence: Synthetic oligonucleotide
acuggauagaggcuaauga

SEQ ID NO: 733928 - RNA, 19 nt, Artificial Sequence
  Description of Artificial Sequence: Synthetic oligonucleotide
cuagcuagagagcauuagg

SEQ ID NO: 733929 - RNA, 19 nt, Artificial Sequence
  Description of Artificial Sequence: Synthetic oligonucleotide
auuacguacuauucuaagu

SEQ ID NO: 733930 - RNA, 19 nt, Artificial Sequence
  Description of Artificial Sequence: Synthetic oligonucleotide
ucacucaaguuguauuacg

SEQ ID NO: 733931 - RNA, 19 nt, Artificial Sequence
  Description of Artificial Sequence: Synthetic oligonucleotide
aauacuuccugaagcguuc

SEQ ID NO: 733932 - RNA, 19 nt, Artificial Sequence
  Description of Artificial Sequence: Synthetic oligonucleotide
aaugcauaaaacagcagau

SEQ ID NO: 733933 - RNA, 19 nt, Artificial Sequence
  Description of Artificial Sequence: Synthetic oligonucleotide
ucuaaguuccuuccauccc

SEQ ID NO: 733934 - RNA, 19 nt, Artificial Sequence
  Description of Artificial Sequence: Synthetic oligonucleotide
ugacaggucaguauugggu

SEQ ID NO: 733935 - RNA, 19 nt, Artificial Sequence
  Description of Artificial Sequence: Synthetic oligonucleotide
uagcuagagagcauuaggu

SEQ ID NO: 733936 - RNA, 19 nt, Artificial Sequence
  Description of Artificial Sequence: Synthetic oligonucleotide
aacgagaauggacuuggcu

SEQ ID NO: 733937 - RNA, 19 nt, Artificial Sequence
  Description of Artificial Sequence: Synthetic oligonucleotide
accugcauuagcuauagaa

SEQ ID NO: 733938 - RNA, 19 nt, Artificial Sequence
  Description of Artificial Sequence: Synthetic oligonucleotide
aacaaacccaacaauuaug

SEQ ID NO: 733939 - RNA, 19 nt, Artificial Sequence
  Description of Artificial Sequence: Synthetic oligonucleotide
uccuguaacacugacggca

SEQ ID NO: 733940 - RNA, 19 nt, Artificial Sequence
  Description of Artificial Sequence: Synthetic oligonucleotide
aaacgagagugccuuuuag

SEQ ID NO: 733941 - RNA, 19 nt, Artificial Sequence
  Description of Artificial Sequence: Synthetic oligonucleotide
ucauacguggugcaccugc

SEQ ID NO: 733942 - RNA, 19 nt, Artificial Sequence
  Description of Artificial Sequence: Synthetic oligonucleotide
acaacgagaauggacuugg

SEQ ID NO: 733943 - RNA, 19 nt, Artificial Sequence
  Description of Artificial Sequence: Synthetic oligonucleotide
uuugguuaaagguccacau

SEQ ID NO: 733944 - RNA, 19 nt, Artificial Sequence
  Description of Artificial Sequence: Synthetic oligonucleotide
uuaugcuuugaaaguaggu

SEQ ID NO: 733945 - RNA, 19 nt, Artificial Sequence
  Description of Artificial Sequence: Synthetic oligonucleotide
aaacuauagugagaacauc

SEQ ID NO: 733946 - RNA, 19 nt, Artificial Sequence
  Description of Artificial Sequence: Synthetic oligonucleotide
agaacucagucugacacgg

SEQ ID NO: 733947 - RNA, 19 nt, Artificial Sequence
  Description of Artificial Sequence: Synthetic oligonucleotide
cuaggauggagucaagaac

SEQ ID NO: 733948 - RNA, 19 nt, Artificial Sequence
  Description of Artificial Sequence: Synthetic oligonucleotide
ugcuuacacaaacucaagu

SEQ ID NO: 733949 - RNA, 19 nt, Artificial Sequence
  Description of Artificial Sequence: Synthetic oligonucleotide
gaggcuaaugacuaagcuc

SEQ ID NO: 733950 - RNA, 19 nt, Artificial Sequence
  Description of Artificial Sequence: Synthetic oligonucleotide
cuguuuuauagugauauuc

SEQ ID NO: 733951 - RNA, 19 nt, Artificial Sequence
  Description of Artificial Sequence: Synthetic oligonucleotide
aaaggguuaguguugcaua

SEQ ID NO: 733952 - RNA, 19 nt, Artificial Sequence
  Description of Artificial Sequence: Synthetic oligonucleotide
uaaccagcgaacccuaacu

SEQ ID NO: 733953 - RNA, 19 nt, Artificial Sequence
  Description of Artificial Sequence: Synthetic oligonucleotide
ugacuaagcucacauucug

SEQ ID NO: 733954 - RNA, 19 nt, Artificial Sequence
  Description of Artificial Sequence: Synthetic oligonucleotide
acggcagauauacugcagg

SEQ ID NO: 733955 - RNA, 19 nt, Artificial Sequence
  Description of Artificial Sequence: Synthetic oligonucleotide
uugguauauguuccucagg

SEQ ID NO: 733956 - RNA, 19 nt, Artificial Sequence
  Description of Artificial Sequence: Synthetic oligonucleotide
uaaguuccuuccauccccg

SEQ ID NO: 733957 - RNA, 19 nt, Artificial Sequence
  Description of Artificial Sequence: Synthetic oligonucleotide
uugcauaacaacacaggaa

SEQ ID NO: 733958 - RNA, 19 nt, Artificial Sequence
  Description of Artificial Sequence: Synthetic oligonucleotide
acagacaacgagaauggac

SEQ ID NO: 733959 - RNA, 19 nt, Artificial Sequence
  Description of Artificial Sequence: Synthetic oligonucleotide
aggcuaaugacuaagcuca

SEQ ID NO: 733960 - RNA, 19 nt, Artificial Sequence
  Description of Artificial Sequence: Synthetic oligonucleotide
uccucagggacuuauacua

SEQ ID NO: 733961 - RNA, 19 nt, Artificial Sequence
  Description of Artificial Sequence: Synthetic oligonucleotide
cuggauagaggcuaaugac

SEQ ID NO: 733962 - RNA, 19 nt, Artificial Sequence
  Description of Artificial Sequence: Synthetic oligonucleotide
aacccuaacuuucuguuuu

SEQ ID NO: 733963 - RNA, 19 nt, Artificial Sequence
  Description of Artificial Sequence: Synthetic oligonucleotide
acgagagugccuuuuagca

SEQ ID NO: 733964 - RNA, 19 nt, Artificial Sequence
  Description of Artificial Sequence: Synthetic oligonucleotide
uuucaaacguuagucacac

SEQ ID NO: 733965 - RNA, 19 nt, Artificial Sequence
  Description of Artificial Sequence: Synthetic oligonucleotide
uagugagaacaucaauuug

SEQ ID NO: 733966 - RNA, 19 nt, Artificial Sequence
  Description of Artificial Sequence: Synthetic oligonucleotide
cagucugacacggagaagc

SEQ ID NO: 733967 - RNA, 19 nt, Artificial Sequence
  Description of Artificial Sequence: Synthetic oligonucleotide
aauaucuaggauggaguca

SEQ ID NO: 733968 - RNA, 19 nt, Artificial Sequence
  Description of Artificial Sequence: Synthetic oligonucleotide
ucagaacaacuuaauugca

SEQ ID NO: 733969 - RNA, 19 nt, Artificial Sequence
  Description of Artificial Sequence: Synthetic oligonucleotide
acucaaguuacacacuuaa

SEQ ID NO: 733970 - RNA, 19 nt, Artificial Sequence
  Description of Artificial Sequence: Synthetic oligonucleotide
uccccaaaccgguaagugg

SEQ ID NO: 733971 - RNA, 19 nt, Artificial Sequence
  Description of Artificial Sequence: Synthetic oligonucleotide
acagacuuucgguaacggg

SEQ ID NO: 733972 - RNA, 19 nt, Artificial Sequence
  Description of Artificial Sequence: Synthetic oligonucleotide
uaauugcacauuaugcuuu

SEQ ID NO: 733973 - RNA, 19 nt, Artificial Sequence
  Description of Artificial Sequence: Synthetic oligonucleotide
uagauuuagcuuacucuga

SEQ ID NO: 733974 - RNA, 19 nt, Artificial Sequence
  Description of Artificial Sequence: Synthetic oligonucleotide
uacguacuauucuaaguga

SEQ ID NO: 733975 - RNA, 19 nt, Artificial Sequence
  Description of Artificial Sequence: Synthetic oligonucleotide
agggacuuauacuacaaau

SEQ ID NO: 733976 - RNA, 19 nt, Artificial Sequence
  Description of Artificial Sequence: Synthetic oligonucleotide
auccaauauuaauaauuug

SEQ ID NO: 733977 - RNA, 19 nt, Artificial Sequence
  Description of Artificial Sequence: Synthetic oligonucleotide
ucuaaaaggaaggcagucu

SEQ ID NO: 733978 - RNA, 19 nt, Artificial Sequence
  Description of Artificial Sequence: Synthetic oligonucleotide
cucaagaggguuacuuucc

SEQ ID NO: 733979 - RNA, 19 nt, Artificial Sequence
  Description of Artificial Sequence: Synthetic oligonucleotide
ugccuuuuagcacagugua

SEQ ID NO: 733980 - RNA, 19 nt, Artificial Sequence
  Description of Artificial Sequence: Synthetic oligonucleotide
acgagaauggacuuggcua

SEQ ID NO: 733981 - RNA, 19 nt, Artificial Sequence
  Description of Artificial Sequence: Synthetic oligonucleotide
accgguucucgcucuaacc

SEQ ID NO: 733982 - RNA, 19 nt, Artificial Sequence
  Description of Artificial Sequence: Synthetic oligonucleotide
cagaacaacuuaauugcac

SEQ ID NO: 733983 - RNA, 19 nt, Artificial Sequence
  Description of Artificial Sequence: Synthetic oligonucleotide
ucaaagcuugauuuauagu

SEQ ID NO: 733984 - RNA, 19 nt, Artificial Sequence
  Description of Artificial Sequence: Synthetic oligonucleotide
ugggcguuuaucaucaauu

SEQ ID NO: 733985 - RNA, 19 nt, Artificial Sequence
  Description of Artificial Sequence: Synthetic oligonucleotide
gggugaacaauccuagggg

SEQ ID NO: 733986 - RNA, 19 nt, Artificial Sequence
  Description of Artificial Sequence: Synthetic oligonucleotide
aaacguuagucacacuguu

SEQ ID NO: 733987 - RNA, 19 nt, Artificial Sequence
  Description of Artificial Sequence: Synthetic oligonucleotide
acacaaacugaaacgagag

SEQ ID NO: 733988 - RNA, 19 nt, Artificial Sequence
  Description of Artificial Sequence: Synthetic oligonucleotide
agcauuagguuagauuuag

SEQ ID NO: 733989 - RNA, 19 nt, Artificial Sequence
  Description of Artificial Sequence: Synthetic oligonucleotide
ucucgcucuaaccagcgaa

SEQ ID NO: 733990 - RNA, 19 nt, Artificial Sequence
  Description of Artificial Sequence: Synthetic oligonucleotide
gcuauagaaaguugucagg

SEQ ID NO: 733991 - RNA, 19 nt, Artificial Sequence
  Description of Artificial Sequence: Synthetic oligonucleotide
agguaaugcccuuugggga

SEQ ID NO: 733992 - RNA, 19 nt, Artificial Sequence
  Description of Artificial Sequence: Synthetic oligonucleotide
auacccauccaauauuaau

SEQ ID NO: 733993 - RNA, 19 nt, Artificial Sequence
  Description of Artificial Sequence: Synthetic oligonucleotide
auaucuaggauggagucaa

SEQ ID NO: 733994 - RNA, 19 nt, Artificial Sequence
  Description of Artificial Sequence: Synthetic oligonucleotide
gacuaagcucacauucugg

SEQ ID NO: 733995 - RNA, 19 nt, Artificial Sequence
  Description of Artificial Sequence: Synthetic oligonucleotide
ugguucacagacuuucggu

SEQ ID NO: 733996 - RNA, 19 nt, Artificial Sequence
  Description of Artificial Sequence: Synthetic oligonucleotide
cauuagcuauagaaaguug

SEQ ID NO: 733997 - RNA, 19 nt, Artificial Sequence
  Description of Artificial Sequence: Synthetic oligonucleotide
acagagcacggugacagac

SEQ ID NO: 733998 - RNA, 19 nt, Artificial Sequence
  Description of Artificial Sequence: Synthetic oligonucleotide
uggccauaaaccacauuga

SEQ ID NO: 733999 - RNA, 19 nt, Artificial Sequence
  Description of Artificial Sequence: Synthetic oligonucleotide
ugcagaucaccgcacggca

SEQ ID NO: 734000 - RNA, 19 nt, Artificial Sequence
  Description of Artificial Sequence: Synthetic oligonucleotide
cuuacacaaacucaaguua

SEQ ID NO: 734001 - RNA, 19 nt, Artificial Sequence
  Description of Artificial Sequence: Synthetic oligonucleotide
cacggugacagacaacgag

SEQ ID NO: 734002 - RNA, 19 nt, Artificial Sequence
  Description of Artificial Sequence: Synthetic oligonucleotide
aaauacccauccaauauua

SEQ ID NO: 734003 - RNA, 19 nt, Artificial Sequence
  Description of Artificial Sequence: Synthetic oligonucleotide
ggacuuauacuacaaauaa

SEQ ID NO: 734004 - RNA, 19 nt, Artificial Sequence
  Description of Artificial Sequence: Synthetic oligonucleotide
uccugaagcguucacucaa

SEQ ID NO: 734005 - RNA, 19 nt, Artificial Sequence
  Description of Artificial Sequence: Synthetic oligonucleotide
guuguauuacguacuauuc

SEQ ID NO: 734006 - RNA, 19 nt, Artificial Sequence
  Description of Artificial Sequence: Synthetic oligonucleotide
ggugaacaauccuaggggc

SEQ ID NO: 734007 - RNA, 19 nt, Artificial Sequence
  Description of Artificial Sequence: Synthetic oligonucleotide
guuuggaugaaguucucaa

SEQ ID NO: 734008 - RNA, 19 nt, Artificial Sequence
  Description of Artificial Sequence: Synthetic oligonucleotide
guacuauucuaagugacca

SEQ ID NO: 734009 - RNA, 19 nt, Artificial Sequence
  Description of Artificial Sequence: Synthetic oligonucleotide
uagguuagauuuagcuuac

SEQ ID NO: 734010 - RNA, 19 nt, Artificial Sequence
  Description of Artificial Sequence: Synthetic oligonucleotide
cacagcaucaguugcucac

SEQ ID NO: 734011 - RNA, 19 nt, Artificial Sequence
  Description of Artificial Sequence: Synthetic oligonucleotide
cacucagucaucacagcac

SEQ ID NO: 734012 - RNA, 19 nt, Artificial Sequence
  Description of Artificial Sequence: Synthetic oligonucleotide
gacuuggcuacuguagugc

SEQ ID NO: 734013 - RNA, 19 nt, Artificial Sequence
  Description of Artificial Sequence: Synthetic oligonucleotide
agaaaguugucagguaaug

SEQ ID NO: 734014 - RNA, 19 nt, Artificial Sequence
  Description of Artificial Sequence: Synthetic oligonucleotide
acacugacggcagagggag

SEQ ID NO: 734015 - RNA, 19 nt, Artificial Sequence
  Description of Artificial Sequence: Synthetic oligonucleotide
uugcauuaaaauggacaag

SEQ ID NO: 734016 - RNA, 19 nt, Artificial Sequence
  Description of Artificial Sequence: Synthetic oligonucleotide
cugguucacagacuuucgg

SEQ ID NO: 734017 - RNA, 19 nt, Artificial Sequence
  Description of Artificial Sequence: Synthetic oligonucleotide
uuuccucacucagucauca

SEQ ID NO: 734018 - RNA, 19 nt, Artificial Sequence
  Description of Artificial Sequence: Synthetic oligonucleotide
aaguaacguuauuuacaga

SEQ ID NO: 734019 - RNA, 19 nt, Artificial Sequence
  Description of Artificial Sequence: Synthetic oligonucleotide
gauuuagcuuacucugaca

SEQ ID NO: 734020 - RNA, 19 nt, Artificial Sequence
  Description of Artificial Sequence: Synthetic oligonucleotide
cccguuuugcauuaaaaug

SEQ ID NO: 734021 - RNA, 19 nt, Artificial Sequence
  Description of Artificial Sequence: Synthetic oligonucleotide
uuccucagggacuuauacu

SEQ ID NO: 734022 - RNA, 19 nt, Artificial Sequence
  Description of Artificial Sequence: Synthetic oligonucleotide
cagacaacgagaauggacu

SEQ ID NO: 734023 - RNA, 19 nt, Artificial Sequence
  Description of Artificial Sequence: Synthetic oligonucleotide
uuuaaccccaaaguugcau

SEQ ID NO: 734024 - RNA, 19 nt, Artificial Sequence
  Description of Artificial Sequence: Synthetic oligonucleotide
gguaacggguuugugaugc

SEQ ID NO: 734025 - RNA, 19 nt, Artificial Sequence
  Description of Artificial Sequence: Synthetic oligonucleotide
guuuuggacuuucaaagcu

SEQ ID NO: 734026 - RNA, 19 nt, Artificial Sequence
  Description of Artificial Sequence: Synthetic oligonucleotide
aacguuagucacacuguug

SEQ ID NO: 734027 - RNA, 19 nt, Artificial Sequence
  Description of Artificial Sequence: Synthetic oligonucleotide
caaauaucuaggauggagu

SEQ ID NO: 734028 - RNA, 19 nt, Artificial Sequence
  Description of Artificial Sequence: Synthetic oligonucleotide
aguuaacuacaaacauuac

SEQ ID NO: 734029 - RNA, 19 nt, Artificial Sequence
  Description of Artificial Sequence: Synthetic oligonucleotide
uguuccucugcuagcuaga

SEQ ID NO: 734030 - RNA, 19 nt, Artificial Sequence
  Description of Artificial Sequence: Synthetic oligonucleotide
uuuuaaccccaaaguugca

SEQ ID NO: 734031 - RNA, 19 nt, Artificial Sequence
  Description of Artificial Sequence: Synthetic oligonucleotide
auacuuuauuagcacgaaa

SEQ ID NO: 734032 - RNA, 19 nt, Artificial Sequence
  Description of Artificial Sequence: Synthetic oligonucleotide
aaaccgguaaguggugcug

SEQ ID NO: 734033 - RNA, 19 nt, Artificial Sequence
  Description of Artificial Sequence: Synthetic oligonucleotide
uacaaauauagcguuucuu

SEQ ID NO: 734034 - RNA, 19 nt, Artificial Sequence
  Description of Artificial Sequence: Synthetic oligonucleotide
auauagcguuucuuuucag

SEQ ID NO: 734035 - RNA, 19 nt, Artificial Sequence
  Description of Artificial Sequence: Synthetic oligonucleotide
uugguuaaagguccacauu

SEQ ID NO: 734036 - RNA, 19 nt, Artificial Sequence
  Description of Artificial Sequence: Synthetic oligonucleotide
guucacucaaguuguauua

SEQ ID NO: 734037 - RNA, 19 nt, Artificial Sequence
  Description of Artificial Sequence: Synthetic oligonucleotide
aaacagacguuagcaguca

SEQ ID NO: 734038 - RNA, 19 nt, Artificial Sequence
  Description of Artificial Sequence: Synthetic oligonucleotide
aaccagcgaacccuaacuu

SEQ ID NO: 734039 - RNA, 19 nt, Artificial Sequence
  Description of Artificial Sequence: Synthetic oligonucleotide
uguuccucaagaggguuac

SEQ ID NO: 734040 - RNA, 19 nt, Artificial Sequence
  Description of Artificial Sequence: Synthetic oligonucleotide
cuaaccagcgaacccuaac

SEQ ID NO: 734041 - RNA, 19 nt, Artificial Sequence
  Description of Artificial Sequence: Synthetic oligonucleotide
gguuagauuuagcuuacuc

SEQ ID NO: 734042 - RNA, 19 nt, Artificial Sequence
  Description of Artificial Sequence: Synthetic oligonucleotide
cacacuguugaaauaccca

SEQ ID NO: 734043 - RNA, 19 nt, Artificial Sequence
  Description of Artificial Sequence: Synthetic oligonucleotide
uuggcuacuguagugcaaa

SEQ ID NO: 734044 - RNA, 19 nt, Artificial Sequence
  Description of Artificial Sequence: Synthetic oligonucleotide
ugcucacaaacaguccucc

SEQ ID NO: 734045 - RNA, 19 nt, Artificial Sequence
  Description of Artificial Sequence: Synthetic oligonucleotide
cuacuguagugcaaauauc

SEQ ID NO: 734046 - RNA, 19 nt, Artificial Sequence
  Description of Artificial Sequence: Synthetic oligonucleotide
uccccguuuugcauuaaaa

SEQ ID NO: 734047 - RNA, 19 nt, Artificial Sequence
  Description of Artificial Sequence: Synthetic oligonucleotide
gacaacgagaauggacuug

SEQ ID NO: 734048 - RNA, 19 nt, Artificial Sequence
  Description of Artificial Sequence: Synthetic oligonucleotide
acucaaguuguauuacgua

SEQ ID NO: 734049 - RNA, 19 nt, Artificial Sequence
  Description of Artificial Sequence: Synthetic oligonucleotide
caagaggguuacuuuccag

SEQ ID NO: 734050 - RNA, 19 nt, Artificial Sequence
  Description of Artificial Sequence: Synthetic oligonucleotide
ugaagcguucacucaaguu

SEQ ID NO: 734051 - RNA, 19 nt, Artificial Sequence
  Description of Artificial Sequence: Synthetic oligonucleotide
agacaccaaauauacuuua

SEQ ID NO: 734052 - RNA, 19 nt, Artificial Sequence
  Description of Artificial Sequence: Synthetic oligonucleotide
aguauggacuucuguuccu

SEQ ID NO: 734053 - RNA, 19 nt, Artificial Sequence
  Description of Artificial Sequence: Synthetic oligonucleotide
gguaaugcccuuuggggac

SEQ ID NO: 734054 - RNA, 19 nt, Artificial Sequence
  Description of Artificial Sequence: Synthetic oligonucleotide
acggagaagcaacacuaga

SEQ ID NO: 734055 - RNA, 19 nt, Artificial Sequence
  Description of Artificial Sequence: Synthetic oligonucleotide
uaacggguuugugaugcag

SEQ ID NO: 734056 - RNA, 19 nt, Artificial Sequence
  Description of Artificial Sequence: Synthetic oligonucleotide
acuuggcuacuguagugca

SEQ ID NO: 734057 - RNA, 19 nt, Artificial Sequence
  Description of Artificial Sequence: Synthetic oligonucleotide
cagacuuucgguaacgggu

SEQ ID NO: 734058 - RNA, 19 nt, Artificial Sequence
  Description of Artificial Sequence: Synthetic oligonucleotide
agagcacggugacagacaa

SEQ ID NO: 734059 - RNA, 19 nt, Artificial Sequence
  Description of Artificial Sequence: Synthetic oligonucleotide
ugcaggcugaaaggaaaag

SEQ ID NO: 734060 - RNA, 19 nt, Artificial Sequence
  Description of Artificial Sequence: Synthetic oligonucleotide
uaaugacuaagcucacauu

SEQ ID NO: 734061 - RNA, 19 nt, Artificial Sequence
  Description of Artificial Sequence: Synthetic oligonucleotide
acuacuuuuggaagguuau

SEQ ID NO: 734062 - RNA, 19 nt, Artificial Sequence
  Description of Artificial Sequence: Synthetic oligonucleotide
cucgcucuaaccagcgaac

SEQ ID NO: 734063 - RNA, 19 nt, Artificial Sequence
  Description of Artificial Sequence: Synthetic oligonucleotide
caggugaaccugcauuagc

SEQ ID NO: 734064 - RNA, 19 nt, Artificial Sequence
  Description of Artificial Sequence: Synthetic oligonucleotide
aaaugccccagaguuuccu

SEQ ID NO: 734065 - RNA, 19 nt, Artificial Sequence
  Description of Artificial Sequence: Synthetic oligonucleotide
uugcucacaaacaguccuc

SEQ ID NO: 734066 - RNA, 19 nt, Artificial Sequence
  Description of Artificial Sequence: Synthetic oligonucleotide
guaacguuauuuacagaca

SEQ ID NO: 734067 - RNA, 19 nt, Artificial Sequence
  Description of Artificial Sequence: Synthetic oligonucleotide
ccaaguaacguuauuuaca

SEQ ID NO: 734068 - RNA, 19 nt, Artificial Sequence
  Description of Artificial Sequence: Synthetic oligonucleotide
cuaaugacuaagcucacau

SEQ ID NO: 734069 - RNA, 19 nt, Artificial Sequence
  Description of Artificial Sequence: Synthetic oligonucleotide
gaugaaguucucaaacacu

SEQ ID NO: 734070 - RNA, 19 nt, Artificial Sequence
  Description of Artificial Sequence: Synthetic oligonucleotide
uugggcguuuaucaucaau

SEQ ID NO: 734071 - RNA, 19 nt, Artificial Sequence
  Description of Artificial Sequence: Synthetic oligonucleotide
ugguccccaaaccgguaag

SEQ ID NO: 734072 - RNA, 19 nt, Artificial Sequence
  Description of Artificial Sequence: Synthetic oligonucleotide
aaguugccaaguaacguua

SEQ ID NO: 734073 - RNA, 19 nt, Artificial Sequence
  Description of Artificial Sequence: Synthetic oligonucleotide
uggugauagccagaggaaa

SEQ ID NO: 734074 - RNA, 19 nt, Artificial Sequence
  Description of Artificial Sequence: Synthetic oligonucleotide
guuccuaggcaccuuuguc

SEQ ID NO: 734075 - RNA, 19 nt, Artificial Sequence
  Description of Artificial Sequence: Synthetic oligonucleotide
aacagacguuagcagucaa

SEQ ID NO: 734076 - RNA, 19 nt, Artificial Sequence
  Description of Artificial Sequence: Synthetic oligonucleotide
ccaacaauuaugcaauaga

SEQ ID NO: 734077 - RNA, 19 nt, Artificial Sequence
  Description of Artificial Sequence: Synthetic oligonucleotide
uugccuugaccgguucucg

SEQ ID NO: 734078 - RNA, 19 nt, Artificial Sequence
  Description of Artificial Sequence: Synthetic oligonucleotide
cagaagaucccacuggaua

SEQ ID NO: 734079 - RNA, 19 nt, Artificial Sequence
  Description of Artificial Sequence: Synthetic oligonucleotide
acuuugccuugaccgguuc

SEQ ID NO: 734080 - RNA, 19 nt, Artificial Sequence
  Description of Artificial Sequence: Synthetic oligonucleotide
cucagucugacacggagaa

SEQ ID NO: 734081 - RNA, 19 nt, Artificial Sequence
  Description of Artificial Sequence: Synthetic oligonucleotide
uccucaguauggacuucug

SEQ ID NO: 734082 - RNA, 19 nt, Artificial Sequence
  Description of Artificial Sequence: Synthetic oligonucleotide
ugaaacgagagugccuuuu

SEQ ID NO: 734083 - RNA, 19 nt, Artificial Sequence
  Description of Artificial Sequence: Synthetic oligonucleotide
acacuagaaucugacaaua

SEQ ID NO: 734084 - RNA, 19 nt, Artificial Sequence
  Description of Artificial Sequence: Synthetic oligonucleotide
acguuagcagucaaagggu

SEQ ID NO: 734085 - RNA, 19 nt, Artificial Sequence
  Description of Artificial Sequence: Synthetic oligonucleotide
caucuguuguuccuaggca

SEQ ID NO: 734086 - RNA, 19 nt, Artificial Sequence
  Description of Artificial Sequence: Synthetic oligonucleotide
gguacauuauaagcucaag

SEQ ID NO: 734087 - RNA, 19 nt, Artificial Sequence
  Description of Artificial Sequence: Synthetic oligonucleotide
uuccucaagaggguuacuu

SEQ ID NO: 734088 - RNA, 19 nt, Artificial Sequence
  Description of Artificial Sequence: Synthetic oligonucleotide
ggccauaaaccacauugac

SEQ ID NO: 734089 - RNA, 19 nt, Artificial Sequence
  Description of Artificial Sequence: Synthetic oligonucleotide
cacagacuuucgguaacgg

SEQ ID NO: 734090 - RNA, 19 nt, Artificial Sequence
  Description of Artificial Sequence: Synthetic oligonucleotide
cuuugguuaaagguccaca

SEQ ID NO: 734091 - RNA, 19 nt, Artificial Sequence
  Description of Artificial Sequence: Synthetic oligonucleotide
cugcagaucaccgcacggc

SEQ ID NO: 734092 - RNA, 19 nt, Artificial Sequence
  Description of Artificial Sequence: Synthetic oligonucleotide
cacaccugcaaaccaucug

SEQ ID NO: 734093 - RNA, 19 nt, Artificial Sequence
  Description of Artificial Sequence: Synthetic oligonucleotide
auuaugcaauagaauuaca

SEQ ID NO: 734094 - RNA, 19 nt, Artificial Sequence
  Description of Artificial Sequence: Synthetic oligonucleotide
ugcaaaccaucuguuguuc

SEQ ID NO: 734095 - RNA, 19 nt, Artificial Sequence
  Description of Artificial Sequence: Synthetic oligonucleotide
gagagcauuagguuagauu

SEQ ID NO: 734096 - RNA, 19 nt, Artificial Sequence
  Description of Artificial Sequence: Synthetic oligonucleotide
aggaaaaguccuguucagu

SEQ ID NO: 734097 - RNA, 19 nt, Artificial Sequence
  Description of Artificial Sequence: Synthetic oligonucleotide
cacggcagauauacugcag

SEQ ID NO: 734098 - RNA, 19 nt, Artificial Sequence
  Description of Artificial Sequence: Synthetic oligonucleotide
aguguugcauacaaauaua

SEQ ID NO: 734099 - RNA, 19 nt, Artificial Sequence
  Description of Artificial Sequence: Synthetic oligonucleotide
cagauauacugcaggcuga

SEQ ID NO: 734100 - RNA, 19 nt, Artificial Sequence
  Description of Artificial Sequence: Synthetic oligonucleotide
ucgcucuaaccagcgaacc

SEQ ID NO: 734101 - RNA, 19 nt, Artificial Sequence
  Description of Artificial Sequence: Synthetic oligonucleotide
cguacuauucuaagugacc

SEQ ID NO: 734102 - RNA, 19 nt, Artificial Sequence
  Description of Artificial Sequence: Synthetic oligonucleotide
uccauccccguuuugcauu

SEQ ID NO: 734103 - RNA, 19 nt, Artificial Sequence
  Description of Artificial Sequence: Synthetic oligonucleotide
uuccuauggcuguacuguc

SEQ ID NO: 734104 - RNA, 19 nt, Artificial Sequence
  Description of Artificial Sequence: Synthetic oligonucleotide
accauuccauguacaagag

SEQ ID NO: 734105 - RNA, 19 nt, Artificial Sequence
  Description of Artificial Sequence: Synthetic oligonucleotide
gaaacgagagugccuuuua

SEQ ID NO: 734106 - RNA, 19 nt, Artificial Sequence
  Description of Artificial Sequence: Synthetic oligonucleotide
augccccagaguuuccuca

SEQ ID NO: 734107 - RNA, 19 nt, Artificial Sequence
  Description of Artificial Sequence: Synthetic oligonucleotide
accagcgaacccuaacuuu

SEQ ID NO: 734108 - RNA, 19 nt, Artificial Sequence
  Description of Artificial Sequence: Synthetic oligonucleotide
ugcuuccuauggcuguacu

SEQ ID NO: 734109 - RNA, 19 nt, Artificial Sequence
  Description of Artificial Sequence: Synthetic oligonucleotide
caauccuaggggccaacuc

SEQ ID NO: 734110 - RNA, 19 nt, Artificial Sequence
  Description of Artificial Sequence: Synthetic oligonucleotide
ucuaaccagcgaacccuaa

SEQ ID NO: 734111 - RNA, 19 nt, Artificial Sequence
  Description of Artificial Sequence: Synthetic oligonucleotide
ugccuugaccgguucucgc

SEQ ID NO: 734112 - RNA, 19 nt, Artificial Sequence
  Description of Artificial Sequence: Synthetic oligonucleotide
agcgaacccuaacuuucug

SEQ ID NO: 734113 - RNA, 19 nt, Artificial Sequence
  Description of Artificial Sequence: Synthetic oligonucleotide
uauuggguugcaggugaac

SEQ ID NO: 734114 - RNA, 19 nt, Artificial Sequence
  Description of Artificial Sequence: Synthetic oligonucleotide
ugcuagcuagagagcauua

SEQ ID NO: 734115 - RNA, 19 nt, Artificial Sequence
  Description of Artificial Sequence: Synthetic oligonucleotide
agacaacgagaauggacuu

SEQ ID NO: 734116 - RNA, 19 nt, Artificial Sequence
  Description of Artificial Sequence: Synthetic oligonucleotide
guauuacguacuauucuaa

SEQ ID NO: 734117 - RNA, 19 nt, Artificial Sequence
  Description of Artificial Sequence: Synthetic oligonucleotide
ccagcgaacccuaacuuuc

SEQ ID NO: 734118 - RNA, 19 nt, Artificial Sequence
  Description of Artificial Sequence: Synthetic oligonucleotide
gguauauguuccucaggga

SEQ ID NO: 734119 - RNA, 19 nt, Artificial Sequence
  Description of Artificial Sequence: Synthetic oligonucleotide
ccuuuuagcacaguguaca

SEQ ID NO: 734120 - RNA, 19 nt, Artificial Sequence
  Description of Artificial Sequence: Synthetic oligonucleotide
gaaaguagguuuggaugaa

SEQ ID NO: 734121 - RNA, 19 nt, Artificial Sequence
  Description of Artificial Sequence: Synthetic oligonucleotide
cagggguuacuuugccuug

SEQ ID NO: 734122 - RNA, 19 nt, Artificial Sequence
  Description of Artificial Sequence: Synthetic oligonucleotide
caacgagaauggacuuggc

SEQ ID NO: 734123 - RNA, 19 nt, Artificial Sequence
  Description of Artificial Sequence: Synthetic oligonucleotide
gaccgguucucgcucuaac

SEQ ID NO: 734124 - RNA, 19 nt, Artificial Sequence
  Description of Artificial Sequence: Synthetic oligonucleotide
gcuguacugucugauacac

SEQ ID NO: 734125 - RNA, 19 nt, Artificial Sequence
  Description of Artificial Sequence: Synthetic oligonucleotide
aacucaaguuacacacuua

SEQ ID NO: 734126 - RNA, 19 nt, Artificial Sequence
  Description of Artificial Sequence: Synthetic oligonucleotide
gcuagcuagagagcauuag

SEQ ID NO: 734127 - RNA, 19 nt, Artificial Sequence
  Description of Artificial Sequence: Synthetic oligonucleotide
aaaggacacuggccauaaa

SEQ ID NO: 734128 - RNA, 19 nt, Artificial Sequence
  Description of Artificial Sequence: Synthetic oligonucleotide
uacuuugccuugaccgguu

SEQ ID NO: 734129 - RNA, 19 nt, Artificial Sequence
  Description of Artificial Sequence: Synthetic oligonucleotide
ugcuuucucggaguuucaa

SEQ ID NO: 734130 - RNA, 19 nt, Artificial Sequence
  Description of Artificial Sequence: Synthetic oligonucleotide
uucaaacguuagucacacu

SEQ ID NO: 734131 - RNA, 19 nt, Artificial Sequence
  Description of Artificial Sequence: Synthetic oligonucleotide
ccugguucacagacuuucg

SEQ ID NO: 734132 - RNA, 19 nt, Artificial Sequence
  Description of Artificial Sequence: Synthetic oligonucleotide
gcuuacacaaacucaaguu

SEQ ID NO: 734133 - RNA, 19 nt, Artificial Sequence
  Description of Artificial Sequence: Synthetic oligonucleotide
gggacuuauacuacaaaua

SEQ ID NO: 734134 - RNA, 19 nt, Artificial Sequence
  Description of Artificial Sequence: Synthetic oligonucleotide
acggcagagggagcccacc

SEQ ID NO: 734135 - RNA, 19 nt, Artificial Sequence
  Description of Artificial Sequence: Synthetic oligonucleotide
cagaucaccgcacggcaga

SEQ ID NO: 734136 - RNA, 19 nt, Artificial Sequence
  Description of Artificial Sequence: Synthetic oligonucleotide
ggauagaggcuaaugacua

SEQ ID NO: 734137 - RNA, 19 nt, Artificial Sequence
  Description of Artificial Sequence: Synthetic oligonucleotide
guauggacuucuguuccuc

SEQ ID NO: 734138 - RNA, 19 nt, Artificial Sequence
  Description of Artificial Sequence: Synthetic oligonucleotide
ggcguuuaucaucaauuaa

SEQ ID NO: 734139 - RNA, 19 nt, Artificial Sequence
  Description of Artificial Sequence: Synthetic oligonucleotide
ccuagguaaugcccuuugg

SEQ ID NO: 734140 - RNA, 19 nt, Artificial Sequence
  Description of Artificial Sequence: Synthetic oligonucleotide
ggugcucuaauguuccucu

SEQ ID NO: 734141 - RNA, 19 nt, Artificial Sequence
  Description of Artificial Sequence: Synthetic oligonucleotide
acaauccuaggggccaacu

SEQ ID NO: 734142 - RNA, 19 nt, Artificial Sequence
  Description of Artificial Sequence: Synthetic oligonucleotide
agacuuucgguaacggguu

SEQ ID NO: 734143 - RNA, 19 nt, Artificial Sequence
  Description of Artificial Sequence: Synthetic oligonucleotide
aggguuaguguugcauaca

SEQ ID NO: 734144 - RNA, 19 nt, Artificial Sequence
  Description of Artificial Sequence: Synthetic oligonucleotide
uagagagcauuagguuaga

SEQ ID NO: 734145 - RNA, 19 nt, Artificial Sequence
  Description of Artificial Sequence: Synthetic oligonucleotide
gguucucgcucuaaccagc

SEQ ID NO: 734146 - RNA, 19 nt, Artificial Sequence
  Description of Artificial Sequence: Synthetic oligonucleotide
gugcucuaauguuccucug

SEQ ID NO: 734147 - RNA, 19 nt, Artificial Sequence
  Description of Artificial Sequence: Synthetic oligonucleotide
aauuugcuacaagcauaua

SEQ ID NO: 734148 - RNA, 19 nt, Artificial Sequence
  Description of Artificial Sequence: Synthetic oligonucleotide
agaccuagguaaugcccuu

SEQ ID NO: 734149 - RNA, 19 nt, Artificial Sequence
  Description of Artificial Sequence: Synthetic oligonucleotide
cagagcacggugacagaca

SEQ ID NO: 734150 - RNA, 19 nt, Artificial Sequence
  Description of Artificial Sequence: Synthetic oligonucleotide
uccacauuuugggcguuua

SEQ ID NO: 734151 - RNA, 19 nt, Artificial Sequence
  Description of Artificial Sequence: Synthetic oligonucleotide
ggguuacuuugccuugacc

SEQ ID NO: 734152 - RNA, 19 nt, Artificial Sequence
  Description of Artificial Sequence: Synthetic oligonucleotide
caucauacguggugcaccu

SEQ ID NO: 734153 - RNA, 19 nt, Artificial Sequence
  Description of Artificial Sequence: Synthetic oligonucleotide
gcuuacucugacaggucag

SEQ ID NO: 734154 - RNA, 19 nt, Artificial Sequence
  Description of Artificial Sequence: Synthetic oligonucleotide
cugaaaggaaaaguccugu

SEQ ID NO: 734155 - RNA, 19 nt, Artificial Sequence
  Description of Artificial Sequence: Synthetic oligonucleotide
agucugacacggagaagca

SEQ ID NO: 734156 - RNA, 19 nt, Artificial Sequence
  Description of Artificial Sequence: Synthetic oligonucleotide
ggugauagccagaggaaaa

SEQ ID NO: 734157 - RNA, 19 nt, Artificial Sequence
  Description of Artificial Sequence: Synthetic oligonucleotide
acagacguuagcagucaaa

SEQ ID NO: 734158 - RNA, 19 nt, Artificial Sequence
  Description of Artificial Sequence: Synthetic oligonucleotide
gacaccaaauauacuuuau

SEQ ID NO: 734159 - RNA, 19 nt, Artificial Sequence
  Description of Artificial Sequence: Synthetic oligonucleotide
auugcacauuaugcuuuga

SEQ ID NO: 734160 - RNA, 19 nt, Artificial Sequence
  Description of Artificial Sequence: Synthetic oligonucleotide
ccugcagaucaccgcacgg

SEQ ID NO: 734161 - RNA, 19 nt, Artificial Sequence
  Description of Artificial Sequence: Synthetic oligonucleotide
cuuggcuacuguagugcaa

SEQ ID NO: 734162 - RNA, 19 nt, Artificial Sequence
  Description of Artificial Sequence: Synthetic oligonucleotide
cgcacggcagauauacugc

SEQ ID NO: 734163 - RNA, 19 nt, Artificial Sequence
  Description of Artificial Sequence: Synthetic oligonucleotide
guuagcagucaaaggguua

SEQ ID NO: 734164 - RNA, 19 nt, Artificial Sequence
  Description of Artificial Sequence: Synthetic oligonucleotide
agggguuacuuugccuuga

SEQ ID NO: 734165 - RNA, 19 nt, Artificial Sequence
  Description of Artificial Sequence: Synthetic oligonucleotide
acccuaacuuucuguuuua

SEQ ID NO: 734166 - RNA, 19 nt, Artificial Sequence
  Description of Artificial Sequence: Synthetic oligonucleotide
acagaagaucccacuggau

SEQ ID NO: 734167 - RNA, 19 nt, Artificial Sequence
  Description of Artificial Sequence: Synthetic oligonucleotide
ggcuguacugucugauaca

SEQ ID NO: 734168 - RNA, 19 nt, Artificial Sequence
  Description of Artificial Sequence: Synthetic oligonucleotide
gguuuggaugaaguucuca

SEQ ID NO: 734169 - RNA, 19 nt, Artificial Sequence
  Description of Artificial Sequence: Synthetic oligonucleotide
ggcaccuuugucugaguaa

SEQ ID NO: 734170 - RNA, 19 nt, Artificial Sequence
  Description of Artificial Sequence: Synthetic oligonucleotide
gcucuaauguuccucugcu

SEQ ID NO: 734171 - RNA, 19 nt, Artificial Sequence
  Description of Artificial Sequence: Synthetic oligonucleotide
cuauggcuguacugucuga

SEQ ID NO: 734172 - RNA, 19 nt, Artificial Sequence
  Description of Artificial Sequence: Synthetic oligonucleotide
uggcuacuguagugcaaau

SEQ ID NO: 734173 - RNA, 19 nt, Artificial Sequence
  Description of Artificial Sequence: Synthetic oligonucleotide
cacaaacugaaacgagagu

SEQ ID NO: 734174 - RNA, 19 nt, Artificial Sequence
  Description of Artificial Sequence: Synthetic oligonucleotide
guaacggguuugugaugca

SEQ ID NO: 734175 - RNA, 19 nt, Artificial Sequence
  Description of Artificial Sequence: Synthetic oligonucleotide
cagggacuuauacuacaaa

SEQ ID NO: 734176 - RNA, 19 nt, Artificial Sequence
  Description of Artificial Sequence: Synthetic oligonucleotide
aguugccaaguaacguuau

SEQ ID NO: 734177 - RNA, 19 nt, Artificial Sequence
  Description of Artificial Sequence: Synthetic oligonucleotide
caaaccgguaaguggugcu

SEQ ID NO: 734178 - RNA, 19 nt, Artificial Sequence
  Description of Artificial Sequence: Synthetic oligonucleotide
uugaccgguucucgcucua

SEQ ID NO: 734179 - RNA, 19 nt, Artificial Sequence
  Description of Artificial Sequence: Synthetic oligonucleotide
cucuaaccagcgaacccua

SEQ ID NO: 734180 - RNA, 19 nt, Artificial Sequence
  Description of Artificial Sequence: Synthetic oligonucleotide
ccaaaccgguaaguggugc

SEQ ID NO: 734181 - RNA, 19 nt, Artificial Sequence
  Description of Artificial Sequence: Synthetic oligonucleotide
ccgguucucgcucuaacca

SEQ ID NO: 734182 - RNA, 19 nt, Artificial Sequence
  Description of Artificial Sequence: Synthetic oligonucleotide
gcuaaugacuaagcucaca

SEQ ID NO: 734183 - RNA, 19 nt, Artificial Sequence
  Description of Artificial Sequence: Synthetic oligonucleotide
gcccuggugauagccagag

SEQ ID NO: 734184 - RNA, 19 nt, Artificial Sequence
  Description of Artificial Sequence: Synthetic oligonucleotide
aucauacguggugcaccug

SEQ ID NO: 734185 - RNA, 19 nt, Artificial Sequence
  Description of Artificial Sequence: Synthetic oligonucleotide
cggagaagcaacacuagaa

SEQ ID NO: 734186 - RNA, 19 nt, Artificial Sequence
  Description of Artificial Sequence: Synthetic oligonucleotide
gcucuaaccagcgaacccu

SEQ ID NO: 734187 - RNA, 19 nt, Artificial Sequence
  Description of Artificial Sequence: Synthetic oligonucleotide
gggguuacuuugccuugac

SEQ ID NO: 734188 - RNA, 19 nt, Artificial Sequence
  Description of Artificial Sequence: Synthetic oligonucleotide
ugaccgguucucgcucuaa

SEQ ID NO: 734189 - RNA, 19 nt, Artificial Sequence
  Description of Artificial Sequence: Synthetic oligonucleotide
gaacucagucugacacgga

SEQ ID NO: 734190 - RNA, 19 nt, Artificial Sequence
  Description of Artificial Sequence: Synthetic oligonucleotide
cgcucuaaccagcgaaccc

SEQ ID NO: 734191 - RNA, 19 nt, Artificial Sequence
  Description of Artificial Sequence: Synthetic oligonucleotide
gccuuuuagcacaguguac

SEQ ID NO: 734192 - RNA, 19 nt, Artificial Sequence
  Description of Artificial Sequence: Synthetic oligonucleotide
agaucaccgcacggcagau

SEQ ID NO: 734193 - RNA, 19 nt, Artificial Sequence
  Description of Artificial Sequence: Synthetic oligonucleotide
cgguucucgcucuaaccag

SEQ ID NO: 734194 - RNA, 19 nt, Artificial Sequence
  Description of Artificial Sequence: Synthetic oligonucleotide
caaguucucuucacagcau

SEQ ID NO: 734195 - RNA, 19 nt, Artificial Sequence
  Description of Artificial Sequence: Synthetic oligonucleotide
cuuucgguaacggguuugu

SEQ ID NO: 734196 - RNA, 19 nt, Artificial Sequence
  Description of Artificial Sequence: Synthetic oligonucleotide
gagaauggacuuggcuacu

SEQ ID NO: 734197 - RNA, 19 nt, Artificial Sequence
  Description of Artificial Sequence: Synthetic oligonucleotide
guccucaguauggacuucu

SEQ ID NO: 734198 - RNA, 19 nt, Artificial Sequence
  Description of Artificial Sequence: Synthetic oligonucleotide
cuugaccgguucucgcucu

SEQ ID NO: 734199 - RNA, 19 nt, Artificial Sequence
  Description of Artificial Sequence: Synthetic oligonucleotide
ccuugaccgguucucgcuc

SEQ ID NO: 734200 - RNA, 19 nt, Artificial Sequence
  Description of Artificial Sequence: Synthetic oligonucleotide
cuuugccuugaccgguucu

SEQ ID NO: 734201 - RNA, 19 nt, Artificial Sequence
  Description of Artificial Sequence: Synthetic oligonucleotide
gcauggaccccaggagugc

SEQ ID NO: 734202 - RNA, 19 nt, Artificial Sequence
  Description of Artificial Sequence: Synthetic oligonucleotide
ccccagaguuuccucacuc

SEQ ID NO: 734203 - RNA, 19 nt, Artificial Sequence
  Description of Artificial Sequence: Synthetic oligonucleotide
gcgaacccuaacuuucugu

SEQ ID NO: 734204 - RNA, 19 nt, Artificial Sequence
  Description of Artificial Sequence: Synthetic oligonucleotide
guauuggguugcaggugaa

SEQ ID NO: 734205 - RNA, 19 nt, Artificial Sequence
  Description of Artificial Sequence: Synthetic oligonucleotide
ggcuaaugacuaagcucac

SEQ ID NO: 734206 - RNA, 19 nt, Artificial Sequence
  Description of Artificial Sequence: Synthetic oligonucleotide
gacuuucgguaacggguuu

SEQ ID NO: 734207 - RNA, 19 nt, Artificial Sequence
  Description of Artificial Sequence: Synthetic oligonucleotide
ggcuacuguagugcaaaua

SEQ ID NO: 734208 - RNA, 19 nt, Artificial Sequence
  Description of Artificial Sequence: Synthetic oligonucleotide
gaucaccgcacggcagaua

SEQ ID NO: 734209 - RNA, 19 nt, Artificial Sequence
  Description of Artificial Sequence: Synthetic oligonucleotide
gccuugaccgguucucgcu

SEQ ID NO: 734210 - RNA, 19 nt, Artificial Sequence
  Description of Artificial Sequence: Synthetic oligonucleotide
ggguuacuuuccagguaca

SEQ ID NO: 734211 - RNA, 19 nt, Artificial Sequence
  Description of Artificial Sequence: Synthetic oligonucleotide
ccccaaaccauuccaugua

SEQ ID NO: 734212 - RNA, 19 nt, Artificial Sequence
  Description of Artificial Sequence: Synthetic oligonucleotide
gaccuagguaaugcccuuu

SEQ ID NO: 734213 - RNA, 19 nt, Artificial Sequence
  Description of Artificial Sequence: Synthetic oligonucleotide
ccuaggcaccuuugucuga

SEQ ID NO: 734214 - RNA, 19 nt, Artificial Sequence
  Description of Artificial Sequence: Synthetic oligonucleotide
cgaacccuaacuuucuguu

SEQ ID NO: 734215 - RNA, 19 nt, Artificial Sequence
  Description of Artificial Sequence: Synthetic oligonucleotide
cguucacucaaguuguauu

SEQ ID NO: 734216 - RNA, 19 nt, Artificial Sequence
  Description of Artificial Sequence: Synthetic oligonucleotide
cgguaacggguuugugaug

SEQ ID NO: 734217 - RNA, 19 nt, Artificial Sequence
  Description of Artificial Sequence: Synthetic oligonucleotide
cugaaacgagagugccuuu

SEQ ID NO: 734218 - RNA, 19 nt, Artificial Sequence
  Description of Artificial Sequence: Synthetic oligonucleotide
ccauccccguuuugcauua

SEQ ID NO: 734219 - RNA, 19 nt, Artificial Sequence
  Description of Artificial Sequence: Synthetic oligonucleotide
gcacggugacagacaacga

SEQ ID NO: 734220 - RNA, 19 nt, Artificial Sequence
  Description of Artificial Sequence: Synthetic oligonucleotide
cccauccaauauuaauaau

SEQ ID NO: 734221 - RNA, 19 nt, Artificial Sequence
  Description of Artificial Sequence: Synthetic oligonucleotide
gugaugcagcugggugcuc

SEQ ID NO: 734222 - RNA, 19 nt, Artificial Sequence
  Description of Artificial Sequence: Synthetic oligonucleotide
gcguucacucaaguuguau

SEQ ID NO: 734223 - RNA, 19 nt, Artificial Sequence
  Description of Artificial Sequence: Synthetic oligonucleotide
cguuagcagucaaaggguu

SEQ ID NO: 734224 - RNA, 19 nt, Artificial Sequence
  Description of Artificial Sequence: Synthetic oligonucleotide
cauccccguuuugcauuaa

SEQ ID NO: 734225 - RNA, 19 nt, Artificial Sequence
  Description of Artificial Sequence: Synthetic oligonucleotide
uacaauaguguuuaaaugg

SEQ ID NO: 734226 - RNA, 19 nt, Artificial Sequence
  Description of Artificial Sequence: Synthetic oligonucleotide
uaagauacaaacauuaucu

SEQ ID NO: 734227 - RNA, 19 nt, Artificial Sequence
  Description of Artificial Sequence: Synthetic oligonucleotide
aaaagaaacaggcucauug

SEQ ID NO: 734228 - RNA, 19 nt, Artificial Sequence
  Description of Artificial Sequence: Synthetic oligonucleotide
ugaauuaguaacuauacca

SEQ ID NO: 734229 - RNA, 19 nt, Artificial Sequence
  Description of Artificial Sequence: Synthetic oligonucleotide
uuaacacacaguaauaucc

SEQ ID NO: 734230 - RNA, 19 nt, Artificial Sequence
  Description of Artificial Sequence: Synthetic oligonucleotide
auaguuuucaaccaaagca

SEQ ID NO: 734231 - RNA, 19 nt, Artificial Sequence
  Description of Artificial Sequence: Synthetic oligonucleotide
ucucuaaucacuaugaaaa

SEQ ID NO: 734232 - RNA, 19 nt, Artificial Sequence
  Description of Artificial Sequence: Synthetic oligonucleotide
cacacaauaggcaagauag

SEQ ID NO: 734233 - RNA, 19 nt, Artificial Sequence
  Description of Artificial Sequence: Synthetic oligonucleotide
uaugaaaacggcaagugcc

SEQ ID NO: 734234 - RNA, 19 nt, Artificial Sequence
  Description of Artificial Sequence: Synthetic oligonucleotide
cuaaucacuaugaaaacgg

SEQ ID NO: 734235 - RNA, 19 nt, Artificial Sequence
  Description of Artificial Sequence: Synthetic oligonucleotide
uuauaaauucaccuaagug

SEQ ID NO: 734236 - RNA, 19 nt, Artificial Sequence
  Description of Artificial Sequence: Synthetic oligonucleotide
gagacauuaagauaagacc

SEQ ID NO: 734237 - RNA, 19 nt, Artificial Sequence
  Description of Artificial Sequence: Synthetic oligonucleotide
ucuacaaucucccaauccc

SEQ ID NO: 734238 - RNA, 19 nt, Artificial Sequence
  Description of Artificial Sequence: Synthetic oligonucleotide
aauaguguuuaaauggaac

SEQ ID NO: 734239 - RNA, 19 nt, Artificial Sequence
  Description of Artificial Sequence: Synthetic oligonucleotide
uaaugauggaccaacagac

SEQ ID NO: 734240 - RNA, 19 nt, Artificial Sequence
  Description of Artificial Sequence: Synthetic oligonucleotide
aaauauuacuaccaacugu

SEQ ID NO: 734241 - RNA, 19 nt, Artificial Sequence
  Description of Artificial Sequence: Synthetic oligonucleotide
uccagacacacuuaaaagg

SEQ ID NO: 734242 - RNA, 19 nt, Artificial Sequence
  Description of Artificial Sequence: Synthetic oligonucleotide
ugucuacucagacagaugc

SEQ ID NO: 734243 - RNA, 19 nt, Artificial Sequence
  Description of Artificial Sequence: Synthetic oligonucleotide
ucuaauguggacuccgugg

SEQ ID NO: 734244 - RNA, 19 nt, Artificial Sequence
  Description of Artificial Sequence: Synthetic oligonucleotide
uuuauaccuucuaaugugg

SEQ ID NO: 734245 - RNA, 19 nt, Artificial Sequence
  Description of Artificial Sequence: Synthetic oligonucleotide
gaauaguugcaauaaagug

SEQ ID NO: 734246 - RNA, 19 nt, Artificial Sequence
  Description of Artificial Sequence: Synthetic oligonucleotide
aagaccucaacauagugga

SEQ ID NO: 734247 - RNA, 19 nt, Artificial Sequence
  Description of Artificial Sequence: Synthetic oligonucleotide
uuugcuuaauuucugguga

SEQ ID NO: 734248 - RNA, 19 nt, Artificial Sequence
  Description of Artificial Sequence: Synthetic oligonucleotide
uuuaaauggaacuacgcau

SEQ ID NO: 734249 - RNA, 19 nt, Artificial Sequence
  Description of Artificial Sequence: Synthetic oligonucleotide
uguggaauugguaaauuug

SEQ ID NO: 734250 - RNA, 19 nt, Artificial Sequence
  Description of Artificial Sequence: Synthetic oligonucleotide
aaauuauaguuuucaacca

SEQ ID NO: 734251 - RNA, 19 nt, Artificial Sequence
  Description of Artificial Sequence: Synthetic oligonucleotide
auaguggaaacauuuuaac

SEQ ID NO: 734252 - RNA, 19 nt, Artificial Sequence
  Description of Artificial Sequence: Synthetic oligonucleotide
guuccuacuacacucauag

SEQ ID NO: 734253 - RNA, 19 nt, Artificial Sequence
  Description of Artificial Sequence: Synthetic oligonucleotide
agaugcauauuccuagacc

SEQ ID NO: 734254 - RNA, 19 nt, Artificial Sequence
  Description of Artificial Sequence: Synthetic oligonucleotide
aaaucacucccauaaaccu

SEQ ID NO: 734255 - RNA, 19 nt, Artificial Sequence
  Description of Artificial Sequence: Synthetic oligonucleotide
ucuaaucacuaugaaaacg

SEQ ID NO: 734256 - RNA, 19 nt, Artificial Sequence
  Description of Artificial Sequence: Synthetic oligonucleotide
uguuuauaccuucuaaugu

SEQ ID NO: 734257 - RNA, 19 nt, Artificial Sequence
  Description of Artificial Sequence: Synthetic oligonucleotide
cuuauuaccuuucaaauga

SEQ ID NO: 734258 - RNA, 19 nt, Artificial Sequence
  Description of Artificial Sequence: Synthetic oligonucleotide
gaauuaguaacuauaccag

SEQ ID NO: 734259 - RNA, 19 nt, Artificial Sequence
  Description of Artificial Sequence: Synthetic oligonucleotide
aacuauaccagcaaaauuu

SEQ ID NO: 734260 - RNA, 19 nt, Artificial Sequence
  Description of Artificial Sequence: Synthetic oligonucleotide
uccuaaaauauuacuacca

SEQ ID NO: 734261 - RNA, 19 nt, Artificial Sequence
  Description of Artificial Sequence: Synthetic oligonucleotide
uuacaauaguguuuaaaug

SEQ ID NO: 734262 - RNA, 19 nt, Artificial Sequence
  Description of Artificial Sequence: Synthetic oligonucleotide
uauacccucagcaauauua

SEQ ID NO: 734263 - RNA, 19 nt, Artificial Sequence
  Description of Artificial Sequence: Synthetic oligonucleotide
uguuuaaauggaacuacgc

SEQ ID NO: 734264 - RNA, 19 nt, Artificial Sequence
  Description of Artificial Sequence: Synthetic oligonucleotide
aaauucaccuaagugauga

SEQ ID NO: 734265 - RNA, 19 nt, Artificial Sequence
  Description of Artificial Sequence: Synthetic oligonucleotide
ugguauguuguuuuaagug

SEQ ID NO: 734266 - RNA, 19 nt, Artificial Sequence
  Description of Artificial Sequence: Synthetic oligonucleotide
uuaaauggaacuacgcauc

SEQ ID NO: 734267 - RNA, 19 nt, Artificial Sequence
  Description of Artificial Sequence: Synthetic oligonucleotide
auaguguuuaaauggaacu

SEQ ID NO: 734268 - RNA, 19 nt, Artificial Sequence
  Description of Artificial Sequence: Synthetic oligonucleotide
uugaacaaguuuuacacaa

SEQ ID NO: 734269 - RNA, 19 nt, Artificial Sequence
  Description of Artificial Sequence: Synthetic oligonucleotide
uagaccucugaaaagaaac

SEQ ID NO: 734270 - RNA, 19 nt, Artificial Sequence
  Description of Artificial Sequence: Synthetic oligonucleotide
auauccaguguuuauaccu

SEQ ID NO: 734271 - RNA, 19 nt, Artificial Sequence
  Description of Artificial Sequence: Synthetic oligonucleotide
uguugcaaaacaucugaag

SEQ ID NO: 734272 - RNA, 19 nt, Artificial Sequence
  Description of Artificial Sequence: Synthetic oligonucleotide
uagggcuauggcaaaaggg

SEQ ID NO: 734273 - RNA, 19 nt, Artificial Sequence
  Description of Artificial Sequence: Synthetic oligonucleotide
uaaauauccugaauuagua

SEQ ID NO: 734274 - RNA, 19 nt, Artificial Sequence
  Description of Artificial Sequence: Synthetic oligonucleotide
auuaguucuguaugucuac

SEQ ID NO: 734275 - RNA, 19 nt, Artificial Sequence
  Description of Artificial Sequence: Synthetic oligonucleotide
aaaaugcuaucugcguucc

SEQ ID NO: 734276 - RNA, 19 nt, Artificial Sequence
  Description of Artificial Sequence: Synthetic oligonucleotide
ugacaauaggcacauuacc

SEQ ID NO: 734277 - RNA, 19 nt, Artificial Sequence
  Description of Artificial Sequence: Synthetic oligonucleotide
ucucaccugucucagaaag

SEQ ID NO: 734278 - RNA, 19 nt, Artificial Sequence
  Description of Artificial Sequence: Synthetic oligonucleotide
ugugguauguuguuuuaag

SEQ ID NO: 734279 - RNA, 19 nt, Artificial Sequence
  Description of Artificial Sequence: Synthetic oligonucleotide
ugaaggaugaccuccgcug

SEQ ID NO: 734280 - RNA, 19 nt, Artificial Sequence
  Description of Artificial Sequence: Synthetic oligonucleotide
aauuuaccuccaguguucc

SEQ ID NO: 734281 - RNA, 19 nt, Artificial Sequence
  Description of Artificial Sequence: Synthetic oligonucleotide
gacaauaggcacauuaccc

SEQ ID NO: 734282 - RNA, 19 nt, Artificial Sequence
  Description of Artificial Sequence: Synthetic oligonucleotide
aaauuuaccuccaguguuc

SEQ ID NO: 734283 - RNA, 19 nt, Artificial Sequence
  Description of Artificial Sequence: Synthetic oligonucleotide
ucaguagggaucuucguug

SEQ ID NO: 734284 - RNA, 19 nt, Artificial Sequence
  Description of Artificial Sequence: Synthetic oligonucleotide
aggcacauuacccaugcgg

SEQ ID NO: 734285 - RNA, 19 nt, Artificial Sequence
  Description of Artificial Sequence: Synthetic oligonucleotide
agacauuaagauaagacca

SEQ ID NO: 734286 - RNA, 19 nt, Artificial Sequence
  Description of Artificial Sequence: Synthetic oligonucleotide
caacaaaccuuuaaucacc

SEQ ID NO: 734287 - RNA, 19 nt, Artificial Sequence
  Description of Artificial Sequence: Synthetic oligonucleotide
uccuacuacacucauaguu

SEQ ID NO: 734288 - RNA, 19 nt, Artificial Sequence
  Description of Artificial Sequence: Synthetic oligonucleotide
cuaucuuuugguagguagg

SEQ ID NO: 734289 - RNA, 19 nt, Artificial Sequence
  Description of Artificial Sequence: Synthetic oligonucleotide
auagauuaguucuguaugu

SEQ ID NO: 734290 - RNA, 19 nt, Artificial Sequence
  Description of Artificial Sequence: Synthetic oligonucleotide
gauaagaccaaauuauagu

SEQ ID NO: 734291 - RNA, 19 nt, Artificial Sequence
  Description of Artificial Sequence: Synthetic oligonucleotide
aauagucaacucuuuuccu

SEQ ID NO: 734292 - RNA, 19 nt, Artificial Sequence
  Description of Artificial Sequence: Synthetic oligonucleotide
ucaugaguuggcaagugcu

SEQ ID NO: 734293 - RNA, 19 nt, Artificial Sequence
  Description of Artificial Sequence: Synthetic oligonucleotide
uucaccuaagugaugauua

SEQ ID NO: 734294 - RNA, 19 nt, Artificial Sequence
  Description of Artificial Sequence: Synthetic oligonucleotide
guuaaugauggaccaacag

SEQ ID NO: 734295 - RNA, 19 nt, Artificial Sequence
  Description of Artificial Sequence: Synthetic oligonucleotide
uacgcaucuacaaucuccc

SEQ ID NO: 734296 - RNA, 19 nt, Artificial Sequence
  Description of Artificial Sequence: Synthetic oligonucleotide
uguagugggaagucaguag

SEQ ID NO: 734297 - RNA, 19 nt, Artificial Sequence
  Description of Artificial Sequence: Synthetic oligonucleotide
aaacgguuaaugccuaaga

SEQ ID NO: 734298 - RNA, 19 nt, Artificial Sequence
  Description of Artificial Sequence: Synthetic oligonucleotide
agcaacucaaaugggaacg

SEQ ID NO: 734299 - RNA, 19 nt, Artificial Sequence
  Description of Artificial Sequence: Synthetic oligonucleotide
uuagacugugguauguugu

SEQ ID NO: 734300 - RNA, 19 nt, Artificial Sequence
  Description of Artificial Sequence: Synthetic oligonucleotide
guuuaaauggaacuacgca

SEQ ID NO: 734301 - RNA, 19 nt, Artificial Sequence
  Description of Artificial Sequence: Synthetic oligonucleotide
uuuagaugcugcauggcuc

SEQ ID NO: 734302 - RNA, 19 nt, Artificial Sequence
  Description of Artificial Sequence: Synthetic oligonucleotide
gaugcauauuccuagaccu

SEQ ID NO: 734303 - RNA, 19 nt, Artificial Sequence
  Description of Artificial Sequence: Synthetic oligonucleotide
gaguuuauggacugacugc

SEQ ID NO: 734304 - RNA, 19 nt, Artificial Sequence
  Description of Artificial Sequence: Synthetic oligonucleotide
acaauaggcacauuaccca

SEQ ID NO: 734305 - RNA, 19 nt, Artificial Sequence
  Description of Artificial Sequence: Synthetic oligonucleotide
aguguuuauaccuucuaau

SEQ ID NO: 734306 - RNA, 19 nt, Artificial Sequence
  Description of Artificial Sequence: Synthetic oligonucleotide
accuaagugaugauuaggg

SEQ ID NO: 734307 - RNA, 19 nt, Artificial Sequence
  Description of Artificial Sequence: Synthetic oligonucleotide
cuacgcaucuacaaucucc

SEQ ID NO: 734308 - RNA, 19 nt, Artificial Sequence
  Description of Artificial Sequence: Synthetic oligonucleotide
caauccuggcuauauaccc

SEQ ID NO: 734309 - RNA, 19 nt, Artificial Sequence
  Description of Artificial Sequence: Synthetic oligonucleotide
uuaguaacuauaccagcaa

SEQ ID NO: 734310 - RNA, 19 nt, Artificial Sequence
  Description of Artificial Sequence: Synthetic oligonucleotide
guucacucaguccagacac

SEQ ID NO: 734311 - RNA, 19 nt, Artificial Sequence
  Description of Artificial Sequence: Synthetic oligonucleotide
gaacgcugaaaugacaugc

SEQ ID NO: 734312 - RNA, 19 nt, Artificial Sequence
  Description of Artificial Sequence: Synthetic oligonucleotide
agcuugagacaucacuggc

SEQ ID NO: 734313 - RNA, 19 nt, Artificial Sequence
  Description of Artificial Sequence: Synthetic oligonucleotide
acaggagacauuaagauaa

SEQ ID NO: 734314 - RNA, 19 nt, Artificial Sequence
  Description of Artificial Sequence: Synthetic oligonucleotide
agugcuaguaucaguaggg

SEQ ID NO: 734315 - RNA, 19 nt, Artificial Sequence
  Description of Artificial Sequence: Synthetic oligonucleotide
gaaagggugagcuguguug

SEQ ID NO: 734316 - RNA, 19 nt, Artificial Sequence
  Description of Artificial Sequence: Synthetic oligonucleotide
agauaagaccaaauuauag

SEQ ID NO: 734317 - RNA, 19 nt, Artificial Sequence
  Description of Artificial Sequence: Synthetic oligonucleotide
aacgguuaaugccuaagau

SEQ ID NO: 734318 - RNA, 19 nt, Artificial Sequence
  Description of Artificial Sequence: Synthetic oligonucleotide
cucaauccuggcuauauac

SEQ ID NO: 734319 - RNA, 19 nt, Artificial Sequence
  Description of Artificial Sequence: Synthetic oligonucleotide
aaaacgguuaaugccuaag

SEQ ID NO: 734320 - RNA, 19 nt, Artificial Sequence
  Description of Artificial Sequence: Synthetic oligonucleotide
uaaucacuaugaaaacggc

SEQ ID NO: 734321 - RNA, 19 nt, Artificial Sequence
  Description of Artificial Sequence: Synthetic oligonucleotide
uauauaaguuugcuuaauu

SEQ ID NO: 734322 - RNA, 19 nt, Artificial Sequence
  Description of Artificial Sequence: Synthetic oligonucleotide
ucuguagugucagagagaa

SEQ ID NO: 734323 - RNA, 19 nt, Artificial Sequence
  Description of Artificial Sequence: Synthetic oligonucleotide
agggcuauggcaaaagggg

SEQ ID NO: 734324 - RNA, 19 nt, Artificial Sequence
  Description of Artificial Sequence: Synthetic oligonucleotide
auagguuuacaauaguguu

SEQ ID NO: 734325 - RNA, 19 nt, Artificial Sequence
  Description of Artificial Sequence: Synthetic oligonucleotide
aaucuaccucuguaguguc

SEQ ID NO: 734326 - RNA, 19 nt, Artificial Sequence
  Description of Artificial Sequence: Synthetic oligonucleotide
augaauguuugccucuauc

SEQ ID NO: 734327 - RNA, 19 nt, Artificial Sequence
  Description of Artificial Sequence: Synthetic oligonucleotide
ugcugcauggcuccuaagc

SEQ ID NO: 734328 - RNA, 19 nt, Artificial Sequence
  Description of Artificial Sequence: Synthetic oligonucleotide
uacuggaaaggugauaggc

SEQ ID NO: 734329 - RNA, 19 nt, Artificial Sequence
  Description of Artificial Sequence: Synthetic oligonucleotide
ucuaaaugaauaguugcaa

SEQ ID NO: 734330 - RNA, 19 nt, Artificial Sequence
  Description of Artificial Sequence: Synthetic oligonucleotide
uauuacuaccaacuguuua

SEQ ID NO: 734331 - RNA, 19 nt, Artificial Sequence
  Description of Artificial Sequence: Synthetic oligonucleotide
auuaguaacuauaccagca

SEQ ID NO: 734332 - RNA, 19 nt, Artificial Sequence
  Description of Artificial Sequence: Synthetic oligonucleotide
gaacuacgcaucuacaauc

SEQ ID NO: 734333 - RNA, 19 nt, Artificial Sequence
  Description of Artificial Sequence: Synthetic oligonucleotide
cuugagacaucacuggcug

SEQ ID NO: 734334 - RNA, 19 nt, Artificial Sequence
  Description of Artificial Sequence: Synthetic oligonucleotide
aguccagacacacuuaaaa

SEQ ID NO: 734335 - RNA, 19 nt, Artificial Sequence
  Description of Artificial Sequence: Synthetic oligonucleotide
uuuaccuccaguguuccca

SEQ ID NO: 734336 - RNA, 19 nt, Artificial Sequence
  Description of Artificial Sequence: Synthetic oligonucleotide
uauuccucccauaaaggau

SEQ ID NO: 734337 - RNA, 19 nt, Artificial Sequence
  Description of Artificial Sequence: Synthetic oligonucleotide
gguacuggaaaggugauag

SEQ ID NO: 734338 - RNA, 19 nt, Artificial Sequence
  Description of Artificial Sequence: Synthetic oligonucleotide
uucagggcacauuuaaaac

SEQ ID NO: 734339 - RNA, 19 nt, Artificial Sequence
  Description of Artificial Sequence: Synthetic oligonucleotide
uauaccuucuaauguggac

SEQ ID NO: 734340 - RNA, 19 nt, Artificial Sequence
  Description of Artificial Sequence: Synthetic oligonucleotide
cugacaauaggcacauuac

SEQ ID NO: 734341 - RNA, 19 nt, Artificial Sequence
  Description of Artificial Sequence: Synthetic oligonucleotide
acuaugaaaacggcaagug

SEQ ID NO: 734342 - RNA, 19 nt, Artificial Sequence
  Description of Artificial Sequence: Synthetic oligonucleotide
uguuuaccaacaaaccuuu

SEQ ID NO: 734343 - RNA, 19 nt, Artificial Sequence
  Description of Artificial Sequence: Synthetic oligonucleotide
accuuuaaucaccaaagaa

SEQ ID NO: 734344 - RNA, 19 nt, Artificial Sequence
  Description of Artificial Sequence: Synthetic oligonucleotide
guccagacacacuuaaaag

SEQ ID NO: 734345 - RNA, 19 nt, Artificial Sequence
  Description of Artificial Sequence: Synthetic oligonucleotide
acaguaauauccaagggaa

SEQ ID NO: 734346 - RNA, 19 nt, Artificial Sequence
  Description of Artificial Sequence: Synthetic oligonucleotide
uguuuuaagugugugcuau

SEQ ID NO: 734347 - RNA, 19 nt, Artificial Sequence
  Description of Artificial Sequence: Synthetic oligonucleotide
guaaauuugcagcuugaga

SEQ ID NO: 734348 - RNA, 19 nt, Artificial Sequence
  Description of Artificial Sequence: Synthetic oligonucleotide
auuccauggagcaaccggg

SEQ ID NO: 734349 - RNA, 19 nt, Artificial Sequence
  Description of Artificial Sequence: Synthetic oligonucleotide
aaaacggcaagugccuuug

SEQ ID NO: 734350 - RNA, 19 nt, Artificial Sequence
  Description of Artificial Sequence: Synthetic oligonucleotide
gagggacuagaaaaguggg

SEQ ID NO: 734351 - RNA, 19 nt, Artificial Sequence
  Description of Artificial Sequence: Synthetic oligonucleotide
acuacacucauaguuauau

SEQ ID NO: 734352 - RNA, 19 nt, Artificial Sequence
  Description of Artificial Sequence: Synthetic oligonucleotide
aguuugcuuaauuucuggu

SEQ ID NO: 734353 - RNA, 19 nt, Artificial Sequence
  Description of Artificial Sequence: Synthetic oligonucleotide
auaccuucuaauguggacu

SEQ ID NO: 734354 - RNA, 19 nt, Artificial Sequence
  Description of Artificial Sequence: Synthetic oligonucleotide
uagguuuacaauaguguuu

SEQ ID NO: 734355 - RNA, 19 nt, Artificial Sequence
  Description of Artificial Sequence: Synthetic oligonucleotide
uugccgaugaauguuugcc

SEQ ID NO: 734356 - RNA, 19 nt, Artificial Sequence
  Description of Artificial Sequence: Synthetic oligonucleotide
ucccauaaaccugcuacgg

SEQ ID NO: 734357 - RNA, 19 nt, Artificial Sequence
  Description of Artificial Sequence: Synthetic oligonucleotide
aacucaaaugggaacgcug

SEQ ID NO: 734358 - RNA, 19 nt, Artificial Sequence
  Description of Artificial Sequence: Synthetic oligonucleotide
guguuuaaauggaacuacg

SEQ ID NO: 734359 - RNA, 19 nt, Artificial Sequence
  Description of Artificial Sequence: Synthetic oligonucleotide
uucuaauguggacuccgug

SEQ ID NO: 734360 - RNA, 19 nt, Artificial Sequence
  Description of Artificial Sequence: Synthetic oligonucleotide
uggaacuacgcaucuacaa

SEQ ID NO: 734361 - RNA, 19 nt, Artificial Sequence
  Description of Artificial Sequence: Synthetic oligonucleotide
uacucagacagaugcauau

SEQ ID NO: 734362 - RNA, 19 nt, Artificial Sequence
  Description of Artificial Sequence: Synthetic oligonucleotide
aaucacucccauaaaccug

SEQ ID NO: 734363 - RNA, 19 nt, Artificial Sequence
  Description of Artificial Sequence: Synthetic oligonucleotide
uugcuuaauuucuggugag

SEQ ID NO: 734364 - RNA, 19 nt, Artificial Sequence
  Description of Artificial Sequence: Synthetic oligonucleotide
uguucaacacuguuuuaaa

SEQ ID NO: 734365 - RNA, 19 nt, Artificial Sequence
  Description of Artificial Sequence: Synthetic oligonucleotide
uuuauuuggcuaccuugaa

SEQ ID NO: 734366 - RNA, 19 nt, Artificial Sequence
  Description of Artificial Sequence: Synthetic oligonucleotide
gauagguuuacaauagugu

SEQ ID NO: 734367 - RNA, 19 nt, Artificial Sequence
  Description of Artificial Sequence: Synthetic oligonucleotide
uaguaacuauaccagcaaa

SEQ ID NO: 734368 - RNA, 19 nt, Artificial Sequence
  Description of Artificial Sequence: Synthetic oligonucleotide
uaaauucaccuaagugaug

SEQ ID NO: 734369 - RNA, 19 nt, Artificial Sequence
  Description of Artificial Sequence: Synthetic oligonucleotide
aauuugcagcuugagacau

SEQ ID NO: 734370 - RNA, 19 nt, Artificial Sequence
  Description of Artificial Sequence: Synthetic oligonucleotide
auaggcuugaacaaguuuu

SEQ ID NO: 734371 - RNA, 19 nt, Artificial Sequence
  Description of Artificial Sequence: Synthetic oligonucleotide
acaauaguguuuaaaugga

SEQ ID NO: 734372 - RNA, 19 nt, Artificial Sequence
  Description of Artificial Sequence: Synthetic oligonucleotide
uucacaagcuccucuuaga

SEQ ID NO: 734373 - RNA, 19 nt, Artificial Sequence
  Description of Artificial Sequence: Synthetic oligonucleotide
ugcauauuccuagaccucu

SEQ ID NO: 734374 - RNA, 19 nt, Artificial Sequence
  Description of Artificial Sequence: Synthetic oligonucleotide
guauguuguuuuaagugug

SEQ ID NO: 734375 - RNA, 19 nt, Artificial Sequence
  Description of Artificial Sequence: Synthetic oligonucleotide
gcuaccuugaaaucacucc

SEQ ID NO: 734376 - RNA, 19 nt, Artificial Sequence
  Description of Artificial Sequence: Synthetic oligonucleotide
ccugaauuaguaacuauac

SEQ ID NO: 734377 - RNA, 19 nt, Artificial Sequence
  Description of Artificial Sequence: Synthetic oligonucleotide
cucuaaucacuaugaaaac

SEQ ID NO: 734378 - RNA, 19 nt, Artificial Sequence
  Description of Artificial Sequence: Synthetic oligonucleotide
uauuaauauccaguguuua

SEQ ID NO: 734379 - RNA, 19 nt, Artificial Sequence
  Description of Artificial Sequence: Synthetic oligonucleotide
cugucgacaugccuugugg

SEQ ID NO: 734380 - RNA, 19 nt, Artificial Sequence
  Description of Artificial Sequence: Synthetic oligonucleotide
guagugggaagucaguaga

SEQ ID NO: 734381 - RNA, 19 nt, Artificial Sequence
  Description of Artificial Sequence: Synthetic oligonucleotide
auagucaacucuuuuccuu

SEQ ID NO: 734382 - RNA, 19 nt, Artificial Sequence
  Description of Artificial Sequence: Synthetic oligonucleotide
acgguuaaugccuaagaua

SEQ ID NO: 734383 - RNA, 19 nt, Artificial Sequence
  Description of Artificial Sequence: Synthetic oligonucleotide
gagagucucaucucaccug

SEQ ID NO: 734384 - RNA, 19 nt, Artificial Sequence
  Description of Artificial Sequence: Synthetic oligonucleotide
auuuaccuccaguguuccc

SEQ ID NO: 734385 - RNA, 19 nt, Artificial Sequence
  Description of Artificial Sequence: Synthetic oligonucleotide
ucugcguuccaacuuuaaa

SEQ ID NO: 734386 - RNA, 19 nt, Artificial Sequence
  Description of Artificial Sequence: Synthetic oligonucleotide
ucuacucagacagaugcau

SEQ ID NO: 734387 - RNA, 19 nt, Artificial Sequence
  Description of Artificial Sequence: Synthetic oligonucleotide
aagucaguagaaaggguga

SEQ ID NO: 734388 - RNA, 19 nt, Artificial Sequence
  Description of Artificial Sequence: Synthetic oligonucleotide
ugguaaauuugcagcuuga

SEQ ID NO: 734389 - RNA, 19 nt, Artificial Sequence
  Description of Artificial Sequence: Synthetic oligonucleotide
uuaaugccuaagauacaaa

SEQ ID NO: 734390 - RNA, 19 nt, Artificial Sequence
  Description of Artificial Sequence: Synthetic oligonucleotide
aacuacgcaucuacaaucu

SEQ ID NO: 734391 - RNA, 19 nt, Artificial Sequence
  Description of Artificial Sequence: Synthetic oligonucleotide
cuagggcuauggcaaaagg

SEQ ID NO: 734392 - RNA, 19 nt, Artificial Sequence
  Description of Artificial Sequence: Synthetic oligonucleotide
uaccucuguagugucagag

SEQ ID NO: 734393 - RNA, 19 nt, Artificial Sequence
  Description of Artificial Sequence: Synthetic oligonucleotide
agucagaguuuauuuggcu

SEQ ID NO: 734394 - RNA, 19 nt, Artificial Sequence
  Description of Artificial Sequence: Synthetic oligonucleotide
aguaacuauaccagcaaaa

SEQ ID NO: 734395 - RNA, 19 nt, Artificial Sequence
  Description of Artificial Sequence: Synthetic oligonucleotide
uuauuaccuuucaaaugau

SEQ ID NO: 734396 - RNA, 19 nt, Artificial Sequence
  Description of Artificial Sequence: Synthetic oligonucleotide
uaguguuuaaauggaacua

SEQ ID NO: 734397 - RNA, 19 nt, Artificial Sequence
  Description of Artificial Sequence: Synthetic oligonucleotide
guguuaaugauggaccaac

SEQ ID NO: 734398 - RNA, 19 nt, Artificial Sequence
  Description of Artificial Sequence: Synthetic oligonucleotide
gagagggacuagaaaagug

SEQ ID NO: 734399 - RNA, 19 nt, Artificial Sequence
  Description of Artificial Sequence: Synthetic oligonucleotide
aucaguagggaucuucguu

SEQ ID NO: 734400 - RNA, 19 nt, Artificial Sequence
  Description of Artificial Sequence: Synthetic oligonucleotide
ugauuaggggauccuuuaa

SEQ ID NO: 734401 - RNA, 19 nt, Artificial Sequence
  Description of Artificial Sequence: Synthetic oligonucleotide
uauccaguguuuauaccuu

SEQ ID NO: 734402 - RNA, 19 nt, Artificial Sequence
  Description of Artificial Sequence: Synthetic oligonucleotide
uaucauccguguccgcugc

SEQ ID NO: 734403 - RNA, 19 nt, Artificial Sequence
  Description of Artificial Sequence: Synthetic oligonucleotide
acuacgcaucuacaaucuc

SEQ ID NO: 734404 - RNA, 19 nt, Artificial Sequence
  Description of Artificial Sequence: Synthetic oligonucleotide
agaguuugacuguugcaaa

SEQ ID NO: 734405 - RNA, 19 nt, Artificial Sequence
  Description of Artificial Sequence: Synthetic oligonucleotide
aaaccugcuacgguucacu

SEQ ID NO: 734406 - RNA, 19 nt, Artificial Sequence
  Description of Artificial Sequence: Synthetic oligonucleotide
cacaagcuccucuuagaag

SEQ ID NO: 734407 - RNA, 19 nt, Artificial Sequence
  Description of Artificial Sequence: Synthetic oligonucleotide
cugcguuccaacuuuaaaa

SEQ ID NO: 734408 - RNA, 19 nt, Artificial Sequence
  Description of Artificial Sequence: Synthetic oligonucleotide
uaccuucuaauguggacuc

SEQ ID NO: 734409 - RNA, 19 nt, Artificial Sequence
  Description of Artificial Sequence: Synthetic oligonucleotide
accugcuacgguucacugg

SEQ ID NO: 734410 - RNA, 19 nt, Artificial Sequence
  Description of Artificial Sequence: Synthetic oligonucleotide
caguagggaucuucguugg

SEQ ID NO: 734411 - RNA, 19 nt, Artificial Sequence
  Description of Artificial Sequence: Synthetic oligonucleotide
uggccaugaaccaucugaa

SEQ ID NO: 734412 - RNA, 19 nt, Artificial Sequence
  Description of Artificial Sequence: Synthetic oligonucleotide
gcaagauagguuuacaaua

SEQ ID NO: 734413 - RNA, 19 nt, Artificial Sequence
  Description of Artificial Sequence: Synthetic oligonucleotide
aaccugcuacgguucacug

SEQ ID NO: 734414 - RNA, 19 nt, Artificial Sequence
  Description of Artificial Sequence: Synthetic oligonucleotide
aauccuggcuauauacccu

SEQ ID NO: 734415 - RNA, 19 nt, Artificial Sequence
  Description of Artificial Sequence: Synthetic oligonucleotide
ugucgacaugccuugugga

SEQ ID NO: 734416 - RNA, 19 nt, Artificial Sequence
  Description of Artificial Sequence: Synthetic oligonucleotide
auuacccaugcggaugagg

SEQ ID NO: 734417 - RNA, 19 nt, Artificial Sequence
  Description of Artificial Sequence: Synthetic oligonucleotide
aauucaccuaagugaugau

SEQ ID NO: 734418 - RNA, 19 nt, Artificial Sequence
  Description of Artificial Sequence: Synthetic oligonucleotide
cuguacuagggcuauggca

SEQ ID NO: 734419 - RNA, 19 nt, Artificial Sequence
  Description of Artificial Sequence: Synthetic oligonucleotide
auaaaccugcuacgguuca

SEQ ID NO: 734420 - RNA, 19 nt, Artificial Sequence
  Description of Artificial Sequence: Synthetic oligonucleotide
ugcuaguaucaguagggau

SEQ ID NO: 734421 - RNA, 19 nt, Artificial Sequence
  Description of Artificial Sequence: Synthetic oligonucleotide
uagauuaguucuguauguc

SEQ ID NO: 734422 - RNA, 19 nt, Artificial Sequence
  Description of Artificial Sequence: Synthetic oligonucleotide
ugccgaugaauguuugccu

SEQ ID NO: 734423 - RNA, 19 nt, Artificial Sequence
  Description of Artificial Sequence: Synthetic oligonucleotide
uaucaguagggaucuucgu

SEQ ID NO: 734424 - RNA, 19 nt, Artificial Sequence
  Description of Artificial Sequence: Synthetic oligonucleotide
gaaucuaccucuguagugu

SEQ ID NO: 734425 - RNA, 19 nt, Artificial Sequence
  Description of Artificial Sequence: Synthetic oligonucleotide
gguauguuguuuuaagugu

SEQ ID NO: 734426 - RNA, 19 nt, Artificial Sequence
  Description of Artificial Sequence: Synthetic oligonucleotide
uggugacggagggaaaggg

SEQ ID NO: 734427 - RNA, 19 nt, Artificial Sequence
  Description of Artificial Sequence: Synthetic oligonucleotide
cuaccaacuguuuauagau

SEQ ID NO: 734428 - RNA, 19 nt, Artificial Sequence
  Description of Artificial Sequence: Synthetic oligonucleotide
gcuaguaucaguagggauc

SEQ ID NO: 734429 - RNA, 19 nt, Artificial Sequence
  Description of Artificial Sequence: Synthetic oligonucleotide
guacuggaaaggugauagg

SEQ ID NO: 734430 - RNA, 19 nt, Artificial Sequence
  Description of Artificial Sequence: Synthetic oligonucleotide
ugcuuaauuucuggugagc

SEQ ID NO: 734431 - RNA, 19 nt, Artificial Sequence
  Description of Artificial Sequence: Synthetic oligonucleotide
uuauggacugacugcugaa

SEQ ID NO: 734432 - RNA, 19 nt, Artificial Sequence
  Description of Artificial Sequence: Synthetic oligonucleotide
agucaguagaaagggugag

SEQ ID NO: 734433 - RNA, 19 nt, Artificial Sequence
  Description of Artificial Sequence: Synthetic oligonucleotide
ggugauguggugacggagg

SEQ ID NO: 734434 - RNA, 19 nt, Artificial Sequence
  Description of Artificial Sequence: Synthetic oligonucleotide
uuccauggagcaaccggga

SEQ ID NO: 734435 - RNA, 19 nt, Artificial Sequence
  Description of Artificial Sequence: Synthetic oligonucleotide
auauuccuagaccucugaa

SEQ ID NO: 734436 - RNA, 19 nt, Artificial Sequence
  Description of Artificial Sequence: Synthetic oligonucleotide
ggugauaggcuugaacaag

SEQ ID NO: 734437 - RNA, 19 nt, Artificial Sequence
  Description of Artificial Sequence: Synthetic oligonucleotide
auauuaauauccaguguuu

SEQ ID NO: 734438 - RNA, 19 nt, Artificial Sequence
  Description of Artificial Sequence: Synthetic oligonucleotide
uagugggaagucaguagaa

SEQ ID NO: 734439 - RNA, 19 nt, Artificial Sequence
  Description of Artificial Sequence: Synthetic oligonucleotide
acugucgacaugccuugug

SEQ ID NO: 734440 - RNA, 19 nt, Artificial Sequence
  Description of Artificial Sequence: Synthetic oligonucleotide
ugggaacgcugaaaugaca

SEQ ID NO: 734441 - RNA, 19 nt, Artificial Sequence
  Description of Artificial Sequence: Synthetic oligonucleotide
uauauacccucagcaauau

SEQ ID NO: 734442 - RNA, 19 nt, Artificial Sequence
  Description of Artificial Sequence: Synthetic oligonucleotide
gguaaauuugcagcuugag

SEQ ID NO: 734443 - RNA, 19 nt, Artificial Sequence
  Description of Artificial Sequence: Synthetic oligonucleotide
uggugauguggugacggag

SEQ ID NO: 734444 - RNA, 19 nt, Artificial Sequence
  Description of Artificial Sequence: Synthetic oligonucleotide
acuagggcuauggcaaaag

SEQ ID NO: 734445 - RNA, 19 nt, Artificial Sequence
  Description of Artificial Sequence: Synthetic oligonucleotide
cagaugcauauuccuagac

SEQ ID NO: 734446 - RNA, 19 nt, Artificial Sequence
  Description of Artificial Sequence: Synthetic oligonucleotide
auuacaagagcaacucaaa

SEQ ID NO: 734447 - RNA, 19 nt, Artificial Sequence
  Description of Artificial Sequence: Synthetic oligonucleotide
caaaauuuaccuccagugu

SEQ ID NO: 734448 - RNA, 19 nt, Artificial Sequence
  Description of Artificial Sequence: Synthetic oligonucleotide
ugccuaagauacaaacauu

SEQ ID NO: 734449 - RNA, 19 nt, Artificial Sequence
  Description of Artificial Sequence: Synthetic oligonucleotide
uguuugccucuaucauccg

SEQ ID NO: 734450 - RNA, 19 nt, Artificial Sequence
  Description of Artificial Sequence: Synthetic oligonucleotide
augaaaacggcaagugccu

SEQ ID NO: 734451 - RNA, 19 nt, Artificial Sequence
  Description of Artificial Sequence: Synthetic oligonucleotide
agagcaacucaaaugggaa

SEQ ID NO: 734452 - RNA, 19 nt, Artificial Sequence
  Description of Artificial Sequence: Synthetic oligonucleotide
uguguuaaugauggaccaa

SEQ ID NO: 734453 - RNA, 19 nt, Artificial Sequence
  Description of Artificial Sequence: Synthetic oligonucleotide
cguggugcuaagaacaggc

SEQ ID NO: 734454 - RNA, 19 nt, Artificial Sequence
  Description of Artificial Sequence: Synthetic oligonucleotide
uccgcugugucaucuuuuc

SEQ ID NO: 734455 - RNA, 19 nt, Artificial Sequence
  Description of Artificial Sequence: Synthetic oligonucleotide
aaaugcuaucugcguucca

SEQ ID NO: 734456 - RNA, 19 nt, Artificial Sequence
  Description of Artificial Sequence: Synthetic oligonucleotide
aguuggcaagugcugucug

SEQ ID NO: 734457 - RNA, 19 nt, Artificial Sequence
  Description of Artificial Sequence: Synthetic oligonucleotide
gcugacaauaggcacauua

SEQ ID NO: 734458 - RNA, 19 nt, Artificial Sequence
  Description of Artificial Sequence: Synthetic oligonucleotide
caauaguguuuaaauggaa

SEQ ID NO: 734459 - RNA, 19 nt, Artificial Sequence
  Description of Artificial Sequence: Synthetic oligonucleotide
auccugaauuaguaacuau

SEQ ID NO: 734460 - RNA, 19 nt, Artificial Sequence
  Description of Artificial Sequence: Synthetic oligonucleotide
ugcuacgguucacuggcuc

SEQ ID NO: 734461 - RNA, 19 nt, Artificial Sequence
  Description of Artificial Sequence: Synthetic oligonucleotide
ugugugcuauuccucccau

SEQ ID NO: 734462 - RNA, 19 nt, Artificial Sequence
  Description of Artificial Sequence: Synthetic oligonucleotide
agaaagggugagcuguguu

SEQ ID NO: 734463 - RNA, 19 nt, Artificial Sequence
  Description of Artificial Sequence: Synthetic oligonucleotide
cucaucucaccugucucag

SEQ ID NO: 734464 - RNA, 19 nt, Artificial Sequence
  Description of Artificial Sequence: Synthetic oligonucleotide
gaugcugcauggcuccuaa

SEQ ID NO: 734465 - RNA, 19 nt, Artificial Sequence
  Description of Artificial Sequence: Synthetic oligonucleotide
gcucuaaacauuucucaga

SEQ ID NO: 734466 - RNA, 19 nt, Artificial Sequence
  Description of Artificial Sequence: Synthetic oligonucleotide
augcauauuccuagaccuc

SEQ ID NO: 734467 - RNA, 19 nt, Artificial Sequence
  Description of Artificial Sequence: Synthetic oligonucleotide
acuauaccagcaaaauuua

SEQ ID NO: 734468 - RNA, 19 nt, Artificial Sequence
  Description of Artificial Sequence: Synthetic oligonucleotide
aauaggcaagauagguuua

SEQ ID NO: 734469 - RNA, 19 nt, Artificial Sequence
  Description of Artificial Sequence: Synthetic oligonucleotide
aggauuccauggagcaacc

SEQ ID NO: 734470 - RNA, 19 nt, Artificial Sequence
  Description of Artificial Sequence: Synthetic oligonucleotide
cugugucaucuuuucauga

SEQ ID NO: 734471 - RNA, 19 nt, Artificial Sequence
  Description of Artificial Sequence: Synthetic oligonucleotide
cuguucaacacuguuuuaa

SEQ ID NO: 734472 - RNA, 19 nt, Artificial Sequence
  Description of Artificial Sequence: Synthetic oligonucleotide
ugacggagggaaagggcuc

SEQ ID NO: 734473 - RNA, 19 nt, Artificial Sequence
  Description of Artificial Sequence: Synthetic oligonucleotide
cauuaucuaaaugaauagu

SEQ ID NO: 734474 - RNA, 19 nt, Artificial Sequence
  Description of Artificial Sequence: Synthetic oligonucleotide
gaugaccuccgcuguguca

SEQ ID NO: 734475 - RNA, 19 nt, Artificial Sequence
  Description of Artificial Sequence: Synthetic oligonucleotide
guaacuauaccagcaaaau

SEQ ID NO: 734476 - RNA, 19 nt, Artificial Sequence
  Description of Artificial Sequence: Synthetic oligonucleotide
gcuccuaagcugaaaacug

SEQ ID NO: 734477 - RNA, 19 nt, Artificial Sequence
  Description of Artificial Sequence: Synthetic oligonucleotide
gucucaucucaccugucuc

SEQ ID NO: 734478 - RNA, 19 nt, Artificial Sequence
  Description of Artificial Sequence: Synthetic oligonucleotide
auucaccuaagugaugauu

SEQ ID NO: 734479 - RNA, 19 nt, Artificial Sequence
  Description of Artificial Sequence: Synthetic oligonucleotide
uacuacacucauaguuaua

SEQ ID NO: 734480 - RNA, 19 nt, Artificial Sequence
  Description of Artificial Sequence: Synthetic oligonucleotide
cauccguguccgcugcucc

SEQ ID NO: 734481 - RNA, 19 nt, Artificial Sequence
  Description of Artificial Sequence: Synthetic oligonucleotide
ccgacuaagcugcuguugc

SEQ ID NO: 734482 - RNA, 19 nt, Artificial Sequence
  Description of Artificial Sequence: Synthetic oligonucleotide
agagaaagugugugugcua

SEQ ID NO: 734483 - RNA, 19 nt, Artificial Sequence
  Description of Artificial Sequence: Synthetic oligonucleotide
caucuacaaucucccaauc

SEQ ID NO: 734484 - RNA, 19 nt, Artificial Sequence
  Description of Artificial Sequence: Synthetic oligonucleotide
cuaauguggacuccguggu

SEQ ID NO: 734485 - RNA, 19 nt, Artificial Sequence
  Description of Artificial Sequence: Synthetic oligonucleotide
guggugacggagggaaagg

SEQ ID NO: 734486 - RNA, 19 nt, Artificial Sequence
  Description of Artificial Sequence: Synthetic oligonucleotide
ugcggaugaggcuguacua

SEQ ID NO: 734487 - RNA, 19 nt, Artificial Sequence
  Description of Artificial Sequence: Synthetic oligonucleotide
ggaugaggcuguacuaggg

SEQ ID NO: 734488 - RNA, 19 nt, Artificial Sequence
  Description of Artificial Sequence: Synthetic oligonucleotide
aaauggaacuacgcaucua

SEQ ID NO: 734489 - RNA, 19 nt, Artificial Sequence
  Description of Artificial Sequence: Synthetic oligonucleotide
cacaauaggcaagauaggu

SEQ ID NO: 734490 - RNA, 19 nt, Artificial Sequence
  Description of Artificial Sequence: Synthetic oligonucleotide
ggaacgcugaaaugacaug

SEQ ID NO: 734491 - RNA, 19 nt, Artificial Sequence
  Description of Artificial Sequence: Synthetic oligonucleotide
gugguauguuguuuuaagu

SEQ ID NO: 734492 - RNA, 19 nt, Artificial Sequence
  Description of Artificial Sequence: Synthetic oligonucleotide
aggcucauuggucucuuuu

SEQ ID NO: 734493 - RNA, 19 nt, Artificial Sequence
  Description of Artificial Sequence: Synthetic oligonucleotide
agcaaccgggaugucuuuc

SEQ ID NO: 734494 - RNA, 19 nt, Artificial Sequence
  Description of Artificial Sequence: Synthetic oligonucleotide
aguagggaucuucguuggu

SEQ ID NO: 734495 - RNA, 19 nt, Artificial Sequence
  Description of Artificial Sequence: Synthetic oligonucleotide
uccuggcuauauacccuca

SEQ ID NO: 734496 - RNA, 19 nt, Artificial Sequence
  Description of Artificial Sequence: Synthetic oligonucleotide
aaacggcaagugccuuugu

SEQ ID NO: 734497 - RNA, 19 nt, Artificial Sequence
  Description of Artificial Sequence: Synthetic oligonucleotide
uaucugcguuccaacuuua

SEQ ID NO: 734498 - RNA, 19 nt, Artificial Sequence
  Description of Artificial Sequence: Synthetic oligonucleotide
cuaguaucaguagggaucu

SEQ ID NO: 734499 - RNA, 19 nt, Artificial Sequence
  Description of Artificial Sequence: Synthetic oligonucleotide
gaaggaugaccuccgcugu

SEQ ID NO: 734500 - RNA, 19 nt, Artificial Sequence
  Description of Artificial Sequence: Synthetic oligonucleotide
gucgacaugccuuguggaa

SEQ ID NO: 734501 - RNA, 19 nt, Artificial Sequence
  Description of Artificial Sequence: Synthetic oligonucleotide
gccuaagauacaaacauua

SEQ ID NO: 734502 - RNA, 19 nt, Artificial Sequence
  Description of Artificial Sequence: Synthetic oligonucleotide
acacuguuuuaaauauccu

SEQ ID NO: 734503 - RNA, 19 nt, Artificial Sequence
  Description of Artificial Sequence: Synthetic oligonucleotide
ggcacauuacccaugcgga

SEQ ID NO: 734504 - RNA, 19 nt, Artificial Sequence
  Description of Artificial Sequence: Synthetic oligonucleotide
uaaaccugcuacgguucac

SEQ ID NO: 734505 - RNA, 19 nt, Artificial Sequence
  Description of Artificial Sequence: Synthetic oligonucleotide
uuccuacuacacucauagu

SEQ ID NO: 734506 - RNA, 19 nt, Artificial Sequence
  Description of Artificial Sequence: Synthetic oligonucleotide
ugugccgacuaagcugcug

SEQ ID NO: 734507 - RNA, 19 nt, Artificial Sequence
  Description of Artificial Sequence: Synthetic oligonucleotide
ccuacuacacucauaguua

SEQ ID NO: 734508 - RNA, 19 nt, Artificial Sequence
  Description of Artificial Sequence: Synthetic oligonucleotide
agggacuagaaaaguggga

SEQ ID NO: 734509 - RNA, 19 nt, Artificial Sequence
  Description of Artificial Sequence: Synthetic oligonucleotide
gcuauauacccucagcaau

SEQ ID NO: 734510 - RNA, 19 nt, Artificial Sequence
  Description of Artificial Sequence: Synthetic oligonucleotide
gccgaugaauguuugccuc

SEQ ID NO: 734511 - RNA, 19 nt, Artificial Sequence
  Description of Artificial Sequence: Synthetic oligonucleotide
caguccugugccgacuaag

SEQ ID NO: 734512 - RNA, 19 nt, Artificial Sequence
  Description of Artificial Sequence: Synthetic oligonucleotide
cauggagcaaccgggaugu

SEQ ID NO: 734513 - RNA, 19 nt, Artificial Sequence
  Description of Artificial Sequence: Synthetic oligonucleotide
ugaaaacggcaagugccuu

SEQ ID NO: 734514 - RNA, 19 nt, Artificial Sequence
  Description of Artificial Sequence: Synthetic oligonucleotide
caguaauauccaagggaaa

SEQ ID NO: 734515 - RNA, 19 nt, Artificial Sequence
  Description of Artificial Sequence: Synthetic oligonucleotide
gaucuucguugguguugag

SEQ ID NO: 734516 - RNA, 19 nt, Artificial Sequence
  Description of Artificial Sequence: Synthetic oligonucleotide
gcucuguuguagugggaag

SEQ ID NO: 734517 - RNA, 19 nt, Artificial Sequence
  Description of Artificial Sequence: Synthetic oligonucleotide
gcuguacuagggcuauggc

SEQ ID NO: 734518 - RNA, 19 nt, Artificial Sequence
  Description of Artificial Sequence: Synthetic oligonucleotide
ggaggagugcuaguaucag

SEQ ID NO: 734519 - RNA, 19 nt, Artificial Sequence
  Description of Artificial Sequence: Synthetic oligonucleotide
ggugacggagggaaagggc

SEQ ID NO: 734520 - RNA, 19 nt, Artificial Sequence
  Description of Artificial Sequence: Synthetic oligonucleotide
auggaacuacgcaucuaca

SEQ ID NO: 734521 - RNA, 19 nt, Artificial Sequence
  Description of Artificial Sequence: Synthetic oligonucleotide
uggacuccguggugcuaag

SEQ ID NO: 734522 - RNA, 19 nt, Artificial Sequence
  Description of Artificial Sequence: Synthetic oligonucleotide
gaaaacggcaagugccuuu

SEQ ID NO: 734523 - RNA, 19 nt, Artificial Sequence
  Description of Artificial Sequence: Synthetic oligonucleotide
ggaacuacgcaucuacaau

SEQ ID NO: 734524 - RNA, 19 nt, Artificial Sequence
  Description of Artificial Sequence: Synthetic oligonucleotide
uacuagggcuauggcaaaa

SEQ ID NO: 734525 - RNA, 19 nt, Artificial Sequence
  Description of Artificial Sequence: Synthetic oligonucleotide
cuacuacacucauaguuau

SEQ ID NO: 734526 - RNA, 19 nt, Artificial Sequence
  Description of Artificial Sequence: Synthetic oligonucleotide
gcaacucaaaugggaacgc

SEQ ID NO: 734527 - RNA, 19 nt, Artificial Sequence
  Description of Artificial Sequence: Synthetic oligonucleotide
gugacggagggaaagggcu

SEQ ID NO: 734528 - RNA, 19 nt, Artificial Sequence
  Description of Artificial Sequence: Synthetic oligonucleotide
auauacccucagcaauauu

SEQ ID NO: 734529 - RNA, 19 nt, Artificial Sequence
  Description of Artificial Sequence: Synthetic oligonucleotide
auccguguccgcugcucca

SEQ ID NO: 734530 - RNA, 19 nt, Artificial Sequence
  Description of Artificial Sequence: Synthetic oligonucleotide
acgcaucuacaaucuccca

SEQ ID NO: 734531 - RNA, 19 nt, Artificial Sequence
  Description of Artificial Sequence: Synthetic oligonucleotide
ggaucuucguugguguuga

SEQ ID NO: 734532 - RNA, 19 nt, Artificial Sequence
  Description of Artificial Sequence: Synthetic oligonucleotide
gaguuuauuuggcuaccuu

SEQ ID NO: 734533 - RNA, 19 nt, Artificial Sequence
  Description of Artificial Sequence: Synthetic oligonucleotide
ggugagcuguguugaagga

SEQ ID NO: 734534 - RNA, 19 nt, Artificial Sequence
  Description of Artificial Sequence: Synthetic oligonucleotide
gugcuaguaucaguaggga

SEQ ID NO: 734535 - RNA, 19 nt, Artificial Sequence
  Description of Artificial Sequence: Synthetic oligonucleotide
aacugucgacaugccuugu

SEQ ID NO: 734536 - RNA, 19 nt, Artificial Sequence
  Description of Artificial Sequence: Synthetic oligonucleotide
gcuuaauuucuggugagcu

SEQ ID NO: 734537 - RNA, 19 nt, Artificial Sequence
  Description of Artificial Sequence: Synthetic oligonucleotide
cacuaugaaaacggcaagu

SEQ ID NO: 734538 - RNA, 19 nt, Artificial Sequence
  Description of Artificial Sequence: Synthetic oligonucleotide
ggauuccauggagcaaccg

SEQ ID NO: 734539 - RNA, 19 nt, Artificial Sequence
  Description of Artificial Sequence: Synthetic oligonucleotide
gugccgacuaagcugcugu

SEQ ID NO: 734540 - RNA, 19 nt, Artificial Sequence
  Description of Artificial Sequence: Synthetic oligonucleotide
ugcuaagaacaggcccaca

SEQ ID NO: 734541 - RNA, 19 nt, Artificial Sequence
  Description of Artificial Sequence: Synthetic oligonucleotide
cuaucugcguuccaacuuu

SEQ ID NO: 734542 - RNA, 19 nt, Artificial Sequence
  Description of Artificial Sequence: Synthetic oligonucleotide
augcugcauggcuccuaag

SEQ ID NO: 734543 - RNA, 19 nt, Artificial Sequence
  Description of Artificial Sequence: Synthetic oligonucleotide
ggcugucaguccugugccg

SEQ ID NO: 734544 - RNA, 19 nt, Artificial Sequence
  Description of Artificial Sequence: Synthetic oligonucleotide
gcaaccgggaugucuuuca

SEQ ID NO: 734545 - RNA, 19 nt, Artificial Sequence
  Description of Artificial Sequence: Synthetic oligonucleotide
ccuggcuauauacccucag

SEQ ID NO: 734546 - RNA, 19 nt, Artificial Sequence
  Description of Artificial Sequence: Synthetic oligonucleotide
gaugaauguuugccucuau

SEQ ID NO: 734547 - RNA, 19 nt, Artificial Sequence
  Description of Artificial Sequence: Synthetic oligonucleotide
ggaccaacagacugggagu

SEQ ID NO: 734548 - RNA, 19 nt, Artificial Sequence
  Description of Artificial Sequence: Synthetic oligonucleotide
gggaggagugcuaguauca

SEQ ID NO: 734549 - RNA, 19 nt, Artificial Sequence
  Description of Artificial Sequence: Synthetic oligonucleotide
gaguuggcaagugcugucu

SEQ ID NO: 734550 - RNA, 19 nt, Artificial Sequence
  Description of Artificial Sequence: Synthetic oligonucleotide
cuucuaauguggacuccgu

SEQ ID NO: 734551 - RNA, 19 nt, Artificial Sequence
  Description of Artificial Sequence: Synthetic oligonucleotide
cugaaggaugaccuccgcu

SEQ ID NO: 734552 - RNA, 19 nt, Artificial Sequence
  Description of Artificial Sequence: Synthetic oligonucleotide
ggcuaccuugaaaucacuc

SEQ ID NO: 734553 - RNA, 19 nt, Artificial Sequence
  Description of Artificial Sequence: Synthetic oligonucleotide
uacgguucacuggcucuaa

SEQ ID NO: 734554 - RNA, 19 nt, Artificial Sequence
  Description of Artificial Sequence: Synthetic oligonucleotide
ugccgacuaagcugcuguu

SEQ ID NO: 734555 - RNA, 19 nt, Artificial Sequence
  Description of Artificial Sequence: Synthetic oligonucleotide
gucaguccugugccgacua

SEQ ID NO: 734556 - RNA, 19 nt, Artificial Sequence
  Description of Artificial Sequence: Synthetic oligonucleotide
acgguucacuggcucuaaa

SEQ ID NO: 734557 - RNA, 19 nt, Artificial Sequence
  Description of Artificial Sequence: Synthetic oligonucleotide
cauuacccaugcggaugag

SEQ ID NO: 734558 - RNA, 19 nt, Artificial Sequence
  Description of Artificial Sequence: Synthetic oligonucleotide
ggaggguuccuacuacacu

SEQ ID NO: 734559 - RNA, 19 nt, Artificial Sequence
  Description of Artificial Sequence: Synthetic oligonucleotide
gggaacgcugaaaugacau

SEQ ID NO: 734560 - RNA, 19 nt, Artificial Sequence
  Description of Artificial Sequence: Synthetic oligonucleotide
aucugcguuccaacuuuaa

SEQ ID NO: 734561 - RNA, 19 nt, Artificial Sequence
  Description of Artificial Sequence: Synthetic oligonucleotide
ccauaaaccugcuacgguu

SEQ ID NO: 734562 - RNA, 19 nt, Artificial Sequence
  Description of Artificial Sequence: Synthetic oligonucleotide
ccuagaccucugaaaagaa

SEQ ID NO: 734563 - RNA, 19 nt, Artificial Sequence
  Description of Artificial Sequence: Synthetic oligonucleotide
gcuacgguucacuggcucu

SEQ ID NO: 734564 - RNA, 19 nt, Artificial Sequence
  Description of Artificial Sequence: Synthetic oligonucleotide
gcuugagacaucacuggcu

SEQ ID NO: 734565 - RNA, 19 nt, Artificial Sequence
  Description of Artificial Sequence: Synthetic oligonucleotide
caaccgggaugucuuucaa

SEQ ID NO: 734566 - RNA, 19 nt, Artificial Sequence
  Description of Artificial Sequence: Synthetic oligonucleotide
cuacgguucacuggcucua

SEQ ID NO: 734567 - RNA, 19 nt, Artificial Sequence
  Description of Artificial Sequence: Synthetic oligonucleotide
guuuaccaacaaaccuuua

SEQ ID NO: 734568 - RNA, 19 nt, Artificial Sequence
  Description of Artificial Sequence: Synthetic oligonucleotide
agaccucaacauaguggaa

SEQ ID NO: 734569 - RNA, 19 nt, Artificial Sequence
  Description of Artificial Sequence: Synthetic oligonucleotide
acggagggaaagggcucug

SEQ ID NO: 734570 - RNA, 19 nt, Artificial Sequence
  Description of Artificial Sequence: Synthetic oligonucleotide
gugugcuauuccucccaua

SEQ ID NO: 734571 - RNA, 19 nt, Artificial Sequence
  Description of Artificial Sequence: Synthetic oligonucleotide
accaacagacugggaguuu

SEQ ID NO: 734572 - RNA, 19 nt, Artificial Sequence
  Description of Artificial Sequence: Synthetic oligonucleotide
cuccucuuagaagaguguu

SEQ ID NO: 734573 - RNA, 19 nt, Artificial Sequence
  Description of Artificial Sequence: Synthetic oligonucleotide
ccguggugcuaagaacagg

SEQ ID NO: 734574 - RNA, 19 nt, Artificial Sequence
  Description of Artificial Sequence: Synthetic oligonucleotide
gcucaauccuggcuauaua

SEQ ID NO: 734575 - RNA, 19 nt, Artificial Sequence
  Description of Artificial Sequence: Synthetic oligonucleotide
ggagcaaccgggaugucuu

SEQ ID NO: 734576 - RNA, 19 nt, Artificial Sequence
  Description of Artificial Sequence: Synthetic oligonucleotide
caacagacugggaguuuau

SEQ ID NO: 734577 - RNA, 19 nt, Artificial Sequence
  Description of Artificial Sequence: Synthetic oligonucleotide
gguuccuacuacacucaua

SEQ ID NO: 734578 - RNA, 19 nt, Artificial Sequence
  Description of Artificial Sequence: Synthetic oligonucleotide
gcacauuacccaugcggau

SEQ ID NO: 734579 - RNA, 19 nt, Artificial Sequence
  Description of Artificial Sequence: Synthetic oligonucleotide
ccgaugaauguuugccucu

SEQ ID NO: 734580 - RNA, 19 nt, Artificial Sequence
  Description of Artificial Sequence: Synthetic oligonucleotide
cccauaaaccugcuacggu

SEQ ID NO: 734581 - RNA, 19 nt, Artificial Sequence
  Description of Artificial Sequence: Synthetic oligonucleotide
gagcaaccgggaugucuuu

SEQ ID NO: 734582 - RNA, 19 nt, Artificial Sequence
  Description of Artificial Sequence: Synthetic oligonucleotide
ggguuccuacuacacucau

SEQ ID NO: 734583 - RNA, 19 nt, Artificial Sequence
  Description of Artificial Sequence: Synthetic oligonucleotide
auaaagucaguccagggac

SEQ ID NO: 734584 - RNA, 19 nt, Artificial Sequence
  Description of Artificial Sequence: Synthetic oligonucleotide
uauaguaccgugaaggggc

SEQ ID NO: 734585 - RNA, 19 nt, Artificial Sequence
  Description of Artificial Sequence: Synthetic oligonucleotide
uuaaagaagucacaccggg

SEQ ID NO: 734586 - RNA, 19 nt, Artificial Sequence
  Description of Artificial Sequence: Synthetic oligonucleotide
agggguauaugccugagcc

SEQ ID NO: 734587 - RNA, 19 nt, Artificial Sequence
  Description of Artificial Sequence: Synthetic oligonucleotide
aauaaagucaguccaggga

SEQ ID NO: 734588 - RNA, 19 nt, Artificial Sequence
  Description of Artificial Sequence: Synthetic oligonucleotide
uucauaaagcccauucugg

SEQ ID NO: 734589 - RNA, 19 nt, Artificial Sequence
  Description of Artificial Sequence: Synthetic oligonucleotide
ugcuauaguaccgugaagg

SEQ ID NO: 734590 - RNA, 19 nt, Artificial Sequence
  Description of Artificial Sequence: Synthetic oligonucleotide
cagaauaccaucucugugg

SEQ ID NO: 734591 - RNA, 19 nt, Artificial Sequence
  Description of Artificial Sequence: Synthetic oligonucleotide
acaagcaccaaccacagcu

SEQ ID NO: 734592 - RNA, 19 nt, Artificial Sequence
  Description of Artificial Sequence: Synthetic oligonucleotide
aguaguucuauucuggaca

SEQ ID NO: 734593 - RNA, 19 nt, Artificial Sequence
  Description of Artificial Sequence: Synthetic oligonucleotide
cuacauucaaguaucacac

SEQ ID NO: 734594 - RNA, 19 nt, Artificial Sequence
  Description of Artificial Sequence: Synthetic oligonucleotide
uagaauggggauacuaggg

SEQ ID NO: 734595 - RNA, 19 nt, Artificial Sequence
  Description of Artificial Sequence: Synthetic oligonucleotide
uccacuacuagaaugggga

SEQ ID NO: 734596 - RNA, 19 nt, Artificial Sequence
  Description of Artificial Sequence: Synthetic oligonucleotide
auguuaaugguagggaugc

SEQ ID NO: 734597 - RNA, 19 nt, Artificial Sequence
  Description of Artificial Sequence: Synthetic oligonucleotide
auucauaaagcccauucug

SEQ ID NO: 734598 - RNA, 19 nt, Artificial Sequence
  Description of Artificial Sequence: Synthetic oligonucleotide
uuccauagcaggaugacga

SEQ ID NO: 734599 - RNA, 19 nt, Artificial Sequence
  Description of Artificial Sequence: Synthetic oligonucleotide
uggacaauaaagucagucc

SEQ ID NO: 734600 - RNA, 19 nt, Artificial Sequence
  Description of Artificial Sequence: Synthetic oligonucleotide
gacgauuccagccacacac

SEQ ID NO: 734601 - RNA, 19 nt, Artificial Sequence
  Description of Artificial Sequence: Synthetic oligonucleotide
aacacagucucagauuugg

SEQ ID NO: 734602 - RNA, 19 nt, Artificial Sequence
  Description of Artificial Sequence: Synthetic oligonucleotide
ucugagucauaauuuauga

SEQ ID NO: 734603 - RNA, 19 nt, Artificial Sequence
  Description of Artificial Sequence: Synthetic oligonucleotide
uucgcaggaacaaaguggc

SEQ ID NO: 734604 - RNA, 19 nt, Artificial Sequence
  Description of Artificial Sequence: Synthetic oligonucleotide
ugcgcuguggagaaugugg

SEQ ID NO: 734605 - RNA, 19 nt, Artificial Sequence
  Description of Artificial Sequence: Synthetic oligonucleotide
agaauggggauacuagggg

SEQ ID NO: 734606 - RNA, 19 nt, Artificial Sequence
  Description of Artificial Sequence: Synthetic oligonucleotide
uagugagaagcccauauac

SEQ ID NO: 734607 - RNA, 19 nt, Artificial Sequence
  Description of Artificial Sequence: Synthetic oligonucleotide
ugacaagguucccaggugg

SEQ ID NO: 734608 - RNA, 19 nt, Artificial Sequence
  Description of Artificial Sequence: Synthetic oligonucleotide
cuagaauggggauacuagg

SEQ ID NO: 734609 - RNA, 19 nt, Artificial Sequence
  Description of Artificial Sequence: Synthetic oligonucleotide
ucaucaguaguucuauucu

SEQ ID NO: 734610 - RNA, 19 nt, Artificial Sequence
  Description of Artificial Sequence: Synthetic oligonucleotide
ucugucaaagucucuguag

SEQ ID NO: 734611 - RNA, 19 nt, Artificial Sequence
  Description of Artificial Sequence: Synthetic oligonucleotide
ucccgaaucugccagcugg

SEQ ID NO: 734612 - RNA, 19 nt, Artificial Sequence
  Description of Artificial Sequence: Synthetic oligonucleotide
augauaaauaggaaggaag

SEQ ID NO: 734613 - RNA, 19 nt, Artificial Sequence
  Description of Artificial Sequence: Synthetic oligonucleotide
guacccuacucucugaagg

SEQ ID NO: 734614 - RNA, 19 nt, Artificial Sequence
  Description of Artificial Sequence: Synthetic oligonucleotide
cuuaaagaagucacaccgg

SEQ ID NO: 734615 - RNA, 19 nt, Artificial Sequence
  Description of Artificial Sequence: Synthetic oligonucleotide
auaugccugagccugcugg

SEQ ID NO: 734616 - RNA, 19 nt, Artificial Sequence
  Description of Artificial Sequence: Synthetic oligonucleotide
gauagaggcuuggacaugg

SEQ ID NO: 734617 - RNA, 19 nt, Artificial Sequence
  Description of Artificial Sequence: Synthetic oligonucleotide
aauguggcuugucuccagg

SEQ ID NO: 734618 - RNA, 19 nt, Artificial Sequence
  Description of Artificial Sequence: Synthetic oligonucleotide
aagagcagaguuaagucug

SEQ ID NO: 734619 - RNA, 19 nt, Artificial Sequence
  Description of Artificial Sequence: Synthetic oligonucleotide
guucgcaggaacaaagugg

SEQ ID NO: 734620 - RNA, 19 nt, Artificial Sequence
  Description of Artificial Sequence: Synthetic oligonucleotide
caauaaagucaguccaggg

SEQ ID NO: 734621 - RNA, 19 nt, Artificial Sequence
  Description of Artificial Sequence: Synthetic oligonucleotide
cauguuaaugguagggaug

SEQ ID NO: 734622 - RNA, 19 nt, Artificial Sequence
  Description of Artificial Sequence: Synthetic oligonucleotide
uauuucaggggacuuccca

SEQ ID NO: 734623 - RNA, 19 nt, Artificial Sequence
  Description of Artificial Sequence: Synthetic oligonucleotide
uguggucaaaagagcagag

SEQ ID NO: 734624 - RNA, 19 nt, Artificial Sequence
  Description of Artificial Sequence: Synthetic oligonucleotide
uuaauucauugcucuuggg

SEQ ID NO: 734625 - RNA, 19 nt, Artificial Sequence
  Description of Artificial Sequence: Synthetic oligonucleotide
gauacuaggggagcagggg

SEQ ID NO: 734626 - RNA, 19 nt, Artificial Sequence
  Description of Artificial Sequence: Synthetic oligonucleotide
guagccaagguuuuggaga

SEQ ID NO: 734627 - RNA, 19 nt, Artificial Sequence
  Description of Artificial Sequence: Synthetic oligonucleotide
aauaagguugagaggguug

SEQ ID NO: 734628 - RNA, 19 nt, Artificial Sequence
  Description of Artificial Sequence: Synthetic oligonucleotide
cauauuucaggggacuucc

SEQ ID NO: 734629 - RNA, 19 nt, Artificial Sequence
  Description of Artificial Sequence: Synthetic oligonucleotide
aauggggauacuaggggag

SEQ ID NO: 734630 - RNA, 19 nt, Artificial Sequence
  Description of Artificial Sequence: Synthetic oligonucleotide
acuagaauggggauacuag

SEQ ID NO: 734631 - RNA, 19 nt, Artificial Sequence
  Description of Artificial Sequence: Synthetic oligonucleotide
aguaguaucggucccgaau

SEQ ID NO: 734632 - RNA, 19 nt, Artificial Sequence
  Description of Artificial Sequence: Synthetic oligonucleotide
aucaguaguucuauucugg

SEQ ID NO: 734633 - RNA, 19 nt, Artificial Sequence
  Description of Artificial Sequence: Synthetic oligonucleotide
aacauccccuccuuuggug

SEQ ID NO: 734634 - RNA, 19 nt, Artificial Sequence
  Description of Artificial Sequence: Synthetic oligonucleotide
agguucagagagaauaagg

SEQ ID NO: 734635 - RNA, 19 nt, Artificial Sequence
  Description of Artificial Sequence: Synthetic oligonucleotide
ugcccuacauucaaguauc

SEQ ID NO: 734636 - RNA, 19 nt, Artificial Sequence
  Description of Artificial Sequence: Synthetic oligonucleotide
cuauaguaccgugaagggg

SEQ ID NO: 734637 - RNA, 19 nt, Artificial Sequence
  Description of Artificial Sequence: Synthetic oligonucleotide
acggccacaagcaccaacc

SEQ ID NO: 734638 - RNA, 19 nt, Artificial Sequence
  Description of Artificial Sequence: Synthetic oligonucleotide
agaguuaagucuggccagc

SEQ ID NO: 734639 - RNA, 19 nt, Artificial Sequence
  Description of Artificial Sequence: Synthetic oligonucleotide
uaaagaagucacaccgggu

SEQ ID NO: 734640 - RNA, 19 nt, Artificial Sequence
  Description of Artificial Sequence: Synthetic oligonucleotide
ucugcauccugccaauauc

SEQ ID NO: 734641 - RNA, 19 nt, Artificial Sequence
  Description of Artificial Sequence: Synthetic oligonucleotide
uacuaggggagcaggggag

SEQ ID NO: 734642 - RNA, 19 nt, Artificial Sequence
  Description of Artificial Sequence: Synthetic oligonucleotide
agaauaccaucucuguggu

SEQ ID NO: 734643 - RNA, 19 nt, Artificial Sequence
  Description of Artificial Sequence: Synthetic oligonucleotide
gaauggggauacuagggga

SEQ ID NO: 734644 - RNA, 19 nt, Artificial Sequence
  Description of Artificial Sequence: Synthetic oligonucleotide
ucgucggucagccuuucug

SEQ ID NO: 734645 - RNA, 19 nt, Artificial Sequence
  Description of Artificial Sequence: Synthetic oligonucleotide
uccauguuaaugguaggga

SEQ ID NO: 734646 - RNA, 19 nt, Artificial Sequence
  Description of Artificial Sequence: Synthetic oligonucleotide
ucggcuuaaagaagucaca

SEQ ID NO: 734647 - RNA, 19 nt, Artificial Sequence
  Description of Artificial Sequence: Synthetic oligonucleotide
aaucagccuccacuacuag

SEQ ID NO: 734648 - RNA, 19 nt, Artificial Sequence
  Description of Artificial Sequence: Synthetic oligonucleotide
gugagaagcccauauacaa

SEQ ID NO: 734649 - RNA, 19 nt, Artificial Sequence
  Description of Artificial Sequence: Synthetic oligonucleotide
uacccugacucugucaaag

SEQ ID NO: 734650 - RNA, 19 nt, Artificial Sequence
  Description of Artificial Sequence: Synthetic oligonucleotide
agcgggucggcuuaaagaa

SEQ ID NO: 734651 - RNA, 19 nt, Artificial Sequence
  Description of Artificial Sequence: Synthetic oligonucleotide
ucacaagaacauccccucc

SEQ ID NO: 734652 - RNA, 19 nt, Artificial Sequence
  Description of Artificial Sequence: Synthetic oligonucleotide
gagaggguugacaagguuc

SEQ ID NO: 734653 - RNA, 19 nt, Artificial Sequence
  Description of Artificial Sequence: Synthetic oligonucleotide
acuuccauagcaggaugac

SEQ ID NO: 734654 - RNA, 19 nt, Artificial Sequence
  Description of Artificial Sequence: Synthetic oligonucleotide
ucggucccgaaucugccag

SEQ ID NO: 734655 - RNA, 19 nt, Artificial Sequence
  Description of Artificial Sequence: Synthetic oligonucleotide
uagcgggucggcuuaaaga

SEQ ID NO: 734656 - RNA, 19 nt, Artificial Sequence
  Description of Artificial Sequence: Synthetic oligonucleotide
ugccaauaucugcugggcc

SEQ ID NO: 734657 - RNA, 19 nt, Artificial Sequence
  Description of Artificial Sequence: Synthetic oligonucleotide
agcacgaccacuggcacag

SEQ ID NO: 734658 - RNA, 19 nt, Artificial Sequence
  Description of Artificial Sequence: Synthetic oligonucleotide
auacuaggggagcagggga

SEQ ID NO: 734659 - RNA, 19 nt, Artificial Sequence
  Description of Artificial Sequence: Synthetic oligonucleotide
uaucggucccgaaucugcc

SEQ ID NO: 734660 - RNA, 19 nt, Artificial Sequence
  Description of Artificial Sequence: Synthetic oligonucleotide
cacacagcgagcacgacca

SEQ ID NO: 734661 - RNA, 19 nt, Artificial Sequence
  Description of Artificial Sequence: Synthetic oligonucleotide
acucacggccacaagcacc

SEQ ID NO: 734662 - RNA, 19 nt, Artificial Sequence
  Description of Artificial Sequence: Synthetic oligonucleotide
uuggggagaggacugggaa

SEQ ID NO: 734663 - RNA, 19 nt, Artificial Sequence
  Description of Artificial Sequence: Synthetic oligonucleotide
aagccgcacuuccauagca

SEQ ID NO: 734664 - RNA, 19 nt, Artificial Sequence
  Description of Artificial Sequence: Synthetic oligonucleotide
gcagaguuaagucuggcca

SEQ ID NO: 734665 - RNA, 19 nt, Artificial Sequence
  Description of Artificial Sequence: Synthetic oligonucleotide
augauccgguaguagcggg

SEQ ID NO: 734666 - RNA, 19 nt, Artificial Sequence
  Description of Artificial Sequence: Synthetic oligonucleotide
agccuccacuacuagaaug

SEQ ID NO: 734667 - RNA, 19 nt, Artificial Sequence
  Description of Artificial Sequence: Synthetic oligonucleotide
gccucuuagcuucauacag

SEQ ID NO: 734668 - RNA, 19 nt, Artificial Sequence
  Description of Artificial Sequence: Synthetic oligonucleotide
ucuccccugcccuacauuc

SEQ ID NO: 734669 - RNA, 19 nt, Artificial Sequence
  Description of Artificial Sequence: Synthetic oligonucleotide
gaagagggguauaugccug

SEQ ID NO: 734670 - RNA, 19 nt, Artificial Sequence
  Description of Artificial Sequence: Synthetic oligonucleotide
uacccuacucucugaagga

SEQ ID NO: 734671 - RNA, 19 nt, Artificial Sequence
  Description of Artificial Sequence: Synthetic oligonucleotide
cacacccgugccuucacgg

SEQ ID NO: 734672 - RNA, 19 nt, Artificial Sequence
  Description of Artificial Sequence: Synthetic oligonucleotide
agucgauguccacugagaa

SEQ ID NO: 734673 - RNA, 19 nt, Artificial Sequence
  Description of Artificial Sequence: Synthetic oligonucleotide
augggacgauuccagccac

SEQ ID NO: 734674 - RNA, 19 nt, Artificial Sequence
  Description of Artificial Sequence: Synthetic oligonucleotide
aggugucaggaaugggacg

SEQ ID NO: 734675 - RNA, 19 nt, Artificial Sequence
  Description of Artificial Sequence: Synthetic oligonucleotide
ccuacauucaaguaucaca

SEQ ID NO: 734676 - RNA, 19 nt, Artificial Sequence
  Description of Artificial Sequence: Synthetic oligonucleotide
caguaguucuauucuggac

SEQ ID NO: 734677 - RNA, 19 nt, Artificial Sequence
  Description of Artificial Sequence: Synthetic oligonucleotide
uggcccuacuuuccagugg

SEQ ID NO: 734678 - RNA, 19 nt, Artificial Sequence
  Description of Artificial Sequence: Synthetic oligonucleotide
ucauauuucaggggacuuc

SEQ ID NO: 734679 - RNA, 19 nt, Artificial Sequence
  Description of Artificial Sequence: Synthetic oligonucleotide
aguuaagucuggccagcug

SEQ ID NO: 734680 - RNA, 19 nt, Artificial Sequence
  Description of Artificial Sequence: Synthetic oligonucleotide
ggaacaaaguggcccagcc

SEQ ID NO: 734681 - RNA, 19 nt, Artificial Sequence
  Description of Artificial Sequence: Synthetic oligonucleotide
acgggucagaaggaucucc

SEQ ID NO: 734682 - RNA, 19 nt, Artificial Sequence
  Description of Artificial Sequence: Synthetic oligonucleotide
caugauccgguaguagcgg

SEQ ID NO: 734683 - RNA, 19 nt, Artificial Sequence
  Description of Artificial Sequence: Synthetic oligonucleotide
uuccuaugggcugaguuuc

SEQ ID NO: 734684 - RNA, 19 nt, Artificial Sequence
  Description of Artificial Sequence: Synthetic oligonucleotide
aggcggguagcgcuccucc

SEQ ID NO: 734685 - RNA, 19 nt, Artificial Sequence
  Description of Artificial Sequence: Synthetic oligonucleotide
gaggugucaggaaugggac

SEQ ID NO: 734686 - RNA, 19 nt, Artificial Sequence
  Description of Artificial Sequence: Synthetic oligonucleotide
agugagaagcccauauaca

SEQ ID NO: 734687 - RNA, 19 nt, Artificial Sequence
  Description of Artificial Sequence: Synthetic oligonucleotide
gggucaguaguaucggucc

SEQ ID NO: 734688 - RNA, 19 nt, Artificial Sequence
  Description of Artificial Sequence: Synthetic oligonucleotide
gaauguggcuugucuccag

SEQ ID NO: 734689 - RNA, 19 nt, Artificial Sequence
  Description of Artificial Sequence: Synthetic oligonucleotide
uugagaggguugacaaggu

SEQ ID NO: 734690 - RNA, 19 nt, Artificial Sequence
  Description of Artificial Sequence: Synthetic oligonucleotide
accauaucaggaacuuuuc

SEQ ID NO: 734691 - RNA, 19 nt, Artificial Sequence
  Description of Artificial Sequence: Synthetic oligonucleotide
guaguucuauucuggacaa

SEQ ID NO: 734692 - RNA, 19 nt, Artificial Sequence
  Description of Artificial Sequence: Synthetic oligonucleotide
uccgguaguagcgggucgg

SEQ ID NO: 734693 - RNA, 19 nt, Artificial Sequence
  Description of Artificial Sequence: Synthetic oligonucleotide
uacuagaauggggauacua

SEQ ID NO: 734694 - RNA, 19 nt, Artificial Sequence
  Description of Artificial Sequence: Synthetic oligonucleotide
uaguaucggucccgaaucu

SEQ ID NO: 734695 - RNA, 19 nt, Artificial Sequence
  Description of Artificial Sequence: Synthetic oligonucleotide
guugacaagguucccaggu

SEQ ID NO: 734696 - RNA, 19 nt, Artificial Sequence
  Description of Artificial Sequence: Synthetic oligonucleotide
guaucggucccgaaucugc

SEQ ID NO: 734697 - RNA, 19 nt, Artificial Sequence
  Description of Artificial Sequence: Synthetic oligonucleotide
auauuucaggggacuuccc

SEQ ID NO: 734698 - RNA, 19 nt, Artificial Sequence
  Description of Artificial Sequence: Synthetic oligonucleotide
gguucgcaggaacaaagug

SEQ ID NO: 734699 - RNA, 19 nt, Artificial Sequence
  Description of Artificial Sequence: Synthetic oligonucleotide
guagaggcgcuuuggcuug

SEQ ID NO: 734700 - RNA, 19 nt, Artificial Sequence
  Description of Artificial Sequence: Synthetic oligonucleotide
ggguauaugccugagccug

SEQ ID NO: 734701 - RNA, 19 nt, Artificial Sequence
  Description of Artificial Sequence: Synthetic oligonucleotide
cuugucaucaguaguucua

SEQ ID NO: 734702 - RNA, 19 nt, Artificial Sequence
  Description of Artificial Sequence: Synthetic oligonucleotide
uaucacaccccacgugguc

SEQ ID NO: 734703 - RNA, 19 nt, Artificial Sequence
  Description of Artificial Sequence: Synthetic oligonucleotide
uaaagcccauucuggggac

SEQ ID NO: 734704 - RNA, 19 nt, Artificial Sequence
  Description of Artificial Sequence: Synthetic oligonucleotide
ccauucauaaagcccauuc

SEQ ID NO: 734705 - RNA, 19 nt, Artificial Sequence
  Description of Artificial Sequence: Synthetic oligonucleotide
agugcgggcucgcuugaag

SEQ ID NO: 734706 - RNA, 19 nt, Artificial Sequence
  Description of Artificial Sequence: Synthetic oligonucleotide
gccuccacuacuagaaugg

SEQ ID NO: 734707 - RNA, 19 nt, Artificial Sequence
  Description of Artificial Sequence: Synthetic oligonucleotide
ggagauccauucauaaagc

SEQ ID NO: 734708 - RNA, 19 nt, Artificial Sequence
  Description of Artificial Sequence: Synthetic oligonucleotide
gucgauguccacugagaac

SEQ ID NO: 734709 - RNA, 19 nt, Artificial Sequence
  Description of Artificial Sequence: Synthetic oligonucleotide
cagcccggcacucacggcc

SEQ ID NO: 734710 - RNA, 19 nt, Artificial Sequence
  Description of Artificial Sequence: Synthetic oligonucleotide
gagggguauaugccugagc

SEQ ID NO: 734711 - RNA, 19 nt, Artificial Sequence
  Description of Artificial Sequence: Synthetic oligonucleotide
ggagaauguggcuugucuc

SEQ ID NO: 734712 - RNA, 19 nt, Artificial Sequence
  Description of Artificial Sequence: Synthetic oligonucleotide
agagcagaguuaagucugg

SEQ ID NO: 734713 - RNA, 19 nt, Artificial Sequence
  Description of Artificial Sequence: Synthetic oligonucleotide
cagggacaauggcucaugg

SEQ ID NO: 734714 - RNA, 19 nt, Artificial Sequence
  Description of Artificial Sequence: Synthetic oligonucleotide
agugugcccaagccgccag

SEQ ID NO: 734715 - RNA, 19 nt, Artificial Sequence
  Description of Artificial Sequence: Synthetic oligonucleotide
uccaguugucuccgccugc

SEQ ID NO: 734716 - RNA, 19 nt, Artificial Sequence
  Description of Artificial Sequence: Synthetic oligonucleotide
guagcgggucggcuuaaag

SEQ ID NO: 734717 - RNA, 19 nt, Artificial Sequence
  Description of Artificial Sequence: Synthetic oligonucleotide
ugagaggguugacaagguu

SEQ ID NO: 734718 - RNA, 19 nt, Artificial Sequence
  Description of Artificial Sequence: Synthetic oligonucleotide
auccgguaguagcgggucg

SEQ ID NO: 734719 - RNA, 19 nt, Artificial Sequence
  Description of Artificial Sequence: Synthetic oligonucleotide
gccaagguuuuggagaucc

SEQ ID NO: 734720 - RNA, 19 nt, Artificial Sequence
  Description of Artificial Sequence: Synthetic oligonucleotide
uccgccugcgcuguggaga

SEQ ID NO: 734721 - RNA, 19 nt, Artificial Sequence
  Description of Artificial Sequence: Synthetic oligonucleotide
ggauugguacccuacucuc

SEQ ID NO: 734722 - RNA, 19 nt, Artificial Sequence
  Description of Artificial Sequence: Synthetic oligonucleotide
uucauauuucaggggacuu

SEQ ID NO: 734723 - RNA, 19 nt, Artificial Sequence
  Description of Artificial Sequence: Synthetic oligonucleotide
gccaauaucugcugggcca

SEQ ID NO: 734724 - RNA, 19 nt, Artificial Sequence
  Description of Artificial Sequence: Synthetic oligonucleotide
aguaccgugaaggggcaga

SEQ ID NO: 734725 - RNA, 19 nt, Artificial Sequence
  Description of Artificial Sequence: Synthetic oligonucleotide
aguaucggucccgaaucug

SEQ ID NO: 734726 - RNA, 19 nt, Artificial Sequence
  Description of Artificial Sequence: Synthetic oligonucleotide
gacuaggaccagugugccc

SEQ ID NO: 734727 - RNA, 19 nt, Artificial Sequence
  Description of Artificial Sequence: Synthetic oligonucleotide
uccauagcaggaugacgau

SEQ ID NO: 734728 - RNA, 19 nt, Artificial Sequence
  Description of Artificial Sequence: Synthetic oligonucleotide
agaauguggcuugucucca

SEQ ID NO: 734729 - RNA, 19 nt, Artificial Sequence
  Description of Artificial Sequence: Synthetic oligonucleotide
gguugagaggguugacaag

SEQ ID NO: 734730 - RNA, 19 nt, Artificial Sequence
  Description of Artificial Sequence: Synthetic oligonucleotide
ggauacuaggggagcaggg

SEQ ID NO: 734731 - RNA, 19 nt, Artificial Sequence
  Description of Artificial Sequence: Synthetic oligonucleotide
uugguacccuacucucuga

SEQ ID NO: 734732 - RNA, 19 nt, Artificial Sequence
  Description of Artificial Sequence: Synthetic oligonucleotide
gauccgcacugcaugguac

SEQ ID NO: 734733 - RNA, 19 nt, Artificial Sequence
  Description of Artificial Sequence: Synthetic oligonucleotide
gacggcuggcucuucaucu

SEQ ID NO: 734734 - RNA, 19 nt, Artificial Sequence
  Description of Artificial Sequence: Synthetic oligonucleotide
ucuggacaauaaagucagu

SEQ ID NO: 734735 - RNA, 19 nt, Artificial Sequence
  Description of Artificial Sequence: Synthetic oligonucleotide
accccacguggucuugugg

SEQ ID NO: 734736 - RNA, 19 nt, Artificial Sequence
  Description of Artificial Sequence: Synthetic oligonucleotide
gaaucagccuccacuacua

SEQ ID NO: 734737 - RNA, 19 nt, Artificial Sequence
  Description of Artificial Sequence: Synthetic oligonucleotide
auacagggcacgagugcgg

SEQ ID NO: 734738 - RNA, 19 nt, Artificial Sequence
  Description of Artificial Sequence: Synthetic oligonucleotide
gguacccuacucucugaag

SEQ ID NO: 734739 - RNA, 19 nt, Artificial Sequence
  Description of Artificial Sequence: Synthetic oligonucleotide
gagucgauguccacugaga

SEQ ID NO: 734740 - RNA, 19 nt, Artificial Sequence
  Description of Artificial Sequence: Synthetic oligonucleotide
ucgcaggaacaaaguggcc

SEQ ID NO: 734741 - RNA, 19 nt, Artificial Sequence
  Description of Artificial Sequence: Synthetic oligonucleotide
agaauaagguugagagggu

SEQ ID NO: 734742 - RNA, 19 nt, Artificial Sequence
  Description of Artificial Sequence: Synthetic oligonucleotide
uggggauacuaggggagca

SEQ ID NO: 734743 - RNA, 19 nt, Artificial Sequence
  Description of Artificial Sequence: Synthetic oligonucleotide
gccgcacuuccauagcagg

SEQ ID NO: 734744 - RNA, 19 nt, Artificial Sequence
  Description of Artificial Sequence: Synthetic oligonucleotide
agggccccagaaagcaugc

SEQ ID NO: 734745 - RNA, 19 nt, Artificial Sequence
  Description of Artificial Sequence: Synthetic oligonucleotide
guggcccuacuuuccagug

SEQ ID NO: 734746 - RNA, 19 nt, Artificial Sequence
  Description of Artificial Sequence: Synthetic oligonucleotide
cugcuauaguaccgugaag

SEQ ID NO: 734747 - RNA, 19 nt, Artificial Sequence
  Description of Artificial Sequence: Synthetic oligonucleotide
ugcgggcucgcuugaagaa

SEQ ID NO: 734748 - RNA, 19 nt, Artificial Sequence
  Description of Artificial Sequence: Synthetic oligonucleotide
uccuaugggcugaguuucu

SEQ ID NO: 734749 - RNA, 19 nt, Artificial Sequence
  Description of Artificial Sequence: Synthetic oligonucleotide
caccauaucaggaacuuuu

SEQ ID NO: 734750 - RNA, 19 nt, Artificial Sequence
  Description of Artificial Sequence: Synthetic oligonucleotide
acgaccacuggcacagguc

SEQ ID NO: 734751 - RNA, 19 nt, Artificial Sequence
  Description of Artificial Sequence: Synthetic oligonucleotide
aggacgggucagaaggauc

SEQ ID NO: 734752 - RNA, 19 nt, Artificial Sequence
  Description of Artificial Sequence: Synthetic oligonucleotide
gggauacuaggggagcagg

SEQ ID NO: 734753 - RNA, 19 nt, Artificial Sequence
  Description of Artificial Sequence: Synthetic oligonucleotide
aucggucccgaaucugcca

SEQ ID NO: 734754 - RNA, 19 nt, Artificial Sequence
  Description of Artificial Sequence: Synthetic oligonucleotide
agagggguauaugccugag

SEQ ID NO: 734755 - RNA, 19 nt, Artificial Sequence
  Description of Artificial Sequence: Synthetic oligonucleotide
ucuccgccugcgcugugga

SEQ ID NO: 734756 - RNA, 19 nt, Artificial Sequence
  Description of Artificial Sequence: Synthetic oligonucleotide
uguuaaugguagggaugcu

SEQ ID NO: 734757 - RNA, 19 nt, Artificial Sequence
  Description of Artificial Sequence: Synthetic oligonucleotide
ggucaguaguaucgguccc

SEQ ID NO: 734758 - RNA, 19 nt, Artificial Sequence
  Description of Artificial Sequence: Synthetic oligonucleotide
ucaggggacuucccacauc

SEQ ID NO: 734759 - RNA, 19 nt, Artificial Sequence
  Description of Artificial Sequence: Synthetic oligonucleotide
ugggacgauuccagccaca

SEQ ID NO: 734760 - RNA, 19 nt, Artificial Sequence
  Description of Artificial Sequence: Synthetic oligonucleotide
guagucgucggucagccuu

SEQ ID NO: 734761 - RNA, 19 nt, Artificial Sequence
  Description of Artificial Sequence: Synthetic oligonucleotide
acacccgugccuucacggu

SEQ ID NO: 734762 - RNA, 19 nt, Artificial Sequence
  Description of Artificial Sequence: Synthetic oligonucleotide
guaccgugaaggggcagag

SEQ ID NO: 734763 - RNA, 19 nt, Artificial Sequence
  Description of Artificial Sequence: Synthetic oligonucleotide
gcuuccuggaggcggguag

SEQ ID NO: 734764 - RNA, 19 nt, Artificial Sequence
  Description of Artificial Sequence: Synthetic oligonucleotide
agauagaggcuuggacaug

SEQ ID NO: 734765 - RNA, 19 nt, Artificial Sequence
  Description of Artificial Sequence: Synthetic oligonucleotide
acccugacucugucaaagu

SEQ ID NO: 734766 - RNA, 19 nt, Artificial Sequence
  Description of Artificial Sequence: Synthetic oligonucleotide
agccaucuacccugacucu

SEQ ID NO: 734767 - RNA, 19 nt, Artificial Sequence
  Description of Artificial Sequence: Synthetic oligonucleotide
guuccuaugggcugaguuu

SEQ ID NO: 734768 - RNA, 19 nt, Artificial Sequence
  Description of Artificial Sequence: Synthetic oligonucleotide
cccauauacaaagaaggca

SEQ ID NO: 734769 - RNA, 19 nt, Artificial Sequence
  Description of Artificial Sequence: Synthetic oligonucleotide
cauccccuccuuuggugug

SEQ ID NO: 734770 - RNA, 19 nt, Artificial Sequence
  Description of Artificial Sequence: Synthetic oligonucleotide
cacguggucuugugggguc

SEQ ID NO: 734771 - RNA, 19 nt, Artificial Sequence
  Description of Artificial Sequence: Synthetic oligonucleotide
cuguagccaagguuuugga

SEQ ID NO: 734772 - RNA, 19 nt, Artificial Sequence
  Description of Artificial Sequence: Synthetic oligonucleotide
cacucacggccacaagcac

SEQ ID NO: 734773 - RNA, 19 nt, Artificial Sequence
  Description of Artificial Sequence: Synthetic oligonucleotide
agccgcacuuccauagcag

SEQ ID NO: 734774 - RNA, 19 nt, Artificial Sequence
  Description of Artificial Sequence: Synthetic oligonucleotide
cccuuuuggacugucugag

SEQ ID NO: 734775 - RNA, 19 nt, Artificial Sequence
  Description of Artificial Sequence: Synthetic oligonucleotide
caaguaucacaccccacgu

SEQ ID NO: 734776 - RNA, 19 nt, Artificial Sequence
  Description of Artificial Sequence: Synthetic oligonucleotide
gugcgggcucgcuugaaga

SEQ ID NO: 734777 - RNA, 19 nt, Artificial Sequence
  Description of Artificial Sequence: Synthetic oligonucleotide
guagggaugcugguucgca

SEQ ID NO: 734778 - RNA, 19 nt, Artificial Sequence
  Description of Artificial Sequence: Synthetic oligonucleotide
gauugguacccuacucucu

SEQ ID NO: 734779 - RNA, 19 nt, Artificial Sequence
  Description of Artificial Sequence: Synthetic oligonucleotide
cagcucaaucucagccggc

SEQ ID NO: 734780 - RNA, 19 nt, Artificial Sequence
  Description of Artificial Sequence: Synthetic oligonucleotide
gagcacgaccacuggcaca

SEQ ID NO: 734781 - RNA, 19 nt, Artificial Sequence
  Description of Artificial Sequence: Synthetic oligonucleotide
ucaccauaucaggaacuuu

SEQ ID NO: 734782 - RNA, 19 nt, Artificial Sequence
  Description of Artificial Sequence: Synthetic oligonucleotide
cagaaagcaugccugcacu

SEQ ID NO: 734783 - RNA, 19 nt, Artificial Sequence
  Description of Artificial Sequence: Synthetic oligonucleotide
cugcccuacauucaaguau

SEQ ID NO: 734784 - RNA, 19 nt, Artificial Sequence
  Description of Artificial Sequence: Synthetic oligonucleotide
cagcugguuacccagugcu

SEQ ID NO: 734785 - RNA, 19 nt, Artificial Sequence
  Description of Artificial Sequence: Synthetic oligonucleotide
ugcacugaagagggguaua

SEQ ID NO: 734786 - RNA, 19 nt, Artificial Sequence
  Description of Artificial Sequence: Synthetic oligonucleotide
caucuacccugacucuguc

SEQ ID NO: 734787 - RNA, 19 nt, Artificial Sequence
  Description of Artificial Sequence: Synthetic oligonucleotide
gaauaagguugagaggguu

SEQ ID NO: 734788 - RNA, 19 nt, Artificial Sequence
  Description of Artificial Sequence: Synthetic oligonucleotide
auaguaccgugaaggggca

SEQ ID NO: 734789 - RNA, 19 nt, Artificial Sequence
  Description of Artificial Sequence: Synthetic oligonucleotide
gagagucuagggccccaga

SEQ ID NO: 734790 - RNA, 19 nt, Artificial Sequence
  Description of Artificial Sequence: Synthetic oligonucleotide
caccaaccacagcucaauc

SEQ ID NO: 734791 - RNA, 19 nt, Artificial Sequence
  Description of Artificial Sequence: Synthetic oligonucleotide
cacccgugccuucacgguc

SEQ ID NO: 734792 - RNA, 19 nt, Artificial Sequence
  Description of Artificial Sequence: Synthetic oligonucleotide
gguauaugccugagccugc

SEQ ID NO: 734793 - RNA, 19 nt, Artificial Sequence
  Description of Artificial Sequence: Synthetic oligonucleotide
gucacaccgggugggccgg

SEQ ID NO: 734794 - RNA, 19 nt, Artificial Sequence
  Description of Artificial Sequence: Synthetic oligonucleotide
ggucacaagaacauccccu

SEQ ID NO: 734795 - RNA, 19 nt, Artificial Sequence
  Description of Artificial Sequence: Synthetic oligonucleotide
uaguaccgugaaggggcag

SEQ ID NO: 734796 - RNA, 19 nt, Artificial Sequence
  Description of Artificial Sequence: Synthetic oligonucleotide
cccuacucucugaaggaug

SEQ ID NO: 734797 - RNA, 19 nt, Artificial Sequence
  Description of Artificial Sequence: Synthetic oligonucleotide
cagaaagccacaggcagcu

SEQ ID NO: 734798 - RNA, 19 nt, Artificial Sequence
  Description of Artificial Sequence: Synthetic oligonucleotide
gucuccgccugcgcugugg

SEQ ID NO: 734799 - RNA, 19 nt, Artificial Sequence
  Description of Artificial Sequence: Synthetic oligonucleotide
cagcgagcacgaccacugg

SEQ ID NO: 734800 - RNA, 19 nt, Artificial Sequence
  Description of Artificial Sequence: Synthetic oligonucleotide
ucacaccccacguggucuu

SEQ ID NO: 734801 - RNA, 19 nt, Artificial Sequence
  Description of Artificial Sequence: Synthetic oligonucleotide
ggagaggacugggaaucag

SEQ ID NO: 734802 - RNA, 19 nt, Artificial Sequence
  Description of Artificial Sequence: Synthetic oligonucleotide
caguugucuccgccugcgc

SEQ ID NO: 734803 - RNA, 19 nt, Artificial Sequence
  Description of Artificial Sequence: Synthetic oligonucleotide
acgauuccagccacacaca

SEQ ID NO: 734804 - RNA, 19 nt, Artificial Sequence
  Description of Artificial Sequence: Synthetic oligonucleotide
ggcguggcuagguuucuca

SEQ ID NO: 734805 - RNA, 19 nt, Artificial Sequence
  Description of Artificial Sequence: Synthetic oligonucleotide
ggggauacuaggggagcag

SEQ ID NO: 734806 - RNA, 19 nt, Artificial Sequence
  Description of Artificial Sequence: Synthetic oligonucleotide
cacuacuagaauggggaua

SEQ ID NO: 734807 - RNA, 19 nt, Artificial Sequence
  Description of Artificial Sequence: Synthetic oligonucleotide
gcguggcuagguuucucag

SEQ ID NO: 734808 - RNA, 19 nt, Artificial Sequence
  Description of Artificial Sequence: Synthetic oligonucleotide
gggacgauuccagccacac

SEQ ID NO: 734809 - RNA, 19 nt, Artificial Sequence
  Description of Artificial Sequence: Synthetic oligonucleotide
acccuacucucugaaggau

SEQ ID NO: 734810 - RNA, 19 nt, Artificial Sequence
  Description of Artificial Sequence: Synthetic oligonucleotide
ggucggcuuaaagaaguca

SEQ ID NO: 734811 - RNA, 19 nt, Artificial Sequence
  Description of Artificial Sequence: Synthetic oligonucleotide
cccaguagaggcgcuuugg

SEQ ID NO: 734812 - RNA, 19 nt, Artificial Sequence
  Description of Artificial Sequence: Synthetic oligonucleotide
ggugacaauggagguguca

SEQ ID NO: 734813 - RNA, 19 nt, Artificial Sequence
  Description of Artificial Sequence: Synthetic oligonucleotide
uggaggcggguagcgcucc

SEQ ID NO: 734814 - RNA, 19 nt, Artificial Sequence
  Description of Artificial Sequence: Synthetic oligonucleotide
gcacucacggccacaagca

SEQ ID NO: 734815 - RNA, 19 nt, Artificial Sequence
  Description of Artificial Sequence: Synthetic oligonucleotide
uggugacaauggagguguc

SEQ ID NO: 734816 - RNA, 19 nt, Artificial Sequence
  Description of Artificial Sequence: Synthetic oligonucleotide
ggaggcguggcuagguuuc

SEQ ID NO: 734817 - RNA, 19 nt, Artificial Sequence
  Description of Artificial Sequence: Synthetic oligonucleotide
uccuuugguguggcccuac

SEQ ID NO: 734818 - RNA, 19 nt, Artificial Sequence
  Description of Artificial Sequence: Synthetic oligonucleotide
agccgccagcccaucuccc

SEQ ID NO: 734819 - RNA, 19 nt, Artificial Sequence
  Description of Artificial Sequence: Synthetic oligonucleotide
ggugccagccaaacuugug

SEQ ID NO: 734820 - RNA, 19 nt, Artificial Sequence
  Description of Artificial Sequence: Synthetic oligonucleotide
cggcuuaaagaagucacac

SEQ ID NO: 734821 - RNA, 19 nt, Artificial Sequence
  Description of Artificial Sequence: Synthetic oligonucleotide
aguccucaaugaaggugcu

SEQ ID NO: 734822 - RNA, 19 nt, Artificial Sequence
  Description of Artificial Sequence: Synthetic oligonucleotide
caccccacguggucuugug

SEQ ID NO: 734823 - RNA, 19 nt, Artificial Sequence
  Description of Artificial Sequence: Synthetic oligonucleotide
agucgucggucagccuuuc

SEQ ID NO: 734824 - RNA, 19 nt, Artificial Sequence
  Description of Artificial Sequence: Synthetic oligonucleotide
cucaccuggaauucauauu

SEQ ID NO: 734825 - RNA, 19 nt, Artificial Sequence
  Description of Artificial Sequence: Synthetic oligonucleotide
gucccgaaucugccagcug

SEQ ID NO: 734826 - RNA, 19 nt, Artificial Sequence
  Description of Artificial Sequence: Synthetic oligonucleotide
cgggcucgcuugaagaagc

SEQ ID NO: 734827 - RNA, 19 nt, Artificial Sequence
  Description of Artificial Sequence: Synthetic oligonucleotide
gugacagguggagagcccu

SEQ ID NO: 734828 - RNA, 19 nt, Artificial Sequence
  Description of Artificial Sequence: Synthetic oligonucleotide
ccauagcaggaugacgaug

SEQ ID NO: 734829 - RNA, 19 nt, Artificial Sequence
  Description of Artificial Sequence: Synthetic oligonucleotide
gccugauugucuccuuguc

SEQ ID NO: 734830 - RNA, 19 nt, Artificial Sequence
  Description of Artificial Sequence: Synthetic oligonucleotide
gggcaugauccgguaguag

SEQ ID NO: 734831 - RNA, 19 nt, Artificial Sequence
  Description of Artificial Sequence: Synthetic oligonucleotide
cucugcauccugccaauau

SEQ ID NO: 734832 - RNA, 19 nt, Artificial Sequence
  Description of Artificial Sequence: Synthetic oligonucleotide
acguggucuuguggggucu

SEQ ID NO: 734833 - RNA, 19 nt, Artificial Sequence
  Description of Artificial Sequence: Synthetic oligonucleotide
cccuacauucaaguaucac

SEQ ID NO: 734834 - RNA, 19 nt, Artificial Sequence
  Description of Artificial Sequence: Synthetic oligonucleotide
agccaaacuuguggccccu

SEQ ID NO: 734835 - RNA, 19 nt, Artificial Sequence
  Description of Artificial Sequence: Synthetic oligonucleotide
guauaugccugagccugcu

SEQ ID NO: 734836 - RNA, 19 nt, Artificial Sequence
  Description of Artificial Sequence: Synthetic oligonucleotide
gcgggcucgcuugaagaag

SEQ ID NO: 734837 - RNA, 19 nt, Artificial Sequence
  Description of Artificial Sequence: Synthetic oligonucleotide
ggauccgcacugcauggua

SEQ ID NO: 734838 - RNA, 19 nt, Artificial Sequence
  Description of Artificial Sequence: Synthetic oligonucleotide
acaccccacguggucuugu

SEQ ID NO: 734839 - RNA, 19 nt, Artificial Sequence
  Description of Artificial Sequence: Synthetic oligonucleotide
guaucacaccccacguggu

SEQ ID NO: 734840 - RNA, 19 nt, Artificial Sequence
  Description of Artificial Sequence: Synthetic oligonucleotide
gcgggucggcuuaaagaag

SEQ ID NO: 734841 - RNA, 19 nt, Artificial Sequence
  Description of Artificial Sequence: Synthetic oligonucleotide
ucacaccgggugggccggg

SEQ ID NO: 734842 - RNA, 19 nt, Artificial Sequence
  Description of Artificial Sequence: Synthetic oligonucleotide
ccccuuuuggacugucuga

SEQ ID NO: 734843 - RNA, 19 nt, Artificial Sequence
  Description of Artificial Sequence: Synthetic oligonucleotide
ccgugaaggggcagagcug

SEQ ID NO: 734844 - RNA, 19 nt, Artificial Sequence
  Description of Artificial Sequence: Synthetic oligonucleotide
gggguauaugccugagccu

SEQ ID NO: 734845 - RNA, 19 nt, Artificial Sequence
  Description of Artificial Sequence: Synthetic oligonucleotide
ggguagggugcuuccugga

SEQ ID NO: 734846 - RNA, 19 nt, Artificial Sequence
  Description of Artificial Sequence: Synthetic oligonucleotide
ggauccgguguggaagaga

SEQ ID NO: 734847 - RNA, 19 nt, Artificial Sequence
  Description of Artificial Sequence: Synthetic oligonucleotide
gaggcggguagcgcuccuc

SEQ ID NO: 734848 - RNA, 19 nt, Artificial Sequence
  Description of Artificial Sequence: Synthetic oligonucleotide
ccgguguggaagagagaug

SEQ ID NO: 734849 - RNA, 19 nt, Artificial Sequence
  Description of Artificial Sequence: Synthetic oligonucleotide
aguagcgggucggcuuaaa

SEQ ID NO: 734850 - RNA, 19 nt, Artificial Sequence
  Description of Artificial Sequence: Synthetic oligonucleotide
agcccggcacucacggcca

SEQ ID NO: 734851 - RNA, 19 nt, Artificial Sequence
  Description of Artificial Sequence: Synthetic oligonucleotide
ccgcacuuccauagcagga

SEQ ID NO: 734852 - RNA, 19 nt, Artificial Sequence
  Description of Artificial Sequence: Synthetic oligonucleotide
agaggcgcuuuggcuuggu

SEQ ID NO: 734853 - RNA, 19 nt, Artificial Sequence
  Description of Artificial Sequence: Synthetic oligonucleotide
gcugguucgcaggaacaaa

SEQ ID NO: 734854 - RNA, 19 nt, Artificial Sequence
  Description of Artificial Sequence: Synthetic oligonucleotide
ccugcccuacauucaagua

SEQ ID NO: 734855 - RNA, 19 nt, Artificial Sequence
  Description of Artificial Sequence: Synthetic oligonucleotide
gggucggcuuaaagaaguc

SEQ ID NO: 734856 - RNA, 19 nt, Artificial Sequence
  Description of Artificial Sequence: Synthetic oligonucleotide
cacugggcucaccuggaau

SEQ ID NO: 734857 - RNA, 19 nt, Artificial Sequence
  Description of Artificial Sequence: Synthetic oligonucleotide
ccaagguuuuggagaucca

SEQ ID NO: 734858 - RNA, 19 nt, Artificial Sequence
  Description of Artificial Sequence: Synthetic oligonucleotide
ccgcacugcaugguacuug

SEQ ID NO: 734859 - RNA, 19 nt, Artificial Sequence
  Description of Artificial Sequence: Synthetic oligonucleotide
ccccugcccuacauucaag

SEQ ID NO: 734860 - RNA, 19 nt, Artificial Sequence
  Description of Artificial Sequence: Synthetic oligonucleotide
cugcacugaagagggguau

SEQ ID NO: 734861 - RNA, 19 nt, Artificial Sequence
  Description of Artificial Sequence: Synthetic oligonucleotide
ccgguaguagcgggucggc

SEQ ID NO: 734862 - RNA, 19 nt, Artificial Sequence
  Description of Artificial Sequence: Synthetic oligonucleotide
cgggucggcuuaaagaagu

SEQ ID NO: 734863 - RNA, 19 nt, Artificial Sequence
  Description of Artificial Sequence: Synthetic oligonucleotide
gaggcguggcuagguuucu

SEQ ID NO: 734864 - RNA, 19 nt, Artificial Sequence
  Description of Artificial Sequence: Synthetic oligonucleotide
gggaggcguggcuagguuu

SEQ ID NO: 734865 - RNA, 19 nt, Artificial Sequence
  Description of Artificial Sequence: Synthetic oligonucleotide
gcaccaaccacagcucaau

SEQ ID NO: 734866 - RNA, 19 nt, Artificial Sequence
  Description of Artificial Sequence: Synthetic oligonucleotide
gcccuacauucaaguauca

SEQ ID NO: 734867 - RNA, 19 nt, Artificial Sequence
  Description of Artificial Sequence: Synthetic oligonucleotide
gucgucggucagccuuucu

SEQ ID NO: 734868 - RNA, 19 nt, Artificial Sequence
  Description of Artificial Sequence: Synthetic oligonucleotide
ccuuuuggacugucugagu

SEQ ID NO: 734869 - RNA, 19 nt, Artificial Sequence
  Description of Artificial Sequence: Synthetic oligonucleotide
cuacuagaauggggauacu

SEQ ID NO: 734870 - RNA, 19 nt, Artificial Sequence
  Description of Artificial Sequence: Synthetic oligonucleotide
gugucaggaaugggacgau

SEQ ID NO: 734871 - RNA, 19 nt, Artificial Sequence
  Description of Artificial Sequence: Synthetic oligonucleotide
ggcucuccccugcccuaca

SEQ ID NO: 734872 - RNA, 19 nt, Artificial Sequence
  Description of Artificial Sequence: Synthetic oligonucleotide
ccacuacuagaauggggau

SEQ ID NO: 734873 - RNA, 19 nt, Artificial Sequence
  Description of Artificial Sequence: Synthetic oligonucleotide
gugccuucacggucacauu

SEQ ID NO: 734874 - RNA, 19 nt, Artificial Sequence
  Description of Artificial Sequence: Synthetic oligonucleotide
ggcggguagcgcuccuccu

SEQ ID NO: 734875 - RNA, 19 nt, Artificial Sequence
  Description of Artificial Sequence: Synthetic oligonucleotide
cccgaaucugccagcuggu

SEQ ID NO: 734876 - RNA, 19 nt, Artificial Sequence
  Description of Artificial Sequence: Synthetic oligonucleotide
ccgagucgauguccacuga

SEQ ID NO: 734877 - RNA, 19 nt, Artificial Sequence
  Description of Artificial Sequence: Synthetic oligonucleotide
cccgugccuucacggucac

SEQ ID NO: 734878 - RNA, 19 nt, Artificial Sequence
  Description of Artificial Sequence: Synthetic oligonucleotide
ccaaacuuguggccccuuu

SEQ ID NO: 734879 - RNA, 19 nt, Artificial Sequence
  Description of Artificial Sequence: Synthetic oligonucleotide
ccaagccgccagcccaucu

SEQ ID NO: 734880 - RNA, 19 nt, Artificial Sequence
  Description of Artificial Sequence: Synthetic oligonucleotide
guggccccuuuuggacugu

SEQ ID NO: 734881 - RNA, 19 nt, Artificial Sequence
  Description of Artificial Sequence: Synthetic oligonucleotide
gcacgagugcgggcucgcu

SEQ ID NO: 734882 - RNA, 19 nt, Artificial Sequence
  Description of Artificial Sequence: Synthetic oligonucleotide
ccgaaucugccagcugguu

SEQ ID NO: 734883 - RNA, 19 nt, Artificial Sequence
  Description of Artificial Sequence: Synthetic oligonucleotide
ccgugccuucacggucaca

SEQ ID NO: 734884 - RNA, 19 nt, Artificial Sequence
  Description of Artificial Sequence: Synthetic oligonucleotide
cgccugcgcuguggagaau

SEQ ID NO: 734885 - RNA, 19 nt, Artificial Sequence
  Description of Artificial Sequence: Synthetic oligonucleotide
ucaauuaucaaucauuuag

SEQ ID NO: 734886 - RNA, 19 nt, Artificial Sequence
  Description of Artificial Sequence: Synthetic oligonucleotide
auuuagguaaugcugaggc

SEQ ID NO: 734887 - RNA, 19 nt, Artificial Sequence
  Description of Artificial Sequence: Synthetic oligonucleotide
aagaucaacaaguaaguuc

SEQ ID NO: 734888 - RNA, 19 nt, Artificial Sequence
  Description of Artificial Sequence: Synthetic oligonucleotide
aauaccacgaaacuugcuc

SEQ ID NO: 734889 - RNA, 19 nt, Artificial Sequence
  Description of Artificial Sequence: Synthetic oligonucleotide
aaguagaacaccucagugc

SEQ ID NO: 734890 - RNA, 19 nt, Artificial Sequence
  Description of Artificial Sequence: Synthetic oligonucleotide
uuugcaacauauaacacag

SEQ ID NO: 734891 - RNA, 19 nt, Artificial Sequence
  Description of Artificial Sequence: Synthetic oligonucleotide
uuguauaugguaaugaaca

SEQ ID NO: 734892 - RNA, 19 nt, Artificial Sequence
  Description of Artificial Sequence: Synthetic oligonucleotide
uagguuagcauuuagaaca

SEQ ID NO: 734893 - RNA, 19 nt, Artificial Sequence
  Description of Artificial Sequence: Synthetic oligonucleotide
ucgaagaucaacaaguaag

SEQ ID NO: 734894 - RNA, 19 nt, Artificial Sequence
  Description of Artificial Sequence: Synthetic oligonucleotide
uuuagauauuuaaauauug

SEQ ID NO: 734895 - RNA, 19 nt, Artificial Sequence
  Description of Artificial Sequence: Synthetic oligonucleotide
  modified_base (5)..(5): a, c, u, g, unknown or other
uuuancugagcauaaauac

SEQ ID NO: 734896 - RNA, 19 nt, Artificial Sequence
  Description of Artificial Sequence: Synthetic oligonucleotide
ucaagaagcgaaaugaucu

SEQ ID NO: 734897 - RNA, 19 nt, Artificial Sequence
  Description of Artificial Sequence: Synthetic oligonucleotide
uuuagaacaaauguggcag

SEQ ID NO: 734898 - RNA, 19 nt, Artificial Sequence
  Description of Artificial Sequence: Synthetic oligonucleotide
uugaauaccacgaaacuug

SEQ ID NO: 734899 - RNA, 19 nt, Artificial Sequence
  Description of Artificial Sequence: Synthetic oligonucleotide
  modified_base (2)..(2): a, c, u, g, unknown or other
unuucuuguacuaaaggca

SEQ ID NO: 734900 - RNA, 19 nt, Artificial Sequence
  Description of Artificial Sequence: Synthetic oligonucleotide
aauuaucaaucauuuagug

SEQ ID NO: 734901 - RNA, 19 nt, Artificial Sequence
  Description of Artificial Sequence: Synthetic oligonucleotide
aauucaaccauaucagugu

SEQ ID NO: 734902 - RNA, 19 nt, Artificial Sequence
  Description of Artificial Sequence: Synthetic oligonucleotide
uauaugguaaugaacaguc

SEQ ID NO: 734903 - RNA, 19 nt, Artificial Sequence
  Description of Artificial Sequence: Synthetic oligonucleotide
aaaacucucaguaaagguc

SEQ ID NO: 734904 - RNA, 19 nt, Artificial Sequence
  Description of Artificial Sequence: Synthetic oligonucleotide
uccauaugaaucaacagcu

SEQ ID NO: 734905 - RNA, 19 nt, Artificial Sequence
  Description of Artificial Sequence: Synthetic oligonucleotide
uuuuaaagcauccuuguau

SEQ ID NO: 734906 - RNA, 19 nt, Artificial Sequence
  Description of Artificial Sequence: Synthetic oligonucleotide
aaacagauacgucuugguc

SEQ ID NO: 734907 - RNA, 19 nt, Artificial Sequence
  Description of Artificial Sequence: Synthetic oligonucleotide
  modified_base (18)..(18): a, c, u, g, unknown or other
agaaguaccaauauuuanc

SEQ ID NO: 734908 - RNA, 19 nt, Artificial Sequence
  Description of Artificial Sequence: Synthetic oligonucleotide
guacuaaaggcacugaucc

SEQ ID NO: 734909 - RNA, 19 nt, Artificial Sequence
  Description of Artificial Sequence: Synthetic oligonucleotide
ucuaaagauguccuuagga

SEQ ID NO: 734910 - RNA, 19 nt, Artificial Sequence
  Description of Artificial Sequence: Synthetic oligonucleotide
  modified_base (12)..(12): a, c, u, g, unknown or other
accaauauuuancugagca

SEQ ID NO: 734911 - RNA, 19 nt, Artificial Sequence
  Description of Artificial Sequence: Synthetic oligonucleotide
cuguacuaaaacuagcucc

SEQ ID NO: 734912 - RNA, 19 nt, Artificial Sequence
  Description of Artificial Sequence: Synthetic oligonucleotide
uguacuaaaacuagcucca

SEQ ID NO: 734913 - RNA, 19 nt, Artificial Sequence
  Description of Artificial Sequence: Synthetic oligonucleotide
ucugacacuuguuagagga

SEQ ID NO: 734914 - RNA, 19 nt, Artificial Sequence
  Description of Artificial Sequence: Synthetic oligonucleotide
  modified_base (3)..(3): a, c, u, g, unknown or other
gunuucuuguacuaaaggc

SEQ ID NO: 734915 - RNA, 19 nt, Artificial Sequence
  Description of Artificial Sequence: Synthetic oligonucleotide
uggauaacagguagcagcg

SEQ ID NO: 734916 - RNA, 19 nt, Artificial Sequence
  Description of Artificial Sequence: Synthetic oligonucleotide
ugugucagcaaccucacca

SEQ ID NO: 734917 - RNA, 19 nt, Artificial Sequence
  Description of Artificial Sequence: Synthetic oligonucleotide
ugauaugccaucuacugca

SEQ ID NO: 734918 - RNA, 19 nt, Artificial Sequence
  Description of Artificial Sequence: Synthetic oligonucleotide
uauaguguguccuauuucu

SEQ ID NO: 734919 - RNA, 19 nt, Artificial Sequence
  Description of Artificial Sequence: Synthetic oligonucleotide
uugagaaguaccaauauuu

SEQ ID NO: 734920 - RNA, 19 nt, Artificial Sequence
  Description of Artificial Sequence: Synthetic oligonucleotide
aaucucaacauuaagcgca

SEQ ID NO: 734921 - RNA, 19 nt, Artificial Sequence
  Description of Artificial Sequence: Synthetic oligonucleotide
aagacguuuucagagcacc

SEQ ID NO: 734922 - RNA, 19 nt, Artificial Sequence
  Description of Artificial Sequence: Synthetic oligonucleotide
ugaucugcucaugagaugg

SEQ ID NO: 734923 - RNA, 19 nt, Artificial Sequence
  Description of Artificial Sequence: Synthetic oligonucleotide
auaccacgaaacuugcucc

SEQ ID NO: 734924 - RNA, 19 nt, Artificial Sequence
  Description of Artificial Sequence: Synthetic oligonucleotide
uguaggugaagguauacug

SEQ ID NO: 734925 - RNA, 19 nt, Artificial Sequence
  Description of Artificial Sequence: Synthetic oligonucleotide
uucauuacaucauuguacu

SEQ ID NO: 734926 - RNA, 19 nt, Artificial Sequence
  Description of Artificial Sequence: Synthetic oligonucleotide
aaccguaagcuauccaugg

SEQ ID NO: 734927 - RNA, 19 nt, Artificial Sequence
  Description of Artificial Sequence: Synthetic oligonucleotide
aaaaccuuugcccaaggaa

SEQ ID NO: 734928 - RNA, 19 nt, Artificial Sequence
  Description of Artificial Sequence: Synthetic oligonucleotide
  modified_base (4)..(4): a, c, u, g, unknown or other
uuancugagcauaaauacu

SEQ ID NO: 734929 - RNA, 19 nt, Artificial Sequence
  Description of Artificial Sequence: Synthetic oligonucleotide
uaaacaggaacccuccaug

SEQ ID NO: 734930 - RNA, 19 nt, Artificial Sequence
  Description of Artificial Sequence: Synthetic oligonucleotide
ucaacaaguaaguucauua

SEQ ID NO: 734931 - RNA, 19 nt, Artificial Sequence
  Description of Artificial Sequence: Synthetic oligonucleotide
uuucaauuaucaaucauuu

SEQ ID NO: 734932 - RNA, 19 nt, Artificial Sequence
  Description of Artificial Sequence: Synthetic oligonucleotide
aguccaauucuguucauuc

SEQ ID NO: 734933 - RNA, 19 nt, Artificial Sequence
  Description of Artificial Sequence: Synthetic oligonucleotide
aguagaacaccucagugca

SEQ ID NO: 734934 - RNA, 19 nt, Artificial Sequence
  Description of Artificial Sequence: Synthetic oligonucleotide
augauaugccaucuacugc

SEQ ID NO: 734935 - RNA, 19 nt, Artificial Sequence
  Description of Artificial Sequence: Synthetic oligonucleotide
guuauuuguaccauuaaac

SEQ ID NO: 734936 - RNA, 19 nt, Artificial Sequence
  Description of Artificial Sequence: Synthetic oligonucleotide
  modified_base (3)..(3): a, c, u, g, unknown or other
uancugagcauaaauacua

SEQ ID NO: 734937 - RNA, 19 nt, Artificial Sequence
  Description of Artificial Sequence: Synthetic oligonucleotide
uucuguacuaaaacuagcu

SEQ ID NO: 734938 - RNA, 19 nt, Artificial Sequence
  Description of Artificial Sequence: Synthetic oligonucleotide
cuaaaacuagcuccaaugc

SEQ ID NO: 734939 - RNA, 19 nt, Artificial Sequence
  Description of Artificial Sequence: Synthetic oligonucleotide
aaccauaucagugucgaug

SEQ ID NO: 734940 - RNA, 19 nt, Artificial Sequence
  Description of Artificial Sequence: Synthetic oligonucleotide
ugagcauaaauacuaacuu

SEQ ID NO: 734941 - RNA, 19 nt, Artificial Sequence
  Description of Artificial Sequence: Synthetic oligonucleotide
ucugcuacucuucagaguu

SEQ ID NO: 734942 - RNA, 19 nt, Artificial Sequence
  Description of Artificial Sequence: Synthetic oligonucleotide
uguauaugguaaugaacag

SEQ ID NO: 734943 - RNA, 19 nt, Artificial Sequence
  Description of Artificial Sequence: Synthetic oligonucleotide
aaacauagcaacaggauaa

SEQ ID NO: 734944 - RNA, 19 nt, Artificial Sequence
  Description of Artificial Sequence: Synthetic oligonucleotide
ccaaucucaacauuaagcg

SEQ ID NO: 734945 - RNA, 19 nt, Artificial Sequence
  Description of Artificial Sequence: Synthetic oligonucleotide
gaaaugaucugcucaugag

SEQ ID NO: 734946 - RNA, 19 nt, Artificial Sequence
  Description of Artificial Sequence: Synthetic oligonucleotide
uaugguaaugaacagucua

SEQ ID NO: 734947 - RNA, 19 nt, Artificial Sequence
  Description of Artificial Sequence: Synthetic oligonucleotide
ucaacauuaagcgcauagg

SEQ ID NO: 734948 - RNA, 19 nt, Artificial Sequence
  Description of Artificial Sequence: Synthetic oligonucleotide
cuuguauaugguaaugaac

SEQ ID NO: 734949 - RNA, 19 nt, Artificial Sequence
  Description of Artificial Sequence: Synthetic oligonucleotide
uaaaacuagcuccaaugcu

SEQ ID NO: 734950 - RNA, 19 nt, Artificial Sequence
  Description of Artificial Sequence: Synthetic oligonucleotide
cuaaugauaugccaucuac

SEQ ID NO: 734951 - RNA, 19 nt, Artificial Sequence
  Description of Artificial Sequence: Synthetic oligonucleotide
ugacaugcucguuagaaga

SEQ ID NO: 734952 - RNA, 19 nt, Artificial Sequence
  Description of Artificial Sequence: Synthetic oligonucleotide
aaaacagauacgucuuggu

SEQ ID NO: 734953 - RNA, 19 nt, Artificial Sequence
  Description of Artificial Sequence: Synthetic oligonucleotide
acauuaagcgcauaggaaa

SEQ ID NO: 734954 - RNA, 19 nt, Artificial Sequence
  Description of Artificial Sequence: Synthetic oligonucleotide
caaacugguaauuaguuga

SEQ ID NO: 734955 - RNA, 19 nt, Artificial Sequence
  Description of Artificial Sequence: Synthetic oligonucleotide
  modified_base (16)..(16): a, c, u, g, unknown or other
aaguaccaauauuuancug

SEQ ID NO: 734956 - RNA, 19 nt, Artificial Sequence
  Description of Artificial Sequence: Synthetic oligonucleotide
uuucuaagggcacacuaga

SEQ ID NO: 734957 - RNA, 19 nt, Artificial Sequence
  Description of Artificial Sequence: Synthetic oligonucleotide
aaaaugguggauuccuuaa

SEQ ID NO: 734958 - RNA, 19 nt, Artificial Sequence
  Description of Artificial Sequence: Synthetic oligonucleotide
aagccaugcaauccauugg

SEQ ID NO: 734959 - RNA, 19 nt, Artificial Sequence
  Description of Artificial Sequence: Synthetic oligonucleotide
ucaccauuaggcaguaugc

SEQ ID NO: 734960 - RNA, 19 nt, Artificial Sequence
  Description of Artificial Sequence: Synthetic oligonucleotide
gcauuuagaacaaaugugg

SEQ ID NO: 734961 - RNA, 19 nt, Artificial Sequence
  Description of Artificial Sequence: Synthetic oligonucleotide
uguacuaaaggcacugauc

SEQ ID NO: 734962 - RNA, 19 nt, Artificial Sequence
  Description of Artificial Sequence: Synthetic oligonucleotide
  modified_base (4)..(4): a, c, u, g, unknown or other
ggunuucuuguacuaaagg

SEQ ID NO: 734963 - RNA, 19 nt, Artificial Sequence
  Description of Artificial Sequence: Synthetic oligonucleotide
uucgcaaacugguaauuag

SEQ ID NO: 734964 - RNA, 19 nt, Artificial Sequence
  Description of Artificial Sequence: Synthetic oligonucleotide
aagcgaaaugaucugcuca

SEQ ID NO: 734965 - RNA, 19 nt, Artificial Sequence
  Description of Artificial Sequence: Synthetic oligonucleotide
uaguguuuguaacaucuca

SEQ ID NO: 734966 - RNA, 19 nt, Artificial Sequence
  Description of Artificial Sequence: Synthetic oligonucleotide
ucauuuuaacagaugaguu

SEQ ID NO: 734967 - RNA, 19 nt, Artificial Sequence
  Description of Artificial Sequence: Synthetic oligonucleotide
acugguaauuaguugauaa

SEQ ID NO: 734968 - RNA, 19 nt, Artificial Sequence
  Description of Artificial Sequence: Synthetic oligonucleotide
guaauuucgaagaucaaca

SEQ ID NO: 734969 - RNA, 19 nt, Artificial Sequence
  Description of Artificial Sequence: Synthetic oligonucleotide
cuauugagaaaacucucag

SEQ ID NO: 734970 - RNA, 19 nt, Artificial Sequence
  Description of Artificial Sequence: Synthetic oligonucleotide
agcaccguugaauaccacg

SEQ ID NO: 734971 - RNA, 19 nt, Artificial Sequence
  Description of Artificial Sequence: Synthetic oligonucleotide
agcaggauaagcuuuguau

SEQ ID NO: 734972 - RNA, 19 nt, Artificial Sequence
  Description of Artificial Sequence: Synthetic oligonucleotide
uucaaccauaucagugucg

SEQ ID NO: 734973 - RNA, 19 nt, Artificial Sequence
  Description of Artificial Sequence: Synthetic oligonucleotide
ugaaagguagguguaauaa

SEQ ID NO: 734974 - RNA, 19 nt, Artificial Sequence
  Description of Artificial Sequence: Synthetic oligonucleotide
ugucgauggaaacucugag

SEQ ID NO: 734975 - RNA, 19 nt, Artificial Sequence
  Description of Artificial Sequence: Synthetic oligonucleotide
cuuucaagaagcgaaauga

SEQ ID NO: 734976 - RNA, 19 nt, Artificial Sequence
  Description of Artificial Sequence: Synthetic oligonucleotide
aacuaugcuggacuuggca

SEQ ID NO: 734977 - RNA, 19 nt, Artificial Sequence
  Description of Artificial Sequence: Synthetic oligonucleotide
ucuguacuaaaacuagcuc

SEQ ID NO: 734978 - RNA, 19 nt, Artificial Sequence
  Description of Artificial Sequence: Synthetic oligonucleotide
guugauaaaacagauacgu

SEQ ID NO: 734979 - RNA, 19 nt, Artificial Sequence
  Description of Artificial Sequence: Synthetic oligonucleotide
ugaauaccacgaaacuugc

SEQ ID NO: 734980 - RNA, 19 nt, Artificial Sequence
  Description of Artificial Sequence: Synthetic oligonucleotide
aucgagcucauuuagguaa

SEQ ID NO: 734981 - RNA, 19 nt, Artificial Sequence
  Description of Artificial Sequence: Synthetic oligonucleotide
cuauccauggucucuggag

SEQ ID NO: 734982 - RNA, 19 nt, Artificial Sequence
  Description of Artificial Sequence: Synthetic oligonucleotide
  modified_base (14)..(14): a, c, u, g, unknown or other
guaccaauauuuancugag

SEQ ID NO: 734983 - RNA, 19 nt, Artificial Sequence
  Description of Artificial Sequence: Synthetic oligonucleotide
agcacuauuugccugaguu

SEQ ID NO: 734984 - RNA, 19 nt, Artificial Sequence
  Description of Artificial Sequence: Synthetic oligonucleotide
uauugagaaaacucucagu

SEQ ID NO: 734985 - RNA, 19 nt, Artificial Sequence
  Description of Artificial Sequence: Synthetic oligonucleotide
cucaccauuaggcaguaug

SEQ ID NO: 734986 - RNA, 19 nt, Artificial Sequence
  Description of Artificial Sequence: Synthetic oligonucleotide
gauaacagguagcagcgca

SEQ ID NO: 734987 - RNA, 19 nt, Artificial Sequence
  Description of Artificial Sequence: Synthetic oligonucleotide
uccgcuucuguacuaaaac

SEQ ID NO: 734988 - RNA, 19 nt, Artificial Sequence
  Description of Artificial Sequence: Synthetic oligonucleotide
auuuguaccauuaaaccau

SEQ ID NO: 734989 - RNA, 19 nt, Artificial Sequence
  Description of Artificial Sequence: Synthetic oligonucleotide
uuccgaauccacccaacag

SEQ ID NO: 734990 - RNA, 19 nt, Artificial Sequence
  Description of Artificial Sequence: Synthetic oligonucleotide
uaugcaauguauacuggua

SEQ ID NO: 734991 - RNA, 19 nt, Artificial Sequence
  Description of Artificial Sequence: Synthetic oligonucleotide
aaaccuuugcccaaggaau

SEQ ID NO: 734992 - RNA, 19 nt, Artificial Sequence
  Description of Artificial Sequence: Synthetic oligonucleotide
ucguuagaagaauuuauua

SEQ ID NO: 734993 - RNA, 19 nt, Artificial Sequence
  Description of Artificial Sequence: Synthetic oligonucleotide
ugugcuaaugauucugaaa

SEQ ID NO: 734994 - RNA, 19 nt, Artificial Sequence
  Description of Artificial Sequence: Synthetic oligonucleotide
  modified_base (9)..(9): a, c, u, g, unknown or other
aauauuuancugagcauaa

SEQ ID NO: 734995 - RNA, 19 nt, Artificial Sequence
  Description of Artificial Sequence: Synthetic oligonucleotide
ucuuguacuaaaggcacug

SEQ ID NO: 734996 - RNA, 19 nt, Artificial Sequence
  Description of Artificial Sequence: Synthetic oligonucleotide
cauaauugugggcacauca

SEQ ID NO: 734997 - RNA, 19 nt, Artificial Sequence
  Description of Artificial Sequence: Synthetic oligonucleotide
cauagagcggcacaacaag

SEQ ID NO: 734998 - RNA, 19 nt, Artificial Sequence
  Description of Artificial Sequence: Synthetic oligonucleotide
ugagaaguaccaauauuua

SEQ ID NO: 734999 - RNA, 19 nt, Artificial Sequence
  Description of Artificial Sequence: Synthetic oligonucleotide
  modified_base (17)..(17): a, c, u, g, unknown or other
gaaguaccaauauuuancu

SEQ ID NO: 735000 - RNA, 19 nt, Artificial Sequence
  Description of Artificial Sequence: Synthetic oligonucleotide
ucucguaaagccaaccgua

SEQ ID NO: 735001 - RNA, 19 nt, Artificial Sequence
  Description of Artificial Sequence: Synthetic oligonucleotide
ucauuuagguaaugcugag

SEQ ID NO: 735002 - RNA, 19 nt, Artificial Sequence
  Description of Artificial Sequence: Synthetic oligonucleotide
guaggugaagguauacugg

SEQ ID NO: 735003 - RNA, 19 nt, Artificial Sequence
  Description of Artificial Sequence: Synthetic oligonucleotide
ucacaaguagguuagcauu

SEQ ID NO: 735004 - RNA, 19 nt, Artificial Sequence
  Description of Artificial Sequence: Synthetic oligonucleotide
aguugauaaaacagauacg

SEQ ID NO: 735005 - RNA, 19 nt, Artificial Sequence
  Description of Artificial Sequence: Synthetic oligonucleotide
uuauaguguguccuauuuc

SEQ ID NO: 735006 - RNA, 19 nt, Artificial Sequence
  Description of Artificial Sequence: Synthetic oligonucleotide
guggcacaaucuuagaaug

SEQ ID NO: 735007 - RNA, 19 nt, Artificial Sequence
  Description of Artificial Sequence: Synthetic oligonucleotide
  modified_base (9)..(9): a, c, u, g, unknown or other
agaugggunuucuuguacu

SEQ ID NO: 735008 - RNA, 19 nt, Artificial Sequence
  Description of Artificial Sequence: Synthetic oligonucleotide
auuacaucauuguacuuuu

SEQ ID NO: 735009 - RNA, 19 nt, Artificial Sequence
  Description of Artificial Sequence: Synthetic oligonucleotide
uguaccauuaaaccaucuu

SEQ ID NO: 735010 - RNA, 19 nt, Artificial Sequence
  Description of Artificial Sequence: Synthetic oligonucleotide
uucacaaguagguuagcau

SEQ ID NO: 735011 - RNA, 19 nt, Artificial Sequence
  Description of Artificial Sequence: Synthetic oligonucleotide
augacaugcucguuagaag

SEQ ID NO: 735012 - RNA, 19 nt, Artificial Sequence
  Description of Artificial Sequence: Synthetic oligonucleotide
uucuuuggagccccggccc

SEQ ID NO: 735013 - RNA, 19 nt, Artificial Sequence
  Description of Artificial Sequence: Synthetic oligonucleotide
uauucauaauugugggcac

SEQ ID NO: 735014 - RNA, 19 nt, Artificial Sequence
  Description of Artificial Sequence: Synthetic oligonucleotide
uuagaggagcaggauaagc

SEQ ID NO: 735015 - RNA, 19 nt, Artificial Sequence
  Description of Artificial Sequence: Synthetic oligonucleotide
auggcuauuucuuucgcaa

SEQ ID NO: 735016 - RNA, 19 nt, Artificial Sequence
  Description of Artificial Sequence: Synthetic oligonucleotide
cuaugcuggacuuggcaag

SEQ ID NO: 735017 - RNA, 19 nt, Artificial Sequence
  Description of Artificial Sequence: Synthetic oligonucleotide
ucguaaagccaaccguaag

SEQ ID NO: 735018 - RNA, 19 nt, Artificial Sequence
  Description of Artificial Sequence: Synthetic oligonucleotide
guagcagcgcacuaucgag

SEQ ID NO: 735019 - RNA, 19 nt, Artificial Sequence
  Description of Artificial Sequence: Synthetic oligonucleotide
ucuauuucuaagggcacac

SEQ ID NO: 735020 - RNA, 19 nt, Artificial Sequence
  Description of Artificial Sequence: Synthetic oligonucleotide
gguaaugaacagucuaaag

SEQ ID NO: 735021 - RNA, 19 nt, Artificial Sequence
  Description of Artificial Sequence: Synthetic oligonucleotide
  modified_base (19)..(19): a, c, u, g, unknown or other
gagaaguaccaauauuuan

SEQ ID NO: 735022 - RNA, 19 nt, Artificial Sequence
  Description of Artificial Sequence: Synthetic oligonucleotide
auagagcggcacaacaagc

SEQ ID NO: 735023 - RNA, 19 nt, Artificial Sequence
  Description of Artificial Sequence: Synthetic oligonucleotide
ucgcaaacugguaauuagu

SEQ ID NO: 735024 - RNA, 19 nt, Artificial Sequence
  Description of Artificial Sequence: Synthetic oligonucleotide
uuguacuaaaggcacugau

SEQ ID NO: 735025 - RNA, 19 nt, Artificial Sequence
  Description of Artificial Sequence: Synthetic oligonucleotide
accauuaggcaguaugcca

SEQ ID NO: 735026 - RNA, 19 nt, Artificial Sequence
  Description of Artificial Sequence: Synthetic oligonucleotide
uccgagguaucuuuauaca

SEQ ID NO: 735027 - RNA, 19 nt, Artificial Sequence
  Description of Artificial Sequence: Synthetic oligonucleotide
ggauaauaauuucugccug

SEQ ID NO: 735028 - RNA, 19 nt, Artificial Sequence
  Description of Artificial Sequence: Synthetic oligonucleotide
aucuuagaaugauuagacu

SEQ ID NO: 735029 - RNA, 19 nt, Artificial Sequence
  Description of Artificial Sequence: Synthetic oligonucleotide
caaccucaccauuaggcag

SEQ ID NO: 735030 - RNA, 19 nt, Artificial Sequence
  Description of Artificial Sequence: Synthetic oligonucleotide
gguagguguaauaaacagg

SEQ ID NO: 735031 - RNA, 19 nt, Artificial Sequence
  Description of Artificial Sequence: Synthetic oligonucleotide
acuaugcuggacuuggcaa

SEQ ID NO: 735032 - RNA, 19 nt, Artificial Sequence
  Description of Artificial Sequence: Synthetic oligonucleotide
cuagcuccaaugcugauga

SEQ ID NO: 735033 - RNA, 19 nt, Artificial Sequence
  Description of Artificial Sequence: Synthetic oligonucleotide
aaguagguuagcauuuaga

SEQ ID NO: 735034 - RNA, 19 nt, Artificial Sequence
  Description of Artificial Sequence: Synthetic oligonucleotide
ucagugucgauggaaacuc

SEQ ID NO: 735035 - RNA, 19 nt, Artificial Sequence
  Description of Artificial Sequence: Synthetic oligonucleotide
uuuguaccauuaaaccauc

SEQ ID NO: 735036 - RNA, 19 nt, Artificial Sequence
  Description of Artificial Sequence: Synthetic oligonucleotide
ucuaaugauaugccaucua

SEQ ID NO: 735037 - RNA, 19 nt, Artificial Sequence
  Description of Artificial Sequence: Synthetic oligonucleotide
gauaauaauuucugccugu

SEQ ID NO: 735038 - RNA, 19 nt, Artificial Sequence
  Description of Artificial Sequence: Synthetic oligonucleotide
uuaguguuuguaacaucuc

SEQ ID NO: 735039 - RNA, 19 nt, Artificial Sequence
  Description of Artificial Sequence: Synthetic oligonucleotide
auuaaaccaucuucaacua

SEQ ID NO: 735040 - RNA, 19 nt, Artificial Sequence
  Description of Artificial Sequence: Synthetic oligonucleotide
uuugguuguuucagugcug

SEQ ID NO: 735041 - RNA, 19 nt, Artificial Sequence
  Description of Artificial Sequence: Synthetic oligonucleotide
gguaauuaguugauaaaac

SEQ ID NO: 735042 - RNA, 19 nt, Artificial Sequence
  Description of Artificial Sequence: Synthetic oligonucleotide
cucaggugagggcauagag

SEQ ID NO: 735043 - RNA, 19 nt, Artificial Sequence
  Description of Artificial Sequence: Synthetic oligonucleotide
uacuaaaacuagcuccaau

SEQ ID NO: 735044 - RNA, 19 nt, Artificial Sequence
  Description of Artificial Sequence: Synthetic oligonucleotide
  modified_base (13)..(13): a, c, u, g, unknown or other
uaccaauauuuancugagc

SEQ ID NO: 735045 - RNA, 19 nt, Artificial Sequence
  Description of Artificial Sequence: Synthetic oligonucleotide
  modified_base (6)..(6): a, c, u, g, unknown or other
ugggunuucuuguacuaaa

SEQ ID NO: 735046 - RNA, 19 nt, Artificial Sequence
  Description of Artificial Sequence: Synthetic oligonucleotide
ucuauguacuuuccuuuua

SEQ ID NO: 735047 - RNA, 19 nt, Artificial Sequence
  Description of Artificial Sequence: Synthetic oligonucleotide
aagguauacuggaugugug

SEQ ID NO: 735048 - RNA, 19 nt, Artificial Sequence
  Description of Artificial Sequence: Synthetic oligonucleotide
acuaucgagcucauuuagg

SEQ ID NO: 735049 - RNA, 19 nt, Artificial Sequence
  Description of Artificial Sequence: Synthetic oligonucleotide
uaagcuauccauggucucu

SEQ ID NO: 735050 - RNA, 19 nt, Artificial Sequence
  Description of Artificial Sequence: Synthetic oligonucleotide
cauuuagguaaugcugagg

SEQ ID NO: 735051 - RNA, 19 nt, Artificial Sequence
  Description of Artificial Sequence: Synthetic oligonucleotide
cacuaucgagcucauuuag

SEQ ID NO: 735052 - RNA, 19 nt, Artificial Sequence
  Description of Artificial Sequence: Synthetic oligonucleotide
ccugaguuugguaaacucc

SEQ ID NO: 735053 - RNA, 19 nt, Artificial Sequence
  Description of Artificial Sequence: Synthetic oligonucleotide
uucccauuuccauaugaau

SEQ ID NO: 735054 - RNA, 19 nt, Artificial Sequence
  Description of Artificial Sequence: Synthetic oligonucleotide
aaaaucauuccugccuaaa

SEQ ID NO: 735055 - RNA, 19 nt, Artificial Sequence
  Description of Artificial Sequence: Synthetic oligonucleotide
cagaguucucaggugaggg

SEQ ID NO: 735056 - RNA, 19 nt, Artificial Sequence
  Description of Artificial Sequence: Synthetic oligonucleotide
caaaccacacucucuucug

SEQ ID NO: 735057 - RNA, 19 nt, Artificial Sequence
  Description of Artificial Sequence: Synthetic oligonucleotide
cagagcaccguugaauacc

SEQ ID NO: 735058 - RNA, 19 nt, Artificial Sequence
  Description of Artificial Sequence: Synthetic oligonucleotide
uaucagugucgauggaaac

SEQ ID NO: 735059 - RNA, 19 nt, Artificial Sequence
  Description of Artificial Sequence: Synthetic oligonucleotide
uucuuguacuaaaggcacu

SEQ ID NO: 735060 - RNA, 19 nt, Artificial Sequence
  Description of Artificial Sequence: Synthetic oligonucleotide
uuuuccgagguaucuuuau

SEQ ID NO: 735061 - RNA, 19 nt, Artificial Sequence
  Description of Artificial Sequence: Synthetic oligonucleotide
agaugaguuugcaacauau

SEQ ID NO: 735062 - RNA, 19 nt, Artificial Sequence
  Description of Artificial Sequence: Synthetic oligonucleotide
gaagcgaaaugaucugcuc

SEQ ID NO: 735063 - RNA, 19 nt, Artificial Sequence
  Description of Artificial Sequence: Synthetic oligonucleotide
auaugaaucaacagcugau

SEQ ID NO: 735064 - RNA, 19 nt, Artificial Sequence
  Description of Artificial Sequence: Synthetic oligonucleotide
aauguggcaggaaaucuuu

SEQ ID NO: 735065 - RNA, 19 nt, Artificial Sequence
  Description of Artificial Sequence: Synthetic oligonucleotide
aucuucaacuaugcuggac

SEQ ID NO: 735066 - RNA, 19 nt, Artificial Sequence
  Description of Artificial Sequence: Synthetic oligonucleotide
uagcagcgcacuaucgagc

SEQ ID NO: 735067 - RNA, 19 nt, Artificial Sequence
  Description of Artificial Sequence: Synthetic oligonucleotide
caaacauagcaacaggaua

SEQ ID NO: 735068 - RNA, 19 nt, Artificial Sequence
  Description of Artificial Sequence: Synthetic oligonucleotide
aagcuauccauggucucug

SEQ ID NO: 735069 - RNA, 19 nt, Artificial Sequence
  Description of Artificial Sequence: Synthetic oligonucleotide
caaguagguuagcauuuag

SEQ ID NO: 735070 - RNA, 19 nt, Artificial Sequence
  Description of Artificial Sequence: Synthetic oligonucleotide
uuauuaccuucauuacauc

SEQ ID NO: 735071 - RNA, 19 nt, Artificial Sequence
  Description of Artificial Sequence: Synthetic oligonucleotide
aaccucaccauuaggcagu

SEQ ID NO: 735072 - RNA, 19 nt, Artificial Sequence
  Description of Artificial Sequence: Synthetic oligonucleotide
uuuccgagguaucuuuaua

SEQ ID NO: 735073 - RNA, 19 nt, Artificial Sequence
  Description of Artificial Sequence: Synthetic oligonucleotide
gcaaacugguaauuaguug

SEQ ID NO: 735074 - RNA, 19 nt, Artificial Sequence
  Description of Artificial Sequence: Synthetic oligonucleotide
guuuguaacaucucaguuu

SEQ ID NO: 735075 - RNA, 19 nt, Artificial Sequence
  Description of Artificial Sequence: Synthetic oligonucleotide
agcagcgcacuaucgagcu

SEQ ID NO: 735076 - RNA, 19 nt, Artificial Sequence
  Description of Artificial Sequence: Synthetic oligonucleotide
aggauaagcuuuguauucu

SEQ ID NO: 735077 - RNA, 19 nt, Artificial Sequence
  Description of Artificial Sequence: Synthetic oligonucleotide
uucauaauugugggcacau

SEQ ID NO: 735078 - RNA, 19 nt, Artificial Sequence
  Description of Artificial Sequence: Synthetic oligonucleotide
cauuaagcgcauaggaaaa

SEQ ID NO: 735079 - RNA, 19 nt, Artificial Sequence
  Description of Artificial Sequence: Synthetic oligonucleotide
agauguuagcuucgcugug

SEQ ID NO: 735080 - RNA, 19 nt, Artificial Sequence
  Description of Artificial Sequence: Synthetic oligonucleotide
uguguccuauuucuccaaa

SEQ ID NO: 735081 - RNA, 19 nt, Artificial Sequence
  Description of Artificial Sequence: Synthetic oligonucleotide
uugcaacauauaacacagc

SEQ ID NO: 735082 - RNA, 19 nt, Artificial Sequence
  Description of Artificial Sequence: Synthetic oligonucleotide
aaacuugcuccugucacuu

SEQ ID NO: 735083 - RNA, 19 nt, Artificial Sequence
  Description of Artificial Sequence: Synthetic oligonucleotide
ugucccaagccaugcaauc

SEQ ID NO: 735084 - RNA, 19 nt, Artificial Sequence
  Description of Artificial Sequence: Synthetic oligonucleotide
aagccaaccguaagcuauc

SEQ ID NO: 735085 - RNA, 19 nt, Artificial Sequence
  Description of Artificial Sequence: Synthetic oligonucleotide
uuguaccauuaaaccaucu

SEQ ID NO: 735086 - RNA, 19 nt, Artificial Sequence
  Description of Artificial Sequence: Synthetic oligonucleotide
uaaugcugaggcagaaguu

SEQ ID NO: 735087 - RNA, 19 nt, Artificial Sequence
  Description of Artificial Sequence: Synthetic oligonucleotide
accguugaauaccacgaaa

SEQ ID NO: 735088 - RNA, 19 nt, Artificial Sequence
  Description of Artificial Sequence: Synthetic oligonucleotide
uucaacuaugcuggacuug

SEQ ID NO: 735089 - RNA, 19 nt, Artificial Sequence
  Description of Artificial Sequence: Synthetic oligonucleotide
ucagagcaccguugaauac

SEQ ID NO: 735090 - RNA, 19 nt, Artificial Sequence
  Description of Artificial Sequence: Synthetic oligonucleotide
uacugguaauuucgaagau

SEQ ID NO: 735091 - RNA, 19 nt, Artificial Sequence
  Description of Artificial Sequence: Synthetic oligonucleotide
acauauaacacagcacauu

SEQ ID NO: 735092 - RNA, 19 nt, Artificial Sequence
  Description of Artificial Sequence: Synthetic oligonucleotide
accguggauaacagguagc

SEQ ID NO: 735093 - RNA, 19 nt, Artificial Sequence
  Description of Artificial Sequence: Synthetic oligonucleotide
ucuuccgaauccacccaac

SEQ ID NO: 735094 - RNA, 19 nt, Artificial Sequence
  Description of Artificial Sequence: Synthetic oligonucleotide
acgaaacuugcuccuguca

SEQ ID NO: 735095 - RNA, 19 nt, Artificial Sequence
  Description of Artificial Sequence: Synthetic oligonucleotide
guauucugcucccaaucuc

SEQ ID NO: 735096 - RNA, 19 nt, Artificial Sequence
  Description of Artificial Sequence: Synthetic oligonucleotide
auacgucuugguccuuuag

SEQ ID NO: 735097 - RNA, 19 nt, Artificial Sequence
  Description of Artificial Sequence: Synthetic oligonucleotide
uaccacgaaacuugcuccu

SEQ ID NO: 735098 - RNA, 19 nt, Artificial Sequence
  Description of Artificial Sequence: Synthetic oligonucleotide
gaagguauacuggaugugu

SEQ ID NO: 735099 - RNA, 19 nt, Artificial Sequence
  Description of Artificial Sequence: Synthetic oligonucleotide
uucgcugugucagcaaccu

SEQ ID NO: 735100 - RNA, 19 nt, Artificial Sequence
  Description of Artificial Sequence: Synthetic oligonucleotide
uugugcuaaugauucugaa

SEQ ID NO: 735101 - RNA, 19 nt, Artificial Sequence
  Description of Artificial Sequence: Synthetic oligonucleotide
ugccugaaauucaaccaua

SEQ ID NO: 735102 - RNA, 19 nt, Artificial Sequence
  Description of Artificial Sequence: Synthetic oligonucleotide
  modified_base (11)..(11): a, c, u, g, unknown or other
ugagaugggunuucuugua

SEQ ID NO: 735103 - RNA, 19 nt, Artificial Sequence
  Description of Artificial Sequence: Synthetic oligonucleotide
  modified_base (2)..(2): a, c, u, g, unknown or other
ancugagcauaaauacuaa

SEQ ID NO: 735104 - RNA, 19 nt, Artificial Sequence
  Description of Artificial Sequence: Synthetic oligonucleotide
  modified_base (14)..(14): a, c, u, g, unknown or other
ucaugagaugggunuucuu

SEQ ID NO: 735105 - RNA, 19 nt, Artificial Sequence
  Description of Artificial Sequence: Synthetic oligonucleotide
uuucgcaaacugguaauua

SEQ ID NO: 735106 - RNA, 19 nt, Artificial Sequence
  Description of Artificial Sequence: Synthetic oligonucleotide
cguaaagccaaccguaagc

SEQ ID NO: 735107 - RNA, 19 nt, Artificial Sequence
  Description of Artificial Sequence: Synthetic oligonucleotide
  modified_base (8)..(8): a, c, u, g, unknown or other
gaugggunuucuuguacua

SEQ ID NO: 735108 - RNA, 19 nt, Artificial Sequence
  Description of Artificial Sequence: Synthetic oligonucleotide
cgagguaucuuuauacagc

SEQ ID NO: 735109 - RNA, 19 nt, Artificial Sequence
  Description of Artificial Sequence: Synthetic oligonucleotide
ugcucguuagaagaauuua

SEQ ID NO: 735110 - RNA, 19 nt, Artificial Sequence
  Description of Artificial Sequence: Synthetic oligonucleotide
uccagauguuagcuucgcu

SEQ ID NO: 735111 - RNA, 19 nt, Artificial Sequence
  Description of Artificial Sequence: Synthetic oligonucleotide
caacaggauaauaauuucu

SEQ ID NO: 735112 - RNA, 19 nt, Artificial Sequence
  Description of Artificial Sequence: Synthetic oligonucleotide
ggauaagcuuuguauucug

SEQ ID NO: 735113 - RNA, 19 nt, Artificial Sequence
  Description of Artificial Sequence: Synthetic oligonucleotide
ugacaacacuuuuauucuu

SEQ ID NO: 735114 - RNA, 19 nt, Artificial Sequence
  Description of Artificial Sequence: Synthetic oligonucleotide
agacguuuucagagcaccg

SEQ ID NO: 735115 - RNA, 19 nt, Artificial Sequence
  Description of Artificial Sequence: Synthetic oligonucleotide
gaucugcucaugagauggg

SEQ ID NO: 735116 - RNA, 19 nt, Artificial Sequence
  Description of Artificial Sequence: Synthetic oligonucleotide
caguagcacuauuugccug

SEQ ID NO: 735117 - RNA, 19 nt, Artificial Sequence
  Description of Artificial Sequence: Synthetic oligonucleotide
agugucgauggaaacucug

SEQ ID NO: 735118 - RNA, 19 nt, Artificial Sequence
  Description of Artificial Sequence: Synthetic oligonucleotide
ccgagguaucuuuauacag

SEQ ID NO: 735119 - RNA, 19 nt, Artificial Sequence
  Description of Artificial Sequence: Synthetic oligonucleotide
ggcacaacaagccauggcu

SEQ ID NO: 735120 - RNA, 19 nt, Artificial Sequence
  Description of Artificial Sequence: Synthetic oligonucleotide
  modified_base (8)..(8): a, c, u, g, unknown or other
auauuuancugagcauaaa

SEQ ID NO: 735121 - RNA, 19 nt, Artificial Sequence
  Description of Artificial Sequence: Synthetic oligonucleotide
uggcuauuucuuucgcaaa

SEQ ID NO: 735122 - RNA, 19 nt, Artificial Sequence
  Description of Artificial Sequence: Synthetic oligonucleotide
  modified_base (7)..(7): a, c, u, g, unknown or other
augggunuucuuguacuaa

SEQ ID NO: 735123 - RNA, 19 nt, Artificial Sequence
  Description of Artificial Sequence: Synthetic oligonucleotide
cauggcuauuucuuucgca

SEQ ID NO: 735124 - RNA, 19 nt, Artificial Sequence
  Description of Artificial Sequence: Synthetic oligonucleotide
agccaaccguaagcuaucc

SEQ ID NO: 735125 - RNA, 19 nt, Artificial Sequence
  Description of Artificial Sequence: Synthetic oligonucleotide
guaagcuauccauggucuc

SEQ ID NO: 735126 - RNA, 19 nt, Artificial Sequence
  Description of Artificial Sequence: Synthetic oligonucleotide
ucccaccguggauaacagg

SEQ ID NO: 735127 - RNA, 19 nt, Artificial Sequence
  Description of Artificial Sequence: Synthetic oligonucleotide
gguaggacaggacuaaagu

SEQ ID NO: 735128 - RNA, 19 nt, Artificial Sequence
  Description of Artificial Sequence: Synthetic oligonucleotide
ucgagcucauuuagguaau

SEQ ID NO: 735129 - RNA, 19 nt, Artificial Sequence
  Description of Artificial Sequence: Synthetic oligonucleotide
acguuuucagagcaccguu

SEQ ID NO: 735130 - RNA, 19 nt, Artificial Sequence
  Description of Artificial Sequence: Synthetic oligonucleotide
ugccaucuacugcacugac

SEQ ID NO: 735131 - RNA, 19 nt, Artificial Sequence
  Description of Artificial Sequence: Synthetic oligonucleotide
guuagaggagcaggauaag

SEQ ID NO: 735132 - RNA, 19 nt, Artificial Sequence
  Description of Artificial Sequence: Synthetic oligonucleotide
ucccuuaggucuacugcau

SEQ ID NO: 735133 - RNA, 19 nt, Artificial Sequence
  Description of Artificial Sequence: Synthetic oligonucleotide
ugacauucacaaguagguu

SEQ ID NO: 735134 - RNA, 19 nt, Artificial Sequence
  Description of Artificial Sequence: Synthetic oligonucleotide
  modified_base (5)..(5): a, c, u, g, unknown or other
gggunuucuuguacuaaag

SEQ ID NO: 735135 - RNA, 19 nt, Artificial Sequence
  Description of Artificial Sequence: Synthetic oligonucleotide
cagauguuagcuucgcugu

SEQ ID NO: 735136 - RNA, 19 nt, Artificial Sequence
  Description of Artificial Sequence: Synthetic oligonucleotide
auaugguaaugaacagucu

SEQ ID NO: 735137 - RNA, 19 nt, Artificial Sequence
  Description of Artificial Sequence: Synthetic oligonucleotide
uacuuccagauguuagcuu

SEQ ID NO: 735138 - RNA, 19 nt, Artificial Sequence
  Description of Artificial Sequence: Synthetic oligonucleotide
gguagcagcgcacuaucga

SEQ ID NO: 735139 - RNA, 19 nt, Artificial Sequence
  Description of Artificial Sequence: Synthetic oligonucleotide
gucccaagccaugcaaucc

SEQ ID NO: 735140 - RNA, 19 nt, Artificial Sequence
  Description of Artificial Sequence: Synthetic oligonucleotide
aacuagcuccaaugcugau

SEQ ID NO: 735141 - RNA, 19 nt, Artificial Sequence
  Description of Artificial Sequence: Synthetic oligonucleotide
cacgaaacuugcuccuguc

SEQ ID NO: 735142 - RNA, 19 nt, Artificial Sequence
  Description of Artificial Sequence: Synthetic oligonucleotide
cauuacaucauuguacuuu

SEQ ID NO: 735143 - RNA, 19 nt, Artificial Sequence
  Description of Artificial Sequence: Synthetic oligonucleotide
aggaaucuuaaaguccuuu

SEQ ID NO: 735144 - RNA, 19 nt, Artificial Sequence
  Description of Artificial Sequence: Synthetic oligonucleotide
cagguagcagcgcacuauc

SEQ ID NO: 735145 - RNA, 19 nt, Artificial Sequence
  Description of Artificial Sequence: Synthetic oligonucleotide
gguuguuucagugcugaga

SEQ ID NO: 735146 - RNA, 19 nt, Artificial Sequence
  Description of Artificial Sequence: Synthetic oligonucleotide
cucguaaagccaaccguaa

SEQ ID NO: 735147 - RNA, 19 nt, Artificial Sequence
  Description of Artificial Sequence: Synthetic oligonucleotide
cacacuagagcuggagguc

SEQ ID NO: 735148 - RNA, 19 nt, Artificial Sequence
  Description of Artificial Sequence: Synthetic oligonucleotide
cuuccgaauccacccaaca

SEQ ID NO: 735149 - RNA, 19 nt, Artificial Sequence
  Description of Artificial Sequence: Synthetic oligonucleotide
uugccugaguuugguaaac

SEQ ID NO: 735150 - RNA, 19 nt, Artificial Sequence
  Description of Artificial Sequence: Synthetic oligonucleotide
cagcaaccucaccauuagg

SEQ ID NO: 735151 - RNA, 19 nt, Artificial Sequence
  Description of Artificial Sequence: Synthetic oligonucleotide
gauguuagcuucgcugugu

SEQ ID NO: 735152 - RNA, 19 nt, Artificial Sequence
  Description of Artificial Sequence: Synthetic oligonucleotide
ggaguuauuuguaccauua

SEQ ID NO: 735153 - RNA, 19 nt, Artificial Sequence
  Description of Artificial Sequence: Synthetic oligonucleotide
agguagcagcgcacuaucg

SEQ ID NO: 735154 - RNA, 19 nt, Artificial Sequence
  Description of Artificial Sequence: Synthetic oligonucleotide
ccauaugaaucaacagcug

SEQ ID NO: 735155 - RNA, 19 nt, Artificial Sequence
  Description of Artificial Sequence: Synthetic oligonucleotide
gauacgucuugguccuuua

SEQ ID NO: 735156 - RNA, 19 nt, Artificial Sequence
  Description of Artificial Sequence: Synthetic oligonucleotide
gugucgauggaaacucuga

SEQ ID NO: 735157 - RNA, 19 nt, Artificial Sequence
  Description of Artificial Sequence: Synthetic oligonucleotide
gaauccgcuucuguacuaa

SEQ ID NO: 735158 - RNA, 19 nt, Artificial Sequence
  Description of Artificial Sequence: Synthetic oligonucleotide
gcccuucaacauuugguug

SEQ ID NO: 735159 - RNA, 19 nt, Artificial Sequence
  Description of Artificial Sequence: Synthetic oligonucleotide
acaaguagguuagcauuua

SEQ ID NO: 735160 - RNA, 19 nt, Artificial Sequence
  Description of Artificial Sequence: Synthetic oligonucleotide
ccuuguauaugguaaugaa

SEQ ID NO: 735161 - RNA, 19 nt, Artificial Sequence
  Description of Artificial Sequence: Synthetic oligonucleotide
gacguuuucagagcaccgu

SEQ ID NO: 735162 - RNA, 19 nt, Artificial Sequence
  Description of Artificial Sequence: Synthetic oligonucleotide
accacgaaacuugcuccug

SEQ ID NO: 735163 - RNA, 19 nt, Artificial Sequence
  Description of Artificial Sequence: Synthetic oligonucleotide
ggucccaccguggauaaca

SEQ ID NO: 735164 - RNA, 19 nt, Artificial Sequence
  Description of Artificial Sequence: Synthetic oligonucleotide
cuuguacuaaaggcacuga

SEQ ID NO: 735165 - RNA, 19 nt, Artificial Sequence
  Description of Artificial Sequence: Synthetic oligonucleotide
gcaccguugaauaccacga

SEQ ID NO: 735166 - RNA, 19 nt, Artificial Sequence
  Description of Artificial Sequence: Synthetic oligonucleotide
agguuagcauuuagaacaa

SEQ ID NO: 735167 - RNA, 19 nt, Artificial Sequence
  Description of Artificial Sequence: Synthetic oligonucleotide
agauacgucuugguccuuu

SEQ ID NO: 735168 - RNA, 19 nt, Artificial Sequence
  Description of Artificial Sequence: Synthetic oligonucleotide
aucucaacauuaagcgcau

SEQ ID NO: 735169 - RNA, 19 nt, Artificial Sequence
  Description of Artificial Sequence: Synthetic oligonucleotide
aggcaguaugccaucugca

SEQ ID NO: 735170 - RNA, 19 nt, Artificial Sequence
  Description of Artificial Sequence: Synthetic oligonucleotide
gguccuuuaggaaguagaa

SEQ ID NO: 735171 - RNA, 19 nt, Artificial Sequence
  Description of Artificial Sequence: Synthetic oligonucleotide
gaaauccugaagacguuuu

SEQ ID NO: 735172 - RNA, 19 nt, Artificial Sequence
  Description of Artificial Sequence: Synthetic oligonucleotide
cguuuucagagcaccguug

SEQ ID NO: 735173 - RNA, 19 nt, Artificial Sequence
  Description of Artificial Sequence: Synthetic oligonucleotide
auccgcuucuguacuaaaa

SEQ ID NO: 735174 - RNA, 19 nt, Artificial Sequence
  Description of Artificial Sequence: Synthetic oligonucleotide
gcaauccauugguugagaa

SEQ ID NO: 735175 - RNA, 19 nt, Artificial Sequence
  Description of Artificial Sequence: Synthetic oligonucleotide
cgaaaugaucugcucauga

SEQ ID NO: 735176 - RNA, 19 nt, Artificial Sequence
  Description of Artificial Sequence: Synthetic oligonucleotide
gucccaccguggauaacag

SEQ ID NO: 735177 - RNA, 19 nt, Artificial Sequence
  Description of Artificial Sequence: Synthetic oligonucleotide
caugcucguuagaagaauu

SEQ ID NO: 735178 - RNA, 19 nt, Artificial Sequence
  Description of Artificial Sequence: Synthetic oligonucleotide
agcuucgcugugucagcaa

SEQ ID NO: 735179 - RNA, 19 nt, Artificial Sequence
  Description of Artificial Sequence: Synthetic oligonucleotide
ucgcugugucagcaaccuc

SEQ ID NO: 735180 - RNA, 19 nt, Artificial Sequence
  Description of Artificial Sequence: Synthetic oligonucleotide
cagccugccugaaauucaa

SEQ ID NO: 735181 - RNA, 19 nt, Artificial Sequence
  Description of Artificial Sequence: Synthetic oligonucleotide
cccaccguggauaacaggu

SEQ ID NO: 735182 - RNA, 19 nt, Artificial Sequence
  Description of Artificial Sequence: Synthetic oligonucleotide
  modified_base (11)..(11): a, c, u, g, unknown or other
ccaauauuuancugagcau

SEQ ID NO: 735183 - RNA, 19 nt, Artificial Sequence
  Description of Artificial Sequence: Synthetic oligonucleotide
ggauaacagguagcagcgc

SEQ ID NO: 735184 - RNA, 19 nt, Artificial Sequence
  Description of Artificial Sequence: Synthetic oligonucleotide
guacuaaaacuagcuccaa

SEQ ID NO: 735185 - RNA, 19 nt, Artificial Sequence
  Description of Artificial Sequence: Synthetic oligonucleotide
gcacuaucgagcucauuua

SEQ ID NO: 735186 - RNA, 19 nt, Artificial Sequence
  Description of Artificial Sequence: Synthetic oligonucleotide
cccuucuaaugauaugcca

SEQ ID NO: 735187 - RNA, 19 nt, Artificial Sequence
  Description of Artificial Sequence: Synthetic oligonucleotide
cauuauaguguguccuauu

SEQ ID NO: 735188 - RNA, 19 nt, Artificial Sequence
  Description of Artificial Sequence: Synthetic oligonucleotide
cuucaacuaugcuggacuu

SEQ ID NO: 735189 - RNA, 19 nt, Artificial Sequence
  Description of Artificial Sequence: Synthetic oligonucleotide
gcauagagcggcacaacaa

SEQ ID NO: 735190 - RNA, 19 nt, Artificial Sequence
  Description of Artificial Sequence: Synthetic oligonucleotide
caccguugaauaccacgaa

SEQ ID NO: 735191 - RNA, 19 nt, Artificial Sequence
  Description of Artificial Sequence: Synthetic oligonucleotide
ucucaacauuaagcgcaua

SEQ ID NO: 735192 - RNA, 19 nt, Artificial Sequence
  Description of Artificial Sequence: Synthetic oligonucleotide
ggagccccggcccuucaac

SEQ ID NO: 735193 - RNA, 19 nt, Artificial Sequence
  Description of Artificial Sequence: Synthetic oligonucleotide
cuuguuagaggagcaggau

SEQ ID NO: 735194 - RNA, 19 nt, Artificial Sequence
  Description of Artificial Sequence: Synthetic oligonucleotide
gcgaaaugaucugcucaug

SEQ ID NO: 735195 - RNA, 19 nt, Artificial Sequence
  Description of Artificial Sequence: Synthetic oligonucleotide
ccguggauaacagguagca

SEQ ID NO: 735196 - RNA, 19 nt, Artificial Sequence
  Description of Artificial Sequence: Synthetic oligonucleotide
cguaagcuauccauggucu

SEQ ID NO: 735197 - RNA, 19 nt, Artificial Sequence
  Description of Artificial Sequence: Synthetic oligonucleotide
gcggcacaacaagccaugg

SEQ ID NO: 735198 - RNA, 19 nt, Artificial Sequence
  Description of Artificial Sequence: Synthetic oligonucleotide
aggucccaccguggauaac

SEQ ID NO: 735199 - RNA, 19 nt, Artificial Sequence
  Description of Artificial Sequence: Synthetic oligonucleotide
acguacucccuuaggucua

SEQ ID NO: 735200 - RNA, 19 nt, Artificial Sequence
  Description of Artificial Sequence: Synthetic oligonucleotide
cguggauaacagguagcag

SEQ ID NO: 735201 - RNA, 19 nt, Artificial Sequence
  Description of Artificial Sequence: Synthetic oligonucleotide
cccuuaggucuacugcauc

SEQ ID NO: 735202 - RNA, 19 nt, Artificial Sequence
  Description of Artificial Sequence: Synthetic oligonucleotide
gagcaccguugaauaccac

SEQ ID NO: 735203 - RNA, 19 nt, Artificial Sequence
  Description of Artificial Sequence: Synthetic oligonucleotide
gccaaccguaagcuaucca

SEQ ID NO: 735204 - RNA, 19 nt, Artificial Sequence
  Description of Artificial Sequence: Synthetic oligonucleotide
gccaucuacugcacugaca

SEQ ID NO: 735205 - RNA, 19 nt, Artificial Sequence
  Description of Artificial Sequence: Synthetic oligonucleotide
ccgcuucuguacuaaaacu

SEQ ID NO: 735206 - RNA, 19 nt, Artificial Sequence
  Description of Artificial Sequence: Synthetic oligonucleotide
ccuugcuauugagaaaacu

SEQ ID NO: 735207 - RNA, 19 nt, Artificial Sequence
  Description of Artificial Sequence: Synthetic oligonucleotide
caaccauaucagugucgau

SEQ ID NO: 735208 - RNA, 19 nt, Artificial Sequence
  Description of Artificial Sequence: Synthetic oligonucleotide
ccauaucagugucgaugga

SEQ ID NO: 735209 - RNA, 19 nt, Artificial Sequence
  Description of Artificial Sequence: Synthetic oligonucleotide
gcagcgcacuaucgagcuc

SEQ ID NO: 735210 - RNA, 19 nt, Artificial Sequence
  Description of Artificial Sequence: Synthetic oligonucleotide
ccaccguggauaacaggua

SEQ ID NO: 735211 - RNA, 19 nt, Artificial Sequence
  Description of Artificial Sequence: Synthetic oligonucleotide
cuccaugauccuugcuauu

SEQ ID NO: 735212 - RNA, 19 nt, Artificial Sequence
  Description of Artificial Sequence: Synthetic oligonucleotide
ccacgaaacuugcuccugu

SEQ ID NO: 735213 - RNA, 19 nt, Artificial Sequence
  Description of Artificial Sequence: Synthetic oligonucleotide
cauggucucuggaguuauu

SEQ ID NO: 735214 - RNA, 19 nt, Artificial Sequence
  Description of Artificial Sequence: Synthetic oligonucleotide
cccggcccuucaacauuug

SEQ ID NO: 735215 - RNA, 19 nt, Artificial Sequence
  Description of Artificial Sequence: Synthetic oligonucleotide
guacucccuuaggucuacu

SEQ ID NO: 735216 - RNA, 19 nt, Artificial Sequence
  Description of Artificial Sequence: Synthetic oligonucleotide
ccccggcccuucaacauuu

SEQ ID NO: 735217 - RNA, 19 nt, Artificial Sequence
  Description of Artificial Sequence: Synthetic oligonucleotide
gcgcacuaucgagcucauu

SEQ ID NO: 735218 - RNA, 19 nt, Artificial Sequence
  Description of Artificial Sequence: Synthetic oligonucleotide
  modified_base (1)..(1): a, c, u, g, unknown or other
nuucuuguacuaaaggcac

SEQ ID NO: 735219 - RNA, 19 nt, Artificial Sequence
  Description of Artificial Sequence: Synthetic oligonucleotide
aauuggauucaauagggcc

SEQ ID NO: 735220 - RNA, 19 nt, Artificial Sequence
  Description of Artificial Sequence: Synthetic oligonucleotide
uuuguagugcaacugagcg

SEQ ID NO: 735221 - RNA, 19 nt, Artificial Sequence
  Description of Artificial Sequence: Synthetic oligonucleotide
ucaaagaucaugauuacga

SEQ ID NO: 735222 - RNA, 19 nt, Artificial Sequence
  Description of Artificial Sequence: Synthetic oligonucleotide
agugagaucugcuagguac

SEQ ID NO: 735223 - RNA, 19 nt, Artificial Sequence
  Description of Artificial Sequence: Synthetic oligonucleotide
ugagguacagugaacaagg

SEQ ID NO: 735224 - RNA, 19 nt, Artificial Sequence
  Description of Artificial Sequence: Synthetic oligonucleotide
gaaugugucauacaggcag

SEQ ID NO: 735225 - RNA, 19 nt, Artificial Sequence
  Description of Artificial Sequence: Synthetic oligonucleotide
aaagcauuccucuuccaac

SEQ ID NO: 735226 - RNA, 19 nt, Artificial Sequence
  Description of Artificial Sequence: Synthetic oligonucleotide
aguaguaugaaaauauaac

SEQ ID NO: 735227 - RNA, 19 nt, Artificial Sequence
  Description of Artificial Sequence: Synthetic oligonucleotide
ucuaguuuagcuuucgucu

SEQ ID NO: 735228 - RNA, 19 nt, Artificial Sequence
  Description of Artificial Sequence: Synthetic oligonucleotide
auaaagaguuacaaaagcc

SEQ ID NO: 735229 - RNA, 19 nt, Artificial Sequence
  Description of Artificial Sequence: Synthetic oligonucleotide
ugugcgugcacacauaugc

SEQ ID NO: 735230 - RNA, 19 nt, Artificial Sequence
  Description of Artificial Sequence: Synthetic oligonucleotide
gaaauugucuacuacccag

SEQ ID NO: 735231 - RNA, 19 nt, Artificial Sequence
  Description of Artificial Sequence: Synthetic oligonucleotide
uggcuuuagaaauaaagag

SEQ ID NO: 735232 - RNA, 19 nt, Artificial Sequence
  Description of Artificial Sequence: Synthetic oligonucleotide
uguagugcaacugagcggg

SEQ ID NO: 735233 - RNA, 19 nt, Artificial Sequence
  Description of Artificial Sequence: Synthetic oligonucleotide
aagaucaugauuacgaugu

SEQ ID NO: 735234 - RNA, 19 nt, Artificial Sequence
  Description of Artificial Sequence: Synthetic oligonucleotide
aauacaguaguaugaaaau

SEQ ID NO: 735235 - RNA, 19 nt, Artificial Sequence
  Description of Artificial Sequence: Synthetic oligonucleotide
aaagaucaugauuacgaug

SEQ ID NO: 735236 - RNA, 19 nt, Artificial Sequence
  Description of Artificial Sequence: Synthetic oligonucleotide
cauaugcacaggaagaggg

SEQ ID NO: 735237 - RNA, 19 nt, Artificial Sequence
  Description of Artificial Sequence: Synthetic oligonucleotide
uggaguaugagaaggacga

SEQ ID NO: 735238 - RNA, 19 nt, Artificial Sequence
  Description of Artificial Sequence: Synthetic oligonucleotide
aaaugagaagcaugccuac

SEQ ID NO: 735239 - RNA, 19 nt, Artificial Sequence
  Description of Artificial Sequence: Synthetic oligonucleotide
uauucuccaaaacgcaggg

SEQ ID NO: 735240 - RNA, 19 nt, Artificial Sequence
  Description of Artificial Sequence: Synthetic oligonucleotide
aaacaaagcucuucgcuug

SEQ ID NO: 735241 - RNA, 19 nt, Artificial Sequence
  Description of Artificial Sequence: Synthetic oligonucleotide
cuguuugcccauuagaccc

SEQ ID NO: 735242 - RNA, 19 nt, Artificial Sequence
  Description of Artificial Sequence: Synthetic oligonucleotide
uaaaugagaagcaugccua

SEQ ID NO: 735243 - RNA, 19 nt, Artificial Sequence
  Description of Artificial Sequence: Synthetic oligonucleotide
agcguuuaagcauuaaugu

SEQ ID NO: 735244 - RNA, 19 nt, Artificial Sequence
  Description of Artificial Sequence: Synthetic oligonucleotide
uccaacuugggucaaucag

SEQ ID NO: 735245 - RNA, 19 nt, Artificial Sequence
  Description of Artificial Sequence: Synthetic oligonucleotide
ugaguaagaaagcauuccu

SEQ ID NO: 735246 - RNA, 19 nt, Artificial Sequence
  Description of Artificial Sequence: Synthetic oligonucleotide
aguaucagacagcuguugg

SEQ ID NO: 735247 - RNA, 19 nt, Artificial Sequence
  Description of Artificial Sequence: Synthetic oligonucleotide
aagcguuuaagcauuaaug

SEQ ID NO: 735248 - RNA, 19 nt, Artificial Sequence
  Description of Artificial Sequence: Synthetic oligonucleotide
aguaauagaaaugccuuag

SEQ ID NO: 735249 - RNA, 19 nt, Artificial Sequence
  Description of Artificial Sequence: Synthetic oligonucleotide
uguuuguagugcaacugag

SEQ ID NO: 735250 - RNA, 19 nt, Artificial Sequence
  Description of Artificial Sequence: Synthetic oligonucleotide
ucuucgcuugcauauuugg

SEQ ID NO: 735251 - RNA, 19 nt, Artificial Sequence
  Description of Artificial Sequence: Synthetic oligonucleotide
acugucacagcucauaaaa

SEQ ID NO: 735252 - RNA, 19 nt, Artificial Sequence
  Description of Artificial Sequence: Synthetic oligonucleotide
uuuagcuuucgucuucccc

SEQ ID NO: 735253 - RNA, 19 nt, Artificial Sequence
  Description of Artificial Sequence: Synthetic oligonucleotide
uugcccauuagacccauag

SEQ ID NO: 735254 - RNA, 19 nt, Artificial Sequence
  Description of Artificial Sequence: Synthetic oligonucleotide
agugcaacugagcgggacc

SEQ ID NO: 735255 - RNA, 19 nt, Artificial Sequence
  Description of Artificial Sequence: Synthetic oligonucleotide
ucgagaugcaguauugugu

SEQ ID NO: 735256 - RNA, 19 nt, Artificial Sequence
  Description of Artificial Sequence: Synthetic oligonucleotide
aagcacgucacauguccac

SEQ ID NO: 735257 - RNA, 19 nt, Artificial Sequence
  Description of Artificial Sequence: Synthetic oligonucleotide
aaagggacgacaacaaaca

SEQ ID NO: 735258 - RNA, 19 nt, Artificial Sequence
  Description of Artificial Sequence: Synthetic oligonucleotide
aucccuauggcuuguuugg

SEQ ID NO: 735259 - RNA, 19 nt, Artificial Sequence
  Description of Artificial Sequence: Synthetic oligonucleotide
uucaaagaucaugauuacg

SEQ ID NO: 735260 - RNA, 19 nt, Artificial Sequence
  Description of Artificial Sequence: Synthetic oligonucleotide
aagcauuccucuuccaacu

SEQ ID NO: 735261 - RNA, 19 nt, Artificial Sequence
  Description of Artificial Sequence: Synthetic oligonucleotide
aacgcagggauucccacug

SEQ ID NO: 735262 - RNA, 19 nt, Artificial Sequence
  Description of Artificial Sequence: Synthetic oligonucleotide
auuacgauguaaagggcac

SEQ ID NO: 735263 - RNA, 19 nt, Artificial Sequence
  Description of Artificial Sequence: Synthetic oligonucleotide
aagacgaccgacuuuucaa

SEQ ID NO: 735264 - RNA, 19 nt, Artificial Sequence
  Description of Artificial Sequence: Synthetic oligonucleotide
gggaaugugucauacaggc

SEQ ID NO: 735265 - RNA, 19 nt, Artificial Sequence
  Description of Artificial Sequence: Synthetic oligonucleotide
uucgcuugcauauuugguc

SEQ ID NO: 735266 - RNA, 19 nt, Artificial Sequence
  Description of Artificial Sequence: Synthetic oligonucleotide
auugucuacuacccagaac

SEQ ID NO: 735267 - RNA, 19 nt, Artificial Sequence
  Description of Artificial Sequence: Synthetic oligonucleotide
uuuggggauuaaaagaguu

SEQ ID NO: 735268 - RNA, 19 nt, Artificial Sequence
  Description of Artificial Sequence: Synthetic oligonucleotide
caaacacgcaccaagccug

SEQ ID NO: 735269 - RNA, 19 nt, Artificial Sequence
  Description of Artificial Sequence: Synthetic oligonucleotide
agaucugcuagguacacau

SEQ ID NO: 735270 - RNA, 19 nt, Artificial Sequence
  Description of Artificial Sequence: Synthetic oligonucleotide
ugcaaaguggaugaacagc

SEQ ID NO: 735271 - RNA, 19 nt, Artificial Sequence
  Description of Artificial Sequence: Synthetic oligonucleotide
cucggcaucagacucuucc

SEQ ID NO: 735272 - RNA, 19 nt, Artificial Sequence
  Description of Artificial Sequence: Synthetic oligonucleotide
ucgucgucagcugagauca

SEQ ID NO: 735273 - RNA, 19 nt, Artificial Sequence
  Description of Artificial Sequence: Synthetic oligonucleotide
ucugcuagguacacauuug

SEQ ID NO: 735274 - RNA, 19 nt, Artificial Sequence
  Description of Artificial Sequence: Synthetic oligonucleotide
gauggggacacucauucca

SEQ ID NO: 735275 - RNA, 19 nt, Artificial Sequence
  Description of Artificial Sequence: Synthetic oligonucleotide
uaugcuguaugugugcgug

SEQ ID NO: 735276 - RNA, 19 nt, Artificial Sequence
  Description of Artificial Sequence: Synthetic oligonucleotide
aucguggaauaagugaugg

SEQ ID NO: 735277 - RNA, 19 nt, Artificial Sequence
  Description of Artificial Sequence: Synthetic oligonucleotide
gaugccgaaacugugcaug

SEQ ID NO: 735278 - RNA, 19 nt, Artificial Sequence
  Description of Artificial Sequence: Synthetic oligonucleotide
agcacguacgcccacauaa

SEQ ID NO: 735279 - RNA, 19 nt, Artificial Sequence
  Description of Artificial Sequence: Synthetic oligonucleotide
ugcuuaugcuguaugugug

SEQ ID NO: 735280 - RNA, 19 nt, Artificial Sequence
  Description of Artificial Sequence: Synthetic oligonucleotide
ugauuacgauguaaagggc

SEQ ID NO: 735281 - RNA, 19 nt, Artificial Sequence
  Description of Artificial Sequence: Synthetic oligonucleotide
uaaggcaucguggaauaag

SEQ ID NO: 735282 - RNA, 19 nt, Artificial Sequence
  Description of Artificial Sequence: Synthetic oligonucleotide
uggcuguuaaccccaagca

SEQ ID NO: 735283 - RNA, 19 nt, Artificial Sequence
  Description of Artificial Sequence: Synthetic oligonucleotide
aaacaguauacggaagacu

SEQ ID NO: 735284 - RNA, 19 nt, Artificial Sequence
  Description of Artificial Sequence: Synthetic oligonucleotide
ucuaugugugcucuguuuu

SEQ ID NO: 735285 - RNA, 19 nt, Artificial Sequence
  Description of Artificial Sequence: Synthetic oligonucleotide
gaaggggacuaucagcaug

SEQ ID NO: 735286 - RNA, 19 nt, Artificial Sequence
  Description of Artificial Sequence: Synthetic oligonucleotide
ucugaagcguuuaagcauu

SEQ ID NO: 735287 - RNA, 19 nt, Artificial Sequence
  Description of Artificial Sequence: Synthetic oligonucleotide
cucuacauccacucuagug

SEQ ID NO: 735288 - RNA, 19 nt, Artificial Sequence
  Description of Artificial Sequence: Synthetic oligonucleotide
gauuacgauguaaagggca

SEQ ID NO: 735289 - RNA, 19 nt, Artificial Sequence
  Description of Artificial Sequence: Synthetic oligonucleotide
uaagugauggggacacuca

SEQ ID NO: 735290 - RNA, 19 nt, Artificial Sequence
  Description of Artificial Sequence: Synthetic oligonucleotide
guaauagaaaugccuuagc

SEQ ID NO: 735291 - RNA, 19 nt, Artificial Sequence
  Description of Artificial Sequence: Synthetic oligonucleotide
aguaugagaaggacgauga

SEQ ID NO: 735292 - RNA, 19 nt, Artificial Sequence
  Description of Artificial Sequence: Synthetic oligonucleotide
caaagaaggggacuaucag

SEQ ID NO: 735293 - RNA, 19 nt, Artificial Sequence
  Description of Artificial Sequence: Synthetic oligonucleotide
ucgcuugcauauuugguca

SEQ ID NO: 735294 - RNA, 19 nt, Artificial Sequence
  Description of Artificial Sequence: Synthetic oligonucleotide
gcuguuaaccccaagcacg

SEQ ID NO: 735295 - RNA, 19 nt, Artificial Sequence
  Description of Artificial Sequence: Synthetic oligonucleotide
agaugcaguauugugugag

SEQ ID NO: 735296 - RNA, 19 nt, Artificial Sequence
  Description of Artificial Sequence: Synthetic oligonucleotide
ccauuagacccauagauac

SEQ ID NO: 735297 - RNA, 19 nt, Artificial Sequence
  Description of Artificial Sequence: Synthetic oligonucleotide
uccacggucgucuuucaug

SEQ ID NO: 735298 - RNA, 19 nt, Artificial Sequence
  Description of Artificial Sequence: Synthetic oligonucleotide
guggcuguuaaccccaagc

SEQ ID NO: 735299 - RNA, 19 nt, Artificial Sequence
  Description of Artificial Sequence: Synthetic oligonucleotide
uacgcccacauaaaugaga

SEQ ID NO: 735300 - RNA, 19 nt, Artificial Sequence
  Description of Artificial Sequence: Synthetic oligonucleotide
acuuuguaggaaauaaaca

SEQ ID NO: 735301 - RNA, 19 nt, Artificial Sequence
  Description of Artificial Sequence: Synthetic oligonucleotide
accgacuuuucaaagauca

SEQ ID NO: 735302 - RNA, 19 nt, Artificial Sequence
  Description of Artificial Sequence: Synthetic oligonucleotide
gaguaugagaaggacgaug

SEQ ID NO: 735303 - RNA, 19 nt, Artificial Sequence
  Description of Artificial Sequence: Synthetic oligonucleotide
augagguacagugaacaag

SEQ ID NO: 735304 - RNA, 19 nt, Artificial Sequence
  Description of Artificial Sequence: Synthetic oligonucleotide
ugcuagguacacauuugca

SEQ ID NO: 735305 - RNA, 19 nt, Artificial Sequence
  Description of Artificial Sequence: Synthetic oligonucleotide
aacugugcaugagcgcgcc

SEQ ID NO: 735306 - RNA, 19 nt, Artificial Sequence
  Description of Artificial Sequence: Synthetic oligonucleotide
caugccuacaguggcaucc

SEQ ID NO: 735307 - RNA, 19 nt, Artificial Sequence
  Description of Artificial Sequence: Synthetic oligonucleotide
cagcucagagacuuugggg

SEQ ID NO: 735308 - RNA, 19 nt, Artificial Sequence
  Description of Artificial Sequence: Synthetic oligonucleotide
caucccuauggcuuguuug

SEQ ID NO: 735309 - RNA, 19 nt, Artificial Sequence
  Description of Artificial Sequence: Synthetic oligonucleotide
agggucccaccucauaagg

SEQ ID NO: 735310 - RNA, 19 nt, Artificial Sequence
  Description of Artificial Sequence: Synthetic oligonucleotide
ucgucagcugagaucagga

SEQ ID NO: 735311 - RNA, 19 nt, Artificial Sequence
  Description of Artificial Sequence: Synthetic oligonucleotide
aacaaggguccucuucagu

SEQ ID NO: 735312 - RNA, 19 nt, Artificial Sequence
  Description of Artificial Sequence: Synthetic oligonucleotide
uuaaugugcugaaggccac

SEQ ID NO: 735313 - RNA, 19 nt, Artificial Sequence
  Description of Artificial Sequence: Synthetic oligonucleotide
ucgguagcgaaccuugcuc

SEQ ID NO: 735314 - RNA, 19 nt, Artificial Sequence
  Description of Artificial Sequence: Synthetic oligonucleotide
gacucggacuccucguggg

SEQ ID NO: 735315 - RNA, 19 nt, Artificial Sequence
  Description of Artificial Sequence: Synthetic oligonucleotide
cugcuagguacacauuugc

SEQ ID NO: 735316 - RNA, 19 nt, Artificial Sequence
  Description of Artificial Sequence: Synthetic oligonucleotide
auuagacccauagauacuu

SEQ ID NO: 735317 - RNA, 19 nt, Artificial Sequence
  Description of Artificial Sequence: Synthetic oligonucleotide
gacgcgacuguggaggccg

SEQ ID NO: 735318 - RNA, 19 nt, Artificial Sequence
  Description of Artificial Sequence: Synthetic oligonucleotide
aaaccauauccuccacggu

SEQ ID NO: 735319 - RNA, 19 nt, Artificial Sequence
  Description of Artificial Sequence: Synthetic oligonucleotide
aaacacgcaccaagccugc

SEQ ID NO: 735320 - RNA, 19 nt, Artificial Sequence
  Description of Artificial Sequence: Synthetic oligonucleotide
acaguaauagaaaugccuu

SEQ ID NO: 735321 - RNA, 19 nt, Artificial Sequence
  Description of Artificial Sequence: Synthetic oligonucleotide
ugugugcgugcacacauau

SEQ ID NO: 735322 - RNA, 19 nt, Artificial Sequence
  Description of Artificial Sequence: Synthetic oligonucleotide
uacgauguaaagggcacac

SEQ ID NO: 735323 - RNA, 19 nt, Artificial Sequence
  Description of Artificial Sequence: Synthetic oligonucleotide
gaguaagaaagcauuccuc

SEQ ID NO: 735324 - RNA, 19 nt, Artificial Sequence
  Description of Artificial Sequence: Synthetic oligonucleotide
aaaugccuuagcagcugcg

SEQ ID NO: 735325 - RNA, 19 nt, Artificial Sequence
  Description of Artificial Sequence: Synthetic oligonucleotide
cagcgcaccacaguaauag

SEQ ID NO: 735326 - RNA, 19 nt, Artificial Sequence
  Description of Artificial Sequence: Synthetic oligonucleotide
ucaaucaguggcuguuaac

SEQ ID NO: 735327 - RNA, 19 nt, Artificial Sequence
  Description of Artificial Sequence: Synthetic oligonucleotide
uuuaagcauuaaugugcug

SEQ ID NO: 735328 - RNA, 19 nt, Artificial Sequence
  Description of Artificial Sequence: Synthetic oligonucleotide
aacugagcgggaccuccag

SEQ ID NO: 735329 - RNA, 19 nt, Artificial Sequence
  Description of Artificial Sequence: Synthetic oligonucleotide
aagcauuaaugugcugaag

SEQ ID NO: 735330 - RNA, 19 nt, Artificial Sequence
  Description of Artificial Sequence: Synthetic oligonucleotide
uugcauggcggcguggcgg

SEQ ID NO: 735331 - RNA, 19 nt, Artificial Sequence
  Description of Artificial Sequence: Synthetic oligonucleotide
gaagacgaccgacuuuuca

SEQ ID NO: 735332 - RNA, 19 nt, Artificial Sequence
  Description of Artificial Sequence: Synthetic oligonucleotide
gaacaaggguccucuucag

SEQ ID NO: 735333 - RNA, 19 nt, Artificial Sequence
  Description of Artificial Sequence: Synthetic oligonucleotide
aacacugucacagcucaua

SEQ ID NO: 735334 - RNA, 19 nt, Artificial Sequence
  Description of Artificial Sequence: Synthetic oligonucleotide
caccucauaaggcaucgug

SEQ ID NO: 735335 - RNA, 19 nt, Artificial Sequence
  Description of Artificial Sequence: Synthetic oligonucleotide
guguuuguagugcaacuga

SEQ ID NO: 735336 - RNA, 19 nt, Artificial Sequence
  Description of Artificial Sequence: Synthetic oligonucleotide
augcuguaugugugcgugc

SEQ ID NO: 735337 - RNA, 19 nt, Artificial Sequence
  Description of Artificial Sequence: Synthetic oligonucleotide
ucggacuccucgugggacg

SEQ ID NO: 735338 - RNA, 19 nt, Artificial Sequence
  Description of Artificial Sequence: Synthetic oligonucleotide
uguuugcccauuagaccca

SEQ ID NO: 735339 - RNA, 19 nt, Artificial Sequence
  Description of Artificial Sequence: Synthetic oligonucleotide
ugccuuagcagcugcggga

SEQ ID NO: 735340 - RNA, 19 nt, Artificial Sequence
  Description of Artificial Sequence: Synthetic oligonucleotide
uccacucuagugaggcagc

SEQ ID NO: 735341 - RNA, 19 nt, Artificial Sequence
  Description of Artificial Sequence: Synthetic oligonucleotide
gcguuuaagcauuaaugug

SEQ ID NO: 735342 - RNA, 19 nt, Artificial Sequence
  Description of Artificial Sequence: Synthetic oligonucleotide
ugugugcucuguuuucuuc

SEQ ID NO: 735343 - RNA, 19 nt, Artificial Sequence
  Description of Artificial Sequence: Synthetic oligonucleotide
guaucagacagcuguugga

SEQ ID NO: 735344 - RNA, 19 nt, Artificial Sequence
  Description of Artificial Sequence: Synthetic oligonucleotide
acgaccgacuuuucaaaga

SEQ ID NO: 735345 - RNA, 19 nt, Artificial Sequence
  Description of Artificial Sequence: Synthetic oligonucleotide
caucguggaauaagugaug

SEQ ID NO: 735346 - RNA, 19 nt, Artificial Sequence
  Description of Artificial Sequence: Synthetic oligonucleotide
caccaagacacugacagca

SEQ ID NO: 735347 - RNA, 19 nt, Artificial Sequence
  Description of Artificial Sequence: Synthetic oligonucleotide
uuaugcuguaugugugcgu

SEQ ID NO: 735348 - RNA, 19 nt, Artificial Sequence
  Description of Artificial Sequence: Synthetic oligonucleotide
ggcaucguggaauaaguga

SEQ ID NO: 735349 - RNA, 19 nt, Artificial Sequence
  Description of Artificial Sequence: Synthetic oligonucleotide
ucggcaucagacucuucca

SEQ ID NO: 735350 - RNA, 19 nt, Artificial Sequence
  Description of Artificial Sequence: Synthetic oligonucleotide
ggucagacauaggacaggg

SEQ ID NO: 735351 - RNA, 19 nt, Artificial Sequence
  Description of Artificial Sequence: Synthetic oligonucleotide
cuccaaaacgcagggauuc

SEQ ID NO: 735352 - RNA, 19 nt, Artificial Sequence
  Description of Artificial Sequence: Synthetic oligonucleotide
ugcuguaugugugcgugca

SEQ ID NO: 735353 - RNA, 19 nt, Artificial Sequence
  Description of Artificial Sequence: Synthetic oligonucleotide
ugugucauacaggcagccc

SEQ ID NO: 735354 - RNA, 19 nt, Artificial Sequence
  Description of Artificial Sequence: Synthetic oligonucleotide
cucacguucccucccgggc

SEQ ID NO: 735355 - RNA, 19 nt, Artificial Sequence
  Description of Artificial Sequence: Synthetic oligonucleotide
cauaggacaggggugucac

SEQ ID NO: 735356 - RNA, 19 nt, Artificial Sequence
  Description of Artificial Sequence: Synthetic oligonucleotide
aggaagaugccgaaacugu

SEQ ID NO: 735357 - RNA, 19 nt, Artificial Sequence
  Description of Artificial Sequence: Synthetic oligonucleotide
gaagcguuuaagcauuaau

SEQ ID NO: 735358 - RNA, 19 nt, Artificial Sequence
  Description of Artificial Sequence: Synthetic oligonucleotide
cagcaugaggcccugcaac

SEQ ID NO: 735359 - RNA, 19 nt, Artificial Sequence
  Description of Artificial Sequence: Synthetic oligonucleotide
ucuccaaaacgcagggauu

SEQ ID NO: 735360 - RNA, 19 nt, Artificial Sequence
  Description of Artificial Sequence: Synthetic oligonucleotide
augagcgcgccgcuuucac

SEQ ID NO: 735361 - RNA, 19 nt, Artificial Sequence
  Description of Artificial Sequence: Synthetic oligonucleotide
ugucuacuacccagaacau

SEQ ID NO: 735362 - RNA, 19 nt, Artificial Sequence
  Description of Artificial Sequence: Synthetic oligonucleotide
gagcgggaccuccagcugc

SEQ ID NO: 735363 - RNA, 19 nt, Artificial Sequence
  Description of Artificial Sequence: Synthetic oligonucleotide
cacgacgccgagcagcccc

SEQ ID NO: 735364 - RNA, 19 nt, Artificial Sequence
  Description of Artificial Sequence: Synthetic oligonucleotide
gacccauagauacuuugua

SEQ ID NO: 735365 - RNA, 19 nt, Artificial Sequence
  Description of Artificial Sequence: Synthetic oligonucleotide
caucucgucgucagcugag

SEQ ID NO: 735366 - RNA, 19 nt, Artificial Sequence
  Description of Artificial Sequence: Synthetic oligonucleotide
augaggaaauugucuacua

SEQ ID NO: 735367 - RNA, 19 nt, Artificial Sequence
  Description of Artificial Sequence: Synthetic oligonucleotide
ccuauggcuuguuuggaag

SEQ ID NO: 735368 - RNA, 19 nt, Artificial Sequence
  Description of Artificial Sequence: Synthetic oligonucleotide
cucgucgucagcugagauc

SEQ ID NO: 735369 - RNA, 19 nt, Artificial Sequence
  Description of Artificial Sequence: Synthetic oligonucleotide
ugggacgccgcccuucggu

SEQ ID NO: 735370 - RNA, 19 nt, Artificial Sequence
  Description of Artificial Sequence: Synthetic oligonucleotide
cuuguuuggaagugucuaa

SEQ ID NO: 735371 - RNA, 19 nt, Artificial Sequence
  Description of Artificial Sequence: Synthetic oligonucleotide
aacaccccaaagggacgac

SEQ ID NO: 735372 - RNA, 19 nt, Artificial Sequence
  Description of Artificial Sequence: Synthetic oligonucleotide
caaaacgcagggauuccca

SEQ ID NO: 735373 - RNA, 19 nt, Artificial Sequence
  Description of Artificial Sequence: Synthetic oligonucleotide
uccaaaacgcagggauucc

SEQ ID NO: 735374 - RNA, 19 nt, Artificial Sequence
  Description of Artificial Sequence: Synthetic oligonucleotide
cugugcaugagcgcgccgc

SEQ ID NO: 735375 - RNA, 19 nt, Artificial Sequence
  Description of Artificial Sequence: Synthetic oligonucleotide
cucuucgcuugcauauuug

SEQ ID NO: 735376 - RNA, 19 nt, Artificial Sequence
  Description of Artificial Sequence: Synthetic oligonucleotide
aauaagugauggggacacu

SEQ ID NO: 735377 - RNA, 19 nt, Artificial Sequence
  Description of Artificial Sequence: Synthetic oligonucleotide
ggcaaacacgcaccaagcc

SEQ ID NO: 735378 - RNA, 19 nt, Artificial Sequence
  Description of Artificial Sequence: Synthetic oligonucleotide
ugagaucugcuagguacac

SEQ ID NO: 735379 - RNA, 19 nt, Artificial Sequence
  Description of Artificial Sequence: Synthetic oligonucleotide
accccaagcacgucacaug

SEQ ID NO: 735380 - RNA, 19 nt, Artificial Sequence
  Description of Artificial Sequence: Synthetic oligonucleotide
guuuaagcauuaaugugcu

SEQ ID NO: 735381 - RNA, 19 nt, Artificial Sequence
  Description of Artificial Sequence: Synthetic oligonucleotide
caguccgcggcucacguuc

SEQ ID NO: 735382 - RNA, 19 nt, Artificial Sequence
  Description of Artificial Sequence: Synthetic oligonucleotide
gugcuuaugcuguaugugu

SEQ ID NO: 735383 - RNA, 19 nt, Artificial Sequence
  Description of Artificial Sequence: Synthetic oligonucleotide
acguacgcccacauaaaug

SEQ ID NO: 735384 - RNA, 19 nt, Artificial Sequence
  Description of Artificial Sequence: Synthetic oligonucleotide
augccgaaacugugcauga

SEQ ID NO: 735385 - RNA, 19 nt, Artificial Sequence
  Description of Artificial Sequence: Synthetic oligonucleotide
uuagacccauagauacuuu

SEQ ID NO: 735386 - RNA, 19 nt, Artificial Sequence
  Description of Artificial Sequence: Synthetic oligonucleotide
gucuacuacccagaacaug

SEQ ID NO: 735387 - RNA, 19 nt, Artificial Sequence
  Description of Artificial Sequence: Synthetic oligonucleotide
cauaaggcaucguggaaua

SEQ ID NO: 735388 - RNA, 19 nt, Artificial Sequence
  Description of Artificial Sequence: Synthetic oligonucleotide
ugcaugagcgcgccgcuuu

SEQ ID NO: 735389 - RNA, 19 nt, Artificial Sequence
  Description of Artificial Sequence: Synthetic oligonucleotide
ggggacuaucagcaugacg

SEQ ID NO: 735390 - RNA, 19 nt, Artificial Sequence
  Description of Artificial Sequence: Synthetic oligonucleotide
aagaggaguggagguagaa

SEQ ID NO: 735391 - RNA, 19 nt, Artificial Sequence
  Description of Artificial Sequence: Synthetic oligonucleotide
ggcuguuaaccccaagcac

SEQ ID NO: 735392 - RNA, 19 nt, Artificial Sequence
  Description of Artificial Sequence: Synthetic oligonucleotide
cuugcauggcggcguggcg

SEQ ID NO: 735393 - RNA, 19 nt, Artificial Sequence
  Description of Artificial Sequence: Synthetic oligonucleotide
gagggcuagguuccaugac

SEQ ID NO: 735394 - RNA, 19 nt, Artificial Sequence
  Description of Artificial Sequence: Synthetic oligonucleotide
caacagucuaugugugcuc

SEQ ID NO: 735395 - RNA, 19 nt, Artificial Sequence
  Description of Artificial Sequence: Synthetic oligonucleotide
ucucgucgucagcugagau

SEQ ID NO: 735396 - RNA, 19 nt, Artificial Sequence
  Description of Artificial Sequence: Synthetic oligonucleotide
aggccggugcgccuggcag

SEQ ID NO: 735397 - RNA, 19 nt, Artificial Sequence
  Description of Artificial Sequence: Synthetic oligonucleotide
caaacaaagcucuucgcuu

SEQ ID NO: 735398 - RNA, 19 nt, Artificial Sequence
  Description of Artificial Sequence: Synthetic oligonucleotide
caguaauagaaaugccuua

SEQ ID NO: 735399 - RNA, 19 nt, Artificial Sequence
  Description of Artificial Sequence: Synthetic oligonucleotide
ggagagcgggcagagacag

SEQ ID NO: 735400 - RNA, 19 nt, Artificial Sequence
  Description of Artificial Sequence: Synthetic oligonucleotide
cagacagguuccaguauca

SEQ ID NO: 735401 - RNA, 19 nt, Artificial Sequence
  Description of Artificial Sequence: Synthetic oligonucleotide
gagaugcaguauuguguga

SEQ ID NO: 735402 - RNA, 19 nt, Artificial Sequence
  Description of Artificial Sequence: Synthetic oligonucleotide
cucugaagcguuuaagcau

SEQ ID NO: 735403 - RNA, 19 nt, Artificial Sequence
  Description of Artificial Sequence: Synthetic oligonucleotide
cguacgcccacauaaauga

SEQ ID NO: 735404 - RNA, 19 nt, Artificial Sequence
  Description of Artificial Sequence: Synthetic oligonucleotide
acgcaccaagccugcacag

SEQ ID NO: 735405 - RNA, 19 nt, Artificial Sequence
  Description of Artificial Sequence: Synthetic oligonucleotide
ugaagcguuuaagcauuaa

SEQ ID NO: 735406 - RNA, 19 nt, Artificial Sequence
  Description of Artificial Sequence: Synthetic oligonucleotide
agcgggaccuccagcugcc

SEQ ID NO: 735407 - RNA, 19 nt, Artificial Sequence
  Description of Artificial Sequence: Synthetic oligonucleotide
gacgccgcccuucgguagc

SEQ ID NO: 735408 - RNA, 19 nt, Artificial Sequence
  Description of Artificial Sequence: Synthetic oligonucleotide
uagcgaaccuugcucccau

SEQ ID NO: 735409 - RNA, 19 nt, Artificial Sequence
  Description of Artificial Sequence: Synthetic oligonucleotide
uucccuacucuuggugaug

SEQ ID NO: 735410 - RNA, 19 nt, Artificial Sequence
  Description of Artificial Sequence: Synthetic oligonucleotide
acugugcaugagcgcgccg

SEQ ID NO: 735411 - RNA, 19 nt, Artificial Sequence
  Description of Artificial Sequence: Synthetic oligonucleotide
gguagcgaaccuugcuccc

SEQ ID NO: 735412 - RNA, 19 nt, Artificial Sequence
  Description of Artificial Sequence: Synthetic oligonucleotide
ugaagacgaccgacuuuuc

SEQ ID NO: 735413 - RNA, 19 nt, Artificial Sequence
  Description of Artificial Sequence: Synthetic oligonucleotide
agcgcaccacaguaauaga

SEQ ID NO: 735414 - RNA, 19 nt, Artificial Sequence
  Description of Artificial Sequence: Synthetic oligonucleotide
caaagaucaugauuacgau

SEQ ID NO: 735415 - RNA, 19 nt, Artificial Sequence
  Description of Artificial Sequence: Synthetic oligonucleotide
agcacgucacauguccaca

SEQ ID NO: 735416 - RNA, 19 nt, Artificial Sequence
  Description of Artificial Sequence: Synthetic oligonucleotide
agcggugcuucuucuucgu

SEQ ID NO: 735417 - RNA, 19 nt, Artificial Sequence
  Description of Artificial Sequence: Synthetic oligonucleotide
cacgcaccaagccugcaca

SEQ ID NO: 735418 - RNA, 19 nt, Artificial Sequence
  Description of Artificial Sequence: Synthetic oligonucleotide
gcccauuagacccauagau

SEQ ID NO: 735419 - RNA, 19 nt, Artificial Sequence
  Description of Artificial Sequence: Synthetic oligonucleotide
agugugggaaugugucaua

SEQ ID NO: 735420 - RNA, 19 nt, Artificial Sequence
  Description of Artificial Sequence: Synthetic oligonucleotide
acagcacguacgcccacau

SEQ ID NO: 735421 - RNA, 19 nt, Artificial Sequence
  Description of Artificial Sequence: Synthetic oligonucleotide
ccucauaaggcaucgugga

SEQ ID NO: 735422 - RNA, 19 nt, Artificial Sequence
  Description of Artificial Sequence: Synthetic oligonucleotide
ggacaggggugucacaaca

SEQ ID NO: 735423 - RNA, 19 nt, Artificial Sequence
  Description of Artificial Sequence: Synthetic oligonucleotide
guacgcccacauaaaugag

SEQ ID NO: 735424 - RNA, 19 nt, Artificial Sequence
  Description of Artificial Sequence: Synthetic oligonucleotide
cugcggagguccuccucgg

SEQ ID NO: 735425 - RNA, 19 nt, Artificial Sequence
  Description of Artificial Sequence: Synthetic oligonucleotide
uagcuuucgucuuccccuu

SEQ ID NO: 735426 - RNA, 19 nt, Artificial Sequence
  Description of Artificial Sequence: Synthetic oligonucleotide
caagcacgucacaugucca

SEQ ID NO: 735427 - RNA, 19 nt, Artificial Sequence
  Description of Artificial Sequence: Synthetic oligonucleotide
auaggacaggggugucaca

SEQ ID NO: 735428 - RNA, 19 nt, Artificial Sequence
  Description of Artificial Sequence: Synthetic oligonucleotide
gcaaacacgcaccaagccu

SEQ ID NO: 735429 - RNA, 19 nt, Artificial Sequence
  Description of Artificial Sequence: Synthetic oligonucleotide
uaacacugucacagcucau

SEQ ID NO: 735430 - RNA, 19 nt, Artificial Sequence
  Description of Artificial Sequence: Synthetic oligonucleotide
cauuagacccauagauacu

SEQ ID NO: 735431 - RNA, 19 nt, Artificial Sequence
  Description of Artificial Sequence: Synthetic oligonucleotide
guaugagaaggacgaugaa

SEQ ID NO: 735432 - RNA, 19 nt, Artificial Sequence
  Description of Artificial Sequence: Synthetic oligonucleotide
cuuugguucucugaagcgu

SEQ ID NO: 735433 - RNA, 19 nt, Artificial Sequence
  Description of Artificial Sequence: Synthetic oligonucleotide
cuucgcuugcauauuuggu

SEQ ID NO: 735434 - RNA, 19 nt, Artificial Sequence
  Description of Artificial Sequence: Synthetic oligonucleotide
cucggacuccucgugggac

SEQ ID NO: 735435 - RNA, 19 nt, Artificial Sequence
  Description of Artificial Sequence: Synthetic oligonucleotide
aguccgcggcucacguucc

SEQ ID NO: 735436 - RNA, 19 nt, Artificial Sequence
  Description of Artificial Sequence: Synthetic oligonucleotide
caguaacacugucacagcu

SEQ ID NO: 735437 - RNA, 19 nt, Artificial Sequence
  Description of Artificial Sequence: Synthetic oligonucleotide
augugugcucuguuuucuu

SEQ ID NO: 735438 - RNA, 19 nt, Artificial Sequence
  Description of Artificial Sequence: Synthetic oligonucleotide
caccccaaagggacgacaa

SEQ ID NO: 735439 - RNA, 19 nt, Artificial Sequence
  Description of Artificial Sequence: Synthetic oligonucleotide
aggggacuaucagcaugac

SEQ ID NO: 735440 - RNA, 19 nt, Artificial Sequence
  Description of Artificial Sequence: Synthetic oligonucleotide
gggcaaacacgcaccaagc

SEQ ID NO: 735441 - RNA, 19 nt, Artificial Sequence
  Description of Artificial Sequence: Synthetic oligonucleotide
gcucacguucccucccggg

SEQ ID NO: 735442 - RNA, 19 nt, Artificial Sequence
  Description of Artificial Sequence: Synthetic oligonucleotide
gggcuagguuccaugacug

SEQ ID NO: 735443 - RNA, 19 nt, Artificial Sequence
  Description of Artificial Sequence: Synthetic oligonucleotide
ccaaaacgcagggauuccc

SEQ ID NO: 735444 - RNA, 19 nt, Artificial Sequence
  Description of Artificial Sequence: Synthetic oligonucleotide
cgguagcgaaccuugcucc

SEQ ID NO: 735445 - RNA, 19 nt, Artificial Sequence
  Description of Artificial Sequence: Synthetic oligonucleotide
gacagcacguacgcccaca

SEQ ID NO: 735446 - RNA, 19 nt, Artificial Sequence
  Description of Artificial Sequence: Synthetic oligonucleotide
guagcgaaccuugcuccca

SEQ ID NO: 735447 - RNA, 19 nt, Artificial Sequence
  Description of Artificial Sequence: Synthetic oligonucleotide
gauccggcgcuggcagccg

SEQ ID NO: 735448 - RNA, 19 nt, Artificial Sequence
  Description of Artificial Sequence: Synthetic oligonucleotide
acaccccaaagggacgaca

SEQ ID NO: 735449 - RNA, 19 nt, Artificial Sequence
  Description of Artificial Sequence: Synthetic oligonucleotide
cacugucacagcucauaaa

SEQ ID NO: 735450 - RNA, 19 nt, Artificial Sequence
  Description of Artificial Sequence: Synthetic oligonucleotide
uuugcccauuagacccaua

SEQ ID NO: 735451 - RNA, 19 nt, Artificial Sequence
  Description of Artificial Sequence: Synthetic oligonucleotide
gcgaaccuugcucccauuc

SEQ ID NO: 735452 - RNA, 19 nt, Artificial Sequence
  Description of Artificial Sequence: Synthetic oligonucleotide
aucucgucgucagcugaga

SEQ ID NO: 735453 - RNA, 19 nt, Artificial Sequence
  Description of Artificial Sequence: Synthetic oligonucleotide
gacauaggacagggguguc

SEQ ID NO: 735454 - RNA, 19 nt, Artificial Sequence
  Description of Artificial Sequence: Synthetic oligonucleotide
gcuuucgucuuccccuuuc

SEQ ID NO: 735455 - RNA, 19 nt, Artificial Sequence
  Description of Artificial Sequence: Synthetic oligonucleotide
ggauccggcgcuggcagcc

SEQ ID NO: 735456 - RNA, 19 nt, Artificial Sequence
  Description of Artificial Sequence: Synthetic oligonucleotide
cccaaagcggugcuucuuc

SEQ ID NO: 735457 - RNA, 19 nt, Artificial Sequence
  Description of Artificial Sequence: Synthetic oligonucleotide
gugcgugcacacauaugca

SEQ ID NO: 735458 - RNA, 19 nt, Artificial Sequence
  Description of Artificial Sequence: Synthetic oligonucleotide
cccauuagacccauagaua

SEQ ID NO: 735459 - RNA, 19 nt, Artificial Sequence
  Description of Artificial Sequence: Synthetic oligonucleotide
gggucccaccucauaaggc

SEQ ID NO: 735460 - RNA, 19 nt, Artificial Sequence
  Description of Artificial Sequence: Synthetic oligonucleotide
gaaggacgaugaagacgac

SEQ ID NO: 735461 - RNA, 19 nt, Artificial Sequence
  Description of Artificial Sequence: Synthetic oligonucleotide
ggaaugugucauacaggca

SEQ ID NO: 735462 - RNA, 19 nt, Artificial Sequence
  Description of Artificial Sequence: Synthetic oligonucleotide
ucccucccgggccuugcau

SEQ ID NO: 735463 - RNA, 19 nt, Artificial Sequence
  Description of Artificial Sequence: Synthetic oligonucleotide
ggcucacguucccucccgg

SEQ ID NO: 735464 - RNA, 19 nt, Artificial Sequence
  Description of Artificial Sequence: Synthetic oligonucleotide
cuucccuacucuuggugau

SEQ ID NO: 735465 - RNA, 19 nt, Artificial Sequence
  Description of Artificial Sequence: Synthetic oligonucleotide
ggacgccgcccuucgguag

SEQ ID NO: 735466 - RNA, 19 nt, Artificial Sequence
  Description of Artificial Sequence: Synthetic oligonucleotide
ugucugccaucagccagua

SEQ ID NO: 735467 - RNA, 19 nt, Artificial Sequence
  Description of Artificial Sequence: Synthetic oligonucleotide
uucgucugcggagguccuc

SEQ ID NO: 735468 - RNA, 19 nt, Artificial Sequence
  Description of Artificial Sequence: Synthetic oligonucleotide
gugggacgccgcccuucgg

SEQ ID NO: 735469 - RNA, 19 nt, Artificial Sequence
  Description of Artificial Sequence: Synthetic oligonucleotide
gaggccggugcgccuggca

SEQ ID NO: 735470 - RNA, 19 nt, Artificial Sequence
  Description of Artificial Sequence: Synthetic oligonucleotide
agcucuucgcuugcauauu

SEQ ID NO: 735471 - RNA, 19 nt, Artificial Sequence
  Description of Artificial Sequence: Synthetic oligonucleotide
cugaagcguuuaagcauua

SEQ ID NO: 735472 - RNA, 19 nt, Artificial Sequence
  Description of Artificial Sequence: Synthetic oligonucleotide
gcccucuacauccacucua

SEQ ID NO: 735473 - RNA, 19 nt, Artificial Sequence
  Description of Artificial Sequence: Synthetic oligonucleotide
ccacucuagugaggcagcg

SEQ ID NO: 735474 - RNA, 19 nt, Artificial Sequence
  Description of Artificial Sequence: Synthetic oligonucleotide
gucugcggagguccuccuc

SEQ ID NO: 735475 - RNA, 19 nt, Artificial Sequence
  Description of Artificial Sequence: Synthetic oligonucleotide
cacguacgcccacauaaau

SEQ ID NO: 735476 - RNA, 19 nt, Artificial Sequence
  Description of Artificial Sequence: Synthetic oligonucleotide
cuggcaguccgcggcucac

SEQ ID NO: 735477 - RNA, 19 nt, Artificial Sequence
  Description of Artificial Sequence: Synthetic oligonucleotide
agcuuucgucuuccccuuu

SEQ ID NO: 735478 - RNA, 19 nt, Artificial Sequence
  Description of Artificial Sequence: Synthetic oligonucleotide
acgccgcccuucgguagcg

SEQ ID NO: 735479 - RNA, 19 nt, Artificial Sequence
  Description of Artificial Sequence: Synthetic oligonucleotide
agcgaaccuugcucccauu

SEQ ID NO: 735480 - RNA, 19 nt, Artificial Sequence
  Description of Artificial Sequence: Synthetic oligonucleotide
gcgacuguggaggccggug

SEQ ID NO: 735481 - RNA, 19 nt, Artificial Sequence
  Description of Artificial Sequence: Synthetic oligonucleotide
gcggcucacguucccuccc

SEQ ID NO: 735482 - RNA, 19 nt, Artificial Sequence
  Description of Artificial Sequence: Synthetic oligonucleotide
caugagcgcgccgcuuuca

SEQ ID NO: 735483 - RNA, 19 nt, Artificial Sequence
  Description of Artificial Sequence: Synthetic oligonucleotide
cagccgcgacccgggaucc

SEQ ID NO: 735484 - RNA, 19 nt, Artificial Sequence
  Description of Artificial Sequence: Synthetic oligonucleotide
gcgccgcuuucacagcggc

SEQ ID NO: 735485 - RNA, 19 nt, Artificial Sequence
  Description of Artificial Sequence: Synthetic oligonucleotide
ccaucucgucgucagcuga

SEQ ID NO: 735486 - RNA, 19 nt, Artificial Sequence
  Description of Artificial Sequence: Synthetic oligonucleotide
gccgcgacccgggauccgg

SEQ ID NO: 735487 - RNA, 19 nt, Artificial Sequence
  Description of Artificial Sequence: Synthetic oligonucleotide
ggacuaucagcaugacgau

SEQ ID NO: 735488 - RNA, 19 nt, Artificial Sequence
  Description of Artificial Sequence: Synthetic oligonucleotide
ccuacucuuggugaugucu

SEQ ID NO: 735489 - RNA, 19 nt, Artificial Sequence
  Description of Artificial Sequence: Synthetic oligonucleotide
augugugcgugcacacaua

SEQ ID NO: 735490 - RNA, 19 nt, Artificial Sequence
  Description of Artificial Sequence: Synthetic oligonucleotide
ggaagacgccccgaccaga

SEQ ID NO: 735491 - RNA, 19 nt, Artificial Sequence
  Description of Artificial Sequence: Synthetic oligonucleotide
gcggcagggcgcgaggggc

SEQ ID NO: 735492 - RNA, 19 nt, Artificial Sequence
  Description of Artificial Sequence: Synthetic oligonucleotide
cgugggacgccgcccuucg

SEQ ID NO: 735493 - RNA, 19 nt, Artificial Sequence
  Description of Artificial Sequence: Synthetic oligonucleotide
gcgacccgggauccggcgc

SEQ ID NO: 735494 - RNA, 19 nt, Artificial Sequence
  Description of Artificial Sequence: Synthetic oligonucleotide
guagugcaacugagcggga

SEQ ID NO: 735495 - RNA, 19 nt, Artificial Sequence
  Description of Artificial Sequence: Synthetic oligonucleotide
gggauccggcgcuggcagc

SEQ ID NO: 735496 - RNA, 19 nt, Artificial Sequence
  Description of Artificial Sequence: Synthetic oligonucleotide
gaggggcggcccggccucg

SEQ ID NO: 735497 - RNA, 19 nt, Artificial Sequence
  Description of Artificial Sequence: Synthetic oligonucleotide
gcaugagcgcgccgcuuuc

SEQ ID NO: 735498 - RNA, 19 nt, Artificial Sequence
  Description of Artificial Sequence: Synthetic oligonucleotide
acgcgacuguggaggccgg

SEQ ID NO: 735499 - RNA, 19 nt, Artificial Sequence
  Description of Artificial Sequence: Synthetic oligonucleotide
cuucuucgucugcggaggu

SEQ ID NO: 735500 - RNA, 19 nt, Artificial Sequence
  Description of Artificial Sequence: Synthetic oligonucleotide
guaaagggucccaccucau

SEQ ID NO: 735501 - RNA, 19 nt, Artificial Sequence
  Description of Artificial Sequence: Synthetic oligonucleotide
ccccaagcacgucacaugu

SEQ ID NO: 735502 - RNA, 19 nt, Artificial Sequence
  Description of Artificial Sequence: Synthetic oligonucleotide
ggcuagguuccaugacugu

SEQ ID NO: 735503 - RNA, 19 nt, Artificial Sequence
  Description of Artificial Sequence: Synthetic oligonucleotide
gcaugccuacaguggcauc

SEQ ID NO: 735504 - RNA, 19 nt, Artificial Sequence
  Description of Artificial Sequence: Synthetic oligonucleotide
agcaucccuauggcuuguu

SEQ ID NO: 735505 - RNA, 19 nt, Artificial Sequence
  Description of Artificial Sequence: Synthetic oligonucleotide
ggacgcgacuguggaggcc

SEQ ID NO: 735506 - RNA, 19 nt, Artificial Sequence
  Description of Artificial Sequence: Synthetic oligonucleotide
gcacguacgcccacauaaa

SEQ ID NO: 735507 - RNA, 19 nt, Artificial Sequence
  Description of Artificial Sequence: Synthetic oligonucleotide
ccgggccuugcauggcggc

SEQ ID NO: 735508 - RNA, 19 nt, Artificial Sequence
  Description of Artificial Sequence: Synthetic oligonucleotide
cuucgucugcggagguccu

SEQ ID NO: 735509 - RNA, 19 nt, Artificial Sequence
  Description of Artificial Sequence: Synthetic oligonucleotide
gcucuucgcuugcauauuu

SEQ ID NO: 735510 - RNA, 19 nt, Artificial Sequence
  Description of Artificial Sequence: Synthetic oligonucleotide
cacguucccucccgggccu

SEQ ID NO: 735511 - RNA, 19 nt, Artificial Sequence
  Description of Artificial Sequence: Synthetic oligonucleotide
cgcgccgcuuucacagcgg

SEQ ID NO: 735512 - RNA, 19 nt, Artificial Sequence
  Description of Artificial Sequence: Synthetic oligonucleotide
cggcucacguucccucccg

SEQ ID NO: 735513 - RNA, 19 nt, Artificial Sequence
  Description of Artificial Sequence: Synthetic oligonucleotide
cagcacguacgcccacaua

SEQ ID NO: 735514 - RNA, 19 nt, Artificial Sequence
  Description of Artificial Sequence: Synthetic oligonucleotide
cggacgcgacuguggaggc

SEQ ID NO: 735515 - RNA, 19 nt, Artificial Sequence
  Description of Artificial Sequence: Synthetic oligonucleotide
cccuacucuuggugauguc

SEQ ID NO: 735516 - RNA, 19 nt, Artificial Sequence
  Description of Artificial Sequence: Synthetic oligonucleotide
ggacuccucgugggacgcc

SEQ ID NO: 735517 - RNA, 19 nt, Artificial Sequence
  Description of Artificial Sequence: Synthetic oligonucleotide
cccucuuuugagucacagu

SEQ ID NO: 735518 - RNA, 19 nt, Artificial Sequence
  Description of Artificial Sequence: Synthetic oligonucleotide
ggaguaugagaaggacgau

SEQ ID NO: 735519 - RNA, 19 nt, Artificial Sequence
  Description of Artificial Sequence: Synthetic oligonucleotide
cgccgcuuucacagcggcc

SEQ ID NO: 735520 - RNA, 19 nt, Artificial Sequence
  Description of Artificial Sequence: Synthetic oligonucleotide
cgggccuugcauggcggcg

SEQ ID NO: 735521 - RNA, 19 nt, Artificial Sequence
  Description of Artificial Sequence: Synthetic oligonucleotide
ccgcgacccgggauccggc

SEQ ID NO: 735522 - RNA, 19 nt, Artificial Sequence
  Description of Artificial Sequence: Synthetic oligonucleotide
ccuggcaguccgcggcuca

SEQ ID NO: 735523 - RNA, 19 nt, Artificial Sequence
  Description of Artificial Sequence: Synthetic oligonucleotide
ggccccggccucagcauga

SEQ ID NO: 735524 - RNA, 19 nt, Artificial Sequence
  Description of Artificial Sequence: Synthetic oligonucleotide
cuccacggucgucuuucau

SEQ ID NO: 735525 - RNA, 19 nt, Artificial Sequence
  Description of Artificial Sequence: Synthetic oligonucleotide
ccgacuuuucaaagaucau

SEQ ID NO: 735526 - RNA, 19 nt, Artificial Sequence
  Description of Artificial Sequence: Synthetic oligonucleotide
cccgccccggacgcgacug

SEQ ID NO: 735527 - RNA, 19 nt, Artificial Sequence
  Description of Artificial Sequence: Synthetic oligonucleotide
cguggcggcagggcgcgag

SEQ ID NO: 735528 - RNA, 19 nt, Artificial Sequence
  Description of Artificial Sequence: Synthetic oligonucleotide
gcagcgcaccacaguaaua

SEQ ID NO: 735529 - RNA, 19 nt, Artificial Sequence
  Description of Artificial Sequence: Synthetic oligonucleotide
cgaccagagcccucuacau

SEQ ID NO: 735530 - RNA, 19 nt, Artificial Sequence
  Description of Artificial Sequence: Synthetic oligonucleotide
ccucuacauccacucuagu

SEQ ID NO: 735531 - RNA, 19 nt, Artificial Sequence
  Description of Artificial Sequence: Synthetic oligonucleotide
cagcaucccuauggcuugu

SEQ ID NO: 735532 - RNA, 19 nt, Artificial Sequence
  Description of Artificial Sequence: Synthetic oligonucleotide
gcgggaccuccagcugccc

SEQ ID NO: 735533 - RNA, 19 nt, Artificial Sequence
  Description of Artificial Sequence: Synthetic oligonucleotide
gccacuccaccaagacacu

SEQ ID NO: 735534 - RNA, 19 nt, Artificial Sequence
  Description of Artificial Sequence: Synthetic oligonucleotide
ccacgacgccgagcagccc

SEQ ID NO: 735535 - RNA, 19 nt, Artificial Sequence
  Description of Artificial Sequence: Synthetic oligonucleotide
cggucgucuuucaugcuuu

SEQ ID NO: 735536 - RNA, 19 nt, Artificial Sequence
  Description of Artificial Sequence: Synthetic oligonucleotide
gcccuucgguagcgaaccu

SEQ ID NO: 735537 - RNA, 19 nt, Artificial Sequence
  Description of Artificial Sequence: Synthetic oligonucleotide
gcggcccgccccggacgcg

SEQ ID NO: 735538 - RNA, 19 nt, Artificial Sequence
  Description of Artificial Sequence: Synthetic oligonucleotide
gcaguccgcggcucacguu

SEQ ID NO: 735539 - RNA, 19 nt, Artificial Sequence
  Description of Artificial Sequence: Synthetic oligonucleotide
gcggcccggccucgcugca

SEQ ID NO: 735540 - RNA, 19 nt, Artificial Sequence
  Description of Artificial Sequence: Synthetic oligonucleotide
ccaccucauaaggcaucgu

SEQ ID NO: 735541 - RNA, 19 nt, Artificial Sequence
  Description of Artificial Sequence: Synthetic oligonucleotide
cccagccgcgacccgggau

SEQ ID NO: 735542 - RNA, 19 nt, Artificial Sequence
  Description of Artificial Sequence: Synthetic oligonucleotide
cgacgccgagcagccccug

SEQ ID NO: 735543 - RNA, 19 nt, Artificial Sequence
  Description of Artificial Sequence: Synthetic oligonucleotide
gcguggcggcagggcgcga

SEQ ID NO: 735544 - RNA, 19 nt, Artificial Sequence
  Description of Artificial Sequence: Synthetic oligonucleotide
cgcgacuguggaggccggu

SEQ ID NO: 735545 - RNA, 19 nt, Artificial Sequence
  Description of Artificial Sequence: Synthetic oligonucleotide
aaugauauugucuagccac

SEQ ID NO: 735546 - RNA, 19 nt, Artificial Sequence
  Description of Artificial Sequence: Synthetic oligonucleotide
aagcaaauagaauaaggcc

SEQ ID NO: 735547 - RNA, 19 nt, Artificial Sequence
  Description of Artificial Sequence: Synthetic oligonucleotide
auauugucuagccacaccc

SEQ ID NO: 735548 - RNA, 19 nt, Artificial Sequence
  Description of Artificial Sequence: Synthetic oligonucleotide
aguaguuacagcaauauac

SEQ ID NO: 735549 - RNA, 19 nt, Artificial Sequence
  Description of Artificial Sequence: Synthetic oligonucleotide
aaugcacgcaaucugcugc

SEQ ID NO: 735550 - RNA, 19 nt, Artificial Sequence
  Description of Artificial Sequence: Synthetic oligonucleotide
gacaauacuucccaaaugc

SEQ ID NO: 735551 - RNA, 19 nt, Artificial Sequence
  Description of Artificial Sequence: Synthetic oligonucleotide
aauagaauaaggcccauaa

SEQ ID NO: 735552 - RNA, 19 nt, Artificial Sequence
  Description of Artificial Sequence: Synthetic oligonucleotide
aaguuauccaguuuuccag

SEQ ID NO: 735553 - RNA, 19 nt, Artificial Sequence
  Description of Artificial Sequence: Synthetic oligonucleotide
uguaucuuaagucucucug

SEQ ID NO: 735554 - RNA, 19 nt, Artificial Sequence
  Description of Artificial Sequence: Synthetic oligonucleotide
aaagcuuuugcccuguggu

SEQ ID NO: 735555 - RNA, 19 nt, Artificial Sequence
  Description of Artificial Sequence: Synthetic oligonucleotide
uguaugguucuacagacug

SEQ ID NO: 735556 - RNA, 19 nt, Artificial Sequence
  Description of Artificial Sequence: Synthetic oligonucleotide
agucagauccaucucaaac

SEQ ID NO: 735557 - RNA, 19 nt, Artificial Sequence
  Description of Artificial Sequence: Synthetic oligonucleotide
gaucuuauaucccaugaug

SEQ ID NO: 735558 - RNA, 19 nt, Artificial Sequence
  Description of Artificial Sequence: Synthetic oligonucleotide
acacuccgaagucagaucc

SEQ ID NO: 735559 - RNA, 19 nt, Artificial Sequence
  Description of Artificial Sequence: Synthetic oligonucleotide
ugaacuugucuucaguaag

SEQ ID NO: 735560 - RNA, 19 nt, Artificial Sequence
  Description of Artificial Sequence: Synthetic oligonucleotide
agaaguaggagauuuaaaa

SEQ ID NO: 735561 - RNA, 19 nt, Artificial Sequence
  Description of Artificial Sequence: Synthetic oligonucleotide
auuuuaccccaucacagac

SEQ ID NO: 735562 - RNA, 19 nt, Artificial Sequence
  Description of Artificial Sequence: Synthetic oligonucleotide
ugauccuaggccuaguaag

SEQ ID NO: 735563 - RNA, 19 nt, Artificial Sequence
  Description of Artificial Sequence: Synthetic oligonucleotide
acaacaacggugguuagcc

SEQ ID NO: 735564 - RNA, 19 nt, Artificial Sequence
  Description of Artificial Sequence: Synthetic oligonucleotide
aacgacauguuguucagcu

SEQ ID NO: 735565 - RNA, 19 nt, Artificial Sequence
  Description of Artificial Sequence: Synthetic oligonucleotide
gaaccaagcaaauagaaua

SEQ ID NO: 735566 - RNA, 19 nt, Artificial Sequence
  Description of Artificial Sequence: Synthetic oligonucleotide
caaaauuuagcccauguga

SEQ ID NO: 735567 - RNA, 19 nt, Artificial Sequence
  Description of Artificial Sequence: Synthetic oligonucleotide
agucucucugaucacaagg

SEQ ID NO: 735568 - RNA, 19 nt, Artificial Sequence
  Description of Artificial Sequence: Synthetic oligonucleotide
uuuuccacccaagugaaag

SEQ ID NO: 735569 - RNA, 19 nt, Artificial Sequence
  Description of Artificial Sequence: Synthetic oligonucleotide
uccaaauacccuuuuggcc

SEQ ID NO: 735570 - RNA, 19 nt, Artificial Sequence
  Description of Artificial Sequence: Synthetic oligonucleotide
cuuugcaaaauuuagccca

SEQ ID NO: 735571 - RNA, 19 nt, Artificial Sequence
  Description of Artificial Sequence: Synthetic oligonucleotide
aaagauagcagaaguagga

SEQ ID NO: 735572 - RNA, 19 nt, Artificial Sequence
  Description of Artificial Sequence: Synthetic oligonucleotide
uuugacugcuuaagggugg

SEQ ID NO: 735573 - RNA, 19 nt, Artificial Sequence
  Description of Artificial Sequence: Synthetic oligonucleotide
aaucuggaaccacaaaagu

SEQ ID NO: 735574 - RNA, 19 nt, Artificial Sequence
  Description of Artificial Sequence: Synthetic oligonucleotide
acuaaagaauguucugggg

SEQ ID NO: 735575 - RNA, 19 nt, Artificial Sequence
  Description of Artificial Sequence: Synthetic oligonucleotide
uuaagcugauaauucaacu

SEQ ID NO: 735576 - RNA, 19 nt, Artificial Sequence
  Description of Artificial Sequence: Synthetic oligonucleotide
agcaaccugacuuuaguag

SEQ ID NO: 735577 - RNA, 19 nt, Artificial Sequence
  Description of Artificial Sequence: Synthetic oligonucleotide
uuauuucuggaaguuaaag

SEQ ID NO: 735578 - RNA, 19 nt, Artificial Sequence
  Description of Artificial Sequence: Synthetic oligonucleotide
uuuacaacaucugucccag

SEQ ID NO: 735579 - RNA, 19 nt, Artificial Sequence
  Description of Artificial Sequence: Synthetic oligonucleotide
aaacgugagugacccaaac

SEQ ID NO: 735580 - RNA, 19 nt, Artificial Sequence
  Description of Artificial Sequence: Synthetic oligonucleotide
aguuauccaguuuuccagg

SEQ ID NO: 735581 - RNA, 19 nt, Artificial Sequence
  Description of Artificial Sequence: Synthetic oligonucleotide
ucuuugcaaaauuuagccc

SEQ ID NO: 735582 - RNA, 19 nt, Artificial Sequence
  Description of Artificial Sequence: Synthetic oligonucleotide
cagguaacuucccagagcc

SEQ ID NO: 735583 - RNA, 19 nt, Artificial Sequence
  Description of Artificial Sequence: Synthetic oligonucleotide
gaaguugagacucugcuaa

SEQ ID NO: 735584 - RNA, 19 nt, Artificial Sequence
  Description of Artificial Sequence: Synthetic oligonucleotide
acgugagugacccaaacug

SEQ ID NO: 735585 - RNA, 19 nt, Artificial Sequence
  Description of Artificial Sequence: Synthetic oligonucleotide
uucagcaaacgacauguug

SEQ ID NO: 735586 - RNA, 19 nt, Artificial Sequence
  Description of Artificial Sequence: Synthetic oligonucleotide
aauaacugucucaaagcag

SEQ ID NO: 735587 - RNA, 19 nt, Artificial Sequence
  Description of Artificial Sequence: Synthetic oligonucleotide
agagucuaguuuucuuugc

SEQ ID NO: 735588 - RNA, 19 nt, Artificial Sequence
  Description of Artificial Sequence: Synthetic oligonucleotide
uuccaaauacccuuuuggc

SEQ ID NO: 735589 - RNA, 19 nt, Artificial Sequence
  Description of Artificial Sequence: Synthetic oligonucleotide
aaggcaagcaguuugucuu

SEQ ID NO: 735590 - RNA, 19 nt, Artificial Sequence
  Description of Artificial Sequence: Synthetic oligonucleotide
uucaccguuauuccaaacu

SEQ ID NO: 735591 - RNA, 19 nt, Artificial Sequence
  Description of Artificial Sequence: Synthetic oligonucleotide
aacaacaacggugguuagc

SEQ ID NO: 735592 - RNA, 19 nt, Artificial Sequence
  Description of Artificial Sequence: Synthetic oligonucleotide
aacaacggugguuagccca

SEQ ID NO: 735593 - RNA, 19 nt, Artificial Sequence
  Description of Artificial Sequence: Synthetic oligonucleotide
aaaauuuagcccaugugau

SEQ ID NO: 735594 - RNA, 19 nt, Artificial Sequence
  Description of Artificial Sequence: Synthetic oligonucleotide
uccaugaucuuauauccca

SEQ ID NO: 735595 - RNA, 19 nt, Artificial Sequence
  Description of Artificial Sequence: Synthetic oligonucleotide
caacucaggaaauuugacc

SEQ ID NO: 735596 - RNA, 19 nt, Artificial Sequence
  Description of Artificial Sequence: Synthetic oligonucleotide
uccgaagucagauccaucu

SEQ ID NO: 735597 - RNA, 19 nt, Artificial Sequence
  Description of Artificial Sequence: Synthetic oligonucleotide
ucaaagcuguaucuuaagu

SEQ ID NO: 735598 - RNA, 19 nt, Artificial Sequence
  Description of Artificial Sequence: Synthetic oligonucleotide
ugcauacuaaagaauguuc

SEQ ID NO: 735599 - RNA, 19 nt, Artificial Sequence
  Description of Artificial Sequence: Synthetic oligonucleotide
ugguguaugguucuacaga

SEQ ID NO: 735600 - RNA, 19 nt, Artificial Sequence
  Description of Artificial Sequence: Synthetic oligonucleotide
augcaagcaggacagggac

SEQ ID NO: 735601 - RNA, 19 nt, Artificial Sequence
  Description of Artificial Sequence: Synthetic oligonucleotide
gaaguuauccaguuuucca

SEQ ID NO: 735602 - RNA, 19 nt, Artificial Sequence
  Description of Artificial Sequence: Synthetic oligonucleotide
auacuucccaaaugccucc

SEQ ID NO: 735603 - RNA, 19 nt, Artificial Sequence
  Description of Artificial Sequence: Synthetic oligonucleotide
agcccaugugaucugacac

SEQ ID NO: 735604 - RNA, 19 nt, Artificial Sequence
  Description of Artificial Sequence: Synthetic oligonucleotide
uuucauuagguuucugaac

SEQ ID NO: 735605 - RNA, 19 nt, Artificial Sequence
  Description of Artificial Sequence: Synthetic oligonucleotide
ugcaaaauuuagcccaugu

SEQ ID NO: 735606 - RNA, 19 nt, Artificial Sequence
  Description of Artificial Sequence: Synthetic oligonucleotide
gagaccaggacucccaaug

SEQ ID NO: 735607 - RNA, 19 nt, Artificial Sequence
  Description of Artificial Sequence: Synthetic oligonucleotide
uuaaggguggaacccggag

SEQ ID NO: 735608 - RNA, 19 nt, Artificial Sequence
  Description of Artificial Sequence: Synthetic oligonucleotide
acccaaacugcccuccugc

SEQ ID NO: 735609 - RNA, 19 nt, Artificial Sequence
  Description of Artificial Sequence: Synthetic oligonucleotide
uauuuuaccccaucacaga

SEQ ID NO: 735610 - RNA, 19 nt, Artificial Sequence
  Description of Artificial Sequence: Synthetic oligonucleotide
uaugguucuacagacugga

SEQ ID NO: 735611 - RNA, 19 nt, Artificial Sequence
  Description of Artificial Sequence: Synthetic oligonucleotide
acacccuacacuuuaauuu

SEQ ID NO: 735612 - RNA, 19 nt, Artificial Sequence
  Description of Artificial Sequence: Synthetic oligonucleotide
uaaggguggaacccggagc

SEQ ID NO: 735613 - RNA, 19 nt, Artificial Sequence
  Description of Artificial Sequence: Synthetic oligonucleotide
augaucuuauaucccauga

SEQ ID NO: 735614 - RNA, 19 nt, Artificial Sequence
  Description of Artificial Sequence: Synthetic oligonucleotide
auugucuagccacacccag

SEQ ID NO: 735615 - RNA, 19 nt, Artificial Sequence
  Description of Artificial Sequence: Synthetic oligonucleotide
aacggugguuagcccaggc

SEQ ID NO: 735616 - RNA, 19 nt, Artificial Sequence
  Description of Artificial Sequence: Synthetic oligonucleotide
ugugaucugacacccuaca

SEQ ID NO: 735617 - RNA, 19 nt, Artificial Sequence
  Description of Artificial Sequence: Synthetic oligonucleotide
uggucgacaauacuuccca

SEQ ID NO: 735618 - RNA, 19 nt, Artificial Sequence
  Description of Artificial Sequence: Synthetic oligonucleotide
gauccuaggccuaguaagg

SEQ ID NO: 735619 - RNA, 19 nt, Artificial Sequence
  Description of Artificial Sequence: Synthetic oligonucleotide
cugacucugaaacaggguc

SEQ ID NO: 735620 - RNA, 19 nt, Artificial Sequence
  Description of Artificial Sequence: Synthetic oligonucleotide
agauagcagaaguaggaga

SEQ ID NO: 735621 - RNA, 19 nt, Artificial Sequence
  Description of Artificial Sequence: Synthetic oligonucleotide
uuaaagucgucaguaugcc

SEQ ID NO: 735622 - RNA, 19 nt, Artificial Sequence
  Description of Artificial Sequence: Synthetic oligonucleotide
uugguguaugguucuacag

SEQ ID NO: 735623 - RNA, 19 nt, Artificial Sequence
  Description of Artificial Sequence: Synthetic oligonucleotide
ucucuggucgacaauacuu

SEQ ID NO: 735624 - RNA, 19 nt, Artificial Sequence
  Description of Artificial Sequence: Synthetic oligonucleotide
aagucgucaguaugccccg

SEQ ID NO: 735625 - RNA, 19 nt, Artificial Sequence
  Description of Artificial Sequence: Synthetic oligonucleotide
ucugaaguugagacucugc

SEQ ID NO: 735626 - RNA, 19 nt, Artificial Sequence
  Description of Artificial Sequence: Synthetic oligonucleotide
ugucacacagaugaacuug

SEQ ID NO: 735627 - RNA, 19 nt, Artificial Sequence
  Description of Artificial Sequence: Synthetic oligonucleotide
uguacccuucauuccaaag

SEQ ID NO: 735628 - RNA, 19 nt, Artificial Sequence
  Description of Artificial Sequence: Synthetic oligonucleotide
ucuuauaucccaugaugau

SEQ ID NO: 735629 - RNA, 19 nt, Artificial Sequence
  Description of Artificial Sequence: Synthetic oligonucleotide
aguaaggggcagcaccugg

SEQ ID NO: 735630 - RNA, 19 nt, Artificial Sequence
  Description of Artificial Sequence: Synthetic oligonucleotide
aggaccuguaguccaaguc

SEQ ID NO: 735631 - RNA, 19 nt, Artificial Sequence
  Description of Artificial Sequence: Synthetic oligonucleotide
accacgaaagcacuuuuca

SEQ ID NO: 735632 - RNA, 19 nt, Artificial Sequence
  Description of Artificial Sequence: Synthetic oligonucleotide
uuaauuuguuggcgggucu

SEQ ID NO: 735633 - RNA, 19 nt, Artificial Sequence
  Description of Artificial Sequence: Synthetic oligonucleotide
agcgcuuuccucuuuacau

SEQ ID NO: 735634 - RNA, 19 nt, Artificial Sequence
  Description of Artificial Sequence: Synthetic oligonucleotide
aaacgacauguuguucagc

SEQ ID NO: 735635 - RNA, 19 nt, Artificial Sequence
  Description of Artificial Sequence: Synthetic oligonucleotide
uuaagucucucugaucaca

SEQ ID NO: 735636 - RNA, 19 nt, Artificial Sequence
  Description of Artificial Sequence: Synthetic oligonucleotide
aucuuauaucccaugauga

SEQ ID NO: 735637 - RNA, 19 nt, Artificial Sequence
  Description of Artificial Sequence: Synthetic oligonucleotide
agagccgggaccuuuacaa

SEQ ID NO: 735638 - RNA, 19 nt, Artificial Sequence
  Description of Artificial Sequence: Synthetic oligonucleotide
cguuauuccaaacugcugg

SEQ ID NO: 735639 - RNA, 19 nt, Artificial Sequence
  Description of Artificial Sequence: Synthetic oligonucleotide
ugagugacccaaacugccc

SEQ ID NO: 735640 - RNA, 19 nt, Artificial Sequence
  Description of Artificial Sequence: Synthetic oligonucleotide
gcuuauugcauacuaaaga

SEQ ID NO: 735641 - RNA, 19 nt, Artificial Sequence
  Description of Artificial Sequence: Synthetic oligonucleotide
ggagacaccaggauguugg

SEQ ID NO: 735642 - RNA, 19 nt, Artificial Sequence
  Description of Artificial Sequence: Synthetic oligonucleotide
augcacgcaaucugcugcc

SEQ ID NO: 735643 - RNA, 19 nt, Artificial Sequence
  Description of Artificial Sequence: Synthetic oligonucleotide
acgaaagcacuuuucauua

SEQ ID NO: 735644 - RNA, 19 nt, Artificial Sequence
  Description of Artificial Sequence: Synthetic oligonucleotide
uauugucuagccacaccca

SEQ ID NO: 735645 - RNA, 19 nt, Artificial Sequence
  Description of Artificial Sequence: Synthetic oligonucleotide
gguguaugguucuacagac

SEQ ID NO: 735646 - RNA, 19 nt, Artificial Sequence
  Description of Artificial Sequence: Synthetic oligonucleotide
ucuggucgacaauacuucc

SEQ ID NO: 735647 - RNA, 19 nt, Artificial Sequence
  Description of Artificial Sequence: Synthetic oligonucleotide
uuugcaaaauuuagcccau

SEQ ID NO: 735648 - RNA, 19 nt, Artificial Sequence
  Description of Artificial Sequence: Synthetic oligonucleotide
acggugguuagcccaggcc

SEQ ID NO: 735649 - RNA, 19 nt, Artificial Sequence
  Description of Artificial Sequence: Synthetic oligonucleotide
ugacuuuaguagugaacug

SEQ ID NO: 735650 - RNA, 19 nt, Artificial Sequence
  Description of Artificial Sequence: Synthetic oligonucleotide
aaugcaagcaggacaggga

SEQ ID NO: 735651 - RNA, 19 nt, Artificial Sequence
  Description of Artificial Sequence: Synthetic oligonucleotide
aagcuguaucuuaagucuc

SEQ ID NO: 735652 - RNA, 19 nt, Artificial Sequence
  Description of Artificial Sequence: Synthetic oligonucleotide
cagagucuaguuuucuuug

SEQ ID NO: 735653 - RNA, 19 nt, Artificial Sequence
  Description of Artificial Sequence: Synthetic oligonucleotide
guuauccaguuuuccaggc

SEQ ID NO: 735654 - RNA, 19 nt, Artificial Sequence
  Description of Artificial Sequence: Synthetic oligonucleotide
acagaaaggcuaugcuguc

SEQ ID NO: 735655 - RNA, 19 nt, Artificial Sequence
  Description of Artificial Sequence: Synthetic oligonucleotide
ugcuuaaggguggaacccg

SEQ ID NO: 735656 - RNA, 19 nt, Artificial Sequence
  Description of Artificial Sequence: Synthetic oligonucleotide
ugcuacagaaaggcuaugc

SEQ ID NO: 735657 - RNA, 19 nt, Artificial Sequence
  Description of Artificial Sequence: Synthetic oligonucleotide
uugccuuuccaaauacccu

SEQ ID NO: 735658 - RNA, 19 nt, Artificial Sequence
  Description of Artificial Sequence: Synthetic oligonucleotide
cuuugcuacagaaaggcua

SEQ ID NO: 735659 - RNA, 19 nt, Artificial Sequence
  Description of Artificial Sequence: Synthetic oligonucleotide
caugaucuuauaucccaug

SEQ ID NO: 735660 - RNA, 19 nt, Artificial Sequence
  Description of Artificial Sequence: Synthetic oligonucleotide
acucaggaaauuugaccag

SEQ ID NO: 735661 - RNA, 19 nt, Artificial Sequence
  Description of Artificial Sequence: Synthetic oligonucleotide
guaucuuaagucucucuga

SEQ ID NO: 735662 - RNA, 19 nt, Artificial Sequence
  Description of Artificial Sequence: Synthetic oligonucleotide
auugcucaaaagauagcag

SEQ ID NO: 735663 - RNA, 19 nt, Artificial Sequence
  Description of Artificial Sequence: Synthetic oligonucleotide
ccaagugaaagugacaccc

SEQ ID NO: 735664 - RNA, 19 nt, Artificial Sequence
  Description of Artificial Sequence: Synthetic oligonucleotide
aacugucucaaagcagaag

SEQ ID NO: 735665 - RNA, 19 nt, Artificial Sequence
  Description of Artificial Sequence: Synthetic oligonucleotide
aaccaagcaaauagaauaa

SEQ ID NO: 735666 - RNA, 19 nt, Artificial Sequence
  Description of Artificial Sequence: Synthetic oligonucleotide
aacuucccagagccgggac

SEQ ID NO: 735667 - RNA, 19 nt, Artificial Sequence
  Description of Artificial Sequence: Synthetic oligonucleotide
aucucaaacgugagugacc

SEQ ID NO: 735668 - RNA, 19 nt, Artificial Sequence
  Description of Artificial Sequence: Synthetic oligonucleotide
uucgugcucaggauggcac

SEQ ID NO: 735669 - RNA, 19 nt, Artificial Sequence
  Description of Artificial Sequence: Synthetic oligonucleotide
guugagacucugcuaauga

SEQ ID NO: 735670 - RNA, 19 nt, Artificial Sequence
  Description of Artificial Sequence: Synthetic oligonucleotide
agaugaacuugucuucagu

SEQ ID NO: 735671 - RNA, 19 nt, Artificial Sequence
  Description of Artificial Sequence: Synthetic oligonucleotide
ugggguuugacugcuuaag

SEQ ID NO: 735672 - RNA, 19 nt, Artificial Sequence
  Description of Artificial Sequence: Synthetic oligonucleotide
uugauccuaggccuaguaa

SEQ ID NO: 735673 - RNA, 19 nt, Artificial Sequence
  Description of Artificial Sequence: Synthetic oligonucleotide
ccucuuuacauaaaagcac

SEQ ID NO: 735674 - RNA, 19 nt, Artificial Sequence
  Description of Artificial Sequence: Synthetic oligonucleotide
agcuuauugcauacuaaag

SEQ ID NO: 735675 - RNA, 19 nt, Artificial Sequence
  Description of Artificial Sequence: Synthetic oligonucleotide
caccguuauuccaaacugc

SEQ ID NO: 735676 - RNA, 19 nt, Artificial Sequence
  Description of Artificial Sequence: Synthetic oligonucleotide
guuugacugcuuaagggug

SEQ ID NO: 735677 - RNA, 19 nt, Artificial Sequence
  Description of Artificial Sequence: Synthetic oligonucleotide
cugaucacaaggucccgag

SEQ ID NO: 735678 - RNA, 19 nt, Artificial Sequence
  Description of Artificial Sequence: Synthetic oligonucleotide
auccaugaucuuauauccc

SEQ ID NO: 735679 - RNA, 19 nt, Artificial Sequence
  Description of Artificial Sequence: Synthetic oligonucleotide
ucacaaggucccgagacca

SEQ ID NO: 735680 - RNA, 19 nt, Artificial Sequence
  Description of Artificial Sequence: Synthetic oligonucleotide
agauugcucaaaagauagc

SEQ ID NO: 735681 - RNA, 19 nt, Artificial Sequence
  Description of Artificial Sequence: Synthetic oligonucleotide
cucuggucgacaauacuuc

SEQ ID NO: 735682 - RNA, 19 nt, Artificial Sequence
  Description of Artificial Sequence: Synthetic oligonucleotide
uuuccaggcgauccaggca

SEQ ID NO: 735683 - RNA, 19 nt, Artificial Sequence
  Description of Artificial Sequence: Synthetic oligonucleotide
cuggucgacaauacuuccc

SEQ ID NO: 735684 - RNA, 19 nt, Artificial Sequence
  Description of Artificial Sequence: Synthetic oligonucleotide
auugcauacuaaagaaugu

SEQ ID NO: 735685 - RNA, 19 nt, Artificial Sequence
  Description of Artificial Sequence: Synthetic oligonucleotide
auccuaggccuaguaaggc

SEQ ID NO: 735686 - RNA, 19 nt, Artificial Sequence
  Description of Artificial Sequence: Synthetic oligonucleotide
auagaauaaggcccauaau

SEQ ID NO: 735687 - RNA, 19 nt, Artificial Sequence
  Description of Artificial Sequence: Synthetic oligonucleotide
caaccugacuuuaguagug

SEQ ID NO: 735688 - RNA, 19 nt, Artificial Sequence
  Description of Artificial Sequence: Synthetic oligonucleotide
ccagucuugaugacaaggg

SEQ ID NO: 735689 - RNA, 19 nt, Artificial Sequence
  Description of Artificial Sequence: Synthetic oligonucleotide
cuuaauuuguuggcggguc

SEQ ID NO: 735690 - RNA, 19 nt, Artificial Sequence
  Description of Artificial Sequence: Synthetic oligonucleotide
ugugguuacaggugccccu

SEQ ID NO: 735691 - RNA, 19 nt, Artificial Sequence
  Description of Artificial Sequence: Synthetic oligonucleotide
ucuuaauuuguuggcgggu

SEQ ID NO: 735692 - RNA, 19 nt, Artificial Sequence
  Description of Artificial Sequence: Synthetic oligonucleotide
gcaaacgacauguuguuca

SEQ ID NO: 735693 - RNA, 19 nt, Artificial Sequence
  Description of Artificial Sequence: Synthetic oligonucleotide
gcaaaauuuagcccaugug

SEQ ID NO: 735694 - RNA, 19 nt, Artificial Sequence
  Description of Artificial Sequence: Synthetic oligonucleotide
uugagacucugcuaaugaa

SEQ ID NO: 735695 - RNA, 19 nt, Artificial Sequence
  Description of Artificial Sequence: Synthetic oligonucleotide
ucgugcucaggauggcacg

SEQ ID NO: 735696 - RNA, 19 nt, Artificial Sequence
  Description of Artificial Sequence: Synthetic oligonucleotide
agugacccaaacugcccuc

SEQ ID NO: 735697 - RNA, 19 nt, Artificial Sequence
  Description of Artificial Sequence: Synthetic oligonucleotide
acuuuaguagugaacugga

SEQ ID NO: 735698 - RNA, 19 nt, Artificial Sequence
  Description of Artificial Sequence: Synthetic oligonucleotide
gacugcuuaaggguggaac

SEQ ID NO: 735699 - RNA, 19 nt, Artificial Sequence
  Description of Artificial Sequence: Synthetic oligonucleotide
gaagccagguugauccuag

SEQ ID NO: 735700 - RNA, 19 nt, Artificial Sequence
  Description of Artificial Sequence: Synthetic oligonucleotide
uugucuagccacacccaga

SEQ ID NO: 735701 - RNA, 19 nt, Artificial Sequence
  Description of Artificial Sequence: Synthetic oligonucleotide
uccuaggccuaguaaggca

SEQ ID NO: 735702 - RNA, 19 nt, Artificial Sequence
  Description of Artificial Sequence: Synthetic oligonucleotide
caaggggccggucagggug

SEQ ID NO: 735703 - RNA, 19 nt, Artificial Sequence
  Description of Artificial Sequence: Synthetic oligonucleotide
gauagcagaaguaggagau

SEQ ID NO: 735704 - RNA, 19 nt, Artificial Sequence
  Description of Artificial Sequence: Synthetic oligonucleotide
cuuaagucucucugaucac

SEQ ID NO: 735705 - RNA, 19 nt, Artificial Sequence
  Description of Artificial Sequence: Synthetic oligonucleotide
cuccaaugcacgcaaucug

SEQ ID NO: 735706 - RNA, 19 nt, Artificial Sequence
  Description of Artificial Sequence: Synthetic oligonucleotide
guaugguucuacagacugg

SEQ ID NO: 735707 - RNA, 19 nt, Artificial Sequence
  Description of Artificial Sequence: Synthetic oligonucleotide
caucucaaacgugagugac

SEQ ID NO: 735708 - RNA, 19 nt, Artificial Sequence
  Description of Artificial Sequence: Synthetic oligonucleotide
cugacuuuaguagugaacu

SEQ ID NO: 735709 - RNA, 19 nt, Artificial Sequence
  Description of Artificial Sequence: Synthetic oligonucleotide
aguugagacucugcuaaug

SEQ ID NO: 735710 - RNA, 19 nt, Artificial Sequence
  Description of Artificial Sequence: Synthetic oligonucleotide
cacgcaaucugcugccgcc

SEQ ID NO: 735711 - RNA, 19 nt, Artificial Sequence
  Description of Artificial Sequence: Synthetic oligonucleotide
aacuggacaccagucuuga

SEQ ID NO: 735712 - RNA, 19 nt, Artificial Sequence
  Description of Artificial Sequence: Synthetic oligonucleotide
accguuauuccaaacugcu

SEQ ID NO: 735713 - RNA, 19 nt, Artificial Sequence
  Description of Artificial Sequence: Synthetic oligonucleotide
cccuucauuccaaagggcc

SEQ ID NO: 735714 - RNA, 19 nt, Artificial Sequence
  Description of Artificial Sequence: Synthetic oligonucleotide
ggggagguagcacacuccg

SEQ ID NO: 735715 - RNA, 19 nt, Artificial Sequence
  Description of Artificial Sequence: Synthetic oligonucleotide
ugauauugucuagccacac

SEQ ID NO: 735716 - RNA, 19 nt, Artificial Sequence
  Description of Artificial Sequence: Synthetic oligonucleotide
agccgggaccuuuacaaca

SEQ ID NO: 735717 - RNA, 19 nt, Artificial Sequence
  Description of Artificial Sequence: Synthetic oligonucleotide
ucgucaguaugccccgagc

SEQ ID NO: 735718 - RNA, 19 nt, Artificial Sequence
  Description of Artificial Sequence: Synthetic oligonucleotide
gggguuugacugcuuaagg

SEQ ID NO: 735719 - RNA, 19 nt, Artificial Sequence
  Description of Artificial Sequence: Synthetic oligonucleotide
ucugaucacaaggucccga

SEQ ID NO: 735720 - RNA, 19 nt, Artificial Sequence
  Description of Artificial Sequence: Synthetic oligonucleotide
agucuaguuuucuuugcua

SEQ ID NO: 735721 - RNA, 19 nt, Artificial Sequence
  Description of Artificial Sequence: Synthetic oligonucleotide
agggguagccaaggcaagc

SEQ ID NO: 735722 - RNA, 19 nt, Artificial Sequence
  Description of Artificial Sequence: Synthetic oligonucleotide
aaauagaauaaggcccaua

SEQ ID NO: 735723 - RNA, 19 nt, Artificial Sequence
  Description of Artificial Sequence: Synthetic oligonucleotide
gaccagcggagacaccagg

SEQ ID NO: 735724 - RNA, 19 nt, Artificial Sequence
  Description of Artificial Sequence: Synthetic oligonucleotide
caaggucaaugauauuguc

SEQ ID NO: 735725 - RNA, 19 nt, Artificial Sequence
  Description of Artificial Sequence: Synthetic oligonucleotide
cuaggccuaguaaggcacc

SEQ ID NO: 735726 - RNA, 19 nt, Artificial Sequence
  Description of Artificial Sequence: Synthetic oligonucleotide
cuugguguaugguucuaca

SEQ ID NO: 735727 - RNA, 19 nt, Artificial Sequence
  Description of Artificial Sequence: Synthetic oligonucleotide
gacucugcuaaugaaguua

SEQ ID NO: 735728 - RNA, 19 nt, Artificial Sequence
  Description of Artificial Sequence: Synthetic oligonucleotide
acaaaaguuaggagucuca

SEQ ID NO: 735729 - RNA, 19 nt, Artificial Sequence
  Description of Artificial Sequence: Synthetic oligonucleotide
caaugcacgcaaucugcug

SEQ ID NO: 735730 - RNA, 19 nt, Artificial Sequence
  Description of Artificial Sequence: Synthetic oligonucleotide
cugcuuaaggguggaaccc

SEQ ID NO: 735731 - RNA, 19 nt, Artificial Sequence
  Description of Artificial Sequence: Synthetic oligonucleotide
agauguugggagggccucc

SEQ ID NO: 735732 - RNA, 19 nt, Artificial Sequence
  Description of Artificial Sequence: Synthetic oligonucleotide
aauacccuuuuggccuggg

SEQ ID NO: 735733 - RNA, 19 nt, Artificial Sequence
  Description of Artificial Sequence: Synthetic oligonucleotide
uuggcgggucugaaguuga

SEQ ID NO: 735734 - RNA, 19 nt, Artificial Sequence
  Description of Artificial Sequence: Synthetic oligonucleotide
cacccagguaacuucccag

SEQ ID NO: 735735 - RNA, 19 nt, Artificial Sequence
  Description of Artificial Sequence: Synthetic oligonucleotide
aaauacccuuuuggccugg

SEQ ID NO: 735736 - RNA, 19 nt, Artificial Sequence
  Description of Artificial Sequence: Synthetic oligonucleotide
uagcccaugugaucugaca

SEQ ID NO: 735737 - RNA, 19 nt, Artificial Sequence
  Description of Artificial Sequence: Synthetic oligonucleotide
aaguugagacucugcuaau

SEQ ID NO: 735738 - RNA, 19 nt, Artificial Sequence
  Description of Artificial Sequence: Synthetic oligonucleotide
guaacuucccagagccggg

SEQ ID NO: 735739 - RNA, 19 nt, Artificial Sequence
  Description of Artificial Sequence: Synthetic oligonucleotide
agcaaacgacauguuguuc

SEQ ID NO: 735740 - RNA, 19 nt, Artificial Sequence
  Description of Artificial Sequence: Synthetic oligonucleotide
cuugggacaugggaaggag

SEQ ID NO: 735741 - RNA, 19 nt, Artificial Sequence
  Description of Artificial Sequence: Synthetic oligonucleotide
uuugaccagcaaccugacu

SEQ ID NO: 735742 - RNA, 19 nt, Artificial Sequence
  Description of Artificial Sequence: Synthetic oligonucleotide
gcuaugcugucucagugug

SEQ ID NO: 735743 - RNA, 19 nt, Artificial Sequence
  Description of Artificial Sequence: Synthetic oligonucleotide
ugccgccucuuccagucag

SEQ ID NO: 735744 - RNA, 19 nt, Artificial Sequence
  Description of Artificial Sequence: Synthetic oligonucleotide
caaguccgauucaaagcug

SEQ ID NO: 735745 - RNA, 19 nt, Artificial Sequence
  Description of Artificial Sequence: Synthetic oligonucleotide
ggagacauaccacaagcaa

SEQ ID NO: 735746 - RNA, 19 nt, Artificial Sequence
  Description of Artificial Sequence: Synthetic oligonucleotide
auguccuagccauggcuca

SEQ ID NO: 735747 - RNA, 19 nt, Artificial Sequence
  Description of Artificial Sequence: Synthetic oligonucleotide
ggagacaauguccuagcca

SEQ ID NO: 735748 - RNA, 19 nt, Artificial Sequence
  Description of Artificial Sequence: Synthetic oligonucleotide
acgacauguuguucagcug

SEQ ID NO: 735749 - RNA, 19 nt, Artificial Sequence
  Description of Artificial Sequence: Synthetic oligonucleotide
gacaccagucuugaugaca

SEQ ID NO: 735750 - RNA, 19 nt, Artificial Sequence
  Description of Artificial Sequence: Synthetic oligonucleotide
ugacacccuacacuuuaau

SEQ ID NO: 735751 - RNA, 19 nt, Artificial Sequence
  Description of Artificial Sequence: Synthetic oligonucleotide
ggagcaauaacugucucaa

SEQ ID NO: 735752 - RNA, 19 nt, Artificial Sequence
  Description of Artificial Sequence: Synthetic oligonucleotide
cacaaaaguuaggagucuc

SEQ ID NO: 735753 - RNA, 19 nt, Artificial Sequence
  Description of Artificial Sequence: Synthetic oligonucleotide
gugaucugacacccuacac

SEQ ID NO: 735754 - RNA, 19 nt, Artificial Sequence
  Description of Artificial Sequence: Synthetic oligonucleotide
auaucccaugaugauuuca

SEQ ID NO: 735755 - RNA, 19 nt, Artificial Sequence
  Description of Artificial Sequence: Synthetic oligonucleotide
gaagucagauccaucucaa

SEQ ID NO: 735756 - RNA, 19 nt, Artificial Sequence
  Description of Artificial Sequence: Synthetic oligonucleotide
gguuugacugcuuaagggu

SEQ ID NO: 735757 - RNA, 19 nt, Artificial Sequence
  Description of Artificial Sequence: Synthetic oligonucleotide
augauauugucuagccaca

SEQ ID NO: 735758 - RNA, 19 nt, Artificial Sequence
  Description of Artificial Sequence: Synthetic oligonucleotide
aguguguuuugcccuuuaa

SEQ ID NO: 735759 - RNA, 19 nt, Artificial Sequence
  Description of Artificial Sequence: Synthetic oligonucleotide
gcucaaaagauagcagaag

SEQ ID NO: 735760 - RNA, 19 nt, Artificial Sequence
  Description of Artificial Sequence: Synthetic oligonucleotide
ucaguaugccccgagccuu

SEQ ID NO: 735761 - RNA, 19 nt, Artificial Sequence
  Description of Artificial Sequence: Synthetic oligonucleotide
gagucuaguuuucuuugcu

SEQ ID NO: 735762 - RNA, 19 nt, Artificial Sequence
  Description of Artificial Sequence: Synthetic oligonucleotide
acaacggugguuagcccag

SEQ ID NO: 735763 - RNA, 19 nt, Artificial Sequence
  Description of Artificial Sequence: Synthetic oligonucleotide
guuggcgggucugaaguug

SEQ ID NO: 735764 - RNA, 19 nt, Artificial Sequence
  Description of Artificial Sequence: Synthetic oligonucleotide
gagucucagaugagcuggg

SEQ ID NO: 735765 - RNA, 19 nt, Artificial Sequence
  Description of Artificial Sequence: Synthetic oligonucleotide
ccuaguaaggcacccucag

SEQ ID NO: 735766 - RNA, 19 nt, Artificial Sequence
  Description of Artificial Sequence: Synthetic oligonucleotide
ccugacuuuaguagugaac

SEQ ID NO: 735767 - RNA, 19 nt, Artificial Sequence
  Description of Artificial Sequence: Synthetic oligonucleotide
ccuaggccuaguaaggcac

SEQ ID NO: 735768 - RNA, 19 nt, Artificial Sequence
  Description of Artificial Sequence: Synthetic oligonucleotide
acucugcuaaugaaguuau

SEQ ID NO: 735769 - RNA, 19 nt, Artificial Sequence
  Description of Artificial Sequence: Synthetic oligonucleotide
aggagacauaccacaagca

SEQ ID NO: 735770 - RNA, 19 nt, Artificial Sequence
  Description of Artificial Sequence: Synthetic oligonucleotide
cagcggagacaccaggaug

SEQ ID NO: 735771 - RNA, 19 nt, Artificial Sequence
  Description of Artificial Sequence: Synthetic oligonucleotide
cacacuccgaagucagauc

SEQ ID NO: 735772 - RNA, 19 nt, Artificial Sequence
  Description of Artificial Sequence: Synthetic oligonucleotide
caacaacggugguuagccc

SEQ ID NO: 735773 - RNA, 19 nt, Artificial Sequence
  Description of Artificial Sequence: Synthetic oligonucleotide
cuucaccguuauuccaaac

SEQ ID NO: 735774 - RNA, 19 nt, Artificial Sequence
  Description of Artificial Sequence: Synthetic oligonucleotide
gucgucaguaugccccgag

SEQ ID NO: 735775 - RNA, 19 nt, Artificial Sequence
  Description of Artificial Sequence: Synthetic oligonucleotide
aguaugccccgagccuugc

SEQ ID NO: 735776 - RNA, 19 nt, Artificial Sequence
  Description of Artificial Sequence: Synthetic oligonucleotide
gguagaccagcggagacac

SEQ ID NO: 735777 - RNA, 19 nt, Artificial Sequence
  Description of Artificial Sequence: Synthetic oligonucleotide
agucucagaugagcugggg

SEQ ID NO: 735778 - RNA, 19 nt, Artificial Sequence
  Description of Artificial Sequence: Synthetic oligonucleotide
agaagcccgagcccuugcu

SEQ ID NO: 735779 - RNA, 19 nt, Artificial Sequence
  Description of Artificial Sequence: Synthetic oligonucleotide
gaagcccgagcccuugcuc

SEQ ID NO: 735780 - RNA, 19 nt, Artificial Sequence
  Description of Artificial Sequence: Synthetic oligonucleotide
uugcaaaauuuagcccaug

SEQ ID NO: 735781 - RNA, 19 nt, Artificial Sequence
  Description of Artificial Sequence: Synthetic oligonucleotide
agcuuuugcccugugguua

SEQ ID NO: 735782 - RNA, 19 nt, Artificial Sequence
  Description of Artificial Sequence: Synthetic oligonucleotide
gggaccuugggacauggga

SEQ ID NO: 735783 - RNA, 19 nt, Artificial Sequence
  Description of Artificial Sequence: Synthetic oligonucleotide
cacgaaagcacuuuucauu

SEQ ID NO: 735784 - RNA, 19 nt, Artificial Sequence
  Description of Artificial Sequence: Synthetic oligonucleotide
gagcgcuuuccucuuuaca

SEQ ID NO: 735785 - RNA, 19 nt, Artificial Sequence
  Description of Artificial Sequence: Synthetic oligonucleotide
uccaccacgaaagcacuuu

SEQ ID NO: 735786 - RNA, 19 nt, Artificial Sequence
  Description of Artificial Sequence: Synthetic oligonucleotide
ugacccaaacugcccuccu

SEQ ID NO: 735787 - RNA, 19 nt, Artificial Sequence
  Description of Artificial Sequence: Synthetic oligonucleotide
cugugguuacaggugcccc

SEQ ID NO: 735788 - RNA, 19 nt, Artificial Sequence
  Description of Artificial Sequence: Synthetic oligonucleotide
ggguccccaggcuuuaaag

SEQ ID NO: 735789 - RNA, 19 nt, Artificial Sequence
  Description of Artificial Sequence: Synthetic oligonucleotide
uccuagccauggcucaguc

SEQ ID NO: 735790 - RNA, 19 nt, Artificial Sequence
  Description of Artificial Sequence: Synthetic oligonucleotide
gggagcaauaacugucuca

SEQ ID NO: 735791 - RNA, 19 nt, Artificial Sequence
  Description of Artificial Sequence: Synthetic oligonucleotide
ccacccaagugaaagugac

SEQ ID NO: 735792 - RNA, 19 nt, Artificial Sequence
  Description of Artificial Sequence: Synthetic oligonucleotide
gagccgggaccuuuacaac

SEQ ID NO: 735793 - RNA, 19 nt, Artificial Sequence
  Description of Artificial Sequence: Synthetic oligonucleotide
agguugauccuaggccuag

SEQ ID NO: 735794 - RNA, 19 nt, Artificial Sequence
  Description of Artificial Sequence: Synthetic oligonucleotide
gacacccuacacuuuaauu

SEQ ID NO: 735795 - RNA, 19 nt, Artificial Sequence
  Description of Artificial Sequence: Synthetic oligonucleotide
accuucaccguuauuccaa

SEQ ID NO: 735796 - RNA, 19 nt, Artificial Sequence
  Description of Artificial Sequence: Synthetic oligonucleotide
ccagguaacuucccagagc

SEQ ID NO: 735797 - RNA, 19 nt, Artificial Sequence
  Description of Artificial Sequence: Synthetic oligonucleotide
cuugcucccggguccccag

SEQ ID NO: 735798 - RNA, 19 nt, Artificial Sequence
  Description of Artificial Sequence: Synthetic oligonucleotide
guugauccuaggccuagua

SEQ ID NO: 735799 - RNA, 19 nt, Artificial Sequence
  Description of Artificial Sequence: Synthetic oligonucleotide
cgugagugacccaaacugc

SEQ ID NO: 735800 - RNA, 19 nt, Artificial Sequence
  Description of Artificial Sequence: Synthetic oligonucleotide
cuuaaggguggaacccgga

SEQ ID NO: 735801 - RNA, 19 nt, Artificial Sequence
  Description of Artificial Sequence: Synthetic oligonucleotide
uggaaagcuuuugcccugu

SEQ ID NO: 735802 - RNA, 19 nt, Artificial Sequence
  Description of Artificial Sequence: Synthetic oligonucleotide
agccuugccuuuccaaaua

SEQ ID NO: 735803 - RNA, 19 nt, Artificial Sequence
  Description of Artificial Sequence: Synthetic oligonucleotide
gcugcuugguguaugguuc

SEQ ID NO: 735804 - RNA, 19 nt, Artificial Sequence
  Description of Artificial Sequence: Synthetic oligonucleotide
auacccuuuuggccuggga

SEQ ID NO: 735805 - RNA, 19 nt, Artificial Sequence
  Description of Artificial Sequence: Synthetic oligonucleotide
cuucauuccaaagggccaa

SEQ ID NO: 735806 - RNA, 19 nt, Artificial Sequence
  Description of Artificial Sequence: Synthetic oligonucleotide
gugcugcacaauagggucc

SEQ ID NO: 735807 - RNA, 19 nt, Artificial Sequence
  Description of Artificial Sequence: Synthetic oligonucleotide
gugacccaaacugcccucc

SEQ ID NO: 735808 - RNA, 19 nt, Artificial Sequence
  Description of Artificial Sequence: Synthetic oligonucleotide
uggcgggucugaaguugag

SEQ ID NO: 735809 - RNA, 19 nt, Artificial Sequence
  Description of Artificial Sequence: Synthetic oligonucleotide
acuccgaagucagauccau

SEQ ID NO: 735810 - RNA, 19 nt, Artificial Sequence
  Description of Artificial Sequence: Synthetic oligonucleotide
gucaguaugccccgagccu

SEQ ID NO: 735811 - RNA, 19 nt, Artificial Sequence
  Description of Artificial Sequence: Synthetic oligonucleotide
caguaugccccgagccuug

SEQ ID NO: 735812 - RNA, 19 nt, Artificial Sequence
  Description of Artificial Sequence: Synthetic oligonucleotide
gcuuaaggguggaacccgg

SEQ ID NO: 735813 - RNA, 19 nt, Artificial Sequence
  Description of Artificial Sequence: Synthetic oligonucleotide
cugugcugcacaauagggu

SEQ ID NO: 735814 - RNA, 19 nt, Artificial Sequence
  Description of Artificial Sequence: Synthetic oligonucleotide
accaggacucccaaugcaa

SEQ ID NO: 735815 - RNA, 19 nt, Artificial Sequence
  Description of Artificial Sequence: Synthetic oligonucleotide
agguaacuucccagagccg

SEQ ID NO: 735816 - RNA, 19 nt, Artificial Sequence
  Description of Artificial Sequence: Synthetic oligonucleotide
uguuggcgggucugaaguu

SEQ ID NO: 735817 - RNA, 19 nt, Artificial Sequence
  Description of Artificial Sequence: Synthetic oligonucleotide
gcaaccugacuuuaguagu

SEQ ID NO: 735818 - RNA, 19 nt, Artificial Sequence
  Description of Artificial Sequence: Synthetic oligonucleotide
cuuauaucccaugaugauu

SEQ ID NO: 735819 - RNA, 19 nt, Artificial Sequence
  Description of Artificial Sequence: Synthetic oligonucleotide
ggugucacacagaugaacu

SEQ ID NO: 735820 - RNA, 19 nt, Artificial Sequence
  Description of Artificial Sequence: Synthetic oligonucleotide
cucugcuaaugaaguuauc

SEQ ID NO: 735821 - RNA, 19 nt, Artificial Sequence
  Description of Artificial Sequence: Synthetic oligonucleotide
gcuacagaaaggcuaugcu

SEQ ID NO: 735822 - RNA, 19 nt, Artificial Sequence
  Description of Artificial Sequence: Synthetic oligonucleotide
cgucaguaugccccgagcc

SEQ ID NO: 735823 - RNA, 19 nt, Artificial Sequence
  Description of Artificial Sequence: Synthetic oligonucleotide
gagagcgcuuuccucuuua

SEQ ID NO: 735824 - RNA, 19 nt, Artificial Sequence
  Description of Artificial Sequence: Synthetic oligonucleotide
ggguggaacccggagcagg

SEQ ID NO: 735825 - RNA, 19 nt, Artificial Sequence
  Description of Artificial Sequence: Synthetic oligonucleotide
ccaaguccgauucaaagcu

SEQ ID NO: 735826 - RNA, 19 nt, Artificial Sequence
  Description of Artificial Sequence: Synthetic oligonucleotide
gagcaauaacugucucaaa

SEQ ID NO: 735827 - RNA, 19 nt, Artificial Sequence
  Description of Artificial Sequence: Synthetic oligonucleotide
ggcccauaaucccugagcu

SEQ ID NO: 735828 - RNA, 19 nt, Artificial Sequence
  Description of Artificial Sequence: Synthetic oligonucleotide
caccuucaccguuauucca

SEQ ID NO: 735829 - RNA, 19 nt, Artificial Sequence
  Description of Artificial Sequence: Synthetic oligonucleotide
agggccuccaaugcacgca

SEQ ID NO: 735830 - RNA, 19 nt, Artificial Sequence
  Description of Artificial Sequence: Synthetic oligonucleotide
ggccuaguaaggcacccuc

SEQ ID NO: 735831 - RNA, 19 nt, Artificial Sequence
  Description of Artificial Sequence: Synthetic oligonucleotide
cuccgaagucagauccauc

SEQ ID NO: 735832 - RNA, 19 nt, Artificial Sequence
  Description of Artificial Sequence: Synthetic oligonucleotide
gggcuucgugcucaggaug

SEQ ID NO: 735833 - RNA, 19 nt, Artificial Sequence
  Description of Artificial Sequence: Synthetic oligonucleotide
cuuuuggccugggacuuca

SEQ ID NO: 735834 - RNA, 19 nt, Artificial Sequence
  Description of Artificial Sequence: Synthetic oligonucleotide
gguggaacccggagcaggc

SEQ ID NO: 735835 - RNA, 19 nt, Artificial Sequence
  Description of Artificial Sequence: Synthetic oligonucleotide
ucccgagaccaggacuccc

SEQ ID NO: 735836 - RNA, 19 nt, Artificial Sequence
  Description of Artificial Sequence: Synthetic oligonucleotide
cacccaagugaaagugaca

SEQ ID NO: 735837 - RNA, 19 nt, Artificial Sequence
  Description of Artificial Sequence: Synthetic oligonucleotide
cacccuacacuuuaauuuu

SEQ ID NO: 735838 - RNA, 19 nt, Artificial Sequence
  Description of Artificial Sequence: Synthetic oligonucleotide
ggaccuugggacaugggaa

SEQ ID NO: 735839 - RNA, 19 nt, Artificial Sequence
  Description of Artificial Sequence: Synthetic oligonucleotide
gugguuagcccaggccacc

SEQ ID NO: 735840 - RNA, 19 nt, Artificial Sequence
  Description of Artificial Sequence: Synthetic oligonucleotide
ggcagauguugggagggcc

SEQ ID NO: 735841 - RNA, 19 nt, Artificial Sequence
  Description of Artificial Sequence: Synthetic oligonucleotide
ccguuauuccaaacugcug

SEQ ID NO: 735842 - RNA, 19 nt, Artificial Sequence
  Description of Artificial Sequence: Synthetic oligonucleotide
ccagauugcucaaaagaua

SEQ ID NO: 735843 - RNA, 19 nt, Artificial Sequence
  Description of Artificial Sequence: Synthetic oligonucleotide
guaugccccgagccuugcc

SEQ ID NO: 735844 - RNA, 19 nt, Artificial Sequence
  Description of Artificial Sequence: Synthetic oligonucleotide
cacagacucagagagcgcu

SEQ ID NO: 735845 - RNA, 19 nt, Artificial Sequence
  Description of Artificial Sequence: Synthetic oligonucleotide
cuggcucucuggucgacaa

SEQ ID NO: 735846 - RNA, 19 nt, Artificial Sequence
  Description of Artificial Sequence: Synthetic oligonucleotide
cuacagacuggaucugggu

SEQ ID NO: 735847 - RNA, 19 nt, Artificial Sequence
  Description of Artificial Sequence: Synthetic oligonucleotide
ggugguuagcccaggccac

SEQ ID NO: 735848 - RNA, 19 nt, Artificial Sequence
  Description of Artificial Sequence: Synthetic oligonucleotide
ccaaacugcccuccugcug

SEQ ID NO: 735849 - RNA, 19 nt, Artificial Sequence
  Description of Artificial Sequence: Synthetic oligonucleotide
cgaaagcacuuuucauuag

SEQ ID NO: 735850 - RNA, 19 nt, Artificial Sequence
  Description of Artificial Sequence: Synthetic oligonucleotide
agugcccagauugcucaaa

SEQ ID NO: 735851 - RNA, 19 nt, Artificial Sequence
  Description of Artificial Sequence: Synthetic oligonucleotide
cuucgugcucaggauggca

SEQ ID NO: 735852 - RNA, 19 nt, Artificial Sequence
  Description of Artificial Sequence: Synthetic oligonucleotide
caguaaggggcagcaccug

SEQ ID NO: 735853 - RNA, 19 nt, Artificial Sequence
  Description of Artificial Sequence: Synthetic oligonucleotide
uggcucucuggucgacaau

SEQ ID NO: 735854 - RNA, 19 nt, Artificial Sequence
  Description of Artificial Sequence: Synthetic oligonucleotide
ucccggguccccaggcuuu

SEQ ID NO: 735855 - RNA, 19 nt, Artificial Sequence
  Description of Artificial Sequence: Synthetic oligonucleotide
agagagcgcuuuccucuuu

SEQ ID NO: 735856 - RNA, 19 nt, Artificial Sequence
  Description of Artificial Sequence: Synthetic oligonucleotide
caggcgauccaggcagaug

SEQ ID NO: 735857 - RNA, 19 nt, Artificial Sequence
  Description of Artificial Sequence: Synthetic oligonucleotide
ggaaagcuuuugcccugug

SEQ ID NO: 735858 - RNA, 19 nt, Artificial Sequence
  Description of Artificial Sequence: Synthetic oligonucleotide
gacauaccacaagcaaggu

SEQ ID NO: 735859 - RNA, 19 nt, Artificial Sequence
  Description of Artificial Sequence: Synthetic oligonucleotide
caacggugguuagcccagg

SEQ ID NO: 735860 - RNA, 19 nt, Artificial Sequence
  Description of Artificial Sequence: Synthetic oligonucleotide
aggccuaguaaggcacccu

SEQ ID NO: 735861 - RNA, 19 nt, Artificial Sequence
  Description of Artificial Sequence: Synthetic oligonucleotide
gcgauccaggcagauguug

SEQ ID NO: 735862 - RNA, 19 nt, Artificial Sequence
  Description of Artificial Sequence: Synthetic oligonucleotide
aggguggaacccggagcag

SEQ ID NO: 735863 - RNA, 19 nt, Artificial Sequence
  Description of Artificial Sequence: Synthetic oligonucleotide
ugacugcuuaaggguggaa

SEQ ID NO: 735864 - RNA, 19 nt, Artificial Sequence
  Description of Artificial Sequence: Synthetic oligonucleotide
ggcuaugcugucucagugu

SEQ ID NO: 735865 - RNA, 19 nt, Artificial Sequence
  Description of Artificial Sequence: Synthetic oligonucleotide
ccaucucaaacgugaguga

SEQ ID NO: 735866 - RNA, 19 nt, Artificial Sequence
  Description of Artificial Sequence: Synthetic oligonucleotide
cucaaacgugagugaccca

SEQ ID NO: 735867 - RNA, 19 nt, Artificial Sequence
  Description of Artificial Sequence: Synthetic oligonucleotide
cagcaaacgacauguuguu

SEQ ID NO: 735868 - RNA, 19 nt, Artificial Sequence
  Description of Artificial Sequence: Synthetic oligonucleotide
cagguugauccuaggccua

SEQ ID NO: 735869 - RNA, 19 nt, Artificial Sequence
  Description of Artificial Sequence: Synthetic oligonucleotide
acccuacacuuuaauuuua

SEQ ID NO: 735870 - RNA, 19 nt, Artificial Sequence
  Description of Artificial Sequence: Synthetic oligonucleotide
ccgaagucagauccaucuc

SEQ ID NO: 735871 - RNA, 19 nt, Artificial Sequence
  Description of Artificial Sequence: Synthetic oligonucleotide
ccgauucaaagcuguaucu

SEQ ID NO: 735872 - RNA, 19 nt, Artificial Sequence
  Description of Artificial Sequence: Synthetic oligonucleotide
aguccgauucaaagcugua

SEQ ID NO: 735873 - RNA, 19 nt, Artificial Sequence
  Description of Artificial Sequence: Synthetic oligonucleotide
gcaagcaguuugucuugga

SEQ ID NO: 735874 - RNA, 19 nt, Artificial Sequence
  Description of Artificial Sequence: Synthetic oligonucleotide
cccugugguuacaggugcc

SEQ ID NO: 735875 - RNA, 19 nt, Artificial Sequence
  Description of Artificial Sequence: Synthetic oligonucleotide
cccuacacuuuaauuuuaa

SEQ ID NO: 735876 - RNA, 19 nt, Artificial Sequence
  Description of Artificial Sequence: Synthetic oligonucleotide
cuaugcugucucagugugu

SEQ ID NO: 735877 - RNA, 19 nt, Artificial Sequence
  Description of Artificial Sequence: Synthetic oligonucleotide
gucccgagaccaggacucc

SEQ ID NO: 735878 - RNA, 19 nt, Artificial Sequence
  Description of Artificial Sequence: Synthetic oligonucleotide
cggugguuagcccaggcca

SEQ ID NO: 735879 - RNA, 19 nt, Artificial Sequence
  Description of Artificial Sequence: Synthetic oligonucleotide
gccgcuccaccacgaaagc

SEQ ID NO: 735880 - RNA, 19 nt, Artificial Sequence
  Description of Artificial Sequence: Synthetic oligonucleotide
ggucgacaauacuucccaa

SEQ ID NO: 735881 - RNA, 19 nt, Artificial Sequence
  Description of Artificial Sequence: Synthetic oligonucleotide
gcgcuuuccucuuuacaua

SEQ ID NO: 735882 - RNA, 19 nt, Artificial Sequence
  Description of Artificial Sequence: Synthetic oligonucleotide
ugccccgagccuugccuuu

SEQ ID NO: 735883 - RNA, 19 nt, Artificial Sequence
  Description of Artificial Sequence: Synthetic oligonucleotide
guagaccagcggagacacc

SEQ ID NO: 735884 - RNA, 19 nt, Artificial Sequence
  Description of Artificial Sequence: Synthetic oligonucleotide
gaacccggagcaggcaggu

SEQ ID NO: 735885 - RNA, 19 nt, Artificial Sequence
  Description of Artificial Sequence: Synthetic oligonucleotide
aguuugucuuggagacaau

SEQ ID NO: 735886 - RNA, 19 nt, Artificial Sequence
  Description of Artificial Sequence: Synthetic oligonucleotide
agucgucaguaugccccga

SEQ ID NO: 735887 - RNA, 19 nt, Artificial Sequence
  Description of Artificial Sequence: Synthetic oligonucleotide
uccuggcucucuggucgac

SEQ ID NO: 735888 - RNA, 19 nt, Artificial Sequence
  Description of Artificial Sequence: Synthetic oligonucleotide
cucagaugagcugggguuu

SEQ ID NO: 735889 - RNA, 19 nt, Artificial Sequence
  Description of Artificial Sequence: Synthetic oligonucleotide
ggcgggucugaaguugaga

SEQ ID NO: 735890 - RNA, 19 nt, Artificial Sequence
  Description of Artificial Sequence: Synthetic oligonucleotide
gcuucgugcucaggauggc

SEQ ID NO: 735891 - RNA, 19 nt, Artificial Sequence
  Description of Artificial Sequence: Synthetic oligonucleotide
cccgagaccaggacuccca

SEQ ID NO: 735892 - RNA, 19 nt, Artificial Sequence
  Description of Artificial Sequence: Synthetic oligonucleotide
ccuccaaugcacgcaaucu

SEQ ID NO: 735893 - RNA, 19 nt, Artificial Sequence
  Description of Artificial Sequence: Synthetic oligonucleotide
gccggucagggugcauggg

SEQ ID NO: 735894 - RNA, 19 nt, Artificial Sequence
  Description of Artificial Sequence: Synthetic oligonucleotide
gggagguagcacacuccga

SEQ ID NO: 735895 - RNA, 19 nt, Artificial Sequence
  Description of Artificial Sequence: Synthetic oligonucleotide
ccacgaaagcacuuuucau

SEQ ID NO: 735896 - RNA, 19 nt, Artificial Sequence
  Description of Artificial Sequence: Synthetic oligonucleotide
cccgagcccuugcucccgg

SEQ ID NO: 735897 - RNA, 19 nt, Artificial Sequence
  Description of Artificial Sequence: Synthetic oligonucleotide
ccgggaccuuuacaacauc

SEQ ID NO: 735898 - RNA, 19 nt, Artificial Sequence
  Description of Artificial Sequence: Synthetic oligonucleotide
ccccgagccuugccuuucc

SEQ ID NO: 735899 - RNA, 19 nt, Artificial Sequence
  Description of Artificial Sequence: Synthetic oligonucleotide
ccugggaaccaagcaaaua

SEQ ID NO: 735900 - RNA, 19 nt, Artificial Sequence
  Description of Artificial Sequence: Synthetic oligonucleotide
ccgagccuugccuuuccaa

SEQ ID NO: 735901 - RNA, 19 nt, Artificial Sequence
  Description of Artificial Sequence: Synthetic oligonucleotide
gccauggcucagucuggaa

SEQ ID NO: 735902 - RNA, 19 nt, Artificial Sequence
  Description of Artificial Sequence: Synthetic oligonucleotide
ggcaggugccucagucauc

SEQ ID NO: 735903 - RNA, 19 nt, Artificial Sequence
  Description of Artificial Sequence: Synthetic oligonucleotide
gcccgagcccuugcucccg

SEQ ID NO: 735904 - RNA, 19 nt, Artificial Sequence
  Description of Artificial Sequence: Synthetic oligonucleotide
ccgagcccuugcucccggg

SEQ ID NO: 735905 - RNA, 19 nt, Artificial Sequence
  Description of Artificial Sequence: Synthetic oligonucleotide
aggugccccugggaaccaa

SEQ ID NO: 735906 - RNA, 19 nt, Artificial Sequence
  Description of Artificial Sequence: Synthetic oligonucleotide
cccaggcuuuaaagucguc

SEQ ID NO: 735907 - RNA, 19 nt, Artificial Sequence
  Description of Artificial Sequence: Synthetic oligonucleotide
gguugauccuaggccuagu

SEQ ID NO: 735908 - RNA, 19 nt, Artificial Sequence
  Description of Artificial Sequence: Synthetic oligonucleotide
cggagacaccaggauguug

SEQ ID NO: 735909 - RNA, 19 nt, Artificial Sequence
  Description of Artificial Sequence: Synthetic oligonucleotide
gccgggaccuuuacaacau

SEQ ID NO: 735910 - RNA, 19 nt, Artificial Sequence
  Description of Artificial Sequence: Synthetic oligonucleotide
cccaugauguacccuucau

SEQ ID NO: 735911 - RNA, 19 nt, Artificial Sequence
  Description of Artificial Sequence: Synthetic oligonucleotide
ggcaugcagggcugccgcu

SEQ ID NO: 735912 - RNA, 19 nt, Artificial Sequence
  Description of Artificial Sequence: Synthetic oligonucleotide
ccccaggcuuuaaagucgu

SEQ ID NO: 735913 - RNA, 19 nt, Artificial Sequence
  Description of Artificial Sequence: Synthetic oligonucleotide
ccuggcucucuggucgaca

SEQ ID NO: 735914 - RNA, 19 nt, Artificial Sequence
  Description of Artificial Sequence: Synthetic oligonucleotide
ccgagaccaggacucccaa

SEQ ID NO: 735915 - RNA, 19 nt, Artificial Sequence
  Description of Artificial Sequence: Synthetic oligonucleotide
ccgcuccaccacgaaagca

SEQ ID NO: 735916 - RNA, 19 nt, Artificial Sequence
  Description of Artificial Sequence: Synthetic oligonucleotide
ccaccacgaaagcacuuuu

SEQ ID NO: 735917 - RNA, 19 nt, Artificial Sequence
  Description of Artificial Sequence: Synthetic oligonucleotide
cggguccccaggcuuuaaa

SEQ ID NO: 735918 - RNA, 19 nt, Artificial Sequence
  Description of Artificial Sequence: Synthetic oligonucleotide
cgagaccaggacucccaau

SEQ ID NO: 735919 - RNA, 19 nt, Artificial Sequence
  Description of Artificial Sequence: Synthetic oligonucleotide
cgagcccuugcucccgggu

SEQ ID NO: 735920 - RNA, 19 nt, Artificial Sequence
  Description of Artificial Sequence: Synthetic oligonucleotide
gcggagacaccaggauguu

SEQ ID NO: 735921 - RNA, 19 nt, Artificial Sequence
  Description of Artificial Sequence: Synthetic oligonucleotide
ccaggcgauccaggcagau

SEQ ID NO: 735922 - RNA, 19 nt, Artificial Sequence
  Description of Artificial Sequence: Synthetic oligonucleotide
cccggguccccaggcuuua

SEQ ID NO: 735923 - RNA, 19 nt, Artificial Sequence
  Description of Artificial Sequence: Synthetic oligonucleotide
ccggguccccaggcuuuaa

SEQ ID NO: 735924 - RNA, 19 nt, Artificial Sequence
  Description of Artificial Sequence: Synthetic oligonucleotide
ggggccggucagggugcau

SEQ ID NO: 735925 - RNA, 19 nt, Artificial Sequence
  Description of Artificial Sequence: Synthetic oligonucleotide
aauuuaugagaacaagaac

SEQ ID NO: 735926 - RNA, 19 nt, Artificial Sequence
  Description of Artificial Sequence: Synthetic oligonucleotide
uucucaaucaagcuuaagg

SEQ ID NO: 735927 - RNA, 19 nt, Artificial Sequence
  Description of Artificial Sequence: Synthetic oligonucleotide
ugaaagauauuugaaaugg

SEQ ID NO: 735928 - RNA, 19 nt, Artificial Sequence
  Description of Artificial Sequence: Synthetic oligonucleotide
uaggaaauagcccagcagg

SEQ ID NO: 735929 - RNA, 19 nt, Artificial Sequence
  Description of Artificial Sequence: Synthetic oligonucleotide
uccguuuugcccaagaagg

SEQ ID NO: 735930 - RNA, 19 nt, Artificial Sequence
  Description of Artificial Sequence: Synthetic oligonucleotide
uuaguagagaaacaguaag

SEQ ID NO: 735931 - RNA, 19 nt, Artificial Sequence
  Description of Artificial Sequence: Synthetic oligonucleotide
aacuuugugccucagcugg

SEQ ID NO: 735932 - RNA, 19 nt, Artificial Sequence
  Description of Artificial Sequence: Synthetic oligonucleotide
ugcguaaauaaccacaugc

SEQ ID NO: 735933 - RNA, 19 nt, Artificial Sequence
  Description of Artificial Sequence: Synthetic oligonucleotide
ucuugaaucuguuaagccg

SEQ ID NO: 735934 - RNA, 19 nt, Artificial Sequence
  Description of Artificial Sequence: Synthetic oligonucleotide
aaagaguggaaccuaaucu

SEQ ID NO: 735935 - RNA, 19 nt, Artificial Sequence
  Description of Artificial Sequence: Synthetic oligonucleotide
uaaaguaggaagaaucugc

SEQ ID NO: 735936 - RNA, 19 nt, Artificial Sequence
  Description of Artificial Sequence: Synthetic oligonucleotide
aacuccugucuuuacaacc

SEQ ID NO: 735937 - RNA, 19 nt, Artificial Sequence
  Description of Artificial Sequence: Synthetic oligonucleotide
uggaccaucagucaaguag

SEQ ID NO: 735938 - RNA, 19 nt, Artificial Sequence
  Description of Artificial Sequence: Synthetic oligonucleotide
ucaaguaggaaauagccca

SEQ ID NO: 735939 - RNA, 19 nt, Artificial Sequence
  Description of Artificial Sequence: Synthetic oligonucleotide
uaagguugcguaaauaacc

SEQ ID NO: 735940 - RNA, 19 nt, Artificial Sequence
  Description of Artificial Sequence: Synthetic oligonucleotide
guagcuaacaacuuugugc

SEQ ID NO: 735941 - RNA, 19 nt, Artificial Sequence
  Description of Artificial Sequence: Synthetic oligonucleotide
aaagguucuauuaugccac

SEQ ID NO: 735942 - RNA, 19 nt, Artificial Sequence
  Description of Artificial Sequence: Synthetic oligonucleotide
auuaacuucuauucggcgg

SEQ ID NO: 735943 - RNA, 19 nt, Artificial Sequence
  Description of Artificial Sequence: Synthetic oligonucleotide
uggugaauuagcauucucg

SEQ ID NO: 735944 - RNA, 19 nt, Artificial Sequence
  Description of Artificial Sequence: Synthetic oligonucleotide
ugcgacaaagguuugaaag

SEQ ID NO: 735945 - RNA, 19 nt, Artificial Sequence
  Description of Artificial Sequence: Synthetic oligonucleotide
uuugaaaguguccagguaa

SEQ ID NO: 735946 - RNA, 19 nt, Artificial Sequence
  Description of Artificial Sequence: Synthetic oligonucleotide
uagcuaacaacuuugugcc

SEQ ID NO: 735947 - RNA, 19 nt, Artificial Sequence
  Description of Artificial Sequence: Synthetic oligonucleotide
gaacuugaaaggcaaagcc

SEQ ID NO: 735948 - RNA, 19 nt, Artificial Sequence
  Description of Artificial Sequence: Synthetic oligonucleotide
uuaacuucuauucggcggc

SEQ ID NO: 735949 - RNA, 19 nt, Artificial Sequence
  Description of Artificial Sequence: Synthetic oligonucleotide
acaauuggcaacucagugg

SEQ ID NO: 735950 - RNA, 19 nt, Artificial Sequence
  Description of Artificial Sequence: Synthetic oligonucleotide
uagugcuucaauuuugucc

SEQ ID NO: 735951 - RNA, 19 nt, Artificial Sequence
  Description of Artificial Sequence: Synthetic oligonucleotide
aagauaugggacuaagcca

SEQ ID NO: 735952 - RNA, 19 nt, Artificial Sequence
  Description of Artificial Sequence: Synthetic oligonucleotide
ucuuaguagagaaacagua

SEQ ID NO: 735953 - RNA, 19 nt, Artificial Sequence
  Description of Artificial Sequence: Synthetic oligonucleotide
aaucuguuaagccgggcag

SEQ ID NO: 735954 - RNA, 19 nt, Artificial Sequence
  Description of Artificial Sequence: Synthetic oligonucleotide
aggaauugcaagaagugcc

SEQ ID NO: 735955 - RNA, 19 nt, Artificial Sequence
  Description of Artificial Sequence: Synthetic oligonucleotide
uuugggaucaaaccagccc

SEQ ID NO: 735956 - RNA, 19 nt, Artificial Sequence
  Description of Artificial Sequence: Synthetic oligonucleotide
gacgaacuaaaguaggaag

SEQ ID NO: 735957 - RNA, 19 nt, Artificial Sequence
  Description of Artificial Sequence: Synthetic oligonucleotide
gaauuagcauucucguugg

SEQ ID NO: 735958 - RNA, 19 nt, Artificial Sequence
  Description of Artificial Sequence: Synthetic oligonucleotide
uuaagagguucaucaaagg

SEQ ID NO: 735959 - RNA, 19 nt, Artificial Sequence
  Description of Artificial Sequence: Synthetic oligonucleotide
aucaaagguucuauuaugc

SEQ ID NO: 735960 - RNA, 19 nt, Artificial Sequence
  Description of Artificial Sequence: Synthetic oligonucleotide
aaguuaaaggucccaggag

SEQ ID NO: 735961 - RNA, 19 nt, Artificial Sequence
  Description of Artificial Sequence: Synthetic oligonucleotide
acaacuuugugccucagcu

SEQ ID NO: 735962 - RNA, 19 nt, Artificial Sequence
  Description of Artificial Sequence: Synthetic oligonucleotide
uggacauuagaaguuaaag

SEQ ID NO: 735963 - RNA, 19 nt, Artificial Sequence
  Description of Artificial Sequence: Synthetic oligonucleotide
caauuggcaacucaguggc

SEQ ID NO: 735964 - RNA, 19 nt, Artificial Sequence
  Description of Artificial Sequence: Synthetic oligonucleotide
gauaacuaaaucucggaaa

SEQ ID NO: 735965 - RNA, 19 nt, Artificial Sequence
  Description of Artificial Sequence: Synthetic oligonucleotide
ugggacuaagccaugauuc

SEQ ID NO: 735966 - RNA, 19 nt, Artificial Sequence
  Description of Artificial Sequence: Synthetic oligonucleotide
aauccgcucauuuggacca

SEQ ID NO: 735967 - RNA, 19 nt, Artificial Sequence
  Description of Artificial Sequence: Synthetic oligonucleotide
uuuccgagcagcuugagua

SEQ ID NO: 735968 - RNA, 19 nt, Artificial Sequence
  Description of Artificial Sequence: Synthetic oligonucleotide
ugcuacaauaacaaaccac

SEQ ID NO: 735969 - RNA, 19 nt, Artificial Sequence
  Description of Artificial Sequence: Synthetic oligonucleotide
gaaccuaaucuuuauuuac

SEQ ID NO: 735970 - RNA, 19 nt, Artificial Sequence
  Description of Artificial Sequence: Synthetic oligonucleotide
aaggagaaguagcaucguc

SEQ ID NO: 735971 - RNA, 19 nt, Artificial Sequence
  Description of Artificial Sequence: Synthetic oligonucleotide
acaagaacacagcacguag

SEQ ID NO: 735972 - RNA, 19 nt, Artificial Sequence
  Description of Artificial Sequence: Synthetic oligonucleotide
aacaagauacacaaucugu

SEQ ID NO: 735973 - RNA, 19 nt, Artificial Sequence
  Description of Artificial Sequence: Synthetic oligonucleotide
uaaaucucggaaaacugaa

SEQ ID NO: 735974 - RNA, 19 nt, Artificial Sequence
  Description of Artificial Sequence: Synthetic oligonucleotide
uaaagaguggaaccuaauc

SEQ ID NO: 735975 - RNA, 19 nt, Artificial Sequence
  Description of Artificial Sequence: Synthetic oligonucleotide
cauagaaauaagaaacuca

SEQ ID NO: 735976 - RNA, 19 nt, Artificial Sequence
  Description of Artificial Sequence: Synthetic oligonucleotide
gccacaaugaacaagauac

SEQ ID NO: 735977 - RNA, 19 nt, Artificial Sequence
  Description of Artificial Sequence: Synthetic oligonucleotide
augauucacaacuugcugu

SEQ ID NO: 735978 - RNA, 19 nt, Artificial Sequence
  Description of Artificial Sequence: Synthetic oligonucleotide
gaagacgaacuaaaguagg

SEQ ID NO: 735979 - RNA, 19 nt, Artificial Sequence
  Description of Artificial Sequence: Synthetic oligonucleotide
uugaaaguguccagguaag

SEQ ID NO: 735980 - RNA, 19 nt, Artificial Sequence
  Description of Artificial Sequence: Synthetic oligonucleotide
guaucuuuugcacuuaaga

SEQ ID NO: 735981 - RNA, 19 nt, Artificial Sequence
  Description of Artificial Sequence: Synthetic oligonucleotide
aagaguggaaccuaaucuu

SEQ ID NO: 735982 - RNA, 19 nt, Artificial Sequence
  Description of Artificial Sequence: Synthetic oligonucleotide
uuuaaagaguggaaccuaa

SEQ ID NO: 735983 - RNA, 19 nt, Artificial Sequence
  Description of Artificial Sequence: Synthetic oligonucleotide
uugauaacuaaaucucgga

SEQ ID NO: 735984 - RNA, 19 nt, Artificial Sequence
  Description of Artificial Sequence: Synthetic oligonucleotide
accuaaucuuuauuuacag

SEQ ID NO: 735985 - RNA, 19 nt, Artificial Sequence
  Description of Artificial Sequence: Synthetic oligonucleotide
cugaaagauauuugaaaug

SEQ ID NO: 735986 - RNA, 19 nt, Artificial Sequence
  Description of Artificial Sequence: Synthetic oligonucleotide
uucuuguugcgacaaaggu

SEQ ID NO: 735987 - RNA, 19 nt, Artificial Sequence
  Description of Artificial Sequence: Synthetic oligonucleotide
ucgguuuuccugcaaagga

SEQ ID NO: 735988 - RNA, 19 nt, Artificial Sequence
  Description of Artificial Sequence: Synthetic oligonucleotide
aaucaagcuuaaggcagcc

SEQ ID NO: 735989 - RNA, 19 nt, Artificial Sequence
  Description of Artificial Sequence: Synthetic oligonucleotide
aacugcaccauauuugaua

SEQ ID NO: 735990 - RNA, 19 nt, Artificial Sequence
  Description of Artificial Sequence: Synthetic oligonucleotide
caguaagacaaauuuauga

SEQ ID NO: 735991 - RNA, 19 nt, Artificial Sequence
  Description of Artificial Sequence: Synthetic oligonucleotide
uauaggagguuguuucucc

SEQ ID NO: 735992 - RNA, 19 nt, Artificial Sequence
  Description of Artificial Sequence: Synthetic oligonucleotide
aaugaaugcugggauagca

SEQ ID NO: 735993 - RNA, 19 nt, Artificial Sequence
  Description of Artificial Sequence: Synthetic oligonucleotide
uccugcaucuaucacaauc

SEQ ID NO: 735994 - RNA, 19 nt, Artificial Sequence
  Description of Artificial Sequence: Synthetic oligonucleotide
ucggaaaacugaaccauca

SEQ ID NO: 735995 - RNA, 19 nt, Artificial Sequence
  Description of Artificial Sequence: Synthetic oligonucleotide
aguugguuacagcccauac

SEQ ID NO: 735996 - RNA, 19 nt, Artificial Sequence
  Description of Artificial Sequence: Synthetic oligonucleotide
accaacaagauaugggacu

SEQ ID NO: 735997 - RNA, 19 nt, Artificial Sequence
  Description of Artificial Sequence: Synthetic oligonucleotide
acuucuauucggcggcgcc

SEQ ID NO: 735998 - RNA, 19 nt, Artificial Sequence
  Description of Artificial Sequence: Synthetic oligonucleotide
gaguuuguuagcagguugg

SEQ ID NO: 735999 - RNA, 19 nt, Artificial Sequence
  Description of Artificial Sequence: Synthetic oligonucleotide
uggaaccuaaucuuuauuu

SEQ ID NO: 736000 - RNA, 19 nt, Artificial Sequence
  Description of Artificial Sequence: Synthetic oligonucleotide
gaagcuucacaaguugggg

SEQ ID NO: 736001 - RNA, 19 nt, Artificial Sequence
  Description of Artificial Sequence: Synthetic oligonucleotide
uagaaagcaguuuccgagc

SEQ ID NO: 736002 - RNA, 19 nt, Artificial Sequence
  Description of Artificial Sequence: Synthetic oligonucleotide
uggcaccacauuuugaucu

SEQ ID NO: 736003 - RNA, 19 nt, Artificial Sequence
  Description of Artificial Sequence: Synthetic oligonucleotide
cucagcuggacauuagaag

SEQ ID NO: 736004 - RNA, 19 nt, Artificial Sequence
  Description of Artificial Sequence: Synthetic oligonucleotide
aauguuaguaagugcccaa

SEQ ID NO: 736005 - RNA, 19 nt, Artificial Sequence
  Description of Artificial Sequence: Synthetic oligonucleotide
uauacagacucauuuucau

SEQ ID NO: 736006 - RNA, 19 nt, Artificial Sequence
  Description of Artificial Sequence: Synthetic oligonucleotide
ucuggcaccacauuuugau

SEQ ID NO: 736007 - RNA, 19 nt, Artificial Sequence
  Description of Artificial Sequence: Synthetic oligonucleotide
gauagcaccuccaucuacc

SEQ ID NO: 736008 - RNA, 19 nt, Artificial Sequence
  Description of Artificial Sequence: Synthetic oligonucleotide
agaagacgaacuaaaguag

SEQ ID NO: 736009 - RNA, 19 nt, Artificial Sequence
  Description of Artificial Sequence: Synthetic oligonucleotide
caaguuggggcacaacucc

SEQ ID NO: 736010 - RNA, 19 nt, Artificial Sequence
  Description of Artificial Sequence: Synthetic oligonucleotide
aggagaaguagcaucgucg

SEQ ID NO: 736011 - RNA, 19 nt, Artificial Sequence
  Description of Artificial Sequence: Synthetic oligonucleotide
auaagaaacucaggacagc

SEQ ID NO: 736012 - RNA, 19 nt, Artificial Sequence
  Description of Artificial Sequence: Synthetic oligonucleotide
gucuauaggagguuguuuc

SEQ ID NO: 736013 - RNA, 19 nt, Artificial Sequence
  Description of Artificial Sequence: Synthetic oligonucleotide
uugaaauggcaucaagaau

SEQ ID NO: 736014 - RNA, 19 nt, Artificial Sequence
  Description of Artificial Sequence: Synthetic oligonucleotide
acagcacguagcuaacaac

SEQ ID NO: 736015 - RNA, 19 nt, Artificial Sequence
  Description of Artificial Sequence: Synthetic oligonucleotide
cuucgcuuuccucaguucc

SEQ ID NO: 736016 - RNA, 19 nt, Artificial Sequence
  Description of Artificial Sequence: Synthetic oligonucleotide
acugcaggauacgaaauuc

SEQ ID NO: 736017 - RNA, 19 nt, Artificial Sequence
  Description of Artificial Sequence: Synthetic oligonucleotide
aagacaggucaggaauugc

SEQ ID NO: 736018 - RNA, 19 nt, Artificial Sequence
  Description of Artificial Sequence: Synthetic oligonucleotide
cuaaaucucggaaaacuga

SEQ ID NO: 736019 - RNA, 19 nt, Artificial Sequence
  Description of Artificial Sequence: Synthetic oligonucleotide
aaaccagcccgaaugaugu

SEQ ID NO: 736020 - RNA, 19 nt, Artificial Sequence
  Description of Artificial Sequence: Synthetic oligonucleotide
uuucgguuuuccugcaaag

SEQ ID NO: 736021 - RNA, 19 nt, Artificial Sequence
  Description of Artificial Sequence: Synthetic oligonucleotide
aucuguucaacagucccac

SEQ ID NO: 736022 - RNA, 19 nt, Artificial Sequence
  Description of Artificial Sequence: Synthetic oligonucleotide
guaggaaauagcccagcag

SEQ ID NO: 736023 - RNA, 19 nt, Artificial Sequence
  Description of Artificial Sequence: Synthetic oligonucleotide
gacaugguuacaggaaucc

SEQ ID NO: 736024 - RNA, 19 nt, Artificial Sequence
  Description of Artificial Sequence: Synthetic oligonucleotide
gaguuggcuuuccaaauug

SEQ ID NO: 736025 - RNA, 19 nt, Artificial Sequence
  Description of Artificial Sequence: Synthetic oligonucleotide
cacguagcuaacaacuuug

SEQ ID NO: 736026 - RNA, 19 nt, Artificial Sequence
  Description of Artificial Sequence: Synthetic oligonucleotide
uguuccgacguuccagaag

SEQ ID NO: 736027 - RNA, 19 nt, Artificial Sequence
  Description of Artificial Sequence: Synthetic oligonucleotide
uucgguuuuccugcaaagg

SEQ ID NO: 736028 - RNA, 19 nt, Artificial Sequence
  Description of Artificial Sequence: Synthetic oligonucleotide
caauccgcucauuuggacc

SEQ ID NO: 736029 - RNA, 19 nt, Artificial Sequence
  Description of Artificial Sequence: Synthetic oligonucleotide
acagugggucaacugcacc

SEQ ID NO: 736030 - RNA, 19 nt, Artificial Sequence
  Description of Artificial Sequence: Synthetic oligonucleotide
aagguugcguaaauaacca

SEQ ID NO: 736031 - RNA, 19 nt, Artificial Sequence
  Description of Artificial Sequence: Synthetic oligonucleotide
ucuauaggagguuguuucu

SEQ ID NO: 736032 - RNA, 19 nt, Artificial Sequence
  Description of Artificial Sequence: Synthetic oligonucleotide
caggauacgaaauuccaca

SEQ ID NO: 736033 - RNA, 19 nt, Artificial Sequence
  Description of Artificial Sequence: Synthetic oligonucleotide
acuaaaucucggaaaacug

SEQ ID NO: 736034 - RNA, 19 nt, Artificial Sequence
  Description of Artificial Sequence: Synthetic oligonucleotide
uccugaacuugaaaggcaa

SEQ ID NO: 736035 - RNA, 19 nt, Artificial Sequence
  Description of Artificial Sequence: Synthetic oligonucleotide
ucgggaaaugagcugacau

SEQ ID NO: 736036 - RNA, 19 nt, Artificial Sequence
  Description of Artificial Sequence: Synthetic oligonucleotide
cauacagcuuccuucugug

SEQ ID NO: 736037 - RNA, 19 nt, Artificial Sequence
  Description of Artificial Sequence: Synthetic oligonucleotide
ugcuguuuaugccuuuaac

SEQ ID NO: 736038 - RNA, 19 nt, Artificial Sequence
  Description of Artificial Sequence: Synthetic oligonucleotide
uguuugacauuguccacgu

SEQ ID NO: 736039 - RNA, 19 nt, Artificial Sequence
  Description of Artificial Sequence: Synthetic oligonucleotide
guaaauaaccacaugccaa

SEQ ID NO: 736040 - RNA, 19 nt, Artificial Sequence
  Description of Artificial Sequence: Synthetic oligonucleotide
auauuaguuuuggaguuug

SEQ ID NO: 736041 - RNA, 19 nt, Artificial Sequence
  Description of Artificial Sequence: Synthetic oligonucleotide
aguagcuuggaguuggcuu

SEQ ID NO: 736042 - RNA, 19 nt, Artificial Sequence
  Description of Artificial Sequence: Synthetic oligonucleotide
uugcaagaagugccaacag

SEQ ID NO: 736043 - RNA, 19 nt, Artificial Sequence
  Description of Artificial Sequence: Synthetic oligonucleotide
ugauucacaacuugcugua

SEQ ID NO: 736044 - RNA, 19 nt, Artificial Sequence
  Description of Artificial Sequence: Synthetic oligonucleotide
ucauuuggaccaucaguca

SEQ ID NO: 736045 - RNA, 19 nt, Artificial Sequence
  Description of Artificial Sequence: Synthetic oligonucleotide
cucccuagaaagcaguuuc

SEQ ID NO: 736046 - RNA, 19 nt, Artificial Sequence
  Description of Artificial Sequence: Synthetic oligonucleotide
auuagcauucucguuggug

SEQ ID NO: 736047 - RNA, 19 nt, Artificial Sequence
  Description of Artificial Sequence: Synthetic oligonucleotide
uguugucuauaggagguug

SEQ ID NO: 736048 - RNA, 19 nt, Artificial Sequence
  Description of Artificial Sequence: Synthetic oligonucleotide
aauccguuuugcccaagaa

SEQ ID NO: 736049 - RNA, 19 nt, Artificial Sequence
  Description of Artificial Sequence: Synthetic oligonucleotide
caaguaggaaauagcccag

SEQ ID NO: 736050 - RNA, 19 nt, Artificial Sequence
  Description of Artificial Sequence: Synthetic oligonucleotide
aagacgaacuaaaguagga

SEQ ID NO: 736051 - RNA, 19 nt, Artificial Sequence
  Description of Artificial Sequence: Synthetic oligonucleotide
gcuguuuaugccuuuaaca

SEQ ID NO: 736052 - RNA, 19 nt, Artificial Sequence
  Description of Artificial Sequence: Synthetic oligonucleotide
uuaaagaguggaaccuaau

SEQ ID NO: 736053 - RNA, 19 nt, Artificial Sequence
  Description of Artificial Sequence: Synthetic oligonucleotide
aaagucugccuuagagagg

SEQ ID NO: 736054 - RNA, 19 nt, Artificial Sequence
  Description of Artificial Sequence: Synthetic oligonucleotide
gguaagguugcguaaauaa

SEQ ID NO: 736055 - RNA, 19 nt, Artificial Sequence
  Description of Artificial Sequence: Synthetic oligonucleotide
aucuguuaagccgggcagc

SEQ ID NO: 736056 - RNA, 19 nt, Artificial Sequence
  Description of Artificial Sequence: Synthetic oligonucleotide
aacuucuauucggcggcgc

SEQ ID NO: 736057 - RNA, 19 nt, Artificial Sequence
  Description of Artificial Sequence: Synthetic oligonucleotide
gcacuuaagagguucauca

SEQ ID NO: 736058 - RNA, 19 nt, Artificial Sequence
  Description of Artificial Sequence: Synthetic oligonucleotide
caggaauugcaagaagugc

SEQ ID NO: 736059 - RNA, 19 nt, Artificial Sequence
  Description of Artificial Sequence: Synthetic oligonucleotide
agguugcguaaauaaccac

SEQ ID NO: 736060 - RNA, 19 nt, Artificial Sequence
  Description of Artificial Sequence: Synthetic oligonucleotide
ugccuuuaacaauaucuuc

SEQ ID NO: 736061 - RNA, 19 nt, Artificial Sequence
  Description of Artificial Sequence: Synthetic oligonucleotide
cuuaguagagaaacaguaa

SEQ ID NO: 736062 - RNA, 19 nt, Artificial Sequence
  Description of Artificial Sequence: Synthetic oligonucleotide
cucgaaacguccacugcgc

SEQ ID NO: 736063 - RNA, 19 nt, Artificial Sequence
  Description of Artificial Sequence: Synthetic oligonucleotide
aacagugggucaacugcac

SEQ ID NO: 736064 - RNA, 19 nt, Artificial Sequence
  Description of Artificial Sequence: Synthetic oligonucleotide
aauauuaguuuuggaguuu

SEQ ID NO: 736065 - RNA, 19 nt, Artificial Sequence
  Description of Artificial Sequence: Synthetic oligonucleotide
acgaacuaaaguaggaaga

SEQ ID NO: 736066 - RNA, 19 nt, Artificial Sequence
  Description of Artificial Sequence: Synthetic oligonucleotide
cuguagugcuucaauuuug

SEQ ID NO: 736067 - RNA, 19 nt, Artificial Sequence
  Description of Artificial Sequence: Synthetic oligonucleotide
uucgcuuuccucaguucca

SEQ ID NO: 736068 - RNA, 19 nt, Artificial Sequence
  Description of Artificial Sequence: Synthetic oligonucleotide
ugucuuaaagucugccuua

SEQ ID NO: 736069 - RNA, 19 nt, Artificial Sequence
  Description of Artificial Sequence: Synthetic oligonucleotide
aguagcaucgucgggaaau

SEQ ID NO: 736070 - RNA, 19 nt, Artificial Sequence
  Description of Artificial Sequence: Synthetic oligonucleotide
cuuguugcgacaaagguuu

SEQ ID NO: 736071 - RNA, 19 nt, Artificial Sequence
  Description of Artificial Sequence: Synthetic oligonucleotide
gacaaauuuaugagaacaa

SEQ ID NO: 736072 - RNA, 19 nt, Artificial Sequence
  Description of Artificial Sequence: Synthetic oligonucleotide
agugcccugauuguuucgg

SEQ ID NO: 736073 - RNA, 19 nt, Artificial Sequence
  Description of Artificial Sequence: Synthetic oligonucleotide
gaagacaggucaggaauug

SEQ ID NO: 736074 - RNA, 19 nt, Artificial Sequence
  Description of Artificial Sequence: Synthetic oligonucleotide
uauucccuauggcucugag

SEQ ID NO: 736075 - RNA, 19 nt, Artificial Sequence
  Description of Artificial Sequence: Synthetic oligonucleotide
ugagcugacauuucuccuu

SEQ ID NO: 736076 - RNA, 19 nt, Artificial Sequence
  Description of Artificial Sequence: Synthetic oligonucleotide
gcaagaagugccaacagug

SEQ ID NO: 736077 - RNA, 19 nt, Artificial Sequence
  Description of Artificial Sequence: Synthetic oligonucleotide
guaagguugcguaaauaac

SEQ ID NO: 736078 - RNA, 19 nt, Artificial Sequence
  Description of Artificial Sequence: Synthetic oligonucleotide
uucaaucauuauacugagu

SEQ ID NO: 736079 - RNA, 19 nt, Artificial Sequence
  Description of Artificial Sequence: Synthetic oligonucleotide
ugauuguuucgguuuuccu

SEQ ID NO: 736080 - RNA, 19 nt, Artificial Sequence
  Description of Artificial Sequence: Synthetic oligonucleotide
uuccgagcagcuugaguag

SEQ ID NO: 736081 - RNA, 19 nt, Artificial Sequence
  Description of Artificial Sequence: Synthetic oligonucleotide
ccuaaucuuuauuuacagg

SEQ ID NO: 736082 - RNA, 19 nt, Artificial Sequence
  Description of Artificial Sequence: Synthetic oligonucleotide
aguggaaccuaaucuuuau

SEQ ID NO: 736083 - RNA, 19 nt, Artificial Sequence
  Description of Artificial Sequence: Synthetic oligonucleotide
agccaugauucacaacuug

SEQ ID NO: 736084 - RNA, 19 nt, Artificial Sequence
  Description of Artificial Sequence: Synthetic oligonucleotide
agucacaauuggcaacuca

SEQ ID NO: 736085 - RNA, 19 nt, Artificial Sequence
  Description of Artificial Sequence: Synthetic oligonucleotide
ucuuaaagucugccuuaga

SEQ ID NO: 736086 - RNA, 19 nt, Artificial Sequence
  Description of Artificial Sequence: Synthetic oligonucleotide
uugcguaaauaaccacaug

SEQ ID NO: 736087 - RNA, 19 nt, Artificial Sequence
  Description of Artificial Sequence: Synthetic oligonucleotide
caccaacaagauaugggac

SEQ ID NO: 736088 - RNA, 19 nt, Artificial Sequence
  Description of Artificial Sequence: Synthetic oligonucleotide
ucaauccgcucauuuggac

SEQ ID NO: 736089 - RNA, 19 nt, Artificial Sequence
  Description of Artificial Sequence: Synthetic oligonucleotide
caggaauccgggagaaagc

SEQ ID NO: 736090 - RNA, 19 nt, Artificial Sequence
  Description of Artificial Sequence: Synthetic oligonucleotide
ugggucaacugcaccauau

SEQ ID NO: 736091 - RNA, 19 nt, Artificial Sequence
  Description of Artificial Sequence: Synthetic oligonucleotide
aggauacgaaauuccacau

SEQ ID NO: 736092 - RNA, 19 nt, Artificial Sequence
  Description of Artificial Sequence: Synthetic oligonucleotide
acgaaaggcggugcggggc

SEQ ID NO: 736093 - RNA, 19 nt, Artificial Sequence
  Description of Artificial Sequence: Synthetic oligonucleotide
aagguucuauuaugccaca

SEQ ID NO: 736094 - RNA, 19 nt, Artificial Sequence
  Description of Artificial Sequence: Synthetic oligonucleotide
ucgaaacguccacugcgcc

SEQ ID NO: 736095 - RNA, 19 nt, Artificial Sequence
  Description of Artificial Sequence: Synthetic oligonucleotide
uuaugccuuuaacaauauc

SEQ ID NO: 736096 - RNA, 19 nt, Artificial Sequence
  Description of Artificial Sequence: Synthetic oligonucleotide
auguuaguaagugcccaag

SEQ ID NO: 736097 - RNA, 19 nt, Artificial Sequence
  Description of Artificial Sequence: Synthetic oligonucleotide
cugauuguuucgguuuucc

SEQ ID NO: 736098 - RNA, 19 nt, Artificial Sequence
  Description of Artificial Sequence: Synthetic oligonucleotide
accauauuugauaacuaaa

SEQ ID NO: 736099 - RNA, 19 nt, Artificial Sequence
  Description of Artificial Sequence: Synthetic oligonucleotide
accaauuuacagugcccug

SEQ ID NO: 736100 - RNA, 19 nt, Artificial Sequence
  Description of Artificial Sequence: Synthetic oligonucleotide
uaugggacuaagccaugau

SEQ ID NO: 736101 - RNA, 19 nt, Artificial Sequence
  Description of Artificial Sequence: Synthetic oligonucleotide
uguaucugguccuggcguc

SEQ ID NO: 736102 - RNA, 19 nt, Artificial Sequence
  Description of Artificial Sequence: Synthetic oligonucleotide
agucccaccacugguguag

SEQ ID NO: 736103 - RNA, 19 nt, Artificial Sequence
  Description of Artificial Sequence: Synthetic oligonucleotide
uugcucgcugaugugagca

SEQ ID NO: 736104 - RNA, 19 nt, Artificial Sequence
  Description of Artificial Sequence: Synthetic oligonucleotide
aauuagcauucucguuggu

SEQ ID NO: 736105 - RNA, 19 nt, Artificial Sequence
  Description of Artificial Sequence: Synthetic oligonucleotide
ucuguuaagccgggcagcu

SEQ ID NO: 736106 - RNA, 19 nt, Artificial Sequence
  Description of Artificial Sequence: Synthetic oligonucleotide
uuugugccucagcuggaca

SEQ ID NO: 736107 - RNA, 19 nt, Artificial Sequence
  Description of Artificial Sequence: Synthetic oligonucleotide
auacugaguuucucugucu

SEQ ID NO: 736108 - RNA, 19 nt, Artificial Sequence
  Description of Artificial Sequence: Synthetic oligonucleotide
uccacgaaaggcggugcgg

SEQ ID NO: 736109 - RNA, 19 nt, Artificial Sequence
  Description of Artificial Sequence: Synthetic oligonucleotide
acagaccaauuuacagugc

SEQ ID NO: 736110 - RNA, 19 nt, Artificial Sequence
  Description of Artificial Sequence: Synthetic oligonucleotide
cucggaaaacugaaccauc

SEQ ID NO: 736111 - RNA, 19 nt, Artificial Sequence
  Description of Artificial Sequence: Synthetic oligonucleotide
cuaucacaaucugagucug

SEQ ID NO: 736112 - RNA, 19 nt, Artificial Sequence
  Description of Artificial Sequence: Synthetic oligonucleotide
aggaauccgggagaaagcu

SEQ ID NO: 736113 - RNA, 19 nt, Artificial Sequence
  Description of Artificial Sequence: Synthetic oligonucleotide
cuccuagaagcuucacaag

SEQ ID NO: 736114 - RNA, 19 nt, Artificial Sequence
  Description of Artificial Sequence: Synthetic oligonucleotide
gcuccuagaagcuucacaa

SEQ ID NO: 736115 - RNA, 19 nt, Artificial Sequence
  Description of Artificial Sequence: Synthetic oligonucleotide
cuucuauucggcggcgccg

SEQ ID NO: 736116 - RNA, 19 nt, Artificial Sequence
  Description of Artificial Sequence: Synthetic oligonucleotide
ugggaucaaaccagcccga

SEQ ID NO: 736117 - RNA, 19 nt, Artificial Sequence
  Description of Artificial Sequence: Synthetic oligonucleotide
agcaucgucgggaaaugag

SEQ ID NO: 736118 - RNA, 19 nt, Artificial Sequence
  Description of Artificial Sequence: Synthetic oligonucleotide
ucaaacugaaugggacuac

SEQ ID NO: 736119 - RNA, 19 nt, Artificial Sequence
  Description of Artificial Sequence: Synthetic oligonucleotide
aucauuauacugaguuucu

SEQ ID NO: 736120 - RNA, 19 nt, Artificial Sequence
  Description of Artificial Sequence: Synthetic oligonucleotide
ccucgaaacguccacugcg

SEQ ID NO: 736121 - RNA, 19 nt, Artificial Sequence
  Description of Artificial Sequence: Synthetic oligonucleotide
aauuuacagugcccugauu

SEQ ID NO: 736122 - RNA, 19 nt, Artificial Sequence
  Description of Artificial Sequence: Synthetic oligonucleotide
gucuuaaagucugccuuag

SEQ ID NO: 736123 - RNA, 19 nt, Artificial Sequence
  Description of Artificial Sequence: Synthetic oligonucleotide
gaaguagcaucgucgggaa

SEQ ID NO: 736124 - RNA, 19 nt, Artificial Sequence
  Description of Artificial Sequence: Synthetic oligonucleotide
uccagguaagguugcguaa

SEQ ID NO: 736125 - RNA, 19 nt, Artificial Sequence
  Description of Artificial Sequence: Synthetic oligonucleotide
aucgucgggaaaugagcug

SEQ ID NO: 736126 - RNA, 19 nt, Artificial Sequence
  Description of Artificial Sequence: Synthetic oligonucleotide
acgaaauuccacauagaaa

SEQ ID NO: 736127 - RNA, 19 nt, Artificial Sequence
  Description of Artificial Sequence: Synthetic oligonucleotide
aguucuuaguagagaaaca

SEQ ID NO: 736128 - RNA, 19 nt, Artificial Sequence
  Description of Artificial Sequence: Synthetic oligonucleotide
agacaggucaggaauugca

SEQ ID NO: 736129 - RNA, 19 nt, Artificial Sequence
  Description of Artificial Sequence: Synthetic oligonucleotide
uucuauucggcggcgccgc

SEQ ID NO: 736130 - RNA, 19 nt, Artificial Sequence
  Description of Artificial Sequence: Synthetic oligonucleotide
uguugcgacaaagguuuga

SEQ ID NO: 736131 - RNA, 19 nt, Artificial Sequence
  Description of Artificial Sequence: Synthetic oligonucleotide
auucccuauggcucugagu

SEQ ID NO: 736132 - RNA, 19 nt, Artificial Sequence
  Description of Artificial Sequence: Synthetic oligonucleotide
agacgaacuaaaguaggaa

SEQ ID NO: 736133 - RNA, 19 nt, Artificial Sequence
  Description of Artificial Sequence: Synthetic oligonucleotide
gguuacagcccauacagcu

SEQ ID NO: 736134 - RNA, 19 nt, Artificial Sequence
  Description of Artificial Sequence: Synthetic oligonucleotide
ucagccugcggggucggcg

SEQ ID NO: 736135 - RNA, 19 nt, Artificial Sequence
  Description of Artificial Sequence: Synthetic oligonucleotide
ugcacuuaagagguucauc

SEQ ID NO: 736136 - RNA, 19 nt, Artificial Sequence
  Description of Artificial Sequence: Synthetic oligonucleotide
ucacaacuugcuguaucug

SEQ ID NO: 736137 - RNA, 19 nt, Artificial Sequence
  Description of Artificial Sequence: Synthetic oligonucleotide
gguugcguaaauaaccaca

SEQ ID NO: 736138 - RNA, 19 nt, Artificial Sequence
  Description of Artificial Sequence: Synthetic oligonucleotide
gcuucauauaguauguaca

SEQ ID NO: 736139 - RNA, 19 nt, Artificial Sequence
  Description of Artificial Sequence: Synthetic oligonucleotide
cugugucuuaaagucugcc

SEQ ID NO: 736140 - RNA, 19 nt, Artificial Sequence
  Description of Artificial Sequence: Synthetic oligonucleotide
ucuguucaacagucccacc

SEQ ID NO: 736141 - RNA, 19 nt, Artificial Sequence
  Description of Artificial Sequence: Synthetic oligonucleotide
gguaguuucuggcaccaca

SEQ ID NO: 736142 - RNA, 19 nt, Artificial Sequence
  Description of Artificial Sequence: Synthetic oligonucleotide
cuaacaacuuugugccuca

SEQ ID NO: 736143 - RNA, 19 nt, Artificial Sequence
  Description of Artificial Sequence: Synthetic oligonucleotide
ggugaauuagcauucucgu

SEQ ID NO: 736144 - RNA, 19 nt, Artificial Sequence
  Description of Artificial Sequence: Synthetic oligonucleotide
gucuguuccgacguuccag

SEQ ID NO: 736145 - RNA, 19 nt, Artificial Sequence
  Description of Artificial Sequence: Synthetic oligonucleotide
cuauaggagguuguuucuc

SEQ ID NO: 736146 - RNA, 19 nt, Artificial Sequence
  Description of Artificial Sequence: Synthetic oligonucleotide
caacuccugucuuuacaac

SEQ ID NO: 736147 - RNA, 19 nt, Artificial Sequence
  Description of Artificial Sequence: Synthetic oligonucleotide
uguuagcagguugggaaaa

SEQ ID NO: 736148 - RNA, 19 nt, Artificial Sequence
  Description of Artificial Sequence: Synthetic oligonucleotide
ugaguagcuuggaguuggc

SEQ ID NO: 736149 - RNA, 19 nt, Artificial Sequence
  Description of Artificial Sequence: Synthetic oligonucleotide
cagugggucaacugcacca

SEQ ID NO: 736150 - RNA, 19 nt, Artificial Sequence
  Description of Artificial Sequence: Synthetic oligonucleotide
ugaaucuguuaagccgggc

SEQ ID NO: 736151 - RNA, 19 nt, Artificial Sequence
  Description of Artificial Sequence: Synthetic oligonucleotide
uggcguccagcugugaugu

SEQ ID NO: 736152 - RNA, 19 nt, Artificial Sequence
  Description of Artificial Sequence: Synthetic oligonucleotide
guccacgaaaggcggugcg

SEQ ID NO: 736153 - RNA, 19 nt, Artificial Sequence
  Description of Artificial Sequence: Synthetic oligonucleotide
ccaucagucaaguaggaaa

SEQ ID NO: 736154 - RNA, 19 nt, Artificial Sequence
  Description of Artificial Sequence: Synthetic oligonucleotide
cagcacguagcuaacaacu

SEQ ID NO: 736155 - RNA, 19 nt, Artificial Sequence
  Description of Artificial Sequence: Synthetic oligonucleotide
cacaaguuggggcacaacu

SEQ ID NO: 736156 - RNA, 19 nt, Artificial Sequence
  Description of Artificial Sequence: Synthetic oligonucleotide
caauguuaguaagugccca

SEQ ID NO: 736157 - RNA, 19 nt, Artificial Sequence
  Description of Artificial Sequence: Synthetic oligonucleotide
ggcaucaagaauaaccaaa

SEQ ID NO: 736158 - RNA, 19 nt, Artificial Sequence
  Description of Artificial Sequence: Synthetic oligonucleotide
auaugggacuaagccauga

SEQ ID NO: 736159 - RNA, 19 nt, Artificial Sequence
  Description of Artificial Sequence: Synthetic oligonucleotide
gagguuguuucucccuaga

SEQ ID NO: 736160 - RNA, 19 nt, Artificial Sequence
  Description of Artificial Sequence: Synthetic oligonucleotide
gccaugauucacaacuugc

SEQ ID NO: 736161 - RNA, 19 nt, Artificial Sequence
  Description of Artificial Sequence: Synthetic oligonucleotide
ucuucgcuuuccucaguuc

SEQ ID NO: 736162 - RNA, 19 nt, Artificial Sequence
  Description of Artificial Sequence: Synthetic oligonucleotide
uguuucgguuuuccugcaa

SEQ ID NO: 736163 - RNA, 19 nt, Artificial Sequence
  Description of Artificial Sequence: Synthetic oligonucleotide
ggacaccaacaagauaugg

SEQ ID NO: 736164 - RNA, 19 nt, Artificial Sequence
  Description of Artificial Sequence: Synthetic oligonucleotide
uugcgacaaagguuugaaa

SEQ ID NO: 736165 - RNA, 19 nt, Artificial Sequence
  Description of Artificial Sequence: Synthetic oligonucleotide
cuugcucgcugaugugagc

SEQ ID NO: 736166 - RNA, 19 nt, Artificial Sequence
  Description of Artificial Sequence: Synthetic oligonucleotide
aacucaggacagcuucaua

SEQ ID NO: 736167 - RNA, 19 nt, Artificial Sequence
  Description of Artificial Sequence: Synthetic oligonucleotide
gauaugggacuaagccaug

SEQ ID NO: 736168 - RNA, 19 nt, Artificial Sequence
  Description of Artificial Sequence: Synthetic oligonucleotide
caucagucaaguaggaaau

SEQ ID NO: 736169 - RNA, 19 nt, Artificial Sequence
  Description of Artificial Sequence: Synthetic oligonucleotide
gcaggagucacaauuggca

SEQ ID NO: 736170 - RNA, 19 nt, Artificial Sequence
  Description of Artificial Sequence: Synthetic oligonucleotide
guugcgacaaagguuugaa

SEQ ID NO: 736171 - RNA, 19 nt, Artificial Sequence
  Description of Artificial Sequence: Synthetic oligonucleotide
aggauucuuguugcgacaa

SEQ ID NO: 736172 - RNA, 19 nt, Artificial Sequence
  Description of Artificial Sequence: Synthetic oligonucleotide
uuguugcgacaaagguuug

SEQ ID NO: 736173 - RNA, 19 nt, Artificial Sequence
  Description of Artificial Sequence: Synthetic oligonucleotide
gucggcggcccucgaaacg

SEQ ID NO: 736174 - RNA, 19 nt, Artificial Sequence
  Description of Artificial Sequence: Synthetic oligonucleotide
gcuaacaacuuugugccuc

SEQ ID NO: 736175 - RNA, 19 nt, Artificial Sequence
  Description of Artificial Sequence: Synthetic oligonucleotide
ggagguuguuucucccuag

SEQ ID NO: 736176 - RNA, 19 nt, Artificial Sequence
  Description of Artificial Sequence: Synthetic oligonucleotide
uugucuauaggagguuguu

SEQ ID NO: 736177 - RNA, 19 nt, Artificial Sequence
  Description of Artificial Sequence: Synthetic oligonucleotide
guagcaucgucgggaaaug

SEQ ID NO: 736178 - RNA, 19 nt, Artificial Sequence
  Description of Artificial Sequence: Synthetic oligonucleotide
uauucggcggcgccgcauu

SEQ ID NO: 736179 - RNA, 19 nt, Artificial Sequence
  Description of Artificial Sequence: Synthetic oligonucleotide
gaugugagcauggggagau

SEQ ID NO: 736180 - RNA, 19 nt, Artificial Sequence
  Description of Artificial Sequence: Synthetic oligonucleotide
gcaucgucgggaaaugagc

SEQ ID NO: 736181 - RNA, 19 nt, Artificial Sequence
  Description of Artificial Sequence: Synthetic oligonucleotide
guccagguaagguugcgua

SEQ ID NO: 736182 - RNA, 19 nt, Artificial Sequence
  Description of Artificial Sequence: Synthetic oligonucleotide
guugcguaaauaaccacau

SEQ ID NO: 736183 - RNA, 19 nt, Artificial Sequence
  Description of Artificial Sequence: Synthetic oligonucleotide
uccgacguuccagaagcaa

SEQ ID NO: 736184 - RNA, 19 nt, Artificial Sequence
  Description of Artificial Sequence: Synthetic oligonucleotide
auacgaaauuccacauaga

SEQ ID NO: 736185 - RNA, 19 nt, Artificial Sequence
  Description of Artificial Sequence: Synthetic oligonucleotide
cacagcacguagcuaacaa

SEQ ID NO: 736186 - RNA, 19 nt, Artificial Sequence
  Description of Artificial Sequence: Synthetic oligonucleotide
cauauaguauguacaguuu

SEQ ID NO: 736187 - RNA, 19 nt, Artificial Sequence
  Description of Artificial Sequence: Synthetic oligonucleotide
cuucucaaucaagcuuaag

SEQ ID NO: 736188 - RNA, 19 nt, Artificial Sequence
  Description of Artificial Sequence: Synthetic oligonucleotide
ugcccugauuguuucgguu

SEQ ID NO: 736189 - RNA, 19 nt, Artificial Sequence
  Description of Artificial Sequence: Synthetic oligonucleotide
aaguagcaucgucgggaaa

SEQ ID NO: 736190 - RNA, 19 nt, Artificial Sequence
  Description of Artificial Sequence: Synthetic oligonucleotide
gguuugaaaguguccaggu

SEQ ID NO: 736191 - RNA, 19 nt, Artificial Sequence
  Description of Artificial Sequence: Synthetic oligonucleotide
caucgucgggaaaugagcu

SEQ ID NO: 736192 - RNA, 19 nt, Artificial Sequence
  Description of Artificial Sequence: Synthetic oligonucleotide
aaacguccacugcgccuca

SEQ ID NO: 736193 - RNA, 19 nt, Artificial Sequence
  Description of Artificial Sequence: Synthetic oligonucleotide
cguaaauaaccacaugcca

SEQ ID NO: 736194 - RNA, 19 nt, Artificial Sequence
  Description of Artificial Sequence: Synthetic oligonucleotide
uucacaaguuggggcacaa

SEQ ID NO: 736195 - RNA, 19 nt, Artificial Sequence
  Description of Artificial Sequence: Synthetic oligonucleotide
guaucugguccuggcgucc

SEQ ID NO: 736196 - RNA, 19 nt, Artificial Sequence
  Description of Artificial Sequence: Synthetic oligonucleotide
uuccgacguuccagaagca

SEQ ID NO: 736197 - RNA, 19 nt, Artificial Sequence
  Description of Artificial Sequence: Synthetic oligonucleotide
aagccaugauucacaacuu

SEQ ID NO: 736198 - RNA, 19 nt, Artificial Sequence
  Description of Artificial Sequence: Synthetic oligonucleotide
uuaagccgggcagcuggug

SEQ ID NO: 736199 - RNA, 19 nt, Artificial Sequence
  Description of Artificial Sequence: Synthetic oligonucleotide
caggauucuuguugcgaca

SEQ ID NO: 736200 - RNA, 19 nt, Artificial Sequence
  Description of Artificial Sequence: Synthetic oligonucleotide
ucuauucggcggcgccgca

SEQ ID NO: 736201 - RNA, 19 nt, Artificial Sequence
  Description of Artificial Sequence: Synthetic oligonucleotide
augccaagagagaaaugaa

SEQ ID NO: 736202 - RNA, 19 nt, Artificial Sequence
  Description of Artificial Sequence: Synthetic oligonucleotide
acguagcuaacaacuuugu

SEQ ID NO: 736203 - RNA, 19 nt, Artificial Sequence
  Description of Artificial Sequence: Synthetic oligonucleotide
uagcaucgucgggaaauga

SEQ ID NO: 736204 - RNA, 19 nt, Artificial Sequence
  Description of Artificial Sequence: Synthetic oligonucleotide
guuuuccugcaaaggagaa

SEQ ID NO: 736205 - RNA, 19 nt, Artificial Sequence
  Description of Artificial Sequence: Synthetic oligonucleotide
gcgacaaagguuugaaagu

SEQ ID NO: 736206 - RNA, 19 nt, Artificial Sequence
  Description of Artificial Sequence: Synthetic oligonucleotide
uaguugguuacagcccaua

SEQ ID NO: 736207 - RNA, 19 nt, Artificial Sequence
  Description of Artificial Sequence: Synthetic oligonucleotide
agcugugauguuugacauu

SEQ ID NO: 736208 - RNA, 19 nt, Artificial Sequence
  Description of Artificial Sequence: Synthetic oligonucleotide
cucaggcguccacgaaagg

SEQ ID NO: 736209 - RNA, 19 nt, Artificial Sequence
  Description of Artificial Sequence: Synthetic oligonucleotide
agguucaucaaagguucua

SEQ ID NO: 736210 - RNA, 19 nt, Artificial Sequence
  Description of Artificial Sequence: Synthetic oligonucleotide
aucaagcuuaaggcagccu

SEQ ID NO: 736211 - RNA, 19 nt, Artificial Sequence
  Description of Artificial Sequence: Synthetic oligonucleotide
ggcuccuagaagcuucaca

SEQ ID NO: 736212 - RNA, 19 nt, Artificial Sequence
  Description of Artificial Sequence: Synthetic oligonucleotide
gcucaggcguccacgaaag

SEQ ID NO: 736213 - RNA, 19 nt, Artificial Sequence
  Description of Artificial Sequence: Synthetic oligonucleotide
accaucagucaaguaggaa

SEQ ID NO: 736214 - RNA, 19 nt, Artificial Sequence
  Description of Artificial Sequence: Synthetic oligonucleotide
cgacguuccagaagcaaug

SEQ ID NO: 736215 - RNA, 19 nt, Artificial Sequence
  Description of Artificial Sequence: Synthetic oligonucleotide
agguaagguugcguaaaua

SEQ ID NO: 736216 - RNA, 19 nt, Artificial Sequence
  Description of Artificial Sequence: Synthetic oligonucleotide
acacagcacguagcuaaca

SEQ ID NO: 736217 - RNA, 19 nt, Artificial Sequence
  Description of Artificial Sequence: Synthetic oligonucleotide
aucagucaaguaggaaaua

SEQ ID NO: 736218 - RNA, 19 nt, Artificial Sequence
  Description of Artificial Sequence: Synthetic oligonucleotide
guugucuauaggagguugu

SEQ ID NO: 736219 - RNA, 19 nt, Artificial Sequence
  Description of Artificial Sequence: Synthetic oligonucleotide
aacguccacugcgccucag

SEQ ID NO: 736220 - RNA, 19 nt, Artificial Sequence
  Description of Artificial Sequence: Synthetic oligonucleotide
gggaaaugagcugacauuu

SEQ ID NO: 736221 - RNA, 19 nt, Artificial Sequence
  Description of Artificial Sequence: Synthetic oligonucleotide
gcccucgaaacguccacug

SEQ ID NO: 736222 - RNA, 19 nt, Artificial Sequence
  Description of Artificial Sequence: Synthetic oligonucleotide
agcacguagcuaacaacuu

SEQ ID NO: 736223 - RNA, 19 nt, Artificial Sequence
  Description of Artificial Sequence: Synthetic oligonucleotide
ggaauccgggagaaagcug

SEQ ID NO: 736224 - RNA, 19 nt, Artificial Sequence
  Description of Artificial Sequence: Synthetic oligonucleotide
auauucccuauggcucuga

SEQ ID NO: 736225 - RNA, 19 nt, Artificial Sequence
  Description of Artificial Sequence: Synthetic oligonucleotide
cguagcuaacaacuuugug

SEQ ID NO: 736226 - RNA, 19 nt, Artificial Sequence
  Description of Artificial Sequence: Synthetic oligonucleotide
gacguuccagaagcaaugu

SEQ ID NO: 736227 - RNA, 19 nt, Artificial Sequence
  Description of Artificial Sequence: Synthetic oligonucleotide
gccgcauuucuguacuguc

SEQ ID NO: 736228 - RNA, 19 nt, Artificial Sequence
  Description of Artificial Sequence: Synthetic oligonucleotide
caauuuacagugcccugau

SEQ ID NO: 736229 - RNA, 19 nt, Artificial Sequence
  Description of Artificial Sequence: Synthetic oligonucleotide
ggucaacugcaccauauuu

SEQ ID NO: 736230 - RNA, 19 nt, Artificial Sequence
  Description of Artificial Sequence: Synthetic oligonucleotide
acuucucaaucaagcuuaa

SEQ ID NO: 736231 - RNA, 19 nt, Artificial Sequence
  Description of Artificial Sequence: Synthetic oligonucleotide
acaauccguuuugcccaag

SEQ ID NO: 736232 - RNA, 19 nt, Artificial Sequence
  Description of Artificial Sequence: Synthetic oligonucleotide
caacagucccaccacuggu

SEQ ID NO: 736233 - RNA, 19 nt, Artificial Sequence
  Description of Artificial Sequence: Synthetic oligonucleotide
auguuuccaagagcccaaa

SEQ ID NO: 736234 - RNA, 19 nt, Artificial Sequence
  Description of Artificial Sequence: Synthetic oligonucleotide
cguuuugcccaagaaggac

SEQ ID NO: 736235 - RNA, 19 nt, Artificial Sequence
  Description of Artificial Sequence: Synthetic oligonucleotide
gucgggaaaugagcugaca

SEQ ID NO: 736236 - RNA, 19 nt, Artificial Sequence
  Description of Artificial Sequence: Synthetic oligonucleotide
cccucgaaacguccacugc

SEQ ID NO: 736237 - RNA, 19 nt, Artificial Sequence
  Description of Artificial Sequence: Synthetic oligonucleotide
uccgcucauuuggaccauc

SEQ ID NO: 736238 - RNA, 19 nt, Artificial Sequence
  Description of Artificial Sequence: Synthetic oligonucleotide
ccuauggcucugagugcag

SEQ ID NO: 736239 - RNA, 19 nt, Artificial Sequence
  Description of Artificial Sequence: Synthetic oligonucleotide
cagcccgaaugauguuguc

SEQ ID NO: 736240 - RNA, 19 nt, Artificial Sequence
  Description of Artificial Sequence: Synthetic oligonucleotide
caacaagauaugggacuaa

SEQ ID NO: 736241 - RNA, 19 nt, Artificial Sequence
  Description of Artificial Sequence: Synthetic oligonucleotide
ggucggcggcccucgaaac

SEQ ID NO: 736242 - RNA, 19 nt, Artificial Sequence
  Description of Artificial Sequence: Synthetic oligonucleotide
ccaacaagauaugggacua

SEQ ID NO: 736243 - RNA, 19 nt, Artificial Sequence
  Description of Artificial Sequence: Synthetic oligonucleotide
ccguuuugcccaagaagga

SEQ ID NO: 736244 - RNA, 19 nt, Artificial Sequence
  Description of Artificial Sequence: Synthetic oligonucleotide
uggcuccuagaagcuucac

SEQ ID NO: 736245 - RNA, 19 nt, Artificial Sequence
  Description of Artificial Sequence: Synthetic oligonucleotide
gcguccacgaaaggcggug

SEQ ID NO: 736246 - RNA, 19 nt, Artificial Sequence
  Description of Artificial Sequence: Synthetic oligonucleotide
auucggcggcgccgcauuu

SEQ ID NO: 736247 - RNA, 19 nt, Artificial Sequence
  Description of Artificial Sequence: Synthetic oligonucleotide
cgcucauuuggaccaucag

SEQ ID NO: 736248 - RNA, 19 nt, Artificial Sequence
  Description of Artificial Sequence: Synthetic oligonucleotide
gcaccauauuugauaacua

SEQ ID NO: 736249 - RNA, 19 nt, Artificial Sequence
  Description of Artificial Sequence: Synthetic oligonucleotide
ggcgccgcauuucuguacu

SEQ ID NO: 736250 - RNA, 19 nt, Artificial Sequence
  Description of Artificial Sequence: Synthetic oligonucleotide
acguggccuccuucugaau

SEQ ID NO: 736251 - RNA, 19 nt, Artificial Sequence
  Description of Artificial Sequence: Synthetic oligonucleotide
ccagguaagguugcguaaa

SEQ ID NO: 736252 - RNA, 19 nt, Artificial Sequence
  Description of Artificial Sequence: Synthetic oligonucleotide
ggaucaaaccagcccgaau

SEQ ID NO: 736253 - RNA, 19 nt, Artificial Sequence
  Description of Artificial Sequence: Synthetic oligonucleotide
gcacguagcuaacaacuuu

SEQ ID NO: 736254 - RNA, 19 nt, Artificial Sequence
  Description of Artificial Sequence: Synthetic oligonucleotide
guccuggcguccagcugug

SEQ ID NO: 736255 - RNA, 19 nt, Artificial Sequence
  Description of Artificial Sequence: Synthetic oligonucleotide
ggcggcgccgcauuucugu

SEQ ID NO: 736256 - RNA, 19 nt, Artificial Sequence
  Description of Artificial Sequence: Synthetic oligonucleotide
gugccucagcuggacauua

SEQ ID NO: 736257 - RNA, 19 nt, Artificial Sequence
  Description of Artificial Sequence: Synthetic oligonucleotide
gucccauccugaacuugaa

SEQ ID NO: 736258 - RNA, 19 nt, Artificial Sequence
  Description of Artificial Sequence: Synthetic oligonucleotide
ccugauuguuucgguuuuc

SEQ ID NO: 736259 - RNA, 19 nt, Artificial Sequence
  Description of Artificial Sequence: Synthetic oligonucleotide
gugcccugauuguuucggu

SEQ ID NO: 736260 - RNA, 19 nt, Artificial Sequence
  Description of Artificial Sequence: Synthetic oligonucleotide
ccgcucauuuggaccauca

SEQ ID NO: 736261 - RNA, 19 nt, Artificial Sequence
  Description of Artificial Sequence: Synthetic oligonucleotide
uccuggcguccagcuguga

SEQ ID NO: 736262 - RNA, 19 nt, Artificial Sequence
  Description of Artificial Sequence: Synthetic oligonucleotide
gggaucaaaccagcccgaa

SEQ ID NO: 736263 - RNA, 19 nt, Artificial Sequence
  Description of Artificial Sequence: Synthetic oligonucleotide
auccgcucauuuggaccau

SEQ ID NO: 736264 - RNA, 19 nt, Artificial Sequence
  Description of Artificial Sequence: Synthetic oligonucleotide
cgucgggaaaugagcugac

SEQ ID NO: 736265 - RNA, 19 nt, Artificial Sequence
  Description of Artificial Sequence: Synthetic oligonucleotide
ccgacguuccagaagcaau

SEQ ID NO: 736266 - RNA, 19 nt, Artificial Sequence
  Description of Artificial Sequence: Synthetic oligonucleotide
ccgaaugauguugucuaua

SEQ ID NO: 736267 - RNA, 19 nt, Artificial Sequence
  Description of Artificial Sequence: Synthetic oligonucleotide
cacugcgccucagcccuca

SEQ ID NO: 736268 - RNA, 19 nt, Artificial Sequence
  Description of Artificial Sequence: Synthetic oligonucleotide
ggugcggggcucucagccu

SEQ ID NO: 736269 - RNA, 19 nt, Artificial Sequence
  Description of Artificial Sequence: Synthetic oligonucleotide
gcgccgcauuucuguacug

SEQ ID NO: 736270 - RNA, 19 nt, Artificial Sequence
  Description of Artificial Sequence: Synthetic oligonucleotide
cguccacgaaaggcggugc

SEQ ID NO: 736271 - RNA, 19 nt, Artificial Sequence
  Description of Artificial Sequence: Synthetic oligonucleotide
aggcggugcggggcucuca

SEQ ID NO: 736272 - RNA, 19 nt, Artificial Sequence
  Description of Artificial Sequence: Synthetic oligonucleotide
ccugcggggucggcggccc

SEQ ID NO: 736273 - RNA, 19 nt, Artificial Sequence
  Description of Artificial Sequence: Synthetic oligonucleotide
cuauucggcggcgccgcau

SEQ ID NO: 736274 - RNA, 19 nt, Artificial Sequence
  Description of Artificial Sequence: Synthetic oligonucleotide
cggcgccgcauuucuguac

SEQ ID NO: 736275 - RNA, 19 nt, Artificial Sequence
  Description of Artificial Sequence: Synthetic oligonucleotide
ccuggcguccagcugugau

SEQ ID NO: 736276 - RNA, 19 nt, Artificial Sequence
  Description of Artificial Sequence: Synthetic oligonucleotide
gcggcgccgcauuucugua

SEQ ID NO: 736277 - RNA, 19 nt, Artificial Sequence
  Description of Artificial Sequence: Synthetic oligonucleotide
ggcguccacgaaaggcggu

SEQ ID NO: 736278 - RNA, 19 nt, Artificial Sequence
  Description of Artificial Sequence: Synthetic oligonucleotide
cagccggcucaggcgucca

SEQ ID NO: 736279 - RNA, 19 nt, Artificial Sequence
  Description of Artificial Sequence: Synthetic oligonucleotide
cggcggcccucgaaacguc

SEQ ID NO: 736280 - RNA, 19 nt, Artificial Sequence
  Description of Artificial Sequence: Synthetic oligonucleotide
cgccgcauuucuguacugu

SEQ ID NO: 736281 - RNA, 19 nt, Artificial Sequence
  Description of Artificial Sequence: Synthetic oligonucleotide
cggcggcgccgcauuucug

SEQ ID NO: 736282 - RNA, 19 nt, Artificial Sequence
  Description of Artificial Sequence: Synthetic oligonucleotide
cccaaacagcuugcucgcu

SEQ ID NO: 736283 - RNA, 19 nt, Artificial Sequence
  Description of Artificial Sequence: Synthetic oligonucleotide
cugcggggucggcggcccu

SEQ ID NO: 736284 - RNA, 19 nt, Artificial Sequence
  Description of Artificial Sequence: Synthetic oligonucleotide
gagacuaugaugcagaugg

SEQ ID NO: 736285 - RNA, 19 nt, Artificial Sequence
  Description of Artificial Sequence: Synthetic oligonucleotide
aagaguagcccauagcagc

SEQ ID NO: 736286 - RNA, 19 nt, Artificial Sequence
  Description of Artificial Sequence: Synthetic oligonucleotide
acuaaaucugcacugauuc

SEQ ID NO: 736287 - RNA, 19 nt, Artificial Sequence
  Description of Artificial Sequence: Synthetic oligonucleotide
ugucugaaagguuugagcg

SEQ ID NO: 736288 - RNA, 19 nt, Artificial Sequence
  Description of Artificial Sequence: Synthetic oligonucleotide
gaaaaggacucuaagaacg

SEQ ID NO: 736289 - RNA, 19 nt, Artificial Sequence
  Description of Artificial Sequence: Synthetic oligonucleotide
uuugguauaguguagucag

SEQ ID NO: 736290 - RNA, 19 nt, Artificial Sequence
  Description of Artificial Sequence: Synthetic oligonucleotide
uuuauuacuaagcaggcuu

SEQ ID NO: 736291 - RNA, 19 nt, Artificial Sequence
  Description of Artificial Sequence: Synthetic oligonucleotide
uuucaaggcacauacaacu

SEQ ID NO: 736292 - RNA, 19 nt, Artificial Sequence
  Description of Artificial Sequence: Synthetic oligonucleotide
acuaagcaggcuuuggccc

SEQ ID NO: 736293 - RNA, 19 nt, Artificial Sequence
  Description of Artificial Sequence: Synthetic oligonucleotide
uacauucuggagaugagag

SEQ ID NO: 736294 - RNA, 19 nt, Artificial Sequence
  Description of Artificial Sequence: Synthetic oligonucleotide
ugugguucuaaccagcaca

SEQ ID NO: 736295 - RNA, 19 nt, Artificial Sequence
  Description of Artificial Sequence: Synthetic oligonucleotide
acaacuuccuaacacgggg

SEQ ID NO: 736296 - RNA, 19 nt, Artificial Sequence
  Description of Artificial Sequence: Synthetic oligonucleotide
uuugcuuugugaugggagg

SEQ ID NO: 736297 - RNA, 19 nt, Artificial Sequence
  Description of Artificial Sequence: Synthetic oligonucleotide
ugauucagaugucagggag

SEQ ID NO: 736298 - RNA, 19 nt, Artificial Sequence
  Description of Artificial Sequence: Synthetic oligonucleotide
cuaugaugcagauggaagg

SEQ ID NO: 736299 - RNA, 19 nt, Artificial Sequence
  Description of Artificial Sequence: Synthetic oligonucleotide
agagaaaccaaccccaaug

SEQ ID NO: 736300 - RNA, 19 nt, Artificial Sequence
  Description of Artificial Sequence: Synthetic oligonucleotide
gagacaugaacacacuugc

SEQ ID NO: 736301 - RNA, 19 nt, Artificial Sequence
  Description of Artificial Sequence: Synthetic oligonucleotide
acgaacucggcgcaggugc

SEQ ID NO: 736302 - RNA, 19 nt, Artificial Sequence
  Description of Artificial Sequence: Synthetic oligonucleotide
uuugugaugggagguaugg

SEQ ID NO: 736303 - RNA, 19 nt, Artificial Sequence
  Description of Artificial Sequence: Synthetic oligonucleotide
aucuggaccagccauacug

SEQ ID NO: 736304 - RNA, 19 nt, Artificial Sequence
  Description of Artificial Sequence: Synthetic oligonucleotide
aucccugcccuuuacauuc

SEQ ID NO: 736305 - RNA, 19 nt, Artificial Sequence
  Description of Artificial Sequence: Synthetic oligonucleotide
cauucuggagaugagagag

SEQ ID NO: 736306 - RNA, 19 nt, Artificial Sequence
  Description of Artificial Sequence: Synthetic oligonucleotide
agggcuaguaccuaggcca

SEQ ID NO: 736307 - RNA, 19 nt, Artificial Sequence
  Description of Artificial Sequence: Synthetic oligonucleotide
aggagugaaagauggcugg

SEQ ID NO: 736308 - RNA, 19 nt, Artificial Sequence
  Description of Artificial Sequence: Synthetic oligonucleotide
agcaacuaaaucugcacug

SEQ ID NO: 736309 - RNA, 19 nt, Artificial Sequence
  Description of Artificial Sequence: Synthetic oligonucleotide
uugucugaaagguuugagc

SEQ ID NO: 736310 - RNA, 19 nt, Artificial Sequence
  Description of Artificial Sequence: Synthetic oligonucleotide
uguagugaugaugucuggg

SEQ ID NO: 736311 - RNA, 19 nt, Artificial Sequence
  Description of Artificial Sequence: Synthetic oligonucleotide
ugaacacacuugcucaugc

SEQ ID NO: 736312 - RNA, 19 nt, Artificial Sequence
  Description of Artificial Sequence: Synthetic oligonucleotide
uacuaagcaggcuuuggcc

SEQ ID NO: 736313 - RNA, 19 nt, Artificial Sequence
  Description of Artificial Sequence: Synthetic oligonucleotide
uauaguguagucagucacu

SEQ ID NO: 736314 - RNA, 19 nt, Artificial Sequence
  Description of Artificial Sequence: Synthetic oligonucleotide
caaggcacauacaacuucc

SEQ ID NO: 736315 - RNA, 19 nt, Artificial Sequence
  Description of Artificial Sequence: Synthetic oligonucleotide
cucuacacgaacucggcgc

SEQ ID NO: 736316 - RNA, 19 nt, Artificial Sequence
  Description of Artificial Sequence: Synthetic oligonucleotide
cuaagggguacccuggacc

SEQ ID NO: 736317 - RNA, 19 nt, Artificial Sequence
  Description of Artificial Sequence: Synthetic oligonucleotide
aaggguagggagucacaac

SEQ ID NO: 736318 - RNA, 19 nt, Artificial Sequence
  Description of Artificial Sequence: Synthetic oligonucleotide
aagaacguuuccaagggca

SEQ ID NO: 736319 - RNA, 19 nt, Artificial Sequence
  Description of Artificial Sequence: Synthetic oligonucleotide
uaguaccuaggccaggcag

SEQ ID NO: 736320 - RNA, 19 nt, Artificial Sequence
  Description of Artificial Sequence: Synthetic oligonucleotide
guauaguguagucagucac

SEQ ID NO: 736321 - RNA, 19 nt, Artificial Sequence
  Description of Artificial Sequence: Synthetic oligonucleotide
ucucuacacgaacucggcg

SEQ ID NO: 736322 - RNA, 19 nt, Artificial Sequence
  Description of Artificial Sequence: Synthetic oligonucleotide
agaccugauucacaucugg

SEQ ID NO: 736323 - RNA, 19 nt, Artificial Sequence
  Description of Artificial Sequence: Synthetic oligonucleotide
uucuaaccagcacacagaa

SEQ ID NO: 736324 - RNA, 19 nt, Artificial Sequence
  Description of Artificial Sequence: Synthetic oligonucleotide
gugaaagccauagggaggg

SEQ ID NO: 736325 - RNA, 19 nt, Artificial Sequence
  Description of Artificial Sequence: Synthetic oligonucleotide
agugagaccuguguuuccc

SEQ ID NO: 736326 - RNA, 19 nt, Artificial Sequence
  Description of Artificial Sequence: Synthetic oligonucleotide
acuaugaugcagauggaag

SEQ ID NO: 736327 - RNA, 19 nt, Artificial Sequence
  Description of Artificial Sequence: Synthetic oligonucleotide
gaaggaauuacacaaggau

SEQ ID NO: 736328 - RNA, 19 nt, Artificial Sequence
  Description of Artificial Sequence: Synthetic oligonucleotide
aaccccaauguagugauga

SEQ ID NO: 736329 - RNA, 19 nt, Artificial Sequence
  Description of Artificial Sequence: Synthetic oligonucleotide
cauccaaccauacaaguga

SEQ ID NO: 736330 - RNA, 19 nt, Artificial Sequence
  Description of Artificial Sequence: Synthetic oligonucleotide
cacaggauagccaggucgg

SEQ ID NO: 736331 - RNA, 19 nt, Artificial Sequence
  Description of Artificial Sequence: Synthetic oligonucleotide
ggcacuaaaggaauggagg

SEQ ID NO: 736332 - RNA, 19 nt, Artificial Sequence
  Description of Artificial Sequence: Synthetic oligonucleotide
auacaacuuccuaacacgg

SEQ ID NO: 736333 - RNA, 19 nt, Artificial Sequence
  Description of Artificial Sequence: Synthetic oligonucleotide
uacaucgucugcugcaacc

SEQ ID NO: 736334 - RNA, 19 nt, Artificial Sequence
  Description of Artificial Sequence: Synthetic oligonucleotide
ucucguucuaacugcaggu

SEQ ID NO: 736335 - RNA, 19 nt, Artificial Sequence
  Description of Artificial Sequence: Synthetic oligonucleotide
uaagggguacccuggacca

SEQ ID NO: 736336 - RNA, 19 nt, Artificial Sequence
  Description of Artificial Sequence: Synthetic oligonucleotide
aaaccaaccccaauguagu

SEQ ID NO: 736337 - RNA, 19 nt, Artificial Sequence
  Description of Artificial Sequence: Synthetic oligonucleotide
cacugauucagaugucagg

SEQ ID NO: 736338 - RNA, 19 nt, Artificial Sequence
  Description of Artificial Sequence: Synthetic oligonucleotide
cucucguucuaacugcagg

SEQ ID NO: 736339 - RNA, 19 nt, Artificial Sequence
  Description of Artificial Sequence: Synthetic oligonucleotide
ucuacacgaacucggcgca

SEQ ID NO: 736340 - RNA, 19 nt, Artificial Sequence
  Description of Artificial Sequence: Synthetic oligonucleotide
agagacaugaacacacuug

SEQ ID NO: 736341 - RNA, 19 nt, Artificial Sequence
  Description of Artificial Sequence: Synthetic oligonucleotide
agugucaaccucaaaucuc

SEQ ID NO: 736342 - RNA, 19 nt, Artificial Sequence
  Description of Artificial Sequence: Synthetic oligonucleotide
uuauuacuaagcaggcuuu

SEQ ID NO: 736343 - RNA, 19 nt, Artificial Sequence
  Description of Artificial Sequence: Synthetic oligonucleotide
caaggcacuaaaggaaugg

SEQ ID NO: 736344 - RNA, 19 nt, Artificial Sequence
  Description of Artificial Sequence: Synthetic oligonucleotide
acaacagagggcuguggag

SEQ ID NO: 736345 - RNA, 19 nt, Artificial Sequence
  Description of Artificial Sequence: Synthetic oligonucleotide
ccugguauuugucugaaag

SEQ ID NO: 736346 - RNA, 19 nt, Artificial Sequence
  Description of Artificial Sequence: Synthetic oligonucleotide
agaccuguguuucccuugg

SEQ ID NO: 736347 - RNA, 19 nt, Artificial Sequence
  Description of Artificial Sequence: Synthetic oligonucleotide
agagaguguagagaaacca

SEQ ID NO: 736348 - RNA, 19 nt, Artificial Sequence
  Description of Artificial Sequence: Synthetic oligonucleotide
gacucuaagaacguuucca

SEQ ID NO: 736349 - RNA, 19 nt, Artificial Sequence
  Description of Artificial Sequence: Synthetic oligonucleotide
acaggccuacuguaggagg

SEQ ID NO: 736350 - RNA, 19 nt, Artificial Sequence
  Description of Artificial Sequence: Synthetic oligonucleotide
augucagggagcaagcuag

SEQ ID NO: 736351 - RNA, 19 nt, Artificial Sequence
  Description of Artificial Sequence: Synthetic oligonucleotide
caaccauacaagugagacc

SEQ ID NO: 736352 - RNA, 19 nt, Artificial Sequence
  Description of Artificial Sequence: Synthetic oligonucleotide
acuaaaggaauggagggau

SEQ ID NO: 736353 - RNA, 19 nt, Artificial Sequence
  Description of Artificial Sequence: Synthetic oligonucleotide
acuaagggguacccuggac

SEQ ID NO: 736354 - RNA, 19 nt, Artificial Sequence
  Description of Artificial Sequence: Synthetic oligonucleotide
gauacccgggagcaggagc

SEQ ID NO: 736355 - RNA, 19 nt, Artificial Sequence
  Description of Artificial Sequence: Synthetic oligonucleotide
ugcccuuuacauucuggag

SEQ ID NO: 736356 - RNA, 19 nt, Artificial Sequence
  Description of Artificial Sequence: Synthetic oligonucleotide
guuugagcggcugauuucc

SEQ ID NO: 736357 - RNA, 19 nt, Artificial Sequence
  Description of Artificial Sequence: Synthetic oligonucleotide
gggugaaagccauagggag

SEQ ID NO: 736358 - RNA, 19 nt, Artificial Sequence
  Description of Artificial Sequence: Synthetic oligonucleotide
guagggagucacaacagag

SEQ ID NO: 736359 - RNA, 19 nt, Artificial Sequence
  Description of Artificial Sequence: Synthetic oligonucleotide
caacagagggcuguggagg

SEQ ID NO: 736360 - RNA, 19 nt, Artificial Sequence
  Description of Artificial Sequence: Synthetic oligonucleotide
gauucagaugucagggagc

SEQ ID NO: 736361 - RNA, 19 nt, Artificial Sequence
  Description of Artificial Sequence: Synthetic oligonucleotide
aacguuuccaagggcaccu

SEQ ID NO: 736362 - RNA, 19 nt, Artificial Sequence
  Description of Artificial Sequence: Synthetic oligonucleotide
aaaaggacucuaagaacgu

SEQ ID NO: 736363 - RNA, 19 nt, Artificial Sequence
  Description of Artificial Sequence: Synthetic oligonucleotide
cuaacugcagguccugaac

SEQ ID NO: 736364 - RNA, 19 nt, Artificial Sequence
  Description of Artificial Sequence: Synthetic oligonucleotide
cugagguuguguuggguag

SEQ ID NO: 736365 - RNA, 19 nt, Artificial Sequence
  Description of Artificial Sequence: Synthetic oligonucleotide
ugucccaacucuguguccc

SEQ ID NO: 736366 - RNA, 19 nt, Artificial Sequence
  Description of Artificial Sequence: Synthetic oligonucleotide
caggagugaaagauggcug

SEQ ID NO: 736367 - RNA, 19 nt, Artificial Sequence
  Description of Artificial Sequence: Synthetic oligonucleotide
aaaggguagggagucacaa

SEQ ID NO: 736368 - RNA, 19 nt, Artificial Sequence
  Description of Artificial Sequence: Synthetic oligonucleotide
ugcacugauucagauguca

SEQ ID NO: 736369 - RNA, 19 nt, Artificial Sequence
  Description of Artificial Sequence: Synthetic oligonucleotide
auucaaggcacuaaaggaa

SEQ ID NO: 736370 - RNA, 19 nt, Artificial Sequence
  Description of Artificial Sequence: Synthetic oligonucleotide
gcaggaaggaauuacacaa

SEQ ID NO: 736371 - RNA, 19 nt, Artificial Sequence
  Description of Artificial Sequence: Synthetic oligonucleotide
ugguauaguguagucaguc

SEQ ID NO: 736372 - RNA, 19 nt, Artificial Sequence
  Description of Artificial Sequence: Synthetic oligonucleotide
aguaccuaggccaggcagg

SEQ ID NO: 736373 - RNA, 19 nt, Artificial Sequence
  Description of Artificial Sequence: Synthetic oligonucleotide
cacacuugcucaugcaaac

SEQ ID NO: 736374 - RNA, 19 nt, Artificial Sequence
  Description of Artificial Sequence: Synthetic oligonucleotide
ucugggagcaccguuugga

SEQ ID NO: 736375 - RNA, 19 nt, Artificial Sequence
  Description of Artificial Sequence: Synthetic oligonucleotide
agaacguuuccaagggcac

SEQ ID NO: 736376 - RNA, 19 nt, Artificial Sequence
  Description of Artificial Sequence: Synthetic oligonucleotide
aaggacccaugcugcacuc

SEQ ID NO: 736377 - RNA, 19 nt, Artificial Sequence
  Description of Artificial Sequence: Synthetic oligonucleotide
aggacucuaagaacguuuc

SEQ ID NO: 736378 - RNA, 19 nt, Artificial Sequence
  Description of Artificial Sequence: Synthetic oligonucleotide
ugcuaguuggggccacagg

SEQ ID NO: 736379 - RNA, 19 nt, Artificial Sequence
  Description of Artificial Sequence: Synthetic oligonucleotide
uggcuagugccaucucucg

SEQ ID NO: 736380 - RNA, 19 nt, Artificial Sequence
  Description of Artificial Sequence: Synthetic oligonucleotide
acaucuggaccagccauac

SEQ ID NO: 736381 - RNA, 19 nt, Artificial Sequence
  Description of Artificial Sequence: Synthetic oligonucleotide
ggagcugagguuguguugg

SEQ ID NO: 736382 - RNA, 19 nt, Artificial Sequence
  Description of Artificial Sequence: Synthetic oligonucleotide
ugagguuguguuggguagg

SEQ ID NO: 736383 - RNA, 19 nt, Artificial Sequence
  Description of Artificial Sequence: Synthetic oligonucleotide
acccaugcugcacucacug

SEQ ID NO: 736384 - RNA, 19 nt, Artificial Sequence
  Description of Artificial Sequence: Synthetic oligonucleotide
aacucggcgcaggugcagc

SEQ ID NO: 736385 - RNA, 19 nt, Artificial Sequence
  Description of Artificial Sequence: Synthetic oligonucleotide
cauacaagugagaccugug

SEQ ID NO: 736386 - RNA, 19 nt, Artificial Sequence
  Description of Artificial Sequence: Synthetic oligonucleotide
aacccgggcccuccacucc

SEQ ID NO: 736387 - RNA, 19 nt, Artificial Sequence
  Description of Artificial Sequence: Synthetic oligonucleotide
caaccucaaaucucagcag

SEQ ID NO: 736388 - RNA, 19 nt, Artificial Sequence
  Description of Artificial Sequence: Synthetic oligonucleotide
agaugagagaguguagaga

SEQ ID NO: 736389 - RNA, 19 nt, Artificial Sequence
  Description of Artificial Sequence: Synthetic oligonucleotide
uggguaagaaggacccaca

SEQ ID NO: 736390 - RNA, 19 nt, Artificial Sequence
  Description of Artificial Sequence: Synthetic oligonucleotide
aaggcacuaaaggaaugga

SEQ ID NO: 736391 - RNA, 19 nt, Artificial Sequence
  Description of Artificial Sequence: Synthetic oligonucleotide
ugucaaccucaaaucucag

SEQ ID NO: 736392 - RNA, 19 nt, Artificial Sequence
  Description of Artificial Sequence: Synthetic oligonucleotide
accaggcuaccucaggaug

SEQ ID NO: 736393 - RNA, 19 nt, Artificial Sequence
  Description of Artificial Sequence: Synthetic oligonucleotide
agaaggacccaugcugcac

SEQ ID NO: 736394 - RNA, 19 nt, Artificial Sequence
  Description of Artificial Sequence: Synthetic oligonucleotide
cuccccauagcagugcugc

SEQ ID NO: 736395 - RNA, 19 nt, Artificial Sequence
  Description of Artificial Sequence: Synthetic oligonucleotide
aaccccuuugguauagugu

SEQ ID NO: 736396 - RNA, 19 nt, Artificial Sequence
  Description of Artificial Sequence: Synthetic oligonucleotide
caccguuccacaagcuucc

SEQ ID NO: 736397 - RNA, 19 nt, Artificial Sequence
  Description of Artificial Sequence: Synthetic oligonucleotide
auacaucgucugcugcaac

SEQ ID NO: 736398 - RNA, 19 nt, Artificial Sequence
  Description of Artificial Sequence: Synthetic oligonucleotide
uacacgaacucggcgcagg

SEQ ID NO: 736399 - RNA, 19 nt, Artificial Sequence
  Description of Artificial Sequence: Synthetic oligonucleotide
gaaagguuugagcggcuga

SEQ ID NO: 736400 - RNA, 19 nt, Artificial Sequence
  Description of Artificial Sequence: Synthetic oligonucleotide
agcuaggcuucccacuaag

SEQ ID NO: 736401 - RNA, 19 nt, Artificial Sequence
  Description of Artificial Sequence: Synthetic oligonucleotide
gaggaaaauuucuccagcu

SEQ ID NO: 736402 - RNA, 19 nt, Artificial Sequence
  Description of Artificial Sequence: Synthetic oligonucleotide
ccacaggauagccaggucg

SEQ ID NO: 736403 - RNA, 19 nt, Artificial Sequence
  Description of Artificial Sequence: Synthetic oligonucleotide
aggaaaauuucuccagcuu

SEQ ID NO: 736404 - RNA, 19 nt, Artificial Sequence
  Description of Artificial Sequence: Synthetic oligonucleotide
ucuaaccagcacacagaac

SEQ ID NO: 736405 - RNA, 19 nt, Artificial Sequence
  Description of Artificial Sequence: Synthetic oligonucleotide
gauagaggggccgcuaaca

SEQ ID NO: 736406 - RNA, 19 nt, Artificial Sequence
  Description of Artificial Sequence: Synthetic oligonucleotide
uccgguugguggcuagugc

SEQ ID NO: 736407 - RNA, 19 nt, Artificial Sequence
  Description of Artificial Sequence: Synthetic oligonucleotide
agggagguuugcuuuguga

SEQ ID NO: 736408 - RNA, 19 nt, Artificial Sequence
  Description of Artificial Sequence: Synthetic oligonucleotide
auagggagggguuggccca

SEQ ID NO: 736409 - RNA, 19 nt, Artificial Sequence
  Description of Artificial Sequence: Synthetic oligonucleotide
ggaugugcugagcuggucc

SEQ ID NO: 736410 - RNA, 19 nt, Artificial Sequence
  Description of Artificial Sequence: Synthetic oligonucleotide
gucuggggccuuuuagggg

SEQ ID NO: 736411 - RNA, 19 nt, Artificial Sequence
  Description of Artificial Sequence: Synthetic oligonucleotide
ugauucacaucuggaccag

SEQ ID NO: 736412 - RNA, 19 nt, Artificial Sequence
  Description of Artificial Sequence: Synthetic oligonucleotide
gcuaguuggggccacagga

SEQ ID NO: 736413 - RNA, 19 nt, Artificial Sequence
  Description of Artificial Sequence: Synthetic oligonucleotide
ccaaccauacaagugagac

SEQ ID NO: 736414 - RNA, 19 nt, Artificial Sequence
  Description of Artificial Sequence: Synthetic oligonucleotide
uagagaaaccaaccccaau

SEQ ID NO: 736415 - RNA, 19 nt, Artificial Sequence
  Description of Artificial Sequence: Synthetic oligonucleotide
acuguaggaggaaggcugg

SEQ ID NO: 736416 - RNA, 19 nt, Artificial Sequence
  Description of Artificial Sequence: Synthetic oligonucleotide
cuaaaucugcacugauuca

SEQ ID NO: 736417 - RNA, 19 nt, Artificial Sequence
  Description of Artificial Sequence: Synthetic oligonucleotide
aggcacuaaaggaauggag

SEQ ID NO: 736418 - RNA, 19 nt, Artificial Sequence
  Description of Artificial Sequence: Synthetic oligonucleotide
augaaauucaaggcacuaa

SEQ ID NO: 736419 - RNA, 19 nt, Artificial Sequence
  Description of Artificial Sequence: Synthetic oligonucleotide
uuuggccccagugcugggg

SEQ ID NO: 736420 - RNA, 19 nt, Artificial Sequence
  Description of Artificial Sequence: Synthetic oligonucleotide
ugggagcaccguuuggaug

SEQ ID NO: 736421 - RNA, 19 nt, Artificial Sequence
  Description of Artificial Sequence: Synthetic oligonucleotide
agcgcugaggaaaauuucu

SEQ ID NO: 736422 - RNA, 19 nt, Artificial Sequence
  Description of Artificial Sequence: Synthetic oligonucleotide
ugcugcaaccccuuuggua

SEQ ID NO: 736423 - RNA, 19 nt, Artificial Sequence
  Description of Artificial Sequence: Synthetic oligonucleotide
cacaaggauagaggggccg

SEQ ID NO: 736424 - RNA, 19 nt, Artificial Sequence
  Description of Artificial Sequence: Synthetic oligonucleotide
aacgcggggccgccucacc

SEQ ID NO: 736425 - RNA, 19 nt, Artificial Sequence
  Description of Artificial Sequence: Synthetic oligonucleotide
gaacguuuccaagggcacc

SEQ ID NO: 736426 - RNA, 19 nt, Artificial Sequence
  Description of Artificial Sequence: Synthetic oligonucleotide
uguuucccuuggcauuccc

SEQ ID NO: 736427 - RNA, 19 nt, Artificial Sequence
  Description of Artificial Sequence: Synthetic oligonucleotide
auagaggggccgcuaacaa

SEQ ID NO: 736428 - RNA, 19 nt, Artificial Sequence
  Description of Artificial Sequence: Synthetic oligonucleotide
agaggggccgcuaacaaau

SEQ ID NO: 736429 - RNA, 19 nt, Artificial Sequence
  Description of Artificial Sequence: Synthetic oligonucleotide
gagaguguagagaaaccaa

SEQ ID NO: 736430 - RNA, 19 nt, Artificial Sequence
  Description of Artificial Sequence: Synthetic oligonucleotide
ucacaacagagggcugugg

SEQ ID NO: 736431 - RNA, 19 nt, Artificial Sequence
  Description of Artificial Sequence: Synthetic oligonucleotide
cagggcuaguaccuaggcc

SEQ ID NO: 736432 - RNA, 19 nt, Artificial Sequence
  Description of Artificial Sequence: Synthetic oligonucleotide
uggcuuccgggucauucug

SEQ ID NO: 736433 - RNA, 19 nt, Artificial Sequence
  Description of Artificial Sequence: Synthetic oligonucleotide
auuugucugaaagguuuga

SEQ ID NO: 736434 - RNA, 19 nt, Artificial Sequence
  Description of Artificial Sequence: Synthetic oligonucleotide
guacccuggaccagaagug

SEQ ID NO: 736435 - RNA, 19 nt, Artificial Sequence
  Description of Artificial Sequence: Synthetic oligonucleotide
uggggaugggcuguagggc

SEQ ID NO: 736436 - RNA, 19 nt, Artificial Sequence
  Description of Artificial Sequence: Synthetic oligonucleotide
gaacacacuugcucaugca

SEQ ID NO: 736437 - RNA, 19 nt, Artificial Sequence
  Description of Artificial Sequence: Synthetic oligonucleotide
aguuggggccacaggauag

SEQ ID NO: 736438 - RNA, 19 nt, Artificial Sequence
  Description of Artificial Sequence: Synthetic oligonucleotide
gguauaguguagucaguca

SEQ ID NO: 736439 - RNA, 19 nt, Artificial Sequence
  Description of Artificial Sequence: Synthetic oligonucleotide
aaaggacucuaagaacguu

SEQ ID NO: 736440 - RNA, 19 nt, Artificial Sequence
  Description of Artificial Sequence: Synthetic oligonucleotide
aaaacgcggggccgccuca

SEQ ID NO: 736441 - RNA, 19 nt, Artificial Sequence
  Description of Artificial Sequence: Synthetic oligonucleotide
agagacuaugaugcagaug

SEQ ID NO: 736442 - RNA, 19 nt, Artificial Sequence
  Description of Artificial Sequence: Synthetic oligonucleotide
ggagcuucucuacacgaac

SEQ ID NO: 736443 - RNA, 19 nt, Artificial Sequence
  Description of Artificial Sequence: Synthetic oligonucleotide
gccuucgaucugcagaagg

SEQ ID NO: 736444 - RNA, 19 nt, Artificial Sequence
  Description of Artificial Sequence: Synthetic oligonucleotide
gcccuuuacauucuggaga

SEQ ID NO: 736445 - RNA, 19 nt, Artificial Sequence
  Description of Artificial Sequence: Synthetic oligonucleotide
ggguaagaaggacccacag

SEQ ID NO: 736446 - RNA, 19 nt, Artificial Sequence
  Description of Artificial Sequence: Synthetic oligonucleotide
agcggcugauuuccagggg

SEQ ID NO: 736447 - RNA, 19 nt, Artificial Sequence
  Description of Artificial Sequence: Synthetic oligonucleotide
ugcaaccccuuugguauag

SEQ ID NO: 736448 - RNA, 19 nt, Artificial Sequence
  Description of Artificial Sequence: Synthetic oligonucleotide
caggauagccaggucgggg

SEQ ID NO: 736449 - RNA, 19 nt, Artificial Sequence
  Description of Artificial Sequence: Synthetic oligonucleotide
cuagcugugcagagacaug

SEQ ID NO: 736450 - RNA, 19 nt, Artificial Sequence
  Description of Artificial Sequence: Synthetic oligonucleotide
accaaccccaauguaguga

SEQ ID NO: 736451 - RNA, 19 nt, Artificial Sequence
  Description of Artificial Sequence: Synthetic oligonucleotide
gcugcacucacugucuggg

SEQ ID NO: 736452 - RNA, 19 nt, Artificial Sequence
  Description of Artificial Sequence: Synthetic oligonucleotide
agagugaccccuaggacau

SEQ ID NO: 736453 - RNA, 19 nt, Artificial Sequence
  Description of Artificial Sequence: Synthetic oligonucleotide
ugaccccuaggacauccaa

SEQ ID NO: 736454 - RNA, 19 nt, Artificial Sequence
  Description of Artificial Sequence: Synthetic oligonucleotide
gauacaucgucugcugcaa

SEQ ID NO: 736455 - RNA, 19 nt, Artificial Sequence
  Description of Artificial Sequence: Synthetic oligonucleotide
aagugcuaguuggggccac

SEQ ID NO: 736456 - RNA, 19 nt, Artificial Sequence
  Description of Artificial Sequence: Synthetic oligonucleotide
agcaagcuagcugugcaga

SEQ ID NO: 736457 - RNA, 19 nt, Artificial Sequence
  Description of Artificial Sequence: Synthetic oligonucleotide
gcuucucuacacgaacucg

SEQ ID NO: 736458 - RNA, 19 nt, Artificial Sequence
  Description of Artificial Sequence: Synthetic oligonucleotide
cuggagaugagagagugua

SEQ ID NO: 736459 - RNA, 19 nt, Artificial Sequence
  Description of Artificial Sequence: Synthetic oligonucleotide
ccgcuaacaaaugaaauuc

SEQ ID NO: 736460 - RNA, 19 nt, Artificial Sequence
  Description of Artificial Sequence: Synthetic oligonucleotide
uagaggggccgcuaacaaa

SEQ ID NO: 736461 - RNA, 19 nt, Artificial Sequence
  Description of Artificial Sequence: Synthetic oligonucleotide
gguacccuggaccagaagu

SEQ ID NO: 736462 - RNA, 19 nt, Artificial Sequence
  Description of Artificial Sequence: Synthetic oligonucleotide
ggcaggaaggaauuacaca

SEQ ID NO: 736463 - RNA, 19 nt, Artificial Sequence
  Description of Artificial Sequence: Synthetic oligonucleotide
augaacacacuugcucaug

SEQ ID NO: 736464 - RNA, 19 nt, Artificial Sequence
  Description of Artificial Sequence: Synthetic oligonucleotide
aggacccacaggccuacug

SEQ ID NO: 736465 - RNA, 19 nt, Artificial Sequence
  Description of Artificial Sequence: Synthetic oligonucleotide
gacgagguggaggagcauc

SEQ ID NO: 736466 - RNA, 19 nt, Artificial Sequence
  Description of Artificial Sequence: Synthetic oligonucleotide
gguagggagguuugcuuug

SEQ ID NO: 736467 - RNA, 19 nt, Artificial Sequence
  Description of Artificial Sequence: Synthetic oligonucleotide
ugucccaacucugcaggga

SEQ ID NO: 736468 - RNA, 19 nt, Artificial Sequence
  Description of Artificial Sequence: Synthetic oligonucleotide
caucgucugcugcaacccc

SEQ ID NO: 736469 - RNA, 19 nt, Artificial Sequence
  Description of Artificial Sequence: Synthetic oligonucleotide
uguccucauggaggaaaag

SEQ ID NO: 736470 - RNA, 19 nt, Artificial Sequence
  Description of Artificial Sequence: Synthetic oligonucleotide
cuggagcuucucuacacga

SEQ ID NO: 736471 - RNA, 19 nt, Artificial Sequence
  Description of Artificial Sequence: Synthetic oligonucleotide
guggacgagguggaggagc

SEQ ID NO: 736472 - RNA, 19 nt, Artificial Sequence
  Description of Artificial Sequence: Synthetic oligonucleotide
gagugaaagauggcuggga

SEQ ID NO: 736473 - RNA, 19 nt, Artificial Sequence
  Description of Artificial Sequence: Synthetic oligonucleotide
aaacgcggggccgccucac

SEQ ID NO: 736474 - RNA, 19 nt, Artificial Sequence
  Description of Artificial Sequence: Synthetic oligonucleotide
aaggcacauacaacuuccu

SEQ ID NO: 736475 - RNA, 19 nt, Artificial Sequence
  Description of Artificial Sequence: Synthetic oligonucleotide
auacccgggagcaggagcu

SEQ ID NO: 736476 - RNA, 19 nt, Artificial Sequence
  Description of Artificial Sequence: Synthetic oligonucleotide
cugauucagaugucaggga

SEQ ID NO: 736477 - RNA, 19 nt, Artificial Sequence
  Description of Artificial Sequence: Synthetic oligonucleotide
ggagucacaacagagggcu

SEQ ID NO: 736478 - RNA, 19 nt, Artificial Sequence
  Description of Artificial Sequence: Synthetic oligonucleotide
caauguagugaugaugucu

SEQ ID NO: 736479 - RNA, 19 nt, Artificial Sequence
  Description of Artificial Sequence: Synthetic oligonucleotide
aggggccgcuaacaaauga

SEQ ID NO: 736480 - RNA, 19 nt, Artificial Sequence
  Description of Artificial Sequence: Synthetic oligonucleotide
aggauagaggggccgcuaa

SEQ ID NO: 736481 - RNA, 19 nt, Artificial Sequence
  Description of Artificial Sequence: Synthetic oligonucleotide
cugcacucacugucugggg

SEQ ID NO: 736482 - RNA, 19 nt, Artificial Sequence
  Description of Artificial Sequence: Synthetic oligonucleotide
acaggauagccaggucggg

SEQ ID NO: 736483 - RNA, 19 nt, Artificial Sequence
  Description of Artificial Sequence: Synthetic oligonucleotide
ggagcaagcuagcugugca

SEQ ID NO: 736484 - RNA, 19 nt, Artificial Sequence
  Description of Artificial Sequence: Synthetic oligonucleotide
cucguucuaacugcagguc

SEQ ID NO: 736485 - RNA, 19 nt, Artificial Sequence
  Description of Artificial Sequence: Synthetic oligonucleotide
cugugguucuaaccagcac

SEQ ID NO: 736486 - RNA, 19 nt, Artificial Sequence
  Description of Artificial Sequence: Synthetic oligonucleotide
gaccccuaggacauccaac

SEQ ID NO: 736487 - RNA, 19 nt, Artificial Sequence
  Description of Artificial Sequence: Synthetic oligonucleotide
acacacuugcucaugcaaa

SEQ ID NO: 736488 - RNA, 19 nt, Artificial Sequence
  Description of Artificial Sequence: Synthetic oligonucleotide
caacucugcagggagcauc

SEQ ID NO: 736489 - RNA, 19 nt, Artificial Sequence
  Description of Artificial Sequence: Synthetic oligonucleotide
cagcgcugaggaaaauuuc

SEQ ID NO: 736490 - RNA, 19 nt, Artificial Sequence
  Description of Artificial Sequence: Synthetic oligonucleotide
gagaccugauucacaucug

SEQ ID NO: 736491 - RNA, 19 nt, Artificial Sequence
  Description of Artificial Sequence: Synthetic oligonucleotide
gggcguuggggauacccgg

SEQ ID NO: 736492 - RNA, 19 nt, Artificial Sequence
  Description of Artificial Sequence: Synthetic oligonucleotide
uaacccgggcccuccacuc

SEQ ID NO: 736493 - RNA, 19 nt, Artificial Sequence
  Description of Artificial Sequence: Synthetic oligonucleotide
caggccuacuguaggagga

SEQ ID NO: 736494 - RNA, 19 nt, Artificial Sequence
  Description of Artificial Sequence: Synthetic oligonucleotide
gcaagcuagcugugcagag

SEQ ID NO: 736495 - RNA, 19 nt, Artificial Sequence
  Description of Artificial Sequence: Synthetic oligonucleotide
gguagggagucacaacaga

SEQ ID NO: 736496 - RNA, 19 nt, Artificial Sequence
  Description of Artificial Sequence: Synthetic oligonucleotide
ggacucuaagaacguuucc

SEQ ID NO: 736497 - RNA, 19 nt, Artificial Sequence
  Description of Artificial Sequence: Synthetic oligonucleotide
augcagauggaaggaagaa

SEQ ID NO: 736498 - RNA, 19 nt, Artificial Sequence
  Description of Artificial Sequence: Synthetic oligonucleotide
ggugauggguaagaaggac

SEQ ID NO: 736499 - RNA, 19 nt, Artificial Sequence
  Description of Artificial Sequence: Synthetic oligonucleotide
gcuaguaccuaggccaggc

SEQ ID NO: 736500 - RNA, 19 nt, Artificial Sequence
  Description of Artificial Sequence: Synthetic oligonucleotide
ccgguugguggcuagugcc

SEQ ID NO: 736501 - RNA, 19 nt, Artificial Sequence
  Description of Artificial Sequence: Synthetic oligonucleotide
aagggguacccuggaccag

SEQ ID NO: 736502 - RNA, 19 nt, Artificial Sequence
  Description of Artificial Sequence: Synthetic oligonucleotide
gaagugcuaguuggggcca

SEQ ID NO: 736503 - RNA, 19 nt, Artificial Sequence
  Description of Artificial Sequence: Synthetic oligonucleotide
agcccauagcagcccuggg

SEQ ID NO: 736504 - RNA, 19 nt, Artificial Sequence
  Description of Artificial Sequence: Synthetic oligonucleotide
ccuaugugucccaacucug

SEQ ID NO: 736505 - RNA, 19 nt, Artificial Sequence
  Description of Artificial Sequence: Synthetic oligonucleotide
gcugcaaccccuuugguau

SEQ ID NO: 736506 - RNA, 19 nt, Artificial Sequence
  Description of Artificial Sequence: Synthetic oligonucleotide
gcugcacucacaaucccug

SEQ ID NO: 736507 - RNA, 19 nt, Artificial Sequence
  Description of Artificial Sequence: Synthetic oligonucleotide
uggcaaaacgcggggccgc

SEQ ID NO: 736508 - RNA, 19 nt, Artificial Sequence
  Description of Artificial Sequence: Synthetic oligonucleotide
uuccuaacacgggguagcu

SEQ ID NO: 736509 - RNA, 19 nt, Artificial Sequence
  Description of Artificial Sequence: Synthetic oligonucleotide
ggcacacuccucugugggg

SEQ ID NO: 736510 - RNA, 19 nt, Artificial Sequence
  Description of Artificial Sequence: Synthetic oligonucleotide
caaaacgcggggccgccuc

SEQ ID NO: 736511 - RNA, 19 nt, Artificial Sequence
  Description of Artificial Sequence: Synthetic oligonucleotide
gcucuggcaaaacgcgggg

SEQ ID NO: 736512 - RNA, 19 nt, Artificial Sequence
  Description of Artificial Sequence: Synthetic oligonucleotide
cagcucucuccccauagca

SEQ ID NO: 736513 - RNA, 19 nt, Artificial Sequence
  Description of Artificial Sequence: Synthetic oligonucleotide
gaaggacccacaggccuac

SEQ ID NO: 736514 - RNA, 19 nt, Artificial Sequence
  Description of Artificial Sequence: Synthetic oligonucleotide
gguuugagcggcugauuuc

SEQ ID NO: 736515 - RNA, 19 nt, Artificial Sequence
  Description of Artificial Sequence: Synthetic oligonucleotide
ugcagcgcugaggaaaauu

SEQ ID NO: 736516 - RNA, 19 nt, Artificial Sequence
  Description of Artificial Sequence: Synthetic oligonucleotide
ugacagggaccagggcuag

SEQ ID NO: 736517 - RNA, 19 nt, Artificial Sequence
  Description of Artificial Sequence: Synthetic oligonucleotide
gggagcaccguuuggaugu

SEQ ID NO: 736518 - RNA, 19 nt, Artificial Sequence
  Description of Artificial Sequence: Synthetic oligonucleotide
aggcuaccucaggaugugc

SEQ ID NO: 736519 - RNA, 19 nt, Artificial Sequence
  Description of Artificial Sequence: Synthetic oligonucleotide
acacgaacucggcgcaggu

SEQ ID NO: 736520 - RNA, 19 nt, Artificial Sequence
  Description of Artificial Sequence: Synthetic oligonucleotide
agccauacugauacaucgu

SEQ ID NO: 736521 - RNA, 19 nt, Artificial Sequence
  Description of Artificial Sequence: Synthetic oligonucleotide
cucuggcaaaacgcggggc

SEQ ID NO: 736522 - RNA, 19 nt, Artificial Sequence
  Description of Artificial Sequence: Synthetic oligonucleotide
aaggauagaggggccgcua

SEQ ID NO: 736523 - RNA, 19 nt, Artificial Sequence
  Description of Artificial Sequence: Synthetic oligonucleotide
cagugucaaccucaaaucu

SEQ ID NO: 736524 - RNA, 19 nt, Artificial Sequence
  Description of Artificial Sequence: Synthetic oligonucleotide
gaaccucaggagacuccag

SEQ ID NO: 736525 - RNA, 19 nt, Artificial Sequence
  Description of Artificial Sequence: Synthetic oligonucleotide
cguuuggauguucugugag

SEQ ID NO: 736526 - RNA, 19 nt, Artificial Sequence
  Description of Artificial Sequence: Synthetic oligonucleotide
gaaagccauagggaggggu

SEQ ID NO: 736527 - RNA, 19 nt, Artificial Sequence
  Description of Artificial Sequence: Synthetic oligonucleotide
cuaccucaggaugugcuga

SEQ ID NO: 736528 - RNA, 19 nt, Artificial Sequence
  Description of Artificial Sequence: Synthetic oligonucleotide
gagguaacccgggcccucc

SEQ ID NO: 736529 - RNA, 19 nt, Artificial Sequence
  Description of Artificial Sequence: Synthetic oligonucleotide
gcuuucuguuccuggcacc

SEQ ID NO: 736530 - RNA, 19 nt, Artificial Sequence
  Description of Artificial Sequence: Synthetic oligonucleotide
gcacugauucagaugucag

SEQ ID NO: 736531 - RNA, 19 nt, Artificial Sequence
  Description of Artificial Sequence: Synthetic oligonucleotide
guuaccugcagggacacuu

SEQ ID NO: 736532 - RNA, 19 nt, Artificial Sequence
  Description of Artificial Sequence: Synthetic oligonucleotide
acgagguggaggagcaucu

SEQ ID NO: 736533 - RNA, 19 nt, Artificial Sequence
  Description of Artificial Sequence: Synthetic oligonucleotide
gaacucggcgcaggugcag

SEQ ID NO: 736534 - RNA, 19 nt, Artificial Sequence
  Description of Artificial Sequence: Synthetic oligonucleotide
aucgucugcugcaaccccu

SEQ ID NO: 736535 - RNA, 19 nt, Artificial Sequence
  Description of Artificial Sequence: Synthetic oligonucleotide
gcuaggcuucccacuaagg

SEQ ID NO: 736536 - RNA, 19 nt, Artificial Sequence
  Description of Artificial Sequence: Synthetic oligonucleotide
gugucccaacucugugucc

SEQ ID NO: 736537 - RNA, 19 nt, Artificial Sequence
  Description of Artificial Sequence: Synthetic oligonucleotide
ucgucugcugcaaccccuu

SEQ ID NO: 736538 - RNA, 19 nt, Artificial Sequence
  Description of Artificial Sequence: Synthetic oligonucleotide
acccacaggccuacuguag

SEQ ID NO: 736539 - RNA, 19 nt, Artificial Sequence
  Description of Artificial Sequence: Synthetic oligonucleotide
cuguuaccugcagggacac

SEQ ID NO: 736540 - RNA, 19 nt, Artificial Sequence
  Description of Artificial Sequence: Synthetic oligonucleotide
cuuuggccccagugcuggg

SEQ ID NO: 736541 - RNA, 19 nt, Artificial Sequence
  Description of Artificial Sequence: Synthetic oligonucleotide
caagcuagcugugcagaga

SEQ ID NO: 736542 - RNA, 19 nt, Artificial Sequence
  Description of Artificial Sequence: Synthetic oligonucleotide
gaugucugggagcaccguu

SEQ ID NO: 736543 - RNA, 19 nt, Artificial Sequence
  Description of Artificial Sequence: Synthetic oligonucleotide
cacuugccugacauuggca

SEQ ID NO: 736544 - RNA, 19 nt, Artificial Sequence
  Description of Artificial Sequence: Synthetic oligonucleotide
ugcuuggggcgcugggcgu

SEQ ID NO: 736545 - RNA, 19 nt, Artificial Sequence
  Description of Artificial Sequence: Synthetic oligonucleotide
ggauagaggggccgcuaac

SEQ ID NO: 736546 - RNA, 19 nt, Artificial Sequence
  Description of Artificial Sequence: Synthetic oligonucleotide
gugcuaguuggggccacag

SEQ ID NO: 736547 - RNA, 19 nt, Artificial Sequence
  Description of Artificial Sequence: Synthetic oligonucleotide
caggcuaccucaggaugug

SEQ ID NO: 736548 - RNA, 19 nt, Artificial Sequence
  Description of Artificial Sequence: Synthetic oligonucleotide
caaucccugcccuuuacau

SEQ ID NO: 736549 - RNA, 19 nt, Artificial Sequence
  Description of Artificial Sequence: Synthetic oligonucleotide
uccccauagcagugcugcu

SEQ ID NO: 736550 - RNA, 19 nt, Artificial Sequence
  Description of Artificial Sequence: Synthetic oligonucleotide
ucccacuaagggguacccu

SEQ ID NO: 736551 - RNA, 19 nt, Artificial Sequence
  Description of Artificial Sequence: Synthetic oligonucleotide
cuaguaccuaggccaggca

SEQ ID NO: 736552 - RNA, 19 nt, Artificial Sequence
  Description of Artificial Sequence: Synthetic oligonucleotide
gcggcugauuuccagggga

SEQ ID NO: 736553 - RNA, 19 nt, Artificial Sequence
  Description of Artificial Sequence: Synthetic oligonucleotide
augucugggagcaccguuu

SEQ ID NO: 736554 - RNA, 19 nt, Artificial Sequence
  Description of Artificial Sequence: Synthetic oligonucleotide
gggagguuugcuuugugau

SEQ ID NO: 736555 - RNA, 19 nt, Artificial Sequence
  Description of Artificial Sequence: Synthetic oligonucleotide
gccuaugugucccaacucu

SEQ ID NO: 736556 - RNA, 19 nt, Artificial Sequence
  Description of Artificial Sequence: Synthetic oligonucleotide
ccuggcaccguuccacaag

SEQ ID NO: 736557 - RNA, 19 nt, Artificial Sequence
  Description of Artificial Sequence: Synthetic oligonucleotide
gagucacaacagagggcug

SEQ ID NO: 736558 - RNA, 19 nt, Artificial Sequence
  Description of Artificial Sequence: Synthetic oligonucleotide
uccuaacacgggguagcuc

SEQ ID NO: 736559 - RNA, 19 nt, Artificial Sequence
  Description of Artificial Sequence: Synthetic oligonucleotide
gugacagggaccagggcua

SEQ ID NO: 736560 - RNA, 19 nt, Artificial Sequence
  Description of Artificial Sequence: Synthetic oligonucleotide
cuacacgaacucggcgcag

SEQ ID NO: 736561 - RNA, 19 nt, Artificial Sequence
  Description of Artificial Sequence: Synthetic oligonucleotide
gccgcuaacaaaugaaauu

SEQ ID NO: 736562 - RNA, 19 nt, Artificial Sequence
  Description of Artificial Sequence: Synthetic oligonucleotide
ccagggcuaguaccuaggc

SEQ ID NO: 736563 - RNA, 19 nt, Artificial Sequence
  Description of Artificial Sequence: Synthetic oligonucleotide
ugccuucgaucugcagaag

SEQ ID NO: 736564 - RNA, 19 nt, Artificial Sequence
  Description of Artificial Sequence: Synthetic oligonucleotide
uggggcgcugggcguggag

SEQ ID NO: 736565 - RNA, 19 nt, Artificial Sequence
  Description of Artificial Sequence: Synthetic oligonucleotide
gaggggccgcuaacaaaug

SEQ ID NO: 736566 - RNA, 19 nt, Artificial Sequence
  Description of Artificial Sequence: Synthetic oligonucleotide
ccuaggacauccaaccaua

SEQ ID NO: 736567 - RNA, 19 nt, Artificial Sequence
  Description of Artificial Sequence: Synthetic oligonucleotide
agacuaugaugcagaugga

SEQ ID NO: 736568 - RNA, 19 nt, Artificial Sequence
  Description of Artificial Sequence: Synthetic oligonucleotide
cacuaagggguacccugga

SEQ ID NO: 736569 - RNA, 19 nt, Artificial Sequence
  Description of Artificial Sequence: Synthetic oligonucleotide
cacgaacucggcgcaggug

SEQ ID NO: 736570 - RNA, 19 nt, Artificial Sequence
  Description of Artificial Sequence: Synthetic oligonucleotide
acccgggagcaggagcuag

SEQ ID NO: 736571 - RNA, 19 nt, Artificial Sequence
  Description of Artificial Sequence: Synthetic oligonucleotide
acgcggggccgccucacca

SEQ ID NO: 736572 - RNA, 19 nt, Artificial Sequence
  Description of Artificial Sequence: Synthetic oligonucleotide
guagcccauagcagcccug

SEQ ID NO: 736573 - RNA, 19 nt, Artificial Sequence
  Description of Artificial Sequence: Synthetic oligonucleotide
agugcuaguuggggccaca

SEQ ID NO: 736574 - RNA, 19 nt, Artificial Sequence
  Description of Artificial Sequence: Synthetic oligonucleotide
gggagcaagcuagcugugc

SEQ ID NO: 736575 - RNA, 19 nt, Artificial Sequence
  Description of Artificial Sequence: Synthetic oligonucleotide
caccagaggcuggguaccc

SEQ ID NO: 736576 - RNA, 19 nt, Artificial Sequence
  Description of Artificial Sequence: Synthetic oligonucleotide
ucgggguggcacacuccuc

SEQ ID NO: 736577 - RNA, 19 nt, Artificial Sequence
  Description of Artificial Sequence: Synthetic oligonucleotide
uguuaccugcagggacacu

SEQ ID NO: 736578 - RNA, 19 nt, Artificial Sequence
  Description of Artificial Sequence: Synthetic oligonucleotide
ugguggcuagugccaucuc

SEQ ID NO: 736579 - RNA, 19 nt, Artificial Sequence
  Description of Artificial Sequence: Synthetic oligonucleotide
cucggcgcaggugcagcag

SEQ ID NO: 736580 - RNA, 19 nt, Artificial Sequence
  Description of Artificial Sequence: Synthetic oligonucleotide
gggcuaguaccuaggccag

SEQ ID NO: 736581 - RNA, 19 nt, Artificial Sequence
  Description of Artificial Sequence: Synthetic oligonucleotide
ggccaccacagggaagggg

SEQ ID NO: 736582 - RNA, 19 nt, Artificial Sequence
  Description of Artificial Sequence: Synthetic oligonucleotide
accauacaagugagaccug

SEQ ID NO: 736583 - RNA, 19 nt, Artificial Sequence
  Description of Artificial Sequence: Synthetic oligonucleotide
gggccuaugugucccaacu

SEQ ID NO: 736584 - RNA, 19 nt, Artificial Sequence
  Description of Artificial Sequence: Synthetic oligonucleotide
gguacccaggcaggggaug

SEQ ID NO: 736585 - RNA, 19 nt, Artificial Sequence
  Description of Artificial Sequence: Synthetic oligonucleotide
ggacccacaggccuacugu

SEQ ID NO: 736586 - RNA, 19 nt, Artificial Sequence
  Description of Artificial Sequence: Synthetic oligonucleotide
caccucacccuccaggaau

SEQ ID NO: 736587 - RNA, 19 nt, Artificial Sequence
  Description of Artificial Sequence: Synthetic oligonucleotide
ccugagaccugauucacau

SEQ ID NO: 736588 - RNA, 19 nt, Artificial Sequence
  Description of Artificial Sequence: Synthetic oligonucleotide
guguuucccuuggcauucc

SEQ ID NO: 736589 - RNA, 19 nt, Artificial Sequence
  Description of Artificial Sequence: Synthetic oligonucleotide
ggcuaguaccuaggccagg

SEQ ID NO: 736590 - RNA, 19 nt, Artificial Sequence
  Description of Artificial Sequence: Synthetic oligonucleotide
aggacccaugcugcacuca

SEQ ID NO: 736591 - RNA, 19 nt, Artificial Sequence
  Description of Artificial Sequence: Synthetic oligonucleotide
ccauacugauacaucgucu

SEQ ID NO: 736592 - RNA, 19 nt, Artificial Sequence
  Description of Artificial Sequence: Synthetic oligonucleotide
gcugagcuggucccuggca

SEQ ID NO: 736593 - RNA, 19 nt, Artificial Sequence
  Description of Artificial Sequence: Synthetic oligonucleotide
cacucacaaucccugcccu

SEQ ID NO: 736594 - RNA, 19 nt, Artificial Sequence
  Description of Artificial Sequence: Synthetic oligonucleotide
gcgcugaggaaaauuucuc

SEQ ID NO: 736595 - RNA, 19 nt, Artificial Sequence
  Description of Artificial Sequence: Synthetic oligonucleotide
ggggccgcuaacaaaugaa

SEQ ID NO: 736596 - RNA, 19 nt, Artificial Sequence
  Description of Artificial Sequence: Synthetic oligonucleotide
ccauagggagggguuggcc

SEQ ID NO: 736597 - RNA, 19 nt, Artificial Sequence
  Description of Artificial Sequence: Synthetic oligonucleotide
ggucuguuaccugcaggga

SEQ ID NO: 736598 - RNA, 19 nt, Artificial Sequence
  Description of Artificial Sequence: Synthetic oligonucleotide
ccguuccacaagcuuccgc

SEQ ID NO: 736599 - RNA, 19 nt, Artificial Sequence
  Description of Artificial Sequence: Synthetic oligonucleotide
cagagacuaugaugcagau

SEQ ID NO: 736600 - RNA, 19 nt, Artificial Sequence
  Description of Artificial Sequence: Synthetic oligonucleotide
ccaccaggcuaccucagga

SEQ ID NO: 736601 - RNA, 19 nt, Artificial Sequence
  Description of Artificial Sequence: Synthetic oligonucleotide
gccaucucucguucuaacu

SEQ ID NO: 736602 - RNA, 19 nt, Artificial Sequence
  Description of Artificial Sequence: Synthetic oligonucleotide
cauagcagcccugggugcu

SEQ ID NO: 736603 - RNA, 19 nt, Artificial Sequence
  Description of Artificial Sequence: Synthetic oligonucleotide
ggauacccgggagcaggag

SEQ ID NO: 736604 - RNA, 19 nt, Artificial Sequence
  Description of Artificial Sequence: Synthetic oligonucleotide
gggccgcuaacaaaugaaa

SEQ ID NO: 736605 - RNA, 19 nt, Artificial Sequence
  Description of Artificial Sequence: Synthetic oligonucleotide
ggguacccuggaccagaag

SEQ ID NO: 736606 - RNA, 19 nt, Artificial Sequence
  Description of Artificial Sequence: Synthetic oligonucleotide
cucacaaucccugcccuuu

SEQ ID NO: 736607 - RNA, 19 nt, Artificial Sequence
  Description of Artificial Sequence: Synthetic oligonucleotide
gccugacauuggcacagca

SEQ ID NO: 736608 - RNA, 19 nt, Artificial Sequence
  Description of Artificial Sequence: Synthetic oligonucleotide
ggggccuaugugucccaac

SEQ ID NO: 736609 - RNA, 19 nt, Artificial Sequence
  Description of Artificial Sequence: Synthetic oligonucleotide
ucccuggcagaaggagcuc

SEQ ID NO: 736610 - RNA, 19 nt, Artificial Sequence
  Description of Artificial Sequence: Synthetic oligonucleotide
ggcuccgguugguggcuag

SEQ ID NO: 736611 - RNA, 19 nt, Artificial Sequence
  Description of Artificial Sequence: Synthetic oligonucleotide
ggguagggagguuugcuuu

SEQ ID NO: 736612 - RNA, 19 nt, Artificial Sequence
  Description of Artificial Sequence: Synthetic oligonucleotide
cugggagcaccguuuggau

SEQ ID NO: 736613 - RNA, 19 nt, Artificial Sequence
  Description of Artificial Sequence: Synthetic oligonucleotide
caucagccccacuuccagu

SEQ ID NO: 736614 - RNA, 19 nt, Artificial Sequence
  Description of Artificial Sequence: Synthetic oligonucleotide
ccaaccccaauguagugau

SEQ ID NO: 736615 - RNA, 19 nt, Artificial Sequence
  Description of Artificial Sequence: Synthetic oligonucleotide
guguuggguagggagguuu

SEQ ID NO: 736616 - RNA, 19 nt, Artificial Sequence
  Description of Artificial Sequence: Synthetic oligonucleotide
gcagcgcugaggaaaauuu

SEQ ID NO: 736617 - RNA, 19 nt, Artificial Sequence
  Description of Artificial Sequence: Synthetic oligonucleotide
ggcuagugccaucucucgu

SEQ ID NO: 736618 - RNA, 19 nt, Artificial Sequence
  Description of Artificial Sequence: Synthetic oligonucleotide
gccauagggagggguuggc

SEQ ID NO: 736619 - RNA, 19 nt, Artificial Sequence
  Description of Artificial Sequence: Synthetic oligonucleotide
cugcaaccccuuugguaua

SEQ ID NO: 736620 - RNA, 19 nt, Artificial Sequence
  Description of Artificial Sequence: Synthetic oligonucleotide
ccaacucugugucccaacu

SEQ ID NO: 736621 - RNA, 19 nt, Artificial Sequence
  Description of Artificial Sequence: Synthetic oligonucleotide
caaggauagaggggccgcu

SEQ ID NO: 736622 - RNA, 19 nt, Artificial Sequence
  Description of Artificial Sequence: Synthetic oligonucleotide
ggucgggguggcacacucc

SEQ ID NO: 736623 - RNA, 19 nt, Artificial Sequence
  Description of Artificial Sequence: Synthetic oligonucleotide
gacccaugcugcacucacu

SEQ ID NO: 736624 - RNA, 19 nt, Artificial Sequence
  Description of Artificial Sequence: Synthetic oligonucleotide
ggccgcuaacaaaugaaau

SEQ ID NO: 736625 - RNA, 19 nt, Artificial Sequence
  Description of Artificial Sequence: Synthetic oligonucleotide
uacccgggagcaggagcua

SEQ ID NO: 736626 - RNA, 19 nt, Artificial Sequence
  Description of Artificial Sequence: Synthetic oligonucleotide
gcagaagguccaacaaggu

SEQ ID NO: 736627 - RNA, 19 nt, Artificial Sequence
  Description of Artificial Sequence: Synthetic oligonucleotide
cccugagaccugauucaca

SEQ ID NO: 736628 - RNA, 19 nt, Artificial Sequence
  Description of Artificial Sequence: Synthetic oligonucleotide
gagugaccccuaggacauc

SEQ ID NO: 736629 - RNA, 19 nt, Artificial Sequence
  Description of Artificial Sequence: Synthetic oligonucleotide
gcuuugugaugggagguau

SEQ ID NO: 736630 - RNA, 19 nt, Artificial Sequence
  Description of Artificial Sequence: Synthetic oligonucleotide
cuuccgggucauucugcau

SEQ ID NO: 736631 - RNA, 19 nt, Artificial Sequence
  Description of Artificial Sequence: Synthetic oligonucleotide
uuggggcgcugggcgugga

SEQ ID NO: 736632 - RNA, 19 nt, Artificial Sequence
  Description of Artificial Sequence: Synthetic oligonucleotide
ccccuaggacauccaacca

SEQ ID NO: 736633 - RNA, 19 nt, Artificial Sequence
  Description of Artificial Sequence: Synthetic oligonucleotide
cccuuugguauaguguagu

SEQ ID NO: 736634 - RNA, 19 nt, Artificial Sequence
  Description of Artificial Sequence: Synthetic oligonucleotide
cacucacugucuggggccu

SEQ ID NO: 736635 - RNA, 19 nt, Artificial Sequence
  Description of Artificial Sequence: Synthetic oligonucleotide
gacagggaccagggcuagu

SEQ ID NO: 736636 - RNA, 19 nt, Artificial Sequence
  Description of Artificial Sequence: Synthetic oligonucleotide
gggguacccuggaccagaa

SEQ ID NO: 736637 - RNA, 19 nt, Artificial Sequence
  Description of Artificial Sequence: Synthetic oligonucleotide
ccgggucauucugcauuuc

SEQ ID NO: 736638 - RNA, 19 nt, Artificial Sequence
  Description of Artificial Sequence: Synthetic oligonucleotide
gcaaaacgcggggccgccu

SEQ ID NO: 736639 - RNA, 19 nt, Artificial Sequence
  Description of Artificial Sequence: Synthetic oligonucleotide
ugauagacagguaagaagg

SEQ ID NO: 736640 - RNA, 19 nt, Artificial Sequence
  Description of Artificial Sequence: Synthetic oligonucleotide
aacuuuauugaccgcaucc

SEQ ID NO: 736641 - RNA, 19 nt, Artificial Sequence
  Description of Artificial Sequence: Synthetic oligonucleotide
uuaauagcaauucugaccu

SEQ ID NO: 736642 - RNA, 19 nt, Artificial Sequence
  Description of Artificial Sequence: Synthetic oligonucleotide
aaugguaauagcuguuugc

SEQ ID NO: 736643 - RNA, 19 nt, Artificial Sequence
  Description of Artificial Sequence: Synthetic oligonucleotide
gauacaguggagcugagcg

SEQ ID NO: 736644 - RNA, 19 nt, Artificial Sequence
  Description of Artificial Sequence: Synthetic oligonucleotide
aaagaguaccaccugcacc

SEQ ID NO: 736645 - RNA, 19 nt, Artificial Sequence
  Description of Artificial Sequence: Synthetic oligonucleotide
agggcuauuucuuucaugc

SEQ ID NO: 736646 - RNA, 19 nt, Artificial Sequence
  Description of Artificial Sequence: Synthetic oligonucleotide
gacaguuugauucgaaugg

SEQ ID NO: 736647 - RNA, 19 nt, Artificial Sequence
  Description of Artificial Sequence: Synthetic oligonucleotide
uuugauguuaugauuccgg

SEQ ID NO: 736648 - RNA, 19 nt, Artificial Sequence
  Description of Artificial Sequence: Synthetic oligonucleotide
cuuaauagcaauucugacc

SEQ ID NO: 736649 - RNA, 19 nt, Artificial Sequence
  Description of Artificial Sequence: Synthetic oligonucleotide
uuuagaacgaaggagagca

SEQ ID NO: 736650 - RNA, 19 nt, Artificial Sequence
  Description of Artificial Sequence: Synthetic oligonucleotide
uuaaucaauacauugucac

SEQ ID NO: 736651 - RNA, 19 nt, Artificial Sequence
  Description of Artificial Sequence: Synthetic oligonucleotide
aaugacgacggcuugaggu

SEQ ID NO: 736652 - RNA, 19 nt, Artificial Sequence
  Description of Artificial Sequence: Synthetic oligonucleotide
uagacuaucccauaagugc

SEQ ID NO: 736653 - RNA, 19 nt, Artificial Sequence
  Description of Artificial Sequence: Synthetic oligonucleotide
aacgaaggagagcagaaag

SEQ ID NO: 736654 - RNA, 19 nt, Artificial Sequence
  Description of Artificial Sequence: Synthetic oligonucleotide
uuuaaugggccccauuuag

SEQ ID NO: 736655 - RNA, 19 nt, Artificial Sequence
  Description of Artificial Sequence: Synthetic oligonucleotide
aaggcgaacauccagugug

SEQ ID NO: 736656 - RNA, 19 nt, Artificial Sequence
  Description of Artificial Sequence: Synthetic oligonucleotide
cauaaaggaaacagcagcg

SEQ ID NO: 736657 - RNA, 19 nt, Artificial Sequence
  Description of Artificial Sequence: Synthetic oligonucleotide
uccuuuaucgauuauuucu

SEQ ID NO: 736658 - RNA, 19 nt, Artificial Sequence
  Description of Artificial Sequence: Synthetic oligonucleotide
aauagcaauucugaccugg

SEQ ID NO: 736659 - RNA, 19 nt, Artificial Sequence
  Description of Artificial Sequence: Synthetic oligonucleotide
uauugguugggacuuaagc

SEQ ID NO: 736660 - RNA, 19 nt, Artificial Sequence
  Description of Artificial Sequence: Synthetic oligonucleotide
ugaauauuuuaauguagcc

SEQ ID NO: 736661 - RNA, 19 nt, Artificial Sequence
  Description of Artificial Sequence: Synthetic oligonucleotide
aagccaauuguuuugcuca

SEQ ID NO: 736662 - RNA, 19 nt, Artificial Sequence
  Description of Artificial Sequence: Synthetic oligonucleotide
ucgacuucguuguugauag

SEQ ID NO: 736663 - RNA, 19 nt, Artificial Sequence
  Description of Artificial Sequence: Synthetic oligonucleotide
uuaguuucggcucuucagc

SEQ ID NO: 736664 - RNA, 19 nt, Artificial Sequence
  Description of Artificial Sequence: Synthetic oligonucleotide
agaaagacuuccuccaggg

SEQ ID NO: 736665 - RNA, 19 nt, Artificial Sequence
  Description of Artificial Sequence: Synthetic oligonucleotide
ggcacuuuaaaucaucgcg

SEQ ID NO: 736666 - RNA, 19 nt, Artificial Sequence
  Description of Artificial Sequence: Synthetic oligonucleotide
uccuuaauagcaauucuga

SEQ ID NO: 736667 - RNA, 19 nt, Artificial Sequence
  Description of Artificial Sequence: Synthetic oligonucleotide
uuccuuaauagcaauucug

SEQ ID NO: 736668 - RNA, 19 nt, Artificial Sequence
  Description of Artificial Sequence: Synthetic oligonucleotide
ucugcuaucucucucugga

SEQ ID NO: 736669 - RNA, 19 nt, Artificial Sequence
  Description of Artificial Sequence: Synthetic oligonucleotide
agggauaucuauugguugg

SEQ ID NO: 736670 - RNA, 19 nt, Artificial Sequence
  Description of Artificial Sequence: Synthetic oligonucleotide
ugaacuaucugauugucau

SEQ ID NO: 736671 - RNA, 19 nt, Artificial Sequence
  Description of Artificial Sequence: Synthetic oligonucleotide
ugccaaauagauauugucu

SEQ ID NO: 736672 - RNA, 19 nt, Artificial Sequence
  Description of Artificial Sequence: Synthetic oligonucleotide
auugguugggacuuaagcu

SEQ ID NO: 736673 - RNA, 19 nt, Artificial Sequence
  Description of Artificial Sequence: Synthetic oligonucleotide
ucaacgauggccuuccaca

SEQ ID NO: 736674 - RNA, 19 nt, Artificial Sequence
  Description of Artificial Sequence: Synthetic oligonucleotide
uuuucaucuggaaugccca

SEQ ID NO: 736675 - RNA, 19 nt, Artificial Sequence
  Description of Artificial Sequence: Synthetic oligonucleotide
auuuguguagggcuauuuc

SEQ ID NO: 736676 - RNA, 19 nt, Artificial Sequence
  Description of Artificial Sequence: Synthetic oligonucleotide
aucgauuauuucuggugcc

SEQ ID NO: 736677 - RNA, 19 nt, Artificial Sequence
  Description of Artificial Sequence: Synthetic oligonucleotide
agauauugucuucuccucg

SEQ ID NO: 736678 - RNA, 19 nt, Artificial Sequence
  Description of Artificial Sequence: Synthetic oligonucleotide
aaggcuaaaguguggccuc

SEQ ID NO: 736679 - RNA, 19 nt, Artificial Sequence
  Description of Artificial Sequence: Synthetic oligonucleotide
uagagaacauccacuagug

SEQ ID NO: 736680 - RNA, 19 nt, Artificial Sequence
  Description of Artificial Sequence: Synthetic oligonucleotide
uaauccucagccagaaacc

SEQ ID NO: 736681 - RNA, 19 nt, Artificial Sequence
  Description of Artificial Sequence: Synthetic oligonucleotide
ucuugagauauuuguguag

SEQ ID NO: 736682 - RNA, 19 nt, Artificial Sequence
  Description of Artificial Sequence: Synthetic oligonucleotide
agaagaguguccguugugc

SEQ ID NO: 736683 - RNA, 19 nt, Artificial Sequence
  Description of Artificial Sequence: Synthetic oligonucleotide
uguauagaagccaauuguu

SEQ ID NO: 736684 - RNA, 19 nt, Artificial Sequence
  Description of Artificial Sequence: Synthetic oligonucleotide
aacccagggauaucuauug

SEQ ID NO: 736685 - RNA, 19 nt, Artificial Sequence
  Description of Artificial Sequence: Synthetic oligonucleotide
cuucguuguugauagacag

SEQ ID NO: 736686 - RNA, 19 nt, Artificial Sequence
  Description of Artificial Sequence: Synthetic oligonucleotide
cuuuaaaucaucgcgugug

SEQ ID NO: 736687 - RNA, 19 nt, Artificial Sequence
  Description of Artificial Sequence: Synthetic oligonucleotide
uaaaucaucgcgugugaca

SEQ ID NO: 736688 - RNA, 19 nt, Artificial Sequence
  Description of Artificial Sequence: Synthetic oligonucleotide
ucucuuuccguacuaacuc

SEQ ID NO: 736689 - RNA, 19 nt, Artificial Sequence
  Description of Artificial Sequence: Synthetic oligonucleotide
ugagauauuuguguagggc

SEQ ID NO: 736690 - RNA, 19 nt, Artificial Sequence
  Description of Artificial Sequence: Synthetic oligonucleotide
ugauguuaugauuccggag

SEQ ID NO: 736691 - RNA, 19 nt, Artificial Sequence
  Description of Artificial Sequence: Synthetic oligonucleotide
cucauguauaccuuucuug

SEQ ID NO: 736692 - RNA, 19 nt, Artificial Sequence
  Description of Artificial Sequence: Synthetic oligonucleotide
ugugaagcacauaaaggaa

SEQ ID NO: 736693 - RNA, 19 nt, Artificial Sequence
  Description of Artificial Sequence: Synthetic oligonucleotide
uccguacuaacucuucaag

SEQ ID NO: 736694 - RNA, 19 nt, Artificial Sequence
  Description of Artificial Sequence: Synthetic oligonucleotide
ucccauuuuaguuucggcu

SEQ ID NO: 736695 - RNA, 19 nt, Artificial Sequence
  Description of Artificial Sequence: Synthetic oligonucleotide
uucucuuuccguacuaacu

SEQ ID NO: 736696 - RNA, 19 nt, Artificial Sequence
  Description of Artificial Sequence: Synthetic oligonucleotide
uuuaaaucaucgcguguga

SEQ ID NO: 736697 - RNA, 19 nt, Artificial Sequence
  Description of Artificial Sequence: Synthetic oligonucleotide
uucguuguugauagacagg

SEQ ID NO: 736698 - RNA, 19 nt, Artificial Sequence
  Description of Artificial Sequence: Synthetic oligonucleotide
uucgcuauccuuucucaag

SEQ ID NO: 736699 - RNA, 19 nt, Artificial Sequence
  Description of Artificial Sequence: Synthetic oligonucleotide
aacucuucaaguaaucuau

SEQ ID NO: 736700 - RNA, 19 nt, Artificial Sequence
  Description of Artificial Sequence: Synthetic oligonucleotide
auuuagaacgaaggagagc

SEQ ID NO: 736701 - RNA, 19 nt, Artificial Sequence
  Description of Artificial Sequence: Synthetic oligonucleotide
ucgcgugugacauaguaga

SEQ ID NO: 736702 - RNA, 19 nt, Artificial Sequence
  Description of Artificial Sequence: Synthetic oligonucleotide
aucuucgacauccaagucu

SEQ ID NO: 736703 - RNA, 19 nt, Artificial Sequence
  Description of Artificial Sequence: Synthetic oligonucleotide
aaggagagcagaaagacuu

SEQ ID NO: 736704 - RNA, 19 nt, Artificial Sequence
  Description of Artificial Sequence: Synthetic oligonucleotide
cauauucguagucauacuc

SEQ ID NO: 736705 - RNA, 19 nt, Artificial Sequence
  Description of Artificial Sequence: Synthetic oligonucleotide
gacggcuugaggucuacgg

SEQ ID NO: 736706 - RNA, 19 nt, Artificial Sequence
  Description of Artificial Sequence: Synthetic oligonucleotide
ucaguacacggguuuaugc

SEQ ID NO: 736707 - RNA, 19 nt, Artificial Sequence
  Description of Artificial Sequence: Synthetic oligonucleotide
guuguugauagacagguaa

SEQ ID NO: 736708 - RNA, 19 nt, Artificial Sequence
  Description of Artificial Sequence: Synthetic oligonucleotide
gaugcaaggcuaaagugug

SEQ ID NO: 736709 - RNA, 19 nt, Artificial Sequence
  Description of Artificial Sequence: Synthetic oligonucleotide
aaggucucaguacacgggu

SEQ ID NO: 736710 - RNA, 19 nt, Artificial Sequence
  Description of Artificial Sequence: Synthetic oligonucleotide
aaaucaucgcgugugacau

SEQ ID NO: 736711 - RNA, 19 nt, Artificial Sequence
  Description of Artificial Sequence: Synthetic oligonucleotide
agaguguccguugugcagc

SEQ ID NO: 736712 - RNA, 19 nt, Artificial Sequence
  Description of Artificial Sequence: Synthetic oligonucleotide
gaaaccgacugauaguguc

SEQ ID NO: 736713 - RNA, 19 nt, Artificial Sequence
  Description of Artificial Sequence: Synthetic oligonucleotide
auaagugccuuuccuaaca

SEQ ID NO: 736714 - RNA, 19 nt, Artificial Sequence
  Description of Artificial Sequence: Synthetic oligonucleotide
auauuugcuuuguauagaa

SEQ ID NO: 736715 - RNA, 19 nt, Artificial Sequence
  Description of Artificial Sequence: Synthetic oligonucleotide
aggcacuuuaaaucaucgc

SEQ ID NO: 736716 - RNA, 19 nt, Artificial Sequence
  Description of Artificial Sequence: Synthetic oligonucleotide
ucucaagcauaaagaagcc

SEQ ID NO: 736717 - RNA, 19 nt, Artificial Sequence
  Description of Artificial Sequence: Synthetic oligonucleotide
ggaagcacgugccaaauag

SEQ ID NO: 736718 - RNA, 19 nt, Artificial Sequence
  Description of Artificial Sequence: Synthetic oligonucleotide
gaggucuacggacaguuug

SEQ ID NO: 736719 - RNA, 19 nt, Artificial Sequence
  Description of Artificial Sequence: Synthetic oligonucleotide
uuccggagaacuuuauuga

SEQ ID NO: 736720 - RNA, 19 nt, Artificial Sequence
  Description of Artificial Sequence: Synthetic oligonucleotide
ucgcuauccuuucucaagc

SEQ ID NO: 736721 - RNA, 19 nt, Artificial Sequence
  Description of Artificial Sequence: Synthetic oligonucleotide
ugguacuucugucaggauc

SEQ ID NO: 736722 - RNA, 19 nt, Artificial Sequence
  Description of Artificial Sequence: Synthetic oligonucleotide
uugauguuaugauuccgga

SEQ ID NO: 736723 - RNA, 19 nt, Artificial Sequence
  Description of Artificial Sequence: Synthetic oligonucleotide
uuauugaccgcauccugga

SEQ ID NO: 736724 - RNA, 19 nt, Artificial Sequence
  Description of Artificial Sequence: Synthetic oligonucleotide
guguguaauccucagccag

SEQ ID NO: 736725 - RNA, 19 nt, Artificial Sequence
  Description of Artificial Sequence: Synthetic oligonucleotide
acggguuuaugccagcaag

SEQ ID NO: 736726 - RNA, 19 nt, Artificial Sequence
  Description of Artificial Sequence: Synthetic oligonucleotide
agcugugucacuuucggau

SEQ ID NO: 736727 - RNA, 19 nt, Artificial Sequence
  Description of Artificial Sequence: Synthetic oligonucleotide
uguguucccauuuuaguuu

SEQ ID NO: 736728 - RNA, 19 nt, Artificial Sequence
  Description of Artificial Sequence: Synthetic oligonucleotide
acuaguguguaauccucag

SEQ ID NO: 736729 - RNA, 19 nt, Artificial Sequence
  Description of Artificial Sequence: Synthetic oligonucleotide
gauauugucuucuccucga

SEQ ID NO: 736730 - RNA, 19 nt, Artificial Sequence
  Description of Artificial Sequence: Synthetic oligonucleotide
augacgacggcuugagguc

SEQ ID NO: 736731 - RNA, 19 nt, Artificial Sequence
  Description of Artificial Sequence: Synthetic oligonucleotide
gaggcacuuuaaaucaucg

SEQ ID NO: 736732 - RNA, 19 nt, Artificial Sequence
  Description of Artificial Sequence: Synthetic oligonucleotide
aguacacggguuuaugcca

SEQ ID NO: 736733 - RNA, 19 nt, Artificial Sequence
  Description of Artificial Sequence: Synthetic oligonucleotide
uuccgcacgaccuuguccu

SEQ ID NO: 736734 - RNA, 19 nt, Artificial Sequence
  Description of Artificial Sequence: Synthetic oligonucleotide
guaaaggucucaguacacg

SEQ ID NO: 736735 - RNA, 19 nt, Artificial Sequence
  Description of Artificial Sequence: Synthetic oligonucleotide
ugcauagacuaucccauaa

SEQ ID NO: 736736 - RNA, 19 nt, Artificial Sequence
  Description of Artificial Sequence: Synthetic oligonucleotide
aaggagugcuuguaacucu

SEQ ID NO: 736737 - RNA, 19 nt, Artificial Sequence
  Description of Artificial Sequence: Synthetic oligonucleotide
ugaguaguaucugcuaucu

SEQ ID NO: 736738 - RNA, 19 nt, Artificial Sequence
  Description of Artificial Sequence: Synthetic oligonucleotide
auauugucuucuccucgac

SEQ ID NO: 736739 - RNA, 19 nt, Artificial Sequence
  Description of Artificial Sequence: Synthetic oligonucleotide
gaagccaauuguuuugcuc

SEQ ID NO: 736740 - RNA, 19 nt, Artificial Sequence
  Description of Artificial Sequence: Synthetic oligonucleotide
caggucucgaccugcauag

SEQ ID NO: 736741 - RNA, 19 nt, Artificial Sequence
  Description of Artificial Sequence: Synthetic oligonucleotide
ucaucauauucguagucau

SEQ ID NO: 736742 - RNA, 19 nt, Artificial Sequence
  Description of Artificial Sequence: Synthetic oligonucleotide
auagacuaucccauaagug

SEQ ID NO: 736743 - RNA, 19 nt, Artificial Sequence
  Description of Artificial Sequence: Synthetic oligonucleotide
aucccauaagugccuuucc

SEQ ID NO: 736744 - RNA, 19 nt, Artificial Sequence
  Description of Artificial Sequence: Synthetic oligonucleotide
aaguaaucuauuaguuucu

SEQ ID NO: 736745 - RNA, 19 nt, Artificial Sequence
  Description of Artificial Sequence: Synthetic oligonucleotide
cagaaaccgacugauagug

SEQ ID NO: 736746 - RNA, 19 nt, Artificial Sequence
  Description of Artificial Sequence: Synthetic oligonucleotide
gacuucguuguugauagac

SEQ ID NO: 736747 - RNA, 19 nt, Artificial Sequence
  Description of Artificial Sequence: Synthetic oligonucleotide
aucaucgcgugugacauag

SEQ ID NO: 736748 - RNA, 19 nt, Artificial Sequence
  Description of Artificial Sequence: Synthetic oligonucleotide
uauucguagucauacucua

SEQ ID NO: 736749 - RNA, 19 nt, Artificial Sequence
  Description of Artificial Sequence: Synthetic oligonucleotide
ccuaacacgacucugucac

SEQ ID NO: 736750 - RNA, 19 nt, Artificial Sequence
  Description of Artificial Sequence: Synthetic oligonucleotide
agaacauccacuagugugu

SEQ ID NO: 736751 - RNA, 19 nt, Artificial Sequence
  Description of Artificial Sequence: Synthetic oligonucleotide
augguaauagcuguuugca

SEQ ID NO: 736752 - RNA, 19 nt, Artificial Sequence
  Description of Artificial Sequence: Synthetic oligonucleotide
uggaaaucaucagaauugu

SEQ ID NO: 736753 - RNA, 19 nt, Artificial Sequence
  Description of Artificial Sequence: Synthetic oligonucleotide
ucgacauccaagucuucug

SEQ ID NO: 736754 - RNA, 19 nt, Artificial Sequence
  Description of Artificial Sequence: Synthetic oligonucleotide
ucacuuucggaugcaaggc

SEQ ID NO: 736755 - RNA, 19 nt, Artificial Sequence
  Description of Artificial Sequence: Synthetic oligonucleotide
auguguucccauuuuaguu

SEQ ID NO: 736756 - RNA, 19 nt, Artificial Sequence
  Description of Artificial Sequence: Synthetic oligonucleotide
gauagacagguaagaaggc

SEQ ID NO: 736757 - RNA, 19 nt, Artificial Sequence
  Description of Artificial Sequence: Synthetic oligonucleotide
uuagaacgaaggagagcag

SEQ ID NO: 736758 - RNA, 19 nt, Artificial Sequence
  Description of Artificial Sequence: Synthetic oligonucleotide
ugggaaucaugggauacag

SEQ ID NO: 736759 - RNA, 19 nt, Artificial Sequence
  Description of Artificial Sequence: Synthetic oligonucleotide
auauucguagucauacucu

SEQ ID NO: 736760 - RNA, 19 nt, Artificial Sequence
  Description of Artificial Sequence: Synthetic oligonucleotide
uuguguagggcuauuucuu

SEQ ID NO: 736761 - RNA, 19 nt, Artificial Sequence
  Description of Artificial Sequence: Synthetic oligonucleotide
acuaacucuucaaguaauc

SEQ ID NO: 736762 - RNA, 19 nt, Artificial Sequence
  Description of Artificial Sequence: Synthetic oligonucleotide
agucugaggcacuuuaaau

SEQ ID NO: 736763 - RNA, 19 nt, Artificial Sequence
  Description of Artificial Sequence: Synthetic oligonucleotide
cagggauaucuauugguug

SEQ ID NO: 736764 - RNA, 19 nt, Artificial Sequence
  Description of Artificial Sequence: Synthetic oligonucleotide
ucccauaagugccuuuccu

SEQ ID NO: 736765 - RNA, 19 nt, Artificial Sequence
  Description of Artificial Sequence: Synthetic oligonucleotide
agcgcucugggaaucaugg

SEQ ID NO: 736766 - RNA, 19 nt, Artificial Sequence
  Description of Artificial Sequence: Synthetic oligonucleotide
ucauauucguagucauacu

SEQ ID NO: 736767 - RNA, 19 nt, Artificial Sequence
  Description of Artificial Sequence: Synthetic oligonucleotide
gcaauucugaccugguugc

SEQ ID NO: 736768 - RNA, 19 nt, Artificial Sequence
  Description of Artificial Sequence: Synthetic oligonucleotide
uaagugccuuuccuaacac

SEQ ID NO: 736769 - RNA, 19 nt, Artificial Sequence
  Description of Artificial Sequence: Synthetic oligonucleotide
cuguaaaggucucaguaca

SEQ ID NO: 736770 - RNA, 19 nt, Artificial Sequence
  Description of Artificial Sequence: Synthetic oligonucleotide
uucccauuuuaguuucggc

SEQ ID NO: 736771 - RNA, 19 nt, Artificial Sequence
  Description of Artificial Sequence: Synthetic oligonucleotide
gccucgagguccuuuaucg

SEQ ID NO: 736772 - RNA, 19 nt, Artificial Sequence
  Description of Artificial Sequence: Synthetic oligonucleotide
gaggguugugauguguucc

SEQ ID NO: 736773 - RNA, 19 nt, Artificial Sequence
  Description of Artificial Sequence: Synthetic oligonucleotide
acccuuuauaucccgguga

SEQ ID NO: 736774 - RNA, 19 nt, Artificial Sequence
  Description of Artificial Sequence: Synthetic oligonucleotide
uauaucccggugaacuauc

SEQ ID NO: 736775 - RNA, 19 nt, Artificial Sequence
  Description of Artificial Sequence: Synthetic oligonucleotide
uucgacauccaagucuucu

SEQ ID NO: 736776 - RNA, 19 nt, Artificial Sequence
  Description of Artificial Sequence: Synthetic oligonucleotide
caagccucuuugauguccc

SEQ ID NO: 736777 - RNA, 19 nt, Artificial Sequence
  Description of Artificial Sequence: Synthetic oligonucleotide
ugggccagugacuccauca

SEQ ID NO: 736778 - RNA, 19 nt, Artificial Sequence
  Description of Artificial Sequence: Synthetic oligonucleotide
ccuuuaucgauuauuucug

SEQ ID NO: 736779 - RNA, 19 nt, Artificial Sequence
  Description of Artificial Sequence: Synthetic oligonucleotide
uuagucugaggcacuuuaa

SEQ ID NO: 736780 - RNA, 19 nt, Artificial Sequence
  Description of Artificial Sequence: Synthetic oligonucleotide
aguguguaauccucagcca

SEQ ID NO: 736781 - RNA, 19 nt, Artificial Sequence
  Description of Artificial Sequence: Synthetic oligonucleotide
ucucgaccugcauagacua

SEQ ID NO: 736782 - RNA, 19 nt, Artificial Sequence
  Description of Artificial Sequence: Synthetic oligonucleotide
cacagcgugcacagcaucc

SEQ ID NO: 736783 - RNA, 19 nt, Artificial Sequence
  Description of Artificial Sequence: Synthetic oligonucleotide
uuuaugccagcaagccucu

SEQ ID NO: 736784 - RNA, 19 nt, Artificial Sequence
  Description of Artificial Sequence: Synthetic oligonucleotide
uuaaaucaucgcgugugac

SEQ ID NO: 736785 - RNA, 19 nt, Artificial Sequence
  Description of Artificial Sequence: Synthetic oligonucleotide
cauaagugccuuuccuaac

SEQ ID NO: 736786 - RNA, 19 nt, Artificial Sequence
  Description of Artificial Sequence: Synthetic oligonucleotide
ucugggaaucaugggauac

SEQ ID NO: 736787 - RNA, 19 nt, Artificial Sequence
  Description of Artificial Sequence: Synthetic oligonucleotide
auauacugcagggugccug

SEQ ID NO: 736788 - RNA, 19 nt, Artificial Sequence
  Description of Artificial Sequence: Synthetic oligonucleotide
gauguguucccauuuuagu

SEQ ID NO: 736789 - RNA, 19 nt, Artificial Sequence
  Description of Artificial Sequence: Synthetic oligonucleotide
uuaugauuccggagaacuu

SEQ ID NO: 736790 - RNA, 19 nt, Artificial Sequence
  Description of Artificial Sequence: Synthetic oligonucleotide
ucacccuuuauaucccggu

SEQ ID NO: 736791 - RNA, 19 nt, Artificial Sequence
  Description of Artificial Sequence: Synthetic oligonucleotide
aagcacgugccaaauagau

SEQ ID NO: 736792 - RNA, 19 nt, Artificial Sequence
  Description of Artificial Sequence: Synthetic oligonucleotide
ucgauuauuucuggugcca

SEQ ID NO: 736793 - RNA, 19 nt, Artificial Sequence
  Description of Artificial Sequence: Synthetic oligonucleotide
caguggaccucacaaacuc

SEQ ID NO: 736794 - RNA, 19 nt, Artificial Sequence
  Description of Artificial Sequence: Synthetic oligonucleotide
uuccguacuaacucuucaa

SEQ ID NO: 736795 - RNA, 19 nt, Artificial Sequence
  Description of Artificial Sequence: Synthetic oligonucleotide
cauccaagucuucuggauc

SEQ ID NO: 736796 - RNA, 19 nt, Artificial Sequence
  Description of Artificial Sequence: Synthetic oligonucleotide
uccuaacacgacucuguca

SEQ ID NO: 736797 - RNA, 19 nt, Artificial Sequence
  Description of Artificial Sequence: Synthetic oligonucleotide
caacgauggccuuccacag

SEQ ID NO: 736798 - RNA, 19 nt, Artificial Sequence
  Description of Artificial Sequence: Synthetic oligonucleotide
gcuuacuccucugauagag

SEQ ID NO: 736799 - RNA, 19 nt, Artificial Sequence
  Description of Artificial Sequence: Synthetic oligonucleotide
uaucccggugaacuaucug

SEQ ID NO: 736800 - RNA, 19 nt, Artificial Sequence
  Description of Artificial Sequence: Synthetic oligonucleotide
agggacuuguuccaugaau

SEQ ID NO: 736801 - RNA, 19 nt, Artificial Sequence
  Description of Artificial Sequence: Synthetic oligonucleotide
agagaacauccacuagugu

SEQ ID NO: 736802 - RNA, 19 nt, Artificial Sequence
  Description of Artificial Sequence: Synthetic oligonucleotide
uaugccagcaagccucuuu

SEQ ID NO: 736803 - RNA, 19 nt, Artificial Sequence
  Description of Artificial Sequence: Synthetic oligonucleotide
agcugcacauucagggacc

SEQ ID NO: 736804 - RNA, 19 nt, Artificial Sequence
  Description of Artificial Sequence: Synthetic oligonucleotide
gugucuugagauauuugug

SEQ ID NO: 736805 - RNA, 19 nt, Artificial Sequence
  Description of Artificial Sequence: Synthetic oligonucleotide
ucugauugucaugaaggua

SEQ ID NO: 736806 - RNA, 19 nt, Artificial Sequence
  Description of Artificial Sequence: Synthetic oligonucleotide
uuccccuuagucugaggca

SEQ ID NO: 736807 - RNA, 19 nt, Artificial Sequence
  Description of Artificial Sequence: Synthetic oligonucleotide
acccagggauaucuauugg

SEQ ID NO: 736808 - RNA, 19 nt, Artificial Sequence
  Description of Artificial Sequence: Synthetic oligonucleotide
agagagcccagguacugga

SEQ ID NO: 736809 - RNA, 19 nt, Artificial Sequence
  Description of Artificial Sequence: Synthetic oligonucleotide
auacucuagggagucaccu

SEQ ID NO: 736810 - RNA, 19 nt, Artificial Sequence
  Description of Artificial Sequence: Synthetic oligonucleotide
uuucgcuauccuuucucaa

SEQ ID NO: 736811 - RNA, 19 nt, Artificial Sequence
  Description of Artificial Sequence: Synthetic oligonucleotide
auacaguggagcugagcgu

SEQ ID NO: 736812 - RNA, 19 nt, Artificial Sequence
  Description of Artificial Sequence: Synthetic oligonucleotide
agaugcuuacuccucugau

SEQ ID NO: 736813 - RNA, 19 nt, Artificial Sequence
  Description of Artificial Sequence: Synthetic oligonucleotide
ugguugugccagcagaguu

SEQ ID NO: 736814 - RNA, 19 nt, Artificial Sequence
  Description of Artificial Sequence: Synthetic oligonucleotide
ccgaaagucaacgauggcc

SEQ ID NO: 736815 - RNA, 19 nt, Artificial Sequence
  Description of Artificial Sequence: Synthetic oligonucleotide
acgugccaaauagauauug

SEQ ID NO: 736816 - RNA, 19 nt, Artificial Sequence
  Description of Artificial Sequence: Synthetic oligonucleotide
guccugguacuucugucag

SEQ ID NO: 736817 - RNA, 19 nt, Artificial Sequence
  Description of Artificial Sequence: Synthetic oligonucleotide
gguauucaccauuucaaaa

SEQ ID NO: 736818 - RNA, 19 nt, Artificial Sequence
  Description of Artificial Sequence: Synthetic oligonucleotide
ggugguacaugggaaaccc

SEQ ID NO: 736819 - RNA, 19 nt, Artificial Sequence
  Description of Artificial Sequence: Synthetic oligonucleotide
cuauugguugggacuuaag

SEQ ID NO: 736820 - RNA, 19 nt, Artificial Sequence
  Description of Artificial Sequence: Synthetic oligonucleotide
ucucugaggcucgcgauga

SEQ ID NO: 736821 - RNA, 19 nt, Artificial Sequence
  Description of Artificial Sequence: Synthetic oligonucleotide
cccauuuagaacgaaggag

SEQ ID NO: 736822 - RNA, 19 nt, Artificial Sequence
  Description of Artificial Sequence: Synthetic oligonucleotide
gaacuuuauugaccgcauc

SEQ ID NO: 736823 - RNA, 19 nt, Artificial Sequence
  Description of Artificial Sequence: Synthetic oligonucleotide
agccucgagguccuuuauc

SEQ ID NO: 736824 - RNA, 19 nt, Artificial Sequence
  Description of Artificial Sequence: Synthetic oligonucleotide
cagcgcucuucaaacuugg

SEQ ID NO: 736825 - RNA, 19 nt, Artificial Sequence
  Description of Artificial Sequence: Synthetic oligonucleotide
ccuguaaaggucucaguac

SEQ ID NO: 736826 - RNA, 19 nt, Artificial Sequence
  Description of Artificial Sequence: Synthetic oligonucleotide
caucagaauugugaagcac

SEQ ID NO: 736827 - RNA, 19 nt, Artificial Sequence
  Description of Artificial Sequence: Synthetic oligonucleotide
gcauagacuaucccauaag

SEQ ID NO: 736828 - RNA, 19 nt, Artificial Sequence
  Description of Artificial Sequence: Synthetic oligonucleotide
cauagacuaucccauaagu

SEQ ID NO: 736829 - RNA, 19 nt, Artificial Sequence
  Description of Artificial Sequence: Synthetic oligonucleotide
agccaccgcauccucaaug

SEQ ID NO: 736830 - RNA, 19 nt, Artificial Sequence
  Description of Artificial Sequence: Synthetic oligonucleotide
cuuucgcuauccuuucuca

SEQ ID NO: 736831 - RNA, 19 nt, Artificial Sequence
  Description of Artificial Sequence: Synthetic oligonucleotide
ucgaccugcauagacuauc

SEQ ID NO: 736832 - RNA, 19 nt, Artificial Sequence
  Description of Artificial Sequence: Synthetic oligonucleotide
uuucggucaguggaccuca

SEQ ID NO: 736833 - RNA, 19 nt, Artificial Sequence
  Description of Artificial Sequence: Synthetic oligonucleotide
acaaacucucugaggcucg

SEQ ID NO: 736834 - RNA, 19 nt, Artificial Sequence
  Description of Artificial Sequence: Synthetic oligonucleotide
uaauagcaauucugaccug

SEQ ID NO: 736835 - RNA, 19 nt, Artificial Sequence
  Description of Artificial Sequence: Synthetic oligonucleotide
uggccucaacucuggaacc

SEQ ID NO: 736836 - RNA, 19 nt, Artificial Sequence
  Description of Artificial Sequence: Synthetic oligonucleotide
agugugguuugauguuaug

SEQ ID NO: 736837 - RNA, 19 nt, Artificial Sequence
  Description of Artificial Sequence: Synthetic oligonucleotide
ucgagguccuuuaucgauu

SEQ ID NO: 736838 - RNA, 19 nt, Artificial Sequence
  Description of Artificial Sequence: Synthetic oligonucleotide
ccggugaacuaucugauug

SEQ ID NO: 736839 - RNA, 19 nt, Artificial Sequence
  Description of Artificial Sequence: Synthetic oligonucleotide
ucccgagguagccaccgca

SEQ ID NO: 736840 - RNA, 19 nt, Artificial Sequence
  Description of Artificial Sequence: Synthetic oligonucleotide
gccccauuuagaacgaagg

SEQ ID NO: 736841 - RNA, 19 nt, Artificial Sequence
  Description of Artificial Sequence: Synthetic oligonucleotide
uccagggacuuguuccaug

SEQ ID NO: 736842 - RNA, 19 nt, Artificial Sequence
  Description of Artificial Sequence: Synthetic oligonucleotide
ccuuaauagcaauucugac

SEQ ID NO: 736843 - RNA, 19 nt, Artificial Sequence
  Description of Artificial Sequence: Synthetic oligonucleotide
cuuagucugaggcacuuua

SEQ ID NO: 736844 - RNA, 19 nt, Artificial Sequence
  Description of Artificial Sequence: Synthetic oligonucleotide
cuaacacgacucugucacc

SEQ ID NO: 736845 - RNA, 19 nt, Artificial Sequence
  Description of Artificial Sequence: Synthetic oligonucleotide
cuguuugcacagccuuucg

SEQ ID NO: 736846 - RNA, 19 nt, Artificial Sequence
  Description of Artificial Sequence: Synthetic oligonucleotide
aucgcgugugacauaguag

SEQ ID NO: 736847 - RNA, 19 nt, Artificial Sequence
  Description of Artificial Sequence: Synthetic oligonucleotide
ucuauugguugggacuuaa

SEQ ID NO: 736848 - RNA, 19 nt, Artificial Sequence
  Description of Artificial Sequence: Synthetic oligonucleotide
cuaaaguguggccucaacu

SEQ ID NO: 736849 - RNA, 19 nt, Artificial Sequence
  Description of Artificial Sequence: Synthetic oligonucleotide
auucguagucauacucuag

SEQ ID NO: 736850 - RNA, 19 nt, Artificial Sequence
  Description of Artificial Sequence: Synthetic oligonucleotide
cacuguagguauuaaucaa

SEQ ID NO: 736851 - RNA, 19 nt, Artificial Sequence
  Description of Artificial Sequence: Synthetic oligonucleotide
gucaacgauggccuuccac

SEQ ID NO: 736852 - RNA, 19 nt, Artificial Sequence
  Description of Artificial Sequence: Synthetic oligonucleotide
guacacggguuuaugccag

SEQ ID NO: 736853 - RNA, 19 nt, Artificial Sequence
  Description of Artificial Sequence: Synthetic oligonucleotide
acuucguuguugauagaca

SEQ ID NO: 736854 - RNA, 19 nt, Artificial Sequence
  Description of Artificial Sequence: Synthetic oligonucleotide
gugcucacucccgagguag

SEQ ID NO: 736855 - RNA, 19 nt, Artificial Sequence
  Description of Artificial Sequence: Synthetic oligonucleotide
gaccugcauagacuauccc

SEQ ID NO: 736856 - RNA, 19 nt, Artificial Sequence
  Description of Artificial Sequence: Synthetic oligonucleotide
gcacgugccaaauagauau

SEQ ID NO: 736857 - RNA, 19 nt, Artificial Sequence
  Description of Artificial Sequence: Synthetic oligonucleotide
gaugucccgaagucagaga

SEQ ID NO: 736858 - RNA, 19 nt, Artificial Sequence
  Description of Artificial Sequence: Synthetic oligonucleotide
uugauucgaaugggauucc

SEQ ID NO: 736859 - RNA, 19 nt, Artificial Sequence
  Description of Artificial Sequence: Synthetic oligonucleotide
ccaaauagauauugucuuc

SEQ ID NO: 736860 - RNA, 19 nt, Artificial Sequence
  Description of Artificial Sequence: Synthetic oligonucleotide
auagccucgagguccuuua

SEQ ID NO: 736861 - RNA, 19 nt, Artificial Sequence
  Description of Artificial Sequence: Synthetic oligonucleotide
uguaauccucagccagaaa

SEQ ID NO: 736862 - RNA, 19 nt, Artificial Sequence
  Description of Artificial Sequence: Synthetic oligonucleotide
cauccacuaguguguaauc

SEQ ID NO: 736863 - RNA, 19 nt, Artificial Sequence
  Description of Artificial Sequence: Synthetic oligonucleotide
uauugaccgcauccuggaa

SEQ ID NO: 736864 - RNA, 19 nt, Artificial Sequence
  Description of Artificial Sequence: Synthetic oligonucleotide
agaacgaaggagagcagaa

SEQ ID NO: 736865 - RNA, 19 nt, Artificial Sequence
  Description of Artificial Sequence: Synthetic oligonucleotide
ugauuccggagaacuuuau

SEQ ID NO: 736866 - RNA, 19 nt, Artificial Sequence
  Description of Artificial Sequence: Synthetic oligonucleotide
gguguuuaauuuccugguc

SEQ ID NO: 736867 - RNA, 19 nt, Artificial Sequence
  Description of Artificial Sequence: Synthetic oligonucleotide
gucacccuuuauaucccgg

SEQ ID NO: 736868 - RNA, 19 nt, Artificial Sequence
  Description of Artificial Sequence: Synthetic oligonucleotide
uccuuccaauauuugcuuu

SEQ ID NO: 736869 - RNA, 19 nt, Artificial Sequence
  Description of Artificial Sequence: Synthetic oligonucleotide
agaacuuuauugaccgcau

SEQ ID NO: 736870 - RNA, 19 nt, Artificial Sequence
  Description of Artificial Sequence: Synthetic oligonucleotide
gggauaucuauugguuggg

SEQ ID NO: 736871 - RNA, 19 nt, Artificial Sequence
  Description of Artificial Sequence: Synthetic oligonucleotide
gaguguccguugugcagcc

SEQ ID NO: 736872 - RNA, 19 nt, Artificial Sequence
  Description of Artificial Sequence: Synthetic oligonucleotide
cacuaguguguaauccuca

SEQ ID NO: 736873 - RNA, 19 nt, Artificial Sequence
  Description of Artificial Sequence: Synthetic oligonucleotide
gaagcacgugccaaauaga

SEQ ID NO: 736874 - RNA, 19 nt, Artificial Sequence
  Description of Artificial Sequence: Synthetic oligonucleotide
agcgugcacagcauccuuc

SEQ ID NO: 736875 - RNA, 19 nt, Artificial Sequence
  Description of Artificial Sequence: Synthetic oligonucleotide
cugcagggugccuguaaag

SEQ ID NO: 736876 - RNA, 19 nt, Artificial Sequence
  Description of Artificial Sequence: Synthetic oligonucleotide
cucaguacacggguuuaug

SEQ ID NO: 736877 - RNA, 19 nt, Artificial Sequence
  Description of Artificial Sequence: Synthetic oligonucleotide
ugcucacucccgagguagc

SEQ ID NO: 736878 - RNA, 19 nt, Artificial Sequence
  Description of Artificial Sequence: Synthetic oligonucleotide
caaugacgacggcuugagg

SEQ ID NO: 736879 - RNA, 19 nt, Artificial Sequence
  Description of Artificial Sequence: Synthetic oligonucleotide
ucucucagccagccaguaa

SEQ ID NO: 736880 - RNA, 19 nt, Artificial Sequence
  Description of Artificial Sequence: Synthetic oligonucleotide
gaguaguaucugcuaucuc

SEQ ID NO: 736881 - RNA, 19 nt, Artificial Sequence
  Description of Artificial Sequence: Synthetic oligonucleotide
ugcuuacuccucugauaga

SEQ ID NO: 736882 - RNA, 19 nt, Artificial Sequence
  Description of Artificial Sequence: Synthetic oligonucleotide
uucuuccgugccucugccc

SEQ ID NO: 736883 - RNA, 19 nt, Artificial Sequence
  Description of Artificial Sequence: Synthetic oligonucleotide
agguccuuuaucgauuauu

SEQ ID NO: 736884 - RNA, 19 nt, Artificial Sequence
  Description of Artificial Sequence: Synthetic oligonucleotide
guagccaccgcauccucaa

SEQ ID NO: 736885 - RNA, 19 nt, Artificial Sequence
  Description of Artificial Sequence: Synthetic oligonucleotide
uacacggguuuaugccagc

SEQ ID NO: 736886 - RNA, 19 nt, Artificial Sequence
  Description of Artificial Sequence: Synthetic oligonucleotide
uacucuagggagucaccuu

SEQ ID NO: 736887 - RNA, 19 nt, Artificial Sequence
  Description of Artificial Sequence: Synthetic oligonucleotide
auagcaauucugaccuggu

SEQ ID NO: 736888 - RNA, 19 nt, Artificial Sequence
  Description of Artificial Sequence: Synthetic oligonucleotide
aggcgaacauccagugugg

SEQ ID NO: 736889 - RNA, 19 nt, Artificial Sequence
  Description of Artificial Sequence: Synthetic oligonucleotide
guguccguugugcagccca

SEQ ID NO: 736890 - RNA, 19 nt, Artificial Sequence
  Description of Artificial Sequence: Synthetic oligonucleotide
cucgcgaugaggguuguga

SEQ ID NO: 736891 - RNA, 19 nt, Artificial Sequence
  Description of Artificial Sequence: Synthetic oligonucleotide
gugaacuaucugauuguca

SEQ ID NO: 736892 - RNA, 19 nt, Artificial Sequence
  Description of Artificial Sequence: Synthetic oligonucleotide
agccaauuguuuugcucau

SEQ ID NO: 736893 - RNA, 19 nt, Artificial Sequence
  Description of Artificial Sequence: Synthetic oligonucleotide
ugacgacggcuugaggucu

SEQ ID NO: 736894 - RNA, 19 nt, Artificial Sequence
  Description of Artificial Sequence: Synthetic oligonucleotide
ccgacugauaguguccucg

SEQ ID NO: 736895 - RNA, 19 nt, Artificial Sequence
  Description of Artificial Sequence: Synthetic oligonucleotide
aggucuacggacaguuuga

SEQ ID NO: 736896 - RNA, 19 nt, Artificial Sequence
  Description of Artificial Sequence: Synthetic oligonucleotide
ggucucgaccugcauagac

SEQ ID NO: 736897 - RNA, 19 nt, Artificial Sequence
  Description of Artificial Sequence: Synthetic oligonucleotide
uucagggaccggugagcgc

SEQ ID NO: 736898 - RNA, 19 nt, Artificial Sequence
  Description of Artificial Sequence: Synthetic oligonucleotide
cucaagcauaaagaagcca

SEQ ID NO: 736899 - RNA, 19 nt, Artificial Sequence
  Description of Artificial Sequence: Synthetic oligonucleotide
aaucaucgcgugugacaua

SEQ ID NO: 736900 - RNA, 19 nt, Artificial Sequence
  Description of Artificial Sequence: Synthetic oligonucleotide
uacggacaguuugauucga

SEQ ID NO: 736901 - RNA, 19 nt, Artificial Sequence
  Description of Artificial Sequence: Synthetic oligonucleotide
ucgcgaugaggguugugau

SEQ ID NO: 736902 - RNA, 19 nt, Artificial Sequence
  Description of Artificial Sequence: Synthetic oligonucleotide
uguccguugugcagcccaa

SEQ ID NO: 736903 - RNA, 19 nt, Artificial Sequence
  Description of Artificial Sequence: Synthetic oligonucleotide
accgacugauaguguccuc

SEQ ID NO: 736904 - RNA, 19 nt, Artificial Sequence
  Description of Artificial Sequence: Synthetic oligonucleotide
ucucaguacacggguuuau

SEQ ID NO: 736905 - RNA, 19 nt, Artificial Sequence
  Description of Artificial Sequence: Synthetic oligonucleotide
gugauguguucccauuuua

SEQ ID NO: 736906 - RNA, 19 nt, Artificial Sequence
  Description of Artificial Sequence: Synthetic oligonucleotide
cuagggagucaccuucaca

SEQ ID NO: 736907 - RNA, 19 nt, Artificial Sequence
  Description of Artificial Sequence: Synthetic oligonucleotide
gcaaggcuaaaguguggcc

SEQ ID NO: 736908 - RNA, 19 nt, Artificial Sequence
  Description of Artificial Sequence: Synthetic oligonucleotide
guauaccuuucuugucauc

SEQ ID NO: 736909 - RNA, 19 nt, Artificial Sequence
  Description of Artificial Sequence: Synthetic oligonucleotide
caaggcuaaaguguggccu

SEQ ID NO: 736910 - RNA, 19 nt, Artificial Sequence
  Description of Artificial Sequence: Synthetic oligonucleotide
gccaaauagauauugucuu

SEQ ID NO: 736911 - RNA, 19 nt, Artificial Sequence
  Description of Artificial Sequence: Synthetic oligonucleotide
caucauauucguagucaua

SEQ ID NO: 736912 - RNA, 19 nt, Artificial Sequence
  Description of Artificial Sequence: Synthetic oligonucleotide
acgacucugucaccguuuu

SEQ ID NO: 736913 - RNA, 19 nt, Artificial Sequence
  Description of Artificial Sequence: Synthetic oligonucleotide
ugaccugguugcucagguc

SEQ ID NO: 736914 - RNA, 19 nt, Artificial Sequence
  Description of Artificial Sequence: Synthetic oligonucleotide
caaacucucugaggcucgc

SEQ ID NO: 736915 - RNA, 19 nt, Artificial Sequence
  Description of Artificial Sequence: Synthetic oligonucleotide
ugaggucuacggacaguuu

SEQ ID NO: 736916 - RNA, 19 nt, Artificial Sequence
  Description of Artificial Sequence: Synthetic oligonucleotide
guauagaagccaauuguuu

SEQ ID NO: 736917 - RNA, 19 nt, Artificial Sequence
  Description of Artificial Sequence: Synthetic oligonucleotide
agggugccuguaaaggucu

SEQ ID NO: 736918 - RNA, 19 nt, Artificial Sequence
  Description of Artificial Sequence: Synthetic oligonucleotide
ggugaacuaucugauuguc

SEQ ID NO: 736919 - RNA, 19 nt, Artificial Sequence
  Description of Artificial Sequence: Synthetic oligonucleotide
gaugaggguugugaugugu

SEQ ID NO: 736920 - RNA, 19 nt, Artificial Sequence
  Description of Artificial Sequence: Synthetic oligonucleotide
agaaaccgacugauagugu

SEQ ID NO: 736921 - RNA, 19 nt, Artificial Sequence
  Description of Artificial Sequence: Synthetic oligonucleotide
uuucggaugcaaggcuaaa

SEQ ID NO: 736922 - RNA, 19 nt, Artificial Sequence
  Description of Artificial Sequence: Synthetic oligonucleotide
ccaaggcgaacauccagug

SEQ ID NO: 736923 - RNA, 19 nt, Artificial Sequence
  Description of Artificial Sequence: Synthetic oligonucleotide
accugguugcucaggucuc

SEQ ID NO: 736924 - RNA, 19 nt, Artificial Sequence
  Description of Artificial Sequence: Synthetic oligonucleotide
aguguccguugugcagccc

SEQ ID NO: 736925 - RNA, 19 nt, Artificial Sequence
  Description of Artificial Sequence: Synthetic oligonucleotide
ccacuaguguguaauccuc

SEQ ID NO: 736926 - RNA, 19 nt, Artificial Sequence
  Description of Artificial Sequence: Synthetic oligonucleotide
gggacuuguuccaugaaua

SEQ ID NO: 736927 - RNA, 19 nt, Artificial Sequence
  Description of Artificial Sequence: Synthetic oligonucleotide
cucuuuccguacuaacucu

SEQ ID NO: 736928 - RNA, 19 nt, Artificial Sequence
  Description of Artificial Sequence: Synthetic oligonucleotide
cuccucgacuucguuguug

SEQ ID NO: 736929 - RNA, 19 nt, Artificial Sequence
  Description of Artificial Sequence: Synthetic oligonucleotide
auaucccggugaacuaucu

SEQ ID NO: 736930 - RNA, 19 nt, Artificial Sequence
  Description of Artificial Sequence: Synthetic oligonucleotide
aggaagcacgugccaaaua

SEQ ID NO: 736931 - RNA, 19 nt, Artificial Sequence
  Description of Artificial Sequence: Synthetic oligonucleotide
cugguagauuuugguuggc

SEQ ID NO: 736932 - RNA, 19 nt, Artificial Sequence
  Description of Artificial Sequence: Synthetic oligonucleotide
ggaccggugagcgcucugg

SEQ ID NO: 736933 - RNA, 19 nt, Artificial Sequence
  Description of Artificial Sequence: Synthetic oligonucleotide
cucuucggugaugguauuc

SEQ ID NO: 736934 - RNA, 19 nt, Artificial Sequence
  Description of Artificial Sequence: Synthetic oligonucleotide
cugggaaucaugggauaca

SEQ ID NO: 736935 - RNA, 19 nt, Artificial Sequence
  Description of Artificial Sequence: Synthetic oligonucleotide
acacggguuuaugccagca

SEQ ID NO: 736936 - RNA, 19 nt, Artificial Sequence
  Description of Artificial Sequence: Synthetic oligonucleotide
ggccccauuuagaacgaag

SEQ ID NO: 736937 - RNA, 19 nt, Artificial Sequence
  Description of Artificial Sequence: Synthetic oligonucleotide
agcccgccuuucgcuaucc

SEQ ID NO: 736938 - RNA, 19 nt, Artificial Sequence
  Description of Artificial Sequence: Synthetic oligonucleotide
cugauagaggaagcacuga

SEQ ID NO: 736939 - RNA, 19 nt, Artificial Sequence
  Description of Artificial Sequence: Synthetic oligonucleotide
cggaugcaaggcuaaagug

SEQ ID NO: 736940 - RNA, 19 nt, Artificial Sequence
  Description of Artificial Sequence: Synthetic oligonucleotide
caugcaggggcugaguagu

SEQ ID NO: 736941 - RNA, 19 nt, Artificial Sequence
  Description of Artificial Sequence: Synthetic oligonucleotide
cucgagguccuuuaucgau

SEQ ID NO: 736942 - RNA, 19 nt, Artificial Sequence
  Description of Artificial Sequence: Synthetic oligonucleotide
ugaccgcauccuggaaacc

SEQ ID NO: 736943 - RNA, 19 nt, Artificial Sequence
  Description of Artificial Sequence: Synthetic oligonucleotide
gccaccgcauccucaauga

SEQ ID NO: 736944 - RNA, 19 nt, Artificial Sequence
  Description of Artificial Sequence: Synthetic oligonucleotide
ggauacaguggagcugagc

SEQ ID NO: 736945 - RNA, 19 nt, Artificial Sequence
  Description of Artificial Sequence: Synthetic oligonucleotide
ucaucgcgugugacauagu

SEQ ID NO: 736946 - RNA, 19 nt, Artificial Sequence
  Description of Artificial Sequence: Synthetic oligonucleotide
gacuaucccauaagugccu

SEQ ID NO: 736947 - RNA, 19 nt, Artificial Sequence
  Description of Artificial Sequence: Synthetic oligonucleotide
uccgcacgaccuuguccug

SEQ ID NO: 736948 - RNA, 19 nt, Artificial Sequence
  Description of Artificial Sequence: Synthetic oligonucleotide
uagccucgagguccuuuau

SEQ ID NO: 736949 - RNA, 19 nt, Artificial Sequence
  Description of Artificial Sequence: Synthetic oligonucleotide
aggagugcuuguaacucuu

SEQ ID NO: 736950 - RNA, 19 nt, Artificial Sequence
  Description of Artificial Sequence: Synthetic oligonucleotide
acuuaagcuucagguguuu

SEQ ID NO: 736951 - RNA, 19 nt, Artificial Sequence
  Description of Artificial Sequence: Synthetic oligonucleotide
cuucgacauccaagucuuc

SEQ ID NO: 736952 - RNA, 19 nt, Artificial Sequence
  Description of Artificial Sequence: Synthetic oligonucleotide
acgacggcuugaggucuac

SEQ ID NO: 736953 - RNA, 19 nt, Artificial Sequence
  Description of Artificial Sequence: Synthetic oligonucleotide
aggcucgcgaugaggguug

SEQ ID NO: 736954 - RNA, 19 nt, Artificial Sequence
  Description of Artificial Sequence: Synthetic oligonucleotide
ucucuucggugaugguauu

SEQ ID NO: 736955 - RNA, 19 nt, Artificial Sequence
  Description of Artificial Sequence: Synthetic oligonucleotide
cgaaagucaacgauggccu

SEQ ID NO: 736956 - RNA, 19 nt, Artificial Sequence
  Description of Artificial Sequence: Synthetic oligonucleotide
cacucccgagguagccacc

SEQ ID NO: 736957 - RNA, 19 nt, Artificial Sequence
  Description of Artificial Sequence: Synthetic oligonucleotide
gucucgaccugcauagacu

SEQ ID NO: 736958 - RNA, 19 nt, Artificial Sequence
  Description of Artificial Sequence: Synthetic oligonucleotide
gcgugugacauaguagaga

SEQ ID NO: 736959 - RNA, 19 nt, Artificial Sequence
  Description of Artificial Sequence: Synthetic oligonucleotide
ggacuuguuccaugaauau

SEQ ID NO: 736960 - RNA, 19 nt, Artificial Sequence
  Description of Artificial Sequence: Synthetic oligonucleotide
ccccauuuagaacgaagga

SEQ ID NO: 736961 - RNA, 19 nt, Artificial Sequence
  Description of Artificial Sequence: Synthetic oligonucleotide
gcgcucugggaaucauggg

SEQ ID NO: 736962 - RNA, 19 nt, Artificial Sequence
  Description of Artificial Sequence: Synthetic oligonucleotide
cucugggaaucaugggaua

SEQ ID NO: 736963 - RNA, 19 nt, Artificial Sequence
  Description of Artificial Sequence: Synthetic oligonucleotide
ucuccucgacuucguuguu

SEQ ID NO: 736964 - RNA, 19 nt, Artificial Sequence
  Description of Artificial Sequence: Synthetic oligonucleotide
gccaguaaguucagaaucu

SEQ ID NO: 736965 - RNA, 19 nt, Artificial Sequence
  Description of Artificial Sequence: Synthetic oligonucleotide
cacggguuuaugccagcaa

SEQ ID NO: 736966 - RNA, 19 nt, Artificial Sequence
  Description of Artificial Sequence: Synthetic oligonucleotide
gccucaacucuggaaccag

SEQ ID NO: 736967 - RNA, 19 nt, Artificial Sequence
  Description of Artificial Sequence: Synthetic oligonucleotide
cccauaagugccuuuccua

SEQ ID NO: 736968 - RNA, 19 nt, Artificial Sequence
  Description of Artificial Sequence: Synthetic oligonucleotide
gcagggugccuguaaaggu

SEQ ID NO: 736969 - RNA, 19 nt, Artificial Sequence
  Description of Artificial Sequence: Synthetic oligonucleotide
gucucaguacacggguuua

SEQ ID NO: 736970 - RNA, 19 nt, Artificial Sequence
  Description of Artificial Sequence: Synthetic oligonucleotide
ccucaaugacgacggcuug

SEQ ID NO: 736971 - RNA, 19 nt, Artificial Sequence
  Description of Artificial Sequence: Synthetic oligonucleotide
acggacaguuugauucgaa

SEQ ID NO: 736972 - RNA, 19 nt, Artificial Sequence
  Description of Artificial Sequence: Synthetic oligonucleotide
cccuuuauaucccggugaa

SEQ ID NO: 736973 - RNA, 19 nt, Artificial Sequence
  Description of Artificial Sequence: Synthetic oligonucleotide
aucuauugguugggacuua

SEQ ID NO: 736974 - RNA, 19 nt, Artificial Sequence
  Description of Artificial Sequence: Synthetic oligonucleotide
gcuauccuuucucaagcau

SEQ ID NO: 736975 - RNA, 19 nt, Artificial Sequence
  Description of Artificial Sequence: Synthetic oligonucleotide
ccguacuaacucuucaagu

SEQ ID NO: 736976 - RNA, 19 nt, Artificial Sequence
  Description of Artificial Sequence: Synthetic oligonucleotide
gaggcucgcgaugaggguu

SEQ ID NO: 736977 - RNA, 19 nt, Artificial Sequence
  Description of Artificial Sequence: Synthetic oligonucleotide
cagaauugugaagcacaua

SEQ ID NO: 736978 - RNA, 19 nt, Artificial Sequence
  Description of Artificial Sequence: Synthetic oligonucleotide
ggucucaguacacggguuu

SEQ ID NO: 736979 - RNA, 19 nt, Artificial Sequence
  Description of Artificial Sequence: Synthetic oligonucleotide
aggucucaguacacggguu

SEQ ID NO: 736980 - RNA, 19 nt, Artificial Sequence
  Description of Artificial Sequence: Synthetic oligonucleotide
cccagggauaucuauuggu

SEQ ID NO: 736981 - RNA, 19 nt, Artificial Sequence
  Description of Artificial Sequence: Synthetic oligonucleotide
ccggugagcgcucugggaa

SEQ ID NO: 736982 - RNA, 19 nt, Artificial Sequence
  Description of Artificial Sequence: Synthetic oligonucleotide
gugagcgcucugggaauca

SEQ ID NO: 736983 - RNA, 19 nt, Artificial Sequence
  Description of Artificial Sequence: Synthetic oligonucleotide
agguuccgcacgaccuugu

SEQ ID NO: 736984 - RNA, 19 nt, Artificial Sequence
  Description of Artificial Sequence: Synthetic oligonucleotide
ggugagcgcucugggaauc

SEQ ID NO: 736985 - RNA, 19 nt, Artificial Sequence
  Description of Artificial Sequence: Synthetic oligonucleotide
ccagggauaucuauugguu

SEQ ID NO: 736986 - RNA, 19 nt, Artificial Sequence
  Description of Artificial Sequence: Synthetic oligonucleotide
gucuacggacaguuugauu

SEQ ID NO: 736987 - RNA, 19 nt, Artificial Sequence
  Description of Artificial Sequence: Synthetic oligonucleotide
ccgcacgaccuuguccugg

SEQ ID NO: 736988 - RNA, 19 nt, Artificial Sequence
  Description of Artificial Sequence: Synthetic oligonucleotide
ccucgagguccuuuaucga

SEQ ID NO: 736989 - RNA, 19 nt, Artificial Sequence
  Description of Artificial Sequence: Synthetic oligonucleotide
ggguagcccgccuuucgcu

SEQ ID NO: 736990 - RNA, 19 nt, Artificial Sequence
  Description of Artificial Sequence: Synthetic oligonucleotide
gacgacggcuugaggucua

SEQ ID NO: 736991 - RNA, 19 nt, Artificial Sequence
  Description of Artificial Sequence: Synthetic oligonucleotide
agggaccggugagcgcucu

SEQ ID NO: 736992 - RNA, 19 nt, Artificial Sequence
  Description of Artificial Sequence: Synthetic oligonucleotide
ccagugugguuugauguua

SEQ ID NO: 736993 - RNA, 19 nt, Artificial Sequence
  Description of Artificial Sequence: Synthetic oligonucleotide
guggaggguagcccgccuu

SEQ ID NO: 736994 - RNA, 19 nt, Artificial Sequence
  Description of Artificial Sequence: Synthetic oligonucleotide
gggaccggugagcgcucug

SEQ ID NO: 736995 - RNA, 19 nt, Artificial Sequence
  Description of Artificial Sequence: Synthetic oligonucleotide
cgcuauccuuucucaagca

SEQ ID NO: 736996 - RNA, 19 nt, Artificial Sequence
  Description of Artificial Sequence: Synthetic oligonucleotide
cucgaccugcauagacuau

SEQ ID NO: 736997 - RNA, 19 nt, Artificial Sequence
  Description of Artificial Sequence: Synthetic oligonucleotide
cacgugccaaauagauauu

SEQ ID NO: 736998 - RNA, 19 nt, Artificial Sequence
  Description of Artificial Sequence: Synthetic oligonucleotide
augcaggggcugaguagua

SEQ ID NO: 736999 - RNA, 19 nt, Artificial Sequence
  Description of Artificial Sequence: Synthetic oligonucleotide
cgagguccuuuaucgauua

SEQ ID NO: 737000 - RNA, 19 nt, Artificial Sequence
  Description of Artificial Sequence: Synthetic oligonucleotide
gggaaucaugggauacagu

SEQ ID NO: 737001 - RNA, 19 nt, Artificial Sequence
  Description of Artificial Sequence: Synthetic oligonucleotide
ggcuaaaguguggccucaa

SEQ ID NO: 737002 - RNA, 19 nt, Artificial Sequence
  Description of Artificial Sequence: Synthetic oligonucleotide
ggucuacggacaguuugau

SEQ ID NO: 737003 - RNA, 19 nt, Artificial Sequence
  Description of Artificial Sequence: Synthetic oligonucleotide
cggugaacuaucugauugu

SEQ ID NO: 737004 - RNA, 19 nt, Artificial Sequence
  Description of Artificial Sequence: Synthetic oligonucleotide
cggacaguuugauucgaau

SEQ ID NO: 737005 - RNA, 19 nt, Artificial Sequence
  Description of Artificial Sequence: Synthetic oligonucleotide
cgacggcuugaggucuacg

SEQ ID NO: 737006 - RNA, 19 nt, Artificial Sequence
  Description of Artificial Sequence: Synthetic oligonucleotide
cagcgugcacagcauccuu

SEQ ID NO: 737007 - RNA, 19 nt, Artificial Sequence
  Description of Artificial Sequence: Synthetic oligonucleotide
gcucgcgaugaggguugug

SEQ ID NO: 737008 - RNA, 19 nt, Artificial Sequence
  Description of Artificial Sequence: Synthetic oligonucleotide
cccgagguagccaccgcau

SEQ ID NO: 737009 - RNA, 19 nt, Artificial Sequence
  Description of Artificial Sequence: Synthetic oligonucleotide
cccgccuuucgcuauccuu

SEQ ID NO: 737010 - RNA, 19 nt, Artificial Sequence
  Description of Artificial Sequence: Synthetic oligonucleotide
cccggugaacuaucugauu

SEQ ID NO: 737011 - RNA, 19 nt, Artificial Sequence
  Description of Artificial Sequence: Synthetic oligonucleotide
cgacuucguuguugauaga

SEQ ID NO: 737012 - RNA, 19 nt, Artificial Sequence
  Description of Artificial Sequence: Synthetic oligonucleotide
cgugcucacucccgaggua

SEQ ID NO: 737013 - RNA, 19 nt, Artificial Sequence
  Description of Artificial Sequence: Synthetic oligonucleotide
cgcacgaccuuguccuggu

SEQ ID NO: 737014 - RNA, 19 nt, Artificial Sequence
  Description of Artificial Sequence: Synthetic oligonucleotide
cccuuagucugaggcacuu

SEQ ID NO: 737015 - RNA, 19 nt, Artificial Sequence
  Description of Artificial Sequence: Synthetic oligonucleotide
gcccgccuuucgcuauccu

SEQ ID NO: 737016 - RNA, 19 nt, Artificial Sequence
  Description of Artificial Sequence: Synthetic oligonucleotide
ccuuagucugaggcacuuu

SEQ ID NO: 737017 - RNA, 19 nt, Artificial Sequence
  Description of Artificial Sequence: Synthetic oligonucleotide
cggugagcgcucugggaau

SEQ ID NO: 737018 - RNA, 19 nt, Artificial Sequence
  Description of Artificial Sequence: Synthetic oligonucleotide
ggcucgcgaugaggguugu

SEQ ID NO: 737019 - RNA, 19 nt, Artificial Sequence
  Description of Artificial Sequence: Synthetic oligonucleotide
uauuuaaccuuuaauauac

SEQ ID NO: 737020 - RNA, 19 nt, Artificial Sequence
  Description of Artificial Sequence: Synthetic oligonucleotide
uuaauguagacucuuuucc

SEQ ID NO: 737021 - RNA, 19 nt, Artificial Sequence
  Description of Artificial Sequence: Synthetic oligonucleotide
guaaugaugaaaacgaugg

SEQ ID NO: 737022 - RNA, 19 nt, Artificial Sequence
  Description of Artificial Sequence: Synthetic oligonucleotide
ucauguaguaccaauacug

SEQ ID NO: 737023 - RNA, 19 nt, Artificial Sequence
  Description of Artificial Sequence: Synthetic oligonucleotide
aauaagaccauccccucuc

SEQ ID NO: 737024 - RNA, 19 nt, Artificial Sequence
  Description of Artificial Sequence: Synthetic oligonucleotide
uaagaauaaggaaugugag

SEQ ID NO: 737025 - RNA, 19 nt, Artificial Sequence
  Description of Artificial Sequence: Synthetic oligonucleotide
aauaacaacuaguugccgu

SEQ ID NO: 737026 - RNA, 19 nt, Artificial Sequence
  Description of Artificial Sequence: Synthetic oligonucleotide
uugguuuaaaggcaacugg

SEQ ID NO: 737027 - RNA, 19 nt, Artificial Sequence
  Description of Artificial Sequence: Synthetic oligonucleotide
auagaaccaggguuuaucc

SEQ ID NO: 737028 - RNA, 19 nt, Artificial Sequence
  Description of Artificial Sequence: Synthetic oligonucleotide
uucuuaagaauaaggaaug

SEQ ID NO: 737029 - RNA, 19 nt, Artificial Sequence
  Description of Artificial Sequence: Synthetic oligonucleotide
auguucaauaaauaacaac

SEQ ID NO: 737030 - RNA, 19 nt, Artificial Sequence
  Description of Artificial Sequence: Synthetic oligonucleotide
aaaaggagaguuaauguag

SEQ ID NO: 737031 - RNA, 19 nt, Artificial Sequence
  Description of Artificial Sequence: Synthetic oligonucleotide
uguagcacugccaucauga

SEQ ID NO: 737032 - RNA, 19 nt, Artificial Sequence
  Description of Artificial Sequence: Synthetic oligonucleotide
auaaccaaccuucucuuac

SEQ ID NO: 737033 - RNA, 19 nt, Artificial Sequence
  Description of Artificial Sequence: Synthetic oligonucleotide
ucgaaugacaagaaagacc

SEQ ID NO: 737034 - RNA, 19 nt, Artificial Sequence
  Description of Artificial Sequence: Synthetic oligonucleotide
ugauuguuauugaggaugg

SEQ ID NO: 737035 - RNA, 19 nt, Artificial Sequence
  Description of Artificial Sequence: Synthetic oligonucleotide
uucgcuugacaucagaagc

SEQ ID NO: 737036 - RNA, 19 nt, Artificial Sequence
  Description of Artificial Sequence: Synthetic oligonucleotide
uaucgaaugacaagaaaga

SEQ ID NO: 737037 - RNA, 19 nt, Artificial Sequence
  Description of Artificial Sequence: Synthetic oligonucleotide
aauccuuucgcuugacauc

SEQ ID NO: 737038 - RNA, 19 nt, Artificial Sequence
  Description of Artificial Sequence: Synthetic oligonucleotide
uccaguuaugaacuugugg

SEQ ID NO: 737039 - RNA, 19 nt, Artificial Sequence
  Description of Artificial Sequence: Synthetic oligonucleotide
uuuauccacaaugacagcc

SEQ ID NO: 737040 - RNA, 19 nt, Artificial Sequence
  Description of Artificial Sequence: Synthetic oligonucleotide
auaagaguagcuuggaaga

SEQ ID NO: 737041 - RNA, 19 nt, Artificial Sequence
  Description of Artificial Sequence: Synthetic oligonucleotide
auuagauaggagccgacuc

SEQ ID NO: 737042 - RNA, 19 nt, Artificial Sequence
  Description of Artificial Sequence: Synthetic oligonucleotide
aaauccuuucgcuugacau

SEQ ID NO: 737043 - RNA, 19 nt, Artificial Sequence
  Description of Artificial Sequence: Synthetic oligonucleotide
agaauucuuaagaauaagg

SEQ ID NO: 737044 - RNA, 19 nt, Artificial Sequence
  Description of Artificial Sequence: Synthetic oligonucleotide
uaaugugggaggcagcuag

SEQ ID NO: 737045 - RNA, 19 nt, Artificial Sequence
  Description of Artificial Sequence: Synthetic oligonucleotide
uguucuaaggugacauugg

SEQ ID NO: 737046 - RNA, 19 nt, Artificial Sequence
  Description of Artificial Sequence: Synthetic oligonucleotide
cuagaagauauaaccaacc

SEQ ID NO: 737047 - RNA, 19 nt, Artificial Sequence
  Description of Artificial Sequence: Synthetic oligonucleotide
guaucgaaugacaagaaag

SEQ ID NO: 737048 - RNA, 19 nt, Artificial Sequence
  Description of Artificial Sequence: Synthetic oligonucleotide
acauuaacaguacauuuug

SEQ ID NO: 737049 - RNA, 19 nt, Artificial Sequence
  Description of Artificial Sequence: Synthetic oligonucleotide
ucguguauuaaugugggag

SEQ ID NO: 737050 - RNA, 19 nt, Artificial Sequence
  Description of Artificial Sequence: Synthetic oligonucleotide
gaagaaguaauagccaaag

SEQ ID NO: 737051 - RNA, 19 nt, Artificial Sequence
  Description of Artificial Sequence: Synthetic oligonucleotide
uuaacaguacauuuugguc

SEQ ID NO: 737052 - RNA, 19 nt, Artificial Sequence
  Description of Artificial Sequence: Synthetic oligonucleotide
uagaaggagaguucaauca

SEQ ID NO: 737053 - RNA, 19 nt, Artificial Sequence
  Description of Artificial Sequence: Synthetic oligonucleotide
uauaacugaaaccccaaau

SEQ ID NO: 737054 - RNA, 19 nt, Artificial Sequence
  Description of Artificial Sequence: Synthetic oligonucleotide
gauauaaccaaccuucucu

SEQ ID NO: 737055 - RNA, 19 nt, Artificial Sequence
  Description of Artificial Sequence: Synthetic oligonucleotide
ggagaguucaaucauguag

SEQ ID NO: 737056 - RNA, 19 nt, Artificial Sequence
  Description of Artificial Sequence: Synthetic oligonucleotide
ugggguggccauuagauag

SEQ ID NO: 737057 - RNA, 19 nt, Artificial Sequence
  Description of Artificial Sequence: Synthetic oligonucleotide
aguuaaaaguagcucagcu

SEQ ID NO: 737058 - RNA, 19 nt, Artificial Sequence
  Description of Artificial Sequence: Synthetic oligonucleotide
uuaccugaggauaggcugg

SEQ ID NO: 737059 - RNA, 19 nt, Artificial Sequence
  Description of Artificial Sequence: Synthetic oligonucleotide
guggccauuagauaggagc

SEQ ID NO: 737060 - RNA, 19 nt, Artificial Sequence
  Description of Artificial Sequence: Synthetic oligonucleotide
agccacauaaagcucaaag

SEQ ID NO: 737061 - RNA, 19 nt, Artificial Sequence
  Description of Artificial Sequence: Synthetic oligonucleotide
aaacagcuagcucagaauu

SEQ ID NO: 737062 - RNA, 19 nt, Artificial Sequence
  Description of Artificial Sequence: Synthetic oligonucleotide
acucugccgagacaaaagc

SEQ ID NO: 737063 - RNA, 19 nt, Artificial Sequence
  Description of Artificial Sequence: Synthetic oligonucleotide
uuuccaguuaugaacuugu

SEQ ID NO: 737064 - RNA, 19 nt, Artificial Sequence
  Description of Artificial Sequence: Synthetic oligonucleotide
auaggagccgacucuuugc

SEQ ID NO: 737065 - RNA, 19 nt, Artificial Sequence
  Description of Artificial Sequence: Synthetic oligonucleotide
cucaaagaaguaucgaaug

SEQ ID NO: 737066 - RNA, 19 nt, Artificial Sequence
  Description of Artificial Sequence: Synthetic oligonucleotide
cuuaccugaggauaggcug

SEQ ID NO: 737067 - RNA, 19 nt, Artificial Sequence
  Description of Artificial Sequence: Synthetic oligonucleotide
gaaccagcguucuaucugg

SEQ ID NO: 737068 - RNA, 19 nt, Artificial Sequence
  Description of Artificial Sequence: Synthetic oligonucleotide
uuagauaggagccgacucu

SEQ ID NO: 737069 - RNA, 19 nt, Artificial Sequence
  Description of Artificial Sequence: Synthetic oligonucleotide
uuucgcuugacaucagaag

SEQ ID NO: 737070 - RNA, 19 nt, Artificial Sequence
  Description of Artificial Sequence: Synthetic oligonucleotide
ugggccaugcgcaaaauga

SEQ ID NO: 737071 - RNA, 19 nt, Artificial Sequence
  Description of Artificial Sequence: Synthetic oligonucleotide
ggagaguuaauguagacuc

SEQ ID NO: 737072 - RNA, 19 nt, Artificial Sequence
  Description of Artificial Sequence: Synthetic oligonucleotide
uggccauuagauaggagcc

SEQ ID NO: 737073 - RNA, 19 nt, Artificial Sequence
  Description of Artificial Sequence: Synthetic oligonucleotide
aaggcaugauaaccagucg

SEQ ID NO: 737074 - RNA, 19 nt, Artificial Sequence
  Description of Artificial Sequence: Synthetic oligonucleotide
aaagaaguaucgaaugaca

SEQ ID NO: 737075 - RNA, 19 nt, Artificial Sequence
  Description of Artificial Sequence: Synthetic oligonucleotide
ugugaguuauaagaguagc

SEQ ID NO: 737076 - RNA, 19 nt, Artificial Sequence
  Description of Artificial Sequence: Synthetic oligonucleotide
aaugugaguuauaagagua

SEQ ID NO: 737077 - RNA, 19 nt, Artificial Sequence
  Description of Artificial Sequence: Synthetic oligonucleotide
agauauaaccaaccuucuc

SEQ ID NO: 737078 - RNA, 19 nt, Artificial Sequence
  Description of Artificial Sequence: Synthetic oligonucleotide
uaggaugauuguuauugag

SEQ ID NO: 737079 - RNA, 19 nt, Artificial Sequence
  Description of Artificial Sequence: Synthetic oligonucleotide
aaauaagaccauccccucu

SEQ ID NO: 737080 - RNA, 19 nt, Artificial Sequence
  Description of Artificial Sequence: Synthetic oligonucleotide
uccgucuccucuccgagcg

SEQ ID NO: 737081 - RNA, 19 nt, Artificial Sequence
  Description of Artificial Sequence: Synthetic oligonucleotide
ugaaauggucccuugcgga

SEQ ID NO: 737082 - RNA, 19 nt, Artificial Sequence
  Description of Artificial Sequence: Synthetic oligonucleotide
ucugccgagacaaaagcuc

SEQ ID NO: 737083 - RNA, 19 nt, Artificial Sequence
  Description of Artificial Sequence: Synthetic oligonucleotide
aucgaaugacaagaaagac

SEQ ID NO: 737084 - RNA, 19 nt, Artificial Sequence
  Description of Artificial Sequence: Synthetic oligonucleotide
ugaaucuccaacuggcuuc

SEQ ID NO: 737085 - RNA, 19 nt, Artificial Sequence
  Description of Artificial Sequence: Synthetic oligonucleotide
aguaaugaugaaaacgaug

SEQ ID NO: 737086 - RNA, 19 nt, Artificial Sequence
  Description of Artificial Sequence: Synthetic oligonucleotide
agguuaaguucacaggcag

SEQ ID NO: 737087 - RNA, 19 nt, Artificial Sequence
  Description of Artificial Sequence: Synthetic oligonucleotide
aguuaaacaucuuggcgga

SEQ ID NO: 737088 - RNA, 19 nt, Artificial Sequence
  Description of Artificial Sequence: Synthetic oligonucleotide
uauaccagcgugcagugua

SEQ ID NO: 737089 - RNA, 19 nt, Artificial Sequence
  Description of Artificial Sequence: Synthetic oligonucleotide
uugcggaaaugccaggucc

SEQ ID NO: 737090 - RNA, 19 nt, Artificial Sequence
  Description of Artificial Sequence: Synthetic oligonucleotide
aggaugauuguuauugagg

SEQ ID NO: 737091 - RNA, 19 nt, Artificial Sequence
  Description of Artificial Sequence: Synthetic oligonucleotide
uacugagaagggacgaugc

SEQ ID NO: 737092 - RNA, 19 nt, Artificial Sequence
  Description of Artificial Sequence: Synthetic oligonucleotide
aagaaguaauagccaaaga

SEQ ID NO: 737093 - RNA, 19 nt, Artificial Sequence
  Description of Artificial Sequence: Synthetic oligonucleotide
agguuggcuaguuucuugg

SEQ ID NO: 737094 - RNA, 19 nt, Artificial Sequence
  Description of Artificial Sequence: Synthetic oligonucleotide
uccuuaaaauccuuucgcu

SEQ ID NO: 737095 - RNA, 19 nt, Artificial Sequence
  Description of Artificial Sequence: Synthetic oligonucleotide
guauuaaugugggaggcag

SEQ ID NO: 737096 - RNA, 19 nt, Artificial Sequence
  Description of Artificial Sequence: Synthetic oligonucleotide
ugucccuauaaagggaagg

SEQ ID NO: 737097 - RNA, 19 nt, Artificial Sequence
  Description of Artificial Sequence: Synthetic oligonucleotide
ugaguuauaagaguagcuu

SEQ ID NO: 737098 - RNA, 19 nt, Artificial Sequence
  Description of Artificial Sequence: Synthetic oligonucleotide
ccuuuaacauuucaggagg

SEQ ID NO: 737099 - RNA, 19 nt, Artificial Sequence
  Description of Artificial Sequence: Synthetic oligonucleotide
aacuaguugccguucuacu

SEQ ID NO: 737100 - RNA, 19 nt, Artificial Sequence
  Description of Artificial Sequence: Synthetic oligonucleotide
ucuuaaggaggagaaaagu

SEQ ID NO: 737101 - RNA, 19 nt, Artificial Sequence
  Description of Artificial Sequence: Synthetic oligonucleotide
agaagauauaaccaaccuu

SEQ ID NO: 737102 - RNA, 19 nt, Artificial Sequence
  Description of Artificial Sequence: Synthetic oligonucleotide
aaccagucgaguaaugaug

SEQ ID NO: 737103 - RNA, 19 nt, Artificial Sequence
  Description of Artificial Sequence: Synthetic oligonucleotide
cucaagucauagaaccagg

SEQ ID NO: 737104 - RNA, 19 nt, Artificial Sequence
  Description of Artificial Sequence: Synthetic oligonucleotide
uucuaaggugacauuggga

SEQ ID NO: 737105 - RNA, 19 nt, Artificial Sequence
  Description of Artificial Sequence: Synthetic oligonucleotide
aggguagagcuccaguggg

SEQ ID NO: 737106 - RNA, 19 nt, Artificial Sequence
  Description of Artificial Sequence: Synthetic oligonucleotide
uuauaagaguagcuuggaa

SEQ ID NO: 737107 - RNA, 19 nt, Artificial Sequence
  Description of Artificial Sequence: Synthetic oligonucleotide
aaaauccuuucgcuugaca

SEQ ID NO: 737108 - RNA, 19 nt, Artificial Sequence
  Description of Artificial Sequence: Synthetic oligonucleotide
gauaggagccgacucuuug

SEQ ID NO: 737109 - RNA, 19 nt, Artificial Sequence
  Description of Artificial Sequence: Synthetic oligonucleotide
aacaacuaguugccguucu

SEQ ID NO: 737110 - RNA, 19 nt, Artificial Sequence
  Description of Artificial Sequence: Synthetic oligonucleotide
agcucaaagaaguaucgaa

SEQ ID NO: 737111 - RNA, 19 nt, Artificial Sequence
  Description of Artificial Sequence: Synthetic oligonucleotide
augaaaacgauggcgaaga

SEQ ID NO: 737112 - RNA, 19 nt, Artificial Sequence
  Description of Artificial Sequence: Synthetic oligonucleotide
ucuuaccugaggauaggcu

SEQ ID NO: 737113 - RNA, 19 nt, Artificial Sequence
  Description of Artificial Sequence: Synthetic oligonucleotide
augauaaccagucgaguaa

SEQ ID NO: 737114 - RNA, 19 nt, Artificial Sequence
  Description of Artificial Sequence: Synthetic oligonucleotide
ucgcuugacaucagaagca

SEQ ID NO: 737115 - RNA, 19 nt, Artificial Sequence
  Description of Artificial Sequence: Synthetic oligonucleotide
auguucuaaggugacauug

SEQ ID NO: 737116 - RNA, 19 nt, Artificial Sequence
  Description of Artificial Sequence: Synthetic oligonucleotide
ggaugauuguuauugagga

SEQ ID NO: 737117 - RNA, 19 nt, Artificial Sequence
  Description of Artificial Sequence: Synthetic oligonucleotide
caguuaugaacuugugggc

SEQ ID NO: 737118 - RNA, 19 nt, Artificial Sequence
  Description of Artificial Sequence: Synthetic oligonucleotide
auaaagggaagguuggcua

SEQ ID NO: 737119 - RNA, 19 nt, Artificial Sequence
  Description of Artificial Sequence: Synthetic oligonucleotide
uauuaaugugggaggcagc

SEQ ID NO: 737120 - RNA, 19 nt, Artificial Sequence
  Description of Artificial Sequence: Synthetic oligonucleotide
ucccuugcggaaaugccag

SEQ ID NO: 737121 - RNA, 19 nt, Artificial Sequence
  Description of Artificial Sequence: Synthetic oligonucleotide
aaaggagaguuaauguaga

SEQ ID NO: 737122 - RNA, 19 nt, Artificial Sequence
  Description of Artificial Sequence: Synthetic oligonucleotide
accagaaguggucauacaa

SEQ ID NO: 737123 - RNA, 19 nt, Artificial Sequence
  Description of Artificial Sequence: Synthetic oligonucleotide
ggaaugugaguuauaagag

SEQ ID NO: 737124 - RNA, 19 nt, Artificial Sequence
  Description of Artificial Sequence: Synthetic oligonucleotide
aagaaguaucgaaugacaa

SEQ ID NO: 737125 - RNA, 19 nt, Artificial Sequence
  Description of Artificial Sequence: Synthetic oligonucleotide
aggcaugauaaccagucga

SEQ ID NO: 737126 - RNA, 19 nt, Artificial Sequence
  Description of Artificial Sequence: Synthetic oligonucleotide
cagguagaaauguucuaag

SEQ ID NO: 737127 - RNA, 19 nt, Artificial Sequence
  Description of Artificial Sequence: Synthetic oligonucleotide
uggucagguagaaauguuc

SEQ ID NO: 737128 - RNA, 19 nt, Artificial Sequence
  Description of Artificial Sequence: Synthetic oligonucleotide
ugggauagcccucccaaac

SEQ ID NO: 737129 - RNA, 19 nt, Artificial Sequence
  Description of Artificial Sequence: Synthetic oligonucleotide
caaaccaggagaagcugag

SEQ ID NO: 737130 - RNA, 19 nt, Artificial Sequence
  Description of Artificial Sequence: Synthetic oligonucleotide
agucggucccaccagaagu

SEQ ID NO: 737131 - RNA, 19 nt, Artificial Sequence
  Description of Artificial Sequence: Synthetic oligonucleotide
aaugucccuauaaagggaa

SEQ ID NO: 737132 - RNA, 19 nt, Artificial Sequence
  Description of Artificial Sequence: Synthetic oligonucleotide
aguggguauaccagcgugc

SEQ ID NO: 737133 - RNA, 19 nt, Artificial Sequence
  Description of Artificial Sequence: Synthetic oligonucleotide
ucggacauaauuggcaaac

SEQ ID NO: 737134 - RNA, 19 nt, Artificial Sequence
  Description of Artificial Sequence: Synthetic oligonucleotide
uaaacaucuuggcggacuc

SEQ ID NO: 737135 - RNA, 19 nt, Artificial Sequence
  Description of Artificial Sequence: Synthetic oligonucleotide
ucauucuuaggaugauugu

SEQ ID NO: 737136 - RNA, 19 nt, Artificial Sequence
  Description of Artificial Sequence: Synthetic oligonucleotide
agccuguauacccuccuuc

SEQ ID NO: 737137 - RNA, 19 nt, Artificial Sequence
  Description of Artificial Sequence: Synthetic oligonucleotide
uaaccagucgaguaaugau

SEQ ID NO: 737138 - RNA, 19 nt, Artificial Sequence
  Description of Artificial Sequence: Synthetic oligonucleotide
agggagcuuagaaaggugg

SEQ ID NO: 737139 - RNA, 19 nt, Artificial Sequence
  Description of Artificial Sequence: Synthetic oligonucleotide
gggacgaugcucuguaugg

SEQ ID NO: 737140 - RNA, 19 nt, Artificial Sequence
  Description of Artificial Sequence: Synthetic oligonucleotide
guaccaauacugagaaggg

SEQ ID NO: 737141 - RNA, 19 nt, Artificial Sequence
  Description of Artificial Sequence: Synthetic oligonucleotide
agucgaguaaugaugaaaa

SEQ ID NO: 737142 - RNA, 19 nt, Artificial Sequence
  Description of Artificial Sequence: Synthetic oligonucleotide
caugcgcaaaaugaaguag

SEQ ID NO: 737143 - RNA, 19 nt, Artificial Sequence
  Description of Artificial Sequence: Synthetic oligonucleotide
gcuucguguauuaaugugg

SEQ ID NO: 737144 - RNA, 19 nt, Artificial Sequence
  Description of Artificial Sequence: Synthetic oligonucleotide
cuuauauccuuucucccca

SEQ ID NO: 737145 - RNA, 19 nt, Artificial Sequence
  Description of Artificial Sequence: Synthetic oligonucleotide
uguauuaaugugggaggca

SEQ ID NO: 737146 - RNA, 19 nt, Artificial Sequence
  Description of Artificial Sequence: Synthetic oligonucleotide
aaguaggcccagaagauau

SEQ ID NO: 737147 - RNA, 19 nt, Artificial Sequence
  Description of Artificial Sequence: Synthetic oligonucleotide
ggaaccaugguccccgggg

SEQ ID NO: 737148 - RNA, 19 nt, Artificial Sequence
  Description of Artificial Sequence: Synthetic oligonucleotide
cauguaguaccaauacuga

SEQ ID NO: 737149 - RNA, 19 nt, Artificial Sequence
  Description of Artificial Sequence: Synthetic oligonucleotide
uucuuaggaugauuguuau

SEQ ID NO: 737150 - RNA, 19 nt, Artificial Sequence
  Description of Artificial Sequence: Synthetic oligonucleotide
aauuggcaaaccaggagaa

SEQ ID NO: 737151 - RNA, 19 nt, Artificial Sequence
  Description of Artificial Sequence: Synthetic oligonucleotide
agaaagguggaaccuuggu

SEQ ID NO: 737152 - RNA, 19 nt, Artificial Sequence
  Description of Artificial Sequence: Synthetic oligonucleotide
ucuccgagcgcccggcccg

SEQ ID NO: 737153 - RNA, 19 nt, Artificial Sequence
  Description of Artificial Sequence: Synthetic oligonucleotide
cuuggcggacuccagcagg

SEQ ID NO: 737154 - RNA, 19 nt, Artificial Sequence
  Description of Artificial Sequence: Synthetic oligonucleotide
agagggaaauaagaccauc

SEQ ID NO: 737155 - RNA, 19 nt, Artificial Sequence
  Description of Artificial Sequence: Synthetic oligonucleotide
ucuaccagcuuuccaguua

SEQ ID NO: 737156 - RNA, 19 nt, Artificial Sequence
  Description of Artificial Sequence: Synthetic oligonucleotide
gaaaacgauggcgaagaca

SEQ ID NO: 737157 - RNA, 19 nt, Artificial Sequence
  Description of Artificial Sequence: Synthetic oligonucleotide
gagcuuagaaagguggaac

SEQ ID NO: 737158 - RNA, 19 nt, Artificial Sequence
  Description of Artificial Sequence: Synthetic oligonucleotide
cauagaaccaggguuuauc

SEQ ID NO: 737159 - RNA, 19 nt, Artificial Sequence
  Description of Artificial Sequence: Synthetic oligonucleotide
gagaguucaaucauguagu

SEQ ID NO: 737160 - RNA, 19 nt, Artificial Sequence
  Description of Artificial Sequence: Synthetic oligonucleotide
caugauaaccagucgagua

SEQ ID NO: 737161 - RNA, 19 nt, Artificial Sequence
  Description of Artificial Sequence: Synthetic oligonucleotide
aauacugagaagggacgau

SEQ ID NO: 737162 - RNA, 19 nt, Artificial Sequence
  Description of Artificial Sequence: Synthetic oligonucleotide
ucggguuuucuccuuuaac

SEQ ID NO: 737163 - RNA, 19 nt, Artificial Sequence
  Description of Artificial Sequence: Synthetic oligonucleotide
agggacgaugcucuguaug

SEQ ID NO: 737164 - RNA, 19 nt, Artificial Sequence
  Description of Artificial Sequence: Synthetic oligonucleotide
ucacuuaauuuguuucuua

SEQ ID NO: 737165 - RNA, 19 nt, Artificial Sequence
  Description of Artificial Sequence: Synthetic oligonucleotide
uaggagccgacucuuugcu

SEQ ID NO: 737166 - RNA, 19 nt, Artificial Sequence
  Description of Artificial Sequence: Synthetic oligonucleotide
guguauuaaugugggaggc

SEQ ID NO: 737167 - RNA, 19 nt, Artificial Sequence
  Description of Artificial Sequence: Synthetic oligonucleotide
cacucugccgagacaaaag

SEQ ID NO: 737168 - RNA, 19 nt, Artificial Sequence
  Description of Artificial Sequence: Synthetic oligonucleotide
ugcggaaaugccagguccu

SEQ ID NO: 737169 - RNA, 19 nt, Artificial Sequence
  Description of Artificial Sequence: Synthetic oligonucleotide
agguccuagcuguaguucu

SEQ ID NO: 737170 - RNA, 19 nt, Artificial Sequence
  Description of Artificial Sequence: Synthetic oligonucleotide
aauggucccuugcggaaau

SEQ ID NO: 737171 - RNA, 19 nt, Artificial Sequence
  Description of Artificial Sequence: Synthetic oligonucleotide
agaaugaugguggccacgu

SEQ ID NO: 737172 - RNA, 19 nt, Artificial Sequence
  Description of Artificial Sequence: Synthetic oligonucleotide
ggagccgacucuuugcucc

SEQ ID NO: 737173 - RNA, 19 nt, Artificial Sequence
  Description of Artificial Sequence: Synthetic oligonucleotide
ccaggguuuauccacaaug

SEQ ID NO: 737174 - RNA, 19 nt, Artificial Sequence
  Description of Artificial Sequence: Synthetic oligonucleotide
ccugcucggacauaauugg

SEQ ID NO: 737175 - RNA, 19 nt, Artificial Sequence
  Description of Artificial Sequence: Synthetic oligonucleotide
accagcguucuaucuggcg

SEQ ID NO: 737176 - RNA, 19 nt, Artificial Sequence
  Description of Artificial Sequence: Synthetic oligonucleotide
auacugagaagggacgaug

SEQ ID NO: 737177 - RNA, 19 nt, Artificial Sequence
  Description of Artificial Sequence: Synthetic oligonucleotide
uccaacuggcuucucggaa

SEQ ID NO: 737178 - RNA, 19 nt, Artificial Sequence
  Description of Artificial Sequence: Synthetic oligonucleotide
uagucggucccaccagaag

SEQ ID NO: 737179 - RNA, 19 nt, Artificial Sequence
  Description of Artificial Sequence: Synthetic oligonucleotide
caggguuuauccacaauga

SEQ ID NO: 737180 - RNA, 19 nt, Artificial Sequence
  Description of Artificial Sequence: Synthetic oligonucleotide
cucuguaugggauagcccu

SEQ ID NO: 737181 - RNA, 19 nt, Artificial Sequence
  Description of Artificial Sequence: Synthetic oligonucleotide
uguagacucuuuuccuuau

SEQ ID NO: 737182 - RNA, 19 nt, Artificial Sequence
  Description of Artificial Sequence: Synthetic oligonucleotide
aagcucaaagaaguaucga

SEQ ID NO: 737183 - RNA, 19 nt, Artificial Sequence
  Description of Artificial Sequence: Synthetic oligonucleotide
cguguauuaaugugggagg

SEQ ID NO: 737184 - RNA, 19 nt, Artificial Sequence
  Description of Artificial Sequence: Synthetic oligonucleotide
cgaguaaugaugaaaacga

SEQ ID NO: 737185 - RNA, 19 nt, Artificial Sequence
  Description of Artificial Sequence: Synthetic oligonucleotide
augugaguuauaagaguag

SEQ ID NO: 737186 - RNA, 19 nt, Artificial Sequence
  Description of Artificial Sequence: Synthetic oligonucleotide
ucuguaugggauagcccuc

SEQ ID NO: 737187 - RNA, 19 nt, Artificial Sequence
  Description of Artificial Sequence: Synthetic oligonucleotide
uucuaucuggcggccagag

SEQ ID NO: 737188 - RNA, 19 nt, Artificial Sequence
  Description of Artificial Sequence: Synthetic oligonucleotide
gaaauggucccuugcggaa

SEQ ID NO: 737189 - RNA, 19 nt, Artificial Sequence
  Description of Artificial Sequence: Synthetic oligonucleotide
ugauaaccagucgaguaau

SEQ ID NO: 737190 - RNA, 19 nt, Artificial Sequence
  Description of Artificial Sequence: Synthetic oligonucleotide
ugaaaccccaaauguucaa

SEQ ID NO: 737191 - RNA, 19 nt, Artificial Sequence
  Description of Artificial Sequence: Synthetic oligonucleotide
uaccaauacugagaaggga

SEQ ID NO: 737192 - RNA, 19 nt, Artificial Sequence
  Description of Artificial Sequence: Synthetic oligonucleotide
cguaguuaaacaucuuggc

SEQ ID NO: 737193 - RNA, 19 nt, Artificial Sequence
  Description of Artificial Sequence: Synthetic oligonucleotide
gggguguagccacauaaag

SEQ ID NO: 737194 - RNA, 19 nt, Artificial Sequence
  Description of Artificial Sequence: Synthetic oligonucleotide
guaggcccagaagauaugc

SEQ ID NO: 737195 - RNA, 19 nt, Artificial Sequence
  Description of Artificial Sequence: Synthetic oligonucleotide
ugacaaaaggagaguuaau

SEQ ID NO: 737196 - RNA, 19 nt, Artificial Sequence
  Description of Artificial Sequence: Synthetic oligonucleotide
acaguaaggcacaacccug

SEQ ID NO: 737197 - RNA, 19 nt, Artificial Sequence
  Description of Artificial Sequence: Synthetic oligonucleotide
ggagucaaaggcaaacagc

SEQ ID NO: 737198 - RNA, 19 nt, Artificial Sequence
  Description of Artificial Sequence: Synthetic oligonucleotide
ugaaaacgauggcgaagac

SEQ ID NO: 737199 - RNA, 19 nt, Artificial Sequence
  Description of Artificial Sequence: Synthetic oligonucleotide
uguaugggauagcccuccc

SEQ ID NO: 737200 - RNA, 19 nt, Artificial Sequence
  Description of Artificial Sequence: Synthetic oligonucleotide
accccaaauguucaauaaa

SEQ ID NO: 737201 - RNA, 19 nt, Artificial Sequence
  Description of Artificial Sequence: Synthetic oligonucleotide
cagcguucuaucuggcggc

SEQ ID NO: 737202 - RNA, 19 nt, Artificial Sequence
  Description of Artificial Sequence: Synthetic oligonucleotide
ucccgcguaguuaaacauc

SEQ ID NO: 737203 - RNA, 19 nt, Artificial Sequence
  Description of Artificial Sequence: Synthetic oligonucleotide
ggacauaauuggcaaacca

SEQ ID NO: 737204 - RNA, 19 nt, Artificial Sequence
  Description of Artificial Sequence: Synthetic oligonucleotide
gggaagguuggcuaguuuc

SEQ ID NO: 737205 - RNA, 19 nt, Artificial Sequence
  Description of Artificial Sequence: Synthetic oligonucleotide
gucgaguaaugaugaaaac

SEQ ID NO: 737206 - RNA, 19 nt, Artificial Sequence
  Description of Artificial Sequence: Synthetic oligonucleotide
acaaugguucagucauucu

SEQ ID NO: 737207 - RNA, 19 nt, Artificial Sequence
  Description of Artificial Sequence: Synthetic oligonucleotide
caguggguauaccagcgug

SEQ ID NO: 737208 - RNA, 19 nt, Artificial Sequence
  Description of Artificial Sequence: Synthetic oligonucleotide
ccagcguucuaucuggcgg

SEQ ID NO: 737209 - RNA, 19 nt, Artificial Sequence
  Description of Artificial Sequence: Synthetic oligonucleotide
gauaaccagucgaguaaug

SEQ ID NO: 737210 - RNA, 19 nt, Artificial Sequence
  Description of Artificial Sequence: Synthetic oligonucleotide
ggcaugauaaccagucgag

SEQ ID NO: 737211 - RNA, 19 nt, Artificial Sequence
  Description of Artificial Sequence: Synthetic oligonucleotide
cuuucgcuugacaucagaa

SEQ ID NO: 737212 - RNA, 19 nt, Artificial Sequence
  Description of Artificial Sequence: Synthetic oligonucleotide
auaagaccauccccucucu

SEQ ID NO: 737213 - RNA, 19 nt, Artificial Sequence
  Description of Artificial Sequence: Synthetic oligonucleotide
guuauaagaguagcuugga

SEQ ID NO: 737214 - RNA, 19 nt, Artificial Sequence
  Description of Artificial Sequence: Synthetic oligonucleotide
caacuaguugccguucuac

SEQ ID NO: 737215 - RNA, 19 nt, Artificial Sequence
  Description of Artificial Sequence: Synthetic oligonucleotide
agcgugcaguguaggaucc

SEQ ID NO: 737216 - RNA, 19 nt, Artificial Sequence
  Description of Artificial Sequence: Synthetic oligonucleotide
aaguaucgaaugacaagaa

SEQ ID NO: 737217 - RNA, 19 nt, Artificial Sequence
  Description of Artificial Sequence: Synthetic oligonucleotide
ggcuucguguauuaaugug

SEQ ID NO: 737218 - RNA, 19 nt, Artificial Sequence
  Description of Artificial Sequence: Synthetic oligonucleotide
uggaaccaugguccccggg

SEQ ID NO: 737219 - RNA, 19 nt, Artificial Sequence
  Description of Artificial Sequence: Synthetic oligonucleotide
uaguaccaauacugagaag

SEQ ID NO: 737220 - RNA, 19 nt, Artificial Sequence
  Description of Artificial Sequence: Synthetic oligonucleotide
guuaaaaguagcucagcuu

SEQ ID NO: 737221 - RNA, 19 nt, Artificial Sequence
  Description of Artificial Sequence: Synthetic oligonucleotide
agugcucaaaugucccuau

SEQ ID NO: 737222 - RNA, 19 nt, Artificial Sequence
  Description of Artificial Sequence: Synthetic oligonucleotide
ucuaucuggcggccagaga

SEQ ID NO: 737223 - RNA, 19 nt, Artificial Sequence
  Description of Artificial Sequence: Synthetic oligonucleotide
aaauggucccuugcggaaa

SEQ ID NO: 737224 - RNA, 19 nt, Artificial Sequence
  Description of Artificial Sequence: Synthetic oligonucleotide
cucuuaccugaggauaggc

SEQ ID NO: 737225 - RNA, 19 nt, Artificial Sequence
  Description of Artificial Sequence: Synthetic oligonucleotide
cucccaaacuuuccucaag

SEQ ID NO: 737226 - RNA, 19 nt, Artificial Sequence
  Description of Artificial Sequence: Synthetic oligonucleotide
ggguguagccacauaaagc

SEQ ID NO: 737227 - RNA, 19 nt, Artificial Sequence
  Description of Artificial Sequence: Synthetic oligonucleotide
cuugcggaaaugccagguc

SEQ ID NO: 737228 - RNA, 19 nt, Artificial Sequence
  Description of Artificial Sequence: Synthetic oligonucleotide
cagguuaaguucacaggca

SEQ ID NO: 737229 - RNA, 19 nt, Artificial Sequence
  Description of Artificial Sequence: Synthetic oligonucleotide
agcguucuaucuggcggcc

SEQ ID NO: 737230 - RNA, 19 nt, Artificial Sequence
  Description of Artificial Sequence: Synthetic oligonucleotide
gaugggguggccauuagau

SEQ ID NO: 737231 - RNA, 19 nt, Artificial Sequence
  Description of Artificial Sequence: Synthetic oligonucleotide
aucccgcguaguuaaacau

SEQ ID NO: 737232 - RNA, 19 nt, Artificial Sequence
  Description of Artificial Sequence: Synthetic oligonucleotide
uucaaucauguaguaccaa

SEQ ID NO: 737233 - RNA, 19 nt, Artificial Sequence
  Description of Artificial Sequence: Synthetic oligonucleotide
gguauaccagcgugcagug

SEQ ID NO: 737234 - RNA, 19 nt, Artificial Sequence
  Description of Artificial Sequence: Synthetic oligonucleotide
auuuaaccuuuaauauacu

SEQ ID NO: 737235 - RNA, 19 nt, Artificial Sequence
  Description of Artificial Sequence: Synthetic oligonucleotide
ugguccccgggguagggug

SEQ ID NO: 737236 - RNA, 19 nt, Artificial Sequence
  Description of Artificial Sequence: Synthetic oligonucleotide
ucccugcucggacauaauu

SEQ ID NO: 737237 - RNA, 19 nt, Artificial Sequence
  Description of Artificial Sequence: Synthetic oligonucleotide
uaacaacuaguugccguuc

SEQ ID NO: 737238 - RNA, 19 nt, Artificial Sequence
  Description of Artificial Sequence: Synthetic oligonucleotide
guccuagcuguaguucugg

SEQ ID NO: 737239 - RNA, 19 nt, Artificial Sequence
  Description of Artificial Sequence: Synthetic oligonucleotide
uagauaggagccgacucuu

SEQ ID NO: 737240 - RNA, 19 nt, Artificial Sequence
  Description of Artificial Sequence: Synthetic oligonucleotide
agcagguagucagaagagu

SEQ ID NO: 737241 - RNA, 19 nt, Artificial Sequence
  Description of Artificial Sequence: Synthetic oligonucleotide
ccucaagucauagaaccag

SEQ ID NO: 737242 - RNA, 19 nt, Artificial Sequence
  Description of Artificial Sequence: Synthetic oligonucleotide
uaaaauccuuucgcuugac

SEQ ID NO: 737243 - RNA, 19 nt, Artificial Sequence
  Description of Artificial Sequence: Synthetic oligonucleotide
agcuaggacaaugguucag

SEQ ID NO: 737244 - RNA, 19 nt, Artificial Sequence
  Description of Artificial Sequence: Synthetic oligonucleotide
guccagcuuuggcagagug

SEQ ID NO: 737245 - RNA, 19 nt, Artificial Sequence
  Description of Artificial Sequence: Synthetic oligonucleotide
guugcgcacuggcugggcc

SEQ ID NO: 737246 - RNA, 19 nt, Artificial Sequence
  Description of Artificial Sequence: Synthetic oligonucleotide
caucccgcguaguuaaaca

SEQ ID NO: 737247 - RNA, 19 nt, Artificial Sequence
  Description of Artificial Sequence: Synthetic oligonucleotide
gaugauuguuauugaggau

SEQ ID NO: 737248 - RNA, 19 nt, Artificial Sequence
  Description of Artificial Sequence: Synthetic oligonucleotide
uaagaccauccccucucua

SEQ ID NO: 737249 - RNA, 19 nt, Artificial Sequence
  Description of Artificial Sequence: Synthetic oligonucleotide
cccugcucggacauaauug

SEQ ID NO: 737250 - RNA, 19 nt, Artificial Sequence
  Description of Artificial Sequence: Synthetic oligonucleotide
gcuagggagcuuagaaagg

SEQ ID NO: 737251 - RNA, 19 nt, Artificial Sequence
  Description of Artificial Sequence: Synthetic oligonucleotide
gaagagucaugcagagcca

SEQ ID NO: 737252 - RNA, 19 nt, Artificial Sequence
  Description of Artificial Sequence: Synthetic oligonucleotide
guggccacgugguggauga

SEQ ID NO: 737253 - RNA, 19 nt, Artificial Sequence
  Description of Artificial Sequence: Synthetic oligonucleotide
gugggccaugcgcaaaaug

SEQ ID NO: 737254 - RNA, 19 nt, Artificial Sequence
  Description of Artificial Sequence: Synthetic oligonucleotide
uucuaccagcuuuccaguu

SEQ ID NO: 737255 - RNA, 19 nt, Artificial Sequence
  Description of Artificial Sequence: Synthetic oligonucleotide
acaacuaguugccguucua

SEQ ID NO: 737256 - RNA, 19 nt, Artificial Sequence
  Description of Artificial Sequence: Synthetic oligonucleotide
uguagaggucugaggcuuu

SEQ ID NO: 737257 - RNA, 19 nt, Artificial Sequence
  Description of Artificial Sequence: Synthetic oligonucleotide
ggccauuagauaggagccg

SEQ ID NO: 737258 - RNA, 19 nt, Artificial Sequence
  Description of Artificial Sequence: Synthetic oligonucleotide
ccucucuagaagauauaac

SEQ ID NO: 737259 - RNA, 19 nt, Artificial Sequence
  Description of Artificial Sequence: Synthetic oligonucleotide
uagagcuccaguggguaua

SEQ ID NO: 737260 - RNA, 19 nt, Artificial Sequence
  Description of Artificial Sequence: Synthetic oligonucleotide
uccuuucgcuugacaucag

SEQ ID NO: 737261 - RNA, 19 nt, Artificial Sequence
  Description of Artificial Sequence: Synthetic oligonucleotide
ccaacuggcuucucggaac

SEQ ID NO: 737262 - RNA, 19 nt, Artificial Sequence
  Description of Artificial Sequence: Synthetic oligonucleotide
cauagucggucccaccaga

SEQ ID NO: 737263 - RNA, 19 nt, Artificial Sequence
  Description of Artificial Sequence: Synthetic oligonucleotide
ggauaggcugguuagaguu

SEQ ID NO: 737264 - RNA, 19 nt, Artificial Sequence
  Description of Artificial Sequence: Synthetic oligonucleotide
gaagugugauguagagguc

SEQ ID NO: 737265 - RNA, 19 nt, Artificial Sequence
  Description of Artificial Sequence: Synthetic oligonucleotide
ggaaccuugguccagcuuu

SEQ ID NO: 737266 - RNA, 19 nt, Artificial Sequence
  Description of Artificial Sequence: Synthetic oligonucleotide
caaugguucagucauucuu

SEQ ID NO: 737267 - RNA, 19 nt, Artificial Sequence
  Description of Artificial Sequence: Synthetic oligonucleotide
auaccagcgugcaguguag

SEQ ID NO: 737268 - RNA, 19 nt, Artificial Sequence
  Description of Artificial Sequence: Synthetic oligonucleotide
gaccaguagaaggagaguu

SEQ ID NO: 737269 - RNA, 19 nt, Artificial Sequence
  Description of Artificial Sequence: Synthetic oligonucleotide
gccauagucggucccacca

SEQ ID NO: 737270 - RNA, 19 nt, Artificial Sequence
  Description of Artificial Sequence: Synthetic oligonucleotide
gugaguuauaagaguagcu

SEQ ID NO: 737271 - RNA, 19 nt, Artificial Sequence
  Description of Artificial Sequence: Synthetic oligonucleotide
agucccugcucggacauaa

SEQ ID NO: 737272 - RNA, 19 nt, Artificial Sequence
  Description of Artificial Sequence: Synthetic oligonucleotide
cuagaucagcccagguuaa

SEQ ID NO: 737273 - RNA, 19 nt, Artificial Sequence
  Description of Artificial Sequence: Synthetic oligonucleotide
guggguauaccagcgugca

SEQ ID NO: 737274 - RNA, 19 nt, Artificial Sequence
  Description of Artificial Sequence: Synthetic oligonucleotide
gucccuugcggaaaugcca

SEQ ID NO: 737275 - RNA, 19 nt, Artificial Sequence
  Description of Artificial Sequence: Synthetic oligonucleotide
uggcauagacacguccauc

SEQ ID NO: 737276 - RNA, 19 nt, Artificial Sequence
  Description of Artificial Sequence: Synthetic oligonucleotide
uagucggguuuucuccuuu

SEQ ID NO: 737277 - RNA, 19 nt, Artificial Sequence
  Description of Artificial Sequence: Synthetic oligonucleotide
aggagaguucaaucaugua

SEQ ID NO: 737278 - RNA, 19 nt, Artificial Sequence
  Description of Artificial Sequence: Synthetic oligonucleotide
ggcugcuugccguugguca

SEQ ID NO: 737279 - RNA, 19 nt, Artificial Sequence
  Description of Artificial Sequence: Synthetic oligonucleotide
cagucgaguaaugaugaaa

SEQ ID NO: 737280 - RNA, 19 nt, Artificial Sequence
  Description of Artificial Sequence: Synthetic oligonucleotide
agucauucuuaggaugauu

SEQ ID NO: 737281 - RNA, 19 nt, Artificial Sequence
  Description of Artificial Sequence: Synthetic oligonucleotide
caaacagcuagcucagaau

SEQ ID NO: 737282 - RNA, 19 nt, Artificial Sequence
  Description of Artificial Sequence: Synthetic oligonucleotide
ucauagaaccaggguuuau

SEQ ID NO: 737283 - RNA, 19 nt, Artificial Sequence
  Description of Artificial Sequence: Synthetic oligonucleotide
cucuccgagcgcccggccc

SEQ ID NO: 737284 - RNA, 19 nt, Artificial Sequence
  Description of Artificial Sequence: Synthetic oligonucleotide
guucuacuccacuccagcu

SEQ ID NO: 737285 - RNA, 19 nt, Artificial Sequence
  Description of Artificial Sequence: Synthetic oligonucleotide
gccuguauacccuccuuca

SEQ ID NO: 737286 - RNA, 19 nt, Artificial Sequence
  Description of Artificial Sequence: Synthetic oligonucleotide
cucggcggccgaugcagag

SEQ ID NO: 737287 - RNA, 19 nt, Artificial Sequence
  Description of Artificial Sequence: Synthetic oligonucleotide
gacauugggaggugcucgu

SEQ ID NO: 737288 - RNA, 19 nt, Artificial Sequence
  Description of Artificial Sequence: Synthetic oligonucleotide
cuagggagcuuagaaaggu

SEQ ID NO: 737289 - RNA, 19 nt, Artificial Sequence
  Description of Artificial Sequence: Synthetic oligonucleotide
cagguccuagcuguaguuc

SEQ ID NO: 737290 - RNA, 19 nt, Artificial Sequence
  Description of Artificial Sequence: Synthetic oligonucleotide
gaaccaugguccccggggu

SEQ ID NO: 737291 - RNA, 19 nt, Artificial Sequence
  Description of Artificial Sequence: Synthetic oligonucleotide
ggucugaaauggucccuug

SEQ ID NO: 737292 - RNA, 19 nt, Artificial Sequence
  Description of Artificial Sequence: Synthetic oligonucleotide
uaccugaggauaggcuggu

SEQ ID NO: 737293 - RNA, 19 nt, Artificial Sequence
  Description of Artificial Sequence: Synthetic oligonucleotide
cugcuugccguuggucagg

SEQ ID NO: 737294 - RNA, 19 nt, Artificial Sequence
  Description of Artificial Sequence: Synthetic oligonucleotide
gcgcaaaaugaaguaggcc

SEQ ID NO: 737295 - RNA, 19 nt, Artificial Sequence
  Description of Artificial Sequence: Synthetic oligonucleotide
gaguaaugaugaaaacgau

SEQ ID NO: 737296 - RNA, 19 nt, Artificial Sequence
  Description of Artificial Sequence: Synthetic oligonucleotide
ccaugaugagagucccugc

SEQ ID NO: 737297 - RNA, 19 nt, Artificial Sequence
  Description of Artificial Sequence: Synthetic oligonucleotide
ggagaaugaugguggccac

SEQ ID NO: 737298 - RNA, 19 nt, Artificial Sequence
  Description of Artificial Sequence: Synthetic oligonucleotide
gcucggacauaauuggcaa

SEQ ID NO: 737299 - RNA, 19 nt, Artificial Sequence
  Description of Artificial Sequence: Synthetic oligonucleotide
agucggguuuucuccuuua

SEQ ID NO: 737300 - RNA, 19 nt, Artificial Sequence
  Description of Artificial Sequence: Synthetic oligonucleotide
ggucagguagaaauguucu

SEQ ID NO: 737301 - RNA, 19 nt, Artificial Sequence
  Description of Artificial Sequence: Synthetic oligonucleotide
ucggcggccgaugcagagc

SEQ ID NO: 737302 - RNA, 19 nt, Artificial Sequence
  Description of Artificial Sequence: Synthetic oligonucleotide
acaucuuggcggacuccag

SEQ ID NO: 737303 - RNA, 19 nt, Artificial Sequence
  Description of Artificial Sequence: Synthetic oligonucleotide
ccaugcccgcaacaaaggc

SEQ ID NO: 737304 - RNA, 19 nt, Artificial Sequence
  Description of Artificial Sequence: Synthetic oligonucleotide
gcggccgaugcagagcugg

SEQ ID NO: 737305 - RNA, 19 nt, Artificial Sequence
  Description of Artificial Sequence: Synthetic oligonucleotide
ggaagauagagagggaaau

SEQ ID NO: 737306 - RNA, 19 nt, Artificial Sequence
  Description of Artificial Sequence: Synthetic oligonucleotide
auagucggucccaccagaa

SEQ ID NO: 737307 - RNA, 19 nt, Artificial Sequence
  Description of Artificial Sequence: Synthetic oligonucleotide
uccucuccgagcgcccggc

SEQ ID NO: 737308 - RNA, 19 nt, Artificial Sequence
  Description of Artificial Sequence: Synthetic oligonucleotide
cccguugcgcacuggcugg

SEQ ID NO: 737309 - RNA, 19 nt, Artificial Sequence
  Description of Artificial Sequence: Synthetic oligonucleotide
gucggguuuucuccuuuaa

SEQ ID NO: 737310 - RNA, 19 nt, Artificial Sequence
  Description of Artificial Sequence: Synthetic oligonucleotide
ggagcuuagaaagguggaa

SEQ ID NO: 737311 - RNA, 19 nt, Artificial Sequence
  Description of Artificial Sequence: Synthetic oligonucleotide
guccugguugcggcggcgg

SEQ ID NO: 737312 - RNA, 19 nt, Artificial Sequence
  Description of Artificial Sequence: Synthetic oligonucleotide
aguugccguucuacuccac

SEQ ID NO: 737313 - RNA, 19 nt, Artificial Sequence
  Description of Artificial Sequence: Synthetic oligonucleotide
uccaucccgcguaguuaaa

SEQ ID NO: 737314 - RNA, 19 nt, Artificial Sequence
  Description of Artificial Sequence: Synthetic oligonucleotide
ccauagucggucccaccag

SEQ ID NO: 737315 - RNA, 19 nt, Artificial Sequence
  Description of Artificial Sequence: Synthetic oligonucleotide
agcgcccggcccguugcgc

SEQ ID NO: 737316 - RNA, 19 nt, Artificial Sequence
  Description of Artificial Sequence: Synthetic oligonucleotide
aggugcucguagucggguu

SEQ ID NO: 737317 - RNA, 19 nt, Artificial Sequence
  Description of Artificial Sequence: Synthetic oligonucleotide
cguucuaucuggcggccag

SEQ ID NO: 737318 - RNA, 19 nt, Artificial Sequence
  Description of Artificial Sequence: Synthetic oligonucleotide
ccgaugcagagcuggccgg

SEQ ID NO: 737319 - RNA, 19 nt, Artificial Sequence
  Description of Artificial Sequence: Synthetic oligonucleotide
gcucaaagaaguaucgaau

SEQ ID NO: 737320 - RNA, 19 nt, Artificial Sequence
  Description of Artificial Sequence: Synthetic oligonucleotide
gagcgcccggcccguugcg

SEQ ID NO: 737321 - RNA, 19 nt, Artificial Sequence
  Description of Artificial Sequence: Synthetic oligonucleotide
gguccuagcuguaguucug

SEQ ID NO: 737322 - RNA, 19 nt, Artificial Sequence
  Description of Artificial Sequence: Synthetic oligonucleotide
ccccaaauguucaauaaau

SEQ ID NO: 737323 - RNA, 19 nt, Artificial Sequence
  Description of Artificial Sequence: Synthetic oligonucleotide
gggagcuuagaaaggugga

SEQ ID NO: 737324 - RNA, 19 nt, Artificial Sequence
  Description of Artificial Sequence: Synthetic oligonucleotide
gucauagaaccaggguuua

SEQ ID NO: 737325 - RNA, 19 nt, Artificial Sequence
  Description of Artificial Sequence: Synthetic oligonucleotide
gaguuaauguagacucuuu

SEQ ID NO: 737326 - RNA, 19 nt, Artificial Sequence
  Description of Artificial Sequence: Synthetic oligonucleotide
ugugggccaugcgcaaaau

SEQ ID NO: 737327 - RNA, 19 nt, Artificial Sequence
  Description of Artificial Sequence: Synthetic oligonucleotide
guauacccuccuucacuua

SEQ ID NO: 737328 - RNA, 19 nt, Artificial Sequence
  Description of Artificial Sequence: Synthetic oligonucleotide
gcacaacccuggcuugaag

SEQ ID NO: 737329 - RNA, 19 nt, Artificial Sequence
  Description of Artificial Sequence: Synthetic oligonucleotide
gccguucuacuccacucca

SEQ ID NO: 737330 - RNA, 19 nt, Artificial Sequence
  Description of Artificial Sequence: Synthetic oligonucleotide
gaguagcuuggaagauaga

SEQ ID NO: 737331 - RNA, 19 nt, Artificial Sequence
  Description of Artificial Sequence: Synthetic oligonucleotide
cagccauagucggucccac

SEQ ID NO: 737332 - RNA, 19 nt, Artificial Sequence
  Description of Artificial Sequence: Synthetic oligonucleotide
gagagggaaauaagaccau

SEQ ID NO: 737333 - RNA, 19 nt, Artificial Sequence
  Description of Artificial Sequence: Synthetic oligonucleotide
guucuaucuggcggccaga

SEQ ID NO: 737334 - RNA, 19 nt, Artificial Sequence
  Description of Artificial Sequence: Synthetic oligonucleotide
ccgacucuuugcuccugcc

SEQ ID NO: 737335 - RNA, 19 nt, Artificial Sequence
  Description of Artificial Sequence: Synthetic oligonucleotide
cuucuagaucagcccaggu

SEQ ID NO: 737336 - RNA, 19 nt, Artificial Sequence
  Description of Artificial Sequence: Synthetic oligonucleotide
ugcucguagucggguuuuc

SEQ ID NO: 737337 - RNA, 19 nt, Artificial Sequence
  Description of Artificial Sequence: Synthetic oligonucleotide
ccugagcuagggagcuuag

SEQ ID NO: 737338 - RNA, 19 nt, Artificial Sequence
  Description of Artificial Sequence: Synthetic oligonucleotide
cccgcguaguuaaacaucu

SEQ ID NO: 737339 - RNA, 19 nt, Artificial Sequence
  Description of Artificial Sequence: Synthetic oligonucleotide
guagagcuccaguggguau

SEQ ID NO: 737340 - RNA, 19 nt, Artificial Sequence
  Description of Artificial Sequence: Synthetic oligonucleotide
auccccucucuagaagaua

SEQ ID NO: 737341 - RNA, 19 nt, Artificial Sequence
  Description of Artificial Sequence: Synthetic oligonucleotide
agauaggagccgacucuuu

SEQ ID NO: 737342 - RNA, 19 nt, Artificial Sequence
  Description of Artificial Sequence: Synthetic oligonucleotide
cacguccaucucugucuuc

SEQ ID NO: 737343 - RNA, 19 nt, Artificial Sequence
  Description of Artificial Sequence: Synthetic oligonucleotide
cugagcuagggagcuuaga

SEQ ID NO: 737344 - RNA, 19 nt, Artificial Sequence
  Description of Artificial Sequence: Synthetic oligonucleotide
auggucccuugcggaaaug

SEQ ID NO: 737345 - RNA, 19 nt, Artificial Sequence
  Description of Artificial Sequence: Synthetic oligonucleotide
ggauagcccucccaaacuu

SEQ ID NO: 737346 - RNA, 19 nt, Artificial Sequence
  Description of Artificial Sequence: Synthetic oligonucleotide
acauugggaggugcucgua

SEQ ID NO: 737347 - RNA, 19 nt, Artificial Sequence
  Description of Artificial Sequence: Synthetic oligonucleotide
ccaucccgcguaguuaaac

SEQ ID NO: 737348 - RNA, 19 nt, Artificial Sequence
  Description of Artificial Sequence: Synthetic oligonucleotide
gagccgacucuuugcuccu

SEQ ID NO: 737349 - RNA, 19 nt, Artificial Sequence
  Description of Artificial Sequence: Synthetic oligonucleotide
caucucggcggccgaugca

SEQ ID NO: 737350 - RNA, 19 nt, Artificial Sequence
  Description of Artificial Sequence: Synthetic oligonucleotide
ccuuucgcuugacaucaga

SEQ ID NO: 737351 - RNA, 19 nt, Artificial Sequence
  Description of Artificial Sequence: Synthetic oligonucleotide
ggagccuguauacccuccu

SEQ ID NO: 737352 - RNA, 19 nt, Artificial Sequence
  Description of Artificial Sequence: Synthetic oligonucleotide
gcggccagagagcccacuc

SEQ ID NO: 737353 - RNA, 19 nt, Artificial Sequence
  Description of Artificial Sequence: Synthetic oligonucleotide
gguagggugaggagccugu

SEQ ID NO: 737354 - RNA, 19 nt, Artificial Sequence
  Description of Artificial Sequence: Synthetic oligonucleotide
cggaaaugccagguccuag

SEQ ID NO: 737355 - RNA, 19 nt, Artificial Sequence
  Description of Artificial Sequence: Synthetic oligonucleotide
guagggugaggagccugua

SEQ ID NO: 737356 - RNA, 19 nt, Artificial Sequence
  Description of Artificial Sequence: Synthetic oligonucleotide
ggugcucguagucggguuu

SEQ ID NO: 737357 - RNA, 19 nt, Artificial Sequence
  Description of Artificial Sequence: Synthetic oligonucleotide
cuacuccacuccagcuugu

SEQ ID NO: 737358 - RNA, 19 nt, Artificial Sequence
  Description of Artificial Sequence: Synthetic oligonucleotide
ggaccaguagaaggagagu

SEQ ID NO: 737359 - RNA, 19 nt, Artificial Sequence
  Description of Artificial Sequence: Synthetic oligonucleotide
ccacucugccgagacaaaa

SEQ ID NO: 737360 - RNA, 19 nt, Artificial Sequence
  Description of Artificial Sequence: Synthetic oligonucleotide
gcggacuccagcagguagu

SEQ ID NO: 737361 - RNA, 19 nt, Artificial Sequence
  Description of Artificial Sequence: Synthetic oligonucleotide
ccuugcggaaaugccaggu

SEQ ID NO: 737362 - RNA, 19 nt, Artificial Sequence
  Description of Artificial Sequence: Synthetic oligonucleotide
gugcucguagucggguuuu

SEQ ID NO: 737363 - RNA, 19 nt, Artificial Sequence
  Description of Artificial Sequence: Synthetic oligonucleotide
gcggaaaugccagguccua

SEQ ID NO: 737364 - RNA, 19 nt, Artificial Sequence
  Description of Artificial Sequence: Synthetic oligonucleotide
ccgucuccucuccgagcgc

SEQ ID NO: 737365 - RNA, 19 nt, Artificial Sequence
  Description of Artificial Sequence: Synthetic oligonucleotide
gcgcccggcccguugcgca

SEQ ID NO: 737366 - RNA, 19 nt, Artificial Sequence
  Description of Artificial Sequence: Synthetic oligonucleotide
gcguucuaucuggcggcca

SEQ ID NO: 737367 - RNA, 19 nt, Artificial Sequence
  Description of Artificial Sequence: Synthetic oligonucleotide
gccguuggucagguagaaa

SEQ ID NO: 737368 - RNA, 19 nt, Artificial Sequence
  Description of Artificial Sequence: Synthetic oligonucleotide
ccgagcgcccggcccguug

SEQ ID NO: 737369 - RNA, 19 nt, Artificial Sequence
  Description of Artificial Sequence: Synthetic oligonucleotide
gcgugcaguguaggaucca

SEQ ID NO: 737370 - RNA, 19 nt, Artificial Sequence
  Description of Artificial Sequence: Synthetic oligonucleotide
cccggcccguugcgcacug

SEQ ID NO: 737371 - RNA, 19 nt, Artificial Sequence
  Description of Artificial Sequence: Synthetic oligonucleotide
gucccugcucggacauaau

SEQ ID NO: 737372 - RNA, 19 nt, Artificial Sequence
  Description of Artificial Sequence: Synthetic oligonucleotide
gcuugccguuggucaggua

SEQ ID NO: 737373 - RNA, 19 nt, Artificial Sequence
  Description of Artificial Sequence: Synthetic oligonucleotide
ccggcccguugcgcacugg

SEQ ID NO: 737374 - RNA, 19 nt, Artificial Sequence
  Description of Artificial Sequence: Synthetic oligonucleotide
cggucccaccagaaguggu

SEQ ID NO: 737375 - RNA, 19 nt, Artificial Sequence
  Description of Artificial Sequence: Synthetic oligonucleotide
ccgcguaguuaaacaucuu

SEQ ID NO: 737376 - RNA, 19 nt, Artificial Sequence
  Description of Artificial Sequence: Synthetic oligonucleotide
cggcggaaccagcguucua

SEQ ID NO: 737377 - RNA, 19 nt, Artificial Sequence
  Description of Artificial Sequence: Synthetic oligonucleotide
uuuauuacaagucacgcuc

SEQ ID NO: 737378 - RNA, 19 nt, Artificial Sequence
  Description of Artificial Sequence: Synthetic oligonucleotide
agaagaaccgcucaaggcg

SEQ ID NO: 737379 - RNA, 19 nt, Artificial Sequence
  Description of Artificial Sequence: Synthetic oligonucleotide
uuucgcaucuuucucaggg

SEQ ID NO: 737380 - RNA, 19 nt, Artificial Sequence
  Description of Artificial Sequence: Synthetic oligonucleotide
aaccguggacuccagagcc

SEQ ID NO: 737381 - RNA, 19 nt, Artificial Sequence
  Description of Artificial Sequence: Synthetic oligonucleotide
agaacauaaggaugaauuc

SEQ ID NO: 737382 - RNA, 19 nt, Artificial Sequence
  Description of Artificial Sequence: Synthetic oligonucleotide
uagaacauaaggaugaauu

SEQ ID NO: 737383 - RNA, 19 nt, Artificial Sequence
  Description of Artificial Sequence: Synthetic oligonucleotide
auaguagaugccuuuggac

SEQ ID NO: 737384 - RNA, 19 nt, Artificial Sequence
  Description of Artificial Sequence: Synthetic oligonucleotide
aaacgguucgguucgguuc

SEQ ID NO: 737385 - RNA, 19 nt, Artificial Sequence
  Description of Artificial Sequence: Synthetic oligonucleotide
aauguauccaagaauaaaa

SEQ ID NO: 737386 - RNA, 19 nt, Artificial Sequence
  Description of Artificial Sequence: Synthetic oligonucleotide
agguuuagcuccuuagagc

SEQ ID NO: 737387 - RNA, 19 nt, Artificial Sequence
  Description of Artificial Sequence: Synthetic oligonucleotide
gguuuagcuccuuagagcg

SEQ ID NO: 737388 - RNA, 19 nt, Artificial Sequence
  Description of Artificial Sequence: Synthetic oligonucleotide
uuauagaaguauaugcgaa

SEQ ID NO: 737389 - RNA, 19 nt, Artificial Sequence
  Description of Artificial Sequence: Synthetic oligonucleotide
aauaggcuugucucgguag

SEQ ID NO: 737390 - RNA, 19 nt, Artificial Sequence
  Description of Artificial Sequence: Synthetic oligonucleotide
gaacauaaggaugaauucc

SEQ ID NO: 737391 - RNA, 19 nt, Artificial Sequence
  Description of Artificial Sequence: Synthetic oligonucleotide
cuugaagcggauccgaagg

SEQ ID NO: 737392 - RNA, 19 nt, Artificial Sequence
  Description of Artificial Sequence: Synthetic oligonucleotide
ucucgguagaacauaagga

SEQ ID NO: 737393 - RNA, 19 nt, Artificial Sequence
  Description of Artificial Sequence: Synthetic oligonucleotide
uucggcuacacccuuguag

SEQ ID NO: 737394 - RNA, 19 nt, Artificial Sequence
  Description of Artificial Sequence: Synthetic oligonucleotide
uauaugcgaacuuaacgug

SEQ ID NO: 737395 - RNA, 19 nt, Artificial Sequence
  Description of Artificial Sequence: Synthetic oligonucleotide
aucucacucaagaugaccc

SEQ ID NO: 737396 - RNA, 19 nt, Artificial Sequence
  Description of Artificial Sequence: Synthetic oligonucleotide
gucucgguagaacauaagg

SEQ ID NO: 737397 - RNA, 19 nt, Artificial Sequence
  Description of Artificial Sequence: Synthetic oligonucleotide
ucauuaucccuuuauuaca

SEQ ID NO: 737398 - RNA, 19 nt, Artificial Sequence
  Description of Artificial Sequence: Synthetic oligonucleotide
ucaauguucccacugcgga

SEQ ID NO: 737399 - RNA, 19 nt, Artificial Sequence
  Description of Artificial Sequence: Synthetic oligonucleotide
agugcgauugcccucuccg

SEQ ID NO: 737400 - RNA, 19 nt, Artificial Sequence
  Description of Artificial Sequence: Synthetic oligonucleotide
agcggaugaagucuccugc

SEQ ID NO: 737401 - RNA, 19 nt, Artificial Sequence
  Description of Artificial Sequence: Synthetic oligonucleotide
agagggacggcuugaagcg

SEQ ID NO: 737402 - RNA, 19 nt, Artificial Sequence
  Description of Artificial Sequence: Synthetic oligonucleotide
uauagaaguauaugcgaac

SEQ ID NO: 737403 - RNA, 19 nt, Artificial Sequence
  Description of Artificial Sequence: Synthetic oligonucleotide
ugacuugaacaucuucccg

SEQ ID NO: 737404 - RNA, 19 nt, Artificial Sequence
  Description of Artificial Sequence: Synthetic oligonucleotide
aacauaaggaugaauucca

SEQ ID NO: 737405 - RNA, 19 nt, Artificial Sequence
  Description of Artificial Sequence: Synthetic oligonucleotide
agucaauaggcuugucucg

SEQ ID NO: 737406 - RNA, 19 nt, Artificial Sequence
  Description of Artificial Sequence: Synthetic oligonucleotide
uacgucuugaggcuugugc

SEQ ID NO: 737407 - RNA, 19 nt, Artificial Sequence
  Description of Artificial Sequence: Synthetic oligonucleotide
ucgguagaacauaaggaug

SEQ ID NO: 737408 - RNA, 19 nt, Artificial Sequence
  Description of Artificial Sequence: Synthetic oligonucleotide
aaugcccaucaccacggac

SEQ ID NO: 737409 - RNA, 19 nt, Artificial Sequence
  Description of Artificial Sequence: Synthetic oligonucleotide
ucaagaugacccacacugg

SEQ ID NO: 737410 - RNA, 19 nt, Artificial Sequence
  Description of Artificial Sequence: Synthetic oligonucleotide
aaugugucagucagguacg

SEQ ID NO: 737411 - RNA, 19 nt, Artificial Sequence
  Description of Artificial Sequence: Synthetic oligonucleotide
aaguauaugcgaacuuaac

SEQ ID NO: 737412 - RNA, 19 nt, Artificial Sequence
  Description of Artificial Sequence: Synthetic oligonucleotide
gauuucguccagcaccagg

SEQ ID NO: 737413 - RNA, 19 nt, Artificial Sequence
  Description of Artificial Sequence: Synthetic oligonucleotide
ugugcgagacguuccacgg

SEQ ID NO: 737414 - RNA, 19 nt, Artificial Sequence
  Description of Artificial Sequence: Synthetic oligonucleotide
gacggcuugaagcggaucc

SEQ ID NO: 737415 - RNA, 19 nt, Artificial Sequence
  Description of Artificial Sequence: Synthetic oligonucleotide
guauaugcgaacuuaacgu

SEQ ID NO: 737416 - RNA, 19 nt, Artificial Sequence
  Description of Artificial Sequence: Synthetic oligonucleotide
uggggauugucaaaaggca

SEQ ID NO: 737417 - RNA, 19 nt, Artificial Sequence
  Description of Artificial Sequence: Synthetic oligonucleotide
gaagguuggccuucugccg

SEQ ID NO: 737418 - RNA, 19 nt, Artificial Sequence
  Description of Artificial Sequence: Synthetic oligonucleotide
uccgagaugagcgagugca

SEQ ID NO: 737419 - RNA, 19 nt, Artificial Sequence
  Description of Artificial Sequence: Synthetic oligonucleotide
uugggcuuggcuacaaugu

SEQ ID NO: 737420 - RNA, 19 nt, Artificial Sequence
  Description of Artificial Sequence: Synthetic oligonucleotide
uuauuacaagucacgcucu

SEQ ID NO: 737421 - RNA, 19 nt, Artificial Sequence
  Description of Artificial Sequence: Synthetic oligonucleotide
accguagaguggcugagcg

SEQ ID NO: 737422 - RNA, 19 nt, Artificial Sequence
  Description of Artificial Sequence: Synthetic oligonucleotide
guucgcgccgcacacagcg

SEQ ID NO: 737423 - RNA, 19 nt, Artificial Sequence
  Description of Artificial Sequence: Synthetic oligonucleotide
guaugcauuccaguguucg

SEQ ID NO: 737424 - RNA, 19 nt, Artificial Sequence
  Description of Artificial Sequence: Synthetic oligonucleotide
uccuuagagcgcuucaggc

SEQ ID NO: 737425 - RNA, 19 nt, Artificial Sequence
  Description of Artificial Sequence: Synthetic oligonucleotide
caaacggucucgcagugcc

SEQ ID NO: 737426 - RNA, 19 nt, Artificial Sequence
  Description of Artificial Sequence: Synthetic oligonucleotide
gaugacugagucuuccuuc

SEQ ID NO: 737427 - RNA, 19 nt, Artificial Sequence
  Description of Artificial Sequence: Synthetic oligonucleotide
ucggcuacacccuuguaga

SEQ ID NO: 737428 - RNA, 19 nt, Artificial Sequence
  Description of Artificial Sequence: Synthetic oligonucleotide
aagucacgcucuuauagaa

SEQ ID NO: 737429 - RNA, 19 nt, Artificial Sequence
  Description of Artificial Sequence: Synthetic oligonucleotide
aacgguucgguucgguucu

SEQ ID NO: 737430 - RNA, 19 nt, Artificial Sequence
  Description of Artificial Sequence: Synthetic oligonucleotide
uaggguaccguagaguggc

SEQ ID NO: 737431 - RNA, 19 nt, Artificial Sequence
  Description of Artificial Sequence: Synthetic oligonucleotide
uacgagugcaccucgcgcc

SEQ ID NO: 737432 - RNA, 19 nt, Artificial Sequence
  Description of Artificial Sequence: Synthetic oligonucleotide
cuuagagcgcuucaggcuc

SEQ ID NO: 737433 - RNA, 19 nt, Artificial Sequence
  Description of Artificial Sequence: Synthetic oligonucleotide
gaaggacucucgaaggcgg

SEQ ID NO: 737434 - RNA, 19 nt, Artificial Sequence
  Description of Artificial Sequence: Synthetic oligonucleotide
uuuagcuccuuagagcgcu

SEQ ID NO: 737435 - RNA, 19 nt, Artificial Sequence
  Description of Artificial Sequence: Synthetic oligonucleotide
gaagacggugggcagauga

SEQ ID NO: 737436 - RNA, 19 nt, Artificial Sequence
  Description of Artificial Sequence: Synthetic oligonucleotide
uaugcgaacuuaacgugaa

SEQ ID NO: 737437 - RNA, 19 nt, Artificial Sequence
  Description of Artificial Sequence: Synthetic oligonucleotide
ugagcgagugcaauguguc

SEQ ID NO: 737438 - RNA, 19 nt, Artificial Sequence
  Description of Artificial Sequence: Synthetic oligonucleotide
uccgucuggauggagaggc

SEQ ID NO: 737439 - RNA, 19 nt, Artificial Sequence
  Description of Artificial Sequence: Synthetic oligonucleotide
aagugcgauugcccucucc

SEQ ID NO: 737440 - RNA, 19 nt, Artificial Sequence
  Description of Artificial Sequence: Synthetic oligonucleotide
ucaggugggguggauaugc

SEQ ID NO: 737441 - RNA, 19 nt, Artificial Sequence
  Description of Artificial Sequence: Synthetic oligonucleotide
acugcggaagaagaaccgc

SEQ ID NO: 737442 - RNA, 19 nt, Artificial Sequence
  Description of Artificial Sequence: Synthetic oligonucleotide
ucgcggauccucaguaagg

SEQ ID NO: 737443 - RNA, 19 nt, Artificial Sequence
  Description of Artificial Sequence: Synthetic oligonucleotide
ugcgaacuuaacgugaaaa

SEQ ID NO: 737444 - RNA, 19 nt, Artificial Sequence
  Description of Artificial Sequence: Synthetic oligonucleotide
agucagguacgagugcacc

SEQ ID NO: 737445 - RNA, 19 nt, Artificial Sequence
  Description of Artificial Sequence: Synthetic oligonucleotide
gucaauaggcuugucucgg

SEQ ID NO: 737446 - RNA, 19 nt, Artificial Sequence
  Description of Artificial Sequence: Synthetic oligonucleotide
ucggacacugcccucuuga

SEQ ID NO: 737447 - RNA, 19 nt, Artificial Sequence
  Description of Artificial Sequence: Synthetic oligonucleotide
gaagaaccgcucaaggcgc

SEQ ID NO: 737448 - RNA, 19 nt, Artificial Sequence
  Description of Artificial Sequence: Synthetic oligonucleotide
aguccgucuggauggagag

SEQ ID NO: 737449 - RNA, 19 nt, Artificial Sequence
  Description of Artificial Sequence: Synthetic oligonucleotide
ggaaccguggacuccagag

SEQ ID NO: 737450 - RNA, 19 nt, Artificial Sequence
  Description of Artificial Sequence: Synthetic oligonucleotide
acggagcacccuuggaagc

SEQ ID NO: 737451 - RNA, 19 nt, Artificial Sequence
  Description of Artificial Sequence: Synthetic oligonucleotide
acgucuugaggcuugugcu

SEQ ID NO: 737452 - RNA, 19 nt, Artificial Sequence
  Description of Artificial Sequence: Synthetic oligonucleotide
uuugggcggcagcaggccg

SEQ ID NO: 737453 - RNA, 19 nt, Artificial Sequence
  Description of Artificial Sequence: Synthetic oligonucleotide
agaaguauaugcgaacuua

SEQ ID NO: 737454 - RNA, 19 nt, Artificial Sequence
  Description of Artificial Sequence: Synthetic oligonucleotide
aacggucucgcagugccag

SEQ ID NO: 737455 - RNA, 19 nt, Artificial Sequence
  Description of Artificial Sequence: Synthetic oligonucleotide
cugugcgagacguuccacg

SEQ ID NO: 737456 - RNA, 19 nt, Artificial Sequence
  Description of Artificial Sequence: Synthetic oligonucleotide
acguuccacggcuucaguc

SEQ ID NO: 737457 - RNA, 19 nt, Artificial Sequence
  Description of Artificial Sequence: Synthetic oligonucleotide
ugcauacaucaugaggaag

SEQ ID NO: 737458 - RNA, 19 nt, Artificial Sequence
  Description of Artificial Sequence: Synthetic oligonucleotide
ugcauuccaguguucgcgc

SEQ ID NO: 737459 - RNA, 19 nt, Artificial Sequence
  Description of Artificial Sequence: Synthetic oligonucleotide
uccucaguaaggcggcccc

SEQ ID NO: 737460 - RNA, 19 nt, Artificial Sequence
  Description of Artificial Sequence: Synthetic oligonucleotide
uguggguccgucucggcga

SEQ ID NO: 737461 - RNA, 19 nt, Artificial Sequence
  Description of Artificial Sequence: Synthetic oligonucleotide
cauaaggaugaauuccaca

SEQ ID NO: 737462 - RNA, 19 nt, Artificial Sequence
  Description of Artificial Sequence: Synthetic oligonucleotide
ugccgagguguacuguggg

SEQ ID NO: 737463 - RNA, 19 nt, Artificial Sequence
  Description of Artificial Sequence: Synthetic oligonucleotide
cuaggguaccguagagugg

SEQ ID NO: 737464 - RNA, 19 nt, Artificial Sequence
  Description of Artificial Sequence: Synthetic oligonucleotide
cacggagcacccuuggaag

SEQ ID NO: 737465 - RNA, 19 nt, Artificial Sequence
  Description of Artificial Sequence: Synthetic oligonucleotide
cacugcggaagaagaaccg

SEQ ID NO: 737466 - RNA, 19 nt, Artificial Sequence
  Description of Artificial Sequence: Synthetic oligonucleotide
gaagcggauccgaagguug

SEQ ID NO: 737467 - RNA, 19 nt, Artificial Sequence
  Description of Artificial Sequence: Synthetic oligonucleotide
uugucucgguagaacauaa

SEQ ID NO: 737468 - RNA, 19 nt, Artificial Sequence
  Description of Artificial Sequence: Synthetic oligonucleotide
uagaaguauaugcgaacuu

SEQ ID NO: 737469 - RNA, 19 nt, Artificial Sequence
  Description of Artificial Sequence: Synthetic oligonucleotide
ugucucgguagaacauaag

SEQ ID NO: 737470 - RNA, 19 nt, Artificial Sequence
  Description of Artificial Sequence: Synthetic oligonucleotide
gacacugcccucuugauuu

SEQ ID NO: 737471 - RNA, 19 nt, Artificial Sequence
  Description of Artificial Sequence: Synthetic oligonucleotide
gaaguauaugcgaacuuaa

SEQ ID NO: 737472 - RNA, 19 nt, Artificial Sequence
  Description of Artificial Sequence: Synthetic oligonucleotide
aaccgcucaaggcgcagug

SEQ ID NO: 737473 - RNA, 19 nt, Artificial Sequence
  Description of Artificial Sequence: Synthetic oligonucleotide
cauuccaguguucgcgccg

SEQ ID NO: 737474 - RNA, 19 nt, Artificial Sequence
  Description of Artificial Sequence: Synthetic oligonucleotide
agaugagcgagugcaaugu

SEQ ID NO: 737475 - RNA, 19 nt, Artificial Sequence
  Description of Artificial Sequence: Synthetic oligonucleotide
cauaguagaugccuuugga

SEQ ID NO: 737476 - RNA, 19 nt, Artificial Sequence
  Description of Artificial Sequence: Synthetic oligonucleotide
ccuaggguaccguagagug

SEQ ID NO: 737477 - RNA, 19 nt, Artificial Sequence
  Description of Artificial Sequence: Synthetic oligonucleotide
agagcaugcuuuccaaaau

SEQ ID NO: 737478 - RNA, 19 nt, Artificial Sequence
  Description of Artificial Sequence: Synthetic oligonucleotide
uggagguaaccaucagggc

SEQ ID NO: 737479 - RNA, 19 nt, Artificial Sequence
  Description of Artificial Sequence: Synthetic oligonucleotide
ugcggaagaagaaccgcuc

SEQ ID NO: 737480 - RNA, 19 nt, Artificial Sequence
  Description of Artificial Sequence: Synthetic oligonucleotide
gaugagcgagugcaaugug

SEQ ID NO: 737481 - RNA, 19 nt, Artificial Sequence
  Description of Artificial Sequence: Synthetic oligonucleotide
ugcaaacggucucgcagug

SEQ ID NO: 737482 - RNA, 19 nt, Artificial Sequence
  Description of Artificial Sequence: Synthetic oligonucleotide
auaugcgaacuuaacguga

SEQ ID NO: 737483 - RNA, 19 nt, Artificial Sequence
  Description of Artificial Sequence: Synthetic oligonucleotide
gucacaauguuucgcaucu

SEQ ID NO: 737484 - RNA, 19 nt, Artificial Sequence
  Description of Artificial Sequence: Synthetic oligonucleotide
gucgcggauccucaguaag

SEQ ID NO: 737485 - RNA, 19 nt, Artificial Sequence
  Description of Artificial Sequence: Synthetic oligonucleotide
cccgaugaagcccagcugg

SEQ ID NO: 737486 - RNA, 19 nt, Artificial Sequence
  Description of Artificial Sequence: Synthetic oligonucleotide
ugcgauugcccucuccguc

SEQ ID NO: 737487 - RNA, 19 nt, Artificial Sequence
  Description of Artificial Sequence: Synthetic oligonucleotide
auaaaguaguguaugcauu

SEQ ID NO: 737488 - RNA, 19 nt, Artificial Sequence
  Description of Artificial Sequence: Synthetic oligonucleotide
cagcacauaaaguagugua

SEQ ID NO: 737489 - RNA, 19 nt, Artificial Sequence
  Description of Artificial Sequence: Synthetic oligonucleotide
ugcucaaguaguugggcuu

SEQ ID NO: 737490 - RNA, 19 nt, Artificial Sequence
  Description of Artificial Sequence: Synthetic oligonucleotide
guacgagugcaccucgcgc

SEQ ID NO: 737491 - RNA, 19 nt, Artificial Sequence
  Description of Artificial Sequence: Synthetic oligonucleotide
aucaccacggacacuccgg

SEQ ID NO: 737492 - RNA, 19 nt, Artificial Sequence
  Description of Artificial Sequence: Synthetic oligonucleotide
caagucacgcucuuauaga

SEQ ID NO: 737493 - RNA, 19 nt, Artificial Sequence
  Description of Artificial Sequence: Synthetic oligonucleotide
ugggcuuggcuacaauguc

SEQ ID NO: 737494 - RNA, 19 nt, Artificial Sequence
  Description of Artificial Sequence: Synthetic oligonucleotide
ccuuuauuacaagucacgc

SEQ ID NO: 737495 - RNA, 19 nt, Artificial Sequence
  Description of Artificial Sequence: Synthetic oligonucleotide
uucgcaucuuucucagggu

SEQ ID NO: 737496 - RNA, 19 nt, Artificial Sequence
  Description of Artificial Sequence: Synthetic oligonucleotide
gguacgagugcaccucgcg

SEQ ID NO: 737497 - RNA, 19 nt, Artificial Sequence
  Description of Artificial Sequence: Synthetic oligonucleotide
guguucgcgccgcacacag

SEQ ID NO: 737498 - RNA, 19 nt, Artificial Sequence
  Description of Artificial Sequence: Synthetic oligonucleotide
cucaaggcgcaguggcugg

SEQ ID NO: 737499 - RNA, 19 nt, Artificial Sequence
  Description of Artificial Sequence: Synthetic oligonucleotide
ucaauaggcuugucucggu

SEQ ID NO: 737500 - RNA, 19 nt, Artificial Sequence
  Description of Artificial Sequence: Synthetic oligonucleotide
gggcaaacgguucgguucg

SEQ ID NO: 737501 - RNA, 19 nt, Artificial Sequence
  Description of Artificial Sequence: Synthetic oligonucleotide
ucagguacgagugcaccuc

SEQ ID NO: 737502 - RNA, 19 nt, Artificial Sequence
  Description of Artificial Sequence: Synthetic oligonucleotide
gucacgcucuuauagaagu

SEQ ID NO: 737503 - RNA, 19 nt, Artificial Sequence
  Description of Artificial Sequence: Synthetic oligonucleotide
uuggaucggcggcagcagc

SEQ ID NO: 737504 - RNA, 19 nt, Artificial Sequence
  Description of Artificial Sequence: Synthetic oligonucleotide
cucgguagaacauaaggau

SEQ ID NO: 737505 - RNA, 19 nt, Artificial Sequence
  Description of Artificial Sequence: Synthetic oligonucleotide
uugcccgccagugaggagu

SEQ ID NO: 737506 - RNA, 19 nt, Artificial Sequence
  Description of Artificial Sequence: Synthetic oligonucleotide
cucgcagugccagaaacuc

SEQ ID NO: 737507 - RNA, 19 nt, Artificial Sequence
  Description of Artificial Sequence: Synthetic oligonucleotide
agcacauaaaguaguguau

SEQ ID NO: 737508 - RNA, 19 nt, Artificial Sequence
  Description of Artificial Sequence: Synthetic oligonucleotide
ucgcaucuuucucaggguu

SEQ ID NO: 737509 - RNA, 19 nt, Artificial Sequence
  Description of Artificial Sequence: Synthetic oligonucleotide
acagcacauaaaguagugu

SEQ ID NO: 737510 - RNA, 19 nt, Artificial Sequence
  Description of Artificial Sequence: Synthetic oligonucleotide
uuuugggcggcagcaggcc

SEQ ID NO: 737511 - RNA, 19 nt, Artificial Sequence
  Description of Artificial Sequence: Synthetic oligonucleotide
uuccacggcuucagucgcg

SEQ ID NO: 737512 - RNA, 19 nt, Artificial Sequence
  Description of Artificial Sequence: Synthetic oligonucleotide
acggacacuccggugcggc

SEQ ID NO: 737513 - RNA, 19 nt, Artificial Sequence
  Description of Artificial Sequence: Synthetic oligonucleotide
acggcuucagucgcggauc

SEQ ID NO: 737514 - RNA, 19 nt, Artificial Sequence
  Description of Artificial Sequence: Synthetic oligonucleotide
guuucgcaucuuucucagg

SEQ ID NO: 737515 - RNA, 19 nt, Artificial Sequence
  Description of Artificial Sequence: Synthetic oligonucleotide
ugccugugcgagacguucc

SEQ ID NO: 737516 - RNA, 19 nt, Artificial Sequence
  Description of Artificial Sequence: Synthetic oligonucleotide
aagcaguaauccagguucu

SEQ ID NO: 737517 - RNA, 19 nt, Artificial Sequence
  Description of Artificial Sequence: Synthetic oligonucleotide
uugcagacuuucacccaca

SEQ ID NO: 737518 - RNA, 19 nt, Artificial Sequence
  Description of Artificial Sequence: Synthetic oligonucleotide
guuccacggcuucagucgc

SEQ ID NO: 737519 - RNA, 19 nt, Artificial Sequence
  Description of Artificial Sequence: Synthetic oligonucleotide
gugucagucagguacgagu

SEQ ID NO: 737520 - RNA, 19 nt, Artificial Sequence
  Description of Artificial Sequence: Synthetic oligonucleotide
ucuugcccgccagugagga

SEQ ID NO: 737521 - RNA, 19 nt, Artificial Sequence
  Description of Artificial Sequence: Synthetic oligonucleotide
uccccuucggcuacacccu

SEQ ID NO: 737522 - RNA, 19 nt, Artificial Sequence
  Description of Artificial Sequence: Synthetic oligonucleotide
cggauccucaguaaggcgg

SEQ ID NO: 737523 - RNA, 19 nt, Artificial Sequence
  Description of Artificial Sequence: Synthetic oligonucleotide
agccgaucuggagguaacc

SEQ ID NO: 737524 - RNA, 19 nt, Artificial Sequence
  Description of Artificial Sequence: Synthetic oligonucleotide
cagguacgagugcaccucg

SEQ ID NO: 737525 - RNA, 19 nt, Artificial Sequence
  Description of Artificial Sequence: Synthetic oligonucleotide
uggcccacccgcacugcgg

SEQ ID NO: 737526 - RNA, 19 nt, Artificial Sequence
  Description of Artificial Sequence: Synthetic oligonucleotide
gcuugaagcggauccgaag

SEQ ID NO: 737527 - RNA, 19 nt, Artificial Sequence
  Description of Artificial Sequence: Synthetic oligonucleotide
gagguguacuguggguccg

SEQ ID NO: 737528 - RNA, 19 nt, Artificial Sequence
  Description of Artificial Sequence: Synthetic oligonucleotide
agcggauccgaagguuggc

SEQ ID NO: 737529 - RNA, 19 nt, Artificial Sequence
  Description of Artificial Sequence: Synthetic oligonucleotide
agcgugcaaacggucucgc

SEQ ID NO: 737530 - RNA, 19 nt, Artificial Sequence
  Description of Artificial Sequence: Synthetic oligonucleotide
ggcuacaaugucauccucc

SEQ ID NO: 737531 - RNA, 19 nt, Artificial Sequence
  Description of Artificial Sequence: Synthetic oligonucleotide
gucagucagguacgagugc

SEQ ID NO: 737532 - RNA, 19 nt, Artificial Sequence
  Description of Artificial Sequence: Synthetic oligonucleotide
agguucuguuugguccucc

SEQ ID NO: 737533 - RNA, 19 nt, Artificial Sequence
  Description of Artificial Sequence: Synthetic oligonucleotide
augagcgagugcaaugugu

SEQ ID NO: 737534 - RNA, 19 nt, Artificial Sequence
  Description of Artificial Sequence: Synthetic oligonucleotide
gcgaucagcaccacgauga

SEQ ID NO: 737535 - RNA, 19 nt, Artificial Sequence
  Description of Artificial Sequence: Synthetic oligonucleotide
acggcuugaagcggauccg

SEQ ID NO: 737536 - RNA, 19 nt, Artificial Sequence
  Description of Artificial Sequence: Synthetic oligonucleotide
ucccacugcggaagaagaa

SEQ ID NO: 737537 - RNA, 19 nt, Artificial Sequence
  Description of Artificial Sequence: Synthetic oligonucleotide
agacguuccacggcuucag

SEQ ID NO: 737538 - RNA, 19 nt, Artificial Sequence
  Description of Artificial Sequence: Synthetic oligonucleotide
ccgccugccaggcagaacc

SEQ ID NO: 737539 - RNA, 19 nt, Artificial Sequence
  Description of Artificial Sequence: Synthetic oligonucleotide
cccgaaggacucucgaagg

SEQ ID NO: 737540 - RNA, 19 nt, Artificial Sequence
  Description of Artificial Sequence: Synthetic oligonucleotide
uggcucaagccgaccggcc

SEQ ID NO: 737541 - RNA, 19 nt, Artificial Sequence
  Description of Artificial Sequence: Synthetic oligonucleotide
acuccggugcggcccuggc

SEQ ID NO: 737542 - RNA, 19 nt, Artificial Sequence
  Description of Artificial Sequence: Synthetic oligonucleotide
cgugcaaacggucucgcag

SEQ ID NO: 737543 - RNA, 19 nt, Artificial Sequence
  Description of Artificial Sequence: Synthetic oligonucleotide
gguaccguagaguggcuga

SEQ ID NO: 737544 - RNA, 19 nt, Artificial Sequence
  Description of Artificial Sequence: Synthetic oligonucleotide
cuccuaggguaccguagag

SEQ ID NO: 737545 - RNA, 19 nt, Artificial Sequence
  Description of Artificial Sequence: Synthetic oligonucleotide
gagcgagugcaauguguca

SEQ ID NO: 737546 - RNA, 19 nt, Artificial Sequence
  Description of Artificial Sequence: Synthetic oligonucleotide
cucacgcuuggaaugccca

SEQ ID NO: 737547 - RNA, 19 nt, Artificial Sequence
  Description of Artificial Sequence: Synthetic oligonucleotide
uuccggagagcaugcuuuc

SEQ ID NO: 737548 - RNA, 19 nt, Artificial Sequence
  Description of Artificial Sequence: Synthetic oligonucleotide
guaccguagaguggcugag

SEQ ID NO: 737549 - RNA, 19 nt, Artificial Sequence
  Description of Artificial Sequence: Synthetic oligonucleotide
gaguccgucuggauggaga

SEQ ID NO: 737550 - RNA, 19 nt, Artificial Sequence
  Description of Artificial Sequence: Synthetic oligonucleotide
aagacggugggcagaugaa

SEQ ID NO: 737551 - RNA, 19 nt, Artificial Sequence
  Description of Artificial Sequence: Synthetic oligonucleotide
uccauuuagucagccuuuu

SEQ ID NO: 737552 - RNA, 19 nt, Artificial Sequence
  Description of Artificial Sequence: Synthetic oligonucleotide
caguguucgcgccgcacac

SEQ ID NO: 737553 - RNA, 19 nt, Artificial Sequence
  Description of Artificial Sequence: Synthetic oligonucleotide
uuucuggaucuugcccgcc

SEQ ID NO: 737554 - RNA, 19 nt, Artificial Sequence
  Description of Artificial Sequence: Synthetic oligonucleotide
agcaguaauccagguucug

SEQ ID NO: 737555 - RNA, 19 nt, Artificial Sequence
  Description of Artificial Sequence: Synthetic oligonucleotide
gcgauugcccucuccgucc

SEQ ID NO: 737556 - RNA, 19 nt, Artificial Sequence
  Description of Artificial Sequence: Synthetic oligonucleotide
caauguucccacugcggaa

SEQ ID NO: 737557 - RNA, 19 nt, Artificial Sequence
  Description of Artificial Sequence: Synthetic oligonucleotide
caggcagaacccuucaggu

SEQ ID NO: 737558 - RNA, 19 nt, Artificial Sequence
  Description of Artificial Sequence: Synthetic oligonucleotide
cgguagaacauaaggauga

SEQ ID NO: 737559 - RNA, 19 nt, Artificial Sequence
  Description of Artificial Sequence: Synthetic oligonucleotide
caagccgaccggccagggg

SEQ ID NO: 737560 - RNA, 19 nt, Artificial Sequence
  Description of Artificial Sequence: Synthetic oligonucleotide
uguucgcgccgcacacagc

SEQ ID NO: 737561 - RNA, 19 nt, Artificial Sequence
  Description of Artificial Sequence: Synthetic oligonucleotide
ccccgaaggacucucgaag

SEQ ID NO: 737562 - RNA, 19 nt, Artificial Sequence
  Description of Artificial Sequence: Synthetic oligonucleotide
augccugguccucuuggau

SEQ ID NO: 737563 - RNA, 19 nt, Artificial Sequence
  Description of Artificial Sequence: Synthetic oligonucleotide
gugcgagacguuccacggc

SEQ ID NO: 737564 - RNA, 19 nt, Artificial Sequence
  Description of Artificial Sequence: Synthetic oligonucleotide
aagaaccgcucaaggcgca

SEQ ID NO: 737565 - RNA, 19 nt, Artificial Sequence
  Description of Artificial Sequence: Synthetic oligonucleotide
gcggauccucaguaaggcg

SEQ ID NO: 737566 - RNA, 19 nt, Artificial Sequence
  Description of Artificial Sequence: Synthetic oligonucleotide
cucaagccgaccggccagg

SEQ ID NO: 737567 - RNA, 19 nt, Artificial Sequence
  Description of Artificial Sequence: Synthetic oligonucleotide
acgugccugugcgagacgu

SEQ ID NO: 737568 - RNA, 19 nt, Artificial Sequence
  Description of Artificial Sequence: Synthetic oligonucleotide
agucgcggauccucaguaa

SEQ ID NO: 737569 - RNA, 19 nt, Artificial Sequence
  Description of Artificial Sequence: Synthetic oligonucleotide
gugcucaaguaguugggcu

SEQ ID NO: 737570 - RNA, 19 nt, Artificial Sequence
  Description of Artificial Sequence: Synthetic oligonucleotide
ugauuucguccagcaccag

SEQ ID NO: 737571 - RNA, 19 nt, Artificial Sequence
  Description of Artificial Sequence: Synthetic oligonucleotide
cagcgggcgcccaagaaaa

SEQ ID NO: 737572 - RNA, 19 nt, Artificial Sequence
  Description of Artificial Sequence: Synthetic oligonucleotide
cagguccaaugacuugaac

SEQ ID NO: 737573 - RNA, 19 nt, Artificial Sequence
  Description of Artificial Sequence: Synthetic oligonucleotide
cuugucucgguagaacaua

SEQ ID NO: 737574 - RNA, 19 nt, Artificial Sequence
  Description of Artificial Sequence: Synthetic oligonucleotide
cuguuugguccuccaccug

SEQ ID NO: 737575 - RNA, 19 nt, Artificial Sequence
  Description of Artificial Sequence: Synthetic oligonucleotide
gucagguacgagugcaccu

SEQ ID NO: 737576 - RNA, 19 nt, Artificial Sequence
  Description of Artificial Sequence: Synthetic oligonucleotide
agaaccgcucaaggcgcag

SEQ ID NO: 737577 - RNA, 19 nt, Artificial Sequence
  Description of Artificial Sequence: Synthetic oligonucleotide
cuccgagaugagcgagugc

SEQ ID NO: 737578 - RNA, 19 nt, Artificial Sequence
  Description of Artificial Sequence: Synthetic oligonucleotide
ccgaaggacucucgaaggc

SEQ ID NO: 737579 - RNA, 19 nt, Artificial Sequence
  Description of Artificial Sequence: Synthetic oligonucleotide
augcgaacuuaacgugaaa

SEQ ID NO: 737580 - RNA, 19 nt, Artificial Sequence
  Description of Artificial Sequence: Synthetic oligonucleotide
aaacggucucgcagugcca

SEQ ID NO: 737581 - RNA, 19 nt, Artificial Sequence
  Description of Artificial Sequence: Synthetic oligonucleotide
ucucgcaaguaggccuucu

SEQ ID NO: 737582 - RNA, 19 nt, Artificial Sequence
  Description of Artificial Sequence: Synthetic oligonucleotide
cugcggaagaagaaccgcu

SEQ ID NO: 737583 - RNA, 19 nt, Artificial Sequence
  Description of Artificial Sequence: Synthetic oligonucleotide
ccgaugaagcccagcuggg

SEQ ID NO: 737584 - RNA, 19 nt, Artificial Sequence
  Description of Artificial Sequence: Synthetic oligonucleotide
ucaaggcgcaguggcugga

SEQ ID NO: 737585 - RNA, 19 nt, Artificial Sequence
  Description of Artificial Sequence: Synthetic oligonucleotide
cgaaggacucucgaaggcg

SEQ ID NO: 737586 - RNA, 19 nt, Artificial Sequence
  Description of Artificial Sequence: Synthetic oligonucleotide
cgagguguacugugggucc

SEQ ID NO: 737587 - RNA, 19 nt, Artificial Sequence
  Description of Artificial Sequence: Synthetic oligonucleotide
caauaggcuugucucggua

SEQ ID NO: 737588 - RNA, 19 nt, Artificial Sequence
  Description of Artificial Sequence: Synthetic oligonucleotide
gagccgaucuggagguaac

SEQ ID NO: 737589 - RNA, 19 nt, Artificial Sequence
  Description of Artificial Sequence: Synthetic oligonucleotide
ggcuccuaggguaccguag

SEQ ID NO: 737590 - RNA, 19 nt, Artificial Sequence
  Description of Artificial Sequence: Synthetic oligonucleotide
cugcacauaguagaugccu

SEQ ID NO: 737591 - RNA, 19 nt, Artificial Sequence
  Description of Artificial Sequence: Synthetic oligonucleotide
gaaugcccaucaccacgga

SEQ ID NO: 737592 - RNA, 19 nt, Artificial Sequence
  Description of Artificial Sequence: Synthetic oligonucleotide
gugaggagugagugcccac

SEQ ID NO: 737593 - RNA, 19 nt, Artificial Sequence
  Description of Artificial Sequence: Synthetic oligonucleotide
gcuccuaggguaccguaga

SEQ ID NO: 737594 - RNA, 19 nt, Artificial Sequence
  Description of Artificial Sequence: Synthetic oligonucleotide
ccgcucaaggcgcaguggc

SEQ ID NO: 737595 - RNA, 19 nt, Artificial Sequence
  Description of Artificial Sequence: Synthetic oligonucleotide
ccuggcucaagccgaccgg

SEQ ID NO: 737596 - RNA, 19 nt, Artificial Sequence
  Description of Artificial Sequence: Synthetic oligonucleotide
gaagcggaugaagucuccu

SEQ ID NO: 737597 - RNA, 19 nt, Artificial Sequence
  Description of Artificial Sequence: Synthetic oligonucleotide
cccacugcggaagaagaac

SEQ ID NO: 737598 - RNA, 19 nt, Artificial Sequence
  Description of Artificial Sequence: Synthetic oligonucleotide
cacaauguuucgcaucuuu

SEQ ID NO: 737599 - RNA, 19 nt, Artificial Sequence
  Description of Artificial Sequence: Synthetic oligonucleotide
agggacggcuugaagcgga

SEQ ID NO: 737600 - RNA, 19 nt, Artificial Sequence
  Description of Artificial Sequence: Synthetic oligonucleotide
cuugcccgccagugaggag

SEQ ID NO: 737601 - RNA, 19 nt, Artificial Sequence
  Description of Artificial Sequence: Synthetic oligonucleotide
cagcuccgagaugagcgag

SEQ ID NO: 737602 - RNA, 19 nt, Artificial Sequence
  Description of Artificial Sequence: Synthetic oligonucleotide
gcauuccaguguucgcgcc

SEQ ID NO: 737603 - RNA, 19 nt, Artificial Sequence
  Description of Artificial Sequence: Synthetic oligonucleotide
aguguucgcgccgcacaca

SEQ ID NO: 737604 - RNA, 19 nt, Artificial Sequence
  Description of Artificial Sequence: Synthetic oligonucleotide
guagaacauaaggaugaau

SEQ ID NO: 737605 - RNA, 19 nt, Artificial Sequence
  Description of Artificial Sequence: Synthetic oligonucleotide
cuccggugcggcccuggcc

SEQ ID NO: 737606 - RNA, 19 nt, Artificial Sequence
  Description of Artificial Sequence: Synthetic oligonucleotide
caccacggacacuccggug

SEQ ID NO: 737607 - RNA, 19 nt, Artificial Sequence
  Description of Artificial Sequence: Synthetic oligonucleotide
acgcucuuauagaaguaua

SEQ ID NO: 737608 - RNA, 19 nt, Artificial Sequence
  Description of Artificial Sequence: Synthetic oligonucleotide
ggggauugucaaaaggcaa

SEQ ID NO: 737609 - RNA, 19 nt, Artificial Sequence
  Description of Artificial Sequence: Synthetic oligonucleotide
gguggauaugccugguccu

SEQ ID NO: 737610 - RNA, 19 nt, Artificial Sequence
  Description of Artificial Sequence: Synthetic oligonucleotide
gcuucagucgcggauccuc

SEQ ID NO: 737611 - RNA, 19 nt, Artificial Sequence
  Description of Artificial Sequence: Synthetic oligonucleotide
gcgggagaagucaggguag

SEQ ID NO: 737612 - RNA, 19 nt, Artificial Sequence
  Description of Artificial Sequence: Synthetic oligonucleotide
guccccgaaggacucucga

SEQ ID NO: 737613 - RNA, 19 nt, Artificial Sequence
  Description of Artificial Sequence: Synthetic oligonucleotide
agugcaccucgcgccucac

SEQ ID NO: 737614 - RNA, 19 nt, Artificial Sequence
  Description of Artificial Sequence: Synthetic oligonucleotide
gccuuuggacugugcauac

SEQ ID NO: 737615 - RNA, 19 nt, Artificial Sequence
  Description of Artificial Sequence: Synthetic oligonucleotide
ggccacggagcacccuugg

SEQ ID NO: 737616 - RNA, 19 nt, Artificial Sequence
  Description of Artificial Sequence: Synthetic oligonucleotide
ccguagaguggcugagcgg

SEQ ID NO: 737617 - RNA, 19 nt, Artificial Sequence
  Description of Artificial Sequence: Synthetic oligonucleotide
gcugguacgucuugaggcu

SEQ ID NO: 737618 - RNA, 19 nt, Artificial Sequence
  Description of Artificial Sequence: Synthetic oligonucleotide
guaguugggcuuggcuaca

SEQ ID NO: 737619 - RNA, 19 nt, Artificial Sequence
  Description of Artificial Sequence: Synthetic oligonucleotide
gcuccgagaugagcgagug

SEQ ID NO: 737620 - RNA, 19 nt, Artificial Sequence
  Description of Artificial Sequence: Synthetic oligonucleotide
ggcucaagccgaccggcca

SEQ ID NO: 737621 - RNA, 19 nt, Artificial Sequence
  Description of Artificial Sequence: Synthetic oligonucleotide
cacgugccugugcgagacg

SEQ ID NO: 737622 - RNA, 19 nt, Artificial Sequence
  Description of Artificial Sequence: Synthetic oligonucleotide
acggucucgcagugccaga

SEQ ID NO: 737623 - RNA, 19 nt, Artificial Sequence
  Description of Artificial Sequence: Synthetic oligonucleotide
cgagccgccugccaggcag

SEQ ID NO: 737624 - RNA, 19 nt, Artificial Sequence
  Description of Artificial Sequence: Synthetic oligonucleotide
gcggauccgaagguuggcc

SEQ ID NO: 737625 - RNA, 19 nt, Artificial Sequence
  Description of Artificial Sequence: Synthetic oligonucleotide
uccuuccggagagcaugcu

SEQ ID NO: 737626 - RNA, 19 nt, Artificial Sequence
  Description of Artificial Sequence: Synthetic oligonucleotide
ggagaacuccaggaucauc

SEQ ID NO: 737627 - RNA, 19 nt, Artificial Sequence
  Description of Artificial Sequence: Synthetic oligonucleotide
cucaguaaggcggccccaa

SEQ ID NO: 737628 - RNA, 19 nt, Artificial Sequence
  Description of Artificial Sequence: Synthetic oligonucleotide
cgcggauccucaguaaggc

SEQ ID NO: 737629 - RNA, 19 nt, Artificial Sequence
  Description of Artificial Sequence: Synthetic oligonucleotide
cacggacacuccggugcgg

SEQ ID NO: 737630 - RNA, 19 nt, Artificial Sequence
  Description of Artificial Sequence: Synthetic oligonucleotide
gccgaucuggagguaacca

SEQ ID NO: 737631 - RNA, 19 nt, Artificial Sequence
  Description of Artificial Sequence: Synthetic oligonucleotide
caaacgguucgguucgguu

SEQ ID NO: 737632 - RNA, 19 nt, Artificial Sequence
  Description of Artificial Sequence: Synthetic oligonucleotide
gcaaacggucucgcagugc

SEQ ID NO: 737633 - RNA, 19 nt, Artificial Sequence
  Description of Artificial Sequence: Synthetic oligonucleotide
uccgucccgcagcgccugc

SEQ ID NO: 737634 - RNA, 19 nt, Artificial Sequence
  Description of Artificial Sequence: Synthetic oligonucleotide
gcggccccaagugcgauug

SEQ ID NO: 737635 - RNA, 19 nt, Artificial Sequence
  Description of Artificial Sequence: Synthetic oligonucleotide
ccuuagagcgcuucaggcu

SEQ ID NO: 737636 - RNA, 19 nt, Artificial Sequence
  Description of Artificial Sequence: Synthetic oligonucleotide
gcaguaauccagguucugu

SEQ ID NO: 737637 - RNA, 19 nt, Artificial Sequence
  Description of Artificial Sequence: Synthetic oligonucleotide
cugcgggcucagcuccgag

SEQ ID NO: 737638 - RNA, 19 nt, Artificial Sequence
  Description of Artificial Sequence: Synthetic oligonucleotide
ccacggagcacccuuggaa

SEQ ID NO: 737639 - RNA, 19 nt, Artificial Sequence
  Description of Artificial Sequence: Synthetic oligonucleotide
cacuccggugcggcccugg

SEQ ID NO: 737640 - RNA, 19 nt, Artificial Sequence
  Description of Artificial Sequence: Synthetic oligonucleotide
gugcgauugcccucuccgu

SEQ ID NO: 737641 - RNA, 19 nt, Artificial Sequence
  Description of Artificial Sequence: Synthetic oligonucleotide
ggagccgaucuggagguaa

SEQ ID NO: 737642 - RNA, 19 nt, Artificial Sequence
  Description of Artificial Sequence: Synthetic oligonucleotide
cgucuggauggagaggcgc

SEQ ID NO: 737643 - RNA, 19 nt, Artificial Sequence
  Description of Artificial Sequence: Synthetic oligonucleotide
ccgucuggauggagaggcg

SEQ ID NO: 737644 - RNA, 19 nt, Artificial Sequence
  Description of Artificial Sequence: Synthetic oligonucleotide
gccugugcgagacguucca

SEQ ID NO: 737645 - RNA, 19 nt, Artificial Sequence
  Description of Artificial Sequence: Synthetic oligonucleotide
gaaccgcucaaggcgcagu

SEQ ID NO: 737646 - RNA, 19 nt, Artificial Sequence
  Description of Artificial Sequence: Synthetic oligonucleotide
cacggcuucagucgcggau

SEQ ID NO: 737647 - RNA, 19 nt, Artificial Sequence
  Description of Artificial Sequence: Synthetic oligonucleotide
ggcaaacgguucgguucgg

SEQ ID NO: 737648 - RNA, 19 nt, Artificial Sequence
  Description of Artificial Sequence: Synthetic oligonucleotide
cucucggacacugcccucu

SEQ ID NO: 737649 - RNA, 19 nt, Artificial Sequence
  Description of Artificial Sequence: Synthetic oligonucleotide
caagugcgauugcccucuc

SEQ ID NO: 737650 - RNA, 19 nt, Artificial Sequence
  Description of Artificial Sequence: Synthetic oligonucleotide
ggugcucaauguucccacu

SEQ ID NO: 737651 - RNA, 19 nt, Artificial Sequence
  Description of Artificial Sequence: Synthetic oligonucleotide
cuccgucccgcagcgccug

SEQ ID NO: 737652 - RNA, 19 nt, Artificial Sequence
  Description of Artificial Sequence: Synthetic oligonucleotide
cucucgcaaguaggccuuc

SEQ ID NO: 737653 - RNA, 19 nt, Artificial Sequence
  Description of Artificial Sequence: Synthetic oligonucleotide
agccgaccggccaggggca

SEQ ID NO: 737654 - RNA, 19 nt, Artificial Sequence
  Description of Artificial Sequence: Synthetic oligonucleotide
ggucucgcagugccagaaa

SEQ ID NO: 737655 - RNA, 19 nt, Artificial Sequence
  Description of Artificial Sequence: Synthetic oligonucleotide
aggguaccguagaguggcu

SEQ ID NO: 737656 - RNA, 19 nt, Artificial Sequence
  Description of Artificial Sequence: Synthetic oligonucleotide
gguucgguucgguucuuuu

SEQ ID NO: 737657 - RNA, 19 nt, Artificial Sequence
  Description of Artificial Sequence: Synthetic oligonucleotide
ucucggcgaucagcaccac

SEQ ID NO: 737658 - RNA, 19 nt, Artificial Sequence
  Description of Artificial Sequence: Synthetic oligonucleotide
gcgggcucagcuccgagau

SEQ ID NO: 737659 - RNA, 19 nt, Artificial Sequence
  Description of Artificial Sequence: Synthetic oligonucleotide
gcgugcaaacggucucgca

SEQ ID NO: 737660 - RNA, 19 nt, Artificial Sequence
  Description of Artificial Sequence: Synthetic oligonucleotide
caaggcgcaguggcuggaa

SEQ ID NO: 737661 - RNA, 19 nt, Artificial Sequence
  Description of Artificial Sequence: Synthetic oligonucleotide
gcuugucucgguagaacau

SEQ ID NO: 737662 - RNA, 19 nt, Artificial Sequence
  Description of Artificial Sequence: Synthetic oligonucleotide
gagccgccugccaggcaga

SEQ ID NO: 737663 - RNA, 19 nt, Artificial Sequence
  Description of Artificial Sequence: Synthetic oligonucleotide
ccugugcgagacguuccac

SEQ ID NO: 737664 - RNA, 19 nt, Artificial Sequence
  Description of Artificial Sequence: Synthetic oligonucleotide
ccacgaugacugagucuuc

SEQ ID NO: 737665 - RNA, 19 nt, Artificial Sequence
  Description of Artificial Sequence: Synthetic oligonucleotide
cgccucacgcuuggaaugc

SEQ ID NO: 737666 - RNA, 19 nt, Artificial Sequence
  Description of Artificial Sequence: Synthetic oligonucleotide
ccgaucuggagguaaccau

SEQ ID NO: 737667 - RNA, 19 nt, Artificial Sequence
  Description of Artificial Sequence: Synthetic oligonucleotide
ccuuguagaaggagccgau

SEQ ID NO: 737668 - RNA, 19 nt, Artificial Sequence
  Description of Artificial Sequence: Synthetic oligonucleotide
ggacggcuugaagcggauc

SEQ ID NO: 737669 - RNA, 19 nt, Artificial Sequence
  Description of Artificial Sequence: Synthetic oligonucleotide
ccgggccagcgguggaccc

SEQ ID NO: 737670 - RNA, 19 nt, Artificial Sequence
  Description of Artificial Sequence: Synthetic oligonucleotide
ccgagaugagcgagugcaa

SEQ ID NO: 737671 - RNA, 19 nt, Artificial Sequence
  Description of Artificial Sequence: Synthetic oligonucleotide
gguacgucuugaggcuugu

SEQ ID NO: 737672 - RNA, 19 nt, Artificial Sequence
  Description of Artificial Sequence: Synthetic oligonucleotide
aggcggccccaagugcgau

SEQ ID NO: 737673 - RNA, 19 nt, Artificial Sequence
  Description of Artificial Sequence: Synthetic oligonucleotide
caccucgcgccucacgcuu

SEQ ID NO: 737674 - RNA, 19 nt, Artificial Sequence
  Description of Artificial Sequence: Synthetic oligonucleotide
aggagccgaucuggaggua

SEQ ID NO: 737675 - RNA, 19 nt, Artificial Sequence
  Description of Artificial Sequence: Synthetic oligonucleotide
acacuccggugcggcccug

SEQ ID NO: 737676 - RNA, 19 nt, Artificial Sequence
  Description of Artificial Sequence: Synthetic oligonucleotide
gcaaacgguucgguucggu

SEQ ID NO: 737677 - RNA, 19 nt, Artificial Sequence
  Description of Artificial Sequence: Synthetic oligonucleotide
acgguucgguucgguucuu

SEQ ID NO: 737678 - RNA, 19 nt, Artificial Sequence
  Description of Artificial Sequence: Synthetic oligonucleotide
cgaccggccaggggcaaac

SEQ ID NO: 737679 - RNA, 19 nt, Artificial Sequence
  Description of Artificial Sequence: Synthetic oligonucleotide
ccucaguaaggcggcccca

SEQ ID NO: 737680 - RNA, 19 nt, Artificial Sequence
  Description of Artificial Sequence: Synthetic oligonucleotide
cggccacggagcacccuug

SEQ ID NO: 737681 - RNA, 19 nt, Artificial Sequence
  Description of Artificial Sequence: Synthetic oligonucleotide
gggagaacuccaggaucau

SEQ ID NO: 737682 - RNA, 19 nt, Artificial Sequence
  Description of Artificial Sequence: Synthetic oligonucleotide
cggcuugaagcggauccga

SEQ ID NO: 737683 - RNA, 19 nt, Artificial Sequence
  Description of Artificial Sequence: Synthetic oligonucleotide
ccacggcuucagucgcgga

SEQ ID NO: 737684 - RNA, 19 nt, Artificial Sequence
  Description of Artificial Sequence: Synthetic oligonucleotide
cggucucgcagugccagaa

SEQ ID NO: 737685 - RNA, 19 nt, Artificial Sequence
  Description of Artificial Sequence: Synthetic oligonucleotide
ccuccgggccagcggugga

SEQ ID NO: 737686 - RNA, 19 nt, Artificial Sequence
  Description of Artificial Sequence: Synthetic oligonucleotide
cgagugcaccucgcgccuc

SEQ ID NO: 737687 - RNA, 19 nt, Artificial Sequence
  Description of Artificial Sequence: Synthetic oligonucleotide
ccggccacggagcacccuu

SEQ ID NO: 737688 - RNA, 19 nt, Artificial Sequence
  Description of Artificial Sequence: Synthetic oligonucleotide
gggacggcuugaagcggau

SEQ ID NO: 737689 - RNA, 19 nt, Artificial Sequence
  Description of Artificial Sequence: Synthetic oligonucleotide
cggccaggggcaaacgguu

SEQ ID NO: 737690 - RNA, 19 nt, Artificial Sequence
  Description of Artificial Sequence: Synthetic oligonucleotide
gcccacccgcacugcgggu

SEQ ID NO: 737691 - RNA, 19 nt, Artificial Sequence
  Description of Artificial Sequence: Synthetic oligonucleotide
ccgagccgccugccaggca

SEQ ID NO: 737692 - RNA, 19 nt, Artificial Sequence
  Description of Artificial Sequence: Synthetic oligonucleotide
gccgaccggccaggggcaa

SEQ ID NO: 737693 - RNA, 19 nt, Artificial Sequence
  Description of Artificial Sequence: Synthetic oligonucleotide
gcccgccagugaggaguga

SEQ ID NO: 737694 - RNA, 19 nt, Artificial Sequence
  Description of Artificial Sequence: Synthetic oligonucleotide
cccacccgcacugcggguu

SEQ ID NO: 737695 - RNA, 19 nt, Artificial Sequence
  Description of Artificial Sequence: Synthetic oligonucleotide
ccgaccggccaggggcaaa

SEQ ID NO: 737696 - RNA, 19 nt, Artificial Sequence
  Description of Artificial Sequence: Synthetic oligonucleotide
cgugccugugcgagacguu

SEQ ID NO: 737697 - RNA, 19 nt, Artificial Sequence
  Description of Artificial Sequence: Synthetic oligonucleotide
cgguucgguucgguucuuu

SEQ ID NO: 737698 - RNA, 19 nt, Artificial Sequence
  Description of Artificial Sequence: Synthetic oligonucleotide
uuauuaucaaaauugaccc

SEQ ID NO: 737699 - RNA, 19 nt, Artificial Sequence
  Description of Artificial Sequence: Synthetic oligonucleotide
uucuaagugaauuuuaacg

SEQ ID NO: 737700 - RNA, 19 nt, Artificial Sequence
  Description of Artificial Sequence: Synthetic oligonucleotide
aaauguaaguacucgaagg

SEQ ID NO: 737701 - RNA, 19 nt, Artificial Sequence
  Description of Artificial Sequence: Synthetic oligonucleotide
ucuaagugaauuuuaacgg

SEQ ID NO: 737702 - RNA, 19 nt, Artificial Sequence
  Description of Artificial Sequence: Synthetic oligonucleotide
uuucaaauuacuacaacag

SEQ ID NO: 737703 - RNA, 19 nt, Artificial Sequence
  Description of Artificial Sequence: Synthetic oligonucleotide
auuuuaacggauauuaugc

SEQ ID NO: 737704 - RNA, 19 nt, Artificial Sequence
  Description of Artificial Sequence: Synthetic oligonucleotide
uuuggaaaaggcuagacca

SEQ ID NO: 737705 - RNA, 19 nt, Artificial Sequence
  Description of Artificial Sequence: Synthetic oligonucleotide
auuuauaaugaaauuaugg

SEQ ID NO: 737706 - RNA, 19 nt, Artificial Sequence
  Description of Artificial Sequence: Synthetic oligonucleotide
ugauauuaguguaugaaug

SEQ ID NO: 737707 - RNA, 19 nt, Artificial Sequence
  Description of Artificial Sequence: Synthetic oligonucleotide
aaacauauguggcauugac

SEQ ID NO: 737708 - RNA, 19 nt, Artificial Sequence
  Description of Artificial Sequence: Synthetic oligonucleotide
aguaguaaggcuuuguuug

SEQ ID NO: 737709 - RNA, 19 nt, Artificial Sequence
  Description of Artificial Sequence: Synthetic oligonucleotide
uguuuaaucaagugcaugc

SEQ ID NO: 737710 - RNA, 19 nt, Artificial Sequence
  Description of Artificial Sequence: Synthetic oligonucleotide
aagcuacuaagccaagucc

SEQ ID NO: 737711 - RNA, 19 nt, Artificial Sequence
  Description of Artificial Sequence: Synthetic oligonucleotide
auuauugcuaagaagaguc

SEQ ID NO: 737712 - RNA, 19 nt, Artificial Sequence
  Description of Artificial Sequence: Synthetic oligonucleotide
uguguuaucggauauugug

SEQ ID NO: 737713 - RNA, 19 nt, Artificial Sequence
  Description of Artificial Sequence: Synthetic oligonucleotide
accuaaauuagucauauga

SEQ ID NO: 737714 - RNA, 19 nt, Artificial Sequence
  Description of Artificial Sequence: Synthetic oligonucleotide
uuauaaugaaauuaugguc

SEQ ID NO: 737715 - RNA, 19 nt, Artificial Sequence
  Description of Artificial Sequence: Synthetic oligonucleotide
aggguaaccagacugauag

SEQ ID NO: 737716 - RNA, 19 nt, Artificial Sequence
  Description of Artificial Sequence: Synthetic oligonucleotide
aauguaaguacucgaagga

SEQ ID NO: 737717 - RNA, 19 nt, Artificial Sequence
  Description of Artificial Sequence: Synthetic oligonucleotide
uuuguaaccaguuauuauc

SEQ ID NO: 737718 - RNA, 19 nt, Artificial Sequence
  Description of Artificial Sequence: Synthetic oligonucleotide
auuucaaauuacuacaaca

SEQ ID NO: 737719 - RNA, 19 nt, Artificial Sequence
  Description of Artificial Sequence: Synthetic oligonucleotide
uguaaguacucgaaggaag

SEQ ID NO: 737720 - RNA, 19 nt, Artificial Sequence
  Description of Artificial Sequence: Synthetic oligonucleotide
aaauugacccaauaguagu

SEQ ID NO: 737721 - RNA, 19 nt, Artificial Sequence
  Description of Artificial Sequence: Synthetic oligonucleotide
uaaauguaaguacucgaag

SEQ ID NO: 737722 - RNA, 19 nt, Artificial Sequence
  Description of Artificial Sequence: Synthetic oligonucleotide
auuaguguaugaauggggc

SEQ ID NO: 737723 - RNA, 19 nt, Artificial Sequence
  Description of Artificial Sequence: Synthetic oligonucleotide
uuuaauugauauuagugua

SEQ ID NO: 737724 - RNA, 19 nt, Artificial Sequence
  Description of Artificial Sequence: Synthetic oligonucleotide
uuuauggccuccauguucc

SEQ ID NO: 737725 - RNA, 19 nt, Artificial Sequence
  Description of Artificial Sequence: Synthetic oligonucleotide
uaaagguacagcaguauug

SEQ ID NO: 737726 - RNA, 19 nt, Artificial Sequence
  Description of Artificial Sequence: Synthetic oligonucleotide
gaaacaacaggguaaccag

SEQ ID NO: 737727 - RNA, 19 nt, Artificial Sequence
  Description of Artificial Sequence: Synthetic oligonucleotide
ucuuagaauuaaauguaag

SEQ ID NO: 737728 - RNA, 19 nt, Artificial Sequence
  Description of Artificial Sequence: Synthetic oligonucleotide
uuagaauuaaauguaagua

SEQ ID NO: 737729 - RNA, 19 nt, Artificial Sequence
  Description of Artificial Sequence: Synthetic oligonucleotide
uuucccacuaauaaguagu

SEQ ID NO: 737730 - RNA, 19 nt, Artificial Sequence
  Description of Artificial Sequence: Synthetic oligonucleotide
uuaaauguaaguacucgaa

SEQ ID NO: 737731 - RNA, 19 nt, Artificial Sequence
  Description of Artificial Sequence: Synthetic oligonucleotide
uuucaauccaguuguaucu

SEQ ID NO: 737732 - RNA, 19 nt, Artificial Sequence
  Description of Artificial Sequence: Synthetic oligonucleotide
uuucuuuacaacagaguug

SEQ ID NO: 737733 - RNA, 19 nt, Artificial Sequence
  Description of Artificial Sequence: Synthetic oligonucleotide
uauggucuaauuauuuaca

SEQ ID NO: 737734 - RNA, 19 nt, Artificial Sequence
  Description of Artificial Sequence: Synthetic oligonucleotide
acuuauuggacucugucca

SEQ ID NO: 737735 - RNA, 19 nt, Artificial Sequence
  Description of Artificial Sequence: Synthetic oligonucleotide
uuaucggauauuguguugg

SEQ ID NO: 737736 - RNA, 19 nt, Artificial Sequence
  Description of Artificial Sequence: Synthetic oligonucleotide
agaagagucaccgagcauc

SEQ ID NO: 737737 - RNA, 19 nt, Artificial Sequence
  Description of Artificial Sequence: Synthetic oligonucleotide
auuaaauguaaguacucga

SEQ ID NO: 737738 - RNA, 19 nt, Artificial Sequence
  Description of Artificial Sequence: Synthetic oligonucleotide
uuuaacggauauuaugcca

SEQ ID NO: 737739 - RNA, 19 nt, Artificial Sequence
  Description of Artificial Sequence: Synthetic oligonucleotide
uuagucauaugaauggguc

SEQ ID NO: 737740 - RNA, 19 nt, Artificial Sequence
  Description of Artificial Sequence: Synthetic oligonucleotide
auugguaauuauuucuuug

SEQ ID NO: 737741 - RNA, 19 nt, Artificial Sequence
  Description of Artificial Sequence: Synthetic oligonucleotide
gaggguuguguauagcugg

SEQ ID NO: 737742 - RNA, 19 nt, Artificial Sequence
  Description of Artificial Sequence: Synthetic oligonucleotide
uuuuaacggauauuaugcc

SEQ ID NO: 737743 - RNA, 19 nt, Artificial Sequence
  Description of Artificial Sequence: Synthetic oligonucleotide
ugaauggggcugcagaaag

SEQ ID NO: 737744 - RNA, 19 nt, Artificial Sequence
  Description of Artificial Sequence: Synthetic oligonucleotide
acggauauuaugccacugc

SEQ ID NO: 737745 - RNA, 19 nt, Artificial Sequence
  Description of Artificial Sequence: Synthetic oligonucleotide
aagugcaugcauuauugcu

SEQ ID NO: 737746 - RNA, 19 nt, Artificial Sequence
  Description of Artificial Sequence: Synthetic oligonucleotide
gauacuacuuauagcagag

SEQ ID NO: 737747 - RNA, 19 nt, Artificial Sequence
  Description of Artificial Sequence: Synthetic oligonucleotide
uuguaaccaguuauuauca

SEQ ID NO: 737748 - RNA, 19 nt, Artificial Sequence
  Description of Artificial Sequence: Synthetic oligonucleotide
auauguggcauugacacag

SEQ ID NO: 737749 - RNA, 19 nt, Artificial Sequence
  Description of Artificial Sequence: Synthetic oligonucleotide
uuaauagcaggagacagcu

SEQ ID NO: 737750 - RNA, 19 nt, Artificial Sequence
  Description of Artificial Sequence: Synthetic oligonucleotide
uguugcaccguuaaaaguu

SEQ ID NO: 737751 - RNA, 19 nt, Artificial Sequence
  Description of Artificial Sequence: Synthetic oligonucleotide
gacaguaucucaaacacuc

SEQ ID NO: 737752 - RNA, 19 nt, Artificial Sequence
  Description of Artificial Sequence: Synthetic oligonucleotide
guaucucaaacacuccugg

SEQ ID NO: 737753 - RNA, 19 nt, Artificial Sequence
  Description of Artificial Sequence: Synthetic oligonucleotide
uaagcuacuaagccaaguc

SEQ ID NO: 737754 - RNA, 19 nt, Artificial Sequence
  Description of Artificial Sequence: Synthetic oligonucleotide
acuguugcaccguuaaaag

SEQ ID NO: 737755 - RNA, 19 nt, Artificial Sequence
  Description of Artificial Sequence: Synthetic oligonucleotide
uugauauuaguguaugaau

SEQ ID NO: 737756 - RNA, 19 nt, Artificial Sequence
  Description of Artificial Sequence: Synthetic oligonucleotide
agcuacuaagccaaguccc

SEQ ID NO: 737757 - RNA, 19 nt, Artificial Sequence
  Description of Artificial Sequence: Synthetic oligonucleotide
uacugauagcccaaacucc

SEQ ID NO: 737758 - RNA, 19 nt, Artificial Sequence
  Description of Artificial Sequence: Synthetic oligonucleotide
aguuguaucugaccauuuc

SEQ ID NO: 737759 - RNA, 19 nt, Artificial Sequence
  Description of Artificial Sequence: Synthetic oligonucleotide
ugccgcauaagcuacuaag

SEQ ID NO: 737760 - RNA, 19 nt, Artificial Sequence
  Description of Artificial Sequence: Synthetic oligonucleotide
aucccuuuaugacagagga

SEQ ID NO: 737761 - RNA, 19 nt, Artificial Sequence
  Description of Artificial Sequence: Synthetic oligonucleotide
auuucuuauggggccaucc

SEQ ID NO: 737762 - RNA, 19 nt, Artificial Sequence
  Description of Artificial Sequence: Synthetic oligonucleotide
aggagucugccgcauaagc

SEQ ID NO: 737763 - RNA, 19 nt, Artificial Sequence
  Description of Artificial Sequence: Synthetic oligonucleotide
ucggauauuguguuggcac

SEQ ID NO: 737764 - RNA, 19 nt, Artificial Sequence
  Description of Artificial Sequence: Synthetic oligonucleotide
uagaccaggucaaacauau

SEQ ID NO: 737765 - RNA, 19 nt, Artificial Sequence
  Description of Artificial Sequence: Synthetic oligonucleotide
uggugauagacagugacug

SEQ ID NO: 737766 - RNA, 19 nt, Artificial Sequence
  Description of Artificial Sequence: Synthetic oligonucleotide
uuguguauagcugguaaag

SEQ ID NO: 737767 - RNA, 19 nt, Artificial Sequence
  Description of Artificial Sequence: Synthetic oligonucleotide
uccacacaccaauauuucg

SEQ ID NO: 737768 - RNA, 19 nt, Artificial Sequence
  Description of Artificial Sequence: Synthetic oligonucleotide
uaagugaauuuuaacggau

SEQ ID NO: 737769 - RNA, 19 nt, Artificial Sequence
  Description of Artificial Sequence: Synthetic oligonucleotide
uuaaucaagugcaugcauu

SEQ ID NO: 737770 - RNA, 19 nt, Artificial Sequence
  Description of Artificial Sequence: Synthetic oligonucleotide
guacugauagcccaaacuc

SEQ ID NO: 737771 - RNA, 19 nt, Artificial Sequence
  Description of Artificial Sequence: Synthetic oligonucleotide
gaauuagaagggcaguaac

SEQ ID NO: 737772 - RNA, 19 nt, Artificial Sequence
  Description of Artificial Sequence: Synthetic oligonucleotide
cccaauaguaguaaaauac

SEQ ID NO: 737773 - RNA, 19 nt, Artificial Sequence
  Description of Artificial Sequence: Synthetic oligonucleotide
uuggaaaaggcuagaccag

SEQ ID NO: 737774 - RNA, 19 nt, Artificial Sequence
  Description of Artificial Sequence: Synthetic oligonucleotide
uucuuauggggccauccag

SEQ ID NO: 737775 - RNA, 19 nt, Artificial Sequence
  Description of Artificial Sequence: Synthetic oligonucleotide
aggcaguuuugacaggagc

SEQ ID NO: 737776 - RNA, 19 nt, Artificial Sequence
  Description of Artificial Sequence: Synthetic oligonucleotide
uuuaaucaagugcaugcau

SEQ ID NO: 737777 - RNA, 19 nt, Artificial Sequence
  Description of Artificial Sequence: Synthetic oligonucleotide
guaaguacucgaaggaagg

SEQ ID NO: 737778 - RNA, 19 nt, Artificial Sequence
  Description of Artificial Sequence: Synthetic oligonucleotide
ucuuauggggccauccaga

SEQ ID NO: 737779 - RNA, 19 nt, Artificial Sequence
  Description of Artificial Sequence: Synthetic oligonucleotide
aucucaaacacuccuggcu

SEQ ID NO: 737780 - RNA, 19 nt, Artificial Sequence
  Description of Artificial Sequence: Synthetic oligonucleotide
uauuguguuggcacaggug

SEQ ID NO: 737781 - RNA, 19 nt, Artificial Sequence
  Description of Artificial Sequence: Synthetic oligonucleotide
agugaauuuuaacggauau

SEQ ID NO: 737782 - RNA, 19 nt, Artificial Sequence
  Description of Artificial Sequence: Synthetic oligonucleotide
aaguaguaaggcuuuguuu

SEQ ID NO: 737783 - RNA, 19 nt, Artificial Sequence
  Description of Artificial Sequence: Synthetic oligonucleotide
uagucauaugaaugggucc

SEQ ID NO: 737784 - RNA, 19 nt, Artificial Sequence
  Description of Artificial Sequence: Synthetic oligonucleotide
aacagaguugaggcuauuc

SEQ ID NO: 737785 - RNA, 19 nt, Artificial Sequence
  Description of Artificial Sequence: Synthetic oligonucleotide
gauagacagugacuguugc

SEQ ID NO: 737786 - RNA, 19 nt, Artificial Sequence
  Description of Artificial Sequence: Synthetic oligonucleotide
uucguuuucuuugacccag

SEQ ID NO: 737787 - RNA, 19 nt, Artificial Sequence
  Description of Artificial Sequence: Synthetic oligonucleotide
accguuaaaaguuggacuu

SEQ ID NO: 737788 - RNA, 19 nt, Artificial Sequence
  Description of Artificial Sequence: Synthetic oligonucleotide
uggcaucccuuuaugacag

SEQ ID NO: 737789 - RNA, 19 nt, Artificial Sequence
  Description of Artificial Sequence: Synthetic oligonucleotide
aagccuguaccuaaauuag

SEQ ID NO: 737790 - RNA, 19 nt, Artificial Sequence
  Description of Artificial Sequence: Synthetic oligonucleotide
uccguagggaggcugaacu

SEQ ID NO: 737791 - RNA, 19 nt, Artificial Sequence
  Description of Artificial Sequence: Synthetic oligonucleotide
aaucauggcuuccugucaa

SEQ ID NO: 737792 - RNA, 19 nt, Artificial Sequence
  Description of Artificial Sequence: Synthetic oligonucleotide
ggagggauacuacuuauag

SEQ ID NO: 737793 - RNA, 19 nt, Artificial Sequence
  Description of Artificial Sequence: Synthetic oligonucleotide
caggucaaacauauguggc

SEQ ID NO: 737794 - RNA, 19 nt, Artificial Sequence
  Description of Artificial Sequence: Synthetic oligonucleotide
ugcgccuucuaucucauuc

SEQ ID NO: 737795 - RNA, 19 nt, Artificial Sequence
  Description of Artificial Sequence: Synthetic oligonucleotide
caacauauaggaaaccaga

SEQ ID NO: 737796 - RNA, 19 nt, Artificial Sequence
  Description of Artificial Sequence: Synthetic oligonucleotide
ccacuaauaaguaguaagg

SEQ ID NO: 737797 - RNA, 19 nt, Artificial Sequence
  Description of Artificial Sequence: Synthetic oligonucleotide
auuauggucuaauuauuua

SEQ ID NO: 737798 - RNA, 19 nt, Artificial Sequence
  Description of Artificial Sequence: Synthetic oligonucleotide
ugauagcccaaacuccagc

SEQ ID NO: 737799 - RNA, 19 nt, Artificial Sequence
  Description of Artificial Sequence: Synthetic oligonucleotide
uauugcuaagaagagucac

SEQ ID NO: 737800 - RNA, 19 nt, Artificial Sequence
  Description of Artificial Sequence: Synthetic oligonucleotide
cuaagugaauuuuaacgga

SEQ ID NO: 737801 - RNA, 19 nt, Artificial Sequence
  Description of Artificial Sequence: Synthetic oligonucleotide
uaugaauggggcugcagaa

SEQ ID NO: 737802 - RNA, 19 nt, Artificial Sequence
  Description of Artificial Sequence: Synthetic oligonucleotide
aauuauggucuaauuauuu

SEQ ID NO: 737803 - RNA, 19 nt, Artificial Sequence
  Description of Artificial Sequence: Synthetic oligonucleotide
ucccuaaugucuucaaggu

SEQ ID NO: 737804 - RNA, 19 nt, Artificial Sequence
  Description of Artificial Sequence: Synthetic oligonucleotide
uggauaauauggugguuga

SEQ ID NO: 737805 - RNA, 19 nt, Artificial Sequence
  Description of Artificial Sequence: Synthetic oligonucleotide
gagggauacuacuuauagc

SEQ ID NO: 737806 - RNA, 19 nt, Artificial Sequence
  Description of Artificial Sequence: Synthetic oligonucleotide
uguaccuaaauuagucaua

SEQ ID NO: 737807 - RNA, 19 nt, Artificial Sequence
  Description of Artificial Sequence: Synthetic oligonucleotide
uucaagguccaagauggcc

SEQ ID NO: 737808 - RNA, 19 nt, Artificial Sequence
  Description of Artificial Sequence: Synthetic oligonucleotide
uccacuaacucccgugucu

SEQ ID NO: 737809 - RNA, 19 nt, Artificial Sequence
  Description of Artificial Sequence: Synthetic oligonucleotide
ugugaugaaggguacugau

SEQ ID NO: 737810 - RNA, 19 nt, Artificial Sequence
  Description of Artificial Sequence: Synthetic oligonucleotide
uguuaucggauauuguguu

SEQ ID NO: 737811 - RNA, 19 nt, Artificial Sequence
  Description of Artificial Sequence: Synthetic oligonucleotide
ugauucgguuuacagcucu

SEQ ID NO: 737812 - RNA, 19 nt, Artificial Sequence
  Description of Artificial Sequence: Synthetic oligonucleotide
agucauaugaaugggucca

SEQ ID NO: 737813 - RNA, 19 nt, Artificial Sequence
  Description of Artificial Sequence: Synthetic oligonucleotide
cccacuaauaaguaguaag

SEQ ID NO: 737814 - RNA, 19 nt, Artificial Sequence
  Description of Artificial Sequence: Synthetic oligonucleotide
aacauauguggcauugaca

SEQ ID NO: 737815 - RNA, 19 nt, Artificial Sequence
  Description of Artificial Sequence: Synthetic oligonucleotide
uauuaugccacugcagaaa

SEQ ID NO: 737816 - RNA, 19 nt, Artificial Sequence
  Description of Artificial Sequence: Synthetic oligonucleotide
gauauuguguuggcacagg

SEQ ID NO: 737817 - RNA, 19 nt, Artificial Sequence
  Description of Artificial Sequence: Synthetic oligonucleotide
uaacaauagcaauggcuac

SEQ ID NO: 737818 - RNA, 19 nt, Artificial Sequence
  Description of Artificial Sequence: Synthetic oligonucleotide
uauagcugguaaagguaca

SEQ ID NO: 737819 - RNA, 19 nt, Artificial Sequence
  Description of Artificial Sequence: Synthetic oligonucleotide
gguaaccagacugauagcc

SEQ ID NO: 737820 - RNA, 19 nt, Artificial Sequence
  Description of Artificial Sequence: Synthetic oligonucleotide
ugacgcaaauuugugauuc

SEQ ID NO: 737821 - RNA, 19 nt, Artificial Sequence
  Description of Artificial Sequence: Synthetic oligonucleotide
guuaauagcaggagacagc

SEQ ID NO: 737822 - RNA, 19 nt, Artificial Sequence
  Description of Artificial Sequence: Synthetic oligonucleotide
uauuggacucuguccagug

SEQ ID NO: 737823 - RNA, 19 nt, Artificial Sequence
  Description of Artificial Sequence: Synthetic oligonucleotide
uacuuauagcagaggguug

SEQ ID NO: 737824 - RNA, 19 nt, Artificial Sequence
  Description of Artificial Sequence: Synthetic oligonucleotide
caucccuuuaugacagagg

SEQ ID NO: 737825 - RNA, 19 nt, Artificial Sequence
  Description of Artificial Sequence: Synthetic oligonucleotide
uaucucaaacacuccuggc

SEQ ID NO: 737826 - RNA, 19 nt, Artificial Sequence
  Description of Artificial Sequence: Synthetic oligonucleotide
agccaagucccuucucggc

SEQ ID NO: 737827 - RNA, 19 nt, Artificial Sequence
  Description of Artificial Sequence: Synthetic oligonucleotide
gguuaauagcaggagacag

SEQ ID NO: 737828 - RNA, 19 nt, Artificial Sequence
  Description of Artificial Sequence: Synthetic oligonucleotide
guaugaauggggcugcaga

SEQ ID NO: 737829 - RNA, 19 nt, Artificial Sequence
  Description of Artificial Sequence: Synthetic oligonucleotide
agauucccguucaucaggc

SEQ ID NO: 737830 - RNA, 19 nt, Artificial Sequence
  Description of Artificial Sequence: Synthetic oligonucleotide
auauuguguuggcacaggu

SEQ ID NO: 737831 - RNA, 19 nt, Artificial Sequence
  Description of Artificial Sequence: Synthetic oligonucleotide
uugcaccguuaaaaguugg

SEQ ID NO: 737832 - RNA, 19 nt, Artificial Sequence
  Description of Artificial Sequence: Synthetic oligonucleotide
cuuauuggacucuguccag

SEQ ID NO: 737833 - RNA, 19 nt, Artificial Sequence
  Description of Artificial Sequence: Synthetic oligonucleotide
gccccuauuucuuaugggg

SEQ ID NO: 737834 - RNA, 19 nt, Artificial Sequence
  Description of Artificial Sequence: Synthetic oligonucleotide
agucaccgagcaucaaagg

SEQ ID NO: 737835 - RNA, 19 nt, Artificial Sequence
  Description of Artificial Sequence: Synthetic oligonucleotide
ugcaccguuaaaaguugga

SEQ ID NO: 737836 - RNA, 19 nt, Artificial Sequence
  Description of Artificial Sequence: Synthetic oligonucleotide
cacuaugcuugguacuccg

SEQ ID NO: 737837 - RNA, 19 nt, Artificial Sequence
  Description of Artificial Sequence: Synthetic oligonucleotide
augaaauuauggucuaauu

SEQ ID NO: 737838 - RNA, 19 nt, Artificial Sequence
  Description of Artificial Sequence: Synthetic oligonucleotide
auuggauggauaauauggu

SEQ ID NO: 737839 - RNA, 19 nt, Artificial Sequence
  Description of Artificial Sequence: Synthetic oligonucleotide
guuaucggauauuguguug

SEQ ID NO: 737840 - RNA, 19 nt, Artificial Sequence
  Description of Artificial Sequence: Synthetic oligonucleotide
aagugccagcuuuggauca

SEQ ID NO: 737841 - RNA, 19 nt, Artificial Sequence
  Description of Artificial Sequence: Synthetic oligonucleotide
ugaggagucugccgcauaa

SEQ ID NO: 737842 - RNA, 19 nt, Artificial Sequence
  Description of Artificial Sequence: Synthetic oligonucleotide
caagugcaugcauuauugc

SEQ ID NO: 737843 - RNA, 19 nt, Artificial Sequence
  Description of Artificial Sequence: Synthetic oligonucleotide
gaauauucagcuccugacu

SEQ ID NO: 737844 - RNA, 19 nt, Artificial Sequence
  Description of Artificial Sequence: Synthetic oligonucleotide
aggcaaggcaguuuugaca

SEQ ID NO: 737845 - RNA, 19 nt, Artificial Sequence
  Description of Artificial Sequence: Synthetic oligonucleotide
aguaucucaaacacuccug

SEQ ID NO: 737846 - RNA, 19 nt, Artificial Sequence
  Description of Artificial Sequence: Synthetic oligonucleotide
ugccccuauuucuuauggg

SEQ ID NO: 737847 - RNA, 19 nt, Artificial Sequence
  Description of Artificial Sequence: Synthetic oligonucleotide
uugaggagggauacuacuu

SEQ ID NO: 737848 - RNA, 19 nt, Artificial Sequence
  Description of Artificial Sequence: Synthetic oligonucleotide
aucgccucuucugugauug

SEQ ID NO: 737849 - RNA, 19 nt, Artificial Sequence
  Description of Artificial Sequence: Synthetic oligonucleotide
gauaaucauggcuuccugu

SEQ ID NO: 737850 - RNA, 19 nt, Artificial Sequence
  Description of Artificial Sequence: Synthetic oligonucleotide
caauccaguuguaucugac

SEQ ID NO: 737851 - RNA, 19 nt, Artificial Sequence
  Description of Artificial Sequence: Synthetic oligonucleotide
caagugccagcuuuggauc

SEQ ID NO: 737852 - RNA, 19 nt, Artificial Sequence
  Description of Artificial Sequence: Synthetic oligonucleotide
ugacaagugccagcuuugg

SEQ ID NO: 737853 - RNA, 19 nt, Artificial Sequence
  Description of Artificial Sequence: Synthetic oligonucleotide
cuucugguuaauagcagga

SEQ ID NO: 737854 - RNA, 19 nt, Artificial Sequence
  Description of Artificial Sequence: Synthetic oligonucleotide
uaucggauauuguguuggc

SEQ ID NO: 737855 - RNA, 19 nt, Artificial Sequence
  Description of Artificial Sequence: Synthetic oligonucleotide
acuacuuauagcagagggu

SEQ ID NO: 737856 - RNA, 19 nt, Artificial Sequence
  Description of Artificial Sequence: Synthetic oligonucleotide
uguaugaauggggcugcag

SEQ ID NO: 737857 - RNA, 19 nt, Artificial Sequence
  Description of Artificial Sequence: Synthetic oligonucleotide
ggauacuacuuauagcaga

SEQ ID NO: 737858 - RNA, 19 nt, Artificial Sequence
  Description of Artificial Sequence: Synthetic oligonucleotide
gagucugccgcauaagcua

SEQ ID NO: 737859 - RNA, 19 nt, Artificial Sequence
  Description of Artificial Sequence: Synthetic oligonucleotide
uaacggauauuaugccacu

SEQ ID NO: 737860 - RNA, 19 nt, Artificial Sequence
  Description of Artificial Sequence: Synthetic oligonucleotide
guuuaaucaagugcaugca

SEQ ID NO: 737861 - RNA, 19 nt, Artificial Sequence
  Description of Artificial Sequence: Synthetic oligonucleotide
ugguacuccguagggaggc

SEQ ID NO: 737862 - RNA, 19 nt, Artificial Sequence
  Description of Artificial Sequence: Synthetic oligonucleotide
guaucugaccauuucaaau

SEQ ID NO: 737863 - RNA, 19 nt, Artificial Sequence
  Description of Artificial Sequence: Synthetic oligonucleotide
caucuucuuagcuggauaa

SEQ ID NO: 737864 - RNA, 19 nt, Artificial Sequence
  Description of Artificial Sequence: Synthetic oligonucleotide
aggauggcaucccuuuaug

SEQ ID NO: 737865 - RNA, 19 nt, Artificial Sequence
  Description of Artificial Sequence: Synthetic oligonucleotide
uuauagcagaggguugugu

SEQ ID NO: 737866 - RNA, 19 nt, Artificial Sequence
  Description of Artificial Sequence: Synthetic oligonucleotide
cuugacgcaaauuugugau

SEQ ID NO: 737867 - RNA, 19 nt, Artificial Sequence
  Description of Artificial Sequence: Synthetic oligonucleotide
uuauuggacucuguccagu

SEQ ID NO: 737868 - RNA, 19 nt, Artificial Sequence
  Description of Artificial Sequence: Synthetic oligonucleotide
cuguccacuaacucccgug

SEQ ID NO: 737869 - RNA, 19 nt, Artificial Sequence
  Description of Artificial Sequence: Synthetic oligonucleotide
guguauagcugguaaaggu

SEQ ID NO: 737870 - RNA, 19 nt, Artificial Sequence
  Description of Artificial Sequence: Synthetic oligonucleotide
ucggccguuuucaucuucu

SEQ ID NO: 737871 - RNA, 19 nt, Artificial Sequence
  Description of Artificial Sequence: Synthetic oligonucleotide
gacacggacauuucaucaa

SEQ ID NO: 737872 - RNA, 19 nt, Artificial Sequence
  Description of Artificial Sequence: Synthetic oligonucleotide
ggcaucaacugccuguccc

SEQ ID NO: 737873 - RNA, 19 nt, Artificial Sequence
  Description of Artificial Sequence: Synthetic oligonucleotide
cucauucugacuggagaag

SEQ ID NO: 737874 - RNA, 19 nt, Artificial Sequence
  Description of Artificial Sequence: Synthetic oligonucleotide
uggcaagacuccaggugcc

SEQ ID NO: 737875 - RNA, 19 nt, Artificial Sequence
  Description of Artificial Sequence: Synthetic oligonucleotide
guugcaccguuaaaaguug

SEQ ID NO: 737876 - RNA, 19 nt, Artificial Sequence
  Description of Artificial Sequence: Synthetic oligonucleotide
cauaagcuacuaagccaag

SEQ ID NO: 737877 - RNA, 19 nt, Artificial Sequence
  Description of Artificial Sequence: Synthetic oligonucleotide
gauccugcgccuucuaucu

SEQ ID NO: 737878 - RNA, 19 nt, Artificial Sequence
  Description of Artificial Sequence: Synthetic oligonucleotide
uacuccguagggaggcuga

SEQ ID NO: 737879 - RNA, 19 nt, Artificial Sequence
  Description of Artificial Sequence: Synthetic oligonucleotide
aagugaauuuuaacggaua

SEQ ID NO: 737880 - RNA, 19 nt, Artificial Sequence
  Description of Artificial Sequence: Synthetic oligonucleotide
ggacacuucgucccuaaug

SEQ ID NO: 737881 - RNA, 19 nt, Artificial Sequence
  Description of Artificial Sequence: Synthetic oligonucleotide
agucugccgcauaagcuac

SEQ ID NO: 737882 - RNA, 19 nt, Artificial Sequence
  Description of Artificial Sequence: Synthetic oligonucleotide
uaccuaaauuagucauaug

SEQ ID NO: 737883 - RNA, 19 nt, Artificial Sequence
  Description of Artificial Sequence: Synthetic oligonucleotide
gcgcucuuagaauuaaaug

SEQ ID NO: 737884 - RNA, 19 nt, Artificial Sequence
  Description of Artificial Sequence: Synthetic oligonucleotide
acggacauuucaucaacua

SEQ ID NO: 737885 - RNA, 19 nt, Artificial Sequence
  Description of Artificial Sequence: Synthetic oligonucleotide
uuauggggccauccagaac

SEQ ID NO: 737886 - RNA, 19 nt, Artificial Sequence
  Description of Artificial Sequence: Synthetic oligonucleotide
uccaagcaguccagauucc

SEQ ID NO: 737887 - RNA, 19 nt, Artificial Sequence
  Description of Artificial Sequence: Synthetic oligonucleotide
auguaaguacucgaaggaa

SEQ ID NO: 737888 - RNA, 19 nt, Artificial Sequence
  Description of Artificial Sequence: Synthetic oligonucleotide
ucguuuucuuugacccagc

SEQ ID NO: 737889 - RNA, 19 nt, Artificial Sequence
  Description of Artificial Sequence: Synthetic oligonucleotide
agaaaggauccaaauggaa

SEQ ID NO: 737890 - RNA, 19 nt, Artificial Sequence
  Description of Artificial Sequence: Synthetic oligonucleotide
ucucgcucuuugccugagg

SEQ ID NO: 737891 - RNA, 19 nt, Artificial Sequence
  Description of Artificial Sequence: Synthetic oligonucleotide
agcagaauauuuauacauu

SEQ ID NO: 737892 - RNA, 19 nt, Artificial Sequence
  Description of Artificial Sequence: Synthetic oligonucleotide
gaagagucaccgagcauca

SEQ ID NO: 737893 - RNA, 19 nt, Artificial Sequence
  Description of Artificial Sequence: Synthetic oligonucleotide
cuggauaaucauggcuucc

SEQ ID NO: 737894 - RNA, 19 nt, Artificial Sequence
  Description of Artificial Sequence: Synthetic oligonucleotide
uggcacuaugcuugguacu

SEQ ID NO: 737895 - RNA, 19 nt, Artificial Sequence
  Description of Artificial Sequence: Synthetic oligonucleotide
ccgcauaagcuacuaagcc

SEQ ID NO: 737896 - RNA, 19 nt, Artificial Sequence
  Description of Artificial Sequence: Synthetic oligonucleotide
uucgucccuaaugucuuca

SEQ ID NO: 737897 - RNA, 19 nt, Artificial Sequence
  Description of Artificial Sequence: Synthetic oligonucleotide
ggauauuguguuggcacag

SEQ ID NO: 737898 - RNA, 19 nt, Artificial Sequence
  Description of Artificial Sequence: Synthetic oligonucleotide
caguagguaaugcuggcaa

SEQ ID NO: 737899 - RNA, 19 nt, Artificial Sequence
  Description of Artificial Sequence: Synthetic oligonucleotide
gguuguguauagcugguaa

SEQ ID NO: 737900 - RNA, 19 nt, Artificial Sequence
  Description of Artificial Sequence: Synthetic oligonucleotide
gguacugauagcccaaacu

SEQ ID NO: 737901 - RNA, 19 nt, Artificial Sequence
  Description of Artificial Sequence: Synthetic oligonucleotide
uugacgcaaauuugugauu

SEQ ID NO: 737902 - RNA, 19 nt, Artificial Sequence
  Description of Artificial Sequence: Synthetic oligonucleotide
ggauaaucauggcuuccug

SEQ ID NO: 737903 - RNA, 19 nt, Artificial Sequence
  Description of Artificial Sequence: Synthetic oligonucleotide
gccggcuggugauagacag

SEQ ID NO: 737904 - RNA, 19 nt, Artificial Sequence
  Description of Artificial Sequence: Synthetic oligonucleotide
cuuauggggccauccagaa

SEQ ID NO: 737905 - RNA, 19 nt, Artificial Sequence
  Description of Artificial Sequence: Synthetic oligonucleotide
ucacuuccacacaccaaua

SEQ ID NO: 737906 - RNA, 19 nt, Artificial Sequence
  Description of Artificial Sequence: Synthetic oligonucleotide
cucgcucuuugccugagga

SEQ ID NO: 737907 - RNA, 19 nt, Artificial Sequence
  Description of Artificial Sequence: Synthetic oligonucleotide
ggcaguuuugacaggagca

SEQ ID NO: 737908 - RNA, 19 nt, Artificial Sequence
  Description of Artificial Sequence: Synthetic oligonucleotide
agcuugacgcaaauuugug

SEQ ID NO: 737909 - RNA, 19 nt, Artificial Sequence
  Description of Artificial Sequence: Synthetic oligonucleotide
ccugaaacaagugugcuga

SEQ ID NO: 737910 - RNA, 19 nt, Artificial Sequence
  Description of Artificial Sequence: Synthetic oligonucleotide
guccaugcugguauccaag

SEQ ID NO: 737911 - RNA, 19 nt, Artificial Sequence
  Description of Artificial Sequence: Synthetic oligonucleotide
caccguuaaaaguuggacu

SEQ ID NO: 737912 - RNA, 19 nt, Artificial Sequence
  Description of Artificial Sequence: Synthetic oligonucleotide
ugcuggcaagacuccaggu

SEQ ID NO: 737913 - RNA, 19 nt, Artificial Sequence
  Description of Artificial Sequence: Synthetic oligonucleotide
cuguaccuaaauuagucau

SEQ ID NO: 737914 - RNA, 19 nt, Artificial Sequence
  Description of Artificial Sequence: Synthetic oligonucleotide
ccccuauuucuuauggggc

SEQ ID NO: 737915 - RNA, 19 nt, Artificial Sequence
  Description of Artificial Sequence: Synthetic oligonucleotide
cugugauuggggcugagcu

SEQ ID NO: 737916 - RNA, 19 nt, Artificial Sequence
  Description of Artificial Sequence: Synthetic oligonucleotide
gagcacuuauuggacucug

SEQ ID NO: 737917 - RNA, 19 nt, Artificial Sequence
  Description of Artificial Sequence: Synthetic oligonucleotide
cagaggguuguguauagcu

SEQ ID NO: 737918 - RNA, 19 nt, Artificial Sequence
  Description of Artificial Sequence: Synthetic oligonucleotide
ucgaaggaagggucuuaaa

SEQ ID NO: 737919 - RNA, 19 nt, Artificial Sequence
  Description of Artificial Sequence: Synthetic oligonucleotide
uugccggcuucgauccugc

SEQ ID NO: 737920 - RNA, 19 nt, Artificial Sequence
  Description of Artificial Sequence: Synthetic oligonucleotide
cugagcaaugggagccggc

SEQ ID NO: 737921 - RNA, 19 nt, Artificial Sequence
  Description of Artificial Sequence: Synthetic oligonucleotide
cacuucgucccuaaugucu

SEQ ID NO: 737922 - RNA, 19 nt, Artificial Sequence
  Description of Artificial Sequence: Synthetic oligonucleotide
cucuguccacuaacucccg

SEQ ID NO: 737923 - RNA, 19 nt, Artificial Sequence
  Description of Artificial Sequence: Synthetic oligonucleotide
aaggguacugauagcccaa

SEQ ID NO: 737924 - RNA, 19 nt, Artificial Sequence
  Description of Artificial Sequence: Synthetic oligonucleotide
gcuugacgcaaauuuguga

SEQ ID NO: 737925 - RNA, 19 nt, Artificial Sequence
  Description of Artificial Sequence: Synthetic oligonucleotide
guaaagguacagcaguauu

SEQ ID NO: 737926 - RNA, 19 nt, Artificial Sequence
  Description of Artificial Sequence: Synthetic oligonucleotide
gagccggcuggugauagac

SEQ ID NO: 737927 - RNA, 19 nt, Artificial Sequence
  Description of Artificial Sequence: Synthetic oligonucleotide
ucccacuaauaaguaguaa

SEQ ID NO: 737928 - RNA, 19 nt, Artificial Sequence
  Description of Artificial Sequence: Synthetic oligonucleotide
guguuaucggauauugugu

SEQ ID NO: 737929 - RNA, 19 nt, Artificial Sequence
  Description of Artificial Sequence: Synthetic oligonucleotide
gguaauuauuucuuugauu

SEQ ID NO: 737930 - RNA, 19 nt, Artificial Sequence
  Description of Artificial Sequence: Synthetic oligonucleotide
caguaucucaaacacuccu

SEQ ID NO: 737931 - RNA, 19 nt, Artificial Sequence
  Description of Artificial Sequence: Synthetic oligonucleotide
gccgcauaagcuacuaagc

SEQ ID NO: 737932 - RNA, 19 nt, Artificial Sequence
  Description of Artificial Sequence: Synthetic oligonucleotide
gcaugcauuauugcuaaga

SEQ ID NO: 737933 - RNA, 19 nt, Artificial Sequence
  Description of Artificial Sequence: Synthetic oligonucleotide
gaggagucugccgcauaag

SEQ ID NO: 737934 - RNA, 19 nt, Artificial Sequence
  Description of Artificial Sequence: Synthetic oligonucleotide
ccauuggauggauaauaug

SEQ ID NO: 737935 - RNA, 19 nt, Artificial Sequence
  Description of Artificial Sequence: Synthetic oligonucleotide
ccugucaaggccccagacc

SEQ ID NO: 737936 - RNA, 19 nt, Artificial Sequence
  Description of Artificial Sequence: Synthetic oligonucleotide
ccuuuaugacagaggacac

SEQ ID NO: 737937 - RNA, 19 nt, Artificial Sequence
  Description of Artificial Sequence: Synthetic oligonucleotide
agugugcugacaagugcca

SEQ ID NO: 737938 - RNA, 19 nt, Artificial Sequence
  Description of Artificial Sequence: Synthetic oligonucleotide
ggauaauauggugguugag

SEQ ID NO: 737939 - RNA, 19 nt, Artificial Sequence
  Description of Artificial Sequence: Synthetic oligonucleotide
augaauggggcugcagaaa

SEQ ID NO: 737940 - RNA, 19 nt, Artificial Sequence
  Description of Artificial Sequence: Synthetic oligonucleotide
auaggaaaccagagaguaa

SEQ ID NO: 737941 - RNA, 19 nt, Artificial Sequence
  Description of Artificial Sequence: Synthetic oligonucleotide
gcuccugacuggaaggaag

SEQ ID NO: 737942 - RNA, 19 nt, Artificial Sequence
  Description of Artificial Sequence: Synthetic oligonucleotide
gcaccguuaaaaguuggac

SEQ ID NO: 737943 - RNA, 19 nt, Artificial Sequence
  Description of Artificial Sequence: Synthetic oligonucleotide
ucgccucuucugugauugg

SEQ ID NO: 737944 - RNA, 19 nt, Artificial Sequence
  Description of Artificial Sequence: Synthetic oligonucleotide
aaggcuagaccaggucaaa

SEQ ID NO: 737945 - RNA, 19 nt, Artificial Sequence
  Description of Artificial Sequence: Synthetic oligonucleotide
ccuguaccuaaauuaguca

SEQ ID NO: 737946 - RNA, 19 nt, Artificial Sequence
  Description of Artificial Sequence: Synthetic oligonucleotide
ggcacuaugcuugguacuc

SEQ ID NO: 737947 - RNA, 19 nt, Artificial Sequence
  Description of Artificial Sequence: Synthetic oligonucleotide
ggauggcaucccuuuauga

SEQ ID NO: 737948 - RNA, 19 nt, Artificial Sequence
  Description of Artificial Sequence: Synthetic oligonucleotide
ggaauuagaagggcaguaa

SEQ ID NO: 737949 - RNA, 19 nt, Artificial Sequence
  Description of Artificial Sequence: Synthetic oligonucleotide
ucgucccuaaugucuucaa

SEQ ID NO: 737950 - RNA, 19 nt, Artificial Sequence
  Description of Artificial Sequence: Synthetic oligonucleotide
ucugccgcauaagcuacua

SEQ ID NO: 737951 - RNA, 19 nt, Artificial Sequence
  Description of Artificial Sequence: Synthetic oligonucleotide
gacgcaaauuugugauucu

SEQ ID NO: 737952 - RNA, 19 nt, Artificial Sequence
  Description of Artificial Sequence: Synthetic oligonucleotide
cugauagccauuggaugga

SEQ ID NO: 737953 - RNA, 19 nt, Artificial Sequence
  Description of Artificial Sequence: Synthetic oligonucleotide
cuaucucauucugacugga

SEQ ID NO: 737954 - RNA, 19 nt, Artificial Sequence
  Description of Artificial Sequence: Synthetic oligonucleotide
cuggugauagacagugacu

SEQ ID NO: 737955 - RNA, 19 nt, Artificial Sequence
  Description of Artificial Sequence: Synthetic oligonucleotide
ugauagccauuggauggau

SEQ ID NO: 737956 - RNA, 19 nt, Artificial Sequence
  Description of Artificial Sequence: Synthetic oligonucleotide
ggacauuucaucaacuauu

SEQ ID NO: 737957 - RNA, 19 nt, Artificial Sequence
  Description of Artificial Sequence: Synthetic oligonucleotide
acgcaaauuugugauucua

SEQ ID NO: 737958 - RNA, 19 nt, Artificial Sequence
  Description of Artificial Sequence: Synthetic oligonucleotide
agccuguaccuaaauuagu

SEQ ID NO: 737959 - RNA, 19 nt, Artificial Sequence
  Description of Artificial Sequence: Synthetic oligonucleotide
cuucgucccuaaugucuuc

SEQ ID NO: 737960 - RNA, 19 nt, Artificial Sequence
  Description of Artificial Sequence: Synthetic oligonucleotide
cacuccauugguaauuauu

SEQ ID NO: 737961 - RNA, 19 nt, Artificial Sequence
  Description of Artificial Sequence: Synthetic oligonucleotide
cugugaugaaggguacuga

SEQ ID NO: 737962 - RNA, 19 nt, Artificial Sequence
  Description of Artificial Sequence: Synthetic oligonucleotide
acuaugcuugguacuccgu

SEQ ID NO: 737963 - RNA, 19 nt, Artificial Sequence
  Description of Artificial Sequence: Synthetic oligonucleotide
aggugccaaugagacagcu

SEQ ID NO: 737964 - RNA, 19 nt, Artificial Sequence
  Description of Artificial Sequence: Synthetic oligonucleotide
ggguaaccagacugauagc

SEQ ID NO: 737965 - RNA, 19 nt, Artificial Sequence
  Description of Artificial Sequence: Synthetic oligonucleotide
gcaggcaaggcaguuuuga

SEQ ID NO: 737966 - RNA, 19 nt, Artificial Sequence
  Description of Artificial Sequence: Synthetic oligonucleotide
cucgaaggaagggucuuaa

SEQ ID NO: 737967 - RNA, 19 nt, Artificial Sequence
  Description of Artificial Sequence: Synthetic oligonucleotide
ggguacugauagcccaaac

SEQ ID NO: 737968 - RNA, 19 nt, Artificial Sequence
  Description of Artificial Sequence: Synthetic oligonucleotide
aggagggauacuacuuaua

SEQ ID NO: 737969 - RNA, 19 nt, Artificial Sequence
  Description of Artificial Sequence: Synthetic oligonucleotide
cucggccguuuucaucuuc

SEQ ID NO: 737970 - RNA, 19 nt, Artificial Sequence
  Description of Artificial Sequence: Synthetic oligonucleotide
cacggacauuucaucaacu

SEQ ID NO: 737971 - RNA, 19 nt, Artificial Sequence
  Description of Artificial Sequence: Synthetic oligonucleotide
ggucaaacauauguggcau

SEQ ID NO: 737972 - RNA, 19 nt, Artificial Sequence
  Description of Artificial Sequence: Synthetic oligonucleotide
ggugauagacagugacugu

SEQ ID NO: 737973 - RNA, 19 nt, Artificial Sequence
  Description of Artificial Sequence: Synthetic oligonucleotide
ggacuccaguagguaaugc

SEQ ID NO: 737974 - RNA, 19 nt, Artificial Sequence
  Description of Artificial Sequence: Synthetic oligonucleotide
caggguaaccagacugaua

SEQ ID NO: 737975 - RNA, 19 nt, Artificial Sequence
  Description of Artificial Sequence: Synthetic oligonucleotide
cuccguagggaggcugaac

SEQ ID NO: 737976 - RNA, 19 nt, Artificial Sequence
  Description of Artificial Sequence: Synthetic oligonucleotide
aggguacugauagcccaaa

SEQ ID NO: 737977 - RNA, 19 nt, Artificial Sequence
  Description of Artificial Sequence: Synthetic oligonucleotide
agaccaggucaaacauaug

SEQ ID NO: 737978 - RNA, 19 nt, Artificial Sequence
  Description of Artificial Sequence: Synthetic oligonucleotide
acucgaaggaagggucuua

SEQ ID NO: 737979 - RNA, 19 nt, Artificial Sequence
  Description of Artificial Sequence: Synthetic oligonucleotide
cacuuccacacaccaauau

SEQ ID NO: 737980 - RNA, 19 nt, Artificial Sequence
  Description of Artificial Sequence: Synthetic oligonucleotide
ccguuaaaaguuggacuug

SEQ ID NO: 737981 - RNA, 19 nt, Artificial Sequence
  Description of Artificial Sequence: Synthetic oligonucleotide
auguuucucuggacacgga

SEQ ID NO: 737982 - RNA, 19 nt, Artificial Sequence
  Description of Artificial Sequence: Synthetic oligonucleotide
ccguagggaggcugaacug

SEQ ID NO: 737983 - RNA, 19 nt, Artificial Sequence
  Description of Artificial Sequence: Synthetic oligonucleotide
gggagccggcuggugauag

SEQ ID NO: 737984 - RNA, 19 nt, Artificial Sequence
  Description of Artificial Sequence: Synthetic oligonucleotide
ggcgcucuuagaauuaaau

SEQ ID NO: 737985 - RNA, 19 nt, Artificial Sequence
  Description of Artificial Sequence: Synthetic oligonucleotide
cggauauuguguuggcaca

SEQ ID NO: 737986 - RNA, 19 nt, Artificial Sequence
  Description of Artificial Sequence: Synthetic oligonucleotide
caccaauauuucguuuucu

SEQ ID NO: 737987 - RNA, 19 nt, Artificial Sequence
  Description of Artificial Sequence: Synthetic oligonucleotide
ggagaagccuguaccuaaa

SEQ ID NO: 737988 - RNA, 19 nt, Artificial Sequence
  Description of Artificial Sequence: Synthetic oligonucleotide
agccggcuggugauagaca

SEQ ID NO: 737989 - RNA, 19 nt, Artificial Sequence
  Description of Artificial Sequence: Synthetic oligonucleotide
acuccguagggaggcugaa

SEQ ID NO: 737990 - RNA, 19 nt, Artificial Sequence
  Description of Artificial Sequence: Synthetic oligonucleotide
gcgccuucuaucucauucu

SEQ ID NO: 737991 - RNA, 19 nt, Artificial Sequence
  Description of Artificial Sequence: Synthetic oligonucleotide
cugccgcauaagcuacuaa

SEQ ID NO: 737992 - RNA, 19 nt, Artificial Sequence
  Description of Artificial Sequence: Synthetic oligonucleotide
accgagcaucaaaggucug

SEQ ID NO: 737993 - RNA, 19 nt, Artificial Sequence
  Description of Artificial Sequence: Synthetic oligonucleotide
aggcgcucuuagaauuaaa

SEQ ID NO: 737994 - RNA, 19 nt, Artificial Sequence
  Description of Artificial Sequence: Synthetic oligonucleotide
cagaggacacuucgucccu

SEQ ID NO: 737995 - RNA, 19 nt, Artificial Sequence
  Description of Artificial Sequence: Synthetic oligonucleotide
gccauuggauggauaauau

SEQ ID NO: 737996 - RNA, 19 nt, Artificial Sequence
  Description of Artificial Sequence: Synthetic oligonucleotide
ggucugccccuauuucuua

SEQ ID NO: 737997 - RNA, 19 nt, Artificial Sequence
  Description of Artificial Sequence: Synthetic oligonucleotide
ugggagccggcuggugaua

SEQ ID NO: 737998 - RNA, 19 nt, Artificial Sequence
  Description of Artificial Sequence: Synthetic oligonucleotide
aagucccuucucggccguu

SEQ ID NO: 737999 - RNA, 19 nt, Artificial Sequence
  Description of Artificial Sequence: Synthetic oligonucleotide
cuacuaagccaagucccuu

SEQ ID NO: 738000 - RNA, 19 nt, Artificial Sequence
  Description of Artificial Sequence: Synthetic oligonucleotide
cuucgauccugcgccuucu

SEQ ID NO: 738001 - RNA, 19 nt, Artificial Sequence
  Description of Artificial Sequence: Synthetic oligonucleotide
cguuaaaaguuggacuugu

SEQ ID NO: 738002 - RNA, 19 nt, Artificial Sequence
  Description of Artificial Sequence: Synthetic oligonucleotide
cggacauuucaucaacuau

SEQ ID NO: 738003 - RNA, 19 nt, Artificial Sequence
  Description of Artificial Sequence: Synthetic oligonucleotide
ggguuguguauagcuggua

SEQ ID NO: 738004 - RNA, 19 nt, Artificial Sequence
  Description of Artificial Sequence: Synthetic oligonucleotide
gucccuucucggccguuuu

SEQ ID NO: 738005 - RNA, 19 nt, Artificial Sequence
  Description of Artificial Sequence: Synthetic oligonucleotide
ccauuccuuucaucagacu

SEQ ID NO: 738006 - RNA, 19 nt, Artificial Sequence
  Description of Artificial Sequence: Synthetic oligonucleotide
gguacuccguagggaggcu

SEQ ID NO: 738007 - RNA, 19 nt, Artificial Sequence
  Description of Artificial Sequence: Synthetic oligonucleotide
gcaaugggagccggcuggu

SEQ ID NO: 738008 - RNA, 19 nt, Artificial Sequence
  Description of Artificial Sequence: Synthetic oligonucleotide
ccagacccauuccuuucau

SEQ ID NO: 738009 - RNA, 19 nt, Artificial Sequence
  Description of Artificial Sequence: Synthetic oligonucleotide
ccggcuggugauagacagu

SEQ ID NO: 738010 - RNA, 19 nt, Artificial Sequence
  Description of Artificial Sequence: Synthetic oligonucleotide
ccugcgccuucuaucucau

SEQ ID NO: 738011 - RNA, 19 nt, Artificial Sequence
  Description of Artificial Sequence: Synthetic oligonucleotide
cugcgccuucuaucucauu

SEQ ID NO: 738012 - RNA, 19 nt, Artificial Sequence
  Description of Artificial Sequence: Synthetic oligonucleotide
ggcuucgauccugcgccuu

SEQ ID NO: 738013 - RNA, 19 nt, Artificial Sequence
  Description of Artificial Sequence: Synthetic oligonucleotide
cggccguuuucaucuucuu

SEQ ID NO: 738014 - RNA, 19 nt, Artificial Sequence
  Description of Artificial Sequence: Synthetic oligonucleotide
aagagaauaaauaagggag

SEQ ID NO: 738015 - RNA, 19 nt, Artificial Sequence
  Description of Artificial Sequence: Synthetic oligonucleotide
aaaagggucaccuggagag

SEQ ID NO: 738016 - RNA, 19 nt, Artificial Sequence
  Description of Artificial Sequence: Synthetic oligonucleotide
uuugccaucguauacgggg

SEQ ID NO: 738017 - RNA, 19 nt, Artificial Sequence
  Description of Artificial Sequence: Synthetic oligonucleotide
gaucauaccgucuuuaaag

SEQ ID NO: 738018 - RNA, 19 nt, Artificial Sequence
  Description of Artificial Sequence: Synthetic oligonucleotide
uaaauaagggagaaggauc

SEQ ID NO: 738019 - RNA, 19 nt, Artificial Sequence
  Description of Artificial Sequence: Synthetic oligonucleotide
aucauaccgucuuuaaagc

SEQ ID NO: 738020 - RNA, 19 nt, Artificial Sequence
  Description of Artificial Sequence: Synthetic oligonucleotide
uguaucaucuugcaucgag

SEQ ID NO: 738021 - RNA, 19 nt, Artificial Sequence
  Description of Artificial Sequence: Synthetic oligonucleotide
uugcucuaugaucauaccg

SEQ ID NO: 738022 - RNA, 19 nt, Artificial Sequence
  Description of Artificial Sequence: Synthetic oligonucleotide
agaccacacauauaaauag

SEQ ID NO: 738023 - RNA, 19 nt, Artificial Sequence
  Description of Artificial Sequence: Synthetic oligonucleotide
ucaaguacaaaaugguaac

SEQ ID NO: 738024 - RNA, 19 nt, Artificial Sequence
  Description of Artificial Sequence: Synthetic oligonucleotide
ugagcuuagugccacugcg

SEQ ID NO: 738025 - RNA, 19 nt, Artificial Sequence
  Description of Artificial Sequence: Synthetic oligonucleotide
ugcucuaugaucauaccgu

SEQ ID NO: 738026 - RNA, 19 nt, Artificial Sequence
  Description of Artificial Sequence: Synthetic oligonucleotide
uccuguaucaucuugcauc

SEQ ID NO: 738027 - RNA, 19 nt, Artificial Sequence
  Description of Artificial Sequence: Synthetic oligonucleotide
ugauccuugaggcuucggg

SEQ ID NO: 738028 - RNA, 19 nt, Artificial Sequence
  Description of Artificial Sequence: Synthetic oligonucleotide
ggaaaaugagcuuagugcc

SEQ ID NO: 738029 - RNA, 19 nt, Artificial Sequence
  Description of Artificial Sequence: Synthetic oligonucleotide
gaaacucacuuugugaucc

SEQ ID NO: 738030 - RNA, 19 nt, Artificial Sequence
  Description of Artificial Sequence: Synthetic oligonucleotide
cuuccuaccagccuccugg

SEQ ID NO: 738031 - RNA, 19 nt, Artificial Sequence
  Description of Artificial Sequence: Synthetic oligonucleotide
cacuuugugauccuugagg

SEQ ID NO: 738032 - RNA, 19 nt, Artificial Sequence
  Description of Artificial Sequence: Synthetic oligonucleotide
aaugucugaacgugucguc

SEQ ID NO: 738033 - RNA, 19 nt, Artificial Sequence
  Description of Artificial Sequence: Synthetic oligonucleotide
guauagaaaccccuccugg

SEQ ID NO: 738034 - RNA, 19 nt, Artificial Sequence
  Description of Artificial Sequence: Synthetic oligonucleotide
auaagggagaaggaucugc

SEQ ID NO: 738035 - RNA, 19 nt, Artificial Sequence
  Description of Artificial Sequence: Synthetic oligonucleotide
uucuuucggacacuagggg

SEQ ID NO: 738036 - RNA, 19 nt, Artificial Sequence
  Description of Artificial Sequence: Synthetic oligonucleotide
ucuaugaucauaccgucuu

SEQ ID NO: 738037 - RNA, 19 nt, Artificial Sequence
  Description of Artificial Sequence: Synthetic oligonucleotide
uuugccaaggguccuagac

SEQ ID NO: 738038 - RNA, 19 nt, Artificial Sequence
  Description of Artificial Sequence: Synthetic oligonucleotide
aacccaagggcuuuccuug

SEQ ID NO: 738039 - RNA, 19 nt, Artificial Sequence
  Description of Artificial Sequence: Synthetic oligonucleotide
agagggcauagacauagac

SEQ ID NO: 738040 - RNA, 19 nt, Artificial Sequence
  Description of Artificial Sequence: Synthetic oligonucleotide
uucuaaagaaugcccacac

SEQ ID NO: 738041 - RNA, 19 nt, Artificial Sequence
  Description of Artificial Sequence: Synthetic oligonucleotide
ugugauacuggggcgaggg

SEQ ID NO: 738042 - RNA, 19 nt, Artificial Sequence
  Description of Artificial Sequence: Synthetic oligonucleotide
uaaggcgacgagaaaagcu

SEQ ID NO: 738043 - RNA, 19 nt, Artificial Sequence
  Description of Artificial Sequence: Synthetic oligonucleotide
uggugcucgucuaaguggg

SEQ ID NO: 738044 - RNA, 19 nt, Artificial Sequence
  Description of Artificial Sequence: Synthetic oligonucleotide
aguuaaugggcacacuugu

SEQ ID NO: 738045 - RNA, 19 nt, Artificial Sequence
  Description of Artificial Sequence: Synthetic oligonucleotide
cuuggaaacaccagagaug

SEQ ID NO: 738046 - RNA, 19 nt, Artificial Sequence
  Description of Artificial Sequence: Synthetic oligonucleotide
auaacccaaggaaagcgcc

SEQ ID NO: 738047 - RNA, 19 nt, Artificial Sequence
  Description of Artificial Sequence: Synthetic oligonucleotide
agaugaguaccccagggcu

SEQ ID NO: 738048 - RNA, 19 nt, Artificial Sequence
  Description of Artificial Sequence: Synthetic oligonucleotide
gcuucuuagaacccaaggg

SEQ ID NO: 738049 - RNA, 19 nt, Artificial Sequence
  Description of Artificial Sequence: Synthetic oligonucleotide
ugaacgugucgucucaucu

SEQ ID NO: 738050 - RNA, 19 nt, Artificial Sequence
  Description of Artificial Sequence: Synthetic oligonucleotide
cuaauuugccaucguauac

SEQ ID NO: 738051 - RNA, 19 nt, Artificial Sequence
  Description of Artificial Sequence: Synthetic oligonucleotide
ugguaggugugauacuggg

SEQ ID NO: 738052 - RNA, 19 nt, Artificial Sequence
  Description of Artificial Sequence: Synthetic oligonucleotide
agcuccuaaagcuaucucu

SEQ ID NO: 738053 - RNA, 19 nt, Artificial Sequence
  Description of Artificial Sequence: Synthetic oligonucleotide
cauaacccaaggaaagcgc

SEQ ID NO: 738054 - RNA, 19 nt, Artificial Sequence
  Description of Artificial Sequence: Synthetic oligonucleotide
aaacauccuuccaacuuac

SEQ ID NO: 738055 - RNA, 19 nt, Artificial Sequence
  Description of Artificial Sequence: Synthetic oligonucleotide
cuaagacagagccugcccc

SEQ ID NO: 738056 - RNA, 19 nt, Artificial Sequence
  Description of Artificial Sequence: Synthetic oligonucleotide
aaggcgacgagaaaagcug

SEQ ID NO: 738057 - RNA, 19 nt, Artificial Sequence
  Description of Artificial Sequence: Synthetic oligonucleotide
aguagacccuguuucugac

SEQ ID NO: 738058 - RNA, 19 nt, Artificial Sequence
  Description of Artificial Sequence: Synthetic oligonucleotide
auaccgucuuuaaagcucc

SEQ ID NO: 738059 - RNA, 19 nt, Artificial Sequence
  Description of Artificial Sequence: Synthetic oligonucleotide
uugucuucgugacaguggu

SEQ ID NO: 738060 - RNA, 19 nt, Artificial Sequence
  Description of Artificial Sequence: Synthetic oligonucleotide
uccuauguccacagcaaug

SEQ ID NO: 738061 - RNA, 19 nt, Artificial Sequence
  Description of Artificial Sequence: Synthetic oligonucleotide
cuuucggacacuaggggug

SEQ ID NO: 738062 - RNA, 19 nt, Artificial Sequence
  Description of Artificial Sequence: Synthetic oligonucleotide
ucuuucggacacuaggggu

SEQ ID NO: 738063 - RNA, 19 nt, Artificial Sequence
  Description of Artificial Sequence: Synthetic oligonucleotide
gugguuuagagggugagcc

SEQ ID NO: 738064 - RNA, 19 nt, Artificial Sequence
  Description of Artificial Sequence: Synthetic oligonucleotide
uugccaaggguccuagacc

SEQ ID NO: 738065 - RNA, 19 nt, Artificial Sequence
  Description of Artificial Sequence: Synthetic oligonucleotide
agagagguauagaaacccc

SEQ ID NO: 738066 - RNA, 19 nt, Artificial Sequence
  Description of Artificial Sequence: Synthetic oligonucleotide
ugccaaacuccuaugucca

SEQ ID NO: 738067 - RNA, 19 nt, Artificial Sequence
  Description of Artificial Sequence: Synthetic oligonucleotide
gacgagaaaagcugccagc

SEQ ID NO: 738068 - RNA, 19 nt, Artificial Sequence
  Description of Artificial Sequence: Synthetic oligonucleotide
cuggugcucgucuaagugg

SEQ ID NO: 738069 - RNA, 19 nt, Artificial Sequence
  Description of Artificial Sequence: Synthetic oligonucleotide
aaugagcuuagugccacug

SEQ ID NO: 738070 - RNA, 19 nt, Artificial Sequence
  Description of Artificial Sequence: Synthetic oligonucleotide
uuugugauccuugaggcuu

SEQ ID NO: 738071 - RNA, 19 nt, Artificial Sequence
  Description of Artificial Sequence: Synthetic oligonucleotide
cuugguaggugugauacug

SEQ ID NO: 738072 - RNA, 19 nt, Artificial Sequence
  Description of Artificial Sequence: Synthetic oligonucleotide
cuagggaaggcuuccuacc

SEQ ID NO: 738073 - RNA, 19 nt, Artificial Sequence
  Description of Artificial Sequence: Synthetic oligonucleotide
aagcuccuaaagcuaucuc

SEQ ID NO: 738074 - RNA, 19 nt, Artificial Sequence
  Description of Artificial Sequence: Synthetic oligonucleotide
ugaucauaccgucuuuaaa

SEQ ID NO: 738075 - RNA, 19 nt, Artificial Sequence
  Description of Artificial Sequence: Synthetic oligonucleotide
cggaaaaugagcuuagugc

SEQ ID NO: 738076 - RNA, 19 nt, Artificial Sequence
  Description of Artificial Sequence: Synthetic oligonucleotide
uagacccuguuucugacuc

SEQ ID NO: 738077 - RNA, 19 nt, Artificial Sequence
  Description of Artificial Sequence: Synthetic oligonucleotide
aacucguccugagcaaugg

SEQ ID NO: 738078 - RNA, 19 nt, Artificial Sequence
  Description of Artificial Sequence: Synthetic oligonucleotide
ugcuacuggguccaagcca

SEQ ID NO: 738079 - RNA, 19 nt, Artificial Sequence
  Description of Artificial Sequence: Synthetic oligonucleotide
ucuaacugagccacugcuc

SEQ ID NO: 738080 - RNA, 19 nt, Artificial Sequence
  Description of Artificial Sequence: Synthetic oligonucleotide
ugugauuggcucagaccag

SEQ ID NO: 738081 - RNA, 19 nt, Artificial Sequence
  Description of Artificial Sequence: Synthetic oligonucleotide
cucguccugagcaaugggc

SEQ ID NO: 738082 - RNA, 19 nt, Artificial Sequence
  Description of Artificial Sequence: Synthetic oligonucleotide
ucauaccgucuuuaaagcu

SEQ ID NO: 738083 - RNA, 19 nt, Artificial Sequence
  Description of Artificial Sequence: Synthetic oligonucleotide
gugacggugguaacaaugg

SEQ ID NO: 738084 - RNA, 19 nt, Artificial Sequence
  Description of Artificial Sequence: Synthetic oligonucleotide
auaaugguccgguccagcu

SEQ ID NO: 738085 - RNA, 19 nt, Artificial Sequence
  Description of Artificial Sequence: Synthetic oligonucleotide
agugguuuagagggugagc

SEQ ID NO: 738086 - RNA, 19 nt, Artificial Sequence
  Description of Artificial Sequence: Synthetic oligonucleotide
guaucaucuugcaucgagg

SEQ ID NO: 738087 - RNA, 19 nt, Artificial Sequence
  Description of Artificial Sequence: Synthetic oligonucleotide
cacacaugcuaagacagag

SEQ ID NO: 738088 - RNA, 19 nt, Artificial Sequence
  Description of Artificial Sequence: Synthetic oligonucleotide
gauuccuaugaucugccaa

SEQ ID NO: 738089 - RNA, 19 nt, Artificial Sequence
  Description of Artificial Sequence: Synthetic oligonucleotide
gaacgugucgucucaucug

SEQ ID NO: 738090 - RNA, 19 nt, Artificial Sequence
  Description of Artificial Sequence: Synthetic oligonucleotide
gaguuaaugggcacacuug

SEQ ID NO: 738091 - RNA, 19 nt, Artificial Sequence
  Description of Artificial Sequence: Synthetic oligonucleotide
gaaaagggucaccuggaga

SEQ ID NO: 738092 - RNA, 19 nt, Artificial Sequence
  Description of Artificial Sequence: Synthetic oligonucleotide
ucauaguggcugcugggcu

SEQ ID NO: 738093 - RNA, 19 nt, Artificial Sequence
  Description of Artificial Sequence: Synthetic oligonucleotide
ccuguaucaucuugcaucg

SEQ ID NO: 738094 - RNA, 19 nt, Artificial Sequence
  Description of Artificial Sequence: Synthetic oligonucleotide
aaacuuccaauuugacuuu

SEQ ID NO: 738095 - RNA, 19 nt, Artificial Sequence
  Description of Artificial Sequence: Synthetic oligonucleotide
ucguauacggggucgggac

SEQ ID NO: 738096 - RNA, 19 nt, Artificial Sequence
  Description of Artificial Sequence: Synthetic oligonucleotide
uggccguuguguuggagag

SEQ ID NO: 738097 - RNA, 19 nt, Artificial Sequence
  Description of Artificial Sequence: Synthetic oligonucleotide
ucaucgugugauuggcuca

SEQ ID NO: 738098 - RNA, 19 nt, Artificial Sequence
  Description of Artificial Sequence: Synthetic oligonucleotide
agcuuagugccacugcgca

SEQ ID NO: 738099 - RNA, 19 nt, Artificial Sequence
  Description of Artificial Sequence: Synthetic oligonucleotide
agugacggugguaacaaug

SEQ ID NO: 738100 - RNA, 19 nt, Artificial Sequence
  Description of Artificial Sequence: Synthetic oligonucleotide
acggggucgggacuggacg

SEQ ID NO: 738101 - RNA, 19 nt, Artificial Sequence
  Description of Artificial Sequence: Synthetic oligonucleotide
cuugcucuaugaucauacc

SEQ ID NO: 738102 - RNA, 19 nt, Artificial Sequence
  Description of Artificial Sequence: Synthetic oligonucleotide
aaaccgcuugauaaggcga

SEQ ID NO: 738103 - RNA, 19 nt, Artificial Sequence
  Description of Artificial Sequence: Synthetic oligonucleotide
uuucggacacuaggggugg

SEQ ID NO: 738104 - RNA, 19 nt, Artificial Sequence
  Description of Artificial Sequence: Synthetic oligonucleotide
caauuugacuuuaauuaaa

SEQ ID NO: 738105 - RNA, 19 nt, Artificial Sequence
  Description of Artificial Sequence: Synthetic oligonucleotide
gcuggggcuucuuagaacc

SEQ ID NO: 738106 - RNA, 19 nt, Artificial Sequence
  Description of Artificial Sequence: Synthetic oligonucleotide
gguauagaaaccccuccug

SEQ ID NO: 738107 - RNA, 19 nt, Artificial Sequence
  Description of Artificial Sequence: Synthetic oligonucleotide
aaagaggagcaguguggga

SEQ ID NO: 738108 - RNA, 19 nt, Artificial Sequence
  Description of Artificial Sequence: Synthetic oligonucleotide
agucuaauuugccaucgua

SEQ ID NO: 738109 - RNA, 19 nt, Artificial Sequence
  Description of Artificial Sequence: Synthetic oligonucleotide
uaugaucauaccgucuuua

SEQ ID NO: 738110 - RNA, 19 nt, Artificial Sequence
  Description of Artificial Sequence: Synthetic oligonucleotide
gucaucgugugauuggcuc

SEQ ID NO: 738111 - RNA, 19 nt, Artificial Sequence
  Description of Artificial Sequence: Synthetic oligonucleotide
acuugugggacuggagagg

SEQ ID NO: 738112 - RNA, 19 nt, Artificial Sequence
  Description of Artificial Sequence: Synthetic oligonucleotide
ccaucgggcauaauggucc

SEQ ID NO: 738113 - RNA, 19 nt, Artificial Sequence
  Description of Artificial Sequence: Synthetic oligonucleotide
guugggguugccauuggcc

SEQ ID NO: 738114 - RNA, 19 nt, Artificial Sequence
  Description of Artificial Sequence: Synthetic oligonucleotide
cuaccagccuccuggcucc

SEQ ID NO: 738115 - RNA, 19 nt, Artificial Sequence
  Description of Artificial Sequence: Synthetic oligonucleotide
ucgugacagugguuuagag

SEQ ID NO: 738116 - RNA, 19 nt, Artificial Sequence
  Description of Artificial Sequence: Synthetic oligonucleotide
ugggcacuagcccggauuc

SEQ ID NO: 738117 - RNA, 19 nt, Artificial Sequence
  Description of Artificial Sequence: Synthetic oligonucleotide
uugccaucguauacggggu

SEQ ID NO: 738118 - RNA, 19 nt, Artificial Sequence
  Description of Artificial Sequence: Synthetic oligonucleotide
augggcacacuugucuucg

SEQ ID NO: 738119 - RNA, 19 nt, Artificial Sequence
  Description of Artificial Sequence: Synthetic oligonucleotide
agcccggauuccuaugauc

SEQ ID NO: 738120 - RNA, 19 nt, Artificial Sequence
  Description of Artificial Sequence: Synthetic oligonucleotide
augaucauaccgucuuuaa

SEQ ID NO: 738121 - RNA, 19 nt, Artificial Sequence
  Description of Artificial Sequence: Synthetic oligonucleotide
agaggucaucgugugauug

SEQ ID NO: 738122 - RNA, 19 nt, Artificial Sequence
  Description of Artificial Sequence: Synthetic oligonucleotide
ggauuugaaggaaaaccgc

SEQ ID NO: 738123 - RNA, 19 nt, Artificial Sequence
  Description of Artificial Sequence: Synthetic oligonucleotide
uaaugguccgguccagcuc

SEQ ID NO: 738124 - RNA, 19 nt, Artificial Sequence
  Description of Artificial Sequence: Synthetic oligonucleotide
ucuaaguggggaccccgaa

SEQ ID NO: 738125 - RNA, 19 nt, Artificial Sequence
  Description of Artificial Sequence: Synthetic oligonucleotide
uugccuuacccuccuggga

SEQ ID NO: 738126 - RNA, 19 nt, Artificial Sequence
  Description of Artificial Sequence: Synthetic oligonucleotide
ugcaaccuugcucuaugau

SEQ ID NO: 738127 - RNA, 19 nt, Artificial Sequence
  Description of Artificial Sequence: Synthetic oligonucleotide
cuagaccacacauauaaau

SEQ ID NO: 738128 - RNA, 19 nt, Artificial Sequence
  Description of Artificial Sequence: Synthetic oligonucleotide
agaagcugcauaacccaag

SEQ ID NO: 738129 - RNA, 19 nt, Artificial Sequence
  Description of Artificial Sequence: Synthetic oligonucleotide
ugcuaagacagagccugcc

SEQ ID NO: 738130 - RNA, 19 nt, Artificial Sequence
  Description of Artificial Sequence: Synthetic oligonucleotide
ugauuggcucagaccagcu

SEQ ID NO: 738131 - RNA, 19 nt, Artificial Sequence
  Description of Artificial Sequence: Synthetic oligonucleotide
ugacggugguaacaauggu

SEQ ID NO: 738132 - RNA, 19 nt, Artificial Sequence
  Description of Artificial Sequence: Synthetic oligonucleotide
agcaaugggcaccuuggaa

SEQ ID NO: 738133 - RNA, 19 nt, Artificial Sequence
  Description of Artificial Sequence: Synthetic oligonucleotide
aggguccuagaccacacau

SEQ ID NO: 738134 - RNA, 19 nt, Artificial Sequence
  Description of Artificial Sequence: Synthetic oligonucleotide
ugcucgucuaaguggggac

SEQ ID NO: 738135 - RNA, 19 nt, Artificial Sequence
  Description of Artificial Sequence: Synthetic oligonucleotide
gcaaccuugcucuaugauc

SEQ ID NO: 738136 - RNA, 19 nt, Artificial Sequence
  Description of Artificial Sequence: Synthetic oligonucleotide
ugguuuagagggugagccu

SEQ ID NO: 738137 - RNA, 19 nt, Artificial Sequence
  Description of Artificial Sequence: Synthetic oligonucleotide
uucgugacagugguuuaga

SEQ ID NO: 738138 - RNA, 19 nt, Artificial Sequence
  Description of Artificial Sequence: Synthetic oligonucleotide
aggcuucgggucuccaggg

SEQ ID NO: 738139 - RNA, 19 nt, Artificial Sequence
  Description of Artificial Sequence: Synthetic oligonucleotide
aaggaucugcccaggagau

SEQ ID NO: 738140 - RNA, 19 nt, Artificial Sequence
  Description of Artificial Sequence: Synthetic oligonucleotide
ucuugguaggugugauacu

SEQ ID NO: 738141 - RNA, 19 nt, Artificial Sequence
  Description of Artificial Sequence: Synthetic oligonucleotide
aggcgacgagaaaagcugc

SEQ ID NO: 738142 - RNA, 19 nt, Artificial Sequence
  Description of Artificial Sequence: Synthetic oligonucleotide
uggugggugucuucuuggc

SEQ ID NO: 738143 - RNA, 19 nt, Artificial Sequence
  Description of Artificial Sequence: Synthetic oligonucleotide
gggcauaaugguccggucc

SEQ ID NO: 738144 - RNA, 19 nt, Artificial Sequence
  Description of Artificial Sequence: Synthetic oligonucleotide
ucuugcaucgaggcuucca

SEQ ID NO: 738145 - RNA, 19 nt, Artificial Sequence
  Description of Artificial Sequence: Synthetic oligonucleotide
ccuaugaucugccaauguc

SEQ ID NO: 738146 - RNA, 19 nt, Artificial Sequence
  Description of Artificial Sequence: Synthetic oligonucleotide
cugcuacuggguccaagcc

SEQ ID NO: 738147 - RNA, 19 nt, Artificial Sequence
  Description of Artificial Sequence: Synthetic oligonucleotide
ucgggcauaaugguccggu

SEQ ID NO: 738148 - RNA, 19 nt, Artificial Sequence
  Description of Artificial Sequence: Synthetic oligonucleotide
ccaacuuaccccacagccc

SEQ ID NO: 738149 - RNA, 19 nt, Artificial Sequence
  Description of Artificial Sequence: Synthetic oligonucleotide
cuggaguuaaugggcacac

SEQ ID NO: 738150 - RNA, 19 nt, Artificial Sequence
  Description of Artificial Sequence: Synthetic oligonucleotide
gggaacccugcucauagug

SEQ ID NO: 738151 - RNA, 19 nt, Artificial Sequence
  Description of Artificial Sequence: Synthetic oligonucleotide
acuagcccggauuccuaug

SEQ ID NO: 738152 - RNA, 19 nt, Artificial Sequence
  Description of Artificial Sequence: Synthetic oligonucleotide
gcuaagacagagccugccc

SEQ ID NO: 738153 - RNA, 19 nt, Artificial Sequence
  Description of Artificial Sequence: Synthetic oligonucleotide
augagcgugcugcgcuugg

SEQ ID NO: 738154 - RNA, 19 nt, Artificial Sequence
  Description of Artificial Sequence: Synthetic oligonucleotide
gagcuuagugccacugcgc

SEQ ID NO: 738155 - RNA, 19 nt, Artificial Sequence
  Description of Artificial Sequence: Synthetic oligonucleotide
cacugguuccuguaucauc

SEQ ID NO: 738156 - RNA, 19 nt, Artificial Sequence
  Description of Artificial Sequence: Synthetic oligonucleotide
cucgucuaaguggggaccc

SEQ ID NO: 738157 - RNA, 19 nt, Artificial Sequence
  Description of Artificial Sequence: Synthetic oligonucleotide
gauccagugccagauccuc

SEQ ID NO: 738158 - RNA, 19 nt, Artificial Sequence
  Description of Artificial Sequence: Synthetic oligonucleotide
uuacccuccugggacagaa

SEQ ID NO: 738159 - RNA, 19 nt, Artificial Sequence
  Description of Artificial Sequence: Synthetic oligonucleotide
guauacggggucgggacug

SEQ ID NO: 738160 - RNA, 19 nt, Artificial Sequence
  Description of Artificial Sequence: Synthetic oligonucleotide
ggcauaaugguccggucca

SEQ ID NO: 738161 - RNA, 19 nt, Artificial Sequence
  Description of Artificial Sequence: Synthetic oligonucleotide
agcgccaacucguccugag

SEQ ID NO: 738162 - RNA, 19 nt, Artificial Sequence
  Description of Artificial Sequence: Synthetic oligonucleotide
cuacaggcaguguggcuug

SEQ ID NO: 738163 - RNA, 19 nt, Artificial Sequence
  Description of Artificial Sequence: Synthetic oligonucleotide
uauacggggucgggacugg

SEQ ID NO: 738164 - RNA, 19 nt, Artificial Sequence
  Description of Artificial Sequence: Synthetic oligonucleotide
aaaccccuccuggaacuug

SEQ ID NO: 738165 - RNA, 19 nt, Artificial Sequence
  Description of Artificial Sequence: Synthetic oligonucleotide
gaaggggauguggggaaug

SEQ ID NO: 738166 - RNA, 19 nt, Artificial Sequence
  Description of Artificial Sequence: Synthetic oligonucleotide
gugauacuggggcgagggg

SEQ ID NO: 738167 - RNA, 19 nt, Artificial Sequence
  Description of Artificial Sequence: Synthetic oligonucleotide
guagugacggugguaacaa

SEQ ID NO: 738168 - RNA, 19 nt, Artificial Sequence
  Description of Artificial Sequence: Synthetic oligonucleotide
guggccguuguguuggaga

SEQ ID NO: 738169 - RNA, 19 nt, Artificial Sequence
  Description of Artificial Sequence: Synthetic oligonucleotide
gugucgucucaucugcuuc

SEQ ID NO: 738170 - RNA, 19 nt, Artificial Sequence
  Description of Artificial Sequence: Synthetic oligonucleotide
guuaaugggcacacuuguc

SEQ ID NO: 738171 - RNA, 19 nt, Artificial Sequence
  Description of Artificial Sequence: Synthetic oligonucleotide
cuagcccggauuccuauga

SEQ ID NO: 738172 - RNA, 19 nt, Artificial Sequence
  Description of Artificial Sequence: Synthetic oligonucleotide
gcgcaggaaacucacuuug

SEQ ID NO: 738173 - RNA, 19 nt, Artificial Sequence
  Description of Artificial Sequence: Synthetic oligonucleotide
gcugcuccgaagcacuuug

SEQ ID NO: 738174 - RNA, 19 nt, Artificial Sequence
  Description of Artificial Sequence: Synthetic oligonucleotide
auguggggaauggacucag

SEQ ID NO: 738175 - RNA, 19 nt, Artificial Sequence
  Description of Artificial Sequence: Synthetic oligonucleotide
ggaacuugccuuacccucc

SEQ ID NO: 738176 - RNA, 19 nt, Artificial Sequence
  Description of Artificial Sequence: Synthetic oligonucleotide
cauuagaaagguggcucuc

SEQ ID NO: 738177 - RNA, 19 nt, Artificial Sequence
  Description of Artificial Sequence: Synthetic oligonucleotide
guaccagcagagggcauag

SEQ ID NO: 738178 - RNA, 19 nt, Artificial Sequence
  Description of Artificial Sequence: Synthetic oligonucleotide
caguagacccuguuucuga

SEQ ID NO: 738179 - RNA, 19 nt, Artificial Sequence
  Description of Artificial Sequence: Synthetic oligonucleotide
ggaaacucacuuugugauc

SEQ ID NO: 738180 - RNA, 19 nt, Artificial Sequence
  Description of Artificial Sequence: Synthetic oligonucleotide
uguggggaauggacucaga

SEQ ID NO: 738181 - RNA, 19 nt, Artificial Sequence
  Description of Artificial Sequence: Synthetic oligonucleotide
gagguggggaguaccugcc

SEQ ID NO: 738182 - RNA, 19 nt, Artificial Sequence
  Description of Artificial Sequence: Synthetic oligonucleotide
aaccuugcucuaugaucau

SEQ ID NO: 738183 - RNA, 19 nt, Artificial Sequence
  Description of Artificial Sequence: Synthetic oligonucleotide
uacggggucgggacuggac

SEQ ID NO: 738184 - RNA, 19 nt, Artificial Sequence
  Description of Artificial Sequence: Synthetic oligonucleotide
ggaaagcgccaacucgucc

SEQ ID NO: 738185 - RNA, 19 nt, Artificial Sequence
  Description of Artificial Sequence: Synthetic oligonucleotide
cuuacucccagcugccaaa

SEQ ID NO: 738186 - RNA, 19 nt, Artificial Sequence
  Description of Artificial Sequence: Synthetic oligonucleotide
gccauuagaaagguggcuc

SEQ ID NO: 738187 - RNA, 19 nt, Artificial Sequence
  Description of Artificial Sequence: Synthetic oligonucleotide
guuuagagggugagccuac

SEQ ID NO: 738188 - RNA, 19 nt, Artificial Sequence
  Description of Artificial Sequence: Synthetic oligonucleotide
cuucugucggggccuccgg

SEQ ID NO: 738189 - RNA, 19 nt, Artificial Sequence
  Description of Artificial Sequence: Synthetic oligonucleotide
uuagaacccaagggcuuuc

SEQ ID NO: 738190 - RNA, 19 nt, Artificial Sequence
  Description of Artificial Sequence: Synthetic oligonucleotide
ucggacacuagggguggcc

SEQ ID NO: 738191 - RNA, 19 nt, Artificial Sequence
  Description of Artificial Sequence: Synthetic oligonucleotide
gaugagcgugcugcgcuug

SEQ ID NO: 738192 - RNA, 19 nt, Artificial Sequence
  Description of Artificial Sequence: Synthetic oligonucleotide
ggaacccugcucauagugc

SEQ ID NO: 738193 - RNA, 19 nt, Artificial Sequence
  Description of Artificial Sequence: Synthetic oligonucleotide
ggcgaauugcugucucugc

SEQ ID NO: 738194 - RNA, 19 nt, Artificial Sequence
  Description of Artificial Sequence: Synthetic oligonucleotide
caucguauacggggucggg

SEQ ID NO: 738195 - RNA, 19 nt, Artificial Sequence
  Description of Artificial Sequence: Synthetic oligonucleotide
ugccaucguauacgggguc

SEQ ID NO: 738196 - RNA, 19 nt, Artificial Sequence
  Description of Artificial Sequence: Synthetic oligonucleotide
accgcuugauaaggcgacg

SEQ ID NO: 738197 - RNA, 19 nt, Artificial Sequence
  Description of Artificial Sequence: Synthetic oligonucleotide
gcuccuaaagcuaucucuc

SEQ ID NO: 738198 - RNA, 19 nt, Artificial Sequence
  Description of Artificial Sequence: Synthetic oligonucleotide
gguccuagaccacacauau

SEQ ID NO: 738199 - RNA, 19 nt, Artificial Sequence
  Description of Artificial Sequence: Synthetic oligonucleotide
cgugugauuggcucagacc

SEQ ID NO: 738200 - RNA, 19 nt, Artificial Sequence
  Description of Artificial Sequence: Synthetic oligonucleotide
acaugcuaagacagagccu

SEQ ID NO: 738201 - RNA, 19 nt, Artificial Sequence
  Description of Artificial Sequence: Synthetic oligonucleotide
gcucuaugaucauaccguc

SEQ ID NO: 738202 - RNA, 19 nt, Artificial Sequence
  Description of Artificial Sequence: Synthetic oligonucleotide
ccuccggcggaaaaugagc

SEQ ID NO: 738203 - RNA, 19 nt, Artificial Sequence
  Description of Artificial Sequence: Synthetic oligonucleotide
gucugaacgugucgucuca

SEQ ID NO: 738204 - RNA, 19 nt, Artificial Sequence
  Description of Artificial Sequence: Synthetic oligonucleotide
ugcccucuagcaucuguuu

SEQ ID NO: 738205 - RNA, 19 nt, Artificial Sequence
  Description of Artificial Sequence: Synthetic oligonucleotide
agucagcuggcgaauugcu

SEQ ID NO: 738206 - RNA, 19 nt, Artificial Sequence
  Description of Artificial Sequence: Synthetic oligonucleotide
agacccuguuucugacuca

SEQ ID NO: 738207 - RNA, 19 nt, Artificial Sequence
  Description of Artificial Sequence: Synthetic oligonucleotide
ccuaggggaacccugcuca

SEQ ID NO: 738208 - RNA, 19 nt, Artificial Sequence
  Description of Artificial Sequence: Synthetic oligonucleotide
uacuggguccaagccauua

SEQ ID NO: 738209 - RNA, 19 nt, Artificial Sequence
  Description of Artificial Sequence: Synthetic oligonucleotide
ggaguuaaugggcacacuu

SEQ ID NO: 738210 - RNA, 19 nt, Artificial Sequence
  Description of Artificial Sequence: Synthetic oligonucleotide
gccaucguauacggggucg

SEQ ID NO: 738211 - RNA, 19 nt, Artificial Sequence
  Description of Artificial Sequence: Synthetic oligonucleotide
ugaugagcgugcugcgcuu

SEQ ID NO: 738212 - RNA, 19 nt, Artificial Sequence
  Description of Artificial Sequence: Synthetic oligonucleotide
gggagucuaauuugccauc

SEQ ID NO: 738213 - RNA, 19 nt, Artificial Sequence
  Description of Artificial Sequence: Synthetic oligonucleotide
ugccugccucucaaaugcu

SEQ ID NO: 738214 - RNA, 19 nt, Artificial Sequence
  Description of Artificial Sequence: Synthetic oligonucleotide
ucgucuaaguggggacccc

SEQ ID NO: 738215 - RNA, 19 nt, Artificial Sequence
  Description of Artificial Sequence: Synthetic oligonucleotide
gcuugauaaggcgacgaga

SEQ ID NO: 738216 - RNA, 19 nt, Artificial Sequence
  Description of Artificial Sequence: Synthetic oligonucleotide
gacccuguuucugacucaa

SEQ ID NO: 738217 - RNA, 19 nt, Artificial Sequence
  Description of Artificial Sequence: Synthetic oligonucleotide
ucugaacgugucgucucau

SEQ ID NO: 738218 - RNA, 19 nt, Artificial Sequence
  Description of Artificial Sequence: Synthetic oligonucleotide
uccuuccaacuuaccccac

SEQ ID NO: 738219 - RNA, 19 nt, Artificial Sequence
  Description of Artificial Sequence: Synthetic oligonucleotide
cagcuggcgaauugcuguc

SEQ ID NO: 738220 - RNA, 19 nt, Artificial Sequence
  Description of Artificial Sequence: Synthetic oligonucleotide
cucuaugaucauaccgucu

SEQ ID NO: 738221 - RNA, 19 nt, Artificial Sequence
  Description of Artificial Sequence: Synthetic oligonucleotide
uaccgucuuuaaagcuccu

SEQ ID NO: 738222 - RNA, 19 nt, Artificial Sequence
  Description of Artificial Sequence: Synthetic oligonucleotide
ggugugauacuggggcgag

SEQ ID NO: 738223 - RNA, 19 nt, Artificial Sequence
  Description of Artificial Sequence: Synthetic oligonucleotide
cacacuugucuucgugaca

SEQ ID NO: 738224 - RNA, 19 nt, Artificial Sequence
  Description of Artificial Sequence: Synthetic oligonucleotide
ugucuucgugacagugguu

SEQ ID NO: 738225 - RNA, 19 nt, Artificial Sequence
  Description of Artificial Sequence: Synthetic oligonucleotide
gguccgguccagcucaauc

SEQ ID NO: 738226 - RNA, 19 nt, Artificial Sequence
  Description of Artificial Sequence: Synthetic oligonucleotide
aucgaggcuuccagagaag

SEQ ID NO: 738227 - RNA, 19 nt, Artificial Sequence
  Description of Artificial Sequence: Synthetic oligonucleotide
gguuuagagggugagccua

SEQ ID NO: 738228 - RNA, 19 nt, Artificial Sequence
  Description of Artificial Sequence: Synthetic oligonucleotide
uagugacggugguaacaau

SEQ ID NO: 738229 - RNA, 19 nt, Artificial Sequence
  Description of Artificial Sequence: Synthetic oligonucleotide
cuggaacuugccuuacccu

SEQ ID NO: 738230 - RNA, 19 nt, Artificial Sequence
  Description of Artificial Sequence: Synthetic oligonucleotide
gugcucgucuaagugggga

SEQ ID NO: 738231 - RNA, 19 nt, Artificial Sequence
  Description of Artificial Sequence: Synthetic oligonucleotide
cgacgagaaaagcugccag

SEQ ID NO: 738232 - RNA, 19 nt, Artificial Sequence
  Description of Artificial Sequence: Synthetic oligonucleotide
ggggagucuaauuugccau

SEQ ID NO: 738233 - RNA, 19 nt, Artificial Sequence
  Description of Artificial Sequence: Synthetic oligonucleotide
gcugucauaguggcugcug

SEQ ID NO: 738234 - RNA, 19 nt, Artificial Sequence
  Description of Artificial Sequence: Synthetic oligonucleotide
ugcugucauaguggcugcu

SEQ ID NO: 738235 - RNA, 19 nt, Artificial Sequence
  Description of Artificial Sequence: Synthetic oligonucleotide
gguuuggauuugaaggaaa

SEQ ID NO: 738236 - RNA, 19 nt, Artificial Sequence
  Description of Artificial Sequence: Synthetic oligonucleotide
cuccggcggaaaaugagcu

SEQ ID NO: 738237 - RNA, 19 nt, Artificial Sequence
  Description of Artificial Sequence: Synthetic oligonucleotide
ggcgacgagaaaagcugcc

SEQ ID NO: 738238 - RNA, 19 nt, Artificial Sequence
  Description of Artificial Sequence: Synthetic oligonucleotide
ugagcgugcugcgcuuggu

SEQ ID NO: 738239 - RNA, 19 nt, Artificial Sequence
  Description of Artificial Sequence: Synthetic oligonucleotide
gcucgucuaaguggggacc

SEQ ID NO: 738240 - RNA, 19 nt, Artificial Sequence
  Description of Artificial Sequence: Synthetic oligonucleotide
ccgaagagagguauagaaa

SEQ ID NO: 738241 - RNA, 19 nt, Artificial Sequence
  Description of Artificial Sequence: Synthetic oligonucleotide
guagacccuguuucugacu

SEQ ID NO: 738242 - RNA, 19 nt, Artificial Sequence
  Description of Artificial Sequence: Synthetic oligonucleotide
ccgucuuuaaagcuccuaa

SEQ ID NO: 738243 - RNA, 19 nt, Artificial Sequence
  Description of Artificial Sequence: Synthetic oligonucleotide
cucuagcaucuguuugcca

SEQ ID NO: 738244 - RNA, 19 nt, Artificial Sequence
  Description of Artificial Sequence: Synthetic oligonucleotide
gauuggcucagaccagcuu

SEQ ID NO: 738245 - RNA, 19 nt, Artificial Sequence
  Description of Artificial Sequence: Synthetic oligonucleotide
acacuagggguggccguug

SEQ ID NO: 738246 - RNA, 19 nt, Artificial Sequence
  Description of Artificial Sequence: Synthetic oligonucleotide
acccuguuucugacucaac

SEQ ID NO: 738247 - RNA, 19 nt, Artificial Sequence
  Description of Artificial Sequence: Synthetic oligonucleotide
accgucuuuaaagcuccua

SEQ ID NO: 738248 - RNA, 19 nt, Artificial Sequence
  Description of Artificial Sequence: Synthetic oligonucleotide
uucggacacuagggguggc

SEQ ID NO: 738249 - RNA, 19 nt, Artificial Sequence
  Description of Artificial Sequence: Synthetic oligonucleotide
gucuaaguggggaccccga

SEQ ID NO: 738250 - RNA, 19 nt, Artificial Sequence
  Description of Artificial Sequence: Synthetic oligonucleotide
agcuggcgaauugcugucu

SEQ ID NO: 738251 - RNA, 19 nt, Artificial Sequence
  Description of Artificial Sequence: Synthetic oligonucleotide
augcccucuagcaucuguu

SEQ ID NO: 738252 - RNA, 19 nt, Artificial Sequence
  Description of Artificial Sequence: Synthetic oligonucleotide
gcuggcgaauugcugucuc

SEQ ID NO: 738253 - RNA, 19 nt, Artificial Sequence
  Description of Artificial Sequence: Synthetic oligonucleotide
gcauaaugguccgguccag

SEQ ID NO: 738254 - RNA, 19 nt, Artificial Sequence
  Description of Artificial Sequence: Synthetic oligonucleotide
cugcgcaggaaacucacuu

SEQ ID NO: 738255 - RNA, 19 nt, Artificial Sequence
  Description of Artificial Sequence: Synthetic oligonucleotide
gacgguagugacgguggua

SEQ ID NO: 738256 - RNA, 19 nt, Artificial Sequence
  Description of Artificial Sequence: Synthetic oligonucleotide
cugcccgcccacugggcuc

SEQ ID NO: 738257 - RNA, 19 nt, Artificial Sequence
  Description of Artificial Sequence: Synthetic oligonucleotide
ggcuucgggucuccagggc

SEQ ID NO: 738258 - RNA, 19 nt, Artificial Sequence
  Description of Artificial Sequence: Synthetic oligonucleotide
gcgaauugcugucucugcu

SEQ ID NO: 738259 - RNA, 19 nt, Artificial Sequence
  Description of Artificial Sequence: Synthetic oligonucleotide
gccaaacuccuauguccac

SEQ ID NO: 738260 - RNA, 19 nt, Artificial Sequence
  Description of Artificial Sequence: Synthetic oligonucleotide
ggugcucgucuaagugggg

SEQ ID NO: 738261 - RNA, 19 nt, Artificial Sequence
  Description of Artificial Sequence: Synthetic oligonucleotide
cuuagaacccaagggcuuu

SEQ ID NO: 738262 - RNA, 19 nt, Artificial Sequence
  Description of Artificial Sequence: Synthetic oligonucleotide
ggucgggacuggacgguag

SEQ ID NO: 738263 - RNA, 19 nt, Artificial Sequence
  Description of Artificial Sequence: Synthetic oligonucleotide
gcgacgagaaaagcugcca

SEQ ID NO: 738264 - RNA, 19 nt, Artificial Sequence
  Description of Artificial Sequence: Synthetic oligonucleotide
ccauuagaaagguggcucu

SEQ ID NO: 738265 - RNA, 19 nt, Artificial Sequence
  Description of Artificial Sequence: Synthetic oligonucleotide
gcuacuggguccaagccau

SEQ ID NO: 738266 - RNA, 19 nt, Artificial Sequence
  Description of Artificial Sequence: Synthetic oligonucleotide
cgucuuuaaagcuccuaaa

SEQ ID NO: 738267 - RNA, 19 nt, Artificial Sequence
  Description of Artificial Sequence: Synthetic oligonucleotide
cuaugaucauaccgucuuu

SEQ ID NO: 738268 - RNA, 19 nt, Artificial Sequence
  Description of Artificial Sequence: Synthetic oligonucleotide
gcgccaacucguccugagc

SEQ ID NO: 738269 - RNA, 19 nt, Artificial Sequence
  Description of Artificial Sequence: Synthetic oligonucleotide
cgucuaaguggggaccccg

SEQ ID NO: 738270 - RNA, 19 nt, Artificial Sequence
  Description of Artificial Sequence: Synthetic oligonucleotide
gagaggucaucgugugauu

SEQ ID NO: 738271 - RNA, 19 nt, Artificial Sequence
  Description of Artificial Sequence: Synthetic oligonucleotide
gccaacucguccugagcaa

SEQ ID NO: 738272 - RNA, 19 nt, Artificial Sequence
  Description of Artificial Sequence: Synthetic oligonucleotide
cgccaacucguccugagca

SEQ ID NO: 738273 - RNA, 19 nt, Artificial Sequence
  Description of Artificial Sequence: Synthetic oligonucleotide
gaggugcaaccuugcucua

SEQ ID NO: 738274 - RNA, 19 nt, Artificial Sequence
  Description of Artificial Sequence: Synthetic oligonucleotide
cggugguaacaauggugcc

SEQ ID NO: 738275 - RNA, 19 nt, Artificial Sequence
  Description of Artificial Sequence: Synthetic oligonucleotide
cggacacuagggguggccg

SEQ ID NO: 738276 - RNA, 19 nt, Artificial Sequence
  Description of Artificial Sequence: Synthetic oligonucleotide
gacacuagggguggccguu

SEQ ID NO: 738277 - RNA, 19 nt, Artificial Sequence
  Description of Artificial Sequence: Synthetic oligonucleotide
auacggggucgggacugga

SEQ ID NO: 738278 - RNA, 19 nt, Artificial Sequence
  Description of Artificial Sequence: Synthetic oligonucleotide
caccuuggacggggagcgg

SEQ ID NO: 738279 - RNA, 19 nt, Artificial Sequence
  Description of Artificial Sequence: Synthetic oligonucleotide
gguggccguuguguuggag

SEQ ID NO: 738280 - RNA, 19 nt, Artificial Sequence
  Description of Artificial Sequence: Synthetic oligonucleotide
cgaagcacuuugaggguca

SEQ ID NO: 738281 - RNA, 19 nt, Artificial Sequence
  Description of Artificial Sequence: Synthetic oligonucleotide
cggcggaaaaugagcuuag

SEQ ID NO: 738282 - RNA, 19 nt, Artificial Sequence
  Description of Artificial Sequence: Synthetic oligonucleotide
ggcacuagcccggauuccu

SEQ ID NO: 738283 - RNA, 19 nt, Artificial Sequence
  Description of Artificial Sequence: Synthetic oligonucleotide
cuggggccgcugcucucac

SEQ ID NO: 738284 - RNA, 19 nt, Artificial Sequence
  Description of Artificial Sequence: Synthetic oligonucleotide
ggggaccccgaagagaggu

SEQ ID NO: 738285 - RNA, 19 nt, Artificial Sequence
  Description of Artificial Sequence: Synthetic oligonucleotide
cuguaucaucuugcaucga

SEQ ID NO: 738286 - RNA, 19 nt, Artificial Sequence
  Description of Artificial Sequence: Synthetic oligonucleotide
ccuggcccuggaguuaaug

SEQ ID NO: 738287 - RNA, 19 nt, Artificial Sequence
  Description of Artificial Sequence: Synthetic oligonucleotide
caauggugccaucgggcau

SEQ ID NO: 738288 - RNA, 19 nt, Artificial Sequence
  Description of Artificial Sequence: Synthetic oligonucleotide
gaccccgaagagagguaua

SEQ ID NO: 738289 - RNA, 19 nt, Artificial Sequence
  Description of Artificial Sequence: Synthetic oligonucleotide
ggguccuagaccacacaua

SEQ ID NO: 738290 - RNA, 19 nt, Artificial Sequence
  Description of Artificial Sequence: Synthetic oligonucleotide
ggcgagggguggaagaggu

SEQ ID NO: 738291 - RNA, 19 nt, Artificial Sequence
  Description of Artificial Sequence: Synthetic oligonucleotide
guccuagaccacacauaua

SEQ ID NO: 738292 - RNA, 19 nt, Artificial Sequence
  Description of Artificial Sequence: Synthetic oligonucleotide
gugcugcgcuuggugggug

SEQ ID NO: 738293 - RNA, 19 nt, Artificial Sequence
  Description of Artificial Sequence: Synthetic oligonucleotide
ggccuuggguuuggauuug

SEQ ID NO: 738294 - RNA, 19 nt, Artificial Sequence
  Description of Artificial Sequence: Synthetic oligonucleotide
ggacacuagggguggccgu

SEQ ID NO: 738295 - RNA, 19 nt, Artificial Sequence
  Description of Artificial Sequence: Synthetic oligonucleotide
gcaccaguagacccuguuu

SEQ ID NO: 738296 - RNA, 19 nt, Artificial Sequence
  Description of Artificial Sequence: Synthetic oligonucleotide
ccuacaggcaguguggcuu

SEQ ID NO: 738297 - RNA, 19 nt, Artificial Sequence
  Description of Artificial Sequence: Synthetic oligonucleotide
ccgcuugauaaggcgacga

SEQ ID NO: 738298 - RNA, 19 nt, Artificial Sequence
  Description of Artificial Sequence: Synthetic oligonucleotide
ccucucaaaugcuucccau

SEQ ID NO: 738299 - RNA, 19 nt, Artificial Sequence
  Description of Artificial Sequence: Synthetic oligonucleotide
cacuagggguggccguugu

SEQ ID NO: 738300 - RNA, 19 nt, Artificial Sequence
  Description of Artificial Sequence: Synthetic oligonucleotide
cgggcauaaugguccgguc

SEQ ID NO: 738301 - RNA, 19 nt, Artificial Sequence
  Description of Artificial Sequence: Synthetic oligonucleotide
gggccgcugcucucacuca

SEQ ID NO: 738302 - RNA, 19 nt, Artificial Sequence
  Description of Artificial Sequence: Synthetic oligonucleotide
ggcggaaaaugagcuuagu

SEQ ID NO: 738303 - RNA, 19 nt, Artificial Sequence
  Description of Artificial Sequence: Synthetic oligonucleotide
ggggaacccugcucauagu

SEQ ID NO: 738304 - RNA, 19 nt, Artificial Sequence
  Description of Artificial Sequence: Synthetic oligonucleotide
cuacuggguccaagccauu

SEQ ID NO: 738305 - RNA, 19 nt, Artificial Sequence
  Description of Artificial Sequence: Synthetic oligonucleotide
gggaccccgaagagaggua

SEQ ID NO: 738306 - RNA, 19 nt, Artificial Sequence
  Description of Artificial Sequence: Synthetic oligonucleotide
cguauacggggucgggacu

SEQ ID NO: 738307 - RNA, 19 nt, Artificial Sequence
  Description of Artificial Sequence: Synthetic oligonucleotide
ccaacucguccugagcaau

SEQ ID NO: 738308 - RNA, 19 nt, Artificial Sequence
  Description of Artificial Sequence: Synthetic oligonucleotide
gggucgggacuggacggua

SEQ ID NO: 738309 - RNA, 19 nt, Artificial Sequence
  Description of Artificial Sequence: Synthetic oligonucleotide
ggggucgggacuggacggu

SEQ ID NO: 738310 - RNA, 19 nt, Artificial Sequence
  Description of Artificial Sequence: Synthetic oligonucleotide
cgugucgucucaucugcuu

SEQ ID NO: 738311 - RNA, 19 nt, Artificial Sequence
  Description of Artificial Sequence: Synthetic oligonucleotide
cgugcugcgcuuggugggu

SEQ ID NO: 738312 - RNA, 19 nt, Artificial Sequence
  Description of Artificial Sequence: Synthetic oligonucleotide
cggggccuccggcggaaaa

SEQ ID NO: 738313 - RNA, 19 nt, Artificial Sequence
  Description of Artificial Sequence: Synthetic oligonucleotide
uauauauauauguauauag

SEQ ID NO: 738314 - RNA, 19 nt, Artificial Sequence
  Description of Artificial Sequence: Synthetic oligonucleotide
aaauagaacacacuuauca

SEQ ID NO: 738315 - RNA, 19 nt, Artificial Sequence
  Description of Artificial Sequence: Synthetic oligonucleotide
uuuaauagacuaaacacug

SEQ ID NO: 738316 - RNA, 19 nt, Artificial Sequence
  Description of Artificial Sequence: Synthetic oligonucleotide
aauagaacacacuuaucac

SEQ ID NO: 738317 - RNA, 19 nt, Artificial Sequence
  Description of Artificial Sequence: Synthetic oligonucleotide
aggaucuaaauccauagcc

SEQ ID NO: 738318 - RNA, 19 nt, Artificial Sequence
  Description of Artificial Sequence: Synthetic oligonucleotide
uuuuaauagacuaaacacu

SEQ ID NO: 738319 - RNA, 19 nt, Artificial Sequence
  Description of Artificial Sequence: Synthetic oligonucleotide
  modified_base (7)..(7): a, c, u, g, unknown or other
uuguuunugggccagaacu

SEQ ID NO: 738320 - RNA, 19 nt, Artificial Sequence
  Description of Artificial Sequence: Synthetic oligonucleotide
uuaaguaacaaaauacaga

SEQ ID NO: 738321 - RNA, 19 nt, Artificial Sequence
  Description of Artificial Sequence: Synthetic oligonucleotide
uaauguaauauauauauau

SEQ ID NO: 738322 - RNA, 19 nt, Artificial Sequence
  Description of Artificial Sequence: Synthetic oligonucleotide
aauauauauauauguauau

SEQ ID NO: 738323 - RNA, 19 nt, Artificial Sequence
  Description of Artificial Sequence: Synthetic oligonucleotide
guaaauaggauccaucucc

SEQ ID NO: 738324 - RNA, 19 nt, Artificial Sequence
  Description of Artificial Sequence: Synthetic oligonucleotide
uuuaaucugauuauuggcu

SEQ ID NO: 738325 - RNA, 19 nt, Artificial Sequence
  Description of Artificial Sequence: Synthetic oligonucleotide
ugugaaauuugcauagagg

SEQ ID NO: 738326 - RNA, 19 nt, Artificial Sequence
  Description of Artificial Sequence: Synthetic oligonucleotide
gauaauauggaaguacccg

SEQ ID NO: 738327 - RNA, 19 nt, Artificial Sequence
  Description of Artificial Sequence: Synthetic oligonucleotide
auguaauauauauauaugu

SEQ ID NO: 738328 - RNA, 19 nt, Artificial Sequence
  Description of Artificial Sequence: Synthetic oligonucleotide
acacuuaucacacccacac

SEQ ID NO: 738329 - RNA, 19 nt, Artificial Sequence
  Description of Artificial Sequence: Synthetic oligonucleotide
auauauauauguauauagc

SEQ ID NO: 738330 - RNA, 19 nt, Artificial Sequence
  Description of Artificial Sequence: Synthetic oligonucleotide
uuuaauucaauuguguccu

SEQ ID NO: 738331 - RNA, 19 nt, Artificial Sequence
  Description of Artificial Sequence: Synthetic oligonucleotide
ugcaacagaacucagggga

SEQ ID NO: 738332 - RNA, 19 nt, Artificial Sequence
  Description of Artificial Sequence: Synthetic oligonucleotide
uaauauauauauauguaua

SEQ ID NO: 738333 - RNA, 19 nt, Artificial Sequence
  Description of Artificial Sequence: Synthetic oligonucleotide
aguauggagauguuaaaag

SEQ ID NO: 738334 - RNA, 19 nt, Artificial Sequence
  Description of Artificial Sequence: Synthetic oligonucleotide
uccuaauaaacuucgacca

SEQ ID NO: 738335 - RNA, 19 nt, Artificial Sequence
  Description of Artificial Sequence: Synthetic oligonucleotide
uguaauauauauauaugua

SEQ ID NO: 738336 - RNA, 19 nt, Artificial Sequence
  Description of Artificial Sequence: Synthetic oligonucleotide
ucaauguaagacacggagg

SEQ ID NO: 738337 - RNA, 19 nt, Artificial Sequence
  Description of Artificial Sequence: Synthetic oligonucleotide
uuaucuggugaaauuacag

SEQ ID NO: 738338 - RNA, 19 nt, Artificial Sequence
  Description of Artificial Sequence: Synthetic oligonucleotide
uuugagugcaugcugaacu

SEQ ID NO: 738339 - RNA, 19 nt, Artificial Sequence
  Description of Artificial Sequence: Synthetic oligonucleotide
ugugcgacaagaauuggag

SEQ ID NO: 738340 - RNA, 19 nt, Artificial Sequence
  Description of Artificial Sequence: Synthetic oligonucleotide
ugaacuacuccaauguggc

SEQ ID NO: 738341 - RNA, 19 nt, Artificial Sequence
  Description of Artificial Sequence: Synthetic oligonucleotide
aguguaguuuuguaaauag

SEQ ID NO: 738342 - RNA, 19 nt, Artificial Sequence
  Description of Artificial Sequence: Synthetic oligonucleotide
aauguaauauauauauaug

SEQ ID NO: 738343 - RNA, 19 nt, Artificial Sequence
  Description of Artificial Sequence: Synthetic oligonucleotide
uguaguggugagaagguag

SEQ ID NO: 738344 - RNA, 19 nt, Artificial Sequence
  Description of Artificial Sequence: Synthetic oligonucleotide
aaacuugggguuaaugggc

SEQ ID NO: 738345 - RNA, 19 nt, Artificial Sequence
  Description of Artificial Sequence: Synthetic oligonucleotide
aauaccugagguguuguac

SEQ ID NO: 738346 - RNA, 19 nt, Artificial Sequence
  Description of Artificial Sequence: Synthetic oligonucleotide
aaacgagggauucuuuggg

SEQ ID NO: 738347 - RNA, 19 nt, Artificial Sequence
  Description of Artificial Sequence: Synthetic oligonucleotide
auuauuuugaguaccaucu

SEQ ID NO: 738348 - RNA, 19 nt, Artificial Sequence
  Description of Artificial Sequence: Synthetic oligonucleotide
gaagauucuaaguucaguc

SEQ ID NO: 738349 - RNA, 19 nt, Artificial Sequence
  Description of Artificial Sequence: Synthetic oligonucleotide
cuccuaauaaacuucgacc

SEQ ID NO: 738350 - RNA, 19 nt, Artificial Sequence
  Description of Artificial Sequence: Synthetic oligonucleotide
auuggagugacuucucgac

SEQ ID NO: 738351 - RNA, 19 nt, Artificial Sequence
  Description of Artificial Sequence: Synthetic oligonucleotide
agcagcauaguucaaaugu

SEQ ID NO: 738352 - RNA, 19 nt, Artificial Sequence
  Description of Artificial Sequence: Synthetic oligonucleotide
auuaagaaguaaacgaggg

SEQ ID NO: 738353 - RNA, 19 nt, Artificial Sequence
  Description of Artificial Sequence: Synthetic oligonucleotide
accuguuuagauaauaugg

SEQ ID NO: 738354 - RNA, 19 nt, Artificial Sequence
  Description of Artificial Sequence: Synthetic oligonucleotide
uaaacgagggauucuuugg

SEQ ID NO: 738355 - RNA, 19 nt, Artificial Sequence
  Description of Artificial Sequence: Synthetic oligonucleotide
agcucguccaauuuggcac

SEQ ID NO: 738356 - RNA, 19 nt, Artificial Sequence
  Description of Artificial Sequence: Synthetic oligonucleotide
auuaguguaguuuuguaaa

SEQ ID NO: 738357 - RNA, 19 nt, Artificial Sequence
  Description of Artificial Sequence: Synthetic oligonucleotide
uacuacguggcaauaaggc

SEQ ID NO: 738358 - RNA, 19 nt, Artificial Sequence
  Description of Artificial Sequence: Synthetic oligonucleotide
accuauaccguacucuggc

SEQ ID NO: 738359 - RNA, 19 nt, Artificial Sequence
  Description of Artificial Sequence: Synthetic oligonucleotide
ucaaggaguacuuugaauu

SEQ ID NO: 738360 - RNA, 19 nt, Artificial Sequence
  Description of Artificial Sequence: Synthetic oligonucleotide
cauucagcaaauaaaguuc

SEQ ID NO: 738361 - RNA, 19 nt, Artificial Sequence
  Description of Artificial Sequence: Synthetic oligonucleotide
auauggaaguacccguucc

SEQ ID NO: 738362 - RNA, 19 nt, Artificial Sequence
  Description of Artificial Sequence: Synthetic oligonucleotide
gaguacuuugaauuggaag

SEQ ID NO: 738363 - RNA, 19 nt, Artificial Sequence
  Description of Artificial Sequence: Synthetic oligonucleotide
uucugaaaaguucaaaaua

SEQ ID NO: 738364 - RNA, 19 nt, Artificial Sequence
  Description of Artificial Sequence: Synthetic oligonucleotide
uauucaaggaguacuuuga

SEQ ID NO: 738365 - RNA, 19 nt, Artificial Sequence
  Description of Artificial Sequence: Synthetic oligonucleotide
aacuuuguguuugugcgac

SEQ ID NO: 738366 - RNA, 19 nt, Artificial Sequence
  Description of Artificial Sequence: Synthetic oligonucleotide
aaccuguuuagauaauaug

SEQ ID NO: 738367 - RNA, 19 nt, Artificial Sequence
  Description of Artificial Sequence: Synthetic oligonucleotide
gaacacacuuaucacaccc

SEQ ID NO: 738368 - RNA, 19 nt, Artificial Sequence
  Description of Artificial Sequence: Synthetic oligonucleotide
ugaaucaauguaagacacg

SEQ ID NO: 738369 - RNA, 19 nt, Artificial Sequence
  Description of Artificial Sequence: Synthetic oligonucleotide
agagaaauucaucaaggca

SEQ ID NO: 738370 - RNA, 19 nt, Artificial Sequence
  Description of Artificial Sequence: Synthetic oligonucleotide
uuguuuaggguauccaaag

SEQ ID NO: 738371 - RNA, 19 nt, Artificial Sequence
  Description of Artificial Sequence: Synthetic oligonucleotide
uaagaaguaaacgagggau

SEQ ID NO: 738372 - RNA, 19 nt, Artificial Sequence
  Description of Artificial Sequence: Synthetic oligonucleotide
auaauauggaaguacccgu

SEQ ID NO: 738373 - RNA, 19 nt, Artificial Sequence
  Description of Artificial Sequence: Synthetic oligonucleotide
aauccuccuaacuucugag

SEQ ID NO: 738374 - RNA, 19 nt, Artificial Sequence
  Description of Artificial Sequence: Synthetic oligonucleotide
aauuacagaagguguauua

SEQ ID NO: 738375 - RNA, 19 nt, Artificial Sequence
  Description of Artificial Sequence: Synthetic oligonucleotide
auagaacacacuuaucaca

SEQ ID NO: 738376 - RNA, 19 nt, Artificial Sequence
  Description of Artificial Sequence: Synthetic oligonucleotide
aaauucaucaaggcaaggu

SEQ ID NO: 738377 - RNA, 19 nt, Artificial Sequence
  Description of Artificial Sequence: Synthetic oligonucleotide
agauucuaaguucagucug

SEQ ID NO: 738378 - RNA, 19 nt, Artificial Sequence
  Description of Artificial Sequence: Synthetic oligonucleotide
aaucagagacuuucaaacu

SEQ ID NO: 738379 - RNA, 19 nt, Artificial Sequence
  Description of Artificial Sequence: Synthetic oligonucleotide
uucagugaagaccuauacc

SEQ ID NO: 738380 - RNA, 19 nt, Artificial Sequence
  Description of Artificial Sequence: Synthetic oligonucleotide
uggaagguagcgcuuauca

SEQ ID NO: 738381 - RNA, 19 nt, Artificial Sequence
  Description of Artificial Sequence: Synthetic oligonucleotide
auagacuaaacacugguua

SEQ ID NO: 738382 - RNA, 19 nt, Artificial Sequence
  Description of Artificial Sequence: Synthetic oligonucleotide
uuuguuuaggguauccaaa

SEQ ID NO: 738383 - RNA, 19 nt, Artificial Sequence
  Description of Artificial Sequence: Synthetic oligonucleotide
acaacuaugccucuauccu

SEQ ID NO: 738384 - RNA, 19 nt, Artificial Sequence
  Description of Artificial Sequence: Synthetic oligonucleotide
ucuguauucaaggaguacu

SEQ ID NO: 738385 - RNA, 19 nt, Artificial Sequence
  Description of Artificial Sequence: Synthetic oligonucleotide
uucaucaaggcaaggugag

SEQ ID NO: 738386 - RNA, 19 nt, Artificial Sequence
  Description of Artificial Sequence: Synthetic oligonucleotide
cugaaucaauguaagacac

SEQ ID NO: 738387 - RNA, 19 nt, Artificial Sequence
  Description of Artificial Sequence: Synthetic oligonucleotide
ugaaauuugcauagagggu

SEQ ID NO: 738388 - RNA, 19 nt, Artificial Sequence
  Description of Artificial Sequence: Synthetic oligonucleotide
guagaguagaucuccauac

SEQ ID NO: 738389 - RNA, 19 nt, Artificial Sequence
  Description of Artificial Sequence: Synthetic oligonucleotide
aucaguaccagaaacucuc

SEQ ID NO: 738390 - RNA, 19 nt, Artificial Sequence
  Description of Artificial Sequence: Synthetic oligonucleotide
cuugggauucaucuguucc

SEQ ID NO: 738391 - RNA, 19 nt, Artificial Sequence
  Description of Artificial Sequence: Synthetic oligonucleotide
aaggaguacuuugaauugg

SEQ ID NO: 738392 - RNA, 19 nt, Artificial Sequence
  Description of Artificial Sequence: Synthetic oligonucleotide
uaaauaggauccaucucca

SEQ ID NO: 738393 - RNA, 19 nt, Artificial Sequence
  Description of Artificial Sequence: Synthetic oligonucleotide
guaguuguagaguagaucu

SEQ ID NO: 738394 - RNA, 19 nt, Artificial Sequence
  Description of Artificial Sequence: Synthetic oligonucleotide
uuauuggcuccuuuuagga

SEQ ID NO: 738395 - RNA, 19 nt, Artificial Sequence
  Description of Artificial Sequence: Synthetic oligonucleotide
uguaaggacugucucgggc

SEQ ID NO: 738396 - RNA, 19 nt, Artificial Sequence
  Description of Artificial Sequence: Synthetic oligonucleotide
uaaucugcgucugucaugc

SEQ ID NO: 738397 - RNA, 19 nt, Artificial Sequence
  Description of Artificial Sequence: Synthetic oligonucleotide
caugaucuguucuucuugg

SEQ ID NO: 738398 - RNA, 19 nt, Artificial Sequence
  Description of Artificial Sequence: Synthetic oligonucleotide
uuaaucugauuauuggcuc

SEQ ID NO: 738399 - RNA, 19 nt, Artificial Sequence
  Description of Artificial Sequence: Synthetic oligonucleotide
cacaacuaugccucuaucc

SEQ ID NO: 738400 - RNA, 19 nt, Artificial Sequence
  Description of Artificial Sequence: Synthetic oligonucleotide
aauccauagcccaagagaa

SEQ ID NO: 738401 - RNA, 19 nt, Artificial Sequence
  Description of Artificial Sequence: Synthetic oligonucleotide
agauaauauggaaguaccc

SEQ ID NO: 738402 - RNA, 19 nt, Artificial Sequence
  Description of Artificial Sequence: Synthetic oligonucleotide
ugauaauguaauauauaua

SEQ ID NO: 738403 - RNA, 19 nt, Artificial Sequence
  Description of Artificial Sequence: Synthetic oligonucleotide
guauucaaggaguacuuug

SEQ ID NO: 738404 - RNA, 19 nt, Artificial Sequence
  Description of Artificial Sequence: Synthetic oligonucleotide
aguucuuguaaagcaagac

SEQ ID NO: 738405 - RNA, 19 nt, Artificial Sequence
  Description of Artificial Sequence: Synthetic oligonucleotide
gauggcacgucaauuacag

SEQ ID NO: 738406 - RNA, 19 nt, Artificial Sequence
  Description of Artificial Sequence: Synthetic oligonucleotide
agaaguaaacgagggauuc

SEQ ID NO: 738407 - RNA, 19 nt, Artificial Sequence
  Description of Artificial Sequence: Synthetic oligonucleotide
  modified_base (4)..(4): a, c, u, g, unknown or other
uuunugggccagaacuuug

SEQ ID NO: 738408 - RNA, 19 nt, Artificial Sequence
  Description of Artificial Sequence: Synthetic oligonucleotide
ucuaaauccauagcccaag

SEQ ID NO: 738409 - RNA, 19 nt, Artificial Sequence
  Description of Artificial Sequence: Synthetic oligonucleotide
ugccaaaguaguuguagag

SEQ ID NO: 738410 - RNA, 19 nt, Artificial Sequence
  Description of Artificial Sequence: Synthetic oligonucleotide
ugucucuauagccagccac

SEQ ID NO: 738411 - RNA, 19 nt, Artificial Sequence
  Description of Artificial Sequence: Synthetic oligonucleotide
uucucaauccuccuaacuu

SEQ ID NO: 738412 - RNA, 19 nt, Artificial Sequence
  Description of Artificial Sequence: Synthetic oligonucleotide
uguuaaaagcaggugugag

SEQ ID NO: 738413 - RNA, 19 nt, Artificial Sequence
  Description of Artificial Sequence: Synthetic oligonucleotide
uguaaauaggauccaucuc

SEQ ID NO: 738414 - RNA, 19 nt, Artificial Sequence
  Description of Artificial Sequence: Synthetic oligonucleotide
acuuaucacacccacacuu

SEQ ID NO: 738415 - RNA, 19 nt, Artificial Sequence
  Description of Artificial Sequence: Synthetic oligonucleotide
uguagaguagaucuccaua

SEQ ID NO: 738416 - RNA, 19 nt, Artificial Sequence
  Description of Artificial Sequence: Synthetic oligonucleotide
cuacguggcaauaaggcuc

SEQ ID NO: 738417 - RNA, 19 nt, Artificial Sequence
  Description of Artificial Sequence: Synthetic oligonucleotide
guaaacgagggauucuuug

SEQ ID NO: 738418 - RNA, 19 nt, Artificial Sequence
  Description of Artificial Sequence: Synthetic oligonucleotide
uuacagaagguguauuagu

SEQ ID NO: 738419 - RNA, 19 nt, Artificial Sequence
  Description of Artificial Sequence: Synthetic oligonucleotide
agaguagaucuccauaccu

SEQ ID NO: 738420 - RNA, 19 nt, Artificial Sequence
  Description of Artificial Sequence: Synthetic oligonucleotide
gaggguugauaucaagugc

SEQ ID NO: 738421 - RNA, 19 nt, Artificial Sequence
  Description of Artificial Sequence: Synthetic oligonucleotide
caauguaagacacggagga

SEQ ID NO: 738422 - RNA, 19 nt, Artificial Sequence
  Description of Artificial Sequence: Synthetic oligonucleotide
uguauuaguguaguuuugu

SEQ ID NO: 738423 - RNA, 19 nt, Artificial Sequence
  Description of Artificial Sequence: Synthetic oligonucleotide
guaauauauauauauguau

SEQ ID NO: 738424 - RNA, 19 nt, Artificial Sequence
  Description of Artificial Sequence: Synthetic oligonucleotide
aaugcaaauagaacacacu

SEQ ID NO: 738425 - RNA, 19 nt, Artificial Sequence
  Description of Artificial Sequence: Synthetic oligonucleotide
ugucugugagauaaauugu

SEQ ID NO: 738426 - RNA, 19 nt, Artificial Sequence
  Description of Artificial Sequence: Synthetic oligonucleotide
aaguacccguuccaagggg

SEQ ID NO: 738427 - RNA, 19 nt, Artificial Sequence
  Description of Artificial Sequence: Synthetic oligonucleotide
ggaaucuguauucaaggag

SEQ ID NO: 738428 - RNA, 19 nt, Artificial Sequence
  Description of Artificial Sequence: Synthetic oligonucleotide
agaccuauaccguacucug

SEQ ID NO: 738429 - RNA, 19 nt, Artificial Sequence
  Description of Artificial Sequence: Synthetic oligonucleotide
uauguauauagcuggcuua

SEQ ID NO: 738430 - RNA, 19 nt, Artificial Sequence
  Description of Artificial Sequence: Synthetic oligonucleotide
agcauaguucaaauguuac

SEQ ID NO: 738431 - RNA, 19 nt, Artificial Sequence
  Description of Artificial Sequence: Synthetic oligonucleotide
aacuacuccaauguggcaa

SEQ ID NO: 738432 - RNA, 19 nt, Artificial Sequence
  Description of Artificial Sequence: Synthetic oligonucleotide
ugcaaauagaacacacuua

SEQ ID NO: 738433 - RNA, 19 nt, Artificial Sequence
  Description of Artificial Sequence: Synthetic oligonucleotide
ucucaauccuccuaacuuc

SEQ ID NO: 738434 - RNA, 19 nt, Artificial Sequence
  Description of Artificial Sequence: Synthetic oligonucleotide
aagaccuauaccguacucu

SEQ ID NO: 738435 - RNA, 19 nt, Artificial Sequence
  Description of Artificial Sequence: Synthetic oligonucleotide
aguacuguaguggugagaa

SEQ ID NO: 738436 - RNA, 19 nt, Artificial Sequence
  Description of Artificial Sequence: Synthetic oligonucleotide
agcgcuuaucaauugccuc

SEQ ID NO: 738437 - RNA, 19 nt, Artificial Sequence
  Description of Artificial Sequence: Synthetic oligonucleotide
aguuaagagaccaccuuuc

SEQ ID NO: 738438 - RNA, 19 nt, Artificial Sequence
  Description of Artificial Sequence: Synthetic oligonucleotide
cuacuacguggcaauaagg

SEQ ID NO: 738439 - RNA, 19 nt, Artificial Sequence
  Description of Artificial Sequence: Synthetic oligonucleotide
ugauuauuggcuccuuuua

SEQ ID NO: 738440 - RNA, 19 nt, Artificial Sequence
  Description of Artificial Sequence: Synthetic oligonucleotide
uacguggcaauaaggcucc

SEQ ID NO: 738441 - RNA, 19 nt, Artificial Sequence
  Description of Artificial Sequence: Synthetic oligonucleotide
acgucaauuacagaaggug

SEQ ID NO: 738442 - RNA, 19 nt, Artificial Sequence
  Description of Artificial Sequence: Synthetic oligonucleotide
aaauaaaacggaggcucug

SEQ ID NO: 738443 - RNA, 19 nt, Artificial Sequence
  Description of Artificial Sequence: Synthetic oligonucleotide
caaggaguacuuugaauug

SEQ ID NO: 738444 - RNA, 19 nt, Artificial Sequence
  Description of Artificial Sequence: Synthetic oligonucleotide
uaaaacggaggcucuguga

SEQ ID NO: 738445 - RNA, 19 nt, Artificial Sequence
  Description of Artificial Sequence: Synthetic oligonucleotide
ugacugucucuauagccag

SEQ ID NO: 738446 - RNA, 19 nt, Artificial Sequence
  Description of Artificial Sequence: Synthetic oligonucleotide
agauaaauugugauuagau

SEQ ID NO: 738447 - RNA, 19 nt, Artificial Sequence
  Description of Artificial Sequence: Synthetic oligonucleotide
ucgacuauuuccacucugu

SEQ ID NO: 738448 - RNA, 19 nt, Artificial Sequence
  Description of Artificial Sequence: Synthetic oligonucleotide
guuugugcgacaagaauug

SEQ ID NO: 738449 - RNA, 19 nt, Artificial Sequence
  Description of Artificial Sequence: Synthetic oligonucleotide
aguuaauuacauucagcaa

SEQ ID NO: 738450 - RNA, 19 nt, Artificial Sequence
  Description of Artificial Sequence: Synthetic oligonucleotide
acuacguggcaauaaggcu

SEQ ID NO: 738451 - RNA, 19 nt, Artificial Sequence
  Description of Artificial Sequence: Synthetic oligonucleotide
uugugcgacaagaauugga

SEQ ID NO: 738452 - RNA, 19 nt, Artificial Sequence
  Description of Artificial Sequence: Synthetic oligonucleotide
uagacuaaacacugguuau

SEQ ID NO: 738453 - RNA, 19 nt, Artificial Sequence
  Description of Artificial Sequence: Synthetic oligonucleotide
ugauaucaagugcuuucug

SEQ ID NO: 738454 - RNA, 19 nt, Artificial Sequence
  Description of Artificial Sequence: Synthetic oligonucleotide
uuaagagaccaccuuucau

SEQ ID NO: 738455 - RNA, 19 nt, Artificial Sequence
  Description of Artificial Sequence: Synthetic oligonucleotide
  modified_base (3)..(3): a, c, u, g, unknown or other
uunugggccagaacuuugu

SEQ ID NO: 738456 - RNA, 19 nt, Artificial Sequence
  Description of Artificial Sequence: Synthetic oligonucleotide
auaccugagguguuguacu

SEQ ID NO: 738457 - RNA, 19 nt, Artificial Sequence
  Description of Artificial Sequence: Synthetic oligonucleotide
uauaccguacucuggcuaa

SEQ ID NO: 738458 - RNA, 19 nt, Artificial Sequence
  Description of Artificial Sequence: Synthetic oligonucleotide
aagaguuaagagaccaccu

SEQ ID NO: 738459 - RNA, 19 nt, Artificial Sequence
  Description of Artificial Sequence: Synthetic oligonucleotide
aaauugugauuagauacua

SEQ ID NO: 738460 - RNA, 19 nt, Artificial Sequence
  Description of Artificial Sequence: Synthetic oligonucleotide
gugagauaaauugugauua

SEQ ID NO: 738461 - RNA, 19 nt, Artificial Sequence
  Description of Artificial Sequence: Synthetic oligonucleotide
auaaaacggaggcucugug

SEQ ID NO: 738462 - RNA, 19 nt, Artificial Sequence
  Description of Artificial Sequence: Synthetic oligonucleotide
  modified_base (6)..(6): a, c, u, g, unknown or other
uguuunugggccagaacuu

SEQ ID NO: 738463 - RNA, 19 nt, Artificial Sequence
  Description of Artificial Sequence: Synthetic oligonucleotide
auauauauauauguauaua

SEQ ID NO: 738464 - RNA, 19 nt, Artificial Sequence
  Description of Artificial Sequence: Synthetic oligonucleotide
uaagacacggaggaaucug

SEQ ID NO: 738465 - RNA, 19 nt, Artificial Sequence
  Description of Artificial Sequence: Synthetic oligonucleotide
uaauauggaaguacccguu

SEQ ID NO: 738466 - RNA, 19 nt, Artificial Sequence
  Description of Artificial Sequence: Synthetic oligonucleotide
ugacccaacuucuuguaaa

SEQ ID NO: 738467 - RNA, 19 nt, Artificial Sequence
  Description of Artificial Sequence: Synthetic oligonucleotide
aucgauaacaauggcuuug

SEQ ID NO: 738468 - RNA, 19 nt, Artificial Sequence
  Description of Artificial Sequence: Synthetic oligonucleotide
gucuguuuaauucaauugu

SEQ ID NO: 738469 - RNA, 19 nt, Artificial Sequence
  Description of Artificial Sequence: Synthetic oligonucleotide
cugcauguauucugaaaag

SEQ ID NO: 738470 - RNA, 19 nt, Artificial Sequence
  Description of Artificial Sequence: Synthetic oligonucleotide
guaguggugagaagguagg

SEQ ID NO: 738471 - RNA, 19 nt, Artificial Sequence
  Description of Artificial Sequence: Synthetic oligonucleotide
gauaacaauggcuuuguuu

SEQ ID NO: 738472 - RNA, 19 nt, Artificial Sequence
  Description of Artificial Sequence: Synthetic oligonucleotide
cuaugaaacucuagaucug

SEQ ID NO: 738473 - RNA, 19 nt, Artificial Sequence
  Description of Artificial Sequence: Synthetic oligonucleotide
gaaucuguauucaaggagu

SEQ ID NO: 738474 - RNA, 19 nt, Artificial Sequence
  Description of Artificial Sequence: Synthetic oligonucleotide
ggaagugcauuucugcgag

SEQ ID NO: 738475 - RNA, 19 nt, Artificial Sequence
  Description of Artificial Sequence: Synthetic oligonucleotide
cacaauacccaaccaguac

SEQ ID NO: 738476 - RNA, 19 nt, Artificial Sequence
  Description of Artificial Sequence: Synthetic oligonucleotide
aauugccucuuuaaucuga

SEQ ID NO: 738477 - RNA, 19 nt, Artificial Sequence
  Description of Artificial Sequence: Synthetic oligonucleotide
ucaauuacagaagguguau

SEQ ID NO: 738478 - RNA, 19 nt, Artificial Sequence
  Description of Artificial Sequence: Synthetic oligonucleotide
aauaaacuucgaccaguuu

SEQ ID NO: 738479 - RNA, 19 nt, Artificial Sequence
  Description of Artificial Sequence: Synthetic oligonucleotide
gacuaaacacugguuauca

SEQ ID NO: 738480 - RNA, 19 nt, Artificial Sequence
  Description of Artificial Sequence: Synthetic oligonucleotide
acuccaauguggcaaagua

SEQ ID NO: 738481 - RNA, 19 nt, Artificial Sequence
  Description of Artificial Sequence: Synthetic oligonucleotide
ucugcgaggcugaaccaug

SEQ ID NO: 738482 - RNA, 19 nt, Artificial Sequence
  Description of Artificial Sequence: Synthetic oligonucleotide
caauacccaaccaguacug

SEQ ID NO: 738483 - RNA, 19 nt, Artificial Sequence
  Description of Artificial Sequence: Synthetic oligonucleotide
agucugacccaacuucuug

SEQ ID NO: 738484 - RNA, 19 nt, Artificial Sequence
  Description of Artificial Sequence: Synthetic oligonucleotide
gaaauuugcauagaggguu

SEQ ID NO: 738485 - RNA, 19 nt, Artificial Sequence
  Description of Artificial Sequence: Synthetic oligonucleotide
cuaaucagagacuuucaaa

SEQ ID NO: 738486 - RNA, 19 nt, Artificial Sequence
  Description of Artificial Sequence: Synthetic oligonucleotide
gaagguagcgcuuaucaau

SEQ ID NO: 738487 - RNA, 19 nt, Artificial Sequence
  Description of Artificial Sequence: Synthetic oligonucleotide
aggguugauaucaagugcu

SEQ ID NO: 738488 - RNA, 19 nt, Artificial Sequence
  Description of Artificial Sequence: Synthetic oligonucleotide
aaguaaacgagggauucuu

SEQ ID NO: 738489 - RNA, 19 nt, Artificial Sequence
  Description of Artificial Sequence: Synthetic oligonucleotide
auguggcaaaguaagacug

SEQ ID NO: 738490 - RNA, 19 nt, Artificial Sequence
  Description of Artificial Sequence: Synthetic oligonucleotide
uucaacucuguaguucuca

SEQ ID NO: 738491 - RNA, 19 nt, Artificial Sequence
  Description of Artificial Sequence: Synthetic oligonucleotide
accuucaacucuguaguuc

SEQ ID NO: 738492 - RNA, 19 nt, Artificial Sequence
  Description of Artificial Sequence: Synthetic oligonucleotide
uuguaaagcaagacuugua

SEQ ID NO: 738493 - RNA, 19 nt, Artificial Sequence
  Description of Artificial Sequence: Synthetic oligonucleotide
  modified_base (2)..(2): a, c, u, g, unknown or other
unugggccagaacuuugug

SEQ ID NO: 738494 - RNA, 19 nt, Artificial Sequence
  Description of Artificial Sequence: Synthetic oligonucleotide
uuaggguauccaaagccuu

SEQ ID NO: 738495 - RNA, 19 nt, Artificial Sequence
  Description of Artificial Sequence: Synthetic oligonucleotide
cauagcccaagagaaauuc

SEQ ID NO: 738496 - RNA, 19 nt, Artificial Sequence
  Description of Artificial Sequence: Synthetic oligonucleotide
uaagcucguccaauuuggc

SEQ ID NO: 738497 - RNA, 19 nt, Artificial Sequence
  Description of Artificial Sequence: Synthetic oligonucleotide
uuugugcgacaagaauugg

SEQ ID NO: 738498 - RNA, 19 nt, Artificial Sequence
  Description of Artificial Sequence: Synthetic oligonucleotide
uggagugacuucucgacua

SEQ ID NO: 738499 - RNA, 19 nt, Artificial Sequence
  Description of Artificial Sequence: Synthetic oligonucleotide
agaguuaagagaccaccuu

SEQ ID NO: 738500 - RNA, 19 nt, Artificial Sequence
  Description of Artificial Sequence: Synthetic oligonucleotide
aucugcgucugucaugcug

SEQ ID NO: 738501 - RNA, 19 nt, Artificial Sequence
  Description of Artificial Sequence: Synthetic oligonucleotide
aaugggcuaagagcaguug

SEQ ID NO: 738502 - RNA, 19 nt, Artificial Sequence
  Description of Artificial Sequence: Synthetic oligonucleotide
aucuguauucaaggaguac

SEQ ID NO: 738503 - RNA, 19 nt, Artificial Sequence
  Description of Artificial Sequence: Synthetic oligonucleotide
gacuucucgacuauuucca

SEQ ID NO: 738504 - RNA, 19 nt, Artificial Sequence
  Description of Artificial Sequence: Synthetic oligonucleotide
guagcgcuuaucaauugcc

SEQ ID NO: 738505 - RNA, 19 nt, Artificial Sequence
  Description of Artificial Sequence: Synthetic oligonucleotide
caucaaggcaaggugaguc

SEQ ID NO: 738506 - RNA, 19 nt, Artificial Sequence
  Description of Artificial Sequence: Synthetic oligonucleotide
  modified_base (19)..(19): a, c, u, g, unknown or other
gagguguuguacuuguuun

SEQ ID NO: 738507 - RNA, 19 nt, Artificial Sequence
  Description of Artificial Sequence: Synthetic oligonucleotide
agaaacucucucuggcaca

SEQ ID NO: 738508 - RNA, 19 nt, Artificial Sequence
  Description of Artificial Sequence: Synthetic oligonucleotide
uagcgcuuaucaauugccu

SEQ ID NO: 738509 - RNA, 19 nt, Artificial Sequence
  Description of Artificial Sequence: Synthetic oligonucleotide
ugggaucgauaacaauggc

SEQ ID NO: 738510 - RNA, 19 nt, Artificial Sequence
  Description of Artificial Sequence: Synthetic oligonucleotide
gcuacuacguggcaauaag

SEQ ID NO: 738511 - RNA, 19 nt, Artificial Sequence
  Description of Artificial Sequence: Synthetic oligonucleotide
uggcucaaucaauaccuga

SEQ ID NO: 738512 - RNA, 19 nt, Artificial Sequence
  Description of Artificial Sequence: Synthetic oligonucleotide
cacggaggaaucuguauuc

SEQ ID NO: 738513 - RNA, 19 nt, Artificial Sequence
  Description of Artificial Sequence: Synthetic oligonucleotide
aggacuugggguuucuaau

SEQ ID NO: 738514 - RNA, 19 nt, Artificial Sequence
  Description of Artificial Sequence: Synthetic oligonucleotide
aauacccaaccaguacugu

SEQ ID NO: 738515 - RNA, 19 nt, Artificial Sequence
  Description of Artificial Sequence: Synthetic oligonucleotide
ucgauaacaauggcuuugu

SEQ ID NO: 738516 - RNA, 19 nt, Artificial Sequence
  Description of Artificial Sequence: Synthetic oligonucleotide
ucugauuauuggcuccuuu

SEQ ID NO: 738517 - RNA, 19 nt, Artificial Sequence
  Description of Artificial Sequence: Synthetic oligonucleotide
guuaagagaccaccuuuca

SEQ ID NO: 738518 - RNA, 19 nt, Artificial Sequence
  Description of Artificial Sequence: Synthetic oligonucleotide
uaggguauccaaagccuuc

SEQ ID NO: 738519 - RNA, 19 nt, Artificial Sequence
  Description of Artificial Sequence: Synthetic oligonucleotide
  modified_base (8)..(8): a, c, u, g, unknown or other
cuuguuunugggccagaac

SEQ ID NO: 738520 - RNA, 19 nt, Artificial Sequence
  Description of Artificial Sequence: Synthetic oligonucleotide
agugcaugcugaacuacuc

SEQ ID NO: 738521 - RNA, 19 nt, Artificial Sequence
  Description of Artificial Sequence: Synthetic oligonucleotide
gucugcaacagaacucagg

SEQ ID NO: 738522 - RNA, 19 nt, Artificial Sequence
  Description of Artificial Sequence: Synthetic oligonucleotide
gucucaaaaucaguaccag

SEQ ID NO: 738523 - RNA, 19 nt, Artificial Sequence
  Description of Artificial Sequence: Synthetic oligonucleotide
aaauaaaguucugcacuua

SEQ ID NO: 738524 - RNA, 19 nt, Artificial Sequence
  Description of Artificial Sequence: Synthetic oligonucleotide
caaucaauaccugaggugu

SEQ ID NO: 738525 - RNA, 19 nt, Artificial Sequence
  Description of Artificial Sequence: Synthetic oligonucleotide
agguguauuaguguaguuu

SEQ ID NO: 738526 - RNA, 19 nt, Artificial Sequence
  Description of Artificial Sequence: Synthetic oligonucleotide
acacggaggaaucuguauu

SEQ ID NO: 738527 - RNA, 19 nt, Artificial Sequence
  Description of Artificial Sequence: Synthetic oligonucleotide
gaagugcauuucugcgagg

SEQ ID NO: 738528 - RNA, 19 nt, Artificial Sequence
  Description of Artificial Sequence: Synthetic oligonucleotide
cucuaggucugcaacagaa

SEQ ID NO: 738529 - RNA, 19 nt, Artificial Sequence
  Description of Artificial Sequence: Synthetic oligonucleotide
ugggauucaucuguuccca

SEQ ID NO: 738530 - RNA, 19 nt, Artificial Sequence
  Description of Artificial Sequence: Synthetic oligonucleotide
aagacacggaggaaucugu

SEQ ID NO: 738531 - RNA, 19 nt, Artificial Sequence
  Description of Artificial Sequence: Synthetic oligonucleotide
ggaaagcuuucuaugaaac

SEQ ID NO: 738532 - RNA, 19 nt, Artificial Sequence
  Description of Artificial Sequence: Synthetic oligonucleotide
gaacuuuguguuugugcga

SEQ ID NO: 738533 - RNA, 19 nt, Artificial Sequence
  Description of Artificial Sequence: Synthetic oligonucleotide
uagaucugauaauguaaua

SEQ ID NO: 738534 - RNA, 19 nt, Artificial Sequence
  Description of Artificial Sequence: Synthetic oligonucleotide
gguagcgcuuaucaauugc

SEQ ID NO: 738535 - RNA, 19 nt, Artificial Sequence
  Description of Artificial Sequence: Synthetic oligonucleotide
ggcuaagagcaguuggucc

SEQ ID NO: 738536 - RNA, 19 nt, Artificial Sequence
  Description of Artificial Sequence: Synthetic oligonucleotide
gcaaauagaacacacuuau

SEQ ID NO: 738537 - RNA, 19 nt, Artificial Sequence
  Description of Artificial Sequence: Synthetic oligonucleotide
ucugugaaauuugcauaga

SEQ ID NO: 738538 - RNA, 19 nt, Artificial Sequence
  Description of Artificial Sequence: Synthetic oligonucleotide
acuacuccaauguggcaaa

SEQ ID NO: 738539 - RNA, 19 nt, Artificial Sequence
  Description of Artificial Sequence: Synthetic oligonucleotide
acagacuuuguuccaguuu

SEQ ID NO: 738540 - RNA, 19 nt, Artificial Sequence
  Description of Artificial Sequence: Synthetic oligonucleotide
uugagugcaugcugaacua

SEQ ID NO: 738541 - RNA, 19 nt, Artificial Sequence
  Description of Artificial Sequence: Synthetic oligonucleotide
gaccuauaccguacucugg

SEQ ID NO: 738542 - RNA, 19 nt, Artificial Sequence
  Description of Artificial Sequence: Synthetic oligonucleotide
uuguagaguagaucuccau

SEQ ID NO: 738543 - RNA, 19 nt, Artificial Sequence
  Description of Artificial Sequence: Synthetic oligonucleotide
auguauauagcuggcuuaa

SEQ ID NO: 738544 - RNA, 19 nt, Artificial Sequence
  Description of Artificial Sequence: Synthetic oligonucleotide
cagaagguguauuagugua

SEQ ID NO: 738545 - RNA, 19 nt, Artificial Sequence
  Description of Artificial Sequence: Synthetic oligonucleotide
ugggguuucuaauggcaaa

SEQ ID NO: 738546 - RNA, 19 nt, Artificial Sequence
  Description of Artificial Sequence: Synthetic oligonucleotide
uaaugggcuaagagcaguu

SEQ ID NO: 738547 - RNA, 19 nt, Artificial Sequence
  Description of Artificial Sequence: Synthetic oligonucleotide
ggacauacaacuccuacua

SEQ ID NO: 738548 - RNA, 19 nt, Artificial Sequence
  Description of Artificial Sequence: Synthetic oligonucleotide
accguacucuggcuaauca

SEQ ID NO: 738549 - RNA, 19 nt, Artificial Sequence
  Description of Artificial Sequence: Synthetic oligonucleotide
aaauuugcauagaggguuu

SEQ ID NO: 738550 - RNA, 19 nt, Artificial Sequence
  Description of Artificial Sequence: Synthetic oligonucleotide
uccgguggauggcacguca

SEQ ID NO: 738551 - RNA, 19 nt, Artificial Sequence
  Description of Artificial Sequence: Synthetic oligonucleotide
ugguuaucacugaguuuug

SEQ ID NO: 738552 - RNA, 19 nt, Artificial Sequence
  Description of Artificial Sequence: Synthetic oligonucleotide
accuuucauuauuuugagu

SEQ ID NO: 738553 - RNA, 19 nt, Artificial Sequence
  Description of Artificial Sequence: Synthetic oligonucleotide
cucuagaucugauaaugua

SEQ ID NO: 738554 - RNA, 19 nt, Artificial Sequence
  Description of Artificial Sequence: Synthetic oligonucleotide
ucugacccaacuucuugua

SEQ ID NO: 738555 - RNA, 19 nt, Artificial Sequence
  Description of Artificial Sequence: Synthetic oligonucleotide
ggacuugggguuucuaaug

SEQ ID NO: 738556 - RNA, 19 nt, Artificial Sequence
  Description of Artificial Sequence: Synthetic oligonucleotide
uccuccuaauaaacuucga

SEQ ID NO: 738557 - RNA, 19 nt, Artificial Sequence
  Description of Artificial Sequence: Synthetic oligonucleotide
accaugucuguuaaauacu

SEQ ID NO: 738558 - RNA, 19 nt, Artificial Sequence
  Description of Artificial Sequence: Synthetic oligonucleotide
ggaaaccuaagaagaaaug

SEQ ID NO: 738559 - RNA, 19 nt, Artificial Sequence
  Description of Artificial Sequence: Synthetic oligonucleotide
ccuguuuagauaauaugga

SEQ ID NO: 738560 - RNA, 19 nt, Artificial Sequence
  Description of Artificial Sequence: Synthetic oligonucleotide
acguuaucuggugaaauua

SEQ ID NO: 738561 - RNA, 19 nt, Artificial Sequence
  Description of Artificial Sequence: Synthetic oligonucleotide
ccuaauaaacuucgaccag

SEQ ID NO: 738562 - RNA, 19 nt, Artificial Sequence
  Description of Artificial Sequence: Synthetic oligonucleotide
ccuccuaauaaacuucgac

SEQ ID NO: 738563 - RNA, 19 nt, Artificial Sequence
  Description of Artificial Sequence: Synthetic oligonucleotide
guaaggacugucucgggcu

SEQ ID NO: 738564 - RNA, 19 nt, Artificial Sequence
  Description of Artificial Sequence: Synthetic oligonucleotide
cucaaucaauaccugaggu

SEQ ID NO: 738565 - RNA, 19 nt, Artificial Sequence
  Description of Artificial Sequence: Synthetic oligonucleotide
uacuugcaguucuuggaua

SEQ ID NO: 738566 - RNA, 19 nt, Artificial Sequence
  Description of Artificial Sequence: Synthetic oligonucleotide
gacauacaacuccuacuaa

SEQ ID NO: 738567 - RNA, 19 nt, Artificial Sequence
  Description of Artificial Sequence: Synthetic oligonucleotide
uucuaaguucagucuguuu

SEQ ID NO: 738568 - RNA, 19 nt, Artificial Sequence
  Description of Artificial Sequence: Synthetic oligonucleotide
uugggguuaaugggcuaag

SEQ ID NO: 738569 - RNA, 19 nt, Artificial Sequence
  Description of Artificial Sequence: Synthetic oligonucleotide
gaguuaagagaccaccuuu

SEQ ID NO: 738570 - RNA, 19 nt, Artificial Sequence
  Description of Artificial Sequence: Synthetic oligonucleotide
acucuagaucugauaaugu

SEQ ID NO: 738571 - RNA, 19 nt, Artificial Sequence
  Description of Artificial Sequence: Synthetic oligonucleotide
gaagguguauuaguguagu

SEQ ID NO: 738572 - RNA, 19 nt, Artificial Sequence
  Description of Artificial Sequence: Synthetic oligonucleotide
cuguaaggacugucucggg

SEQ ID NO: 738573 - RNA, 19 nt, Artificial Sequence
  Description of Artificial Sequence: Synthetic oligonucleotide
uggugaaauuacagcugaa

SEQ ID NO: 738574 - RNA, 19 nt, Artificial Sequence
  Description of Artificial Sequence: Synthetic oligonucleotide
cuaauaaacuucgaccagu

SEQ ID NO: 738575 - RNA, 19 nt, Artificial Sequence
  Description of Artificial Sequence: Synthetic oligonucleotide
guguauuaguguaguuuug

SEQ ID NO: 738576 - RNA, 19 nt, Artificial Sequence
  Description of Artificial Sequence: Synthetic oligonucleotide
aggaguacuuugaauugga

SEQ ID NO: 738577 - RNA, 19 nt, Artificial Sequence
  Description of Artificial Sequence: Synthetic oligonucleotide
agguagcgcuuaucaauug

SEQ ID NO: 738578 - RNA, 19 nt, Artificial Sequence
  Description of Artificial Sequence: Synthetic oligonucleotide
uacuccaauguggcaaagu

SEQ ID NO: 738579 - RNA, 19 nt, Artificial Sequence
  Description of Artificial Sequence: Synthetic oligonucleotide
ggcacgucaauuacagaag

SEQ ID NO: 738580 - RNA, 19 nt, Artificial Sequence
  Description of Artificial Sequence: Synthetic oligonucleotide
gauucuaaguucagucugu

SEQ ID NO: 738581 - RNA, 19 nt, Artificial Sequence
  Description of Artificial Sequence: Synthetic oligonucleotide
ccugcauguauucugaaaa

SEQ ID NO: 738582 - RNA, 19 nt, Artificial Sequence
  Description of Artificial Sequence: Synthetic oligonucleotide
cagcagcauaguucaaaug

SEQ ID NO: 738583 - RNA, 19 nt, Artificial Sequence
  Description of Artificial Sequence: Synthetic oligonucleotide
gaacuacuccaauguggca

SEQ ID NO: 738584 - RNA, 19 nt, Artificial Sequence
  Description of Artificial Sequence: Synthetic oligonucleotide
uccauaccuucaacucugu

SEQ ID NO: 738585 - RNA, 19 nt, Artificial Sequence
  Description of Artificial Sequence: Synthetic oligonucleotide
  modified_base (9)..(9): a, c, u, g, unknown or other
acuuguuunugggccagaa

SEQ ID NO: 738586 - RNA, 19 nt, Artificial Sequence
  Description of Artificial Sequence: Synthetic oligonucleotide
aaccaguacuguaguggug

SEQ ID NO: 738587 - RNA, 19 nt, Artificial Sequence
  Description of Artificial Sequence: Synthetic oligonucleotide
caaauaaaacggaggcucu

SEQ ID NO: 738588 - RNA, 19 nt, Artificial Sequence
  Description of Artificial Sequence: Synthetic oligonucleotide
uacuuugaauuggaagauu

SEQ ID NO: 738589 - RNA, 19 nt, Artificial Sequence
  Description of Artificial Sequence: Synthetic oligonucleotide
guacuguaguggugagaag

SEQ ID NO: 738590 - RNA, 19 nt, Artificial Sequence
  Description of Artificial Sequence: Synthetic oligonucleotide
ucaucaaggcaaggugagu

SEQ ID NO: 738591 - RNA, 19 nt, Artificial Sequence
  Description of Artificial Sequence: Synthetic oligonucleotide
aaucaauaccugagguguu

SEQ ID NO: 738592 - RNA, 19 nt, Artificial Sequence
  Description of Artificial Sequence: Synthetic oligonucleotide
cagcauaguucaaauguua

SEQ ID NO: 738593 - RNA, 19 nt, Artificial Sequence
  Description of Artificial Sequence: Synthetic oligonucleotide
agcaguugguccuccuaau

SEQ ID NO: 738594 - RNA, 19 nt, Artificial Sequence
  Description of Artificial Sequence: Synthetic oligonucleotide
uguauauagcuggcuuaau

SEQ ID NO: 738595 - RNA, 19 nt, Artificial Sequence
  Description of Artificial Sequence: Synthetic oligonucleotide
cuccuaacuucugagaaua

SEQ ID NO: 738596 - RNA, 19 nt, Artificial Sequence
  Description of Artificial Sequence: Synthetic oligonucleotide
cuuguaaagcaagacuugu

SEQ ID NO: 738597 - RNA, 19 nt, Artificial Sequence
  Description of Artificial Sequence: Synthetic oligonucleotide
gagaccaccuuucauuauu

SEQ ID NO: 738598 - RNA, 19 nt, Artificial Sequence
  Description of Artificial Sequence: Synthetic oligonucleotide
gacguuaucuggugaaauu

SEQ ID NO: 738599 - RNA, 19 nt, Artificial Sequence
  Description of Artificial Sequence: Synthetic oligonucleotide
uucugcgaggcugaaccau

SEQ ID NO: 738600 - RNA, 19 nt, Artificial Sequence
  Description of Artificial Sequence: Synthetic oligonucleotide
cuauaccguacucuggcua

SEQ ID NO: 738601 - RNA, 19 nt, Artificial Sequence
  Description of Artificial Sequence: Synthetic oligonucleotide
ugggguuaaugggcuaaga

SEQ ID NO: 738602 - RNA, 19 nt, Artificial Sequence
  Description of Artificial Sequence: Synthetic oligonucleotide
acacugguuaucacugagu

SEQ ID NO: 738603 - RNA, 19 nt, Artificial Sequence
  Description of Artificial Sequence: Synthetic oligonucleotide
cuuaaucugcgucugucau

SEQ ID NO: 738604 - RNA, 19 nt, Artificial Sequence
  Description of Artificial Sequence: Synthetic oligonucleotide
uggcuuaaucugcgucugu

SEQ ID NO: 738605 - RNA, 19 nt, Artificial Sequence
  Description of Artificial Sequence: Synthetic oligonucleotide
ggaucgauaacaauggcuu

SEQ ID NO: 738606 - RNA, 19 nt, Artificial Sequence
  Description of Artificial Sequence: Synthetic oligonucleotide
uaccugagguguuguacuu

SEQ ID NO: 738607 - RNA, 19 nt, Artificial Sequence
  Description of Artificial Sequence: Synthetic oligonucleotide
gaaguaaacgagggauucu

SEQ ID NO: 738608 - RNA, 19 nt, Artificial Sequence
  Description of Artificial Sequence: Synthetic oligonucleotide
gcuuucuaugaaacucuag

SEQ ID NO: 738609 - RNA, 19 nt, Artificial Sequence
  Description of Artificial Sequence: Synthetic oligonucleotide
gggguguuucuguaaggac

SEQ ID NO: 738610 - RNA, 19 nt, Artificial Sequence
  Description of Artificial Sequence: Synthetic oligonucleotide
auucuaaguucagucuguu

SEQ ID NO: 738611 - RNA, 19 nt, Artificial Sequence
  Description of Artificial Sequence: Synthetic oligonucleotide
ugcgaggcugaaccauguc

SEQ ID NO: 738612 - RNA, 19 nt, Artificial Sequence
  Description of Artificial Sequence: Synthetic oligonucleotide
gacacggaggaaucuguau

SEQ ID NO: 738613 - RNA, 19 nt, Artificial Sequence
  Description of Artificial Sequence: Synthetic oligonucleotide
cugauuauuggcuccuuuu

SEQ ID NO: 738614 - RNA, 19 nt, Artificial Sequence
  Description of Artificial Sequence: Synthetic oligonucleotide
ccguacucuggcuaaucag

SEQ ID NO: 738615 - RNA, 19 nt, Artificial Sequence
  Description of Artificial Sequence: Synthetic oligonucleotide
ggguuauuggcuccucauc

SEQ ID NO: 738616 - RNA, 19 nt, Artificial Sequence
  Description of Artificial Sequence: Synthetic oligonucleotide
caaaauaagcucguccaau

SEQ ID NO: 738617 - RNA, 19 nt, Artificial Sequence
  Description of Artificial Sequence: Synthetic oligonucleotide
aaucugcgucugucaugcu

SEQ ID NO: 738618 - RNA, 19 nt, Artificial Sequence
  Description of Artificial Sequence: Synthetic oligonucleotide
cauuucugcgaggcugaac

SEQ ID NO: 738619 - RNA, 19 nt, Artificial Sequence
  Description of Artificial Sequence: Synthetic oligonucleotide
gaucgauaacaauggcuuu

SEQ ID NO: 738620 - RNA, 19 nt, Artificial Sequence
  Description of Artificial Sequence: Synthetic oligonucleotide
ucccaaaacuugggguuaa

SEQ ID NO: 738621 - RNA, 19 nt, Artificial Sequence
  Description of Artificial Sequence: Synthetic oligonucleotide
ggaagguagcgcuuaucaa

SEQ ID NO: 738622 - RNA, 19 nt, Artificial Sequence
  Description of Artificial Sequence: Synthetic oligonucleotide
guacuuugaauuggaagau

SEQ ID NO: 738623 - RNA, 19 nt, Artificial Sequence
  Description of Artificial Sequence: Synthetic oligonucleotide
aguaaacgagggauucuuu

SEQ ID NO: 738624 - RNA, 19 nt, Artificial Sequence
  Description of Artificial Sequence: Synthetic oligonucleotide
cacugguuaucacugaguu

SEQ ID NO: 738625 - RNA, 19 nt, Artificial Sequence
  Description of Artificial Sequence: Synthetic oligonucleotide
cguacucuggcuaaucaga

SEQ ID NO: 738626 - RNA, 19 nt, Artificial Sequence
  Description of Artificial Sequence: Synthetic oligonucleotide
gucucuauagccagccacu

SEQ ID NO: 738627 - RNA, 19 nt, Artificial Sequence
  Description of Artificial Sequence: Synthetic oligonucleotide
gaggcugaaccaugucugu

SEQ ID NO: 738628 - RNA, 19 nt, Artificial Sequence
  Description of Artificial Sequence: Synthetic oligonucleotide
uaccguacucuggcuaauc

SEQ ID NO: 738629 - RNA, 19 nt, Artificial Sequence
  Description of Artificial Sequence: Synthetic oligonucleotide
cuacuccaauguggcaaag

SEQ ID NO: 738630 - RNA, 19 nt, Artificial Sequence
  Description of Artificial Sequence: Synthetic oligonucleotide
cacgucaauuacagaaggu

SEQ ID NO: 738631 - RNA, 19 nt, Artificial Sequence
  Description of Artificial Sequence: Synthetic oligonucleotide
gcgcuuaucaauugccucu

SEQ ID NO: 738632 - RNA, 19 nt, Artificial Sequence
  Description of Artificial Sequence: Synthetic oligonucleotide
gggaucgauaacaauggcu

SEQ ID NO: 738633 - RNA, 19 nt, Artificial Sequence
  Description of Artificial Sequence: Synthetic oligonucleotide
cugacccaacuucuuguaa

SEQ ID NO: 738634 - RNA, 19 nt, Artificial Sequence
  Description of Artificial Sequence: Synthetic oligonucleotide
gcuuuguuuaggguaucca

SEQ ID NO: 738635 - RNA, 19 nt, Artificial Sequence
  Description of Artificial Sequence: Synthetic oligonucleotide
gcgacaagaauuggaguga

SEQ ID NO: 738636 - RNA, 19 nt, Artificial Sequence
  Description of Artificial Sequence: Synthetic oligonucleotide
ggcuccgguggauggcacg

SEQ ID NO: 738637 - RNA, 19 nt, Artificial Sequence
  Description of Artificial Sequence: Synthetic oligonucleotide
cuggaagguagcgcuuauc

SEQ ID NO: 738638 - RNA, 19 nt, Artificial Sequence
  Description of Artificial Sequence: Synthetic oligonucleotide
gugcgacaagaauuggagu

SEQ ID NO: 738639 - RNA, 19 nt, Artificial Sequence
  Description of Artificial Sequence: Synthetic oligonucleotide
  modified_base (5)..(5): a, c, u, g, unknown or other
guuunugggccagaacuuu

SEQ ID NO: 738640 - RNA, 19 nt, Artificial Sequence
  Description of Artificial Sequence: Synthetic oligonucleotide
agggcuccgguggauggca

SEQ ID NO: 738641 - RNA, 19 nt, Artificial Sequence
  Description of Artificial Sequence: Synthetic oligonucleotide
gacaagaauuggagugacu

SEQ ID NO: 738642 - RNA, 19 nt, Artificial Sequence
  Description of Artificial Sequence: Synthetic oligonucleotide
uucuggcaacuagacuuuu

SEQ ID NO: 738643 - RNA, 19 nt, Artificial Sequence
  Description of Artificial Sequence: Synthetic oligonucleotide
agacacggaggaaucugua

SEQ ID NO: 738644 - RNA, 19 nt, Artificial Sequence
  Description of Artificial Sequence: Synthetic oligonucleotide
auaccguacucuggcuaau

SEQ ID NO: 738645 - RNA, 19 nt, Artificial Sequence
  Description of Artificial Sequence: Synthetic oligonucleotide
acggaggcucugugaaauu

SEQ ID NO: 738646 - RNA, 19 nt, Artificial Sequence
  Description of Artificial Sequence: Synthetic oligonucleotide
aucugauuauuggcuccuu

SEQ ID NO: 738647 - RNA, 19 nt, Artificial Sequence
  Description of Artificial Sequence: Synthetic oligonucleotide
ggucugcaacagaacucag

SEQ ID NO: 738648 - RNA, 19 nt, Artificial Sequence
  Description of Artificial Sequence: Synthetic oligonucleotide
ggaguacuuugaauuggaa

SEQ ID NO: 738649 - RNA, 19 nt, Artificial Sequence
  Description of Artificial Sequence: Synthetic oligonucleotide
ugcgucugucaugcugcuc

SEQ ID NO: 738650 - RNA, 19 nt, Artificial Sequence
  Description of Artificial Sequence: Synthetic oligonucleotide
ucguccaauuuggcacaau

SEQ ID NO: 738651 - RNA, 19 nt, Artificial Sequence
  Description of Artificial Sequence: Synthetic oligonucleotide
ggcuacuacguggcaauaa

SEQ ID NO: 738652 - RNA, 19 nt, Artificial Sequence
  Description of Artificial Sequence: Synthetic oligonucleotide
ccacaacuaugccucuauc

SEQ ID NO: 738653 - RNA, 19 nt, Artificial Sequence
  Description of Artificial Sequence: Synthetic oligonucleotide
caauuacagaagguguauu

SEQ ID NO: 738654 - RNA, 19 nt, Artificial Sequence
  Description of Artificial Sequence: Synthetic oligonucleotide
cgacaagaauuggagugac

SEQ ID NO: 738655 - RNA, 19 nt, Artificial Sequence
  Description of Artificial Sequence: Synthetic oligonucleotide
ggugagaagguagguggcu

SEQ ID NO: 738656 - RNA, 19 nt, Artificial Sequence
  Description of Artificial Sequence: Synthetic oligonucleotide
ucgggcugucugugagaua

SEQ ID NO: 738657 - RNA, 19 nt, Artificial Sequence
  Description of Artificial Sequence: Synthetic oligonucleotide
cugcgaggcugaaccaugu

SEQ ID NO: 738658 - RNA, 19 nt, Artificial Sequence
  Description of Artificial Sequence: Synthetic oligonucleotide
gccacaacuaugccucuau

SEQ ID NO: 738659 - RNA, 19 nt, Artificial Sequence
  Description of Artificial Sequence: Synthetic oligonucleotide
gguugauaucaagugcuuu

SEQ ID NO: 738660 - RNA, 19 nt, Artificial Sequence
  Description of Artificial Sequence: Synthetic oligonucleotide
gggacguuaucuggugaaa

SEQ ID NO: 738661 - RNA, 19 nt, Artificial Sequence
  Description of Artificial Sequence: Synthetic oligonucleotide
ggacguuaucuggugaaau

SEQ ID NO: 738662 - RNA, 19 nt, Artificial Sequence
  Description of Artificial Sequence: Synthetic oligonucleotide
ggagugacuucucgacuau

SEQ ID NO: 738663 - RNA, 19 nt, Artificial Sequence
  Description of Artificial Sequence: Synthetic oligonucleotide
cucgggcugucugugagau

SEQ ID NO: 738664 - RNA, 19 nt, Artificial Sequence
  Description of Artificial Sequence: Synthetic oligonucleotide
cucguccaauuuggcacaa

SEQ ID NO: 738665 - RNA, 19 nt, Artificial Sequence
  Description of Artificial Sequence: Synthetic oligonucleotide
ggguuucuaauggcaaaau

SEQ ID NO: 738666 - RNA, 19 nt, Artificial Sequence
  Description of Artificial Sequence: Synthetic oligonucleotide
ccuauaccguacucuggcu

SEQ ID NO: 738667 - RNA, 19 nt, Artificial Sequence
  Description of Artificial Sequence: Synthetic oligonucleotide
cugcgucugucaugcugcu

SEQ ID NO: 738668 - RNA, 19 nt, Artificial Sequence
  Description of Artificial Sequence: Synthetic oligonucleotide
acguggcaauaaggcucca

SEQ ID NO: 738669 - RNA, 19 nt, Artificial Sequence
  Description of Artificial Sequence: Synthetic oligonucleotide
gggauucaucuguucccau

SEQ ID NO: 738670 - RNA, 19 nt, Artificial Sequence
  Description of Artificial Sequence: Synthetic oligonucleotide
gcuccaguauggagauguu

SEQ ID NO: 738671 - RNA, 19 nt, Artificial Sequence
  Description of Artificial Sequence: Synthetic oligonucleotide
cggaggcucugugaaauuu

SEQ ID NO: 738672 - RNA, 19 nt, Artificial Sequence
  Description of Artificial Sequence: Synthetic oligonucleotide
uuauuuuacaucgagaucc

SEQ ID NO: 738673 - RNA, 19 nt, Artificial Sequence
  Description of Artificial Sequence: Synthetic oligonucleotide
aacuuuuggagcuuggaac

SEQ ID NO: 738674 - RNA, 19 nt, Artificial Sequence
  Description of Artificial Sequence: Synthetic oligonucleotide
uuuguuaugagccacagau

SEQ ID NO: 738675 - RNA, 19 nt, Artificial Sequence
  Description of Artificial Sequence: Synthetic oligonucleotide
aaacccauuacauuuaucu

SEQ ID NO: 738676 - RNA, 19 nt, Artificial Sequence
  Description of Artificial Sequence: Synthetic oligonucleotide
aaauuguucacucugaauu

SEQ ID NO: 738677 - RNA, 19 nt, Artificial Sequence
  Description of Artificial Sequence: Synthetic oligonucleotide
acaaucaaaagcucugucc

SEQ ID NO: 738678 - RNA, 19 nt, Artificial Sequence
  Description of Artificial Sequence: Synthetic oligonucleotide
aaaauauuccagaaggcgg

SEQ ID NO: 738679 - RNA, 19 nt, Artificial Sequence
  Description of Artificial Sequence: Synthetic oligonucleotide
aguaaguacuaauggaggc

SEQ ID NO: 738680 - RNA, 19 nt, Artificial Sequence
  Description of Artificial Sequence: Synthetic oligonucleotide
uuuagcuaaucuaucacag

SEQ ID NO: 738681 - RNA, 19 nt, Artificial Sequence
  Description of Artificial Sequence: Synthetic oligonucleotide
auuuacauuggauaacccg

SEQ ID NO: 738682 - RNA, 19 nt, Artificial Sequence
  Description of Artificial Sequence: Synthetic oligonucleotide
aauuguucacucugaauuc

SEQ ID NO: 738683 - RNA, 19 nt, Artificial Sequence
  Description of Artificial Sequence: Synthetic oligonucleotide
uguuaugagccacagaucu

SEQ ID NO: 738684 - RNA, 19 nt, Artificial Sequence
  Description of Artificial Sequence: Synthetic oligonucleotide
auauccccuaucuauaagc

SEQ ID NO: 738685 - RNA, 19 nt, Artificial Sequence
  Description of Artificial Sequence: Synthetic oligonucleotide
cuugaaggggaauacaucc

SEQ ID NO: 738686 - RNA, 19 nt, Artificial Sequence
  Description of Artificial Sequence: Synthetic oligonucleotide
agaagaguaacucgagagc

SEQ ID NO: 738687 - RNA, 19 nt, Artificial Sequence
  Description of Artificial Sequence: Synthetic oligonucleotide
caaguaaguacuaauggag

SEQ ID NO: 738688 - RNA, 19 nt, Artificial Sequence
  Description of Artificial Sequence: Synthetic oligonucleotide
uaucuauaagcacucauga

SEQ ID NO: 738689 - RNA, 19 nt, Artificial Sequence
  Description of Artificial Sequence: Synthetic oligonucleotide
aggcaaauuaguuucagag

SEQ ID NO: 738690 - RNA, 19 nt, Artificial Sequence
  Description of Artificial Sequence: Synthetic oligonucleotide
ugauacauuuacuacauaa

SEQ ID NO: 738691 - RNA, 19 nt, Artificial Sequence
  Description of Artificial Sequence: Synthetic oligonucleotide
ugaacugaucacaaguaag

SEQ ID NO: 738692 - RNA, 19 nt, Artificial Sequence
  Description of Artificial Sequence: Synthetic oligonucleotide
uuauccgcagcucaaaaug

SEQ ID NO: 738693 - RNA, 19 nt, Artificial Sequence
  Description of Artificial Sequence: Synthetic oligonucleotide
aacaccuugagauuuuaca

SEQ ID NO: 738694 - RNA, 19 nt, Artificial Sequence
  Description of Artificial Sequence: Synthetic oligonucleotide
guacguuccaucuagcagg

SEQ ID NO: 738695 - RNA, 19 nt, Artificial Sequence
  Description of Artificial Sequence: Synthetic oligonucleotide
uaucucugaaucuuguuag

SEQ ID NO: 738696 - RNA, 19 nt, Artificial Sequence
  Description of Artificial Sequence: Synthetic oligonucleotide
ugauauuccaaguucuccc

SEQ ID NO: 738697 - RNA, 19 nt, Artificial Sequence
  Description of Artificial Sequence: Synthetic oligonucleotide
uagacugacaauuugacuu

SEQ ID NO: 738698 - RNA, 19 nt, Artificial Sequence
  Description of Artificial Sequence: Synthetic oligonucleotide
ucacaaguaaguacuaaug

SEQ ID NO: 738699 - RNA, 19 nt, Artificial Sequence
  Description of Artificial Sequence: Synthetic oligonucleotide
aauucgguaucguugagaa

SEQ ID NO: 738700 - RNA, 19 nt, Artificial Sequence
  Description of Artificial Sequence: Synthetic oligonucleotide
auuauuuuacaucgagauc

SEQ ID NO: 738701 - RNA, 19 nt, Artificial Sequence
  Description of Artificial Sequence: Synthetic oligonucleotide
uaagcacucaugacuaagg

SEQ ID NO: 738702 - RNA, 19 nt, Artificial Sequence
  Description of Artificial Sequence: Synthetic oligonucleotide
uguacguuccaucuagcag

SEQ ID NO: 738703 - RNA, 19 nt, Artificial Sequence
  Description of Artificial Sequence: Synthetic oligonucleotide
uucgguaucguugagaagu

SEQ ID NO: 738704 - RNA, 19 nt, Artificial Sequence
  Description of Artificial Sequence: Synthetic oligonucleotide
cugacuauuccaaaacucc

SEQ ID NO: 738705 - RNA, 19 nt, Artificial Sequence
  Description of Artificial Sequence: Synthetic oligonucleotide
agucauuauauauuuguca

SEQ ID NO: 738706 - RNA, 19 nt, Artificial Sequence
  Description of Artificial Sequence: Synthetic oligonucleotide
ugcaggguaaucuucacug

SEQ ID NO: 738707 - RNA, 19 nt, Artificial Sequence
  Description of Artificial Sequence: Synthetic oligonucleotide
agacuuucaagucuucuuc

SEQ ID NO: 738708 - RNA, 19 nt, Artificial Sequence
  Description of Artificial Sequence: Synthetic oligonucleotide
ugauggacggaacagaguc

SEQ ID NO: 738709 - RNA, 19 nt, Artificial Sequence
  Description of Artificial Sequence: Synthetic oligonucleotide
cacgaagucaccuccaggg

SEQ ID NO: 738710 - RNA, 19 nt, Artificial Sequence
  Description of Artificial Sequence: Synthetic oligonucleotide
acaaguaaguacuaaugga

SEQ ID NO: 738711 - RNA, 19 nt, Artificial Sequence
  Description of Artificial Sequence: Synthetic oligonucleotide
cagguuuucaauagguggg

SEQ ID NO: 738712 - RNA, 19 nt, Artificial Sequence
  Description of Artificial Sequence: Synthetic oligonucleotide
ugauucaacuuuuggagcu

SEQ ID NO: 738713 - RNA, 19 nt, Artificial Sequence
  Description of Artificial Sequence: Synthetic oligonucleotide
uuaucugaucaucaucuga

SEQ ID NO: 738714 - RNA, 19 nt, Artificial Sequence
  Description of Artificial Sequence: Synthetic oligonucleotide
ugcaaaaucuuugauuccc

SEQ ID NO: 738715 - RNA, 19 nt, Artificial Sequence
  Description of Artificial Sequence: Synthetic oligonucleotide
ucugacuauuccaaaacuc

SEQ ID NO: 738716 - RNA, 19 nt, Artificial Sequence
  Description of Artificial Sequence: Synthetic oligonucleotide
uuacauuggauaacccgag

SEQ ID NO: 738717 - RNA, 19 nt, Artificial Sequence
  Description of Artificial Sequence: Synthetic oligonucleotide
ucuuguuagaagccggcgc

SEQ ID NO: 738718 - RNA, 19 nt, Artificial Sequence
  Description of Artificial Sequence: Synthetic oligonucleotide
uccccuaucuauaagcacu

SEQ ID NO: 738719 - RNA, 19 nt, Artificial Sequence
  Description of Artificial Sequence: Synthetic oligonucleotide
aaauggguggcacuccuca

SEQ ID NO: 738720 - RNA, 19 nt, Artificial Sequence
  Description of Artificial Sequence: Synthetic oligonucleotide
uuccuguagaggcagaaac

SEQ ID NO: 738721 - RNA, 19 nt, Artificial Sequence
  Description of Artificial Sequence: Synthetic oligonucleotide
ucggucaugggccaaacac

SEQ ID NO: 738722 - RNA, 19 nt, Artificial Sequence
  Description of Artificial Sequence: Synthetic oligonucleotide
auaugaacacugcagguga

SEQ ID NO: 738723 - RNA, 19 nt, Artificial Sequence
  Description of Artificial Sequence: Synthetic oligonucleotide
ucuaauucagaugguaugu

SEQ ID NO: 738724 - RNA, 19 nt, Artificial Sequence
  Description of Artificial Sequence: Synthetic oligonucleotide
ugguaggcaaauuaguuuc

SEQ ID NO: 738725 - RNA, 19 nt, Artificial Sequence
  Description of Artificial Sequence: Synthetic oligonucleotide
ucaugggccaaacaccuug

SEQ ID NO: 738726 - RNA, 19 nt, Artificial Sequence
  Description of Artificial Sequence: Synthetic oligonucleotide
auaaguucauuuguuauga

SEQ ID NO: 738727 - RNA, 19 nt, Artificial Sequence
  Description of Artificial Sequence: Synthetic oligonucleotide
ucaacucuacaucaaguuc

SEQ ID NO: 738728 - RNA, 19 nt, Artificial Sequence
  Description of Artificial Sequence: Synthetic oligonucleotide
aaauauuccagaaggcgga

SEQ ID NO: 738729 - RNA, 19 nt, Artificial Sequence
  Description of Artificial Sequence: Synthetic oligonucleotide
acagccaccuggcaugacc

SEQ ID NO: 738730 - RNA, 19 nt, Artificial Sequence
  Description of Artificial Sequence: Synthetic oligonucleotide
uauuuuacaucgagauccc

SEQ ID NO: 738731 - RNA, 19 nt, Artificial Sequence
  Description of Artificial Sequence: Synthetic oligonucleotide
gucgguuccaaccucaaug

SEQ ID NO: 738732 - RNA, 19 nt, Artificial Sequence
  Description of Artificial Sequence: Synthetic oligonucleotide
agcaaagacuuucaagucu

SEQ ID NO: 738733 - RNA, 19 nt, Artificial Sequence
  Description of Artificial Sequence: Synthetic oligonucleotide
aaggggaauacauccagaa

SEQ ID NO: 738734 - RNA, 19 nt, Artificial Sequence
  Description of Artificial Sequence: Synthetic oligonucleotide
uacuaauggaggcugcaca

SEQ ID NO: 738735 - RNA, 19 nt, Artificial Sequence
  Description of Artificial Sequence: Synthetic oligonucleotide
agaguaacucgagagccgc

SEQ ID NO: 738736 - RNA, 19 nt, Artificial Sequence
  Description of Artificial Sequence: Synthetic oligonucleotide
uaaguacuaauggaggcug

SEQ ID NO: 738737 - RNA, 19 nt, Artificial Sequence
  Description of Artificial Sequence: Synthetic oligonucleotide
ucgagagccgccuaggaga

SEQ ID NO: 738738 - RNA, 19 nt, Artificial Sequence
  Description of Artificial Sequence: Synthetic oligonucleotide
gucgauagugaguuucugg

SEQ ID NO: 738739 - RNA, 19 nt, Artificial Sequence
  Description of Artificial Sequence: Synthetic oligonucleotide
ugcuacgcuggucauaucu

SEQ ID NO: 738740 - RNA, 19 nt, Artificial Sequence
  Description of Artificial Sequence: Synthetic oligonucleotide
uauauccccuaucuauaag

SEQ ID NO: 738741 - RNA, 19 nt, Artificial Sequence
  Description of Artificial Sequence: Synthetic oligonucleotide
uauccccuaucuauaagca

SEQ ID NO: 738742 - RNA, 19 nt, Artificial Sequence
  Description of Artificial Sequence: Synthetic oligonucleotide
auuauauagucauuauaua

SEQ ID NO: 738743 - RNA, 19 nt, Artificial Sequence
  Description of Artificial Sequence: Synthetic oligonucleotide
caugacuaaggguagcaac

SEQ ID NO: 738744 - RNA, 19 nt, Artificial Sequence
  Description of Artificial Sequence: Synthetic oligonucleotide
uuuugcaacaccacucgau

SEQ ID NO: 738745 - RNA, 19 nt, Artificial Sequence
  Description of Artificial Sequence: Synthetic oligonucleotide
uacauuggauaacccgagg

SEQ ID NO: 738746 - RNA, 19 nt, Artificial Sequence
  Description of Artificial Sequence: Synthetic oligonucleotide
ugcacauagacugacaauu

SEQ ID NO: 738747 - RNA, 19 nt, Artificial Sequence
  Description of Artificial Sequence: Synthetic oligonucleotide
cuacauaagaaaucuguga

SEQ ID NO: 738748 - RNA, 19 nt, Artificial Sequence
  Description of Artificial Sequence: Synthetic oligonucleotide
acggaaacccauuacauuu

SEQ ID NO: 738749 - RNA, 19 nt, Artificial Sequence
  Description of Artificial Sequence: Synthetic oligonucleotide
uaucguugagaaguucugg

SEQ ID NO: 738750 - RNA, 19 nt, Artificial Sequence
  Description of Artificial Sequence: Synthetic oligonucleotide
acauuggauaacccgagga

SEQ ID NO: 738751 - RNA, 19 nt, Artificial Sequence
  Description of Artificial Sequence: Synthetic oligonucleotide
uaauucagaugguauguaa

SEQ ID NO: 738752 - RNA, 19 nt, Artificial Sequence
  Description of Artificial Sequence: Synthetic oligonucleotide
aucacaaguaaguacuaau

SEQ ID NO: 738753 - RNA, 19 nt, Artificial Sequence
  Description of Artificial Sequence: Synthetic oligonucleotide
aaggugaacugaucacaag

SEQ ID NO: 738754 - RNA, 19 nt, Artificial Sequence
  Description of Artificial Sequence: Synthetic oligonucleotide
uuuuacaucuuugaugauu

SEQ ID NO: 738755 - RNA, 19 nt, Artificial Sequence
  Description of Artificial Sequence: Synthetic oligonucleotide
uuuaucugaucaucaucug

SEQ ID NO: 738756 - RNA, 19 nt, Artificial Sequence
  Description of Artificial Sequence: Synthetic oligonucleotide
uacguuccaucuagcaggg

SEQ ID NO: 738757 - RNA, 19 nt, Artificial Sequence
  Description of Artificial Sequence: Synthetic oligonucleotide
uuugcaacaccacucgauu

SEQ ID NO: 738758 - RNA, 19 nt, Artificial Sequence
  Description of Artificial Sequence: Synthetic oligonucleotide
gagacggaaacccauuaca

SEQ ID NO: 738759 - RNA, 19 nt, Artificial Sequence
  Description of Artificial Sequence: Synthetic oligonucleotide
agcuaaucuaucacagagc

SEQ ID NO: 738760 - RNA, 19 nt, Artificial Sequence
  Description of Artificial Sequence: Synthetic oligonucleotide
ucauuuguuaugagccaca

SEQ ID NO: 738761 - RNA, 19 nt, Artificial Sequence
  Description of Artificial Sequence: Synthetic oligonucleotide
uuauuaaacuugauacauu

SEQ ID NO: 738762 - RNA, 19 nt, Artificial Sequence
  Description of Artificial Sequence: Synthetic oligonucleotide
uuagcuaaucuaucacaga

SEQ ID NO: 738763 - RNA, 19 nt, Artificial Sequence
  Description of Artificial Sequence: Synthetic oligonucleotide
cuuuagcuaaucuaucaca

SEQ ID NO: 738764 - RNA, 19 nt, Artificial Sequence
  Description of Artificial Sequence: Synthetic oligonucleotide
uuaugagccacagaucuuc

SEQ ID NO: 738765 - RNA, 19 nt, Artificial Sequence
  Description of Artificial Sequence: Synthetic oligonucleotide
acggaacagagucgguucc

SEQ ID NO: 738766 - RNA, 19 nt, Artificial Sequence
  Description of Artificial Sequence: Synthetic oligonucleotide
acuacauaagaaaucugug

SEQ ID NO: 738767 - RNA, 19 nt, Artificial Sequence
  Description of Artificial Sequence: Synthetic oligonucleotide
ugugauauuccaaguucuc

SEQ ID NO: 738768 - RNA, 19 nt, Artificial Sequence
  Description of Artificial Sequence: Synthetic oligonucleotide
agguuuucaauaggugggc

SEQ ID NO: 738769 - RNA, 19 nt, Artificial Sequence
  Description of Artificial Sequence: Synthetic oligonucleotide
gcuaaucuaucacagagca

SEQ ID NO: 738770 - RNA, 19 nt, Artificial Sequence
  Description of Artificial Sequence: Synthetic oligonucleotide
augaucaaucaacucaaaa

SEQ ID NO: 738771 - RNA, 19 nt, Artificial Sequence
  Description of Artificial Sequence: Synthetic oligonucleotide
ggugucuuaucucugaauc

SEQ ID NO: 738772 - RNA, 19 nt, Artificial Sequence
  Description of Artificial Sequence: Synthetic oligonucleotide
agaaacgcugcuucuagaa

SEQ ID NO: 738773 - RNA, 19 nt, Artificial Sequence
  Description of Artificial Sequence: Synthetic oligonucleotide
auccccuaucuauaagcac

SEQ ID NO: 738774 - RNA, 19 nt, Artificial Sequence
  Description of Artificial Sequence: Synthetic oligonucleotide
aaguacuaauggaggcugc

SEQ ID NO: 738775 - RNA, 19 nt, Artificial Sequence
  Description of Artificial Sequence: Synthetic oligonucleotide
uuuauccgcagcucaaaau

SEQ ID NO: 738776 - RNA, 19 nt, Artificial Sequence
  Description of Artificial Sequence: Synthetic oligonucleotide
uucauuuguuaugagccac

SEQ ID NO: 738777 - RNA, 19 nt, Artificial Sequence
  Description of Artificial Sequence: Synthetic oligonucleotide
caaccucaauguuaguggc

SEQ ID NO: 738778 - RNA, 19 nt, Artificial Sequence
  Description of Artificial Sequence: Synthetic oligonucleotide
ucgguuccaaccucaaugu

SEQ ID NO: 738779 - RNA, 19 nt, Artificial Sequence
  Description of Artificial Sequence: Synthetic oligonucleotide
aucuaguuagcuugacucu

SEQ ID NO: 738780 - RNA, 19 nt, Artificial Sequence
  Description of Artificial Sequence: Synthetic oligonucleotide
cuaucacagagcaaaguga

SEQ ID NO: 738781 - RNA, 19 nt, Artificial Sequence
  Description of Artificial Sequence: Synthetic oligonucleotide
uuguacguuccaucuagca

SEQ ID NO: 738782 - RNA, 19 nt, Artificial Sequence
  Description of Artificial Sequence: Synthetic oligonucleotide
ugcauuauauagucauuau

SEQ ID NO: 738783 - RNA, 19 nt, Artificial Sequence
  Description of Artificial Sequence: Synthetic oligonucleotide
auaagcacucaugacuaag

SEQ ID NO: 738784 - RNA, 19 nt, Artificial Sequence
  Description of Artificial Sequence: Synthetic oligonucleotide
aauggguggcacuccucag

SEQ ID NO: 738785 - RNA, 19 nt, Artificial Sequence
  Description of Artificial Sequence: Synthetic oligonucleotide
aacgcugcuucuagaauag

SEQ ID NO: 738786 - RNA, 19 nt, Artificial Sequence
  Description of Artificial Sequence: Synthetic oligonucleotide
acuaauggaggcugcacau

SEQ ID NO: 738787 - RNA, 19 nt, Artificial Sequence
  Description of Artificial Sequence: Synthetic oligonucleotide
aucuccacgaagucaccuc

SEQ ID NO: 738788 - RNA, 19 nt, Artificial Sequence
  Description of Artificial Sequence: Synthetic oligonucleotide
gaaucaaggcuagaggaga

SEQ ID NO: 738789 - RNA, 19 nt, Artificial Sequence
  Description of Artificial Sequence: Synthetic oligonucleotide
gaaggcggaggauaaguuc

SEQ ID NO: 738790 - RNA, 19 nt, Artificial Sequence
  Description of Artificial Sequence: Synthetic oligonucleotide
auagugaguuucuggcuug

SEQ ID NO: 738791 - RNA, 19 nt, Artificial Sequence
  Description of Artificial Sequence: Synthetic oligonucleotide
uaacucgagagccgccuag

SEQ ID NO: 738792 - RNA, 19 nt, Artificial Sequence
  Description of Artificial Sequence: Synthetic oligonucleotide
cuugacucugacuauucca

SEQ ID NO: 738793 - RNA, 19 nt, Artificial Sequence
  Description of Artificial Sequence: Synthetic oligonucleotide
aguucugcggacucuucug

SEQ ID NO: 738794 - RNA, 19 nt, Artificial Sequence
  Description of Artificial Sequence: Synthetic oligonucleotide
acauagacugacaauuuga

SEQ ID NO: 738795 - RNA, 19 nt, Artificial Sequence
  Description of Artificial Sequence: Synthetic oligonucleotide
agcacucaugacuaagggu

SEQ ID NO: 738796 - RNA, 19 nt, Artificial Sequence
  Description of Artificial Sequence: Synthetic oligonucleotide
gcuuguacguuccaucuag

SEQ ID NO: 738797 - RNA, 19 nt, Artificial Sequence
  Description of Artificial Sequence: Synthetic oligonucleotide
aagggugucuuccuuccau

SEQ ID NO: 738798 - RNA, 19 nt, Artificial Sequence
  Description of Artificial Sequence: Synthetic oligonucleotide
agagccgccuaggagacgg

SEQ ID NO: 738799 - RNA, 19 nt, Artificial Sequence
  Description of Artificial Sequence: Synthetic oligonucleotide
gugauauuccaaguucucc

SEQ ID NO: 738800 - RNA, 19 nt, Artificial Sequence
  Description of Artificial Sequence: Synthetic oligonucleotide
aaaggugaacugaucacaa

SEQ ID NO: 738801 - RNA, 19 nt, Artificial Sequence
  Description of Artificial Sequence: Synthetic oligonucleotide
augacuaaggguagcaaca

SEQ ID NO: 738802 - RNA, 19 nt, Artificial Sequence
  Description of Artificial Sequence: Synthetic oligonucleotide
uuggugucgauagugaguu

SEQ ID NO: 738803 - RNA, 19 nt, Artificial Sequence
  Description of Artificial Sequence: Synthetic oligonucleotide
acaggagauuuguuggugu

SEQ ID NO: 738804 - RNA, 19 nt, Artificial Sequence
  Description of Artificial Sequence: Synthetic oligonucleotide
acgaagucaccuccagggg

SEQ ID NO: 738805 - RNA, 19 nt, Artificial Sequence
  Description of Artificial Sequence: Synthetic oligonucleotide
uaacccgaggaauuccugu

SEQ ID NO: 738806 - RNA, 19 nt, Artificial Sequence
  Description of Artificial Sequence: Synthetic oligonucleotide
agcacaaucaaaagcucug

SEQ ID NO: 738807 - RNA, 19 nt, Artificial Sequence
  Description of Artificial Sequence: Synthetic oligonucleotide
ugucuuaucucugaaucuu

SEQ ID NO: 738808 - RNA, 19 nt, Artificial Sequence
  Description of Artificial Sequence: Synthetic oligonucleotide
agaaacaacugcauuuccu

SEQ ID NO: 738809 - RNA, 19 nt, Artificial Sequence
  Description of Artificial Sequence: Synthetic oligonucleotide
gacggaacagagucgguuc

SEQ ID NO: 738810 - RNA, 19 nt, Artificial Sequence
  Description of Artificial Sequence: Synthetic oligonucleotide
ugaauucgguaucguugag

SEQ ID NO: 738811 - RNA, 19 nt, Artificial Sequence
  Description of Artificial Sequence: Synthetic oligonucleotide
uuguuaugagccacagauc

SEQ ID NO: 738812 - RNA, 19 nt, Artificial Sequence
  Description of Artificial Sequence: Synthetic oligonucleotide
cuugcuauauccccuaucu

SEQ ID NO: 738813 - RNA, 19 nt, Artificial Sequence
  Description of Artificial Sequence: Synthetic oligonucleotide
gcuagaggagacuacagca

SEQ ID NO: 738814 - RNA, 19 nt, Artificial Sequence
  Description of Artificial Sequence: Synthetic oligonucleotide
auuggauaacccgaggaau

SEQ ID NO: 738815 - RNA, 19 nt, Artificial Sequence
  Description of Artificial Sequence: Synthetic oligonucleotide
uacaucgagaucccugcau

SEQ ID NO: 738816 - RNA, 19 nt, Artificial Sequence
  Description of Artificial Sequence: Synthetic oligonucleotide
aacucgagagccgccuagg

SEQ ID NO: 738817 - RNA, 19 nt, Artificial Sequence
  Description of Artificial Sequence: Synthetic oligonucleotide
acucaugacuaaggguagc

SEQ ID NO: 738818 - RNA, 19 nt, Artificial Sequence
  Description of Artificial Sequence: Synthetic oligonucleotide
ucuucgacaggcagguuuu

SEQ ID NO: 738819 - RNA, 19 nt, Artificial Sequence
  Description of Artificial Sequence: Synthetic oligonucleotide
aucuuguuagaagccggcg

SEQ ID NO: 738820 - RNA, 19 nt, Artificial Sequence
  Description of Artificial Sequence: Synthetic oligonucleotide
uaugaacacugcaggugac

SEQ ID NO: 738821 - RNA, 19 nt, Artificial Sequence
  Description of Artificial Sequence: Synthetic oligonucleotide
acuaaggguagcaacaguu

SEQ ID NO: 738822 - RNA, 19 nt, Artificial Sequence
  Description of Artificial Sequence: Synthetic oligonucleotide
agcaaauggguggcacucc

SEQ ID NO: 738823 - RNA, 19 nt, Artificial Sequence
  Description of Artificial Sequence: Synthetic oligonucleotide
gaacugaucacaaguaagu

SEQ ID NO: 738824 - RNA, 19 nt, Artificial Sequence
  Description of Artificial Sequence: Synthetic oligonucleotide
aagggucugucccaagaua

SEQ ID NO: 738825 - RNA, 19 nt, Artificial Sequence
  Description of Artificial Sequence: Synthetic oligonucleotide
cuuguacguuccaucuagc

SEQ ID NO: 738826 - RNA, 19 nt, Artificial Sequence
  Description of Artificial Sequence: Synthetic oligonucleotide
cacucaugacuaaggguag

SEQ ID NO: 738827 - RNA, 19 nt, Artificial Sequence
  Description of Artificial Sequence: Synthetic oligonucleotide
gagacgcccaccuuuagcu

SEQ ID NO: 738828 - RNA, 19 nt, Artificial Sequence
  Description of Artificial Sequence: Synthetic oligonucleotide
auggcccgaaauugcacag

SEQ ID NO: 738829 - RNA, 19 nt, Artificial Sequence
  Description of Artificial Sequence: Synthetic oligonucleotide
cuagaauagcagucugguc

SEQ ID NO: 738830 - RNA, 19 nt, Artificial Sequence
  Description of Artificial Sequence: Synthetic oligonucleotide
guaggcaaauuaguuucag

SEQ ID NO: 738831 - RNA, 19 nt, Artificial Sequence
  Description of Artificial Sequence: Synthetic oligonucleotide
uuacaucgagaucccugca

SEQ ID NO: 738832 - RNA, 19 nt, Artificial Sequence
  Description of Artificial Sequence: Synthetic oligonucleotide
aguuagcuugacucugacu

SEQ ID NO: 738833 - RNA, 19 nt, Artificial Sequence
  Description of Artificial Sequence: Synthetic oligonucleotide
uaguuagcuugacucugac

SEQ ID NO: 738834 - RNA, 19 nt, Artificial Sequence
  Description of Artificial Sequence: Synthetic oligonucleotide
ucaaggcuagaggagacua

SEQ ID NO: 738835 - RNA, 19 nt, Artificial Sequence
  Description of Artificial Sequence: Synthetic oligonucleotide
guuuucaauaggugggcaa

SEQ ID NO: 738836 - RNA, 19 nt, Artificial Sequence
  Description of Artificial Sequence: Synthetic oligonucleotide
cagcaaagacuuucaaguc

SEQ ID NO: 738837 - RNA, 19 nt, Artificial Sequence
  Description of Artificial Sequence: Synthetic oligonucleotide
caggcagguuuucaauagg

SEQ ID NO: 738838 - RNA, 19 nt, Artificial Sequence
  Description of Artificial Sequence: Synthetic oligonucleotide
uauaagcacucaugacuaa

SEQ ID NO: 738839 - RNA, 19 nt, Artificial Sequence
  Description of Artificial Sequence: Synthetic oligonucleotide
guaucguugagaaguucug

SEQ ID NO: 738840 - RNA, 19 nt, Artificial Sequence
  Description of Artificial Sequence: Synthetic oligonucleotide
gaauucgguaucguugaga

SEQ ID NO: 738841 - RNA, 19 nt, Artificial Sequence
  Description of Artificial Sequence: Synthetic oligonucleotide
gugaacugaucacaaguaa

SEQ ID NO: 738842 - RNA, 19 nt, Artificial Sequence
  Description of Artificial Sequence: Synthetic oligonucleotide
acaucgagaucccugcauu

SEQ ID NO: 738843 - RNA, 19 nt, Artificial Sequence
  Description of Artificial Sequence: Synthetic oligonucleotide
uggaagcaagaagaguaac

SEQ ID NO: 738844 - RNA, 19 nt, Artificial Sequence
  Description of Artificial Sequence: Synthetic oligonucleotide
cuuuggguauggucaguug

SEQ ID NO: 738845 - RNA, 19 nt, Artificial Sequence
  Description of Artificial Sequence: Synthetic oligonucleotide
agaggagacuacagcaaag

SEQ ID NO: 738846 - RNA, 19 nt, Artificial Sequence
  Description of Artificial Sequence: Synthetic oligonucleotide
gagcaaagugaugugcuuc

SEQ ID NO: 738847 - RNA, 19 nt, Artificial Sequence
  Description of Artificial Sequence: Synthetic oligonucleotide
aguacuaauggaggcugca

SEQ ID NO: 738848 - RNA, 19 nt, Artificial Sequence
  Description of Artificial Sequence: Synthetic oligonucleotide
gugucugacucugggauug

SEQ ID NO: 738849 - RNA, 19 nt, Artificial Sequence
  Description of Artificial Sequence: Synthetic oligonucleotide
auucgguaucguugagaag

SEQ ID NO: 738850 - RNA, 19 nt, Artificial Sequence
  Description of Artificial Sequence: Synthetic oligonucleotide
cuagaggagacuacagcaa

SEQ ID NO: 738851 - RNA, 19 nt, Artificial Sequence
  Description of Artificial Sequence: Synthetic oligonucleotide
ggcuagaggagacuacagc

SEQ ID NO: 738852 - RNA, 19 nt, Artificial Sequence
  Description of Artificial Sequence: Synthetic oligonucleotide
gcagaaacgcugcuucuag

SEQ ID NO: 738853 - RNA, 19 nt, Artificial Sequence
  Description of Artificial Sequence: Synthetic oligonucleotide
caaggcuagaggagacuac

SEQ ID NO: 738854 - RNA, 19 nt, Artificial Sequence
  Description of Artificial Sequence: Synthetic oligonucleotide
ucgagaucccugcauuaua

SEQ ID NO: 738855 - RNA, 19 nt, Artificial Sequence
  Description of Artificial Sequence: Synthetic oligonucleotide
gaacagagucgguuccaac

SEQ ID NO: 738856 - RNA, 19 nt, Artificial Sequence
  Description of Artificial Sequence: Synthetic oligonucleotide
cuauauccccuaucuauaa

SEQ ID NO: 738857 - RNA, 19 nt, Artificial Sequence
  Description of Artificial Sequence: Synthetic oligonucleotide
ugacucugacuauuccaaa

SEQ ID NO: 738858 - RNA, 19 nt, Artificial Sequence
  Description of Artificial Sequence: Synthetic oligonucleotide
cuaguuagcuugacucuga

SEQ ID NO: 738859 - RNA, 19 nt, Artificial Sequence
  Description of Artificial Sequence: Synthetic oligonucleotide
ugcaucugcuagagcaauc

SEQ ID NO: 738860 - RNA, 19 nt, Artificial Sequence
  Description of Artificial Sequence: Synthetic oligonucleotide
uugauacauuuacuacaua

SEQ ID NO: 738861 - RNA, 19 nt, Artificial Sequence
  Description of Artificial Sequence: Synthetic oligonucleotide
gacucugggauuggaguac

SEQ ID NO: 738862 - RNA, 19 nt, Artificial Sequence
  Description of Artificial Sequence: Synthetic oligonucleotide
ccuuuagcuaaucuaucac

SEQ ID NO: 738863 - RNA, 19 nt, Artificial Sequence
  Description of Artificial Sequence: Synthetic oligonucleotide
ucaugacuaaggguagcaa

SEQ ID NO: 738864 - RNA, 19 nt, Artificial Sequence
  Description of Artificial Sequence: Synthetic oligonucleotide
caaagcuugcuccuuggaa

SEQ ID NO: 738865 - RNA, 19 nt, Artificial Sequence
  Description of Artificial Sequence: Synthetic oligonucleotide
caggcugacaggagauuug

SEQ ID NO: 738866 - RNA, 19 nt, Artificial Sequence
  Description of Artificial Sequence: Synthetic oligonucleotide
cuuguuagaagccggcgcu

SEQ ID NO: 738867 - RNA, 19 nt, Artificial Sequence
  Description of Artificial Sequence: Synthetic oligonucleotide
ugcuugugguugguaaaca

SEQ ID NO: 738868 - RNA, 19 nt, Artificial Sequence
  Description of Artificial Sequence: Synthetic oligonucleotide
ggcuaucaaauuauuuuac

SEQ ID NO: 738869 - RNA, 19 nt, Artificial Sequence
  Description of Artificial Sequence: Synthetic oligonucleotide
agacggaaacccauuacau

SEQ ID NO: 738870 - RNA, 19 nt, Artificial Sequence
  Description of Artificial Sequence: Synthetic oligonucleotide
uucgacaggcagguuuuca

SEQ ID NO: 738871 - RNA, 19 nt, Artificial Sequence
  Description of Artificial Sequence: Synthetic oligonucleotide
uaggagacggaaacccauu

SEQ ID NO: 738872 - RNA, 19 nt, Artificial Sequence
  Description of Artificial Sequence: Synthetic oligonucleotide
ggugucgauagugaguuuc

SEQ ID NO: 738873 - RNA, 19 nt, Artificial Sequence
  Description of Artificial Sequence: Synthetic oligonucleotide
agggucugucccaagauau

SEQ ID NO: 738874 - RNA, 19 nt, Artificial Sequence
  Description of Artificial Sequence: Synthetic oligonucleotide
cugcauuauauagucauua

SEQ ID NO: 738875 - RNA, 19 nt, Artificial Sequence
  Description of Artificial Sequence: Synthetic oligonucleotide
guaaguacuaauggaggcu

SEQ ID NO: 738876 - RNA, 19 nt, Artificial Sequence
  Description of Artificial Sequence: Synthetic oligonucleotide
accucaauguuaguggcuu

SEQ ID NO: 738877 - RNA, 19 nt, Artificial Sequence
  Description of Artificial Sequence: Synthetic oligonucleotide
ugcuuguacguuccaucua

SEQ ID NO: 738878 - RNA, 19 nt, Artificial Sequence
  Description of Artificial Sequence: Synthetic oligonucleotide
gcacucaugacuaagggua

SEQ ID NO: 738879 - RNA, 19 nt, Artificial Sequence
  Description of Artificial Sequence: Synthetic oligonucleotide
aggguuggccucagaaagg

SEQ ID NO: 738880 - RNA, 19 nt, Artificial Sequence
  Description of Artificial Sequence: Synthetic oligonucleotide
aggcagguuuucaauaggu

SEQ ID NO: 738881 - RNA, 19 nt, Artificial Sequence
  Description of Artificial Sequence: Synthetic oligonucleotide
uggguauggucaguuggcu

SEQ ID NO: 738882 - RNA, 19 nt, Artificial Sequence
  Description of Artificial Sequence: Synthetic oligonucleotide
gggcuaucaaauuauuuua

SEQ ID NO: 738883 - RNA, 19 nt, Artificial Sequence
  Description of Artificial Sequence: Synthetic oligonucleotide
uggucauaucugguacugc

SEQ ID NO: 738884 - RNA, 19 nt, Artificial Sequence
  Description of Artificial Sequence: Synthetic oligonucleotide
gauuggaguacagccaccu

SEQ ID NO: 738885 - RNA, 19 nt, Artificial Sequence
  Description of Artificial Sequence: Synthetic oligonucleotide
gaaacccauuacauuuauc

SEQ ID NO: 738886 - RNA, 19 nt, Artificial Sequence
  Description of Artificial Sequence: Synthetic oligonucleotide
aggagacggaaacccauua

SEQ ID NO: 738887 - RNA, 19 nt, Artificial Sequence
  Description of Artificial Sequence: Synthetic oligonucleotide
guacuaauggaggcugcac

SEQ ID NO: 738888 - RNA, 19 nt, Artificial Sequence
  Description of Artificial Sequence: Synthetic oligonucleotide
ucgguaucguugagaaguu

SEQ ID NO: 738889 - RNA, 19 nt, Artificial Sequence
  Description of Artificial Sequence: Synthetic oligonucleotide
ggggcuaucaaauuauuuu

SEQ ID NO: 738890 - RNA, 19 nt, Artificial Sequence
  Description of Artificial Sequence: Synthetic oligonucleotide
gcaagaagaguaacucgag

SEQ ID NO: 738891 - RNA, 19 nt, Artificial Sequence
  Description of Artificial Sequence: Synthetic oligonucleotide
ggagacggaaacccauuac

SEQ ID NO: 738892 - RNA, 19 nt, Artificial Sequence
  Description of Artificial Sequence: Synthetic oligonucleotide
auuuuacaucgagaucccu

SEQ ID NO: 738893 - RNA, 19 nt, Artificial Sequence
  Description of Artificial Sequence: Synthetic oligonucleotide
cucaugacuaaggguagca

SEQ ID NO: 738894 - RNA, 19 nt, Artificial Sequence
  Description of Artificial Sequence: Synthetic oligonucleotide
cacugugauggacggaaca

SEQ ID NO: 738895 - RNA, 19 nt, Artificial Sequence
  Description of Artificial Sequence: Synthetic oligonucleotide
agagucgguuccaaccuca

SEQ ID NO: 738896 - RNA, 19 nt, Artificial Sequence
  Description of Artificial Sequence: Synthetic oligonucleotide
guuucagaggaagucuaaa

SEQ ID NO: 738897 - RNA, 19 nt, Artificial Sequence
  Description of Artificial Sequence: Synthetic oligonucleotide
auaacccgaggaauuccug

SEQ ID NO: 738898 - RNA, 19 nt, Artificial Sequence
  Description of Artificial Sequence: Synthetic oligonucleotide
caaauggguggcacuccuc

SEQ ID NO: 738899 - RNA, 19 nt, Artificial Sequence
  Description of Artificial Sequence: Synthetic oligonucleotide
gagcucucuugauucaacu

SEQ ID NO: 738900 - RNA, 19 nt, Artificial Sequence
  Description of Artificial Sequence: Synthetic oligonucleotide
auuugucaucuugcuauau

SEQ ID NO: 738901 - RNA, 19 nt, Artificial Sequence
  Description of Artificial Sequence: Synthetic oligonucleotide
aucgagaucccugcauuau

SEQ ID NO: 738902 - RNA, 19 nt, Artificial Sequence
  Description of Artificial Sequence: Synthetic oligonucleotide
gguaaacaguucugcggac

SEQ ID NO: 738903 - RNA, 19 nt, Artificial Sequence
  Description of Artificial Sequence: Synthetic oligonucleotide
uccaucuaguuagcuugac

SEQ ID NO: 738904 - RNA, 19 nt, Artificial Sequence
  Description of Artificial Sequence: Synthetic oligonucleotide
ggagauuuguuggugucga

SEQ ID NO: 738905 - RNA, 19 nt, Artificial Sequence
  Description of Artificial Sequence: Synthetic oligonucleotide
ggguauggucaguuggcug

SEQ ID NO: 738906 - RNA, 19 nt, Artificial Sequence
  Description of Artificial Sequence: Synthetic oligonucleotide
gacggaaacccauuacauu

SEQ ID NO: 738907 - RNA, 19 nt, Artificial Sequence
  Description of Artificial Sequence: Synthetic oligonucleotide
cucugacuauuccaaaacu

SEQ ID NO: 738908 - RNA, 19 nt, Artificial Sequence
  Description of Artificial Sequence: Synthetic oligonucleotide
acgcuggucauaucuggua

SEQ ID NO: 738909 - RNA, 19 nt, Artificial Sequence
  Description of Artificial Sequence: Synthetic oligonucleotide
aaucaccugcuuguacguu

SEQ ID NO: 738910 - RNA, 19 nt, Artificial Sequence
  Description of Artificial Sequence: Synthetic oligonucleotide
gaugaucaaucaacucaaa

SEQ ID NO: 738911 - RNA, 19 nt, Artificial Sequence
  Description of Artificial Sequence: Synthetic oligonucleotide
aggcuagaggagacuacag

SEQ ID NO: 738912 - RNA, 19 nt, Artificial Sequence
  Description of Artificial Sequence: Synthetic oligonucleotide
gcagcucaaaaugaugauc

SEQ ID NO: 738913 - RNA, 19 nt, Artificial Sequence
  Description of Artificial Sequence: Synthetic oligonucleotide
ggucugucccaagauauga

SEQ ID NO: 738914 - RNA, 19 nt, Artificial Sequence
  Description of Artificial Sequence: Synthetic oligonucleotide
aguuucagaggaagucuaa

SEQ ID NO: 738915 - RNA, 19 nt, Artificial Sequence
  Description of Artificial Sequence: Synthetic oligonucleotide
uuucggucaugggccaaac

SEQ ID NO: 738916 - RNA, 19 nt, Artificial Sequence
  Description of Artificial Sequence: Synthetic oligonucleotide
uggcccgaaauugcacagc

SEQ ID NO: 738917 - RNA, 19 nt, Artificial Sequence
  Description of Artificial Sequence: Synthetic oligonucleotide
acgcugcuucuagaauagc

SEQ ID NO: 738918 - RNA, 19 nt, Artificial Sequence
  Description of Artificial Sequence: Synthetic oligonucleotide
cugguaggcaaauuaguuu

SEQ ID NO: 738919 - RNA, 19 nt, Artificial Sequence
  Description of Artificial Sequence: Synthetic oligonucleotide
gacuaaggguagcaacagu

SEQ ID NO: 738920 - RNA, 19 nt, Artificial Sequence
  Description of Artificial Sequence: Synthetic oligonucleotide
guuagaagccggcgcugga

SEQ ID NO: 738921 - RNA, 19 nt, Artificial Sequence
  Description of Artificial Sequence: Synthetic oligonucleotide
cagccaccuggcaugacca

SEQ ID NO: 738922 - RNA, 19 nt, Artificial Sequence
  Description of Artificial Sequence: Synthetic oligonucleotide
cuaauucagaugguaugua

SEQ ID NO: 738923 - RNA, 19 nt, Artificial Sequence
  Description of Artificial Sequence: Synthetic oligonucleotide
guaaacaguucugcggacu

SEQ ID NO: 738924 - RNA, 19 nt, Artificial Sequence
  Description of Artificial Sequence: Synthetic oligonucleotide
uggacggaacagagucggu

SEQ ID NO: 738925 - RNA, 19 nt, Artificial Sequence
  Description of Artificial Sequence: Synthetic oligonucleotide
cagaaacgcugcuucuaga

SEQ ID NO: 738926 - RNA, 19 nt, Artificial Sequence
  Description of Artificial Sequence: Synthetic oligonucleotide
cuaggagacggaaacccau

SEQ ID NO: 738927 - RNA, 19 nt, Artificial Sequence
  Description of Artificial Sequence: Synthetic oligonucleotide
cagagucgguuccaaccuc

SEQ ID NO: 738928 - RNA, 19 nt, Artificial Sequence
  Description of Artificial Sequence: Synthetic oligonucleotide
agaaggcggaggauaaguu

SEQ ID NO: 738929 - RNA, 19 nt, Artificial Sequence
  Description of Artificial Sequence: Synthetic oligonucleotide
gacuauuccaaaacuccuu

SEQ ID NO: 738930 - RNA, 19 nt, Artificial Sequence
  Description of Artificial Sequence: Synthetic oligonucleotide
cuaaggguagcaacaguuu

SEQ ID NO: 738931 - RNA, 19 nt, Artificial Sequence
  Description of Artificial Sequence: Synthetic oligonucleotide
caucugugauauuccaagu

SEQ ID NO: 738932 - RNA, 19 nt, Artificial Sequence
  Description of Artificial Sequence: Synthetic oligonucleotide
cauuuauccgcagcucaaa

SEQ ID NO: 738933 - RNA, 19 nt, Artificial Sequence
  Description of Artificial Sequence: Synthetic oligonucleotide
caucgagaucccugcauua

SEQ ID NO: 738934 - RNA, 19 nt, Artificial Sequence
  Description of Artificial Sequence: Synthetic oligonucleotide
cccgaaauugcacagcucu

SEQ ID NO: 738935 - RNA, 19 nt, Artificial Sequence
  Description of Artificial Sequence: Synthetic oligonucleotide
cucuucgacaggcagguuu

SEQ ID NO: 738936 - RNA, 19 nt, Artificial Sequence
  Description of Artificial Sequence: Synthetic oligonucleotide
guccccaucuccacgaagu

SEQ ID NO: 738937 - RNA, 19 nt, Artificial Sequence
  Description of Artificial Sequence: Synthetic oligonucleotide
gcuauauccccuaucuaua

SEQ ID NO: 738938 - RNA, 19 nt, Artificial Sequence
  Description of Artificial Sequence: Synthetic oligonucleotide
ccacgaagucaccuccagg

SEQ ID NO: 738939 - RNA, 19 nt, Artificial Sequence
  Description of Artificial Sequence: Synthetic oligonucleotide
gguuuucaauaggugggca

SEQ ID NO: 738940 - RNA, 19 nt, Artificial Sequence
  Description of Artificial Sequence: Synthetic oligonucleotide
cuguagaggcagaaacgcu

SEQ ID NO: 738941 - RNA, 19 nt, Artificial Sequence
  Description of Artificial Sequence: Synthetic oligonucleotide
ccccuaucuauaagcacuc

SEQ ID NO: 738942 - RNA, 19 nt, Artificial Sequence
  Description of Artificial Sequence: Synthetic oligonucleotide
cccaccuuuagcuaaucua

SEQ ID NO: 738943 - RNA, 19 nt, Artificial Sequence
  Description of Artificial Sequence: Synthetic oligonucleotide
guggcacuccucaggccag

SEQ ID NO: 738944 - RNA, 19 nt, Artificial Sequence
  Description of Artificial Sequence: Synthetic oligonucleotide
ccaccuuuagcuaaucuau

SEQ ID NO: 738945 - RNA, 19 nt, Artificial Sequence
  Description of Artificial Sequence: Synthetic oligonucleotide
guaacucgagagccgccua

SEQ ID NO: 738946 - RNA, 19 nt, Artificial Sequence
  Description of Artificial Sequence: Synthetic oligonucleotide
gcaacaccacucgauucug

SEQ ID NO: 738947 - RNA, 19 nt, Artificial Sequence
  Description of Artificial Sequence: Synthetic oligonucleotide
ggauuggaguacagccacc

SEQ ID NO: 738948 - RNA, 19 nt, Artificial Sequence
  Description of Artificial Sequence: Synthetic oligonucleotide
cuaauggaggcugcacaua

SEQ ID NO: 738949 - RNA, 19 nt, Artificial Sequence
  Description of Artificial Sequence: Synthetic oligonucleotide
cgcuggucauaucugguac

SEQ ID NO: 738950 - RNA, 19 nt, Artificial Sequence
  Description of Artificial Sequence: Synthetic oligonucleotide
ccucaauguuaguggcuug

SEQ ID NO: 738951 - RNA, 19 nt, Artificial Sequence
  Description of Artificial Sequence: Synthetic oligonucleotide
ccaaaacuccuuggagggc

SEQ ID NO: 738952 - RNA, 19 nt, Artificial Sequence
  Description of Artificial Sequence: Synthetic oligonucleotide
gggucugucccaagauaug

SEQ ID NO: 738953 - RNA, 19 nt, Artificial Sequence
  Description of Artificial Sequence: Synthetic oligonucleotide
ggcccgaaauugcacagcu

SEQ ID NO: 738954 - RNA, 19 nt, Artificial Sequence
  Description of Artificial Sequence: Synthetic oligonucleotide
gugucgauagugaguuucu

SEQ ID NO: 738955 - RNA, 19 nt, Artificial Sequence
  Description of Artificial Sequence: Synthetic oligonucleotide
gagauuuguuggugucgau

SEQ ID NO: 738956 - RNA, 19 nt, Artificial Sequence
  Description of Artificial Sequence: Synthetic oligonucleotide
cuucgacaggcagguuuuc

SEQ ID NO: 738957 - RNA, 19 nt, Artificial Sequence
  Description of Artificial Sequence: Synthetic oligonucleotide
uggugucgauagugaguuu

SEQ ID NO: 738958 - RNA, 19 nt, Artificial Sequence
  Description of Artificial Sequence: Synthetic oligonucleotide
gagucgguuccaaccucaa

SEQ ID NO: 738959 - RNA, 19 nt, Artificial Sequence
  Description of Artificial Sequence: Synthetic oligonucleotide
ggaacagagucgguuccaa

SEQ ID NO: 738960 - RNA, 19 nt, Artificial Sequence
  Description of Artificial Sequence: Synthetic oligonucleotide
gcaaaaucuuugauucccu

SEQ ID NO: 738961 - RNA, 19 nt, Artificial Sequence
  Description of Artificial Sequence: Synthetic oligonucleotide
ccuaucuauaagcacucau

SEQ ID NO: 738962 - RNA, 19 nt, Artificial Sequence
  Description of Artificial Sequence: Synthetic oligonucleotide
gcugcuacgcuggucauau

SEQ ID NO: 738963 - RNA, 19 nt, Artificial Sequence
  Description of Artificial Sequence: Synthetic oligonucleotide
cugcaacuucaggcacggg

SEQ ID NO: 738964 - RNA, 19 nt, Artificial Sequence
  Description of Artificial Sequence: Synthetic oligonucleotide
gcaacagccugucuugguu

SEQ ID NO: 738965 - RNA, 19 nt, Artificial Sequence
  Description of Artificial Sequence: Synthetic oligonucleotide
guuaugagccacagaucuu

SEQ ID NO: 738966 - RNA, 19 nt, Artificial Sequence
  Description of Artificial Sequence: Synthetic oligonucleotide
cccaucugugauauuccaa

SEQ ID NO: 738967 - RNA, 19 nt, Artificial Sequence
  Description of Artificial Sequence: Synthetic oligonucleotide
uacagccaccuggcaugac

SEQ ID NO: 738968 - RNA, 19 nt, Artificial Sequence
  Description of Artificial Sequence: Synthetic oligonucleotide
gcacaaucaaaagcucugu

SEQ ID NO: 738969 - RNA, 19 nt, Artificial Sequence
  Description of Artificial Sequence: Synthetic oligonucleotide
cugcuacgcuggucauauc

SEQ ID NO: 738970 - RNA, 19 nt, Artificial Sequence
  Description of Artificial Sequence: Synthetic oligonucleotide
ccaucuaguuagcuugacu

SEQ ID NO: 738971 - RNA, 19 nt, Artificial Sequence
  Description of Artificial Sequence: Synthetic oligonucleotide
ggacggaacagagucgguu

SEQ ID NO: 738972 - RNA, 19 nt, Artificial Sequence
  Description of Artificial Sequence: Synthetic oligonucleotide
acguuccaucuagcagggu

SEQ ID NO: 738973 - RNA, 19 nt, Artificial Sequence
  Description of Artificial Sequence: Synthetic oligonucleotide
cgagaucccugcauuauau

SEQ ID NO: 738974 - RNA, 19 nt, Artificial Sequence
  Description of Artificial Sequence: Synthetic oligonucleotide
gucuuuggguauggucagu

SEQ ID NO: 738975 - RNA, 19 nt, Artificial Sequence
  Description of Artificial Sequence: Synthetic oligonucleotide
gcaggcugacaggagauuu

SEQ ID NO: 738976 - RNA, 19 nt, Artificial Sequence
  Description of Artificial Sequence: Synthetic oligonucleotide
cgaagucaccuccaggggu

SEQ ID NO: 738977 - RNA, 19 nt, Artificial Sequence
  Description of Artificial Sequence: Synthetic oligonucleotide
ccugcauuauauagucauu

SEQ ID NO: 738978 - RNA, 19 nt, Artificial Sequence
  Description of Artificial Sequence: Synthetic oligonucleotide
caaguucucccagcacaau

SEQ ID NO: 738979 - RNA, 19 nt, Artificial Sequence
  Description of Artificial Sequence: Synthetic oligonucleotide
cccuaucuauaagcacuca

SEQ ID NO: 738980 - RNA, 19 nt, Artificial Sequence
  Description of Artificial Sequence: Synthetic oligonucleotide
cugaccugguaggcaaauu

SEQ ID NO: 738981 - RNA, 19 nt, Artificial Sequence
  Description of Artificial Sequence: Synthetic oligonucleotide
cgguaucguugagaaguuc

SEQ ID NO: 738982 - RNA, 19 nt, Artificial Sequence
  Description of Artificial Sequence: Synthetic oligonucleotide
gucaugggccaaacaccuu

SEQ ID NO: 738983 - RNA, 19 nt, Artificial Sequence
  Description of Artificial Sequence: Synthetic oligonucleotide
ccgaaauugcacagcucuu

SEQ ID NO: 738984 - RNA, 19 nt, Artificial Sequence
  Description of Artificial Sequence: Synthetic oligonucleotide
cgacaggcagguuuucaau

SEQ ID NO: 738985 - RNA, 19 nt, Artificial Sequence
  Description of Artificial Sequence: Synthetic oligonucleotide
cgcagcucaaaaugaugau

SEQ ID NO: 738986 - RNA, 19 nt, Artificial Sequence
  Description of Artificial Sequence: Synthetic oligonucleotide
cggaacagagucgguucca

SEQ ID NO: 738987 - RNA, 19 nt, Artificial Sequence
  Description of Artificial Sequence: Synthetic oligonucleotide
cgguuccaaccucaauguu

SEQ ID NO: 738988 - RNA, 19 nt, Artificial Sequence
  Description of Artificial Sequence: Synthetic oligonucleotide
agaauggucauucugacag

SEQ ID NO: 738989 - RNA, 19 nt, Artificial Sequence
  Description of Artificial Sequence: Synthetic oligonucleotide
aacaacugcugacacaagc

SEQ ID NO: 738990 - RNA, 19 nt, Artificial Sequence
  Description of Artificial Sequence: Synthetic oligonucleotide
agauucuuuauauugcuac

SEQ ID NO: 738991 - RNA, 19 nt, Artificial Sequence
  Description of Artificial Sequence: Synthetic oligonucleotide
uuugguuauagccacagca

SEQ ID NO: 738992 - RNA, 19 nt, Artificial Sequence
  Description of Artificial Sequence: Synthetic oligonucleotide
uaauguagagcauacagca

SEQ ID NO: 738993 - RNA, 19 nt, Artificial Sequence
  Description of Artificial Sequence: Synthetic oligonucleotide
uuuaccaccguauucaaca

SEQ ID NO: 738994 - RNA, 19 nt, Artificial Sequence
  Description of Artificial Sequence: Synthetic oligonucleotide
aacaaauugcuuuuaggug

SEQ ID NO: 738995 - RNA, 19 nt, Artificial Sequence
  Description of Artificial Sequence: Synthetic oligonucleotide
guuauaaacuguuagcgcc

SEQ ID NO: 738996 - RNA, 19 nt, Artificial Sequence
  Description of Artificial Sequence: Synthetic oligonucleotide
aguuacaacaaacacaaga

SEQ ID NO: 738997 - RNA, 19 nt, Artificial Sequence
  Description of Artificial Sequence: Synthetic oligonucleotide
aauauugaggggaaaacag

SEQ ID NO: 738998 - RNA, 19 nt, Artificial Sequence
  Description of Artificial Sequence: Synthetic oligonucleotide
uuuauauugcuaccaaucu

SEQ ID NO: 738999 - RNA, 19 nt, Artificial Sequence
  Description of Artificial Sequence: Synthetic oligonucleotide
acaaauugcuuuuaggugu

SEQ ID NO: 739000 - RNA, 19 nt, Artificial Sequence
  Description of Artificial Sequence: Synthetic oligonucleotide
uguauuugggucuucggag

SEQ ID NO: 739001 - RNA, 19 nt, Artificial Sequence
  Description of Artificial Sequence: Synthetic oligonucleotide
cauaguggcgaauugacag

SEQ ID NO: 739002 - RNA, 19 nt, Artificial Sequence
  Description of Artificial Sequence: Synthetic oligonucleotide
uaaaccauacucacuauac

SEQ ID NO: 739003 - RNA, 19 nt, Artificial Sequence
  Description of Artificial Sequence: Synthetic oligonucleotide
aaccauacucacuauacca

SEQ ID NO: 739004 - RNA, 19 nt, Artificial Sequence
  Description of Artificial Sequence: Synthetic oligonucleotide
uguaaucaccauaaaauuc

SEQ ID NO: 739005 - RNA, 19 nt, Artificial Sequence
  Description of Artificial Sequence: Synthetic oligonucleotide
ucgcucauaauguagagca

SEQ ID NO: 739006 - RNA, 19 nt, Artificial Sequence
  Description of Artificial Sequence: Synthetic oligonucleotide
uguguguaaaccauacuca

SEQ ID NO: 739007 - RNA, 19 nt, Artificial Sequence
  Description of Artificial Sequence: Synthetic oligonucleotide
uucgccggaacucaaagag

SEQ ID NO: 739008 - RNA, 19 nt, Artificial Sequence
  Description of Artificial Sequence: Synthetic oligonucleotide
auaauguagagcauacagc

SEQ ID NO: 739009 - RNA, 19 nt, Artificial Sequence
  Description of Artificial Sequence: Synthetic oligonucleotide
agguuauaaacuguuagcg

SEQ ID NO: 739010 - RNA, 19 nt, Artificial Sequence
  Description of Artificial Sequence: Synthetic oligonucleotide
aaggacuucacaucgcucu

SEQ ID NO: 739011 - RNA, 19 nt, Artificial Sequence
  Description of Artificial Sequence: Synthetic oligonucleotide
uucuuuacuuaucacuugc

SEQ ID NO: 739012 - RNA, 19 nt, Artificial Sequence
  Description of Artificial Sequence: Synthetic oligonucleotide
auguuauuagcauagaauu

SEQ ID NO: 739013 - RNA, 19 nt, Artificial Sequence
  Description of Artificial Sequence: Synthetic oligonucleotide
ucgucauucuucauugccg

SEQ ID NO: 739014 - RNA, 19 nt, Artificial Sequence
  Description of Artificial Sequence: Synthetic oligonucleotide
ucagcuaaggacuucacau

SEQ ID NO: 739015 - RNA, 19 nt, Artificial Sequence
  Description of Artificial Sequence: Synthetic oligonucleotide
uuugauacggucccagaca

SEQ ID NO: 739016 - RNA, 19 nt, Artificial Sequence
  Description of Artificial Sequence: Synthetic oligonucleotide
cuuaucacuugcuuaacac

SEQ ID NO: 739017 - RNA, 19 nt, Artificial Sequence
  Description of Artificial Sequence: Synthetic oligonucleotide
uucgaagagguauacuucc

SEQ ID NO: 739018 - RNA, 19 nt, Artificial Sequence
  Description of Artificial Sequence: Synthetic oligonucleotide
gaucucucgauuuugagaa

SEQ ID NO: 739019 - RNA, 19 nt, Artificial Sequence
  Description of Artificial Sequence: Synthetic oligonucleotide
aauucguucgaagagguau

SEQ ID NO: 739020 - RNA, 19 nt, Artificial Sequence
  Description of Artificial Sequence: Synthetic oligonucleotide
gauucuuuauauugcuacc

SEQ ID NO: 739021 - RNA, 19 nt, Artificial Sequence
  Description of Artificial Sequence: Synthetic oligonucleotide
ggaaagaucaauccgguug

SEQ ID NO: 739022 - RNA, 19 nt, Artificial Sequence
  Description of Artificial Sequence: Synthetic oligonucleotide
uguuauuagcauagaauuc

SEQ ID NO: 739023 - RNA, 19 nt, Artificial Sequence
  Description of Artificial Sequence: Synthetic oligonucleotide
uguugucccucccagaaca

SEQ ID NO: 739024 - RNA, 19 nt, Artificial Sequence
  Description of Artificial Sequence: Synthetic oligonucleotide
uaagauaauccacauucuc

SEQ ID NO: 739025 - RNA, 19 nt, Artificial Sequence
  Description of Artificial Sequence: Synthetic oligonucleotide
uguuguuuaugcccaguag

SEQ ID NO: 739026 - RNA, 19 nt, Artificial Sequence
  Description of Artificial Sequence: Synthetic oligonucleotide
ugcgguucagguuauaaac

SEQ ID NO: 739027 - RNA, 19 nt, Artificial Sequence
  Description of Artificial Sequence: Synthetic oligonucleotide
uuuauccaugagaaguacc

SEQ ID NO: 739028 - RNA, 19 nt, Artificial Sequence
  Description of Artificial Sequence: Synthetic oligonucleotide
auacucacuauaccagucg

SEQ ID NO: 739029 - RNA, 19 nt, Artificial Sequence
  Description of Artificial Sequence: Synthetic oligonucleotide
auccgguuguuguuuaugc

SEQ ID NO: 739030 - RNA, 19 nt, Artificial Sequence
  Description of Artificial Sequence: Synthetic oligonucleotide
uucauaguggcgaauugac

SEQ ID NO: 739031 - RNA, 19 nt, Artificial Sequence
  Description of Artificial Sequence: Synthetic oligonucleotide
ugugucgcucauaauguag

SEQ ID NO: 739032 - RNA, 19 nt, Artificial Sequence
  Description of Artificial Sequence: Synthetic oligonucleotide
cuguguguaaaccauacuc

SEQ ID NO: 739033 - RNA, 19 nt, Artificial Sequence
  Description of Artificial Sequence: Synthetic oligonucleotide
accagucguuucuuuaucc

SEQ ID NO: 739034 - RNA, 19 nt, Artificial Sequence
  Description of Artificial Sequence: Synthetic oligonucleotide
aagagguauacuuccuucu

SEQ ID NO: 739035 - RNA, 19 nt, Artificial Sequence
  Description of Artificial Sequence: Synthetic oligonucleotide
ucggaaacaccuuuacucc

SEQ ID NO: 739036 - RNA, 19 nt, Artificial Sequence
  Description of Artificial Sequence: Synthetic oligonucleotide
uuauaaacuguuagcgccu

SEQ ID NO: 739037 - RNA, 19 nt, Artificial Sequence
  Description of Artificial Sequence: Synthetic oligonucleotide
agaaucacaaguggguugg

SEQ ID NO: 739038 - RNA, 19 nt, Artificial Sequence
  Description of Artificial Sequence: Synthetic oligonucleotide
ucuaacccguuuaccaccg

SEQ ID NO: 739039 - RNA, 19 nt, Artificial Sequence
  Description of Artificial Sequence: Synthetic oligonucleotide
acaccuuuacuccugaggu

SEQ ID NO: 739040 - RNA, 19 nt, Artificial Sequence
  Description of Artificial Sequence: Synthetic oligonucleotide
auaaggguagagguuuucc

SEQ ID NO: 739041 - RNA, 19 nt, Artificial Sequence
  Description of Artificial Sequence: Synthetic oligonucleotide
ugaucucucgauuuugaga

SEQ ID NO: 739042 - RNA, 19 nt, Artificial Sequence
  Description of Artificial Sequence: Synthetic oligonucleotide
uccucuaacccguuuacca

SEQ ID NO: 739043 - RNA, 19 nt, Artificial Sequence
  Description of Artificial Sequence: Synthetic oligonucleotide
ugagaaucaauucguucga

SEQ ID NO: 739044 - RNA, 19 nt, Artificial Sequence
  Description of Artificial Sequence: Synthetic oligonucleotide
ugucacaugcuuugauacg

SEQ ID NO: 739045 - RNA, 19 nt, Artificial Sequence
  Description of Artificial Sequence: Synthetic oligonucleotide
agcgccucuucauaggugg

SEQ ID NO: 739046 - RNA, 19 nt, Artificial Sequence
  Description of Artificial Sequence: Synthetic oligonucleotide
auaguggcgaauugacagg

SEQ ID NO: 739047 - RNA, 19 nt, Artificial Sequence
  Description of Artificial Sequence: Synthetic oligonucleotide
uccaugagauucuuuauau

SEQ ID NO: 739048 - RNA, 19 nt, Artificial Sequence
  Description of Artificial Sequence: Synthetic oligonucleotide
uuggaaauauacugcuuca

SEQ ID NO: 739049 - RNA, 19 nt, Artificial Sequence
  Description of Artificial Sequence: Synthetic oligonucleotide
uguuagcgccucuucauag

SEQ ID NO: 739050 - RNA, 19 nt, Artificial Sequence
  Description of Artificial Sequence: Synthetic oligonucleotide
aauuucggcccugacagca

SEQ ID NO: 739051 - RNA, 19 nt, Artificial Sequence
  Description of Artificial Sequence: Synthetic oligonucleotide
uguucgccggaacucaaag

SEQ ID NO: 739052 - RNA, 19 nt, Artificial Sequence
  Description of Artificial Sequence: Synthetic oligonucleotide
accgagacaguucuccgac

SEQ ID NO: 739053 - RNA, 19 nt, Artificial Sequence
  Description of Artificial Sequence: Synthetic oligonucleotide
uguguaaaccauacucacu

SEQ ID NO: 739054 - RNA, 19 nt, Artificial Sequence
  Description of Artificial Sequence: Synthetic oligonucleotide
uguaggccgaagaaaacaa

SEQ ID NO: 739055 - RNA, 19 nt, Artificial Sequence
  Description of Artificial Sequence: Synthetic oligonucleotide
aggaacuucuguucgccgg

SEQ ID NO: 739056 - RNA, 19 nt, Artificial Sequence
  Description of Artificial Sequence: Synthetic oligonucleotide
uguuugguuauagccacag

SEQ ID NO: 739057 - RNA, 19 nt, Artificial Sequence
  Description of Artificial Sequence: Synthetic oligonucleotide
cuugaguuguucuggcuag

SEQ ID NO: 739058 - RNA, 19 nt, Artificial Sequence
  Description of Artificial Sequence: Synthetic oligonucleotide
ugucccucccagaacaacc

SEQ ID NO: 739059 - RNA, 19 nt, Artificial Sequence
  Description of Artificial Sequence: Synthetic oligonucleotide
aacuguuagcgccucuuca

SEQ ID NO: 739060 - RNA, 19 nt, Artificial Sequence
  Description of Artificial Sequence: Synthetic oligonucleotide
acuagaauggucauucuga

SEQ ID NO: 739061 - RNA, 19 nt, Artificial Sequence
  Description of Artificial Sequence: Synthetic oligonucleotide
guuuaugcccaguaguuca

SEQ ID NO: 739062 - RNA, 19 nt, Artificial Sequence
  Description of Artificial Sequence: Synthetic oligonucleotide
acagcaucaccagacgagc

SEQ ID NO: 739063 - RNA, 19 nt, Artificial Sequence
  Description of Artificial Sequence: Synthetic oligonucleotide
uucuuuauauugcuaccaa

SEQ ID NO: 739064 - RNA, 19 nt, Artificial Sequence
  Description of Artificial Sequence: Synthetic oligonucleotide
gaagagguauacuuccuuc

SEQ ID NO: 739065 - RNA, 19 nt, Artificial Sequence
  Description of Artificial Sequence: Synthetic oligonucleotide
uguguauuguugucccucc

SEQ ID NO: 739066 - RNA, 19 nt, Artificial Sequence
  Description of Artificial Sequence: Synthetic oligonucleotide
gauauguccacugguugag

SEQ ID NO: 739067 - RNA, 19 nt, Artificial Sequence
  Description of Artificial Sequence: Synthetic oligonucleotide
ccaauuucggcccugacag

SEQ ID NO: 739068 - RNA, 19 nt, Artificial Sequence
  Description of Artificial Sequence: Synthetic oligonucleotide
cacgaguuacaacaaacac

SEQ ID NO: 739069 - RNA, 19 nt, Artificial Sequence
  Description of Artificial Sequence: Synthetic oligonucleotide
gaugaaagcugguagcgaa

SEQ ID NO: 739070 - RNA, 19 nt, Artificial Sequence
  Description of Artificial Sequence: Synthetic oligonucleotide
cuuugauacggucccagac

SEQ ID NO: 739071 - RNA, 19 nt, Artificial Sequence
  Description of Artificial Sequence: Synthetic oligonucleotide
cuagaauggucauucugac

SEQ ID NO: 739072 - RNA, 19 nt, Artificial Sequence
  Description of Artificial Sequence: Synthetic oligonucleotide
auuguugucccucccagaa

SEQ ID NO: 739073 - RNA, 19 nt, Artificial Sequence
  Description of Artificial Sequence: Synthetic oligonucleotide
uuguuuaugcccaguaguu

SEQ ID NO: 739074 - RNA, 19 nt, Artificial Sequence
  Description of Artificial Sequence: Synthetic oligonucleotide
ucuucggagcucuugaaua

SEQ ID NO: 739075 - RNA, 19 nt, Artificial Sequence
  Description of Artificial Sequence: Synthetic oligonucleotide
ugugacuuuaggguucugc

SEQ ID NO: 739076 - RNA, 19 nt, Artificial Sequence
  Description of Artificial Sequence: Synthetic oligonucleotide
aguaguucauggaccaugg

SEQ ID NO: 739077 - RNA, 19 nt, Artificial Sequence
  Description of Artificial Sequence: Synthetic oligonucleotide
ugguagcgaaucauggggc

SEQ ID NO: 739078 - RNA, 19 nt, Artificial Sequence
  Description of Artificial Sequence: Synthetic oligonucleotide
ucuuuauauugcuaccaau

SEQ ID NO: 739079 - RNA, 19 nt, Artificial Sequence
  Description of Artificial Sequence: Synthetic oligonucleotide
gagagcacuagaaugguca

SEQ ID NO: 739080 - RNA, 19 nt, Artificial Sequence
  Description of Artificial Sequence: Synthetic oligonucleotide
guauuguugucccucccag

SEQ ID NO: 739081 - RNA, 19 nt, Artificial Sequence
  Description of Artificial Sequence: Synthetic oligonucleotide
aacuucuguucgccggaac

SEQ ID NO: 739082 - RNA, 19 nt, Artificial Sequence
  Description of Artificial Sequence: Synthetic oligonucleotide
agagguauacuuccuucug

SEQ ID NO: 739083 - RNA, 19 nt, Artificial Sequence
  Description of Artificial Sequence: Synthetic oligonucleotide
guguaaaccauacucacua

SEQ ID NO: 739084 - RNA, 19 nt, Artificial Sequence
  Description of Artificial Sequence: Synthetic oligonucleotide
acuaugaguccuggcaggc

SEQ ID NO: 739085 - RNA, 19 nt, Artificial Sequence
  Description of Artificial Sequence: Synthetic oligonucleotide
ucauaguggcgaauugaca

SEQ ID NO: 739086 - RNA, 19 nt, Artificial Sequence
  Description of Artificial Sequence: Synthetic oligonucleotide
uuguaggccgaagaaaaca

SEQ ID NO: 739087 - RNA, 19 nt, Artificial Sequence
  Description of Artificial Sequence: Synthetic oligonucleotide
uguggauaguucucaacaa

SEQ ID NO: 739088 - RNA, 19 nt, Artificial Sequence
  Description of Artificial Sequence: Synthetic oligonucleotide
ggcuaugcagcccugaagc

SEQ ID NO: 739089 - RNA, 19 nt, Artificial Sequence
  Description of Artificial Sequence: Synthetic oligonucleotide
uccgaccacugucacaugc

SEQ ID NO: 739090 - RNA, 19 nt, Artificial Sequence
  Description of Artificial Sequence: Synthetic oligonucleotide
uauugcuaccaaucucugc

SEQ ID NO: 739091 - RNA, 19 nt, Artificial Sequence
  Description of Artificial Sequence: Synthetic oligonucleotide
ugguuauagccacagcauc

SEQ ID NO: 739092 - RNA, 19 nt, Artificial Sequence
  Description of Artificial Sequence: Synthetic oligonucleotide
gaauggucauucugacagg

SEQ ID NO: 739093 - RNA, 19 nt, Artificial Sequence
  Description of Artificial Sequence: Synthetic oligonucleotide
uuuguaggccgaagaaaac

SEQ ID NO: 739094 - RNA, 19 nt, Artificial Sequence
  Description of Artificial Sequence: Synthetic oligonucleotide
uauuagcauagaauucauc

SEQ ID NO: 739095 - RNA, 19 nt, Artificial Sequence
  Description of Artificial Sequence: Synthetic oligonucleotide
acuuaucacuugcuuaaca

SEQ ID NO: 739096 - RNA, 19 nt, Artificial Sequence
  Description of Artificial Sequence: Synthetic oligonucleotide
acgagcugcauccaauucu

SEQ ID NO: 739097 - RNA, 19 nt, Artificial Sequence
  Description of Artificial Sequence: Synthetic oligonucleotide
accguauucaacaacugcu

SEQ ID NO: 739098 - RNA, 19 nt, Artificial Sequence
  Description of Artificial Sequence: Synthetic oligonucleotide
guuagcgccucuucauagg

SEQ ID NO: 739099 - RNA, 19 nt, Artificial Sequence
  Description of Artificial Sequence: Synthetic oligonucleotide
acgaguuacaacaaacaca

SEQ ID NO: 739100 - RNA, 19 nt, Artificial Sequence
  Description of Artificial Sequence: Synthetic oligonucleotide
uggaccauggccugauaug

SEQ ID NO: 739101 - RNA, 19 nt, Artificial Sequence
  Description of Artificial Sequence: Synthetic oligonucleotide
gaaagaucaauccgguugu

SEQ ID NO: 739102 - RNA, 19 nt, Artificial Sequence
  Description of Artificial Sequence: Synthetic oligonucleotide
ugucgcucauaauguagag

SEQ ID NO: 739103 - RNA, 19 nt, Artificial Sequence
  Description of Artificial Sequence: Synthetic oligonucleotide
cugauauguccacugguug

SEQ ID NO: 739104 - RNA, 19 nt, Artificial Sequence
  Description of Artificial Sequence: Synthetic oligonucleotide
uugcucaaccucugaaacc

SEQ ID NO: 739105 - RNA, 19 nt, Artificial Sequence
  Description of Artificial Sequence: Synthetic oligonucleotide
cuagaaugagaagcagugg

SEQ ID NO: 739106 - RNA, 19 nt, Artificial Sequence
  Description of Artificial Sequence: Synthetic oligonucleotide
uucucggaaacaccuuuac

SEQ ID NO: 739107 - RNA, 19 nt, Artificial Sequence
  Description of Artificial Sequence: Synthetic oligonucleotide
cuguggauaguucucaaca

SEQ ID NO: 739108 - RNA, 19 nt, Artificial Sequence
  Description of Artificial Sequence: Synthetic oligonucleotide
guggcgaauugacaggugc

SEQ ID NO: 739109 - RNA, 19 nt, Artificial Sequence
  Description of Artificial Sequence: Synthetic oligonucleotide
cacuaugaguccuggcagg

SEQ ID NO: 739110 - RNA, 19 nt, Artificial Sequence
  Description of Artificial Sequence: Synthetic oligonucleotide
caccguauucaacaacugc

SEQ ID NO: 739111 - RNA, 19 nt, Artificial Sequence
  Description of Artificial Sequence: Synthetic oligonucleotide
ucaaccucugaaaccucca

SEQ ID NO: 739112 - RNA, 19 nt, Artificial Sequence
  Description of Artificial Sequence: Synthetic oligonucleotide
uggggccuaaauaagggua

SEQ ID NO: 739113 - RNA, 19 nt, Artificial Sequence
  Description of Artificial Sequence: Synthetic oligonucleotide
gaacaacccucacuccagg

SEQ ID NO: 739114 - RNA, 19 nt, Artificial Sequence
  Description of Artificial Sequence: Synthetic oligonucleotide
cacugaccaaccgagacag

SEQ ID NO: 739115 - RNA, 19 nt, Artificial Sequence
  Description of Artificial Sequence: Synthetic oligonucleotide
accauacucacuauaccag

SEQ ID NO: 739116 - RNA, 19 nt, Artificial Sequence
  Description of Artificial Sequence: Synthetic oligonucleotide
guuguuuaugcccaguagu

SEQ ID NO: 739117 - RNA, 19 nt, Artificial Sequence
  Description of Artificial Sequence: Synthetic oligonucleotide
gauggcgucgucacagcgg

SEQ ID NO: 739118 - RNA, 19 nt, Artificial Sequence
  Description of Artificial Sequence: Synthetic oligonucleotide
ucucggaaacaccuuuacu

SEQ ID NO: 739119 - RNA, 19 nt, Artificial Sequence
  Description of Artificial Sequence: Synthetic oligonucleotide
uccuuaagcuuuccuuuga

SEQ ID NO: 739120 - RNA, 19 nt, Artificial Sequence
  Description of Artificial Sequence: Synthetic oligonucleotide
accacguucauaguggcga

SEQ ID NO: 739121 - RNA, 19 nt, Artificial Sequence
  Description of Artificial Sequence: Synthetic oligonucleotide
aaccgagacaguucuccga

SEQ ID NO: 739122 - RNA, 19 nt, Artificial Sequence
  Description of Artificial Sequence: Synthetic oligonucleotide
cacuagaauggucauucug

SEQ ID NO: 739123 - RNA, 19 nt, Artificial Sequence
  Description of Artificial Sequence: Synthetic oligonucleotide
cacuccaggaguugugcgg

SEQ ID NO: 739124 - RNA, 19 nt, Artificial Sequence
  Description of Artificial Sequence: Synthetic oligonucleotide
gugacuuuaggguucugca

SEQ ID NO: 739125 - RNA, 19 nt, Artificial Sequence
  Description of Artificial Sequence: Synthetic oligonucleotide
ucggagcucuugaauaaga

SEQ ID NO: 739126 - RNA, 19 nt, Artificial Sequence
  Description of Artificial Sequence: Synthetic oligonucleotide
uucaugaucucucgauuuu

SEQ ID NO: 739127 - RNA, 19 nt, Artificial Sequence
  Description of Artificial Sequence: Synthetic oligonucleotide
uucuggagagcacuagaau

SEQ ID NO: 739128 - RNA, 19 nt, Artificial Sequence
  Description of Artificial Sequence: Synthetic oligonucleotide
uucagguuauaaacuguua

SEQ ID NO: 739129 - RNA, 19 nt, Artificial Sequence
  Description of Artificial Sequence: Synthetic oligonucleotide
gauacggucccagacaucu

SEQ ID NO: 739130 - RNA, 19 nt, Artificial Sequence
  Description of Artificial Sequence: Synthetic oligonucleotide
uccgguuguuguuuaugcc

SEQ ID NO: 739131 - RNA, 19 nt, Artificial Sequence
  Description of Artificial Sequence: Synthetic oligonucleotide
gaagaggucacuuccucua

SEQ ID NO: 739132 - RNA, 19 nt, Artificial Sequence
  Description of Artificial Sequence: Synthetic oligonucleotide
ucaugggcguuccaguguc

SEQ ID NO: 739133 - RNA, 19 nt, Artificial Sequence
  Description of Artificial Sequence: Synthetic oligonucleotide
uuaccuggcacgaguuaca

SEQ ID NO: 739134 - RNA, 19 nt, Artificial Sequence
  Description of Artificial Sequence: Synthetic oligonucleotide
gaaaggcugauguugugua

SEQ ID NO: 739135 - RNA, 19 nt, Artificial Sequence
  Description of Artificial Sequence: Synthetic oligonucleotide
accaccguauucaacaacu

SEQ ID NO: 739136 - RNA, 19 nt, Artificial Sequence
  Description of Artificial Sequence: Synthetic oligonucleotide
ugaccaaccgagacaguuc

SEQ ID NO: 739137 - RNA, 19 nt, Artificial Sequence
  Description of Artificial Sequence: Synthetic oligonucleotide
uguuuaugcccaguaguuc

SEQ ID NO: 739138 - RNA, 19 nt, Artificial Sequence
  Description of Artificial Sequence: Synthetic oligonucleotide
gccuaaauaaggguagagg

SEQ ID NO: 739139 - RNA, 19 nt, Artificial Sequence
  Description of Artificial Sequence: Synthetic oligonucleotide
ugcuuugauacggucccag

SEQ ID NO: 739140 - RNA, 19 nt, Artificial Sequence
  Description of Artificial Sequence: Synthetic oligonucleotide
uuuaugcccaguaguucau

SEQ ID NO: 739141 - RNA, 19 nt, Artificial Sequence
  Description of Artificial Sequence: Synthetic oligonucleotide
gcuuaacacauucuccaag

SEQ ID NO: 739142 - RNA, 19 nt, Artificial Sequence
  Description of Artificial Sequence: Synthetic oligonucleotide
ucauaauguagagcauaca

SEQ ID NO: 739143 - RNA, 19 nt, Artificial Sequence
  Description of Artificial Sequence: Synthetic oligonucleotide
gaguuguucuggcuagcug

SEQ ID NO: 739144 - RNA, 19 nt, Artificial Sequence
  Description of Artificial Sequence: Synthetic oligonucleotide
agacaggaccaccucucuc

SEQ ID NO: 739145 - RNA, 19 nt, Artificial Sequence
  Description of Artificial Sequence: Synthetic oligonucleotide
cuguauuugggucuucgga

SEQ ID NO: 739146 - RNA, 19 nt, Artificial Sequence
  Description of Artificial Sequence: Synthetic oligonucleotide
guuaccuggcacgaguuac

SEQ ID NO: 739147 - RNA, 19 nt, Artificial Sequence
  Description of Artificial Sequence: Synthetic oligonucleotide
auguccacugguugagcag

SEQ ID NO: 739148 - RNA, 19 nt, Artificial Sequence
  Description of Artificial Sequence: Synthetic oligonucleotide
gcggucuagaaugagaagc

SEQ ID NO: 739149 - RNA, 19 nt, Artificial Sequence
  Description of Artificial Sequence: Synthetic oligonucleotide
uuucgguacuucucggaaa

SEQ ID NO: 739150 - RNA, 19 nt, Artificial Sequence
  Description of Artificial Sequence: Synthetic oligonucleotide
caaccgagacaguucuccg

SEQ ID NO: 739151 - RNA, 19 nt, Artificial Sequence
  Description of Artificial Sequence: Synthetic oligonucleotide
uguaaaccauacucacuau

SEQ ID NO: 739152 - RNA, 19 nt, Artificial Sequence
  Description of Artificial Sequence: Synthetic oligonucleotide
auauguccacugguugagc

SEQ ID NO: 739153 - RNA, 19 nt, Artificial Sequence
  Description of Artificial Sequence: Synthetic oligonucleotide
cuuccucuaacccguuuac

SEQ ID NO: 739154 - RNA, 19 nt, Artificial Sequence
  Description of Artificial Sequence: Synthetic oligonucleotide
acuguguguaaaccauacu

SEQ ID NO: 739155 - RNA, 19 nt, Artificial Sequence
  Description of Artificial Sequence: Synthetic oligonucleotide
ccuggcacgaguuacaaca

SEQ ID NO: 739156 - RNA, 19 nt, Artificial Sequence
  Description of Artificial Sequence: Synthetic oligonucleotide
caaagacgaugauauccug

SEQ ID NO: 739157 - RNA, 19 nt, Artificial Sequence
  Description of Artificial Sequence: Synthetic oligonucleotide
uaccaaucucugcaaaguu

SEQ ID NO: 739158 - RNA, 19 nt, Artificial Sequence
  Description of Artificial Sequence: Synthetic oligonucleotide
aagaggucacuuccucuaa

SEQ ID NO: 739159 - RNA, 19 nt, Artificial Sequence
  Description of Artificial Sequence: Synthetic oligonucleotide
ucguuucuuuauccaugag

SEQ ID NO: 739160 - RNA, 19 nt, Artificial Sequence
  Description of Artificial Sequence: Synthetic oligonucleotide
aauguagagcauacagcau

SEQ ID NO: 739161 - RNA, 19 nt, Artificial Sequence
  Description of Artificial Sequence: Synthetic oligonucleotide
cucugaaaccuccagcaga

SEQ ID NO: 739162 - RNA, 19 nt, Artificial Sequence
  Description of Artificial Sequence: Synthetic oligonucleotide
uccugagguccacuaugag

SEQ ID NO: 739163 - RNA, 19 nt, Artificial Sequence
  Description of Artificial Sequence: Synthetic oligonucleotide
guaaaccauacucacuaua

SEQ ID NO: 739164 - RNA, 19 nt, Artificial Sequence
  Description of Artificial Sequence: Synthetic oligonucleotide
ccgguuguuguuuaugccc

SEQ ID NO: 739165 - RNA, 19 nt, Artificial Sequence
  Description of Artificial Sequence: Synthetic oligonucleotide
ugagguccacuaugagucc

SEQ ID NO: 739166 - RNA, 19 nt, Artificial Sequence
  Description of Artificial Sequence: Synthetic oligonucleotide
caguaguucauggaccaug

SEQ ID NO: 739167 - RNA, 19 nt, Artificial Sequence
  Description of Artificial Sequence: Synthetic oligonucleotide
uucggagcucuugaauaag

SEQ ID NO: 739168 - RNA, 19 nt, Artificial Sequence
  Description of Artificial Sequence: Synthetic oligonucleotide
gguauacuuccuucugaag

SEQ ID NO: 739169 - RNA, 19 nt, Artificial Sequence
  Description of Artificial Sequence: Synthetic oligonucleotide
caugaucucucgauuuuga

SEQ ID NO: 739170 - RNA, 19 nt, Artificial Sequence
  Description of Artificial Sequence: Synthetic oligonucleotide
agcggucuagaaugagaag

SEQ ID NO: 739171 - RNA, 19 nt, Artificial Sequence
  Description of Artificial Sequence: Synthetic oligonucleotide
cagcuaaggacuucacauc

SEQ ID NO: 739172 - RNA, 19 nt, Artificial Sequence
  Description of Artificial Sequence: Synthetic oligonucleotide
uaacccguuuaccaccgua

SEQ ID NO: 739173 - RNA, 19 nt, Artificial Sequence
  Description of Artificial Sequence: Synthetic oligonucleotide
uauaaacuguuagcgccuc

SEQ ID NO: 739174 - RNA, 19 nt, Artificial Sequence
  Description of Artificial Sequence: Synthetic oligonucleotide
ugaguuguucuggcuagcu

SEQ ID NO: 739175 - RNA, 19 nt, Artificial Sequence
  Description of Artificial Sequence: Synthetic oligonucleotide
ugugcgguucagguuauaa

SEQ ID NO: 739176 - RNA, 19 nt, Artificial Sequence
  Description of Artificial Sequence: Synthetic oligonucleotide
guucgaagagguauacuuc

SEQ ID NO: 739177 - RNA, 19 nt, Artificial Sequence
  Description of Artificial Sequence: Synthetic oligonucleotide
uuucggcccugacagcaac

SEQ ID NO: 739178 - RNA, 19 nt, Artificial Sequence
  Description of Artificial Sequence: Synthetic oligonucleotide
uucguucgaagagguauac

SEQ ID NO: 739179 - RNA, 19 nt, Artificial Sequence
  Description of Artificial Sequence: Synthetic oligonucleotide
aggacauguuuauuuggua

SEQ ID NO: 739180 - RNA, 19 nt, Artificial Sequence
  Description of Artificial Sequence: Synthetic oligonucleotide
aacccguuuaccaccguau

SEQ ID NO: 739181 - RNA, 19 nt, Artificial Sequence
  Description of Artificial Sequence: Synthetic oligonucleotide
ucacagcggucuagaauga

SEQ ID NO: 739182 - RNA, 19 nt, Artificial Sequence
  Description of Artificial Sequence: Synthetic oligonucleotide
gucgcucauaauguagagc

SEQ ID NO: 739183 - RNA, 19 nt, Artificial Sequence
  Description of Artificial Sequence: Synthetic oligonucleotide
auaaacuguuagcgccucu

SEQ ID NO: 739184 - RNA, 19 nt, Artificial Sequence
  Description of Artificial Sequence: Synthetic oligonucleotide
ggucucaugcaggaaaggc

SEQ ID NO: 739185 - RNA, 19 nt, Artificial Sequence
  Description of Artificial Sequence: Synthetic oligonucleotide
aggaguugugcgguucagg

SEQ ID NO: 739186 - RNA, 19 nt, Artificial Sequence
  Description of Artificial Sequence: Synthetic oligonucleotide
ucgccggaacucaaagagu

SEQ ID NO: 739187 - RNA, 19 nt, Artificial Sequence
  Description of Artificial Sequence: Synthetic oligonucleotide
cauucuggagagcacuaga

SEQ ID NO: 739188 - RNA, 19 nt, Artificial Sequence
  Description of Artificial Sequence: Synthetic oligonucleotide
uuauagccacagcaucuuu

SEQ ID NO: 739189 - RNA, 19 nt, Artificial Sequence
  Description of Artificial Sequence: Synthetic oligonucleotide
acagaaucacaaguggguu

SEQ ID NO: 739190 - RNA, 19 nt, Artificial Sequence
  Description of Artificial Sequence: Synthetic oligonucleotide
cuccuccaauaacaaagac

SEQ ID NO: 739191 - RNA, 19 nt, Artificial Sequence
  Description of Artificial Sequence: Synthetic oligonucleotide
accuggcacgaguuacaac

SEQ ID NO: 739192 - RNA, 19 nt, Artificial Sequence
  Description of Artificial Sequence: Synthetic oligonucleotide
gacgagcugcauccaauuc

SEQ ID NO: 739193 - RNA, 19 nt, Artificial Sequence
  Description of Artificial Sequence: Synthetic oligonucleotide
uccuugaguuguucuggcu

SEQ ID NO: 739194 - RNA, 19 nt, Artificial Sequence
  Description of Artificial Sequence: Synthetic oligonucleotide
ucaauccgguuguuguuua

SEQ ID NO: 739195 - RNA, 19 nt, Artificial Sequence
  Description of Artificial Sequence: Synthetic oligonucleotide
guaagagggaggcugugcu

SEQ ID NO: 739196 - RNA, 19 nt, Artificial Sequence
  Description of Artificial Sequence: Synthetic oligonucleotide
uucggcccugacagcaacc

SEQ ID NO: 739197 - RNA, 19 nt, Artificial Sequence
  Description of Artificial Sequence: Synthetic oligonucleotide
ucucgauuuugagaaucaa

SEQ ID NO: 739198 - RNA, 19 nt, Artificial Sequence
  Description of Artificial Sequence: Synthetic oligonucleotide
auucuggagagcacuagaa

SEQ ID NO: 739199 - RNA, 19 nt, Artificial Sequence
  Description of Artificial Sequence: Synthetic oligonucleotide
gaccaaccgagacaguucu

SEQ ID NO: 739200 - RNA, 19 nt, Artificial Sequence
  Description of Artificial Sequence: Synthetic oligonucleotide
uagcgccucuucauaggug

SEQ ID NO: 739201 - RNA, 19 nt, Artificial Sequence
  Description of Artificial Sequence: Synthetic oligonucleotide
cuuucgguacuucucggaa

SEQ ID NO: 739202 - RNA, 19 nt, Artificial Sequence
  Description of Artificial Sequence: Synthetic oligonucleotide
augcccaguaguucaugga

SEQ ID NO: 739203 - RNA, 19 nt, Artificial Sequence
  Description of Artificial Sequence: Synthetic oligonucleotide
gauauccugaggccugucu

SEQ ID NO: 739204 - RNA, 19 nt, Artificial Sequence
  Description of Artificial Sequence: Synthetic oligonucleotide
cagcggucuagaaugagaa

SEQ ID NO: 739205 - RNA, 19 nt, Artificial Sequence
  Description of Artificial Sequence: Synthetic oligonucleotide
agggucucaugcaggaaag

SEQ ID NO: 739206 - RNA, 19 nt, Artificial Sequence
  Description of Artificial Sequence: Synthetic oligonucleotide
gagacaguucuccgaccac

SEQ ID NO: 739207 - RNA, 19 nt, Artificial Sequence
  Description of Artificial Sequence: Synthetic oligonucleotide
gaaucacaaguggguuggg

SEQ ID NO: 739208 - RNA, 19 nt, Artificial Sequence
  Description of Artificial Sequence: Synthetic oligonucleotide
uugggguuaccuggcacga

SEQ ID NO: 739209 - RNA, 19 nt, Artificial Sequence
  Description of Artificial Sequence: Synthetic oligonucleotide
augggcucaucaugggcgu

SEQ ID NO: 739210 - RNA, 19 nt, Artificial Sequence
  Description of Artificial Sequence: Synthetic oligonucleotide
ccguauucaacaacugcug

SEQ ID NO: 739211 - RNA, 19 nt, Artificial Sequence
  Description of Artificial Sequence: Synthetic oligonucleotide
cuucggagcucuugaauaa

SEQ ID NO: 739212 - RNA, 19 nt, Artificial Sequence
  Description of Artificial Sequence: Synthetic oligonucleotide
agacgagcugcauccaauu

SEQ ID NO: 739213 - RNA, 19 nt, Artificial Sequence
  Description of Artificial Sequence: Synthetic oligonucleotide
caauuucggcccugacagc

SEQ ID NO: 739214 - RNA, 19 nt, Artificial Sequence
  Description of Artificial Sequence: Synthetic oligonucleotide
ccaaccgagacaguucucc

SEQ ID NO: 739215 - RNA, 19 nt, Artificial Sequence
  Description of Artificial Sequence: Synthetic oligonucleotide
ugcggccucugaugaaagc

SEQ ID NO: 739216 - RNA, 19 nt, Artificial Sequence
  Description of Artificial Sequence: Synthetic oligonucleotide
ggggccuaaauaaggguag

SEQ ID NO: 739217 - RNA, 19 nt, Artificial Sequence
  Description of Artificial Sequence: Synthetic oligonucleotide
ggaaacaccuuuacuccug

SEQ ID NO: 739218 - RNA, 19 nt, Artificial Sequence
  Description of Artificial Sequence: Synthetic oligonucleotide
uacuucucggaaacaccuu

SEQ ID NO: 739219 - RNA, 19 nt, Artificial Sequence
  Description of Artificial Sequence: Synthetic oligonucleotide
caccuuuacuccugagguc

SEQ ID NO: 739220 - RNA, 19 nt, Artificial Sequence
  Description of Artificial Sequence: Synthetic oligonucleotide
cacuauaccagucguuucu

SEQ ID NO: 739221 - RNA, 19 nt, Artificial Sequence
  Description of Artificial Sequence: Synthetic oligonucleotide
gugucgcucauaauguaga

SEQ ID NO: 739222 - RNA, 19 nt, Artificial Sequence
  Description of Artificial Sequence: Synthetic oligonucleotide
ggccugauauguccacugg

SEQ ID NO: 739223 - RNA, 19 nt, Artificial Sequence
  Description of Artificial Sequence: Synthetic oligonucleotide
gcuauucucgucauucuuc

SEQ ID NO: 739224 - RNA, 19 nt, Artificial Sequence
  Description of Artificial Sequence: Synthetic oligonucleotide
ggcgaauugacaggugccc

SEQ ID NO: 739225 - RNA, 19 nt, Artificial Sequence
  Description of Artificial Sequence: Synthetic oligonucleotide
cuccugagguccacuauga

SEQ ID NO: 739226 - RNA, 19 nt, Artificial Sequence
  Description of Artificial Sequence: Synthetic oligonucleotide
guucgccggaacucaaaga

SEQ ID NO: 739227 - RNA, 19 nt, Artificial Sequence
  Description of Artificial Sequence: Synthetic oligonucleotide
guuuaccaccguauucaac

SEQ ID NO: 739228 - RNA, 19 nt, Artificial Sequence
  Description of Artificial Sequence: Synthetic oligonucleotide
cucgauuuugagaaucaau

SEQ ID NO: 739229 - RNA, 19 nt, Artificial Sequence
  Description of Artificial Sequence: Synthetic oligonucleotide
gguagcgaaucauggggca

SEQ ID NO: 739230 - RNA, 19 nt, Artificial Sequence
  Description of Artificial Sequence: Synthetic oligonucleotide
acguucauaguggcgaauu

SEQ ID NO: 739231 - RNA, 19 nt, Artificial Sequence
  Description of Artificial Sequence: Synthetic oligonucleotide
caacaacugcugacacaag

SEQ ID NO: 739232 - RNA, 19 nt, Artificial Sequence
  Description of Artificial Sequence: Synthetic oligonucleotide
ugauacggucccagacauc

SEQ ID NO: 739233 - RNA, 19 nt, Artificial Sequence
  Description of Artificial Sequence: Synthetic oligonucleotide
guagcgaaucauggggcac

SEQ ID NO: 739234 - RNA, 19 nt, Artificial Sequence
  Description of Artificial Sequence: Synthetic oligonucleotide
ucguucgaagagguauacu

SEQ ID NO: 739235 - RNA, 19 nt, Artificial Sequence
  Description of Artificial Sequence: Synthetic oligonucleotide
agcuucagcuaaggacuuc

SEQ ID NO: 739236 - RNA, 19 nt, Artificial Sequence
  Description of Artificial Sequence: Synthetic oligonucleotide
cguuucuuuauccaugaga

SEQ ID NO: 739237 - RNA, 19 nt, Artificial Sequence
  Description of Artificial Sequence: Synthetic oligonucleotide
guuucaugaucucucgauu

SEQ ID NO: 739238 - RNA, 19 nt, Artificial Sequence
  Description of Artificial Sequence: Synthetic oligonucleotide
ggccuaaauaaggguagag

SEQ ID NO: 739239 - RNA, 19 nt, Artificial Sequence
  Description of Artificial Sequence: Synthetic oligonucleotide
gugcgguucagguuauaaa

SEQ ID NO: 739240 - RNA, 19 nt, Artificial Sequence
  Description of Artificial Sequence: Synthetic oligonucleotide
uugucccucccagaacaac

SEQ ID NO: 739241 - RNA, 19 nt, Artificial Sequence
  Description of Artificial Sequence: Synthetic oligonucleotide
acuauaccagucguuucuu

SEQ ID NO: 739242 - RNA, 19 nt, Artificial Sequence
  Description of Artificial Sequence: Synthetic oligonucleotide
cgguucagguuauaaacug

SEQ ID NO: 739243 - RNA, 19 nt, Artificial Sequence
  Description of Artificial Sequence: Synthetic oligonucleotide
aggacuucacaucgcucuu

SEQ ID NO: 739244 - RNA, 19 nt, Artificial Sequence
  Description of Artificial Sequence: Synthetic oligonucleotide
augggcguuccagugucug

SEQ ID NO: 739245 - RNA, 19 nt, Artificial Sequence
  Description of Artificial Sequence: Synthetic oligonucleotide
auucguucgaagagguaua

SEQ ID NO: 739246 - RNA, 19 nt, Artificial Sequence
  Description of Artificial Sequence: Synthetic oligonucleotide
gagcugucaguccuugagu

SEQ ID NO: 739247 - RNA, 19 nt, Artificial Sequence
  Description of Artificial Sequence: Synthetic oligonucleotide
uccaggaguugugcgguuc

SEQ ID NO: 739248 - RNA, 19 nt, Artificial Sequence
  Description of Artificial Sequence: Synthetic oligonucleotide
uaccuggcacgaguuacaa

SEQ ID NO: 739249 - RNA, 19 nt, Artificial Sequence
  Description of Artificial Sequence: Synthetic oligonucleotide
cuuuacuccugagguccac

SEQ ID NO: 739250 - RNA, 19 nt, Artificial Sequence
  Description of Artificial Sequence: Synthetic oligonucleotide
gcacgaguuacaacaaaca

SEQ ID NO: 739251 - RNA, 19 nt, Artificial Sequence
  Description of Artificial Sequence: Synthetic oligonucleotide
aucucucgauuuugagaau

SEQ ID NO: 739252 - RNA, 19 nt, Artificial Sequence
  Description of Artificial Sequence: Synthetic oligonucleotide
acccguuuaccaccguauu

SEQ ID NO: 739253 - RNA, 19 nt, Artificial Sequence
  Description of Artificial Sequence: Synthetic oligonucleotide
gcuuguugaccucgaggug

SEQ ID NO: 739254 - RNA, 19 nt, Artificial Sequence
  Description of Artificial Sequence: Synthetic oligonucleotide
cacagcggucuagaaugag

SEQ ID NO: 739255 - RNA, 19 nt, Artificial Sequence
  Description of Artificial Sequence: Synthetic oligonucleotide
augaaagcugguagcgaau

SEQ ID NO: 739256 - RNA, 19 nt, Artificial Sequence
  Description of Artificial Sequence: Synthetic oligonucleotide
ugucaguccuugaguuguu

SEQ ID NO: 739257 - RNA, 19 nt, Artificial Sequence
  Description of Artificial Sequence: Synthetic oligonucleotide
cuugcggccucugaugaaa

SEQ ID NO: 739258 - RNA, 19 nt, Artificial Sequence
  Description of Artificial Sequence: Synthetic oligonucleotide
ugggguuaccuggcacgag

SEQ ID NO: 739259 - RNA, 19 nt, Artificial Sequence
  Description of Artificial Sequence: Synthetic oligonucleotide
gguccacuaugaguccugg

SEQ ID NO: 739260 - RNA, 19 nt, Artificial Sequence
  Description of Artificial Sequence: Synthetic oligonucleotide
uucuccuuuguaggccgaa

SEQ ID NO: 739261 - RNA, 19 nt, Artificial Sequence
  Description of Artificial Sequence: Synthetic oligonucleotide
cucacuauaccagucguuu

SEQ ID NO: 739262 - RNA, 19 nt, Artificial Sequence
  Description of Artificial Sequence: Synthetic oligonucleotide
cugucaguccuugaguugu

SEQ ID NO: 739263 - RNA, 19 nt, Artificial Sequence
  Description of Artificial Sequence: Synthetic oligonucleotide
guagagcauacagcaucac

SEQ ID NO: 739264 - RNA, 19 nt, Artificial Sequence
  Description of Artificial Sequence: Synthetic oligonucleotide
ccguuuaccaccguauuca

SEQ ID NO: 739265 - RNA, 19 nt, Artificial Sequence
  Description of Artificial Sequence: Synthetic oligonucleotide
gcgaauugacaggugcccc

SEQ ID NO: 739266 - RNA, 19 nt, Artificial Sequence
  Description of Artificial Sequence: Synthetic oligonucleotide
ggcguuccagugucugugc

SEQ ID NO: 739267 - RNA, 19 nt, Artificial Sequence
  Description of Artificial Sequence: Synthetic oligonucleotide
aucacuugcuuaacacauu

SEQ ID NO: 739268 - RNA, 19 nt, Artificial Sequence
  Description of Artificial Sequence: Synthetic oligonucleotide
acucacuauaccagucguu

SEQ ID NO: 739269 - RNA, 19 nt, Artificial Sequence
  Description of Artificial Sequence: Synthetic oligonucleotide
cccaauuucggcccugaca

SEQ ID NO: 739270 - RNA, 19 nt, Artificial Sequence
  Description of Artificial Sequence: Synthetic oligonucleotide
ccagucguuucuuuaucca

SEQ ID NO: 739271 - RNA, 19 nt, Artificial Sequence
  Description of Artificial Sequence: Synthetic oligonucleotide
cccguuuaccaccguauuc

SEQ ID NO: 739272 - RNA, 19 nt, Artificial Sequence
  Description of Artificial Sequence: Synthetic oligonucleotide
caggaguugugcgguucag

SEQ ID NO: 739273 - RNA, 19 nt, Artificial Sequence
  Description of Artificial Sequence: Synthetic oligonucleotide
cuguuagcgccucuucaua

SEQ ID NO: 739274 - RNA, 19 nt, Artificial Sequence
  Description of Artificial Sequence: Synthetic oligonucleotide
ccaccguauucaacaacug

SEQ ID NO: 739275 - RNA, 19 nt, Artificial Sequence
  Description of Artificial Sequence: Synthetic oligonucleotide
accaaccgagacaguucuc

SEQ ID NO: 739276 - RNA, 19 nt, Artificial Sequence
  Description of Artificial Sequence: Synthetic oligonucleotide
aggugccccacagcccuuc

SEQ ID NO: 739277 - RNA, 19 nt, Artificial Sequence
  Description of Artificial Sequence: Synthetic oligonucleotide
cagucguuucuuuauccau

SEQ ID NO: 739278 - RNA, 19 nt, Artificial Sequence
  Description of Artificial Sequence: Synthetic oligonucleotide
ccuugaguuguucuggcua

SEQ ID NO: 739279 - RNA, 19 nt, Artificial Sequence
  Description of Artificial Sequence: Synthetic oligonucleotide
guugaccucgagguggccu

SEQ ID NO: 739280 - RNA, 19 nt, Artificial Sequence
  Description of Artificial Sequence: Synthetic oligonucleotide
cugugucgcucauaaugua

SEQ ID NO: 739281 - RNA, 19 nt, Artificial Sequence
  Description of Artificial Sequence: Synthetic oligonucleotide
gcugugucgcucauaaugu

SEQ ID NO: 739282 - RNA, 19 nt, Artificial Sequence
  Description of Artificial Sequence: Synthetic oligonucleotide
cuggggccuaaauaagggu

SEQ ID NO: 739283 - RNA, 19 nt, Artificial Sequence
  Description of Artificial Sequence: Synthetic oligonucleotide
gaacuucuguucgccggaa

SEQ ID NO: 739284 - RNA, 19 nt, Artificial Sequence
  Description of Artificial Sequence: Synthetic oligonucleotide
cguucauaguggcgaauug

SEQ ID NO: 739285 - RNA, 19 nt, Artificial Sequence
  Description of Artificial Sequence: Synthetic oligonucleotide
cauuuuccacucccuucaa

SEQ ID NO: 739286 - RNA, 19 nt, Artificial Sequence
  Description of Artificial Sequence: Synthetic oligonucleotide
ccugagguccacuaugagu

SEQ ID NO: 739287 - RNA, 19 nt, Artificial Sequence
  Description of Artificial Sequence: Synthetic oligonucleotide
caauaacaaagacgaugau

SEQ ID NO: 739288 - RNA, 19 nt, Artificial Sequence
  Description of Artificial Sequence: Synthetic oligonucleotide
ggauugggguuaccuggca

SEQ ID NO: 739289 - RNA, 19 nt, Artificial Sequence
  Description of Artificial Sequence: Synthetic oligonucleotide
ggcucaucaugggcguucc

SEQ ID NO: 739290 - RNA, 19 nt, Artificial Sequence
  Description of Artificial Sequence: Synthetic oligonucleotide
auuucggcccugacagcaa

SEQ ID NO: 739291 - RNA, 19 nt, Artificial Sequence
  Description of Artificial Sequence: Synthetic oligonucleotide
gggguuaccuggcacgagu

SEQ ID NO: 739292 - RNA, 19 nt, Artificial Sequence
  Description of Artificial Sequence: Synthetic oligonucleotide
gcugcggcuaugcagcccu

SEQ ID NO: 739293 - RNA, 19 nt, Artificial Sequence
  Description of Artificial Sequence: Synthetic oligonucleotide
cagacgagcugcauccaau

SEQ ID NO: 739294 - RNA, 19 nt, Artificial Sequence
  Description of Artificial Sequence: Synthetic oligonucleotide
cgagacaguucuccgacca

SEQ ID NO: 739295 - RNA, 19 nt, Artificial Sequence
  Description of Artificial Sequence: Synthetic oligonucleotide
accagacgagcugcaucca

SEQ ID NO: 739296 - RNA, 19 nt, Artificial Sequence
  Description of Artificial Sequence: Synthetic oligonucleotide
cguucgaagagguauacuu

SEQ ID NO: 739297 - RNA, 19 nt, Artificial Sequence
  Description of Artificial Sequence: Synthetic oligonucleotide
ccgagacaguucuccgacc

SEQ ID NO: 739298 - RNA, 19 nt, Artificial Sequence
  Description of Artificial Sequence: Synthetic oligonucleotide
gguuaccuggcacgaguua

SEQ ID NO: 739299 - RNA, 19 nt, Artificial Sequence
  Description of Artificial Sequence: Synthetic oligonucleotide
gaccucgagguggccugug

SEQ ID NO: 739300 - RNA, 19 nt, Artificial Sequence
  Description of Artificial Sequence: Synthetic oligonucleotide
gccugauauguccacuggu

SEQ ID NO: 739301 - RNA, 19 nt, Artificial Sequence
  Description of Artificial Sequence: Synthetic oligonucleotide
cgaauugacaggugcccca

SEQ ID NO: 739302 - RNA, 19 nt, Artificial Sequence
  Description of Artificial Sequence: Synthetic oligonucleotide
gucccaauuucggcccuga

SEQ ID NO: 739303 - RNA, 19 nt, Artificial Sequence
  Description of Artificial Sequence: Synthetic oligonucleotide
ggcccgcuguccucuauca

SEQ ID NO: 739304 - RNA, 19 nt, Artificial Sequence
  Description of Artificial Sequence: Synthetic oligonucleotide
guugucccucccagaacaa

SEQ ID NO: 739305 - RNA, 19 nt, Artificial Sequence
  Description of Artificial Sequence: Synthetic oligonucleotide
cuauaccagucguuucuuu

SEQ ID NO: 739306 - RNA, 19 nt, Artificial Sequence
  Description of Artificial Sequence: Synthetic oligonucleotide
gggccuaaauaaggguaga

SEQ ID NO: 739307 - RNA, 19 nt, Artificial Sequence
  Description of Artificial Sequence: Synthetic oligonucleotide
ggcugauguuguguauaca

SEQ ID NO: 739308 - RNA, 19 nt, Artificial Sequence
  Description of Artificial Sequence: Synthetic oligonucleotide
acugaccaaccgagacagu

SEQ ID NO: 739309 - RNA, 19 nt, Artificial Sequence
  Description of Artificial Sequence: Synthetic oligonucleotide
gcggccucugaugaaagcu

SEQ ID NO: 739310 - RNA, 19 nt, Artificial Sequence
  Description of Artificial Sequence: Synthetic oligonucleotide
cugcggcuaugcagcccug

SEQ ID NO: 739311 - RNA, 19 nt, Artificial Sequence
  Description of Artificial Sequence: Synthetic oligonucleotide
cuaugaguccuggcaggcu

SEQ ID NO: 739312 - RNA, 19 nt, Artificial Sequence
  Description of Artificial Sequence: Synthetic oligonucleotide
ggucccaauuucggcccug

SEQ ID NO: 739313 - RNA, 19 nt, Artificial Sequence
  Description of Artificial Sequence: Synthetic oligonucleotide
ccuuuacuccugaggucca

SEQ ID NO: 739314 - RNA, 19 nt, Artificial Sequence
  Description of Artificial Sequence: Synthetic oligonucleotide
cacaaaggacauguuuauu

SEQ ID NO: 739315 - RNA, 19 nt, Artificial Sequence
  Description of Artificial Sequence: Synthetic oligonucleotide
caauccgguuguuguuuau

SEQ ID NO: 739316 - RNA, 19 nt, Artificial Sequence
  Description of Artificial Sequence: Synthetic oligonucleotide
uugugcgguucagguuaua

SEQ ID NO: 739317 - RNA, 19 nt, Artificial Sequence
  Description of Artificial Sequence: Synthetic oligonucleotide
auacggucccagacaucuu

SEQ ID NO: 739318 - RNA, 19 nt, Artificial Sequence
  Description of Artificial Sequence: Synthetic oligonucleotide
gcacuagaauggucauucu

SEQ ID NO: 739319 - RNA, 19 nt, Artificial Sequence
  Description of Artificial Sequence: Synthetic oligonucleotide
ggaagucuuccaugagauu

SEQ ID NO: 739320 - RNA, 19 nt, Artificial Sequence
  Description of Artificial Sequence: Synthetic oligonucleotide
caugggcguuccagugucu

SEQ ID NO: 739321 - RNA, 19 nt, Artificial Sequence
  Description of Artificial Sequence: Synthetic oligonucleotide
cguuuaccaccguauucaa

SEQ ID NO: 739322 - RNA, 19 nt, Artificial Sequence
  Description of Artificial Sequence: Synthetic oligonucleotide
cuaacccguuuaccaccgu

SEQ ID NO: 739323 - RNA, 19 nt, Artificial Sequence
  Description of Artificial Sequence: Synthetic oligonucleotide
cccgcuguccucuaucauu

SEQ ID NO: 739324 - RNA, 19 nt, Artificial Sequence
  Description of Artificial Sequence: Synthetic oligonucleotide
cgccggaacucaaagaguu

SEQ ID NO: 739325 - RNA, 19 nt, Artificial Sequence
  Description of Artificial Sequence: Synthetic oligonucleotide
cacguucauaguggcgaau

SEQ ID NO: 739326 - RNA, 19 nt, Artificial Sequence
  Description of Artificial Sequence: Synthetic oligonucleotide
ccaugagaaguaccuucau

SEQ ID NO: 739327 - RNA, 19 nt, Artificial Sequence
  Description of Artificial Sequence: Synthetic oligonucleotide
ccuugcggccucugaugaa

SEQ ID NO: 739328 - RNA, 19 nt, Artificial Sequence
  Description of Artificial Sequence: Synthetic oligonucleotide
ccaagucuccuugcggccu

SEQ ID NO: 739329 - RNA, 19 nt, Artificial Sequence
  Description of Artificial Sequence: Synthetic oligonucleotide
ggguuaccuggcacgaguu

SEQ ID NO: 739330 - RNA, 19 nt, Artificial Sequence
  Description of Artificial Sequence: Synthetic oligonucleotide
gggucccaauuucggcccu

SEQ ID NO: 739331 - RNA, 19 nt, Artificial Sequence
  Description of Artificial Sequence: Synthetic oligonucleotide
ccgggguaagagggaggcu

SEQ ID NO: 739332 - RNA, 19 nt, Artificial Sequence
  Description of Artificial Sequence: Synthetic oligonucleotide
uguaacauaggccaacagg

SEQ ID NO: 739333 - RNA, 19 nt, Artificial Sequence
  Description of Artificial Sequence: Synthetic oligonucleotide
ugugcuauggcucaauucc

SEQ ID NO: 739334 - RNA, 19 nt, Artificial Sequence
  Description of Artificial Sequence: Synthetic oligonucleotide
uaggccugaauccagaacg

SEQ ID NO: 739335 - RNA, 19 nt, Artificial Sequence
  Description of Artificial Sequence: Synthetic oligonucleotide
aacaguuuagccuggagca

SEQ ID NO: 739336 - RNA, 19 nt, Artificial Sequence
  Description of Artificial Sequence: Synthetic oligonucleotide
ucaauucccguuaacacag

SEQ ID NO: 739337 - RNA, 19 nt, Artificial Sequence
  Description of Artificial Sequence: Synthetic oligonucleotide
aauucccguuaacacagcc

SEQ ID NO: 739338 - RNA, 19 nt, Artificial Sequence
  Description of Artificial Sequence: Synthetic oligonucleotide
aaugaugcaggacuggcca

SEQ ID NO: 739339 - RNA, 19 nt, Artificial Sequence
  Description of Artificial Sequence: Synthetic oligonucleotide
aaccuaaggcuucggaagc

SEQ ID NO: 739340 - RNA, 19 nt, Artificial Sequence
  Description of Artificial Sequence: Synthetic oligonucleotide
aguguaugcggccaacagc

SEQ ID NO: 739341 - RNA, 19 nt, Artificial Sequence
  Description of Artificial Sequence: Synthetic oligonucleotide
guaacauaggccaacaggc

SEQ ID NO: 739342 - RNA, 19 nt, Artificial Sequence
  Description of Artificial Sequence: Synthetic oligonucleotide
uucccguuaacacagccag

SEQ ID NO: 739343 - RNA, 19 nt, Artificial Sequence
  Description of Artificial Sequence: Synthetic oligonucleotide
ucgaagugguaccaaaucc

SEQ ID NO: 739344 - RNA, 19 nt, Artificial Sequence
  Description of Artificial Sequence: Synthetic oligonucleotide
agauacguagugcacgugg

SEQ ID NO: 739345 - RNA, 19 nt, Artificial Sequence
  Description of Artificial Sequence: Synthetic oligonucleotide
uaacccucagaaaucagcc

SEQ ID NO: 739346 - RNA, 19 nt, Artificial Sequence
  Description of Artificial Sequence: Synthetic oligonucleotide
agggguaggacucacugac

SEQ ID NO: 739347 - RNA, 19 nt, Artificial Sequence
  Description of Artificial Sequence: Synthetic oligonucleotide
aucggaauaccucacccac

SEQ ID NO: 739348 - RNA, 19 nt, Artificial Sequence
  Description of Artificial Sequence: Synthetic oligonucleotide
uaaucggaauaccucaccc

SEQ ID NO: 739349 - RNA, 19 nt, Artificial Sequence
  Description of Artificial Sequence: Synthetic oligonucleotide
ugguccagaaguaagcggc

SEQ ID NO: 739350 - RNA, 19 nt, Artificial Sequence
  Description of Artificial Sequence: Synthetic oligonucleotide
ugaguuagugcugugagga

SEQ ID NO: 739351 - RNA, 19 nt, Artificial Sequence
  Description of Artificial Sequence: Synthetic oligonucleotide
agggauacggcccaguuug

SEQ ID NO: 739352 - RNA, 19 nt, Artificial Sequence
  Description of Artificial Sequence: Synthetic oligonucleotide
ucggacaacgcucaggaga

SEQ ID NO: 739353 - RNA, 19 nt, Artificial Sequence
  Description of Artificial Sequence: Synthetic oligonucleotide
ugagacaccgaguaucagc

SEQ ID NO: 739354 - RNA, 19 nt, Artificial Sequence
  Description of Artificial Sequence: Synthetic oligonucleotide
cugguuucgguguacaggc

SEQ ID NO: 739355 - RNA, 19 nt, Artificial Sequence
  Description of Artificial Sequence: Synthetic oligonucleotide
aaguguaugcggccaacag

SEQ ID NO: 739356 - RNA, 19 nt, Artificial Sequence
  Description of Artificial Sequence: Synthetic oligonucleotide
gaggauagcuccuucgcag

SEQ ID NO: 739357 - RNA, 19 nt, Artificial Sequence
  Description of Artificial Sequence: Synthetic oligonucleotide
uggaccagucacuagagcu

SEQ ID NO: 739358 - RNA, 19 nt, Artificial Sequence
  Description of Artificial Sequence: Synthetic oligonucleotide
uaccaaauccaucugcgcu

SEQ ID NO: 739359 - RNA, 19 nt, Artificial Sequence
  Description of Artificial Sequence: Synthetic oligonucleotide
caaccuaaggcuucggaag

SEQ ID NO: 739360 - RNA, 19 nt, Artificial Sequence
  Description of Artificial Sequence: Synthetic oligonucleotide
ucuggcaucggacaacgcu

SEQ ID NO: 739361 - RNA, 19 nt, Artificial Sequence
  Description of Artificial Sequence: Synthetic oligonucleotide
gaauaccucacccacugac

SEQ ID NO: 739362 - RNA, 19 nt, Artificial Sequence
  Description of Artificial Sequence: Synthetic oligonucleotide
uuuuagucacagaucuuca

SEQ ID NO: 739363 - RNA, 19 nt, Artificial Sequence
  Description of Artificial Sequence: Synthetic oligonucleotide
aaucggaauaccucaccca

SEQ ID NO: 739364 - RNA, 19 nt, Artificial Sequence
  Description of Artificial Sequence: Synthetic oligonucleotide
aacgaacucaucucugggu

SEQ ID NO: 739365 - RNA, 19 nt, Artificial Sequence
  Description of Artificial Sequence: Synthetic oligonucleotide
cuuuuagucacagaucuuc

SEQ ID NO: 739366 - RNA, 19 nt, Artificial Sequence
  Description of Artificial Sequence: Synthetic oligonucleotide
uaucauaaaggaagccuac

SEQ ID NO: 739367 - RNA, 19 nt, Artificial Sequence
  Description of Artificial Sequence: Synthetic oligonucleotide
gauagcagagcccggaaga

SEQ ID NO: 739368 - RNA, 19 nt, Artificial Sequence
  Description of Artificial Sequence: Synthetic oligonucleotide
gacaccgaguaucagccag

SEQ ID NO: 739369 - RNA, 19 nt, Artificial Sequence
  Description of Artificial Sequence: Synthetic oligonucleotide
ugcuggaccagucacuaga

SEQ ID NO: 739370 - RNA, 19 nt, Artificial Sequence
  Description of Artificial Sequence: Synthetic oligonucleotide
accuaaucggaauaccuca

SEQ ID NO: 739371 - RNA, 19 nt, Artificial Sequence
  Description of Artificial Sequence: Synthetic oligonucleotide
guugagucagguuccgagg

SEQ ID NO: 739372 - RNA, 19 nt, Artificial Sequence
  Description of Artificial Sequence: Synthetic oligonucleotide
gacgugccaagauacguag

SEQ ID NO: 739373 - RNA, 19 nt, Artificial Sequence
  Description of Artificial Sequence: Synthetic oligonucleotide
gagacaccgaguaucagcc

SEQ ID NO: 739374 - RNA, 19 nt, Artificial Sequence
  Description of Artificial Sequence: Synthetic oligonucleotide
ugccaagauacguagugca

SEQ ID NO: 739375 - RNA, 19 nt, Artificial Sequence
  Description of Artificial Sequence: Synthetic oligonucleotide
aguuagugcugugaggagg

SEQ ID NO: 739376 - RNA, 19 nt, Artificial Sequence
  Description of Artificial Sequence: Synthetic oligonucleotide
uuugcgaaguguucggggu

SEQ ID NO: 739377 - RNA, 19 nt, Artificial Sequence
  Description of Artificial Sequence: Synthetic oligonucleotide
gagggcaugacagagaaaa

SEQ ID NO: 739378 - RNA, 19 nt, Artificial Sequence
  Description of Artificial Sequence: Synthetic oligonucleotide
ugagacgugccaagauacg

SEQ ID NO: 739379 - RNA, 19 nt, Artificial Sequence
  Description of Artificial Sequence: Synthetic oligonucleotide
gauacguagugcacguggg

SEQ ID NO: 739380 - RNA, 19 nt, Artificial Sequence
  Description of Artificial Sequence: Synthetic oligonucleotide
aaggcuucggaagcuuccc

SEQ ID NO: 739381 - RNA, 19 nt, Artificial Sequence
  Description of Artificial Sequence: Synthetic oligonucleotide
guuugcgaaguguucgggg

SEQ ID NO: 739382 - RNA, 19 nt, Artificial Sequence
  Description of Artificial Sequence: Synthetic oligonucleotide
ucggauagcucuggcaucg

SEQ ID NO: 739383 - RNA, 19 nt, Artificial Sequence
  Description of Artificial Sequence: Synthetic oligonucleotide
aaguguucggggugucgac

SEQ ID NO: 739384 - RNA, 19 nt, Artificial Sequence
  Description of Artificial Sequence: Synthetic oligonucleotide
gaaggguagggucagugca

SEQ ID NO: 739385 - RNA, 19 nt, Artificial Sequence
  Description of Artificial Sequence: Synthetic oligonucleotide
ugcauaacccucagaaauc

SEQ ID NO: 739386 - RNA, 19 nt, Artificial Sequence
  Description of Artificial Sequence: Synthetic oligonucleotide
cacagaguaggcuuccggc

SEQ ID NO: 739387 - RNA, 19 nt, Artificial Sequence
  Description of Artificial Sequence: Synthetic oligonucleotide
aggggacucagccugaaca

SEQ ID NO: 739388 - RNA, 19 nt, Artificial Sequence
  Description of Artificial Sequence: Synthetic oligonucleotide
gaagccuacaagagcagcc

SEQ ID NO: 739389 - RNA, 19 nt, Artificial Sequence
  Description of Artificial Sequence: Synthetic oligonucleotide
guaggacucacugacucgg

SEQ ID NO: 739390 - RNA, 19 nt, Artificial Sequence
  Description of Artificial Sequence: Synthetic oligonucleotide
ccgaguaucagccaggcgc

SEQ ID NO: 739391 - RNA, 19 nt, Artificial Sequence
  Description of Artificial Sequence: Synthetic oligonucleotide
gaaguaagcggcgccacag

SEQ ID NO: 739392 - RNA, 19 nt, Artificial Sequence
  Description of Artificial Sequence: Synthetic oligonucleotide
cuaaucggaauaccucacc

SEQ ID NO: 739393 - RNA, 19 nt, Artificial Sequence
  Description of Artificial Sequence: Synthetic oligonucleotide
uauggcucaauucccguua

SEQ ID NO: 739394 - RNA, 19 nt, Artificial Sequence
  Description of Artificial Sequence: Synthetic oligonucleotide
auagcucuggcaucggaca

SEQ ID NO: 739395 - RNA, 19 nt, Artificial Sequence
  Description of Artificial Sequence: Synthetic oligonucleotide
ucuggggagauaucuccag

SEQ ID NO: 739396 - RNA, 19 nt, Artificial Sequence
  Description of Artificial Sequence: Synthetic oligonucleotide
acaaccuaaggcuucggaa

SEQ ID NO: 739397 - RNA, 19 nt, Artificial Sequence
  Description of Artificial Sequence: Synthetic oligonucleotide
ugaaggguagggucagugc

SEQ ID NO: 739398 - RNA, 19 nt, Artificial Sequence
  Description of Artificial Sequence: Synthetic oligonucleotide
guucauagaggcaagggga

SEQ ID NO: 739399 - RNA, 19 nt, Artificial Sequence
  Description of Artificial Sequence: Synthetic oligonucleotide
uccagaaguaagcggcgcc

SEQ ID NO: 739400 - RNA, 19 nt, Artificial Sequence
  Description of Artificial Sequence: Synthetic oligonucleotide
caaagcuuccggauagcag

SEQ ID NO: 739401 - RNA, 19 nt, Artificial Sequence
  Description of Artificial Sequence: Synthetic oligonucleotide
cuguaacuugcccaaggcc

SEQ ID NO: 739402 - RNA, 19 nt, Artificial Sequence
  Description of Artificial Sequence: Synthetic oligonucleotide
guaggcuuccggcagauga

SEQ ID NO: 739403 - RNA, 19 nt, Artificial Sequence
  Description of Artificial Sequence: Synthetic oligonucleotide
gguaccaaauccaucugcg

SEQ ID NO: 739404 - RNA, 19 nt, Artificial Sequence
  Description of Artificial Sequence: Synthetic oligonucleotide
cucaauucccguuaacaca

SEQ ID NO: 739405 - RNA, 19 nt, Artificial Sequence
  Description of Artificial Sequence: Synthetic oligonucleotide
guccaucguacacaguggg

SEQ ID NO: 739406 - RNA, 19 nt, Artificial Sequence
  Description of Artificial Sequence: Synthetic oligonucleotide
uaugcggccaacagccucu

SEQ ID NO: 739407 - RNA, 19 nt, Artificial Sequence
  Description of Artificial Sequence: Synthetic oligonucleotide
uggagcaccugugcuaugg

SEQ ID NO: 739408 - RNA, 19 nt, Artificial Sequence
  Description of Artificial Sequence: Synthetic oligonucleotide
gucacuagagcuccacuug

SEQ ID NO: 739409 - RNA, 19 nt, Artificial Sequence
  Description of Artificial Sequence: Synthetic oligonucleotide
ggagcuguaggccugaauc

SEQ ID NO: 739410 - RNA, 19 nt, Artificial Sequence
  Description of Artificial Sequence: Synthetic oligonucleotide
caguagcugaagcagcccg

SEQ ID NO: 739411 - RNA, 19 nt, Artificial Sequence
  Description of Artificial Sequence: Synthetic oligonucleotide
agaagccucccguccaacg

SEQ ID NO: 739412 - RNA, 19 nt, Artificial Sequence
  Description of Artificial Sequence: Synthetic oligonucleotide
cugaguuagugcugugagg

SEQ ID NO: 739413 - RNA, 19 nt, Artificial Sequence
  Description of Artificial Sequence: Synthetic oligonucleotide
gagagguucauagaggcaa

SEQ ID NO: 739414 - RNA, 19 nt, Artificial Sequence
  Description of Artificial Sequence: Synthetic oligonucleotide
aggccagucaucuggugag

SEQ ID NO: 739415 - RNA, 19 nt, Artificial Sequence
  Description of Artificial Sequence: Synthetic oligonucleotide
agcccuauaagggccaggg

SEQ ID NO: 739416 - RNA, 19 nt, Artificial Sequence
  Description of Artificial Sequence: Synthetic oligonucleotide
gucaucuggugagacaccg

SEQ ID NO: 739417 - RNA, 19 nt, Artificial Sequence
  Description of Artificial Sequence: Synthetic oligonucleotide
gguugagucagguuccgag

SEQ ID NO: 739418 - RNA, 19 nt, Artificial Sequence
  Description of Artificial Sequence: Synthetic oligonucleotide
guacaggccgggcaugugg

SEQ ID NO: 739419 - RNA, 19 nt, Artificial Sequence
  Description of Artificial Sequence: Synthetic oligonucleotide
acagaguaggcuuccggca

SEQ ID NO: 739420 - RNA, 19 nt, Artificial Sequence
  Description of Artificial Sequence: Synthetic oligonucleotide
agagacacacagcccgcac

SEQ ID NO: 739421 - RNA, 19 nt, Artificial Sequence
  Description of Artificial Sequence: Synthetic oligonucleotide
agcgugacaacagcaacag

SEQ ID NO: 739422 - RNA, 19 nt, Artificial Sequence
  Description of Artificial Sequence: Synthetic oligonucleotide
caggguuacaggugagacg

SEQ ID NO: 739423 - RNA, 19 nt, Artificial Sequence
  Description of Artificial Sequence: Synthetic oligonucleotide
gauagcucuggcaucggac

SEQ ID NO: 739424 - RNA, 19 nt, Artificial Sequence
  Description of Artificial Sequence: Synthetic oligonucleotide
gggcaugacagagaaaagg

SEQ ID NO: 739425 - RNA, 19 nt, Artificial Sequence
  Description of Artificial Sequence: Synthetic oligonucleotide
aagugguaccaaauccauc

SEQ ID NO: 739426 - RNA, 19 nt, Artificial Sequence
  Description of Artificial Sequence: Synthetic oligonucleotide
uccaucguacacagugggc

SEQ ID NO: 739427 - RNA, 19 nt, Artificial Sequence
  Description of Artificial Sequence: Synthetic oligonucleotide
gauuugguuccacuuucuc

SEQ ID NO: 739428 - RNA, 19 nt, Artificial Sequence
  Description of Artificial Sequence: Synthetic oligonucleotide
cccuauaagggccagggcc

SEQ ID NO: 739429 - RNA, 19 nt, Artificial Sequence
  Description of Artificial Sequence: Synthetic oligonucleotide
cucgaagugguaccaaauc

SEQ ID NO: 739430 - RNA, 19 nt, Artificial Sequence
  Description of Artificial Sequence: Synthetic oligonucleotide
aagcgugacaacagcaaca

SEQ ID NO: 739431 - RNA, 19 nt, Artificial Sequence
  Description of Artificial Sequence: Synthetic oligonucleotide
uggugagacaccgaguauc

SEQ ID NO: 739432 - RNA, 19 nt, Artificial Sequence
  Description of Artificial Sequence: Synthetic oligonucleotide
uguggaaccggcugaguua

SEQ ID NO: 739433 - RNA, 19 nt, Artificial Sequence
  Description of Artificial Sequence: Synthetic oligonucleotide
agcggcgccacagaguagg

SEQ ID NO: 739434 - RNA, 19 nt, Artificial Sequence
  Description of Artificial Sequence: Synthetic oligonucleotide
caguuugcgaaguguucgg

SEQ ID NO: 739435 - RNA, 19 nt, Artificial Sequence
  Description of Artificial Sequence: Synthetic oligonucleotide
uggcuuuuagucacagauc

SEQ ID NO: 739436 - RNA, 19 nt, Artificial Sequence
  Description of Artificial Sequence: Synthetic oligonucleotide
uucgcagucuccccucaug

SEQ ID NO: 739437 - RNA, 19 nt, Artificial Sequence
  Description of Artificial Sequence: Synthetic oligonucleotide
gcugaguuagugcugugag

SEQ ID NO: 739438 - RNA, 19 nt, Artificial Sequence
  Description of Artificial Sequence: Synthetic oligonucleotide
aagccuacaagagcagcca

SEQ ID NO: 739439 - RNA, 19 nt, Artificial Sequence
  Description of Artificial Sequence: Synthetic oligonucleotide
uccggcagaugaaggguag

SEQ ID NO: 739440 - RNA, 19 nt, Artificial Sequence
  Description of Artificial Sequence: Synthetic oligonucleotide
ucgguguacaggccgggca

SEQ ID NO: 739441 - RNA, 19 nt, Artificial Sequence
  Description of Artificial Sequence: Synthetic oligonucleotide
auagcugcgcacaaaggcu

SEQ ID NO: 739442 - RNA, 19 nt, Artificial Sequence
  Description of Artificial Sequence: Synthetic oligonucleotide
caucggacaacgcucagga

SEQ ID NO: 739443 - RNA, 19 nt, Artificial Sequence
  Description of Artificial Sequence: Synthetic oligonucleotide
uugcgaaguguucggggug

SEQ ID NO: 739444 - RNA, 19 nt, Artificial Sequence
  Description of Artificial Sequence: Synthetic oligonucleotide
cagaguaggcuuccggcag

SEQ ID NO: 739445 - RNA, 19 nt, Artificial Sequence
  Description of Artificial Sequence: Synthetic oligonucleotide
cacauagcugccuggccag

SEQ ID NO: 739446 - RNA, 19 nt, Artificial Sequence
  Description of Artificial Sequence: Synthetic oligonucleotide
gugagacgugccaagauac

SEQ ID NO: 739447 - RNA, 19 nt, Artificial Sequence
  Description of Artificial Sequence: Synthetic oligonucleotide
gggagauaucuccagggcc

SEQ ID NO: 739448 - RNA, 19 nt, Artificial Sequence
  Description of Artificial Sequence: Synthetic oligonucleotide
caagagacacacagcccgc

SEQ ID NO: 739449 - RNA, 19 nt, Artificial Sequence
  Description of Artificial Sequence: Synthetic oligonucleotide
cagaacgaagugcagguca

SEQ ID NO: 739450 - RNA, 19 nt, Artificial Sequence
  Description of Artificial Sequence: Synthetic oligonucleotide
aacacgugggugccaggca

SEQ ID NO: 739451 - RNA, 19 nt, Artificial Sequence
  Description of Artificial Sequence: Synthetic oligonucleotide
aguuugcgaaguguucggg

SEQ ID NO: 739452 - RNA, 19 nt, Artificial Sequence
  Description of Artificial Sequence: Synthetic oligonucleotide
guaucauaaaggaagccua

SEQ ID NO: 739453 - RNA, 19 nt, Artificial Sequence
  Description of Artificial Sequence: Synthetic oligonucleotide
aaguaagcggcgccacaga

SEQ ID NO: 739454 - RNA, 19 nt, Artificial Sequence
  Description of Artificial Sequence: Synthetic oligonucleotide
gaccagucacuagagcucc

SEQ ID NO: 739455 - RNA, 19 nt, Artificial Sequence
  Description of Artificial Sequence: Synthetic oligonucleotide
gaccuaaucggaauaccuc

SEQ ID NO: 739456 - RNA, 19 nt, Artificial Sequence
  Description of Artificial Sequence: Synthetic oligonucleotide
aguguucggggugucgacg

SEQ ID NO: 739457 - RNA, 19 nt, Artificial Sequence
  Description of Artificial Sequence: Synthetic oligonucleotide
caucucacccagcucucgg

SEQ ID NO: 739458 - RNA, 19 nt, Artificial Sequence
  Description of Artificial Sequence: Synthetic oligonucleotide
caguuuagccuggagcacc

SEQ ID NO: 739459 - RNA, 19 nt, Artificial Sequence
  Description of Artificial Sequence: Synthetic oligonucleotide
agaacgaagugcaggucag

SEQ ID NO: 739460 - RNA, 19 nt, Artificial Sequence
  Description of Artificial Sequence: Synthetic oligonucleotide
guuuucuagggcacugccc

SEQ ID NO: 739461 - RNA, 19 nt, Artificial Sequence
  Description of Artificial Sequence: Synthetic oligonucleotide
guuucgguguacaggccgg

SEQ ID NO: 739462 - RNA, 19 nt, Artificial Sequence
  Description of Artificial Sequence: Synthetic oligonucleotide
augaaggguagggucagug

SEQ ID NO: 739463 - RNA, 19 nt, Artificial Sequence
  Description of Artificial Sequence: Synthetic oligonucleotide
guggaaccggcugaguuag

SEQ ID NO: 739464 - RNA, 19 nt, Artificial Sequence
  Description of Artificial Sequence: Synthetic oligonucleotide
guaucagccaggcgcgcag

SEQ ID NO: 739465 - RNA, 19 nt, Artificial Sequence
  Description of Artificial Sequence: Synthetic oligonucleotide
ucggaauaccucacccacu

SEQ ID NO: 739466 - RNA, 19 nt, Artificial Sequence
  Description of Artificial Sequence: Synthetic oligonucleotide
cugugcuauggcucaauuc

SEQ ID NO: 739467 - RNA, 19 nt, Artificial Sequence
  Description of Artificial Sequence: Synthetic oligonucleotide
gaguccguuccucagggaa

SEQ ID NO: 739468 - RNA, 19 nt, Artificial Sequence
  Description of Artificial Sequence: Synthetic oligonucleotide
gaagccucccguccaacga

SEQ ID NO: 739469 - RNA, 19 nt, Artificial Sequence
  Description of Artificial Sequence: Synthetic oligonucleotide
ccaagauacguagugcacg

SEQ ID NO: 739470 - RNA, 19 nt, Artificial Sequence
  Description of Artificial Sequence: Synthetic oligonucleotide
aggauagcuccuucgcagu

SEQ ID NO: 739471 - RNA, 19 nt, Artificial Sequence
  Description of Artificial Sequence: Synthetic oligonucleotide
gaaguguucggggugucga

SEQ ID NO: 739472 - RNA, 19 nt, Artificial Sequence
  Description of Artificial Sequence: Synthetic oligonucleotide
auacguagugcacgugggu

SEQ ID NO: 739473 - RNA, 19 nt, Artificial Sequence
  Description of Artificial Sequence: Synthetic oligonucleotide
ggaagaguggguguggaac

SEQ ID NO: 739474 - RNA, 19 nt, Artificial Sequence
  Description of Artificial Sequence: Synthetic oligonucleotide
gagagaagccucccgucca

SEQ ID NO: 739475 - RNA, 19 nt, Artificial Sequence
  Description of Artificial Sequence: Synthetic oligonucleotide
ccaguuugcgaaguguucg

SEQ ID NO: 739476 - RNA, 19 nt, Artificial Sequence
  Description of Artificial Sequence: Synthetic oligonucleotide
ggagaagcgugacaacagc

SEQ ID NO: 739477 - RNA, 19 nt, Artificial Sequence
  Description of Artificial Sequence: Synthetic oligonucleotide
ugccaacaguuuagccugg

SEQ ID NO: 739478 - RNA, 19 nt, Artificial Sequence
  Description of Artificial Sequence: Synthetic oligonucleotide
gacucggauagcucuggca

SEQ ID NO: 739479 - RNA, 19 nt, Artificial Sequence
  Description of Artificial Sequence: Synthetic oligonucleotide
guuacaggugagacgugcc

SEQ ID NO: 739480 - RNA, 19 nt, Artificial Sequence
  Description of Artificial Sequence: Synthetic oligonucleotide
aagccucccguccaacgaa

SEQ ID NO: 739481 - RNA, 19 nt, Artificial Sequence
  Description of Artificial Sequence: Synthetic oligonucleotide
auacggcccaguuugcgaa

SEQ ID NO: 739482 - RNA, 19 nt, Artificial Sequence
  Description of Artificial Sequence: Synthetic oligonucleotide
gguauugaccccagggcag

SEQ ID NO: 739483 - RNA, 19 nt, Artificial Sequence
  Description of Artificial Sequence: Synthetic oligonucleotide
guguucggggugucgacgc

SEQ ID NO: 739484 - RNA, 19 nt, Artificial Sequence
  Description of Artificial Sequence: Synthetic oligonucleotide
uuucgguguacaggccggg

SEQ ID NO: 739485 - RNA, 19 nt, Artificial Sequence
  Description of Artificial Sequence: Synthetic oligonucleotide
ugacucggauagcucuggc

SEQ ID NO: 739486 - RNA, 19 nt, Artificial Sequence
  Description of Artificial Sequence: Synthetic oligonucleotide
caacacgugggugccaggc

SEQ ID NO: 739487 - RNA, 19 nt, Artificial Sequence
  Description of Artificial Sequence: Synthetic oligonucleotide
ggcaugacagagaaaagga

SEQ ID NO: 739488 - RNA, 19 nt, Artificial Sequence
  Description of Artificial Sequence: Synthetic oligonucleotide
aagauacguagugcacgug

SEQ ID NO: 739489 - RNA, 19 nt, Artificial Sequence
  Description of Artificial Sequence: Synthetic oligonucleotide
cugagagaagccucccguc

SEQ ID NO: 739490 - RNA, 19 nt, Artificial Sequence
  Description of Artificial Sequence: Synthetic oligonucleotide
caggcuacacgguccucgg

SEQ ID NO: 739491 - RNA, 19 nt, Artificial Sequence
  Description of Artificial Sequence: Synthetic oligonucleotide
uccggauagcagagcccgg

SEQ ID NO: 739492 - RNA, 19 nt, Artificial Sequence
  Description of Artificial Sequence: Synthetic oligonucleotide
gccggggccgaccuaaucg

SEQ ID NO: 739493 - RNA, 19 nt, Artificial Sequence
  Description of Artificial Sequence: Synthetic oligonucleotide
gguuacaggugagacgugc

SEQ ID NO: 739494 - RNA, 19 nt, Artificial Sequence
  Description of Artificial Sequence: Synthetic oligonucleotide
agaagcgugacaacagcaa

SEQ ID NO: 739495 - RNA, 19 nt, Artificial Sequence
  Description of Artificial Sequence: Synthetic oligonucleotide
ggguauugaccccagggca

SEQ ID NO: 739496 - RNA, 19 nt, Artificial Sequence
  Description of Artificial Sequence: Synthetic oligonucleotide
aggcgcgcagcagugcugc

SEQ ID NO: 739497 - RNA, 19 nt, Artificial Sequence
  Description of Artificial Sequence: Synthetic oligonucleotide
agggaaucugcugcaaaga

SEQ ID NO: 739498 - RNA, 19 nt, Artificial Sequence
  Description of Artificial Sequence: Synthetic oligonucleotide
gccuguaacuugcccaagg

SEQ ID NO: 739499 - RNA, 19 nt, Artificial Sequence
  Description of Artificial Sequence: Synthetic oligonucleotide
uuccggcagaugaagggua

SEQ ID NO: 739500 - RNA, 19 nt, Artificial Sequence
  Description of Artificial Sequence: Synthetic oligonucleotide
uacguagugcacguggguu

SEQ ID NO: 739501 - RNA, 19 nt, Artificial Sequence
  Description of Artificial Sequence: Synthetic oligonucleotide
agaguaggcuuccggcaga

SEQ ID NO: 739502 - RNA, 19 nt, Artificial Sequence
  Description of Artificial Sequence: Synthetic oligonucleotide
accgaguaucagccaggcg

SEQ ID NO: 739503 - RNA, 19 nt, Artificial Sequence
  Description of Artificial Sequence: Synthetic oligonucleotide
ugcgaaguguucggggugu

SEQ ID NO: 739504 - RNA, 19 nt, Artificial Sequence
  Description of Artificial Sequence: Synthetic oligonucleotide
auucccguuaacacagcca

SEQ ID NO: 739505 - RNA, 19 nt, Artificial Sequence
  Description of Artificial Sequence: Synthetic oligonucleotide
uguaugcggccaacagccu

SEQ ID NO: 739506 - RNA, 19 nt, Artificial Sequence
  Description of Artificial Sequence: Synthetic oligonucleotide
ucccguuaacacagccagc

SEQ ID NO: 739507 - RNA, 19 nt, Artificial Sequence
  Description of Artificial Sequence: Synthetic oligonucleotide
cacaacacgugggugccag

SEQ ID NO: 739508 - RNA, 19 nt, Artificial Sequence
  Description of Artificial Sequence: Synthetic oligonucleotide
uacacgguccucgggacuc

SEQ ID NO: 739509 - RNA, 19 nt, Artificial Sequence
  Description of Artificial Sequence: Synthetic oligonucleotide
gugccaagauacguagugc

SEQ ID NO: 739510 - RNA, 19 nt, Artificial Sequence
  Description of Artificial Sequence: Synthetic oligonucleotide
aagcccuauaagggccagg

SEQ ID NO: 739511 - RNA, 19 nt, Artificial Sequence
  Description of Artificial Sequence: Synthetic oligonucleotide
cugacucggauagcucugg

SEQ ID NO: 739512 - RNA, 19 nt, Artificial Sequence
  Description of Artificial Sequence: Synthetic oligonucleotide
guaugcggccaacagccuc

SEQ ID NO: 739513 - RNA, 19 nt, Artificial Sequence
  Description of Artificial Sequence: Synthetic oligonucleotide
guauugaccccagggcagc

SEQ ID NO: 739514 - RNA, 19 nt, Artificial Sequence
  Description of Artificial Sequence: Synthetic oligonucleotide
aguaguggcagcagggaua

SEQ ID NO: 739515 - RNA, 19 nt, Artificial Sequence
  Description of Artificial Sequence: Synthetic oligonucleotide
ggguaggacucacugacuc

SEQ ID NO: 739516 - RNA, 19 nt, Artificial Sequence
  Description of Artificial Sequence: Synthetic oligonucleotide
acguagugcacguggguuu

SEQ ID NO: 739517 - RNA, 19 nt, Artificial Sequence
  Description of Artificial Sequence: Synthetic oligonucleotide
acaacacgugggugccagg

SEQ ID NO: 739518 - RNA, 19 nt, Artificial Sequence
  Description of Artificial Sequence: Synthetic oligonucleotide
ggaaagggaaucugcugca

SEQ ID NO: 739519 - RNA, 19 nt, Artificial Sequence
  Description of Artificial Sequence: Synthetic oligonucleotide
aucggacaacgcucaggag

SEQ ID NO: 739520 - RNA, 19 nt, Artificial Sequence
  Description of Artificial Sequence: Synthetic oligonucleotide
acuagggacaggccucgaa

SEQ ID NO: 739521 - RNA, 19 nt, Artificial Sequence
  Description of Artificial Sequence: Synthetic oligonucleotide
caagauacguagugcacgu

SEQ ID NO: 739522 - RNA, 19 nt, Artificial Sequence
  Description of Artificial Sequence: Synthetic oligonucleotide
ccucgggacucccagagag

SEQ ID NO: 739523 - RNA, 19 nt, Artificial Sequence
  Description of Artificial Sequence: Synthetic oligonucleotide
cucgggacucccagagagc

SEQ ID NO: 739524 - RNA, 19 nt, Artificial Sequence
  Description of Artificial Sequence: Synthetic oligonucleotide
ucccguccaacgaacucau

SEQ ID NO: 739525 - RNA, 19 nt, Artificial Sequence
  Description of Artificial Sequence: Synthetic oligonucleotide
aggugagacgugccaagau

SEQ ID NO: 739526 - RNA, 19 nt, Artificial Sequence
  Description of Artificial Sequence: Synthetic oligonucleotide
aacgaccagcagccuccag

SEQ ID NO: 739527 - RNA, 19 nt, Artificial Sequence
  Description of Artificial Sequence: Synthetic oligonucleotide
uagcugaagcagcccgcug

SEQ ID NO: 739528 - RNA, 19 nt, Artificial Sequence
  Description of Artificial Sequence: Synthetic oligonucleotide
cgaguaucagccaggcgcg

SEQ ID NO: 739529 - RNA, 19 nt, Artificial Sequence
  Description of Artificial Sequence: Synthetic oligonucleotide
ccuaaucggaauaccucac

SEQ ID NO: 739530 - RNA, 19 nt, Artificial Sequence
  Description of Artificial Sequence: Synthetic oligonucleotide
gggagaagcgugacaacag

SEQ ID NO: 739531 - RNA, 19 nt, Artificial Sequence
  Description of Artificial Sequence: Synthetic oligonucleotide
gcuucggaagcuucccacc

SEQ ID NO: 739532 - RNA, 19 nt, Artificial Sequence
  Description of Artificial Sequence: Synthetic oligonucleotide
uguucggggugucgacgcu

SEQ ID NO: 739533 - RNA, 19 nt, Artificial Sequence
  Description of Artificial Sequence: Synthetic oligonucleotide
agagaagccucccguccaa

SEQ ID NO: 739534 - RNA, 19 nt, Artificial Sequence
  Description of Artificial Sequence: Synthetic oligonucleotide
aguaucagccaggcgcgca

SEQ ID NO: 739535 - RNA, 19 nt, Artificial Sequence
  Description of Artificial Sequence: Synthetic oligonucleotide
caucugcgcuucagcaaag

SEQ ID NO: 739536 - RNA, 19 nt, Artificial Sequence
  Description of Artificial Sequence: Synthetic oligonucleotide
cucagccuuggaucccagc

SEQ ID NO: 739537 - RNA, 19 nt, Artificial Sequence
  Description of Artificial Sequence: Synthetic oligonucleotide
cacccacuccaaaagggga

SEQ ID NO: 739538 - RNA, 19 nt, Artificial Sequence
  Description of Artificial Sequence: Synthetic oligonucleotide
uggcucaauucccguuaac

SEQ ID NO: 739539 - RNA, 19 nt, Artificial Sequence
  Description of Artificial Sequence: Synthetic oligonucleotide
auggcucaauucccguuaa

SEQ ID NO: 739540 - RNA, 19 nt, Artificial Sequence
  Description of Artificial Sequence: Synthetic oligonucleotide
gguccagaaguaagcggcg

SEQ ID NO: 739541 - RNA, 19 nt, Artificial Sequence
  Description of Artificial Sequence: Synthetic oligonucleotide
uucgguguacaggccgggc

SEQ ID NO: 739542 - RNA, 19 nt, Artificial Sequence
  Description of Artificial Sequence: Synthetic oligonucleotide
caccgaguaucagccaggc

SEQ ID NO: 739543 - RNA, 19 nt, Artificial Sequence
  Description of Artificial Sequence: Synthetic oligonucleotide
cgugccaagauacguagug

SEQ ID NO: 739544 - RNA, 19 nt, Artificial Sequence
  Description of Artificial Sequence: Synthetic oligonucleotide
cagugggcagccagccggg

SEQ ID NO: 739545 - RNA, 19 nt, Artificial Sequence
  Description of Artificial Sequence: Synthetic oligonucleotide
ggaaccggcugaguuagug

SEQ ID NO: 739546 - RNA, 19 nt, Artificial Sequence
  Description of Artificial Sequence: Synthetic oligonucleotide
gagacgugccaagauacgu

SEQ ID NO: 739547 - RNA, 19 nt, Artificial Sequence
  Description of Artificial Sequence: Synthetic oligonucleotide
ggauacggcccaguuugcg

SEQ ID NO: 739548 - RNA, 19 nt, Artificial Sequence
  Description of Artificial Sequence: Synthetic oligonucleotide
gaccaaucuggggagauau

SEQ ID NO: 739549 - RNA, 19 nt, Artificial Sequence
  Description of Artificial Sequence: Synthetic oligonucleotide
ggugagacgugccaagaua

SEQ ID NO: 739550 - RNA, 19 nt, Artificial Sequence
  Description of Artificial Sequence: Synthetic oligonucleotide
aggaagaguggguguggaa

SEQ ID NO: 739551 - RNA, 19 nt, Artificial Sequence
  Description of Artificial Sequence: Synthetic oligonucleotide
ggcuucggaagcuucccac

SEQ ID NO: 739552 - RNA, 19 nt, Artificial Sequence
  Description of Artificial Sequence: Synthetic oligonucleotide
agacaccgaguaucagcca

SEQ ID NO: 739553 - RNA, 19 nt, Artificial Sequence
  Description of Artificial Sequence: Synthetic oligonucleotide
cagaaguaagcggcgccac

SEQ ID NO: 739554 - RNA, 19 nt, Artificial Sequence
  Description of Artificial Sequence: Synthetic oligonucleotide
guggcggaggccacccugg

SEQ ID NO: 739555 - RNA, 19 nt, Artificial Sequence
  Description of Artificial Sequence: Synthetic oligonucleotide
ccgguugauggcuucccgg

SEQ ID NO: 739556 - RNA, 19 nt, Artificial Sequence
  Description of Artificial Sequence: Synthetic oligonucleotide
uguacaggccgggcaugug

SEQ ID NO: 739557 - RNA, 19 nt, Artificial Sequence
  Description of Artificial Sequence: Synthetic oligonucleotide
guggcagcagggauacggc

SEQ ID NO: 739558 - RNA, 19 nt, Artificial Sequence
  Description of Artificial Sequence: Synthetic oligonucleotide
acaagcccuauaagggcca

SEQ ID NO: 739559 - RNA, 19 nt, Artificial Sequence
  Description of Artificial Sequence: Synthetic oligonucleotide
gaacucaucucugggugcu

SEQ ID NO: 739560 - RNA, 19 nt, Artificial Sequence
  Description of Artificial Sequence: Synthetic oligonucleotide
aaacgaccagcagccucca

SEQ ID NO: 739561 - RNA, 19 nt, Artificial Sequence
  Description of Artificial Sequence: Synthetic oligonucleotide
cuucagugagaggcccugc

SEQ ID NO: 739562 - RNA, 19 nt, Artificial Sequence
  Description of Artificial Sequence: Synthetic oligonucleotide
ggugagacaccgaguauca

SEQ ID NO: 739563 - RNA, 19 nt, Artificial Sequence
  Description of Artificial Sequence: Synthetic oligonucleotide
ggagauaucuccagggccu

SEQ ID NO: 739564 - RNA, 19 nt, Artificial Sequence
  Description of Artificial Sequence: Synthetic oligonucleotide
ccacagaguaggcuuccgg

SEQ ID NO: 739565 - RNA, 19 nt, Artificial Sequence
  Description of Artificial Sequence: Synthetic oligonucleotide
acccaaguguaugcggcca

SEQ ID NO: 739566 - RNA, 19 nt, Artificial Sequence
  Description of Artificial Sequence: Synthetic oligonucleotide
uagugcacguggguuuggu

SEQ ID NO: 739567 - RNA, 19 nt, Artificial Sequence
  Description of Artificial Sequence: Synthetic oligonucleotide
cggaauaccucacccacug

SEQ ID NO: 739568 - RNA, 19 nt, Artificial Sequence
  Description of Artificial Sequence: Synthetic oligonucleotide
agccggggccgaccuaauc

SEQ ID NO: 739569 - RNA, 19 nt, Artificial Sequence
  Description of Artificial Sequence: Synthetic oligonucleotide
ggauggggcucacgguggg

SEQ ID NO: 739570 - RNA, 19 nt, Artificial Sequence
  Description of Artificial Sequence: Synthetic oligonucleotide
agacgugccaagauacgua

SEQ ID NO: 739571 - RNA, 19 nt, Artificial Sequence
  Description of Artificial Sequence: Synthetic oligonucleotide
acacgguccucgggacucc

SEQ ID NO: 739572 - RNA, 19 nt, Artificial Sequence
  Description of Artificial Sequence: Synthetic oligonucleotide
cagggaugccaacaguuua

SEQ ID NO: 739573 - RNA, 19 nt, Artificial Sequence
  Description of Artificial Sequence: Synthetic oligonucleotide
caaguguaugcggccaaca

SEQ ID NO: 739574 - RNA, 19 nt, Artificial Sequence
  Description of Artificial Sequence: Synthetic oligonucleotide
ccaugcugagagaagccuc

SEQ ID NO: 739575 - RNA, 19 nt, Artificial Sequence
  Description of Artificial Sequence: Synthetic oligonucleotide
ccaucguacacagugggca

SEQ ID NO: 739576 - RNA, 19 nt, Artificial Sequence
  Description of Artificial Sequence: Synthetic oligonucleotide
gugagacaccgaguaucag

SEQ ID NO: 739577 - RNA, 19 nt, Artificial Sequence
  Description of Artificial Sequence: Synthetic oligonucleotide
gggcccguuuucuagggca

SEQ ID NO: 739578 - RNA, 19 nt, Artificial Sequence
  Description of Artificial Sequence: Synthetic oligonucleotide
guagugcacguggguuugg

SEQ ID NO: 739579 - RNA, 19 nt, Artificial Sequence
  Description of Artificial Sequence: Synthetic oligonucleotide
ugcuuccacaagcccuaua

SEQ ID NO: 739580 - RNA, 19 nt, Artificial Sequence
  Description of Artificial Sequence: Synthetic oligonucleotide
cugcacuagggacaggccu

SEQ ID NO: 739581 - RNA, 19 nt, Artificial Sequence
  Description of Artificial Sequence: Synthetic oligonucleotide
gcuacacgguccucgggac

SEQ ID NO: 739582 - RNA, 19 nt, Artificial Sequence
  Description of Artificial Sequence: Synthetic oligonucleotide
aggccugaauccagaacga

SEQ ID NO: 739583 - RNA, 19 nt, Artificial Sequence
  Description of Artificial Sequence: Synthetic oligonucleotide
agucuccccucaugccaug

SEQ ID NO: 739584 - RNA, 19 nt, Artificial Sequence
  Description of Artificial Sequence: Synthetic oligonucleotide
caacagccucuucuagcuc

SEQ ID NO: 739585 - RNA, 19 nt, Artificial Sequence
  Description of Artificial Sequence: Synthetic oligonucleotide
gcuucccggcacaagagac

SEQ ID NO: 739586 - RNA, 19 nt, Artificial Sequence
  Description of Artificial Sequence: Synthetic oligonucleotide
cccguuaacacagccagca

SEQ ID NO: 739587 - RNA, 19 nt, Artificial Sequence
  Description of Artificial Sequence: Synthetic oligonucleotide
uauaagggccagggcccgu

SEQ ID NO: 739588 - RNA, 19 nt, Artificial Sequence
  Description of Artificial Sequence: Synthetic oligonucleotide
cuucggaagcuucccaccu

SEQ ID NO: 739589 - RNA, 19 nt, Artificial Sequence
  Description of Artificial Sequence: Synthetic oligonucleotide
ggguuuggugguccuggug

SEQ ID NO: 739590 - RNA, 19 nt, Artificial Sequence
  Description of Artificial Sequence: Synthetic oligonucleotide
cccgcacuagggcugcugg

SEQ ID NO: 739591 - RNA, 19 nt, Artificial Sequence
  Description of Artificial Sequence: Synthetic oligonucleotide
auagaggcaaggggagguu

SEQ ID NO: 739592 - RNA, 19 nt, Artificial Sequence
  Description of Artificial Sequence: Synthetic oligonucleotide
gccaagauacguagugcac

SEQ ID NO: 739593 - RNA, 19 nt, Artificial Sequence
  Description of Artificial Sequence: Synthetic oligonucleotide
ucccggcacaagagacaca

SEQ ID NO: 739594 - RNA, 19 nt, Artificial Sequence
  Description of Artificial Sequence: Synthetic oligonucleotide
ugucgacgcugcggucugg

SEQ ID NO: 739595 - RNA, 19 nt, Artificial Sequence
  Description of Artificial Sequence: Synthetic oligonucleotide
agccuguaacuugcccaag

SEQ ID NO: 739596 - RNA, 19 nt, Artificial Sequence
  Description of Artificial Sequence: Synthetic oligonucleotide
cagccacaacacgugggug

SEQ ID NO: 739597 - RNA, 19 nt, Artificial Sequence
  Description of Artificial Sequence: Synthetic oligonucleotide
ccggaagaaggggaggcag

SEQ ID NO: 739598 - RNA, 19 nt, Artificial Sequence
  Description of Artificial Sequence: Synthetic oligonucleotide
aagaggcacgaggcccaga

SEQ ID NO: 739599 - RNA, 19 nt, Artificial Sequence
  Description of Artificial Sequence: Synthetic oligonucleotide
cacagcccgcacuagggcu

SEQ ID NO: 739600 - RNA, 19 nt, Artificial Sequence
  Description of Artificial Sequence: Synthetic oligonucleotide
ccgaccuaaucggaauacc

SEQ ID NO: 739601 - RNA, 19 nt, Artificial Sequence
  Description of Artificial Sequence: Synthetic oligonucleotide
uggaaccggcugaguuagu

SEQ ID NO: 739602 - RNA, 19 nt, Artificial Sequence
  Description of Artificial Sequence: Synthetic oligonucleotide
gccgaccuaaucggaauac

SEQ ID NO: 739603 - RNA, 19 nt, Artificial Sequence
  Description of Artificial Sequence: Synthetic oligonucleotide
ggcuucccggcacaagaga

SEQ ID NO: 739604 - RNA, 19 nt, Artificial Sequence
  Description of Artificial Sequence: Synthetic oligonucleotide
ggaauaccucacccacuga

SEQ ID NO: 739605 - RNA, 19 nt, Artificial Sequence
  Description of Artificial Sequence: Synthetic oligonucleotide
ccguuccucagggaagucc

SEQ ID NO: 739606 - RNA, 19 nt, Artificial Sequence
  Description of Artificial Sequence: Synthetic oligonucleotide
guagcugaagcagcccgcu

SEQ ID NO: 739607 - RNA, 19 nt, Artificial Sequence
  Description of Artificial Sequence: Synthetic oligonucleotide
agguugagucagguuccga

SEQ ID NO: 739608 - RNA, 19 nt, Artificial Sequence
  Description of Artificial Sequence: Synthetic oligonucleotide
guuuagccuggagcaccug

SEQ ID NO: 739609 - RNA, 19 nt, Artificial Sequence
  Description of Artificial Sequence: Synthetic oligonucleotide
agaccaaucuggggagaua

SEQ ID NO: 739610 - RNA, 19 nt, Artificial Sequence
  Description of Artificial Sequence: Synthetic oligonucleotide
gagaccaaucuggggagau

SEQ ID NO: 739611 - RNA, 19 nt, Artificial Sequence
  Description of Artificial Sequence: Synthetic oligonucleotide
caccuguaacauaggccaa

SEQ ID NO: 739612 - RNA, 19 nt, Artificial Sequence
  Description of Artificial Sequence: Synthetic oligonucleotide
uggccagggguaggacuca

SEQ ID NO: 739613 - RNA, 19 nt, Artificial Sequence
  Description of Artificial Sequence: Synthetic oligonucleotide
ccguccaacgaacucaucu

SEQ ID NO: 739614 - RNA, 19 nt, Artificial Sequence
  Description of Artificial Sequence: Synthetic oligonucleotide
cuauggcucaauucccguu

SEQ ID NO: 739615 - RNA, 19 nt, Artificial Sequence
  Description of Artificial Sequence: Synthetic oligonucleotide
cacaaagugcuggaccagu

SEQ ID NO: 739616 - RNA, 19 nt, Artificial Sequence
  Description of Artificial Sequence: Synthetic oligonucleotide
aagcggcgccacagaguag

SEQ ID NO: 739617 - RNA, 19 nt, Artificial Sequence
  Description of Artificial Sequence: Synthetic oligonucleotide
gauggggcucacgguggga

SEQ ID NO: 739618 - RNA, 19 nt, Artificial Sequence
  Description of Artificial Sequence: Synthetic oligonucleotide
acgugccaagauacguagu

SEQ ID NO: 739619 - RNA, 19 nt, Artificial Sequence
  Description of Artificial Sequence: Synthetic oligonucleotide
gcccuauaagggccagggc

SEQ ID NO: 739620 - RNA, 19 nt, Artificial Sequence
  Description of Artificial Sequence: Synthetic oligonucleotide
ccgagggcaugacagagaa

SEQ ID NO: 739621 - RNA, 19 nt, Artificial Sequence
  Description of Artificial Sequence: Synthetic oligonucleotide
ggggugucgacgcugcggu

SEQ ID NO: 739622 - RNA, 19 nt, Artificial Sequence
  Description of Artificial Sequence: Synthetic oligonucleotide
ccccucaugccaugcugag

SEQ ID NO: 739623 - RNA, 19 nt, Artificial Sequence
  Description of Artificial Sequence: Synthetic oligonucleotide
gccucgaagugguaccaaa

SEQ ID NO: 739624 - RNA, 19 nt, Artificial Sequence
  Description of Artificial Sequence: Synthetic oligonucleotide
gccagucaucuggugagac

SEQ ID NO: 739625 - RNA, 19 nt, Artificial Sequence
  Description of Artificial Sequence: Synthetic oligonucleotide
ggucagugcacaggcuaca

SEQ ID NO: 739626 - RNA, 19 nt, Artificial Sequence
  Description of Artificial Sequence: Synthetic oligonucleotide
auaggccaacaggccacaa

SEQ ID NO: 739627 - RNA, 19 nt, Artificial Sequence
  Description of Artificial Sequence: Synthetic oligonucleotide
ugcggccaacagccucuuc

SEQ ID NO: 739628 - RNA, 19 nt, Artificial Sequence
  Description of Artificial Sequence: Synthetic oligonucleotide
ccacaaagugcuggaccag

SEQ ID NO: 739629 - RNA, 19 nt, Artificial Sequence
  Description of Artificial Sequence: Synthetic oligonucleotide
ggcucacggugggagacac

SEQ ID NO: 739630 - RNA, 19 nt, Artificial Sequence
  Description of Artificial Sequence: Synthetic oligonucleotide
ccaaguguaugcggccaac

SEQ ID NO: 739631 - RNA, 19 nt, Artificial Sequence
  Description of Artificial Sequence: Synthetic oligonucleotide
cagucacuagagcuccacu

SEQ ID NO: 739632 - RNA, 19 nt, Artificial Sequence
  Description of Artificial Sequence: Synthetic oligonucleotide
ccaaaaggggacucagccu

SEQ ID NO: 739633 - RNA, 19 nt, Artificial Sequence
  Description of Artificial Sequence: Synthetic oligonucleotide
cccgacagccaugcaaaug

SEQ ID NO: 739634 - RNA, 19 nt, Artificial Sequence
  Description of Artificial Sequence: Synthetic oligonucleotide
cccguuuucuagggcacug

SEQ ID NO: 739635 - RNA, 19 nt, Artificial Sequence
  Description of Artificial Sequence: Synthetic oligonucleotide
ccucccguccaacgaacuc

SEQ ID NO: 739636 - RNA, 19 nt, Artificial Sequence
  Description of Artificial Sequence: Synthetic oligonucleotide
ggcccguuuucuagggcac

SEQ ID NO: 739637 - RNA, 19 nt, Artificial Sequence
  Description of Artificial Sequence: Synthetic oligonucleotide
agguggcggaggccacccu

SEQ ID NO: 739638 - RNA, 19 nt, Artificial Sequence
  Description of Artificial Sequence: Synthetic oligonucleotide
ccggcagaugaaggguagg

SEQ ID NO: 739639 - RNA, 19 nt, Artificial Sequence
  Description of Artificial Sequence: Synthetic oligonucleotide
cguagugcacguggguuug

SEQ ID NO: 739640 - RNA, 19 nt, Artificial Sequence
  Description of Artificial Sequence: Synthetic oligonucleotide
cgaccuaaucggaauaccu

SEQ ID NO: 739641 - RNA, 19 nt, Artificial Sequence
  Description of Artificial Sequence: Synthetic oligonucleotide
gggauacggcccaguuugc

SEQ ID NO: 739642 - RNA, 19 nt, Artificial Sequence
  Description of Artificial Sequence: Synthetic oligonucleotide
cuacacgguccucgggacu

SEQ ID NO: 739643 - RNA, 19 nt, Artificial Sequence
  Description of Artificial Sequence: Synthetic oligonucleotide
ggaguccguuccucaggga

SEQ ID NO: 739644 - RNA, 19 nt, Artificial Sequence
  Description of Artificial Sequence: Synthetic oligonucleotide
caccauagcugcgcacaaa

SEQ ID NO: 739645 - RNA, 19 nt, Artificial Sequence
  Description of Artificial Sequence: Synthetic oligonucleotide
cuggugagacaccgaguau

SEQ ID NO: 739646 - RNA, 19 nt, Artificial Sequence
  Description of Artificial Sequence: Synthetic oligonucleotide
cggggugucgacgcugcgg

SEQ ID NO: 739647 - RNA, 19 nt, Artificial Sequence
  Description of Artificial Sequence: Synthetic oligonucleotide
cccaaggcuccucaguagu

SEQ ID NO: 739648 - RNA, 19 nt, Artificial Sequence
  Description of Artificial Sequence: Synthetic oligonucleotide
ggguuacaggugagacgug

SEQ ID NO: 739649 - RNA, 19 nt, Artificial Sequence
  Description of Artificial Sequence: Synthetic oligonucleotide
ccggauagcagagcccgga

SEQ ID NO: 739650 - RNA, 19 nt, Artificial Sequence
  Description of Artificial Sequence: Synthetic oligonucleotide
ccucgaagugguaccaaau

SEQ ID NO: 739651 - RNA, 19 nt, Artificial Sequence
  Description of Artificial Sequence: Synthetic oligonucleotide
gccaacaguuuagccugga

SEQ ID NO: 739652 - RNA, 19 nt, Artificial Sequence
  Description of Artificial Sequence: Synthetic oligonucleotide
gggccgaccuaaucggaau

SEQ ID NO: 739653 - RNA, 19 nt, Artificial Sequence
  Description of Artificial Sequence: Synthetic oligonucleotide
cgacgcugcggucuggcca

SEQ ID NO: 739654 - RNA, 19 nt, Artificial Sequence
  Description of Artificial Sequence: Synthetic oligonucleotide
gcagggauacggcccaguu

SEQ ID NO: 739655 - RNA, 19 nt, Artificial Sequence
  Description of Artificial Sequence: Synthetic oligonucleotide
gcgccacagaguaggcuuc

SEQ ID NO: 739656 - RNA, 19 nt, Artificial Sequence
  Description of Artificial Sequence: Synthetic oligonucleotide
ggccagucaucuggugaga

SEQ ID NO: 739657 - RNA, 19 nt, Artificial Sequence
  Description of Artificial Sequence: Synthetic oligonucleotide
cacgaggcccagagccugu

SEQ ID NO: 739658 - RNA, 19 nt, Artificial Sequence
  Description of Artificial Sequence: Synthetic oligonucleotide
ccguuaacacagccagcaa

SEQ ID NO: 739659 - RNA, 19 nt, Artificial Sequence
  Description of Artificial Sequence: Synthetic oligonucleotide
cuucgcagucuccccucau

SEQ ID NO: 739660 - RNA, 19 nt, Artificial Sequence
  Description of Artificial Sequence: Synthetic oligonucleotide
gcccgcacuagggcugcug

SEQ ID NO: 739661 - RNA, 19 nt, Artificial Sequence
  Description of Artificial Sequence: Synthetic oligonucleotide
gcgaaguguucgggguguc

SEQ ID NO: 739662 - RNA, 19 nt, Artificial Sequence
  Description of Artificial Sequence: Synthetic oligonucleotide
ggccucgaagugguaccaa

SEQ ID NO: 739663 - RNA, 19 nt, Artificial Sequence
  Description of Artificial Sequence: Synthetic oligonucleotide
cggauagcucuggcaucgg

SEQ ID NO: 739664 - RNA, 19 nt, Artificial Sequence
  Description of Artificial Sequence: Synthetic oligonucleotide
gcgugacaacagcaacagu

SEQ ID NO: 739665 - RNA, 19 nt, Artificial Sequence
  Description of Artificial Sequence: Synthetic oligonucleotide
gcggcgccacagaguaggc

SEQ ID NO: 739666 - RNA, 19 nt, Artificial Sequence
  Description of Artificial Sequence: Synthetic oligonucleotide
cccguccaacgaacucauc

SEQ ID NO: 739667 - RNA, 19 nt, Artificial Sequence
  Description of Artificial Sequence: Synthetic oligonucleotide
ccggcacaagagacacaca

SEQ ID NO: 739668 - RNA, 19 nt, Artificial Sequence
  Description of Artificial Sequence: Synthetic oligonucleotide
cccacuccaaaaggggacu

SEQ ID NO: 739669 - RNA, 19 nt, Artificial Sequence
  Description of Artificial Sequence: Synthetic oligonucleotide
ccugugcuauggcucaauu

SEQ ID NO: 739670 - RNA, 19 nt, Artificial Sequence
  Description of Artificial Sequence: Synthetic oligonucleotide
ggcgcgcagcagugcugca

SEQ ID NO: 739671 - RNA, 19 nt, Artificial Sequence
  Description of Artificial Sequence: Synthetic oligonucleotide
gcccguuuucuagggcacu

SEQ ID NO: 739672 - RNA, 19 nt, Artificial Sequence
  Description of Artificial Sequence: Synthetic oligonucleotide
gccucccguccaacgaacu

SEQ ID NO: 739673 - RNA, 19 nt, Artificial Sequence
  Description of Artificial Sequence: Synthetic oligonucleotide
cgguguacaggccgggcau

SEQ ID NO: 739674 - RNA, 19 nt, Artificial Sequence
  Description of Artificial Sequence: Synthetic oligonucleotide
cagccggggccgaccuaau

SEQ ID NO: 739675 - RNA, 19 nt, Artificial Sequence
  Description of Artificial Sequence: Synthetic oligonucleotide
ccccgacagccaugcaaau

SEQ ID NO: 739676 - RNA, 19 nt, Artificial Sequence
  Description of Artificial Sequence: Synthetic oligonucleotide
uauaaauuggaaaggaagg

SEQ ID NO: 739677 - RNA, 19 nt, Artificial Sequence
  Description of Artificial Sequence: Synthetic oligonucleotide
ucuaccauaagguccaugg

SEQ ID NO: 739678 - RNA, 19 nt, Artificial Sequence
  Description of Artificial Sequence: Synthetic oligonucleotide
agaguaguuaaacucaacg

SEQ ID NO: 739679 - RNA, 19 nt, Artificial Sequence
  Description of Artificial Sequence: Synthetic oligonucleotide
aauguugaagcuucuaucu

SEQ ID NO: 739680 - RNA, 19 nt, Artificial Sequence
  Description of Artificial Sequence: Synthetic oligonucleotide
agagauauguuucaugauc

SEQ ID NO: 739681 - RNA, 19 nt, Artificial Sequence
  Description of Artificial Sequence: Synthetic oligonucleotide
ugaguaacggccuuuauug

SEQ ID NO: 739682 - RNA, 19 nt, Artificial Sequence
  Description of Artificial Sequence: Synthetic oligonucleotide
auauagacgagauuauuuc

SEQ ID NO: 739683 - RNA, 19 nt, Artificial Sequence
  Description of Artificial Sequence: Synthetic oligonucleotide
aaaacaaccggcuuaacua

SEQ ID NO: 739684 - RNA, 19 nt, Artificial Sequence
  Description of Artificial Sequence: Synthetic oligonucleotide
uuaacuaugcaagacaaca

SEQ ID NO: 739685 - RNA, 19 nt, Artificial Sequence
  Description of Artificial Sequence: Synthetic oligonucleotide
uguacucuccccuagagug

SEQ ID NO: 739686 - RNA, 19 nt, Artificial Sequence
  Description of Artificial Sequence: Synthetic oligonucleotide
uucuaaaugggucucgaag

SEQ ID NO: 739687 - RNA, 19 nt, Artificial Sequence
  Description of Artificial Sequence: Synthetic oligonucleotide
auaaauuggaaaggaaggc

SEQ ID NO: 739688 - RNA, 19 nt, Artificial Sequence
  Description of Artificial Sequence: Synthetic oligonucleotide
ucagauauagacgagauua

SEQ ID NO: 739689 - RNA, 19 nt, Artificial Sequence
  Description of Artificial Sequence: Synthetic oligonucleotide
aaaaggaucuacugcuggg

SEQ ID NO: 739690 - RNA, 19 nt, Artificial Sequence
  Description of Artificial Sequence: Synthetic oligonucleotide
cuuauugaaguccaaacug

SEQ ID NO: 739691 - RNA, 19 nt, Artificial Sequence
  Description of Artificial Sequence: Synthetic oligonucleotide
ucaauauuggaacccguag

SEQ ID NO: 739692 - RNA, 19 nt, Artificial Sequence
  Description of Artificial Sequence: Synthetic oligonucleotide
ugacaucagauauagacga

SEQ ID NO: 739693 - RNA, 19 nt, Artificial Sequence
  Description of Artificial Sequence: Synthetic oligonucleotide
uaauucucagaucaucugc

SEQ ID NO: 739694 - RNA, 19 nt, Artificial Sequence
  Description of Artificial Sequence: Synthetic oligonucleotide
auuuguagagaguagaaaa

SEQ ID NO: 739695 - RNA, 19 nt, Artificial Sequence
  Description of Artificial Sequence: Synthetic oligonucleotide
agagagauauguuucauga

SEQ ID NO: 739696 - RNA, 19 nt, Artificial Sequence
  Description of Artificial Sequence: Synthetic oligonucleotide
ucuuauugaaguccaaacu

SEQ ID NO: 739697 - RNA, 19 nt, Artificial Sequence
  Description of Artificial Sequence: Synthetic oligonucleotide
agugccguaauucuaaaug

SEQ ID NO: 739698 - RNA, 19 nt, Artificial Sequence
  Description of Artificial Sequence: Synthetic oligonucleotide
aaauucgucguggacuugc

SEQ ID NO: 739699 - RNA, 19 nt, Artificial Sequence
  Description of Artificial Sequence: Synthetic oligonucleotide
aaauuggaaaggaaggcuc

SEQ ID NO: 739700 - RNA, 19 nt, Artificial Sequence
  Description of Artificial Sequence: Synthetic oligonucleotide
uuuauuaaguagcuccaca

SEQ ID NO: 739701 - RNA, 19 nt, Artificial Sequence
  Description of Artificial Sequence: Synthetic oligonucleotide
ucuaaaugggucucgaagu

SEQ ID NO: 739702 - RNA, 19 nt, Artificial Sequence
  Description of Artificial Sequence: Synthetic oligonucleotide
gaugaugucggcuuccgcc

SEQ ID NO: 739703 - RNA, 19 nt, Artificial Sequence
  Description of Artificial Sequence: Synthetic oligonucleotide
uuauugaaguccaaacugu

SEQ ID NO: 739704 - RNA, 19 nt, Artificial Sequence
  Description of Artificial Sequence: Synthetic oligonucleotide
ucauguaccgaccacugug

SEQ ID NO: 739705 - RNA, 19 nt, Artificial Sequence
  Description of Artificial Sequence: Synthetic oligonucleotide
ugcgucacuauucucaaug

SEQ ID NO: 739706 - RNA, 19 nt, Artificial Sequence
  Description of Artificial Sequence: Synthetic oligonucleotide
aguagguuuucccuucagc

SEQ ID NO: 739707 - RNA, 19 nt, Artificial Sequence
  Description of Artificial Sequence: Synthetic oligonucleotide
uuucuaucaaacauucuaa

SEQ ID NO: 739708 - RNA, 19 nt, Artificial Sequence
  Description of Artificial Sequence: Synthetic oligonucleotide
aaaaugagcagcauucugu

SEQ ID NO: 739709 - RNA, 19 nt, Artificial Sequence
  Description of Artificial Sequence: Synthetic oligonucleotide
guacucauguaccuggugg

SEQ ID NO: 739710 - RNA, 19 nt, Artificial Sequence
  Description of Artificial Sequence: Synthetic oligonucleotide
uggaauuuaugugauaugu

SEQ ID NO: 739711 - RNA, 19 nt, Artificial Sequence
  Description of Artificial Sequence: Synthetic oligonucleotide
uauuggaacccguagugcc

SEQ ID NO: 739712 - RNA, 19 nt, Artificial Sequence
  Description of Artificial Sequence: Synthetic oligonucleotide
aacucaacgguggagauga

SEQ ID NO: 739713 - RNA, 19 nt, Artificial Sequence
  Description of Artificial Sequence: Synthetic oligonucleotide
gucauaauggcacugucug

SEQ ID NO: 739714 - RNA, 19 nt, Artificial Sequence
  Description of Artificial Sequence: Synthetic oligonucleotide
uucuuauugaaguccaaac

SEQ ID NO: 739715 - RNA, 19 nt, Artificial Sequence
  Description of Artificial Sequence: Synthetic oligonucleotide
ugggcuucaauauuggaac

SEQ ID NO: 739716 - RNA, 19 nt, Artificial Sequence
  Description of Artificial Sequence: Synthetic oligonucleotide
uucccguuggaaaauaaca

SEQ ID NO: 739717 - RNA, 19 nt, Artificial Sequence
  Description of Artificial Sequence: Synthetic oligonucleotide
uauacaaguuauugguggc

SEQ ID NO: 739718 - RNA, 19 nt, Artificial Sequence
  Description of Artificial Sequence: Synthetic oligonucleotide
uccuguugcaagaaggucu

SEQ ID NO: 739719 - RNA, 19 nt, Artificial Sequence
  Description of Artificial Sequence: Synthetic oligonucleotide
uucguagguacucauguac

SEQ ID NO: 739720 - RNA, 19 nt, Artificial Sequence
  Description of Artificial Sequence: Synthetic oligonucleotide
ucuauaaauuggaaaggaa

SEQ ID NO: 739721 - RNA, 19 nt, Artificial Sequence
  Description of Artificial Sequence: Synthetic oligonucleotide
uauuaaguagcuccacaga

SEQ ID NO: 739722 - RNA, 19 nt, Artificial Sequence
  Description of Artificial Sequence: Synthetic oligonucleotide
aacgguggagaugaugucg

SEQ ID NO: 739723 - RNA, 19 nt, Artificial Sequence
  Description of Artificial Sequence: Synthetic oligonucleotide
ucuaugagggaaguggaag

SEQ ID NO: 739724 - RNA, 19 nt, Artificial Sequence
  Description of Artificial Sequence: Synthetic oligonucleotide
ucuuugacgggaaaacaac

SEQ ID NO: 739725 - RNA, 19 nt, Artificial Sequence
  Description of Artificial Sequence: Synthetic oligonucleotide
gugucuaugagggaagugg

SEQ ID NO: 739726 - RNA, 19 nt, Artificial Sequence
  Description of Artificial Sequence: Synthetic oligonucleotide
ugaaagguacuguaaacau

SEQ ID NO: 739727 - RNA, 19 nt, Artificial Sequence
  Description of Artificial Sequence: Synthetic oligonucleotide
gaaaaugagcagcauucug

SEQ ID NO: 739728 - RNA, 19 nt, Artificial Sequence
  Description of Artificial Sequence: Synthetic oligonucleotide
uacucauguaccugguggg

SEQ ID NO: 739729 - RNA, 19 nt, Artificial Sequence
  Description of Artificial Sequence: Synthetic oligonucleotide
uaucauuuguagagaguag

SEQ ID NO: 739730 - RNA, 19 nt, Artificial Sequence
  Description of Artificial Sequence: Synthetic oligonucleotide
gugccguaauucuaaaugg

SEQ ID NO: 739731 - RNA, 19 nt, Artificial Sequence
  Description of Artificial Sequence: Synthetic oligonucleotide
cuuugacgggaaaacaacc

SEQ ID NO: 739732 - RNA, 19 nt, Artificial Sequence
  Description of Artificial Sequence: Synthetic oligonucleotide
uaccuucaccgacagauag

SEQ ID NO: 739733 - RNA, 19 nt, Artificial Sequence
  Description of Artificial Sequence: Synthetic oligonucleotide
uucuuugacgggaaaacaa

SEQ ID NO: 739734 - RNA, 19 nt, Artificial Sequence
  Description of Artificial Sequence: Synthetic oligonucleotide
acgagauuauuucugagaa

SEQ ID NO: 739735 - RNA, 19 nt, Artificial Sequence
  Description of Artificial Sequence: Synthetic oligonucleotide
uuuuaucccguucacuuau

SEQ ID NO: 739736 - RNA, 19 nt, Artificial Sequence
  Description of Artificial Sequence: Synthetic oligonucleotide
uacauuugaguaacggccu

SEQ ID NO: 739737 - RNA, 19 nt, Artificial Sequence
  Description of Artificial Sequence: Synthetic oligonucleotide
ucaugacucugaaagguac

SEQ ID NO: 739738 - RNA, 19 nt, Artificial Sequence
  Description of Artificial Sequence: Synthetic oligonucleotide
gacaaugccauuucuuuga

SEQ ID NO: 739739 - RNA, 19 nt, Artificial Sequence
  Description of Artificial Sequence: Synthetic oligonucleotide
gaauuuaugugauauguau

SEQ ID NO: 739740 - RNA, 19 nt, Artificial Sequence
  Description of Artificial Sequence: Synthetic oligonucleotide
uaacuaugcaagacaacac

SEQ ID NO: 739741 - RNA, 19 nt, Artificial Sequence
  Description of Artificial Sequence: Synthetic oligonucleotide
uuguguuuauuaaguagcu

SEQ ID NO: 739742 - RNA, 19 nt, Artificial Sequence
  Description of Artificial Sequence: Synthetic oligonucleotide
aacacguugcacuggugug

SEQ ID NO: 739743 - RNA, 19 nt, Artificial Sequence
  Description of Artificial Sequence: Synthetic oligonucleotide
aaacaaccggcuuaacuau

SEQ ID NO: 739744 - RNA, 19 nt, Artificial Sequence
  Description of Artificial Sequence: Synthetic oligonucleotide
uauccuugcaccaguggug

SEQ ID NO: 739745 - RNA, 19 nt, Artificial Sequence
  Description of Artificial Sequence: Synthetic oligonucleotide
auauuggaacccguagugc

SEQ ID NO: 739746 - RNA, 19 nt, Artificial Sequence
  Description of Artificial Sequence: Synthetic oligonucleotide
ugacgggaaaacaaccggc

SEQ ID NO: 739747 - RNA, 19 nt, Artificial Sequence
  Description of Artificial Sequence: Synthetic oligonucleotide
uguugcggcaaccaccuga

SEQ ID NO: 739748 - RNA, 19 nt, Artificial Sequence
  Description of Artificial Sequence: Synthetic oligonucleotide
accaauucagcuucgagua

SEQ ID NO: 739749 - RNA, 19 nt, Artificial Sequence
  Description of Artificial Sequence: Synthetic oligonucleotide
cuggucaucauguaccgac

SEQ ID NO: 739750 - RNA, 19 nt, Artificial Sequence
  Description of Artificial Sequence: Synthetic oligonucleotide
cuaugcaagacaacacuug

SEQ ID NO: 739751 - RNA, 19 nt, Artificial Sequence
  Description of Artificial Sequence: Synthetic oligonucleotide
uccagcguaacaucucucc

SEQ ID NO: 739752 - RNA, 19 nt, Artificial Sequence
  Description of Artificial Sequence: Synthetic oligonucleotide
ugucuaugagggaagugga

SEQ ID NO: 739753 - RNA, 19 nt, Artificial Sequence
  Description of Artificial Sequence: Synthetic oligonucleotide
gacgagauuauuucugaga

SEQ ID NO: 739754 - RNA, 19 nt, Artificial Sequence
  Description of Artificial Sequence: Synthetic oligonucleotide
cauguaccgaccacugugg

SEQ ID NO: 739755 - RNA, 19 nt, Artificial Sequence
  Description of Artificial Sequence: Synthetic oligonucleotide
caauguugaagcuucuauc

SEQ ID NO: 739756 - RNA, 19 nt, Artificial Sequence
  Description of Artificial Sequence: Synthetic oligonucleotide
uucuaucaaacauucuaaa

SEQ ID NO: 739757 - RNA, 19 nt, Artificial Sequence
  Description of Artificial Sequence: Synthetic oligonucleotide
uguacauacuuugcggggc

SEQ ID NO: 739758 - RNA, 19 nt, Artificial Sequence
  Description of Artificial Sequence: Synthetic oligonucleotide
ugguguugcagcccacugg

SEQ ID NO: 739759 - RNA, 19 nt, Artificial Sequence
  Description of Artificial Sequence: Synthetic oligonucleotide
aagugcgucacuauucuca

SEQ ID NO: 739760 - RNA, 19 nt, Artificial Sequence
  Description of Artificial Sequence: Synthetic oligonucleotide
gugagugcggccuuuauuc

SEQ ID NO: 739761 - RNA, 19 nt, Artificial Sequence
  Description of Artificial Sequence: Synthetic oligonucleotide
uagacgagauuauuucuga

SEQ ID NO: 739762 - RNA, 19 nt, Artificial Sequence
  Description of Artificial Sequence: Synthetic oligonucleotide
cuaaucucguccuucuuuc

SEQ ID NO: 739763 - RNA, 19 nt, Artificial Sequence
  Description of Artificial Sequence: Synthetic oligonucleotide
agcguaacaucucuccgag

SEQ ID NO: 739764 - RNA, 19 nt, Artificial Sequence
  Description of Artificial Sequence: Synthetic oligonucleotide
ucccguuggaaaauaacaa

SEQ ID NO: 739765 - RNA, 19 nt, Artificial Sequence
  Description of Artificial Sequence: Synthetic oligonucleotide
uucaauauuggaacccgua

SEQ ID NO: 739766 - RNA, 19 nt, Artificial Sequence
  Description of Artificial Sequence: Synthetic oligonucleotide
auaauggcacugucugaac

SEQ ID NO: 739767 - RNA, 19 nt, Artificial Sequence
  Description of Artificial Sequence: Synthetic oligonucleotide
guaggagcccgucauaaug

SEQ ID NO: 739768 - RNA, 19 nt, Artificial Sequence
  Description of Artificial Sequence: Synthetic oligonucleotide
aaccaccugauuuuauuaa

SEQ ID NO: 739769 - RNA, 19 nt, Artificial Sequence
  Description of Artificial Sequence: Synthetic oligonucleotide
aacucagcggcggugauga

SEQ ID NO: 739770 - RNA, 19 nt, Artificial Sequence
  Description of Artificial Sequence: Synthetic oligonucleotide
aauucuaaaugggucucga

SEQ ID NO: 739771 - RNA, 19 nt, Artificial Sequence
  Description of Artificial Sequence: Synthetic oligonucleotide
uucgucguggacuugcuuc

SEQ ID NO: 739772 - RNA, 19 nt, Artificial Sequence
  Description of Artificial Sequence: Synthetic oligonucleotide
ucagcuucgaguagguuuu

SEQ ID NO: 739773 - RNA, 19 nt, Artificial Sequence
  Description of Artificial Sequence: Synthetic oligonucleotide
ugucugaaccguuccagca

SEQ ID NO: 739774 - RNA, 19 nt, Artificial Sequence
  Description of Artificial Sequence: Synthetic oligonucleotide
gucgauagcgcccuucacc

SEQ ID NO: 739775 - RNA, 19 nt, Artificial Sequence
  Description of Artificial Sequence: Synthetic oligonucleotide
aauuggaaaggaaggcuca

SEQ ID NO: 739776 - RNA, 19 nt, Artificial Sequence
  Description of Artificial Sequence: Synthetic oligonucleotide
gguguugcagcccacuggg

SEQ ID NO: 739777 - RNA, 19 nt, Artificial Sequence
  Description of Artificial Sequence: Synthetic oligonucleotide
auagacgagauuauuucug

SEQ ID NO: 739778 - RNA, 19 nt, Artificial Sequence
  Description of Artificial Sequence: Synthetic oligonucleotide
aggagcgcaugucacacag

SEQ ID NO: 739779 - RNA, 19 nt, Artificial Sequence
  Description of Artificial Sequence: Synthetic oligonucleotide
acaaccggcuuaacuaugc

SEQ ID NO: 739780 - RNA, 19 nt, Artificial Sequence
  Description of Artificial Sequence: Synthetic oligonucleotide
gaaaacaaccggcuuaacu

SEQ ID NO: 739781 - RNA, 19 nt, Artificial Sequence
  Description of Artificial Sequence: Synthetic oligonucleotide
caauaaugcucuccauggg

SEQ ID NO: 739782 - RNA, 19 nt, Artificial Sequence
  Description of Artificial Sequence: Synthetic oligonucleotide
cuuaacuaugcaagacaac

SEQ ID NO: 739783 - RNA, 19 nt, Artificial Sequence
  Description of Artificial Sequence: Synthetic oligonucleotide
auggaauuuaugugauaug

SEQ ID NO: 739784 - RNA, 19 nt, Artificial Sequence
  Description of Artificial Sequence: Synthetic oligonucleotide
uugcuacugcuguagacca

SEQ ID NO: 739785 - RNA, 19 nt, Artificial Sequence
  Description of Artificial Sequence: Synthetic oligonucleotide
accggcuuaacuaugcaag

SEQ ID NO: 739786 - RNA, 19 nt, Artificial Sequence
  Description of Artificial Sequence: Synthetic oligonucleotide
ugcggcaaccaccugauuu

SEQ ID NO: 739787 - RNA, 19 nt, Artificial Sequence
  Description of Artificial Sequence: Synthetic oligonucleotide
aguaacggccuuuauugaa

SEQ ID NO: 739788 - RNA, 19 nt, Artificial Sequence
  Description of Artificial Sequence: Synthetic oligonucleotide
aaaugggucucgaagucgu

SEQ ID NO: 739789 - RNA, 19 nt, Artificial Sequence
  Description of Artificial Sequence: Synthetic oligonucleotide
cuaaaugggucucgaaguc

SEQ ID NO: 739790 - RNA, 19 nt, Artificial Sequence
  Description of Artificial Sequence: Synthetic oligonucleotide
augggucucgaagucgucc

SEQ ID NO: 739791 - RNA, 19 nt, Artificial Sequence
  Description of Artificial Sequence: Synthetic oligonucleotide
aagucguugccgcccgccg

SEQ ID NO: 739792 - RNA, 19 nt, Artificial Sequence
  Description of Artificial Sequence: Synthetic oligonucleotide
acuauuuacugaaauggaa

SEQ ID NO: 739793 - RNA, 19 nt, Artificial Sequence
  Description of Artificial Sequence: Synthetic oligonucleotide
auacaaggagcagagcuug

SEQ ID NO: 739794 - RNA, 19 nt, Artificial Sequence
  Description of Artificial Sequence: Synthetic oligonucleotide
cauguugaggucccauacc

SEQ ID NO: 739795 - RNA, 19 nt, Artificial Sequence
  Description of Artificial Sequence: Synthetic oligonucleotide
aggaucuacugcugggguc

SEQ ID NO: 739796 - RNA, 19 nt, Artificial Sequence
  Description of Artificial Sequence: Synthetic oligonucleotide
agacgagauuauuucugag

SEQ ID NO: 739797 - RNA, 19 nt, Artificial Sequence
  Description of Artificial Sequence: Synthetic oligonucleotide
aguuaaacucaacggugga

SEQ ID NO: 739798 - RNA, 19 nt, Artificial Sequence
  Description of Artificial Sequence: Synthetic oligonucleotide
ucaaacucuggcucaugac

SEQ ID NO: 739799 - RNA, 19 nt, Artificial Sequence
  Description of Artificial Sequence: Synthetic oligonucleotide
cauagguuaauucucagau

SEQ ID NO: 739800 - RNA, 19 nt, Artificial Sequence
  Description of Artificial Sequence: Synthetic oligonucleotide
acauuguacucuccccuag

SEQ ID NO: 739801 - RNA, 19 nt, Artificial Sequence
  Description of Artificial Sequence: Synthetic oligonucleotide
auguaccgaccacuguggc

SEQ ID NO: 739802 - RNA, 19 nt, Artificial Sequence
  Description of Artificial Sequence: Synthetic oligonucleotide
cucuggucaucauguaccg

SEQ ID NO: 739803 - RNA, 19 nt, Artificial Sequence
  Description of Artificial Sequence: Synthetic oligonucleotide
ucgggcguauccuugcacc

SEQ ID NO: 739804 - RNA, 19 nt, Artificial Sequence
  Description of Artificial Sequence: Synthetic oligonucleotide
cuaccauaagguccauggg

SEQ ID NO: 739805 - RNA, 19 nt, Artificial Sequence
  Description of Artificial Sequence: Synthetic oligonucleotide
uggaagucguugccgcccg

SEQ ID NO: 739806 - RNA, 19 nt, Artificial Sequence
  Description of Artificial Sequence: Synthetic oligonucleotide
caucauguaccgaccacug

SEQ ID NO: 739807 - RNA, 19 nt, Artificial Sequence
  Description of Artificial Sequence: Synthetic oligonucleotide
uaacggccuuuauugaaca

SEQ ID NO: 739808 - RNA, 19 nt, Artificial Sequence
  Description of Artificial Sequence: Synthetic oligonucleotide
ccuguacauacuuugcggg

SEQ ID NO: 739809 - RNA, 19 nt, Artificial Sequence
  Description of Artificial Sequence: Synthetic oligonucleotide
guacuguaaacauuguacu

SEQ ID NO: 739810 - RNA, 19 nt, Artificial Sequence
  Description of Artificial Sequence: Synthetic oligonucleotide
ucccauaccuucaccgaca

SEQ ID NO: 739811 - RNA, 19 nt, Artificial Sequence
  Description of Artificial Sequence: Synthetic oligonucleotide
aaacucaacgguggagaug

SEQ ID NO: 739812 - RNA, 19 nt, Artificial Sequence
  Description of Artificial Sequence: Synthetic oligonucleotide
aagcuucuaucugugauuu

SEQ ID NO: 739813 - RNA, 19 nt, Artificial Sequence
  Description of Artificial Sequence: Synthetic oligonucleotide
gaagcaccacuggaagucg

SEQ ID NO: 739814 - RNA, 19 nt, Artificial Sequence
  Description of Artificial Sequence: Synthetic oligonucleotide
auuggaacccguagugccg

SEQ ID NO: 739815 - RNA, 19 nt, Artificial Sequence
  Description of Artificial Sequence: Synthetic oligonucleotide
acccguagugccguaauuc

SEQ ID NO: 739816 - RNA, 19 nt, Artificial Sequence
  Description of Artificial Sequence: Synthetic oligonucleotide
augaugucggcuuccgcca

SEQ ID NO: 739817 - RNA, 19 nt, Artificial Sequence
  Description of Artificial Sequence: Synthetic oligonucleotide
ugcuucguagguacucaug

SEQ ID NO: 739818 - RNA, 19 nt, Artificial Sequence
  Description of Artificial Sequence: Synthetic oligonucleotide
gacucugaaagguacugua

SEQ ID NO: 739819 - RNA, 19 nt, Artificial Sequence
  Description of Artificial Sequence: Synthetic oligonucleotide
cacuauuuacugaaaugga

SEQ ID NO: 739820 - RNA, 19 nt, Artificial Sequence
  Description of Artificial Sequence: Synthetic oligonucleotide
acuguggcugaacuugaca

SEQ ID NO: 739821 - RNA, 19 nt, Artificial Sequence
  Description of Artificial Sequence: Synthetic oligonucleotide
gauauagacgagauuauuu

SEQ ID NO: 739822 - RNA, 19 nt, Artificial Sequence
  Description of Artificial Sequence: Synthetic oligonucleotide
acacguugcacuggugugg

SEQ ID NO: 739823 - RNA, 19 nt, Artificial Sequence
  Description of Artificial Sequence: Synthetic oligonucleotide
ucgucgauagcgcccuuca

SEQ ID NO: 739824 - RNA, 19 nt, Artificial Sequence
  Description of Artificial Sequence: Synthetic oligonucleotide
augccauuucuuugacggg

SEQ ID NO: 739825 - RNA, 19 nt, Artificial Sequence
  Description of Artificial Sequence: Synthetic oligonucleotide
uguaccgaccacuguggcu

SEQ ID NO: 739826 - RNA, 19 nt, Artificial Sequence
  Description of Artificial Sequence: Synthetic oligonucleotide
uucgaguagguuuucccuu

SEQ ID NO: 739827 - RNA, 19 nt, Artificial Sequence
  Description of Artificial Sequence: Synthetic oligonucleotide
agaggacaaugccauuucu

SEQ ID NO: 739828 - RNA, 19 nt, Artificial Sequence
  Description of Artificial Sequence: Synthetic oligonucleotide
accgacagauagucucugg

SEQ ID NO: 739829 - RNA, 19 nt, Artificial Sequence
  Description of Artificial Sequence: Synthetic oligonucleotide
ugggucucgaagucgucca

SEQ ID NO: 739830 - RNA, 19 nt, Artificial Sequence
  Description of Artificial Sequence: Synthetic oligonucleotide
guaauucuaaaugggucuc

SEQ ID NO: 739831 - RNA, 19 nt, Artificial Sequence
  Description of Artificial Sequence: Synthetic oligonucleotide
ucgaguagguuuucccuuc

SEQ ID NO: 739832 - RNA, 19 nt, Artificial Sequence
  Description of Artificial Sequence: Synthetic oligonucleotide
auacaaguuauugguggca

SEQ ID NO: 739833 - RNA, 19 nt, Artificial Sequence
  Description of Artificial Sequence: Synthetic oligonucleotide
guaacggccuuuauugaac

SEQ ID NO: 739834 - RNA, 19 nt, Artificial Sequence
  Description of Artificial Sequence: Synthetic oligonucleotide
cguaacaucucuccgagug

SEQ ID NO: 739835 - RNA, 19 nt, Artificial Sequence
  Description of Artificial Sequence: Synthetic oligonucleotide
cauaauggcacugucugaa

SEQ ID NO: 739836 - RNA, 19 nt, Artificial Sequence
  Description of Artificial Sequence: Synthetic oligonucleotide
uggguggaacucagcggcg

SEQ ID NO: 739837 - RNA, 19 nt, Artificial Sequence
  Description of Artificial Sequence: Synthetic oligonucleotide
ucuacugcuggggucuucu

SEQ ID NO: 739838 - RNA, 19 nt, Artificial Sequence
  Description of Artificial Sequence: Synthetic oligonucleotide
uacucuccccuagagugag

SEQ ID NO: 739839 - RNA, 19 nt, Artificial Sequence
  Description of Artificial Sequence: Synthetic oligonucleotide
uuaaagcccagggauggau

SEQ ID NO: 739840 - RNA, 19 nt, Artificial Sequence
  Description of Artificial Sequence: Synthetic oligonucleotide
uuaucccguucacuuauuu

SEQ ID NO: 739841 - RNA, 19 nt, Artificial Sequence
  Description of Artificial Sequence: Synthetic oligonucleotide
gcgcaugucacacagccug

SEQ ID NO: 739842 - RNA, 19 nt, Artificial Sequence
  Description of Artificial Sequence: Synthetic oligonucleotide
ucgucguggacuugcuucu

SEQ ID NO: 739843 - RNA, 19 nt, Artificial Sequence
  Description of Artificial Sequence: Synthetic oligonucleotide
acgguggagaugaugucgg

SEQ ID NO: 739844 - RNA, 19 nt, Artificial Sequence
  Description of Artificial Sequence: Synthetic oligonucleotide
gaguagguuuucccuucag

SEQ ID NO: 739845 - RNA, 19 nt, Artificial Sequence
  Description of Artificial Sequence: Synthetic oligonucleotide
ggcuuaacuaugcaagaca

SEQ ID NO: 739846 - RNA, 19 nt, Artificial Sequence
  Description of Artificial Sequence: Synthetic oligonucleotide
agugcgucacuauucucaa

SEQ ID NO: 739847 - RNA, 19 nt, Artificial Sequence
  Description of Artificial Sequence: Synthetic oligonucleotide
aacaaccggcuuaacuaug

SEQ ID NO: 739848 - RNA, 19 nt, Artificial Sequence
  Description of Artificial Sequence: Synthetic oligonucleotide
uaucccguucacuuauuuu

SEQ ID NO: 739849 - RNA, 19 nt, Artificial Sequence
  Description of Artificial Sequence: Synthetic oligonucleotide
caagaaggucuccagagua

SEQ ID NO: 739850 - RNA, 19 nt, Artificial Sequence
  Description of Artificial Sequence: Synthetic oligonucleotide
auucucauacaaggagcag

SEQ ID NO: 739851 - RNA, 19 nt, Artificial Sequence
  Description of Artificial Sequence: Synthetic oligonucleotide
ugagugcggccuuuauucu

SEQ ID NO: 739852 - RNA, 19 nt, Artificial Sequence
  Description of Artificial Sequence: Synthetic oligonucleotide
guauccuugcaccaguggu

SEQ ID NO: 739853 - RNA, 19 nt, Artificial Sequence
  Description of Artificial Sequence: Synthetic oligonucleotide
cagaguaguuaaacucaac

SEQ ID NO: 739854 - RNA, 19 nt, Artificial Sequence
  Description of Artificial Sequence: Synthetic oligonucleotide
auucuaaaugggucucgaa

SEQ ID NO: 739855 - RNA, 19 nt, Artificial Sequence
  Description of Artificial Sequence: Synthetic oligonucleotide
ugugaaggaucuucuuauu

SEQ ID NO: 739856 - RNA, 19 nt, Artificial Sequence
  Description of Artificial Sequence: Synthetic oligonucleotide
aucagauauagacgagauu

SEQ ID NO: 739857 - RNA, 19 nt, Artificial Sequence
  Description of Artificial Sequence: Synthetic oligonucleotide
agauauagacgagauuauu

SEQ ID NO: 739858 - RNA, 19 nt, Artificial Sequence
  Description of Artificial Sequence: Synthetic oligonucleotide
gaguaacggccuuuauuga

SEQ ID NO: 739859 - RNA, 19 nt, Artificial Sequence
  Description of Artificial Sequence: Synthetic oligonucleotide
accugcgagaagcaccacu

SEQ ID NO: 739860 - RNA, 19 nt, Artificial Sequence
  Description of Artificial Sequence: Synthetic oligonucleotide
aacggccuuuauugaacaa

SEQ ID NO: 739861 - RNA, 19 nt, Artificial Sequence
  Description of Artificial Sequence: Synthetic oligonucleotide
aucauguaccgaccacugu

SEQ ID NO: 739862 - RNA, 19 nt, Artificial Sequence
  Description of Artificial Sequence: Synthetic oligonucleotide
agugagugcggccuuuauu

SEQ ID NO: 739863 - RNA, 19 nt, Artificial Sequence
  Description of Artificial Sequence: Synthetic oligonucleotide
aguggaagugcgucacuau

SEQ ID NO: 739864 - RNA, 19 nt, Artificial Sequence
  Description of Artificial Sequence: Synthetic oligonucleotide
ccguaauucuaaauggguc

SEQ ID NO: 739865 - RNA, 19 nt, Artificial Sequence
  Description of Artificial Sequence: Synthetic oligonucleotide
cuggaagucguugccgccc

SEQ ID NO: 739866 - RNA, 19 nt, Artificial Sequence
  Description of Artificial Sequence: Synthetic oligonucleotide
cagguuaaagcccagggau

SEQ ID NO: 739867 - RNA, 19 nt, Artificial Sequence
  Description of Artificial Sequence: Synthetic oligonucleotide
gcgucacuauucucaaugg

SEQ ID NO: 739868 - RNA, 19 nt, Artificial Sequence
  Description of Artificial Sequence: Synthetic oligonucleotide
gucccauaccuucaccgac

SEQ ID NO: 739869 - RNA, 19 nt, Artificial Sequence
  Description of Artificial Sequence: Synthetic oligonucleotide
caccaauucagcuucgagu

SEQ ID NO: 739870 - RNA, 19 nt, Artificial Sequence
  Description of Artificial Sequence: Synthetic oligonucleotide
aaaauucgucguggacuug

SEQ ID NO: 739871 - RNA, 19 nt, Artificial Sequence
  Description of Artificial Sequence: Synthetic oligonucleotide
caauauuggaacccguagu

SEQ ID NO: 739872 - RNA, 19 nt, Artificial Sequence
  Description of Artificial Sequence: Synthetic oligonucleotide
agguuaaagcccagggaug

SEQ ID NO: 739873 - RNA, 19 nt, Artificial Sequence
  Description of Artificial Sequence: Synthetic oligonucleotide
cccguuggaaaauaacaac

SEQ ID NO: 739874 - RNA, 19 nt, Artificial Sequence
  Description of Artificial Sequence: Synthetic oligonucleotide
gucguugccgcccgccggg

SEQ ID NO: 739875 - RNA, 19 nt, Artificial Sequence
  Description of Artificial Sequence: Synthetic oligonucleotide
gaagcuucuaucugugauu

SEQ ID NO: 739876 - RNA, 19 nt, Artificial Sequence
  Description of Artificial Sequence: Synthetic oligonucleotide
acguccucgucgauagcgc

SEQ ID NO: 739877 - RNA, 19 nt, Artificial Sequence
  Description of Artificial Sequence: Synthetic oligonucleotide
guucccguuggaaaauaac

SEQ ID NO: 739878 - RNA, 19 nt, Artificial Sequence
  Description of Artificial Sequence: Synthetic oligonucleotide
uguaggagcccgucauaau

SEQ ID NO: 739879 - RNA, 19 nt, Artificial Sequence
  Description of Artificial Sequence: Synthetic oligonucleotide
augugauauguaugagcau

SEQ ID NO: 739880 - RNA, 19 nt, Artificial Sequence
  Description of Artificial Sequence: Synthetic oligonucleotide
cagcacucgaacuugucaa

SEQ ID NO: 739881 - RNA, 19 nt, Artificial Sequence
  Description of Artificial Sequence: Synthetic oligonucleotide
cugcgagaagcaccacugg

SEQ ID NO: 739882 - RNA, 19 nt, Artificial Sequence
  Description of Artificial Sequence: Synthetic oligonucleotide
cacguugcacugguguggg

SEQ ID NO: 739883 - RNA, 19 nt, Artificial Sequence
  Description of Artificial Sequence: Synthetic oligonucleotide
gagugcggccuuuauucuc

SEQ ID NO: 739884 - RNA, 19 nt, Artificial Sequence
  Description of Artificial Sequence: Synthetic oligonucleotide
cucuccgaguguuucuauc

SEQ ID NO: 739885 - RNA, 19 nt, Artificial Sequence
  Description of Artificial Sequence: Synthetic oligonucleotide
agugcggccuuuauucucu

SEQ ID NO: 739886 - RNA, 19 nt, Artificial Sequence
  Description of Artificial Sequence: Synthetic oligonucleotide
uagugccguaauucuaaau

SEQ ID NO: 739887 - RNA, 19 nt, Artificial Sequence
  Description of Artificial Sequence: Synthetic oligonucleotide
agcacucgaacuugucaaa

SEQ ID NO: 739888 - RNA, 19 nt, Artificial Sequence
  Description of Artificial Sequence: Synthetic oligonucleotide
cuaugagggaaguggaagu

SEQ ID NO: 739889 - RNA, 19 nt, Artificial Sequence
  Description of Artificial Sequence: Synthetic oligonucleotide
guacagugggugaguaaag

SEQ ID NO: 739890 - RNA, 19 nt, Artificial Sequence
  Description of Artificial Sequence: Synthetic oligonucleotide
gaaccguuccagcagcacu

SEQ ID NO: 739891 - RNA, 19 nt, Artificial Sequence
  Description of Artificial Sequence: Synthetic oligonucleotide
acggccuuuauugaacaaa

SEQ ID NO: 739892 - RNA, 19 nt, Artificial Sequence
  Description of Artificial Sequence: Synthetic oligonucleotide
cagcguaacaucucuccga

SEQ ID NO: 739893 - RNA, 19 nt, Artificial Sequence
  Description of Artificial Sequence: Synthetic oligonucleotide
uuuaucccguucacuuauu

SEQ ID NO: 739894 - RNA, 19 nt, Artificial Sequence
  Description of Artificial Sequence: Synthetic oligonucleotide
acauuugaguaacggccuu

SEQ ID NO: 739895 - RNA, 19 nt, Artificial Sequence
  Description of Artificial Sequence: Synthetic oligonucleotide
cucaacgguggagaugaug

SEQ ID NO: 739896 - RNA, 19 nt, Artificial Sequence
  Description of Artificial Sequence: Synthetic oligonucleotide
cacucgaacuugucaaaga

SEQ ID NO: 739897 - RNA, 19 nt, Artificial Sequence
  Description of Artificial Sequence: Synthetic oligonucleotide
uuggaacccguagugccgu

SEQ ID NO: 739898 - RNA, 19 nt, Artificial Sequence
  Description of Artificial Sequence: Synthetic oligonucleotide
aacccguagugccguaauu

SEQ ID NO: 739899 - RNA, 19 nt, Artificial Sequence
  Description of Artificial Sequence: Synthetic oligonucleotide
cuuuuaucccguucacuua

SEQ ID NO: 739900 - RNA, 19 nt, Artificial Sequence
  Description of Artificial Sequence: Synthetic oligonucleotide
gcuuaacuaugcaagacaa

SEQ ID NO: 739901 - RNA, 19 nt, Artificial Sequence
  Description of Artificial Sequence: Synthetic oligonucleotide
uccuccauguuagcuggcu

SEQ ID NO: 739902 - RNA, 19 nt, Artificial Sequence
  Description of Artificial Sequence: Synthetic oligonucleotide
cuucgaguagguuuucccu

SEQ ID NO: 739903 - RNA, 19 nt, Artificial Sequence
  Description of Artificial Sequence: Synthetic oligonucleotide
cuggugggucucgacaggc

SEQ ID NO: 739904 - RNA, 19 nt, Artificial Sequence
  Description of Artificial Sequence: Synthetic oligonucleotide
ccagcguaacaucucuccg

SEQ ID NO: 739905 - RNA, 19 nt, Artificial Sequence
  Description of Artificial Sequence: Synthetic oligonucleotide
ccccuguacauacuuugcg

SEQ ID NO: 739906 - RNA, 19 nt, Artificial Sequence
  Description of Artificial Sequence: Synthetic oligonucleotide
cacgcuaaucucguccuuc

SEQ ID NO: 739907 - RNA, 19 nt, Artificial Sequence
  Description of Artificial Sequence: Synthetic oligonucleotide
cuugcuucguagguacuca

SEQ ID NO: 739908 - RNA, 19 nt, Artificial Sequence
  Description of Artificial Sequence: Synthetic oligonucleotide
cauuguacucuccccuaga

SEQ ID NO: 739909 - RNA, 19 nt, Artificial Sequence
  Description of Artificial Sequence: Synthetic oligonucleotide
caaguuauugguggcagcu

SEQ ID NO: 739910 - RNA, 19 nt, Artificial Sequence
  Description of Artificial Sequence: Synthetic oligonucleotide
caacacguugcacuggugu

SEQ ID NO: 739911 - RNA, 19 nt, Artificial Sequence
  Description of Artificial Sequence: Synthetic oligonucleotide
uugcuucguagguacucau

SEQ ID NO: 739912 - RNA, 19 nt, Artificial Sequence
  Description of Artificial Sequence: Synthetic oligonucleotide
cauggcgcgggcgggacgc

SEQ ID NO: 739913 - RNA, 19 nt, Artificial Sequence
  Description of Artificial Sequence: Synthetic oligonucleotide
gucguggacuugcuucuac

SEQ ID NO: 739914 - RNA, 19 nt, Artificial Sequence
  Description of Artificial Sequence: Synthetic oligonucleotide
caagguccuccagagagga

SEQ ID NO: 739915 - RNA, 19 nt, Artificial Sequence
  Description of Artificial Sequence: Synthetic oligonucleotide
gcuucguagguacucaugu

SEQ ID NO: 739916 - RNA, 19 nt, Artificial Sequence
  Description of Artificial Sequence: Synthetic oligonucleotide
gacgggaaaacaaccggcu

SEQ ID NO: 739917 - RNA, 19 nt, Artificial Sequence
  Description of Artificial Sequence: Synthetic oligonucleotide
caacgguggagaugauguc

SEQ ID NO: 739918 - RNA, 19 nt, Artificial Sequence
  Description of Artificial Sequence: Synthetic oligonucleotide
gcagcacucgaacuuguca

SEQ ID NO: 739919 - RNA, 19 nt, Artificial Sequence
  Description of Artificial Sequence: Synthetic oligonucleotide
ugcuacugcuguagaccaa

SEQ ID NO: 739920 - RNA, 19 nt, Artificial Sequence
  Description of Artificial Sequence: Synthetic oligonucleotide
cauacaaggagcagagcuu

SEQ ID NO: 739921 - RNA, 19 nt, Artificial Sequence
  Description of Artificial Sequence: Synthetic oligonucleotide
gcuacugcuguagaccaac

SEQ ID NO: 739922 - RNA, 19 nt, Artificial Sequence
  Description of Artificial Sequence: Synthetic oligonucleotide
gucucgacaggccugcccu

SEQ ID NO: 739923 - RNA, 19 nt, Artificial Sequence
  Description of Artificial Sequence: Synthetic oligonucleotide
cucgacaggccugcccucc

SEQ ID NO: 739924 - RNA, 19 nt, Artificial Sequence
  Description of Artificial Sequence: Synthetic oligonucleotide
gcacucgaacuugucaaag

SEQ ID NO: 739925 - RNA, 19 nt, Artificial Sequence
  Description of Artificial Sequence: Synthetic oligonucleotide
cucgggcguauccuugcac

SEQ ID NO: 739926 - RNA, 19 nt, Artificial Sequence
  Description of Artificial Sequence: Synthetic oligonucleotide
ggaauuuaugugauaugua

SEQ ID NO: 739927 - RNA, 19 nt, Artificial Sequence
  Description of Artificial Sequence: Synthetic oligonucleotide
aagcaccacuggaagucgu

SEQ ID NO: 739928 - RNA, 19 nt, Artificial Sequence
  Description of Artificial Sequence: Synthetic oligonucleotide
cuucaauauuggaacccgu

SEQ ID NO: 739929 - RNA, 19 nt, Artificial Sequence
  Description of Artificial Sequence: Synthetic oligonucleotide
guagugccguaauucuaaa

SEQ ID NO: 739930 - RNA, 19 nt, Artificial Sequence
  Description of Artificial Sequence: Synthetic oligonucleotide
cuugaggcuuccagcguaa

SEQ ID NO: 739931 - RNA, 19 nt, Artificial Sequence
  Description of Artificial Sequence: Synthetic oligonucleotide
ccauagguuaauucucaga

SEQ ID NO: 739932 - RNA, 19 nt, Artificial Sequence
  Description of Artificial Sequence: Synthetic oligonucleotide
guacauacuuugcggggcu

SEQ ID NO: 739933 - RNA, 19 nt, Artificial Sequence
  Description of Artificial Sequence: Synthetic oligonucleotide
cuucguagguacucaugua

SEQ ID NO: 739934 - RNA, 19 nt, Artificial Sequence
  Description of Artificial Sequence: Synthetic oligonucleotide
cagauauagacgagauuau

SEQ ID NO: 739935 - RNA, 19 nt, Artificial Sequence
  Description of Artificial Sequence: Synthetic oligonucleotide
ccaccaauucagcuucgag

SEQ ID NO: 739936 - RNA, 19 nt, Artificial Sequence
  Description of Artificial Sequence: Synthetic oligonucleotide
gggaaaacaaccggcuuaa

SEQ ID NO: 739937 - RNA, 19 nt, Artificial Sequence
  Description of Artificial Sequence: Synthetic oligonucleotide
uuguucccguuggaaaaua

SEQ ID NO: 739938 - RNA, 19 nt, Artificial Sequence
  Description of Artificial Sequence: Synthetic oligonucleotide
auucgucguggacuugcuu

SEQ ID NO: 739939 - RNA, 19 nt, Artificial Sequence
  Description of Artificial Sequence: Synthetic oligonucleotide
uccuccagucaguuuccuu

SEQ ID NO: 739940 - RNA, 19 nt, Artificial Sequence
  Description of Artificial Sequence: Synthetic oligonucleotide
gaggagcgcaugucacaca

SEQ ID NO: 739941 - RNA, 19 nt, Artificial Sequence
  Description of Artificial Sequence: Synthetic oligonucleotide
ccaauucagcuucgaguag

SEQ ID NO: 739942 - RNA, 19 nt, Artificial Sequence
  Description of Artificial Sequence: Synthetic oligonucleotide
cacugucugaaccguucca

SEQ ID NO: 739943 - RNA, 19 nt, Artificial Sequence
  Description of Artificial Sequence: Synthetic oligonucleotide
guacucuccccuagaguga

SEQ ID NO: 739944 - RNA, 19 nt, Artificial Sequence
  Description of Artificial Sequence: Synthetic oligonucleotide
gaaguggaagugcgucacu

SEQ ID NO: 739945 - RNA, 19 nt, Artificial Sequence
  Description of Artificial Sequence: Synthetic oligonucleotide
cuccuccauguuagcuggc

SEQ ID NO: 739946 - RNA, 19 nt, Artificial Sequence
  Description of Artificial Sequence: Synthetic oligonucleotide
caaccggcuuaacuaugca

SEQ ID NO: 739947 - RNA, 19 nt, Artificial Sequence
  Description of Artificial Sequence: Synthetic oligonucleotide
cuucaggcaggcucggggu

SEQ ID NO: 739948 - RNA, 19 nt, Artificial Sequence
  Description of Artificial Sequence: Synthetic oligonucleotide
acucagcggcggugaugac

SEQ ID NO: 739949 - RNA, 19 nt, Artificial Sequence
  Description of Artificial Sequence: Synthetic oligonucleotide
caccgacagauagucucug

SEQ ID NO: 739950 - RNA, 19 nt, Artificial Sequence
  Description of Artificial Sequence: Synthetic oligonucleotide
uggcacugucugaaccguu

SEQ ID NO: 739951 - RNA, 19 nt, Artificial Sequence
  Description of Artificial Sequence: Synthetic oligonucleotide
gucuacaauguugaagcuu

SEQ ID NO: 739952 - RNA, 19 nt, Artificial Sequence
  Description of Artificial Sequence: Synthetic oligonucleotide
ggaucuacugcuggggucu

SEQ ID NO: 739953 - RNA, 19 nt, Artificial Sequence
  Description of Artificial Sequence: Synthetic oligonucleotide
guggacuugcuucuaccau

SEQ ID NO: 739954 - RNA, 19 nt, Artificial Sequence
  Description of Artificial Sequence: Synthetic oligonucleotide
ggcacugucugaaccguuc

SEQ ID NO: 739955 - RNA, 19 nt, Artificial Sequence
  Description of Artificial Sequence: Synthetic oligonucleotide
gagcagagcuugcuucgua

SEQ ID NO: 739956 - RNA, 19 nt, Artificial Sequence
  Description of Artificial Sequence: Synthetic oligonucleotide
gaacccguagugccguaau

SEQ ID NO: 739957 - RNA, 19 nt, Artificial Sequence
  Description of Artificial Sequence: Synthetic oligonucleotide
ccagaguaguuaaacucaa

SEQ ID NO: 739958 - RNA, 19 nt, Artificial Sequence
  Description of Artificial Sequence: Synthetic oligonucleotide
cguagugccguaauucuaa

SEQ ID NO: 739959 - RNA, 19 nt, Artificial Sequence
  Description of Artificial Sequence: Synthetic oligonucleotide
gcggccuuuauucucuugu

SEQ ID NO: 739960 - RNA, 19 nt, Artificial Sequence
  Description of Artificial Sequence: Synthetic oligonucleotide
gaccgugggugguggccac

SEQ ID NO: 739961 - RNA, 19 nt, Artificial Sequence
  Description of Artificial Sequence: Synthetic oligonucleotide
gcaccacuggaagucguug

SEQ ID NO: 739962 - RNA, 19 nt, Artificial Sequence
  Description of Artificial Sequence: Synthetic oligonucleotide
caggcucgggguuugcugu

SEQ ID NO: 739963 - RNA, 19 nt, Artificial Sequence
  Description of Artificial Sequence: Synthetic oligonucleotide
gccguaauucuaaaugggu

SEQ ID NO: 739964 - RNA, 19 nt, Artificial Sequence
  Description of Artificial Sequence: Synthetic oligonucleotide
cuacaauguugaagcuucu

SEQ ID NO: 739965 - RNA, 19 nt, Artificial Sequence
  Description of Artificial Sequence: Synthetic oligonucleotide
gggcguauccuugcaccag

SEQ ID NO: 739966 - RNA, 19 nt, Artificial Sequence
  Description of Artificial Sequence: Synthetic oligonucleotide
caucucuccgaguguuucu

SEQ ID NO: 739967 - RNA, 19 nt, Artificial Sequence
  Description of Artificial Sequence: Synthetic oligonucleotide
agagugagugcggccuuua

SEQ ID NO: 739968 - RNA, 19 nt, Artificial Sequence
  Description of Artificial Sequence: Synthetic oligonucleotide
ccggcuuaacuaugcaaga

SEQ ID NO: 739969 - RNA, 19 nt, Artificial Sequence
  Description of Artificial Sequence: Synthetic oligonucleotide
gaucaucugcagagagaua

SEQ ID NO: 739970 - RNA, 19 nt, Artificial Sequence
  Description of Artificial Sequence: Synthetic oligonucleotide
gcaaccaccugauuuuauu

SEQ ID NO: 739971 - RNA, 19 nt, Artificial Sequence
  Description of Artificial Sequence: Synthetic oligonucleotide
ggucucgaagucguccauc

SEQ ID NO: 739972 - RNA, 19 nt, Artificial Sequence
  Description of Artificial Sequence: Synthetic oligonucleotide
ccgucauaauggcacuguc

SEQ ID NO: 739973 - RNA, 19 nt, Artificial Sequence
  Description of Artificial Sequence: Synthetic oligonucleotide
agcaccacuggaagucguu

SEQ ID NO: 739974 - RNA, 19 nt, Artificial Sequence
  Description of Artificial Sequence: Synthetic oligonucleotide
gguggagaugaugucggcu

SEQ ID NO: 739975 - RNA, 19 nt, Artificial Sequence
  Description of Artificial Sequence: Synthetic oligonucleotide
agcuugcuucguagguacu

SEQ ID NO: 739976 - RNA, 19 nt, Artificial Sequence
  Description of Artificial Sequence: Synthetic oligonucleotide
ccgaccgaggcgcuccgag

SEQ ID NO: 739977 - RNA, 19 nt, Artificial Sequence
  Description of Artificial Sequence: Synthetic oligonucleotide
cguucacuuauuuuccaua

SEQ ID NO: 739978 - RNA, 19 nt, Artificial Sequence
  Description of Artificial Sequence: Synthetic oligonucleotide
cuuguucccguuggaaaau

SEQ ID NO: 739979 - RNA, 19 nt, Artificial Sequence
  Description of Artificial Sequence: Synthetic oligonucleotide
ggaaaacaaccggcuuaac

SEQ ID NO: 739980 - RNA, 19 nt, Artificial Sequence
  Description of Artificial Sequence: Synthetic oligonucleotide
uggaacccguagugccgua

SEQ ID NO: 739981 - RNA, 19 nt, Artificial Sequence
  Description of Artificial Sequence: Synthetic oligonucleotide
ugucggcuuccgccacguc

SEQ ID NO: 739982 - RNA, 19 nt, Artificial Sequence
  Description of Artificial Sequence: Synthetic oligonucleotide
cucagcggcggugaugacu

SEQ ID NO: 739983 - RNA, 19 nt, Artificial Sequence
  Description of Artificial Sequence: Synthetic oligonucleotide
gaaggucuccagaguaguu

SEQ ID NO: 739984 - RNA, 19 nt, Artificial Sequence
  Description of Artificial Sequence: Synthetic oligonucleotide
gguccccuugcuacugcug

SEQ ID NO: 739985 - RNA, 19 nt, Artificial Sequence
  Description of Artificial Sequence: Synthetic oligonucleotide
ccaacacguugcacuggug

SEQ ID NO: 739986 - RNA, 19 nt, Artificial Sequence
  Description of Artificial Sequence: Synthetic oligonucleotide
gagugagugcggccuuuau

SEQ ID NO: 739987 - RNA, 19 nt, Artificial Sequence
  Description of Artificial Sequence: Synthetic oligonucleotide
cggcuuaacuaugcaagac

SEQ ID NO: 739988 - RNA, 19 nt, Artificial Sequence
  Description of Artificial Sequence: Synthetic oligonucleotide
gggcgggacgcgcccagcc

SEQ ID NO: 739989 - RNA, 19 nt, Artificial Sequence
  Description of Artificial Sequence: Synthetic oligonucleotide
ucguugccgcccgccgggc

SEQ ID NO: 739990 - RNA, 19 nt, Artificial Sequence
  Description of Artificial Sequence: Synthetic oligonucleotide
ggagcgcaugucacacagc

SEQ ID NO: 739991 - RNA, 19 nt, Artificial Sequence
  Description of Artificial Sequence: Synthetic oligonucleotide
cccguucacuuauuuucca

SEQ ID NO: 739992 - RNA, 19 nt, Artificial Sequence
  Description of Artificial Sequence: Synthetic oligonucleotide
gcggcaaccaccugauuuu

SEQ ID NO: 739993 - RNA, 19 nt, Artificial Sequence
  Description of Artificial Sequence: Synthetic oligonucleotide
ggaccgugggugguggcca

SEQ ID NO: 739994 - RNA, 19 nt, Artificial Sequence
  Description of Artificial Sequence: Synthetic oligonucleotide
acaccauguccagguuaaa

SEQ ID NO: 739995 - RNA, 19 nt, Artificial Sequence
  Description of Artificial Sequence: Synthetic oligonucleotide
gcggcggugaugacuucug

SEQ ID NO: 739996 - RNA, 19 nt, Artificial Sequence
  Description of Artificial Sequence: Synthetic oligonucleotide
cgagauuauuucugagaaa

SEQ ID NO: 739997 - RNA, 19 nt, Artificial Sequence
  Description of Artificial Sequence: Synthetic oligonucleotide
cgucauaauggcacugucu

SEQ ID NO: 739998 - RNA, 19 nt, Artificial Sequence
  Description of Artificial Sequence: Synthetic oligonucleotide
ccgacagauagucucuggu

SEQ ID NO: 739999 - RNA, 19 nt, Artificial Sequence
  Description of Artificial Sequence: Synthetic oligonucleotide
cccguagugccguaauucu

SEQ ID NO: 740000 - RNA, 19 nt, Artificial Sequence
  Description of Artificial Sequence: Synthetic oligonucleotide
caccaguggugguguugca

SEQ ID NO: 740001 - RNA, 19 nt, Artificial Sequence
  Description of Artificial Sequence: Synthetic oligonucleotide
cagcuucgaguagguuuuc

SEQ ID NO: 740002 - RNA, 19 nt, Artificial Sequence
  Description of Artificial Sequence: Synthetic oligonucleotide
cuugguccuccagucaguu

SEQ ID NO: 740003 - RNA, 19 nt, Artificial Sequence
  Description of Artificial Sequence: Synthetic oligonucleotide
ccacaccauguccagguua

SEQ ID NO: 740004 - RNA, 19 nt, Artificial Sequence
  Description of Artificial Sequence: Synthetic oligonucleotide
ggaacccguagugccguaa

SEQ ID NO: 740005 - RNA, 19 nt, Artificial Sequence
  Description of Artificial Sequence: Synthetic oligonucleotide
ccguagugccguaauucua

SEQ ID NO: 740006 - RNA, 19 nt, Artificial Sequence
  Description of Artificial Sequence: Synthetic oligonucleotide
cgguggagaugaugucggc

SEQ ID NO: 740007 - RNA, 19 nt, Artificial Sequence
  Description of Artificial Sequence: Synthetic oligonucleotide
gccugucacacagggcaga

SEQ ID NO: 740008 - RNA, 19 nt, Artificial Sequence
  Description of Artificial Sequence: Synthetic oligonucleotide
gugcgucacuauucucaau

SEQ ID NO: 740009 - RNA, 19 nt, Artificial Sequence
  Description of Artificial Sequence: Synthetic oligonucleotide
cgaguagguuuucccuuca

SEQ ID NO: 740010 - RNA, 19 nt, Artificial Sequence
  Description of Artificial Sequence: Synthetic oligonucleotide
ggcucgggguuugcuguuc

SEQ ID NO: 740011 - RNA, 19 nt, Artificial Sequence
  Description of Artificial Sequence: Synthetic oligonucleotide
gcgggcgggacgcgcccag

SEQ ID NO: 740012 - RNA, 19 nt, Artificial Sequence
  Description of Artificial Sequence: Synthetic oligonucleotide
cgggcguauccuugcacca

SEQ ID NO: 740013 - RNA, 19 nt, Artificial Sequence
  Description of Artificial Sequence: Synthetic oligonucleotide
ccacguccucgucgauagc

SEQ ID NO: 740014 - RNA, 19 nt, Artificial Sequence
  Description of Artificial Sequence: Synthetic oligonucleotide
gcguaacaucucuccgagu

SEQ ID NO: 740015 - RNA, 19 nt, Artificial Sequence
  Description of Artificial Sequence: Synthetic oligonucleotide
ccauaccuucaccgacaga

SEQ ID NO: 740016 - RNA, 19 nt, Artificial Sequence
  Description of Artificial Sequence: Synthetic oligonucleotide
cccgucauaauggcacugu

SEQ ID NO: 740017 - RNA, 19 nt, Artificial Sequence
  Description of Artificial Sequence: Synthetic oligonucleotide
cgggacgcgcccagccgag

SEQ ID NO: 740018 - RNA, 19 nt, Artificial Sequence
  Description of Artificial Sequence: Synthetic oligonucleotide
gggucucgaagucguccau

SEQ ID NO: 740019 - RNA, 19 nt, Artificial Sequence
  Description of Artificial Sequence: Synthetic oligonucleotide
cggccgaccgaggcgcucc

SEQ ID NO: 740020 - RNA, 19 nt, Artificial Sequence
  Description of Artificial Sequence: Synthetic oligonucleotide
ccagccgagcgcggccgac

SEQ ID NO: 740021 - RNA, 19 nt, Artificial Sequence
  Description of Artificial Sequence: Synthetic oligonucleotide
gccgaccgaggcgcuccga

SEQ ID NO: 740022 - RNA, 19 nt, Artificial Sequence
  Description of Artificial Sequence: Synthetic oligonucleotide
cguugccgcccgccgggca

SEQ ID NO: 740023 - RNA, 19 nt, Artificial Sequence
  Description of Artificial Sequence: Synthetic oligonucleotide
cgaagucguccaucuucau

SEQ ID NO: 740024 - RNA, 19 nt, Artificial Sequence
  Description of Artificial Sequence: Synthetic oligonucleotide
cgggcgggacgcgcccagc

SEQ ID NO: 740025 - RNA, 19 nt, Artificial Sequence
  Description of Artificial Sequence: Synthetic oligonucleotide
cggcggugaugacuucugu

SEQ ID NO: 740026 - RNA, 19 nt, Artificial Sequence
  Description of Artificial Sequence: Synthetic oligonucleotide
cgucguggacuugcuucua

SEQ ID NO: 740027 - RNA, 19 nt, Artificial Sequence
  Description of Artificial Sequence: Synthetic oligonucleotide
ccgccacguccucgucgau

SEQ ID NO: 740028 - RNA, 19 nt, Artificial Sequence
  Description of Artificial Sequence: Synthetic oligonucleotide
  modified_base (5)..(5): a, c, u, g, unknown or other
uuuangaugacaaagacag

SEQ ID NO: 740029 - RNA, 19 nt, Artificial Sequence
  Description of Artificial Sequence: Synthetic oligonucleotide
auuacaaagguauuggccc

SEQ ID NO: 740030 - RNA, 19 nt, Artificial Sequence
  Description of Artificial Sequence: Synthetic oligonucleotide
aguuuuaucagcuaagggg

SEQ ID NO: 740031 - RNA, 19 nt, Artificial Sequence
  Description of Artificial Sequence: Synthetic oligonucleotide
agugagaccacacauaggc

SEQ ID NO: 740032 - RNA, 19 nt, Artificial Sequence
  Description of Artificial Sequence: Synthetic oligonucleotide
acuaugacccaacaaagcc

SEQ ID NO: 740033 - RNA, 19 nt, Artificial Sequence
  Description of Artificial Sequence: Synthetic oligonucleotide
ucugaaaguauccugguag

SEQ ID NO: 740034 - RNA, 19 nt, Artificial Sequence
  Description of Artificial Sequence: Synthetic oligonucleotide
acuaagauauaugacaggc

SEQ ID NO: 740035 - RNA, 19 nt, Artificial Sequence
  Description of Artificial Sequence: Synthetic oligonucleotide
uguuauauaacacaucaaa

SEQ ID NO: 740036 - RNA, 19 nt, Artificial Sequence
  Description of Artificial Sequence: Synthetic oligonucleotide
cagauuuugaacuaacugg

SEQ ID NO: 740037 - RNA, 19 nt, Artificial Sequence
  Description of Artificial Sequence: Synthetic oligonucleotide
ggagacauaaccuagagcc

SEQ ID NO: 740038 - RNA, 19 nt, Artificial Sequence
  Description of Artificial Sequence: Synthetic oligonucleotide
uuucauaccugaaaauccg

SEQ ID NO: 740039 - RNA, 19 nt, Artificial Sequence
  Description of Artificial Sequence: Synthetic oligonucleotide
uaacuaggagaacugagcg

SEQ ID NO: 740040 - RNA, 19 nt, Artificial Sequence
  Description of Artificial Sequence: Synthetic oligonucleotide
  modified_base (7)..(7): a, c, u, g, unknown or other
uauuuangaugacaaagac

SEQ ID NO: 740041 - RNA, 19 nt, Artificial Sequence
  Description of Artificial Sequence: Synthetic oligonucleotide
aaacguccaaucuuguccg

SEQ ID NO: 740042 - RNA, 19 nt, Artificial Sequence
  Description of Artificial Sequence: Synthetic oligonucleotide
aagccuacagauuuuagca

SEQ ID NO: 740043 - RNA, 19 nt, Artificial Sequence
  Description of Artificial Sequence: Synthetic oligonucleotide
aaaguauccugguagucag

SEQ ID NO: 740044 - RNA, 19 nt, Artificial Sequence
  Description of Artificial Sequence: Synthetic oligonucleotide
agcacuaagauauaugaca

SEQ ID NO: 740045 - RNA, 19 nt, Artificial Sequence
  Description of Artificial Sequence: Synthetic oligonucleotide
  modified_base (15)..(15): a, c, u, g, unknown or other
ugauuagcuauuuangaug

SEQ ID NO: 740046 - RNA, 19 nt, Artificial Sequence
  Description of Artificial Sequence: Synthetic oligonucleotide
ugcuuuuguacucagggcc

SEQ ID NO: 740047 - RNA, 19 nt, Artificial Sequence
  Description of Artificial Sequence: Synthetic oligonucleotide
acuaggagaacugagcggc

SEQ ID NO: 740048 - RNA, 19 nt, Artificial Sequence
  Description of Artificial Sequence: Synthetic oligonucleotide
uaaccuagagccaauguug

SEQ ID NO: 740049 - RNA, 19 nt, Artificial Sequence
  Description of Artificial Sequence: Synthetic oligonucleotide
ugaacuaacuggaggaugc

SEQ ID NO: 740050 - RNA, 19 nt, Artificial Sequence
  Description of Artificial Sequence: Synthetic oligonucleotide
aaccaauucagcacggacc

SEQ ID NO: 740051 - RNA, 19 nt, Artificial Sequence
  Description of Artificial Sequence: Synthetic oligonucleotide
agaacaacuucgaauaggc

SEQ ID NO: 740052 - RNA, 19 nt, Artificial Sequence
  Description of Artificial Sequence: Synthetic oligonucleotide
aaauaugaggucagauucc

SEQ ID NO: 740053 - RNA, 19 nt, Artificial Sequence
  Description of Artificial Sequence: Synthetic oligonucleotide
  modified_base (17)..(17): a, c, u, g, unknown or other
gaugauuagcuauuuanga

SEQ ID NO: 740054 - RNA, 19 nt, Artificial Sequence
  Description of Artificial Sequence: Synthetic oligonucleotide
caaacguccaaucuugucc

SEQ ID NO: 740055 - RNA, 19 nt, Artificial Sequence
  Description of Artificial Sequence: Synthetic oligonucleotide
  modified_base (3)..(3): a, c, u, g, unknown or other
uangaugacaaagacagaa

SEQ ID NO: 740056 - RNA, 19 nt, Artificial Sequence
  Description of Artificial Sequence: Synthetic oligonucleotide
uuggaacuagauuacagca

SEQ ID NO: 740057 - RNA, 19 nt, Artificial Sequence
  Description of Artificial Sequence: Synthetic oligonucleotide
cuaacuaggagaacugagc

SEQ ID NO: 740058 - RNA, 19 nt, Artificial Sequence
  Description of Artificial Sequence: Synthetic oligonucleotide
uggaucagauuucaaacug

SEQ ID NO: 740059 - RNA, 19 nt, Artificial Sequence
  Description of Artificial Sequence: Synthetic oligonucleotide
aacuaggagaacugagcgg

SEQ ID NO: 740060 - RNA, 19 nt, Artificial Sequence
  Description of Artificial Sequence: Synthetic oligonucleotide
aaaaccggcaguuugcuuu

SEQ ID NO: 740061 - RNA, 19 nt, Artificial Sequence
  Description of Artificial Sequence: Synthetic oligonucleotide
ucauagcgaagaaugaaug

SEQ ID NO: 740062 - RNA, 19 nt, Artificial Sequence
  Description of Artificial Sequence: Synthetic oligonucleotide
aaagggcugaaccgcacac

SEQ ID NO: 740063 - RNA, 19 nt, Artificial Sequence
  Description of Artificial Sequence: Synthetic oligonucleotide
aucauuagcaugcucauau

SEQ ID NO: 740064 - RNA, 19 nt, Artificial Sequence
  Description of Artificial Sequence: Synthetic oligonucleotide
ucuagcagcagcacuaaga

SEQ ID NO: 740065 - RNA, 19 nt, Artificial Sequence
  Description of Artificial Sequence: Synthetic oligonucleotide
  modified_base (16)..(16): a, c, u, g, unknown or other
augauuagcuauuuangau

SEQ ID NO: 740066 - RNA, 19 nt, Artificial Sequence
  Description of Artificial Sequence: Synthetic oligonucleotide
augcucauaucugacaacc

SEQ ID NO: 740067 - RNA, 19 nt, Artificial Sequence
  Description of Artificial Sequence: Synthetic oligonucleotide
  modified_base (11)..(11): a, c, u, g, unknown or other
uagcuauuuangaugacaa

SEQ ID NO: 740068 - RNA, 19 nt, Artificial Sequence
  Description of Artificial Sequence: Synthetic oligonucleotide
cagacgaggagacauaacc

SEQ ID NO: 740069 - RNA, 19 nt, Artificial Sequence
  Description of Artificial Sequence: Synthetic oligonucleotide
guagccauaaaguaguguc

SEQ ID NO: 740070 - RNA, 19 nt, Artificial Sequence
  Description of Artificial Sequence: Synthetic oligonucleotide
uucucuagaagccuugagu

SEQ ID NO: 740071 - RNA, 19 nt, Artificial Sequence
  Description of Artificial Sequence: Synthetic oligonucleotide
uguacuuuguggacguaag

SEQ ID NO: 740072 - RNA, 19 nt, Artificial Sequence
  Description of Artificial Sequence: Synthetic oligonucleotide
aguguuacagggcacacga

SEQ ID NO: 740073 - RNA, 19 nt, Artificial Sequence
  Description of Artificial Sequence: Synthetic oligonucleotide
aauguaaaugcagcucuuc

SEQ ID NO: 740074 - RNA, 19 nt, Artificial Sequence
  Description of Artificial Sequence: Synthetic oligonucleotide
  modified_base (2)..(2): a, c, u, g, unknown or other
angaugacaaagacagaac

SEQ ID NO: 740075 - RNA, 19 nt, Artificial Sequence
  Description of Artificial Sequence: Synthetic oligonucleotide
cucauaucugacaaccccg

SEQ ID NO: 740076 - RNA, 19 nt, Artificial Sequence
  Description of Artificial Sequence: Synthetic oligonucleotide
uggaacuagauuacagcag

SEQ ID NO: 740077 - RNA, 19 nt, Artificial Sequence
  Description of Artificial Sequence: Synthetic oligonucleotide
cauaccugaaaauccggcg

SEQ ID NO: 740078 - RNA, 19 nt, Artificial Sequence
  Description of Artificial Sequence: Synthetic oligonucleotide
uaaaguagugucugaaagu

SEQ ID NO: 740079 - RNA, 19 nt, Artificial Sequence
  Description of Artificial Sequence: Synthetic oligonucleotide
aaucugaacaccacuaacu

SEQ ID NO: 740080 - RNA, 19 nt, Artificial Sequence
  Description of Artificial Sequence: Synthetic oligonucleotide
ucaacauagaggaggcuug

SEQ ID NO: 740081 - RNA, 19 nt, Artificial Sequence
  Description of Artificial Sequence: Synthetic oligonucleotide
uucauaccugaaaauccgg

SEQ ID NO: 740082 - RNA, 19 nt, Artificial Sequence
  Description of Artificial Sequence: Synthetic oligonucleotide
ucuccaauauucuggauuc

SEQ ID NO: 740083 - RNA, 19 nt, Artificial Sequence
  Description of Artificial Sequence: Synthetic oligonucleotide
auauaugacaggcuuuugu

SEQ ID NO: 740084 - RNA, 19 nt, Artificial Sequence
  Description of Artificial Sequence: Synthetic oligonucleotide
uguugccagauucacaccu

SEQ ID NO: 740085 - RNA, 19 nt, Artificial Sequence
  Description of Artificial Sequence: Synthetic oligonucleotide
  modified_base (8)..(8): a, c, u, g, unknown or other
cuauuuangaugacaaaga

SEQ ID NO: 740086 - RNA, 19 nt, Artificial Sequence
  Description of Artificial Sequence: Synthetic oligonucleotide
uguuaucaucauuagcaug

SEQ ID NO: 740087 - RNA, 19 nt, Artificial Sequence
  Description of Artificial Sequence: Synthetic oligonucleotide
cuucaaacguccaaucuug

SEQ ID NO: 740088 - RNA, 19 nt, Artificial Sequence
  Description of Artificial Sequence: Synthetic oligonucleotide
aaccuagagccaauguugc

SEQ ID NO: 740089 - RNA, 19 nt, Artificial Sequence
  Description of Artificial Sequence: Synthetic oligonucleotide
caagccuacagauuuuagc

SEQ ID NO: 740090 - RNA, 19 nt, Artificial Sequence
  Description of Artificial Sequence: Synthetic oligonucleotide
ugaauggcaagccuacaga

SEQ ID NO: 740091 - RNA, 19 nt, Artificial Sequence
  Description of Artificial Sequence: Synthetic oligonucleotide
uucauagcgaagaaugaau

SEQ ID NO: 740092 - RNA, 19 nt, Artificial Sequence
  Description of Artificial Sequence: Synthetic oligonucleotide
gucuucauagcgaagaaug

SEQ ID NO: 740093 - RNA, 19 nt, Artificial Sequence
  Description of Artificial Sequence: Synthetic oligonucleotide
cuagccaucgguucagugc

SEQ ID NO: 740094 - RNA, 19 nt, Artificial Sequence
  Description of Artificial Sequence: Synthetic oligonucleotide
uuaugggaggucaacauuu

SEQ ID NO: 740095 - RNA, 19 nt, Artificial Sequence
  Description of Artificial Sequence: Synthetic oligonucleotide
  modified_base (9)..(9): a, c, u, g, unknown or other
gcuauuuangaugacaaag

SEQ ID NO: 740096 - RNA, 19 nt, Artificial Sequence
  Description of Artificial Sequence: Synthetic oligonucleotide
aguguacacgucaaaaccg

SEQ ID NO: 740097 - RNA, 19 nt, Artificial Sequence
  Description of Artificial Sequence: Synthetic oligonucleotide
acaacuucgaauaggcccg

SEQ ID NO: 740098 - RNA, 19 nt, Artificial Sequence
  Description of Artificial Sequence: Synthetic oligonucleotide
augaauggcaagccuacag

SEQ ID NO: 740099 - RNA, 19 nt, Artificial Sequence
  Description of Artificial Sequence: Synthetic oligonucleotide
acuagauuacagcaguggu

SEQ ID NO: 740100 - RNA, 19 nt, Artificial Sequence
  Description of Artificial Sequence: Synthetic oligonucleotide
ugggaggucaacauuugca

SEQ ID NO: 740101 - RNA, 19 nt, Artificial Sequence
  Description of Artificial Sequence: Synthetic oligonucleotide
  modified_base (18)..(18): a, c, u, g, unknown or other
agaugauuagcuauuuang

SEQ ID NO: 740102 - RNA, 19 nt, Artificial Sequence
  Description of Artificial Sequence: Synthetic oligonucleotide
ucuucauagcgaagaauga

SEQ ID NO: 740103 - RNA, 19 nt, Artificial Sequence
  Description of Artificial Sequence: Synthetic oligonucleotide
uaugacccaacaaagccau

SEQ ID NO: 740104 - RNA, 19 nt, Artificial Sequence
  Description of Artificial Sequence: Synthetic oligonucleotide
ugucaugcuaucacauuug

SEQ ID NO: 740105 - RNA, 19 nt, Artificial Sequence
  Description of Artificial Sequence: Synthetic oligonucleotide
agacagaacaacuucgaau

SEQ ID NO: 740106 - RNA, 19 nt, Artificial Sequence
  Description of Artificial Sequence: Synthetic oligonucleotide
uuuagcaaguccuucccuc

SEQ ID NO: 740107 - RNA, 19 nt, Artificial Sequence
  Description of Artificial Sequence: Synthetic oligonucleotide
acguaaguguauucugugg

SEQ ID NO: 740108 - RNA, 19 nt, Artificial Sequence
  Description of Artificial Sequence: Synthetic oligonucleotide
uucaguuguuccccuagcc

SEQ ID NO: 740109 - RNA, 19 nt, Artificial Sequence
  Description of Artificial Sequence: Synthetic oligonucleotide
acacagguaagccaagcug

SEQ ID NO: 740110 - RNA, 19 nt, Artificial Sequence
  Description of Artificial Sequence: Synthetic oligonucleotide
uucgaauaggcccguauuc

SEQ ID NO: 740111 - RNA, 19 nt, Artificial Sequence
  Description of Artificial Sequence: Synthetic oligonucleotide
uguccguauguccaacugc

SEQ ID NO: 740112 - RNA, 19 nt, Artificial Sequence
  Description of Artificial Sequence: Synthetic oligonucleotide
ugaaaauccggcguagcca

SEQ ID NO: 740113 - RNA, 19 nt, Artificial Sequence
  Description of Artificial Sequence: Synthetic oligonucleotide
uguaguguacacgucaaaa

SEQ ID NO: 740114 - RNA, 19 nt, Artificial Sequence
  Description of Artificial Sequence: Synthetic oligonucleotide
ugggauccaaacauagugu

SEQ ID NO: 740115 - RNA, 19 nt, Artificial Sequence
  Description of Artificial Sequence: Synthetic oligonucleotide
guaguguacacgucaaaac

SEQ ID NO: 740116 - RNA, 19 nt, Artificial Sequence
  Description of Artificial Sequence: Synthetic oligonucleotide
  modified_base (6)..(6): a, c, u, g, unknown or other
auuuangaugacaaagaca

SEQ ID NO: 740117 - RNA, 19 nt, Artificial Sequence
  Description of Artificial Sequence: Synthetic oligonucleotide
gacguaaguguauucugug

SEQ ID NO: 740118 - RNA, 19 nt, Artificial Sequence
  Description of Artificial Sequence: Synthetic oligonucleotide
auaccugaaaauccggcgu

SEQ ID NO: 740119 - RNA, 19 nt, Artificial Sequence
  Description of Artificial Sequence: Synthetic oligonucleotide
ucauaucugacaaccccga

SEQ ID NO: 740120 - RNA, 19 nt, Artificial Sequence
  Description of Artificial Sequence: Synthetic oligonucleotide
cugaaccgcacacaggugc

SEQ ID NO: 740121 - RNA, 19 nt, Artificial Sequence
  Description of Artificial Sequence: Synthetic oligonucleotide
cuggaauguccucugauac

SEQ ID NO: 740122 - RNA, 19 nt, Artificial Sequence
  Description of Artificial Sequence: Synthetic oligonucleotide
ucacuugccaugccaaugu

SEQ ID NO: 740123 - RNA, 19 nt, Artificial Sequence
  Description of Artificial Sequence: Synthetic oligonucleotide
uuugcuucgagugccugag

SEQ ID NO: 740124 - RNA, 19 nt, Artificial Sequence
  Description of Artificial Sequence: Synthetic oligonucleotide
ucucaagaaaggcaauauc

SEQ ID NO: 740125 - RNA, 19 nt, Artificial Sequence
  Description of Artificial Sequence: Synthetic oligonucleotide
accauaucuuguccacugc

SEQ ID NO: 740126 - RNA, 19 nt, Artificial Sequence
  Description of Artificial Sequence: Synthetic oligonucleotide
uccggcguagccauaaagu

SEQ ID NO: 740127 - RNA, 19 nt, Artificial Sequence
  Description of Artificial Sequence: Synthetic oligonucleotide
cuaguucagaaacauccac

SEQ ID NO: 740128 - RNA, 19 nt, Artificial Sequence
  Description of Artificial Sequence: Synthetic oligonucleotide
aguuaaaacuucuucccuu

SEQ ID NO: 740129 - RNA, 19 nt, Artificial Sequence
  Description of Artificial Sequence: Synthetic oligonucleotide
uuacaaagguauuggccca

SEQ ID NO: 740130 - RNA, 19 nt, Artificial Sequence
  Description of Artificial Sequence: Synthetic oligonucleotide
cugaaaauccggcguagcc

SEQ ID NO: 740131 - RNA, 19 nt, Artificial Sequence
  Description of Artificial Sequence: Synthetic oligonucleotide
cagacuaugacccaacaaa

SEQ ID NO: 740132 - RNA, 19 nt, Artificial Sequence
  Description of Artificial Sequence: Synthetic oligonucleotide
uggacguaaguguauucug

SEQ ID NO: 740133 - RNA, 19 nt, Artificial Sequence
  Description of Artificial Sequence: Synthetic oligonucleotide
gaaggaauuuggugguggc

SEQ ID NO: 740134 - RNA, 19 nt, Artificial Sequence
  Description of Artificial Sequence: Synthetic oligonucleotide
agcuguaguguacacguca

SEQ ID NO: 740135 - RNA, 19 nt, Artificial Sequence
  Description of Artificial Sequence: Synthetic oligonucleotide
cacuaagauauaugacagg

SEQ ID NO: 740136 - RNA, 19 nt, Artificial Sequence
  Description of Artificial Sequence: Synthetic oligonucleotide
uccaaucuuguccguaugu

SEQ ID NO: 740137 - RNA, 19 nt, Artificial Sequence
  Description of Artificial Sequence: Synthetic oligonucleotide
uuguuauauaacacaucaa

SEQ ID NO: 740138 - RNA, 19 nt, Artificial Sequence
  Description of Artificial Sequence: Synthetic oligonucleotide
acuaacuaggagaacugag

SEQ ID NO: 740139 - RNA, 19 nt, Artificial Sequence
  Description of Artificial Sequence: Synthetic oligonucleotide
  modified_base (4)..(4): a, c, u, g, unknown or other
uuangaugacaaagacaga

SEQ ID NO: 740140 - RNA, 19 nt, Artificial Sequence
  Description of Artificial Sequence: Synthetic oligonucleotide
ucgaauaggcccguauucc

SEQ ID NO: 740141 - RNA, 19 nt, Artificial Sequence
  Description of Artificial Sequence: Synthetic oligonucleotide
ucgguucagugcaucacag

SEQ ID NO: 740142 - RNA, 19 nt, Artificial Sequence
  Description of Artificial Sequence: Synthetic oligonucleotide
agacuaugacccaacaaag

SEQ ID NO: 740143 - RNA, 19 nt, Artificial Sequence
  Description of Artificial Sequence: Synthetic oligonucleotide
uagccauaaaguagugucu

SEQ ID NO: 740144 - RNA, 19 nt, Artificial Sequence
  Description of Artificial Sequence: Synthetic oligonucleotide
auauaacacaucaaaucca

SEQ ID NO: 740145 - RNA, 19 nt, Artificial Sequence
  Description of Artificial Sequence: Synthetic oligonucleotide
aacacucccucuuccagaa

SEQ ID NO: 740146 - RNA, 19 nt, Artificial Sequence
  Description of Artificial Sequence: Synthetic oligonucleotide
auuagcaugcucauaucug

SEQ ID NO: 740147 - RNA, 19 nt, Artificial Sequence
  Description of Artificial Sequence: Synthetic oligonucleotide
uccucaauuucccgggcug

SEQ ID NO: 740148 - RNA, 19 nt, Artificial Sequence
  Description of Artificial Sequence: Synthetic oligonucleotide
uaugggaggucaacauuug

SEQ ID NO: 740149 - RNA, 19 nt, Artificial Sequence
  Description of Artificial Sequence: Synthetic oligonucleotide
aaaccggcaguuugcuuug

SEQ ID NO: 740150 - RNA, 19 nt, Artificial Sequence
  Description of Artificial Sequence: Synthetic oligonucleotide
gacaaccccgauuccaggc

SEQ ID NO: 740151 - RNA, 19 nt, Artificial Sequence
  Description of Artificial Sequence: Synthetic oligonucleotide
uguacacgucaaaaccggc

SEQ ID NO: 740152 - RNA, 19 nt, Artificial Sequence
  Description of Artificial Sequence: Synthetic oligonucleotide
ucugacaaccccgauucca

SEQ ID NO: 740153 - RNA, 19 nt, Artificial Sequence
  Description of Artificial Sequence: Synthetic oligonucleotide
agggcugaaccgcacacag

SEQ ID NO: 740154 - RNA, 19 nt, Artificial Sequence
  Description of Artificial Sequence: Synthetic oligonucleotide
  modified_base (10)..(10): a, c, u, g, unknown or other
agcuauuuangaugacaaa

SEQ ID NO: 740155 - RNA, 19 nt, Artificial Sequence
  Description of Artificial Sequence: Synthetic oligonucleotide
cugggacagcuuuaaaggc

SEQ ID NO: 740156 - RNA, 19 nt, Artificial Sequence
  Description of Artificial Sequence: Synthetic oligonucleotide
uuguccguauguccaacug

SEQ ID NO: 740157 - RNA, 19 nt, Artificial Sequence
  Description of Artificial Sequence: Synthetic oligonucleotide
gacuaugacccaacaaagc

SEQ ID NO: 740158 - RNA, 19 nt, Artificial Sequence
  Description of Artificial Sequence: Synthetic oligonucleotide
agggaucucucucccgacc

SEQ ID NO: 740159 - RNA, 19 nt, Artificial Sequence
  Description of Artificial Sequence: Synthetic oligonucleotide
cuggacgccauuuccacac

SEQ ID NO: 740160 - RNA, 19 nt, Artificial Sequence
  Description of Artificial Sequence: Synthetic oligonucleotide
ggaaaugguucuuuagaug

SEQ ID NO: 740161 - RNA, 19 nt, Artificial Sequence
  Description of Artificial Sequence: Synthetic oligonucleotide
gcagcacuaagauauauga

SEQ ID NO: 740162 - RNA, 19 nt, Artificial Sequence
  Description of Artificial Sequence: Synthetic oligonucleotide
guguacacgucaaaaccgg

SEQ ID NO: 740163 - RNA, 19 nt, Artificial Sequence
  Description of Artificial Sequence: Synthetic oligonucleotide
aggcccguauuccuggacg

SEQ ID NO: 740164 - RNA, 19 nt, Artificial Sequence
  Description of Artificial Sequence: Synthetic oligonucleotide
uucagcacggacccuacua

SEQ ID NO: 740165 - RNA, 19 nt, Artificial Sequence
  Description of Artificial Sequence: Synthetic oligonucleotide
aauucagcacggacccuac

SEQ ID NO: 740166 - RNA, 19 nt, Artificial Sequence
  Description of Artificial Sequence: Synthetic oligonucleotide
aacccugcugccgucauca

SEQ ID NO: 740167 - RNA, 19 nt, Artificial Sequence
  Description of Artificial Sequence: Synthetic oligonucleotide
cuaugacccaacaaagcca

SEQ ID NO: 740168 - RNA, 19 nt, Artificial Sequence
  Description of Artificial Sequence: Synthetic oligonucleotide
ucccuuccgaacuacuucu

SEQ ID NO: 740169 - RNA, 19 nt, Artificial Sequence
  Description of Artificial Sequence: Synthetic oligonucleotide
ucaugcuaucacauuuggu

SEQ ID NO: 740170 - RNA, 19 nt, Artificial Sequence
  Description of Artificial Sequence: Synthetic oligonucleotide
ugcugccgucaucaaaggg

SEQ ID NO: 740171 - RNA, 19 nt, Artificial Sequence
  Description of Artificial Sequence: Synthetic oligonucleotide
uggauacugggacagcuuu

SEQ ID NO: 740172 - RNA, 19 nt, Artificial Sequence
  Description of Artificial Sequence: Synthetic oligonucleotide
aaugguucuuuagaugauu

SEQ ID NO: 740173 - RNA, 19 nt, Artificial Sequence
  Description of Artificial Sequence: Synthetic oligonucleotide
gcuuuguuauuaugggagg

SEQ ID NO: 740174 - RNA, 19 nt, Artificial Sequence
  Description of Artificial Sequence: Synthetic oligonucleotide
ucaaacguccaaucuuguc

SEQ ID NO: 740175 - RNA, 19 nt, Artificial Sequence
  Description of Artificial Sequence: Synthetic oligonucleotide
cucaccauaucuuguccac

SEQ ID NO: 740176 - RNA, 19 nt, Artificial Sequence
  Description of Artificial Sequence: Synthetic oligonucleotide
auaugacaggcuuuuguua

SEQ ID NO: 740177 - RNA, 19 nt, Artificial Sequence
  Description of Artificial Sequence: Synthetic oligonucleotide
auuucccgggcugugacag

SEQ ID NO: 740178 - RNA, 19 nt, Artificial Sequence
  Description of Artificial Sequence: Synthetic oligonucleotide
ugguagucaguuuucucaa

SEQ ID NO: 740179 - RNA, 19 nt, Artificial Sequence
  Description of Artificial Sequence: Synthetic oligonucleotide
aucgguucagugcaucaca

SEQ ID NO: 740180 - RNA, 19 nt, Artificial Sequence
  Description of Artificial Sequence: Synthetic oligonucleotide
agccauaaaguagugucug

SEQ ID NO: 740181 - RNA, 19 nt, Artificial Sequence
  Description of Artificial Sequence: Synthetic oligonucleotide
ugacaaccccgauuccagg

SEQ ID NO: 740182 - RNA, 19 nt, Artificial Sequence
  Description of Artificial Sequence: Synthetic oligonucleotide
agauauaugacaggcuuuu

SEQ ID NO: 740183 - RNA, 19 nt, Artificial Sequence
  Description of Artificial Sequence: Synthetic oligonucleotide
auaguguuacagggcacac

SEQ ID NO: 740184 - RNA, 19 nt, Artificial Sequence
  Description of Artificial Sequence: Synthetic oligonucleotide
aauuucccgggcugugaca

SEQ ID NO: 740185 - RNA, 19 nt, Artificial Sequence
  Description of Artificial Sequence: Synthetic oligonucleotide
gacgccauuuccacacugg

SEQ ID NO: 740186 - RNA, 19 nt, Artificial Sequence
  Description of Artificial Sequence: Synthetic oligonucleotide
gaacaccacuaacuaggag

SEQ ID NO: 740187 - RNA, 19 nt, Artificial Sequence
  Description of Artificial Sequence: Synthetic oligonucleotide
uuuagaugauuagcuauuu

SEQ ID NO: 740188 - RNA, 19 nt, Artificial Sequence
  Description of Artificial Sequence: Synthetic oligonucleotide
uucaaacguccaaucuugu

SEQ ID NO: 740189 - RNA, 19 nt, Artificial Sequence
  Description of Artificial Sequence: Synthetic oligonucleotide
uacuaccgggaucugccgc

SEQ ID NO: 740190 - RNA, 19 nt, Artificial Sequence
  Description of Artificial Sequence: Synthetic oligonucleotide
caguguguauuuucucccc

SEQ ID NO: 740191 - RNA, 19 nt, Artificial Sequence
  Description of Artificial Sequence: Synthetic oligonucleotide
gacgaggagacauaaccua

SEQ ID NO: 740192 - RNA, 19 nt, Artificial Sequence
  Description of Artificial Sequence: Synthetic oligonucleotide
cagcacuaagauauaugac

SEQ ID NO: 740193 - RNA, 19 nt, Artificial Sequence
  Description of Artificial Sequence: Synthetic oligonucleotide
gacccaacaaagccaugug

SEQ ID NO: 740194 - RNA, 19 nt, Artificial Sequence
  Description of Artificial Sequence: Synthetic oligonucleotide
uuugaacuaacuggaggau

SEQ ID NO: 740195 - RNA, 19 nt, Artificial Sequence
  Description of Artificial Sequence: Synthetic oligonucleotide
cuaacuggaggaugcucac

SEQ ID NO: 740196 - RNA, 19 nt, Artificial Sequence
  Description of Artificial Sequence: Synthetic oligonucleotide
ccuacuaccgggaucugcc

SEQ ID NO: 740197 - RNA, 19 nt, Artificial Sequence
  Description of Artificial Sequence: Synthetic oligonucleotide
guuacagggcacacgacac

SEQ ID NO: 740198 - RNA, 19 nt, Artificial Sequence
  Description of Artificial Sequence: Synthetic oligonucleotide
cuucgagugccugagggug

SEQ ID NO: 740199 - RNA, 19 nt, Artificial Sequence
  Description of Artificial Sequence: Synthetic oligonucleotide
agagccugcuguuaaguua

SEQ ID NO: 740200 - RNA, 19 nt, Artificial Sequence
  Description of Artificial Sequence: Synthetic oligonucleotide
aaugaauggcaagccuaca

SEQ ID NO: 740201 - RNA, 19 nt, Artificial Sequence
  Description of Artificial Sequence: Synthetic oligonucleotide
gggcacacgacacaagcag

SEQ ID NO: 740202 - RNA, 19 nt, Artificial Sequence
  Description of Artificial Sequence: Synthetic oligonucleotide
gaauaggcccguauuccug

SEQ ID NO: 740203 - RNA, 19 nt, Artificial Sequence
  Description of Artificial Sequence: Synthetic oligonucleotide
agcacagacgaggagacau

SEQ ID NO: 740204 - RNA, 19 nt, Artificial Sequence
  Description of Artificial Sequence: Synthetic oligonucleotide
ugaauucccuuccgaacua

SEQ ID NO: 740205 - RNA, 19 nt, Artificial Sequence
  Description of Artificial Sequence: Synthetic oligonucleotide
cuagauuacagcaguggua

SEQ ID NO: 740206 - RNA, 19 nt, Artificial Sequence
  Description of Artificial Sequence: Synthetic oligonucleotide
uaccugaaaauccggcgua

SEQ ID NO: 740207 - RNA, 19 nt, Artificial Sequence
  Description of Artificial Sequence: Synthetic oligonucleotide
ggaaggaauuugguggugg

SEQ ID NO: 740208 - RNA, 19 nt, Artificial Sequence
  Description of Artificial Sequence: Synthetic oligonucleotide
aaccugggccuccugaauu

SEQ ID NO: 740209 - RNA, 19 nt, Artificial Sequence
  Description of Artificial Sequence: Synthetic oligonucleotide
gauauaugacaggcuuuug

SEQ ID NO: 740210 - RNA, 19 nt, Artificial Sequence
  Description of Artificial Sequence: Synthetic oligonucleotide
ugaaaguauccugguaguc

SEQ ID NO: 740211 - RNA, 19 nt, Artificial Sequence
  Description of Artificial Sequence: Synthetic oligonucleotide
uccgaacuacuucugucau

SEQ ID NO: 740212 - RNA, 19 nt, Artificial Sequence
  Description of Artificial Sequence: Synthetic oligonucleotide
aaauccggcguagccauaa

SEQ ID NO: 740213 - RNA, 19 nt, Artificial Sequence
  Description of Artificial Sequence: Synthetic oligonucleotide
acuaccgggaucugccgca

SEQ ID NO: 740214 - RNA, 19 nt, Artificial Sequence
  Description of Artificial Sequence: Synthetic oligonucleotide
caaagguauuggcccaggc

SEQ ID NO: 740215 - RNA, 19 nt, Artificial Sequence
  Description of Artificial Sequence: Synthetic oligonucleotide
auccggcguagccauaaag

SEQ ID NO: 740216 - RNA, 19 nt, Artificial Sequence
  Description of Artificial Sequence: Synthetic oligonucleotide
gaaaauccggcguagccau

SEQ ID NO: 740217 - RNA, 19 nt, Artificial Sequence
  Description of Artificial Sequence: Synthetic oligonucleotide
agcacggacccuacuaccg

SEQ ID NO: 740218 - RNA, 19 nt, Artificial Sequence
  Description of Artificial Sequence: Synthetic oligonucleotide
uccccuagccaucgguuca

SEQ ID NO: 740219 - RNA, 19 nt, Artificial Sequence
  Description of Artificial Sequence: Synthetic oligonucleotide
acgaggagacauaaccuag

SEQ ID NO: 740220 - RNA, 19 nt, Artificial Sequence
  Description of Artificial Sequence: Synthetic oligonucleotide
aggagaacugagcggccag

SEQ ID NO: 740221 - RNA, 19 nt, Artificial Sequence
  Description of Artificial Sequence: Synthetic oligonucleotide
acuucgaauaggcccguau

SEQ ID NO: 740222 - RNA, 19 nt, Artificial Sequence
  Description of Artificial Sequence: Synthetic oligonucleotide
cguuccuuguacuuugugg

SEQ ID NO: 740223 - RNA, 19 nt, Artificial Sequence
  Description of Artificial Sequence: Synthetic oligonucleotide
uguggacguaaguguauuc

SEQ ID NO: 740224 - RNA, 19 nt, Artificial Sequence
  Description of Artificial Sequence: Synthetic oligonucleotide
agccuuggaacuagauuac

SEQ ID NO: 740225 - RNA, 19 nt, Artificial Sequence
  Description of Artificial Sequence: Synthetic oligonucleotide
ucgucuccaugcaucagau

SEQ ID NO: 740226 - RNA, 19 nt, Artificial Sequence
  Description of Artificial Sequence: Synthetic oligonucleotide
caauuucccgggcugugac

SEQ ID NO: 740227 - RNA, 19 nt, Artificial Sequence
  Description of Artificial Sequence: Synthetic oligonucleotide
cuacuaccgggaucugccg

SEQ ID NO: 740228 - RNA, 19 nt, Artificial Sequence
  Description of Artificial Sequence: Synthetic oligonucleotide
aacauagaggaggcuugcu

SEQ ID NO: 740229 - RNA, 19 nt, Artificial Sequence
  Description of Artificial Sequence: Synthetic oligonucleotide
aaaugguucuuuagaugau

SEQ ID NO: 740230 - RNA, 19 nt, Artificial Sequence
  Description of Artificial Sequence: Synthetic oligonucleotide
cauaguguuacagggcaca

SEQ ID NO: 740231 - RNA, 19 nt, Artificial Sequence
  Description of Artificial Sequence: Synthetic oligonucleotide
agacgaggagacauaaccu

SEQ ID NO: 740232 - RNA, 19 nt, Artificial Sequence
  Description of Artificial Sequence: Synthetic oligonucleotide
cacggacccuacuaccggg

SEQ ID NO: 740233 - RNA, 19 nt, Artificial Sequence
  Description of Artificial Sequence: Synthetic oligonucleotide
uccguauguccaacugcug

SEQ ID NO: 740234 - RNA, 19 nt, Artificial Sequence
  Description of Artificial Sequence: Synthetic oligonucleotide
caauggucuccacuaguuc

SEQ ID NO: 740235 - RNA, 19 nt, Artificial Sequence
  Description of Artificial Sequence: Synthetic oligonucleotide
ggaacuagauuacagcagu

SEQ ID NO: 740236 - RNA, 19 nt, Artificial Sequence
  Description of Artificial Sequence: Synthetic oligonucleotide
cauagaggaggcuugcugu

SEQ ID NO: 740237 - RNA, 19 nt, Artificial Sequence
  Description of Artificial Sequence: Synthetic oligonucleotide
cagugguagggcagugucc

SEQ ID NO: 740238 - RNA, 19 nt, Artificial Sequence
  Description of Artificial Sequence: Synthetic oligonucleotide
caagcugauuacaaaggua

SEQ ID NO: 740239 - RNA, 19 nt, Artificial Sequence
  Description of Artificial Sequence: Synthetic oligonucleotide
cugaauucccuuccgaacu

SEQ ID NO: 740240 - RNA, 19 nt, Artificial Sequence
  Description of Artificial Sequence: Synthetic oligonucleotide
aguauccugguagucaguu

SEQ ID NO: 740241 - RNA, 19 nt, Artificial Sequence
  Description of Artificial Sequence: Synthetic oligonucleotide
uucgagugccugagggugu

SEQ ID NO: 740242 - RNA, 19 nt, Artificial Sequence
  Description of Artificial Sequence: Synthetic oligonucleotide
caacauagaggaggcuugc

SEQ ID NO: 740243 - RNA, 19 nt, Artificial Sequence
  Description of Artificial Sequence: Synthetic oligonucleotide
cuaagauauaugacaggcu

SEQ ID NO: 740244 - RNA, 19 nt, Artificial Sequence
  Description of Artificial Sequence: Synthetic oligonucleotide
gcgaagaaugaauggcaag

SEQ ID NO: 740245 - RNA, 19 nt, Artificial Sequence
  Description of Artificial Sequence: Synthetic oligonucleotide
acgccauuuccacacugga

SEQ ID NO: 740246 - RNA, 19 nt, Artificial Sequence
  Description of Artificial Sequence: Synthetic oligonucleotide
accgggaucugccgcaaca

SEQ ID NO: 740247 - RNA, 19 nt, Artificial Sequence
  Description of Artificial Sequence: Synthetic oligonucleotide
gagccugcuguuaaguuaa

SEQ ID NO: 740248 - RNA, 19 nt, Artificial Sequence
  Description of Artificial Sequence: Synthetic oligonucleotide
uuccccuagccaucgguuc

SEQ ID NO: 740249 - RNA, 19 nt, Artificial Sequence
  Description of Artificial Sequence: Synthetic oligonucleotide
gacccuacuaccgggaucu

SEQ ID NO: 740250 - RNA, 19 nt, Artificial Sequence
  Description of Artificial Sequence: Synthetic oligonucleotide
ccugaauucccuuccgaac

SEQ ID NO: 740251 - RNA, 19 nt, Artificial Sequence
  Description of Artificial Sequence: Synthetic oligonucleotide
guacucagggcccauuuua

SEQ ID NO: 740252 - RNA, 19 nt, Artificial Sequence
  Description of Artificial Sequence: Synthetic oligonucleotide
uccaugcaucagauuuuga

SEQ ID NO: 740253 - RNA, 19 nt, Artificial Sequence
  Description of Artificial Sequence: Synthetic oligonucleotide
ucgaagcuguaguguacac

SEQ ID NO: 740254 - RNA, 19 nt, Artificial Sequence
  Description of Artificial Sequence: Synthetic oligonucleotide
uucuuuccguuuuccuccu

SEQ ID NO: 740255 - RNA, 19 nt, Artificial Sequence
  Description of Artificial Sequence: Synthetic oligonucleotide
aacguccaaucuuguccgu

SEQ ID NO: 740256 - RNA, 19 nt, Artificial Sequence
  Description of Artificial Sequence: Synthetic oligonucleotide
guacacgucaaaaccggca

SEQ ID NO: 740257 - RNA, 19 nt, Artificial Sequence
  Description of Artificial Sequence: Synthetic oligonucleotide
acagacgaggagacauaac

SEQ ID NO: 740258 - RNA, 19 nt, Artificial Sequence
  Description of Artificial Sequence: Synthetic oligonucleotide
gacacagguaagccaagcu

SEQ ID NO: 740259 - RNA, 19 nt, Artificial Sequence
  Description of Artificial Sequence: Synthetic oligonucleotide
ccguauguccaacugcugc

SEQ ID NO: 740260 - RNA, 19 nt, Artificial Sequence
  Description of Artificial Sequence: Synthetic oligonucleotide
uaacuggaggaugcucacc

SEQ ID NO: 740261 - RNA, 19 nt, Artificial Sequence
  Description of Artificial Sequence: Synthetic oligonucleotide
gucuccacuaguucagaaa

SEQ ID NO: 740262 - RNA, 19 nt, Artificial Sequence
  Description of Artificial Sequence: Synthetic oligonucleotide
agguauuggcccaggcccg

SEQ ID NO: 740263 - RNA, 19 nt, Artificial Sequence
  Description of Artificial Sequence: Synthetic oligonucleotide
accugaaaauccggcguag

SEQ ID NO: 740264 - RNA, 19 nt, Artificial Sequence
  Description of Artificial Sequence: Synthetic oligonucleotide
ggcuuuuguuauauaacac

SEQ ID NO: 740265 - RNA, 19 nt, Artificial Sequence
  Description of Artificial Sequence: Synthetic oligonucleotide
uucgggugcucugaggcuc

SEQ ID NO: 740266 - RNA, 19 nt, Artificial Sequence
  Description of Artificial Sequence: Synthetic oligonucleotide
cuggaucagauuucaaacu

SEQ ID NO: 740267 - RNA, 19 nt, Artificial Sequence
  Description of Artificial Sequence: Synthetic oligonucleotide
gguaagccaagcugauuac

SEQ ID NO: 740268 - RNA, 19 nt, Artificial Sequence
  Description of Artificial Sequence: Synthetic oligonucleotide
uagcaaguccuucccucuc

SEQ ID NO: 740269 - RNA, 19 nt, Artificial Sequence
  Description of Artificial Sequence: Synthetic oligonucleotide
uucccgggcugugacagca

SEQ ID NO: 740270 - RNA, 19 nt, Artificial Sequence
  Description of Artificial Sequence: Synthetic oligonucleotide
cauaggcaccagcuguuuc

SEQ ID NO: 740271 - RNA, 19 nt, Artificial Sequence
  Description of Artificial Sequence: Synthetic oligonucleotide
ucuuguccguauguccaac

SEQ ID NO: 740272 - RNA, 19 nt, Artificial Sequence
  Description of Artificial Sequence: Synthetic oligonucleotide
gcuuuuguacucagggccc

SEQ ID NO: 740273 - RNA, 19 nt, Artificial Sequence
  Description of Artificial Sequence: Synthetic oligonucleotide
cugcugccgucaucaaagg

SEQ ID NO: 740274 - RNA, 19 nt, Artificial Sequence
  Description of Artificial Sequence: Synthetic oligonucleotide
gcuaaggggacagccuugg

SEQ ID NO: 740275 - RNA, 19 nt, Artificial Sequence
  Description of Artificial Sequence: Synthetic oligonucleotide
uguggacuccagagagccu

SEQ ID NO: 740276 - RNA, 19 nt, Artificial Sequence
  Description of Artificial Sequence: Synthetic oligonucleotide
caucgguucagugcaucac

SEQ ID NO: 740277 - RNA, 19 nt, Artificial Sequence
  Description of Artificial Sequence: Synthetic oligonucleotide
caggugccacguuggauac

SEQ ID NO: 740278 - RNA, 19 nt, Artificial Sequence
  Description of Artificial Sequence: Synthetic oligonucleotide
gugucaugcuaucacauuu

SEQ ID NO: 740279 - RNA, 19 nt, Artificial Sequence
  Description of Artificial Sequence: Synthetic oligonucleotide
uuguggacguaaguguauu

SEQ ID NO: 740280 - RNA, 19 nt, Artificial Sequence
  Description of Artificial Sequence: Synthetic oligonucleotide
ggcggugucacucccguuc

SEQ ID NO: 740281 - RNA, 19 nt, Artificial Sequence
  Description of Artificial Sequence: Synthetic oligonucleotide
gagaacugagcggccagga

SEQ ID NO: 740282 - RNA, 19 nt, Artificial Sequence
  Description of Artificial Sequence: Synthetic oligonucleotide
uaggcccguauuccuggac

SEQ ID NO: 740283 - RNA, 19 nt, Artificial Sequence
  Description of Artificial Sequence: Synthetic oligonucleotide
ggauccuaacccugcugcc

SEQ ID NO: 740284 - RNA, 19 nt, Artificial Sequence
  Description of Artificial Sequence: Synthetic oligonucleotide
ggcacacgacacaagcagg

SEQ ID NO: 740285 - RNA, 19 nt, Artificial Sequence
  Description of Artificial Sequence: Synthetic oligonucleotide
ccacuaacuaggagaacug

SEQ ID NO: 740286 - RNA, 19 nt, Artificial Sequence
  Description of Artificial Sequence: Synthetic oligonucleotide
ucagugcaucacagggauc

SEQ ID NO: 740287 - RNA, 19 nt, Artificial Sequence
  Description of Artificial Sequence: Synthetic oligonucleotide
aauccggcguagccauaaa

SEQ ID NO: 740288 - RNA, 19 nt, Artificial Sequence
  Description of Artificial Sequence: Synthetic oligonucleotide
uaguugaaccugggccucc

SEQ ID NO: 740289 - RNA, 19 nt, Artificial Sequence
  Description of Artificial Sequence: Synthetic oligonucleotide
augacaggcuuuuguuaua

SEQ ID NO: 740290 - RNA, 19 nt, Artificial Sequence
  Description of Artificial Sequence: Synthetic oligonucleotide
cucgaagcuguaguguaca

SEQ ID NO: 740291 - RNA, 19 nt, Artificial Sequence
  Description of Artificial Sequence: Synthetic oligonucleotide
caaagggcugaaccgcaca

SEQ ID NO: 740292 - RNA, 19 nt, Artificial Sequence
  Description of Artificial Sequence: Synthetic oligonucleotide
aaguauccugguagucagu

SEQ ID NO: 740293 - RNA, 19 nt, Artificial Sequence
  Description of Artificial Sequence: Synthetic oligonucleotide
gcagugguagggcaguguc

SEQ ID NO: 740294 - RNA, 19 nt, Artificial Sequence
  Description of Artificial Sequence: Synthetic oligonucleotide
guggacguaaguguauucu

SEQ ID NO: 740295 - RNA, 19 nt, Artificial Sequence
  Description of Artificial Sequence: Synthetic oligonucleotide
ucgagugccugagggugug

SEQ ID NO: 740296 - RNA, 19 nt, Artificial Sequence
  Description of Artificial Sequence: Synthetic oligonucleotide
ccaauguaaaugcagcucu

SEQ ID NO: 740297 - RNA, 19 nt, Artificial Sequence
  Description of Artificial Sequence: Synthetic oligonucleotide
auaggcccguauuccugga

SEQ ID NO: 740298 - RNA, 19 nt, Artificial Sequence
  Description of Artificial Sequence: Synthetic oligonucleotide
gaauuuggugguggcagcu

SEQ ID NO: 740299 - RNA, 19 nt, Artificial Sequence
  Description of Artificial Sequence: Synthetic oligonucleotide
aaccccgauuccaggccag

SEQ ID NO: 740300 - RNA, 19 nt, Artificial Sequence
  Description of Artificial Sequence: Synthetic oligonucleotide
cguaaguguauucugugga

SEQ ID NO: 740301 - RNA, 19 nt, Artificial Sequence
  Description of Artificial Sequence: Synthetic oligonucleotide
gcaguccuccuuuucuaug

SEQ ID NO: 740302 - RNA, 19 nt, Artificial Sequence
  Description of Artificial Sequence: Synthetic oligonucleotide
auacugggacagcuuuaaa

SEQ ID NO: 740303 - RNA, 19 nt, Artificial Sequence
  Description of Artificial Sequence: Synthetic oligonucleotide
guccguauguccaacugcu

SEQ ID NO: 740304 - RNA, 19 nt, Artificial Sequence
  Description of Artificial Sequence: Synthetic oligonucleotide
ggcccguauuccuggacgc

SEQ ID NO: 740305 - RNA, 19 nt, Artificial Sequence
  Description of Artificial Sequence: Synthetic oligonucleotide
agggcacacgacacaagca

SEQ ID NO: 740306 - RNA, 19 nt, Artificial Sequence
  Description of Artificial Sequence: Synthetic oligonucleotide
ggcguagccauaaaguagu

SEQ ID NO: 740307 - RNA, 19 nt, Artificial Sequence
  Description of Artificial Sequence: Synthetic oligonucleotide
cuucgucuccaugcaucag

SEQ ID NO: 740308 - RNA, 19 nt, Artificial Sequence
  Description of Artificial Sequence: Synthetic oligonucleotide
cggcguagccauaaaguag

SEQ ID NO: 740309 - RNA, 19 nt, Artificial Sequence
  Description of Artificial Sequence: Synthetic oligonucleotide
gguauuggcccaggcccgg

SEQ ID NO: 740310 - RNA, 19 nt, Artificial Sequence
  Description of Artificial Sequence: Synthetic oligonucleotide
cacagacgaggagacauaa

SEQ ID NO: 740311 - RNA, 19 nt, Artificial Sequence
  Description of Artificial Sequence: Synthetic oligonucleotide
cgaagcuguaguguacacg

SEQ ID NO: 740312 - RNA, 19 nt, Artificial Sequence
  Description of Artificial Sequence: Synthetic oligonucleotide
cuggaggaugcucaccaua

SEQ ID NO: 740313 - RNA, 19 nt, Artificial Sequence
  Description of Artificial Sequence: Synthetic oligonucleotide
gccauaaaguagugucuga

SEQ ID NO: 740314 - RNA, 19 nt, Artificial Sequence
  Description of Artificial Sequence: Synthetic oligonucleotide
gacaggcuuuuguuauaua

SEQ ID NO: 740315 - RNA, 19 nt, Artificial Sequence
  Description of Artificial Sequence: Synthetic oligonucleotide
gagcggccaggagucagug

SEQ ID NO: 740316 - RNA, 19 nt, Artificial Sequence
  Description of Artificial Sequence: Synthetic oligonucleotide
agcugauuacaaagguauu

SEQ ID NO: 740317 - RNA, 19 nt, Artificial Sequence
  Description of Artificial Sequence: Synthetic oligonucleotide
cuucgaauaggcccguauu

SEQ ID NO: 740318 - RNA, 19 nt, Artificial Sequence
  Description of Artificial Sequence: Synthetic oligonucleotide
cuuguccguauguccaacu

SEQ ID NO: 740319 - RNA, 19 nt, Artificial Sequence
  Description of Artificial Sequence: Synthetic oligonucleotide
gagagccugcuguuaaguu

SEQ ID NO: 740320 - RNA, 19 nt, Artificial Sequence
  Description of Artificial Sequence: Synthetic oligonucleotide
ccugaaaauccggcguagc

SEQ ID NO: 740321 - RNA, 19 nt, Artificial Sequence
  Description of Artificial Sequence: Synthetic oligonucleotide
gggauccaaacauaguguu

SEQ ID NO: 740322 - RNA, 19 nt, Artificial Sequence
  Description of Artificial Sequence: Synthetic oligonucleotide
ccacuaguucagaaacauc

SEQ ID NO: 740323 - RNA, 19 nt, Artificial Sequence
  Description of Artificial Sequence: Synthetic oligonucleotide
gcggugucacucccguucc

SEQ ID NO: 740324 - RNA, 19 nt, Artificial Sequence
  Description of Artificial Sequence: Synthetic oligonucleotide
cuguaguguacacgucaaa

SEQ ID NO: 740325 - RNA, 19 nt, Artificial Sequence
  Description of Artificial Sequence: Synthetic oligonucleotide
agcggccaggagucagugu

SEQ ID NO: 740326 - RNA, 19 nt, Artificial Sequence
  Description of Artificial Sequence: Synthetic oligonucleotide
gaacuaacuggaggaugcu

SEQ ID NO: 740327 - RNA, 19 nt, Artificial Sequence
  Description of Artificial Sequence: Synthetic oligonucleotide
ggaggaugcucaccauauc

SEQ ID NO: 740328 - RNA, 19 nt, Artificial Sequence
  Description of Artificial Sequence: Synthetic oligonucleotide
uaccgggaucugccgcaac

SEQ ID NO: 740329 - RNA, 19 nt, Artificial Sequence
  Description of Artificial Sequence: Synthetic oligonucleotide
ccgaacuacuucugucaug

SEQ ID NO: 740330 - RNA, 19 nt, Artificial Sequence
  Description of Artificial Sequence: Synthetic oligonucleotide
aguuugcuuuggauccuaa

SEQ ID NO: 740331 - RNA, 19 nt, Artificial Sequence
  Description of Artificial Sequence: Synthetic oligonucleotide
ggcccuggaauguccucug

SEQ ID NO: 740332 - RNA, 19 nt, Artificial Sequence
  Description of Artificial Sequence: Synthetic oligonucleotide
ggacccuacuaccgggauc

SEQ ID NO: 740333 - RNA, 19 nt, Artificial Sequence
  Description of Artificial Sequence: Synthetic oligonucleotide
ggacguaaguguauucugu

SEQ ID NO: 740334 - RNA, 19 nt, Artificial Sequence
  Description of Artificial Sequence: Synthetic oligonucleotide
aaaauccggcguagccaua

SEQ ID NO: 740335 - RNA, 19 nt, Artificial Sequence
  Description of Artificial Sequence: Synthetic oligonucleotide
aacuucgaauaggcccgua

SEQ ID NO: 740336 - RNA, 19 nt, Artificial Sequence
  Description of Artificial Sequence: Synthetic oligonucleotide
caauguaaaugcagcucuu

SEQ ID NO: 740337 - RNA, 19 nt, Artificial Sequence
  Description of Artificial Sequence: Synthetic oligonucleotide
ccaagcugauuacaaaggu

SEQ ID NO: 740338 - RNA, 19 nt, Artificial Sequence
  Description of Artificial Sequence: Synthetic oligonucleotide
acgucaaaaccggcaguuu

SEQ ID NO: 740339 - RNA, 19 nt, Artificial Sequence
  Description of Artificial Sequence: Synthetic oligonucleotide
gccacguuggauacuggga

SEQ ID NO: 740340 - RNA, 19 nt, Artificial Sequence
  Description of Artificial Sequence: Synthetic oligonucleotide
acguccaaucuuguccgua

SEQ ID NO: 740341 - RNA, 19 nt, Artificial Sequence
  Description of Artificial Sequence: Synthetic oligonucleotide
ggagucagugucaugcuau

SEQ ID NO: 740342 - RNA, 19 nt, Artificial Sequence
  Description of Artificial Sequence: Synthetic oligonucleotide
gcuguaguguacacgucaa

SEQ ID NO: 740343 - RNA, 19 nt, Artificial Sequence
  Description of Artificial Sequence: Synthetic oligonucleotide
ccgcauugccuccuucaag

SEQ ID NO: 740344 - RNA, 19 nt, Artificial Sequence
  Description of Artificial Sequence: Synthetic oligonucleotide
gugccacguuggauacugg

SEQ ID NO: 740345 - RNA, 19 nt, Artificial Sequence
  Description of Artificial Sequence: Synthetic oligonucleotide
gccgcaacacucccucuuc

SEQ ID NO: 740346 - RNA, 19 nt, Artificial Sequence
  Description of Artificial Sequence: Synthetic oligonucleotide
cacgucaaaaccggcaguu

SEQ ID NO: 740347 - RNA, 19 nt, Artificial Sequence
  Description of Artificial Sequence: Synthetic oligonucleotide
ccgcaacacucccucuucc

SEQ ID NO: 740348 - RNA, 19 nt, Artificial Sequence
  Description of Artificial Sequence: Synthetic oligonucleotide
ccuucaaacguccaaucuu

SEQ ID NO: 740349 - RNA, 19 nt, Artificial Sequence
  Description of Artificial Sequence: Synthetic oligonucleotide
ccggcguagccauaaagua

SEQ ID NO: 740350 - RNA, 19 nt, Artificial Sequence
  Description of Artificial Sequence: Synthetic oligonucleotide
ccaucgguucagugcauca

SEQ ID NO: 740351 - RNA, 19 nt, Artificial Sequence
  Description of Artificial Sequence: Synthetic oligonucleotide
cccuacuaccgggaucugc

SEQ ID NO: 740352 - RNA, 19 nt, Artificial Sequence
  Description of Artificial Sequence: Synthetic oligonucleotide
caucacuugccaugccaau

SEQ ID NO: 740353 - RNA, 19 nt, Artificial Sequence
  Description of Artificial Sequence: Synthetic oligonucleotide
gcugaaccgcacacaggug

SEQ ID NO: 740354 - RNA, 19 nt, Artificial Sequence
  Description of Artificial Sequence: Synthetic oligonucleotide
ccgggcugugacagcaaug

SEQ ID NO: 740355 - RNA, 19 nt, Artificial Sequence
  Description of Artificial Sequence: Synthetic oligonucleotide
cacuugccaugccaaugua

SEQ ID NO: 740356 - RNA, 19 nt, Artificial Sequence
  Description of Artificial Sequence: Synthetic oligonucleotide
cuguuugcuucgagugccu

SEQ ID NO: 740357 - RNA, 19 nt, Artificial Sequence
  Description of Artificial Sequence: Synthetic oligonucleotide
gaacuacuucugucauguu

SEQ ID NO: 740358 - RNA, 19 nt, Artificial Sequence
  Description of Artificial Sequence: Synthetic oligonucleotide
gcguagccauaaaguagug

SEQ ID NO: 740359 - RNA, 19 nt, Artificial Sequence
  Description of Artificial Sequence: Synthetic oligonucleotide
aggugccacguuggauacu

SEQ ID NO: 740360 - RNA, 19 nt, Artificial Sequence
  Description of Artificial Sequence: Synthetic oligonucleotide
caguuugcuuuggauccua

SEQ ID NO: 740361 - RNA, 19 nt, Artificial Sequence
  Description of Artificial Sequence: Synthetic oligonucleotide
gcccguauuccuggacgcc

SEQ ID NO: 740362 - RNA, 19 nt, Artificial Sequence
  Description of Artificial Sequence: Synthetic oligonucleotide
caucuucgucuccaugcau

SEQ ID NO: 740363 - RNA, 19 nt, Artificial Sequence
  Description of Artificial Sequence: Synthetic oligonucleotide
ccgggaucugccgcaacac

SEQ ID NO: 740364 - RNA, 19 nt, Artificial Sequence
  Description of Artificial Sequence: Synthetic oligonucleotide
ccuggacgccauuuccaca

SEQ ID NO: 740365 - RNA, 19 nt, Artificial Sequence
  Description of Artificial Sequence: Synthetic oligonucleotide
cggucuagcagcagcacua

SEQ ID NO: 740366 - RNA, 19 nt, Artificial Sequence
  Description of Artificial Sequence: Synthetic oligonucleotide
guugccagauucacaccuu

SEQ ID NO: 740367 - RNA, 19 nt, Artificial Sequence
  Description of Artificial Sequence: Synthetic oligonucleotide
ccacuacaaagucuucaua

SEQ ID NO: 740368 - RNA, 19 nt, Artificial Sequence
  Description of Artificial Sequence: Synthetic oligonucleotide
gccaucgguucagugcauc

SEQ ID NO: 740369 - RNA, 19 nt, Artificial Sequence
  Description of Artificial Sequence: Synthetic oligonucleotide
cccguauuccuggacgcca

SEQ ID NO: 740370 - RNA, 19 nt, Artificial Sequence
  Description of Artificial Sequence: Synthetic oligonucleotide
aggcggugucacucccguu

SEQ ID NO: 740371 - RNA, 19 nt, Artificial Sequence
  Description of Artificial Sequence: Synthetic oligonucleotide
acccuacuaccgggaucug

SEQ ID NO: 740372 - RNA, 19 nt, Artificial Sequence
  Description of Artificial Sequence: Synthetic oligonucleotide
gcccggucuagcagcagca

SEQ ID NO: 740373 - RNA, 19 nt, Artificial Sequence
  Description of Artificial Sequence: Synthetic oligonucleotide
cuaccgggaucugccgcaa

SEQ ID NO: 740374 - RNA, 19 nt, Artificial Sequence
  Description of Artificial Sequence: Synthetic oligonucleotide
agccaucgguucagugcau

SEQ ID NO: 740375 - RNA, 19 nt, Artificial Sequence
  Description of Artificial Sequence: Synthetic oligonucleotide
ccuaacccugcugccguca

SEQ ID NO: 740376 - RNA, 19 nt, Artificial Sequence
  Description of Artificial Sequence: Synthetic oligonucleotide
ggacagccuuggaacuaga

SEQ ID NO: 740377 - RNA, 19 nt, Artificial Sequence
  Description of Artificial Sequence: Synthetic oligonucleotide
caacuucgaauaggcccgu

SEQ ID NO: 740378 - RNA, 19 nt, Artificial Sequence
  Description of Artificial Sequence: Synthetic oligonucleotide
ggugucacucccguuccuu

SEQ ID NO: 740379 - RNA, 19 nt, Artificial Sequence
  Description of Artificial Sequence: Synthetic oligonucleotide
cugccgcaacacucccucu

SEQ ID NO: 740380 - RNA, 19 nt, Artificial Sequence
  Description of Artificial Sequence: Synthetic oligonucleotide
cguagccauaaaguagugu

SEQ ID NO: 740381 - RNA, 19 nt, Artificial Sequence
  Description of Artificial Sequence: Synthetic oligonucleotide
ccucaauuucccgggcugu

SEQ ID NO: 740382 - RNA, 19 nt, Artificial Sequence
  Description of Artificial Sequence: Synthetic oligonucleotide
ccguauuccuggacgccau

SEQ ID NO: 740383 - RNA, 19 nt, Artificial Sequence
  Description of Artificial Sequence: Synthetic oligonucleotide
ccaauucagcacggacccu

SEQ ID NO: 740384 - RNA, 19 nt, Artificial Sequence
  Description of Artificial Sequence: Synthetic oligonucleotide
cccgggcugugacagcaau

SEQ ID NO: 740385 - RNA, 19 nt, Artificial Sequence
  Description of Artificial Sequence: Synthetic oligonucleotide
cggugucacucccguuccu

SEQ ID NO: 740386 - RNA, 19 nt, Artificial Sequence
  Description of Artificial Sequence: Synthetic oligonucleotide
aacacuucacucaugagcc

SEQ ID NO: 740387 - RNA, 19 nt, Artificial Sequence
  Description of Artificial Sequence: Synthetic oligonucleotide
aaaccaaugggccugcagg

SEQ ID NO: 740388 - RNA, 19 nt, Artificial Sequence
  Description of Artificial Sequence: Synthetic oligonucleotide
aauagggccaaaauguggc

SEQ ID NO: 740389 - RNA, 19 nt, Artificial Sequence
  Description of Artificial Sequence: Synthetic oligonucleotide
uauagaacgccaaaugaag

SEQ ID NO: 740390 - RNA, 19 nt, Artificial Sequence
  Description of Artificial Sequence: Synthetic oligonucleotide
uauuccacgguccugaagc

SEQ ID NO: 740391 - RNA, 19 nt, Artificial Sequence
  Description of Artificial Sequence: Synthetic oligonucleotide
aauacugaccuacagcgug

SEQ ID NO: 740392 - RNA, 19 nt, Artificial Sequence
  Description of Artificial Sequence: Synthetic oligonucleotide
ugaacaaugaaugagcugu

SEQ ID NO: 740393 - RNA, 19 nt, Artificial Sequence
  Description of Artificial Sequence: Synthetic oligonucleotide
uuuacuggugacuaugucc

SEQ ID NO: 740394 - RNA, 19 nt, Artificial Sequence
  Description of Artificial Sequence: Synthetic oligonucleotide
uguaggcuaguucagaacc

SEQ ID NO: 740395 - RNA, 19 nt, Artificial Sequence
  Description of Artificial Sequence: Synthetic oligonucleotide
gauagaaaggaggauacgg

SEQ ID NO: 740396 - RNA, 19 nt, Artificial Sequence
  Description of Artificial Sequence: Synthetic oligonucleotide
uucacaggaaaaccaaugg

SEQ ID NO: 740397 - RNA, 19 nt, Artificial Sequence
  Description of Artificial Sequence: Synthetic oligonucleotide
uuugagaucuucuuagccc

SEQ ID NO: 740398 - RNA, 19 nt, Artificial Sequence
  Description of Artificial Sequence: Synthetic oligonucleotide
cuuggugagggaaugaagg

SEQ ID NO: 740399 - RNA, 19 nt, Artificial Sequence
  Description of Artificial Sequence: Synthetic oligonucleotide
agugcacuaguacaaacac

SEQ ID NO: 740400 - RNA, 19 nt, Artificial Sequence
  Description of Artificial Sequence: Synthetic oligonucleotide
aaucgggugaacaagucac

SEQ ID NO: 740401 - RNA, 19 nt, Artificial Sequence
  Description of Artificial Sequence: Synthetic oligonucleotide
uuauggcacaauuuguagg

SEQ ID NO: 740402 - RNA, 19 nt, Artificial Sequence
  Description of Artificial Sequence: Synthetic oligonucleotide
uuagcccuuaccuaggaag

SEQ ID NO: 740403 - RNA, 19 nt, Artificial Sequence
  Description of Artificial Sequence: Synthetic oligonucleotide
gauauugagcaucuuggcc

SEQ ID NO: 740404 - RNA, 19 nt, Artificial Sequence
  Description of Artificial Sequence: Synthetic oligonucleotide
uagaacgccaaaugaaggg

SEQ ID NO: 740405 - RNA, 19 nt, Artificial Sequence
  Description of Artificial Sequence: Synthetic oligonucleotide
uugaccuuagaccaaucag

SEQ ID NO: 740406 - RNA, 19 nt, Artificial Sequence
  Description of Artificial Sequence: Synthetic oligonucleotide
cucauuauggcacaauuug

SEQ ID NO: 740407 - RNA, 19 nt, Artificial Sequence
  Description of Artificial Sequence: Synthetic oligonucleotide
aguauggaauaacuuuggc

SEQ ID NO: 740408 - RNA, 19 nt, Artificial Sequence
  Description of Artificial Sequence: Synthetic oligonucleotide
uuugaacaaugaaugagcu

SEQ ID NO: 740409 - RNA, 19 nt, Artificial Sequence
  Description of Artificial Sequence: Synthetic oligonucleotide
ugaccuuagaccaaucaga

SEQ ID NO: 740410 - RNA, 19 nt, Artificial Sequence
  Description of Artificial Sequence: Synthetic oligonucleotide
aaggggucggcccagaugu

SEQ ID NO: 740411 - RNA, 19 nt, Artificial Sequence
  Description of Artificial Sequence: Synthetic oligonucleotide
uuaacagcgaccgaggaac

SEQ ID NO: 740412 - RNA, 19 nt, Artificial Sequence
  Description of Artificial Sequence: Synthetic oligonucleotide
uuuuaaaggaugcguuugc

SEQ ID NO: 740413 - RNA, 19 nt, Artificial Sequence
  Description of Artificial Sequence: Synthetic oligonucleotide
ucuagcaugccacucuugc

SEQ ID NO: 740414 - RNA, 19 nt, Artificial Sequence
  Description of Artificial Sequence: Synthetic oligonucleotide
caaaggaugucacacagug

SEQ ID NO: 740415 - RNA, 19 nt, Artificial Sequence
  Description of Artificial Sequence: Synthetic oligonucleotide
aagagauucucugggaauc

SEQ ID NO: 740416 - RNA, 19 nt, Artificial Sequence
  Description of Artificial Sequence: Synthetic oligonucleotide
cuauguaauccacaaagug

SEQ ID NO: 740417 - RNA, 19 nt, Artificial Sequence
  Description of Artificial Sequence: Synthetic oligonucleotide
uagauagaaaggaggauac

SEQ ID NO: 740418 - RNA, 19 nt, Artificial Sequence
  Description of Artificial Sequence: Synthetic oligonucleotide
uucucuaagagucgaguug

SEQ ID NO: 740419 - RNA, 19 nt, Artificial Sequence
  Description of Artificial Sequence: Synthetic oligonucleotide
uuuggugcaaaaugucuag

SEQ ID NO: 740420 - RNA, 19 nt, Artificial Sequence
  Description of Artificial Sequence: Synthetic oligonucleotide
ucugaguucgggauuauuc

SEQ ID NO: 740421 - RNA, 19 nt, Artificial Sequence
  Description of Artificial Sequence: Synthetic oligonucleotide
accaaucagaguugaauuc

SEQ ID NO: 740422 - RNA, 19 nt, Artificial Sequence
  Description of Artificial Sequence: Synthetic oligonucleotide
agaaggaugaugguucuac

SEQ ID NO: 740423 - RNA, 19 nt, Artificial Sequence
  Description of Artificial Sequence: Synthetic oligonucleotide
auguguuacacgcaugcag

SEQ ID NO: 740424 - RNA, 19 nt, Artificial Sequence
  Description of Artificial Sequence: Synthetic oligonucleotide
ucuauguaauccacaaagu

SEQ ID NO: 740425 - RNA, 19 nt, Artificial Sequence
  Description of Artificial Sequence: Synthetic oligonucleotide
aaacgggcaggcucaaagg

SEQ ID NO: 740426 - RNA, 19 nt, Artificial Sequence
  Description of Artificial Sequence: Synthetic oligonucleotide
guauguguuacacgcaugc

SEQ ID NO: 740427 - RNA, 19 nt, Artificial Sequence
  Description of Artificial Sequence: Synthetic oligonucleotide
guagcaagagauucucugg

SEQ ID NO: 740428 - RNA, 19 nt, Artificial Sequence
  Description of Artificial Sequence: Synthetic oligonucleotide
augaaggguccacaaagac

SEQ ID NO: 740429 - RNA, 19 nt, Artificial Sequence
  Description of Artificial Sequence: Synthetic oligonucleotide
caagaaagcauacagaaua

SEQ ID NO: 740430 - RNA, 19 nt, Artificial Sequence
  Description of Artificial Sequence: Synthetic oligonucleotide
cuuaccuaggaagacauug

SEQ ID NO: 740431 - RNA, 19 nt, Artificial Sequence
  Description of Artificial Sequence: Synthetic oligonucleotide
agaacgccaaaugaagggc

SEQ ID NO: 740432 - RNA, 19 nt, Artificial Sequence
  Description of Artificial Sequence: Synthetic oligonucleotide
augcaauagggccaaaaug

SEQ ID NO: 740433 - RNA, 19 nt, Artificial Sequence
  Description of Artificial Sequence: Synthetic oligonucleotide
ucauuauggcacaauuugu

SEQ ID NO: 740434 - RNA, 19 nt, Artificial Sequence
  Description of Artificial Sequence: Synthetic oligonucleotide
uaugcaauagggccaaaau

SEQ ID NO: 740435 - RNA, 19 nt, Artificial Sequence
  Description of Artificial Sequence: Synthetic oligonucleotide
uugagaucuucuuagcccu

SEQ ID NO: 740436 - RNA, 19 nt, Artificial Sequence
  Description of Artificial Sequence: Synthetic oligonucleotide
uccuucaugagccuuuuaa

SEQ ID NO: 740437 - RNA, 19 nt, Artificial Sequence
  Description of Artificial Sequence: Synthetic oligonucleotide
auagaaaggaggauacggg

SEQ ID NO: 740438 - RNA, 19 nt, Artificial Sequence
  Description of Artificial Sequence: Synthetic oligonucleotide
uaguaguuuaacagcgacc

SEQ ID NO: 740439 - RNA, 19 nt, Artificial Sequence
  Description of Artificial Sequence: Synthetic oligonucleotide
gugguagauagaaaggagg

SEQ ID NO: 740440 - RNA, 19 nt, Artificial Sequence
  Description of Artificial Sequence: Synthetic oligonucleotide
cugaccuacagcgugaccc

SEQ ID NO: 740441 - RNA, 19 nt, Artificial Sequence
  Description of Artificial Sequence: Synthetic oligonucleotide
aaaauguggcggcauggca

SEQ ID NO: 740442 - RNA, 19 nt, Artificial Sequence
  Description of Artificial Sequence: Synthetic oligonucleotide
aaugucuagcaugccacuc

SEQ ID NO: 740443 - RNA, 19 nt, Artificial Sequence
  Description of Artificial Sequence: Synthetic oligonucleotide
uacagcgugacccacccac

SEQ ID NO: 740444 - RNA, 19 nt, Artificial Sequence
  Description of Artificial Sequence: Synthetic oligonucleotide
gacccacccacuuugaaac

SEQ ID NO: 740445 - RNA, 19 nt, Artificial Sequence
  Description of Artificial Sequence: Synthetic oligonucleotide
acucagguagcuguaaggg

SEQ ID NO: 740446 - RNA, 19 nt, Artificial Sequence
  Description of Artificial Sequence: Synthetic oligonucleotide
gcugguaugcaauagggcc

SEQ ID NO: 740447 - RNA, 19 nt, Artificial Sequence
  Description of Artificial Sequence: Synthetic oligonucleotide
gucuauagaacgccaaaug

SEQ ID NO: 740448 - RNA, 19 nt, Artificial Sequence
  Description of Artificial Sequence: Synthetic oligonucleotide
aggucggaaggacugcugc

SEQ ID NO: 740449 - RNA, 19 nt, Artificial Sequence
  Description of Artificial Sequence: Synthetic oligonucleotide
acagugcacuaguacaaac

SEQ ID NO: 740450 - RNA, 19 nt, Artificial Sequence
  Description of Artificial Sequence: Synthetic oligonucleotide
cuaguaguuuaacagcgac

SEQ ID NO: 740451 - RNA, 19 nt, Artificial Sequence
  Description of Artificial Sequence: Synthetic oligonucleotide
caguauggaauaacuuugg

SEQ ID NO: 740452 - RNA, 19 nt, Artificial Sequence
  Description of Artificial Sequence: Synthetic oligonucleotide
uucuguaccaccucccacu

SEQ ID NO: 740453 - RNA, 19 nt, Artificial Sequence
  Description of Artificial Sequence: Synthetic oligonucleotide
gaggauacgggcagcaggg

SEQ ID NO: 740454 - RNA, 19 nt, Artificial Sequence
  Description of Artificial Sequence: Synthetic oligonucleotide
aagugcaccacucgacucu

SEQ ID NO: 740455 - RNA, 19 nt, Artificial Sequence
  Description of Artificial Sequence: Synthetic oligonucleotide
ucuaguaguuuaacagcga

SEQ ID NO: 740456 - RNA, 19 nt, Artificial Sequence
  Description of Artificial Sequence: Synthetic oligonucleotide
auagaacgccaaaugaagg

SEQ ID NO: 740457 - RNA, 19 nt, Artificial Sequence
  Description of Artificial Sequence: Synthetic oligonucleotide
gugacauucccucuacaag

SEQ ID NO: 740458 - RNA, 19 nt, Artificial Sequence
  Description of Artificial Sequence: Synthetic oligonucleotide
aaggaugcguuugcagagc

SEQ ID NO: 740459 - RNA, 19 nt, Artificial Sequence
  Description of Artificial Sequence: Synthetic oligonucleotide
gaccuuagaccaaucagag

SEQ ID NO: 740460 - RNA, 19 nt, Artificial Sequence
  Description of Artificial Sequence: Synthetic oligonucleotide
ucucuaagagucgaguugu

SEQ ID NO: 740461 - RNA, 19 nt, Artificial Sequence
  Description of Artificial Sequence: Synthetic oligonucleotide
gguuuugagacacagugca

SEQ ID NO: 740462 - RNA, 19 nt, Artificial Sequence
  Description of Artificial Sequence: Synthetic oligonucleotide
aacgggcaggcucaaagga

SEQ ID NO: 740463 - RNA, 19 nt, Artificial Sequence
  Description of Artificial Sequence: Synthetic oligonucleotide
aagccaucgagcccucauc

SEQ ID NO: 740464 - RNA, 19 nt, Artificial Sequence
  Description of Artificial Sequence: Synthetic oligonucleotide
gauuauuccacgguccuga

SEQ ID NO: 740465 - RNA, 19 nt, Artificial Sequence
  Description of Artificial Sequence: Synthetic oligonucleotide
uucuuagcccuuaccuagg

SEQ ID NO: 740466 - RNA, 19 nt, Artificial Sequence
  Description of Artificial Sequence: Synthetic oligonucleotide
ucuuggccaggucggaagg

SEQ ID NO: 740467 - RNA, 19 nt, Artificial Sequence
  Description of Artificial Sequence: Synthetic oligonucleotide
caugcauguaccacagcag

SEQ ID NO: 740468 - RNA, 19 nt, Artificial Sequence
  Description of Artificial Sequence: Synthetic oligonucleotide
ugaguucgggauuauucca

SEQ ID NO: 740469 - RNA, 19 nt, Artificial Sequence
  Description of Artificial Sequence: Synthetic oligonucleotide
aagaucuccugaagaauag

SEQ ID NO: 740470 - RNA, 19 nt, Artificial Sequence
  Description of Artificial Sequence: Synthetic oligonucleotide
uguauguguuacacgcaug

SEQ ID NO: 740471 - RNA, 19 nt, Artificial Sequence
  Description of Artificial Sequence: Synthetic oligonucleotide
cuauagaacgccaaaugaa

SEQ ID NO: 740472 - RNA, 19 nt, Artificial Sequence
  Description of Artificial Sequence: Synthetic oligonucleotide
caucacuuuugcuaucuug

SEQ ID NO: 740473 - RNA, 19 nt, Artificial Sequence
  Description of Artificial Sequence: Synthetic oligonucleotide
uccaagcuguccauguaug

SEQ ID NO: 740474 - RNA, 19 nt, Artificial Sequence
  Description of Artificial Sequence: Synthetic oligonucleotide
cuuagaccaaucagaguug

SEQ ID NO: 740475 - RNA, 19 nt, Artificial Sequence
  Description of Artificial Sequence: Synthetic oligonucleotide
uuuugcgcaggguggagca

SEQ ID NO: 740476 - RNA, 19 nt, Artificial Sequence
  Description of Artificial Sequence: Synthetic oligonucleotide
aagaggaaagcuguccccu

SEQ ID NO: 740477 - RNA, 19 nt, Artificial Sequence
  Description of Artificial Sequence: Synthetic oligonucleotide
uucgggauuauuccacggu

SEQ ID NO: 740478 - RNA, 19 nt, Artificial Sequence
  Description of Artificial Sequence: Synthetic oligonucleotide
gaggccugacacuuuacug

SEQ ID NO: 740479 - RNA, 19 nt, Artificial Sequence
  Description of Artificial Sequence: Synthetic oligonucleotide
ugguauuaaagaagucuau

SEQ ID NO: 740480 - RNA, 19 nt, Artificial Sequence
  Description of Artificial Sequence: Synthetic oligonucleotide
auagggccaaaauguggcg

SEQ ID NO: 740481 - RNA, 19 nt, Artificial Sequence
  Description of Artificial Sequence: Synthetic oligonucleotide
aguuuaacagcgaccgagg

SEQ ID NO: 740482 - RNA, 19 nt, Artificial Sequence
  Description of Artificial Sequence: Synthetic oligonucleotide
agcucuuaagaccuuuggu

SEQ ID NO: 740483 - RNA, 19 nt, Artificial Sequence
  Description of Artificial Sequence: Synthetic oligonucleotide
agaucuccugaagaauagc

SEQ ID NO: 740484 - RNA, 19 nt, Artificial Sequence
  Description of Artificial Sequence: Synthetic oligonucleotide
gaagucaacuggcugcuga

SEQ ID NO: 740485 - RNA, 19 nt, Artificial Sequence
  Description of Artificial Sequence: Synthetic oligonucleotide
agaauauggcccuggcugu

SEQ ID NO: 740486 - RNA, 19 nt, Artificial Sequence
  Description of Artificial Sequence: Synthetic oligonucleotide
auguauguguuacacgcau

SEQ ID NO: 740487 - RNA, 19 nt, Artificial Sequence
  Description of Artificial Sequence: Synthetic oligonucleotide
ucgggauuauuccacgguc

SEQ ID NO: 740488 - RNA, 19 nt, Artificial Sequence
  Description of Artificial Sequence: Synthetic oligonucleotide
cuugagcacagcgaagugc

SEQ ID NO: 740489 - RNA, 19 nt, Artificial Sequence
  Description of Artificial Sequence: Synthetic oligonucleotide
gaucuucuuagcccuuacc

SEQ ID NO: 740490 - RNA, 19 nt, Artificial Sequence
  Description of Artificial Sequence: Synthetic oligonucleotide
aacaaugaaugagcugucu

SEQ ID NO: 740491 - RNA, 19 nt, Artificial Sequence
  Description of Artificial Sequence: Synthetic oligonucleotide
aguucagaaccacuuuggu

SEQ ID NO: 740492 - RNA, 19 nt, Artificial Sequence
  Description of Artificial Sequence: Synthetic oligonucleotide
ucuucucuaagagucgagu

SEQ ID NO: 740493 - RNA, 19 nt, Artificial Sequence
  Description of Artificial Sequence: Synthetic oligonucleotide
gcuuugaacaaugaaugag

SEQ ID NO: 740494 - RNA, 19 nt, Artificial Sequence
  Description of Artificial Sequence: Synthetic oligonucleotide
gaaucgggugaacaaguca

SEQ ID NO: 740495 - RNA, 19 nt, Artificial Sequence
  Description of Artificial Sequence: Synthetic oligonucleotide
gaguugaauucugugaaga

SEQ ID NO: 740496 - RNA, 19 nt, Artificial Sequence
  Description of Artificial Sequence: Synthetic oligonucleotide
aggaaaaccaaugggccug

SEQ ID NO: 740497 - RNA, 19 nt, Artificial Sequence
  Description of Artificial Sequence: Synthetic oligonucleotide
ugggaaucgggugaacaag

SEQ ID NO: 740498 - RNA, 19 nt, Artificial Sequence
  Description of Artificial Sequence: Synthetic oligonucleotide
ugaaggaugcaguccagua

SEQ ID NO: 740499 - RNA, 19 nt, Artificial Sequence
  Description of Artificial Sequence: Synthetic oligonucleotide
guauggaauaacuuuggcu

SEQ ID NO: 740500 - RNA, 19 nt, Artificial Sequence
  Description of Artificial Sequence: Synthetic oligonucleotide
ugugguucugaccuugcuu

SEQ ID NO: 740501 - RNA, 19 nt, Artificial Sequence
  Description of Artificial Sequence: Synthetic oligonucleotide
uuagaccaaucagaguuga

SEQ ID NO: 740502 - RNA, 19 nt, Artificial Sequence
  Description of Artificial Sequence: Synthetic oligonucleotide
aguugaauucugugaagau

SEQ ID NO: 740503 - RNA, 19 nt, Artificial Sequence
  Description of Artificial Sequence: Synthetic oligonucleotide
acgauuuugcgcagggugg

SEQ ID NO: 740504 - RNA, 19 nt, Artificial Sequence
  Description of Artificial Sequence: Synthetic oligonucleotide
agagauucucugggaaucg

SEQ ID NO: 740505 - RNA, 19 nt, Artificial Sequence
  Description of Artificial Sequence: Synthetic oligonucleotide
agauagaaaggaggauacg

SEQ ID NO: 740506 - RNA, 19 nt, Artificial Sequence
  Description of Artificial Sequence: Synthetic oligonucleotide
ugucuauagaacgccaaau

SEQ ID NO: 740507 - RNA, 19 nt, Artificial Sequence
  Description of Artificial Sequence: Synthetic oligonucleotide
acaaugaaugagcugucua

SEQ ID NO: 740508 - RNA, 19 nt, Artificial Sequence
  Description of Artificial Sequence: Synthetic oligonucleotide
uguaacaguugagacuccu

SEQ ID NO: 740509 - RNA, 19 nt, Artificial Sequence
  Description of Artificial Sequence: Synthetic oligonucleotide
ugauuaaaauacugaccua

SEQ ID NO: 740510 - RNA, 19 nt, Artificial Sequence
  Description of Artificial Sequence: Synthetic oligonucleotide
cauuauggcacaauuugua

SEQ ID NO: 740511 - RNA, 19 nt, Artificial Sequence
  Description of Artificial Sequence: Synthetic oligonucleotide
ucuaagagucgaguugugu

SEQ ID NO: 740512 - RNA, 19 nt, Artificial Sequence
  Description of Artificial Sequence: Synthetic oligonucleotide
agaccaaucagaguugaau

SEQ ID NO: 740513 - RNA, 19 nt, Artificial Sequence
  Description of Artificial Sequence: Synthetic oligonucleotide
caagucacucaucuugcug

SEQ ID NO: 740514 - RNA, 19 nt, Artificial Sequence
  Description of Artificial Sequence: Synthetic oligonucleotide
uguuacacgcaugcagacc

SEQ ID NO: 740515 - RNA, 19 nt, Artificial Sequence
  Description of Artificial Sequence: Synthetic oligonucleotide
gagccuuuuaaaggaugcg

SEQ ID NO: 740516 - RNA, 19 nt, Artificial Sequence
  Description of Artificial Sequence: Synthetic oligonucleotide
gaagaucuccugaagaaua

SEQ ID NO: 740517 - RNA, 19 nt, Artificial Sequence
  Description of Artificial Sequence: Synthetic oligonucleotide
ucgacucucucgcucuuug

SEQ ID NO: 740518 - RNA, 19 nt, Artificial Sequence
  Description of Artificial Sequence: Synthetic oligonucleotide
ugacccacccacuuugaaa

SEQ ID NO: 740519 - RNA, 19 nt, Artificial Sequence
  Description of Artificial Sequence: Synthetic oligonucleotide
ucuuagcccuuaccuagga

SEQ ID NO: 740520 - RNA, 19 nt, Artificial Sequence
  Description of Artificial Sequence: Synthetic oligonucleotide
ggugacuauguccaagcug

SEQ ID NO: 740521 - RNA, 19 nt, Artificial Sequence
  Description of Artificial Sequence: Synthetic oligonucleotide
agcgaagugcaccacucga

SEQ ID NO: 740522 - RNA, 19 nt, Artificial Sequence
  Description of Artificial Sequence: Synthetic oligonucleotide
gagauucucugggaaucgg

SEQ ID NO: 740523 - RNA, 19 nt, Artificial Sequence
  Description of Artificial Sequence: Synthetic oligonucleotide
ucuuaagaccuuugguauu

SEQ ID NO: 740524 - RNA, 19 nt, Artificial Sequence
  Description of Artificial Sequence: Synthetic oligonucleotide
gacacuuuacuggugacua

SEQ ID NO: 740525 - RNA, 19 nt, Artificial Sequence
  Description of Artificial Sequence: Synthetic oligonucleotide
ucucacaugcauguaccac

SEQ ID NO: 740526 - RNA, 19 nt, Artificial Sequence
  Description of Artificial Sequence: Synthetic oligonucleotide
aaggggcaugaccuuucag

SEQ ID NO: 740527 - RNA, 19 nt, Artificial Sequence
  Description of Artificial Sequence: Synthetic oligonucleotide
ucccucuacaaguucuuaa

SEQ ID NO: 740528 - RNA, 19 nt, Artificial Sequence
  Description of Artificial Sequence: Synthetic oligonucleotide
uuugcucaccuggugugag

SEQ ID NO: 740529 - RNA, 19 nt, Artificial Sequence
  Description of Artificial Sequence: Synthetic oligonucleotide
acugaccuacagcgugacc

SEQ ID NO: 740530 - RNA, 19 nt, Artificial Sequence
  Description of Artificial Sequence: Synthetic oligonucleotide
ccuggugugagucuucuag

SEQ ID NO: 740531 - RNA, 19 nt, Artificial Sequence
  Description of Artificial Sequence: Synthetic oligonucleotide
ugaccuacagcgugaccca

SEQ ID NO: 740532 - RNA, 19 nt, Artificial Sequence
  Description of Artificial Sequence: Synthetic oligonucleotide
gaccuuucaguauggaaua

SEQ ID NO: 740533 - RNA, 19 nt, Artificial Sequence
  Description of Artificial Sequence: Synthetic oligonucleotide
uggcuucuccuacuggcug

SEQ ID NO: 740534 - RNA, 19 nt, Artificial Sequence
  Description of Artificial Sequence: Synthetic oligonucleotide
gaagugcaccacucgacuc

SEQ ID NO: 740535 - RNA, 19 nt, Artificial Sequence
  Description of Artificial Sequence: Synthetic oligonucleotide
cacuuuacuggugacuaug

SEQ ID NO: 740536 - RNA, 19 nt, Artificial Sequence
  Description of Artificial Sequence: Synthetic oligonucleotide
cuuuggugcaaaaugucua

SEQ ID NO: 740537 - RNA, 19 nt, Artificial Sequence
  Description of Artificial Sequence: Synthetic oligonucleotide
ugacacuuuacuggugacu

SEQ ID NO: 740538 - RNA, 19 nt, Artificial Sequence
  Description of Artificial Sequence: Synthetic oligonucleotide
caccucccacucauuaugg

SEQ ID NO: 740539 - RNA, 19 nt, Artificial Sequence
  Description of Artificial Sequence: Synthetic oligonucleotide
ucccgaagagcuuccuuca

SEQ ID NO: 740540 - RNA, 19 nt, Artificial Sequence
  Description of Artificial Sequence: Synthetic oligonucleotide
gagcugucuauagaacgcc

SEQ ID NO: 740541 - RNA, 19 nt, Artificial Sequence
  Description of Artificial Sequence: Synthetic oligonucleotide
cugcuuagguccuggauca

SEQ ID NO: 740542 - RNA, 19 nt, Artificial Sequence
  Description of Artificial Sequence: Synthetic oligonucleotide
uagggauugcugcucccga

SEQ ID NO: 740543 - RNA, 19 nt, Artificial Sequence
  Description of Artificial Sequence: Synthetic oligonucleotide
ucccgaaagaggccugaca

SEQ ID NO: 740544 - RNA, 19 nt, Artificial Sequence
  Description of Artificial Sequence: Synthetic oligonucleotide
gaguucgggauuauuccac

SEQ ID NO: 740545 - RNA, 19 nt, Artificial Sequence
  Description of Artificial Sequence: Synthetic oligonucleotide
gcucuuaagaccuuuggua

SEQ ID NO: 740546 - RNA, 19 nt, Artificial Sequence
  Description of Artificial Sequence: Synthetic oligonucleotide
uaacagcgaccgaggaacc

SEQ ID NO: 740547 - RNA, 19 nt, Artificial Sequence
  Description of Artificial Sequence: Synthetic oligonucleotide
acagcgaccgaggaaccag

SEQ ID NO: 740548 - RNA, 19 nt, Artificial Sequence
  Description of Artificial Sequence: Synthetic oligonucleotide
uggcacaauuuguaggcua

SEQ ID NO: 740549 - RNA, 19 nt, Artificial Sequence
  Description of Artificial Sequence: Synthetic oligonucleotide
aaccacuuuggugcaaaau

SEQ ID NO: 740550 - RNA, 19 nt, Artificial Sequence
  Description of Artificial Sequence: Synthetic oligonucleotide
gguggguggaauucuguac

SEQ ID NO: 740551 - RNA, 19 nt, Artificial Sequence
  Description of Artificial Sequence: Synthetic oligonucleotide
ggaucaugugguucugacc

SEQ ID NO: 740552 - RNA, 19 nt, Artificial Sequence
  Description of Artificial Sequence: Synthetic oligonucleotide
aggaugcguuugcagagcu

SEQ ID NO: 740553 - RNA, 19 nt, Artificial Sequence
  Description of Artificial Sequence: Synthetic oligonucleotide
ggcucaaaggaugucacac

SEQ ID NO: 740554 - RNA, 19 nt, Artificial Sequence
  Description of Artificial Sequence: Synthetic oligonucleotide
cccgaaagaggccugacac

SEQ ID NO: 740555 - RNA, 19 nt, Artificial Sequence
  Description of Artificial Sequence: Synthetic oligonucleotide
cauguauguguuacacgca

SEQ ID NO: 740556 - RNA, 19 nt, Artificial Sequence
  Description of Artificial Sequence: Synthetic oligonucleotide
aucgagcccucaucuacug

SEQ ID NO: 740557 - RNA, 19 nt, Artificial Sequence
  Description of Artificial Sequence: Synthetic oligonucleotide
cucuuaagaccuuugguau

SEQ ID NO: 740558 - RNA, 19 nt, Artificial Sequence
  Description of Artificial Sequence: Synthetic oligonucleotide
agcccuuaccuaggaagac

SEQ ID NO: 740559 - RNA, 19 nt, Artificial Sequence
  Description of Artificial Sequence: Synthetic oligonucleotide
accuuagaccaaucagagu

SEQ ID NO: 740560 - RNA, 19 nt, Artificial Sequence
  Description of Artificial Sequence: Synthetic oligonucleotide
aguccaguagggauugcug

SEQ ID NO: 740561 - RNA, 19 nt, Artificial Sequence
  Description of Artificial Sequence: Synthetic oligonucleotide
cacucuugcaggacugauc

SEQ ID NO: 740562 - RNA, 19 nt, Artificial Sequence
  Description of Artificial Sequence: Synthetic oligonucleotide
gucggaaggacugcugccc

SEQ ID NO: 740563 - RNA, 19 nt, Artificial Sequence
  Description of Artificial Sequence: Synthetic oligonucleotide
caauccccucacuuuugag

SEQ ID NO: 740564 - RNA, 19 nt, Artificial Sequence
  Description of Artificial Sequence: Synthetic oligonucleotide
augagccuuuuaaaggaug

SEQ ID NO: 740565 - RNA, 19 nt, Artificial Sequence
  Description of Artificial Sequence: Synthetic oligonucleotide
guagcauugcugaaaggaa

SEQ ID NO: 740566 - RNA, 19 nt, Artificial Sequence
  Description of Artificial Sequence: Synthetic oligonucleotide
gauuuugcgcaggguggag

SEQ ID NO: 740567 - RNA, 19 nt, Artificial Sequence
  Description of Artificial Sequence: Synthetic oligonucleotide
agucgaguugugugguaga

SEQ ID NO: 740568 - RNA, 19 nt, Artificial Sequence
  Description of Artificial Sequence: Synthetic oligonucleotide
ggauugcugcucccgaaag

SEQ ID NO: 740569 - RNA, 19 nt, Artificial Sequence
  Description of Artificial Sequence: Synthetic oligonucleotide
cuuaagaccuuugguauua

SEQ ID NO: 740570 - RNA, 19 nt, Artificial Sequence
  Description of Artificial Sequence: Synthetic oligonucleotide
gaccgaggaaccagccacg

SEQ ID NO: 740571 - RNA, 19 nt, Artificial Sequence
  Description of Artificial Sequence: Synthetic oligonucleotide
acucauuauggcacaauuu

SEQ ID NO: 740572 - RNA, 19 nt, Artificial Sequence
  Description of Artificial Sequence: Synthetic oligonucleotide
gaacaaugaaugagcuguc

SEQ ID NO: 740573 - RNA, 19 nt, Artificial Sequence
  Description of Artificial Sequence: Synthetic oligonucleotide
uuacacgcaugcagacccu

SEQ ID NO: 740574 - RNA, 19 nt, Artificial Sequence
  Description of Artificial Sequence: Synthetic oligonucleotide
cagcgaagugcaccacucg

SEQ ID NO: 740575 - RNA, 19 nt, Artificial Sequence
  Description of Artificial Sequence: Synthetic oligonucleotide
ucgggugaacaagucacuc

SEQ ID NO: 740576 - RNA, 19 nt, Artificial Sequence
  Description of Artificial Sequence: Synthetic oligonucleotide
uggugacauucccucuaca

SEQ ID NO: 740577 - RNA, 19 nt, Artificial Sequence
  Description of Artificial Sequence: Synthetic oligonucleotide
gaaaggggcaugaccuuuc

SEQ ID NO: 740578 - RNA, 19 nt, Artificial Sequence
  Description of Artificial Sequence: Synthetic oligonucleotide
aacagcgaccgaggaacca

SEQ ID NO: 740579 - RNA, 19 nt, Artificial Sequence
  Description of Artificial Sequence: Synthetic oligonucleotide
cucuagcuguccccagagg

SEQ ID NO: 740580 - RNA, 19 nt, Artificial Sequence
  Description of Artificial Sequence: Synthetic oligonucleotide
ugcucaccuggugugaguc

SEQ ID NO: 740581 - RNA, 19 nt, Artificial Sequence
  Description of Artificial Sequence: Synthetic oligonucleotide
cuccacccgguguagcaag

SEQ ID NO: 740582 - RNA, 19 nt, Artificial Sequence
  Description of Artificial Sequence: Synthetic oligonucleotide
cuaggaagacauugauuaa

SEQ ID NO: 740583 - RNA, 19 nt, Artificial Sequence
  Description of Artificial Sequence: Synthetic oligonucleotide
acgcaugcagacccuuucu

SEQ ID NO: 740584 - RNA, 19 nt, Artificial Sequence
  Description of Artificial Sequence: Synthetic oligonucleotide
augugguucugaccuugcu

SEQ ID NO: 740585 - RNA, 19 nt, Artificial Sequence
  Description of Artificial Sequence: Synthetic oligonucleotide
gguguagcaagagauucuc

SEQ ID NO: 740586 - RNA, 19 nt, Artificial Sequence
  Description of Artificial Sequence: Synthetic oligonucleotide
cacgcaugcagacccuuuc

SEQ ID NO: 740587 - RNA, 19 nt, Artificial Sequence
  Description of Artificial Sequence: Synthetic oligonucleotide
cucuaagagucgaguugug

SEQ ID NO: 740588 - RNA, 19 nt, Artificial Sequence
  Description of Artificial Sequence: Synthetic oligonucleotide
caccccacaucauugaagu

SEQ ID NO: 740589 - RNA, 19 nt, Artificial Sequence
  Description of Artificial Sequence: Synthetic oligonucleotide
gggcuguaacaguugagac

SEQ ID NO: 740590 - RNA, 19 nt, Artificial Sequence
  Description of Artificial Sequence: Synthetic oligonucleotide
uuaagaccuuugguauuaa

SEQ ID NO: 740591 - RNA, 19 nt, Artificial Sequence
  Description of Artificial Sequence: Synthetic oligonucleotide
uccacccgguguagcaaga

SEQ ID NO: 740592 - RNA, 19 nt, Artificial Sequence
  Description of Artificial Sequence: Synthetic oligonucleotide
gcaagagauucucugggaa

SEQ ID NO: 740593 - RNA, 19 nt, Artificial Sequence
  Description of Artificial Sequence: Synthetic oligonucleotide
ugagaucuucuuagcccuu

SEQ ID NO: 740594 - RNA, 19 nt, Artificial Sequence
  Description of Artificial Sequence: Synthetic oligonucleotide
ucgagcccucaucuacugu

SEQ ID NO: 740595 - RNA, 19 nt, Artificial Sequence
  Description of Artificial Sequence: Synthetic oligonucleotide
auacugaccuacagcguga

SEQ ID NO: 740596 - RNA, 19 nt, Artificial Sequence
  Description of Artificial Sequence: Synthetic oligonucleotide
ccuacagcgugacccaccc

SEQ ID NO: 740597 - RNA, 19 nt, Artificial Sequence
  Description of Artificial Sequence: Synthetic oligonucleotide
gugaagauauugagcaucu

SEQ ID NO: 740598 - RNA, 19 nt, Artificial Sequence
  Description of Artificial Sequence: Synthetic oligonucleotide
cagcgaccgaggaaccagc

SEQ ID NO: 740599 - RNA, 19 nt, Artificial Sequence
  Description of Artificial Sequence: Synthetic oligonucleotide
ccaucgagcccucaucuac

SEQ ID NO: 740600 - RNA, 19 nt, Artificial Sequence
  Description of Artificial Sequence: Synthetic oligonucleotide
aguggggucccaauccccu

SEQ ID NO: 740601 - RNA, 19 nt, Artificial Sequence
  Description of Artificial Sequence: Synthetic oligonucleotide
aggcuugcaucagaagaga

SEQ ID NO: 740602 - RNA, 19 nt, Artificial Sequence
  Description of Artificial Sequence: Synthetic oligonucleotide
uacugaccuacagcgugac

SEQ ID NO: 740603 - RNA, 19 nt, Artificial Sequence
  Description of Artificial Sequence: Synthetic oligonucleotide
ggucggaaggacugcugcc

SEQ ID NO: 740604 - RNA, 19 nt, Artificial Sequence
  Description of Artificial Sequence: Synthetic oligonucleotide
ugccaccggcagcacacca

SEQ ID NO: 740605 - RNA, 19 nt, Artificial Sequence
  Description of Artificial Sequence: Synthetic oligonucleotide
caugccacucuugcaggac

SEQ ID NO: 740606 - RNA, 19 nt, Artificial Sequence
  Description of Artificial Sequence: Synthetic oligonucleotide
gccaaaauguggcggcaug

SEQ ID NO: 740607 - RNA, 19 nt, Artificial Sequence
  Description of Artificial Sequence: Synthetic oligonucleotide
gaacgccaaaugaagggcu

SEQ ID NO: 740608 - RNA, 19 nt, Artificial Sequence
  Description of Artificial Sequence: Synthetic oligonucleotide
gcucaaaggaugucacaca

SEQ ID NO: 740609 - RNA, 19 nt, Artificial Sequence
  Description of Artificial Sequence: Synthetic oligonucleotide
caggucggaaggacugcug

SEQ ID NO: 740610 - RNA, 19 nt, Artificial Sequence
  Description of Artificial Sequence: Synthetic oligonucleotide
ucgaguugugugguagaua

SEQ ID NO: 740611 - RNA, 19 nt, Artificial Sequence
  Description of Artificial Sequence: Synthetic oligonucleotide
accuugaccuuagaccaau

SEQ ID NO: 740612 - RNA, 19 nt, Artificial Sequence
  Description of Artificial Sequence: Synthetic oligonucleotide
gcgugacccacccacuuug

SEQ ID NO: 740613 - RNA, 19 nt, Artificial Sequence
  Description of Artificial Sequence: Synthetic oligonucleotide
cgggauuauuccacggucc

SEQ ID NO: 740614 - RNA, 19 nt, Artificial Sequence
  Description of Artificial Sequence: Synthetic oligonucleotide
agcugucuauagaacgcca

SEQ ID NO: 740615 - RNA, 19 nt, Artificial Sequence
  Description of Artificial Sequence: Synthetic oligonucleotide
caagagauucucugggaau

SEQ ID NO: 740616 - RNA, 19 nt, Artificial Sequence
  Description of Artificial Sequence: Synthetic oligonucleotide
ggcugguaugcaauagggc

SEQ ID NO: 740617 - RNA, 19 nt, Artificial Sequence
  Description of Artificial Sequence: Synthetic oligonucleotide
gaagccaucgagcccucau

SEQ ID NO: 740618 - RNA, 19 nt, Artificial Sequence
  Description of Artificial Sequence: Synthetic oligonucleotide
cuucucuaagagucgaguu

SEQ ID NO: 740619 - RNA, 19 nt, Artificial Sequence
  Description of Artificial Sequence: Synthetic oligonucleotide
aucgggugaacaagucacu

SEQ ID NO: 740620 - RNA, 19 nt, Artificial Sequence
  Description of Artificial Sequence: Synthetic oligonucleotide
guugugugguagauagaaa

SEQ ID NO: 740621 - RNA, 19 nt, Artificial Sequence
  Description of Artificial Sequence: Synthetic oligonucleotide
acccacccacuuugaaacu

SEQ ID NO: 740622 - RNA, 19 nt, Artificial Sequence
  Description of Artificial Sequence: Synthetic oligonucleotide
agcgugacccacccacuuu

SEQ ID NO: 740623 - RNA, 19 nt, Artificial Sequence
  Description of Artificial Sequence: Synthetic oligonucleotide
gggugaacaagucacucau

SEQ ID NO: 740624 - RNA, 19 nt, Artificial Sequence
  Description of Artificial Sequence: Synthetic oligonucleotide
cacucauuauggcacaauu

SEQ ID NO: 740625 - RNA, 19 nt, Artificial Sequence
  Description of Artificial Sequence: Synthetic oligonucleotide
acgccaaaugaagggcuga

SEQ ID NO: 740626 - RNA, 19 nt, Artificial Sequence
  Description of Artificial Sequence: Synthetic oligonucleotide
gcaccccacaucauugaag

SEQ ID NO: 740627 - RNA, 19 nt, Artificial Sequence
  Description of Artificial Sequence: Synthetic oligonucleotide
uuccacgguccugaagcuc

SEQ ID NO: 740628 - RNA, 19 nt, Artificial Sequence
  Description of Artificial Sequence: Synthetic oligonucleotide
cuuagcccuuaccuaggaa

SEQ ID NO: 740629 - RNA, 19 nt, Artificial Sequence
  Description of Artificial Sequence: Synthetic oligonucleotide
gaggccaagugugucuucu

SEQ ID NO: 740630 - RNA, 19 nt, Artificial Sequence
  Description of Artificial Sequence: Synthetic oligonucleotide
ccgguguagcaagagauuc

SEQ ID NO: 740631 - RNA, 19 nt, Artificial Sequence
  Description of Artificial Sequence: Synthetic oligonucleotide
accuuucaguauggaauaa

SEQ ID NO: 740632 - RNA, 19 nt, Artificial Sequence
  Description of Artificial Sequence: Synthetic oligonucleotide
aggcuaguucagaaccacu

SEQ ID NO: 740633 - RNA, 19 nt, Artificial Sequence
  Description of Artificial Sequence: Synthetic oligonucleotide
ggauacgggcagcagggaa

SEQ ID NO: 740634 - RNA, 19 nt, Artificial Sequence
  Description of Artificial Sequence: Synthetic oligonucleotide
ggaaucgggugaacaaguc

SEQ ID NO: 740635 - RNA, 19 nt, Artificial Sequence
  Description of Artificial Sequence: Synthetic oligonucleotide
cccucuacaaguucuuaaa

SEQ ID NO: 740636 - RNA, 19 nt, Artificial Sequence
  Description of Artificial Sequence: Synthetic oligonucleotide
accaaugggccugcaggaa

SEQ ID NO: 740637 - RNA, 19 nt, Artificial Sequence
  Description of Artificial Sequence: Synthetic oligonucleotide
gaccuacagcgugacccac

SEQ ID NO: 740638 - RNA, 19 nt, Artificial Sequence
  Description of Artificial Sequence: Synthetic oligonucleotide
caucgagcccucaucuacu

SEQ ID NO: 740639 - RNA, 19 nt, Artificial Sequence
  Description of Artificial Sequence: Synthetic oligonucleotide
ggcuugcaucagaagagac

SEQ ID NO: 740640 - RNA, 19 nt, Artificial Sequence
  Description of Artificial Sequence: Synthetic oligonucleotide
gaaaaccaaugggccugca

SEQ ID NO: 740641 - RNA, 19 nt, Artificial Sequence
  Description of Artificial Sequence: Synthetic oligonucleotide
ccagguggguggaauucug

SEQ ID NO: 740642 - RNA, 19 nt, Artificial Sequence
  Description of Artificial Sequence: Synthetic oligonucleotide
cuaucuuggccaggucgga

SEQ ID NO: 740643 - RNA, 19 nt, Artificial Sequence
  Description of Artificial Sequence: Synthetic oligonucleotide
cucccgaaagaggccugac

SEQ ID NO: 740644 - RNA, 19 nt, Artificial Sequence
  Description of Artificial Sequence: Synthetic oligonucleotide
ccaaucagaguugaauucu

SEQ ID NO: 740645 - RNA, 19 nt, Artificial Sequence
  Description of Artificial Sequence: Synthetic oligonucleotide
gcugcggaagaaaggggca

SEQ ID NO: 740646 - RNA, 19 nt, Artificial Sequence
  Description of Artificial Sequence: Synthetic oligonucleotide
guucuuaaaagggcuucuu

SEQ ID NO: 740647 - RNA, 19 nt, Artificial Sequence
  Description of Artificial Sequence: Synthetic oligonucleotide
cacaauuuguaggcuaguu

SEQ ID NO: 740648 - RNA, 19 nt, Artificial Sequence
  Description of Artificial Sequence: Synthetic oligonucleotide
augguucuaccaggggcuu

SEQ ID NO: 740649 - RNA, 19 nt, Artificial Sequence
  Description of Artificial Sequence: Synthetic oligonucleotide
gguucuaccaggggcuucu

SEQ ID NO: 740650 - RNA, 19 nt, Artificial Sequence
  Description of Artificial Sequence: Synthetic oligonucleotide
gcacuaguacaaacacuuc

SEQ ID NO: 740651 - RNA, 19 nt, Artificial Sequence
  Description of Artificial Sequence: Synthetic oligonucleotide
ccucaucuacuguaaggaa

SEQ ID NO: 740652 - RNA, 19 nt, Artificial Sequence
  Description of Artificial Sequence: Synthetic oligonucleotide
gggaaucgggugaacaagu

SEQ ID NO: 740653 - RNA, 19 nt, Artificial Sequence
  Description of Artificial Sequence: Synthetic oligonucleotide
accuggugugagucuucua

SEQ ID NO: 740654 - RNA, 19 nt, Artificial Sequence
  Description of Artificial Sequence: Synthetic oligonucleotide
ggcuaguucagaaccacuu

SEQ ID NO: 740655 - RNA, 19 nt, Artificial Sequence
  Description of Artificial Sequence: Synthetic oligonucleotide
ggcaccccacaucauugaa

SEQ ID NO: 740656 - RNA, 19 nt, Artificial Sequence
  Description of Artificial Sequence: Synthetic oligonucleotide
gucgaguugugugguagau

SEQ ID NO: 740657 - RNA, 19 nt, Artificial Sequence
  Description of Artificial Sequence: Synthetic oligonucleotide
guguagcaagagauucucu

SEQ ID NO: 740658 - RNA, 19 nt, Artificial Sequence
  Description of Artificial Sequence: Synthetic oligonucleotide
gcgaccgaggaaccagcca

SEQ ID NO: 740659 - RNA, 19 nt, Artificial Sequence
  Description of Artificial Sequence: Synthetic oligonucleotide
gaauauggcccuggcuguu

SEQ ID NO: 740660 - RNA, 19 nt, Artificial Sequence
  Description of Artificial Sequence: Synthetic oligonucleotide
acacgcaugcagacccuuu

SEQ ID NO: 740661 - RNA, 19 nt, Artificial Sequence
  Description of Artificial Sequence: Synthetic oligonucleotide
ccuugaccuuagaccaauc

SEQ ID NO: 740662 - RNA, 19 nt, Artificial Sequence
  Description of Artificial Sequence: Synthetic oligonucleotide
gccuuuuaaaggaugcguu

SEQ ID NO: 740663 - RNA, 19 nt, Artificial Sequence
  Description of Artificial Sequence: Synthetic oligonucleotide
cgcaugcagacccuuucuc

SEQ ID NO: 740664 - RNA, 19 nt, Artificial Sequence
  Description of Artificial Sequence: Synthetic oligonucleotide
cgggugaacaagucacuca

SEQ ID NO: 740665 - RNA, 19 nt, Artificial Sequence
  Description of Artificial Sequence: Synthetic oligonucleotide
gccaggucggaaggacugc

SEQ ID NO: 740666 - RNA, 19 nt, Artificial Sequence
  Description of Artificial Sequence: Synthetic oligonucleotide
cagaaggaugaugguucua

SEQ ID NO: 740667 - RNA, 19 nt, Artificial Sequence
  Description of Artificial Sequence: Synthetic oligonucleotide
ccacccgguguagcaagag

SEQ ID NO: 740668 - RNA, 19 nt, Artificial Sequence
  Description of Artificial Sequence: Synthetic oligonucleotide
gggccaaaauguggcggca

SEQ ID NO: 740669 - RNA, 19 nt, Artificial Sequence
  Description of Artificial Sequence: Synthetic oligonucleotide
gccaucgagcccucaucua

SEQ ID NO: 740670 - RNA, 19 nt, Artificial Sequence
  Description of Artificial Sequence: Synthetic oligonucleotide
ccgaaagaggccugacacu

SEQ ID NO: 740671 - RNA, 19 nt, Artificial Sequence
  Description of Artificial Sequence: Synthetic oligonucleotide
cgaagugcaccacucgacu

SEQ ID NO: 740672 - RNA, 19 nt, Artificial Sequence
  Description of Artificial Sequence: Synthetic oligonucleotide
gcucccgaaagaggccuga

SEQ ID NO: 740673 - RNA, 19 nt, Artificial Sequence
  Description of Artificial Sequence: Synthetic oligonucleotide
ccgaggaaccagccacguc

SEQ ID NO: 740674 - RNA, 19 nt, Artificial Sequence
  Description of Artificial Sequence: Synthetic oligonucleotide
gcaugcuugggagcugagu

SEQ ID NO: 740675 - RNA, 19 nt, Artificial Sequence
  Description of Artificial Sequence: Synthetic oligonucleotide
cgaaagaggccugacacuu

SEQ ID NO: 740676 - RNA, 19 nt, Artificial Sequence
  Description of Artificial Sequence: Synthetic oligonucleotide
cagcgugacccacccacuu

SEQ ID NO: 740677 - RNA, 19 nt, Artificial Sequence
  Description of Artificial Sequence: Synthetic oligonucleotide
cgguguagcaagagauucu

SEQ ID NO: 740678 - RNA, 19 nt, Artificial Sequence
  Description of Artificial Sequence: Synthetic oligonucleotide
cuacuggcugcuggcuggu

SEQ ID NO: 740679 - RNA, 19 nt, Artificial Sequence
  Description of Artificial Sequence: Synthetic oligonucleotide
ggaagccaucgagcccuca

SEQ ID NO: 740680 - RNA, 19 nt, Artificial Sequence
  Description of Artificial Sequence: Synthetic oligonucleotide
ggccaaaauguggcggcau

SEQ ID NO: 740681 - RNA, 19 nt, Artificial Sequence
  Description of Artificial Sequence: Synthetic oligonucleotide
cccacucauuauggcacaa

SEQ ID NO: 740682 - RNA, 19 nt, Artificial Sequence
  Description of Artificial Sequence: Synthetic oligonucleotide
cucgacucucucgcucuuu

SEQ ID NO: 740683 - RNA, 19 nt, Artificial Sequence
  Description of Artificial Sequence: Synthetic oligonucleotide
gcgcaggguggagcagcgc

SEQ ID NO: 740684 - RNA, 19 nt, Artificial Sequence
  Description of Artificial Sequence: Synthetic oligonucleotide
cccugcuuagguccuggau

SEQ ID NO: 740685 - RNA, 19 nt, Artificial Sequence
  Description of Artificial Sequence: Synthetic oligonucleotide
ccacucauuauggcacaau

SEQ ID NO: 740686 - RNA, 19 nt, Artificial Sequence
  Description of Artificial Sequence: Synthetic oligonucleotide
ccaccagguggguggaauu

SEQ ID NO: 740687 - RNA, 19 nt, Artificial Sequence
  Description of Artificial Sequence: Synthetic oligonucleotide
cgacucucucgcucuuugu

SEQ ID NO: 740688 - RNA, 19 nt, Artificial Sequence
  Description of Artificial Sequence: Synthetic oligonucleotide
aauucugucauuugcacag

SEQ ID NO: 740689 - RNA, 19 nt, Artificial Sequence
  Description of Artificial Sequence: Synthetic oligonucleotide
aagauuuaucuucugcugc

SEQ ID NO: 740690 - RNA, 19 nt, Artificial Sequence
  Description of Artificial Sequence: Synthetic oligonucleotide
aaagcgucuuccuuaaagc

SEQ ID NO: 740691 - RNA, 19 nt, Artificial Sequence
  Description of Artificial Sequence: Synthetic oligonucleotide
ugagucauaauuauggucu

SEQ ID NO: 740692 - RNA, 19 nt, Artificial Sequence
  Description of Artificial Sequence: Synthetic oligonucleotide
auaauuauggucucucuac

SEQ ID NO: 740693 - RNA, 19 nt, Artificial Sequence
  Description of Artificial Sequence: Synthetic oligonucleotide
aaaucccucauucuauggc

SEQ ID NO: 740694 - RNA, 19 nt, Artificial Sequence
  Description of Artificial Sequence: Synthetic oligonucleotide
aagaucgaugauuugauug

SEQ ID NO: 740695 - RNA, 19 nt, Artificial Sequence
  Description of Artificial Sequence: Synthetic oligonucleotide
uuugucagcuaccauauag

SEQ ID NO: 740696 - RNA, 19 nt, Artificial Sequence
  Description of Artificial Sequence: Synthetic oligonucleotide
ugaauaacugaaaauccag

SEQ ID NO: 740697 - RNA, 19 nt, Artificial Sequence
  Description of Artificial Sequence: Synthetic oligonucleotide
agaaacaccuauaaguugc

SEQ ID NO: 740698 - RNA, 19 nt, Artificial Sequence
  Description of Artificial Sequence: Synthetic oligonucleotide
aaagauuuaucuucugcug

SEQ ID NO: 740699 - RNA, 19 nt, Artificial Sequence
  Description of Artificial Sequence: Synthetic oligonucleotide
auugagugugauuuuaggg

SEQ ID NO: 740700 - RNA, 19 nt, Artificial Sequence
  Description of Artificial Sequence: Synthetic oligonucleotide
aauagauaguaggagggac

SEQ ID NO: 740701 - RNA, 19 nt, Artificial Sequence
  Description of Artificial Sequence: Synthetic oligonucleotide
guaaggauaaauuuguuuc

SEQ ID NO: 740702 - RNA, 19 nt, Artificial Sequence
  Description of Artificial Sequence: Synthetic oligonucleotide
uccaguaaggauaaauuug

SEQ ID NO: 740703 - RNA, 19 nt, Artificial Sequence
  Description of Artificial Sequence: Synthetic oligonucleotide
agcaggaauagauaguagg

SEQ ID NO: 740704 - RNA, 19 nt, Artificial Sequence
  Description of Artificial Sequence: Synthetic oligonucleotide
uuugugauugaauaacuga

SEQ ID NO: 740705 - RNA, 19 nt, Artificial Sequence
  Description of Artificial Sequence: Synthetic oligonucleotide
acuuauagcuuccugugcg

SEQ ID NO: 740706 - RNA, 19 nt, Artificial Sequence
  Description of Artificial Sequence: Synthetic oligonucleotide
ucuauggcuaccuuuaugu

SEQ ID NO: 740707 - RNA, 19 nt, Artificial Sequence
  Description of Artificial Sequence: Synthetic oligonucleotide
ggcacugacacacagagcg

SEQ ID NO: 740708 - RNA, 19 nt, Artificial Sequence
  Description of Artificial Sequence: Synthetic oligonucleotide
aauacuugacauccauguc

SEQ ID NO: 740709 - RNA, 19 nt, Artificial Sequence
  Description of Artificial Sequence: Synthetic oligonucleotide
uagaaauuuugucagcuac

SEQ ID NO: 740710 - RNA, 19 nt, Artificial Sequence
  Description of Artificial Sequence: Synthetic oligonucleotide
uuugccaucacuagcacuc

SEQ ID NO: 740711 - RNA, 19 nt, Artificial Sequence
  Description of Artificial Sequence: Synthetic oligonucleotide
aguggcuuguccuaucagc

SEQ ID NO: 740712 - RNA, 19 nt, Artificial Sequence
  Description of Artificial Sequence: Synthetic oligonucleotide
agaacacgaaccaucaugc

SEQ ID NO: 740713 - RNA, 19 nt, Artificial Sequence
  Description of Artificial Sequence: Synthetic oligonucleotide
uugagugugauuuuagggu

SEQ ID NO: 740714 - RNA, 19 nt, Artificial Sequence
  Description of Artificial Sequence: Synthetic oligonucleotide
ugcgaaauacuugacaucc

SEQ ID NO: 740715 - RNA, 19 nt, Artificial Sequence
  Description of Artificial Sequence: Synthetic oligonucleotide
ucaaacgaacuucaggaca

SEQ ID NO: 740716 - RNA, 19 nt, Artificial Sequence
  Description of Artificial Sequence: Synthetic oligonucleotide
augauagccaggcggaccc

SEQ ID NO: 740717 - RNA, 19 nt, Artificial Sequence
  Description of Artificial Sequence: Synthetic oligonucleotide
uuuauauagggcaggauuu

SEQ ID NO: 740718 - RNA, 19 nt, Artificial Sequence
  Description of Artificial Sequence: Synthetic oligonucleotide
uuuugugauugaauaacug

SEQ ID NO: 740719 - RNA, 19 nt, Artificial Sequence
  Description of Artificial Sequence: Synthetic oligonucleotide
agugcauugaugcagaaua

SEQ ID NO: 740720 - RNA, 19 nt, Artificial Sequence
  Description of Artificial Sequence: Synthetic oligonucleotide
uuuucuguaaugacuuggc

SEQ ID NO: 740721 - RNA, 19 nt, Artificial Sequence
  Description of Artificial Sequence: Synthetic oligonucleotide
agcuucacaguccuuaagg

SEQ ID NO: 740722 - RNA, 19 nt, Artificial Sequence
  Description of Artificial Sequence: Synthetic oligonucleotide
auucgagcgagcuagcauc

SEQ ID NO: 740723 - RNA, 19 nt, Artificial Sequence
  Description of Artificial Sequence: Synthetic oligonucleotide
ugcaaaugcgcucugcuug

SEQ ID NO: 740724 - RNA, 19 nt, Artificial Sequence
  Description of Artificial Sequence: Synthetic oligonucleotide
auuaccaaggccucaaggu

SEQ ID NO: 740725 - RNA, 19 nt, Artificial Sequence
  Description of Artificial Sequence: Synthetic oligonucleotide
acaagaagagagcuacuac

SEQ ID NO: 740726 - RNA, 19 nt, Artificial Sequence
  Description of Artificial Sequence: Synthetic oligonucleotide
ugguaucuagaauuggucc

SEQ ID NO: 740727 - RNA, 19 nt, Artificial Sequence
  Description of Artificial Sequence: Synthetic oligonucleotide
cucgguaccaaacuuuugg

SEQ ID NO: 740728 - RNA, 19 nt, Artificial Sequence
  Description of Artificial Sequence: Synthetic oligonucleotide
ugugcgaaauacuugacau

SEQ ID NO: 740729 - RNA, 19 nt, Artificial Sequence
  Description of Artificial Sequence: Synthetic oligonucleotide
gugauuuuaggguccaccg

SEQ ID NO: 740730 - RNA, 19 nt, Artificial Sequence
  Description of Artificial Sequence: Synthetic oligonucleotide
ucuacggagagccauccug

SEQ ID NO: 740731 - RNA, 19 nt, Artificial Sequence
  Description of Artificial Sequence: Synthetic oligonucleotide
uauggcaggacaguuaggc

SEQ ID NO: 740732 - RNA, 19 nt, Artificial Sequence
  Description of Artificial Sequence: Synthetic oligonucleotide
aaucccucauucuauggcu

SEQ ID NO: 740733 - RNA, 19 nt, Artificial Sequence
  Description of Artificial Sequence: Synthetic oligonucleotide
ucuagaauugguccaauuu

SEQ ID NO: 740734 - RNA, 19 nt, Artificial Sequence
  Description of Artificial Sequence: Synthetic oligonucleotide
acuaauuccuuuauauagg

SEQ ID NO: 740735 - RNA, 19 nt, Artificial Sequence
  Description of Artificial Sequence: Synthetic oligonucleotide
ucgaugauuugauugaaaa

SEQ ID NO: 740736 - RNA, 19 nt, Artificial Sequence
  Description of Artificial Sequence: Synthetic oligonucleotide
agaguggucauucugugca

SEQ ID NO: 740737 - RNA, 19 nt, Artificial Sequence
  Description of Artificial Sequence: Synthetic oligonucleotide
uuaagaucgaugauuugau

SEQ ID NO: 740738 - RNA, 19 nt, Artificial Sequence
  Description of Artificial Sequence: Synthetic oligonucleotide
gguacgaugguauucuggg

SEQ ID NO: 740739 - RNA, 19 nt, Artificial Sequence
  Description of Artificial Sequence: Synthetic oligonucleotide
gagcuagcaucuuugaggc

SEQ ID NO: 740740 - RNA, 19 nt, Artificial Sequence
  Description of Artificial Sequence: Synthetic oligonucleotide
uuggcauaaacuccugccc

SEQ ID NO: 740741 - RNA, 19 nt, Artificial Sequence
  Description of Artificial Sequence: Synthetic oligonucleotide
gaagacuaggcaugggaag

SEQ ID NO: 740742 - RNA, 19 nt, Artificial Sequence
  Description of Artificial Sequence: Synthetic oligonucleotide
uggaccaacuucaugagau

SEQ ID NO: 740743 - RNA, 19 nt, Artificial Sequence
  Description of Artificial Sequence: Synthetic oligonucleotide
ugugauugaauaacugaaa

SEQ ID NO: 740744 - RNA, 19 nt, Artificial Sequence
  Description of Artificial Sequence: Synthetic oligonucleotide
auuguagauaaucccauaa

SEQ ID NO: 740745 - RNA, 19 nt, Artificial Sequence
  Description of Artificial Sequence: Synthetic oligonucleotide
gaaaucccucauucuaugg

SEQ ID NO: 740746 - RNA, 19 nt, Artificial Sequence
  Description of Artificial Sequence: Synthetic oligonucleotide
uacacaauccaaguuggag

SEQ ID NO: 740747 - RNA, 19 nt, Artificial Sequence
  Description of Artificial Sequence: Synthetic oligonucleotide
agaucgaugauuugauuga

SEQ ID NO: 740748 - RNA, 19 nt, Artificial Sequence
  Description of Artificial Sequence: Synthetic oligonucleotide
aguuaggcgacagaugagg

SEQ ID NO: 740749 - RNA, 19 nt, Artificial Sequence
  Description of Artificial Sequence: Synthetic oligonucleotide
acacaauccaaguuggaga

SEQ ID NO: 740750 - RNA, 19 nt, Artificial Sequence
  Description of Artificial Sequence: Synthetic oligonucleotide
caaacgaacuucaggacac

SEQ ID NO: 740751 - RNA, 19 nt, Artificial Sequence
  Description of Artificial Sequence: Synthetic oligonucleotide
ugcccaaaauuguagauaa

SEQ ID NO: 740752 - RNA, 19 nt, Artificial Sequence
  Description of Artificial Sequence: Synthetic oligonucleotide
aguaaggauaaauuuguuu

SEQ ID NO: 740753 - RNA, 19 nt, Artificial Sequence
  Description of Artificial Sequence: Synthetic oligonucleotide
uuucaaguagaaaucccuc

SEQ ID NO: 740754 - RNA, 19 nt, Artificial Sequence
  Description of Artificial Sequence: Synthetic oligonucleotide
accuauaaguugccuuucc

SEQ ID NO: 740755 - RNA, 19 nt, Artificial Sequence
  Description of Artificial Sequence: Synthetic oligonucleotide
aucacuagcacucuaggua

SEQ ID NO: 740756 - RNA, 19 nt, Artificial Sequence
  Description of Artificial Sequence: Synthetic oligonucleotide
ucggaccucagcuucacag

SEQ ID NO: 740757 - RNA, 19 nt, Artificial Sequence
  Description of Artificial Sequence: Synthetic oligonucleotide
aguguaggcauuaccaagg

SEQ ID NO: 740758 - RNA, 19 nt, Artificial Sequence
  Description of Artificial Sequence: Synthetic oligonucleotide
ucacuagcacucuagguac

SEQ ID NO: 740759 - RNA, 19 nt, Artificial Sequence
  Description of Artificial Sequence: Synthetic oligonucleotide
ugugauuuuaggguccacc

SEQ ID NO: 740760 - RNA, 19 nt, Artificial Sequence
  Description of Artificial Sequence: Synthetic oligonucleotide
ucaaguagaaaucccucau

SEQ ID NO: 740761 - RNA, 19 nt, Artificial Sequence
  Description of Artificial Sequence: Synthetic oligonucleotide
ucauuuugugauugaauaa

SEQ ID NO: 740762 - RNA, 19 nt, Artificial Sequence
  Description of Artificial Sequence: Synthetic oligonucleotide
guaagcucccguuugcucc

SEQ ID NO: 740763 - RNA, 19 nt, Artificial Sequence
  Description of Artificial Sequence: Synthetic oligonucleotide
uugagucauaauuaugguc

SEQ ID NO: 740764 - RNA, 19 nt, Artificial Sequence
  Description of Artificial Sequence: Synthetic oligonucleotide
aacaccuauaaguugccuu

SEQ ID NO: 740765 - RNA, 19 nt, Artificial Sequence
  Description of Artificial Sequence: Synthetic oligonucleotide
ggaauagauaguaggaggg

SEQ ID NO: 740766 - RNA, 19 nt, Artificial Sequence
  Description of Artificial Sequence: Synthetic oligonucleotide
uuacuuugugggcagcggc

SEQ ID NO: 740767 - RNA, 19 nt, Artificial Sequence
  Description of Artificial Sequence: Synthetic oligonucleotide
ugagugugauuuuaggguc

SEQ ID NO: 740768 - RNA, 19 nt, Artificial Sequence
  Description of Artificial Sequence: Synthetic oligonucleotide
ugauuuuaggguccaccgc

SEQ ID NO: 740769 - RNA, 19 nt, Artificial Sequence
  Description of Artificial Sequence: Synthetic oligonucleotide
cuuaagaucgaugauuuga

SEQ ID NO: 740770 - RNA, 19 nt, Artificial Sequence
  Description of Artificial Sequence: Synthetic oligonucleotide
aauuagggucauuugccau

SEQ ID NO: 740771 - RNA, 19 nt, Artificial Sequence
  Description of Artificial Sequence: Synthetic oligonucleotide
guauucugggcccacucgg

SEQ ID NO: 740772 - RNA, 19 nt, Artificial Sequence
  Description of Artificial Sequence: Synthetic oligonucleotide
agaugauauucaaacgaac

SEQ ID NO: 740773 - RNA, 19 nt, Artificial Sequence
  Description of Artificial Sequence: Synthetic oligonucleotide
uguuucugacacuuauagc

SEQ ID NO: 740774 - RNA, 19 nt, Artificial Sequence
  Description of Artificial Sequence: Synthetic oligonucleotide
ugccauuuucaacacgaug

SEQ ID NO: 740775 - RNA, 19 nt, Artificial Sequence
  Description of Artificial Sequence: Synthetic oligonucleotide
uccuuucaaguagaaaucc

SEQ ID NO: 740776 - RNA, 19 nt, Artificial Sequence
  Description of Artificial Sequence: Synthetic oligonucleotide
uccuaucagcagaugaaug

SEQ ID NO: 740777 - RNA, 19 nt, Artificial Sequence
  Description of Artificial Sequence: Synthetic oligonucleotide
uuugcuuagugguuauuuc

SEQ ID NO: 740778 - RNA, 19 nt, Artificial Sequence
  Description of Artificial Sequence: Synthetic oligonucleotide
agcacucuagguacgaugg

SEQ ID NO: 740779 - RNA, 19 nt, Artificial Sequence
  Description of Artificial Sequence: Synthetic oligonucleotide
agaaaucccucauucuaug

SEQ ID NO: 740780 - RNA, 19 nt, Artificial Sequence
  Description of Artificial Sequence: Synthetic oligonucleotide
ggugauucgagcgagcuag

SEQ ID NO: 740781 - RNA, 19 nt, Artificial Sequence
  Description of Artificial Sequence: Synthetic oligonucleotide
ugucguaagcucccguuug

SEQ ID NO: 740782 - RNA, 19 nt, Artificial Sequence
  Description of Artificial Sequence: Synthetic oligonucleotide
cuacggagagccauccugg

SEQ ID NO: 740783 - RNA, 19 nt, Artificial Sequence
  Description of Artificial Sequence: Synthetic oligonucleotide
gaugauauucaaacgaacu

SEQ ID NO: 740784 - RNA, 19 nt, Artificial Sequence
  Description of Artificial Sequence: Synthetic oligonucleotide
uucacauguugauugguau

SEQ ID NO: 740785 - RNA, 19 nt, Artificial Sequence
  Description of Artificial Sequence: Synthetic oligonucleotide
uuauauagggcaggauuug

SEQ ID NO: 740786 - RNA, 19 nt, Artificial Sequence
  Description of Artificial Sequence: Synthetic oligonucleotide
uagauaguaggagggacug

SEQ ID NO: 740787 - RNA, 19 nt, Artificial Sequence
  Description of Artificial Sequence: Synthetic oligonucleotide
gacauuugcuacuuggucu

SEQ ID NO: 740788 - RNA, 19 nt, Artificial Sequence
  Description of Artificial Sequence: Synthetic oligonucleotide
ucauaauuauggucucucu

SEQ ID NO: 740789 - RNA, 19 nt, Artificial Sequence
  Description of Artificial Sequence: Synthetic oligonucleotide
cuaccauauagcgaacccg

SEQ ID NO: 740790 - RNA, 19 nt, Artificial Sequence
  Description of Artificial Sequence: Synthetic oligonucleotide
guaccaaacuuuuggacca

SEQ ID NO: 740791 - RNA, 19 nt, Artificial Sequence
  Description of Artificial Sequence: Synthetic oligonucleotide
gauuuuaggguccaccgcu

SEQ ID NO: 740792 - RNA, 19 nt, Artificial Sequence
  Description of Artificial Sequence: Synthetic oligonucleotide
ucauuucaggacugcaaga

SEQ ID NO: 740793 - RNA, 19 nt, Artificial Sequence
  Description of Artificial Sequence: Synthetic oligonucleotide
gaugaggggcuacggagag

SEQ ID NO: 740794 - RNA, 19 nt, Artificial Sequence
  Description of Artificial Sequence: Synthetic oligonucleotide
aacgaacuucaggacacuc

SEQ ID NO: 740795 - RNA, 19 nt, Artificial Sequence
  Description of Artificial Sequence: Synthetic oligonucleotide
gugguuauuuccuuaccac

SEQ ID NO: 740796 - RNA, 19 nt, Artificial Sequence
  Description of Artificial Sequence: Synthetic oligonucleotide
gacacuuauagcuuccugu

SEQ ID NO: 740797 - RNA, 19 nt, Artificial Sequence
  Description of Artificial Sequence: Synthetic oligonucleotide
agcggcauauacucaauga

SEQ ID NO: 740798 - RNA, 19 nt, Artificial Sequence
  Description of Artificial Sequence: Synthetic oligonucleotide
aacauuugcuuagugguua

SEQ ID NO: 740799 - RNA, 19 nt, Artificial Sequence
  Description of Artificial Sequence: Synthetic oligonucleotide
uauggucucucuaccuuca

SEQ ID NO: 740800 - RNA, 19 nt, Artificial Sequence
  Description of Artificial Sequence: Synthetic oligonucleotide
agcuacuacacugaugcug

SEQ ID NO: 740801 - RNA, 19 nt, Artificial Sequence
  Description of Artificial Sequence: Synthetic oligonucleotide
guagaaaucccucauucua

SEQ ID NO: 740802 - RNA, 19 nt, Artificial Sequence
  Description of Artificial Sequence: Synthetic oligonucleotide
uucaacacgaugggcaaca

SEQ ID NO: 740803 - RNA, 19 nt, Artificial Sequence
  Description of Artificial Sequence: Synthetic oligonucleotide
uugauugguaucagacacu

SEQ ID NO: 740804 - RNA, 19 nt, Artificial Sequence
  Description of Artificial Sequence: Synthetic oligonucleotide
agacagugcauugaugcag

SEQ ID NO: 740805 - RNA, 19 nt, Artificial Sequence
  Description of Artificial Sequence: Synthetic oligonucleotide
gaccuagcagcuauggcag

SEQ ID NO: 740806 - RNA, 19 nt, Artificial Sequence
  Description of Artificial Sequence: Synthetic oligonucleotide
uuuauguccugagauggaa

SEQ ID NO: 740807 - RNA, 19 nt, Artificial Sequence
  Description of Artificial Sequence: Synthetic oligonucleotide
aguaaguguccaggcaggc

SEQ ID NO: 740808 - RNA, 19 nt, Artificial Sequence
  Description of Artificial Sequence: Synthetic oligonucleotide
gguuauuuccuuaccacag

SEQ ID NO: 740809 - RNA, 19 nt, Artificial Sequence
  Description of Artificial Sequence: Synthetic oligonucleotide
ugcaagaacagcaccgcua

SEQ ID NO: 740810 - RNA, 19 nt, Artificial Sequence
  Description of Artificial Sequence: Synthetic oligonucleotide
agcgucuuccuuaaagcac

SEQ ID NO: 740811 - RNA, 19 nt, Artificial Sequence
  Description of Artificial Sequence: Synthetic oligonucleotide
uugguaucagacacuaauu

SEQ ID NO: 740812 - RNA, 19 nt, Artificial Sequence
  Description of Artificial Sequence: Synthetic oligonucleotide
ugacacuuauagcuuccug

SEQ ID NO: 740813 - RNA, 19 nt, Artificial Sequence
  Description of Artificial Sequence: Synthetic oligonucleotide
uucccgaauggcauagaca

SEQ ID NO: 740814 - RNA, 19 nt, Artificial Sequence
  Description of Artificial Sequence: Synthetic oligonucleotide
uuauggucucucuaccuuc

SEQ ID NO: 740815 - RNA, 19 nt, Artificial Sequence
  Description of Artificial Sequence: Synthetic oligonucleotide
guagauaaucccauaauua

SEQ ID NO: 740816 - RNA, 19 nt, Artificial Sequence
  Description of Artificial Sequence: Synthetic oligonucleotide
uagcacucuagguacgaug

SEQ ID NO: 740817 - RNA, 19 nt, Artificial Sequence
  Description of Artificial Sequence: Synthetic oligonucleotide
cagaauagaguggucauuc

SEQ ID NO: 740818 - RNA, 19 nt, Artificial Sequence
  Description of Artificial Sequence: Synthetic oligonucleotide
cuuccuuaaagcacaagaa

SEQ ID NO: 740819 - RNA, 19 nt, Artificial Sequence
  Description of Artificial Sequence: Synthetic oligonucleotide
auuauggucucucuaccuu

SEQ ID NO: 740820 - RNA, 19 nt, Artificial Sequence
  Description of Artificial Sequence: Synthetic oligonucleotide
cugaccuagcuucugcagc

SEQ ID NO: 740821 - RNA, 19 nt, Artificial Sequence
  Description of Artificial Sequence: Synthetic oligonucleotide
ucauucuauggcuaccuuu

SEQ ID NO: 740822 - RNA, 19 nt, Artificial Sequence
  Description of Artificial Sequence: Synthetic oligonucleotide
acaccuauaaguugccuuu

SEQ ID NO: 740823 - RNA, 19 nt, Artificial Sequence
  Description of Artificial Sequence: Synthetic oligonucleotide
uuugcuacuuggucuccug

SEQ ID NO: 740824 - RNA, 19 nt, Artificial Sequence
  Description of Artificial Sequence: Synthetic oligonucleotide
uagcgaacccgccaaagau

SEQ ID NO: 740825 - RNA, 19 nt, Artificial Sequence
  Description of Artificial Sequence: Synthetic oligonucleotide
ucgguaccaaacuuuugga

SEQ ID NO: 740826 - RNA, 19 nt, Artificial Sequence
  Description of Artificial Sequence: Synthetic oligonucleotide
uagugguuauuuccuuacc

SEQ ID NO: 740827 - RNA, 19 nt, Artificial Sequence
  Description of Artificial Sequence: Synthetic oligonucleotide
uacuuugugggcagcggcu

SEQ ID NO: 740828 - RNA, 19 nt, Artificial Sequence
  Description of Artificial Sequence: Synthetic oligonucleotide
cuagagcugacuucacaug

SEQ ID NO: 740829 - RNA, 19 nt, Artificial Sequence
  Description of Artificial Sequence: Synthetic oligonucleotide
agucuacggagagccaucc

SEQ ID NO: 740830 - RNA, 19 nt, Artificial Sequence
  Description of Artificial Sequence: Synthetic oligonucleotide
ugauugguaucagacacua

SEQ ID NO: 740831 - RNA, 19 nt, Artificial Sequence
  Description of Artificial Sequence: Synthetic oligonucleotide
gacgaauuccaaucacuuc

SEQ ID NO: 740832 - RNA, 19 nt, Artificial Sequence
  Description of Artificial Sequence: Synthetic oligonucleotide
uucugacacuuauagcuuc

SEQ ID NO: 740833 - RNA, 19 nt, Artificial Sequence
  Description of Artificial Sequence: Synthetic oligonucleotide
ugcagaauagaguggucau

SEQ ID NO: 740834 - RNA, 19 nt, Artificial Sequence
  Description of Artificial Sequence: Synthetic oligonucleotide
gagaugauauucaaacgaa

SEQ ID NO: 740835 - RNA, 19 nt, Artificial Sequence
  Description of Artificial Sequence: Synthetic oligonucleotide
cuaggcaugggaagucuac

SEQ ID NO: 740836 - RNA, 19 nt, Artificial Sequence
  Description of Artificial Sequence: Synthetic oligonucleotide
gguaucuagaauuggucca

SEQ ID NO: 740837 - RNA, 19 nt, Artificial Sequence
  Description of Artificial Sequence: Synthetic oligonucleotide
auagcgaacccgccaaaga

SEQ ID NO: 740838 - RNA, 19 nt, Artificial Sequence
  Description of Artificial Sequence: Synthetic oligonucleotide
cacgaugggcaacauuugc

SEQ ID NO: 740839 - RNA, 19 nt, Artificial Sequence
  Description of Artificial Sequence: Synthetic oligonucleotide
caaggccucaaggucaucc

SEQ ID NO: 740840 - RNA, 19 nt, Artificial Sequence
  Description of Artificial Sequence: Synthetic oligonucleotide
ugcuggauccugucguaag

SEQ ID NO: 740841 - RNA, 19 nt, Artificial Sequence
  Description of Artificial Sequence: Synthetic oligonucleotide
cuuucaaguagaaaucccu

SEQ ID NO: 740842 - RNA, 19 nt, Artificial Sequence
  Description of Artificial Sequence: Synthetic oligonucleotide
gggaagucuacggagagcc

SEQ ID NO: 740843 - RNA, 19 nt, Artificial Sequence
  Description of Artificial Sequence: Synthetic oligonucleotide
uccuccucaugcuuaagau

SEQ ID NO: 740844 - RNA, 19 nt, Artificial Sequence
  Description of Artificial Sequence: Synthetic oligonucleotide
auagauaguaggagggacu

SEQ ID NO: 740845 - RNA, 19 nt, Artificial Sequence
  Description of Artificial Sequence: Synthetic oligonucleotide
agaauagaguggucauucu

SEQ ID NO: 740846 - RNA, 19 nt, Artificial Sequence
  Description of Artificial Sequence: Synthetic oligonucleotide
ugagagcagauggugguca

SEQ ID NO: 740847 - RNA, 19 nt, Artificial Sequence
  Description of Artificial Sequence: Synthetic oligonucleotide
guuaggcgacagaugaggg

SEQ ID NO: 740848 - RNA, 19 nt, Artificial Sequence
  Description of Artificial Sequence: Synthetic oligonucleotide
auauagggcaggauuugag

SEQ ID NO: 740849 - RNA, 19 nt, Artificial Sequence
  Description of Artificial Sequence: Synthetic oligonucleotide
uccugccauuuucaacacg

SEQ ID NO: 740850 - RNA, 19 nt, Artificial Sequence
  Description of Artificial Sequence: Synthetic oligonucleotide
gaauagauaguaggaggga

SEQ ID NO: 740851 - RNA, 19 nt, Artificial Sequence
  Description of Artificial Sequence: Synthetic oligonucleotide
gguauucugggcccacucg

SEQ ID NO: 740852 - RNA, 19 nt, Artificial Sequence
  Description of Artificial Sequence: Synthetic oligonucleotide
gaugcugcaccuagaaaca

SEQ ID NO: 740853 - RNA, 19 nt, Artificial Sequence
  Description of Artificial Sequence: Synthetic oligonucleotide
ggucauuugccaucacuag

SEQ ID NO: 740854 - RNA, 19 nt, Artificial Sequence
  Description of Artificial Sequence: Synthetic oligonucleotide
cagaagauguucaauggua

SEQ ID NO: 740855 - RNA, 19 nt, Artificial Sequence
  Description of Artificial Sequence: Synthetic oligonucleotide
aggcggacccuccacuugg

SEQ ID NO: 740856 - RNA, 19 nt, Artificial Sequence
  Description of Artificial Sequence: Synthetic oligonucleotide
agcugacgaauuccaauca

SEQ ID NO: 740857 - RNA, 19 nt, Artificial Sequence
  Description of Artificial Sequence: Synthetic oligonucleotide
aggcaagggaagacuaggc

SEQ ID NO: 740858 - RNA, 19 nt, Artificial Sequence
  Description of Artificial Sequence: Synthetic oligonucleotide
ucagcagaugaaugcacua

SEQ ID NO: 740859 - RNA, 19 nt, Artificial Sequence
  Description of Artificial Sequence: Synthetic oligonucleotide
cuucccgaauggcauagac

SEQ ID NO: 740860 - RNA, 19 nt, Artificial Sequence
  Description of Artificial Sequence: Synthetic oligonucleotide
aagccgggagcacccauca

SEQ ID NO: 740861 - RNA, 19 nt, Artificial Sequence
  Description of Artificial Sequence: Synthetic oligonucleotide
agaguggcuuguccuauca

SEQ ID NO: 740862 - RNA, 19 nt, Artificial Sequence
  Description of Artificial Sequence: Synthetic oligonucleotide
agaagauguucaaugguau

SEQ ID NO: 740863 - RNA, 19 nt, Artificial Sequence
  Description of Artificial Sequence: Synthetic oligonucleotide
gauccugucguaagcuccc

SEQ ID NO: 740864 - RNA, 19 nt, Artificial Sequence
  Description of Artificial Sequence: Synthetic oligonucleotide
augcuuaagaucgaugauu

SEQ ID NO: 740865 - RNA, 19 nt, Artificial Sequence
  Description of Artificial Sequence: Synthetic oligonucleotide
uaggcauuaccaaggccuc

SEQ ID NO: 740866 - RNA, 19 nt, Artificial Sequence
  Description of Artificial Sequence: Synthetic oligonucleotide
gagucauaauuauggucuc

SEQ ID NO: 740867 - RNA, 19 nt, Artificial Sequence
  Description of Artificial Sequence: Synthetic oligonucleotide
gagugugauuuuagggucc

SEQ ID NO: 740868 - RNA, 19 nt, Artificial Sequence
  Description of Artificial Sequence: Synthetic oligonucleotide
uucgagcgagcuagcaucu

SEQ ID NO: 740869 - RNA, 19 nt, Artificial Sequence
  Description of Artificial Sequence: Synthetic oligonucleotide
acccgccaaagauuuaucu

SEQ ID NO: 740870 - RNA, 19 nt, Artificial Sequence
  Description of Artificial Sequence: Synthetic oligonucleotide
gaaggcggggaugagguca

SEQ ID NO: 740871 - RNA, 19 nt, Artificial Sequence
  Description of Artificial Sequence: Synthetic oligonucleotide
gacaguuaggcgacagaug

SEQ ID NO: 740872 - RNA, 19 nt, Artificial Sequence
  Description of Artificial Sequence: Synthetic oligonucleotide
agguacgaugguauucugg

SEQ ID NO: 740873 - RNA, 19 nt, Artificial Sequence
  Description of Artificial Sequence: Synthetic oligonucleotide
agugggcaaguucucacaa

SEQ ID NO: 740874 - RNA, 19 nt, Artificial Sequence
  Description of Artificial Sequence: Synthetic oligonucleotide
aaacaccuauaaguugccu

SEQ ID NO: 740875 - RNA, 19 nt, Artificial Sequence
  Description of Artificial Sequence: Synthetic oligonucleotide
gcuaccauauagcgaaccc

SEQ ID NO: 740876 - RNA, 19 nt, Artificial Sequence
  Description of Artificial Sequence: Synthetic oligonucleotide
cauauagcgaacccgccaa

SEQ ID NO: 740877 - RNA, 19 nt, Artificial Sequence
  Description of Artificial Sequence: Synthetic oligonucleotide
gcaaaugcgcucugcuugg

SEQ ID NO: 740878 - RNA, 19 nt, Artificial Sequence
  Description of Artificial Sequence: Synthetic oligonucleotide
aacggacauuugcuacuug

SEQ ID NO: 740879 - RNA, 19 nt, Artificial Sequence
  Description of Artificial Sequence: Synthetic oligonucleotide
uaagaucgaugauuugauu

SEQ ID NO: 740880 - RNA, 19 nt, Artificial Sequence
  Description of Artificial Sequence: Synthetic oligonucleotide
uugcccaaaauuguagaua

SEQ ID NO: 740881 - RNA, 19 nt, Artificial Sequence
  Description of Artificial Sequence: Synthetic oligonucleotide
uucugcugcuugccgaagu

SEQ ID NO: 740882 - RNA, 19 nt, Artificial Sequence
  Description of Artificial Sequence: Synthetic oligonucleotide
gcuacggagaggcugucag

SEQ ID NO: 740883 - RNA, 19 nt, Artificial Sequence
  Description of Artificial Sequence: Synthetic oligonucleotide
cauagacaugauccacaag

SEQ ID NO: 740884 - RNA, 19 nt, Artificial Sequence
  Description of Artificial Sequence: Synthetic oligonucleotide
ugacauccagguguuacaa

SEQ ID NO: 740885 - RNA, 19 nt, Artificial Sequence
  Description of Artificial Sequence: Synthetic oligonucleotide
uaagcucccguuugcuccu

SEQ ID NO: 740886 - RNA, 19 nt, Artificial Sequence
  Description of Artificial Sequence: Synthetic oligonucleotide
uagcagcuauggcaggaca

SEQ ID NO: 740887 - RNA, 19 nt, Artificial Sequence
  Description of Artificial Sequence: Synthetic oligonucleotide
cauguugauugguaucaga

SEQ ID NO: 740888 - RNA, 19 nt, Artificial Sequence
  Description of Artificial Sequence: Synthetic oligonucleotide
accgcuacagauuggcaua

SEQ ID NO: 740889 - RNA, 19 nt, Artificial Sequence
  Description of Artificial Sequence: Synthetic oligonucleotide
gaguggcuuguccuaucag

SEQ ID NO: 740890 - RNA, 19 nt, Artificial Sequence
  Description of Artificial Sequence: Synthetic oligonucleotide
gucguaagcucccguuugc

SEQ ID NO: 740891 - RNA, 19 nt, Artificial Sequence
  Description of Artificial Sequence: Synthetic oligonucleotide
ucgccuggugaagaacacg

SEQ ID NO: 740892 - RNA, 19 nt, Artificial Sequence
  Description of Artificial Sequence: Synthetic oligonucleotide
uggcauagacaugauccac

SEQ ID NO: 740893 - RNA, 19 nt, Artificial Sequence
  Description of Artificial Sequence: Synthetic oligonucleotide
cacuagcacucuagguacg

SEQ ID NO: 740894 - RNA, 19 nt, Artificial Sequence
  Description of Artificial Sequence: Synthetic oligonucleotide
cuuauagcuuccugugcga

SEQ ID NO: 740895 - RNA, 19 nt, Artificial Sequence
  Description of Artificial Sequence: Synthetic oligonucleotide
cuagaauugguccaauuuu

SEQ ID NO: 740896 - RNA, 19 nt, Artificial Sequence
  Description of Artificial Sequence: Synthetic oligonucleotide
gagcgagcuagcaucuuug

SEQ ID NO: 740897 - RNA, 19 nt, Artificial Sequence
  Description of Artificial Sequence: Synthetic oligonucleotide
cagccuguuaggcacugac

SEQ ID NO: 740898 - RNA, 19 nt, Artificial Sequence
  Description of Artificial Sequence: Synthetic oligonucleotide
aucagcagaugaaugcacu

SEQ ID NO: 740899 - RNA, 19 nt, Artificial Sequence
  Description of Artificial Sequence: Synthetic oligonucleotide
ccgccaaagauuuaucuuc

SEQ ID NO: 740900 - RNA, 19 nt, Artificial Sequence
  Description of Artificial Sequence: Synthetic oligonucleotide
aacccgccaaagauuuauc

SEQ ID NO: 740901 - RNA, 19 nt, Artificial Sequence
  Description of Artificial Sequence: Synthetic oligonucleotide
gacagugcauugaugcaga

SEQ ID NO: 740902 - RNA, 19 nt, Artificial Sequence
  Description of Artificial Sequence: Synthetic oligonucleotide
cugugcgaaauacuugaca

SEQ ID NO: 740903 - RNA, 19 nt, Artificial Sequence
  Description of Artificial Sequence: Synthetic oligonucleotide
aaacggacauuugcuacuu

SEQ ID NO: 740904 - RNA, 19 nt, Artificial Sequence
  Description of Artificial Sequence: Synthetic oligonucleotide
ugauucgagcgagcuagca

SEQ ID NO: 740905 - RNA, 19 nt, Artificial Sequence
  Description of Artificial Sequence: Synthetic oligonucleotide
uuuuaggguccaccgcuuu

SEQ ID NO: 740906 - RNA, 19 nt, Artificial Sequence
  Description of Artificial Sequence: Synthetic oligonucleotide
gcacuaagcacaaagcguc

SEQ ID NO: 740907 - RNA, 19 nt, Artificial Sequence
  Description of Artificial Sequence: Synthetic oligonucleotide
uggauccugucguaagcuc

SEQ ID NO: 740908 - RNA, 19 nt, Artificial Sequence
  Description of Artificial Sequence: Synthetic oligonucleotide
caaucacuucauuuacaca

SEQ ID NO: 740909 - RNA, 19 nt, Artificial Sequence
  Description of Artificial Sequence: Synthetic oligonucleotide
cgaaccaucaugcuggauc

SEQ ID NO: 740910 - RNA, 19 nt, Artificial Sequence
  Description of Artificial Sequence: Synthetic oligonucleotide
acauguugauugguaucag

SEQ ID NO: 740911 - RNA, 19 nt, Artificial Sequence
  Description of Artificial Sequence: Synthetic oligonucleotide
uccucaugcuuaagaucga

SEQ ID NO: 740912 - RNA, 19 nt, Artificial Sequence
  Description of Artificial Sequence: Synthetic oligonucleotide
caguuaggcgacagaugag

SEQ ID NO: 740913 - RNA, 19 nt, Artificial Sequence
  Description of Artificial Sequence: Synthetic oligonucleotide
aucuagaauugguccaauu

SEQ ID NO: 740914 - RNA, 19 nt, Artificial Sequence
  Description of Artificial Sequence: Synthetic oligonucleotide
gggaagacuaggcauggga

SEQ ID NO: 740915 - RNA, 19 nt, Artificial Sequence
  Description of Artificial Sequence: Synthetic oligonucleotide
acgaugggcaacauuugcu

SEQ ID NO: 740916 - RNA, 19 nt, Artificial Sequence
  Description of Artificial Sequence: Synthetic oligonucleotide
aaacgaacuucaggacacu

SEQ ID NO: 740917 - RNA, 19 nt, Artificial Sequence
  Description of Artificial Sequence: Synthetic oligonucleotide
acucuagguacgaugguau

SEQ ID NO: 740918 - RNA, 19 nt, Artificial Sequence
  Description of Artificial Sequence: Synthetic oligonucleotide
agugugauuuuagggucca

SEQ ID NO: 740919 - RNA, 19 nt, Artificial Sequence
  Description of Artificial Sequence: Synthetic oligonucleotide
caccuagaaacaccuauaa

SEQ ID NO: 740920 - RNA, 19 nt, Artificial Sequence
  Description of Artificial Sequence: Synthetic oligonucleotide
aggacaguuaggcgacaga

SEQ ID NO: 740921 - RNA, 19 nt, Artificial Sequence
  Description of Artificial Sequence: Synthetic oligonucleotide
acgaacuucaggacacuca

SEQ ID NO: 740922 - RNA, 19 nt, Artificial Sequence
  Description of Artificial Sequence: Synthetic oligonucleotide
acuucacauguugauuggu

SEQ ID NO: 740923 - RNA, 19 nt, Artificial Sequence
  Description of Artificial Sequence: Synthetic oligonucleotide
agcgagcuagcaucuuuga

SEQ ID NO: 740924 - RNA, 19 nt, Artificial Sequence
  Description of Artificial Sequence: Synthetic oligonucleotide
agagacugagagagcugac

SEQ ID NO: 740925 - RNA, 19 nt, Artificial Sequence
  Description of Artificial Sequence: Synthetic oligonucleotide
ugggaagucuacggagagc

SEQ ID NO: 740926 - RNA, 19 nt, Artificial Sequence
  Description of Artificial Sequence: Synthetic oligonucleotide
ggauccugucguaagcucc

SEQ ID NO: 740927 - RNA, 19 nt, Artificial Sequence
  Description of Artificial Sequence: Synthetic oligonucleotide
accuagcagcuauggcagg

SEQ ID NO: 740928 - RNA, 19 nt, Artificial Sequence
  Description of Artificial Sequence: Synthetic oligonucleotide
guaucuagaauugguccaa

SEQ ID NO: 740929 - RNA, 19 nt, Artificial Sequence
  Description of Artificial Sequence: Synthetic oligonucleotide
acggagaggcugucagaag

SEQ ID NO: 740930 - RNA, 19 nt, Artificial Sequence
  Description of Artificial Sequence: Synthetic oligonucleotide
ccaauuuucuguaaugacu

SEQ ID NO: 740931 - RNA, 19 nt, Artificial Sequence
  Description of Artificial Sequence: Synthetic oligonucleotide
gaucgaugauuugauugaa

SEQ ID NO: 740932 - RNA, 19 nt, Artificial Sequence
  Description of Artificial Sequence: Synthetic oligonucleotide
acuagcacucuagguacga

SEQ ID NO: 740933 - RNA, 19 nt, Artificial Sequence
  Description of Artificial Sequence: Synthetic oligonucleotide
auggucucucuaccuucag

SEQ ID NO: 740934 - RNA, 19 nt, Artificial Sequence
  Description of Artificial Sequence: Synthetic oligonucleotide
cacaauccaaguuggagau

SEQ ID NO: 740935 - RNA, 19 nt, Artificial Sequence
  Description of Artificial Sequence: Synthetic oligonucleotide
aauugggcuguggguguca

SEQ ID NO: 740936 - RNA, 19 nt, Artificial Sequence
  Description of Artificial Sequence: Synthetic oligonucleotide
ggcaagggaagacuaggca

SEQ ID NO: 740937 - RNA, 19 nt, Artificial Sequence
  Description of Artificial Sequence: Synthetic oligonucleotide
uaggguccaccgcuuucug

SEQ ID NO: 740938 - RNA, 19 nt, Artificial Sequence
  Description of Artificial Sequence: Synthetic oligonucleotide
cucuuugcccaaaauugua

SEQ ID NO: 740939 - RNA, 19 nt, Artificial Sequence
  Description of Artificial Sequence: Synthetic oligonucleotide
acugacacacagagcggag

SEQ ID NO: 740940 - RNA, 19 nt, Artificial Sequence
  Description of Artificial Sequence: Synthetic oligonucleotide
cagacagugcauugaugca

SEQ ID NO: 740941 - RNA, 19 nt, Artificial Sequence
  Description of Artificial Sequence: Synthetic oligonucleotide
uggugauucgagcgagcua

SEQ ID NO: 740942 - RNA, 19 nt, Artificial Sequence
  Description of Artificial Sequence: Synthetic oligonucleotide
cagcggcauauacucaaug

SEQ ID NO: 740943 - RNA, 19 nt, Artificial Sequence
  Description of Artificial Sequence: Synthetic oligonucleotide
auauagcgaacccgccaaa

SEQ ID NO: 740944 - RNA, 19 nt, Artificial Sequence
  Description of Artificial Sequence: Synthetic oligonucleotide
cacaaagcgucuuccuuaa

SEQ ID NO: 740945 - RNA, 19 nt, Artificial Sequence
  Description of Artificial Sequence: Synthetic oligonucleotide
uccugucguaagcucccgu

SEQ ID NO: 740946 - RNA, 19 nt, Artificial Sequence
  Description of Artificial Sequence: Synthetic oligonucleotide
ucguaagcucccguuugcu

SEQ ID NO: 740947 - RNA, 19 nt, Artificial Sequence
  Description of Artificial Sequence: Synthetic oligonucleotide
gaugguauucugggcccac

SEQ ID NO: 740948 - RNA, 19 nt, Artificial Sequence
  Description of Artificial Sequence: Synthetic oligonucleotide
gacauccagguguuacaaa

SEQ ID NO: 740949 - RNA, 19 nt, Artificial Sequence
  Description of Artificial Sequence: Synthetic oligonucleotide
uaucuagaauugguccaau

SEQ ID NO: 740950 - RNA, 19 nt, Artificial Sequence
  Description of Artificial Sequence: Synthetic oligonucleotide
cuugccgaaguguaggcau

SEQ ID NO: 740951 - RNA, 19 nt, Artificial Sequence
  Description of Artificial Sequence: Synthetic oligonucleotide
gaagucuacggagagccau

SEQ ID NO: 740952 - RNA, 19 nt, Artificial Sequence
  Description of Artificial Sequence: Synthetic oligonucleotide
agcucaccugauuguuucu

SEQ ID NO: 740953 - RNA, 19 nt, Artificial Sequence
  Description of Artificial Sequence: Synthetic oligonucleotide
aagcacaagaagagagcua

SEQ ID NO: 740954 - RNA, 19 nt, Artificial Sequence
  Description of Artificial Sequence: Synthetic oligonucleotide
ugcaaguaauuagggucau

SEQ ID NO: 740955 - RNA, 19 nt, Artificial Sequence
  Description of Artificial Sequence: Synthetic oligonucleotide
ggcuucagacagugcauug

SEQ ID NO: 740956 - RNA, 19 nt, Artificial Sequence
  Description of Artificial Sequence: Synthetic oligonucleotide
guaggagggacugucauuu

SEQ ID NO: 740957 - RNA, 19 nt, Artificial Sequence
  Description of Artificial Sequence: Synthetic oligonucleotide
uugccgaaguguaggcauu

SEQ ID NO: 740958 - RNA, 19 nt, Artificial Sequence
  Description of Artificial Sequence: Synthetic oligonucleotide
acuaagcacaaagcgucuu

SEQ ID NO: 740959 - RNA, 19 nt, Artificial Sequence
  Description of Artificial Sequence: Synthetic oligonucleotide
caaugauagccaggcggac

SEQ ID NO: 740960 - RNA, 19 nt, Artificial Sequence
  Description of Artificial Sequence: Synthetic oligonucleotide
aucgaugauuugauugaaa

SEQ ID NO: 740961 - RNA, 19 nt, Artificial Sequence
  Description of Artificial Sequence: Synthetic oligonucleotide
acacgaugggcaacauuug

SEQ ID NO: 740962 - RNA, 19 nt, Artificial Sequence
  Description of Artificial Sequence: Synthetic oligonucleotide
gaagccgggagcacccauc

SEQ ID NO: 740963 - RNA, 19 nt, Artificial Sequence
  Description of Artificial Sequence: Synthetic oligonucleotide
ggaagacuaggcaugggaa

SEQ ID NO: 740964 - RNA, 19 nt, Artificial Sequence
  Description of Artificial Sequence: Synthetic oligonucleotide
caucacuagcacucuaggu

SEQ ID NO: 740965 - RNA, 19 nt, Artificial Sequence
  Description of Artificial Sequence: Synthetic oligonucleotide
ggaaacuggugagagcaga

SEQ ID NO: 740966 - RNA, 19 nt, Artificial Sequence
  Description of Artificial Sequence: Synthetic oligonucleotide
gaacccgccaaagauuuau

SEQ ID NO: 740967 - RNA, 19 nt, Artificial Sequence
  Description of Artificial Sequence: Synthetic oligonucleotide
gaacacgaaccaucaugcu

SEQ ID NO: 740968 - RNA, 19 nt, Artificial Sequence
  Description of Artificial Sequence: Synthetic oligonucleotide
acagugcauugaugcagaa

SEQ ID NO: 740969 - RNA, 19 nt, Artificial Sequence
  Description of Artificial Sequence: Synthetic oligonucleotide
ggucccaacuggugcuggg

SEQ ID NO: 740970 - RNA, 19 nt, Artificial Sequence
  Description of Artificial Sequence: Synthetic oligonucleotide
gaguggucauucugugcaa

SEQ ID NO: 740971 - RNA, 19 nt, Artificial Sequence
  Description of Artificial Sequence: Synthetic oligonucleotide
cucucacuccuuucaagua

SEQ ID NO: 740972 - RNA, 19 nt, Artificial Sequence
  Description of Artificial Sequence: Synthetic oligonucleotide
ccuccucaugcuuaagauc

SEQ ID NO: 740973 - RNA, 19 nt, Artificial Sequence
  Description of Artificial Sequence: Synthetic oligonucleotide
auccugucguaagcucccg

SEQ ID NO: 740974 - RNA, 19 nt, Artificial Sequence
  Description of Artificial Sequence: Synthetic oligonucleotide
gcggaggugaggacagucg

SEQ ID NO: 740975 - RNA, 19 nt, Artificial Sequence
  Description of Artificial Sequence: Synthetic oligonucleotide
agcuagcaucuuugaggcu

SEQ ID NO: 740976 - RNA, 19 nt, Artificial Sequence
  Description of Artificial Sequence: Synthetic oligonucleotide
acucgguaccaaacuuuug

SEQ ID NO: 740977 - RNA, 19 nt, Artificial Sequence
  Description of Artificial Sequence: Synthetic oligonucleotide
agaggcugucagaagguua

SEQ ID NO: 740978 - RNA, 19 nt, Artificial Sequence
  Description of Artificial Sequence: Synthetic oligonucleotide
agccuguuaggcacugaca

SEQ ID NO: 740979 - RNA, 19 nt, Artificial Sequence
  Description of Artificial Sequence: Synthetic oligonucleotide
agcgaacccgccaaagauu

SEQ ID NO: 740980 - RNA, 19 nt, Artificial Sequence
  Description of Artificial Sequence: Synthetic oligonucleotide
caugcuuaagaucgaugau

SEQ ID NO: 740981 - RNA, 19 nt, Artificial Sequence
  Description of Artificial Sequence: Synthetic oligonucleotide
ugccgaaguguaggcauua

SEQ ID NO: 740982 - RNA, 19 nt, Artificial Sequence
  Description of Artificial Sequence: Synthetic oligonucleotide
cagcagaugaaugcacuaa

SEQ ID NO: 740983 - RNA, 19 nt, Artificial Sequence
  Description of Artificial Sequence: Synthetic oligonucleotide
ggcaggacaguuaggcgac

SEQ ID NO: 740984 - RNA, 19 nt, Artificial Sequence
  Description of Artificial Sequence: Synthetic oligonucleotide
ggggccgcucauuucagga

SEQ ID NO: 740985 - RNA, 19 nt, Artificial Sequence
  Description of Artificial Sequence: Synthetic oligonucleotide
gagagcugacgaauuccaa

SEQ ID NO: 740986 - RNA, 19 nt, Artificial Sequence
  Description of Artificial Sequence: Synthetic oligonucleotide
gugucagcaggaauagaua

SEQ ID NO: 740987 - RNA, 19 nt, Artificial Sequence
  Description of Artificial Sequence: Synthetic oligonucleotide
agcuauggcaggacaguua

SEQ ID NO: 740988 - RNA, 19 nt, Artificial Sequence
  Description of Artificial Sequence: Synthetic oligonucleotide
ccauauagcgaacccgcca

SEQ ID NO: 740989 - RNA, 19 nt, Artificial Sequence
  Description of Artificial Sequence: Synthetic oligonucleotide
gcucaccugauuguuucug

SEQ ID NO: 740990 - RNA, 19 nt, Artificial Sequence
  Description of Artificial Sequence: Synthetic oligonucleotide
caccgcuacagauuggcau

SEQ ID NO: 740991 - RNA, 19 nt, Artificial Sequence
  Description of Artificial Sequence: Synthetic oligonucleotide
cagcaccgcuacagauugg

SEQ ID NO: 740992 - RNA, 19 nt, Artificial Sequence
  Description of Artificial Sequence: Synthetic oligonucleotide
ccaacuggugcugggcugc

SEQ ID NO: 740993 - RNA, 19 nt, Artificial Sequence
  Description of Artificial Sequence: Synthetic oligonucleotide
gacuaggcaugggaagucu

SEQ ID NO: 740994 - RNA, 19 nt, Artificial Sequence
  Description of Artificial Sequence: Synthetic oligonucleotide
uaggagggacugucauuuu

SEQ ID NO: 740995 - RNA, 19 nt, Artificial Sequence
  Description of Artificial Sequence: Synthetic oligonucleotide
gucgccuggugaagaacac

SEQ ID NO: 740996 - RNA, 19 nt, Artificial Sequence
  Description of Artificial Sequence: Synthetic oligonucleotide
ccugugcgaaauacuugac

SEQ ID NO: 740997 - RNA, 19 nt, Artificial Sequence
  Description of Artificial Sequence: Synthetic oligonucleotide
gugauucgagcgagcuagc

SEQ ID NO: 740998 - RNA, 19 nt, Artificial Sequence
  Description of Artificial Sequence: Synthetic oligonucleotide
caacauuugcuuagugguu

SEQ ID NO: 740999 - RNA, 19 nt, Artificial Sequence
  Description of Artificial Sequence: Synthetic oligonucleotide
acuaggcaugggaagucua

SEQ ID NO: 741000 - RNA, 19 nt, Artificial Sequence
  Description of Artificial Sequence: Synthetic oligonucleotide
ggacaguuaggcgacagau

SEQ ID NO: 741001 - RNA, 19 nt, Artificial Sequence
  Description of Artificial Sequence: Synthetic oligonucleotide
ugauagccaggcggacccu

SEQ ID NO: 741002 - RNA, 19 nt, Artificial Sequence
  Description of Artificial Sequence: Synthetic oligonucleotide
cacucgguaccaaacuuuu

SEQ ID NO: 741003 - RNA, 19 nt, Artificial Sequence
  Description of Artificial Sequence: Synthetic oligonucleotide
aucccucauucuauggcua

SEQ ID NO: 741004 - RNA, 19 nt, Artificial Sequence
  Description of Artificial Sequence: Synthetic oligonucleotide
cacgaaccaucaugcugga

SEQ ID NO: 741005 - RNA, 19 nt, Artificial Sequence
  Description of Artificial Sequence: Synthetic oligonucleotide
ggagggacugucauuuugu

SEQ ID NO: 741006 - RNA, 19 nt, Artificial Sequence
  Description of Artificial Sequence: Synthetic oligonucleotide
cuggauccugucguaagcu

SEQ ID NO: 741007 - RNA, 19 nt, Artificial Sequence
  Description of Artificial Sequence: Synthetic oligonucleotide
cguaagcucccguuugcuc

SEQ ID NO: 741008 - RNA, 19 nt, Artificial Sequence
  Description of Artificial Sequence: Synthetic oligonucleotide
cagguguuacaaacucagu

SEQ ID NO: 741009 - RNA, 19 nt, Artificial Sequence
  Description of Artificial Sequence: Synthetic oligonucleotide
gagcuacuacacugaugcu

SEQ ID NO: 741010 - RNA, 19 nt, Artificial Sequence
  Description of Artificial Sequence: Synthetic oligonucleotide
cugacuucacauguugauu

SEQ ID NO: 741011 - RNA, 19 nt, Artificial Sequence
  Description of Artificial Sequence: Synthetic oligonucleotide
cagcagcggcauauacuca

SEQ ID NO: 741012 - RNA, 19 nt, Artificial Sequence
  Description of Artificial Sequence: Synthetic oligonucleotide
gugugauuuuaggguccac

SEQ ID NO: 741013 - RNA, 19 nt, Artificial Sequence
  Description of Artificial Sequence: Synthetic oligonucleotide
cuacuuggucuccugccau

SEQ ID NO: 741014 - RNA, 19 nt, Artificial Sequence
  Description of Artificial Sequence: Synthetic oligonucleotide
gcaccuagaaacaccuaua

SEQ ID NO: 741015 - RNA, 19 nt, Artificial Sequence
  Description of Artificial Sequence: Synthetic oligonucleotide
ccaaacuuuuggaccaacu

SEQ ID NO: 741016 - RNA, 19 nt, Artificial Sequence
  Description of Artificial Sequence: Synthetic oligonucleotide
gagcacccaucaacagaca

SEQ ID NO: 741017 - RNA, 19 nt, Artificial Sequence
  Description of Artificial Sequence: Synthetic oligonucleotide
aggcgacagaugaggggcu

SEQ ID NO: 741018 - RNA, 19 nt, Artificial Sequence
  Description of Artificial Sequence: Synthetic oligonucleotide
gccgcucauuucaggacug

SEQ ID NO: 741019 - RNA, 19 nt, Artificial Sequence
  Description of Artificial Sequence: Synthetic oligonucleotide
ccuuuacuuugugggcagc

SEQ ID NO: 741020 - RNA, 19 nt, Artificial Sequence
  Description of Artificial Sequence: Synthetic oligonucleotide
gucagcucaccugauuguu

SEQ ID NO: 741021 - RNA, 19 nt, Artificial Sequence
  Description of Artificial Sequence: Synthetic oligonucleotide
cugacacuuauagcuuccu

SEQ ID NO: 741022 - RNA, 19 nt, Artificial Sequence
  Description of Artificial Sequence: Synthetic oligonucleotide
cucuagguacgaugguauu

SEQ ID NO: 741023 - RNA, 19 nt, Artificial Sequence
  Description of Artificial Sequence: Synthetic oligonucleotide
ucgagcgagcuagcaucuu

SEQ ID NO: 741024 - RNA, 19 nt, Artificial Sequence
  Description of Artificial Sequence: Synthetic oligonucleotide
cucggaccucagcuucaca

SEQ ID NO: 741025 - RNA, 19 nt, Artificial Sequence
  Description of Artificial Sequence: Synthetic oligonucleotide
gcagcuauggcaggacagu

SEQ ID NO: 741026 - RNA, 19 nt, Artificial Sequence
  Description of Artificial Sequence: Synthetic oligonucleotide
gucuacggagagccauccu

SEQ ID NO: 741027 - RNA, 19 nt, Artificial Sequence
  Description of Artificial Sequence: Synthetic oligonucleotide
cugcaccuagaaacaccua

SEQ ID NO: 741028 - RNA, 19 nt, Artificial Sequence
  Description of Artificial Sequence: Synthetic oligonucleotide
gccgaaguguaggcauuac

SEQ ID NO: 741029 - RNA, 19 nt, Artificial Sequence
  Description of Artificial Sequence: Synthetic oligonucleotide
gcucccguuugcuccucuc

SEQ ID NO: 741030 - RNA, 19 nt, Artificial Sequence
  Description of Artificial Sequence: Synthetic oligonucleotide
caacacgaugggcaacauu

SEQ ID NO: 741031 - RNA, 19 nt, Artificial Sequence
  Description of Artificial Sequence: Synthetic oligonucleotide
cagugcauugaugcagaau

SEQ ID NO: 741032 - RNA, 19 nt, Artificial Sequence
  Description of Artificial Sequence: Synthetic oligonucleotide
gcgaacccgccaaagauuu

SEQ ID NO: 741033 - RNA, 19 nt, Artificial Sequence
  Description of Artificial Sequence: Synthetic oligonucleotide
ccugauuguuucugacacu

SEQ ID NO: 741034 - RNA, 19 nt, Artificial Sequence
  Description of Artificial Sequence: Synthetic oligonucleotide
gcucggaccucagcuucac

SEQ ID NO: 741035 - RNA, 19 nt, Artificial Sequence
  Description of Artificial Sequence: Synthetic oligonucleotide
ccgcucauuucaggacugc

SEQ ID NO: 741036 - RNA, 19 nt, Artificial Sequence
  Description of Artificial Sequence: Synthetic oligonucleotide
ccgcuuucuggagcucuag

SEQ ID NO: 741037 - RNA, 19 nt, Artificial Sequence
  Description of Artificial Sequence: Synthetic oligonucleotide
ggcuacggagaggcuguca

SEQ ID NO: 741038 - RNA, 19 nt, Artificial Sequence
  Description of Artificial Sequence: Synthetic oligonucleotide
cccgccaaagauuuaucuu

SEQ ID NO: 741039 - RNA, 19 nt, Artificial Sequence
  Description of Artificial Sequence: Synthetic oligonucleotide
gcacucuagguacgauggu

SEQ ID NO: 741040 - RNA, 19 nt, Artificial Sequence
  Description of Artificial Sequence: Synthetic oligonucleotide
gcaccgcuacagauuggca

SEQ ID NO: 741041 - RNA, 19 nt, Artificial Sequence
  Description of Artificial Sequence: Synthetic oligonucleotide
caucaacagacagccuguu

SEQ ID NO: 741042 - RNA, 19 nt, Artificial Sequence
  Description of Artificial Sequence: Synthetic oligonucleotide
cagcuauggcaggacaguu

SEQ ID NO: 741043 - RNA, 19 nt, Artificial Sequence
  Description of Artificial Sequence: Synthetic oligonucleotide
ggcgacagaugaggggcua

SEQ ID NO: 741044 - RNA, 19 nt, Artificial Sequence
  Description of Artificial Sequence: Synthetic oligonucleotide
cccacucgguaccaaacuu

SEQ ID NO: 741045 - RNA, 19 nt, Artificial Sequence
  Description of Artificial Sequence: Synthetic oligonucleotide
ccuuuauauagggcaggau

SEQ ID NO: 741046 - RNA, 19 nt, Artificial Sequence
  Description of Artificial Sequence: Synthetic oligonucleotide
ccgcuacagauuggcauaa

SEQ ID NO: 741047 - RNA, 19 nt, Artificial Sequence
  Description of Artificial Sequence: Synthetic oligonucleotide
gcaaguaauuagggucauu

SEQ ID NO: 741048 - RNA, 19 nt, Artificial Sequence
  Description of Artificial Sequence: Synthetic oligonucleotide
gcagcggcauauacucaau

SEQ ID NO: 741049 - RNA, 19 nt, Artificial Sequence
  Description of Artificial Sequence: Synthetic oligonucleotide
gcccaaaauuguagauaau

SEQ ID NO: 741050 - RNA, 19 nt, Artificial Sequence
  Description of Artificial Sequence: Synthetic oligonucleotide
cggacccuccacuuggcau

SEQ ID NO: 741051 - RNA, 19 nt, Artificial Sequence
  Description of Artificial Sequence: Synthetic oligonucleotide
ccaggcggacccuccacuu

SEQ ID NO: 741052 - RNA, 19 nt, Artificial Sequence
  Description of Artificial Sequence: Synthetic oligonucleotide
auuaguacauaccaaagag

SEQ ID NO: 741053 - RNA, 19 nt, Artificial Sequence
  Description of Artificial Sequence: Synthetic oligonucleotide
aaaguaaucugacucauca

SEQ ID NO: 741054 - RNA, 19 nt, Artificial Sequence
  Description of Artificial Sequence: Synthetic oligonucleotide
aauucgagauucuugauga

SEQ ID NO: 741055 - RNA, 19 nt, Artificial Sequence
  Description of Artificial Sequence: Synthetic oligonucleotide
uuuuguuugagucacgcug

SEQ ID NO: 741056 - RNA, 19 nt, Artificial Sequence
  Description of Artificial Sequence: Synthetic oligonucleotide
uuuaccagaacucccaaag

SEQ ID NO: 741057 - RNA, 19 nt, Artificial Sequence
  Description of Artificial Sequence: Synthetic oligonucleotide
aucaauuagguccacacag

SEQ ID NO: 741058 - RNA, 19 nt, Artificial Sequence
  Description of Artificial Sequence: Synthetic oligonucleotide
aguaaucugacucaucauc

SEQ ID NO: 741059 - RNA, 19 nt, Artificial Sequence
  Description of Artificial Sequence: Synthetic oligonucleotide
uuauugaugagcuugugcu

SEQ ID NO: 741060 - RNA, 19 nt, Artificial Sequence
  Description of Artificial Sequence: Synthetic oligonucleotide
aucuaaagguguuuugacc

SEQ ID NO: 741061 - RNA, 19 nt, Artificial Sequence
  Description of Artificial Sequence: Synthetic oligonucleotide
guuagaaucacuagcaaag

SEQ ID NO: 741062 - RNA, 19 nt, Artificial Sequence
  Description of Artificial Sequence: Synthetic oligonucleotide
uauaagaucuucuaugaau

SEQ ID NO: 741063 - RNA, 19 nt, Artificial Sequence
  Description of Artificial Sequence: Synthetic oligonucleotide
caauugacaaaacauacug

SEQ ID NO: 741064 - RNA, 19 nt, Artificial Sequence
  Description of Artificial Sequence: Synthetic oligonucleotide
aguuguugcuuucuugugc

SEQ ID NO: 741065 - RNA, 19 nt, Artificial Sequence
  Description of Artificial Sequence: Synthetic oligonucleotide
acuacauaaagaauccacc

SEQ ID NO: 741066 - RNA, 19 nt, Artificial Sequence
  Description of Artificial Sequence: Synthetic oligonucleotide
uguauaaauugacaaauuu

SEQ ID NO: 741067 - RNA, 19 nt, Artificial Sequence
  Description of Artificial Sequence: Synthetic oligonucleotide
ucggauacuaguucugucg

SEQ ID NO: 741068 - RNA, 19 nt, Artificial Sequence
  Description of Artificial Sequence: Synthetic oligonucleotide
ucauuaguacauaccaaag

SEQ ID NO: 741069 - RNA, 19 nt, Artificial Sequence
  Description of Artificial Sequence: Synthetic oligonucleotide
acuuguguccuucggauac

SEQ ID NO: 741070 - RNA, 19 nt, Artificial Sequence
  Description of Artificial Sequence: Synthetic oligonucleotide
acuucacuaugcuauauag

SEQ ID NO: 741071 - RNA, 19 nt, Artificial Sequence
  Description of Artificial Sequence: Synthetic oligonucleotide
auuagguccacacagccca

SEQ ID NO: 741072 - RNA, 19 nt, Artificial Sequence
  Description of Artificial Sequence: Synthetic oligonucleotide
agagucgugaggcaugucg

SEQ ID NO: 741073 - RNA, 19 nt, Artificial Sequence
  Description of Artificial Sequence: Synthetic oligonucleotide
aaaucuaaagguguuuuga

SEQ ID NO: 741074 - RNA, 19 nt, Artificial Sequence
  Description of Artificial Sequence: Synthetic oligonucleotide
aauuuaguacacaagacuu

SEQ ID NO: 741075 - RNA, 19 nt, Artificial Sequence
  Description of Artificial Sequence: Synthetic oligonucleotide
uaaaccaaguucuagucuc

SEQ ID NO: 741076 - RNA, 19 nt, Artificial Sequence
  Description of Artificial Sequence: Synthetic oligonucleotide
aagccuuuagcuuuauacu

SEQ ID NO: 741077 - RNA, 19 nt, Artificial Sequence
  Description of Artificial Sequence: Synthetic oligonucleotide
ucaauugacaaaacauacu

SEQ ID NO: 741078 - RNA, 19 nt, Artificial Sequence
  Description of Artificial Sequence: Synthetic oligonucleotide
uaccagaacucccaaaggc

SEQ ID NO: 741079 - RNA, 19 nt, Artificial Sequence
  Description of Artificial Sequence: Synthetic oligonucleotide
ucucuuguguauaaauuga

SEQ ID NO: 741080 - RNA, 19 nt, Artificial Sequence
  Description of Artificial Sequence: Synthetic oligonucleotide
uguauugucucaucuaguc

SEQ ID NO: 741081 - RNA, 19 nt, Artificial Sequence
  Description of Artificial Sequence: Synthetic oligonucleotide
uacagguugggauuuacca

SEQ ID NO: 741082 - RNA, 19 nt, Artificial Sequence
  Description of Artificial Sequence: Synthetic oligonucleotide
aauaauguauucaaagauu

SEQ ID NO: 741083 - RNA, 19 nt, Artificial Sequence
  Description of Artificial Sequence: Synthetic oligonucleotide
uuuaguacacaagacuuca

SEQ ID NO: 741084 - RNA, 19 nt, Artificial Sequence
  Description of Artificial Sequence: Synthetic oligonucleotide
ucggaguucucucagcucc

SEQ ID NO: 741085 - RNA, 19 nt, Artificial Sequence
  Description of Artificial Sequence: Synthetic oligonucleotide
augcuugauagccuucucc

SEQ ID NO: 741086 - RNA, 19 nt, Artificial Sequence
  Description of Artificial Sequence: Synthetic oligonucleotide
aauuagguccacacagccc

SEQ ID NO: 741087 - RNA, 19 nt, Artificial Sequence
  Description of Artificial Sequence: Synthetic oligonucleotide
uguaugauuuccucgcuga

SEQ ID NO: 741088 - RNA, 19 nt, Artificial Sequence
  Description of Artificial Sequence: Synthetic oligonucleotide
aucuagucugcugugauac

SEQ ID NO: 741089 - RNA, 19 nt, Artificial Sequence
  Description of Artificial Sequence: Synthetic oligonucleotide
uuggccaaaucuaaaggug

SEQ ID NO: 741090 - RNA, 19 nt, Artificial Sequence
  Description of Artificial Sequence: Synthetic oligonucleotide
uacacaagacuucacuaug

SEQ ID NO: 741091 - RNA, 19 nt, Artificial Sequence
  Description of Artificial Sequence: Synthetic oligonucleotide
aaucaauuagguccacaca

SEQ ID NO: 741092 - RNA, 19 nt, Artificial Sequence
  Description of Artificial Sequence: Synthetic oligonucleotide
aauuuuccgccccugacau

SEQ ID NO: 741093 - RNA, 19 nt, Artificial Sequence
  Description of Artificial Sequence: Synthetic oligonucleotide
ugggugacgaccaggaagc

SEQ ID NO: 741094 - RNA, 19 nt, Artificial Sequence
  Description of Artificial Sequence: Synthetic oligonucleotide
caaucaauuagguccacac

SEQ ID NO: 741095 - RNA, 19 nt, Artificial Sequence
  Description of Artificial Sequence: Synthetic oligonucleotide
acaagcaaucaauuagguc

SEQ ID NO: 741096 - RNA, 19 nt, Artificial Sequence
  Description of Artificial Sequence: Synthetic oligonucleotide
auagucauuuggaaauucc

SEQ ID NO: 741097 - RNA, 19 nt, Artificial Sequence
  Description of Artificial Sequence: Synthetic oligonucleotide
ugugauacucugccagugg

SEQ ID NO: 741098 - RNA, 19 nt, Artificial Sequence
  Description of Artificial Sequence: Synthetic oligonucleotide
ugagguguauaccaggauc

SEQ ID NO: 741099 - RNA, 19 nt, Artificial Sequence
  Description of Artificial Sequence: Synthetic oligonucleotide
uguaaaccaaguucuaguc

SEQ ID NO: 741100 - RNA, 19 nt, Artificial Sequence
  Description of Artificial Sequence: Synthetic oligonucleotide
guacauaccaaagagccgc

SEQ ID NO: 741101 - RNA, 19 nt, Artificial Sequence
  Description of Artificial Sequence: Synthetic oligonucleotide
acgaagaagacaauaagug

SEQ ID NO: 741102 - RNA, 19 nt, Artificial Sequence
  Description of Artificial Sequence: Synthetic oligonucleotide
ucaauuagguccacacagc

SEQ ID NO: 741103 - RNA, 19 nt, Artificial Sequence
  Description of Artificial Sequence: Synthetic oligonucleotide
gucacuauauucucguagc

SEQ ID NO: 741104 - RNA, 19 nt, Artificial Sequence
  Description of Artificial Sequence: Synthetic oligonucleotide
acaauaaguggccuggagu

SEQ ID NO: 741105 - RNA, 19 nt, Artificial Sequence
  Description of Artificial Sequence: Synthetic oligonucleotide
agugaagucuucuucugug

SEQ ID NO: 741106 - RNA, 19 nt, Artificial Sequence
  Description of Artificial Sequence: Synthetic oligonucleotide
ucuucagaggaucuaucca

SEQ ID NO: 741107 - RNA, 19 nt, Artificial Sequence
  Description of Artificial Sequence: Synthetic oligonucleotide
augggugacgaccaggaag

SEQ ID NO: 741108 - RNA, 19 nt, Artificial Sequence
  Description of Artificial Sequence: Synthetic oligonucleotide
uguacuagccgcucccggg

SEQ ID NO: 741109 - RNA, 19 nt, Artificial Sequence
  Description of Artificial Sequence: Synthetic oligonucleotide
agccuuuagcuuuauacug

SEQ ID NO: 741110 - RNA, 19 nt, Artificial Sequence
  Description of Artificial Sequence: Synthetic oligonucleotide
ucugggacaagcaaucaau

SEQ ID NO: 741111 - RNA, 19 nt, Artificial Sequence
  Description of Artificial Sequence: Synthetic oligonucleotide
agucauuuggaaauuccac

SEQ ID NO: 741112 - RNA, 19 nt, Artificial Sequence
  Description of Artificial Sequence: Synthetic oligonucleotide
uuguguauaaauugacaaa

SEQ ID NO: 741113 - RNA, 19 nt, Artificial Sequence
  Description of Artificial Sequence: Synthetic oligonucleotide
gggacaagcaaucaauuag

SEQ ID NO: 741114 - RNA, 19 nt, Artificial Sequence
  Description of Artificial Sequence: Synthetic oligonucleotide
aaaccaaguucuagucucc

SEQ ID NO: 741115 - RNA, 19 nt, Artificial Sequence
  Description of Artificial Sequence: Synthetic oligonucleotide
caauuagguccacacagcc

SEQ ID NO: 741116 - RNA, 19 nt, Artificial Sequence
  Description of Artificial Sequence: Synthetic oligonucleotide
ugguuaagaguuuuaaauu

SEQ ID NO: 741117 - RNA, 19 nt, Artificial Sequence
  Description of Artificial Sequence: Synthetic oligonucleotide
uugucuacccacuggggag

SEQ ID NO: 741118 - RNA, 19 nt, Artificial Sequence
  Description of Artificial Sequence: Synthetic oligonucleotide
gaccucuacagucagguca

SEQ ID NO: 741119 - RNA, 19 nt, Artificial Sequence
  Description of Artificial Sequence: Synthetic oligonucleotide
aagguguuuugaccucuac

SEQ ID NO: 741120 - RNA, 19 nt, Artificial Sequence
  Description of Artificial Sequence: Synthetic oligonucleotide
uugaucauucuuuugccau

SEQ ID NO: 741121 - RNA, 19 nt, Artificial Sequence
  Description of Artificial Sequence: Synthetic oligonucleotide
cagacuuaauucgagauuc

SEQ ID NO: 741122 - RNA, 19 nt, Artificial Sequence
  Description of Artificial Sequence: Synthetic oligonucleotide
aauccgaccacagaccaga

SEQ ID NO: 741123 - RNA, 19 nt, Artificial Sequence
  Description of Artificial Sequence: Synthetic oligonucleotide
uggcccacuacauaaagaa

SEQ ID NO: 741124 - RNA, 19 nt, Artificial Sequence
  Description of Artificial Sequence: Synthetic oligonucleotide
guguugucuacccacuggg

SEQ ID NO: 741125 - RNA, 19 nt, Artificial Sequence
  Description of Artificial Sequence: Synthetic oligonucleotide
aauaaguggccuggaguuc

SEQ ID NO: 741126 - RNA, 19 nt, Artificial Sequence
  Description of Artificial Sequence: Synthetic oligonucleotide
uguugucuacccacugggg

SEQ ID NO: 741127 - RNA, 19 nt, Artificial Sequence
  Description of Artificial Sequence: Synthetic oligonucleotide
uaaucccucugacaagcag

SEQ ID NO: 741128 - RNA, 19 nt, Artificial Sequence
  Description of Artificial Sequence: Synthetic oligonucleotide
cuugcucgcagacaauccg

SEQ ID NO: 741129 - RNA, 19 nt, Artificial Sequence
  Description of Artificial Sequence: Synthetic oligonucleotide
uccuacuccgcuuuagcug

SEQ ID NO: 741130 - RNA, 19 nt, Artificial Sequence
  Description of Artificial Sequence: Synthetic oligonucleotide
uuuuccgccccugacauga

SEQ ID NO: 741131 - RNA, 19 nt, Artificial Sequence
  Description of Artificial Sequence: Synthetic oligonucleotide
uuggaaauuccacaucuuu

SEQ ID NO: 741132 - RNA, 19 nt, Artificial Sequence
  Description of Artificial Sequence: Synthetic oligonucleotide
gauacuaguucugucgaac

SEQ ID NO: 741133 - RNA, 19 nt, Artificial Sequence
  Description of Artificial Sequence: Synthetic oligonucleotide
aggaccagcagauagcaau

SEQ ID NO: 741134 - RNA, 19 nt, Artificial Sequence
  Description of Artificial Sequence: Synthetic oligonucleotide
acacaagacuucacuaugc

SEQ ID NO: 741135 - RNA, 19 nt, Artificial Sequence
  Description of Artificial Sequence: Synthetic oligonucleotide
cucaacuuuggacagccac

SEQ ID NO: 741136 - RNA, 19 nt, Artificial Sequence
  Description of Artificial Sequence: Synthetic oligonucleotide
gucaugucaagccuuuagc

SEQ ID NO: 741137 - RNA, 19 nt, Artificial Sequence
  Description of Artificial Sequence: Synthetic oligonucleotide
uucagcacucucaauugac

SEQ ID NO: 741138 - RNA, 19 nt, Artificial Sequence
  Description of Artificial Sequence: Synthetic oligonucleotide
caaguucuagucuccgucc

SEQ ID NO: 741139 - RNA, 19 nt, Artificial Sequence
  Description of Artificial Sequence: Synthetic oligonucleotide
ucuuuaugcuugauagccu

SEQ ID NO: 741140 - RNA, 19 nt, Artificial Sequence
  Description of Artificial Sequence: Synthetic oligonucleotide
aaccagacuuaauucgaga

SEQ ID NO: 741141 - RNA, 19 nt, Artificial Sequence
  Description of Artificial Sequence: Synthetic oligonucleotide
cugguuagaaucacuagca

SEQ ID NO: 741142 - RNA, 19 nt, Artificial Sequence
  Description of Artificial Sequence: Synthetic oligonucleotide
uugaccucuacagucaggu

SEQ ID NO: 741143 - RNA, 19 nt, Artificial Sequence
  Description of Artificial Sequence: Synthetic oligonucleotide
uuugaccucuacagucagg

SEQ ID NO: 741144 - RNA, 19 nt, Artificial Sequence
  Description of Artificial Sequence: Synthetic oligonucleotide
accagacaguuauugauga

SEQ ID NO: 741145 - RNA, 19 nt, Artificial Sequence
  Description of Artificial Sequence: Synthetic oligonucleotide
gaauuuuccgccccugaca

SEQ ID NO: 741146 - RNA, 19 nt, Artificial Sequence
  Description of Artificial Sequence: Synthetic oligonucleotide
aguucugucgaacucuaau

SEQ ID NO: 741147 - RNA, 19 nt, Artificial Sequence
  Description of Artificial Sequence: Synthetic oligonucleotide
cucuuguguauaaauugac

SEQ ID NO: 741148 - RNA, 19 nt, Artificial Sequence
  Description of Artificial Sequence: Synthetic oligonucleotide
gauggauagucauuuggaa

SEQ ID NO: 741149 - RNA, 19 nt, Artificial Sequence
  Description of Artificial Sequence: Synthetic oligonucleotide
cauuaguacauaccaaaga

SEQ ID NO: 741150 - RNA, 19 nt, Artificial Sequence
  Description of Artificial Sequence: Synthetic oligonucleotide
uguauaccaggaucugccc

SEQ ID NO: 741151 - RNA, 19 nt, Artificial Sequence
  Description of Artificial Sequence: Synthetic oligonucleotide
guugggauuuaccagaacu

SEQ ID NO: 741152 - RNA, 19 nt, Artificial Sequence
  Description of Artificial Sequence: Synthetic oligonucleotide
uaugauuuccucgcugaca

SEQ ID NO: 741153 - RNA, 19 nt, Artificial Sequence
  Description of Artificial Sequence: Synthetic oligonucleotide
ucacuauauucucguagcu

SEQ ID NO: 741154 - RNA, 19 nt, Artificial Sequence
  Description of Artificial Sequence: Synthetic oligonucleotide
auaagaucuucuaugaauu

SEQ ID NO: 741155 - RNA, 19 nt, Artificial Sequence
  Description of Artificial Sequence: Synthetic oligonucleotide
aaguucuagucuccguccu

SEQ ID NO: 741156 - RNA, 19 nt, Artificial Sequence
  Description of Artificial Sequence: Synthetic oligonucleotide
accagacuuaauucgagau

SEQ ID NO: 741157 - RNA, 19 nt, Artificial Sequence
  Description of Artificial Sequence: Synthetic oligonucleotide
guguauaccaggaucugcc

SEQ ID NO: 741158 - RNA, 19 nt, Artificial Sequence
  Description of Artificial Sequence: Synthetic oligonucleotide
uuugagucacgcuguaaaa

SEQ ID NO: 741159 - RNA, 19 nt, Artificial Sequence
  Description of Artificial Sequence: Synthetic oligonucleotide
uggucuacugaucucuguc

SEQ ID NO: 741160 - RNA, 19 nt, Artificial Sequence
  Description of Artificial Sequence: Synthetic oligonucleotide
auacuaguucugucgaacu

SEQ ID NO: 741161 - RNA, 19 nt, Artificial Sequence
  Description of Artificial Sequence: Synthetic oligonucleotide
aaguaaucugacucaucau

SEQ ID NO: 741162 - RNA, 19 nt, Artificial Sequence
  Description of Artificial Sequence: Synthetic oligonucleotide
uccuucggauacuaguucu

SEQ ID NO: 741163 - RNA, 19 nt, Artificial Sequence
  Description of Artificial Sequence: Synthetic oligonucleotide
guuugagucacgcuguaaa

SEQ ID NO: 741164 - RNA, 19 nt, Artificial Sequence
  Description of Artificial Sequence: Synthetic oligonucleotide
acuaguucugucgaacucu

SEQ ID NO: 741165 - RNA, 19 nt, Artificial Sequence
  Description of Artificial Sequence: Synthetic oligonucleotide
aaucagaaaccaacucuug

SEQ ID NO: 741166 - RNA, 19 nt, Artificial Sequence
  Description of Artificial Sequence: Synthetic oligonucleotide
ugaggcaugucggaguucu

SEQ ID NO: 741167 - RNA, 19 nt, Artificial Sequence
  Description of Artificial Sequence: Synthetic oligonucleotide
gucuccguccugcugagag

SEQ ID NO: 741168 - RNA, 19 nt, Artificial Sequence
  Description of Artificial Sequence: Synthetic oligonucleotide
uacuaguucugucgaacuc

SEQ ID NO: 741169 - RNA, 19 nt, Artificial Sequence
  Description of Artificial Sequence: Synthetic oligonucleotide
caauuuaguacacaagacu

SEQ ID NO: 741170 - RNA, 19 nt, Artificial Sequence
  Description of Artificial Sequence: Synthetic oligonucleotide
agaaaguuuuccgcaacug

SEQ ID NO: 741171 - RNA, 19 nt, Artificial Sequence
  Description of Artificial Sequence: Synthetic oligonucleotide
uuuuccgcaacugcugugu

SEQ ID NO: 741172 - RNA, 19 nt, Artificial Sequence
  Description of Artificial Sequence: Synthetic oligonucleotide
ucaucuagucugcugugau

SEQ ID NO: 741173 - RNA, 19 nt, Artificial Sequence
  Description of Artificial Sequence: Synthetic oligonucleotide
agacaguuauugaugagcu

SEQ ID NO: 741174 - RNA, 19 nt, Artificial Sequence
  Description of Artificial Sequence: Synthetic oligonucleotide
gagucgugaggcaugucgg

SEQ ID NO: 741175 - RNA, 19 nt, Artificial Sequence
  Description of Artificial Sequence: Synthetic oligonucleotide
gaugcauagagaggcacca

SEQ ID NO: 741176 - RNA, 19 nt, Artificial Sequence
  Description of Artificial Sequence: Synthetic oligonucleotide
uucuaugaauuguaccuuu

SEQ ID NO: 741177 - RNA, 19 nt, Artificial Sequence
  Description of Artificial Sequence: Synthetic oligonucleotide
gacaaccugauggauaguc

SEQ ID NO: 741178 - RNA, 19 nt, Artificial Sequence
  Description of Artificial Sequence: Synthetic oligonucleotide
acccuuuuaaucccucuga

SEQ ID NO: 741179 - RNA, 19 nt, Artificial Sequence
  Description of Artificial Sequence: Synthetic oligonucleotide
gagccgcagaauaagcagg

SEQ ID NO: 741180 - RNA, 19 nt, Artificial Sequence
  Description of Artificial Sequence: Synthetic oligonucleotide
ucuagucuccguccugcug

SEQ ID NO: 741181 - RNA, 19 nt, Artificial Sequence
  Description of Artificial Sequence: Synthetic oligonucleotide
cucugacaagcagagacgc

SEQ ID NO: 741182 - RNA, 19 nt, Artificial Sequence
  Description of Artificial Sequence: Synthetic oligonucleotide
uuaauucgagauucuugau

SEQ ID NO: 741183 - RNA, 19 nt, Artificial Sequence
  Description of Artificial Sequence: Synthetic oligonucleotide
gggucagacagcuuuauuc

SEQ ID NO: 741184 - RNA, 19 nt, Artificial Sequence
  Description of Artificial Sequence: Synthetic oligonucleotide
gaucuuccgcccugcaaag

SEQ ID NO: 741185 - RNA, 19 nt, Artificial Sequence
  Description of Artificial Sequence: Synthetic oligonucleotide
uccgcaacugcugugugca

SEQ ID NO: 741186 - RNA, 19 nt, Artificial Sequence
  Description of Artificial Sequence: Synthetic oligonucleotide
guugucuacccacugggga

SEQ ID NO: 741187 - RNA, 19 nt, Artificial Sequence
  Description of Artificial Sequence: Synthetic oligonucleotide
ugguuagaaucacuagcaa

SEQ ID NO: 741188 - RNA, 19 nt, Artificial Sequence
  Description of Artificial Sequence: Synthetic oligonucleotide
cucgcagacaauccgacca

SEQ ID NO: 741189 - RNA, 19 nt, Artificial Sequence
  Description of Artificial Sequence: Synthetic oligonucleotide
gauagucauuuggaaauuc

SEQ ID NO: 741190 - RNA, 19 nt, Artificial Sequence
  Description of Artificial Sequence: Synthetic oligonucleotide
ccuguauugucucaucuag

SEQ ID NO: 741191 - RNA, 19 nt, Artificial Sequence
  Description of Artificial Sequence: Synthetic oligonucleotide
ugauggaucuuggaaucca

SEQ ID NO: 741192 - RNA, 19 nt, Artificial Sequence
  Description of Artificial Sequence: Synthetic oligonucleotide
ugucgaacucuaauaguuu

SEQ ID NO: 741193 - RNA, 19 nt, Artificial Sequence
  Description of Artificial Sequence: Synthetic oligonucleotide
uaaagguguuuugaccucu

SEQ ID NO: 741194 - RNA, 19 nt, Artificial Sequence
  Description of Artificial Sequence: Synthetic oligonucleotide
ccuacuccgcuuuagcugg

SEQ ID NO: 741195 - RNA, 19 nt, Artificial Sequence
  Description of Artificial Sequence: Synthetic oligonucleotide
gaucuucuaugaauuguac

SEQ ID NO: 741196 - RNA, 19 nt, Artificial Sequence
  Description of Artificial Sequence: Synthetic oligonucleotide
uuuggaaauuccacaucuu

SEQ ID NO: 741197 - RNA, 19 nt, Artificial Sequence
  Description of Artificial Sequence: Synthetic oligonucleotide
uugcucgcagacaauccga

SEQ ID NO: 741198 - RNA, 19 nt, Artificial Sequence
  Description of Artificial Sequence: Synthetic oligonucleotide
cuaaagguguuuugaccuc

SEQ ID NO: 741199 - RNA, 19 nt, Artificial Sequence
  Description of Artificial Sequence: Synthetic oligonucleotide
aagacuucacuaugcuaua

SEQ ID NO: 741200 - RNA, 19 nt, Artificial Sequence
  Description of Artificial Sequence: Synthetic oligonucleotide
cuagucuccguccugcuga

SEQ ID NO: 741201 - RNA, 19 nt, Artificial Sequence
  Description of Artificial Sequence: Synthetic oligonucleotide
gugugcaccaguguacuag

SEQ ID NO: 741202 - RNA, 19 nt, Artificial Sequence
  Description of Artificial Sequence: Synthetic oligonucleotide
uccgccccugacaugagcu

SEQ ID NO: 741203 - RNA, 19 nt, Artificial Sequence
  Description of Artificial Sequence: Synthetic oligonucleotide
auaaguggccuggaguucu

SEQ ID NO: 741204 - RNA, 19 nt, Artificial Sequence
  Description of Artificial Sequence: Synthetic oligonucleotide
agaacccucuugcucgcag

SEQ ID NO: 741205 - RNA, 19 nt, Artificial Sequence
  Description of Artificial Sequence: Synthetic oligonucleotide
agaguuucccgcucaacuu

SEQ ID NO: 741206 - RNA, 19 nt, Artificial Sequence
  Description of Artificial Sequence: Synthetic oligonucleotide
uacauaccaaagagccgca

SEQ ID NO: 741207 - RNA, 19 nt, Artificial Sequence
  Description of Artificial Sequence: Synthetic oligonucleotide
ugauacucugccaguggau

SEQ ID NO: 741208 - RNA, 19 nt, Artificial Sequence
  Description of Artificial Sequence: Synthetic oligonucleotide
cuguaugauuuccucgcug

SEQ ID NO: 741209 - RNA, 19 nt, Artificial Sequence
  Description of Artificial Sequence: Synthetic oligonucleotide
agauagcaauuuaguacac

SEQ ID NO: 741210 - RNA, 19 nt, Artificial Sequence
  Description of Artificial Sequence: Synthetic oligonucleotide
caacuuuggacagccacug

SEQ ID NO: 741211 - RNA, 19 nt, Artificial Sequence
  Description of Artificial Sequence: Synthetic oligonucleotide
cuuggccaaaucuaaaggu

SEQ ID NO: 741212 - RNA, 19 nt, Artificial Sequence
  Description of Artificial Sequence: Synthetic oligonucleotide
uucggauacuaguucuguc

SEQ ID NO: 741213 - RNA, 19 nt, Artificial Sequence
  Description of Artificial Sequence: Synthetic oligonucleotide
ggucuacugaucucugucc

SEQ ID NO: 741214 - RNA, 19 nt, Artificial Sequence
  Description of Artificial Sequence: Synthetic oligonucleotide
auuuaccagaacucccaaa

SEQ ID NO: 741215 - RNA, 19 nt, Artificial Sequence
  Description of Artificial Sequence: Synthetic oligonucleotide
agcacucucaauugacaaa

SEQ ID NO: 741216 - RNA, 19 nt, Artificial Sequence
  Description of Artificial Sequence: Synthetic oligonucleotide
cucuauuuccccugguaga

SEQ ID NO: 741217 - RNA, 19 nt, Artificial Sequence
  Description of Artificial Sequence: Synthetic oligonucleotide
gguuagaaucacuagcaaa

SEQ ID NO: 741218 - RNA, 19 nt, Artificial Sequence
  Description of Artificial Sequence: Synthetic oligonucleotide
ugcucgcagacaauccgac

SEQ ID NO: 741219 - RNA, 19 nt, Artificial Sequence
  Description of Artificial Sequence: Synthetic oligonucleotide
uccccucuauuuccccugg

SEQ ID NO: 741220 - RNA, 19 nt, Artificial Sequence
  Description of Artificial Sequence: Synthetic oligonucleotide
uuccccucuauuuccccug

SEQ ID NO: 741221 - RNA, 19 nt, Artificial Sequence
  Description of Artificial Sequence: Synthetic oligonucleotide
cacuauauucucguagcuc

SEQ ID NO: 741222 - RNA, 19 nt, Artificial Sequence
  Description of Artificial Sequence: Synthetic oligonucleotide
aguucuagucuccguccug

SEQ ID NO: 741223 - RNA, 19 nt, Artificial Sequence
  Description of Artificial Sequence: Synthetic oligonucleotide
caguguacuagccgcuccc

SEQ ID NO: 741224 - RNA, 19 nt, Artificial Sequence
  Description of Artificial Sequence: Synthetic oligonucleotide
gaaucuggugucaugucaa

SEQ ID NO: 741225 - RNA, 19 nt, Artificial Sequence
  Description of Artificial Sequence: Synthetic oligonucleotide
gugauacucugccagugga

SEQ ID NO: 741226 - RNA, 19 nt, Artificial Sequence
  Description of Artificial Sequence: Synthetic oligonucleotide
uuagguccacacagcccag

SEQ ID NO: 741227 - RNA, 19 nt, Artificial Sequence
  Description of Artificial Sequence: Synthetic oligonucleotide
gauuuaccagaacucccaa

SEQ ID NO: 741228 - RNA, 19 nt, Artificial Sequence
  Description of Artificial Sequence: Synthetic oligonucleotide
uuuagcaguuucugacuuu

SEQ ID NO: 741229 - RNA, 19 nt, Artificial Sequence
  Description of Artificial Sequence: Synthetic oligonucleotide
uuccgcaacugcugugugc

SEQ ID NO: 741230 - RNA, 19 nt, Artificial Sequence
  Description of Artificial Sequence: Synthetic oligonucleotide
uuuccgcaacugcugugug

SEQ ID NO: 741231 - RNA, 19 nt, Artificial Sequence
  Description of Artificial Sequence: Synthetic oligonucleotide
ucgugaggcaugucggagu

SEQ ID NO: 741232 - RNA, 19 nt, Artificial Sequence
  Description of Artificial Sequence: Synthetic oligonucleotide
gucuacugaucucugucca

SEQ ID NO: 741233 - RNA, 19 nt, Artificial Sequence
  Description of Artificial Sequence: Synthetic oligonucleotide
aguguacuagccgcucccg

SEQ ID NO: 741234 - RNA, 19 nt, Artificial Sequence
  Description of Artificial Sequence: Synthetic oligonucleotide
ucuacugaucucuguccau

SEQ ID NO: 741235 - RNA, 19 nt, Artificial Sequence
  Description of Artificial Sequence: Synthetic oligonucleotide
agaagacaauaaguggccu

SEQ ID NO: 741236 - RNA, 19 nt, Artificial Sequence
  Description of Artificial Sequence: Synthetic oligonucleotide
guacuagccgcucccgggc

SEQ ID NO: 741237 - RNA, 19 nt, Artificial Sequence
  Description of Artificial Sequence: Synthetic oligonucleotide
guaaaccaaguucuagucu

SEQ ID NO: 741238 - RNA, 19 nt, Artificial Sequence
  Description of Artificial Sequence: Synthetic oligonucleotide
ucgcagacaauccgaccac

SEQ ID NO: 741239 - RNA, 19 nt, Artificial Sequence
  Description of Artificial Sequence: Synthetic oligonucleotide
cauaccaaagagccgcaga

SEQ ID NO: 741240 - RNA, 19 nt, Artificial Sequence
  Description of Artificial Sequence: Synthetic oligonucleotide
cacagcccagaagacaacc

SEQ ID NO: 741241 - RNA, 19 nt, Artificial Sequence
  Description of Artificial Sequence: Synthetic oligonucleotide
guguacuagccgcucccgg

SEQ ID NO: 741242 - RNA, 19 nt, Artificial Sequence
  Description of Artificial Sequence: Synthetic oligonucleotide
gcaauuuaguacacaagac

SEQ ID NO: 741243 - RNA, 19 nt, Artificial Sequence
  Description of Artificial Sequence: Synthetic oligonucleotide
ucgcugacauccagggaga

SEQ ID NO: 741244 - RNA, 19 nt, Artificial Sequence
  Description of Artificial Sequence: Synthetic oligonucleotide
guaugauuuccucgcugac

SEQ ID NO: 741245 - RNA, 19 nt, Artificial Sequence
  Description of Artificial Sequence: Synthetic oligonucleotide
uuccuuuaauaggaaacuu

SEQ ID NO: 741246 - RNA, 19 nt, Artificial Sequence
  Description of Artificial Sequence: Synthetic oligonucleotide
gagguguauaccaggaucu

SEQ ID NO: 741247 - RNA, 19 nt, Artificial Sequence
  Description of Artificial Sequence: Synthetic oligonucleotide
gagaaaguuuuccgcaacu

SEQ ID NO: 741248 - RNA, 19 nt, Artificial Sequence
  Description of Artificial Sequence: Synthetic oligonucleotide
gacuucacuaugcuauaua

SEQ ID NO: 741249 - RNA, 19 nt, Artificial Sequence
  Description of Artificial Sequence: Synthetic oligonucleotide
uccgcuuuagcuggucuac

SEQ ID NO: 741250 - RNA, 19 nt, Artificial Sequence
  Description of Artificial Sequence: Synthetic oligonucleotide
cagcccagaagacaaccug

SEQ ID NO: 741251 - RNA, 19 nt, Artificial Sequence
  Description of Artificial Sequence: Synthetic oligonucleotide
aggucuaccuuuccagaau

SEQ ID NO: 741252 - RNA, 19 nt, Artificial Sequence
  Description of Artificial Sequence: Synthetic oligonucleotide
ucacaugggugacgaccag

SEQ ID NO: 741253 - RNA, 19 nt, Artificial Sequence
  Description of Artificial Sequence: Synthetic oligonucleotide
gagauugaaucugguguca

SEQ ID NO: 741254 - RNA, 19 nt, Artificial Sequence
  Description of Artificial Sequence: Synthetic oligonucleotide
ucuagucugcugugauacu

SEQ ID NO: 741255 - RNA, 19 nt, Artificial Sequence
  Description of Artificial Sequence: Synthetic oligonucleotide
uccgaccacagaccagaca

SEQ ID NO: 741256 - RNA, 19 nt, Artificial Sequence
  Description of Artificial Sequence: Synthetic oligonucleotide
aaggcucuucagaggaucu

SEQ ID NO: 741257 - RNA, 19 nt, Artificial Sequence
  Description of Artificial Sequence: Synthetic oligonucleotide
uggugucaugucaagccuu

SEQ ID NO: 741258 - RNA, 19 nt, Artificial Sequence
  Description of Artificial Sequence: Synthetic oligonucleotide
caauaaguggccuggaguu

SEQ ID NO: 741259 - RNA, 19 nt, Artificial Sequence
  Description of Artificial Sequence: Synthetic oligonucleotide
ggaucuuccgcccugcaaa

SEQ ID NO: 741260 - RNA, 19 nt, Artificial Sequence
  Description of Artificial Sequence: Synthetic oligonucleotide
ggaucuauccaaugucauc

SEQ ID NO: 741261 - RNA, 19 nt, Artificial Sequence
  Description of Artificial Sequence: Synthetic oligonucleotide
agucgugaggcaugucgga

SEQ ID NO: 741262 - RNA, 19 nt, Artificial Sequence
  Description of Artificial Sequence: Synthetic oligonucleotide
cugugauacucugccagug

SEQ ID NO: 741263 - RNA, 19 nt, Artificial Sequence
  Description of Artificial Sequence: Synthetic oligonucleotide
guacagguugggauuuacc

SEQ ID NO: 741264 - RNA, 19 nt, Artificial Sequence
  Description of Artificial Sequence: Synthetic oligonucleotide
ucccacgaagaagacaaua

SEQ ID NO: 741265 - RNA, 19 nt, Artificial Sequence
  Description of Artificial Sequence: Synthetic oligonucleotide
cugaucucuguccaucuaa

SEQ ID NO: 741266 - RNA, 19 nt, Artificial Sequence
  Description of Artificial Sequence: Synthetic oligonucleotide
cugagacuucuugagagga

SEQ ID NO: 741267 - RNA, 19 nt, Artificial Sequence
  Description of Artificial Sequence: Synthetic oligonucleotide
cuagcaaaguaaucugacu

SEQ ID NO: 741268 - RNA, 19 nt, Artificial Sequence
  Description of Artificial Sequence: Synthetic oligonucleotide
acaaccugauggauaguca

SEQ ID NO: 741269 - RNA, 19 nt, Artificial Sequence
  Description of Artificial Sequence: Synthetic oligonucleotide
gguguauaccaggaucugc

SEQ ID NO: 741270 - RNA, 19 nt, Artificial Sequence
  Description of Artificial Sequence: Synthetic oligonucleotide
ggauuuaccagaacuccca

SEQ ID NO: 741271 - RNA, 19 nt, Artificial Sequence
  Description of Artificial Sequence: Synthetic oligonucleotide
cugucgaacucuaauaguu

SEQ ID NO: 741272 - RNA, 19 nt, Artificial Sequence
  Description of Artificial Sequence: Synthetic oligonucleotide
cuccguccugcugagagug

SEQ ID NO: 741273 - RNA, 19 nt, Artificial Sequence
  Description of Artificial Sequence: Synthetic oligonucleotide
uccuccuacuccgcuuuag

SEQ ID NO: 741274 - RNA, 19 nt, Artificial Sequence
  Description of Artificial Sequence: Synthetic oligonucleotide
aggcaugucggaguucucu

SEQ ID NO: 741275 - RNA, 19 nt, Artificial Sequence
  Description of Artificial Sequence: Synthetic oligonucleotide
gucgugaggcaugucggag

SEQ ID NO: 741276 - RNA, 19 nt, Artificial Sequence
  Description of Artificial Sequence: Synthetic oligonucleotide
uccacccuuuuaaucccuc

SEQ ID NO: 741277 - RNA, 19 nt, Artificial Sequence
  Description of Artificial Sequence: Synthetic oligonucleotide
acauaccaaagagccgcag

SEQ ID NO: 741278 - RNA, 19 nt, Artificial Sequence
  Description of Artificial Sequence: Synthetic oligonucleotide
acuccgcuuuagcuggucu

SEQ ID NO: 741279 - RNA, 19 nt, Artificial Sequence
  Description of Artificial Sequence: Synthetic oligonucleotide
ccgcagaauaagcaggggc

SEQ ID NO: 741280 - RNA, 19 nt, Artificial Sequence
  Description of Artificial Sequence: Synthetic oligonucleotide
cuauuuccccugguagaag

SEQ ID NO: 741281 - RNA, 19 nt, Artificial Sequence
  Description of Artificial Sequence: Synthetic oligonucleotide
agcaaucaauuagguccac

SEQ ID NO: 741282 - RNA, 19 nt, Artificial Sequence
  Description of Artificial Sequence: Synthetic oligonucleotide
uuccgccccugacaugagc

SEQ ID NO: 741283 - RNA, 19 nt, Artificial Sequence
  Description of Artificial Sequence: Synthetic oligonucleotide
agagagucgugaggcaugu

SEQ ID NO: 741284 - RNA, 19 nt, Artificial Sequence
  Description of Artificial Sequence: Synthetic oligonucleotide
cagcacucucaauugacaa

SEQ ID NO: 741285 - RNA, 19 nt, Artificial Sequence
  Description of Artificial Sequence: Synthetic oligonucleotide
ucuccguccugcugagagu

SEQ ID NO: 741286 - RNA, 19 nt, Artificial Sequence
  Description of Artificial Sequence: Synthetic oligonucleotide
aucaaugacuuguguccuu

SEQ ID NO: 741287 - RNA, 19 nt, Artificial Sequence
  Description of Artificial Sequence: Synthetic oligonucleotide
agauugaaucuggugucau

SEQ ID NO: 741288 - RNA, 19 nt, Artificial Sequence
  Description of Artificial Sequence: Synthetic oligonucleotide
aggaucuuccgcccugcaa

SEQ ID NO: 741289 - RNA, 19 nt, Artificial Sequence
  Description of Artificial Sequence: Synthetic oligonucleotide
ugcugagagugaagucuuc

SEQ ID NO: 741290 - RNA, 19 nt, Artificial Sequence
  Description of Artificial Sequence: Synthetic oligonucleotide
aaccugauggauagucauu

SEQ ID NO: 741291 - RNA, 19 nt, Artificial Sequence
  Description of Artificial Sequence: Synthetic oligonucleotide
auuuuccgccccugacaug

SEQ ID NO: 741292 - RNA, 19 nt, Artificial Sequence
  Description of Artificial Sequence: Synthetic oligonucleotide
uaggaucuuccgcccugca

SEQ ID NO: 741293 - RNA, 19 nt, Artificial Sequence
  Description of Artificial Sequence: Synthetic oligonucleotide
cuaguucugucgaacucua

SEQ ID NO: 741294 - RNA, 19 nt, Artificial Sequence
  Description of Artificial Sequence: Synthetic oligonucleotide
uuuccgccccugacaugag

SEQ ID NO: 741295 - RNA, 19 nt, Artificial Sequence
  Description of Artificial Sequence: Synthetic oligonucleotide
gucgaacucuaauaguuuu

SEQ ID NO: 741296 - RNA, 19 nt, Artificial Sequence
  Description of Artificial Sequence: Synthetic oligonucleotide
ugggucagacagcuuuauu

SEQ ID NO: 741297 - RNA, 19 nt, Artificial Sequence
  Description of Artificial Sequence: Synthetic oligonucleotide
ugaccucuacagucagguc

SEQ ID NO: 741298 - RNA, 19 nt, Artificial Sequence
  Description of Artificial Sequence: Synthetic oligonucleotide
gagucacgcuguaaaaugu

SEQ ID NO: 741299 - RNA, 19 nt, Artificial Sequence
  Description of Artificial Sequence: Synthetic oligonucleotide
agacuucacuaugcuauau

SEQ ID NO: 741300 - RNA, 19 nt, Artificial Sequence
  Description of Artificial Sequence: Synthetic oligonucleotide
caaccugauggauagucau

SEQ ID NO: 741301 - RNA, 19 nt, Artificial Sequence
  Description of Artificial Sequence: Synthetic oligonucleotide
acuaugcuauauaguuccu

SEQ ID NO: 741302 - RNA, 19 nt, Artificial Sequence
  Description of Artificial Sequence: Synthetic oligonucleotide
agacaauaaguggccugga

SEQ ID NO: 741303 - RNA, 19 nt, Artificial Sequence
  Description of Artificial Sequence: Synthetic oligonucleotide
uggcugcuauccagagucu

SEQ ID NO: 741304 - RNA, 19 nt, Artificial Sequence
  Description of Artificial Sequence: Synthetic oligonucleotide
ggugacgaccaggaagcag

SEQ ID NO: 741305 - RNA, 19 nt, Artificial Sequence
  Description of Artificial Sequence: Synthetic oligonucleotide
gaguuucccgcucaacuuu

SEQ ID NO: 741306 - RNA, 19 nt, Artificial Sequence
  Description of Artificial Sequence: Synthetic oligonucleotide
ccuccacccuuuuaauccc

SEQ ID NO: 741307 - RNA, 19 nt, Artificial Sequence
  Description of Artificial Sequence: Synthetic oligonucleotide
ggcaugucggaguucucuc

SEQ ID NO: 741308 - RNA, 19 nt, Artificial Sequence
  Description of Artificial Sequence: Synthetic oligonucleotide
uccguccugcugagaguga

SEQ ID NO: 741309 - RNA, 19 nt, Artificial Sequence
  Description of Artificial Sequence: Synthetic oligonucleotide
cuguauugucucaucuagu

SEQ ID NO: 741310 - RNA, 19 nt, Artificial Sequence
  Description of Artificial Sequence: Synthetic oligonucleotide
ccuccuacuccgcuuuagc

SEQ ID NO: 741311 - RNA, 19 nt, Artificial Sequence
  Description of Artificial Sequence: Synthetic oligonucleotide
gacuuaauucgagauucuu

SEQ ID NO: 741312 - RNA, 19 nt, Artificial Sequence
  Description of Artificial Sequence: Synthetic oligonucleotide
auuuccucgcugacaucca

SEQ ID NO: 741313 - RNA, 19 nt, Artificial Sequence
  Description of Artificial Sequence: Synthetic oligonucleotide
caucuagucugcugugaua

SEQ ID NO: 741314 - RNA, 19 nt, Artificial Sequence
  Description of Artificial Sequence: Synthetic oligonucleotide
gguacagguugggauuuac

SEQ ID NO: 741315 - RNA, 19 nt, Artificial Sequence
  Description of Artificial Sequence: Synthetic oligonucleotide
ccaguggauuuucaucuuc

SEQ ID NO: 741316 - RNA, 19 nt, Artificial Sequence
  Description of Artificial Sequence: Synthetic oligonucleotide
cuccuacuccgcuuuagcu

SEQ ID NO: 741317 - RNA, 19 nt, Artificial Sequence
  Description of Artificial Sequence: Synthetic oligonucleotide
cccgcucaacuuuggacag

SEQ ID NO: 741318 - RNA, 19 nt, Artificial Sequence
  Description of Artificial Sequence: Synthetic oligonucleotide
cuggugucaugucaagccu

SEQ ID NO: 741319 - RNA, 19 nt, Artificial Sequence
  Description of Artificial Sequence: Synthetic oligonucleotide
ggaucuuggaauccaguuu

SEQ ID NO: 741320 - RNA, 19 nt, Artificial Sequence
  Description of Artificial Sequence: Synthetic oligonucleotide
auccgaccacagaccagac

SEQ ID NO: 741321 - RNA, 19 nt, Artificial Sequence
  Description of Artificial Sequence: Synthetic oligonucleotide
gcucgcagacaauccgacc

SEQ ID NO: 741322 - RNA, 19 nt, Artificial Sequence
  Description of Artificial Sequence: Synthetic oligonucleotide
gacaguuauugaugagcuu

SEQ ID NO: 741323 - RNA, 19 nt, Artificial Sequence
  Description of Artificial Sequence: Synthetic oligonucleotide
ggauacuaguucugucgaa

SEQ ID NO: 741324 - RNA, 19 nt, Artificial Sequence
  Description of Artificial Sequence: Synthetic oligonucleotide
gcaugucggaguucucuca

SEQ ID NO: 741325 - RNA, 19 nt, Artificial Sequence
  Description of Artificial Sequence: Synthetic oligonucleotide
gguugggauuuaccagaac

SEQ ID NO: 741326 - RNA, 19 nt, Artificial Sequence
  Description of Artificial Sequence: Synthetic oligonucleotide
gagacgcccagggcugaug

SEQ ID NO: 741327 - RNA, 19 nt, Artificial Sequence
  Description of Artificial Sequence: Synthetic oligonucleotide
ucuacccacuggggagggc

SEQ ID NO: 741328 - RNA, 19 nt, Artificial Sequence
  Description of Artificial Sequence: Synthetic oligonucleotide
gucccucucuuguguauaa

SEQ ID NO: 741329 - RNA, 19 nt, Artificial Sequence
  Description of Artificial Sequence: Synthetic oligonucleotide
gcagagacgcccagggcug

SEQ ID NO: 741330 - RNA, 19 nt, Artificial Sequence
  Description of Artificial Sequence: Synthetic oligonucleotide
acgcccagggcugaugcau

SEQ ID NO: 741331 - RNA, 19 nt, Artificial Sequence
  Description of Artificial Sequence: Synthetic oligonucleotide
ucccucucuuguguauaaa

SEQ ID NO: 741332 - RNA, 19 nt, Artificial Sequence
  Description of Artificial Sequence: Synthetic oligonucleotide
cgcucaacuuuggacagcc

SEQ ID NO: 741333 - RNA, 19 nt, Artificial Sequence
  Description of Artificial Sequence: Synthetic oligonucleotide
gggccgacgccccagccac

SEQ ID NO: 741334 - RNA, 19 nt, Artificial Sequence
  Description of Artificial Sequence: Synthetic oligonucleotide
cuucggauacuaguucugu

SEQ ID NO: 741335 - RNA, 19 nt, Artificial Sequence
  Description of Artificial Sequence: Synthetic oligonucleotide
gacgcccagggcugaugca

SEQ ID NO: 741336 - RNA, 19 nt, Artificial Sequence
  Description of Artificial Sequence: Synthetic oligonucleotide
cuucuaugaauuguaccuu

SEQ ID NO: 741337 - RNA, 19 nt, Artificial Sequence
  Description of Artificial Sequence: Synthetic oligonucleotide
gcaaucaauuagguccaca

SEQ ID NO: 741338 - RNA, 19 nt, Artificial Sequence
  Description of Artificial Sequence: Synthetic oligonucleotide
uuccuccuacuccgcuuua

SEQ ID NO: 741339 - RNA, 19 nt, Artificial Sequence
  Description of Artificial Sequence: Synthetic oligonucleotide
cugggacaagcaaucaauu

SEQ ID NO: 741340 - RNA, 19 nt, Artificial Sequence
  Description of Artificial Sequence: Synthetic oligonucleotide
cccagaagacaaccugaug

SEQ ID NO: 741341 - RNA, 19 nt, Artificial Sequence
  Description of Artificial Sequence: Synthetic oligonucleotide
cugucacuauauucucgua

SEQ ID NO: 741342 - RNA, 19 nt, Artificial Sequence
  Description of Artificial Sequence: Synthetic oligonucleotide
cuucuggcccaggcaauca

SEQ ID NO: 741343 - RNA, 19 nt, Artificial Sequence
  Description of Artificial Sequence: Synthetic oligonucleotide
uccgcccugcaaagucaau

SEQ ID NO: 741344 - RNA, 19 nt, Artificial Sequence
  Description of Artificial Sequence: Synthetic oligonucleotide
agacaaccugauggauagu

SEQ ID NO: 741345 - RNA, 19 nt, Artificial Sequence
  Description of Artificial Sequence: Synthetic oligonucleotide
gcuggucuacugaucucug

SEQ ID NO: 741346 - RNA, 19 nt, Artificial Sequence
  Description of Artificial Sequence: Synthetic oligonucleotide
cuggucuacugaucucugu

SEQ ID NO: 741347 - RNA, 19 nt, Artificial Sequence
  Description of Artificial Sequence: Synthetic oligonucleotide
gcccuccacccuuuuaauc

SEQ ID NO: 741348 - RNA, 19 nt, Artificial Sequence
  Description of Artificial Sequence: Synthetic oligonucleotide
ccgcccugcaaagucaaug

SEQ ID NO: 741349 - RNA, 19 nt, Artificial Sequence
  Description of Artificial Sequence: Synthetic oligonucleotide
ccuugguagagaggucuac

SEQ ID NO: 741350 - RNA, 19 nt, Artificial Sequence
  Description of Artificial Sequence: Synthetic oligonucleotide
gcaaaguaaucugacucau

SEQ ID NO: 741351 - RNA, 19 nt, Artificial Sequence
  Description of Artificial Sequence: Synthetic oligonucleotide
cggauacuaguucugucga

SEQ ID NO: 741352 - RNA, 19 nt, Artificial Sequence
  Description of Artificial Sequence: Synthetic oligonucleotide
cuuuagcuuuauacugcuu

SEQ ID NO: 741353 - RNA, 19 nt, Artificial Sequence
  Description of Artificial Sequence: Synthetic oligonucleotide
gcagaguuucccgcucaac

SEQ ID NO: 741354 - RNA, 19 nt, Artificial Sequence
  Description of Artificial Sequence: Synthetic oligonucleotide
gagagucgugaggcauguc

SEQ ID NO: 741355 - RNA, 19 nt, Artificial Sequence
  Description of Artificial Sequence: Synthetic oligonucleotide
cuccacccuuuuaaucccu

SEQ ID NO: 741356 - RNA, 19 nt, Artificial Sequence
  Description of Artificial Sequence: Synthetic oligonucleotide
ccaaaucuaaagguguuuu

SEQ ID NO: 741357 - RNA, 19 nt, Artificial Sequence
  Description of Artificial Sequence: Synthetic oligonucleotide
cuuguguccuucggauacu

SEQ ID NO: 741358 - RNA, 19 nt, Artificial Sequence
  Description of Artificial Sequence: Synthetic oligonucleotide
agagacgcccagggcugau

SEQ ID NO: 741359 - RNA, 19 nt, Artificial Sequence
  Description of Artificial Sequence: Synthetic oligonucleotide
ccagacuuaauucgagauu

SEQ ID NO: 741360 - RNA, 19 nt, Artificial Sequence
  Description of Artificial Sequence: Synthetic oligonucleotide
ggcugacccaguguugucu

SEQ ID NO: 741361 - RNA, 19 nt, Artificial Sequence
  Description of Artificial Sequence: Synthetic oligonucleotide
cugucccucucuuguguau

SEQ ID NO: 741362 - RNA, 19 nt, Artificial Sequence
  Description of Artificial Sequence: Synthetic oligonucleotide
ggauagucauuuggaaauu

SEQ ID NO: 741363 - RNA, 19 nt, Artificial Sequence
  Description of Artificial Sequence: Synthetic oligonucleotide
gggcugacccaguguuguc

SEQ ID NO: 741364 - RNA, 19 nt, Artificial Sequence
  Description of Artificial Sequence: Synthetic oligonucleotide
cagagacgcccagggcuga

SEQ ID NO: 741365 - RNA, 19 nt, Artificial Sequence
  Description of Artificial Sequence: Synthetic oligonucleotide
ccgcucaacuuuggacagc

SEQ ID NO: 741366 - RNA, 19 nt, Artificial Sequence
  Description of Artificial Sequence: Synthetic oligonucleotide
cacuggggagggcucuggu

SEQ ID NO: 741367 - RNA, 19 nt, Artificial Sequence
  Description of Artificial Sequence: Synthetic oligonucleotide
cuacuccgcuuuagcuggu

SEQ ID NO: 741368 - RNA, 19 nt, Artificial Sequence
  Description of Artificial Sequence: Synthetic oligonucleotide
ggcccacuacauaaagaau

SEQ ID NO: 741369 - RNA, 19 nt, Artificial Sequence
  Description of Artificial Sequence: Synthetic oligonucleotide
gccaguggauuuucaucuu

SEQ ID NO: 741370 - RNA, 19 nt, Artificial Sequence
  Description of Artificial Sequence: Synthetic oligonucleotide
ccgcaacugcugugugcac

SEQ ID NO: 741371 - RNA, 19 nt, Artificial Sequence
  Description of Artificial Sequence: Synthetic oligonucleotide
gggugacgaccaggaagca

SEQ ID NO: 741372 - RNA, 19 nt, Artificial Sequence
  Description of Artificial Sequence: Synthetic oligonucleotide
gucaagccuuuagcuuuau

SEQ ID NO: 741373 - RNA, 19 nt, Artificial Sequence
  Description of Artificial Sequence: Synthetic oligonucleotide
ccguccugcugagagugaa

SEQ ID NO: 741374 - RNA, 19 nt, Artificial Sequence
  Description of Artificial Sequence: Synthetic oligonucleotide
cccaggcaaucacaugggu

SEQ ID NO: 741375 - RNA, 19 nt, Artificial Sequence
  Description of Artificial Sequence: Synthetic oligonucleotide
ccgcuuuagcuggucuacu

SEQ ID NO: 741376 - RNA, 19 nt, Artificial Sequence
  Description of Artificial Sequence: Synthetic oligonucleotide
ccccucuauuuccccuggu

SEQ ID NO: 741377 - RNA, 19 nt, Artificial Sequence
  Description of Artificial Sequence: Synthetic oligonucleotide
ccccugacaugagcuucuu

SEQ ID NO: 741378 - RNA, 19 nt, Artificial Sequence
  Description of Artificial Sequence: Synthetic oligonucleotide
aagccuaacaauuugagug

SEQ ID NO: 741379 - RNA, 19 nt, Artificial Sequence
  Description of Artificial Sequence: Synthetic oligonucleotide
auuagauuaaacuuccaac

SEQ ID NO: 741380 - RNA, 19 nt, Artificial Sequence
  Description of Artificial Sequence: Synthetic oligonucleotide
uuagauuaaacuuccaacu

SEQ ID NO: 741381 - RNA, 19 nt, Artificial Sequence
  Description of Artificial Sequence: Synthetic oligonucleotide
aauaaaucuguuguacucg

SEQ ID NO: 741382 - RNA, 19 nt, Artificial Sequence
  Description of Artificial Sequence: Synthetic oligonucleotide
aaucauguucuucagacga

SEQ ID NO: 741383 - RNA, 19 nt, Artificial Sequence
  Description of Artificial Sequence: Synthetic oligonucleotide
aaucaguacaaaagaaucc

SEQ ID NO: 741384 - RNA, 19 nt, Artificial Sequence
  Description of Artificial Sequence: Synthetic oligonucleotide
acaaauugggcauucacuc

SEQ ID NO: 741385 - RNA, 19 nt, Artificial Sequence
  Description of Artificial Sequence: Synthetic oligonucleotide
ucuuaaucaguacaaaaga

SEQ ID NO: 741386 - RNA, 19 nt, Artificial Sequence
  Description of Artificial Sequence: Synthetic oligonucleotide
aaacacacagggcacauag

SEQ ID NO: 741387 - RNA, 19 nt, Artificial Sequence
  Description of Artificial Sequence: Synthetic oligonucleotide
uauauguccaagaugugcc

SEQ ID NO: 741388 - RNA, 19 nt, Artificial Sequence
  Description of Artificial Sequence: Synthetic oligonucleotide
aagguuucagaaucauugc

SEQ ID NO: 741389 - RNA, 19 nt, Artificial Sequence
  Description of Artificial Sequence: Synthetic oligonucleotide
uaaacuuccaacuagcuuu

SEQ ID NO: 741390 - RNA, 19 nt, Artificial Sequence
  Description of Artificial Sequence: Synthetic oligonucleotide
acuuuugagaguaaaacac

SEQ ID NO: 741391 - RNA, 19 nt, Artificial Sequence
  Description of Artificial Sequence: Synthetic oligonucleotide
aauacucccacuugagauc

SEQ ID NO: 741392 - RNA, 19 nt, Artificial Sequence
  Description of Artificial Sequence: Synthetic oligonucleotide
uuuacauccacaucuggcc

SEQ ID NO: 741393 - RNA, 19 nt, Artificial Sequence
  Description of Artificial Sequence: Synthetic oligonucleotide
uccaacuagcuuuagaacc

SEQ ID NO: 741394 - RNA, 19 nt, Artificial Sequence
  Description of Artificial Sequence: Synthetic oligonucleotide
uuuugagaguaaaacacgc

SEQ ID NO: 741395 - RNA, 19 nt, Artificial Sequence
  Description of Artificial Sequence: Synthetic oligonucleotide
uugccuuucgacaaauugg

SEQ ID NO: 741396 - RNA, 19 nt, Artificial Sequence
  Description of Artificial Sequence: Synthetic oligonucleotide
uauggcgucauggagaggg

SEQ ID NO: 741397 - RNA, 19 nt, Artificial Sequence
  Description of Artificial Sequence: Synthetic oligonucleotide
caggacuucgauaacagcg

SEQ ID NO: 741398 - RNA, 19 nt, Artificial Sequence
  Description of Artificial Sequence: Synthetic oligonucleotide
aacaagucgcaaugugucc

SEQ ID NO: 741399 - RNA, 19 nt, Artificial Sequence
  Description of Artificial Sequence: Synthetic oligonucleotide
ugaugcagggcauugaacc

SEQ ID NO: 741400 - RNA, 19 nt, Artificial Sequence
  Description of Artificial Sequence: Synthetic oligonucleotide
uuaaucaguacaaaagaau

SEQ ID NO: 741401 - RNA, 19 nt, Artificial Sequence
  Description of Artificial Sequence: Synthetic oligonucleotide
uacuuuagcuaacaaaaca

SEQ ID NO: 741402 - RNA, 19 nt, Artificial Sequence
  Description of Artificial Sequence: Synthetic oligonucleotide
gauuauggcggccaggugc

SEQ ID NO: 741403 - RNA, 19 nt, Artificial Sequence
  Description of Artificial Sequence: Synthetic oligonucleotide
gaaugucuagcuuagcacc

SEQ ID NO: 741404 - RNA, 19 nt, Artificial Sequence
  Description of Artificial Sequence: Synthetic oligonucleotide
aaaucauguucuucagacg

SEQ ID NO: 741405 - RNA, 19 nt, Artificial Sequence
  Description of Artificial Sequence: Synthetic oligonucleotide
gagaguaaaacacgcauug

SEQ ID NO: 741406 - RNA, 19 nt, Artificial Sequence
  Description of Artificial Sequence: Synthetic oligonucleotide
acuuuagcuaacaaaacac

SEQ ID NO: 741407 - RNA, 19 nt, Artificial Sequence
  Description of Artificial Sequence: Synthetic oligonucleotide
agauuaaacuuccaacuag

SEQ ID NO: 741408 - RNA, 19 nt, Artificial Sequence
  Description of Artificial Sequence: Synthetic oligonucleotide
ugccuuucgacaaauuggg

SEQ ID NO: 741409 - RNA, 19 nt, Artificial Sequence
  Description of Artificial Sequence: Synthetic oligonucleotide
agacgauccaaacacacag

SEQ ID NO: 741410 - RNA, 19 nt, Artificial Sequence
  Description of Artificial Sequence: Synthetic oligonucleotide
uuuagcuaacaaaacacuc

SEQ ID NO: 741411 - RNA, 19 nt, Artificial Sequence
  Description of Artificial Sequence: Synthetic oligonucleotide
aucauugcuaaucauagaa

SEQ ID NO: 741412 - RNA, 19 nt, Artificial Sequence
  Description of Artificial Sequence: Synthetic oligonucleotide
cuucagacgauccaaacac

SEQ ID NO: 741413 - RNA, 19 nt, Artificial Sequence
  Description of Artificial Sequence: Synthetic oligonucleotide
uuauuucgaaugcugaggu

SEQ ID NO: 741414 - RNA, 19 nt, Artificial Sequence
  Description of Artificial Sequence: Synthetic oligonucleotide
uaaucauagaaggacuccg

SEQ ID NO: 741415 - RNA, 19 nt, Artificial Sequence
  Description of Artificial Sequence: Synthetic oligonucleotide
aaaggcggcauggugaacg

SEQ ID NO: 741416 - RNA, 19 nt, Artificial Sequence
  Description of Artificial Sequence: Synthetic oligonucleotide
ucgcaauguguccacaugg

SEQ ID NO: 741417 - RNA, 19 nt, Artificial Sequence
  Description of Artificial Sequence: Synthetic oligonucleotide
uuauauguccaagaugugc

SEQ ID NO: 741418 - RNA, 19 nt, Artificial Sequence
  Description of Artificial Sequence: Synthetic oligonucleotide
uguuucuuaaucaguacaa

SEQ ID NO: 741419 - RNA, 19 nt, Artificial Sequence
  Description of Artificial Sequence: Synthetic oligonucleotide
uuaaaucacugucugaaua

SEQ ID NO: 741420 - RNA, 19 nt, Artificial Sequence
  Description of Artificial Sequence: Synthetic oligonucleotide
acuccgagaacccacuugg

SEQ ID NO: 741421 - RNA, 19 nt, Artificial Sequence
  Description of Artificial Sequence: Synthetic oligonucleotide
gaauccuccguucaauugc

SEQ ID NO: 741422 - RNA, 19 nt, Artificial Sequence
  Description of Artificial Sequence: Synthetic oligonucleotide
aaagccuaacaauuugagu

SEQ ID NO: 741423 - RNA, 19 nt, Artificial Sequence
  Description of Artificial Sequence: Synthetic oligonucleotide
uugagaguaaaacacgcau

SEQ ID NO: 741424 - RNA, 19 nt, Artificial Sequence
  Description of Artificial Sequence: Synthetic oligonucleotide
cugagcauaccauacauuc

SEQ ID NO: 741425 - RNA, 19 nt, Artificial Sequence
  Description of Artificial Sequence: Synthetic oligonucleotide
cuuauuucgaaugcugagg

SEQ ID NO: 741426 - RNA, 19 nt, Artificial Sequence
  Description of Artificial Sequence: Synthetic oligonucleotide
acaaaagaauccuccguuc

SEQ ID NO: 741427 - RNA, 19 nt, Artificial Sequence
  Description of Artificial Sequence: Synthetic oligonucleotide
aaaagccuaacaauuugag

SEQ ID NO: 741428 - RNA, 19 nt, Artificial Sequence
  Description of Artificial Sequence: Synthetic oligonucleotide
ugaaugucuagcuuagcac

SEQ ID NO: 741429 - RNA, 19 nt, Artificial Sequence
  Description of Artificial Sequence: Synthetic oligonucleotide
caaagaacaagucgcaaug

SEQ ID NO: 741430 - RNA, 19 nt, Artificial Sequence
  Description of Artificial Sequence: Synthetic oligonucleotide
aaauugggcauucacucau

SEQ ID NO: 741431 - RNA, 19 nt, Artificial Sequence
  Description of Artificial Sequence: Synthetic oligonucleotide
auugacagcgauaugcagg

SEQ ID NO: 741432 - RNA, 19 nt, Artificial Sequence
  Description of Artificial Sequence: Synthetic oligonucleotide
uuugccagugcuuugcaga

SEQ ID NO: 741433 - RNA, 19 nt, Artificial Sequence
  Description of Artificial Sequence: Synthetic oligonucleotide
acaagguuggaaaagaaca

SEQ ID NO: 741434 - RNA, 19 nt, Artificial Sequence
  Description of Artificial Sequence: Synthetic oligonucleotide
acagaugaggcauuucuug

SEQ ID NO: 741435 - RNA, 19 nt, Artificial Sequence
  Description of Artificial Sequence: Synthetic oligonucleotide
uagaaggacuccgagaacc

SEQ ID NO: 741436 - RNA, 19 nt, Artificial Sequence
  Description of Artificial Sequence: Synthetic oligonucleotide
uucaauugccuuucgacaa

SEQ ID NO: 741437 - RNA, 19 nt, Artificial Sequence
  Description of Artificial Sequence: Synthetic oligonucleotide
accugcgcggaccaaaagc

SEQ ID NO: 741438 - RNA, 19 nt, Artificial Sequence
  Description of Artificial Sequence: Synthetic oligonucleotide
aaacacgcauugcacuggg

SEQ ID NO: 741439 - RNA, 19 nt, Artificial Sequence
  Description of Artificial Sequence: Synthetic oligonucleotide
ugcuaaucauagaaggacu

SEQ ID NO: 741440 - RNA, 19 nt, Artificial Sequence
  Description of Artificial Sequence: Synthetic oligonucleotide
cuucuuauuucgaaugcug

SEQ ID NO: 741441 - RNA, 19 nt, Artificial Sequence
  Description of Artificial Sequence: Synthetic oligonucleotide
ucuagcuuagcaccugcgc

SEQ ID NO: 741442 - RNA, 19 nt, Artificial Sequence
  Description of Artificial Sequence: Synthetic oligonucleotide
acauacuuuagcuaacaaa

SEQ ID NO: 741443 - RNA, 19 nt, Artificial Sequence
  Description of Artificial Sequence: Synthetic oligonucleotide
uugcuaaucauagaaggac

SEQ ID NO: 741444 - RNA, 19 nt, Artificial Sequence
  Description of Artificial Sequence: Synthetic oligonucleotide
cuuauggcgucauggagag

SEQ ID NO: 741445 - RNA, 19 nt, Artificial Sequence
  Description of Artificial Sequence: Synthetic oligonucleotide
ucagacgauccaaacacac

SEQ ID NO: 741446 - RNA, 19 nt, Artificial Sequence
  Description of Artificial Sequence: Synthetic oligonucleotide
aauccuccguucaauugcc

SEQ ID NO: 741447 - RNA, 19 nt, Artificial Sequence
  Description of Artificial Sequence: Synthetic oligonucleotide
uucacaaccugaaggugcc

SEQ ID NO: 741448 - RNA, 19 nt, Artificial Sequence
  Description of Artificial Sequence: Synthetic oligonucleotide
ugauggucacgucugcucc

SEQ ID NO: 741449 - RNA, 19 nt, Artificial Sequence
  Description of Artificial Sequence: Synthetic oligonucleotide
uggaauacucccacuugag

SEQ ID NO: 741450 - RNA, 19 nt, Artificial Sequence
  Description of Artificial Sequence: Synthetic oligonucleotide
ugacuagcagcuugcauug

SEQ ID NO: 741451 - RNA, 19 nt, Artificial Sequence
  Description of Artificial Sequence: Synthetic oligonucleotide
gaaggugcccuuuauugac

SEQ ID NO: 741452 - RNA, 19 nt, Artificial Sequence
  Description of Artificial Sequence: Synthetic oligonucleotide
aaaggaguaucuccauccu

SEQ ID NO: 741453 - RNA, 19 nt, Artificial Sequence
  Description of Artificial Sequence: Synthetic oligonucleotide
uuacuuauggcgucaugga

SEQ ID NO: 741454 - RNA, 19 nt, Artificial Sequence
  Description of Artificial Sequence: Synthetic oligonucleotide
acacagggcacauagucug

SEQ ID NO: 741455 - RNA, 19 nt, Artificial Sequence
  Description of Artificial Sequence: Synthetic oligonucleotide
uucuggauauccagguuug

SEQ ID NO: 741456 - RNA, 19 nt, Artificial Sequence
  Description of Artificial Sequence: Synthetic oligonucleotide
acacguggggaacacaaag

SEQ ID NO: 741457 - RNA, 19 nt, Artificial Sequence
  Description of Artificial Sequence: Synthetic oligonucleotide
aacggcucggucuccaucu

SEQ ID NO: 741458 - RNA, 19 nt, Artificial Sequence
  Description of Artificial Sequence: Synthetic oligonucleotide
aggacuucgauaacagcgc

SEQ ID NO: 741459 - RNA, 19 nt, Artificial Sequence
  Description of Artificial Sequence: Synthetic oligonucleotide
aacacucuguguuucuuaa

SEQ ID NO: 741460 - RNA, 19 nt, Artificial Sequence
  Description of Artificial Sequence: Synthetic oligonucleotide
uugggcauucacucauucg

SEQ ID NO: 741461 - RNA, 19 nt, Artificial Sequence
  Description of Artificial Sequence: Synthetic oligonucleotide
uguggugccucaaagccuc

SEQ ID NO: 741462 - RNA, 19 nt, Artificial Sequence
  Description of Artificial Sequence: Synthetic oligonucleotide
uugaacccguuguuguugg

SEQ ID NO: 741463 - RNA, 19 nt, Artificial Sequence
  Description of Artificial Sequence: Synthetic oligonucleotide
auaacagcgcccucaucuc

SEQ ID NO: 741464 - RNA, 19 nt, Artificial Sequence
  Description of Artificial Sequence: Synthetic oligonucleotide
agcacaugaugaaaggcac

SEQ ID NO: 741465 - RNA, 19 nt, Artificial Sequence
  Description of Artificial Sequence: Synthetic oligonucleotide
cuaaucauagaaggacucc

SEQ ID NO: 741466 - RNA, 19 nt, Artificial Sequence
  Description of Artificial Sequence: Synthetic oligonucleotide
uuucuugacacguggggaa

SEQ ID NO: 741467 - RNA, 19 nt, Artificial Sequence
  Description of Artificial Sequence: Synthetic oligonucleotide
uugguaacuuuugagagua

SEQ ID NO: 741468 - RNA, 19 nt, Artificial Sequence
  Description of Artificial Sequence: Synthetic oligonucleotide
agaauccuccguucaauug

SEQ ID NO: 741469 - RNA, 19 nt, Artificial Sequence
  Description of Artificial Sequence: Synthetic oligonucleotide
aaagaacaagucgcaaugu

SEQ ID NO: 741470 - RNA, 19 nt, Artificial Sequence
  Description of Artificial Sequence: Synthetic oligonucleotide
uuacauccacaucuggccu

SEQ ID NO: 741471 - RNA, 19 nt, Artificial Sequence
  Description of Artificial Sequence: Synthetic oligonucleotide
cugaaccugcucuuuacag

SEQ ID NO: 741472 - RNA, 19 nt, Artificial Sequence
  Description of Artificial Sequence: Synthetic oligonucleotide
ugacacguggggaacacaa

SEQ ID NO: 741473 - RNA, 19 nt, Artificial Sequence
  Description of Artificial Sequence: Synthetic oligonucleotide
ucaguacaaaagaauccuc

SEQ ID NO: 741474 - RNA, 19 nt, Artificial Sequence
  Description of Artificial Sequence: Synthetic oligonucleotide
gaacaagucgcaauguguc

SEQ ID NO: 741475 - RNA, 19 nt, Artificial Sequence
  Description of Artificial Sequence: Synthetic oligonucleotide
uucgauaacagcgcccuca

SEQ ID NO: 741476 - RNA, 19 nt, Artificial Sequence
  Description of Artificial Sequence: Synthetic oligonucleotide
caaccgaaguccagcagcg

SEQ ID NO: 741477 - RNA, 19 nt, Artificial Sequence
  Description of Artificial Sequence: Synthetic oligonucleotide
acccacuaagaucucauga

SEQ ID NO: 741478 - RNA, 19 nt, Artificial Sequence
  Description of Artificial Sequence: Synthetic oligonucleotide
ugagacagaguguggugcc

SEQ ID NO: 741479 - RNA, 19 nt, Artificial Sequence
  Description of Artificial Sequence: Synthetic oligonucleotide
uggccacagaggaaaauca

SEQ ID NO: 741480 - RNA, 19 nt, Artificial Sequence
  Description of Artificial Sequence: Synthetic oligonucleotide
uaaaucuguuguacucggc

SEQ ID NO: 741481 - RNA, 19 nt, Artificial Sequence
  Description of Artificial Sequence: Synthetic oligonucleotide
agccuaacaauuugagugu

SEQ ID NO: 741482 - RNA, 19 nt, Artificial Sequence
  Description of Artificial Sequence: Synthetic oligonucleotide
gaauacucccacuugagau

SEQ ID NO: 741483 - RNA, 19 nt, Artificial Sequence
  Description of Artificial Sequence: Synthetic oligonucleotide
ucccugaugcaccaacagc

SEQ ID NO: 741484 - RNA, 19 nt, Artificial Sequence
  Description of Artificial Sequence: Synthetic oligonucleotide
aaugucuagcuuagcaccu

SEQ ID NO: 741485 - RNA, 19 nt, Artificial Sequence
  Description of Artificial Sequence: Synthetic oligonucleotide
ugcacgucugcguugacau

SEQ ID NO: 741486 - RNA, 19 nt, Artificial Sequence
  Description of Artificial Sequence: Synthetic oligonucleotide
caauccacggccuugguaa

SEQ ID NO: 741487 - RNA, 19 nt, Artificial Sequence
  Description of Artificial Sequence: Synthetic oligonucleotide
cugcucuuuacagaugagg

SEQ ID NO: 741488 - RNA, 19 nt, Artificial Sequence
  Description of Artificial Sequence: Synthetic oligonucleotide
cuugcauugcuguguggcc

SEQ ID NO: 741489 - RNA, 19 nt, Artificial Sequence
  Description of Artificial Sequence: Synthetic oligonucleotide
ugucuagcuuagcaccugc

SEQ ID NO: 741490 - RNA, 19 nt, Artificial Sequence
  Description of Artificial Sequence: Synthetic oligonucleotide
aaucauagaaggacuccga

SEQ ID NO: 741491 - RNA, 19 nt, Artificial Sequence
  Description of Artificial Sequence: Synthetic oligonucleotide
aagaauccuccguucaauu

SEQ ID NO: 741492 - RNA, 19 nt, Artificial Sequence
  Description of Artificial Sequence: Synthetic oligonucleotide
aggcaauagaugcugcacu

SEQ ID NO: 741493 - RNA, 19 nt, Artificial Sequence
  Description of Artificial Sequence: Synthetic oligonucleotide
agcgcccucaucuccaaag

SEQ ID NO: 741494 - RNA, 19 nt, Artificial Sequence
  Description of Artificial Sequence: Synthetic oligonucleotide
ugcuaauggcugauccugc

SEQ ID NO: 741495 - RNA, 19 nt, Artificial Sequence
  Description of Artificial Sequence: Synthetic oligonucleotide
uucagacgauccaaacaca

SEQ ID NO: 741496 - RNA, 19 nt, Artificial Sequence
  Description of Artificial Sequence: Synthetic oligonucleotide
acuugagaucucaucagag

SEQ ID NO: 741497 - RNA, 19 nt, Artificial Sequence
  Description of Artificial Sequence: Synthetic oligonucleotide
acuucgauaacagcgcccu

SEQ ID NO: 741498 - RNA, 19 nt, Artificial Sequence
  Description of Artificial Sequence: Synthetic oligonucleotide
agaacaagucgcaaugugu

SEQ ID NO: 741499 - RNA, 19 nt, Artificial Sequence
  Description of Artificial Sequence: Synthetic oligonucleotide
augauuauggcggccaggu

SEQ ID NO: 741500 - RNA, 19 nt, Artificial Sequence
  Description of Artificial Sequence: Synthetic oligonucleotide
cauucggucuccacagagc

SEQ ID NO: 741501 - RNA, 19 nt, Artificial Sequence
  Description of Artificial Sequence: Synthetic oligonucleotide
uugucagagcacaccacac

SEQ ID NO: 741502 - RNA, 19 nt, Artificial Sequence
  Description of Artificial Sequence: Synthetic oligonucleotide
ucgcuuauugcgagcauuc

SEQ ID NO: 741503 - RNA, 19 nt, Artificial Sequence
  Description of Artificial Sequence: Synthetic oligonucleotide
gacgauccaaacacacagg

SEQ ID NO: 741504 - RNA, 19 nt, Artificial Sequence
  Description of Artificial Sequence: Synthetic oligonucleotide
auugaacccguuguuguug

SEQ ID NO: 741505 - RNA, 19 nt, Artificial Sequence
  Description of Artificial Sequence: Synthetic oligonucleotide
ugagagucuuucaccagau

SEQ ID NO: 741506 - RNA, 19 nt, Artificial Sequence
  Description of Artificial Sequence: Synthetic oligonucleotide
uucaaucuuuguccuggac

SEQ ID NO: 741507 - RNA, 19 nt, Artificial Sequence
  Description of Artificial Sequence: Synthetic oligonucleotide
cucacaagcacacaugugu

SEQ ID NO: 741508 - RNA, 19 nt, Artificial Sequence
  Description of Artificial Sequence: Synthetic oligonucleotide
ccaacuagcuuuagaaccc

SEQ ID NO: 741509 - RNA, 19 nt, Artificial Sequence
  Description of Artificial Sequence: Synthetic oligonucleotide
uucaaccacugcccgacac

SEQ ID NO: 741510 - RNA, 19 nt, Artificial Sequence
  Description of Artificial Sequence: Synthetic oligonucleotide
acacgcauugcacugggau

SEQ ID NO: 741511 - RNA, 19 nt, Artificial Sequence
  Description of Artificial Sequence: Synthetic oligonucleotide
gacugaaccugcucuuuac

SEQ ID NO: 741512 - RNA, 19 nt, Artificial Sequence
  Description of Artificial Sequence: Synthetic oligonucleotide
agguuggaaaagaacagcu

SEQ ID NO: 741513 - RNA, 19 nt, Artificial Sequence
  Description of Artificial Sequence: Synthetic oligonucleotide
ucuuacuuauggcgucaug

SEQ ID NO: 741514 - RNA, 19 nt, Artificial Sequence
  Description of Artificial Sequence: Synthetic oligonucleotide
agagauccaguggugacug

SEQ ID NO: 741515 - RNA, 19 nt, Artificial Sequence
  Description of Artificial Sequence: Synthetic oligonucleotide
auauguccaagaugugcca

SEQ ID NO: 741516 - RNA, 19 nt, Artificial Sequence
  Description of Artificial Sequence: Synthetic oligonucleotide
ccugcguucaaccacugcc

SEQ ID NO: 741517 - RNA, 19 nt, Artificial Sequence
  Description of Artificial Sequence: Synthetic oligonucleotide
uuagcaccugcgcggacca

SEQ ID NO: 741518 - RNA, 19 nt, Artificial Sequence
  Description of Artificial Sequence: Synthetic oligonucleotide
aacuagcuuuagaacccac

SEQ ID NO: 741519 - RNA, 19 nt, Artificial Sequence
  Description of Artificial Sequence: Synthetic oligonucleotide
auucacucauucggucucc

SEQ ID NO: 741520 - RNA, 19 nt, Artificial Sequence
  Description of Artificial Sequence: Synthetic oligonucleotide
acaugauuauggcggccag

SEQ ID NO: 741521 - RNA, 19 nt, Artificial Sequence
  Description of Artificial Sequence: Synthetic oligonucleotide
guuccguggccacagagga

SEQ ID NO: 741522 - RNA, 19 nt, Artificial Sequence
  Description of Artificial Sequence: Synthetic oligonucleotide
cauucacucauucggucuc

SEQ ID NO: 741523 - RNA, 19 nt, Artificial Sequence
  Description of Artificial Sequence: Synthetic oligonucleotide
gugacaaccgaaguccagc

SEQ ID NO: 741524 - RNA, 19 nt, Artificial Sequence
  Description of Artificial Sequence: Synthetic oligonucleotide
uccucuuagugcagcguga

SEQ ID NO: 741525 - RNA, 19 nt, Artificial Sequence
  Description of Artificial Sequence: Synthetic oligonucleotide
cacgucugcguugacauug

SEQ ID NO: 741526 - RNA, 19 nt, Artificial Sequence
  Description of Artificial Sequence: Synthetic oligonucleotide
acaagucgcaaugugucca

SEQ ID NO: 741527 - RNA, 19 nt, Artificial Sequence
  Description of Artificial Sequence: Synthetic oligonucleotide
cuuagcaccugcgcggacc

SEQ ID NO: 741528 - RNA, 19 nt, Artificial Sequence
  Description of Artificial Sequence: Synthetic oligonucleotide
cuuuagcuaacaaaacacu

SEQ ID NO: 741529 - RNA, 19 nt, Artificial Sequence
  Description of Artificial Sequence: Synthetic oligonucleotide
aggugcccuuuauugacag

SEQ ID NO: 741530 - RNA, 19 nt, Artificial Sequence
  Description of Artificial Sequence: Synthetic oligonucleotide
ugcccgacacugcacacac

SEQ ID NO: 741531 - RNA, 19 nt, Artificial Sequence
  Description of Artificial Sequence: Synthetic oligonucleotide
gugagagucuuucaccaga

SEQ ID NO: 741532 - RNA, 19 nt, Artificial Sequence
  Description of Artificial Sequence: Synthetic oligonucleotide
uccguggccacagaggaaa

SEQ ID NO: 741533 - RNA, 19 nt, Artificial Sequence
  Description of Artificial Sequence: Synthetic oligonucleotide
gacaaauugggcauucacu

SEQ ID NO: 741534 - RNA, 19 nt, Artificial Sequence
  Description of Artificial Sequence: Synthetic oligonucleotide
uauuucgaaugcugagguc

SEQ ID NO: 741535 - RNA, 19 nt, Artificial Sequence
  Description of Artificial Sequence: Synthetic oligonucleotide
cuggaauacucccacuuga

SEQ ID NO: 741536 - RNA, 19 nt, Artificial Sequence
  Description of Artificial Sequence: Synthetic oligonucleotide
gaacccguuguuguuggug

SEQ ID NO: 741537 - RNA, 19 nt, Artificial Sequence
  Description of Artificial Sequence: Synthetic oligonucleotide
ugauuauggcggccaggug

SEQ ID NO: 741538 - RNA, 19 nt, Artificial Sequence
  Description of Artificial Sequence: Synthetic oligonucleotide
ucuuuguccuggacugaac

SEQ ID NO: 741539 - RNA, 19 nt, Artificial Sequence
  Description of Artificial Sequence: Synthetic oligonucleotide
ucagguccgcacugccucg

SEQ ID NO: 741540 - RNA, 19 nt, Artificial Sequence
  Description of Artificial Sequence: Synthetic oligonucleotide
acuggggugacaaccgaag

SEQ ID NO: 741541 - RNA, 19 nt, Artificial Sequence
  Description of Artificial Sequence: Synthetic oligonucleotide
ugccuucgcuuauugcgag

SEQ ID NO: 741542 - RNA, 19 nt, Artificial Sequence
  Description of Artificial Sequence: Synthetic oligonucleotide
caugauuauggcggccagg

SEQ ID NO: 741543 - RNA, 19 nt, Artificial Sequence
  Description of Artificial Sequence: Synthetic oligonucleotide
ggagacuggggugacaacc

SEQ ID NO: 741544 - RNA, 19 nt, Artificial Sequence
  Description of Artificial Sequence: Synthetic oligonucleotide
gucgcaauguguccacaug

SEQ ID NO: 741545 - RNA, 19 nt, Artificial Sequence
  Description of Artificial Sequence: Synthetic oligonucleotide
ucgauaacagcgcccucau

SEQ ID NO: 741546 - RNA, 19 nt, Artificial Sequence
  Description of Artificial Sequence: Synthetic oligonucleotide
augcauugcuaauggcuga

SEQ ID NO: 741547 - RNA, 19 nt, Artificial Sequence
  Description of Artificial Sequence: Synthetic oligonucleotide
auuuugccagugcuuugca

SEQ ID NO: 741548 - RNA, 19 nt, Artificial Sequence
  Description of Artificial Sequence: Synthetic oligonucleotide
acugcccgacacugcacac

SEQ ID NO: 741549 - RNA, 19 nt, Artificial Sequence
  Description of Artificial Sequence: Synthetic oligonucleotide
gacuucgauaacagcgccc

SEQ ID NO: 741550 - RNA, 19 nt, Artificial Sequence
  Description of Artificial Sequence: Synthetic oligonucleotide
ccugcgcggaccaaaagcc

SEQ ID NO: 741551 - RNA, 19 nt, Artificial Sequence
  Description of Artificial Sequence: Synthetic oligonucleotide
ggugucaccuucagaaucc

SEQ ID NO: 741552 - RNA, 19 nt, Artificial Sequence
  Description of Artificial Sequence: Synthetic oligonucleotide
cguucaauugccuuucgac

SEQ ID NO: 741553 - RNA, 19 nt, Artificial Sequence
  Description of Artificial Sequence: Synthetic oligonucleotide
cacucauucggucuccaca

SEQ ID NO: 741554 - RNA, 19 nt, Artificial Sequence
  Description of Artificial Sequence: Synthetic oligonucleotide
gaucucaugaucacauacu

SEQ ID NO: 741555 - RNA, 19 nt, Artificial Sequence
  Description of Artificial Sequence: Synthetic oligonucleotide
ucaucucgcuucuuacuua

SEQ ID NO: 741556 - RNA, 19 nt, Artificial Sequence
  Description of Artificial Sequence: Synthetic oligonucleotide
auuauggcggccaggugca

SEQ ID NO: 741557 - RNA, 19 nt, Artificial Sequence
  Description of Artificial Sequence: Synthetic oligonucleotide
cauggagaggggugucacc

SEQ ID NO: 741558 - RNA, 19 nt, Artificial Sequence
  Description of Artificial Sequence: Synthetic oligonucleotide
ugcagggcauugaacccgu

SEQ ID NO: 741559 - RNA, 19 nt, Artificial Sequence
  Description of Artificial Sequence: Synthetic oligonucleotide
cuaagaucucaugaucaca

SEQ ID NO: 741560 - RNA, 19 nt, Artificial Sequence
  Description of Artificial Sequence: Synthetic oligonucleotide
ugcgcggaccaaaagccua

SEQ ID NO: 741561 - RNA, 19 nt, Artificial Sequence
  Description of Artificial Sequence: Synthetic oligonucleotide
agcgauaugcaggggcguc

SEQ ID NO: 741562 - RNA, 19 nt, Artificial Sequence
  Description of Artificial Sequence: Synthetic oligonucleotide
gauaugcaggggcgucugc

SEQ ID NO: 741563 - RNA, 19 nt, Artificial Sequence
  Description of Artificial Sequence: Synthetic oligonucleotide
agucgcaauguguccacau

SEQ ID NO: 741564 - RNA, 19 nt, Artificial Sequence
  Description of Artificial Sequence: Synthetic oligonucleotide
ucggccaacuuuaccuaaa

SEQ ID NO: 741565 - RNA, 19 nt, Artificial Sequence
  Description of Artificial Sequence: Synthetic oligonucleotide
accuuggaaacugcugcag

SEQ ID NO: 741566 - RNA, 19 nt, Artificial Sequence
  Description of Artificial Sequence: Synthetic oligonucleotide
ggcaauagaugcugcacuc

SEQ ID NO: 741567 - RNA, 19 nt, Artificial Sequence
  Description of Artificial Sequence: Synthetic oligonucleotide
ucuugacacguggggaaca

SEQ ID NO: 741568 - RNA, 19 nt, Artificial Sequence
  Description of Artificial Sequence: Synthetic oligonucleotide
agcauaccauacauuccuc

SEQ ID NO: 741569 - RNA, 19 nt, Artificial Sequence
  Description of Artificial Sequence: Synthetic oligonucleotide
guacucggccaacuuuacc

SEQ ID NO: 741570 - RNA, 19 nt, Artificial Sequence
  Description of Artificial Sequence: Synthetic oligonucleotide
gauggucacgucugcucca

SEQ ID NO: 741571 - RNA, 19 nt, Artificial Sequence
  Description of Artificial Sequence: Synthetic oligonucleotide
agaacccacuaagaucuca

SEQ ID NO: 741572 - RNA, 19 nt, Artificial Sequence
  Description of Artificial Sequence: Synthetic oligonucleotide
ccuaacaauuugagugugc

SEQ ID NO: 741573 - RNA, 19 nt, Artificial Sequence
  Description of Artificial Sequence: Synthetic oligonucleotide
gucuagcuuagcaccugcg

SEQ ID NO: 741574 - RNA, 19 nt, Artificial Sequence
  Description of Artificial Sequence: Synthetic oligonucleotide
cacguggggaacacaaaga

SEQ ID NO: 741575 - RNA, 19 nt, Artificial Sequence
  Description of Artificial Sequence: Synthetic oligonucleotide
cacugggauuuccucuuag

SEQ ID NO: 741576 - RNA, 19 nt, Artificial Sequence
  Description of Artificial Sequence: Synthetic oligonucleotide
guaccaagucccauuauua

SEQ ID NO: 741577 - RNA, 19 nt, Artificial Sequence
  Description of Artificial Sequence: Synthetic oligonucleotide
aaggugcccuuuauugaca

SEQ ID NO: 741578 - RNA, 19 nt, Artificial Sequence
  Description of Artificial Sequence: Synthetic oligonucleotide
cagacgauccaaacacaca

SEQ ID NO: 741579 - RNA, 19 nt, Artificial Sequence
  Description of Artificial Sequence: Synthetic oligonucleotide
acgcauugcacugggauuu

SEQ ID NO: 741580 - RNA, 19 nt, Artificial Sequence
  Description of Artificial Sequence: Synthetic oligonucleotide
ugcauugcuaauggcugau

SEQ ID NO: 741581 - RNA, 19 nt, Artificial Sequence
  Description of Artificial Sequence: Synthetic oligonucleotide
ucacucauucggucuccac

SEQ ID NO: 741582 - RNA, 19 nt, Artificial Sequence
  Description of Artificial Sequence: Synthetic oligonucleotide
gcuaaucauagaaggacuc

SEQ ID NO: 741583 - RNA, 19 nt, Artificial Sequence
  Description of Artificial Sequence: Synthetic oligonucleotide
ggacuucgauaacagcgcc

SEQ ID NO: 741584 - RNA, 19 nt, Artificial Sequence
  Description of Artificial Sequence: Synthetic oligonucleotide
caucaggcuggcacaguuc

SEQ ID NO: 741585 - RNA, 19 nt, Artificial Sequence
  Description of Artificial Sequence: Synthetic oligonucleotide
augucuuguagcugccgua

SEQ ID NO: 741586 - RNA, 19 nt, Artificial Sequence
  Description of Artificial Sequence: Synthetic oligonucleotide
agcuaacaaaacacucugu

SEQ ID NO: 741587 - RNA, 19 nt, Artificial Sequence
  Description of Artificial Sequence: Synthetic oligonucleotide
agcgugaugcagggcauug

SEQ ID NO: 741588 - RNA, 19 nt, Artificial Sequence
  Description of Artificial Sequence: Synthetic oligonucleotide
aucuuuguccuggacugaa

SEQ ID NO: 741589 - RNA, 19 nt, Artificial Sequence
  Description of Artificial Sequence: Synthetic oligonucleotide
gaacggcucggucuccauc

SEQ ID NO: 741590 - RNA, 19 nt, Artificial Sequence
  Description of Artificial Sequence: Synthetic oligonucleotide
ugagugugcugccguucaa

SEQ ID NO: 741591 - RNA, 19 nt, Artificial Sequence
  Description of Artificial Sequence: Synthetic oligonucleotide
acaaccugaaggugcccuu

SEQ ID NO: 741592 - RNA, 19 nt, Artificial Sequence
  Description of Artificial Sequence: Synthetic oligonucleotide
uucacucauucggucucca

SEQ ID NO: 741593 - RNA, 19 nt, Artificial Sequence
  Description of Artificial Sequence: Synthetic oligonucleotide
auggucacgucugcuccag

SEQ ID NO: 741594 - RNA, 19 nt, Artificial Sequence
  Description of Artificial Sequence: Synthetic oligonucleotide
ugguaacuuuugagaguaa

SEQ ID NO: 741595 - RNA, 19 nt, Artificial Sequence
  Description of Artificial Sequence: Synthetic oligonucleotide
augucuagcuuagcaccug

SEQ ID NO: 741596 - RNA, 19 nt, Artificial Sequence
  Description of Artificial Sequence: Synthetic oligonucleotide
cuccguucaauugccuuuc

SEQ ID NO: 741597 - RNA, 19 nt, Artificial Sequence
  Description of Artificial Sequence: Synthetic oligonucleotide
ggaccaaaagccuaacaau

SEQ ID NO: 741598 - RNA, 19 nt, Artificial Sequence
  Description of Artificial Sequence: Synthetic oligonucleotide
gcagagauccaguggugac

SEQ ID NO: 741599 - RNA, 19 nt, Artificial Sequence
  Description of Artificial Sequence: Synthetic oligonucleotide
aagucgcaauguguccaca

SEQ ID NO: 741600 - RNA, 19 nt, Artificial Sequence
  Description of Artificial Sequence: Synthetic oligonucleotide
augccaccuuggaaacugc

SEQ ID NO: 741601 - RNA, 19 nt, Artificial Sequence
  Description of Artificial Sequence: Synthetic oligonucleotide
uucuuacuuauggcgucau

SEQ ID NO: 741602 - RNA, 19 nt, Artificial Sequence
  Description of Artificial Sequence: Synthetic oligonucleotide
aauugggcauucacucauu

SEQ ID NO: 741603 - RNA, 19 nt, Artificial Sequence
  Description of Artificial Sequence: Synthetic oligonucleotide
aauugccuuucgacaaauu

SEQ ID NO: 741604 - RNA, 19 nt, Artificial Sequence
  Description of Artificial Sequence: Synthetic oligonucleotide
ccgcagcacaugaugaaag

SEQ ID NO: 741605 - RNA, 19 nt, Artificial Sequence
  Description of Artificial Sequence: Synthetic oligonucleotide
gcaggacuucgauaacagc

SEQ ID NO: 741606 - RNA, 19 nt, Artificial Sequence
  Description of Artificial Sequence: Synthetic oligonucleotide
acgucugcguugacauugg

SEQ ID NO: 741607 - RNA, 19 nt, Artificial Sequence
  Description of Artificial Sequence: Synthetic oligonucleotide
uugacacguggggaacaca

SEQ ID NO: 741608 - RNA, 19 nt, Artificial Sequence
  Description of Artificial Sequence: Synthetic oligonucleotide
uagaacccacuaagaucuc

SEQ ID NO: 741609 - RNA, 19 nt, Artificial Sequence
  Description of Artificial Sequence: Synthetic oligonucleotide
uuauggcgucauggagagg

SEQ ID NO: 741610 - RNA, 19 nt, Artificial Sequence
  Description of Artificial Sequence: Synthetic oligonucleotide
guagcugccguagcugaga

SEQ ID NO: 741611 - RNA, 19 nt, Artificial Sequence
  Description of Artificial Sequence: Synthetic oligonucleotide
ccgagaacccacuuggcca

SEQ ID NO: 741612 - RNA, 19 nt, Artificial Sequence
  Description of Artificial Sequence: Synthetic oligonucleotide
ugaacccguuguuguuggu

SEQ ID NO: 741613 - RNA, 19 nt, Artificial Sequence
  Description of Artificial Sequence: Synthetic oligonucleotide
gcuuuagaacccacuaaga

SEQ ID NO: 741614 - RNA, 19 nt, Artificial Sequence
  Description of Artificial Sequence: Synthetic oligonucleotide
gugccacaaacuuccaccu

SEQ ID NO: 741615 - RNA, 19 nt, Artificial Sequence
  Description of Artificial Sequence: Synthetic oligonucleotide
cacugcccgacacugcaca

SEQ ID NO: 741616 - RNA, 19 nt, Artificial Sequence
  Description of Artificial Sequence: Synthetic oligonucleotide
ccaggugcaaggcaucauc

SEQ ID NO: 741617 - RNA, 19 nt, Artificial Sequence
  Description of Artificial Sequence: Synthetic oligonucleotide
uggucacgucugcuccagc

SEQ ID NO: 741618 - RNA, 19 nt, Artificial Sequence
  Description of Artificial Sequence: Synthetic oligonucleotide
uccacggccuugguaacuu

SEQ ID NO: 741619 - RNA, 19 nt, Artificial Sequence
  Description of Artificial Sequence: Synthetic oligonucleotide
agaacccacuuggccacug

SEQ ID NO: 741620 - RNA, 19 nt, Artificial Sequence
  Description of Artificial Sequence: Synthetic oligonucleotide
gguaccaagucccauuauu

SEQ ID NO: 741621 - RNA, 19 nt, Artificial Sequence
  Description of Artificial Sequence: Synthetic oligonucleotide
gacuagcagcuugcauugc

SEQ ID NO: 741622 - RNA, 19 nt, Artificial Sequence
  Description of Artificial Sequence: Synthetic oligonucleotide
aggcggcauggugaacggc

SEQ ID NO: 741623 - RNA, 19 nt, Artificial Sequence
  Description of Artificial Sequence: Synthetic oligonucleotide
gcacccugcguucaaccac

SEQ ID NO: 741624 - RNA, 19 nt, Artificial Sequence
  Description of Artificial Sequence: Synthetic oligonucleotide
auggcgucauggagagggg

SEQ ID NO: 741625 - RNA, 19 nt, Artificial Sequence
  Description of Artificial Sequence: Synthetic oligonucleotide
cugaacccuucccaccgca

SEQ ID NO: 741626 - RNA, 19 nt, Artificial Sequence
  Description of Artificial Sequence: Synthetic oligonucleotide
caacuagcuuuagaaccca

SEQ ID NO: 741627 - RNA, 19 nt, Artificial Sequence
  Description of Artificial Sequence: Synthetic oligonucleotide
cuacaucuacauuuugcuu

SEQ ID NO: 741628 - RNA, 19 nt, Artificial Sequence
  Description of Artificial Sequence: Synthetic oligonucleotide
caauagaugcugcacucuu

SEQ ID NO: 741629 - RNA, 19 nt, Artificial Sequence
  Description of Artificial Sequence: Synthetic oligonucleotide
agcugccguagcugagaca

SEQ ID NO: 741630 - RNA, 19 nt, Artificial Sequence
  Description of Artificial Sequence: Synthetic oligonucleotide
acccguuguuguuggugau

SEQ ID NO: 741631 - RNA, 19 nt, Artificial Sequence
  Description of Artificial Sequence: Synthetic oligonucleotide
cgagaacccacuuggccac

SEQ ID NO: 741632 - RNA, 19 nt, Artificial Sequence
  Description of Artificial Sequence: Synthetic oligonucleotide
caccugcgcggaccaaaag

SEQ ID NO: 741633 - RNA, 19 nt, Artificial Sequence
  Description of Artificial Sequence: Synthetic oligonucleotide
ucccaccgcagcacaugau

SEQ ID NO: 741634 - RNA, 19 nt, Artificial Sequence
  Description of Artificial Sequence: Synthetic oligonucleotide
cagguccgcacugccucgg

SEQ ID NO: 741635 - RNA, 19 nt, Artificial Sequence
  Description of Artificial Sequence: Synthetic oligonucleotide
ggucacgucugcuccagcu

SEQ ID NO: 741636 - RNA, 19 nt, Artificial Sequence
  Description of Artificial Sequence: Synthetic oligonucleotide
guucaaccacugcccgaca

SEQ ID NO: 741637 - RNA, 19 nt, Artificial Sequence
  Description of Artificial Sequence: Synthetic oligonucleotide
cacccugcguucaaccacu

SEQ ID NO: 741638 - RNA, 19 nt, Artificial Sequence
  Description of Artificial Sequence: Synthetic oligonucleotide
cugcacgucugcguugaca

SEQ ID NO: 741639 - RNA, 19 nt, Artificial Sequence
  Description of Artificial Sequence: Synthetic oligonucleotide
cauugaacccguuguuguu

SEQ ID NO: 741640 - RNA, 19 nt, Artificial Sequence
  Description of Artificial Sequence: Synthetic oligonucleotide
ccuucgcuuauugcgagca

SEQ ID NO: 741641 - RNA, 19 nt, Artificial Sequence
  Description of Artificial Sequence: Synthetic oligonucleotide
cacguccccauuggcagca

SEQ ID NO: 741642 - RNA, 19 nt, Artificial Sequence
  Description of Artificial Sequence: Synthetic oligonucleotide
ggacugaaccugcucuuua

SEQ ID NO: 741643 - RNA, 19 nt, Artificial Sequence
  Description of Artificial Sequence: Synthetic oligonucleotide
gccuucgcuuauugcgagc

SEQ ID NO: 741644 - RNA, 19 nt, Artificial Sequence
  Description of Artificial Sequence: Synthetic oligonucleotide
cagagauccaguggugacu

SEQ ID NO: 741645 - RNA, 19 nt, Artificial Sequence
  Description of Artificial Sequence: Synthetic oligonucleotide
gcggaccaaaagccuaaca

SEQ ID NO: 741646 - RNA, 19 nt, Artificial Sequence
  Description of Artificial Sequence: Synthetic oligonucleotide
gccuuaaccagcucuucau

SEQ ID NO: 741647 - RNA, 19 nt, Artificial Sequence
  Description of Artificial Sequence: Synthetic oligonucleotide
cacgcauugcacugggauu

SEQ ID NO: 741648 - RNA, 19 nt, Artificial Sequence
  Description of Artificial Sequence: Synthetic oligonucleotide
gcaggggcgucugccuucg

SEQ ID NO: 741649 - RNA, 19 nt, Artificial Sequence
  Description of Artificial Sequence: Synthetic oligonucleotide
guguggugccucaaagccu

SEQ ID NO: 741650 - RNA, 19 nt, Artificial Sequence
  Description of Artificial Sequence: Synthetic oligonucleotide
cauguuccguggccacaga

SEQ ID NO: 741651 - RNA, 19 nt, Artificial Sequence
  Description of Artificial Sequence: Synthetic oligonucleotide
ccacaugauuauggcggcc

SEQ ID NO: 741652 - RNA, 19 nt, Artificial Sequence
  Description of Artificial Sequence: Synthetic oligonucleotide
cugcccgacacugcacaca

SEQ ID NO: 741653 - RNA, 19 nt, Artificial Sequence
  Description of Artificial Sequence: Synthetic oligonucleotide
ugcgagcauucagguccgc

SEQ ID NO: 741654 - RNA, 19 nt, Artificial Sequence
  Description of Artificial Sequence: Synthetic oligonucleotide
gcacauagucugcuccuua

SEQ ID NO: 741655 - RNA, 19 nt, Artificial Sequence
  Description of Artificial Sequence: Synthetic oligonucleotide
gcaauagaugcugcacucu

SEQ ID NO: 741656 - RNA, 19 nt, Artificial Sequence
  Description of Artificial Sequence: Synthetic oligonucleotide
caccagaugcauugcuaau

SEQ ID NO: 741657 - RNA, 19 nt, Artificial Sequence
  Description of Artificial Sequence: Synthetic oligonucleotide
caauugccuuucgacaaau

SEQ ID NO: 741658 - RNA, 19 nt, Artificial Sequence
  Description of Artificial Sequence: Synthetic oligonucleotide
ggugaacggcucggucucc

SEQ ID NO: 741659 - RNA, 19 nt, Artificial Sequence
  Description of Artificial Sequence: Synthetic oligonucleotide
cugcgcggaccaaaagccu

SEQ ID NO: 741660 - RNA, 19 nt, Artificial Sequence
  Description of Artificial Sequence: Synthetic oligonucleotide
gcauugcuaauggcugauc

SEQ ID NO: 741661 - RNA, 19 nt, Artificial Sequence
  Description of Artificial Sequence: Synthetic oligonucleotide
cccugcguucaaccacugc

SEQ ID NO: 741662 - RNA, 19 nt, Artificial Sequence
  Description of Artificial Sequence: Synthetic oligonucleotide
ccguucaauugccuuucga

SEQ ID NO: 741663 - RNA, 19 nt, Artificial Sequence
  Description of Artificial Sequence: Synthetic oligonucleotide
cccauuggcagcagccuua

SEQ ID NO: 741664 - RNA, 19 nt, Artificial Sequence
  Description of Artificial Sequence: Synthetic oligonucleotide
gugcagcgugaugcagggc

SEQ ID NO: 741665 - RNA, 19 nt, Artificial Sequence
  Description of Artificial Sequence: Synthetic oligonucleotide
acguccccauuggcagcag

SEQ ID NO: 741666 - RNA, 19 nt, Artificial Sequence
  Description of Artificial Sequence: Synthetic oligonucleotide
cgauaugcaggggcgucug

SEQ ID NO: 741667 - RNA, 19 nt, Artificial Sequence
  Description of Artificial Sequence: Synthetic oligonucleotide
gcuuagcaccugcgcggac

SEQ ID NO: 741668 - RNA, 19 nt, Artificial Sequence
  Description of Artificial Sequence: Synthetic oligonucleotide
cuucgcuuauugcgagcau

SEQ ID NO: 741669 - RNA, 19 nt, Artificial Sequence
  Description of Artificial Sequence: Synthetic oligonucleotide
gcguugacauugguguugu

SEQ ID NO: 741670 - RNA, 19 nt, Artificial Sequence
  Description of Artificial Sequence: Synthetic oligonucleotide
gcggcauggugaacggcuc

SEQ ID NO: 741671 - RNA, 19 nt, Artificial Sequence
  Description of Artificial Sequence: Synthetic oligonucleotide
ggggcgucugccuucgcuu

SEQ ID NO: 741672 - RNA, 19 nt, Artificial Sequence
  Description of Artificial Sequence: Synthetic oligonucleotide
ccuccguucaauugccuuu

SEQ ID NO: 741673 - RNA, 19 nt, Artificial Sequence
  Description of Artificial Sequence: Synthetic oligonucleotide
gcgugaugcagggcauuga

SEQ ID NO: 741674 - RNA, 19 nt, Artificial Sequence
  Description of Artificial Sequence: Synthetic oligonucleotide
guggugccucaaagccuca

SEQ ID NO: 741675 - RNA, 19 nt, Artificial Sequence
  Description of Artificial Sequence: Synthetic oligonucleotide
ccucggugcaggacuucga

SEQ ID NO: 741676 - RNA, 19 nt, Artificial Sequence
  Description of Artificial Sequence: Synthetic oligonucleotide
caggggcgucugccuucgc

SEQ ID NO: 741677 - RNA, 19 nt, Artificial Sequence
  Description of Artificial Sequence: Synthetic oligonucleotide
gcgcggaccaaaagccuaa

SEQ ID NO: 741678 - RNA, 19 nt, Artificial Sequence
  Description of Artificial Sequence: Synthetic oligonucleotide
gcacugggauuuccucuua

SEQ ID NO: 741679 - RNA, 19 nt, Artificial Sequence
  Description of Artificial Sequence: Synthetic oligonucleotide
gcgauaugcaggggcgucu

SEQ ID NO: 741680 - RNA, 19 nt, Artificial Sequence
  Description of Artificial Sequence: Synthetic oligonucleotide
gcaccugcgcggaccaaaa

SEQ ID NO: 741681 - RNA, 19 nt, Artificial Sequence
  Description of Artificial Sequence: Synthetic oligonucleotide
gccucaugcaaaggaguau

SEQ ID NO: 741682 - RNA, 19 nt, Artificial Sequence
  Description of Artificial Sequence: Synthetic oligonucleotide
ggguaccaagucccauuau

SEQ ID NO: 741683 - RNA, 19 nt, Artificial Sequence
  Description of Artificial Sequence: Synthetic oligonucleotide
cagcgcccucaucuccaaa

SEQ ID NO: 741684 - RNA, 19 nt, Artificial Sequence
  Description of Artificial Sequence: Synthetic oligonucleotide
cagcaagguguagggccgu

SEQ ID NO: 741685 - RNA, 19 nt, Artificial Sequence
  Description of Artificial Sequence: Synthetic oligonucleotide
cgcggaccaaaagccuaac

SEQ ID NO: 741686 - RNA, 19 nt, Artificial Sequence
  Description of Artificial Sequence: Synthetic oligonucleotide
gcaagguguagggccguuu

SEQ ID NO: 741687 - RNA, 19 nt, Artificial Sequence
  Description of Artificial Sequence: Synthetic oligonucleotide
cagcgugaugcagggcauu

SEQ ID NO: 741688 - RNA, 19 nt, Artificial Sequence
  Description of Artificial Sequence: Synthetic oligonucleotide
gcacgucugcguugacauu

SEQ ID NO: 741689 - RNA, 19 nt, Artificial Sequence
  Description of Artificial Sequence: Synthetic oligonucleotide
gcccgacacugcacacacu

SEQ ID NO: 741690 - RNA, 19 nt, Artificial Sequence
  Description of Artificial Sequence: Synthetic oligonucleotide
cggcucggucuccaucuuu

SEQ ID NO: 741691 - RNA, 19 nt, Artificial Sequence
  Description of Artificial Sequence: Synthetic oligonucleotide
uuagauaagguaaaggacg

SEQ ID NO: 741692 - RNA, 19 nt, Artificial Sequence
  Description of Artificial Sequence: Synthetic oligonucleotide
aaaacauaagcaaugugcc

SEQ ID NO: 741693 - RNA, 19 nt, Artificial Sequence
  Description of Artificial Sequence: Synthetic oligonucleotide
uaaaucuugagcuggaagg

SEQ ID NO: 741694 - RNA, 19 nt, Artificial Sequence
  Description of Artificial Sequence: Synthetic oligonucleotide
aaauuuaacauccuugaga

SEQ ID NO: 741695 - RNA, 19 nt, Artificial Sequence
  Description of Artificial Sequence: Synthetic oligonucleotide
aaucgaaccaucugaauag

SEQ ID NO: 741696 - RNA, 19 nt, Artificial Sequence
  Description of Artificial Sequence: Synthetic oligonucleotide
gaauaguuaaguaagcagg

SEQ ID NO: 741697 - RNA, 19 nt, Artificial Sequence
  Description of Artificial Sequence: Synthetic oligonucleotide
agaacgaauacauugaacu

SEQ ID NO: 741698 - RNA, 19 nt, Artificial Sequence
  Description of Artificial Sequence: Synthetic oligonucleotide
acuguaaccgaguagagag

SEQ ID NO: 741699 - RNA, 19 nt, Artificial Sequence
  Description of Artificial Sequence: Synthetic oligonucleotide
gauuccguacauuucaugg

SEQ ID NO: 741700 - RNA, 19 nt, Artificial Sequence
  Description of Artificial Sequence: Synthetic oligonucleotide
aaaagcugggccuugaaca

SEQ ID NO: 741701 - RNA, 19 nt, Artificial Sequence
  Description of Artificial Sequence: Synthetic oligonucleotide
auguuaaccaugcaagacc

SEQ ID NO: 741702 - RNA, 19 nt, Artificial Sequence
  Description of Artificial Sequence: Synthetic oligonucleotide
uuuaacauccuugagaacu

SEQ ID NO: 741703 - RNA, 19 nt, Artificial Sequence
  Description of Artificial Sequence: Synthetic oligonucleotide
auuuugaccgaaaagagac

SEQ ID NO: 741704 - RNA, 19 nt, Artificial Sequence
  Description of Artificial Sequence: Synthetic oligonucleotide
acucgcaucauuuguaccc

SEQ ID NO: 741705 - RNA, 19 nt, Artificial Sequence
  Description of Artificial Sequence: Synthetic oligonucleotide
aauaauaggugguauacua

SEQ ID NO: 741706 - RNA, 19 nt, Artificial Sequence
  Description of Artificial Sequence: Synthetic oligonucleotide
uauuucaacucuucgaggc

SEQ ID NO: 741707 - RNA, 19 nt, Artificial Sequence
  Description of Artificial Sequence: Synthetic oligonucleotide
ucaguauucaauucuacac

SEQ ID NO: 741708 - RNA, 19 nt, Artificial Sequence
  Description of Artificial Sequence: Synthetic oligonucleotide
aacauaagcaaugugccag

SEQ ID NO: 741709 - RNA, 19 nt, Artificial Sequence
  Description of Artificial Sequence: Synthetic oligonucleotide
gaagaaguuuuauccaugg

SEQ ID NO: 741710 - RNA, 19 nt, Artificial Sequence
  Description of Artificial Sequence: Synthetic oligonucleotide
uuaacuucuugguugauga

SEQ ID NO: 741711 - RNA, 19 nt, Artificial Sequence
  Description of Artificial Sequence: Synthetic oligonucleotide
uguaacaaguguuaccaag

SEQ ID NO: 741712 - RNA, 19 nt, Artificial Sequence
  Description of Artificial Sequence: Synthetic oligonucleotide
ugaagucgcaauuuaagcc

SEQ ID NO: 741713 - RNA, 19 nt, Artificial Sequence
  Description of Artificial Sequence: Synthetic oligonucleotide
auacauaaugaccugaaga

SEQ ID NO: 741714 - RNA, 19 nt, Artificial Sequence
  Description of Artificial Sequence: Synthetic oligonucleotide
gaagucgcaauuuaagccc

SEQ ID NO: 741715 - RNA, 19 nt, Artificial Sequence
  Description of Artificial Sequence: Synthetic oligonucleotide
ugauguacaaagcauuucu

SEQ ID NO: 741716 - RNA, 19 nt, Artificial Sequence
  Description of Artificial Sequence: Synthetic oligonucleotide
uuuaguaauuucuuccuga

SEQ ID NO: 741717 - RNA, 19 nt, Artificial Sequence
  Description of Artificial Sequence: Synthetic oligonucleotide
ugaucaauuaagcuuuucu

SEQ ID NO: 741718 - RNA, 19 nt, Artificial Sequence
  Description of Artificial Sequence: Synthetic oligonucleotide
ucagauuccguacauuuca

SEQ ID NO: 741719 - RNA, 19 nt, Artificial Sequence
  Description of Artificial Sequence: Synthetic oligonucleotide
uguugcaacacucgcauca

SEQ ID NO: 741720 - RNA, 19 nt, Artificial Sequence
  Description of Artificial Sequence: Synthetic oligonucleotide
cauacuuaaccucuuuugg

SEQ ID NO: 741721 - RNA, 19 nt, Artificial Sequence
  Description of Artificial Sequence: Synthetic oligonucleotide
auacuuaaccucuuuuggg

SEQ ID NO: 741722 - RNA, 19 nt, Artificial Sequence
  Description of Artificial Sequence: Synthetic oligonucleotide
aauucguuagauaagguaa

SEQ ID NO: 741723 - RNA, 19 nt, Artificial Sequence
  Description of Artificial Sequence: Synthetic oligonucleotide
accugcauaccuuuuaagg

SEQ ID NO: 741724 - RNA, 19 nt, Artificial Sequence
  Description of Artificial Sequence: Synthetic oligonucleotide
ucauacuuaaccucuuuug

SEQ ID NO: 741725 - RNA, 19 nt, Artificial Sequence
  Description of Artificial Sequence: Synthetic oligonucleotide
aaggguucauacuuaaccu

SEQ ID NO: 741726 - RNA, 19 nt, Artificial Sequence
  Description of Artificial Sequence: Synthetic oligonucleotide
aaaugaucaacaauaacaa

SEQ ID NO: 741727 - RNA, 19 nt, Artificial Sequence
  Description of Artificial Sequence: Synthetic oligonucleotide
aauguuggagacuguuuag

SEQ ID NO: 741728 - RNA, 19 nt, Artificial Sequence
  Description of Artificial Sequence: Synthetic oligonucleotide
uguuaaccaugcaagacca

SEQ ID NO: 741729 - RNA, 19 nt, Artificial Sequence
  Description of Artificial Sequence: Synthetic oligonucleotide
aacaacuaagcugaaguug

SEQ ID NO: 741730 - RNA, 19 nt, Artificial Sequence
  Description of Artificial Sequence: Synthetic oligonucleotide
aauuuaagcccugugaaaa

SEQ ID NO: 741731 - RNA, 19 nt, Artificial Sequence
  Description of Artificial Sequence: Synthetic oligonucleotide
aaauacuugauuguaccca

SEQ ID NO: 741732 - RNA, 19 nt, Artificial Sequence
  Description of Artificial Sequence: Synthetic oligonucleotide
uuuaggcugaugcacaagu

SEQ ID NO: 741733 - RNA, 19 nt, Artificial Sequence
  Description of Artificial Sequence: Synthetic oligonucleotide
uuauuucaacucuucgagg

SEQ ID NO: 741734 - RNA, 19 nt, Artificial Sequence
  Description of Artificial Sequence: Synthetic oligonucleotide
aacgaauacauugaacugu

SEQ ID NO: 741735 - RNA, 19 nt, Artificial Sequence
  Description of Artificial Sequence: Synthetic oligonucleotide
uuagagcucaagauuauaa

SEQ ID NO: 741736 - RNA, 19 nt, Artificial Sequence
  Description of Artificial Sequence: Synthetic oligonucleotide
uaagguaaaggacgggcag

SEQ ID NO: 741737 - RNA, 19 nt, Artificial Sequence
  Description of Artificial Sequence: Synthetic oligonucleotide
auuucaacucuucgaggcc

SEQ ID NO: 741738 - RNA, 19 nt, Artificial Sequence
  Description of Artificial Sequence: Synthetic oligonucleotide
ucugaauaguuaaguaagc

SEQ ID NO: 741739 - RNA, 19 nt, Artificial Sequence
  Description of Artificial Sequence: Synthetic oligonucleotide
uccccugaagcucucaagg

SEQ ID NO: 741740 - RNA, 19 nt, Artificial Sequence
  Description of Artificial Sequence: Synthetic oligonucleotide
ucuagauccuugaauuuug

SEQ ID NO: 741741 - RNA, 19 nt, Artificial Sequence
  Description of Artificial Sequence: Synthetic oligonucleotide
gaaauuuaacauccuugag

SEQ ID NO: 741742 - RNA, 19 nt, Artificial Sequence
  Description of Artificial Sequence: Synthetic oligonucleotide
uguuuaguaauuucuuccu

SEQ ID NO: 741743 - RNA, 19 nt, Artificial Sequence
  Description of Artificial Sequence: Synthetic oligonucleotide
auaaauagcuaaauugaag

SEQ ID NO: 741744 - RNA, 19 nt, Artificial Sequence
  Description of Artificial Sequence: Synthetic oligonucleotide
aucugaauaguuaaguaag

SEQ ID NO: 741745 - RNA, 19 nt, Artificial Sequence
  Description of Artificial Sequence: Synthetic oligonucleotide
aauaguuaaguaagcaggu

SEQ ID NO: 741746 - RNA, 19 nt, Artificial Sequence
  Description of Artificial Sequence: Synthetic oligonucleotide
ugugggaaagccauaugca

SEQ ID NO: 741747 - RNA, 19 nt, Artificial Sequence
  Description of Artificial Sequence: Synthetic oligonucleotide
auaaacaucauugcuaaau

SEQ ID NO: 741748 - RNA, 19 nt, Artificial Sequence
  Description of Artificial Sequence: Synthetic oligonucleotide
aggcccauaaaguaaaaca

SEQ ID NO: 741749 - RNA, 19 nt, Artificial Sequence
  Description of Artificial Sequence: Synthetic oligonucleotide
gaacgaauacauugaacug

SEQ ID NO: 741750 - RNA, 19 nt, Artificial Sequence
  Description of Artificial Sequence: Synthetic oligonucleotide
aaacauaagcaaugugcca

SEQ ID NO: 741751 - RNA, 19 nt, Artificial Sequence
  Description of Artificial Sequence: Synthetic oligonucleotide
auaggugguauacuagaag

SEQ ID NO: 741752 - RNA, 19 nt, Artificial Sequence
  Description of Artificial Sequence: Synthetic oligonucleotide
cugaagucgcaauuuaagc

SEQ ID NO: 741753 - RNA, 19 nt, Artificial Sequence
  Description of Artificial Sequence: Synthetic oligonucleotide
uuugaccgaaaagagacca

SEQ ID NO: 741754 - RNA, 19 nt, Artificial Sequence
  Description of Artificial Sequence: Synthetic oligonucleotide
cugcauaccuuuuaagggc

SEQ ID NO: 741755 - RNA, 19 nt, Artificial Sequence
  Description of Artificial Sequence: Synthetic oligonucleotide
cugugggaaagccauaugc

SEQ ID NO: 741756 - RNA, 19 nt, Artificial Sequence
  Description of Artificial Sequence: Synthetic oligonucleotide
ucuucgaggcccauaaagu

SEQ ID NO: 741757 - RNA, 19 nt, Artificial Sequence
  Description of Artificial Sequence: Synthetic oligonucleotide
ucuguugcaacacucgcau

SEQ ID NO: 741758 - RNA, 19 nt, Artificial Sequence
  Description of Artificial Sequence: Synthetic oligonucleotide
auguacaaagcauuucucu

SEQ ID NO: 741759 - RNA, 19 nt, Artificial Sequence
  Description of Artificial Sequence: Synthetic oligonucleotide
ucuuauugaucacaauuua

SEQ ID NO: 741760 - RNA, 19 nt, Artificial Sequence
  Description of Artificial Sequence: Synthetic oligonucleotide
gcaguagaauaauaggugg

SEQ ID NO: 741761 - RNA, 19 nt, Artificial Sequence
  Description of Artificial Sequence: Synthetic oligonucleotide
aauuuugaccgaaaagaga

SEQ ID NO: 741762 - RNA, 19 nt, Artificial Sequence
  Description of Artificial Sequence: Synthetic oligonucleotide
aucaguauucaauucuaca

SEQ ID NO: 741763 - RNA, 19 nt, Artificial Sequence
  Description of Artificial Sequence: Synthetic oligonucleotide
ucguuagauaagguaaagg

SEQ ID NO: 741764 - RNA, 19 nt, Artificial Sequence
  Description of Artificial Sequence: Synthetic oligonucleotide
acuagaucuucccugguga

SEQ ID NO: 741765 - RNA, 19 nt, Artificial Sequence
  Description of Artificial Sequence: Synthetic oligonucleotide
aacugaucaauuaagcuuu

SEQ ID NO: 741766 - RNA, 19 nt, Artificial Sequence
  Description of Artificial Sequence: Synthetic oligonucleotide
guuagcauccugcugaaga

SEQ ID NO: 741767 - RNA, 19 nt, Artificial Sequence
  Description of Artificial Sequence: Synthetic oligonucleotide
ugauacauaaugaccugaa

SEQ ID NO: 741768 - RNA, 19 nt, Artificial Sequence
  Description of Artificial Sequence: Synthetic oligonucleotide
caagguuuguacaauccac

SEQ ID NO: 741769 - RNA, 19 nt, Artificial Sequence
  Description of Artificial Sequence: Synthetic oligonucleotide
uaguauccacaauuauugg

SEQ ID NO: 741770 - RNA, 19 nt, Artificial Sequence
  Description of Artificial Sequence: Synthetic oligonucleotide
cuaccuuuauacaggguag

SEQ ID NO: 741771 - RNA, 19 nt, Artificial Sequence
  Description of Artificial Sequence: Synthetic oligonucleotide
aucucuaagggcugcagug

SEQ ID NO: 741772 - RNA, 19 nt, Artificial Sequence
  Description of Artificial Sequence: Synthetic oligonucleotide
aggguucauacuuaaccuc

SEQ ID NO: 741773 - RNA, 19 nt, Artificial Sequence
  Description of Artificial Sequence: Synthetic oligonucleotide
cuaggcagcagcucguggg

SEQ ID NO: 741774 - RNA, 19 nt, Artificial Sequence
  Description of Artificial Sequence: Synthetic oligonucleotide
aaacaacuaagcugaaguu

SEQ ID NO: 741775 - RNA, 19 nt, Artificial Sequence
  Description of Artificial Sequence: Synthetic oligonucleotide
uuaguaauuucuuccugaa

SEQ ID NO: 741776 - RNA, 19 nt, Artificial Sequence
  Description of Artificial Sequence: Synthetic oligonucleotide
caaugugccagucuccacc

SEQ ID NO: 741777 - RNA, 19 nt, Artificial Sequence
  Description of Artificial Sequence: Synthetic oligonucleotide
uacuagaagaaguuuuauc

SEQ ID NO: 741778 - RNA, 19 nt, Artificial Sequence
  Description of Artificial Sequence: Synthetic oligonucleotide
uguuaccaagguuuguaca

SEQ ID NO: 741779 - RNA, 19 nt, Artificial Sequence
  Description of Artificial Sequence: Synthetic oligonucleotide
acacucgcaucauuuguac

SEQ ID NO: 741780 - RNA, 19 nt, Artificial Sequence
  Description of Artificial Sequence: Synthetic oligonucleotide
ugcacaaguggccugguuc

SEQ ID NO: 741781 - RNA, 19 nt, Artificial Sequence
  Description of Artificial Sequence: Synthetic oligonucleotide
cucuucgaggcccauaaag

SEQ ID NO: 741782 - RNA, 19 nt, Artificial Sequence
  Description of Artificial Sequence: Synthetic oligonucleotide
uuuugaccgaaaagagacc

SEQ ID NO: 741783 - RNA, 19 nt, Artificial Sequence
  Description of Artificial Sequence: Synthetic oligonucleotide
cauugcuaaaucuugagcu

SEQ ID NO: 741784 - RNA, 19 nt, Artificial Sequence
  Description of Artificial Sequence: Synthetic oligonucleotide
ugcauaccuuuuaagggca

SEQ ID NO: 741785 - RNA, 19 nt, Artificial Sequence
  Description of Artificial Sequence: Synthetic oligonucleotide
uucaguguaccuccuuuca

SEQ ID NO: 741786 - RNA, 19 nt, Artificial Sequence
  Description of Artificial Sequence: Synthetic oligonucleotide
uaggugugcaauaaacauc

SEQ ID NO: 741787 - RNA, 19 nt, Artificial Sequence
  Description of Artificial Sequence: Synthetic oligonucleotide
uccauuauuucaacucuuc

SEQ ID NO: 741788 - RNA, 19 nt, Artificial Sequence
  Description of Artificial Sequence: Synthetic oligonucleotide
aagaaguuuuauccaugga

SEQ ID NO: 741789 - RNA, 19 nt, Artificial Sequence
  Description of Artificial Sequence: Synthetic oligonucleotide
aauuuauuguaaagucaug

SEQ ID NO: 741790 - RNA, 19 nt, Artificial Sequence
  Description of Artificial Sequence: Synthetic oligonucleotide
uuuaagcccugugaaaaga

SEQ ID NO: 741791 - RNA, 19 nt, Artificial Sequence
  Description of Artificial Sequence: Synthetic oligonucleotide
uuugguugcugauucacuu

SEQ ID NO: 741792 - RNA, 19 nt, Artificial Sequence
  Description of Artificial Sequence: Synthetic oligonucleotide
uuggagauucaucaguauu

SEQ ID NO: 741793 - RNA, 19 nt, Artificial Sequence
  Description of Artificial Sequence: Synthetic oligonucleotide
ugguauacuagaagaaguu

SEQ ID NO: 741794 - RNA, 19 nt, Artificial Sequence
  Description of Artificial Sequence: Synthetic oligonucleotide
uuccccuuagagcucaaga

SEQ ID NO: 741795 - RNA, 19 nt, Artificial Sequence
  Description of Artificial Sequence: Synthetic oligonucleotide
uccguacauuucaugguag

SEQ ID NO: 741796 - RNA, 19 nt, Artificial Sequence
  Description of Artificial Sequence: Synthetic oligonucleotide
auuuguacccagcacucgu

SEQ ID NO: 741797 - RNA, 19 nt, Artificial Sequence
  Description of Artificial Sequence: Synthetic oligonucleotide
uagaauaauaggugguaua

SEQ ID NO: 741798 - RNA, 19 nt, Artificial Sequence
  Description of Artificial Sequence: Synthetic oligonucleotide
ggugaguuagcacugcuug

SEQ ID NO: 741799 - RNA, 19 nt, Artificial Sequence
  Description of Artificial Sequence: Synthetic oligonucleotide
auaauaggugguauacuag

SEQ ID NO: 741800 - RNA, 19 nt, Artificial Sequence
  Description of Artificial Sequence: Synthetic oligonucleotide
ucauaguauccacaauuau

SEQ ID NO: 741801 - RNA, 19 nt, Artificial Sequence
  Description of Artificial Sequence: Synthetic oligonucleotide
aaguaagcagguagccggc

SEQ ID NO: 741802 - RNA, 19 nt, Artificial Sequence
  Description of Artificial Sequence: Synthetic oligonucleotide
ucaauucuacaccuucaaa

SEQ ID NO: 741803 - RNA, 19 nt, Artificial Sequence
  Description of Artificial Sequence: Synthetic oligonucleotide
aguuagcacugcuuguaag

SEQ ID NO: 741804 - RNA, 19 nt, Artificial Sequence
  Description of Artificial Sequence: Synthetic oligonucleotide
aggcugaugcacaaguggc

SEQ ID NO: 741805 - RNA, 19 nt, Artificial Sequence
  Description of Artificial Sequence: Synthetic oligonucleotide
guuaccaagguuuguacaa

SEQ ID NO: 741806 - RNA, 19 nt, Artificial Sequence
  Description of Artificial Sequence: Synthetic oligonucleotide
caccauuggagauucauca

SEQ ID NO: 741807 - RNA, 19 nt, Artificial Sequence
  Description of Artificial Sequence: Synthetic oligonucleotide
ugcuuguaagucauaguau

SEQ ID NO: 741808 - RNA, 19 nt, Artificial Sequence
  Description of Artificial Sequence: Synthetic oligonucleotide
uguaccuccuuucaccaua

SEQ ID NO: 741809 - RNA, 19 nt, Artificial Sequence
  Description of Artificial Sequence: Synthetic oligonucleotide
ugaucacaauuuauuguaa

SEQ ID NO: 741810 - RNA, 19 nt, Artificial Sequence
  Description of Artificial Sequence: Synthetic oligonucleotide
ugaugcacaaguggccugg

SEQ ID NO: 741811 - RNA, 19 nt, Artificial Sequence
  Description of Artificial Sequence: Synthetic oligonucleotide
uuucacccaugauacauaa

SEQ ID NO: 741812 - RNA, 19 nt, Artificial Sequence
  Description of Artificial Sequence: Synthetic oligonucleotide
aaaucucuaagggcugcag

SEQ ID NO: 741813 - RNA, 19 nt, Artificial Sequence
  Description of Artificial Sequence: Synthetic oligonucleotide
uucguuagauaagguaaag

SEQ ID NO: 741814 - RNA, 19 nt, Artificial Sequence
  Description of Artificial Sequence: Synthetic oligonucleotide
auuccguacauuucauggu

SEQ ID NO: 741815 - RNA, 19 nt, Artificial Sequence
  Description of Artificial Sequence: Synthetic oligonucleotide
acauugaacuguagcauuc

SEQ ID NO: 741816 - RNA, 19 nt, Artificial Sequence
  Description of Artificial Sequence: Synthetic oligonucleotide
uucagauuccguacauuuc

SEQ ID NO: 741817 - RNA, 19 nt, Artificial Sequence
  Description of Artificial Sequence: Synthetic oligonucleotide
acaugguaacuccauauuu

SEQ ID NO: 741818 - RNA, 19 nt, Artificial Sequence
  Description of Artificial Sequence: Synthetic oligonucleotide
uguuacaaugcugaccuua

SEQ ID NO: 741819 - RNA, 19 nt, Artificial Sequence
  Description of Artificial Sequence: Synthetic oligonucleotide
ugaccuuaucaucaucaaa

SEQ ID NO: 741820 - RNA, 19 nt, Artificial Sequence
  Description of Artificial Sequence: Synthetic oligonucleotide
uuccguacauuucauggua

SEQ ID NO: 741821 - RNA, 19 nt, Artificial Sequence
  Description of Artificial Sequence: Synthetic oligonucleotide
uuagcauccugcugaagau

SEQ ID NO: 741822 - RNA, 19 nt, Artificial Sequence
  Description of Artificial Sequence: Synthetic oligonucleotide
aagcaaugugccagucucc

SEQ ID NO: 741823 - RNA, 19 nt, Artificial Sequence
  Description of Artificial Sequence: Synthetic oligonucleotide
uaaaggacgggcagcuacu

SEQ ID NO: 741824 - RNA, 19 nt, Artificial Sequence
  Description of Artificial Sequence: Synthetic oligonucleotide
agacuguuuaguaauuucu

SEQ ID NO: 741825 - RNA, 19 nt, Artificial Sequence
  Description of Artificial Sequence: Synthetic oligonucleotide
ucaguguaccuccuuucac

SEQ ID NO: 741826 - RNA, 19 nt, Artificial Sequence
  Description of Artificial Sequence: Synthetic oligonucleotide
uccgcaaacugugggaaag

SEQ ID NO: 741827 - RNA, 19 nt, Artificial Sequence
  Description of Artificial Sequence: Synthetic oligonucleotide
uacacgaugagagcaacau

SEQ ID NO: 741828 - RNA, 19 nt, Artificial Sequence
  Description of Artificial Sequence: Synthetic oligonucleotide
caaguguuaccaagguuug

SEQ ID NO: 741829 - RNA, 19 nt, Artificial Sequence
  Description of Artificial Sequence: Synthetic oligonucleotide
aggggaauaaauggacuuc

SEQ ID NO: 741830 - RNA, 19 nt, Artificial Sequence
  Description of Artificial Sequence: Synthetic oligonucleotide
caugguaguuucaaacuca

SEQ ID NO: 741831 - RNA, 19 nt, Artificial Sequence
  Description of Artificial Sequence: Synthetic oligonucleotide
uacuugauuguacccaguu

SEQ ID NO: 741832 - RNA, 19 nt, Artificial Sequence
  Description of Artificial Sequence: Synthetic oligonucleotide
ugguguuacaaugcugacc

SEQ ID NO: 741833 - RNA, 19 nt, Artificial Sequence
  Description of Artificial Sequence: Synthetic oligonucleotide
ugaacaccauuggagauuc

SEQ ID NO: 741834 - RNA, 19 nt, Artificial Sequence
  Description of Artificial Sequence: Synthetic oligonucleotide
gaguuacacgaugagagca

SEQ ID NO: 741835 - RNA, 19 nt, Artificial Sequence
  Description of Artificial Sequence: Synthetic oligonucleotide
uguuggagacuguuuagua

SEQ ID NO: 741836 - RNA, 19 nt, Artificial Sequence
  Description of Artificial Sequence: Synthetic oligonucleotide
cuucuccgcaaacuguggg

SEQ ID NO: 741837 - RNA, 19 nt, Artificial Sequence
  Description of Artificial Sequence: Synthetic oligonucleotide
aauaggugguauacuagaa

SEQ ID NO: 741838 - RNA, 19 nt, Artificial Sequence
  Description of Artificial Sequence: Synthetic oligonucleotide
aguaggugugcaauaaaca

SEQ ID NO: 741839 - RNA, 19 nt, Artificial Sequence
  Description of Artificial Sequence: Synthetic oligonucleotide
caucaguauucaauucuac

SEQ ID NO: 741840 - RNA, 19 nt, Artificial Sequence
  Description of Artificial Sequence: Synthetic oligonucleotide
ucgaggcccauaaaguaaa

SEQ ID NO: 741841 - RNA, 19 nt, Artificial Sequence
  Description of Artificial Sequence: Synthetic oligonucleotide
uugguugaugaaacaacua

SEQ ID NO: 741842 - RNA, 19 nt, Artificial Sequence
  Description of Artificial Sequence: Synthetic oligonucleotide
ugcuaaaucuugagcugga

SEQ ID NO: 741843 - RNA, 19 nt, Artificial Sequence
  Description of Artificial Sequence: Synthetic oligonucleotide
auuugauguacaaagcauu

SEQ ID NO: 741844 - RNA, 19 nt, Artificial Sequence
  Description of Artificial Sequence: Synthetic oligonucleotide
uuacacgaugagagcaaca

SEQ ID NO: 741845 - RNA, 19 nt, Artificial Sequence
  Description of Artificial Sequence: Synthetic oligonucleotide
uaaugaccugaagaacuag

SEQ ID NO: 741846 - RNA, 19 nt, Artificial Sequence
  Description of Artificial Sequence: Synthetic oligonucleotide
agauuccguacauuucaug

SEQ ID NO: 741847 - RNA, 19 nt, Artificial Sequence
  Description of Artificial Sequence: Synthetic oligonucleotide
aguagaauaauagguggua

SEQ ID NO: 741848 - RNA, 19 nt, Artificial Sequence
  Description of Artificial Sequence: Synthetic oligonucleotide
accgaguagagaggcaugg

SEQ ID NO: 741849 - RNA, 19 nt, Artificial Sequence
  Description of Artificial Sequence: Synthetic oligonucleotide
aacugugggaaagccauau

SEQ ID NO: 741850 - RNA, 19 nt, Artificial Sequence
  Description of Artificial Sequence: Synthetic oligonucleotide
cuguaaccgaguagagagg

SEQ ID NO: 741851 - RNA, 19 nt, Artificial Sequence
  Description of Artificial Sequence: Synthetic oligonucleotide
ucugacgaggacggcagag

SEQ ID NO: 741852 - RNA, 19 nt, Artificial Sequence
  Description of Artificial Sequence: Synthetic oligonucleotide
uuagcacugcuuguaaguc

SEQ ID NO: 741853 - RNA, 19 nt, Artificial Sequence
  Description of Artificial Sequence: Synthetic oligonucleotide
ucgcaauuuaagcccugug

SEQ ID NO: 741854 - RNA, 19 nt, Artificial Sequence
  Description of Artificial Sequence: Synthetic oligonucleotide
auaagguaaaggacgggca

SEQ ID NO: 741855 - RNA, 19 nt, Artificial Sequence
  Description of Artificial Sequence: Synthetic oligonucleotide
cacugcuuguaagucauag

SEQ ID NO: 741856 - RNA, 19 nt, Artificial Sequence
  Description of Artificial Sequence: Synthetic oligonucleotide
uacuguaaccgaguagaga

SEQ ID NO: 741857 - RNA, 19 nt, Artificial Sequence
  Description of Artificial Sequence: Synthetic oligonucleotide
agguuuguacaauccacau

SEQ ID NO: 741858 - RNA, 19 nt, Artificial Sequence
  Description of Artificial Sequence: Synthetic oligonucleotide
agaagauuugauguacaaa

SEQ ID NO: 741859 - RNA, 19 nt, Artificial Sequence
  Description of Artificial Sequence: Synthetic oligonucleotide
ccauuuuacuguaaccgag

SEQ ID NO: 741860 - RNA, 19 nt, Artificial Sequence
  Description of Artificial Sequence: Synthetic oligonucleotide
uaaccgaguagagaggcau

SEQ ID NO: 741861 - RNA, 19 nt, Artificial Sequence
  Description of Artificial Sequence: Synthetic oligonucleotide
ccccauuuuacuguaaccg

SEQ ID NO: 741862 - RNA, 19 nt, Artificial Sequence
  Description of Artificial Sequence: Synthetic oligonucleotide
cguuagauaagguaaagga

SEQ ID NO: 741863 - RNA, 19 nt, Artificial Sequence
  Description of Artificial Sequence: Synthetic oligonucleotide
aguguuaccaagguuugua

SEQ ID NO: 741864 - RNA, 19 nt, Artificial Sequence
  Description of Artificial Sequence: Synthetic oligonucleotide
uucacaccucugcauaaau

SEQ ID NO: 741865 - RNA, 19 nt, Artificial Sequence
  Description of Artificial Sequence: Synthetic oligonucleotide
gcaauuuaagcccugugaa

SEQ ID NO: 741866 - RNA, 19 nt, Artificial Sequence
  Description of Artificial Sequence: Synthetic oligonucleotide
gguuuguacaauccacaug

SEQ ID NO: 741867 - RNA, 19 nt, Artificial Sequence
  Description of Artificial Sequence: Synthetic oligonucleotide
uguacccaguugaugggau

SEQ ID NO: 741868 - RNA, 19 nt, Artificial Sequence
  Description of Artificial Sequence: Synthetic oligonucleotide
auuggagauucaucaguau

SEQ ID NO: 741869 - RNA, 19 nt, Artificial Sequence
  Description of Artificial Sequence: Synthetic oligonucleotide
guguuaccaagguuuguac

SEQ ID NO: 741870 - RNA, 19 nt, Artificial Sequence
  Description of Artificial Sequence: Synthetic oligonucleotide
guuagcacugcuuguaagu

SEQ ID NO: 741871 - RNA, 19 nt, Artificial Sequence
  Description of Artificial Sequence: Synthetic oligonucleotide
accgaaaagagaccauuuu

SEQ ID NO: 741872 - RNA, 19 nt, Artificial Sequence
  Description of Artificial Sequence: Synthetic oligonucleotide
uagccggcugaucuuagaa

SEQ ID NO: 741873 - RNA, 19 nt, Artificial Sequence
  Description of Artificial Sequence: Synthetic oligonucleotide
aguucaggcacagaacgaa

SEQ ID NO: 741874 - RNA, 19 nt, Artificial Sequence
  Description of Artificial Sequence: Synthetic oligonucleotide
acaaguaggugugcaauaa

SEQ ID NO: 741875 - RNA, 19 nt, Artificial Sequence
  Description of Artificial Sequence: Synthetic oligonucleotide
cacugaguuacacgaugag

SEQ ID NO: 741876 - RNA, 19 nt, Artificial Sequence
  Description of Artificial Sequence: Synthetic oligonucleotide
cauuuguacccagcacucg

SEQ ID NO: 741877 - RNA, 19 nt, Artificial Sequence
  Description of Artificial Sequence: Synthetic oligonucleotide
agccgcaagauaucuucug

SEQ ID NO: 741878 - RNA, 19 nt, Artificial Sequence
  Description of Artificial Sequence: Synthetic oligonucleotide
gccuugaacaccauuggag

SEQ ID NO: 741879 - RNA, 19 nt, Artificial Sequence
  Description of Artificial Sequence: Synthetic oligonucleotide
guaagucauaguauccaca

SEQ ID NO: 741880 - RNA, 19 nt, Artificial Sequence
  Description of Artificial Sequence: Synthetic oligonucleotide
uguccuuguucacccuucu

SEQ ID NO: 741881 - RNA, 19 nt, Artificial Sequence
  Description of Artificial Sequence: Synthetic oligonucleotide
cacccaugauacauaauga

SEQ ID NO: 741882 - RNA, 19 nt, Artificial Sequence
  Description of Artificial Sequence: Synthetic oligonucleotide
aacuaagcugaaguugauu

SEQ ID NO: 741883 - RNA, 19 nt, Artificial Sequence
  Description of Artificial Sequence: Synthetic oligonucleotide
gccgcaagauaucuucugg

SEQ ID NO: 741884 - RNA, 19 nt, Artificial Sequence
  Description of Artificial Sequence: Synthetic oligonucleotide
caauuuaagcccugugaaa

SEQ ID NO: 741885 - RNA, 19 nt, Artificial Sequence
  Description of Artificial Sequence: Synthetic oligonucleotide
ugaccgaaaagagaccauu

SEQ ID NO: 741886 - RNA, 19 nt, Artificial Sequence
  Description of Artificial Sequence: Synthetic oligonucleotide
acugugggaaagccauaug

SEQ ID NO: 741887 - RNA, 19 nt, Artificial Sequence
  Description of Artificial Sequence: Synthetic oligonucleotide
cacucgcaucauuuguacc

SEQ ID NO: 741888 - RNA, 19 nt, Artificial Sequence
  Description of Artificial Sequence: Synthetic oligonucleotide
agaucuucccuggugaguu

SEQ ID NO: 741889 - RNA, 19 nt, Artificial Sequence
  Description of Artificial Sequence: Synthetic oligonucleotide
gugauauacugugcugaag

SEQ ID NO: 741890 - RNA, 19 nt, Artificial Sequence
  Description of Artificial Sequence: Synthetic oligonucleotide
auucguuagauaagguaaa

SEQ ID NO: 741891 - RNA, 19 nt, Artificial Sequence
  Description of Artificial Sequence: Synthetic oligonucleotide
uacaauccacaugguaacu

SEQ ID NO: 741892 - RNA, 19 nt, Artificial Sequence
  Description of Artificial Sequence: Synthetic oligonucleotide
uugaccgaaaagagaccau

SEQ ID NO: 741893 - RNA, 19 nt, Artificial Sequence
  Description of Artificial Sequence: Synthetic oligonucleotide
ucuccgcaaacugugggaa

SEQ ID NO: 741894 - RNA, 19 nt, Artificial Sequence
  Description of Artificial Sequence: Synthetic oligonucleotide
gaggcccauaaaguaaaac

SEQ ID NO: 741895 - RNA, 19 nt, Artificial Sequence
  Description of Artificial Sequence: Synthetic oligonucleotide
caccugcauaccuuuuaag

SEQ ID NO: 741896 - RNA, 19 nt, Artificial Sequence
  Description of Artificial Sequence: Synthetic oligonucleotide
uuaccaagguuuguacaau

SEQ ID NO: 741897 - RNA, 19 nt, Artificial Sequence
  Description of Artificial Sequence: Synthetic oligonucleotide
guauacuagaagaaguuuu

SEQ ID NO: 741898 - RNA, 19 nt, Artificial Sequence
  Description of Artificial Sequence: Synthetic oligonucleotide
caccucugcauaaauagcu

SEQ ID NO: 741899 - RNA, 19 nt, Artificial Sequence
  Description of Artificial Sequence: Synthetic oligonucleotide
gucauaguauccacaauua

SEQ ID NO: 741900 - RNA, 19 nt, Artificial Sequence
  Description of Artificial Sequence: Synthetic oligonucleotide
cuagauccuugaauuuuga

SEQ ID NO: 741901 - RNA, 19 nt, Artificial Sequence
  Description of Artificial Sequence: Synthetic oligonucleotide
auuugguugcugauucacu

SEQ ID NO: 741902 - RNA, 19 nt, Artificial Sequence
  Description of Artificial Sequence: Synthetic oligonucleotide
cuucgaggcccauaaagua

SEQ ID NO: 741903 - RNA, 19 nt, Artificial Sequence
  Description of Artificial Sequence: Synthetic oligonucleotide
auaguuaaguaagcaggua

SEQ ID NO: 741904 - RNA, 19 nt, Artificial Sequence
  Description of Artificial Sequence: Synthetic oligonucleotide
guuacacgaugagagcaac

SEQ ID NO: 741905 - RNA, 19 nt, Artificial Sequence
  Description of Artificial Sequence: Synthetic oligonucleotide
cauuucaugguaguuucaa

SEQ ID NO: 741906 - RNA, 19 nt, Artificial Sequence
  Description of Artificial Sequence: Synthetic oligonucleotide
auguaacaaguguuaccaa

SEQ ID NO: 741907 - RNA, 19 nt, Artificial Sequence
  Description of Artificial Sequence: Synthetic oligonucleotide
uuucacaccucugcauaaa

SEQ ID NO: 741908 - RNA, 19 nt, Artificial Sequence
  Description of Artificial Sequence: Synthetic oligonucleotide
gcaacacucgcaucauuug

SEQ ID NO: 741909 - RNA, 19 nt, Artificial Sequence
  Description of Artificial Sequence: Synthetic oligonucleotide
guacccaguugaugggaug

SEQ ID NO: 741910 - RNA, 19 nt, Artificial Sequence
  Description of Artificial Sequence: Synthetic oligonucleotide
acgaauacauugaacugua

SEQ ID NO: 741911 - RNA, 19 nt, Artificial Sequence
  Description of Artificial Sequence: Synthetic oligonucleotide
gagauucaucaguauucaa

SEQ ID NO: 741912 - RNA, 19 nt, Artificial Sequence
  Description of Artificial Sequence: Synthetic oligonucleotide
ugguucuguucuccuuugu

SEQ ID NO: 741913 - RNA, 19 nt, Artificial Sequence
  Description of Artificial Sequence: Synthetic oligonucleotide
aaccgaguagagaggcaug

SEQ ID NO: 741914 - RNA, 19 nt, Artificial Sequence
  Description of Artificial Sequence: Synthetic oligonucleotide
cugaugcacaaguggccug

SEQ ID NO: 741915 - RNA, 19 nt, Artificial Sequence
  Description of Artificial Sequence: Synthetic oligonucleotide
aguuacacgaugagagcaa

SEQ ID NO: 741916 - RNA, 19 nt, Artificial Sequence
  Description of Artificial Sequence: Synthetic oligonucleotide
cagacagccgcaagauauc

SEQ ID NO: 741917 - RNA, 19 nt, Artificial Sequence
  Description of Artificial Sequence: Synthetic oligonucleotide
gccggcugaucuuagaaga

SEQ ID NO: 741918 - RNA, 19 nt, Artificial Sequence
  Description of Artificial Sequence: Synthetic oligonucleotide
agacagccgcaagauaucu

SEQ ID NO: 741919 - RNA, 19 nt, Artificial Sequence
  Description of Artificial Sequence: Synthetic oligonucleotide
gcauucauguaacaagugu

SEQ ID NO: 741920 - RNA, 19 nt, Artificial Sequence
  Description of Artificial Sequence: Synthetic oligonucleotide
uagcacccaaacguaauuu

SEQ ID NO: 741921 - RNA, 19 nt, Artificial Sequence
  Description of Artificial Sequence: Synthetic oligonucleotide
caguagaauaauagguggu

SEQ ID NO: 741922 - RNA, 19 nt, Artificial Sequence
  Description of Artificial Sequence: Synthetic oligonucleotide
ggggaauaaauggacuuca

SEQ ID NO: 741923 - RNA, 19 nt, Artificial Sequence
  Description of Artificial Sequence: Synthetic oligonucleotide
ggcaaggggaauaaaugga

SEQ ID NO: 741924 - RNA, 19 nt, Artificial Sequence
  Description of Artificial Sequence: Synthetic oligonucleotide
aggugguauacuagaagaa

SEQ ID NO: 741925 - RNA, 19 nt, Artificial Sequence
  Description of Artificial Sequence: Synthetic oligonucleotide
gaguucaggcacagaacga

SEQ ID NO: 741926 - RNA, 19 nt, Artificial Sequence
  Description of Artificial Sequence: Synthetic oligonucleotide
agagagcuaggcagcagcu

SEQ ID NO: 741927 - RNA, 19 nt, Artificial Sequence
  Description of Artificial Sequence: Synthetic oligonucleotide
ggucugacgaggacggcag

SEQ ID NO: 741928 - RNA, 19 nt, Artificial Sequence
  Description of Artificial Sequence: Synthetic oligonucleotide
cugaccuuaucaucaucaa

SEQ ID NO: 741929 - RNA, 19 nt, Artificial Sequence
  Description of Artificial Sequence: Synthetic oligonucleotide
cugaucaauuaagcuuuuc

SEQ ID NO: 741930 - RNA, 19 nt, Artificial Sequence
  Description of Artificial Sequence: Synthetic oligonucleotide
gcacucguuagcauccugc

SEQ ID NO: 741931 - RNA, 19 nt, Artificial Sequence
  Description of Artificial Sequence: Synthetic oligonucleotide
aguaagcagguagccggcu

SEQ ID NO: 741932 - RNA, 19 nt, Artificial Sequence
  Description of Artificial Sequence: Synthetic oligonucleotide
cgcaagauaucuucuggug

SEQ ID NO: 741933 - RNA, 19 nt, Artificial Sequence
  Description of Artificial Sequence: Synthetic oligonucleotide
augcugaccuuaucaucau

SEQ ID NO: 741934 - RNA, 19 nt, Artificial Sequence
  Description of Artificial Sequence: Synthetic oligonucleotide
cucucaaggcaccugcaua

SEQ ID NO: 741935 - RNA, 19 nt, Artificial Sequence
  Description of Artificial Sequence: Synthetic oligonucleotide
cuucuaguuucuguugcaa

SEQ ID NO: 741936 - RNA, 19 nt, Artificial Sequence
  Description of Artificial Sequence: Synthetic oligonucleotide
acauuucaugguaguuuca

SEQ ID NO: 741937 - RNA, 19 nt, Artificial Sequence
  Description of Artificial Sequence: Synthetic oligonucleotide
cuucugguguuacaaugcu

SEQ ID NO: 741938 - RNA, 19 nt, Artificial Sequence
  Description of Artificial Sequence: Synthetic oligonucleotide
auacuugauuguacccagu

SEQ ID NO: 741939 - RNA, 19 nt, Artificial Sequence
  Description of Artificial Sequence: Synthetic oligonucleotide
ggcagcuacugaaugguga

SEQ ID NO: 741940 - RNA, 19 nt, Artificial Sequence
  Description of Artificial Sequence: Synthetic oligonucleotide
caacacucgcaucauuugu

SEQ ID NO: 741941 - RNA, 19 nt, Artificial Sequence
  Description of Artificial Sequence: Synthetic oligonucleotide
guuacaaugcugaccuuau

SEQ ID NO: 741942 - RNA, 19 nt, Artificial Sequence
  Description of Artificial Sequence: Synthetic oligonucleotide
cucgcaucauuuguaccca

SEQ ID NO: 741943 - RNA, 19 nt, Artificial Sequence
  Description of Artificial Sequence: Synthetic oligonucleotide
cuaagcugaaguugauuuu

SEQ ID NO: 741944 - RNA, 19 nt, Artificial Sequence
  Description of Artificial Sequence: Synthetic oligonucleotide
cuguugcaacacucgcauc

SEQ ID NO: 741945 - RNA, 19 nt, Artificial Sequence
  Description of Artificial Sequence: Synthetic oligonucleotide
augcaagaaauaagcuuuu

SEQ ID NO: 741946 - RNA, 19 nt, Artificial Sequence
  Description of Artificial Sequence: Synthetic oligonucleotide
ggcccauaaaguaaaacau

SEQ ID NO: 741947 - RNA, 19 nt, Artificial Sequence
  Description of Artificial Sequence: Synthetic oligonucleotide
guagccggcugaucuuaga

SEQ ID NO: 741948 - RNA, 19 nt, Artificial Sequence
  Description of Artificial Sequence: Synthetic oligonucleotide
guaaccgaguagagaggca

SEQ ID NO: 741949 - RNA, 19 nt, Artificial Sequence
  Description of Artificial Sequence: Synthetic oligonucleotide
ggcgggagaggccggcgcg

SEQ ID NO: 741950 - RNA, 19 nt, Artificial Sequence
  Description of Artificial Sequence: Synthetic oligonucleotide
acccuucuccgcaaacugu

SEQ ID NO: 741951 - RNA, 19 nt, Artificial Sequence
  Description of Artificial Sequence: Synthetic oligonucleotide
ccagacagccgcaagauau

SEQ ID NO: 741952 - RNA, 19 nt, Artificial Sequence
  Description of Artificial Sequence: Synthetic oligonucleotide
gcaaacugugggaaagcca

SEQ ID NO: 741953 - RNA, 19 nt, Artificial Sequence
  Description of Artificial Sequence: Synthetic oligonucleotide
guagcacccaaacguaauu

SEQ ID NO: 741954 - RNA, 19 nt, Artificial Sequence
  Description of Artificial Sequence: Synthetic oligonucleotide
aggguagcacccaaacgua

SEQ ID NO: 741955 - RNA, 19 nt, Artificial Sequence
  Description of Artificial Sequence: Synthetic oligonucleotide
ggagaggccggcgcggaag

SEQ ID NO: 741956 - RNA, 19 nt, Artificial Sequence
  Description of Artificial Sequence: Synthetic oligonucleotide
aucuaccuuuauacagggu

SEQ ID NO: 741957 - RNA, 19 nt, Artificial Sequence
  Description of Artificial Sequence: Synthetic oligonucleotide
agucgcaauuuaagcccug

SEQ ID NO: 741958 - RNA, 19 nt, Artificial Sequence
  Description of Artificial Sequence: Synthetic oligonucleotide
cugacgaggacggcagaga

SEQ ID NO: 741959 - RNA, 19 nt, Artificial Sequence
  Description of Artificial Sequence: Synthetic oligonucleotide
gcacugaguuacacgauga

SEQ ID NO: 741960 - RNA, 19 nt, Artificial Sequence
  Description of Artificial Sequence: Synthetic oligonucleotide
gaccgaaaagagaccauuu

SEQ ID NO: 741961 - RNA, 19 nt, Artificial Sequence
  Description of Artificial Sequence: Synthetic oligonucleotide
auacaggguagcacccaaa

SEQ ID NO: 741962 - RNA, 19 nt, Artificial Sequence
  Description of Artificial Sequence: Synthetic oligonucleotide
gcaccugcauaccuuuuaa

SEQ ID NO: 741963 - RNA, 19 nt, Artificial Sequence
  Description of Artificial Sequence: Synthetic oligonucleotide
acugaucaauuaagcuuuu

SEQ ID NO: 741964 - RNA, 19 nt, Artificial Sequence
  Description of Artificial Sequence: Synthetic oligonucleotide
gggauguggacagcagcac

SEQ ID NO: 741965 - RNA, 19 nt, Artificial Sequence
  Description of Artificial Sequence: Synthetic oligonucleotide
ucaacucuucgaggcccau

SEQ ID NO: 741966 - RNA, 19 nt, Artificial Sequence
  Description of Artificial Sequence: Synthetic oligonucleotide
agguagccggcugaucuua

SEQ ID NO: 741967 - RNA, 19 nt, Artificial Sequence
  Description of Artificial Sequence: Synthetic oligonucleotide
gcaaugugccagucuccac

SEQ ID NO: 741968 - RNA, 19 nt, Artificial Sequence
  Description of Artificial Sequence: Synthetic oligonucleotide
gggucugacgaggacggca

SEQ ID NO: 741969 - RNA, 19 nt, Artificial Sequence
  Description of Artificial Sequence: Synthetic oligonucleotide
gguagccggcugaucuuag

SEQ ID NO: 741970 - RNA, 19 nt, Artificial Sequence
  Description of Artificial Sequence: Synthetic oligonucleotide
cuccgcaaacugugggaaa

SEQ ID NO: 741971 - RNA, 19 nt, Artificial Sequence
  Description of Artificial Sequence: Synthetic oligonucleotide
cagauuccguacauuucau

SEQ ID NO: 741972 - RNA, 19 nt, Artificial Sequence
  Description of Artificial Sequence: Synthetic oligonucleotide
gucgcaauuuaagcccugu

SEQ ID NO: 741973 - RNA, 19 nt, Artificial Sequence
  Description of Artificial Sequence: Synthetic oligonucleotide
guauucaauucuacaccuu

SEQ ID NO: 741974 - RNA, 19 nt, Artificial Sequence
  Description of Artificial Sequence: Synthetic oligonucleotide
guugcaacacucgcaucau

SEQ ID NO: 741975 - RNA, 19 nt, Artificial Sequence
  Description of Artificial Sequence: Synthetic oligonucleotide
gcuaaaucuugagcuggaa

SEQ ID NO: 741976 - RNA, 19 nt, Artificial Sequence
  Description of Artificial Sequence: Synthetic oligonucleotide
caacuaagcugaaguugau

SEQ ID NO: 741977 - RNA, 19 nt, Artificial Sequence
  Description of Artificial Sequence: Synthetic oligonucleotide
ccgaguagagaggcauggc

SEQ ID NO: 741978 - RNA, 19 nt, Artificial Sequence
  Description of Artificial Sequence: Synthetic oligonucleotide
cagccgcaagauaucuucu

SEQ ID NO: 741979 - RNA, 19 nt, Artificial Sequence
  Description of Artificial Sequence: Synthetic oligonucleotide
cacaauuauuggagccaau

SEQ ID NO: 741980 - RNA, 19 nt, Artificial Sequence
  Description of Artificial Sequence: Synthetic oligonucleotide
ccgcaaacugugggaaagc

SEQ ID NO: 741981 - RNA, 19 nt, Artificial Sequence
  Description of Artificial Sequence: Synthetic oligonucleotide
ccacaauuauuggagccaa

SEQ ID NO: 741982 - RNA, 19 nt, Artificial Sequence
  Description of Artificial Sequence: Synthetic oligonucleotide
gguagcacccaaacguaau

SEQ ID NO: 741983 - RNA, 19 nt, Artificial Sequence
  Description of Artificial Sequence: Synthetic oligonucleotide
gggcagcuacugaauggug

SEQ ID NO: 741984 - RNA, 19 nt, Artificial Sequence
  Description of Artificial Sequence: Synthetic oligonucleotide
ggguagcacccaaacguaa

SEQ ID NO: 741985 - RNA, 19 nt, Artificial Sequence
  Description of Artificial Sequence: Synthetic oligonucleotide
ggcgcggaaggcugggucu

SEQ ID NO: 741986 - RNA, 19 nt, Artificial Sequence
  Description of Artificial Sequence: Synthetic oligonucleotide
caccagacagccgcaagau

SEQ ID NO: 741987 - RNA, 19 nt, Artificial Sequence
  Description of Artificial Sequence: Synthetic oligonucleotide
guguaccuccuuucaccau

SEQ ID NO: 741988 - RNA, 19 nt, Artificial Sequence
  Description of Artificial Sequence: Synthetic oligonucleotide
gacagccgcaagauaucuu

SEQ ID NO: 741989 - RNA, 19 nt, Artificial Sequence
  Description of Artificial Sequence: Synthetic oligonucleotide
ccguacauuucaugguagu

SEQ ID NO: 741990 - RNA, 19 nt, Artificial Sequence
  Description of Artificial Sequence: Synthetic oligonucleotide
gcgcggaaggcugggucug

SEQ ID NO: 741991 - RNA, 19 nt, Artificial Sequence
  Description of Artificial Sequence: Synthetic oligonucleotide
gguaaaggacgggcagcua

SEQ ID NO: 741992 - RNA, 19 nt, Artificial Sequence
  Description of Artificial Sequence: Synthetic oligonucleotide
cagguagccggcugaucuu

SEQ ID NO: 741993 - RNA, 19 nt, Artificial Sequence
  Description of Artificial Sequence: Synthetic oligonucleotide
cugcaauguuggagacugu

SEQ ID NO: 741994 - RNA, 19 nt, Artificial Sequence
  Description of Artificial Sequence: Synthetic oligonucleotide
ggcacagaacgaauacauu

SEQ ID NO: 741995 - RNA, 19 nt, Artificial Sequence
  Description of Artificial Sequence: Synthetic oligonucleotide
cagcacucguuagcauccu

SEQ ID NO: 741996 - RNA, 19 nt, Artificial Sequence
  Description of Artificial Sequence: Synthetic oligonucleotide
aaaaccaagagauagggug

SEQ ID NO: 741997 - RNA, 19 nt, Artificial Sequence
  Description of Artificial Sequence: Synthetic oligonucleotide
auagguaugagguugcugc

SEQ ID NO: 741998 - RNA, 19 nt, Artificial Sequence
  Description of Artificial Sequence: Synthetic oligonucleotide
uaagcuaugagcagguagg

SEQ ID NO: 741999 - RNA, 19 nt, Artificial Sequence
  Description of Artificial Sequence: Synthetic oligonucleotide
aaguaaaggauccagcugu

SEQ ID NO: 742000 - RNA, 19 nt, Artificial Sequence
  Description of Artificial Sequence: Synthetic oligonucleotide
gauauaguugcccauggag

SEQ ID NO: 742001 - RNA, 19 nt, Artificial Sequence
  Description of Artificial Sequence: Synthetic oligonucleotide
augggcgucacguugauac

SEQ ID NO: 742002 - RNA, 19 nt, Artificial Sequence
  Description of Artificial Sequence: Synthetic oligonucleotide
aaccugagaaacuguaaac

SEQ ID NO: 742003 - RNA, 19 nt, Artificial Sequence
  Description of Artificial Sequence: Synthetic oligonucleotide
acaugcgaagcucaaaugg

SEQ ID NO: 742004 - RNA, 19 nt, Artificial Sequence
  Description of Artificial Sequence: Synthetic oligonucleotide
uauaggaugcccaggagug

SEQ ID NO: 742005 - RNA, 19 nt, Artificial Sequence
  Description of Artificial Sequence: Synthetic oligonucleotide
aagucauacagguaguagu

SEQ ID NO: 742006 - RNA, 19 nt, Artificial Sequence
  Description of Artificial Sequence: Synthetic oligonucleotide
ucucuuugucuucauauag

SEQ ID NO: 742007 - RNA, 19 nt, Artificial Sequence
  Description of Artificial Sequence: Synthetic oligonucleotide
gaagcuauagaagauggcc

SEQ ID NO: 742008 - RNA, 19 nt, Artificial Sequence
  Description of Artificial Sequence: Synthetic oligonucleotide
aaaccaagagauagggugc

SEQ ID NO: 742009 - RNA, 19 nt, Artificial Sequence
  Description of Artificial Sequence: Synthetic oligonucleotide
aagcucaaauggaagaagc

SEQ ID NO: 742010 - RNA, 19 nt, Artificial Sequence
  Description of Artificial Sequence: Synthetic oligonucleotide
ucacgcacguguuugaagg

SEQ ID NO: 742011 - RNA, 19 nt, Artificial Sequence
  Description of Artificial Sequence: Synthetic oligonucleotide
aagaggaccucaaagccgc

SEQ ID NO: 742012 - RNA, 19 nt, Artificial Sequence
  Description of Artificial Sequence: Synthetic oligonucleotide
aaaaccuagauaagcacag

SEQ ID NO: 742013 - RNA, 19 nt, Artificial Sequence
  Description of Artificial Sequence: Synthetic oligonucleotide
aaccagugcaggcaaagag

SEQ ID NO: 742014 - RNA, 19 nt, Artificial Sequence
  Description of Artificial Sequence: Synthetic oligonucleotide
auacccaucagcaucuugc

SEQ ID NO: 742015 - RNA, 19 nt, Artificial Sequence
  Description of Artificial Sequence: Synthetic oligonucleotide
gaugccguggcucuuagug

SEQ ID NO: 742016 - RNA, 19 nt, Artificial Sequence
  Description of Artificial Sequence: Synthetic oligonucleotide
ucuucauauaggaugccca

SEQ ID NO: 742017 - RNA, 19 nt, Artificial Sequence
  Description of Artificial Sequence: Synthetic oligonucleotide
ucuacaacaaugagguuuc

SEQ ID NO: 742018 - RNA, 19 nt, Artificial Sequence
  Description of Artificial Sequence: Synthetic oligonucleotide
guacucauaguacuucugg

SEQ ID NO: 742019 - RNA, 19 nt, Artificial Sequence
  Description of Artificial Sequence: Synthetic oligonucleotide
aaccuagauaagcacaggu

SEQ ID NO: 742020 - RNA, 19 nt, Artificial Sequence
  Description of Artificial Sequence: Synthetic oligonucleotide
uaaucggaagucacgcacg

SEQ ID NO: 742021 - RNA, 19 nt, Artificial Sequence
  Description of Artificial Sequence: Synthetic oligonucleotide
aucgauguccggcagcccc

SEQ ID NO: 742022 - RNA, 19 nt, Artificial Sequence
  Description of Artificial Sequence: Synthetic oligonucleotide
acaaaguaaaggauccagc

SEQ ID NO: 742023 - RNA, 19 nt, Artificial Sequence
  Description of Artificial Sequence: Synthetic oligonucleotide
guaagcuaugagcagguag

SEQ ID NO: 742024 - RNA, 19 nt, Artificial Sequence
  Description of Artificial Sequence: Synthetic oligonucleotide
uguaguugggguacgcgcc

SEQ ID NO: 742025 - RNA, 19 nt, Artificial Sequence
  Description of Artificial Sequence: Synthetic oligonucleotide
uuuauagugggaguacuca

SEQ ID NO: 742026 - RNA, 19 nt, Artificial Sequence
  Description of Artificial Sequence: Synthetic oligonucleotide
guugauacccaucagcauc

SEQ ID NO: 742027 - RNA, 19 nt, Artificial Sequence
  Description of Artificial Sequence: Synthetic oligonucleotide
aguccgguuuuguugaggg

SEQ ID NO: 742028 - RNA, 19 nt, Artificial Sequence
  Description of Artificial Sequence: Synthetic oligonucleotide
aguugcaucugcaggaggc

SEQ ID NO: 742029 - RNA, 19 nt, Artificial Sequence
  Description of Artificial Sequence: Synthetic oligonucleotide
uucacguugaacagugugu

SEQ ID NO: 742030 - RNA, 19 nt, Artificial Sequence
  Description of Artificial Sequence: Synthetic oligonucleotide
auauaggaugcccaggagu

SEQ ID NO: 742031 - RNA, 19 nt, Artificial Sequence
  Description of Artificial Sequence: Synthetic oligonucleotide
uguaguagcguucccagua

SEQ ID NO: 742032 - RNA, 19 nt, Artificial Sequence
  Description of Artificial Sequence: Synthetic oligonucleotide
cuugcuaucgauguccggc

SEQ ID NO: 742033 - RNA, 19 nt, Artificial Sequence
  Description of Artificial Sequence: Synthetic oligonucleotide
gaagauguugccccagccc

SEQ ID NO: 742034 - RNA, 19 nt, Artificial Sequence
  Description of Artificial Sequence: Synthetic oligonucleotide
guaguugguagagacaaag

SEQ ID NO: 742035 - RNA, 19 nt, Artificial Sequence
  Description of Artificial Sequence: Synthetic oligonucleotide
agugggaguacucauagua

SEQ ID NO: 742036 - RNA, 19 nt, Artificial Sequence
  Description of Artificial Sequence: Synthetic oligonucleotide
uugauacccaucagcaucu

SEQ ID NO: 742037 - RNA, 19 nt, Artificial Sequence
  Description of Artificial Sequence: Synthetic oligonucleotide
uagcguucccaguaguugg

SEQ ID NO: 742038 - RNA, 19 nt, Artificial Sequence
  Description of Artificial Sequence: Synthetic oligonucleotide
ugccaccagugauagaugg

SEQ ID NO: 742039 - RNA, 19 nt, Artificial Sequence
  Description of Artificial Sequence: Synthetic oligonucleotide
cucaucauagugcaggauc

SEQ ID NO: 742040 - RNA, 19 nt, Artificial Sequence
  Description of Artificial Sequence: Synthetic oligonucleotide
uaaaggauccagcugugau

SEQ ID NO: 742041 - RNA, 19 nt, Artificial Sequence
  Description of Artificial Sequence: Synthetic oligonucleotide
uccugcucuuuauaguggg

SEQ ID NO: 742042 - RNA, 19 nt, Artificial Sequence
  Description of Artificial Sequence: Synthetic oligonucleotide
ugcgaagcucaaauggaag

SEQ ID NO: 742043 - RNA, 19 nt, Artificial Sequence
  Description of Artificial Sequence: Synthetic oligonucleotide
aagagauagggugcguggg

SEQ ID NO: 742044 - RNA, 19 nt, Artificial Sequence
  Description of Artificial Sequence: Synthetic oligonucleotide
agugccgcagcucuucacg

SEQ ID NO: 742045 - RNA, 19 nt, Artificial Sequence
  Description of Artificial Sequence: Synthetic oligonucleotide
agguagacgccauagguga

SEQ ID NO: 742046 - RNA, 19 nt, Artificial Sequence
  Description of Artificial Sequence: Synthetic oligonucleotide
uaggucucaucauagugca

SEQ ID NO: 742047 - RNA, 19 nt, Artificial Sequence
  Description of Artificial Sequence: Synthetic oligonucleotide
ggaaaaccaagagauaggg

SEQ ID NO: 742048 - RNA, 19 nt, Artificial Sequence
  Description of Artificial Sequence: Synthetic oligonucleotide
guaaucggaagucacgcac

SEQ ID NO: 742049 - RNA, 19 nt, Artificial Sequence
  Description of Artificial Sequence: Synthetic oligonucleotide
aagcuaugagcagguaggc

SEQ ID NO: 742050 - RNA, 19 nt, Artificial Sequence
  Description of Artificial Sequence: Synthetic oligonucleotide
aggccagccgcucuagucc

SEQ ID NO: 742051 - RNA, 19 nt, Artificial Sequence
  Description of Artificial Sequence: Synthetic oligonucleotide
gauaagcacagguguguag

SEQ ID NO: 742052 - RNA, 19 nt, Artificial Sequence
  Description of Artificial Sequence: Synthetic oligonucleotide
ucaaagccgcuguagauaa

SEQ ID NO: 742053 - RNA, 19 nt, Artificial Sequence
  Description of Artificial Sequence: Synthetic oligonucleotide
uugaagccggucaggaugc

SEQ ID NO: 742054 - RNA, 19 nt, Artificial Sequence
  Description of Artificial Sequence: Synthetic oligonucleotide
uaguacuucugggacaucc

SEQ ID NO: 742055 - RNA, 19 nt, Artificial Sequence
  Description of Artificial Sequence: Synthetic oligonucleotide
aaccaagagauagggugcg

SEQ ID NO: 742056 - RNA, 19 nt, Artificial Sequence
  Description of Artificial Sequence: Synthetic oligonucleotide
aggaaguaaaucaugggca

SEQ ID NO: 742057 - RNA, 19 nt, Artificial Sequence
  Description of Artificial Sequence: Synthetic oligonucleotide
uagauaaagaagggcacca

SEQ ID NO: 742058 - RNA, 19 nt, Artificial Sequence
  Description of Artificial Sequence: Synthetic oligonucleotide
ucauaguacuucugggaca

SEQ ID NO: 742059 - RNA, 19 nt, Artificial Sequence
  Description of Artificial Sequence: Synthetic oligonucleotide
gaagcucaaauggaagaag

SEQ ID NO: 742060 - RNA, 19 nt, Artificial Sequence
  Description of Artificial Sequence: Synthetic oligonucleotide
cucuucacguugaacagug

SEQ ID NO: 742061 - RNA, 19 nt, Artificial Sequence
  Description of Artificial Sequence: Synthetic oligonucleotide
aagcuauagaagauggccu

SEQ ID NO: 742062 - RNA, 19 nt, Artificial Sequence
  Description of Artificial Sequence: Synthetic oligonucleotide
uccgguuuuguugagggca

SEQ ID NO: 742063 - RNA, 19 nt, Artificial Sequence
  Description of Artificial Sequence: Synthetic oligonucleotide
aaucggaagucacgcacgu

SEQ ID NO: 742064 - RNA, 19 nt, Artificial Sequence
  Description of Artificial Sequence: Synthetic oligonucleotide
uggaauucgcggcugucug

SEQ ID NO: 742065 - RNA, 19 nt, Artificial Sequence
  Description of Artificial Sequence: Synthetic oligonucleotide
agauagggugcgugggagc

SEQ ID NO: 742066 - RNA, 19 nt, Artificial Sequence
  Description of Artificial Sequence: Synthetic oligonucleotide
gguaccagcguguaguagc

SEQ ID NO: 742067 - RNA, 19 nt, Artificial Sequence
  Description of Artificial Sequence: Synthetic oligonucleotide
uccauagguaugagguugc

SEQ ID NO: 742068 - RNA, 19 nt, Artificial Sequence
  Description of Artificial Sequence: Synthetic oligonucleotide
uauagugggaguacucaua

SEQ ID NO: 742069 - RNA, 19 nt, Artificial Sequence
  Description of Artificial Sequence: Synthetic oligonucleotide
gacgccauaggugagcgug

SEQ ID NO: 742070 - RNA, 19 nt, Artificial Sequence
  Description of Artificial Sequence: Synthetic oligonucleotide
uggcuuuggaauucgcggc

SEQ ID NO: 742071 - RNA, 19 nt, Artificial Sequence
  Description of Artificial Sequence: Synthetic oligonucleotide
ggucucaucauagugcagg

SEQ ID NO: 742072 - RNA, 19 nt, Artificial Sequence
  Description of Artificial Sequence: Synthetic oligonucleotide
guagauaaagaagggcacc

SEQ ID NO: 742073 - RNA, 19 nt, Artificial Sequence
  Description of Artificial Sequence: Synthetic oligonucleotide
agaagcuauagaagauggc

SEQ ID NO: 742074 - RNA, 19 nt, Artificial Sequence
  Description of Artificial Sequence: Synthetic oligonucleotide
gaauucgcggcugucuggg

SEQ ID NO: 742075 - RNA, 19 nt, Artificial Sequence
  Description of Artificial Sequence: Synthetic oligonucleotide
agauagagcaggguucagg

SEQ ID NO: 742076 - RNA, 19 nt, Artificial Sequence
  Description of Artificial Sequence: Synthetic oligonucleotide
auccauagguaugagguug

SEQ ID NO: 742077 - RNA, 19 nt, Artificial Sequence
  Description of Artificial Sequence: Synthetic oligonucleotide
auaagcacagguguguaga

SEQ ID NO: 742078 - RNA, 19 nt, Artificial Sequence
  Description of Artificial Sequence: Synthetic oligonucleotide
cuuuauagugggaguacuc

SEQ ID NO: 742079 - RNA, 19 nt, Artificial Sequence
  Description of Artificial Sequence: Synthetic oligonucleotide
uuauagugggaguacucau

SEQ ID NO: 742080 - RNA, 19 nt, Artificial Sequence
  Description of Artificial Sequence: Synthetic oligonucleotide
cuaaguccgguuuuguuga

SEQ ID NO: 742081 - RNA, 19 nt, Artificial Sequence
  Description of Artificial Sequence: Synthetic oligonucleotide
uccgagccgguccucaucc

SEQ ID NO: 742082 - RNA, 19 nt, Artificial Sequence
  Description of Artificial Sequence: Synthetic oligonucleotide
auaguugcccauggaggcc

SEQ ID NO: 742083 - RNA, 19 nt, Artificial Sequence
  Description of Artificial Sequence: Synthetic oligonucleotide
agagcggcgggucugccuc

SEQ ID NO: 742084 - RNA, 19 nt, Artificial Sequence
  Description of Artificial Sequence: Synthetic oligonucleotide
ucuuuauagugggaguacu

SEQ ID NO: 742085 - RNA, 19 nt, Artificial Sequence
  Description of Artificial Sequence: Synthetic oligonucleotide
gauagggugcgugggagcc

SEQ ID NO: 742086 - RNA, 19 nt, Artificial Sequence
  Description of Artificial Sequence: Synthetic oligonucleotide
ugccguggcucuuagugcc

SEQ ID NO: 742087 - RNA, 19 nt, Artificial Sequence
  Description of Artificial Sequence: Synthetic oligonucleotide
ugcugcgaggcaacguccg

SEQ ID NO: 742088 - RNA, 19 nt, Artificial Sequence
  Description of Artificial Sequence: Synthetic oligonucleotide
gacaaagagggcguagaug

SEQ ID NO: 742089 - RNA, 19 nt, Artificial Sequence
  Description of Artificial Sequence: Synthetic oligonucleotide
gacucucaaccugagaaac

SEQ ID NO: 742090 - RNA, 19 nt, Artificial Sequence
  Description of Artificial Sequence: Synthetic oligonucleotide
guaguugaggaaguaaauc

SEQ ID NO: 742091 - RNA, 19 nt, Artificial Sequence
  Description of Artificial Sequence: Synthetic oligonucleotide
cucuuacugcuccucaggc

SEQ ID NO: 742092 - RNA, 19 nt, Artificial Sequence
  Description of Artificial Sequence: Synthetic oligonucleotide
gaaccgucuuguugaagcc

SEQ ID NO: 742093 - RNA, 19 nt, Artificial Sequence
  Description of Artificial Sequence: Synthetic oligonucleotide
aggugagcgugccacccgc

SEQ ID NO: 742094 - RNA, 19 nt, Artificial Sequence
  Description of Artificial Sequence: Synthetic oligonucleotide
cagguagacgccauaggug

SEQ ID NO: 742095 - RNA, 19 nt, Artificial Sequence
  Description of Artificial Sequence: Synthetic oligonucleotide
guacgcgcccaccagcucg

SEQ ID NO: 742096 - RNA, 19 nt, Artificial Sequence
  Description of Artificial Sequence: Synthetic oligonucleotide
gaaguaaaucaugggcagc

SEQ ID NO: 742097 - RNA, 19 nt, Artificial Sequence
  Description of Artificial Sequence: Synthetic oligonucleotide
gcuaugagcagguaggcca

SEQ ID NO: 742098 - RNA, 19 nt, Artificial Sequence
  Description of Artificial Sequence: Synthetic oligonucleotide
cuaugagcagguaggccag

SEQ ID NO: 742099 - RNA, 19 nt, Artificial Sequence
  Description of Artificial Sequence: Synthetic oligonucleotide
caagucauacagguaguag

SEQ ID NO: 742100 - RNA, 19 nt, Artificial Sequence
  Description of Artificial Sequence: Synthetic oligonucleotide
uccucguuguaguuggggu

SEQ ID NO: 742101 - RNA, 19 nt, Artificial Sequence
  Description of Artificial Sequence: Synthetic oligonucleotide
guaguagcggcgcuccucc

SEQ ID NO: 742102 - RNA, 19 nt, Artificial Sequence
  Description of Artificial Sequence: Synthetic oligonucleotide
agcuaugagcagguaggcc

SEQ ID NO: 742103 - RNA, 19 nt, Artificial Sequence
  Description of Artificial Sequence: Synthetic oligonucleotide
uagacgccauaggugagcg

SEQ ID NO: 742104 - RNA, 19 nt, Artificial Sequence
  Description of Artificial Sequence: Synthetic oligonucleotide
uagugcaggaucaguugca

SEQ ID NO: 742105 - RNA, 19 nt, Artificial Sequence
  Description of Artificial Sequence: Synthetic oligonucleotide
cuucuguuccauccauagg

SEQ ID NO: 742106 - RNA, 19 nt, Artificial Sequence
  Description of Artificial Sequence: Synthetic oligonucleotide
guaguagcguucccaguag

SEQ ID NO: 742107 - RNA, 19 nt, Artificial Sequence
  Description of Artificial Sequence: Synthetic oligonucleotide
gaccagcuagcucugcacc

SEQ ID NO: 742108 - RNA, 19 nt, Artificial Sequence
  Description of Artificial Sequence: Synthetic oligonucleotide
ugugcuaaguccgguuuug

SEQ ID NO: 742109 - RNA, 19 nt, Artificial Sequence
  Description of Artificial Sequence: Synthetic oligonucleotide
uagguaugagguugcugcc

SEQ ID NO: 742110 - RNA, 19 nt, Artificial Sequence
  Description of Artificial Sequence: Synthetic oligonucleotide
guuguaguugggguacgcg

SEQ ID NO: 742111 - RNA, 19 nt, Artificial Sequence
  Description of Artificial Sequence: Synthetic oligonucleotide
gaagccccaggaccgaggc

SEQ ID NO: 742112 - RNA, 19 nt, Artificial Sequence
  Description of Artificial Sequence: Synthetic oligonucleotide
aauucgcggcugucugggg

SEQ ID NO: 742113 - RNA, 19 nt, Artificial Sequence
  Description of Artificial Sequence: Synthetic oligonucleotide
uugcuaucgauguccggca

SEQ ID NO: 742114 - RNA, 19 nt, Artificial Sequence
  Description of Artificial Sequence: Synthetic oligonucleotide
caugcgaagcucaaaugga

SEQ ID NO: 742115 - RNA, 19 nt, Artificial Sequence
  Description of Artificial Sequence: Synthetic oligonucleotide
gagauagggugcgugggag

SEQ ID NO: 742116 - RNA, 19 nt, Artificial Sequence
  Description of Artificial Sequence: Synthetic oligonucleotide
aaguccgguuuuguugagg

SEQ ID NO: 742117 - RNA, 19 nt, Artificial Sequence
  Description of Artificial Sequence: Synthetic oligonucleotide
gauacccaucagcaucuug

SEQ ID NO: 742118 - RNA, 19 nt, Artificial Sequence
  Description of Artificial Sequence: Synthetic oligonucleotide
acguugaacaguguguggu

SEQ ID NO: 742119 - RNA, 19 nt, Artificial Sequence
  Description of Artificial Sequence: Synthetic oligonucleotide
ucgaucucuuccgugggcc

SEQ ID NO: 742120 - RNA, 19 nt, Artificial Sequence
  Description of Artificial Sequence: Synthetic oligonucleotide
accuagauaagcacaggug

SEQ ID NO: 742121 - RNA, 19 nt, Artificial Sequence
  Description of Artificial Sequence: Synthetic oligonucleotide
ucuugcuaucgauguccgg

SEQ ID NO: 742122 - RNA, 19 nt, Artificial Sequence
  Description of Artificial Sequence: Synthetic oligonucleotide
uaggugagcgugccacccg

SEQ ID NO: 742123 - RNA, 19 nt, Artificial Sequence
  Description of Artificial Sequence: Synthetic oligonucleotide
ugggcacaugcgaagcuca

SEQ ID NO: 742124 - RNA, 19 nt, Artificial Sequence
  Description of Artificial Sequence: Synthetic oligonucleotide
aaugagguuucugcugcga

SEQ ID NO: 742125 - RNA, 19 nt, Artificial Sequence
  Description of Artificial Sequence: Synthetic oligonucleotide
auaacccagggcgaaacca

SEQ ID NO: 742126 - RNA, 19 nt, Artificial Sequence
  Description of Artificial Sequence: Synthetic oligonucleotide
ugguagagacaaagagggc

SEQ ID NO: 742127 - RNA, 19 nt, Artificial Sequence
  Description of Artificial Sequence: Synthetic oligonucleotide
gggacucucaaccugagaa

SEQ ID NO: 742128 - RNA, 19 nt, Artificial Sequence
  Description of Artificial Sequence: Synthetic oligonucleotide
agagauagggugcguggga

SEQ ID NO: 742129 - RNA, 19 nt, Artificial Sequence
  Description of Artificial Sequence: Synthetic oligonucleotide
agccgcuguagauaaagaa

SEQ ID NO: 742130 - RNA, 19 nt, Artificial Sequence
  Description of Artificial Sequence: Synthetic oligonucleotide
uggcguaaucggaagucac

SEQ ID NO: 742131 - RNA, 19 nt, Artificial Sequence
  Description of Artificial Sequence: Synthetic oligonucleotide
gcuagcucugcaccuaggg

SEQ ID NO: 742132 - RNA, 19 nt, Artificial Sequence
  Description of Artificial Sequence: Synthetic oligonucleotide
guagcguucccaguaguug

SEQ ID NO: 742133 - RNA, 19 nt, Artificial Sequence
  Description of Artificial Sequence: Synthetic oligonucleotide
ugcuaucgauguccggcag

SEQ ID NO: 742134 - RNA, 19 nt, Artificial Sequence
  Description of Artificial Sequence: Synthetic oligonucleotide
cacaugcgaagcucaaaug

SEQ ID NO: 742135 - RNA, 19 nt, Artificial Sequence
  Description of Artificial Sequence: Synthetic oligonucleotide
agugugcuaaguccgguuu

SEQ ID NO: 742136 - RNA, 19 nt, Artificial Sequence
  Description of Artificial Sequence: Synthetic oligonucleotide
agcaacacugccagcuugg

SEQ ID NO: 742137 - RNA, 19 nt, Artificial Sequence
  Description of Artificial Sequence: Synthetic oligonucleotide
accgucuuguugaagccgg

SEQ ID NO: 742138 - RNA, 19 nt, Artificial Sequence
  Description of Artificial Sequence: Synthetic oligonucleotide
uaggaugcccaggagugug

SEQ ID NO: 742139 - RNA, 19 nt, Artificial Sequence
  Description of Artificial Sequence: Synthetic oligonucleotide
uugggguacgcgcccacca

SEQ ID NO: 742140 - RNA, 19 nt, Artificial Sequence
  Description of Artificial Sequence: Synthetic oligonucleotide
caaccugagaaacuguaaa

SEQ ID NO: 742141 - RNA, 19 nt, Artificial Sequence
  Description of Artificial Sequence: Synthetic oligonucleotide
uuggaauucgcggcugucu

SEQ ID NO: 742142 - RNA, 19 nt, Artificial Sequence
  Description of Artificial Sequence: Synthetic oligonucleotide
guaccagcguguaguagcg

SEQ ID NO: 742143 - RNA, 19 nt, Artificial Sequence
  Description of Artificial Sequence: Synthetic oligonucleotide
cauaacccagggcgaaacc

SEQ ID NO: 742144 - RNA, 19 nt, Artificial Sequence
  Description of Artificial Sequence: Synthetic oligonucleotide
aaaccagugcaggcaaaga

SEQ ID NO: 742145 - RNA, 19 nt, Artificial Sequence
  Description of Artificial Sequence: Synthetic oligonucleotide
cauaggugagcgugccacc

SEQ ID NO: 742146 - RNA, 19 nt, Artificial Sequence
  Description of Artificial Sequence: Synthetic oligonucleotide
uaggucgaucucuuccgug

SEQ ID NO: 742147 - RNA, 19 nt, Artificial Sequence
  Description of Artificial Sequence: Synthetic oligonucleotide
agagacaaagagggcguag

SEQ ID NO: 742148 - RNA, 19 nt, Artificial Sequence
  Description of Artificial Sequence: Synthetic oligonucleotide
uccgugggccgguaagcgg

SEQ ID NO: 742149 - RNA, 19 nt, Artificial Sequence
  Description of Artificial Sequence: Synthetic oligonucleotide
agagggaccuucuggcaga

SEQ ID NO: 742150 - RNA, 19 nt, Artificial Sequence
  Description of Artificial Sequence: Synthetic oligonucleotide
gucacgcacguguuugaag

SEQ ID NO: 742151 - RNA, 19 nt, Artificial Sequence
  Description of Artificial Sequence: Synthetic oligonucleotide
uccagcggagccucuggcc

SEQ ID NO: 742152 - RNA, 19 nt, Artificial Sequence
  Description of Artificial Sequence: Synthetic oligonucleotide
agcguguaguagcguuccc

SEQ ID NO: 742153 - RNA, 19 nt, Artificial Sequence
  Description of Artificial Sequence: Synthetic oligonucleotide
uugaccacgccgaggcgcu

SEQ ID NO: 742154 - RNA, 19 nt, Artificial Sequence
  Description of Artificial Sequence: Synthetic oligonucleotide
agccacuaggggcacugag

SEQ ID NO: 742155 - RNA, 19 nt, Artificial Sequence
  Description of Artificial Sequence: Synthetic oligonucleotide
uggcucuuagugccgcagc

SEQ ID NO: 742156 - RNA, 19 nt, Artificial Sequence
  Description of Artificial Sequence: Synthetic oligonucleotide
cacgcacguguuugaaggg

SEQ ID NO: 742157 - RNA, 19 nt, Artificial Sequence
  Description of Artificial Sequence: Synthetic oligonucleotide
guugccccagcccacgcug

SEQ ID NO: 742158 - RNA, 19 nt, Artificial Sequence
  Description of Artificial Sequence: Synthetic oligonucleotide
guagcggcgcuccuccucc

SEQ ID NO: 742159 - RNA, 19 nt, Artificial Sequence
  Description of Artificial Sequence: Synthetic oligonucleotide
uaguagcguucccaguagu

SEQ ID NO: 742160 - RNA, 19 nt, Artificial Sequence
  Description of Artificial Sequence: Synthetic oligonucleotide
aucuugcuaucgauguccg

SEQ ID NO: 742161 - RNA, 19 nt, Artificial Sequence
  Description of Artificial Sequence: Synthetic oligonucleotide
auucgcggcugucugggga

SEQ ID NO: 742162 - RNA, 19 nt, Artificial Sequence
  Description of Artificial Sequence: Synthetic oligonucleotide
ugcaccuagggccccugcu

SEQ ID NO: 742163 - RNA, 19 nt, Artificial Sequence
  Description of Artificial Sequence: Synthetic oligonucleotide
gaagccggucaggaugccg

SEQ ID NO: 742164 - RNA, 19 nt, Artificial Sequence
  Description of Artificial Sequence: Synthetic oligonucleotide
cagggcgaaaccagugcag

SEQ ID NO: 742165 - RNA, 19 nt, Artificial Sequence
  Description of Artificial Sequence: Synthetic oligonucleotide
agcucaaauggaagaagcu

SEQ ID NO: 742166 - RNA, 19 nt, Artificial Sequence
  Description of Artificial Sequence: Synthetic oligonucleotide
uuucugcugcgaggcaacg

SEQ ID NO: 742167 - RNA, 19 nt, Artificial Sequence
  Description of Artificial Sequence: Synthetic oligonucleotide
uaaguccgguuuuguugag

SEQ ID NO: 742168 - RNA, 19 nt, Artificial Sequence
  Description of Artificial Sequence: Synthetic oligonucleotide
ggaagauguugccccagcc

SEQ ID NO: 742169 - RNA, 19 nt, Artificial Sequence
  Description of Artificial Sequence: Synthetic oligonucleotide
cauagguaugagguugcug

SEQ ID NO: 742170 - RNA, 19 nt, Artificial Sequence
  Description of Artificial Sequence: Synthetic oligonucleotide
uaggccagccgcucuaguc

SEQ ID NO: 742171 - RNA, 19 nt, Artificial Sequence
  Description of Artificial Sequence: Synthetic oligonucleotide
ucgauguccggcagcccca

SEQ ID NO: 742172 - RNA, 19 nt, Artificial Sequence
  Description of Artificial Sequence: Synthetic oligonucleotide
ugagcgugccacccgcgcu

SEQ ID NO: 742173 - RNA, 19 nt, Artificial Sequence
  Description of Artificial Sequence: Synthetic oligonucleotide
ggacauccuggugauauag

SEQ ID NO: 742174 - RNA, 19 nt, Artificial Sequence
  Description of Artificial Sequence: Synthetic oligonucleotide
accuucuggcagauagagc

SEQ ID NO: 742175 - RNA, 19 nt, Artificial Sequence
  Description of Artificial Sequence: Synthetic oligonucleotide
acguguuugaagggcagcu

SEQ ID NO: 742176 - RNA, 19 nt, Artificial Sequence
  Description of Artificial Sequence: Synthetic oligonucleotide
ggaauucgcggcugucugg

SEQ ID NO: 742177 - RNA, 19 nt, Artificial Sequence
  Description of Artificial Sequence: Synthetic oligonucleotide
guagacgccauaggugagc

SEQ ID NO: 742178 - RNA, 19 nt, Artificial Sequence
  Description of Artificial Sequence: Synthetic oligonucleotide
gugggaguacucauaguac

SEQ ID NO: 742179 - RNA, 19 nt, Artificial Sequence
  Description of Artificial Sequence: Synthetic oligonucleotide
gguaugagguugcugccac

SEQ ID NO: 742180 - RNA, 19 nt, Artificial Sequence
  Description of Artificial Sequence: Synthetic oligonucleotide
cacaggguagagcggcggg

SEQ ID NO: 742181 - RNA, 19 nt, Artificial Sequence
  Description of Artificial Sequence: Synthetic oligonucleotide
aguaaaggauccagcugug

SEQ ID NO: 742182 - RNA, 19 nt, Artificial Sequence
  Description of Artificial Sequence: Synthetic oligonucleotide
uuacugcuccucaggccca

SEQ ID NO: 742183 - RNA, 19 nt, Artificial Sequence
  Description of Artificial Sequence: Synthetic oligonucleotide
ugcugccacuaccaggguc

SEQ ID NO: 742184 - RNA, 19 nt, Artificial Sequence
  Description of Artificial Sequence: Synthetic oligonucleotide
gguagcgguagccacgcac

SEQ ID NO: 742185 - RNA, 19 nt, Artificial Sequence
  Description of Artificial Sequence: Synthetic oligonucleotide
agcguggcagccacagccc

SEQ ID NO: 742186 - RNA, 19 nt, Artificial Sequence
  Description of Artificial Sequence: Synthetic oligonucleotide
ugcuaaguccgguuuuguu

SEQ ID NO: 742187 - RNA, 19 nt, Artificial Sequence
  Description of Artificial Sequence: Synthetic oligonucleotide
cuuagugccgcagcucuuc

SEQ ID NO: 742188 - RNA, 19 nt, Artificial Sequence
  Description of Artificial Sequence: Synthetic oligonucleotide
gcguaggucgaucucuucc

SEQ ID NO: 742189 - RNA, 19 nt, Artificial Sequence
  Description of Artificial Sequence: Synthetic oligonucleotide
accagcguguaguagcguu

SEQ ID NO: 742190 - RNA, 19 nt, Artificial Sequence
  Description of Artificial Sequence: Synthetic oligonucleotide
agugugugguucaagucau

SEQ ID NO: 742191 - RNA, 19 nt, Artificial Sequence
  Description of Artificial Sequence: Synthetic oligonucleotide
gugggcgcugcugaggucc

SEQ ID NO: 742192 - RNA, 19 nt, Artificial Sequence
  Description of Artificial Sequence: Synthetic oligonucleotide
cuccucguuguaguugggg

SEQ ID NO: 742193 - RNA, 19 nt, Artificial Sequence
  Description of Artificial Sequence: Synthetic oligonucleotide
ggcguaaucggaagucacg

SEQ ID NO: 742194 - RNA, 19 nt, Artificial Sequence
  Description of Artificial Sequence: Synthetic oligonucleotide
acguucuugaccacgccga

SEQ ID NO: 742195 - RNA, 19 nt, Artificial Sequence
  Description of Artificial Sequence: Synthetic oligonucleotide
accacgccgaggcgcuugc

SEQ ID NO: 742196 - RNA, 19 nt, Artificial Sequence
  Description of Artificial Sequence: Synthetic oligonucleotide
cacgccgaggcgcuugcgg

SEQ ID NO: 742197 - RNA, 19 nt, Artificial Sequence
  Description of Artificial Sequence: Synthetic oligonucleotide
agcauggccaagaaggcua

SEQ ID NO: 742198 - RNA, 19 nt, Artificial Sequence
  Description of Artificial Sequence: Synthetic oligonucleotide
caguugcaucugcaggagg

SEQ ID NO: 742199 - RNA, 19 nt, Artificial Sequence
  Description of Artificial Sequence: Synthetic oligonucleotide
cugcugcgaggcaacgucc

SEQ ID NO: 742200 - RNA, 19 nt, Artificial Sequence
  Description of Artificial Sequence: Synthetic oligonucleotide
cucuagucccacagagcac

SEQ ID NO: 742201 - RNA, 19 nt, Artificial Sequence
  Description of Artificial Sequence: Synthetic oligonucleotide
cguaggucgaucucuuccg

SEQ ID NO: 742202 - RNA, 19 nt, Artificial Sequence
  Description of Artificial Sequence: Synthetic oligonucleotide
ugggcgucacguugauacc

SEQ ID NO: 742203 - RNA, 19 nt, Artificial Sequence
  Description of Artificial Sequence: Synthetic oligonucleotide
cagcguguaguagcguucc

SEQ ID NO: 742204 - RNA, 19 nt, Artificial Sequence
  Description of Artificial Sequence: Synthetic oligonucleotide
gugcgugggagccgcgugg

SEQ ID NO: 742205 - RNA, 19 nt, Artificial Sequence
  Description of Artificial Sequence: Synthetic oligonucleotide
gcgaagcucaaauggaaga

SEQ ID NO: 742206 - RNA, 19 nt, Artificial Sequence
  Description of Artificial Sequence: Synthetic oligonucleotide
cucauccccuugagggccg

SEQ ID NO: 742207 - RNA, 19 nt, Artificial Sequence
  Description of Artificial Sequence: Synthetic oligonucleotide
ggcaacguccgcagaaccg

SEQ ID NO: 742208 - RNA, 19 nt, Artificial Sequence
  Description of Artificial Sequence: Synthetic oligonucleotide
ugggcaagcuggagcccag

SEQ ID NO: 742209 - RNA, 19 nt, Artificial Sequence
  Description of Artificial Sequence: Synthetic oligonucleotide
gcguaaucggaagucacgc

SEQ ID NO: 742210 - RNA, 19 nt, Artificial Sequence
  Description of Artificial Sequence: Synthetic oligonucleotide
uggaggacccgaggcaaug

SEQ ID NO: 742211 - RNA, 19 nt, Artificial Sequence
  Description of Artificial Sequence: Synthetic oligonucleotide
uagggugcgugggagccgc

SEQ ID NO: 742212 - RNA, 19 nt, Artificial Sequence
  Description of Artificial Sequence: Synthetic oligonucleotide
cagguagcgguagccacgc

SEQ ID NO: 742213 - RNA, 19 nt, Artificial Sequence
  Description of Artificial Sequence: Synthetic oligonucleotide
gugccacccgcgcuggccg

SEQ ID NO: 742214 - RNA, 19 nt, Artificial Sequence
  Description of Artificial Sequence: Synthetic oligonucleotide
agguggcguaaucggaagu

SEQ ID NO: 742215 - RNA, 19 nt, Artificial Sequence
  Description of Artificial Sequence: Synthetic oligonucleotide
cuauagaagauggccugga

SEQ ID NO: 742216 - RNA, 19 nt, Artificial Sequence
  Description of Artificial Sequence: Synthetic oligonucleotide
agguaugagguugcugcca

SEQ ID NO: 742217 - RNA, 19 nt, Artificial Sequence
  Description of Artificial Sequence: Synthetic oligonucleotide
ccuagauaagcacaggugu

SEQ ID NO: 742218 - RNA, 19 nt, Artificial Sequence
  Description of Artificial Sequence: Synthetic oligonucleotide
acgccauaggugagcgugc

SEQ ID NO: 742219 - RNA, 19 nt, Artificial Sequence
  Description of Artificial Sequence: Synthetic oligonucleotide
aacuccgagccgguccuca

SEQ ID NO: 742220 - RNA, 19 nt, Artificial Sequence
  Description of Artificial Sequence: Synthetic oligonucleotide
caccuagggccccugcuug

SEQ ID NO: 742221 - RNA, 19 nt, Artificial Sequence
  Description of Artificial Sequence: Synthetic oligonucleotide
ggaguacucauaguacuuc

SEQ ID NO: 742222 - RNA, 19 nt, Artificial Sequence
  Description of Artificial Sequence: Synthetic oligonucleotide
cacguguuugaagggcagc

SEQ ID NO: 742223 - RNA, 19 nt, Artificial Sequence
  Description of Artificial Sequence: Synthetic oligonucleotide
cguguaguagcguucccag

SEQ ID NO: 742224 - RNA, 19 nt, Artificial Sequence
  Description of Artificial Sequence: Synthetic oligonucleotide
cuguggcuuuggaauucgc

SEQ ID NO: 742225 - RNA, 19 nt, Artificial Sequence
  Description of Artificial Sequence: Synthetic oligonucleotide
gcuaucgauguccggcagc

SEQ ID NO: 742226 - RNA, 19 nt, Artificial Sequence
  Description of Artificial Sequence: Synthetic oligonucleotide
auagggugcgugggagccg

SEQ ID NO: 742227 - RNA, 19 nt, Artificial Sequence
  Description of Artificial Sequence: Synthetic oligonucleotide
agugcaggaucaguugcau

SEQ ID NO: 742228 - RNA, 19 nt, Artificial Sequence
  Description of Artificial Sequence: Synthetic oligonucleotide
acucucaaccugagaaacu

SEQ ID NO: 742229 - RNA, 19 nt, Artificial Sequence
  Description of Artificial Sequence: Synthetic oligonucleotide
augcgaagcucaaauggaa

SEQ ID NO: 742230 - RNA, 19 nt, Artificial Sequence
  Description of Artificial Sequence: Synthetic oligonucleotide
aacuucuguuccauccaua

SEQ ID NO: 742231 - RNA, 19 nt, Artificial Sequence
  Description of Artificial Sequence: Synthetic oligonucleotide
gugagcgugccacccgcgc

SEQ ID NO: 742232 - RNA, 19 nt, Artificial Sequence
  Description of Artificial Sequence: Synthetic oligonucleotide
ggacccgaggcaauggggc

SEQ ID NO: 742233 - RNA, 19 nt, Artificial Sequence
  Description of Artificial Sequence: Synthetic oligonucleotide
cagcuagcucugcaccuag

SEQ ID NO: 742234 - RNA, 19 nt, Artificial Sequence
  Description of Artificial Sequence: Synthetic oligonucleotide
cuuccuccgcacagucccc

SEQ ID NO: 742235 - RNA, 19 nt, Artificial Sequence
  Description of Artificial Sequence: Synthetic oligonucleotide
ccauaggugagcgugccac

SEQ ID NO: 742236 - RNA, 19 nt, Artificial Sequence
  Description of Artificial Sequence: Synthetic oligonucleotide
guggcucuuagugccgcag

SEQ ID NO: 742237 - RNA, 19 nt, Artificial Sequence
  Description of Artificial Sequence: Synthetic oligonucleotide
acaccauaacccagggcga

SEQ ID NO: 742238 - RNA, 19 nt, Artificial Sequence
  Description of Artificial Sequence: Synthetic oligonucleotide
uucugcugcgaggcaacgu

SEQ ID NO: 742239 - RNA, 19 nt, Artificial Sequence
  Description of Artificial Sequence: Synthetic oligonucleotide
aggguagagcggcgggucu

SEQ ID NO: 742240 - RNA, 19 nt, Artificial Sequence
  Description of Artificial Sequence: Synthetic oligonucleotide
ggaccagcuagcucugcac

SEQ ID NO: 742241 - RNA, 19 nt, Artificial Sequence
  Description of Artificial Sequence: Synthetic oligonucleotide
uguaagcuaugagcaggua

SEQ ID NO: 742242 - RNA, 19 nt, Artificial Sequence
  Description of Artificial Sequence: Synthetic oligonucleotide
aguagcguucccaguaguu

SEQ ID NO: 742243 - RNA, 19 nt, Artificial Sequence
  Description of Artificial Sequence: Synthetic oligonucleotide
gguggcguaaucggaaguc

SEQ ID NO: 742244 - RNA, 19 nt, Artificial Sequence
  Description of Artificial Sequence: Synthetic oligonucleotide
acgcugcguaggucgaucu

SEQ ID NO: 742245 - RNA, 19 nt, Artificial Sequence
  Description of Artificial Sequence: Synthetic oligonucleotide
uagugccgcagcucuucac

SEQ ID NO: 742246 - RNA, 19 nt, Artificial Sequence
  Description of Artificial Sequence: Synthetic oligonucleotide
cgcagaaccgucuuguuga

SEQ ID NO: 742247 - RNA, 19 nt, Artificial Sequence
  Description of Artificial Sequence: Synthetic oligonucleotide
guggcguaaucggaaguca

SEQ ID NO: 742248 - RNA, 19 nt, Artificial Sequence
  Description of Artificial Sequence: Synthetic oligonucleotide
ccagugauagauggugaag

SEQ ID NO: 742249 - RNA, 19 nt, Artificial Sequence
  Description of Artificial Sequence: Synthetic oligonucleotide
ugcguaggucgaucucuuc

SEQ ID NO: 742250 - RNA, 19 nt, Artificial Sequence
  Description of Artificial Sequence: Synthetic oligonucleotide
ccgguaagcggcuccacac

SEQ ID NO: 742251 - RNA, 19 nt, Artificial Sequence
  Description of Artificial Sequence: Synthetic oligonucleotide
gcucaaauggaagaagcua

SEQ ID NO: 742252 - RNA, 19 nt, Artificial Sequence
  Description of Artificial Sequence: Synthetic oligonucleotide
ccgcucuagucccacagag

SEQ ID NO: 742253 - RNA, 19 nt, Artificial Sequence
  Description of Artificial Sequence: Synthetic oligonucleotide
gcagauagagcaggguuca

SEQ ID NO: 742254 - RNA, 19 nt, Artificial Sequence
  Description of Artificial Sequence: Synthetic oligonucleotide
uagagacaaagagggcgua

SEQ ID NO: 742255 - RNA, 19 nt, Artificial Sequence
  Description of Artificial Sequence: Synthetic oligonucleotide
ucucuacaacaaugagguu

SEQ ID NO: 742256 - RNA, 19 nt, Artificial Sequence
  Description of Artificial Sequence: Synthetic oligonucleotide
ggcgaaaccagugcaggca

SEQ ID NO: 742257 - RNA, 19 nt, Artificial Sequence
  Description of Artificial Sequence: Synthetic oligonucleotide
ugaggcacccaggcuguaa

SEQ ID NO: 742258 - RNA, 19 nt, Artificial Sequence
  Description of Artificial Sequence: Synthetic oligonucleotide
ggacucucaaccugagaaa

SEQ ID NO: 742259 - RNA, 19 nt, Artificial Sequence
  Description of Artificial Sequence: Synthetic oligonucleotide
accuagggccccugcuugu

SEQ ID NO: 742260 - RNA, 19 nt, Artificial Sequence
  Description of Artificial Sequence: Synthetic oligonucleotide
caacguccgcagaaccguc

SEQ ID NO: 742261 - RNA, 19 nt, Artificial Sequence
  Description of Artificial Sequence: Synthetic oligonucleotide
ccgugggccgguaagcggc

SEQ ID NO: 742262 - RNA, 19 nt, Artificial Sequence
  Description of Artificial Sequence: Synthetic oligonucleotide
gggcgucacguugauaccc

SEQ ID NO: 742263 - RNA, 19 nt, Artificial Sequence
  Description of Artificial Sequence: Synthetic oligonucleotide
ccaagagauagggugcgug

SEQ ID NO: 742264 - RNA, 19 nt, Artificial Sequence
  Description of Artificial Sequence: Synthetic oligonucleotide
gccacuaggggcacugagc

SEQ ID NO: 742265 - RNA, 19 nt, Artificial Sequence
  Description of Artificial Sequence: Synthetic oligonucleotide
aggguaccagcguguagua

SEQ ID NO: 742266 - RNA, 19 nt, Artificial Sequence
  Description of Artificial Sequence: Synthetic oligonucleotide
cagaaccgucuuguugaag

SEQ ID NO: 742267 - RNA, 19 nt, Artificial Sequence
  Description of Artificial Sequence: Synthetic oligonucleotide
ucauccccuugagggccgg

SEQ ID NO: 742268 - RNA, 19 nt, Artificial Sequence
  Description of Artificial Sequence: Synthetic oligonucleotide
aggggcacugagcguggca

SEQ ID NO: 742269 - RNA, 19 nt, Artificial Sequence
  Description of Artificial Sequence: Synthetic oligonucleotide
uagcgguagccacgcacuu

SEQ ID NO: 742270 - RNA, 19 nt, Artificial Sequence
  Description of Artificial Sequence: Synthetic oligonucleotide
guagcgguagccacgcacu

SEQ ID NO: 742271 - RNA, 19 nt, Artificial Sequence
  Description of Artificial Sequence: Synthetic oligonucleotide
aguaguugguagagacaaa

SEQ ID NO: 742272 - RNA, 19 nt, Artificial Sequence
  Description of Artificial Sequence: Synthetic oligonucleotide
aucggaagucacgcacgug

SEQ ID NO: 742273 - RNA, 19 nt, Artificial Sequence
  Description of Artificial Sequence: Synthetic oligonucleotide
agucacgcacguguuugaa

SEQ ID NO: 742274 - RNA, 19 nt, Artificial Sequence
  Description of Artificial Sequence: Synthetic oligonucleotide
gcacaugcgaagcucaaau

SEQ ID NO: 742275 - RNA, 19 nt, Artificial Sequence
  Description of Artificial Sequence: Synthetic oligonucleotide
agcguucccaguaguuggu

SEQ ID NO: 742276 - RNA, 19 nt, Artificial Sequence
  Description of Artificial Sequence: Synthetic oligonucleotide
gguagacgccauaggugag

SEQ ID NO: 742277 - RNA, 19 nt, Artificial Sequence
  Description of Artificial Sequence: Synthetic oligonucleotide
gggguacgcgcccaccagc

SEQ ID NO: 742278 - RNA, 19 nt, Artificial Sequence
  Description of Artificial Sequence: Synthetic oligonucleotide
acguccgcagaaccgucuu

SEQ ID NO: 742279 - RNA, 19 nt, Artificial Sequence
  Description of Artificial Sequence: Synthetic oligonucleotide
ggugcgugggagccgcgug

SEQ ID NO: 742280 - RNA, 19 nt, Artificial Sequence
  Description of Artificial Sequence: Synthetic oligonucleotide
ugaagccggucaggaugcc

SEQ ID NO: 742281 - RNA, 19 nt, Artificial Sequence
  Description of Artificial Sequence: Synthetic oligonucleotide
gacauccuggugauauagu

SEQ ID NO: 742282 - RNA, 19 nt, Artificial Sequence
  Description of Artificial Sequence: Synthetic oligonucleotide
ccauaacccagggcgaaac

SEQ ID NO: 742283 - RNA, 19 nt, Artificial Sequence
  Description of Artificial Sequence: Synthetic oligonucleotide
accaagagauagggugcgu

SEQ ID NO: 742284 - RNA, 19 nt, Artificial Sequence
  Description of Artificial Sequence: Synthetic oligonucleotide
agacgccauaggugagcgu

SEQ ID NO: 742285 - RNA, 19 nt, Artificial Sequence
  Description of Artificial Sequence: Synthetic oligonucleotide
guaggucgaucucuuccgu

SEQ ID NO: 742286 - RNA, 19 nt, Artificial Sequence
  Description of Artificial Sequence: Synthetic oligonucleotide
agcgugccacccgcgcugg

SEQ ID NO: 742287 - RNA, 19 nt, Artificial Sequence
  Description of Artificial Sequence: Synthetic oligonucleotide
gagugugcuaaguccgguu

SEQ ID NO: 742288 - RNA, 19 nt, Artificial Sequence
  Description of Artificial Sequence: Synthetic oligonucleotide
gcgaaaccagugcaggcaa

SEQ ID NO: 742289 - RNA, 19 nt, Artificial Sequence
  Description of Artificial Sequence: Synthetic oligonucleotide
gguagagcggcgggucugc

SEQ ID NO: 742290 - RNA, 19 nt, Artificial Sequence
  Description of Artificial Sequence: Synthetic oligonucleotide
gcacguguuugaagggcag

SEQ ID NO: 742291 - RNA, 19 nt, Artificial Sequence
  Description of Artificial Sequence: Synthetic oligonucleotide
cguagaugcccacagcuaa

SEQ ID NO: 742292 - RNA, 19 nt, Artificial Sequence
  Description of Artificial Sequence: Synthetic oligonucleotide
uaccagcguguaguagcgu

SEQ ID NO: 742293 - RNA, 19 nt, Artificial Sequence
  Description of Artificial Sequence: Synthetic oligonucleotide
gcagcgaugggcgucacgu

SEQ ID NO: 742294 - RNA, 19 nt, Artificial Sequence
  Description of Artificial Sequence: Synthetic oligonucleotide
guguaguagcguucccagu

SEQ ID NO: 742295 - RNA, 19 nt, Artificial Sequence
  Description of Artificial Sequence: Synthetic oligonucleotide
gagcggcgggucugccucc

SEQ ID NO: 742296 - RNA, 19 nt, Artificial Sequence
  Description of Artificial Sequence: Synthetic oligonucleotide
agcccacgcugcguagguc

SEQ ID NO: 742297 - RNA, 19 nt, Artificial Sequence
  Description of Artificial Sequence: Synthetic oligonucleotide
ggaacuccgagccgguccu

SEQ ID NO: 742298 - RNA, 19 nt, Artificial Sequence
  Description of Artificial Sequence: Synthetic oligonucleotide
ggcagcgaugggcgucacg

SEQ ID NO: 742299 - RNA, 19 nt, Artificial Sequence
  Description of Artificial Sequence: Synthetic oligonucleotide
gcgcccaccagcucgucca

SEQ ID NO: 742300 - RNA, 19 nt, Artificial Sequence
  Description of Artificial Sequence: Synthetic oligonucleotide
cgaucucuuccgugggccg

SEQ ID NO: 742301 - RNA, 19 nt, Artificial Sequence
  Description of Artificial Sequence: Synthetic oligonucleotide
gcugcgaggcaacguccgc

SEQ ID NO: 742302 - RNA, 19 nt, Artificial Sequence
  Description of Artificial Sequence: Synthetic oligonucleotide
gcguguaguagcguuccca

SEQ ID NO: 742303 - RNA, 19 nt, Artificial Sequence
  Description of Artificial Sequence: Synthetic oligonucleotide
ggguaccagcguguaguag

SEQ ID NO: 742304 - RNA, 19 nt, Artificial Sequence
  Description of Artificial Sequence: Synthetic oligonucleotide
cgcucuagucccacagagc

SEQ ID NO: 742305 - RNA, 19 nt, Artificial Sequence
  Description of Artificial Sequence: Synthetic oligonucleotide
ggugagcgugccacccgcg

SEQ ID NO: 742306 - RNA, 19 nt, Artificial Sequence
  Description of Artificial Sequence: Synthetic oligonucleotide
aucauccacuugguaccaa

SEQ ID NO: 742307 - RNA, 19 nt, Artificial Sequence
  Description of Artificial Sequence: Synthetic oligonucleotide
ugauacccaucagcaucuu

SEQ ID NO: 742308 - RNA, 19 nt, Artificial Sequence
  Description of Artificial Sequence: Synthetic oligonucleotide
cagccccauguugccauac

SEQ ID NO: 742309 - RNA, 19 nt, Artificial Sequence
  Description of Artificial Sequence: Synthetic oligonucleotide
gcgcuugcggcgguaguag

SEQ ID NO: 742310 - RNA, 19 nt, Artificial Sequence
  Description of Artificial Sequence: Synthetic oligonucleotide
guagagcggcgggucugcc

SEQ ID NO: 742311 - RNA, 19 nt, Artificial Sequence
  Description of Artificial Sequence: Synthetic oligonucleotide
gcugcguaggucgaucucu

SEQ ID NO: 742312 - RNA, 19 nt, Artificial Sequence
  Description of Artificial Sequence: Synthetic oligonucleotide
uacugcuccucaggcccau

SEQ ID NO: 742313 - RNA, 19 nt, Artificial Sequence
  Description of Artificial Sequence: Synthetic oligonucleotide
gccgguaagcggcuccaca

SEQ ID NO: 742314 - RNA, 19 nt, Artificial Sequence
  Description of Artificial Sequence: Synthetic oligonucleotide
ccacaggguagagcggcgg

SEQ ID NO: 742315 - RNA, 19 nt, Artificial Sequence
  Description of Artificial Sequence: Synthetic oligonucleotide
ggcgucacguugauaccca

SEQ ID NO: 742316 - RNA, 19 nt, Artificial Sequence
  Description of Artificial Sequence: Synthetic oligonucleotide
gccacaggguagagcggcg

SEQ ID NO: 742317 - RNA, 19 nt, Artificial Sequence
  Description of Artificial Sequence: Synthetic oligonucleotide
gcaacguccgcagaaccgu

SEQ ID NO: 742318 - RNA, 19 nt, Artificial Sequence
  Description of Artificial Sequence: Synthetic oligonucleotide
caaagccgcuguagauaaa

SEQ ID NO: 742319 - RNA, 19 nt, Artificial Sequence
  Description of Artificial Sequence: Synthetic oligonucleotide
cgagccgguccucaucccc

SEQ ID NO: 742320 - RNA, 19 nt, Artificial Sequence
  Description of Artificial Sequence: Synthetic oligonucleotide
cguaaucggaagucacgca

SEQ ID NO: 742321 - RNA, 19 nt, Artificial Sequence
  Description of Artificial Sequence: Synthetic oligonucleotide
cacuuugugcuguggcuuu

SEQ ID NO: 742322 - RNA, 19 nt, Artificial Sequence
  Description of Artificial Sequence: Synthetic oligonucleotide
caggaacuccgagccgguc

SEQ ID NO: 742323 - RNA, 19 nt, Artificial Sequence
  Description of Artificial Sequence: Synthetic oligonucleotide
gccgaggcgcuugcggcgg

SEQ ID NO: 742324 - RNA, 19 nt, Artificial Sequence
  Description of Artificial Sequence: Synthetic oligonucleotide
ccaggaccgaggcugcuga

SEQ ID NO: 742325 - RNA, 19 nt, Artificial Sequence
  Description of Artificial Sequence: Synthetic oligonucleotide
cgucacguugauacccauc

SEQ ID NO: 742326 - RNA, 19 nt, Artificial Sequence
  Description of Artificial Sequence: Synthetic oligonucleotide
agaggaccucaaagccgcu

SEQ ID NO: 742327 - RNA, 19 nt, Artificial Sequence
  Description of Artificial Sequence: Synthetic oligonucleotide
gcagaaccgucuuguugaa

SEQ ID NO: 742328 - RNA, 19 nt, Artificial Sequence
  Description of Artificial Sequence: Synthetic oligonucleotide
cccuguaggucucaucaua

SEQ ID NO: 742329 - RNA, 19 nt, Artificial Sequence
  Description of Artificial Sequence: Synthetic oligonucleotide
gccguggcucuuagugccg

SEQ ID NO: 742330 - RNA, 19 nt, Artificial Sequence
  Description of Artificial Sequence: Synthetic oligonucleotide
ggcgguaguagcggcgcuc

SEQ ID NO: 742331 - RNA, 19 nt, Artificial Sequence
  Description of Artificial Sequence: Synthetic oligonucleotide
gccgcucuagucccacaga

SEQ ID NO: 742332 - RNA, 19 nt, Artificial Sequence
  Description of Artificial Sequence: Synthetic oligonucleotide
cauccccuugagggccggc

SEQ ID NO: 742333 - RNA, 19 nt, Artificial Sequence
  Description of Artificial Sequence: Synthetic oligonucleotide
ggcacaugcgaagcucaaa

SEQ ID NO: 742334 - RNA, 19 nt, Artificial Sequence
  Description of Artificial Sequence: Synthetic oligonucleotide
gccugcggcagggaccagc

SEQ ID NO: 742335 - RNA, 19 nt, Artificial Sequence
  Description of Artificial Sequence: Synthetic oligonucleotide
gggacauccuggugauaua

SEQ ID NO: 742336 - RNA, 19 nt, Artificial Sequence
  Description of Artificial Sequence: Synthetic oligonucleotide
ggaccucaaagccgcugua

SEQ ID NO: 742337 - RNA, 19 nt, Artificial Sequence
  Description of Artificial Sequence: Synthetic oligonucleotide
gugcuaaguccgguuuugu

SEQ ID NO: 742338 - RNA, 19 nt, Artificial Sequence
  Description of Artificial Sequence: Synthetic oligonucleotide
gcccauggaggcccagaga

SEQ ID NO: 742339 - RNA, 19 nt, Artificial Sequence
  Description of Artificial Sequence: Synthetic oligonucleotide
ucucuuccgugggccggua

SEQ ID NO: 742340 - RNA, 19 nt, Artificial Sequence
  Description of Artificial Sequence: Synthetic oligonucleotide
cagcagaggguaccagcgu

SEQ ID NO: 742341 - RNA, 19 nt, Artificial Sequence
  Description of Artificial Sequence: Synthetic oligonucleotide
cgaggcaacguccgcagaa

SEQ ID NO: 742342 - RNA, 19 nt, Artificial Sequence
  Description of Artificial Sequence: Synthetic oligonucleotide
agcggcgggucugccucca

SEQ ID NO: 742343 - RNA, 19 nt, Artificial Sequence
  Description of Artificial Sequence: Synthetic oligonucleotide
cacuaggggcacugagcgu

SEQ ID NO: 742344 - RNA, 19 nt, Artificial Sequence
  Description of Artificial Sequence: Synthetic oligonucleotide
ccuagggccccugcuugug

SEQ ID NO: 742345 - RNA, 19 nt, Artificial Sequence
  Description of Artificial Sequence: Synthetic oligonucleotide
cugcguaggucgaucucuu

SEQ ID NO: 742346 - RNA, 19 nt, Artificial Sequence
  Description of Artificial Sequence: Synthetic oligonucleotide
cucuuccgugggccgguaa

SEQ ID NO: 742347 - RNA, 19 nt, Artificial Sequence
  Description of Artificial Sequence: Synthetic oligonucleotide
ccguggcucuuagugccgc

SEQ ID NO: 742348 - RNA, 19 nt, Artificial Sequence
  Description of Artificial Sequence: Synthetic oligonucleotide
ggcgcuugcggcgguagua

SEQ ID NO: 742349 - RNA, 19 nt, Artificial Sequence
  Description of Artificial Sequence: Synthetic oligonucleotide
ccgccccagccacuagggg

SEQ ID NO: 742350 - RNA, 19 nt, Artificial Sequence
  Description of Artificial Sequence: Synthetic oligonucleotide
cgccauaggugagcgugcc

SEQ ID NO: 742351 - RNA, 19 nt, Artificial Sequence
  Description of Artificial Sequence: Synthetic oligonucleotide
agggugcgugggagccgcg

SEQ ID NO: 742352 - RNA, 19 nt, Artificial Sequence
  Description of Artificial Sequence: Synthetic oligonucleotide
ggguacgcgcccaccagcu

SEQ ID NO: 742353 - RNA, 19 nt, Artificial Sequence
  Description of Artificial Sequence: Synthetic oligonucleotide
cguccgcagaaccgucuug

SEQ ID NO: 742354 - RNA, 19 nt, Artificial Sequence
  Description of Artificial Sequence: Synthetic oligonucleotide
cacccgcgcuggccgccag

SEQ ID NO: 742355 - RNA, 19 nt, Artificial Sequence
  Description of Artificial Sequence: Synthetic oligonucleotide
cgguaagcggcuccacaca

SEQ ID NO: 742356 - RNA, 19 nt, Artificial Sequence
  Description of Artificial Sequence: Synthetic oligonucleotide
gcgaggcaacguccgcaga

SEQ ID NO: 742357 - RNA, 19 nt, Artificial Sequence
  Description of Artificial Sequence: Synthetic oligonucleotide
gggccgguaagcggcucca

SEQ ID NO: 742358 - RNA, 19 nt, Artificial Sequence
  Description of Artificial Sequence: Synthetic oligonucleotide
cagccacuaggggcacuga

SEQ ID NO: 742359 - RNA, 19 nt, Artificial Sequence
  Description of Artificial Sequence: Synthetic oligonucleotide
ccggcggccccagccacag

SEQ ID NO: 742360 - RNA, 19 nt, Artificial Sequence
  Description of Artificial Sequence: Synthetic oligonucleotide
cgcgcccaccagcucgucc

SEQ ID NO: 742361 - RNA, 19 nt, Artificial Sequence
  Description of Artificial Sequence: Synthetic oligonucleotide
agggaccuucuggcagaua

SEQ ID NO: 742362 - RNA, 19 nt, Artificial Sequence
  Description of Artificial Sequence: Synthetic oligonucleotide
cguugauacccaucagcau

SEQ ID NO: 742363 - RNA, 19 nt, Artificial Sequence
  Description of Artificial Sequence: Synthetic oligonucleotide
cgcugcguaggucgaucuc

SEQ ID NO: 742364 - RNA, 19 nt, Artificial Sequence
  Description of Artificial Sequence: Synthetic oligonucleotide
ggaugccguggcucuuagu

SEQ ID NO: 742365 - RNA, 19 nt, Artificial Sequence
  Description of Artificial Sequence: Synthetic oligonucleotide
ggccgguaagcggcuccac

SEQ ID NO: 742366 - RNA, 19 nt, Artificial Sequence
  Description of Artificial Sequence: Synthetic oligonucleotide
cguugaacagugugugguu

SEQ ID NO: 742367 - RNA, 19 nt, Artificial Sequence
  Description of Artificial Sequence: Synthetic oligonucleotide
gcguucccaguaguuggua

SEQ ID NO: 742368 - RNA, 19 nt, Artificial Sequence
  Description of Artificial Sequence: Synthetic oligonucleotide
cagcgaugggcgucacguu

SEQ ID NO: 742369 - RNA, 19 nt, Artificial Sequence
  Description of Artificial Sequence: Synthetic oligonucleotide
cccgaggcaauggggccca

SEQ ID NO: 742370 - RNA, 19 nt, Artificial Sequence
  Description of Artificial Sequence: Synthetic oligonucleotide
cugcggcagggaccagcua

SEQ ID NO: 742371 - RNA, 19 nt, Artificial Sequence
  Description of Artificial Sequence: Synthetic oligonucleotide
ccacgccgaggcgcuugcg

SEQ ID NO: 742372 - RNA, 19 nt, Artificial Sequence
  Description of Artificial Sequence: Synthetic oligonucleotide
gcgucacguugauacccau

SEQ ID NO: 742373 - RNA, 19 nt, Artificial Sequence
  Description of Artificial Sequence: Synthetic oligonucleotide
cuacugccaugagcacacu

SEQ ID NO: 742374 - RNA, 19 nt, Artificial Sequence
  Description of Artificial Sequence: Synthetic oligonucleotide
gcgugccacccgcgcuggc

SEQ ID NO: 742375 - RNA, 19 nt, Artificial Sequence
  Description of Artificial Sequence: Synthetic oligonucleotide
cugaggcacccaggcugua

SEQ ID NO: 742376 - RNA, 19 nt, Artificial Sequence
  Description of Artificial Sequence: Synthetic oligonucleotide
gggugcgugggagccgcgu

SEQ ID NO: 742377 - RNA, 19 nt, Artificial Sequence
  Description of Artificial Sequence: Synthetic oligonucleotide
gagccgcguggugggcgcu

SEQ ID NO: 742378 - RNA, 19 nt, Artificial Sequence
  Description of Artificial Sequence: Synthetic oligonucleotide
ccgucuuguugaagccggu

SEQ ID NO: 742379 - RNA, 19 nt, Artificial Sequence
  Description of Artificial Sequence: Synthetic oligonucleotide
gccggcggccccagccaca

SEQ ID NO: 742380 - RNA, 19 nt, Artificial Sequence
  Description of Artificial Sequence: Synthetic oligonucleotide
gggcagcgaugggcgucac

SEQ ID NO: 742381 - RNA, 19 nt, Artificial Sequence
  Description of Artificial Sequence: Synthetic oligonucleotide
ccgaggcaauggggcccag

SEQ ID NO: 742382 - RNA, 19 nt, Artificial Sequence
  Description of Artificial Sequence: Synthetic oligonucleotide
cggcggccccagccacagg

SEQ ID NO: 742383 - RNA, 19 nt, Artificial Sequence
  Description of Artificial Sequence: Synthetic oligonucleotide
gcggagccucuggcccauc

SEQ ID NO: 742384 - RNA, 19 nt, Artificial Sequence
  Description of Artificial Sequence: Synthetic oligonucleotide
gcggcgggucugccuccau

SEQ ID NO: 742385 - RNA, 19 nt, Artificial Sequence
  Description of Artificial Sequence: Synthetic oligonucleotide
ccgaggcgcuugcggcggu

SEQ ID NO: 742386 - RNA, 19 nt, Artificial Sequence
  Description of Artificial Sequence: Synthetic oligonucleotide
cggcgguaguagcggcgcu

SEQ ID NO: 742387 - RNA, 19 nt, Artificial Sequence
  Description of Artificial Sequence: Synthetic oligonucleotide
aauguagagccucauaguc

SEQ ID NO: 742388 - RNA, 19 nt, Artificial Sequence
  Description of Artificial Sequence: Synthetic oligonucleotide
cuugucguaauguagagcc

SEQ ID NO: 742389 - RNA, 19 nt, Artificial Sequence
  Description of Artificial Sequence: Synthetic oligonucleotide
aauacgugaugcugcaagc

SEQ ID NO: 742390 - RNA, 19 nt, Artificial Sequence
  Description of Artificial Sequence: Synthetic oligonucleotide
guaauguagagccucauag

SEQ ID NO: 742391 - RNA, 19 nt, Artificial Sequence
  Description of Artificial Sequence: Synthetic oligonucleotide
aaacaagucaccgugggag

SEQ ID NO: 742392 - RNA, 19 nt, Artificial Sequence
  Description of Artificial Sequence: Synthetic oligonucleotide
agcccaaagaaccaggugg

SEQ ID NO: 742393 - RNA, 19 nt, Artificial Sequence
  Description of Artificial Sequence: Synthetic oligonucleotide
auaugaauacagcaggcuc

SEQ ID NO: 742394 - RNA, 19 nt, Artificial Sequence
  Description of Artificial Sequence: Synthetic oligonucleotide
uccaagaaacaccacuugg

SEQ ID NO: 742395 - RNA, 19 nt, Artificial Sequence
  Description of Artificial Sequence: Synthetic oligonucleotide
aaugaaaugacuggguaca

SEQ ID NO: 742396 - RNA, 19 nt, Artificial Sequence
  Description of Artificial Sequence: Synthetic oligonucleotide
agcauagaacaucuuauuc

SEQ ID NO: 742397 - RNA, 19 nt, Artificial Sequence
  Description of Artificial Sequence: Synthetic oligonucleotide
uagucgugcauacugaccc

SEQ ID NO: 742398 - RNA, 19 nt, Artificial Sequence
  Description of Artificial Sequence: Synthetic oligonucleotide
uaugaauacagcaggcucu

SEQ ID NO: 742399 - RNA, 19 nt, Artificial Sequence
  Description of Artificial Sequence: Synthetic oligonucleotide
gaauacgugaugcugcaag

SEQ ID NO: 742400 - RNA, 19 nt, Artificial Sequence
  Description of Artificial Sequence: Synthetic oligonucleotide
aacaagucaccgugggagc

SEQ ID NO: 742401 - RNA, 19 nt, Artificial Sequence
  Description of Artificial Sequence: Synthetic oligonucleotide
gaaaugacuggguacauga

SEQ ID NO: 742402 - RNA, 19 nt, Artificial Sequence
  Description of Artificial Sequence: Synthetic oligonucleotide
auaaaucucguccugggca

SEQ ID NO: 742403 - RNA, 19 nt, Artificial Sequence
  Description of Artificial Sequence: Synthetic oligonucleotide
gauauaaaucucguccugg

SEQ ID NO: 742404 - RNA, 19 nt, Artificial Sequence
  Description of Artificial Sequence: Synthetic oligonucleotide
uucgaauacgugaugcugc

SEQ ID NO: 742405 - RNA, 19 nt, Artificial Sequence
  Description of Artificial Sequence: Synthetic oligonucleotide
aaugcugacgguucuccag

SEQ ID NO: 742406 - RNA, 19 nt, Artificial Sequence
  Description of Artificial Sequence: Synthetic oligonucleotide
uuccaucacacacuacucg

SEQ ID NO: 742407 - RNA, 19 nt, Artificial Sequence
  Description of Artificial Sequence: Synthetic oligonucleotide
ucacacacuacucggaugu

SEQ ID NO: 742408 - RNA, 19 nt, Artificial Sequence
  Description of Artificial Sequence: Synthetic oligonucleotide
agucauuccucuuggcggc

SEQ ID NO: 742409 - RNA, 19 nt, Artificial Sequence
  Description of Artificial Sequence: Synthetic oligonucleotide
ucuaggauauaaaucucgu

SEQ ID NO: 742410 - RNA, 19 nt, Artificial Sequence
  Description of Artificial Sequence: Synthetic oligonucleotide
aucuuauuccgaaagcggc

SEQ ID NO: 742411 - RNA, 19 nt, Artificial Sequence
  Description of Artificial Sequence: Synthetic oligonucleotide
guaaacaagucaccguggg

SEQ ID NO: 742412 - RNA, 19 nt, Artificial Sequence
  Description of Artificial Sequence: Synthetic oligonucleotide
uucucgagacucaugaaac

SEQ ID NO: 742413 - RNA, 19 nt, Artificial Sequence
  Description of Artificial Sequence: Synthetic oligonucleotide
uguagagccucauagucgu

SEQ ID NO: 742414 - RNA, 19 nt, Artificial Sequence
  Description of Artificial Sequence: Synthetic oligonucleotide
ucaugaaacuccaggguga

SEQ ID NO: 742415 - RNA, 19 nt, Artificial Sequence
  Description of Artificial Sequence: Synthetic oligonucleotide
ugucgauccuguagaagcg

SEQ ID NO: 742416 - RNA, 19 nt, Artificial Sequence
  Description of Artificial Sequence: Synthetic oligonucleotide
ucgagacucaugaaacucc

SEQ ID NO: 742417 - RNA, 19 nt, Artificial Sequence
  Description of Artificial Sequence: Synthetic oligonucleotide
ugaggucaccuccugcucg

SEQ ID NO: 742418 - RNA, 19 nt, Artificial Sequence
  Description of Artificial Sequence: Synthetic oligonucleotide
uggugagcagcacuucucg

SEQ ID NO: 742419 - RNA, 19 nt, Artificial Sequence
  Description of Artificial Sequence: Synthetic oligonucleotide
agucagagaaggccguccc

SEQ ID NO: 742420 - RNA, 19 nt, Artificial Sequence
  Description of Artificial Sequence: Synthetic oligonucleotide
agcucuaguccucugguag

SEQ ID NO: 742421 - RNA, 19 nt, Artificial Sequence
  Description of Artificial Sequence: Synthetic oligonucleotide
gaucugaguggcuucuggg

SEQ ID NO: 742422 - RNA, 19 nt, Artificial Sequence
  Description of Artificial Sequence: Synthetic oligonucleotide
aaagcggcuguugaacuuc

SEQ ID NO: 742423 - RNA, 19 nt, Artificial Sequence
  Description of Artificial Sequence: Synthetic oligonucleotide
agcuucuacaauguagugg

SEQ ID NO: 742424 - RNA, 19 nt, Artificial Sequence
  Description of Artificial Sequence: Synthetic oligonucleotide
uucuacaauguaguggcag

SEQ ID NO: 742425 - RNA, 19 nt, Artificial Sequence
  Description of Artificial Sequence: Synthetic oligonucleotide
ugguguaagagugugcggc

SEQ ID NO: 742426 - RNA, 19 nt, Artificial Sequence
  Description of Artificial Sequence: Synthetic oligonucleotide
gucuaggauauaaaucucg

SEQ ID NO: 742427 - RNA, 19 nt, Artificial Sequence
  Description of Artificial Sequence: Synthetic oligonucleotide
agccuucucagcucgcugc

SEQ ID NO: 742428 - RNA, 19 nt, Artificial Sequence
  Description of Artificial Sequence: Synthetic oligonucleotide
cuucaaucaggucuucacc

SEQ ID NO: 742429 - RNA, 19 nt, Artificial Sequence
  Description of Artificial Sequence: Synthetic oligonucleotide
aggcucaaagucauggugc

SEQ ID NO: 742430 - RNA, 19 nt, Artificial Sequence
  Description of Artificial Sequence: Synthetic oligonucleotide
agucucucaaugugggcac

SEQ ID NO: 742431 - RNA, 19 nt, Artificial Sequence
  Description of Artificial Sequence: Synthetic oligonucleotide
uaauguagagccucauagu

SEQ ID NO: 742432 - RNA, 19 nt, Artificial Sequence
  Description of Artificial Sequence: Synthetic oligonucleotide
uccgucacauaguugaggu

SEQ ID NO: 742433 - RNA, 19 nt, Artificial Sequence
  Description of Artificial Sequence: Synthetic oligonucleotide
ucauagucgugcauacuga

SEQ ID NO: 742434 - RNA, 19 nt, Artificial Sequence
  Description of Artificial Sequence: Synthetic oligonucleotide
caucaaggaucucuggcgg

SEQ ID NO: 742435 - RNA, 19 nt, Artificial Sequence
  Description of Artificial Sequence: Synthetic oligonucleotide
ugcaccaucgggcuccugc

SEQ ID NO: 742436 - RNA, 19 nt, Artificial Sequence
  Description of Artificial Sequence: Synthetic oligonucleotide
uagugucccucgcugaucc

SEQ ID NO: 742437 - RNA, 19 nt, Artificial Sequence
  Description of Artificial Sequence: Synthetic oligonucleotide
acacuuuacugagucacac

SEQ ID NO: 742438 - RNA, 19 nt, Artificial Sequence
  Description of Artificial Sequence: Synthetic oligonucleotide
ugcuaaggaugucauggug

SEQ ID NO: 742439 - RNA, 19 nt, Artificial Sequence
  Description of Artificial Sequence: Synthetic oligonucleotide
gaugucauggugaagccga

SEQ ID NO: 742440 - RNA, 19 nt, Artificial Sequence
  Description of Artificial Sequence: Synthetic oligonucleotide
cuuggcuaaguccuuggag

SEQ ID NO: 742441 - RNA, 19 nt, Artificial Sequence
  Description of Artificial Sequence: Synthetic oligonucleotide
cugaucgcugugaaguggg

SEQ ID NO: 742442 - RNA, 19 nt, Artificial Sequence
  Description of Artificial Sequence: Synthetic oligonucleotide
ugagcagcacuucucggca

SEQ ID NO: 742443 - RNA, 19 nt, Artificial Sequence
  Description of Artificial Sequence: Synthetic oligonucleotide
uaaacaagucaccguggga

SEQ ID NO: 742444 - RNA, 19 nt, Artificial Sequence
  Description of Artificial Sequence: Synthetic oligonucleotide
uccccuuaacuacacggcc

SEQ ID NO: 742445 - RNA, 19 nt, Artificial Sequence
  Description of Artificial Sequence: Synthetic oligonucleotide
ugacgguucuccagguagg

SEQ ID NO: 742446 - RNA, 19 nt, Artificial Sequence
  Description of Artificial Sequence: Synthetic oligonucleotide
cugacgguucuccagguag

SEQ ID NO: 742447 - RNA, 19 nt, Artificial Sequence
  Description of Artificial Sequence: Synthetic oligonucleotide
ccagacagcccaaagaacc

SEQ ID NO: 742448 - RNA, 19 nt, Artificial Sequence
  Description of Artificial Sequence: Synthetic oligonucleotide
uuaacuacacggccgucuc

SEQ ID NO: 742449 - RNA, 19 nt, Artificial Sequence
  Description of Artificial Sequence: Synthetic oligonucleotide
aacaccacuuggaggauag

SEQ ID NO: 742450 - RNA, 19 nt, Artificial Sequence
  Description of Artificial Sequence: Synthetic oligonucleotide
cucgagguagccaucauca

SEQ ID NO: 742451 - RNA, 19 nt, Artificial Sequence
  Description of Artificial Sequence: Synthetic oligonucleotide
uuagguccauuccaucaca

SEQ ID NO: 742452 - RNA, 19 nt, Artificial Sequence
  Description of Artificial Sequence: Synthetic oligonucleotide
gcaucaaggaucucuggcg

SEQ ID NO: 742453 - RNA, 19 nt, Artificial Sequence
  Description of Artificial Sequence: Synthetic oligonucleotide
auagucgugcauacugacc

SEQ ID NO: 742454 - RNA, 19 nt, Artificial Sequence
  Description of Artificial Sequence: Synthetic oligonucleotide
uguaagagugugcggcucu

SEQ ID NO: 742455 - RNA, 19 nt, Artificial Sequence
  Description of Artificial Sequence: Synthetic oligonucleotide
cagauagaagggcuaggcg

SEQ ID NO: 742456 - RNA, 19 nt, Artificial Sequence
  Description of Artificial Sequence: Synthetic oligonucleotide
acuacucggaugugcuugg

SEQ ID NO: 742457 - RNA, 19 nt, Artificial Sequence
  Description of Artificial Sequence: Synthetic oligonucleotide
uaaaucucguccugggcaa

SEQ ID NO: 742458 - RNA, 19 nt, Artificial Sequence
  Description of Artificial Sequence: Synthetic oligonucleotide
auucgaauacgugaugcug

SEQ ID NO: 742459 - RNA, 19 nt, Artificial Sequence
  Description of Artificial Sequence: Synthetic oligonucleotide
acacacuacucggaugugc

SEQ ID NO: 742460 - RNA, 19 nt, Artificial Sequence
  Description of Artificial Sequence: Synthetic oligonucleotide
uccuugucguaauguagag

SEQ ID NO: 742461 - RNA, 19 nt, Artificial Sequence
  Description of Artificial Sequence: Synthetic oligonucleotide
uguacuagggauggccuug

SEQ ID NO: 742462 - RNA, 19 nt, Artificial Sequence
  Description of Artificial Sequence: Synthetic oligonucleotide
uggggauguugagaaaacg

SEQ ID NO: 742463 - RNA, 19 nt, Artificial Sequence
  Description of Artificial Sequence: Synthetic oligonucleotide
gauaguugguggcacgguc

SEQ ID NO: 742464 - RNA, 19 nt, Artificial Sequence
  Description of Artificial Sequence: Synthetic oligonucleotide
cuaggauauaaaucucguc

SEQ ID NO: 742465 - RNA, 19 nt, Artificial Sequence
  Description of Artificial Sequence: Synthetic oligonucleotide
auaguugguggcacggucg

SEQ ID NO: 742466 - RNA, 19 nt, Artificial Sequence
  Description of Artificial Sequence: Synthetic oligonucleotide
gaggauaguugguggcacg

SEQ ID NO: 742467 - RNA, 19 nt, Artificial Sequence
  Description of Artificial Sequence: Synthetic oligonucleotide
acaagucaccgugggagcc

SEQ ID NO: 742468 - RNA, 19 nt, Artificial Sequence
  Description of Artificial Sequence: Synthetic oligonucleotide
aggagcucuaguccucugg

SEQ ID NO: 742469 - RNA, 19 nt, Artificial Sequence
  Description of Artificial Sequence: Synthetic oligonucleotide
auuacacuuuacugaguca

SEQ ID NO: 742470 - RNA, 19 nt, Artificial Sequence
  Description of Artificial Sequence: Synthetic oligonucleotide
uacacuuuacugagucaca

SEQ ID NO: 742471 - RNA, 19 nt, Artificial Sequence
  Description of Artificial Sequence: Synthetic oligonucleotide
cauagucgugcauacugac

SEQ ID NO: 742472 - RNA, 19 nt, Artificial Sequence
  Description of Artificial Sequence: Synthetic oligonucleotide
ugcucgguguagcuccugg

SEQ ID NO: 742473 - RNA, 19 nt, Artificial Sequence
  Description of Artificial Sequence: Synthetic oligonucleotide
ugugcggcucugcuggucc

SEQ ID NO: 742474 - RNA, 19 nt, Artificial Sequence
  Description of Artificial Sequence: Synthetic oligonucleotide
gaaaacgaugcacuggggu

SEQ ID NO: 742475 - RNA, 19 nt, Artificial Sequence
  Description of Artificial Sequence: Synthetic oligonucleotide
auccaagaaacaccacuug

SEQ ID NO: 742476 - RNA, 19 nt, Artificial Sequence
  Description of Artificial Sequence: Synthetic oligonucleotide
uguuccuugucguaaugua

SEQ ID NO: 742477 - RNA, 19 nt, Artificial Sequence
  Description of Artificial Sequence: Synthetic oligonucleotide
ucgaauacgugaugcugca

SEQ ID NO: 742478 - RNA, 19 nt, Artificial Sequence
  Description of Artificial Sequence: Synthetic oligonucleotide
aacuacacggccgucuccu

SEQ ID NO: 742479 - RNA, 19 nt, Artificial Sequence
  Description of Artificial Sequence: Synthetic oligonucleotide
gguccauuccaucacacac

SEQ ID NO: 742480 - RNA, 19 nt, Artificial Sequence
  Description of Artificial Sequence: Synthetic oligonucleotide
ucgauccuguagaagcggc

SEQ ID NO: 742481 - RNA, 19 nt, Artificial Sequence
  Description of Artificial Sequence: Synthetic oligonucleotide
agugcugcuaaggauguca

SEQ ID NO: 742482 - RNA, 19 nt, Artificial Sequence
  Description of Artificial Sequence: Synthetic oligonucleotide
cuucccuagggcagggucc

SEQ ID NO: 742483 - RNA, 19 nt, Artificial Sequence
  Description of Artificial Sequence: Synthetic oligonucleotide
ugucguaauguagagccuc

SEQ ID NO: 742484 - RNA, 19 nt, Artificial Sequence
  Description of Artificial Sequence: Synthetic oligonucleotide
aaaugacuggguacaugag

SEQ ID NO: 742485 - RNA, 19 nt, Artificial Sequence
  Description of Artificial Sequence: Synthetic oligonucleotide
ucugguagugucccucgcu

SEQ ID NO: 742486 - RNA, 19 nt, Artificial Sequence
  Description of Artificial Sequence: Synthetic oligonucleotide
gagucucucaaugugggca

SEQ ID NO: 742487 - RNA, 19 nt, Artificial Sequence
  Description of Artificial Sequence: Synthetic oligonucleotide
uuccgaaagcggcuguuga

SEQ ID NO: 742488 - RNA, 19 nt, Artificial Sequence
  Description of Artificial Sequence: Synthetic oligonucleotide
acggucggggacuuggcuc

SEQ ID NO: 742489 - RNA, 19 nt, Artificial Sequence
  Description of Artificial Sequence: Synthetic oligonucleotide
ucucgagacucaugaaacu

SEQ ID NO: 742490 - RNA, 19 nt, Artificial Sequence
  Description of Artificial Sequence: Synthetic oligonucleotide
guggcauccaagaaacacc

SEQ ID NO: 742491 - RNA, 19 nt, Artificial Sequence
  Description of Artificial Sequence: Synthetic oligonucleotide
guugguggcacggucgggg

SEQ ID NO: 742492 - RNA, 19 nt, Artificial Sequence
  Description of Artificial Sequence: Synthetic oligonucleotide
uaguccucugguagugucc

SEQ ID NO: 742493 - RNA, 19 nt, Artificial Sequence
  Description of Artificial Sequence: Synthetic oligonucleotide
caccacggugcccagaggc

SEQ ID NO: 742494 - RNA, 19 nt, Artificial Sequence
  Description of Artificial Sequence: Synthetic oligonucleotide
uggagcuugcagaagucau

SEQ ID NO: 742495 - RNA, 19 nt, Artificial Sequence
  Description of Artificial Sequence: Synthetic oligonucleotide
cuuauuccgaaagcggcug

SEQ ID NO: 742496 - RNA, 19 nt, Artificial Sequence
  Description of Artificial Sequence: Synthetic oligonucleotide
uggcuaaguccuuggagcu

SEQ ID NO: 742497 - RNA, 19 nt, Artificial Sequence
  Description of Artificial Sequence: Synthetic oligonucleotide
ugaucgcugugaagugggg

SEQ ID NO: 742498 - RNA, 19 nt, Artificial Sequence
  Description of Artificial Sequence: Synthetic oligonucleotide
aaucucguccugggcaauc

SEQ ID NO: 742499 - RNA, 19 nt, Artificial Sequence
  Description of Artificial Sequence: Synthetic oligonucleotide
uccgugguccccuuaacua

SEQ ID NO: 742500 - RNA, 19 nt, Artificial Sequence
  Description of Artificial Sequence: Synthetic oligonucleotide
caaucaggucuucaccuug

SEQ ID NO: 742501 - RNA, 19 nt, Artificial Sequence
  Description of Artificial Sequence: Synthetic oligonucleotide
aacgaugcacugggguuuc

SEQ ID NO: 742502 - RNA, 19 nt, Artificial Sequence
  Description of Artificial Sequence: Synthetic oligonucleotide
gucacacccagcuguaaac

SEQ ID NO: 742503 - RNA, 19 nt, Artificial Sequence
  Description of Artificial Sequence: Synthetic oligonucleotide
ugauccgugguccccuuaa

SEQ ID NO: 742504 - RNA, 19 nt, Artificial Sequence
  Description of Artificial Sequence: Synthetic oligonucleotide
ucuccgucacauaguugag

SEQ ID NO: 742505 - RNA, 19 nt, Artificial Sequence
  Description of Artificial Sequence: Synthetic oligonucleotide
uagcggacuacuuccuuac

SEQ ID NO: 742506 - RNA, 19 nt, Artificial Sequence
  Description of Artificial Sequence: Synthetic oligonucleotide
uacgugaugcugcaagcuu

SEQ ID NO: 742507 - RNA, 19 nt, Artificial Sequence
  Description of Artificial Sequence: Synthetic oligonucleotide
ggauauaaaucucguccug

SEQ ID NO: 742508 - RNA, 19 nt, Artificial Sequence
  Description of Artificial Sequence: Synthetic oligonucleotide
ugcgugguguaagagugug

SEQ ID NO: 742509 - RNA, 19 nt, Artificial Sequence
  Description of Artificial Sequence: Synthetic oligonucleotide
cuucucgagacucaugaaa

SEQ ID NO: 742510 - RNA, 19 nt, Artificial Sequence
  Description of Artificial Sequence: Synthetic oligonucleotide
uuauuccgaaagcggcugu

SEQ ID NO: 742511 - RNA, 19 nt, Artificial Sequence
  Description of Artificial Sequence: Synthetic oligonucleotide
ggcacagaggccuccuucg

SEQ ID NO: 742512 - RNA, 19 nt, Artificial Sequence
  Description of Artificial Sequence: Synthetic oligonucleotide
ugcaugaggucaccuccug

SEQ ID NO: 742513 - RNA, 19 nt, Artificial Sequence
  Description of Artificial Sequence: Synthetic oligonucleotide
gggcauaugaauacagcag

SEQ ID NO: 742514 - RNA, 19 nt, Artificial Sequence
  Description of Artificial Sequence: Synthetic oligonucleotide
cccagaagccuccagacag

SEQ ID NO: 742515 - RNA, 19 nt, Artificial Sequence
  Description of Artificial Sequence: Synthetic oligonucleotide
aaucaggucuucaccuuga

SEQ ID NO: 742516 - RNA, 19 nt, Artificial Sequence
  Description of Artificial Sequence: Synthetic oligonucleotide
ucgagcuguuccuugucgu

SEQ ID NO: 742517 - RNA, 19 nt, Artificial Sequence
  Description of Artificial Sequence: Synthetic oligonucleotide
cugguagugucccucgcug

SEQ ID NO: 742518 - RNA, 19 nt, Artificial Sequence
  Description of Artificial Sequence: Synthetic oligonucleotide
auagaagggcuaggcgccc

SEQ ID NO: 742519 - RNA, 19 nt, Artificial Sequence
  Description of Artificial Sequence: Synthetic oligonucleotide
auacagcaggcucuugagu

SEQ ID NO: 742520 - RNA, 19 nt, Artificial Sequence
  Description of Artificial Sequence: Synthetic oligonucleotide
cucgagacucaugaaacuc

SEQ ID NO: 742521 - RNA, 19 nt, Artificial Sequence
  Description of Artificial Sequence: Synthetic oligonucleotide
uaacuacacggccgucucc

SEQ ID NO: 742522 - RNA, 19 nt, Artificial Sequence
  Description of Artificial Sequence: Synthetic oligonucleotide
ugcugaucgcugugaagug

SEQ ID NO: 742523 - RNA, 19 nt, Artificial Sequence
  Description of Artificial Sequence: Synthetic oligonucleotide
ucgugcauacugacccugc

SEQ ID NO: 742524 - RNA, 19 nt, Artificial Sequence
  Description of Artificial Sequence: Synthetic oligonucleotide
uggaggauaguugguggca

SEQ ID NO: 742525 - RNA, 19 nt, Artificial Sequence
  Description of Artificial Sequence: Synthetic oligonucleotide
cuaguccucugguaguguc

SEQ ID NO: 742526 - RNA, 19 nt, Artificial Sequence
  Description of Artificial Sequence: Synthetic oligonucleotide
uugucguaauguagagccu

SEQ ID NO: 742527 - RNA, 19 nt, Artificial Sequence
  Description of Artificial Sequence: Synthetic oligonucleotide
cacuacucggaugugcuug

SEQ ID NO: 742528 - RNA, 19 nt, Artificial Sequence
  Description of Artificial Sequence: Synthetic oligonucleotide
gugguguaagagugugcgg

SEQ ID NO: 742529 - RNA, 19 nt, Artificial Sequence
  Description of Artificial Sequence: Synthetic oligonucleotide
gauucgaauacgugaugcu

SEQ ID NO: 742530 - RNA, 19 nt, Artificial Sequence
  Description of Artificial Sequence: Synthetic oligonucleotide
agucacacccagcuguaaa

SEQ ID NO: 742531 - RNA, 19 nt, Artificial Sequence
  Description of Artificial Sequence: Synthetic oligonucleotide
uccuuacugccagagcuga

SEQ ID NO: 742532 - RNA, 19 nt, Artificial Sequence
  Description of Artificial Sequence: Synthetic oligonucleotide
ucucuggcggugcaugguc

SEQ ID NO: 742533 - RNA, 19 nt, Artificial Sequence
  Description of Artificial Sequence: Synthetic oligonucleotide
ggucaggccgggcugaugc

SEQ ID NO: 742534 - RNA, 19 nt, Artificial Sequence
  Description of Artificial Sequence: Synthetic oligonucleotide
aagggcgauucgaauacgu

SEQ ID NO: 742535 - RNA, 19 nt, Artificial Sequence
  Description of Artificial Sequence: Synthetic oligonucleotide
gggcuaggcgcccagaagc

SEQ ID NO: 742536 - RNA, 19 nt, Artificial Sequence
  Description of Artificial Sequence: Synthetic oligonucleotide
cuguuccccaugaacccag

SEQ ID NO: 742537 - RNA, 19 nt, Artificial Sequence
  Description of Artificial Sequence: Synthetic oligonucleotide
uccuucgagcuguuccuug

SEQ ID NO: 742538 - RNA, 19 nt, Artificial Sequence
  Description of Artificial Sequence: Synthetic oligonucleotide
ugguccccuuaacuacacg

SEQ ID NO: 742539 - RNA, 19 nt, Artificial Sequence
  Description of Artificial Sequence: Synthetic oligonucleotide
gucgauccuguagaagcgg

SEQ ID NO: 742540 - RNA, 19 nt, Artificial Sequence
  Description of Artificial Sequence: Synthetic oligonucleotide
uccagguaggcagcuagcu

SEQ ID NO: 742541 - RNA, 19 nt, Artificial Sequence
  Description of Artificial Sequence: Synthetic oligonucleotide
auccgugguccccuuaacu

SEQ ID NO: 742542 - RNA, 19 nt, Artificial Sequence
  Description of Artificial Sequence: Synthetic oligonucleotide
uugcgaagggcgauucgaa

SEQ ID NO: 742543 - RNA, 19 nt, Artificial Sequence
  Description of Artificial Sequence: Synthetic oligonucleotide
gaagggcgauucgaauacg

SEQ ID NO: 742544 - RNA, 19 nt, Artificial Sequence
  Description of Artificial Sequence: Synthetic oligonucleotide
cagugaccgggguaugggg

SEQ ID NO: 742545 - RNA, 19 nt, Artificial Sequence
  Description of Artificial Sequence: Synthetic oligonucleotide
uggggcagcgcuccugcgc

SEQ ID NO: 742546 - RNA, 19 nt, Artificial Sequence
  Description of Artificial Sequence: Synthetic oligonucleotide
uccgaaagcggcuguugaa

SEQ ID NO: 742547 - RNA, 19 nt, Artificial Sequence
  Description of Artificial Sequence: Synthetic oligonucleotide
auacgugaugcugcaagcu

SEQ ID NO: 742548 - RNA, 19 nt, Artificial Sequence
  Description of Artificial Sequence: Synthetic oligonucleotide
aucaaggaucucuggcggu

SEQ ID NO: 742549 - RNA, 19 nt, Artificial Sequence
  Description of Artificial Sequence: Synthetic oligonucleotide
agaaaacgaugcacugggg

SEQ ID NO: 742550 - RNA, 19 nt, Artificial Sequence
  Description of Artificial Sequence: Synthetic oligonucleotide
uaaggaugucauggugaag

SEQ ID NO: 742551 - RNA, 19 nt, Artificial Sequence
  Description of Artificial Sequence: Synthetic oligonucleotide
uccuguagaagcggcuggc

SEQ ID NO: 742552 - RNA, 19 nt, Artificial Sequence
  Description of Artificial Sequence: Synthetic oligonucleotide
ugguagugucccucgcuga

SEQ ID NO: 742553 - RNA, 19 nt, Artificial Sequence
  Description of Artificial Sequence: Synthetic oligonucleotide
ugagucacacccagcugua

SEQ ID NO: 742554 - RNA, 19 nt, Artificial Sequence
  Description of Artificial Sequence: Synthetic oligonucleotide
cuccgucacauaguugagg

SEQ ID NO: 742555 - RNA, 19 nt, Artificial Sequence
  Description of Artificial Sequence: Synthetic oligonucleotide
gauggugcgcugacccagg

SEQ ID NO: 742556 - RNA, 19 nt, Artificial Sequence
  Description of Artificial Sequence: Synthetic oligonucleotide
cacggcagagcucuagguc

SEQ ID NO: 742557 - RNA, 19 nt, Artificial Sequence
  Description of Artificial Sequence: Synthetic oligonucleotide
guugcgaagggcgauucga

SEQ ID NO: 742558 - RNA, 19 nt, Artificial Sequence
  Description of Artificial Sequence: Synthetic oligonucleotide
ggcggcuucaaucaggucu

SEQ ID NO: 742559 - RNA, 19 nt, Artificial Sequence
  Description of Artificial Sequence: Synthetic oligonucleotide
cagguaggcagcuagcucu

SEQ ID NO: 742560 - RNA, 19 nt, Artificial Sequence
  Description of Artificial Sequence: Synthetic oligonucleotide
guccccuuaacuacacggc

SEQ ID NO: 742561 - RNA, 19 nt, Artificial Sequence
  Description of Artificial Sequence: Synthetic oligonucleotide
acgugaugcugcaagcuug

SEQ ID NO: 742562 - RNA, 19 nt, Artificial Sequence
  Description of Artificial Sequence: Synthetic oligonucleotide
gccgcugaggcucaaaguc

SEQ ID NO: 742563 - RNA, 19 nt, Artificial Sequence
  Description of Artificial Sequence: Synthetic oligonucleotide
gacccugcucaccuggauc

SEQ ID NO: 742564 - RNA, 19 nt, Artificial Sequence
  Description of Artificial Sequence: Synthetic oligonucleotide
cgugguguaagagugugcg

SEQ ID NO: 742565 - RNA, 19 nt, Artificial Sequence
  Description of Artificial Sequence: Synthetic oligonucleotide
aaucuccgucacauaguug

SEQ ID NO: 742566 - RNA, 19 nt, Artificial Sequence
  Description of Artificial Sequence: Synthetic oligonucleotide
agcgggcauaugaauacag

SEQ ID NO: 742567 - RNA, 19 nt, Artificial Sequence
  Description of Artificial Sequence: Synthetic oligonucleotide
auuccgaaagcggcuguug

SEQ ID NO: 742568 - RNA, 19 nt, Artificial Sequence
  Description of Artificial Sequence: Synthetic oligonucleotide
gggcgauucgaauacguga

SEQ ID NO: 742569 - RNA, 19 nt, Artificial Sequence
  Description of Artificial Sequence: Synthetic oligonucleotide
caccgugggagccccaccc

SEQ ID NO: 742570 - RNA, 19 nt, Artificial Sequence
  Description of Artificial Sequence: Synthetic oligonucleotide
cucuggcggugcauggucc

SEQ ID NO: 742571 - RNA, 19 nt, Artificial Sequence
  Description of Artificial Sequence: Synthetic oligonucleotide
ugcgaagggcgauucgaau

SEQ ID NO: 742572 - RNA, 19 nt, Artificial Sequence
  Description of Artificial Sequence: Synthetic oligonucleotide
guacuagggauggccuugg

SEQ ID NO: 742573 - RNA, 19 nt, Artificial Sequence
  Description of Artificial Sequence: Synthetic oligonucleotide
uaggcgcccagaagccucc

SEQ ID NO: 742574 - RNA, 19 nt, Artificial Sequence
  Description of Artificial Sequence: Synthetic oligonucleotide
cagcuucuacaauguagug

SEQ ID NO: 742575 - RNA, 19 nt, Artificial Sequence
  Description of Artificial Sequence: Synthetic oligonucleotide
uaagagugugcggcucugc

SEQ ID NO: 742576 - RNA, 19 nt, Artificial Sequence
  Description of Artificial Sequence: Synthetic oligonucleotide
uacacggccgucuccugau

SEQ ID NO: 742577 - RNA, 19 nt, Artificial Sequence
  Description of Artificial Sequence: Synthetic oligonucleotide
gcagcgggcauaugaauac

SEQ ID NO: 742578 - RNA, 19 nt, Artificial Sequence
  Description of Artificial Sequence: Synthetic oligonucleotide
gacugcgugguguaagagu

SEQ ID NO: 742579 - RNA, 19 nt, Artificial Sequence
  Description of Artificial Sequence: Synthetic oligonucleotide
gcggacuacuuccuuacug

SEQ ID NO: 742580 - RNA, 19 nt, Artificial Sequence
  Description of Artificial Sequence: Synthetic oligonucleotide
cucgcugauccgugguccc

SEQ ID NO: 742581 - RNA, 19 nt, Artificial Sequence
  Description of Artificial Sequence: Synthetic oligonucleotide
ccccuuaacuacacggccg

SEQ ID NO: 742582 - RNA, 19 nt, Artificial Sequence
  Description of Artificial Sequence: Synthetic oligonucleotide
cuggucccggugcaugagg

SEQ ID NO: 742583 - RNA, 19 nt, Artificial Sequence
  Description of Artificial Sequence: Synthetic oligonucleotide
ucgggcuccugcuggaguc

SEQ ID NO: 742584 - RNA, 19 nt, Artificial Sequence
  Description of Artificial Sequence: Synthetic oligonucleotide
agucgugcauacugacccu

SEQ ID NO: 742585 - RNA, 19 nt, Artificial Sequence
  Description of Artificial Sequence: Synthetic oligonucleotide
cugccggggagugucaccc

SEQ ID NO: 742586 - RNA, 19 nt, Artificial Sequence
  Description of Artificial Sequence: Synthetic oligonucleotide
cucuaguccucugguagug

SEQ ID NO: 742587 - RNA, 19 nt, Artificial Sequence
  Description of Artificial Sequence: Synthetic oligonucleotide
cuucucggcacugggucag

SEQ ID NO: 742588 - RNA, 19 nt, Artificial Sequence
  Description of Artificial Sequence: Synthetic oligonucleotide
agaaggccgucccagcaua

SEQ ID NO: 742589 - RNA, 19 nt, Artificial Sequence
  Description of Artificial Sequence: Synthetic oligonucleotide
gaugaccucgagguagcca

SEQ ID NO: 742590 - RNA, 19 nt, Artificial Sequence
  Description of Artificial Sequence: Synthetic oligonucleotide
cggacuacuuccuuacugc

SEQ ID NO: 742591 - RNA, 19 nt, Artificial Sequence
  Description of Artificial Sequence: Synthetic oligonucleotide
auggugcgcugacccaggg

SEQ ID NO: 742592 - RNA, 19 nt, Artificial Sequence
  Description of Artificial Sequence: Synthetic oligonucleotide
ggggauguugagaaaacga

SEQ ID NO: 742593 - RNA, 19 nt, Artificial Sequence
  Description of Artificial Sequence: Synthetic oligonucleotide
ucgcugugaaguggggcag

SEQ ID NO: 742594 - RNA, 19 nt, Artificial Sequence
  Description of Artificial Sequence: Synthetic oligonucleotide
guagcggacuacuuccuua

SEQ ID NO: 742595 - RNA, 19 nt, Artificial Sequence
  Description of Artificial Sequence: Synthetic oligonucleotide
ucuaguccucugguagugu

SEQ ID NO: 742596 - RNA, 19 nt, Artificial Sequence
  Description of Artificial Sequence: Synthetic oligonucleotide
uggcagauggugcgcugac

SEQ ID NO: 742597 - RNA, 19 nt, Artificial Sequence
  Description of Artificial Sequence: Synthetic oligonucleotide
gauccgugguccccuuaac

SEQ ID NO: 742598 - RNA, 19 nt, Artificial Sequence
  Description of Artificial Sequence: Synthetic oligonucleotide
agugucccucgcugauccg

SEQ ID NO: 742599 - RNA, 19 nt, Artificial Sequence
  Description of Artificial Sequence: Synthetic oligonucleotide
gcugaucgcugugaagugg

SEQ ID NO: 742600 - RNA, 19 nt, Artificial Sequence
  Description of Artificial Sequence: Synthetic oligonucleotide
uacuagggauggccuuggc

SEQ ID NO: 742601 - RNA, 19 nt, Artificial Sequence
  Description of Artificial Sequence: Synthetic oligonucleotide
gcauccaagaaacaccacu

SEQ ID NO: 742602 - RNA, 19 nt, Artificial Sequence
  Description of Artificial Sequence: Synthetic oligonucleotide
ugcucaccuggauccucag

SEQ ID NO: 742603 - RNA, 19 nt, Artificial Sequence
  Description of Artificial Sequence: Synthetic oligonucleotide
caaggaucucuggcggugc

SEQ ID NO: 742604 - RNA, 19 nt, Artificial Sequence
  Description of Artificial Sequence: Synthetic oligonucleotide
aaacaccacuuggaggaua

SEQ ID NO: 742605 - RNA, 19 nt, Artificial Sequence
  Description of Artificial Sequence: Synthetic oligonucleotide
cauccaagaaacaccacuu

SEQ ID NO: 742606 - RNA, 19 nt, Artificial Sequence
  Description of Artificial Sequence: Synthetic oligonucleotide
augaauacagcaggcucuu

SEQ ID NO: 742607 - RNA, 19 nt, Artificial Sequence
  Description of Artificial Sequence: Synthetic oligonucleotide
ccucuuggcggcuucaauc

SEQ ID NO: 742608 - RNA, 19 nt, Artificial Sequence
  Description of Artificial Sequence: Synthetic oligonucleotide
cagcccaaagaaccaggug

SEQ ID NO: 742609 - RNA, 19 nt, Artificial Sequence
  Description of Artificial Sequence: Synthetic oligonucleotide
cgauucgaauacgugaugc

SEQ ID NO: 742610 - RNA, 19 nt, Artificial Sequence
  Description of Artificial Sequence: Synthetic oligonucleotide
cugcgcuuggccuucugca

SEQ ID NO: 742611 - RNA, 19 nt, Artificial Sequence
  Description of Artificial Sequence: Synthetic oligonucleotide
cugacugcgugguguaaga

SEQ ID NO: 742612 - RNA, 19 nt, Artificial Sequence
  Description of Artificial Sequence: Synthetic oligonucleotide
gccgucccagcauagaaca

SEQ ID NO: 742613 - RNA, 19 nt, Artificial Sequence
  Description of Artificial Sequence: Synthetic oligonucleotide
uggguacaugaggaucgcc

SEQ ID NO: 742614 - RNA, 19 nt, Artificial Sequence
  Description of Artificial Sequence: Synthetic oligonucleotide
agggcgauucgaauacgug

SEQ ID NO: 742615 - RNA, 19 nt, Artificial Sequence
  Description of Artificial Sequence: Synthetic oligonucleotide
gaagucagagaaggccguc

SEQ ID NO: 742616 - RNA, 19 nt, Artificial Sequence
  Description of Artificial Sequence: Synthetic oligonucleotide
ucgagguagccaucaucau

SEQ ID NO: 742617 - RNA, 19 nt, Artificial Sequence
  Description of Artificial Sequence: Synthetic oligonucleotide
cuuggccguggugagcagc

SEQ ID NO: 742618 - RNA, 19 nt, Artificial Sequence
  Description of Artificial Sequence: Synthetic oligonucleotide
gaagcggcuggcaguggug

SEQ ID NO: 742619 - RNA, 19 nt, Artificial Sequence
  Description of Artificial Sequence: Synthetic oligonucleotide
ggguacaugaggaucgcca

SEQ ID NO: 742620 - RNA, 19 nt, Artificial Sequence
  Description of Artificial Sequence: Synthetic oligonucleotide
guaagagugugcggcucug

SEQ ID NO: 742621 - RNA, 19 nt, Artificial Sequence
  Description of Artificial Sequence: Synthetic oligonucleotide
ggcacggucggggacuugg

SEQ ID NO: 742622 - RNA, 19 nt, Artificial Sequence
  Description of Artificial Sequence: Synthetic oligonucleotide
uauuccgaaagcggcuguu

SEQ ID NO: 742623 - RNA, 19 nt, Artificial Sequence
  Description of Artificial Sequence: Synthetic oligonucleotide
gguugcgaagggcgauucg

SEQ ID NO: 742624 - RNA, 19 nt, Artificial Sequence
  Description of Artificial Sequence: Synthetic oligonucleotide
cuuaacuacacggccgucu

SEQ ID NO: 742625 - RNA, 19 nt, Artificial Sequence
  Description of Artificial Sequence: Synthetic oligonucleotide
gaaggccgucccagcauag

SEQ ID NO: 742626 - RNA, 19 nt, Artificial Sequence
  Description of Artificial Sequence: Synthetic oligonucleotide
gucgugcauacugacccug

SEQ ID NO: 742627 - RNA, 19 nt, Artificial Sequence
  Description of Artificial Sequence: Synthetic oligonucleotide
ugacccugcucaccuggau

SEQ ID NO: 742628 - RNA, 19 nt, Artificial Sequence
  Description of Artificial Sequence: Synthetic oligonucleotide
ugggcccugucgauccugu

SEQ ID NO: 742629 - RNA, 19 nt, Artificial Sequence
  Description of Artificial Sequence: Synthetic oligonucleotide
acuacacggccgucuccug

SEQ ID NO: 742630 - RNA, 19 nt, Artificial Sequence
  Description of Artificial Sequence: Synthetic oligonucleotide
ggagucucucaaugugggc

SEQ ID NO: 742631 - RNA, 19 nt, Artificial Sequence
  Description of Artificial Sequence: Synthetic oligonucleotide
aaggccgucccagcauaga

SEQ ID NO: 742632 - RNA, 19 nt, Artificial Sequence
  Description of Artificial Sequence: Synthetic oligonucleotide
cagggucuaggauauaaau

SEQ ID NO: 742633 - RNA, 19 nt, Artificial Sequence
  Description of Artificial Sequence: Synthetic oligonucleotide
cucgggaacuggcugcuga

SEQ ID NO: 742634 - RNA, 19 nt, Artificial Sequence
  Description of Artificial Sequence: Synthetic oligonucleotide
cucgcugccggggaguguc

SEQ ID NO: 742635 - RNA, 19 nt, Artificial Sequence
  Description of Artificial Sequence: Synthetic oligonucleotide
cgaagggcgauucgaauac

SEQ ID NO: 742636 - RNA, 19 nt, Artificial Sequence
  Description of Artificial Sequence: Synthetic oligonucleotide
ccaaagaaccagguggcug

SEQ ID NO: 742637 - RNA, 19 nt, Artificial Sequence
  Description of Artificial Sequence: Synthetic oligonucleotide
gaccucgagguagccauca

SEQ ID NO: 742638 - RNA, 19 nt, Artificial Sequence
  Description of Artificial Sequence: Synthetic oligonucleotide
gucguaauguagagccuca

SEQ ID NO: 742639 - RNA, 19 nt, Artificial Sequence
  Description of Artificial Sequence: Synthetic oligonucleotide
gcagugaccgggguauggg

SEQ ID NO: 742640 - RNA, 19 nt, Artificial Sequence
  Description of Artificial Sequence: Synthetic oligonucleotide
augaaaugacuggguacau

SEQ ID NO: 742641 - RNA, 19 nt, Artificial Sequence
  Description of Artificial Sequence: Synthetic oligonucleotide
ggagaggagcucuaguccu

SEQ ID NO: 742642 - RNA, 19 nt, Artificial Sequence
  Description of Artificial Sequence: Synthetic oligonucleotide
cuggguacaugaggaucgc

SEQ ID NO: 742643 - RNA, 19 nt, Artificial Sequence
  Description of Artificial Sequence: Synthetic oligonucleotide
agcggacuacuuccuuacu

SEQ ID NO: 742644 - RNA, 19 nt, Artificial Sequence
  Description of Artificial Sequence: Synthetic oligonucleotide
gcugacugcgugguguaag

SEQ ID NO: 742645 - RNA, 19 nt, Artificial Sequence
  Description of Artificial Sequence: Synthetic oligonucleotide
ucguaauguagagccucau

SEQ ID NO: 742646 - RNA, 19 nt, Artificial Sequence
  Description of Artificial Sequence: Synthetic oligonucleotide
gcccaaagaaccagguggc

SEQ ID NO: 742647 - RNA, 19 nt, Artificial Sequence
  Description of Artificial Sequence: Synthetic oligonucleotide
cuucuacaauguaguggca

SEQ ID NO: 742648 - RNA, 19 nt, Artificial Sequence
  Description of Artificial Sequence: Synthetic oligonucleotide
ugguggcacggucggggac

SEQ ID NO: 742649 - RNA, 19 nt, Artificial Sequence
  Description of Artificial Sequence: Synthetic oligonucleotide
ccuagaucugaguggcuuc

SEQ ID NO: 742650 - RNA, 19 nt, Artificial Sequence
  Description of Artificial Sequence: Synthetic oligonucleotide
ggaggauaguugguggcac

SEQ ID NO: 742651 - RNA, 19 nt, Artificial Sequence
  Description of Artificial Sequence: Synthetic oligonucleotide
uagaagggcuaggcgccca

SEQ ID NO: 742652 - RNA, 19 nt, Artificial Sequence
  Description of Artificial Sequence: Synthetic oligonucleotide
cgggcauaugaauacagca

SEQ ID NO: 742653 - RNA, 19 nt, Artificial Sequence
  Description of Artificial Sequence: Synthetic oligonucleotide
agcuagcucugugucuuga

SEQ ID NO: 742654 - RNA, 19 nt, Artificial Sequence
  Description of Artificial Sequence: Synthetic oligonucleotide
acacuacucggaugugcuu

SEQ ID NO: 742655 - RNA, 19 nt, Artificial Sequence
  Description of Artificial Sequence: Synthetic oligonucleotide
uggcggugcaugguccagc

SEQ ID NO: 742656 - RNA, 19 nt, Artificial Sequence
  Description of Artificial Sequence: Synthetic oligonucleotide
gcuguggugaggggaaggc

SEQ ID NO: 742657 - RNA, 19 nt, Artificial Sequence
  Description of Artificial Sequence: Synthetic oligonucleotide
ccuugucguaauguagagc

SEQ ID NO: 742658 - RNA, 19 nt, Artificial Sequence
  Description of Artificial Sequence: Synthetic oligonucleotide
cuccaugcccacccaccug

SEQ ID NO: 742659 - RNA, 19 nt, Artificial Sequence
  Description of Artificial Sequence: Synthetic oligonucleotide
ccgugguccccuuaacuac

SEQ ID NO: 742660 - RNA, 19 nt, Artificial Sequence
  Description of Artificial Sequence: Synthetic oligonucleotide
guguaagagugugcggcuc

SEQ ID NO: 742661 - RNA, 19 nt, Artificial Sequence
  Description of Artificial Sequence: Synthetic oligonucleotide
cccagcuguaaacaaguca

SEQ ID NO: 742662 - RNA, 19 nt, Artificial Sequence
  Description of Artificial Sequence: Synthetic oligonucleotide
ucgcugauccguggucccc

SEQ ID NO: 742663 - RNA, 19 nt, Artificial Sequence
  Description of Artificial Sequence: Synthetic oligonucleotide
aucucuggcggugcauggu

SEQ ID NO: 742664 - RNA, 19 nt, Artificial Sequence
  Description of Artificial Sequence: Synthetic oligonucleotide
gcccugucgauccuguaga

SEQ ID NO: 742665 - RNA, 19 nt, Artificial Sequence
  Description of Artificial Sequence: Synthetic oligonucleotide
gcgauucgaauacgugaug

SEQ ID NO: 742666 - RNA, 19 nt, Artificial Sequence
  Description of Artificial Sequence: Synthetic oligonucleotide
gcaaggagaggagcucuag

SEQ ID NO: 742667 - RNA, 19 nt, Artificial Sequence
  Description of Artificial Sequence: Synthetic oligonucleotide
gucaggccgggcugaugcc

SEQ ID NO: 742668 - RNA, 19 nt, Artificial Sequence
  Description of Artificial Sequence: Synthetic oligonucleotide
gcgaagggcgauucgaaua

SEQ ID NO: 742669 - RNA, 19 nt, Artificial Sequence
  Description of Artificial Sequence: Synthetic oligonucleotide
cugugaaguggggcagcgc

SEQ ID NO: 742670 - RNA, 19 nt, Artificial Sequence
  Description of Artificial Sequence: Synthetic oligonucleotide
gcgggcauaugaauacagc

SEQ ID NO: 742671 - RNA, 19 nt, Artificial Sequence
  Description of Artificial Sequence: Synthetic oligonucleotide
cuacucggaugugcuuggc

SEQ ID NO: 742672 - RNA, 19 nt, Artificial Sequence
  Description of Artificial Sequence: Synthetic oligonucleotide
cagauggugcgcugaccca

SEQ ID NO: 742673 - RNA, 19 nt, Artificial Sequence
  Description of Artificial Sequence: Synthetic oligonucleotide
agggcagcgggcauaugaa

SEQ ID NO: 742674 - RNA, 19 nt, Artificial Sequence
  Description of Artificial Sequence: Synthetic oligonucleotide
caucacacacuacucggau

SEQ ID NO: 742675 - RNA, 19 nt, Artificial Sequence
  Description of Artificial Sequence: Synthetic oligonucleotide
gguaaugcugacgguucuc

SEQ ID NO: 742676 - RNA, 19 nt, Artificial Sequence
  Description of Artificial Sequence: Synthetic oligonucleotide
gagcugacugcguggugua

SEQ ID NO: 742677 - RNA, 19 nt, Artificial Sequence
  Description of Artificial Sequence: Synthetic oligonucleotide
cuagaucugaguggcuucu

SEQ ID NO: 742678 - RNA, 19 nt, Artificial Sequence
  Description of Artificial Sequence: Synthetic oligonucleotide
caccaucgggcuccugcug

SEQ ID NO: 742679 - RNA, 19 nt, Artificial Sequence
  Description of Artificial Sequence: Synthetic oligonucleotide
gguguaagagugugcggcu

SEQ ID NO: 742680 - RNA, 19 nt, Artificial Sequence
  Description of Artificial Sequence: Synthetic oligonucleotide
agugugcggcucugcuggu

SEQ ID NO: 742681 - RNA, 19 nt, Artificial Sequence
  Description of Artificial Sequence: Synthetic oligonucleotide
ggagcucuaguccucuggu

SEQ ID NO: 742682 - RNA, 19 nt, Artificial Sequence
  Description of Artificial Sequence: Synthetic oligonucleotide
ggugaggggaaggcugccc

SEQ ID NO: 742683 - RNA, 19 nt, Artificial Sequence
  Description of Artificial Sequence: Synthetic oligonucleotide
ccucgcugauccguggucc

SEQ ID NO: 742684 - RNA, 19 nt, Artificial Sequence
  Description of Artificial Sequence: Synthetic oligonucleotide
ggcuaggcgcccagaagcc

SEQ ID NO: 742685 - RNA, 19 nt, Artificial Sequence
  Description of Artificial Sequence: Synthetic oligonucleotide
cacacacuacucggaugug

SEQ ID NO: 742686 - RNA, 19 nt, Artificial Sequence
  Description of Artificial Sequence: Synthetic oligonucleotide
cagagcugacugcguggug

SEQ ID NO: 742687 - RNA, 19 nt, Artificial Sequence
  Description of Artificial Sequence: Synthetic oligonucleotide
agguagcggacuacuuccu

SEQ ID NO: 742688 - RNA, 19 nt, Artificial Sequence
  Description of Artificial Sequence: Synthetic oligonucleotide
gucaccgugggagccccac

SEQ ID NO: 742689 - RNA, 19 nt, Artificial Sequence
  Description of Artificial Sequence: Synthetic oligonucleotide
ccaucacacacuacucgga

SEQ ID NO: 742690 - RNA, 19 nt, Artificial Sequence
  Description of Artificial Sequence: Synthetic oligonucleotide
ggcgauucgaauacgugau

SEQ ID NO: 742691 - RNA, 19 nt, Artificial Sequence
  Description of Artificial Sequence: Synthetic oligonucleotide
ggcggugcaugguccagca

SEQ ID NO: 742692 - RNA, 19 nt, Artificial Sequence
  Description of Artificial Sequence: Synthetic oligonucleotide
ugaggccgugcagcauccc

SEQ ID NO: 742693 - RNA, 19 nt, Artificial Sequence
  Description of Artificial Sequence: Synthetic oligonucleotide
cuggcggugcaugguccag

SEQ ID NO: 742694 - RNA, 19 nt, Artificial Sequence
  Description of Artificial Sequence: Synthetic oligonucleotide
cggucggggacuuggcucc

SEQ ID NO: 742695 - RNA, 19 nt, Artificial Sequence
  Description of Artificial Sequence: Synthetic oligonucleotide
gugcgcugacccagggcag

SEQ ID NO: 742696 - RNA, 19 nt, Artificial Sequence
  Description of Artificial Sequence: Synthetic oligonucleotide
agcucgcugccggggagug

SEQ ID NO: 742697 - RNA, 19 nt, Artificial Sequence
  Description of Artificial Sequence: Synthetic oligonucleotide
ucgcugccggggaguguca

SEQ ID NO: 742698 - RNA, 19 nt, Artificial Sequence
  Description of Artificial Sequence: Synthetic oligonucleotide
gcauggugccugcacagua

SEQ ID NO: 742699 - RNA, 19 nt, Artificial Sequence
  Description of Artificial Sequence: Synthetic oligonucleotide
ugccggggagugucacccu

SEQ ID NO: 742700 - RNA, 19 nt, Artificial Sequence
  Description of Artificial Sequence: Synthetic oligonucleotide
gguagugucccucgcugau

SEQ ID NO: 742701 - RNA, 19 nt, Artificial Sequence
  Description of Artificial Sequence: Synthetic oligonucleotide
gagucacacccagcuguaa

SEQ ID NO: 742702 - RNA, 19 nt, Artificial Sequence
  Description of Artificial Sequence: Synthetic oligonucleotide
gcugccggggagugucacc

SEQ ID NO: 742703 - RNA, 19 nt, Artificial Sequence
  Description of Artificial Sequence: Synthetic oligonucleotide
uggcggcuucaaucagguc

SEQ ID NO: 742704 - RNA, 19 nt, Artificial Sequence
  Description of Artificial Sequence: Synthetic oligonucleotide
ggggagugucacccugcug

SEQ ID NO: 742705 - RNA, 19 nt, Artificial Sequence
  Description of Artificial Sequence: Synthetic oligonucleotide
gaaacaccacuuggaggau

SEQ ID NO: 742706 - RNA, 19 nt, Artificial Sequence
  Description of Artificial Sequence: Synthetic oligonucleotide
gcucuaguccucugguagu

SEQ ID NO: 742707 - RNA, 19 nt, Artificial Sequence
  Description of Artificial Sequence: Synthetic oligonucleotide
cagcgggcauaugaauaca

SEQ ID NO: 742708 - RNA, 19 nt, Artificial Sequence
  Description of Artificial Sequence: Synthetic oligonucleotide
ggaagucagagaaggccgu

SEQ ID NO: 742709 - RNA, 19 nt, Artificial Sequence
  Description of Artificial Sequence: Synthetic oligonucleotide
ggcccagaguggguggggc

SEQ ID NO: 742710 - RNA, 19 nt, Artificial Sequence
  Description of Artificial Sequence: Synthetic oligonucleotide
ggcauccaagaaacaccac

SEQ ID NO: 742711 - RNA, 19 nt, Artificial Sequence
  Description of Artificial Sequence: Synthetic oligonucleotide
gcagagcucuaggucgcug

SEQ ID NO: 742712 - RNA, 19 nt, Artificial Sequence
  Description of Artificial Sequence: Synthetic oligonucleotide
ccgucuccugauccucccg

SEQ ID NO: 742713 - RNA, 19 nt, Artificial Sequence
  Description of Artificial Sequence: Synthetic oligonucleotide
gagccucauagucgugcau

SEQ ID NO: 742714 - RNA, 19 nt, Artificial Sequence
  Description of Artificial Sequence: Synthetic oligonucleotide
gugucccucgcugauccgu

SEQ ID NO: 742715 - RNA, 19 nt, Artificial Sequence
  Description of Artificial Sequence: Synthetic oligonucleotide
aggucaggccgggcugaug

SEQ ID NO: 742716 - RNA, 19 nt, Artificial Sequence
  Description of Artificial Sequence: Synthetic oligonucleotide
gcgugguguaagagugugc

SEQ ID NO: 742717 - RNA, 19 nt, Artificial Sequence
  Description of Artificial Sequence: Synthetic oligonucleotide
gggcacggcagagcucuag

SEQ ID NO: 742718 - RNA, 19 nt, Artificial Sequence
  Description of Artificial Sequence: Synthetic oligonucleotide
cgugguccccuuaacuaca

SEQ ID NO: 742719 - RNA, 19 nt, Artificial Sequence
  Description of Artificial Sequence: Synthetic oligonucleotide
cggugcaugaggucaccuc

SEQ ID NO: 742720 - RNA, 19 nt, Artificial Sequence
  Description of Artificial Sequence: Synthetic oligonucleotide
ggggcagcgcuccugcgcu

SEQ ID NO: 742721 - RNA, 19 nt, Artificial Sequence
  Description of Artificial Sequence: Synthetic oligonucleotide
gcagcuagcucugugucuu

SEQ ID NO: 742722 - RNA, 19 nt, Artificial Sequence
  Description of Artificial Sequence: Synthetic oligonucleotide
gcggugcaugguccagcag

SEQ ID NO: 742723 - RNA, 19 nt, Artificial Sequence
  Description of Artificial Sequence: Synthetic oligonucleotide
cagcagguagcggacuacu

SEQ ID NO: 742724 - RNA, 19 nt, Artificial Sequence
  Description of Artificial Sequence: Synthetic oligonucleotide
gggguuagguccauuccau

SEQ ID NO: 742725 - RNA, 19 nt, Artificial Sequence
  Description of Artificial Sequence: Synthetic oligonucleotide
cacggucggggacuuggcu

SEQ ID NO: 742726 - RNA, 19 nt, Artificial Sequence
  Description of Artificial Sequence: Synthetic oligonucleotide
cccuuaacuacacggccgu

SEQ ID NO: 742727 - RNA, 19 nt, Artificial Sequence
  Description of Artificial Sequence: Synthetic oligonucleotide
cuguggugaggggaaggcu

SEQ ID NO: 742728 - RNA, 19 nt, Artificial Sequence
  Description of Artificial Sequence: Synthetic oligonucleotide
ggauaguugguggcacggu

SEQ ID NO: 742729 - RNA, 19 nt, Artificial Sequence
  Description of Artificial Sequence: Synthetic oligonucleotide
gcccagaguggguggggca

SEQ ID NO: 742730 - RNA, 19 nt, Artificial Sequence
  Description of Artificial Sequence: Synthetic oligonucleotide
cccucgcugauccgugguc

SEQ ID NO: 742731 - RNA, 19 nt, Artificial Sequence
  Description of Artificial Sequence: Synthetic oligonucleotide
gguagcggacuacuuccuu

SEQ ID NO: 742732 - RNA, 19 nt, Artificial Sequence
  Description of Artificial Sequence: Synthetic oligonucleotide
gauccucccgcuggaucau

SEQ ID NO: 742733 - RNA, 19 nt, Artificial Sequence
  Description of Artificial Sequence: Synthetic oligonucleotide
ggccguggugagcagcacu

SEQ ID NO: 742734 - RNA, 19 nt, Artificial Sequence
  Description of Artificial Sequence: Synthetic oligonucleotide
ggccaucccacaggaaugu

SEQ ID NO: 742735 - RNA, 19 nt, Artificial Sequence
  Description of Artificial Sequence: Synthetic oligonucleotide
cugauccgugguccccuua

SEQ ID NO: 742736 - RNA, 19 nt, Artificial Sequence
  Description of Artificial Sequence: Synthetic oligonucleotide
gccgcucuccaugcccacc

SEQ ID NO: 742737 - RNA, 19 nt, Artificial Sequence
  Description of Artificial Sequence: Synthetic oligonucleotide
ccuuaacuacacggccguc

SEQ ID NO: 742738 - RNA, 19 nt, Artificial Sequence
  Description of Artificial Sequence: Synthetic oligonucleotide
gcacggucggggacuuggc

SEQ ID NO: 742739 - RNA, 19 nt, Artificial Sequence
  Description of Artificial Sequence: Synthetic oligonucleotide
ccgcuggaucaucugguaa

SEQ ID NO: 742740 - RNA, 19 nt, Artificial Sequence
  Description of Artificial Sequence: Synthetic oligonucleotide
cccggugcaugaggucacc

SEQ ID NO: 742741 - RNA, 19 nt, Artificial Sequence
  Description of Artificial Sequence: Synthetic oligonucleotide
cgagcuguuccuugucgua

SEQ ID NO: 742742 - RNA, 19 nt, Artificial Sequence
  Description of Artificial Sequence: Synthetic oligonucleotide
cugguugcgaagggcgauu

SEQ ID NO: 742743 - RNA, 19 nt, Artificial Sequence
  Description of Artificial Sequence: Synthetic oligonucleotide
cccgcuggaucaucuggua

SEQ ID NO: 742744 - RNA, 19 nt, Artificial Sequence
  Description of Artificial Sequence: Synthetic oligonucleotide
gccguggugagcagcacuu

SEQ ID NO: 742745 - RNA, 19 nt, Artificial Sequence
  Description of Artificial Sequence: Synthetic oligonucleotide
gcucgggaacuggcugcug

SEQ ID NO: 742746 - RNA, 19 nt, Artificial Sequence
  Description of Artificial Sequence: Synthetic oligonucleotide
gcuaggcgcccagaagccu

SEQ ID NO: 742747 - RNA, 19 nt, Artificial Sequence
  Description of Artificial Sequence: Synthetic oligonucleotide
cccuagaucugaguggcuu

SEQ ID NO: 742748 - RNA, 19 nt, Artificial Sequence
  Description of Artificial Sequence: Synthetic oligonucleotide
cccugcagugaccggggua

SEQ ID NO: 742749 - RNA, 19 nt, Artificial Sequence
  Description of Artificial Sequence: Synthetic oligonucleotide
cgugcauacugacccugcu

SEQ ID NO: 742750 - RNA, 19 nt, Artificial Sequence
  Description of Artificial Sequence: Synthetic oligonucleotide
cgaauacgugaugcugcaa

SEQ ID NO: 742751 - RNA, 19 nt, Artificial Sequence
  Description of Artificial Sequence: Synthetic oligonucleotide
gcugauccgugguccccuu

SEQ ID NO: 742752 - RNA, 19 nt, Artificial Sequence
  Description of Artificial Sequence: Synthetic oligonucleotide
cgcugccggggagugucac

SEQ ID NO: 742753 - RNA, 19 nt, Artificial Sequence
  Description of Artificial Sequence: Synthetic oligonucleotide
gcgcugacccagggcagcu

SEQ ID NO: 742754 - RNA, 19 nt, Artificial Sequence
  Description of Artificial Sequence: Synthetic oligonucleotide
ccgucccagcauagaacau

SEQ ID NO: 742755 - RNA, 19 nt, Artificial Sequence
  Description of Artificial Sequence: Synthetic oligonucleotide
ggucggggacuuggcuccu

SEQ ID NO: 742756 - RNA, 19 nt, Artificial Sequence
  Description of Artificial Sequence: Synthetic oligonucleotide
ccggugcaugaggucaccu

SEQ ID NO: 742757 - RNA, 19 nt, Artificial Sequence
  Description of Artificial Sequence: Synthetic oligonucleotide
ccugggcccugucgauccu

SEQ ID NO: 742758 - RNA, 19 nt, Artificial Sequence
  Description of Artificial Sequence: Synthetic oligonucleotide
gcucgcugccggggagugu

SEQ ID NO: 742759 - RNA, 19 nt, Artificial Sequence
  Description of Artificial Sequence: Synthetic oligonucleotide
gggguggcauggggcuccu

SEQ ID NO: 742760 - RNA, 19 nt, Artificial Sequence
  Description of Artificial Sequence: Synthetic oligonucleotide
ggguggcauggggcuccuu

SEQ ID NO: 742761 - RNA, 19 nt, Artificial Sequence
  Description of Artificial Sequence: Synthetic oligonucleotide
acaguuaauauucaaaugg

SEQ ID NO: 742762 - RNA, 19 nt, Artificial Sequence
  Description of Artificial Sequence: Synthetic oligonucleotide
aauaacacaguuaauauuc

SEQ ID NO: 742763 - RNA, 19 nt, Artificial Sequence
  Description of Artificial Sequence: Synthetic oligonucleotide
aaacaagaaacagugaagc

SEQ ID NO: 742764 - RNA, 19 nt, Artificial Sequence
  Description of Artificial Sequence: Synthetic oligonucleotide
aaacugguaaaucaauggc

SEQ ID NO: 742765 - RNA, 19 nt, Artificial Sequence
  Description of Artificial Sequence: Synthetic oligonucleotide
aauacugaguaucagacga

SEQ ID NO: 742766 - RNA, 19 nt, Artificial Sequence
  Description of Artificial Sequence: Synthetic oligonucleotide
cuauuucuaaauauggugg

SEQ ID NO: 742767 - RNA, 19 nt, Artificial Sequence
  Description of Artificial Sequence: Synthetic oligonucleotide
auuggaacagcauauuuac

SEQ ID NO: 742768 - RNA, 19 nt, Artificial Sequence
  Description of Artificial Sequence: Synthetic oligonucleotide
auauagaugaguuuugucu

SEQ ID NO: 742769 - RNA, 19 nt, Artificial Sequence
  Description of Artificial Sequence: Synthetic oligonucleotide
aaauaugguggccuggagg

SEQ ID NO: 742770 - RNA, 19 nt, Artificial Sequence
  Description of Artificial Sequence: Synthetic oligonucleotide
uggaacagcauauuuacag

SEQ ID NO: 742771 - RNA, 19 nt, Artificial Sequence
  Description of Artificial Sequence: Synthetic oligonucleotide
aauaugguggccuggaggu

SEQ ID NO: 742772 - RNA, 19 nt, Artificial Sequence
  Description of Artificial Sequence: Synthetic oligonucleotide
aacaggugggcucagauca

SEQ ID NO: 742773 - RNA, 19 nt, Artificial Sequence
  Description of Artificial Sequence: Synthetic oligonucleotide
uccaugaucuugcaguugg

SEQ ID NO: 742774 - RNA, 19 nt, Artificial Sequence
  Description of Artificial Sequence: Synthetic oligonucleotide
aauuucucguucuuagcag

SEQ ID NO: 742775 - RNA, 19 nt, Artificial Sequence
  Description of Artificial Sequence: Synthetic oligonucleotide
acgcaagucaaacaaaggg

SEQ ID NO: 742776 - RNA, 19 nt, Artificial Sequence
  Description of Artificial Sequence: Synthetic oligonucleotide
aguuccuauauacacggac

SEQ ID NO: 742777 - RNA, 19 nt, Artificial Sequence
  Description of Artificial Sequence: Synthetic oligonucleotide
uuacaggguaguaacaugc

SEQ ID NO: 742778 - RNA, 19 nt, Artificial Sequence
  Description of Artificial Sequence: Synthetic oligonucleotide
aaagacaaccccucccugg

SEQ ID NO: 742779 - RNA, 19 nt, Artificial Sequence
  Description of Artificial Sequence: Synthetic oligonucleotide
agaucagagagauucgcac

SEQ ID NO: 742780 - RNA, 19 nt, Artificial Sequence
  Description of Artificial Sequence: Synthetic oligonucleotide
aagucaaacaaaggggucg

SEQ ID NO: 742781 - RNA, 19 nt, Artificial Sequence
  Description of Artificial Sequence: Synthetic oligonucleotide
uauacacggacacgcaugg

SEQ ID NO: 742782 - RNA, 19 nt, Artificial Sequence
  Description of Artificial Sequence: Synthetic oligonucleotide
cuggagugaauucugaagg

SEQ ID NO: 742783 - RNA, 19 nt, Artificial Sequence
  Description of Artificial Sequence: Synthetic oligonucleotide
uaucagacgacgcaaguca

SEQ ID NO: 742784 - RNA, 19 nt, Artificial Sequence
  Description of Artificial Sequence: Synthetic oligonucleotide
cauaguuccuauauacacg

SEQ ID NO: 742785 - RNA, 19 nt, Artificial Sequence
  Description of Artificial Sequence: Synthetic oligonucleotide
gaaacagugaagcaaguga

SEQ ID NO: 742786 - RNA, 19 nt, Artificial Sequence
  Description of Artificial Sequence: Synthetic oligonucleotide
uguugagaaagacaacccc

SEQ ID NO: 742787 - RNA, 19 nt, Artificial Sequence
  Description of Artificial Sequence: Synthetic oligonucleotide
auuucucguucuuagcagc

SEQ ID NO: 742788 - RNA, 19 nt, Artificial Sequence
  Description of Artificial Sequence: Synthetic oligonucleotide
acaauacugaguaucagac

SEQ ID NO: 742789 - RNA, 19 nt, Artificial Sequence
  Description of Artificial Sequence: Synthetic oligonucleotide
uauuucuaaauaugguggc

SEQ ID NO: 742790 - RNA, 19 nt, Artificial Sequence
  Description of Artificial Sequence: Synthetic oligonucleotide
aggucuuagccccaggccc

SEQ ID NO: 742791 - RNA, 19 nt, Artificial Sequence
  Description of Artificial Sequence: Synthetic oligonucleotide
aacgauaaacugguaaauc

SEQ ID NO: 742792 - RNA, 19 nt, Artificial Sequence
  Description of Artificial Sequence: Synthetic oligonucleotide
cauaccuuacaccuguacg

SEQ ID NO: 742793 - RNA, 19 nt, Artificial Sequence
  Description of Artificial Sequence: Synthetic oligonucleotide
ugaaggaggucuuagcccc

SEQ ID NO: 742794 - RNA, 19 nt, Artificial Sequence
  Description of Artificial Sequence: Synthetic oligonucleotide
aaacagugaagcaagugag

SEQ ID NO: 742795 - RNA, 19 nt, Artificial Sequence
  Description of Artificial Sequence: Synthetic oligonucleotide
guacauaguuccuauauac

SEQ ID NO: 742796 - RNA, 19 nt, Artificial Sequence
  Description of Artificial Sequence: Synthetic oligonucleotide
ccagauacagaauauauag

SEQ ID NO: 742797 - RNA, 19 nt, Artificial Sequence
  Description of Artificial Sequence: Synthetic oligonucleotide
gaagccaggucucaucugg

SEQ ID NO: 742798 - RNA, 19 nt, Artificial Sequence
  Description of Artificial Sequence: Synthetic oligonucleotide
aagccaaggguguuaacag

SEQ ID NO: 742799 - RNA, 19 nt, Artificial Sequence
  Description of Artificial Sequence: Synthetic oligonucleotide
accagaacaguccaugauc

SEQ ID NO: 742800 - RNA, 19 nt, Artificial Sequence
  Description of Artificial Sequence: Synthetic oligonucleotide
acgauaaacugguaaauca

SEQ ID NO: 742801 - RNA, 19 nt, Artificial Sequence
  Description of Artificial Sequence: Synthetic oligonucleotide
agugguagggcuugacacc

SEQ ID NO: 742802 - RNA, 19 nt, Artificial Sequence
  Description of Artificial Sequence: Synthetic oligonucleotide
agcaccaacauucuggcca

SEQ ID NO: 742803 - RNA, 19 nt, Artificial Sequence
  Description of Artificial Sequence: Synthetic oligonucleotide
aguuaauauucaaauggac

SEQ ID NO: 742804 - RNA, 19 nt, Artificial Sequence
  Description of Artificial Sequence: Synthetic oligonucleotide
auuucuaaauaugguggcc

SEQ ID NO: 742805 - RNA, 19 nt, Artificial Sequence
  Description of Artificial Sequence: Synthetic oligonucleotide
acacaguuaauauucaaau

SEQ ID NO: 742806 - RNA, 19 nt, Artificial Sequence
  Description of Artificial Sequence: Synthetic oligonucleotide
aauaagguaacuauuucua

SEQ ID NO: 742807 - RNA, 19 nt, Artificial Sequence
  Description of Artificial Sequence: Synthetic oligonucleotide
gaaacgauaaacugguaaa

SEQ ID NO: 742808 - RNA, 19 nt, Artificial Sequence
  Description of Artificial Sequence: Synthetic oligonucleotide
aaggcgaaaggcaaggcuc

SEQ ID NO: 742809 - RNA, 19 nt, Artificial Sequence
  Description of Artificial Sequence: Synthetic oligonucleotide
uagccgauagguuuccugg

SEQ ID NO: 742810 - RNA, 19 nt, Artificial Sequence
  Description of Artificial Sequence: Synthetic oligonucleotide
agcuacaauacugaguauc

SEQ ID NO: 742811 - RNA, 19 nt, Artificial Sequence
  Description of Artificial Sequence: Synthetic oligonucleotide
ggcucaggcaguuugagcg

SEQ ID NO: 742812 - RNA, 19 nt, Artificial Sequence
  Description of Artificial Sequence: Synthetic oligonucleotide
uuaauuucucguucuuagc

SEQ ID NO: 742813 - RNA, 19 nt, Artificial Sequence
  Description of Artificial Sequence: Synthetic oligonucleotide
aggguaguaacaugcggac

SEQ ID NO: 742814 - RNA, 19 nt, Artificial Sequence
  Description of Artificial Sequence: Synthetic oligonucleotide
aaggugagcgggcauaccu

SEQ ID NO: 742815 - RNA, 19 nt, Artificial Sequence
  Description of Artificial Sequence: Synthetic oligonucleotide
uuugcggucucaccagagg

SEQ ID NO: 742816 - RNA, 19 nt, Artificial Sequence
  Description of Artificial Sequence: Synthetic oligonucleotide
uuccuauauacacggacac

SEQ ID NO: 742817 - RNA, 19 nt, Artificial Sequence
  Description of Artificial Sequence: Synthetic oligonucleotide
caagcuuucuggcagguug

SEQ ID NO: 742818 - RNA, 19 nt, Artificial Sequence
  Description of Artificial Sequence: Synthetic oligonucleotide
aaaucaauggcgaguuaag

SEQ ID NO: 742819 - RNA, 19 nt, Artificial Sequence
  Description of Artificial Sequence: Synthetic oligonucleotide
aacuauuucuaaauauggu

SEQ ID NO: 742820 - RNA, 19 nt, Artificial Sequence
  Description of Artificial Sequence: Synthetic oligonucleotide
uauauagaugaguuuuguc

SEQ ID NO: 742821 - RNA, 19 nt, Artificial Sequence
  Description of Artificial Sequence: Synthetic oligonucleotide
ugaagcaagugagggaggg

SEQ ID NO: 742822 - RNA, 19 nt, Artificial Sequence
  Description of Artificial Sequence: Synthetic oligonucleotide
uacacggacacgcauggcu

SEQ ID NO: 742823 - RNA, 19 nt, Artificial Sequence
  Description of Artificial Sequence: Synthetic oligonucleotide
uauuuacaggguaguaaca

SEQ ID NO: 742824 - RNA, 19 nt, Artificial Sequence
  Description of Artificial Sequence: Synthetic oligonucleotide
uacugaguaucagacgacg

SEQ ID NO: 742825 - RNA, 19 nt, Artificial Sequence
  Description of Artificial Sequence: Synthetic oligonucleotide
aaggguguuaacagcauug

SEQ ID NO: 742826 - RNA, 19 nt, Artificial Sequence
  Description of Artificial Sequence: Synthetic oligonucleotide
ucuguauccgucucuccag

SEQ ID NO: 742827 - RNA, 19 nt, Artificial Sequence
  Description of Artificial Sequence: Synthetic oligonucleotide
cugagaucgucuuuggaug

SEQ ID NO: 742828 - RNA, 19 nt, Artificial Sequence
  Description of Artificial Sequence: Synthetic oligonucleotide
ucuaaauaugguggccugg

SEQ ID NO: 742829 - RNA, 19 nt, Artificial Sequence
  Description of Artificial Sequence: Synthetic oligonucleotide
caauacugaguaucagacg

SEQ ID NO: 742830 - RNA, 19 nt, Artificial Sequence
  Description of Artificial Sequence: Synthetic oligonucleotide
uucggauugggaugucugg

SEQ ID NO: 742831 - RNA, 19 nt, Artificial Sequence
  Description of Artificial Sequence: Synthetic oligonucleotide
ugagaaagacaaccccucc

SEQ ID NO: 742832 - RNA, 19 nt, Artificial Sequence
  Description of Artificial Sequence: Synthetic oligonucleotide
guaacaugcggacgaaaag

SEQ ID NO: 742833 - RNA, 19 nt, Artificial Sequence
  Description of Artificial Sequence: Synthetic oligonucleotide
cugugugcgacuuggagug

SEQ ID NO: 742834 - RNA, 19 nt, Artificial Sequence
  Description of Artificial Sequence: Synthetic oligonucleotide
cugaaggaggucuuagccc

SEQ ID NO: 742835 - RNA, 19 nt, Artificial Sequence
  Description of Artificial Sequence: Synthetic oligonucleotide
uauauacacggacacgcau

SEQ ID NO: 742836 - RNA, 19 nt, Artificial Sequence
  Description of Artificial Sequence: Synthetic oligonucleotide
acgaaaagcuacaauacug

SEQ ID NO: 742837 - RNA, 19 nt, Artificial Sequence
  Description of Artificial Sequence: Synthetic oligonucleotide
uguacauaguuccuauaua

SEQ ID NO: 742838 - RNA, 19 nt, Artificial Sequence
  Description of Artificial Sequence: Synthetic oligonucleotide
ugucggaaggacuugucac

SEQ ID NO: 742839 - RNA, 19 nt, Artificial Sequence
  Description of Artificial Sequence: Synthetic oligonucleotide
ccaggaaacgauaaacugg

SEQ ID NO: 742840 - RNA, 19 nt, Artificial Sequence
  Description of Artificial Sequence: Synthetic oligonucleotide
uaaauaugguggccuggag

SEQ ID NO: 742841 - RNA, 19 nt, Artificial Sequence
  Description of Artificial Sequence: Synthetic oligonucleotide
accccucuuguuuccaugc

SEQ ID NO: 742842 - RNA, 19 nt, Artificial Sequence
  Description of Artificial Sequence: Synthetic oligonucleotide
uucuaaauaugguggccug

SEQ ID NO: 742843 - RNA, 19 nt, Artificial Sequence
  Description of Artificial Sequence: Synthetic oligonucleotide
ugcggaccaagcuuucugg

SEQ ID NO: 742844 - RNA, 19 nt, Artificial Sequence
  Description of Artificial Sequence: Synthetic oligonucleotide
agccaaggguguuaacagc

SEQ ID NO: 742845 - RNA, 19 nt, Artificial Sequence
  Description of Artificial Sequence: Synthetic oligonucleotide
gacgacgcaagucaaacaa

SEQ ID NO: 742846 - RNA, 19 nt, Artificial Sequence
  Description of Artificial Sequence: Synthetic oligonucleotide
aaacgauaaacugguaaau

SEQ ID NO: 742847 - RNA, 19 nt, Artificial Sequence
  Description of Artificial Sequence: Synthetic oligonucleotide
ugagaucgucuuuggaugc

SEQ ID NO: 742848 - RNA, 19 nt, Artificial Sequence
  Description of Artificial Sequence: Synthetic oligonucleotide
agaauauauagaugaguuu

SEQ ID NO: 742849 - RNA, 19 nt, Artificial Sequence
  Description of Artificial Sequence: Synthetic oligonucleotide
aagcaagugagggagggga

SEQ ID NO: 742850 - RNA, 19 nt, Artificial Sequence
  Description of Artificial Sequence: Synthetic oligonucleotide
accccaggaaacgauaaac

SEQ ID NO: 742851 - RNA, 19 nt, Artificial Sequence
  Description of Artificial Sequence: Synthetic oligonucleotide
cuauggccagagaaggucc

SEQ ID NO: 742852 - RNA, 19 nt, Artificial Sequence
  Description of Artificial Sequence: Synthetic oligonucleotide
caggugaaugcgcaggugc

SEQ ID NO: 742853 - RNA, 19 nt, Artificial Sequence
  Description of Artificial Sequence: Synthetic oligonucleotide
cagcauauuuacaggguag

SEQ ID NO: 742854 - RNA, 19 nt, Artificial Sequence
  Description of Artificial Sequence: Synthetic oligonucleotide
ucagaucagagagauucgc

SEQ ID NO: 742855 - RNA, 19 nt, Artificial Sequence
  Description of Artificial Sequence: Synthetic oligonucleotide
caugcuacaguuguccuug

SEQ ID NO: 742856 - RNA, 19 nt, Artificial Sequence
  Description of Artificial Sequence: Synthetic oligonucleotide
uuaacagcauuggaacagc

SEQ ID NO: 742857 - RNA, 19 nt, Artificial Sequence
  Description of Artificial Sequence: Synthetic oligonucleotide
agcgggcauaccuuacacc

SEQ ID NO: 742858 - RNA, 19 nt, Artificial Sequence
  Description of Artificial Sequence: Synthetic oligonucleotide
uccuauauacacggacacg

SEQ ID NO: 742859 - RNA, 19 nt, Artificial Sequence
  Description of Artificial Sequence: Synthetic oligonucleotide
caguuaauauucaaaugga

SEQ ID NO: 742860 - RNA, 19 nt, Artificial Sequence
  Description of Artificial Sequence: Synthetic oligonucleotide
aggucuccgagguguaggc

SEQ ID NO: 742861 - RNA, 19 nt, Artificial Sequence
  Description of Artificial Sequence: Synthetic oligonucleotide
gguaguaacaugcggacga

SEQ ID NO: 742862 - RNA, 19 nt, Artificial Sequence
  Description of Artificial Sequence: Synthetic oligonucleotide
aaagugcucugagaucguc

SEQ ID NO: 742863 - RNA, 19 nt, Artificial Sequence
  Description of Artificial Sequence: Synthetic oligonucleotide
ucggauugggaugucuggg

SEQ ID NO: 742864 - RNA, 19 nt, Artificial Sequence
  Description of Artificial Sequence: Synthetic oligonucleotide
ugguaaaucaauggcgagu

SEQ ID NO: 742865 - RNA, 19 nt, Artificial Sequence
  Description of Artificial Sequence: Synthetic oligonucleotide
uuagcagcaccaacauucu

SEQ ID NO: 742866 - RNA, 19 nt, Artificial Sequence
  Description of Artificial Sequence: Synthetic oligonucleotide
agccgauagguuuccuggc

SEQ ID NO: 742867 - RNA, 19 nt, Artificial Sequence
  Description of Artificial Sequence: Synthetic oligonucleotide
cucagaucagagagauucg

SEQ ID NO: 742868 - RNA, 19 nt, Artificial Sequence
  Description of Artificial Sequence: Synthetic oligonucleotide
acgucuugcccuccuuugc

SEQ ID NO: 742869 - RNA, 19 nt, Artificial Sequence
  Description of Artificial Sequence: Synthetic oligonucleotide
agagauucgcaccgggaug

SEQ ID NO: 742870 - RNA, 19 nt, Artificial Sequence
  Description of Artificial Sequence: Synthetic oligonucleotide
auuuacaggguaguaacau

SEQ ID NO: 742871 - RNA, 19 nt, Artificial Sequence
  Description of Artificial Sequence: Synthetic oligonucleotide
gagauucgcaccgggaugc

SEQ ID NO: 742872 - RNA, 19 nt, Artificial Sequence
  Description of Artificial Sequence: Synthetic oligonucleotide
uauccgucucuccaguccu

SEQ ID NO: 742873 - RNA, 19 nt, Artificial Sequence
  Description of Artificial Sequence: Synthetic oligonucleotide
gaggauccuaucccugccg

SEQ ID NO: 742874 - RNA, 19 nt, Artificial Sequence
  Description of Artificial Sequence: Synthetic oligonucleotide
ugaguaucagacgacgcaa

SEQ ID NO: 742875 - RNA, 19 nt, Artificial Sequence
  Description of Artificial Sequence: Synthetic oligonucleotide
ucuccgagguguaggcgcg

SEQ ID NO: 742876 - RNA, 19 nt, Artificial Sequence
  Description of Artificial Sequence: Synthetic oligonucleotide
aggucaugaagagagcuug

SEQ ID NO: 742877 - RNA, 19 nt, Artificial Sequence
  Description of Artificial Sequence: Synthetic oligonucleotide
agaaacagugaagcaagug

SEQ ID NO: 742878 - RNA, 19 nt, Artificial Sequence
  Description of Artificial Sequence: Synthetic oligonucleotide
uggaggauccuaucccugc

SEQ ID NO: 742879 - RNA, 19 nt, Artificial Sequence
  Description of Artificial Sequence: Synthetic oligonucleotide
aguaucagacgacgcaagu

SEQ ID NO: 742880 - RNA, 19 nt, Artificial Sequence
  Description of Artificial Sequence: Synthetic oligonucleotide
aaaggugagcgggcauacc

SEQ ID NO: 742881 - RNA, 19 nt, Artificial Sequence
  Description of Artificial Sequence: Synthetic oligonucleotide
acacgcauggcuuucggau

SEQ ID NO: 742882 - RNA, 19 nt, Artificial Sequence
  Description of Artificial Sequence: Synthetic oligonucleotide
guauccgucucuccagucc

SEQ ID NO: 742883 - RNA, 19 nt, Artificial Sequence
  Description of Artificial Sequence: Synthetic oligonucleotide
gcuacaguuguccuuguug

SEQ ID NO: 742884 - RNA, 19 nt, Artificial Sequence
  Description of Artificial Sequence: Synthetic oligonucleotide
auauacacggacacgcaug

SEQ ID NO: 742885 - RNA, 19 nt, Artificial Sequence
  Description of Artificial Sequence: Synthetic oligonucleotide
ugcggucucaccagaggcc

SEQ ID NO: 742886 - RNA, 19 nt, Artificial Sequence
  Description of Artificial Sequence: Synthetic oligonucleotide
caucagguaggucuccgag

SEQ ID NO: 742887 - RNA, 19 nt, Artificial Sequence
  Description of Artificial Sequence: Synthetic oligonucleotide
ggaaacgauaaacugguaa

SEQ ID NO: 742888 - RNA, 19 nt, Artificial Sequence
  Description of Artificial Sequence: Synthetic oligonucleotide
aguuugagcggggugcggg

SEQ ID NO: 742889 - RNA, 19 nt, Artificial Sequence
  Description of Artificial Sequence: Synthetic oligonucleotide
uaggucuccgagguguagg

SEQ ID NO: 742890 - RNA, 19 nt, Artificial Sequence
  Description of Artificial Sequence: Synthetic oligonucleotide
uccuuugcggucucaccag

SEQ ID NO: 742891 - RNA, 19 nt, Artificial Sequence
  Description of Artificial Sequence: Synthetic oligonucleotide
uccuaucccugccgcaggg

SEQ ID NO: 742892 - RNA, 19 nt, Artificial Sequence
  Description of Artificial Sequence: Synthetic oligonucleotide
cugguaaaucaauggcgag

SEQ ID NO: 742893 - RNA, 19 nt, Artificial Sequence
  Description of Artificial Sequence: Synthetic oligonucleotide
uacgucuugcccuccuuug

SEQ ID NO: 742894 - RNA, 19 nt, Artificial Sequence
  Description of Artificial Sequence: Synthetic oligonucleotide
agagaaggucccacgcugc

SEQ ID NO: 742895 - RNA, 19 nt, Artificial Sequence
  Description of Artificial Sequence: Synthetic oligonucleotide
aacccaacagacagguuca

SEQ ID NO: 742896 - RNA, 19 nt, Artificial Sequence
  Description of Artificial Sequence: Synthetic oligonucleotide
cuuuggaugccaccagaac

SEQ ID NO: 742897 - RNA, 19 nt, Artificial Sequence
  Description of Artificial Sequence: Synthetic oligonucleotide
aguaacaugcggacgaaaa

SEQ ID NO: 742898 - RNA, 19 nt, Artificial Sequence
  Description of Artificial Sequence: Synthetic oligonucleotide
ucacugcgcccuuuggucc

SEQ ID NO: 742899 - RNA, 19 nt, Artificial Sequence
  Description of Artificial Sequence: Synthetic oligonucleotide
gcguuggugagacuggagg

SEQ ID NO: 742900 - RNA, 19 nt, Artificial Sequence
  Description of Artificial Sequence: Synthetic oligonucleotide
uggugagacuggagguugg

SEQ ID NO: 742901 - RNA, 19 nt, Artificial Sequence
  Description of Artificial Sequence: Synthetic oligonucleotide
guagccgauagguuuccug

SEQ ID NO: 742902 - RNA, 19 nt, Artificial Sequence
  Description of Artificial Sequence: Synthetic oligonucleotide
cuaucccugccgcagggcc

SEQ ID NO: 742903 - RNA, 19 nt, Artificial Sequence
  Description of Artificial Sequence: Synthetic oligonucleotide
uggguguugccuaggucug

SEQ ID NO: 742904 - RNA, 19 nt, Artificial Sequence
  Description of Artificial Sequence: Synthetic oligonucleotide
cagauacagaauauauaga

SEQ ID NO: 742905 - RNA, 19 nt, Artificial Sequence
  Description of Artificial Sequence: Synthetic oligonucleotide
agguaacuauuucuaaaua

SEQ ID NO: 742906 - RNA, 19 nt, Artificial Sequence
  Description of Artificial Sequence: Synthetic oligonucleotide
agcaccgagguagacuggg

SEQ ID NO: 742907 - RNA, 19 nt, Artificial Sequence
  Description of Artificial Sequence: Synthetic oligonucleotide
ucagagagauucgcaccgg

SEQ ID NO: 742908 - RNA, 19 nt, Artificial Sequence
  Description of Artificial Sequence: Synthetic oligonucleotide
ugacacccaggugaaugcg

SEQ ID NO: 742909 - RNA, 19 nt, Artificial Sequence
  Description of Artificial Sequence: Synthetic oligonucleotide
gaguaucagacgacgcaag

SEQ ID NO: 742910 - RNA, 19 nt, Artificial Sequence
  Description of Artificial Sequence: Synthetic oligonucleotide
ucaggcaguuugagcgggg

SEQ ID NO: 742911 - RNA, 19 nt, Artificial Sequence
  Description of Artificial Sequence: Synthetic oligonucleotide
acaaccccucccugggaac

SEQ ID NO: 742912 - RNA, 19 nt, Artificial Sequence
  Description of Artificial Sequence: Synthetic oligonucleotide
auucgcaccgggaugccgg

SEQ ID NO: 742913 - RNA, 19 nt, Artificial Sequence
  Description of Artificial Sequence: Synthetic oligonucleotide
caggaaacgauaaacuggu

SEQ ID NO: 742914 - RNA, 19 nt, Artificial Sequence
  Description of Artificial Sequence: Synthetic oligonucleotide
gaagcaagugagggagggg

SEQ ID NO: 742915 - RNA, 19 nt, Artificial Sequence
  Description of Artificial Sequence: Synthetic oligonucleotide
gucacugcgcccuuugguc

SEQ ID NO: 742916 - RNA, 19 nt, Artificial Sequence
  Description of Artificial Sequence: Synthetic oligonucleotide
auaacacaguuaauauuca

SEQ ID NO: 742917 - RNA, 19 nt, Artificial Sequence
  Description of Artificial Sequence: Synthetic oligonucleotide
guuugagcggggugcgggg

SEQ ID NO: 742918 - RNA, 19 nt, Artificial Sequence
  Description of Artificial Sequence: Synthetic oligonucleotide
ucucaccagaggccaagga

SEQ ID NO: 742919 - RNA, 19 nt, Artificial Sequence
  Description of Artificial Sequence: Synthetic oligonucleotide
cuuugcggucucaccagag

SEQ ID NO: 742920 - RNA, 19 nt, Artificial Sequence
  Description of Artificial Sequence: Synthetic oligonucleotide
aacccauuucccugggcuu

SEQ ID NO: 742921 - RNA, 19 nt, Artificial Sequence
  Description of Artificial Sequence: Synthetic oligonucleotide
ucaucagguaggucuccga

SEQ ID NO: 742922 - RNA, 19 nt, Artificial Sequence
  Description of Artificial Sequence: Synthetic oligonucleotide
gugagugauggcucaccag

SEQ ID NO: 742923 - RNA, 19 nt, Artificial Sequence
  Description of Artificial Sequence: Synthetic oligonucleotide
ggacgaaaagcuacaauac

SEQ ID NO: 742924 - RNA, 19 nt, Artificial Sequence
  Description of Artificial Sequence: Synthetic oligonucleotide
gaaggcgaaaggcaaggcu

SEQ ID NO: 742925 - RNA, 19 nt, Artificial Sequence
  Description of Artificial Sequence: Synthetic oligonucleotide
agaugaguuuugucuaguu

SEQ ID NO: 742926 - RNA, 19 nt, Artificial Sequence
  Description of Artificial Sequence: Synthetic oligonucleotide
gacgcguuggcaaaggacu

SEQ ID NO: 742927 - RNA, 19 nt, Artificial Sequence
  Description of Artificial Sequence: Synthetic oligonucleotide
gucggaaggacuugucaca

SEQ ID NO: 742928 - RNA, 19 nt, Artificial Sequence
  Description of Artificial Sequence: Synthetic oligonucleotide
uuacaccuguacgucuugc

SEQ ID NO: 742929 - RNA, 19 nt, Artificial Sequence
  Description of Artificial Sequence: Synthetic oligonucleotide
ugggguggcgcaacaggug

SEQ ID NO: 742930 - RNA, 19 nt, Artificial Sequence
  Description of Artificial Sequence: Synthetic oligonucleotide
cccaggaaacgauaaacug

SEQ ID NO: 742931 - RNA, 19 nt, Artificial Sequence
  Description of Artificial Sequence: Synthetic oligonucleotide
uagaugaguuuugucuagu

SEQ ID NO: 742932 - RNA, 19 nt, Artificial Sequence
  Description of Artificial Sequence: Synthetic oligonucleotide
ccuuuggaggauccuaucc

SEQ ID NO: 742933 - RNA, 19 nt, Artificial Sequence
  Description of Artificial Sequence: Synthetic oligonucleotide
ugauggcucaccagguguu

SEQ ID NO: 742934 - RNA, 19 nt, Artificial Sequence
  Description of Artificial Sequence: Synthetic oligonucleotide
agacgacgcaagucaaaca

SEQ ID NO: 742935 - RNA, 19 nt, Artificial Sequence
  Description of Artificial Sequence: Synthetic oligonucleotide
guaucagacgacgcaaguc

SEQ ID NO: 742936 - RNA, 19 nt, Artificial Sequence
  Description of Artificial Sequence: Synthetic oligonucleotide
agguguuccaccacugugu

SEQ ID NO: 742937 - RNA, 19 nt, Artificial Sequence
  Description of Artificial Sequence: Synthetic oligonucleotide
uaguuccuauauacacgga

SEQ ID NO: 742938 - RNA, 19 nt, Artificial Sequence
  Description of Artificial Sequence: Synthetic oligonucleotide
ggaggucuuagccccaggc

SEQ ID NO: 742939 - RNA, 19 nt, Artificial Sequence
  Description of Artificial Sequence: Synthetic oligonucleotide
gauucgcaccgggaugccg

SEQ ID NO: 742940 - RNA, 19 nt, Artificial Sequence
  Description of Artificial Sequence: Synthetic oligonucleotide
cagaucagagagauucgca

SEQ ID NO: 742941 - RNA, 19 nt, Artificial Sequence
  Description of Artificial Sequence: Synthetic oligonucleotide
uaccuuacaccuguacguc

SEQ ID NO: 742942 - RNA, 19 nt, Artificial Sequence
  Description of Artificial Sequence: Synthetic oligonucleotide
ugucugccaaguggguggg

SEQ ID NO: 742943 - RNA, 19 nt, Artificial Sequence
  Description of Artificial Sequence: Synthetic oligonucleotide
uaggacgcguuggcaaagg

SEQ ID NO: 742944 - RNA, 19 nt, Artificial Sequence
  Description of Artificial Sequence: Synthetic oligonucleotide
aaggucaugaagagagcuu

SEQ ID NO: 742945 - RNA, 19 nt, Artificial Sequence
  Description of Artificial Sequence: Synthetic oligonucleotide
gaccccucuuguuuccaug

SEQ ID NO: 742946 - RNA, 19 nt, Artificial Sequence
  Description of Artificial Sequence: Synthetic oligonucleotide
uguauccgucucuccaguc

SEQ ID NO: 742947 - RNA, 19 nt, Artificial Sequence
  Description of Artificial Sequence: Synthetic oligonucleotide
caacaggugggcucagauc

SEQ ID NO: 742948 - RNA, 19 nt, Artificial Sequence
  Description of Artificial Sequence: Synthetic oligonucleotide
acaugcuacaguuguccuu

SEQ ID NO: 742949 - RNA, 19 nt, Artificial Sequence
  Description of Artificial Sequence: Synthetic oligonucleotide
cuuacaccuguacgucuug

SEQ ID NO: 742950 - RNA, 19 nt, Artificial Sequence
  Description of Artificial Sequence: Synthetic oligonucleotide
gagaucgucuuuggaugcc

SEQ ID NO: 742951 - RNA, 19 nt, Artificial Sequence
  Description of Artificial Sequence: Synthetic oligonucleotide
agguagccgauagguuucc

SEQ ID NO: 742952 - RNA, 19 nt, Artificial Sequence
  Description of Artificial Sequence: Synthetic oligonucleotide
uucgcaccgggaugccggg

SEQ ID NO: 742953 - RNA, 19 nt, Artificial Sequence
  Description of Artificial Sequence: Synthetic oligonucleotide
gcuacaauacugaguauca

SEQ ID NO: 742954 - RNA, 19 nt, Artificial Sequence
  Description of Artificial Sequence: Synthetic oligonucleotide
cuuguuuccaugcccugaa

SEQ ID NO: 742955 - RNA, 19 nt, Artificial Sequence
  Description of Artificial Sequence: Synthetic oligonucleotide
cuugccacccagccgucac

SEQ ID NO: 742956 - RNA, 19 nt, Artificial Sequence
  Description of Artificial Sequence: Synthetic oligonucleotide
gacaaccccucccugggaa

SEQ ID NO: 742957 - RNA, 19 nt, Artificial Sequence
  Description of Artificial Sequence: Synthetic oligonucleotide
cuaacccauuucccugggc

SEQ ID NO: 742958 - RNA, 19 nt, Artificial Sequence
  Description of Artificial Sequence: Synthetic oligonucleotide
gaaugcgcaggugcugggc

SEQ ID NO: 742959 - RNA, 19 nt, Artificial Sequence
  Description of Artificial Sequence: Synthetic oligonucleotide
auacacggacacgcauggc

SEQ ID NO: 742960 - RNA, 19 nt, Artificial Sequence
  Description of Artificial Sequence: Synthetic oligonucleotide
gaaggucccacgcugcccu

SEQ ID NO: 742961 - RNA, 19 nt, Artificial Sequence
  Description of Artificial Sequence: Synthetic oligonucleotide
aggucugugucugccaagu

SEQ ID NO: 742962 - RNA, 19 nt, Artificial Sequence
  Description of Artificial Sequence: Synthetic oligonucleotide
uccccuucuggagugaauu

SEQ ID NO: 742963 - RNA, 19 nt, Artificial Sequence
  Description of Artificial Sequence: Synthetic oligonucleotide
cgacgcaagucaaacaaag

SEQ ID NO: 742964 - RNA, 19 nt, Artificial Sequence
  Description of Artificial Sequence: Synthetic oligonucleotide
ccaggucucaucuggcacc

SEQ ID NO: 742965 - RNA, 19 nt, Artificial Sequence
  Description of Artificial Sequence: Synthetic oligonucleotide
cagguugggaaggucauga

SEQ ID NO: 742966 - RNA, 19 nt, Artificial Sequence
  Description of Artificial Sequence: Synthetic oligonucleotide
agauucgcaccgggaugcc

SEQ ID NO: 742967 - RNA, 19 nt, Artificial Sequence
  Description of Artificial Sequence: Synthetic oligonucleotide
cugucggaaggacuuguca

SEQ ID NO: 742968 - RNA, 19 nt, Artificial Sequence
  Description of Artificial Sequence: Synthetic oligonucleotide
cacccagccgucacugcgc

SEQ ID NO: 742969 - RNA, 19 nt, Artificial Sequence
  Description of Artificial Sequence: Synthetic oligonucleotide
agaaaccccaggaaacgau

SEQ ID NO: 742970 - RNA, 19 nt, Artificial Sequence
  Description of Artificial Sequence: Synthetic oligonucleotide
ugcccucugguucucugua

SEQ ID NO: 742971 - RNA, 19 nt, Artificial Sequence
  Description of Artificial Sequence: Synthetic oligonucleotide
cacugcgcccuuugguccc

SEQ ID NO: 742972 - RNA, 19 nt, Artificial Sequence
  Description of Artificial Sequence: Synthetic oligonucleotide
uguacgucuugcccuccuu

SEQ ID NO: 742973 - RNA, 19 nt, Artificial Sequence
  Description of Artificial Sequence: Synthetic oligonucleotide
aauggcgaguuaaggcuua

SEQ ID NO: 742974 - RNA, 19 nt, Artificial Sequence
  Description of Artificial Sequence: Synthetic oligonucleotide
uuuggucccgcggcucucc

SEQ ID NO: 742975 - RNA, 19 nt, Artificial Sequence
  Description of Artificial Sequence: Synthetic oligonucleotide
agaucgucuuuggaugcca

SEQ ID NO: 742976 - RNA, 19 nt, Artificial Sequence
  Description of Artificial Sequence: Synthetic oligonucleotide
ggaggauccuaucccugcc

SEQ ID NO: 742977 - RNA, 19 nt, Artificial Sequence
  Description of Artificial Sequence: Synthetic oligonucleotide
uggcgcaacaggugggcuc

SEQ ID NO: 742978 - RNA, 19 nt, Artificial Sequence
  Description of Artificial Sequence: Synthetic oligonucleotide
gcucaggcaguuugagcgg

SEQ ID NO: 742979 - RNA, 19 nt, Artificial Sequence
  Description of Artificial Sequence: Synthetic oligonucleotide
gcuccugggaccuccuuug

SEQ ID NO: 742980 - RNA, 19 nt, Artificial Sequence
  Description of Artificial Sequence: Synthetic oligonucleotide
ggguaguaacaugcggacg

SEQ ID NO: 742981 - RNA, 19 nt, Artificial Sequence
  Description of Artificial Sequence: Synthetic oligonucleotide
ggugagugauggcucacca

SEQ ID NO: 742982 - RNA, 19 nt, Artificial Sequence
  Description of Artificial Sequence: Synthetic oligonucleotide
cuuggccucugugugcgac

SEQ ID NO: 742983 - RNA, 19 nt, Artificial Sequence
  Description of Artificial Sequence: Synthetic oligonucleotide
guaggacgcguuggcaaag

SEQ ID NO: 742984 - RNA, 19 nt, Artificial Sequence
  Description of Artificial Sequence: Synthetic oligonucleotide
cuaggucugugucugccaa

SEQ ID NO: 742985 - RNA, 19 nt, Artificial Sequence
  Description of Artificial Sequence: Synthetic oligonucleotide
cuugcccuccuuugcgguc

SEQ ID NO: 742986 - RNA, 19 nt, Artificial Sequence
  Description of Artificial Sequence: Synthetic oligonucleotide
gcauaccuuacaccuguac

SEQ ID NO: 742987 - RNA, 19 nt, Artificial Sequence
  Description of Artificial Sequence: Synthetic oligonucleotide
gggacuccguccucugagg

SEQ ID NO: 742988 - RNA, 19 nt, Artificial Sequence
  Description of Artificial Sequence: Synthetic oligonucleotide
uugcccuccuuugcggucu

SEQ ID NO: 742989 - RNA, 19 nt, Artificial Sequence
  Description of Artificial Sequence: Synthetic oligonucleotide
ccccaguggaaaagaaacc

SEQ ID NO: 742990 - RNA, 19 nt, Artificial Sequence
  Description of Artificial Sequence: Synthetic oligonucleotide
aggacgcguuggcaaagga

SEQ ID NO: 742991 - RNA, 19 nt, Artificial Sequence
  Description of Artificial Sequence: Synthetic oligonucleotide
acggacacgcauggcuuuc

SEQ ID NO: 742992 - RNA, 19 nt, Artificial Sequence
  Description of Artificial Sequence: Synthetic oligonucleotide
cuccugggaccuccuuugg

SEQ ID NO: 742993 - RNA, 19 nt, Artificial Sequence
  Description of Artificial Sequence: Synthetic oligonucleotide
cuggccaauaaauauccuu

SEQ ID NO: 742994 - RNA, 19 nt, Artificial Sequence
  Description of Artificial Sequence: Synthetic oligonucleotide
agcauuggaacagcauauu

SEQ ID NO: 742995 - RNA, 19 nt, Artificial Sequence
  Description of Artificial Sequence: Synthetic oligonucleotide
gguguaggcgcgcccacac

SEQ ID NO: 742996 - RNA, 19 nt, Artificial Sequence
  Description of Artificial Sequence: Synthetic oligonucleotide
aggcgaaaggcaaggcuca

SEQ ID NO: 742997 - RNA, 19 nt, Artificial Sequence
  Description of Artificial Sequence: Synthetic oligonucleotide
cccucuuguuuccaugccc

SEQ ID NO: 742998 - RNA, 19 nt, Artificial Sequence
  Description of Artificial Sequence: Synthetic oligonucleotide
gcgggcauaccuuacaccu

SEQ ID NO: 742999 - RNA, 19 nt, Artificial Sequence
  Description of Artificial Sequence: Synthetic oligonucleotide
cggacgaaaagcuacaaua

SEQ ID NO: 743000 - RNA, 19 nt, Artificial Sequence
  Description of Artificial Sequence: Synthetic oligonucleotide
ugcggacgaaaagcuacaa

SEQ ID NO: 743001 - RNA, 19 nt, Artificial Sequence
  Description of Artificial Sequence: Synthetic oligonucleotide
guaggucuccgagguguag

SEQ ID NO: 743002 - RNA, 19 nt, Artificial Sequence
  Description of Artificial Sequence: Synthetic oligonucleotide
cucaagaccugaggcuaug

SEQ ID NO: 743003 - RNA, 19 nt, Artificial Sequence
  Description of Artificial Sequence: Synthetic oligonucleotide
uccgagguguaggcgcgcc

SEQ ID NO: 743004 - RNA, 19 nt, Artificial Sequence
  Description of Artificial Sequence: Synthetic oligonucleotide
agacaaccccucccuggga

SEQ ID NO: 743005 - RNA, 19 nt, Artificial Sequence
  Description of Artificial Sequence: Synthetic oligonucleotide
cagcauuggaacagcauau

SEQ ID NO: 743006 - RNA, 19 nt, Artificial Sequence
  Description of Artificial Sequence: Synthetic oligonucleotide
aaccccucccugggaacug

SEQ ID NO: 743007 - RNA, 19 nt, Artificial Sequence
  Description of Artificial Sequence: Synthetic oligonucleotide
ucccgcggcucuccagacc

SEQ ID NO: 743008 - RNA, 19 nt, Artificial Sequence
  Description of Artificial Sequence: Synthetic oligonucleotide
cucugcccagugaaggcga

SEQ ID NO: 743009 - RNA, 19 nt, Artificial Sequence
  Description of Artificial Sequence: Synthetic oligonucleotide
gagguguaggcgcgcccac

SEQ ID NO: 743010 - RNA, 19 nt, Artificial Sequence
  Description of Artificial Sequence: Synthetic oligonucleotide
ugcgcccuuuggucccgcg

SEQ ID NO: 743011 - RNA, 19 nt, Artificial Sequence
  Description of Artificial Sequence: Synthetic oligonucleotide
cucuguacauaguuccuau

SEQ ID NO: 743012 - RNA, 19 nt, Artificial Sequence
  Description of Artificial Sequence: Synthetic oligonucleotide
ggagccgaaccaggcaggg

SEQ ID NO: 743013 - RNA, 19 nt, Artificial Sequence
  Description of Artificial Sequence: Synthetic oligonucleotide
guaaaucaauggcgaguua

SEQ ID NO: 743014 - RNA, 19 nt, Artificial Sequence
  Description of Artificial Sequence: Synthetic oligonucleotide
gccaggucucaucuggcac

SEQ ID NO: 743015 - RNA, 19 nt, Artificial Sequence
  Description of Artificial Sequence: Synthetic oligonucleotide
gguaggacgcguuggcaaa

SEQ ID NO: 743016 - RNA, 19 nt, Artificial Sequence
  Description of Artificial Sequence: Synthetic oligonucleotide
caggaugugggcacuugua

SEQ ID NO: 743017 - RNA, 19 nt, Artificial Sequence
  Description of Artificial Sequence: Synthetic oligonucleotide
gcggaccaagcuuucuggc

SEQ ID NO: 743018 - RNA, 19 nt, Artificial Sequence
  Description of Artificial Sequence: Synthetic oligonucleotide
augcggacgaaaagcuaca

SEQ ID NO: 743019 - RNA, 19 nt, Artificial Sequence
  Description of Artificial Sequence: Synthetic oligonucleotide
caccuguacgucuugcccu

SEQ ID NO: 743020 - RNA, 19 nt, Artificial Sequence
  Description of Artificial Sequence: Synthetic oligonucleotide
ggucucaccagaggccaag

SEQ ID NO: 743021 - RNA, 19 nt, Artificial Sequence
  Description of Artificial Sequence: Synthetic oligonucleotide
accaagcuuucuggcaggu

SEQ ID NO: 743022 - RNA, 19 nt, Artificial Sequence
  Description of Artificial Sequence: Synthetic oligonucleotide
ccagaacaguccaugaucu

SEQ ID NO: 743023 - RNA, 19 nt, Artificial Sequence
  Description of Artificial Sequence: Synthetic oligonucleotide
ccccuaacccauuucccug

SEQ ID NO: 743024 - RNA, 19 nt, Artificial Sequence
  Description of Artificial Sequence: Synthetic oligonucleotide
ggacgcguuggcaaaggac

SEQ ID NO: 743025 - RNA, 19 nt, Artificial Sequence
  Description of Artificial Sequence: Synthetic oligonucleotide
acacggacacgcauggcuu

SEQ ID NO: 743026 - RNA, 19 nt, Artificial Sequence
  Description of Artificial Sequence: Synthetic oligonucleotide
acgacgcaagucaaacaaa

SEQ ID NO: 743027 - RNA, 19 nt, Artificial Sequence
  Description of Artificial Sequence: Synthetic oligonucleotide
cguucuuagcagcaccaac

SEQ ID NO: 743028 - RNA, 19 nt, Artificial Sequence
  Description of Artificial Sequence: Synthetic oligonucleotide
ccuccuuugcggucucacc

SEQ ID NO: 743029 - RNA, 19 nt, Artificial Sequence
  Description of Artificial Sequence: Synthetic oligonucleotide
guccccuucuguguugaga

SEQ ID NO: 743030 - RNA, 19 nt, Artificial Sequence
  Description of Artificial Sequence: Synthetic oligonucleotide
ccaugaucuugcaguuggc

SEQ ID NO: 743031 - RNA, 19 nt, Artificial Sequence
  Description of Artificial Sequence: Synthetic oligonucleotide
gggcauaccuuacaccugu

SEQ ID NO: 743032 - RNA, 19 nt, Artificial Sequence
  Description of Artificial Sequence: Synthetic oligonucleotide
augggguaagggacaacaa

SEQ ID NO: 743033 - RNA, 19 nt, Artificial Sequence
  Description of Artificial Sequence: Synthetic oligonucleotide
cauuucccugggcuugcca

SEQ ID NO: 743034 - RNA, 19 nt, Artificial Sequence
  Description of Artificial Sequence: Synthetic oligonucleotide
ggucuccgagguguaggcg

SEQ ID NO: 743035 - RNA, 19 nt, Artificial Sequence
  Description of Artificial Sequence: Synthetic oligonucleotide
gcaagugagggaggggaac

SEQ ID NO: 743036 - RNA, 19 nt, Artificial Sequence
  Description of Artificial Sequence: Synthetic oligonucleotide
guuaggcuggguguugccu

SEQ ID NO: 743037 - RNA, 19 nt, Artificial Sequence
  Description of Artificial Sequence: Synthetic oligonucleotide
acugcgcccuuuggucccg

SEQ ID NO: 743038 - RNA, 19 nt, Artificial Sequence
  Description of Artificial Sequence: Synthetic oligonucleotide
cagguaggucuccgaggug

SEQ ID NO: 743039 - RNA, 19 nt, Artificial Sequence
  Description of Artificial Sequence: Synthetic oligonucleotide
cacaugcuacaguuguccu

SEQ ID NO: 743040 - RNA, 19 nt, Artificial Sequence
  Description of Artificial Sequence: Synthetic oligonucleotide
uggcgaguuaaggcuuaaa

SEQ ID NO: 743041 - RNA, 19 nt, Artificial Sequence
  Description of Artificial Sequence: Synthetic oligonucleotide
ggugagcgggcauaccuua

SEQ ID NO: 743042 - RNA, 19 nt, Artificial Sequence
  Description of Artificial Sequence: Synthetic oligonucleotide
acaugcggacgaaaagcua

SEQ ID NO: 743043 - RNA, 19 nt, Artificial Sequence
  Description of Artificial Sequence: Synthetic oligonucleotide
ggucccgcggcucuccaga

SEQ ID NO: 743044 - RNA, 19 nt, Artificial Sequence
  Description of Artificial Sequence: Synthetic oligonucleotide
caauggcgaguuaaggcuu

SEQ ID NO: 743045 - RNA, 19 nt, Artificial Sequence
  Description of Artificial Sequence: Synthetic oligonucleotide
ggauccuaucccugccgca

SEQ ID NO: 743046 - RNA, 19 nt, Artificial Sequence
  Description of Artificial Sequence: Synthetic oligonucleotide
gugagcgggcauaccuuac

SEQ ID NO: 743047 - RNA, 19 nt, Artificial Sequence
  Description of Artificial Sequence: Synthetic oligonucleotide
ccacacaugcuacaguugu

SEQ ID NO: 743048 - RNA, 19 nt, Artificial Sequence
  Description of Artificial Sequence: Synthetic oligonucleotide
ucgcaccgggaugccgggg

SEQ ID NO: 743049 - RNA, 19 nt, Artificial Sequence
  Description of Artificial Sequence: Synthetic oligonucleotide
gcgcccuuuggucccgcgg

SEQ ID NO: 743050 - RNA, 19 nt, Artificial Sequence
  Description of Artificial Sequence: Synthetic oligonucleotide
agguguaggcgcgcccaca

SEQ ID NO: 743051 - RNA, 19 nt, Artificial Sequence
  Description of Artificial Sequence: Synthetic oligonucleotide
gcauuggaacagcauauuu

SEQ ID NO: 743052 - RNA, 19 nt, Artificial Sequence
  Description of Artificial Sequence: Synthetic oligonucleotide
ugucgccuguguggauucu

SEQ ID NO: 743053 - RNA, 19 nt, Artificial Sequence
  Description of Artificial Sequence: Synthetic oligonucleotide
aggugagcgggcauaccuu

SEQ ID NO: 743054 - RNA, 19 nt, Artificial Sequence
  Description of Artificial Sequence: Synthetic oligonucleotide
caccgagguagacuggggu

SEQ ID NO: 743055 - RNA, 19 nt, Artificial Sequence
  Description of Artificial Sequence: Synthetic oligonucleotide
guguaggcgcgcccacaca

SEQ ID NO: 743056 - RNA, 19 nt, Artificial Sequence
  Description of Artificial Sequence: Synthetic oligonucleotide
cuuucggauugggaugucu

SEQ ID NO: 743057 - RNA, 19 nt, Artificial Sequence
  Description of Artificial Sequence: Synthetic oligonucleotide
caccagguguuccaccacu

SEQ ID NO: 743058 - RNA, 19 nt, Artificial Sequence
  Description of Artificial Sequence: Synthetic oligonucleotide
cuguauccgucucuccagu

SEQ ID NO: 743059 - RNA, 19 nt, Artificial Sequence
  Description of Artificial Sequence: Synthetic oligonucleotide
guacgucuugcccuccuuu

SEQ ID NO: 743060 - RNA, 19 nt, Artificial Sequence
  Description of Artificial Sequence: Synthetic oligonucleotide
cuccagaccccucuuguuu

SEQ ID NO: 743061 - RNA, 19 nt, Artificial Sequence
  Description of Artificial Sequence: Synthetic oligonucleotide
ggcgaaaggcaaggcucag

SEQ ID NO: 743062 - RNA, 19 nt, Artificial Sequence
  Description of Artificial Sequence: Synthetic oligonucleotide
cgucuuuggaugccaccag

SEQ ID NO: 743063 - RNA, 19 nt, Artificial Sequence
  Description of Artificial Sequence: Synthetic oligonucleotide
gccgucacugcgcccuuug

SEQ ID NO: 743064 - RNA, 19 nt, Artificial Sequence
  Description of Artificial Sequence: Synthetic oligonucleotide
ccgauagguuuccuggcca

SEQ ID NO: 743065 - RNA, 19 nt, Artificial Sequence
  Description of Artificial Sequence: Synthetic oligonucleotide
caaggguguuaacagcauu

SEQ ID NO: 743066 - RNA, 19 nt, Artificial Sequence
  Description of Artificial Sequence: Synthetic oligonucleotide
gcaacaggugggcucagau

SEQ ID NO: 743067 - RNA, 19 nt, Artificial Sequence
  Description of Artificial Sequence: Synthetic oligonucleotide
gucccgcggcucuccagac

SEQ ID NO: 743068 - RNA, 19 nt, Artificial Sequence
  Description of Artificial Sequence: Synthetic oligonucleotide
aggaaacgauaaacuggua

SEQ ID NO: 743069 - RNA, 19 nt, Artificial Sequence
  Description of Artificial Sequence: Synthetic oligonucleotide
gcggucucaccagaggcca

SEQ ID NO: 743070 - RNA, 19 nt, Artificial Sequence
  Description of Artificial Sequence: Synthetic oligonucleotide
cgcccuuuggucccgcggc

SEQ ID NO: 743071 - RNA, 19 nt, Artificial Sequence
  Description of Artificial Sequence: Synthetic oligonucleotide
caaagugcucugagaucgu

SEQ ID NO: 743072 - RNA, 19 nt, Artificial Sequence
  Description of Artificial Sequence: Synthetic oligonucleotide
auggcgaguuaaggcuuaa

SEQ ID NO: 743073 - RNA, 19 nt, Artificial Sequence
  Description of Artificial Sequence: Synthetic oligonucleotide
uccguccucugaggugagu

SEQ ID NO: 743074 - RNA, 19 nt, Artificial Sequence
  Description of Artificial Sequence: Synthetic oligonucleotide
gcucuguacauaguuccua

SEQ ID NO: 743075 - RNA, 19 nt, Artificial Sequence
  Description of Artificial Sequence: Synthetic oligonucleotide
acgcguuggcaaaggacuu

SEQ ID NO: 743076 - RNA, 19 nt, Artificial Sequence
  Description of Artificial Sequence: Synthetic oligonucleotide
ccuaggucugugucugcca

SEQ ID NO: 743077 - RNA, 19 nt, Artificial Sequence
  Description of Artificial Sequence: Synthetic oligonucleotide
cuccgagguguaggcgcgc

SEQ ID NO: 743078 - RNA, 19 nt, Artificial Sequence
  Description of Artificial Sequence: Synthetic oligonucleotide
ccacuccauccccaucccc

SEQ ID NO: 743079 - RNA, 19 nt, Artificial Sequence
  Description of Artificial Sequence: Synthetic oligonucleotide
gggcucagaucagagagau

SEQ ID NO: 743080 - RNA, 19 nt, Artificial Sequence
  Description of Artificial Sequence: Synthetic oligonucleotide
ccgucacugcgcccuuugg

SEQ ID NO: 743081 - RNA, 19 nt, Artificial Sequence
  Description of Artificial Sequence: Synthetic oligonucleotide
ggacuccguccucugaggu

SEQ ID NO: 743082 - RNA, 19 nt, Artificial Sequence
  Description of Artificial Sequence: Synthetic oligonucleotide
ccuaucccugccgcagggc

SEQ ID NO: 743083 - RNA, 19 nt, Artificial Sequence
  Description of Artificial Sequence: Synthetic oligonucleotide
cgggcauaccuuacaccug

SEQ ID NO: 743084 - RNA, 19 nt, Artificial Sequence
  Description of Artificial Sequence: Synthetic oligonucleotide
cuguacgucuugcccuccu

SEQ ID NO: 743085 - RNA, 19 nt, Artificial Sequence
  Description of Artificial Sequence: Synthetic oligonucleotide
gcggacgaaaagcuacaau

SEQ ID NO: 743086 - RNA, 19 nt, Artificial Sequence
  Description of Artificial Sequence: Synthetic oligonucleotide
ccuuugcggucucaccaga

SEQ ID NO: 743087 - RNA, 19 nt, Artificial Sequence
  Description of Artificial Sequence: Synthetic oligonucleotide
guuggggcuuggccucugu

SEQ ID NO: 743088 - RNA, 19 nt, Artificial Sequence
  Description of Artificial Sequence: Synthetic oligonucleotide
caaccccucccugggaacu

SEQ ID NO: 743089 - RNA, 19 nt, Artificial Sequence
  Description of Artificial Sequence: Synthetic oligonucleotide
cacggacacgcauggcuuu

SEQ ID NO: 743090 - RNA, 19 nt, Artificial Sequence
  Description of Artificial Sequence: Synthetic oligonucleotide
caggcaguuugagcggggu

SEQ ID NO: 743091 - RNA, 19 nt, Artificial Sequence
  Description of Artificial Sequence: Synthetic oligonucleotide
ccuguacgucuugcccucc

SEQ ID NO: 743092 - RNA, 19 nt, Artificial Sequence
  Description of Artificial Sequence: Synthetic oligonucleotide
cggacacgcauggcuuucg

SEQ ID NO: 743093 - RNA, 19 nt, Artificial Sequence
  Description of Artificial Sequence: Synthetic oligonucleotide
cugcccagugaaggcgaaa

SEQ ID NO: 743094 - RNA, 19 nt, Artificial Sequence
  Description of Artificial Sequence: Synthetic oligonucleotide
guggcgcaacaggugggcu

SEQ ID NO: 743095 - RNA, 19 nt, Artificial Sequence
  Description of Artificial Sequence: Synthetic oligonucleotide
cugcgcccuuuggucccgc

SEQ ID NO: 743096 - RNA, 19 nt, Artificial Sequence
  Description of Artificial Sequence: Synthetic oligonucleotide
gggugucuucagggcagca

SEQ ID NO: 743097 - RNA, 19 nt, Artificial Sequence
  Description of Artificial Sequence: Synthetic oligonucleotide
ccgaaccaggcagggcuuc

SEQ ID NO: 743098 - RNA, 19 nt, Artificial Sequence
  Description of Artificial Sequence: Synthetic oligonucleotide
cccaacagacagguucaaa

SEQ ID NO: 743099 - RNA, 19 nt, Artificial Sequence
  Description of Artificial Sequence: Synthetic oligonucleotide
ccuuuggucccgcggcucu

SEQ ID NO: 743100 - RNA, 19 nt, Artificial Sequence
  Description of Artificial Sequence: Synthetic oligonucleotide
gcuuucggauugggauguc

SEQ ID NO: 743101 - RNA, 19 nt, Artificial Sequence
  Description of Artificial Sequence: Synthetic oligonucleotide
ggcauaccuuacaccugua

SEQ ID NO: 743102 - RNA, 19 nt, Artificial Sequence
  Description of Artificial Sequence: Synthetic oligonucleotide
agccgucacugcgcccuuu

SEQ ID NO: 743103 - RNA, 19 nt, Artificial Sequence
  Description of Artificial Sequence: Synthetic oligonucleotide
cgucacugcgcccuuuggu

SEQ ID NO: 743104 - RNA, 19 nt, Artificial Sequence
  Description of Artificial Sequence: Synthetic oligonucleotide
gcccuuuggucccgcggcu

SEQ ID NO: 743105 - RNA, 19 nt, Artificial Sequence
  Description of Artificial Sequence: Synthetic oligonucleotide
ccucaagaccugaggcuau

SEQ ID NO: 743106 - RNA, 19 nt, Artificial Sequence
  Description of Artificial Sequence: Synthetic oligonucleotide
gcccucugguucucuguau

SEQ ID NO: 743107 - RNA, 19 nt, Artificial Sequence
  Description of Artificial Sequence: Synthetic oligonucleotide
ggguguugccuaggucugu

SEQ ID NO: 743108 - RNA, 19 nt, Artificial Sequence
  Description of Artificial Sequence: Synthetic oligonucleotide
gcgcaacaggugggcucag

SEQ ID NO: 743109 - RNA, 19 nt, Artificial Sequence
  Description of Artificial Sequence: Synthetic oligonucleotide
ggcaaggcucaggcaguuu

SEQ ID NO: 743110 - RNA, 19 nt, Artificial Sequence
  Description of Artificial Sequence: Synthetic oligonucleotide
gccgaaccaggcagggcuu

SEQ ID NO: 743111 - RNA, 19 nt, Artificial Sequence
  Description of Artificial Sequence: Synthetic oligonucleotide
cggucucaccagaggccaa

SEQ ID NO: 743112 - RNA, 19 nt, Artificial Sequence
  Description of Artificial Sequence: Synthetic oligonucleotide
ccaagcuuucuggcagguu

SEQ ID NO: 743113 - RNA, 19 nt, Artificial Sequence
  Description of Artificial Sequence: Synthetic oligonucleotide
ugugacacgguacagauag

SEQ ID NO: 743114 - RNA, 19 nt, Artificial Sequence
  Description of Artificial Sequence: Synthetic oligonucleotide
uucguguugaugaacaugg

SEQ ID NO: 743115 - RNA, 19 nt, Artificial Sequence
  Description of Artificial Sequence: Synthetic oligonucleotide
aguaagacgagagagcucc

SEQ ID NO: 743116 - RNA, 19 nt, Artificial Sequence
  Description of Artificial Sequence: Synthetic oligonucleotide
  modified_base (7)..(7): a, c, u, g, unknown or other
cuuuucncuaggaagaggc

SEQ ID NO: 743117 - RNA, 19 nt, Artificial Sequence
  Description of Artificial Sequence: Synthetic oligonucleotide
ucuuauuuccaguaagacg

SEQ ID NO: 743118 - RNA, 19 nt, Artificial Sequence
  Description of Artificial Sequence: Synthetic oligonucleotide
gaagugugcaaucucaggg

SEQ ID NO: 743119 - RNA, 19 nt, Artificial Sequence
  Description of Artificial Sequence: Synthetic oligonucleotide
  modified_base (4)..(4): a, c, u, g, unknown or other
uucncuaggaagaggcucg

SEQ ID NO: 743120 - RNA, 19 nt, Artificial Sequence
  Description of Artificial Sequence: Synthetic oligonucleotide
acccguaaacaccagagcc

SEQ ID NO: 743121 - RNA, 19 nt, Artificial Sequence
  Description of Artificial Sequence: Synthetic oligonucleotide
uuuguagacaccuuuggga

SEQ ID NO: 743122 - RNA, 19 nt, Artificial Sequence
  Description of Artificial Sequence: Synthetic oligonucleotide
ucuaguuuacccuacucca

SEQ ID NO: 743123 - RNA, 19 nt, Artificial Sequence
  Description of Artificial Sequence: Synthetic oligonucleotide
uuaaccgauuuccaaaucu

SEQ ID NO: 743124 - RNA, 19 nt, Artificial Sequence
  Description of Artificial Sequence: Synthetic oligonucleotide
aauaggcccacgucagccc

SEQ ID NO: 743125 - RNA, 19 nt, Artificial Sequence
  Description of Artificial Sequence: Synthetic oligonucleotide
ggugauaagaaguuuuggg

SEQ ID NO: 743126 - RNA, 19 nt, Artificial Sequence
  Description of Artificial Sequence: Synthetic oligonucleotide
aacccguaaacaccagagc

SEQ ID NO: 743127 - RNA, 19 nt, Artificial Sequence
  Description of Artificial Sequence: Synthetic oligonucleotide
gauagaacaggcuuuccac

SEQ ID NO: 743128 - RNA, 19 nt, Artificial Sequence
  Description of Artificial Sequence: Synthetic oligonucleotide
uugauagaagaauagccac

SEQ ID NO: 743129 - RNA, 19 nt, Artificial Sequence
  Description of Artificial Sequence: Synthetic oligonucleotide
acacgguacagauagaaca

SEQ ID NO: 743130 - RNA, 19 nt, Artificial Sequence
  Description of Artificial Sequence: Synthetic oligonucleotide
cugagaaugccguagcagg

SEQ ID NO: 743131 - RNA, 19 nt, Artificial Sequence
  Description of Artificial Sequence: Synthetic oligonucleotide
aacaaggucauuugggcau

SEQ ID NO: 743132 - RNA, 19 nt, Artificial Sequence
  Description of Artificial Sequence: Synthetic oligonucleotide
uuacccuacuccaugagcu

SEQ ID NO: 743133 - RNA, 19 nt, Artificial Sequence
  Description of Artificial Sequence: Synthetic oligonucleotide
agagacacaagguggccgc

SEQ ID NO: 743134 - RNA, 19 nt, Artificial Sequence
  Description of Artificial Sequence: Synthetic oligonucleotide
cugauuugacucuuguucc

SEQ ID NO: 743135 - RNA, 19 nt, Artificial Sequence
  Description of Artificial Sequence: Synthetic oligonucleotide
uuuacccuacuccaugagc

SEQ ID NO: 743136 - RNA, 19 nt, Artificial Sequence
  Description of Artificial Sequence: Synthetic oligonucleotide
agcagguauucguaguagc

SEQ ID NO: 743137 - RNA, 19 nt, Artificial Sequence
  Description of Artificial Sequence: Synthetic oligonucleotide
cuuaugauccgcccgagug

SEQ ID NO: 743138 - RNA, 19 nt, Artificial Sequence
  Description of Artificial Sequence: Synthetic oligonucleotide
uuccaguaagacgagagag

SEQ ID NO: 743139 - RNA, 19 nt, Artificial Sequence
  Description of Artificial Sequence: Synthetic oligonucleotide
uauggaaucuuggagggug

SEQ ID NO: 743140 - RNA, 19 nt, Artificial Sequence
  Description of Artificial Sequence: Synthetic oligonucleotide
uuauugaagcuuugcagga

SEQ ID NO: 743141 - RNA, 19 nt, Artificial Sequence
  Description of Artificial Sequence: Synthetic oligonucleotide
gaagaauagccaccugagg

SEQ ID NO: 743142 - RNA, 19 nt, Artificial Sequence
  Description of Artificial Sequence: Synthetic oligonucleotide
acauccuuaugauccgccc

SEQ ID NO: 743143 - RNA, 19 nt, Artificial Sequence
  Description of Artificial Sequence: Synthetic oligonucleotide
gucuaguuuacccuacucc

SEQ ID NO: 743144 - RNA, 19 nt, Artificial Sequence
  Description of Artificial Sequence: Synthetic oligonucleotide
uccaguaagacgagagagc

SEQ ID NO: 743145 - RNA, 19 nt, Artificial Sequence
  Description of Artificial Sequence: Synthetic oligonucleotide
ugggauuagagcuggcuug

SEQ ID NO: 743146 - RNA, 19 nt, Artificial Sequence
  Description of Artificial Sequence: Synthetic oligonucleotide
ugguagacaagucagccua

SEQ ID NO: 743147 - RNA, 19 nt, Artificial Sequence
  Description of Artificial Sequence: Synthetic oligonucleotide
uaguuuacccuacuccaug

SEQ ID NO: 743148 - RNA, 19 nt, Artificial Sequence
  Description of Artificial Sequence: Synthetic oligonucleotide
ugguauguacucagcaggc

SEQ ID NO: 743149 - RNA, 19 nt, Artificial Sequence
  Description of Artificial Sequence: Synthetic oligonucleotide
aguccaacccguaaacacc

SEQ ID NO: 743150 - RNA, 19 nt, Artificial Sequence
  Description of Artificial Sequence: Synthetic oligonucleotide
uguacuuauugaagcuuug

SEQ ID NO: 743151 - RNA, 19 nt, Artificial Sequence
  Description of Artificial Sequence: Synthetic oligonucleotide
caacccguaaacaccagag

SEQ ID NO: 743152 - RNA, 19 nt, Artificial Sequence
  Description of Artificial Sequence: Synthetic oligonucleotide
gaguccaacccguaaacac

SEQ ID NO: 743153 - RNA, 19 nt, Artificial Sequence
  Description of Artificial Sequence: Synthetic oligonucleotide
uuuccaguaagacgagaga

SEQ ID NO: 743154 - RNA, 19 nt, Artificial Sequence
  Description of Artificial Sequence: Synthetic oligonucleotide
guauaagugguugacagga

SEQ ID NO: 743155 - RNA, 19 nt, Artificial Sequence
  Description of Artificial Sequence: Synthetic oligonucleotide
acuucagcguuucucccac

SEQ ID NO: 743156 - RNA, 19 nt, Artificial Sequence
  Description of Artificial Sequence: Synthetic oligonucleotide
acugacuagggauaucacu

SEQ ID NO: 743157 - RNA, 19 nt, Artificial Sequence
  Description of Artificial Sequence: Synthetic oligonucleotide
auuuccaguaagacgagag

SEQ ID NO: 743158 - RNA, 19 nt, Artificial Sequence
  Description of Artificial Sequence: Synthetic oligonucleotide
gacaccuuugggauuagag

SEQ ID NO: 743159 - RNA, 19 nt, Artificial Sequence
  Description of Artificial Sequence: Synthetic oligonucleotide
aagucccuggggcaacuac

SEQ ID NO: 743160 - RNA, 19 nt, Artificial Sequence
  Description of Artificial Sequence: Synthetic oligonucleotide
uguucuaaccccugccagc

SEQ ID NO: 743161 - RNA, 19 nt, Artificial Sequence
  Description of Artificial Sequence: Synthetic oligonucleotide
ucacugacuagggauauca

SEQ ID NO: 743162 - RNA, 19 nt, Artificial Sequence
  Description of Artificial Sequence: Synthetic oligonucleotide
agaggcucguccccgauag

SEQ ID NO: 743163 - RNA, 19 nt, Artificial Sequence
  Description of Artificial Sequence: Synthetic oligonucleotide
agguauucguaguagcugu

SEQ ID NO: 743164 - RNA, 19 nt, Artificial Sequence
  Description of Artificial Sequence: Synthetic oligonucleotide
aaccgauuuccaaaucuuc

SEQ ID NO: 743165 - RNA, 19 nt, Artificial Sequence
  Description of Artificial Sequence: Synthetic oligonucleotide
uuaugauccgcccgagugu

SEQ ID NO: 743166 - RNA, 19 nt, Artificial Sequence
  Description of Artificial Sequence: Synthetic oligonucleotide
ucucccacgaaggugagcu

SEQ ID NO: 743167 - RNA, 19 nt, Artificial Sequence
  Description of Artificial Sequence: Synthetic oligonucleotide
  modified_base (10)..(10): a, c, u, g, unknown or other
cagcuuuucncuaggaaga

SEQ ID NO: 743168 - RNA, 19 nt, Artificial Sequence
  Description of Artificial Sequence: Synthetic oligonucleotide
uuauuuccaguaagacgag

SEQ ID NO: 743169 - RNA, 19 nt, Artificial Sequence
  Description of Artificial Sequence: Synthetic oligonucleotide
uguucacaucagaguaugg

SEQ ID NO: 743170 - RNA, 19 nt, Artificial Sequence
  Description of Artificial Sequence: Synthetic oligonucleotide
agaccugucuccaucugcc

SEQ ID NO: 743171 - RNA, 19 nt, Artificial Sequence
  Description of Artificial Sequence: Synthetic oligonucleotide
aggucauuugggcauagga

SEQ ID NO: 743172 - RNA, 19 nt, Artificial Sequence
  Description of Artificial Sequence: Synthetic oligonucleotide
uuugccucagagacacaag

SEQ ID NO: 743173 - RNA, 19 nt, Artificial Sequence
  Description of Artificial Sequence: Synthetic oligonucleotide
aaaacuaugugggcccugu

SEQ ID NO: 743174 - RNA, 19 nt, Artificial Sequence
  Description of Artificial Sequence: Synthetic oligonucleotide
gccccuaagauucggaugg

SEQ ID NO: 743175 - RNA, 19 nt, Artificial Sequence
  Description of Artificial Sequence: Synthetic oligonucleotide
cuagaacugagcaggagca

SEQ ID NO: 743176 - RNA, 19 nt, Artificial Sequence
  Description of Artificial Sequence: Synthetic oligonucleotide
  modified_base (5)..(5): a, c, u, g, unknown or other
uuucncuaggaagaggcuc

SEQ ID NO: 743177 - RNA, 19 nt, Artificial Sequence
  Description of Artificial Sequence: Synthetic oligonucleotide
ugagaaugccguagcaggu

SEQ ID NO: 743178 - RNA, 19 nt, Artificial Sequence
  Description of Artificial Sequence: Synthetic oligonucleotide
  modified_base (6)..(6): a, c, u, g, unknown or other
uuuucncuaggaagaggcu

SEQ ID NO: 743179 - RNA, 19 nt, Artificial Sequence
  Description of Artificial Sequence: Synthetic oligonucleotide
aagacgagagagcucccga

SEQ ID NO: 743180 - RNA, 19 nt, Artificial Sequence
  Description of Artificial Sequence: Synthetic oligonucleotide
aucccagaaucccauaccu

SEQ ID NO: 743181 - RNA, 19 nt, Artificial Sequence
  Description of Artificial Sequence: Synthetic oligonucleotide
uguugaacacacagguguc

SEQ ID NO: 743182 - RNA, 19 nt, Artificial Sequence
  Description of Artificial Sequence: Synthetic oligonucleotide
uaagacgagagagcucccg

SEQ ID NO: 743183 - RNA, 19 nt, Artificial Sequence
  Description of Artificial Sequence: Synthetic oligonucleotide
uguacagguugaagugugc

SEQ ID NO: 743184 - RNA, 19 nt, Artificial Sequence
  Description of Artificial Sequence: Synthetic oligonucleotide
acuaugugggcccugugaa

SEQ ID NO: 743185 - RNA, 19 nt, Artificial Sequence
  Description of Artificial Sequence: Synthetic oligonucleotide
gguauaagugguugacagg

SEQ ID NO: 743186 - RNA, 19 nt, Artificial Sequence
  Description of Artificial Sequence: Synthetic oligonucleotide
uaagauucggaugguacuc

SEQ ID NO: 743187 - RNA, 19 nt, Artificial Sequence
  Description of Artificial Sequence: Synthetic oligonucleotide
acccaauaggcccacguca

SEQ ID NO: 743188 - RNA, 19 nt, Artificial Sequence
  Description of Artificial Sequence: Synthetic oligonucleotide
acauuguugauagaagaau

SEQ ID NO: 743189 - RNA, 19 nt, Artificial Sequence
  Description of Artificial Sequence: Synthetic oligonucleotide
aggugauaagaaguuuugg

SEQ ID NO: 743190 - RNA, 19 nt, Artificial Sequence
  Description of Artificial Sequence: Synthetic oligonucleotide
ggagugagcaagucaaacc

SEQ ID NO: 743191 - RNA, 19 nt, Artificial Sequence
  Description of Artificial Sequence: Synthetic oligonucleotide
uaaccgauuuccaaaucuu

SEQ ID NO: 743192 - RNA, 19 nt, Artificial Sequence
  Description of Artificial Sequence: Synthetic oligonucleotide
uuuauccccucaauggcuu

SEQ ID NO: 743193 - RNA, 19 nt, Artificial Sequence
  Description of Artificial Sequence: Synthetic oligonucleotide
ggugguauguacucagcag

SEQ ID NO: 743194 - RNA, 19 nt, Artificial Sequence
  Description of Artificial Sequence: Synthetic oligonucleotide
aguuuacccuacuccauga

SEQ ID NO: 743195 - RNA, 19 nt, Artificial Sequence
  Description of Artificial Sequence: Synthetic oligonucleotide
uggauccacugcuuuagca

SEQ ID NO: 743196 - RNA, 19 nt, Artificial Sequence
  Description of Artificial Sequence: Synthetic oligonucleotide
acgggcuauccuccuaggc

SEQ ID NO: 743197 - RNA, 19 nt, Artificial Sequence
  Description of Artificial Sequence: Synthetic oligonucleotide
ugucuaguuuacccuacuc

SEQ ID NO: 743198 - RNA, 19 nt, Artificial Sequence
  Description of Artificial Sequence: Synthetic oligonucleotide
gauagaagaauagccaccu

SEQ ID NO: 743199 - RNA, 19 nt, Artificial Sequence
  Description of Artificial Sequence: Synthetic oligonucleotide
ggcuuuaacauagucuucc

SEQ ID NO: 743200 - RNA, 19 nt, Artificial Sequence
  Description of Artificial Sequence: Synthetic oligonucleotide
auccuuaugauccgcccga

SEQ ID NO: 743201 - RNA, 19 nt, Artificial Sequence
  Description of Artificial Sequence: Synthetic oligonucleotide
acugaagcggccaugggca

SEQ ID NO: 743202 - RNA, 19 nt, Artificial Sequence
  Description of Artificial Sequence: Synthetic oligonucleotide
gaccugugggucaacaggc

SEQ ID NO: 743203 - RNA, 19 nt, Artificial Sequence
  Description of Artificial Sequence: Synthetic oligonucleotide
ugaaugcuugucacuucug

SEQ ID NO: 743204 - RNA, 19 nt, Artificial Sequence
  Description of Artificial Sequence: Synthetic oligonucleotide
agagagcucccgaaacucc

SEQ ID NO: 743205 - RNA, 19 nt, Artificial Sequence
  Description of Artificial Sequence: Synthetic oligonucleotide
gaagcacaccaaguggucc

SEQ ID NO: 743206 - RNA, 19 nt, Artificial Sequence
  Description of Artificial Sequence: Synthetic oligonucleotide
gacuagggauaucacucug

SEQ ID NO: 743207 - RNA, 19 nt, Artificial Sequence
  Description of Artificial Sequence: Synthetic oligonucleotide
uauaagugguugacaggaa

SEQ ID NO: 743208 - RNA, 19 nt, Artificial Sequence
  Description of Artificial Sequence: Synthetic oligonucleotide
caauaggcccacgucagcc

SEQ ID NO: 743209 - RNA, 19 nt, Artificial Sequence
  Description of Artificial Sequence: Synthetic oligonucleotide
uucugucuaguuuacccua

SEQ ID NO: 743210 - RNA, 19 nt, Artificial Sequence
  Description of Artificial Sequence: Synthetic oligonucleotide
ugccuuagauucugucuag

SEQ ID NO: 743211 - RNA, 19 nt, Artificial Sequence
  Description of Artificial Sequence: Synthetic oligonucleotide
uucagcguuucucccacaa

SEQ ID NO: 743212 - RNA, 19 nt, Artificial Sequence
  Description of Artificial Sequence: Synthetic oligonucleotide
caucacacuugauggcugc

SEQ ID NO: 743213 - RNA, 19 nt, Artificial Sequence
  Description of Artificial Sequence: Synthetic oligonucleotide
guacuuauugaagcuuugc

SEQ ID NO: 743214 - RNA, 19 nt, Artificial Sequence
  Description of Artificial Sequence: Synthetic oligonucleotide
caucuuaucccugggauca

SEQ ID NO: 743215 - RNA, 19 nt, Artificial Sequence
  Description of Artificial Sequence: Synthetic oligonucleotide
gacauuguugauagaagaa

SEQ ID NO: 743216 - RNA, 19 nt, Artificial Sequence
  Description of Artificial Sequence: Synthetic oligonucleotide
ugccgguucaucucauagc

SEQ ID NO: 743217 - RNA, 19 nt, Artificial Sequence
  Description of Artificial Sequence: Synthetic oligonucleotide
ucuuaucccugggaucagg

SEQ ID NO: 743218 - RNA, 19 nt, Artificial Sequence
  Description of Artificial Sequence: Synthetic oligonucleotide
agaaguuuugggacuacca

SEQ ID NO: 743219 - RNA, 19 nt, Artificial Sequence
  Description of Artificial Sequence: Synthetic oligonucleotide
caaucucagggcucagacc

SEQ ID NO: 743220 - RNA, 19 nt, Artificial Sequence
  Description of Artificial Sequence: Synthetic oligonucleotide
aagauucggaugguacucu

SEQ ID NO: 743221 - RNA, 19 nt, Artificial Sequence
  Description of Artificial Sequence: Synthetic oligonucleotide
cauagcaggucuccaugag

SEQ ID NO: 743222 - RNA, 19 nt, Artificial Sequence
  Description of Artificial Sequence: Synthetic oligonucleotide
ccuaagauucggaugguac

SEQ ID NO: 743223 - RNA, 19 nt, Artificial Sequence
  Description of Artificial Sequence: Synthetic oligonucleotide
gacgcaucacagugggacc

SEQ ID NO: 743224 - RNA, 19 nt, Artificial Sequence
  Description of Artificial Sequence: Synthetic oligonucleotide
ucucauagcaggucuccau

SEQ ID NO: 743225 - RNA, 19 nt, Artificial Sequence
  Description of Artificial Sequence: Synthetic oligonucleotide
guuuacccuacuccaugag

SEQ ID NO: 743226 - RNA, 19 nt, Artificial Sequence
  Description of Artificial Sequence: Synthetic oligonucleotide
aaacuaugugggcccugug

SEQ ID NO: 743227 - RNA, 19 nt, Artificial Sequence
  Description of Artificial Sequence: Synthetic oligonucleotide
guacuggaguccugagugg

SEQ ID NO: 743228 - RNA, 19 nt, Artificial Sequence
  Description of Artificial Sequence: Synthetic oligonucleotide
agugagcaagucaaaccuc

SEQ ID NO: 743229 - RNA, 19 nt, Artificial Sequence
  Description of Artificial Sequence: Synthetic oligonucleotide
ugggguauaagugguugac

SEQ ID NO: 743230 - RNA, 19 nt, Artificial Sequence
  Description of Artificial Sequence: Synthetic oligonucleotide
cugccgguucaucucauag

SEQ ID NO: 743231 - RNA, 19 nt, Artificial Sequence
  Description of Artificial Sequence: Synthetic oligonucleotide
ugcccaaaacuaugugggc

SEQ ID NO: 743232 - RNA, 19 nt, Artificial Sequence
  Description of Artificial Sequence: Synthetic oligonucleotide
guugaacacacaggugucc

SEQ ID NO: 743233 - RNA, 19 nt, Artificial Sequence
  Description of Artificial Sequence: Synthetic oligonucleotide
uuccaaaucuucagcuuuu

SEQ ID NO: 743234 - RNA, 19 nt, Artificial Sequence
  Description of Artificial Sequence: Synthetic oligonucleotide
agacccaauaggcccacgu

SEQ ID NO: 743235 - RNA, 19 nt, Artificial Sequence
  Description of Artificial Sequence: Synthetic oligonucleotide
auggggagugagcaaguca

SEQ ID NO: 743236 - RNA, 19 nt, Artificial Sequence
  Description of Artificial Sequence: Synthetic oligonucleotide
ugaguccaacccguaaaca

SEQ ID NO: 743237 - RNA, 19 nt, Artificial Sequence
  Description of Artificial Sequence: Synthetic oligonucleotide
agccuaaauaucccagaau

SEQ ID NO: 743238 - RNA, 19 nt, Artificial Sequence
  Description of Artificial Sequence: Synthetic oligonucleotide
cacccaaagugaacacucc

SEQ ID NO: 743239 - RNA, 19 nt, Artificial Sequence
  Description of Artificial Sequence: Synthetic oligonucleotide
gauaucacucugaacucaa

SEQ ID NO: 743240 - RNA, 19 nt, Artificial Sequence
  Description of Artificial Sequence: Synthetic oligonucleotide
uagggauaucacucugaac

SEQ ID NO: 743241 - RNA, 19 nt, Artificial Sequence
  Description of Artificial Sequence: Synthetic oligonucleotide
cuaagauucggaugguacu

SEQ ID NO: 743242 - RNA, 19 nt, Artificial Sequence
  Description of Artificial Sequence: Synthetic oligonucleotide
gcuucugguagacaaguca

SEQ ID NO: 743243 - RNA, 19 nt, Artificial Sequence
  Description of Artificial Sequence: Synthetic oligonucleotide
gacacgguacagauagaac

SEQ ID NO: 743244 - RNA, 19 nt, Artificial Sequence
  Description of Artificial Sequence: Synthetic oligonucleotide
ccgauuuccaaaucuucag

SEQ ID NO: 743245 - RNA, 19 nt, Artificial Sequence
  Description of Artificial Sequence: Synthetic oligonucleotide
ggacgcaucacagugggac

SEQ ID NO: 743246 - RNA, 19 nt, Artificial Sequence
  Description of Artificial Sequence: Synthetic oligonucleotide
auuugggcauaggaaucag

SEQ ID NO: 743247 - RNA, 19 nt, Artificial Sequence
  Description of Artificial Sequence: Synthetic oligonucleotide
gacccaauaggcccacguc

SEQ ID NO: 743248 - RNA, 19 nt, Artificial Sequence
  Description of Artificial Sequence: Synthetic oligonucleotide
gauccgcccgaguguacag

SEQ ID NO: 743249 - RNA, 19 nt, Artificial Sequence
  Description of Artificial Sequence: Synthetic oligonucleotide
ucccacaaagaagcucucc

SEQ ID NO: 743250 - RNA, 19 nt, Artificial Sequence
  Description of Artificial Sequence: Synthetic oligonucleotide
gaaacuccagcugaaugcu

SEQ ID NO: 743251 - RNA, 19 nt, Artificial Sequence
  Description of Artificial Sequence: Synthetic oligonucleotide
cuuguggucccuugugaca

SEQ ID NO: 743252 - RNA, 19 nt, Artificial Sequence
  Description of Artificial Sequence: Synthetic oligonucleotide
uccccgauaggugguaugu

SEQ ID NO: 743253 - RNA, 19 nt, Artificial Sequence
  Description of Artificial Sequence: Synthetic oligonucleotide
ugauccgcccgaguguaca

SEQ ID NO: 743254 - RNA, 19 nt, Artificial Sequence
  Description of Artificial Sequence: Synthetic oligonucleotide
agguugaagugugcaaucu

SEQ ID NO: 743255 - RNA, 19 nt, Artificial Sequence
  Description of Artificial Sequence: Synthetic oligonucleotide
aggggaugggccucugugu

SEQ ID NO: 743256 - RNA, 19 nt, Artificial Sequence
  Description of Artificial Sequence: Synthetic oligonucleotide
acuagggauaucacucuga

SEQ ID NO: 743257 - RNA, 19 nt, Artificial Sequence
  Description of Artificial Sequence: Synthetic oligonucleotide
ugaugaacaugggcaccag

SEQ ID NO: 743258 - RNA, 19 nt, Artificial Sequence
  Description of Artificial Sequence: Synthetic oligonucleotide
gcucguccccgauaggugg

SEQ ID NO: 743259 - RNA, 19 nt, Artificial Sequence
  Description of Artificial Sequence: Synthetic oligonucleotide
uccgcccgaguguacaggu

SEQ ID NO: 743260 - RNA, 19 nt, Artificial Sequence
  Description of Artificial Sequence: Synthetic oligonucleotide
acaaggccccuugagguca

SEQ ID NO: 743261 - RNA, 19 nt, Artificial Sequence
  Description of Artificial Sequence: Synthetic oligonucleotide
agucuccggccgcagcagg

SEQ ID NO: 743262 - RNA, 19 nt, Artificial Sequence
  Description of Artificial Sequence: Synthetic oligonucleotide
cuacuccaugagcucagac

SEQ ID NO: 743263 - RNA, 19 nt, Artificial Sequence
  Description of Artificial Sequence: Synthetic oligonucleotide
cauuugggcauaggaauca

SEQ ID NO: 743264 - RNA, 19 nt, Artificial Sequence
  Description of Artificial Sequence: Synthetic oligonucleotide
auuaucccaggguguccug

SEQ ID NO: 743265 - RNA, 19 nt, Artificial Sequence
  Description of Artificial Sequence: Synthetic oligonucleotide
cuuugccucagagacacaa

SEQ ID NO: 743266 - RNA, 19 nt, Artificial Sequence
  Description of Artificial Sequence: Synthetic oligonucleotide
guauucguaguagcuguca

SEQ ID NO: 743267 - RNA, 19 nt, Artificial Sequence
  Description of Artificial Sequence: Synthetic oligonucleotide
ggcauaggaaucaggaguc

SEQ ID NO: 743268 - RNA, 19 nt, Artificial Sequence
  Description of Artificial Sequence: Synthetic oligonucleotide
ugggaccaaguccacuuuu

SEQ ID NO: 743269 - RNA, 19 nt, Artificial Sequence
  Description of Artificial Sequence: Synthetic oligonucleotide
ggcauuaaccgauuuccaa

SEQ ID NO: 743270 - RNA, 19 nt, Artificial Sequence
  Description of Artificial Sequence: Synthetic oligonucleotide
gaguggaugugcucuguua

SEQ ID NO: 743271 - RNA, 19 nt, Artificial Sequence
  Description of Artificial Sequence: Synthetic oligonucleotide
cacugacuagggauaucac

SEQ ID NO: 743272 - RNA, 19 nt, Artificial Sequence
  Description of Artificial Sequence: Synthetic oligonucleotide
accuuugggauuagagcug

SEQ ID NO: 743273 - RNA, 19 nt, Artificial Sequence
  Description of Artificial Sequence: Synthetic oligonucleotide
ccguguguacuuauugaag

SEQ ID NO: 743274 - RNA, 19 nt, Artificial Sequence
  Description of Artificial Sequence: Synthetic oligonucleotide
uacccuacuccaugagcuc

SEQ ID NO: 743275 - RNA, 19 nt, Artificial Sequence
  Description of Artificial Sequence: Synthetic oligonucleotide
aagaggcucguccccgaua

SEQ ID NO: 743276 - RNA, 19 nt, Artificial Sequence
  Description of Artificial Sequence: Synthetic oligonucleotide
uccuuaugauccgcccgag

SEQ ID NO: 743277 - RNA, 19 nt, Artificial Sequence
  Description of Artificial Sequence: Synthetic oligonucleotide
cuuugggauuagagcuggc

SEQ ID NO: 743278 - RNA, 19 nt, Artificial Sequence
  Description of Artificial Sequence: Synthetic oligonucleotide
guucaucucauagcagguc

SEQ ID NO: 743279 - RNA, 19 nt, Artificial Sequence
  Description of Artificial Sequence: Synthetic oligonucleotide
agcguuucucccacaaaga

SEQ ID NO: 743280 - RNA, 19 nt, Artificial Sequence
  Description of Artificial Sequence: Synthetic oligonucleotide
ugaggggacccguguguac

SEQ ID NO: 743281 - RNA, 19 nt, Artificial Sequence
  Description of Artificial Sequence: Synthetic oligonucleotide
ucccgaaacuccagcugaa

SEQ ID NO: 743282 - RNA, 19 nt, Artificial Sequence
  Description of Artificial Sequence: Synthetic oligonucleotide
cccgauaggugguauguac

SEQ ID NO: 743283 - RNA, 19 nt, Artificial Sequence
  Description of Artificial Sequence: Synthetic oligonucleotide
cuaaccccugccagcccag

SEQ ID NO: 743284 - RNA, 19 nt, Artificial Sequence
  Description of Artificial Sequence: Synthetic oligonucleotide
aggcucguccccgauaggu

SEQ ID NO: 743285 - RNA, 19 nt, Artificial Sequence
  Description of Artificial Sequence: Synthetic oligonucleotide
cacacuugauggcugccca

SEQ ID NO: 743286 - RNA, 19 nt, Artificial Sequence
  Description of Artificial Sequence: Synthetic oligonucleotide
uugugacacgguacagaua

SEQ ID NO: 743287 - RNA, 19 nt, Artificial Sequence
  Description of Artificial Sequence: Synthetic oligonucleotide
ggucauuugggcauaggaa

SEQ ID NO: 743288 - RNA, 19 nt, Artificial Sequence
  Description of Artificial Sequence: Synthetic oligonucleotide
cugaaugcuugucacuucu

SEQ ID NO: 743289 - RNA, 19 nt, Artificial Sequence
  Description of Artificial Sequence: Synthetic oligonucleotide
aggccccuaagauucggau

SEQ ID NO: 743290 - RNA, 19 nt, Artificial Sequence
  Description of Artificial Sequence: Synthetic oligonucleotide
cuacuuugccucagagaca

SEQ ID NO: 743291 - RNA, 19 nt, Artificial Sequence
  Description of Artificial Sequence: Synthetic oligonucleotide
cccaacaucuucauggaaa

SEQ ID NO: 743292 - RNA, 19 nt, Artificial Sequence
  Description of Artificial Sequence: Synthetic oligonucleotide
ggugccuuagauucugucu

SEQ ID NO: 743293 - RNA, 19 nt, Artificial Sequence
  Description of Artificial Sequence: Synthetic oligonucleotide
cagccuaaauaucccagaa

SEQ ID NO: 743294 - RNA, 19 nt, Artificial Sequence
  Description of Artificial Sequence: Synthetic oligonucleotide
cgguacagauagaacaggc

SEQ ID NO: 743295 - RNA, 19 nt, Artificial Sequence
  Description of Artificial Sequence: Synthetic oligonucleotide
gauggggagugagcaaguc

SEQ ID NO: 743296 - RNA, 19 nt, Artificial Sequence
  Description of Artificial Sequence: Synthetic oligonucleotide
ccuuugggauuagagcugg

SEQ ID NO: 743297 - RNA, 19 nt, Artificial Sequence
  Description of Artificial Sequence: Synthetic oligonucleotide
uccuccuaggcaggagccc

SEQ ID NO: 743298 - RNA, 19 nt, Artificial Sequence
  Description of Artificial Sequence: Synthetic oligonucleotide
cacgggcuauccuccuagg

SEQ ID NO: 743299 - RNA, 19 nt, Artificial Sequence
  Description of Artificial Sequence: Synthetic oligonucleotide
gaaugccguagcaggugug

SEQ ID NO: 743300 - RNA, 19 nt, Artificial Sequence
  Description of Artificial Sequence: Synthetic oligonucleotide
acgcaucacagugggacca

SEQ ID NO: 743301 - RNA, 19 nt, Artificial Sequence
  Description of Artificial Sequence: Synthetic oligonucleotide
gaccaaguccacuuuucau

SEQ ID NO: 743302 - RNA, 19 nt, Artificial Sequence
  Description of Artificial Sequence: Synthetic oligonucleotide
ccgaaacuccagcugaaug

SEQ ID NO: 743303 - RNA, 19 nt, Artificial Sequence
  Description of Artificial Sequence: Synthetic oligonucleotide
  modified_base (3)..(3): a, c, u, g, unknown or other
ucncuaggaagaggcucgu

SEQ ID NO: 743304 - RNA, 19 nt, Artificial Sequence
  Description of Artificial Sequence: Synthetic oligonucleotide
ggauaucacucugaacuca

SEQ ID NO: 743305 - RNA, 19 nt, Artificial Sequence
  Description of Artificial Sequence: Synthetic oligonucleotide
aucccugaguccaacccgu

SEQ ID NO: 743306 - RNA, 19 nt, Artificial Sequence
  Description of Artificial Sequence: Synthetic oligonucleotide
uagaacugagcaggagcau

SEQ ID NO: 743307 - RNA, 19 nt, Artificial Sequence
  Description of Artificial Sequence: Synthetic oligonucleotide
acacuugauggcugcccaa

SEQ ID NO: 743308 - RNA, 19 nt, Artificial Sequence
  Description of Artificial Sequence: Synthetic oligonucleotide
aggcauuaaccgauuucca

SEQ ID NO: 743309 - RNA, 19 nt, Artificial Sequence
  Description of Artificial Sequence: Synthetic oligonucleotide
caaaacuaugugggcccug

SEQ ID NO: 743310 - RNA, 19 nt, Artificial Sequence
  Description of Artificial Sequence: Synthetic oligonucleotide
gucauggcaugaguuuuca

SEQ ID NO: 743311 - RNA, 19 nt, Artificial Sequence
  Description of Artificial Sequence: Synthetic oligonucleotide
auccgcccgaguguacagg

SEQ ID NO: 743312 - RNA, 19 nt, Artificial Sequence
  Description of Artificial Sequence: Synthetic oligonucleotide
uccccucaauggcuuuaac

SEQ ID NO: 743313 - RNA, 19 nt, Artificial Sequence
  Description of Artificial Sequence: Synthetic oligonucleotide
ccaucuuaucccugggauc

SEQ ID NO: 743314 - RNA, 19 nt, Artificial Sequence
  Description of Artificial Sequence: Synthetic oligonucleotide
acuuuucaucucagcugag

SEQ ID NO: 743315 - RNA, 19 nt, Artificial Sequence
  Description of Artificial Sequence: Synthetic oligonucleotide
guccccgauaggugguaug

SEQ ID NO: 743316 - RNA, 19 nt, Artificial Sequence
  Description of Artificial Sequence: Synthetic oligonucleotide
aaccccugccagcccagua

SEQ ID NO: 743317 - RNA, 19 nt, Artificial Sequence
  Description of Artificial Sequence: Synthetic oligonucleotide
auggaaucuuggagggugu

SEQ ID NO: 743318 - RNA, 19 nt, Artificial Sequence
  Description of Artificial Sequence: Synthetic oligonucleotide
ccgcuguucguguugauga

SEQ ID NO: 743319 - RNA, 19 nt, Artificial Sequence
  Description of Artificial Sequence: Synthetic oligonucleotide
ccguaaacaccagagccac

SEQ ID NO: 743320 - RNA, 19 nt, Artificial Sequence
  Description of Artificial Sequence: Synthetic oligonucleotide
ugagugccugagccagauc

SEQ ID NO: 743321 - RNA, 19 nt, Artificial Sequence
  Description of Artificial Sequence: Synthetic oligonucleotide
cccguaaacaccagagcca

SEQ ID NO: 743322 - RNA, 19 nt, Artificial Sequence
  Description of Artificial Sequence: Synthetic oligonucleotide
uucucccacgaaggugagc

SEQ ID NO: 743323 - RNA, 19 nt, Artificial Sequence
  Description of Artificial Sequence: Synthetic oligonucleotide
ccaagugguccaucuuggc

SEQ ID NO: 743324 - RNA, 19 nt, Artificial Sequence
  Description of Artificial Sequence: Synthetic oligonucleotide
guagacaagucagccuaaa

SEQ ID NO: 743325 - RNA, 19 nt, Artificial Sequence
  Description of Artificial Sequence: Synthetic oligonucleotide
guaagacgagagagcuccc

SEQ ID NO: 743326 - RNA, 19 nt, Artificial Sequence
  Description of Artificial Sequence: Synthetic oligonucleotide
agucaaaccuccagaucuu

SEQ ID NO: 743327 - RNA, 19 nt, Artificial Sequence
  Description of Artificial Sequence: Synthetic oligonucleotide
cacgaaggugagcuuucca

SEQ ID NO: 743328 - RNA, 19 nt, Artificial Sequence
  Description of Artificial Sequence: Synthetic oligonucleotide
cucccacaaagaagcucuc

SEQ ID NO: 743329 - RNA, 19 nt, Artificial Sequence
  Description of Artificial Sequence: Synthetic oligonucleotide
cucuggcacccaaagugaa

SEQ ID NO: 743330 - RNA, 19 nt, Artificial Sequence
  Description of Artificial Sequence: Synthetic oligonucleotide
ccauguggucagcuggaag

SEQ ID NO: 743331 - RNA, 19 nt, Artificial Sequence
  Description of Artificial Sequence: Synthetic oligonucleotide
ggauuagagcuggcuuggg

SEQ ID NO: 743332 - RNA, 19 nt, Artificial Sequence
  Description of Artificial Sequence: Synthetic oligonucleotide
ccccucaauggcuuuaaca

SEQ ID NO: 743333 - RNA, 19 nt, Artificial Sequence
  Description of Artificial Sequence: Synthetic oligonucleotide
gguacuuguggucccuugu

SEQ ID NO: 743334 - RNA, 19 nt, Artificial Sequence
  Description of Artificial Sequence: Synthetic oligonucleotide
augauccgcccgaguguac

SEQ ID NO: 743335 - RNA, 19 nt, Artificial Sequence
  Description of Artificial Sequence: Synthetic oligonucleotide
ggcacacccuccccaacac

SEQ ID NO: 743336 - RNA, 19 nt, Artificial Sequence
  Description of Artificial Sequence: Synthetic oligonucleotide
ggucccuugugacacggua

SEQ ID NO: 743337 - RNA, 19 nt, Artificial Sequence
  Description of Artificial Sequence: Synthetic oligonucleotide
ggaggugauaagaaguuuu

SEQ ID NO: 743338 - RNA, 19 nt, Artificial Sequence
  Description of Artificial Sequence: Synthetic oligonucleotide
gggguauaagugguugaca

SEQ ID NO: 743339 - RNA, 19 nt, Artificial Sequence
  Description of Artificial Sequence: Synthetic oligonucleotide
cucacugacuagggauauc

SEQ ID NO: 743340 - RNA, 19 nt, Artificial Sequence
  Description of Artificial Sequence: Synthetic oligonucleotide
ccaauaggcccacgucagc

SEQ ID NO: 743341 - RNA, 19 nt, Artificial Sequence
  Description of Artificial Sequence: Synthetic oligonucleotide
gguauucguaguagcuguc

SEQ ID NO: 743342 - RNA, 19 nt, Artificial Sequence
  Description of Artificial Sequence: Synthetic oligonucleotide
caugagugccugagccaga

SEQ ID NO: 743343 - RNA, 19 nt, Artificial Sequence
  Description of Artificial Sequence: Synthetic oligonucleotide
uggugaaggcaggcauuaa

SEQ ID NO: 743344 - RNA, 19 nt, Artificial Sequence
  Description of Artificial Sequence: Synthetic oligonucleotide
ucccugaguccaacccgua

SEQ ID NO: 743345 - RNA, 19 nt, Artificial Sequence
  Description of Artificial Sequence: Synthetic oligonucleotide
ccugaguccaacccguaaa

SEQ ID NO: 743346 - RNA, 19 nt, Artificial Sequence
  Description of Artificial Sequence: Synthetic oligonucleotide
cccguguguacuuauugaa

SEQ ID NO: 743347 - RNA, 19 nt, Artificial Sequence
  Description of Artificial Sequence: Synthetic oligonucleotide
cauaggaaucaggagucau

SEQ ID NO: 743348 - RNA, 19 nt, Artificial Sequence
  Description of Artificial Sequence: Synthetic oligonucleotide
ccgguucaucucauagcag

SEQ ID NO: 743349 - RNA, 19 nt, Artificial Sequence
  Description of Artificial Sequence: Synthetic oligonucleotide
gcucuggcacccaaaguga

SEQ ID NO: 743350 - RNA, 19 nt, Artificial Sequence
  Description of Artificial Sequence: Synthetic oligonucleotide
gcagguauucguaguagcu

SEQ ID NO: 743351 - RNA, 19 nt, Artificial Sequence
  Description of Artificial Sequence: Synthetic oligonucleotide
  modified_base (2)..(2): a, c, u, g, unknown or other
cncuaggaagaggcucguc

SEQ ID NO: 743352 - RNA, 19 nt, Artificial Sequence
  Description of Artificial Sequence: Synthetic oligonucleotide
ggcucguccccgauaggug

SEQ ID NO: 743353 - RNA, 19 nt, Artificial Sequence
  Description of Artificial Sequence: Synthetic oligonucleotide
gccgccacugagcugcaga

SEQ ID NO: 743354 - RNA, 19 nt, Artificial Sequence
  Description of Artificial Sequence: Synthetic oligonucleotide
cugucuaguuuacccuacu

SEQ ID NO: 743355 - RNA, 19 nt, Artificial Sequence
  Description of Artificial Sequence: Synthetic oligonucleotide
uaaccccugccagcccagu

SEQ ID NO: 743356 - RNA, 19 nt, Artificial Sequence
  Description of Artificial Sequence: Synthetic oligonucleotide
gaagaggcucguccccgau

SEQ ID NO: 743357 - RNA, 19 nt, Artificial Sequence
  Description of Artificial Sequence: Synthetic oligonucleotide
cuucagcguuucucccaca

SEQ ID NO: 743358 - RNA, 19 nt, Artificial Sequence
  Description of Artificial Sequence: Synthetic oligonucleotide
guauggaaucuuggagggu

SEQ ID NO: 743359 - RNA, 19 nt, Artificial Sequence
  Description of Artificial Sequence: Synthetic oligonucleotide
cacggccuccuggaauuuc

SEQ ID NO: 743360 - RNA, 19 nt, Artificial Sequence
  Description of Artificial Sequence: Synthetic oligonucleotide
gguagacaagucagccuaa

SEQ ID NO: 743361 - RNA, 19 nt, Artificial Sequence
  Description of Artificial Sequence: Synthetic oligonucleotide
ucguccccgauagguggua

SEQ ID NO: 743362 - RNA, 19 nt, Artificial Sequence
  Description of Artificial Sequence: Synthetic oligonucleotide
ccgauaggugguauguacu

SEQ ID NO: 743363 - RNA, 19 nt, Artificial Sequence
  Description of Artificial Sequence: Synthetic oligonucleotide
ccacgaaggugagcuuucc

SEQ ID NO: 743364 - RNA, 19 nt, Artificial Sequence
  Description of Artificial Sequence: Synthetic oligonucleotide
gugacacgguacagauaga

SEQ ID NO: 743365 - RNA, 19 nt, Artificial Sequence
  Description of Artificial Sequence: Synthetic oligonucleotide
ggcuugggguauaaguggu

SEQ ID NO: 743366 - RNA, 19 nt, Artificial Sequence
  Description of Artificial Sequence: Synthetic oligonucleotide
cagguaacacaggccccga

SEQ ID NO: 743367 - RNA, 19 nt, Artificial Sequence
  Description of Artificial Sequence: Synthetic oligonucleotide
gguggccgccacugagcug

SEQ ID NO: 743368 - RNA, 19 nt, Artificial Sequence
  Description of Artificial Sequence: Synthetic oligonucleotide
aggacgcaucacaguggga

SEQ ID NO: 743369 - RNA, 19 nt, Artificial Sequence
  Description of Artificial Sequence: Synthetic oligonucleotide
cucguccccgauagguggu

SEQ ID NO: 743370 - RNA, 19 nt, Artificial Sequence
  Description of Artificial Sequence: Synthetic oligonucleotide
cccuugugacacgguacag

SEQ ID NO: 743371 - RNA, 19 nt, Artificial Sequence
  Description of Artificial Sequence: Synthetic oligonucleotide
cccguccuucuucccagac

SEQ ID NO: 743372 - RNA, 19 nt, Artificial Sequence
  Description of Artificial Sequence: Synthetic oligonucleotide
gugggaccaaguccacuuu

SEQ ID NO: 743373 - RNA, 19 nt, Artificial Sequence
  Description of Artificial Sequence: Synthetic oligonucleotide
ccagcccguccuucuuccc

SEQ ID NO: 743374 - RNA, 19 nt, Artificial Sequence
  Description of Artificial Sequence: Synthetic oligonucleotide
caccagaccugugggucaa

SEQ ID NO: 743375 - RNA, 19 nt, Artificial Sequence
  Description of Artificial Sequence: Synthetic oligonucleotide
aggcaggcauuaaccgauu

SEQ ID NO: 743376 - RNA, 19 nt, Artificial Sequence
  Description of Artificial Sequence: Synthetic oligonucleotide
gguaggggaugggccucug

SEQ ID NO: 743377 - RNA, 19 nt, Artificial Sequence
  Description of Artificial Sequence: Synthetic oligonucleotide
ggggagugagcaagucaaa

SEQ ID NO: 743378 - RNA, 19 nt, Artificial Sequence
  Description of Artificial Sequence: Synthetic oligonucleotide
ggcaggcauuaaccgauuu

SEQ ID NO: 743379 - RNA, 19 nt, Artificial Sequence
  Description of Artificial Sequence: Synthetic oligonucleotide
cccugaguccaacccguaa

SEQ ID NO: 743380 - RNA, 19 nt, Artificial Sequence
  Description of Artificial Sequence: Synthetic oligonucleotide
cguaaacaccagagccaca

SEQ ID NO: 743381 - RNA, 19 nt, Artificial Sequence
  Description of Artificial Sequence: Synthetic oligonucleotide
gggacccguguguacuuau

SEQ ID NO: 743382 - RNA, 19 nt, Artificial Sequence
  Description of Artificial Sequence: Synthetic oligonucleotide
ccccaacaucuucauggaa

SEQ ID NO: 743383 - RNA, 19 nt, Artificial Sequence
  Description of Artificial Sequence: Synthetic oligonucleotide
ccuuaugauccgcccgagu

SEQ ID NO: 743384 - RNA, 19 nt, Artificial Sequence
  Description of Artificial Sequence: Synthetic oligonucleotide
cccuaagauucggauggua

SEQ ID NO: 743385 - RNA, 19 nt, Artificial Sequence
  Description of Artificial Sequence: Synthetic oligonucleotide
gccacgggcuauccuccua

SEQ ID NO: 743386 - RNA, 19 nt, Artificial Sequence
  Description of Artificial Sequence: Synthetic oligonucleotide
ccaaaacuaugugggcccu

SEQ ID NO: 743387 - RNA, 19 nt, Artificial Sequence
  Description of Artificial Sequence: Synthetic oligonucleotide
gcccacgucagcccuccau

SEQ ID NO: 743388 - RNA, 19 nt, Artificial Sequence
  Description of Artificial Sequence: Synthetic oligonucleotide
ggggacccguguguacuua

SEQ ID NO: 743389 - RNA, 19 nt, Artificial Sequence
  Description of Artificial Sequence: Synthetic oligonucleotide
gcuugggguauaagugguu

SEQ ID NO: 743390 - RNA, 19 nt, Artificial Sequence
  Description of Artificial Sequence: Synthetic oligonucleotide
cugguacuuguggucccuu

SEQ ID NO: 743391 - RNA, 19 nt, Artificial Sequence
  Description of Artificial Sequence: Synthetic oligonucleotide
ccgccacugagcugcagau

SEQ ID NO: 743392 - RNA, 19 nt, Artificial Sequence
  Description of Artificial Sequence: Synthetic oligonucleotide
ggacccguguguacuuauu

SEQ ID NO: 743393 - RNA, 19 nt, Artificial Sequence
  Description of Artificial Sequence: Synthetic oligonucleotide
ccccgauaggugguaugua

SEQ ID NO: 743394 - RNA, 19 nt, Artificial Sequence
  Description of Artificial Sequence: Synthetic oligonucleotide
cccgaaacuccagcugaau

SEQ ID NO: 743395 - RNA, 19 nt, Artificial Sequence
  Description of Artificial Sequence: Synthetic oligonucleotide
ccccuaagauucggauggu

SEQ ID NO: 743396 - RNA, 19 nt, Artificial Sequence
  Description of Artificial Sequence: Synthetic oligonucleotide
ccgcccgaguguacagguu

SEQ ID NO: 743397 - RNA, 19 nt, Artificial Sequence
  Description of Artificial Sequence: Synthetic oligonucleotide
ccacggccuccuggaauuu

SEQ ID NO: 743398 - RNA, 19 nt, Artificial Sequence
  Description of Artificial Sequence: Synthetic oligonucleotide
aacguuguuauccagaagc

SEQ ID NO: 743399 - RNA, 19 nt, Artificial Sequence
  Description of Artificial Sequence: Synthetic oligonucleotide
aaugcuaucaagauaaucc

SEQ ID NO: 743400 - RNA, 19 nt, Artificial Sequence
  Description of Artificial Sequence: Synthetic oligonucleotide
aaaauuuauauaccuaggc

SEQ ID NO: 743401 - RNA, 19 nt, Artificial Sequence
  Description of Artificial Sequence: Synthetic oligonucleotide
aauuaugucaucugaaauc

SEQ ID NO: 743402 - RNA, 19 nt, Artificial Sequence
  Description of Artificial Sequence: Synthetic oligonucleotide
auaaauaaaacaguguggc

SEQ ID NO: 743403 - RNA, 19 nt, Artificial Sequence
  Description of Artificial Sequence: Synthetic oligonucleotide
uuaacuaucuaaaaguggc

SEQ ID NO: 743404 - RNA, 19 nt, Artificial Sequence
  Description of Artificial Sequence: Synthetic oligonucleotide
acguuuuaaacucacaagc

SEQ ID NO: 743405 - RNA, 19 nt, Artificial Sequence
  Description of Artificial Sequence: Synthetic oligonucleotide
aauggaauccaucaugguc

SEQ ID NO: 743406 - RNA, 19 nt, Artificial Sequence
  Description of Artificial Sequence: Synthetic oligonucleotide
uuuaugauggugauuauca

SEQ ID NO: 743407 - RNA, 19 nt, Artificial Sequence
  Description of Artificial Sequence: Synthetic oligonucleotide
aaaauggccauuugaaguc

SEQ ID NO: 743408 - RNA, 19 nt, Artificial Sequence
  Description of Artificial Sequence: Synthetic oligonucleotide
aauagauucuucuuuugag

SEQ ID NO: 743409 - RNA, 19 nt, Artificial Sequence
  Description of Artificial Sequence: Synthetic oligonucleotide
gauauguacuacuuuacgg

SEQ ID NO: 743410 - RNA, 19 nt, Artificial Sequence
  Description of Artificial Sequence: Synthetic oligonucleotide
aauaacuugcugcugcugg

SEQ ID NO: 743411 - RNA, 19 nt, Artificial Sequence
  Description of Artificial Sequence: Synthetic oligonucleotide
aauaauguucauuaaaauu

SEQ ID NO: 743412 - RNA, 19 nt, Artificial Sequence
  Description of Artificial Sequence: Synthetic oligonucleotide
uguuuuauaauuccggagu

SEQ ID NO: 743413 - RNA, 19 nt, Artificial Sequence
  Description of Artificial Sequence: Synthetic oligonucleotide
uuugaagucaacuuaagau

SEQ ID NO: 743414 - RNA, 19 nt, Artificial Sequence
  Description of Artificial Sequence: Synthetic oligonucleotide
aauuacaaugucaggauac

SEQ ID NO: 743415 - RNA, 19 nt, Artificial Sequence
  Description of Artificial Sequence: Synthetic oligonucleotide
auuuaguugucucacaaag

SEQ ID NO: 743416 - RNA, 19 nt, Artificial Sequence
  Description of Artificial Sequence: Synthetic oligonucleotide
ucuaauaacuugcugcugc

SEQ ID NO: 743417 - RNA, 19 nt, Artificial Sequence
  Description of Artificial Sequence: Synthetic oligonucleotide
aaaauggaauccaucaugg

SEQ ID NO: 743418 - RNA, 19 nt, Artificial Sequence
  Description of Artificial Sequence: Synthetic oligonucleotide
agcaaguucacauaaauaa

SEQ ID NO: 743419 - RNA, 19 nt, Artificial Sequence
  Description of Artificial Sequence: Synthetic oligonucleotide
agauauuccaauaauguuc

SEQ ID NO: 743420 - RNA, 19 nt, Artificial Sequence
  Description of Artificial Sequence: Synthetic oligonucleotide
uugacuuuaaaccuucugu

SEQ ID NO: 743421 - RNA, 19 nt, Artificial Sequence
  Description of Artificial Sequence: Synthetic oligonucleotide
ucaguaacaucauaaauaa

SEQ ID NO: 743422 - RNA, 19 nt, Artificial Sequence
  Description of Artificial Sequence: Synthetic oligonucleotide
gauggugauuaucaguugg

SEQ ID NO: 743423 - RNA, 19 nt, Artificial Sequence
  Description of Artificial Sequence: Synthetic oligonucleotide
aaagaacuagaccagaguu

SEQ ID NO: 743424 - RNA, 19 nt, Artificial Sequence
  Description of Artificial Sequence: Synthetic oligonucleotide
uaauaaagaacuagaccag

SEQ ID NO: 743425 - RNA, 19 nt, Artificial Sequence
  Description of Artificial Sequence: Synthetic oligonucleotide
acuauguggaacuuuauga

SEQ ID NO: 743426 - RNA, 19 nt, Artificial Sequence
  Description of Artificial Sequence: Synthetic oligonucleotide
cuuaacuaucuaaaagugg

SEQ ID NO: 743427 - RNA, 19 nt, Artificial Sequence
  Description of Artificial Sequence: Synthetic oligonucleotide
uuaguguuuagaaguagag

SEQ ID NO: 743428 - RNA, 19 nt, Artificial Sequence
  Description of Artificial Sequence: Synthetic oligonucleotide
gaaguagaggccuuuuacg

SEQ ID NO: 743429 - RNA, 19 nt, Artificial Sequence
  Description of Artificial Sequence: Synthetic oligonucleotide
agcucaucgacuucuaugg

SEQ ID NO: 743430 - RNA, 19 nt, Artificial Sequence
  Description of Artificial Sequence: Synthetic oligonucleotide
uaucaagauaauccaacag

SEQ ID NO: 743431 - RNA, 19 nt, Artificial Sequence
  Description of Artificial Sequence: Synthetic oligonucleotide
guugaaauucaacaggggc

SEQ ID NO: 743432 - RNA, 19 nt, Artificial Sequence
  Description of Artificial Sequence: Synthetic oligonucleotide
uuguuaaaucuucuugacg

SEQ ID NO: 743433 - RNA, 19 nt, Artificial Sequence
  Description of Artificial Sequence: Synthetic oligonucleotide
ucuaaacacuuaaagguca

SEQ ID NO: 743434 - RNA, 19 nt, Artificial Sequence
  Description of Artificial Sequence: Synthetic oligonucleotide
uaugggcuuaucuacagag

SEQ ID NO: 743435 - RNA, 19 nt, Artificial Sequence
  Description of Artificial Sequence: Synthetic oligonucleotide
uuguuuaucggguuuagac

SEQ ID NO: 743436 - RNA, 19 nt, Artificial Sequence
  Description of Artificial Sequence: Synthetic oligonucleotide
uuaaaaugguuauauuugu

SEQ ID NO: 743437 - RNA, 19 nt, Artificial Sequence
  Description of Artificial Sequence: Synthetic oligonucleotide
agaagaucugggucuaugc

SEQ ID NO: 743438 - RNA, 19 nt, Artificial Sequence
  Description of Artificial Sequence: Synthetic oligonucleotide
uuacguuuuaaacucacaa

SEQ ID NO: 743439 - RNA, 19 nt, Artificial Sequence
  Description of Artificial Sequence: Synthetic oligonucleotide
aacuacugcccauucuggc

SEQ ID NO: 743440 - RNA, 19 nt, Artificial Sequence
  Description of Artificial Sequence: Synthetic oligonucleotide
acgaauuuuauuuuccucu

SEQ ID NO: 743441 - RNA, 19 nt, Artificial Sequence
  Description of Artificial Sequence: Synthetic oligonucleotide
auauguacuacuuuacgga

SEQ ID NO: 743442 - RNA, 19 nt, Artificial Sequence
  Description of Artificial Sequence: Synthetic oligonucleotide
aauugcacagcacuagaca

SEQ ID NO: 743443 - RNA, 19 nt, Artificial Sequence
  Description of Artificial Sequence: Synthetic oligonucleotide
uuaaugauucucuggcuag

SEQ ID NO: 743444 - RNA, 19 nt, Artificial Sequence
  Description of Artificial Sequence: Synthetic oligonucleotide
ucuugguagcuucuaaucc

SEQ ID NO: 743445 - RNA, 19 nt, Artificial Sequence
  Description of Artificial Sequence: Synthetic oligonucleotide
aucccuuauucucagaauc

SEQ ID NO: 743446 - RNA, 19 nt, Artificial Sequence
  Description of Artificial Sequence: Synthetic oligonucleotide
aggucaauugaaaauaaac

SEQ ID NO: 743447 - RNA, 19 nt, Artificial Sequence
  Description of Artificial Sequence: Synthetic oligonucleotide
uacaacuggagaaaauggc

SEQ ID NO: 743448 - RNA, 19 nt, Artificial Sequence
  Description of Artificial Sequence: Synthetic oligonucleotide
cugaucuccacucugaaug

SEQ ID NO: 743449 - RNA, 19 nt, Artificial Sequence
  Description of Artificial Sequence: Synthetic oligonucleotide
agacaugaaauauuacaag

SEQ ID NO: 743450 - RNA, 19 nt, Artificial Sequence
  Description of Artificial Sequence: Synthetic oligonucleotide
uuuaauugcacagcacuag

SEQ ID NO: 743451 - RNA, 19 nt, Artificial Sequence
  Description of Artificial Sequence: Synthetic oligonucleotide
acauacaguguccauuugg

SEQ ID NO: 743452 - RNA, 19 nt, Artificial Sequence
  Description of Artificial Sequence: Synthetic oligonucleotide
guugggaucagacacaaca

SEQ ID NO: 743453 - RNA, 19 nt, Artificial Sequence
  Description of Artificial Sequence: Synthetic oligonucleotide
ugcaucaacguuguuaucc

SEQ ID NO: 743454 - RNA, 19 nt, Artificial Sequence
  Description of Artificial Sequence: Synthetic oligonucleotide
uuuaguugucucacaaagc

SEQ ID NO: 743455 - RNA, 19 nt, Artificial Sequence
  Description of Artificial Sequence: Synthetic oligonucleotide
uccaauaauguucauuaaa

SEQ ID NO: 743456 - RNA, 19 nt, Artificial Sequence
  Description of Artificial Sequence: Synthetic oligonucleotide
aauaguuucuucaucugca

SEQ ID NO: 743457 - RNA, 19 nt, Artificial Sequence
  Description of Artificial Sequence: Synthetic oligonucleotide
caaaauggaauccaucaug

SEQ ID NO: 743458 - RNA, 19 nt, Artificial Sequence
  Description of Artificial Sequence: Synthetic oligonucleotide
acauauuuaguugucucac

SEQ ID NO: 743459 - RNA, 19 nt, Artificial Sequence
  Description of Artificial Sequence: Synthetic oligonucleotide
uucuaaacacuuaaagguc

SEQ ID NO: 743460 - RNA, 19 nt, Artificial Sequence
  Description of Artificial Sequence: Synthetic oligonucleotide
aacaaucuugcuuuggguu

SEQ ID NO: 743461 - RNA, 19 nt, Artificial Sequence
  Description of Artificial Sequence: Synthetic oligonucleotide
acuaucuaaaaguggcauc

SEQ ID NO: 743462 - RNA, 19 nt, Artificial Sequence
  Description of Artificial Sequence: Synthetic oligonucleotide
uuuauaauuccggagucga

SEQ ID NO: 743463 - RNA, 19 nt, Artificial Sequence
  Description of Artificial Sequence: Synthetic oligonucleotide
uguuuaucggguuuagacu

SEQ ID NO: 743464 - RNA, 19 nt, Artificial Sequence
  Description of Artificial Sequence: Synthetic oligonucleotide
auaaacuggacaaucuuuc

SEQ ID NO: 743465 - RNA, 19 nt, Artificial Sequence
  Description of Artificial Sequence: Synthetic oligonucleotide
cuuuugagcuccauuagug

SEQ ID NO: 743466 - RNA, 19 nt, Artificial Sequence
  Description of Artificial Sequence: Synthetic oligonucleotide
ugaaccaauguaacaauaa

SEQ ID NO: 743467 - RNA, 19 nt, Artificial Sequence
  Description of Artificial Sequence: Synthetic oligonucleotide
ugaaaccuuccuuuuaaug

SEQ ID NO: 743468 - RNA, 19 nt, Artificial Sequence
  Description of Artificial Sequence: Synthetic oligonucleotide
agcuucuaaucccuuauuc

SEQ ID NO: 743469 - RNA, 19 nt, Artificial Sequence
  Description of Artificial Sequence: Synthetic oligonucleotide
uauguggaacuuuaugaug

SEQ ID NO: 743470 - RNA, 19 nt, Artificial Sequence
  Description of Artificial Sequence: Synthetic oligonucleotide
aucacucaaaauggaaucc

SEQ ID NO: 743471 - RNA, 19 nt, Artificial Sequence
  Description of Artificial Sequence: Synthetic oligonucleotide
uaaagaacuagaccagagu

SEQ ID NO: 743472 - RNA, 19 nt, Artificial Sequence
  Description of Artificial Sequence: Synthetic oligonucleotide
uacuaaauaccaugguuca

SEQ ID NO: 743473 - RNA, 19 nt, Artificial Sequence
  Description of Artificial Sequence: Synthetic oligonucleotide
aauaauuaugucaucugaa

SEQ ID NO: 743474 - RNA, 19 nt, Artificial Sequence
  Description of Artificial Sequence: Synthetic oligonucleotide
ggauaaguuguuuaucggg

SEQ ID NO: 743475 - RNA, 19 nt, Artificial Sequence
  Description of Artificial Sequence: Synthetic oligonucleotide
gauauuccaauaauguuca

SEQ ID NO: 743476 - RNA, 19 nt, Artificial Sequence
  Description of Artificial Sequence: Synthetic oligonucleotide
aaaggcaguauacuggaua

SEQ ID NO: 743477 - RNA, 19 nt, Artificial Sequence
  Description of Artificial Sequence: Synthetic oligonucleotide
ugaugaauauauacauaca

SEQ ID NO: 743478 - RNA, 19 nt, Artificial Sequence
  Description of Artificial Sequence: Synthetic oligonucleotide
ugacuaugugcugaaauag

SEQ ID NO: 743479 - RNA, 19 nt, Artificial Sequence
  Description of Artificial Sequence: Synthetic oligonucleotide
uuaauugcacagcacuaga

SEQ ID NO: 743480 - RNA, 19 nt, Artificial Sequence
  Description of Artificial Sequence: Synthetic oligonucleotide
aauccaacagcucaaccuu

SEQ ID NO: 743481 - RNA, 19 nt, Artificial Sequence
  Description of Artificial Sequence: Synthetic oligonucleotide
aaaacaguguggcuucacu

SEQ ID NO: 743482 - RNA, 19 nt, Artificial Sequence
  Description of Artificial Sequence: Synthetic oligonucleotide
uuuuacguuuuaaacucac

SEQ ID NO: 743483 - RNA, 19 nt, Artificial Sequence
  Description of Artificial Sequence: Synthetic oligonucleotide
uucuaaucccuuauucuca

SEQ ID NO: 743484 - RNA, 19 nt, Artificial Sequence
  Description of Artificial Sequence: Synthetic oligonucleotide
gaggguacaacuucugaug

SEQ ID NO: 743485 - RNA, 19 nt, Artificial Sequence
  Description of Artificial Sequence: Synthetic oligonucleotide
uguccuacuauguggaacu

SEQ ID NO: 743486 - RNA, 19 nt, Artificial Sequence
  Description of Artificial Sequence: Synthetic oligonucleotide
uaguguuuagaaguagagg

SEQ ID NO: 743487 - RNA, 19 nt, Artificial Sequence
  Description of Artificial Sequence: Synthetic oligonucleotide
ucaucgacuucuaugggcu

SEQ ID NO: 743488 - RNA, 19 nt, Artificial Sequence
  Description of Artificial Sequence: Synthetic oligonucleotide
aauaaagaacuagaccaga

SEQ ID NO: 743489 - RNA, 19 nt, Artificial Sequence
  Description of Artificial Sequence: Synthetic oligonucleotide
uaaucccuuauucucagaa

SEQ ID NO: 743490 - RNA, 19 nt, Artificial Sequence
  Description of Artificial Sequence: Synthetic oligonucleotide
uauauaccuaggcagccga

SEQ ID NO: 743491 - RNA, 19 nt, Artificial Sequence
  Description of Artificial Sequence: Synthetic oligonucleotide
ugaaauagauucuucuuuu

SEQ ID NO: 743492 - RNA, 19 nt, Artificial Sequence
  Description of Artificial Sequence: Synthetic oligonucleotide
ucugaaauccgcucucuug

SEQ ID NO: 743493 - RNA, 19 nt, Artificial Sequence
  Description of Artificial Sequence: Synthetic oligonucleotide
uucaacaggggccaucucu

SEQ ID NO: 743494 - RNA, 19 nt, Artificial Sequence
  Description of Artificial Sequence: Synthetic oligonucleotide
uuuggguuggcucugcauc

SEQ ID NO: 743495 - RNA, 19 nt, Artificial Sequence
  Description of Artificial Sequence: Synthetic oligonucleotide
uucuuuugagcuccauuag

SEQ ID NO: 743496 - RNA, 19 nt, Artificial Sequence
  Description of Artificial Sequence: Synthetic oligonucleotide
ucuaaucccuuauucucag

SEQ ID NO: 743497 - RNA, 19 nt, Artificial Sequence
  Description of Artificial Sequence: Synthetic oligonucleotide
uuuauauaccuaggcagcc

SEQ ID NO: 743498 - RNA, 19 nt, Artificial Sequence
  Description of Artificial Sequence: Synthetic oligonucleotide
uguuaucacucaaaaugga

SEQ ID NO: 743499 - RNA, 19 nt, Artificial Sequence
  Description of Artificial Sequence: Synthetic oligonucleotide
aacaccugaaagcuuugca

SEQ ID NO: 743500 - RNA, 19 nt, Artificial Sequence
  Description of Artificial Sequence: Synthetic oligonucleotide
ucugggucuaugcuaaacu

SEQ ID NO: 743501 - RNA, 19 nt, Artificial Sequence
  Description of Artificial Sequence: Synthetic oligonucleotide
uuacggaagccauacauau

SEQ ID NO: 743502 - RNA, 19 nt, Artificial Sequence
  Description of Artificial Sequence: Synthetic oligonucleotide
cuucuaugggcuuaucuac

SEQ ID NO: 743503 - RNA, 19 nt, Artificial Sequence
  Description of Artificial Sequence: Synthetic oligonucleotide
gcucucuugacuuuaaacc

SEQ ID NO: 743504 - RNA, 19 nt, Artificial Sequence
  Description of Artificial Sequence: Synthetic oligonucleotide
acaaucuugcuuuggguug

SEQ ID NO: 743505 - RNA, 19 nt, Artificial Sequence
  Description of Artificial Sequence: Synthetic oligonucleotide
uuaugauggugauuaucag

SEQ ID NO: 743506 - RNA, 19 nt, Artificial Sequence
  Description of Artificial Sequence: Synthetic oligonucleotide
aaaggugcuuuuauuccac

SEQ ID NO: 743507 - RNA, 19 nt, Artificial Sequence
  Description of Artificial Sequence: Synthetic oligonucleotide
ugcuaaacugucuuccuga

SEQ ID NO: 743508 - RNA, 19 nt, Artificial Sequence
  Description of Artificial Sequence: Synthetic oligonucleotide
cuguuuuauaauuccggag

SEQ ID NO: 743509 - RNA, 19 nt, Artificial Sequence
  Description of Artificial Sequence: Synthetic oligonucleotide
aacuagaccagaguuuucu

SEQ ID NO: 743510 - RNA, 19 nt, Artificial Sequence
  Description of Artificial Sequence: Synthetic oligonucleotide
ucuuuugagcuccauuagu

SEQ ID NO: 743511 - RNA, 19 nt, Artificial Sequence
  Description of Artificial Sequence: Synthetic oligonucleotide
agagguuaauguuaucacu

SEQ ID NO: 743512 - RNA, 19 nt, Artificial Sequence
  Description of Artificial Sequence: Synthetic oligonucleotide
uuuacguuuuaaacucaca

SEQ ID NO: 743513 - RNA, 19 nt, Artificial Sequence
  Description of Artificial Sequence: Synthetic oligonucleotide
cuaccuuuaguucuaaaca

SEQ ID NO: 743514 - RNA, 19 nt, Artificial Sequence
  Description of Artificial Sequence: Synthetic oligonucleotide
uuauauaccuaggcagccg

SEQ ID NO: 743515 - RNA, 19 nt, Artificial Sequence
  Description of Artificial Sequence: Synthetic oligonucleotide
acaaguuuaacugggauua

SEQ ID NO: 743516 - RNA, 19 nt, Artificial Sequence
  Description of Artificial Sequence: Synthetic oligonucleotide
aaacucacaagcugauuau

SEQ ID NO: 743517 - RNA, 19 nt, Artificial Sequence
  Description of Artificial Sequence: Synthetic oligonucleotide
auaacuugcugcugcuggg

SEQ ID NO: 743518 - RNA, 19 nt, Artificial Sequence
  Description of Artificial Sequence: Synthetic oligonucleotide
cuaugcuaaacugucuucc

SEQ ID NO: 743519 - RNA, 19 nt, Artificial Sequence
  Description of Artificial Sequence: Synthetic oligonucleotide
uaacuaucuaaaaguggca

SEQ ID NO: 743520 - RNA, 19 nt, Artificial Sequence
  Description of Artificial Sequence: Synthetic oligonucleotide
cuugacgaauuuuauuuuc

SEQ ID NO: 743521 - RNA, 19 nt, Artificial Sequence
  Description of Artificial Sequence: Synthetic oligonucleotide
ugcaaucaaugcuaucaag

SEQ ID NO: 743522 - RNA, 19 nt, Artificial Sequence
  Description of Artificial Sequence: Synthetic oligonucleotide
augcaagaaguggaaaggc

SEQ ID NO: 743523 - RNA, 19 nt, Artificial Sequence
  Description of Artificial Sequence: Synthetic oligonucleotide
uauguacuacuuuacggaa

SEQ ID NO: 743524 - RNA, 19 nt, Artificial Sequence
  Description of Artificial Sequence: Synthetic oligonucleotide
uucuguccuacuaugugga

SEQ ID NO: 743525 - RNA, 19 nt, Artificial Sequence
  Description of Artificial Sequence: Synthetic oligonucleotide
uccggagucgauauguacu

SEQ ID NO: 743526 - RNA, 19 nt, Artificial Sequence
  Description of Artificial Sequence: Synthetic oligonucleotide
aaguccucuaaacugcaau

SEQ ID NO: 743527 - RNA, 19 nt, Artificial Sequence
  Description of Artificial Sequence: Synthetic oligonucleotide
cucaucgacuucuaugggc

SEQ ID NO: 743528 - RNA, 19 nt, Artificial Sequence
  Description of Artificial Sequence: Synthetic oligonucleotide
ucgauauguacuacuuuac

SEQ ID NO: 743529 - RNA, 19 nt, Artificial Sequence
  Description of Artificial Sequence: Synthetic oligonucleotide
uaauugcacagcacuagac

SEQ ID NO: 743530 - RNA, 19 nt, Artificial Sequence
  Description of Artificial Sequence: Synthetic oligonucleotide
gagguuaauguuaucacuc

SEQ ID NO: 743531 - RNA, 19 nt, Artificial Sequence
  Description of Artificial Sequence: Synthetic oligonucleotide
aaucucugcucauccaaga

SEQ ID NO: 743532 - RNA, 19 nt, Artificial Sequence
  Description of Artificial Sequence: Synthetic oligonucleotide
ucaacguuguuauccagaa

SEQ ID NO: 743533 - RNA, 19 nt, Artificial Sequence
  Description of Artificial Sequence: Synthetic oligonucleotide
uuuugagcuccauuagugu

SEQ ID NO: 743534 - RNA, 19 nt, Artificial Sequence
  Description of Artificial Sequence: Synthetic oligonucleotide
uugacuaugugcugaaaua

SEQ ID NO: 743535 - RNA, 19 nt, Artificial Sequence
  Description of Artificial Sequence: Synthetic oligonucleotide
aaccuucuguccuacuaug

SEQ ID NO: 743536 - RNA, 19 nt, Artificial Sequence
  Description of Artificial Sequence: Synthetic oligonucleotide
acuucuaugggcuuaucua

SEQ ID NO: 743537 - RNA, 19 nt, Artificial Sequence
  Description of Artificial Sequence: Synthetic oligonucleotide
uaaaccuucuguccuacua

SEQ ID NO: 743538 - RNA, 19 nt, Artificial Sequence
  Description of Artificial Sequence: Synthetic oligonucleotide
uucacuagcuucaguuuca

SEQ ID NO: 743539 - RNA, 19 nt, Artificial Sequence
  Description of Artificial Sequence: Synthetic oligonucleotide
ucccuuauucucagaauca

SEQ ID NO: 743540 - RNA, 19 nt, Artificial Sequence
  Description of Artificial Sequence: Synthetic oligonucleotide
auaaagaacuagaccagag

SEQ ID NO: 743541 - RNA, 19 nt, Artificial Sequence
  Description of Artificial Sequence: Synthetic oligonucleotide
caccugaaagcuuugcaag

SEQ ID NO: 743542 - RNA, 19 nt, Artificial Sequence
  Description of Artificial Sequence: Synthetic oligonucleotide
aaauggaauccaucauggu

SEQ ID NO: 743543 - RNA, 19 nt, Artificial Sequence
  Description of Artificial Sequence: Synthetic oligonucleotide
ucgaggaaugcaagaagug

SEQ ID NO: 743544 - RNA, 19 nt, Artificial Sequence
  Description of Artificial Sequence: Synthetic oligonucleotide
aaauucaacaggggccauc

SEQ ID NO: 743545 - RNA, 19 nt, Artificial Sequence
  Description of Artificial Sequence: Synthetic oligonucleotide
auaauuccggagucgauau

SEQ ID NO: 743546 - RNA, 19 nt, Artificial Sequence
  Description of Artificial Sequence: Synthetic oligonucleotide
ugacgaauuuuauuuuccu

SEQ ID NO: 743547 - RNA, 19 nt, Artificial Sequence
  Description of Artificial Sequence: Synthetic oligonucleotide
ugagcacuacuuauaauuu

SEQ ID NO: 743548 - RNA, 19 nt, Artificial Sequence
  Description of Artificial Sequence: Synthetic oligonucleotide
aagcaaaaggugcuuuuau

SEQ ID NO: 743549 - RNA, 19 nt, Artificial Sequence
  Description of Artificial Sequence: Synthetic oligonucleotide
gacgaauuuuauuuuccuc

SEQ ID NO: 743550 - RNA, 19 nt, Artificial Sequence
  Description of Artificial Sequence: Synthetic oligonucleotide
guuugaaguaaggauguug

SEQ ID NO: 743551 - RNA, 19 nt, Artificial Sequence
  Description of Artificial Sequence: Synthetic oligonucleotide
acaacauccucauuaguuu

SEQ ID NO: 743552 - RNA, 19 nt, Artificial Sequence
  Description of Artificial Sequence: Synthetic oligonucleotide
uauaauuccggagucgaua

SEQ ID NO: 743553 - RNA, 19 nt, Artificial Sequence
  Description of Artificial Sequence: Synthetic oligonucleotide
ugggucuaugcuaaacugu

SEQ ID NO: 743554 - RNA, 19 nt, Artificial Sequence
  Description of Artificial Sequence: Synthetic oligonucleotide
ccuuuuacguuuuaaacuc

SEQ ID NO: 743555 - RNA, 19 nt, Artificial Sequence
  Description of Artificial Sequence: Synthetic oligonucleotide
gaaucaaccagaagaucug

SEQ ID NO: 743556 - RNA, 19 nt, Artificial Sequence
  Description of Artificial Sequence: Synthetic oligonucleotide
acaagauacaggcacuuua

SEQ ID NO: 743557 - RNA, 19 nt, Artificial Sequence
  Description of Artificial Sequence: Synthetic oligonucleotide
gauuauucugaaccaaugu

SEQ ID NO: 743558 - RNA, 19 nt, Artificial Sequence
  Description of Artificial Sequence: Synthetic oligonucleotide
uuuaucggguuuagacuug

SEQ ID NO: 743559 - RNA, 19 nt, Artificial Sequence
  Description of Artificial Sequence: Synthetic oligonucleotide
ucggguuuagacuuggauu

SEQ ID NO: 743560 - RNA, 19 nt, Artificial Sequence
  Description of Artificial Sequence: Synthetic oligonucleotide
aacuggagaaaauggccau

SEQ ID NO: 743561 - RNA, 19 nt, Artificial Sequence
  Description of Artificial Sequence: Synthetic oligonucleotide
uuccaaagggacucguucu

SEQ ID NO: 743562 - RNA, 19 nt, Artificial Sequence
  Description of Artificial Sequence: Synthetic oligonucleotide
uaugcuaaacugucuuccu

SEQ ID NO: 743563 - RNA, 19 nt, Artificial Sequence
  Description of Artificial Sequence: Synthetic oligonucleotide
aaucccuuauucucagaau

SEQ ID NO: 743564 - RNA, 19 nt, Artificial Sequence
  Description of Artificial Sequence: Synthetic oligonucleotide
ggucaauugaaaauaaaca

SEQ ID NO: 743565 - RNA, 19 nt, Artificial Sequence
  Description of Artificial Sequence: Synthetic oligonucleotide
uuaauucugacaccuccuu

SEQ ID NO: 743566 - RNA, 19 nt, Artificial Sequence
  Description of Artificial Sequence: Synthetic oligonucleotide
uuaauucugaaagccugga

SEQ ID NO: 743567 - RNA, 19 nt, Artificial Sequence
  Description of Artificial Sequence: Synthetic oligonucleotide
uuugagcuccauuaguguu

SEQ ID NO: 743568 - RNA, 19 nt, Artificial Sequence
  Description of Artificial Sequence: Synthetic oligonucleotide
ucuaugcuaaacugucuuc

SEQ ID NO: 743569 - RNA, 19 nt, Artificial Sequence
  Description of Artificial Sequence: Synthetic oligonucleotide
ugcuaucaagauaauccaa

SEQ ID NO: 743570 - RNA, 19 nt, Artificial Sequence
  Description of Artificial Sequence: Synthetic oligonucleotide
gucgauauguacuacuuua

SEQ ID NO: 743571 - RNA, 19 nt, Artificial Sequence
  Description of Artificial Sequence: Synthetic oligonucleotide
agguuaauguuaucacuca

SEQ ID NO: 743572 - RNA, 19 nt, Artificial Sequence
  Description of Artificial Sequence: Synthetic oligonucleotide
uucucagaaucaaccagaa

SEQ ID NO: 743573 - RNA, 19 nt, Artificial Sequence
  Description of Artificial Sequence: Synthetic oligonucleotide
uuaucggguuuagacuugg

SEQ ID NO: 743574 - RNA, 19 nt, Artificial Sequence
  Description of Artificial Sequence: Synthetic oligonucleotide
acuacugcccauucuggcu

SEQ ID NO: 743575 - RNA, 19 nt, Artificial Sequence
  Description of Artificial Sequence: Synthetic oligonucleotide
aaagggacucguucucacu

SEQ ID NO: 743576 - RNA, 19 nt, Artificial Sequence
  Description of Artificial Sequence: Synthetic oligonucleotide
gggcuuaacuaucuaaaag

SEQ ID NO: 743577 - RNA, 19 nt, Artificial Sequence
  Description of Artificial Sequence: Synthetic oligonucleotide
ucaucugaaauccgcucuc

SEQ ID NO: 743578 - RNA, 19 nt, Artificial Sequence
  Description of Artificial Sequence: Synthetic oligonucleotide
agccgaacaaucuugcuuu

SEQ ID NO: 743579 - RNA, 19 nt, Artificial Sequence
  Description of Artificial Sequence: Synthetic oligonucleotide
aggguacaacuucugauga

SEQ ID NO: 743580 - RNA, 19 nt, Artificial Sequence
  Description of Artificial Sequence: Synthetic oligonucleotide
cugggucuaugcuaaacug

SEQ ID NO: 743581 - RNA, 19 nt, Artificial Sequence
  Description of Artificial Sequence: Synthetic oligonucleotide
ccgaguaacaccugaaagc

SEQ ID NO: 743582 - RNA, 19 nt, Artificial Sequence
  Description of Artificial Sequence: Synthetic oligonucleotide
acaauaaacuggacaaucu

SEQ ID NO: 743583 - RNA, 19 nt, Artificial Sequence
  Description of Artificial Sequence: Synthetic oligonucleotide
ggggcauuuaauugcacag

SEQ ID NO: 743584 - RNA, 19 nt, Artificial Sequence
  Description of Artificial Sequence: Synthetic oligonucleotide
uuacaaugucaggauacug

SEQ ID NO: 743585 - RNA, 19 nt, Artificial Sequence
  Description of Artificial Sequence: Synthetic oligonucleotide
uccccuguucaauagcaga

SEQ ID NO: 743586 - RNA, 19 nt, Artificial Sequence
  Description of Artificial Sequence: Synthetic oligonucleotide
caaccagaagaucuggguc

SEQ ID NO: 743587 - RNA, 19 nt, Artificial Sequence
  Description of Artificial Sequence: Synthetic oligonucleotide
caacagcucaaccuuuccc

SEQ ID NO: 743588 - RNA, 19 nt, Artificial Sequence
  Description of Artificial Sequence: Synthetic oligonucleotide
uuaucuacagaggguacaa

SEQ ID NO: 743589 - RNA, 19 nt, Artificial Sequence
  Description of Artificial Sequence: Synthetic oligonucleotide
caucucacuauccagaggu

SEQ ID NO: 743590 - RNA, 19 nt, Artificial Sequence
  Description of Artificial Sequence: Synthetic oligonucleotide
accuaggcagccgaguaac

SEQ ID NO: 743591 - RNA, 19 nt, Artificial Sequence
  Description of Artificial Sequence: Synthetic oligonucleotide
cuuuaugauggugauuauc

SEQ ID NO: 743592 - RNA, 19 nt, Artificial Sequence
  Description of Artificial Sequence: Synthetic oligonucleotide
gauaaguuguuuaucgggu

SEQ ID NO: 743593 - RNA, 19 nt, Artificial Sequence
  Description of Artificial Sequence: Synthetic oligonucleotide
uaacugggauuaaaauggu

SEQ ID NO: 743594 - RNA, 19 nt, Artificial Sequence
  Description of Artificial Sequence: Synthetic oligonucleotide
aaagcaaaaggugcuuuua

SEQ ID NO: 743595 - RNA, 19 nt, Artificial Sequence
  Description of Artificial Sequence: Synthetic oligonucleotide
auuacaaugucaggauacu

SEQ ID NO: 743596 - RNA, 19 nt, Artificial Sequence
  Description of Artificial Sequence: Synthetic oligonucleotide
augcuaaacugucuuccug

SEQ ID NO: 743597 - RNA, 19 nt, Artificial Sequence
  Description of Artificial Sequence: Synthetic oligonucleotide
uuggguuggcucugcauca

SEQ ID NO: 743598 - RNA, 19 nt, Artificial Sequence
  Description of Artificial Sequence: Synthetic oligonucleotide
ccuuaauucugacaccucc

SEQ ID NO: 743599 - RNA, 19 nt, Artificial Sequence
  Description of Artificial Sequence: Synthetic oligonucleotide
cuacagaggguacaacuuc

SEQ ID NO: 743600 - RNA, 19 nt, Artificial Sequence
  Description of Artificial Sequence: Synthetic oligonucleotide
gaaugacaggggcauacuc

SEQ ID NO: 743601 - RNA, 19 nt, Artificial Sequence
  Description of Artificial Sequence: Synthetic oligonucleotide
uuuaaaccuucuguccuac

SEQ ID NO: 743602 - RNA, 19 nt, Artificial Sequence
  Description of Artificial Sequence: Synthetic oligonucleotide
uuuagacuuggauuuucuu

SEQ ID NO: 743603 - RNA, 19 nt, Artificial Sequence
  Description of Artificial Sequence: Synthetic oligonucleotide
uggagaaaauggccauuug

SEQ ID NO: 743604 - RNA, 19 nt, Artificial Sequence
  Description of Artificial Sequence: Synthetic oligonucleotide
aguggaaaggcaguauacu

SEQ ID NO: 743605 - RNA, 19 nt, Artificial Sequence
  Description of Artificial Sequence: Synthetic oligonucleotide
aguuuaacugggauuaaaa

SEQ ID NO: 743606 - RNA, 19 nt, Artificial Sequence
  Description of Artificial Sequence: Synthetic oligonucleotide
cuaaauaccaugguucaaa

SEQ ID NO: 743607 - RNA, 19 nt, Artificial Sequence
  Description of Artificial Sequence: Synthetic oligonucleotide
auacuggauaaguuguuua

SEQ ID NO: 743608 - RNA, 19 nt, Artificial Sequence
  Description of Artificial Sequence: Synthetic oligonucleotide
auaaguuguuuaucggguu

SEQ ID NO: 743609 - RNA, 19 nt, Artificial Sequence
  Description of Artificial Sequence: Synthetic oligonucleotide
uuguugaaugacacugcuc

SEQ ID NO: 743610 - RNA, 19 nt, Artificial Sequence
  Description of Artificial Sequence: Synthetic oligonucleotide
guacaacuucugaugaugc

SEQ ID NO: 743611 - RNA, 19 nt, Artificial Sequence
  Description of Artificial Sequence: Synthetic oligonucleotide
gggaucagacacaacaucc

SEQ ID NO: 743612 - RNA, 19 nt, Artificial Sequence
  Description of Artificial Sequence: Synthetic oligonucleotide
gcuuaacuaucuaaaagug

SEQ ID NO: 743613 - RNA, 19 nt, Artificial Sequence
  Description of Artificial Sequence: Synthetic oligonucleotide
uuauaauuccggagucgau

SEQ ID NO: 743614 - RNA, 19 nt, Artificial Sequence
  Description of Artificial Sequence: Synthetic oligonucleotide
ucccaucgaggaaugcaag

SEQ ID NO: 743615 - RNA, 19 nt, Artificial Sequence
  Description of Artificial Sequence: Synthetic oligonucleotide
ucuggcuaguucacucuga

SEQ ID NO: 743616 - RNA, 19 nt, Artificial Sequence
  Description of Artificial Sequence: Synthetic oligonucleotide
uccacaguaucugauuaaa

SEQ ID NO: 743617 - RNA, 19 nt, Artificial Sequence
  Description of Artificial Sequence: Synthetic oligonucleotide
acuaugugcugaaauagau

SEQ ID NO: 743618 - RNA, 19 nt, Artificial Sequence
  Description of Artificial Sequence: Synthetic oligonucleotide
uauacuggauaaguuguuu

SEQ ID NO: 743619 - RNA, 19 nt, Artificial Sequence
  Description of Artificial Sequence: Synthetic oligonucleotide
aucggguuuagacuuggau

SEQ ID NO: 743620 - RNA, 19 nt, Artificial Sequence
  Description of Artificial Sequence: Synthetic oligonucleotide
ggccuuuuacguuuuaaac

SEQ ID NO: 743621 - RNA, 19 nt, Artificial Sequence
  Description of Artificial Sequence: Synthetic oligonucleotide
agcaaaaggugcuuuuauu

SEQ ID NO: 743622 - RNA, 19 nt, Artificial Sequence
  Description of Artificial Sequence: Synthetic oligonucleotide
uguggaacuuuaugauggu

SEQ ID NO: 743623 - RNA, 19 nt, Artificial Sequence
  Description of Artificial Sequence: Synthetic oligonucleotide
aucugggucuaugcuaaac

SEQ ID NO: 743624 - RNA, 19 nt, Artificial Sequence
  Description of Artificial Sequence: Synthetic oligonucleotide
uacuccccuguucaauagc

SEQ ID NO: 743625 - RNA, 19 nt, Artificial Sequence
  Description of Artificial Sequence: Synthetic oligonucleotide
uacauacaguguccauuug

SEQ ID NO: 743626 - RNA, 19 nt, Artificial Sequence
  Description of Artificial Sequence: Synthetic oligonucleotide
agaguucccaucgaggaau

SEQ ID NO: 743627 - RNA, 19 nt, Artificial Sequence
  Description of Artificial Sequence: Synthetic oligonucleotide
uggccauuugaagucaacu

SEQ ID NO: 743628 - RNA, 19 nt, Artificial Sequence
  Description of Artificial Sequence: Synthetic oligonucleotide
aucaaccagaagaucuggg

SEQ ID NO: 743629 - RNA, 19 nt, Artificial Sequence
  Description of Artificial Sequence: Synthetic oligonucleotide
ugaaauccgcucucuugac

SEQ ID NO: 743630 - RNA, 19 nt, Artificial Sequence
  Description of Artificial Sequence: Synthetic oligonucleotide
uagaaguagaggccuuuua

SEQ ID NO: 743631 - RNA, 19 nt, Artificial Sequence
  Description of Artificial Sequence: Synthetic oligonucleotide
gcuaucaagauaauccaac

SEQ ID NO: 743632 - RNA, 19 nt, Artificial Sequence
  Description of Artificial Sequence: Synthetic oligonucleotide
uaauaacuugcugcugcug

SEQ ID NO: 743633 - RNA, 19 nt, Artificial Sequence
  Description of Artificial Sequence: Synthetic oligonucleotide
aggccuuuuacguuuuaaa

SEQ ID NO: 743634 - RNA, 19 nt, Artificial Sequence
  Description of Artificial Sequence: Synthetic oligonucleotide
uauaccuaggcagccgagu

SEQ ID NO: 743635 - RNA, 19 nt, Artificial Sequence
  Description of Artificial Sequence: Synthetic oligonucleotide
ucucuggcuaguucacucu

SEQ ID NO: 743636 - RNA, 19 nt, Artificial Sequence
  Description of Artificial Sequence: Synthetic oligonucleotide
guuuaucggguuuagacuu

SEQ ID NO: 743637 - RNA, 19 nt, Artificial Sequence
  Description of Artificial Sequence: Synthetic oligonucleotide
uuccaauaauguucauuaa

SEQ ID NO: 743638 - RNA, 19 nt, Artificial Sequence
  Description of Artificial Sequence: Synthetic oligonucleotide
gccgaguaacaccugaaag

SEQ ID NO: 743639 - RNA, 19 nt, Artificial Sequence
  Description of Artificial Sequence: Synthetic oligonucleotide
cuggaauaguuucuucauc

SEQ ID NO: 743640 - RNA, 19 nt, Artificial Sequence
  Description of Artificial Sequence: Synthetic oligonucleotide
cugagcacuacuuauaauu

SEQ ID NO: 743641 - RNA, 19 nt, Artificial Sequence
  Description of Artificial Sequence: Synthetic oligonucleotide
cauauuuaguugucucaca

SEQ ID NO: 743642 - RNA, 19 nt, Artificial Sequence
  Description of Artificial Sequence: Synthetic oligonucleotide
uaauuccggagucgauaug

SEQ ID NO: 743643 - RNA, 19 nt, Artificial Sequence
  Description of Artificial Sequence: Synthetic oligonucleotide
auccgucacauuuauuuua

SEQ ID NO: 743644 - RNA, 19 nt, Artificial Sequence
  Description of Artificial Sequence: Synthetic oligonucleotide
gcaaucaaugcuaucaaga

SEQ ID NO: 743645 - RNA, 19 nt, Artificial Sequence
  Description of Artificial Sequence: Synthetic oligonucleotide
agcuccauuaguguuuaga

SEQ ID NO: 743646 - RNA, 19 nt, Artificial Sequence
  Description of Artificial Sequence: Synthetic oligonucleotide
cuaucuaaaaguggcaucu

SEQ ID NO: 743647 - RNA, 19 nt, Artificial Sequence
  Description of Artificial Sequence: Synthetic oligonucleotide
aaugauucucuggcuaguu

SEQ ID NO: 743648 - RNA, 19 nt, Artificial Sequence
  Description of Artificial Sequence: Synthetic oligonucleotide
aaguuguuuaucggguuua

SEQ ID NO: 743649 - RNA, 19 nt, Artificial Sequence
  Description of Artificial Sequence: Synthetic oligonucleotide
uuccacaguaucugauuaa

SEQ ID NO: 743650 - RNA, 19 nt, Artificial Sequence
  Description of Artificial Sequence: Synthetic oligonucleotide
uuccggagucgauauguac

SEQ ID NO: 743651 - RNA, 19 nt, Artificial Sequence
  Description of Artificial Sequence: Synthetic oligonucleotide
gacuaugugcugaaauaga

SEQ ID NO: 743652 - RNA, 19 nt, Artificial Sequence
  Description of Artificial Sequence: Synthetic oligonucleotide
aguuguuuaucggguuuag

SEQ ID NO: 743653 - RNA, 19 nt, Artificial Sequence
  Description of Artificial Sequence: Synthetic oligonucleotide
cuuuuacguuuuaaacuca

SEQ ID NO: 743654 - RNA, 19 nt, Artificial Sequence
  Description of Artificial Sequence: Synthetic oligonucleotide
caaaucucugcucauccaa

SEQ ID NO: 743655 - RNA, 19 nt, Artificial Sequence
  Description of Artificial Sequence: Synthetic oligonucleotide
ugcccuuaauucugacacc

SEQ ID NO: 743656 - RNA, 19 nt, Artificial Sequence
  Description of Artificial Sequence: Synthetic oligonucleotide
caucaacguuguuauccag

SEQ ID NO: 743657 - RNA, 19 nt, Artificial Sequence
  Description of Artificial Sequence: Synthetic oligonucleotide
uaacuugcugcugcugggc

SEQ ID NO: 743658 - RNA, 19 nt, Artificial Sequence
  Description of Artificial Sequence: Synthetic oligonucleotide
cuucaacaauuacaauguc

SEQ ID NO: 743659 - RNA, 19 nt, Artificial Sequence
  Description of Artificial Sequence: Synthetic oligonucleotide
uuuagaaguagaggccuuu

SEQ ID NO: 743660 - RNA, 19 nt, Artificial Sequence
  Description of Artificial Sequence: Synthetic oligonucleotide
aagaguguggugagugaga

SEQ ID NO: 743661 - RNA, 19 nt, Artificial Sequence
  Description of Artificial Sequence: Synthetic oligonucleotide
ucugagcacuacuuauaau

SEQ ID NO: 743662 - RNA, 19 nt, Artificial Sequence
  Description of Artificial Sequence: Synthetic oligonucleotide
gaacaaucuugcuuugggu

SEQ ID NO: 743663 - RNA, 19 nt, Artificial Sequence
  Description of Artificial Sequence: Synthetic oligonucleotide
agucgauauguacuacuuu

SEQ ID NO: 743664 - RNA, 19 nt, Artificial Sequence
  Description of Artificial Sequence: Synthetic oligonucleotide
uuacaagauacaggcacuu

SEQ ID NO: 743665 - RNA, 19 nt, Artificial Sequence
  Description of Artificial Sequence: Synthetic oligonucleotide
ugcugggcgugcuuugccc

SEQ ID NO: 743666 - RNA, 19 nt, Artificial Sequence
  Description of Artificial Sequence: Synthetic oligonucleotide
auaccuaggcagccgagua

SEQ ID NO: 743667 - RNA, 19 nt, Artificial Sequence
  Description of Artificial Sequence: Synthetic oligonucleotide
gacuucuaugggcuuaucu

SEQ ID NO: 743668 - RNA, 19 nt, Artificial Sequence
  Description of Artificial Sequence: Synthetic oligonucleotide
uuaaaccuucuguccuacu

SEQ ID NO: 743669 - RNA, 19 nt, Artificial Sequence
  Description of Artificial Sequence: Synthetic oligonucleotide
cuguccuacuauguggaac

SEQ ID NO: 743670 - RNA, 19 nt, Artificial Sequence
  Description of Artificial Sequence: Synthetic oligonucleotide
cuuaauucugacaccuccu

SEQ ID NO: 743671 - RNA, 19 nt, Artificial Sequence
  Description of Artificial Sequence: Synthetic oligonucleotide
cuauguggaacuuuaugau

SEQ ID NO: 743672 - RNA, 19 nt, Artificial Sequence
  Description of Artificial Sequence: Synthetic oligonucleotide
caaucaaugcuaucaagau

SEQ ID NO: 743673 - RNA, 19 nt, Artificial Sequence
  Description of Artificial Sequence: Synthetic oligonucleotide
cgauauguacuacuuuacg

SEQ ID NO: 743674 - RNA, 19 nt, Artificial Sequence
  Description of Artificial Sequence: Synthetic oligonucleotide
uaaaacaguguggcuucac

SEQ ID NO: 743675 - RNA, 19 nt, Artificial Sequence
  Description of Artificial Sequence: Synthetic oligonucleotide
acacaacauccucauuagu

SEQ ID NO: 743676 - RNA, 19 nt, Artificial Sequence
  Description of Artificial Sequence: Synthetic oligonucleotide
ugaaugacaggggcauacu

SEQ ID NO: 743677 - RNA, 19 nt, Artificial Sequence
  Description of Artificial Sequence: Synthetic oligonucleotide
aaacugcaaucaaugcuau

SEQ ID NO: 743678 - RNA, 19 nt, Artificial Sequence
  Description of Artificial Sequence: Synthetic oligonucleotide
aacucacaagcugauuauu

SEQ ID NO: 743679 - RNA, 19 nt, Artificial Sequence
  Description of Artificial Sequence: Synthetic oligonucleotide
agaguguggugagugagaa

SEQ ID NO: 743680 - RNA, 19 nt, Artificial Sequence
  Description of Artificial Sequence: Synthetic oligonucleotide
uaccuaggcagccgaguaa

SEQ ID NO: 743681 - RNA, 19 nt, Artificial Sequence
  Description of Artificial Sequence: Synthetic oligonucleotide
aguucccaucgaggaaugc

SEQ ID NO: 743682 - RNA, 19 nt, Artificial Sequence
  Description of Artificial Sequence: Synthetic oligonucleotide
ugguuccagccgaacaauc

SEQ ID NO: 743683 - RNA, 19 nt, Artificial Sequence
  Description of Artificial Sequence: Synthetic oligonucleotide
gccuuuuacguuuuaaacu

SEQ ID NO: 743684 - RNA, 19 nt, Artificial Sequence
  Description of Artificial Sequence: Synthetic oligonucleotide
auggugauuaucaguuggu

SEQ ID NO: 743685 - RNA, 19 nt, Artificial Sequence
  Description of Artificial Sequence: Synthetic oligonucleotide
auucaacaggggccaucuc

SEQ ID NO: 743686 - RNA, 19 nt, Artificial Sequence
  Description of Artificial Sequence: Synthetic oligonucleotide
caacguuguuauccagaag

SEQ ID NO: 743687 - RNA, 19 nt, Artificial Sequence
  Description of Artificial Sequence: Synthetic oligonucleotide
uaucuaaaaguggcaucuc

SEQ ID NO: 743688 - RNA, 19 nt, Artificial Sequence
  Description of Artificial Sequence: Synthetic oligonucleotide
cucuggcuaguucacucug

SEQ ID NO: 743689 - RNA, 19 nt, Artificial Sequence
  Description of Artificial Sequence: Synthetic oligonucleotide
uuagaaguagaggccuuuu

SEQ ID NO: 743690 - RNA, 19 nt, Artificial Sequence
  Description of Artificial Sequence: Synthetic oligonucleotide
agccgaguaacaccugaaa

SEQ ID NO: 743691 - RNA, 19 nt, Artificial Sequence
  Description of Artificial Sequence: Synthetic oligonucleotide
aauccgcucucuugacuuu

SEQ ID NO: 743692 - RNA, 19 nt, Artificial Sequence
  Description of Artificial Sequence: Synthetic oligonucleotide
cagaagaucugggucuaug

SEQ ID NO: 743693 - RNA, 19 nt, Artificial Sequence
  Description of Artificial Sequence: Synthetic oligonucleotide
cugaaccaauguaacaaua

SEQ ID NO: 743694 - RNA, 19 nt, Artificial Sequence
  Description of Artificial Sequence: Synthetic oligonucleotide
acuagaccagaguuuucua

SEQ ID NO: 743695 - RNA, 19 nt, Artificial Sequence
  Description of Artificial Sequence: Synthetic oligonucleotide
acuccccuguucaauagca

SEQ ID NO: 743696 - RNA, 19 nt, Artificial Sequence
  Description of Artificial Sequence: Synthetic oligonucleotide
uaucggguuuagacuugga

SEQ ID NO: 743697 - RNA, 19 nt, Artificial Sequence
  Description of Artificial Sequence: Synthetic oligonucleotide
caauuacaaugucaggaua

SEQ ID NO: 743698 - RNA, 19 nt, Artificial Sequence
  Description of Artificial Sequence: Synthetic oligonucleotide
uagcuucuaaucccuuauu

SEQ ID NO: 743699 - RNA, 19 nt, Artificial Sequence
  Description of Artificial Sequence: Synthetic oligonucleotide
gccauuugaagucaacuua

SEQ ID NO: 743700 - RNA, 19 nt, Artificial Sequence
  Description of Artificial Sequence: Synthetic oligonucleotide
aaguaccaaaugauacuuu

SEQ ID NO: 743701 - RNA, 19 nt, Artificial Sequence
  Description of Artificial Sequence: Synthetic oligonucleotide
acuaaauaccaugguucaa

SEQ ID NO: 743702 - RNA, 19 nt, Artificial Sequence
  Description of Artificial Sequence: Synthetic oligonucleotide
cagaaucaaccagaagauc

SEQ ID NO: 743703 - RNA, 19 nt, Artificial Sequence
  Description of Artificial Sequence: Synthetic oligonucleotide
ucuguccuacuauguggaa

SEQ ID NO: 743704 - RNA, 19 nt, Artificial Sequence
  Description of Artificial Sequence: Synthetic oligonucleotide
guagcuucuaaucccuuau

SEQ ID NO: 743705 - RNA, 19 nt, Artificial Sequence
  Description of Artificial Sequence: Synthetic oligonucleotide
gaaauccgcucucuugacu

SEQ ID NO: 743706 - RNA, 19 nt, Artificial Sequence
  Description of Artificial Sequence: Synthetic oligonucleotide
aauggccauuugaagucaa

SEQ ID NO: 743707 - RNA, 19 nt, Artificial Sequence
  Description of Artificial Sequence: Synthetic oligonucleotide
auauaccuaggcagccgag

SEQ ID NO: 743708 - RNA, 19 nt, Artificial Sequence
  Description of Artificial Sequence: Synthetic oligonucleotide
guagaggccuuuuacguuu

SEQ ID NO: 743709 - RNA, 19 nt, Artificial Sequence
  Description of Artificial Sequence: Synthetic oligonucleotide
guuggcucugcaucaacgu

SEQ ID NO: 743710 - RNA, 19 nt, Artificial Sequence
  Description of Artificial Sequence: Synthetic oligonucleotide
guacuugggaagaauuucu

SEQ ID NO: 743711 - RNA, 19 nt, Artificial Sequence
  Description of Artificial Sequence: Synthetic oligonucleotide
ccauuugaagucaacuuaa

SEQ ID NO: 743712 - RNA, 19 nt, Artificial Sequence
  Description of Artificial Sequence: Synthetic oligonucleotide
guaccaaaugauacuuuaa

SEQ ID NO: 743713 - RNA, 19 nt, Artificial Sequence
  Description of Artificial Sequence: Synthetic oligonucleotide
gccauacauauuuaguugu

SEQ ID NO: 743714 - RNA, 19 nt, Artificial Sequence
  Description of Artificial Sequence: Synthetic oligonucleotide
cauacauauuuaguugucu

SEQ ID NO: 743715 - RNA, 19 nt, Artificial Sequence
  Description of Artificial Sequence: Synthetic oligonucleotide
gggucuaugcuaaacuguc

SEQ ID NO: 743716 - RNA, 19 nt, Artificial Sequence
  Description of Artificial Sequence: Synthetic oligonucleotide
aucugaaauccgcucucuu

SEQ ID NO: 743717 - RNA, 19 nt, Artificial Sequence
  Description of Artificial Sequence: Synthetic oligonucleotide
gcaucaacguuguuaucca

SEQ ID NO: 743718 - RNA, 19 nt, Artificial Sequence
  Description of Artificial Sequence: Synthetic oligonucleotide
acagaggguacaacuucug

SEQ ID NO: 743719 - RNA, 19 nt, Artificial Sequence
  Description of Artificial Sequence: Synthetic oligonucleotide
uacaagauacaggcacuuu

SEQ ID NO: 743720 - RNA, 19 nt, Artificial Sequence
  Description of Artificial Sequence: Synthetic oligonucleotide
auacuggcugcaguuggga

SEQ ID NO: 743721 - RNA, 19 nt, Artificial Sequence
  Description of Artificial Sequence: Synthetic oligonucleotide
ccauacauauuuaguuguc

SEQ ID NO: 743722 - RNA, 19 nt, Artificial Sequence
  Description of Artificial Sequence: Synthetic oligonucleotide
ccuacuauguggaacuuua

SEQ ID NO: 743723 - RNA, 19 nt, Artificial Sequence
  Description of Artificial Sequence: Synthetic oligonucleotide
aggcaguauacuggauaag

SEQ ID NO: 743724 - RNA, 19 nt, Artificial Sequence
  Description of Artificial Sequence: Synthetic oligonucleotide
ucgacuucuaugggcuuau

SEQ ID NO: 743725 - RNA, 19 nt, Artificial Sequence
  Description of Artificial Sequence: Synthetic oligonucleotide
uccuacuauguggaacuuu

SEQ ID NO: 743726 - RNA, 19 nt, Artificial Sequence
  Description of Artificial Sequence: Synthetic oligonucleotide
ucagugguuccagccgaac

SEQ ID NO: 743727 - RNA, 19 nt, Artificial Sequence
  Description of Artificial Sequence: Synthetic oligonucleotide
gaguucccaucgaggaaug

SEQ ID NO: 743728 - RNA, 19 nt, Artificial Sequence
  Description of Artificial Sequence: Synthetic oligonucleotide
cagugguuccagccgaaca

SEQ ID NO: 743729 - RNA, 19 nt, Artificial Sequence
  Description of Artificial Sequence: Synthetic oligonucleotide
ggcuuaucuacagagggua

SEQ ID NO: 743730 - RNA, 19 nt, Artificial Sequence
  Description of Artificial Sequence: Synthetic oligonucleotide
gguuuagacuuggauuuuc

SEQ ID NO: 743731 - RNA, 19 nt, Artificial Sequence
  Description of Artificial Sequence: Synthetic oligonucleotide
aguugggaucagacacaac

SEQ ID NO: 743732 - RNA, 19 nt, Artificial Sequence
  Description of Artificial Sequence: Synthetic oligonucleotide
cuggccuuguuugaaguaa

SEQ ID NO: 743733 - RNA, 19 nt, Artificial Sequence
  Description of Artificial Sequence: Synthetic oligonucleotide
ggggcuuaacuaucuaaaa

SEQ ID NO: 743734 - RNA, 19 nt, Artificial Sequence
  Description of Artificial Sequence: Synthetic oligonucleotide
ggagucgauauguacuacu

SEQ ID NO: 743735 - RNA, 19 nt, Artificial Sequence
  Description of Artificial Sequence: Synthetic oligonucleotide
gcauuuaauugcacagcac

SEQ ID NO: 743736 - RNA, 19 nt, Artificial Sequence
  Description of Artificial Sequence: Synthetic oligonucleotide
agggacucguucucacuuu

SEQ ID NO: 743737 - RNA, 19 nt, Artificial Sequence
  Description of Artificial Sequence: Synthetic oligonucleotide
aucgacuucuaugggcuua

SEQ ID NO: 743738 - RNA, 19 nt, Artificial Sequence
  Description of Artificial Sequence: Synthetic oligonucleotide
ugguagcuucuaaucccuu

SEQ ID NO: 743739 - RNA, 19 nt, Artificial Sequence
  Description of Artificial Sequence: Synthetic oligonucleotide
ggaauaacuggaauaguuu

SEQ ID NO: 743740 - RNA, 19 nt, Artificial Sequence
  Description of Artificial Sequence: Synthetic oligonucleotide
gagucgauauguacuacuu

SEQ ID NO: 743741 - RNA, 19 nt, Artificial Sequence
  Description of Artificial Sequence: Synthetic oligonucleotide
gaaugacacugcucuuggu

SEQ ID NO: 743742 - RNA, 19 nt, Artificial Sequence
  Description of Artificial Sequence: Synthetic oligonucleotide
gcagccgaguaacaccuga

SEQ ID NO: 743743 - RNA, 19 nt, Artificial Sequence
  Description of Artificial Sequence: Synthetic oligonucleotide
gcaagaguguggugaguga

SEQ ID NO: 743744 - RNA, 19 nt, Artificial Sequence
  Description of Artificial Sequence: Synthetic oligonucleotide
gagcuccauuaguguuuag

SEQ ID NO: 743745 - RNA, 19 nt, Artificial Sequence
  Description of Artificial Sequence: Synthetic oligonucleotide
cacuuuauguucccaguuu

SEQ ID NO: 743746 - RNA, 19 nt, Artificial Sequence
  Description of Artificial Sequence: Synthetic oligonucleotide
cugcaucaacguuguuauc

SEQ ID NO: 743747 - RNA, 19 nt, Artificial Sequence
  Description of Artificial Sequence: Synthetic oligonucleotide
gcuuaucuacagaggguac

SEQ ID NO: 743748 - RNA, 19 nt, Artificial Sequence
  Description of Artificial Sequence: Synthetic oligonucleotide
caguugggaucagacacaa

SEQ ID NO: 743749 - RNA, 19 nt, Artificial Sequence
  Description of Artificial Sequence: Synthetic oligonucleotide
gaucugggucuaugcuaaa

SEQ ID NO: 743750 - RNA, 19 nt, Artificial Sequence
  Description of Artificial Sequence: Synthetic oligonucleotide
gaagucaacuuaagauauu

SEQ ID NO: 743751 - RNA, 19 nt, Artificial Sequence
  Description of Artificial Sequence: Synthetic oligonucleotide
cagccgaacaaucuugcuu

SEQ ID NO: 743752 - RNA, 19 nt, Artificial Sequence
  Description of Artificial Sequence: Synthetic oligonucleotide
cagccgaguaacaccugaa

SEQ ID NO: 743753 - RNA, 19 nt, Artificial Sequence
  Description of Artificial Sequence: Synthetic oligonucleotide
ugccgccagcauuucccaa

SEQ ID NO: 743754 - RNA, 19 nt, Artificial Sequence
  Description of Artificial Sequence: Synthetic oligonucleotide
agccuggacucaauaguuu

SEQ ID NO: 743755 - RNA, 19 nt, Artificial Sequence
  Description of Artificial Sequence: Synthetic oligonucleotide
gaacuuuaugauggugauu

SEQ ID NO: 743756 - RNA, 19 nt, Artificial Sequence
  Description of Artificial Sequence: Synthetic oligonucleotide
cccaucgaggaaugcaaga

SEQ ID NO: 743757 - RNA, 19 nt, Artificial Sequence
  Description of Artificial Sequence: Synthetic oligonucleotide
cuacuauguggaacuuuau

SEQ ID NO: 743758 - RNA, 19 nt, Artificial Sequence
  Description of Artificial Sequence: Synthetic oligonucleotide
gguuccagccgaacaaucu

SEQ ID NO: 743759 - RNA, 19 nt, Artificial Sequence
  Description of Artificial Sequence: Synthetic oligonucleotide
caguaacaucauaaauaau

SEQ ID NO: 743760 - RNA, 19 nt, Artificial Sequence
  Description of Artificial Sequence: Synthetic oligonucleotide
guauacuggauaaguuguu

SEQ ID NO: 743761 - RNA, 19 nt, Artificial Sequence
  Description of Artificial Sequence: Synthetic oligonucleotide
cuggaauaacuggaauagu

SEQ ID NO: 743762 - RNA, 19 nt, Artificial Sequence
  Description of Artificial Sequence: Synthetic oligonucleotide
gccgccagcauuucccaaa

SEQ ID NO: 743763 - RNA, 19 nt, Artificial Sequence
  Description of Artificial Sequence: Synthetic oligonucleotide
ccaucgaggaaugcaagaa

SEQ ID NO: 743764 - RNA, 19 nt, Artificial Sequence
  Description of Artificial Sequence: Synthetic oligonucleotide
cguuguuauccagaagcuc

SEQ ID NO: 743765 - RNA, 19 nt, Artificial Sequence
  Description of Artificial Sequence: Synthetic oligonucleotide
gaaaggcaguauacuggau

SEQ ID NO: 743766 - RNA, 19 nt, Artificial Sequence
  Description of Artificial Sequence: Synthetic oligonucleotide
cgaguaacaccugaaagcu

SEQ ID NO: 743767 - RNA, 19 nt, Artificial Sequence
  Description of Artificial Sequence: Synthetic oligonucleotide
ccucuaaacugcaaucaau

SEQ ID NO: 743768 - RNA, 19 nt, Artificial Sequence
  Description of Artificial Sequence: Synthetic oligonucleotide
ugggcgugcuuugcccuua

SEQ ID NO: 743769 - RNA, 19 nt, Artificial Sequence
  Description of Artificial Sequence: Synthetic oligonucleotide
ccggagucgauauguacua

SEQ ID NO: 743770 - RNA, 19 nt, Artificial Sequence
  Description of Artificial Sequence: Synthetic oligonucleotide
cggguuuagacuuggauuu

SEQ ID NO: 743771 - RNA, 19 nt, Artificial Sequence
  Description of Artificial Sequence: Synthetic oligonucleotide
gcgugcuuugcccuuaauu

SEQ ID NO: 743772 - RNA, 19 nt, Artificial Sequence
  Description of Artificial Sequence: Synthetic oligonucleotide
ggucuaugcuaaacugucu

SEQ ID NO: 743773 - RNA, 19 nt, Artificial Sequence
  Description of Artificial Sequence: Synthetic oligonucleotide
gucagugguuccagccgaa

SEQ ID NO: 743774 - RNA, 19 nt, Artificial Sequence
  Description of Artificial Sequence: Synthetic oligonucleotide
ggguacaacuucugaugau

SEQ ID NO: 743775 - RNA, 19 nt, Artificial Sequence
  Description of Artificial Sequence: Synthetic oligonucleotide
gggcuuaucuacagagggu

SEQ ID NO: 743776 - RNA, 19 nt, Artificial Sequence
  Description of Artificial Sequence: Synthetic oligonucleotide
cuguacuccccuguucaau

SEQ ID NO: 743777 - RNA, 19 nt, Artificial Sequence
  Description of Artificial Sequence: Synthetic oligonucleotide
gggacucguucucacuuuu

SEQ ID NO: 743778 - RNA, 19 nt, Artificial Sequence
  Description of Artificial Sequence: Synthetic oligonucleotide
ggcagccgaguaacaccug

SEQ ID NO: 743779 - RNA, 19 nt, Artificial Sequence
  Description of Artificial Sequence: Synthetic oligonucleotide
caucgacuucuaugggcuu

SEQ ID NO: 743780 - RNA, 19 nt, Artificial Sequence
  Description of Artificial Sequence: Synthetic oligonucleotide
cggagucgauauguacuac

SEQ ID NO: 743781 - RNA, 19 nt, Artificial Sequence
  Description of Artificial Sequence: Synthetic oligonucleotide
ccagccgaacaaucuugcu

SEQ ID NO: 743782 - RNA, 19 nt, Artificial Sequence
  Description of Artificial Sequence: Synthetic oligonucleotide
ggguuuagacuuggauuuu

SEQ ID NO: 743783 - RNA, 19 nt, Artificial Sequence
  Description of Artificial Sequence: Synthetic oligonucleotide
ccgucacauuuauuuuacu

SEQ ID NO: 743784 - RNA, 19 nt, Artificial Sequence
  Description of Artificial Sequence: Synthetic oligonucleotide
gggcgugcuuugcccuuaa

SEQ ID NO: 743785 - RNA, 19 nt, Artificial Sequence
  Description of Artificial Sequence: Synthetic oligonucleotide
ccgcucucuugacuuuaaa

SEQ ID NO: 743786 - RNA, 19 nt, Artificial Sequence
  Description of Artificial Sequence: Synthetic oligonucleotide
ggcgugcuuugcccuuaau

SEQ ID NO: 743787 - RNA, 19 nt, Artificial Sequence
  Description of Artificial Sequence: Synthetic oligonucleotide
cgacuucuaugggcuuauc

SEQ ID NO: 743788 - RNA, 19 nt, Artificial Sequence
  Description of Artificial Sequence: Synthetic oligonucleotide
ccuuucccaagagguuaau

SEQ ID NO: 743789 - RNA, 19 nt, Artificial Sequence
  Description of Artificial Sequence: Synthetic oligonucleotide
aagcagaccaucuuuauuc

SEQ ID NO: 743790 - RNA, 19 nt, Artificial Sequence
  Description of Artificial Sequence: Synthetic oligonucleotide
uucacuguaaccagguggg

SEQ ID NO: 743791 - RNA, 19 nt, Artificial Sequence
  Description of Artificial Sequence: Synthetic oligonucleotide
guuacauacucauaaagug

SEQ ID NO: 743792 - RNA, 19 nt, Artificial Sequence
  Description of Artificial Sequence: Synthetic oligonucleotide
gaagauaaggcccggacag

SEQ ID NO: 743793 - RNA, 19 nt, Artificial Sequence
  Description of Artificial Sequence: Synthetic oligonucleotide
uuacauacucauaaagugc

SEQ ID NO: 743794 - RNA, 19 nt, Artificial Sequence
  Description of Artificial Sequence: Synthetic oligonucleotide
ugagagaugggguagauuc

SEQ ID NO: 743795 - RNA, 19 nt, Artificial Sequence
  Description of Artificial Sequence: Synthetic oligonucleotide
ucuaacacccgccauagcu

SEQ ID NO: 743796 - RNA, 19 nt, Artificial Sequence
  Description of Artificial Sequence: Synthetic oligonucleotide
auagacuucccggauaucc

SEQ ID NO: 743797 - RNA, 19 nt, Artificial Sequence
  Description of Artificial Sequence: Synthetic oligonucleotide
ucuaccaagaccacuggcc

SEQ ID NO: 743798 - RNA, 19 nt, Artificial Sequence
  Description of Artificial Sequence: Synthetic oligonucleotide
aaagcaaagcuaccgagga

SEQ ID NO: 743799 - RNA, 19 nt, Artificial Sequence
  Description of Artificial Sequence: Synthetic oligonucleotide
acucauaaagugcuggagg

SEQ ID NO: 743800 - RNA, 19 nt, Artificial Sequence
  Description of Artificial Sequence: Synthetic oligonucleotide
uacauacucauaaagugcu

SEQ ID NO: 743801 - RNA, 19 nt, Artificial Sequence
  Description of Artificial Sequence: Synthetic oligonucleotide
ucggacauuucuaacaccc

SEQ ID NO: 743802 - RNA, 19 nt, Artificial Sequence
  Description of Artificial Sequence: Synthetic oligonucleotide
aaagcuaccgaggacaaug

SEQ ID NO: 743803 - RNA, 19 nt, Artificial Sequence
  Description of Artificial Sequence: Synthetic oligonucleotide
aacaggacaauguggagcu

SEQ ID NO: 743804 - RNA, 19 nt, Artificial Sequence
  Description of Artificial Sequence: Synthetic oligonucleotide
uuuauaaccucguuucucu

SEQ ID NO: 743805 - RNA, 19 nt, Artificial Sequence
  Description of Artificial Sequence: Synthetic oligonucleotide
ugaaaguaaugcuuccagg

SEQ ID NO: 743806 - RNA, 19 nt, Artificial Sequence
  Description of Artificial Sequence: Synthetic oligonucleotide
guucacuguaaccaggugg

SEQ ID NO: 743807 - RNA, 19 nt, Artificial Sequence
  Description of Artificial Sequence: Synthetic oligonucleotide
uaagucuggaaguaccggg

SEQ ID NO: 743808 - RNA, 19 nt, Artificial Sequence
  Description of Artificial Sequence: Synthetic oligonucleotide
cucauaaagugcuggaggg

SEQ ID NO: 743809 - RNA, 19 nt, Artificial Sequence
  Description of Artificial Sequence: Synthetic oligonucleotide
aaguguaugccccauguau

SEQ ID NO: 743810 - RNA, 19 nt, Artificial Sequence
  Description of Artificial Sequence: Synthetic oligonucleotide
aaguaaugcuuccaggcca

SEQ ID NO: 743811 - RNA, 19 nt, Artificial Sequence
  Description of Artificial Sequence: Synthetic oligonucleotide
uccagcucaguccaaaagc

SEQ ID NO: 743812 - RNA, 19 nt, Artificial Sequence
  Description of Artificial Sequence: Synthetic oligonucleotide
ucucuguucacuguaacca

SEQ ID NO: 743813 - RNA, 19 nt, Artificial Sequence
  Description of Artificial Sequence: Synthetic oligonucleotide
aucgguugggaucguagcc

SEQ ID NO: 743814 - RNA, 19 nt, Artificial Sequence
  Description of Artificial Sequence: Synthetic oligonucleotide
uucucugaaguguaugccc

SEQ ID NO: 743815 - RNA, 19 nt, Artificial Sequence
  Description of Artificial Sequence: Synthetic oligonucleotide
cauagcuccaaggaggacg

SEQ ID NO: 743816 - RNA, 19 nt, Artificial Sequence
  Description of Artificial Sequence: Synthetic oligonucleotide
ucuguacacaucauugcga

SEQ ID NO: 743817 - RNA, 19 nt, Artificial Sequence
  Description of Artificial Sequence: Synthetic oligonucleotide
agagacgggaagauaaggc

SEQ ID NO: 743818 - RNA, 19 nt, Artificial Sequence
  Description of Artificial Sequence: Synthetic oligonucleotide
caaaagcaaagcuaccgag

SEQ ID NO: 743819 - RNA, 19 nt, Artificial Sequence
  Description of Artificial Sequence: Synthetic oligonucleotide
cucuguacacaucauugcg

SEQ ID NO: 743820 - RNA, 19 nt, Artificial Sequence
  Description of Artificial Sequence: Synthetic oligonucleotide
guugcgggcagcuaggcag

SEQ ID NO: 743821 - RNA, 19 nt, Artificial Sequence
  Description of Artificial Sequence: Synthetic oligonucleotide
uauaaccucguuucucugc

SEQ ID NO: 743822 - RNA, 19 nt, Artificial Sequence
  Description of Artificial Sequence: Synthetic oligonucleotide
cuagcaaucuucucacgcc

SEQ ID NO: 743823 - RNA, 19 nt, Artificial Sequence
  Description of Artificial Sequence: Synthetic oligonucleotide
aaagaggugaacaggacaa

SEQ ID NO: 743824 - RNA, 19 nt, Artificial Sequence
  Description of Artificial Sequence: Synthetic oligonucleotide
aacugcucuggccccagcg

SEQ ID NO: 743825 - RNA, 19 nt, Artificial Sequence
  Description of Artificial Sequence: Synthetic oligonucleotide
ugucggaugucagugauca

SEQ ID NO: 743826 - RNA, 19 nt, Artificial Sequence
  Description of Artificial Sequence: Synthetic oligonucleotide
ugucggacauuucuaacac

SEQ ID NO: 743827 - RNA, 19 nt, Artificial Sequence
  Description of Artificial Sequence: Synthetic oligonucleotide
cuguacacaucauugcgag

SEQ ID NO: 743828 - RNA, 19 nt, Artificial Sequence
  Description of Artificial Sequence: Synthetic oligonucleotide
gagccguuaccccaggagg

SEQ ID NO: 743829 - RNA, 19 nt, Artificial Sequence
  Description of Artificial Sequence: Synthetic oligonucleotide
aagguauuccuggaagcuc

SEQ ID NO: 743830 - RNA, 19 nt, Artificial Sequence
  Description of Artificial Sequence: Synthetic oligonucleotide
ugauagacuucccggauau

SEQ ID NO: 743831 - RNA, 19 nt, Artificial Sequence
  Description of Artificial Sequence: Synthetic oligonucleotide
aggcugauagacuucccgg

SEQ ID NO: 743832 - RNA, 19 nt, Artificial Sequence
  Description of Artificial Sequence: Synthetic oligonucleotide
augucggacauuucuaaca

SEQ ID NO: 743833 - RNA, 19 nt, Artificial Sequence
  Description of Artificial Sequence: Synthetic oligonucleotide
uggagcgaagcccaucuug

SEQ ID NO: 743834 - RNA, 19 nt, Artificial Sequence
  Description of Artificial Sequence: Synthetic oligonucleotide
ucgcagaugucccaggcac

SEQ ID NO: 743835 - RNA, 19 nt, Artificial Sequence
  Description of Artificial Sequence: Synthetic oligonucleotide
gacauuucuaacacccgcc

SEQ ID NO: 743836 - RNA, 19 nt, Artificial Sequence
  Description of Artificial Sequence: Synthetic oligonucleotide
gaucguagccucucggccc

SEQ ID NO: 743837 - RNA, 19 nt, Artificial Sequence
  Description of Artificial Sequence: Synthetic oligonucleotide
ucccguucgaaaugcagcc

SEQ ID NO: 743838 - RNA, 19 nt, Artificial Sequence
  Description of Artificial Sequence: Synthetic oligonucleotide
aguaagucuggaaguaccg

SEQ ID NO: 743839 - RNA, 19 nt, Artificial Sequence
  Description of Artificial Sequence: Synthetic oligonucleotide
aaagcagaccaucuuuauu

SEQ ID NO: 743840 - RNA, 19 nt, Artificial Sequence
  Description of Artificial Sequence: Synthetic oligonucleotide
aucauugcgagcugccuug

SEQ ID NO: 743841 - RNA, 19 nt, Artificial Sequence
  Description of Artificial Sequence: Synthetic oligonucleotide
ugagaaaguaagucuggaa

SEQ ID NO: 743842 - RNA, 19 nt, Artificial Sequence
  Description of Artificial Sequence: Synthetic oligonucleotide
uucgcaggcucuuagcaac

SEQ ID NO: 743843 - RNA, 19 nt, Artificial Sequence
  Description of Artificial Sequence: Synthetic oligonucleotide
uagcaaucuucucacgcca

SEQ ID NO: 743844 - RNA, 19 nt, Artificial Sequence
  Description of Artificial Sequence: Synthetic oligonucleotide
aucguagccucucggcccc

SEQ ID NO: 743845 - RNA, 19 nt, Artificial Sequence
  Description of Artificial Sequence: Synthetic oligonucleotide
uaucgguugggaucguagc

SEQ ID NO: 743846 - RNA, 19 nt, Artificial Sequence
  Description of Artificial Sequence: Synthetic oligonucleotide
aguguaugccccauguauc

SEQ ID NO: 743847 - RNA, 19 nt, Artificial Sequence
  Description of Artificial Sequence: Synthetic oligonucleotide
uucacaaccggaugucgga

SEQ ID NO: 743848 - RNA, 19 nt, Artificial Sequence
  Description of Artificial Sequence: Synthetic oligonucleotide
ugaucagcgaggacuuccc

SEQ ID NO: 743849 - RNA, 19 nt, Artificial Sequence
  Description of Artificial Sequence: Synthetic oligonucleotide
auacucauaaagugcugga

SEQ ID NO: 743850 - RNA, 19 nt, Artificial Sequence
  Description of Artificial Sequence: Synthetic oligonucleotide
uugaucagcgaggacuucc

SEQ ID NO: 743851 - RNA, 19 nt, Artificial Sequence
  Description of Artificial Sequence: Synthetic oligonucleotide
aggacgucggggaaagucc

SEQ ID NO: 743852 - RNA, 19 nt, Artificial Sequence
  Description of Artificial Sequence: Synthetic oligonucleotide
acggauuccccaucugagg

SEQ ID NO: 743853 - RNA, 19 nt, Artificial Sequence
  Description of Artificial Sequence: Synthetic oligonucleotide
aaccucguuucucugccca

SEQ ID NO: 743854 - RNA, 19 nt, Artificial Sequence
  Description of Artificial Sequence: Synthetic oligonucleotide
uaacacccgccauagcugc

SEQ ID NO: 743855 - RNA, 19 nt, Artificial Sequence
  Description of Artificial Sequence: Synthetic oligonucleotide
aggggugcuccgcugaagg

SEQ ID NO: 743856 - RNA, 19 nt, Artificial Sequence
  Description of Artificial Sequence: Synthetic oligonucleotide
cuaccgaggacaauggaga

SEQ ID NO: 743857 - RNA, 19 nt, Artificial Sequence
  Description of Artificial Sequence: Synthetic oligonucleotide
acuggagcgaagcccaucu

SEQ ID NO: 743858 - RNA, 19 nt, Artificial Sequence
  Description of Artificial Sequence: Synthetic oligonucleotide
ugggaucguagccucucgg

SEQ ID NO: 743859 - RNA, 19 nt, Artificial Sequence
  Description of Artificial Sequence: Synthetic oligonucleotide
uuauaaccucguuucucug

SEQ ID NO: 743860 - RNA, 19 nt, Artificial Sequence
  Description of Artificial Sequence: Synthetic oligonucleotide
gaugucggacauuucuaac

SEQ ID NO: 743861 - RNA, 19 nt, Artificial Sequence
  Description of Artificial Sequence: Synthetic oligonucleotide
ucgaaaugcagccgguauc

SEQ ID NO: 743862 - RNA, 19 nt, Artificial Sequence
  Description of Artificial Sequence: Synthetic oligonucleotide
auugcgagcugccuuggcu

SEQ ID NO: 743863 - RNA, 19 nt, Artificial Sequence
  Description of Artificial Sequence: Synthetic oligonucleotide
uguaucuucccaagguauu

SEQ ID NO: 743864 - RNA, 19 nt, Artificial Sequence
  Description of Artificial Sequence: Synthetic oligonucleotide
guaagucuggaaguaccgg

SEQ ID NO: 743865 - RNA, 19 nt, Artificial Sequence
  Description of Artificial Sequence: Synthetic oligonucleotide
ucccuagcaaucuucucac

SEQ ID NO: 743866 - RNA, 19 nt, Artificial Sequence
  Description of Artificial Sequence: Synthetic oligonucleotide
cacggauuccccaucugag

SEQ ID NO: 743867 - RNA, 19 nt, Artificial Sequence
  Description of Artificial Sequence: Synthetic oligonucleotide
agcuccaaggaggacgucg

SEQ ID NO: 743868 - RNA, 19 nt, Artificial Sequence
  Description of Artificial Sequence: Synthetic oligonucleotide
uugcgagcugccuuggcug

SEQ ID NO: 743869 - RNA, 19 nt, Artificial Sequence
  Description of Artificial Sequence: Synthetic oligonucleotide
caucucauagcuccaagga

SEQ ID NO: 743870 - RNA, 19 nt, Artificial Sequence
  Description of Artificial Sequence: Synthetic oligonucleotide
acaaccggaugucggaugu

SEQ ID NO: 743871 - RNA, 19 nt, Artificial Sequence
  Description of Artificial Sequence: Synthetic oligonucleotide
guucacaaccggaugucgg

SEQ ID NO: 743872 - RNA, 19 nt, Artificial Sequence
  Description of Artificial Sequence: Synthetic oligonucleotide
agucgucuccgcaugaguc

SEQ ID NO: 743873 - RNA, 19 nt, Artificial Sequence
  Description of Artificial Sequence: Synthetic oligonucleotide
agggcguauggguugcggg

SEQ ID NO: 743874 - RNA, 19 nt, Artificial Sequence
  Description of Artificial Sequence: Synthetic oligonucleotide
agcgccugaguccauccuc

SEQ ID NO: 743875 - RNA, 19 nt, Artificial Sequence
  Description of Artificial Sequence: Synthetic oligonucleotide
cacgcuucgcagauguccc

SEQ ID NO: 743876 - RNA, 19 nt, Artificial Sequence
  Description of Artificial Sequence: Synthetic oligonucleotide
cuccgcaugagucucccag

SEQ ID NO: 743877 - RNA, 19 nt, Artificial Sequence
  Description of Artificial Sequence: Synthetic oligonucleotide
aagcuaccgaggacaaugg

SEQ ID NO: 743878 - RNA, 19 nt, Artificial Sequence
  Description of Artificial Sequence: Synthetic oligonucleotide
aaugcagccgguaucgguu

SEQ ID NO: 743879 - RNA, 19 nt, Artificial Sequence
  Description of Artificial Sequence: Synthetic oligonucleotide
uccuguggcguucucgagu

SEQ ID NO: 743880 - RNA, 19 nt, Artificial Sequence
  Description of Artificial Sequence: Synthetic oligonucleotide
caugucccuagcaaucuuc

SEQ ID NO: 743881 - RNA, 19 nt, Artificial Sequence
  Description of Artificial Sequence: Synthetic oligonucleotide
agccguuaccccaggaggc

SEQ ID NO: 743882 - RNA, 19 nt, Artificial Sequence
  Description of Artificial Sequence: Synthetic oligonucleotide
uucgcagaugucccaggca

SEQ ID NO: 743883 - RNA, 19 nt, Artificial Sequence
  Description of Artificial Sequence: Synthetic oligonucleotide
agcagaccaucuuuauuca

SEQ ID NO: 743884 - RNA, 19 nt, Artificial Sequence
  Description of Artificial Sequence: Synthetic oligonucleotide
agucccgagggaaagaggu

SEQ ID NO: 743885 - RNA, 19 nt, Artificial Sequence
  Description of Artificial Sequence: Synthetic oligonucleotide
cugaaccaggcugauagac

SEQ ID NO: 743886 - RNA, 19 nt, Artificial Sequence
  Description of Artificial Sequence: Synthetic oligonucleotide
cucaguccaaaagcaaagc

SEQ ID NO: 743887 - RNA, 19 nt, Artificial Sequence
  Description of Artificial Sequence: Synthetic oligonucleotide
ccuagcaaucuucucacgc

SEQ ID NO: 743888 - RNA, 19 nt, Artificial Sequence
  Description of Artificial Sequence: Synthetic oligonucleotide
guaaccagguggguggaag

SEQ ID NO: 743889 - RNA, 19 nt, Artificial Sequence
  Description of Artificial Sequence: Synthetic oligonucleotide
uugcgggcagcuaggcagg

SEQ ID NO: 743890 - RNA, 19 nt, Artificial Sequence
  Description of Artificial Sequence: Synthetic oligonucleotide
guaucgguugggaucguag

SEQ ID NO: 743891 - RNA, 19 nt, Artificial Sequence
  Description of Artificial Sequence: Synthetic oligonucleotide
ggccgguggagccagaucc

SEQ ID NO: 743892 - RNA, 19 nt, Artificial Sequence
  Description of Artificial Sequence: Synthetic oligonucleotide
agagaugggguagauucca

SEQ ID NO: 743893 - RNA, 19 nt, Artificial Sequence
  Description of Artificial Sequence: Synthetic oligonucleotide
auucgggaggccagguacc

SEQ ID NO: 743894 - RNA, 19 nt, Artificial Sequence
  Description of Artificial Sequence: Synthetic oligonucleotide
cuuguagcgcucccuggag

SEQ ID NO: 743895 - RNA, 19 nt, Artificial Sequence
  Description of Artificial Sequence: Synthetic oligonucleotide
agccgauggucaccacucc

SEQ ID NO: 743896 - RNA, 19 nt, Artificial Sequence
  Description of Artificial Sequence: Synthetic oligonucleotide
caggcugagacggccaucc

SEQ ID NO: 743897 - RNA, 19 nt, Artificial Sequence
  Description of Artificial Sequence: Synthetic oligonucleotide
caugucuccaaguugugcu

SEQ ID NO: 743898 - RNA, 19 nt, Artificial Sequence
  Description of Artificial Sequence: Synthetic oligonucleotide
ugagacggccauccacagc

SEQ ID NO: 743899 - RNA, 19 nt, Artificial Sequence
  Description of Artificial Sequence: Synthetic oligonucleotide
uucccaagguauuccugga

SEQ ID NO: 743900 - RNA, 19 nt, Artificial Sequence
  Description of Artificial Sequence: Synthetic oligonucleotide
guaugccccauguaucuuc

SEQ ID NO: 743901 - RNA, 19 nt, Artificial Sequence
  Description of Artificial Sequence: Synthetic oligonucleotide
gcuaccgaggacaauggag

SEQ ID NO: 743902 - RNA, 19 nt, Artificial Sequence
  Description of Artificial Sequence: Synthetic oligonucleotide
cacccuacccugcaacacc

SEQ ID NO: 743903 - RNA, 19 nt, Artificial Sequence
  Description of Artificial Sequence: Synthetic oligonucleotide
ucucugcccacgcuucgca

SEQ ID NO: 743904 - RNA, 19 nt, Artificial Sequence
  Description of Artificial Sequence: Synthetic oligonucleotide
ggaucguagccucucggcc

SEQ ID NO: 743905 - RNA, 19 nt, Artificial Sequence
  Description of Artificial Sequence: Synthetic oligonucleotide
cuugaagcccucgcuuccg

SEQ ID NO: 743906 - RNA, 19 nt, Artificial Sequence
  Description of Artificial Sequence: Synthetic oligonucleotide
ugcagccgguaucgguugg

SEQ ID NO: 743907 - RNA, 19 nt, Artificial Sequence
  Description of Artificial Sequence: Synthetic oligonucleotide
aagauaaggcccggacagu

SEQ ID NO: 743908 - RNA, 19 nt, Artificial Sequence
  Description of Artificial Sequence: Synthetic oligonucleotide
uccaucgcugagucagucu

SEQ ID NO: 743909 - RNA, 19 nt, Artificial Sequence
  Description of Artificial Sequence: Synthetic oligonucleotide
cuuccgccccaccagcccg

SEQ ID NO: 743910 - RNA, 19 nt, Artificial Sequence
  Description of Artificial Sequence: Synthetic oligonucleotide
ucccaagguauuccuggaa

SEQ ID NO: 743911 - RNA, 19 nt, Artificial Sequence
  Description of Artificial Sequence: Synthetic oligonucleotide
gaagcccucgcuuccgcuc

SEQ ID NO: 743912 - RNA, 19 nt, Artificial Sequence
  Description of Artificial Sequence: Synthetic oligonucleotide
aacacccgccauagcugcc

SEQ ID NO: 743913 - RNA, 19 nt, Artificial Sequence
  Description of Artificial Sequence: Synthetic oligonucleotide
caucgcugagucagucugc

SEQ ID NO: 743914 - RNA, 19 nt, Artificial Sequence
  Description of Artificial Sequence: Synthetic oligonucleotide
ucauugcgagcugccuugg

SEQ ID NO: 743915 - RNA, 19 nt, Artificial Sequence
  Description of Artificial Sequence: Synthetic oligonucleotide
aacccacacagccgauggu

SEQ ID NO: 743916 - RNA, 19 nt, Artificial Sequence
  Description of Artificial Sequence: Synthetic oligonucleotide
ucucgagucccgagggaaa

SEQ ID NO: 743917 - RNA, 19 nt, Artificial Sequence
  Description of Artificial Sequence: Synthetic oligonucleotide
gggaagauaaggcccggac

SEQ ID NO: 743918 - RNA, 19 nt, Artificial Sequence
  Description of Artificial Sequence: Synthetic oligonucleotide
auuucaguacugacaggcu

SEQ ID NO: 743919 - RNA, 19 nt, Artificial Sequence
  Description of Artificial Sequence: Synthetic oligonucleotide
cacaaccggaugucggaug

SEQ ID NO: 743920 - RNA, 19 nt, Artificial Sequence
  Description of Artificial Sequence: Synthetic oligonucleotide
uaaccucguuucucugccc

SEQ ID NO: 743921 - RNA, 19 nt, Artificial Sequence
  Description of Artificial Sequence: Synthetic oligonucleotide
cccaagguauuccuggaag

SEQ ID NO: 743922 - RNA, 19 nt, Artificial Sequence
  Description of Artificial Sequence: Synthetic oligonucleotide
acugaaccaggcugauaga

SEQ ID NO: 743923 - RNA, 19 nt, Artificial Sequence
  Description of Artificial Sequence: Synthetic oligonucleotide
ucacugaaggggugagaaa

SEQ ID NO: 743924 - RNA, 19 nt, Artificial Sequence
  Description of Artificial Sequence: Synthetic oligonucleotide
cacgccagcugcucaaguc

SEQ ID NO: 743925 - RNA, 19 nt, Artificial Sequence
  Description of Artificial Sequence: Synthetic oligonucleotide
ggagacacucaccaccuuc

SEQ ID NO: 743926 - RNA, 19 nt, Artificial Sequence
  Description of Artificial Sequence: Synthetic oligonucleotide
acgucggggaaaguccagg

SEQ ID NO: 743927 - RNA, 19 nt, Artificial Sequence
  Description of Artificial Sequence: Synthetic oligonucleotide
gaugucggaugucagugau

SEQ ID NO: 743928 - RNA, 19 nt, Artificial Sequence
  Description of Artificial Sequence: Synthetic oligonucleotide
aguugugcucaaaguagcu

SEQ ID NO: 743929 - RNA, 19 nt, Artificial Sequence
  Description of Artificial Sequence: Synthetic oligonucleotide
aaguaccggguguggccug

SEQ ID NO: 743930 - RNA, 19 nt, Artificial Sequence
  Description of Artificial Sequence: Synthetic oligonucleotide
ugggucacggauuccccau

SEQ ID NO: 743931 - RNA, 19 nt, Artificial Sequence
  Description of Artificial Sequence: Synthetic oligonucleotide
cgaaaugcagccgguaucg

SEQ ID NO: 743932 - RNA, 19 nt, Artificial Sequence
  Description of Artificial Sequence: Synthetic oligonucleotide
cugaaguguaugccccaug

SEQ ID NO: 743933 - RNA, 19 nt, Artificial Sequence
  Description of Artificial Sequence: Synthetic oligonucleotide
ucgccagagccguuacccc

SEQ ID NO: 743934 - RNA, 19 nt, Artificial Sequence
  Description of Artificial Sequence: Synthetic oligonucleotide
ccguucgaaaugcagccgg

SEQ ID NO: 743935 - RNA, 19 nt, Artificial Sequence
  Description of Artificial Sequence: Synthetic oligonucleotide
uaccggguguggccuggcg

SEQ ID NO: 743936 - RNA, 19 nt, Artificial Sequence
  Description of Artificial Sequence: Synthetic oligonucleotide
augcagccgguaucgguug

SEQ ID NO: 743937 - RNA, 19 nt, Artificial Sequence
  Description of Artificial Sequence: Synthetic oligonucleotide
gggaucguagccucucggc

SEQ ID NO: 743938 - RNA, 19 nt, Artificial Sequence
  Description of Artificial Sequence: Synthetic oligonucleotide
agggaaguucacaaccgga

SEQ ID NO: 743939 - RNA, 19 nt, Artificial Sequence
  Description of Artificial Sequence: Synthetic oligonucleotide
agcaaucuucucacgccag

SEQ ID NO: 743940 - RNA, 19 nt, Artificial Sequence
  Description of Artificial Sequence: Synthetic oligonucleotide
gaaguguaugccccaugua

SEQ ID NO: 743941 - RNA, 19 nt, Artificial Sequence
  Description of Artificial Sequence: Synthetic oligonucleotide
auauccagcuccagcauuu

SEQ ID NO: 743942 - RNA, 19 nt, Artificial Sequence
  Description of Artificial Sequence: Synthetic oligonucleotide
guguaugccccauguaucu

SEQ ID NO: 743943 - RNA, 19 nt, Artificial Sequence
  Description of Artificial Sequence: Synthetic oligonucleotide
ugucccuagcaaucuucuc

SEQ ID NO: 743944 - RNA, 19 nt, Artificial Sequence
  Description of Artificial Sequence: Synthetic oligonucleotide
uaaggcccggacagucgca

SEQ ID NO: 743945 - RNA, 19 nt, Artificial Sequence
  Description of Artificial Sequence: Synthetic oligonucleotide
cucgagucccgagggaaag

SEQ ID NO: 743946 - RNA, 19 nt, Artificial Sequence
  Description of Artificial Sequence: Synthetic oligonucleotide
ucguuucucugcccacgcu

SEQ ID NO: 743947 - RNA, 19 nt, Artificial Sequence
  Description of Artificial Sequence: Synthetic oligonucleotide
aucgcugagucagucugcu

SEQ ID NO: 743948 - RNA, 19 nt, Artificial Sequence
  Description of Artificial Sequence: Synthetic oligonucleotide
ccagguaccucucuguuca

SEQ ID NO: 743949 - RNA, 19 nt, Artificial Sequence
  Description of Artificial Sequence: Synthetic oligonucleotide
cacucaccaccuuccgccc

SEQ ID NO: 743950 - RNA, 19 nt, Artificial Sequence
  Description of Artificial Sequence: Synthetic oligonucleotide
agcuaccgaggacaaugga

SEQ ID NO: 743951 - RNA, 19 nt, Artificial Sequence
  Description of Artificial Sequence: Synthetic oligonucleotide
ccaucgcugagucagucug

SEQ ID NO: 743952 - RNA, 19 nt, Artificial Sequence
  Description of Artificial Sequence: Synthetic oligonucleotide
ucgcaggcucuuagcaacu

SEQ ID NO: 743953 - RNA, 19 nt, Artificial Sequence
  Description of Artificial Sequence: Synthetic oligonucleotide
ggaaaguccaggacugaac

SEQ ID NO: 743954 - RNA, 19 nt, Artificial Sequence
  Description of Artificial Sequence: Synthetic oligonucleotide
gcguucucgagucccgagg

SEQ ID NO: 743955 - RNA, 19 nt, Artificial Sequence
  Description of Artificial Sequence: Synthetic oligonucleotide
uucucugcccacgcuucgc

SEQ ID NO: 743956 - RNA, 19 nt, Artificial Sequence
  Description of Artificial Sequence: Synthetic oligonucleotide
ucacgccagcugcucaagu

SEQ ID NO: 743957 - RNA, 19 nt, Artificial Sequence
  Description of Artificial Sequence: Synthetic oligonucleotide
aguaccggguguggccugg

SEQ ID NO: 743958 - RNA, 19 nt, Artificial Sequence
  Description of Artificial Sequence: Synthetic oligonucleotide
gauuccccaucugaggugu

SEQ ID NO: 743959 - RNA, 19 nt, Artificial Sequence
  Description of Artificial Sequence: Synthetic oligonucleotide
gccgguaucgguugggauc

SEQ ID NO: 743960 - RNA, 19 nt, Artificial Sequence
  Description of Artificial Sequence: Synthetic oligonucleotide
ccgguaucgguugggaucg

SEQ ID NO: 743961 - RNA, 19 nt, Artificial Sequence
  Description of Artificial Sequence: Synthetic oligonucleotide
cccauguaucuucccaagg

SEQ ID NO: 743962 - RNA, 19 nt, Artificial Sequence
  Description of Artificial Sequence: Synthetic oligonucleotide
ggauuccccaucugaggug

SEQ ID NO: 743963 - RNA, 19 nt, Artificial Sequence
  Description of Artificial Sequence: Synthetic oligonucleotide
cauuggggaaacccacaca

SEQ ID NO: 743964 - RNA, 19 nt, Artificial Sequence
  Description of Artificial Sequence: Synthetic oligonucleotide
ccaaguugugcucaaagua

SEQ ID NO: 743965 - RNA, 19 nt, Artificial Sequence
  Description of Artificial Sequence: Synthetic oligonucleotide
gggcguauggguugcgggc

SEQ ID NO: 743966 - RNA, 19 nt, Artificial Sequence
  Description of Artificial Sequence: Synthetic oligonucleotide
gcuucgcaggcucuuagca

SEQ ID NO: 743967 - RNA, 19 nt, Artificial Sequence
  Description of Artificial Sequence: Synthetic oligonucleotide
ucacaaccggaugucggau

SEQ ID NO: 743968 - RNA, 19 nt, Artificial Sequence
  Description of Artificial Sequence: Synthetic oligonucleotide
cuucgcaggcucuuagcaa

SEQ ID NO: 743969 - RNA, 19 nt, Artificial Sequence
  Description of Artificial Sequence: Synthetic oligonucleotide
ugacaggcuguagcacuug

SEQ ID NO: 743970 - RNA, 19 nt, Artificial Sequence
  Description of Artificial Sequence: Synthetic oligonucleotide
accgaggacaauggagaca

SEQ ID NO: 743971 - RNA, 19 nt, Artificial Sequence
  Description of Artificial Sequence: Synthetic oligonucleotide
cauugcgagcugccuuggc

SEQ ID NO: 743972 - RNA, 19 nt, Artificial Sequence
  Description of Artificial Sequence: Synthetic oligonucleotide
ccagcucaguccaaaagca

SEQ ID NO: 743973 - RNA, 19 nt, Artificial Sequence
  Description of Artificial Sequence: Synthetic oligonucleotide
cucugcccacgcuucgcag

SEQ ID NO: 743974 - RNA, 19 nt, Artificial Sequence
  Description of Artificial Sequence: Synthetic oligonucleotide
aacuccggccgguccucca

SEQ ID NO: 743975 - RNA, 19 nt, Artificial Sequence
  Description of Artificial Sequence: Synthetic oligonucleotide
gaaguaccggguguggccu

SEQ ID NO: 743976 - RNA, 19 nt, Artificial Sequence
  Description of Artificial Sequence: Synthetic oligonucleotide
ccuacccugcaacaccacc

SEQ ID NO: 743977 - RNA, 19 nt, Artificial Sequence
  Description of Artificial Sequence: Synthetic oligonucleotide
gacgucggggaaaguccag

SEQ ID NO: 743978 - RNA, 19 nt, Artificial Sequence
  Description of Artificial Sequence: Synthetic oligonucleotide
ccuguggcguucucgaguc

SEQ ID NO: 743979 - RNA, 19 nt, Artificial Sequence
  Description of Artificial Sequence: Synthetic oligonucleotide
cagcaggacgaugucggac

SEQ ID NO: 743980 - RNA, 19 nt, Artificial Sequence
  Description of Artificial Sequence: Synthetic oligonucleotide
ggagcgaagcccaucuuga

SEQ ID NO: 743981 - RNA, 19 nt, Artificial Sequence
  Description of Artificial Sequence: Synthetic oligonucleotide
gacagucgcagagcuucac

SEQ ID NO: 743982 - RNA, 19 nt, Artificial Sequence
  Description of Artificial Sequence: Synthetic oligonucleotide
agcacucgcccucgcccag

SEQ ID NO: 743983 - RNA, 19 nt, Artificial Sequence
  Description of Artificial Sequence: Synthetic oligonucleotide
acggggauucgggaggcca

SEQ ID NO: 743984 - RNA, 19 nt, Artificial Sequence
  Description of Artificial Sequence: Synthetic oligonucleotide
uguaugccccauguaucuu

SEQ ID NO: 743985 - RNA, 19 nt, Artificial Sequence
  Description of Artificial Sequence: Synthetic oligonucleotide
gauagacuucccggauauc

SEQ ID NO: 743986 - RNA, 19 nt, Artificial Sequence
  Description of Artificial Sequence: Synthetic oligonucleotide
ucgagucccgagggaaaga

SEQ ID NO: 743987 - RNA, 19 nt, Artificial Sequence
  Description of Artificial Sequence: Synthetic oligonucleotide
guuaccccaggaggccccg

SEQ ID NO: 743988 - RNA, 19 nt, Artificial Sequence
  Description of Artificial Sequence: Synthetic oligonucleotide
acgaugucggacauuucua

SEQ ID NO: 743989 - RNA, 19 nt, Artificial Sequence
  Description of Artificial Sequence: Synthetic oligonucleotide
cagggcguauggguugcgg

SEQ ID NO: 743990 - RNA, 19 nt, Artificial Sequence
  Description of Artificial Sequence: Synthetic oligonucleotide
ggggugcuccgcugaaggg

SEQ ID NO: 743991 - RNA, 19 nt, Artificial Sequence
  Description of Artificial Sequence: Synthetic oligonucleotide
ucucggcugucccguucga

SEQ ID NO: 743992 - RNA, 19 nt, Artificial Sequence
  Description of Artificial Sequence: Synthetic oligonucleotide
uguaaccagguggguggaa

SEQ ID NO: 743993 - RNA, 19 nt, Artificial Sequence
  Description of Artificial Sequence: Synthetic oligonucleotide
ccaccgagcuccccgacgc

SEQ ID NO: 743994 - RNA, 19 nt, Artificial Sequence
  Description of Artificial Sequence: Synthetic oligonucleotide
gucgucuccgcaugagucu

SEQ ID NO: 743995 - RNA, 19 nt, Artificial Sequence
  Description of Artificial Sequence: Synthetic oligonucleotide
caagggccgguggagccag

SEQ ID NO: 743996 - RNA, 19 nt, Artificial Sequence
  Description of Artificial Sequence: Synthetic oligonucleotide
agccgguaucgguugggau

SEQ ID NO: 743997 - RNA, 19 nt, Artificial Sequence
  Description of Artificial Sequence: Synthetic oligonucleotide
gucuccgcaugagucuccc

SEQ ID NO: 743998 - RNA, 19 nt, Artificial Sequence
  Description of Artificial Sequence: Synthetic oligonucleotide
gcucagucgucuccgcaug

SEQ ID NO: 743999 - RNA, 19 nt, Artificial Sequence
  Description of Artificial Sequence: Synthetic oligonucleotide
ccugcggaugugauggguc

SEQ ID NO: 744000 - RNA, 19 nt, Artificial Sequence
  Description of Artificial Sequence: Synthetic oligonucleotide
cggacauuucuaacacccg

SEQ ID NO: 744001 - RNA, 19 nt, Artificial Sequence
  Description of Artificial Sequence: Synthetic oligonucleotide
ucuccgcaugagucuccca

SEQ ID NO: 744002 - RNA, 19 nt, Artificial Sequence
  Description of Artificial Sequence: Synthetic oligonucleotide
acgcuucgcagauguccca

SEQ ID NO: 744003 - RNA, 19 nt, Artificial Sequence
  Description of Artificial Sequence: Synthetic oligonucleotide
caucuugaagcccucgcuu

SEQ ID NO: 744004 - RNA, 19 nt, Artificial Sequence
  Description of Artificial Sequence: Synthetic oligonucleotide
ccuggcguucuggagacac

SEQ ID NO: 744005 - RNA, 19 nt, Artificial Sequence
  Description of Artificial Sequence: Synthetic oligonucleotide
gucccgagggaaagaggug

SEQ ID NO: 744006 - RNA, 19 nt, Artificial Sequence
  Description of Artificial Sequence: Synthetic oligonucleotide
ccucguuucucugcccacg

SEQ ID NO: 744007 - RNA, 19 nt, Artificial Sequence
  Description of Artificial Sequence: Synthetic oligonucleotide
uauggguugcgggcagcua

SEQ ID NO: 744008 - RNA, 19 nt, Artificial Sequence
  Description of Artificial Sequence: Synthetic oligonucleotide
ugcuccgcugaaggguccu

SEQ ID NO: 744009 - RNA, 19 nt, Artificial Sequence
  Description of Artificial Sequence: Synthetic oligonucleotide
cucagucgucuccgcauga

SEQ ID NO: 744010 - RNA, 19 nt, Artificial Sequence
  Description of Artificial Sequence: Synthetic oligonucleotide
ggugcuccgcugaaggguc

SEQ ID NO: 744011 - RNA, 19 nt, Artificial Sequence
  Description of Artificial Sequence: Synthetic oligonucleotide
cagguaccucucuguucac

SEQ ID NO: 744012 - RNA, 19 nt, Artificial Sequence
  Description of Artificial Sequence: Synthetic oligonucleotide
cuguggcguucucgagucc

SEQ ID NO: 744013 - RNA, 19 nt, Artificial Sequence
  Description of Artificial Sequence: Synthetic oligonucleotide
cccuagcaaucuucucacg

SEQ ID NO: 744014 - RNA, 19 nt, Artificial Sequence
  Description of Artificial Sequence: Synthetic oligonucleotide
caucauugcgagcugccuu

SEQ ID NO: 744015 - RNA, 19 nt, Artificial Sequence
  Description of Artificial Sequence: Synthetic oligonucleotide
cgcugaaggguccuccgcc

SEQ ID NO: 744016 - RNA, 19 nt, Artificial Sequence
  Description of Artificial Sequence: Synthetic oligonucleotide
gcguauggguugcgggcag

SEQ ID NO: 744017 - RNA, 19 nt, Artificial Sequence
  Description of Artificial Sequence: Synthetic oligonucleotide
gccgauggucaccacucca

SEQ ID NO: 744018 - RNA, 19 nt, Artificial Sequence
  Description of Artificial Sequence: Synthetic oligonucleotide
caggggugcuccgcugaag

SEQ ID NO: 744019 - RNA, 19 nt, Artificial Sequence
  Description of Artificial Sequence: Synthetic oligonucleotide
gcagccgguaucgguuggg

SEQ ID NO: 744020 - RNA, 19 nt, Artificial Sequence
  Description of Artificial Sequence: Synthetic oligonucleotide
ccguugaucagcgaggacu

SEQ ID NO: 744021 - RNA, 19 nt, Artificial Sequence
  Description of Artificial Sequence: Synthetic oligonucleotide
ggcuagcccaagcucucca

SEQ ID NO: 744022 - RNA, 19 nt, Artificial Sequence
  Description of Artificial Sequence: Synthetic oligonucleotide
ggcguauggguugcgggca

SEQ ID NO: 744023 - RNA, 19 nt, Artificial Sequence
  Description of Artificial Sequence: Synthetic oligonucleotide
gguugcgggcagcuaggca

SEQ ID NO: 744024 - RNA, 19 nt, Artificial Sequence
  Description of Artificial Sequence: Synthetic oligonucleotide
gccguuaccccaggaggcc

SEQ ID NO: 744025 - RNA, 19 nt, Artificial Sequence
  Description of Artificial Sequence: Synthetic oligonucleotide
cccguucgaaaugcagccg

SEQ ID NO: 744026 - RNA, 19 nt, Artificial Sequence
  Description of Artificial Sequence: Synthetic oligonucleotide
cuccaccgagcuccccgac

SEQ ID NO: 744027 - RNA, 19 nt, Artificial Sequence
  Description of Artificial Sequence: Synthetic oligonucleotide
cuguaaccaggugggugga

SEQ ID NO: 744028 - RNA, 19 nt, Artificial Sequence
  Description of Artificial Sequence: Synthetic oligonucleotide
gguugagccugcggaugug

SEQ ID NO: 744029 - RNA, 19 nt, Artificial Sequence
  Description of Artificial Sequence: Synthetic oligonucleotide
caaccggaugucggauguc

SEQ ID NO: 744030 - RNA, 19 nt, Artificial Sequence
  Description of Artificial Sequence: Synthetic oligonucleotide
auggcuucgcaggcucuua

SEQ ID NO: 744031 - RNA, 19 nt, Artificial Sequence
  Description of Artificial Sequence: Synthetic oligonucleotide
cgaugucggacauuucuaa

SEQ ID NO: 744032 - RNA, 19 nt, Artificial Sequence
  Description of Artificial Sequence: Synthetic oligonucleotide
ugcccacgcuucgcagaug

SEQ ID NO: 744033 - RNA, 19 nt, Artificial Sequence
  Description of Artificial Sequence: Synthetic oligonucleotide
gggucacggauuccccauc

SEQ ID NO: 744034 - RNA, 19 nt, Artificial Sequence
  Description of Artificial Sequence: Synthetic oligonucleotide
cagucgucuccgcaugagu

SEQ ID NO: 744035 - RNA, 19 nt, Artificial Sequence
  Description of Artificial Sequence: Synthetic oligonucleotide
cccgcagugauggcuucgc

SEQ ID NO: 744036 - RNA, 19 nt, Artificial Sequence
  Description of Artificial Sequence: Synthetic oligonucleotide
ccugcacggggauucggga

SEQ ID NO: 744037 - RNA, 19 nt, Artificial Sequence
  Description of Artificial Sequence: Synthetic oligonucleotide
gcccacgcuucgcagaugu

SEQ ID NO: 744038 - RNA, 19 nt, Artificial Sequence
  Description of Artificial Sequence: Synthetic oligonucleotide
cacggggauucgggaggcc

SEQ ID NO: 744039 - RNA, 19 nt, Artificial Sequence
  Description of Artificial Sequence: Synthetic oligonucleotide
agggccgguggagccagau

SEQ ID NO: 744040 - RNA, 19 nt, Artificial Sequence
  Description of Artificial Sequence: Synthetic oligonucleotide
agacggccauccacagcca

SEQ ID NO: 744041 - RNA, 19 nt, Artificial Sequence
  Description of Artificial Sequence: Synthetic oligonucleotide
gcacggggauucgggaggc

SEQ ID NO: 744042 - RNA, 19 nt, Artificial Sequence
  Description of Artificial Sequence: Synthetic oligonucleotide
cacucgcccucgcccagca

SEQ ID NO: 744043 - RNA, 19 nt, Artificial Sequence
  Description of Artificial Sequence: Synthetic oligonucleotide
guaccggguguggccuggc

SEQ ID NO: 744044 - RNA, 19 nt, Artificial Sequence
  Description of Artificial Sequence: Synthetic oligonucleotide
cagccgguaucgguuggga

SEQ ID NO: 744045 - RNA, 19 nt, Artificial Sequence
  Description of Artificial Sequence: Synthetic oligonucleotide
ccguuaccccaggaggccc

SEQ ID NO: 744046 - RNA, 19 nt, Artificial Sequence
  Description of Artificial Sequence: Synthetic oligonucleotide
gggugcuccgcugaagggu

SEQ ID NO: 744047 - RNA, 19 nt, Artificial Sequence
  Description of Artificial Sequence: Synthetic oligonucleotide
gggcuagcccaagcucucc

SEQ ID NO: 744048 - RNA, 19 nt, Artificial Sequence
  Description of Artificial Sequence: Synthetic oligonucleotide
gccuucgauucuucuucaa

SEQ ID NO: 744049 - RNA, 19 nt, Artificial Sequence
  Description of Artificial Sequence: Synthetic oligonucleotide
cuggcguucuggagacacu

SEQ ID NO: 744050 - RNA, 19 nt, Artificial Sequence
  Description of Artificial Sequence: Synthetic oligonucleotide
ucguagccucucggcccca

SEQ ID NO: 744051 - RNA, 19 nt, Artificial Sequence
  Description of Artificial Sequence: Synthetic oligonucleotide
ggccgguccuccaccgagc

SEQ ID NO: 744052 - RNA, 19 nt, Artificial Sequence
  Description of Artificial Sequence: Synthetic oligonucleotide
gguaucgguugggaucgua

SEQ ID NO: 744053 - RNA, 19 nt, Artificial Sequence
  Description of Artificial Sequence: Synthetic oligonucleotide
ggacagucgcagagcuuca

SEQ ID NO: 744054 - RNA, 19 nt, Artificial Sequence
  Description of Artificial Sequence: Synthetic oligonucleotide
gagccagauccaccuuguu

SEQ ID NO: 744055 - RNA, 19 nt, Artificial Sequence
  Description of Artificial Sequence: Synthetic oligonucleotide
cggauuccccaucugaggu

SEQ ID NO: 744056 - RNA, 19 nt, Artificial Sequence
  Description of Artificial Sequence: Synthetic oligonucleotide
cccguugaucagcgaggac

SEQ ID NO: 744057 - RNA, 19 nt, Artificial Sequence
  Description of Artificial Sequence: Synthetic oligonucleotide
ccgguggagccagauccac

SEQ ID NO: 744058 - RNA, 19 nt, Artificial Sequence
  Description of Artificial Sequence: Synthetic oligonucleotide
gcucagcacucgcccucgc

SEQ ID NO: 744059 - RNA, 19 nt, Artificial Sequence
  Description of Artificial Sequence: Synthetic oligonucleotide
cggccgguccuccaccgag

SEQ ID NO: 744060 - RNA, 19 nt, Artificial Sequence
  Description of Artificial Sequence: Synthetic oligonucleotide
ccgauggucaccacuccau

SEQ ID NO: 744061 - RNA, 19 nt, Artificial Sequence
  Description of Artificial Sequence: Synthetic oligonucleotide
gcagggcguauggguugcg

SEQ ID NO: 744062 - RNA, 19 nt, Artificial Sequence
  Description of Artificial Sequence: Synthetic oligonucleotide
ccuccaccgagcuccccga

SEQ ID NO: 744063 - RNA, 19 nt, Artificial Sequence
  Description of Artificial Sequence: Synthetic oligonucleotide
aagggccgguggagccaga

SEQ ID NO: 744064 - RNA, 19 nt, Artificial Sequence
  Description of Artificial Sequence: Synthetic oligonucleotide
cagcgccugaguccauccu

SEQ ID NO: 744065 - RNA, 19 nt, Artificial Sequence
  Description of Artificial Sequence: Synthetic oligonucleotide
ggacugaaccaggcugaua

SEQ ID NO: 744066 - RNA, 19 nt, Artificial Sequence
  Description of Artificial Sequence: Synthetic oligonucleotide
gcaggacgaugucggacau

SEQ ID NO: 744067 - RNA, 19 nt, Artificial Sequence
  Description of Artificial Sequence: Synthetic oligonucleotide
gccgguccuccaccgagcu

SEQ ID NO: 744068 - RNA, 19 nt, Artificial Sequence
  Description of Artificial Sequence: Synthetic oligonucleotide
cccacgcuucgcagauguc

SEQ ID NO: 744069 - RNA, 19 nt, Artificial Sequence
  Description of Artificial Sequence: Synthetic oligonucleotide
cccagcgccugaguccauc

SEQ ID NO: 744070 - RNA, 19 nt, Artificial Sequence
  Description of Artificial Sequence: Synthetic oligonucleotide
uccgccccaccagcccguu

SEQ ID NO: 744071 - RNA, 19 nt, Artificial Sequence
  Description of Artificial Sequence: Synthetic oligonucleotide
cuggagcgaagcccaucuu

SEQ ID NO: 744072 - RNA, 19 nt, Artificial Sequence
  Description of Artificial Sequence: Synthetic oligonucleotide
cguucgaaaugcagccggu

SEQ ID NO: 744073 - RNA, 19 nt, Artificial Sequence
  Description of Artificial Sequence: Synthetic oligonucleotide
ccgcagugauggcuucgca

SEQ ID NO: 744074 - RNA, 19 nt, Artificial Sequence
  Description of Artificial Sequence: Synthetic oligonucleotide
ccgccucuggguggcgcag

SEQ ID NO: 744075 - RNA, 19 nt, Artificial Sequence
  Description of Artificial Sequence: Synthetic oligonucleotide
gcgaggacuuccccacauu

SEQ ID NO: 744076 - RNA, 19 nt, Artificial Sequence
  Description of Artificial Sequence: Synthetic oligonucleotide
cgcaugagucucccaggua

SEQ ID NO: 744077 - RNA, 19 nt, Artificial Sequence
  Description of Artificial Sequence: Synthetic oligonucleotide
caggacgaugucggacauu

SEQ ID NO: 744078 - RNA, 19 nt, Artificial Sequence
  Description of Artificial Sequence: Synthetic oligonucleotide
ccuccgccucuggguggcg

SEQ ID NO: 744079 - RNA, 19 nt, Artificial Sequence
  Description of Artificial Sequence: Synthetic oligonucleotide
ccgccccaccagcccguug

SEQ ID NO: 744080 - RNA, 19 nt, Artificial Sequence
  Description of Artificial Sequence: Synthetic oligonucleotide
ccggccgguccuccaccga

SEQ ID NO: 744081 - RNA, 19 nt, Artificial Sequence
  Description of Artificial Sequence: Synthetic oligonucleotide
gccuggcguucuggagaca

SEQ ID NO: 744082 - RNA, 19 nt, Artificial Sequence
  Description of Artificial Sequence: Synthetic oligonucleotide
gccccaccagcccguugau

SEQ ID NO: 744083 - RNA, 19 nt, Artificial Sequence
  Description of Artificial Sequence: Synthetic oligonucleotide
gcgagcugccuuggcuguu

SEQ ID NO: 744084 - RNA, 19 nt, Artificial Sequence
  Description of Artificial Sequence: Synthetic oligonucleotide
cgguaucgguugggaucgu

SEQ ID NO: 744085 - RNA, 19 nt, Artificial Sequence
  Description of Artificial Sequence: Synthetic oligonucleotide
ccccagcgccugaguccau

SEQ ID NO: 744086 - RNA, 19 nt, Artificial Sequence
  Description of Artificial Sequence: Synthetic oligonucleotide
uuuacuaauucuuuaaagg

SEQ ID NO: 744087 - RNA, 19 nt, Artificial Sequence
  Description of Artificial Sequence: Synthetic oligonucleotide
uuaaguacuagucaugggg

SEQ ID NO: 744088 - RNA, 19 nt, Artificial Sequence
  Description of Artificial Sequence: Synthetic oligonucleotide
agaauauaagaauauggcg

SEQ ID NO: 744089 - RNA, 19 nt, Artificial Sequence
  Description of Artificial Sequence: Synthetic oligonucleotide
aucaccauaacccuugagc

SEQ ID NO: 744090 - RNA, 19 nt, Artificial Sequence
  Description of Artificial Sequence: Synthetic oligonucleotide
aguaaaguuagccaaccac

SEQ ID NO: 744091 - RNA, 19 nt, Artificial Sequence
  Description of Artificial Sequence: Synthetic oligonucleotide
uguuuuauacuuacaaccc

SEQ ID NO: 744092 - RNA, 19 nt, Artificial Sequence
  Description of Artificial Sequence: Synthetic oligonucleotide
ucuaguuuaguauuugagc

SEQ ID NO: 744093 - RNA, 19 nt, Artificial Sequence
  Description of Artificial Sequence: Synthetic oligonucleotide
aguuuguugguauauggcg

SEQ ID NO: 744094 - RNA, 19 nt, Artificial Sequence
  Description of Artificial Sequence: Synthetic oligonucleotide
uugacguuaugcaaaaucc

SEQ ID NO: 744095 - RNA, 19 nt, Artificial Sequence
  Description of Artificial Sequence: Synthetic oligonucleotide
uccacuuacaaucuuagaa

SEQ ID NO: 744096 - RNA, 19 nt, Artificial Sequence
  Description of Artificial Sequence: Synthetic oligonucleotide
aguuuuccgacacaaagag

SEQ ID NO: 744097 - RNA, 19 nt, Artificial Sequence
  Description of Artificial Sequence: Synthetic oligonucleotide
aaaacgcauuugcagauag

SEQ ID NO: 744098 - RNA, 19 nt, Artificial Sequence
  Description of Artificial Sequence: Synthetic oligonucleotide
uggauuuugaccacaggcc

SEQ ID NO: 744099 - RNA, 19 nt, Artificial Sequence
  Description of Artificial Sequence: Synthetic oligonucleotide
aacgacguaaccaauccac

SEQ ID NO: 744100 - RNA, 19 nt, Artificial Sequence
  Description of Artificial Sequence: Synthetic oligonucleotide
aagaauauggcggagaguu

SEQ ID NO: 744101 - RNA, 19 nt, Artificial Sequence
  Description of Artificial Sequence: Synthetic oligonucleotide
uucgagggaaaacaugagg

SEQ ID NO: 744102 - RNA, 19 nt, Artificial Sequence
  Description of Artificial Sequence: Synthetic oligonucleotide
aacuugugaaauguucgcc

SEQ ID NO: 744103 - RNA, 19 nt, Artificial Sequence
  Description of Artificial Sequence: Synthetic oligonucleotide
auaagaauauggcggagag

SEQ ID NO: 744104 - RNA, 19 nt, Artificial Sequence
  Description of Artificial Sequence: Synthetic oligonucleotide
aagauuccuggucagagga

SEQ ID NO: 744105 - RNA, 19 nt, Artificial Sequence
  Description of Artificial Sequence: Synthetic oligonucleotide
ugacaaauacaaacgacgu

SEQ ID NO: 744106 - RNA, 19 nt, Artificial Sequence
  Description of Artificial Sequence: Synthetic oligonucleotide
aaacaguacuuuccaucgc

SEQ ID NO: 744107 - RNA, 19 nt, Artificial Sequence
  Description of Artificial Sequence: Synthetic oligonucleotide
aacugucugagacucgguc

SEQ ID NO: 744108 - RNA, 19 nt, Artificial Sequence
  Description of Artificial Sequence: Synthetic oligonucleotide
aaguuagccaaccaccacu

SEQ ID NO: 744109 - RNA, 19 nt, Artificial Sequence
  Description of Artificial Sequence: Synthetic oligonucleotide
uccaucgcauauuaaauca

SEQ ID NO: 744110 - RNA, 19 nt, Artificial Sequence
  Description of Artificial Sequence: Synthetic oligonucleotide
gaauauggcggagaguugg

SEQ ID NO: 744111 - RNA, 19 nt, Artificial Sequence
  Description of Artificial Sequence: Synthetic oligonucleotide
aacaguacuuuccaucgca

SEQ ID NO: 744112 - RNA, 19 nt, Artificial Sequence
  Description of Artificial Sequence: Synthetic oligonucleotide
uaaguacuagucaugggga

SEQ ID NO: 744113 - RNA, 19 nt, Artificial Sequence
  Description of Artificial Sequence: Synthetic oligonucleotide
accacuuacugcuuuauug

SEQ ID NO: 744114 - RNA, 19 nt, Artificial Sequence
  Description of Artificial Sequence: Synthetic oligonucleotide
ugaaauguucgccuuguac

SEQ ID NO: 744115 - RNA, 19 nt, Artificial Sequence
  Description of Artificial Sequence: Synthetic oligonucleotide
uacagaacggcuaccguag

SEQ ID NO: 744116 - RNA, 19 nt, Artificial Sequence
  Description of Artificial Sequence: Synthetic oligonucleotide
gacguuaugcaaaaucccg

SEQ ID NO: 744117 - RNA, 19 nt, Artificial Sequence
  Description of Artificial Sequence: Synthetic oligonucleotide
acaaauacaaacgacguaa

SEQ ID NO: 744118 - RNA, 19 nt, Artificial Sequence
  Description of Artificial Sequence: Synthetic oligonucleotide
ugagacuugacguuaugca

SEQ ID NO: 744119 - RNA, 19 nt, Artificial Sequence
  Description of Artificial Sequence: Synthetic oligonucleotide
  modified_base (2)..(2): a, c, u, g, unknown or other
anccggagcugcuguaucc

SEQ ID NO: 744120 - RNA, 19 nt, Artificial Sequence
  Description of Artificial Sequence: Synthetic oligonucleotide
ucaccauaacccuugagcu

SEQ ID NO: 744121 - RNA, 19 nt, Artificial Sequence
  Description of Artificial Sequence: Synthetic oligonucleotide
agugaaucuaguuuaguau

SEQ ID NO: 744122 - RNA, 19 nt, Artificial Sequence
  Description of Artificial Sequence: Synthetic oligonucleotide
acaguuacccaguaggcug

SEQ ID NO: 744123 - RNA, 19 nt, Artificial Sequence
  Description of Artificial Sequence: Synthetic oligonucleotide
agaacggcuaccguagucc

SEQ ID NO: 744124 - RNA, 19 nt, Artificial Sequence
  Description of Artificial Sequence: Synthetic oligonucleotide
cagauagaauguuuuauac

SEQ ID NO: 744125 - RNA, 19 nt, Artificial Sequence
  Description of Artificial Sequence: Synthetic oligonucleotide
gaccauauugaguuuguug

SEQ ID NO: 744126 - RNA, 19 nt, Artificial Sequence
  Description of Artificial Sequence: Synthetic oligonucleotide
aagguugagacgaucaaug

SEQ ID NO: 744127 - RNA, 19 nt, Artificial Sequence
  Description of Artificial Sequence: Synthetic oligonucleotide
ugacguuaugcaaaauccc

SEQ ID NO: 744128 - RNA, 19 nt, Artificial Sequence
  Description of Artificial Sequence: Synthetic oligonucleotide
accucuaagauuccugguc

SEQ ID NO: 744129 - RNA, 19 nt, Artificial Sequence
  Description of Artificial Sequence: Synthetic oligonucleotide
accauaacccuugagcuac

SEQ ID NO: 744130 - RNA, 19 nt, Artificial Sequence
  Description of Artificial Sequence: Synthetic oligonucleotide
uauggcguacucuuuaggu

SEQ ID NO: 744131 - RNA, 19 nt, Artificial Sequence
  Description of Artificial Sequence: Synthetic oligonucleotide
ggcacaguuacccaguagg

SEQ ID NO: 744132 - RNA, 19 nt, Artificial Sequence
  Description of Artificial Sequence: Synthetic oligonucleotide
uaagauuccuggucagagg

SEQ ID NO: 744133 - RNA, 19 nt, Artificial Sequence
  Description of Artificial Sequence: Synthetic oligonucleotide
agguugagacgaucaaugc

SEQ ID NO: 744134 - RNA, 19 nt, Artificial Sequence
  Description of Artificial Sequence: Synthetic oligonucleotide
uacuuacaacccuagauaa

SEQ ID NO: 744135 - RNA, 19 nt, Artificial Sequence
  Description of Artificial Sequence: Synthetic oligonucleotide
caaacgacguaaccaaucc

SEQ ID NO: 744136 - RNA, 19 nt, Artificial Sequence
  Description of Artificial Sequence: Synthetic oligonucleotide
acgaucaaugcacagacaa

SEQ ID NO: 744137 - RNA, 19 nt, Artificial Sequence
  Description of Artificial Sequence: Synthetic oligonucleotide
auacuuacaacccuagaua

SEQ ID NO: 744138 - RNA, 19 nt, Artificial Sequence
  Description of Artificial Sequence: Synthetic oligonucleotide
aguacuuuccaucgcauau

SEQ ID NO: 744139 - RNA, 19 nt, Artificial Sequence
  Description of Artificial Sequence: Synthetic oligonucleotide
uaaguaaaguuagccaacc

SEQ ID NO: 744140 - RNA, 19 nt, Artificial Sequence
  Description of Artificial Sequence: Synthetic oligonucleotide
cauaacagauucucucggg

SEQ ID NO: 744141 - RNA, 19 nt, Artificial Sequence
  Description of Artificial Sequence: Synthetic oligonucleotide
acaugagguauuauguugg

SEQ ID NO: 744142 - RNA, 19 nt, Artificial Sequence
  Description of Artificial Sequence: Synthetic oligonucleotide
caauccacuuauuagcuuc

SEQ ID NO: 744143 - RNA, 19 nt, Artificial Sequence
  Description of Artificial Sequence: Synthetic oligonucleotide
uauauggcguacucuuuag

SEQ ID NO: 744144 - RNA, 19 nt, Artificial Sequence
  Description of Artificial Sequence: Synthetic oligonucleotide
uuaucacccgacagagugg

SEQ ID NO: 744145 - RNA, 19 nt, Artificial Sequence
  Description of Artificial Sequence: Synthetic oligonucleotide
cauagaauauaagaauaug

SEQ ID NO: 744146 - RNA, 19 nt, Artificial Sequence
  Description of Artificial Sequence: Synthetic oligonucleotide
ucucaagcagcuuuuguaa

SEQ ID NO: 744147 - RNA, 19 nt, Artificial Sequence
  Description of Artificial Sequence: Synthetic oligonucleotide
cuccaauuaaguacuaguc

SEQ ID NO: 744148 - RNA, 19 nt, Artificial Sequence
  Description of Artificial Sequence: Synthetic oligonucleotide
auaacagauucucucggga

SEQ ID NO: 744149 - RNA, 19 nt, Artificial Sequence
  Description of Artificial Sequence: Synthetic oligonucleotide
aguguuuacugaccaucac

SEQ ID NO: 744150 - RNA, 19 nt, Artificial Sequence
  Description of Artificial Sequence: Synthetic oligonucleotide
cuaguuuaguauuugagcu

SEQ ID NO: 744151 - RNA, 19 nt, Artificial Sequence
  Description of Artificial Sequence: Synthetic oligonucleotide
auggcguacucuuuagguc

SEQ ID NO: 744152 - RNA, 19 nt, Artificial Sequence
  Description of Artificial Sequence: Synthetic oligonucleotide
cuaagauuccuggucagag

SEQ ID NO: 744153 - RNA, 19 nt, Artificial Sequence
  Description of Artificial Sequence: Synthetic oligonucleotide
aaguaaaguuagccaacca

SEQ ID NO: 744154 - RNA, 19 nt, Artificial Sequence
  Description of Artificial Sequence: Synthetic oligonucleotide
gacuuaggguccaacacag

SEQ ID NO: 744155 - RNA, 19 nt, Artificial Sequence
  Description of Artificial Sequence: Synthetic oligonucleotide
ucggggaguucucagauuc

SEQ ID NO: 744156 - RNA, 19 nt, Artificial Sequence
  Description of Artificial Sequence: Synthetic oligonucleotide
ugaaucuaguuuaguauuu

SEQ ID NO: 744157 - RNA, 19 nt, Artificial Sequence
  Description of Artificial Sequence: Synthetic oligonucleotide
cuguauggauccacaacgg

SEQ ID NO: 744158 - RNA, 19 nt, Artificial Sequence
  Description of Artificial Sequence: Synthetic oligonucleotide
uagccaaugaguauuuauu

SEQ ID NO: 744159 - RNA, 19 nt, Artificial Sequence
  Description of Artificial Sequence: Synthetic oligonucleotide
gagguauuauguuggcccc

SEQ ID NO: 744160 - RNA, 19 nt, Artificial Sequence
  Description of Artificial Sequence: Synthetic oligonucleotide
aguacuagucauggggaac

SEQ ID NO: 744161 - RNA, 19 nt, Artificial Sequence
  Description of Artificial Sequence: Synthetic oligonucleotide
uuacagaacggcuaccgua

SEQ ID NO: 744162 - RNA, 19 nt, Artificial Sequence
  Description of Artificial Sequence: Synthetic oligonucleotide
auauggcguacucuuuagg

SEQ ID NO: 744163 - RNA, 19 nt, Artificial Sequence
  Description of Artificial Sequence: Synthetic oligonucleotide
ugguauauggcguacucuu

SEQ ID NO: 744164 - RNA, 19 nt, Artificial Sequence
  Description of Artificial Sequence: Synthetic oligonucleotide
cuagucauggggaacaaaa

SEQ ID NO: 744165 - RNA, 19 nt, Artificial Sequence
  Description of Artificial Sequence: Synthetic oligonucleotide
aaacgacguaaccaaucca

SEQ ID NO: 744166 - RNA, 19 nt, Artificial Sequence
  Description of Artificial Sequence: Synthetic oligonucleotide
uauggcggagaguuggaca

SEQ ID NO: 744167 - RNA, 19 nt, Artificial Sequence
  Description of Artificial Sequence: Synthetic oligonucleotide
acaaacgacguaaccaauc

SEQ ID NO: 744168 - RNA, 19 nt, Artificial Sequence
  Description of Artificial Sequence: Synthetic oligonucleotide
gaaucuaguuuaguauuug

SEQ ID NO: 744169 - RNA, 19 nt, Artificial Sequence
  Description of Artificial Sequence: Synthetic oligonucleotide
gguuaccaugcugagaugg

SEQ ID NO: 744170 - RNA, 19 nt, Artificial Sequence
  Description of Artificial Sequence: Synthetic oligonucleotide
ugagcuacaggcguccucu

SEQ ID NO: 744171 - RNA, 19 nt, Artificial Sequence
  Description of Artificial Sequence: Synthetic oligonucleotide
aaguacuagucauggggaa

SEQ ID NO: 744172 - RNA, 19 nt, Artificial Sequence
  Description of Artificial Sequence: Synthetic oligonucleotide
aucuuaguaucuuuuccaa

SEQ ID NO: 744173 - RNA, 19 nt, Artificial Sequence
  Description of Artificial Sequence: Synthetic oligonucleotide
acuuacugcuuuauuguag

SEQ ID NO: 744174 - RNA, 19 nt, Artificial Sequence
  Description of Artificial Sequence: Synthetic oligonucleotide
aguaggcugacaaauacaa

SEQ ID NO: 744175 - RNA, 19 nt, Artificial Sequence
  Description of Artificial Sequence: Synthetic oligonucleotide
uaccaugcugagaugggac

SEQ ID NO: 744176 - RNA, 19 nt, Artificial Sequence
  Description of Artificial Sequence: Synthetic oligonucleotide
ucaacuuauauugcacaaa

SEQ ID NO: 744177 - RNA, 19 nt, Artificial Sequence
  Description of Artificial Sequence: Synthetic oligonucleotide
uacaacccuagauaauuau

SEQ ID NO: 744178 - RNA, 19 nt, Artificial Sequence
  Description of Artificial Sequence: Synthetic oligonucleotide
gagacuugacguuaugcaa

SEQ ID NO: 744179 - RNA, 19 nt, Artificial Sequence
  Description of Artificial Sequence: Synthetic oligonucleotide
ucgcauauuaaaucacaau

SEQ ID NO: 744180 - RNA, 19 nt, Artificial Sequence
  Description of Artificial Sequence: Synthetic oligonucleotide
ugggacuuaggguccaaca

SEQ ID NO: 744181 - RNA, 19 nt, Artificial Sequence
  Description of Artificial Sequence: Synthetic oligonucleotide
uucacuauguuagcuguaa

SEQ ID NO: 744182 - RNA, 19 nt, Artificial Sequence
  Description of Artificial Sequence: Synthetic oligonucleotide
uugagacgaucaaugcaca

SEQ ID NO: 744183 - RNA, 19 nt, Artificial Sequence
  Description of Artificial Sequence: Synthetic oligonucleotide
cuucgugucgaaccacucc

SEQ ID NO: 744184 - RNA, 19 nt, Artificial Sequence
  Description of Artificial Sequence: Synthetic oligonucleotide
cugagacuugacguuaugc

SEQ ID NO: 744185 - RNA, 19 nt, Artificial Sequence
  Description of Artificial Sequence: Synthetic oligonucleotide
uuacaacccuagauaauua

SEQ ID NO: 744186 - RNA, 19 nt, Artificial Sequence
  Description of Artificial Sequence: Synthetic oligonucleotide
caauccauacuguaaguaa

SEQ ID NO: 744187 - RNA, 19 nt, Artificial Sequence
  Description of Artificial Sequence: Synthetic oligonucleotide
uaccguaguccacuuacaa

SEQ ID NO: 744188 - RNA, 19 nt, Artificial Sequence
  Description of Artificial Sequence: Synthetic oligonucleotide
gcauaacagauucucucgg

SEQ ID NO: 744189 - RNA, 19 nt, Artificial Sequence
  Description of Artificial Sequence: Synthetic oligonucleotide
augacguaggagauugggg

SEQ ID NO: 744190 - RNA, 19 nt, Artificial Sequence
  Description of Artificial Sequence: Synthetic oligonucleotide
gguuacagaacggcuaccg

SEQ ID NO: 744191 - RNA, 19 nt, Artificial Sequence
  Description of Artificial Sequence: Synthetic oligonucleotide
gacucggucacauggaagu

SEQ ID NO: 744192 - RNA, 19 nt, Artificial Sequence
  Description of Artificial Sequence: Synthetic oligonucleotide
cagagugaaucuaguuuag

SEQ ID NO: 744193 - RNA, 19 nt, Artificial Sequence
  Description of Artificial Sequence: Synthetic oligonucleotide
uaucacccgacagagugga

SEQ ID NO: 744194 - RNA, 19 nt, Artificial Sequence
  Description of Artificial Sequence: Synthetic oligonucleotide
ucccgacaguuucugacug

SEQ ID NO: 744195 - RNA, 19 nt, Artificial Sequence
  Description of Artificial Sequence: Synthetic oligonucleotide
guugguauauggcguacuc

SEQ ID NO: 744196 - RNA, 19 nt, Artificial Sequence
  Description of Artificial Sequence: Synthetic oligonucleotide
ucuaagauuccuggucaga

SEQ ID NO: 744197 - RNA, 19 nt, Artificial Sequence
  Description of Artificial Sequence: Synthetic oligonucleotide
auggcggagaguuggacau

SEQ ID NO: 744198 - RNA, 19 nt, Artificial Sequence
  Description of Artificial Sequence: Synthetic oligonucleotide
gacaaauacaaacgacgua

SEQ ID NO: 744199 - RNA, 19 nt, Artificial Sequence
  Description of Artificial Sequence: Synthetic oligonucleotide
ccguaguccacuuacaauc

SEQ ID NO: 744200 - RNA, 19 nt, Artificial Sequence
  Description of Artificial Sequence: Synthetic oligonucleotide
cacccgacagaguggaacc

SEQ ID NO: 744201 - RNA, 19 nt, Artificial Sequence
  Description of Artificial Sequence: Synthetic oligonucleotide
cacaacggacgucagggac

SEQ ID NO: 744202 - RNA, 19 nt, Artificial Sequence
  Description of Artificial Sequence: Synthetic oligonucleotide
cucuaagauuccuggucag

SEQ ID NO: 744203 - RNA, 19 nt, Artificial Sequence
  Description of Artificial Sequence: Synthetic oligonucleotide
ucuugcuuucggcuuuacu

SEQ ID NO: 744204 - RNA, 19 nt, Artificial Sequence
  Description of Artificial Sequence: Synthetic oligonucleotide
agaagguugagacgaucaa

SEQ ID NO: 744205 - RNA, 19 nt, Artificial Sequence
  Description of Artificial Sequence: Synthetic oligonucleotide
gcuaccguaguccacuuac

SEQ ID NO: 744206 - RNA, 19 nt, Artificial Sequence
  Description of Artificial Sequence: Synthetic oligonucleotide
ggacuugugaucccaggcc

SEQ ID NO: 744207 - RNA, 19 nt, Artificial Sequence
  Description of Artificial Sequence: Synthetic oligonucleotide
uugguauauggcguacucu

SEQ ID NO: 744208 - RNA, 19 nt, Artificial Sequence
  Description of Artificial Sequence: Synthetic oligonucleotide
aguacuguauggauccaca

SEQ ID NO: 744209 - RNA, 19 nt, Artificial Sequence
  Description of Artificial Sequence: Synthetic oligonucleotide
ucacucagucaccauucuc

SEQ ID NO: 744210 - RNA, 19 nt, Artificial Sequence
  Description of Artificial Sequence: Synthetic oligonucleotide
aacauccaauccauacugu

SEQ ID NO: 744211 - RNA, 19 nt, Artificial Sequence
  Description of Artificial Sequence: Synthetic oligonucleotide
aucccgacaguuucugacu

SEQ ID NO: 744212 - RNA, 19 nt, Artificial Sequence
  Description of Artificial Sequence: Synthetic oligonucleotide
gguugagacgaucaaugca

SEQ ID NO: 744213 - RNA, 19 nt, Artificial Sequence
  Description of Artificial Sequence: Synthetic oligonucleotide
uaagaauauggcggagagu

SEQ ID NO: 744214 - RNA, 19 nt, Artificial Sequence
  Description of Artificial Sequence: Synthetic oligonucleotide
ucuuaucacccgacagagu

SEQ ID NO: 744215 - RNA, 19 nt, Artificial Sequence
  Description of Artificial Sequence: Synthetic oligonucleotide
guauauggcguacucuuua

SEQ ID NO: 744216 - RNA, 19 nt, Artificial Sequence
  Description of Artificial Sequence: Synthetic oligonucleotide
uugcacaccucccgagaug

SEQ ID NO: 744217 - RNA, 19 nt, Artificial Sequence
  Description of Artificial Sequence: Synthetic oligonucleotide
  modified_base (6)..(6): a, c, u, g, unknown or other
uggganccggagcugcugu

SEQ ID NO: 744218 - RNA, 19 nt, Artificial Sequence
  Description of Artificial Sequence: Synthetic oligonucleotide
guacuagucauggggaaca

SEQ ID NO: 744219 - RNA, 19 nt, Artificial Sequence
  Description of Artificial Sequence: Synthetic oligonucleotide
agucucggggaguucucag

SEQ ID NO: 744220 - RNA, 19 nt, Artificial Sequence
  Description of Artificial Sequence: Synthetic oligonucleotide
accguaguccacuuacaau

SEQ ID NO: 744221 - RNA, 19 nt, Artificial Sequence
  Description of Artificial Sequence: Synthetic oligonucleotide
ggaccuugcacaccucccg

SEQ ID NO: 744222 - RNA, 19 nt, Artificial Sequence
  Description of Artificial Sequence: Synthetic oligonucleotide
agacuugacguuaugcaaa

SEQ ID NO: 744223 - RNA, 19 nt, Artificial Sequence
  Description of Artificial Sequence: Synthetic oligonucleotide
caguguuuacugaccauca

SEQ ID NO: 744224 - RNA, 19 nt, Artificial Sequence
  Description of Artificial Sequence: Synthetic oligonucleotide
gugaaucuaguuuaguauu

SEQ ID NO: 744225 - RNA, 19 nt, Artificial Sequence
  Description of Artificial Sequence: Synthetic oligonucleotide
ugguuggcgacuugcuggu

SEQ ID NO: 744226 - RNA, 19 nt, Artificial Sequence
  Description of Artificial Sequence: Synthetic oligonucleotide
aucgcauauuaaaucacaa

SEQ ID NO: 744227 - RNA, 19 nt, Artificial Sequence
  Description of Artificial Sequence: Synthetic oligonucleotide
ggggauagagaucuuagua

SEQ ID NO: 744228 - RNA, 19 nt, Artificial Sequence
  Description of Artificial Sequence: Synthetic oligonucleotide
aacggcuaccguaguccac

SEQ ID NO: 744229 - RNA, 19 nt, Artificial Sequence
  Description of Artificial Sequence: Synthetic oligonucleotide
agagugaaucuaguuuagu

SEQ ID NO: 744230 - RNA, 19 nt, Artificial Sequence
  Description of Artificial Sequence: Synthetic oligonucleotide
gaacggcuaccguagucca

SEQ ID NO: 744231 - RNA, 19 nt, Artificial Sequence
  Description of Artificial Sequence: Synthetic oligonucleotide
gguauuauguuggccccag

SEQ ID NO: 744232 - RNA, 19 nt, Artificial Sequence
  Description of Artificial Sequence: Synthetic oligonucleotide
  modified_base (8)..(8): a, c, u, g, unknown or other
ucuggganccggagcugcu

SEQ ID NO: 744233 - RNA, 19 nt, Artificial Sequence
  Description of Artificial Sequence: Synthetic oligonucleotide
caacggacgucagggaccc

SEQ ID NO: 744234 - RNA, 19 nt, Artificial Sequence
  Description of Artificial Sequence: Synthetic oligonucleotide
cuuacaacccuagauaauu

SEQ ID NO: 744235 - RNA, 19 nt, Artificial Sequence
  Description of Artificial Sequence: Synthetic oligonucleotide
gcgcauaacagauucucuc

SEQ ID NO: 744236 - RNA, 19 nt, Artificial Sequence
  Description of Artificial Sequence: Synthetic oligonucleotide
  modified_base (3)..(3): a, c, u, g, unknown or other
ganccggagcugcuguauc

SEQ ID NO: 744237 - RNA, 19 nt, Artificial Sequence
  Description of Artificial Sequence: Synthetic oligonucleotide
guuuguugguauauggcgu

SEQ ID NO: 744238 - RNA, 19 nt, Artificial Sequence
  Description of Artificial Sequence: Synthetic oligonucleotide
uuaggucagaagguugguu

SEQ ID NO: 744239 - RNA, 19 nt, Artificial Sequence
  Description of Artificial Sequence: Synthetic oligonucleotide
acggcuaccguaguccacu

SEQ ID NO: 744240 - RNA, 19 nt, Artificial Sequence
  Description of Artificial Sequence: Synthetic oligonucleotide
gcuaugaucagggcauuug

SEQ ID NO: 744241 - RNA, 19 nt, Artificial Sequence
  Description of Artificial Sequence: Synthetic oligonucleotide
cauauugaguuuguuggua

SEQ ID NO: 744242 - RNA, 19 nt, Artificial Sequence
  Description of Artificial Sequence: Synthetic oligonucleotide
acaacccuagauaauuauu

SEQ ID NO: 744243 - RNA, 19 nt, Artificial Sequence
  Description of Artificial Sequence: Synthetic oligonucleotide
cagguaaagcuuugccuca

SEQ ID NO: 744244 - RNA, 19 nt, Artificial Sequence
  Description of Artificial Sequence: Synthetic oligonucleotide
gaucccaggcccgauggga

SEQ ID NO: 744245 - RNA, 19 nt, Artificial Sequence
  Description of Artificial Sequence: Synthetic oligonucleotide
ccauccggcgcucuguucc

SEQ ID NO: 744246 - RNA, 19 nt, Artificial Sequence
  Description of Artificial Sequence: Synthetic oligonucleotide
gauggguguagggagcgaa

SEQ ID NO: 744247 - RNA, 19 nt, Artificial Sequence
  Description of Artificial Sequence: Synthetic oligonucleotide
gggauagagaucuuaguau

SEQ ID NO: 744248 - RNA, 19 nt, Artificial Sequence
  Description of Artificial Sequence: Synthetic oligonucleotide
auccacuuauuagcuucuc

SEQ ID NO: 744249 - RNA, 19 nt, Artificial Sequence
  Description of Artificial Sequence: Synthetic oligonucleotide
agaauauggcggagaguug

SEQ ID NO: 744250 - RNA, 19 nt, Artificial Sequence
  Description of Artificial Sequence: Synthetic oligonucleotide
gaccuugcacaccucccga

SEQ ID NO: 744251 - RNA, 19 nt, Artificial Sequence
  Description of Artificial Sequence: Synthetic oligonucleotide
cguuaugcaaaaucccgac

SEQ ID NO: 744252 - RNA, 19 nt, Artificial Sequence
  Description of Artificial Sequence: Synthetic oligonucleotide
uccgguuaccaugcugaga

SEQ ID NO: 744253 - RNA, 19 nt, Artificial Sequence
  Description of Artificial Sequence: Synthetic oligonucleotide
ggcccgaugggacugucug

SEQ ID NO: 744254 - RNA, 19 nt, Artificial Sequence
  Description of Artificial Sequence: Synthetic oligonucleotide
acuuacaacccuagauaau

SEQ ID NO: 744255 - RNA, 19 nt, Artificial Sequence
  Description of Artificial Sequence: Synthetic oligonucleotide
acgacguaaccaauccacu

SEQ ID NO: 744256 - RNA, 19 nt, Artificial Sequence
  Description of Artificial Sequence: Synthetic oligonucleotide
gaagguugagacgaucaau

SEQ ID NO: 744257 - RNA, 19 nt, Artificial Sequence
  Description of Artificial Sequence: Synthetic oligonucleotide
caguuacccaguaggcuga

SEQ ID NO: 744258 - RNA, 19 nt, Artificial Sequence
  Description of Artificial Sequence: Synthetic oligonucleotide
gucgcuaugaucagggcau

SEQ ID NO: 744259 - RNA, 19 nt, Artificial Sequence
  Description of Artificial Sequence: Synthetic oligonucleotide
guuggcgacuugcuggucu

SEQ ID NO: 744260 - RNA, 19 nt, Artificial Sequence
  Description of Artificial Sequence: Synthetic oligonucleotide
cauccggcgcucuguuccc

SEQ ID NO: 744261 - RNA, 19 nt, Artificial Sequence
  Description of Artificial Sequence: Synthetic oligonucleotide
agguauuauguuggcccca

SEQ ID NO: 744262 - RNA, 19 nt, Artificial Sequence
  Description of Artificial Sequence: Synthetic oligonucleotide
cacuuacugcuuuauugua

SEQ ID NO: 744263 - RNA, 19 nt, Artificial Sequence
  Description of Artificial Sequence: Synthetic oligonucleotide
guuacagaacggcuaccgu

SEQ ID NO: 744264 - RNA, 19 nt, Artificial Sequence
  Description of Artificial Sequence: Synthetic oligonucleotide
cuaccguaguccacuuaca

SEQ ID NO: 744265 - RNA, 19 nt, Artificial Sequence
  Description of Artificial Sequence: Synthetic oligonucleotide
  modified_base (7)..(7): a, c, u, g, unknown or other
cuggganccggagcugcug

SEQ ID NO: 744266 - RNA, 19 nt, Artificial Sequence
  Description of Artificial Sequence: Synthetic oligonucleotide
acaguacuuuccaucgcau

SEQ ID NO: 744267 - RNA, 19 nt, Artificial Sequence
  Description of Artificial Sequence: Synthetic oligonucleotide
gcacaguuacccaguaggc

SEQ ID NO: 744268 - RNA, 19 nt, Artificial Sequence
  Description of Artificial Sequence: Synthetic oligonucleotide
auggaagucucggggaguu

SEQ ID NO: 744269 - RNA, 19 nt, Artificial Sequence
  Description of Artificial Sequence: Synthetic oligonucleotide
uacuagucauggggaacaa

SEQ ID NO: 744270 - RNA, 19 nt, Artificial Sequence
  Description of Artificial Sequence: Synthetic oligonucleotide
cuacaggcguccucuggga

SEQ ID NO: 744271 - RNA, 19 nt, Artificial Sequence
  Description of Artificial Sequence: Synthetic oligonucleotide
ucgccuuguacuggcugga

SEQ ID NO: 744272 - RNA, 19 nt, Artificial Sequence
  Description of Artificial Sequence: Synthetic oligonucleotide
acuagucauggggaacaaa

SEQ ID NO: 744273 - RNA, 19 nt, Artificial Sequence
  Description of Artificial Sequence: Synthetic oligonucleotide
gggcgcauaacagauucuc

SEQ ID NO: 744274 - RNA, 19 nt, Artificial Sequence
  Description of Artificial Sequence: Synthetic oligonucleotide
ccgacaguuucugacuggc

SEQ ID NO: 744275 - RNA, 19 nt, Artificial Sequence
  Description of Artificial Sequence: Synthetic oligonucleotide
caguugggacaucaagaaa

SEQ ID NO: 744276 - RNA, 19 nt, Artificial Sequence
  Description of Artificial Sequence: Synthetic oligonucleotide
caguacuuuccaucgcaua

SEQ ID NO: 744277 - RNA, 19 nt, Artificial Sequence
  Description of Artificial Sequence: Synthetic oligonucleotide
agcggggauagagaucuua

SEQ ID NO: 744278 - RNA, 19 nt, Artificial Sequence
  Description of Artificial Sequence: Synthetic oligonucleotide
ggucugacugucgcuauga

SEQ ID NO: 744279 - RNA, 19 nt, Artificial Sequence
  Description of Artificial Sequence: Synthetic oligonucleotide
aacggacgucagggacccc

SEQ ID NO: 744280 - RNA, 19 nt, Artificial Sequence
  Description of Artificial Sequence: Synthetic oligonucleotide
ccacuuacugcuuuauugu

SEQ ID NO: 744281 - RNA, 19 nt, Artificial Sequence
  Description of Artificial Sequence: Synthetic oligonucleotide
cccgacaguuucugacugg

SEQ ID NO: 744282 - RNA, 19 nt, Artificial Sequence
  Description of Artificial Sequence: Synthetic oligonucleotide
uccggcgcucuguucccgu

SEQ ID NO: 744283 - RNA, 19 nt, Artificial Sequence
  Description of Artificial Sequence: Synthetic oligonucleotide
acuugacguuaugcaaaau

SEQ ID NO: 744284 - RNA, 19 nt, Artificial Sequence
  Description of Artificial Sequence: Synthetic oligonucleotide
ggcguacucuuuaggucag

SEQ ID NO: 744285 - RNA, 19 nt, Artificial Sequence
  Description of Artificial Sequence: Synthetic oligonucleotide
cuugcacaccucccgagau

SEQ ID NO: 744286 - RNA, 19 nt, Artificial Sequence
  Description of Artificial Sequence: Synthetic oligonucleotide
ggaagucucggggaguucu

SEQ ID NO: 744287 - RNA, 19 nt, Artificial Sequence
  Description of Artificial Sequence: Synthetic oligonucleotide
auccggcgcucuguucccg

SEQ ID NO: 744288 - RNA, 19 nt, Artificial Sequence
  Description of Artificial Sequence: Synthetic oligonucleotide
ccuucgugucgaaccacuc

SEQ ID NO: 744289 - RNA, 19 nt, Artificial Sequence
  Description of Artificial Sequence: Synthetic oligonucleotide
guacuuuccaucgcauauu

SEQ ID NO: 744290 - RNA, 19 nt, Artificial Sequence
  Description of Artificial Sequence: Synthetic oligonucleotide
gcccgaugggacugucugc

SEQ ID NO: 744291 - RNA, 19 nt, Artificial Sequence
  Description of Artificial Sequence: Synthetic oligonucleotide
ucgguccgaggugguuuug

SEQ ID NO: 744292 - RNA, 19 nt, Artificial Sequence
  Description of Artificial Sequence: Synthetic oligonucleotide
cuuucggcuuuacucucau

SEQ ID NO: 744293 - RNA, 19 nt, Artificial Sequence
  Description of Artificial Sequence: Synthetic oligonucleotide
cauuugcagauagaauguu

SEQ ID NO: 744294 - RNA, 19 nt, Artificial Sequence
  Description of Artificial Sequence: Synthetic oligonucleotide
ccauauugaguuuguuggu

SEQ ID NO: 744295 - RNA, 19 nt, Artificial Sequence
  Description of Artificial Sequence: Synthetic oligonucleotide
ucgcuaugaucagggcauu

SEQ ID NO: 744296 - RNA, 19 nt, Artificial Sequence
  Description of Artificial Sequence: Synthetic oligonucleotide
cgacagaguggaaccauca

SEQ ID NO: 744297 - RNA, 19 nt, Artificial Sequence
  Description of Artificial Sequence: Synthetic oligonucleotide
cugggaccuugcacaccuc

SEQ ID NO: 744298 - RNA, 19 nt, Artificial Sequence
  Description of Artificial Sequence: Synthetic oligonucleotide
cacaccucccgagaugggu

SEQ ID NO: 744299 - RNA, 19 nt, Artificial Sequence
  Description of Artificial Sequence: Synthetic oligonucleotide
uggcgacuugcuggucuuc

SEQ ID NO: 744300 - RNA, 19 nt, Artificial Sequence
  Description of Artificial Sequence: Synthetic oligonucleotide
uggcggagaguuggacauu

SEQ ID NO: 744301 - RNA, 19 nt, Artificial Sequence
  Description of Artificial Sequence: Synthetic oligonucleotide
aggcccgaugggacugucu

SEQ ID NO: 744302 - RNA, 19 nt, Artificial Sequence
  Description of Artificial Sequence: Synthetic oligonucleotide
cguaguccacuuacaaucu

SEQ ID NO: 744303 - RNA, 19 nt, Artificial Sequence
  Description of Artificial Sequence: Synthetic oligonucleotide
gguauauggcguacucuuu

SEQ ID NO: 744304 - RNA, 19 nt, Artificial Sequence
  Description of Artificial Sequence: Synthetic oligonucleotide
caucgguccgaggugguuu

SEQ ID NO: 744305 - RNA, 19 nt, Artificial Sequence
  Description of Artificial Sequence: Synthetic oligonucleotide
  modified_base (4)..(4): a, c, u, g, unknown or other
gganccggagcugcuguau

SEQ ID NO: 744306 - RNA, 19 nt, Artificial Sequence
  Description of Artificial Sequence: Synthetic oligonucleotide
  modified_base (5)..(5): a, c, u, g, unknown or other
ggganccggagcugcugua

SEQ ID NO: 744307 - RNA, 19 nt, Artificial Sequence
  Description of Artificial Sequence: Synthetic oligonucleotide
cuugagcuacaggcguccu

SEQ ID NO: 744308 - RNA, 19 nt, Artificial Sequence
  Description of Artificial Sequence: Synthetic oligonucleotide
ggagaccuccaagcgcaaa

SEQ ID NO: 744309 - RNA, 19 nt, Artificial Sequence
  Description of Artificial Sequence: Synthetic oligonucleotide
cggcgcucuguucccgugg

SEQ ID NO: 744310 - RNA, 19 nt, Artificial Sequence
  Description of Artificial Sequence: Synthetic oligonucleotide
aucacccgacagaguggaa

SEQ ID NO: 744311 - RNA, 19 nt, Artificial Sequence
  Description of Artificial Sequence: Synthetic oligonucleotide
ggcuaccguaguccacuua

SEQ ID NO: 744312 - RNA, 19 nt, Artificial Sequence
  Description of Artificial Sequence: Synthetic oligonucleotide
ggcggagaguuggacauuu

SEQ ID NO: 744313 - RNA, 19 nt, Artificial Sequence
  Description of Artificial Sequence: Synthetic oligonucleotide
cccgaugggacugucugcu

SEQ ID NO: 744314 - RNA, 19 nt, Artificial Sequence
  Description of Artificial Sequence: Synthetic oligonucleotide
caaccaccacuuacugcuu

SEQ ID NO: 744315 - RNA, 19 nt, Artificial Sequence
  Description of Artificial Sequence: Synthetic oligonucleotide
cccauccggcgcucuguuc

SEQ ID NO: 744316 - RNA, 19 nt, Artificial Sequence
  Description of Artificial Sequence: Synthetic oligonucleotide
ccaauccacuuauuagcuu

SEQ ID NO: 744317 - RNA, 19 nt, Artificial Sequence
  Description of Artificial Sequence: Synthetic oligonucleotide
cgguuaccaugcugagaug

SEQ ID NO: 744318 - RNA, 19 nt, Artificial Sequence
  Description of Artificial Sequence: Synthetic oligonucleotide
ccggcgcucuguucccgug

SEQ ID NO: 744319 - RNA, 19 nt, Artificial Sequence
  Description of Artificial Sequence: Synthetic oligonucleotide
gcggagaguuggacauuuc

SEQ ID NO: 744320 - RNA, 19 nt, Artificial Sequence
  Description of Artificial Sequence: Synthetic oligonucleotide
gguuggcgacuugcugguc

SEQ ID NO: 744321 - RNA, 19 nt, Artificial Sequence
  Description of Artificial Sequence: Synthetic oligonucleotide
cggggauagagaucuuagu

SEQ ID NO: 744322 - RNA, 19 nt, Artificial Sequence
  Description of Artificial Sequence: Synthetic oligonucleotide
ccgugggcaucgguccgag

SEQ ID NO: 744323 - RNA, 19 nt, Artificial Sequence
  Description of Artificial Sequence: Synthetic oligonucleotide
gcguacucuuuaggucaga

SEQ ID NO: 744324 - RNA, 19 nt, Artificial Sequence
  Description of Artificial Sequence: Synthetic oligonucleotide
cccgugggcaucgguccga

SEQ ID NO: 744325 - RNA, 19 nt, Artificial Sequence
  Description of Artificial Sequence: Synthetic oligonucleotide
cccgacagaguggaaccau

SEQ ID NO: 744326 - RNA, 19 nt, Artificial Sequence
  Description of Artificial Sequence: Synthetic oligonucleotide
gcaucgguccgaggugguu

SEQ ID NO: 744327 - RNA, 19 nt, Artificial Sequence
  Description of Artificial Sequence: Synthetic oligonucleotide
cgcuaugaucagggcauuu

SEQ ID NO: 744328 - RNA, 19 nt, Artificial Sequence
  Description of Artificial Sequence: Synthetic oligonucleotide
ccacuccguccaggucuga

SEQ ID NO: 744329 - RNA, 19 nt, Artificial Sequence
  Description of Artificial Sequence: Synthetic oligonucleotide
cggcuaccguaguccacuu

SEQ ID NO: 744330 - RNA, 19 nt, Artificial Sequence
  Description of Artificial Sequence: Synthetic oligonucleotide
  modified_base (1)..(1): a, c, u, g, unknown or other
nccggagcugcuguauccu

SEQ ID NO: 744331 - RNA, 19 nt, Artificial Sequence
  Description of Artificial Sequence: Synthetic oligonucleotide
aaagauuagauauggaggc

SEQ ID NO: 744332 - RNA, 19 nt, Artificial Sequence
  Description of Artificial Sequence: Synthetic oligonucleotide
uaaguauucucucagaucc

SEQ ID NO: 744333 - RNA, 19 nt, Artificial Sequence
  Description of Artificial Sequence: Synthetic oligonucleotide
aucauuauggagcagcugc

SEQ ID NO: 744334 - RNA, 19 nt, Artificial Sequence
  Description of Artificial Sequence: Synthetic oligonucleotide
gagacugccgcuuagaccg

SEQ ID NO: 744335 - RNA, 19 nt, Artificial Sequence
  Description of Artificial Sequence: Synthetic oligonucleotide
ugugauauccuccagugag

SEQ ID NO: 744336 - RNA, 19 nt, Artificial Sequence
  Description of Artificial Sequence: Synthetic oligonucleotide
caaaagauuagauauggag

SEQ ID NO: 744337 - RNA, 19 nt, Artificial Sequence
  Description of Artificial Sequence: Synthetic oligonucleotide
aaugugaucaucuggggca

SEQ ID NO: 744338 - RNA, 19 nt, Artificial Sequence
  Description of Artificial Sequence: Synthetic oligonucleotide
auuccuagaaucucaagac

SEQ ID NO: 744339 - RNA, 19 nt, Artificial Sequence
  Description of Artificial Sequence: Synthetic oligonucleotide
accuaugauagacagaagg

SEQ ID NO: 744340 - RNA, 19 nt, Artificial Sequence
  Description of Artificial Sequence: Synthetic oligonucleotide
gaagguauccaucuguagg

SEQ ID NO: 744341 - RNA, 19 nt, Artificial Sequence
  Description of Artificial Sequence: Synthetic oligonucleotide
uaauucauaccacuugccg

SEQ ID NO: 744342 - RNA, 19 nt, Artificial Sequence
  Description of Artificial Sequence: Synthetic oligonucleotide
uguaauucauaccacuugc

SEQ ID NO: 744343 - RNA, 19 nt, Artificial Sequence
  Description of Artificial Sequence: Synthetic oligonucleotide
gaaaguaggcuucaacacg

SEQ ID NO: 744344 - RNA, 19 nt, Artificial Sequence
  Description of Artificial Sequence: Synthetic oligonucleotide
agugguaccaucauaugcc

SEQ ID NO: 744345 - RNA, 19 nt, Artificial Sequence
  Description of Artificial Sequence: Synthetic oligonucleotide
guuagcuucauguuuauuc

SEQ ID NO: 744346 - RNA, 19 nt, Artificial Sequence
  Description of Artificial Sequence: Synthetic oligonucleotide
uugcaacaauucaagaagg

SEQ ID NO: 744347 - RNA, 19 nt, Artificial Sequence
  Description of Artificial Sequence: Synthetic oligonucleotide
uuagcuucauguuuauucc

SEQ ID NO: 744348 - RNA, 19 nt, Artificial Sequence
  Description of Artificial Sequence: Synthetic oligonucleotide
uaugugauauccuccagug

SEQ ID NO: 744349 - RNA, 19 nt, Artificial Sequence
  Description of Artificial Sequence: Synthetic oligonucleotide
aaguacuugccacacacca

SEQ ID NO: 744350 - RNA, 19 nt, Artificial Sequence
  Description of Artificial Sequence: Synthetic oligonucleotide
aaaaccaucuaccuaugau

SEQ ID NO: 744351 - RNA, 19 nt, Artificial Sequence
  Description of Artificial Sequence: Synthetic oligonucleotide
uagauauggaggcagcuug

SEQ ID NO: 744352 - RNA, 19 nt, Artificial Sequence
  Description of Artificial Sequence: Synthetic oligonucleotide
uaugcauuaauaugugaga

SEQ ID NO: 744353 - RNA, 19 nt, Artificial Sequence
  Description of Artificial Sequence: Synthetic oligonucleotide
cuuaguaaaucucuugaug

SEQ ID NO: 744354 - RNA, 19 nt, Artificial Sequence
  Description of Artificial Sequence: Synthetic oligonucleotide
auaugcauuaauaugugag

SEQ ID NO: 744355 - RNA, 19 nt, Artificial Sequence
  Description of Artificial Sequence: Synthetic oligonucleotide
agucacaauagucuucuuc

SEQ ID NO: 744356 - RNA, 19 nt, Artificial Sequence
  Description of Artificial Sequence: Synthetic oligonucleotide
aaugguauccagguauggg

SEQ ID NO: 744357 - RNA, 19 nt, Artificial Sequence
  Description of Artificial Sequence: Synthetic oligonucleotide
caugaggagaaacaugugc

SEQ ID NO: 744358 - RNA, 19 nt, Artificial Sequence
  Description of Artificial Sequence: Synthetic oligonucleotide
gaaaguaguuccgaagagg

SEQ ID NO: 744359 - RNA, 19 nt, Artificial Sequence
  Description of Artificial Sequence: Synthetic oligonucleotide
ugagagggaaauagaacag

SEQ ID NO: 744360 - RNA, 19 nt, Artificial Sequence
  Description of Artificial Sequence: Synthetic oligonucleotide
acugcauuugcauagucgu

SEQ ID NO: 744361 - RNA, 19 nt, Artificial Sequence
  Description of Artificial Sequence: Synthetic oligonucleotide
auaugugagagggaaauag

SEQ ID NO: 744362 - RNA, 19 nt, Artificial Sequence
  Description of Artificial Sequence: Synthetic oligonucleotide
aaaguaguuccgaagagga

SEQ ID NO: 744363 - RNA, 19 nt, Artificial Sequence
  Description of Artificial Sequence: Synthetic oligonucleotide
acuccuguuaaugguaucc

SEQ ID NO: 744364 - RNA, 19 nt, Artificial Sequence
  Description of Artificial Sequence: Synthetic oligonucleotide
cuauaggaaaaccaucuac

SEQ ID NO: 744365 - RNA, 19 nt, Artificial Sequence
  Description of Artificial Sequence: Synthetic oligonucleotide
aucuaccuaugauagacag

SEQ ID NO: 744366 - RNA, 19 nt, Artificial Sequence
  Description of Artificial Sequence: Synthetic oligonucleotide
gcauuaauaugugagaggg

SEQ ID NO: 744367 - RNA, 19 nt, Artificial Sequence
  Description of Artificial Sequence: Synthetic oligonucleotide
acaugauauccccuggagg

SEQ ID NO: 744368 - RNA, 19 nt, Artificial Sequence
  Description of Artificial Sequence: Synthetic oligonucleotide
acacguaugugauauccuc

SEQ ID NO: 744369 - RNA, 19 nt, Artificial Sequence
  Description of Artificial Sequence: Synthetic oligonucleotide
uaugcccgggauaauuugg

SEQ ID NO: 744370 - RNA, 19 nt, Artificial Sequence
  Description of Artificial Sequence: Synthetic oligonucleotide
uuaaugguauccagguaug

SEQ ID NO: 744371 - RNA, 19 nt, Artificial Sequence
  Description of Artificial Sequence: Synthetic oligonucleotide
guaggcaugagacuucaag

SEQ ID NO: 744372 - RNA, 19 nt, Artificial Sequence
  Description of Artificial Sequence: Synthetic oligonucleotide
aaguuugcaauuugcugcu

SEQ ID NO: 744373 - RNA, 19 nt, Artificial Sequence
  Description of Artificial Sequence: Synthetic oligonucleotide
agagcauucagaaaccaag

SEQ ID NO: 744374 - RNA, 19 nt, Artificial Sequence
  Description of Artificial Sequence: Synthetic oligonucleotide
agcacacuccuguuaaugg

SEQ ID NO: 744375 - RNA, 19 nt, Artificial Sequence
  Description of Artificial Sequence: Synthetic oligonucleotide
ugaauguaugccucggaca

SEQ ID NO: 744376 - RNA, 19 nt, Artificial Sequence
  Description of Artificial Sequence: Synthetic oligonucleotide
agaaaguaguuccgaagag

SEQ ID NO: 744377 - RNA, 19 nt, Artificial Sequence
  Description of Artificial Sequence: Synthetic oligonucleotide
ugugaaaguaggcuucaac

SEQ ID NO: 744378 - RNA, 19 nt, Artificial Sequence
  Description of Artificial Sequence: Synthetic oligonucleotide
ugucggauucuucuccacg

SEQ ID NO: 744379 - RNA, 19 nt, Artificial Sequence
  Description of Artificial Sequence: Synthetic oligonucleotide
caagacgauguuuccaagg

SEQ ID NO: 744380 - RNA, 19 nt, Artificial Sequence
  Description of Artificial Sequence: Synthetic oligonucleotide
aagaggagggacauuugac

SEQ ID NO: 744381 - RNA, 19 nt, Artificial Sequence
  Description of Artificial Sequence: Synthetic oligonucleotide
aaaguaggcuucaacacgu

SEQ ID NO: 744382 - RNA, 19 nt, Artificial Sequence
  Description of Artificial Sequence: Synthetic oligonucleotide
aucauuaucccgccucuuc

SEQ ID NO: 744383 - RNA, 19 nt, Artificial Sequence
  Description of Artificial Sequence: Synthetic oligonucleotide
uucucucagauccacauuu

SEQ ID NO: 744384 - RNA, 19 nt, Artificial Sequence
  Description of Artificial Sequence: Synthetic oligonucleotide
cagauaaguauucucucag

SEQ ID NO: 744385 - RNA, 19 nt, Artificial Sequence
  Description of Artificial Sequence: Synthetic oligonucleotide
ugcauuugcauagucguug

SEQ ID NO: 744386 - RNA, 19 nt, Artificial Sequence
  Description of Artificial Sequence: Synthetic oligonucleotide
ggucuuguaauucauacca

SEQ ID NO: 744387 - RNA, 19 nt, Artificial Sequence
  Description of Artificial Sequence: Synthetic oligonucleotide
agaccggcuagacaucgcc

SEQ ID NO: 744388 - RNA, 19 nt, Artificial Sequence
  Description of Artificial Sequence: Synthetic oligonucleotide
aaacaugugccuugaaguu

SEQ ID NO: 744389 - RNA, 19 nt, Artificial Sequence
  Description of Artificial Sequence: Synthetic oligonucleotide
ggaaccaugagacugccgc

SEQ ID NO: 744390 - RNA, 19 nt, Artificial Sequence
  Description of Artificial Sequence: Synthetic oligonucleotide
cucgccaaaacgcuggacc

SEQ ID NO: 744391 - RNA, 19 nt, Artificial Sequence
  Description of Artificial Sequence: Synthetic oligonucleotide
augcauuaauaugugagag

SEQ ID NO: 744392 - RNA, 19 nt, Artificial Sequence
  Description of Artificial Sequence: Synthetic oligonucleotide
ggauaauuuggcuugcuug

SEQ ID NO: 744393 - RNA, 19 nt, Artificial Sequence
  Description of Artificial Sequence: Synthetic oligonucleotide
gaauguaugccucggacaa

SEQ ID NO: 744394 - RNA, 19 nt, Artificial Sequence
  Description of Artificial Sequence: Synthetic oligonucleotide
gagacuucaagccccggcc

SEQ ID NO: 744395 - RNA, 19 nt, Artificial Sequence
  Description of Artificial Sequence: Synthetic oligonucleotide
uuuauguuguucagcccca

SEQ ID NO: 744396 - RNA, 19 nt, Artificial Sequence
  Description of Artificial Sequence: Synthetic oligonucleotide
gucagguacaugaacgugg

SEQ ID NO: 744397 - RNA, 19 nt, Artificial Sequence
  Description of Artificial Sequence: Synthetic oligonucleotide
acaaugugaucaucugggg

SEQ ID NO: 744398 - RNA, 19 nt, Artificial Sequence
  Description of Artificial Sequence: Synthetic oligonucleotide
cacugcauuugcauagucg

SEQ ID NO: 744399 - RNA, 19 nt, Artificial Sequence
  Description of Artificial Sequence: Synthetic oligonucleotide
auuugcugcuuugugaaag

SEQ ID NO: 744400 - RNA, 19 nt, Artificial Sequence
  Description of Artificial Sequence: Synthetic oligonucleotide
accggcuagacaucgccgc

SEQ ID NO: 744401 - RNA, 19 nt, Artificial Sequence
  Description of Artificial Sequence: Synthetic oligonucleotide
gaaguugacaauugucgga

SEQ ID NO: 744402 - RNA, 19 nt, Artificial Sequence
  Description of Artificial Sequence: Synthetic oligonucleotide
ugagacuucaagccccggc

SEQ ID NO: 744403 - RNA, 19 nt, Artificial Sequence
  Description of Artificial Sequence: Synthetic oligonucleotide
aagcacguggauccuguag

SEQ ID NO: 744404 - RNA, 19 nt, Artificial Sequence
  Description of Artificial Sequence: Synthetic oligonucleotide
cuugguacucaucauuaug

SEQ ID NO: 744405 - RNA, 19 nt, Artificial Sequence
  Description of Artificial Sequence: Synthetic oligonucleotide
cuugagaguauggagguug

SEQ ID NO: 744406 - RNA, 19 nt, Artificial Sequence
  Description of Artificial Sequence: Synthetic oligonucleotide
ucccgcuucacgcggaccg

SEQ ID NO: 744407 - RNA, 19 nt, Artificial Sequence
  Description of Artificial Sequence: Synthetic oligonucleotide
caaugugaucaucuggggc

SEQ ID NO: 744408 - RNA, 19 nt, Artificial Sequence
  Description of Artificial Sequence: Synthetic oligonucleotide
caacacguaugugauaucc

SEQ ID NO: 744409 - RNA, 19 nt, Artificial Sequence
  Description of Artificial Sequence: Synthetic oligonucleotide
uuagaccggcuagacaucg

SEQ ID NO: 744410 - RNA, 19 nt, Artificial Sequence
  Description of Artificial Sequence: Synthetic oligonucleotide
ucucauugaccccuggaaa

SEQ ID NO: 744411 - RNA, 19 nt, Artificial Sequence
  Description of Artificial Sequence: Synthetic oligonucleotide
uugaugcaaaagauuagau

SEQ ID NO: 744412 - RNA, 19 nt, Artificial Sequence
  Description of Artificial Sequence: Synthetic oligonucleotide
uugauacuugcaacaauuc

SEQ ID NO: 744413 - RNA, 19 nt, Artificial Sequence
  Description of Artificial Sequence: Synthetic oligonucleotide
ucaucauuauggagcagcu

SEQ ID NO: 744414 - RNA, 19 nt, Artificial Sequence
  Description of Artificial Sequence: Synthetic oligonucleotide
ugguauccagguaugggca

SEQ ID NO: 744415 - RNA, 19 nt, Artificial Sequence
  Description of Artificial Sequence: Synthetic oligonucleotide
cuaccuaugauagacagaa

SEQ ID NO: 744416 - RNA, 19 nt, Artificial Sequence
  Description of Artificial Sequence: Synthetic oligonucleotide
ugcuuugugaaaguaggcu

SEQ ID NO: 744417 - RNA, 19 nt, Artificial Sequence
  Description of Artificial Sequence: Synthetic oligonucleotide
auuugugauagggaaguug

SEQ ID NO: 744418 - RNA, 19 nt, Artificial Sequence
  Description of Artificial Sequence: Synthetic oligonucleotide
cacauuugugauagggaag

SEQ ID NO: 744419 - RNA, 19 nt, Artificial Sequence
  Description of Artificial Sequence: Synthetic oligonucleotide
auuugcauagucguuggcu

SEQ ID NO: 744420 - RNA, 19 nt, Artificial Sequence
  Description of Artificial Sequence: Synthetic oligonucleotide
ucauuauggagcagcugcu

SEQ ID NO: 744421 - RNA, 19 nt, Artificial Sequence
  Description of Artificial Sequence: Synthetic oligonucleotide
cagaguuucucaaagucga

SEQ ID NO: 744422 - RNA, 19 nt, Artificial Sequence
  Description of Artificial Sequence: Synthetic oligonucleotide
ugauauccccuggagggcg

SEQ ID NO: 744423 - RNA, 19 nt, Artificial Sequence
  Description of Artificial Sequence: Synthetic oligonucleotide
aggagaaacaugugccuug

SEQ ID NO: 744424 - RNA, 19 nt, Artificial Sequence
  Description of Artificial Sequence: Synthetic oligonucleotide
cagaaaguaguuccgaaga

SEQ ID NO: 744425 - RNA, 19 nt, Artificial Sequence
  Description of Artificial Sequence: Synthetic oligonucleotide
uaaugguauccagguaugg

SEQ ID NO: 744426 - RNA, 19 nt, Artificial Sequence
  Description of Artificial Sequence: Synthetic oligonucleotide
auagacagaaggaugcugu

SEQ ID NO: 744427 - RNA, 19 nt, Artificial Sequence
  Description of Artificial Sequence: Synthetic oligonucleotide
guaguuccgaagaggaggg

SEQ ID NO: 744428 - RNA, 19 nt, Artificial Sequence
  Description of Artificial Sequence: Synthetic oligonucleotide
agauaaguauucucucaga

SEQ ID NO: 744429 - RNA, 19 nt, Artificial Sequence
  Description of Artificial Sequence: Synthetic oligonucleotide
uaauugucuuccuccagaa

SEQ ID NO: 744430 - RNA, 19 nt, Artificial Sequence
  Description of Artificial Sequence: Synthetic oligonucleotide
uuuggcuugcuuguccaag

SEQ ID NO: 744431 - RNA, 19 nt, Artificial Sequence
  Description of Artificial Sequence: Synthetic oligonucleotide
ugaagcacguggauccugu

SEQ ID NO: 744432 - RNA, 19 nt, Artificial Sequence
  Description of Artificial Sequence: Synthetic oligonucleotide
agugaggaaucgaugaucu

SEQ ID NO: 744433 - RNA, 19 nt, Artificial Sequence
  Description of Artificial Sequence: Synthetic oligonucleotide
ucaagacgauguuuccaag

SEQ ID NO: 744434 - RNA, 19 nt, Artificial Sequence
  Description of Artificial Sequence: Synthetic oligonucleotide
gauuagauauggaggcagc

SEQ ID NO: 744435 - RNA, 19 nt, Artificial Sequence
  Description of Artificial Sequence: Synthetic oligonucleotide
cagcacugcauuugcauag

SEQ ID NO: 744436 - RNA, 19 nt, Artificial Sequence
  Description of Artificial Sequence: Synthetic oligonucleotide
uucuugaugcgacccgagc

SEQ ID NO: 744437 - RNA, 19 nt, Artificial Sequence
  Description of Artificial Sequence: Synthetic oligonucleotide
aagauuagauauggaggca

SEQ ID NO: 744438 - RNA, 19 nt, Artificial Sequence
  Description of Artificial Sequence: Synthetic oligonucleotide
gguacucaucauuauggag

SEQ ID NO: 744439 - RNA, 19 nt, Artificial Sequence
  Description of Artificial Sequence: Synthetic oligonucleotide
ugguacucaucauuaugga

SEQ ID NO: 744440 - RNA, 19 nt, Artificial Sequence
  Description of Artificial Sequence: Synthetic oligonucleotide
cauccuuguagaguggggc

SEQ ID NO: 744441 - RNA, 19 nt, Artificial Sequence
  Description of Artificial Sequence: Synthetic oligonucleotide
gaacuauaggaaaaccauc

SEQ ID NO: 744442 - RNA, 19 nt, Artificial Sequence
  Description of Artificial Sequence: Synthetic oligonucleotide
ugaaaguacuugccacaca

SEQ ID NO: 744443 - RNA, 19 nt, Artificial Sequence
  Description of Artificial Sequence: Synthetic oligonucleotide
gagaucauaagugguguuc

SEQ ID NO: 744444 - RNA, 19 nt, Artificial Sequence
  Description of Artificial Sequence: Synthetic oligonucleotide
aucauaagugguguucuug

SEQ ID NO: 744445 - RNA, 19 nt, Artificial Sequence
  Description of Artificial Sequence: Synthetic oligonucleotide
auaugcccgggauaauuug

SEQ ID NO: 744446 - RNA, 19 nt, Artificial Sequence
  Description of Artificial Sequence: Synthetic oligonucleotide
caugagacuucaagccccg

SEQ ID NO: 744447 - RNA, 19 nt, Artificial Sequence
  Description of Artificial Sequence: Synthetic oligonucleotide
acgcuggaccaacaggaac

SEQ ID NO: 744448 - RNA, 19 nt, Artificial Sequence
  Description of Artificial Sequence: Synthetic oligonucleotide
uugagaguauggagguuga

SEQ ID NO: 744449 - RNA, 19 nt, Artificial Sequence
  Description of Artificial Sequence: Synthetic oligonucleotide
ucagcucgccaaaacgcug

SEQ ID NO: 744450 - RNA, 19 nt, Artificial Sequence
  Description of Artificial Sequence: Synthetic oligonucleotide
gaccggacugccccgagag

SEQ ID NO: 744451 - RNA, 19 nt, Artificial Sequence
  Description of Artificial Sequence: Synthetic oligonucleotide
caccauugucucuugguac

SEQ ID NO: 744452 - RNA, 19 nt, Artificial Sequence
  Description of Artificial Sequence: Synthetic oligonucleotide
guuguucuuaguaaaucuc

SEQ ID NO: 744453 - RNA, 19 nt, Artificial Sequence
  Description of Artificial Sequence: Synthetic oligonucleotide
auugucggauucuucucca

SEQ ID NO: 744454 - RNA, 19 nt, Artificial Sequence
  Description of Artificial Sequence: Synthetic oligonucleotide
ucgccaaaacgcuggacca

SEQ ID NO: 744455 - RNA, 19 nt, Artificial Sequence
  Description of Artificial Sequence: Synthetic oligonucleotide
agucggcucggcuucccgc

SEQ ID NO: 744456 - RNA, 19 nt, Artificial Sequence
  Description of Artificial Sequence: Synthetic oligonucleotide
ucguuggcuuuuauguugu

SEQ ID NO: 744457 - RNA, 19 nt, Artificial Sequence
  Description of Artificial Sequence: Synthetic oligonucleotide
agacaucgccgccaccggc

SEQ ID NO: 744458 - RNA, 19 nt, Artificial Sequence
  Description of Artificial Sequence: Synthetic oligonucleotide
uguuaaugguauccaggua

SEQ ID NO: 744459 - RNA, 19 nt, Artificial Sequence
  Description of Artificial Sequence: Synthetic oligonucleotide
uccuguaggagcccucgga

SEQ ID NO: 744460 - RNA, 19 nt, Artificial Sequence
  Description of Artificial Sequence: Synthetic oligonucleotide
uagacaucgccgccaccgg

SEQ ID NO: 744461 - RNA, 19 nt, Artificial Sequence
  Description of Artificial Sequence: Synthetic oligonucleotide
caucucaugaggagaaaca

SEQ ID NO: 744462 - RNA, 19 nt, Artificial Sequence
  Description of Artificial Sequence: Synthetic oligonucleotide
uggcuuuuauguuguucag

SEQ ID NO: 744463 - RNA, 19 nt, Artificial Sequence
  Description of Artificial Sequence: Synthetic oligonucleotide
cauaccacuugccggugcc

SEQ ID NO: 744464 - RNA, 19 nt, Artificial Sequence
  Description of Artificial Sequence: Synthetic oligonucleotide
cauaagugguguucuugug

SEQ ID NO: 744465 - RNA, 19 nt, Artificial Sequence
  Description of Artificial Sequence: Synthetic oligonucleotide
auuagauauggaggcagcu

SEQ ID NO: 744466 - RNA, 19 nt, Artificial Sequence
  Description of Artificial Sequence: Synthetic oligonucleotide
ggggauaaugagcugcucc

SEQ ID NO: 744467 - RNA, 19 nt, Artificial Sequence
  Description of Artificial Sequence: Synthetic oligonucleotide
cuguaggagcccucggagg

SEQ ID NO: 744468 - RNA, 19 nt, Artificial Sequence
  Description of Artificial Sequence: Synthetic oligonucleotide
ggaacaugauauccccugg

SEQ ID NO: 744469 - RNA, 19 nt, Artificial Sequence
  Description of Artificial Sequence: Synthetic oligonucleotide
accggcuaggagcuuccgc

SEQ ID NO: 744470 - RNA, 19 nt, Artificial Sequence
  Description of Artificial Sequence: Synthetic oligonucleotide
uggauguaggcaugagacu

SEQ ID NO: 744471 - RNA, 19 nt, Artificial Sequence
  Description of Artificial Sequence: Synthetic oligonucleotide
cagcucgccaaaacgcugg

SEQ ID NO: 744472 - RNA, 19 nt, Artificial Sequence
  Description of Artificial Sequence: Synthetic oligonucleotide
gaaaaccaucuaccuauga

SEQ ID NO: 744473 - RNA, 19 nt, Artificial Sequence
  Description of Artificial Sequence: Synthetic oligonucleotide
ugccgcuuagaccggcuag

SEQ ID NO: 744474 - RNA, 19 nt, Artificial Sequence
  Description of Artificial Sequence: Synthetic oligonucleotide
aaguaguuccgaagaggag

SEQ ID NO: 744475 - RNA, 19 nt, Artificial Sequence
  Description of Artificial Sequence: Synthetic oligonucleotide
uccuuguagaguggggcag

SEQ ID NO: 744476 - RNA, 19 nt, Artificial Sequence
  Description of Artificial Sequence: Synthetic oligonucleotide
gaugcgacccgagcuaccc

SEQ ID NO: 744477 - RNA, 19 nt, Artificial Sequence
  Description of Artificial Sequence: Synthetic oligonucleotide
aacacguaugugauauccu

SEQ ID NO: 744478 - RNA, 19 nt, Artificial Sequence
  Description of Artificial Sequence: Synthetic oligonucleotide
cauaugcauuaauauguga

SEQ ID NO: 744479 - RNA, 19 nt, Artificial Sequence
  Description of Artificial Sequence: Synthetic oligonucleotide
aggaaggcaguaaaacuug

SEQ ID NO: 744480 - RNA, 19 nt, Artificial Sequence
  Description of Artificial Sequence: Synthetic oligonucleotide
ccaaguuugcaauuugcug

SEQ ID NO: 744481 - RNA, 19 nt, Artificial Sequence
  Description of Artificial Sequence: Synthetic oligonucleotide
uugugauagggaaguugac

SEQ ID NO: 744482 - RNA, 19 nt, Artificial Sequence
  Description of Artificial Sequence: Synthetic oligonucleotide
uuagauauggaggcagcuu

SEQ ID NO: 744483 - RNA, 19 nt, Artificial Sequence
  Description of Artificial Sequence: Synthetic oligonucleotide
caauugucggauucuucuc

SEQ ID NO: 744484 - RNA, 19 nt, Artificial Sequence
  Description of Artificial Sequence: Synthetic oligonucleotide
ggcaugagacuucaagccc

SEQ ID NO: 744485 - RNA, 19 nt, Artificial Sequence
  Description of Artificial Sequence: Synthetic oligonucleotide
uucucaucagcucgccaaa

SEQ ID NO: 744486 - RNA, 19 nt, Artificial Sequence
  Description of Artificial Sequence: Synthetic oligonucleotide
aaagucccaugggagagaa

SEQ ID NO: 744487 - RNA, 19 nt, Artificial Sequence
  Description of Artificial Sequence: Synthetic oligonucleotide
cuuugcucgcaccucccgc

SEQ ID NO: 744488 - RNA, 19 nt, Artificial Sequence
  Description of Artificial Sequence: Synthetic oligonucleotide
uaccccgcgacucggacuc

SEQ ID NO: 744489 - RNA, 19 nt, Artificial Sequence
  Description of Artificial Sequence: Synthetic oligonucleotide
guaugccucggacaaugug

SEQ ID NO: 744490 - RNA, 19 nt, Artificial Sequence
  Description of Artificial Sequence: Synthetic oligonucleotide
augcccgggauaauuuggc

SEQ ID NO: 744491 - RNA, 19 nt, Artificial Sequence
  Description of Artificial Sequence: Synthetic oligonucleotide
ccaucuaccuaugauagac

SEQ ID NO: 744492 - RNA, 19 nt, Artificial Sequence
  Description of Artificial Sequence: Synthetic oligonucleotide
cuugccggugccaugguga

SEQ ID NO: 744493 - RNA, 19 nt, Artificial Sequence
  Description of Artificial Sequence: Synthetic oligonucleotide
gcagugacgacuccuccgg

SEQ ID NO: 744494 - RNA, 19 nt, Artificial Sequence
  Description of Artificial Sequence: Synthetic oligonucleotide
cuucacgcggaccggacug

SEQ ID NO: 744495 - RNA, 19 nt, Artificial Sequence
  Description of Artificial Sequence: Synthetic oligonucleotide
gucggauucuucuccacga

SEQ ID NO: 744496 - RNA, 19 nt, Artificial Sequence
  Description of Artificial Sequence: Synthetic oligonucleotide
ccagaaaguaguuccgaag

SEQ ID NO: 744497 - RNA, 19 nt, Artificial Sequence
  Description of Artificial Sequence: Synthetic oligonucleotide
aguaggcuucaacacguau

SEQ ID NO: 744498 - RNA, 19 nt, Artificial Sequence
  Description of Artificial Sequence: Synthetic oligonucleotide
uggacuccaccauugucuc

SEQ ID NO: 744499 - RNA, 19 nt, Artificial Sequence
  Description of Artificial Sequence: Synthetic oligonucleotide
ucauaugcccgggauaauu

SEQ ID NO: 744500 - RNA, 19 nt, Artificial Sequence
  Description of Artificial Sequence: Synthetic oligonucleotide
uuauggagcagcugcucuu

SEQ ID NO: 744501 - RNA, 19 nt, Artificial Sequence
  Description of Artificial Sequence: Synthetic oligonucleotide
cuucuugaugcgacccgag

SEQ ID NO: 744502 - RNA, 19 nt, Artificial Sequence
  Description of Artificial Sequence: Synthetic oligonucleotide
uguaugccucggacaaugu

SEQ ID NO: 744503 - RNA, 19 nt, Artificial Sequence
  Description of Artificial Sequence: Synthetic oligonucleotide
ggcagugacgacuccuccg

SEQ ID NO: 744504 - RNA, 19 nt, Artificial Sequence
  Description of Artificial Sequence: Synthetic oligonucleotide
uucacccucacggccgggg

SEQ ID NO: 744505 - RNA, 19 nt, Artificial Sequence
  Description of Artificial Sequence: Synthetic oligonucleotide
agacgugguggcugaacug

SEQ ID NO: 744506 - RNA, 19 nt, Artificial Sequence
  Description of Artificial Sequence: Synthetic oligonucleotide
caucauaugcccgggauaa

SEQ ID NO: 744507 - RNA, 19 nt, Artificial Sequence
  Description of Artificial Sequence: Synthetic oligonucleotide
ggaccucucgcgcagucgg

SEQ ID NO: 744508 - RNA, 19 nt, Artificial Sequence
  Description of Artificial Sequence: Synthetic oligonucleotide
acauuugacagagccugca

SEQ ID NO: 744509 - RNA, 19 nt, Artificial Sequence
  Description of Artificial Sequence: Synthetic oligonucleotide
gguauccaucuguaggagc

SEQ ID NO: 744510 - RNA, 19 nt, Artificial Sequence
  Description of Artificial Sequence: Synthetic oligonucleotide
uuccgcuggcagaucagga

SEQ ID NO: 744511 - RNA, 19 nt, Artificial Sequence
  Description of Artificial Sequence: Synthetic oligonucleotide
cauuaauaugugagaggga

SEQ ID NO: 744512 - RNA, 19 nt, Artificial Sequence
  Description of Artificial Sequence: Synthetic oligonucleotide
agacuucaagccccggccu

SEQ ID NO: 744513 - RNA, 19 nt, Artificial Sequence
  Description of Artificial Sequence: Synthetic oligonucleotide
uggcagguaagugguacca

SEQ ID NO: 744514 - RNA, 19 nt, Artificial Sequence
  Description of Artificial Sequence: Synthetic oligonucleotide
gcuuagaccggcuagacau

SEQ ID NO: 744515 - RNA, 19 nt, Artificial Sequence
  Description of Artificial Sequence: Synthetic oligonucleotide
acgcuguggauguaggcau

SEQ ID NO: 744516 - RNA, 19 nt, Artificial Sequence
  Description of Artificial Sequence: Synthetic oligonucleotide
gauagggaaguugacaauu

SEQ ID NO: 744517 - RNA, 19 nt, Artificial Sequence
  Description of Artificial Sequence: Synthetic oligonucleotide
ugagaguauggagguugag

SEQ ID NO: 744518 - RNA, 19 nt, Artificial Sequence
  Description of Artificial Sequence: Synthetic oligonucleotide
ucggauucuucuccacgaa

SEQ ID NO: 744519 - RNA, 19 nt, Artificial Sequence
  Description of Artificial Sequence: Synthetic oligonucleotide
ucagucaccugaaggucuu

SEQ ID NO: 744520 - RNA, 19 nt, Artificial Sequence
  Description of Artificial Sequence: Synthetic oligonucleotide
auuaucccgccucuuccaa

SEQ ID NO: 744521 - RNA, 19 nt, Artificial Sequence
  Description of Artificial Sequence: Synthetic oligonucleotide
gccgccaccggcuaggagc

SEQ ID NO: 744522 - RNA, 19 nt, Artificial Sequence
  Description of Artificial Sequence: Synthetic oligonucleotide
agguaugggcagugacgac

SEQ ID NO: 744523 - RNA, 19 nt, Artificial Sequence
  Description of Artificial Sequence: Synthetic oligonucleotide
augcgacccgagcuacccc

SEQ ID NO: 744524 - RNA, 19 nt, Artificial Sequence
  Description of Artificial Sequence: Synthetic oligonucleotide
agaauccacucggccauuc

SEQ ID NO: 744525 - RNA, 19 nt, Artificial Sequence
  Description of Artificial Sequence: Synthetic oligonucleotide
ggguggaaccaugagacug

SEQ ID NO: 744526 - RNA, 19 nt, Artificial Sequence
  Description of Artificial Sequence: Synthetic oligonucleotide
gguauccagguaugggcag

SEQ ID NO: 744527 - RNA, 19 nt, Artificial Sequence
  Description of Artificial Sequence: Synthetic oligonucleotide
gaccggcuagacaucgccg

SEQ ID NO: 744528 - RNA, 19 nt, Artificial Sequence
  Description of Artificial Sequence: Synthetic oligonucleotide
aaccaugagacugccgcuu

SEQ ID NO: 744529 - RNA, 19 nt, Artificial Sequence
  Description of Artificial Sequence: Synthetic oligonucleotide
cagugaggaaucgaugauc

SEQ ID NO: 744530 - RNA, 19 nt, Artificial Sequence
  Description of Artificial Sequence: Synthetic oligonucleotide
agccccacgaucccuggca

SEQ ID NO: 744531 - RNA, 19 nt, Artificial Sequence
  Description of Artificial Sequence: Synthetic oligonucleotide
accaucuaccuaugauaga

SEQ ID NO: 744532 - RNA, 19 nt, Artificial Sequence
  Description of Artificial Sequence: Synthetic oligonucleotide
acaugaacguggacuccac

SEQ ID NO: 744533 - RNA, 19 nt, Artificial Sequence
  Description of Artificial Sequence: Synthetic oligonucleotide
caugggagagaaaggaacu

SEQ ID NO: 744534 - RNA, 19 nt, Artificial Sequence
  Description of Artificial Sequence: Synthetic oligonucleotide
ugaugcgacccgagcuacc

SEQ ID NO: 744535 - RNA, 19 nt, Artificial Sequence
  Description of Artificial Sequence: Synthetic oligonucleotide
ugacaauugucggauucuu

SEQ ID NO: 744536 - RNA, 19 nt, Artificial Sequence
  Description of Artificial Sequence: Synthetic oligonucleotide
cagguaugggcagugacga

SEQ ID NO: 744537 - RNA, 19 nt, Artificial Sequence
  Description of Artificial Sequence: Synthetic oligonucleotide
aucagcucgccaaaacgcu

SEQ ID NO: 744538 - RNA, 19 nt, Artificial Sequence
  Description of Artificial Sequence: Synthetic oligonucleotide
caucuaccuaugauagaca

SEQ ID NO: 744539 - RNA, 19 nt, Artificial Sequence
  Description of Artificial Sequence: Synthetic oligonucleotide
aauguaugccucggacaau

SEQ ID NO: 744540 - RNA, 19 nt, Artificial Sequence
  Description of Artificial Sequence: Synthetic oligonucleotide
uugaugcgacccgagcuac

SEQ ID NO: 744541 - RNA, 19 nt, Artificial Sequence
  Description of Artificial Sequence: Synthetic oligonucleotide
cccgggauaauuuggcuug

SEQ ID NO: 744542 - RNA, 19 nt, Artificial Sequence
  Description of Artificial Sequence: Synthetic oligonucleotide
uugucggauucuucuccac

SEQ ID NO: 744543 - RNA, 19 nt, Artificial Sequence
  Description of Artificial Sequence: Synthetic oligonucleotide
uuaucccgccucuuccaaa

SEQ ID NO: 744544 - RNA, 19 nt, Artificial Sequence
  Description of Artificial Sequence: Synthetic oligonucleotide
uagaccggcuagacaucgc

SEQ ID NO: 744545 - RNA, 19 nt, Artificial Sequence
  Description of Artificial Sequence: Synthetic oligonucleotide
cucucgcgcagucggcucg

SEQ ID NO: 744546 - RNA, 19 nt, Artificial Sequence
  Description of Artificial Sequence: Synthetic oligonucleotide
gagagcucgccgccuccgg

SEQ ID NO: 744547 - RNA, 19 nt, Artificial Sequence
  Description of Artificial Sequence: Synthetic oligonucleotide
caucauuauggagcagcug

SEQ ID NO: 744548 - RNA, 19 nt, Artificial Sequence
  Description of Artificial Sequence: Synthetic oligonucleotide
cuaugauagacagaaggau

SEQ ID NO: 744549 - RNA, 19 nt, Artificial Sequence
  Description of Artificial Sequence: Synthetic oligonucleotide
ggaacuauaggaaaaccau

SEQ ID NO: 744550 - RNA, 19 nt, Artificial Sequence
  Description of Artificial Sequence: Synthetic oligonucleotide
ugcccgggauaauuuggcu

SEQ ID NO: 744551 - RNA, 19 nt, Artificial Sequence
  Description of Artificial Sequence: Synthetic oligonucleotide
uuccgaagaggagggacau

SEQ ID NO: 744552 - RNA, 19 nt, Artificial Sequence
  Description of Artificial Sequence: Synthetic oligonucleotide
ccuguaggagcccucggag

SEQ ID NO: 744553 - RNA, 19 nt, Artificial Sequence
  Description of Artificial Sequence: Synthetic oligonucleotide
gauauccccuggagggcgc

SEQ ID NO: 744554 - RNA, 19 nt, Artificial Sequence
  Description of Artificial Sequence: Synthetic oligonucleotide
ugacgacuccuccgguccu

SEQ ID NO: 744555 - RNA, 19 nt, Artificial Sequence
  Description of Artificial Sequence: Synthetic oligonucleotide
uguaggcaugagacuucaa

SEQ ID NO: 744556 - RNA, 19 nt, Artificial Sequence
  Description of Artificial Sequence: Synthetic oligonucleotide
gagggaaauagaacagagu

SEQ ID NO: 744557 - RNA, 19 nt, Artificial Sequence
  Description of Artificial Sequence: Synthetic oligonucleotide
ccaaaagucccaugggaga

SEQ ID NO: 744558 - RNA, 19 nt, Artificial Sequence
  Description of Artificial Sequence: Synthetic oligonucleotide
uucacgcggaccggacugc

SEQ ID NO: 744559 - RNA, 19 nt, Artificial Sequence
  Description of Artificial Sequence: Synthetic oligonucleotide
gaaccaugagacugccgcu

SEQ ID NO: 744560 - RNA, 19 nt, Artificial Sequence
  Description of Artificial Sequence: Synthetic oligonucleotide
gaagcgcuucaggaaguuc

SEQ ID NO: 744561 - RNA, 19 nt, Artificial Sequence
  Description of Artificial Sequence: Synthetic oligonucleotide
gcuguuagcuucauguuua

SEQ ID NO: 744562 - RNA, 19 nt, Artificial Sequence
  Description of Artificial Sequence: Synthetic oligonucleotide
ucucgcgcagucggcucgg

SEQ ID NO: 744563 - RNA, 19 nt, Artificial Sequence
  Description of Artificial Sequence: Synthetic oligonucleotide
gcaacaauucaagaaggua

SEQ ID NO: 744564 - RNA, 19 nt, Artificial Sequence
  Description of Artificial Sequence: Synthetic oligonucleotide
guauucucucagauccaca

SEQ ID NO: 744565 - RNA, 19 nt, Artificial Sequence
  Description of Artificial Sequence: Synthetic oligonucleotide
gagcuaccccgcgacucgg

SEQ ID NO: 744566 - RNA, 19 nt, Artificial Sequence
  Description of Artificial Sequence: Synthetic oligonucleotide
uuggugccgcccagagcug

SEQ ID NO: 744567 - RNA, 19 nt, Artificial Sequence
  Description of Artificial Sequence: Synthetic oligonucleotide
augagacuucaagccccgg

SEQ ID NO: 744568 - RNA, 19 nt, Artificial Sequence
  Description of Artificial Sequence: Synthetic oligonucleotide
caucagucacaauagucuu

SEQ ID NO: 744569 - RNA, 19 nt, Artificial Sequence
  Description of Artificial Sequence: Synthetic oligonucleotide
augccucggacaaugugau

SEQ ID NO: 744570 - RNA, 19 nt, Artificial Sequence
  Description of Artificial Sequence: Synthetic oligonucleotide
agcucgccaaaacgcugga

SEQ ID NO: 744571 - RNA, 19 nt, Artificial Sequence
  Description of Artificial Sequence: Synthetic oligonucleotide
ucucggugaugccguugaa

SEQ ID NO: 744572 - RNA, 19 nt, Artificial Sequence
  Description of Artificial Sequence: Synthetic oligonucleotide
ggagaaacaugugccuuga

SEQ ID NO: 744573 - RNA, 19 nt, Artificial Sequence
  Description of Artificial Sequence: Synthetic oligonucleotide
cagucggcucggcuucccg

SEQ ID NO: 744574 - RNA, 19 nt, Artificial Sequence
  Description of Artificial Sequence: Synthetic oligonucleotide
agaguuucucaaagucgaa

SEQ ID NO: 744575 - RNA, 19 nt, Artificial Sequence
  Description of Artificial Sequence: Synthetic oligonucleotide
ucccgcggguggaaccaug

SEQ ID NO: 744576 - RNA, 19 nt, Artificial Sequence
  Description of Artificial Sequence: Synthetic oligonucleotide
cauaugcccgggauaauuu

SEQ ID NO: 744577 - RNA, 19 nt, Artificial Sequence
  Description of Artificial Sequence: Synthetic oligonucleotide
cacgaucccuggcagguaa

SEQ ID NO: 744578 - RNA, 19 nt, Artificial Sequence
  Description of Artificial Sequence: Synthetic oligonucleotide
ucacgcggaccggacugcc

SEQ ID NO: 744579 - RNA, 19 nt, Artificial Sequence
  Description of Artificial Sequence: Synthetic oligonucleotide
aguugucaggaaggcagua

SEQ ID NO: 744580 - RNA, 19 nt, Artificial Sequence
  Description of Artificial Sequence: Synthetic oligonucleotide
cacgcggaccggacugccc

SEQ ID NO: 744581 - RNA, 19 nt, Artificial Sequence
  Description of Artificial Sequence: Synthetic oligonucleotide
uaguuccgaagaggaggga

SEQ ID NO: 744582 - RNA, 19 nt, Artificial Sequence
  Description of Artificial Sequence: Synthetic oligonucleotide
ggacucgcgcuucccgcgg

SEQ ID NO: 744583 - RNA, 19 nt, Artificial Sequence
  Description of Artificial Sequence: Synthetic oligonucleotide
uggugccgcccagagcuga

SEQ ID NO: 744584 - RNA, 19 nt, Artificial Sequence
  Description of Artificial Sequence: Synthetic oligonucleotide
aaguaggcuucaacacgua

SEQ ID NO: 744585 - RNA, 19 nt, Artificial Sequence
  Description of Artificial Sequence: Synthetic oligonucleotide
gacugccgcuuagaccggc

SEQ ID NO: 744586 - RNA, 19 nt, Artificial Sequence
  Description of Artificial Sequence: Synthetic oligonucleotide
accucucgcgcagucggcu

SEQ ID NO: 744587 - RNA, 19 nt, Artificial Sequence
  Description of Artificial Sequence: Synthetic oligonucleotide
ggaaggcaguaaaacuuga

SEQ ID NO: 744588 - RNA, 19 nt, Artificial Sequence
  Description of Artificial Sequence: Synthetic oligonucleotide
gaacguggacuccaccauu

SEQ ID NO: 744589 - RNA, 19 nt, Artificial Sequence
  Description of Artificial Sequence: Synthetic oligonucleotide
gcuucccgcggguggaacc

SEQ ID NO: 744590 - RNA, 19 nt, Artificial Sequence
  Description of Artificial Sequence: Synthetic oligonucleotide
gacaucgccgccaccggcu

SEQ ID NO: 744591 - RNA, 19 nt, Artificial Sequence
  Description of Artificial Sequence: Synthetic oligonucleotide
gcggucucgcuccuucuug

SEQ ID NO: 744592 - RNA, 19 nt, Artificial Sequence
  Description of Artificial Sequence: Synthetic oligonucleotide
cugccccgagagcucgccg

SEQ ID NO: 744593 - RNA, 19 nt, Artificial Sequence
  Description of Artificial Sequence: Synthetic oligonucleotide
uucccgcuucacgcggacc

SEQ ID NO: 744594 - RNA, 19 nt, Artificial Sequence
  Description of Artificial Sequence: Synthetic oligonucleotide
ucgcggucucgcuccuucu

SEQ ID NO: 744595 - RNA, 19 nt, Artificial Sequence
  Description of Artificial Sequence: Synthetic oligonucleotide
cccgccucuuccaaaucug

SEQ ID NO: 744596 - RNA, 19 nt, Artificial Sequence
  Description of Artificial Sequence: Synthetic oligonucleotide
acgaucccuggcagguaag

SEQ ID NO: 744597 - RNA, 19 nt, Artificial Sequence
  Description of Artificial Sequence: Synthetic oligonucleotide
gaguccucgucggccucgc

SEQ ID NO: 744598 - RNA, 19 nt, Artificial Sequence
  Description of Artificial Sequence: Synthetic oligonucleotide
gcuucaacacguaugugau

SEQ ID NO: 744599 - RNA, 19 nt, Artificial Sequence
  Description of Artificial Sequence: Synthetic oligonucleotide
cgagcuaccccgcgacucg

SEQ ID NO: 744600 - RNA, 19 nt, Artificial Sequence
  Description of Artificial Sequence: Synthetic oligonucleotide
cauggugaagcacguggau

SEQ ID NO: 744601 - RNA, 19 nt, Artificial Sequence
  Description of Artificial Sequence: Synthetic oligonucleotide
gacgacuccuccgguccuc

SEQ ID NO: 744602 - RNA, 19 nt, Artificial Sequence
  Description of Artificial Sequence: Synthetic oligonucleotide
gacuucaagccccggccuu

SEQ ID NO: 744603 - RNA, 19 nt, Artificial Sequence
  Description of Artificial Sequence: Synthetic oligonucleotide
auauccccuggagggcgcu

SEQ ID NO: 744604 - RNA, 19 nt, Artificial Sequence
  Description of Artificial Sequence: Synthetic oligonucleotide
agacugccgcuuagaccgg

SEQ ID NO: 744605 - RNA, 19 nt, Artificial Sequence
  Description of Artificial Sequence: Synthetic oligonucleotide
gcuaccccgcgacucggac

SEQ ID NO: 744606 - RNA, 19 nt, Artificial Sequence
  Description of Artificial Sequence: Synthetic oligonucleotide
gucggcucggcuucccgcu

SEQ ID NO: 744607 - RNA, 19 nt, Artificial Sequence
  Description of Artificial Sequence: Synthetic oligonucleotide
acugccgcuuagaccggcu

SEQ ID NO: 744608 - RNA, 19 nt, Artificial Sequence
  Description of Artificial Sequence: Synthetic oligonucleotide
gccgggaccucucgcgcag

SEQ ID NO: 744609 - RNA, 19 nt, Artificial Sequence
  Description of Artificial Sequence: Synthetic oligonucleotide
gccguugaacuuggccagg

SEQ ID NO: 744610 - RNA, 19 nt, Artificial Sequence
  Description of Artificial Sequence: Synthetic oligonucleotide
gggauaauuuggcuugcuu

SEQ ID NO: 744611 - RNA, 19 nt, Artificial Sequence
  Description of Artificial Sequence: Synthetic oligonucleotide
ccggcuagacaucgccgcc

SEQ ID NO: 744612 - RNA, 19 nt, Artificial Sequence
  Description of Artificial Sequence: Synthetic oligonucleotide
ccaccauugucucuuggua

SEQ ID NO: 744613 - RNA, 19 nt, Artificial Sequence
  Description of Artificial Sequence: Synthetic oligonucleotide
cuucacccucacggccggg

SEQ ID NO: 744614 - RNA, 19 nt, Artificial Sequence
  Description of Artificial Sequence: Synthetic oligonucleotide
ccaaaacgcuggaccaaca

SEQ ID NO: 744615 - RNA, 19 nt, Artificial Sequence
  Description of Artificial Sequence: Synthetic oligonucleotide
cagucaccugaaggucuug

SEQ ID NO: 744616 - RNA, 19 nt, Artificial Sequence
  Description of Artificial Sequence: Synthetic oligonucleotide
caccggcuaggagcuuccg

SEQ ID NO: 744617 - RNA, 19 nt, Artificial Sequence
  Description of Artificial Sequence: Synthetic oligonucleotide
ccuagaaucucaagacgau

SEQ ID NO: 744618 - RNA, 19 nt, Artificial Sequence
  Description of Artificial Sequence: Synthetic oligonucleotide
gacugccccgagagcucgc

SEQ ID NO: 744619 - RNA, 19 nt, Artificial Sequence
  Description of Artificial Sequence: Synthetic oligonucleotide
cuguuagcuucauguuuau

SEQ ID NO: 744620 - RNA, 19 nt, Artificial Sequence
  Description of Artificial Sequence: Synthetic oligonucleotide
cugcauuugcauagucguu

SEQ ID NO: 744621 - RNA, 19 nt, Artificial Sequence
  Description of Artificial Sequence: Synthetic oligonucleotide
ccaucauaugcccgggaua

SEQ ID NO: 744622 - RNA, 19 nt, Artificial Sequence
  Description of Artificial Sequence: Synthetic oligonucleotide
gccgcuuagaccggcuaga

SEQ ID NO: 744623 - RNA, 19 nt, Artificial Sequence
  Description of Artificial Sequence: Synthetic oligonucleotide
ccgggauaauuuggcuugc

SEQ ID NO: 744624 - RNA, 19 nt, Artificial Sequence
  Description of Artificial Sequence: Synthetic oligonucleotide
cauagucguuggcuuuuau

SEQ ID NO: 744625 - RNA, 19 nt, Artificial Sequence
  Description of Artificial Sequence: Synthetic oligonucleotide
ccgagcuaccccgcgacuc

SEQ ID NO: 744626 - RNA, 19 nt, Artificial Sequence
  Description of Artificial Sequence: Synthetic oligonucleotide
cccgcgacucggacucgcg

SEQ ID NO: 744627 - RNA, 19 nt, Artificial Sequence
  Description of Artificial Sequence: Synthetic oligonucleotide
cgcggguggaaccaugaga

SEQ ID NO: 744628 - RNA, 19 nt, Artificial Sequence
  Description of Artificial Sequence: Synthetic oligonucleotide
agcuaccccgcgacucgga

SEQ ID NO: 744629 - RNA, 19 nt, Artificial Sequence
  Description of Artificial Sequence: Synthetic oligonucleotide
ggaccggacugccccgaga

SEQ ID NO: 744630 - RNA, 19 nt, Artificial Sequence
  Description of Artificial Sequence: Synthetic oligonucleotide
cugccgcuuagaccggcua

SEQ ID NO: 744631 - RNA, 19 nt, Artificial Sequence
  Description of Artificial Sequence: Synthetic oligonucleotide
gcccgggauaauuuggcuu

SEQ ID NO: 744632 - RNA, 19 nt, Artificial Sequence
  Description of Artificial Sequence: Synthetic oligonucleotide
ccgcuuagaccggcuagac

SEQ ID NO: 744633 - RNA, 19 nt, Artificial Sequence
  Description of Artificial Sequence: Synthetic oligonucleotide
cucgcgcagucggcucggc

SEQ ID NO: 744634 - RNA, 19 nt, Artificial Sequence
  Description of Artificial Sequence: Synthetic oligonucleotide
gcuucacgcggaccggacu

SEQ ID NO: 744635 - RNA, 19 nt, Artificial Sequence
  Description of Artificial Sequence: Synthetic oligonucleotide
ccgcggguggaaccaugag

SEQ ID NO: 744636 - RNA, 19 nt, Artificial Sequence
  Description of Artificial Sequence: Synthetic oligonucleotide
accccgcgacucggacucg

SEQ ID NO: 744637 - RNA, 19 nt, Artificial Sequence
  Description of Artificial Sequence: Synthetic oligonucleotide
cccgcggguggaaccauga

SEQ ID NO: 744638 - RNA, 19 nt, Artificial Sequence
  Description of Artificial Sequence: Synthetic oligonucleotide
cgcuugauguucuuauaau

SEQ ID NO: 744639 - RNA, 19 nt, Artificial Sequence
  Description of Artificial Sequence: Synthetic oligonucleotide
gcagucggcucggcuuccc

SEQ ID NO: 744640 - RNA, 19 nt, Artificial Sequence
  Description of Artificial Sequence: Synthetic oligonucleotide
cgcuucacgcggaccggac

SEQ ID NO: 744641 - RNA, 19 nt, Artificial Sequence
  Description of Artificial Sequence: Synthetic oligonucleotide
cagugacgacuccuccggu

SEQ ID NO: 744642 - RNA, 19 nt, Artificial Sequence
  Description of Artificial Sequence: Synthetic oligonucleotide
caucauuaucccgccucuu

SEQ ID NO: 744643 - RNA, 19 nt, Artificial Sequence
  Description of Artificial Sequence: Synthetic oligonucleotide
ccguugaacuuggccagga

SEQ ID NO: 744644 - RNA, 19 nt, Artificial Sequence
  Description of Artificial Sequence: Synthetic oligonucleotide
gagggcgcuugauguucuu

SEQ ID NO: 744645 - RNA, 19 nt, Artificial Sequence
  Description of Artificial Sequence: Synthetic oligonucleotide
cgcuuagaccggcuagaca

SEQ ID NO: 744646 - RNA, 19 nt, Artificial Sequence
  Description of Artificial Sequence: Synthetic oligonucleotide
cggucucgcuccuucuuga

SEQ ID NO: 744647 - RNA, 19 nt, Artificial Sequence
  Description of Artificial Sequence: Synthetic oligonucleotide
ccggcucccgcucgcgguc

SEQ ID NO: 744648 - RNA, 19 nt, Artificial Sequence
  Description of Artificial Sequence: Synthetic oligonucleotide
ccccgcgacucggacucgc

SEQ ID NO: 744649 - RNA, 19 nt, Artificial Sequence
  Description of Artificial Sequence: Synthetic oligonucleotide
cacuugccggugccauggu

SEQ ID NO: 744650 - RNA, 19 nt, Artificial Sequence
  Description of Artificial Sequence: Synthetic oligonucleotide
gcgacucggacucgcgcuu

SEQ ID NO: 744651 - RNA, 19 nt, Artificial Sequence
  Description of Artificial Sequence: Synthetic oligonucleotide
ccgccaccggcuaggagcu

SEQ ID NO: 744652 - RNA, 19 nt, Artificial Sequence
  Description of Artificial Sequence: Synthetic oligonucleotide
cggcuagacaucgccgcca

SEQ ID NO: 744653 - RNA, 19 nt, Artificial Sequence
  Description of Artificial Sequence: Synthetic oligonucleotide
cggaccggacugccccgag

SEQ ID NO: 744654 - RNA, 19 nt, Artificial Sequence
  Description of Artificial Sequence: Synthetic oligonucleotide
gcggaccggacugccccga

SEQ ID NO: 744655 - RNA, 19 nt, Artificial Sequence
  Description of Artificial Sequence: Synthetic oligonucleotide
cgacucggacucgcgcuuc

SEQ ID NO: 744656 - RNA, 19 nt, Artificial Sequence
  Description of Artificial Sequence: Synthetic oligonucleotide
cgcagucggcucggcuucc

SEQ ID NO: 744657 - RNA, 19 nt, Artificial Sequence
  Description of Artificial Sequence: Synthetic oligonucleotide
cgccaaaacgcuggaccaa

SEQ ID NO: 744658 - RNA, 19 nt, Artificial Sequence
  Description of Artificial Sequence: Synthetic oligonucleotide
ccgcuucacgcggaccgga

SEQ ID NO: 744659 - RNA, 19 nt, Artificial Sequence
  Description of Artificial Sequence: Synthetic oligonucleotide
cggccauucuuugcucgca

SEQ ID NO: 744660 - RNA, 19 nt, Artificial Sequence
  Description of Artificial Sequence: Synthetic oligonucleotide
cgccgggaccucucgcgca

SEQ ID NO: 744661 - RNA, 19 nt, Artificial Sequence
  Description of Artificial Sequence: Synthetic oligonucleotide
cggguggaaccaugagacu

SEQ ID NO: 744662 - RNA, 19 nt, Artificial Sequence
  Description of Artificial Sequence: Synthetic oligonucleotide
cgggauaauuuggcuugcu

SEQ ID NO: 744663 - RNA, 19 nt, Artificial Sequence
  Description of Artificial Sequence: Synthetic oligonucleotide
cccgagcuaccccgcgacu

SEQ ID NO: 744664 - RNA, 19 nt, Artificial Sequence
  Description of Artificial Sequence: Synthetic oligonucleotide
cgcggucucgcuccuucuu

SEQ ID NO: 744665 - RNA, 19 nt, Artificial Sequence
  Description of Artificial Sequence: Synthetic oligonucleotide
ccgggaccucucgcgcagu

SEQ ID NO: 744666 - RNA, 19 nt, Artificial Sequence
  Description of Artificial Sequence: Synthetic oligonucleotide
aauacguaauacuacauac

SEQ ID NO: 744667 - RNA, 19 nt, Artificial Sequence
  Description of Artificial Sequence: Synthetic oligonucleotide
aauucuucgauauaagagg

SEQ ID NO: 744668 - RNA, 19 nt, Artificial Sequence
  Description of Artificial Sequence: Synthetic oligonucleotide
aauaauaucaggcucagca

SEQ ID NO: 744669 - RNA, 19 nt, Artificial Sequence
  Description of Artificial Sequence: Synthetic oligonucleotide
uuuagaauggaauaguuug

SEQ ID NO: 744670 - RNA, 19 nt, Artificial Sequence
  Description of Artificial Sequence: Synthetic oligonucleotide
aguauaagcaaauuccacc

SEQ ID NO: 744671 - RNA, 19 nt, Artificial Sequence
  Description of Artificial Sequence: Synthetic oligonucleotide
aaacagacuaacuacacag

SEQ ID NO: 744672 - RNA, 19 nt, Artificial Sequence
  Description of Artificial Sequence: Synthetic oligonucleotide
aaggauaucaaccauaaau

SEQ ID NO: 744673 - RNA, 19 nt, Artificial Sequence
  Description of Artificial Sequence: Synthetic oligonucleotide
agcgucauaaaccuggucc

SEQ ID NO: 744674 - RNA, 19 nt, Artificial Sequence
  Description of Artificial Sequence: Synthetic oligonucleotide
uuacuuaucaaaauaccag

SEQ ID NO: 744675 - RNA, 19 nt, Artificial Sequence
  Description of Artificial Sequence: Synthetic oligonucleotide
uuacuuaggaaauucuucg

SEQ ID NO: 744676 - RNA, 19 nt, Artificial Sequence
  Description of Artificial Sequence: Synthetic oligonucleotide
auauaauccauacuacuac

SEQ ID NO: 744677 - RNA, 19 nt, Artificial Sequence
  Description of Artificial Sequence: Synthetic oligonucleotide
aauaaaugaagacaagcaa

SEQ ID NO: 744678 - RNA, 19 nt, Artificial Sequence
  Description of Artificial Sequence: Synthetic oligonucleotide
agcaguauaagcaaauucc

SEQ ID NO: 744679 - RNA, 19 nt, Artificial Sequence
  Description of Artificial Sequence: Synthetic oligonucleotide
uacguaauacuacauacag

SEQ ID NO: 744680 - RNA, 19 nt, Artificial Sequence
  Description of Artificial Sequence: Synthetic oligonucleotide
ucuaccuacaccuugaaaa

SEQ ID NO: 744681 - RNA, 19 nt, Artificial Sequence
  Description of Artificial Sequence: Synthetic oligonucleotide
accuaaaccauucuggccg

SEQ ID NO: 744682 - RNA, 19 nt, Artificial Sequence
  Description of Artificial Sequence: Synthetic oligonucleotide
uccacaaguaucaacaaca

SEQ ID NO: 744683 - RNA, 19 nt, Artificial Sequence
  Description of Artificial Sequence: Synthetic oligonucleotide
aauccauacuacuacuuag

SEQ ID NO: 744684 - RNA, 19 nt, Artificial Sequence
  Description of Artificial Sequence: Synthetic oligonucleotide
aaguauagagcugaguuuc

SEQ ID NO: 744685 - RNA, 19 nt, Artificial Sequence
  Description of Artificial Sequence: Synthetic oligonucleotide
uggaacaaaccauuggugg

SEQ ID NO: 744686 - RNA, 19 nt, Artificial Sequence
  Description of Artificial Sequence: Synthetic oligonucleotide
augcuuauaacuuucaagu

SEQ ID NO: 744687 - RNA, 19 nt, Artificial Sequence
  Description of Artificial Sequence: Synthetic oligonucleotide
aaugaagacaagcaaaaua

SEQ ID NO: 744688 - RNA, 19 nt, Artificial Sequence
  Description of Artificial Sequence: Synthetic oligonucleotide
aauuaaguaaucaaaucca

SEQ ID NO: 744689 - RNA, 19 nt, Artificial Sequence
  Description of Artificial Sequence: Synthetic oligonucleotide
uuaguguugaccaaacaga

SEQ ID NO: 744690 - RNA, 19 nt, Artificial Sequence
  Description of Artificial Sequence: Synthetic oligonucleotide
uguaucauagcacucaaau

SEQ ID NO: 744691 - RNA, 19 nt, Artificial Sequence
  Description of Artificial Sequence: Synthetic oligonucleotide
aauggaauaguuuggcacu

SEQ ID NO: 744692 - RNA, 19 nt, Artificial Sequence
  Description of Artificial Sequence: Synthetic oligonucleotide
acaaacauagaugagacca

SEQ ID NO: 744693 - RNA, 19 nt, Artificial Sequence
  Description of Artificial Sequence: Synthetic oligonucleotide
uaaacuucgguaaaaugcu

SEQ ID NO: 744694 - RNA, 19 nt, Artificial Sequence
  Description of Artificial Sequence: Synthetic oligonucleotide
uguacuguuuuacuuagga

SEQ ID NO: 744695 - RNA, 19 nt, Artificial Sequence
  Description of Artificial Sequence: Synthetic oligonucleotide
uugaacacagcucagucca

SEQ ID NO: 744696 - RNA, 19 nt, Artificial Sequence
  Description of Artificial Sequence: Synthetic oligonucleotide
auaaguauagagcugaguu

SEQ ID NO: 744697 - RNA, 19 nt, Artificial Sequence
  Description of Artificial Sequence: Synthetic oligonucleotide
ucguauuuuaaccaccuca

SEQ ID NO: 744698 - RNA, 19 nt, Artificial Sequence
  Description of Artificial Sequence: Synthetic oligonucleotide
cacucaaauaaguauagag

SEQ ID NO: 744699 - RNA, 19 nt, Artificial Sequence
  Description of Artificial Sequence: Synthetic oligonucleotide
ucucugaugagcaugcccc

SEQ ID NO: 744700 - RNA, 19 nt, Artificial Sequence
  Description of Artificial Sequence: Synthetic oligonucleotide
acuuaucaccauuuuaagg

SEQ ID NO: 744701 - RNA, 19 nt, Artificial Sequence
  Description of Artificial Sequence: Synthetic oligonucleotide
uggucuuugaauuaaguaa

SEQ ID NO: 744702 - RNA, 19 nt, Artificial Sequence
  Description of Artificial Sequence: Synthetic oligonucleotide
uagaaauucaucaguuuug

SEQ ID NO: 744703 - RNA, 19 nt, Artificial Sequence
  Description of Artificial Sequence: Synthetic oligonucleotide
uacuacuuaguguugacca

SEQ ID NO: 744704 - RNA, 19 nt, Artificial Sequence
  Description of Artificial Sequence: Synthetic oligonucleotide
uuuaaggcauuccggauug

SEQ ID NO: 744705 - RNA, 19 nt, Artificial Sequence
  Description of Artificial Sequence: Synthetic oligonucleotide
acauagaugagaccauugg

SEQ ID NO: 744706 - RNA, 19 nt, Artificial Sequence
  Description of Artificial Sequence: Synthetic oligonucleotide
gucguaauauuccacauug

SEQ ID NO: 744707 - RNA, 19 nt, Artificial Sequence
  Description of Artificial Sequence: Synthetic oligonucleotide
uuuauuggaaucuuacuua

SEQ ID NO: 744708 - RNA, 19 nt, Artificial Sequence
  Description of Artificial Sequence: Synthetic oligonucleotide
aauaaagucaucugcuguu

SEQ ID NO: 744709 - RNA, 19 nt, Artificial Sequence
  Description of Artificial Sequence: Synthetic oligonucleotide
uaagcacucucccagaaac

SEQ ID NO: 744710 - RNA, 19 nt, Artificial Sequence
  Description of Artificial Sequence: Synthetic oligonucleotide
ugcaagcacacuuauacca

SEQ ID NO: 744711 - RNA, 19 nt, Artificial Sequence
  Description of Artificial Sequence: Synthetic oligonucleotide
guguugaccaaacagaaac

SEQ ID NO: 744712 - RNA, 19 nt, Artificial Sequence
  Description of Artificial Sequence: Synthetic oligonucleotide
gauaucaaccauaaauggc

SEQ ID NO: 744713 - RNA, 19 nt, Artificial Sequence
  Description of Artificial Sequence: Synthetic oligonucleotide
aacauuguugccuaagcuu

SEQ ID NO: 744714 - RNA, 19 nt, Artificial Sequence
  Description of Artificial Sequence: Synthetic oligonucleotide
gaacuaagcacucucccag

SEQ ID NO: 744715 - RNA, 19 nt, Artificial Sequence
  Description of Artificial Sequence: Synthetic oligonucleotide
aggaacuaagcacucuccc

SEQ ID NO: 744716 - RNA, 19 nt, Artificial Sequence
  Description of Artificial Sequence: Synthetic oligonucleotide
aaacauuguugccuaagcu

SEQ ID NO: 744717 - RNA, 19 nt, Artificial Sequence
  Description of Artificial Sequence: Synthetic oligonucleotide
aaauacguaauacuacaua

SEQ ID NO: 744718 - RNA, 19 nt, Artificial Sequence
  Description of Artificial Sequence: Synthetic oligonucleotide
aaucguguuucuuucuucu

SEQ ID NO: 744719 - RNA, 19 nt, Artificial Sequence
  Description of Artificial Sequence: Synthetic oligonucleotide
uuaggaaauucuucgauau

SEQ ID NO: 744720 - RNA, 19 nt, Artificial Sequence
  Description of Artificial Sequence: Synthetic oligonucleotide
gaucauagacuucacagga

SEQ ID NO: 744721 - RNA, 19 nt, Artificial Sequence
  Description of Artificial Sequence: Synthetic oligonucleotide
agacuaacuacacagcacu

SEQ ID NO: 744722 - RNA, 19 nt, Artificial Sequence
  Description of Artificial Sequence: Synthetic oligonucleotide
aaucaaauccagaugaaau

SEQ ID NO: 744723 - RNA, 19 nt, Artificial Sequence
  Description of Artificial Sequence: Synthetic oligonucleotide
guaauauuccacauugucc

SEQ ID NO: 744724 - RNA, 19 nt, Artificial Sequence
  Description of Artificial Sequence: Synthetic oligonucleotide
aaauggcuggcgauuaggc

SEQ ID NO: 744725 - RNA, 19 nt, Artificial Sequence
  Description of Artificial Sequence: Synthetic oligonucleotide
auaucaaccauaaauggcu

SEQ ID NO: 744726 - RNA, 19 nt, Artificial Sequence
  Description of Artificial Sequence: Synthetic oligonucleotide
ugauagagccaacugcugc

SEQ ID NO: 744727 - RNA, 19 nt, Artificial Sequence
  Description of Artificial Sequence: Synthetic oligonucleotide
cacacuuauaccaagacaa

SEQ ID NO: 744728 - RNA, 19 nt, Artificial Sequence
  Description of Artificial Sequence: Synthetic oligonucleotide
ucuaacaaugacuggacau

SEQ ID NO: 744729 - RNA, 19 nt, Artificial Sequence
  Description of Artificial Sequence: Synthetic oligonucleotide
ggauaucaaccauaaaugg

SEQ ID NO: 744730 - RNA, 19 nt, Artificial Sequence
  Description of Artificial Sequence: Synthetic oligonucleotide
ucuccguuucucaaagggg

SEQ ID NO: 744731 - RNA, 19 nt, Artificial Sequence
  Description of Artificial Sequence: Synthetic oligonucleotide
gauguauaaaucuugcccu

SEQ ID NO: 744732 - RNA, 19 nt, Artificial Sequence
  Description of Artificial Sequence: Synthetic oligonucleotide
ggugaauaaagucaucugc

SEQ ID NO: 744733 - RNA, 19 nt, Artificial Sequence
  Description of Artificial Sequence: Synthetic oligonucleotide
cagaacuucacaaccaaac

SEQ ID NO: 744734 - RNA, 19 nt, Artificial Sequence
  Description of Artificial Sequence: Synthetic oligonucleotide
cuggcgauuaggcucaucg

SEQ ID NO: 744735 - RNA, 19 nt, Artificial Sequence
  Description of Artificial Sequence: Synthetic oligonucleotide
uauaauccauacuacuacu

SEQ ID NO: 744736 - RNA, 19 nt, Artificial Sequence
  Description of Artificial Sequence: Synthetic oligonucleotide
auagcacucaaauaaguau

SEQ ID NO: 744737 - RNA, 19 nt, Artificial Sequence
  Description of Artificial Sequence: Synthetic oligonucleotide
auaguuuggcacuaaguga

SEQ ID NO: 744738 - RNA, 19 nt, Artificial Sequence
  Description of Artificial Sequence: Synthetic oligonucleotide
aggauaucaaccauaaaug

SEQ ID NO: 744739 - RNA, 19 nt, Artificial Sequence
  Description of Artificial Sequence: Synthetic oligonucleotide
accuugaaaaccugccagc

SEQ ID NO: 744740 - RNA, 19 nt, Artificial Sequence
  Description of Artificial Sequence: Synthetic oligonucleotide
cugcaucuaacaaugacug

SEQ ID NO: 744741 - RNA, 19 nt, Artificial Sequence
  Description of Artificial Sequence: Synthetic oligonucleotide
uuauaccaagacaauuuga

SEQ ID NO: 744742 - RNA, 19 nt, Artificial Sequence
  Description of Artificial Sequence: Synthetic oligonucleotide
aacuucgguaaaaugcugg

SEQ ID NO: 744743 - RNA, 19 nt, Artificial Sequence
  Description of Artificial Sequence: Synthetic oligonucleotide
caaaauacguaauacuaca

SEQ ID NO: 744744 - RNA, 19 nt, Artificial Sequence
  Description of Artificial Sequence: Synthetic oligonucleotide
guauaagcaaauuccacca

SEQ ID NO: 744745 - RNA, 19 nt, Artificial Sequence
  Description of Artificial Sequence: Synthetic oligonucleotide
agcacacuuauaccaagac

SEQ ID NO: 744746 - RNA, 19 nt, Artificial Sequence
  Description of Artificial Sequence: Synthetic oligonucleotide
uacucguuugacaucaagu

SEQ ID NO: 744747 - RNA, 19 nt, Artificial Sequence
  Description of Artificial Sequence: Synthetic oligonucleotide
ucuugaaauauaauccaua

SEQ ID NO: 744748 - RNA, 19 nt, Artificial Sequence
  Description of Artificial Sequence: Synthetic oligonucleotide
aauuugaugcguccaccug

SEQ ID NO: 744749 - RNA, 19 nt, Artificial Sequence
  Description of Artificial Sequence: Synthetic oligonucleotide
aaccacccaaaauguacac

SEQ ID NO: 744750 - RNA, 19 nt, Artificial Sequence
  Description of Artificial Sequence: Synthetic oligonucleotide
ugaaccuccagauguauaa

SEQ ID NO: 744751 - RNA, 19 nt, Artificial Sequence
  Description of Artificial Sequence: Synthetic oligonucleotide
cuuauaccaagacaauuug

SEQ ID NO: 744752 - RNA, 19 nt, Artificial Sequence
  Description of Artificial Sequence: Synthetic oligonucleotide
uuugagucucagaugaguc

SEQ ID NO: 744753 - RNA, 19 nt, Artificial Sequence
  Description of Artificial Sequence: Synthetic oligonucleotide
agacaagcaaaauacguaa

SEQ ID NO: 744754 - RNA, 19 nt, Artificial Sequence
  Description of Artificial Sequence: Synthetic oligonucleotide
uuagacaacuugugacugg

SEQ ID NO: 744755 - RNA, 19 nt, Artificial Sequence
  Description of Artificial Sequence: Synthetic oligonucleotide
uucucgaucuucaggagac

SEQ ID NO: 744756 - RNA, 19 nt, Artificial Sequence
  Description of Artificial Sequence: Synthetic oligonucleotide
agaaaugcuuauaacuuuc

SEQ ID NO: 744757 - RNA, 19 nt, Artificial Sequence
  Description of Artificial Sequence: Synthetic oligonucleotide
uggaaucuuacuuaucaaa

SEQ ID NO: 744758 - RNA, 19 nt, Artificial Sequence
  Description of Artificial Sequence: Synthetic oligonucleotide
acugcagcgucauaaaccu

SEQ ID NO: 744759 - RNA, 19 nt, Artificial Sequence
  Description of Artificial Sequence: Synthetic oligonucleotide
aggcucaucguauuuuaac

SEQ ID NO: 744760 - RNA, 19 nt, Artificial Sequence
  Description of Artificial Sequence: Synthetic oligonucleotide
uccauacuacuacuuagug

SEQ ID NO: 744761 - RNA, 19 nt, Artificial Sequence
  Description of Artificial Sequence: Synthetic oligonucleotide
aaccauaaauggcuggcga

SEQ ID NO: 744762 - RNA, 19 nt, Artificial Sequence
  Description of Artificial Sequence: Synthetic oligonucleotide
ugugcccuaaucuaccuac

SEQ ID NO: 744763 - RNA, 19 nt, Artificial Sequence
  Description of Artificial Sequence: Synthetic oligonucleotide
guugcucaauaauaucagg

SEQ ID NO: 744764 - RNA, 19 nt, Artificial Sequence
  Description of Artificial Sequence: Synthetic oligonucleotide
acauuguugccuaagcuuc

SEQ ID NO: 744765 - RNA, 19 nt, Artificial Sequence
  Description of Artificial Sequence: Synthetic oligonucleotide
ucgauauaagaggaaaucu

SEQ ID NO: 744766 - RNA, 19 nt, Artificial Sequence
  Description of Artificial Sequence: Synthetic oligonucleotide
acuacuacuuaguguugac

SEQ ID NO: 744767 - RNA, 19 nt, Artificial Sequence
  Description of Artificial Sequence: Synthetic oligonucleotide
uguuuuacuuaggaaauuc

SEQ ID NO: 744768 - RNA, 19 nt, Artificial Sequence
  Description of Artificial Sequence: Synthetic oligonucleotide
acaauuugaugcguccacc

SEQ ID NO: 744769 - RNA, 19 nt, Artificial Sequence
  Description of Artificial Sequence: Synthetic oligonucleotide
aauaaguauagagcugagu

SEQ ID NO: 744770 - RNA, 19 nt, Artificial Sequence
  Description of Artificial Sequence: Synthetic oligonucleotide
uguugaccaaacagaaaca

SEQ ID NO: 744771 - RNA, 19 nt, Artificial Sequence
  Description of Artificial Sequence: Synthetic oligonucleotide
uucgauauaagaggaaauc

SEQ ID NO: 744772 - RNA, 19 nt, Artificial Sequence
  Description of Artificial Sequence: Synthetic oligonucleotide
uaguguugaccaaacagaa

SEQ ID NO: 744773 - RNA, 19 nt, Artificial Sequence
  Description of Artificial Sequence: Synthetic oligonucleotide
uucaccguuacaccccucc

SEQ ID NO: 744774 - RNA, 19 nt, Artificial Sequence
  Description of Artificial Sequence: Synthetic oligonucleotide
cauuuuaaggcauuccgga

SEQ ID NO: 744775 - RNA, 19 nt, Artificial Sequence
  Description of Artificial Sequence: Synthetic oligonucleotide
uaauccauacuacuacuua

SEQ ID NO: 744776 - RNA, 19 nt, Artificial Sequence
  Description of Artificial Sequence: Synthetic oligonucleotide
uaucaaccauaaauggcug

SEQ ID NO: 744777 - RNA, 19 nt, Artificial Sequence
  Description of Artificial Sequence: Synthetic oligonucleotide
uggguuacucguuugacau

SEQ ID NO: 744778 - RNA, 19 nt, Artificial Sequence
  Description of Artificial Sequence: Synthetic oligonucleotide
ucuucgauauaagaggaaa

SEQ ID NO: 744779 - RNA, 19 nt, Artificial Sequence
  Description of Artificial Sequence: Synthetic oligonucleotide
uaugcgguaaucguguuuc

SEQ ID NO: 744780 - RNA, 19 nt, Artificial Sequence
  Description of Artificial Sequence: Synthetic oligonucleotide
ugcuauucacagaaauucu

SEQ ID NO: 744781 - RNA, 19 nt, Artificial Sequence
  Description of Artificial Sequence: Synthetic oligonucleotide
uucucaaaggggcaucgga

SEQ ID NO: 744782 - RNA, 19 nt, Artificial Sequence
  Description of Artificial Sequence: Synthetic oligonucleotide
caaauaaguauagagcuga

SEQ ID NO: 744783 - RNA, 19 nt, Artificial Sequence
  Description of Artificial Sequence: Synthetic oligonucleotide
uggacauuguugcuauuca

SEQ ID NO: 744784 - RNA, 19 nt, Artificial Sequence
  Description of Artificial Sequence: Synthetic oligonucleotide
uuccggauugucuugaaua

SEQ ID NO: 744785 - RNA, 19 nt, Artificial Sequence
  Description of Artificial Sequence: Synthetic oligonucleotide
cuaccuacaccuugaaaac

SEQ ID NO: 744786 - RNA, 19 nt, Artificial Sequence
  Description of Artificial Sequence: Synthetic oligonucleotide
caaucauguuucaaggguc

SEQ ID NO: 744787 - RNA, 19 nt, Artificial Sequence
  Description of Artificial Sequence: Synthetic oligonucleotide
cauacuacuacuuaguguu

SEQ ID NO: 744788 - RNA, 19 nt, Artificial Sequence
  Description of Artificial Sequence: Synthetic oligonucleotide
acucguuugacaucaaguu

SEQ ID NO: 744789 - RNA, 19 nt, Artificial Sequence
  Description of Artificial Sequence: Synthetic oligonucleotide
gacaauuugaugcguccac

SEQ ID NO: 744790 - RNA, 19 nt, Artificial Sequence
  Description of Artificial Sequence: Synthetic oligonucleotide
ugcaucuaacaaugacugg

SEQ ID NO: 744791 - RNA, 19 nt, Artificial Sequence
  Description of Artificial Sequence: Synthetic oligonucleotide
cuucacaaccaaacuaaug

SEQ ID NO: 744792 - RNA, 19 nt, Artificial Sequence
  Description of Artificial Sequence: Synthetic oligonucleotide
auaauaucaggcucagcau

SEQ ID NO: 744793 - RNA, 19 nt, Artificial Sequence
  Description of Artificial Sequence: Synthetic oligonucleotide
auuagacaacuugugacug

SEQ ID NO: 744794 - RNA, 19 nt, Artificial Sequence
  Description of Artificial Sequence: Synthetic oligonucleotide
uugagucucagaugaguca

SEQ ID NO: 744795 - RNA, 19 nt, Artificial Sequence
  Description of Artificial Sequence: Synthetic oligonucleotide
cuugugacugggaaagcac

SEQ ID NO: 744796 - RNA, 19 nt, Artificial Sequence
  Description of Artificial Sequence: Synthetic oligonucleotide
caccuugaaaaccugccag

SEQ ID NO: 744797 - RNA, 19 nt, Artificial Sequence
  Description of Artificial Sequence: Synthetic oligonucleotide
agaauggaauaguuuggca

SEQ ID NO: 744798 - RNA, 19 nt, Artificial Sequence
  Description of Artificial Sequence: Synthetic oligonucleotide
auaaaccugguccucugcu

SEQ ID NO: 744799 - RNA, 19 nt, Artificial Sequence
  Description of Artificial Sequence: Synthetic oligonucleotide
uuggaauaccagcuguccu

SEQ ID NO: 744800 - RNA, 19 nt, Artificial Sequence
  Description of Artificial Sequence: Synthetic oligonucleotide
ucucaaaggggcaucggau

SEQ ID NO: 744801 - RNA, 19 nt, Artificial Sequence
  Description of Artificial Sequence: Synthetic oligonucleotide
cacuuaucaccauuuuaag

SEQ ID NO: 744802 - RNA, 19 nt, Artificial Sequence
  Description of Artificial Sequence: Synthetic oligonucleotide
gacaguagaugguaccuca

SEQ ID NO: 744803 - RNA, 19 nt, Artificial Sequence
  Description of Artificial Sequence: Synthetic oligonucleotide
aaauaaguauagagcugag

SEQ ID NO: 744804 - RNA, 19 nt, Artificial Sequence
  Description of Artificial Sequence: Synthetic oligonucleotide
ucgugugccaacuuucagu

SEQ ID NO: 744805 - RNA, 19 nt, Artificial Sequence
  Description of Artificial Sequence: Synthetic oligonucleotide
cucguuugacaucaaguug

SEQ ID NO: 744806 - RNA, 19 nt, Artificial Sequence
  Description of Artificial Sequence: Synthetic oligonucleotide
uuguacuguuuuacuuagg

SEQ ID NO: 744807 - RNA, 19 nt, Artificial Sequence
  Description of Artificial Sequence: Synthetic oligonucleotide
uccacuuaucaccauuuua

SEQ ID NO: 744808 - RNA, 19 nt, Artificial Sequence
  Description of Artificial Sequence: Synthetic oligonucleotide
agaugagaccauuggccuc

SEQ ID NO: 744809 - RNA, 19 nt, Artificial Sequence
  Description of Artificial Sequence: Synthetic oligonucleotide
uuccacucauuuaauuuaa

SEQ ID NO: 744810 - RNA, 19 nt, Artificial Sequence
  Description of Artificial Sequence: Synthetic oligonucleotide
guugccuaagcuuccacca

SEQ ID NO: 744811 - RNA, 19 nt, Artificial Sequence
  Description of Artificial Sequence: Synthetic oligonucleotide
acuuauaccaagacaauuu

SEQ ID NO: 744812 - RNA, 19 nt, Artificial Sequence
  Description of Artificial Sequence: Synthetic oligonucleotide
ggcucaucguauuuuaacc

SEQ ID NO: 744813 - RNA, 19 nt, Artificial Sequence
  Description of Artificial Sequence: Synthetic oligonucleotide
uguuggcgggcccaguuug

SEQ ID NO: 744814 - RNA, 19 nt, Artificial Sequence
  Description of Artificial Sequence: Synthetic oligonucleotide
uccggauugucuugaauaa

SEQ ID NO: 744815 - RNA, 19 nt, Artificial Sequence
  Description of Artificial Sequence: Synthetic oligonucleotide
auuuuaaggcauuccggau

SEQ ID NO: 744816 - RNA, 19 nt, Artificial Sequence
  Description of Artificial Sequence: Synthetic oligonucleotide
aguauagagcugaguuucc

SEQ ID NO: 744817 - RNA, 19 nt, Artificial Sequence
  Description of Artificial Sequence: Synthetic oligonucleotide
acuucgguaaaaugcuggu

SEQ ID NO: 744818 - RNA, 19 nt, Artificial Sequence
  Description of Artificial Sequence: Synthetic oligonucleotide
gaccaccuaaaccauucug

SEQ ID NO: 744819 - RNA, 19 nt, Artificial Sequence
  Description of Artificial Sequence: Synthetic oligonucleotide
agcacucaaauaaguauag

SEQ ID NO: 744820 - RNA, 19 nt, Artificial Sequence
  Description of Artificial Sequence: Synthetic oligonucleotide
agcuaaaauauggucuuug

SEQ ID NO: 744821 - RNA, 19 nt, Artificial Sequence
  Description of Artificial Sequence: Synthetic oligonucleotide
uucgugugccaacuuucag

SEQ ID NO: 744822 - RNA, 19 nt, Artificial Sequence
  Description of Artificial Sequence: Synthetic oligonucleotide
auaaauggcuggcgauuag

SEQ ID NO: 744823 - RNA, 19 nt, Artificial Sequence
  Description of Artificial Sequence: Synthetic oligonucleotide
aucguauuuuaaccaccuc

SEQ ID NO: 744824 - RNA, 19 nt, Artificial Sequence
  Description of Artificial Sequence: Synthetic oligonucleotide
agcuguaauccuuuggguu

SEQ ID NO: 744825 - RNA, 19 nt, Artificial Sequence
  Description of Artificial Sequence: Synthetic oligonucleotide
uacuacuacuuaguguuga

SEQ ID NO: 744826 - RNA, 19 nt, Artificial Sequence
  Description of Artificial Sequence: Synthetic oligonucleotide
auucuucgauauaagagga

SEQ ID NO: 744827 - RNA, 19 nt, Artificial Sequence
  Description of Artificial Sequence: Synthetic oligonucleotide
acacaauaugaaaauagaa

SEQ ID NO: 744828 - RNA, 19 nt, Artificial Sequence
  Description of Artificial Sequence: Synthetic oligonucleotide
guuucucaaaggggcaucg

SEQ ID NO: 744829 - RNA, 19 nt, Artificial Sequence
  Description of Artificial Sequence: Synthetic oligonucleotide
acaacacaaauuagacaac

SEQ ID NO: 744830 - RNA, 19 nt, Artificial Sequence
  Description of Artificial Sequence: Synthetic oligonucleotide
cauuugcuccacaaguauc

SEQ ID NO: 744831 - RNA, 19 nt, Artificial Sequence
  Description of Artificial Sequence: Synthetic oligonucleotide
uaaucguguuucuuucuuc

SEQ ID NO: 744832 - RNA, 19 nt, Artificial Sequence
  Description of Artificial Sequence: Synthetic oligonucleotide
ugucguaauauuccacauu

SEQ ID NO: 744833 - RNA, 19 nt, Artificial Sequence
  Description of Artificial Sequence: Synthetic oligonucleotide
caccuaaaccauucuggcc

SEQ ID NO: 744834 - RNA, 19 nt, Artificial Sequence
  Description of Artificial Sequence: Synthetic oligonucleotide
agcacuuacacaauaugaa

SEQ ID NO: 744835 - RNA, 19 nt, Artificial Sequence
  Description of Artificial Sequence: Synthetic oligonucleotide
uguacacuacauuguccca

SEQ ID NO: 744836 - RNA, 19 nt, Artificial Sequence
  Description of Artificial Sequence: Synthetic oligonucleotide
cagaccaccuaaaccauuc

SEQ ID NO: 744837 - RNA, 19 nt, Artificial Sequence
  Description of Artificial Sequence: Synthetic oligonucleotide
aaucugacuuuagcaagga

SEQ ID NO: 744838 - RNA, 19 nt, Artificial Sequence
  Description of Artificial Sequence: Synthetic oligonucleotide
ugcuuauaacuuucaaguu

SEQ ID NO: 744839 - RNA, 19 nt, Artificial Sequence
  Description of Artificial Sequence: Synthetic oligonucleotide
accuccagauguauaaauc

SEQ ID NO: 744840 - RNA, 19 nt, Artificial Sequence
  Description of Artificial Sequence: Synthetic oligonucleotide
guagaaauucaucaguuuu

SEQ ID NO: 744841 - RNA, 19 nt, Artificial Sequence
  Description of Artificial Sequence: Synthetic oligonucleotide
aaggcauuccggauugucu

SEQ ID NO: 744842 - RNA, 19 nt, Artificial Sequence
  Description of Artificial Sequence: Synthetic oligonucleotide
agcuaagcugggcuacuuc

SEQ ID NO: 744843 - RNA, 19 nt, Artificial Sequence
  Description of Artificial Sequence: Synthetic oligonucleotide
cuacuacuuaguguugacc

SEQ ID NO: 744844 - RNA, 19 nt, Artificial Sequence
  Description of Artificial Sequence: Synthetic oligonucleotide
gaaucuuacuuaucaaaau

SEQ ID NO: 744845 - RNA, 19 nt, Artificial Sequence
  Description of Artificial Sequence: Synthetic oligonucleotide
uauucaaggaugugcccua

SEQ ID NO: 744846 - RNA, 19 nt, Artificial Sequence
  Description of Artificial Sequence: Synthetic oligonucleotide
auacguaauacuacauaca

SEQ ID NO: 744847 - RNA, 19 nt, Artificial Sequence
  Description of Artificial Sequence: Synthetic oligonucleotide
cuugaaaaccugccagcac

SEQ ID NO: 744848 - RNA, 19 nt, Artificial Sequence
  Description of Artificial Sequence: Synthetic oligonucleotide
cugcaagcacacuuauacc

SEQ ID NO: 744849 - RNA, 19 nt, Artificial Sequence
  Description of Artificial Sequence: Synthetic oligonucleotide
cuucauuugcuccacaagu

SEQ ID NO: 744850 - RNA, 19 nt, Artificial Sequence
  Description of Artificial Sequence: Synthetic oligonucleotide
ucgcuuuauggggaaaagc

SEQ ID NO: 744851 - RNA, 19 nt, Artificial Sequence
  Description of Artificial Sequence: Synthetic oligonucleotide
aaacuucgguaaaaugcug

SEQ ID NO: 744852 - RNA, 19 nt, Artificial Sequence
  Description of Artificial Sequence: Synthetic oligonucleotide
auagacuucacaggaacua

SEQ ID NO: 744853 - RNA, 19 nt, Artificial Sequence
  Description of Artificial Sequence: Synthetic oligonucleotide
agaugguaccucauuccac

SEQ ID NO: 744854 - RNA, 19 nt, Artificial Sequence
  Description of Artificial Sequence: Synthetic oligonucleotide
cauagcacucaaauaagua

SEQ ID NO: 744855 - RNA, 19 nt, Artificial Sequence
  Description of Artificial Sequence: Synthetic oligonucleotide
uuugaugcguccaccuguu

SEQ ID NO: 744856 - RNA, 19 nt, Artificial Sequence
  Description of Artificial Sequence: Synthetic oligonucleotide
ugagcaugccccacucugu

SEQ ID NO: 744857 - RNA, 19 nt, Artificial Sequence
  Description of Artificial Sequence: Synthetic oligonucleotide
acuacuuaguguugaccaa

SEQ ID NO: 744858 - RNA, 19 nt, Artificial Sequence
  Description of Artificial Sequence: Synthetic oligonucleotide
acuuaguguugaccaaaca

SEQ ID NO: 744859 - RNA, 19 nt, Artificial Sequence
  Description of Artificial Sequence: Synthetic oligonucleotide
cgauauaagaggaaaucug

SEQ ID NO: 744860 - RNA, 19 nt, Artificial Sequence
  Description of Artificial Sequence: Synthetic oligonucleotide
augucguaauauuccacau

SEQ ID NO: 744861 - RNA, 19 nt, Artificial Sequence
  Description of Artificial Sequence: Synthetic oligonucleotide
caaacagacuaacuacaca

SEQ ID NO: 744862 - RNA, 19 nt, Artificial Sequence
  Description of Artificial Sequence: Synthetic oligonucleotide
ucgguaaaaugcuggugaa

SEQ ID NO: 744863 - RNA, 19 nt, Artificial Sequence
  Description of Artificial Sequence: Synthetic oligonucleotide
uggcaauccauuuguccgu

SEQ ID NO: 744864 - RNA, 19 nt, Artificial Sequence
  Description of Artificial Sequence: Synthetic oligonucleotide
cguauuuuaaccaccucac

SEQ ID NO: 744865 - RNA, 19 nt, Artificial Sequence
  Description of Artificial Sequence: Synthetic oligonucleotide
agaguguccuggcuaagaa

SEQ ID NO: 744866 - RNA, 19 nt, Artificial Sequence
  Description of Artificial Sequence: Synthetic oligonucleotide
ucucuccguuucucaaagg

SEQ ID NO: 744867 - RNA, 19 nt, Artificial Sequence
  Description of Artificial Sequence: Synthetic oligonucleotide
uugguuauauggccagcua

SEQ ID NO: 744868 - RNA, 19 nt, Artificial Sequence
  Description of Artificial Sequence: Synthetic oligonucleotide
gagcuaugcgguaaucgug

SEQ ID NO: 744869 - RNA, 19 nt, Artificial Sequence
  Description of Artificial Sequence: Synthetic oligonucleotide
ugguugggagccuccaaac

SEQ ID NO: 744870 - RNA, 19 nt, Artificial Sequence
  Description of Artificial Sequence: Synthetic oligonucleotide
guuuacuuuagaauggaau

SEQ ID NO: 744871 - RNA, 19 nt, Artificial Sequence
  Description of Artificial Sequence: Synthetic oligonucleotide
gcucaauaauaucaggcuc

SEQ ID NO: 744872 - RNA, 19 nt, Artificial Sequence
  Description of Artificial Sequence: Synthetic oligonucleotide
guuacaccccuccacggca

SEQ ID NO: 744873 - RNA, 19 nt, Artificial Sequence
  Description of Artificial Sequence: Synthetic oligonucleotide
uugccuaagcuuccaccac

SEQ ID NO: 744874 - RNA, 19 nt, Artificial Sequence
  Description of Artificial Sequence: Synthetic oligonucleotide
caguuuggaauaccagcug

SEQ ID NO: 744875 - RNA, 19 nt, Artificial Sequence
  Description of Artificial Sequence: Synthetic oligonucleotide
gguuacucguuugacauca

SEQ ID NO: 744876 - RNA, 19 nt, Artificial Sequence
  Description of Artificial Sequence: Synthetic oligonucleotide
agcuaugcgguaaucgugu

SEQ ID NO: 744877 - RNA, 19 nt, Artificial Sequence
  Description of Artificial Sequence: Synthetic oligonucleotide
auuuguccguuucuguguu

SEQ ID NO: 744878 - RNA, 19 nt, Artificial Sequence
  Description of Artificial Sequence: Synthetic oligonucleotide
agacaauuugaugcgucca

SEQ ID NO: 744879 - RNA, 19 nt, Artificial Sequence
  Description of Artificial Sequence: Synthetic oligonucleotide
ggaaucuuacuuaucaaaa

SEQ ID NO: 744880 - RNA, 19 nt, Artificial Sequence
  Description of Artificial Sequence: Synthetic oligonucleotide
ggacaguccagacacucug

SEQ ID NO: 744881 - RNA, 19 nt, Artificial Sequence
  Description of Artificial Sequence: Synthetic oligonucleotide
caucggaugucuguccagc

SEQ ID NO: 744882 - RNA, 19 nt, Artificial Sequence
  Description of Artificial Sequence: Synthetic oligonucleotide
aggcauuccggauugucuu

SEQ ID NO: 744883 - RNA, 19 nt, Artificial Sequence
  Description of Artificial Sequence: Synthetic oligonucleotide
gcucaaucauugaacacag

SEQ ID NO: 744884 - RNA, 19 nt, Artificial Sequence
  Description of Artificial Sequence: Synthetic oligonucleotide
uacaggacugugguuggga

SEQ ID NO: 744885 - RNA, 19 nt, Artificial Sequence
  Description of Artificial Sequence: Synthetic oligonucleotide
auuaggcucaucguauuuu

SEQ ID NO: 744886 - RNA, 19 nt, Artificial Sequence
  Description of Artificial Sequence: Synthetic oligonucleotide
gacaccaucuuccacucau

SEQ ID NO: 744887 - RNA, 19 nt, Artificial Sequence
  Description of Artificial Sequence: Synthetic oligonucleotide
ggaacuaagcacucuccca

SEQ ID NO: 744888 - RNA, 19 nt, Artificial Sequence
  Description of Artificial Sequence: Synthetic oligonucleotide
cuaaagcuaagcugggcua

SEQ ID NO: 744889 - RNA, 19 nt, Artificial Sequence
  Description of Artificial Sequence: Synthetic oligonucleotide
gcucaucguauuuuaacca

SEQ ID NO: 744890 - RNA, 19 nt, Artificial Sequence
  Description of Artificial Sequence: Synthetic oligonucleotide
auaauccauacuacuacuu

SEQ ID NO: 744891 - RNA, 19 nt, Artificial Sequence
  Description of Artificial Sequence: Synthetic oligonucleotide
cuggguuacucguuugaca

SEQ ID NO: 744892 - RNA, 19 nt, Artificial Sequence
  Description of Artificial Sequence: Synthetic oligonucleotide
cuuguaucauagcacucaa

SEQ ID NO: 744893 - RNA, 19 nt, Artificial Sequence
  Description of Artificial Sequence: Synthetic oligonucleotide
guagcaauccauucgcuuu

SEQ ID NO: 744894 - RNA, 19 nt, Artificial Sequence
  Description of Artificial Sequence: Synthetic oligonucleotide
gcagcgcugagucagcaug

SEQ ID NO: 744895 - RNA, 19 nt, Artificial Sequence
  Description of Artificial Sequence: Synthetic oligonucleotide
ggcuacuucucugaugagc

SEQ ID NO: 744896 - RNA, 19 nt, Artificial Sequence
  Description of Artificial Sequence: Synthetic oligonucleotide
accaaacuaauggaacaaa

SEQ ID NO: 744897 - RNA, 19 nt, Artificial Sequence
  Description of Artificial Sequence: Synthetic oligonucleotide
cagcgcugagucagcaugc

SEQ ID NO: 744898 - RNA, 19 nt, Artificial Sequence
  Description of Artificial Sequence: Synthetic oligonucleotide
aucuaccuacaccuugaaa

SEQ ID NO: 744899 - RNA, 19 nt, Artificial Sequence
  Description of Artificial Sequence: Synthetic oligonucleotide
auuccggauugucuugaau

SEQ ID NO: 744900 - RNA, 19 nt, Artificial Sequence
  Description of Artificial Sequence: Synthetic oligonucleotide
gcaguauaagcaaauucca

SEQ ID NO: 744901 - RNA, 19 nt, Artificial Sequence
  Description of Artificial Sequence: Synthetic oligonucleotide
gcacuuacacaauaugaaa

SEQ ID NO: 744902 - RNA, 19 nt, Artificial Sequence
  Description of Artificial Sequence: Synthetic oligonucleotide
gcccuaaucuaccuacacc

SEQ ID NO: 744903 - RNA, 19 nt, Artificial Sequence
  Description of Artificial Sequence: Synthetic oligonucleotide
cuguguuauauucaaggau

SEQ ID NO: 744904 - RNA, 19 nt, Artificial Sequence
  Description of Artificial Sequence: Synthetic oligonucleotide
acggacuuuggaauuggca

SEQ ID NO: 744905 - RNA, 19 nt, Artificial Sequence
  Description of Artificial Sequence: Synthetic oligonucleotide
ugcacacuucaccguuaca

SEQ ID NO: 744906 - RNA, 19 nt, Artificial Sequence
  Description of Artificial Sequence: Synthetic oligonucleotide
augauagagccaacugcug

SEQ ID NO: 744907 - RNA, 19 nt, Artificial Sequence
  Description of Artificial Sequence: Synthetic oligonucleotide
cuucuaggccuugugccac

SEQ ID NO: 744908 - RNA, 19 nt, Artificial Sequence
  Description of Artificial Sequence: Synthetic oligonucleotide
cugggcuacuucucugaug

SEQ ID NO: 744909 - RNA, 19 nt, Artificial Sequence
  Description of Artificial Sequence: Synthetic oligonucleotide
gcuuauaacuuucaaguuu

SEQ ID NO: 744910 - RNA, 19 nt, Artificial Sequence
  Description of Artificial Sequence: Synthetic oligonucleotide
aagcacucucccagaaaca

SEQ ID NO: 744911 - RNA, 19 nt, Artificial Sequence
  Description of Artificial Sequence: Synthetic oligonucleotide
cauuuguccguuucugugu

SEQ ID NO: 744912 - RNA, 19 nt, Artificial Sequence
  Description of Artificial Sequence: Synthetic oligonucleotide
guacacuacauugucccaa

SEQ ID NO: 744913 - RNA, 19 nt, Artificial Sequence
  Description of Artificial Sequence: Synthetic oligonucleotide
uuacaccccuccacggcau

SEQ ID NO: 744914 - RNA, 19 nt, Artificial Sequence
  Description of Artificial Sequence: Synthetic oligonucleotide
aucugacuuuagcaaggau

SEQ ID NO: 744915 - RNA, 19 nt, Artificial Sequence
  Description of Artificial Sequence: Synthetic oligonucleotide
auacuacuacuuaguguug

SEQ ID NO: 744916 - RNA, 19 nt, Artificial Sequence
  Description of Artificial Sequence: Synthetic oligonucleotide
ggaugugcccuaaucuacc

SEQ ID NO: 744917 - RNA, 19 nt, Artificial Sequence
  Description of Artificial Sequence: Synthetic oligonucleotide
cuacuuaguguugaccaaa

SEQ ID NO: 744918 - RNA, 19 nt, Artificial Sequence
  Description of Artificial Sequence: Synthetic oligonucleotide
cccuaaucuaccuacaccu

SEQ ID NO: 744919 - RNA, 19 nt, Artificial Sequence
  Description of Artificial Sequence: Synthetic oligonucleotide
aguguugaccaaacagaaa

SEQ ID NO: 744920 - RNA, 19 nt, Artificial Sequence
  Description of Artificial Sequence: Synthetic oligonucleotide
aucguguuucuuucuucua

SEQ ID NO: 744921 - RNA, 19 nt, Artificial Sequence
  Description of Artificial Sequence: Synthetic oligonucleotide
cauaaauggcuggcgauua

SEQ ID NO: 744922 - RNA, 19 nt, Artificial Sequence
  Description of Artificial Sequence: Synthetic oligonucleotide
gcaaggauaucaaccauaa

SEQ ID NO: 744923 - RNA, 19 nt, Artificial Sequence
  Description of Artificial Sequence: Synthetic oligonucleotide
cuggcuaagaagcuggguu

SEQ ID NO: 744924 - RNA, 19 nt, Artificial Sequence
  Description of Artificial Sequence: Synthetic oligonucleotide
guaauacuacauacaguua

SEQ ID NO: 744925 - RNA, 19 nt, Artificial Sequence
  Description of Artificial Sequence: Synthetic oligonucleotide
guaaucguguuucuuucuu

SEQ ID NO: 744926 - RNA, 19 nt, Artificial Sequence
  Description of Artificial Sequence: Synthetic oligonucleotide
gucucagaugagucagguc

SEQ ID NO: 744927 - RNA, 19 nt, Artificial Sequence
  Description of Artificial Sequence: Synthetic oligonucleotide
ggcacuaagugaaauaaau

SEQ ID NO: 744928 - RNA, 19 nt, Artificial Sequence
  Description of Artificial Sequence: Synthetic oligonucleotide
gauuaggcucaucguauuu

SEQ ID NO: 744929 - RNA, 19 nt, Artificial Sequence
  Description of Artificial Sequence: Synthetic oligonucleotide
guuggcgggcccaguuugg

SEQ ID NO: 744930 - RNA, 19 nt, Artificial Sequence
  Description of Artificial Sequence: Synthetic oligonucleotide
cuacaggacugugguuggg

SEQ ID NO: 744931 - RNA, 19 nt, Artificial Sequence
  Description of Artificial Sequence: Synthetic oligonucleotide
cuaacaaugacuggacauu

SEQ ID NO: 744932 - RNA, 19 nt, Artificial Sequence
  Description of Artificial Sequence: Synthetic oligonucleotide
cuaaaccauucuggccgcc

SEQ ID NO: 744933 - RNA, 19 nt, Artificial Sequence
  Description of Artificial Sequence: Synthetic oligonucleotide
cuaagcacucucccagaaa

SEQ ID NO: 744934 - RNA, 19 nt, Artificial Sequence
  Description of Artificial Sequence: Synthetic oligonucleotide
gcugucucgagguguuggc

SEQ ID NO: 744935 - RNA, 19 nt, Artificial Sequence
  Description of Artificial Sequence: Synthetic oligonucleotide
caaacagagcuaugcggua

SEQ ID NO: 744936 - RNA, 19 nt, Artificial Sequence
  Description of Artificial Sequence: Synthetic oligonucleotide
cuugguuauauggccagcu

SEQ ID NO: 744937 - RNA, 19 nt, Artificial Sequence
  Description of Artificial Sequence: Synthetic oligonucleotide
caaaccauugguggccaga

SEQ ID NO: 744938 - RNA, 19 nt, Artificial Sequence
  Description of Artificial Sequence: Synthetic oligonucleotide
aucaccauuuuaaggcauu

SEQ ID NO: 744939 - RNA, 19 nt, Artificial Sequence
  Description of Artificial Sequence: Synthetic oligonucleotide
augguaccucauuccacuu

SEQ ID NO: 744940 - RNA, 19 nt, Artificial Sequence
  Description of Artificial Sequence: Synthetic oligonucleotide
ucuaggccuugugccaccu

SEQ ID NO: 744941 - RNA, 19 nt, Artificial Sequence
  Description of Artificial Sequence: Synthetic oligonucleotide
augcgguaaucguguuucu

SEQ ID NO: 744942 - RNA, 19 nt, Artificial Sequence
  Description of Artificial Sequence: Synthetic oligonucleotide
cagguucaaucugguacug

SEQ ID NO: 744943 - RNA, 19 nt, Artificial Sequence
  Description of Artificial Sequence: Synthetic oligonucleotide
gggcucaaucauugaacac

SEQ ID NO: 744944 - RNA, 19 nt, Artificial Sequence
  Description of Artificial Sequence: Synthetic oligonucleotide
ggcuaagaagcuggguuac

SEQ ID NO: 744945 - RNA, 19 nt, Artificial Sequence
  Description of Artificial Sequence: Synthetic oligonucleotide
uuggcgggcccaguuugga

SEQ ID NO: 744946 - RNA, 19 nt, Artificial Sequence
  Description of Artificial Sequence: Synthetic oligonucleotide
agguccacucaaucauguu

SEQ ID NO: 744947 - RNA, 19 nt, Artificial Sequence
  Description of Artificial Sequence: Synthetic oligonucleotide
gcaucggaugucuguccag

SEQ ID NO: 744948 - RNA, 19 nt, Artificial Sequence
  Description of Artificial Sequence: Synthetic oligonucleotide
cugcagcgucauaaaccug

SEQ ID NO: 744949 - RNA, 19 nt, Artificial Sequence
  Description of Artificial Sequence: Synthetic oligonucleotide
gacugugguugggagccuc

SEQ ID NO: 744950 - RNA, 19 nt, Artificial Sequence
  Description of Artificial Sequence: Synthetic oligonucleotide
gguaaucguguuucuuucu

SEQ ID NO: 744951 - RNA, 19 nt, Artificial Sequence
  Description of Artificial Sequence: Synthetic oligonucleotide
auucaaggaugugcccuaa

SEQ ID NO: 744952 - RNA, 19 nt, Artificial Sequence
  Description of Artificial Sequence: Synthetic oligonucleotide
ccguuacaccccuccacgg

SEQ ID NO: 744953 - RNA, 19 nt, Artificial Sequence
  Description of Artificial Sequence: Synthetic oligonucleotide
uacaccccuccacggcauc

SEQ ID NO: 744954 - RNA, 19 nt, Artificial Sequence
  Description of Artificial Sequence: Synthetic oligonucleotide
cagaguguccuggcuaaga

SEQ ID NO: 744955 - RNA, 19 nt, Artificial Sequence
  Description of Artificial Sequence: Synthetic oligonucleotide
cugcaucucuccguuucuc

SEQ ID NO: 744956 - RNA, 19 nt, Artificial Sequence
  Description of Artificial Sequence: Synthetic oligonucleotide
aguuuggcacuaagugaaa

SEQ ID NO: 744957 - RNA, 19 nt, Artificial Sequence
  Description of Artificial Sequence: Synthetic oligonucleotide
uucuggccgcccacagcaa

SEQ ID NO: 744958 - RNA, 19 nt, Artificial Sequence
  Description of Artificial Sequence: Synthetic oligonucleotide
gcgucauaaaccugguccu

SEQ ID NO: 744959 - RNA, 19 nt, Artificial Sequence
  Description of Artificial Sequence: Synthetic oligonucleotide
uggcgggcccaguuuggaa

SEQ ID NO: 744960 - RNA, 19 nt, Artificial Sequence
  Description of Artificial Sequence: Synthetic oligonucleotide
ccauacuacuacuuagugu

SEQ ID NO: 744961 - RNA, 19 nt, Artificial Sequence
  Description of Artificial Sequence: Synthetic oligonucleotide
gcuggguuacucguuugac

SEQ ID NO: 744962 - RNA, 19 nt, Artificial Sequence
  Description of Artificial Sequence: Synthetic oligonucleotide
cgguaaucguguuucuuuc

SEQ ID NO: 744963 - RNA, 19 nt, Artificial Sequence
  Description of Artificial Sequence: Synthetic oligonucleotide
cguuacaccccuccacggc

SEQ ID NO: 744964 - RNA, 19 nt, Artificial Sequence
  Description of Artificial Sequence: Synthetic oligonucleotide
cacuuauaccaagacaauu

SEQ ID NO: 744965 - RNA, 19 nt, Artificial Sequence
  Description of Artificial Sequence: Synthetic oligonucleotide
cuaggccuugugccaccug

SEQ ID NO: 744966 - RNA, 19 nt, Artificial Sequence
  Description of Artificial Sequence: Synthetic oligonucleotide
ggguuacucguuugacauc

SEQ ID NO: 744967 - RNA, 19 nt, Artificial Sequence
  Description of Artificial Sequence: Synthetic oligonucleotide
ccggauugucuugaauaag

SEQ ID NO: 744968 - RNA, 19 nt, Artificial Sequence
  Description of Artificial Sequence: Synthetic oligonucleotide
gcugagaaccacccaaaau

SEQ ID NO: 744969 - RNA, 19 nt, Artificial Sequence
  Description of Artificial Sequence: Synthetic oligonucleotide
gcacucaaauaaguauaga

SEQ ID NO: 744970 - RNA, 19 nt, Artificial Sequence
  Description of Artificial Sequence: Synthetic oligonucleotide
ccagcuaaaauauggucuu

SEQ ID NO: 744971 - RNA, 19 nt, Artificial Sequence
  Description of Artificial Sequence: Synthetic oligonucleotide
cuucaccguuacaccccuc

SEQ ID NO: 744972 - RNA, 19 nt, Artificial Sequence
  Description of Artificial Sequence: Synthetic oligonucleotide
cggauugucuugaauaagu

SEQ ID NO: 744973 - RNA, 19 nt, Artificial Sequence
  Description of Artificial Sequence: Synthetic oligonucleotide
gcgguaaucguguuucuuu

SEQ ID NO: 744974 - RNA, 19 nt, Artificial Sequence
  Description of Artificial Sequence: Synthetic oligonucleotide
aggccuugugccaccugca

SEQ ID NO: 744975 - RNA, 19 nt, Artificial Sequence
  Description of Artificial Sequence: Synthetic oligonucleotide
guaccucauuccacuuauc

SEQ ID NO: 744976 - RNA, 19 nt, Artificial Sequence
  Description of Artificial Sequence: Synthetic oligonucleotide
gggcuacuucucugaugag

SEQ ID NO: 744977 - RNA, 19 nt, Artificial Sequence
  Description of Artificial Sequence: Synthetic oligonucleotide
cuaugcgguaaucguguuu

SEQ ID NO: 744978 - RNA, 19 nt, Artificial Sequence
  Description of Artificial Sequence: Synthetic oligonucleotide
cgaucuucaggagacagua

SEQ ID NO: 744979 - RNA, 19 nt, Artificial Sequence
  Description of Artificial Sequence: Synthetic oligonucleotide
gcuggugaauaaagucauc

SEQ ID NO: 744980 - RNA, 19 nt, Artificial Sequence
  Description of Artificial Sequence: Synthetic oligonucleotide
guuacucguuugacaucaa

SEQ ID NO: 744981 - RNA, 19 nt, Artificial Sequence
  Description of Artificial Sequence: Synthetic oligonucleotide
gcgauuaggcucaucguau

SEQ ID NO: 744982 - RNA, 19 nt, Artificial Sequence
  Description of Artificial Sequence: Synthetic oligonucleotide
guuuucuggcugauagcuu

SEQ ID NO: 744983 - RNA, 19 nt, Artificial Sequence
  Description of Artificial Sequence: Synthetic oligonucleotide
ggcgggcccaguuuggaau

SEQ ID NO: 744984 - RNA, 19 nt, Artificial Sequence
  Description of Artificial Sequence: Synthetic oligonucleotide
accucacugcagcgucaua

SEQ ID NO: 744985 - RNA, 19 nt, Artificial Sequence
  Description of Artificial Sequence: Synthetic oligonucleotide
cgucauaaaccugguccuc

SEQ ID NO: 744986 - RNA, 19 nt, Artificial Sequence
  Description of Artificial Sequence: Synthetic oligonucleotide
gcgggcccaguuuggaaua

SEQ ID NO: 744987 - RNA, 19 nt, Artificial Sequence
  Description of Artificial Sequence: Synthetic oligonucleotide
cguuugacaucaaguugua

SEQ ID NO: 744988 - RNA, 19 nt, Artificial Sequence
  Description of Artificial Sequence: Synthetic oligonucleotide
gcuaagaagcuggguuacu

SEQ ID NO: 744989 - RNA, 19 nt, Artificial Sequence
  Description of Artificial Sequence: Synthetic oligonucleotide
ccauaaauggcuggcgauu

SEQ ID NO: 744990 - RNA, 19 nt, Artificial Sequence
  Description of Artificial Sequence: Synthetic oligonucleotide
cagcuaaaauauggucuuu

SEQ ID NO: 744991 - RNA, 19 nt, Artificial Sequence
  Description of Artificial Sequence: Synthetic oligonucleotide
gcagcgucauaaaccuggu

SEQ ID NO: 744992 - RNA, 19 nt, Artificial Sequence
  Description of Artificial Sequence: Synthetic oligonucleotide
cggggacaccaucuuccac

SEQ ID NO: 744993 - RNA, 19 nt, Artificial Sequence
  Description of Artificial Sequence: Synthetic oligonucleotide
gcuaugcgguaaucguguu

SEQ ID NO: 744994 - RNA, 19 nt, Artificial Sequence
  Description of Artificial Sequence: Synthetic oligonucleotide
ccuggcuaagaagcugggu

SEQ ID NO: 744995 - RNA, 19 nt, Artificial Sequence
  Description of Artificial Sequence: Synthetic oligonucleotide
gcacucucccagaaacauu

SEQ ID NO: 744996 - RNA, 19 nt, Artificial Sequence
  Description of Artificial Sequence: Synthetic oligonucleotide
cgggcccaguuuggaauac

SEQ ID NO: 744997 - RNA, 19 nt, Artificial Sequence
  Description of Artificial Sequence: Synthetic oligonucleotide
ccguuucucaaaggggcau

SEQ ID NO: 744998 - RNA, 19 nt, Artificial Sequence
  Description of Artificial Sequence: Synthetic oligonucleotide
aacgccaugacaauaaugc

SEQ ID NO: 744999 - RNA, 19 nt, Artificial Sequence
  Description of Artificial Sequence: Synthetic oligonucleotide
guuaacauagauauaacgg

SEQ ID NO: 745000 - RNA, 19 nt, Artificial Sequence
  Description of Artificial Sequence: Synthetic oligonucleotide
agagcauauaacaagaugg

SEQ ID NO: 745001 - RNA, 19 nt, Artificial Sequence
  Description of Artificial Sequence: Synthetic oligonucleotide
auagauauaacggaugaac

SEQ ID NO: 745002 - RNA, 19 nt, Artificial Sequence
  Description of Artificial Sequence: Synthetic oligonucleotide
ugauguuccacacccaacg

SEQ ID NO: 745003 - RNA, 19 nt, Artificial Sequence
  Description of Artificial Sequence: Synthetic oligonucleotide
ucuugguucgacaaggugc

SEQ ID NO: 745004 - RNA, 19 nt, Artificial Sequence
  Description of Artificial Sequence: Synthetic oligonucleotide
aauggcuccaugacgaugc

SEQ ID NO: 745005 - RNA, 19 nt, Artificial Sequence
  Description of Artificial Sequence: Synthetic oligonucleotide
uccaaauguguccagaggc

SEQ ID NO: 745006 - RNA, 19 nt, Artificial Sequence
  Description of Artificial Sequence: Synthetic oligonucleotide
aaaaccacggauuggcaag

SEQ ID NO: 745007 - RNA, 19 nt, Artificial Sequence
  Description of Artificial Sequence: Synthetic oligonucleotide
gacaaggugcaucaaaggg

SEQ ID NO: 745008 - RNA, 19 nt, Artificial Sequence
  Description of Artificial Sequence: Synthetic oligonucleotide
cauauaacaagauggcugc

SEQ ID NO: 745009 - RNA, 19 nt, Artificial Sequence
  Description of Artificial Sequence: Synthetic oligonucleotide
acgcauuagaaugacagcc

SEQ ID NO: 745010 - RNA, 19 nt, Artificial Sequence
  Description of Artificial Sequence: Synthetic oligonucleotide
aucgaguggaaucaguggg

SEQ ID NO: 745011 - RNA, 19 nt, Artificial Sequence
  Description of Artificial Sequence: Synthetic oligonucleotide
uauccuuauaucauagaga

SEQ ID NO: 745012 - RNA, 19 nt, Artificial Sequence
  Description of Artificial Sequence: Synthetic oligonucleotide
aauaaugcccgugccaagg

SEQ ID NO: 745013 - RNA, 19 nt, Artificial Sequence
  Description of Artificial Sequence: Synthetic oligonucleotide
ugacauauagaaugacagg

SEQ ID NO: 745014 - RNA, 19 nt, Artificial Sequence
  Description of Artificial Sequence: Synthetic oligonucleotide
gaugacaguagauuuguac

SEQ ID NO: 745015 - RNA, 19 nt, Artificial Sequence
  Description of Artificial Sequence: Synthetic oligonucleotide
acuaagacuuuugugacgg

SEQ ID NO: 745016 - RNA, 19 nt, Artificial Sequence
  Description of Artificial Sequence: Synthetic oligonucleotide
aucagaucguaacccaucc

SEQ ID NO: 745017 - RNA, 19 nt, Artificial Sequence
  Description of Artificial Sequence: Synthetic oligonucleotide
aagcggaucucguacaaag

SEQ ID NO: 745018 - RNA, 19 nt, Artificial Sequence
  Description of Artificial Sequence: Synthetic oligonucleotide
ucuuuaaggcagcaggacc

SEQ ID NO: 745019 - RNA, 19 nt, Artificial Sequence
  Description of Artificial Sequence: Synthetic oligonucleotide
gguuaacauagauauaacg

SEQ ID NO: 745020 - RNA, 19 nt, Artificial Sequence
  Description of Artificial Sequence: Synthetic oligonucleotide
uauagaaugacagggucgc

SEQ ID NO: 745021 - RNA, 19 nt, Artificial Sequence
  Description of Artificial Sequence: Synthetic oligonucleotide
uagauuuguaccaggguug

SEQ ID NO: 745022 - RNA, 19 nt, Artificial Sequence
  Description of Artificial Sequence: Synthetic oligonucleotide
uagauauaacggaugaacu

SEQ ID NO: 745023 - RNA, 19 nt, Artificial Sequence
  Description of Artificial Sequence: Synthetic oligonucleotide
aaagggacuagcguuguuc

SEQ ID NO: 745024 - RNA, 19 nt, Artificial Sequence
  Description of Artificial Sequence: Synthetic oligonucleotide
gaagcuaucgaguggaauc

SEQ ID NO: 745025 - RNA, 19 nt, Artificial Sequence
  Description of Artificial Sequence: Synthetic oligonucleotide
uagcacacgcauuagaaug

SEQ ID NO: 745026 - RNA, 19 nt, Artificial Sequence
  Description of Artificial Sequence: Synthetic oligonucleotide
cuccacgucaagaagaaag

SEQ ID NO: 745027 - RNA, 19 nt, Artificial Sequence
  Description of Artificial Sequence: Synthetic oligonucleotide
gauaguagugguaaguuuc

SEQ ID NO: 745028 - RNA, 19 nt, Artificial Sequence
  Description of Artificial Sequence: Synthetic oligonucleotide
aauauaauucgaucuccau

SEQ ID NO: 745029 - RNA, 19 nt, Artificial Sequence
  Description of Artificial Sequence: Synthetic oligonucleotide
uaucgaguggaaucagugg

SEQ ID NO: 745030 - RNA, 19 nt, Artificial Sequence
  Description of Artificial Sequence: Synthetic oligonucleotide
ucuacugucuguacugccc

SEQ ID NO: 745031 - RNA, 19 nt, Artificial Sequence
  Description of Artificial Sequence: Synthetic oligonucleotide
ggagccaacgcuuagcacg

SEQ ID NO: 745032 - RNA, 19 nt, Artificial Sequence
  Description of Artificial Sequence: Synthetic oligonucleotide
uaacauagauauaacggau

SEQ ID NO: 745033 - RNA, 19 nt, Artificial Sequence
  Description of Artificial Sequence: Synthetic oligonucleotide
uguagugugucacaccuuc

SEQ ID NO: 745034 - RNA, 19 nt, Artificial Sequence
  Description of Artificial Sequence: Synthetic oligonucleotide
acgucaagaagaaaggcac

SEQ ID NO: 745035 - RNA, 19 nt, Artificial Sequence
  Description of Artificial Sequence: Synthetic oligonucleotide
acuagcguuguucuucccg

SEQ ID NO: 745036 - RNA, 19 nt, Artificial Sequence
  Description of Artificial Sequence: Synthetic oligonucleotide
acaaccaauggauuuccag

SEQ ID NO: 745037 - RNA, 19 nt, Artificial Sequence
  Description of Artificial Sequence: Synthetic oligonucleotide
gaguucaccacgcuccacg

SEQ ID NO: 745038 - RNA, 19 nt, Artificial Sequence
  Description of Artificial Sequence: Synthetic oligonucleotide
caaauauaauucgaucucc

SEQ ID NO: 745039 - RNA, 19 nt, Artificial Sequence
  Description of Artificial Sequence: Synthetic oligonucleotide
uagaaugacagggucgccg

SEQ ID NO: 745040 - RNA, 19 nt, Artificial Sequence
  Description of Artificial Sequence: Synthetic oligonucleotide
aaagauucggccauucggu

SEQ ID NO: 745041 - RNA, 19 nt, Artificial Sequence
  Description of Artificial Sequence: Synthetic oligonucleotide
gauugagggaaggaaggcg

SEQ ID NO: 745042 - RNA, 19 nt, Artificial Sequence
  Description of Artificial Sequence: Synthetic oligonucleotide
aagacuuuugugacggauc

SEQ ID NO: 745043 - RNA, 19 nt, Artificial Sequence
  Description of Artificial Sequence: Synthetic oligonucleotide
acacgcauuagaaugacag

SEQ ID NO: 745044 - RNA, 19 nt, Artificial Sequence
  Description of Artificial Sequence: Synthetic oligonucleotide
uggauuuccaguguucgag

SEQ ID NO: 745045 - RNA, 19 nt, Artificial Sequence
  Description of Artificial Sequence: Synthetic oligonucleotide
auaacggaugaacuuuaag

SEQ ID NO: 745046 - RNA, 19 nt, Artificial Sequence
  Description of Artificial Sequence: Synthetic oligonucleotide
aaauauaauucgaucucca

SEQ ID NO: 745047 - RNA, 19 nt, Artificial Sequence
  Description of Artificial Sequence: Synthetic oligonucleotide
cuaucgaguggaaucagug

SEQ ID NO: 745048 - RNA, 19 nt, Artificial Sequence
  Description of Artificial Sequence: Synthetic oligonucleotide
ugaagucucagaccagcgc

SEQ ID NO: 745049 - RNA, 19 nt, Artificial Sequence
  Description of Artificial Sequence: Synthetic oligonucleotide
uguucgaggaaagaagcca

SEQ ID NO: 745050 - RNA, 19 nt, Artificial Sequence
  Description of Artificial Sequence: Synthetic oligonucleotide
caguagauuuguaccaggg

SEQ ID NO: 745051 - RNA, 19 nt, Artificial Sequence
  Description of Artificial Sequence: Synthetic oligonucleotide
aguagugguaaguuuccug

SEQ ID NO: 745052 - RNA, 19 nt, Artificial Sequence
  Description of Artificial Sequence: Synthetic oligonucleotide
ucguacaaagauucggcca

SEQ ID NO: 745053 - RNA, 19 nt, Artificial Sequence
  Description of Artificial Sequence: Synthetic oligonucleotide
ucaguaaagaguagccaaa

SEQ ID NO: 745054 - RNA, 19 nt, Artificial Sequence
  Description of Artificial Sequence: Synthetic oligonucleotide
acaguagauuuguaccagg

SEQ ID NO: 745055 - RNA, 19 nt, Artificial Sequence
  Description of Artificial Sequence: Synthetic oligonucleotide
agauauaacggaugaacuu

SEQ ID NO: 745056 - RNA, 19 nt, Artificial Sequence
  Description of Artificial Sequence: Synthetic oligonucleotide
aagggacuagcguuguucu

SEQ ID NO: 745057 - RNA, 19 nt, Artificial Sequence
  Description of Artificial Sequence: Synthetic oligonucleotide
aagucaucgcuagagccuc

SEQ ID NO: 745058 - RNA, 19 nt, Artificial Sequence
  Description of Artificial Sequence: Synthetic oligonucleotide
ugugaguaaggccuaggaa

SEQ ID NO: 745059 - RNA, 19 nt, Artificial Sequence
  Description of Artificial Sequence: Synthetic oligonucleotide
ucguaacccauccaagcug

SEQ ID NO: 745060 - RNA, 19 nt, Artificial Sequence
  Description of Artificial Sequence: Synthetic oligonucleotide
cucgccuccaaucugccgg

SEQ ID NO: 745061 - RNA, 19 nt, Artificial Sequence
  Description of Artificial Sequence: Synthetic oligonucleotide
auucagucagaagcuaucg

SEQ ID NO: 745062 - RNA, 19 nt, Artificial Sequence
  Description of Artificial Sequence: Synthetic oligonucleotide
gaauucuagguggaagucc

SEQ ID NO: 745063 - RNA, 19 nt, Artificial Sequence
  Description of Artificial Sequence: Synthetic oligonucleotide
uucaucagaucguaaccca

SEQ ID NO: 745064 - RNA, 19 nt, Artificial Sequence
  Description of Artificial Sequence: Synthetic oligonucleotide
acgccaugacaauaaugcc

SEQ ID NO: 745065 - RNA, 19 nt, Artificial Sequence
  Description of Artificial Sequence: Synthetic oligonucleotide
ucuugagguuaacauagau

SEQ ID NO: 745066 - RNA, 19 nt, Artificial Sequence
  Description of Artificial Sequence: Synthetic oligonucleotide
cucguacaaagauucggcc

SEQ ID NO: 745067 - RNA, 19 nt, Artificial Sequence
  Description of Artificial Sequence: Synthetic oligonucleotide
guuguaccgagccagguca

SEQ ID NO: 745068 - RNA, 19 nt, Artificial Sequence
  Description of Artificial Sequence: Synthetic oligonucleotide
aguaaagaguagccaaaga

SEQ ID NO: 745069 - RNA, 19 nt, Artificial Sequence
  Description of Artificial Sequence: Synthetic oligonucleotide
aucguaacccauccaagcu

SEQ ID NO: 745070 - RNA, 19 nt, Artificial Sequence
  Description of Artificial Sequence: Synthetic oligonucleotide
auaaugcccgugccaaggg

SEQ ID NO: 745071 - RNA, 19 nt, Artificial Sequence
  Description of Artificial Sequence: Synthetic oligonucleotide
uucuugguucgacaaggug

SEQ ID NO: 745072 - RNA, 19 nt, Artificial Sequence
  Description of Artificial Sequence: Synthetic oligonucleotide
ugucacucagagcucaguc

SEQ ID NO: 745073 - RNA, 19 nt, Artificial Sequence
  Description of Artificial Sequence: Synthetic oligonucleotide
ucgagggugcccuaggacu

SEQ ID NO: 745074 - RNA, 19 nt, Artificial Sequence
  Description of Artificial Sequence: Synthetic oligonucleotide
gucaguaaagaguagccaa

SEQ ID NO: 745075 - RNA, 19 nt, Artificial Sequence
  Description of Artificial Sequence: Synthetic oligonucleotide
acgcuuagcacggaucgcc

SEQ ID NO: 745076 - RNA, 19 nt, Artificial Sequence
  Description of Artificial Sequence: Synthetic oligonucleotide
caggucagagcauauaaca

SEQ ID NO: 745077 - RNA, 19 nt, Artificial Sequence
  Description of Artificial Sequence: Synthetic oligonucleotide
ucccgggcgauauucuugg

SEQ ID NO: 745078 - RNA, 19 nt, Artificial Sequence
  Description of Artificial Sequence: Synthetic oligonucleotide
aagacauaaccagucagua

SEQ ID NO: 745079 - RNA, 19 nt, Artificial Sequence
  Description of Artificial Sequence: Synthetic oligonucleotide
agcacggaucgccaccacc

SEQ ID NO: 745080 - RNA, 19 nt, Artificial Sequence
  Description of Artificial Sequence: Synthetic oligonucleotide
aagcuaucgaguggaauca

SEQ ID NO: 745081 - RNA, 19 nt, Artificial Sequence
  Description of Artificial Sequence: Synthetic oligonucleotide
cugugucgaaccauuggcc

SEQ ID NO: 745082 - RNA, 19 nt, Artificial Sequence
  Description of Artificial Sequence: Synthetic oligonucleotide
gacauguuagagcgccggg

SEQ ID NO: 745083 - RNA, 19 nt, Artificial Sequence
  Description of Artificial Sequence: Synthetic oligonucleotide
aacgcuuagcacggaucgc

SEQ ID NO: 745084 - RNA, 19 nt, Artificial Sequence
  Description of Artificial Sequence: Synthetic oligonucleotide
guagggucccacuuuguug

SEQ ID NO: 745085 - RNA, 19 nt, Artificial Sequence
  Description of Artificial Sequence: Synthetic oligonucleotide
cuugguucgacaaggugca

SEQ ID NO: 745086 - RNA, 19 nt, Artificial Sequence
  Description of Artificial Sequence: Synthetic oligonucleotide
auuggcccaaugcacugag

SEQ ID NO: 745087 - RNA, 19 nt, Artificial Sequence
  Description of Artificial Sequence: Synthetic oligonucleotide
aagucucagaccagcgcac

SEQ ID NO: 745088 - RNA, 19 nt, Artificial Sequence
  Description of Artificial Sequence: Synthetic oligonucleotide
cauagagauugagggaagg

SEQ ID NO: 745089 - RNA, 19 nt, Artificial Sequence
  Description of Artificial Sequence: Synthetic oligonucleotide
cacgucaagaagaaaggca

SEQ ID NO: 745090 - RNA, 19 nt, Artificial Sequence
  Description of Artificial Sequence: Synthetic oligonucleotide
uuuugugacggaucuucuc

SEQ ID NO: 745091 - RNA, 19 nt, Artificial Sequence
  Description of Artificial Sequence: Synthetic oligonucleotide
uauaacggaugaacuuuaa

SEQ ID NO: 745092 - RNA, 19 nt, Artificial Sequence
  Description of Artificial Sequence: Synthetic oligonucleotide
cagaccguggcaaagaugu

SEQ ID NO: 745093 - RNA, 19 nt, Artificial Sequence
  Description of Artificial Sequence: Synthetic oligonucleotide
acggaguagaggaaaauga

SEQ ID NO: 745094 - RNA, 19 nt, Artificial Sequence
  Description of Artificial Sequence: Synthetic oligonucleotide
guagcccacaaaaccacgg

SEQ ID NO: 745095 - RNA, 19 nt, Artificial Sequence
  Description of Artificial Sequence: Synthetic oligonucleotide
agagcagaccacgguaugg

SEQ ID NO: 745096 - RNA, 19 nt, Artificial Sequence
  Description of Artificial Sequence: Synthetic oligonucleotide
gacaucccgaacugaaaca

SEQ ID NO: 745097 - RNA, 19 nt, Artificial Sequence
  Description of Artificial Sequence: Synthetic oligonucleotide
ucagaucguaacccaucca

SEQ ID NO: 745098 - RNA, 19 nt, Artificial Sequence
  Description of Artificial Sequence: Synthetic oligonucleotide
gauauaacggaugaacuuu

SEQ ID NO: 745099 - RNA, 19 nt, Artificial Sequence
  Description of Artificial Sequence: Synthetic oligonucleotide
ucauuucguagcacacgca

SEQ ID NO: 745100 - RNA, 19 nt, Artificial Sequence
  Description of Artificial Sequence: Synthetic oligonucleotide
acggaucgccaccaccagc

SEQ ID NO: 745101 - RNA, 19 nt, Artificial Sequence
  Description of Artificial Sequence: Synthetic oligonucleotide
ucguagcacacgcauuaga

SEQ ID NO: 745102 - RNA, 19 nt, Artificial Sequence
  Description of Artificial Sequence: Synthetic oligonucleotide
caguaaagaguagccaaag

SEQ ID NO: 745103 - RNA, 19 nt, Artificial Sequence
  Description of Artificial Sequence: Synthetic oligonucleotide
aguaacgccaugacaauaa

SEQ ID NO: 745104 - RNA, 19 nt, Artificial Sequence
  Description of Artificial Sequence: Synthetic oligonucleotide
caucagaucguaacccauc

SEQ ID NO: 745105 - RNA, 19 nt, Artificial Sequence
  Description of Artificial Sequence: Synthetic oligonucleotide
ccuccgaugacagugagag

SEQ ID NO: 745106 - RNA, 19 nt, Artificial Sequence
  Description of Artificial Sequence: Synthetic oligonucleotide
cacgguauggagggaagcg

SEQ ID NO: 745107 - RNA, 19 nt, Artificial Sequence
  Description of Artificial Sequence: Synthetic oligonucleotide
ccaaacuaagacuuuugug

SEQ ID NO: 745108 - RNA, 19 nt, Artificial Sequence
  Description of Artificial Sequence: Synthetic oligonucleotide
acuucgagggugcccuagg

SEQ ID NO: 745109 - RNA, 19 nt, Artificial Sequence
  Description of Artificial Sequence: Synthetic oligonucleotide
uucucccgaaagcggaucu

SEQ ID NO: 745110 - RNA, 19 nt, Artificial Sequence
  Description of Artificial Sequence: Synthetic oligonucleotide
auagagauugagggaagga

SEQ ID NO: 745111 - RNA, 19 nt, Artificial Sequence
  Description of Artificial Sequence: Synthetic oligonucleotide
agcguuguucuucccgaag

SEQ ID NO: 745112 - RNA, 19 nt, Artificial Sequence
  Description of Artificial Sequence: Synthetic oligonucleotide
agaucguaacccauccaag

SEQ ID NO: 745113 - RNA, 19 nt, Artificial Sequence
  Description of Artificial Sequence: Synthetic oligonucleotide
uuagcacggaucgccacca

SEQ ID NO: 745114 - RNA, 19 nt, Artificial Sequence
  Description of Artificial Sequence: Synthetic oligonucleotide
cuuauaucauagagauuga

SEQ ID NO: 745115 - RNA, 19 nt, Artificial Sequence
  Description of Artificial Sequence: Synthetic oligonucleotide
gguucgacaaggugcauca

SEQ ID NO: 745116 - RNA, 19 nt, Artificial Sequence
  Description of Artificial Sequence: Synthetic oligonucleotide
cagaucguaacccauccaa

SEQ ID NO: 745117 - RNA, 19 nt, Artificial Sequence
  Description of Artificial Sequence: Synthetic oligonucleotide
cauguuagagcgccgggca

SEQ ID NO: 745118 - RNA, 19 nt, Artificial Sequence
  Description of Artificial Sequence: Synthetic oligonucleotide
cuagcguuguucuucccga

SEQ ID NO: 745119 - RNA, 19 nt, Artificial Sequence
  Description of Artificial Sequence: Synthetic oligonucleotide
aaaccacggauuggcaagu

SEQ ID NO: 745120 - RNA, 19 nt, Artificial Sequence
  Description of Artificial Sequence: Synthetic oligonucleotide
acggauuggcaagucaucu

SEQ ID NO: 745121 - RNA, 19 nt, Artificial Sequence
  Description of Artificial Sequence: Synthetic oligonucleotide
auggauuuccaguguucga

SEQ ID NO: 745122 - RNA, 19 nt, Artificial Sequence
  Description of Artificial Sequence: Synthetic oligonucleotide
caaaaccacggauuggcaa

SEQ ID NO: 745123 - RNA, 19 nt, Artificial Sequence
  Description of Artificial Sequence: Synthetic oligonucleotide
gugugaguaaggccuagga

SEQ ID NO: 745124 - RNA, 19 nt, Artificial Sequence
  Description of Artificial Sequence: Synthetic oligonucleotide
gaaggcggcaauugccauc

SEQ ID NO: 745125 - RNA, 19 nt, Artificial Sequence
  Description of Artificial Sequence: Synthetic oligonucleotide
ccugacauguuagagcgcc

SEQ ID NO: 745126 - RNA, 19 nt, Artificial Sequence
  Description of Artificial Sequence: Synthetic oligonucleotide
cuguauggauaauuuucca

SEQ ID NO: 745127 - RNA, 19 nt, Artificial Sequence
  Description of Artificial Sequence: Synthetic oligonucleotide
cugacauguuagagcgccg

SEQ ID NO: 745128 - RNA, 19 nt, Artificial Sequence
  Description of Artificial Sequence: Synthetic oligonucleotide
aguucaccacgcuccacgu

SEQ ID NO: 745129 - RNA, 19 nt, Artificial Sequence
  Description of Artificial Sequence: Synthetic oligonucleotide
ugccgguagaaguggcuug

SEQ ID NO: 745130 - RNA, 19 nt, Artificial Sequence
  Description of Artificial Sequence: Synthetic oligonucleotide
acaucccgaacugaaacau

SEQ ID NO: 745131 - RNA, 19 nt, Artificial Sequence
  Description of Artificial Sequence: Synthetic oligonucleotide
ccacuuuguugacauauag

SEQ ID NO: 745132 - RNA, 19 nt, Artificial Sequence
  Description of Artificial Sequence: Synthetic oligonucleotide
gcauuagaaugacagccac

SEQ ID NO: 745133 - RNA, 19 nt, Artificial Sequence
  Description of Artificial Sequence: Synthetic oligonucleotide
acgaugcacauugaacaug

SEQ ID NO: 745134 - RNA, 19 nt, Artificial Sequence
  Description of Artificial Sequence: Synthetic oligonucleotide
uucguagcacacgcauuag

SEQ ID NO: 745135 - RNA, 19 nt, Artificial Sequence
  Description of Artificial Sequence: Synthetic oligonucleotide
guuagagcgccgggcauag

SEQ ID NO: 745136 - RNA, 19 nt, Artificial Sequence
  Description of Artificial Sequence: Synthetic oligonucleotide
accacggauuggcaaguca

SEQ ID NO: 745137 - RNA, 19 nt, Artificial Sequence
  Description of Artificial Sequence: Synthetic oligonucleotide
guguucgaggaaagaagcc

SEQ ID NO: 745138 - RNA, 19 nt, Artificial Sequence
  Description of Artificial Sequence: Synthetic oligonucleotide
acuccgacgcuccacugaa

SEQ ID NO: 745139 - RNA, 19 nt, Artificial Sequence
  Description of Artificial Sequence: Synthetic oligonucleotide
agcacacgcauuagaauga

SEQ ID NO: 745140 - RNA, 19 nt, Artificial Sequence
  Description of Artificial Sequence: Synthetic oligonucleotide
gcgauggagaugcaagccc

SEQ ID NO: 745141 - RNA, 19 nt, Artificial Sequence
  Description of Artificial Sequence: Synthetic oligonucleotide
caugacgaugcacauugaa

SEQ ID NO: 745142 - RNA, 19 nt, Artificial Sequence
  Description of Artificial Sequence: Synthetic oligonucleotide
cacggauuggcaagucauc

SEQ ID NO: 745143 - RNA, 19 nt, Artificial Sequence
  Description of Artificial Sequence: Synthetic oligonucleotide
aagccuaccagcagccaaa

SEQ ID NO: 745144 - RNA, 19 nt, Artificial Sequence
  Description of Artificial Sequence: Synthetic oligonucleotide
gcggcaauugccaucacac

SEQ ID NO: 745145 - RNA, 19 nt, Artificial Sequence
  Description of Artificial Sequence: Synthetic oligonucleotide
caucaaagggacuagcguu

SEQ ID NO: 745146 - RNA, 19 nt, Artificial Sequence
  Description of Artificial Sequence: Synthetic oligonucleotide
auauaacggaugaacuuua

SEQ ID NO: 745147 - RNA, 19 nt, Artificial Sequence
  Description of Artificial Sequence: Synthetic oligonucleotide
ugggcgcccacaccaagaa

SEQ ID NO: 745148 - RNA, 19 nt, Artificial Sequence
  Description of Artificial Sequence: Synthetic oligonucleotide
gccugugucgaaccauugg

SEQ ID NO: 745149 - RNA, 19 nt, Artificial Sequence
  Description of Artificial Sequence: Synthetic oligonucleotide
aggucagagcauauaacaa

SEQ ID NO: 745150 - RNA, 19 nt, Artificial Sequence
  Description of Artificial Sequence: Synthetic oligonucleotide
ggacuagcguuguucuucc

SEQ ID NO: 745151 - RNA, 19 nt, Artificial Sequence
  Description of Artificial Sequence: Synthetic oligonucleotide
agaagcuaucgaguggaau

SEQ ID NO: 745152 - RNA, 19 nt, Artificial Sequence
  Description of Artificial Sequence: Synthetic oligonucleotide
gggcgauauucuugguucg

SEQ ID NO: 745153 - RNA, 19 nt, Artificial Sequence
  Description of Artificial Sequence: Synthetic oligonucleotide
ucccgaaagcggaucucgu

SEQ ID NO: 745154 - RNA, 19 nt, Artificial Sequence
  Description of Artificial Sequence: Synthetic oligonucleotide
uguuagagcgccgggcaua

SEQ ID NO: 745155 - RNA, 19 nt, Artificial Sequence
  Description of Artificial Sequence: Synthetic oligonucleotide
gcagaccacgguauggagg

SEQ ID NO: 745156 - RNA, 19 nt, Artificial Sequence
  Description of Artificial Sequence: Synthetic oligonucleotide
caucgcuagagccuccaga

SEQ ID NO: 745157 - RNA, 19 nt, Artificial Sequence
  Description of Artificial Sequence: Synthetic oligonucleotide
auauaacaagauggcugcu

SEQ ID NO: 745158 - RNA, 19 nt, Artificial Sequence
  Description of Artificial Sequence: Synthetic oligonucleotide
ucgccgggcuuguagugug

SEQ ID NO: 745159 - RNA, 19 nt, Artificial Sequence
  Description of Artificial Sequence: Synthetic oligonucleotide
gacgaugcacauugaacau

SEQ ID NO: 745160 - RNA, 19 nt, Artificial Sequence
  Description of Artificial Sequence: Synthetic oligonucleotide
ccgaaagcggaucucguac

SEQ ID NO: 745161 - RNA, 19 nt, Artificial Sequence
  Description of Artificial Sequence: Synthetic oligonucleotide
ucagaccagcgcacacugu

SEQ ID NO: 745162 - RNA, 19 nt, Artificial Sequence
  Description of Artificial Sequence: Synthetic oligonucleotide
cauuucguagcacacgcau

SEQ ID NO: 745163 - RNA, 19 nt, Artificial Sequence
  Description of Artificial Sequence: Synthetic oligonucleotide
uguacugcucucggcccca

SEQ ID NO: 745164 - RNA, 19 nt, Artificial Sequence
  Description of Artificial Sequence: Synthetic oligonucleotide
agccuaccagcagccaaac

SEQ ID NO: 745165 - RNA, 19 nt, Artificial Sequence
  Description of Artificial Sequence: Synthetic oligonucleotide
agcuaucgaguggaaucag

SEQ ID NO: 745166 - RNA, 19 nt, Artificial Sequence
  Description of Artificial Sequence: Synthetic oligonucleotide
gaguaaggccuaggaauuc

SEQ ID NO: 745167 - RNA, 19 nt, Artificial Sequence
  Description of Artificial Sequence: Synthetic oligonucleotide
gcgccggucacuccgacgc

SEQ ID NO: 745168 - RNA, 19 nt, Artificial Sequence
  Description of Artificial Sequence: Synthetic oligonucleotide
ccgaacugaaacauuggca

SEQ ID NO: 745169 - RNA, 19 nt, Artificial Sequence
  Description of Artificial Sequence: Synthetic oligonucleotide
cuccgaugacagugagagg

SEQ ID NO: 745170 - RNA, 19 nt, Artificial Sequence
  Description of Artificial Sequence: Synthetic oligonucleotide
ucacuccgacgcuccacug

SEQ ID NO: 745171 - RNA, 19 nt, Artificial Sequence
  Description of Artificial Sequence: Synthetic oligonucleotide
gggacuagcguuguucuuc

SEQ ID NO: 745172 - RNA, 19 nt, Artificial Sequence
  Description of Artificial Sequence: Synthetic oligonucleotide
ggccuaggaauucaucaga

SEQ ID NO: 745173 - RNA, 19 nt, Artificial Sequence
  Description of Artificial Sequence: Synthetic oligonucleotide
aaagucccguggagccaac

SEQ ID NO: 745174 - RNA, 19 nt, Artificial Sequence
  Description of Artificial Sequence: Synthetic oligonucleotide
ggaauucuagguggaaguc

SEQ ID NO: 745175 - RNA, 19 nt, Artificial Sequence
  Description of Artificial Sequence: Synthetic oligonucleotide
guagcacacgcauuagaau

SEQ ID NO: 745176 - RNA, 19 nt, Artificial Sequence
  Description of Artificial Sequence: Synthetic oligonucleotide
uuguaccgagccaggucau

SEQ ID NO: 745177 - RNA, 19 nt, Artificial Sequence
  Description of Artificial Sequence: Synthetic oligonucleotide
gguagagccugugucgaac

SEQ ID NO: 745178 - RNA, 19 nt, Artificial Sequence
  Description of Artificial Sequence: Synthetic oligonucleotide
ccuaggaauucaucagauc

SEQ ID NO: 745179 - RNA, 19 nt, Artificial Sequence
  Description of Artificial Sequence: Synthetic oligonucleotide
ucaccacgcuccacgucaa

SEQ ID NO: 745180 - RNA, 19 nt, Artificial Sequence
  Description of Artificial Sequence: Synthetic oligonucleotide
cacggaucgccaccaccag

SEQ ID NO: 745181 - RNA, 19 nt, Artificial Sequence
  Description of Artificial Sequence: Synthetic oligonucleotide
accacgguauggagggaag

SEQ ID NO: 745182 - RNA, 19 nt, Artificial Sequence
  Description of Artificial Sequence: Synthetic oligonucleotide
agagccugugucgaaccau

SEQ ID NO: 745183 - RNA, 19 nt, Artificial Sequence
  Description of Artificial Sequence: Synthetic oligonucleotide
auuucguagcacacgcauu

SEQ ID NO: 745184 - RNA, 19 nt, Artificial Sequence
  Description of Artificial Sequence: Synthetic oligonucleotide
ucgccuccaaucugccggu

SEQ ID NO: 745185 - RNA, 19 nt, Artificial Sequence
  Description of Artificial Sequence: Synthetic oligonucleotide
ccacgucaagaagaaaggc

SEQ ID NO: 745186 - RNA, 19 nt, Artificial Sequence
  Description of Artificial Sequence: Synthetic oligonucleotide
ccaacgcucgccuccaauc

SEQ ID NO: 745187 - RNA, 19 nt, Artificial Sequence
  Description of Artificial Sequence: Synthetic oligonucleotide
gaccacgguauggagggaa

SEQ ID NO: 745188 - RNA, 19 nt, Artificial Sequence
  Description of Artificial Sequence: Synthetic oligonucleotide
gguuaugguagggucccac

SEQ ID NO: 745189 - RNA, 19 nt, Artificial Sequence
  Description of Artificial Sequence: Synthetic oligonucleotide
ccaacgcuuagcacggauc

SEQ ID NO: 745190 - RNA, 19 nt, Artificial Sequence
  Description of Artificial Sequence: Synthetic oligonucleotide
cugguagagccugugucga

SEQ ID NO: 745191 - RNA, 19 nt, Artificial Sequence
  Description of Artificial Sequence: Synthetic oligonucleotide
cagcgguaaucuuccccug

SEQ ID NO: 745192 - RNA, 19 nt, Artificial Sequence
  Description of Artificial Sequence: Synthetic oligonucleotide
cugaguucaccacgcucca

SEQ ID NO: 745193 - RNA, 19 nt, Artificial Sequence
  Description of Artificial Sequence: Synthetic oligonucleotide
cuaagacuuuugugacgga

SEQ ID NO: 745194 - RNA, 19 nt, Artificial Sequence
  Description of Artificial Sequence: Synthetic oligonucleotide
gcgguaaucuuccccugac

SEQ ID NO: 745195 - RNA, 19 nt, Artificial Sequence
  Description of Artificial Sequence: Synthetic oligonucleotide
cuucgagggugcccuagga

SEQ ID NO: 745196 - RNA, 19 nt, Artificial Sequence
  Description of Artificial Sequence: Synthetic oligonucleotide
gguaaguuuccugaggguu

SEQ ID NO: 745197 - RNA, 19 nt, Artificial Sequence
  Description of Artificial Sequence: Synthetic oligonucleotide
gggugggaucucccgggcg

SEQ ID NO: 745198 - RNA, 19 nt, Artificial Sequence
  Description of Artificial Sequence: Synthetic oligonucleotide
cacuccgacgcuccacuga

SEQ ID NO: 745199 - RNA, 19 nt, Artificial Sequence
  Description of Artificial Sequence: Synthetic oligonucleotide
gcugauaguagugguaagu

SEQ ID NO: 745200 - RNA, 19 nt, Artificial Sequence
  Description of Artificial Sequence: Synthetic oligonucleotide
caacagucauguggaugac

SEQ ID NO: 745201 - RNA, 19 nt, Artificial Sequence
  Description of Artificial Sequence: Synthetic oligonucleotide
ggcggcaauugccaucaca

SEQ ID NO: 745202 - RNA, 19 nt, Artificial Sequence
  Description of Artificial Sequence: Synthetic oligonucleotide
cacacccaacgcucgccuc

SEQ ID NO: 745203 - RNA, 19 nt, Artificial Sequence
  Description of Artificial Sequence: Synthetic oligonucleotide
agggacuagcguuguucuu

SEQ ID NO: 745204 - RNA, 19 nt, Artificial Sequence
  Description of Artificial Sequence: Synthetic oligonucleotide
gcgauauucuugguucgac

SEQ ID NO: 745205 - RNA, 19 nt, Artificial Sequence
  Description of Artificial Sequence: Synthetic oligonucleotide
gcuuagcacggaucgccac

SEQ ID NO: 745206 - RNA, 19 nt, Artificial Sequence
  Description of Artificial Sequence: Synthetic oligonucleotide
ucggccauucgguccccau

SEQ ID NO: 745207 - RNA, 19 nt, Artificial Sequence
  Description of Artificial Sequence: Synthetic oligonucleotide
guaacgccaugacaauaau

SEQ ID NO: 745208 - RNA, 19 nt, Artificial Sequence
  Description of Artificial Sequence: Synthetic oligonucleotide
cgcauuagaaugacagcca

SEQ ID NO: 745209 - RNA, 19 nt, Artificial Sequence
  Description of Artificial Sequence: Synthetic oligonucleotide
agggugcccuaggacuguc

SEQ ID NO: 745210 - RNA, 19 nt, Artificial Sequence
  Description of Artificial Sequence: Synthetic oligonucleotide
cauuggcccaaugcacuga

SEQ ID NO: 745211 - RNA, 19 nt, Artificial Sequence
  Description of Artificial Sequence: Synthetic oligonucleotide
caacgcucgccuccaaucu

SEQ ID NO: 745212 - RNA, 19 nt, Artificial Sequence
  Description of Artificial Sequence: Synthetic oligonucleotide
ggaauucaucagaucguaa

SEQ ID NO: 745213 - RNA, 19 nt, Artificial Sequence
  Description of Artificial Sequence: Synthetic oligonucleotide
ccagcgguaaucuuccccu

SEQ ID NO: 745214 - RNA, 19 nt, Artificial Sequence
  Description of Artificial Sequence: Synthetic oligonucleotide
caguaacgccaugacaaua

SEQ ID NO: 745215 - RNA, 19 nt, Artificial Sequence
  Description of Artificial Sequence: Synthetic oligonucleotide
ugcccgugccaagggccag

SEQ ID NO: 745216 - RNA, 19 nt, Artificial Sequence
  Description of Artificial Sequence: Synthetic oligonucleotide
caccacgcuccacgucaag

SEQ ID NO: 745217 - RNA, 19 nt, Artificial Sequence
  Description of Artificial Sequence: Synthetic oligonucleotide
gguagggucccacuuuguu

SEQ ID NO: 745218 - RNA, 19 nt, Artificial Sequence
  Description of Artificial Sequence: Synthetic oligonucleotide
aggaugguuguggcuggua

SEQ ID NO: 745219 - RNA, 19 nt, Artificial Sequence
  Description of Artificial Sequence: Synthetic oligonucleotide
uucggccauucggucccca

SEQ ID NO: 745220 - RNA, 19 nt, Artificial Sequence
  Description of Artificial Sequence: Synthetic oligonucleotide
cgaaagcggaucucguaca

SEQ ID NO: 745221 - RNA, 19 nt, Artificial Sequence
  Description of Artificial Sequence: Synthetic oligonucleotide
uugguucgacaaggugcau

SEQ ID NO: 745222 - RNA, 19 nt, Artificial Sequence
  Description of Artificial Sequence: Synthetic oligonucleotide
ccacgcuccacgucaagaa

SEQ ID NO: 745223 - RNA, 19 nt, Artificial Sequence
  Description of Artificial Sequence: Synthetic oligonucleotide
gagccugugucgaaccauu

SEQ ID NO: 745224 - RNA, 19 nt, Artificial Sequence
  Description of Artificial Sequence: Synthetic oligonucleotide
ccgacgcuccacugaaguc

SEQ ID NO: 745225 - RNA, 19 nt, Artificial Sequence
  Description of Artificial Sequence: Synthetic oligonucleotide
ccaacuucgagggugcccu

SEQ ID NO: 745226 - RNA, 19 nt, Artificial Sequence
  Description of Artificial Sequence: Synthetic oligonucleotide
guaccgagccaggucauuu

SEQ ID NO: 745227 - RNA, 19 nt, Artificial Sequence
  Description of Artificial Sequence: Synthetic oligonucleotide
agaccacgguauggaggga

SEQ ID NO: 745228 - RNA, 19 nt, Artificial Sequence
  Description of Artificial Sequence: Synthetic oligonucleotide
ccacggauuggcaagucau

SEQ ID NO: 745229 - RNA, 19 nt, Artificial Sequence
  Description of Artificial Sequence: Synthetic oligonucleotide
ccguggagccaacgcuuag

SEQ ID NO: 745230 - RNA, 19 nt, Artificial Sequence
  Description of Artificial Sequence: Synthetic oligonucleotide
gucgccgggcuuguagugu

SEQ ID NO: 745231 - RNA, 19 nt, Artificial Sequence
  Description of Artificial Sequence: Synthetic oligonucleotide
ccgaugacagugagaggaa

SEQ ID NO: 745232 - RNA, 19 nt, Artificial Sequence
  Description of Artificial Sequence: Synthetic oligonucleotide
ggaaggcggcaauugccau

SEQ ID NO: 745233 - RNA, 19 nt, Artificial Sequence
  Description of Artificial Sequence: Synthetic oligonucleotide
agaccguggcaaagaugua

SEQ ID NO: 745234 - RNA, 19 nt, Artificial Sequence
  Description of Artificial Sequence: Synthetic oligonucleotide
gcccgugccaagggccagg

SEQ ID NO: 745235 - RNA, 19 nt, Artificial Sequence
  Description of Artificial Sequence: Synthetic oligonucleotide
cacucagagcucaguccau

SEQ ID NO: 745236 - RNA, 19 nt, Artificial Sequence
  Description of Artificial Sequence: Synthetic oligonucleotide
cccgaaagcggaucucgua

SEQ ID NO: 745237 - RNA, 19 nt, Artificial Sequence
  Description of Artificial Sequence: Synthetic oligonucleotide
gggucgccgggcuuguagu

SEQ ID NO: 745238 - RNA, 19 nt, Artificial Sequence
  Description of Artificial Sequence: Synthetic oligonucleotide
gcugaguuaauggcuccau

SEQ ID NO: 745239 - RNA, 19 nt, Artificial Sequence
  Description of Artificial Sequence: Synthetic oligonucleotide
ggccuaucuuguggcuaug

SEQ ID NO: 745240 - RNA, 19 nt, Artificial Sequence
  Description of Artificial Sequence: Synthetic oligonucleotide
caacuucgagggugcccua

SEQ ID NO: 745241 - RNA, 19 nt, Artificial Sequence
  Description of Artificial Sequence: Synthetic oligonucleotide
cgcucgccuccaaucugcc

SEQ ID NO: 745242 - RNA, 19 nt, Artificial Sequence
  Description of Artificial Sequence: Synthetic oligonucleotide
ccaguaacgccaugacaau

SEQ ID NO: 745243 - RNA, 19 nt, Artificial Sequence
  Description of Artificial Sequence: Synthetic oligonucleotide
ccccugacaauuggaagua

SEQ ID NO: 745244 - RNA, 19 nt, Artificial Sequence
  Description of Artificial Sequence: Synthetic oligonucleotide
cgacgcuccacugaagucu

SEQ ID NO: 745245 - RNA, 19 nt, Artificial Sequence
  Description of Artificial Sequence: Synthetic oligonucleotide
cgcuuagcacggaucgcca

SEQ ID NO: 745246 - RNA, 19 nt, Artificial Sequence
  Description of Artificial Sequence: Synthetic oligonucleotide
cggaucucguacaaagauu

SEQ ID NO: 745247 - RNA, 19 nt, Artificial Sequence
  Description of Artificial Sequence: Synthetic oligonucleotide
cccguggagccaacgcuua

SEQ ID NO: 745248 - RNA, 19 nt, Artificial Sequence
  Description of Artificial Sequence: Synthetic oligonucleotide
ccgagccaggucauuucgu

SEQ ID NO: 745249 - RNA, 19 nt, Artificial Sequence
  Description of Artificial Sequence: Synthetic oligonucleotide
cccgugccaagggccagga

SEQ ID NO: 745250 - RNA, 19 nt, Artificial Sequence
  Description of Artificial Sequence: Synthetic oligonucleotide
cccaacgcucgccuccaau

SEQ ID NO: 745251 - RNA, 19 nt, Artificial Sequence
  Description of Artificial Sequence: Synthetic oligonucleotide
cagggucgccgggcuugua

SEQ ID NO: 745252 - RNA, 19 nt, Artificial Sequence
  Description of Artificial Sequence: Synthetic oligonucleotide
ccgugccaagggccaggaa

SEQ ID NO: 745253 - RNA, 19 nt, Artificial Sequence
  Description of Artificial Sequence: Synthetic oligonucleotide
cccgggcgauauucuuggu

SEQ ID NO: 745254 - RNA, 19 nt, Artificial Sequence
  Description of Artificial Sequence: Synthetic oligonucleotide
aaaucgaauggguccaagc

SEQ ID NO: 745255 - RNA, 19 nt, Artificial Sequence
  Description of Artificial Sequence: Synthetic oligonucleotide
auuaugaauagccccugcc

SEQ ID NO: 745256 - RNA, 19 nt, Artificial Sequence
  Description of Artificial Sequence: Synthetic oligonucleotide
caaaagucugaguucaugg

SEQ ID NO: 745257 - RNA, 19 nt, Artificial Sequence
  Description of Artificial Sequence: Synthetic oligonucleotide
ugggcauauauacauauac

SEQ ID NO: 745258 - RNA, 19 nt, Artificial Sequence
  Description of Artificial Sequence: Synthetic oligonucleotide
uaugaauagccccugccag

SEQ ID NO: 745259 - RNA, 19 nt, Artificial Sequence
  Description of Artificial Sequence: Synthetic oligonucleotide
aaucgaauggguccaagca

SEQ ID NO: 745260 - RNA, 19 nt, Artificial Sequence
  Description of Artificial Sequence: Synthetic oligonucleotide
gauguucuaggccaccugg

SEQ ID NO: 745261 - RNA, 19 nt, Artificial Sequence
  Description of Artificial Sequence: Synthetic oligonucleotide
uuaugaauagccccugcca

SEQ ID NO: 745262 - RNA, 19 nt, Artificial Sequence
  Description of Artificial Sequence: Synthetic oligonucleotide
cugggauucauccagccgg

SEQ ID NO: 745263 - RNA, 19 nt, Artificial Sequence
  Description of Artificial Sequence: Synthetic oligonucleotide
ugggguaugaguaggugag

SEQ ID NO: 745264 - RNA, 19 nt, Artificial Sequence
  Description of Artificial Sequence: Synthetic oligonucleotide
ugguaucuuauuaugaaua

SEQ ID NO: 745265 - RNA, 19 nt, Artificial Sequence
  Description of Artificial Sequence: Synthetic oligonucleotide
uguacuggcuguauccucc

SEQ ID NO: 745266 - RNA, 19 nt, Artificial Sequence
  Description of Artificial Sequence: Synthetic oligonucleotide
guucuucucgaagagagcg

SEQ ID NO: 745267 - RNA, 19 nt, Artificial Sequence
  Description of Artificial Sequence: Synthetic oligonucleotide
aaaugcuucaggucugcca

SEQ ID NO: 745268 - RNA, 19 nt, Artificial Sequence
  Description of Artificial Sequence: Synthetic oligonucleotide
guaugaguaggugagagug

SEQ ID NO: 745269 - RNA, 19 nt, Artificial Sequence
  Description of Artificial Sequence: Synthetic oligonucleotide
guguguuuccuuuaggaug

SEQ ID NO: 745270 - RNA, 19 nt, Artificial Sequence
  Description of Artificial Sequence: Synthetic oligonucleotide
caguuuauccucucguucc

SEQ ID NO: 745271 - RNA, 19 nt, Artificial Sequence
  Description of Artificial Sequence: Synthetic oligonucleotide
gaagucguccccaacagug

SEQ ID NO: 745272 - RNA, 19 nt, Artificial Sequence
  Description of Artificial Sequence: Synthetic oligonucleotide
agcuccucauacuugaucu

SEQ ID NO: 745273 - RNA, 19 nt, Artificial Sequence
  Description of Artificial Sequence: Synthetic oligonucleotide
caagccucccuccauaugc

SEQ ID NO: 745274 - RNA, 19 nt, Artificial Sequence
  Description of Artificial Sequence: Synthetic oligonucleotide
aaguccuaugcagaugggg

SEQ ID NO: 745275 - RNA, 19 nt, Artificial Sequence
  Description of Artificial Sequence: Synthetic oligonucleotide
cucagaucacaauccaggg

SEQ ID NO: 745276 - RNA, 19 nt, Artificial Sequence
  Description of Artificial Sequence: Synthetic oligonucleotide
gguaucuuauuaugaauag

SEQ ID NO: 745277 - RNA, 19 nt, Artificial Sequence
  Description of Artificial Sequence: Synthetic oligonucleotide
agacaugcggcccaguuca

SEQ ID NO: 745278 - RNA, 19 nt, Artificial Sequence
  Description of Artificial Sequence: Synthetic oligonucleotide
uauuaugaauagccccugc

SEQ ID NO: 745279 - RNA, 19 nt, Artificial Sequence
  Description of Artificial Sequence: Synthetic oligonucleotide
ggcacuggcauucugacgc

SEQ ID NO: 745280 - RNA, 19 nt, Artificial Sequence
  Description of Artificial Sequence: Synthetic oligonucleotide
aaaucggguacugcggauc

SEQ ID NO: 745281 - RNA, 19 nt, Artificial Sequence
  Description of Artificial Sequence: Synthetic oligonucleotide
uaugaguaggugagagugc

SEQ ID NO: 745282 - RNA, 19 nt, Artificial Sequence
  Description of Artificial Sequence: Synthetic oligonucleotide
uucuucucgaagagagcgg

SEQ ID NO: 745283 - RNA, 19 nt, Artificial Sequence
  Description of Artificial Sequence: Synthetic oligonucleotide
uccucggugccaaaucggg

SEQ ID NO: 745284 - RNA, 19 nt, Artificial Sequence
  Description of Artificial Sequence: Synthetic oligonucleotide
gaagagcugcacaauuugg

SEQ ID NO: 745285 - RNA, 19 nt, Artificial Sequence
  Description of Artificial Sequence: Synthetic oligonucleotide
cacgguugcgcucagcgcg

SEQ ID NO: 745286 - RNA, 19 nt, Artificial Sequence
  Description of Artificial Sequence: Synthetic oligonucleotide
cucgcacucgcccugagcc

SEQ ID NO: 745287 - RNA, 19 nt, Artificial Sequence
  Description of Artificial Sequence: Synthetic oligonucleotide
uggggucuuaggaacuggg

SEQ ID NO: 745288 - RNA, 19 nt, Artificial Sequence
  Description of Artificial Sequence: Synthetic oligonucleotide
auuggcgugugccagcucu

SEQ ID NO: 745289 - RNA, 19 nt, Artificial Sequence
  Description of Artificial Sequence: Synthetic oligonucleotide
ucaucuaggucgcuggcuc

SEQ ID NO: 745290 - RNA, 19 nt, Artificial Sequence
  Description of Artificial Sequence: Synthetic oligonucleotide
ugcgauccaugcuggagcg

SEQ ID NO: 745291 - RNA, 19 nt, Artificial Sequence
  Description of Artificial Sequence: Synthetic oligonucleotide
ggucuuaggaacugggucc

SEQ ID NO: 745292 - RNA, 19 nt, Artificial Sequence
  Description of Artificial Sequence: Synthetic oligonucleotide
ugaucuuccacuggcuaag

SEQ ID NO: 745293 - RNA, 19 nt, Artificial Sequence
  Description of Artificial Sequence: Synthetic oligonucleotide
cuuauuaugaauagccccu

SEQ ID NO: 745294 - RNA, 19 nt, Artificial Sequence
  Description of Artificial Sequence: Synthetic oligonucleotide
auaugcuccauccuugcau

SEQ ID NO: 745295 - RNA, 19 nt, Artificial Sequence
  Description of Artificial Sequence: Synthetic oligonucleotide
aaucggguacugcggaucu

SEQ ID NO: 745296 - RNA, 19 nt, Artificial Sequence
  Description of Artificial Sequence: Synthetic oligonucleotide
agguuccccauccaugggg

SEQ ID NO: 745297 - RNA, 19 nt, Artificial Sequence
  Description of Artificial Sequence: Synthetic oligonucleotide
ucguuccuuaagcagcacc

SEQ ID NO: 745298 - RNA, 19 nt, Artificial Sequence
  Description of Artificial Sequence: Synthetic oligonucleotide
auuugcgcggcucgcgcgc

SEQ ID NO: 745299 - RNA, 19 nt, Artificial Sequence
  Description of Artificial Sequence: Synthetic oligonucleotide
cauucugacgccgucugcg

SEQ ID NO: 745300 - RNA, 19 nt, Artificial Sequence
  Description of Artificial Sequence: Synthetic oligonucleotide
ucuucucgaagagagcggc

SEQ ID NO: 745301 - RNA, 19 nt, Artificial Sequence
  Description of Artificial Sequence: Synthetic oligonucleotide
uuccucggugccaaaucgg

SEQ ID NO: 745302 - RNA, 19 nt, Artificial Sequence
  Description of Artificial Sequence: Synthetic oligonucleotide
aaaaucgaauggguccaag

SEQ ID NO: 745303 - RNA, 19 nt, Artificial Sequence
  Description of Artificial Sequence: Synthetic oligonucleotide
uuauuaugaauagccccug

SEQ ID NO: 745304 - RNA, 19 nt, Artificial Sequence
  Description of Artificial Sequence: Synthetic oligonucleotide
cacuucucgcgccaguucg

SEQ ID NO: 745305 - RNA, 19 nt, Artificial Sequence
  Description of Artificial Sequence: Synthetic oligonucleotide
ucugcucguccagugaccg

SEQ ID NO: 745306 - RNA, 19 nt, Artificial Sequence
  Description of Artificial Sequence: Synthetic oligonucleotide
ucucgugcuguuccacacg

SEQ ID NO: 745307 - RNA, 19 nt, Artificial Sequence
  Description of Artificial Sequence: Synthetic oligonucleotide
cuuuaccuccgucucgugc

SEQ ID NO: 745308 - RNA, 19 nt, Artificial Sequence
  Description of Artificial Sequence: Synthetic oligonucleotide
cuucuuuaccuccgucucg

SEQ ID NO: 745309 - RNA, 19 nt, Artificial Sequence
  Description of Artificial Sequence: Synthetic oligonucleotide
uuugcagguccucauccuc

SEQ ID NO: 745310 - RNA, 19 nt, Artificial Sequence
  Description of Artificial Sequence: Synthetic oligonucleotide
uguggguggcaacgagucg

SEQ ID NO: 745311 - RNA, 19 nt, Artificial Sequence
  Description of Artificial Sequence: Synthetic oligonucleotide
uccaucucaccccucaguu

SEQ ID NO: 745312 - RNA, 19 nt, Artificial Sequence
  Description of Artificial Sequence: Synthetic oligonucleotide
accaccagcgcauuguuuu

SEQ ID NO: 745313 - RNA, 19 nt, Artificial Sequence
  Description of Artificial Sequence: Synthetic oligonucleotide
ucugacgccgucugcgagc

SEQ ID NO: 745314 - RNA, 19 nt, Artificial Sequence
  Description of Artificial Sequence: Synthetic oligonucleotide
aagucguccccaacagugg

SEQ ID NO: 745315 - RNA, 19 nt, Artificial Sequence
  Description of Artificial Sequence: Synthetic oligonucleotide
aguuuauccucucguuccu

SEQ ID NO: 745316 - RNA, 19 nt, Artificial Sequence
  Description of Artificial Sequence: Synthetic oligonucleotide
augaauagccccugccaga

SEQ ID NO: 745317 - RNA, 19 nt, Artificial Sequence
  Description of Artificial Sequence: Synthetic oligonucleotide
cucgugcuguuccacacgc

SEQ ID NO: 745318 - RNA, 19 nt, Artificial Sequence
  Description of Artificial Sequence: Synthetic oligonucleotide
agccaguuuauccucucgu

SEQ ID NO: 745319 - RNA, 19 nt, Artificial Sequence
  Description of Artificial Sequence: Synthetic oligonucleotide
gguggcaacgagucggccg

SEQ ID NO: 745320 - RNA, 19 nt, Artificial Sequence
  Description of Artificial Sequence: Synthetic oligonucleotide
aguccuaugcagauggggu

SEQ ID NO: 745321 - RNA, 19 nt, Artificial Sequence
  Description of Artificial Sequence: Synthetic oligonucleotide
agagccaguuuauccucuc

SEQ ID NO: 745322 - RNA, 19 nt, Artificial Sequence
  Description of Artificial Sequence: Synthetic oligonucleotide
gauccuggcggccugagcu

SEQ ID NO: 745323 - RNA, 19 nt, Artificial Sequence
  Description of Artificial Sequence: Synthetic oligonucleotide
caugcucgcgcucaggcuc

SEQ ID NO: 745324 - RNA, 19 nt, Artificial Sequence
  Description of Artificial Sequence: Synthetic oligonucleotide
gaauggguccaagcaaccc

SEQ ID NO: 745325 - RNA, 19 nt, Artificial Sequence
  Description of Artificial Sequence: Synthetic oligonucleotide
auuugcagguccucauccu

SEQ ID NO: 745326 - RNA, 19 nt, Artificial Sequence
  Description of Artificial Sequence: Synthetic oligonucleotide
cauuuugcuguugccugcg

SEQ ID NO: 745327 - RNA, 19 nt, Artificial Sequence
  Description of Artificial Sequence: Synthetic oligonucleotide
caguucgccgugcagucgg

SEQ ID NO: 745328 - RNA, 19 nt, Artificial Sequence
  Description of Artificial Sequence: Synthetic oligonucleotide
uggagguucucgcucugcu

SEQ ID NO: 745329 - RNA, 19 nt, Artificial Sequence
  Description of Artificial Sequence: Synthetic oligonucleotide
caagggagugcagagagca

SEQ ID NO: 745330 - RNA, 19 nt, Artificial Sequence
  Description of Artificial Sequence: Synthetic oligonucleotide
ucucgaagagagcggccug

SEQ ID NO: 745331 - RNA, 19 nt, Artificial Sequence
  Description of Artificial Sequence: Synthetic oligonucleotide
ugggauucauccagccgga

SEQ ID NO: 745332 - RNA, 19 nt, Artificial Sequence
  Description of Artificial Sequence: Synthetic oligonucleotide
uccuaugcagauggggucu

SEQ ID NO: 745333 - RNA, 19 nt, Artificial Sequence
  Description of Artificial Sequence: Synthetic oligonucleotide
caggcgguugcgauccugg

SEQ ID NO: 745334 - RNA, 19 nt, Artificial Sequence
  Description of Artificial Sequence: Synthetic oligonucleotide
accagcgcauuguuuucuc

SEQ ID NO: 745335 - RNA, 19 nt, Artificial Sequence
  Description of Artificial Sequence: Synthetic oligonucleotide
uuuucuccauuugcgcggc

SEQ ID NO: 745336 - RNA, 19 nt, Artificial Sequence
  Description of Artificial Sequence: Synthetic oligonucleotide
uucgccgugcagucggacc

SEQ ID NO: 745337 - RNA, 19 nt, Artificial Sequence
  Description of Artificial Sequence: Synthetic oligonucleotide
uuauccucucguuccuuaa

SEQ ID NO: 745338 - RNA, 19 nt, Artificial Sequence
  Description of Artificial Sequence: Synthetic oligonucleotide
caugcuggagcgugcgccc

SEQ ID NO: 745339 - RNA, 19 nt, Artificial Sequence
  Description of Artificial Sequence: Synthetic oligonucleotide
gucgcgcacaggcucaugc

SEQ ID NO: 745340 - RNA, 19 nt, Artificial Sequence
  Description of Artificial Sequence: Synthetic oligonucleotide
ucggugccaaaucggguac

SEQ ID NO: 745341 - RNA, 19 nt, Artificial Sequence
  Description of Artificial Sequence: Synthetic oligonucleotide
cauuugcgcggcucgcgcg

SEQ ID NO: 745342 - RNA, 19 nt, Artificial Sequence
  Description of Artificial Sequence: Synthetic oligonucleotide
gguacugcggaucuuccca

SEQ ID NO: 745343 - RNA, 19 nt, Artificial Sequence
  Description of Artificial Sequence: Synthetic oligonucleotide
ucucgcgccaguucgccgu

SEQ ID NO: 745344 - RNA, 19 nt, Artificial Sequence
  Description of Artificial Sequence: Synthetic oligonucleotide
gacgccgucugcgagccag

SEQ ID NO: 745345 - RNA, 19 nt, Artificial Sequence
  Description of Artificial Sequence: Synthetic oligonucleotide
uccauccuugcaugaaguc

SEQ ID NO: 745346 - RNA, 19 nt, Artificial Sequence
  Description of Artificial Sequence: Synthetic oligonucleotide
augcgauccggggacgggc

SEQ ID NO: 745347 - RNA, 19 nt, Artificial Sequence
  Description of Artificial Sequence: Synthetic oligonucleotide
cacaggcucaugcucgcgc

SEQ ID NO: 745348 - RNA, 19 nt, Artificial Sequence
  Description of Artificial Sequence: Synthetic oligonucleotide
caacgagucggccgggccc

SEQ ID NO: 745349 - RNA, 19 nt, Artificial Sequence
  Description of Artificial Sequence: Synthetic oligonucleotide
gucuccaaccugugcacgc

SEQ ID NO: 745350 - RNA, 19 nt, Artificial Sequence
  Description of Artificial Sequence: Synthetic oligonucleotide
cccgaugucgcgcacaggc

SEQ ID NO: 745351 - RNA, 19 nt, Artificial Sequence
  Description of Artificial Sequence: Synthetic oligonucleotide
cuccgucucgugcuguucc

SEQ ID NO: 745352 - RNA, 19 nt, Artificial Sequence
  Description of Artificial Sequence: Synthetic oligonucleotide
cuucucgaagagagcggcc

SEQ ID NO: 745353 - RNA, 19 nt, Artificial Sequence
  Description of Artificial Sequence: Synthetic oligonucleotide
ggauucauccagccggagc

SEQ ID NO: 745354 - RNA, 19 nt, Artificial Sequence
  Description of Artificial Sequence: Synthetic oligonucleotide
ucucucugcggccccacuc

SEQ ID NO: 745355 - RNA, 19 nt, Artificial Sequence
  Description of Artificial Sequence: Synthetic oligonucleotide
agcaacccugggcauauau

SEQ ID NO: 745356 - RNA, 19 nt, Artificial Sequence
  Description of Artificial Sequence: Synthetic oligonucleotide
augcgcuccccgcagccgg

SEQ ID NO: 745357 - RNA, 19 nt, Artificial Sequence
  Description of Artificial Sequence: Synthetic oligonucleotide
cucgaagagagcggccugg

SEQ ID NO: 745358 - RNA, 19 nt, Artificial Sequence
  Description of Artificial Sequence: Synthetic oligonucleotide
gcugaguugcuugagcacc

SEQ ID NO: 745359 - RNA, 19 nt, Artificial Sequence
  Description of Artificial Sequence: Synthetic oligonucleotide
uccacacgccgauuggcgu

SEQ ID NO: 745360 - RNA, 19 nt, Artificial Sequence
  Description of Artificial Sequence: Synthetic oligonucleotide
ugcacgcagcuucuuguuc

SEQ ID NO: 745361 - RNA, 19 nt, Artificial Sequence
  Description of Artificial Sequence: Synthetic oligonucleotide
uucucgcgccaguucgccg

SEQ ID NO: 745362 - RNA, 19 nt, Artificial Sequence
  Description of Artificial Sequence: Synthetic oligonucleotide
ucaugcucgcgcucaggcu

SEQ ID NO: 745363 - RNA, 19 nt, Artificial Sequence
  Description of Artificial Sequence: Synthetic oligonucleotide
uuaccuccgucucgugcug

SEQ ID NO: 745364 - RNA, 19 nt, Artificial Sequence
  Description of Artificial Sequence: Synthetic oligonucleotide
aucuccggcuuccucggug

SEQ ID NO: 745365 - RNA, 19 nt, Artificial Sequence
  Description of Artificial Sequence: Synthetic oligonucleotide
aucuugcgauccaugcugg

SEQ ID NO: 745366 - RNA, 19 nt, Artificial Sequence
  Description of Artificial Sequence: Synthetic oligonucleotide
cucuccgccccgaugucgc

SEQ ID NO: 745367 - RNA, 19 nt, Artificial Sequence
  Description of Artificial Sequence: Synthetic oligonucleotide
gagucggccgggcccaugc

SEQ ID NO: 745368 - RNA, 19 nt, Artificial Sequence
  Description of Artificial Sequence: Synthetic oligonucleotide
auucugacgccgucugcga

SEQ ID NO: 745369 - RNA, 19 nt, Artificial Sequence
  Description of Artificial Sequence: Synthetic oligonucleotide
auucauccagccggagccg

SEQ ID NO: 745370 - RNA, 19 nt, Artificial Sequence
  Description of Artificial Sequence: Synthetic oligonucleotide
agcgcauuguuuucuccau

SEQ ID NO: 745371 - RNA, 19 nt, Artificial Sequence
  Description of Artificial Sequence: Synthetic oligonucleotide
aacccugggcauauauaca

SEQ ID NO: 745372 - RNA, 19 nt, Artificial Sequence
  Description of Artificial Sequence: Synthetic oligonucleotide
ugccaugcgcuccccgcag

SEQ ID NO: 745373 - RNA, 19 nt, Artificial Sequence
  Description of Artificial Sequence: Synthetic oligonucleotide
cccaagggagugcagagag

SEQ ID NO: 745374 - RNA, 19 nt, Artificial Sequence
  Description of Artificial Sequence: Synthetic oligonucleotide
acuucucgcgccaguucgc

SEQ ID NO: 745375 - RNA, 19 nt, Artificial Sequence
  Description of Artificial Sequence: Synthetic oligonucleotide
ggagcgugcgcccagcuca

SEQ ID NO: 745376 - RNA, 19 nt, Artificial Sequence
  Description of Artificial Sequence: Synthetic oligonucleotide
ucgcggcucucccagucgc

SEQ ID NO: 745377 - RNA, 19 nt, Artificial Sequence
  Description of Artificial Sequence: Synthetic oligonucleotide
ugccccggauguucuaggc

SEQ ID NO: 745378 - RNA, 19 nt, Artificial Sequence
  Description of Artificial Sequence: Synthetic oligonucleotide
aacgagucggccgggccca

SEQ ID NO: 745379 - RNA, 19 nt, Artificial Sequence
  Description of Artificial Sequence: Synthetic oligonucleotide
ucggguacugcggaucuuc

SEQ ID NO: 745380 - RNA, 19 nt, Artificial Sequence
  Description of Artificial Sequence: Synthetic oligonucleotide
ggucuucagacaugcggcc

SEQ ID NO: 745381 - RNA, 19 nt, Artificial Sequence
  Description of Artificial Sequence: Synthetic oligonucleotide
caugggguaugaguaggug

SEQ ID NO: 745382 - RNA, 19 nt, Artificial Sequence
  Description of Artificial Sequence: Synthetic oligonucleotide
cucgcucugcucugucugc

SEQ ID NO: 745383 - RNA, 19 nt, Artificial Sequence
  Description of Artificial Sequence: Synthetic oligonucleotide
cagucagcuuggaagcauc

SEQ ID NO: 745384 - RNA, 19 nt, Artificial Sequence
  Description of Artificial Sequence: Synthetic oligonucleotide
uuggcgugugccagcucug

SEQ ID NO: 745385 - RNA, 19 nt, Artificial Sequence
  Description of Artificial Sequence: Synthetic oligonucleotide
cuguacuggcuguauccuc

SEQ ID NO: 745386 - RNA, 19 nt, Artificial Sequence
  Description of Artificial Sequence: Synthetic oligonucleotide
ucguccagugaccgcugca

SEQ ID NO: 745387 - RNA, 19 nt, Artificial Sequence
  Description of Artificial Sequence: Synthetic oligonucleotide
ccucucguuccuuaagcag

SEQ ID NO: 745388 - RNA, 19 nt, Artificial Sequence
  Description of Artificial Sequence: Synthetic oligonucleotide
ucuuuaccuccgucucgug

SEQ ID NO: 745389 - RNA, 19 nt, Artificial Sequence
  Description of Artificial Sequence: Synthetic oligonucleotide
ugggacccaagggagugca

SEQ ID NO: 745390 - RNA, 19 nt, Artificial Sequence
  Description of Artificial Sequence: Synthetic oligonucleotide
ugcgauccggggacgggcu

SEQ ID NO: 745391 - RNA, 19 nt, Artificial Sequence
  Description of Artificial Sequence: Synthetic oligonucleotide
uuaggaugcugaguugcuu

SEQ ID NO: 745392 - RNA, 19 nt, Artificial Sequence
  Description of Artificial Sequence: Synthetic oligonucleotide
gccaaaucggguacugcgg

SEQ ID NO: 745393 - RNA, 19 nt, Artificial Sequence
  Description of Artificial Sequence: Synthetic oligonucleotide
cucggugccaaaucgggua

SEQ ID NO: 745394 - RNA, 19 nt, Artificial Sequence
  Description of Artificial Sequence: Synthetic oligonucleotide
uucuccauuugcgcggcuc

SEQ ID NO: 745395 - RNA, 19 nt, Artificial Sequence
  Description of Artificial Sequence: Synthetic oligonucleotide
guugcgcucagcgcgcacc

SEQ ID NO: 745396 - RNA, 19 nt, Artificial Sequence
  Description of Artificial Sequence: Synthetic oligonucleotide
ggcauucugacgccgucug

SEQ ID NO: 745397 - RNA, 19 nt, Artificial Sequence
  Description of Artificial Sequence: Synthetic oligonucleotide
ucgugcuguuccacacgcc

SEQ ID NO: 745398 - RNA, 19 nt, Artificial Sequence
  Description of Artificial Sequence: Synthetic oligonucleotide
gggaugggacccaagggag

SEQ ID NO: 745399 - RNA, 19 nt, Artificial Sequence
  Description of Artificial Sequence: Synthetic oligonucleotide
ucgaagagagcggccuggc

SEQ ID NO: 745400 - RNA, 19 nt, Artificial Sequence
  Description of Artificial Sequence: Synthetic oligonucleotide
uugcgcucagcgcgcaccu

SEQ ID NO: 745401 - RNA, 19 nt, Artificial Sequence
  Description of Artificial Sequence: Synthetic oligonucleotide
gauccaugcuggagcgugc

SEQ ID NO: 745402 - RNA, 19 nt, Artificial Sequence
  Description of Artificial Sequence: Synthetic oligonucleotide
uccaccgugccaugcgcuc

SEQ ID NO: 745403 - RNA, 19 nt, Artificial Sequence
  Description of Artificial Sequence: Synthetic oligonucleotide
gggcauauauacauauaca

SEQ ID NO: 745404 - RNA, 19 nt, Artificial Sequence
  Description of Artificial Sequence: Synthetic oligonucleotide
uccgucucgugcuguucca

SEQ ID NO: 745405 - RNA, 19 nt, Artificial Sequence
  Description of Artificial Sequence: Synthetic oligonucleotide
cucgcggcucucccagucg

SEQ ID NO: 745406 - RNA, 19 nt, Artificial Sequence
  Description of Artificial Sequence: Synthetic oligonucleotide
cugacgccgucugcgagcc

SEQ ID NO: 745407 - RNA, 19 nt, Artificial Sequence
  Description of Artificial Sequence: Synthetic oligonucleotide
ggacgggcugcccaggaug

SEQ ID NO: 745408 - RNA, 19 nt, Artificial Sequence
  Description of Artificial Sequence: Synthetic oligonucleotide
cagggcacuggcauucuga

SEQ ID NO: 745409 - RNA, 19 nt, Artificial Sequence
  Description of Artificial Sequence: Synthetic oligonucleotide
cuucucgcgccaguucgcc

SEQ ID NO: 745410 - RNA, 19 nt, Artificial Sequence
  Description of Artificial Sequence: Synthetic oligonucleotide
uggcauucugacgccgucu

SEQ ID NO: 745411 - RNA, 19 nt, Artificial Sequence
  Description of Artificial Sequence: Synthetic oligonucleotide
acgguugcgcucagcgcgc

SEQ ID NO: 745412 - RNA, 19 nt, Artificial Sequence
  Description of Artificial Sequence: Synthetic oligonucleotide
ucgcgcacaggcucaugcu

SEQ ID NO: 745413 - RNA, 19 nt, Artificial Sequence
  Description of Artificial Sequence: Synthetic oligonucleotide
ucggaccaccagcgcauug

SEQ ID NO: 745414 - RNA, 19 nt, Artificial Sequence
  Description of Artificial Sequence: Synthetic oligonucleotide
gcgccagccaacuccuugg

SEQ ID NO: 745415 - RNA, 19 nt, Artificial Sequence
  Description of Artificial Sequence: Synthetic oligonucleotide
cucagcgcgcaccuugcuc

SEQ ID NO: 745416 - RNA, 19 nt, Artificial Sequence
  Description of Artificial Sequence: Synthetic oligonucleotide
agguucucgcucugcucug

SEQ ID NO: 745417 - RNA, 19 nt, Artificial Sequence
  Description of Artificial Sequence: Synthetic oligonucleotide
ucgcccugagccuccuggc

SEQ ID NO: 745418 - RNA, 19 nt, Artificial Sequence
  Description of Artificial Sequence: Synthetic oligonucleotide
uuugcgcggcucgcgcgcg

SEQ ID NO: 745419 - RNA, 19 nt, Artificial Sequence
  Description of Artificial Sequence: Synthetic oligonucleotide
uccucgcgcgcacgguugc

SEQ ID NO: 745420 - RNA, 19 nt, Artificial Sequence
  Description of Artificial Sequence: Synthetic oligonucleotide
cagguuccccauccauggg

SEQ ID NO: 745421 - RNA, 19 nt, Artificial Sequence
  Description of Artificial Sequence: Synthetic oligonucleotide
ggcgguguggguggcaacg

SEQ ID NO: 745422 - RNA, 19 nt, Artificial Sequence
  Description of Artificial Sequence: Synthetic oligonucleotide
ccugguguguuuccuuuag

SEQ ID NO: 745423 - RNA, 19 nt, Artificial Sequence
  Description of Artificial Sequence: Synthetic oligonucleotide
ggucgcuggcuccaucucc

SEQ ID NO: 745424 - RNA, 19 nt, Artificial Sequence
  Description of Artificial Sequence: Synthetic oligonucleotide
caugcgauccggggacggg

SEQ ID NO: 745425 - RNA, 19 nt, Artificial Sequence
  Description of Artificial Sequence: Synthetic oligonucleotide
agcuugaacuccauuuauu

SEQ ID NO: 745426 - RNA, 19 nt, Artificial Sequence
  Description of Artificial Sequence: Synthetic oligonucleotide
cagucggaccaccagcgca

SEQ ID NO: 745427 - RNA, 19 nt, Artificial Sequence
  Description of Artificial Sequence: Synthetic oligonucleotide
cugcauucucugccugaag

SEQ ID NO: 745428 - RNA, 19 nt, Artificial Sequence
  Description of Artificial Sequence: Synthetic oligonucleotide
gaacuccauuuauuacaaa

SEQ ID NO: 745429 - RNA, 19 nt, Artificial Sequence
  Description of Artificial Sequence: Synthetic oligonucleotide
uugcgauccuggcggccug

SEQ ID NO: 745430 - RNA, 19 nt, Artificial Sequence
  Description of Artificial Sequence: Synthetic oligonucleotide
ucuccgccccgaugucgcg

SEQ ID NO: 745431 - RNA, 19 nt, Artificial Sequence
  Description of Artificial Sequence: Synthetic oligonucleotide
uccugguguguuuccuuua

SEQ ID NO: 745432 - RNA, 19 nt, Artificial Sequence
  Description of Artificial Sequence: Synthetic oligonucleotide
auguucuaggccaccugga

SEQ ID NO: 745433 - RNA, 19 nt, Artificial Sequence
  Description of Artificial Sequence: Synthetic oligonucleotide
cacuggcauucugacgccg

SEQ ID NO: 745434 - RNA, 19 nt, Artificial Sequence
  Description of Artificial Sequence: Synthetic oligonucleotide
agucggccgggcccaugcg

SEQ ID NO: 745435 - RNA, 19 nt, Artificial Sequence
  Description of Artificial Sequence: Synthetic oligonucleotide
aggaggaagucguccccaa

SEQ ID NO: 745436 - RNA, 19 nt, Artificial Sequence
  Description of Artificial Sequence: Synthetic oligonucleotide
cuggcauucugacgccguc

SEQ ID NO: 745437 - RNA, 19 nt, Artificial Sequence
  Description of Artificial Sequence: Synthetic oligonucleotide
cuccucgcgcgcacgguug

SEQ ID NO: 745438 - RNA, 19 nt, Artificial Sequence
  Description of Artificial Sequence: Synthetic oligonucleotide
uccgugccugguugugggc

SEQ ID NO: 745439 - RNA, 19 nt, Artificial Sequence
  Description of Artificial Sequence: Synthetic oligonucleotide
ugaccgcugcagcuuccgu

SEQ ID NO: 745440 - RNA, 19 nt, Artificial Sequence
  Description of Artificial Sequence: Synthetic oligonucleotide
ucgcacucgcccugagccu

SEQ ID NO: 745441 - RNA, 19 nt, Artificial Sequence
  Description of Artificial Sequence: Synthetic oligonucleotide
cccucagaucacaauccag

SEQ ID NO: 745442 - RNA, 19 nt, Artificial Sequence
  Description of Artificial Sequence: Synthetic oligonucleotide
guacugcggaucuucccaa

SEQ ID NO: 745443 - RNA, 19 nt, Artificial Sequence
  Description of Artificial Sequence: Synthetic oligonucleotide
cucugcggccccacucagc

SEQ ID NO: 745444 - RNA, 19 nt, Artificial Sequence
  Description of Artificial Sequence: Synthetic oligonucleotide
caccgugccaugcgcuccc

SEQ ID NO: 745445 - RNA, 19 nt, Artificial Sequence
  Description of Artificial Sequence: Synthetic oligonucleotide
auagccccugccagaccac

SEQ ID NO: 745446 - RNA, 19 nt, Artificial Sequence
  Description of Artificial Sequence: Synthetic oligonucleotide
ccaucuccggcuuccucgg

SEQ ID NO: 745447 - RNA, 19 nt, Artificial Sequence
  Description of Artificial Sequence: Synthetic oligonucleotide
caugcgcuccccgcagccg

SEQ ID NO: 745448 - RNA, 19 nt, Artificial Sequence
  Description of Artificial Sequence: Synthetic oligonucleotide
gcaugaaguccuaugcaga

SEQ ID NO: 745449 - RNA, 19 nt, Artificial Sequence
  Description of Artificial Sequence: Synthetic oligonucleotide
gccagcucacguccgcgcg

SEQ ID NO: 745450 - RNA, 19 nt, Artificial Sequence
  Description of Artificial Sequence: Synthetic oligonucleotide
aggcucaugcucgcgcuca

SEQ ID NO: 745451 - RNA, 19 nt, Artificial Sequence
  Description of Artificial Sequence: Synthetic oligonucleotide
gccgucggccagcagggcg

SEQ ID NO: 745452 - RNA, 19 nt, Artificial Sequence
  Description of Artificial Sequence: Synthetic oligonucleotide
caccuccucgcgcgcacgg

SEQ ID NO: 745453 - RNA, 19 nt, Artificial Sequence
  Description of Artificial Sequence: Synthetic oligonucleotide
cuccauuugcgcggcucgc

SEQ ID NO: 745454 - RNA, 19 nt, Artificial Sequence
  Description of Artificial Sequence: Synthetic oligonucleotide
ucgcucugcucugucugcu

SEQ ID NO: 745455 - RNA, 19 nt, Artificial Sequence
  Description of Artificial Sequence: Synthetic oligonucleotide
guucagccaucuugcgauc

SEQ ID NO: 745456 - RNA, 19 nt, Artificial Sequence
  Description of Artificial Sequence: Synthetic oligonucleotide
gcuuccucggugccaaauc

SEQ ID NO: 745457 - RNA, 19 nt, Artificial Sequence
  Description of Artificial Sequence: Synthetic oligonucleotide
gguaugaguaggugagagu

SEQ ID NO: 745458 - RNA, 19 nt, Artificial Sequence
  Description of Artificial Sequence: Synthetic oligonucleotide
gucguguguccuuguccac

SEQ ID NO: 745459 - RNA, 19 nt, Artificial Sequence
  Description of Artificial Sequence: Synthetic oligonucleotide
cugcucguccagugaccgc

SEQ ID NO: 745460 - RNA, 19 nt, Artificial Sequence
  Description of Artificial Sequence: Synthetic oligonucleotide
ccgucguguguccuugucc

SEQ ID NO: 745461 - RNA, 19 nt, Artificial Sequence
  Description of Artificial Sequence: Synthetic oligonucleotide
ucgcgcgcacgguugcgcu

SEQ ID NO: 745462 - RNA, 19 nt, Artificial Sequence
  Description of Artificial Sequence: Synthetic oligonucleotide
cagcucacguccgcgcgcc

SEQ ID NO: 745463 - RNA, 19 nt, Artificial Sequence
  Description of Artificial Sequence: Synthetic oligonucleotide
uccuggcgcucgcggcgcg

SEQ ID NO: 745464 - RNA, 19 nt, Artificial Sequence
  Description of Artificial Sequence: Synthetic oligonucleotide
gcccaugcgauccggggac

SEQ ID NO: 745465 - RNA, 19 nt, Artificial Sequence
  Description of Artificial Sequence: Synthetic oligonucleotide
gcaacgagucggccgggcc

SEQ ID NO: 745466 - RNA, 19 nt, Artificial Sequence
  Description of Artificial Sequence: Synthetic oligonucleotide
cccugccagaccaccaagc

SEQ ID NO: 745467 - RNA, 19 nt, Artificial Sequence
  Description of Artificial Sequence: Synthetic oligonucleotide
ccauuugcgcggcucgcgc

SEQ ID NO: 745468 - RNA, 19 nt, Artificial Sequence
  Description of Artificial Sequence: Synthetic oligonucleotide
gccgauuggcgugugccag

SEQ ID NO: 745469 - RNA, 19 nt, Artificial Sequence
  Description of Artificial Sequence: Synthetic oligonucleotide
gcgugcgcccagcucaucc

SEQ ID NO: 745470 - RNA, 19 nt, Artificial Sequence
  Description of Artificial Sequence: Synthetic oligonucleotide
ccaaaucggguacugcgga

SEQ ID NO: 745471 - RNA, 19 nt, Artificial Sequence
  Description of Artificial Sequence: Synthetic oligonucleotide
cucgcgcgcacgguugcgc

SEQ ID NO: 745472 - RNA, 19 nt, Artificial Sequence
  Description of Artificial Sequence: Synthetic oligonucleotide
gcgugugccagcucugcca

SEQ ID NO: 745473 - RNA, 19 nt, Artificial Sequence
  Description of Artificial Sequence: Synthetic oligonucleotide
uccgggccgucgugugucc

SEQ ID NO: 745474 - RNA, 19 nt, Artificial Sequence
  Description of Artificial Sequence: Synthetic oligonucleotide
gucuuaggaacuggguccu

SEQ ID NO: 745475 - RNA, 19 nt, Artificial Sequence
  Description of Artificial Sequence: Synthetic oligonucleotide
gggagugcagagagcauga

SEQ ID NO: 745476 - RNA, 19 nt, Artificial Sequence
  Description of Artificial Sequence: Synthetic oligonucleotide
cacgccgauuggcgugugc

SEQ ID NO: 745477 - RNA, 19 nt, Artificial Sequence
  Description of Artificial Sequence: Synthetic oligonucleotide
gcauucugacgccgucugc

SEQ ID NO: 745478 - RNA, 19 nt, Artificial Sequence
  Description of Artificial Sequence: Synthetic oligonucleotide
gauuggcgugugccagcuc

SEQ ID NO: 745479 - RNA, 19 nt, Artificial Sequence
  Description of Artificial Sequence: Synthetic oligonucleotide
uggcaacgagucggccggg

SEQ ID NO: 745480 - RNA, 19 nt, Artificial Sequence
  Description of Artificial Sequence: Synthetic oligonucleotide
caguccuguucugccccgg

SEQ ID NO: 745481 - RNA, 19 nt, Artificial Sequence
  Description of Artificial Sequence: Synthetic oligonucleotide
ggucugcucuucagcaggc

SEQ ID NO: 745482 - RNA, 19 nt, Artificial Sequence
  Description of Artificial Sequence: Synthetic oligonucleotide
ccacacgccgauuggcgug

SEQ ID NO: 745483 - RNA, 19 nt, Artificial Sequence
  Description of Artificial Sequence: Synthetic oligonucleotide
guugcgauccuggcggccu

SEQ ID NO: 745484 - RNA, 19 nt, Artificial Sequence
  Description of Artificial Sequence: Synthetic oligonucleotide
gucggccgggcccaugcga

SEQ ID NO: 745485 - RNA, 19 nt, Artificial Sequence
  Description of Artificial Sequence: Synthetic oligonucleotide
cgucguguguccuugucca

SEQ ID NO: 745486 - RNA, 19 nt, Artificial Sequence
  Description of Artificial Sequence: Synthetic oligonucleotide
cuccgggccgucguguguc

SEQ ID NO: 745487 - RNA, 19 nt, Artificial Sequence
  Description of Artificial Sequence: Synthetic oligonucleotide
gccccgaugucgcgcacag

SEQ ID NO: 745488 - RNA, 19 nt, Artificial Sequence
  Description of Artificial Sequence: Synthetic oligonucleotide
cuggcgcucgcggcgcgcg

SEQ ID NO: 745489 - RNA, 19 nt, Artificial Sequence
  Description of Artificial Sequence: Synthetic oligonucleotide
ugcgauccuggcggccuga

SEQ ID NO: 745490 - RNA, 19 nt, Artificial Sequence
  Description of Artificial Sequence: Synthetic oligonucleotide
cgugccaugcgcuccccgc

SEQ ID NO: 745491 - RNA, 19 nt, Artificial Sequence
  Description of Artificial Sequence: Synthetic oligonucleotide
ggcccaugcgauccgggga

SEQ ID NO: 745492 - RNA, 19 nt, Artificial Sequence
  Description of Artificial Sequence: Synthetic oligonucleotide
uucugccccggauguucua

SEQ ID NO: 745493 - RNA, 19 nt, Artificial Sequence
  Description of Artificial Sequence: Synthetic oligonucleotide
gcagucggaccaccagcgc

SEQ ID NO: 745494 - RNA, 19 nt, Artificial Sequence
  Description of Artificial Sequence: Synthetic oligonucleotide
cucguuccuuaagcagcac

SEQ ID NO: 745495 - RNA, 19 nt, Artificial Sequence
  Description of Artificial Sequence: Synthetic oligonucleotide
gucguccccaacaguggga

SEQ ID NO: 745496 - RNA, 19 nt, Artificial Sequence
  Description of Artificial Sequence: Synthetic oligonucleotide
uccgcgcgccucgcacucg

SEQ ID NO: 745497 - RNA, 19 nt, Artificial Sequence
  Description of Artificial Sequence: Synthetic oligonucleotide
accuccgucucgugcuguu

SEQ ID NO: 745498 - RNA, 19 nt, Artificial Sequence
  Description of Artificial Sequence: Synthetic oligonucleotide
uaccuccgucucgugcugu

SEQ ID NO: 745499 - RNA, 19 nt, Artificial Sequence
  Description of Artificial Sequence: Synthetic oligonucleotide
agcgcgcaccuugcuccac

SEQ ID NO: 745500 - RNA, 19 nt, Artificial Sequence
  Description of Artificial Sequence: Synthetic oligonucleotide
cuccgccccgaugucgcgc

SEQ ID NO: 745501 - RNA, 19 nt, Artificial Sequence
  Description of Artificial Sequence: Synthetic oligonucleotide
ugucgcgcacaggcucaug

SEQ ID NO: 745502 - RNA, 19 nt, Artificial Sequence
  Description of Artificial Sequence: Synthetic oligonucleotide
caacagguuccccauccau

SEQ ID NO: 745503 - RNA, 19 nt, Artificial Sequence
  Description of Artificial Sequence: Synthetic oligonucleotide
ggcucaugcucgcgcucag

SEQ ID NO: 745504 - RNA, 19 nt, Artificial Sequence
  Description of Artificial Sequence: Synthetic oligonucleotide
cucgcgccaguucgccgug

SEQ ID NO: 745505 - RNA, 19 nt, Artificial Sequence
  Description of Artificial Sequence: Synthetic oligonucleotide
cguuccuuaagcagcaccu

SEQ ID NO: 745506 - RNA, 19 nt, Artificial Sequence
  Description of Artificial Sequence: Synthetic oligonucleotide
ggccucuccgccccgaugu

SEQ ID NO: 745507 - RNA, 19 nt, Artificial Sequence
  Description of Artificial Sequence: Synthetic oligonucleotide
gugagagugcagccuuccu

SEQ ID NO: 745508 - RNA, 19 nt, Artificial Sequence
  Description of Artificial Sequence: Synthetic oligonucleotide
caaaucggguacugcggau

SEQ ID NO: 745509 - RNA, 19 nt, Artificial Sequence
  Description of Artificial Sequence: Synthetic oligonucleotide
cucgaugcuccugcucaga

SEQ ID NO: 745510 - RNA, 19 nt, Artificial Sequence
  Description of Artificial Sequence: Synthetic oligonucleotide
ugcgcggcucgcgcgcgug

SEQ ID NO: 745511 - RNA, 19 nt, Artificial Sequence
  Description of Artificial Sequence: Synthetic oligonucleotide
guccgcgcgccucgcacuc

SEQ ID NO: 745512 - RNA, 19 nt, Artificial Sequence
  Description of Artificial Sequence: Synthetic oligonucleotide
guucgccgugcagucggac

SEQ ID NO: 745513 - RNA, 19 nt, Artificial Sequence
  Description of Artificial Sequence: Synthetic oligonucleotide
ccgugccugguugugggcc

SEQ ID NO: 745514 - RNA, 19 nt, Artificial Sequence
  Description of Artificial Sequence: Synthetic oligonucleotide
gguugcgauccuggcggcc

SEQ ID NO: 745515 - RNA, 19 nt, Artificial Sequence
  Description of Artificial Sequence: Synthetic oligonucleotide
ccaccagcgcauuguuuuc

SEQ ID NO: 745516 - RNA, 19 nt, Artificial Sequence
  Description of Artificial Sequence: Synthetic oligonucleotide
ugacggcgugccgcugggc

SEQ ID NO: 745517 - RNA, 19 nt, Artificial Sequence
  Description of Artificial Sequence: Synthetic oligonucleotide
augcuggagcgugcgccca

SEQ ID NO: 745518 - RNA, 19 nt, Artificial Sequence
  Description of Artificial Sequence: Synthetic oligonucleotide
ucacguccgcgcgccucgc

SEQ ID NO: 745519 - RNA, 19 nt, Artificial Sequence
  Description of Artificial Sequence: Synthetic oligonucleotide
cagggcagucagcuuggaa

SEQ ID NO: 745520 - RNA, 19 nt, Artificial Sequence
  Description of Artificial Sequence: Synthetic oligonucleotide
gccgucugcgagccagggc

SEQ ID NO: 745521 - RNA, 19 nt, Artificial Sequence
  Description of Artificial Sequence: Synthetic oligonucleotide
ccucuccgccccgaugucg

SEQ ID NO: 745522 - RNA, 19 nt, Artificial Sequence
  Description of Artificial Sequence: Synthetic oligonucleotide
cccggauguucuaggccac

SEQ ID NO: 745523 - RNA, 19 nt, Artificial Sequence
  Description of Artificial Sequence: Synthetic oligonucleotide
acgccgucugcgagccagg

SEQ ID NO: 745524 - RNA, 19 nt, Artificial Sequence
  Description of Artificial Sequence: Synthetic oligonucleotide
ccaugcgauccggggacgg

SEQ ID NO: 745525 - RNA, 19 nt, Artificial Sequence
  Description of Artificial Sequence: Synthetic oligonucleotide
cugcggccccacucagcug

SEQ ID NO: 745526 - RNA, 19 nt, Artificial Sequence
  Description of Artificial Sequence: Synthetic oligonucleotide
ggcuccgggccgucgugug

SEQ ID NO: 745527 - RNA, 19 nt, Artificial Sequence
  Description of Artificial Sequence: Synthetic oligonucleotide
ggcaacgagucggccgggc

SEQ ID NO: 745528 - RNA, 19 nt, Artificial Sequence
  Description of Artificial Sequence: Synthetic oligonucleotide
aggcuccgggccgucgugu

SEQ ID NO: 745529 - RNA, 19 nt, Artificial Sequence
  Description of Artificial Sequence: Synthetic oligonucleotide
aguucgccgugcagucgga

SEQ ID NO: 745530 - RNA, 19 nt, Artificial Sequence
  Description of Artificial Sequence: Synthetic oligonucleotide
ugacgccgucugcgagcca

SEQ ID NO: 745531 - RNA, 19 nt, Artificial Sequence
  Description of Artificial Sequence: Synthetic oligonucleotide
cggguacugcggaucuucc

SEQ ID NO: 745532 - RNA, 19 nt, Artificial Sequence
  Description of Artificial Sequence: Synthetic oligonucleotide
agucgccgucggccagcag

SEQ ID NO: 745533 - RNA, 19 nt, Artificial Sequence
  Description of Artificial Sequence: Synthetic oligonucleotide
cgcgcucaggcuccgggcc

SEQ ID NO: 745534 - RNA, 19 nt, Artificial Sequence
  Description of Artificial Sequence: Synthetic oligonucleotide
agcgugcgcccagcucauc

SEQ ID NO: 745535 - RNA, 19 nt, Artificial Sequence
  Description of Artificial Sequence: Synthetic oligonucleotide
gggguaugaguaggugaga

SEQ ID NO: 745536 - RNA, 19 nt, Artificial Sequence
  Description of Artificial Sequence: Synthetic oligonucleotide
gguuugaguggaugcucau

SEQ ID NO: 745537 - RNA, 19 nt, Artificial Sequence
  Description of Artificial Sequence: Synthetic oligonucleotide
ccuguucugccccggaugu

SEQ ID NO: 745538 - RNA, 19 nt, Artificial Sequence
  Description of Artificial Sequence: Synthetic oligonucleotide
ucgcgccaguucgccgugc

SEQ ID NO: 745539 - RNA, 19 nt, Artificial Sequence
  Description of Artificial Sequence: Synthetic oligonucleotide
accuccucgcgcgcacggu

SEQ ID NO: 745540 - RNA, 19 nt, Artificial Sequence
  Description of Artificial Sequence: Synthetic oligonucleotide
agcucacguccgcgcgccu

SEQ ID NO: 745541 - RNA, 19 nt, Artificial Sequence
  Description of Artificial Sequence: Synthetic oligonucleotide
gccgucguguguccuuguc

SEQ ID NO: 745542 - RNA, 19 nt, Artificial Sequence
  Description of Artificial Sequence: Synthetic oligonucleotide
gggccgucguguguccuug

SEQ ID NO: 745543 - RNA, 19 nt, Artificial Sequence
  Description of Artificial Sequence: Synthetic oligonucleotide
gccaggcggccucuccgcc

SEQ ID NO: 745544 - RNA, 19 nt, Artificial Sequence
  Description of Artificial Sequence: Synthetic oligonucleotide
ccaccgugccaugcgcucc

SEQ ID NO: 745545 - RNA, 19 nt, Artificial Sequence
  Description of Artificial Sequence: Synthetic oligonucleotide
guucugccccggauguucu

SEQ ID NO: 745546 - RNA, 19 nt, Artificial Sequence
  Description of Artificial Sequence: Synthetic oligonucleotide
gugcacgcagcuucuuguu

SEQ ID NO: 745547 - RNA, 19 nt, Artificial Sequence
  Description of Artificial Sequence: Synthetic oligonucleotide
gcgccaguucgccgugcag

SEQ ID NO: 745548 - RNA, 19 nt, Artificial Sequence
  Description of Artificial Sequence: Synthetic oligonucleotide
cgcgccagccaacuccuug

SEQ ID NO: 745549 - RNA, 19 nt, Artificial Sequence
  Description of Artificial Sequence: Synthetic oligonucleotide
cagcgcgcaccuugcucca

SEQ ID NO: 745550 - RNA, 19 nt, Artificial Sequence
  Description of Artificial Sequence: Synthetic oligonucleotide
augucgcgcacaggcucau

SEQ ID NO: 745551 - RNA, 19 nt, Artificial Sequence
  Description of Artificial Sequence: Synthetic oligonucleotide
gucugcgagccagggccuc

SEQ ID NO: 745552 - RNA, 19 nt, Artificial Sequence
  Description of Artificial Sequence: Synthetic oligonucleotide
gguugcgcucagcgcgcac

SEQ ID NO: 745553 - RNA, 19 nt, Artificial Sequence
  Description of Artificial Sequence: Synthetic oligonucleotide
ccucgcggcucucccaguc

SEQ ID NO: 745554 - RNA, 19 nt, Artificial Sequence
  Description of Artificial Sequence: Synthetic oligonucleotide
aucggguacugcggaucuu

SEQ ID NO: 745555 - RNA, 19 nt, Artificial Sequence
  Description of Artificial Sequence: Synthetic oligonucleotide
gcuggagcgugcgcccagc

SEQ ID NO: 745556 - RNA, 19 nt, Artificial Sequence
  Description of Artificial Sequence: Synthetic oligonucleotide
cagggcaggcgguugcgau

SEQ ID NO: 745557 - RNA, 19 nt, Artificial Sequence
  Description of Artificial Sequence: Synthetic oligonucleotide
caccagcgcauuguuuucu

SEQ ID NO: 745558 - RNA, 19 nt, Artificial Sequence
  Description of Artificial Sequence: Synthetic oligonucleotide
gggacccaagggagugcag

SEQ ID NO: 745559 - RNA, 19 nt, Artificial Sequence
  Description of Artificial Sequence: Synthetic oligonucleotide
gcgauccggggacgggcug

SEQ ID NO: 745560 - RNA, 19 nt, Artificial Sequence
  Description of Artificial Sequence: Synthetic oligonucleotide
ccgggccagcucacguccg

SEQ ID NO: 745561 - RNA, 19 nt, Artificial Sequence
  Description of Artificial Sequence: Synthetic oligonucleotide
gcgcgcgugccuccuccag

SEQ ID NO: 745562 - RNA, 19 nt, Artificial Sequence
  Description of Artificial Sequence: Synthetic oligonucleotide
ggguggcaacgagucggcc

SEQ ID NO: 745563 - RNA, 19 nt, Artificial Sequence
  Description of Artificial Sequence: Synthetic oligonucleotide
ggagugcagagagcaugaa

SEQ ID NO: 745564 - RNA, 19 nt, Artificial Sequence
  Description of Artificial Sequence: Synthetic oligonucleotide
cccaugcgauccggggacg

SEQ ID NO: 745565 - RNA, 19 nt, Artificial Sequence
  Description of Artificial Sequence: Synthetic oligonucleotide
gccuggacugcagguguuc

SEQ ID NO: 745566 - RNA, 19 nt, Artificial Sequence
  Description of Artificial Sequence: Synthetic oligonucleotide
guccaccgugccaugcgcu

SEQ ID NO: 745567 - RNA, 19 nt, Artificial Sequence
  Description of Artificial Sequence: Synthetic oligonucleotide
ggaugggacccaagggagu

SEQ ID NO: 745568 - RNA, 19 nt, Artificial Sequence
  Description of Artificial Sequence: Synthetic oligonucleotide
cacacgccgauuggcgugu

SEQ ID NO: 745569 - RNA, 19 nt, Artificial Sequence
  Description of Artificial Sequence: Synthetic oligonucleotide
cucgcgcgcgugccuccuc

SEQ ID NO: 745570 - RNA, 19 nt, Artificial Sequence
  Description of Artificial Sequence: Synthetic oligonucleotide
gcgcgugccuccuccagcu

SEQ ID NO: 745571 - RNA, 19 nt, Artificial Sequence
  Description of Artificial Sequence: Synthetic oligonucleotide
gcucguccagugaccgcug

SEQ ID NO: 745572 - RNA, 19 nt, Artificial Sequence
  Description of Artificial Sequence: Synthetic oligonucleotide
ugcgcucagcgcgcaccuu

SEQ ID NO: 745573 - RNA, 19 nt, Artificial Sequence
  Description of Artificial Sequence: Synthetic oligonucleotide
gcgcaccuugcuccacuuc

SEQ ID NO: 745574 - RNA, 19 nt, Artificial Sequence
  Description of Artificial Sequence: Synthetic oligonucleotide
cccauccaugggguaugag

SEQ ID NO: 745575 - RNA, 19 nt, Artificial Sequence
  Description of Artificial Sequence: Synthetic oligonucleotide
gcucacguccgcgcgccuc

SEQ ID NO: 745576 - RNA, 19 nt, Artificial Sequence
  Description of Artificial Sequence: Synthetic oligonucleotide
gcagucagcuuggaagcau

SEQ ID NO: 745577 - RNA, 19 nt, Artificial Sequence
  Description of Artificial Sequence: Synthetic oligonucleotide
gccgugcagucggaccacc

SEQ ID NO: 745578 - RNA, 19 nt, Artificial Sequence
  Description of Artificial Sequence: Synthetic oligonucleotide
gccucgcacucgcccugag

SEQ ID NO: 745579 - RNA, 19 nt, Artificial Sequence
  Description of Artificial Sequence: Synthetic oligonucleotide
gggcgguguggguggcaac

SEQ ID NO: 745580 - RNA, 19 nt, Artificial Sequence
  Description of Artificial Sequence: Synthetic oligonucleotide
ccgucucgugcuguuccac

SEQ ID NO: 745581 - RNA, 19 nt, Artificial Sequence
  Description of Artificial Sequence: Synthetic oligonucleotide
cacguccgcgcgccucgca

SEQ ID NO: 745582 - RNA, 19 nt, Artificial Sequence
  Description of Artificial Sequence: Synthetic oligonucleotide
cuggagcgugcgcccagcu

SEQ ID NO: 745583 - RNA, 19 nt, Artificial Sequence
  Description of Artificial Sequence: Synthetic oligonucleotide
gcgguguggguggcaacga

SEQ ID NO: 745584 - RNA, 19 nt, Artificial Sequence
  Description of Artificial Sequence: Synthetic oligonucleotide
cagucgccgucggccagca

SEQ ID NO: 745585 - RNA, 19 nt, Artificial Sequence
  Description of Artificial Sequence: Synthetic oligonucleotide
cgcacucgcccugagccuc

SEQ ID NO: 745586 - RNA, 19 nt, Artificial Sequence
  Description of Artificial Sequence: Synthetic oligonucleotide
cgcggcucucccagucgcc

SEQ ID NO: 745587 - RNA, 19 nt, Artificial Sequence
  Description of Artificial Sequence: Synthetic oligonucleotide
cgguugcgauccuggcggc

SEQ ID NO: 745588 - RNA, 19 nt, Artificial Sequence
  Description of Artificial Sequence: Synthetic oligonucleotide
cgggccagcucacguccgc

SEQ ID NO: 745589 - RNA, 19 nt, Artificial Sequence
  Description of Artificial Sequence: Synthetic oligonucleotide
ccucgcgcgcacgguugcg

SEQ ID NO: 745590 - RNA, 19 nt, Artificial Sequence
  Description of Artificial Sequence: Synthetic oligonucleotide
ccucggugccaaaucgggu

SEQ ID NO: 745591 - RNA, 19 nt, Artificial Sequence
  Description of Artificial Sequence: Synthetic oligonucleotide
gccucuccgccccgauguc

SEQ ID NO: 745592 - RNA, 19 nt, Artificial Sequence
  Description of Artificial Sequence: Synthetic oligonucleotide
ccgggcccaugcgauccgg

SEQ ID NO: 745593 - RNA, 19 nt, Artificial Sequence
  Description of Artificial Sequence: Synthetic oligonucleotide
gcgcauuguuuucuccauu

SEQ ID NO: 745594 - RNA, 19 nt, Artificial Sequence
  Description of Artificial Sequence: Synthetic oligonucleotide
gagcgugcgcccagcucau

SEQ ID NO: 745595 - RNA, 19 nt, Artificial Sequence
  Description of Artificial Sequence: Synthetic oligonucleotide
ggccccggugacggcgugc

SEQ ID NO: 745596 - RNA, 19 nt, Artificial Sequence
  Description of Artificial Sequence: Synthetic oligonucleotide
ggcgcgcgccagccaacuc

SEQ ID NO: 745597 - RNA, 19 nt, Artificial Sequence
  Description of Artificial Sequence: Synthetic oligonucleotide
cgccgauuggcgugugcca

SEQ ID NO: 745598 - RNA, 19 nt, Artificial Sequence
  Description of Artificial Sequence: Synthetic oligonucleotide
cgcaccuccucgcgcgcac

SEQ ID NO: 745599 - RNA, 19 nt, Artificial Sequence
  Description of Artificial Sequence: Synthetic oligonucleotide
caucuccggcuuccucggu

SEQ ID NO: 745600 - RNA, 19 nt, Artificial Sequence
  Description of Artificial Sequence: Synthetic oligonucleotide
ccgaugucgcgcacaggcu

SEQ ID NO: 745601 - RNA, 19 nt, Artificial Sequence
  Description of Artificial Sequence: Synthetic oligonucleotide
cgccgucugcgagccaggg

SEQ ID NO: 745602 - RNA, 19 nt, Artificial Sequence
  Description of Artificial Sequence: Synthetic oligonucleotide
ccccgaugucgcgcacagg

SEQ ID NO: 745603 - RNA, 19 nt, Artificial Sequence
  Description of Artificial Sequence: Synthetic oligonucleotide
ccccggugacggcgugccg

SEQ ID NO: 745604 - RNA, 19 nt, Artificial Sequence
  Description of Artificial Sequence: Synthetic oligonucleotide
gcucagcgcgcaccuugcu

SEQ ID NO: 745605 - RNA, 19 nt, Artificial Sequence
  Description of Artificial Sequence: Synthetic oligonucleotide
ccuggcgcucgcggcgcgc

SEQ ID NO: 745606 - RNA, 19 nt, Artificial Sequence
  Description of Artificial Sequence: Synthetic oligonucleotide
cagcaccuucugggauuca

SEQ ID NO: 745607 - RNA, 19 nt, Artificial Sequence
  Description of Artificial Sequence: Synthetic oligonucleotide
acgagucggccgggcccau

SEQ ID NO: 745608 - RNA, 19 nt, Artificial Sequence
  Description of Artificial Sequence: Synthetic oligonucleotide
gcuccgggccgucgugugu

SEQ ID NO: 745609 - RNA, 19 nt, Artificial Sequence
  Description of Artificial Sequence: Synthetic oligonucleotide
cgcgcgcacgguugcgcuc

SEQ ID NO: 745610 - RNA, 19 nt, Artificial Sequence
  Description of Artificial Sequence: Synthetic oligonucleotide
gcgcacgguugcgcucagc

SEQ ID NO: 745611 - RNA, 19 nt, Artificial Sequence
  Description of Artificial Sequence: Synthetic oligonucleotide
cgugcgcccagcucauccu

SEQ ID NO: 745612 - RNA, 19 nt, Artificial Sequence
  Description of Artificial Sequence: Synthetic oligonucleotide
gucggaccaccagcgcauu

SEQ ID NO: 745613 - RNA, 19 nt, Artificial Sequence
  Description of Artificial Sequence: Synthetic oligonucleotide
cggccucuccgccccgaug

SEQ ID NO: 745614 - RNA, 19 nt, Artificial Sequence
  Description of Artificial Sequence: Synthetic oligonucleotide
cgcgccaguucgccgugca

SEQ ID NO: 745615 - RNA, 19 nt, Artificial Sequence
  Description of Artificial Sequence: Synthetic oligonucleotide
ggcggccucuccgccccga

SEQ ID NO: 745616 - RNA, 19 nt, Artificial Sequence
  Description of Artificial Sequence: Synthetic oligonucleotide
cggggacgggcugcccagg

SEQ ID NO: 745617 - RNA, 19 nt, Artificial Sequence
  Description of Artificial Sequence: Synthetic oligonucleotide
cgauuggcgugugccagcu

SEQ ID NO: 745618 - RNA, 19 nt, Artificial Sequence
  Description of Artificial Sequence: Synthetic oligonucleotide
ggcgugccgcugggcggug

SEQ ID NO: 745619 - RNA, 19 nt, Artificial Sequence
  Description of Artificial Sequence: Synthetic oligonucleotide
gcuguuccacacgccgauu

SEQ ID NO: 745620 - RNA, 19 nt, Artificial Sequence
  Description of Artificial Sequence: Synthetic oligonucleotide
cacucgcccugagccuccu

SEQ ID NO: 745621 - RNA, 19 nt, Artificial Sequence
  Description of Artificial Sequence: Synthetic oligonucleotide
ccuaugcagauggggucuu

SEQ ID NO: 745622 - RNA, 19 nt, Artificial Sequence
  Description of Artificial Sequence: Synthetic oligonucleotide
gcggcucgcgcgcgugccu

SEQ ID NO: 745623 - RNA, 19 nt, Artificial Sequence
  Description of Artificial Sequence: Synthetic oligonucleotide
cggcucgcgcgcgugccuc

SEQ ID NO: 745624 - RNA, 19 nt, Artificial Sequence
  Description of Artificial Sequence: Synthetic oligonucleotide
cgagucggccgggcccaug

SEQ ID NO: 745625 - RNA, 19 nt, Artificial Sequence
  Description of Artificial Sequence: Synthetic oligonucleotide
cgcgcgcgugccuccucca

SEQ ID NO: 745626 - RNA, 19 nt, Artificial Sequence
  Description of Artificial Sequence: Synthetic oligonucleotide
gcucgcgcgcgugccuccu

SEQ ID NO: 745627 - RNA, 19 nt, Artificial Sequence
  Description of Artificial Sequence: Synthetic oligonucleotide
cgccccgaugucgcgcaca

SEQ ID NO: 745628 - RNA, 19 nt, Artificial Sequence
  Description of Artificial Sequence: Synthetic oligonucleotide
cgguugcgcucagcgcgca

SEQ ID NO: 745629 - RNA, 19 nt, Artificial Sequence
  Description of Artificial Sequence: Synthetic oligonucleotide
cgccucgcacucgcccuga

SEQ ID NO: 745630 - RNA, 19 nt, Artificial Sequence
  Description of Artificial Sequence: Synthetic oligonucleotide
gcgugccgcugggcggugu

SEQ ID NO: 745631 - RNA, 19 nt, Artificial Sequence
  Description of Artificial Sequence: Synthetic oligonucleotide
cggcgugccgcugggcggu

SEQ ID NO: 745632 - RNA, 19 nt, Artificial Sequence
  Description of Artificial Sequence: Synthetic oligonucleotide
ccgggccgucguguguccu

SEQ ID NO: 745633 - RNA, 19 nt, Artificial Sequence
  Description of Artificial Sequence: Synthetic oligonucleotide
cggcgcgcgccagccaacu

SEQ ID NO: 745634 - RNA, 19 nt, Artificial Sequence
  Description of Artificial Sequence: Synthetic oligonucleotide
aauagaguagauugaaauc

SEQ ID NO: 745635 - RNA, 19 nt, Artificial Sequence
  Description of Artificial Sequence: Synthetic oligonucleotide
uguucauugcccuugacgg

SEQ ID NO: 745636 - RNA, 19 nt, Artificial Sequence
  Description of Artificial Sequence: Synthetic oligonucleotide
aagccaauagaguagauug

SEQ ID NO: 745637 - RNA, 19 nt, Artificial Sequence
  Description of Artificial Sequence: Synthetic oligonucleotide
uaaucuaccaacccgaugu

SEQ ID NO: 745638 - RNA, 19 nt, Artificial Sequence
  Description of Artificial Sequence: Synthetic oligonucleotide
uucccuauuacucucauug

SEQ ID NO: 745639 - RNA, 19 nt, Artificial Sequence
  Description of Artificial Sequence: Synthetic oligonucleotide
auaucgucgauguaggugg

SEQ ID NO: 745640 - RNA, 19 nt, Artificial Sequence
  Description of Artificial Sequence: Synthetic oligonucleotide
uauaccaguucucaaauug

SEQ ID NO: 745641 - RNA, 19 nt, Artificial Sequence
  Description of Artificial Sequence: Synthetic oligonucleotide
uuuccgagaagucagcgcg

SEQ ID NO: 745642 - RNA, 19 nt, Artificial Sequence
  Description of Artificial Sequence: Synthetic oligonucleotide
aacacugcguccuuggcac

SEQ ID NO: 745643 - RNA, 19 nt, Artificial Sequence
  Description of Artificial Sequence: Synthetic oligonucleotide
aguaauaucgucgauguag

SEQ ID NO: 745644 - RNA, 19 nt, Artificial Sequence
  Description of Artificial Sequence: Synthetic oligonucleotide
aaaguaacccuugggauac

SEQ ID NO: 745645 - RNA, 19 nt, Artificial Sequence
  Description of Artificial Sequence: Synthetic oligonucleotide
uuccguaucuaucacagag

SEQ ID NO: 745646 - RNA, 19 nt, Artificial Sequence
  Description of Artificial Sequence: Synthetic oligonucleotide
ucucucgcaaaauaaaugc

SEQ ID NO: 745647 - RNA, 19 nt, Artificial Sequence
  Description of Artificial Sequence: Synthetic oligonucleotide
guaucuaucacagagcugc

SEQ ID NO: 745648 - RNA, 19 nt, Artificial Sequence
  Description of Artificial Sequence: Synthetic oligonucleotide
caaaagacgaacuucuagc

SEQ ID NO: 745649 - RNA, 19 nt, Artificial Sequence
  Description of Artificial Sequence: Synthetic oligonucleotide
aauaaaguuccgaagccgg

SEQ ID NO: 745650 - RNA, 19 nt, Artificial Sequence
  Description of Artificial Sequence: Synthetic oligonucleotide
aaaguuccgaagccgggcc

SEQ ID NO: 745651 - RNA, 19 nt, Artificial Sequence
  Description of Artificial Sequence: Synthetic oligonucleotide
aaauagaaagguuucccgu

SEQ ID NO: 745652 - RNA, 19 nt, Artificial Sequence
  Description of Artificial Sequence: Synthetic oligonucleotide
ucggauaucugaauccucg

SEQ ID NO: 745653 - RNA, 19 nt, Artificial Sequence
  Description of Artificial Sequence: Synthetic oligonucleotide
aaaagacgaacuucuagcu

SEQ ID NO: 745654 - RNA, 19 nt, Artificial Sequence
  Description of Artificial Sequence: Synthetic oligonucleotide
ucuugugagucuuauacca

SEQ ID NO: 745655 - RNA, 19 nt, Artificial Sequence
  Description of Artificial Sequence: Synthetic oligonucleotide
aauuccguaucuaucacag

SEQ ID NO: 745656 - RNA, 19 nt, Artificial Sequence
  Description of Artificial Sequence: Synthetic oligonucleotide
uaguucuagcuuuagaaug

SEQ ID NO: 745657 - RNA, 19 nt, Artificial Sequence
  Description of Artificial Sequence: Synthetic oligonucleotide
uucgaaucccaacagggag

SEQ ID NO: 745658 - RNA, 19 nt, Artificial Sequence
  Description of Artificial Sequence: Synthetic oligonucleotide
ucucgcaaaauaaaugcca

SEQ ID NO: 745659 - RNA, 19 nt, Artificial Sequence
  Description of Artificial Sequence: Synthetic oligonucleotide
aguggucacaguaauaucg

SEQ ID NO: 745660 - RNA, 19 nt, Artificial Sequence
  Description of Artificial Sequence: Synthetic oligonucleotide
ugagucuuauaccaguucu

SEQ ID NO: 745661 - RNA, 19 nt, Artificial Sequence
  Description of Artificial Sequence: Synthetic oligonucleotide
acgccauggaaauagaaag

SEQ ID NO: 745662 - RNA, 19 nt, Artificial Sequence
  Description of Artificial Sequence: Synthetic oligonucleotide
uggauggucaugcaucagg

SEQ ID NO: 745663 - RNA, 19 nt, Artificial Sequence
  Description of Artificial Sequence: Synthetic oligonucleotide
aauaucgucgauguaggug

SEQ ID NO: 745664 - RNA, 19 nt, Artificial Sequence
  Description of Artificial Sequence: Synthetic oligonucleotide
aguagauugaaauccuuca

SEQ ID NO: 745665 - RNA, 19 nt, Artificial Sequence
  Description of Artificial Sequence: Synthetic oligonucleotide
agcgucuugaaguaauaac

SEQ ID NO: 745666 - RNA, 19 nt, Artificial Sequence
  Description of Artificial Sequence: Synthetic oligonucleotide
aaccgagugauaguucucc

SEQ ID NO: 745667 - RNA, 19 nt, Artificial Sequence
  Description of Artificial Sequence: Synthetic oligonucleotide
aagguuucccguuuaugag

SEQ ID NO: 745668 - RNA, 19 nt, Artificial Sequence
  Description of Artificial Sequence: Synthetic oligonucleotide
acaguaauaucgucgaugu

SEQ ID NO: 745669 - RNA, 19 nt, Artificial Sequence
  Description of Artificial Sequence: Synthetic oligonucleotide
uagcuuuagaaugugaaug

SEQ ID NO: 745670 - RNA, 19 nt, Artificial Sequence
  Description of Artificial Sequence: Synthetic oligonucleotide
ucugaucgaaaaccgagug

SEQ ID NO: 745671 - RNA, 19 nt, Artificial Sequence
  Description of Artificial Sequence: Synthetic oligonucleotide
auugcuucccgcucauacc

SEQ ID NO: 745672 - RNA, 19 nt, Artificial Sequence
  Description of Artificial Sequence: Synthetic oligonucleotide
aauugcuucugcuccauau

SEQ ID NO: 745673 - RNA, 19 nt, Artificial Sequence
  Description of Artificial Sequence: Synthetic oligonucleotide
ucuaucacagagcugcagu

SEQ ID NO: 745674 - RNA, 19 nt, Artificial Sequence
  Description of Artificial Sequence: Synthetic oligonucleotide
ucgaaucccaacagggagg

SEQ ID NO: 745675 - RNA, 19 nt, Artificial Sequence
  Description of Artificial Sequence: Synthetic oligonucleotide
aucgaaaaccgagugauag

SEQ ID NO: 745676 - RNA, 19 nt, Artificial Sequence
  Description of Artificial Sequence: Synthetic oligonucleotide
uacgaaaggaguuggcacc

SEQ ID NO: 745677 - RNA, 19 nt, Artificial Sequence
  Description of Artificial Sequence: Synthetic oligonucleotide
uugaaguaauaaccggcag

SEQ ID NO: 745678 - RNA, 19 nt, Artificial Sequence
  Description of Artificial Sequence: Synthetic oligonucleotide
ucguuucugaucgaaaacc

SEQ ID NO: 745679 - RNA, 19 nt, Artificial Sequence
  Description of Artificial Sequence: Synthetic oligonucleotide
uccaguaucucucucgcaa

SEQ ID NO: 745680 - RNA, 19 nt, Artificial Sequence
  Description of Artificial Sequence: Synthetic oligonucleotide
guaauaucgucgauguagg

SEQ ID NO: 745681 - RNA, 19 nt, Artificial Sequence
  Description of Artificial Sequence: Synthetic oligonucleotide
uguucgaauccuugcagcc

SEQ ID NO: 745682 - RNA, 19 nt, Artificial Sequence
  Description of Artificial Sequence: Synthetic oligonucleotide
guugacgccauggaaauag

SEQ ID NO: 745683 - RNA, 19 nt, Artificial Sequence
  Description of Artificial Sequence: Synthetic oligonucleotide
gauugcuucccgcucauac

SEQ ID NO: 745684 - RNA, 19 nt, Artificial Sequence
  Description of Artificial Sequence: Synthetic oligonucleotide
agguuucccguuuaugagg

SEQ ID NO: 745685 - RNA, 19 nt, Artificial Sequence
  Description of Artificial Sequence: Synthetic oligonucleotide
ugaucgaaaaccgagugau

SEQ ID NO: 745686 - RNA, 19 nt, Artificial Sequence
  Description of Artificial Sequence: Synthetic oligonucleotide
acaauuccguaucuaucac

SEQ ID NO: 745687 - RNA, 19 nt, Artificial Sequence
  Description of Artificial Sequence: Synthetic oligonucleotide
aguacagguaggcuggaug

SEQ ID NO: 745688 - RNA, 19 nt, Artificial Sequence
  Description of Artificial Sequence: Synthetic oligonucleotide
aaucuaccaacccgauguc

SEQ ID NO: 745689 - RNA, 19 nt, Artificial Sequence
  Description of Artificial Sequence: Synthetic oligonucleotide
gaggguauagaagucagac

SEQ ID NO: 745690 - RNA, 19 nt, Artificial Sequence
  Description of Artificial Sequence: Synthetic oligonucleotide
agacucguugccaagacuc

SEQ ID NO: 745691 - RNA, 19 nt, Artificial Sequence
  Description of Artificial Sequence: Synthetic oligonucleotide
uuagaaugugaauggucug

SEQ ID NO: 745692 - RNA, 19 nt, Artificial Sequence
  Description of Artificial Sequence: Synthetic oligonucleotide
caauaaaguuccgaagccg

SEQ ID NO: 745693 - RNA, 19 nt, Artificial Sequence
  Description of Artificial Sequence: Synthetic oligonucleotide
aaacccugcaauugcuucu

SEQ ID NO: 745694 - RNA, 19 nt, Artificial Sequence
  Description of Artificial Sequence: Synthetic oligonucleotide
uucuugugagucuuauacc

SEQ ID NO: 745695 - RNA, 19 nt, Artificial Sequence
  Description of Artificial Sequence: Synthetic oligonucleotide
ucauaccacacccagccaa

SEQ ID NO: 745696 - RNA, 19 nt, Artificial Sequence
  Description of Artificial Sequence: Synthetic oligonucleotide
ugauaccaggagaaguagc

SEQ ID NO: 745697 - RNA, 19 nt, Artificial Sequence
  Description of Artificial Sequence: Synthetic oligonucleotide
cauugaagcuggaagggac

SEQ ID NO: 745698 - RNA, 19 nt, Artificial Sequence
  Description of Artificial Sequence: Synthetic oligonucleotide
ucauuggcaauccuccagu

SEQ ID NO: 745699 - RNA, 19 nt, Artificial Sequence
  Description of Artificial Sequence: Synthetic oligonucleotide
uguagaugauggacccugg

SEQ ID NO: 745700 - RNA, 19 nt, Artificial Sequence
  Description of Artificial Sequence: Synthetic oligonucleotide
cucgcaaaauaaaugccac

SEQ ID NO: 745701 - RNA, 19 nt, Artificial Sequence
  Description of Artificial Sequence: Synthetic oligonucleotide
ugcagucccgcauaguuga

SEQ ID NO: 745702 - RNA, 19 nt, Artificial Sequence
  Description of Artificial Sequence: Synthetic oligonucleotide
uuuuccgagaagucagcgc

SEQ ID NO: 745703 - RNA, 19 nt, Artificial Sequence
  Description of Artificial Sequence: Synthetic oligonucleotide
uccguaucuaucacagagc

SEQ ID NO: 745704 - RNA, 19 nt, Artificial Sequence
  Description of Artificial Sequence: Synthetic oligonucleotide
cuugaaguaauaaccggca

SEQ ID NO: 745705 - RNA, 19 nt, Artificial Sequence
  Description of Artificial Sequence: Synthetic oligonucleotide
cauucacccacacaacagc

SEQ ID NO: 745706 - RNA, 19 nt, Artificial Sequence
  Description of Artificial Sequence: Synthetic oligonucleotide
uugcuucccgcucauacca

SEQ ID NO: 745707 - RNA, 19 nt, Artificial Sequence
  Description of Artificial Sequence: Synthetic oligonucleotide
aagucagcgcggaagcgcc

SEQ ID NO: 745708 - RNA, 19 nt, Artificial Sequence
  Description of Artificial Sequence: Synthetic oligonucleotide
cucucucgcaaaauaaaug

SEQ ID NO: 745709 - RNA, 19 nt, Artificial Sequence
  Description of Artificial Sequence: Synthetic oligonucleotide
cucucgcaaaauaaaugcc

SEQ ID NO: 745710 - RNA, 19 nt, Artificial Sequence
  Description of Artificial Sequence: Synthetic oligonucleotide
uauucgcucuggauaacug

SEQ ID NO: 745711 - RNA, 19 nt, Artificial Sequence
  Description of Artificial Sequence: Synthetic oligonucleotide
uucgugcuccaccacauga

SEQ ID NO: 745712 - RNA, 19 nt, Artificial Sequence
  Description of Artificial Sequence: Synthetic oligonucleotide
ucucucucgcaaaauaaau

SEQ ID NO: 745713 - RNA, 19 nt, Artificial Sequence
  Description of Artificial Sequence: Synthetic oligonucleotide
cucauuggugucugguugg

SEQ ID NO: 745714 - RNA, 19 nt, Artificial Sequence
  Description of Artificial Sequence: Synthetic oligonucleotide
agcgccagggcgcaacugc

SEQ ID NO: 745715 - RNA, 19 nt, Artificial Sequence
  Description of Artificial Sequence: Synthetic oligonucleotide
uucugaucgaaaaccgagu

SEQ ID NO: 745716 - RNA, 19 nt, Artificial Sequence
  Description of Artificial Sequence: Synthetic oligonucleotide
gaauccucgugcuuguuga

SEQ ID NO: 745717 - RNA, 19 nt, Artificial Sequence
  Description of Artificial Sequence: Synthetic oligonucleotide
ugcuguucgaauccuugca

SEQ ID NO: 745718 - RNA, 19 nt, Artificial Sequence
  Description of Artificial Sequence: Synthetic oligonucleotide
ucuagguggugccgaagag

SEQ ID NO: 745719 - RNA, 19 nt, Artificial Sequence
  Description of Artificial Sequence: Synthetic oligonucleotide
uuauguccuggacaaagua

SEQ ID NO: 745720 - RNA, 19 nt, Artificial Sequence
  Description of Artificial Sequence: Synthetic oligonucleotide
caacccgaugucuuguucc

SEQ ID NO: 745721 - RNA, 19 nt, Artificial Sequence
  Description of Artificial Sequence: Synthetic oligonucleotide
guacgaaaggaguuggcac

SEQ ID NO: 745722 - RNA, 19 nt, Artificial Sequence
  Description of Artificial Sequence: Synthetic oligonucleotide
auaccaguucucaaauugg

SEQ ID NO: 745723 - RNA, 19 nt, Artificial Sequence
  Description of Artificial Sequence: Synthetic oligonucleotide
ucggaguagggguaguggc

SEQ ID NO: 745724 - RNA, 19 nt, Artificial Sequence
  Description of Artificial Sequence: Synthetic oligonucleotide
accggcagguuucagagca

SEQ ID NO: 745725 - RNA, 19 nt, Artificial Sequence
  Description of Artificial Sequence: Synthetic oligonucleotide
uuuucguuucugaucgaaa

SEQ ID NO: 745726 - RNA, 19 nt, Artificial Sequence
  Description of Artificial Sequence: Synthetic oligonucleotide
uaaaguuccgaagccgggc

SEQ ID NO: 745727 - RNA, 19 nt, Artificial Sequence
  Description of Artificial Sequence: Synthetic oligonucleotide
uccucgugcuuguugacgc

SEQ ID NO: 745728 - RNA, 19 nt, Artificial Sequence
  Description of Artificial Sequence: Synthetic oligonucleotide
ucuaccaacccgaugucuu

SEQ ID NO: 745729 - RNA, 19 nt, Artificial Sequence
  Description of Artificial Sequence: Synthetic oligonucleotide
cacccagccaauaaaguuc

SEQ ID NO: 745730 - RNA, 19 nt, Artificial Sequence
  Description of Artificial Sequence: Synthetic oligonucleotide
auaaccggcagguuucaga

SEQ ID NO: 745731 - RNA, 19 nt, Artificial Sequence
  Description of Artificial Sequence: Synthetic oligonucleotide
cuguucgaauccuugcagc

SEQ ID NO: 745732 - RNA, 19 nt, Artificial Sequence
  Description of Artificial Sequence: Synthetic oligonucleotide
uaggauugcuucccgcuca

SEQ ID NO: 745733 - RNA, 19 nt, Artificial Sequence
  Description of Artificial Sequence: Synthetic oligonucleotide
gaaguaauaaccggcaggu

SEQ ID NO: 745734 - RNA, 19 nt, Artificial Sequence
  Description of Artificial Sequence: Synthetic oligonucleotide
ucccgcucauaccacaccc

SEQ ID NO: 745735 - RNA, 19 nt, Artificial Sequence
  Description of Artificial Sequence: Synthetic oligonucleotide
auuacucucauuggugucu

SEQ ID NO: 745736 - RNA, 19 nt, Artificial Sequence
  Description of Artificial Sequence: Synthetic oligonucleotide
ucguugccaagacucuggg

SEQ ID NO: 745737 - RNA, 19 nt, Artificial Sequence
  Description of Artificial Sequence: Synthetic oligonucleotide
ccguuuaugaggaacuugc

SEQ ID NO: 745738 - RNA, 19 nt, Artificial Sequence
  Description of Artificial Sequence: Synthetic oligonucleotide
agucuuauaccaguucuca

SEQ ID NO: 745739 - RNA, 19 nt, Artificial Sequence
  Description of Artificial Sequence: Synthetic oligonucleotide
ugucugguuucauuggcaa

SEQ ID NO: 745740 - RNA, 19 nt, Artificial Sequence
  Description of Artificial Sequence: Synthetic oligonucleotide
uaguggcugguacgaaagg

SEQ ID NO: 745741 - RNA, 19 nt, Artificial Sequence
  Description of Artificial Sequence: Synthetic oligonucleotide
aguucuagcuuuagaaugu

SEQ ID NO: 745742 - RNA, 19 nt, Artificial Sequence
  Description of Artificial Sequence: Synthetic oligonucleotide
agugagguaguucuagcuu

SEQ ID NO: 745743 - RNA, 19 nt, Artificial Sequence
  Description of Artificial Sequence: Synthetic oligonucleotide
ucgcaaaauaaaugccaca

SEQ ID NO: 745744 - RNA, 19 nt, Artificial Sequence
  Description of Artificial Sequence: Synthetic oligonucleotide
agucccgcauaguugaaga

SEQ ID NO: 745745 - RNA, 19 nt, Artificial Sequence
  Description of Artificial Sequence: Synthetic oligonucleotide
caggagagcuuucugguac

SEQ ID NO: 745746 - RNA, 19 nt, Artificial Sequence
  Description of Artificial Sequence: Synthetic oligonucleotide
uuguugacgccauggaaau

SEQ ID NO: 745747 - RNA, 19 nt, Artificial Sequence
  Description of Artificial Sequence: Synthetic oligonucleotide
uuucccguuuaugaggaac

SEQ ID NO: 745748 - RNA, 19 nt, Artificial Sequence
  Description of Artificial Sequence: Synthetic oligonucleotide
aucagguaaggccaccaga

SEQ ID NO: 745749 - RNA, 19 nt, Artificial Sequence
  Description of Artificial Sequence: Synthetic oligonucleotide
ugccgaagagacucguugc

SEQ ID NO: 745750 - RNA, 19 nt, Artificial Sequence
  Description of Artificial Sequence: Synthetic oligonucleotide
uuucauuggcaauccucca

SEQ ID NO: 745751 - RNA, 19 nt, Artificial Sequence
  Description of Artificial Sequence: Synthetic oligonucleotide
caguaaucuaccaacccga

SEQ ID NO: 745752 - RNA, 19 nt, Artificial Sequence
  Description of Artificial Sequence: Synthetic oligonucleotide
aacccgaugucuuguucca

SEQ ID NO: 745753 - RNA, 19 nt, Artificial Sequence
  Description of Artificial Sequence: Synthetic oligonucleotide
gcgucuugaaguaauaacc

SEQ ID NO: 745754 - RNA, 19 nt, Artificial Sequence
  Description of Artificial Sequence: Synthetic oligonucleotide
uauuacucucauugguguc

SEQ ID NO: 745755 - RNA, 19 nt, Artificial Sequence
  Description of Artificial Sequence: Synthetic oligonucleotide
guaauaaccggcagguuuc

SEQ ID NO: 745756 - RNA, 19 nt, Artificial Sequence
  Description of Artificial Sequence: Synthetic oligonucleotide
uggcacccgaagcugaccc

SEQ ID NO: 745757 - RNA, 19 nt, Artificial Sequence
  Description of Artificial Sequence: Synthetic oligonucleotide
ucgugaaacccugcaauug

SEQ ID NO: 745758 - RNA, 19 nt, Artificial Sequence
  Description of Artificial Sequence: Synthetic oligonucleotide
aucgcugugguaggauugc

SEQ ID NO: 745759 - RNA, 19 nt, Artificial Sequence
  Description of Artificial Sequence: Synthetic oligonucleotide
uuccgagaagucagcgcgg

SEQ ID NO: 745760 - RNA, 19 nt, Artificial Sequence
  Description of Artificial Sequence: Synthetic oligonucleotide
auaaaguuccgaagccggg

SEQ ID NO: 745761 - RNA, 19 nt, Artificial Sequence
  Description of Artificial Sequence: Synthetic oligonucleotide
caugucuuggguccaucgc

SEQ ID NO: 745762 - RNA, 19 nt, Artificial Sequence
  Description of Artificial Sequence: Synthetic oligonucleotide
ucgaaaaccgagugauagu

SEQ ID NO: 745763 - RNA, 19 nt, Artificial Sequence
  Description of Artificial Sequence: Synthetic oligonucleotide
accguucgaaucccaacag

SEQ ID NO: 745764 - RNA, 19 nt, Artificial Sequence
  Description of Artificial Sequence: Synthetic oligonucleotide
uucccaaacacugcguccu

SEQ ID NO: 745765 - RNA, 19 nt, Artificial Sequence
  Description of Artificial Sequence: Synthetic oligonucleotide
agcgccacccagcacgcac

SEQ ID NO: 745766 - RNA, 19 nt, Artificial Sequence
  Description of Artificial Sequence: Synthetic oligonucleotide
guaguggcugguacgaaag

SEQ ID NO: 745767 - RNA, 19 nt, Artificial Sequence
  Description of Artificial Sequence: Synthetic oligonucleotide
acaucacaaccgcagggug

SEQ ID NO: 745768 - RNA, 19 nt, Artificial Sequence
  Description of Artificial Sequence: Synthetic oligonucleotide
gugccgaagagacucguug

SEQ ID NO: 745769 - RNA, 19 nt, Artificial Sequence
  Description of Artificial Sequence: Synthetic oligonucleotide
guaaucuaccaacccgaug

SEQ ID NO: 745770 - RNA, 19 nt, Artificial Sequence
  Description of Artificial Sequence: Synthetic oligonucleotide
auagaaagguuucccguuu

SEQ ID NO: 745771 - RNA, 19 nt, Artificial Sequence
  Description of Artificial Sequence: Synthetic oligonucleotide
augauaccaggagaaguag

SEQ ID NO: 745772 - RNA, 19 nt, Artificial Sequence
  Description of Artificial Sequence: Synthetic oligonucleotide
ugaauggucugguucccaa

SEQ ID NO: 745773 - RNA, 19 nt, Artificial Sequence
  Description of Artificial Sequence: Synthetic oligonucleotide
acgaacuucuagcuggaaa

SEQ ID NO: 745774 - RNA, 19 nt, Artificial Sequence
  Description of Artificial Sequence: Synthetic oligonucleotide
guucccaaacacugcgucc

SEQ ID NO: 745775 - RNA, 19 nt, Artificial Sequence
  Description of Artificial Sequence: Synthetic oligonucleotide
uauuugguguuggucacaa

SEQ ID NO: 745776 - RNA, 19 nt, Artificial Sequence
  Description of Artificial Sequence: Synthetic oligonucleotide
acgcacuccgcuuugggga

SEQ ID NO: 745777 - RNA, 19 nt, Artificial Sequence
  Description of Artificial Sequence: Synthetic oligonucleotide
agcauaguaaugggcacug

SEQ ID NO: 745778 - RNA, 19 nt, Artificial Sequence
  Description of Artificial Sequence: Synthetic oligonucleotide
guucgaauccuugcagccg

SEQ ID NO: 745779 - RNA, 19 nt, Artificial Sequence
  Description of Artificial Sequence: Synthetic oligonucleotide
ccaaaagacgaacuucuag

SEQ ID NO: 745780 - RNA, 19 nt, Artificial Sequence
  Description of Artificial Sequence: Synthetic oligonucleotide
cguucgaaucccaacaggg

SEQ ID NO: 745781 - RNA, 19 nt, Artificial Sequence
  Description of Artificial Sequence: Synthetic oligonucleotide
guaaugggcacuguugauc

SEQ ID NO: 745782 - RNA, 19 nt, Artificial Sequence
  Description of Artificial Sequence: Synthetic oligonucleotide
ucccucggauaucugaauc

SEQ ID NO: 745783 - RNA, 19 nt, Artificial Sequence
  Description of Artificial Sequence: Synthetic oligonucleotide
gguuucagagcagaagaag

SEQ ID NO: 745784 - RNA, 19 nt, Artificial Sequence
  Description of Artificial Sequence: Synthetic oligonucleotide
caaaguaacccuugggaua

SEQ ID NO: 745785 - RNA, 19 nt, Artificial Sequence
  Description of Artificial Sequence: Synthetic oligonucleotide
caucgcugugguaggauug

SEQ ID NO: 745786 - RNA, 19 nt, Artificial Sequence
  Description of Artificial Sequence: Synthetic oligonucleotide
uagggguaguggcugguac

SEQ ID NO: 745787 - RNA, 19 nt, Artificial Sequence
  Description of Artificial Sequence: Synthetic oligonucleotide
cugugguaggauugcuucc

SEQ ID NO: 745788 - RNA, 19 nt, Artificial Sequence
  Description of Artificial Sequence: Synthetic oligonucleotide
uaauaucgucgauguaggu

SEQ ID NO: 745789 - RNA, 19 nt, Artificial Sequence
  Description of Artificial Sequence: Synthetic oligonucleotide
ugguacgaaaggaguuggc

SEQ ID NO: 745790 - RNA, 19 nt, Artificial Sequence
  Description of Artificial Sequence: Synthetic oligonucleotide
cacgcacuccgcuuugggg

SEQ ID NO: 745791 - RNA, 19 nt, Artificial Sequence
  Description of Artificial Sequence: Synthetic oligonucleotide
ggauaucugaauccucgug

SEQ ID NO: 745792 - RNA, 19 nt, Artificial Sequence
  Description of Artificial Sequence: Synthetic oligonucleotide
aauaaccggcagguuucag

SEQ ID NO: 745793 - RNA, 19 nt, Artificial Sequence
  Description of Artificial Sequence: Synthetic oligonucleotide
agccuugaccucccgcgac

SEQ ID NO: 745794 - RNA, 19 nt, Artificial Sequence
  Description of Artificial Sequence: Synthetic oligonucleotide
uccgcuuuggggacaugcu

SEQ ID NO: 745795 - RNA, 19 nt, Artificial Sequence
  Description of Artificial Sequence: Synthetic oligonucleotide
gacgccauggaaauagaaa

SEQ ID NO: 745796 - RNA, 19 nt, Artificial Sequence
  Description of Artificial Sequence: Synthetic oligonucleotide
ugguaggauugcuucccgc

SEQ ID NO: 745797 - RNA, 19 nt, Artificial Sequence
  Description of Artificial Sequence: Synthetic oligonucleotide
cccauagucaugauaccag

SEQ ID NO: 745798 - RNA, 19 nt, Artificial Sequence
  Description of Artificial Sequence: Synthetic oligonucleotide
guaucucucucgcaaaaua

SEQ ID NO: 745799 - RNA, 19 nt, Artificial Sequence
  Description of Artificial Sequence: Synthetic oligonucleotide
auauucgcucuggauaacu

SEQ ID NO: 745800 - RNA, 19 nt, Artificial Sequence
  Description of Artificial Sequence: Synthetic oligonucleotide
cagguaaggccaccagagg

SEQ ID NO: 745801 - RNA, 19 nt, Artificial Sequence
  Description of Artificial Sequence: Synthetic oligonucleotide
ggaaauccaguaaucuacc

SEQ ID NO: 745802 - RNA, 19 nt, Artificial Sequence
  Description of Artificial Sequence: Synthetic oligonucleotide
cuaccaacccgaugucuug

SEQ ID NO: 745803 - RNA, 19 nt, Artificial Sequence
  Description of Artificial Sequence: Synthetic oligonucleotide
guacuccucacugaacaug

SEQ ID NO: 745804 - RNA, 19 nt, Artificial Sequence
  Description of Artificial Sequence: Synthetic oligonucleotide
ucgugcuccaccacaugaa

SEQ ID NO: 745805 - RNA, 19 nt, Artificial Sequence
  Description of Artificial Sequence: Synthetic oligonucleotide
ucgccuccaaggaguacag

SEQ ID NO: 745806 - RNA, 19 nt, Artificial Sequence
  Description of Artificial Sequence: Synthetic oligonucleotide
caauuccguaucuaucaca

SEQ ID NO: 745807 - RNA, 19 nt, Artificial Sequence
  Description of Artificial Sequence: Synthetic oligonucleotide
caguggccagucaaagccc

SEQ ID NO: 745808 - RNA, 19 nt, Artificial Sequence
  Description of Artificial Sequence: Synthetic oligonucleotide
caucagguaaggccaccag

SEQ ID NO: 745809 - RNA, 19 nt, Artificial Sequence
  Description of Artificial Sequence: Synthetic oligonucleotide
ugcccauagucaugauacc

SEQ ID NO: 745810 - RNA, 19 nt, Artificial Sequence
  Description of Artificial Sequence: Synthetic oligonucleotide
uugacgccauggaaauaga

SEQ ID NO: 745811 - RNA, 19 nt, Artificial Sequence
  Description of Artificial Sequence: Synthetic oligonucleotide
ggugaucagcgucuugaag

SEQ ID NO: 745812 - RNA, 19 nt, Artificial Sequence
  Description of Artificial Sequence: Synthetic oligonucleotide
uaguggucacaguaauauc

SEQ ID NO: 745813 - RNA, 19 nt, Artificial Sequence
  Description of Artificial Sequence: Synthetic oligonucleotide
aucuaucacagagcugcag

SEQ ID NO: 745814 - RNA, 19 nt, Artificial Sequence
  Description of Artificial Sequence: Synthetic oligonucleotide
gagagcuuucugguacucc

SEQ ID NO: 745815 - RNA, 19 nt, Artificial Sequence
  Description of Artificial Sequence: Synthetic oligonucleotide
gucgguaccacugcuguuc

SEQ ID NO: 745816 - RNA, 19 nt, Artificial Sequence
  Description of Artificial Sequence: Synthetic oligonucleotide
cuugacggaaauccaguaa

SEQ ID NO: 745817 - RNA, 19 nt, Artificial Sequence
  Description of Artificial Sequence: Synthetic oligonucleotide
guaggauugcuucccgcuc

SEQ ID NO: 745818 - RNA, 19 nt, Artificial Sequence
  Description of Artificial Sequence: Synthetic oligonucleotide
gaaucccauucacccacac

SEQ ID NO: 745819 - RNA, 19 nt, Artificial Sequence
  Description of Artificial Sequence: Synthetic oligonucleotide
ggcauguccaaaguugggc

SEQ ID NO: 745820 - RNA, 19 nt, Artificial Sequence
  Description of Artificial Sequence: Synthetic oligonucleotide
acucucauuggugucuggu

SEQ ID NO: 745821 - RNA, 19 nt, Artificial Sequence
  Description of Artificial Sequence: Synthetic oligonucleotide
agggaggguauagaaguca

SEQ ID NO: 745822 - RNA, 19 nt, Artificial Sequence
  Description of Artificial Sequence: Synthetic oligonucleotide
agccgguuuuccgagaagu

SEQ ID NO: 745823 - RNA, 19 nt, Artificial Sequence
  Description of Artificial Sequence: Synthetic oligonucleotide
caccguucgaaucccaaca

SEQ ID NO: 745824 - RNA, 19 nt, Artificial Sequence
  Description of Artificial Sequence: Synthetic oligonucleotide
cuucccgcucauaccacac

SEQ ID NO: 745825 - RNA, 19 nt, Artificial Sequence
  Description of Artificial Sequence: Synthetic oligonucleotide
cagggcacucaucaaugac

SEQ ID NO: 745826 - RNA, 19 nt, Artificial Sequence
  Description of Artificial Sequence: Synthetic oligonucleotide
ccauucacccacacaacag

SEQ ID NO: 745827 - RNA, 19 nt, Artificial Sequence
  Description of Artificial Sequence: Synthetic oligonucleotide
gguaucagccuuguagaug

SEQ ID NO: 745828 - RNA, 19 nt, Artificial Sequence
  Description of Artificial Sequence: Synthetic oligonucleotide
cauccucgccuccaaggag

SEQ ID NO: 745829 - RNA, 19 nt, Artificial Sequence
  Description of Artificial Sequence: Synthetic oligonucleotide
caucacaaccgcaggguga

SEQ ID NO: 745830 - RNA, 19 nt, Artificial Sequence
  Description of Artificial Sequence: Synthetic oligonucleotide
aggguaugaggggucagug

SEQ ID NO: 745831 - RNA, 19 nt, Artificial Sequence
  Description of Artificial Sequence: Synthetic oligonucleotide
agguaucagccuuguagau

SEQ ID NO: 745832 - RNA, 19 nt, Artificial Sequence
  Description of Artificial Sequence: Synthetic oligonucleotide
cucggauaucugaauccuc

SEQ ID NO: 745833 - RNA, 19 nt, Artificial Sequence
  Description of Artificial Sequence: Synthetic oligonucleotide
auuccguaucuaucacaga

SEQ ID NO: 745834 - RNA, 19 nt, Artificial Sequence
  Description of Artificial Sequence: Synthetic oligonucleotide
cuggcgagugaagaucccc

SEQ ID NO: 745835 - RNA, 19 nt, Artificial Sequence
  Description of Artificial Sequence: Synthetic oligonucleotide
gcaccaagccaauagagua

SEQ ID NO: 745836 - RNA, 19 nt, Artificial Sequence
  Description of Artificial Sequence: Synthetic oligonucleotide
gguacgaaaggaguuggca

SEQ ID NO: 745837 - RNA, 19 nt, Artificial Sequence
  Description of Artificial Sequence: Synthetic oligonucleotide
ugaccucccgcgacgggcu

SEQ ID NO: 745838 - RNA, 19 nt, Artificial Sequence
  Description of Artificial Sequence: Synthetic oligonucleotide
gguucccaaacacugcguc

SEQ ID NO: 745839 - RNA, 19 nt, Artificial Sequence
  Description of Artificial Sequence: Synthetic oligonucleotide
ugggccagacucccucagc

SEQ ID NO: 745840 - RNA, 19 nt, Artificial Sequence
  Description of Artificial Sequence: Synthetic oligonucleotide
aguaucucucucgcaaaau

SEQ ID NO: 745841 - RNA, 19 nt, Artificial Sequence
  Description of Artificial Sequence: Synthetic oligonucleotide
accgagugauaguucucca

SEQ ID NO: 745842 - RNA, 19 nt, Artificial Sequence
  Description of Artificial Sequence: Synthetic oligonucleotide
acgaaaggaguuggcacca

SEQ ID NO: 745843 - RNA, 19 nt, Artificial Sequence
  Description of Artificial Sequence: Synthetic oligonucleotide
cuucccucggauaucugaa

SEQ ID NO: 745844 - RNA, 19 nt, Artificial Sequence
  Description of Artificial Sequence: Synthetic oligonucleotide
uaucgucgauguagguggu

SEQ ID NO: 745845 - RNA, 19 nt, Artificial Sequence
  Description of Artificial Sequence: Synthetic oligonucleotide
guucgaaucccaacaggga

SEQ ID NO: 745846 - RNA, 19 nt, Artificial Sequence
  Description of Artificial Sequence: Synthetic oligonucleotide
uaugaggggucaguguguu

SEQ ID NO: 745847 - RNA, 19 nt, Artificial Sequence
  Description of Artificial Sequence: Synthetic oligonucleotide
agaccgaugcagucccgca

SEQ ID NO: 745848 - RNA, 19 nt, Artificial Sequence
  Description of Artificial Sequence: Synthetic oligonucleotide
cuagcuuuagaaugugaau

SEQ ID NO: 745849 - RNA, 19 nt, Artificial Sequence
  Description of Artificial Sequence: Synthetic oligonucleotide
agccaauagaguagauuga

SEQ ID NO: 745850 - RNA, 19 nt, Artificial Sequence
  Description of Artificial Sequence: Synthetic oligonucleotide
gucuuauaccaguucucaa

SEQ ID NO: 745851 - RNA, 19 nt, Artificial Sequence
  Description of Artificial Sequence: Synthetic oligonucleotide
agcaccacucucauaucca

SEQ ID NO: 745852 - RNA, 19 nt, Artificial Sequence
  Description of Artificial Sequence: Synthetic oligonucleotide
gggaggguauagaagucag

SEQ ID NO: 745853 - RNA, 19 nt, Artificial Sequence
  Description of Artificial Sequence: Synthetic oligonucleotide
cucgccuccaaggaguaca

SEQ ID NO: 745854 - RNA, 19 nt, Artificial Sequence
  Description of Artificial Sequence: Synthetic oligonucleotide
accgaugcagucccgcaua

SEQ ID NO: 745855 - RNA, 19 nt, Artificial Sequence
  Description of Artificial Sequence: Synthetic oligonucleotide
ggaguagggguaguggcug

SEQ ID NO: 745856 - RNA, 19 nt, Artificial Sequence
  Description of Artificial Sequence: Synthetic oligonucleotide
aguaaucuaccaacccgau

SEQ ID NO: 745857 - RNA, 19 nt, Artificial Sequence
  Description of Artificial Sequence: Synthetic oligonucleotide
gccgaagagacucguugcc

SEQ ID NO: 745858 - RNA, 19 nt, Artificial Sequence
  Description of Artificial Sequence: Synthetic oligonucleotide
aaguaauaaccggcagguu

SEQ ID NO: 745859 - RNA, 19 nt, Artificial Sequence
  Description of Artificial Sequence: Synthetic oligonucleotide
augcagucccgcauaguug

SEQ ID NO: 745860 - RNA, 19 nt, Artificial Sequence
  Description of Artificial Sequence: Synthetic oligonucleotide
cgguuuuccgagaagucag

SEQ ID NO: 745861 - RNA, 19 nt, Artificial Sequence
  Description of Artificial Sequence: Synthetic oligonucleotide
ccauauucgcucuggauaa

SEQ ID NO: 745862 - RNA, 19 nt, Artificial Sequence
  Description of Artificial Sequence: Synthetic oligonucleotide
cagaccgaugcagucccgc

SEQ ID NO: 745863 - RNA, 19 nt, Artificial Sequence
  Description of Artificial Sequence: Synthetic oligonucleotide
guaccucuucggaguaggg

SEQ ID NO: 745864 - RNA, 19 nt, Artificial Sequence
  Description of Artificial Sequence: Synthetic oligonucleotide
ccugcguaccaguuccucc

SEQ ID NO: 745865 - RNA, 19 nt, Artificial Sequence
  Description of Artificial Sequence: Synthetic oligonucleotide
aggcuggauggucaugcau

SEQ ID NO: 745866 - RNA, 19 nt, Artificial Sequence
  Description of Artificial Sequence: Synthetic oligonucleotide
gguuucccguuuaugagga

SEQ ID NO: 745867 - RNA, 19 nt, Artificial Sequence
  Description of Artificial Sequence: Synthetic oligonucleotide
gguaguggcugguacgaaa

SEQ ID NO: 745868 - RNA, 19 nt, Artificial Sequence
  Description of Artificial Sequence: Synthetic oligonucleotide
ccgagugauaguucuccag

SEQ ID NO: 745869 - RNA, 19 nt, Artificial Sequence
  Description of Artificial Sequence: Synthetic oligonucleotide
ucgaauccuugcagccggu

SEQ ID NO: 745870 - RNA, 19 nt, Artificial Sequence
  Description of Artificial Sequence: Synthetic oligonucleotide
acaaccgcagggugauuuu

SEQ ID NO: 745871 - RNA, 19 nt, Artificial Sequence
  Description of Artificial Sequence: Synthetic oligonucleotide
agguuucagagcagaagaa

SEQ ID NO: 745872 - RNA, 19 nt, Artificial Sequence
  Description of Artificial Sequence: Synthetic oligonucleotide
cauauucgcucuggauaac

SEQ ID NO: 745873 - RNA, 19 nt, Artificial Sequence
  Description of Artificial Sequence: Synthetic oligonucleotide
cuucgugcuccaccacaug

SEQ ID NO: 745874 - RNA, 19 nt, Artificial Sequence
  Description of Artificial Sequence: Synthetic oligonucleotide
ggauccucgugaaacccug

SEQ ID NO: 745875 - RNA, 19 nt, Artificial Sequence
  Description of Artificial Sequence: Synthetic oligonucleotide
acccgaugucuuguuccac

SEQ ID NO: 745876 - RNA, 19 nt, Artificial Sequence
  Description of Artificial Sequence: Synthetic oligonucleotide
ccguucgaaucccaacagg

SEQ ID NO: 745877 - RNA, 19 nt, Artificial Sequence
  Description of Artificial Sequence: Synthetic oligonucleotide
gccaauagaguagauugaa

SEQ ID NO: 745878 - RNA, 19 nt, Artificial Sequence
  Description of Artificial Sequence: Synthetic oligonucleotide
ucagcgcggaagcgccaca

SEQ ID NO: 745879 - RNA, 19 nt, Artificial Sequence
  Description of Artificial Sequence: Synthetic oligonucleotide
gagacucguugccaagacu

SEQ ID NO: 745880 - RNA, 19 nt, Artificial Sequence
  Description of Artificial Sequence: Synthetic oligonucleotide
gagccuugaccucccgcga

SEQ ID NO: 745881 - RNA, 19 nt, Artificial Sequence
  Description of Artificial Sequence: Synthetic oligonucleotide
caguaucucucucgcaaaa

SEQ ID NO: 745882 - RNA, 19 nt, Artificial Sequence
  Description of Artificial Sequence: Synthetic oligonucleotide
gguuuuccgagaagucagc

SEQ ID NO: 745883 - RNA, 19 nt, Artificial Sequence
  Description of Artificial Sequence: Synthetic oligonucleotide
gguaccacugcuguucgaa

SEQ ID NO: 745884 - RNA, 19 nt, Artificial Sequence
  Description of Artificial Sequence: Synthetic oligonucleotide
ugcguccuuggcacugaau

SEQ ID NO: 745885 - RNA, 19 nt, Artificial Sequence
  Description of Artificial Sequence: Synthetic oligonucleotide
uccaucgcugugguaggau

SEQ ID NO: 745886 - RNA, 19 nt, Artificial Sequence
  Description of Artificial Sequence: Synthetic oligonucleotide
aggggcccacucuggacca

SEQ ID NO: 745887 - RNA, 19 nt, Artificial Sequence
  Description of Artificial Sequence: Synthetic oligonucleotide
guggugccgaagagacucg

SEQ ID NO: 745888 - RNA, 19 nt, Artificial Sequence
  Description of Artificial Sequence: Synthetic oligonucleotide
ugucgguaccacugcuguu

SEQ ID NO: 745889 - RNA, 19 nt, Artificial Sequence
  Description of Artificial Sequence: Synthetic oligonucleotide
gcccuugacggaaauccag

SEQ ID NO: 745890 - RNA, 19 nt, Artificial Sequence
  Description of Artificial Sequence: Synthetic oligonucleotide
gcggcugucgguaccacug

SEQ ID NO: 745891 - RNA, 19 nt, Artificial Sequence
  Description of Artificial Sequence: Synthetic oligonucleotide
gcacgcacuccgcuuuggg

SEQ ID NO: 745892 - RNA, 19 nt, Artificial Sequence
  Description of Artificial Sequence: Synthetic oligonucleotide
aggacgggugggguccagg

SEQ ID NO: 745893 - RNA, 19 nt, Artificial Sequence
  Description of Artificial Sequence: Synthetic oligonucleotide
gaucgaaaaccgagugaua

SEQ ID NO: 745894 - RNA, 19 nt, Artificial Sequence
  Description of Artificial Sequence: Synthetic oligonucleotide
cuggauggucaugcaucag

SEQ ID NO: 745895 - RNA, 19 nt, Artificial Sequence
  Description of Artificial Sequence: Synthetic oligonucleotide
uggugccgaagagacucgu

SEQ ID NO: 745896 - RNA, 19 nt, Artificial Sequence
  Description of Artificial Sequence: Synthetic oligonucleotide
gcccauagucaugauacca

SEQ ID NO: 745897 - RNA, 19 nt, Artificial Sequence
  Description of Artificial Sequence: Synthetic oligonucleotide
cacugcguccuuggcacug

SEQ ID NO: 745898 - RNA, 19 nt, Artificial Sequence
  Description of Artificial Sequence: Synthetic oligonucleotide
ucccguuuaugaggaacuu

SEQ ID NO: 745899 - RNA, 19 nt, Artificial Sequence
  Description of Artificial Sequence: Synthetic oligonucleotide
uguugacgccauggaaaua

SEQ ID NO: 745900 - RNA, 19 nt, Artificial Sequence
  Description of Artificial Sequence: Synthetic oligonucleotide
ccgcucauaccacacccag

SEQ ID NO: 745901 - RNA, 19 nt, Artificial Sequence
  Description of Artificial Sequence: Synthetic oligonucleotide
ccacagaccgaugcagucc

SEQ ID NO: 745902 - RNA, 19 nt, Artificial Sequence
  Description of Artificial Sequence: Synthetic oligonucleotide
agcccuucccucggauauc

SEQ ID NO: 745903 - RNA, 19 nt, Artificial Sequence
  Description of Artificial Sequence: Synthetic oligonucleotide
ccaauagaguagauugaaa

SEQ ID NO: 745904 - RNA, 19 nt, Artificial Sequence
  Description of Artificial Sequence: Synthetic oligonucleotide
agcgcggaagcgccacagu

SEQ ID NO: 745905 - RNA, 19 nt, Artificial Sequence
  Description of Artificial Sequence: Synthetic oligonucleotide
agagaaccacagaccgaug

SEQ ID NO: 745906 - RNA, 19 nt, Artificial Sequence
  Description of Artificial Sequence: Synthetic oligonucleotide
gcgagugaagauccccuuc

SEQ ID NO: 745907 - RNA, 19 nt, Artificial Sequence
  Description of Artificial Sequence: Synthetic oligonucleotide
guuuccugggccacgacuu

SEQ ID NO: 745908 - RNA, 19 nt, Artificial Sequence
  Description of Artificial Sequence: Synthetic oligonucleotide
ucccugcguaccaguuccu

SEQ ID NO: 745909 - RNA, 19 nt, Artificial Sequence
  Description of Artificial Sequence: Synthetic oligonucleotide
ccaccguucgaaucccaac

SEQ ID NO: 745910 - RNA, 19 nt, Artificial Sequence
  Description of Artificial Sequence: Synthetic oligonucleotide
ucgcugugguaggauugcu

SEQ ID NO: 745911 - RNA, 19 nt, Artificial Sequence
  Description of Artificial Sequence: Synthetic oligonucleotide
cuccaguaucucucucgca

SEQ ID NO: 745912 - RNA, 19 nt, Artificial Sequence
  Description of Artificial Sequence: Synthetic oligonucleotide
gucccgcauaguugaagaa

SEQ ID NO: 745913 - RNA, 19 nt, Artificial Sequence
  Description of Artificial Sequence: Synthetic oligonucleotide
gcugucgguaccacugcug

SEQ ID NO: 745914 - RNA, 19 nt, Artificial Sequence
  Description of Artificial Sequence: Synthetic oligonucleotide
gaagcgccacagucccguc

SEQ ID NO: 745915 - RNA, 19 nt, Artificial Sequence
  Description of Artificial Sequence: Synthetic oligonucleotide
acagaccgaugcagucccg

SEQ ID NO: 745916 - RNA, 19 nt, Artificial Sequence
  Description of Artificial Sequence: Synthetic oligonucleotide
ccguaucuaucacagagcu

SEQ ID NO: 745917 - RNA, 19 nt, Artificial Sequence
  Description of Artificial Sequence: Synthetic oligonucleotide
acugcguccuuggcacuga

SEQ ID NO: 745918 - RNA, 19 nt, Artificial Sequence
  Description of Artificial Sequence: Synthetic oligonucleotide
cccaacagggaggguauag

SEQ ID NO: 745919 - RNA, 19 nt, Artificial Sequence
  Description of Artificial Sequence: Synthetic oligonucleotide
caagccaauagaguagauu

SEQ ID NO: 745920 - RNA, 19 nt, Artificial Sequence
  Description of Artificial Sequence: Synthetic oligonucleotide
gucagcgcggaagcgccac

SEQ ID NO: 745921 - RNA, 19 nt, Artificial Sequence
  Description of Artificial Sequence: Synthetic oligonucleotide
cucgugaaacccugcaauu

SEQ ID NO: 745922 - RNA, 19 nt, Artificial Sequence
  Description of Artificial Sequence: Synthetic oligonucleotide
cccguuuaugaggaacuug

SEQ ID NO: 745923 - RNA, 19 nt, Artificial Sequence
  Description of Artificial Sequence: Synthetic oligonucleotide
cguaucuaucacagagcug

SEQ ID NO: 745924 - RNA, 19 nt, Artificial Sequence
  Description of Artificial Sequence: Synthetic oligonucleotide
gaccgaugcagucccgcau

SEQ ID NO: 745925 - RNA, 19 nt, Artificial Sequence
  Description of Artificial Sequence: Synthetic oligonucleotide
guaugaggggucagugugu

SEQ ID NO: 745926 - RNA, 19 nt, Artificial Sequence
  Description of Artificial Sequence: Synthetic oligonucleotide
gcgcggaagcgccacaguc

SEQ ID NO: 745927 - RNA, 19 nt, Artificial Sequence
  Description of Artificial Sequence: Synthetic oligonucleotide
cccgaugucuuguuccaca

SEQ ID NO: 745928 - RNA, 19 nt, Artificial Sequence
  Description of Artificial Sequence: Synthetic oligonucleotide
gcgacgggcucucccuggg

SEQ ID NO: 745929 - RNA, 19 nt, Artificial Sequence
  Description of Artificial Sequence: Synthetic oligonucleotide
accuggcacccgaagcuga

SEQ ID NO: 745930 - RNA, 19 nt, Artificial Sequence
  Description of Artificial Sequence: Synthetic oligonucleotide
gcucuccaaccauguauuc

SEQ ID NO: 745931 - RNA, 19 nt, Artificial Sequence
  Description of Artificial Sequence: Synthetic oligonucleotide
ccgcauaguugaagaaguc

SEQ ID NO: 745932 - RNA, 19 nt, Artificial Sequence
  Description of Artificial Sequence: Synthetic oligonucleotide
ggaggguauagaagucaga

SEQ ID NO: 745933 - RNA, 19 nt, Artificial Sequence
  Description of Artificial Sequence: Synthetic oligonucleotide
ccgguuuuccgagaaguca

SEQ ID NO: 745934 - RNA, 19 nt, Artificial Sequence
  Description of Artificial Sequence: Synthetic oligonucleotide
ccaacccgaugucuuguuc

SEQ ID NO: 745935 - RNA, 19 nt, Artificial Sequence
  Description of Artificial Sequence: Synthetic oligonucleotide
ccucgugcuuguugacgcc

SEQ ID NO: 745936 - RNA, 19 nt, Artificial Sequence
  Description of Artificial Sequence: Synthetic oligonucleotide
guuucccguuuaugaggaa

SEQ ID NO: 745937 - RNA, 19 nt, Artificial Sequence
  Description of Artificial Sequence: Synthetic oligonucleotide
gcagccgguuuuccgagaa

SEQ ID NO: 745938 - RNA, 19 nt, Artificial Sequence
  Description of Artificial Sequence: Synthetic oligonucleotide
ccuugaccucccgcgacgg

SEQ ID NO: 745939 - RNA, 19 nt, Artificial Sequence
  Description of Artificial Sequence: Synthetic oligonucleotide
ggcacucaucaaugaccac

SEQ ID NO: 745940 - RNA, 19 nt, Artificial Sequence
  Description of Artificial Sequence: Synthetic oligonucleotide
ccgaugcagucccgcauag

SEQ ID NO: 745941 - RNA, 19 nt, Artificial Sequence
  Description of Artificial Sequence: Synthetic oligonucleotide
caguaauaucgucgaugua

SEQ ID NO: 745942 - RNA, 19 nt, Artificial Sequence
  Description of Artificial Sequence: Synthetic oligonucleotide
cgcucauaccacacccagc

SEQ ID NO: 745943 - RNA, 19 nt, Artificial Sequence
  Description of Artificial Sequence: Synthetic oligonucleotide
cagcuucaaaggggagaug

SEQ ID NO: 745944 - RNA, 19 nt, Artificial Sequence
  Description of Artificial Sequence: Synthetic oligonucleotide
gggugaucagcgucuugaa

SEQ ID NO: 745945 - RNA, 19 nt, Artificial Sequence
  Description of Artificial Sequence: Synthetic oligonucleotide
gggauacauggagguauca

SEQ ID NO: 745946 - RNA, 19 nt, Artificial Sequence
  Description of Artificial Sequence: Synthetic oligonucleotide
ggaagcgccacagucccgu

SEQ ID NO: 745947 - RNA, 19 nt, Artificial Sequence
  Description of Artificial Sequence: Synthetic oligonucleotide
acagucccguccagagccu

SEQ ID NO: 745948 - RNA, 19 nt, Artificial Sequence
  Description of Artificial Sequence: Synthetic oligonucleotide
ccuugacggaaauccagua

SEQ ID NO: 745949 - RNA, 19 nt, Artificial Sequence
  Description of Artificial Sequence: Synthetic oligonucleotide
cgcaaaauaaaugccacau

SEQ ID NO: 745950 - RNA, 19 nt, Artificial Sequence
  Description of Artificial Sequence: Synthetic oligonucleotide
guagggguaguggcuggua

SEQ ID NO: 745951 - RNA, 19 nt, Artificial Sequence
  Description of Artificial Sequence: Synthetic oligonucleotide
cacaaccgcagggugauuu

SEQ ID NO: 745952 - RNA, 19 nt, Artificial Sequence
  Description of Artificial Sequence: Synthetic oligonucleotide
ccaacagggaggguauaga

SEQ ID NO: 745953 - RNA, 19 nt, Artificial Sequence
  Description of Artificial Sequence: Synthetic oligonucleotide
gccgguuuuccgagaaguc

SEQ ID NO: 745954 - RNA, 19 nt, Artificial Sequence
  Description of Artificial Sequence: Synthetic oligonucleotide
cccuucgugcuccaccaca

SEQ ID NO: 745955 - RNA, 19 nt, Artificial Sequence
  Description of Artificial Sequence: Synthetic oligonucleotide
guccaucgcugugguagga

SEQ ID NO: 745956 - RNA, 19 nt, Artificial Sequence
  Description of Artificial Sequence: Synthetic oligonucleotide
acaggacggguggggucca

SEQ ID NO: 745957 - RNA, 19 nt, Artificial Sequence
  Description of Artificial Sequence: Synthetic oligonucleotide
gaccucccgcgacgggcuc

SEQ ID NO: 745958 - RNA, 19 nt, Artificial Sequence
  Description of Artificial Sequence: Synthetic oligonucleotide
agucagcgcggaagcgcca

SEQ ID NO: 745959 - RNA, 19 nt, Artificial Sequence
  Description of Artificial Sequence: Synthetic oligonucleotide
caaagcccuucccucggau

SEQ ID NO: 745960 - RNA, 19 nt, Artificial Sequence
  Description of Artificial Sequence: Synthetic oligonucleotide
caccagagguuggcaccug

SEQ ID NO: 745961 - RNA, 19 nt, Artificial Sequence
  Description of Artificial Sequence: Synthetic oligonucleotide
accucccgcgacgggcucu

SEQ ID NO: 745962 - RNA, 19 nt, Artificial Sequence
  Description of Artificial Sequence: Synthetic oligonucleotide
cccuugacggaaauccagu

SEQ ID NO: 745963 - RNA, 19 nt, Artificial Sequence
  Description of Artificial Sequence: Synthetic oligonucleotide
cgagugaagauccccuucu

SEQ ID NO: 745964 - RNA, 19 nt, Artificial Sequence
  Description of Artificial Sequence: Synthetic oligonucleotide
agccaccguucgaauccca

SEQ ID NO: 745965 - RNA, 19 nt, Artificial Sequence
  Description of Artificial Sequence: Synthetic oligonucleotide
ggaguacagguaggcugga

SEQ ID NO: 745966 - RNA, 19 nt, Artificial Sequence
  Description of Artificial Sequence: Synthetic oligonucleotide
cauugcccuugacggaaau

SEQ ID NO: 745967 - RNA, 19 nt, Artificial Sequence
  Description of Artificial Sequence: Synthetic oligonucleotide
gguuggcaccuggcacccg

SEQ ID NO: 745968 - RNA, 19 nt, Artificial Sequence
  Description of Artificial Sequence: Synthetic oligonucleotide
cccgcucauaccacaccca

SEQ ID NO: 745969 - RNA, 19 nt, Artificial Sequence
  Description of Artificial Sequence: Synthetic oligonucleotide
ucacaaccgcagggugauu

SEQ ID NO: 745970 - RNA, 19 nt, Artificial Sequence
  Description of Artificial Sequence: Synthetic oligonucleotide
ccucagcggcugucgguac

SEQ ID NO: 745971 - RNA, 19 nt, Artificial Sequence
  Description of Artificial Sequence: Synthetic oligonucleotide
ccucggauaucugaauccu

SEQ ID NO: 745972 - RNA, 19 nt, Artificial Sequence
  Description of Artificial Sequence: Synthetic oligonucleotide
ggcugucgguaccacugcu

SEQ ID NO: 745973 - RNA, 19 nt, Artificial Sequence
  Description of Artificial Sequence: Synthetic oligonucleotide
cgugcuuguugacgccaug

SEQ ID NO: 745974 - RNA, 19 nt, Artificial Sequence
  Description of Artificial Sequence: Synthetic oligonucleotide
ggcgagugaagauccccuu

SEQ ID NO: 745975 - RNA, 19 nt, Artificial Sequence
  Description of Artificial Sequence: Synthetic oligonucleotide
caggacgggugggguccag

SEQ ID NO: 745976 - RNA, 19 nt, Artificial Sequence
  Description of Artificial Sequence: Synthetic oligonucleotide
gccaccguucgaaucccaa

SEQ ID NO: 745977 - RNA, 19 nt, Artificial Sequence
  Description of Artificial Sequence: Synthetic oligonucleotide
cggcugucgguaccacugc

SEQ ID NO: 745978 - RNA, 19 nt, Artificial Sequence
  Description of Artificial Sequence: Synthetic oligonucleotide
ccuucgugcuccaccacau

SEQ ID NO: 745979 - RNA, 19 nt, Artificial Sequence
  Description of Artificial Sequence: Synthetic oligonucleotide
ccgaugucuuguuccacau

SEQ ID NO: 745980 - RNA, 19 nt, Artificial Sequence
  Description of Artificial Sequence: Synthetic oligonucleotide
ccaagacucuggggcagca

SEQ ID NO: 745981 - RNA, 19 nt, Artificial Sequence
  Description of Artificial Sequence: Synthetic oligonucleotide
gcgccagggcgcaacugca

SEQ ID NO: 745982 - RNA, 19 nt, Artificial Sequence
  Description of Artificial Sequence: Synthetic oligonucleotide
gccacgacuuugccauccu

SEQ ID NO: 745983 - RNA, 19 nt, Artificial Sequence
  Description of Artificial Sequence: Synthetic oligonucleotide
cggauaucugaauccucgu

SEQ ID NO: 745984 - RNA, 19 nt, Artificial Sequence
  Description of Artificial Sequence: Synthetic oligonucleotide
ccaucgcugugguaggauu

SEQ ID NO: 745985 - RNA, 19 nt, Artificial Sequence
  Description of Artificial Sequence: Synthetic oligonucleotide
ccgcgacgggcucucccug

SEQ ID NO: 745986 - RNA, 19 nt, Artificial Sequence
  Description of Artificial Sequence: Synthetic oligonucleotide
ccucgccuccaaggaguac

SEQ ID NO: 745987 - RNA, 19 nt, Artificial Sequence
  Description of Artificial Sequence: Synthetic oligonucleotide
cacuccgcuuuggggacau

SEQ ID NO: 745988 - RNA, 19 nt, Artificial Sequence
  Description of Artificial Sequence: Synthetic oligonucleotide
ggugccgaagagacucguu

SEQ ID NO: 745989 - RNA, 19 nt, Artificial Sequence
  Description of Artificial Sequence: Synthetic oligonucleotide
ccgagaagucagcgcggaa

SEQ ID NO: 745990 - RNA, 19 nt, Artificial Sequence
  Description of Artificial Sequence: Synthetic oligonucleotide
cccagcacgcacuccgcuu

SEQ ID NO: 745991 - RNA, 19 nt, Artificial Sequence
  Description of Artificial Sequence: Synthetic oligonucleotide
cgguaccacugcuguucga

SEQ ID NO: 745992 - RNA, 19 nt, Artificial Sequence
  Description of Artificial Sequence: Synthetic oligonucleotide
cgaugcagucccgcauagu

SEQ ID NO: 745993 - RNA, 19 nt, Artificial Sequence
  Description of Artificial Sequence: Synthetic oligonucleotide
aauauuaggauucaaaugc

SEQ ID NO: 745994 - RNA, 19 nt, Artificial Sequence
  Description of Artificial Sequence: Synthetic oligonucleotide
auugacuuaagucugagcc

SEQ ID NO: 745995 - RNA, 19 nt, Artificial Sequence
  Description of Artificial Sequence: Synthetic oligonucleotide
uaaucuacaagugaaaagg

SEQ ID NO: 745996 - RNA, 19 nt, Artificial Sequence
  Description of Artificial Sequence: Synthetic oligonucleotide
aaacauucuaagaugaccc

SEQ ID NO: 745997 - RNA, 19 nt, Artificial Sequence
  Description of Artificial Sequence: Synthetic oligonucleotide
agauaaaaccaacaugucc

SEQ ID NO: 745998 - RNA, 19 nt, Artificial Sequence
  Description of Artificial Sequence: Synthetic oligonucleotide
aauaauucuauuuuggcuu

SEQ ID NO: 745999 - RNA, 19 nt, Artificial Sequence
  Description of Artificial Sequence: Synthetic oligonucleotide
gauacggcaacuuuuaggc

SEQ ID NO: 746000 - RNA, 19 nt, Artificial Sequence
  Description of Artificial Sequence: Synthetic oligonucleotide
agagcuaacacucaggucu

SEQ ID NO: 746001 - RNA, 19 nt, Artificial Sequence
  Description of Artificial Sequence: Synthetic oligonucleotide
uauauaaugcuuuugugga

SEQ ID NO: 746002 - RNA, 19 nt, Artificial Sequence
  Description of Artificial Sequence: Synthetic oligonucleotide
uaucuauugacuuaagucu

SEQ ID NO: 746003 - RNA, 19 nt, Artificial Sequence
  Description of Artificial Sequence: Synthetic oligonucleotide
cuaucuuucacuauggaug

SEQ ID NO: 746004 - RNA, 19 nt, Artificial Sequence
  Description of Artificial Sequence: Synthetic oligonucleotide
uuaucuauugacuuaaguc

SEQ ID NO: 746005 - RNA, 19 nt, Artificial Sequence
  Description of Artificial Sequence: Synthetic oligonucleotide
auauaguucacacuggaug

SEQ ID NO: 746006 - RNA, 19 nt, Artificial Sequence
  Description of Artificial Sequence: Synthetic oligonucleotide
uaugcauaguaauuguccg

SEQ ID NO: 746007 - RNA, 19 nt, Artificial Sequence
  Description of Artificial Sequence: Synthetic oligonucleotide
uuugcaugaaauauauagc

SEQ ID NO: 746008 - RNA, 19 nt, Artificial Sequence
  Description of Artificial Sequence: Synthetic oligonucleotide
aacauucuaagaugacccc

SEQ ID NO: 746009 - RNA, 19 nt, Artificial Sequence
  Description of Artificial Sequence: Synthetic oligonucleotide
ucaagagauggauaaagag

SEQ ID NO: 746010 - RNA, 19 nt, Artificial Sequence
  Description of Artificial Sequence: Synthetic oligonucleotide
uuaauagagagcuaacacu

SEQ ID NO: 746011 - RNA, 19 nt, Artificial Sequence
  Description of Artificial Sequence: Synthetic oligonucleotide
ucuacaagugaaaaggcga

SEQ ID NO: 746012 - RNA, 19 nt, Artificial Sequence
  Description of Artificial Sequence: Synthetic oligonucleotide
ucuuuugcaaaguacacac

SEQ ID NO: 746013 - RNA, 19 nt, Artificial Sequence
  Description of Artificial Sequence: Synthetic oligonucleotide
acuagcugaacaaauauac

SEQ ID NO: 746014 - RNA, 19 nt, Artificial Sequence
  Description of Artificial Sequence: Synthetic oligonucleotide
uaauagagagcuaacacuc

SEQ ID NO: 746015 - RNA, 19 nt, Artificial Sequence
  Description of Artificial Sequence: Synthetic oligonucleotide
uuaacuggaauuuuacaca

SEQ ID NO: 746016 - RNA, 19 nt, Artificial Sequence
  Description of Artificial Sequence: Synthetic oligonucleotide
aaaaccaggauaaggcuac

SEQ ID NO: 746017 - RNA, 19 nt, Artificial Sequence
  Description of Artificial Sequence: Synthetic oligonucleotide
cuuaauagagagcuaacac

SEQ ID NO: 746018 - RNA, 19 nt, Artificial Sequence
  Description of Artificial Sequence: Synthetic oligonucleotide
guaauuguccgcucaaagg

SEQ ID NO: 746019 - RNA, 19 nt, Artificial Sequence
  Description of Artificial Sequence: Synthetic oligonucleotide
agaccaugggcauauuugc

SEQ ID NO: 746020 - RNA, 19 nt, Artificial Sequence
  Description of Artificial Sequence: Synthetic oligonucleotide
aaaauuuagugacaaucau

SEQ ID NO: 746021 - RNA, 19 nt, Artificial Sequence
  Description of Artificial Sequence: Synthetic oligonucleotide
aauuccagcaucguuaccu

SEQ ID NO: 746022 - RNA, 19 nt, Artificial Sequence
  Description of Artificial Sequence: Synthetic oligonucleotide
uagaaaaucuccauacaac

SEQ ID NO: 746023 - RNA, 19 nt, Artificial Sequence
  Description of Artificial Sequence: Synthetic oligonucleotide
auuacauaauauuaggauu

SEQ ID NO: 746024 - RNA, 19 nt, Artificial Sequence
  Description of Artificial Sequence: Synthetic oligonucleotide
aucagauagagugagguuc

SEQ ID NO: 746025 - RNA, 19 nt, Artificial Sequence
  Description of Artificial Sequence: Synthetic oligonucleotide
gaagcauauuaagugaagg

SEQ ID NO: 746026 - RNA, 19 nt, Artificial Sequence
  Description of Artificial Sequence: Synthetic oligonucleotide
augauaaagugucauuguc

SEQ ID NO: 746027 - RNA, 19 nt, Artificial Sequence
  Description of Artificial Sequence: Synthetic oligonucleotide
uuauucuaaaugcuugcug

SEQ ID NO: 746028 - RNA, 19 nt, Artificial Sequence
  Description of Artificial Sequence: Synthetic oligonucleotide
uagggaaacauucuaagau

SEQ ID NO: 746029 - RNA, 19 nt, Artificial Sequence
  Description of Artificial Sequence: Synthetic oligonucleotide
aagcauauuaagugaaggu

SEQ ID NO: 746030 - RNA, 19 nt, Artificial Sequence
  Description of Artificial Sequence: Synthetic oligonucleotide
agcauauucucccuggcuc

SEQ ID NO: 746031 - RNA, 19 nt, Artificial Sequence
  Description of Artificial Sequence: Synthetic oligonucleotide
uuaggcguuuccuuuaugc

SEQ ID NO: 746032 - RNA, 19 nt, Artificial Sequence
  Description of Artificial Sequence: Synthetic oligonucleotide
auuaagugaagguaguuaa

SEQ ID NO: 746033 - RNA, 19 nt, Artificial Sequence
  Description of Artificial Sequence: Synthetic oligonucleotide
ugccgaagaagaaaacugg

SEQ ID NO: 746034 - RNA, 19 nt, Artificial Sequence
  Description of Artificial Sequence: Synthetic oligonucleotide
uaaaccucgggaauggugu

SEQ ID NO: 746035 - RNA, 19 nt, Artificial Sequence
  Description of Artificial Sequence: Synthetic oligonucleotide
augccaaauuaauauugcc

SEQ ID NO: 746036 - RNA, 19 nt, Artificial Sequence
  Description of Artificial Sequence: Synthetic oligonucleotide
aaacgauucuaggaaaguc

SEQ ID NO: 746037 - RNA, 19 nt, Artificial Sequence
  Description of Artificial Sequence: Synthetic oligonucleotide
ucuaggacaaaggugacca

SEQ ID NO: 746038 - RNA, 19 nt, Artificial Sequence
  Description of Artificial Sequence: Synthetic oligonucleotide
aaauuaauauugcccacau

SEQ ID NO: 746039 - RNA, 19 nt, Artificial Sequence
  Description of Artificial Sequence: Synthetic oligonucleotide
aguaauuguccgcucaaag

SEQ ID NO: 746040 - RNA, 19 nt, Artificial Sequence
  Description of Artificial Sequence: Synthetic oligonucleotide
aaguuucuaaaccucggga

SEQ ID NO: 746041 - RNA, 19 nt, Artificial Sequence
  Description of Artificial Sequence: Synthetic oligonucleotide
acacagaauaacuucacga

SEQ ID NO: 746042 - RNA, 19 nt, Artificial Sequence
  Description of Artificial Sequence: Synthetic oligonucleotide
aaaugcuugcuguaguuaa

SEQ ID NO: 746043 - RNA, 19 nt, Artificial Sequence
  Description of Artificial Sequence: Synthetic oligonucleotide
auugaucugcaguaccugg

SEQ ID NO: 746044 - RNA, 19 nt, Artificial Sequence
  Description of Artificial Sequence: Synthetic oligonucleotide
ggugcuaccauauaguuca

SEQ ID NO: 746045 - RNA, 19 nt, Artificial Sequence
  Description of Artificial Sequence: Synthetic oligonucleotide
aauuguccgcucaaagggc

SEQ ID NO: 746046 - RNA, 19 nt, Artificial Sequence
  Description of Artificial Sequence: Synthetic oligonucleotide
auauauagcgauuuauuuu

SEQ ID NO: 746047 - RNA, 19 nt, Artificial Sequence
  Description of Artificial Sequence: Synthetic oligonucleotide
aagugaagcacacgacuag

SEQ ID NO: 746048 - RNA, 19 nt, Artificial Sequence
  Description of Artificial Sequence: Synthetic oligonucleotide
uucagaaagcgauacggca

SEQ ID NO: 746049 - RNA, 19 nt, Artificial Sequence
  Description of Artificial Sequence: Synthetic oligonucleotide
uuucagaaagcgauacggc

SEQ ID NO: 746050 - RNA, 19 nt, Artificial Sequence
  Description of Artificial Sequence: Synthetic oligonucleotide
ucagauagagugagguucc

SEQ ID NO: 746051 - RNA, 19 nt, Artificial Sequence
  Description of Artificial Sequence: Synthetic oligonucleotide
aucguuaccugucacaggu

SEQ ID NO: 746052 - RNA, 19 nt, Artificial Sequence
  Description of Artificial Sequence: Synthetic oligonucleotide
cuugcuguaguuaaggcga

SEQ ID NO: 746053 - RNA, 19 nt, Artificial Sequence
  Description of Artificial Sequence: Synthetic oligonucleotide
agaagugaagcacacgacu

SEQ ID NO: 746054 - RNA, 19 nt, Artificial Sequence
  Description of Artificial Sequence: Synthetic oligonucleotide
acaccagucauccuaacca

SEQ ID NO: 746055 - RNA, 19 nt, Artificial Sequence
  Description of Artificial Sequence: Synthetic oligonucleotide
agugaagguaguuaaaauu

SEQ ID NO: 746056 - RNA, 19 nt, Artificial Sequence
  Description of Artificial Sequence: Synthetic oligonucleotide
uguaggguaagcaccagaa

SEQ ID NO: 746057 - RNA, 19 nt, Artificial Sequence
  Description of Artificial Sequence: Synthetic oligonucleotide
ugcaugaaauauauagcga

SEQ ID NO: 746058 - RNA, 19 nt, Artificial Sequence
  Description of Artificial Sequence: Synthetic oligonucleotide
ugagaauccuucaagccaa

SEQ ID NO: 746059 - RNA, 19 nt, Artificial Sequence
  Description of Artificial Sequence: Synthetic oligonucleotide
uugcaaaguacacacaaua

SEQ ID NO: 746060 - RNA, 19 nt, Artificial Sequence
  Description of Artificial Sequence: Synthetic oligonucleotide
cuucacuuaaagucagucc

SEQ ID NO: 746061 - RNA, 19 nt, Artificial Sequence
  Description of Artificial Sequence: Synthetic oligonucleotide
aaucuccauacaacuaggc

SEQ ID NO: 746062 - RNA, 19 nt, Artificial Sequence
  Description of Artificial Sequence: Synthetic oligonucleotide
uccuucaagccaaugacgu

SEQ ID NO: 746063 - RNA, 19 nt, Artificial Sequence
  Description of Artificial Sequence: Synthetic oligonucleotide
ugaauuacuuugucuaccu

SEQ ID NO: 746064 - RNA, 19 nt, Artificial Sequence
  Description of Artificial Sequence: Synthetic oligonucleotide
uaucuuucacuauggaugu

SEQ ID NO: 746065 - RNA, 19 nt, Artificial Sequence
  Description of Artificial Sequence: Synthetic oligonucleotide
agucauccuaaccacaaug

SEQ ID NO: 746066 - RNA, 19 nt, Artificial Sequence
  Description of Artificial Sequence: Synthetic oligonucleotide
uccuuaugcauaguaauug

SEQ ID NO: 746067 - RNA, 19 nt, Artificial Sequence
  Description of Artificial Sequence: Synthetic oligonucleotide
uuuccaguaaagaaacgau

SEQ ID NO: 746068 - RNA, 19 nt, Artificial Sequence
  Description of Artificial Sequence: Synthetic oligonucleotide
auagagagcuaacacucag

SEQ ID NO: 746069 - RNA, 19 nt, Artificial Sequence
  Description of Artificial Sequence: Synthetic oligonucleotide
aacgauucuaggaaaguca

SEQ ID NO: 746070 - RNA, 19 nt, Artificial Sequence
  Description of Artificial Sequence: Synthetic oligonucleotide
agagagcuaacacucaggu

SEQ ID NO: 746071 - RNA, 19 nt, Artificial Sequence
  Description of Artificial Sequence: Synthetic oligonucleotide
ucauccuaaccacaauggc

SEQ ID NO: 746072 - RNA, 19 nt, Artificial Sequence
  Description of Artificial Sequence: Synthetic oligonucleotide
uaaugcguuguucaaaguu

SEQ ID NO: 746073 - RNA, 19 nt, Artificial Sequence
  Description of Artificial Sequence: Synthetic oligonucleotide
cuccauacaacuaggcagc

SEQ ID NO: 746074 - RNA, 19 nt, Artificial Sequence
  Description of Artificial Sequence: Synthetic oligonucleotide
uaccuucaaaucuucaaga

SEQ ID NO: 746075 - RNA, 19 nt, Artificial Sequence
  Description of Artificial Sequence: Synthetic oligonucleotide
auagaaguugccgaagaag

SEQ ID NO: 746076 - RNA, 19 nt, Artificial Sequence
  Description of Artificial Sequence: Synthetic oligonucleotide
uuaagucugagcccaauuu

SEQ ID NO: 746077 - RNA, 19 nt, Artificial Sequence
  Description of Artificial Sequence: Synthetic oligonucleotide
ucagaaagcgauacggcaa

SEQ ID NO: 746078 - RNA, 19 nt, Artificial Sequence
  Description of Artificial Sequence: Synthetic oligonucleotide
aagaaacgauucuaggaaa

SEQ ID NO: 746079 - RNA, 19 nt, Artificial Sequence
  Description of Artificial Sequence: Synthetic oligonucleotide
cuucaagagauggauaaag

SEQ ID NO: 746080 - RNA, 19 nt, Artificial Sequence
  Description of Artificial Sequence: Synthetic oligonucleotide
aguuucuaaaccucgggaa

SEQ ID NO: 746081 - RNA, 19 nt, Artificial Sequence
  Description of Artificial Sequence: Synthetic oligonucleotide
uacggcaacuuuuaggcgu

SEQ ID NO: 746082 - RNA, 19 nt, Artificial Sequence
  Description of Artificial Sequence: Synthetic oligonucleotide
aaucucagaccaaccaagg

SEQ ID NO: 746083 - RNA, 19 nt, Artificial Sequence
  Description of Artificial Sequence: Synthetic oligonucleotide
auaaugcuuggugccaucc

SEQ ID NO: 746084 - RNA, 19 nt, Artificial Sequence
  Description of Artificial Sequence: Synthetic oligonucleotide
gaacuaucuuucacuaugg

SEQ ID NO: 746085 - RNA, 19 nt, Artificial Sequence
  Description of Artificial Sequence: Synthetic oligonucleotide
ugcaaaguacacacaauau

SEQ ID NO: 746086 - RNA, 19 nt, Artificial Sequence
  Description of Artificial Sequence: Synthetic oligonucleotide
uuuaucucacagaugugau

SEQ ID NO: 746087 - RNA, 19 nt, Artificial Sequence
  Description of Artificial Sequence: Synthetic oligonucleotide
acuaucuuucacuauggau

SEQ ID NO: 746088 - RNA, 19 nt, Artificial Sequence
  Description of Artificial Sequence: Synthetic oligonucleotide
ucuauugacuuaagucuga

SEQ ID NO: 746089 - RNA, 19 nt, Artificial Sequence
  Description of Artificial Sequence: Synthetic oligonucleotide
agugaagcacacgacuagc

SEQ ID NO: 746090 - RNA, 19 nt, Artificial Sequence
  Description of Artificial Sequence: Synthetic oligonucleotide
caacuaucuuaaaaucugc

SEQ ID NO: 746091 - RNA, 19 nt, Artificial Sequence
  Description of Artificial Sequence: Synthetic oligonucleotide
agaggacggaaucagaaaa

SEQ ID NO: 746092 - RNA, 19 nt, Artificial Sequence
  Description of Artificial Sequence: Synthetic oligonucleotide
cagaaggcagcaauaauuc

SEQ ID NO: 746093 - RNA, 19 nt, Artificial Sequence
  Description of Artificial Sequence: Synthetic oligonucleotide
ugaaauauauagcgauuua

SEQ ID NO: 746094 - RNA, 19 nt, Artificial Sequence
  Description of Artificial Sequence: Synthetic oligonucleotide
cagaagacaucagauagag

SEQ ID NO: 746095 - RNA, 19 nt, Artificial Sequence
  Description of Artificial Sequence: Synthetic oligonucleotide
gucauccuaaccacaaugg

SEQ ID NO: 746096 - RNA, 19 nt, Artificial Sequence
  Description of Artificial Sequence: Synthetic oligonucleotide
aucuacaagugaaaaggcg

SEQ ID NO: 746097 - RNA, 19 nt, Artificial Sequence
  Description of Artificial Sequence: Synthetic oligonucleotide
gacggaaucagaaaauaga

SEQ ID NO: 746098 - RNA, 19 nt, Artificial Sequence
  Description of Artificial Sequence: Synthetic oligonucleotide
aagguaguuaaaauuuagu

SEQ ID NO: 746099 - RNA, 19 nt, Artificial Sequence
  Description of Artificial Sequence: Synthetic oligonucleotide
cuacaagugaaaaggcgac

SEQ ID NO: 746100 - RNA, 19 nt, Artificial Sequence
  Description of Artificial Sequence: Synthetic oligonucleotide
aaagcgauacggcaacuuu

SEQ ID NO: 746101 - RNA, 19 nt, Artificial Sequence
  Description of Artificial Sequence: Synthetic oligonucleotide
accgaggacgcgcugcucc

SEQ ID NO: 746102 - RNA, 19 nt, Artificial Sequence
  Description of Artificial Sequence: Synthetic oligonucleotide
aggcguuuccuuuaugcag

SEQ ID NO: 746103 - RNA, 19 nt, Artificial Sequence
  Description of Artificial Sequence: Synthetic oligonucleotide
acuagcacugugcuucauc

SEQ ID NO: 746104 - RNA, 19 nt, Artificial Sequence
  Description of Artificial Sequence: Synthetic oligonucleotide
cacaggugcuaccauauag

SEQ ID NO: 746105 - RNA, 19 nt, Artificial Sequence
  Description of Artificial Sequence: Synthetic oligonucleotide
acaucagauagagugaggu

SEQ ID NO: 746106 - RNA, 19 nt, Artificial Sequence
  Description of Artificial Sequence: Synthetic oligonucleotide
ugauuguaaugguaacuac

SEQ ID NO: 746107 - RNA, 19 nt, Artificial Sequence
  Description of Artificial Sequence: Synthetic oligonucleotide
ucacuuaaagucaguccca

SEQ ID NO: 746108 - RNA, 19 nt, Artificial Sequence
  Description of Artificial Sequence: Synthetic oligonucleotide
cuauaacaauguuugcaug

SEQ ID NO: 746109 - RNA, 19 nt, Artificial Sequence
  Description of Artificial Sequence: Synthetic oligonucleotide
aacuaucuuucacuaugga

SEQ ID NO: 746110 - RNA, 19 nt, Artificial Sequence
  Description of Artificial Sequence: Synthetic oligonucleotide
cucacagaugugaugauca

SEQ ID NO: 746111 - RNA, 19 nt, Artificial Sequence
  Description of Artificial Sequence: Synthetic oligonucleotide
cacacgacuagcacugugc

SEQ ID NO: 746112 - RNA, 19 nt, Artificial Sequence
  Description of Artificial Sequence: Synthetic oligonucleotide
ugacuagaaaaucuccaua

SEQ ID NO: 746113 - RNA, 19 nt, Artificial Sequence
  Description of Artificial Sequence: Synthetic oligonucleotide
gcauauuaagugaagguag

SEQ ID NO: 746114 - RNA, 19 nt, Artificial Sequence
  Description of Artificial Sequence: Synthetic oligonucleotide
cuuaaagucagucccaugu

SEQ ID NO: 746115 - RNA, 19 nt, Artificial Sequence
  Description of Artificial Sequence: Synthetic oligonucleotide
aaugcguuguucaaaguuu

SEQ ID NO: 746116 - RNA, 19 nt, Artificial Sequence
  Description of Artificial Sequence: Synthetic oligonucleotide
cucgggaauggugugaucc

SEQ ID NO: 746117 - RNA, 19 nt, Artificial Sequence
  Description of Artificial Sequence: Synthetic oligonucleotide
cauccguuuaauaauaugu

SEQ ID NO: 746118 - RNA, 19 nt, Artificial Sequence
  Description of Artificial Sequence: Synthetic oligonucleotide
auuacuuugucuaccuuca

SEQ ID NO: 746119 - RNA, 19 nt, Artificial Sequence
  Description of Artificial Sequence: Synthetic oligonucleotide
uccuuuaugcagugacuag

SEQ ID NO: 746120 - RNA, 19 nt, Artificial Sequence
  Description of Artificial Sequence: Synthetic oligonucleotide
ugaucagugagaaggccau

SEQ ID NO: 746121 - RNA, 19 nt, Artificial Sequence
  Description of Artificial Sequence: Synthetic oligonucleotide
uguuuagaggacggaauca

SEQ ID NO: 746122 - RNA, 19 nt, Artificial Sequence
  Description of Artificial Sequence: Synthetic oligonucleotide
aagcacacgacuagcacug

SEQ ID NO: 746123 - RNA, 19 nt, Artificial Sequence
  Description of Artificial Sequence: Synthetic oligonucleotide
cuaaaccucgggaauggug

SEQ ID NO: 746124 - RNA, 19 nt, Artificial Sequence
  Description of Artificial Sequence: Synthetic oligonucleotide
uaccauuaucuauugacuu

SEQ ID NO: 746125 - RNA, 19 nt, Artificial Sequence
  Description of Artificial Sequence: Synthetic oligonucleotide
cugaauuacuuugucuacc

SEQ ID NO: 746126 - RNA, 19 nt, Artificial Sequence
  Description of Artificial Sequence: Synthetic oligonucleotide
agaccaaccaaggaggcug

SEQ ID NO: 746127 - RNA, 19 nt, Artificial Sequence
  Description of Artificial Sequence: Synthetic oligonucleotide
agacaucagauagagugag

SEQ ID NO: 746128 - RNA, 19 nt, Artificial Sequence
  Description of Artificial Sequence: Synthetic oligonucleotide
cuucaagccaaugacguuc

SEQ ID NO: 746129 - RNA, 19 nt, Artificial Sequence
  Description of Artificial Sequence: Synthetic oligonucleotide
agaaacgauucuaggaaag

SEQ ID NO: 746130 - RNA, 19 nt, Artificial Sequence
  Description of Artificial Sequence: Synthetic oligonucleotide
uuaaagucagucccaugua

SEQ ID NO: 746131 - RNA, 19 nt, Artificial Sequence
  Description of Artificial Sequence: Synthetic oligonucleotide
auugggagagcucuggaua

SEQ ID NO: 746132 - RNA, 19 nt, Artificial Sequence
  Description of Artificial Sequence: Synthetic oligonucleotide
agcauauuaagugaaggua

SEQ ID NO: 746133 - RNA, 19 nt, Artificial Sequence
  Description of Artificial Sequence: Synthetic oligonucleotide
augaaauauauagcgauuu

SEQ ID NO: 746134 - RNA, 19 nt, Artificial Sequence
  Description of Artificial Sequence: Synthetic oligonucleotide
ucagaccaaccaaggaggc

SEQ ID NO: 746135 - RNA, 19 nt, Artificial Sequence
  Description of Artificial Sequence: Synthetic oligonucleotide
aaaccagaguugauuaacu

SEQ ID NO: 746136 - RNA, 19 nt, Artificial Sequence
  Description of Artificial Sequence: Synthetic oligonucleotide
auaaugcuuuuguggaaug

SEQ ID NO: 746137 - RNA, 19 nt, Artificial Sequence
  Description of Artificial Sequence: Synthetic oligonucleotide
uacauaauauuaggauuca

SEQ ID NO: 746138 - RNA, 19 nt, Artificial Sequence
  Description of Artificial Sequence: Synthetic oligonucleotide
agaguugauuaacuggaau

SEQ ID NO: 746139 - RNA, 19 nt, Artificial Sequence
  Description of Artificial Sequence: Synthetic oligonucleotide
aguugauuaacuggaauuu

SEQ ID NO: 746140 - RNA, 19 nt, Artificial Sequence
  Description of Artificial Sequence: Synthetic oligonucleotide
uuacacacucauacagaga

SEQ ID NO: 746141 - RNA, 19 nt, Artificial Sequence
  Description of Artificial Sequence: Synthetic oligonucleotide
uccuuacacagaauaacuu

SEQ ID NO: 746142 - RNA, 19 nt, Artificial Sequence
  Description of Artificial Sequence: Synthetic oligonucleotide
gaugaucagugagaaggcc

SEQ ID NO: 746143 - RNA, 19 nt, Artificial Sequence
  Description of Artificial Sequence: Synthetic oligonucleotide
gauaaggcuacaacuaucu

SEQ ID NO: 746144 - RNA, 19 nt, Artificial Sequence
  Description of Artificial Sequence: Synthetic oligonucleotide
aauagagagcuaacacuca

SEQ ID NO: 746145 - RNA, 19 nt, Artificial Sequence
  Description of Artificial Sequence: Synthetic oligonucleotide
auacggcaacuuuuaggcg

SEQ ID NO: 746146 - RNA, 19 nt, Artificial Sequence
  Description of Artificial Sequence: Synthetic oligonucleotide
auaccauuaucuauugacu

SEQ ID NO: 746147 - RNA, 19 nt, Artificial Sequence
  Description of Artificial Sequence: Synthetic oligonucleotide
agucccauguauugggaga

SEQ ID NO: 746148 - RNA, 19 nt, Artificial Sequence
  Description of Artificial Sequence: Synthetic oligonucleotide
cauacaacuaggcagcucu

SEQ ID NO: 746149 - RNA, 19 nt, Artificial Sequence
  Description of Artificial Sequence: Synthetic oligonucleotide
uggacuagcugaacaaaua

SEQ ID NO: 746150 - RNA, 19 nt, Artificial Sequence
  Description of Artificial Sequence: Synthetic oligonucleotide
aggauaaggcuacaacuau

SEQ ID NO: 746151 - RNA, 19 nt, Artificial Sequence
  Description of Artificial Sequence: Synthetic oligonucleotide
acgauucuaggaaagucag

SEQ ID NO: 746152 - RNA, 19 nt, Artificial Sequence
  Description of Artificial Sequence: Synthetic oligonucleotide
aaguugccgaagaagaaaa

SEQ ID NO: 746153 - RNA, 19 nt, Artificial Sequence
  Description of Artificial Sequence: Synthetic oligonucleotide
aaaguacacacaauauaua

SEQ ID NO: 746154 - RNA, 19 nt, Artificial Sequence
  Description of Artificial Sequence: Synthetic oligonucleotide
uccagcaucguuaccuguc

SEQ ID NO: 746155 - RNA, 19 nt, Artificial Sequence
  Description of Artificial Sequence: Synthetic oligonucleotide
aaaccucgggaauggugug

SEQ ID NO: 746156 - RNA, 19 nt, Artificial Sequence
  Description of Artificial Sequence: Synthetic oligonucleotide
auaguaauuguccgcucaa

SEQ ID NO: 746157 - RNA, 19 nt, Artificial Sequence
  Description of Artificial Sequence: Synthetic oligonucleotide
auauaaugcuuuuguggaa

SEQ ID NO: 746158 - RNA, 19 nt, Artificial Sequence
  Description of Artificial Sequence: Synthetic oligonucleotide
agcuguugacaguaugucu

SEQ ID NO: 746159 - RNA, 19 nt, Artificial Sequence
  Description of Artificial Sequence: Synthetic oligonucleotide
ugaaaccagaguugauuaa

SEQ ID NO: 746160 - RNA, 19 nt, Artificial Sequence
  Description of Artificial Sequence: Synthetic oligonucleotide
ugcccacauaaucuacaag

SEQ ID NO: 746161 - RNA, 19 nt, Artificial Sequence
  Description of Artificial Sequence: Synthetic oligonucleotide
ugaccacuuaucacacagc

SEQ ID NO: 746162 - RNA, 19 nt, Artificial Sequence
  Description of Artificial Sequence: Synthetic oligonucleotide
aacuaccaaaggcaaucau

SEQ ID NO: 746163 - RNA, 19 nt, Artificial Sequence
  Description of Artificial Sequence: Synthetic oligonucleotide
auauugcccacauaaucua

SEQ ID NO: 746164 - RNA, 19 nt, Artificial Sequence
  Description of Artificial Sequence: Synthetic oligonucleotide
caccaaaacugccugggug

SEQ ID NO: 746165 - RNA, 19 nt, Artificial Sequence
  Description of Artificial Sequence: Synthetic oligonucleotide
cuagggaaacauucuaaga

SEQ ID NO: 746166 - RNA, 19 nt, Artificial Sequence
  Description of Artificial Sequence: Synthetic oligonucleotide
uauugggagagcucuggau

SEQ ID NO: 746167 - RNA, 19 nt, Artificial Sequence
  Description of Artificial Sequence: Synthetic oligonucleotide
ugccuuaucagagcuccag

SEQ ID NO: 746168 - RNA, 19 nt, Artificial Sequence
  Description of Artificial Sequence: Synthetic oligonucleotide
gucaguaaguaguuucaca

SEQ ID NO: 746169 - RNA, 19 nt, Artificial Sequence
  Description of Artificial Sequence: Synthetic oligonucleotide
acggaaucagaaaauagaa

SEQ ID NO: 746170 - RNA, 19 nt, Artificial Sequence
  Description of Artificial Sequence: Synthetic oligonucleotide
agcaucguuaccugucaca

SEQ ID NO: 746171 - RNA, 19 nt, Artificial Sequence
  Description of Artificial Sequence: Synthetic oligonucleotide
uuuuaggcguuuccuuuau

SEQ ID NO: 746172 - RNA, 19 nt, Artificial Sequence
  Description of Artificial Sequence: Synthetic oligonucleotide
agcuuaauagagagcuaac

SEQ ID NO: 746173 - RNA, 19 nt, Artificial Sequence
  Description of Artificial Sequence: Synthetic oligonucleotide
gaagcacacgacuagcacu

SEQ ID NO: 746174 - RNA, 19 nt, Artificial Sequence
  Description of Artificial Sequence: Synthetic oligonucleotide
auauaccauuaucuauuga

SEQ ID NO: 746175 - RNA, 19 nt, Artificial Sequence
  Description of Artificial Sequence: Synthetic oligonucleotide
uagaggacggaaucagaaa

SEQ ID NO: 746176 - RNA, 19 nt, Artificial Sequence
  Description of Artificial Sequence: Synthetic oligonucleotide
gcuguugacaguaugucug

SEQ ID NO: 746177 - RNA, 19 nt, Artificial Sequence
  Description of Artificial Sequence: Synthetic oligonucleotide
acauucuaagaugacccca

SEQ ID NO: 746178 - RNA, 19 nt, Artificial Sequence
  Description of Artificial Sequence: Synthetic oligonucleotide
accauauaguucacacugg

SEQ ID NO: 746179 - RNA, 19 nt, Artificial Sequence
  Description of Artificial Sequence: Synthetic oligonucleotide
aguacacacaauauauaau

SEQ ID NO: 746180 - RNA, 19 nt, Artificial Sequence
  Description of Artificial Sequence: Synthetic oligonucleotide
caguaaguaguuucacauc

SEQ ID NO: 746181 - RNA, 19 nt, Artificial Sequence
  Description of Artificial Sequence: Synthetic oligonucleotide
ugccauccguuuaauaaua

SEQ ID NO: 746182 - RNA, 19 nt, Artificial Sequence
  Description of Artificial Sequence: Synthetic oligonucleotide
acaguaugucugcaaucug

SEQ ID NO: 746183 - RNA, 19 nt, Artificial Sequence
  Description of Artificial Sequence: Synthetic oligonucleotide
cuauugacuuaagucugag

SEQ ID NO: 746184 - RNA, 19 nt, Artificial Sequence
  Description of Artificial Sequence: Synthetic oligonucleotide
ccguuuaauaauauguuca

SEQ ID NO: 746185 - RNA, 19 nt, Artificial Sequence
  Description of Artificial Sequence: Synthetic oligonucleotide
acacaauauauaaugcuuu

SEQ ID NO: 746186 - RNA, 19 nt, Artificial Sequence
  Description of Artificial Sequence: Synthetic oligonucleotide
acaucagguuuccaguaaa

SEQ ID NO: 746187 - RNA, 19 nt, Artificial Sequence
  Description of Artificial Sequence: Synthetic oligonucleotide
cccggaaagcuucauaugc

SEQ ID NO: 746188 - RNA, 19 nt, Artificial Sequence
  Description of Artificial Sequence: Synthetic oligonucleotide
acacgacuagcacugugcu

SEQ ID NO: 746189 - RNA, 19 nt, Artificial Sequence
  Description of Artificial Sequence: Synthetic oligonucleotide
uaacuaccaaaggcaauca

SEQ ID NO: 746190 - RNA, 19 nt, Artificial Sequence
  Description of Artificial Sequence: Synthetic oligonucleotide
augcguuguucaaaguuuc

SEQ ID NO: 746191 - RNA, 19 nt, Artificial Sequence
  Description of Artificial Sequence: Synthetic oligonucleotide
auccuaaccacaauggcuu

SEQ ID NO: 746192 - RNA, 19 nt, Artificial Sequence
  Description of Artificial Sequence: Synthetic oligonucleotide
uccgaauuccagcaucguu

SEQ ID NO: 746193 - RNA, 19 nt, Artificial Sequence
  Description of Artificial Sequence: Synthetic oligonucleotide
caaaucucagaccaaccaa

SEQ ID NO: 746194 - RNA, 19 nt, Artificial Sequence
  Description of Artificial Sequence: Synthetic oligonucleotide
caucguuaccugucacagg

SEQ ID NO: 746195 - RNA, 19 nt, Artificial Sequence
  Description of Artificial Sequence: Synthetic oligonucleotide
caggauaaggcuacaacua

SEQ ID NO: 746196 - RNA, 19 nt, Artificial Sequence
  Description of Artificial Sequence: Synthetic oligonucleotide
agcuaagccuacaccaguc

SEQ ID NO: 746197 - RNA, 19 nt, Artificial Sequence
  Description of Artificial Sequence: Synthetic oligonucleotide
gccaugauggaagauagac

SEQ ID NO: 746198 - RNA, 19 nt, Artificial Sequence
  Description of Artificial Sequence: Synthetic oligonucleotide
ucccggaaagcuucauaug

SEQ ID NO: 746199 - RNA, 19 nt, Artificial Sequence
  Description of Artificial Sequence: Synthetic oligonucleotide
cugcccguuuaucucacag

SEQ ID NO: 746200 - RNA, 19 nt, Artificial Sequence
  Description of Artificial Sequence: Synthetic oligonucleotide
aggugcuaccauauaguuc

SEQ ID NO: 746201 - RNA, 19 nt, Artificial Sequence
  Description of Artificial Sequence: Synthetic oligonucleotide
ugcccguuuaucucacaga

SEQ ID NO: 746202 - RNA, 19 nt, Artificial Sequence
  Description of Artificial Sequence: Synthetic oligonucleotide
aguugccgaagaagaaaac

SEQ ID NO: 746203 - RNA, 19 nt, Artificial Sequence
  Description of Artificial Sequence: Synthetic oligonucleotide
cauccuaaccacaauggcu

SEQ ID NO: 746204 - RNA, 19 nt, Artificial Sequence
  Description of Artificial Sequence: Synthetic oligonucleotide
caccagucauccuaaccac

SEQ ID NO: 746205 - RNA, 19 nt, Artificial Sequence
  Description of Artificial Sequence: Synthetic oligonucleotide
agguaccagcuuaauagag

SEQ ID NO: 746206 - RNA, 19 nt, Artificial Sequence
  Description of Artificial Sequence: Synthetic oligonucleotide
ucugcaccgaggacgcgcu

SEQ ID NO: 746207 - RNA, 19 nt, Artificial Sequence
  Description of Artificial Sequence: Synthetic oligonucleotide
caccuugugugccuuauca

SEQ ID NO: 746208 - RNA, 19 nt, Artificial Sequence
  Description of Artificial Sequence: Synthetic oligonucleotide
ccagaguugauuaacugga

SEQ ID NO: 746209 - RNA, 19 nt, Artificial Sequence
  Description of Artificial Sequence: Synthetic oligonucleotide
aggugaccacuuaucacac

SEQ ID NO: 746210 - RNA, 19 nt, Artificial Sequence
  Description of Artificial Sequence: Synthetic oligonucleotide
gcuguaguuaaggcgacag

SEQ ID NO: 746211 - RNA, 19 nt, Artificial Sequence
  Description of Artificial Sequence: Synthetic oligonucleotide
agcaggcaugauuguaaug

SEQ ID NO: 746212 - RNA, 19 nt, Artificial Sequence
  Description of Artificial Sequence: Synthetic oligonucleotide
agagugagguucccagcca

SEQ ID NO: 746213 - RNA, 19 nt, Artificial Sequence
  Description of Artificial Sequence: Synthetic oligonucleotide
gcaucguuaccugucacag

SEQ ID NO: 746214 - RNA, 19 nt, Artificial Sequence
  Description of Artificial Sequence: Synthetic oligonucleotide
acgaaucccuuguuuaauu

SEQ ID NO: 746215 - RNA, 19 nt, Artificial Sequence
  Description of Artificial Sequence: Synthetic oligonucleotide
cauguauugggagagcucu

SEQ ID NO: 746216 - RNA, 19 nt, Artificial Sequence
  Description of Artificial Sequence: Synthetic oligonucleotide
cgauacggcaacuuuuagg

SEQ ID NO: 746217 - RNA, 19 nt, Artificial Sequence
  Description of Artificial Sequence: Synthetic oligonucleotide
ggacggaaucagaaaauag

SEQ ID NO: 746218 - RNA, 19 nt, Artificial Sequence
  Description of Artificial Sequence: Synthetic oligonucleotide
caguuuaggauagagauuu

SEQ ID NO: 746219 - RNA, 19 nt, Artificial Sequence
  Description of Artificial Sequence: Synthetic oligonucleotide
gccugaauuacuuugucua

SEQ ID NO: 746220 - RNA, 19 nt, Artificial Sequence
  Description of Artificial Sequence: Synthetic oligonucleotide
gcaugaaauauauagcgau

SEQ ID NO: 746221 - RNA, 19 nt, Artificial Sequence
  Description of Artificial Sequence: Synthetic oligonucleotide
cuguccuuaugcauaguaa

SEQ ID NO: 746222 - RNA, 19 nt, Artificial Sequence
  Description of Artificial Sequence: Synthetic oligonucleotide
auaguucacacuggauggu

SEQ ID NO: 746223 - RNA, 19 nt, Artificial Sequence
  Description of Artificial Sequence: Synthetic oligonucleotide
ucguuaccugucacaggug

SEQ ID NO: 746224 - RNA, 19 nt, Artificial Sequence
  Description of Artificial Sequence: Synthetic oligonucleotide
ggcaugauuguaaugguaa

SEQ ID NO: 746225 - RNA, 19 nt, Artificial Sequence
  Description of Artificial Sequence: Synthetic oligonucleotide
guuucuaaaccucgggaau

SEQ ID NO: 746226 - RNA, 19 nt, Artificial Sequence
  Description of Artificial Sequence: Synthetic oligonucleotide
guugccgaagaagaaaacu

SEQ ID NO: 746227 - RNA, 19 nt, Artificial Sequence
  Description of Artificial Sequence: Synthetic oligonucleotide
gcuuaauagagagcuaaca

SEQ ID NO: 746228 - RNA, 19 nt, Artificial Sequence
  Description of Artificial Sequence: Synthetic oligonucleotide
uggugugauccaucaggcu

SEQ ID NO: 746229 - RNA, 19 nt, Artificial Sequence
  Description of Artificial Sequence: Synthetic oligonucleotide
cagcuuaauagagagcuaa

SEQ ID NO: 746230 - RNA, 19 nt, Artificial Sequence
  Description of Artificial Sequence: Synthetic oligonucleotide
ugcaccgaggacgcgcugc

SEQ ID NO: 746231 - RNA, 19 nt, Artificial Sequence
  Description of Artificial Sequence: Synthetic oligonucleotide
ccucaauguacuaugcuga

SEQ ID NO: 746232 - RNA, 19 nt, Artificial Sequence
  Description of Artificial Sequence: Synthetic oligonucleotide
gacuagcugaacaaauaua

SEQ ID NO: 746233 - RNA, 19 nt, Artificial Sequence
  Description of Artificial Sequence: Synthetic oligonucleotide
cauaaugcuuggugccauc

SEQ ID NO: 746234 - RNA, 19 nt, Artificial Sequence
  Description of Artificial Sequence: Synthetic oligonucleotide
uaguaauuguccgcucaaa

SEQ ID NO: 746235 - RNA, 19 nt, Artificial Sequence
  Description of Artificial Sequence: Synthetic oligonucleotide
gaaacgauucuaggaaagu

SEQ ID NO: 746236 - RNA, 19 nt, Artificial Sequence
  Description of Artificial Sequence: Synthetic oligonucleotide
ugcuaccaacugcccuugg

SEQ ID NO: 746237 - RNA, 19 nt, Artificial Sequence
  Description of Artificial Sequence: Synthetic oligonucleotide
gugacuagaaaaucuccau

SEQ ID NO: 746238 - RNA, 19 nt, Artificial Sequence
  Description of Artificial Sequence: Synthetic oligonucleotide
cuaggacaaaggugaccac

SEQ ID NO: 746239 - RNA, 19 nt, Artificial Sequence
  Description of Artificial Sequence: Synthetic oligonucleotide
ccguuuaucucacagaugu

SEQ ID NO: 746240 - RNA, 19 nt, Artificial Sequence
  Description of Artificial Sequence: Synthetic oligonucleotide
aggacggaaucagaaaaua

SEQ ID NO: 746241 - RNA, 19 nt, Artificial Sequence
  Description of Artificial Sequence: Synthetic oligonucleotide
cuuggguuggugcuccaga

SEQ ID NO: 746242 - RNA, 19 nt, Artificial Sequence
  Description of Artificial Sequence: Synthetic oligonucleotide
aaccaggauaaggcuacaa

SEQ ID NO: 746243 - RNA, 19 nt, Artificial Sequence
  Description of Artificial Sequence: Synthetic oligonucleotide
aaccucgggaaugguguga

SEQ ID NO: 746244 - RNA, 19 nt, Artificial Sequence
  Description of Artificial Sequence: Synthetic oligonucleotide
ucuaaaccucgggaauggu

SEQ ID NO: 746245 - RNA, 19 nt, Artificial Sequence
  Description of Artificial Sequence: Synthetic oligonucleotide
ccauccguuuaauaauaug

SEQ ID NO: 746246 - RNA, 19 nt, Artificial Sequence
  Description of Artificial Sequence: Synthetic oligonucleotide
gguaccagcuuaauagaga

SEQ ID NO: 746247 - RNA, 19 nt, Artificial Sequence
  Description of Artificial Sequence: Synthetic oligonucleotide
gguuuccaguaaagaaacg

SEQ ID NO: 746248 - RNA, 19 nt, Artificial Sequence
  Description of Artificial Sequence: Synthetic oligonucleotide
guaggguaagcaccagaaa

SEQ ID NO: 746249 - RNA, 19 nt, Artificial Sequence
  Description of Artificial Sequence: Synthetic oligonucleotide
cccaaaucucagaccaacc

SEQ ID NO: 746250 - RNA, 19 nt, Artificial Sequence
  Description of Artificial Sequence: Synthetic oligonucleotide
auggauaaagagacauuuu

SEQ ID NO: 746251 - RNA, 19 nt, Artificial Sequence
  Description of Artificial Sequence: Synthetic oligonucleotide
gugaagcacacgacuagca

SEQ ID NO: 746252 - RNA, 19 nt, Artificial Sequence
  Description of Artificial Sequence: Synthetic oligonucleotide
uccauacaacuaggcagcu

SEQ ID NO: 746253 - RNA, 19 nt, Artificial Sequence
  Description of Artificial Sequence: Synthetic oligonucleotide
agcgauacggcaacuuuua

SEQ ID NO: 746254 - RNA, 19 nt, Artificial Sequence
  Description of Artificial Sequence: Synthetic oligonucleotide
ggugugauccaucaggcuu

SEQ ID NO: 746255 - RNA, 19 nt, Artificial Sequence
  Description of Artificial Sequence: Synthetic oligonucleotide
ggauaaggcuacaacuauc

SEQ ID NO: 746256 - RNA, 19 nt, Artificial Sequence
  Description of Artificial Sequence: Synthetic oligonucleotide
cuugcuaccaacugcccuu

SEQ ID NO: 746257 - RNA, 19 nt, Artificial Sequence
  Description of Artificial Sequence: Synthetic oligonucleotide
ccgaauuccagcaucguua

SEQ ID NO: 746258 - RNA, 19 nt, Artificial Sequence
  Description of Artificial Sequence: Synthetic oligonucleotide
aucccuuguuuaauuucug

SEQ ID NO: 746259 - RNA, 19 nt, Artificial Sequence
  Description of Artificial Sequence: Synthetic oligonucleotide
uccuaaccacaauggcuua

SEQ ID NO: 746260 - RNA, 19 nt, Artificial Sequence
  Description of Artificial Sequence: Synthetic oligonucleotide
ugcuguaguuaaggcgaca

SEQ ID NO: 746261 - RNA, 19 nt, Artificial Sequence
  Description of Artificial Sequence: Synthetic oligonucleotide
cuacaccagucauccuaac

SEQ ID NO: 746262 - RNA, 19 nt, Artificial Sequence
  Description of Artificial Sequence: Synthetic oligonucleotide
gacguucugcccguuuauc

SEQ ID NO: 746263 - RNA, 19 nt, Artificial Sequence
  Description of Artificial Sequence: Synthetic oligonucleotide
cagaguugauuaacuggaa

SEQ ID NO: 746264 - RNA, 19 nt, Artificial Sequence
  Description of Artificial Sequence: Synthetic oligonucleotide
ccauauaguucacacugga

SEQ ID NO: 746265 - RNA, 19 nt, Artificial Sequence
  Description of Artificial Sequence: Synthetic oligonucleotide
agaaagcgauacggcaacu

SEQ ID NO: 746266 - RNA, 19 nt, Artificial Sequence
  Description of Artificial Sequence: Synthetic oligonucleotide
auacaacuaggcagcucug

SEQ ID NO: 746267 - RNA, 19 nt, Artificial Sequence
  Description of Artificial Sequence: Synthetic oligonucleotide
cagauagagugagguuccc

SEQ ID NO: 746268 - RNA, 19 nt, Artificial Sequence
  Description of Artificial Sequence: Synthetic oligonucleotide
gcuaacacucaggucucag

SEQ ID NO: 746269 - RNA, 19 nt, Artificial Sequence
  Description of Artificial Sequence: Synthetic oligonucleotide
gcuaagccuacaccaguca

SEQ ID NO: 746270 - RNA, 19 nt, Artificial Sequence
  Description of Artificial Sequence: Synthetic oligonucleotide
cuggacuagcugaacaaau

SEQ ID NO: 746271 - RNA, 19 nt, Artificial Sequence
  Description of Artificial Sequence: Synthetic oligonucleotide
cuaaccacaauggcuuaua

SEQ ID NO: 746272 - RNA, 19 nt, Artificial Sequence
  Description of Artificial Sequence: Synthetic oligonucleotide
cagcaucguuaccugucac

SEQ ID NO: 746273 - RNA, 19 nt, Artificial Sequence
  Description of Artificial Sequence: Synthetic oligonucleotide
gaauuacuuugucuaccuu

SEQ ID NO: 746274 - RNA, 19 nt, Artificial Sequence
  Description of Artificial Sequence: Synthetic oligonucleotide
guugauuaacuggaauuuu

SEQ ID NO: 746275 - RNA, 19 nt, Artificial Sequence
  Description of Artificial Sequence: Synthetic oligonucleotide
ccuuuaugcagugacuaga

SEQ ID NO: 746276 - RNA, 19 nt, Artificial Sequence
  Description of Artificial Sequence: Synthetic oligonucleotide
guaaugcguuguucaaagu

SEQ ID NO: 746277 - RNA, 19 nt, Artificial Sequence
  Description of Artificial Sequence: Synthetic oligonucleotide
aggcaugauuguaauggua

SEQ ID NO: 746278 - RNA, 19 nt, Artificial Sequence
  Description of Artificial Sequence: Synthetic oligonucleotide
gcgauacggcaacuuuuag

SEQ ID NO: 746279 - RNA, 19 nt, Artificial Sequence
  Description of Artificial Sequence: Synthetic oligonucleotide
gccgaagaagaaaacugga

SEQ ID NO: 746280 - RNA, 19 nt, Artificial Sequence
  Description of Artificial Sequence: Synthetic oligonucleotide
cuaagccuacaccagucau

SEQ ID NO: 746281 - RNA, 19 nt, Artificial Sequence
  Description of Artificial Sequence: Synthetic oligonucleotide
gaggacggaaucagaaaau

SEQ ID NO: 746282 - RNA, 19 nt, Artificial Sequence
  Description of Artificial Sequence: Synthetic oligonucleotide
cuuaagucugagcccaauu

SEQ ID NO: 746283 - RNA, 19 nt, Artificial Sequence
  Description of Artificial Sequence: Synthetic oligonucleotide
gaaagcgauacggcaacuu

SEQ ID NO: 746284 - RNA, 19 nt, Artificial Sequence
  Description of Artificial Sequence: Synthetic oligonucleotide
ggcuagggaaacauucuaa

SEQ ID NO: 746285 - RNA, 19 nt, Artificial Sequence
  Description of Artificial Sequence: Synthetic oligonucleotide
accacuuaucacacagcua

SEQ ID NO: 746286 - RNA, 19 nt, Artificial Sequence
  Description of Artificial Sequence: Synthetic oligonucleotide
gcccguuuaucucacagau

SEQ ID NO: 746287 - RNA, 19 nt, Artificial Sequence
  Description of Artificial Sequence: Synthetic oligonucleotide
ggcagguaccagcuuaaua

SEQ ID NO: 746288 - RNA, 19 nt, Artificial Sequence
  Description of Artificial Sequence: Synthetic oligonucleotide
cccguuuaucucacagaug

SEQ ID NO: 746289 - RNA, 19 nt, Artificial Sequence
  Description of Artificial Sequence: Synthetic oligonucleotide
gaaugaaaccagaguugau

SEQ ID NO: 746290 - RNA, 19 nt, Artificial Sequence
  Description of Artificial Sequence: Synthetic oligonucleotide
guacuaugcugauguucua

SEQ ID NO: 746291 - RNA, 19 nt, Artificial Sequence
  Description of Artificial Sequence: Synthetic oligonucleotide
guccuuaugcauaguaauu

SEQ ID NO: 746292 - RNA, 19 nt, Artificial Sequence
  Description of Artificial Sequence: Synthetic oligonucleotide
caucagauagagugagguu

SEQ ID NO: 746293 - RNA, 19 nt, Artificial Sequence
  Description of Artificial Sequence: Synthetic oligonucleotide
caggugcuaccauauaguu

SEQ ID NO: 746294 - RNA, 19 nt, Artificial Sequence
  Description of Artificial Sequence: Synthetic oligonucleotide
gaccccaaagugacuaaau

SEQ ID NO: 746295 - RNA, 19 nt, Artificial Sequence
  Description of Artificial Sequence: Synthetic oligonucleotide
ggcguuuccuuuaugcagu

SEQ ID NO: 746296 - RNA, 19 nt, Artificial Sequence
  Description of Artificial Sequence: Synthetic oligonucleotide
cuguaguuaaggcgacagu

SEQ ID NO: 746297 - RNA, 19 nt, Artificial Sequence
  Description of Artificial Sequence: Synthetic oligonucleotide
cagaacuaucuuucacuau

SEQ ID NO: 746298 - RNA, 19 nt, Artificial Sequence
  Description of Artificial Sequence: Synthetic oligonucleotide
acggcaacuuuuaggcguu

SEQ ID NO: 746299 - RNA, 19 nt, Artificial Sequence
  Description of Artificial Sequence: Synthetic oligonucleotide
cagcuaagccuacaccagu

SEQ ID NO: 746300 - RNA, 19 nt, Artificial Sequence
  Description of Artificial Sequence: Synthetic oligonucleotide
gugugccuuaucagagcuc

SEQ ID NO: 746301 - RNA, 19 nt, Artificial Sequence
  Description of Artificial Sequence: Synthetic oligonucleotide
ggccugucccgaaugguca

SEQ ID NO: 746302 - RNA, 19 nt, Artificial Sequence
  Description of Artificial Sequence: Synthetic oligonucleotide
caacuaggcagcucugcuu

SEQ ID NO: 746303 - RNA, 19 nt, Artificial Sequence
  Description of Artificial Sequence: Synthetic oligonucleotide
ccagcaucguuaccuguca

SEQ ID NO: 746304 - RNA, 19 nt, Artificial Sequence
  Description of Artificial Sequence: Synthetic oligonucleotide
gggccugucccgaaugguc

SEQ ID NO: 746305 - RNA, 19 nt, Artificial Sequence
  Description of Artificial Sequence: Synthetic oligonucleotide
ccgcucaaagggccugucc

SEQ ID NO: 746306 - RNA, 19 nt, Artificial Sequence
  Description of Artificial Sequence: Synthetic oligonucleotide
gcucugcuuagcagugagc

SEQ ID NO: 746307 - RNA, 19 nt, Artificial Sequence
  Description of Artificial Sequence: Synthetic oligonucleotide
cuggcagcagaacuaucuu

SEQ ID NO: 746308 - RNA, 19 nt, Artificial Sequence
  Description of Artificial Sequence: Synthetic oligonucleotide
cacgaaucccuuguuuaau

SEQ ID NO: 746309 - RNA, 19 nt, Artificial Sequence
  Description of Artificial Sequence: Synthetic oligonucleotide
gcuuggugccauccguuua

SEQ ID NO: 746310 - RNA, 19 nt, Artificial Sequence
  Description of Artificial Sequence: Synthetic oligonucleotide
gcaccuugugugccuuauc

SEQ ID NO: 746311 - RNA, 19 nt, Artificial Sequence
  Description of Artificial Sequence: Synthetic oligonucleotide
cugcaccgaggacgcgcug

SEQ ID NO: 746312 - RNA, 19 nt, Artificial Sequence
  Description of Artificial Sequence: Synthetic oligonucleotide
gugccuuaucagagcucca

SEQ ID NO: 746313 - RNA, 19 nt, Artificial Sequence
  Description of Artificial Sequence: Synthetic oligonucleotide
gagaauccuucaagccaau

SEQ ID NO: 746314 - RNA, 19 nt, Artificial Sequence
  Description of Artificial Sequence: Synthetic oligonucleotide
cagucauccuaaccacaau

SEQ ID NO: 746315 - RNA, 19 nt, Artificial Sequence
  Description of Artificial Sequence: Synthetic oligonucleotide
ccagcuuaauagagagcua

SEQ ID NO: 746316 - RNA, 19 nt, Artificial Sequence
  Description of Artificial Sequence: Synthetic oligonucleotide
cacgacuagcacugugcuu

SEQ ID NO: 746317 - RNA, 19 nt, Artificial Sequence
  Description of Artificial Sequence: Synthetic oligonucleotide
ccugucccgaauggucaug

SEQ ID NO: 746318 - RNA, 19 nt, Artificial Sequence
  Description of Artificial Sequence: Synthetic oligonucleotide
gugauccaucaggcuuuuc

SEQ ID NO: 746319 - RNA, 19 nt, Artificial Sequence
  Description of Artificial Sequence: Synthetic oligonucleotide
cuccgaauuccagcaucgu

SEQ ID NO: 746320 - RNA, 19 nt, Artificial Sequence
  Description of Artificial Sequence: Synthetic oligonucleotide
ccucgggaauggugugauc

SEQ ID NO: 746321 - RNA, 19 nt, Artificial Sequence
  Description of Artificial Sequence: Synthetic oligonucleotide
ggcgacaguugaagcauau

SEQ ID NO: 746322 - RNA, 19 nt, Artificial Sequence
  Description of Artificial Sequence: Synthetic oligonucleotide
gccauccguuuaauaauau

SEQ ID NO: 746323 - RNA, 19 nt, Artificial Sequence
  Description of Artificial Sequence: Synthetic oligonucleotide
cgauucuaggaaagucagu

SEQ ID NO: 746324 - RNA, 19 nt, Artificial Sequence
  Description of Artificial Sequence: Synthetic oligonucleotide
ccuucaagccaaugacguu

SEQ ID NO: 746325 - RNA, 19 nt, Artificial Sequence
  Description of Artificial Sequence: Synthetic oligonucleotide
gcucuccgaauuccagcau

SEQ ID NO: 746326 - RNA, 19 nt, Artificial Sequence
  Description of Artificial Sequence: Synthetic oligonucleotide
ccuaaccacaauggcuuau

SEQ ID NO: 746327 - RNA, 19 nt, Artificial Sequence
  Description of Artificial Sequence: Synthetic oligonucleotide
gcgacaguugaagcauauu

SEQ ID NO: 746328 - RNA, 19 nt, Artificial Sequence
  Description of Artificial Sequence: Synthetic oligonucleotide
gguccccaugcagcauauu

SEQ ID NO: 746329 - RNA, 19 nt, Artificial Sequence
  Description of Artificial Sequence: Synthetic oligonucleotide
cccgcacaguuguccccau

SEQ ID NO: 746330 - RNA, 19 nt, Artificial Sequence
  Description of Artificial Sequence: Synthetic oligonucleotide
ccgcacaguuguccccauu

SEQ ID NO: 746331 - RNA, 19 nt, Artificial Sequence
  Description of Artificial Sequence: Synthetic oligonucleotide
cggcaacuuuuaggcguuu

SEQ ID NO: 746332 - RNA, 19 nt, Artificial Sequence
  Description of Artificial Sequence: Synthetic oligonucleotide
ucuaguucaaaauaaaagg

SEQ ID NO: 746333 - RNA, 19 nt, Artificial Sequence
  Description of Artificial Sequence: Synthetic oligonucleotide
auaaauucggccuuggagc

SEQ ID NO: 746334 - RNA, 19 nt, Artificial Sequence
  Description of Artificial Sequence: Synthetic oligonucleotide
aauucuacugaucaucugg

SEQ ID NO: 746335 - RNA, 19 nt, Artificial Sequence
  Description of Artificial Sequence: Synthetic oligonucleotide
ucuaguacagguaagcagg

SEQ ID NO: 746336 - RNA, 19 nt, Artificial Sequence
  Description of Artificial Sequence: Synthetic oligonucleotide
auaaguacggucuucauag

SEQ ID NO: 746337 - RNA, 19 nt, Artificial Sequence
  Description of Artificial Sequence: Synthetic oligonucleotide
aucuaagcaacacacauac

SEQ ID NO: 746338 - RNA, 19 nt, Artificial Sequence
  Description of Artificial Sequence: Synthetic oligonucleotide
uauucaauucuacugauca

SEQ ID NO: 746339 - RNA, 19 nt, Artificial Sequence
  Description of Artificial Sequence: Synthetic oligonucleotide
ucagcuaacauaaguacgg

SEQ ID NO: 746340 - RNA, 19 nt, Artificial Sequence
  Description of Artificial Sequence: Synthetic oligonucleotide
aauaccaagaugugcauug

SEQ ID NO: 746341 - RNA, 19 nt, Artificial Sequence
  Description of Artificial Sequence: Synthetic oligonucleotide
aaucuuauacaguuugcuc

SEQ ID NO: 746342 - RNA, 19 nt, Artificial Sequence
  Description of Artificial Sequence: Synthetic oligonucleotide
aggauaaucuaguagucgc

SEQ ID NO: 746343 - RNA, 19 nt, Artificial Sequence
  Description of Artificial Sequence: Synthetic oligonucleotide
uuuguugcagccuuuagcc

SEQ ID NO: 746344 - RNA, 19 nt, Artificial Sequence
  Description of Artificial Sequence: Synthetic oligonucleotide
acuuauuacagugacgccc

SEQ ID NO: 746345 - RNA, 19 nt, Artificial Sequence
  Description of Artificial Sequence: Synthetic oligonucleotide
auuuaucuaagcaacacac

SEQ ID NO: 746346 - RNA, 19 nt, Artificial Sequence
  Description of Artificial Sequence: Synthetic oligonucleotide
aaauguguagucauauugg

SEQ ID NO: 746347 - RNA, 19 nt, Artificial Sequence
  Description of Artificial Sequence: Synthetic oligonucleotide
aaguaaguucuuuacacca

SEQ ID NO: 746348 - RNA, 19 nt, Artificial Sequence
  Description of Artificial Sequence: Synthetic oligonucleotide
uccuaaagauuccaugucg

SEQ ID NO: 746349 - RNA, 19 nt, Artificial Sequence
  Description of Artificial Sequence: Synthetic oligonucleotide
aguuaauauucacaauuac

SEQ ID NO: 746350 - RNA, 19 nt, Artificial Sequence
  Description of Artificial Sequence: Synthetic oligonucleotide
auauuggugguucaggguc

SEQ ID NO: 746351 - RNA, 19 nt, Artificial Sequence
  Description of Artificial Sequence: Synthetic oligonucleotide
uuuguguuaaccuuuaguu

SEQ ID NO: 746352 - RNA, 19 nt, Artificial Sequence
  Description of Artificial Sequence: Synthetic oligonucleotide
uuaguuaacuuuaacacuu

SEQ ID NO: 746353 - RNA, 19 nt, Artificial Sequence
  Description of Artificial Sequence: Synthetic oligonucleotide
uaauuuaaguacauggcaa

SEQ ID NO: 746354 - RNA, 19 nt, Artificial Sequence
  Description of Artificial Sequence: Synthetic oligonucleotide
uccugagccgcgaagaugg

SEQ ID NO: 746355 - RNA, 19 nt, Artificial Sequence
  Description of Artificial Sequence: Synthetic oligonucleotide
uguccaaucaaauguguag

SEQ ID NO: 746356 - RNA, 19 nt, Artificial Sequence
  Description of Artificial Sequence: Synthetic oligonucleotide
uugaucgccagauaaaugu

SEQ ID NO: 746357 - RNA, 19 nt, Artificial Sequence
  Description of Artificial Sequence: Synthetic oligonucleotide
uuaaugaacuuguaaacaa

SEQ ID NO: 746358 - RNA, 19 nt, Artificial Sequence
  Description of Artificial Sequence: Synthetic oligonucleotide
ucauauuggugguucaggg

SEQ ID NO: 746359 - RNA, 19 nt, Artificial Sequence
  Description of Artificial Sequence: Synthetic oligonucleotide
uuaacauuguccaaucaaa

SEQ ID NO: 746360 - RNA, 19 nt, Artificial Sequence
  Description of Artificial Sequence: Synthetic oligonucleotide
acauuauagaguuaaugca

SEQ ID NO: 746361 - RNA, 19 nt, Artificial Sequence
  Description of Artificial Sequence: Synthetic oligonucleotide
uuucaaaugcucaaacacu

SEQ ID NO: 746362 - RNA, 19 nt, Artificial Sequence
  Description of Artificial Sequence: Synthetic oligonucleotide
uauccuaaagauuccaugu

SEQ ID NO: 746363 - RNA, 19 nt, Artificial Sequence
  Description of Artificial Sequence: Synthetic oligonucleotide
acuaccucaguuaauauuc

SEQ ID NO: 746364 - RNA, 19 nt, Artificial Sequence
  Description of Artificial Sequence: Synthetic oligonucleotide
caaauguguagucauauug

SEQ ID NO: 746365 - RNA, 19 nt, Artificial Sequence
  Description of Artificial Sequence: Synthetic oligonucleotide
auagugaaccuucuugaac

SEQ ID NO: 746366 - RNA, 19 nt, Artificial Sequence
  Description of Artificial Sequence: Synthetic oligonucleotide
aauguguagucauauuggu

SEQ ID NO: 746367 - RNA, 19 nt, Artificial Sequence
  Description of Artificial Sequence: Synthetic oligonucleotide
aaugagaucucaaagcagu

SEQ ID NO: 746368 - RNA, 19 nt, Artificial Sequence
  Description of Artificial Sequence: Synthetic oligonucleotide
aacuuauuacagugacgcc

SEQ ID NO: 746369 - RNA, 19 nt, Artificial Sequence
  Description of Artificial Sequence: Synthetic oligonucleotide
uuuacaccaaguaaauggu

SEQ ID NO: 746370 - RNA, 19 nt, Artificial Sequence
  Description of Artificial Sequence: Synthetic oligonucleotide
ucaacaacuugcaaacccc

SEQ ID NO: 746371 - RNA, 19 nt, Artificial Sequence
  Description of Artificial Sequence: Synthetic oligonucleotide
aaggauaaucuaguagucg

SEQ ID NO: 746372 - RNA, 19 nt, Artificial Sequence
  Description of Artificial Sequence: Synthetic oligonucleotide
aaaccccuuacacaaaacu

SEQ ID NO: 746373 - RNA, 19 nt, Artificial Sequence
  Description of Artificial Sequence: Synthetic oligonucleotide
auuacagcggcuauagcgc

SEQ ID NO: 746374 - RNA, 19 nt, Artificial Sequence
  Description of Artificial Sequence: Synthetic oligonucleotide
augccuagaaaccuguggg

SEQ ID NO: 746375 - RNA, 19 nt, Artificial Sequence
  Description of Artificial Sequence: Synthetic oligonucleotide
caugacuagcacauuauag

SEQ ID NO: 746376 - RNA, 19 nt, Artificial Sequence
  Description of Artificial Sequence: Synthetic oligonucleotide
uucuaguacagguaagcag

SEQ ID NO: 746377 - RNA, 19 nt, Artificial Sequence
  Description of Artificial Sequence: Synthetic oligonucleotide
ugagccgcgaagauggagg

SEQ ID NO: 746378 - RNA, 19 nt, Artificial Sequence
  Description of Artificial Sequence: Synthetic oligonucleotide
ugaacuaaaaugucuaguu

SEQ ID NO: 746379 - RNA, 19 nt, Artificial Sequence
  Description of Artificial Sequence: Synthetic oligonucleotide
aaugcagaguccuaaggau

SEQ ID NO: 746380 - RNA, 19 nt, Artificial Sequence
  Description of Artificial Sequence: Synthetic oligonucleotide
agaucauauagauguuuac

SEQ ID NO: 746381 - RNA, 19 nt, Artificial Sequence
  Description of Artificial Sequence: Synthetic oligonucleotide
uugguugcuaccauaucag

SEQ ID NO: 746382 - RNA, 19 nt, Artificial Sequence
  Description of Artificial Sequence: Synthetic oligonucleotide
agaacacacaauugugaac

SEQ ID NO: 746383 - RNA, 19 nt, Artificial Sequence
  Description of Artificial Sequence: Synthetic oligonucleotide
uaagacgguaacuaaauuu

SEQ ID NO: 746384 - RNA, 19 nt, Artificial Sequence
  Description of Artificial Sequence: Synthetic oligonucleotide
uguaagacgguaacuaaau

SEQ ID NO: 746385 - RNA, 19 nt, Artificial Sequence
  Description of Artificial Sequence: Synthetic oligonucleotide
accaaguaaaugguugucc

SEQ ID NO: 746386 - RNA, 19 nt, Artificial Sequence
  Description of Artificial Sequence: Synthetic oligonucleotide
ucuaguuuugggagaaaca

SEQ ID NO: 746387 - RNA, 19 nt, Artificial Sequence
  Description of Artificial Sequence: Synthetic oligonucleotide
gucaacaacuugcaaaccc

SEQ ID NO: 746388 - RNA, 19 nt, Artificial Sequence
  Description of Artificial Sequence: Synthetic oligonucleotide
uucgugugcaccaauuugu

SEQ ID NO: 746389 - RNA, 19 nt, Artificial Sequence
  Description of Artificial Sequence: Synthetic oligonucleotide
uaaauucggccuuggagcc

SEQ ID NO: 746390 - RNA, 19 nt, Artificial Sequence
  Description of Artificial Sequence: Synthetic oligonucleotide
ucaguuguaagacgguaac

SEQ ID NO: 746391 - RNA, 19 nt, Artificial Sequence
  Description of Artificial Sequence: Synthetic oligonucleotide
aaguaaaugguuguccaca

SEQ ID NO: 746392 - RNA, 19 nt, Artificial Sequence
  Description of Artificial Sequence: Synthetic oligonucleotide
aguuuauacuuaaaguaag

SEQ ID NO: 746393 - RNA, 19 nt, Artificial Sequence
  Description of Artificial Sequence: Synthetic oligonucleotide
uaaucuaguagucgcuaug

SEQ ID NO: 746394 - RNA, 19 nt, Artificial Sequence
  Description of Artificial Sequence: Synthetic oligonucleotide
aguccuaaggauaaucuag

SEQ ID NO: 746395 - RNA, 19 nt, Artificial Sequence
  Description of Artificial Sequence: Synthetic oligonucleotide
aagauccaugacuagcaca

SEQ ID NO: 746396 - RNA, 19 nt, Artificial Sequence
  Description of Artificial Sequence: Synthetic oligonucleotide
uucaauucuacugaucauc

SEQ ID NO: 746397 - RNA, 19 nt, Artificial Sequence
  Description of Artificial Sequence: Synthetic oligonucleotide
aacgcgaggcuuuguuggc

SEQ ID NO: 746398 - RNA, 19 nt, Artificial Sequence
  Description of Artificial Sequence: Synthetic oligonucleotide
aaccccaccuugaagaauc

SEQ ID NO: 746399 - RNA, 19 nt, Artificial Sequence
  Description of Artificial Sequence: Synthetic oligonucleotide
ugacuagcacauuauaguc

SEQ ID NO: 746400 - RNA, 19 nt, Artificial Sequence
  Description of Artificial Sequence: Synthetic oligonucleotide
aacauaaguacggucuuca

SEQ ID NO: 746401 - RNA, 19 nt, Artificial Sequence
  Description of Artificial Sequence: Synthetic oligonucleotide
auccuaaagauuccauguc

SEQ ID NO: 746402 - RNA, 19 nt, Artificial Sequence
  Description of Artificial Sequence: Synthetic oligonucleotide
aaucuaguagucgcuaugu

SEQ ID NO: 746403 - RNA, 19 nt, Artificial Sequence
  Description of Artificial Sequence: Synthetic oligonucleotide
caugccuagaaaccugugg

SEQ ID NO: 746404 - RNA, 19 nt, Artificial Sequence
  Description of Artificial Sequence: Synthetic oligonucleotide
auguucaguuguaagacgg

SEQ ID NO: 746405 - RNA, 19 nt, Artificial Sequence
  Description of Artificial Sequence: Synthetic oligonucleotide
uaaggauaaucuaguaguc

SEQ ID NO: 746406 - RNA, 19 nt, Artificial Sequence
  Description of Artificial Sequence: Synthetic oligonucleotide
cauuguccaaucaaaugug

SEQ ID NO: 746407 - RNA, 19 nt, Artificial Sequence
  Description of Artificial Sequence: Synthetic oligonucleotide
uuguaagacgguaacuaaa

SEQ ID NO: 746408 - RNA, 19 nt, Artificial Sequence
  Description of Artificial Sequence: Synthetic oligonucleotide
ucuuauacaguuugcucuc

SEQ ID NO: 746409 - RNA, 19 nt, Artificial Sequence
  Description of Artificial Sequence: Synthetic oligonucleotide
auucgugugcaccaauuug

SEQ ID NO: 746410 - RNA, 19 nt, Artificial Sequence
  Description of Artificial Sequence: Synthetic oligonucleotide
augcaauagaaaaccagac

SEQ ID NO: 746411 - RNA, 19 nt, Artificial Sequence
  Description of Artificial Sequence: Synthetic oligonucleotide
agcuaacauaaguacgguc

SEQ ID NO: 746412 - RNA, 19 nt, Artificial Sequence
  Description of Artificial Sequence: Synthetic oligonucleotide
auagcgcaggaucagcauc

SEQ ID NO: 746413 - RNA, 19 nt, Artificial Sequence
  Description of Artificial Sequence: Synthetic oligonucleotide
uuagaugcuguuauuucua

SEQ ID NO: 746414 - RNA, 19 nt, Artificial Sequence
  Description of Artificial Sequence: Synthetic oligonucleotide
gucagcuaacauaaguacg

SEQ ID NO: 746415 - RNA, 19 nt, Artificial Sequence
  Description of Artificial Sequence: Synthetic oligonucleotide
aagauuccaugucgucucg

SEQ ID NO: 746416 - RNA, 19 nt, Artificial Sequence
  Description of Artificial Sequence: Synthetic oligonucleotide
aaagaauguuuuaagucaa

SEQ ID NO: 746417 - RNA, 19 nt, Artificial Sequence
  Description of Artificial Sequence: Synthetic oligonucleotide
uguuucacuaccucaguua

SEQ ID NO: 746418 - RNA, 19 nt, Artificial Sequence
  Description of Artificial Sequence: Synthetic oligonucleotide
uucaguuguaagacgguaa

SEQ ID NO: 746419 - RNA, 19 nt, Artificial Sequence
  Description of Artificial Sequence: Synthetic oligonucleotide
agcaagaacauuauagagu

SEQ ID NO: 746420 - RNA, 19 nt, Artificial Sequence
  Description of Artificial Sequence: Synthetic oligonucleotide
gaaaacccuaagaacacac

SEQ ID NO: 746421 - RNA, 19 nt, Artificial Sequence
  Description of Artificial Sequence: Synthetic oligonucleotide
uauagaguuaaugcagagu

SEQ ID NO: 746422 - RNA, 19 nt, Artificial Sequence
  Description of Artificial Sequence: Synthetic oligonucleotide
acuuaaaguaaguucuuua

SEQ ID NO: 746423 - RNA, 19 nt, Artificial Sequence
  Description of Artificial Sequence: Synthetic oligonucleotide
acauaugaacuaaaauguc

SEQ ID NO: 746424 - RNA, 19 nt, Artificial Sequence
  Description of Artificial Sequence: Synthetic oligonucleotide
gaaauugaagagaucuuca

SEQ ID NO: 746425 - RNA, 19 nt, Artificial Sequence
  Description of Artificial Sequence: Synthetic oligonucleotide
uauuggugguucagggucc

SEQ ID NO: 746426 - RNA, 19 nt, Artificial Sequence
  Description of Artificial Sequence: Synthetic oligonucleotide
ugaagacuguucaugccgu

SEQ ID NO: 746427 - RNA, 19 nt, Artificial Sequence
  Description of Artificial Sequence: Synthetic oligonucleotide
auaacuuauuacagugacg

SEQ ID NO: 746428 - RNA, 19 nt, Artificial Sequence
  Description of Artificial Sequence: Synthetic oligonucleotide
auuggcauauacaauuucu

SEQ ID NO: 746429 - RNA, 19 nt, Artificial Sequence
  Description of Artificial Sequence: Synthetic oligonucleotide
aauucgugugcaccaauuu

SEQ ID NO: 746430 - RNA, 19 nt, Artificial Sequence
  Description of Artificial Sequence: Synthetic oligonucleotide
uucacuaccucaguuaaua

SEQ ID NO: 746431 - RNA, 19 nt, Artificial Sequence
  Description of Artificial Sequence: Synthetic oligonucleotide
uuguccauaccaccguaug

SEQ ID NO: 746432 - RNA, 19 nt, Artificial Sequence
  Description of Artificial Sequence: Synthetic oligonucleotide
gauuccaugucgucucggc

SEQ ID NO: 746433 - RNA, 19 nt, Artificial Sequence
  Description of Artificial Sequence: Synthetic oligonucleotide
aguucaaaauaaaagguuu

SEQ ID NO: 746434 - RNA, 19 nt, Artificial Sequence
  Description of Artificial Sequence: Synthetic oligonucleotide
guucuuuacaccaaguaaa

SEQ ID NO: 746435 - RNA, 19 nt, Artificial Sequence
  Description of Artificial Sequence: Synthetic oligonucleotide
cuuauuacagugacgccca

SEQ ID NO: 746436 - RNA, 19 nt, Artificial Sequence
  Description of Artificial Sequence: Synthetic oligonucleotide
acccuaagaacacacaauu

SEQ ID NO: 746437 - RNA, 19 nt, Artificial Sequence
  Description of Artificial Sequence: Synthetic oligonucleotide
accccuuacacaaaacuuc

SEQ ID NO: 746438 - RNA, 19 nt, Artificial Sequence
  Description of Artificial Sequence: Synthetic oligonucleotide
ugguucuauuaaaauacau

SEQ ID NO: 746439 - RNA, 19 nt, Artificial Sequence
  Description of Artificial Sequence: Synthetic oligonucleotide
gaaacgcgaggcuuuguug

SEQ ID NO: 746440 - RNA, 19 nt, Artificial Sequence
  Description of Artificial Sequence: Synthetic oligonucleotide
gguaacuaaauuucuguga

SEQ ID NO: 746441 - RNA, 19 nt, Artificial Sequence
  Description of Artificial Sequence: Synthetic oligonucleotide
uuucuaguacagguaagca

SEQ ID NO: 746442 - RNA, 19 nt, Artificial Sequence
  Description of Artificial Sequence: Synthetic oligonucleotide
uuaagucaacaacuugcaa

SEQ ID NO: 746443 - RNA, 19 nt, Artificial Sequence
  Description of Artificial Sequence: Synthetic oligonucleotide
uucaugccuagaaaccugu

SEQ ID NO: 746444 - RNA, 19 nt, Artificial Sequence
  Description of Artificial Sequence: Synthetic oligonucleotide
agcagucuaguucaaaaua

SEQ ID NO: 746445 - RNA, 19 nt, Artificial Sequence
  Description of Artificial Sequence: Synthetic oligonucleotide
uguccauaccaccguaugu

SEQ ID NO: 746446 - RNA, 19 nt, Artificial Sequence
  Description of Artificial Sequence: Synthetic oligonucleotide
aguuguaagacgguaacua

SEQ ID NO: 746447 - RNA, 19 nt, Artificial Sequence
  Description of Artificial Sequence: Synthetic oligonucleotide
gaucgccagauaaaugucc

SEQ ID NO: 746448 - RNA, 19 nt, Artificial Sequence
  Description of Artificial Sequence: Synthetic oligonucleotide
cuaguacagguaagcaggc

SEQ ID NO: 746449 - RNA, 19 nt, Artificial Sequence
  Description of Artificial Sequence: Synthetic oligonucleotide
augaacuaaaaugucuagu

SEQ ID NO: 746450 - RNA, 19 nt, Artificial Sequence
  Description of Artificial Sequence: Synthetic oligonucleotide
gucauauuggugguucagg

SEQ ID NO: 746451 - RNA, 19 nt, Artificial Sequence
  Description of Artificial Sequence: Synthetic oligonucleotide
agugaaccuucuugaacag

SEQ ID NO: 746452 - RNA, 19 nt, Artificial Sequence
  Description of Artificial Sequence: Synthetic oligonucleotide
uguugccuuguccuguugu

SEQ ID NO: 746453 - RNA, 19 nt, Artificial Sequence
  Description of Artificial Sequence: Synthetic oligonucleotide
uguaugguauguguugccu

SEQ ID NO: 746454 - RNA, 19 nt, Artificial Sequence
  Description of Artificial Sequence: Synthetic oligonucleotide
uguugaucgccagauaaau

SEQ ID NO: 746455 - RNA, 19 nt, Artificial Sequence
  Description of Artificial Sequence: Synthetic oligonucleotide
cauuuaucuaagcaacaca

SEQ ID NO: 746456 - RNA, 19 nt, Artificial Sequence
  Description of Artificial Sequence: Synthetic oligonucleotide
auaccaccguaugugaggg

SEQ ID NO: 746457 - RNA, 19 nt, Artificial Sequence
  Description of Artificial Sequence: Synthetic oligonucleotide
aguaaaugguuguccacaa

SEQ ID NO: 746458 - RNA, 19 nt, Artificial Sequence
  Description of Artificial Sequence: Synthetic oligonucleotide
uuauacaguuugcucucgu

SEQ ID NO: 746459 - RNA, 19 nt, Artificial Sequence
  Description of Artificial Sequence: Synthetic oligonucleotide
auaugaacuaaaaugucua

SEQ ID NO: 746460 - RNA, 19 nt, Artificial Sequence
  Description of Artificial Sequence: Synthetic oligonucleotide
caaguaaaugguuguccac

SEQ ID NO: 746461 - RNA, 19 nt, Artificial Sequence
  Description of Artificial Sequence: Synthetic oligonucleotide
ugaugcuagcauaccgggc

SEQ ID NO: 746462 - RNA, 19 nt, Artificial Sequence
  Description of Artificial Sequence: Synthetic oligonucleotide
cuccacacaauucgugugc

SEQ ID NO: 746463 - RNA, 19 nt, Artificial Sequence
  Description of Artificial Sequence: Synthetic oligonucleotide
ugagaucucaaagcagucu

SEQ ID NO: 746464 - RNA, 19 nt, Artificial Sequence
  Description of Artificial Sequence: Synthetic oligonucleotide
gguucuauuaaaauacauc

SEQ ID NO: 746465 - RNA, 19 nt, Artificial Sequence
  Description of Artificial Sequence: Synthetic oligonucleotide
cuaguuuugggagaaacaa

SEQ ID NO: 746466 - RNA, 19 nt, Artificial Sequence
  Description of Artificial Sequence: Synthetic oligonucleotide
aaaugcucaaacacuggaa

SEQ ID NO: 746467 - RNA, 19 nt, Artificial Sequence
  Description of Artificial Sequence: Synthetic oligonucleotide
aaaacccuaagaacacaca

SEQ ID NO: 746468 - RNA, 19 nt, Artificial Sequence
  Description of Artificial Sequence: Synthetic oligonucleotide
auaaucuaguagucgcuau

SEQ ID NO: 746469 - RNA, 19 nt, Artificial Sequence
  Description of Artificial Sequence: Synthetic oligonucleotide
agucaacaacuugcaaacc

SEQ ID NO: 746470 - RNA, 19 nt, Artificial Sequence
  Description of Artificial Sequence: Synthetic oligonucleotide
caccaguuuguauuucccc

SEQ ID NO: 746471 - RNA, 19 nt, Artificial Sequence
  Description of Artificial Sequence: Synthetic oligonucleotide
agggauggaaaacccuaag

SEQ ID NO: 746472 - RNA, 19 nt, Artificial Sequence
  Description of Artificial Sequence: Synthetic oligonucleotide
caggcaaccgaaacgcgag

SEQ ID NO: 746473 - RNA, 19 nt, Artificial Sequence
  Description of Artificial Sequence: Synthetic oligonucleotide
ggucagcuaacauaaguac

SEQ ID NO: 746474 - RNA, 19 nt, Artificial Sequence
  Description of Artificial Sequence: Synthetic oligonucleotide
uuccgcaccaguuuguauu

SEQ ID NO: 746475 - RNA, 19 nt, Artificial Sequence
  Description of Artificial Sequence: Synthetic oligonucleotide
ucguacagcaacuggggau

SEQ ID NO: 746476 - RNA, 19 nt, Artificial Sequence
  Description of Artificial Sequence: Synthetic oligonucleotide
uguaauccggagcuuccuc

SEQ ID NO: 746477 - RNA, 19 nt, Artificial Sequence
  Description of Artificial Sequence: Synthetic oligonucleotide
ugaucgccagauaaauguc

SEQ ID NO: 746478 - RNA, 19 nt, Artificial Sequence
  Description of Artificial Sequence: Synthetic oligonucleotide
cacgacaguaauuuaagua

SEQ ID NO: 746479 - RNA, 19 nt, Artificial Sequence
  Description of Artificial Sequence: Synthetic oligonucleotide
gauccgaucuuccgcacca

SEQ ID NO: 746480 - RNA, 19 nt, Artificial Sequence
  Description of Artificial Sequence: Synthetic oligonucleotide
agaguccuaaggauaaucu

SEQ ID NO: 746481 - RNA, 19 nt, Artificial Sequence
  Description of Artificial Sequence: Synthetic oligonucleotide
ugccguucuucugaaauga

SEQ ID NO: 746482 - RNA, 19 nt, Artificial Sequence
  Description of Artificial Sequence: Synthetic oligonucleotide
aguuaaugcagaguccuaa

SEQ ID NO: 746483 - RNA, 19 nt, Artificial Sequence
  Description of Artificial Sequence: Synthetic oligonucleotide
aucuggucagcuaacauaa

SEQ ID NO: 746484 - RNA, 19 nt, Artificial Sequence
  Description of Artificial Sequence: Synthetic oligonucleotide
uguuaaccuuuaguuaacu

SEQ ID NO: 746485 - RNA, 19 nt, Artificial Sequence
  Description of Artificial Sequence: Synthetic oligonucleotide
ucuaagcaacacacauaca

SEQ ID NO: 746486 - RNA, 19 nt, Artificial Sequence
  Description of Artificial Sequence: Synthetic oligonucleotide
agccagauccgaucuuccg

SEQ ID NO: 746487 - RNA, 19 nt, Artificial Sequence
  Description of Artificial Sequence: Synthetic oligonucleotide
guauguguugccuuguccu

SEQ ID NO: 746488 - RNA, 19 nt, Artificial Sequence
  Description of Artificial Sequence: Synthetic oligonucleotide
gaaucuuauacaguuugcu

SEQ ID NO: 746489 - RNA, 19 nt, Artificial Sequence
  Description of Artificial Sequence: Synthetic oligonucleotide
ugguugcuaccauaucagc

SEQ ID NO: 746490 - RNA, 19 nt, Artificial Sequence
  Description of Artificial Sequence: Synthetic oligonucleotide
ucaaauguguagucauauu

SEQ ID NO: 746491 - RNA, 19 nt, Artificial Sequence
  Description of Artificial Sequence: Synthetic oligonucleotide
uuacaccaaguaaaugguu

SEQ ID NO: 746492 - RNA, 19 nt, Artificial Sequence
  Description of Artificial Sequence: Synthetic oligonucleotide
ugcggaauagcugccucag

SEQ ID NO: 746493 - RNA, 19 nt, Artificial Sequence
  Description of Artificial Sequence: Synthetic oligonucleotide
cuuauacaguuugcucucg

SEQ ID NO: 746494 - RNA, 19 nt, Artificial Sequence
  Description of Artificial Sequence: Synthetic oligonucleotide
ggauucuagcuucacugcc

SEQ ID NO: 746495 - RNA, 19 nt, Artificial Sequence
  Description of Artificial Sequence: Synthetic oligonucleotide
uuacagcggcuauagcgca

SEQ ID NO: 746496 - RNA, 19 nt, Artificial Sequence
  Description of Artificial Sequence: Synthetic oligonucleotide
cuaguguacauaugaacua

SEQ ID NO: 746497 - RNA, 19 nt, Artificial Sequence
  Description of Artificial Sequence: Synthetic oligonucleotide
guaauccggagcuuccuca

SEQ ID NO: 746498 - RNA, 19 nt, Artificial Sequence
  Description of Artificial Sequence: Synthetic oligonucleotide
augccguucuucugaaaug

SEQ ID NO: 746499 - RNA, 19 nt, Artificial Sequence
  Description of Artificial Sequence: Synthetic oligonucleotide
gauaaucuaguagucgcua

SEQ ID NO: 746500 - RNA, 19 nt, Artificial Sequence
  Description of Artificial Sequence: Synthetic oligonucleotide
gguccugaaaaggaugcgg

SEQ ID NO: 746501 - RNA, 19 nt, Artificial Sequence
  Description of Artificial Sequence: Synthetic oligonucleotide
gucuaguuuugggagaaac

SEQ ID NO: 746502 - RNA, 19 nt, Artificial Sequence
  Description of Artificial Sequence: Synthetic oligonucleotide
aaacuucaacaggagugga

SEQ ID NO: 746503 - RNA, 19 nt, Artificial Sequence
  Description of Artificial Sequence: Synthetic oligonucleotide
gguauguguugccuugucc

SEQ ID NO: 746504 - RNA, 19 nt, Artificial Sequence
  Description of Artificial Sequence: Synthetic oligonucleotide
agugacgcccaauacccau

SEQ ID NO: 746505 - RNA, 19 nt, Artificial Sequence
  Description of Artificial Sequence: Synthetic oligonucleotide
ucacaauuacagcggcuau

SEQ ID NO: 746506 - RNA, 19 nt, Artificial Sequence
  Description of Artificial Sequence: Synthetic oligonucleotide
acuaaauuucugugacaaa

SEQ ID NO: 746507 - RNA, 19 nt, Artificial Sequence
  Description of Artificial Sequence: Synthetic oligonucleotide
ucaugccuagaaaccugug

SEQ ID NO: 746508 - RNA, 19 nt, Artificial Sequence
  Description of Artificial Sequence: Synthetic oligonucleotide
gacgauaaauucggccuug

SEQ ID NO: 746509 - RNA, 19 nt, Artificial Sequence
  Description of Artificial Sequence: Synthetic oligonucleotide
cuauagcgcaggaucagca

SEQ ID NO: 746510 - RNA, 19 nt, Artificial Sequence
  Description of Artificial Sequence: Synthetic oligonucleotide
caauucuacugaucaucug

SEQ ID NO: 746511 - RNA, 19 nt, Artificial Sequence
  Description of Artificial Sequence: Synthetic oligonucleotide
gaugcggaauagcugccuc

SEQ ID NO: 746512 - RNA, 19 nt, Artificial Sequence
  Description of Artificial Sequence: Synthetic oligonucleotide
uccuaaggauaaucuagua

SEQ ID NO: 746513 - RNA, 19 nt, Artificial Sequence
  Description of Artificial Sequence: Synthetic oligonucleotide
caccguaugugagggaugc

SEQ ID NO: 746514 - RNA, 19 nt, Artificial Sequence
  Description of Artificial Sequence: Synthetic oligonucleotide
uacagcggcuauagcgcag

SEQ ID NO: 746515 - RNA, 19 nt, Artificial Sequence
  Description of Artificial Sequence: Synthetic oligonucleotide
augugcauugaugcuagca

SEQ ID NO: 746516 - RNA, 19 nt, Artificial Sequence
  Description of Artificial Sequence: Synthetic oligonucleotide
uacuuaaaguaaguucuuu

SEQ ID NO: 746517 - RNA, 19 nt, Artificial Sequence
  Description of Artificial Sequence: Synthetic oligonucleotide
cacccgacagaacugagga

SEQ ID NO: 746518 - RNA, 19 nt, Artificial Sequence
  Description of Artificial Sequence: Synthetic oligonucleotide
guugaucgccagauaaaug

SEQ ID NO: 746519 - RNA, 19 nt, Artificial Sequence
  Description of Artificial Sequence: Synthetic oligonucleotide
uugcucucguacagcaacu

SEQ ID NO: 746520 - RNA, 19 nt, Artificial Sequence
  Description of Artificial Sequence: Synthetic oligonucleotide
guaaaugguuguccacaac

SEQ ID NO: 746521 - RNA, 19 nt, Artificial Sequence
  Description of Artificial Sequence: Synthetic oligonucleotide
auuguccaaucaaaugugu

SEQ ID NO: 746522 - RNA, 19 nt, Artificial Sequence
  Description of Artificial Sequence: Synthetic oligonucleotide
gaguccuaaggauaaucua

SEQ ID NO: 746523 - RNA, 19 nt, Artificial Sequence
  Description of Artificial Sequence: Synthetic oligonucleotide
cauaaguacggucuucaua

SEQ ID NO: 746524 - RNA, 19 nt, Artificial Sequence
  Description of Artificial Sequence: Synthetic oligonucleotide
uaacauaaguacggucuuc

SEQ ID NO: 746525 - RNA, 19 nt, Artificial Sequence
  Description of Artificial Sequence: Synthetic oligonucleotide
caucuggucagcuaacaua

SEQ ID NO: 746526 - RNA, 19 nt, Artificial Sequence
  Description of Artificial Sequence: Synthetic oligonucleotide
ucgccagauaaaugucccc

SEQ ID NO: 746527 - RNA, 19 nt, Artificial Sequence
  Description of Artificial Sequence: Synthetic oligonucleotide
uuucacuaccucaguuaau

SEQ ID NO: 746528 - RNA, 19 nt, Artificial Sequence
  Description of Artificial Sequence: Synthetic oligonucleotide
gcuaacauaaguacggucu

SEQ ID NO: 746529 - RNA, 19 nt, Artificial Sequence
  Description of Artificial Sequence: Synthetic oligonucleotide
gccaaccccaccuugaaga

SEQ ID NO: 746530 - RNA, 19 nt, Artificial Sequence
  Description of Artificial Sequence: Synthetic oligonucleotide
ugcuaccauaucagcuggc

SEQ ID NO: 746531 - RNA, 19 nt, Artificial Sequence
  Description of Artificial Sequence: Synthetic oligonucleotide
cugguucuauuaaaauaca

SEQ ID NO: 746532 - RNA, 19 nt, Artificial Sequence
  Description of Artificial Sequence: Synthetic oligonucleotide
acgauaaauucggccuugg

SEQ ID NO: 746533 - RNA, 19 nt, Artificial Sequence
  Description of Artificial Sequence: Synthetic oligonucleotide
acagcggcuauagcgcagg

SEQ ID NO: 746534 - RNA, 19 nt, Artificial Sequence
  Description of Artificial Sequence: Synthetic oligonucleotide
caagccccgacaccucugg

SEQ ID NO: 746535 - RNA, 19 nt, Artificial Sequence
  Description of Artificial Sequence: Synthetic oligonucleotide
gccgcuuucugcuuuaaca

SEQ ID NO: 746536 - RNA, 19 nt, Artificial Sequence
  Description of Artificial Sequence: Synthetic oligonucleotide
augcuagcauaccgggcag

SEQ ID NO: 746537 - RNA, 19 nt, Artificial Sequence
  Description of Artificial Sequence: Synthetic oligonucleotide
ggcgacucugcucaauacc

SEQ ID NO: 746538 - RNA, 19 nt, Artificial Sequence
  Description of Artificial Sequence: Synthetic oligonucleotide
ucacuaccucaguuaauau

SEQ ID NO: 746539 - RNA, 19 nt, Artificial Sequence
  Description of Artificial Sequence: Synthetic oligonucleotide
gcggcuauagcgcaggauc

SEQ ID NO: 746540 - RNA, 19 nt, Artificial Sequence
  Description of Artificial Sequence: Synthetic oligonucleotide
agccguuuaaagaauguuu

SEQ ID NO: 746541 - RNA, 19 nt, Artificial Sequence
  Description of Artificial Sequence: Synthetic oligonucleotide
aguaaguucuuuacaccaa

SEQ ID NO: 746542 - RNA, 19 nt, Artificial Sequence
  Description of Artificial Sequence: Synthetic oligonucleotide
uccacccgacagaacugag

SEQ ID NO: 746543 - RNA, 19 nt, Artificial Sequence
  Description of Artificial Sequence: Synthetic oligonucleotide
gcuaguguacauaugaacu

SEQ ID NO: 746544 - RNA, 19 nt, Artificial Sequence
  Description of Artificial Sequence: Synthetic oligonucleotide
aagccccgacaccucuggg

SEQ ID NO: 746545 - RNA, 19 nt, Artificial Sequence
  Description of Artificial Sequence: Synthetic oligonucleotide
cccgacagaacugaggagc

SEQ ID NO: 746546 - RNA, 19 nt, Artificial Sequence
  Description of Artificial Sequence: Synthetic oligonucleotide
aggcaaccgaaacgcgagg

SEQ ID NO: 746547 - RNA, 19 nt, Artificial Sequence
  Description of Artificial Sequence: Synthetic oligonucleotide
cccacgacaguaauuuaag

SEQ ID NO: 746548 - RNA, 19 nt, Artificial Sequence
  Description of Artificial Sequence: Synthetic oligonucleotide
aauacccauuaggaaguua

SEQ ID NO: 746549 - RNA, 19 nt, Artificial Sequence
  Description of Artificial Sequence: Synthetic oligonucleotide
cagaguccuaaggauaauc

SEQ ID NO: 746550 - RNA, 19 nt, Artificial Sequence
  Description of Artificial Sequence: Synthetic oligonucleotide
ugucgucucggcgacucug

SEQ ID NO: 746551 - RNA, 19 nt, Artificial Sequence
  Description of Artificial Sequence: Synthetic oligonucleotide
ugacgcccaauacccauua

SEQ ID NO: 746552 - RNA, 19 nt, Artificial Sequence
  Description of Artificial Sequence: Synthetic oligonucleotide
augcggaauagcugccuca

SEQ ID NO: 746553 - RNA, 19 nt, Artificial Sequence
  Description of Artificial Sequence: Synthetic oligonucleotide
ugguauguguugccuuguc

SEQ ID NO: 746554 - RNA, 19 nt, Artificial Sequence
  Description of Artificial Sequence: Synthetic oligonucleotide
agauuccaugucgucucgg

SEQ ID NO: 746555 - RNA, 19 nt, Artificial Sequence
  Description of Artificial Sequence: Synthetic oligonucleotide
acaauucgugugcaccaau

SEQ ID NO: 746556 - RNA, 19 nt, Artificial Sequence
  Description of Artificial Sequence: Synthetic oligonucleotide
cccgacgauaaauucggcc

SEQ ID NO: 746557 - RNA, 19 nt, Artificial Sequence
  Description of Artificial Sequence: Synthetic oligonucleotide
guacggucuucauagugaa

SEQ ID NO: 746558 - RNA, 19 nt, Artificial Sequence
  Description of Artificial Sequence: Synthetic oligonucleotide
ucggcgacucugcucaaua

SEQ ID NO: 746559 - RNA, 19 nt, Artificial Sequence
  Description of Artificial Sequence: Synthetic oligonucleotide
accaccguaugugagggau

SEQ ID NO: 746560 - RNA, 19 nt, Artificial Sequence
  Description of Artificial Sequence: Synthetic oligonucleotide
gcucucguacagcaacugg

SEQ ID NO: 746561 - RNA, 19 nt, Artificial Sequence
  Description of Artificial Sequence: Synthetic oligonucleotide
ccaaucaucugcucugcug

SEQ ID NO: 746562 - RNA, 19 nt, Artificial Sequence
  Description of Artificial Sequence: Synthetic oligonucleotide
gacuagcacauuauagucu

SEQ ID NO: 746563 - RNA, 19 nt, Artificial Sequence
  Description of Artificial Sequence: Synthetic oligonucleotide
ugcucucguacagcaacug

SEQ ID NO: 746564 - RNA, 19 nt, Artificial Sequence
  Description of Artificial Sequence: Synthetic oligonucleotide
gaggcuuuguuggcguuac

SEQ ID NO: 746565 - RNA, 19 nt, Artificial Sequence
  Description of Artificial Sequence: Synthetic oligonucleotide
gccagauccgaucuuccgc

SEQ ID NO: 746566 - RNA, 19 nt, Artificial Sequence
  Description of Artificial Sequence: Synthetic oligonucleotide
cuaccucaguuaauauuca

SEQ ID NO: 746567 - RNA, 19 nt, Artificial Sequence
  Description of Artificial Sequence: Synthetic oligonucleotide
gaugugcauugaugcuagc

SEQ ID NO: 746568 - RNA, 19 nt, Artificial Sequence
  Description of Artificial Sequence: Synthetic oligonucleotide
caccaauuuguguuaaccu

SEQ ID NO: 746569 - RNA, 19 nt, Artificial Sequence
  Description of Artificial Sequence: Synthetic oligonucleotide
guccugaaaaggaugcgga

SEQ ID NO: 746570 - RNA, 19 nt, Artificial Sequence
  Description of Artificial Sequence: Synthetic oligonucleotide
ugcucgccauccugagccg

SEQ ID NO: 746571 - RNA, 19 nt, Artificial Sequence
  Description of Artificial Sequence: Synthetic oligonucleotide
agccccgacaccucuggga

SEQ ID NO: 746572 - RNA, 19 nt, Artificial Sequence
  Description of Artificial Sequence: Synthetic oligonucleotide
uccgcaccaguuuguauuu

SEQ ID NO: 746573 - RNA, 19 nt, Artificial Sequence
  Description of Artificial Sequence: Synthetic oligonucleotide
aaacaagaagccagccguu

SEQ ID NO: 746574 - RNA, 19 nt, Artificial Sequence
  Description of Artificial Sequence: Synthetic oligonucleotide
cuagcauaccgggcagugc

SEQ ID NO: 746575 - RNA, 19 nt, Artificial Sequence
  Description of Artificial Sequence: Synthetic oligonucleotide
guacagguaagcaggcaga

SEQ ID NO: 746576 - RNA, 19 nt, Artificial Sequence
  Description of Artificial Sequence: Synthetic oligonucleotide
aucuaguagucgcuauguu

SEQ ID NO: 746577 - RNA, 19 nt, Artificial Sequence
  Description of Artificial Sequence: Synthetic oligonucleotide
gacgcccaauacccauuag

SEQ ID NO: 746578 - RNA, 19 nt, Artificial Sequence
  Description of Artificial Sequence: Synthetic oligonucleotide
ccgacagaacugaggagcg

SEQ ID NO: 746579 - RNA, 19 nt, Artificial Sequence
  Description of Artificial Sequence: Synthetic oligonucleotide
uguguugccuuguccuguu

SEQ ID NO: 746580 - RNA, 19 nt, Artificial Sequence
  Description of Artificial Sequence: Synthetic oligonucleotide
cccuaagaacacacaauug

SEQ ID NO: 746581 - RNA, 19 nt, Artificial Sequence
  Description of Artificial Sequence: Synthetic oligonucleotide
gggcuguuccacccgacag

SEQ ID NO: 746582 - RNA, 19 nt, Artificial Sequence
  Description of Artificial Sequence: Synthetic oligonucleotide
caugccguucuucugaaau

SEQ ID NO: 746583 - RNA, 19 nt, Artificial Sequence
  Description of Artificial Sequence: Synthetic oligonucleotide
caguuugcucucguacagc

SEQ ID NO: 746584 - RNA, 19 nt, Artificial Sequence
  Description of Artificial Sequence: Synthetic oligonucleotide
cauauuggugguucagggu

SEQ ID NO: 746585 - RNA, 19 nt, Artificial Sequence
  Description of Artificial Sequence: Synthetic oligonucleotide
accguaugugagggaugcc

SEQ ID NO: 746586 - RNA, 19 nt, Artificial Sequence
  Description of Artificial Sequence: Synthetic oligonucleotide
auguugaucgccagauaaa

SEQ ID NO: 746587 - RNA, 19 nt, Artificial Sequence
  Description of Artificial Sequence: Synthetic oligonucleotide
auccugagccgcgaagaug

SEQ ID NO: 746588 - RNA, 19 nt, Artificial Sequence
  Description of Artificial Sequence: Synthetic oligonucleotide
ccggagcuuccucaaagcg

SEQ ID NO: 746589 - RNA, 19 nt, Artificial Sequence
  Description of Artificial Sequence: Synthetic oligonucleotide
aaccgaaacgcgaggcuuu

SEQ ID NO: 746590 - RNA, 19 nt, Artificial Sequence
  Description of Artificial Sequence: Synthetic oligonucleotide
guucaguuguaagacggua

SEQ ID NO: 746591 - RNA, 19 nt, Artificial Sequence
  Description of Artificial Sequence: Synthetic oligonucleotide
cgguaacuaaauuucugug

SEQ ID NO: 746592 - RNA, 19 nt, Artificial Sequence
  Description of Artificial Sequence: Synthetic oligonucleotide
aagcgcagcccacgacagu

SEQ ID NO: 746593 - RNA, 19 nt, Artificial Sequence
  Description of Artificial Sequence: Synthetic oligonucleotide
auggcagacugguucuauu

SEQ ID NO: 746594 - RNA, 19 nt, Artificial Sequence
  Description of Artificial Sequence: Synthetic oligonucleotide
ucuuccgcaccaguuugua

SEQ ID NO: 746595 - RNA, 19 nt, Artificial Sequence
  Description of Artificial Sequence: Synthetic oligonucleotide
agguaagcaggcagagucu

SEQ ID NO: 746596 - RNA, 19 nt, Artificial Sequence
  Description of Artificial Sequence: Synthetic oligonucleotide
ugugccgcuuucugcuuua

SEQ ID NO: 746597 - RNA, 19 nt, Artificial Sequence
  Description of Artificial Sequence: Synthetic oligonucleotide
ggcaaccgaaacgcgaggc

SEQ ID NO: 746598 - RNA, 19 nt, Artificial Sequence
  Description of Artificial Sequence: Synthetic oligonucleotide
uaccgggcagugccaguga

SEQ ID NO: 746599 - RNA, 19 nt, Artificial Sequence
  Description of Artificial Sequence: Synthetic oligonucleotide
ccacccgacagaacugagg

SEQ ID NO: 746600 - RNA, 19 nt, Artificial Sequence
  Description of Artificial Sequence: Synthetic oligonucleotide
cugagccgcgaagauggag

SEQ ID NO: 746601 - RNA, 19 nt, Artificial Sequence
  Description of Artificial Sequence: Synthetic oligonucleotide
guccuaaggauaaucuagu

SEQ ID NO: 746602 - RNA, 19 nt, Artificial Sequence
  Description of Artificial Sequence: Synthetic oligonucleotide
ggaauagcugccucagaua

SEQ ID NO: 746603 - RNA, 19 nt, Artificial Sequence
  Description of Artificial Sequence: Synthetic oligonucleotide
gcuauagcgcaggaucagc

SEQ ID NO: 746604 - RNA, 19 nt, Artificial Sequence
  Description of Artificial Sequence: Synthetic oligonucleotide
cagauccgaucuuccgcac

SEQ ID NO: 746605 - RNA, 19 nt, Artificial Sequence
  Description of Artificial Sequence: Synthetic oligonucleotide
cuaacauaaguacggucuu

SEQ ID NO: 746606 - RNA, 19 nt, Artificial Sequence
  Description of Artificial Sequence: Synthetic oligonucleotide
cugcugacccugcccacug

SEQ ID NO: 746607 - RNA, 19 nt, Artificial Sequence
  Description of Artificial Sequence: Synthetic oligonucleotide
uacauguaauccggagcuu

SEQ ID NO: 746608 - RNA, 19 nt, Artificial Sequence
  Description of Artificial Sequence: Synthetic oligonucleotide
ccaaucaaauguguaguca

SEQ ID NO: 746609 - RNA, 19 nt, Artificial Sequence
  Description of Artificial Sequence: Synthetic oligonucleotide
ccagauccgaucuuccgca

SEQ ID NO: 746610 - RNA, 19 nt, Artificial Sequence
  Description of Artificial Sequence: Synthetic oligonucleotide
uucggccuuggagccacug

SEQ ID NO: 746611 - RNA, 19 nt, Artificial Sequence
  Description of Artificial Sequence: Synthetic oligonucleotide
ucaugccguucuucugaaa

SEQ ID NO: 746612 - RNA, 19 nt, Artificial Sequence
  Description of Artificial Sequence: Synthetic oligonucleotide
accgaaacgcgaggcuuug

SEQ ID NO: 746613 - RNA, 19 nt, Artificial Sequence
  Description of Artificial Sequence: Synthetic oligonucleotide
gcuagcauaccgggcagug

SEQ ID NO: 746614 - RNA, 19 nt, Artificial Sequence
  Description of Artificial Sequence: Synthetic oligonucleotide
guguagucauauugguggu

SEQ ID NO: 746615 - RNA, 19 nt, Artificial Sequence
  Description of Artificial Sequence: Synthetic oligonucleotide
ggcuauagcgcaggaucag

SEQ ID NO: 746616 - RNA, 19 nt, Artificial Sequence
  Description of Artificial Sequence: Synthetic oligonucleotide
gcuugcaaacaagaagcca

SEQ ID NO: 746617 - RNA, 19 nt, Artificial Sequence
  Description of Artificial Sequence: Synthetic oligonucleotide
ggcagacugguucuauuaa

SEQ ID NO: 746618 - RNA, 19 nt, Artificial Sequence
  Description of Artificial Sequence: Synthetic oligonucleotide
ccgacgauaaauucggccu

SEQ ID NO: 746619 - RNA, 19 nt, Artificial Sequence
  Description of Artificial Sequence: Synthetic oligonucleotide
gcauugaugcuagcauacc

SEQ ID NO: 746620 - RNA, 19 nt, Artificial Sequence
  Description of Artificial Sequence: Synthetic oligonucleotide
guaagacgguaacuaaauu

SEQ ID NO: 746621 - RNA, 19 nt, Artificial Sequence
  Description of Artificial Sequence: Synthetic oligonucleotide
ugcuagcauaccgggcagu

SEQ ID NO: 746622 - RNA, 19 nt, Artificial Sequence
  Description of Artificial Sequence: Synthetic oligonucleotide
ccccuuacacaaaacuuca

SEQ ID NO: 746623 - RNA, 19 nt, Artificial Sequence
  Description of Artificial Sequence: Synthetic oligonucleotide
cacuaccucaguuaauauu

SEQ ID NO: 746624 - RNA, 19 nt, Artificial Sequence
  Description of Artificial Sequence: Synthetic oligonucleotide
agccgcgaagauggaggcg

SEQ ID NO: 746625 - RNA, 19 nt, Artificial Sequence
  Description of Artificial Sequence: Synthetic oligonucleotide
cacaauuacagcggcuaua

SEQ ID NO: 746626 - RNA, 19 nt, Artificial Sequence
  Description of Artificial Sequence: Synthetic oligonucleotide
guaugguauguguugccuu

SEQ ID NO: 746627 - RNA, 19 nt, Artificial Sequence
  Description of Artificial Sequence: Synthetic oligonucleotide
uaccaccguaugugaggga

SEQ ID NO: 746628 - RNA, 19 nt, Artificial Sequence
  Description of Artificial Sequence: Synthetic oligonucleotide
cguacagcaacuggggaug

SEQ ID NO: 746629 - RNA, 19 nt, Artificial Sequence
  Description of Artificial Sequence: Synthetic oligonucleotide
ccuaaagauuccaugucgu

SEQ ID NO: 746630 - RNA, 19 nt, Artificial Sequence
  Description of Artificial Sequence: Synthetic oligonucleotide
cauguuucacuaccucagu

SEQ ID NO: 746631 - RNA, 19 nt, Artificial Sequence
  Description of Artificial Sequence: Synthetic oligonucleotide
cccgaaggagccagauccg

SEQ ID NO: 746632 - RNA, 19 nt, Artificial Sequence
  Description of Artificial Sequence: Synthetic oligonucleotide
gccauccugagccgcgaag

SEQ ID NO: 746633 - RNA, 19 nt, Artificial Sequence
  Description of Artificial Sequence: Synthetic oligonucleotide
gaguuaaugcagaguccua

SEQ ID NO: 746634 - RNA, 19 nt, Artificial Sequence
  Description of Artificial Sequence: Synthetic oligonucleotide
ccguucuucugaaaugaga

SEQ ID NO: 746635 - RNA, 19 nt, Artificial Sequence
  Description of Artificial Sequence: Synthetic oligonucleotide
cgcccaauacccauuagga

SEQ ID NO: 746636 - RNA, 19 nt, Artificial Sequence
  Description of Artificial Sequence: Synthetic oligonucleotide
guguugccuuguccuguug

SEQ ID NO: 746637 - RNA, 19 nt, Artificial Sequence
  Description of Artificial Sequence: Synthetic oligonucleotide
caauucgugugcaccaauu

SEQ ID NO: 746638 - RNA, 19 nt, Artificial Sequence
  Description of Artificial Sequence: Synthetic oligonucleotide
gccagccguuuaaagaaug

SEQ ID NO: 746639 - RNA, 19 nt, Artificial Sequence
  Description of Artificial Sequence: Synthetic oligonucleotide
gcccaauacccauuaggaa

SEQ ID NO: 746640 - RNA, 19 nt, Artificial Sequence
  Description of Artificial Sequence: Synthetic oligonucleotide
gcaggcaaccgaaacgcga

SEQ ID NO: 746641 - RNA, 19 nt, Artificial Sequence
  Description of Artificial Sequence: Synthetic oligonucleotide
augucgucucggcgacucu

SEQ ID NO: 746642 - RNA, 19 nt, Artificial Sequence
  Description of Artificial Sequence: Synthetic oligonucleotide
agcggcuauagcgcaggau

SEQ ID NO: 746643 - RNA, 19 nt, Artificial Sequence
  Description of Artificial Sequence: Synthetic oligonucleotide
agcccacgacaguaauuua

SEQ ID NO: 746644 - RNA, 19 nt, Artificial Sequence
  Description of Artificial Sequence: Synthetic oligonucleotide
cacaauucgugugcaccaa

SEQ ID NO: 746645 - RNA, 19 nt, Artificial Sequence
  Description of Artificial Sequence: Synthetic oligonucleotide
uguccggggccaguuuaua

SEQ ID NO: 746646 - RNA, 19 nt, Artificial Sequence
  Description of Artificial Sequence: Synthetic oligonucleotide
gcccacgacaguaauuuaa

SEQ ID NO: 746647 - RNA, 19 nt, Artificial Sequence
  Description of Artificial Sequence: Synthetic oligonucleotide
cagugacgcccaauaccca

SEQ ID NO: 746648 - RNA, 19 nt, Artificial Sequence
  Description of Artificial Sequence: Synthetic oligonucleotide
gccguucuucugaaaugag

SEQ ID NO: 746649 - RNA, 19 nt, Artificial Sequence
  Description of Artificial Sequence: Synthetic oligonucleotide
cagcccacgacaguaauuu

SEQ ID NO: 746650 - RNA, 19 nt, Artificial Sequence
  Description of Artificial Sequence: Synthetic oligonucleotide
ugcaaaccccagggaugga

SEQ ID NO: 746651 - RNA, 19 nt, Artificial Sequence
  Description of Artificial Sequence: Synthetic oligonucleotide
ccagauaaauguccccgaa

SEQ ID NO: 746652 - RNA, 19 nt, Artificial Sequence
  Description of Artificial Sequence: Synthetic oligonucleotide
ccguuuaaagaauguuuua

SEQ ID NO: 746653 - RNA, 19 nt, Artificial Sequence
  Description of Artificial Sequence: Synthetic oligonucleotide
caguuguaagacgguaacu

SEQ ID NO: 746654 - RNA, 19 nt, Artificial Sequence
  Description of Artificial Sequence: Synthetic oligonucleotide
agccagccguuuaaagaau

SEQ ID NO: 746655 - RNA, 19 nt, Artificial Sequence
  Description of Artificial Sequence: Synthetic oligonucleotide
ggggcuguuccacccgaca

SEQ ID NO: 746656 - RNA, 19 nt, Artificial Sequence
  Description of Artificial Sequence: Synthetic oligonucleotide
cuaccauaucagcuggcuu

SEQ ID NO: 746657 - RNA, 19 nt, Artificial Sequence
  Description of Artificial Sequence: Synthetic oligonucleotide
ccaccguaugugagggaug

SEQ ID NO: 746658 - RNA, 19 nt, Artificial Sequence
  Description of Artificial Sequence: Synthetic oligonucleotide
gccccgacaccucugggaa

SEQ ID NO: 746659 - RNA, 19 nt, Artificial Sequence
  Description of Artificial Sequence: Synthetic oligonucleotide
gcaaccgaaacgcgaggcu

SEQ ID NO: 746660 - RNA, 19 nt, Artificial Sequence
  Description of Artificial Sequence: Synthetic oligonucleotide
ccauccugagccgcgaaga

SEQ ID NO: 746661 - RNA, 19 nt, Artificial Sequence
  Description of Artificial Sequence: Synthetic oligonucleotide
cguaugugagggaugccaa

SEQ ID NO: 746662 - RNA, 19 nt, Artificial Sequence
  Description of Artificial Sequence: Synthetic oligonucleotide
cagcuaacauaaguacggu

SEQ ID NO: 746663 - RNA, 19 nt, Artificial Sequence
  Description of Artificial Sequence: Synthetic oligonucleotide
accccaccuugaagaaucu

SEQ ID NO: 746664 - RNA, 19 nt, Artificial Sequence
  Description of Artificial Sequence: Synthetic oligonucleotide
caaccgaaacgcgaggcuu

SEQ ID NO: 746665 - RNA, 19 nt, Artificial Sequence
  Description of Artificial Sequence: Synthetic oligonucleotide
augcuguccggggccaguu

SEQ ID NO: 746666 - RNA, 19 nt, Artificial Sequence
  Description of Artificial Sequence: Synthetic oligonucleotide
ccgcgaagauggaggcggg

SEQ ID NO: 746667 - RNA, 19 nt, Artificial Sequence
  Description of Artificial Sequence: Synthetic oligonucleotide
cauccugagccgcgaagau

SEQ ID NO: 746668 - RNA, 19 nt, Artificial Sequence
  Description of Artificial Sequence: Synthetic oligonucleotide
cuuccgcaccaguuuguau

SEQ ID NO: 746669 - RNA, 19 nt, Artificial Sequence
  Description of Artificial Sequence: Synthetic oligonucleotide
cgcggcaggcaaccgaaac

SEQ ID NO: 746670 - RNA, 19 nt, Artificial Sequence
  Description of Artificial Sequence: Synthetic oligonucleotide
ggagcgcggcaggcaaccg

SEQ ID NO: 746671 - RNA, 19 nt, Artificial Sequence
  Description of Artificial Sequence: Synthetic oligonucleotide
cagccguuuaaagaauguu

SEQ ID NO: 746672 - RNA, 19 nt, Artificial Sequence
  Description of Artificial Sequence: Synthetic oligonucleotide
ccagccguuuaaagaaugu

SEQ ID NO: 746673 - RNA, 19 nt, Artificial Sequence
  Description of Artificial Sequence: Synthetic oligonucleotide
cggcuauagcgcaggauca

SEQ ID NO: 746674 - RNA, 19 nt, Artificial Sequence
  Description of Artificial Sequence: Synthetic oligonucleotide
ccccgacgauaaauucggc

SEQ ID NO: 746675 - RNA, 19 nt, Artificial Sequence
  Description of Artificial Sequence: Synthetic oligonucleotide
gcggaauagcugccucaga

SEQ ID NO: 746676 - RNA, 19 nt, Artificial Sequence
  Description of Artificial Sequence: Synthetic oligonucleotide
cuuccucgccauuggugau

SEQ ID NO: 746677 - RNA, 19 nt, Artificial Sequence
  Description of Artificial Sequence: Synthetic oligonucleotide
cggaauagcugccucagau

SEQ ID NO: 746678 - RNA, 19 nt, Artificial Sequence
  Description of Artificial Sequence: Synthetic oligonucleotide
ccacgacaguaauuuaagu

SEQ ID NO: 746679 - RNA, 19 nt, Artificial Sequence
  Description of Artificial Sequence: Synthetic oligonucleotide
ccaucacaacuguggcuga

SEQ ID NO: 746680 - RNA, 19 nt, Artificial Sequence
  Description of Artificial Sequence: Synthetic oligonucleotide
cggcgacucugcucaauac

SEQ ID NO: 746681 - RNA, 19 nt, Artificial Sequence
  Description of Artificial Sequence: Synthetic oligonucleotide
cagcggcuauagcgcagga

SEQ ID NO: 746682 - RNA, 19 nt, Artificial Sequence
  Description of Artificial Sequence: Synthetic oligonucleotide
ccgaaggagccagauccga

SEQ ID NO: 746683 - RNA, 19 nt, Artificial Sequence
  Description of Artificial Sequence: Synthetic oligonucleotide
cccagggauggaaaacccu

SEQ ID NO: 746684 - RNA, 19 nt, Artificial Sequence
  Description of Artificial Sequence: Synthetic oligonucleotide
cgcgaagauggaggcgggg

SEQ ID NO: 746685 - RNA, 19 nt, Artificial Sequence
  Description of Artificial Sequence: Synthetic oligonucleotide
caaccccaccuugaagaau

SEQ ID NO: 746686 - RNA, 19 nt, Artificial Sequence
  Description of Artificial Sequence: Synthetic oligonucleotide
caauacccauuaggaaguu

SEQ ID NO: 746687 - RNA, 19 nt, Artificial Sequence
  Description of Artificial Sequence: Synthetic oligonucleotide
cgaaacgcgaggcuuuguu

SEQ ID NO: 746688 - RNA, 19 nt, Artificial Sequence
  Description of Artificial Sequence: Synthetic oligonucleotide
ccugagccgcgaagaugga

SEQ ID NO: 746689 - RNA, 19 nt, Artificial Sequence
  Description of Artificial Sequence: Synthetic oligonucleotide
cgacgauaaauucggccuu

SEQ ID NO: 746690 - RNA, 19 nt, Artificial Sequence
  Description of Artificial Sequence: Synthetic oligonucleotide
cucggcgacucugcucaau

SEQ ID NO: 746691 - RNA, 19 nt, Artificial Sequence
  Description of Artificial Sequence: Synthetic oligonucleotide
gcgcagcccacgacaguaa

SEQ ID NO: 746692 - RNA, 19 nt, Artificial Sequence
  Description of Artificial Sequence: Synthetic oligonucleotide
ccgaaacgcgaggcuuugu

SEQ ID NO: 746693 - RNA, 19 nt, Artificial Sequence
  Description of Artificial Sequence: Synthetic oligonucleotide
auuuacuucgaauaauccc

SEQ ID NO: 746694 - RNA, 19 nt, Artificial Sequence
  Description of Artificial Sequence: Synthetic oligonucleotide
uuuacuucgaauaaucccu

SEQ ID NO: 746695 - RNA, 19 nt, Artificial Sequence
  Description of Artificial Sequence: Synthetic oligonucleotide
gaaauaagcaacuccaagc

SEQ ID NO: 746696 - RNA, 19 nt, Artificial Sequence
  Description of Artificial Sequence: Synthetic oligonucleotide
ucagauaagaaauccaaca

SEQ ID NO: 746697 - RNA, 19 nt, Artificial Sequence
  Description of Artificial Sequence: Synthetic oligonucleotide
ucgaauaaucccuuguacg

SEQ ID NO: 746698 - RNA, 19 nt, Artificial Sequence
  Description of Artificial Sequence: Synthetic oligonucleotide
auaaaucuuccucccaucc

SEQ ID NO: 746699 - RNA, 19 nt, Artificial Sequence
  Description of Artificial Sequence: Synthetic oligonucleotide
uauuacauugcacaaacau

SEQ ID NO: 746700 - RNA, 19 nt, Artificial Sequence
  Description of Artificial Sequence: Synthetic oligonucleotide
uuaccaaggacucuggccc

SEQ ID NO: 746701 - RNA, 19 nt, Artificial Sequence
  Description of Artificial Sequence: Synthetic oligonucleotide
cacuuuagaaugaagacac

SEQ ID NO: 746702 - RNA, 19 nt, Artificial Sequence
  Description of Artificial Sequence: Synthetic oligonucleotide
gaaucugaggaucuauggg

SEQ ID NO: 746703 - RNA, 19 nt, Artificial Sequence
  Description of Artificial Sequence: Synthetic oligonucleotide
gacuccaauagcaucaugg

SEQ ID NO: 746704 - RNA, 19 nt, Artificial Sequence
  Description of Artificial Sequence: Synthetic oligonucleotide
ucuaagauaaggagucaag

SEQ ID NO: 746705 - RNA, 19 nt, Artificial Sequence
  Description of Artificial Sequence: Synthetic oligonucleotide
agauaagaaauccaacaug

SEQ ID NO: 746706 - RNA, 19 nt, Artificial Sequence
  Description of Artificial Sequence: Synthetic oligonucleotide
agaaucugaggaucuaugg

SEQ ID NO: 746707 - RNA, 19 nt, Artificial Sequence
  Description of Artificial Sequence: Synthetic oligonucleotide
acuccaauagcaucauggc

SEQ ID NO: 746708 - RNA, 19 nt, Artificial Sequence
  Description of Artificial Sequence: Synthetic oligonucleotide
acuuccaagggcuaucagg

SEQ ID NO: 746709 - RNA, 19 nt, Artificial Sequence
  Description of Artificial Sequence: Synthetic oligonucleotide
agaauuuguguacuuagca

SEQ ID NO: 746710 - RNA, 19 nt, Artificial Sequence
  Description of Artificial Sequence: Synthetic oligonucleotide
aacuccauuagggaaccgc

SEQ ID NO: 746711 - RNA, 19 nt, Artificial Sequence
  Description of Artificial Sequence: Synthetic oligonucleotide
aguaucguacuccaacagg

SEQ ID NO: 746712 - RNA, 19 nt, Artificial Sequence
  Description of Artificial Sequence: Synthetic oligonucleotide
uuuacuguggaggaagaag

SEQ ID NO: 746713 - RNA, 19 nt, Artificial Sequence
  Description of Artificial Sequence: Synthetic oligonucleotide
ugaggauuuacuucgaaua

SEQ ID NO: 746714 - RNA, 19 nt, Artificial Sequence
  Description of Artificial Sequence: Synthetic oligonucleotide
cauuucggguuuuacaagg

SEQ ID NO: 746715 - RNA, 19 nt, Artificial Sequence
  Description of Artificial Sequence: Synthetic oligonucleotide
uauucucacacaucucacg

SEQ ID NO: 746716 - RNA, 19 nt, Artificial Sequence
  Description of Artificial Sequence: Synthetic oligonucleotide
uauaccguggcacaaacuu

SEQ ID NO: 746717 - RNA, 19 nt, Artificial Sequence
  Description of Artificial Sequence: Synthetic oligonucleotide
ucuaggaccaggcuauacc

SEQ ID NO: 746718 - RNA, 19 nt, Artificial Sequence
  Description of Artificial Sequence: Synthetic oligonucleotide
cauuacaucaacaggucac

SEQ ID NO: 746719 - RNA, 19 nt, Artificial Sequence
  Description of Artificial Sequence: Synthetic oligonucleotide
aauugucgcagcagcaacc

SEQ ID NO: 746720 - RNA, 19 nt, Artificial Sequence
  Description of Artificial Sequence: Synthetic oligonucleotide
aauccccuacucuaaucac

SEQ ID NO: 746721 - RNA, 19 nt, Artificial Sequence
  Description of Artificial Sequence: Synthetic oligonucleotide
acagggauaaagcuauguc

SEQ ID NO: 746722 - RNA, 19 nt, Artificial Sequence
  Description of Artificial Sequence: Synthetic oligonucleotide
aggagguagucacagaaag

SEQ ID NO: 746723 - RNA, 19 nt, Artificial Sequence
  Description of Artificial Sequence: Synthetic oligonucleotide
aucauuucggguuuuacaa

SEQ ID NO: 746724 - RNA, 19 nt, Artificial Sequence
  Description of Artificial Sequence: Synthetic oligonucleotide
aucguacuccaacaggcgc

SEQ ID NO: 746725 - RNA, 19 nt, Artificial Sequence
  Description of Artificial Sequence: Synthetic oligonucleotide
ugugggucuaagauaagga

SEQ ID NO: 746726 - RNA, 19 nt, Artificial Sequence
  Description of Artificial Sequence: Synthetic oligonucleotide
gauauugucaggaaaucca

SEQ ID NO: 746727 - RNA, 19 nt, Artificial Sequence
  Description of Artificial Sequence: Synthetic oligonucleotide
uucggguuuuacaagggcc

SEQ ID NO: 746728 - RNA, 19 nt, Artificial Sequence
  Description of Artificial Sequence: Synthetic oligonucleotide
cuaggaccaggcuauaccg

SEQ ID NO: 746729 - RNA, 19 nt, Artificial Sequence
  Description of Artificial Sequence: Synthetic oligonucleotide
aguccuacagaauuugugu

SEQ ID NO: 746730 - RNA, 19 nt, Artificial Sequence
  Description of Artificial Sequence: Synthetic oligonucleotide
uucgaauaaucccuuguac

SEQ ID NO: 746731 - RNA, 19 nt, Artificial Sequence
  Description of Artificial Sequence: Synthetic oligonucleotide
guagguucaucauuucggg

SEQ ID NO: 746732 - RNA, 19 nt, Artificial Sequence
  Description of Artificial Sequence: Synthetic oligonucleotide
cuaagauaaggagucaagc

SEQ ID NO: 746733 - RNA, 19 nt, Artificial Sequence
  Description of Artificial Sequence: Synthetic oligonucleotide
aaaccuucacuucucuugu

SEQ ID NO: 746734 - RNA, 19 nt, Artificial Sequence
  Description of Artificial Sequence: Synthetic oligonucleotide
aauuaagaccaguguauaa

SEQ ID NO: 746735 - RNA, 19 nt, Artificial Sequence
  Description of Artificial Sequence: Synthetic oligonucleotide
ugacaaguauaugaaaucu

SEQ ID NO: 746736 - RNA, 19 nt, Artificial Sequence
  Description of Artificial Sequence: Synthetic oligonucleotide
uagacucuucuuauccugg

SEQ ID NO: 746737 - RNA, 19 nt, Artificial Sequence
  Description of Artificial Sequence: Synthetic oligonucleotide
ucucuuaauaaaaggcuuc

SEQ ID NO: 746738 - RNA, 19 nt, Artificial Sequence
  Description of Artificial Sequence: Synthetic oligonucleotide
aauaaucccuuguacgcau

SEQ ID NO: 746739 - RNA, 19 nt, Artificial Sequence
  Description of Artificial Sequence: Synthetic oligonucleotide
uaucguacuccaacaggcg

SEQ ID NO: 746740 - RNA, 19 nt, Artificial Sequence
  Description of Artificial Sequence: Synthetic oligonucleotide
uccccgauauuuaccaagg

SEQ ID NO: 746741 - RNA, 19 nt, Artificial Sequence
  Description of Artificial Sequence: Synthetic oligonucleotide
auauuuaccaaggacucug

SEQ ID NO: 746742 - RNA, 19 nt, Artificial Sequence
  Description of Artificial Sequence: Synthetic oligonucleotide
ugagugugaugauuccugg

SEQ ID NO: 746743 - RNA, 19 nt, Artificial Sequence
  Description of Artificial Sequence: Synthetic oligonucleotide
aauccaggcauguucucca

SEQ ID NO: 746744 - RNA, 19 nt, Artificial Sequence
  Description of Artificial Sequence: Synthetic oligonucleotide
auagcuaauccccuacucu

SEQ ID NO: 746745 - RNA, 19 nt, Artificial Sequence
  Description of Artificial Sequence: Synthetic oligonucleotide
aguuucagcuugcaugauc

SEQ ID NO: 746746 - RNA, 19 nt, Artificial Sequence
  Description of Artificial Sequence: Synthetic oligonucleotide
auagacucuucuuauccug

SEQ ID NO: 746747 - RNA, 19 nt, Artificial Sequence
  Description of Artificial Sequence: Synthetic oligonucleotide
caaauagccuuucugcuug

SEQ ID NO: 746748 - RNA, 19 nt, Artificial Sequence
  Description of Artificial Sequence: Synthetic oligonucleotide
uugugggucuaagauaagg

SEQ ID NO: 746749 - RNA, 19 nt, Artificial Sequence
  Description of Artificial Sequence: Synthetic oligonucleotide
acucuaaucaccaaacccu

SEQ ID NO: 746750 - RNA, 19 nt, Artificial Sequence
  Description of Artificial Sequence: Synthetic oligonucleotide
guacgcaucaaccacaaaa

SEQ ID NO: 746751 - RNA, 19 nt, Artificial Sequence
  Description of Artificial Sequence: Synthetic oligonucleotide
cuugcaugaucccagccag

SEQ ID NO: 746752 - RNA, 19 nt, Artificial Sequence
  Description of Artificial Sequence: Synthetic oligonucleotide
uaccguggcacaaacuuca

SEQ ID NO: 746753 - RNA, 19 nt, Artificial Sequence
  Description of Artificial Sequence: Synthetic oligonucleotide
uuugguugcagaacgccaa

SEQ ID NO: 746754 - RNA, 19 nt, Artificial Sequence
  Description of Artificial Sequence: Synthetic oligonucleotide
guaucguacuccaacaggc

SEQ ID NO: 746755 - RNA, 19 nt, Artificial Sequence
  Description of Artificial Sequence: Synthetic oligonucleotide
gucgcaacuuuguauuugg

SEQ ID NO: 746756 - RNA, 19 nt, Artificial Sequence
  Description of Artificial Sequence: Synthetic oligonucleotide
agacucuucuuauccuggc

SEQ ID NO: 746757 - RNA, 19 nt, Artificial Sequence
  Description of Artificial Sequence: Synthetic oligonucleotide
auugucgcagcagcaaccc

SEQ ID NO: 746758 - RNA, 19 nt, Artificial Sequence
  Description of Artificial Sequence: Synthetic oligonucleotide
ucauuucggguuuuacaag

SEQ ID NO: 746759 - RNA, 19 nt, Artificial Sequence
  Description of Artificial Sequence: Synthetic oligonucleotide
cacaguaucguacuccaac

SEQ ID NO: 746760 - RNA, 19 nt, Artificial Sequence
  Description of Artificial Sequence: Synthetic oligonucleotide
aacaggucacuacucacau

SEQ ID NO: 746761 - RNA, 19 nt, Artificial Sequence
  Description of Artificial Sequence: Synthetic oligonucleotide
caaaauuaagaccagugua

SEQ ID NO: 746762 - RNA, 19 nt, Artificial Sequence
  Description of Artificial Sequence: Synthetic oligonucleotide
agggaaccgcaacuggucc

SEQ ID NO: 746763 - RNA, 19 nt, Artificial Sequence
  Description of Artificial Sequence: Synthetic oligonucleotide
cagaauuuguguacuuagc

SEQ ID NO: 746764 - RNA, 19 nt, Artificial Sequence
  Description of Artificial Sequence: Synthetic oligonucleotide
uccuacagaauuuguguac

SEQ ID NO: 746765 - RNA, 19 nt, Artificial Sequence
  Description of Artificial Sequence: Synthetic oligonucleotide
uccaucgugcucaugggcu

SEQ ID NO: 746766 - RNA, 19 nt, Artificial Sequence
  Description of Artificial Sequence: Synthetic oligonucleotide
caagcuuauuacauugcac

SEQ ID NO: 746767 - RNA, 19 nt, Artificial Sequence
  Description of Artificial Sequence: Synthetic oligonucleotide
uacucccgcacuuccaagg

SEQ ID NO: 746768 - RNA, 19 nt, Artificial Sequence
  Description of Artificial Sequence: Synthetic oligonucleotide
agaacgccaaacaucaaag

SEQ ID NO: 746769 - RNA, 19 nt, Artificial Sequence
  Description of Artificial Sequence: Synthetic oligonucleotide
ucggguuuuacaagggccu

SEQ ID NO: 746770 - RNA, 19 nt, Artificial Sequence
  Description of Artificial Sequence: Synthetic oligonucleotide
ucguacuccaacaggcgcc

SEQ ID NO: 746771 - RNA, 19 nt, Artificial Sequence
  Description of Artificial Sequence: Synthetic oligonucleotide
cuuccaagggcuaucagga

SEQ ID NO: 746772 - RNA, 19 nt, Artificial Sequence
  Description of Artificial Sequence: Synthetic oligonucleotide
uccccuacucuaaucacca

SEQ ID NO: 746773 - RNA, 19 nt, Artificial Sequence
  Description of Artificial Sequence: Synthetic oligonucleotide
gagguagucacagaaagaa

SEQ ID NO: 746774 - RNA, 19 nt, Artificial Sequence
  Description of Artificial Sequence: Synthetic oligonucleotide
cacgaauugucgcagcagc

SEQ ID NO: 746775 - RNA, 19 nt, Artificial Sequence
  Description of Artificial Sequence: Synthetic oligonucleotide
ugucacaguaucguacucc

SEQ ID NO: 746776 - RNA, 19 nt, Artificial Sequence
  Description of Artificial Sequence: Synthetic oligonucleotide
auccccgauauuuaccaag

SEQ ID NO: 746777 - RNA, 19 nt, Artificial Sequence
  Description of Artificial Sequence: Synthetic oligonucleotide
ugauuccuggcaugcacag

SEQ ID NO: 746778 - RNA, 19 nt, Artificial Sequence
  Description of Artificial Sequence: Synthetic oligonucleotide
agggauaaagcuaugucca

SEQ ID NO: 746779 - RNA, 19 nt, Artificial Sequence
  Description of Artificial Sequence: Synthetic oligonucleotide
agguucaucauuucggguu

SEQ ID NO: 746780 - RNA, 19 nt, Artificial Sequence
  Description of Artificial Sequence: Synthetic oligonucleotide
ucaacaggucacuacucac

SEQ ID NO: 746781 - RNA, 19 nt, Artificial Sequence
  Description of Artificial Sequence: Synthetic oligonucleotide
uuagcacgaauugucgcag

SEQ ID NO: 746782 - RNA, 19 nt, Artificial Sequence
  Description of Artificial Sequence: Synthetic oligonucleotide
agaaaggucccugcauagc

SEQ ID NO: 746783 - RNA, 19 nt, Artificial Sequence
  Description of Artificial Sequence: Synthetic oligonucleotide
ccaagaaauaagcaacucc

SEQ ID NO: 746784 - RNA, 19 nt, Artificial Sequence
  Description of Artificial Sequence: Synthetic oligonucleotide
guuagcacgaauugucgca

SEQ ID NO: 746785 - RNA, 19 nt, Artificial Sequence
  Description of Artificial Sequence: Synthetic oligonucleotide
auauugucaggaaauccag

SEQ ID NO: 746786 - RNA, 19 nt, Artificial Sequence
  Description of Artificial Sequence: Synthetic oligonucleotide
gaauugucgcagcagcaac

SEQ ID NO: 746787 - RNA, 19 nt, Artificial Sequence
  Description of Artificial Sequence: Synthetic oligonucleotide
guugaacuccauuagggaa

SEQ ID NO: 746788 - RNA, 19 nt, Artificial Sequence
  Description of Artificial Sequence: Synthetic oligonucleotide
aaguccacguauucucaca

SEQ ID NO: 746789 - RNA, 19 nt, Artificial Sequence
  Description of Artificial Sequence: Synthetic oligonucleotide
acauugcacaaacauuaca

SEQ ID NO: 746790 - RNA, 19 nt, Artificial Sequence
  Description of Artificial Sequence: Synthetic oligonucleotide
aauagcaucauggcuccaa

SEQ ID NO: 746791 - RNA, 19 nt, Artificial Sequence
  Description of Artificial Sequence: Synthetic oligonucleotide
ugaggggcaccucuugacc

SEQ ID NO: 746792 - RNA, 19 nt, Artificial Sequence
  Description of Artificial Sequence: Synthetic oligonucleotide
uaaucccuuguacgcauca

SEQ ID NO: 746793 - RNA, 19 nt, Artificial Sequence
  Description of Artificial Sequence: Synthetic oligonucleotide
gaggauuuacuucgaauaa

SEQ ID NO: 746794 - RNA, 19 nt, Artificial Sequence
  Description of Artificial Sequence: Synthetic oligonucleotide
auaggugaccaccacccca

SEQ ID NO: 746795 - RNA, 19 nt, Artificial Sequence
  Description of Artificial Sequence: Synthetic oligonucleotide
aaagugacaucaaguccag

SEQ ID NO: 746796 - RNA, 19 nt, Artificial Sequence
  Description of Artificial Sequence: Synthetic oligonucleotide
auuacaucaacaggucacu

SEQ ID NO: 746797 - RNA, 19 nt, Artificial Sequence
  Description of Artificial Sequence: Synthetic oligonucleotide
gagaaucugaggaucuaug

SEQ ID NO: 746798 - RNA, 19 nt, Artificial Sequence
  Description of Artificial Sequence: Synthetic oligonucleotide
ucacccaacuccaguggag

SEQ ID NO: 746799 - RNA, 19 nt, Artificial Sequence
  Description of Artificial Sequence: Synthetic oligonucleotide
agagcuacucaugacagaa

SEQ ID NO: 746800 - RNA, 19 nt, Artificial Sequence
  Description of Artificial Sequence: Synthetic oligonucleotide
acugacuucuaggaccagg

SEQ ID NO: 746801 - RNA, 19 nt, Artificial Sequence
  Description of Artificial Sequence: Synthetic oligonucleotide
auccccuacucuaaucacc

SEQ ID NO: 746802 - RNA, 19 nt, Artificial Sequence
  Description of Artificial Sequence: Synthetic oligonucleotide
uagcuaauccccuacucua

SEQ ID NO: 746803 - RNA, 19 nt, Artificial Sequence
  Description of Artificial Sequence: Synthetic oligonucleotide
ucacucacauaggugacca

SEQ ID NO: 746804 - RNA, 19 nt, Artificial Sequence
  Description of Artificial Sequence: Synthetic oligonucleotide
caccccuuuacuguggagg

SEQ ID NO: 746805 - RNA, 19 nt, Artificial Sequence
  Description of Artificial Sequence: Synthetic oligonucleotide
acagagcuacucaugacag

SEQ ID NO: 746806 - RNA, 19 nt, Artificial Sequence
  Description of Artificial Sequence: Synthetic oligonucleotide
accgucuccugacugaaca

SEQ ID NO: 746807 - RNA, 19 nt, Artificial Sequence
  Description of Artificial Sequence: Synthetic oligonucleotide
gaccuaugguggcugagug

SEQ ID NO: 746808 - RNA, 19 nt, Artificial Sequence
  Description of Artificial Sequence: Synthetic oligonucleotide
cguagguucaucauuucgg

SEQ ID NO: 746809 - RNA, 19 nt, Artificial Sequence
  Description of Artificial Sequence: Synthetic oligonucleotide
ugcaugaucccagccagca

SEQ ID NO: 746810 - RNA, 19 nt, Artificial Sequence
  Description of Artificial Sequence: Synthetic oligonucleotide
acagaaaggucccugcaua

SEQ ID NO: 746811 - RNA, 19 nt, Artificial Sequence
  Description of Artificial Sequence: Synthetic oligonucleotide
aguaaacaucacauccccg

SEQ ID NO: 746812 - RNA, 19 nt, Artificial Sequence
  Description of Artificial Sequence: Synthetic oligonucleotide
agguuacagcagcuacucc

SEQ ID NO: 746813 - RNA, 19 nt, Artificial Sequence
  Description of Artificial Sequence: Synthetic oligonucleotide
cgaauaaucccuuguacgc

SEQ ID NO: 746814 - RNA, 19 nt, Artificial Sequence
  Description of Artificial Sequence: Synthetic oligonucleotide
ucccgagugacagugagau

SEQ ID NO: 746815 - RNA, 19 nt, Artificial Sequence
  Description of Artificial Sequence: Synthetic oligonucleotide
gaauaaucccuuguacgca

SEQ ID NO: 746816 - RNA, 19 nt, Artificial Sequence
  Description of Artificial Sequence: Synthetic oligonucleotide
gaaguccacguauucucac

SEQ ID NO: 746817 - RNA, 19 nt, Artificial Sequence
  Description of Artificial Sequence: Synthetic oligonucleotide
cacauccccgauauuuacc

SEQ ID NO: 746818 - RNA, 19 nt, Artificial Sequence
  Description of Artificial Sequence: Synthetic oligonucleotide
ccuacucuaaucaccaaac

SEQ ID NO: 746819 - RNA, 19 nt, Artificial Sequence
  Description of Artificial Sequence: Synthetic oligonucleotide
cuuagccacugaaauagga

SEQ ID NO: 746820 - RNA, 19 nt, Artificial Sequence
  Description of Artificial Sequence: Synthetic oligonucleotide
ucacauccccgauauuuac

SEQ ID NO: 746821 - RNA, 19 nt, Artificial Sequence
  Description of Artificial Sequence: Synthetic oligonucleotide
ucgggagacaguugaacuc

SEQ ID NO: 746822 - RNA, 19 nt, Artificial Sequence
  Description of Artificial Sequence: Synthetic oligonucleotide
ugucgcaacuuuguauuug

SEQ ID NO: 746823 - RNA, 19 nt, Artificial Sequence
  Description of Artificial Sequence: Synthetic oligonucleotide
gaaaggucccugcauagcu

SEQ ID NO: 746824 - RNA, 19 nt, Artificial Sequence
  Description of Artificial Sequence: Synthetic oligonucleotide
gucacaguaucguacucca

SEQ ID NO: 746825 - RNA, 19 nt, Artificial Sequence
  Description of Artificial Sequence: Synthetic oligonucleotide
aacccaguacccgccagag

SEQ ID NO: 746826 - RNA, 19 nt, Artificial Sequence
  Description of Artificial Sequence: Synthetic oligonucleotide
ucuuaauaaaaggcuucuc

SEQ ID NO: 746827 - RNA, 19 nt, Artificial Sequence
  Description of Artificial Sequence: Synthetic oligonucleotide
aaacccaggguuagcacga

SEQ ID NO: 746828 - RNA, 19 nt, Artificial Sequence
  Description of Artificial Sequence: Synthetic oligonucleotide
cauuagggaaccgcaacug

SEQ ID NO: 746829 - RNA, 19 nt, Artificial Sequence
  Description of Artificial Sequence: Synthetic oligonucleotide
uacuucgaauaaucccuug

SEQ ID NO: 746830 - RNA, 19 nt, Artificial Sequence
  Description of Artificial Sequence: Synthetic oligonucleotide
uuacuucgaauaaucccuu

SEQ ID NO: 746831 - RNA, 19 nt, Artificial Sequence
  Description of Artificial Sequence: Synthetic oligonucleotide
cuaauccccuacucuaauc

SEQ ID NO: 746832 - RNA, 19 nt, Artificial Sequence
  Description of Artificial Sequence: Synthetic oligonucleotide
guaagaccccacuuuagaa

SEQ ID NO: 746833 - RNA, 19 nt, Artificial Sequence
  Description of Artificial Sequence: Synthetic oligonucleotide
guagggcaccccuuuacug

SEQ ID NO: 746834 - RNA, 19 nt, Artificial Sequence
  Description of Artificial Sequence: Synthetic oligonucleotide
aaauagccuuucugcuugu

SEQ ID NO: 746835 - RNA, 19 nt, Artificial Sequence
  Description of Artificial Sequence: Synthetic oligonucleotide
caucccgagugacagugag

SEQ ID NO: 746836 - RNA, 19 nt, Artificial Sequence
  Description of Artificial Sequence: Synthetic oligonucleotide
cacguauucucacacaucu

SEQ ID NO: 746837 - RNA, 19 nt, Artificial Sequence
  Description of Artificial Sequence: Synthetic oligonucleotide
agcagcaacccaguacccg

SEQ ID NO: 746838 - RNA, 19 nt, Artificial Sequence
  Description of Artificial Sequence: Synthetic oligonucleotide
cacugcacguuucugagga

SEQ ID NO: 746839 - RNA, 19 nt, Artificial Sequence
  Description of Artificial Sequence: Synthetic oligonucleotide
gguuagcacgaauugucgc

SEQ ID NO: 746840 - RNA, 19 nt, Artificial Sequence
  Description of Artificial Sequence: Synthetic oligonucleotide
agacacauagacucuucuu

SEQ ID NO: 746841 - RNA, 19 nt, Artificial Sequence
  Description of Artificial Sequence: Synthetic oligonucleotide
uagguucaucauuucgggu

SEQ ID NO: 746842 - RNA, 19 nt, Artificial Sequence
  Description of Artificial Sequence: Synthetic oligonucleotide
ugacuucuaggaccaggcu

SEQ ID NO: 746843 - RNA, 19 nt, Artificial Sequence
  Description of Artificial Sequence: Synthetic oligonucleotide
uggcccacuaaguugguuu

SEQ ID NO: 746844 - RNA, 19 nt, Artificial Sequence
  Description of Artificial Sequence: Synthetic oligonucleotide
cacauagacucuucuuauc

SEQ ID NO: 746845 - RNA, 19 nt, Artificial Sequence
  Description of Artificial Sequence: Synthetic oligonucleotide
auaagaaauccaacaugga

SEQ ID NO: 746846 - RNA, 19 nt, Artificial Sequence
  Description of Artificial Sequence: Synthetic oligonucleotide
auaccguggcacaaacuuc

SEQ ID NO: 746847 - RNA, 19 nt, Artificial Sequence
  Description of Artificial Sequence: Synthetic oligonucleotide
caacaggcgcccaucauca

SEQ ID NO: 746848 - RNA, 19 nt, Artificial Sequence
  Description of Artificial Sequence: Synthetic oligonucleotide
caacaggucacuacucaca

SEQ ID NO: 746849 - RNA, 19 nt, Artificial Sequence
  Description of Artificial Sequence: Synthetic oligonucleotide
auuugguugcagaacgcca

SEQ ID NO: 746850 - RNA, 19 nt, Artificial Sequence
  Description of Artificial Sequence: Synthetic oligonucleotide
caccucuugaccuucucca

SEQ ID NO: 746851 - RNA, 19 nt, Artificial Sequence
  Description of Artificial Sequence: Synthetic oligonucleotide
ucccgucucugccacuugc

SEQ ID NO: 746852 - RNA, 19 nt, Artificial Sequence
  Description of Artificial Sequence: Synthetic oligonucleotide
gggucuaagauaaggaguc

SEQ ID NO: 746853 - RNA, 19 nt, Artificial Sequence
  Description of Artificial Sequence: Synthetic oligonucleotide
gguaagaccccacuuuaga

SEQ ID NO: 746854 - RNA, 19 nt, Artificial Sequence
  Description of Artificial Sequence: Synthetic oligonucleotide
aggauuuacuucgaauaau

SEQ ID NO: 746855 - RNA, 19 nt, Artificial Sequence
  Description of Artificial Sequence: Synthetic oligonucleotide
cugggccggauauugucag

SEQ ID NO: 746856 - RNA, 19 nt, Artificial Sequence
  Description of Artificial Sequence: Synthetic oligonucleotide
guauuugguugcagaacgc

SEQ ID NO: 746857 - RNA, 19 nt, Artificial Sequence
  Description of Artificial Sequence: Synthetic oligonucleotide
ggcgauggucucuauuucc

SEQ ID NO: 746858 - RNA, 19 nt, Artificial Sequence
  Description of Artificial Sequence: Synthetic oligonucleotide
guauucucacacaucucac

SEQ ID NO: 746859 - RNA, 19 nt, Artificial Sequence
  Description of Artificial Sequence: Synthetic oligonucleotide
aacaggcgcccaucaucag

SEQ ID NO: 746860 - RNA, 19 nt, Artificial Sequence
  Description of Artificial Sequence: Synthetic oligonucleotide
cucccaucccgagugacag

SEQ ID NO: 746861 - RNA, 19 nt, Artificial Sequence
  Description of Artificial Sequence: Synthetic oligonucleotide
cccgauauuuaccaaggac

SEQ ID NO: 746862 - RNA, 19 nt, Artificial Sequence
  Description of Artificial Sequence: Synthetic oligonucleotide
cagaacgccaaacaucaaa

SEQ ID NO: 746863 - RNA, 19 nt, Artificial Sequence
  Description of Artificial Sequence: Synthetic oligonucleotide
acuccauuagggaaccgca

SEQ ID NO: 746864 - RNA, 19 nt, Artificial Sequence
  Description of Artificial Sequence: Synthetic oligonucleotide
uugguugcagaacgccaaa

SEQ ID NO: 746865 - RNA, 19 nt, Artificial Sequence
  Description of Artificial Sequence: Synthetic oligonucleotide
cuucgaauaaucccuugua

SEQ ID NO: 746866 - RNA, 19 nt, Artificial Sequence
  Description of Artificial Sequence: Synthetic oligonucleotide
ggaggagguagucacagaa

SEQ ID NO: 746867 - RNA, 19 nt, Artificial Sequence
  Description of Artificial Sequence: Synthetic oligonucleotide
uaucaggagcacagggaua

SEQ ID NO: 746868 - RNA, 19 nt, Artificial Sequence
  Description of Artificial Sequence: Synthetic oligonucleotide
cagguagucccgucucugc

SEQ ID NO: 746869 - RNA, 19 nt, Artificial Sequence
  Description of Artificial Sequence: Synthetic oligonucleotide
cuugucgcaacuuuguauu

SEQ ID NO: 746870 - RNA, 19 nt, Artificial Sequence
  Description of Artificial Sequence: Synthetic oligonucleotide
caggagcacagggauaaag

SEQ ID NO: 746871 - RNA, 19 nt, Artificial Sequence
  Description of Artificial Sequence: Synthetic oligonucleotide
cacguuucugaggauuuac

SEQ ID NO: 746872 - RNA, 19 nt, Artificial Sequence
  Description of Artificial Sequence: Synthetic oligonucleotide
gguugcagaacgccaaaca

SEQ ID NO: 746873 - RNA, 19 nt, Artificial Sequence
  Description of Artificial Sequence: Synthetic oligonucleotide
guugcagaacgccaaacau

SEQ ID NO: 746874 - RNA, 19 nt, Artificial Sequence
  Description of Artificial Sequence: Synthetic oligonucleotide
cagauaagaaauccaacau

SEQ ID NO: 746875 - RNA, 19 nt, Artificial Sequence
  Description of Artificial Sequence: Synthetic oligonucleotide
ugaaccaaaccgggcgaug

SEQ ID NO: 746876 - RNA, 19 nt, Artificial Sequence
  Description of Artificial Sequence: Synthetic oligonucleotide
cgauauuuaccaaggacuc

SEQ ID NO: 746877 - RNA, 19 nt, Artificial Sequence
  Description of Artificial Sequence: Synthetic oligonucleotide
acacguagguucaucauuu

SEQ ID NO: 746878 - RNA, 19 nt, Artificial Sequence
  Description of Artificial Sequence: Synthetic oligonucleotide
ucgcaacuuuguauuuggu

SEQ ID NO: 746879 - RNA, 19 nt, Artificial Sequence
  Description of Artificial Sequence: Synthetic oligonucleotide
ugcuugucgcaacuuugua

SEQ ID NO: 746880 - RNA, 19 nt, Artificial Sequence
  Description of Artificial Sequence: Synthetic oligonucleotide
aauagccuggaggcugagu

SEQ ID NO: 746881 - RNA, 19 nt, Artificial Sequence
  Description of Artificial Sequence: Synthetic oligonucleotide
ccuuguacgcaucaaccac

SEQ ID NO: 746882 - RNA, 19 nt, Artificial Sequence
  Description of Artificial Sequence: Synthetic oligonucleotide
ccgauauuuaccaaggacu

SEQ ID NO: 746883 - RNA, 19 nt, Artificial Sequence
  Description of Artificial Sequence: Synthetic oligonucleotide
ggguuagcacgaauugucg

SEQ ID NO: 746884 - RNA, 19 nt, Artificial Sequence
  Description of Artificial Sequence: Synthetic oligonucleotide
ccuaugguggcugagugug

SEQ ID NO: 746885 - RNA, 19 nt, Artificial Sequence
  Description of Artificial Sequence: Synthetic oligonucleotide
uagcacgaauugucgcagc

SEQ ID NO: 746886 - RNA, 19 nt, Artificial Sequence
  Description of Artificial Sequence: Synthetic oligonucleotide
ugucuuccccacagcagau

SEQ ID NO: 746887 - RNA, 19 nt, Artificial Sequence
  Description of Artificial Sequence: Synthetic oligonucleotide
uacuccaacaggcgcccau

SEQ ID NO: 746888 - RNA, 19 nt, Artificial Sequence
  Description of Artificial Sequence: Synthetic oligonucleotide
augauuccuggcaugcaca

SEQ ID NO: 746889 - RNA, 19 nt, Artificial Sequence
  Description of Artificial Sequence: Synthetic oligonucleotide
guagucccgucucugccac

SEQ ID NO: 746890 - RNA, 19 nt, Artificial Sequence
  Description of Artificial Sequence: Synthetic oligonucleotide
uaccaaggacucuggccca

SEQ ID NO: 746891 - RNA, 19 nt, Artificial Sequence
  Description of Artificial Sequence: Synthetic oligonucleotide
agguaagaccccacuuuag

SEQ ID NO: 746892 - RNA, 19 nt, Artificial Sequence
  Description of Artificial Sequence: Synthetic oligonucleotide
aaucccuuguacgcaucaa

SEQ ID NO: 746893 - RNA, 19 nt, Artificial Sequence
  Description of Artificial Sequence: Synthetic oligonucleotide
ucacaguaucguacuccaa

SEQ ID NO: 746894 - RNA, 19 nt, Artificial Sequence
  Description of Artificial Sequence: Synthetic oligonucleotide
cagcaacccaguacccgcc

SEQ ID NO: 746895 - RNA, 19 nt, Artificial Sequence
  Description of Artificial Sequence: Synthetic oligonucleotide
cguauucucacacaucuca

SEQ ID NO: 746896 - RNA, 19 nt, Artificial Sequence
  Description of Artificial Sequence: Synthetic oligonucleotide
gucucugccaccagaacaa

SEQ ID NO: 746897 - RNA, 19 nt, Artificial Sequence
  Description of Artificial Sequence: Synthetic oligonucleotide
gcuauaccguggcacaaac

SEQ ID NO: 746898 - RNA, 19 nt, Artificial Sequence
  Description of Artificial Sequence: Synthetic oligonucleotide
gacagaaaggucccugcau

SEQ ID NO: 746899 - RNA, 19 nt, Artificial Sequence
  Description of Artificial Sequence: Synthetic oligonucleotide
acguauucucacacaucuc

SEQ ID NO: 746900 - RNA, 19 nt, Artificial Sequence
  Description of Artificial Sequence: Synthetic oligonucleotide
ugguugcagaacgccaaac

SEQ ID NO: 746901 - RNA, 19 nt, Artificial Sequence
  Description of Artificial Sequence: Synthetic oligonucleotide
uccaacaggcgcccaucau

SEQ ID NO: 746902 - RNA, 19 nt, Artificial Sequence
  Description of Artificial Sequence: Synthetic oligonucleotide
cacguggccccugagaaca

SEQ ID NO: 746903 - RNA, 19 nt, Artificial Sequence
  Description of Artificial Sequence: Synthetic oligonucleotide
ggcacgaaaagaggccagg

SEQ ID NO: 746904 - RNA, 19 nt, Artificial Sequence
  Description of Artificial Sequence: Synthetic oligonucleotide
uugucgcaacuuuguauuu

SEQ ID NO: 746905 - RNA, 19 nt, Artificial Sequence
  Description of Artificial Sequence: Synthetic oligonucleotide
aaaccgggcgauggucucu

SEQ ID NO: 746906 - RNA, 19 nt, Artificial Sequence
  Description of Artificial Sequence: Synthetic oligonucleotide
uccggaccuaugguggcug

SEQ ID NO: 746907 - RNA, 19 nt, Artificial Sequence
  Description of Artificial Sequence: Synthetic oligonucleotide
uguacgcaucaaccacaaa

SEQ ID NO: 746908 - RNA, 19 nt, Artificial Sequence
  Description of Artificial Sequence: Synthetic oligonucleotide
acgaauugucgcagcagca

SEQ ID NO: 746909 - RNA, 19 nt, Artificial Sequence
  Description of Artificial Sequence: Synthetic oligonucleotide
agcagcuacucccgcacuu

SEQ ID NO: 746910 - RNA, 19 nt, Artificial Sequence
  Description of Artificial Sequence: Synthetic oligonucleotide
uuuguguacuuagcauauu

SEQ ID NO: 746911 - RNA, 19 nt, Artificial Sequence
  Description of Artificial Sequence: Synthetic oligonucleotide
cacguagguucaucauuuc

SEQ ID NO: 746912 - RNA, 19 nt, Artificial Sequence
  Description of Artificial Sequence: Synthetic oligonucleotide
gccacugaaauaggaauuc

SEQ ID NO: 746913 - RNA, 19 nt, Artificial Sequence
  Description of Artificial Sequence: Synthetic oligonucleotide
ggaaccgcaacugguccag

SEQ ID NO: 746914 - RNA, 19 nt, Artificial Sequence
  Description of Artificial Sequence: Synthetic oligonucleotide
cuggcacgaaaagaggcca

SEQ ID NO: 746915 - RNA, 19 nt, Artificial Sequence
  Description of Artificial Sequence: Synthetic oligonucleotide
gaacuccauuagggaaccg

SEQ ID NO: 746916 - RNA, 19 nt, Artificial Sequence
  Description of Artificial Sequence: Synthetic oligonucleotide
caguacccgccagagcugc

SEQ ID NO: 746917 - RNA, 19 nt, Artificial Sequence
  Description of Artificial Sequence: Synthetic oligonucleotide
ccaacaggcgcccaucauc

SEQ ID NO: 746918 - RNA, 19 nt, Artificial Sequence
  Description of Artificial Sequence: Synthetic oligonucleotide
uccucgggagacaguugaa

SEQ ID NO: 746919 - RNA, 19 nt, Artificial Sequence
  Description of Artificial Sequence: Synthetic oligonucleotide
cacuuccaagggcuaucag

SEQ ID NO: 746920 - RNA, 19 nt, Artificial Sequence
  Description of Artificial Sequence: Synthetic oligonucleotide
agcuaauccccuacucuaa

SEQ ID NO: 746921 - RNA, 19 nt, Artificial Sequence
  Description of Artificial Sequence: Synthetic oligonucleotide
ugcaacccucuuagccacu

SEQ ID NO: 746922 - RNA, 19 nt, Artificial Sequence
  Description of Artificial Sequence: Synthetic oligonucleotide
cucuugucacaguaucgua

SEQ ID NO: 746923 - RNA, 19 nt, Artificial Sequence
  Description of Artificial Sequence: Synthetic oligonucleotide
cagagcuacucaugacaga

SEQ ID NO: 746924 - RNA, 19 nt, Artificial Sequence
  Description of Artificial Sequence: Synthetic oligonucleotide
cucaugggcuucacucaca

SEQ ID NO: 746925 - RNA, 19 nt, Artificial Sequence
  Description of Artificial Sequence: Synthetic oligonucleotide
ccuuucaucaggccagaca

SEQ ID NO: 746926 - RNA, 19 nt, Artificial Sequence
  Description of Artificial Sequence: Synthetic oligonucleotide
caacaguuucacugcacgu

SEQ ID NO: 746927 - RNA, 19 nt, Artificial Sequence
  Description of Artificial Sequence: Synthetic oligonucleotide
guacccgccagagcugcug

SEQ ID NO: 746928 - RNA, 19 nt, Artificial Sequence
  Description of Artificial Sequence: Synthetic oligonucleotide
gaugcccaggggucuccca

SEQ ID NO: 746929 - RNA, 19 nt, Artificial Sequence
  Description of Artificial Sequence: Synthetic oligonucleotide
ggagguagucacagaaaga

SEQ ID NO: 746930 - RNA, 19 nt, Artificial Sequence
  Description of Artificial Sequence: Synthetic oligonucleotide
gcacgaauugucgcagcag

SEQ ID NO: 746931 - RNA, 19 nt, Artificial Sequence
  Description of Artificial Sequence: Synthetic oligonucleotide
aacuccaguggaggaggua

SEQ ID NO: 746932 - RNA, 19 nt, Artificial Sequence
  Description of Artificial Sequence: Synthetic oligonucleotide
cugcuugucgcaacuuugu

SEQ ID NO: 746933 - RNA, 19 nt, Artificial Sequence
  Description of Artificial Sequence: Synthetic oligonucleotide
ggggucucccacacguagg

SEQ ID NO: 746934 - RNA, 19 nt, Artificial Sequence
  Description of Artificial Sequence: Synthetic oligonucleotide
accaguguauaaacauauu

SEQ ID NO: 746935 - RNA, 19 nt, Artificial Sequence
  Description of Artificial Sequence: Synthetic oligonucleotide
cuaugguggcugaguguga

SEQ ID NO: 746936 - RNA, 19 nt, Artificial Sequence
  Description of Artificial Sequence: Synthetic oligonucleotide
cgggagacaguugaacucc

SEQ ID NO: 746937 - RNA, 19 nt, Artificial Sequence
  Description of Artificial Sequence: Synthetic oligonucleotide
agucccgucucugccacuu

SEQ ID NO: 746938 - RNA, 19 nt, Artificial Sequence
  Description of Artificial Sequence: Synthetic oligonucleotide
ggucccugcauagcuaauc

SEQ ID NO: 746939 - RNA, 19 nt, Artificial Sequence
  Description of Artificial Sequence: Synthetic oligonucleotide
cccuuguacgcaucaacca

SEQ ID NO: 746940 - RNA, 19 nt, Artificial Sequence
  Description of Artificial Sequence: Synthetic oligonucleotide
cacacguagguucaucauu

SEQ ID NO: 746941 - RNA, 19 nt, Artificial Sequence
  Description of Artificial Sequence: Synthetic oligonucleotide
gagcuacucaugacagaaa

SEQ ID NO: 746942 - RNA, 19 nt, Artificial Sequence
  Description of Artificial Sequence: Synthetic oligonucleotide
gcuugucgcaacuuuguau

SEQ ID NO: 746943 - RNA, 19 nt, Artificial Sequence
  Description of Artificial Sequence: Synthetic oligonucleotide
acccucuuagccacugaaa

SEQ ID NO: 746944 - RNA, 19 nt, Artificial Sequence
  Description of Artificial Sequence: Synthetic oligonucleotide
aaccgggcgauggucucua

SEQ ID NO: 746945 - RNA, 19 nt, Artificial Sequence
  Description of Artificial Sequence: Synthetic oligonucleotide
cuauaccguggcacaaacu

SEQ ID NO: 746946 - RNA, 19 nt, Artificial Sequence
  Description of Artificial Sequence: Synthetic oligonucleotide
ccacguauucucacacauc

SEQ ID NO: 746947 - RNA, 19 nt, Artificial Sequence
  Description of Artificial Sequence: Synthetic oligonucleotide
gcagguagucccgucucug

SEQ ID NO: 746948 - RNA, 19 nt, Artificial Sequence
  Description of Artificial Sequence: Synthetic oligonucleotide
acaucucacguggccccug

SEQ ID NO: 746949 - RNA, 19 nt, Artificial Sequence
  Description of Artificial Sequence: Synthetic oligonucleotide
cccaaagguaagaccccac

SEQ ID NO: 746950 - RNA, 19 nt, Artificial Sequence
  Description of Artificial Sequence: Synthetic oligonucleotide
ggucuaagauaaggaguca

SEQ ID NO: 746951 - RNA, 19 nt, Artificial Sequence
  Description of Artificial Sequence: Synthetic oligonucleotide
acccaggguuagcacgaau

SEQ ID NO: 746952 - RNA, 19 nt, Artificial Sequence
  Description of Artificial Sequence: Synthetic oligonucleotide
gguagggcaccccuuuacu

SEQ ID NO: 746953 - RNA, 19 nt, Artificial Sequence
  Description of Artificial Sequence: Synthetic oligonucleotide
gggccggauauugucagga

SEQ ID NO: 746954 - RNA, 19 nt, Artificial Sequence
  Description of Artificial Sequence: Synthetic oligonucleotide
gggcgauggucucuauuuc

SEQ ID NO: 746955 - RNA, 19 nt, Artificial Sequence
  Description of Artificial Sequence: Synthetic oligonucleotide
ccgucuccugacugaacag

SEQ ID NO: 746956 - RNA, 19 nt, Artificial Sequence
  Description of Artificial Sequence: Synthetic oligonucleotide
cccuacucuaaucaccaaa

SEQ ID NO: 746957 - RNA, 19 nt, Artificial Sequence
  Description of Artificial Sequence: Synthetic oligonucleotide
ccggauauugucaggaaau

SEQ ID NO: 746958 - RNA, 19 nt, Artificial Sequence
  Description of Artificial Sequence: Synthetic oligonucleotide
cccauugggcccugcccgg

SEQ ID NO: 746959 - RNA, 19 nt, Artificial Sequence
  Description of Artificial Sequence: Synthetic oligonucleotide
caucucacguggccccuga

SEQ ID NO: 746960 - RNA, 19 nt, Artificial Sequence
  Description of Artificial Sequence: Synthetic oligonucleotide
aucccgagugacagugaga

SEQ ID NO: 746961 - RNA, 19 nt, Artificial Sequence
  Description of Artificial Sequence: Synthetic oligonucleotide
gcaacccucuuagccacug

SEQ ID NO: 746962 - RNA, 19 nt, Artificial Sequence
  Description of Artificial Sequence: Synthetic oligonucleotide
agguacagacuggcugggu

SEQ ID NO: 746963 - RNA, 19 nt, Artificial Sequence
  Description of Artificial Sequence: Synthetic oligonucleotide
aacccaggguuagcacgaa

SEQ ID NO: 746964 - RNA, 19 nt, Artificial Sequence
  Description of Artificial Sequence: Synthetic oligonucleotide
ccucgggagacaguugaac

SEQ ID NO: 746965 - RNA, 19 nt, Artificial Sequence
  Description of Artificial Sequence: Synthetic oligonucleotide
ccuccggaccuaugguggc

SEQ ID NO: 746966 - RNA, 19 nt, Artificial Sequence
  Description of Artificial Sequence: Synthetic oligonucleotide
ccugaaccaaaccgggcga

SEQ ID NO: 746967 - RNA, 19 nt, Artificial Sequence
  Description of Artificial Sequence: Synthetic oligonucleotide
gauuccuggcaugcacagu

SEQ ID NO: 746968 - RNA, 19 nt, Artificial Sequence
  Description of Artificial Sequence: Synthetic oligonucleotide
ccucuuagccacugaaaua

SEQ ID NO: 746969 - RNA, 19 nt, Artificial Sequence
  Description of Artificial Sequence: Synthetic oligonucleotide
ccaguacccgccagagcug

SEQ ID NO: 746970 - RNA, 19 nt, Artificial Sequence
  Description of Artificial Sequence: Synthetic oligonucleotide
gucccgucucugccacuug

SEQ ID NO: 746971 - RNA, 19 nt, Artificial Sequence
  Description of Artificial Sequence: Synthetic oligonucleotide
gcaccccuuuacuguggag

SEQ ID NO: 746972 - RNA, 19 nt, Artificial Sequence
  Description of Artificial Sequence: Synthetic oligonucleotide
gggucucccacacguaggu

SEQ ID NO: 746973 - RNA, 19 nt, Artificial Sequence
  Description of Artificial Sequence: Synthetic oligonucleotide
ccucuaaaagugacaucaa

SEQ ID NO: 746974 - RNA, 19 nt, Artificial Sequence
  Description of Artificial Sequence: Synthetic oligonucleotide
gcacuuccaagggcuauca

SEQ ID NO: 746975 - RNA, 19 nt, Artificial Sequence
  Description of Artificial Sequence: Synthetic oligonucleotide
gggauaaagcuauguccau

SEQ ID NO: 746976 - RNA, 19 nt, Artificial Sequence
  Description of Artificial Sequence: Synthetic oligonucleotide
ugggcccugcccggaugcc

SEQ ID NO: 746977 - RNA, 19 nt, Artificial Sequence
  Description of Artificial Sequence: Synthetic oligonucleotide
aggucacuacucacauuuu

SEQ ID NO: 746978 - RNA, 19 nt, Artificial Sequence
  Description of Artificial Sequence: Synthetic oligonucleotide
gcuucuccggaaggcacca

SEQ ID NO: 746979 - RNA, 19 nt, Artificial Sequence
  Description of Artificial Sequence: Synthetic oligonucleotide
ggcuauaccguggcacaaa

SEQ ID NO: 746980 - RNA, 19 nt, Artificial Sequence
  Description of Artificial Sequence: Synthetic oligonucleotide
ggccggauauugucaggaa

SEQ ID NO: 746981 - RNA, 19 nt, Artificial Sequence
  Description of Artificial Sequence: Synthetic oligonucleotide
ccguggcacaaacuucauc

SEQ ID NO: 746982 - RNA, 19 nt, Artificial Sequence
  Description of Artificial Sequence: Synthetic oligonucleotide
gucgcagcagcaacccagu

SEQ ID NO: 746983 - RNA, 19 nt, Artificial Sequence
  Description of Artificial Sequence: Synthetic oligonucleotide
ggucucuauuuccccauuu

SEQ ID NO: 746984 - RNA, 19 nt, Artificial Sequence
  Description of Artificial Sequence: Synthetic oligonucleotide
ccaaaccgggcgauggucu

SEQ ID NO: 746985 - RNA, 19 nt, Artificial Sequence
  Description of Artificial Sequence: Synthetic oligonucleotide
aguacccgccagagcugcu

SEQ ID NO: 746986 - RNA, 19 nt, Artificial Sequence
  Description of Artificial Sequence: Synthetic oligonucleotide
caauagcaucauggcucca

SEQ ID NO: 746987 - RNA, 19 nt, Artificial Sequence
  Description of Artificial Sequence: Synthetic oligonucleotide
cgaauugucgcagcagcaa

SEQ ID NO: 746988 - RNA, 19 nt, Artificial Sequence
  Description of Artificial Sequence: Synthetic oligonucleotide
cugaaccaaaccgggcgau

SEQ ID NO: 746989 - RNA, 19 nt, Artificial Sequence
  Description of Artificial Sequence: Synthetic oligonucleotide
ggcccacuaaguugguuuu

SEQ ID NO: 746990 - RNA, 19 nt, Artificial Sequence
  Description of Artificial Sequence: Synthetic oligonucleotide
ccccgauauuuaccaagga

SEQ ID NO: 746991 - RNA, 19 nt, Artificial Sequence
  Description of Artificial Sequence: Synthetic oligonucleotide
caggggucucccacacgua

SEQ ID NO: 746992 - RNA, 19 nt, Artificial Sequence
  Description of Artificial Sequence: Synthetic oligonucleotide
ggacucuggcccacuaagu

SEQ ID NO: 746993 - RNA, 19 nt, Artificial Sequence
  Description of Artificial Sequence: Synthetic oligonucleotide
aggucccugcauagcuaau

SEQ ID NO: 746994 - RNA, 19 nt, Artificial Sequence
  Description of Artificial Sequence: Synthetic oligonucleotide
gggcccugcccggaugccc

SEQ ID NO: 746995 - RNA, 19 nt, Artificial Sequence
  Description of Artificial Sequence: Synthetic oligonucleotide
guacuccaacaggcgccca

SEQ ID NO: 746996 - RNA, 19 nt, Artificial Sequence
  Description of Artificial Sequence: Synthetic oligonucleotide
accgggcgauggucucuau

SEQ ID NO: 746997 - RNA, 19 nt, Artificial Sequence
  Description of Artificial Sequence: Synthetic oligonucleotide
cccgagugacagugagauc

SEQ ID NO: 746998 - RNA, 19 nt, Artificial Sequence
  Description of Artificial Sequence: Synthetic oligonucleotide
gcccggaugcccagggguc

SEQ ID NO: 746999 - RNA, 19 nt, Artificial Sequence
  Description of Artificial Sequence: Synthetic oligonucleotide
cgcacuuccaagggcuauc

SEQ ID NO: 747000 - RNA, 19 nt, Artificial Sequence
  Description of Artificial Sequence: Synthetic oligonucleotide
gcacguuucugaggauuua

SEQ ID NO: 747001 - RNA, 19 nt, Artificial Sequence
  Description of Artificial Sequence: Synthetic oligonucleotide
cauugggcccugcccggau

SEQ ID NO: 747002 - RNA, 19 nt, Artificial Sequence
  Description of Artificial Sequence: Synthetic oligonucleotide
acguggccccugagaacaa

SEQ ID NO: 747003 - RNA, 19 nt, Artificial Sequence
  Description of Artificial Sequence: Synthetic oligonucleotide
cuccggaccuaugguggcu

SEQ ID NO: 747004 - RNA, 19 nt, Artificial Sequence
  Description of Artificial Sequence: Synthetic oligonucleotide
ccacacguagguucaucau

SEQ ID NO: 747005 - RNA, 19 nt, Artificial Sequence
  Description of Artificial Sequence: Synthetic oligonucleotide
cggaccuaugguggcugag

SEQ ID NO: 747006 - RNA, 19 nt, Artificial Sequence
  Description of Artificial Sequence: Synthetic oligonucleotide
gcagaacgccaaacaucaa

SEQ ID NO: 747007 - RNA, 19 nt, Artificial Sequence
  Description of Artificial Sequence: Synthetic oligonucleotide
ccggaccuaugguggcuga

SEQ ID NO: 747008 - RNA, 19 nt, Artificial Sequence
  Description of Artificial Sequence: Synthetic oligonucleotide
ccccuacucuaaucaccaa

SEQ ID NO: 747009 - RNA, 19 nt, Artificial Sequence
  Description of Artificial Sequence: Synthetic oligonucleotide
ccggaugcccaggggucuc

SEQ ID NO: 747010 - RNA, 19 nt, Artificial Sequence
  Description of Artificial Sequence: Synthetic oligonucleotide
cccgcacuuccaagggcua

SEQ ID NO: 747011 - RNA, 19 nt, Artificial Sequence
  Description of Artificial Sequence: Synthetic oligonucleotide
ccauugggcccugcccgga

SEQ ID NO: 747012 - RNA, 19 nt, Artificial Sequence
  Description of Artificial Sequence: Synthetic oligonucleotide
cccggaugcccaggggucu

SEQ ID NO: 747013 - RNA, 19 nt, Artificial Sequence
  Description of Artificial Sequence: Synthetic oligonucleotide
ccgggcgauggucucuauu

SEQ ID NO: 747014 - RNA, 19 nt, Artificial Sequence
  Description of Artificial Sequence: Synthetic oligonucleotide
ccgcacuuccaagggcuau

SEQ ID NO: 747015 - RNA, 19 nt, Artificial Sequence
  Description of Artificial Sequence: Synthetic oligonucleotide
uguaauuucaugccaaagg

SEQ ID NO: 747016 - RNA, 19 nt, Artificial Sequence
  Description of Artificial Sequence: Synthetic oligonucleotide
uugucuauaaauaaugcag

SEQ ID NO: 747017 - RNA, 19 nt, Artificial Sequence
  Description of Artificial Sequence: Synthetic oligonucleotide
aauguuacugcgcaacacc

SEQ ID NO: 747018 - RNA, 19 nt, Artificial Sequence
  Description of Artificial Sequence: Synthetic oligonucleotide
cucucuaucagcuagagac

SEQ ID NO: 747019 - RNA, 19 nt, Artificial Sequence
  Description of Artificial Sequence: Synthetic oligonucleotide
uuaguauagaacuuguuga

SEQ ID NO: 747020 - RNA, 19 nt, Artificial Sequence
  Description of Artificial Sequence: Synthetic oligonucleotide
aaagaugcuggccaugccg

SEQ ID NO: 747021 - RNA, 19 nt, Artificial Sequence
  Description of Artificial Sequence: Synthetic oligonucleotide
caaacgaucuucaucaucc

SEQ ID NO: 747022 - RNA, 19 nt, Artificial Sequence
  Description of Artificial Sequence: Synthetic oligonucleotide
acacacaccacacacacac

SEQ ID NO: 747023 - RNA, 19 nt, Artificial Sequence
  Description of Artificial Sequence: Synthetic oligonucleotide
agaguagcagaucucaugg

SEQ ID NO: 747024 - RNA, 19 nt, Artificial Sequence
  Description of Artificial Sequence: Synthetic oligonucleotide
uacgagaagagacacaaca

SEQ ID NO: 747025 - RNA, 19 nt, Artificial Sequence
  Description of Artificial Sequence: Synthetic oligonucleotide
acgaacugcagccacauac

SEQ ID NO: 747026 - RNA, 19 nt, Artificial Sequence
  Description of Artificial Sequence: Synthetic oligonucleotide
aucagcuagagacaggccg

SEQ ID NO: 747027 - RNA, 19 nt, Artificial Sequence
  Description of Artificial Sequence: Synthetic oligonucleotide
uuuacuauaguaguggguc

SEQ ID NO: 747028 - RNA, 19 nt, Artificial Sequence
  Description of Artificial Sequence: Synthetic oligonucleotide
agacacaacacagaguagc

SEQ ID NO: 747029 - RNA, 19 nt, Artificial Sequence
  Description of Artificial Sequence: Synthetic oligonucleotide
ucuuaggcagaguagcugg

SEQ ID NO: 747030 - RNA, 19 nt, Artificial Sequence
  Description of Artificial Sequence: Synthetic oligonucleotide
uuaaacuucugguauccag

SEQ ID NO: 747031 - RNA, 19 nt, Artificial Sequence
  Description of Artificial Sequence: Synthetic oligonucleotide
accacacacacacacacac

SEQ ID NO: 747032 - RNA, 19 nt, Artificial Sequence
  Description of Artificial Sequence: Synthetic oligonucleotide
aggaaguuugccauuaacc

SEQ ID NO: 747033 - RNA, 19 nt, Artificial Sequence
  Description of Artificial Sequence: Synthetic oligonucleotide
agacacacacaccacacac

SEQ ID NO: 747034 - RNA, 19 nt, Artificial Sequence
  Description of Artificial Sequence: Synthetic oligonucleotide
uaguauagaacuuguugag

SEQ ID NO: 747035 - RNA, 19 nt, Artificial Sequence
  Description of Artificial Sequence: Synthetic oligonucleotide
acacacacaccacacacac

SEQ ID NO: 747036 - RNA, 19 nt, Artificial Sequence
  Description of Artificial Sequence: Synthetic oligonucleotide
ugucccaggucaauggugg

SEQ ID NO: 747037 - RNA, 19 nt, Artificial Sequence
  Description of Artificial Sequence: Synthetic oligonucleotide
uucuuuaggacccuuuccu

SEQ ID NO: 747038 - RNA, 19 nt, Artificial Sequence
  Description of Artificial Sequence: Synthetic oligonucleotide
acacacaccacacacacca

SEQ ID NO: 747039 - RNA, 19 nt, Artificial Sequence
  Description of Artificial Sequence: Synthetic oligonucleotide
uuuauauucucuguuggac

SEQ ID NO: 747040 - RNA, 19 nt, Artificial Sequence
  Description of Artificial Sequence: Synthetic oligonucleotide
acaccacacacacacacac

SEQ ID NO: 747041 - RNA, 19 nt, Artificial Sequence
  Description of Artificial Sequence: Synthetic oligonucleotide
ugaucaagcacuucauuga

SEQ ID NO: 747042 - RNA, 19 nt, Artificial Sequence
  Description of Artificial Sequence: Synthetic oligonucleotide
acgaucuucaucauccucc

SEQ ID NO: 747043 - RNA, 19 nt, Artificial Sequence
  Description of Artificial Sequence: Synthetic oligonucleotide
aguaguauagcucccgaca

SEQ ID NO: 747044 - RNA, 19 nt, Artificial Sequence
  Description of Artificial Sequence: Synthetic oligonucleotide
cacgcaguaguauagcucc

SEQ ID NO: 747045 - RNA, 19 nt, Artificial Sequence
  Description of Artificial Sequence: Synthetic oligonucleotide
uacaagaccaaugugggac

SEQ ID NO: 747046 - RNA, 19 nt, Artificial Sequence
  Description of Artificial Sequence: Synthetic oligonucleotide
auaguagugggucugggca

SEQ ID NO: 747047 - RNA, 19 nt, Artificial Sequence
  Description of Artificial Sequence: Synthetic oligonucleotide
acacaccacacacacacac

SEQ ID NO: 747048 - RNA, 19 nt, Artificial Sequence
  Description of Artificial Sequence: Synthetic oligonucleotide
uuacauuccaucuguccag

SEQ ID NO: 747049 - RNA, 19 nt, Artificial Sequence
  Description of Artificial Sequence: Synthetic oligonucleotide
ggaaguuugccauuaaccc

SEQ ID NO: 747050 - RNA, 19 nt, Artificial Sequence
  Description of Artificial Sequence: Synthetic oligonucleotide
aguucuuuaggacccuuuc

SEQ ID NO: 747051 - RNA, 19 nt, Artificial Sequence
  Description of Artificial Sequence: Synthetic oligonucleotide
uacauugucuauaaauaau

SEQ ID NO: 747052 - RNA, 19 nt, Artificial Sequence
  Description of Artificial Sequence: Synthetic oligonucleotide
guaccugucgaucauuucc

SEQ ID NO: 747053 - RNA, 19 nt, Artificial Sequence
  Description of Artificial Sequence: Synthetic oligonucleotide
agcauauaagauaugaggu

SEQ ID NO: 747054 - RNA, 19 nt, Artificial Sequence
  Description of Artificial Sequence: Synthetic oligonucleotide
acugcucgagacuaaggac

SEQ ID NO: 747055 - RNA, 19 nt, Artificial Sequence
  Description of Artificial Sequence: Synthetic oligonucleotide
cucgggaacacuauuuggc

SEQ ID NO: 747056 - RNA, 19 nt, Artificial Sequence
  Description of Artificial Sequence: Synthetic oligonucleotide
aaggacguuuauuucacau

SEQ ID NO: 747057 - RNA, 19 nt, Artificial Sequence
  Description of Artificial Sequence: Synthetic oligonucleotide
aggacguuuauuucacauc

SEQ ID NO: 747058 - RNA, 19 nt, Artificial Sequence
  Description of Artificial Sequence: Synthetic oligonucleotide
uauaguagugggucugggc

SEQ ID NO: 747059 - RNA, 19 nt, Artificial Sequence
  Description of Artificial Sequence: Synthetic oligonucleotide
ucuagcauucccuuguaua

SEQ ID NO: 747060 - RNA, 19 nt, Artificial Sequence
  Description of Artificial Sequence: Synthetic oligonucleotide
aaugugggacuuucccauc

SEQ ID NO: 747061 - RNA, 19 nt, Artificial Sequence
  Description of Artificial Sequence: Synthetic oligonucleotide
ugaacugcgcgguucagcu

SEQ ID NO: 747062 - RNA, 19 nt, Artificial Sequence
  Description of Artificial Sequence: Synthetic oligonucleotide
cacacacacacacacacac

SEQ ID NO: 747063 - RNA, 19 nt, Artificial Sequence
  Description of Artificial Sequence: Synthetic oligonucleotide
aaaguguggccagcaaacg

SEQ ID NO: 747064 - RNA, 19 nt, Artificial Sequence
  Description of Artificial Sequence: Synthetic oligonucleotide
ugucgaucauuuccugagg

SEQ ID NO: 747065 - RNA, 19 nt, Artificial Sequence
  Description of Artificial Sequence: Synthetic oligonucleotide
ucggaggucuucuucacug

SEQ ID NO: 747066 - RNA, 19 nt, Artificial Sequence
  Description of Artificial Sequence: Synthetic oligonucleotide
auuuggcugauggaguugg

SEQ ID NO: 747067 - RNA, 19 nt, Artificial Sequence
  Description of Artificial Sequence: Synthetic oligonucleotide
cugguauccaguucuuuag

SEQ ID NO: 747068 - RNA, 19 nt, Artificial Sequence
  Description of Artificial Sequence: Synthetic oligonucleotide
augugcuggacucaacuug

SEQ ID NO: 747069 - RNA, 19 nt, Artificial Sequence
  Description of Artificial Sequence: Synthetic oligonucleotide
auuaaccccagcuuccccu

SEQ ID NO: 747070 - RNA, 19 nt, Artificial Sequence
  Description of Artificial Sequence: Synthetic oligonucleotide
acucgggaacacuauuugg

SEQ ID NO: 747071 - RNA, 19 nt, Artificial Sequence
  Description of Artificial Sequence: Synthetic oligonucleotide
ucuuuaggacccuuuccug

SEQ ID NO: 747072 - RNA, 19 nt, Artificial Sequence
  Description of Artificial Sequence: Synthetic oligonucleotide
uagaacuuguugagcuggg

SEQ ID NO: 747073 - RNA, 19 nt, Artificial Sequence
  Description of Artificial Sequence: Synthetic oligonucleotide
ugccauuaaccccagcuuc

SEQ ID NO: 747074 - RNA, 19 nt, Artificial Sequence
  Description of Artificial Sequence: Synthetic oligonucleotide
guagcauauaagauaugag

SEQ ID NO: 747075 - RNA, 19 nt, Artificial Sequence
  Description of Artificial Sequence: Synthetic oligonucleotide
uucucguaccaccagcgcu

SEQ ID NO: 747076 - RNA, 19 nt, Artificial Sequence
  Description of Artificial Sequence: Synthetic oligonucleotide
cacacacacacacacacuc

SEQ ID NO: 747077 - RNA, 19 nt, Artificial Sequence
  Description of Artificial Sequence: Synthetic oligonucleotide
acaugugcuggacucaacu

SEQ ID NO: 747078 - RNA, 19 nt, Artificial Sequence
  Description of Artificial Sequence: Synthetic oligonucleotide
uuguauaccuuccgacuga

SEQ ID NO: 747079 - RNA, 19 nt, Artificial Sequence
  Description of Artificial Sequence: Synthetic oligonucleotide
guaguauagcucccgacac

SEQ ID NO: 747080 - RNA, 19 nt, Artificial Sequence
  Description of Artificial Sequence: Synthetic oligonucleotide
auaccuuccgacugaucuc

SEQ ID NO: 747081 - RNA, 19 nt, Artificial Sequence
  Description of Artificial Sequence: Synthetic oligonucleotide
gacugcucgagacuaagga

SEQ ID NO: 747082 - RNA, 19 nt, Artificial Sequence
  Description of Artificial Sequence: Synthetic oligonucleotide
ugucccaauguuacugcgc

SEQ ID NO: 747083 - RNA, 19 nt, Artificial Sequence
  Description of Artificial Sequence: Synthetic oligonucleotide
cuugaugcuuuguugccug

SEQ ID NO: 747084 - RNA, 19 nt, Artificial Sequence
  Description of Artificial Sequence: Synthetic oligonucleotide
acacuucuuaguauagaac

SEQ ID NO: 747085 - RNA, 19 nt, Artificial Sequence
  Description of Artificial Sequence: Synthetic oligonucleotide
aaauaaugcagagcugaaa

SEQ ID NO: 747086 - RNA, 19 nt, Artificial Sequence
  Description of Artificial Sequence: Synthetic oligonucleotide
uaccugucgaucauuuccu

SEQ ID NO: 747087 - RNA, 19 nt, Artificial Sequence
  Description of Artificial Sequence: Synthetic oligonucleotide
acagacacacacaccacac

SEQ ID NO: 747088 - RNA, 19 nt, Artificial Sequence
  Description of Artificial Sequence: Synthetic oligonucleotide
uuacuauaguagugggucu

SEQ ID NO: 747089 - RNA, 19 nt, Artificial Sequence
  Description of Artificial Sequence: Synthetic oligonucleotide
ggacguuuauuucacauca

SEQ ID NO: 747090 - RNA, 19 nt, Artificial Sequence
  Description of Artificial Sequence: Synthetic oligonucleotide
uuaggaauugugugaggaa

SEQ ID NO: 747091 - RNA, 19 nt, Artificial Sequence
  Description of Artificial Sequence: Synthetic oligonucleotide
ucucguaccaccagcgcuc

SEQ ID NO: 747092 - RNA, 19 nt, Artificial Sequence
  Description of Artificial Sequence: Synthetic oligonucleotide
ugacuugaagcaagccacc

SEQ ID NO: 747093 - RNA, 19 nt, Artificial Sequence
  Description of Artificial Sequence: Synthetic oligonucleotide
acugcgcaacaccacacag

SEQ ID NO: 747094 - RNA, 19 nt, Artificial Sequence
  Description of Artificial Sequence: Synthetic oligonucleotide
ugaugagcuucucguacca

SEQ ID NO: 747095 - RNA, 19 nt, Artificial Sequence
  Description of Artificial Sequence: Synthetic oligonucleotide
uucacgcaguaguauagcu

SEQ ID NO: 747096 - RNA, 19 nt, Artificial Sequence
  Description of Artificial Sequence: Synthetic oligonucleotide
ucgggaacacuauuuggcu

SEQ ID NO: 747097 - RNA, 19 nt, Artificial Sequence
  Description of Artificial Sequence: Synthetic oligonucleotide
uuaggacccuuuccuguag

SEQ ID NO: 747098 - RNA, 19 nt, Artificial Sequence
  Description of Artificial Sequence: Synthetic oligonucleotide
cagaguagcagaucucaug

SEQ ID NO: 747099 - RNA, 19 nt, Artificial Sequence
  Description of Artificial Sequence: Synthetic oligonucleotide
aggucuagcauucccuugu

SEQ ID NO: 747100 - RNA, 19 nt, Artificial Sequence
  Description of Artificial Sequence: Synthetic oligonucleotide
uacuauaguagugggucug

SEQ ID NO: 747101 - RNA, 19 nt, Artificial Sequence
  Description of Artificial Sequence: Synthetic oligonucleotide
aaacgaucuucaucauccu

SEQ ID NO: 747102 - RNA, 19 nt, Artificial Sequence
  Description of Artificial Sequence: Synthetic oligonucleotide
ucacgcaguaguauagcuc

SEQ ID NO: 747103 - RNA, 19 nt, Artificial Sequence
  Description of Artificial Sequence: Synthetic oligonucleotide
agagccauuucuacgccac

SEQ ID NO: 747104 - RNA, 19 nt, Artificial Sequence
  Description of Artificial Sequence: Synthetic oligonucleotide
ucgagacuaaggacugugc

SEQ ID NO: 747105 - RNA, 19 nt, Artificial Sequence
  Description of Artificial Sequence: Synthetic oligonucleotide
guuacugcgcaacaccaca

SEQ ID NO: 747106 - RNA, 19 nt, Artificial Sequence
  Description of Artificial Sequence: Synthetic oligonucleotide
acuauaguagugggucugg

SEQ ID NO: 747107 - RNA, 19 nt, Artificial Sequence
  Description of Artificial Sequence: Synthetic oligonucleotide
uguuacugcgcaacaccac

SEQ ID NO: 747108 - RNA, 19 nt, Artificial Sequence
  Description of Artificial Sequence: Synthetic oligonucleotide
cauacgagaagagacacaa

SEQ ID NO: 747109 - RNA, 19 nt, Artificial Sequence
  Description of Artificial Sequence: Synthetic oligonucleotide
uuucuacgccacaaacaca

SEQ ID NO: 747110 - RNA, 19 nt, Artificial Sequence
  Description of Artificial Sequence: Synthetic oligonucleotide
ggagagaucacguccacuc

SEQ ID NO: 747111 - RNA, 19 nt, Artificial Sequence
  Description of Artificial Sequence: Synthetic oligonucleotide
gggguauuuauauucucug

SEQ ID NO: 747112 - RNA, 19 nt, Artificial Sequence
  Description of Artificial Sequence: Synthetic oligonucleotide
guagcagaucucaugggcc

SEQ ID NO: 747113 - RNA, 19 nt, Artificial Sequence
  Description of Artificial Sequence: Synthetic oligonucleotide
ucgaucauuuccugaggac

SEQ ID NO: 747114 - RNA, 19 nt, Artificial Sequence
  Description of Artificial Sequence: Synthetic oligonucleotide
aggcgccgcacuuucuucc

SEQ ID NO: 747115 - RNA, 19 nt, Artificial Sequence
  Description of Artificial Sequence: Synthetic oligonucleotide
ucuacgccacaaacacagg

SEQ ID NO: 747116 - RNA, 19 nt, Artificial Sequence
  Description of Artificial Sequence: Synthetic oligonucleotide
cacaccacacacaccacac

SEQ ID NO: 747117 - RNA, 19 nt, Artificial Sequence
  Description of Artificial Sequence: Synthetic oligonucleotide
uuuaggacccuuuccugua

SEQ ID NO: 747118 - RNA, 19 nt, Artificial Sequence
  Description of Artificial Sequence: Synthetic oligonucleotide
uaccuuccgacugaucucc

SEQ ID NO: 747119 - RNA, 19 nt, Artificial Sequence
  Description of Artificial Sequence: Synthetic oligonucleotide
uguucuccuagggacaggu

SEQ ID NO: 747120 - RNA, 19 nt, Artificial Sequence
  Description of Artificial Sequence: Synthetic oligonucleotide
caccacacacaccacacac

SEQ ID NO: 747121 - RNA, 19 nt, Artificial Sequence
  Description of Artificial Sequence: Synthetic oligonucleotide
uccggucauguucuccuag

SEQ ID NO: 747122 - RNA, 19 nt, Artificial Sequence
  Description of Artificial Sequence: Synthetic oligonucleotide
acacacacacacucuugag

SEQ ID NO: 747123 - RNA, 19 nt, Artificial Sequence
  Description of Artificial Sequence: Synthetic oligonucleotide
ucuugggacaguaggucau

SEQ ID NO: 747124 - RNA, 19 nt, Artificial Sequence
  Description of Artificial Sequence: Synthetic oligonucleotide
gacucaacuuggcugugac

SEQ ID NO: 747125 - RNA, 19 nt, Artificial Sequence
  Description of Artificial Sequence: Synthetic oligonucleotide
aacugcagccacauacgag

SEQ ID NO: 747126 - RNA, 19 nt, Artificial Sequence
  Description of Artificial Sequence: Synthetic oligonucleotide
ugcguguaccacaaauguc

SEQ ID NO: 747127 - RNA, 19 nt, Artificial Sequence
  Description of Artificial Sequence: Synthetic oligonucleotide
guaucucucacuucccaga

SEQ ID NO: 747128 - RNA, 19 nt, Artificial Sequence
  Description of Artificial Sequence: Synthetic oligonucleotide
ucugacugaacugcgcggu

SEQ ID NO: 747129 - RNA, 19 nt, Artificial Sequence
  Description of Artificial Sequence: Synthetic oligonucleotide
cacauacgagaagagacac

SEQ ID NO: 747130 - RNA, 19 nt, Artificial Sequence
  Description of Artificial Sequence: Synthetic oligonucleotide
agcggaacugucccagguc

SEQ ID NO: 747131 - RNA, 19 nt, Artificial Sequence
  Description of Artificial Sequence: Synthetic oligonucleotide
ucacucgggaacacuauuu

SEQ ID NO: 747132 - RNA, 19 nt, Artificial Sequence
  Description of Artificial Sequence: Synthetic oligonucleotide
gaucucaugggccauuggu

SEQ ID NO: 747133 - RNA, 19 nt, Artificial Sequence
  Description of Artificial Sequence: Synthetic oligonucleotide
auauaagauaugagguugu

SEQ ID NO: 747134 - RNA, 19 nt, Artificial Sequence
  Description of Artificial Sequence: Synthetic oligonucleotide
acuauuuggcugauggagu

SEQ ID NO: 747135 - RNA, 19 nt, Artificial Sequence
  Description of Artificial Sequence: Synthetic oligonucleotide
uugccauuaaccccagcuu

SEQ ID NO: 747136 - RNA, 19 nt, Artificial Sequence
  Description of Artificial Sequence: Synthetic oligonucleotide
ucguccucugacugaacug

SEQ ID NO: 747137 - RNA, 19 nt, Artificial Sequence
  Description of Artificial Sequence: Synthetic oligonucleotide
ugucccugcguguaccaca

SEQ ID NO: 747138 - RNA, 19 nt, Artificial Sequence
  Description of Artificial Sequence: Synthetic oligonucleotide
uacugcgcaacaccacaca

SEQ ID NO: 747139 - RNA, 19 nt, Artificial Sequence
  Description of Artificial Sequence: Synthetic oligonucleotide
ugagggacccuuagcugug

SEQ ID NO: 747140 - RNA, 19 nt, Artificial Sequence
  Description of Artificial Sequence: Synthetic oligonucleotide
acacaccacacacaccaca

SEQ ID NO: 747141 - RNA, 19 nt, Artificial Sequence
  Description of Artificial Sequence: Synthetic oligonucleotide
gcagagcugaaauauuuac

SEQ ID NO: 747142 - RNA, 19 nt, Artificial Sequence
  Description of Artificial Sequence: Synthetic oligonucleotide
ugugccggcugccacugga

SEQ ID NO: 747143 - RNA, 19 nt, Artificial Sequence
  Description of Artificial Sequence: Synthetic oligonucleotide
aucacccuaaccccucugu

SEQ ID NO: 747144 - RNA, 19 nt, Artificial Sequence
  Description of Artificial Sequence: Synthetic oligonucleotide
uacccaucccuucucuuuc

SEQ ID NO: 747145 - RNA, 19 nt, Artificial Sequence
  Description of Artificial Sequence: Synthetic oligonucleotide
gucgaucauuuccugagga

SEQ ID NO: 747146 - RNA, 19 nt, Artificial Sequence
  Description of Artificial Sequence: Synthetic oligonucleotide
acagcuguacauugucuau

SEQ ID NO: 747147 - RNA, 19 nt, Artificial Sequence
  Description of Artificial Sequence: Synthetic oligonucleotide
gccacauacgagaagagac

SEQ ID NO: 747148 - RNA, 19 nt, Artificial Sequence
  Description of Artificial Sequence: Synthetic oligonucleotide
aguauagcucccgacacuu

SEQ ID NO: 747149 - RNA, 19 nt, Artificial Sequence
  Description of Artificial Sequence: Synthetic oligonucleotide
gggcuugaugcuuuguugc

SEQ ID NO: 747150 - RNA, 19 nt, Artificial Sequence
  Description of Artificial Sequence: Synthetic oligonucleotide
gacuuucccaucaggcgcc

SEQ ID NO: 747151 - RNA, 19 nt, Artificial Sequence
  Description of Artificial Sequence: Synthetic oligonucleotide
aucucaugggccauuggug

SEQ ID NO: 747152 - RNA, 19 nt, Artificial Sequence
  Description of Artificial Sequence: Synthetic oligonucleotide
agaucucaugggccauugg

SEQ ID NO: 747153 - RNA, 19 nt, Artificial Sequence
  Description of Artificial Sequence: Synthetic oligonucleotide
uaaggacguuuauuucaca

SEQ ID NO: 747154 - RNA, 19 nt, Artificial Sequence
  Description of Artificial Sequence: Synthetic oligonucleotide
cuauaguagugggucuggg

SEQ ID NO: 747155 - RNA, 19 nt, Artificial Sequence
  Description of Artificial Sequence: Synthetic oligonucleotide
ucacguccacucagauugg

SEQ ID NO: 747156 - RNA, 19 nt, Artificial Sequence
  Description of Artificial Sequence: Synthetic oligonucleotide
ugguccauacccaucccuu

SEQ ID NO: 747157 - RNA, 19 nt, Artificial Sequence
  Description of Artificial Sequence: Synthetic oligonucleotide
acccuaaccccucuguaau

SEQ ID NO: 747158 - RNA, 19 nt, Artificial Sequence
  Description of Artificial Sequence: Synthetic oligonucleotide
cguuuauuucacaucacac

SEQ ID NO: 747159 - RNA, 19 nt, Artificial Sequence
  Description of Artificial Sequence: Synthetic oligonucleotide
guaccaccagcgcucauac

SEQ ID NO: 747160 - RNA, 19 nt, Artificial Sequence
  Description of Artificial Sequence: Synthetic oligonucleotide
guacuuguggcucaccacu

SEQ ID NO: 747161 - RNA, 19 nt, Artificial Sequence
  Description of Artificial Sequence: Synthetic oligonucleotide
cucgagacuaaggacugug

SEQ ID NO: 747162 - RNA, 19 nt, Artificial Sequence
  Description of Artificial Sequence: Synthetic oligonucleotide
uaguagugggucugggcaa

SEQ ID NO: 747163 - RNA, 19 nt, Artificial Sequence
  Description of Artificial Sequence: Synthetic oligonucleotide
agguuguguaaaagugugg

SEQ ID NO: 747164 - RNA, 19 nt, Artificial Sequence
  Description of Artificial Sequence: Synthetic oligonucleotide
cuacgccacaaacacagga

SEQ ID NO: 747165 - RNA, 19 nt, Artificial Sequence
  Description of Artificial Sequence: Synthetic oligonucleotide
ccccucuguaauuucaugc

SEQ ID NO: 747166 - RNA, 19 nt, Artificial Sequence
  Description of Artificial Sequence: Synthetic oligonucleotide
accugcgugggcauaggac

SEQ ID NO: 747167 - RNA, 19 nt, Artificial Sequence
  Description of Artificial Sequence: Synthetic oligonucleotide
cauuaaccccagcuucccc

SEQ ID NO: 747168 - RNA, 19 nt, Artificial Sequence
  Description of Artificial Sequence: Synthetic oligonucleotide
auguuacugcgcaacacca

SEQ ID NO: 747169 - RNA, 19 nt, Artificial Sequence
  Description of Artificial Sequence: Synthetic oligonucleotide
cuucucguaccaccagcgc

SEQ ID NO: 747170 - RNA, 19 nt, Artificial Sequence
  Description of Artificial Sequence: Synthetic oligonucleotide
cacacacacacacucuuga

SEQ ID NO: 747171 - RNA, 19 nt, Artificial Sequence
  Description of Artificial Sequence: Synthetic oligonucleotide
gucuugggacaguagguca

SEQ ID NO: 747172 - RNA, 19 nt, Artificial Sequence
  Description of Artificial Sequence: Synthetic oligonucleotide
gacugaacugcgcgguuca

SEQ ID NO: 747173 - RNA, 19 nt, Artificial Sequence
  Description of Artificial Sequence: Synthetic oligonucleotide
gagagaucacguccacuca

SEQ ID NO: 747174 - RNA, 19 nt, Artificial Sequence
  Description of Artificial Sequence: Synthetic oligonucleotide
auaggacugcucgagacua

SEQ ID NO: 747175 - RNA, 19 nt, Artificial Sequence
  Description of Artificial Sequence: Synthetic oligonucleotide
auugugugaggaagcagga

SEQ ID NO: 747176 - RNA, 19 nt, Artificial Sequence
  Description of Artificial Sequence: Synthetic oligonucleotide
auacgagaagagacacaac

SEQ ID NO: 747177 - RNA, 19 nt, Artificial Sequence
  Description of Artificial Sequence: Synthetic oligonucleotide
cacaaaugucugcuucuuc

SEQ ID NO: 747178 - RNA, 19 nt, Artificial Sequence
  Description of Artificial Sequence: Synthetic oligonucleotide
cugcucgagacuaaggacu

SEQ ID NO: 747179 - RNA, 19 nt, Artificial Sequence
  Description of Artificial Sequence: Synthetic oligonucleotide
gcauaggacugcucgagac

SEQ ID NO: 747180 - RNA, 19 nt, Artificial Sequence
  Description of Artificial Sequence: Synthetic oligonucleotide
uguauaccuuccgacugau

SEQ ID NO: 747181 - RNA, 19 nt, Artificial Sequence
  Description of Artificial Sequence: Synthetic oligonucleotide
cuuuacuauaguagugggu

SEQ ID NO: 747182 - RNA, 19 nt, Artificial Sequence
  Description of Artificial Sequence: Synthetic oligonucleotide
ucaggcgccgcacuuucuu

SEQ ID NO: 747183 - RNA, 19 nt, Artificial Sequence
  Description of Artificial Sequence: Synthetic oligonucleotide
aggacccuuuccuguagca

SEQ ID NO: 747184 - RNA, 19 nt, Artificial Sequence
  Description of Artificial Sequence: Synthetic oligonucleotide
gacacacacaccacacaca

SEQ ID NO: 747185 - RNA, 19 nt, Artificial Sequence
  Description of Artificial Sequence: Synthetic oligonucleotide
cacacacaccacacacacc

SEQ ID NO: 747186 - RNA, 19 nt, Artificial Sequence
  Description of Artificial Sequence: Synthetic oligonucleotide
cuuuaggacccuuuccugu

SEQ ID NO: 747187 - RNA, 19 nt, Artificial Sequence
  Description of Artificial Sequence: Synthetic oligonucleotide
ccacacacaccacacacac

SEQ ID NO: 747188 - RNA, 19 nt, Artificial Sequence
  Description of Artificial Sequence: Synthetic oligonucleotide
agccacauacgagaagaga

SEQ ID NO: 747189 - RNA, 19 nt, Artificial Sequence
  Description of Artificial Sequence: Synthetic oligonucleotide
cagaguagcugguggccac

SEQ ID NO: 747190 - RNA, 19 nt, Artificial Sequence
  Description of Artificial Sequence: Synthetic oligonucleotide
cuugagccagcagcuuugg

SEQ ID NO: 747191 - RNA, 19 nt, Artificial Sequence
  Description of Artificial Sequence: Synthetic oligonucleotide
acaccacacacaccacaca

SEQ ID NO: 747192 - RNA, 19 nt, Artificial Sequence
  Description of Artificial Sequence: Synthetic oligonucleotide
caccagcgcucauacacug

SEQ ID NO: 747193 - RNA, 19 nt, Artificial Sequence
  Description of Artificial Sequence: Synthetic oligonucleotide
ugacugaacugcgcgguuc

SEQ ID NO: 747194 - RNA, 19 nt, Artificial Sequence
  Description of Artificial Sequence: Synthetic oligonucleotide
ccgaggacccagcugaggg

SEQ ID NO: 747195 - RNA, 19 nt, Artificial Sequence
  Description of Artificial Sequence: Synthetic oligonucleotide
cuuagcugugccauagccu

SEQ ID NO: 747196 - RNA, 19 nt, Artificial Sequence
  Description of Artificial Sequence: Synthetic oligonucleotide
cauccugccgggcaucguc

SEQ ID NO: 747197 - RNA, 19 nt, Artificial Sequence
  Description of Artificial Sequence: Synthetic oligonucleotide
aggaggucuagcauucccu

SEQ ID NO: 747198 - RNA, 19 nt, Artificial Sequence
  Description of Artificial Sequence: Synthetic oligonucleotide
cugcgugggcauaggacug

SEQ ID NO: 747199 - RNA, 19 nt, Artificial Sequence
  Description of Artificial Sequence: Synthetic oligonucleotide
aguccguaucuuccuccug

SEQ ID NO: 747200 - RNA, 19 nt, Artificial Sequence
  Description of Artificial Sequence: Synthetic oligonucleotide
cuggacucaacuuggcugu

SEQ ID NO: 747201 - RNA, 19 nt, Artificial Sequence
  Description of Artificial Sequence: Synthetic oligonucleotide
cauuggugucuuguacuug

SEQ ID NO: 747202 - RNA, 19 nt, Artificial Sequence
  Description of Artificial Sequence: Synthetic oligonucleotide
cugcguguaccacaaaugu

SEQ ID NO: 747203 - RNA, 19 nt, Artificial Sequence
  Description of Artificial Sequence: Synthetic oligonucleotide
acacacacacacacucuug

SEQ ID NO: 747204 - RNA, 19 nt, Artificial Sequence
  Description of Artificial Sequence: Synthetic oligonucleotide
uggagagaucacguccacu

SEQ ID NO: 747205 - RNA, 19 nt, Artificial Sequence
  Description of Artificial Sequence: Synthetic oligonucleotide
acguccacucagauugguc

SEQ ID NO: 747206 - RNA, 19 nt, Artificial Sequence
  Description of Artificial Sequence: Synthetic oligonucleotide
cuugggacaguaggucaug

SEQ ID NO: 747207 - RNA, 19 nt, Artificial Sequence
  Description of Artificial Sequence: Synthetic oligonucleotide
cacaccacacacacacaca

SEQ ID NO: 747208 - RNA, 19 nt, Artificial Sequence
  Description of Artificial Sequence: Synthetic oligonucleotide
gugaggggugaccccuggg

SEQ ID NO: 747209 - RNA, 19 nt, Artificial Sequence
  Description of Artificial Sequence: Synthetic oligonucleotide
aaccccucuguaauuucau

SEQ ID NO: 747210 - RNA, 19 nt, Artificial Sequence
  Description of Artificial Sequence: Synthetic oligonucleotide
acauacgagaagagacaca

SEQ ID NO: 747211 - RNA, 19 nt, Artificial Sequence
  Description of Artificial Sequence: Synthetic oligonucleotide
agcaagaggugagggguga

SEQ ID NO: 747212 - RNA, 19 nt, Artificial Sequence
  Description of Artificial Sequence: Synthetic oligonucleotide
ugcgugggcauaggacugc

SEQ ID NO: 747213 - RNA, 19 nt, Artificial Sequence
  Description of Artificial Sequence: Synthetic oligonucleotide
acacacacacacacacucu

SEQ ID NO: 747214 - RNA, 19 nt, Artificial Sequence
  Description of Artificial Sequence: Synthetic oligonucleotide
cagaccugcgugggcauag

SEQ ID NO: 747215 - RNA, 19 nt, Artificial Sequence
  Description of Artificial Sequence: Synthetic oligonucleotide
gcguguaccacaaaugucu

SEQ ID NO: 747216 - RNA, 19 nt, Artificial Sequence
  Description of Artificial Sequence: Synthetic oligonucleotide
uggccaguuuaggaauugu

SEQ ID NO: 747217 - RNA, 19 nt, Artificial Sequence
  Description of Artificial Sequence: Synthetic oligonucleotide
cacccuaaccccucuguaa

SEQ ID NO: 747218 - RNA, 19 nt, Artificial Sequence
  Description of Artificial Sequence: Synthetic oligonucleotide
ggaccggauggagagauca

SEQ ID NO: 747219 - RNA, 19 nt, Artificial Sequence
  Description of Artificial Sequence: Synthetic oligonucleotide
accacacacaccacacaca

SEQ ID NO: 747220 - RNA, 19 nt, Artificial Sequence
  Description of Artificial Sequence: Synthetic oligonucleotide
aagaccaaugugggacuuu

SEQ ID NO: 747221 - RNA, 19 nt, Artificial Sequence
  Description of Artificial Sequence: Synthetic oligonucleotide
ggccaguuuaggaauugug

SEQ ID NO: 747222 - RNA, 19 nt, Artificial Sequence
  Description of Artificial Sequence: Synthetic oligonucleotide
cuuccguuugucugguucu

SEQ ID NO: 747223 - RNA, 19 nt, Artificial Sequence
  Description of Artificial Sequence: Synthetic oligonucleotide
cauggcagucacucgggaa

SEQ ID NO: 747224 - RNA, 19 nt, Artificial Sequence
  Description of Artificial Sequence: Synthetic oligonucleotide
cagucacucgggaacacua

SEQ ID NO: 747225 - RNA, 19 nt, Artificial Sequence
  Description of Artificial Sequence: Synthetic oligonucleotide
cagacacacacaccacaca

SEQ ID NO: 747226 - RNA, 19 nt, Artificial Sequence
  Description of Artificial Sequence: Synthetic oligonucleotide
gcauauaagauaugagguu

SEQ ID NO: 747227 - RNA, 19 nt, Artificial Sequence
  Description of Artificial Sequence: Synthetic oligonucleotide
cacacaccacacacaccac

SEQ ID NO: 747228 - RNA, 19 nt, Artificial Sequence
  Description of Artificial Sequence: Synthetic oligonucleotide
cacucagauuggucagcug

SEQ ID NO: 747229 - RNA, 19 nt, Artificial Sequence
  Description of Artificial Sequence: Synthetic oligonucleotide
gccggcugccacuggaccg

SEQ ID NO: 747230 - RNA, 19 nt, Artificial Sequence
  Description of Artificial Sequence: Synthetic oligonucleotide
ccacauacgagaagagaca

SEQ ID NO: 747231 - RNA, 19 nt, Artificial Sequence
  Description of Artificial Sequence: Synthetic oligonucleotide
acacacacacacacacaca

SEQ ID NO: 747232 - RNA, 19 nt, Artificial Sequence
  Description of Artificial Sequence: Synthetic oligonucleotide
acacacacacacacacacu

SEQ ID NO: 747233 - RNA, 19 nt, Artificial Sequence
  Description of Artificial Sequence: Synthetic oligonucleotide
ccgacacuucuuaguauag

SEQ ID NO: 747234 - RNA, 19 nt, Artificial Sequence
  Description of Artificial Sequence: Synthetic oligonucleotide
gucugucccugcguguacc

SEQ ID NO: 747235 - RNA, 19 nt, Artificial Sequence
  Description of Artificial Sequence: Synthetic oligonucleotide
cauaggacugcucgagacu

SEQ ID NO: 747236 - RNA, 19 nt, Artificial Sequence
  Description of Artificial Sequence: Synthetic oligonucleotide
ggacugcucgagacuaagg

SEQ ID NO: 747237 - RNA, 19 nt, Artificial Sequence
  Description of Artificial Sequence: Synthetic oligonucleotide
uggggcucggaggucuucu

SEQ ID NO: 747238 - RNA, 19 nt, Artificial Sequence
  Description of Artificial Sequence: Synthetic oligonucleotide
gguccauacccaucccuuc

SEQ ID NO: 747239 - RNA, 19 nt, Artificial Sequence
  Description of Artificial Sequence: Synthetic oligonucleotide
cuuguggcucaccacuucu

SEQ ID NO: 747240 - RNA, 19 nt, Artificial Sequence
  Description of Artificial Sequence: Synthetic oligonucleotide
uggacucaacuuggcugug

SEQ ID NO: 747241 - RNA, 19 nt, Artificial Sequence
  Description of Artificial Sequence: Synthetic oligonucleotide
cagcuagagacaggccgag

SEQ ID NO: 747242 - RNA, 19 nt, Artificial Sequence
  Description of Artificial Sequence: Synthetic oligonucleotide
ggcugugacccacccuucc

SEQ ID NO: 747243 - RNA, 19 nt, Artificial Sequence
  Description of Artificial Sequence: Synthetic oligonucleotide
gaccugcgugggcauagga

SEQ ID NO: 747244 - RNA, 19 nt, Artificial Sequence
  Description of Artificial Sequence: Synthetic oligonucleotide
ucccuuccagggugacuug

SEQ ID NO: 747245 - RNA, 19 nt, Artificial Sequence
  Description of Artificial Sequence: Synthetic oligonucleotide
agaguagcugguggccacu

SEQ ID NO: 747246 - RNA, 19 nt, Artificial Sequence
  Description of Artificial Sequence: Synthetic oligonucleotide
cuacaaaauucucuuccuu

SEQ ID NO: 747247 - RNA, 19 nt, Artificial Sequence
  Description of Artificial Sequence: Synthetic oligonucleotide
aguuugccauuaaccccag

SEQ ID NO: 747248 - RNA, 19 nt, Artificial Sequence
  Description of Artificial Sequence: Synthetic oligonucleotide
gguaccugucgaucauuuc

SEQ ID NO: 747249 - RNA, 19 nt, Artificial Sequence
  Description of Artificial Sequence: Synthetic oligonucleotide
agaccugcgugggcauagg

SEQ ID NO: 747250 - RNA, 19 nt, Artificial Sequence
  Description of Artificial Sequence: Synthetic oligonucleotide
uacgaacugcagccacaua

SEQ ID NO: 747251 - RNA, 19 nt, Artificial Sequence
  Description of Artificial Sequence: Synthetic oligonucleotide
uccuagggacagguaccug

SEQ ID NO: 747252 - RNA, 19 nt, Artificial Sequence
  Description of Artificial Sequence: Synthetic oligonucleotide
caccacacacacacacaca

SEQ ID NO: 747253 - RNA, 19 nt, Artificial Sequence
  Description of Artificial Sequence: Synthetic oligonucleotide
ccaacagggguauuuauau

SEQ ID NO: 747254 - RNA, 19 nt, Artificial Sequence
  Description of Artificial Sequence: Synthetic oligonucleotide
gccauuggugucuuguacu

SEQ ID NO: 747255 - RNA, 19 nt, Artificial Sequence
  Description of Artificial Sequence: Synthetic oligonucleotide
guggcucaccacuucuuua

SEQ ID NO: 747256 - RNA, 19 nt, Artificial Sequence
  Description of Artificial Sequence: Synthetic oligonucleotide
gccaguuuaggaauugugu

SEQ ID NO: 747257 - RNA, 19 nt, Artificial Sequence
  Description of Artificial Sequence: Synthetic oligonucleotide
agucacucgggaacacuau

SEQ ID NO: 747258 - RNA, 19 nt, Artificial Sequence
  Description of Artificial Sequence: Synthetic oligonucleotide
agcaugaccuguggccagu

SEQ ID NO: 747259 - RNA, 19 nt, Artificial Sequence
  Description of Artificial Sequence: Synthetic oligonucleotide
cgcacuuucuuccugaugu

SEQ ID NO: 747260 - RNA, 19 nt, Artificial Sequence
  Description of Artificial Sequence: Synthetic oligonucleotide
uuccggucauguucuccua

SEQ ID NO: 747261 - RNA, 19 nt, Artificial Sequence
  Description of Artificial Sequence: Synthetic oligonucleotide
agguaccugucgaucauuu

SEQ ID NO: 747262 - RNA, 19 nt, Artificial Sequence
  Description of Artificial Sequence: Synthetic oligonucleotide
caggcgccgcacuuucuuc

SEQ ID NO: 747263 - RNA, 19 nt, Artificial Sequence
  Description of Artificial Sequence: Synthetic oligonucleotide
cacacacaccacacacaca

SEQ ID NO: 747264 - RNA, 19 nt, Artificial Sequence
  Description of Artificial Sequence: Synthetic oligonucleotide
ccauuaaccccagcuuccc

SEQ ID NO: 747265 - RNA, 19 nt, Artificial Sequence
  Description of Artificial Sequence: Synthetic oligonucleotide
ccgggcaucguccucugac

SEQ ID NO: 747266 - RNA, 19 nt, Artificial Sequence
  Description of Artificial Sequence: Synthetic oligonucleotide
cuuaggcagaguagcuggu

SEQ ID NO: 747267 - RNA, 19 nt, Artificial Sequence
  Description of Artificial Sequence: Synthetic oligonucleotide
cacacaccacacacacaca

SEQ ID NO: 747268 - RNA, 19 nt, Artificial Sequence
  Description of Artificial Sequence: Synthetic oligonucleotide
ggcauaggacugcucgaga

SEQ ID NO: 747269 - RNA, 19 nt, Artificial Sequence
  Description of Artificial Sequence: Synthetic oligonucleotide
uccguuugucugguucuuu

SEQ ID NO: 747270 - RNA, 19 nt, Artificial Sequence
  Description of Artificial Sequence: Synthetic oligonucleotide
cauugauuugcuggcugua

SEQ ID NO: 747271 - RNA, 19 nt, Artificial Sequence
  Description of Artificial Sequence: Synthetic oligonucleotide
ccaauguuacugcgcaaca

SEQ ID NO: 747272 - RNA, 19 nt, Artificial Sequence
  Description of Artificial Sequence: Synthetic oligonucleotide
cacacacacacacacucuu

SEQ ID NO: 747273 - RNA, 19 nt, Artificial Sequence
  Description of Artificial Sequence: Synthetic oligonucleotide
ggacagguaccugucgauc

SEQ ID NO: 747274 - RNA, 19 nt, Artificial Sequence
  Description of Artificial Sequence: Synthetic oligonucleotide
cgagacuaaggacugugca

SEQ ID NO: 747275 - RNA, 19 nt, Artificial Sequence
  Description of Artificial Sequence: Synthetic oligonucleotide
guauagcucccgacacuuc

SEQ ID NO: 747276 - RNA, 19 nt, Artificial Sequence
  Description of Artificial Sequence: Synthetic oligonucleotide
gggugacuugaagcaagcc

SEQ ID NO: 747277 - RNA, 19 nt, Artificial Sequence
  Description of Artificial Sequence: Synthetic oligonucleotide
ccugucgaucauuuccuga

SEQ ID NO: 747278 - RNA, 19 nt, Artificial Sequence
  Description of Artificial Sequence: Synthetic oligonucleotide
caugugcuggacucaacuu

SEQ ID NO: 747279 - RNA, 19 nt, Artificial Sequence
  Description of Artificial Sequence: Synthetic oligonucleotide
ccugcgugggcauaggacu

SEQ ID NO: 747280 - RNA, 19 nt, Artificial Sequence
  Description of Artificial Sequence: Synthetic oligonucleotide
gacuaaggacugugcacuu

SEQ ID NO: 747281 - RNA, 19 nt, Artificial Sequence
  Description of Artificial Sequence: Synthetic oligonucleotide
cgcaguaguauagcucccg

SEQ ID NO: 747282 - RNA, 19 nt, Artificial Sequence
  Description of Artificial Sequence: Synthetic oligonucleotide
guauaccuuccgacugauc

SEQ ID NO: 747283 - RNA, 19 nt, Artificial Sequence
  Description of Artificial Sequence: Synthetic oligonucleotide
caccuaguucaggcccggg

SEQ ID NO: 747284 - RNA, 19 nt, Artificial Sequence
  Description of Artificial Sequence: Synthetic oligonucleotide
gacccuuagcugugccaua

SEQ ID NO: 747285 - RNA, 19 nt, Artificial Sequence
  Description of Artificial Sequence: Synthetic oligonucleotide
gucacucgggaacacuauu

SEQ ID NO: 747286 - RNA, 19 nt, Artificial Sequence
  Description of Artificial Sequence: Synthetic oligonucleotide
gucccugcguguaccacaa

SEQ ID NO: 747287 - RNA, 19 nt, Artificial Sequence
  Description of Artificial Sequence: Synthetic oligonucleotide
ggcuguauacaagaccaau

SEQ ID NO: 747288 - RNA, 19 nt, Artificial Sequence
  Description of Artificial Sequence: Synthetic oligonucleotide
cuggaccggauggagagau

SEQ ID NO: 747289 - RNA, 19 nt, Artificial Sequence
  Description of Artificial Sequence: Synthetic oligonucleotide
cugugacccacccuuccau

SEQ ID NO: 747290 - RNA, 19 nt, Artificial Sequence
  Description of Artificial Sequence: Synthetic oligonucleotide
caguucuuuaggacccuuu

SEQ ID NO: 747291 - RNA, 19 nt, Artificial Sequence
  Description of Artificial Sequence: Synthetic oligonucleotide
ccacacacacacacacaca

SEQ ID NO: 747292 - RNA, 19 nt, Artificial Sequence
  Description of Artificial Sequence: Synthetic oligonucleotide
cugcuacgaacugcagcca

SEQ ID NO: 747293 - RNA, 19 nt, Artificial Sequence
  Description of Artificial Sequence: Synthetic oligonucleotide
cucguaccaccagcgcuca

SEQ ID NO: 747294 - RNA, 19 nt, Artificial Sequence
  Description of Artificial Sequence: Synthetic oligonucleotide
cauacccaucccuucucuu

SEQ ID NO: 747295 - RNA, 19 nt, Artificial Sequence
  Description of Artificial Sequence: Synthetic oligonucleotide
caggcacaugugcuggacu

SEQ ID NO: 747296 - RNA, 19 nt, Artificial Sequence
  Description of Artificial Sequence: Synthetic oligonucleotide
gcgcucauacacuguccca

SEQ ID NO: 747297 - RNA, 19 nt, Artificial Sequence
  Description of Artificial Sequence: Synthetic oligonucleotide
gugccggcugccacuggac

SEQ ID NO: 747298 - RNA, 19 nt, Artificial Sequence
  Description of Artificial Sequence: Synthetic oligonucleotide
cuccuagggacagguaccu

SEQ ID NO: 747299 - RNA, 19 nt, Artificial Sequence
  Description of Artificial Sequence: Synthetic oligonucleotide
ucguaccaccagcgcucau

SEQ ID NO: 747300 - RNA, 19 nt, Artificial Sequence
  Description of Artificial Sequence: Synthetic oligonucleotide
ggucuagcauucccuugua

SEQ ID NO: 747301 - RNA, 19 nt, Artificial Sequence
  Description of Artificial Sequence: Synthetic oligonucleotide
aggcgcuuccggucauguu

SEQ ID NO: 747302 - RNA, 19 nt, Artificial Sequence
  Description of Artificial Sequence: Synthetic oligonucleotide
ccgcacuuucuuccugaug

SEQ ID NO: 747303 - RNA, 19 nt, Artificial Sequence
  Description of Artificial Sequence: Synthetic oligonucleotide
gggacagguaccugucgau

SEQ ID NO: 747304 - RNA, 19 nt, Artificial Sequence
  Description of Artificial Sequence: Synthetic oligonucleotide
gaacugcgcgguucagcuu

SEQ ID NO: 747305 - RNA, 19 nt, Artificial Sequence
  Description of Artificial Sequence: Synthetic oligonucleotide
ggcagucacucgggaacac

SEQ ID NO: 747306 - RNA, 19 nt, Artificial Sequence
  Description of Artificial Sequence: Synthetic oligonucleotide
ccaugcuguccuucacgca

SEQ ID NO: 747307 - RNA, 19 nt, Artificial Sequence
  Description of Artificial Sequence: Synthetic oligonucleotide
ccguaucuuccuccuggca

SEQ ID NO: 747308 - RNA, 19 nt, Artificial Sequence
  Description of Artificial Sequence: Synthetic oligonucleotide
cccugcguguaccacaaau

SEQ ID NO: 747309 - RNA, 19 nt, Artificial Sequence
  Description of Artificial Sequence: Synthetic oligonucleotide
ccccaaguaucucucacuu

SEQ ID NO: 747310 - RNA, 19 nt, Artificial Sequence
  Description of Artificial Sequence: Synthetic oligonucleotide
cgacacuucuuaguauaga

SEQ ID NO: 747311 - RNA, 19 nt, Artificial Sequence
  Description of Artificial Sequence: Synthetic oligonucleotide
gccagcaaacgaucuucau

SEQ ID NO: 747312 - RNA, 19 nt, Artificial Sequence
  Description of Artificial Sequence: Synthetic oligonucleotide
cugacugaacugcgcgguu

SEQ ID NO: 747313 - RNA, 19 nt, Artificial Sequence
  Description of Artificial Sequence: Synthetic oligonucleotide
cacguccacucagauuggu

SEQ ID NO: 747314 - RNA, 19 nt, Artificial Sequence
  Description of Artificial Sequence: Synthetic oligonucleotide
ggcgccgcacuuucuuccu

SEQ ID NO: 747315 - RNA, 19 nt, Artificial Sequence
  Description of Artificial Sequence: Synthetic oligonucleotide
ccaccagcgcucauacacu

SEQ ID NO: 747316 - RNA, 19 nt, Artificial Sequence
  Description of Artificial Sequence: Synthetic oligonucleotide
gcccgggcuugaugcuuug

SEQ ID NO: 747317 - RNA, 19 nt, Artificial Sequence
  Description of Artificial Sequence: Synthetic oligonucleotide
cgccgcacuuucuuccuga

SEQ ID NO: 747318 - RNA, 19 nt, Artificial Sequence
  Description of Artificial Sequence: Synthetic oligonucleotide
gacccagcugagggacccu

SEQ ID NO: 747319 - RNA, 19 nt, Artificial Sequence
  Description of Artificial Sequence: Synthetic oligonucleotide
ggcuggccccaaguaucuc

SEQ ID NO: 747320 - RNA, 19 nt, Artificial Sequence
  Description of Artificial Sequence: Synthetic oligonucleotide
gccgcacuuucuuccugau

SEQ ID NO: 747321 - RNA, 19 nt, Artificial Sequence
  Description of Artificial Sequence: Synthetic oligonucleotide
cccuaaccccucuguaauu

SEQ ID NO: 747322 - RNA, 19 nt, Artificial Sequence
  Description of Artificial Sequence: Synthetic oligonucleotide
gcauucccuuguauaccuu

SEQ ID NO: 747323 - RNA, 19 nt, Artificial Sequence
  Description of Artificial Sequence: Synthetic oligonucleotide
gcaugaccuguggccaguu

SEQ ID NO: 747324 - RNA, 19 nt, Artificial Sequence
  Description of Artificial Sequence: Synthetic oligonucleotide
ccuugccaacagggguauu

SEQ ID NO: 747325 - RNA, 19 nt, Artificial Sequence
  Description of Artificial Sequence: Synthetic oligonucleotide
aaaucaagaguuccccugc

SEQ ID NO: 747326 - RNA, 19 nt, Artificial Sequence
  Description of Artificial Sequence: Synthetic oligonucleotide
uacuuauguguauagaagg

SEQ ID NO: 747327 - RNA, 19 nt, Artificial Sequence
  Description of Artificial Sequence: Synthetic oligonucleotide
uuauguguauagaaggccg

SEQ ID NO: 747328 - RNA, 19 nt, Artificial Sequence
  Description of Artificial Sequence: Synthetic oligonucleotide
uuaaucucaaggcagaauc

SEQ ID NO: 747329 - RNA, 19 nt, Artificial Sequence
  Description of Artificial Sequence: Synthetic oligonucleotide
aaaaucaagaguuccccug

SEQ ID NO: 747330 - RNA, 19 nt, Artificial Sequence
  Description of Artificial Sequence: Synthetic oligonucleotide
ugauccaacagggagaagg

SEQ ID NO: 747331 - RNA, 19 nt, Artificial Sequence
  Description of Artificial Sequence: Synthetic oligonucleotide
acuacauugaagcugcaag

SEQ ID NO: 747332 - RNA, 19 nt, Artificial Sequence
  Description of Artificial Sequence: Synthetic oligonucleotide
uccaguuuggaucagggug

SEQ ID NO: 747333 - RNA, 19 nt, Artificial Sequence
  Description of Artificial Sequence: Synthetic oligonucleotide
ugugcuugcagccagacuc

SEQ ID NO: 747334 - RNA, 19 nt, Artificial Sequence
  Description of Artificial Sequence: Synthetic oligonucleotide
accugggucgcucugaucc

SEQ ID NO: 747335 - RNA, 19 nt, Artificial Sequence
  Description of Artificial Sequence: Synthetic oligonucleotide
uaaccuaggcaaaagaaga

SEQ ID NO: 747336 - RNA, 19 nt, Artificial Sequence
  Description of Artificial Sequence: Synthetic oligonucleotide
agaaucuuacaacuacccc

SEQ ID NO: 747337 - RNA, 19 nt, Artificial Sequence
  Description of Artificial Sequence: Synthetic oligonucleotide
ggcaaaagaagaaagaggg

SEQ ID NO: 747338 - RNA, 19 nt, Artificial Sequence
  Description of Artificial Sequence: Synthetic oligonucleotide
ugggagaugaauuuggggu

SEQ ID NO: 747339 - RNA, 19 nt, Artificial Sequence
  Description of Artificial Sequence: Synthetic oligonucleotide
cuuaagcccagaaagcucc

SEQ ID NO: 747340 - RNA, 19 nt, Artificial Sequence
  Description of Artificial Sequence: Synthetic oligonucleotide
uuuggaucaggguggaagg

SEQ ID NO: 747341 - RNA, 19 nt, Artificial Sequence
  Description of Artificial Sequence: Synthetic oligonucleotide
uacaauucaggauuuauua

SEQ ID NO: 747342 - RNA, 19 nt, Artificial Sequence
  Description of Artificial Sequence: Synthetic oligonucleotide
uggaaguucuuccaguuug

SEQ ID NO: 747343 - RNA, 19 nt, Artificial Sequence
  Description of Artificial Sequence: Synthetic oligonucleotide
gauauagcaccugagcagg

SEQ ID NO: 747344 - RNA, 19 nt, Artificial Sequence
  Description of Artificial Sequence: Synthetic oligonucleotide
aaucuuacaacuaccccuc

SEQ ID NO: 747345 - RNA, 19 nt, Artificial Sequence
  Description of Artificial Sequence: Synthetic oligonucleotide
uauguguauagaaggccgg

SEQ ID NO: 747346 - RNA, 19 nt, Artificial Sequence
  Description of Artificial Sequence: Synthetic oligonucleotide
caaguggcccuguagaugg

SEQ ID NO: 747347 - RNA, 19 nt, Artificial Sequence
  Description of Artificial Sequence: Synthetic oligonucleotide
acuuauguguauagaaggc

SEQ ID NO: 747348 - RNA, 19 nt, Artificial Sequence
  Description of Artificial Sequence: Synthetic oligonucleotide
uguagauagagagaugugu

SEQ ID NO: 747349 - RNA, 19 nt, Artificial Sequence
  Description of Artificial Sequence: Synthetic oligonucleotide
acuaaagucacagccacag

SEQ ID NO: 747350 - RNA, 19 nt, Artificial Sequence
  Description of Artificial Sequence: Synthetic oligonucleotide
uggcuuuacacucuccucc

SEQ ID NO: 747351 - RNA, 19 nt, Artificial Sequence
  Description of Artificial Sequence: Synthetic oligonucleotide
aauuugggguagccaaaac

SEQ ID NO: 747352 - RNA, 19 nt, Artificial Sequence
  Description of Artificial Sequence: Synthetic oligonucleotide
cuugaggcggcguuuaggg

SEQ ID NO: 747353 - RNA, 19 nt, Artificial Sequence
  Description of Artificial Sequence: Synthetic oligonucleotide
uugccauugaggaacgcag

SEQ ID NO: 747354 - RNA, 19 nt, Artificial Sequence
  Description of Artificial Sequence: Synthetic oligonucleotide
aacagucgccucaucaugc

SEQ ID NO: 747355 - RNA, 19 nt, Artificial Sequence
  Description of Artificial Sequence: Synthetic oligonucleotide
auaauuucgcuuccggaug

SEQ ID NO: 747356 - RNA, 19 nt, Artificial Sequence
  Description of Artificial Sequence: Synthetic oligonucleotide
cagaaucuuacaacuaccc

SEQ ID NO: 747357 - RNA, 19 nt, Artificial Sequence
  Description of Artificial Sequence: Synthetic oligonucleotide
gauagagagaugugugccc

SEQ ID NO: 747358 - RNA, 19 nt, Artificial Sequence
  Description of Artificial Sequence: Synthetic oligonucleotide
agacauuaaucucaaggca

SEQ ID NO: 747359 - RNA, 19 nt, Artificial Sequence
  Description of Artificial Sequence: Synthetic oligonucleotide
cuuauguguauagaaggcc

SEQ ID NO: 747360 - RNA, 19 nt, Artificial Sequence
  Description of Artificial Sequence: Synthetic oligonucleotide
aggccuaacacuuggaccu

SEQ ID NO: 747361 - RNA, 19 nt, Artificial Sequence
  Description of Artificial Sequence: Synthetic oligonucleotide
ucaagaguuccccugcugu

SEQ ID NO: 747362 - RNA, 19 nt, Artificial Sequence
  Description of Artificial Sequence: Synthetic oligonucleotide
ugggcuaguaaccuaggca

SEQ ID NO: 747363 - RNA, 19 nt, Artificial Sequence
  Description of Artificial Sequence: Synthetic oligonucleotide
augaauuugggguagccaa

SEQ ID NO: 747364 - RNA, 19 nt, Artificial Sequence
  Description of Artificial Sequence: Synthetic oligonucleotide
guaaccuaggcaaaagaag

SEQ ID NO: 747365 - RNA, 19 nt, Artificial Sequence
  Description of Artificial Sequence: Synthetic oligonucleotide
ucacuauggaugcagcgga

SEQ ID NO: 747366 - RNA, 19 nt, Artificial Sequence
  Description of Artificial Sequence: Synthetic oligonucleotide
aauaaccagagagggcgac

SEQ ID NO: 747367 - RNA, 19 nt, Artificial Sequence
  Description of Artificial Sequence: Synthetic oligonucleotide
aaccccgagaccugcuccc

SEQ ID NO: 747368 - RNA, 19 nt, Artificial Sequence
  Description of Artificial Sequence: Synthetic oligonucleotide
auacuuauguguauagaag

SEQ ID NO: 747369 - RNA, 19 nt, Artificial Sequence
  Description of Artificial Sequence: Synthetic oligonucleotide
uugaggaacgcagacaccu

SEQ ID NO: 747370 - RNA, 19 nt, Artificial Sequence
  Description of Artificial Sequence: Synthetic oligonucleotide
auagcaccugagcaggcac

SEQ ID NO: 747371 - RNA, 19 nt, Artificial Sequence
  Description of Artificial Sequence: Synthetic oligonucleotide
uacauugaagcugcaagug

SEQ ID NO: 747372 - RNA, 19 nt, Artificial Sequence
  Description of Artificial Sequence: Synthetic oligonucleotide
ugaggcggcguuuagggca

SEQ ID NO: 747373 - RNA, 19 nt, Artificial Sequence
  Description of Artificial Sequence: Synthetic oligonucleotide
uagauggcgaaguugccca

SEQ ID NO: 747374 - RNA, 19 nt, Artificial Sequence
  Description of Artificial Sequence: Synthetic oligonucleotide
aagcacuccagguuaggcu

SEQ ID NO: 747375 - RNA, 19 nt, Artificial Sequence
  Description of Artificial Sequence: Synthetic oligonucleotide
guagauagagagaugugug

SEQ ID NO: 747376 - RNA, 19 nt, Artificial Sequence
  Description of Artificial Sequence: Synthetic oligonucleotide
ggauauagcaccugagcag

SEQ ID NO: 747377 - RNA, 19 nt, Artificial Sequence
  Description of Artificial Sequence: Synthetic oligonucleotide
cauuugaagacuccuucac

SEQ ID NO: 747378 - RNA, 19 nt, Artificial Sequence
  Description of Artificial Sequence: Synthetic oligonucleotide
caucccgcacauaauuucg

SEQ ID NO: 747379 - RNA, 19 nt, Artificial Sequence
  Description of Artificial Sequence: Synthetic oligonucleotide
aagauugucaaaggcgccu

SEQ ID NO: 747380 - RNA, 19 nt, Artificial Sequence
  Description of Artificial Sequence: Synthetic oligonucleotide
cuauggaugcagcggauag

SEQ ID NO: 747381 - RNA, 19 nt, Artificial Sequence
  Description of Artificial Sequence: Synthetic oligonucleotide
accaauuggaggcaccuga

SEQ ID NO: 747382 - RNA, 19 nt, Artificial Sequence
  Description of Artificial Sequence: Synthetic oligonucleotide
uaauuucgcuuccggaugu

SEQ ID NO: 747383 - RNA, 19 nt, Artificial Sequence
  Description of Artificial Sequence: Synthetic oligonucleotide
agcccagaaagcuccacuc

SEQ ID NO: 747384 - RNA, 19 nt, Artificial Sequence
  Description of Artificial Sequence: Synthetic oligonucleotide
gaugcagcggauaggcagg

SEQ ID NO: 747385 - RNA, 19 nt, Artificial Sequence
  Description of Artificial Sequence: Synthetic oligonucleotide
ucaucaugcgggcaccaca

SEQ ID NO: 747386 - RNA, 19 nt, Artificial Sequence
  Description of Artificial Sequence: Synthetic oligonucleotide
caucacugccuauggauag

SEQ ID NO: 747387 - RNA, 19 nt, Artificial Sequence
  Description of Artificial Sequence: Synthetic oligonucleotide
auaguccagaggaagcugg

SEQ ID NO: 747388 - RNA, 19 nt, Artificial Sequence
  Description of Artificial Sequence: Synthetic oligonucleotide
aaucaagaguuccccugcu

SEQ ID NO: 747389 - RNA, 19 nt, Artificial Sequence
  Description of Artificial Sequence: Synthetic oligonucleotide
caggccuaacacuuggacc

SEQ ID NO: 747390 - RNA, 19 nt, Artificial Sequence
  Description of Artificial Sequence: Synthetic oligonucleotide
aagacugcgucaucccgca

SEQ ID NO: 747391 - RNA, 19 nt, Artificial Sequence
  Description of Artificial Sequence: Synthetic oligonucleotide
gauugucaaaggcgccugg

SEQ ID NO: 747392 - RNA, 19 nt, Artificial Sequence
  Description of Artificial Sequence: Synthetic oligonucleotide
aaggcgccugguaacacac

SEQ ID NO: 747393 - RNA, 19 nt, Artificial Sequence
  Description of Artificial Sequence: Synthetic oligonucleotide
uaggccuccccacuaaagu

SEQ ID NO: 747394 - RNA, 19 nt, Artificial Sequence
  Description of Artificial Sequence: Synthetic oligonucleotide
aaguagacaccugcacggg

SEQ ID NO: 747395 - RNA, 19 nt, Artificial Sequence
  Description of Artificial Sequence: Synthetic oligonucleotide
ucaucccgcacauaauuuc

SEQ ID NO: 747396 - RNA, 19 nt, Artificial Sequence
  Description of Artificial Sequence: Synthetic oligonucleotide
uccuugguacaguaggcac

SEQ ID NO: 747397 - RNA, 19 nt, Artificial Sequence
  Description of Artificial Sequence: Synthetic oligonucleotide
ccuaggcaaaagaagaaag

SEQ ID NO: 747398 - RNA, 19 nt, Artificial Sequence
  Description of Artificial Sequence: Synthetic oligonucleotide
aguaaccuaggcaaaagaa

SEQ ID NO: 747399 - RNA, 19 nt, Artificial Sequence
  Description of Artificial Sequence: Synthetic oligonucleotide
gaacgcagacaccugcagc

SEQ ID NO: 747400 - RNA, 19 nt, Artificial Sequence
  Description of Artificial Sequence: Synthetic oligonucleotide
cuugauaaccccgagaccu

SEQ ID NO: 747401 - RNA, 19 nt, Artificial Sequence
  Description of Artificial Sequence: Synthetic oligonucleotide
auuucgcuuccggaugucc

SEQ ID NO: 747402 - RNA, 19 nt, Artificial Sequence
  Description of Artificial Sequence: Synthetic oligonucleotide
agggcagucgugcugcaag

SEQ ID NO: 747403 - RNA, 19 nt, Artificial Sequence
  Description of Artificial Sequence: Synthetic oligonucleotide
gaagacugcgucaucccgc

SEQ ID NO: 747404 - RNA, 19 nt, Artificial Sequence
  Description of Artificial Sequence: Synthetic oligonucleotide
gaggcacggaugaagacug

SEQ ID NO: 747405 - RNA, 19 nt, Artificial Sequence
  Description of Artificial Sequence: Synthetic oligonucleotide
uugauaaccccgagaccug

SEQ ID NO: 747406 - RNA, 19 nt, Artificial Sequence
  Description of Artificial Sequence: Synthetic oligonucleotide
caucaugcgggcaccacac

SEQ ID NO: 747407 - RNA, 19 nt, Artificial Sequence
  Description of Artificial Sequence: Synthetic oligonucleotide
acagucgccucaucaugcg

SEQ ID NO: 747408 - RNA, 19 nt, Artificial Sequence
  Description of Artificial Sequence: Synthetic oligonucleotide
uggacagcgauuggggcag

SEQ ID NO: 747409 - RNA, 19 nt, Artificial Sequence
  Description of Artificial Sequence: Synthetic oligonucleotide
cacacggauguagauagag

SEQ ID NO: 747410 - RNA, 19 nt, Artificial Sequence
  Description of Artificial Sequence: Synthetic oligonucleotide
aaaacccagagaacuuuca

SEQ ID NO: 747411 - RNA, 19 nt, Artificial Sequence
  Description of Artificial Sequence: Synthetic oligonucleotide
gguacaguaggcacaaggc

SEQ ID NO: 747412 - RNA, 19 nt, Artificial Sequence
  Description of Artificial Sequence: Synthetic oligonucleotide
gccauugccagcuuagggc

SEQ ID NO: 747413 - RNA, 19 nt, Artificial Sequence
  Description of Artificial Sequence: Synthetic oligonucleotide
auggugguggugguggugg

SEQ ID NO: 747414 - RNA, 19 nt, Artificial Sequence
  Description of Artificial Sequence: Synthetic oligonucleotide
ugcccuccuagcacuaaag

SEQ ID NO: 747415 - RNA, 19 nt, Artificial Sequence
  Description of Artificial Sequence: Synthetic oligonucleotide
agcuccacucagcugagga

SEQ ID NO: 747416 - RNA, 19 nt, Artificial Sequence
  Description of Artificial Sequence: Synthetic oligonucleotide
aucacugccuauggauagc

SEQ ID NO: 747417 - RNA, 19 nt, Artificial Sequence
  Description of Artificial Sequence: Synthetic oligonucleotide
cacgugacgugccauugcc

SEQ ID NO: 747418 - RNA, 19 nt, Artificial Sequence
  Description of Artificial Sequence: Synthetic oligonucleotide
ugcaaguguucaaguggcc

SEQ ID NO: 747419 - RNA, 19 nt, Artificial Sequence
  Description of Artificial Sequence: Synthetic oligonucleotide
ugacgugccauugccagcu

SEQ ID NO: 747420 - RNA, 19 nt, Artificial Sequence
  Description of Artificial Sequence: Synthetic oligonucleotide
agaaagcuccacucagcug

SEQ ID NO: 747421 - RNA, 19 nt, Artificial Sequence
  Description of Artificial Sequence: Synthetic oligonucleotide
uauagaaggccggacugaa

SEQ ID NO: 747422 - RNA, 19 nt, Artificial Sequence
  Description of Artificial Sequence: Synthetic oligonucleotide
uccucacuauggaugcagc

SEQ ID NO: 747423 - RNA, 19 nt, Artificial Sequence
  Description of Artificial Sequence: Synthetic oligonucleotide
aaguguucaaguggcccug

SEQ ID NO: 747424 - RNA, 19 nt, Artificial Sequence
  Description of Artificial Sequence: Synthetic oligonucleotide
cauaauuucgcuuccggau

SEQ ID NO: 747425 - RNA, 19 nt, Artificial Sequence
  Description of Artificial Sequence: Synthetic oligonucleotide
auagagagaugugugcccu

SEQ ID NO: 747426 - RNA, 19 nt, Artificial Sequence
  Description of Artificial Sequence: Synthetic oligonucleotide
uucgcuuccggauguccug

SEQ ID NO: 747427 - RNA, 19 nt, Artificial Sequence
  Description of Artificial Sequence: Synthetic oligonucleotide
aucaagaguuccccugcug

SEQ ID NO: 747428 - RNA, 19 nt, Artificial Sequence
  Description of Artificial Sequence: Synthetic oligonucleotide
agggagccucgccaagugc

SEQ ID NO: 747429 - RNA, 19 nt, Artificial Sequence
  Description of Artificial Sequence: Synthetic oligonucleotide
cuugggauauagcaccuga

SEQ ID NO: 747430 - RNA, 19 nt, Artificial Sequence
  Description of Artificial Sequence: Synthetic oligonucleotide
aauuucgcuuccggauguc

SEQ ID NO: 747431 - RNA, 19 nt, Artificial Sequence
  Description of Artificial Sequence: Synthetic oligonucleotide
ugguccucggggcauuuga

SEQ ID NO: 747432 - RNA, 19 nt, Artificial Sequence
  Description of Artificial Sequence: Synthetic oligonucleotide
cccuugauaaccccgagac

SEQ ID NO: 747433 - RNA, 19 nt, Artificial Sequence
  Description of Artificial Sequence: Synthetic oligonucleotide
ucaaaggcgccugguaaca

SEQ ID NO: 747434 - RNA, 19 nt, Artificial Sequence
  Description of Artificial Sequence: Synthetic oligonucleotide
caugcgggcaccacacuug

SEQ ID NO: 747435 - RNA, 19 nt, Artificial Sequence
  Description of Artificial Sequence: Synthetic oligonucleotide
uauagcaccugagcaggca

SEQ ID NO: 747436 - RNA, 19 nt, Artificial Sequence
  Description of Artificial Sequence: Synthetic oligonucleotide
ucgugacucucguaggccu

SEQ ID NO: 747437 - RNA, 19 nt, Artificial Sequence
  Description of Artificial Sequence: Synthetic oligonucleotide
cacggaugaagacugcguc

SEQ ID NO: 747438 - RNA, 19 nt, Artificial Sequence
  Description of Artificial Sequence: Synthetic oligonucleotide
caagaguuccccugcugug

SEQ ID NO: 747439 - RNA, 19 nt, Artificial Sequence
  Description of Artificial Sequence: Synthetic oligonucleotide
gacugcgucaucccgcaca

SEQ ID NO: 747440 - RNA, 19 nt, Artificial Sequence
  Description of Artificial Sequence: Synthetic oligonucleotide
ugaagcacuccagguuagg

SEQ ID NO: 747441 - RNA, 19 nt, Artificial Sequence
  Description of Artificial Sequence: Synthetic oligonucleotide
aggcagaucacgacggcuc

SEQ ID NO: 747442 - RNA, 19 nt, Artificial Sequence
  Description of Artificial Sequence: Synthetic oligonucleotide
cugagcaggcaccucaguc

SEQ ID NO: 747443 - RNA, 19 nt, Artificial Sequence
  Description of Artificial Sequence: Synthetic oligonucleotide
caacagucgccucaucaug

SEQ ID NO: 747444 - RNA, 19 nt, Artificial Sequence
  Description of Artificial Sequence: Synthetic oligonucleotide
ucgcgcaugggcuucccgc

SEQ ID NO: 747445 - RNA, 19 nt, Artificial Sequence
  Description of Artificial Sequence: Synthetic oligonucleotide
ggauaggcaggccuaacac

SEQ ID NO: 747446 - RNA, 19 nt, Artificial Sequence
  Description of Artificial Sequence: Synthetic oligonucleotide
cugccguugccauugagga

SEQ ID NO: 747447 - RNA, 19 nt, Artificial Sequence
  Description of Artificial Sequence: Synthetic oligonucleotide
auuaaucucaaggcagaau

SEQ ID NO: 747448 - RNA, 19 nt, Artificial Sequence
  Description of Artificial Sequence: Synthetic oligonucleotide
uuaagcccagaaagcucca

SEQ ID NO: 747449 - RNA, 19 nt, Artificial Sequence
  Description of Artificial Sequence: Synthetic oligonucleotide
cagacucuuugaaagggca

SEQ ID NO: 747450 - RNA, 19 nt, Artificial Sequence
  Description of Artificial Sequence: Synthetic oligonucleotide
agauggcgaaguugcccac

SEQ ID NO: 747451 - RNA, 19 nt, Artificial Sequence
  Description of Artificial Sequence: Synthetic oligonucleotide
ucaugcgggcaccacacuu

SEQ ID NO: 747452 - RNA, 19 nt, Artificial Sequence
  Description of Artificial Sequence: Synthetic oligonucleotide
aaauaaccagagagggcga

SEQ ID NO: 747453 - RNA, 19 nt, Artificial Sequence
  Description of Artificial Sequence: Synthetic oligonucleotide
agcgauuggggcaggggac

SEQ ID NO: 747454 - RNA, 19 nt, Artificial Sequence
  Description of Artificial Sequence: Synthetic oligonucleotide
aaccuaggcaaaagaagaa

SEQ ID NO: 747455 - RNA, 19 nt, Artificial Sequence
  Description of Artificial Sequence: Synthetic oligonucleotide
aucccgcacauaauuucgc

SEQ ID NO: 747456 - RNA, 19 nt, Artificial Sequence
  Description of Artificial Sequence: Synthetic oligonucleotide
ggcgccugguaacacacgg

SEQ ID NO: 747457 - RNA, 19 nt, Artificial Sequence
  Description of Artificial Sequence: Synthetic oligonucleotide
ucucguaggccuccccacu

SEQ ID NO: 747458 - RNA, 19 nt, Artificial Sequence
  Description of Artificial Sequence: Synthetic oligonucleotide
ucgugcugcaagugagcag

SEQ ID NO: 747459 - RNA, 19 nt, Artificial Sequence
  Description of Artificial Sequence: Synthetic oligonucleotide
ucccgcacauaauuucgcu

SEQ ID NO: 747460 - RNA, 19 nt, Artificial Sequence
  Description of Artificial Sequence: Synthetic oligonucleotide
uacaacuaccccucccuuu

SEQ ID NO: 747461 - RNA, 19 nt, Artificial Sequence
  Description of Artificial Sequence: Synthetic oligonucleotide
agauugucaaaggcgccug

SEQ ID NO: 747462 - RNA, 19 nt, Artificial Sequence
  Description of Artificial Sequence: Synthetic oligonucleotide
guccucccgagccacagug

SEQ ID NO: 747463 - RNA, 19 nt, Artificial Sequence
  Description of Artificial Sequence: Synthetic oligonucleotide
cuacauugaagcugcaagu

SEQ ID NO: 747464 - RNA, 19 nt, Artificial Sequence
  Description of Artificial Sequence: Synthetic oligonucleotide
uuacaacuaccccucccuu

SEQ ID NO: 747465 - RNA, 19 nt, Artificial Sequence
  Description of Artificial Sequence: Synthetic oligonucleotide
gugggcuaguaaccuaggc

SEQ ID NO: 747466 - RNA, 19 nt, Artificial Sequence
  Description of Artificial Sequence: Synthetic oligonucleotide
gccgcaaguagacaccugc

SEQ ID NO: 747467 - RNA, 19 nt, Artificial Sequence
  Description of Artificial Sequence: Synthetic oligonucleotide
gugguggugguggugguag

SEQ ID NO: 747468 - RNA, 19 nt, Artificial Sequence
  Description of Artificial Sequence: Synthetic oligonucleotide
ucccgcuuaagcccagaaa

SEQ ID NO: 747469 - RNA, 19 nt, Artificial Sequence
  Description of Artificial Sequence: Synthetic oligonucleotide
cuccacucagcugaggauc

SEQ ID NO: 747470 - RNA, 19 nt, Artificial Sequence
  Description of Artificial Sequence: Synthetic oligonucleotide
gaaggccggacugaagcac

SEQ ID NO: 747471 - RNA, 19 nt, Artificial Sequence
  Description of Artificial Sequence: Synthetic oligonucleotide
uugaggcggcguuuagggc

SEQ ID NO: 747472 - RNA, 19 nt, Artificial Sequence
  Description of Artificial Sequence: Synthetic oligonucleotide
gagggcgacacuggguaag

SEQ ID NO: 747473 - RNA, 19 nt, Artificial Sequence
  Description of Artificial Sequence: Synthetic oligonucleotide
agagagaugugugcccuca

SEQ ID NO: 747474 - RNA, 19 nt, Artificial Sequence
  Description of Artificial Sequence: Synthetic oligonucleotide
agaucacgacggcucagcu

SEQ ID NO: 747475 - RNA, 19 nt, Artificial Sequence
  Description of Artificial Sequence: Synthetic oligonucleotide
uccgugacaugcuguggcu

SEQ ID NO: 747476 - RNA, 19 nt, Artificial Sequence
  Description of Artificial Sequence: Synthetic oligonucleotide
acagcccgcguccucgcuc

SEQ ID NO: 747477 - RNA, 19 nt, Artificial Sequence
  Description of Artificial Sequence: Synthetic oligonucleotide
accuaggcaaaagaagaaa

SEQ ID NO: 747478 - RNA, 19 nt, Artificial Sequence
  Description of Artificial Sequence: Synthetic oligonucleotide
acagcgauuggggcagggg

SEQ ID NO: 747479 - RNA, 19 nt, Artificial Sequence
  Description of Artificial Sequence: Synthetic oligonucleotide
gcccucgugacucucguag

SEQ ID NO: 747480 - RNA, 19 nt, Artificial Sequence
  Description of Artificial Sequence: Synthetic oligonucleotide
agaagcgguggccgcaagu

SEQ ID NO: 747481 - RNA, 19 nt, Artificial Sequence
  Description of Artificial Sequence: Synthetic oligonucleotide
aggucuccgugacaugcug

SEQ ID NO: 747482 - RNA, 19 nt, Artificial Sequence
  Description of Artificial Sequence: Synthetic oligonucleotide
cucgugacucucguaggcc

SEQ ID NO: 747483 - RNA, 19 nt, Artificial Sequence
  Description of Artificial Sequence: Synthetic oligonucleotide
cucgcuccggccguguucc

SEQ ID NO: 747484 - RNA, 19 nt, Artificial Sequence
  Description of Artificial Sequence: Synthetic oligonucleotide
cagaucacgacggcucagc

SEQ ID NO: 747485 - RNA, 19 nt, Artificial Sequence
  Description of Artificial Sequence: Synthetic oligonucleotide
ggacacaugcccucgugac

SEQ ID NO: 747486 - RNA, 19 nt, Artificial Sequence
  Description of Artificial Sequence: Synthetic oligonucleotide
accugcacgggcucgcgca

SEQ ID NO: 747487 - RNA, 19 nt, Artificial Sequence
  Description of Artificial Sequence: Synthetic oligonucleotide
guguauagaaggccggacu

SEQ ID NO: 747488 - RNA, 19 nt, Artificial Sequence
  Description of Artificial Sequence: Synthetic oligonucleotide
ucggggcauuugaagacuc

SEQ ID NO: 747489 - RNA, 19 nt, Artificial Sequence
  Description of Artificial Sequence: Synthetic oligonucleotide
gagaugaauuugggguagc

SEQ ID NO: 747490 - RNA, 19 nt, Artificial Sequence
  Description of Artificial Sequence: Synthetic oligonucleotide
uccuccacgugacgugcca

SEQ ID NO: 747491 - RNA, 19 nt, Artificial Sequence
  Description of Artificial Sequence: Synthetic oligonucleotide
cagccgugggcacugguac

SEQ ID NO: 747492 - RNA, 19 nt, Artificial Sequence
  Description of Artificial Sequence: Synthetic oligonucleotide
acuauggcucuugggauau

SEQ ID NO: 747493 - RNA, 19 nt, Artificial Sequence
  Description of Artificial Sequence: Synthetic oligonucleotide
cagugcccacaccacauug

SEQ ID NO: 747494 - RNA, 19 nt, Artificial Sequence
  Description of Artificial Sequence: Synthetic oligonucleotide
gccguugccauugaggaac

SEQ ID NO: 747495 - RNA, 19 nt, Artificial Sequence
  Description of Artificial Sequence: Synthetic oligonucleotide
aggagacauuaaucucaag

SEQ ID NO: 747496 - RNA, 19 nt, Artificial Sequence
  Description of Artificial Sequence: Synthetic oligonucleotide
gcgacacuggguaaggaag

SEQ ID NO: 747497 - RNA, 19 nt, Artificial Sequence
  Description of Artificial Sequence: Synthetic oligonucleotide
ccucacuauggaugcagcg

SEQ ID NO: 747498 - RNA, 19 nt, Artificial Sequence
  Description of Artificial Sequence: Synthetic oligonucleotide
ggaacgcagacaccugcag

SEQ ID NO: 747499 - RNA, 19 nt, Artificial Sequence
  Description of Artificial Sequence: Synthetic oligonucleotide
ggugucgcagaagcggugg

SEQ ID NO: 747500 - RNA, 19 nt, Artificial Sequence
  Description of Artificial Sequence: Synthetic oligonucleotide
guaggccuccccacuaaag

SEQ ID NO: 747501 - RNA, 19 nt, Artificial Sequence
  Description of Artificial Sequence: Synthetic oligonucleotide
ccgcacauaauuucgcuuc

SEQ ID NO: 747502 - RNA, 19 nt, Artificial Sequence
  Description of Artificial Sequence: Synthetic oligonucleotide
augcagcggauaggcaggc

SEQ ID NO: 747503 - RNA, 19 nt, Artificial Sequence
  Description of Artificial Sequence: Synthetic oligonucleotide
cuugccgcugccgacucac

SEQ ID NO: 747504 - RNA, 19 nt, Artificial Sequence
  Description of Artificial Sequence: Synthetic oligonucleotide
auaaccagagagggcgaca

SEQ ID NO: 747505 - RNA, 19 nt, Artificial Sequence
  Description of Artificial Sequence: Synthetic oligonucleotide
ggcauaguccagaggaagc

SEQ ID NO: 747506 - RNA, 19 nt, Artificial Sequence
  Description of Artificial Sequence: Synthetic oligonucleotide
guauagaaggccggacuga

SEQ ID NO: 747507 - RNA, 19 nt, Artificial Sequence
  Description of Artificial Sequence: Synthetic oligonucleotide
cuugguacaguaggcacaa

SEQ ID NO: 747508 - RNA, 19 nt, Artificial Sequence
  Description of Artificial Sequence: Synthetic oligonucleotide
gguggaaggucuccgugac

SEQ ID NO: 747509 - RNA, 19 nt, Artificial Sequence
  Description of Artificial Sequence: Synthetic oligonucleotide
uucccgcuuaagcccagaa

SEQ ID NO: 747510 - RNA, 19 nt, Artificial Sequence
  Description of Artificial Sequence: Synthetic oligonucleotide
gauggugguggugguggug

SEQ ID NO: 747511 - RNA, 19 nt, Artificial Sequence
  Description of Artificial Sequence: Synthetic oligonucleotide
gugacgugccauugccagc

SEQ ID NO: 747512 - RNA, 19 nt, Artificial Sequence
  Description of Artificial Sequence: Synthetic oligonucleotide
gagagaugugugcccucac

SEQ ID NO: 747513 - RNA, 19 nt, Artificial Sequence
  Description of Artificial Sequence: Synthetic oligonucleotide
ccaacagggagaaggugac

SEQ ID NO: 747514 - RNA, 19 nt, Artificial Sequence
  Description of Artificial Sequence: Synthetic oligonucleotide
gacuacauugaagcugcaa

SEQ ID NO: 747515 - RNA, 19 nt, Artificial Sequence
  Description of Artificial Sequence: Synthetic oligonucleotide
ucacuuguuuccagcccuu

SEQ ID NO: 747516 - RNA, 19 nt, Artificial Sequence
  Description of Artificial Sequence: Synthetic oligonucleotide
cauugccagcuuagggcac

SEQ ID NO: 747517 - RNA, 19 nt, Artificial Sequence
  Description of Artificial Sequence: Synthetic oligonucleotide
cuuccggggcaguucaaca

SEQ ID NO: 747518 - RNA, 19 nt, Artificial Sequence
  Description of Artificial Sequence: Synthetic oligonucleotide
augcgggcaccacacuugu

SEQ ID NO: 747519 - RNA, 19 nt, Artificial Sequence
  Description of Artificial Sequence: Synthetic oligonucleotide
gaggcggcguuuagggcag

SEQ ID NO: 747520 - RNA, 19 nt, Artificial Sequence
  Description of Artificial Sequence: Synthetic oligonucleotide
gaagcgguggccgcaagua

SEQ ID NO: 747521 - RNA, 19 nt, Artificial Sequence
  Description of Artificial Sequence: Synthetic oligonucleotide
agggcgacacuggguaagg

SEQ ID NO: 747522 - RNA, 19 nt, Artificial Sequence
  Description of Artificial Sequence: Synthetic oligonucleotide
cagcgauuggggcagggga

SEQ ID NO: 747523 - RNA, 19 nt, Artificial Sequence
  Description of Artificial Sequence: Synthetic oligonucleotide
uuagggcaccugugcuugc

SEQ ID NO: 747524 - RNA, 19 nt, Artificial Sequence
  Description of Artificial Sequence: Synthetic oligonucleotide
agccauacuuauguguaua

SEQ ID NO: 747525 - RNA, 19 nt, Artificial Sequence
  Description of Artificial Sequence: Synthetic oligonucleotide
uagagagaugugugcccuc

SEQ ID NO: 747526 - RNA, 19 nt, Artificial Sequence
  Description of Artificial Sequence: Synthetic oligonucleotide
ccucccuucccgcuuaagc

SEQ ID NO: 747527 - RNA, 19 nt, Artificial Sequence
  Description of Artificial Sequence: Synthetic oligonucleotide
gauccaacagggagaaggu

SEQ ID NO: 747528 - RNA, 19 nt, Artificial Sequence
  Description of Artificial Sequence: Synthetic oligonucleotide
cgugacgugccauugccag

SEQ ID NO: 747529 - RNA, 19 nt, Artificial Sequence
  Description of Artificial Sequence: Synthetic oligonucleotide
gcguuuagggcagucgugc

SEQ ID NO: 747530 - RNA, 19 nt, Artificial Sequence
  Description of Artificial Sequence: Synthetic oligonucleotide
ggcucuugggauauagcac

SEQ ID NO: 747531 - RNA, 19 nt, Artificial Sequence
  Description of Artificial Sequence: Synthetic oligonucleotide
cccaacuauggcucuuggg

SEQ ID NO: 747532 - RNA, 19 nt, Artificial Sequence
  Description of Artificial Sequence: Synthetic oligonucleotide
gacucucguaggccucccc

SEQ ID NO: 747533 - RNA, 19 nt, Artificial Sequence
  Description of Artificial Sequence: Synthetic oligonucleotide
guaacacacggauguagau

SEQ ID NO: 747534 - RNA, 19 nt, Artificial Sequence
  Description of Artificial Sequence: Synthetic oligonucleotide
gggagccucgccaagugcc

SEQ ID NO: 747535 - RNA, 19 nt, Artificial Sequence
  Description of Artificial Sequence: Synthetic oligonucleotide
ccgcuuaagcccagaaagc

SEQ ID NO: 747536 - RNA, 19 nt, Artificial Sequence
  Description of Artificial Sequence: Synthetic oligonucleotide
ucgcagaagcgguggccgc

SEQ ID NO: 747537 - RNA, 19 nt, Artificial Sequence
  Description of Artificial Sequence: Synthetic oligonucleotide
ugggucgcucugauccaac

SEQ ID NO: 747538 - RNA, 19 nt, Artificial Sequence
  Description of Artificial Sequence: Synthetic oligonucleotide
cagcccgcguccucgcucc

SEQ ID NO: 747539 - RNA, 19 nt, Artificial Sequence
  Description of Artificial Sequence: Synthetic oligonucleotide
uggccgcaaguagacaccu

SEQ ID NO: 747540 - RNA, 19 nt, Artificial Sequence
  Description of Artificial Sequence: Synthetic oligonucleotide
gucgugcugcaagugagca

SEQ ID NO: 747541 - RNA, 19 nt, Artificial Sequence
  Description of Artificial Sequence: Synthetic oligonucleotide
ccuugauaaccccgagacc

SEQ ID NO: 747542 - RNA, 19 nt, Artificial Sequence
  Description of Artificial Sequence: Synthetic oligonucleotide
agacugcgucaucccgcac

SEQ ID NO: 747543 - RNA, 19 nt, Artificial Sequence
  Description of Artificial Sequence: Synthetic oligonucleotide
agaccugggucgcucugau

SEQ ID NO: 747544 - RNA, 19 nt, Artificial Sequence
  Description of Artificial Sequence: Synthetic oligonucleotide
caguucuugccgcugccga

SEQ ID NO: 747545 - RNA, 19 nt, Artificial Sequence
  Description of Artificial Sequence: Synthetic oligonucleotide
cauuaaucucaaggcagaa

SEQ ID NO: 747546 - RNA, 19 nt, Artificial Sequence
  Description of Artificial Sequence: Synthetic oligonucleotide
aucaugcgggcaccacacu

SEQ ID NO: 747547 - RNA, 19 nt, Artificial Sequence
  Description of Artificial Sequence: Synthetic oligonucleotide
cacucagcugaggaucuuc

SEQ ID NO: 747548 - RNA, 19 nt, Artificial Sequence
  Description of Artificial Sequence: Synthetic oligonucleotide
guagacaccugcacgggcu

SEQ ID NO: 747549 - RNA, 19 nt, Artificial Sequence
  Description of Artificial Sequence: Synthetic oligonucleotide
gugucgcagaagcgguggc

SEQ ID NO: 747550 - RNA, 19 nt, Artificial Sequence
  Description of Artificial Sequence: Synthetic oligonucleotide
gcagucgugcugcaaguga

SEQ ID NO: 747551 - RNA, 19 nt, Artificial Sequence
  Description of Artificial Sequence: Synthetic oligonucleotide
agguuaggcuuggccuugg

SEQ ID NO: 747552 - RNA, 19 nt, Artificial Sequence
  Description of Artificial Sequence: Synthetic oligonucleotide
ggauguagauagagagaug

SEQ ID NO: 747553 - RNA, 19 nt, Artificial Sequence
  Description of Artificial Sequence: Synthetic oligonucleotide
caaaggcgccugguaacac

SEQ ID NO: 747554 - RNA, 19 nt, Artificial Sequence
  Description of Artificial Sequence: Synthetic oligonucleotide
cucgcgcaugggcuucccg

SEQ ID NO: 747555 - RNA, 19 nt, Artificial Sequence
  Description of Artificial Sequence: Synthetic oligonucleotide
ggcgacacuggguaaggaa

SEQ ID NO: 747556 - RNA, 19 nt, Artificial Sequence
  Description of Artificial Sequence: Synthetic oligonucleotide
cacgcggcggccccacagc

SEQ ID NO: 747557 - RNA, 19 nt, Artificial Sequence
  Description of Artificial Sequence: Synthetic oligonucleotide
agagggcgacacuggguaa

SEQ ID NO: 747558 - RNA, 19 nt, Artificial Sequence
  Description of Artificial Sequence: Synthetic oligonucleotide
gagccucgccaagugccag

SEQ ID NO: 747559 - RNA, 19 nt, Artificial Sequence
  Description of Artificial Sequence: Synthetic oligonucleotide
gggacacaugcccucguga

SEQ ID NO: 747560 - RNA, 19 nt, Artificial Sequence
  Description of Artificial Sequence: Synthetic oligonucleotide
cuaccccucccuuuuccaa

SEQ ID NO: 747561 - RNA, 19 nt, Artificial Sequence
  Description of Artificial Sequence: Synthetic oligonucleotide
gccucuuggagacgccgcc

SEQ ID NO: 747562 - RNA, 19 nt, Artificial Sequence
  Description of Artificial Sequence: Synthetic oligonucleotide
cgugacaugcuguggcuug

SEQ ID NO: 747563 - RNA, 19 nt, Artificial Sequence
  Description of Artificial Sequence: Synthetic oligonucleotide
uugccgcugccgacucacc

SEQ ID NO: 747564 - RNA, 19 nt, Artificial Sequence
  Description of Artificial Sequence: Synthetic oligonucleotide
ugguggugguggugguggu

SEQ ID NO: 747565 - RNA, 19 nt, Artificial Sequence
  Description of Artificial Sequence: Synthetic oligonucleotide
gcugccgacucaccagggc

SEQ ID NO: 747566 - RNA, 19 nt, Artificial Sequence
  Description of Artificial Sequence: Synthetic oligonucleotide
agggccacucaagaagauu

SEQ ID NO: 747567 - RNA, 19 nt, Artificial Sequence
  Description of Artificial Sequence: Synthetic oligonucleotide
cccuccuagcacuaaagaa

SEQ ID NO: 747568 - RNA, 19 nt, Artificial Sequence
  Description of Artificial Sequence: Synthetic oligonucleotide
cccucgugacucucguagg

SEQ ID NO: 747569 - RNA, 19 nt, Artificial Sequence
  Description of Artificial Sequence: Synthetic oligonucleotide
gguacugauggcucuggau

SEQ ID NO: 747570 - RNA, 19 nt, Artificial Sequence
  Description of Artificial Sequence: Synthetic oligonucleotide
auagccagauguggcuuua

SEQ ID NO: 747571 - RNA, 19 nt, Artificial Sequence
  Description of Artificial Sequence: Synthetic oligonucleotide
acgugccauugccagcuua

SEQ ID NO: 747572 - RNA, 19 nt, Artificial Sequence
  Description of Artificial Sequence: Synthetic oligonucleotide
ggcguuuagggcagucgug

SEQ ID NO: 747573 - RNA, 19 nt, Artificial Sequence
  Description of Artificial Sequence: Synthetic oligonucleotide
gcggcguuuagggcagucg

SEQ ID NO: 747574 - RNA, 19 nt, Artificial Sequence
  Description of Artificial Sequence: Synthetic oligonucleotide
cugggugcgcuuggggcac

SEQ ID NO: 747575 - RNA, 19 nt, Artificial Sequence
  Description of Artificial Sequence: Synthetic oligonucleotide
gcaguucaacagaggcacg

SEQ ID NO: 747576 - RNA, 19 nt, Artificial Sequence
  Description of Artificial Sequence: Synthetic oligonucleotide
gcccuccuagcacuaaaga

SEQ ID NO: 747577 - RNA, 19 nt, Artificial Sequence
  Description of Artificial Sequence: Synthetic oligonucleotide
gauaaccccgagaccugcu

SEQ ID NO: 747578 - RNA, 19 nt, Artificial Sequence
  Description of Artificial Sequence: Synthetic oligonucleotide
caccugcacgggcucgcgc

SEQ ID NO: 747579 - RNA, 19 nt, Artificial Sequence
  Description of Artificial Sequence: Synthetic oligonucleotide
aggugucgcagaagcggug

SEQ ID NO: 747580 - RNA, 19 nt, Artificial Sequence
  Description of Artificial Sequence: Synthetic oligonucleotide
gcagcggauaggcaggccu

SEQ ID NO: 747581 - RNA, 19 nt, Artificial Sequence
  Description of Artificial Sequence: Synthetic oligonucleotide
agcggauaggcaggccuaa

SEQ ID NO: 747582 - RNA, 19 nt, Artificial Sequence
  Description of Artificial Sequence: Synthetic oligonucleotide
gcccucaccacugccguug

SEQ ID NO: 747583 - RNA, 19 nt, Artificial Sequence
  Description of Artificial Sequence: Synthetic oligonucleotide
ccguugccauugaggaacg

SEQ ID NO: 747584 - RNA, 19 nt, Artificial Sequence
  Description of Artificial Sequence: Synthetic oligonucleotide
acgugacgugccauugcca

SEQ ID NO: 747585 - RNA, 19 nt, Artificial Sequence
  Description of Artificial Sequence: Synthetic oligonucleotide
guucuugccgcugccgacu

SEQ ID NO: 747586 - RNA, 19 nt, Artificial Sequence
  Description of Artificial Sequence: Synthetic oligonucleotide
guggugggcuaguaaccua

SEQ ID NO: 747587 - RNA, 19 nt, Artificial Sequence
  Description of Artificial Sequence: Synthetic oligonucleotide
gugcccuccuagcacuaaa

SEQ ID NO: 747588 - RNA, 19 nt, Artificial Sequence
  Description of Artificial Sequence: Synthetic oligonucleotide
aggcgccugguaacacacg

SEQ ID NO: 747589 - RNA, 19 nt, Artificial Sequence
  Description of Artificial Sequence: Synthetic oligonucleotide
ggcacgggcgagcggggcc

SEQ ID NO: 747590 - RNA, 19 nt, Artificial Sequence
  Description of Artificial Sequence: Synthetic oligonucleotide
ccacgugacgugccauugc

SEQ ID NO: 747591 - RNA, 19 nt, Artificial Sequence
  Description of Artificial Sequence: Synthetic oligonucleotide
ggcagucgugcugcaagug

SEQ ID NO: 747592 - RNA, 19 nt, Artificial Sequence
  Description of Artificial Sequence: Synthetic oligonucleotide
cucguaggccuccccacua

SEQ ID NO: 747593 - RNA, 19 nt, Artificial Sequence
  Description of Artificial Sequence: Synthetic oligonucleotide
cagcggauaggcaggccua

SEQ ID NO: 747594 - RNA, 19 nt, Artificial Sequence
  Description of Artificial Sequence: Synthetic oligonucleotide
gccugguaacacacggaug

SEQ ID NO: 747595 - RNA, 19 nt, Artificial Sequence
  Description of Artificial Sequence: Synthetic oligonucleotide
ggcaggggacuacauugaa

SEQ ID NO: 747596 - RNA, 19 nt, Artificial Sequence
  Description of Artificial Sequence: Synthetic oligonucleotide
acacacggauguagauaga

SEQ ID NO: 747597 - RNA, 19 nt, Artificial Sequence
  Description of Artificial Sequence: Synthetic oligonucleotide
guugcccacuccagcggca

SEQ ID NO: 747598 - RNA, 19 nt, Artificial Sequence
  Description of Artificial Sequence: Synthetic oligonucleotide
gcagaucacgacggcucag

SEQ ID NO: 747599 - RNA, 19 nt, Artificial Sequence
  Description of Artificial Sequence: Synthetic oligonucleotide
ggugacccggcgggcaaag

SEQ ID NO: 747600 - RNA, 19 nt, Artificial Sequence
  Description of Artificial Sequence: Synthetic oligonucleotide
cuuggagacgccgcccaua

SEQ ID NO: 747601 - RNA, 19 nt, Artificial Sequence
  Description of Artificial Sequence: Synthetic oligonucleotide
ugcgggcaccacacuuguu

SEQ ID NO: 747602 - RNA, 19 nt, Artificial Sequence
  Description of Artificial Sequence: Synthetic oligonucleotide
cugggccaacagucgccuc

SEQ ID NO: 747603 - RNA, 19 nt, Artificial Sequence
  Description of Artificial Sequence: Synthetic oligonucleotide
ggcuaguaaccuaggcaaa

SEQ ID NO: 747604 - RNA, 19 nt, Artificial Sequence
  Description of Artificial Sequence: Synthetic oligonucleotide
ccgcccauagcugccaauc

SEQ ID NO: 747605 - RNA, 19 nt, Artificial Sequence
  Description of Artificial Sequence: Synthetic oligonucleotide
cggauguagauagagagau

SEQ ID NO: 747606 - RNA, 19 nt, Artificial Sequence
  Description of Artificial Sequence: Synthetic oligonucleotide
ugcccucaccacugccguu

SEQ ID NO: 747607 - RNA, 19 nt, Artificial Sequence
  Description of Artificial Sequence: Synthetic oligonucleotide
ccgcaaguagacaccugca

SEQ ID NO: 747608 - RNA, 19 nt, Artificial Sequence
  Description of Artificial Sequence: Synthetic oligonucleotide
ggagccucgccaagugcca

SEQ ID NO: 747609 - RNA, 19 nt, Artificial Sequence
  Description of Artificial Sequence: Synthetic oligonucleotide
ggccggacugaagcacucc

SEQ ID NO: 747610 - RNA, 19 nt, Artificial Sequence
  Description of Artificial Sequence: Synthetic oligonucleotide
gcaccaauuggaggcaccu

SEQ ID NO: 747611 - RNA, 19 nt, Artificial Sequence
  Description of Artificial Sequence: Synthetic oligonucleotide
cacucucuuggggacacau

SEQ ID NO: 747612 - RNA, 19 nt, Artificial Sequence
  Description of Artificial Sequence: Synthetic oligonucleotide
gcuuagggcaccugugcuu

SEQ ID NO: 747613 - RNA, 19 nt, Artificial Sequence
  Description of Artificial Sequence: Synthetic oligonucleotide
uggccagaccugggucgcu

SEQ ID NO: 747614 - RNA, 19 nt, Artificial Sequence
  Description of Artificial Sequence: Synthetic oligonucleotide
cugggucgcucugauccaa

SEQ ID NO: 747615 - RNA, 19 nt, Artificial Sequence
  Description of Artificial Sequence: Synthetic oligonucleotide
gcgggcaaagggccacuca

SEQ ID NO: 747616 - RNA, 19 nt, Artificial Sequence
  Description of Artificial Sequence: Synthetic oligonucleotide
ggcggccccacagcccgcg

SEQ ID NO: 747617 - RNA, 19 nt, Artificial Sequence
  Description of Artificial Sequence: Synthetic oligonucleotide
cuucccgcuuaagcccaga

SEQ ID NO: 747618 - RNA, 19 nt, Artificial Sequence
  Description of Artificial Sequence: Synthetic oligonucleotide
ggccuaacacuuggaccuc

SEQ ID NO: 747619 - RNA, 19 nt, Artificial Sequence
  Description of Artificial Sequence: Synthetic oligonucleotide
gggcagucgugcugcaagu

SEQ ID NO: 747620 - RNA, 19 nt, Artificial Sequence
  Description of Artificial Sequence: Synthetic oligonucleotide
ccugggucgcucugaucca

SEQ ID NO: 747621 - RNA, 19 nt, Artificial Sequence
  Description of Artificial Sequence: Synthetic oligonucleotide
cacgggcgagcggggccgg

SEQ ID NO: 747622 - RNA, 19 nt, Artificial Sequence
  Description of Artificial Sequence: Synthetic oligonucleotide
cgcugccgacucaccaggg

SEQ ID NO: 747623 - RNA, 19 nt, Artificial Sequence
  Description of Artificial Sequence: Synthetic oligonucleotide
gcggauaggcaggccuaac

SEQ ID NO: 747624 - RNA, 19 nt, Artificial Sequence
  Description of Artificial Sequence: Synthetic oligonucleotide
ggccagaccugggucgcuc

SEQ ID NO: 747625 - RNA, 19 nt, Artificial Sequence
  Description of Artificial Sequence: Synthetic oligonucleotide
ggucuccgugacaugcugu

SEQ ID NO: 747626 - RNA, 19 nt, Artificial Sequence
  Description of Artificial Sequence: Synthetic oligonucleotide
gggcacucagaaguggcau

SEQ ID NO: 747627 - RNA, 19 nt, Artificial Sequence
  Description of Artificial Sequence: Synthetic oligonucleotide
gcgccugguaacacacgga

SEQ ID NO: 747628 - RNA, 19 nt, Artificial Sequence
  Description of Artificial Sequence: Synthetic oligonucleotide
cugggucuggguagaucuu

SEQ ID NO: 747629 - RNA, 19 nt, Artificial Sequence
  Description of Artificial Sequence: Synthetic oligonucleotide
gccgacucaccagggcaca

SEQ ID NO: 747630 - RNA, 19 nt, Artificial Sequence
  Description of Artificial Sequence: Synthetic oligonucleotide
gcgauuggggcaggggacu

SEQ ID NO: 747631 - RNA, 19 nt, Artificial Sequence
  Description of Artificial Sequence: Synthetic oligonucleotide
cgcgcaugggcuucccgca

SEQ ID NO: 747632 - RNA, 19 nt, Artificial Sequence
  Description of Artificial Sequence: Synthetic oligonucleotide
gguggugguggugguggua

SEQ ID NO: 747633 - RNA, 19 nt, Artificial Sequence
  Description of Artificial Sequence: Synthetic oligonucleotide
ggacuacauugaagcugca

SEQ ID NO: 747634 - RNA, 19 nt, Artificial Sequence
  Description of Artificial Sequence: Synthetic oligonucleotide
cgucaucccgcacauaauu

SEQ ID NO: 747635 - RNA, 19 nt, Artificial Sequence
  Description of Artificial Sequence: Synthetic oligonucleotide
ggcggcguuuagggcaguc

SEQ ID NO: 747636 - RNA, 19 nt, Artificial Sequence
  Description of Artificial Sequence: Synthetic oligonucleotide
gggcgacacuggguaagga

SEQ ID NO: 747637 - RNA, 19 nt, Artificial Sequence
  Description of Artificial Sequence: Synthetic oligonucleotide
ggccaacagucgccucauc

SEQ ID NO: 747638 - RNA, 19 nt, Artificial Sequence
  Description of Artificial Sequence: Synthetic oligonucleotide
ccgacucaccagggcacac

SEQ ID NO: 747639 - RNA, 19 nt, Artificial Sequence
  Description of Artificial Sequence: Synthetic oligonucleotide
cccgcacauaauuucgcuu

SEQ ID NO: 747640 - RNA, 19 nt, Artificial Sequence
  Description of Artificial Sequence: Synthetic oligonucleotide
ccggcgggcaaagggccac

SEQ ID NO: 747641 - RNA, 19 nt, Artificial Sequence
  Description of Artificial Sequence: Synthetic oligonucleotide
gacgugccauugccagcuu

SEQ ID NO: 747642 - RNA, 19 nt, Artificial Sequence
  Description of Artificial Sequence: Synthetic oligonucleotide
gggcacgggcgagcggggc

SEQ ID NO: 747643 - RNA, 19 nt, Artificial Sequence
  Description of Artificial Sequence: Synthetic oligonucleotide
gccagaccugggucgcucu

SEQ ID NO: 747644 - RNA, 19 nt, Artificial Sequence
  Description of Artificial Sequence: Synthetic oligonucleotide
cagccgccgcuugggcuuc

SEQ ID NO: 747645 - RNA, 19 nt, Artificial Sequence
  Description of Artificial Sequence: Synthetic oligonucleotide
cuauggcucuugggauaua

SEQ ID NO: 747646 - RNA, 19 nt, Artificial Sequence
  Description of Artificial Sequence: Synthetic oligonucleotide
cggcguuuagggcagucgu

SEQ ID NO: 747647 - RNA, 19 nt, Artificial Sequence
  Description of Artificial Sequence: Synthetic oligonucleotide
gcucgcgcaugggcuuccc

SEQ ID NO: 747648 - RNA, 19 nt, Artificial Sequence
  Description of Artificial Sequence: Synthetic oligonucleotide
cguuuagggcagucgugcu

SEQ ID NO: 747649 - RNA, 19 nt, Artificial Sequence
  Description of Artificial Sequence: Synthetic oligonucleotide
cacagcccgcguccucgcu

SEQ ID NO: 747650 - RNA, 19 nt, Artificial Sequence
  Description of Artificial Sequence: Synthetic oligonucleotide
cgacucaccagggcacaca

SEQ ID NO: 747651 - RNA, 19 nt, Artificial Sequence
  Description of Artificial Sequence: Synthetic oligonucleotide
ccaccucccuucccgcuua

SEQ ID NO: 747652 - RNA, 19 nt, Artificial Sequence
  Description of Artificial Sequence: Synthetic oligonucleotide
gcguccucgcuccggccgu

SEQ ID NO: 747653 - RNA, 19 nt, Artificial Sequence
  Description of Artificial Sequence: Synthetic oligonucleotide
gcgucaucccgcacauaau

SEQ ID NO: 747654 - RNA, 19 nt, Artificial Sequence
  Description of Artificial Sequence: Synthetic oligonucleotide
cgcccauagcugccaaucu

SEQ ID NO: 747655 - RNA, 19 nt, Artificial Sequence
  Description of Artificial Sequence: Synthetic oligonucleotide
cugcgucaucccgcacaua

SEQ ID NO: 747656 - RNA, 19 nt, Artificial Sequence
  Description of Artificial Sequence: Synthetic oligonucleotide
cgauuggggcaggggacua

SEQ ID NO: 747657 - RNA, 19 nt, Artificial Sequence
  Description of Artificial Sequence: Synthetic oligonucleotide
ccgugacaugcuguggcuu

SEQ ID NO: 747658 - RNA, 19 nt, Artificial Sequence
  Description of Artificial Sequence: Synthetic oligonucleotide
cggcggccccacagcccgc

SEQ ID NO: 747659 - RNA, 19 nt, Artificial Sequence
  Description of Artificial Sequence: Synthetic oligonucleotide
cgccgcccauagcugccaa

SEQ ID NO: 747660 - RNA, 19 nt, Artificial Sequence
  Description of Artificial Sequence: Synthetic oligonucleotide
auaaccauuaaguacaagc

SEQ ID NO: 747661 - RNA, 19 nt, Artificial Sequence
  Description of Artificial Sequence: Synthetic oligonucleotide
auuaauaaccauuaaguac

SEQ ID NO: 747662 - RNA, 19 nt, Artificial Sequence
  Description of Artificial Sequence: Synthetic oligonucleotide
uuaauaaccauuaaguaca

SEQ ID NO: 747663 - RNA, 19 nt, Artificial Sequence
  Description of Artificial Sequence: Synthetic oligonucleotide
aagaugaaagaacauaagg

SEQ ID NO: 747664 - RNA, 19 nt, Artificial Sequence
  Description of Artificial Sequence: Synthetic oligonucleotide
gaugaaagaacauaagggg

SEQ ID NO: 747665 - RNA, 19 nt, Artificial Sequence
  Description of Artificial Sequence: Synthetic oligonucleotide
uuguaaauuauaaugaugu

SEQ ID NO: 747666 - RNA, 19 nt, Artificial Sequence
  Description of Artificial Sequence: Synthetic oligonucleotide
aaauggaugcucuucaccg

SEQ ID NO: 747667 - RNA, 19 nt, Artificial Sequence
  Description of Artificial Sequence: Synthetic oligonucleotide
aacagaagagcacuuagcg

SEQ ID NO: 747668 - RNA, 19 nt, Artificial Sequence
  Description of Artificial Sequence: Synthetic oligonucleotide
agaaaauaaagcuuugggg

SEQ ID NO: 747669 - RNA, 19 nt, Artificial Sequence
  Description of Artificial Sequence: Synthetic oligonucleotide
aauccauucacacaacauc

SEQ ID NO: 747670 - RNA, 19 nt, Artificial Sequence
  Description of Artificial Sequence: Synthetic oligonucleotide
aauguguccaaguaggcag

SEQ ID NO: 747671 - RNA, 19 nt, Artificial Sequence
  Description of Artificial Sequence: Synthetic oligonucleotide
gaagguaacaacuguaggg

SEQ ID NO: 747672 - RNA, 19 nt, Artificial Sequence
  Description of Artificial Sequence: Synthetic oligonucleotide
aaagauacccaaucaaaag

SEQ ID NO: 747673 - RNA, 19 nt, Artificial Sequence
  Description of Artificial Sequence: Synthetic oligonucleotide
aaauuuaacuguaauggcg

SEQ ID NO: 747674 - RNA, 19 nt, Artificial Sequence
  Description of Artificial Sequence: Synthetic oligonucleotide
guaaguuugaacaacagag

SEQ ID NO: 747675 - RNA, 19 nt, Artificial Sequence
  Description of Artificial Sequence: Synthetic oligonucleotide
ucugauuaaaauaccaucu

SEQ ID NO: 747676 - RNA, 19 nt, Artificial Sequence
  Description of Artificial Sequence: Synthetic oligonucleotide
uuguguaggaagauggucg

SEQ ID NO: 747677 - RNA, 19 nt, Artificial Sequence
  Description of Artificial Sequence: Synthetic oligonucleotide
acuggcuuaugccagagcc

SEQ ID NO: 747678 - RNA, 19 nt, Artificial Sequence
  Description of Artificial Sequence: Synthetic oligonucleotide
agaaaauucagaauagucg

SEQ ID NO: 747679 - RNA, 19 nt, Artificial Sequence
  Description of Artificial Sequence: Synthetic oligonucleotide
aauucagaauagucgcugc

SEQ ID NO: 747680 - RNA, 19 nt, Artificial Sequence
  Description of Artificial Sequence: Synthetic oligonucleotide
ugaaagaacauaaggggcc

SEQ ID NO: 747681 - RNA, 19 nt, Artificial Sequence
  Description of Artificial Sequence: Synthetic oligonucleotide
agaugaaagaacauaaggg

SEQ ID NO: 747682 - RNA, 19 nt, Artificial Sequence
  Description of Artificial Sequence: Synthetic oligonucleotide
aagauacccaaucaaaaga

SEQ ID NO: 747683 - RNA, 19 nt, Artificial Sequence
  Description of Artificial Sequence: Synthetic oligonucleotide
aaguacauacugcuggcac

SEQ ID NO: 747684 - RNA, 19 nt, Artificial Sequence
  Description of Artificial Sequence: Synthetic oligonucleotide
uguaauggcgaacugcucc

SEQ ID NO: 747685 - RNA, 19 nt, Artificial Sequence
  Description of Artificial Sequence: Synthetic oligonucleotide
agggcuuacacacuaacac

SEQ ID NO: 747686 - RNA, 19 nt, Artificial Sequence
  Description of Artificial Sequence: Synthetic oligonucleotide
acuauaaacaaauugccaa

SEQ ID NO: 747687 - RNA, 19 nt, Artificial Sequence
  Description of Artificial Sequence: Synthetic oligonucleotide
uaaccauuaaguacaagca

SEQ ID NO: 747688 - RNA, 19 nt, Artificial Sequence
  Description of Artificial Sequence: Synthetic oligonucleotide
uuaaaggcuuuacagaccu

SEQ ID NO: 747689 - RNA, 19 nt, Artificial Sequence
  Description of Artificial Sequence: Synthetic oligonucleotide
aacguaguucuguucuucc

SEQ ID NO: 747690 - RNA, 19 nt, Artificial Sequence
  Description of Artificial Sequence: Synthetic oligonucleotide
caacuauaaacaaauugcc

SEQ ID NO: 747691 - RNA, 19 nt, Artificial Sequence
  Description of Artificial Sequence: Synthetic oligonucleotide
ucuacaauacauacuuuug

SEQ ID NO: 747692 - RNA, 19 nt, Artificial Sequence
  Description of Artificial Sequence: Synthetic oligonucleotide
aagccuggauaauacauag

SEQ ID NO: 747693 - RNA, 19 nt, Artificial Sequence
  Description of Artificial Sequence: Synthetic oligonucleotide
ugaagguaacaacuguagg

SEQ ID NO: 747694 - RNA, 19 nt, Artificial Sequence
  Description of Artificial Sequence: Synthetic oligonucleotide
augaaagaacauaaggggc

SEQ ID NO: 747695 - RNA, 19 nt, Artificial Sequence
  Description of Artificial Sequence: Synthetic oligonucleotide
ugaagucuacaauacauac

SEQ ID NO: 747696 - RNA, 19 nt, Artificial Sequence
  Description of Artificial Sequence: Synthetic oligonucleotide
aauuuaacuguaauggcga

SEQ ID NO: 747697 - RNA, 19 nt, Artificial Sequence
  Description of Artificial Sequence: Synthetic oligonucleotide
cuuguaaauuauaaugaug

SEQ ID NO: 747698 - RNA, 19 nt, Artificial Sequence
  Description of Artificial Sequence: Synthetic oligonucleotide
uaaauucugacaugugacc

SEQ ID NO: 747699 - RNA, 19 nt, Artificial Sequence
  Description of Artificial Sequence: Synthetic oligonucleotide
ugagaacacacucuggugu

SEQ ID NO: 747700 - RNA, 19 nt, Artificial Sequence
  Description of Artificial Sequence: Synthetic oligonucleotide
gaguuguguaggaagaugg

SEQ ID NO: 747701 - RNA, 19 nt, Artificial Sequence
  Description of Artificial Sequence: Synthetic oligonucleotide
agccggaacagacugaggg

SEQ ID NO: 747702 - RNA, 19 nt, Artificial Sequence
  Description of Artificial Sequence: Synthetic oligonucleotide
agugccuaaauuccuccgc

SEQ ID NO: 747703 - RNA, 19 nt, Artificial Sequence
  Description of Artificial Sequence: Synthetic oligonucleotide
uuagcguuguuucugcucu

SEQ ID NO: 747704 - RNA, 19 nt, Artificial Sequence
  Description of Artificial Sequence: Synthetic oligonucleotide
gauaaauggaugcucuuca

SEQ ID NO: 747705 - RNA, 19 nt, Artificial Sequence
  Description of Artificial Sequence: Synthetic oligonucleotide
ucugggaagggaaaagaug

SEQ ID NO: 747706 - RNA, 19 nt, Artificial Sequence
  Description of Artificial Sequence: Synthetic oligonucleotide
guucaauaguuauuaauac

SEQ ID NO: 747707 - RNA, 19 nt, Artificial Sequence
  Description of Artificial Sequence: Synthetic oligonucleotide
gugaauguguccaaguagg

SEQ ID NO: 747708 - RNA, 19 nt, Artificial Sequence
  Description of Artificial Sequence: Synthetic oligonucleotide
cauaagaugugucgaaggc

SEQ ID NO: 747709 - RNA, 19 nt, Artificial Sequence
  Description of Artificial Sequence: Synthetic oligonucleotide
cuggauaauacauagucca

SEQ ID NO: 747710 - RNA, 19 nt, Artificial Sequence
  Description of Artificial Sequence: Synthetic oligonucleotide
aagguaacaacuguagggu

SEQ ID NO: 747711 - RNA, 19 nt, Artificial Sequence
  Description of Artificial Sequence: Synthetic oligonucleotide
ggcgacacaauuuuggagg

SEQ ID NO: 747712 - RNA, 19 nt, Artificial Sequence
  Description of Artificial Sequence: Synthetic oligonucleotide
gauuaauaaccauuaagua

SEQ ID NO: 747713 - RNA, 19 nt, Artificial Sequence
  Description of Artificial Sequence: Synthetic oligonucleotide
aguaaguuugaacaacaga

SEQ ID NO: 747714 - RNA, 19 nt, Artificial Sequence
  Description of Artificial Sequence: Synthetic oligonucleotide
agaaguugguuccaggugu

SEQ ID NO: 747715 - RNA, 19 nt, Artificial Sequence
  Description of Artificial Sequence: Synthetic oligonucleotide
aaaagauacccaaucaaaa

SEQ ID NO: 747716 - RNA, 19 nt, Artificial Sequence
  Description of Artificial Sequence: Synthetic oligonucleotide
aauucugacaugugaccca

SEQ ID NO: 747717 - RNA, 19 nt, Artificial Sequence
  Description of Artificial Sequence: Synthetic oligonucleotide
gagguuaggauccucuccc

SEQ ID NO: 747718 - RNA, 19 nt, Artificial Sequence
  Description of Artificial Sequence: Synthetic oligonucleotide
aaaggcuuuacagaccuga

SEQ ID NO: 747719 - RNA, 19 nt, Artificial Sequence
  Description of Artificial Sequence: Synthetic oligonucleotide
cugaagguaacaacuguag

SEQ ID NO: 747720 - RNA, 19 nt, Artificial Sequence
  Description of Artificial Sequence: Synthetic oligonucleotide
ucugacaugugacccaaga

SEQ ID NO: 747721 - RNA, 19 nt, Artificial Sequence
  Description of Artificial Sequence: Synthetic oligonucleotide
ucagaauagucgcugcuac

SEQ ID NO: 747722 - RNA, 19 nt, Artificial Sequence
  Description of Artificial Sequence: Synthetic oligonucleotide
aaagccggaacagacugag

SEQ ID NO: 747723 - RNA, 19 nt, Artificial Sequence
  Description of Artificial Sequence: Synthetic oligonucleotide
ucaagccuggauaauacau

SEQ ID NO: 747724 - RNA, 19 nt, Artificial Sequence
  Description of Artificial Sequence: Synthetic oligonucleotide
ugagguuaggauccucucc

SEQ ID NO: 747725 - RNA, 19 nt, Artificial Sequence
  Description of Artificial Sequence: Synthetic oligonucleotide
uuuguucuaucauucucca

SEQ ID NO: 747726 - RNA, 19 nt, Artificial Sequence
  Description of Artificial Sequence: Synthetic oligonucleotide
ucucugucuauccugggac

SEQ ID NO: 747727 - RNA, 19 nt, Artificial Sequence
  Description of Artificial Sequence: Synthetic oligonucleotide
ugaaguacauacugcuggc

SEQ ID NO: 747728 - RNA, 19 nt, Artificial Sequence
  Description of Artificial Sequence: Synthetic oligonucleotide
acugacgacaucccuagug

SEQ ID NO: 747729 - RNA, 19 nt, Artificial Sequence
  Description of Artificial Sequence: Synthetic oligonucleotide
ugguaugucaugagaacac

SEQ ID NO: 747730 - RNA, 19 nt, Artificial Sequence
  Description of Artificial Sequence: Synthetic oligonucleotide
aguucaauaguuauuaaua

SEQ ID NO: 747731 - RNA, 19 nt, Artificial Sequence
  Description of Artificial Sequence: Synthetic oligonucleotide
agaccugacuacaagcacc

SEQ ID NO: 747732 - RNA, 19 nt, Artificial Sequence
  Description of Artificial Sequence: Synthetic oligonucleotide
uacacauauacucuuuauu

SEQ ID NO: 747733 - RNA, 19 nt, Artificial Sequence
  Description of Artificial Sequence: Synthetic oligonucleotide
uggagauucagacggugca

SEQ ID NO: 747734 - RNA, 19 nt, Artificial Sequence
  Description of Artificial Sequence: Synthetic oligonucleotide
uggaguaaauuuaacugua

SEQ ID NO: 747735 - RNA, 19 nt, Artificial Sequence
  Description of Artificial Sequence: Synthetic oligonucleotide
cugacgacaucccuagugg

SEQ ID NO: 747736 - RNA, 19 nt, Artificial Sequence
  Description of Artificial Sequence: Synthetic oligonucleotide
gaucugagugcacugacga

SEQ ID NO: 747737 - RNA, 19 nt, Artificial Sequence
  Description of Artificial Sequence: Synthetic oligonucleotide
gucugaagaaguugguucc

SEQ ID NO: 747738 - RNA, 19 nt, Artificial Sequence
  Description of Artificial Sequence: Synthetic oligonucleotide
uugccaaucugauuaaaau

SEQ ID NO: 747739 - RNA, 19 nt, Artificial Sequence
  Description of Artificial Sequence: Synthetic oligonucleotide
agaauagucgcugcuacug

SEQ ID NO: 747740 - RNA, 19 nt, Artificial Sequence
  Description of Artificial Sequence: Synthetic oligonucleotide
caaucugauuaaaauacca

SEQ ID NO: 747741 - RNA, 19 nt, Artificial Sequence
  Description of Artificial Sequence: Synthetic oligonucleotide
ccuggaguaaauuuaacug

SEQ ID NO: 747742 - RNA, 19 nt, Artificial Sequence
  Description of Artificial Sequence: Synthetic oligonucleotide
ugccaaucugauuaaaaua

SEQ ID NO: 747743 - RNA, 19 nt, Artificial Sequence
  Description of Artificial Sequence: Synthetic oligonucleotide
ucaccgguggcacagggac

SEQ ID NO: 747744 - RNA, 19 nt, Artificial Sequence
  Description of Artificial Sequence: Synthetic oligonucleotide
gugacacucagacucuggg

SEQ ID NO: 747745 - RNA, 19 nt, Artificial Sequence
  Description of Artificial Sequence: Synthetic oligonucleotide
caguguuaccagcugaacc

SEQ ID NO: 747746 - RNA, 19 nt, Artificial Sequence
  Description of Artificial Sequence: Synthetic oligonucleotide
agcaccucuucccuucccc

SEQ ID NO: 747747 - RNA, 19 nt, Artificial Sequence
  Description of Artificial Sequence: Synthetic oligonucleotide
aagauggucgugaaugugu

SEQ ID NO: 747748 - RNA, 19 nt, Artificial Sequence
  Description of Artificial Sequence: Synthetic oligonucleotide
uucaccgugugucucccag

SEQ ID NO: 747749 - RNA, 19 nt, Artificial Sequence
  Description of Artificial Sequence: Synthetic oligonucleotide
ugugacccaagaaaauaaa

SEQ ID NO: 747750 - RNA, 19 nt, Artificial Sequence
  Description of Artificial Sequence: Synthetic oligonucleotide
guccccuacucccagagag

SEQ ID NO: 747751 - RNA, 19 nt, Artificial Sequence
  Description of Artificial Sequence: Synthetic oligonucleotide
uguaaauuauaaugauguu

SEQ ID NO: 747752 - RNA, 19 nt, Artificial Sequence
  Description of Artificial Sequence: Synthetic oligonucleotide
acaggcgacacaauuuugg

SEQ ID NO: 747753 - RNA, 19 nt, Artificial Sequence
  Description of Artificial Sequence: Synthetic oligonucleotide
uccauaagaugugucgaag

SEQ ID NO: 747754 - RNA, 19 nt, Artificial Sequence
  Description of Artificial Sequence: Synthetic oligonucleotide
caucaagccuggauaauac

SEQ ID NO: 747755 - RNA, 19 nt, Artificial Sequence
  Description of Artificial Sequence: Synthetic oligonucleotide
ugauaaauggaugcucuuc

SEQ ID NO: 747756 - RNA, 19 nt, Artificial Sequence
  Description of Artificial Sequence: Synthetic oligonucleotide
ucuauccugggacuucugu

SEQ ID NO: 747757 - RNA, 19 nt, Artificial Sequence
  Description of Artificial Sequence: Synthetic oligonucleotide
uacuaagggugucauucca

SEQ ID NO: 747758 - RNA, 19 nt, Artificial Sequence
  Description of Artificial Sequence: Synthetic oligonucleotide
acaguugcucaacuggugu

SEQ ID NO: 747759 - RNA, 19 nt, Artificial Sequence
  Description of Artificial Sequence: Synthetic oligonucleotide
uguguaggaagauggucgu

SEQ ID NO: 747760 - RNA, 19 nt, Artificial Sequence
  Description of Artificial Sequence: Synthetic oligonucleotide
aauaaccauuaaguacaag

SEQ ID NO: 747761 - RNA, 19 nt, Artificial Sequence
  Description of Artificial Sequence: Synthetic oligonucleotide
guugcacuggcuuaugcca

SEQ ID NO: 747762 - RNA, 19 nt, Artificial Sequence
  Description of Artificial Sequence: Synthetic oligonucleotide
uguuaccaguucaauaguu

SEQ ID NO: 747763 - RNA, 19 nt, Artificial Sequence
  Description of Artificial Sequence: Synthetic oligonucleotide
gguacuaagggugucauuc

SEQ ID NO: 747764 - RNA, 19 nt, Artificial Sequence
  Description of Artificial Sequence: Synthetic oligonucleotide
uugaggggcggucuggcug

SEQ ID NO: 747765 - RNA, 19 nt, Artificial Sequence
  Description of Artificial Sequence: Synthetic oligonucleotide
guagggugagguuaggauc

SEQ ID NO: 747766 - RNA, 19 nt, Artificial Sequence
  Description of Artificial Sequence: Synthetic oligonucleotide
uuguuaccaguucaauagu

SEQ ID NO: 747767 - RNA, 19 nt, Artificial Sequence
  Description of Artificial Sequence: Synthetic oligonucleotide
gucgaaggcaaagaaagac

SEQ ID NO: 747768 - RNA, 19 nt, Artificial Sequence
  Description of Artificial Sequence: Synthetic oligonucleotide
uucacaggcgacacaauuu

SEQ ID NO: 747769 - RNA, 19 nt, Artificial Sequence
  Description of Artificial Sequence: Synthetic oligonucleotide
aguuugaacaacagagucu

SEQ ID NO: 747770 - RNA, 19 nt, Artificial Sequence
  Description of Artificial Sequence: Synthetic oligonucleotide
uugcacuggcuuaugccag

SEQ ID NO: 747771 - RNA, 19 nt, Artificial Sequence
  Description of Artificial Sequence: Synthetic oligonucleotide
gagcacuuagcguuguuuc

SEQ ID NO: 747772 - RNA, 19 nt, Artificial Sequence
  Description of Artificial Sequence: Synthetic oligonucleotide
gugucuuccguugaggggc

SEQ ID NO: 747773 - RNA, 19 nt, Artificial Sequence
  Description of Artificial Sequence: Synthetic oligonucleotide
auaagaugugucgaaggca

SEQ ID NO: 747774 - RNA, 19 nt, Artificial Sequence
  Description of Artificial Sequence: Synthetic oligonucleotide
ggggaaacuugguuaaagg

SEQ ID NO: 747775 - RNA, 19 nt, Artificial Sequence
  Description of Artificial Sequence: Synthetic oligonucleotide
agaacauaaggggccuggc

SEQ ID NO: 747776 - RNA, 19 nt, Artificial Sequence
  Description of Artificial Sequence: Synthetic oligonucleotide
aaggcuuuacagaccugac

SEQ ID NO: 747777 - RNA, 19 nt, Artificial Sequence
  Description of Artificial Sequence: Synthetic oligonucleotide
ugcugcggcuaguucaccg

SEQ ID NO: 747778 - RNA, 19 nt, Artificial Sequence
  Description of Artificial Sequence: Synthetic oligonucleotide
uggauaauacauaguccau

SEQ ID NO: 747779 - RNA, 19 nt, Artificial Sequence
  Description of Artificial Sequence: Synthetic oligonucleotide
agaugugucgaaggcaaag

SEQ ID NO: 747780 - RNA, 19 nt, Artificial Sequence
  Description of Artificial Sequence: Synthetic oligonucleotide
uaauaaccauuaaguacaa

SEQ ID NO: 747781 - RNA, 19 nt, Artificial Sequence
  Description of Artificial Sequence: Synthetic oligonucleotide
uuccaucaagccuggauaa

SEQ ID NO: 747782 - RNA, 19 nt, Artificial Sequence
  Description of Artificial Sequence: Synthetic oligonucleotide
guggacaggguccacgcag

SEQ ID NO: 747783 - RNA, 19 nt, Artificial Sequence
  Description of Artificial Sequence: Synthetic oligonucleotide
guaacaacuguagggugag

SEQ ID NO: 747784 - RNA, 19 nt, Artificial Sequence
  Description of Artificial Sequence: Synthetic oligonucleotide
cuaguggaggggaaacuug

SEQ ID NO: 747785 - RNA, 19 nt, Artificial Sequence
  Description of Artificial Sequence: Synthetic oligonucleotide
accauuaaguacaagcaaa

SEQ ID NO: 747786 - RNA, 19 nt, Artificial Sequence
  Description of Artificial Sequence: Synthetic oligonucleotide
aggcgacacaauuuuggag

SEQ ID NO: 747787 - RNA, 19 nt, Artificial Sequence
  Description of Artificial Sequence: Synthetic oligonucleotide
guuaaaggcuuuacagacc

SEQ ID NO: 747788 - RNA, 19 nt, Artificial Sequence
  Description of Artificial Sequence: Synthetic oligonucleotide
gccuggauaauacauaguc

SEQ ID NO: 747789 - RNA, 19 nt, Artificial Sequence
  Description of Artificial Sequence: Synthetic oligonucleotide
agaggugggcaguucaaca

SEQ ID NO: 747790 - RNA, 19 nt, Artificial Sequence
  Description of Artificial Sequence: Synthetic oligonucleotide
cuuagcguuguuucugcuc

SEQ ID NO: 747791 - RNA, 19 nt, Artificial Sequence
  Description of Artificial Sequence: Synthetic oligonucleotide
ucgugaauguguccaagua

SEQ ID NO: 747792 - RNA, 19 nt, Artificial Sequence
  Description of Artificial Sequence: Synthetic oligonucleotide
gagcuacuagugcugcggg

SEQ ID NO: 747793 - RNA, 19 nt, Artificial Sequence
  Description of Artificial Sequence: Synthetic oligonucleotide
agauacccaaucaaaagau

SEQ ID NO: 747794 - RNA, 19 nt, Artificial Sequence
  Description of Artificial Sequence: Synthetic oligonucleotide
ggcuuacacacuaacacag

SEQ ID NO: 747795 - RNA, 19 nt, Artificial Sequence
  Description of Artificial Sequence: Synthetic oligonucleotide
cuuaugccagagcccaugc

SEQ ID NO: 747796 - RNA, 19 nt, Artificial Sequence
  Description of Artificial Sequence: Synthetic oligonucleotide
uacgaggggaaugacgcug

SEQ ID NO: 747797 - RNA, 19 nt, Artificial Sequence
  Description of Artificial Sequence: Synthetic oligonucleotide
cacacaacaucuuguuuuc

SEQ ID NO: 747798 - RNA, 19 nt, Artificial Sequence
  Description of Artificial Sequence: Synthetic oligonucleotide
agguaacaacuguagggug

SEQ ID NO: 747799 - RNA, 19 nt, Artificial Sequence
  Description of Artificial Sequence: Synthetic oligonucleotide
ugguguuuguucuaucauu

SEQ ID NO: 747800 - RNA, 19 nt, Artificial Sequence
  Description of Artificial Sequence: Synthetic oligonucleotide
guacuaagggugucauucc

SEQ ID NO: 747801 - RNA, 19 nt, Artificial Sequence
  Description of Artificial Sequence: Synthetic oligonucleotide
agugcacugacgacauccc

SEQ ID NO: 747802 - RNA, 19 nt, Artificial Sequence
  Description of Artificial Sequence: Synthetic oligonucleotide
ugccuaaauuccuccgcag

SEQ ID NO: 747803 - RNA, 19 nt, Artificial Sequence
  Description of Artificial Sequence: Synthetic oligonucleotide
uuccuucugugugugugcg

SEQ ID NO: 747804 - RNA, 19 nt, Artificial Sequence
  Description of Artificial Sequence: Synthetic oligonucleotide
uuguucuaucauucuccag

SEQ ID NO: 747805 - RNA, 19 nt, Artificial Sequence
  Description of Artificial Sequence: Synthetic oligonucleotide
ugguguacugaugcugcgg

SEQ ID NO: 747806 - RNA, 19 nt, Artificial Sequence
  Description of Artificial Sequence: Synthetic oligonucleotide
auaguccauaagauguguc

SEQ ID NO: 747807 - RNA, 19 nt, Artificial Sequence
  Description of Artificial Sequence: Synthetic oligonucleotide
cacuuagcguuguuucugc

SEQ ID NO: 747808 - RNA, 19 nt, Artificial Sequence
  Description of Artificial Sequence: Synthetic oligonucleotide
gucgcugcuacugaaguac

SEQ ID NO: 747809 - RNA, 19 nt, Artificial Sequence
  Description of Artificial Sequence: Synthetic oligonucleotide
uccugcugaagguaacaac

SEQ ID NO: 747810 - RNA, 19 nt, Artificial Sequence
  Description of Artificial Sequence: Synthetic oligonucleotide
gucaacguaguucuguucu

SEQ ID NO: 747811 - RNA, 19 nt, Artificial Sequence
  Description of Artificial Sequence: Synthetic oligonucleotide
gacucuuccgccaccccgg

SEQ ID NO: 747812 - RNA, 19 nt, Artificial Sequence
  Description of Artificial Sequence: Synthetic oligonucleotide
uguuaccagcugaaccucu

SEQ ID NO: 747813 - RNA, 19 nt, Artificial Sequence
  Description of Artificial Sequence: Synthetic oligonucleotide
ugucuuccguugaggggcg

SEQ ID NO: 747814 - RNA, 19 nt, Artificial Sequence
  Description of Artificial Sequence: Synthetic oligonucleotide
agcacuuagcguuguuucu

SEQ ID NO: 747815 - RNA, 19 nt, Artificial Sequence
  Description of Artificial Sequence: Synthetic oligonucleotide
cuggcuuaugccagagccc

SEQ ID NO: 747816 - RNA, 19 nt, Artificial Sequence
  Description of Artificial Sequence: Synthetic oligonucleotide
aggggaaacuugguuaaag

SEQ ID NO: 747817 - RNA, 19 nt, Artificial Sequence
  Description of Artificial Sequence: Synthetic oligonucleotide
aacagagucuccacagggu

SEQ ID NO: 747818 - RNA, 19 nt, Artificial Sequence
  Description of Artificial Sequence: Synthetic oligonucleotide
auggacucuuccgccaccc

SEQ ID NO: 747819 - RNA, 19 nt, Artificial Sequence
  Description of Artificial Sequence: Synthetic oligonucleotide
agcuacuagugcugcgggg

SEQ ID NO: 747820 - RNA, 19 nt, Artificial Sequence
  Description of Artificial Sequence: Synthetic oligonucleotide
agccauugcugguacuaag

SEQ ID NO: 747821 - RNA, 19 nt, Artificial Sequence
  Description of Artificial Sequence: Synthetic oligonucleotide
aggaauggauacgagggga

SEQ ID NO: 747822 - RNA, 19 nt, Artificial Sequence
  Description of Artificial Sequence: Synthetic oligonucleotide
auuuaacuguaauggcgaa

SEQ ID NO: 747823 - RNA, 19 nt, Artificial Sequence
  Description of Artificial Sequence: Synthetic oligonucleotide
gaauagucgcugcuacuga

SEQ ID NO: 747824 - RNA, 19 nt, Artificial Sequence
  Description of Artificial Sequence: Synthetic oligonucleotide
agcgcagcgguggacaggg

SEQ ID NO: 747825 - RNA, 19 nt, Artificial Sequence
  Description of Artificial Sequence: Synthetic oligonucleotide
agauggucgugaauguguc

SEQ ID NO: 747826 - RNA, 19 nt, Artificial Sequence
  Description of Artificial Sequence: Synthetic oligonucleotide
gguguacugaugcugcggc

SEQ ID NO: 747827 - RNA, 19 nt, Artificial Sequence
  Description of Artificial Sequence: Synthetic oligonucleotide
cagugccuaaauuccuccg

SEQ ID NO: 747828 - RNA, 19 nt, Artificial Sequence
  Description of Artificial Sequence: Synthetic oligonucleotide
aaagaacauaaggggccug

SEQ ID NO: 747829 - RNA, 19 nt, Artificial Sequence
  Description of Artificial Sequence: Synthetic oligonucleotide
ugacgacaucccuagugga

SEQ ID NO: 747830 - RNA, 19 nt, Artificial Sequence
  Description of Artificial Sequence: Synthetic oligonucleotide
ggcuuuacagaccugacua

SEQ ID NO: 747831 - RNA, 19 nt, Artificial Sequence
  Description of Artificial Sequence: Synthetic oligonucleotide
uucagaauagucgcugcua

SEQ ID NO: 747832 - RNA, 19 nt, Artificial Sequence
  Description of Artificial Sequence: Synthetic oligonucleotide
acuaagggugucauuccag

SEQ ID NO: 747833 - RNA, 19 nt, Artificial Sequence
  Description of Artificial Sequence: Synthetic oligonucleotide
ggugucuuccguugagggg

SEQ ID NO: 747834 - RNA, 19 nt, Artificial Sequence
  Description of Artificial Sequence: Synthetic oligonucleotide
ugggccaaugcccuuucuc

SEQ ID NO: 747835 - RNA, 19 nt, Artificial Sequence
  Description of Artificial Sequence: Synthetic oligonucleotide
gugauacagugacacucag

SEQ ID NO: 747836 - RNA, 19 nt, Artificial Sequence
  Description of Artificial Sequence: Synthetic oligonucleotide
caucugcucugcuuaggag

SEQ ID NO: 747837 - RNA, 19 nt, Artificial Sequence
  Description of Artificial Sequence: Synthetic oligonucleotide
guaugucaugagaacacac

SEQ ID NO: 747838 - RNA, 19 nt, Artificial Sequence
  Description of Artificial Sequence: Synthetic oligonucleotide
ggagcuacuagugcugcgg

SEQ ID NO: 747839 - RNA, 19 nt, Artificial Sequence
  Description of Artificial Sequence: Synthetic oligonucleotide
gguguuuguucuaucauuc

SEQ ID NO: 747840 - RNA, 19 nt, Artificial Sequence
  Description of Artificial Sequence: Synthetic oligonucleotide
gaacuggugcccaaaggca

SEQ ID NO: 747841 - RNA, 19 nt, Artificial Sequence
  Description of Artificial Sequence: Synthetic oligonucleotide
ggauacgaggggaaugacg

SEQ ID NO: 747842 - RNA, 19 nt, Artificial Sequence
  Description of Artificial Sequence: Synthetic oligonucleotide
gugcggagaggacagcugc

SEQ ID NO: 747843 - RNA, 19 nt, Artificial Sequence
  Description of Artificial Sequence: Synthetic oligonucleotide
gucuacaauacauacuuuu

SEQ ID NO: 747844 - RNA, 19 nt, Artificial Sequence
  Description of Artificial Sequence: Synthetic oligonucleotide
uaaaggcuuuacagaccug

SEQ ID NO: 747845 - RNA, 19 nt, Artificial Sequence
  Description of Artificial Sequence: Synthetic oligonucleotide
uucgugggccucagcagug

SEQ ID NO: 747846 - RNA, 19 nt, Artificial Sequence
  Description of Artificial Sequence: Synthetic oligonucleotide
uccgucagcaucuguggau

SEQ ID NO: 747847 - RNA, 19 nt, Artificial Sequence
  Description of Artificial Sequence: Synthetic oligonucleotide
cccaggaauggauacgagg

SEQ ID NO: 747848 - RNA, 19 nt, Artificial Sequence
  Description of Artificial Sequence: Synthetic oligonucleotide
gguuaggauccucucccgg

SEQ ID NO: 747849 - RNA, 19 nt, Artificial Sequence
  Description of Artificial Sequence: Synthetic oligonucleotide
gaugcugcggcuaguucac

SEQ ID NO: 747850 - RNA, 19 nt, Artificial Sequence
  Description of Artificial Sequence: Synthetic oligonucleotide
gaaguugguuccaggugug

SEQ ID NO: 747851 - RNA, 19 nt, Artificial Sequence
  Description of Artificial Sequence: Synthetic oligonucleotide
guucaccgguggcacaggg

SEQ ID NO: 747852 - RNA, 19 nt, Artificial Sequence
  Description of Artificial Sequence: Synthetic oligonucleotide
cuguucgugggccucagca

SEQ ID NO: 747853 - RNA, 19 nt, Artificial Sequence
  Description of Artificial Sequence: Synthetic oligonucleotide
auagucgcugcuacugaag

SEQ ID NO: 747854 - RNA, 19 nt, Artificial Sequence
  Description of Artificial Sequence: Synthetic oligonucleotide
gaagucuacaauacauacu

SEQ ID NO: 747855 - RNA, 19 nt, Artificial Sequence
  Description of Artificial Sequence: Synthetic oligonucleotide
cugguaugucaugagaaca

SEQ ID NO: 747856 - RNA, 19 nt, Artificial Sequence
  Description of Artificial Sequence: Synthetic oligonucleotide
acguccccuacucccagag

SEQ ID NO: 747857 - RNA, 19 nt, Artificial Sequence
  Description of Artificial Sequence: Synthetic oligonucleotide
ugaguguagggugggcaug

SEQ ID NO: 747858 - RNA, 19 nt, Artificial Sequence
  Description of Artificial Sequence: Synthetic oligonucleotide
ugaggggcggucuggcugu

SEQ ID NO: 747859 - RNA, 19 nt, Artificial Sequence
  Description of Artificial Sequence: Synthetic oligonucleotide
agugacacucagacucugg

SEQ ID NO: 747860 - RNA, 19 nt, Artificial Sequence
  Description of Artificial Sequence: Synthetic oligonucleotide
uucaccgguggcacaggga

SEQ ID NO: 747861 - RNA, 19 nt, Artificial Sequence
  Description of Artificial Sequence: Synthetic oligonucleotide
acuagugcugcggggaacu

SEQ ID NO: 747862 - RNA, 19 nt, Artificial Sequence
  Description of Artificial Sequence: Synthetic oligonucleotide
auggcgaacugcuccuuga

SEQ ID NO: 747863 - RNA, 19 nt, Artificial Sequence
  Description of Artificial Sequence: Synthetic oligonucleotide
gauucagacggugcaggca

SEQ ID NO: 747864 - RNA, 19 nt, Artificial Sequence
  Description of Artificial Sequence: Synthetic oligonucleotide
acuuuuguuaccaguucaa

SEQ ID NO: 747865 - RNA, 19 nt, Artificial Sequence
  Description of Artificial Sequence: Synthetic oligonucleotide
cucccggaaccugucaacg

SEQ ID NO: 747866 - RNA, 19 nt, Artificial Sequence
  Description of Artificial Sequence: Synthetic oligonucleotide
uggaugcucuucaccgugu

SEQ ID NO: 747867 - RNA, 19 nt, Artificial Sequence
  Description of Artificial Sequence: Synthetic oligonucleotide
ggaaacuugguuaaaggcu

SEQ ID NO: 747868 - RNA, 19 nt, Artificial Sequence
  Description of Artificial Sequence: Synthetic oligonucleotide
acgcugaccacagaggaaa

SEQ ID NO: 747869 - RNA, 19 nt, Artificial Sequence
  Description of Artificial Sequence: Synthetic oligonucleotide
cauucacacaacaucuugu

SEQ ID NO: 747870 - RNA, 19 nt, Artificial Sequence
  Description of Artificial Sequence: Synthetic oligonucleotide
ggaaagagucauguaaaca

SEQ ID NO: 747871 - RNA, 19 nt, Artificial Sequence
  Description of Artificial Sequence: Synthetic oligonucleotide
ugcggcuaguucaccggug

SEQ ID NO: 747872 - RNA, 19 nt, Artificial Sequence
  Description of Artificial Sequence: Synthetic oligonucleotide
agaagagcacuuagcguug

SEQ ID NO: 747873 - RNA, 19 nt, Artificial Sequence
  Description of Artificial Sequence: Synthetic oligonucleotide
uccguugaggggcggucug

SEQ ID NO: 747874 - RNA, 19 nt, Artificial Sequence
  Description of Artificial Sequence: Synthetic oligonucleotide
gugccuaaauuccuccgca

SEQ ID NO: 747875 - RNA, 19 nt, Artificial Sequence
  Description of Artificial Sequence: Synthetic oligonucleotide
ucagcgcagcgguggacag

SEQ ID NO: 747876 - RNA, 19 nt, Artificial Sequence
  Description of Artificial Sequence: Synthetic oligonucleotide
aggagcgcaccuuggccag

SEQ ID NO: 747877 - RNA, 19 nt, Artificial Sequence
  Description of Artificial Sequence: Synthetic oligonucleotide
accugguaugucaugagaa

SEQ ID NO: 747878 - RNA, 19 nt, Artificial Sequence
  Description of Artificial Sequence: Synthetic oligonucleotide
uguggagccauugcuggua

SEQ ID NO: 747879 - RNA, 19 nt, Artificial Sequence
  Description of Artificial Sequence: Synthetic oligonucleotide
caguugcacuggcuuaugc

SEQ ID NO: 747880 - RNA, 19 nt, Artificial Sequence
  Description of Artificial Sequence: Synthetic oligonucleotide
ugcaguugcacuggcuuau

SEQ ID NO: 747881 - RNA, 19 nt, Artificial Sequence
  Description of Artificial Sequence: Synthetic oligonucleotide
ucgcugcuacugaaguaca

SEQ ID NO: 747882 - RNA, 19 nt, Artificial Sequence
  Description of Artificial Sequence: Synthetic oligonucleotide
guuaccaguucaauaguua

SEQ ID NO: 747883 - RNA, 19 nt, Artificial Sequence
  Description of Artificial Sequence: Synthetic oligonucleotide
cgugaauguguccaaguag

SEQ ID NO: 747884 - RNA, 19 nt, Artificial Sequence
  Description of Artificial Sequence: Synthetic oligonucleotide
gaaagaacauaaggggccu

SEQ ID NO: 747885 - RNA, 19 nt, Artificial Sequence
  Description of Artificial Sequence: Synthetic oligonucleotide
acuuagcguuguuucugcu

SEQ ID NO: 747886 - RNA, 19 nt, Artificial Sequence
  Description of Artificial Sequence: Synthetic oligonucleotide
guuaccagcugaaccucug

SEQ ID NO: 747887 - RNA, 19 nt, Artificial Sequence
  Description of Artificial Sequence: Synthetic oligonucleotide
caagccuggauaauacaua

SEQ ID NO: 747888 - RNA, 19 nt, Artificial Sequence
  Description of Artificial Sequence: Synthetic oligonucleotide
uucugacaugugacccaag

SEQ ID NO: 747889 - RNA, 19 nt, Artificial Sequence
  Description of Artificial Sequence: Synthetic oligonucleotide
ugggagcuacuagugcugc

SEQ ID NO: 747890 - RNA, 19 nt, Artificial Sequence
  Description of Artificial Sequence: Synthetic oligonucleotide
ucaccgugugucucccagc

SEQ ID NO: 747891 - RNA, 19 nt, Artificial Sequence
  Description of Artificial Sequence: Synthetic oligonucleotide
ccauucacacaacaucuug

SEQ ID NO: 747892 - RNA, 19 nt, Artificial Sequence
  Description of Artificial Sequence: Synthetic oligonucleotide
ugcggagaggacagcugcu

SEQ ID NO: 747893 - RNA, 19 nt, Artificial Sequence
  Description of Artificial Sequence: Synthetic oligonucleotide
aguuguguaggaagauggu

SEQ ID NO: 747894 - RNA, 19 nt, Artificial Sequence
  Description of Artificial Sequence: Synthetic oligonucleotide
ccugguaugucaugagaac

SEQ ID NO: 747895 - RNA, 19 nt, Artificial Sequence
  Description of Artificial Sequence: Synthetic oligonucleotide
gcaguucaacagcagcucc

SEQ ID NO: 747896 - RNA, 19 nt, Artificial Sequence
  Description of Artificial Sequence: Synthetic oligonucleotide
acacaauuuuggagguguc

SEQ ID NO: 747897 - RNA, 19 nt, Artificial Sequence
  Description of Artificial Sequence: Synthetic oligonucleotide
aacuugguuaaaggcuuua

SEQ ID NO: 747898 - RNA, 19 nt, Artificial Sequence
  Description of Artificial Sequence: Synthetic oligonucleotide
gugagguuaggauccucuc

SEQ ID NO: 747899 - RNA, 19 nt, Artificial Sequence
  Description of Artificial Sequence: Synthetic oligonucleotide
cagggcuuacacacuaaca

SEQ ID NO: 747900 - RNA, 19 nt, Artificial Sequence
  Description of Artificial Sequence: Synthetic oligonucleotide
auacgaggggaaugacgcu

SEQ ID NO: 747901 - RNA, 19 nt, Artificial Sequence
  Description of Artificial Sequence: Synthetic oligonucleotide
guccauaagaugugucgaa

SEQ ID NO: 747902 - RNA, 19 nt, Artificial Sequence
  Description of Artificial Sequence: Synthetic oligonucleotide
ugacuacaagcaccaguuu

SEQ ID NO: 747903 - RNA, 19 nt, Artificial Sequence
  Description of Artificial Sequence: Synthetic oligonucleotide
gggcuuacacacuaacaca

SEQ ID NO: 747904 - RNA, 19 nt, Artificial Sequence
  Description of Artificial Sequence: Synthetic oligonucleotide
agagcacuuagcguuguuu

SEQ ID NO: 747905 - RNA, 19 nt, Artificial Sequence
  Description of Artificial Sequence: Synthetic oligonucleotide
gcggcuaguucaccggugg

SEQ ID NO: 747906 - RNA, 19 nt, Artificial Sequence
  Description of Artificial Sequence: Synthetic oligonucleotide
caggcgacacaauuuugga

SEQ ID NO: 747907 - RNA, 19 nt, Artificial Sequence
  Description of Artificial Sequence: Synthetic oligonucleotide
cugggugcuguucgugggc

SEQ ID NO: 747908 - RNA, 19 nt, Artificial Sequence
  Description of Artificial Sequence: Synthetic oligonucleotide
gcugcggcuaguucaccgg

SEQ ID NO: 747909 - RNA, 19 nt, Artificial Sequence
  Description of Artificial Sequence: Synthetic oligonucleotide
caggcaucucuuccuggag

SEQ ID NO: 747910 - RNA, 19 nt, Artificial Sequence
  Description of Artificial Sequence: Synthetic oligonucleotide
ggagauucagacggugcag

SEQ ID NO: 747911 - RNA, 19 nt, Artificial Sequence
  Description of Artificial Sequence: Synthetic oligonucleotide
ggaggugucuuccguugag

SEQ ID NO: 747912 - RNA, 19 nt, Artificial Sequence
  Description of Artificial Sequence: Synthetic oligonucleotide
cuguaauggcgaacugcuc

SEQ ID NO: 747913 - RNA, 19 nt, Artificial Sequence
  Description of Artificial Sequence: Synthetic oligonucleotide
cugcagacguccccuacuc

SEQ ID NO: 747914 - RNA, 19 nt, Artificial Sequence
  Description of Artificial Sequence: Synthetic oligonucleotide
agcccaugcucagcgcagc

SEQ ID NO: 747915 - RNA, 19 nt, Artificial Sequence
  Description of Artificial Sequence: Synthetic oligonucleotide
uggauccaggagcgcaccu

SEQ ID NO: 747916 - RNA, 19 nt, Artificial Sequence
  Description of Artificial Sequence: Synthetic oligonucleotide
ucccggaaccugucaacgu

SEQ ID NO: 747917 - RNA, 19 nt, Artificial Sequence
  Description of Artificial Sequence: Synthetic oligonucleotide
ugagccccagugccuaaau

SEQ ID NO: 747918 - RNA, 19 nt, Artificial Sequence
  Description of Artificial Sequence: Synthetic oligonucleotide
gcuuuacagaccugacuac

SEQ ID NO: 747919 - RNA, 19 nt, Artificial Sequence
  Description of Artificial Sequence: Synthetic oligonucleotide
ggaggggaaacuugguuaa

SEQ ID NO: 747920 - RNA, 19 nt, Artificial Sequence
  Description of Artificial Sequence: Synthetic oligonucleotide
acaugugacccaagaaaau

SEQ ID NO: 747921 - RNA, 19 nt, Artificial Sequence
  Description of Artificial Sequence: Synthetic oligonucleotide
ugcuuaggaggagagccuu

SEQ ID NO: 747922 - RNA, 19 nt, Artificial Sequence
  Description of Artificial Sequence: Synthetic oligonucleotide
aagccggaacagacugagg

SEQ ID NO: 747923 - RNA, 19 nt, Artificial Sequence
  Description of Artificial Sequence: Synthetic oligonucleotide
aaacuugguuaaaggcuuu

SEQ ID NO: 747924 - RNA, 19 nt, Artificial Sequence
  Description of Artificial Sequence: Synthetic oligonucleotide
ggauaauacauaguccaua

SEQ ID NO: 747925 - RNA, 19 nt, Artificial Sequence
  Description of Artificial Sequence: Synthetic oligonucleotide
agcaguguuaccagcugaa

SEQ ID NO: 747926 - RNA, 19 nt, Artificial Sequence
  Description of Artificial Sequence: Synthetic oligonucleotide
cugauuaaaauaccaucuu

SEQ ID NO: 747927 - RNA, 19 nt, Artificial Sequence
  Description of Artificial Sequence: Synthetic oligonucleotide
uggucgugaauguguccaa

SEQ ID NO: 747928 - RNA, 19 nt, Artificial Sequence
  Description of Artificial Sequence: Synthetic oligonucleotide
ugcucagcgcagcggugga

SEQ ID NO: 747929 - RNA, 19 nt, Artificial Sequence
  Description of Artificial Sequence: Synthetic oligonucleotide
gcuggaucugagugcacug

SEQ ID NO: 747930 - RNA, 19 nt, Artificial Sequence
  Description of Artificial Sequence: Synthetic oligonucleotide
accggcaaccucuuccguu

SEQ ID NO: 747931 - RNA, 19 nt, Artificial Sequence
  Description of Artificial Sequence: Synthetic oligonucleotide
ucuccugggugcuguucgu

SEQ ID NO: 747932 - RNA, 19 nt, Artificial Sequence
  Description of Artificial Sequence: Synthetic oligonucleotide
gaaagccggaacagacuga

SEQ ID NO: 747933 - RNA, 19 nt, Artificial Sequence
  Description of Artificial Sequence: Synthetic oligonucleotide
caugcucagcgcagcggug

SEQ ID NO: 747934 - RNA, 19 nt, Artificial Sequence
  Description of Artificial Sequence: Synthetic oligonucleotide
caccugguaugucaugaga

SEQ ID NO: 747935 - RNA, 19 nt, Artificial Sequence
  Description of Artificial Sequence: Synthetic oligonucleotide
gccggaacagacugagggc

SEQ ID NO: 747936 - RNA, 19 nt, Artificial Sequence
  Description of Artificial Sequence: Synthetic oligonucleotide
ccaaguaggcagaagggaa

SEQ ID NO: 747937 - RNA, 19 nt, Artificial Sequence
  Description of Artificial Sequence: Synthetic oligonucleotide
uggauacgaggggaaugac

SEQ ID NO: 747938 - RNA, 19 nt, Artificial Sequence
  Description of Artificial Sequence: Synthetic oligonucleotide
uugcucaacuggugucuuc

SEQ ID NO: 747939 - RNA, 19 nt, Artificial Sequence
  Description of Artificial Sequence: Synthetic oligonucleotide
ugcucuccugcugaaggua

SEQ ID NO: 747940 - RNA, 19 nt, Artificial Sequence
  Description of Artificial Sequence: Synthetic oligonucleotide
ucuuccguugaggggcggu

SEQ ID NO: 747941 - RNA, 19 nt, Artificial Sequence
  Description of Artificial Sequence: Synthetic oligonucleotide
cagaggugggcaguucaac

SEQ ID NO: 747942 - RNA, 19 nt, Artificial Sequence
  Description of Artificial Sequence: Synthetic oligonucleotide
gcuaguucaccgguggcac

SEQ ID NO: 747943 - RNA, 19 nt, Artificial Sequence
  Description of Artificial Sequence: Synthetic oligonucleotide
guucgugggccucagcagu

SEQ ID NO: 747944 - RNA, 19 nt, Artificial Sequence
  Description of Artificial Sequence: Synthetic oligonucleotide
ggggaaagagucauguaaa

SEQ ID NO: 747945 - RNA, 19 nt, Artificial Sequence
  Description of Artificial Sequence: Synthetic oligonucleotide
cacuggcuuaugccagagc

SEQ ID NO: 747946 - RNA, 19 nt, Artificial Sequence
  Description of Artificial Sequence: Synthetic oligonucleotide
gcuacuagugcugcgggga

SEQ ID NO: 747947 - RNA, 19 nt, Artificial Sequence
  Description of Artificial Sequence: Synthetic oligonucleotide
uuccguugaggggcggucu

SEQ ID NO: 747948 - RNA, 19 nt, Artificial Sequence
  Description of Artificial Sequence: Synthetic oligonucleotide
aguucaccgguggcacagg

SEQ ID NO: 747949 - RNA, 19 nt, Artificial Sequence
  Description of Artificial Sequence: Synthetic oligonucleotide
gggagcuacuagugcugcg

SEQ ID NO: 747950 - RNA, 19 nt, Artificial Sequence
  Description of Artificial Sequence: Synthetic oligonucleotide
ccggaaccugucaacguag

SEQ ID NO: 747951 - RNA, 19 nt, Artificial Sequence
  Description of Artificial Sequence: Synthetic oligonucleotide
gaugcucuucaccgugugu

SEQ ID NO: 747952 - RNA, 19 nt, Artificial Sequence
  Description of Artificial Sequence: Synthetic oligonucleotide
gauacccaaucaaaagauu

SEQ ID NO: 747953 - RNA, 19 nt, Artificial Sequence
  Description of Artificial Sequence: Synthetic oligonucleotide
gcuuaugccagagcccaug

SEQ ID NO: 747954 - RNA, 19 nt, Artificial Sequence
  Description of Artificial Sequence: Synthetic oligonucleotide
caccgguggcacagggacc

SEQ ID NO: 747955 - RNA, 19 nt, Artificial Sequence
  Description of Artificial Sequence: Synthetic oligonucleotide
ggucgugaauguguccaag

SEQ ID NO: 747956 - RNA, 19 nt, Artificial Sequence
  Description of Artificial Sequence: Synthetic oligonucleotide
ugguacuaagggugucauu

SEQ ID NO: 747957 - RNA, 19 nt, Artificial Sequence
  Description of Artificial Sequence: Synthetic oligonucleotide
ugugugcggagaggacagc

SEQ ID NO: 747958 - RNA, 19 nt, Artificial Sequence
  Description of Artificial Sequence: Synthetic oligonucleotide
ccaggagcgcaccuuggcc

SEQ ID NO: 747959 - RNA, 19 nt, Artificial Sequence
  Description of Artificial Sequence: Synthetic oligonucleotide
cccaaucaaaagauuaaua

SEQ ID NO: 747960 - RNA, 19 nt, Artificial Sequence
  Description of Artificial Sequence: Synthetic oligonucleotide
ggaguaaauuuaacuguaa

SEQ ID NO: 747961 - RNA, 19 nt, Artificial Sequence
  Description of Artificial Sequence: Synthetic oligonucleotide
ggcaccugguaugucauga

SEQ ID NO: 747962 - RNA, 19 nt, Artificial Sequence
  Description of Artificial Sequence: Synthetic oligonucleotide
ggcaguucaacagcagcuc

SEQ ID NO: 747963 - RNA, 19 nt, Artificial Sequence
  Description of Artificial Sequence: Synthetic oligonucleotide
ccagggcuuacacacuaac

SEQ ID NO: 747964 - RNA, 19 nt, Artificial Sequence
  Description of Artificial Sequence: Synthetic oligonucleotide
guguaggaagauggucgug

SEQ ID NO: 747965 - RNA, 19 nt, Artificial Sequence
  Description of Artificial Sequence: Synthetic oligonucleotide
cagcucccagccugcagac

SEQ ID NO: 747966 - RNA, 19 nt, Artificial Sequence
  Description of Artificial Sequence: Synthetic oligonucleotide
cuggaucugagugcacuga

SEQ ID NO: 747967 - RNA, 19 nt, Artificial Sequence
  Description of Artificial Sequence: Synthetic oligonucleotide
cuaguucaccgguggcaca

SEQ ID NO: 747968 - RNA, 19 nt, Artificial Sequence
  Description of Artificial Sequence: Synthetic oligonucleotide
uuccgccaccccgggaaag

SEQ ID NO: 747969 - RNA, 19 nt, Artificial Sequence
  Description of Artificial Sequence: Synthetic oligonucleotide
ggaagauggucgugaaugu

SEQ ID NO: 747970 - RNA, 19 nt, Artificial Sequence
  Description of Artificial Sequence: Synthetic oligonucleotide
acgaggggaaugacgcuga

SEQ ID NO: 747971 - RNA, 19 nt, Artificial Sequence
  Description of Artificial Sequence: Synthetic oligonucleotide
ccuacucccagagaggcca

SEQ ID NO: 747972 - RNA, 19 nt, Artificial Sequence
  Description of Artificial Sequence: Synthetic oligonucleotide
ggggaguuguguaggaaga

SEQ ID NO: 747973 - RNA, 19 nt, Artificial Sequence
  Description of Artificial Sequence: Synthetic oligonucleotide
augcugcggcuaguucacc

SEQ ID NO: 747974 - RNA, 19 nt, Artificial Sequence
  Description of Artificial Sequence: Synthetic oligonucleotide
gcugaagguaacaacugua

SEQ ID NO: 747975 - RNA, 19 nt, Artificial Sequence
  Description of Artificial Sequence: Synthetic oligonucleotide
cucagcgcagcgguggaca

SEQ ID NO: 747976 - RNA, 19 nt, Artificial Sequence
  Description of Artificial Sequence: Synthetic oligonucleotide
cuuccguugaggggcgguc

SEQ ID NO: 747977 - RNA, 19 nt, Artificial Sequence
  Description of Artificial Sequence: Synthetic oligonucleotide
gcaaccucuuccguuugug

SEQ ID NO: 747978 - RNA, 19 nt, Artificial Sequence
  Description of Artificial Sequence: Synthetic oligonucleotide
ggacuucuguccauuuuca

SEQ ID NO: 747979 - RNA, 19 nt, Artificial Sequence
  Description of Artificial Sequence: Synthetic oligonucleotide
agccuggauaauacauagu

SEQ ID NO: 747980 - RNA, 19 nt, Artificial Sequence
  Description of Artificial Sequence: Synthetic oligonucleotide
gaauggauacgaggggaau

SEQ ID NO: 747981 - RNA, 19 nt, Artificial Sequence
  Description of Artificial Sequence: Synthetic oligonucleotide
cagugacacucagacucug

SEQ ID NO: 747982 - RNA, 19 nt, Artificial Sequence
  Description of Artificial Sequence: Synthetic oligonucleotide
gcucugcuuaggaggagag

SEQ ID NO: 747983 - RNA, 19 nt, Artificial Sequence
  Description of Artificial Sequence: Synthetic oligonucleotide
ggaauggauacgaggggaa

SEQ ID NO: 747984 - RNA, 19 nt, Artificial Sequence
  Description of Artificial Sequence: Synthetic oligonucleotide
gccuugaacagaagagcac

SEQ ID NO: 747985 - RNA, 19 nt, Artificial Sequence
  Description of Artificial Sequence: Synthetic oligonucleotide
cuacuagugcugcggggaa

SEQ ID NO: 747986 - RNA, 19 nt, Artificial Sequence
  Description of Artificial Sequence: Synthetic oligonucleotide
cagcaccucuucccuuccc

SEQ ID NO: 747987 - RNA, 19 nt, Artificial Sequence
  Description of Artificial Sequence: Synthetic oligonucleotide
gcugguacuaaggguguca

SEQ ID NO: 747988 - RNA, 19 nt, Artificial Sequence
  Description of Artificial Sequence: Synthetic oligonucleotide
gggaaaggcuucaucucuc

SEQ ID NO: 747989 - RNA, 19 nt, Artificial Sequence
  Description of Artificial Sequence: Synthetic oligonucleotide
cugguguuuguucuaucau

SEQ ID NO: 747990 - RNA, 19 nt, Artificial Sequence
  Description of Artificial Sequence: Synthetic oligonucleotide
ggugagguuaggauccucu

SEQ ID NO: 747991 - RNA, 19 nt, Artificial Sequence
  Description of Artificial Sequence: Synthetic oligonucleotide
ccauuaaguacaagcaaau

SEQ ID NO: 747992 - RNA, 19 nt, Artificial Sequence
  Description of Artificial Sequence: Synthetic oligonucleotide
cugaguguagggugggcau

SEQ ID NO: 747993 - RNA, 19 nt, Artificial Sequence
  Description of Artificial Sequence: Synthetic oligonucleotide
ggcauggacagcggugcug

SEQ ID NO: 747994 - RNA, 19 nt, Artificial Sequence
  Description of Artificial Sequence: Synthetic oligonucleotide
gcccaugcucagcgcagcg

SEQ ID NO: 747995 - RNA, 19 nt, Artificial Sequence
  Description of Artificial Sequence: Synthetic oligonucleotide
cugauaaauggaugcucuu

SEQ ID NO: 747996 - RNA, 19 nt, Artificial Sequence
  Description of Artificial Sequence: Synthetic oligonucleotide
ggaccgcuccuacugccac

SEQ ID NO: 747997 - RNA, 19 nt, Artificial Sequence
  Description of Artificial Sequence: Synthetic oligonucleotide
cucccagccugcagacguc

SEQ ID NO: 747998 - RNA, 19 nt, Artificial Sequence
  Description of Artificial Sequence: Synthetic oligonucleotide
ccuucugugugugugcgga

SEQ ID NO: 747999 - RNA, 19 nt, Artificial Sequence
  Description of Artificial Sequence: Synthetic oligonucleotide
gccuaaauuccuccgcagu

SEQ ID NO: 748000 - RNA, 19 nt, Artificial Sequence
  Description of Artificial Sequence: Synthetic oligonucleotide
cugucaacguaguucuguu

SEQ ID NO: 748001 - RNA, 19 nt, Artificial Sequence
  Description of Artificial Sequence: Synthetic oligonucleotide
caccgugugucucccagcu

SEQ ID NO: 748002 - RNA, 19 nt, Artificial Sequence
  Description of Artificial Sequence: Synthetic oligonucleotide
gaggggaaacuugguuaaa

SEQ ID NO: 748003 - RNA, 19 nt, Artificial Sequence
  Description of Artificial Sequence: Synthetic oligonucleotide
cuuggggaccagggcuuac

SEQ ID NO: 748004 - RNA, 19 nt, Artificial Sequence
  Description of Artificial Sequence: Synthetic oligonucleotide
ccguuugugcuuccgucuc

SEQ ID NO: 748005 - RNA, 19 nt, Artificial Sequence
  Description of Artificial Sequence: Synthetic oligonucleotide
cagcgcagcgguggacagg

SEQ ID NO: 748006 - RNA, 19 nt, Artificial Sequence
  Description of Artificial Sequence: Synthetic oligonucleotide
gcuuaggaggagagccuug

SEQ ID NO: 748007 - RNA, 19 nt, Artificial Sequence
  Description of Artificial Sequence: Synthetic oligonucleotide
gggcaguucaacagcagcu

SEQ ID NO: 748008 - RNA, 19 nt, Artificial Sequence
  Description of Artificial Sequence: Synthetic oligonucleotide
cagagucuccacaggguau

SEQ ID NO: 748009 - RNA, 19 nt, Artificial Sequence
  Description of Artificial Sequence: Synthetic oligonucleotide
cgucagcaucuguggaugg

SEQ ID NO: 748010 - RNA, 19 nt, Artificial Sequence
  Description of Artificial Sequence: Synthetic oligonucleotide
gguggacaggguccacgca

SEQ ID NO: 748011 - RNA, 19 nt, Artificial Sequence
  Description of Artificial Sequence: Synthetic oligonucleotide
cgguggacaggguccacgc

SEQ ID NO: 748012 - RNA, 19 nt, Artificial Sequence
  Description of Artificial Sequence: Synthetic oligonucleotide
cccuacucccagagaggcc

SEQ ID NO: 748013 - RNA, 19 nt, Artificial Sequence
  Description of Artificial Sequence: Synthetic oligonucleotide
accgugugucucccagcuu

SEQ ID NO: 748014 - RNA, 19 nt, Artificial Sequence
  Description of Artificial Sequence: Synthetic oligonucleotide
guugaggggcggucuggcu

SEQ ID NO: 748015 - RNA, 19 nt, Artificial Sequence
  Description of Artificial Sequence: Synthetic oligonucleotide
gcucaacuggugucuucuc

SEQ ID NO: 748016 - RNA, 19 nt, Artificial Sequence
  Description of Artificial Sequence: Synthetic oligonucleotide
accugucaacguaguucug

SEQ ID NO: 748017 - RNA, 19 nt, Artificial Sequence
  Description of Artificial Sequence: Synthetic oligonucleotide
ggugcuguucgugggccuc

SEQ ID NO: 748018 - RNA, 19 nt, Artificial Sequence
  Description of Artificial Sequence: Synthetic oligonucleotide
gcagucaggggagaugacu

SEQ ID NO: 748019 - RNA, 19 nt, Artificial Sequence
  Description of Artificial Sequence: Synthetic oligonucleotide
gguuccagguguggagcca

SEQ ID NO: 748020 - RNA, 19 nt, Artificial Sequence
  Description of Artificial Sequence: Synthetic oligonucleotide
gcaguugcacuggcuuaug

SEQ ID NO: 748021 - RNA, 19 nt, Artificial Sequence
  Description of Artificial Sequence: Synthetic oligonucleotide
agccugcagacguccccua

SEQ ID NO: 748022 - RNA, 19 nt, Artificial Sequence
  Description of Artificial Sequence: Synthetic oligonucleotide
ggcuggaucugagugcacu

SEQ ID NO: 748023 - RNA, 19 nt, Artificial Sequence
  Description of Artificial Sequence: Synthetic oligonucleotide
cugguacuaagggugucau

SEQ ID NO: 748024 - RNA, 19 nt, Artificial Sequence
  Description of Artificial Sequence: Synthetic oligonucleotide
gugcuguucgugggccuca

SEQ ID NO: 748025 - RNA, 19 nt, Artificial Sequence
  Description of Artificial Sequence: Synthetic oligonucleotide
ccgcagucaggggagauga

SEQ ID NO: 748026 - RNA, 19 nt, Artificial Sequence
  Description of Artificial Sequence: Synthetic oligonucleotide
cuccugguguacugaugcu

SEQ ID NO: 748027 - RNA, 19 nt, Artificial Sequence
  Description of Artificial Sequence: Synthetic oligonucleotide
ccugucaacguaguucugu

SEQ ID NO: 748028 - RNA, 19 nt, Artificial Sequence
  Description of Artificial Sequence: Synthetic oligonucleotide
cugcggcuaguucaccggu

SEQ ID NO: 748029 - RNA, 19 nt, Artificial Sequence
  Description of Artificial Sequence: Synthetic oligonucleotide
cgcagcgguggacaggguc

SEQ ID NO: 748030 - RNA, 19 nt, Artificial Sequence
  Description of Artificial Sequence: Synthetic oligonucleotide
cuuccgccaccccgggaaa

SEQ ID NO: 748031 - RNA, 19 nt, Artificial Sequence
  Description of Artificial Sequence: Synthetic oligonucleotide
ccguugaggggcggucugg

SEQ ID NO: 748032 - RNA, 19 nt, Artificial Sequence
  Description of Artificial Sequence: Synthetic oligonucleotide
ccaugcucagcgcagcggu

SEQ ID NO: 748033 - RNA, 19 nt, Artificial Sequence
  Description of Artificial Sequence: Synthetic oligonucleotide
cccggaaccugucaacgua

SEQ ID NO: 748034 - RNA, 19 nt, Artificial Sequence
  Description of Artificial Sequence: Synthetic oligonucleotide
caccccgggaaaggcuuca

SEQ ID NO: 748035 - RNA, 19 nt, Artificial Sequence
  Description of Artificial Sequence: Synthetic oligonucleotide
gggaccgcuccuacugcca

SEQ ID NO: 748036 - RNA, 19 nt, Artificial Sequence
  Description of Artificial Sequence: Synthetic oligonucleotide
ggcaaccucuuccguuugu

SEQ ID NO: 748037 - RNA, 19 nt, Artificial Sequence
  Description of Artificial Sequence: Synthetic oligonucleotide
ccgugugucucccagcuuu

SEQ ID NO: 748038 - RNA, 19 nt, Artificial Sequence
  Description of Artificial Sequence: Synthetic oligonucleotide
ccuaguggaggggaaacuu

SEQ ID NO: 748039 - RNA, 19 nt, Artificial Sequence
  Description of Artificial Sequence: Synthetic oligonucleotide
ccaccccgggaaaggcuuc

SEQ ID NO: 748040 - RNA, 19 nt, Artificial Sequence
  Description of Artificial Sequence: Synthetic oligonucleotide
ccgccaccccgggaaaggc

SEQ ID NO: 748041 - RNA, 19 nt, Artificial Sequence
  Description of Artificial Sequence: Synthetic oligonucleotide
gcucagcgcagcgguggac

SEQ ID NO: 748042 - RNA, 19 nt, Artificial Sequence
  Description of Artificial Sequence: Synthetic oligonucleotide
ggauccaggagcgcaccuu

SEQ ID NO: 748043 - RNA, 19 nt, Artificial Sequence
  Description of Artificial Sequence: Synthetic oligonucleotide
ccggcaaccucuuccguuu

SEQ ID NO: 748044 - RNA, 19 nt, Artificial Sequence
  Description of Artificial Sequence: Synthetic oligonucleotide
ccccagugccuaaauuccu

SEQ ID NO: 748045 - RNA, 19 nt, Artificial Sequence
  Description of Artificial Sequence: Synthetic oligonucleotide
ggaccagggcuuacacacu

SEQ ID NO: 748046 - RNA, 19 nt, Artificial Sequence
  Description of Artificial Sequence: Synthetic oligonucleotide
cagcggugcugcugcaguu

SEQ ID NO: 748047 - RNA, 19 nt, Artificial Sequence
  Description of Artificial Sequence: Synthetic oligonucleotide
gggcuggaucugagugcac

SEQ ID NO: 748048 - RNA, 19 nt, Artificial Sequence
  Description of Artificial Sequence: Synthetic oligonucleotide
cuccgcagucaggggagau

SEQ ID NO: 748049 - RNA, 19 nt, Artificial Sequence
  Description of Artificial Sequence: Synthetic oligonucleotide
cccuaguggaggggaaacu

SEQ ID NO: 748050 - RNA, 19 nt, Artificial Sequence
  Description of Artificial Sequence: Synthetic oligonucleotide
cguccccuacucccagaga

SEQ ID NO: 748051 - RNA, 19 nt, Artificial Sequence
  Description of Artificial Sequence: Synthetic oligonucleotide
ccgcuccuacugccacugu

SEQ ID NO: 748052 - RNA, 19 nt, Artificial Sequence
  Description of Artificial Sequence: Synthetic oligonucleotide
gcgcagcgguggacagggu

SEQ ID NO: 748053 - RNA, 19 nt, Artificial Sequence
  Description of Artificial Sequence: Synthetic oligonucleotide
auuuuaguaccauagaaac

SEQ ID NO: 748054 - RNA, 19 nt, Artificial Sequence
  Description of Artificial Sequence: Synthetic oligonucleotide
aaugauuaaaggugcaugg

SEQ ID NO: 748055 - RNA, 19 nt, Artificial Sequence
  Description of Artificial Sequence: Synthetic oligonucleotide
gucauuaacauucauagug

SEQ ID NO: 748056 - RNA, 19 nt, Artificial Sequence
  Description of Artificial Sequence: Synthetic oligonucleotide
caaaauuuuaguaccauag

SEQ ID NO: 748057 - RNA, 19 nt, Artificial Sequence
  Description of Artificial Sequence: Synthetic oligonucleotide
uguacaaugacucauuauc

SEQ ID NO: 748058 - RNA, 19 nt, Artificial Sequence
  Description of Artificial Sequence: Synthetic oligonucleotide
auaaagaacuccuucgugg

SEQ ID NO: 748059 - RNA, 19 nt, Artificial Sequence
  Description of Artificial Sequence: Synthetic oligonucleotide
ugcuugauaaaauaaaaca

SEQ ID NO: 748060 - RNA, 19 nt, Artificial Sequence
  Description of Artificial Sequence: Synthetic oligonucleotide
uuuaguaccauagaaaccu

SEQ ID NO: 748061 - RNA, 19 nt, Artificial Sequence
  Description of Artificial Sequence: Synthetic oligonucleotide
aaaacucauagcuggcagc

SEQ ID NO: 748062 - RNA, 19 nt, Artificial Sequence
  Description of Artificial Sequence: Synthetic oligonucleotide
cucacuuuaggauucauag

SEQ ID NO: 748063 - RNA, 19 nt, Artificial Sequence
  Description of Artificial Sequence: Synthetic oligonucleotide
caucaaaacucauagcugg

SEQ ID NO: 748064 - RNA, 19 nt, Artificial Sequence
  Description of Artificial Sequence: Synthetic oligonucleotide
uuuuguaagccaaaguacu

SEQ ID NO: 748065 - RNA, 19 nt, Artificial Sequence
  Description of Artificial Sequence: Synthetic oligonucleotide
aacuuagacaguuaggaaa

SEQ ID NO: 748066 - RNA, 19 nt, Artificial Sequence
  Description of Artificial Sequence: Synthetic oligonucleotide
acacaauagacaugaauac

SEQ ID NO: 748067 - RNA, 19 nt, Artificial Sequence
  Description of Artificial Sequence: Synthetic oligonucleotide
aaaauuuuaguaccauaga

SEQ ID NO: 748068 - RNA, 19 nt, Artificial Sequence
  Description of Artificial Sequence: Synthetic oligonucleotide
uggucauuauauaccaugg

SEQ ID NO: 748069 - RNA, 19 nt, Artificial Sequence
  Description of Artificial Sequence: Synthetic oligonucleotide
aauaagaccuucagugagc

SEQ ID NO: 748070 - RNA, 19 nt, Artificial Sequence
  Description of Artificial Sequence: Synthetic oligonucleotide
ugcagaauccaaugaagcg

SEQ ID NO: 748071 - RNA, 19 nt, Artificial Sequence
  Description of Artificial Sequence: Synthetic oligonucleotide
ugagcuucguuucugagcu

SEQ ID NO: 748072 - RNA, 19 nt, Artificial Sequence
  Description of Artificial Sequence: Synthetic oligonucleotide
aacaagacucccauguggc

SEQ ID NO: 748073 - RNA, 19 nt, Artificial Sequence
  Description of Artificial Sequence: Synthetic oligonucleotide
cuuuauuccauuuggcuug

SEQ ID NO: 748074 - RNA, 19 nt, Artificial Sequence
  Description of Artificial Sequence: Synthetic oligonucleotide
uauguacaacuucaaaagc

SEQ ID NO: 748075 - RNA, 19 nt, Artificial Sequence
  Description of Artificial Sequence: Synthetic oligonucleotide
uuggugagaggaaugauca

SEQ ID NO: 748076 - RNA, 19 nt, Artificial Sequence
  Description of Artificial Sequence: Synthetic oligonucleotide
accaauauguuguccacac

SEQ ID NO: 748077 - RNA, 19 nt, Artificial Sequence
  Description of Artificial Sequence: Synthetic oligonucleotide
aaaacagagcugugaacuc

SEQ ID NO: 748078 - RNA, 19 nt, Artificial Sequence
  Description of Artificial Sequence: Synthetic oligonucleotide
gaucaaauccuccaauggc

SEQ ID NO: 748079 - RNA, 19 nt, Artificial Sequence
  Description of Artificial Sequence: Synthetic oligonucleotide
uuuuaguaccauagaaacc

SEQ ID NO: 748080 - RNA, 19 nt, Artificial Sequence
  Description of Artificial Sequence: Synthetic oligonucleotide
aaugguacggugaagaaau

SEQ ID NO: 748081 - RNA, 19 nt, Artificial Sequence
  Description of Artificial Sequence: Synthetic oligonucleotide
ucuggcuuaauugagugcc

SEQ ID NO: 748082 - RNA, 19 nt, Artificial Sequence
  Description of Artificial Sequence: Synthetic oligonucleotide
auagaaaccuuuugaaaug

SEQ ID NO: 748083 - RNA, 19 nt, Artificial Sequence
  Description of Artificial Sequence: Synthetic oligonucleotide
aaaucugggaaaguccuuc

SEQ ID NO: 748084 - RNA, 19 nt, Artificial Sequence
  Description of Artificial Sequence: Synthetic oligonucleotide
ugacucauuaucacuaugu

SEQ ID NO: 748085 - RNA, 19 nt, Artificial Sequence
  Description of Artificial Sequence: Synthetic oligonucleotide
acugcuuuuccgcuaaccg

SEQ ID NO: 748086 - RNA, 19 nt, Artificial Sequence
  Description of Artificial Sequence: Synthetic oligonucleotide
aaaagugucuugugggaug

SEQ ID NO: 748087 - RNA, 19 nt, Artificial Sequence
  Description of Artificial Sequence: Synthetic oligonucleotide
aaguacuugugcuucauaa

SEQ ID NO: 748088 - RNA, 19 nt, Artificial Sequence
  Description of Artificial Sequence: Synthetic oligonucleotide
gagauuucacacuggauug

SEQ ID NO: 748089 - RNA, 19 nt, Artificial Sequence
  Description of Artificial Sequence: Synthetic oligonucleotide
aauuuuaguaccauagaaa

SEQ ID NO: 748090 - RNA, 19 nt, Artificial Sequence
  Description of Artificial Sequence: Synthetic oligonucleotide
uuauauaccauggaaugac

SEQ ID NO: 748091 - RNA, 19 nt, Artificial Sequence
  Description of Artificial Sequence: Synthetic oligonucleotide
aaugcagaauccaaugaag

SEQ ID NO: 748092 - RNA, 19 nt, Artificial Sequence
  Description of Artificial Sequence: Synthetic oligonucleotide
aauagacaugaauacucca

SEQ ID NO: 748093 - RNA, 19 nt, Artificial Sequence
  Description of Artificial Sequence: Synthetic oligonucleotide
auaaguucaacucuucaaa

SEQ ID NO: 748094 - RNA, 19 nt, Artificial Sequence
  Description of Artificial Sequence: Synthetic oligonucleotide
gauuccauuguucuaccgc

SEQ ID NO: 748095 - RNA, 19 nt, Artificial Sequence
  Description of Artificial Sequence: Synthetic oligonucleotide
uccaagauaauuuucccau

SEQ ID NO: 748096 - RNA, 19 nt, Artificial Sequence
  Description of Artificial Sequence: Synthetic oligonucleotide
ucaucuaugaagugucccc

SEQ ID NO: 748097 - RNA, 19 nt, Artificial Sequence
  Description of Artificial Sequence: Synthetic oligonucleotide
uuucacacuggauugguac

SEQ ID NO: 748098 - RNA, 19 nt, Artificial Sequence
  Description of Artificial Sequence: Synthetic oligonucleotide
uuaauugagugccccuggg

SEQ ID NO: 748099 - RNA, 19 nt, Artificial Sequence
  Description of Artificial Sequence: Synthetic oligonucleotide
uucagaaaugguacgguga

SEQ ID NO: 748100 - RNA, 19 nt, Artificial Sequence
  Description of Artificial Sequence: Synthetic oligonucleotide
accgcuggucauuauauac

SEQ ID NO: 748101 - RNA, 19 nt, Artificial Sequence
  Description of Artificial Sequence: Synthetic oligonucleotide
ugauuaaaggugcauggaa

SEQ ID NO: 748102 - RNA, 19 nt, Artificial Sequence
  Description of Artificial Sequence: Synthetic oligonucleotide
uguagcacggggaauugcc

SEQ ID NO: 748103 - RNA, 19 nt, Artificial Sequence
  Description of Artificial Sequence: Synthetic oligonucleotide
ugaaugcagaauccaauga

SEQ ID NO: 748104 - RNA, 19 nt, Artificial Sequence
  Description of Artificial Sequence: Synthetic oligonucleotide
aauccaaugaagcgugggu

SEQ ID NO: 748105 - RNA, 19 nt, Artificial Sequence
  Description of Artificial Sequence: Synthetic oligonucleotide
ugaguuugaggucauuaac

SEQ ID NO: 748106 - RNA, 19 nt, Artificial Sequence
  Description of Artificial Sequence: Synthetic oligonucleotide
gagaggagagauuucacac

SEQ ID NO: 748107 - RNA, 19 nt, Artificial Sequence
  Description of Artificial Sequence: Synthetic oligonucleotide
ucauacaugcccuugggau

SEQ ID NO: 748108 - RNA, 19 nt, Artificial Sequence
  Description of Artificial Sequence: Synthetic oligonucleotide
agacuuuccauuuguagca

SEQ ID NO: 748109 - RNA, 19 nt, Artificial Sequence
  Description of Artificial Sequence: Synthetic oligonucleotide
caauagacaugaauacucc

SEQ ID NO: 748110 - RNA, 19 nt, Artificial Sequence
  Description of Artificial Sequence: Synthetic oligonucleotide
cuuuccauuuguagcacgg

SEQ ID NO: 748111 - RNA, 19 nt, Artificial Sequence
  Description of Artificial Sequence: Synthetic oligonucleotide
uagacaugaauacuccaga

SEQ ID NO: 748112 - RNA, 19 nt, Artificial Sequence
  Description of Artificial Sequence: Synthetic oligonucleotide
aagucaugcucaccauccc

SEQ ID NO: 748113 - RNA, 19 nt, Artificial Sequence
  Description of Artificial Sequence: Synthetic oligonucleotide
uguggauggccaauguaag

SEQ ID NO: 748114 - RNA, 19 nt, Artificial Sequence
  Description of Artificial Sequence: Synthetic oligonucleotide
gacccagcaaugaugaagg

SEQ ID NO: 748115 - RNA, 19 nt, Artificial Sequence
  Description of Artificial Sequence: Synthetic oligonucleotide
guaaacgccauccacucug

SEQ ID NO: 748116 - RNA, 19 nt, Artificial Sequence
  Description of Artificial Sequence: Synthetic oligonucleotide
gaggagagauuucacacug

SEQ ID NO: 748117 - RNA, 19 nt, Artificial Sequence
  Description of Artificial Sequence: Synthetic oligonucleotide
guagcuucagaauacguuc

SEQ ID NO: 748118 - RNA, 19 nt, Artificial Sequence
  Description of Artificial Sequence: Synthetic oligonucleotide
augaucaaauccuccaaug

SEQ ID NO: 748119 - RNA, 19 nt, Artificial Sequence
  Description of Artificial Sequence: Synthetic oligonucleotide
uuucagaaaugguacggug

SEQ ID NO: 748120 - RNA, 19 nt, Artificial Sequence
  Description of Artificial Sequence: Synthetic oligonucleotide
gguucauaaacauugacaa

SEQ ID NO: 748121 - RNA, 19 nt, Artificial Sequence
  Description of Artificial Sequence: Synthetic oligonucleotide
uuagcaauguuuccugcgu

SEQ ID NO: 748122 - RNA, 19 nt, Artificial Sequence
  Description of Artificial Sequence: Synthetic oligonucleotide
uguagcuucagaauacguu

SEQ ID NO: 748123 - RNA, 19 nt, Artificial Sequence
  Description of Artificial Sequence: Synthetic oligonucleotide
ucagaaaugguacggugaa

SEQ ID NO: 748124 - RNA, 19 nt, Artificial Sequence
  Description of Artificial Sequence: Synthetic oligonucleotide
uggauggccaauguaagcc

SEQ ID NO: 748125 - RNA, 19 nt, Artificial Sequence
  Description of Artificial Sequence: Synthetic oligonucleotide
auuccauuguucuaccgcu

SEQ ID NO: 748126 - RNA, 19 nt, Artificial Sequence
  Description of Artificial Sequence: Synthetic oligonucleotide
cuugggauaagcaacucca

SEQ ID NO: 748127 - RNA, 19 nt, Artificial Sequence
  Description of Artificial Sequence: Synthetic oligonucleotide
agaaaucucacuguauucu

SEQ ID NO: 748128 - RNA, 19 nt, Artificial Sequence
  Description of Artificial Sequence: Synthetic oligonucleotide
cuggauugguacaucauug

SEQ ID NO: 748129 - RNA, 19 nt, Artificial Sequence
  Description of Artificial Sequence: Synthetic oligonucleotide
uauauaccauggaaugaca

SEQ ID NO: 748130 - RNA, 19 nt, Artificial Sequence
  Description of Artificial Sequence: Synthetic oligonucleotide
cuccauauaaaguucuguc

SEQ ID NO: 748131 - RNA, 19 nt, Artificial Sequence
  Description of Artificial Sequence: Synthetic oligonucleotide
cuuaauugagugccccugg

SEQ ID NO: 748132 - RNA, 19 nt, Artificial Sequence
  Description of Artificial Sequence: Synthetic oligonucleotide
aucacuauguacaacuuca

SEQ ID NO: 748133 - RNA, 19 nt, Artificial Sequence
  Description of Artificial Sequence: Synthetic oligonucleotide
aacugagguucauaaacau

SEQ ID NO: 748134 - RNA, 19 nt, Artificial Sequence
  Description of Artificial Sequence: Synthetic oligonucleotide
uucguuucugagcugucgc

SEQ ID NO: 748135 - RNA, 19 nt, Artificial Sequence
  Description of Artificial Sequence: Synthetic oligonucleotide
ugaagcgugggucugccac

SEQ ID NO: 748136 - RNA, 19 nt, Artificial Sequence
  Description of Artificial Sequence: Synthetic oligonucleotide
acuuuaggauucauaggcc

SEQ ID NO: 748137 - RNA, 19 nt, Artificial Sequence
  Description of Artificial Sequence: Synthetic oligonucleotide
gagaaaucugggaaagucc

SEQ ID NO: 748138 - RNA, 19 nt, Artificial Sequence
  Description of Artificial Sequence: Synthetic oligonucleotide
auauaccauggaaugacac

SEQ ID NO: 748139 - RNA, 19 nt, Artificial Sequence
  Description of Artificial Sequence: Synthetic oligonucleotide
agccuucuagcccuucucc

SEQ ID NO: 748140 - RNA, 19 nt, Artificial Sequence
  Description of Artificial Sequence: Synthetic oligonucleotide
auauuuugggcugcaagag

SEQ ID NO: 748141 - RNA, 19 nt, Artificial Sequence
  Description of Artificial Sequence: Synthetic oligonucleotide
gaagggacaucaaagcaug

SEQ ID NO: 748142 - RNA, 19 nt, Artificial Sequence
  Description of Artificial Sequence: Synthetic oligonucleotide
auuaaaggugcauggaauu

SEQ ID NO: 748143 - RNA, 19 nt, Artificial Sequence
  Description of Artificial Sequence: Synthetic oligonucleotide
agauaauuuucccaucaaa

SEQ ID NO: 748144 - RNA, 19 nt, Artificial Sequence
  Description of Artificial Sequence: Synthetic oligonucleotide
agggacaucaaagcaugcc

SEQ ID NO: 748145 - RNA, 19 nt, Artificial Sequence
  Description of Artificial Sequence: Synthetic oligonucleotide
gacaaccugaguuugaggu

SEQ ID NO: 748146 - RNA, 19 nt, Artificial Sequence
  Description of Artificial Sequence: Synthetic oligonucleotide
ucggguauccaccuuuucu

SEQ ID NO: 748147 - RNA, 19 nt, Artificial Sequence
  Description of Artificial Sequence: Synthetic oligonucleotide
auacguucugcuugaaucu

SEQ ID NO: 748148 - RNA, 19 nt, Artificial Sequence
  Description of Artificial Sequence: Synthetic oligonucleotide
ugguacggugaagaaaugg

SEQ ID NO: 748149 - RNA, 19 nt, Artificial Sequence
  Description of Artificial Sequence: Synthetic oligonucleotide
cuugucuggcuuaauugag

SEQ ID NO: 748150 - RNA, 19 nt, Artificial Sequence
  Description of Artificial Sequence: Synthetic oligonucleotide
augggaucuucuucugagc

SEQ ID NO: 748151 - RNA, 19 nt, Artificial Sequence
  Description of Artificial Sequence: Synthetic oligonucleotide
ugucuugugggauggcaag

SEQ ID NO: 748152 - RNA, 19 nt, Artificial Sequence
  Description of Artificial Sequence: Synthetic oligonucleotide
caacucauuccaaaaccgc

SEQ ID NO: 748153 - RNA, 19 nt, Artificial Sequence
  Description of Artificial Sequence: Synthetic oligonucleotide
uuguaagccaaaguacuug

SEQ ID NO: 748154 - RNA, 19 nt, Artificial Sequence
  Description of Artificial Sequence: Synthetic oligonucleotide
auuguucuaccgcugguca

SEQ ID NO: 748155 - RNA, 19 nt, Artificial Sequence
  Description of Artificial Sequence: Synthetic oligonucleotide
uguuccgagaaaucuggga

SEQ ID NO: 748156 - RNA, 19 nt, Artificial Sequence
  Description of Artificial Sequence: Synthetic oligonucleotide
uagacaguuaggaaauaua

SEQ ID NO: 748157 - RNA, 19 nt, Artificial Sequence
  Description of Artificial Sequence: Synthetic oligonucleotide
gcaacugagguucauaaac

SEQ ID NO: 748158 - RNA, 19 nt, Artificial Sequence
  Description of Artificial Sequence: Synthetic oligonucleotide
caugaauacuccagaugcc

SEQ ID NO: 748159 - RNA, 19 nt, Artificial Sequence
  Description of Artificial Sequence: Synthetic oligonucleotide
ugagaaucaaggucccgca

SEQ ID NO: 748160 - RNA, 19 nt, Artificial Sequence
  Description of Artificial Sequence: Synthetic oligonucleotide
uuucaucuaugaagugucc

SEQ ID NO: 748161 - RNA, 19 nt, Artificial Sequence
  Description of Artificial Sequence: Synthetic oligonucleotide
acaucaaagcaugccuugc

SEQ ID NO: 748162 - RNA, 19 nt, Artificial Sequence
  Description of Artificial Sequence: Synthetic oligonucleotide
caagauaauuuucccauca

SEQ ID NO: 748163 - RNA, 19 nt, Artificial Sequence
  Description of Artificial Sequence: Synthetic oligonucleotide
uuuguaagccaaaguacuu

SEQ ID NO: 748164 - RNA, 19 nt, Artificial Sequence
  Description of Artificial Sequence: Synthetic oligonucleotide
agguucauaaacauugaca

SEQ ID NO: 748165 - RNA, 19 nt, Artificial Sequence
  Description of Artificial Sequence: Synthetic oligonucleotide
ugguagugaagcuucguaa

SEQ ID NO: 748166 - RNA, 19 nt, Artificial Sequence
  Description of Artificial Sequence: Synthetic oligonucleotide
acaaaauuuuaguaccaua

SEQ ID NO: 748167 - RNA, 19 nt, Artificial Sequence
  Description of Artificial Sequence: Synthetic oligonucleotide
uuuuaccaauauguugucc

SEQ ID NO: 748168 - RNA, 19 nt, Artificial Sequence
  Description of Artificial Sequence: Synthetic oligonucleotide
uccguucucaucaaugauu

SEQ ID NO: 748169 - RNA, 19 nt, Artificial Sequence
  Description of Artificial Sequence: Synthetic oligonucleotide
aucaaaacucauagcuggc

SEQ ID NO: 748170 - RNA, 19 nt, Artificial Sequence
  Description of Artificial Sequence: Synthetic oligonucleotide
aaaugguacggugaagaaa

SEQ ID NO: 748171 - RNA, 19 nt, Artificial Sequence
  Description of Artificial Sequence: Synthetic oligonucleotide
gaaguuuuguggauggcca

SEQ ID NO: 748172 - RNA, 19 nt, Artificial Sequence
  Description of Artificial Sequence: Synthetic oligonucleotide
cacacuuguugccauacug

SEQ ID NO: 748173 - RNA, 19 nt, Artificial Sequence
  Description of Artificial Sequence: Synthetic oligonucleotide
cugagaaucaaggucccgc

SEQ ID NO: 748174 - RNA, 19 nt, Artificial Sequence
  Description of Artificial Sequence: Synthetic oligonucleotide
uuaccaauauguuguccac

SEQ ID NO: 748175 - RNA, 19 nt, Artificial Sequence
  Description of Artificial Sequence: Synthetic oligonucleotide
ucccguaauacuucauaca

SEQ ID NO: 748176 - RNA, 19 nt, Artificial Sequence
  Description of Artificial Sequence: Synthetic oligonucleotide
aaguucugucuguugggcu

SEQ ID NO: 748177 - RNA, 19 nt, Artificial Sequence
  Description of Artificial Sequence: Synthetic oligonucleotide
uucacacuggauugguaca

SEQ ID NO: 748178 - RNA, 19 nt, Artificial Sequence
  Description of Artificial Sequence: Synthetic oligonucleotide
cuccauucggguauccacc

SEQ ID NO: 748179 - RNA, 19 nt, Artificial Sequence
  Description of Artificial Sequence: Synthetic oligonucleotide
gagguucauaaacauugac

SEQ ID NO: 748180 - RNA, 19 nt, Artificial Sequence
  Description of Artificial Sequence: Synthetic oligonucleotide
uggcagagcucacuuuagg

SEQ ID NO: 748181 - RNA, 19 nt, Artificial Sequence
  Description of Artificial Sequence: Synthetic oligonucleotide
agacaguuaggaaauauaa

SEQ ID NO: 748182 - RNA, 19 nt, Artificial Sequence
  Description of Artificial Sequence: Synthetic oligonucleotide
acuccguucucaucaauga

SEQ ID NO: 748183 - RNA, 19 nt, Artificial Sequence
  Description of Artificial Sequence: Synthetic oligonucleotide
cuuccacaauauuuugggc

SEQ ID NO: 748184 - RNA, 19 nt, Artificial Sequence
  Description of Artificial Sequence: Synthetic oligonucleotide
cauggaaugacacacuugu

SEQ ID NO: 748185 - RNA, 19 nt, Artificial Sequence
  Description of Artificial Sequence: Synthetic oligonucleotide
uguuuucucuaccaccuuu

SEQ ID NO: 748186 - RNA, 19 nt, Artificial Sequence
  Description of Artificial Sequence: Synthetic oligonucleotide
uuuucuuggugagaggaau

SEQ ID NO: 748187 - RNA, 19 nt, Artificial Sequence
  Description of Artificial Sequence: Synthetic oligonucleotide
agcucauggacuccguucu

SEQ ID NO: 748188 - RNA, 19 nt, Artificial Sequence
  Description of Artificial Sequence: Synthetic oligonucleotide
ugaauacuccagaugccuc

SEQ ID NO: 748189 - RNA, 19 nt, Artificial Sequence
  Description of Artificial Sequence: Synthetic oligonucleotide
uguuuccugcguugaacag

SEQ ID NO: 748190 - RNA, 19 nt, Artificial Sequence
  Description of Artificial Sequence: Synthetic oligonucleotide
caccauucccaucuggagc

SEQ ID NO: 748191 - RNA, 19 nt, Artificial Sequence
  Description of Artificial Sequence: Synthetic oligonucleotide
uugucuggcuuaauugagu

SEQ ID NO: 748192 - RNA, 19 nt, Artificial Sequence
  Description of Artificial Sequence: Synthetic oligonucleotide
ugugggguuuguuuucucu

SEQ ID NO: 748193 - RNA, 19 nt, Artificial Sequence
  Description of Artificial Sequence: Synthetic oligonucleotide
augaauacuccagaugccu

SEQ ID NO: 748194 - RNA, 19 nt, Artificial Sequence
  Description of Artificial Sequence: Synthetic oligonucleotide
ccaacucauuccaaaaccg

SEQ ID NO: 748195 - RNA, 19 nt, Artificial Sequence
  Description of Artificial Sequence: Synthetic oligonucleotide
acuggauugguacaucauu

SEQ ID NO: 748196 - RNA, 19 nt, Artificial Sequence
  Description of Artificial Sequence: Synthetic oligonucleotide
guuccgagaaaucugggaa

SEQ ID NO: 748197 - RNA, 19 nt, Artificial Sequence
  Description of Artificial Sequence: Synthetic oligonucleotide
uccgcuaaccgcuguagcu

SEQ ID NO: 748198 - RNA, 19 nt, Artificial Sequence
  Description of Artificial Sequence: Synthetic oligonucleotide
ugguaaacgccauccacuc

SEQ ID NO: 748199 - RNA, 19 nt, Artificial Sequence
  Description of Artificial Sequence: Synthetic oligonucleotide
aacgccauccacucugcaa

SEQ ID NO: 748200 - RNA, 19 nt, Artificial Sequence
  Description of Artificial Sequence: Synthetic oligonucleotide
uggacaaccugaguuugag

SEQ ID NO: 748201 - RNA, 19 nt, Artificial Sequence
  Description of Artificial Sequence: Synthetic oligonucleotide
ucuugugggauggcaagcc

SEQ ID NO: 748202 - RNA, 19 nt, Artificial Sequence
  Description of Artificial Sequence: Synthetic oligonucleotide
uccugcguugaacagcagu

SEQ ID NO: 748203 - RNA, 19 nt, Artificial Sequence
  Description of Artificial Sequence: Synthetic oligonucleotide
ucuaccgcuggucauuaua

SEQ ID NO: 748204 - RNA, 19 nt, Artificial Sequence
  Description of Artificial Sequence: Synthetic oligonucleotide
ucugggaaaguccuucauu

SEQ ID NO: 748205 - RNA, 19 nt, Artificial Sequence
  Description of Artificial Sequence: Synthetic oligonucleotide
ucugccacuuuuaccaaua

SEQ ID NO: 748206 - RNA, 19 nt, Artificial Sequence
  Description of Artificial Sequence: Synthetic oligonucleotide
uucuuggugagaggaauga

SEQ ID NO: 748207 - RNA, 19 nt, Artificial Sequence
  Description of Artificial Sequence: Synthetic oligonucleotide
uccaucugagcuucguuuc

SEQ ID NO: 748208 - RNA, 19 nt, Artificial Sequence
  Description of Artificial Sequence: Synthetic oligonucleotide
agacaugaauacuccagau

SEQ ID NO: 748209 - RNA, 19 nt, Artificial Sequence
  Description of Artificial Sequence: Synthetic oligonucleotide
uuauuuuguuguccaguua

SEQ ID NO: 748210 - RNA, 19 nt, Artificial Sequence
  Description of Artificial Sequence: Synthetic oligonucleotide
uucagaauacguucugcuu

SEQ ID NO: 748211 - RNA, 19 nt, Artificial Sequence
  Description of Artificial Sequence: Synthetic oligonucleotide
ucaaugauuaaaggugcau

SEQ ID NO: 748212 - RNA, 19 nt, Artificial Sequence
  Description of Artificial Sequence: Synthetic oligonucleotide
agagcucacuuuaggauuc

SEQ ID NO: 748213 - RNA, 19 nt, Artificial Sequence
  Description of Artificial Sequence: Synthetic oligonucleotide
augacucauuaucacuaug

SEQ ID NO: 748214 - RNA, 19 nt, Artificial Sequence
  Description of Artificial Sequence: Synthetic oligonucleotide
uugaacagcagucguccau

SEQ ID NO: 748215 - RNA, 19 nt, Artificial Sequence
  Description of Artificial Sequence: Synthetic oligonucleotide
aacucccucggcgaucccg

SEQ ID NO: 748216 - RNA, 19 nt, Artificial Sequence
  Description of Artificial Sequence: Synthetic oligonucleotide
uaaacgccauccacucugc

SEQ ID NO: 748217 - RNA, 19 nt, Artificial Sequence
  Description of Artificial Sequence: Synthetic oligonucleotide
guacaaugacucauuauca

SEQ ID NO: 748218 - RNA, 19 nt, Artificial Sequence
  Description of Artificial Sequence: Synthetic oligonucleotide
uguugggcuucuuccaacu

SEQ ID NO: 748219 - RNA, 19 nt, Artificial Sequence
  Description of Artificial Sequence: Synthetic oligonucleotide
guauucuaccaccugguaa

SEQ ID NO: 748220 - RNA, 19 nt, Artificial Sequence
  Description of Artificial Sequence: Synthetic oligonucleotide
uucguggauuccauuguuc

SEQ ID NO: 748221 - RNA, 19 nt, Artificial Sequence
  Description of Artificial Sequence: Synthetic oligonucleotide
acacuggauugguacauca

SEQ ID NO: 748222 - RNA, 19 nt, Artificial Sequence
  Description of Artificial Sequence: Synthetic oligonucleotide
ucaaguugugauugacauc

SEQ ID NO: 748223 - RNA, 19 nt, Artificial Sequence
  Description of Artificial Sequence: Synthetic oligonucleotide
auaagaccuucagugagcu

SEQ ID NO: 748224 - RNA, 19 nt, Artificial Sequence
  Description of Artificial Sequence: Synthetic oligonucleotide
gaacuuagacaguuaggaa

SEQ ID NO: 748225 - RNA, 19 nt, Artificial Sequence
  Description of Artificial Sequence: Synthetic oligonucleotide
aucauacaugcccuuggga

SEQ ID NO: 748226 - RNA, 19 nt, Artificial Sequence
  Description of Artificial Sequence: Synthetic oligonucleotide
caugccuugcaguggucgg

SEQ ID NO: 748227 - RNA, 19 nt, Artificial Sequence
  Description of Artificial Sequence: Synthetic oligonucleotide
auugagugccccugggagu

SEQ ID NO: 748228 - RNA, 19 nt, Artificial Sequence
  Description of Artificial Sequence: Synthetic oligonucleotide
uuccgagaaaucugggaaa

SEQ ID NO: 748229 - RNA, 19 nt, Artificial Sequence
  Description of Artificial Sequence: Synthetic oligonucleotide
ggauugguacaucauuggc

SEQ ID NO: 748230 - RNA, 19 nt, Artificial Sequence
  Description of Artificial Sequence: Synthetic oligonucleotide
uaacauucauagugcucug

SEQ ID NO: 748231 - RNA, 19 nt, Artificial Sequence
  Description of Artificial Sequence: Synthetic oligonucleotide
cucauagcuggcagcauuc

SEQ ID NO: 748232 - RNA, 19 nt, Artificial Sequence
  Description of Artificial Sequence: Synthetic oligonucleotide
uggauuccauuguucuacc

SEQ ID NO: 748233 - RNA, 19 nt, Artificial Sequence
  Description of Artificial Sequence: Synthetic oligonucleotide
ucccaucaaaacucauagc

SEQ ID NO: 748234 - RNA, 19 nt, Artificial Sequence
  Description of Artificial Sequence: Synthetic oligonucleotide
cuucaaaguucauggccug

SEQ ID NO: 748235 - RNA, 19 nt, Artificial Sequence
  Description of Artificial Sequence: Synthetic oligonucleotide
cauagcuggcagcauuccc

SEQ ID NO: 748236 - RNA, 19 nt, Artificial Sequence
  Description of Artificial Sequence: Synthetic oligonucleotide
cuuuuaccaauauguuguc

SEQ ID NO: 748237 - RNA, 19 nt, Artificial Sequence
  Description of Artificial Sequence: Synthetic oligonucleotide
cauuuucaucuaugaagug

SEQ ID NO: 748238 - RNA, 19 nt, Artificial Sequence
  Description of Artificial Sequence: Synthetic oligonucleotide
cuucguuucugagcugucg

SEQ ID NO: 748239 - RNA, 19 nt, Artificial Sequence
  Description of Artificial Sequence: Synthetic oligonucleotide
ugggucugccacuuuuacc

SEQ ID NO: 748240 - RNA, 19 nt, Artificial Sequence
  Description of Artificial Sequence: Synthetic oligonucleotide
accuucagugagcugagaa

SEQ ID NO: 748241 - RNA, 19 nt, Artificial Sequence
  Description of Artificial Sequence: Synthetic oligonucleotide
auguacaaugacucauuau

SEQ ID NO: 748242 - RNA, 19 nt, Artificial Sequence
  Description of Artificial Sequence: Synthetic oligonucleotide
cguaauacuucauacacca

SEQ ID NO: 748243 - RNA, 19 nt, Artificial Sequence
  Description of Artificial Sequence: Synthetic oligonucleotide
gaaaugguacggugaagaa

SEQ ID NO: 748244 - RNA, 19 nt, Artificial Sequence
  Description of Artificial Sequence: Synthetic oligonucleotide
auagcuggcagcauucccu

SEQ ID NO: 748245 - RNA, 19 nt, Artificial Sequence
  Description of Artificial Sequence: Synthetic oligonucleotide
uccauucggguauccaccu

SEQ ID NO: 748246 - RNA, 19 nt, Artificial Sequence
  Description of Artificial Sequence: Synthetic oligonucleotide
acgccauccacucugcaaa

SEQ ID NO: 748247 - RNA, 19 nt, Artificial Sequence
  Description of Artificial Sequence: Synthetic oligonucleotide
augauuaaaggugcaugga

SEQ ID NO: 748248 - RNA, 19 nt, Artificial Sequence
  Description of Artificial Sequence: Synthetic oligonucleotide
cauugaggacccagcaaug

SEQ ID NO: 748249 - RNA, 19 nt, Artificial Sequence
  Description of Artificial Sequence: Synthetic oligonucleotide
uuccgcuaaccgcuguagc

SEQ ID NO: 748250 - RNA, 19 nt, Artificial Sequence
  Description of Artificial Sequence: Synthetic oligonucleotide
agucguccaucugagcuuc

SEQ ID NO: 748251 - RNA, 19 nt, Artificial Sequence
  Description of Artificial Sequence: Synthetic oligonucleotide
uuggacaaccugaguuuga

SEQ ID NO: 748252 - RNA, 19 nt, Artificial Sequence
  Description of Artificial Sequence: Synthetic oligonucleotide
ccaaacagagucaagcuga

SEQ ID NO: 748253 - RNA, 19 nt, Artificial Sequence
  Description of Artificial Sequence: Synthetic oligonucleotide
uaccauggaaugacacacu

SEQ ID NO: 748254 - RNA, 19 nt, Artificial Sequence
  Description of Artificial Sequence: Synthetic oligonucleotide
accauggaaugacacacuu

SEQ ID NO: 748255 - RNA, 19 nt, Artificial Sequence
  Description of Artificial Sequence: Synthetic oligonucleotide
uaccaauauguuguccaca

SEQ ID NO: 748256 - RNA, 19 nt, Artificial Sequence
  Description of Artificial Sequence: Synthetic oligonucleotide
uaguaccauagaaaccuuu

SEQ ID NO: 748257 - RNA, 19 nt, Artificial Sequence
  Description of Artificial Sequence: Synthetic oligonucleotide
gacaucagcugugaugguc

SEQ ID NO: 748258 - RNA, 19 nt, Artificial Sequence
  Description of Artificial Sequence: Synthetic oligonucleotide
uucuagcccuucuccagca

SEQ ID NO: 748259 - RNA, 19 nt, Artificial Sequence
  Description of Artificial Sequence: Synthetic oligonucleotide
aauugccgggaggcgagag

SEQ ID NO: 748260 - RNA, 19 nt, Artificial Sequence
  Description of Artificial Sequence: Synthetic oligonucleotide
acugcccaacaccucucgg

SEQ ID NO: 748261 - RNA, 19 nt, Artificial Sequence
  Description of Artificial Sequence: Synthetic oligonucleotide
ugcaacugagguucauaaa

SEQ ID NO: 748262 - RNA, 19 nt, Artificial Sequence
  Description of Artificial Sequence: Synthetic oligonucleotide
uuuuccgcuaaccgcugua

SEQ ID NO: 748263 - RNA, 19 nt, Artificial Sequence
  Description of Artificial Sequence: Synthetic oligonucleotide
cagaauacguucugcuuga

SEQ ID NO: 748264 - RNA, 19 nt, Artificial Sequence
  Description of Artificial Sequence: Synthetic oligonucleotide
aguaccauagaaaccuuuu

SEQ ID NO: 748265 - RNA, 19 nt, Artificial Sequence
  Description of Artificial Sequence: Synthetic oligonucleotide
ccgguaaagaccaccauuc

SEQ ID NO: 748266 - RNA, 19 nt, Artificial Sequence
  Description of Artificial Sequence: Synthetic oligonucleotide
gggagaacucgucuucccg

SEQ ID NO: 748267 - RNA, 19 nt, Artificial Sequence
  Description of Artificial Sequence: Synthetic oligonucleotide
auucuaccaccugguaaac

SEQ ID NO: 748268 - RNA, 19 nt, Artificial Sequence
  Description of Artificial Sequence: Synthetic oligonucleotide
ggagagauuucacacugga

SEQ ID NO: 748269 - RNA, 19 nt, Artificial Sequence
  Description of Artificial Sequence: Synthetic oligonucleotide
aguggggagaacucgucuu

SEQ ID NO: 748270 - RNA, 19 nt, Artificial Sequence
  Description of Artificial Sequence: Synthetic oligonucleotide
ugugaacucccucggcgau

SEQ ID NO: 748271 - RNA, 19 nt, Artificial Sequence
  Description of Artificial Sequence: Synthetic oligonucleotide
uuaguaccauagaaaccuu

SEQ ID NO: 748272 - RNA, 19 nt, Artificial Sequence
  Description of Artificial Sequence: Synthetic oligonucleotide
guagcacggggaauugccg

SEQ ID NO: 748273 - RNA, 19 nt, Artificial Sequence
  Description of Artificial Sequence: Synthetic oligonucleotide
guagugaagcuucguaaaa

SEQ ID NO: 748274 - RNA, 19 nt, Artificial Sequence
  Description of Artificial Sequence: Synthetic oligonucleotide
cugcguugaacagcagucg

SEQ ID NO: 748275 - RNA, 19 nt, Artificial Sequence
  Description of Artificial Sequence: Synthetic oligonucleotide
aagugucuugugggauggc

SEQ ID NO: 748276 - RNA, 19 nt, Artificial Sequence
  Description of Artificial Sequence: Synthetic oligonucleotide
cauuguucuaccgcugguc

SEQ ID NO: 748277 - RNA, 19 nt, Artificial Sequence
  Description of Artificial Sequence: Synthetic oligonucleotide
ucgccagagaaaucucacu

SEQ ID NO: 748278 - RNA, 19 nt, Artificial Sequence
  Description of Artificial Sequence: Synthetic oligonucleotide
cucugguagugaagcuucg

SEQ ID NO: 748279 - RNA, 19 nt, Artificial Sequence
  Description of Artificial Sequence: Synthetic oligonucleotide
accuuuugaaauguacaau

SEQ ID NO: 748280 - RNA, 19 nt, Artificial Sequence
  Description of Artificial Sequence: Synthetic oligonucleotide
gguagugaagcuucguaaa

SEQ ID NO: 748281 - RNA, 19 nt, Artificial Sequence
  Description of Artificial Sequence: Synthetic oligonucleotide
ggcuuggaagaacuuagac

SEQ ID NO: 748282 - RNA, 19 nt, Artificial Sequence
  Description of Artificial Sequence: Synthetic oligonucleotide
agugucuugugggauggca

SEQ ID NO: 748283 - RNA, 19 nt, Artificial Sequence
  Description of Artificial Sequence: Synthetic oligonucleotide
uggcuugucuggcuuaauu

SEQ ID NO: 748284 - RNA, 19 nt, Artificial Sequence
  Description of Artificial Sequence: Synthetic oligonucleotide
auauaaaguucugucuguu

SEQ ID NO: 748285 - RNA, 19 nt, Artificial Sequence
  Description of Artificial Sequence: Synthetic oligonucleotide
ucauagcuggcagcauucc

SEQ ID NO: 748286 - RNA, 19 nt, Artificial Sequence
  Description of Artificial Sequence: Synthetic oligonucleotide
cuuccagccccaagugaag

SEQ ID NO: 748287 - RNA, 19 nt, Artificial Sequence
  Description of Artificial Sequence: Synthetic oligonucleotide
agcuucguuucugagcugu

SEQ ID NO: 748288 - RNA, 19 nt, Artificial Sequence
  Description of Artificial Sequence: Synthetic oligonucleotide
ccaagugaagucaugcuca

SEQ ID NO: 748289 - RNA, 19 nt, Artificial Sequence
  Description of Artificial Sequence: Synthetic oligonucleotide
acggggaauugccgggagg

SEQ ID NO: 748290 - RNA, 19 nt, Artificial Sequence
  Description of Artificial Sequence: Synthetic oligonucleotide
gguuagcaauguuuccugc

SEQ ID NO: 748291 - RNA, 19 nt, Artificial Sequence
  Description of Artificial Sequence: Synthetic oligonucleotide
cagcagucguccaucugag

SEQ ID NO: 748292 - RNA, 19 nt, Artificial Sequence
  Description of Artificial Sequence: Synthetic oligonucleotide
aaaggugcauggaauucuu

SEQ ID NO: 748293 - RNA, 19 nt, Artificial Sequence
  Description of Artificial Sequence: Synthetic oligonucleotide
aguggucggguuguccuuc

SEQ ID NO: 748294 - RNA, 19 nt, Artificial Sequence
  Description of Artificial Sequence: Synthetic oligonucleotide
aucaaugauuaaaggugca

SEQ ID NO: 748295 - RNA, 19 nt, Artificial Sequence
  Description of Artificial Sequence: Synthetic oligonucleotide
acucccucggcgaucccgc

SEQ ID NO: 748296 - RNA, 19 nt, Artificial Sequence
  Description of Artificial Sequence: Synthetic oligonucleotide
agagucaagcugaggaagu

SEQ ID NO: 748297 - RNA, 19 nt, Artificial Sequence
  Description of Artificial Sequence: Synthetic oligonucleotide
ucauggacuccguucucau

SEQ ID NO: 748298 - RNA, 19 nt, Artificial Sequence
  Description of Artificial Sequence: Synthetic oligonucleotide
gggauaagcaacuccaagu

SEQ ID NO: 748299 - RNA, 19 nt, Artificial Sequence
  Description of Artificial Sequence: Synthetic oligonucleotide
cugucuguugggcuucuuc

SEQ ID NO: 748300 - RNA, 19 nt, Artificial Sequence
  Description of Artificial Sequence: Synthetic oligonucleotide
ccugcguugaacagcaguc

SEQ ID NO: 748301 - RNA, 19 nt, Artificial Sequence
  Description of Artificial Sequence: Synthetic oligonucleotide
uguucuaccgcuggucauu

SEQ ID NO: 748302 - RNA, 19 nt, Artificial Sequence
  Description of Artificial Sequence: Synthetic oligonucleotide
ucugguagugaagcuucgu

SEQ ID NO: 748303 - RNA, 19 nt, Artificial Sequence
  Description of Artificial Sequence: Synthetic oligonucleotide
cccaucaaaacucauagcu

SEQ ID NO: 748304 - RNA, 19 nt, Artificial Sequence
  Description of Artificial Sequence: Synthetic oligonucleotide
cugccacauagccuucuag

SEQ ID NO: 748305 - RNA, 19 nt, Artificial Sequence
  Description of Artificial Sequence: Synthetic oligonucleotide
agaauccaaugaagcgugg

SEQ ID NO: 748306 - RNA, 19 nt, Artificial Sequence
  Description of Artificial Sequence: Synthetic oligonucleotide
gucuugaucucugguagca

SEQ ID NO: 748307 - RNA, 19 nt, Artificial Sequence
  Description of Artificial Sequence: Synthetic oligonucleotide
acccagcaaugaugaaggg

SEQ ID NO: 748308 - RNA, 19 nt, Artificial Sequence
  Description of Artificial Sequence: Synthetic oligonucleotide
uaagaccuucagugagcug

SEQ ID NO: 748309 - RNA, 19 nt, Artificial Sequence
  Description of Artificial Sequence: Synthetic oligonucleotide
uaaccgcuguagcuucaga

SEQ ID NO: 748310 - RNA, 19 nt, Artificial Sequence
  Description of Artificial Sequence: Synthetic oligonucleotide
ccuugggauaagcaacucc

SEQ ID NO: 748311 - RNA, 19 nt, Artificial Sequence
  Description of Artificial Sequence: Synthetic oligonucleotide
cacugcccaacaccucucg

SEQ ID NO: 748312 - RNA, 19 nt, Artificial Sequence
  Description of Artificial Sequence: Synthetic oligonucleotide
uuguagcacggggaauugc

SEQ ID NO: 748313 - RNA, 19 nt, Artificial Sequence
  Description of Artificial Sequence: Synthetic oligonucleotide
gacuuuccauuuguagcac

SEQ ID NO: 748314 - RNA, 19 nt, Artificial Sequence
  Description of Artificial Sequence: Synthetic oligonucleotide
ccaaaaccgcagcaggugc

SEQ ID NO: 748315 - RNA, 19 nt, Artificial Sequence
  Description of Artificial Sequence: Synthetic oligonucleotide
gcuuaauugagugccccug

SEQ ID NO: 748316 - RNA, 19 nt, Artificial Sequence
  Description of Artificial Sequence: Synthetic oligonucleotide
gccaauguaagccuuggcu

SEQ ID NO: 748317 - RNA, 19 nt, Artificial Sequence
  Description of Artificial Sequence: Synthetic oligonucleotide
accugguaaacgccaucca

SEQ ID NO: 748318 - RNA, 19 nt, Artificial Sequence
  Description of Artificial Sequence: Synthetic oligonucleotide
ccgcuggucauuauauacc

SEQ ID NO: 748319 - RNA, 19 nt, Artificial Sequence
  Description of Artificial Sequence: Synthetic oligonucleotide
gcuccauucggguauccac

SEQ ID NO: 748320 - RNA, 19 nt, Artificial Sequence
  Description of Artificial Sequence: Synthetic oligonucleotide
aguuuuguggauggccaau

SEQ ID NO: 748321 - RNA, 19 nt, Artificial Sequence
  Description of Artificial Sequence: Synthetic oligonucleotide
caaugaagcgugggucugc

SEQ ID NO: 748322 - RNA, 19 nt, Artificial Sequence
  Description of Artificial Sequence: Synthetic oligonucleotide
gucgccagagaaaucucac

SEQ ID NO: 748323 - RNA, 19 nt, Artificial Sequence
  Description of Artificial Sequence: Synthetic oligonucleotide
cccaagugaagucaugcuc

SEQ ID NO: 748324 - RNA, 19 nt, Artificial Sequence
  Description of Artificial Sequence: Synthetic oligonucleotide
uggugagaggaaugaucaa

SEQ ID NO: 748325 - RNA, 19 nt, Artificial Sequence
  Description of Artificial Sequence: Synthetic oligonucleotide
uucggguauccaccuuuuc

SEQ ID NO: 748326 - RNA, 19 nt, Artificial Sequence
  Description of Artificial Sequence: Synthetic oligonucleotide
cugugaacucccucggcga

SEQ ID NO: 748327 - RNA, 19 nt, Artificial Sequence
  Description of Artificial Sequence: Synthetic oligonucleotide
gagcccgguaaagaccacc

SEQ ID NO: 748328 - RNA, 19 nt, Artificial Sequence
  Description of Artificial Sequence: Synthetic oligonucleotide
ccuucuagcccuucuccag

SEQ ID NO: 748329 - RNA, 19 nt, Artificial Sequence
  Description of Artificial Sequence: Synthetic oligonucleotide
gagaacucgucuucccgua

SEQ ID NO: 748330 - RNA, 19 nt, Artificial Sequence
  Description of Artificial Sequence: Synthetic oligonucleotide
cuaaccgcuguagcuucag

SEQ ID NO: 748331 - RNA, 19 nt, Artificial Sequence
  Description of Artificial Sequence: Synthetic oligonucleotide
cagaaaugguacggugaag

SEQ ID NO: 748332 - RNA, 19 nt, Artificial Sequence
  Description of Artificial Sequence: Synthetic oligonucleotide
gauuucacacuggauuggu

SEQ ID NO: 748333 - RNA, 19 nt, Artificial Sequence
  Description of Artificial Sequence: Synthetic oligonucleotide
ggauggcaagccaacauca

SEQ ID NO: 748334 - RNA, 19 nt, Artificial Sequence
  Description of Artificial Sequence: Synthetic oligonucleotide
cacauggugcugcaacuga

SEQ ID NO: 748335 - RNA, 19 nt, Artificial Sequence
  Description of Artificial Sequence: Synthetic oligonucleotide
cuuggcuuggaagaacuua

SEQ ID NO: 748336 - RNA, 19 nt, Artificial Sequence
  Description of Artificial Sequence: Synthetic oligonucleotide
cauggacuccguucucauc

SEQ ID NO: 748337 - RNA, 19 nt, Artificial Sequence
  Description of Artificial Sequence: Synthetic oligonucleotide
agaacucgucuucccguaa

SEQ ID NO: 748338 - RNA, 19 nt, Artificial Sequence
  Description of Artificial Sequence: Synthetic oligonucleotide
gggacaucaaagcaugccu

SEQ ID NO: 748339 - RNA, 19 nt, Artificial Sequence
  Description of Artificial Sequence: Synthetic oligonucleotide
aaaccgcagcaggugcucu

SEQ ID NO: 748340 - RNA, 19 nt, Artificial Sequence
  Description of Artificial Sequence: Synthetic oligonucleotide
gaauacguucugcuugaau

SEQ ID NO: 748341 - RNA, 19 nt, Artificial Sequence
  Description of Artificial Sequence: Synthetic oligonucleotide
cugguagugaagcuucgua

SEQ ID NO: 748342 - RNA, 19 nt, Artificial Sequence
  Description of Artificial Sequence: Synthetic oligonucleotide
gccauagagacuuuguuuu

SEQ ID NO: 748343 - RNA, 19 nt, Artificial Sequence
  Description of Artificial Sequence: Synthetic oligonucleotide
gcagucguccaucugagcu

SEQ ID NO: 748344 - RNA, 19 nt, Artificial Sequence
  Description of Artificial Sequence: Synthetic oligonucleotide
ggaauugccgggaggcgag

SEQ ID NO: 748345 - RNA, 19 nt, Artificial Sequence
  Description of Artificial Sequence: Synthetic oligonucleotide
cuugugggauggcaagcca

SEQ ID NO: 748346 - RNA, 19 nt, Artificial Sequence
  Description of Artificial Sequence: Synthetic oligonucleotide
ccauagaaaccuuuugaaa

SEQ ID NO: 748347 - RNA, 19 nt, Artificial Sequence
  Description of Artificial Sequence: Synthetic oligonucleotide
cagcauugaggacccagca

SEQ ID NO: 748348 - RNA, 19 nt, Artificial Sequence
  Description of Artificial Sequence: Synthetic oligonucleotide
ggagcuccauauaaaguuc

SEQ ID NO: 748349 - RNA, 19 nt, Artificial Sequence
  Description of Artificial Sequence: Synthetic oligonucleotide
ccaagauaauuuucccauc

SEQ ID NO: 748350 - RNA, 19 nt, Artificial Sequence
  Description of Artificial Sequence: Synthetic oligonucleotide
uucugacugucugcauucu

SEQ ID NO: 748351 - RNA, 19 nt, Artificial Sequence
  Description of Artificial Sequence: Synthetic oligonucleotide
gcauugaggacccagcaau

SEQ ID NO: 748352 - RNA, 19 nt, Artificial Sequence
  Description of Artificial Sequence: Synthetic oligonucleotide
acaauauuuugggcugcaa

SEQ ID NO: 748353 - RNA, 19 nt, Artificial Sequence
  Description of Artificial Sequence: Synthetic oligonucleotide
uaccgcuggucauuauaua

SEQ ID NO: 748354 - RNA, 19 nt, Artificial Sequence
  Description of Artificial Sequence: Synthetic oligonucleotide
cuugcccagcuuuggacaa

SEQ ID NO: 748355 - RNA, 19 nt, Artificial Sequence
  Description of Artificial Sequence: Synthetic oligonucleotide
gguacggugaagaaauggu

SEQ ID NO: 748356 - RNA, 19 nt, Artificial Sequence
  Description of Artificial Sequence: Synthetic oligonucleotide
agcccgguaaagaccacca

SEQ ID NO: 748357 - RNA, 19 nt, Artificial Sequence
  Description of Artificial Sequence: Synthetic oligonucleotide
uggucggguuguccuuccc

SEQ ID NO: 748358 - RNA, 19 nt, Artificial Sequence
  Description of Artificial Sequence: Synthetic oligonucleotide
gaguggggagaacucgucu

SEQ ID NO: 748359 - RNA, 19 nt, Artificial Sequence
  Description of Artificial Sequence: Synthetic oligonucleotide
gagcuccauauaaaguucu

SEQ ID NO: 748360 - RNA, 19 nt, Artificial Sequence
  Description of Artificial Sequence: Synthetic oligonucleotide
cuaccgcuggucauuauau

SEQ ID NO: 748361 - RNA, 19 nt, Artificial Sequence
  Description of Artificial Sequence: Synthetic oligonucleotide
caucuuucaaguugugauu

SEQ ID NO: 748362 - RNA, 19 nt, Artificial Sequence
  Description of Artificial Sequence: Synthetic oligonucleotide
ggugcauggaauucuuuau

SEQ ID NO: 748363 - RNA, 19 nt, Artificial Sequence
  Description of Artificial Sequence: Synthetic oligonucleotide
gcauaggagaugagaggag

SEQ ID NO: 748364 - RNA, 19 nt, Artificial Sequence
  Description of Artificial Sequence: Synthetic oligonucleotide
gcugucgccagagaaaucu

SEQ ID NO: 748365 - RNA, 19 nt, Artificial Sequence
  Description of Artificial Sequence: Synthetic oligonucleotide
cacggggaauugccgggag

SEQ ID NO: 748366 - RNA, 19 nt, Artificial Sequence
  Description of Artificial Sequence: Synthetic oligonucleotide
cagagcucacuuuaggauu

SEQ ID NO: 748367 - RNA, 19 nt, Artificial Sequence
  Description of Artificial Sequence: Synthetic oligonucleotide
cacaauauuuugggcugca

SEQ ID NO: 748368 - RNA, 19 nt, Artificial Sequence
  Description of Artificial Sequence: Synthetic oligonucleotide
cauucugacugucugcauu

SEQ ID NO: 748369 - RNA, 19 nt, Artificial Sequence
  Description of Artificial Sequence: Synthetic oligonucleotide
cugcauucuugagugggga

SEQ ID NO: 748370 - RNA, 19 nt, Artificial Sequence
  Description of Artificial Sequence: Synthetic oligonucleotide
gagcuucguuucugagcug

SEQ ID NO: 748371 - RNA, 19 nt, Artificial Sequence
  Description of Artificial Sequence: Synthetic oligonucleotide
cacacuggauugguacauc

SEQ ID NO: 748372 - RNA, 19 nt, Artificial Sequence
  Description of Artificial Sequence: Synthetic oligonucleotide
augaagcgugggucugcca

SEQ ID NO: 748373 - RNA, 19 nt, Artificial Sequence
  Description of Artificial Sequence: Synthetic oligonucleotide
gagcugucgccagagaaau

SEQ ID NO: 748374 - RNA, 19 nt, Artificial Sequence
  Description of Artificial Sequence: Synthetic oligonucleotide
auuucacacuggauuggua

SEQ ID NO: 748375 - RNA, 19 nt, Artificial Sequence
  Description of Artificial Sequence: Synthetic oligonucleotide
gcugagaaucaaggucccg

SEQ ID NO: 748376 - RNA, 19 nt, Artificial Sequence
  Description of Artificial Sequence: Synthetic oligonucleotide
ccguucucaucaaugauua

SEQ ID NO: 748377 - RNA, 19 nt, Artificial Sequence
  Description of Artificial Sequence: Synthetic oligonucleotide
cuccagcauaggagaugag

SEQ ID NO: 748378 - RNA, 19 nt, Artificial Sequence
  Description of Artificial Sequence: Synthetic oligonucleotide
ucggguuguccuucccauu

SEQ ID NO: 748379 - RNA, 19 nt, Artificial Sequence
  Description of Artificial Sequence: Synthetic oligonucleotide
cauucggguauccaccuuu

SEQ ID NO: 748380 - RNA, 19 nt, Artificial Sequence
  Description of Artificial Sequence: Synthetic oligonucleotide
gagagauuucacacuggau

SEQ ID NO: 748381 - RNA, 19 nt, Artificial Sequence
  Description of Artificial Sequence: Synthetic oligonucleotide
augguacggugaagaaaug

SEQ ID NO: 748382 - RNA, 19 nt, Artificial Sequence
  Description of Artificial Sequence: Synthetic oligonucleotide
ggucggguuguccuuccca

SEQ ID NO: 748383 - RNA, 19 nt, Artificial Sequence
  Description of Artificial Sequence: Synthetic oligonucleotide
ggggaauugccgggaggcg

SEQ ID NO: 748384 - RNA, 19 nt, Artificial Sequence
  Description of Artificial Sequence: Synthetic oligonucleotide
gccuucuagcccuucucca

SEQ ID NO: 748385 - RNA, 19 nt, Artificial Sequence
  Description of Artificial Sequence: Synthetic oligonucleotide
gggaauugccgggaggcga

SEQ ID NO: 748386 - RNA, 19 nt, Artificial Sequence
  Description of Artificial Sequence: Synthetic oligonucleotide
ggugcucuugcccagcuuu

SEQ ID NO: 748387 - RNA, 19 nt, Artificial Sequence
  Description of Artificial Sequence: Synthetic oligonucleotide
agcugucgccagagaaauc

SEQ ID NO: 748388 - RNA, 19 nt, Artificial Sequence
  Description of Artificial Sequence: Synthetic oligonucleotide
cucccucggcgaucccgcg

SEQ ID NO: 748389 - RNA, 19 nt, Artificial Sequence
  Description of Artificial Sequence: Synthetic oligonucleotide
gauggcaagccaacaucau

SEQ ID NO: 748390 - RNA, 19 nt, Artificial Sequence
  Description of Artificial Sequence: Synthetic oligonucleotide
guacggugaagaaaugguu

SEQ ID NO: 748391 - RNA, 19 nt, Artificial Sequence
  Description of Artificial Sequence: Synthetic oligonucleotide
auucggguauccaccuuuu

SEQ ID NO: 748392 - RNA, 19 nt, Artificial Sequence
  Description of Artificial Sequence: Synthetic oligonucleotide
gucggguuguccuucccau

SEQ ID NO: 748393 - RNA, 19 nt, Artificial Sequence
  Description of Artificial Sequence: Synthetic oligonucleotide
uucuaccgcuggucauuau

SEQ ID NO: 748394 - RNA, 19 nt, Artificial Sequence
  Description of Artificial Sequence: Synthetic oligonucleotide
agaauacguucugcuugaa

SEQ ID NO: 748395 - RNA, 19 nt, Artificial Sequence
  Description of Artificial Sequence: Synthetic oligonucleotide
agagcccgguaaagaccac

SEQ ID NO: 748396 - RNA, 19 nt, Artificial Sequence
  Description of Artificial Sequence: Synthetic oligonucleotide
gcaguggucggguuguccu

SEQ ID NO: 748397 - RNA, 19 nt, Artificial Sequence
  Description of Artificial Sequence: Synthetic oligonucleotide
cuuagacaguuaggaaaua

SEQ ID NO: 748398 - RNA, 19 nt, Artificial Sequence
  Description of Artificial Sequence: Synthetic oligonucleotide
cggggaauugccgggaggc

SEQ ID NO: 748399 - RNA, 19 nt, Artificial Sequence
  Description of Artificial Sequence: Synthetic oligonucleotide
gugaacucccucggcgauc

SEQ ID NO: 748400 - RNA, 19 nt, Artificial Sequence
  Description of Artificial Sequence: Synthetic oligonucleotide
cugcuacuuuguuccgaga

SEQ ID NO: 748401 - RNA, 19 nt, Artificial Sequence
  Description of Artificial Sequence: Synthetic oligonucleotide
gaauugccgggaggcgaga

SEQ ID NO: 748402 - RNA, 19 nt, Artificial Sequence
  Description of Artificial Sequence: Synthetic oligonucleotide
gcuccauauaaaguucugu

SEQ ID NO: 748403 - RNA, 19 nt, Artificial Sequence
  Description of Artificial Sequence: Synthetic oligonucleotide
agccccaagugaagucaug

SEQ ID NO: 748404 - RNA, 19 nt, Artificial Sequence
  Description of Artificial Sequence: Synthetic oligonucleotide
guucuaccgcuggucauua

SEQ ID NO: 748405 - RNA, 19 nt, Artificial Sequence
  Description of Artificial Sequence: Synthetic oligonucleotide
agugccccugggaguccac

SEQ ID NO: 748406 - RNA, 19 nt, Artificial Sequence
  Description of Artificial Sequence: Synthetic oligonucleotide
ggcuuaauugagugccccu

SEQ ID NO: 748407 - RNA, 19 nt, Artificial Sequence
  Description of Artificial Sequence: Synthetic oligonucleotide
cuucguggauuccauuguu

SEQ ID NO: 748408 - RNA, 19 nt, Artificial Sequence
  Description of Artificial Sequence: Synthetic oligonucleotide
uuggcuugucuggcuuaau

SEQ ID NO: 748409 - RNA, 19 nt, Artificial Sequence
  Description of Artificial Sequence: Synthetic oligonucleotide
cacuggauugguacaucau

SEQ ID NO: 748410 - RNA, 19 nt, Artificial Sequence
  Description of Artificial Sequence: Synthetic oligonucleotide
gguaaacgccauccacucu

SEQ ID NO: 748411 - RNA, 19 nt, Artificial Sequence
  Description of Artificial Sequence: Synthetic oligonucleotide
gagucaagcugaggaaguu

SEQ ID NO: 748412 - RNA, 19 nt, Artificial Sequence
  Description of Artificial Sequence: Synthetic oligonucleotide
gcuuuuccgcuaaccgcug

SEQ ID NO: 748413 - RNA, 19 nt, Artificial Sequence
  Description of Artificial Sequence: Synthetic oligonucleotide
gucccgcagguucacaguu

SEQ ID NO: 748414 - RNA, 19 nt, Artificial Sequence
  Description of Artificial Sequence: Synthetic oligonucleotide
accucucggggcacaggcu

SEQ ID NO: 748415 - RNA, 19 nt, Artificial Sequence
  Description of Artificial Sequence: Synthetic oligonucleotide
cagucguccaucugagcuu

SEQ ID NO: 748416 - RNA, 19 nt, Artificial Sequence
  Description of Artificial Sequence: Synthetic oligonucleotide
cuuuuccgcuaaccgcugu

SEQ ID NO: 748417 - RNA, 19 nt, Artificial Sequence
  Description of Artificial Sequence: Synthetic oligonucleotide
cgcuaaccgcuguagcuuc

SEQ ID NO: 748418 - RNA, 19 nt, Artificial Sequence
  Description of Artificial Sequence: Synthetic oligonucleotide
ggcuccauucggguaucca

SEQ ID NO: 748419 - RNA, 19 nt, Artificial Sequence
  Description of Artificial Sequence: Synthetic oligonucleotide
cugccacuuuuaccaauau

SEQ ID NO: 748420 - RNA, 19 nt, Artificial Sequence
  Description of Artificial Sequence: Synthetic oligonucleotide
gcucaccaucccaaacaga

SEQ ID NO: 748421 - RNA, 19 nt, Artificial Sequence
  Description of Artificial Sequence: Synthetic oligonucleotide
gcuaaccgcuguagcuuca

SEQ ID NO: 748422 - RNA, 19 nt, Artificial Sequence
  Description of Artificial Sequence: Synthetic oligonucleotide
gcuucguuucugagcuguc

SEQ ID NO: 748423 - RNA, 19 nt, Artificial Sequence
  Description of Artificial Sequence: Synthetic oligonucleotide
cccgguaaagaccaccauu

SEQ ID NO: 748424 - RNA, 19 nt, Artificial Sequence
  Description of Artificial Sequence: Synthetic oligonucleotide
cguggauuccauuguucua

SEQ ID NO: 748425 - RNA, 19 nt, Artificial Sequence
  Description of Artificial Sequence: Synthetic oligonucleotide
ccaacaccucucggggcac

SEQ ID NO: 748426 - RNA, 19 nt, Artificial Sequence
  Description of Artificial Sequence: Synthetic oligonucleotide
gcacggggaauugccggga

SEQ ID NO: 748427 - RNA, 19 nt, Artificial Sequence
  Description of Artificial Sequence: Synthetic oligonucleotide
ccauuguucuaccgcuggu

SEQ ID NO: 748428 - RNA, 19 nt, Artificial Sequence
  Description of Artificial Sequence: Synthetic oligonucleotide
cuccuucguggauuccauu

SEQ ID NO: 748429 - RNA, 19 nt, Artificial Sequence
  Description of Artificial Sequence: Synthetic oligonucleotide
caguggucggguuguccuu

SEQ ID NO: 748430 - RNA, 19 nt, Artificial Sequence
  Description of Artificial Sequence: Synthetic oligonucleotide
gcgugggucugccacuuuu

SEQ ID NO: 748431 - RNA, 19 nt, Artificial Sequence
  Description of Artificial Sequence: Synthetic oligonucleotide
cgugggucugccacuuuua

SEQ ID NO: 748432 - RNA, 19 nt, Artificial Sequence
  Description of Artificial Sequence: Synthetic oligonucleotide
gcccgguaaagaccaccau

SEQ ID NO: 748433 - RNA, 19 nt, Artificial Sequence
  Description of Artificial Sequence: Synthetic oligonucleotide
ccgcuaaccgcuguagcuu

SEQ ID NO: 748434 - RNA, 19 nt, Artificial Sequence
  Description of Artificial Sequence: Synthetic oligonucleotide
gggaggcgagagccauuuu

SEQ ID NO: 748435 - RNA, 19 nt, Artificial Sequence
  Description of Artificial Sequence: Synthetic oligonucleotide
cucggggcacaggcuccau

SEQ ID NO: 748436 - RNA, 19 nt, Artificial Sequence
  Description of Artificial Sequence: Synthetic oligonucleotide
ugagauauaaacaagaauu

SEQ ID NO: 748437 - RNA, 19 nt, Artificial Sequence
  Description of Artificial Sequence: Synthetic oligonucleotide
uuuauggugaaaaucacag

SEQ ID NO: 748438 - RNA, 19 nt, Artificial Sequence
  Description of Artificial Sequence: Synthetic oligonucleotide
ugaaucacaaaucugaugu

SEQ ID NO: 748439 - RNA, 19 nt, Artificial Sequence
  Description of Artificial Sequence: Synthetic oligonucleotide
ugauggacgauuuucaucg

SEQ ID NO: 748440 - RNA, 19 nt, Artificial Sequence
  Description of Artificial Sequence: Synthetic oligonucleotide
uuuaauacagccuauuucu

SEQ ID NO: 748441 - RNA, 19 nt, Artificial Sequence
  Description of Artificial Sequence: Synthetic oligonucleotide
aauggagcaacauucuugg

SEQ ID NO: 748442 - RNA, 19 nt, Artificial Sequence
  Description of Artificial Sequence: Synthetic oligonucleotide
aaagcgauuauccaaauaa

SEQ ID NO: 748443 - RNA, 19 nt, Artificial Sequence
  Description of Artificial Sequence: Synthetic oligonucleotide
aaaagauucaucgaaagca

SEQ ID NO: 748444 - RNA, 19 nt, Artificial Sequence
  Description of Artificial Sequence: Synthetic oligonucleotide
uuugaauggauacuuagug

SEQ ID NO: 748445 - RNA, 19 nt, Artificial Sequence
  Description of Artificial Sequence: Synthetic oligonucleotide
gacuaaacucucuagacgg

SEQ ID NO: 748446 - RNA, 19 nt, Artificial Sequence
  Description of Artificial Sequence: Synthetic oligonucleotide
uuuaugauaaauucuggug

SEQ ID NO: 748447 - RNA, 19 nt, Artificial Sequence
  Description of Artificial Sequence: Synthetic oligonucleotide
acuaucaacacuuucacca

SEQ ID NO: 748448 - RNA, 19 nt, Artificial Sequence
  Description of Artificial Sequence: Synthetic oligonucleotide
acugaguauacacaguggc

SEQ ID NO: 748449 - RNA, 19 nt, Artificial Sequence
  Description of Artificial Sequence: Synthetic oligonucleotide
aaacucaugaucuucacau

SEQ ID NO: 748450 - RNA, 19 nt, Artificial Sequence
  Description of Artificial Sequence: Synthetic oligonucleotide
cuuugauuaauuuaggcuc

SEQ ID NO: 748451 - RNA, 19 nt, Artificial Sequence
  Description of Artificial Sequence: Synthetic oligonucleotide
ugucauacauuacagaaga

SEQ ID NO: 748452 - RNA, 19 nt, Artificial Sequence
  Description of Artificial Sequence: Synthetic oligonucleotide
aauacauugauggauuuug

SEQ ID NO: 748453 - RNA, 19 nt, Artificial Sequence
  Description of Artificial Sequence: Synthetic oligonucleotide
aauugagauagucuugcag

SEQ ID NO: 748454 - RNA, 19 nt, Artificial Sequence
  Description of Artificial Sequence: Synthetic oligonucleotide
ugauagaacauucaauugu

SEQ ID NO: 748455 - RNA, 19 nt, Artificial Sequence
  Description of Artificial Sequence: Synthetic oligonucleotide
uguagaguagcuuucaacu

SEQ ID NO: 748456 - RNA, 19 nt, Artificial Sequence
  Description of Artificial Sequence: Synthetic oligonucleotide
uuagaauauacaacaaugu

SEQ ID NO: 748457 - RNA, 19 nt, Artificial Sequence
  Description of Artificial Sequence: Synthetic oligonucleotide
guauucaucuuccauaucc

SEQ ID NO: 748458 - RNA, 19 nt, Artificial Sequence
  Description of Artificial Sequence: Synthetic oligonucleotide
uucacuaauaccaggauuc

SEQ ID NO: 748459 - RNA, 19 nt, Artificial Sequence
  Description of Artificial Sequence: Synthetic oligonucleotide
acuaucaacuucaaguucc

SEQ ID NO: 748460 - RNA, 19 nt, Artificial Sequence
  Description of Artificial Sequence: Synthetic oligonucleotide
aacuuauacaaucuucucu

SEQ ID NO: 748461 - RNA, 19 nt, Artificial Sequence
  Description of Artificial Sequence: Synthetic oligonucleotide
uuuaguucgacgccaauca

SEQ ID NO: 748462 - RNA, 19 nt, Artificial Sequence
  Description of Artificial Sequence: Synthetic oligonucleotide
uucguugcuacuaucaagc

SEQ ID NO: 748463 - RNA, 19 nt, Artificial Sequence
  Description of Artificial Sequence: Synthetic oligonucleotide
agaacauucaauuguaggu

SEQ ID NO: 748464 - RNA, 19 nt, Artificial Sequence
  Description of Artificial Sequence: Synthetic oligonucleotide
cuuuaauggagaaaaugcc

SEQ ID NO: 748465 - RNA, 19 nt, Artificial Sequence
  Description of Artificial Sequence: Synthetic oligonucleotide
uucgacgccaaucaacucg

SEQ ID NO: 748466 - RNA, 19 nt, Artificial Sequence
  Description of Artificial Sequence: Synthetic oligonucleotide
aaucauauaaucaucucca

SEQ ID NO: 748467 - RNA, 19 nt, Artificial Sequence
  Description of Artificial Sequence: Synthetic oligonucleotide
augucaacauaucuugugc

SEQ ID NO: 748468 - RNA, 19 nt, Artificial Sequence
  Description of Artificial Sequence: Synthetic oligonucleotide
ugugagauacuucuuuuag

SEQ ID NO: 748469 - RNA, 19 nt, Artificial Sequence
  Description of Artificial Sequence: Synthetic oligonucleotide
agaauugagauagucuugc

SEQ ID NO: 748470 - RNA, 19 nt, Artificial Sequence
  Description of Artificial Sequence: Synthetic oligonucleotide
acuaauuucaguugugaug

SEQ ID NO: 748471 - RNA, 19 nt, Artificial Sequence
  Description of Artificial Sequence: Synthetic oligonucleotide
guuuguaagagguuuacug

SEQ ID NO: 748472 - RNA, 19 nt, Artificial Sequence
  Description of Artificial Sequence: Synthetic oligonucleotide
acuuugauuaauuuaggcu

SEQ ID NO: 748473 - RNA, 19 nt, Artificial Sequence
  Description of Artificial Sequence: Synthetic oligonucleotide
aaucacaaaucugauguuc

SEQ ID NO: 748474 - RNA, 19 nt, Artificial Sequence
  Description of Artificial Sequence: Synthetic oligonucleotide
auugagauagucuugcagu

SEQ ID NO: 748475 - RNA, 19 nt, Artificial Sequence
  Description of Artificial Sequence: Synthetic oligonucleotide
ugugauguagucaaauuuc

SEQ ID NO: 748476 - RNA, 19 nt, Artificial Sequence
  Description of Artificial Sequence: Synthetic oligonucleotide
ucuaacauguaccauuuuc

SEQ ID NO: 748477 - RNA, 19 nt, Artificial Sequence
  Description of Artificial Sequence: Synthetic oligonucleotide
guagcuuucaacucgcucc

SEQ ID NO: 748478 - RNA, 19 nt, Artificial Sequence
  Description of Artificial Sequence: Synthetic oligonucleotide
gauuauccaaauaaugaag

SEQ ID NO: 748479 - RNA, 19 nt, Artificial Sequence
  Description of Artificial Sequence: Synthetic oligonucleotide
uuacaugauacagagaaac

SEQ ID NO: 748480 - RNA, 19 nt, Artificial Sequence
  Description of Artificial Sequence: Synthetic oligonucleotide
guauuauacugacugagcc

SEQ ID NO: 748481 - RNA, 19 nt, Artificial Sequence
  Description of Artificial Sequence: Synthetic oligonucleotide
uuauuagacuucacugugg

SEQ ID NO: 748482 - RNA, 19 nt, Artificial Sequence
  Description of Artificial Sequence: Synthetic oligonucleotide
gacgggguugaauaaagcg

SEQ ID NO: 748483 - RNA, 19 nt, Artificial Sequence
  Description of Artificial Sequence: Synthetic oligonucleotide
acaguuugaauuuuaaaau

SEQ ID NO: 748484 - RNA, 19 nt, Artificial Sequence
  Description of Artificial Sequence: Synthetic oligonucleotide
uguaggucauuuaugagaa

SEQ ID NO: 748485 - RNA, 19 nt, Artificial Sequence
  Description of Artificial Sequence: Synthetic oligonucleotide
aaugaagagaugucaacau

SEQ ID NO: 748486 - RNA, 19 nt, Artificial Sequence
  Description of Artificial Sequence: Synthetic oligonucleotide
uaaggcagguauuauacug

SEQ ID NO: 748487 - RNA, 19 nt, Artificial Sequence
  Description of Artificial Sequence: Synthetic oligonucleotide
uuauccaaauaaugaagag

SEQ ID NO: 748488 - RNA, 19 nt, Artificial Sequence
  Description of Artificial Sequence: Synthetic oligonucleotide
agacuaaacucucuagacg

SEQ ID NO: 748489 - RNA, 19 nt, Artificial Sequence
  Description of Artificial Sequence: Synthetic oligonucleotide
uuuguaagagguuuacugu

SEQ ID NO: 748490 - RNA, 19 nt, Artificial Sequence
  Description of Artificial Sequence: Synthetic oligonucleotide
uuuuauggugaaaaucaca

SEQ ID NO: 748491 - RNA, 19 nt, Artificial Sequence
  Description of Artificial Sequence: Synthetic oligonucleotide
aacauucaauuguagguca

SEQ ID NO: 748492 - RNA, 19 nt, Artificial Sequence
  Description of Artificial Sequence: Synthetic oligonucleotide
ucuuguacuacaaaaucau

SEQ ID NO: 748493 - RNA, 19 nt, Artificial Sequence
  Description of Artificial Sequence: Synthetic oligonucleotide
uucuacuaaacugacagga

SEQ ID NO: 748494 - RNA, 19 nt, Artificial Sequence
  Description of Artificial Sequence: Synthetic oligonucleotide
uuugauuaauuuaggcucu

SEQ ID NO: 748495 - RNA, 19 nt, Artificial Sequence
  Description of Artificial Sequence: Synthetic oligonucleotide
cuacuaaacugacaggagg

SEQ ID NO: 748496 - RNA, 19 nt, Artificial Sequence
  Description of Artificial Sequence: Synthetic oligonucleotide
uuuacuguugcuucccuca

SEQ ID NO: 748497 - RNA, 19 nt, Artificial Sequence
  Description of Artificial Sequence: Synthetic oligonucleotide
cuucacaacuguuucaaag

SEQ ID NO: 748498 - RNA, 19 nt, Artificial Sequence
  Description of Artificial Sequence: Synthetic oligonucleotide
caucuugaaaguaauccgc

SEQ ID NO: 748499 - RNA, 19 nt, Artificial Sequence
  Description of Artificial Sequence: Synthetic oligonucleotide
auacuuaguguagaguagc

SEQ ID NO: 748500 - RNA, 19 nt, Artificial Sequence
  Description of Artificial Sequence: Synthetic oligonucleotide
uugaaaguaauccgcagaa

SEQ ID NO: 748501 - RNA, 19 nt, Artificial Sequence
  Description of Artificial Sequence: Synthetic oligonucleotide
ugaauggauacuuagugua

SEQ ID NO: 748502 - RNA, 19 nt, Artificial Sequence
  Description of Artificial Sequence: Synthetic oligonucleotide
aaccugcuauaauucaaac

SEQ ID NO: 748503 - RNA, 19 nt, Artificial Sequence
  Description of Artificial Sequence: Synthetic oligonucleotide
uacgacuucuuccuggugc

SEQ ID NO: 748504 - RNA, 19 nt, Artificial Sequence
  Description of Artificial Sequence: Synthetic oligonucleotide
uuuacuaauuucaguugug

SEQ ID NO: 748505 - RNA, 19 nt, Artificial Sequence
  Description of Artificial Sequence: Synthetic oligonucleotide
ucuacuaaacugacaggag

SEQ ID NO: 748506 - RNA, 19 nt, Artificial Sequence
  Description of Artificial Sequence: Synthetic oligonucleotide
uaugcaggcuuuauuagac

SEQ ID NO: 748507 - RNA, 19 nt, Artificial Sequence
  Description of Artificial Sequence: Synthetic oligonucleotide
ccuuuaauggagaaaaugc

SEQ ID NO: 748508 - RNA, 19 nt, Artificial Sequence
  Description of Artificial Sequence: Synthetic oligonucleotide
agaaacuuauacaaucuuc

SEQ ID NO: 748509 - RNA, 19 nt, Artificial Sequence
  Description of Artificial Sequence: Synthetic oligonucleotide
caggacugaacucaggucc

SEQ ID NO: 748510 - RNA, 19 nt, Artificial Sequence
  Description of Artificial Sequence: Synthetic oligonucleotide
uauccaaauaaugaagaga

SEQ ID NO: 748511 - RNA, 19 nt, Artificial Sequence
  Description of Artificial Sequence: Synthetic oligonucleotide
uuaauggagaaaaugccuu

SEQ ID NO: 748512 - RNA, 19 nt, Artificial Sequence
  Description of Artificial Sequence: Synthetic oligonucleotide
acaugaaaucaucugucuc

SEQ ID NO: 748513 - RNA, 19 nt, Artificial Sequence
  Description of Artificial Sequence: Synthetic oligonucleotide
uguaagagguuuacuguug

SEQ ID NO: 748514 - RNA, 19 nt, Artificial Sequence
  Description of Artificial Sequence: Synthetic oligonucleotide
uguaccauuuucacuuaag

SEQ ID NO: 748515 - RNA, 19 nt, Artificial Sequence
  Description of Artificial Sequence: Synthetic oligonucleotide
gcagguauuauacugacug

SEQ ID NO: 748516 - RNA, 19 nt, Artificial Sequence
  Description of Artificial Sequence: Synthetic oligonucleotide
aagagaauucuguuuuacu

SEQ ID NO: 748517 - RNA, 19 nt, Artificial Sequence
  Description of Artificial Sequence: Synthetic oligonucleotide
uaauccgcagaauugagau

SEQ ID NO: 748518 - RNA, 19 nt, Artificial Sequence
  Description of Artificial Sequence: Synthetic oligonucleotide
aauaacugugagauacuuc

SEQ ID NO: 748519 - RNA, 19 nt, Artificial Sequence
  Description of Artificial Sequence: Synthetic oligonucleotide
ucuaugcaggcuuuauuag

SEQ ID NO: 748520 - RNA, 19 nt, Artificial Sequence
  Description of Artificial Sequence: Synthetic oligonucleotide
ucuucuaacauguaccauu

SEQ ID NO: 748521 - RNA, 19 nt, Artificial Sequence
  Description of Artificial Sequence: Synthetic oligonucleotide
uuuaugagaaaaucaucaa

SEQ ID NO: 748522 - RNA, 19 nt, Artificial Sequence
  Description of Artificial Sequence: Synthetic oligonucleotide
uucgugucuucuaacaugu

SEQ ID NO: 748523 - RNA, 19 nt, Artificial Sequence
  Description of Artificial Sequence: Synthetic oligonucleotide
uuucgugucuucuaacaug

SEQ ID NO: 748524 - RNA, 19 nt, Artificial Sequence
  Description of Artificial Sequence: Synthetic oligonucleotide
agagaauucuguuuuacua

SEQ ID NO: 748525 - RNA, 19 nt, Artificial Sequence
  Description of Artificial Sequence: Synthetic oligonucleotide
uccaucgacuucuugagac

SEQ ID NO: 748526 - RNA, 19 nt, Artificial Sequence
  Description of Artificial Sequence: Synthetic oligonucleotide
auccgcagaauugagauag

SEQ ID NO: 748527 - RNA, 19 nt, Artificial Sequence
  Description of Artificial Sequence: Synthetic oligonucleotide
ugacaugaaaucaucuguc

SEQ ID NO: 748528 - RNA, 19 nt, Artificial Sequence
  Description of Artificial Sequence: Synthetic oligonucleotide
auaguggucacuaaaagaa

SEQ ID NO: 748529 - RNA, 19 nt, Artificial Sequence
  Description of Artificial Sequence: Synthetic oligonucleotide
auccaaauaaugaagagau

SEQ ID NO: 748530 - RNA, 19 nt, Artificial Sequence
  Description of Artificial Sequence: Synthetic oligonucleotide
uucaucgaaagcauugauc

SEQ ID NO: 748531 - RNA, 19 nt, Artificial Sequence
  Description of Artificial Sequence: Synthetic oligonucleotide
uacuucuuuuaguucgacg

SEQ ID NO: 748532 - RNA, 19 nt, Artificial Sequence
  Description of Artificial Sequence: Synthetic oligonucleotide
uugaauggauacuuagugu

SEQ ID NO: 748533 - RNA, 19 nt, Artificial Sequence
  Description of Artificial Sequence: Synthetic oligonucleotide
guauaguggucacuaaaag

SEQ ID NO: 748534 - RNA, 19 nt, Artificial Sequence
  Description of Artificial Sequence: Synthetic oligonucleotide
aagugaguauaguggucac

SEQ ID NO: 748535 - RNA, 19 nt, Artificial Sequence
  Description of Artificial Sequence: Synthetic oligonucleotide
uugagacuaaacucucuag

SEQ ID NO: 748536 - RNA, 19 nt, Artificial Sequence
  Description of Artificial Sequence: Synthetic oligonucleotide
auacaacaauguuacauga

SEQ ID NO: 748537 - RNA, 19 nt, Artificial Sequence
  Description of Artificial Sequence: Synthetic oligonucleotide
caauggagcaacauucuug

SEQ ID NO: 748538 - RNA, 19 nt, Artificial Sequence
  Description of Artificial Sequence: Synthetic oligonucleotide
agaauauacaacaauguua

SEQ ID NO: 748539 - RNA, 19 nt, Artificial Sequence
  Description of Artificial Sequence: Synthetic oligonucleotide
uugaaucacaaaucugaug

SEQ ID NO: 748540 - RNA, 19 nt, Artificial Sequence
  Description of Artificial Sequence: Synthetic oligonucleotide
acaacaauguuacaugaua

SEQ ID NO: 748541 - RNA, 19 nt, Artificial Sequence
  Description of Artificial Sequence: Synthetic oligonucleotide
ugaacucagguccuuguac

SEQ ID NO: 748542 - RNA, 19 nt, Artificial Sequence
  Description of Artificial Sequence: Synthetic oligonucleotide
gauacuuaguguagaguag

SEQ ID NO: 748543 - RNA, 19 nt, Artificial Sequence
  Description of Artificial Sequence: Synthetic oligonucleotide
uccaggucaguccaaauau

SEQ ID NO: 748544 - RNA, 19 nt, Artificial Sequence
  Description of Artificial Sequence: Synthetic oligonucleotide
auucguugcuacuaucaag

SEQ ID NO: 748545 - RNA, 19 nt, Artificial Sequence
  Description of Artificial Sequence: Synthetic oligonucleotide
uuugaaucacaaaucugau

SEQ ID NO: 748546 - RNA, 19 nt, Artificial Sequence
  Description of Artificial Sequence: Synthetic oligonucleotide
ugcaguugaucauauuucu

SEQ ID NO: 748547 - RNA, 19 nt, Artificial Sequence
  Description of Artificial Sequence: Synthetic oligonucleotide
uacuaucaagcucuucacc

SEQ ID NO: 748548 - RNA, 19 nt, Artificial Sequence
  Description of Artificial Sequence: Synthetic oligonucleotide
uagacgggguugaauaaag

SEQ ID NO: 748549 - RNA, 19 nt, Artificial Sequence
  Description of Artificial Sequence: Synthetic oligonucleotide
auacauuacagaagacagc

SEQ ID NO: 748550 - RNA, 19 nt, Artificial Sequence
  Description of Artificial Sequence: Synthetic oligonucleotide
aaguaauccgcagaauuga

SEQ ID NO: 748551 - RNA, 19 nt, Artificial Sequence
  Description of Artificial Sequence: Synthetic oligonucleotide
acaguaaauaccugcuugu

SEQ ID NO: 748552 - RNA, 19 nt, Artificial Sequence
  Description of Artificial Sequence: Synthetic oligonucleotide
caacauaucuugugcauac

SEQ ID NO: 748553 - RNA, 19 nt, Artificial Sequence
  Description of Artificial Sequence: Synthetic oligonucleotide
ugaaaaucacaggagcuga

SEQ ID NO: 748554 - RNA, 19 nt, Artificial Sequence
  Description of Artificial Sequence: Synthetic oligonucleotide
cauaucuugugcauacgac

SEQ ID NO: 748555 - RNA, 19 nt, Artificial Sequence
  Description of Artificial Sequence: Synthetic oligonucleotide
agguauuauacugacugag

SEQ ID NO: 748556 - RNA, 19 nt, Artificial Sequence
  Description of Artificial Sequence: Synthetic oligonucleotide
aauggauacuuaguguaga

SEQ ID NO: 748557 - RNA, 19 nt, Artificial Sequence
  Description of Artificial Sequence: Synthetic oligonucleotide
aucauuauuuguaaucuca

SEQ ID NO: 748558 - RNA, 19 nt, Artificial Sequence
  Description of Artificial Sequence: Synthetic oligonucleotide
uggagcaacauucuuggua

SEQ ID NO: 748559 - RNA, 19 nt, Artificial Sequence
  Description of Artificial Sequence: Synthetic oligonucleotide
aaaaucacaggagcugaug

SEQ ID NO: 748560 - RNA, 19 nt, Artificial Sequence
  Description of Artificial Sequence: Synthetic oligonucleotide
uccugagagaugcacugag

SEQ ID NO: 748561 - RNA, 19 nt, Artificial Sequence
  Description of Artificial Sequence: Synthetic oligonucleotide
gacgauuuucaucgucugg

SEQ ID NO: 748562 - RNA, 19 nt, Artificial Sequence
  Description of Artificial Sequence: Synthetic oligonucleotide
uuacuaauuucaguuguga

SEQ ID NO: 748563 - RNA, 19 nt, Artificial Sequence
  Description of Artificial Sequence: Synthetic oligonucleotide
uccucuacgcuuuguuugg

SEQ ID NO: 748564 - RNA, 19 nt, Artificial Sequence
  Description of Artificial Sequence: Synthetic oligonucleotide
ucaugaaaaucagaugaga

SEQ ID NO: 748565 - RNA, 19 nt, Artificial Sequence
  Description of Artificial Sequence: Synthetic oligonucleotide
gacaugauagaacauucaa

SEQ ID NO: 748566 - RNA, 19 nt, Artificial Sequence
  Description of Artificial Sequence: Synthetic oligonucleotide
gagaauucuguuuuacuaa

SEQ ID NO: 748567 - RNA, 19 nt, Artificial Sequence
  Description of Artificial Sequence: Synthetic oligonucleotide
uguagucaaauuucuuccu

SEQ ID NO: 748568 - RNA, 19 nt, Artificial Sequence
  Description of Artificial Sequence: Synthetic oligonucleotide
aguuuaugauaaauucugg

SEQ ID NO: 748569 - RNA, 19 nt, Artificial Sequence
  Description of Artificial Sequence: Synthetic oligonucleotide
uucuggugcgaucagcaca

SEQ ID NO: 748570 - RNA, 19 nt, Artificial Sequence
  Description of Artificial Sequence: Synthetic oligonucleotide
uaauaccaggauucguugc

SEQ ID NO: 748571 - RNA, 19 nt, Artificial Sequence
  Description of Artificial Sequence: Synthetic oligonucleotide
acauaucuugugcauacga

SEQ ID NO: 748572 - RNA, 19 nt, Artificial Sequence
  Description of Artificial Sequence: Synthetic oligonucleotide
gaacauucaauuguagguc

SEQ ID NO: 748573 - RNA, 19 nt, Artificial Sequence
  Description of Artificial Sequence: Synthetic oligonucleotide
aauaccugcuugucaugug

SEQ ID NO: 748574 - RNA, 19 nt, Artificial Sequence
  Description of Artificial Sequence: Synthetic oligonucleotide
ucuggugcgaucagcacaa

SEQ ID NO: 748575 - RNA, 19 nt, Artificial Sequence
  Description of Artificial Sequence: Synthetic oligonucleotide
ugaucauauuucuuucuaa

SEQ ID NO: 748576 - RNA, 19 nt, Artificial Sequence
  Description of Artificial Sequence: Synthetic oligonucleotide
gucaaguugacacaggacu

SEQ ID NO: 748577 - RNA, 19 nt, Artificial Sequence
  Description of Artificial Sequence: Synthetic oligonucleotide
caauuguaggucauuuaug

SEQ ID NO: 748578 - RNA, 19 nt, Artificial Sequence
  Description of Artificial Sequence: Synthetic oligonucleotide
gaauggauacuuaguguag

SEQ ID NO: 748579 - RNA, 19 nt, Artificial Sequence
  Description of Artificial Sequence: Synthetic oligonucleotide
uguugaacuauugcuggug

SEQ ID NO: 748580 - RNA, 19 nt, Artificial Sequence
  Description of Artificial Sequence: Synthetic oligonucleotide
cuucuuuuaguucgacgcc

SEQ ID NO: 748581 - RNA, 19 nt, Artificial Sequence
  Description of Artificial Sequence: Synthetic oligonucleotide
accccgucgaccuuuaaug

SEQ ID NO: 748582 - RNA, 19 nt, Artificial Sequence
  Description of Artificial Sequence: Synthetic oligonucleotide
guaagagguuuacuguugc

SEQ ID NO: 748583 - RNA, 19 nt, Artificial Sequence
  Description of Artificial Sequence: Synthetic oligonucleotide
ggagcaacauucuugguac

SEQ ID NO: 748584 - RNA, 19 nt, Artificial Sequence
  Description of Artificial Sequence: Synthetic oligonucleotide
caacucgcuccuuauauug

SEQ ID NO: 748585 - RNA, 19 nt, Artificial Sequence
  Description of Artificial Sequence: Synthetic oligonucleotide
uuuuaguucgacgccaauc

SEQ ID NO: 748586 - RNA, 19 nt, Artificial Sequence
  Description of Artificial Sequence: Synthetic oligonucleotide
ucaucaauacaugaccaaa

SEQ ID NO: 748587 - RNA, 19 nt, Artificial Sequence
  Description of Artificial Sequence: Synthetic oligonucleotide
aacauaucuugugcauacg

SEQ ID NO: 748588 - RNA, 19 nt, Artificial Sequence
  Description of Artificial Sequence: Synthetic oligonucleotide
gcuacuaucaagcucuuca

SEQ ID NO: 748589 - RNA, 19 nt, Artificial Sequence
  Description of Artificial Sequence: Synthetic oligonucleotide
caucacuaucaaauaacug

SEQ ID NO: 748590 - RNA, 19 nt, Artificial Sequence
  Description of Artificial Sequence: Synthetic oligonucleotide
uaaauucuggugcgaucag

SEQ ID NO: 748591 - RNA, 19 nt, Artificial Sequence
  Description of Artificial Sequence: Synthetic oligonucleotide
uaguucgacgccaaucaac

SEQ ID NO: 748592 - RNA, 19 nt, Artificial Sequence
  Description of Artificial Sequence: Synthetic oligonucleotide
guugcuacuaucaagcucu

SEQ ID NO: 748593 - RNA, 19 nt, Artificial Sequence
  Description of Artificial Sequence: Synthetic oligonucleotide
aucgaaagcauugaucaga

SEQ ID NO: 748594 - RNA, 19 nt, Artificial Sequence
  Description of Artificial Sequence: Synthetic oligonucleotide
cuaauuucaguugugaugu

SEQ ID NO: 748595 - RNA, 19 nt, Artificial Sequence
  Description of Artificial Sequence: Synthetic oligonucleotide
caugauagaacauucaauu

SEQ ID NO: 748596 - RNA, 19 nt, Artificial Sequence
  Description of Artificial Sequence: Synthetic oligonucleotide
uacgcuuuguuugguaugc

SEQ ID NO: 748597 - RNA, 19 nt, Artificial Sequence
  Description of Artificial Sequence: Synthetic oligonucleotide
agcgauuauccaaauaaug

SEQ ID NO: 748598 - RNA, 19 nt, Artificial Sequence
  Description of Artificial Sequence: Synthetic oligonucleotide
uuguaagagguuuacuguu

SEQ ID NO: 748599 - RNA, 19 nt, Artificial Sequence
  Description of Artificial Sequence: Synthetic oligonucleotide
accugcuauaauucaaacu

SEQ ID NO: 748600 - RNA, 19 nt, Artificial Sequence
  Description of Artificial Sequence: Synthetic oligonucleotide
uucuuuuaguucgacgcca

SEQ ID NO: 748601 - RNA, 19 nt, Artificial Sequence
  Description of Artificial Sequence: Synthetic oligonucleotide
aaauaacugugagauacuu

SEQ ID NO: 748602 - RNA, 19 nt, Artificial Sequence
  Description of Artificial Sequence: Synthetic oligonucleotide
acuguuucaaagugaguau

SEQ ID NO: 748603 - RNA, 19 nt, Artificial Sequence
  Description of Artificial Sequence: Synthetic oligonucleotide
uacuaauuucaguugugau

SEQ ID NO: 748604 - RNA, 19 nt, Artificial Sequence
  Description of Artificial Sequence: Synthetic oligonucleotide
acgauuuucaucgucuggu

SEQ ID NO: 748605 - RNA, 19 nt, Artificial Sequence
  Description of Artificial Sequence: Synthetic oligonucleotide
uacaacaauguuacaugau

SEQ ID NO: 748606 - RNA, 19 nt, Artificial Sequence
  Description of Artificial Sequence: Synthetic oligonucleotide
uucuaauccagccgcuuuc

SEQ ID NO: 748607 - RNA, 19 nt, Artificial Sequence
  Description of Artificial Sequence: Synthetic oligonucleotide
auggacgauuuucaucguc

SEQ ID NO: 748608 - RNA, 19 nt, Artificial Sequence
  Description of Artificial Sequence: Synthetic oligonucleotide
cuacuaucaagcucuucac

SEQ ID NO: 748609 - RNA, 19 nt, Artificial Sequence
  Description of Artificial Sequence: Synthetic oligonucleotide
cuugaaaguaauccgcaga

SEQ ID NO: 748610 - RNA, 19 nt, Artificial Sequence
  Description of Artificial Sequence: Synthetic oligonucleotide
ucuacgcuuuguuugguau

SEQ ID NO: 748611 - RNA, 19 nt, Artificial Sequence
  Description of Artificial Sequence: Synthetic oligonucleotide
guuuaugauaaauucuggu

SEQ ID NO: 748612 - RNA, 19 nt, Artificial Sequence
  Description of Artificial Sequence: Synthetic oligonucleotide
uuacuguugcuucccucag

SEQ ID NO: 748613 - RNA, 19 nt, Artificial Sequence
  Description of Artificial Sequence: Synthetic oligonucleotide
gauagaacauucaauugua

SEQ ID NO: 748614 - RNA, 19 nt, Artificial Sequence
  Description of Artificial Sequence: Synthetic oligonucleotide
auuuugaaucacaaaucug

SEQ ID NO: 748615 - RNA, 19 nt, Artificial Sequence
  Description of Artificial Sequence: Synthetic oligonucleotide
uugguaugccuguugacau

SEQ ID NO: 748616 - RNA, 19 nt, Artificial Sequence
  Description of Artificial Sequence: Synthetic oligonucleotide
auauuucuuucuaauccag

SEQ ID NO: 748617 - RNA, 19 nt, Artificial Sequence
  Description of Artificial Sequence: Synthetic oligonucleotide
aucuugugcauacgacuuc

SEQ ID NO: 748618 - RNA, 19 nt, Artificial Sequence
  Description of Artificial Sequence: Synthetic oligonucleotide
auaccugcuugucauguga

SEQ ID NO: 748619 - RNA, 19 nt, Artificial Sequence
  Description of Artificial Sequence: Synthetic oligonucleotide
uucuugagacuaaacucuc

SEQ ID NO: 748620 - RNA, 19 nt, Artificial Sequence
  Description of Artificial Sequence: Synthetic oligonucleotide
ugcuugucaugugacauga

SEQ ID NO: 748621 - RNA, 19 nt, Artificial Sequence
  Description of Artificial Sequence: Synthetic oligonucleotide
cagaauugagauagucuug

SEQ ID NO: 748622 - RNA, 19 nt, Artificial Sequence
  Description of Artificial Sequence: Synthetic oligonucleotide
ggauacuuaguguagagua

SEQ ID NO: 748623 - RNA, 19 nt, Artificial Sequence
  Description of Artificial Sequence: Synthetic oligonucleotide
acaguggcgaugcagccca

SEQ ID NO: 748624 - RNA, 19 nt, Artificial Sequence
  Description of Artificial Sequence: Synthetic oligonucleotide
guaaauaccugcuugucau

SEQ ID NO: 748625 - RNA, 19 nt, Artificial Sequence
  Description of Artificial Sequence: Synthetic oligonucleotide
ccuauuucuacuaaacuga

SEQ ID NO: 748626 - RNA, 19 nt, Artificial Sequence
  Description of Artificial Sequence: Synthetic oligonucleotide
aaggcagguauuauacuga

SEQ ID NO: 748627 - RNA, 19 nt, Artificial Sequence
  Description of Artificial Sequence: Synthetic oligonucleotide
agagaugcacugaguauac

SEQ ID NO: 748628 - RNA, 19 nt, Artificial Sequence
  Description of Artificial Sequence: Synthetic oligonucleotide
ggcgaugcagcccacaagc

SEQ ID NO: 748629 - RNA, 19 nt, Artificial Sequence
  Description of Artificial Sequence: Synthetic oligonucleotide
ucgacgccaaucaacucga

SEQ ID NO: 748630 - RNA, 19 nt, Artificial Sequence
  Description of Artificial Sequence: Synthetic oligonucleotide
ucuuccuacuguuucuuua

SEQ ID NO: 748631 - RNA, 19 nt, Artificial Sequence
  Description of Artificial Sequence: Synthetic oligonucleotide
gaugcacugaguauacaca

SEQ ID NO: 748632 - RNA, 19 nt, Artificial Sequence
  Description of Artificial Sequence: Synthetic oligonucleotide
guguagaguagcuuucaac

SEQ ID NO: 748633 - RNA, 19 nt, Artificial Sequence
  Description of Artificial Sequence: Synthetic oligonucleotide
ccuuguacuuguaaggcag

SEQ ID NO: 748634 - RNA, 19 nt, Artificial Sequence
  Description of Artificial Sequence: Synthetic oligonucleotide
uaaagcgauuauccaaaua

SEQ ID NO: 748635 - RNA, 19 nt, Artificial Sequence
  Description of Artificial Sequence: Synthetic oligonucleotide
acuaauaccaggauucguu

SEQ ID NO: 748636 - RNA, 19 nt, Artificial Sequence
  Description of Artificial Sequence: Synthetic oligonucleotide
uuuuccaggcuugauguau

SEQ ID NO: 748637 - RNA, 19 nt, Artificial Sequence
  Description of Artificial Sequence: Synthetic oligonucleotide
ugaacuauugcugguguuu

SEQ ID NO: 748638 - RNA, 19 nt, Artificial Sequence
  Description of Artificial Sequence: Synthetic oligonucleotide
aguucgacgccaaucaacu

SEQ ID NO: 748639 - RNA, 19 nt, Artificial Sequence
  Description of Artificial Sequence: Synthetic oligonucleotide
uuucuaauccagccgcuuu

SEQ ID NO: 748640 - RNA, 19 nt, Artificial Sequence
  Description of Artificial Sequence: Synthetic oligonucleotide
aucaucaauacaugaccaa

SEQ ID NO: 748641 - RNA, 19 nt, Artificial Sequence
  Description of Artificial Sequence: Synthetic oligonucleotide
gugcgaucagcacaaauuc

SEQ ID NO: 748642 - RNA, 19 nt, Artificial Sequence
  Description of Artificial Sequence: Synthetic oligonucleotide
cugauggacgauuuucauc

SEQ ID NO: 748643 - RNA, 19 nt, Artificial Sequence
  Description of Artificial Sequence: Synthetic oligonucleotide
uagcuuucaacucgcuccu

SEQ ID NO: 748644 - RNA, 19 nt, Artificial Sequence
  Description of Artificial Sequence: Synthetic oligonucleotide
ucuuuuaguucgacgccaa

SEQ ID NO: 748645 - RNA, 19 nt, Artificial Sequence
  Description of Artificial Sequence: Synthetic oligonucleotide
aaacucucuagacgggguu

SEQ ID NO: 748646 - RNA, 19 nt, Artificial Sequence
  Description of Artificial Sequence: Synthetic oligonucleotide
auggagaaaaugccuuaca

SEQ ID NO: 748647 - RNA, 19 nt, Artificial Sequence
  Description of Artificial Sequence: Synthetic oligonucleotide
caucgucugguaaaucaug

SEQ ID NO: 748648 - RNA, 19 nt, Artificial Sequence
  Description of Artificial Sequence: Synthetic oligonucleotide
uaaagagaauucuguuuua

SEQ ID NO: 748649 - RNA, 19 nt, Artificial Sequence
  Description of Artificial Sequence: Synthetic oligonucleotide
gugacaugaaaucaucugu

SEQ ID NO: 748650 - RNA, 19 nt, Artificial Sequence
  Description of Artificial Sequence: Synthetic oligonucleotide
ucuagacgggguugaauaa

SEQ ID NO: 748651 - RNA, 19 nt, Artificial Sequence
  Description of Artificial Sequence: Synthetic oligonucleotide
gaugaccccggcuuguguc

SEQ ID NO: 748652 - RNA, 19 nt, Artificial Sequence
  Description of Artificial Sequence: Synthetic oligonucleotide
ucgcuccuuauauuguucu

SEQ ID NO: 748653 - RNA, 19 nt, Artificial Sequence
  Description of Artificial Sequence: Synthetic oligonucleotide
uucugaugaccccggcuug

SEQ ID NO: 748654 - RNA, 19 nt, Artificial Sequence
  Description of Artificial Sequence: Synthetic oligonucleotide
ucuuccuggugccagcaua

SEQ ID NO: 748655 - RNA, 19 nt, Artificial Sequence
  Description of Artificial Sequence: Synthetic oligonucleotide
acugugagauacuucuuuu

SEQ ID NO: 748656 - RNA, 19 nt, Artificial Sequence
  Description of Artificial Sequence: Synthetic oligonucleotide
uuuucaucgucugguaaau

SEQ ID NO: 748657 - RNA, 19 nt, Artificial Sequence
  Description of Artificial Sequence: Synthetic oligonucleotide
gauagucuugcaguugauc

SEQ ID NO: 748658 - RNA, 19 nt, Artificial Sequence
  Description of Artificial Sequence: Synthetic oligonucleotide
gaccaaauacauugaugga

SEQ ID NO: 748659 - RNA, 19 nt, Artificial Sequence
  Description of Artificial Sequence: Synthetic oligonucleotide
uccauuguccugguguugu

SEQ ID NO: 748660 - RNA, 19 nt, Artificial Sequence
  Description of Artificial Sequence: Synthetic oligonucleotide
gagagaugcacugaguaua

SEQ ID NO: 748661 - RNA, 19 nt, Artificial Sequence
  Description of Artificial Sequence: Synthetic oligonucleotide
gugucaaguugacacagga

SEQ ID NO: 748662 - RNA, 19 nt, Artificial Sequence
  Description of Artificial Sequence: Synthetic oligonucleotide
auucaucgaaagcauugau

SEQ ID NO: 748663 - RNA, 19 nt, Artificial Sequence
  Description of Artificial Sequence: Synthetic oligonucleotide
acuaaacucucuagacggg

SEQ ID NO: 748664 - RNA, 19 nt, Artificial Sequence
  Description of Artificial Sequence: Synthetic oligonucleotide
uguuuguaagagguuuacu

SEQ ID NO: 748665 - RNA, 19 nt, Artificial Sequence
  Description of Artificial Sequence: Synthetic oligonucleotide
uggauacuuaguguagagu

SEQ ID NO: 748666 - RNA, 19 nt, Artificial Sequence
  Description of Artificial Sequence: Synthetic oligonucleotide
cuaugcaggcuuuauuaga

SEQ ID NO: 748667 - RNA, 19 nt, Artificial Sequence
  Description of Artificial Sequence: Synthetic oligonucleotide
guacuuguaaggcagguau

SEQ ID NO: 748668 - RNA, 19 nt, Artificial Sequence
  Description of Artificial Sequence: Synthetic oligonucleotide
acaugauagaacauucaau

SEQ ID NO: 748669 - RNA, 19 nt, Artificial Sequence
  Description of Artificial Sequence: Synthetic oligonucleotide
uuaguucgacgccaaucaa

SEQ ID NO: 748670 - RNA, 19 nt, Artificial Sequence
  Description of Artificial Sequence: Synthetic oligonucleotide
gguauuauacugacugagc

SEQ ID NO: 748671 - RNA, 19 nt, Artificial Sequence
  Description of Artificial Sequence: Synthetic oligonucleotide
gcgauuauccaaauaauga

SEQ ID NO: 748672 - RNA, 19 nt, Artificial Sequence
  Description of Artificial Sequence: Synthetic oligonucleotide
ugcccuaccccgucgaccu

SEQ ID NO: 748673 - RNA, 19 nt, Artificial Sequence
  Description of Artificial Sequence: Synthetic oligonucleotide
uugacacaggacugaacuc

SEQ ID NO: 748674 - RNA, 19 nt, Artificial Sequence
  Description of Artificial Sequence: Synthetic oligonucleotide
aguaauccgcagaauugag

SEQ ID NO: 748675 - RNA, 19 nt, Artificial Sequence
  Description of Artificial Sequence: Synthetic oligonucleotide
cuacgcuuuguuugguaug

SEQ ID NO: 748676 - RNA, 19 nt, Artificial Sequence
  Description of Artificial Sequence: Synthetic oligonucleotide
aagcgauuauccaaauaau

SEQ ID NO: 748677 - RNA, 19 nt, Artificial Sequence
  Description of Artificial Sequence: Synthetic oligonucleotide
cacuaucaacuucaaguuc

SEQ ID NO: 748678 - RNA, 19 nt, Artificial Sequence
  Description of Artificial Sequence: Synthetic oligonucleotide
agcacaaauucugccaaca

SEQ ID NO: 748679 - RNA, 19 nt, Artificial Sequence
  Description of Artificial Sequence: Synthetic oligonucleotide
uagucuugcaguugaucau

SEQ ID NO: 748680 - RNA, 19 nt, Artificial Sequence
  Description of Artificial Sequence: Synthetic oligonucleotide
aucuugaaaguaauccgca

SEQ ID NO: 748681 - RNA, 19 nt, Artificial Sequence
  Description of Artificial Sequence: Synthetic oligonucleotide
acgggguugaauaaagcga

SEQ ID NO: 748682 - RNA, 19 nt, Artificial Sequence
  Description of Artificial Sequence: Synthetic oligonucleotide
gaauugagauagucuugca

SEQ ID NO: 748683 - RNA, 19 nt, Artificial Sequence
  Description of Artificial Sequence: Synthetic oligonucleotide
uugauuaauuuaggcucug

SEQ ID NO: 748684 - RNA, 19 nt, Artificial Sequence
  Description of Artificial Sequence: Synthetic oligonucleotide
uucuugguacaguuugaau

SEQ ID NO: 748685 - RNA, 19 nt, Artificial Sequence
  Description of Artificial Sequence: Synthetic oligonucleotide
auaaagcgauuauccaaau

SEQ ID NO: 748686 - RNA, 19 nt, Artificial Sequence
  Description of Artificial Sequence: Synthetic oligonucleotide
cuuauauuguucuuuccau

SEQ ID NO: 748687 - RNA, 19 nt, Artificial Sequence
  Description of Artificial Sequence: Synthetic oligonucleotide
uugaccugauggacgauuu

SEQ ID NO: 748688 - RNA, 19 nt, Artificial Sequence
  Description of Artificial Sequence: Synthetic oligonucleotide
cucuagacgggguugaaua

SEQ ID NO: 748689 - RNA, 19 nt, Artificial Sequence
  Description of Artificial Sequence: Synthetic oligonucleotide
aauccgcagaauugagaua

SEQ ID NO: 748690 - RNA, 19 nt, Artificial Sequence
  Description of Artificial Sequence: Synthetic oligonucleotide
ugauuaauuuaggcucugu

SEQ ID NO: 748691 - RNA, 19 nt, Artificial Sequence
  Description of Artificial Sequence: Synthetic oligonucleotide
ugaguauaguggucacuaa

SEQ ID NO: 748692 - RNA, 19 nt, Artificial Sequence
  Description of Artificial Sequence: Synthetic oligonucleotide
cuguuuuggcaauggagca

SEQ ID NO: 748693 - RNA, 19 nt, Artificial Sequence
  Description of Artificial Sequence: Synthetic oligonucleotide
cuugagacuaaacucucua

SEQ ID NO: 748694 - RNA, 19 nt, Artificial Sequence
  Description of Artificial Sequence: Synthetic oligonucleotide
uccuucuucugaugacccc

SEQ ID NO: 748695 - RNA, 19 nt, Artificial Sequence
  Description of Artificial Sequence: Synthetic oligonucleotide
uaccugcuugucaugugac

SEQ ID NO: 748696 - RNA, 19 nt, Artificial Sequence
  Description of Artificial Sequence: Synthetic oligonucleotide
uugauggauuuugaaucac

SEQ ID NO: 748697 - RNA, 19 nt, Artificial Sequence
  Description of Artificial Sequence: Synthetic oligonucleotide
ggcauuucaugaaaaucag

SEQ ID NO: 748698 - RNA, 19 nt, Artificial Sequence
  Description of Artificial Sequence: Synthetic oligonucleotide
uuguacuuguaaggcaggu

SEQ ID NO: 748699 - RNA, 19 nt, Artificial Sequence
  Description of Artificial Sequence: Synthetic oligonucleotide
aguggucacuaaaagaaua

SEQ ID NO: 748700 - RNA, 19 nt, Artificial Sequence
  Description of Artificial Sequence: Synthetic oligonucleotide
uaccaggauucguugcuac

SEQ ID NO: 748701 - RNA, 19 nt, Artificial Sequence
  Description of Artificial Sequence: Synthetic oligonucleotide
cacuaucaaauaacuguga

SEQ ID NO: 748702 - RNA, 19 nt, Artificial Sequence
  Description of Artificial Sequence: Synthetic oligonucleotide
ucuccauuguccugguguu

SEQ ID NO: 748703 - RNA, 19 nt, Artificial Sequence
  Description of Artificial Sequence: Synthetic oligonucleotide
uggcgaugcagcccacaag

SEQ ID NO: 748704 - RNA, 19 nt, Artificial Sequence
  Description of Artificial Sequence: Synthetic oligonucleotide
uggcuccacccacaauggg

SEQ ID NO: 748705 - RNA, 19 nt, Artificial Sequence
  Description of Artificial Sequence: Synthetic oligonucleotide
ccuuauauuguucuuucca

SEQ ID NO: 748706 - RNA, 19 nt, Artificial Sequence
  Description of Artificial Sequence: Synthetic oligonucleotide
ugaaaguaauccgcagaau

SEQ ID NO: 748707 - RNA, 19 nt, Artificial Sequence
  Description of Artificial Sequence: Synthetic oligonucleotide
cuugguacaguuugaauuu

SEQ ID NO: 748708 - RNA, 19 nt, Artificial Sequence
  Description of Artificial Sequence: Synthetic oligonucleotide
gugaguauaguggucacua

SEQ ID NO: 748709 - RNA, 19 nt, Artificial Sequence
  Description of Artificial Sequence: Synthetic oligonucleotide
uaccccgucgaccuuuaau

SEQ ID NO: 748710 - RNA, 19 nt, Artificial Sequence
  Description of Artificial Sequence: Synthetic oligonucleotide
ggucaguccaaauauauuu

SEQ ID NO: 748711 - RNA, 19 nt, Artificial Sequence
  Description of Artificial Sequence: Synthetic oligonucleotide
cauggagagugcugcuuac

SEQ ID NO: 748712 - RNA, 19 nt, Artificial Sequence
  Description of Artificial Sequence: Synthetic oligonucleotide
ucgaccuuuaauggagaaa

SEQ ID NO: 748713 - RNA, 19 nt, Artificial Sequence
  Description of Artificial Sequence: Synthetic oligonucleotide
aagauucaucgaaagcauu

SEQ ID NO: 748714 - RNA, 19 nt, Artificial Sequence
  Description of Artificial Sequence: Synthetic oligonucleotide
gcgaucagcacaaauucug

SEQ ID NO: 748715 - RNA, 19 nt, Artificial Sequence
  Description of Artificial Sequence: Synthetic oligonucleotide
guguuuguaagagguuuac

SEQ ID NO: 748716 - RNA, 19 nt, Artificial Sequence
  Description of Artificial Sequence: Synthetic oligonucleotide
augcaggcuuuauuagacu

SEQ ID NO: 748717 - RNA, 19 nt, Artificial Sequence
  Description of Artificial Sequence: Synthetic oligonucleotide
auacauugauggauuuuga

SEQ ID NO: 748718 - RNA, 19 nt, Artificial Sequence
  Description of Artificial Sequence: Synthetic oligonucleotide
guugaacuauugcuggugu

SEQ ID NO: 748719 - RNA, 19 nt, Artificial Sequence
  Description of Artificial Sequence: Synthetic oligonucleotide
ucgacuucuugagacuaaa

SEQ ID NO: 748720 - RNA, 19 nt, Artificial Sequence
  Description of Artificial Sequence: Synthetic oligonucleotide
gcagaauugagauagucuu

SEQ ID NO: 748721 - RNA, 19 nt, Artificial Sequence
  Description of Artificial Sequence: Synthetic oligonucleotide
guaauccgcagaauugaga

SEQ ID NO: 748722 - RNA, 19 nt, Artificial Sequence
  Description of Artificial Sequence: Synthetic oligonucleotide
uccgcaggguucuuugaau

SEQ ID NO: 748723 - RNA, 19 nt, Artificial Sequence
  Description of Artificial Sequence: Synthetic oligonucleotide
accaggauucguugcuacu

SEQ ID NO: 748724 - RNA, 19 nt, Artificial Sequence
  Description of Artificial Sequence: Synthetic oligonucleotide
uggugcgaucagcacaaau

SEQ ID NO: 748725 - RNA, 19 nt, Artificial Sequence
  Description of Artificial Sequence: Synthetic oligonucleotide
gguacuugaguuuuagaau

SEQ ID NO: 748726 - RNA, 19 nt, Artificial Sequence
  Description of Artificial Sequence: Synthetic oligonucleotide
ucugaugaccccggcuugu

SEQ ID NO: 748727 - RNA, 19 nt, Artificial Sequence
  Description of Artificial Sequence: Synthetic oligonucleotide
cacucucaagcucuucauc

SEQ ID NO: 748728 - RNA, 19 nt, Artificial Sequence
  Description of Artificial Sequence: Synthetic oligonucleotide
caguaaauaccugcuuguc

SEQ ID NO: 748729 - RNA, 19 nt, Artificial Sequence
  Description of Artificial Sequence: Synthetic oligonucleotide
ggauucguugcuacuauca

SEQ ID NO: 748730 - RNA, 19 nt, Artificial Sequence
  Description of Artificial Sequence: Synthetic oligonucleotide
caucaauacaugaccaaau

SEQ ID NO: 748731 - RNA, 19 nt, Artificial Sequence
  Description of Artificial Sequence: Synthetic oligonucleotide
cagccugcuucuuacagaa

SEQ ID NO: 748732 - RNA, 19 nt, Artificial Sequence
  Description of Artificial Sequence: Synthetic oligonucleotide
ccgucgaccuuuaauggag

SEQ ID NO: 748733 - RNA, 19 nt, Artificial Sequence
  Description of Artificial Sequence: Synthetic oligonucleotide
ugguaugccuguugacauc

SEQ ID NO: 748734 - RNA, 19 nt, Artificial Sequence
  Description of Artificial Sequence: Synthetic oligonucleotide
ggacgauuuucaucgucug

SEQ ID NO: 748735 - RNA, 19 nt, Artificial Sequence
  Description of Artificial Sequence: Synthetic oligonucleotide
ccuguugacaucacccuuc

SEQ ID NO: 748736 - RNA, 19 nt, Artificial Sequence
  Description of Artificial Sequence: Synthetic oligonucleotide
acgcuuuguuugguaugcc

SEQ ID NO: 748737 - RNA, 19 nt, Artificial Sequence
  Description of Artificial Sequence: Synthetic oligonucleotide
caguccgcaggguucuuug

SEQ ID NO: 748738 - RNA, 19 nt, Artificial Sequence
  Description of Artificial Sequence: Synthetic oligonucleotide
auacgacuucuuccuggug

SEQ ID NO: 748739 - RNA, 19 nt, Artificial Sequence
  Description of Artificial Sequence: Synthetic oligonucleotide
uauccuccucuacgcuuug

SEQ ID NO: 748740 - RNA, 19 nt, Artificial Sequence
  Description of Artificial Sequence: Synthetic oligonucleotide
ccuacuguuucuuuaaccu

SEQ ID NO: 748741 - RNA, 19 nt, Artificial Sequence
  Description of Artificial Sequence: Synthetic oligonucleotide
uucuaacauguaccauuuu

SEQ ID NO: 748742 - RNA, 19 nt, Artificial Sequence
  Description of Artificial Sequence: Synthetic oligonucleotide
gguaugccuguugacauca

SEQ ID NO: 748743 - RNA, 19 nt, Artificial Sequence
  Description of Artificial Sequence: Synthetic oligonucleotide
acaucuaugcaggcuuuau

SEQ ID NO: 748744 - RNA, 19 nt, Artificial Sequence
  Description of Artificial Sequence: Synthetic oligonucleotide
cuucuaacauguaccauuu

SEQ ID NO: 748745 - RNA, 19 nt, Artificial Sequence
  Description of Artificial Sequence: Synthetic oligonucleotide
cugugagauacuucuuuua

SEQ ID NO: 748746 - RNA, 19 nt, Artificial Sequence
  Description of Artificial Sequence: Synthetic oligonucleotide
uccgcagaauugagauagu

SEQ ID NO: 748747 - RNA, 19 nt, Artificial Sequence
  Description of Artificial Sequence: Synthetic oligonucleotide
ugaccugauggacgauuuu

SEQ ID NO: 748748 - RNA, 19 nt, Artificial Sequence
  Description of Artificial Sequence: Synthetic oligonucleotide
ggcuccacccacaaugggc

SEQ ID NO: 748749 - RNA, 19 nt, Artificial Sequence
  Description of Artificial Sequence: Synthetic oligonucleotide
guaaggcagguauuauacu

SEQ ID NO: 748750 - RNA, 19 nt, Artificial Sequence
  Description of Artificial Sequence: Synthetic oligonucleotide
guuucaaagugaguauagu

SEQ ID NO: 748751 - RNA, 19 nt, Artificial Sequence
  Description of Artificial Sequence: Synthetic oligonucleotide
cgaucagcacaaauucugc

SEQ ID NO: 748752 - RNA, 19 nt, Artificial Sequence
  Description of Artificial Sequence: Synthetic oligonucleotide
caggucaguccaaauauau

SEQ ID NO: 748753 - RNA, 19 nt, Artificial Sequence
  Description of Artificial Sequence: Synthetic oligonucleotide
aguccgcaggguucuuuga

SEQ ID NO: 748754 - RNA, 19 nt, Artificial Sequence
  Description of Artificial Sequence: Synthetic oligonucleotide
auggagcaacauucuuggu

SEQ ID NO: 748755 - RNA, 19 nt, Artificial Sequence
  Description of Artificial Sequence: Synthetic oligonucleotide
ggugaaaaucacaggagcu

SEQ ID NO: 748756 - RNA, 19 nt, Artificial Sequence
  Description of Artificial Sequence: Synthetic oligonucleotide
gagcaacauucuugguaca

SEQ ID NO: 748757 - RNA, 19 nt, Artificial Sequence
  Description of Artificial Sequence: Synthetic oligonucleotide
uacaucuaugcaggcuuua

SEQ ID NO: 748758 - RNA, 19 nt, Artificial Sequence
  Description of Artificial Sequence: Synthetic oligonucleotide
gucgaccuuuaauggagaa

SEQ ID NO: 748759 - RNA, 19 nt, Artificial Sequence
  Description of Artificial Sequence: Synthetic oligonucleotide
acauucaauuguaggucau

SEQ ID NO: 748760 - RNA, 19 nt, Artificial Sequence
  Description of Artificial Sequence: Synthetic oligonucleotide
cuaucaacuucaaguuccu

SEQ ID NO: 748761 - RNA, 19 nt, Artificial Sequence
  Description of Artificial Sequence: Synthetic oligonucleotide
cuagacgggguugaauaaa

SEQ ID NO: 748762 - RNA, 19 nt, Artificial Sequence
  Description of Artificial Sequence: Synthetic oligonucleotide
ccccgucgaccuuuaaugg

SEQ ID NO: 748763 - RNA, 19 nt, Artificial Sequence
  Description of Artificial Sequence: Synthetic oligonucleotide
ggacaugauagaacauuca

SEQ ID NO: 748764 - RNA, 19 nt, Artificial Sequence
  Description of Artificial Sequence: Synthetic oligonucleotide
ggguugaauaaagcgauua

SEQ ID NO: 748765 - RNA, 19 nt, Artificial Sequence
  Description of Artificial Sequence: Synthetic oligonucleotide
cgcaggguucuuugaaugg

SEQ ID NO: 748766 - RNA, 19 nt, Artificial Sequence
  Description of Artificial Sequence: Synthetic oligonucleotide
gacuucacuguggcauuuc

SEQ ID NO: 748767 - RNA, 19 nt, Artificial Sequence
  Description of Artificial Sequence: Synthetic oligonucleotide
ccggcuugugucaaguuga

SEQ ID NO: 748768 - RNA, 19 nt, Artificial Sequence
  Description of Artificial Sequence: Synthetic oligonucleotide
ugcuacuaucaagcucuuc

SEQ ID NO: 748769 - RNA, 19 nt, Artificial Sequence
  Description of Artificial Sequence: Synthetic oligonucleotide
ccgcaggguucuuugaaug

SEQ ID NO: 748770 - RNA, 19 nt, Artificial Sequence
  Description of Artificial Sequence: Synthetic oligonucleotide
caucgacuucuugagacua

SEQ ID NO: 748771 - RNA, 19 nt, Artificial Sequence
  Description of Artificial Sequence: Synthetic oligonucleotide
gugcccuaccccgucgacc

SEQ ID NO: 748772 - RNA, 19 nt, Artificial Sequence
  Description of Artificial Sequence: Synthetic oligonucleotide
ggugcgaucagcacaaauu

SEQ ID NO: 748773 - RNA, 19 nt, Artificial Sequence
  Description of Artificial Sequence: Synthetic oligonucleotide
gauggacgauuuucaucgu

SEQ ID NO: 748774 - RNA, 19 nt, Artificial Sequence
  Description of Artificial Sequence: Synthetic oligonucleotide
cauugaucagaagagccuu

SEQ ID NO: 748775 - RNA, 19 nt, Artificial Sequence
  Description of Artificial Sequence: Synthetic oligonucleotide
guaggucauuuaugagaaa

SEQ ID NO: 748776 - RNA, 19 nt, Artificial Sequence
  Description of Artificial Sequence: Synthetic oligonucleotide
cuccauuguccugguguug

SEQ ID NO: 748777 - RNA, 19 nt, Artificial Sequence
  Description of Artificial Sequence: Synthetic oligonucleotide
uugcuacuaucaagcucuu

SEQ ID NO: 748778 - RNA, 19 nt, Artificial Sequence
  Description of Artificial Sequence: Synthetic oligonucleotide
cguugcuacuaucaagcuc

SEQ ID NO: 748779 - RNA, 19 nt, Artificial Sequence
  Description of Artificial Sequence: Synthetic oligonucleotide
aggguucuuugaauggaua

SEQ ID NO: 748780 - RNA, 19 nt, Artificial Sequence
  Description of Artificial Sequence: Synthetic oligonucleotide
gaccccggcuugugucaag

SEQ ID NO: 748781 - RNA, 19 nt, Artificial Sequence
  Description of Artificial Sequence: Synthetic oligonucleotide
cuguugaacuauugcuggu

SEQ ID NO: 748782 - RNA, 19 nt, Artificial Sequence
  Description of Artificial Sequence: Synthetic oligonucleotide
gguguuuguaagagguuua

SEQ ID NO: 748783 - RNA, 19 nt, Artificial Sequence
  Description of Artificial Sequence: Synthetic oligonucleotide
aucgacuucuugagacuaa

SEQ ID NO: 748784 - RNA, 19 nt, Artificial Sequence
  Description of Artificial Sequence: Synthetic oligonucleotide
cucuacgcuuuguuuggua

SEQ ID NO: 748785 - RNA, 19 nt, Artificial Sequence
  Description of Artificial Sequence: Synthetic oligonucleotide
cacccuucucuugaccuga

SEQ ID NO: 748786 - RNA, 19 nt, Artificial Sequence
  Description of Artificial Sequence: Synthetic oligonucleotide
caguuucaacuuugauuaa

SEQ ID NO: 748787 - RNA, 19 nt, Artificial Sequence
  Description of Artificial Sequence: Synthetic oligonucleotide
gccagcauacaagguuucc

SEQ ID NO: 748788 - RNA, 19 nt, Artificial Sequence
  Description of Artificial Sequence: Synthetic oligonucleotide
cuguugacaucacccuucu

SEQ ID NO: 748789 - RNA, 19 nt, Artificial Sequence
  Description of Artificial Sequence: Synthetic oligonucleotide
ucuugaccugauggacgau

SEQ ID NO: 748790 - RNA, 19 nt, Artificial Sequence
  Description of Artificial Sequence: Synthetic oligonucleotide
caucuaugcaggcuuuauu

SEQ ID NO: 748791 - RNA, 19 nt, Artificial Sequence
  Description of Artificial Sequence: Synthetic oligonucleotide
caacuguuucaaagugagu

SEQ ID NO: 748792 - RNA, 19 nt, Artificial Sequence
  Description of Artificial Sequence: Synthetic oligonucleotide
caggauucguugcuacuau

SEQ ID NO: 748793 - RNA, 19 nt, Artificial Sequence
  Description of Artificial Sequence: Synthetic oligonucleotide
cacuaauaccaggauucgu

SEQ ID NO: 748794 - RNA, 19 nt, Artificial Sequence
  Description of Artificial Sequence: Synthetic oligonucleotide
ccgcagaauugagauaguc

SEQ ID NO: 748795 - RNA, 19 nt, Artificial Sequence
  Description of Artificial Sequence: Synthetic oligonucleotide
cccgucgaccuuuaaugga

SEQ ID NO: 748796 - RNA, 19 nt, Artificial Sequence
  Description of Artificial Sequence: Synthetic oligonucleotide
cuugaccugauggacgauu

SEQ ID NO: 748797 - RNA, 19 nt, Artificial Sequence
  Description of Artificial Sequence: Synthetic oligonucleotide
ggcaauggagcaacauucu

SEQ ID NO: 748798 - RNA, 19 nt, Artificial Sequence
  Description of Artificial Sequence: Synthetic oligonucleotide
cgcagaauugagauagucu

SEQ ID NO: 748799 - RNA, 19 nt, Artificial Sequence
  Description of Artificial Sequence: Synthetic oligonucleotide
gccaaucaacucgagauuu

SEQ ID NO: 748800 - RNA, 19 nt, Artificial Sequence
  Description of Artificial Sequence: Synthetic oligonucleotide
ccuuguuucgugucuucua

SEQ ID NO: 748801 - RNA, 19 nt, Artificial Sequence
  Description of Artificial Sequence: Synthetic oligonucleotide
cauucaauuguaggucauu

SEQ ID NO: 748802 - RNA, 19 nt, Artificial Sequence
  Description of Artificial Sequence: Synthetic oligonucleotide
cuuuuaguucgacgccaau

SEQ ID NO: 748803 - RNA, 19 nt, Artificial Sequence
  Description of Artificial Sequence: Synthetic oligonucleotide
cuuucuaauccagccgcuu

SEQ ID NO: 748804 - RNA, 19 nt, Artificial Sequence
  Description of Artificial Sequence: Synthetic oligonucleotide
ccaggauucguugcuacua

SEQ ID NO: 748805 - RNA, 19 nt, Artificial Sequence
  Description of Artificial Sequence: Synthetic oligonucleotide
ccauggagagugcugcuua

SEQ ID NO: 748806 - RNA, 19 nt, Artificial Sequence
  Description of Artificial Sequence: Synthetic oligonucleotide
ccaggucaguccaaauaua

SEQ ID NO: 748807 - RNA, 19 nt, Artificial Sequence
  Description of Artificial Sequence: Synthetic oligonucleotide
guacaucuaugcaggcuuu

SEQ ID NO: 748808 - RNA, 19 nt, Artificial Sequence
  Description of Artificial Sequence: Synthetic oligonucleotide
cgggguugaauaaagcgau

SEQ ID NO: 748809 - RNA, 19 nt, Artificial Sequence
  Description of Artificial Sequence: Synthetic oligonucleotide
cccuucucuugaccugaug

SEQ ID NO: 748810 - RNA, 19 nt, Artificial Sequence
  Description of Artificial Sequence: Synthetic oligonucleotide
caguggcgaugcagcccac

SEQ ID NO: 748811 - RNA, 19 nt, Artificial Sequence
  Description of Artificial Sequence: Synthetic oligonucleotide
agcuuucaacucgcuccuu

SEQ ID NO: 748812 - RNA, 19 nt, Artificial Sequence
  Description of Artificial Sequence: Synthetic oligonucleotide
cuaauccagccgcuuucuu

SEQ ID NO: 748813 - RNA, 19 nt, Artificial Sequence
  Description of Artificial Sequence: Synthetic oligonucleotide
ccaucgacuucuugagacu

SEQ ID NO: 748814 - RNA, 19 nt, Artificial Sequence
  Description of Artificial Sequence: Synthetic oligonucleotide
cucucuagacgggguugaa

SEQ ID NO: 748815 - RNA, 19 nt, Artificial Sequence
  Description of Artificial Sequence: Synthetic oligonucleotide
acccuucucuugaccugau

SEQ ID NO: 748816 - RNA, 19 nt, Artificial Sequence
  Description of Artificial Sequence: Synthetic oligonucleotide
cgucgaccuuuaauggaga

SEQ ID NO: 748817 - RNA, 19 nt, Artificial Sequence
  Description of Artificial Sequence: Synthetic oligonucleotide
gccuguugacaucacccuu

SEQ ID NO: 748818 - RNA, 19 nt, Artificial Sequence
  Description of Artificial Sequence: Synthetic oligonucleotide
gcuugucaugugacaugaa

SEQ ID NO: 748819 - RNA, 19 nt, Artificial Sequence
  Description of Artificial Sequence: Synthetic oligonucleotide
cgacgccaaucaacucgag

SEQ ID NO: 748820 - RNA, 19 nt, Artificial Sequence
  Description of Artificial Sequence: Synthetic oligonucleotide
cuaccccgucgaccuuuaa

SEQ ID NO: 748821 - RNA, 19 nt, Artificial Sequence
  Description of Artificial Sequence: Synthetic oligonucleotide
caccugcccagggauggcu

SEQ ID NO: 748822 - RNA, 19 nt, Artificial Sequence
  Description of Artificial Sequence: Synthetic oligonucleotide
ccuaccccgucgaccuuua

SEQ ID NO: 748823 - RNA, 19 nt, Artificial Sequence
  Description of Artificial Sequence: Synthetic oligonucleotide
ggacugaacucagguccuu

SEQ ID NO: 748824 - RNA, 19 nt, Artificial Sequence
  Description of Artificial Sequence: Synthetic oligonucleotide
cgccaaucaacucgagauu

SEQ ID NO: 748825 - RNA, 19 nt, Artificial Sequence
  Description of Artificial Sequence: Synthetic oligonucleotide
gcaguccgcaggguucuuu

SEQ ID NO: 748826 - RNA, 19 nt, Artificial Sequence
  Description of Artificial Sequence: Synthetic oligonucleotide
ccucuacgcuuuguuuggu

SEQ ID NO: 748827 - RNA, 19 nt, Artificial Sequence
  Description of Artificial Sequence: Synthetic oligonucleotide
cccuaccccgucgaccuuu

SEQ ID NO: 748828 - RNA, 19 nt, Artificial Sequence
  Description of Artificial Sequence: Synthetic oligonucleotide
ccccggcuugugucaaguu

SEQ ID NO: 748829 - RNA, 19 nt, Artificial Sequence
  Description of Artificial Sequence: Synthetic oligonucleotide
gcccuaccccgucgaccuu

SEQ ID NO: 748830 - RNA, 19 nt, Artificial Sequence
  Description of Artificial Sequence: Synthetic oligonucleotide
uuuaaggcgucuuugaugg

SEQ ID NO: 748831 - RNA, 19 nt, Artificial Sequence
  Description of Artificial Sequence: Synthetic oligonucleotide
uuaucaaugucccagagcu

SEQ ID NO: 748832 - RNA, 19 nt, Artificial Sequence
  Description of Artificial Sequence: Synthetic oligonucleotide
aaucuuuuggacgaagucc

SEQ ID NO: 748833 - RNA, 19 nt, Artificial Sequence
  Description of Artificial Sequence: Synthetic oligonucleotide
auuucuggcacauacucgc

SEQ ID NO: 748834 - RNA, 19 nt, Artificial Sequence
  Description of Artificial Sequence: Synthetic oligonucleotide
ugaagcauagccauaacca

SEQ ID NO: 748835 - RNA, 19 nt, Artificial Sequence
  Description of Artificial Sequence: Synthetic oligonucleotide
ucgauguuaucacauaagg

SEQ ID NO: 748836 - RNA, 19 nt, Artificial Sequence
  Description of Artificial Sequence: Synthetic oligonucleotide
aauagaauugucagucacc

SEQ ID NO: 748837 - RNA, 19 nt, Artificial Sequence
  Description of Artificial Sequence: Synthetic oligonucleotide
agaauugucagucaccuca

SEQ ID NO: 748838 - RNA, 19 nt, Artificial Sequence
  Description of Artificial Sequence: Synthetic oligonucleotide
ucuuucacguuuaagaaaa

SEQ ID NO: 748839 - RNA, 19 nt, Artificial Sequence
  Description of Artificial Sequence: Synthetic oligonucleotide
ucuauggccccaaagaucu

SEQ ID NO: 748840 - RNA, 19 nt, Artificial Sequence
  Description of Artificial Sequence: Synthetic oligonucleotide
cauaaaaguucuuauugag

SEQ ID NO: 748841 - RNA, 19 nt, Artificial Sequence
  Description of Artificial Sequence: Synthetic oligonucleotide
aaaaguaccugacccagca

SEQ ID NO: 748842 - RNA, 19 nt, Artificial Sequence
  Description of Artificial Sequence: Synthetic oligonucleotide
caaaguaagccucugacug

SEQ ID NO: 748843 - RNA, 19 nt, Artificial Sequence
  Description of Artificial Sequence: Synthetic oligonucleotide
cuaugugccauccuggacg

SEQ ID NO: 748844 - RNA, 19 nt, Artificial Sequence
  Description of Artificial Sequence: Synthetic oligonucleotide
auaaaaguucuuauugagc

SEQ ID NO: 748845 - RNA, 19 nt, Artificial Sequence
  Description of Artificial Sequence: Synthetic oligonucleotide
auacuugucgguuucugac

SEQ ID NO: 748846 - RNA, 19 nt, Artificial Sequence
  Description of Artificial Sequence: Synthetic oligonucleotide
aaccucaaggacuuucuuc

SEQ ID NO: 748847 - RNA, 19 nt, Artificial Sequence
  Description of Artificial Sequence: Synthetic oligonucleotide
ucacuagcagcaaacuugg

SEQ ID NO: 748848 - RNA, 19 nt, Artificial Sequence
  Description of Artificial Sequence: Synthetic oligonucleotide
uugaagcauagccauaacc

SEQ ID NO: 748849 - RNA, 19 nt, Artificial Sequence
  Description of Artificial Sequence: Synthetic oligonucleotide
uaucacauaaggcuucaug

SEQ ID NO: 748850 - RNA, 19 nt, Artificial Sequence
  Description of Artificial Sequence: Synthetic oligonucleotide
uucuuauugagcuccaccu

SEQ ID NO: 748851 - RNA, 19 nt, Artificial Sequence
  Description of Artificial Sequence: Synthetic oligonucleotide
agggagaacauucagggcu

SEQ ID NO: 748852 - RNA, 19 nt, Artificial Sequence
  Description of Artificial Sequence: Synthetic oligonucleotide
uguucagaagaauuuauua

SEQ ID NO: 748853 - RNA, 19 nt, Artificial Sequence
  Description of Artificial Sequence: Synthetic oligonucleotide
aguguugcaggaauagucc

SEQ ID NO: 748854 - RNA, 19 nt, Artificial Sequence
  Description of Artificial Sequence: Synthetic oligonucleotide
cacaauuucuggcacauac

SEQ ID NO: 748855 - RNA, 19 nt, Artificial Sequence
  Description of Artificial Sequence: Synthetic oligonucleotide
aguagacugacccauuuga

SEQ ID NO: 748856 - RNA, 19 nt, Artificial Sequence
  Description of Artificial Sequence: Synthetic oligonucleotide
aaguaccugacccagcagu

SEQ ID NO: 748857 - RNA, 19 nt, Artificial Sequence
  Description of Artificial Sequence: Synthetic oligonucleotide
uccucuauggccccaaaga

SEQ ID NO: 748858 - RNA, 19 nt, Artificial Sequence
  Description of Artificial Sequence: Synthetic oligonucleotide
uggucuucaaaccgaaccc

SEQ ID NO: 748859 - RNA, 19 nt, Artificial Sequence
  Description of Artificial Sequence: Synthetic oligonucleotide
aauacuugucgguuucuga

SEQ ID NO: 748860 - RNA, 19 nt, Artificial Sequence
  Description of Artificial Sequence: Synthetic oligonucleotide
uaaccauuguccacaaucu

SEQ ID NO: 748861 - RNA, 19 nt, Artificial Sequence
  Description of Artificial Sequence: Synthetic oligonucleotide
aauuucuggcacauacucg

SEQ ID NO: 748862 - RNA, 19 nt, Artificial Sequence
  Description of Artificial Sequence: Synthetic oligonucleotide
augcgggugagguacaugg

SEQ ID NO: 748863 - RNA, 19 nt, Artificial Sequence
  Description of Artificial Sequence: Synthetic oligonucleotide
cuuucaguaaggugucucg

SEQ ID NO: 748864 - RNA, 19 nt, Artificial Sequence
  Description of Artificial Sequence: Synthetic oligonucleotide
ugaauguccauugaggcuc

SEQ ID NO: 748865 - RNA, 19 nt, Artificial Sequence
  Description of Artificial Sequence: Synthetic oligonucleotide
ucuacaggggcucggagga

SEQ ID NO: 748866 - RNA, 19 nt, Artificial Sequence
  Description of Artificial Sequence: Synthetic oligonucleotide
uaguguugcaggaauaguc

SEQ ID NO: 748867 - RNA, 19 nt, Artificial Sequence
  Description of Artificial Sequence: Synthetic oligonucleotide
agagguugcacugacugac

SEQ ID NO: 748868 - RNA, 19 nt, Artificial Sequence
  Description of Artificial Sequence: Synthetic oligonucleotide
aauuccgacaauaucugca

SEQ ID NO: 748869 - RNA, 19 nt, Artificial Sequence
  Description of Artificial Sequence: Synthetic oligonucleotide
ugauucaggugugagaaca

SEQ ID NO: 748870 - RNA, 19 nt, Artificial Sequence
  Description of Artificial Sequence: Synthetic oligonucleotide
auuccgacaauaucugcag

SEQ ID NO: 748871 - RNA, 19 nt, Artificial Sequence
  Description of Artificial Sequence: Synthetic oligonucleotide
uguccauugaggcucccag

SEQ ID NO: 748872 - RNA, 19 nt, Artificial Sequence
  Description of Artificial Sequence: Synthetic oligonucleotide
aacauucagggcuuccaug

SEQ ID NO: 748873 - RNA, 19 nt, Artificial Sequence
  Description of Artificial Sequence: Synthetic oligonucleotide
gacuuggacaucuugcaac

SEQ ID NO: 748874 - RNA, 19 nt, Artificial Sequence
  Description of Artificial Sequence: Synthetic oligonucleotide
ucaaaguaagccucugacu

SEQ ID NO: 748875 - RNA, 19 nt, Artificial Sequence
  Description of Artificial Sequence: Synthetic oligonucleotide
guaaacaugaccagggcac

SEQ ID NO: 748876 - RNA, 19 nt, Artificial Sequence
  Description of Artificial Sequence: Synthetic oligonucleotide
ucucggucuaccaacuuca

SEQ ID NO: 748877 - RNA, 19 nt, Artificial Sequence
  Description of Artificial Sequence: Synthetic oligonucleotide
aaaguaagccucugacugu

SEQ ID NO: 748878 - RNA, 19 nt, Artificial Sequence
  Description of Artificial Sequence: Synthetic oligonucleotide
uguagaaccucaaggacuu

SEQ ID NO: 748879 - RNA, 19 nt, Artificial Sequence
  Description of Artificial Sequence: Synthetic oligonucleotide
uguggaaacucuucuuccc

SEQ ID NO: 748880 - RNA, 19 nt, Artificial Sequence
  Description of Artificial Sequence: Synthetic oligonucleotide
uguugcaggaauaguccag

SEQ ID NO: 748881 - RNA, 19 nt, Artificial Sequence
  Description of Artificial Sequence: Synthetic oligonucleotide
auagaauugucagucaccu

SEQ ID NO: 748882 - RNA, 19 nt, Artificial Sequence
  Description of Artificial Sequence: Synthetic oligonucleotide
ugacccauuugaagcauag

SEQ ID NO: 748883 - RNA, 19 nt, Artificial Sequence
  Description of Artificial Sequence: Synthetic oligonucleotide
uccagacggguccagagug

SEQ ID NO: 748884 - RNA, 19 nt, Artificial Sequence
  Description of Artificial Sequence: Synthetic oligonucleotide
uucaaaccgaaccccaagu

SEQ ID NO: 748885 - RNA, 19 nt, Artificial Sequence
  Description of Artificial Sequence: Synthetic oligonucleotide
aaguagacugacccauuug

SEQ ID NO: 748886 - RNA, 19 nt, Artificial Sequence
  Description of Artificial Sequence: Synthetic oligonucleotide
cacugacugaccaaagccc

SEQ ID NO: 748887 - RNA, 19 nt, Artificial Sequence
  Description of Artificial Sequence: Synthetic oligonucleotide
guuccagugguucuguggc

SEQ ID NO: 748888 - RNA, 19 nt, Artificial Sequence
  Description of Artificial Sequence: Synthetic oligonucleotide
acuugucgguuucugacag

SEQ ID NO: 748889 - RNA, 19 nt, Artificial Sequence
  Description of Artificial Sequence: Synthetic oligonucleotide
cuugcaaccugcuaucguc

SEQ ID NO: 748890 - RNA, 19 nt, Artificial Sequence
  Description of Artificial Sequence: Synthetic oligonucleotide
uccgacaauaucugcaggu

SEQ ID NO: 748891 - RNA, 19 nt, Artificial Sequence
  Description of Artificial Sequence: Synthetic oligonucleotide
aaaguagacugacccauuu

SEQ ID NO: 748892 - RNA, 19 nt, Artificial Sequence
  Description of Artificial Sequence: Synthetic oligonucleotide
ucaaaguagacugacccau

SEQ ID NO: 748893 - RNA, 19 nt, Artificial Sequence
  Description of Artificial Sequence: Synthetic oligonucleotide
ugagguacauggcaaugcu

SEQ ID NO: 748894 - RNA, 19 nt, Artificial Sequence
  Description of Artificial Sequence: Synthetic oligonucleotide
caagagugcaugaggaaug

SEQ ID NO: 748895 - RNA, 19 nt, Artificial Sequence
  Description of Artificial Sequence: Synthetic oligonucleotide
guagguguggccacaaucc

SEQ ID NO: 748896 - RNA, 19 nt, Artificial Sequence
  Description of Artificial Sequence: Synthetic oligonucleotide
agguauacugcugggcugc

SEQ ID NO: 748897 - RNA, 19 nt, Artificial Sequence
  Description of Artificial Sequence: Synthetic oligonucleotide
cuggcagguauacugcugg

SEQ ID NO: 748898 - RNA, 19 nt, Artificial Sequence
  Description of Artificial Sequence: Synthetic oligonucleotide
cacauaaggcuucaugaac

SEQ ID NO: 748899 - RNA, 19 nt, Artificial Sequence
  Description of Artificial Sequence: Synthetic oligonucleotide
uccauaguguugcaggaau

SEQ ID NO: 748900 - RNA, 19 nt, Artificial Sequence
  Description of Artificial Sequence: Synthetic oligonucleotide
cauaguguugcaggaauag

SEQ ID NO: 748901 - RNA, 19 nt, Artificial Sequence
  Description of Artificial Sequence: Synthetic oligonucleotide
gagagcguuucucacugag

SEQ ID NO: 748902 - RNA, 19 nt, Artificial Sequence
  Description of Artificial Sequence: Synthetic oligonucleotide
gaaccccaaguucaggcag

SEQ ID NO: 748903 - RNA, 19 nt, Artificial Sequence
  Description of Artificial Sequence: Synthetic oligonucleotide
uuggacgaaguccacaauu

SEQ ID NO: 748904 - RNA, 19 nt, Artificial Sequence
  Description of Artificial Sequence: Synthetic oligonucleotide
cagaacuugggcaguuugg

SEQ ID NO: 748905 - RNA, 19 nt, Artificial Sequence
  Description of Artificial Sequence: Synthetic oligonucleotide
ucuuuaaggcgucuuugau

SEQ ID NO: 748906 - RNA, 19 nt, Artificial Sequence
  Description of Artificial Sequence: Synthetic oligonucleotide
gcugagugcuucuuuaagg

SEQ ID NO: 748907 - RNA, 19 nt, Artificial Sequence
  Description of Artificial Sequence: Synthetic oligonucleotide
aaguaagccucugacugug

SEQ ID NO: 748908 - RNA, 19 nt, Artificial Sequence
  Description of Artificial Sequence: Synthetic oligonucleotide
uagcggagcacucuaugug

SEQ ID NO: 748909 - RNA, 19 nt, Artificial Sequence
  Description of Artificial Sequence: Synthetic oligonucleotide
gaauuccgacaauaucugc

SEQ ID NO: 748910 - RNA, 19 nt, Artificial Sequence
  Description of Artificial Sequence: Synthetic oligonucleotide
gucuacaggggcucggagg

SEQ ID NO: 748911 - RNA, 19 nt, Artificial Sequence
  Description of Artificial Sequence: Synthetic oligonucleotide
uuccgacaauaucugcagg

SEQ ID NO: 748912 - RNA, 19 nt, Artificial Sequence
  Description of Artificial Sequence: Synthetic oligonucleotide
agccauaaccauuguccac

SEQ ID NO: 748913 - RNA, 19 nt, Artificial Sequence
  Description of Artificial Sequence: Synthetic oligonucleotide
uagccauaaccauugucca

SEQ ID NO: 748914 - RNA, 19 nt, Artificial Sequence
  Description of Artificial Sequence: Synthetic oligonucleotide
aggaauaguccaguguguc

SEQ ID NO: 748915 - RNA, 19 nt, Artificial Sequence
  Description of Artificial Sequence: Synthetic oligonucleotide
uggaauacuugucgguuuc

SEQ ID NO: 748916 - RNA, 19 nt, Artificial Sequence
  Description of Artificial Sequence: Synthetic oligonucleotide
acuuggaauacuugucggu

SEQ ID NO: 748917 - RNA, 19 nt, Artificial Sequence
  Description of Artificial Sequence: Synthetic oligonucleotide
aggcggucagaggagaugc

SEQ ID NO: 748918 - RNA, 19 nt, Artificial Sequence
  Description of Artificial Sequence: Synthetic oligonucleotide
cagcaauaccugcacacgg

SEQ ID NO: 748919 - RNA, 19 nt, Artificial Sequence
  Description of Artificial Sequence: Synthetic oligonucleotide
uaaggcgucuuugauggug

SEQ ID NO: 748920 - RNA, 19 nt, Artificial Sequence
  Description of Artificial Sequence: Synthetic oligonucleotide
uacggagugcuuuucacua

SEQ ID NO: 748921 - RNA, 19 nt, Artificial Sequence
  Description of Artificial Sequence: Synthetic oligonucleotide
caaaccgaaccccaaguuc

SEQ ID NO: 748922 - RNA, 19 nt, Artificial Sequence
  Description of Artificial Sequence: Synthetic oligonucleotide
auagcggagcacucuaugu

SEQ ID NO: 748923 - RNA, 19 nt, Artificial Sequence
  Description of Artificial Sequence: Synthetic oligonucleotide
agugugucuuuccaagagu

SEQ ID NO: 748924 - RNA, 19 nt, Artificial Sequence
  Description of Artificial Sequence: Synthetic oligonucleotide
ucuaugugccauccuggac

SEQ ID NO: 748925 - RNA, 19 nt, Artificial Sequence
  Description of Artificial Sequence: Synthetic oligonucleotide
uacuugucgguuucugaca

SEQ ID NO: 748926 - RNA, 19 nt, Artificial Sequence
  Description of Artificial Sequence: Synthetic oligonucleotide
cauacggagugcuuuucac

SEQ ID NO: 748927 - RNA, 19 nt, Artificial Sequence
  Description of Artificial Sequence: Synthetic oligonucleotide
agugcaugaggaaugccag

SEQ ID NO: 748928 - RNA, 19 nt, Artificial Sequence
  Description of Artificial Sequence: Synthetic oligonucleotide
uggacgaaguccacaauuu

SEQ ID NO: 748929 - RNA, 19 nt, Artificial Sequence
  Description of Artificial Sequence: Synthetic oligonucleotide
ggaagcggaggucaaaccc

SEQ ID NO: 748930 - RNA, 19 nt, Artificial Sequence
  Description of Artificial Sequence: Synthetic oligonucleotide
uucuggcacauacucgcug

SEQ ID NO: 748931 - RNA, 19 nt, Artificial Sequence
  Description of Artificial Sequence: Synthetic oligonucleotide
uccaugacagugcgggugu

SEQ ID NO: 748932 - RNA, 19 nt, Artificial Sequence
  Description of Artificial Sequence: Synthetic oligonucleotide
agcguuucucacugaggcg

SEQ ID NO: 748933 - RNA, 19 nt, Artificial Sequence
  Description of Artificial Sequence: Synthetic oligonucleotide
cagugugucuuuccaagag

SEQ ID NO: 748934 - RNA, 19 nt, Artificial Sequence
  Description of Artificial Sequence: Synthetic oligonucleotide
aauugucagucaccucacu

SEQ ID NO: 748935 - RNA, 19 nt, Artificial Sequence
  Description of Artificial Sequence: Synthetic oligonucleotide
auacggagugcuuuucacu

SEQ ID NO: 748936 - RNA, 19 nt, Artificial Sequence
  Description of Artificial Sequence: Synthetic oligonucleotide
aaacucauucaugaacuuu

SEQ ID NO: 748937 - RNA, 19 nt, Artificial Sequence
  Description of Artificial Sequence: Synthetic oligonucleotide
ucaaaccgaaccccaaguu

SEQ ID NO: 748938 - RNA, 19 nt, Artificial Sequence
  Description of Artificial Sequence: Synthetic oligonucleotide
gucgauguuaucacauaag

SEQ ID NO: 748939 - RNA, 19 nt, Artificial Sequence
  Description of Artificial Sequence: Synthetic oligonucleotide
ucuugcaaccugcuaucgu

SEQ ID NO: 748940 - RNA, 19 nt, Artificial Sequence
  Description of Artificial Sequence: Synthetic oligonucleotide
uugcaaccugcuaucguca

SEQ ID NO: 748941 - RNA, 19 nt, Artificial Sequence
  Description of Artificial Sequence: Synthetic oligonucleotide
cucuauggccccaaagauc

SEQ ID NO: 748942 - RNA, 19 nt, Artificial Sequence
  Description of Artificial Sequence: Synthetic oligonucleotide
uaaggugucucggucuacc

SEQ ID NO: 748943 - RNA, 19 nt, Artificial Sequence
  Description of Artificial Sequence: Synthetic oligonucleotide
guaagccucugacugugcc

SEQ ID NO: 748944 - RNA, 19 nt, Artificial Sequence
  Description of Artificial Sequence: Synthetic oligonucleotide
gaauacuugucgguuucug

SEQ ID NO: 748945 - RNA, 19 nt, Artificial Sequence
  Description of Artificial Sequence: Synthetic oligonucleotide
ugucuuuccaagagugcau

SEQ ID NO: 748946 - RNA, 19 nt, Artificial Sequence
  Description of Artificial Sequence: Synthetic oligonucleotide
uucucacugaggcggucag

SEQ ID NO: 748947 - RNA, 19 nt, Artificial Sequence
  Description of Artificial Sequence: Synthetic oligonucleotide
caaagucguugggagagcg

SEQ ID NO: 748948 - RNA, 19 nt, Artificial Sequence
  Description of Artificial Sequence: Synthetic oligonucleotide
acgaaguccacaauuucug

SEQ ID NO: 748949 - RNA, 19 nt, Artificial Sequence
  Description of Artificial Sequence: Synthetic oligonucleotide
agugcauagccuguuccag

SEQ ID NO: 748950 - RNA, 19 nt, Artificial Sequence
  Description of Artificial Sequence: Synthetic oligonucleotide
acuccauaguguugcagga

SEQ ID NO: 748951 - RNA, 19 nt, Artificial Sequence
  Description of Artificial Sequence: Synthetic oligonucleotide
agaacuugggcaguuugga

SEQ ID NO: 748952 - RNA, 19 nt, Artificial Sequence
  Description of Artificial Sequence: Synthetic oligonucleotide
gcuaucgucagguggcccg

SEQ ID NO: 748953 - RNA, 19 nt, Artificial Sequence
  Description of Artificial Sequence: Synthetic oligonucleotide
aaguucaggcaggauguca

SEQ ID NO: 748954 - RNA, 19 nt, Artificial Sequence
  Description of Artificial Sequence: Synthetic oligonucleotide
gagggagaacauucagggc

SEQ ID NO: 748955 - RNA, 19 nt, Artificial Sequence
  Description of Artificial Sequence: Synthetic oligonucleotide
ccugcuaucgucagguggc

SEQ ID NO: 748956 - RNA, 19 nt, Artificial Sequence
  Description of Artificial Sequence: Synthetic oligonucleotide
ugcaaccugcuaucgucag

SEQ ID NO: 748957 - RNA, 19 nt, Artificial Sequence
  Description of Artificial Sequence: Synthetic oligonucleotide
guugggagagcguuucuca

SEQ ID NO: 748958 - RNA, 19 nt, Artificial Sequence
  Description of Artificial Sequence: Synthetic oligonucleotide
aguaccugacccagcaguc

SEQ ID NO: 748959 - RNA, 19 nt, Artificial Sequence
  Description of Artificial Sequence: Synthetic oligonucleotide
cauagcggagcacucuaug

SEQ ID NO: 748960 - RNA, 19 nt, Artificial Sequence
  Description of Artificial Sequence: Synthetic oligonucleotide
cagccagucagagagcaag

SEQ ID NO: 748961 - RNA, 19 nt, Artificial Sequence
  Description of Artificial Sequence: Synthetic oligonucleotide
agugcagacuccauagugu

SEQ ID NO: 748962 - RNA, 19 nt, Artificial Sequence
  Description of Artificial Sequence: Synthetic oligonucleotide
gacagugcgggugucgaug

SEQ ID NO: 748963 - RNA, 19 nt, Artificial Sequence
  Description of Artificial Sequence: Synthetic oligonucleotide
uuggaauacuugucgguuu

SEQ ID NO: 748964 - RNA, 19 nt, Artificial Sequence
  Description of Artificial Sequence: Synthetic oligonucleotide
aagucguugggagagcguu

SEQ ID NO: 748965 - RNA, 19 nt, Artificial Sequence
  Description of Artificial Sequence: Synthetic oligonucleotide
uuccucacaccuucucuga

SEQ ID NO: 748966 - RNA, 19 nt, Artificial Sequence
  Description of Artificial Sequence: Synthetic oligonucleotide
gagugcauagccuguucca

SEQ ID NO: 748967 - RNA, 19 nt, Artificial Sequence
  Description of Artificial Sequence: Synthetic oligonucleotide
gcguuucucacugaggcgg

SEQ ID NO: 748968 - RNA, 19 nt, Artificial Sequence
  Description of Artificial Sequence: Synthetic oligonucleotide
aacccuccgccaugaaugu

SEQ ID NO: 748969 - RNA, 19 nt, Artificial Sequence
  Description of Artificial Sequence: Synthetic oligonucleotide
uugggagagcguuucucac

SEQ ID NO: 748970 - RNA, 19 nt, Artificial Sequence
  Description of Artificial Sequence: Synthetic oligonucleotide
gcaccagcuucccauacgg

SEQ ID NO: 748971 - RNA, 19 nt, Artificial Sequence
  Description of Artificial Sequence: Synthetic oligonucleotide
aagcggaggucaaacccuc

SEQ ID NO: 748972 - RNA, 19 nt, Artificial Sequence
  Description of Artificial Sequence: Synthetic oligonucleotide
aguaaggugucucggucua

SEQ ID NO: 748973 - RNA, 19 nt, Artificial Sequence
  Description of Artificial Sequence: Synthetic oligonucleotide
ggugucucggucuaccaac

SEQ ID NO: 748974 - RNA, 19 nt, Artificial Sequence
  Description of Artificial Sequence: Synthetic oligonucleotide
gaagcauagccauaaccau

SEQ ID NO: 748975 - RNA, 19 nt, Artificial Sequence
  Description of Artificial Sequence: Synthetic oligonucleotide
gucguggguaggcagacca

SEQ ID NO: 748976 - RNA, 19 nt, Artificial Sequence
  Description of Artificial Sequence: Synthetic oligonucleotide
uuucuggcacauacucgcu

SEQ ID NO: 748977 - RNA, 19 nt, Artificial Sequence
  Description of Artificial Sequence: Synthetic oligonucleotide
gaauugucagucaccucac

SEQ ID NO: 748978 - RNA, 19 nt, Artificial Sequence
  Description of Artificial Sequence: Synthetic oligonucleotide
ucuuuuggacgaaguccac

SEQ ID NO: 748979 - RNA, 19 nt, Artificial Sequence
  Description of Artificial Sequence: Synthetic oligonucleotide
ccaccuguagaauccagcc

SEQ ID NO: 748980 - RNA, 19 nt, Artificial Sequence
  Description of Artificial Sequence: Synthetic oligonucleotide
uauggccccaaagaucuuc

SEQ ID NO: 748981 - RNA, 19 nt, Artificial Sequence
  Description of Artificial Sequence: Synthetic oligonucleotide
acggagugcuuuucacuag

SEQ ID NO: 748982 - RNA, 19 nt, Artificial Sequence
  Description of Artificial Sequence: Synthetic oligonucleotide
aaggcgucuuugaugguga

SEQ ID NO: 748983 - RNA, 19 nt, Artificial Sequence
  Description of Artificial Sequence: Synthetic oligonucleotide
agguugcacugacugacca

SEQ ID NO: 748984 - RNA, 19 nt, Artificial Sequence
  Description of Artificial Sequence: Synthetic oligonucleotide
agagcguuucucacugagg

SEQ ID NO: 748985 - RNA, 19 nt, Artificial Sequence
  Description of Artificial Sequence: Synthetic oligonucleotide
ugacugaccaaagcccgca

SEQ ID NO: 748986 - RNA, 19 nt, Artificial Sequence
  Description of Artificial Sequence: Synthetic oligonucleotide
cagguauacugcugggcug

SEQ ID NO: 748987 - RNA, 19 nt, Artificial Sequence
  Description of Artificial Sequence: Synthetic oligonucleotide
uuuggacgaaguccacaau

SEQ ID NO: 748988 - RNA, 19 nt, Artificial Sequence
  Description of Artificial Sequence: Synthetic oligonucleotide
cuuggaggccuuccacagg

SEQ ID NO: 748989 - RNA, 19 nt, Artificial Sequence
  Description of Artificial Sequence: Synthetic oligonucleotide
cugacugaccaaagcccgc

SEQ ID NO: 748990 - RNA, 19 nt, Artificial Sequence
  Description of Artificial Sequence: Synthetic oligonucleotide
gacgacccuuuccccaggg

SEQ ID NO: 748991 - RNA, 19 nt, Artificial Sequence
  Description of Artificial Sequence: Synthetic oligonucleotide
auaguguugcaggaauagu

SEQ ID NO: 748992 - RNA, 19 nt, Artificial Sequence
  Description of Artificial Sequence: Synthetic oligonucleotide
guggaaacucuucuuccca

SEQ ID NO: 748993 - RNA, 19 nt, Artificial Sequence
  Description of Artificial Sequence: Synthetic oligonucleotide
acaauuucuggcacauacu

SEQ ID NO: 748994 - RNA, 19 nt, Artificial Sequence
  Description of Artificial Sequence: Synthetic oligonucleotide
uccgccaugaauguccauu

SEQ ID NO: 748995 - RNA, 19 nt, Artificial Sequence
  Description of Artificial Sequence: Synthetic oligonucleotide
gaggucaaacccuccgcca

SEQ ID NO: 748996 - RNA, 19 nt, Artificial Sequence
  Description of Artificial Sequence: Synthetic oligonucleotide
gacgaaguccacaauuucu

SEQ ID NO: 748997 - RNA, 19 nt, Artificial Sequence
  Description of Artificial Sequence: Synthetic oligonucleotide
ccagucagagagcaagucc

SEQ ID NO: 748998 - RNA, 19 nt, Artificial Sequence
  Description of Artificial Sequence: Synthetic oligonucleotide
ugccaccuguagaauccag

SEQ ID NO: 748999 - RNA, 19 nt, Artificial Sequence
  Description of Artificial Sequence: Synthetic oligonucleotide
acagugcgggugucgaugu

SEQ ID NO: 749000 - RNA, 19 nt, Artificial Sequence
  Description of Artificial Sequence: Synthetic oligonucleotide
cucucgggcaaucuuccuc

SEQ ID NO: 749001 - RNA, 19 nt, Artificial Sequence
  Description of Artificial Sequence: Synthetic oligonucleotide
guugcacugacugaccaaa

SEQ ID NO: 749002 - RNA, 19 nt, Artificial Sequence
  Description of Artificial Sequence: Synthetic oligonucleotide
uucucugaauuccgacaau

SEQ ID NO: 749003 - RNA, 19 nt, Artificial Sequence
  Description of Artificial Sequence: Synthetic oligonucleotide
acggguccagagugcauag

SEQ ID NO: 749004 - RNA, 19 nt, Artificial Sequence
  Description of Artificial Sequence: Synthetic oligonucleotide
aaccugcuaucgucaggug

SEQ ID NO: 749005 - RNA, 19 nt, Artificial Sequence
  Description of Artificial Sequence: Synthetic oligonucleotide
aaccgaaccccaaguucag

SEQ ID NO: 749006 - RNA, 19 nt, Artificial Sequence
  Description of Artificial Sequence: Synthetic oligonucleotide
ucgucagguggcccgugug

SEQ ID NO: 749007 - RNA, 19 nt, Artificial Sequence
  Description of Artificial Sequence: Synthetic oligonucleotide
ggucagaggagaugcucag

SEQ ID NO: 749008 - RNA, 19 nt, Artificial Sequence
  Description of Artificial Sequence: Synthetic oligonucleotide
ugccacucugccugauuca

SEQ ID NO: 749009 - RNA, 19 nt, Artificial Sequence
  Description of Artificial Sequence: Synthetic oligonucleotide
gaauguccauugaggcucc

SEQ ID NO: 749010 - RNA, 19 nt, Artificial Sequence
  Description of Artificial Sequence: Synthetic oligonucleotide
aggacaucaggagggagaa

SEQ ID NO: 749011 - RNA, 19 nt, Artificial Sequence
  Description of Artificial Sequence: Synthetic oligonucleotide
aaagucguugggagagcgu

SEQ ID NO: 749012 - RNA, 19 nt, Artificial Sequence
  Description of Artificial Sequence: Synthetic oligonucleotide
ucgggcaaucuuccucaca

SEQ ID NO: 749013 - RNA, 19 nt, Artificial Sequence
  Description of Artificial Sequence: Synthetic oligonucleotide
cucuaugugccauccugga

SEQ ID NO: 749014 - RNA, 19 nt, Artificial Sequence
  Description of Artificial Sequence: Synthetic oligonucleotide
ucagugucguggguaggca

SEQ ID NO: 749015 - RNA, 19 nt, Artificial Sequence
  Description of Artificial Sequence: Synthetic oligonucleotide
guacaguuucuccugggcu

SEQ ID NO: 749016 - RNA, 19 nt, Artificial Sequence
  Description of Artificial Sequence: Synthetic oligonucleotide
cggucuaccaacuucacca

SEQ ID NO: 749017 - RNA, 19 nt, Artificial Sequence
  Description of Artificial Sequence: Synthetic oligonucleotide
gcaguuuggagaaaauaga

SEQ ID NO: 749018 - RNA, 19 nt, Artificial Sequence
  Description of Artificial Sequence: Synthetic oligonucleotide
gacccauuugaagcauagc

SEQ ID NO: 749019 - RNA, 19 nt, Artificial Sequence
  Description of Artificial Sequence: Synthetic oligonucleotide
ccgaaccccaaguucaggc

SEQ ID NO: 749020 - RNA, 19 nt, Artificial Sequence
  Description of Artificial Sequence: Synthetic oligonucleotide
gggugcaaucuucaucuug

SEQ ID NO: 749021 - RNA, 19 nt, Artificial Sequence
  Description of Artificial Sequence: Synthetic oligonucleotide
cccauuugaagcauagcca

SEQ ID NO: 749022 - RNA, 19 nt, Artificial Sequence
  Description of Artificial Sequence: Synthetic oligonucleotide
ggccccaaagaucuucagc

SEQ ID NO: 749023 - RNA, 19 nt, Artificial Sequence
  Description of Artificial Sequence: Synthetic oligonucleotide
ugggcaguuuggagaaaau

SEQ ID NO: 749024 - RNA, 19 nt, Artificial Sequence
  Description of Artificial Sequence: Synthetic oligonucleotide
augacagugcgggugucga

SEQ ID NO: 749025 - RNA, 19 nt, Artificial Sequence
  Description of Artificial Sequence: Synthetic oligonucleotide
gaagcggaggucaaacccu

SEQ ID NO: 749026 - RNA, 19 nt, Artificial Sequence
  Description of Artificial Sequence: Synthetic oligonucleotide
uggcugugucaaaguagac

SEQ ID NO: 749027 - RNA, 19 nt, Artificial Sequence
  Description of Artificial Sequence: Synthetic oligonucleotide
cauucagggcuuccauguc

SEQ ID NO: 749028 - RNA, 19 nt, Artificial Sequence
  Description of Artificial Sequence: Synthetic oligonucleotide
gucuucaaaccgaacccca

SEQ ID NO: 749029 - RNA, 19 nt, Artificial Sequence
  Description of Artificial Sequence: Synthetic oligonucleotide
ugccauagcggagcacucu

SEQ ID NO: 749030 - RNA, 19 nt, Artificial Sequence
  Description of Artificial Sequence: Synthetic oligonucleotide
gaacauucagggcuuccau

SEQ ID NO: 749031 - RNA, 19 nt, Artificial Sequence
  Description of Artificial Sequence: Synthetic oligonucleotide
acauacucgcugacccggg

SEQ ID NO: 749032 - RNA, 19 nt, Artificial Sequence
  Description of Artificial Sequence: Synthetic oligonucleotide
uuaaggcgucuuugauggu

SEQ ID NO: 749033 - RNA, 19 nt, Artificial Sequence
  Description of Artificial Sequence: Synthetic oligonucleotide
cucggucuaccaacuucac

SEQ ID NO: 749034 - RNA, 19 nt, Artificial Sequence
  Description of Artificial Sequence: Synthetic oligonucleotide
aggcaggaugucaucccgg

SEQ ID NO: 749035 - RNA, 19 nt, Artificial Sequence
  Description of Artificial Sequence: Synthetic oligonucleotide
gaagugcagacuccauagu

SEQ ID NO: 749036 - RNA, 19 nt, Artificial Sequence
  Description of Artificial Sequence: Synthetic oligonucleotide
ugcacacggcuuucuacuu

SEQ ID NO: 749037 - RNA, 19 nt, Artificial Sequence
  Description of Artificial Sequence: Synthetic oligonucleotide
ggacgaaguccacaauuuc

SEQ ID NO: 749038 - RNA, 19 nt, Artificial Sequence
  Description of Artificial Sequence: Synthetic oligonucleotide
ggcaaucuuccucacaccu

SEQ ID NO: 749039 - RNA, 19 nt, Artificial Sequence
  Description of Artificial Sequence: Synthetic oligonucleotide
ucucucgggcaaucuuccu

SEQ ID NO: 749040 - RNA, 19 nt, Artificial Sequence
  Description of Artificial Sequence: Synthetic oligonucleotide
guagacugacccauuugaa

SEQ ID NO: 749041 - RNA, 19 nt, Artificial Sequence
  Description of Artificial Sequence: Synthetic oligonucleotide
accgaaccccaaguucagg

SEQ ID NO: 749042 - RNA, 19 nt, Artificial Sequence
  Description of Artificial Sequence: Synthetic oligonucleotide
ggucuaccaacuucaccac

SEQ ID NO: 749043 - RNA, 19 nt, Artificial Sequence
  Description of Artificial Sequence: Synthetic oligonucleotide
ugcuaucgucagguggccc

SEQ ID NO: 749044 - RNA, 19 nt, Artificial Sequence
  Description of Artificial Sequence: Synthetic oligonucleotide
agcggaggucaaacccucc

SEQ ID NO: 749045 - RNA, 19 nt, Artificial Sequence
  Description of Artificial Sequence: Synthetic oligonucleotide
gggaagcggaggucaaacc

SEQ ID NO: 749046 - RNA, 19 nt, Artificial Sequence
  Description of Artificial Sequence: Synthetic oligonucleotide
gcauagccuguuccagugg

SEQ ID NO: 749047 - RNA, 19 nt, Artificial Sequence
  Description of Artificial Sequence: Synthetic oligonucleotide
caccuguagaauccagcca

SEQ ID NO: 749048 - RNA, 19 nt, Artificial Sequence
  Description of Artificial Sequence: Synthetic oligonucleotide
ucguugggagagcguuucu

SEQ ID NO: 749049 - RNA, 19 nt, Artificial Sequence
  Description of Artificial Sequence: Synthetic oligonucleotide
aucgucagguggcccgugu

SEQ ID NO: 749050 - RNA, 19 nt, Artificial Sequence
  Description of Artificial Sequence: Synthetic oligonucleotide
gucguugggagagcguuuc

SEQ ID NO: 749051 - RNA, 19 nt, Artificial Sequence
  Description of Artificial Sequence: Synthetic oligonucleotide
ucgcugacccgggucagga

SEQ ID NO: 749052 - RNA, 19 nt, Artificial Sequence
  Description of Artificial Sequence: Synthetic oligonucleotide
gguucuguggcaagcuuca

SEQ ID NO: 749053 - RNA, 19 nt, Artificial Sequence
  Description of Artificial Sequence: Synthetic oligonucleotide
gcagguauacugcugggcu

SEQ ID NO: 749054 - RNA, 19 nt, Artificial Sequence
  Description of Artificial Sequence: Synthetic oligonucleotide
agugcgggugucgauguua

SEQ ID NO: 749055 - RNA, 19 nt, Artificial Sequence
  Description of Artificial Sequence: Synthetic oligonucleotide
aacaucucacugggugcaa

SEQ ID NO: 749056 - RNA, 19 nt, Artificial Sequence
  Description of Artificial Sequence: Synthetic oligonucleotide
augucuacaggggcucgga

SEQ ID NO: 749057 - RNA, 19 nt, Artificial Sequence
  Description of Artificial Sequence: Synthetic oligonucleotide
ucaaacccuccgccaugaa

SEQ ID NO: 749058 - RNA, 19 nt, Artificial Sequence
  Description of Artificial Sequence: Synthetic oligonucleotide
cacugagcuguagaaccuc

SEQ ID NO: 749059 - RNA, 19 nt, Artificial Sequence
  Description of Artificial Sequence: Synthetic oligonucleotide
auggccccaaagaucuuca

SEQ ID NO: 749060 - RNA, 19 nt, Artificial Sequence
  Description of Artificial Sequence: Synthetic oligonucleotide
caguaaggugucucggucu

SEQ ID NO: 749061 - RNA, 19 nt, Artificial Sequence
  Description of Artificial Sequence: Synthetic oligonucleotide
ugucguggguaggcagacc

SEQ ID NO: 749062 - RNA, 19 nt, Artificial Sequence
  Description of Artificial Sequence: Synthetic oligonucleotide
ccgccaugaauguccauug

SEQ ID NO: 749063 - RNA, 19 nt, Artificial Sequence
  Description of Artificial Sequence: Synthetic oligonucleotide
cugcuaucgucagguggcc

SEQ ID NO: 749064 - RNA, 19 nt, Artificial Sequence
  Description of Artificial Sequence: Synthetic oligonucleotide
gccaccuguagaauccagc

SEQ ID NO: 749065 - RNA, 19 nt, Artificial Sequence
  Description of Artificial Sequence: Synthetic oligonucleotide
cuuggaauacuugucgguu

SEQ ID NO: 749066 - RNA, 19 nt, Artificial Sequence
  Description of Artificial Sequence: Synthetic oligonucleotide
agcugccgagcugagugcu

SEQ ID NO: 749067 - RNA, 19 nt, Artificial Sequence
  Description of Artificial Sequence: Synthetic oligonucleotide
acgacccuuuccccaggga

SEQ ID NO: 749068 - RNA, 19 nt, Artificial Sequence
  Description of Artificial Sequence: Synthetic oligonucleotide
gucagguggcccgugugca

SEQ ID NO: 749069 - RNA, 19 nt, Artificial Sequence
  Description of Artificial Sequence: Synthetic oligonucleotide
ugccgagcugagugcuucu

SEQ ID NO: 749070 - RNA, 19 nt, Artificial Sequence
  Description of Artificial Sequence: Synthetic oligonucleotide
ccauuugaagcauagccau

SEQ ID NO: 749071 - RNA, 19 nt, Artificial Sequence
  Description of Artificial Sequence: Synthetic oligonucleotide
guauacugcugggcugcug

SEQ ID NO: 749072 - RNA, 19 nt, Artificial Sequence
  Description of Artificial Sequence: Synthetic oligonucleotide
gccugauucaggugugaga

SEQ ID NO: 749073 - RNA, 19 nt, Artificial Sequence
  Description of Artificial Sequence: Synthetic oligonucleotide
cucgggcaaucuuccucac

SEQ ID NO: 749074 - RNA, 19 nt, Artificial Sequence
  Description of Artificial Sequence: Synthetic oligonucleotide
gugucguggguaggcagac

SEQ ID NO: 749075 - RNA, 19 nt, Artificial Sequence
  Description of Artificial Sequence: Synthetic oligonucleotide
cugccgagcugagugcuuc

SEQ ID NO: 749076 - RNA, 19 nt, Artificial Sequence
  Description of Artificial Sequence: Synthetic oligonucleotide
acaucucacugggugcaau

SEQ ID NO: 749077 - RNA, 19 nt, Artificial Sequence
  Description of Artificial Sequence: Synthetic oligonucleotide
uaucgucagguggcccgug

SEQ ID NO: 749078 - RNA, 19 nt, Artificial Sequence
  Description of Artificial Sequence: Synthetic oligonucleotide
cccggagagcaucacugag

SEQ ID NO: 749079 - RNA, 19 nt, Artificial Sequence
  Description of Artificial Sequence: Synthetic oligonucleotide
accugcacacggcuuucua

SEQ ID NO: 749080 - RNA, 19 nt, Artificial Sequence
  Description of Artificial Sequence: Synthetic oligonucleotide
cagguugguuccaggccca

SEQ ID NO: 749081 - RNA, 19 nt, Artificial Sequence
  Description of Artificial Sequence: Synthetic oligonucleotide
ccagacggguccagagugc

SEQ ID NO: 749082 - RNA, 19 nt, Artificial Sequence
  Description of Artificial Sequence: Synthetic oligonucleotide
gaaccucaaggacuuucuu

SEQ ID NO: 749083 - RNA, 19 nt, Artificial Sequence
  Description of Artificial Sequence: Synthetic oligonucleotide
accccaaguucaggcagga

SEQ ID NO: 749084 - RNA, 19 nt, Artificial Sequence
  Description of Artificial Sequence: Synthetic oligonucleotide
gggugucgauguuaucaca

SEQ ID NO: 749085 - RNA, 19 nt, Artificial Sequence
  Description of Artificial Sequence: Synthetic oligonucleotide
cagacggguccagagugca

SEQ ID NO: 749086 - RNA, 19 nt, Artificial Sequence
  Description of Artificial Sequence: Synthetic oligonucleotide
ugggugcaaucuucaucuu

SEQ ID NO: 749087 - RNA, 19 nt, Artificial Sequence
  Description of Artificial Sequence: Synthetic oligonucleotide
ggagugugccugccauagc

SEQ ID NO: 749088 - RNA, 19 nt, Artificial Sequence
  Description of Artificial Sequence: Synthetic oligonucleotide
caaacccuccgccaugaau

SEQ ID NO: 749089 - RNA, 19 nt, Artificial Sequence
  Description of Artificial Sequence: Synthetic oligonucleotide
guugggccuccuccuuuca

SEQ ID NO: 749090 - RNA, 19 nt, Artificial Sequence
  Description of Artificial Sequence: Synthetic oligonucleotide
agagcccgguugggccucc

SEQ ID NO: 749091 - RNA, 19 nt, Artificial Sequence
  Description of Artificial Sequence: Synthetic oligonucleotide
acccuccgccaugaauguc

SEQ ID NO: 749092 - RNA, 19 nt, Artificial Sequence
  Description of Artificial Sequence: Synthetic oligonucleotide
agguggcccgugugcaaaa

SEQ ID NO: 749093 - RNA, 19 nt, Artificial Sequence
  Description of Artificial Sequence: Synthetic oligonucleotide
guuucucacugaggcgguc

SEQ ID NO: 749094 - RNA, 19 nt, Artificial Sequence
  Description of Artificial Sequence: Synthetic oligonucleotide
auagccuguuccagugguu

SEQ ID NO: 749095 - RNA, 19 nt, Artificial Sequence
  Description of Artificial Sequence: Synthetic oligonucleotide
agucguugggagagcguuu

SEQ ID NO: 749096 - RNA, 19 nt, Artificial Sequence
  Description of Artificial Sequence: Synthetic oligonucleotide
gccagucagagagcaaguc

SEQ ID NO: 749097 - RNA, 19 nt, Artificial Sequence
  Description of Artificial Sequence: Synthetic oligonucleotide
gccauagcggagcacucua

SEQ ID NO: 749098 - RNA, 19 nt, Artificial Sequence
  Description of Artificial Sequence: Synthetic oligonucleotide
caucccggagagcaucacu

SEQ ID NO: 749099 - RNA, 19 nt, Artificial Sequence
  Description of Artificial Sequence: Synthetic oligonucleotide
augucaucccggagagcau

SEQ ID NO: 749100 - RNA, 19 nt, Artificial Sequence
  Description of Artificial Sequence: Synthetic oligonucleotide
caauaccugcacacggcuu

SEQ ID NO: 749101 - RNA, 19 nt, Artificial Sequence
  Description of Artificial Sequence: Synthetic oligonucleotide
cggucagaggagaugcuca

SEQ ID NO: 749102 - RNA, 19 nt, Artificial Sequence
  Description of Artificial Sequence: Synthetic oligonucleotide
ccauaguguugcaggaaua

SEQ ID NO: 749103 - RNA, 19 nt, Artificial Sequence
  Description of Artificial Sequence: Synthetic oligonucleotide
cauacucgcugacccgggu

SEQ ID NO: 749104 - RNA, 19 nt, Artificial Sequence
  Description of Artificial Sequence: Synthetic oligonucleotide
agcaugcgggugagguaca

SEQ ID NO: 749105 - RNA, 19 nt, Artificial Sequence
  Description of Artificial Sequence: Synthetic oligonucleotide
cgaaccccaaguucaggca

SEQ ID NO: 749106 - RNA, 19 nt, Artificial Sequence
  Description of Artificial Sequence: Synthetic oligonucleotide
caggagugugccugccaua

SEQ ID NO: 749107 - RNA, 19 nt, Artificial Sequence
  Description of Artificial Sequence: Synthetic oligonucleotide
ccugccauagcggagcacu

SEQ ID NO: 749108 - RNA, 19 nt, Artificial Sequence
  Description of Artificial Sequence: Synthetic oligonucleotide
ggcagaccauuuucaucaa

SEQ ID NO: 749109 - RNA, 19 nt, Artificial Sequence
  Description of Artificial Sequence: Synthetic oligonucleotide
ccaagagugcaugaggaau

SEQ ID NO: 749110 - RNA, 19 nt, Artificial Sequence
  Description of Artificial Sequence: Synthetic oligonucleotide
ugacccgggucaggacauc

SEQ ID NO: 749111 - RNA, 19 nt, Artificial Sequence
  Description of Artificial Sequence: Synthetic oligonucleotide
cauaaccauuguccacaau

SEQ ID NO: 749112 - RNA, 19 nt, Artificial Sequence
  Description of Artificial Sequence: Synthetic oligonucleotide
cagagcccgguugggccuc

SEQ ID NO: 749113 - RNA, 19 nt, Artificial Sequence
  Description of Artificial Sequence: Synthetic oligonucleotide
gcuucccauacggagugcu

SEQ ID NO: 749114 - RNA, 19 nt, Artificial Sequence
  Description of Artificial Sequence: Synthetic oligonucleotide
accugacccagcagucauu

SEQ ID NO: 749115 - RNA, 19 nt, Artificial Sequence
  Description of Artificial Sequence: Synthetic oligonucleotide
cuaucgucagguggcccgu

SEQ ID NO: 749116 - RNA, 19 nt, Artificial Sequence
  Description of Artificial Sequence: Synthetic oligonucleotide
ccgacaauaucugcaggua

SEQ ID NO: 749117 - RNA, 19 nt, Artificial Sequence
  Description of Artificial Sequence: Synthetic oligonucleotide
cccauacggagugcuuuuc

SEQ ID NO: 749118 - RNA, 19 nt, Artificial Sequence
  Description of Artificial Sequence: Synthetic oligonucleotide
gggagaacauucagggcuu

SEQ ID NO: 749119 - RNA, 19 nt, Artificial Sequence
  Description of Artificial Sequence: Synthetic oligonucleotide
ccucacaccuucucugaau

SEQ ID NO: 749120 - RNA, 19 nt, Artificial Sequence
  Description of Artificial Sequence: Synthetic oligonucleotide
guggccagacuggcaggua

SEQ ID NO: 749121 - RNA, 19 nt, Artificial Sequence
  Description of Artificial Sequence: Synthetic oligonucleotide
cgccaugaauguccauuga

SEQ ID NO: 749122 - RNA, 19 nt, Artificial Sequence
  Description of Artificial Sequence: Synthetic oligonucleotide
ggcaguccuucauggucuu

SEQ ID NO: 749123 - RNA, 19 nt, Artificial Sequence
  Description of Artificial Sequence: Synthetic oligonucleotide
cgucuuugauggugaugaa

SEQ ID NO: 749124 - RNA, 19 nt, Artificial Sequence
  Description of Artificial Sequence: Synthetic oligonucleotide
gccauccuggacgacccuu

SEQ ID NO: 749125 - RNA, 19 nt, Artificial Sequence
  Description of Artificial Sequence: Synthetic oligonucleotide
ccacaauuucuggcacaua

SEQ ID NO: 749126 - RNA, 19 nt, Artificial Sequence
  Description of Artificial Sequence: Synthetic oligonucleotide
ccgagcugagugcuucuuu

SEQ ID NO: 749127 - RNA, 19 nt, Artificial Sequence
  Description of Artificial Sequence: Synthetic oligonucleotide
cagugcgggugucgauguu

SEQ ID NO: 749128 - RNA, 19 nt, Artificial Sequence
  Description of Artificial Sequence: Synthetic oligonucleotide
cuccuggcuuggaggccuu

SEQ ID NO: 749129 - RNA, 19 nt, Artificial Sequence
  Description of Artificial Sequence: Synthetic oligonucleotide
gcaugcgggugagguacau

SEQ ID NO: 749130 - RNA, 19 nt, Artificial Sequence
  Description of Artificial Sequence: Synthetic oligonucleotide
gagcccgguugggccuccu

SEQ ID NO: 749131 - RNA, 19 nt, Artificial Sequence
  Description of Artificial Sequence: Synthetic oligonucleotide
gcugccgagcugagugcuu

SEQ ID NO: 749132 - RNA, 19 nt, Artificial Sequence
  Description of Artificial Sequence: Synthetic oligonucleotide
uauuuuaacaaacacgugu

SEQ ID NO: 749133 - RNA, 19 nt, Artificial Sequence
  Description of Artificial Sequence: Synthetic oligonucleotide
aacauuaugccuuguuccc

SEQ ID NO: 749134 - RNA, 19 nt, Artificial Sequence
  Description of Artificial Sequence: Synthetic oligonucleotide
ucaaaaguaauuaacgccu

SEQ ID NO: 749135 - RNA, 19 nt, Artificial Sequence
  Description of Artificial Sequence: Synthetic oligonucleotide
aaauuccgaauccuggccc

SEQ ID NO: 749136 - RNA, 19 nt, Artificial Sequence
  Description of Artificial Sequence: Synthetic oligonucleotide
aaaaguaauuaacgccugc

SEQ ID NO: 749137 - RNA, 19 nt, Artificial Sequence
  Description of Artificial Sequence: Synthetic oligonucleotide
auaacauauaguccauucc

SEQ ID NO: 749138 - RNA, 19 nt, Artificial Sequence
  Description of Artificial Sequence: Synthetic oligonucleotide
aauacagucaucaacuucu

SEQ ID NO: 749139 - RNA, 19 nt, Artificial Sequence
  Description of Artificial Sequence: Synthetic oligonucleotide
augacuuuaaguuugucug

SEQ ID NO: 749140 - RNA, 19 nt, Artificial Sequence
  Description of Artificial Sequence: Synthetic oligonucleotide
uaacauauaguccauucca

SEQ ID NO: 749141 - RNA, 19 nt, Artificial Sequence
  Description of Artificial Sequence: Synthetic oligonucleotide
aacaagucauccauggacc

SEQ ID NO: 749142 - RNA, 19 nt, Artificial Sequence
  Description of Artificial Sequence: Synthetic oligonucleotide
uuauaaaguagcuuggaaa

SEQ ID NO: 749143 - RNA, 19 nt, Artificial Sequence
  Description of Artificial Sequence: Synthetic oligonucleotide
gaacauuaugccuuguucc

SEQ ID NO: 749144 - RNA, 19 nt, Artificial Sequence
  Description of Artificial Sequence: Synthetic oligonucleotide
aaccgguuccuuuucaugg

SEQ ID NO: 749145 - RNA, 19 nt, Artificial Sequence
  Description of Artificial Sequence: Synthetic oligonucleotide
agagccuaaauuccgaauc

SEQ ID NO: 749146 - RNA, 19 nt, Artificial Sequence
  Description of Artificial Sequence: Synthetic oligonucleotide
aauggauguggacaaacca

SEQ ID NO: 749147 - RNA, 19 nt, Artificial Sequence
  Description of Artificial Sequence: Synthetic oligonucleotide
aaggcucagaaauuacaac

SEQ ID NO: 749148 - RNA, 19 nt, Artificial Sequence
  Description of Artificial Sequence: Synthetic oligonucleotide
aguacaaccugcuccuugc

SEQ ID NO: 749149 - RNA, 19 nt, Artificial Sequence
  Description of Artificial Sequence: Synthetic oligonucleotide
aauuaacgccugcugaguc

SEQ ID NO: 749150 - RNA, 19 nt, Artificial Sequence
  Description of Artificial Sequence: Synthetic oligonucleotide
ugcacuauacauuugaauu

SEQ ID NO: 749151 - RNA, 19 nt, Artificial Sequence
  Description of Artificial Sequence: Synthetic oligonucleotide
uguuuguucagucgaagca

SEQ ID NO: 749152 - RNA, 19 nt, Artificial Sequence
  Description of Artificial Sequence: Synthetic oligonucleotide
gaaaauccgcuugagauag

SEQ ID NO: 749153 - RNA, 19 nt, Artificial Sequence
  Description of Artificial Sequence: Synthetic oligonucleotide
uguuacucaaacagcuacg

SEQ ID NO: 749154 - RNA, 19 nt, Artificial Sequence
  Description of Artificial Sequence: Synthetic oligonucleotide
ucugaguucagugugaggu

SEQ ID NO: 749155 - RNA, 19 nt, Artificial Sequence
  Description of Artificial Sequence: Synthetic oligonucleotide
ugucuugauuauaaaguag

SEQ ID NO: 749156 - RNA, 19 nt, Artificial Sequence
  Description of Artificial Sequence: Synthetic oligonucleotide
aaauggauguggacaaacc

SEQ ID NO: 749157 - RNA, 19 nt, Artificial Sequence
  Description of Artificial Sequence: Synthetic oligonucleotide
aaccucacaagcuaggaaa

SEQ ID NO: 749158 - RNA, 19 nt, Artificial Sequence
  Description of Artificial Sequence: Synthetic oligonucleotide
  modified_base (4)..(4): a, c, u, g, unknown or other
aagngacucauaacaagac

SEQ ID NO: 749159 - RNA, 19 nt, Artificial Sequence
  Description of Artificial Sequence: Synthetic oligonucleotide
aaguaauuaacgccugcug

SEQ ID NO: 749160 - RNA, 19 nt, Artificial Sequence
  Description of Artificial Sequence: Synthetic oligonucleotide
cugaaugacuuuaaguuug

SEQ ID NO: 749161 - RNA, 19 nt, Artificial Sequence
  Description of Artificial Sequence: Synthetic oligonucleotide
aguaauuaacgccugcuga

SEQ ID NO: 749162 - RNA, 19 nt, Artificial Sequence
  Description of Artificial Sequence: Synthetic oligonucleotide
aauuccgaauccuggcccg

SEQ ID NO: 749163 - RNA, 19 nt, Artificial Sequence
  Description of Artificial Sequence: Synthetic oligonucleotide
uuuccuauuugcacuauac

SEQ ID NO: 749164 - RNA, 19 nt, Artificial Sequence
  Description of Artificial Sequence: Synthetic oligonucleotide
  modified_base (2)..(2): a, c, u, g, unknown or other
gngacucauaacaagacug

SEQ ID NO: 749165 - RNA, 19 nt, Artificial Sequence
  Description of Artificial Sequence: Synthetic oligonucleotide
uaaauuccgaauccuggcc

SEQ ID NO: 749166 - RNA, 19 nt, Artificial Sequence
  Description of Artificial Sequence: Synthetic oligonucleotide
ugaacauuaugccuuguuc

SEQ ID NO: 749167 - RNA, 19 nt, Artificial Sequence
  Description of Artificial Sequence: Synthetic oligonucleotide
agcuacgggaaauaagaac

SEQ ID NO: 749168 - RNA, 19 nt, Artificial Sequence
  Description of Artificial Sequence: Synthetic oligonucleotide
caaggauugacaagguugc

SEQ ID NO: 749169 - RNA, 19 nt, Artificial Sequence
  Description of Artificial Sequence: Synthetic oligonucleotide
auuugcacuauacauuuga

SEQ ID NO: 749170 - RNA, 19 nt, Artificial Sequence
  Description of Artificial Sequence: Synthetic oligonucleotide
guaauuaacgccugcugag

SEQ ID NO: 749171 - RNA, 19 nt, Artificial Sequence
  Description of Artificial Sequence: Synthetic oligonucleotide
ugaaucagggcacugugcu

SEQ ID NO: 749172 - RNA, 19 nt, Artificial Sequence
  Description of Artificial Sequence: Synthetic oligonucleotide
cuaaauuccgaauccuggc

SEQ ID NO: 749173 - RNA, 19 nt, Artificial Sequence
  Description of Artificial Sequence: Synthetic oligonucleotide
uuauuacuaaggcucagaa

SEQ ID NO: 749174 - RNA, 19 nt, Artificial Sequence
  Description of Artificial Sequence: Synthetic oligonucleotide
uccuauuugcacuauacau

SEQ ID NO: 749175 - RNA, 19 nt, Artificial Sequence
  Description of Artificial Sequence: Synthetic oligonucleotide
  modified_base (8)..(8): a, c, u, g, unknown or other
gagcaagngacucauaaca

SEQ ID NO: 749176 - RNA, 19 nt, Artificial Sequence
  Description of Artificial Sequence: Synthetic oligonucleotide
accacauauaagaagacag

SEQ ID NO: 749177 - RNA, 19 nt, Artificial Sequence
  Description of Artificial Sequence: Synthetic oligonucleotide
uguuacauuacagccaaca

SEQ ID NO: 749178 - RNA, 19 nt, Artificial Sequence
  Description of Artificial Sequence: Synthetic oligonucleotide
  modified_base (9)..(9): a, c, u, g, unknown or other
agagcaagngacucauaac

SEQ ID NO: 749179 - RNA, 19 nt, Artificial Sequence
  Description of Artificial Sequence: Synthetic oligonucleotide
agcgauaucugccuguuug

SEQ ID NO: 749180 - RNA, 19 nt, Artificial Sequence
  Description of Artificial Sequence: Synthetic oligonucleotide
gaagcuacgggaaauaaga

SEQ ID NO: 749181 - RNA, 19 nt, Artificial Sequence
  Description of Artificial Sequence: Synthetic oligonucleotide
ucgguuacugcucucacac

SEQ ID NO: 749182 - RNA, 19 nt, Artificial Sequence
  Description of Artificial Sequence: Synthetic oligonucleotide
aaaguaauuaacgccugcu

SEQ ID NO: 749183 - RNA, 19 nt, Artificial Sequence
  Description of Artificial Sequence: Synthetic oligonucleotide
aggaguuaccgcuacagug

SEQ ID NO: 749184 - RNA, 19 nt, Artificial Sequence
  Description of Artificial Sequence: Synthetic oligonucleotide
accaacaaccuacaacggg

SEQ ID NO: 749185 - RNA, 19 nt, Artificial Sequence
  Description of Artificial Sequence: Synthetic oligonucleotide
ggugggaacaaccaaagug

SEQ ID NO: 749186 - RNA, 19 nt, Artificial Sequence
  Description of Artificial Sequence: Synthetic oligonucleotide
uucacaugaaucagggcac

SEQ ID NO: 749187 - RNA, 19 nt, Artificial Sequence
  Description of Artificial Sequence: Synthetic oligonucleotide
acgugucuugauuauaaag

SEQ ID NO: 749188 - RNA, 19 nt, Artificial Sequence
  Description of Artificial Sequence: Synthetic oligonucleotide
aagguugcaggccaaaauu

SEQ ID NO: 749189 - RNA, 19 nt, Artificial Sequence
  Description of Artificial Sequence: Synthetic oligonucleotide
acugcaaauggauguggac

SEQ ID NO: 749190 - RNA, 19 nt, Artificial Sequence
  Description of Artificial Sequence: Synthetic oligonucleotide
uguggacaaaccaggaacu

SEQ ID NO: 749191 - RNA, 19 nt, Artificial Sequence
  Description of Artificial Sequence: Synthetic oligonucleotide
cacauaaccaggcucuggg

SEQ ID NO: 749192 - RNA, 19 nt, Artificial Sequence
  Description of Artificial Sequence: Synthetic oligonucleotide
gaagcacuaagccagaacu

SEQ ID NO: 749193 - RNA, 19 nt, Artificial Sequence
  Description of Artificial Sequence: Synthetic oligonucleotide
acaagcuaggaaaauccgc

SEQ ID NO: 749194 - RNA, 19 nt, Artificial Sequence
  Description of Artificial Sequence: Synthetic oligonucleotide
uuccuauaaaggaaagggu

SEQ ID NO: 749195 - RNA, 19 nt, Artificial Sequence
  Description of Artificial Sequence: Synthetic oligonucleotide
auauaguccauuccaauuu

SEQ ID NO: 749196 - RNA, 19 nt, Artificial Sequence
  Description of Artificial Sequence: Synthetic oligonucleotide
ucggucauuguccaaggca

SEQ ID NO: 749197 - RNA, 19 nt, Artificial Sequence
  Description of Artificial Sequence: Synthetic oligonucleotide
guaaauguugugcugaucu

SEQ ID NO: 749198 - RNA, 19 nt, Artificial Sequence
  Description of Artificial Sequence: Synthetic oligonucleotide
agucucaaguacaaccugc

SEQ ID NO: 749199 - RNA, 19 nt, Artificial Sequence
  Description of Artificial Sequence: Synthetic oligonucleotide
aaagcaaaccguggaaaug

SEQ ID NO: 749200 - RNA, 19 nt, Artificial Sequence
  Description of Artificial Sequence: Synthetic oligonucleotide
guguaaaccaacaaccuac

SEQ ID NO: 749201 - RNA, 19 nt, Artificial Sequence
  Description of Artificial Sequence: Synthetic oligonucleotide
aaucagggcacugugcuca

SEQ ID NO: 749202 - RNA, 19 nt, Artificial Sequence
  Description of Artificial Sequence: Synthetic oligonucleotide
aaguuugucugauggagua

SEQ ID NO: 749203 - RNA, 19 nt, Artificial Sequence
  Description of Artificial Sequence: Synthetic oligonucleotide
agguguauggaucuuagua

SEQ ID NO: 749204 - RNA, 19 nt, Artificial Sequence
  Description of Artificial Sequence: Synthetic oligonucleotide
aaaccguggaaauguggug

SEQ ID NO: 749205 - RNA, 19 nt, Artificial Sequence
  Description of Artificial Sequence: Synthetic oligonucleotide
aguagucggcgguuggccc

SEQ ID NO: 749206 - RNA, 19 nt, Artificial Sequence
  Description of Artificial Sequence: Synthetic oligonucleotide
  modified_base (3)..(3): a, c, u, g, unknown or other
agngacucauaacaagacu

SEQ ID NO: 749207 - RNA, 19 nt, Artificial Sequence
  Description of Artificial Sequence: Synthetic oligonucleotide
uuacucaaacagcuacgag

SEQ ID NO: 749208 - RNA, 19 nt, Artificial Sequence
  Description of Artificial Sequence: Synthetic oligonucleotide
  modified_base (5)..(5): a, c, u, g, unknown or other
caagngacucauaacaaga

SEQ ID NO: 749209 - RNA, 19 nt, Artificial Sequence
  Description of Artificial Sequence: Synthetic oligonucleotide
uucccagugcagaaggacc

SEQ ID NO: 749210 - RNA, 19 nt, Artificial Sequence
  Description of Artificial Sequence: Synthetic oligonucleotide
ugggguaacugcaaaugga

SEQ ID NO: 749211 - RNA, 19 nt, Artificial Sequence
  Description of Artificial Sequence: Synthetic oligonucleotide
gagccuaaauuccgaaucc

SEQ ID NO: 749212 - RNA, 19 nt, Artificial Sequence
  Description of Artificial Sequence: Synthetic oligonucleotide
uaaauguugugcugaucug

SEQ ID NO: 749213 - RNA, 19 nt, Artificial Sequence
  Description of Artificial Sequence: Synthetic oligonucleotide
agcuacgaggaguuaccgc

SEQ ID NO: 749214 - RNA, 19 nt, Artificial Sequence
  Description of Artificial Sequence: Synthetic oligonucleotide
gguguauggaucuuaguac

SEQ ID NO: 749215 - RNA, 19 nt, Artificial Sequence
  Description of Artificial Sequence: Synthetic oligonucleotide
auaaaguagcuuggaaauc

SEQ ID NO: 749216 - RNA, 19 nt, Artificial Sequence
  Description of Artificial Sequence: Synthetic oligonucleotide
cuuaaucuccuuuacagcu

SEQ ID NO: 749217 - RNA, 19 nt, Artificial Sequence
  Description of Artificial Sequence: Synthetic oligonucleotide
ugacuuuaaguuugucuga

SEQ ID NO: 749218 - RNA, 19 nt, Artificial Sequence
  Description of Artificial Sequence: Synthetic oligonucleotide
gagaauaaaccaauucaca

SEQ ID NO: 749219 - RNA, 19 nt, Artificial Sequence
  Description of Artificial Sequence: Synthetic oligonucleotide
acauuaugccuuguucccc

SEQ ID NO: 749220 - RNA, 19 nt, Artificial Sequence
  Description of Artificial Sequence: Synthetic oligonucleotide
cauacgucauucuguacac

SEQ ID NO: 749221 - RNA, 19 nt, Artificial Sequence
  Description of Artificial Sequence: Synthetic oligonucleotide
ccaaggauugacaagguug

SEQ ID NO: 749222 - RNA, 19 nt, Artificial Sequence
  Description of Artificial Sequence: Synthetic oligonucleotide
caaaaguaauuaacgccug

SEQ ID NO: 749223 - RNA, 19 nt, Artificial Sequence
  Description of Artificial Sequence: Synthetic oligonucleotide
uuugcacuauacauuugaa

SEQ ID NO: 749224 - RNA, 19 nt, Artificial Sequence
  Description of Artificial Sequence: Synthetic oligonucleotide
agcuaggaaaauccgcuug

SEQ ID NO: 749225 - RNA, 19 nt, Artificial Sequence
  Description of Artificial Sequence: Synthetic oligonucleotide
cauggaguacagcagauga

SEQ ID NO: 749226 - RNA, 19 nt, Artificial Sequence
  Description of Artificial Sequence: Synthetic oligonucleotide
acucaaacagcuacgagga

SEQ ID NO: 749227 - RNA, 19 nt, Artificial Sequence
  Description of Artificial Sequence: Synthetic oligonucleotide
agcgacagggcucgguuac

SEQ ID NO: 749228 - RNA, 19 nt, Artificial Sequence
  Description of Artificial Sequence: Synthetic oligonucleotide
aaauccgcuugagauagga

SEQ ID NO: 749229 - RNA, 19 nt, Artificial Sequence
  Description of Artificial Sequence: Synthetic oligonucleotide
uuaguacaggccacagaug

SEQ ID NO: 749230 - RNA, 19 nt, Artificial Sequence
  Description of Artificial Sequence: Synthetic oligonucleotide
uuaagcuucucacgcugga

SEQ ID NO: 749231 - RNA, 19 nt, Artificial Sequence
  Description of Artificial Sequence: Synthetic oligonucleotide
uaccgcuacaguguaaacc

SEQ ID NO: 749232 - RNA, 19 nt, Artificial Sequence
  Description of Artificial Sequence: Synthetic oligonucleotide
uguuuucaaccugagcuga

SEQ ID NO: 749233 - RNA, 19 nt, Artificial Sequence
  Description of Artificial Sequence: Synthetic oligonucleotide
auuaugaaaacugcuguua

SEQ ID NO: 749234 - RNA, 19 nt, Artificial Sequence
  Description of Artificial Sequence: Synthetic oligonucleotide
ugaaugacuuuaaguuugu

SEQ ID NO: 749235 - RNA, 19 nt, Artificial Sequence
  Description of Artificial Sequence: Synthetic oligonucleotide
ugccuaguuaagcuucuca

SEQ ID NO: 749236 - RNA, 19 nt, Artificial Sequence
  Description of Artificial Sequence: Synthetic oligonucleotide
guauggaucuuaguacagg

SEQ ID NO: 749237 - RNA, 19 nt, Artificial Sequence
  Description of Artificial Sequence: Synthetic oligonucleotide
ucaaccugagcugaggcuc

SEQ ID NO: 749238 - RNA, 19 nt, Artificial Sequence
  Description of Artificial Sequence: Synthetic oligonucleotide
acauaaccaggcucugggg

SEQ ID NO: 749239 - RNA, 19 nt, Artificial Sequence
  Description of Artificial Sequence: Synthetic oligonucleotide
aguguaaaccaacaaccua

SEQ ID NO: 749240 - RNA, 19 nt, Artificial Sequence
  Description of Artificial Sequence: Synthetic oligonucleotide
uucccaguaaaugucuucu

SEQ ID NO: 749241 - RNA, 19 nt, Artificial Sequence
  Description of Artificial Sequence: Synthetic oligonucleotide
auuaacgccugcugaguca

SEQ ID NO: 749242 - RNA, 19 nt, Artificial Sequence
  Description of Artificial Sequence: Synthetic oligonucleotide
aaacacgugucuugauuau

SEQ ID NO: 749243 - RNA, 19 nt, Artificial Sequence
  Description of Artificial Sequence: Synthetic oligonucleotide
acauauaguccauuccaau

SEQ ID NO: 749244 - RNA, 19 nt, Artificial Sequence
  Description of Artificial Sequence: Synthetic oligonucleotide
auuauuacuaaggcucaga

SEQ ID NO: 749245 - RNA, 19 nt, Artificial Sequence
  Description of Artificial Sequence: Synthetic oligonucleotide
acuaaggcucagaaauuac

SEQ ID NO: 749246 - RNA, 19 nt, Artificial Sequence
  Description of Artificial Sequence: Synthetic oligonucleotide
aacauauaguccauuccaa

SEQ ID NO: 749247 - RNA, 19 nt, Artificial Sequence
  Description of Artificial Sequence: Synthetic oligonucleotide
uaaccgguuccuuuucaug

SEQ ID NO: 749248 - RNA, 19 nt, Artificial Sequence
  Description of Artificial Sequence: Synthetic oligonucleotide
guuuguucagucgaagcac

SEQ ID NO: 749249 - RNA, 19 nt, Artificial Sequence
  Description of Artificial Sequence: Synthetic oligonucleotide
ucggauguggacucugacu

SEQ ID NO: 749250 - RNA, 19 nt, Artificial Sequence
  Description of Artificial Sequence: Synthetic oligonucleotide
uauuugcacuauacauuug

SEQ ID NO: 749251 - RNA, 19 nt, Artificial Sequence
  Description of Artificial Sequence: Synthetic oligonucleotide
uccacaagccugcccagug

SEQ ID NO: 749252 - RNA, 19 nt, Artificial Sequence
  Description of Artificial Sequence: Synthetic oligonucleotide
augaaucagggcacugugc

SEQ ID NO: 749253 - RNA, 19 nt, Artificial Sequence
  Description of Artificial Sequence: Synthetic oligonucleotide
  modified_base (6)..(6): a, c, u, g, unknown or other
gcaagngacucauaacaag

SEQ ID NO: 749254 - RNA, 19 nt, Artificial Sequence
  Description of Artificial Sequence: Synthetic oligonucleotide
acaaacacgugucuugauu

SEQ ID NO: 749255 - RNA, 19 nt, Artificial Sequence
  Description of Artificial Sequence: Synthetic oligonucleotide
ugaguucagugugagguac

SEQ ID NO: 749256 - RNA, 19 nt, Artificial Sequence
  Description of Artificial Sequence: Synthetic oligonucleotide
aauccgcuugagauaggac

SEQ ID NO: 749257 - RNA, 19 nt, Artificial Sequence
  Description of Artificial Sequence: Synthetic oligonucleotide
uguguuacucaaacagcua

SEQ ID NO: 749258 - RNA, 19 nt, Artificial Sequence
  Description of Artificial Sequence: Synthetic oligonucleotide
uucugaguucagugugagg

SEQ ID NO: 749259 - RNA, 19 nt, Artificial Sequence
  Description of Artificial Sequence: Synthetic oligonucleotide
uccgcuugagauaggacuu

SEQ ID NO: 749260 - RNA, 19 nt, Artificial Sequence
  Description of Artificial Sequence: Synthetic oligonucleotide
uaauuaacgccugcugagu

SEQ ID NO: 749261 - RNA, 19 nt, Artificial Sequence
  Description of Artificial Sequence: Synthetic oligonucleotide
aggagagcgauaucugccu

SEQ ID NO: 749262 - RNA, 19 nt, Artificial Sequence
  Description of Artificial Sequence: Synthetic oligonucleotide
uacuaaggcucagaaauua

SEQ ID NO: 749263 - RNA, 19 nt, Artificial Sequence
  Description of Artificial Sequence: Synthetic oligonucleotide
uuacuaaggcucagaaauu

SEQ ID NO: 749264 - RNA, 19 nt, Artificial Sequence
  Description of Artificial Sequence: Synthetic oligonucleotide
uaguuaagcuucucacgcu

SEQ ID NO: 749265 - RNA, 19 nt, Artificial Sequence
  Description of Artificial Sequence: Synthetic oligonucleotide
uguacacugcaaccagggu

SEQ ID NO: 749266 - RNA, 19 nt, Artificial Sequence
  Description of Artificial Sequence: Synthetic oligonucleotide
cugcacuccgagaaagccc

SEQ ID NO: 749267 - RNA, 19 nt, Artificial Sequence
  Description of Artificial Sequence: Synthetic oligonucleotide
guuaagcuucucacgcugg

SEQ ID NO: 749268 - RNA, 19 nt, Artificial Sequence
  Description of Artificial Sequence: Synthetic oligonucleotide
uacaacggguuuuguaaaa

SEQ ID NO: 749269 - RNA, 19 nt, Artificial Sequence
  Description of Artificial Sequence: Synthetic oligonucleotide
acuccgagaaagcccagga

SEQ ID NO: 749270 - RNA, 19 nt, Artificial Sequence
  Description of Artificial Sequence: Synthetic oligonucleotide
guuacucaaacagcuacga

SEQ ID NO: 749271 - RNA, 19 nt, Artificial Sequence
  Description of Artificial Sequence: Synthetic oligonucleotide
aacaaccaaagugugucuu

SEQ ID NO: 749272 - RNA, 19 nt, Artificial Sequence
  Description of Artificial Sequence: Synthetic oligonucleotide
uguucagucgaagcacaca

SEQ ID NO: 749273 - RNA, 19 nt, Artificial Sequence
  Description of Artificial Sequence: Synthetic oligonucleotide
caagcuaggaaaauccgcu

SEQ ID NO: 749274 - RNA, 19 nt, Artificial Sequence
  Description of Artificial Sequence: Synthetic oligonucleotide
aggaccuccuuccgguggg

SEQ ID NO: 749275 - RNA, 19 nt, Artificial Sequence
  Description of Artificial Sequence: Synthetic oligonucleotide
guauuuuaacaaacacgug

SEQ ID NO: 749276 - RNA, 19 nt, Artificial Sequence
  Description of Artificial Sequence: Synthetic oligonucleotide
uccgaauccuggcccguag

SEQ ID NO: 749277 - RNA, 19 nt, Artificial Sequence
  Description of Artificial Sequence: Synthetic oligonucleotide
cagccaacauuccaaaaca

SEQ ID NO: 749278 - RNA, 19 nt, Artificial Sequence
  Description of Artificial Sequence: Synthetic oligonucleotide
cagucgaagcacacauucc

SEQ ID NO: 749279 - RNA, 19 nt, Artificial Sequence
  Description of Artificial Sequence: Synthetic oligonucleotide
uuugucugauggaguaaau

SEQ ID NO: 749280 - RNA, 19 nt, Artificial Sequence
  Description of Artificial Sequence: Synthetic oligonucleotide
acagggcucgguuacugcu

SEQ ID NO: 749281 - RNA, 19 nt, Artificial Sequence
  Description of Artificial Sequence: Synthetic oligonucleotide
aggugccuaguuaagcuuc

SEQ ID NO: 749282 - RNA, 19 nt, Artificial Sequence
  Description of Artificial Sequence: Synthetic oligonucleotide
uacgaggaguuaccgcuac

SEQ ID NO: 749283 - RNA, 19 nt, Artificial Sequence
  Description of Artificial Sequence: Synthetic oligonucleotide
cuguguuacucaaacagcu

SEQ ID NO: 749284 - RNA, 19 nt, Artificial Sequence
  Description of Artificial Sequence: Synthetic oligonucleotide
gugagguacagggaaggcc

SEQ ID NO: 749285 - RNA, 19 nt, Artificial Sequence
  Description of Artificial Sequence: Synthetic oligonucleotide
  modified_base (7)..(7): a, c, u, g, unknown or other
agcaagngacucauaacaa

SEQ ID NO: 749286 - RNA, 19 nt, Artificial Sequence
  Description of Artificial Sequence: Synthetic oligonucleotide
aaaugugguggugccacaa

SEQ ID NO: 749287 - RNA, 19 nt, Artificial Sequence
  Description of Artificial Sequence: Synthetic oligonucleotide
uccuugccgagggaugugg

SEQ ID NO: 749288 - RNA, 19 nt, Artificial Sequence
  Description of Artificial Sequence: Synthetic oligonucleotide
caaaccguggaaauguggu

SEQ ID NO: 749289 - RNA, 19 nt, Artificial Sequence
  Description of Artificial Sequence: Synthetic oligonucleotide
  modified_base (12)..(12): a, c, u, g, unknown or other
uggagagcaagngacucau

SEQ ID NO: 749290 - RNA, 19 nt, Artificial Sequence
  Description of Artificial Sequence: Synthetic oligonucleotide
guucuuugccgcuguggcc

SEQ ID NO: 749291 - RNA, 19 nt, Artificial Sequence
  Description of Artificial Sequence: Synthetic oligonucleotide
cugguaguagcaugccuuc

SEQ ID NO: 749292 - RNA, 19 nt, Artificial Sequence
  Description of Artificial Sequence: Synthetic oligonucleotide
aaaguagcuuggaaaucau

SEQ ID NO: 749293 - RNA, 19 nt, Artificial Sequence
  Description of Artificial Sequence: Synthetic oligonucleotide
gccuaguuaagcuucucac

SEQ ID NO: 749294 - RNA, 19 nt, Artificial Sequence
  Description of Artificial Sequence: Synthetic oligonucleotide
uuaacgccugcugagucau

SEQ ID NO: 749295 - RNA, 19 nt, Artificial Sequence
  Description of Artificial Sequence: Synthetic oligonucleotide
gaugugggguaacugcaaa

SEQ ID NO: 749296 - RNA, 19 nt, Artificial Sequence
  Description of Artificial Sequence: Synthetic oligonucleotide
gaaccucacaagcuaggaa

SEQ ID NO: 749297 - RNA, 19 nt, Artificial Sequence
  Description of Artificial Sequence: Synthetic oligonucleotide
agagcaccuguguuacuca

SEQ ID NO: 749298 - RNA, 19 nt, Artificial Sequence
  Description of Artificial Sequence: Synthetic oligonucleotide
guuaccgcuacaguguaaa

SEQ ID NO: 749299 - RNA, 19 nt, Artificial Sequence
  Description of Artificial Sequence: Synthetic oligonucleotide
ugcuagcaguugugguugg

SEQ ID NO: 749300 - RNA, 19 nt, Artificial Sequence
  Description of Artificial Sequence: Synthetic oligonucleotide
guagucggcgguuggcccc

SEQ ID NO: 749301 - RNA, 19 nt, Artificial Sequence
  Description of Artificial Sequence: Synthetic oligonucleotide
gacagggcucgguuacugc

SEQ ID NO: 749302 - RNA, 19 nt, Artificial Sequence
  Description of Artificial Sequence: Synthetic oligonucleotide
ccuuguuccccacugcugc

SEQ ID NO: 749303 - RNA, 19 nt, Artificial Sequence
  Description of Artificial Sequence: Synthetic oligonucleotide
guucucaagcugucaggug

SEQ ID NO: 749304 - RNA, 19 nt, Artificial Sequence
  Description of Artificial Sequence: Synthetic oligonucleotide
uggacaaaccaggaacuua

SEQ ID NO: 749305 - RNA, 19 nt, Artificial Sequence
  Description of Artificial Sequence: Synthetic oligonucleotide
gucaggugccuaguuaagc

SEQ ID NO: 749306 - RNA, 19 nt, Artificial Sequence
  Description of Artificial Sequence: Synthetic oligonucleotide
guucagucgaagcacacau

SEQ ID NO: 749307 - RNA, 19 nt, Artificial Sequence
  Description of Artificial Sequence: Synthetic oligonucleotide
gauccuuuucaaaaguaau

SEQ ID NO: 749308 - RNA, 19 nt, Artificial Sequence
  Description of Artificial Sequence: Synthetic oligonucleotide
aaaauccgcuugagauagg

SEQ ID NO: 749309 - RNA, 19 nt, Artificial Sequence
  Description of Artificial Sequence: Synthetic oligonucleotide
aggguaaccgguuccuuuu

SEQ ID NO: 749310 - RNA, 19 nt, Artificial Sequence
  Description of Artificial Sequence: Synthetic oligonucleotide
gcuacuucagucucaagua

SEQ ID NO: 749311 - RNA, 19 nt, Artificial Sequence
  Description of Artificial Sequence: Synthetic oligonucleotide
ccuacaacggguuuuguaa

SEQ ID NO: 749312 - RNA, 19 nt, Artificial Sequence
  Description of Artificial Sequence: Synthetic oligonucleotide
accuacaacggguuuugua

SEQ ID NO: 749313 - RNA, 19 nt, Artificial Sequence
  Description of Artificial Sequence: Synthetic oligonucleotide
caaccuacaacggguuuug

SEQ ID NO: 749314 - RNA, 19 nt, Artificial Sequence
  Description of Artificial Sequence: Synthetic oligonucleotide
acaaccuacaacggguuuu

SEQ ID NO: 749315 - RNA, 19 nt, Artificial Sequence
  Description of Artificial Sequence: Synthetic oligonucleotide
caaccaaagugugucuuuc

SEQ ID NO: 749316 - RNA, 19 nt, Artificial Sequence
  Description of Artificial Sequence: Synthetic oligonucleotide
acacgugucuugauuauaa

SEQ ID NO: 749317 - RNA, 19 nt, Artificial Sequence
  Description of Artificial Sequence: Synthetic oligonucleotide
ccaguucucaagcugucag

SEQ ID NO: 749318 - RNA, 19 nt, Artificial Sequence
  Description of Artificial Sequence: Synthetic oligonucleotide
uccgguggguggaggagca

SEQ ID NO: 749319 - RNA, 19 nt, Artificial Sequence
  Description of Artificial Sequence: Synthetic oligonucleotide
uacgggaaauaagaaccuc

SEQ ID NO: 749320 - RNA, 19 nt, Artificial Sequence
  Description of Artificial Sequence: Synthetic oligonucleotide
accguggaaaugugguggu

SEQ ID NO: 749321 - RNA, 19 nt, Artificial Sequence
  Description of Artificial Sequence: Synthetic oligonucleotide
aacgccugcugagucauuu

SEQ ID NO: 749322 - RNA, 19 nt, Artificial Sequence
  Description of Artificial Sequence: Synthetic oligonucleotide
cauauaguccauuccaauu

SEQ ID NO: 749323 - RNA, 19 nt, Artificial Sequence
  Description of Artificial Sequence: Synthetic oligonucleotide
aaggauugacaagguugca

SEQ ID NO: 749324 - RNA, 19 nt, Artificial Sequence
  Description of Artificial Sequence: Synthetic oligonucleotide
guuuucaaccugagcugag

SEQ ID NO: 749325 - RNA, 19 nt, Artificial Sequence
  Description of Artificial Sequence: Synthetic oligonucleotide
uuaccgcuacaguguaaac

SEQ ID NO: 749326 - RNA, 19 nt, Artificial Sequence
  Description of Artificial Sequence: Synthetic oligonucleotide
gugccacaauacuuuugag

SEQ ID NO: 749327 - RNA, 19 nt, Artificial Sequence
  Description of Artificial Sequence: Synthetic oligonucleotide
guucuaggaaggcaaggua

SEQ ID NO: 749328 - RNA, 19 nt, Artificial Sequence
  Description of Artificial Sequence: Synthetic oligonucleotide
ggaagcacuaagccagaac

SEQ ID NO: 749329 - RNA, 19 nt, Artificial Sequence
  Description of Artificial Sequence: Synthetic oligonucleotide
aacacgugucuugauuaua

SEQ ID NO: 749330 - RNA, 19 nt, Artificial Sequence
  Description of Artificial Sequence: Synthetic oligonucleotide
gcuacgaggaguuaccgcu

SEQ ID NO: 749331 - RNA, 19 nt, Artificial Sequence
  Description of Artificial Sequence: Synthetic oligonucleotide
ggagguguauggaucuuag

SEQ ID NO: 749332 - RNA, 19 nt, Artificial Sequence
  Description of Artificial Sequence: Synthetic oligonucleotide
uuccuccccgagcaaagua

SEQ ID NO: 749333 - RNA, 19 nt, Artificial Sequence
  Description of Artificial Sequence: Synthetic oligonucleotide
aagcacuaagccagaacuu

SEQ ID NO: 749334 - RNA, 19 nt, Artificial Sequence
  Description of Artificial Sequence: Synthetic oligonucleotide
cucggucauuguccaaggc

SEQ ID NO: 749335 - RNA, 19 nt, Artificial Sequence
  Description of Artificial Sequence: Synthetic oligonucleotide
cucaaacagcuacgaggag

SEQ ID NO: 749336 - RNA, 19 nt, Artificial Sequence
  Description of Artificial Sequence: Synthetic oligonucleotide
cuacaacggguuuuguaaa

SEQ ID NO: 749337 - RNA, 19 nt, Artificial Sequence
  Description of Artificial Sequence: Synthetic oligonucleotide
  modified_base (18)..(18): a, c, u, g, unknown or other
ccaagauggagagcaagng

SEQ ID NO: 749338 - RNA, 19 nt, Artificial Sequence
  Description of Artificial Sequence: Synthetic oligonucleotide
guacaaccugcuccuugcc

SEQ ID NO: 749339 - RNA, 19 nt, Artificial Sequence
  Description of Artificial Sequence: Synthetic oligonucleotide
uuccgguggguggaggagc

SEQ ID NO: 749340 - RNA, 19 nt, Artificial Sequence
  Description of Artificial Sequence: Synthetic oligonucleotide
agucuguuuucaaccugag

SEQ ID NO: 749341 - RNA, 19 nt, Artificial Sequence
  Description of Artificial Sequence: Synthetic oligonucleotide
cauggagguguauggaucu

SEQ ID NO: 749342 - RNA, 19 nt, Artificial Sequence
  Description of Artificial Sequence: Synthetic oligonucleotide
uguagcgacagggcucggu

SEQ ID NO: 749343 - RNA, 19 nt, Artificial Sequence
  Description of Artificial Sequence: Synthetic oligonucleotide
guaacuucauggagcugac

SEQ ID NO: 749344 - RNA, 19 nt, Artificial Sequence
  Description of Artificial Sequence: Synthetic oligonucleotide
gcuacaguguaaaccaaca

SEQ ID NO: 749345 - RNA, 19 nt, Artificial Sequence
  Description of Artificial Sequence: Synthetic oligonucleotide
gcagaaggaccuccuuccg

SEQ ID NO: 749346 - RNA, 19 nt, Artificial Sequence
  Description of Artificial Sequence: Synthetic oligonucleotide
ugguaguagcaugccuuca

SEQ ID NO: 749347 - RNA, 19 nt, Artificial Sequence
  Description of Artificial Sequence: Synthetic oligonucleotide
cagcuacgaggaguuaccg

SEQ ID NO: 749348 - RNA, 19 nt, Artificial Sequence
  Description of Artificial Sequence: Synthetic oligonucleotide
guagcaugcugcacaugug

SEQ ID NO: 749349 - RNA, 19 nt, Artificial Sequence
  Description of Artificial Sequence: Synthetic oligonucleotide
caaacagcuacgaggaguu

SEQ ID NO: 749350 - RNA, 19 nt, Artificial Sequence
  Description of Artificial Sequence: Synthetic oligonucleotide
aaaggguaaccgguuccuu

SEQ ID NO: 749351 - RNA, 19 nt, Artificial Sequence
  Description of Artificial Sequence: Synthetic oligonucleotide
gaguuaccgcuacagugua

SEQ ID NO: 749352 - RNA, 19 nt, Artificial Sequence
  Description of Artificial Sequence: Synthetic oligonucleotide
ucccaguaaaugucuucuu

SEQ ID NO: 749353 - RNA, 19 nt, Artificial Sequence
  Description of Artificial Sequence: Synthetic oligonucleotide
agguugcaggccaaaauuu

SEQ ID NO: 749354 - RNA, 19 nt, Artificial Sequence
  Description of Artificial Sequence: Synthetic oligonucleotide
gagagcgauaucugccugu

SEQ ID NO: 749355 - RNA, 19 nt, Artificial Sequence
  Description of Artificial Sequence: Synthetic oligonucleotide
cuacgggaaauaagaaccu

SEQ ID NO: 749356 - RNA, 19 nt, Artificial Sequence
  Description of Artificial Sequence: Synthetic oligonucleotide
aggguucuaggaaggcaag

SEQ ID NO: 749357 - RNA, 19 nt, Artificial Sequence
  Description of Artificial Sequence: Synthetic oligonucleotide
ggguucuaggaaggcaagg

SEQ ID NO: 749358 - RNA, 19 nt, Artificial Sequence
  Description of Artificial Sequence: Synthetic oligonucleotide
cucgguuacugcucucaca

SEQ ID NO: 749359 - RNA, 19 nt, Artificial Sequence
  Description of Artificial Sequence: Synthetic oligonucleotide
gguugcaggccaaaauuuc

SEQ ID NO: 749360 - RNA, 19 nt, Artificial Sequence
  Description of Artificial Sequence: Synthetic oligonucleotide
acaagguugcaggccaaaa

SEQ ID NO: 749361 - RNA, 19 nt, Artificial Sequence
  Description of Artificial Sequence: Synthetic oligonucleotide
cccacacccacauacguca

SEQ ID NO: 749362 - RNA, 19 nt, Artificial Sequence
  Description of Artificial Sequence: Synthetic oligonucleotide
gaggaguuaccgcuacagu

SEQ ID NO: 749363 - RNA, 19 nt, Artificial Sequence
  Description of Artificial Sequence: Synthetic oligonucleotide
cccgagcaaaguagcaugc

SEQ ID NO: 749364 - RNA, 19 nt, Artificial Sequence
  Description of Artificial Sequence: Synthetic oligonucleotide
aagcugucaggugccuagu

SEQ ID NO: 749365 - RNA, 19 nt, Artificial Sequence
  Description of Artificial Sequence: Synthetic oligonucleotide
cacaugaaucagggcacug

SEQ ID NO: 749366 - RNA, 19 nt, Artificial Sequence
  Description of Artificial Sequence: Synthetic oligonucleotide
agagcgauaucugccuguu

SEQ ID NO: 749367 - RNA, 19 nt, Artificial Sequence
  Description of Artificial Sequence: Synthetic oligonucleotide
ccaacaaccuacaacgggu

SEQ ID NO: 749368 - RNA, 19 nt, Artificial Sequence
  Description of Artificial Sequence: Synthetic oligonucleotide
acauguggcuggaaggguu

SEQ ID NO: 749369 - RNA, 19 nt, Artificial Sequence
  Description of Artificial Sequence: Synthetic oligonucleotide
gguaaccgguuccuuuuca

SEQ ID NO: 749370 - RNA, 19 nt, Artificial Sequence
  Description of Artificial Sequence: Synthetic oligonucleotide
ccccgagcaaaguagcaug

SEQ ID NO: 749371 - RNA, 19 nt, Artificial Sequence
  Description of Artificial Sequence: Synthetic oligonucleotide
auacgucauucuguacacu

SEQ ID NO: 749372 - RNA, 19 nt, Artificial Sequence
  Description of Artificial Sequence: Synthetic oligonucleotide
agcccaggagagcgauauc

SEQ ID NO: 749373 - RNA, 19 nt, Artificial Sequence
  Description of Artificial Sequence: Synthetic oligonucleotide
gaguucagugugagguaca

SEQ ID NO: 749374 - RNA, 19 nt, Artificial Sequence
  Description of Artificial Sequence: Synthetic oligonucleotide
ggaguuaccgcuacagugu

SEQ ID NO: 749375 - RNA, 19 nt, Artificial Sequence
  Description of Artificial Sequence: Synthetic oligonucleotide
auggucuggucugagucuu

SEQ ID NO: 749376 - RNA, 19 nt, Artificial Sequence
  Description of Artificial Sequence: Synthetic oligonucleotide
acgaggaguuaccgcuaca

SEQ ID NO: 749377 - RNA, 19 nt, Artificial Sequence
  Description of Artificial Sequence: Synthetic oligonucleotide
caccuguguuacucaaaca

SEQ ID NO: 749378 - RNA, 19 nt, Artificial Sequence
  Description of Artificial Sequence: Synthetic oligonucleotide
cugaguucagugugaggua

SEQ ID NO: 749379 - RNA, 19 nt, Artificial Sequence
  Description of Artificial Sequence: Synthetic oligonucleotide
gugaacauuaugccuuguu

SEQ ID NO: 749380 - RNA, 19 nt, Artificial Sequence
  Description of Artificial Sequence: Synthetic oligonucleotide
ccuauuugcacuauacauu

SEQ ID NO: 749381 - RNA, 19 nt, Artificial Sequence
  Description of Artificial Sequence: Synthetic oligonucleotide
ccuccccgagcaaaguagc

SEQ ID NO: 749382 - RNA, 19 nt, Artificial Sequence
  Description of Artificial Sequence: Synthetic oligonucleotide
guaaccgguuccuuuucau

SEQ ID NO: 749383 - RNA, 19 nt, Artificial Sequence
  Description of Artificial Sequence: Synthetic oligonucleotide
uggcccguagcaccacaua

SEQ ID NO: 749384 - RNA, 19 nt, Artificial Sequence
  Description of Artificial Sequence: Synthetic oligonucleotide
cacgugucuugauuauaaa

SEQ ID NO: 749385 - RNA, 19 nt, Artificial Sequence
  Description of Artificial Sequence: Synthetic oligonucleotide
caagguugcaggccaaaau

SEQ ID NO: 749386 - RNA, 19 nt, Artificial Sequence
  Description of Artificial Sequence: Synthetic oligonucleotide
cgaggaguuaccgcuacag

SEQ ID NO: 749387 - RNA, 19 nt, Artificial Sequence
  Description of Artificial Sequence: Synthetic oligonucleotide
cagucggcgcucaggcuuc

SEQ ID NO: 749388 - RNA, 19 nt, Artificial Sequence
  Description of Artificial Sequence: Synthetic oligonucleotide
guggacuucagagccuaaa

SEQ ID NO: 749389 - RNA, 19 nt, Artificial Sequence
  Description of Artificial Sequence: Synthetic oligonucleotide
gcgucauugaagagaauaa

SEQ ID NO: 749390 - RNA, 19 nt, Artificial Sequence
  Description of Artificial Sequence: Synthetic oligonucleotide
gacaagguugcaggccaaa

SEQ ID NO: 749391 - RNA, 19 nt, Artificial Sequence
  Description of Artificial Sequence: Synthetic oligonucleotide
aaacagcuacgaggaguua

SEQ ID NO: 749392 - RNA, 19 nt, Artificial Sequence
  Description of Artificial Sequence: Synthetic oligonucleotide
uccugccaagauggagagc

SEQ ID NO: 749393 - RNA, 19 nt, Artificial Sequence
  Description of Artificial Sequence: Synthetic oligonucleotide
auuccgaauccuggcccgu

SEQ ID NO: 749394 - RNA, 19 nt, Artificial Sequence
  Description of Artificial Sequence: Synthetic oligonucleotide
cuacgaggaguuaccgcua

SEQ ID NO: 749395 - RNA, 19 nt, Artificial Sequence
  Description of Artificial Sequence: Synthetic oligonucleotide
guagcgacagggcucgguu

SEQ ID NO: 749396 - RNA, 19 nt, Artificial Sequence
  Description of Artificial Sequence: Synthetic oligonucleotide
cccguagcaccacauauaa

SEQ ID NO: 749397 - RNA, 19 nt, Artificial Sequence
  Description of Artificial Sequence: Synthetic oligonucleotide
agucggcgcucaggcuucc

SEQ ID NO: 749398 - RNA, 19 nt, Artificial Sequence
  Description of Artificial Sequence: Synthetic oligonucleotide
cagagccuaaauuccgaau

SEQ ID NO: 749399 - RNA, 19 nt, Artificial Sequence
  Description of Artificial Sequence: Synthetic oligonucleotide
cacagcagucggcgcucag

SEQ ID NO: 749400 - RNA, 19 nt, Artificial Sequence
  Description of Artificial Sequence: Synthetic oligonucleotide
uuccgaauccuggcccgua

SEQ ID NO: 749401 - RNA, 19 nt, Artificial Sequence
  Description of Artificial Sequence: Synthetic oligonucleotide
ggaaggcaagguauggcua

SEQ ID NO: 749402 - RNA, 19 nt, Artificial Sequence
  Description of Artificial Sequence: Synthetic oligonucleotide
ccguagcaccacauauaag

SEQ ID NO: 749403 - RNA, 19 nt, Artificial Sequence
  Description of Artificial Sequence: Synthetic oligonucleotide
aguuaccgcuacaguguaa

SEQ ID NO: 749404 - RNA, 19 nt, Artificial Sequence
  Description of Artificial Sequence: Synthetic oligonucleotide
gaagagcaccuguguuacu

SEQ ID NO: 749405 - RNA, 19 nt, Artificial Sequence
  Description of Artificial Sequence: Synthetic oligonucleotide
ggguaaccgguuccuuuuc

SEQ ID NO: 749406 - RNA, 19 nt, Artificial Sequence
  Description of Artificial Sequence: Synthetic oligonucleotide
cgcucaggcuuccucaaug

SEQ ID NO: 749407 - RNA, 19 nt, Artificial Sequence
  Description of Artificial Sequence: Synthetic oligonucleotide
ccgaauccuggcccguagc

SEQ ID NO: 749408 - RNA, 19 nt, Artificial Sequence
  Description of Artificial Sequence: Synthetic oligonucleotide
aggcaagguauggcuacuu

SEQ ID NO: 749409 - RNA, 19 nt, Artificial Sequence
  Description of Artificial Sequence: Synthetic oligonucleotide
caaccugagcugaggcucu

SEQ ID NO: 749410 - RNA, 19 nt, Artificial Sequence
  Description of Artificial Sequence: Synthetic oligonucleotide
gcgauaucugccuguuugu

SEQ ID NO: 749411 - RNA, 19 nt, Artificial Sequence
  Description of Artificial Sequence: Synthetic oligonucleotide
aaccugccugcgugcugua

SEQ ID NO: 749412 - RNA, 19 nt, Artificial Sequence
  Description of Artificial Sequence: Synthetic oligonucleotide
guacagcagaugagacgga

SEQ ID NO: 749413 - RNA, 19 nt, Artificial Sequence
  Description of Artificial Sequence: Synthetic oligonucleotide
ggcccguagcaccacauau

SEQ ID NO: 749414 - RNA, 19 nt, Artificial Sequence
  Description of Artificial Sequence: Synthetic oligonucleotide
ggaugugggguaacugcaa

SEQ ID NO: 749415 - RNA, 19 nt, Artificial Sequence
  Description of Artificial Sequence: Synthetic oligonucleotide
gugguuggcaaaaccuuuu

SEQ ID NO: 749416 - RNA, 19 nt, Artificial Sequence
  Description of Artificial Sequence: Synthetic oligonucleotide
cgaauccuggcccguagca

SEQ ID NO: 749417 - RNA, 19 nt, Artificial Sequence
  Description of Artificial Sequence: Synthetic oligonucleotide
gcacuaagccagaacuugu

SEQ ID NO: 749418 - RNA, 19 nt, Artificial Sequence
  Description of Artificial Sequence: Synthetic oligonucleotide
ccuuccgguggguggagga

SEQ ID NO: 749419 - RNA, 19 nt, Artificial Sequence
  Description of Artificial Sequence: Synthetic oligonucleotide
ggcgcucaggcuuccucaa

SEQ ID NO: 749420 - RNA, 19 nt, Artificial Sequence
  Description of Artificial Sequence: Synthetic oligonucleotide
ggaauugugcugcccucuu

SEQ ID NO: 749421 - RNA, 19 nt, Artificial Sequence
  Description of Artificial Sequence: Synthetic oligonucleotide
gagcgauaucugccuguuu

SEQ ID NO: 749422 - RNA, 19 nt, Artificial Sequence
  Description of Artificial Sequence: Synthetic oligonucleotide
gcccguagcaccacauaua

SEQ ID NO: 749423 - RNA, 19 nt, Artificial Sequence
  Description of Artificial Sequence: Synthetic oligonucleotide
ccauuccaauuucaacacu

SEQ ID NO: 749424 - RNA, 19 nt, Artificial Sequence
  Description of Artificial Sequence: Synthetic oligonucleotide
ccguggaaaugugguggug

SEQ ID NO: 749425 - RNA, 19 nt, Artificial Sequence
  Description of Artificial Sequence: Synthetic oligonucleotide
ggugaacauuaugccuugu

SEQ ID NO: 749426 - RNA, 19 nt, Artificial Sequence
  Description of Artificial Sequence: Synthetic oligonucleotide
ccgagggaugugggguaac

SEQ ID NO: 749427 - RNA, 19 nt, Artificial Sequence
  Description of Artificial Sequence: Synthetic oligonucleotide
ccgagcaaaguagcaugcu

SEQ ID NO: 749428 - RNA, 19 nt, Artificial Sequence
  Description of Artificial Sequence: Synthetic oligonucleotide
cuuugccgcuguggccucu

SEQ ID NO: 749429 - RNA, 19 nt, Artificial Sequence
  Description of Artificial Sequence: Synthetic oligonucleotide
ccugcaguagucggcgguu

SEQ ID NO: 749430 - RNA, 19 nt, Artificial Sequence
  Description of Artificial Sequence: Synthetic oligonucleotide
gucggcgcucaggcuuccu

SEQ ID NO: 749431 - RNA, 19 nt, Artificial Sequence
  Description of Artificial Sequence: Synthetic oligonucleotide
gcgacagggcucgguuacu

SEQ ID NO: 749432 - RNA, 19 nt, Artificial Sequence
  Description of Artificial Sequence: Synthetic oligonucleotide
ccacacccacauacgucau

SEQ ID NO: 749433 - RNA, 19 nt, Artificial Sequence
  Description of Artificial Sequence: Synthetic oligonucleotide
gaaugugacacucaguugg

SEQ ID NO: 749434 - RNA, 19 nt, Artificial Sequence
  Description of Artificial Sequence: Synthetic oligonucleotide
ugugauugaacucagaguc

SEQ ID NO: 749435 - RNA, 19 nt, Artificial Sequence
  Description of Artificial Sequence: Synthetic oligonucleotide
aaggguguuaacuugaaga

SEQ ID NO: 749436 - RNA, 19 nt, Artificial Sequence
  Description of Artificial Sequence: Synthetic oligonucleotide
aacgacucaacucugaagu

SEQ ID NO: 749437 - RNA, 19 nt, Artificial Sequence
  Description of Artificial Sequence: Synthetic oligonucleotide
aacuugaagagauucaacu

SEQ ID NO: 749438 - RNA, 19 nt, Artificial Sequence
  Description of Artificial Sequence: Synthetic oligonucleotide
agaacuauguucaugauag

SEQ ID NO: 749439 - RNA, 19 nt, Artificial Sequence
  Description of Artificial Sequence: Synthetic oligonucleotide
ugaccuaaugcauauagag

SEQ ID NO: 749440 - RNA, 19 nt, Artificial Sequence
  Description of Artificial Sequence: Synthetic oligonucleotide
ugagacagaacuauguuca

SEQ ID NO: 749441 - RNA, 19 nt, Artificial Sequence
  Description of Artificial Sequence: Synthetic oligonucleotide
guugcuauaagugauaggc

SEQ ID NO: 749442 - RNA, 19 nt, Artificial Sequence
  Description of Artificial Sequence: Synthetic oligonucleotide
ucugugauugaacucagag

SEQ ID NO: 749443 - RNA, 19 nt, Artificial Sequence
  Description of Artificial Sequence: Synthetic oligonucleotide
uuaauugaaaccuuguaau

SEQ ID NO: 749444 - RNA, 19 nt, Artificial Sequence
  Description of Artificial Sequence: Synthetic oligonucleotide
aaagauggcgucaaaagag

SEQ ID NO: 749445 - RNA, 19 nt, Artificial Sequence
  Description of Artificial Sequence: Synthetic oligonucleotide
uuugcaaugcucuuguuga

SEQ ID NO: 749446 - RNA, 19 nt, Artificial Sequence
  Description of Artificial Sequence: Synthetic oligonucleotide
aaggacuuuucccacuccc

SEQ ID NO: 749447 - RNA, 19 nt, Artificial Sequence
  Description of Artificial Sequence: Synthetic oligonucleotide
ugcuauaagugauaggcag

SEQ ID NO: 749448 - RNA, 19 nt, Artificial Sequence
  Description of Artificial Sequence: Synthetic oligonucleotide
ucuugcaccaaauaggcac

SEQ ID NO: 749449 - RNA, 19 nt, Artificial Sequence
  Description of Artificial Sequence: Synthetic oligonucleotide
ugugugagauaaaagacgu

SEQ ID NO: 749450 - RNA, 19 nt, Artificial Sequence
  Description of Artificial Sequence: Synthetic oligonucleotide
aaauguauccuugaaggug

SEQ ID NO: 749451 - RNA, 19 nt, Artificial Sequence
  Description of Artificial Sequence: Synthetic oligonucleotide
ugaaaccuuguaauaaaag

SEQ ID NO: 749452 - RNA, 19 nt, Artificial Sequence
  Description of Artificial Sequence: Synthetic oligonucleotide
uuaugaauccaccuuuccc

SEQ ID NO: 749453 - RNA, 19 nt, Artificial Sequence
  Description of Artificial Sequence: Synthetic oligonucleotide
cauguugucccaaagucgg

SEQ ID NO: 749454 - RNA, 19 nt, Artificial Sequence
  Description of Artificial Sequence: Synthetic oligonucleotide
ucuaaagucuuacacacua

SEQ ID NO: 749455 - RNA, 19 nt, Artificial Sequence
  Description of Artificial Sequence: Synthetic oligonucleotide
aagucuuacacacuaacuu

SEQ ID NO: 749456 - RNA, 19 nt, Artificial Sequence
  Description of Artificial Sequence: Synthetic oligonucleotide
guaaggaacggagaaaugg

SEQ ID NO: 749457 - RNA, 19 nt, Artificial Sequence
  Description of Artificial Sequence: Synthetic oligonucleotide
agcacuaugucuuccacag

SEQ ID NO: 749458 - RNA, 19 nt, Artificial Sequence
  Description of Artificial Sequence: Synthetic oligonucleotide
cuuuacaucaccucugaug

SEQ ID NO: 749459 - RNA, 19 nt, Artificial Sequence
  Description of Artificial Sequence: Synthetic oligonucleotide
uaaugcauauagaggacag

SEQ ID NO: 749460 - RNA, 19 nt, Artificial Sequence
  Description of Artificial Sequence: Synthetic oligonucleotide
auucuugcaccaaauaggc

SEQ ID NO: 749461 - RNA, 19 nt, Artificial Sequence
  Description of Artificial Sequence: Synthetic oligonucleotide
cucuguucaaccaugacuc

SEQ ID NO: 749462 - RNA, 19 nt, Artificial Sequence
  Description of Artificial Sequence: Synthetic oligonucleotide
uaaagucuuacacacuaac

SEQ ID NO: 749463 - RNA, 19 nt, Artificial Sequence
  Description of Artificial Sequence: Synthetic oligonucleotide
uucacugccccucggaagg

SEQ ID NO: 749464 - RNA, 19 nt, Artificial Sequence
  Description of Artificial Sequence: Synthetic oligonucleotide
aagucggcuugcuucaugg

SEQ ID NO: 749465 - RNA, 19 nt, Artificial Sequence
  Description of Artificial Sequence: Synthetic oligonucleotide
agauaaaagacgugggugu

SEQ ID NO: 749466 - RNA, 19 nt, Artificial Sequence
  Description of Artificial Sequence: Synthetic oligonucleotide
ugagauaaaagacgugggu

SEQ ID NO: 749467 - RNA, 19 nt, Artificial Sequence
  Description of Artificial Sequence: Synthetic oligonucleotide
cuauuuaauugaaaccuug

SEQ ID NO: 749468 - RNA, 19 nt, Artificial Sequence
  Description of Artificial Sequence: Synthetic oligonucleotide
uucaagacguuacuuguca

SEQ ID NO: 749469 - RNA, 19 nt, Artificial Sequence
  Description of Artificial Sequence: Synthetic oligonucleotide
cuugaagagauucaacuuc

SEQ ID NO: 749470 - RNA, 19 nt, Artificial Sequence
  Description of Artificial Sequence: Synthetic oligonucleotide
gaguuaaccaugaagggug

SEQ ID NO: 749471 - RNA, 19 nt, Artificial Sequence
  Description of Artificial Sequence: Synthetic oligonucleotide
acguaagcuauuuccacac

SEQ ID NO: 749472 - RNA, 19 nt, Artificial Sequence
  Description of Artificial Sequence: Synthetic oligonucleotide
aacuauguucaugauagcu

SEQ ID NO: 749473 - RNA, 19 nt, Artificial Sequence
  Description of Artificial Sequence: Synthetic oligonucleotide
ucucuauucuuucuaccag

SEQ ID NO: 749474 - RNA, 19 nt, Artificial Sequence
  Description of Artificial Sequence: Synthetic oligonucleotide
auaggcacgugaucgauag

SEQ ID NO: 749475 - RNA, 19 nt, Artificial Sequence
  Description of Artificial Sequence: Synthetic oligonucleotide
gaacuggcuauuuguaagg

SEQ ID NO: 749476 - RNA, 19 nt, Artificial Sequence
  Description of Artificial Sequence: Synthetic oligonucleotide
ugccuauuuaauugaaacc

SEQ ID NO: 749477 - RNA, 19 nt, Artificial Sequence
  Description of Artificial Sequence: Synthetic oligonucleotide
uuuccugacucucuugcag

SEQ ID NO: 749478 - RNA, 19 nt, Artificial Sequence
  Description of Artificial Sequence: Synthetic oligonucleotide
ucccacauggcugagacag

SEQ ID NO: 749479 - RNA, 19 nt, Artificial Sequence
  Description of Artificial Sequence: Synthetic oligonucleotide
uugaaggugauucuccuuc

SEQ ID NO: 749480 - RNA, 19 nt, Artificial Sequence
  Description of Artificial Sequence: Synthetic oligonucleotide
gagauaaaagacgugggug

SEQ ID NO: 749481 - RNA, 19 nt, Artificial Sequence
  Description of Artificial Sequence: Synthetic oligonucleotide
aagaugguagcucccacgu

SEQ ID NO: 749482 - RNA, 19 nt, Artificial Sequence
  Description of Artificial Sequence: Synthetic oligonucleotide
uauagauuuguuggugggg

SEQ ID NO: 749483 - RNA, 19 nt, Artificial Sequence
  Description of Artificial Sequence: Synthetic oligonucleotide
uccccuacaaagaucuucc

SEQ ID NO: 749484 - RNA, 19 nt, Artificial Sequence
  Description of Artificial Sequence: Synthetic oligonucleotide
ucccacguaagcuauuucc

SEQ ID NO: 749485 - RNA, 19 nt, Artificial Sequence
  Description of Artificial Sequence: Synthetic oligonucleotide
uacccguacagccucauca

SEQ ID NO: 749486 - RNA, 19 nt, Artificial Sequence
  Description of Artificial Sequence: Synthetic oligonucleotide
guucucuaaagucuuacac

SEQ ID NO: 749487 - RNA, 19 nt, Artificial Sequence
  Description of Artificial Sequence: Synthetic oligonucleotide
uaaaagacguggguguggg

SEQ ID NO: 749488 - RNA, 19 nt, Artificial Sequence
  Description of Artificial Sequence: Synthetic oligonucleotide
agaaauggcagguccaacu

SEQ ID NO: 749489 - RNA, 19 nt, Artificial Sequence
  Description of Artificial Sequence: Synthetic oligonucleotide
ugcaaggacagaguuaacc

SEQ ID NO: 749490 - RNA, 19 nt, Artificial Sequence
  Description of Artificial Sequence: Synthetic oligonucleotide
aaugcauauagaggacagg

SEQ ID NO: 749491 - RNA, 19 nt, Artificial Sequence
  Description of Artificial Sequence: Synthetic oligonucleotide
agauuucacaguggcaugc

SEQ ID NO: 749492 - RNA, 19 nt, Artificial Sequence
  Description of Artificial Sequence: Synthetic oligonucleotide
acaaagcauucacugcccc

SEQ ID NO: 749493 - RNA, 19 nt, Artificial Sequence
  Description of Artificial Sequence: Synthetic oligonucleotide
acuuagcccuuaugaaucc

SEQ ID NO: 749494 - RNA, 19 nt, Artificial Sequence
  Description of Artificial Sequence: Synthetic oligonucleotide
ucuggaauccugauauugu

SEQ ID NO: 749495 - RNA, 19 nt, Artificial Sequence
  Description of Artificial Sequence: Synthetic oligonucleotide
gguauagauuuguuggugg

SEQ ID NO: 749496 - RNA, 19 nt, Artificial Sequence
  Description of Artificial Sequence: Synthetic oligonucleotide
ugugacacucaguugguga

SEQ ID NO: 749497 - RNA, 19 nt, Artificial Sequence
  Description of Artificial Sequence: Synthetic oligonucleotide
aagauggcgucaaaagagg

SEQ ID NO: 749498 - RNA, 19 nt, Artificial Sequence
  Description of Artificial Sequence: Synthetic oligonucleotide
uucauccucagaaaacgac

SEQ ID NO: 749499 - RNA, 19 nt, Artificial Sequence
  Description of Artificial Sequence: Synthetic oligonucleotide
aagacguuacuugucagcu

SEQ ID NO: 749500 - RNA, 19 nt, Artificial Sequence
  Description of Artificial Sequence: Synthetic oligonucleotide
acaugaguggcagagguag

SEQ ID NO: 749501 - RNA, 19 nt, Artificial Sequence
  Description of Artificial Sequence: Synthetic oligonucleotide
uaacuuagcccuuaugaau

SEQ ID NO: 749502 - RNA, 19 nt, Artificial Sequence
  Description of Artificial Sequence: Synthetic oligonucleotide
cagaguuaaccaugaaggg

SEQ ID NO: 749503 - RNA, 19 nt, Artificial Sequence
  Description of Artificial Sequence: Synthetic oligonucleotide
aaaacgacucaacucugaa

SEQ ID NO: 749504 - RNA, 19 nt, Artificial Sequence
  Description of Artificial Sequence: Synthetic oligonucleotide
cuuugcaaugcucuuguug

SEQ ID NO: 749505 - RNA, 19 nt, Artificial Sequence
  Description of Artificial Sequence: Synthetic oligonucleotide
ugcucugugauugaacuca

SEQ ID NO: 749506 - RNA, 19 nt, Artificial Sequence
  Description of Artificial Sequence: Synthetic oligonucleotide
ucuaguugguaucuucuuc

SEQ ID NO: 749507 - RNA, 19 nt, Artificial Sequence
  Description of Artificial Sequence: Synthetic oligonucleotide
aucuaaaacucugugugag

SEQ ID NO: 749508 - RNA, 19 nt, Artificial Sequence
  Description of Artificial Sequence: Synthetic oligonucleotide
aaaugcucugugauugaac

SEQ ID NO: 749509 - RNA, 19 nt, Artificial Sequence
  Description of Artificial Sequence: Synthetic oligonucleotide
cauauagaggacaggcaag

SEQ ID NO: 749510 - RNA, 19 nt, Artificial Sequence
  Description of Artificial Sequence: Synthetic oligonucleotide
guugcacugucccacacag

SEQ ID NO: 749511 - RNA, 19 nt, Artificial Sequence
  Description of Artificial Sequence: Synthetic oligonucleotide
cuugcaccaaauaggcacg

SEQ ID NO: 749512 - RNA, 19 nt, Artificial Sequence
  Description of Artificial Sequence: Synthetic oligonucleotide
aaagucuuacacacuaacu

SEQ ID NO: 749513 - RNA, 19 nt, Artificial Sequence
  Description of Artificial Sequence: Synthetic oligonucleotide
uaugccucuucuuugcacu

SEQ ID NO: 749514 - RNA, 19 nt, Artificial Sequence
  Description of Artificial Sequence: Synthetic oligonucleotide
ggcaaugccuauuuaauug

SEQ ID NO: 749515 - RNA, 19 nt, Artificial Sequence
  Description of Artificial Sequence: Synthetic oligonucleotide
uuuuccacuacugcgauuu

SEQ ID NO: 749516 - RNA, 19 nt, Artificial Sequence
  Description of Artificial Sequence: Synthetic oligonucleotide
uugcaagaaauacucccca

SEQ ID NO: 749517 - RNA, 19 nt, Artificial Sequence
  Description of Artificial Sequence: Synthetic oligonucleotide
uuccacaccaaaucuaaaa

SEQ ID NO: 749518 - RNA, 19 nt, Artificial Sequence
  Description of Artificial Sequence: Synthetic oligonucleotide
ucugcaaaguccaaaucuu

SEQ ID NO: 749519 - RNA, 19 nt, Artificial Sequence
  Description of Artificial Sequence: Synthetic oligonucleotide
ugaugguucccuccaacca

SEQ ID NO: 749520 - RNA, 19 nt, Artificial Sequence
  Description of Artificial Sequence: Synthetic oligonucleotide
uugaaaccuuguaauaaaa

SEQ ID NO: 749521 - RNA, 19 nt, Artificial Sequence
  Description of Artificial Sequence: Synthetic oligonucleotide
ugcauauagaggacaggca

SEQ ID NO: 749522 - RNA, 19 nt, Artificial Sequence
  Description of Artificial Sequence: Synthetic oligonucleotide
uucuguugcuauaagugau

SEQ ID NO: 749523 - RNA, 19 nt, Artificial Sequence
  Description of Artificial Sequence: Synthetic oligonucleotide
aaauggcagguccaacucu

SEQ ID NO: 749524 - RNA, 19 nt, Artificial Sequence
  Description of Artificial Sequence: Synthetic oligonucleotide
uuaugagccgcuucuuggc

SEQ ID NO: 749525 - RNA, 19 nt, Artificial Sequence
  Description of Artificial Sequence: Synthetic oligonucleotide
gacuacuccuguuuucaag

SEQ ID NO: 749526 - RNA, 19 nt, Artificial Sequence
  Description of Artificial Sequence: Synthetic oligonucleotide
cuuaugaauccaccuuucc

SEQ ID NO: 749527 - RNA, 19 nt, Artificial Sequence
  Description of Artificial Sequence: Synthetic oligonucleotide
auuuggucauuaugagccg

SEQ ID NO: 749528 - RNA, 19 nt, Artificial Sequence
  Description of Artificial Sequence: Synthetic oligonucleotide
ucuguuacccguacagccu

SEQ ID NO: 749529 - RNA, 19 nt, Artificial Sequence
  Description of Artificial Sequence: Synthetic oligonucleotide
uucaugauagcugggguac

SEQ ID NO: 749530 - RNA, 19 nt, Artificial Sequence
  Description of Artificial Sequence: Synthetic oligonucleotide
uucccuccaaccaacgucu

SEQ ID NO: 749531 - RNA, 19 nt, Artificial Sequence
  Description of Artificial Sequence: Synthetic oligonucleotide
caagaugguagcucccacg

SEQ ID NO: 749532 - RNA, 19 nt, Artificial Sequence
  Description of Artificial Sequence: Synthetic oligonucleotide
gaugguagcucccacguaa

SEQ ID NO: 749533 - RNA, 19 nt, Artificial Sequence
  Description of Artificial Sequence: Synthetic oligonucleotide
ugucauuugguaugccucu

SEQ ID NO: 749534 - RNA, 19 nt, Artificial Sequence
  Description of Artificial Sequence: Synthetic oligonucleotide
aacucagagucucccauaa

SEQ ID NO: 749535 - RNA, 19 nt, Artificial Sequence
  Description of Artificial Sequence: Synthetic oligonucleotide
cugagacagaacuauguuc

SEQ ID NO: 749536 - RNA, 19 nt, Artificial Sequence
  Description of Artificial Sequence: Synthetic oligonucleotide
accaaauaggcacgugauc

SEQ ID NO: 749537 - RNA, 19 nt, Artificial Sequence
  Description of Artificial Sequence: Synthetic oligonucleotide
aacucugugugagauaaaa

SEQ ID NO: 749538 - RNA, 19 nt, Artificial Sequence
  Description of Artificial Sequence: Synthetic oligonucleotide
uaaugaugagguuucguuu

SEQ ID NO: 749539 - RNA, 19 nt, Artificial Sequence
  Description of Artificial Sequence: Synthetic oligonucleotide
ggaacuggcuauuuguaag

SEQ ID NO: 749540 - RNA, 19 nt, Artificial Sequence
  Description of Artificial Sequence: Synthetic oligonucleotide
gcuugcaagaaauacuccc

SEQ ID NO: 749541 - RNA, 19 nt, Artificial Sequence
  Description of Artificial Sequence: Synthetic oligonucleotide
uugcuauaagugauaggca

SEQ ID NO: 749542 - RNA, 19 nt, Artificial Sequence
  Description of Artificial Sequence: Synthetic oligonucleotide
guaagcuauuuccacacca

SEQ ID NO: 749543 - RNA, 19 nt, Artificial Sequence
  Description of Artificial Sequence: Synthetic oligonucleotide
aggcacgugaucgauaguc

SEQ ID NO: 749544 - RNA, 19 nt, Artificial Sequence
  Description of Artificial Sequence: Synthetic oligonucleotide
uaugccgggcacaaggcac

SEQ ID NO: 749545 - RNA, 19 nt, Artificial Sequence
  Description of Artificial Sequence: Synthetic oligonucleotide
gauagucagcucuucguca

SEQ ID NO: 749546 - RNA, 19 nt, Artificial Sequence
  Description of Artificial Sequence: Synthetic oligonucleotide
agaguuaaccaugaagggu

SEQ ID NO: 749547 - RNA, 19 nt, Artificial Sequence
  Description of Artificial Sequence: Synthetic oligonucleotide
uuucacaguggcaugccaa

SEQ ID NO: 749548 - RNA, 19 nt, Artificial Sequence
  Description of Artificial Sequence: Synthetic oligonucleotide
ucuaaaacucugugugaga

SEQ ID NO: 749549 - RNA, 19 nt, Artificial Sequence
  Description of Artificial Sequence: Synthetic oligonucleotide
gguuuugcagaugacauug

SEQ ID NO: 749550 - RNA, 19 nt, Artificial Sequence
  Description of Artificial Sequence: Synthetic oligonucleotide
uguucucuagugauuuggu

SEQ ID NO: 749551 - RNA, 19 nt, Artificial Sequence
  Description of Artificial Sequence: Synthetic oligonucleotide
ucgauagucagcucuucgu

SEQ ID NO: 749552 - RNA, 19 nt, Artificial Sequence
  Description of Artificial Sequence: Synthetic oligonucleotide
uuagcccuuaugaauccac

SEQ ID NO: 749553 - RNA, 19 nt, Artificial Sequence
  Description of Artificial Sequence: Synthetic oligonucleotide
ucaagacguuacuugucag

SEQ ID NO: 749554 - RNA, 19 nt, Artificial Sequence
  Description of Artificial Sequence: Synthetic oligonucleotide
uuuaaugaugagguuucgu

SEQ ID NO: 749555 - RNA, 19 nt, Artificial Sequence
  Description of Artificial Sequence: Synthetic oligonucleotide
auaaaagacgugggugugg

SEQ ID NO: 749556 - RNA, 19 nt, Artificial Sequence
  Description of Artificial Sequence: Synthetic oligonucleotide
uguuguugcacugucccac

SEQ ID NO: 749557 - RNA, 19 nt, Artificial Sequence
  Description of Artificial Sequence: Synthetic oligonucleotide
auuaugccgggcacaaggc

SEQ ID NO: 749558 - RNA, 19 nt, Artificial Sequence
  Description of Artificial Sequence: Synthetic oligonucleotide
gauaaaagacgugggugug

SEQ ID NO: 749559 - RNA, 19 nt, Artificial Sequence
  Description of Artificial Sequence: Synthetic oligonucleotide
gguguuguugcacuguccc

SEQ ID NO: 749560 - RNA, 19 nt, Artificial Sequence
  Description of Artificial Sequence: Synthetic oligonucleotide
ucuauucuuucuaccaguu

SEQ ID NO: 749561 - RNA, 19 nt, Artificial Sequence
  Description of Artificial Sequence: Synthetic oligonucleotide
uucgucagcugaugcaaag

SEQ ID NO: 749562 - RNA, 19 nt, Artificial Sequence
  Description of Artificial Sequence: Synthetic oligonucleotide
ugggcaaugccuauuuaau

SEQ ID NO: 749563 - RNA, 19 nt, Artificial Sequence
  Description of Artificial Sequence: Synthetic oligonucleotide
aguugguaucuucuuccuc

SEQ ID NO: 749564 - RNA, 19 nt, Artificial Sequence
  Description of Artificial Sequence: Synthetic oligonucleotide
agugcguuccauggcacgc

SEQ ID NO: 749565 - RNA, 19 nt, Artificial Sequence
  Description of Artificial Sequence: Synthetic oligonucleotide
gugacacucaguuggugag

SEQ ID NO: 749566 - RNA, 19 nt, Artificial Sequence
  Description of Artificial Sequence: Synthetic oligonucleotide
ggaacggagaaauggcagg

SEQ ID NO: 749567 - RNA, 19 nt, Artificial Sequence
  Description of Artificial Sequence: Synthetic oligonucleotide
gaaggguguuaacuugaag

SEQ ID NO: 749568 - RNA, 19 nt, Artificial Sequence
  Description of Artificial Sequence: Synthetic oligonucleotide
ugguaugccucuucuuugc

SEQ ID NO: 749569 - RNA, 19 nt, Artificial Sequence
  Description of Artificial Sequence: Synthetic oligonucleotide
gcuauuuccacaccaaauc

SEQ ID NO: 749570 - RNA, 19 nt, Artificial Sequence
  Description of Artificial Sequence: Synthetic oligonucleotide
ucuuucuaccaguucugga

SEQ ID NO: 749571 - RNA, 19 nt, Artificial Sequence
  Description of Artificial Sequence: Synthetic oligonucleotide
caugguaaggauggugucc

SEQ ID NO: 749572 - RNA, 19 nt, Artificial Sequence
  Description of Artificial Sequence: Synthetic oligonucleotide
ucugaugguucccuccaac

SEQ ID NO: 749573 - RNA, 19 nt, Artificial Sequence
  Description of Artificial Sequence: Synthetic oligonucleotide
auucacugccccucggaag

SEQ ID NO: 749574 - RNA, 19 nt, Artificial Sequence
  Description of Artificial Sequence: Synthetic oligonucleotide
caaagauggcgucaaaaga

SEQ ID NO: 749575 - RNA, 19 nt, Artificial Sequence
  Description of Artificial Sequence: Synthetic oligonucleotide
uagauuucacaguggcaug

SEQ ID NO: 749576 - RNA, 19 nt, Artificial Sequence
  Description of Artificial Sequence: Synthetic oligonucleotide
aagugaggaagcugggcaa

SEQ ID NO: 749577 - RNA, 19 nt, Artificial Sequence
  Description of Artificial Sequence: Synthetic oligonucleotide
ugccagaguuucaaauagc

SEQ ID NO: 749578 - RNA, 19 nt, Artificial Sequence
  Description of Artificial Sequence: Synthetic oligonucleotide
uuuggucauuaugagccgc

SEQ ID NO: 749579 - RNA, 19 nt, Artificial Sequence
  Description of Artificial Sequence: Synthetic oligonucleotide
agcaaaggcuugcucagcu

SEQ ID NO: 749580 - RNA, 19 nt, Artificial Sequence
  Description of Artificial Sequence: Synthetic oligonucleotide
cauuaugagccgcuucuug

SEQ ID NO: 749581 - RNA, 19 nt, Artificial Sequence
  Description of Artificial Sequence: Synthetic oligonucleotide
augagccgcuucuuggcac

SEQ ID NO: 749582 - RNA, 19 nt, Artificial Sequence
  Description of Artificial Sequence: Synthetic oligonucleotide
uuaugccgggcacaaggca

SEQ ID NO: 749583 - RNA, 19 nt, Artificial Sequence
  Description of Artificial Sequence: Synthetic oligonucleotide
ugugcacccaucuucugau

SEQ ID NO: 749584 - RNA, 19 nt, Artificial Sequence
  Description of Artificial Sequence: Synthetic oligonucleotide
aacggagaaauggcagguc

SEQ ID NO: 749585 - RNA, 19 nt, Artificial Sequence
  Description of Artificial Sequence: Synthetic oligonucleotide
uagcccuuaugaauccacc

SEQ ID NO: 749586 - RNA, 19 nt, Artificial Sequence
  Description of Artificial Sequence: Synthetic oligonucleotide
uuggucauuaugagccgcu

SEQ ID NO: 749587 - RNA, 19 nt, Artificial Sequence
  Description of Artificial Sequence: Synthetic oligonucleotide
ugguacuuucgcccgacgu

SEQ ID NO: 749588 - RNA, 19 nt, Artificial Sequence
  Description of Artificial Sequence: Synthetic oligonucleotide
gacguuacuugucagcucu

SEQ ID NO: 749589 - RNA, 19 nt, Artificial Sequence
  Description of Artificial Sequence: Synthetic oligonucleotide
uccgcauguugucccaaag

SEQ ID NO: 749590 - RNA, 19 nt, Artificial Sequence
  Description of Artificial Sequence: Synthetic oligonucleotide
aagauuaugccgggcacaa

SEQ ID NO: 749591 - RNA, 19 nt, Artificial Sequence
  Description of Artificial Sequence: Synthetic oligonucleotide
ugggcaagauuaugccggg

SEQ ID NO: 749592 - RNA, 19 nt, Artificial Sequence
  Description of Artificial Sequence: Synthetic oligonucleotide
ugaugcaaagaguucucua

SEQ ID NO: 749593 - RNA, 19 nt, Artificial Sequence
  Description of Artificial Sequence: Synthetic oligonucleotide
aaugccuauuuaauugaaa

SEQ ID NO: 749594 - RNA, 19 nt, Artificial Sequence
  Description of Artificial Sequence: Synthetic oligonucleotide
guucccuccaaccaacguc

SEQ ID NO: 749595 - RNA, 19 nt, Artificial Sequence
  Description of Artificial Sequence: Synthetic oligonucleotide
gaugguucccuccaaccaa

SEQ ID NO: 749596 - RNA, 19 nt, Artificial Sequence
  Description of Artificial Sequence: Synthetic oligonucleotide
acaaggcacuuucacaaaa

SEQ ID NO: 749597 - RNA, 19 nt, Artificial Sequence
  Description of Artificial Sequence: Synthetic oligonucleotide
acgugaucgauagucagcu

SEQ ID NO: 749598 - RNA, 19 nt, Artificial Sequence
  Description of Artificial Sequence: Synthetic oligonucleotide
uagcacuaugucuuccaca

SEQ ID NO: 749599 - RNA, 19 nt, Artificial Sequence
  Description of Artificial Sequence: Synthetic oligonucleotide
agguauagauuuguuggug

SEQ ID NO: 749600 - RNA, 19 nt, Artificial Sequence
  Description of Artificial Sequence: Synthetic oligonucleotide
ccugaccuaaugcauauag

SEQ ID NO: 749601 - RNA, 19 nt, Artificial Sequence
  Description of Artificial Sequence: Synthetic oligonucleotide
gaagaaggguccaaauguc

SEQ ID NO: 749602 - RNA, 19 nt, Artificial Sequence
  Description of Artificial Sequence: Synthetic oligonucleotide
agaauguacucugcaaagu

SEQ ID NO: 749603 - RNA, 19 nt, Artificial Sequence
  Description of Artificial Sequence: Synthetic oligonucleotide
ggaguggaagguuuugcag

SEQ ID NO: 749604 - RNA, 19 nt, Artificial Sequence
  Description of Artificial Sequence: Synthetic oligonucleotide
caugugucauuugguaugc

SEQ ID NO: 749605 - RNA, 19 nt, Artificial Sequence
  Description of Artificial Sequence: Synthetic oligonucleotide
agacguuacuugucagcuc

SEQ ID NO: 749606 - RNA, 19 nt, Artificial Sequence
  Description of Artificial Sequence: Synthetic oligonucleotide
uguugucccaaagucggcu

SEQ ID NO: 749607 - RNA, 19 nt, Artificial Sequence
  Description of Artificial Sequence: Synthetic oligonucleotide
cuguugcuauaagugauag

SEQ ID NO: 749608 - RNA, 19 nt, Artificial Sequence
  Description of Artificial Sequence: Synthetic oligonucleotide
gaaggugauucuccuucug

SEQ ID NO: 749609 - RNA, 19 nt, Artificial Sequence
  Description of Artificial Sequence: Synthetic oligonucleotide
ugucccuuuacaucaccuc

SEQ ID NO: 749610 - RNA, 19 nt, Artificial Sequence
  Description of Artificial Sequence: Synthetic oligonucleotide
auaagcagggaugcagcag

SEQ ID NO: 749611 - RNA, 19 nt, Artificial Sequence
  Description of Artificial Sequence: Synthetic oligonucleotide
ucuagugauuuggucauua

SEQ ID NO: 749612 - RNA, 19 nt, Artificial Sequence
  Description of Artificial Sequence: Synthetic oligonucleotide
aggaacggagaaauggcag

SEQ ID NO: 749613 - RNA, 19 nt, Artificial Sequence
  Description of Artificial Sequence: Synthetic oligonucleotide
ugaucgauagucagcucuu

SEQ ID NO: 749614 - RNA, 19 nt, Artificial Sequence
  Description of Artificial Sequence: Synthetic oligonucleotide
uauguggcaucucucuauu

SEQ ID NO: 749615 - RNA, 19 nt, Artificial Sequence
  Description of Artificial Sequence: Synthetic oligonucleotide
agagucaggauguucucua

SEQ ID NO: 749616 - RNA, 19 nt, Artificial Sequence
  Description of Artificial Sequence: Synthetic oligonucleotide
agcccuuaugaauccaccu

SEQ ID NO: 749617 - RNA, 19 nt, Artificial Sequence
  Description of Artificial Sequence: Synthetic oligonucleotide
uucuugcaccaaauaggca

SEQ ID NO: 749618 - RNA, 19 nt, Artificial Sequence
  Description of Artificial Sequence: Synthetic oligonucleotide
gaugccacucugaugguuc

SEQ ID NO: 749619 - RNA, 19 nt, Artificial Sequence
  Description of Artificial Sequence: Synthetic oligonucleotide
ugaaggguguuaacuugaa

SEQ ID NO: 749620 - RNA, 19 nt, Artificial Sequence
  Description of Artificial Sequence: Synthetic oligonucleotide
cugaagugaggaagcuggg

SEQ ID NO: 749621 - RNA, 19 nt, Artificial Sequence
  Description of Artificial Sequence: Synthetic oligonucleotide
ucggaagguauagauuugu

SEQ ID NO: 749622 - RNA, 19 nt, Artificial Sequence
  Description of Artificial Sequence: Synthetic oligonucleotide
gauuucacaguggcaugcc

SEQ ID NO: 749623 - RNA, 19 nt, Artificial Sequence
  Description of Artificial Sequence: Synthetic oligonucleotide
aaugugacacucaguuggu

SEQ ID NO: 749624 - RNA, 19 nt, Artificial Sequence
  Description of Artificial Sequence: Synthetic oligonucleotide
cugcacaugaguggcagag

SEQ ID NO: 749625 - RNA, 19 nt, Artificial Sequence
  Description of Artificial Sequence: Synthetic oligonucleotide
uaguugguaucuucuuccu

SEQ ID NO: 749626 - RNA, 19 nt, Artificial Sequence
  Description of Artificial Sequence: Synthetic oligonucleotide
uccucagcagcagucacgu

SEQ ID NO: 749627 - RNA, 19 nt, Artificial Sequence
  Description of Artificial Sequence: Synthetic oligonucleotide
acaggcaagugggaacugg

SEQ ID NO: 749628 - RNA, 19 nt, Artificial Sequence
  Description of Artificial Sequence: Synthetic oligonucleotide
gugaucgauagucagcucu

SEQ ID NO: 749629 - RNA, 19 nt, Artificial Sequence
  Description of Artificial Sequence: Synthetic oligonucleotide
ucgcccgacgugacuauag

SEQ ID NO: 749630 - RNA, 19 nt, Artificial Sequence
  Description of Artificial Sequence: Synthetic oligonucleotide
cccgacgugacuauaggcc

SEQ ID NO: 749631 - RNA, 19 nt, Artificial Sequence
  Description of Artificial Sequence: Synthetic oligonucleotide
gcauauagaggacaggcaa

SEQ ID NO: 749632 - RNA, 19 nt, Artificial Sequence
  Description of Artificial Sequence: Synthetic oligonucleotide
cuucuguuacccguacagc

SEQ ID NO: 749633 - RNA, 19 nt, Artificial Sequence
  Description of Artificial Sequence: Synthetic oligonucleotide
guucucuagugauuugguc

SEQ ID NO: 749634 - RNA, 19 nt, Artificial Sequence
  Description of Artificial Sequence: Synthetic oligonucleotide
aauggcagguccaacucua

SEQ ID NO: 749635 - RNA, 19 nt, Artificial Sequence
  Description of Artificial Sequence: Synthetic oligonucleotide
ucuguucaaccaugacucu

SEQ ID NO: 749636 - RNA, 19 nt, Artificial Sequence
  Description of Artificial Sequence: Synthetic oligonucleotide
gaaaacgacucaacucuga

SEQ ID NO: 749637 - RNA, 19 nt, Artificial Sequence
  Description of Artificial Sequence: Synthetic oligonucleotide
aaaggcccgauccgcugcu

SEQ ID NO: 749638 - RNA, 19 nt, Artificial Sequence
  Description of Artificial Sequence: Synthetic oligonucleotide
cacguaagcuauuuccaca

SEQ ID NO: 749639 - RNA, 19 nt, Artificial Sequence
  Description of Artificial Sequence: Synthetic oligonucleotide
acucugugugagauaaaag

SEQ ID NO: 749640 - RNA, 19 nt, Artificial Sequence
  Description of Artificial Sequence: Synthetic oligonucleotide
agcaguggacuacuccugu

SEQ ID NO: 749641 - RNA, 19 nt, Artificial Sequence
  Description of Artificial Sequence: Synthetic oligonucleotide
augguucccuccaaccaac

SEQ ID NO: 749642 - RNA, 19 nt, Artificial Sequence
  Description of Artificial Sequence: Synthetic oligonucleotide
aguggacuacuccuguuuu

SEQ ID NO: 749643 - RNA, 19 nt, Artificial Sequence
  Description of Artificial Sequence: Synthetic oligonucleotide
caaaggcccgauccgcugc

SEQ ID NO: 749644 - RNA, 19 nt, Artificial Sequence
  Description of Artificial Sequence: Synthetic oligonucleotide
agaaaacgacucaacucug

SEQ ID NO: 749645 - RNA, 19 nt, Artificial Sequence
  Description of Artificial Sequence: Synthetic oligonucleotide
guucaugauagcuggggua

SEQ ID NO: 749646 - RNA, 19 nt, Artificial Sequence
  Description of Artificial Sequence: Synthetic oligonucleotide
cucggaagguauagauuug

SEQ ID NO: 749647 - RNA, 19 nt, Artificial Sequence
  Description of Artificial Sequence: Synthetic oligonucleotide
agcauucacugccccucgg

SEQ ID NO: 749648 - RNA, 19 nt, Artificial Sequence
  Description of Artificial Sequence: Synthetic oligonucleotide
aagugauaggcaguuucuu

SEQ ID NO: 749649 - RNA, 19 nt, Artificial Sequence
  Description of Artificial Sequence: Synthetic oligonucleotide
ucuccuucuguuacccgua

SEQ ID NO: 749650 - RNA, 19 nt, Artificial Sequence
  Description of Artificial Sequence: Synthetic oligonucleotide
gccuauuuaauugaaaccu

SEQ ID NO: 749651 - RNA, 19 nt, Artificial Sequence
  Description of Artificial Sequence: Synthetic oligonucleotide
uccuguuuucaagacguua

SEQ ID NO: 749652 - RNA, 19 nt, Artificial Sequence
  Description of Artificial Sequence: Synthetic oligonucleotide
cucagaaaacgacucaacu

SEQ ID NO: 749653 - RNA, 19 nt, Artificial Sequence
  Description of Artificial Sequence: Synthetic oligonucleotide
ugucuuuaaugaugagguu

SEQ ID NO: 749654 - RNA, 19 nt, Artificial Sequence
  Description of Artificial Sequence: Synthetic oligonucleotide
ggcaagauuaugccgggca

SEQ ID NO: 749655 - RNA, 19 nt, Artificial Sequence
  Description of Artificial Sequence: Synthetic oligonucleotide
cauaagcagggaugcagca

SEQ ID NO: 749656 - RNA, 19 nt, Artificial Sequence
  Description of Artificial Sequence: Synthetic oligonucleotide
guagcucccacguaagcua

SEQ ID NO: 749657 - RNA, 19 nt, Artificial Sequence
  Description of Artificial Sequence: Synthetic oligonucleotide
gcaaugccuauuuaauuga

SEQ ID NO: 749658 - RNA, 19 nt, Artificial Sequence
  Description of Artificial Sequence: Synthetic oligonucleotide
ccauaagcagggaugcagc

SEQ ID NO: 749659 - RNA, 19 nt, Artificial Sequence
  Description of Artificial Sequence: Synthetic oligonucleotide
uggcgucaaaagaggcaag

SEQ ID NO: 749660 - RNA, 19 nt, Artificial Sequence
  Description of Artificial Sequence: Synthetic oligonucleotide
agugcccagaauguacucu

SEQ ID NO: 749661 - RNA, 19 nt, Artificial Sequence
  Description of Artificial Sequence: Synthetic oligonucleotide
cugaccuaaugcauauaga

SEQ ID NO: 749662 - RNA, 19 nt, Artificial Sequence
  Description of Artificial Sequence: Synthetic oligonucleotide
uguuacccguacagccuca

SEQ ID NO: 749663 - RNA, 19 nt, Artificial Sequence
  Description of Artificial Sequence: Synthetic oligonucleotide
cacagugcguuccauggca

SEQ ID NO: 749664 - RNA, 19 nt, Artificial Sequence
  Description of Artificial Sequence: Synthetic oligonucleotide
cuguuacccguacagccuc

SEQ ID NO: 749665 - RNA, 19 nt, Artificial Sequence
  Description of Artificial Sequence: Synthetic oligonucleotide
agaaggguccaaaugucaa

SEQ ID NO: 749666 - RNA, 19 nt, Artificial Sequence
  Description of Artificial Sequence: Synthetic oligonucleotide
cagugcguuccauggcacg

SEQ ID NO: 749667 - RNA, 19 nt, Artificial Sequence
  Description of Artificial Sequence: Synthetic oligonucleotide
guacuuucgcccgacguga

SEQ ID NO: 749668 - RNA, 19 nt, Artificial Sequence
  Description of Artificial Sequence: Synthetic oligonucleotide
auguugucccaaagucggc

SEQ ID NO: 749669 - RNA, 19 nt, Artificial Sequence
  Description of Artificial Sequence: Synthetic oligonucleotide
ccuaaugcauauagaggac

SEQ ID NO: 749670 - RNA, 19 nt, Artificial Sequence
  Description of Artificial Sequence: Synthetic oligonucleotide
gguguuaacuugaagagau

SEQ ID NO: 749671 - RNA, 19 nt, Artificial Sequence
  Description of Artificial Sequence: Synthetic oligonucleotide
cacuaacuuagcccuuaug

SEQ ID NO: 749672 - RNA, 19 nt, Artificial Sequence
  Description of Artificial Sequence: Synthetic oligonucleotide
augugucauuugguaugcc

SEQ ID NO: 749673 - RNA, 19 nt, Artificial Sequence
  Description of Artificial Sequence: Synthetic oligonucleotide
cuguucaaccaugacucuc

SEQ ID NO: 749674 - RNA, 19 nt, Artificial Sequence
  Description of Artificial Sequence: Synthetic oligonucleotide
acagugcguuccauggcac

SEQ ID NO: 749675 - RNA, 19 nt, Artificial Sequence
  Description of Artificial Sequence: Synthetic oligonucleotide
gucuuuaaugaugagguuu

SEQ ID NO: 749676 - RNA, 19 nt, Artificial Sequence
  Description of Artificial Sequence: Synthetic oligonucleotide
ugccccucggaagguauag

SEQ ID NO: 749677 - RNA, 19 nt, Artificial Sequence
  Description of Artificial Sequence: Synthetic oligonucleotide
ugcguuccauggcacgcac

SEQ ID NO: 749678 - RNA, 19 nt, Artificial Sequence
  Description of Artificial Sequence: Synthetic oligonucleotide
aauaggcacgugaucgaua

SEQ ID NO: 749679 - RNA, 19 nt, Artificial Sequence
  Description of Artificial Sequence: Synthetic oligonucleotide
gacgugacuauaggccaug

SEQ ID NO: 749680 - RNA, 19 nt, Artificial Sequence
  Description of Artificial Sequence: Synthetic oligonucleotide
cauggaguggaagguuuug

SEQ ID NO: 749681 - RNA, 19 nt, Artificial Sequence
  Description of Artificial Sequence: Synthetic oligonucleotide
cugugauugaacucagagu

SEQ ID NO: 749682 - RNA, 19 nt, Artificial Sequence
  Description of Artificial Sequence: Synthetic oligonucleotide
gaauccugauauuguauuu

SEQ ID NO: 749683 - RNA, 19 nt, Artificial Sequence
  Description of Artificial Sequence: Synthetic oligonucleotide
gguagcacuaugucuucca

SEQ ID NO: 749684 - RNA, 19 nt, Artificial Sequence
  Description of Artificial Sequence: Synthetic oligonucleotide
cuggaauccugauauugua

SEQ ID NO: 749685 - RNA, 19 nt, Artificial Sequence
  Description of Artificial Sequence: Synthetic oligonucleotide
ccgaucaaauguauccuug

SEQ ID NO: 749686 - RNA, 19 nt, Artificial Sequence
  Description of Artificial Sequence: Synthetic oligonucleotide
ggcacaaggcacuuucaca

SEQ ID NO: 749687 - RNA, 19 nt, Artificial Sequence
  Description of Artificial Sequence: Synthetic oligonucleotide
guuucguuuccuccguucu

SEQ ID NO: 749688 - RNA, 19 nt, Artificial Sequence
  Description of Artificial Sequence: Synthetic oligonucleotide
accugucuuuaaugaugag

SEQ ID NO: 749689 - RNA, 19 nt, Artificial Sequence
  Description of Artificial Sequence: Synthetic oligonucleotide
uagcucccacguaagcuau

SEQ ID NO: 749690 - RNA, 19 nt, Artificial Sequence
  Description of Artificial Sequence: Synthetic oligonucleotide
caaugccuauuuaauugaa

SEQ ID NO: 749691 - RNA, 19 nt, Artificial Sequence
  Description of Artificial Sequence: Synthetic oligonucleotide
guuguugcacugucccaca

SEQ ID NO: 749692 - RNA, 19 nt, Artificial Sequence
  Description of Artificial Sequence: Synthetic oligonucleotide
cagcacguagagucacagc

SEQ ID NO: 749693 - RNA, 19 nt, Artificial Sequence
  Description of Artificial Sequence: Synthetic oligonucleotide
gaaauacuccccagccaga

SEQ ID NO: 749694 - RNA, 19 nt, Artificial Sequence
  Description of Artificial Sequence: Synthetic oligonucleotide
agccagagucaggauguuc

SEQ ID NO: 749695 - RNA, 19 nt, Artificial Sequence
  Description of Artificial Sequence: Synthetic oligonucleotide
ggcgucaaaagaggcaagc

SEQ ID NO: 749696 - RNA, 19 nt, Artificial Sequence
  Description of Artificial Sequence: Synthetic oligonucleotide
caagauuaugccgggcaca

SEQ ID NO: 749697 - RNA, 19 nt, Artificial Sequence
  Description of Artificial Sequence: Synthetic oligonucleotide
gcuauuuguaaggaacgga

SEQ ID NO: 749698 - RNA, 19 nt, Artificial Sequence
  Description of Artificial Sequence: Synthetic oligonucleotide
uacuuucgcccgacgugac

SEQ ID NO: 749699 - RNA, 19 nt, Artificial Sequence
  Description of Artificial Sequence: Synthetic oligonucleotide
gaagccacuaaagccuucu

SEQ ID NO: 749700 - RNA, 19 nt, Artificial Sequence
  Description of Artificial Sequence: Synthetic oligonucleotide
acgugacuauaggccaugg

SEQ ID NO: 749701 - RNA, 19 nt, Artificial Sequence
  Description of Artificial Sequence: Synthetic oligonucleotide
gaaggguccaaaugucaau

SEQ ID NO: 749702 - RNA, 19 nt, Artificial Sequence
  Description of Artificial Sequence: Synthetic oligonucleotide
gugugagauaaaagacgug

SEQ ID NO: 749703 - RNA, 19 nt, Artificial Sequence
  Description of Artificial Sequence: Synthetic oligonucleotide
acuuucgcccgacgugacu

SEQ ID NO: 749704 - RNA, 19 nt, Artificial Sequence
  Description of Artificial Sequence: Synthetic oligonucleotide
guuacuugucagcucugcu

SEQ ID NO: 749705 - RNA, 19 nt, Artificial Sequence
  Description of Artificial Sequence: Synthetic oligonucleotide
augguagcucccacguaag

SEQ ID NO: 749706 - RNA, 19 nt, Artificial Sequence
  Description of Artificial Sequence: Synthetic oligonucleotide
gguuucguuuccuccguuc

SEQ ID NO: 749707 - RNA, 19 nt, Artificial Sequence
  Description of Artificial Sequence: Synthetic oligonucleotide
ccuuaugaauccaccuuuc

SEQ ID NO: 749708 - RNA, 19 nt, Artificial Sequence
  Description of Artificial Sequence: Synthetic oligonucleotide
acacuaacuuagcccuuau

SEQ ID NO: 749709 - RNA, 19 nt, Artificial Sequence
  Description of Artificial Sequence: Synthetic oligonucleotide
caaaucuucuauguggcau

SEQ ID NO: 749710 - RNA, 19 nt, Artificial Sequence
  Description of Artificial Sequence: Synthetic oligonucleotide
ggucauuaugagccgcuuc

SEQ ID NO: 749711 - RNA, 19 nt, Artificial Sequence
  Description of Artificial Sequence: Synthetic oligonucleotide
ggugauucuccuucuguua

SEQ ID NO: 749712 - RNA, 19 nt, Artificial Sequence
  Description of Artificial Sequence: Synthetic oligonucleotide
uuccgcauguugucccaaa

SEQ ID NO: 749713 - RNA, 19 nt, Artificial Sequence
  Description of Artificial Sequence: Synthetic oligonucleotide
cugaugaaccugucuuuaa

SEQ ID NO: 749714 - RNA, 19 nt, Artificial Sequence
  Description of Artificial Sequence: Synthetic oligonucleotide
ggaugguguuguugcacug

SEQ ID NO: 749715 - RNA, 19 nt, Artificial Sequence
  Description of Artificial Sequence: Synthetic oligonucleotide
cauucacugccccucggaa

SEQ ID NO: 749716 - RNA, 19 nt, Artificial Sequence
  Description of Artificial Sequence: Synthetic oligonucleotide
uucccacauggcugagaca

SEQ ID NO: 749717 - RNA, 19 nt, Artificial Sequence
  Description of Artificial Sequence: Synthetic oligonucleotide
ggaauccugauauuguauu

SEQ ID NO: 749718 - RNA, 19 nt, Artificial Sequence
  Description of Artificial Sequence: Synthetic oligonucleotide
agggccucgugccugggua

SEQ ID NO: 749719 - RNA, 19 nt, Artificial Sequence
  Description of Artificial Sequence: Synthetic oligonucleotide
caccucugaugccacucug

SEQ ID NO: 749720 - RNA, 19 nt, Artificial Sequence
  Description of Artificial Sequence: Synthetic oligonucleotide
agauuaugccgggcacaag

SEQ ID NO: 749721 - RNA, 19 nt, Artificial Sequence
  Description of Artificial Sequence: Synthetic oligonucleotide
gugccuggguagcacuaug

SEQ ID NO: 749722 - RNA, 19 nt, Artificial Sequence
  Description of Artificial Sequence: Synthetic oligonucleotide
gggaacuggcuauuuguaa

SEQ ID NO: 749723 - RNA, 19 nt, Artificial Sequence
  Description of Artificial Sequence: Synthetic oligonucleotide
ugucuuccacagugcguuc

SEQ ID NO: 749724 - RNA, 19 nt, Artificial Sequence
  Description of Artificial Sequence: Synthetic oligonucleotide
ugaugccacucugaugguu

SEQ ID NO: 749725 - RNA, 19 nt, Artificial Sequence
  Description of Artificial Sequence: Synthetic oligonucleotide
ucgugccuggguagcacua

SEQ ID NO: 749726 - RNA, 19 nt, Artificial Sequence
  Description of Artificial Sequence: Synthetic oligonucleotide
uuucgcccgacgugacuau

SEQ ID NO: 749727 - RNA, 19 nt, Artificial Sequence
  Description of Artificial Sequence: Synthetic oligonucleotide
uaggcacgugaucgauagu

SEQ ID NO: 749728 - RNA, 19 nt, Artificial Sequence
  Description of Artificial Sequence: Synthetic oligonucleotide
ggaugcagcagcacguaga

SEQ ID NO: 749729 - RNA, 19 nt, Artificial Sequence
  Description of Artificial Sequence: Synthetic oligonucleotide
cagugcccagaauguacuc

SEQ ID NO: 749730 - RNA, 19 nt, Artificial Sequence
  Description of Artificial Sequence: Synthetic oligonucleotide
uuuccacuacugcgauuuu

SEQ ID NO: 749731 - RNA, 19 nt, Artificial Sequence
  Description of Artificial Sequence: Synthetic oligonucleotide
agaugguagcucccacgua

SEQ ID NO: 749732 - RNA, 19 nt, Artificial Sequence
  Description of Artificial Sequence: Synthetic oligonucleotide
aagugggaacuggcuauuu

SEQ ID NO: 749733 - RNA, 19 nt, Artificial Sequence
  Description of Artificial Sequence: Synthetic oligonucleotide
caccaaauaggcacgugau

SEQ ID NO: 749734 - RNA, 19 nt, Artificial Sequence
  Description of Artificial Sequence: Synthetic oligonucleotide
accaugacucucuguccuu

SEQ ID NO: 749735 - RNA, 19 nt, Artificial Sequence
  Description of Artificial Sequence: Synthetic oligonucleotide
ccacucccugaccuaaugc

SEQ ID NO: 749736 - RNA, 19 nt, Artificial Sequence
  Description of Artificial Sequence: Synthetic oligonucleotide
gguguccacagggauggug

SEQ ID NO: 749737 - RNA, 19 nt, Artificial Sequence
  Description of Artificial Sequence: Synthetic oligonucleotide
uguauccuugaaggugauu

SEQ ID NO: 749738 - RNA, 19 nt, Artificial Sequence
  Description of Artificial Sequence: Synthetic oligonucleotide
cuuucgcccgacgugacua

SEQ ID NO: 749739 - RNA, 19 nt, Artificial Sequence
  Description of Artificial Sequence: Synthetic oligonucleotide
ggguguuaacuugaagaga

SEQ ID NO: 749740 - RNA, 19 nt, Artificial Sequence
  Description of Artificial Sequence: Synthetic oligonucleotide
aggcccgauccgcugcucu

SEQ ID NO: 749741 - RNA, 19 nt, Artificial Sequence
  Description of Artificial Sequence: Synthetic oligonucleotide
gcccgacgugacuauaggc

SEQ ID NO: 749742 - RNA, 19 nt, Artificial Sequence
  Description of Artificial Sequence: Synthetic oligonucleotide
cucccacguaagcuauuuc

SEQ ID NO: 749743 - RNA, 19 nt, Artificial Sequence
  Description of Artificial Sequence: Synthetic oligonucleotide
cuuagcccuuaugaaucca

SEQ ID NO: 749744 - RNA, 19 nt, Artificial Sequence
  Description of Artificial Sequence: Synthetic oligonucleotide
gugcacccaucuucugaug

SEQ ID NO: 749745 - RNA, 19 nt, Artificial Sequence
  Description of Artificial Sequence: Synthetic oligonucleotide
uggucauuaugagccgcuu

SEQ ID NO: 749746 - RNA, 19 nt, Artificial Sequence
  Description of Artificial Sequence: Synthetic oligonucleotide
guugaaugugacacucagu

SEQ ID NO: 749747 - RNA, 19 nt, Artificial Sequence
  Description of Artificial Sequence: Synthetic oligonucleotide
cgauagucagcucuucguc

SEQ ID NO: 749748 - RNA, 19 nt, Artificial Sequence
  Description of Artificial Sequence: Synthetic oligonucleotide
cccuacaaagaucuuccca

SEQ ID NO: 749749 - RNA, 19 nt, Artificial Sequence
  Description of Artificial Sequence: Synthetic oligonucleotide
cguagagucacagccucag

SEQ ID NO: 749750 - RNA, 19 nt, Artificial Sequence
  Description of Artificial Sequence: Synthetic oligonucleotide
cuucgucagcugaugcaaa

SEQ ID NO: 749751 - RNA, 19 nt, Artificial Sequence
  Description of Artificial Sequence: Synthetic oligonucleotide
ccucggaagguauagauuu

SEQ ID NO: 749752 - RNA, 19 nt, Artificial Sequence
  Description of Artificial Sequence: Synthetic oligonucleotide
aggcaagcaaaggcuugcu

SEQ ID NO: 749753 - RNA, 19 nt, Artificial Sequence
  Description of Artificial Sequence: Synthetic oligonucleotide
ccacaccaaaucuaaaacu

SEQ ID NO: 749754 - RNA, 19 nt, Artificial Sequence
  Description of Artificial Sequence: Synthetic oligonucleotide
ccgacgugacuauaggcca

SEQ ID NO: 749755 - RNA, 19 nt, Artificial Sequence
  Description of Artificial Sequence: Synthetic oligonucleotide
cuagugauuuggucauuau

SEQ ID NO: 749756 - RNA, 19 nt, Artificial Sequence
  Description of Artificial Sequence: Synthetic oligonucleotide
cacacuaacuuagcccuua

SEQ ID NO: 749757 - RNA, 19 nt, Artificial Sequence
  Description of Artificial Sequence: Synthetic oligonucleotide
gccuggguagcacuauguc

SEQ ID NO: 749758 - RNA, 19 nt, Artificial Sequence
  Description of Artificial Sequence: Synthetic oligonucleotide
cgaucaaauguauccuuga

SEQ ID NO: 749759 - RNA, 19 nt, Artificial Sequence
  Description of Artificial Sequence: Synthetic oligonucleotide
cgucaaaagaggcaagcaa

SEQ ID NO: 749760 - RNA, 19 nt, Artificial Sequence
  Description of Artificial Sequence: Synthetic oligonucleotide
caaugggcaaugccuauuu

SEQ ID NO: 749761 - RNA, 19 nt, Artificial Sequence
  Description of Artificial Sequence: Synthetic oligonucleotide
agguuucguuuccuccguu

SEQ ID NO: 749762 - RNA, 19 nt, Artificial Sequence
  Description of Artificial Sequence: Synthetic oligonucleotide
gcuauaagugauaggcagu

SEQ ID NO: 749763 - RNA, 19 nt, Artificial Sequence
  Description of Artificial Sequence: Synthetic oligonucleotide
ggcacgugaucgauaguca

SEQ ID NO: 749764 - RNA, 19 nt, Artificial Sequence
  Description of Artificial Sequence: Synthetic oligonucleotide
gcgucaaaagaggcaagca

SEQ ID NO: 749765 - RNA, 19 nt, Artificial Sequence
  Description of Artificial Sequence: Synthetic oligonucleotide
acguuacuugucagcucug

SEQ ID NO: 749766 - RNA, 19 nt, Artificial Sequence
  Description of Artificial Sequence: Synthetic oligonucleotide
ccacagugcguuccauggc

SEQ ID NO: 749767 - RNA, 19 nt, Artificial Sequence
  Description of Artificial Sequence: Synthetic oligonucleotide
ccaaaucuucuauguggca

SEQ ID NO: 749768 - RNA, 19 nt, Artificial Sequence
  Description of Artificial Sequence: Synthetic oligonucleotide
cuugaaggugauucuccuu

SEQ ID NO: 749769 - RNA, 19 nt, Artificial Sequence
  Description of Artificial Sequence: Synthetic oligonucleotide
gguccaaaugucaaugauu

SEQ ID NO: 749770 - RNA, 19 nt, Artificial Sequence
  Description of Artificial Sequence: Synthetic oligonucleotide
ccccuacaaagaucuuccc

SEQ ID NO: 749771 - RNA, 19 nt, Artificial Sequence
  Description of Artificial Sequence: Synthetic oligonucleotide
ucacugccccucggaaggu

SEQ ID NO: 749772 - RNA, 19 nt, Artificial Sequence
  Description of Artificial Sequence: Synthetic oligonucleotide
cguuacuugucagcucugc

SEQ ID NO: 749773 - RNA, 19 nt, Artificial Sequence
  Description of Artificial Sequence: Synthetic oligonucleotide
guaccucuugaagccacua

SEQ ID NO: 749774 - RNA, 19 nt, Artificial Sequence
  Description of Artificial Sequence: Synthetic oligonucleotide
ggcaugccaaugggcaaug

SEQ ID NO: 749775 - RNA, 19 nt, Artificial Sequence
  Description of Artificial Sequence: Synthetic oligonucleotide
ucccuccaaccaacgucuu

SEQ ID NO: 749776 - RNA, 19 nt, Artificial Sequence
  Description of Artificial Sequence: Synthetic oligonucleotide
gugcguuccauggcacgca

SEQ ID NO: 749777 - RNA, 19 nt, Artificial Sequence
  Description of Artificial Sequence: Synthetic oligonucleotide
ggacuacuccuguuuucaa

SEQ ID NO: 749778 - RNA, 19 nt, Artificial Sequence
  Description of Artificial Sequence: Synthetic oligonucleotide
ggcccgauccgcugcucug

SEQ ID NO: 749779 - RNA, 19 nt, Artificial Sequence
  Description of Artificial Sequence: Synthetic oligonucleotide
auguauccuugaaggugau

SEQ ID NO: 749780 - RNA, 19 nt, Artificial Sequence
  Description of Artificial Sequence: Synthetic oligonucleotide
uucgcccgacgugacuaua

SEQ ID NO: 749781 - RNA, 19 nt, Artificial Sequence
  Description of Artificial Sequence: Synthetic oligonucleotide
cuccguucuuccucuggcu

SEQ ID NO: 749782 - RNA, 19 nt, Artificial Sequence
  Description of Artificial Sequence: Synthetic oligonucleotide
gcccuuaugaauccaccuu

SEQ ID NO: 749783 - RNA, 19 nt, Artificial Sequence
  Description of Artificial Sequence: Synthetic oligonucleotide
gggcaagauuaugccgggc

SEQ ID NO: 749784 - RNA, 19 nt, Artificial Sequence
  Description of Artificial Sequence: Synthetic oligonucleotide
cgauccgcugcucugcaca

SEQ ID NO: 749785 - RNA, 19 nt, Artificial Sequence
  Description of Artificial Sequence: Synthetic oligonucleotide
cgcccgacgugacuauagg

SEQ ID NO: 749786 - RNA, 19 nt, Artificial Sequence
  Description of Artificial Sequence: Synthetic oligonucleotide
cggagaaauggcaggucca

SEQ ID NO: 749787 - RNA, 19 nt, Artificial Sequence
  Description of Artificial Sequence: Synthetic oligonucleotide
ccaacucuaguugguaucu

SEQ ID NO: 749788 - RNA, 19 nt, Artificial Sequence
  Description of Artificial Sequence: Synthetic oligonucleotide
cccuuaugaauccaccuuu

SEQ ID NO: 749789 - RNA, 19 nt, Artificial Sequence
  Description of Artificial Sequence: Synthetic oligonucleotide
gcaugccaaugggcaaugc

SEQ ID NO: 749790 - RNA, 19 nt, Artificial Sequence
  Description of Artificial Sequence: Synthetic oligonucleotide
gcccgauccgcugcucugc

SEQ ID NO: 749791 - RNA, 19 nt, Artificial Sequence
  Description of Artificial Sequence: Synthetic oligonucleotide
cuuccgcauguugucccaa

SEQ ID NO: 749792 - RNA, 19 nt, Artificial Sequence
  Description of Artificial Sequence: Synthetic oligonucleotide
cguuccauggcacgcaccu

SEQ ID NO: 749793 - RNA, 19 nt, Artificial Sequence
  Description of Artificial Sequence: Synthetic oligonucleotide
gcacguagagucacagccu

SEQ ID NO: 749794 - RNA, 19 nt, Artificial Sequence
  Description of Artificial Sequence: Synthetic oligonucleotide
cugaugccacucugauggu

SEQ ID NO: 749795 - RNA, 19 nt, Artificial Sequence
  Description of Artificial Sequence: Synthetic oligonucleotide
gccgcuucuuggcacgagu

SEQ ID NO: 749796 - RNA, 19 nt, Artificial Sequence
  Description of Artificial Sequence: Synthetic oligonucleotide
gcguuccauggcacgcacc

SEQ ID NO: 749797 - RNA, 19 nt, Artificial Sequence
  Description of Artificial Sequence: Synthetic oligonucleotide
cgugaucgauagucagcuc

SEQ ID NO: 749798 - RNA, 19 nt, Artificial Sequence
  Description of Artificial Sequence: Synthetic oligonucleotide
guuacccguacagccucau

SEQ ID NO: 749799 - RNA, 19 nt, Artificial Sequence
  Description of Artificial Sequence: Synthetic oligonucleotide
ccgcauguugucccaaagu

SEQ ID NO: 749800 - RNA, 19 nt, Artificial Sequence
  Description of Artificial Sequence: Synthetic oligonucleotide
ccccucggaagguauagau

SEQ ID NO: 749801 - RNA, 19 nt, Artificial Sequence
  Description of Artificial Sequence: Synthetic oligonucleotide
agcucccacguaagcuauu

SEQ ID NO: 749802 - RNA, 19 nt, Artificial Sequence
  Description of Artificial Sequence: Synthetic oligonucleotide
ccgauccgcugcucugcac

SEQ ID NO: 749803 - RNA, 19 nt, Artificial Sequence
  Description of Artificial Sequence: Synthetic oligonucleotide
gccauggaguggaagguuu

SEQ ID NO: 749804 - RNA, 19 nt, Artificial Sequence
  Description of Artificial Sequence: Synthetic oligonucleotide
cccgaucaaauguauccuu

SEQ ID NO: 749805 - RNA, 19 nt, Artificial Sequence
  Description of Artificial Sequence: Synthetic oligonucleotide
gcaguggacuacuccuguu

SEQ ID NO: 749806 - RNA, 19 nt, Artificial Sequence
  Description of Artificial Sequence: Synthetic oligonucleotide
cccacacagcaguggacua

SEQ ID NO: 749807 - RNA, 19 nt, Artificial Sequence
  Description of Artificial Sequence: Synthetic oligonucleotide
gcacagugucaaacucuaa

SEQ ID NO: 749808 - RNA, 19 nt, Artificial Sequence
  Description of Artificial Sequence: Synthetic oligonucleotide
caacucuaguugguaucuu

SEQ ID NO: 749809 - RNA, 19 nt, Artificial Sequence
  Description of Artificial Sequence: Synthetic oligonucleotide
ccccgaucaaauguauccu

SEQ ID NO: 749810 - RNA, 19 nt, Artificial Sequence
  Description of Artificial Sequence: Synthetic oligonucleotide
gcucccacguaagcuauuu

SEQ ID NO: 749811 - RNA, 19 nt, Artificial Sequence
  Description of Artificial Sequence: Synthetic oligonucleotide
cccucggaagguauagauu

SEQ ID NO: 749812 - RNA, 19 nt, Artificial Sequence
  Description of Artificial Sequence: Synthetic oligonucleotide
cagcagucacguaccucuu

SEQ ID NO: 749813 - RNA, 19 nt, Artificial Sequence
  Description of Artificial Sequence: Synthetic oligonucleotide
ccacaaagauggcgucaaa

SEQ ID NO: 749814 - RNA, 19 nt, Artificial Sequence
  Description of Artificial Sequence: Synthetic oligonucleotide
cacugccccucggaaggua

SEQ ID NO: 749815 - RNA, 19 nt, Artificial Sequence
  Description of Artificial Sequence: Synthetic oligonucleotide
gccccucggaagguauaga

SEQ ID NO: 749816 - RNA, 19 nt, Artificial Sequence
  Description of Artificial Sequence: Synthetic oligonucleotide
cccgauccgcugcucugca

SEQ ID NO: 749817 - RNA, 19 nt, Artificial Sequence
  Description of Artificial Sequence: Synthetic oligonucleotide
ggaaugccaaaggcccgau

SEQ ID NO: 749818 - RNA, 19 nt, Artificial Sequence
  Description of Artificial Sequence: Synthetic oligonucleotide
cgacgugacuauaggccau

SEQ ID NO: 749819 - RNA, 19 nt, Artificial Sequence
  Description of Artificial Sequence: Synthetic oligonucleotide
cccugaccuaaugcauaua

SEQ ID NO: 749820 - RNA, 19 nt, Artificial Sequence
  Description of Artificial Sequence: Synthetic oligonucleotide
cgugccuggguagcacuau

SEQ ID NO: 749821 - RNA, 19 nt, Artificial Sequence
  Description of Artificial Sequence: Synthetic oligonucleotide
gccgggcacaaggcacuuu

SEQ ID NO: 749822 - RNA, 19 nt, Artificial Sequence
  Description of Artificial Sequence: Synthetic oligonucleotide
aauaccacccuauagcugg

SEQ ID NO: 749823 - RNA, 19 nt, Artificial Sequence
  Description of Artificial Sequence: Synthetic oligonucleotide
aacagaagcacagggaacc

SEQ ID NO: 749824 - RNA, 19 nt, Artificial Sequence
  Description of Artificial Sequence: Synthetic oligonucleotide
gauaucauugagcaggccc

SEQ ID NO: 749825 - RNA, 19 nt, Artificial Sequence
  Description of Artificial Sequence: Synthetic oligonucleotide
aagugguacaugcaguagg

SEQ ID NO: 749826 - RNA, 19 nt, Artificial Sequence
  Description of Artificial Sequence: Synthetic oligonucleotide
aacaccagaaggcauccac

SEQ ID NO: 749827 - RNA, 19 nt, Artificial Sequence
  Description of Artificial Sequence: Synthetic oligonucleotide
ugaaccacgaagaguauug

SEQ ID NO: 749828 - RNA, 19 nt, Artificial Sequence
  Description of Artificial Sequence: Synthetic oligonucleotide
aacucagggauauugugca

SEQ ID NO: 749829 - RNA, 19 nt, Artificial Sequence
  Description of Artificial Sequence: Synthetic oligonucleotide
gcuaagguaccccagaagg

SEQ ID NO: 749830 - RNA, 19 nt, Artificial Sequence
  Description of Artificial Sequence: Synthetic oligonucleotide
ugugcaggcgaccaucagg

SEQ ID NO: 749831 - RNA, 19 nt, Artificial Sequence
  Description of Artificial Sequence: Synthetic oligonucleotide
aagaguauuggggacagga

SEQ ID NO: 749832 - RNA, 19 nt, Artificial Sequence
  Description of Artificial Sequence: Synthetic oligonucleotide
gaagcgugacaccacauug

SEQ ID NO: 749833 - RNA, 19 nt, Artificial Sequence
  Description of Artificial Sequence: Synthetic oligonucleotide
caggagaugaccucaaaac

SEQ ID NO: 749834 - RNA, 19 nt, Artificial Sequence
  Description of Artificial Sequence: Synthetic oligonucleotide
ugguacaugcaguagguga

SEQ ID NO: 749835 - RNA, 19 nt, Artificial Sequence
  Description of Artificial Sequence: Synthetic oligonucleotide
ggaaaugcaaggcaggcag

SEQ ID NO: 749836 - RNA, 19 nt, Artificial Sequence
  Description of Artificial Sequence: Synthetic oligonucleotide
gaugagagaguccgggucc

SEQ ID NO: 749837 - RNA, 19 nt, Artificial Sequence
  Description of Artificial Sequence: Synthetic oligonucleotide
uucagcugaacccucccag

SEQ ID NO: 749838 - RNA, 19 nt, Artificial Sequence
  Description of Artificial Sequence: Synthetic oligonucleotide
agcccagucagguucauag

SEQ ID NO: 749839 - RNA, 19 nt, Artificial Sequence
  Description of Artificial Sequence: Synthetic oligonucleotide
uacgucucucucaaugagg

SEQ ID NO: 749840 - RNA, 19 nt, Artificial Sequence
  Description of Artificial Sequence: Synthetic oligonucleotide
ucguucugaaccacgaaga

SEQ ID NO: 749841 - RNA, 19 nt, Artificial Sequence
  Description of Artificial Sequence: Synthetic oligonucleotide
ucaacucagggauauugug

SEQ ID NO: 749842 - RNA, 19 nt, Artificial Sequence
  Description of Artificial Sequence: Synthetic oligonucleotide
ugaggaggauaucauugag

SEQ ID NO: 749843 - RNA, 19 nt, Artificial Sequence
  Description of Artificial Sequence: Synthetic oligonucleotide
agggauauugugcaggcga

SEQ ID NO: 749844 - RNA, 19 nt, Artificial Sequence
  Description of Artificial Sequence: Synthetic oligonucleotide
cauagcccaagucaaagug

SEQ ID NO: 749845 - RNA, 19 nt, Artificial Sequence
  Description of Artificial Sequence: Synthetic oligonucleotide
caacucagggauauugugc

SEQ ID NO: 749846 - RNA, 19 nt, Artificial Sequence
  Description of Artificial Sequence: Synthetic oligonucleotide
agguaggcccagcugaggc

SEQ ID NO: 749847 - RNA, 19 nt, Artificial Sequence
  Description of Artificial Sequence: Synthetic oligonucleotide
accacauccucccucggcg

SEQ ID NO: 749848 - RNA, 19 nt, Artificial Sequence
  Description of Artificial Sequence: Synthetic oligonucleotide
auagccaccgcggagguuc

SEQ ID NO: 749849 - RNA, 19 nt, Artificial Sequence
  Description of Artificial Sequence: Synthetic oligonucleotide
ucguagaacuuguuagucc

SEQ ID NO: 749850 - RNA, 19 nt, Artificial Sequence
  Description of Artificial Sequence: Synthetic oligonucleotide
aagcuacugaagguggugg

SEQ ID NO: 749851 - RNA, 19 nt, Artificial Sequence
  Description of Artificial Sequence: Synthetic oligonucleotide
agcacucacagacuuccac

SEQ ID NO: 749852 - RNA, 19 nt, Artificial Sequence
  Description of Artificial Sequence: Synthetic oligonucleotide
ggagaugaccucaaaaccg

SEQ ID NO: 749853 - RNA, 19 nt, Artificial Sequence
  Description of Artificial Sequence: Synthetic oligonucleotide
ucaaaguucccaugcacaa

SEQ ID NO: 749854 - RNA, 19 nt, Artificial Sequence
  Description of Artificial Sequence: Synthetic oligonucleotide
acgucucucucaaugaggc

SEQ ID NO: 749855 - RNA, 19 nt, Artificial Sequence
  Description of Artificial Sequence: Synthetic oligonucleotide
cucgacuccacuugagucc

SEQ ID NO: 749856 - RNA, 19 nt, Artificial Sequence
  Description of Artificial Sequence: Synthetic oligonucleotide
agagaagcuacugaaggug

SEQ ID NO: 749857 - RNA, 19 nt, Artificial Sequence
  Description of Artificial Sequence: Synthetic oligonucleotide
cacauuggaacuguccugg

SEQ ID NO: 749858 - RNA, 19 nt, Artificial Sequence
  Description of Artificial Sequence: Synthetic oligonucleotide
ugcgcaaccacauccuccc

SEQ ID NO: 749859 - RNA, 19 nt, Artificial Sequence
  Description of Artificial Sequence: Synthetic oligonucleotide
guucccaugcacaaguucc

SEQ ID NO: 749860 - RNA, 19 nt, Artificial Sequence
  Description of Artificial Sequence: Synthetic oligonucleotide
ucggguaccuccccugugg

SEQ ID NO: 749861 - RNA, 19 nt, Artificial Sequence
  Description of Artificial Sequence: Synthetic oligonucleotide
ugaggcuacgguauccaug

SEQ ID NO: 749862 - RNA, 19 nt, Artificial Sequence
  Description of Artificial Sequence: Synthetic oligonucleotide
aguucccaugcacaaguuc

SEQ ID NO: 749863 - RNA, 19 nt, Artificial Sequence
  Description of Artificial Sequence: Synthetic oligonucleotide
aaucguggcgggaagacca

SEQ ID NO: 749864 - RNA, 19 nt, Artificial Sequence
  Description of Artificial Sequence: Synthetic oligonucleotide
uauccaugcagcagggagu

SEQ ID NO: 749865 - RNA, 19 nt, Artificial Sequence
  Description of Artificial Sequence: Synthetic oligonucleotide
gacauagcccaagucaaag

SEQ ID NO: 749866 - RNA, 19 nt, Artificial Sequence
  Description of Artificial Sequence: Synthetic oligonucleotide
gaacuuguuaguccuguca

SEQ ID NO: 749867 - RNA, 19 nt, Artificial Sequence
  Description of Artificial Sequence: Synthetic oligonucleotide
cuaggagucugcaccgucg

SEQ ID NO: 749868 - RNA, 19 nt, Artificial Sequence
  Description of Artificial Sequence: Synthetic oligonucleotide
uccacuucguucugaacca

SEQ ID NO: 749869 - RNA, 19 nt, Artificial Sequence
  Description of Artificial Sequence: Synthetic oligonucleotide
caugcggaaguacucgucc

SEQ ID NO: 749870 - RNA, 19 nt, Artificial Sequence
  Description of Artificial Sequence: Synthetic oligonucleotide
aaaaccgggcucuggcuca

SEQ ID NO: 749871 - RNA, 19 nt, Artificial Sequence
  Description of Artificial Sequence: Synthetic oligonucleotide
ugcuuccauagccaccgcg

SEQ ID NO: 749872 - RNA, 19 nt, Artificial Sequence
  Description of Artificial Sequence: Synthetic oligonucleotide
aagcgugacaccacauugg

SEQ ID NO: 749873 - RNA, 19 nt, Artificial Sequence
  Description of Artificial Sequence: Synthetic oligonucleotide
agaaguuggucacucgaga

SEQ ID NO: 749874 - RNA, 19 nt, Artificial Sequence
  Description of Artificial Sequence: Synthetic oligonucleotide
agaguggcugauccaguac

SEQ ID NO: 749875 - RNA, 19 nt, Artificial Sequence
  Description of Artificial Sequence: Synthetic oligonucleotide
uggcucaucaucuggccgc

SEQ ID NO: 749876 - RNA, 19 nt, Artificial Sequence
  Description of Artificial Sequence: Synthetic oligonucleotide
uauagcuggaugcuuccau

SEQ ID NO: 749877 - RNA, 19 nt, Artificial Sequence
  Description of Artificial Sequence: Synthetic oligonucleotide
gaagccaccggaaacagaa

SEQ ID NO: 749878 - RNA, 19 nt, Artificial Sequence
  Description of Artificial Sequence: Synthetic oligonucleotide
cuuaaggaucucguuggcg

SEQ ID NO: 749879 - RNA, 19 nt, Artificial Sequence
  Description of Artificial Sequence: Synthetic oligonucleotide
cugacucucuucaaaguuc

SEQ ID NO: 749880 - RNA, 19 nt, Artificial Sequence
  Description of Artificial Sequence: Synthetic oligonucleotide
gaaggaacuuccaagccuc

SEQ ID NO: 749881 - RNA, 19 nt, Artificial Sequence
  Description of Artificial Sequence: Synthetic oligonucleotide
gaggaggauaucauugagc

SEQ ID NO: 749882 - RNA, 19 nt, Artificial Sequence
  Description of Artificial Sequence: Synthetic oligonucleotide
uaagguaccccagaaggaa

SEQ ID NO: 749883 - RNA, 19 nt, Artificial Sequence
  Description of Artificial Sequence: Synthetic oligonucleotide
ucugggucgggucuccagc

SEQ ID NO: 749884 - RNA, 19 nt, Artificial Sequence
  Description of Artificial Sequence: Synthetic oligonucleotide
gacacccgcgaugagagag

SEQ ID NO: 749885 - RNA, 19 nt, Artificial Sequence
  Description of Artificial Sequence: Synthetic oligonucleotide
agaacuuguuaguccuguc

SEQ ID NO: 749886 - RNA, 19 nt, Artificial Sequence
  Description of Artificial Sequence: Synthetic oligonucleotide
gaacuuccaagccucccgc

SEQ ID NO: 749887 - RNA, 19 nt, Artificial Sequence
  Description of Artificial Sequence: Synthetic oligonucleotide
uggcgggaagaccaaguag

SEQ ID NO: 749888 - RNA, 19 nt, Artificial Sequence
  Description of Artificial Sequence: Synthetic oligonucleotide
gccaauagcagguagcgac

SEQ ID NO: 749889 - RNA, 19 nt, Artificial Sequence
  Description of Artificial Sequence: Synthetic oligonucleotide
aucaggacccacguggcgg

SEQ ID NO: 749890 - RNA, 19 nt, Artificial Sequence
  Description of Artificial Sequence: Synthetic oligonucleotide
gaugaccucaaaaccgggc

SEQ ID NO: 749891 - RNA, 19 nt, Artificial Sequence
  Description of Artificial Sequence: Synthetic oligonucleotide
auagcagguagcgacugag

SEQ ID NO: 749892 - RNA, 19 nt, Artificial Sequence
  Description of Artificial Sequence: Synthetic oligonucleotide
uccacgcaggagaugaccu

SEQ ID NO: 749893 - RNA, 19 nt, Artificial Sequence
  Description of Artificial Sequence: Synthetic oligonucleotide
agcuaagguaccccagaag

SEQ ID NO: 749894 - RNA, 19 nt, Artificial Sequence
  Description of Artificial Sequence: Synthetic oligonucleotide
caccacacggaugacaccc

SEQ ID NO: 749895 - RNA, 19 nt, Artificial Sequence
  Description of Artificial Sequence: Synthetic oligonucleotide
uagggauccuggaggaagc

SEQ ID NO: 749896 - RNA, 19 nt, Artificial Sequence
  Description of Artificial Sequence: Synthetic oligonucleotide
guagggauccuggaggaag

SEQ ID NO: 749897 - RNA, 19 nt, Artificial Sequence
  Description of Artificial Sequence: Synthetic oligonucleotide
acucaugcccuggacauag

SEQ ID NO: 749898 - RNA, 19 nt, Artificial Sequence
  Description of Artificial Sequence: Synthetic oligonucleotide
gacagcaucagcgcauccc

SEQ ID NO: 749899 - RNA, 19 nt, Artificial Sequence
  Description of Artificial Sequence: Synthetic oligonucleotide
ugaacccucccagcuaagg

SEQ ID NO: 749900 - RNA, 19 nt, Artificial Sequence
  Description of Artificial Sequence: Synthetic oligonucleotide
gcuuacgucucucucaaug

SEQ ID NO: 749901 - RNA, 19 nt, Artificial Sequence
  Description of Artificial Sequence: Synthetic oligonucleotide
uaaugacagcccagucagg

SEQ ID NO: 749902 - RNA, 19 nt, Artificial Sequence
  Description of Artificial Sequence: Synthetic oligonucleotide
ggugaggaggauaucauug

SEQ ID NO: 749903 - RNA, 19 nt, Artificial Sequence
  Description of Artificial Sequence: Synthetic oligonucleotide
cacucacagacuuccacug

SEQ ID NO: 749904 - RNA, 19 nt, Artificial Sequence
  Description of Artificial Sequence: Synthetic oligonucleotide
uacgguauccaugcagcag

SEQ ID NO: 749905 - RNA, 19 nt, Artificial Sequence
  Description of Artificial Sequence: Synthetic oligonucleotide
gaaccacgaagaguauugg

SEQ ID NO: 749906 - RNA, 19 nt, Artificial Sequence
  Description of Artificial Sequence: Synthetic oligonucleotide
uucguagaacuuguuaguc

SEQ ID NO: 749907 - RNA, 19 nt, Artificial Sequence
  Description of Artificial Sequence: Synthetic oligonucleotide
cuuacgucucucucaauga

SEQ ID NO: 749908 - RNA, 19 nt, Artificial Sequence
  Description of Artificial Sequence: Synthetic oligonucleotide
uuccauagccaccgcggag

SEQ ID NO: 749909 - RNA, 19 nt, Artificial Sequence
  Description of Artificial Sequence: Synthetic oligonucleotide
augacacccgcgaugagag

SEQ ID NO: 749910 - RNA, 19 nt, Artificial Sequence
  Description of Artificial Sequence: Synthetic oligonucleotide
aucggggaagggaaauucc

SEQ ID NO: 749911 - RNA, 19 nt, Artificial Sequence
  Description of Artificial Sequence: Synthetic oligonucleotide
ucaaaaccgggcucuggcu

SEQ ID NO: 749912 - RNA, 19 nt, Artificial Sequence
  Description of Artificial Sequence: Synthetic oligonucleotide
guaggugaggaggauauca

SEQ ID NO: 749913 - RNA, 19 nt, Artificial Sequence
  Description of Artificial Sequence: Synthetic oligonucleotide
cuuugugcucuucagcuga

SEQ ID NO: 749914 - RNA, 19 nt, Artificial Sequence
  Description of Artificial Sequence: Synthetic oligonucleotide
accggaaacagaagcacag

SEQ ID NO: 749915 - RNA, 19 nt, Artificial Sequence
  Description of Artificial Sequence: Synthetic oligonucleotide
accagaugagaagccaccg

SEQ ID NO: 749916 - RNA, 19 nt, Artificial Sequence
  Description of Artificial Sequence: Synthetic oligonucleotide
uucccaugcacaaguucca

SEQ ID NO: 749917 - RNA, 19 nt, Artificial Sequence
  Description of Artificial Sequence: Synthetic oligonucleotide
cacuucguucugaaccacg

SEQ ID NO: 749918 - RNA, 19 nt, Artificial Sequence
  Description of Artificial Sequence: Synthetic oligonucleotide
acaugcaguaggugaggag

SEQ ID NO: 749919 - RNA, 19 nt, Artificial Sequence
  Description of Artificial Sequence: Synthetic oligonucleotide
aguuggucacucgagagaa

SEQ ID NO: 749920 - RNA, 19 nt, Artificial Sequence
  Description of Artificial Sequence: Synthetic oligonucleotide
aaauucccucuugaaccag

SEQ ID NO: 749921 - RNA, 19 nt, Artificial Sequence
  Description of Artificial Sequence: Synthetic oligonucleotide
accgcggagguuccacugc

SEQ ID NO: 749922 - RNA, 19 nt, Artificial Sequence
  Description of Artificial Sequence: Synthetic oligonucleotide
gaugacacccgcgaugaga

SEQ ID NO: 749923 - RNA, 19 nt, Artificial Sequence
  Description of Artificial Sequence: Synthetic oligonucleotide
uucaugcggaaguacucgu

SEQ ID NO: 749924 - RNA, 19 nt, Artificial Sequence
  Description of Artificial Sequence: Synthetic oligonucleotide
uggaugcuuccauagccac

SEQ ID NO: 749925 - RNA, 19 nt, Artificial Sequence
  Description of Artificial Sequence: Synthetic oligonucleotide
agcgugacaccacauugga

SEQ ID NO: 749926 - RNA, 19 nt, Artificial Sequence
  Description of Artificial Sequence: Synthetic oligonucleotide
ccagguggggccuuggucg

SEQ ID NO: 749927 - RNA, 19 nt, Artificial Sequence
  Description of Artificial Sequence: Synthetic oligonucleotide
acacggaugacacccgcga

SEQ ID NO: 749928 - RNA, 19 nt, Artificial Sequence
  Description of Artificial Sequence: Synthetic oligonucleotide
uauuggggacaggagguca

SEQ ID NO: 749929 - RNA, 19 nt, Artificial Sequence
  Description of Artificial Sequence: Synthetic oligonucleotide
aacccgaguccugggaauc

SEQ ID NO: 749930 - RNA, 19 nt, Artificial Sequence
  Description of Artificial Sequence: Synthetic oligonucleotide
gucagugcggcuuacgucu

SEQ ID NO: 749931 - RNA, 19 nt, Artificial Sequence
  Description of Artificial Sequence: Synthetic oligonucleotide
ugcacauuguguggcagcu

SEQ ID NO: 749932 - RNA, 19 nt, Artificial Sequence
  Description of Artificial Sequence: Synthetic oligonucleotide
cauggucagcucauugaug

SEQ ID NO: 749933 - RNA, 19 nt, Artificial Sequence
  Description of Artificial Sequence: Synthetic oligonucleotide
gcuaaugacagcccaguca

SEQ ID NO: 749934 - RNA, 19 nt, Artificial Sequence
  Description of Artificial Sequence: Synthetic oligonucleotide
cugcgcaaccacauccucc

SEQ ID NO: 749935 - RNA, 19 nt, Artificial Sequence
  Description of Artificial Sequence: Synthetic oligonucleotide
cuaagguaccccagaagga

SEQ ID NO: 749936 - RNA, 19 nt, Artificial Sequence
  Description of Artificial Sequence: Synthetic oligonucleotide
ugaccucaaaaccgggcuc

SEQ ID NO: 749937 - RNA, 19 nt, Artificial Sequence
  Description of Artificial Sequence: Synthetic oligonucleotide
caaaaccgggcucuggcuc

SEQ ID NO: 749938 - RNA, 19 nt, Artificial Sequence
  Description of Artificial Sequence: Synthetic oligonucleotide
agaguauuggggacaggag

SEQ ID NO: 749939 - RNA, 19 nt, Artificial Sequence
  Description of Artificial Sequence: Synthetic oligonucleotide
uggaaaugcaaggcaggca

SEQ ID NO: 749940 - RNA, 19 nt, Artificial Sequence
  Description of Artificial Sequence: Synthetic oligonucleotide
gagagaguccggguccugg

SEQ ID NO: 749941 - RNA, 19 nt, Artificial Sequence
  Description of Artificial Sequence: Synthetic oligonucleotide
ugcaccgucgucguccuca

SEQ ID NO: 749942 - RNA, 19 nt, Artificial Sequence
  Description of Artificial Sequence: Synthetic oligonucleotide
gaguagggauccuggagga

SEQ ID NO: 749943 - RNA, 19 nt, Artificial Sequence
  Description of Artificial Sequence: Synthetic oligonucleotide
agugguacaugcaguaggu

SEQ ID NO: 749944 - RNA, 19 nt, Artificial Sequence
  Description of Artificial Sequence: Synthetic oligonucleotide
cucguuggcgccaaagcca

SEQ ID NO: 749945 - RNA, 19 nt, Artificial Sequence
  Description of Artificial Sequence: Synthetic oligonucleotide
uagguuccuccucuguggu

SEQ ID NO: 749946 - RNA, 19 nt, Artificial Sequence
  Description of Artificial Sequence: Synthetic oligonucleotide
uggcugauccaguacccga

SEQ ID NO: 749947 - RNA, 19 nt, Artificial Sequence
  Description of Artificial Sequence: Synthetic oligonucleotide
ucguccguuuucuuccgca

SEQ ID NO: 749948 - RNA, 19 nt, Artificial Sequence
  Description of Artificial Sequence: Synthetic oligonucleotide
ucaugcggaaguacucguc

SEQ ID NO: 749949 - RNA, 19 nt, Artificial Sequence
  Description of Artificial Sequence: Synthetic oligonucleotide
uaggagucugcaccgucgu

SEQ ID NO: 749950 - RNA, 19 nt, Artificial Sequence
  Description of Artificial Sequence: Synthetic oligonucleotide
ucacucgagagaagcuacu

SEQ ID NO: 749951 - RNA, 19 nt, Artificial Sequence
  Description of Artificial Sequence: Synthetic oligonucleotide
ugucaggcugcgcaaccac

SEQ ID NO: 749952 - RNA, 19 nt, Artificial Sequence
  Description of Artificial Sequence: Synthetic oligonucleotide
cacacggaugacacccgcg

SEQ ID NO: 749953 - RNA, 19 nt, Artificial Sequence
  Description of Artificial Sequence: Synthetic oligonucleotide
caaggcucggguaccuccc

SEQ ID NO: 749954 - RNA, 19 nt, Artificial Sequence
  Description of Artificial Sequence: Synthetic oligonucleotide
accuccccuguggaaaugc

SEQ ID NO: 749955 - RNA, 19 nt, Artificial Sequence
  Description of Artificial Sequence: Synthetic oligonucleotide
aggaggacgucgcuguccu

SEQ ID NO: 749956 - RNA, 19 nt, Artificial Sequence
  Description of Artificial Sequence: Synthetic oligonucleotide
gaggaagcgugacaccaca

SEQ ID NO: 749957 - RNA, 19 nt, Artificial Sequence
  Description of Artificial Sequence: Synthetic oligonucleotide
guacaugcaguaggugagg

SEQ ID NO: 749958 - RNA, 19 nt, Artificial Sequence
  Description of Artificial Sequence: Synthetic oligonucleotide
ggcuacgguauccaugcag

SEQ ID NO: 749959 - RNA, 19 nt, Artificial Sequence
  Description of Artificial Sequence: Synthetic oligonucleotide
uacugaaggugguggagua

SEQ ID NO: 749960 - RNA, 19 nt, Artificial Sequence
  Description of Artificial Sequence: Synthetic oligonucleotide
gcuacugggcucuuuuggc

SEQ ID NO: 749961 - RNA, 19 nt, Artificial Sequence
  Description of Artificial Sequence: Synthetic oligonucleotide
ccacccuauagcuggaugc

SEQ ID NO: 749962 - RNA, 19 nt, Artificial Sequence
  Description of Artificial Sequence: Synthetic oligonucleotide
accacccuauagcuggaug

SEQ ID NO: 749963 - RNA, 19 nt, Artificial Sequence
  Description of Artificial Sequence: Synthetic oligonucleotide
acgaagaguauuggggaca

SEQ ID NO: 749964 - RNA, 19 nt, Artificial Sequence
  Description of Artificial Sequence: Synthetic oligonucleotide
gaacuguccuggucaaaga

SEQ ID NO: 749965 - RNA, 19 nt, Artificial Sequence
  Description of Artificial Sequence: Synthetic oligonucleotide
agcuacugaagguggugga

SEQ ID NO: 749966 - RNA, 19 nt, Artificial Sequence
  Description of Artificial Sequence: Synthetic oligonucleotide
gaaucguggcgggaagacc

SEQ ID NO: 749967 - RNA, 19 nt, Artificial Sequence
  Description of Artificial Sequence: Synthetic oligonucleotide
ugggcucgacuccacuuga

SEQ ID NO: 749968 - RNA, 19 nt, Artificial Sequence
  Description of Artificial Sequence: Synthetic oligonucleotide
agugcuccccggaagaagu

SEQ ID NO: 749969 - RNA, 19 nt, Artificial Sequence
  Description of Artificial Sequence: Synthetic oligonucleotide
ugcggcuuacgucucucuc

SEQ ID NO: 749970 - RNA, 19 nt, Artificial Sequence
  Description of Artificial Sequence: Synthetic oligonucleotide
ucgacuccacuugaguccu

SEQ ID NO: 749971 - RNA, 19 nt, Artificial Sequence
  Description of Artificial Sequence: Synthetic oligonucleotide
acuucguucugaaccacga

SEQ ID NO: 749972 - RNA, 19 nt, Artificial Sequence
  Description of Artificial Sequence: Synthetic oligonucleotide
augggaggagaugggcuac

SEQ ID NO: 749973 - RNA, 19 nt, Artificial Sequence
  Description of Artificial Sequence: Synthetic oligonucleotide
caucaggacccacguggcg

SEQ ID NO: 749974 - RNA, 19 nt, Artificial Sequence
  Description of Artificial Sequence: Synthetic oligonucleotide
uagugcuccccggaagaag

SEQ ID NO: 749975 - RNA, 19 nt, Artificial Sequence
  Description of Artificial Sequence: Synthetic oligonucleotide
aaggaucucguuggcgcca

SEQ ID NO: 749976 - RNA, 19 nt, Artificial Sequence
  Description of Artificial Sequence: Synthetic oligonucleotide
agcgacugaggacccggag

SEQ ID NO: 749977 - RNA, 19 nt, Artificial Sequence
  Description of Artificial Sequence: Synthetic oligonucleotide
gcaggcgaccaucaggacc

SEQ ID NO: 749978 - RNA, 19 nt, Artificial Sequence
  Description of Artificial Sequence: Synthetic oligonucleotide
gucacucgagagaagcuac

SEQ ID NO: 749979 - RNA, 19 nt, Artificial Sequence
  Description of Artificial Sequence: Synthetic oligonucleotide
aggacaucggggaagggaa

SEQ ID NO: 749980 - RNA, 19 nt, Artificial Sequence
  Description of Artificial Sequence: Synthetic oligonucleotide
gagaguccggguccuggug

SEQ ID NO: 749981 - RNA, 19 nt, Artificial Sequence
  Description of Artificial Sequence: Synthetic oligonucleotide
cacaaccgaaggacaucgg

SEQ ID NO: 749982 - RNA, 19 nt, Artificial Sequence
  Description of Artificial Sequence: Synthetic oligonucleotide
ccaugcacaaguuccauga

SEQ ID NO: 749983 - RNA, 19 nt, Artificial Sequence
  Description of Artificial Sequence: Synthetic oligonucleotide
cauagccugggucaaaggu

SEQ ID NO: 749984 - RNA, 19 nt, Artificial Sequence
  Description of Artificial Sequence: Synthetic oligonucleotide
uggacagcggcagcgggga

SEQ ID NO: 749985 - RNA, 19 nt, Artificial Sequence
  Description of Artificial Sequence: Synthetic oligonucleotide
ccgcacaugggcuuugugc

SEQ ID NO: 749986 - RNA, 19 nt, Artificial Sequence
  Description of Artificial Sequence: Synthetic oligonucleotide
ggauccuggaggaagcgug

SEQ ID NO: 749987 - RNA, 19 nt, Artificial Sequence
  Description of Artificial Sequence: Synthetic oligonucleotide
ucugcccgcgucagcacgu

SEQ ID NO: 749988 - RNA, 19 nt, Artificial Sequence
  Description of Artificial Sequence: Synthetic oligonucleotide
cucugcccgcgucagcacg

SEQ ID NO: 749989 - RNA, 19 nt, Artificial Sequence
  Description of Artificial Sequence: Synthetic oligonucleotide
ugaggacccggagcaaggc

SEQ ID NO: 749990 - RNA, 19 nt, Artificial Sequence
  Description of Artificial Sequence: Synthetic oligonucleotide
auagccugggucaaaggua

SEQ ID NO: 749991 - RNA, 19 nt, Artificial Sequence
  Description of Artificial Sequence: Synthetic oligonucleotide
gaagaguauuggggacagg

SEQ ID NO: 749992 - RNA, 19 nt, Artificial Sequence
  Description of Artificial Sequence: Synthetic oligonucleotide
guggcugauccaguacccg

SEQ ID NO: 749993 - RNA, 19 nt, Artificial Sequence
  Description of Artificial Sequence: Synthetic oligonucleotide
cuccacgcaggagaugacc

SEQ ID NO: 749994 - RNA, 19 nt, Artificial Sequence
  Description of Artificial Sequence: Synthetic oligonucleotide
aggagucugcaccgucguc

SEQ ID NO: 749995 - RNA, 19 nt, Artificial Sequence
  Description of Artificial Sequence: Synthetic oligonucleotide
cucuuuuggcugugccagc

SEQ ID NO: 749996 - RNA, 19 nt, Artificial Sequence
  Description of Artificial Sequence: Synthetic oligonucleotide
gucguccucaggcaagauc

SEQ ID NO: 749997 - RNA, 19 nt, Artificial Sequence
  Description of Artificial Sequence: Synthetic oligonucleotide
ccacaaccgaaggacaucg

SEQ ID NO: 749998 - RNA, 19 nt, Artificial Sequence
  Description of Artificial Sequence: Synthetic oligonucleotide
agugcggcuuacgucucuc

SEQ ID NO: 749999 - RNA, 19 nt, Artificial Sequence
  Description of Artificial Sequence: Synthetic oligonucleotide
auauugugcaggcgaccau

SEQ ID NO: 750000 - RNA, 19 nt, Artificial Sequence
  Description of Artificial Sequence: Synthetic oligonucleotide
uuccaagccucccgccgca

SEQ ID NO: 750001 - RNA, 19 nt, Artificial Sequence
  Description of Artificial Sequence: Synthetic oligonucleotide
cacucgagagaagcuacug

SEQ ID NO: 750002 - RNA, 19 nt, Artificial Sequence
  Description of Artificial Sequence: Synthetic oligonucleotide
guggcggguccauucuucc

SEQ ID NO: 750003 - RNA, 19 nt, Artificial Sequence
  Description of Artificial Sequence: Synthetic oligonucleotide
ugugggacgcugccccaac

SEQ ID NO: 750004 - RNA, 19 nt, Artificial Sequence
  Description of Artificial Sequence: Synthetic oligonucleotide
cacauuguguggcagcucu

SEQ ID NO: 750005 - RNA, 19 nt, Artificial Sequence
  Description of Artificial Sequence: Synthetic oligonucleotide
cuucgcuccugcucagcac

SEQ ID NO: 750006 - RNA, 19 nt, Artificial Sequence
  Description of Artificial Sequence: Synthetic oligonucleotide
cacugccccgaucuccucc

SEQ ID NO: 750007 - RNA, 19 nt, Artificial Sequence
  Description of Artificial Sequence: Synthetic oligonucleotide
acauuggaacuguccuggu

SEQ ID NO: 750008 - RNA, 19 nt, Artificial Sequence
  Description of Artificial Sequence: Synthetic oligonucleotide
ggucgcacugugcuaauga

SEQ ID NO: 750009 - RNA, 19 nt, Artificial Sequence
  Description of Artificial Sequence: Synthetic oligonucleotide
agggauccuggaggaagcg

SEQ ID NO: 750010 - RNA, 19 nt, Artificial Sequence
  Description of Artificial Sequence: Synthetic oligonucleotide
cuuggucgcacugugcuaa

SEQ ID NO: 750011 - RNA, 19 nt, Artificial Sequence
  Description of Artificial Sequence: Synthetic oligonucleotide
gcucgacuccacuugaguc

SEQ ID NO: 750012 - RNA, 19 nt, Artificial Sequence
  Description of Artificial Sequence: Synthetic oligonucleotide
aggaggucacucaugcccu

SEQ ID NO: 750013 - RNA, 19 nt, Artificial Sequence
  Description of Artificial Sequence: Synthetic oligonucleotide
aggaccccgcuccacugug

SEQ ID NO: 750014 - RNA, 19 nt, Artificial Sequence
  Description of Artificial Sequence: Synthetic oligonucleotide
gguaggcccagcugaggcc

SEQ ID NO: 750015 - RNA, 19 nt, Artificial Sequence
  Description of Artificial Sequence: Synthetic oligonucleotide
aggaccagguaggcccagc

SEQ ID NO: 750016 - RNA, 19 nt, Artificial Sequence
  Description of Artificial Sequence: Synthetic oligonucleotide
gcgaccaucaggacccacg

SEQ ID NO: 750017 - RNA, 19 nt, Artificial Sequence
  Description of Artificial Sequence: Synthetic oligonucleotide
cuacgguauccaugcagca

SEQ ID NO: 750018 - RNA, 19 nt, Artificial Sequence
  Description of Artificial Sequence: Synthetic oligonucleotide
agaugagaagccaccggaa

SEQ ID NO: 750019 - RNA, 19 nt, Artificial Sequence
  Description of Artificial Sequence: Synthetic oligonucleotide
gcuacugaaggugguggag

SEQ ID NO: 750020 - RNA, 19 nt, Artificial Sequence
  Description of Artificial Sequence: Synthetic oligonucleotide
cuuccauagccaccgcgga

SEQ ID NO: 750021 - RNA, 19 nt, Artificial Sequence
  Description of Artificial Sequence: Synthetic oligonucleotide
uuccuucgcuccugcucag

SEQ ID NO: 750022 - RNA, 19 nt, Artificial Sequence
  Description of Artificial Sequence: Synthetic oligonucleotide
ccucccacaaccgaaggac

SEQ ID NO: 750023 - RNA, 19 nt, Artificial Sequence
  Description of Artificial Sequence: Synthetic oligonucleotide
agguagcgacugaggaccc

SEQ ID NO: 750024 - RNA, 19 nt, Artificial Sequence
  Description of Artificial Sequence: Synthetic oligonucleotide
uagcgacugaggacccgga

SEQ ID NO: 750025 - RNA, 19 nt, Artificial Sequence
  Description of Artificial Sequence: Synthetic oligonucleotide
gcuuaaggaucucguuggc

SEQ ID NO: 750026 - RNA, 19 nt, Artificial Sequence
  Description of Artificial Sequence: Synthetic oligonucleotide
augaggcuacgguauccau

SEQ ID NO: 750027 - RNA, 19 nt, Artificial Sequence
  Description of Artificial Sequence: Synthetic oligonucleotide
cagguggggccuuggucgc

SEQ ID NO: 750028 - RNA, 19 nt, Artificial Sequence
  Description of Artificial Sequence: Synthetic oligonucleotide
ugggucgggucuccagccu

SEQ ID NO: 750029 - RNA, 19 nt, Artificial Sequence
  Description of Artificial Sequence: Synthetic oligonucleotide
ucagugcggcuuacgucuc

SEQ ID NO: 750030 - RNA, 19 nt, Artificial Sequence
  Description of Artificial Sequence: Synthetic oligonucleotide
cccuauagcuggaugcuuc

SEQ ID NO: 750031 - RNA, 19 nt, Artificial Sequence
  Description of Artificial Sequence: Synthetic oligonucleotide
ggauauugugcaggcgacc

SEQ ID NO: 750032 - RNA, 19 nt, Artificial Sequence
  Description of Artificial Sequence: Synthetic oligonucleotide
aucagcgcaucccgcucca

SEQ ID NO: 750033 - RNA, 19 nt, Artificial Sequence
  Description of Artificial Sequence: Synthetic oligonucleotide
cagguacacgccucccuuc

SEQ ID NO: 750034 - RNA, 19 nt, Artificial Sequence
  Description of Artificial Sequence: Synthetic oligonucleotide
ccacauuggaacuguccug

SEQ ID NO: 750035 - RNA, 19 nt, Artificial Sequence
  Description of Artificial Sequence: Synthetic oligonucleotide
cuucagcugaacccuccca

SEQ ID NO: 750036 - RNA, 19 nt, Artificial Sequence
  Description of Artificial Sequence: Synthetic oligonucleotide
agcaccucccacaaccgaa

SEQ ID NO: 750037 - RNA, 19 nt, Artificial Sequence
  Description of Artificial Sequence: Synthetic oligonucleotide
augagagaguccggguccu

SEQ ID NO: 750038 - RNA, 19 nt, Artificial Sequence
  Description of Artificial Sequence: Synthetic oligonucleotide
accacacggaugacacccg

SEQ ID NO: 750039 - RNA, 19 nt, Artificial Sequence
  Description of Artificial Sequence: Synthetic oligonucleotide
caccgcggagguuccacug

SEQ ID NO: 750040 - RNA, 19 nt, Artificial Sequence
  Description of Artificial Sequence: Synthetic oligonucleotide
guuggucacucgagagaag

SEQ ID NO: 750041 - RNA, 19 nt, Artificial Sequence
  Description of Artificial Sequence: Synthetic oligonucleotide
cucccacaaccgaaggaca

SEQ ID NO: 750042 - RNA, 19 nt, Artificial Sequence
  Description of Artificial Sequence: Synthetic oligonucleotide
cacgcaggagaugaccuca

SEQ ID NO: 750043 - RNA, 19 nt, Artificial Sequence
  Description of Artificial Sequence: Synthetic oligonucleotide
ggaaucguggcgggaagac

SEQ ID NO: 750044 - RNA, 19 nt, Artificial Sequence
  Description of Artificial Sequence: Synthetic oligonucleotide
guauuggggacaggagguc

SEQ ID NO: 750045 - RNA, 19 nt, Artificial Sequence
  Description of Artificial Sequence: Synthetic oligonucleotide
gguaccuccccuguggaaa

SEQ ID NO: 750046 - RNA, 19 nt, Artificial Sequence
  Description of Artificial Sequence: Synthetic oligonucleotide
ggcccgaguggacagcggc

SEQ ID NO: 750047 - RNA, 19 nt, Artificial Sequence
  Description of Artificial Sequence: Synthetic oligonucleotide
cugaacccucccagcuaag

SEQ ID NO: 750048 - RNA, 19 nt, Artificial Sequence
  Description of Artificial Sequence: Synthetic oligonucleotide
cucguccguuuucuuccgc

SEQ ID NO: 750049 - RNA, 19 nt, Artificial Sequence
  Description of Artificial Sequence: Synthetic oligonucleotide
cucaugcccuggacauagc

SEQ ID NO: 750050 - RNA, 19 nt, Artificial Sequence
  Description of Artificial Sequence: Synthetic oligonucleotide
gggauauugugcaggcgac

SEQ ID NO: 750051 - RNA, 19 nt, Artificial Sequence
  Description of Artificial Sequence: Synthetic oligonucleotide
cagcagggaguuccuucgc

SEQ ID NO: 750052 - RNA, 19 nt, Artificial Sequence
  Description of Artificial Sequence: Synthetic oligonucleotide
ggagaugggcuacugggcu

SEQ ID NO: 750053 - RNA, 19 nt, Artificial Sequence
  Description of Artificial Sequence: Synthetic oligonucleotide
uggucgcacugugcuaaug

SEQ ID NO: 750054 - RNA, 19 nt, Artificial Sequence
  Description of Artificial Sequence: Synthetic oligonucleotide
uccccggaagaaguugguc

SEQ ID NO: 750055 - RNA, 19 nt, Artificial Sequence
  Description of Artificial Sequence: Synthetic oligonucleotide
agcacgucuuccacacuca

SEQ ID NO: 750056 - RNA, 19 nt, Artificial Sequence
  Description of Artificial Sequence: Synthetic oligonucleotide
ucguggcgggaagaccaag

SEQ ID NO: 750057 - RNA, 19 nt, Artificial Sequence
  Description of Artificial Sequence: Synthetic oligonucleotide
gcggagagcuggccaauag

SEQ ID NO: 750058 - RNA, 19 nt, Artificial Sequence
  Description of Artificial Sequence: Synthetic oligonucleotide
ccgcagaggaaggucaggg

SEQ ID NO: 750059 - RNA, 19 nt, Artificial Sequence
  Description of Artificial Sequence: Synthetic oligonucleotide
cagaguggcugauccagua

SEQ ID NO: 750060 - RNA, 19 nt, Artificial Sequence
  Description of Artificial Sequence: Synthetic oligonucleotide
ucccaugcacaaguuccau

SEQ ID NO: 750061 - RNA, 19 nt, Artificial Sequence
  Description of Artificial Sequence: Synthetic oligonucleotide
ugacacccgcgaugagaga

SEQ ID NO: 750062 - RNA, 19 nt, Artificial Sequence
  Description of Artificial Sequence: Synthetic oligonucleotide
gcggcuuacgucucucuca

SEQ ID NO: 750063 - RNA, 19 nt, Artificial Sequence
  Description of Artificial Sequence: Synthetic oligonucleotide
cuucguucugaaccacgaa

SEQ ID NO: 750064 - RNA, 19 nt, Artificial Sequence
  Description of Artificial Sequence: Synthetic oligonucleotide
cucggguaccuccccugug

SEQ ID NO: 750065 - RNA, 19 nt, Artificial Sequence
  Description of Artificial Sequence: Synthetic oligonucleotide
ccccggaagaaguugguca

SEQ ID NO: 750066 - RNA, 19 nt, Artificial Sequence
  Description of Artificial Sequence: Synthetic oligonucleotide
acuccacgcaggagaugac

SEQ ID NO: 750067 - RNA, 19 nt, Artificial Sequence
  Description of Artificial Sequence: Synthetic oligonucleotide
ggacccggagcaaggcucg

SEQ ID NO: 750068 - RNA, 19 nt, Artificial Sequence
  Description of Artificial Sequence: Synthetic oligonucleotide
ggaacccgaguccugggaa

SEQ ID NO: 750069 - RNA, 19 nt, Artificial Sequence
  Description of Artificial Sequence: Synthetic oligonucleotide
ugccuguacagggccucug

SEQ ID NO: 750070 - RNA, 19 nt, Artificial Sequence
  Description of Artificial Sequence: Synthetic oligonucleotide
acauuguguggcagcucug

SEQ ID NO: 750071 - RNA, 19 nt, Artificial Sequence
  Description of Artificial Sequence: Synthetic oligonucleotide
gagucugcaccgucgucgu

SEQ ID NO: 750072 - RNA, 19 nt, Artificial Sequence
  Description of Artificial Sequence: Synthetic oligonucleotide
cagcuaagguaccccagaa

SEQ ID NO: 750073 - RNA, 19 nt, Artificial Sequence
  Description of Artificial Sequence: Synthetic oligonucleotide
caaguuccaugaagccaca

SEQ ID NO: 750074 - RNA, 19 nt, Artificial Sequence
  Description of Artificial Sequence: Synthetic oligonucleotide
ugggcucuuuuggcugugc

SEQ ID NO: 750075 - RNA, 19 nt, Artificial Sequence
  Description of Artificial Sequence: Synthetic oligonucleotide
cuggccgcagaggaagguc

SEQ ID NO: 750076 - RNA, 19 nt, Artificial Sequence
  Description of Artificial Sequence: Synthetic oligonucleotide
agaagccaccggaaacaga

SEQ ID NO: 750077 - RNA, 19 nt, Artificial Sequence
  Description of Artificial Sequence: Synthetic oligonucleotide
acccggagcaaggcucggg

SEQ ID NO: 750078 - RNA, 19 nt, Artificial Sequence
  Description of Artificial Sequence: Synthetic oligonucleotide
ggacccacguggcgggucc

SEQ ID NO: 750079 - RNA, 19 nt, Artificial Sequence
  Description of Artificial Sequence: Synthetic oligonucleotide
cccaugcacaaguuccaug

SEQ ID NO: 750080 - RNA, 19 nt, Artificial Sequence
  Description of Artificial Sequence: Synthetic oligonucleotide
gaacccgaguccugggaau

SEQ ID NO: 750081 - RNA, 19 nt, Artificial Sequence
  Description of Artificial Sequence: Synthetic oligonucleotide
cgaugagagaguccggguc

SEQ ID NO: 750082 - RNA, 19 nt, Artificial Sequence
  Description of Artificial Sequence: Synthetic oligonucleotide
ccgaaggacaucggggaag

SEQ ID NO: 750083 - RNA, 19 nt, Artificial Sequence
  Description of Artificial Sequence: Synthetic oligonucleotide
gcuaggagucugcaccguc

SEQ ID NO: 750084 - RNA, 19 nt, Artificial Sequence
  Description of Artificial Sequence: Synthetic oligonucleotide
uuggucgcacugugcuaau

SEQ ID NO: 750085 - RNA, 19 nt, Artificial Sequence
  Description of Artificial Sequence: Synthetic oligonucleotide
cccagcuaagguaccccag

SEQ ID NO: 750086 - RNA, 19 nt, Artificial Sequence
  Description of Artificial Sequence: Synthetic oligonucleotide
aguagggauccuggaggaa

SEQ ID NO: 750087 - RNA, 19 nt, Artificial Sequence
  Description of Artificial Sequence: Synthetic oligonucleotide
gcacucacagacuuccacu

SEQ ID NO: 750088 - RNA, 19 nt, Artificial Sequence
  Description of Artificial Sequence: Synthetic oligonucleotide
agcggggauaugggaggag

SEQ ID NO: 750089 - RNA, 19 nt, Artificial Sequence
  Description of Artificial Sequence: Synthetic oligonucleotide
acgccucccuucucaaaua

SEQ ID NO: 750090 - RNA, 19 nt, Artificial Sequence
  Description of Artificial Sequence: Synthetic oligonucleotide
ggucacucgagagaagcua

SEQ ID NO: 750091 - RNA, 19 nt, Artificial Sequence
  Description of Artificial Sequence: Synthetic oligonucleotide
gcgccaaagccagacagca

SEQ ID NO: 750092 - RNA, 19 nt, Artificial Sequence
  Description of Artificial Sequence: Synthetic oligonucleotide
cgcgaugagagaguccggg

SEQ ID NO: 750093 - RNA, 19 nt, Artificial Sequence
  Description of Artificial Sequence: Synthetic oligonucleotide
guaggcccagcugaggccu

SEQ ID NO: 750094 - RNA, 19 nt, Artificial Sequence
  Description of Artificial Sequence: Synthetic oligonucleotide
aaaccgggcucuggcucau

SEQ ID NO: 750095 - RNA, 19 nt, Artificial Sequence
  Description of Artificial Sequence: Synthetic oligonucleotide
ugcccgcgucagcacgucu

SEQ ID NO: 750096 - RNA, 19 nt, Artificial Sequence
  Description of Artificial Sequence: Synthetic oligonucleotide
cacgccucccuucucaaau

SEQ ID NO: 750097 - RNA, 19 nt, Artificial Sequence
  Description of Artificial Sequence: Synthetic oligonucleotide
gccccggguucucagggcc

SEQ ID NO: 750098 - RNA, 19 nt, Artificial Sequence
  Description of Artificial Sequence: Synthetic oligonucleotide
gacagcggcagcggggaua

SEQ ID NO: 750099 - RNA, 19 nt, Artificial Sequence
  Description of Artificial Sequence: Synthetic oligonucleotide
ccagcuaagguaccccaga

SEQ ID NO: 750100 - RNA, 19 nt, Artificial Sequence
  Description of Artificial Sequence: Synthetic oligonucleotide
acacccgcgaugagagagu

SEQ ID NO: 750101 - RNA, 19 nt, Artificial Sequence
  Description of Artificial Sequence: Synthetic oligonucleotide
gacccggagcaaggcucgg

SEQ ID NO: 750102 - RNA, 19 nt, Artificial Sequence
  Description of Artificial Sequence: Synthetic oligonucleotide
cacccgcgaugagagaguc

SEQ ID NO: 750103 - RNA, 19 nt, Artificial Sequence
  Description of Artificial Sequence: Synthetic oligonucleotide
gccuuggucgcacugugcu

SEQ ID NO: 750104 - RNA, 19 nt, Artificial Sequence
  Description of Artificial Sequence: Synthetic oligonucleotide
gcuguagugcuccccggaa

SEQ ID NO: 750105 - RNA, 19 nt, Artificial Sequence
  Description of Artificial Sequence: Synthetic oligonucleotide
aaccgggcucuggcucauc

SEQ ID NO: 750106 - RNA, 19 nt, Artificial Sequence
  Description of Artificial Sequence: Synthetic oligonucleotide
ugcggagagcuggccaaua

SEQ ID NO: 750107 - RNA, 19 nt, Artificial Sequence
  Description of Artificial Sequence: Synthetic oligonucleotide
gggaacccgaguccuggga

SEQ ID NO: 750108 - RNA, 19 nt, Artificial Sequence
  Description of Artificial Sequence: Synthetic oligonucleotide
ccacacggaugacacccgc

SEQ ID NO: 750109 - RNA, 19 nt, Artificial Sequence
  Description of Artificial Sequence: Synthetic oligonucleotide
acccuauagcuggaugcuu

SEQ ID NO: 750110 - RNA, 19 nt, Artificial Sequence
  Description of Artificial Sequence: Synthetic oligonucleotide
auaccacccuauagcugga

SEQ ID NO: 750111 - RNA, 19 nt, Artificial Sequence
  Description of Artificial Sequence: Synthetic oligonucleotide
aggaagcgugacaccacau

SEQ ID NO: 750112 - RNA, 19 nt, Artificial Sequence
  Description of Artificial Sequence: Synthetic oligonucleotide
uaccacccuauagcuggau

SEQ ID NO: 750113 - RNA, 19 nt, Artificial Sequence
  Description of Artificial Sequence: Synthetic oligonucleotide
gcaucagcgcaucccgcuc

SEQ ID NO: 750114 - RNA, 19 nt, Artificial Sequence
  Description of Artificial Sequence: Synthetic oligonucleotide
gggaguuccuucgcuccug

SEQ ID NO: 750115 - RNA, 19 nt, Artificial Sequence
  Description of Artificial Sequence: Synthetic oligonucleotide
acguggcggguccauucuu

SEQ ID NO: 750116 - RNA, 19 nt, Artificial Sequence
  Description of Artificial Sequence: Synthetic oligonucleotide
ggucgggucuccagccucc

SEQ ID NO: 750117 - RNA, 19 nt, Artificial Sequence
  Description of Artificial Sequence: Synthetic oligonucleotide
gaggaccccgcuccacugu

SEQ ID NO: 750118 - RNA, 19 nt, Artificial Sequence
  Description of Artificial Sequence: Synthetic oligonucleotide
ccacguggcggguccauuc

SEQ ID NO: 750119 - RNA, 19 nt, Artificial Sequence
  Description of Artificial Sequence: Synthetic oligonucleotide
cccgaguggacagcggcag

SEQ ID NO: 750120 - RNA, 19 nt, Artificial Sequence
  Description of Artificial Sequence: Synthetic oligonucleotide
gcugcgcaaccacauccuc

SEQ ID NO: 750121 - RNA, 19 nt, Artificial Sequence
  Description of Artificial Sequence: Synthetic oligonucleotide
ggaagcgugacaccacauu

SEQ ID NO: 750122 - RNA, 19 nt, Artificial Sequence
  Description of Artificial Sequence: Synthetic oligonucleotide
ccugucagugcggcuuacg

SEQ ID NO: 750123 - RNA, 19 nt, Artificial Sequence
  Description of Artificial Sequence: Synthetic oligonucleotide
cggagguuccacugccccg

SEQ ID NO: 750124 - RNA, 19 nt, Artificial Sequence
  Description of Artificial Sequence: Synthetic oligonucleotide
ggcugauccaguacccgaa

SEQ ID NO: 750125 - RNA, 19 nt, Artificial Sequence
  Description of Artificial Sequence: Synthetic oligonucleotide
cacccuauagcuggaugcu

SEQ ID NO: 750126 - RNA, 19 nt, Artificial Sequence
  Description of Artificial Sequence: Synthetic oligonucleotide
guaccuccccuguggaaau

SEQ ID NO: 750127 - RNA, 19 nt, Artificial Sequence
  Description of Artificial Sequence: Synthetic oligonucleotide
ccaagccucccgccgcagg

SEQ ID NO: 750128 - RNA, 19 nt, Artificial Sequence
  Description of Artificial Sequence: Synthetic oligonucleotide
gguccugcggagagcuggc

SEQ ID NO: 750129 - RNA, 19 nt, Artificial Sequence
  Description of Artificial Sequence: Synthetic oligonucleotide
gggucgggucuccagccuc

SEQ ID NO: 750130 - RNA, 19 nt, Artificial Sequence
  Description of Artificial Sequence: Synthetic oligonucleotide
ccgcggagguuccacugcc

SEQ ID NO: 750131 - RNA, 19 nt, Artificial Sequence
  Description of Artificial Sequence: Synthetic oligonucleotide
cccguccacagcaccuccc

SEQ ID NO: 750132 - RNA, 19 nt, Artificial Sequence
  Description of Artificial Sequence: Synthetic oligonucleotide
cugccagguggggccuugg

SEQ ID NO: 750133 - RNA, 19 nt, Artificial Sequence
  Description of Artificial Sequence: Synthetic oligonucleotide
ggcucgacuccacuugagu

SEQ ID NO: 750134 - RNA, 19 nt, Artificial Sequence
  Description of Artificial Sequence: Synthetic oligonucleotide
ccacgcaggagaugaccuc

SEQ ID NO: 750135 - RNA, 19 nt, Artificial Sequence
  Description of Artificial Sequence: Synthetic oligonucleotide
ggacauagcccaagucaaa

SEQ ID NO: 750136 - RNA, 19 nt, Artificial Sequence
  Description of Artificial Sequence: Synthetic oligonucleotide
ccaauagcagguagcgacu

SEQ ID NO: 750137 - RNA, 19 nt, Artificial Sequence
  Description of Artificial Sequence: Synthetic oligonucleotide
cgcacaugggcuuugugcu

SEQ ID NO: 750138 - RNA, 19 nt, Artificial Sequence
  Description of Artificial Sequence: Synthetic oligonucleotide
gcggggcccgaguggacag

SEQ ID NO: 750139 - RNA, 19 nt, Artificial Sequence
  Description of Artificial Sequence: Synthetic oligonucleotide
cagaggaaucguggcggga

SEQ ID NO: 750140 - RNA, 19 nt, Artificial Sequence
  Description of Artificial Sequence: Synthetic oligonucleotide
cugaaccacgaagaguauu

SEQ ID NO: 750141 - RNA, 19 nt, Artificial Sequence
  Description of Artificial Sequence: Synthetic oligonucleotide
ccugcggagagcuggccaa

SEQ ID NO: 750142 - RNA, 19 nt, Artificial Sequence
  Description of Artificial Sequence: Synthetic oligonucleotide
aucguggcgggaagaccaa

SEQ ID NO: 750143 - RNA, 19 nt, Artificial Sequence
  Description of Artificial Sequence: Synthetic oligonucleotide
aggcagucagcugccugua

SEQ ID NO: 750144 - RNA, 19 nt, Artificial Sequence
  Description of Artificial Sequence: Synthetic oligonucleotide
cguggcggguccauucuuc

SEQ ID NO: 750145 - RNA, 19 nt, Artificial Sequence
  Description of Artificial Sequence: Synthetic oligonucleotide
cccacaaccgaaggacauc

SEQ ID NO: 750146 - RNA, 19 nt, Artificial Sequence
  Description of Artificial Sequence: Synthetic oligonucleotide
gggcucgacuccacuugag

SEQ ID NO: 750147 - RNA, 19 nt, Artificial Sequence
  Description of Artificial Sequence: Synthetic oligonucleotide
acgcaggagaugaccucaa

SEQ ID NO: 750148 - RNA, 19 nt, Artificial Sequence
  Description of Artificial Sequence: Synthetic oligonucleotide
agcuggccaauagcaggua

SEQ ID NO: 750149 - RNA, 19 nt, Artificial Sequence
  Description of Artificial Sequence: Synthetic oligonucleotide
ccgaguggacagcggcagc

SEQ ID NO: 750150 - RNA, 19 nt, Artificial Sequence
  Description of Artificial Sequence: Synthetic oligonucleotide
gcgaugagagaguccgggu

SEQ ID NO: 750151 - RNA, 19 nt, Artificial Sequence
  Description of Artificial Sequence: Synthetic oligonucleotide
ggcucaucaucuggccgca

SEQ ID NO: 750152 - RNA, 19 nt, Artificial Sequence
  Description of Artificial Sequence: Synthetic oligonucleotide
cagcggggauaugggagga

SEQ ID NO: 750153 - RNA, 19 nt, Artificial Sequence
  Description of Artificial Sequence: Synthetic oligonucleotide
gagcaaggcucggguaccu

SEQ ID NO: 750154 - RNA, 19 nt, Artificial Sequence
  Description of Artificial Sequence: Synthetic oligonucleotide
ccgcuucauagucuccuga

SEQ ID NO: 750155 - RNA, 19 nt, Artificial Sequence
  Description of Artificial Sequence: Synthetic oligonucleotide
gugcggcuuacgucucucu

SEQ ID NO: 750156 - RNA, 19 nt, Artificial Sequence
  Description of Artificial Sequence: Synthetic oligonucleotide
cagcggggcccgaguggac

SEQ ID NO: 750157 - RNA, 19 nt, Artificial Sequence
  Description of Artificial Sequence: Synthetic oligonucleotide
cuguggugcugggcucgac

SEQ ID NO: 750158 - RNA, 19 nt, Artificial Sequence
  Description of Artificial Sequence: Synthetic oligonucleotide
gugggacgcugccccaacu

SEQ ID NO: 750159 - RNA, 19 nt, Artificial Sequence
  Description of Artificial Sequence: Synthetic oligonucleotide
ggguaccuccccuguggaa

SEQ ID NO: 750160 - RNA, 19 nt, Artificial Sequence
  Description of Artificial Sequence: Synthetic oligonucleotide
agguggggccuuggucgca

SEQ ID NO: 750161 - RNA, 19 nt, Artificial Sequence
  Description of Artificial Sequence: Synthetic oligonucleotide
cacggaugacacccgcgau

SEQ ID NO: 750162 - RNA, 19 nt, Artificial Sequence
  Description of Artificial Sequence: Synthetic oligonucleotide
ggacaucggggaagggaaa

SEQ ID NO: 750163 - RNA, 19 nt, Artificial Sequence
  Description of Artificial Sequence: Synthetic oligonucleotide
ccaacuccacgcaggagau

SEQ ID NO: 750164 - RNA, 19 nt, Artificial Sequence
  Description of Artificial Sequence: Synthetic oligonucleotide
gcugggcucgacuccacuu

SEQ ID NO: 750165 - RNA, 19 nt, Artificial Sequence
  Description of Artificial Sequence: Synthetic oligonucleotide
cacucaugcccuggacaua

SEQ ID NO: 750166 - RNA, 19 nt, Artificial Sequence
  Description of Artificial Sequence: Synthetic oligonucleotide
ggcugcgcaaccacauccu

SEQ ID NO: 750167 - RNA, 19 nt, Artificial Sequence
  Description of Artificial Sequence: Synthetic oligonucleotide
acccacguggcggguccau

SEQ ID NO: 750168 - RNA, 19 nt, Artificial Sequence
  Description of Artificial Sequence: Synthetic oligonucleotide
gcccgaguggacagcggca

SEQ ID NO: 750169 - RNA, 19 nt, Artificial Sequence
  Description of Artificial Sequence: Synthetic oligonucleotide
cggcuuacgucucucucaa

SEQ ID NO: 750170 - RNA, 19 nt, Artificial Sequence
  Description of Artificial Sequence: Synthetic oligonucleotide
gcgugacaccacauuggaa

SEQ ID NO: 750171 - RNA, 19 nt, Artificial Sequence
  Description of Artificial Sequence: Synthetic oligonucleotide
gcucggguaccuccccugu

SEQ ID NO: 750172 - RNA, 19 nt, Artificial Sequence
  Description of Artificial Sequence: Synthetic oligonucleotide
ccgcgucagcacgucuucc

SEQ ID NO: 750173 - RNA, 19 nt, Artificial Sequence
  Description of Artificial Sequence: Synthetic oligonucleotide
ccuuggucgcacugugcua

SEQ ID NO: 750174 - RNA, 19 nt, Artificial Sequence
  Description of Artificial Sequence: Synthetic oligonucleotide
aggcgaccaucaggaccca

SEQ ID NO: 750175 - RNA, 19 nt, Artificial Sequence
  Description of Artificial Sequence: Synthetic oligonucleotide
cagugcggcuuacgucucu

SEQ ID NO: 750176 - RNA, 19 nt, Artificial Sequence
  Description of Artificial Sequence: Synthetic oligonucleotide
cggggaagggaaauucccu

SEQ ID NO: 750177 - RNA, 19 nt, Artificial Sequence
  Description of Artificial Sequence: Synthetic oligonucleotide
ggggccuuggucgcacugu

SEQ ID NO: 750178 - RNA, 19 nt, Artificial Sequence
  Description of Artificial Sequence: Synthetic oligonucleotide
gccccguccacagcaccuc

SEQ ID NO: 750179 - RNA, 19 nt, Artificial Sequence
  Description of Artificial Sequence: Synthetic oligonucleotide
cccggagcaaggcucgggu

SEQ ID NO: 750180 - RNA, 19 nt, Artificial Sequence
  Description of Artificial Sequence: Synthetic oligonucleotide
cauccucccucggcggccu

SEQ ID NO: 750181 - RNA, 19 nt, Artificial Sequence
  Description of Artificial Sequence: Synthetic oligonucleotide
cccuggacauagcccaagu

SEQ ID NO: 750182 - RNA, 19 nt, Artificial Sequence
  Description of Artificial Sequence: Synthetic oligonucleotide
cagcccagucagguucaua

SEQ ID NO: 750183 - RNA, 19 nt, Artificial Sequence
  Description of Artificial Sequence: Synthetic oligonucleotide
ccggagcaaggcucgggua

SEQ ID NO: 750184 - RNA, 19 nt, Artificial Sequence
  Description of Artificial Sequence: Synthetic oligonucleotide
cggguaccuccccugugga

SEQ ID NO: 750185 - RNA, 19 nt, Artificial Sequence
  Description of Artificial Sequence: Synthetic oligonucleotide
ccauagccaccgcggaggu

SEQ ID NO: 750186 - RNA, 19 nt, Artificial Sequence
  Description of Artificial Sequence: Synthetic oligonucleotide
cggcagcggggauauggga

SEQ ID NO: 750187 - RNA, 19 nt, Artificial Sequence
  Description of Artificial Sequence: Synthetic oligonucleotide
ggcuuacgucucucucaau

SEQ ID NO: 750188 - RNA, 19 nt, Artificial Sequence
  Description of Artificial Sequence: Synthetic oligonucleotide
cugcggagagcuggccaau

SEQ ID NO: 750189 - RNA, 19 nt, Artificial Sequence
  Description of Artificial Sequence: Synthetic oligonucleotide
cauagccaccgcggagguu

SEQ ID NO: 750190 - RNA, 19 nt, Artificial Sequence
  Description of Artificial Sequence: Synthetic oligonucleotide
ccaccgcggagguuccacu

SEQ ID NO: 750191 - RNA, 19 nt, Artificial Sequence
  Description of Artificial Sequence: Synthetic oligonucleotide
ccggguucucagggccuuc

SEQ ID NO: 750192 - RNA, 19 nt, Artificial Sequence
  Description of Artificial Sequence: Synthetic oligonucleotide
ccccggguucucagggccu

SEQ ID NO: 750193 - RNA, 19 nt, Artificial Sequence
  Description of Artificial Sequence: Synthetic oligonucleotide
ggaggacgucgcuguccuu

SEQ ID NO: 750194 - RNA, 19 nt, Artificial Sequence
  Description of Artificial Sequence: Synthetic oligonucleotide
ggacagcggcagcggggau

SEQ ID NO: 750195 - RNA, 19 nt, Artificial Sequence
  Description of Artificial Sequence: Synthetic oligonucleotide
ccaagacuuccugcacauu

SEQ ID NO: 750196 - RNA, 19 nt, Artificial Sequence
  Description of Artificial Sequence: Synthetic oligonucleotide
cccggguucucagggccuu

SEQ ID NO: 750197 - RNA, 19 nt, Artificial Sequence
  Description of Artificial Sequence: Synthetic oligonucleotide
ccggguccuggugcuuccu

SEQ ID NO: 750198 - RNA, 19 nt, Artificial Sequence
  Description of Artificial Sequence: Synthetic oligonucleotide
cccacguggcggguccauu

SEQ ID NO: 750199 - RNA, 19 nt, Artificial Sequence
  Description of Artificial Sequence: Synthetic oligonucleotide
cgacuccacuugaguccuu

SEQ ID NO: 750200 - RNA, 19 nt, Artificial Sequence
  Description of Artificial Sequence: Synthetic oligonucleotide
aauauuuugugacugugcc

SEQ ID NO: 750201 - RNA, 19 nt, Artificial Sequence
  Description of Artificial Sequence: Synthetic oligonucleotide
aaauauagcacauuaucuc

SEQ ID NO: 750202 - RNA, 19 nt, Artificial Sequence
  Description of Artificial Sequence: Synthetic oligonucleotide
aagcauaucaguuaaaaug

SEQ ID NO: 750203 - RNA, 19 nt, Artificial Sequence
  Description of Artificial Sequence: Synthetic oligonucleotide
aauucuagcaagcauauca

SEQ ID NO: 750204 - RNA, 19 nt, Artificial Sequence
  Description of Artificial Sequence: Synthetic oligonucleotide
uucuauuuuauauugaaca

SEQ ID NO: 750205 - RNA, 19 nt, Artificial Sequence
  Description of Artificial Sequence: Synthetic oligonucleotide
uuuacacuaaacaauaugu

SEQ ID NO: 750206 - RNA, 19 nt, Artificial Sequence
  Description of Artificial Sequence: Synthetic oligonucleotide
auuaguauaauauuuugug

SEQ ID NO: 750207 - RNA, 19 nt, Artificial Sequence
  Description of Artificial Sequence: Synthetic oligonucleotide
auuacaacuguuuauuuag

SEQ ID NO: 750208 - RNA, 19 nt, Artificial Sequence
  Description of Artificial Sequence: Synthetic oligonucleotide
gauugauucacauucuucc

SEQ ID NO: 750209 - RNA, 19 nt, Artificial Sequence
  Description of Artificial Sequence: Synthetic oligonucleotide
uguacaauauacaucaagu

SEQ ID NO: 750210 - RNA, 19 nt, Artificial Sequence
  Description of Artificial Sequence: Synthetic oligonucleotide
aaggcugcgacccauugcc

SEQ ID NO: 750211 - RNA, 19 nt, Artificial Sequence
  Description of Artificial Sequence: Synthetic oligonucleotide
ugaagaauggaccugcgag

SEQ ID NO: 750212 - RNA, 19 nt, Artificial Sequence
  Description of Artificial Sequence: Synthetic oligonucleotide
auuacuaaugcuauguugg

SEQ ID NO: 750213 - RNA, 19 nt, Artificial Sequence
  Description of Artificial Sequence: Synthetic oligonucleotide
aauaaaggcuuccuguaag

SEQ ID NO: 750214 - RNA, 19 nt, Artificial Sequence
  Description of Artificial Sequence: Synthetic oligonucleotide
aaagguugaauuuuacugu

SEQ ID NO: 750215 - RNA, 19 nt, Artificial Sequence
  Description of Artificial Sequence: Synthetic oligonucleotide
uuucggauggcucugaucu

SEQ ID NO: 750216 - RNA, 19 nt, Artificial Sequence
  Description of Artificial Sequence: Synthetic oligonucleotide
uacugauugauucacauuc

SEQ ID NO: 750217 - RNA, 19 nt, Artificial Sequence
  Description of Artificial Sequence: Synthetic oligonucleotide
uaguauaauauuuugugac

SEQ ID NO: 750218 - RNA, 19 nt, Artificial Sequence
  Description of Artificial Sequence: Synthetic oligonucleotide
uuugcaaggacuauucaca

SEQ ID NO: 750219 - RNA, 19 nt, Artificial Sequence
  Description of Artificial Sequence: Synthetic oligonucleotide
acaguugcaaauauuaucg

SEQ ID NO: 750220 - RNA, 19 nt, Artificial Sequence
  Description of Artificial Sequence: Synthetic oligonucleotide
uacacuaaacaauauguug

SEQ ID NO: 750221 - RNA, 19 nt, Artificial Sequence
  Description of Artificial Sequence: Synthetic oligonucleotide
agacaagacauguaccugc

SEQ ID NO: 750222 - RNA, 19 nt, Artificial Sequence
  Description of Artificial Sequence: Synthetic oligonucleotide
uuauauugaacauaugcau

SEQ ID NO: 750223 - RNA, 19 nt, Artificial Sequence
  Description of Artificial Sequence: Synthetic oligonucleotide
uggaguauagcacaacuug

SEQ ID NO: 750224 - RNA, 19 nt, Artificial Sequence
  Description of Artificial Sequence: Synthetic oligonucleotide
acagugggaacuuugcagc

SEQ ID NO: 750225 - RNA, 19 nt, Artificial Sequence
  Description of Artificial Sequence: Synthetic oligonucleotide
uuagcugaauucuagcaag

SEQ ID NO: 750226 - RNA, 19 nt, Artificial Sequence
  Description of Artificial Sequence: Synthetic oligonucleotide
uauuaguauaauauuuugu

SEQ ID NO: 750227 - RNA, 19 nt, Artificial Sequence
  Description of Artificial Sequence: Synthetic oligonucleotide
aucauaacaccccuggcac

SEQ ID NO: 750228 - RNA, 19 nt, Artificial Sequence
  Description of Artificial Sequence: Synthetic oligonucleotide
aaagcaucucacugcaaac

SEQ ID NO: 750229 - RNA, 19 nt, Artificial Sequence
  Description of Artificial Sequence: Synthetic oligonucleotide
aagaacacggguugucagc

SEQ ID NO: 750230 - RNA, 19 nt, Artificial Sequence
  Description of Artificial Sequence: Synthetic oligonucleotide
ugugccauggaguauagca

SEQ ID NO: 750231 - RNA, 19 nt, Artificial Sequence
  Description of Artificial Sequence: Synthetic oligonucleotide
agcauaucaguuaaaaugg

SEQ ID NO: 750232 - RNA, 19 nt, Artificial Sequence
  Description of Artificial Sequence: Synthetic oligonucleotide
aacgacaaauuacucuaac

SEQ ID NO: 750233 - RNA, 19 nt, Artificial Sequence
  Description of Artificial Sequence: Synthetic oligonucleotide
ucuguaaccccucauuugc

SEQ ID NO: 750234 - RNA, 19 nt, Artificial Sequence
  Description of Artificial Sequence: Synthetic oligonucleotide
gacaaauuacucuaacccc

SEQ ID NO: 750235 - RNA, 19 nt, Artificial Sequence
  Description of Artificial Sequence: Synthetic oligonucleotide
caaacguuaauauauuuuc

SEQ ID NO: 750236 - RNA, 19 nt, Artificial Sequence
  Description of Artificial Sequence: Synthetic oligonucleotide
uuaguauaauauuuuguga

SEQ ID NO: 750237 - RNA, 19 nt, Artificial Sequence
  Description of Artificial Sequence: Synthetic oligonucleotide
acgacaaauuacucuaacc

SEQ ID NO: 750238 - RNA, 19 nt, Artificial Sequence
  Description of Artificial Sequence: Synthetic oligonucleotide
aaaucagagucuuacaaua

SEQ ID NO: 750239 - RNA, 19 nt, Artificial Sequence
  Description of Artificial Sequence: Synthetic oligonucleotide
agucccauagucuaucacg

SEQ ID NO: 750240 - RNA, 19 nt, Artificial Sequence
  Description of Artificial Sequence: Synthetic oligonucleotide
aacaccauaaacaaggcaa

SEQ ID NO: 750241 - RNA, 19 nt, Artificial Sequence
  Description of Artificial Sequence: Synthetic oligonucleotide
uggagaacaaucuuuauua

SEQ ID NO: 750242 - RNA, 19 nt, Artificial Sequence
  Description of Artificial Sequence: Synthetic oligonucleotide
uguaacuguacaauauaca

SEQ ID NO: 750243 - RNA, 19 nt, Artificial Sequence
  Description of Artificial Sequence: Synthetic oligonucleotide
uaugaugccucuuaaaaua

SEQ ID NO: 750244 - RNA, 19 nt, Artificial Sequence
  Description of Artificial Sequence: Synthetic oligonucleotide
gaagaauggaccugcgagg

SEQ ID NO: 750245 - RNA, 19 nt, Artificial Sequence
  Description of Artificial Sequence: Synthetic oligonucleotide
agaccuuucacacagcaca

SEQ ID NO: 750246 - RNA, 19 nt, Artificial Sequence
  Description of Artificial Sequence: Synthetic oligonucleotide
aauuuuaugaugccucuua

SEQ ID NO: 750247 - RNA, 19 nt, Artificial Sequence
  Description of Artificial Sequence: Synthetic oligonucleotide
aagacauguaccugcuggg

SEQ ID NO: 750248 - RNA, 19 nt, Artificial Sequence
  Description of Artificial Sequence: Synthetic oligonucleotide
uauuaucguauauacaaaa

SEQ ID NO: 750249 - RNA, 19 nt, Artificial Sequence
  Description of Artificial Sequence: Synthetic oligonucleotide
uccaacuuccaaguaaucg

SEQ ID NO: 750250 - RNA, 19 nt, Artificial Sequence
  Description of Artificial Sequence: Synthetic oligonucleotide
auagaagagaccuuucaca

SEQ ID NO: 750251 - RNA, 19 nt, Artificial Sequence
  Description of Artificial Sequence: Synthetic oligonucleotide
aacguuaauauauuuucua

SEQ ID NO: 750252 - RNA, 19 nt, Artificial Sequence
  Description of Artificial Sequence: Synthetic oligonucleotide
uuuugcaaggacuauucac

SEQ ID NO: 750253 - RNA, 19 nt, Artificial Sequence
  Description of Artificial Sequence: Synthetic oligonucleotide
aguauaauauuuugugacu

SEQ ID NO: 750254 - RNA, 19 nt, Artificial Sequence
  Description of Artificial Sequence: Synthetic oligonucleotide
uccauuagcugaauucuag

SEQ ID NO: 750255 - RNA, 19 nt, Artificial Sequence
  Description of Artificial Sequence: Synthetic oligonucleotide
acaauauacaucaagucca

SEQ ID NO: 750256 - RNA, 19 nt, Artificial Sequence
  Description of Artificial Sequence: Synthetic oligonucleotide
cuuuacacuaaacaauaug

SEQ ID NO: 750257 - RNA, 19 nt, Artificial Sequence
  Description of Artificial Sequence: Synthetic oligonucleotide
agagacaagacauguaccu

SEQ ID NO: 750258 - RNA, 19 nt, Artificial Sequence
  Description of Artificial Sequence: Synthetic oligonucleotide
cuauguuggcuuuucaaag

SEQ ID NO: 750259 - RNA, 19 nt, Artificial Sequence
  Description of Artificial Sequence: Synthetic oligonucleotide
aagaauggaccugcgaggg

SEQ ID NO: 750260 - RNA, 19 nt, Artificial Sequence
  Description of Artificial Sequence: Synthetic oligonucleotide
uuggaguuccauuagcuga

SEQ ID NO: 750261 - RNA, 19 nt, Artificial Sequence
  Description of Artificial Sequence: Synthetic oligonucleotide
aauccuccaccguuggaac

SEQ ID NO: 750262 - RNA, 19 nt, Artificial Sequence
  Description of Artificial Sequence: Synthetic oligonucleotide
gauagaagagaccuuucac

SEQ ID NO: 750263 - RNA, 19 nt, Artificial Sequence
  Description of Artificial Sequence: Synthetic oligonucleotide
uuuacuguaacuguacaau

SEQ ID NO: 750264 - RNA, 19 nt, Artificial Sequence
  Description of Artificial Sequence: Synthetic oligonucleotide
ugauagaagagaccuuuca

SEQ ID NO: 750265 - RNA, 19 nt, Artificial Sequence
  Description of Artificial Sequence: Synthetic oligonucleotide
gagcugaccgugcugaugg

SEQ ID NO: 750266 - RNA, 19 nt, Artificial Sequence
  Description of Artificial Sequence: Synthetic oligonucleotide
auaaagguugaauuuuacu

SEQ ID NO: 750267 - RNA, 19 nt, Artificial Sequence
  Description of Artificial Sequence: Synthetic oligonucleotide
uaaggcaacccuuggcugg

SEQ ID NO: 750268 - RNA, 19 nt, Artificial Sequence
  Description of Artificial Sequence: Synthetic oligonucleotide
guaaauccagucccgaugc

SEQ ID NO: 750269 - RNA, 19 nt, Artificial Sequence
  Description of Artificial Sequence: Synthetic oligonucleotide
ugcuccgagacccugagcu

SEQ ID NO: 750270 - RNA, 19 nt, Artificial Sequence
  Description of Artificial Sequence: Synthetic oligonucleotide
ucugcgaugugcaaaguaa

SEQ ID NO: 750271 - RNA, 19 nt, Artificial Sequence
  Description of Artificial Sequence: Synthetic oligonucleotide
caucugaacuccgugaucg

SEQ ID NO: 750272 - RNA, 19 nt, Artificial Sequence
  Description of Artificial Sequence: Synthetic oligonucleotide
aagcaucucacugcaaacg

SEQ ID NO: 750273 - RNA, 19 nt, Artificial Sequence
  Description of Artificial Sequence: Synthetic oligonucleotide
caaaguaaauccagucccg

SEQ ID NO: 750274 - RNA, 19 nt, Artificial Sequence
  Description of Artificial Sequence: Synthetic oligonucleotide
ugcaacggcauccaggccu

SEQ ID NO: 750275 - RNA, 19 nt, Artificial Sequence
  Description of Artificial Sequence: Synthetic oligonucleotide
aaugcuauguuggcuuuuc

SEQ ID NO: 750276 - RNA, 19 nt, Artificial Sequence
  Description of Artificial Sequence: Synthetic oligonucleotide
uuccugauuacuaaugcua

SEQ ID NO: 750277 - RNA, 19 nt, Artificial Sequence
  Description of Artificial Sequence: Synthetic oligonucleotide
cuuucugcgaugugcaaag

SEQ ID NO: 750278 - RNA, 19 nt, Artificial Sequence
  Description of Artificial Sequence: Synthetic oligonucleotide
uuuuacuguaacuguacaa

SEQ ID NO: 750279 - RNA, 19 nt, Artificial Sequence
  Description of Artificial Sequence: Synthetic oligonucleotide
guauaauauuuugugacug

SEQ ID NO: 750280 - RNA, 19 nt, Artificial Sequence
  Description of Artificial Sequence: Synthetic oligonucleotide
ucacucgaucauaacaccc

SEQ ID NO: 750281 - RNA, 19 nt, Artificial Sequence
  Description of Artificial Sequence: Synthetic oligonucleotide
cuguaacuguacaauauac

SEQ ID NO: 750282 - RNA, 19 nt, Artificial Sequence
  Description of Artificial Sequence: Synthetic oligonucleotide
ugaauucuagcaagcauau

SEQ ID NO: 750283 - RNA, 19 nt, Artificial Sequence
  Description of Artificial Sequence: Synthetic oligonucleotide
uagaacacaucugaacucc

SEQ ID NO: 750284 - RNA, 19 nt, Artificial Sequence
  Description of Artificial Sequence: Synthetic oligonucleotide
acacuaaacaauauguuga

SEQ ID NO: 750285 - RNA, 19 nt, Artificial Sequence
  Description of Artificial Sequence: Synthetic oligonucleotide
acuaaugcuauguuggcuu

SEQ ID NO: 750286 - RNA, 19 nt, Artificial Sequence
  Description of Artificial Sequence: Synthetic oligonucleotide
uucaugcuugugcugagug

SEQ ID NO: 750287 - RNA, 19 nt, Artificial Sequence
  Description of Artificial Sequence: Synthetic oligonucleotide
cacaguugcaaauauuauc

SEQ ID NO: 750288 - RNA, 19 nt, Artificial Sequence
  Description of Artificial Sequence: Synthetic oligonucleotide
caauuuaaggcaacccuug

SEQ ID NO: 750289 - RNA, 19 nt, Artificial Sequence
  Description of Artificial Sequence: Synthetic oligonucleotide
aaacaauuccuuggaguuc

SEQ ID NO: 750290 - RNA, 19 nt, Artificial Sequence
  Description of Artificial Sequence: Synthetic oligonucleotide
gcaacaaugggauuggcug

SEQ ID NO: 750291 - RNA, 19 nt, Artificial Sequence
  Description of Artificial Sequence: Synthetic oligonucleotide
uaucaguuaaaauggcaaa

SEQ ID NO: 750292 - RNA, 19 nt, Artificial Sequence
  Description of Artificial Sequence: Synthetic oligonucleotide
uuacacuaaacaauauguu

SEQ ID NO: 750293 - RNA, 19 nt, Artificial Sequence
  Description of Artificial Sequence: Synthetic oligonucleotide
aucguuggagcagugauag

SEQ ID NO: 750294 - RNA, 19 nt, Artificial Sequence
  Description of Artificial Sequence: Synthetic oligonucleotide
uuagaacacaucugaacuc

SEQ ID NO: 750295 - RNA, 19 nt, Artificial Sequence
  Description of Artificial Sequence: Synthetic oligonucleotide
ugaacauaugcaucuguaa

SEQ ID NO: 750296 - RNA, 19 nt, Artificial Sequence
  Description of Artificial Sequence: Synthetic oligonucleotide
uacuguaacuguacaauau

SEQ ID NO: 750297 - RNA, 19 nt, Artificial Sequence
  Description of Artificial Sequence: Synthetic oligonucleotide
aaucuuccuugcucagugg

SEQ ID NO: 750298 - RNA, 19 nt, Artificial Sequence
  Description of Artificial Sequence: Synthetic oligonucleotide
uguaaccccucauuugcag

SEQ ID NO: 750299 - RNA, 19 nt, Artificial Sequence
  Description of Artificial Sequence: Synthetic oligonucleotide
uuacuaaugcuauguuggc

SEQ ID NO: 750300 - RNA, 19 nt, Artificial Sequence
  Description of Artificial Sequence: Synthetic oligonucleotide
ucgugugcaacaaugggau

SEQ ID NO: 750301 - RNA, 19 nt, Artificial Sequence
  Description of Artificial Sequence: Synthetic oligonucleotide
aaacguuaauauauuuucu

SEQ ID NO: 750302 - RNA, 19 nt, Artificial Sequence
  Description of Artificial Sequence: Synthetic oligonucleotide
uaacaccauaaacaaggca

SEQ ID NO: 750303 - RNA, 19 nt, Artificial Sequence
  Description of Artificial Sequence: Synthetic oligonucleotide
uuaguugguugcauaugug

SEQ ID NO: 750304 - RNA, 19 nt, Artificial Sequence
  Description of Artificial Sequence: Synthetic oligonucleotide
ccaacuuccaaguaaucgg

SEQ ID NO: 750305 - RNA, 19 nt, Artificial Sequence
  Description of Artificial Sequence: Synthetic oligonucleotide
acagugccaagauuacaac

SEQ ID NO: 750306 - RNA, 19 nt, Artificial Sequence
  Description of Artificial Sequence: Synthetic oligonucleotide
uggagcagugauagaagag

SEQ ID NO: 750307 - RNA, 19 nt, Artificial Sequence
  Description of Artificial Sequence: Synthetic oligonucleotide
gcaaggacuauucacaaac

SEQ ID NO: 750308 - RNA, 19 nt, Artificial Sequence
  Description of Artificial Sequence: Synthetic oligonucleotide
gauuacaacuguuuauuua

SEQ ID NO: 750309 - RNA, 19 nt, Artificial Sequence
  Description of Artificial Sequence: Synthetic oligonucleotide
ucaucguuggagcagugau

SEQ ID NO: 750310 - RNA, 19 nt, Artificial Sequence
  Description of Artificial Sequence: Synthetic oligonucleotide
gacccuugaagaauggacc

SEQ ID NO: 750311 - RNA, 19 nt, Artificial Sequence
  Description of Artificial Sequence: Synthetic oligonucleotide
cuuagaacacaucugaacu

SEQ ID NO: 750312 - RNA, 19 nt, Artificial Sequence
  Description of Artificial Sequence: Synthetic oligonucleotide
cacucgaucauaacacccc

SEQ ID NO: 750313 - RNA, 19 nt, Artificial Sequence
  Description of Artificial Sequence: Synthetic oligonucleotide
uucacucgaucauaacacc

SEQ ID NO: 750314 - RNA, 19 nt, Artificial Sequence
  Description of Artificial Sequence: Synthetic oligonucleotide
ucuuuccgaacucugcuuc

SEQ ID NO: 750315 - RNA, 19 nt, Artificial Sequence
  Description of Artificial Sequence: Synthetic oligonucleotide
agucuuacaauaaaggcuu

SEQ ID NO: 750316 - RNA, 19 nt, Artificial Sequence
  Description of Artificial Sequence: Synthetic oligonucleotide
aggggcaaauuuuaugaug

SEQ ID NO: 750317 - RNA, 19 nt, Artificial Sequence
  Description of Artificial Sequence: Synthetic oligonucleotide
uuggagcagugauagaaga

SEQ ID NO: 750318 - RNA, 19 nt, Artificial Sequence
  Description of Artificial Sequence: Synthetic oligonucleotide
uuucaaacguuaauauauu

SEQ ID NO: 750319 - RNA, 19 nt, Artificial Sequence
  Description of Artificial Sequence: Synthetic oligonucleotide
cugaacuccgugaucgcgg

SEQ ID NO: 750320 - RNA, 19 nt, Artificial Sequence
  Description of Artificial Sequence: Synthetic oligonucleotide
uccugauuacuaaugcuau

SEQ ID NO: 750321 - RNA, 19 nt, Artificial Sequence
  Description of Artificial Sequence: Synthetic oligonucleotide
uggcuuaagcucaccaggc

SEQ ID NO: 750322 - RNA, 19 nt, Artificial Sequence
  Description of Artificial Sequence: Synthetic oligonucleotide
aaaguaaauccagucccga

SEQ ID NO: 750323 - RNA, 19 nt, Artificial Sequence
  Description of Artificial Sequence: Synthetic oligonucleotide
aaguccaaagggaaaucag

SEQ ID NO: 750324 - RNA, 19 nt, Artificial Sequence
  Description of Artificial Sequence: Synthetic oligonucleotide
gugaucgcggcuuugcacc

SEQ ID NO: 750325 - RNA, 19 nt, Artificial Sequence
  Description of Artificial Sequence: Synthetic oligonucleotide
auagcacauuaucucuggg

SEQ ID NO: 750326 - RNA, 19 nt, Artificial Sequence
  Description of Artificial Sequence: Synthetic oligonucleotide
cauaucaguuaaaauggca

SEQ ID NO: 750327 - RNA, 19 nt, Artificial Sequence
  Description of Artificial Sequence: Synthetic oligonucleotide
uuacaacuguuuauuuagu

SEQ ID NO: 750328 - RNA, 19 nt, Artificial Sequence
  Description of Artificial Sequence: Synthetic oligonucleotide
uuauuuaguugguugcaua

SEQ ID NO: 750329 - RNA, 19 nt, Artificial Sequence
  Description of Artificial Sequence: Synthetic oligonucleotide
uugcuaauuuacaaauuuu

SEQ ID NO: 750330 - RNA, 19 nt, Artificial Sequence
  Description of Artificial Sequence: Synthetic oligonucleotide
aguugcaaauauuaucgua

SEQ ID NO: 750331 - RNA, 19 nt, Artificial Sequence
  Description of Artificial Sequence: Synthetic oligonucleotide
aaguaaauccagucccgau

SEQ ID NO: 750332 - RNA, 19 nt, Artificial Sequence
  Description of Artificial Sequence: Synthetic oligonucleotide
auauuuugugacugugcca

SEQ ID NO: 750333 - RNA, 19 nt, Artificial Sequence
  Description of Artificial Sequence: Synthetic oligonucleotide
cgaugugcaaaguaaaucc

SEQ ID NO: 750334 - RNA, 19 nt, Artificial Sequence
  Description of Artificial Sequence: Synthetic oligonucleotide
cugaauucuagcaagcaua

SEQ ID NO: 750335 - RNA, 19 nt, Artificial Sequence
  Description of Artificial Sequence: Synthetic oligonucleotide
auuuuaugaugccucuuaa

SEQ ID NO: 750336 - RNA, 19 nt, Artificial Sequence
  Description of Artificial Sequence: Synthetic oligonucleotide
aguauagcacaacuuguuu

SEQ ID NO: 750337 - RNA, 19 nt, Artificial Sequence
  Description of Artificial Sequence: Synthetic oligonucleotide
aacccaauccuccaccguu

SEQ ID NO: 750338 - RNA, 19 nt, Artificial Sequence
  Description of Artificial Sequence: Synthetic oligonucleotide
gagucuuacaauaaaggcu

SEQ ID NO: 750339 - RNA, 19 nt, Artificial Sequence
  Description of Artificial Sequence: Synthetic oligonucleotide
uggaguuccauuagcugaa

SEQ ID NO: 750340 - RNA, 19 nt, Artificial Sequence
  Description of Artificial Sequence: Synthetic oligonucleotide
ucuuuacacuaaacaauau

SEQ ID NO: 750341 - RNA, 19 nt, Artificial Sequence
  Description of Artificial Sequence: Synthetic oligonucleotide
aguccucacaccgguaggc

SEQ ID NO: 750342 - RNA, 19 nt, Artificial Sequence
  Description of Artificial Sequence: Synthetic oligonucleotide
auauuccugauuacuaaug

SEQ ID NO: 750343 - RNA, 19 nt, Artificial Sequence
  Description of Artificial Sequence: Synthetic oligonucleotide
cugaccgugcugauggacc

SEQ ID NO: 750344 - RNA, 19 nt, Artificial Sequence
  Description of Artificial Sequence: Synthetic oligonucleotide
uccuuggaguuccauuagc

SEQ ID NO: 750345 - RNA, 19 nt, Artificial Sequence
  Description of Artificial Sequence: Synthetic oligonucleotide
agaauggaccugcgagggc

SEQ ID NO: 750346 - RNA, 19 nt, Artificial Sequence
  Description of Artificial Sequence: Synthetic oligonucleotide
agcaucucacugcaaacga

SEQ ID NO: 750347 - RNA, 19 nt, Artificial Sequence
  Description of Artificial Sequence: Synthetic oligonucleotide
ugguguuucggauggcucu

SEQ ID NO: 750348 - RNA, 19 nt, Artificial Sequence
  Description of Artificial Sequence: Synthetic oligonucleotide
uguacucauugguguuucg

SEQ ID NO: 750349 - RNA, 19 nt, Artificial Sequence
  Description of Artificial Sequence: Synthetic oligonucleotide
caagaacacggguugucag

SEQ ID NO: 750350 - RNA, 19 nt, Artificial Sequence
  Description of Artificial Sequence: Synthetic oligonucleotide
uccaaguaaucgguggcag

SEQ ID NO: 750351 - RNA, 19 nt, Artificial Sequence
  Description of Artificial Sequence: Synthetic oligonucleotide
ugauuacuaaugcuauguu

SEQ ID NO: 750352 - RNA, 19 nt, Artificial Sequence
  Description of Artificial Sequence: Synthetic oligonucleotide
ugcagcaaaggcugcgacc

SEQ ID NO: 750353 - RNA, 19 nt, Artificial Sequence
  Description of Artificial Sequence: Synthetic oligonucleotide
gagaaggaugauccuaaca

SEQ ID NO: 750354 - RNA, 19 nt, Artificial Sequence
  Description of Artificial Sequence: Synthetic oligonucleotide
guacucauugguguuucgg

SEQ ID NO: 750355 - RNA, 19 nt, Artificial Sequence
  Description of Artificial Sequence: Synthetic oligonucleotide
acaagucccauagucuauc

SEQ ID NO: 750356 - RNA, 19 nt, Artificial Sequence
  Description of Artificial Sequence: Synthetic oligonucleotide
aguaaucgguggcaggaga

SEQ ID NO: 750357 - RNA, 19 nt, Artificial Sequence
  Description of Artificial Sequence: Synthetic oligonucleotide
agacuuuggcugcacccgg

SEQ ID NO: 750358 - RNA, 19 nt, Artificial Sequence
  Description of Artificial Sequence: Synthetic oligonucleotide
aucugaacuccgugaucgc

SEQ ID NO: 750359 - RNA, 19 nt, Artificial Sequence
  Description of Artificial Sequence: Synthetic oligonucleotide
auaugcaucuguaaccccu

SEQ ID NO: 750360 - RNA, 19 nt, Artificial Sequence
  Description of Artificial Sequence: Synthetic oligonucleotide
auccuccaccguuggaacc

SEQ ID NO: 750361 - RNA, 19 nt, Artificial Sequence
  Description of Artificial Sequence: Synthetic oligonucleotide
ugcgaugugcaaaguaaau

SEQ ID NO: 750362 - RNA, 19 nt, Artificial Sequence
  Description of Artificial Sequence: Synthetic oligonucleotide
uaucucuggggaaaacaau

SEQ ID NO: 750363 - RNA, 19 nt, Artificial Sequence
  Description of Artificial Sequence: Synthetic oligonucleotide
ggaaaucagagucuuacaa

SEQ ID NO: 750364 - RNA, 19 nt, Artificial Sequence
  Description of Artificial Sequence: Synthetic oligonucleotide
caggcuuagaacacaucug

SEQ ID NO: 750365 - RNA, 19 nt, Artificial Sequence
  Description of Artificial Sequence: Synthetic oligonucleotide
cugcuugucacagauccag

SEQ ID NO: 750366 - RNA, 19 nt, Artificial Sequence
  Description of Artificial Sequence: Synthetic oligonucleotide
aggugcacuccuuacauuu

SEQ ID NO: 750367 - RNA, 19 nt, Artificial Sequence
  Description of Artificial Sequence: Synthetic oligonucleotide
gaauuuuacuguaacugua

SEQ ID NO: 750368 - RNA, 19 nt, Artificial Sequence
  Description of Artificial Sequence: Synthetic oligonucleotide
acacccauggccgaccauc

SEQ ID NO: 750369 - RNA, 19 nt, Artificial Sequence
  Description of Artificial Sequence: Synthetic oligonucleotide
aggccuguucacucgauca

SEQ ID NO: 750370 - RNA, 19 nt, Artificial Sequence
  Description of Artificial Sequence: Synthetic oligonucleotide
ugaacuccgugaucgcggc

SEQ ID NO: 750371 - RNA, 19 nt, Artificial Sequence
  Description of Artificial Sequence: Synthetic oligonucleotide
auggccgaccaucgugugc

SEQ ID NO: 750372 - RNA, 19 nt, Artificial Sequence
  Description of Artificial Sequence: Synthetic oligonucleotide
aaguaaucgguggcaggag

SEQ ID NO: 750373 - RNA, 19 nt, Artificial Sequence
  Description of Artificial Sequence: Synthetic oligonucleotide
uacuaaugcuauguuggcu

SEQ ID NO: 750374 - RNA, 19 nt, Artificial Sequence
  Description of Artificial Sequence: Synthetic oligonucleotide
guaaccccucauuugcagc

SEQ ID NO: 750375 - RNA, 19 nt, Artificial Sequence
  Description of Artificial Sequence: Synthetic oligonucleotide
aaauccagucccgaugcaa

SEQ ID NO: 750376 - RNA, 19 nt, Artificial Sequence
  Description of Artificial Sequence: Synthetic oligonucleotide
uuggaacccucucggauuc

SEQ ID NO: 750377 - RNA, 19 nt, Artificial Sequence
  Description of Artificial Sequence: Synthetic oligonucleotide
gagacaagacauguaccug

SEQ ID NO: 750378 - RNA, 19 nt, Artificial Sequence
  Description of Artificial Sequence: Synthetic oligonucleotide
cuucuuucugcgaugugca

SEQ ID NO: 750379 - RNA, 19 nt, Artificial Sequence
  Description of Artificial Sequence: Synthetic oligonucleotide
cagacuuuggcugcacccg

SEQ ID NO: 750380 - RNA, 19 nt, Artificial Sequence
  Description of Artificial Sequence: Synthetic oligonucleotide
cauaugcaucuguaacccc

SEQ ID NO: 750381 - RNA, 19 nt, Artificial Sequence
  Description of Artificial Sequence: Synthetic oligonucleotide
guuggagcagugauagaag

SEQ ID NO: 750382 - RNA, 19 nt, Artificial Sequence
  Description of Artificial Sequence: Synthetic oligonucleotide
uucugcgaugugcaaagua

SEQ ID NO: 750383 - RNA, 19 nt, Artificial Sequence
  Description of Artificial Sequence: Synthetic oligonucleotide
agauuacaacuguuuauuu

SEQ ID NO: 750384 - RNA, 19 nt, Artificial Sequence
  Description of Artificial Sequence: Synthetic oligonucleotide
ucuuucugcgaugugcaaa

SEQ ID NO: 750385 - RNA, 19 nt, Artificial Sequence
  Description of Artificial Sequence: Synthetic oligonucleotide
aacuguuuauuuaguuggu

SEQ ID NO: 750386 - RNA, 19 nt, Artificial Sequence
  Description of Artificial Sequence: Synthetic oligonucleotide
aguaggccccucuguguac

SEQ ID NO: 750387 - RNA, 19 nt, Artificial Sequence
  Description of Artificial Sequence: Synthetic oligonucleotide
acucgaucauaacaccccu

SEQ ID NO: 750388 - RNA, 19 nt, Artificial Sequence
  Description of Artificial Sequence: Synthetic oligonucleotide
cuuugcaccaaccccucuc

SEQ ID NO: 750389 - RNA, 19 nt, Artificial Sequence
  Description of Artificial Sequence: Synthetic oligonucleotide
aguccaaagggaaaucaga

SEQ ID NO: 750390 - RNA, 19 nt, Artificial Sequence
  Description of Artificial Sequence: Synthetic oligonucleotide
agcaaacuguguucgaguu

SEQ ID NO: 750391 - RNA, 19 nt, Artificial Sequence
  Description of Artificial Sequence: Synthetic oligonucleotide
guuuauuuaguugguugca

SEQ ID NO: 750392 - RNA, 19 nt, Artificial Sequence
  Description of Artificial Sequence: Synthetic oligonucleotide
cuguaauauuccugauuac

SEQ ID NO: 750393 - RNA, 19 nt, Artificial Sequence
  Description of Artificial Sequence: Synthetic oligonucleotide
ucauaacaccccuggcaca

SEQ ID NO: 750394 - RNA, 19 nt, Artificial Sequence
  Description of Artificial Sequence: Synthetic oligonucleotide
guaacaccauaaacaaggc

SEQ ID NO: 750395 - RNA, 19 nt, Artificial Sequence
  Description of Artificial Sequence: Synthetic oligonucleotide
ugauccuaacagucugugu

SEQ ID NO: 750396 - RNA, 19 nt, Artificial Sequence
  Description of Artificial Sequence: Synthetic oligonucleotide
uugguguuucggauggcuc

SEQ ID NO: 750397 - RNA, 19 nt, Artificial Sequence
  Description of Artificial Sequence: Synthetic oligonucleotide
uuccauuagcugaauucua

SEQ ID NO: 750398 - RNA, 19 nt, Artificial Sequence
  Description of Artificial Sequence: Synthetic oligonucleotide
aacuuccaaguaaucggug

SEQ ID NO: 750399 - RNA, 19 nt, Artificial Sequence
  Description of Artificial Sequence: Synthetic oligonucleotide
aaucgguggcaggagaaaa

SEQ ID NO: 750400 - RNA, 19 nt, Artificial Sequence
  Description of Artificial Sequence: Synthetic oligonucleotide
aauccagucccgaugcaaa

SEQ ID NO: 750401 - RNA, 19 nt, Artificial Sequence
  Description of Artificial Sequence: Synthetic oligonucleotide
cacaguaggccccucugug

SEQ ID NO: 750402 - RNA, 19 nt, Artificial Sequence
  Description of Artificial Sequence: Synthetic oligonucleotide
auauuaucguauauacaaa

SEQ ID NO: 750403 - RNA, 19 nt, Artificial Sequence
  Description of Artificial Sequence: Synthetic oligonucleotide
aggacuauucacaaacaau

SEQ ID NO: 750404 - RNA, 19 nt, Artificial Sequence
  Description of Artificial Sequence: Synthetic oligonucleotide
augauccuaacagucugug

SEQ ID NO: 750405 - RNA, 19 nt, Artificial Sequence
  Description of Artificial Sequence: Synthetic oligonucleotide
auacugauugauucacauu

SEQ ID NO: 750406 - RNA, 19 nt, Artificial Sequence
  Description of Artificial Sequence: Synthetic oligonucleotide
acugcuccgagacccugag

SEQ ID NO: 750407 - RNA, 19 nt, Artificial Sequence
  Description of Artificial Sequence: Synthetic oligonucleotide
cugcaaacgacaaauuacu

SEQ ID NO: 750408 - RNA, 19 nt, Artificial Sequence
  Description of Artificial Sequence: Synthetic oligonucleotide
cacuaaacaauauguugaa

SEQ ID NO: 750409 - RNA, 19 nt, Artificial Sequence
  Description of Artificial Sequence: Synthetic oligonucleotide
aucacguucugggcugagc

SEQ ID NO: 750410 - RNA, 19 nt, Artificial Sequence
  Description of Artificial Sequence: Synthetic oligonucleotide
acccggauuaucccaucag

SEQ ID NO: 750411 - RNA, 19 nt, Artificial Sequence
  Description of Artificial Sequence: Synthetic oligonucleotide
ugaccgugcugauggaccu

SEQ ID NO: 750412 - RNA, 19 nt, Artificial Sequence
  Description of Artificial Sequence: Synthetic oligonucleotide
ucggauggcucugaucuga

SEQ ID NO: 750413 - RNA, 19 nt, Artificial Sequence
  Description of Artificial Sequence: Synthetic oligonucleotide
aucgcggcuuugcaccaac

SEQ ID NO: 750414 - RNA, 19 nt, Artificial Sequence
  Description of Artificial Sequence: Synthetic oligonucleotide
agaacacaucugaacuccg

SEQ ID NO: 750415 - RNA, 19 nt, Artificial Sequence
  Description of Artificial Sequence: Synthetic oligonucleotide
augacacccauggccgacc

SEQ ID NO: 750416 - RNA, 19 nt, Artificial Sequence
  Description of Artificial Sequence: Synthetic oligonucleotide
caugcuugugcugagugga

SEQ ID NO: 750417 - RNA, 19 nt, Artificial Sequence
  Description of Artificial Sequence: Synthetic oligonucleotide
aggucuuggcaguguguuc

SEQ ID NO: 750418 - RNA, 19 nt, Artificial Sequence
  Description of Artificial Sequence: Synthetic oligonucleotide
ugcaaggacuauucacaaa

SEQ ID NO: 750419 - RNA, 19 nt, Artificial Sequence
  Description of Artificial Sequence: Synthetic oligonucleotide
guugguugcauaugugugu

SEQ ID NO: 750420 - RNA, 19 nt, Artificial Sequence
  Description of Artificial Sequence: Synthetic oligonucleotide
uguacugcuccgagacccu

SEQ ID NO: 750421 - RNA, 19 nt, Artificial Sequence
  Description of Artificial Sequence: Synthetic oligonucleotide
cugauuacuaaugcuaugu

SEQ ID NO: 750422 - RNA, 19 nt, Artificial Sequence
  Description of Artificial Sequence: Synthetic oligonucleotide
acaagacauguaccugcug

SEQ ID NO: 750423 - RNA, 19 nt, Artificial Sequence
  Description of Artificial Sequence: Synthetic oligonucleotide
gccguggagucuuucaugc

SEQ ID NO: 750424 - RNA, 19 nt, Artificial Sequence
  Description of Artificial Sequence: Synthetic oligonucleotide
acugauugauucacauucu

SEQ ID NO: 750425 - RNA, 19 nt, Artificial Sequence
  Description of Artificial Sequence: Synthetic oligonucleotide
ggagcagugauagaagaga

SEQ ID NO: 750426 - RNA, 19 nt, Artificial Sequence
  Description of Artificial Sequence: Synthetic oligonucleotide
aacuccgugaucgcggcuu

SEQ ID NO: 750427 - RNA, 19 nt, Artificial Sequence
  Description of Artificial Sequence: Synthetic oligonucleotide
gcaaauauuaucguauaua

SEQ ID NO: 750428 - RNA, 19 nt, Artificial Sequence
  Description of Artificial Sequence: Synthetic oligonucleotide
cucgaucauaacaccccug

SEQ ID NO: 750429 - RNA, 19 nt, Artificial Sequence
  Description of Artificial Sequence: Synthetic oligonucleotide
ccauuagcugaauucuagc

SEQ ID NO: 750430 - RNA, 19 nt, Artificial Sequence
  Description of Artificial Sequence: Synthetic oligonucleotide
aggcaaaauacaaucuaaa

SEQ ID NO: 750431 - RNA, 19 nt, Artificial Sequence
  Description of Artificial Sequence: Synthetic oligonucleotide
uuaagcucaccaggcuuga

SEQ ID NO: 750432 - RNA, 19 nt, Artificial Sequence
  Description of Artificial Sequence: Synthetic oligonucleotide
ugcacccggauuaucccau

SEQ ID NO: 750433 - RNA, 19 nt, Artificial Sequence
  Description of Artificial Sequence: Synthetic oligonucleotide
uacugcuccgagacccuga

SEQ ID NO: 750434 - RNA, 19 nt, Artificial Sequence
  Description of Artificial Sequence: Synthetic oligonucleotide
gggauuggcugcaagaaca

SEQ ID NO: 750435 - RNA, 19 nt, Artificial Sequence
  Description of Artificial Sequence: Synthetic oligonucleotide
ugccaagauuacaacuguu

SEQ ID NO: 750436 - RNA, 19 nt, Artificial Sequence
  Description of Artificial Sequence: Synthetic oligonucleotide
ccuauuaacagugccaaga

SEQ ID NO: 750437 - RNA, 19 nt, Artificial Sequence
  Description of Artificial Sequence: Synthetic oligonucleotide
caaaggcugcgacccauug

SEQ ID NO: 750438 - RNA, 19 nt, Artificial Sequence
  Description of Artificial Sequence: Synthetic oligonucleotide
uguguacucauugguguuu

SEQ ID NO: 750439 - RNA, 19 nt, Artificial Sequence
  Description of Artificial Sequence: Synthetic oligonucleotide
accgguaggcgugcagacc

SEQ ID NO: 750440 - RNA, 19 nt, Artificial Sequence
  Description of Artificial Sequence: Synthetic oligonucleotide
caaugggauuggcugcaag

SEQ ID NO: 750441 - RNA, 19 nt, Artificial Sequence
  Description of Artificial Sequence: Synthetic oligonucleotide
cccuggcacaauuuaaggc

SEQ ID NO: 750442 - RNA, 19 nt, Artificial Sequence
  Description of Artificial Sequence: Synthetic oligonucleotide
cacugcaaacgacaaauua

SEQ ID NO: 750443 - RNA, 19 nt, Artificial Sequence
  Description of Artificial Sequence: Synthetic oligonucleotide
gcagugauagaagagaccu

SEQ ID NO: 750444 - RNA, 19 nt, Artificial Sequence
  Description of Artificial Sequence: Synthetic oligonucleotide
ggacccuugaagaauggac

SEQ ID NO: 750445 - RNA, 19 nt, Artificial Sequence
  Description of Artificial Sequence: Synthetic oligonucleotide
cucacugcaaacgacaaau

SEQ ID NO: 750446 - RNA, 19 nt, Artificial Sequence
  Description of Artificial Sequence: Synthetic oligonucleotide
uccagucccgaugcaaacu

SEQ ID NO: 750447 - RNA, 19 nt, Artificial Sequence
  Description of Artificial Sequence: Synthetic oligonucleotide
gagaccuuucacacagcac

SEQ ID NO: 750448 - RNA, 19 nt, Artificial Sequence
  Description of Artificial Sequence: Synthetic oligonucleotide
ugaucgcggcuuugcacca

SEQ ID NO: 750449 - RNA, 19 nt, Artificial Sequence
  Description of Artificial Sequence: Synthetic oligonucleotide
gaacccucucggauuccgg

SEQ ID NO: 750450 - RNA, 19 nt, Artificial Sequence
  Description of Artificial Sequence: Synthetic oligonucleotide
ugacacccauggccgacca

SEQ ID NO: 750451 - RNA, 19 nt, Artificial Sequence
  Description of Artificial Sequence: Synthetic oligonucleotide
cacauuaucucuggggaaa

SEQ ID NO: 750452 - RNA, 19 nt, Artificial Sequence
  Description of Artificial Sequence: Synthetic oligonucleotide
gacugugccauggaguaua

SEQ ID NO: 750453 - RNA, 19 nt, Artificial Sequence
  Description of Artificial Sequence: Synthetic oligonucleotide
uaaucgguggcaggagaaa

SEQ ID NO: 750454 - RNA, 19 nt, Artificial Sequence
  Description of Artificial Sequence: Synthetic oligonucleotide
cuguucacucgaucauaac

SEQ ID NO: 750455 - RNA, 19 nt, Artificial Sequence
  Description of Artificial Sequence: Synthetic oligonucleotide
caggcuugagcccaggucu

SEQ ID NO: 750456 - RNA, 19 nt, Artificial Sequence
  Description of Artificial Sequence: Synthetic oligonucleotide
agacauguaccugcugggu

SEQ ID NO: 750457 - RNA, 19 nt, Artificial Sequence
  Description of Artificial Sequence: Synthetic oligonucleotide
augaugccucuuaaaauaa

SEQ ID NO: 750458 - RNA, 19 nt, Artificial Sequence
  Description of Artificial Sequence: Synthetic oligonucleotide
ccaaguaaucgguggcagg

SEQ ID NO: 750459 - RNA, 19 nt, Artificial Sequence
  Description of Artificial Sequence: Synthetic oligonucleotide
gcggcuuugcaccaacccc

SEQ ID NO: 750460 - RNA, 19 nt, Artificial Sequence
  Description of Artificial Sequence: Synthetic oligonucleotide
gcagcaaacuguguucgag

SEQ ID NO: 750461 - RNA, 19 nt, Artificial Sequence
  Description of Artificial Sequence: Synthetic oligonucleotide
cauaacaccccuggcacaa

SEQ ID NO: 750462 - RNA, 19 nt, Artificial Sequence
  Description of Artificial Sequence: Synthetic oligonucleotide
auggaguauagcacaacuu

SEQ ID NO: 750463 - RNA, 19 nt, Artificial Sequence
  Description of Artificial Sequence: Synthetic oligonucleotide
uugcaacggcauccaggcc

SEQ ID NO: 750464 - RNA, 19 nt, Artificial Sequence
  Description of Artificial Sequence: Synthetic oligonucleotide
cccauugccacucugagcu

SEQ ID NO: 750465 - RNA, 19 nt, Artificial Sequence
  Description of Artificial Sequence: Synthetic oligonucleotide
gaauucuagcaagcauauc

SEQ ID NO: 750466 - RNA, 19 nt, Artificial Sequence
  Description of Artificial Sequence: Synthetic oligonucleotide
caagcauaucaguuaaaau

SEQ ID NO: 750467 - RNA, 19 nt, Artificial Sequence
  Description of Artificial Sequence: Synthetic oligonucleotide
cggauuaucccaucagcag

SEQ ID NO: 750468 - RNA, 19 nt, Artificial Sequence
  Description of Artificial Sequence: Synthetic oligonucleotide
cccggauuaucccaucagc

SEQ ID NO: 750469 - RNA, 19 nt, Artificial Sequence
  Description of Artificial Sequence: Synthetic oligonucleotide
ccugauuacuaaugcuaug

SEQ ID NO: 750470 - RNA, 19 nt, Artificial Sequence
  Description of Artificial Sequence: Synthetic oligonucleotide
uccgagacccugagcugac

SEQ ID NO: 750471 - RNA, 19 nt, Artificial Sequence
  Description of Artificial Sequence: Synthetic oligonucleotide
guaaucgguggcaggagaa

SEQ ID NO: 750472 - RNA, 19 nt, Artificial Sequence
  Description of Artificial Sequence: Synthetic oligonucleotide
gguugcauauguguguuaa

SEQ ID NO: 750473 - RNA, 19 nt, Artificial Sequence
  Description of Artificial Sequence: Synthetic oligonucleotide
acggguugucagcacaguu

SEQ ID NO: 750474 - RNA, 19 nt, Artificial Sequence
  Description of Artificial Sequence: Synthetic oligonucleotide
cugcgaugugcaaaguaaa

SEQ ID NO: 750475 - RNA, 19 nt, Artificial Sequence
  Description of Artificial Sequence: Synthetic oligonucleotide
gaacacggguugucagcac

SEQ ID NO: 750476 - RNA, 19 nt, Artificial Sequence
  Description of Artificial Sequence: Synthetic oligonucleotide
acacggguugucagcacag

SEQ ID NO: 750477 - RNA, 19 nt, Artificial Sequence
  Description of Artificial Sequence: Synthetic oligonucleotide
acaccgguaggcgugcaga

SEQ ID NO: 750478 - RNA, 19 nt, Artificial Sequence
  Description of Artificial Sequence: Synthetic oligonucleotide
cugccaccgucauggggcg

SEQ ID NO: 750479 - RNA, 19 nt, Artificial Sequence
  Description of Artificial Sequence: Synthetic oligonucleotide
ggucugggaaucacaguag

SEQ ID NO: 750480 - RNA, 19 nt, Artificial Sequence
  Description of Artificial Sequence: Synthetic oligonucleotide
gggaaucacaguaggcccc

SEQ ID NO: 750481 - RNA, 19 nt, Artificial Sequence
  Description of Artificial Sequence: Synthetic oligonucleotide
caaccccucucccucggac

SEQ ID NO: 750482 - RNA, 19 nt, Artificial Sequence
  Description of Artificial Sequence: Synthetic oligonucleotide
caagucccauagucuauca

SEQ ID NO: 750483 - RNA, 19 nt, Artificial Sequence
  Description of Artificial Sequence: Synthetic oligonucleotide
gcgaugugcaaaguaaauc

SEQ ID NO: 750484 - RNA, 19 nt, Artificial Sequence
  Description of Artificial Sequence: Synthetic oligonucleotide
acguucugggcugagcaaa

SEQ ID NO: 750485 - RNA, 19 nt, Artificial Sequence
  Description of Artificial Sequence: Synthetic oligonucleotide
aggccguggagucuuucau

SEQ ID NO: 750486 - RNA, 19 nt, Artificial Sequence
  Description of Artificial Sequence: Synthetic oligonucleotide
ggcugcacccggauuaucc

SEQ ID NO: 750487 - RNA, 19 nt, Artificial Sequence
  Description of Artificial Sequence: Synthetic oligonucleotide
gcugcacccggauuauccc

SEQ ID NO: 750488 - RNA, 19 nt, Artificial Sequence
  Description of Artificial Sequence: Synthetic oligonucleotide
ggaacccucucggauuccg

SEQ ID NO: 750489 - RNA, 19 nt, Artificial Sequence
  Description of Artificial Sequence: Synthetic oligonucleotide
cuguaaccccucauuugca

SEQ ID NO: 750490 - RNA, 19 nt, Artificial Sequence
  Description of Artificial Sequence: Synthetic oligonucleotide
agaaaacaaccaggggaaa

SEQ ID NO: 750491 - RNA, 19 nt, Artificial Sequence
  Description of Artificial Sequence: Synthetic oligonucleotide
caguggcuuaagcucacca

SEQ ID NO: 750492 - RNA, 19 nt, Artificial Sequence
  Description of Artificial Sequence: Synthetic oligonucleotide
cagugccaagauuacaacu

SEQ ID NO: 750493 - RNA, 19 nt, Artificial Sequence
  Description of Artificial Sequence: Synthetic oligonucleotide
caccgguaggcgugcagac

SEQ ID NO: 750494 - RNA, 19 nt, Artificial Sequence
  Description of Artificial Sequence: Synthetic oligonucleotide
ucgcggcuuugcaccaacc

SEQ ID NO: 750495 - RNA, 19 nt, Artificial Sequence
  Description of Artificial Sequence: Synthetic oligonucleotide
guuggaacccucucggauu

SEQ ID NO: 750496 - RNA, 19 nt, Artificial Sequence
  Description of Artificial Sequence: Synthetic oligonucleotide
aucucacugcaaacgacaa

SEQ ID NO: 750497 - RNA, 19 nt, Artificial Sequence
  Description of Artificial Sequence: Synthetic oligonucleotide
cuugagcccaggucuggga

SEQ ID NO: 750498 - RNA, 19 nt, Artificial Sequence
  Description of Artificial Sequence: Synthetic oligonucleotide
gaccugcgagggcuggagc

SEQ ID NO: 750499 - RNA, 19 nt, Artificial Sequence
  Description of Artificial Sequence: Synthetic oligonucleotide
ccggauuaucccaucagca

SEQ ID NO: 750500 - RNA, 19 nt, Artificial Sequence
  Description of Artificial Sequence: Synthetic oligonucleotide
cagugggaacuuugcagca

SEQ ID NO: 750501 - RNA, 19 nt, Artificial Sequence
  Description of Artificial Sequence: Synthetic oligonucleotide
ggagaaggaugauccuaac

SEQ ID NO: 750502 - RNA, 19 nt, Artificial Sequence
  Description of Artificial Sequence: Synthetic oligonucleotide
caucaucguuggagcagug

SEQ ID NO: 750503 - RNA, 19 nt, Artificial Sequence
  Description of Artificial Sequence: Synthetic oligonucleotide
acccaauccuccaccguug

SEQ ID NO: 750504 - RNA, 19 nt, Artificial Sequence
  Description of Artificial Sequence: Synthetic oligonucleotide
guucacuccagcaggcuua

SEQ ID NO: 750505 - RNA, 19 nt, Artificial Sequence
  Description of Artificial Sequence: Synthetic oligonucleotide
ggcgugcagacccaaaucu

SEQ ID NO: 750506 - RNA, 19 nt, Artificial Sequence
  Description of Artificial Sequence: Synthetic oligonucleotide
cauggccgaccaucgugug

SEQ ID NO: 750507 - RNA, 19 nt, Artificial Sequence
  Description of Artificial Sequence: Synthetic oligonucleotide
agguugaauuuuacuguaa

SEQ ID NO: 750508 - RNA, 19 nt, Artificial Sequence
  Description of Artificial Sequence: Synthetic oligonucleotide
caucguuggagcagugaua

SEQ ID NO: 750509 - RNA, 19 nt, Artificial Sequence
  Description of Artificial Sequence: Synthetic oligonucleotide
gacccugagcugaccgugc

SEQ ID NO: 750510 - RNA, 19 nt, Artificial Sequence
  Description of Artificial Sequence: Synthetic oligonucleotide
uuucugcgaugugcaaagu

SEQ ID NO: 750511 - RNA, 19 nt, Artificial Sequence
  Description of Artificial Sequence: Synthetic oligonucleotide
ggguugucagcacaguugu

SEQ ID NO: 750512 - RNA, 19 nt, Artificial Sequence
  Description of Artificial Sequence: Synthetic oligonucleotide
ggccguggagucuuucaug

SEQ ID NO: 750513 - RNA, 19 nt, Artificial Sequence
  Description of Artificial Sequence: Synthetic oligonucleotide
ucguuggagcagugauaga

SEQ ID NO: 750514 - RNA, 19 nt, Artificial Sequence
  Description of Artificial Sequence: Synthetic oligonucleotide
acccugagcugaccgugcu

SEQ ID NO: 750515 - RNA, 19 nt, Artificial Sequence
  Description of Artificial Sequence: Synthetic oligonucleotide
ggagggucgaggagcaggc

SEQ ID NO: 750516 - RNA, 19 nt, Artificial Sequence
  Description of Artificial Sequence: Synthetic oligonucleotide
cucacaccgguaggcgugc

SEQ ID NO: 750517 - RNA, 19 nt, Artificial Sequence
  Description of Artificial Sequence: Synthetic oligonucleotide
cgugcagacccaaaucuuc

SEQ ID NO: 750518 - RNA, 19 nt, Artificial Sequence
  Description of Artificial Sequence: Synthetic oligonucleotide
ugguugcauauguguguua

SEQ ID NO: 750519 - RNA, 19 nt, Artificial Sequence
  Description of Artificial Sequence: Synthetic oligonucleotide
ggaguauagcacaacuugu

SEQ ID NO: 750520 - RNA, 19 nt, Artificial Sequence
  Description of Artificial Sequence: Synthetic oligonucleotide
cugcacccggauuauccca

SEQ ID NO: 750521 - RNA, 19 nt, Artificial Sequence
  Description of Artificial Sequence: Synthetic oligonucleotide
ggauuggcugcaagaacac

SEQ ID NO: 750522 - RNA, 19 nt, Artificial Sequence
  Description of Artificial Sequence: Synthetic oligonucleotide
gggagaaggaugauccuaa

SEQ ID NO: 750523 - RNA, 19 nt, Artificial Sequence
  Description of Artificial Sequence: Synthetic oligonucleotide
aaccccucauuugcagcaa

SEQ ID NO: 750524 - RNA, 19 nt, Artificial Sequence
  Description of Artificial Sequence: Synthetic oligonucleotide
ccucacaccgguaggcgug

SEQ ID NO: 750525 - RNA, 19 nt, Artificial Sequence
  Description of Artificial Sequence: Synthetic oligonucleotide
ggugcacuccuuacauuug

SEQ ID NO: 750526 - RNA, 19 nt, Artificial Sequence
  Description of Artificial Sequence: Synthetic oligonucleotide
gaacccaauccuccaccgu

SEQ ID NO: 750527 - RNA, 19 nt, Artificial Sequence
  Description of Artificial Sequence: Synthetic oligonucleotide
ugcgacccauugccacucu

SEQ ID NO: 750528 - RNA, 19 nt, Artificial Sequence
  Description of Artificial Sequence: Synthetic oligonucleotide
cagauccagucugauggca

SEQ ID NO: 750529 - RNA, 19 nt, Artificial Sequence
  Description of Artificial Sequence: Synthetic oligonucleotide
cccaauccuccaccguugg

SEQ ID NO: 750530 - RNA, 19 nt, Artificial Sequence
  Description of Artificial Sequence: Synthetic oligonucleotide
caguaggccccucugugua

SEQ ID NO: 750531 - RNA, 19 nt, Artificial Sequence
  Description of Artificial Sequence: Synthetic oligonucleotide
cacccggauuaucccauca

SEQ ID NO: 750532 - RNA, 19 nt, Artificial Sequence
  Description of Artificial Sequence: Synthetic oligonucleotide
uugcagcaaccaucacauc

SEQ ID NO: 750533 - RNA, 19 nt, Artificial Sequence
  Description of Artificial Sequence: Synthetic oligonucleotide
cccuauuaacagugccaag

SEQ ID NO: 750534 - RNA, 19 nt, Artificial Sequence
  Description of Artificial Sequence: Synthetic oligonucleotide
ugagggcgucccugggauc

SEQ ID NO: 750535 - RNA, 19 nt, Artificial Sequence
  Description of Artificial Sequence: Synthetic oligonucleotide
cugugccauggaguauagc

SEQ ID NO: 750536 - RNA, 19 nt, Artificial Sequence
  Description of Artificial Sequence: Synthetic oligonucleotide
cgugaucgcggcuuugcac

SEQ ID NO: 750537 - RNA, 19 nt, Artificial Sequence
  Description of Artificial Sequence: Synthetic oligonucleotide
gugcaacaaugggauuggc

SEQ ID NO: 750538 - RNA, 19 nt, Artificial Sequence
  Description of Artificial Sequence: Synthetic oligonucleotide
cugcgacccauugccacuc

SEQ ID NO: 750539 - RNA, 19 nt, Artificial Sequence
  Description of Artificial Sequence: Synthetic oligonucleotide
gaccgugcugauggaccug

SEQ ID NO: 750540 - RNA, 19 nt, Artificial Sequence
  Description of Artificial Sequence: Synthetic oligonucleotide
acccauggccgaccaucgu

SEQ ID NO: 750541 - RNA, 19 nt, Artificial Sequence
  Description of Artificial Sequence: Synthetic oligonucleotide
agcugaccgugcugaugga

SEQ ID NO: 750542 - RNA, 19 nt, Artificial Sequence
  Description of Artificial Sequence: Synthetic oligonucleotide
gugagggcgucccugggau

SEQ ID NO: 750543 - RNA, 19 nt, Artificial Sequence
  Description of Artificial Sequence: Synthetic oligonucleotide
cugcuccgagacccugagc

SEQ ID NO: 750544 - RNA, 19 nt, Artificial Sequence
  Description of Artificial Sequence: Synthetic oligonucleotide
uggaccugcgagggcugga

SEQ ID NO: 750545 - RNA, 19 nt, Artificial Sequence
  Description of Artificial Sequence: Synthetic oligonucleotide
acuccgugaucgcggcuuu

SEQ ID NO: 750546 - RNA, 19 nt, Artificial Sequence
  Description of Artificial Sequence: Synthetic oligonucleotide
ggucggggucauuugcuaa

SEQ ID NO: 750547 - RNA, 19 nt, Artificial Sequence
  Description of Artificial Sequence: Synthetic oligonucleotide
gggaacuuugcagcaaacu

SEQ ID NO: 750548 - RNA, 19 nt, Artificial Sequence
  Description of Artificial Sequence: Synthetic oligonucleotide
gcaacggcauccaggccug

SEQ ID NO: 750549 - RNA, 19 nt, Artificial Sequence
  Description of Artificial Sequence: Synthetic oligonucleotide
cgcggcuuugcaccaaccc

SEQ ID NO: 750550 - RNA, 19 nt, Artificial Sequence
  Description of Artificial Sequence: Synthetic oligonucleotide
cucggacucucuucuuucu

SEQ ID NO: 750551 - RNA, 19 nt, Artificial Sequence
  Description of Artificial Sequence: Synthetic oligonucleotide
acaaugggauuggcugcaa

SEQ ID NO: 750552 - RNA, 19 nt, Artificial Sequence
  Description of Artificial Sequence: Synthetic oligonucleotide
auggaccugggcagaggga

SEQ ID NO: 750553 - RNA, 19 nt, Artificial Sequence
  Description of Artificial Sequence: Synthetic oligonucleotide
acaauuccuuggaguucca

SEQ ID NO: 750554 - RNA, 19 nt, Artificial Sequence
  Description of Artificial Sequence: Synthetic oligonucleotide
cacaagucccauagucuau

SEQ ID NO: 750555 - RNA, 19 nt, Artificial Sequence
  Description of Artificial Sequence: Synthetic oligonucleotide
gaaucacaguaggccccuc

SEQ ID NO: 750556 - RNA, 19 nt, Artificial Sequence
  Description of Artificial Sequence: Synthetic oligonucleotide
gccaccgucauggggcgcc

SEQ ID NO: 750557 - RNA, 19 nt, Artificial Sequence
  Description of Artificial Sequence: Synthetic oligonucleotide
cucggguaggugcacuccu

SEQ ID NO: 750558 - RNA, 19 nt, Artificial Sequence
  Description of Artificial Sequence: Synthetic oligonucleotide
gcugaccgugcugauggac

SEQ ID NO: 750559 - RNA, 19 nt, Artificial Sequence
  Description of Artificial Sequence: Synthetic oligonucleotide
gcugagcaaaggcacugcu

SEQ ID NO: 750560 - RNA, 19 nt, Artificial Sequence
  Description of Artificial Sequence: Synthetic oligonucleotide
cuaucacguucugggcuga

SEQ ID NO: 750561 - RNA, 19 nt, Artificial Sequence
  Description of Artificial Sequence: Synthetic oligonucleotide
ccccuauuaacagugccaa

SEQ ID NO: 750562 - RNA, 19 nt, Artificial Sequence
  Description of Artificial Sequence: Synthetic oligonucleotide
ucccucggacucucuucuu

SEQ ID NO: 750563 - RNA, 19 nt, Artificial Sequence
  Description of Artificial Sequence: Synthetic oligonucleotide
gcgacccauugccacucug

SEQ ID NO: 750564 - RNA, 19 nt, Artificial Sequence
  Description of Artificial Sequence: Synthetic oligonucleotide
gaccaucgugugcaacaau

SEQ ID NO: 750565 - RNA, 19 nt, Artificial Sequence
  Description of Artificial Sequence: Synthetic oligonucleotide
guaggccccucuguguacu

SEQ ID NO: 750566 - RNA, 19 nt, Artificial Sequence
  Description of Artificial Sequence: Synthetic oligonucleotide
gaacuccgugaucgcggcu

SEQ ID NO: 750567 - RNA, 19 nt, Artificial Sequence
  Description of Artificial Sequence: Synthetic oligonucleotide
guaggcgugcagacccaaa

SEQ ID NO: 750568 - RNA, 19 nt, Artificial Sequence
  Description of Artificial Sequence: Synthetic oligonucleotide
cuccgugaucgcggcuuug

SEQ ID NO: 750569 - RNA, 19 nt, Artificial Sequence
  Description of Artificial Sequence: Synthetic oligonucleotide
gaucgcggcuuugcaccaa

SEQ ID NO: 750570 - RNA, 19 nt, Artificial Sequence
  Description of Artificial Sequence: Synthetic oligonucleotide
ggcuuugcaccaaccccuc

SEQ ID NO: 750571 - RNA, 19 nt, Artificial Sequence
  Description of Artificial Sequence: Synthetic oligonucleotide
uggcugcacccggauuauc

SEQ ID NO: 750572 - RNA, 19 nt, Artificial Sequence
  Description of Artificial Sequence: Synthetic oligonucleotide
cgacccauugccacucuga

SEQ ID NO: 750573 - RNA, 19 nt, Artificial Sequence
  Description of Artificial Sequence: Synthetic oligonucleotide
gggucggggucauuugcua

SEQ ID NO: 750574 - RNA, 19 nt, Artificial Sequence
  Description of Artificial Sequence: Synthetic oligonucleotide
ccauggccgaccaucgugu

SEQ ID NO: 750575 - RNA, 19 nt, Artificial Sequence
  Description of Artificial Sequence: Synthetic oligonucleotide
ggccuguucacucgaucau

SEQ ID NO: 750576 - RNA, 19 nt, Artificial Sequence
  Description of Artificial Sequence: Synthetic oligonucleotide
gguaggcgugcagacccaa

SEQ ID NO: 750577 - RNA, 19 nt, Artificial Sequence
  Description of Artificial Sequence: Synthetic oligonucleotide
caauuccuuggaguuccau

SEQ ID NO: 750578 - RNA, 19 nt, Artificial Sequence
  Description of Artificial Sequence: Synthetic oligonucleotide
ccaauccuccaccguugga

SEQ ID NO: 750579 - RNA, 19 nt, Artificial Sequence
  Description of Artificial Sequence: Synthetic oligonucleotide
gcggccucggguaggugca

SEQ ID NO: 750580 - RNA, 19 nt, Artificial Sequence
  Description of Artificial Sequence: Synthetic oligonucleotide
ggcgucccugggauccggc

SEQ ID NO: 750581 - RNA, 19 nt, Artificial Sequence
  Description of Artificial Sequence: Synthetic oligonucleotide
cagucccgaugcaaacuuu

SEQ ID NO: 750582 - RNA, 19 nt, Artificial Sequence
  Description of Artificial Sequence: Synthetic oligonucleotide
ccguuggaacccucucgga

SEQ ID NO: 750583 - RNA, 19 nt, Artificial Sequence
  Description of Artificial Sequence: Synthetic oligonucleotide
caccgucauggggcgccug

SEQ ID NO: 750584 - RNA, 19 nt, Artificial Sequence
  Description of Artificial Sequence: Synthetic oligonucleotide
gccgaccaucgugugcaac

SEQ ID NO: 750585 - RNA, 19 nt, Artificial Sequence
  Description of Artificial Sequence: Synthetic oligonucleotide
ccagucccgaugcaaacuu

SEQ ID NO: 750586 - RNA, 19 nt, Artificial Sequence
  Description of Artificial Sequence: Synthetic oligonucleotide
ccgugaucgcggcuuugca

SEQ ID NO: 750587 - RNA, 19 nt, Artificial Sequence
  Description of Artificial Sequence: Synthetic oligonucleotide
ggccccucuguguacucau

SEQ ID NO: 750588 - RNA, 19 nt, Artificial Sequence
  Description of Artificial Sequence: Synthetic oligonucleotide
aggcaacccuuggcuggaa

SEQ ID NO: 750589 - RNA, 19 nt, Artificial Sequence
  Description of Artificial Sequence: Synthetic oligonucleotide
gcuuugcaccaaccccucu

SEQ ID NO: 750590 - RNA, 19 nt, Artificial Sequence
  Description of Artificial Sequence: Synthetic oligonucleotide
cguuggaacccucucggau

SEQ ID NO: 750591 - RNA, 19 nt, Artificial Sequence
  Description of Artificial Sequence: Synthetic oligonucleotide
gcgugcagacccaaaucuu

SEQ ID NO: 750592 - RNA, 19 nt, Artificial Sequence
  Description of Artificial Sequence: Synthetic oligonucleotide
ccaaccccucucccucgga

SEQ ID NO: 750593 - RNA, 19 nt, Artificial Sequence
  Description of Artificial Sequence: Synthetic oligonucleotide
cgaccaucgugugcaacaa

SEQ ID NO: 750594 - RNA, 19 nt, Artificial Sequence
  Description of Artificial Sequence: Synthetic oligonucleotide
ggccgaccaucgugugcaa

SEQ ID NO: 750595 - RNA, 19 nt, Artificial Sequence
  Description of Artificial Sequence: Synthetic oligonucleotide
ccgucauggggcgccugca

SEQ ID NO: 750596 - RNA, 19 nt, Artificial Sequence
  Description of Artificial Sequence: Synthetic oligonucleotide
caacggcauccaggccugu

SEQ ID NO: 750597 - RNA, 19 nt, Artificial Sequence
  Description of Artificial Sequence: Synthetic oligonucleotide
aauaaaacgauucugugcu

SEQ ID NO: 750598 - RNA, 19 nt, Artificial Sequence
  Description of Artificial Sequence: Synthetic oligonucleotide
auaaacaacaucuggaugg

SEQ ID NO: 750599 - RNA, 19 nt, Artificial Sequence
  Description of Artificial Sequence: Synthetic oligonucleotide
  modified_base (9)..(9): a, c, u, g, unknown or other
uuuaaugcncaaaauaaug

SEQ ID NO: 750600 - RNA, 19 nt, Artificial Sequence
  Description of Artificial Sequence: Synthetic oligonucleotide
aaugauaucaaacuguauu

SEQ ID NO: 750601 - RNA, 19 nt, Artificial Sequence
  Description of Artificial Sequence: Synthetic oligonucleotide
acugaagaguauuuaaugc

SEQ ID NO: 750602 - RNA, 19 nt, Artificial Sequence
  Description of Artificial Sequence: Synthetic oligonucleotide
ugaacaguugucuauaucc

SEQ ID NO: 750603 - RNA, 19 nt, Artificial Sequence
  Description of Artificial Sequence: Synthetic oligonucleotide
  modified_base (6)..(6): a, c, u, g, unknown or other
aaguanagguucuacaaag

SEQ ID NO: 750604 - RNA, 19 nt, Artificial Sequence
  Description of Artificial Sequence: Synthetic oligonucleotide
ucaaauauguagcacacug

SEQ ID NO: 750605 - RNA, 19 nt, Artificial Sequence
  Description of Artificial Sequence: Synthetic oligonucleotide
uguauugaaacugugaagc

SEQ ID NO: 750606 - RNA, 19 nt, Artificial Sequence
  Description of Artificial Sequence: Synthetic oligonucleotide
  modified_base (8)..(8): a, c, u, g, unknown or other
uuaaugcncaaaauaaugc

SEQ ID NO: 750607 - RNA, 19 nt, Artificial Sequence
  Description of Artificial Sequence: Synthetic oligonucleotide
aauguauugaaacugugaa

SEQ ID NO: 750608 - RNA, 19 nt, Artificial Sequence
  Description of Artificial Sequence: Synthetic oligonucleotide
uguaugauaaugcauagua

SEQ ID NO: 750609 - RNA, 19 nt, Artificial Sequence
  Description of Artificial Sequence: Synthetic oligonucleotide
aaguuuuguaugauaaugc

SEQ ID NO: 750610 - RNA, 19 nt, Artificial Sequence
  Description of Artificial Sequence: Synthetic oligonucleotide
uuuuguaugauaaugcaua

SEQ ID NO: 750611 - RNA, 19 nt, Artificial Sequence
  Description of Artificial Sequence: Synthetic oligonucleotide
auuccuagcauuuagggca

SEQ ID NO: 750612 - RNA, 19 nt, Artificial Sequence
  Description of Artificial Sequence: Synthetic oligonucleotide
accaugauaggaaugaacc

SEQ ID NO: 750613 - RNA, 19 nt, Artificial Sequence
  Description of Artificial Sequence: Synthetic oligonucleotide
  modified_base (7)..(7): a, c, u, g, unknown or other
uaaugcncaaaauaaugca

SEQ ID NO: 750614 - RNA, 19 nt, Artificial Sequence
  Description of Artificial Sequence: Synthetic oligonucleotide
aaucuagagagagggaagc

SEQ ID NO: 750615 - RNA, 19 nt, Artificial Sequence
  Description of Artificial Sequence: Synthetic oligonucleotide
gaucaauuaacuucaaaca

SEQ ID NO: 750616 - RNA, 19 nt, Artificial Sequence
  Description of Artificial Sequence: Synthetic oligonucleotide
aauaaauaacugaugaaga

SEQ ID NO: 750617 - RNA, 19 nt, Artificial Sequence
  Description of Artificial Sequence: Synthetic oligonucleotide
ucaauuaacuucaaacagu

SEQ ID NO: 750618 - RNA, 19 nt, Artificial Sequence
  Description of Artificial Sequence: Synthetic oligonucleotide
aaagcuuuugccuggccag

SEQ ID NO: 750619 - RNA, 19 nt, Artificial Sequence
  Description of Artificial Sequence: Synthetic oligonucleotide
gacucauuaaguuuccacc

SEQ ID NO: 750620 - RNA, 19 nt, Artificial Sequence
  Description of Artificial Sequence: Synthetic oligonucleotide
aaugaacccagauucagaa

SEQ ID NO: 750621 - RNA, 19 nt, Artificial Sequence
  Description of Artificial Sequence: Synthetic oligonucleotide
auguccggagaacaaaucc

SEQ ID NO: 750622 - RNA, 19 nt, Artificial Sequence
  Description of Artificial Sequence: Synthetic oligonucleotide
uguaacuugggucugcgga

SEQ ID NO: 750623 - RNA, 19 nt, Artificial Sequence
  Description of Artificial Sequence: Synthetic oligonucleotide
aacugucuaucccagguag

SEQ ID NO: 750624 - RNA, 19 nt, Artificial Sequence
  Description of Artificial Sequence: Synthetic oligonucleotide
  modified_base (18)..(18): a, c, u, g, unknown or other
ugaagaguauuuaaugcnc

SEQ ID NO: 750625 - RNA, 19 nt, Artificial Sequence
  Description of Artificial Sequence: Synthetic oligonucleotide
ucauuacuagcaauaauac

SEQ ID NO: 750626 - RNA, 19 nt, Artificial Sequence
  Description of Artificial Sequence: Synthetic oligonucleotide
gaaguaaaacugucuaucc

SEQ ID NO: 750627 - RNA, 19 nt, Artificial Sequence
  Description of Artificial Sequence: Synthetic oligonucleotide
aaaagcuuuugccuggcca

SEQ ID NO: 750628 - RNA, 19 nt, Artificial Sequence
  Description of Artificial Sequence: Synthetic oligonucleotide
agaucuggcgcauuguuuc

SEQ ID NO: 750629 - RNA, 19 nt, Artificial Sequence
  Description of Artificial Sequence: Synthetic oligonucleotide
ugcccuacgauccaguuca

SEQ ID NO: 750630 - RNA, 19 nt, Artificial Sequence
  Description of Artificial Sequence: Synthetic oligonucleotide
aaaacuacacaugguaaug

SEQ ID NO: 750631 - RNA, 19 nt, Artificial Sequence
  Description of Artificial Sequence: Synthetic oligonucleotide
caugcgaaagauguuaugg

SEQ ID NO: 750632 - RNA, 19 nt, Artificial Sequence
  Description of Artificial Sequence: Synthetic oligonucleotide
ugcggaucaauuaacuuca

SEQ ID NO: 750633 - RNA, 19 nt, Artificial Sequence
  Description of Artificial Sequence: Synthetic oligonucleotide
agugcuaucuguuuugcca

SEQ ID NO: 750634 - RNA, 19 nt, Artificial Sequence
  Description of Artificial Sequence: Synthetic oligonucleotide
gaaaguaccgcaugacaag

SEQ ID NO: 750635 - RNA, 19 nt, Artificial Sequence
  Description of Artificial Sequence: Synthetic oligonucleotide
aaagucguuuauuuuccug

SEQ ID NO: 750636 - RNA, 19 nt, Artificial Sequence
  Description of Artificial Sequence: Synthetic oligonucleotide
ugacaaacuacuuucacuu

SEQ ID NO: 750637 - RNA, 19 nt, Artificial Sequence
  Description of Artificial Sequence: Synthetic oligonucleotide
ucaaacagucacaagugac

SEQ ID NO: 750638 - RNA, 19 nt, Artificial Sequence
  Description of Artificial Sequence: Synthetic oligonucleotide
auuuguagacucugauccc

SEQ ID NO: 750639 - RNA, 19 nt, Artificial Sequence
  Description of Artificial Sequence: Synthetic oligonucleotide
ucguuuauuuuccuggugu

SEQ ID NO: 750640 - RNA, 19 nt, Artificial Sequence
  Description of Artificial Sequence: Synthetic oligonucleotide
aaauaacugaugaagaaua

SEQ ID NO: 750641 - RNA, 19 nt, Artificial Sequence
  Description of Artificial Sequence: Synthetic oligonucleotide
cucaauauaaccuguuauc

SEQ ID NO: 750642 - RNA, 19 nt, Artificial Sequence
  Description of Artificial Sequence: Synthetic oligonucleotide
gguaauggaaaugugagcc

SEQ ID NO: 750643 - RNA, 19 nt, Artificial Sequence
  Description of Artificial Sequence: Synthetic oligonucleotide
accaaaccuguuuuauucc

SEQ ID NO: 750644 - RNA, 19 nt, Artificial Sequence
  Description of Artificial Sequence: Synthetic oligonucleotide
  modified_base (4)..(4): a, c, u, g, unknown or other
ugcncaaaauaaugcauca

SEQ ID NO: 750645 - RNA, 19 nt, Artificial Sequence
  Description of Artificial Sequence: Synthetic oligonucleotide
uuuagggcauauauccaag

SEQ ID NO: 750646 - RNA, 19 nt, Artificial Sequence
  Description of Artificial Sequence: Synthetic oligonucleotide
  modified_base (16)..(16): a, c, u, g, unknown or other
aagaguauuuaaugcncaa

SEQ ID NO: 750647 - RNA, 19 nt, Artificial Sequence
  Description of Artificial Sequence: Synthetic oligonucleotide
uuuuaacaugguuaccuug

SEQ ID NO: 750648 - RNA, 19 nt, Artificial Sequence
  Description of Artificial Sequence: Synthetic oligonucleotide
  modified_base (3)..(3): a, c, u, g, unknown or other
uanagguucuacaaagcau

SEQ ID NO: 750649 - RNA, 19 nt, Artificial Sequence
  Description of Artificial Sequence: Synthetic oligonucleotide
uauuccuagcauuuagggc

SEQ ID NO: 750650 - RNA, 19 nt, Artificial Sequence
  Description of Artificial Sequence: Synthetic oligonucleotide
aguuuuguaugauaaugca

SEQ ID NO: 750651 - RNA, 19 nt, Artificial Sequence
  Description of Artificial Sequence: Synthetic oligonucleotide
uucaguugaacaucuaaaa

SEQ ID NO: 750652 - RNA, 19 nt, Artificial Sequence
  Description of Artificial Sequence: Synthetic oligonucleotide
uucugaugcccuacgaucc

SEQ ID NO: 750653 - RNA, 19 nt, Artificial Sequence
  Description of Artificial Sequence: Synthetic oligonucleotide
aguaccgcaugacaagaac

SEQ ID NO: 750654 - RNA, 19 nt, Artificial Sequence
  Description of Artificial Sequence: Synthetic oligonucleotide
uugaaaguaccgcaugaca

SEQ ID NO: 750655 - RNA, 19 nt, Artificial Sequence
  Description of Artificial Sequence: Synthetic oligonucleotide
  modified_base (5)..(5): a, c, u, g, unknown or other
aguanagguucuacaaagc

SEQ ID NO: 750656 - RNA, 19 nt, Artificial Sequence
  Description of Artificial Sequence: Synthetic oligonucleotide
uugauucaaauauguagca

SEQ ID NO: 750657 - RNA, 19 nt, Artificial Sequence
  Description of Artificial Sequence: Synthetic oligonucleotide
uuacuagcaauaauacuuc

SEQ ID NO: 750658 - RNA, 19 nt, Artificial Sequence
  Description of Artificial Sequence: Synthetic oligonucleotide
aaauguauugaaacuguga

SEQ ID NO: 750659 - RNA, 19 nt, Artificial Sequence
  Description of Artificial Sequence: Synthetic oligonucleotide
acucugaucccaaggaucc

SEQ ID NO: 750660 - RNA, 19 nt, Artificial Sequence
  Description of Artificial Sequence: Synthetic oligonucleotide
  modified_base (15)..(15): a, c, u, g, unknown or other
cauauauccaaguanaggu

SEQ ID NO: 750661 - RNA, 19 nt, Artificial Sequence
  Description of Artificial Sequence: Synthetic oligonucleotide
uagacucugaucccaagga

SEQ ID NO: 750662 - RNA, 19 nt, Artificial Sequence
  Description of Artificial Sequence: Synthetic oligonucleotide
ugccaauccaacagaauca

SEQ ID NO: 750663 - RNA, 19 nt, Artificial Sequence
  Description of Artificial Sequence: Synthetic oligonucleotide
  modified_base (2)..(2): a, c, u, g, unknown or other
anagguucuacaaagcauu

SEQ ID NO: 750664 - RNA, 19 nt, Artificial Sequence
  Description of Artificial Sequence: Synthetic oligonucleotide
uaaacugggaaauggggaa

SEQ ID NO: 750665 - RNA, 19 nt, Artificial Sequence
  Description of Artificial Sequence: Synthetic oligonucleotide
ucauuaaguuuccacccug

SEQ ID NO: 750666 - RNA, 19 nt, Artificial Sequence
  Description of Artificial Sequence: Synthetic oligonucleotide
aucaugaucauuacuagca

SEQ ID NO: 750667 - RNA, 19 nt, Artificial Sequence
  Description of Artificial Sequence: Synthetic oligonucleotide
uaccuugucauuuucuccu

SEQ ID NO: 750668 - RNA, 19 nt, Artificial Sequence
  Description of Artificial Sequence: Synthetic oligonucleotide
ucuccaaauggauuuguac

SEQ ID NO: 750669 - RNA, 19 nt, Artificial Sequence
  Description of Artificial Sequence: Synthetic oligonucleotide
  modified_base (4)..(4): a, c, u, g, unknown or other
guanagguucuacaaagca

SEQ ID NO: 750670 - RNA, 19 nt, Artificial Sequence
  Description of Artificial Sequence: Synthetic oligonucleotide
uauuggaguaucuggggca

SEQ ID NO: 750671 - RNA, 19 nt, Artificial Sequence
  Description of Artificial Sequence: Synthetic oligonucleotide
uuaaguuuccacccugcgu

SEQ ID NO: 750672 - RNA, 19 nt, Artificial Sequence
  Description of Artificial Sequence: Synthetic oligonucleotide
aacuacacaugguaaugga

SEQ ID NO: 750673 - RNA, 19 nt, Artificial Sequence
  Description of Artificial Sequence: Synthetic oligonucleotide
augacaaacuacuuucacu

SEQ ID NO: 750674 - RNA, 19 nt, Artificial Sequence
  Description of Artificial Sequence: Synthetic oligonucleotide
acuaauaagugugauucug

SEQ ID NO: 750675 - RNA, 19 nt, Artificial Sequence
  Description of Artificial Sequence: Synthetic oligonucleotide
uucaaacagucacaaguga

SEQ ID NO: 750676 - RNA, 19 nt, Artificial Sequence
  Description of Artificial Sequence: Synthetic oligonucleotide
  modified_base (9)..(9): a, c, u, g, unknown or other
uccaaguanagguucuaca

SEQ ID NO: 750677 - RNA, 19 nt, Artificial Sequence
  Description of Artificial Sequence: Synthetic oligonucleotide
gauucugucaugcgaaaga

SEQ ID NO: 750678 - RNA, 19 nt, Artificial Sequence
  Description of Artificial Sequence: Synthetic oligonucleotide
guagacucugaucccaagg

SEQ ID NO: 750679 - RNA, 19 nt, Artificial Sequence
  Description of Artificial Sequence: Synthetic oligonucleotide
cugauuuacucgugcaucc

SEQ ID NO: 750680 - RNA, 19 nt, Artificial Sequence
  Description of Artificial Sequence: Synthetic oligonucleotide
  modified_base (16)..(16): a, c, u, g, unknown or other
gcauauauccaaguanagg

SEQ ID NO: 750681 - RNA, 19 nt, Artificial Sequence
  Description of Artificial Sequence: Synthetic oligonucleotide
  modified_base (6)..(6): a, c, u, g, unknown or other
aaugcncaaaauaaugcau

SEQ ID NO: 750682 - RNA, 19 nt, Artificial Sequence
  Description of Artificial Sequence: Synthetic oligonucleotide
uguccggagaacaaaucca

SEQ ID NO: 750683 - RNA, 19 nt, Artificial Sequence
  Description of Artificial Sequence: Synthetic oligonucleotide
uuaacucucugcuugcaaa

SEQ ID NO: 750684 - RNA, 19 nt, Artificial Sequence
  Description of Artificial Sequence: Synthetic oligonucleotide
uuuccaucaaaggaaguga

SEQ ID NO: 750685 - RNA, 19 nt, Artificial Sequence
  Description of Artificial Sequence: Synthetic oligonucleotide
uggaaguauacacauccuc

SEQ ID NO: 750686 - RNA, 19 nt, Artificial Sequence
  Description of Artificial Sequence: Synthetic oligonucleotide
gauuuguacgccugccucc

SEQ ID NO: 750687 - RNA, 19 nt, Artificial Sequence
  Description of Artificial Sequence: Synthetic oligonucleotide
aaagcaaguuuaugcuucu

SEQ ID NO: 750688 - RNA, 19 nt, Artificial Sequence
  Description of Artificial Sequence: Synthetic oligonucleotide
ugugagccuuguaacuugg

SEQ ID NO: 750689 - RNA, 19 nt, Artificial Sequence
  Description of Artificial Sequence: Synthetic oligonucleotide
uccucuguuacuucguacu

SEQ ID NO: 750690 - RNA, 19 nt, Artificial Sequence
  Description of Artificial Sequence: Synthetic oligonucleotide
  modified_base (19)..(19): a, c, u, g, unknown or other
cugaagaguauuuaaugcn

SEQ ID NO: 750691 - RNA, 19 nt, Artificial Sequence
  Description of Artificial Sequence: Synthetic oligonucleotide
cauuguuugauucaaauau

SEQ ID NO: 750692 - RNA, 19 nt, Artificial Sequence
  Description of Artificial Sequence: Synthetic oligonucleotide
ucguacuuuaccuugucau

SEQ ID NO: 750693 - RNA, 19 nt, Artificial Sequence
  Description of Artificial Sequence: Synthetic oligonucleotide
  modified_base (5)..(5): a, c, u, g, unknown or other
augcncaaaauaaugcauc

SEQ ID NO: 750694 - RNA, 19 nt, Artificial Sequence
  Description of Artificial Sequence: Synthetic oligonucleotide
ugacucauuaaguuuccac

SEQ ID NO: 750695 - RNA, 19 nt, Artificial Sequence
  Description of Artificial Sequence: Synthetic oligonucleotide
aaacugggaaauggggaac

SEQ ID NO: 750696 - RNA, 19 nt, Artificial Sequence
  Description of Artificial Sequence: Synthetic oligonucleotide
uuuaccuccauagaaccaa

SEQ ID NO: 750697 - RNA, 19 nt, Artificial Sequence
  Description of Artificial Sequence: Synthetic oligonucleotide
aaacgauucugugcucccc

SEQ ID NO: 750698 - RNA, 19 nt, Artificial Sequence
  Description of Artificial Sequence: Synthetic oligonucleotide
uaguguaaguauuucuuuc

SEQ ID NO: 750699 - RNA, 19 nt, Artificial Sequence
  Description of Artificial Sequence: Synthetic oligonucleotide
  modified_base (10)..(10): a, c, u, g, unknown or other
auuuaaugcncaaaauaau

SEQ ID NO: 750700 - RNA, 19 nt, Artificial Sequence
  Description of Artificial Sequence: Synthetic oligonucleotide
cugcggaucaauuaacuuc

SEQ ID NO: 750701 - RNA, 19 nt, Artificial Sequence
  Description of Artificial Sequence: Synthetic oligonucleotide
aguugaaaguaccgcauga

SEQ ID NO: 750702 - RNA, 19 nt, Artificial Sequence
  Description of Artificial Sequence: Synthetic oligonucleotide
uuaauugcagcaucaugau

SEQ ID NO: 750703 - RNA, 19 nt, Artificial Sequence
  Description of Artificial Sequence: Synthetic oligonucleotide
agcugaaacaagcaaguau

SEQ ID NO: 750704 - RNA, 19 nt, Artificial Sequence
  Description of Artificial Sequence: Synthetic oligonucleotide
caccaaaccuguuuuauuc

SEQ ID NO: 750705 - RNA, 19 nt, Artificial Sequence
  Description of Artificial Sequence: Synthetic oligonucleotide
uuuuagguggguggggcgg

SEQ ID NO: 750706 - RNA, 19 nt, Artificial Sequence
  Description of Artificial Sequence: Synthetic oligonucleotide
aacaguugucuauauccau

SEQ ID NO: 750707 - RNA, 19 nt, Artificial Sequence
  Description of Artificial Sequence: Synthetic oligonucleotide
ugccuuuaccuccauagaa

SEQ ID NO: 750708 - RNA, 19 nt, Artificial Sequence
  Description of Artificial Sequence: Synthetic oligonucleotide
uuaccuugugccacauucc

SEQ ID NO: 750709 - RNA, 19 nt, Artificial Sequence
  Description of Artificial Sequence: Synthetic oligonucleotide
cacauccucuguuacuucg

SEQ ID NO: 750710 - RNA, 19 nt, Artificial Sequence
  Description of Artificial Sequence: Synthetic oligonucleotide
gcaacaagagaaucuagag

SEQ ID NO: 750711 - RNA, 19 nt, Artificial Sequence
  Description of Artificial Sequence: Synthetic oligonucleotide
  modified_base (10)..(10): a, c, u, g, unknown or other
auccaaguanagguucuac

SEQ ID NO: 750712 - RNA, 19 nt, Artificial Sequence
  Description of Artificial Sequence: Synthetic oligonucleotide
  modified_base (19)..(19): a, c, u, g, unknown or other
agggcauauauccaaguan

SEQ ID NO: 750713 - RNA, 19 nt, Artificial Sequence
  Description of Artificial Sequence: Synthetic oligonucleotide
guugaguugaaaguaccgc

SEQ ID NO: 750714 - RNA, 19 nt, Artificial Sequence
  Description of Artificial Sequence: Synthetic oligonucleotide
uuuguagacucugauccca

SEQ ID NO: 750715 - RNA, 19 nt, Artificial Sequence
  Description of Artificial Sequence: Synthetic oligonucleotide
gauaugcucaauauaaccu

SEQ ID NO: 750716 - RNA, 19 nt, Artificial Sequence
  Description of Artificial Sequence: Synthetic oligonucleotide
uuggucuacuggaagcagc

SEQ ID NO: 750717 - RNA, 19 nt, Artificial Sequence
  Description of Artificial Sequence: Synthetic oligonucleotide
aguugaguugaaaguaccg

SEQ ID NO: 750718 - RNA, 19 nt, Artificial Sequence
  Description of Artificial Sequence: Synthetic oligonucleotide
ugcgaaagauguuauggau

SEQ ID NO: 750719 - RNA, 19 nt, Artificial Sequence
  Description of Artificial Sequence: Synthetic oligonucleotide
uuugacaaucggcuguauc

SEQ ID NO: 750720 - RNA, 19 nt, Artificial Sequence
  Description of Artificial Sequence: Synthetic oligonucleotide
ucaaaggaagugaucugaa

SEQ ID NO: 750721 - RNA, 19 nt, Artificial Sequence
  Description of Artificial Sequence: Synthetic oligonucleotide
agcaucaugaucauuacua

SEQ ID NO: 750722 - RNA, 19 nt, Artificial Sequence
  Description of Artificial Sequence: Synthetic oligonucleotide
ucaugaucauuacuagcaa

SEQ ID NO: 750723 - RNA, 19 nt, Artificial Sequence
  Description of Artificial Sequence: Synthetic oligonucleotide
cgaaagauguuauggaugg

SEQ ID NO: 750724 - RNA, 19 nt, Artificial Sequence
  Description of Artificial Sequence: Synthetic oligonucleotide
agcauuuagggcauauauc

SEQ ID NO: 750725 - RNA, 19 nt, Artificial Sequence
  Description of Artificial Sequence: Synthetic oligonucleotide
uguuuuagguggguggggc

SEQ ID NO: 750726 - RNA, 19 nt, Artificial Sequence
  Description of Artificial Sequence: Synthetic oligonucleotide
cuugacucauuaaguuucc

SEQ ID NO: 750727 - RNA, 19 nt, Artificial Sequence
  Description of Artificial Sequence: Synthetic oligonucleotide
augaacccagauucagaac

SEQ ID NO: 750728 - RNA, 19 nt, Artificial Sequence
  Description of Artificial Sequence: Synthetic oligonucleotide
uaccuugugccacauucca

SEQ ID NO: 750729 - RNA, 19 nt, Artificial Sequence
  Description of Artificial Sequence: Synthetic oligonucleotide
ugcagugcuaucuguuuug

SEQ ID NO: 750730 - RNA, 19 nt, Artificial Sequence
  Description of Artificial Sequence: Synthetic oligonucleotide
ugauucaaauauguagcac

SEQ ID NO: 750731 - RNA, 19 nt, Artificial Sequence
  Description of Artificial Sequence: Synthetic oligonucleotide
auaaaacgauucugugcuc

SEQ ID NO: 750732 - RNA, 19 nt, Artificial Sequence
  Description of Artificial Sequence: Synthetic oligonucleotide
aaauggauuuguacgccug

SEQ ID NO: 750733 - RNA, 19 nt, Artificial Sequence
  Description of Artificial Sequence: Synthetic oligonucleotide
ucuacuggaagcagcuauc

SEQ ID NO: 750734 - RNA, 19 nt, Artificial Sequence
  Description of Artificial Sequence: Synthetic oligonucleotide
uucguacuuuaccuuguca

SEQ ID NO: 750735 - RNA, 19 nt, Artificial Sequence
  Description of Artificial Sequence: Synthetic oligonucleotide
auccugaacugcugguucg

SEQ ID NO: 750736 - RNA, 19 nt, Artificial Sequence
  Description of Artificial Sequence: Synthetic oligonucleotide
gaguugaaaguaccgcaug

SEQ ID NO: 750737 - RNA, 19 nt, Artificial Sequence
  Description of Artificial Sequence: Synthetic oligonucleotide
uggucuacuggaagcagcu

SEQ ID NO: 750738 - RNA, 19 nt, Artificial Sequence
  Description of Artificial Sequence: Synthetic oligonucleotide
auggauuuguacgccugcc

SEQ ID NO: 750739 - RNA, 19 nt, Artificial Sequence
  Description of Artificial Sequence: Synthetic oligonucleotide
auccucuguuacuucguac

SEQ ID NO: 750740 - RNA, 19 nt, Artificial Sequence
  Description of Artificial Sequence: Synthetic oligonucleotide
accuccauagaaccaagga

SEQ ID NO: 750741 - RNA, 19 nt, Artificial Sequence
  Description of Artificial Sequence: Synthetic oligonucleotide
cauuccaggggaaagggga

SEQ ID NO: 750742 - RNA, 19 nt, Artificial Sequence
  Description of Artificial Sequence: Synthetic oligonucleotide
uuuacucgugcauccacuc

SEQ ID NO: 750743 - RNA, 19 nt, Artificial Sequence
  Description of Artificial Sequence: Synthetic oligonucleotide
uuucugauuuugugcuucc

SEQ ID NO: 750744 - RNA, 19 nt, Artificial Sequence
  Description of Artificial Sequence: Synthetic oligonucleotide
augcgaaagauguuaugga

SEQ ID NO: 750745 - RNA, 19 nt, Artificial Sequence
  Description of Artificial Sequence: Synthetic oligonucleotide
cagacugauuuacucgugc

SEQ ID NO: 750746 - RNA, 19 nt, Artificial Sequence
  Description of Artificial Sequence: Synthetic oligonucleotide
ucucccaaaucacucuccu

SEQ ID NO: 750747 - RNA, 19 nt, Artificial Sequence
  Description of Artificial Sequence: Synthetic oligonucleotide
uuaccuccauagaaccaag

SEQ ID NO: 750748 - RNA, 19 nt, Artificial Sequence
  Description of Artificial Sequence: Synthetic oligonucleotide
ugauaaugcauaguauuuu

SEQ ID NO: 750749 - RNA, 19 nt, Artificial Sequence
  Description of Artificial Sequence: Synthetic oligonucleotide
uguacgccugccuccuugg

SEQ ID NO: 750750 - RNA, 19 nt, Artificial Sequence
  Description of Artificial Sequence: Synthetic oligonucleotide
guuuuagguggguggggcg

SEQ ID NO: 750751 - RNA, 19 nt, Artificial Sequence
  Description of Artificial Sequence: Synthetic oligonucleotide
ucaugcgaaagauguuaug

SEQ ID NO: 750752 - RNA, 19 nt, Artificial Sequence
  Description of Artificial Sequence: Synthetic oligonucleotide
augauaggaaugaacccag

SEQ ID NO: 750753 - RNA, 19 nt, Artificial Sequence
  Description of Artificial Sequence: Synthetic oligonucleotide
  modified_base (17)..(17): a, c, u, g, unknown or other
gaagaguauuuaaugcnca

SEQ ID NO: 750754 - RNA, 19 nt, Artificial Sequence
  Description of Artificial Sequence: Synthetic oligonucleotide
uguagacucugaucccaag

SEQ ID NO: 750755 - RNA, 19 nt, Artificial Sequence
  Description of Artificial Sequence: Synthetic oligonucleotide
ugcucaauauaaccuguua

SEQ ID NO: 750756 - RNA, 19 nt, Artificial Sequence
  Description of Artificial Sequence: Synthetic oligonucleotide
gguuuggucuacuggaagc

SEQ ID NO: 750757 - RNA, 19 nt, Artificial Sequence
  Description of Artificial Sequence: Synthetic oligonucleotide
ucgugucucugcuggaaag

SEQ ID NO: 750758 - RNA, 19 nt, Artificial Sequence
  Description of Artificial Sequence: Synthetic oligonucleotide
uagggcauauauccaagua

SEQ ID NO: 750759 - RNA, 19 nt, Artificial Sequence
  Description of Artificial Sequence: Synthetic oligonucleotide
ugacaaucggcuguaucug

SEQ ID NO: 750760 - RNA, 19 nt, Artificial Sequence
  Description of Artificial Sequence: Synthetic oligonucleotide
uggauuuguacgccugccu

SEQ ID NO: 750761 - RNA, 19 nt, Artificial Sequence
  Description of Artificial Sequence: Synthetic oligonucleotide
ggcgcauuguuucauaaac

SEQ ID NO: 750762 - RNA, 19 nt, Artificial Sequence
  Description of Artificial Sequence: Synthetic oligonucleotide
uacuagcaauaauacuucu

SEQ ID NO: 750763 - RNA, 19 nt, Artificial Sequence
  Description of Artificial Sequence: Synthetic oligonucleotide
ucacugaacaguugucuau

SEQ ID NO: 750764 - RNA, 19 nt, Artificial Sequence
  Description of Artificial Sequence: Synthetic oligonucleotide
caaauauguagcacacuga

SEQ ID NO: 750765 - RNA, 19 nt, Artificial Sequence
  Description of Artificial Sequence: Synthetic oligonucleotide
agucguuuauuuuccuggu

SEQ ID NO: 750766 - RNA, 19 nt, Artificial Sequence
  Description of Artificial Sequence: Synthetic oligonucleotide
ucugaucccaaggauccug

SEQ ID NO: 750767 - RNA, 19 nt, Artificial Sequence
  Description of Artificial Sequence: Synthetic oligonucleotide
  modified_base (14)..(14): a, c, u, g, unknown or other
auauauccaaguanagguu

SEQ ID NO: 750768 - RNA, 19 nt, Artificial Sequence
  Description of Artificial Sequence: Synthetic oligonucleotide
uauguagcacacugaugac

SEQ ID NO: 750769 - RNA, 19 nt, Artificial Sequence
  Description of Artificial Sequence: Synthetic oligonucleotide
uuguacgccugccuccuug

SEQ ID NO: 750770 - RNA, 19 nt, Artificial Sequence
  Description of Artificial Sequence: Synthetic oligonucleotide
  modified_base (7)..(7): a, c, u, g, unknown or other
caaguanagguucuacaaa

SEQ ID NO: 750771 - RNA, 19 nt, Artificial Sequence
  Description of Artificial Sequence: Synthetic oligonucleotide
gcuacugcuaaggacaagc

SEQ ID NO: 750772 - RNA, 19 nt, Artificial Sequence
  Description of Artificial Sequence: Synthetic oligonucleotide
ccuuuaccuccauagaacc

SEQ ID NO: 750773 - RNA, 19 nt, Artificial Sequence
  Description of Artificial Sequence: Synthetic oligonucleotide
acaaaacuacacaugguaa

SEQ ID NO: 750774 - RNA, 19 nt, Artificial Sequence
  Description of Artificial Sequence: Synthetic oligonucleotide
uacucgugcauccacucuu

SEQ ID NO: 750775 - RNA, 19 nt, Artificial Sequence
  Description of Artificial Sequence: Synthetic oligonucleotide
ucugaugcccuacgaucca

SEQ ID NO: 750776 - RNA, 19 nt, Artificial Sequence
  Description of Artificial Sequence: Synthetic oligonucleotide
gaacaguugucuauaucca

SEQ ID NO: 750777 - RNA, 19 nt, Artificial Sequence
  Description of Artificial Sequence: Synthetic oligonucleotide
augcccuacgauccaguuc

SEQ ID NO: 750778 - RNA, 19 nt, Artificial Sequence
  Description of Artificial Sequence: Synthetic oligonucleotide
ucugcggaucaauuaacuu

SEQ ID NO: 750779 - RNA, 19 nt, Artificial Sequence
  Description of Artificial Sequence: Synthetic oligonucleotide
uuguaugauaaugcauagu

SEQ ID NO: 750780 - RNA, 19 nt, Artificial Sequence
  Description of Artificial Sequence: Synthetic oligonucleotide
uccucugauuggcuacugc

SEQ ID NO: 750781 - RNA, 19 nt, Artificial Sequence
  Description of Artificial Sequence: Synthetic oligonucleotide
uaucuguuaauugcagcau

SEQ ID NO: 750782 - RNA, 19 nt, Artificial Sequence
  Description of Artificial Sequence: Synthetic oligonucleotide
cuccauagaaccaaggaau

SEQ ID NO: 750783 - RNA, 19 nt, Artificial Sequence
  Description of Artificial Sequence: Synthetic oligonucleotide
guugaaaguaccgcaugac

SEQ ID NO: 750784 - RNA, 19 nt, Artificial Sequence
  Description of Artificial Sequence: Synthetic oligonucleotide
aucacugaacaguugucua

SEQ ID NO: 750785 - RNA, 19 nt, Artificial Sequence
  Description of Artificial Sequence: Synthetic oligonucleotide
uuuagguggguggggcggg

SEQ ID NO: 750786 - RNA, 19 nt, Artificial Sequence
  Description of Artificial Sequence: Synthetic oligonucleotide
aagugacuaauaaguguga

SEQ ID NO: 750787 - RNA, 19 nt, Artificial Sequence
  Description of Artificial Sequence: Synthetic oligonucleotide
ggaaucggacaauaaauaa

SEQ ID NO: 750788 - RNA, 19 nt, Artificial Sequence
  Description of Artificial Sequence: Synthetic oligonucleotide
ugcuugcaaaauugaagau

SEQ ID NO: 750789 - RNA, 19 nt, Artificial Sequence
  Description of Artificial Sequence: Synthetic oligonucleotide
gauuggcuacugcuaagga

SEQ ID NO: 750790 - RNA, 19 nt, Artificial Sequence
  Description of Artificial Sequence: Synthetic oligonucleotide
ggggauaugcucaauauaa

SEQ ID NO: 750791 - RNA, 19 nt, Artificial Sequence
  Description of Artificial Sequence: Synthetic oligonucleotide
agcuuuugccuggccaggc

SEQ ID NO: 750792 - RNA, 19 nt, Artificial Sequence
  Description of Artificial Sequence: Synthetic oligonucleotide
cauuuagggcauauaucca

SEQ ID NO: 750793 - RNA, 19 nt, Artificial Sequence
  Description of Artificial Sequence: Synthetic oligonucleotide
gucguuuauuuuccuggug

SEQ ID NO: 750794 - RNA, 19 nt, Artificial Sequence
  Description of Artificial Sequence: Synthetic oligonucleotide
ucuaucccagguagaugac

SEQ ID NO: 750795 - RNA, 19 nt, Artificial Sequence
  Description of Artificial Sequence: Synthetic oligonucleotide
ugauuuacucgugcaucca

SEQ ID NO: 750796 - RNA, 19 nt, Artificial Sequence
  Description of Artificial Sequence: Synthetic oligonucleotide
auagaaccaaggaaucgga

SEQ ID NO: 750797 - RNA, 19 nt, Artificial Sequence
  Description of Artificial Sequence: Synthetic oligonucleotide
acaagcaaguauaaagcuu

SEQ ID NO: 750798 - RNA, 19 nt, Artificial Sequence
  Description of Artificial Sequence: Synthetic oligonucleotide
agugacuaauaagugugau

SEQ ID NO: 750799 - RNA, 19 nt, Artificial Sequence
  Description of Artificial Sequence: Synthetic oligonucleotide
auuuacucgugcauccacu

SEQ ID NO: 750800 - RNA, 19 nt, Artificial Sequence
  Description of Artificial Sequence: Synthetic oligonucleotide
uacuuuaccuugucauuuu

SEQ ID NO: 750801 - RNA, 19 nt, Artificial Sequence
  Description of Artificial Sequence: Synthetic oligonucleotide
aaacuguauuggaguaucu

SEQ ID NO: 750802 - RNA, 19 nt, Artificial Sequence
  Description of Artificial Sequence: Synthetic oligonucleotide
agcaugcagugcuaucugu

SEQ ID NO: 750803 - RNA, 19 nt, Artificial Sequence
  Description of Artificial Sequence: Synthetic oligonucleotide
gcugaaacaagcaaguaua

SEQ ID NO: 750804 - RNA, 19 nt, Artificial Sequence
  Description of Artificial Sequence: Synthetic oligonucleotide
ggacaauaaauaacugaug

SEQ ID NO: 750805 - RNA, 19 nt, Artificial Sequence
  Description of Artificial Sequence: Synthetic oligonucleotide
uccggagaacaaauccaaa

SEQ ID NO: 750806 - RNA, 19 nt, Artificial Sequence
  Description of Artificial Sequence: Synthetic oligonucleotide
aggaaucggacaauaaaua

SEQ ID NO: 750807 - RNA, 19 nt, Artificial Sequence
  Description of Artificial Sequence: Synthetic oligonucleotide
ugaugcccuacgauccagu

SEQ ID NO: 750808 - RNA, 19 nt, Artificial Sequence
  Description of Artificial Sequence: Synthetic oligonucleotide
ucauagucugguguuguuu

SEQ ID NO: 750809 - RNA, 19 nt, Artificial Sequence
  Description of Artificial Sequence: Synthetic oligonucleotide
caaaacuacacaugguaau

SEQ ID NO: 750810 - RNA, 19 nt, Artificial Sequence
  Description of Artificial Sequence: Synthetic oligonucleotide
cgcaugacaagaacuaagc

SEQ ID NO: 750811 - RNA, 19 nt, Artificial Sequence
  Description of Artificial Sequence: Synthetic oligonucleotide
ggauuuguacgccugccuc

SEQ ID NO: 750812 - RNA, 19 nt, Artificial Sequence
  Description of Artificial Sequence: Synthetic oligonucleotide
cugaaacaagcaaguauaa

SEQ ID NO: 750813 - RNA, 19 nt, Artificial Sequence
  Description of Artificial Sequence: Synthetic oligonucleotide
auuuguacgccugccuccu

SEQ ID NO: 750814 - RNA, 19 nt, Artificial Sequence
  Description of Artificial Sequence: Synthetic oligonucleotide
ccuacgauccaguucagca

SEQ ID NO: 750815 - RNA, 19 nt, Artificial Sequence
  Description of Artificial Sequence: Synthetic oligonucleotide
gguagaugacaccaaaccu

SEQ ID NO: 750816 - RNA, 19 nt, Artificial Sequence
  Description of Artificial Sequence: Synthetic oligonucleotide
cagugcuaucuguuuugcc

SEQ ID NO: 750817 - RNA, 19 nt, Artificial Sequence
  Description of Artificial Sequence: Synthetic oligonucleotide
gaagccaaauuuguagacu

SEQ ID NO: 750818 - RNA, 19 nt, Artificial Sequence
  Description of Artificial Sequence: Synthetic oligonucleotide
  modified_base (8)..(8): a, c, u, g, unknown or other
ccaaguanagguucuacaa

SEQ ID NO: 750819 - RNA, 19 nt, Artificial Sequence
  Description of Artificial Sequence: Synthetic oligonucleotide
  modified_base (17)..(17): a, c, u, g, unknown or other
ggcauauauccaaguanag

SEQ ID NO: 750820 - RNA, 19 nt, Artificial Sequence
  Description of Artificial Sequence: Synthetic oligonucleotide
auaaugcaucauagucugg

SEQ ID NO: 750821 - RNA, 19 nt, Artificial Sequence
  Description of Artificial Sequence: Synthetic oligonucleotide
acuagcaauaauacuucuu

SEQ ID NO: 750822 - RNA, 19 nt, Artificial Sequence
  Description of Artificial Sequence: Synthetic oligonucleotide
cuguuaucauguuuagucu

SEQ ID NO: 750823 - RNA, 19 nt, Artificial Sequence
  Description of Artificial Sequence: Synthetic oligonucleotide
agcaaguauaaagcuuagu

SEQ ID NO: 750824 - RNA, 19 nt, Artificial Sequence
  Description of Artificial Sequence: Synthetic oligonucleotide
ggcaacaagagaaucuaga

SEQ ID NO: 750825 - RNA, 19 nt, Artificial Sequence
  Description of Artificial Sequence: Synthetic oligonucleotide
cuaccagccugguuugguc

SEQ ID NO: 750826 - RNA, 19 nt, Artificial Sequence
  Description of Artificial Sequence: Synthetic oligonucleotide
guaauggaaaugugagccu

SEQ ID NO: 750827 - RNA, 19 nt, Artificial Sequence
  Description of Artificial Sequence: Synthetic oligonucleotide
cuucguacuuuaccuuguc

SEQ ID NO: 750828 - RNA, 19 nt, Artificial Sequence
  Description of Artificial Sequence: Synthetic oligonucleotide
accugauguccggagaaca

SEQ ID NO: 750829 - RNA, 19 nt, Artificial Sequence
  Description of Artificial Sequence: Synthetic oligonucleotide
uggcgcauuguuucauaaa

SEQ ID NO: 750830 - RNA, 19 nt, Artificial Sequence
  Description of Artificial Sequence: Synthetic oligonucleotide
ucgagcuguugguggccgg

SEQ ID NO: 750831 - RNA, 19 nt, Artificial Sequence
  Description of Artificial Sequence: Synthetic oligonucleotide
ccgcaugacaagaacuaag

SEQ ID NO: 750832 - RNA, 19 nt, Artificial Sequence
  Description of Artificial Sequence: Synthetic oligonucleotide
ucuggcgcauuguuucaua

SEQ ID NO: 750833 - RNA, 19 nt, Artificial Sequence
  Description of Artificial Sequence: Synthetic oligonucleotide
ugcuaucuguuuugccaau

SEQ ID NO: 750834 - RNA, 19 nt, Artificial Sequence
  Description of Artificial Sequence: Synthetic oligonucleotide
ucucgugucucugcuggaa

SEQ ID NO: 750835 - RNA, 19 nt, Artificial Sequence
  Description of Artificial Sequence: Synthetic oligonucleotide
aucauagucugguguuguu

SEQ ID NO: 750836 - RNA, 19 nt, Artificial Sequence
  Description of Artificial Sequence: Synthetic oligonucleotide
cucugauuggcuacugcua

SEQ ID NO: 750837 - RNA, 19 nt, Artificial Sequence
  Description of Artificial Sequence: Synthetic oligonucleotide
ugaucccaaggauccugaa

SEQ ID NO: 750838 - RNA, 19 nt, Artificial Sequence
  Description of Artificial Sequence: Synthetic oligonucleotide
gacaaucggcuguaucugu

SEQ ID NO: 750839 - RNA, 19 nt, Artificial Sequence
  Description of Artificial Sequence: Synthetic oligonucleotide
cuggacgcaggcucucgug

SEQ ID NO: 750840 - RNA, 19 nt, Artificial Sequence
  Description of Artificial Sequence: Synthetic oligonucleotide
caaauggauuuguacgccu

SEQ ID NO: 750841 - RNA, 19 nt, Artificial Sequence
  Description of Artificial Sequence: Synthetic oligonucleotide
gccuuuaccuccauagaac

SEQ ID NO: 750842 - RNA, 19 nt, Artificial Sequence
  Description of Artificial Sequence: Synthetic oligonucleotide
caugaucauuacuagcaau

SEQ ID NO: 750843 - RNA, 19 nt, Artificial Sequence
  Description of Artificial Sequence: Synthetic oligonucleotide
guaacuugggucugcggau

SEQ ID NO: 750844 - RNA, 19 nt, Artificial Sequence
  Description of Artificial Sequence: Synthetic oligonucleotide
cucccaaaucacucuccuc

SEQ ID NO: 750845 - RNA, 19 nt, Artificial Sequence
  Description of Artificial Sequence: Synthetic oligonucleotide
gcucaauauaaccuguuau

SEQ ID NO: 750846 - RNA, 19 nt, Artificial Sequence
  Description of Artificial Sequence: Synthetic oligonucleotide
cugguucgagcuguuggug

SEQ ID NO: 750847 - RNA, 19 nt, Artificial Sequence
  Description of Artificial Sequence: Synthetic oligonucleotide
gugacuaauaagugugauu

SEQ ID NO: 750848 - RNA, 19 nt, Artificial Sequence
  Description of Artificial Sequence: Synthetic oligonucleotide
acccugcgugaaguaaaac

SEQ ID NO: 750849 - RNA, 19 nt, Artificial Sequence
  Description of Artificial Sequence: Synthetic oligonucleotide
cguuuauuuuccuggugug

SEQ ID NO: 750850 - RNA, 19 nt, Artificial Sequence
  Description of Artificial Sequence: Synthetic oligonucleotide
ugcuucaguugaacaucua

SEQ ID NO: 750851 - RNA, 19 nt, Artificial Sequence
  Description of Artificial Sequence: Synthetic oligonucleotide
caucacugaacaguugucu

SEQ ID NO: 750852 - RNA, 19 nt, Artificial Sequence
  Description of Artificial Sequence: Synthetic oligonucleotide
cugaugcccuacgauccag

SEQ ID NO: 750853 - RNA, 19 nt, Artificial Sequence
  Description of Artificial Sequence: Synthetic oligonucleotide
cuuuuaacaugguuaccuu

SEQ ID NO: 750854 - RNA, 19 nt, Artificial Sequence
  Description of Artificial Sequence: Synthetic oligonucleotide
guccggagaacaaauccaa

SEQ ID NO: 750855 - RNA, 19 nt, Artificial Sequence
  Description of Artificial Sequence: Synthetic oligonucleotide
guaccgcaugacaagaacu

SEQ ID NO: 750856 - RNA, 19 nt, Artificial Sequence
  Description of Artificial Sequence: Synthetic oligonucleotide
gcaaguuuaugcuucugau

SEQ ID NO: 750857 - RNA, 19 nt, Artificial Sequence
  Description of Artificial Sequence: Synthetic oligonucleotide
gggagggccauuuccucac

SEQ ID NO: 750858 - RNA, 19 nt, Artificial Sequence
  Description of Artificial Sequence: Synthetic oligonucleotide
guucgagcuguugguggcc

SEQ ID NO: 750859 - RNA, 19 nt, Artificial Sequence
  Description of Artificial Sequence: Synthetic oligonucleotide
agaucccaguggaaccaag

SEQ ID NO: 750860 - RNA, 19 nt, Artificial Sequence
  Description of Artificial Sequence: Synthetic oligonucleotide
agguucuacaaagcauuuu

SEQ ID NO: 750861 - RNA, 19 nt, Artificial Sequence
  Description of Artificial Sequence: Synthetic oligonucleotide
ccggagaacaaauccaaaa

SEQ ID NO: 750862 - RNA, 19 nt, Artificial Sequence
  Description of Artificial Sequence: Synthetic oligonucleotide
cuggcgcauuguuucauaa

SEQ ID NO: 750863 - RNA, 19 nt, Artificial Sequence
  Description of Artificial Sequence: Synthetic oligonucleotide
cuacgauccaguucagcau

SEQ ID NO: 750864 - RNA, 19 nt, Artificial Sequence
  Description of Artificial Sequence: Synthetic oligonucleotide
acaaucggcuguaucuguu

SEQ ID NO: 750865 - RNA, 19 nt, Artificial Sequence
  Description of Artificial Sequence: Synthetic oligonucleotide
cuacugcuaaggacaagcu

SEQ ID NO: 750866 - RNA, 19 nt, Artificial Sequence
  Description of Artificial Sequence: Synthetic oligonucleotide
ucugcccagugaccaugau

SEQ ID NO: 750867 - RNA, 19 nt, Artificial Sequence
  Description of Artificial Sequence: Synthetic oligonucleotide
gcaugacaagaacuaagcu

SEQ ID NO: 750868 - RNA, 19 nt, Artificial Sequence
  Description of Artificial Sequence: Synthetic oligonucleotide
uaaggacaagcuggcccuc

SEQ ID NO: 750869 - RNA, 19 nt, Artificial Sequence
  Description of Artificial Sequence: Synthetic oligonucleotide
cacugaacaguugucuaua

SEQ ID NO: 750870 - RNA, 19 nt, Artificial Sequence
  Description of Artificial Sequence: Synthetic oligonucleotide
gcagugcuaucuguuuugc

SEQ ID NO: 750871 - RNA, 19 nt, Artificial Sequence
  Description of Artificial Sequence: Synthetic oligonucleotide
guacgccugccuccuuggc

SEQ ID NO: 750872 - RNA, 19 nt, Artificial Sequence
  Description of Artificial Sequence: Synthetic oligonucleotide
gggcaacaagagaaucuag

SEQ ID NO: 750873 - RNA, 19 nt, Artificial Sequence
  Description of Artificial Sequence: Synthetic oligonucleotide
gggcgggagggccauuucc

SEQ ID NO: 750874 - RNA, 19 nt, Artificial Sequence
  Description of Artificial Sequence: Synthetic oligonucleotide
caccugauguccggagaac

SEQ ID NO: 750875 - RNA, 19 nt, Artificial Sequence
  Description of Artificial Sequence: Synthetic oligonucleotide
ggucugcggaucaauuaac

SEQ ID NO: 750876 - RNA, 19 nt, Artificial Sequence
  Description of Artificial Sequence: Synthetic oligonucleotide
gaugcccuacgauccaguu

SEQ ID NO: 750877 - RNA, 19 nt, Artificial Sequence
  Description of Artificial Sequence: Synthetic oligonucleotide
uuagguggguggggcggga

SEQ ID NO: 750878 - RNA, 19 nt, Artificial Sequence
  Description of Artificial Sequence: Synthetic oligonucleotide
caugcagugcuaucuguuu

SEQ ID NO: 750879 - RNA, 19 nt, Artificial Sequence
  Description of Artificial Sequence: Synthetic oligonucleotide
cccaaggauccugaacugc

SEQ ID NO: 750880 - RNA, 19 nt, Artificial Sequence
  Description of Artificial Sequence: Synthetic oligonucleotide
uuuguacgccugccuccuu

SEQ ID NO: 750881 - RNA, 19 nt, Artificial Sequence
  Description of Artificial Sequence: Synthetic oligonucleotide
cucgugucucugcuggaaa

SEQ ID NO: 750882 - RNA, 19 nt, Artificial Sequence
  Description of Artificial Sequence: Synthetic oligonucleotide
gucugcggaucaauuaacu

SEQ ID NO: 750883 - RNA, 19 nt, Artificial Sequence
  Description of Artificial Sequence: Synthetic oligonucleotide
gcgcauuguuucauaaaca

SEQ ID NO: 750884 - RNA, 19 nt, Artificial Sequence
  Description of Artificial Sequence: Synthetic oligonucleotide
gcuaucuguuuugccaauc

SEQ ID NO: 750885 - RNA, 19 nt, Artificial Sequence
  Description of Artificial Sequence: Synthetic oligonucleotide
gcagaucccaguggaacca

SEQ ID NO: 750886 - RNA, 19 nt, Artificial Sequence
  Description of Artificial Sequence: Synthetic oligonucleotide
ggcuugacucauuaaguuu

SEQ ID NO: 750887 - RNA, 19 nt, Artificial Sequence
  Description of Artificial Sequence: Synthetic oligonucleotide
cacccugcgugaaguaaaa

SEQ ID NO: 750888 - RNA, 19 nt, Artificial Sequence
  Description of Artificial Sequence: Synthetic oligonucleotide
gcagacugauuuacucgug

SEQ ID NO: 750889 - RNA, 19 nt, Artificial Sequence
  Description of Artificial Sequence: Synthetic oligonucleotide
uccacgggcuugacucauu

SEQ ID NO: 750890 - RNA, 19 nt, Artificial Sequence
  Description of Artificial Sequence: Synthetic oligonucleotide
gcugguucgagcuguuggu

SEQ ID NO: 750891 - RNA, 19 nt, Artificial Sequence
  Description of Artificial Sequence: Synthetic oligonucleotide
cugucuaucccagguagau

SEQ ID NO: 750892 - RNA, 19 nt, Artificial Sequence
  Description of Artificial Sequence: Synthetic oligonucleotide
cuaagaucuggcgcauugu

SEQ ID NO: 750893 - RNA, 19 nt, Artificial Sequence
  Description of Artificial Sequence: Synthetic oligonucleotide
ugguuaccuugugccacau

SEQ ID NO: 750894 - RNA, 19 nt, Artificial Sequence
  Description of Artificial Sequence: Synthetic oligonucleotide
gucaugcgaaagauguuau

SEQ ID NO: 750895 - RNA, 19 nt, Artificial Sequence
  Description of Artificial Sequence: Synthetic oligonucleotide
ccucugauuggcuacugcu

SEQ ID NO: 750896 - RNA, 19 nt, Artificial Sequence
  Description of Artificial Sequence: Synthetic oligonucleotide
gcccgagcugcuaagaucu

SEQ ID NO: 750897 - RNA, 19 nt, Artificial Sequence
  Description of Artificial Sequence: Synthetic oligonucleotide
gcuaucaaccgacucuguu

SEQ ID NO: 750898 - RNA, 19 nt, Artificial Sequence
  Description of Artificial Sequence: Synthetic oligonucleotide
ggaguaucuggggcaacaa

SEQ ID NO: 750899 - RNA, 19 nt, Artificial Sequence
  Description of Artificial Sequence: Synthetic oligonucleotide
cacgggcuugacucauuaa

SEQ ID NO: 750900 - RNA, 19 nt, Artificial Sequence
  Description of Artificial Sequence: Synthetic oligonucleotide
ccacccugcgugaaguaaa

SEQ ID NO: 750901 - RNA, 19 nt, Artificial Sequence
  Description of Artificial Sequence: Synthetic oligonucleotide
  modified_base (3)..(3): a, c, u, g, unknown or other
gcncaaaauaaugcaucau

SEQ ID NO: 750902 - RNA, 19 nt, Artificial Sequence
  Description of Artificial Sequence: Synthetic oligonucleotide
cccuacgauccaguucagc

SEQ ID NO: 750903 - RNA, 19 nt, Artificial Sequence
  Description of Artificial Sequence: Synthetic oligonucleotide
gcgggagggccauuuccuc

SEQ ID NO: 750904 - RNA, 19 nt, Artificial Sequence
  Description of Artificial Sequence: Synthetic oligonucleotide
cugucaugcgaaagauguu

SEQ ID NO: 750905 - RNA, 19 nt, Artificial Sequence
  Description of Artificial Sequence: Synthetic oligonucleotide
cuugggucugcggaucaau

SEQ ID NO: 750906 - RNA, 19 nt, Artificial Sequence
  Description of Artificial Sequence: Synthetic oligonucleotide
ggggaacaucauggcauca

SEQ ID NO: 750907 - RNA, 19 nt, Artificial Sequence
  Description of Artificial Sequence: Synthetic oligonucleotide
gcuuuugccuggccaggcu

SEQ ID NO: 750908 - RNA, 19 nt, Artificial Sequence
  Description of Artificial Sequence: Synthetic oligonucleotide
ccgggauuguccugcugga

SEQ ID NO: 750909 - RNA, 19 nt, Artificial Sequence
  Description of Artificial Sequence: Synthetic oligonucleotide
ggcgggagggccauuuccu

SEQ ID NO: 750910 - RNA, 19 nt, Artificial Sequence
  Description of Artificial Sequence: Synthetic oligonucleotide
cguacuuuaccuugucauu

SEQ ID NO: 750911 - RNA, 19 nt, Artificial Sequence
  Description of Artificial Sequence: Synthetic oligonucleotide
cccgagcugcuaagaucug

SEQ ID NO: 750912 - RNA, 19 nt, Artificial Sequence
  Description of Artificial Sequence: Synthetic oligonucleotide
gcuggacgcaggcucucgu

SEQ ID NO: 750913 - RNA, 19 nt, Artificial Sequence
  Description of Artificial Sequence: Synthetic oligonucleotide
cucugaucccaaggauccu

SEQ ID NO: 750914 - RNA, 19 nt, Artificial Sequence
  Description of Artificial Sequence: Synthetic oligonucleotide
cugcuaagaucuggcgcau

SEQ ID NO: 750915 - RNA, 19 nt, Artificial Sequence
  Description of Artificial Sequence: Synthetic oligonucleotide
cgggauuguccugcuggac

SEQ ID NO: 750916 - RNA, 19 nt, Artificial Sequence
  Description of Artificial Sequence: Synthetic oligonucleotide
gcggaucaauuaacuucaa

SEQ ID NO: 750917 - RNA, 19 nt, Artificial Sequence
  Description of Artificial Sequence: Synthetic oligonucleotide
ggagggccauuuccucacu

SEQ ID NO: 750918 - RNA, 19 nt, Artificial Sequence
  Description of Artificial Sequence: Synthetic oligonucleotide
gcccuacgauccaguucag

SEQ ID NO: 750919 - RNA, 19 nt, Artificial Sequence
  Description of Artificial Sequence: Synthetic oligonucleotide
gguuaccuugugccacauu

SEQ ID NO: 750920 - RNA, 19 nt, Artificial Sequence
  Description of Artificial Sequence: Synthetic oligonucleotide
cgauccaguucagcaugca

SEQ ID NO: 750921 - RNA, 19 nt, Artificial Sequence
  Description of Artificial Sequence: Synthetic oligonucleotide
aaggcuucuacauaaaucc

SEQ ID NO: 750922 - RNA, 19 nt, Artificial Sequence
  Description of Artificial Sequence: Synthetic oligonucleotide
aaauauaaaaccaagggga

SEQ ID NO: 750923 - RNA, 19 nt, Artificial Sequence
  Description of Artificial Sequence: Synthetic oligonucleotide
cuugauacagcccaaagcc

SEQ ID NO: 750924 - RNA, 19 nt, Artificial Sequence
  Description of Artificial Sequence: Synthetic oligonucleotide
aaucuaaucuguccucugc

SEQ ID NO: 750925 - RNA, 19 nt, Artificial Sequence
  Description of Artificial Sequence: Synthetic oligonucleotide
cauugauagaaauuugugg

SEQ ID NO: 750926 - RNA, 19 nt, Artificial Sequence
  Description of Artificial Sequence: Synthetic oligonucleotide
uaagaauuuguucugggga

SEQ ID NO: 750927 - RNA, 19 nt, Artificial Sequence
  Description of Artificial Sequence: Synthetic oligonucleotide
uuaagaauuuguucugggg

SEQ ID NO: 750928 - RNA, 19 nt, Artificial Sequence
  Description of Artificial Sequence: Synthetic oligonucleotide
uugauagaaauuugugggg

SEQ ID NO: 750929 - RNA, 19 nt, Artificial Sequence
  Description of Artificial Sequence: Synthetic oligonucleotide
accagaacaagcaagacuc

SEQ ID NO: 750930 - RNA, 19 nt, Artificial Sequence
  Description of Artificial Sequence: Synthetic oligonucleotide
uagacuuucauugauagaa

SEQ ID NO: 750931 - RNA, 19 nt, Artificial Sequence
  Description of Artificial Sequence: Synthetic oligonucleotide
ugagcagacucucuagucg

SEQ ID NO: 750932 - RNA, 19 nt, Artificial Sequence
  Description of Artificial Sequence: Synthetic oligonucleotide
uugugagagucucugaacc

SEQ ID NO: 750933 - RNA, 19 nt, Artificial Sequence
  Description of Artificial Sequence: Synthetic oligonucleotide
acgauagucauccagggca

SEQ ID NO: 750934 - RNA, 19 nt, Artificial Sequence
  Description of Artificial Sequence: Synthetic oligonucleotide
uccguuguagaaauggggc

SEQ ID NO: 750935 - RNA, 19 nt, Artificial Sequence
  Description of Artificial Sequence: Synthetic oligonucleotide
agaugaagggguugagucc

SEQ ID NO: 750936 - RNA, 19 nt, Artificial Sequence
  Description of Artificial Sequence: Synthetic oligonucleotide
agaaccaaggcugggaggc

SEQ ID NO: 750937 - RNA, 19 nt, Artificial Sequence
  Description of Artificial Sequence: Synthetic oligonucleotide
gaacaagcaagacucuggg

SEQ ID NO: 750938 - RNA, 19 nt, Artificial Sequence
  Description of Artificial Sequence: Synthetic oligonucleotide
uuccguuguagaaaugggg

SEQ ID NO: 750939 - RNA, 19 nt, Artificial Sequence
  Description of Artificial Sequence: Synthetic oligonucleotide
cucaaguugguccaggaag

SEQ ID NO: 750940 - RNA, 19 nt, Artificial Sequence
  Description of Artificial Sequence: Synthetic oligonucleotide
uacauaaauccagaacugg

SEQ ID NO: 750941 - RNA, 19 nt, Artificial Sequence
  Description of Artificial Sequence: Synthetic oligonucleotide
uuuccguuguagaaauggg

SEQ ID NO: 750942 - RNA, 19 nt, Artificial Sequence
  Description of Artificial Sequence: Synthetic oligonucleotide
uaaaaccaaggggauaugg

SEQ ID NO: 750943 - RNA, 19 nt, Artificial Sequence
  Description of Artificial Sequence: Synthetic oligonucleotide
agaauaugcagaaccaagg

SEQ ID NO: 750944 - RNA, 19 nt, Artificial Sequence
  Description of Artificial Sequence: Synthetic oligonucleotide
gauagaaauuuguggggag

SEQ ID NO: 750945 - RNA, 19 nt, Artificial Sequence
  Description of Artificial Sequence: Synthetic oligonucleotide
aggucuauagcagaauugg

SEQ ID NO: 750946 - RNA, 19 nt, Artificial Sequence
  Description of Artificial Sequence: Synthetic oligonucleotide
uuuaguguagggaguggag

SEQ ID NO: 750947 - RNA, 19 nt, Artificial Sequence
  Description of Artificial Sequence: Synthetic oligonucleotide
uuaguguagggaguggagg

SEQ ID NO: 750948 - RNA, 19 nt, Artificial Sequence
  Description of Artificial Sequence: Synthetic oligonucleotide
uguggggucuguuuuagug

SEQ ID NO: 750949 - RNA, 19 nt, Artificial Sequence
  Description of Artificial Sequence: Synthetic oligonucleotide
cugaccacgauagucaucc

SEQ ID NO: 750950 - RNA, 19 nt, Artificial Sequence
  Description of Artificial Sequence: Synthetic oligonucleotide
ucccaaaaugucaggaagc

SEQ ID NO: 750951 - RNA, 19 nt, Artificial Sequence
  Description of Artificial Sequence: Synthetic oligonucleotide
aauuuguggggagaggugu

SEQ ID NO: 750952 - RNA, 19 nt, Artificial Sequence
  Description of Artificial Sequence: Synthetic oligonucleotide
ggguccauagcauuggugg

SEQ ID NO: 750953 - RNA, 19 nt, Artificial Sequence
  Description of Artificial Sequence: Synthetic oligonucleotide
accaguaacacuuccucug

SEQ ID NO: 750954 - RNA, 19 nt, Artificial Sequence
  Description of Artificial Sequence: Synthetic oligonucleotide
gagguuuagugccugggag

SEQ ID NO: 750955 - RNA, 19 nt, Artificial Sequence
  Description of Artificial Sequence: Synthetic oligonucleotide
augaaucuaaucuguccuc

SEQ ID NO: 750956 - RNA, 19 nt, Artificial Sequence
  Description of Artificial Sequence: Synthetic oligonucleotide
aggugcaagaugcuguggg

SEQ ID NO: 750957 - RNA, 19 nt, Artificial Sequence
  Description of Artificial Sequence: Synthetic oligonucleotide
ugauagaaauuugugggga

SEQ ID NO: 750958 - RNA, 19 nt, Artificial Sequence
  Description of Artificial Sequence: Synthetic oligonucleotide
cuaaguucugaauguuggg

SEQ ID NO: 750959 - RNA, 19 nt, Artificial Sequence
  Description of Artificial Sequence: Synthetic oligonucleotide
cucuagucgagucaccucc

SEQ ID NO: 750960 - RNA, 19 nt, Artificial Sequence
  Description of Artificial Sequence: Synthetic oligonucleotide
uccaccgggcagaugaagg

SEQ ID NO: 750961 - RNA, 19 nt, Artificial Sequence
  Description of Artificial Sequence: Synthetic oligonucleotide
uuagggacugagcauuuga

SEQ ID NO: 750962 - RNA, 19 nt, Artificial Sequence
  Description of Artificial Sequence: Synthetic oligonucleotide
cugagugacugcaaggcag

SEQ ID NO: 750963 - RNA, 19 nt, Artificial Sequence
  Description of Artificial Sequence: Synthetic oligonucleotide
uagaaauuuguggggagag

SEQ ID NO: 750964 - RNA, 19 nt, Artificial Sequence
  Description of Artificial Sequence: Synthetic oligonucleotide
ucauuucaggcacucuacc

SEQ ID NO: 750965 - RNA, 19 nt, Artificial Sequence
  Description of Artificial Sequence: Synthetic oligonucleotide
uauuagacuuucauugaua

SEQ ID NO: 750966 - RNA, 19 nt, Artificial Sequence
  Description of Artificial Sequence: Synthetic oligonucleotide
uggcacaaguacaccaggg

SEQ ID NO: 750967 - RNA, 19 nt, Artificial Sequence
  Description of Artificial Sequence: Synthetic oligonucleotide
cauacuuccucgagcacgc

SEQ ID NO: 750968 - RNA, 19 nt, Artificial Sequence
  Description of Artificial Sequence: Synthetic oligonucleotide
gucccaaaaugucaggaag

SEQ ID NO: 750969 - RNA, 19 nt, Artificial Sequence
  Description of Artificial Sequence: Synthetic oligonucleotide
agaacaagcaagacucugg

SEQ ID NO: 750970 - RNA, 19 nt, Artificial Sequence
  Description of Artificial Sequence: Synthetic oligonucleotide
auagcauuggugguaugac

SEQ ID NO: 750971 - RNA, 19 nt, Artificial Sequence
  Description of Artificial Sequence: Synthetic oligonucleotide
ucuaaucuguccucugcca

SEQ ID NO: 750972 - RNA, 19 nt, Artificial Sequence
  Description of Artificial Sequence: Synthetic oligonucleotide
agcuaagccuggcuggcgc

SEQ ID NO: 750973 - RNA, 19 nt, Artificial Sequence
  Description of Artificial Sequence: Synthetic oligonucleotide
auuucaggcacucuaccaa

SEQ ID NO: 750974 - RNA, 19 nt, Artificial Sequence
  Description of Artificial Sequence: Synthetic oligonucleotide
cucagcuaagccuggcugg

SEQ ID NO: 750975 - RNA, 19 nt, Artificial Sequence
  Description of Artificial Sequence: Synthetic oligonucleotide
uaguggucaagacuggguc

SEQ ID NO: 750976 - RNA, 19 nt, Artificial Sequence
  Description of Artificial Sequence: Synthetic oligonucleotide
aaggucuauagcagaauug

SEQ ID NO: 750977 - RNA, 19 nt, Artificial Sequence
  Description of Artificial Sequence: Synthetic oligonucleotide
agcaagacauggccaggcc

SEQ ID NO: 750978 - RNA, 19 nt, Artificial Sequence
  Description of Artificial Sequence: Synthetic oligonucleotide
uuuagugccugggagugug

SEQ ID NO: 750979 - RNA, 19 nt, Artificial Sequence
  Description of Artificial Sequence: Synthetic oligonucleotide
ucugaaccagaacaagcaa

SEQ ID NO: 750980 - RNA, 19 nt, Artificial Sequence
  Description of Artificial Sequence: Synthetic oligonucleotide
agagucucugaaccagaac

SEQ ID NO: 750981 - RNA, 19 nt, Artificial Sequence
  Description of Artificial Sequence: Synthetic oligonucleotide
gcuaaguucugaauguugg

SEQ ID NO: 750982 - RNA, 19 nt, Artificial Sequence
  Description of Artificial Sequence: Synthetic oligonucleotide
ugaaucuaaucuguccucu

SEQ ID NO: 750983 - RNA, 19 nt, Artificial Sequence
  Description of Artificial Sequence: Synthetic oligonucleotide
gaccacgauagucauccag

SEQ ID NO: 750984 - RNA, 19 nt, Artificial Sequence
  Description of Artificial Sequence: Synthetic oligonucleotide
caagcaagacucugggaag

SEQ ID NO: 750985 - RNA, 19 nt, Artificial Sequence
  Description of Artificial Sequence: Synthetic oligonucleotide
aauuggggcuuuccguugu

SEQ ID NO: 750986 - RNA, 19 nt, Artificial Sequence
  Description of Artificial Sequence: Synthetic oligonucleotide
cauuaggguccccagggcc

SEQ ID NO: 750987 - RNA, 19 nt, Artificial Sequence
  Description of Artificial Sequence: Synthetic oligonucleotide
cuugugagagucucugaac

SEQ ID NO: 750988 - RNA, 19 nt, Artificial Sequence
  Description of Artificial Sequence: Synthetic oligonucleotide
agcgcaggggcccaaaugu

SEQ ID NO: 750989 - RNA, 19 nt, Artificial Sequence
  Description of Artificial Sequence: Synthetic oligonucleotide
ugagugacugcaaggcaga

SEQ ID NO: 750990 - RNA, 19 nt, Artificial Sequence
  Description of Artificial Sequence: Synthetic oligonucleotide
ugggcucuuaagaauuugu

SEQ ID NO: 750991 - RNA, 19 nt, Artificial Sequence
  Description of Artificial Sequence: Synthetic oligonucleotide
agaggugucuggaaccagc

SEQ ID NO: 750992 - RNA, 19 nt, Artificial Sequence
  Description of Artificial Sequence: Synthetic oligonucleotide
aguuucagcaggaggcggc

SEQ ID NO: 750993 - RNA, 19 nt, Artificial Sequence
  Description of Artificial Sequence: Synthetic oligonucleotide
gaacugaccacgauaguca

SEQ ID NO: 750994 - RNA, 19 nt, Artificial Sequence
  Description of Artificial Sequence: Synthetic oligonucleotide
cucugaaccagaacaagca

SEQ ID NO: 750995 - RNA, 19 nt, Artificial Sequence
  Description of Artificial Sequence: Synthetic oligonucleotide
aaccaaggggauaugguga

SEQ ID NO: 750996 - RNA, 19 nt, Artificial Sequence
  Description of Artificial Sequence: Synthetic oligonucleotide
uuguguggcaaagaauaug

SEQ ID NO: 750997 - RNA, 19 nt, Artificial Sequence
  Description of Artificial Sequence: Synthetic oligonucleotide
cuuuguuguugccauggac

SEQ ID NO: 750998 - RNA, 19 nt, Artificial Sequence
  Description of Artificial Sequence: Synthetic oligonucleotide
guuuggcacaaguacacca

SEQ ID NO: 750999 - RNA, 19 nt, Artificial Sequence
  Description of Artificial Sequence: Synthetic oligonucleotide
ucgagucaccuccugcucc

SEQ ID NO: 751000 - RNA, 19 nt, Artificial Sequence
  Description of Artificial Sequence: Synthetic oligonucleotide
agaauuggggcuuuccguu

SEQ ID NO: 751001 - RNA, 19 nt, Artificial Sequence
  Description of Artificial Sequence: Synthetic oligonucleotide
ucuaccaaccccaggggua

SEQ ID NO: 751002 - RNA, 19 nt, Artificial Sequence
  Description of Artificial Sequence: Synthetic oligonucleotide
agagcaaggucuauagcag

SEQ ID NO: 751003 - RNA, 19 nt, Artificial Sequence
  Description of Artificial Sequence: Synthetic oligonucleotide
caagacuggguccauagca

SEQ ID NO: 751004 - RNA, 19 nt, Artificial Sequence
  Description of Artificial Sequence: Synthetic oligonucleotide
uuuggggcagggcuuguga

SEQ ID NO: 751005 - RNA, 19 nt, Artificial Sequence
  Description of Artificial Sequence: Synthetic oligonucleotide
caaggggauauggugaggc

SEQ ID NO: 751006 - RNA, 19 nt, Artificial Sequence
  Description of Artificial Sequence: Synthetic oligonucleotide
ucgucgaugagcagacugu

SEQ ID NO: 751007 - RNA, 19 nt, Artificial Sequence
  Description of Artificial Sequence: Synthetic oligonucleotide
agggacugagcauuugaug

SEQ ID NO: 751008 - RNA, 19 nt, Artificial Sequence
  Description of Artificial Sequence: Synthetic oligonucleotide
uucaggcacucuaccaacc

SEQ ID NO: 751009 - RNA, 19 nt, Artificial Sequence
  Description of Artificial Sequence: Synthetic oligonucleotide
acauaaauccagaacugga

SEQ ID NO: 751010 - RNA, 19 nt, Artificial Sequence
  Description of Artificial Sequence: Synthetic oligonucleotide
agucgagucaccuccugcu

SEQ ID NO: 751011 - RNA, 19 nt, Artificial Sequence
  Description of Artificial Sequence: Synthetic oligonucleotide
gggacugagcauuugauga

SEQ ID NO: 751012 - RNA, 19 nt, Artificial Sequence
  Description of Artificial Sequence: Synthetic oligonucleotide
cugaauguuggggugcagg

SEQ ID NO: 751013 - RNA, 19 nt, Artificial Sequence
  Description of Artificial Sequence: Synthetic oligonucleotide
gaauguuggggugcagggg

SEQ ID NO: 751014 - RNA, 19 nt, Artificial Sequence
  Description of Artificial Sequence: Synthetic oligonucleotide
uagucgucgaugagcagac

SEQ ID NO: 751015 - RNA, 19 nt, Artificial Sequence
  Description of Artificial Sequence: Synthetic oligonucleotide
ggggcuauggaugagggag

SEQ ID NO: 751016 - RNA, 19 nt, Artificial Sequence
  Description of Artificial Sequence: Synthetic oligonucleotide
aggugcuaaccucagggcu

SEQ ID NO: 751017 - RNA, 19 nt, Artificial Sequence
  Description of Artificial Sequence: Synthetic oligonucleotide
caagagaauauauuagacu

SEQ ID NO: 751018 - RNA, 19 nt, Artificial Sequence
  Description of Artificial Sequence: Synthetic oligonucleotide
agaugcgaggcagagcauc

SEQ ID NO: 751019 - RNA, 19 nt, Artificial Sequence
  Description of Artificial Sequence: Synthetic oligonucleotide
gugacugcaaggcagaggu

SEQ ID NO: 751020 - RNA, 19 nt, Artificial Sequence
  Description of Artificial Sequence: Synthetic oligonucleotide
aggugucuggaaccagccc

SEQ ID NO: 751021 - RNA, 19 nt, Artificial Sequence
  Description of Artificial Sequence: Synthetic oligonucleotide
cacucgagucugcacaucc

SEQ ID NO: 751022 - RNA, 19 nt, Artificial Sequence
  Description of Artificial Sequence: Synthetic oligonucleotide
ugcgaggcagagcauccag

SEQ ID NO: 751023 - RNA, 19 nt, Artificial Sequence
  Description of Artificial Sequence: Synthetic oligonucleotide
ggagccuugauacagccca

SEQ ID NO: 751024 - RNA, 19 nt, Artificial Sequence
  Description of Artificial Sequence: Synthetic oligonucleotide
agggguucaaugccuucgg

SEQ ID NO: 751025 - RNA, 19 nt, Artificial Sequence
  Description of Artificial Sequence: Synthetic oligonucleotide
uagucgagucaccuccugc

SEQ ID NO: 751026 - RNA, 19 nt, Artificial Sequence
  Description of Artificial Sequence: Synthetic oligonucleotide
ggcacaaguacaccagggg

SEQ ID NO: 751027 - RNA, 19 nt, Artificial Sequence
  Description of Artificial Sequence: Synthetic oligonucleotide
gaauuggggcuuuccguug

SEQ ID NO: 751028 - RNA, 19 nt, Artificial Sequence
  Description of Artificial Sequence: Synthetic oligonucleotide
agagguuuagugccuggga

SEQ ID NO: 751029 - RNA, 19 nt, Artificial Sequence
  Description of Artificial Sequence: Synthetic oligonucleotide
gaggcuccgaagcugggug

SEQ ID NO: 751030 - RNA, 19 nt, Artificial Sequence
  Description of Artificial Sequence: Synthetic oligonucleotide
uaccaguaacacuuccucu

SEQ ID NO: 751031 - RNA, 19 nt, Artificial Sequence
  Description of Artificial Sequence: Synthetic oligonucleotide
aacugaccacgauagucau

SEQ ID NO: 751032 - RNA, 19 nt, Artificial Sequence
  Description of Artificial Sequence: Synthetic oligonucleotide
uauagcagaauuggggcuu

SEQ ID NO: 751033 - RNA, 19 nt, Artificial Sequence
  Description of Artificial Sequence: Synthetic oligonucleotide
cucuagucgucgaugagca

SEQ ID NO: 751034 - RNA, 19 nt, Artificial Sequence
  Description of Artificial Sequence: Synthetic oligonucleotide
agccauuaggguccccagg

SEQ ID NO: 751035 - RNA, 19 nt, Artificial Sequence
  Description of Artificial Sequence: Synthetic oligonucleotide
ugcaagaugcugugggguc

SEQ ID NO: 751036 - RNA, 19 nt, Artificial Sequence
  Description of Artificial Sequence: Synthetic oligonucleotide
uagggacugagcauuugau

SEQ ID NO: 751037 - RNA, 19 nt, Artificial Sequence
  Description of Artificial Sequence: Synthetic oligonucleotide
gacucucuagucgagucac

SEQ ID NO: 751038 - RNA, 19 nt, Artificial Sequence
  Description of Artificial Sequence: Synthetic oligonucleotide
agugacugcaaggcagagg

SEQ ID NO: 751039 - RNA, 19 nt, Artificial Sequence
  Description of Artificial Sequence: Synthetic oligonucleotide
gaugcgaggcagagcaucc

SEQ ID NO: 751040 - RNA, 19 nt, Artificial Sequence
  Description of Artificial Sequence: Synthetic oligonucleotide
uggucccaaaaugucagga

SEQ ID NO: 751041 - RNA, 19 nt, Artificial Sequence
  Description of Artificial Sequence: Synthetic oligonucleotide
uguccaaggcuucuacaua

SEQ ID NO: 751042 - RNA, 19 nt, Artificial Sequence
  Description of Artificial Sequence: Synthetic oligonucleotide
guuuuaguguagggagugg

SEQ ID NO: 751043 - RNA, 19 nt, Artificial Sequence
  Description of Artificial Sequence: Synthetic oligonucleotide
gaauuuggggcagggcuug

SEQ ID NO: 751044 - RNA, 19 nt, Artificial Sequence
  Description of Artificial Sequence: Synthetic oligonucleotide
ucugcaugagcagacucuc

SEQ ID NO: 751045 - RNA, 19 nt, Artificial Sequence
  Description of Artificial Sequence: Synthetic oligonucleotide
gugaacccugaaaaugggg

SEQ ID NO: 751046 - RNA, 19 nt, Artificial Sequence
  Description of Artificial Sequence: Synthetic oligonucleotide
uugcuucggggacuggggc

SEQ ID NO: 751047 - RNA, 19 nt, Artificial Sequence
  Description of Artificial Sequence: Synthetic oligonucleotide
guugcuucggggacugggg

SEQ ID NO: 751048 - RNA, 19 nt, Artificial Sequence
  Description of Artificial Sequence: Synthetic oligonucleotide
aauuuguucuggggaauuu

SEQ ID NO: 751049 - RNA, 19 nt, Artificial Sequence
  Description of Artificial Sequence: Synthetic oligonucleotide
uucagcacaacagccuggu

SEQ ID NO: 751050 - RNA, 19 nt, Artificial Sequence
  Description of Artificial Sequence: Synthetic oligonucleotide
agacagggccaagugagag

SEQ ID NO: 751051 - RNA, 19 nt, Artificial Sequence
  Description of Artificial Sequence: Synthetic oligonucleotide
ucuagucgagucaccuccu

SEQ ID NO: 751052 - RNA, 19 nt, Artificial Sequence
  Description of Artificial Sequence: Synthetic oligonucleotide
agacucucuagucgaguca

SEQ ID NO: 751053 - RNA, 19 nt, Artificial Sequence
  Description of Artificial Sequence: Synthetic oligonucleotide
ucaggaagccagaccgaga

SEQ ID NO: 751054 - RNA, 19 nt, Artificial Sequence
  Description of Artificial Sequence: Synthetic oligonucleotide
ggcuucuacauaaauccag

SEQ ID NO: 751055 - RNA, 19 nt, Artificial Sequence
  Description of Artificial Sequence: Synthetic oligonucleotide
cagggguucaaugccuucg

SEQ ID NO: 751056 - RNA, 19 nt, Artificial Sequence
  Description of Artificial Sequence: Synthetic oligonucleotide
agcccaugccuccuggcag

SEQ ID NO: 751057 - RNA, 19 nt, Artificial Sequence
  Description of Artificial Sequence: Synthetic oligonucleotide
cagaccgagaggcagagaa

SEQ ID NO: 751058 - RNA, 19 nt, Artificial Sequence
  Description of Artificial Sequence: Synthetic oligonucleotide
cucuagagcccaugccucc

SEQ ID NO: 751059 - RNA, 19 nt, Artificial Sequence
  Description of Artificial Sequence: Synthetic oligonucleotide
guacuggcugcagaaagug

SEQ ID NO: 751060 - RNA, 19 nt, Artificial Sequence
  Description of Artificial Sequence: Synthetic oligonucleotide
cuguaccaguaacacuucc

SEQ ID NO: 751061 - RNA, 19 nt, Artificial Sequence
  Description of Artificial Sequence: Synthetic oligonucleotide
cuagucgucgaugagcaga

SEQ ID NO: 751062 - RNA, 19 nt, Artificial Sequence
  Description of Artificial Sequence: Synthetic oligonucleotide
aagguagcauccagggcug

SEQ ID NO: 751063 - RNA, 19 nt, Artificial Sequence
  Description of Artificial Sequence: Synthetic oligonucleotide
cauagcauuggugguauga

SEQ ID NO: 751064 - RNA, 19 nt, Artificial Sequence
  Description of Artificial Sequence: Synthetic oligonucleotide
ugucaggaagccagaccga

SEQ ID NO: 751065 - RNA, 19 nt, Artificial Sequence
  Description of Artificial Sequence: Synthetic oligonucleotide
ugggcccaaagaugcgagg

SEQ ID NO: 751066 - RNA, 19 nt, Artificial Sequence
  Description of Artificial Sequence: Synthetic oligonucleotide
cagaacaagcaagacucug

SEQ ID NO: 751067 - RNA, 19 nt, Artificial Sequence
  Description of Artificial Sequence: Synthetic oligonucleotide
gaggugucuggaaccagcc

SEQ ID NO: 751068 - RNA, 19 nt, Artificial Sequence
  Description of Artificial Sequence: Synthetic oligonucleotide
acuuccucgagcacgcgug

SEQ ID NO: 751069 - RNA, 19 nt, Artificial Sequence
  Description of Artificial Sequence: Synthetic oligonucleotide
uugggcucuuaagaauuug

SEQ ID NO: 751070 - RNA, 19 nt, Artificial Sequence
  Description of Artificial Sequence: Synthetic oligonucleotide
uggaggcucggcuucgagu

SEQ ID NO: 751071 - RNA, 19 nt, Artificial Sequence
  Description of Artificial Sequence: Synthetic oligonucleotide
ggucuauagcagaauuggg

SEQ ID NO: 751072 - RNA, 19 nt, Artificial Sequence
  Description of Artificial Sequence: Synthetic oligonucleotide
ucucuagucgagucaccuc

SEQ ID NO: 751073 - RNA, 19 nt, Artificial Sequence
  Description of Artificial Sequence: Synthetic oligonucleotide
gacacccugugcuuaggga

SEQ ID NO: 751074 - RNA, 19 nt, Artificial Sequence
  Description of Artificial Sequence: Synthetic oligonucleotide
ucuagucgucgaugagcag

SEQ ID NO: 751075 - RNA, 19 nt, Artificial Sequence
  Description of Artificial Sequence: Synthetic oligonucleotide
cuccuaggcagcuuccguc

SEQ ID NO: 751076 - RNA, 19 nt, Artificial Sequence
  Description of Artificial Sequence: Synthetic oligonucleotide
gccccugacacuugugugg

SEQ ID NO: 751077 - RNA, 19 nt, Artificial Sequence
  Description of Artificial Sequence: Synthetic oligonucleotide
gcaagacauggccaggccc

SEQ ID NO: 751078 - RNA, 19 nt, Artificial Sequence
  Description of Artificial Sequence: Synthetic oligonucleotide
ucgcaggcgccccucaggu

SEQ ID NO: 751079 - RNA, 19 nt, Artificial Sequence
  Description of Artificial Sequence: Synthetic oligonucleotide
cauggaggggcuguccaag

SEQ ID NO: 751080 - RNA, 19 nt, Artificial Sequence
  Description of Artificial Sequence: Synthetic oligonucleotide
ugccagugccuggugaacc

SEQ ID NO: 751081 - RNA, 19 nt, Artificial Sequence
  Description of Artificial Sequence: Synthetic oligonucleotide
ggugaacccugaaaauggg

SEQ ID NO: 751082 - RNA, 19 nt, Artificial Sequence
  Description of Artificial Sequence: Synthetic oligonucleotide
cucaggugcuaaccucagg

SEQ ID NO: 751083 - RNA, 19 nt, Artificial Sequence
  Description of Artificial Sequence: Synthetic oligonucleotide
cuguaaaauucuguaaaua

SEQ ID NO: 751084 - RNA, 19 nt, Artificial Sequence
  Description of Artificial Sequence: Synthetic oligonucleotide
ugcuucggggacuggggcu

SEQ ID NO: 751085 - RNA, 19 nt, Artificial Sequence
  Description of Artificial Sequence: Synthetic oligonucleotide
acgcgugcuucccucagca

SEQ ID NO: 751086 - RNA, 19 nt, Artificial Sequence
  Description of Artificial Sequence: Synthetic oligonucleotide
auaaaaccaaggggauaug

SEQ ID NO: 751087 - RNA, 19 nt, Artificial Sequence
  Description of Artificial Sequence: Synthetic oligonucleotide
gaugcuaaggcuggaggcu

SEQ ID NO: 751088 - RNA, 19 nt, Artificial Sequence
  Description of Artificial Sequence: Synthetic oligonucleotide
acuccucuagucgucgaug

SEQ ID NO: 751089 - RNA, 19 nt, Artificial Sequence
  Description of Artificial Sequence: Synthetic oligonucleotide
gggucuguuuuaguguagg

SEQ ID NO: 751090 - RNA, 19 nt, Artificial Sequence
  Description of Artificial Sequence: Synthetic oligonucleotide
gugugaggucugcagagga

SEQ ID NO: 751091 - RNA, 19 nt, Artificial Sequence
  Description of Artificial Sequence: Synthetic oligonucleotide
agaccgagaggcagagaac

SEQ ID NO: 751092 - RNA, 19 nt, Artificial Sequence
  Description of Artificial Sequence: Synthetic oligonucleotide
cccaaaaugucaggaagcc

SEQ ID NO: 751093 - RNA, 19 nt, Artificial Sequence
  Description of Artificial Sequence: Synthetic oligonucleotide
ugggagccgguguucagaa

SEQ ID NO: 751094 - RNA, 19 nt, Artificial Sequence
  Description of Artificial Sequence: Synthetic oligonucleotide
agaaagugaggagcaccug

SEQ ID NO: 751095 - RNA, 19 nt, Artificial Sequence
  Description of Artificial Sequence: Synthetic oligonucleotide
ugcuggaccaagguagcau

SEQ ID NO: 751096 - RNA, 19 nt, Artificial Sequence
  Description of Artificial Sequence: Synthetic oligonucleotide
uuggggcuuuccguuguag

SEQ ID NO: 751097 - RNA, 19 nt, Artificial Sequence
  Description of Artificial Sequence: Synthetic oligonucleotide
acucucuagucgagucacc

SEQ ID NO: 751098 - RNA, 19 nt, Artificial Sequence
  Description of Artificial Sequence: Synthetic oligonucleotide
ggguucaaugccuucggga

SEQ ID NO: 751099 - RNA, 19 nt, Artificial Sequence
  Description of Artificial Sequence: Synthetic oligonucleotide
ggaagcacaaaagagcccu

SEQ ID NO: 751100 - RNA, 19 nt, Artificial Sequence
  Description of Artificial Sequence: Synthetic oligonucleotide
caaccccagggguaacaag

SEQ ID NO: 751101 - RNA, 19 nt, Artificial Sequence
  Description of Artificial Sequence: Synthetic oligonucleotide
ccgggcuaaguucugaaug

SEQ ID NO: 751102 - RNA, 19 nt, Artificial Sequence
  Description of Artificial Sequence: Synthetic oligonucleotide
agcaaggucuauagcagaa

SEQ ID NO: 751103 - RNA, 19 nt, Artificial Sequence
  Description of Artificial Sequence: Synthetic oligonucleotide
cuauagcagaauuggggcu

SEQ ID NO: 751104 - RNA, 19 nt, Artificial Sequence
  Description of Artificial Sequence: Synthetic oligonucleotide
cacccucccugccagugcc

SEQ ID NO: 751105 - RNA, 19 nt, Artificial Sequence
  Description of Artificial Sequence: Synthetic oligonucleotide
gcgugcuucccucagcagc

SEQ ID NO: 751106 - RNA, 19 nt, Artificial Sequence
  Description of Artificial Sequence: Synthetic oligonucleotide
ggcuaaguucugaauguug

SEQ ID NO: 751107 - RNA, 19 nt, Artificial Sequence
  Description of Artificial Sequence: Synthetic oligonucleotide
cugagcauuugaugaaucu

SEQ ID NO: 751108 - RNA, 19 nt, Artificial Sequence
  Description of Artificial Sequence: Synthetic oligonucleotide
cauagcuugcugcgcucac

SEQ ID NO: 751109 - RNA, 19 nt, Artificial Sequence
  Description of Artificial Sequence: Synthetic oligonucleotide
ccuugucucugcaugagca

SEQ ID NO: 751110 - RNA, 19 nt, Artificial Sequence
  Description of Artificial Sequence: Synthetic oligonucleotide
guggucaagacugggucca

SEQ ID NO: 751111 - RNA, 19 nt, Artificial Sequence
  Description of Artificial Sequence: Synthetic oligonucleotide
aucccuucgcaggcgcccc

SEQ ID NO: 751112 - RNA, 19 nt, Artificial Sequence
  Description of Artificial Sequence: Synthetic oligonucleotide
gcuugugagagucucugaa

SEQ ID NO: 751113 - RNA, 19 nt, Artificial Sequence
  Description of Artificial Sequence: Synthetic oligonucleotide
ccucuagucgucgaugagc

SEQ ID NO: 751114 - RNA, 19 nt, Artificial Sequence
  Description of Artificial Sequence: Synthetic oligonucleotide
agcccuuucccggaagaca

SEQ ID NO: 751115 - RNA, 19 nt, Artificial Sequence
  Description of Artificial Sequence: Synthetic oligonucleotide
caucccuucgcaggcgccc

SEQ ID NO: 751116 - RNA, 19 nt, Artificial Sequence
  Description of Artificial Sequence: Synthetic oligonucleotide
cuuagggacugagcauuug

SEQ ID NO: 751117 - RNA, 19 nt, Artificial Sequence
  Description of Artificial Sequence: Synthetic oligonucleotide
acugaccacgauagucauc

SEQ ID NO: 751118 - RNA, 19 nt, Artificial Sequence
  Description of Artificial Sequence: Synthetic oligonucleotide
cacuucauuucaggcacuc

SEQ ID NO: 751119 - RNA, 19 nt, Artificial Sequence
  Description of Artificial Sequence: Synthetic oligonucleotide
uugcugcgcucacauacuu

SEQ ID NO: 751120 - RNA, 19 nt, Artificial Sequence
  Description of Artificial Sequence: Synthetic oligonucleotide
ggaaagucgggcaccguac

SEQ ID NO: 751121 - RNA, 19 nt, Artificial Sequence
  Description of Artificial Sequence: Synthetic oligonucleotide
auagcuugcugcgcucaca

SEQ ID NO: 751122 - RNA, 19 nt, Artificial Sequence
  Description of Artificial Sequence: Synthetic oligonucleotide
gggguucaaugccuucggg

SEQ ID NO: 751123 - RNA, 19 nt, Artificial Sequence
  Description of Artificial Sequence: Synthetic oligonucleotide
uccucgagcacgcgugcuu

SEQ ID NO: 751124 - RNA, 19 nt, Artificial Sequence
  Description of Artificial Sequence: Synthetic oligonucleotide
cucugcaugagcagacucu

SEQ ID NO: 751125 - RNA, 19 nt, Artificial Sequence
  Description of Artificial Sequence: Synthetic oligonucleotide
ugugucuguuuggcacaag

SEQ ID NO: 751126 - RNA, 19 nt, Artificial Sequence
  Description of Artificial Sequence: Synthetic oligonucleotide
ucgagcacgcgugcuuccc

SEQ ID NO: 751127 - RNA, 19 nt, Artificial Sequence
  Description of Artificial Sequence: Synthetic oligonucleotide
gcagagguuuagugccugg

SEQ ID NO: 751128 - RNA, 19 nt, Artificial Sequence
  Description of Artificial Sequence: Synthetic oligonucleotide
guggggucuguuuuagugu

SEQ ID NO: 751129 - RNA, 19 nt, Artificial Sequence
  Description of Artificial Sequence: Synthetic oligonucleotide
ccucagcuaagccuggcug

SEQ ID NO: 751130 - RNA, 19 nt, Artificial Sequence
  Description of Artificial Sequence: Synthetic oligonucleotide
aggggcuauggaugaggga

SEQ ID NO: 751131 - RNA, 19 nt, Artificial Sequence
  Description of Artificial Sequence: Synthetic oligonucleotide
uccgaagcugggugcugac

SEQ ID NO: 751132 - RNA, 19 nt, Artificial Sequence
  Description of Artificial Sequence: Synthetic oligonucleotide
gucgagucaccuccugcuc

SEQ ID NO: 751133 - RNA, 19 nt, Artificial Sequence
  Description of Artificial Sequence: Synthetic oligonucleotide
gagcacgcgugcuucccuc

SEQ ID NO: 751134 - RNA, 19 nt, Artificial Sequence
  Description of Artificial Sequence: Synthetic oligonucleotide
agcagacucucuagucgag

SEQ ID NO: 751135 - RNA, 19 nt, Artificial Sequence
  Description of Artificial Sequence: Synthetic oligonucleotide
cucagggaacugaccacga

SEQ ID NO: 751136 - RNA, 19 nt, Artificial Sequence
  Description of Artificial Sequence: Synthetic oligonucleotide
agcacgcgugcuucccuca

SEQ ID NO: 751137 - RNA, 19 nt, Artificial Sequence
  Description of Artificial Sequence: Synthetic oligonucleotide
ggcuuguaguggucaagac

SEQ ID NO: 751138 - RNA, 19 nt, Artificial Sequence
  Description of Artificial Sequence: Synthetic oligonucleotide
caccguacuggcugcagaa

SEQ ID NO: 751139 - RNA, 19 nt, Artificial Sequence
  Description of Artificial Sequence: Synthetic oligonucleotide
cuucgcaggcgccccucag

SEQ ID NO: 751140 - RNA, 19 nt, Artificial Sequence
  Description of Artificial Sequence: Synthetic oligonucleotide
aggggcccaaaugugccca

SEQ ID NO: 751141 - RNA, 19 nt, Artificial Sequence
  Description of Artificial Sequence: Synthetic oligonucleotide
gggagagaaccuugggcuc

SEQ ID NO: 751142 - RNA, 19 nt, Artificial Sequence
  Description of Artificial Sequence: Synthetic oligonucleotide
ugcaggggcuauggaugag

SEQ ID NO: 751143 - RNA, 19 nt, Artificial Sequence
  Description of Artificial Sequence: Synthetic oligonucleotide
cacgcgugcuucccucagc

SEQ ID NO: 751144 - RNA, 19 nt, Artificial Sequence
  Description of Artificial Sequence: Synthetic oligonucleotide
ggcgcagggaaagucgggc

SEQ ID NO: 751145 - RNA, 19 nt, Artificial Sequence
  Description of Artificial Sequence: Synthetic oligonucleotide
cagccucagcuaagccugg

SEQ ID NO: 751146 - RNA, 19 nt, Artificial Sequence
  Description of Artificial Sequence: Synthetic oligonucleotide
guaguggucaagacugggu

SEQ ID NO: 751147 - RNA, 19 nt, Artificial Sequence
  Description of Artificial Sequence: Synthetic oligonucleotide
ggccccugacacuugugug

SEQ ID NO: 751148 - RNA, 19 nt, Artificial Sequence
  Description of Artificial Sequence: Synthetic oligonucleotide
gggacuccucuagucgucg

SEQ ID NO: 751149 - RNA, 19 nt, Artificial Sequence
  Description of Artificial Sequence: Synthetic oligonucleotide
cuaaggcuggaggcucggc

SEQ ID NO: 751150 - RNA, 19 nt, Artificial Sequence
  Description of Artificial Sequence: Synthetic oligonucleotide
auacuuccucgagcacgcg

SEQ ID NO: 751151 - RNA, 19 nt, Artificial Sequence
  Description of Artificial Sequence: Synthetic oligonucleotide
guagggaguggaggcugag

SEQ ID NO: 751152 - RNA, 19 nt, Artificial Sequence
  Description of Artificial Sequence: Synthetic oligonucleotide
gccgcucuagagcccaugc

SEQ ID NO: 751153 - RNA, 19 nt, Artificial Sequence
  Description of Artificial Sequence: Synthetic oligonucleotide
ggccaagugagaggcuccg

SEQ ID NO: 751154 - RNA, 19 nt, Artificial Sequence
  Description of Artificial Sequence: Synthetic oligonucleotide
cugggagugugaggucugc

SEQ ID NO: 751155 - RNA, 19 nt, Artificial Sequence
  Description of Artificial Sequence: Synthetic oligonucleotide
accaaccccagggguaaca

SEQ ID NO: 751156 - RNA, 19 nt, Artificial Sequence
  Description of Artificial Sequence: Synthetic oligonucleotide
gggaaagucgggcaccgua

SEQ ID NO: 751157 - RNA, 19 nt, Artificial Sequence
  Description of Artificial Sequence: Synthetic oligonucleotide
cagcuaagccuggcuggcg

SEQ ID NO: 751158 - RNA, 19 nt, Artificial Sequence
  Description of Artificial Sequence: Synthetic oligonucleotide
auauggugaggcagagcaa

SEQ ID NO: 751159 - RNA, 19 nt, Artificial Sequence
  Description of Artificial Sequence: Synthetic oligonucleotide
auagcagaauuggggcuuu

SEQ ID NO: 751160 - RNA, 19 nt, Artificial Sequence
  Description of Artificial Sequence: Synthetic oligonucleotide
ggagaggugucuggaacca

SEQ ID NO: 751161 - RNA, 19 nt, Artificial Sequence
  Description of Artificial Sequence: Synthetic oligonucleotide
acccugugcuuagggacug

SEQ ID NO: 751162 - RNA, 19 nt, Artificial Sequence
  Description of Artificial Sequence: Synthetic oligonucleotide
uaagagcccgaagcccauc

SEQ ID NO: 751163 - RNA, 19 nt, Artificial Sequence
  Description of Artificial Sequence: Synthetic oligonucleotide
uuccucgagcacgcgugcu

SEQ ID NO: 751164 - RNA, 19 nt, Artificial Sequence
  Description of Artificial Sequence: Synthetic oligonucleotide
gguuagagcaaggucuaua

SEQ ID NO: 751165 - RNA, 19 nt, Artificial Sequence
  Description of Artificial Sequence: Synthetic oligonucleotide
ccauuaggguccccagggc

SEQ ID NO: 751166 - RNA, 19 nt, Artificial Sequence
  Description of Artificial Sequence: Synthetic oligonucleotide
ggauauggugaggcagagc

SEQ ID NO: 751167 - RNA, 19 nt, Artificial Sequence
  Description of Artificial Sequence: Synthetic oligonucleotide
gggcuuguaguggucaaga

SEQ ID NO: 751168 - RNA, 19 nt, Artificial Sequence
  Description of Artificial Sequence: Synthetic oligonucleotide
cccgaagcccaucccuucg

SEQ ID NO: 751169 - RNA, 19 nt, Artificial Sequence
  Description of Artificial Sequence: Synthetic oligonucleotide
ggcccaaagaugcgaggca

SEQ ID NO: 751170 - RNA, 19 nt, Artificial Sequence
  Description of Artificial Sequence: Synthetic oligonucleotide
aagaugcgaggcagagcau

SEQ ID NO: 751171 - RNA, 19 nt, Artificial Sequence
  Description of Artificial Sequence: Synthetic oligonucleotide
gaaccaaggcugggaggca

SEQ ID NO: 751172 - RNA, 19 nt, Artificial Sequence
  Description of Artificial Sequence: Synthetic oligonucleotide
cucucuagucgagucaccu

SEQ ID NO: 751173 - RNA, 19 nt, Artificial Sequence
  Description of Artificial Sequence: Synthetic oligonucleotide
agccuugauacagcccaaa

SEQ ID NO: 751174 - RNA, 19 nt, Artificial Sequence
  Description of Artificial Sequence: Synthetic oligonucleotide
cacuuguguggcaaagaau

SEQ ID NO: 751175 - RNA, 19 nt, Artificial Sequence
  Description of Artificial Sequence: Synthetic oligonucleotide
gacuccucuagucgucgau

SEQ ID NO: 751176 - RNA, 19 nt, Artificial Sequence
  Description of Artificial Sequence: Synthetic oligonucleotide
gcagccauuagggucccca

SEQ ID NO: 751177 - RNA, 19 nt, Artificial Sequence
  Description of Artificial Sequence: Synthetic oligonucleotide
ccgguguucagaaugcugu

SEQ ID NO: 751178 - RNA, 19 nt, Artificial Sequence
  Description of Artificial Sequence: Synthetic oligonucleotide
aggaacacugggagccggu

SEQ ID NO: 751179 - RNA, 19 nt, Artificial Sequence
  Description of Artificial Sequence: Synthetic oligonucleotide
ggcacucuaccaaccccag

SEQ ID NO: 751180 - RNA, 19 nt, Artificial Sequence
  Description of Artificial Sequence: Synthetic oligonucleotide
ggccuugucucugcaugag

SEQ ID NO: 751181 - RNA, 19 nt, Artificial Sequence
  Description of Artificial Sequence: Synthetic oligonucleotide
gcucuagagcccaugccuc

SEQ ID NO: 751182 - RNA, 19 nt, Artificial Sequence
  Description of Artificial Sequence: Synthetic oligonucleotide
ccucaggugcuaaccucag

SEQ ID NO: 751183 - RNA, 19 nt, Artificial Sequence
  Description of Artificial Sequence: Synthetic oligonucleotide
gccgguguucagaaugcug

SEQ ID NO: 751184 - RNA, 19 nt, Artificial Sequence
  Description of Artificial Sequence: Synthetic oligonucleotide
cugggagccgguguucaga

SEQ ID NO: 751185 - RNA, 19 nt, Artificial Sequence
  Description of Artificial Sequence: Synthetic oligonucleotide
accguacuggcugcagaaa

SEQ ID NO: 751186 - RNA, 19 nt, Artificial Sequence
  Description of Artificial Sequence: Synthetic oligonucleotide
augcgaggcagagcaucca

SEQ ID NO: 751187 - RNA, 19 nt, Artificial Sequence
  Description of Artificial Sequence: Synthetic oligonucleotide
cacccugugcuuagggacu

SEQ ID NO: 751188 - RNA, 19 nt, Artificial Sequence
  Description of Artificial Sequence: Synthetic oligonucleotide
gguccauagcauugguggu

SEQ ID NO: 751189 - RNA, 19 nt, Artificial Sequence
  Description of Artificial Sequence: Synthetic oligonucleotide
gccuccuaggcagcuuccg

SEQ ID NO: 751190 - RNA, 19 nt, Artificial Sequence
  Description of Artificial Sequence: Synthetic oligonucleotide
gcuaagccuggcuggcgca

SEQ ID NO: 751191 - RNA, 19 nt, Artificial Sequence
  Description of Artificial Sequence: Synthetic oligonucleotide
ccgcucuagagcccaugcc

SEQ ID NO: 751192 - RNA, 19 nt, Artificial Sequence
  Description of Artificial Sequence: Synthetic oligonucleotide
guuucagcaggaggcggcu

SEQ ID NO: 751193 - RNA, 19 nt, Artificial Sequence
  Description of Artificial Sequence: Synthetic oligonucleotide
agcuugcugcgcucacaua

SEQ ID NO: 751194 - RNA, 19 nt, Artificial Sequence
  Description of Artificial Sequence: Synthetic oligonucleotide
gcacgcgugcuucccucag

SEQ ID NO: 751195 - RNA, 19 nt, Artificial Sequence
  Description of Artificial Sequence: Synthetic oligonucleotide
gggccaagugagaggcucc

SEQ ID NO: 751196 - RNA, 19 nt, Artificial Sequence
  Description of Artificial Sequence: Synthetic oligonucleotide
gcugggcccaaagaugcga

SEQ ID NO: 751197 - RNA, 19 nt, Artificial Sequence
  Description of Artificial Sequence: Synthetic oligonucleotide
uggucaagacuggguccau

SEQ ID NO: 751198 - RNA, 19 nt, Artificial Sequence
  Description of Artificial Sequence: Synthetic oligonucleotide
gcaccguacuggcugcaga

SEQ ID NO: 751199 - RNA, 19 nt, Artificial Sequence
  Description of Artificial Sequence: Synthetic oligonucleotide
ggggcccaaaugugcccag

SEQ ID NO: 751200 - RNA, 19 nt, Artificial Sequence
  Description of Artificial Sequence: Synthetic oligonucleotide
gagccuugauacagcccaa

SEQ ID NO: 751201 - RNA, 19 nt, Artificial Sequence
  Description of Artificial Sequence: Synthetic oligonucleotide
agcccgaagcccaucccuu

SEQ ID NO: 751202 - RNA, 19 nt, Artificial Sequence
  Description of Artificial Sequence: Synthetic oligonucleotide
agucgucgaugagcagacu

SEQ ID NO: 751203 - RNA, 19 nt, Artificial Sequence
  Description of Artificial Sequence: Synthetic oligonucleotide
cuaagagcccgaagcccau

SEQ ID NO: 751204 - RNA, 19 nt, Artificial Sequence
  Description of Artificial Sequence: Synthetic oligonucleotide
gaggggcuguccaaggcuu

SEQ ID NO: 751205 - RNA, 19 nt, Artificial Sequence
  Description of Artificial Sequence: Synthetic oligonucleotide
ccguuguagaaauggggcu

SEQ ID NO: 751206 - RNA, 19 nt, Artificial Sequence
  Description of Artificial Sequence: Synthetic oligonucleotide
cugcaugagcagacucucu

SEQ ID NO: 751207 - RNA, 19 nt, Artificial Sequence
  Description of Artificial Sequence: Synthetic oligonucleotide
ggugcuaaccucagggcuu

SEQ ID NO: 751208 - RNA, 19 nt, Artificial Sequence
  Description of Artificial Sequence: Synthetic oligonucleotide
ccagggguucaaugccuuc

SEQ ID NO: 751209 - RNA, 19 nt, Artificial Sequence
  Description of Artificial Sequence: Synthetic oligonucleotide
ggccgggcuaaguucugaa

SEQ ID NO: 751210 - RNA, 19 nt, Artificial Sequence
  Description of Artificial Sequence: Synthetic oligonucleotide
ccauagcauuggugguaug

SEQ ID NO: 751211 - RNA, 19 nt, Artificial Sequence
  Description of Artificial Sequence: Synthetic oligonucleotide
gcuauggaugagggagaga

SEQ ID NO: 751212 - RNA, 19 nt, Artificial Sequence
  Description of Artificial Sequence: Synthetic oligonucleotide
cgcucuagagcccaugccu

SEQ ID NO: 751213 - RNA, 19 nt, Artificial Sequence
  Description of Artificial Sequence: Synthetic oligonucleotide
gcgcaggggcccaaaugug

SEQ ID NO: 751214 - RNA, 19 nt, Artificial Sequence
  Description of Artificial Sequence: Synthetic oligonucleotide
caucaucauugaggaagcu

SEQ ID NO: 751215 - RNA, 19 nt, Artificial Sequence
  Description of Artificial Sequence: Synthetic oligonucleotide
ggaugagggagagaaccuu

SEQ ID NO: 751216 - RNA, 19 nt, Artificial Sequence
  Description of Artificial Sequence: Synthetic oligonucleotide
gggcucuuaagaauuuguu

SEQ ID NO: 751217 - RNA, 19 nt, Artificial Sequence
  Description of Artificial Sequence: Synthetic oligonucleotide
agagaaccuugggcucuua

SEQ ID NO: 751218 - RNA, 19 nt, Artificial Sequence
  Description of Artificial Sequence: Synthetic oligonucleotide
ggccuccuaggcagcuucc

SEQ ID NO: 751219 - RNA, 19 nt, Artificial Sequence
  Description of Artificial Sequence: Synthetic oligonucleotide
ccauagcuugcugcgcuca

SEQ ID NO: 751220 - RNA, 19 nt, Artificial Sequence
  Description of Artificial Sequence: Synthetic oligonucleotide
gccugggagugugaggucu

SEQ ID NO: 751221 - RNA, 19 nt, Artificial Sequence
  Description of Artificial Sequence: Synthetic oligonucleotide
cucccugccagugccuggu

SEQ ID NO: 751222 - RNA, 19 nt, Artificial Sequence
  Description of Artificial Sequence: Synthetic oligonucleotide
gcagacucucuagucgagu

SEQ ID NO: 751223 - RNA, 19 nt, Artificial Sequence
  Description of Artificial Sequence: Synthetic oligonucleotide
ggucaagacuggguccaua

SEQ ID NO: 751224 - RNA, 19 nt, Artificial Sequence
  Description of Artificial Sequence: Synthetic oligonucleotide
gugcuaaccucagggcuuu

SEQ ID NO: 751225 - RNA, 19 nt, Artificial Sequence
  Description of Artificial Sequence: Synthetic oligonucleotide
cgggcaccguacuggcugc

SEQ ID NO: 751226 - RNA, 19 nt, Artificial Sequence
  Description of Artificial Sequence: Synthetic oligonucleotide
ggcccaaaugugcccaguu

SEQ ID NO: 751227 - RNA, 19 nt, Artificial Sequence
  Description of Artificial Sequence: Synthetic oligonucleotide
agcuuccgucccagggcau

SEQ ID NO: 751228 - RNA, 19 nt, Artificial Sequence
  Description of Artificial Sequence: Synthetic oligonucleotide
gggugcugacagcagccau

SEQ ID NO: 751229 - RNA, 19 nt, Artificial Sequence
  Description of Artificial Sequence: Synthetic oligonucleotide
gccaagugagaggcuccga

SEQ ID NO: 751230 - RNA, 19 nt, Artificial Sequence
  Description of Artificial Sequence: Synthetic oligonucleotide
ccccauagcuugcugcgcu

SEQ ID NO: 751231 - RNA, 19 nt, Artificial Sequence
  Description of Artificial Sequence: Synthetic oligonucleotide
gccgggcuaaguucugaau

SEQ ID NO: 751232 - RNA, 19 nt, Artificial Sequence
  Description of Artificial Sequence: Synthetic oligonucleotide
ccaaccccagggguaacaa

SEQ ID NO: 751233 - RNA, 19 nt, Artificial Sequence
  Description of Artificial Sequence: Synthetic oligonucleotide
gcgccccucaggugcuaac

SEQ ID NO: 751234 - RNA, 19 nt, Artificial Sequence
  Description of Artificial Sequence: Synthetic oligonucleotide
gggcuaaguucugaauguu

SEQ ID NO: 751235 - RNA, 19 nt, Artificial Sequence
  Description of Artificial Sequence: Synthetic oligonucleotide
ccacucgagucugcacauc

SEQ ID NO: 751236 - RNA, 19 nt, Artificial Sequence
  Description of Artificial Sequence: Synthetic oligonucleotide
cuggccccggccccacugu

SEQ ID NO: 751237 - RNA, 19 nt, Artificial Sequence
  Description of Artificial Sequence: Synthetic oligonucleotide
ccgaagcugggugcugaca

SEQ ID NO: 751238 - RNA, 19 nt, Artificial Sequence
  Description of Artificial Sequence: Synthetic oligonucleotide
gcuuagggacugagcauuu

SEQ ID NO: 751239 - RNA, 19 nt, Artificial Sequence
  Description of Artificial Sequence: Synthetic oligonucleotide
gggcaccguacuggcugca

SEQ ID NO: 751240 - RNA, 19 nt, Artificial Sequence
  Description of Artificial Sequence: Synthetic oligonucleotide
gggcccaaaugugcccagu

SEQ ID NO: 751241 - RNA, 19 nt, Artificial Sequence
  Description of Artificial Sequence: Synthetic oligonucleotide
ccagaccgagaggcagaga

SEQ ID NO: 751242 - RNA, 19 nt, Artificial Sequence
  Description of Artificial Sequence: Synthetic oligonucleotide
ccgggcagaugaagggguu

SEQ ID NO: 751243 - RNA, 19 nt, Artificial Sequence
  Description of Artificial Sequence: Synthetic oligonucleotide
ccggccccacugucuucau

SEQ ID NO: 751244 - RNA, 19 nt, Artificial Sequence
  Description of Artificial Sequence: Synthetic oligonucleotide
uaguauuauacacagagcc

SEQ ID NO: 751245 - RNA, 19 nt, Artificial Sequence
  Description of Artificial Sequence: Synthetic oligonucleotide
aagacaaagguucugugac

SEQ ID NO: 751246 - RNA, 19 nt, Artificial Sequence
  Description of Artificial Sequence: Synthetic oligonucleotide
aaagcacacacacacacac

SEQ ID NO: 751247 - RNA, 19 nt, Artificial Sequence
  Description of Artificial Sequence: Synthetic oligonucleotide
aguaaaguaucuugaagac

SEQ ID NO: 751248 - RNA, 19 nt, Artificial Sequence
  Description of Artificial Sequence: Synthetic oligonucleotide
gguaaaaucacacauuucc

SEQ ID NO: 751249 - RNA, 19 nt, Artificial Sequence
  Description of Artificial Sequence: Synthetic oligonucleotide
acuacacacacacacacac

SEQ ID NO: 751250 - RNA, 19 nt, Artificial Sequence
  Description of Artificial Sequence: Synthetic oligonucleotide
aaagaggguuccuugguac

SEQ ID NO: 751251 - RNA, 19 nt, Artificial Sequence
  Description of Artificial Sequence: Synthetic oligonucleotide
cauuauuaguauuauacac

SEQ ID NO: 751252 - RNA, 19 nt, Artificial Sequence
  Description of Artificial Sequence: Synthetic oligonucleotide
cauaccuucaacauaggcc

SEQ ID NO: 751253 - RNA, 19 nt, Artificial Sequence
  Description of Artificial Sequence: Synthetic oligonucleotide
uugaauaauuuucuguacc

SEQ ID NO: 751254 - RNA, 19 nt, Artificial Sequence
  Description of Artificial Sequence: Synthetic oligonucleotide
acacacuacacacacacac

SEQ ID NO: 751255 - RNA, 19 nt, Artificial Sequence
  Description of Artificial Sequence: Synthetic oligonucleotide
caaaggauucaucugaacg

SEQ ID NO: 751256 - RNA, 19 nt, Artificial Sequence
  Description of Artificial Sequence: Synthetic oligonucleotide
acacacacuacacacacac

SEQ ID NO: 751257 - RNA, 19 nt, Artificial Sequence
  Description of Artificial Sequence: Synthetic oligonucleotide
aauggagguaaaaucacac

SEQ ID NO: 751258 - RNA, 19 nt, Artificial Sequence
  Description of Artificial Sequence: Synthetic oligonucleotide
ugaacuacaauaugaguca

SEQ ID NO: 751259 - RNA, 19 nt, Artificial Sequence
  Description of Artificial Sequence: Synthetic oligonucleotide
ucuauaauugggaguaaag

SEQ ID NO: 751260 - RNA, 19 nt, Artificial Sequence
  Description of Artificial Sequence: Synthetic oligonucleotide
cugaacuacaauaugaguc

SEQ ID NO: 751261 - RNA, 19 nt, Artificial Sequence
  Description of Artificial Sequence: Synthetic oligonucleotide
aaagaugcuucacacggag

SEQ ID NO: 751262 - RNA, 19 nt, Artificial Sequence
  Description of Artificial Sequence: Synthetic oligonucleotide
uuuucaacccagaggacgg

SEQ ID NO: 751263 - RNA, 19 nt, Artificial Sequence
  Description of Artificial Sequence: Synthetic oligonucleotide
uaaaagcacacacacacac

SEQ ID NO: 751264 - RNA, 19 nt, Artificial Sequence
  Description of Artificial Sequence: Synthetic oligonucleotide
uucgcucccacuuugagag

SEQ ID NO: 751265 - RNA, 19 nt, Artificial Sequence
  Description of Artificial Sequence: Synthetic oligonucleotide
auaccuucaacauaggcca

SEQ ID NO: 751266 - RNA, 19 nt, Artificial Sequence
  Description of Artificial Sequence: Synthetic oligonucleotide
ugaagauucaugagcaaug

SEQ ID NO: 751267 - RNA, 19 nt, Artificial Sequence
  Description of Artificial Sequence: Synthetic oligonucleotide
uauaauugggaguaaagua

SEQ ID NO: 751268 - RNA, 19 nt, Artificial Sequence
  Description of Artificial Sequence: Synthetic oligonucleotide
acacacacacacuacacac

SEQ ID NO: 751269 - RNA, 19 nt, Artificial Sequence
  Description of Artificial Sequence: Synthetic oligonucleotide
agauucaugagcaauguuc

SEQ ID NO: 751270 - RNA, 19 nt, Artificial Sequence
  Description of Artificial Sequence: Synthetic oligonucleotide
agcacacacacacacacac

SEQ ID NO: 751271 - RNA, 19 nt, Artificial Sequence
  Description of Artificial Sequence: Synthetic oligonucleotide
uucguaagaaagaauccag

SEQ ID NO: 751272 - RNA, 19 nt, Artificial Sequence
  Description of Artificial Sequence: Synthetic oligonucleotide
augagugugaacaacuggc

SEQ ID NO: 751273 - RNA, 19 nt, Artificial Sequence
  Description of Artificial Sequence: Synthetic oligonucleotide
ucuauggucagauuugaac

SEQ ID NO: 751274 - RNA, 19 nt, Artificial Sequence
  Description of Artificial Sequence: Synthetic oligonucleotide
uccuuaucuagacacagca

SEQ ID NO: 751275 - RNA, 19 nt, Artificial Sequence
  Description of Artificial Sequence: Synthetic oligonucleotide
aagagguagcuaauuaggc

SEQ ID NO: 751276 - RNA, 19 nt, Artificial Sequence
  Description of Artificial Sequence: Synthetic oligonucleotide
ugauauuuggguucuguug

SEQ ID NO: 751277 - RNA, 19 nt, Artificial Sequence
  Description of Artificial Sequence: Synthetic oligonucleotide
gauauuuggguucuguuga

SEQ ID NO: 751278 - RNA, 19 nt, Artificial Sequence
  Description of Artificial Sequence: Synthetic oligonucleotide
ugucuuacgggcuuugucc

SEQ ID NO: 751279 - RNA, 19 nt, Artificial Sequence
  Description of Artificial Sequence: Synthetic oligonucleotide
uuugaagauaaaagcacac

SEQ ID NO: 751280 - RNA, 19 nt, Artificial Sequence
  Description of Artificial Sequence: Synthetic oligonucleotide
acacuacacacacacacac

SEQ ID NO: 751281 - RNA, 19 nt, Artificial Sequence
  Description of Artificial Sequence: Synthetic oligonucleotide
aguauuauacacagagccc

SEQ ID NO: 751282 - RNA, 19 nt, Artificial Sequence
  Description of Artificial Sequence: Synthetic oligonucleotide
cagaauuccguauugguac

SEQ ID NO: 751283 - RNA, 19 nt, Artificial Sequence
  Description of Artificial Sequence: Synthetic oligonucleotide
uuaguauuauacacagagc

SEQ ID NO: 751284 - RNA, 19 nt, Artificial Sequence
  Description of Artificial Sequence: Synthetic oligonucleotide
acacacacacuacacacac

SEQ ID NO: 751285 - RNA, 19 nt, Artificial Sequence
  Description of Artificial Sequence: Synthetic oligonucleotide
uacacacacacacacacac

SEQ ID NO: 751286 - RNA, 19 nt, Artificial Sequence
  Description of Artificial Sequence: Synthetic oligonucleotide
gaccauaccuucaacauag

SEQ ID NO: 751287 - RNA, 19 nt, Artificial Sequence
  Description of Artificial Sequence: Synthetic oligonucleotide
gaauccagcauccucgagc

SEQ ID NO: 751288 - RNA, 19 nt, Artificial Sequence
  Description of Artificial Sequence: Synthetic oligonucleotide
ucaucucauuaacagaucu

SEQ ID NO: 751289 - RNA, 19 nt, Artificial Sequence
  Description of Artificial Sequence: Synthetic oligonucleotide
aucucauuaacagaucuuc

SEQ ID NO: 751290 - RNA, 19 nt, Artificial Sequence
  Description of Artificial Sequence: Synthetic oligonucleotide
ugagacuguucaaacaucu

SEQ ID NO: 751291 - RNA, 19 nt, Artificial Sequence
  Description of Artificial Sequence: Synthetic oligonucleotide
uuaucaggggaaaaguagu

SEQ ID NO: 751292 - RNA, 19 nt, Artificial Sequence
  Description of Artificial Sequence: Synthetic oligonucleotide
ugcagaucggagcagcagg

SEQ ID NO: 751293 - RNA, 19 nt, Artificial Sequence
  Description of Artificial Sequence: Synthetic oligonucleotide
uccauucuauaauugggag

SEQ ID NO: 751294 - RNA, 19 nt, Artificial Sequence
  Description of Artificial Sequence: Synthetic oligonucleotide
agaugcuucacacggagug

SEQ ID NO: 751295 - RNA, 19 nt, Artificial Sequence
  Description of Artificial Sequence: Synthetic oligonucleotide
aagaccauaccuucaacau

SEQ ID NO: 751296 - RNA, 19 nt, Artificial Sequence
  Description of Artificial Sequence: Synthetic oligonucleotide
uugggaguaaaguaucuug

SEQ ID NO: 751297 - RNA, 19 nt, Artificial Sequence
  Description of Artificial Sequence: Synthetic oligonucleotide
aucgacaaggcagaauucc

SEQ ID NO: 751298 - RNA, 19 nt, Artificial Sequence
  Description of Artificial Sequence: Synthetic oligonucleotide
  modified_base (9)..(9): a, c, u, g, unknown or other
acacaggunaggcagagca

SEQ ID NO: 751299 - RNA, 19 nt, Artificial Sequence
  Description of Artificial Sequence: Synthetic oligonucleotide
guaagaacugcuuaucuuc

SEQ ID NO: 751300 - RNA, 19 nt, Artificial Sequence
  Description of Artificial Sequence: Synthetic oligonucleotide
aacugagucaguaaugcug

SEQ ID NO: 751301 - RNA, 19 nt, Artificial Sequence
  Description of Artificial Sequence: Synthetic oligonucleotide
uucaccgcagggaacaaag

SEQ ID NO: 751302 - RNA, 19 nt, Artificial Sequence
  Description of Artificial Sequence: Synthetic oligonucleotide
caugauuguccuuaucuag

SEQ ID NO: 751303 - RNA, 19 nt, Artificial Sequence
  Description of Artificial Sequence: Synthetic oligonucleotide
agaauuccguauugguacc

SEQ ID NO: 751304 - RNA, 19 nt, Artificial Sequence
  Description of Artificial Sequence: Synthetic oligonucleotide
cuuaucuagacacagcaca

SEQ ID NO: 751305 - RNA, 19 nt, Artificial Sequence
  Description of Artificial Sequence: Synthetic oligonucleotide
auuaucaggggaaaaguag

SEQ ID NO: 751306 - RNA, 19 nt, Artificial Sequence
  Description of Artificial Sequence: Synthetic oligonucleotide
auaaagaucucagagucca

SEQ ID NO: 751307 - RNA, 19 nt, Artificial Sequence
  Description of Artificial Sequence: Synthetic oligonucleotide
ugacccaauucuaaagacc

SEQ ID NO: 751308 - RNA, 19 nt, Artificial Sequence
  Description of Artificial Sequence: Synthetic oligonucleotide
acuacaauaugagucauga

SEQ ID NO: 751309 - RNA, 19 nt, Artificial Sequence
  Description of Artificial Sequence: Synthetic oligonucleotide
acaacuggcguucaagucu

SEQ ID NO: 751310 - RNA, 19 nt, Artificial Sequence
  Description of Artificial Sequence: Synthetic oligonucleotide
ucguaagaaagaauccagc

SEQ ID NO: 751311 - RNA, 19 nt, Artificial Sequence
  Description of Artificial Sequence: Synthetic oligonucleotide
ucgacaaggcagaauuccg

SEQ ID NO: 751312 - RNA, 19 nt, Artificial Sequence
  Description of Artificial Sequence: Synthetic oligonucleotide
aagccuuucaguguguuca

SEQ ID NO: 751313 - RNA, 19 nt, Artificial Sequence
  Description of Artificial Sequence: Synthetic oligonucleotide
uuaucuagacacagcacac

SEQ ID NO: 751314 - RNA, 19 nt, Artificial Sequence
  Description of Artificial Sequence: Synthetic oligonucleotide
agcuaauuaggcuugguaa

SEQ ID NO: 751315 - RNA, 19 nt, Artificial Sequence
  Description of Artificial Sequence: Synthetic oligonucleotide
ugauacccaucuuugaaga

SEQ ID NO: 751316 - RNA, 19 nt, Artificial Sequence
  Description of Artificial Sequence: Synthetic oligonucleotide
ugggaguaaaguaucuuga

SEQ ID NO: 751317 - RNA, 19 nt, Artificial Sequence
  Description of Artificial Sequence: Synthetic oligonucleotide
auaaguuacauaaaagaau

SEQ ID NO: 751318 - RNA, 19 nt, Artificial Sequence
  Description of Artificial Sequence: Synthetic oligonucleotide
aauuaggcuugguaauucu

SEQ ID NO: 751319 - RNA, 19 nt, Artificial Sequence
  Description of Artificial Sequence: Synthetic oligonucleotide
ucaguaaugcugauaugga

SEQ ID NO: 751320 - RNA, 19 nt, Artificial Sequence
  Description of Artificial Sequence: Synthetic oligonucleotide
cuauggucagauuugaaca

SEQ ID NO: 751321 - RNA, 19 nt, Artificial Sequence
  Description of Artificial Sequence: Synthetic oligonucleotide
uccaguaugcuucuucgcu

SEQ ID NO: 751322 - RNA, 19 nt, Artificial Sequence
  Description of Artificial Sequence: Synthetic oligonucleotide
cauuaacagaucuucccag

SEQ ID NO: 751323 - RNA, 19 nt, Artificial Sequence
  Description of Artificial Sequence: Synthetic oligonucleotide
aaaucaauuuccauucuau

SEQ ID NO: 751324 - RNA, 19 nt, Artificial Sequence
  Description of Artificial Sequence: Synthetic oligonucleotide
uggaggacgguccuuagcu

SEQ ID NO: 751325 - RNA, 19 nt, Artificial Sequence
  Description of Artificial Sequence: Synthetic oligonucleotide
ugaacagcuguaucgacaa

SEQ ID NO: 751326 - RNA, 19 nt, Artificial Sequence
  Description of Artificial Sequence: Synthetic oligonucleotide
uaugagucaugaauaaguu

SEQ ID NO: 751327 - RNA, 19 nt, Artificial Sequence
  Description of Artificial Sequence: Synthetic oligonucleotide
auaauugggaguaaaguau

SEQ ID NO: 751328 - RNA, 19 nt, Artificial Sequence
  Description of Artificial Sequence: Synthetic oligonucleotide
aaggcagaauuccguauug

SEQ ID NO: 751329 - RNA, 19 nt, Artificial Sequence
  Description of Artificial Sequence: Synthetic oligonucleotide
aaggauucaucugaacgug

SEQ ID NO: 751330 - RNA, 19 nt, Artificial Sequence
  Description of Artificial Sequence: Synthetic oligonucleotide
ggcugauuugcaaagaggg

SEQ ID NO: 751331 - RNA, 19 nt, Artificial Sequence
  Description of Artificial Sequence: Synthetic oligonucleotide
agagguagcuaauuaggcu

SEQ ID NO: 751332 - RNA, 19 nt, Artificial Sequence
  Description of Artificial Sequence: Synthetic oligonucleotide
cacacacacacacacacac

SEQ ID NO: 751333 - RNA, 19 nt, Artificial Sequence
  Description of Artificial Sequence: Synthetic oligonucleotide
ugaacccaagucuacuggc

SEQ ID NO: 751334 - RNA, 19 nt, Artificial Sequence
  Description of Artificial Sequence: Synthetic oligonucleotide
auucguaagaaagaaucca

SEQ ID NO: 751335 - RNA, 19 nt, Artificial Sequence
  Description of Artificial Sequence: Synthetic oligonucleotide
cacacacacacacaccacg

SEQ ID NO: 751336 - RNA, 19 nt, Artificial Sequence
  Description of Artificial Sequence: Synthetic oligonucleotide
  modified_base (7)..(7): a, c, u, g, unknown or other
acaggunaggcagagcaug

SEQ ID NO: 751337 - RNA, 19 nt, Artificial Sequence
  Description of Artificial Sequence: Synthetic oligonucleotide
caagucugcagaucggagc

SEQ ID NO: 751338 - RNA, 19 nt, Artificial Sequence
  Description of Artificial Sequence: Synthetic oligonucleotide
gauucaucugaacgugaag

SEQ ID NO: 751339 - RNA, 19 nt, Artificial Sequence
  Description of Artificial Sequence: Synthetic oligonucleotide
ucaagucugcagaucggag

SEQ ID NO: 751340 - RNA, 19 nt, Artificial Sequence
  Description of Artificial Sequence: Synthetic oligonucleotide
accaauggagguaaaauca

SEQ ID NO: 751341 - RNA, 19 nt, Artificial Sequence
  Description of Artificial Sequence: Synthetic oligonucleotide
ggucauuugauuguuuagg

SEQ ID NO: 751342 - RNA, 19 nt, Artificial Sequence
  Description of Artificial Sequence: Synthetic oligonucleotide
ugauuguccuuaucuagac

SEQ ID NO: 751343 - RNA, 19 nt, Artificial Sequence
  Description of Artificial Sequence: Synthetic oligonucleotide
uguaagaacugcuuaucuu

SEQ ID NO: 751344 - RNA, 19 nt, Artificial Sequence
  Description of Artificial Sequence: Synthetic oligonucleotide
acagcuguaucgacaaggc

SEQ ID NO: 751345 - RNA, 19 nt, Artificial Sequence
  Description of Artificial Sequence: Synthetic oligonucleotide
agugugaacaacuggcaaa

SEQ ID NO: 751346 - RNA, 19 nt, Artificial Sequence
  Description of Artificial Sequence: Synthetic oligonucleotide
caaugaacuguaagaacug

SEQ ID NO: 751347 - RNA, 19 nt, Artificial Sequence
  Description of Artificial Sequence: Synthetic oligonucleotide
accaucaaaagaugagugu

SEQ ID NO: 751348 - RNA, 19 nt, Artificial Sequence
  Description of Artificial Sequence: Synthetic oligonucleotide
ggaguaaaguaucuugaag

SEQ ID NO: 751349 - RNA, 19 nt, Artificial Sequence
  Description of Artificial Sequence: Synthetic oligonucleotide
gacccaauucuaaagacca

SEQ ID NO: 751350 - RNA, 19 nt, Artificial Sequence
  Description of Artificial Sequence: Synthetic oligonucleotide
cugaacgugaagauucaug

SEQ ID NO: 751351 - RNA, 19 nt, Artificial Sequence
  Description of Artificial Sequence: Synthetic oligonucleotide
gaccaucaaaagaugagug

SEQ ID NO: 751352 - RNA, 19 nt, Artificial Sequence
  Description of Artificial Sequence: Synthetic oligonucleotide
gacuagaaguacuucuuga

SEQ ID NO: 751353 - RNA, 19 nt, Artificial Sequence
  Description of Artificial Sequence: Synthetic oligonucleotide
uuugccccugucuuacggg

SEQ ID NO: 751354 - RNA, 19 nt, Artificial Sequence
  Description of Artificial Sequence: Synthetic oligonucleotide
cuuugucccagguacuuug

SEQ ID NO: 751355 - RNA, 19 nt, Artificial Sequence
  Description of Artificial Sequence: Synthetic oligonucleotide
gaugaggcuggcuugcuga

SEQ ID NO: 751356 - RNA, 19 nt, Artificial Sequence
  Description of Artificial Sequence: Synthetic oligonucleotide
auggucagauuugaacagc

SEQ ID NO: 751357 - RNA, 19 nt, Artificial Sequence
  Description of Artificial Sequence: Synthetic oligonucleotide
caauucuaaagaccacagc

SEQ ID NO: 751358 - RNA, 19 nt, Artificial Sequence
  Description of Artificial Sequence: Synthetic oligonucleotide
cuugagauuaucaggggaa

SEQ ID NO: 751359 - RNA, 19 nt, Artificial Sequence
  Description of Artificial Sequence: Synthetic oligonucleotide
uagacaacuggcguucaag

SEQ ID NO: 751360 - RNA, 19 nt, Artificial Sequence
  Description of Artificial Sequence: Synthetic oligonucleotide
ucggaggugaacccaaguc

SEQ ID NO: 751361 - RNA, 19 nt, Artificial Sequence
  Description of Artificial Sequence: Synthetic oligonucleotide
ucggguuucucaagacuag

SEQ ID NO: 751362 - RNA, 19 nt, Artificial Sequence
  Description of Artificial Sequence: Synthetic oligonucleotide
uaccguuggaagaccauac

SEQ ID NO: 751363 - RNA, 19 nt, Artificial Sequence
  Description of Artificial Sequence: Synthetic oligonucleotide
ucaaaagaugagugugaac

SEQ ID NO: 751364 - RNA, 19 nt, Artificial Sequence
  Description of Artificial Sequence: Synthetic oligonucleotide
aaguacuucuugaaacuga

SEQ ID NO: 751365 - RNA, 19 nt, Artificial Sequence
  Description of Artificial Sequence: Synthetic oligonucleotide
cacacuaauaaagaucuca

SEQ ID NO: 751366 - RNA, 19 nt, Artificial Sequence
  Description of Artificial Sequence: Synthetic oligonucleotide
ucuucgcucccacuuugag

SEQ ID NO: 751367 - RNA, 19 nt, Artificial Sequence
  Description of Artificial Sequence: Synthetic oligonucleotide
uagcuaauuaggcuuggua

SEQ ID NO: 751368 - RNA, 19 nt, Artificial Sequence
  Description of Artificial Sequence: Synthetic oligonucleotide
caguaugcuucuucgcucc

SEQ ID NO: 751369 - RNA, 19 nt, Artificial Sequence
  Description of Artificial Sequence: Synthetic oligonucleotide
ugucggguuucucaagacu

SEQ ID NO: 751370 - RNA, 19 nt, Artificial Sequence
  Description of Artificial Sequence: Synthetic oligonucleotide
uuggaagaccauaccuuca

SEQ ID NO: 751371 - RNA, 19 nt, Artificial Sequence
  Description of Artificial Sequence: Synthetic oligonucleotide
uccagugacccaauucuaa

SEQ ID NO: 751372 - RNA, 19 nt, Artificial Sequence
  Description of Artificial Sequence: Synthetic oligonucleotide
acaugggucacuugcuugu

SEQ ID NO: 751373 - RNA, 19 nt, Artificial Sequence
  Description of Artificial Sequence: Synthetic oligonucleotide
auuauacacagagcccagg

SEQ ID NO: 751374 - RNA, 19 nt, Artificial Sequence
  Description of Artificial Sequence: Synthetic oligonucleotide
ugguugggagacaaugaac

SEQ ID NO: 751375 - RNA, 19 nt, Artificial Sequence
  Description of Artificial Sequence: Synthetic oligonucleotide
aguaugcuucuucgcuccc

SEQ ID NO: 751376 - RNA, 19 nt, Artificial Sequence
  Description of Artificial Sequence: Synthetic oligonucleotide
cacacacacacacacacca

SEQ ID NO: 751377 - RNA, 19 nt, Artificial Sequence
  Description of Artificial Sequence: Synthetic oligonucleotide
cuuugccccugucuuacgg

SEQ ID NO: 751378 - RNA, 19 nt, Artificial Sequence
  Description of Artificial Sequence: Synthetic oligonucleotide
cacaccacgguacuggauc

SEQ ID NO: 751379 - RNA, 19 nt, Artificial Sequence
  Description of Artificial Sequence: Synthetic oligonucleotide
uugagacuguucaaacauc

SEQ ID NO: 751380 - RNA, 19 nt, Artificial Sequence
  Description of Artificial Sequence: Synthetic oligonucleotide
aaaagcacacacacacaca

SEQ ID NO: 751381 - RNA, 19 nt, Artificial Sequence
  Description of Artificial Sequence: Synthetic oligonucleotide
gugacccaauucuaaagac

SEQ ID NO: 751382 - RNA, 19 nt, Artificial Sequence
  Description of Artificial Sequence: Synthetic oligonucleotide
cagaccucaggugugaaug

SEQ ID NO: 751383 - RNA, 19 nt, Artificial Sequence
  Description of Artificial Sequence: Synthetic oligonucleotide
uggacucgcagaccucagg

SEQ ID NO: 751384 - RNA, 19 nt, Artificial Sequence
  Description of Artificial Sequence: Synthetic oligonucleotide
ucacacggagugauauuug

SEQ ID NO: 751385 - RNA, 19 nt, Artificial Sequence
  Description of Artificial Sequence: Synthetic oligonucleotide
uucuauaauugggaguaaa

SEQ ID NO: 751386 - RNA, 19 nt, Artificial Sequence
  Description of Artificial Sequence: Synthetic oligonucleotide
acacacacacacacuacac

SEQ ID NO: 751387 - RNA, 19 nt, Artificial Sequence
  Description of Artificial Sequence: Synthetic oligonucleotide
aagacuucucugaacuaca

SEQ ID NO: 751388 - RNA, 19 nt, Artificial Sequence
  Description of Artificial Sequence: Synthetic oligonucleotide
uaauuaggcuugguaauuc

SEQ ID NO: 751389 - RNA, 19 nt, Artificial Sequence
  Description of Artificial Sequence: Synthetic oligonucleotide
aagacuagaaguacuucuu

SEQ ID NO: 751390 - RNA, 19 nt, Artificial Sequence
  Description of Artificial Sequence: Synthetic oligonucleotide
caucaaaagaugaguguga

SEQ ID NO: 751391 - RNA, 19 nt, Artificial Sequence
  Description of Artificial Sequence: Synthetic oligonucleotide
uucacacggagugauauuu

SEQ ID NO: 751392 - RNA, 19 nt, Artificial Sequence
  Description of Artificial Sequence: Synthetic oligonucleotide
acaugggugguggacucgc

SEQ ID NO: 751393 - RNA, 19 nt, Artificial Sequence
  Description of Artificial Sequence: Synthetic oligonucleotide
gacaacuggcguucaaguc

SEQ ID NO: 751394 - RNA, 19 nt, Artificial Sequence
  Description of Artificial Sequence: Synthetic oligonucleotide
acagcacccauucguaaga

SEQ ID NO: 751395 - RNA, 19 nt, Artificial Sequence
  Description of Artificial Sequence: Synthetic oligonucleotide
  modified_base (5)..(5): a, c, u, g, unknown or other
aggunaggcagagcaugcc

SEQ ID NO: 751396 - RNA, 19 nt, Artificial Sequence
  Description of Artificial Sequence: Synthetic oligonucleotide
uccguauugguaccucuuc

SEQ ID NO: 751397 - RNA, 19 nt, Artificial Sequence
  Description of Artificial Sequence: Synthetic oligonucleotide
aucuagacacagcacacua

SEQ ID NO: 751398 - RNA, 19 nt, Artificial Sequence
  Description of Artificial Sequence: Synthetic oligonucleotide
agugauauuuggguucugu

SEQ ID NO: 751399 - RNA, 19 nt, Artificial Sequence
  Description of Artificial Sequence: Synthetic oligonucleotide
guaucgacaaggcagaauu

SEQ ID NO: 751400 - RNA, 19 nt, Artificial Sequence
  Description of Artificial Sequence: Synthetic oligonucleotide
gucuuacgggcuuuguccc

SEQ ID NO: 751401 - RNA, 19 nt, Artificial Sequence
  Description of Artificial Sequence: Synthetic oligonucleotide
  modified_base (6)..(6): a, c, u, g, unknown or other
caggunaggcagagcaugc

SEQ ID NO: 751402 - RNA, 19 nt, Artificial Sequence
  Description of Artificial Sequence: Synthetic oligonucleotide
uuugucaccaauggaggua

SEQ ID NO: 751403 - RNA, 19 nt, Artificial Sequence
  Description of Artificial Sequence: Synthetic oligonucleotide
ugugaacaacuggcaaagg

SEQ ID NO: 751404 - RNA, 19 nt, Artificial Sequence
  Description of Artificial Sequence: Synthetic oligonucleotide
ccaauucuaaagaccacag

SEQ ID NO: 751405 - RNA, 19 nt, Artificial Sequence
  Description of Artificial Sequence: Synthetic oligonucleotide
augagucaugaauaaguua

SEQ ID NO: 751406 - RNA, 19 nt, Artificial Sequence
  Description of Artificial Sequence: Synthetic oligonucleotide
augauuguccuuaucuaga

SEQ ID NO: 751407 - RNA, 19 nt, Artificial Sequence
  Description of Artificial Sequence: Synthetic oligonucleotide
ggaccaaugaugaggcugg

SEQ ID NO: 751408 - RNA, 19 nt, Artificial Sequence
  Description of Artificial Sequence: Synthetic oligonucleotide
ucgagcgauccccaucagc

SEQ ID NO: 751409 - RNA, 19 nt, Artificial Sequence
  Description of Artificial Sequence: Synthetic oligonucleotide
acacacacacacaccacgg

SEQ ID NO: 751410 - RNA, 19 nt, Artificial Sequence
  Description of Artificial Sequence: Synthetic oligonucleotide
uuggaggacgguccuuagc

SEQ ID NO: 751411 - RNA, 19 nt, Artificial Sequence
  Description of Artificial Sequence: Synthetic oligonucleotide
agcacauuuagggugcgga

SEQ ID NO: 751412 - RNA, 19 nt, Artificial Sequence
  Description of Artificial Sequence: Synthetic oligonucleotide
caucaguauucaccgcagg

SEQ ID NO: 751413 - RNA, 19 nt, Artificial Sequence
  Description of Artificial Sequence: Synthetic oligonucleotide
cuagaaguacuucuugaaa

SEQ ID NO: 751414 - RNA, 19 nt, Artificial Sequence
  Description of Artificial Sequence: Synthetic oligonucleotide
gcacccauucguaagaaag

SEQ ID NO: 751415 - RNA, 19 nt, Artificial Sequence
  Description of Artificial Sequence: Synthetic oligonucleotide
auuccguauugguaccucu

SEQ ID NO: 751416 - RNA, 19 nt, Artificial Sequence
  Description of Artificial Sequence: Synthetic oligonucleotide
uaucgacaaggcagaauuc

SEQ ID NO: 751417 - RNA, 19 nt, Artificial Sequence
  Description of Artificial Sequence: Synthetic oligonucleotide
uuucggaggugaacccaag

SEQ ID NO: 751418 - RNA, 19 nt, Artificial Sequence
  Description of Artificial Sequence: Synthetic oligonucleotide
uaucuagacacagcacacu

SEQ ID NO: 751419 - RNA, 19 nt, Artificial Sequence
  Description of Artificial Sequence: Synthetic oligonucleotide
guccucauaagaggaagcc

SEQ ID NO: 751420 - RNA, 19 nt, Artificial Sequence
  Description of Artificial Sequence: Synthetic oligonucleotide
ucugcagaucggagcagca

SEQ ID NO: 751421 - RNA, 19 nt, Artificial Sequence
  Description of Artificial Sequence: Synthetic oligonucleotide
guauucaccgcagggaaca

SEQ ID NO: 751422 - RNA, 19 nt, Artificial Sequence
  Description of Artificial Sequence: Synthetic oligonucleotide
acacacacacacacacacc

SEQ ID NO: 751423 - RNA, 19 nt, Artificial Sequence
  Description of Artificial Sequence: Synthetic oligonucleotide
agucaugaauaaguuacau

SEQ ID NO: 751424 - RNA, 19 nt, Artificial Sequence
  Description of Artificial Sequence: Synthetic oligonucleotide
agggugcggacagacuucc

SEQ ID NO: 751425 - RNA, 19 nt, Artificial Sequence
  Description of Artificial Sequence: Synthetic oligonucleotide
uugccccugucuuacgggc

SEQ ID NO: 751426 - RNA, 19 nt, Artificial Sequence
  Description of Artificial Sequence: Synthetic oligonucleotide
caauggagguaaaaucaca

SEQ ID NO: 751427 - RNA, 19 nt, Artificial Sequence
  Description of Artificial Sequence: Synthetic oligonucleotide
acaaggcagaauuccguau

SEQ ID NO: 751428 - RNA, 19 nt, Artificial Sequence
  Description of Artificial Sequence: Synthetic oligonucleotide
ucucagaguccaagccaag

SEQ ID NO: 751429 - RNA, 19 nt, Artificial Sequence
  Description of Artificial Sequence: Synthetic oligonucleotide
uugagauuaucaggggaaa

SEQ ID NO: 751430 - RNA, 19 nt, Artificial Sequence
  Description of Artificial Sequence: Synthetic oligonucleotide
gagugugaacaacuggcaa

SEQ ID NO: 751431 - RNA, 19 nt, Artificial Sequence
  Description of Artificial Sequence: Synthetic oligonucleotide
augggugguggacucgcag

SEQ ID NO: 751432 - RNA, 19 nt, Artificial Sequence
  Description of Artificial Sequence: Synthetic oligonucleotide
agcauccucgagcgauccc

SEQ ID NO: 751433 - RNA, 19 nt, Artificial Sequence
  Description of Artificial Sequence: Synthetic oligonucleotide
ugcugauauggaucugggu

SEQ ID NO: 751434 - RNA, 19 nt, Artificial Sequence
  Description of Artificial Sequence: Synthetic oligonucleotide
cuaaagaccacagcaccca

SEQ ID NO: 751435 - RNA, 19 nt, Artificial Sequence
  Description of Artificial Sequence: Synthetic oligonucleotide
cacacacacacacacuaca

SEQ ID NO: 751436 - RNA, 19 nt, Artificial Sequence
  Description of Artificial Sequence: Synthetic oligonucleotide
agucaguaaugcugauaug

SEQ ID NO: 751437 - RNA, 19 nt, Artificial Sequence
  Description of Artificial Sequence: Synthetic oligonucleotide
acacacacacacacacuac

SEQ ID NO: 751438 - RNA, 19 nt, Artificial Sequence
  Description of Artificial Sequence: Synthetic oligonucleotide
agaucggagcagcagggaa

SEQ ID NO: 751439 - RNA, 19 nt, Artificial Sequence
  Description of Artificial Sequence: Synthetic oligonucleotide
auaaaagcacacacacaca

SEQ ID NO: 751440 - RNA, 19 nt, Artificial Sequence
  Description of Artificial Sequence: Synthetic oligonucleotide
acacacacacaccacggua

SEQ ID NO: 751441 - RNA, 19 nt, Artificial Sequence
  Description of Artificial Sequence: Synthetic oligonucleotide
auauggaucuggguuuugu

SEQ ID NO: 751442 - RNA, 19 nt, Artificial Sequence
  Description of Artificial Sequence: Synthetic oligonucleotide
aggcagaauuccguauugg

SEQ ID NO: 751443 - RNA, 19 nt, Artificial Sequence
  Description of Artificial Sequence: Synthetic oligonucleotide
cacacacacacacacacua

SEQ ID NO: 751444 - RNA, 19 nt, Artificial Sequence
  Description of Artificial Sequence: Synthetic oligonucleotide
ggugcggacagacuucccc

SEQ ID NO: 751445 - RNA, 19 nt, Artificial Sequence
  Description of Artificial Sequence: Synthetic oligonucleotide
acgguccuuagcuuucuga

SEQ ID NO: 751446 - RNA, 19 nt, Artificial Sequence
  Description of Artificial Sequence: Synthetic oligonucleotide
  modified_base (4)..(4): a, c, u, g, unknown or other
ggunaggcagagcaugcca

SEQ ID NO: 751447 - RNA, 19 nt, Artificial Sequence
  Description of Artificial Sequence: Synthetic oligonucleotide
gagacuguucaaacaucug

SEQ ID NO: 751448 - RNA, 19 nt, Artificial Sequence
  Description of Artificial Sequence: Synthetic oligonucleotide
acggagugauauuuggguu

SEQ ID NO: 751449 - RNA, 19 nt, Artificial Sequence
  Description of Artificial Sequence: Synthetic oligonucleotide
uugucggguuucucaagac

SEQ ID NO: 751450 - RNA, 19 nt, Artificial Sequence
  Description of Artificial Sequence: Synthetic oligonucleotide
gaagauucaugagcaaugu

SEQ ID NO: 751451 - RNA, 19 nt, Artificial Sequence
  Description of Artificial Sequence: Synthetic oligonucleotide
uucuucgcucccacuuuga

SEQ ID NO: 751452 - RNA, 19 nt, Artificial Sequence
  Description of Artificial Sequence: Synthetic oligonucleotide
uguaucgacaaggcagaau

SEQ ID NO: 751453 - RNA, 19 nt, Artificial Sequence
  Description of Artificial Sequence: Synthetic oligonucleotide
ccaauggagguaaaaucac

SEQ ID NO: 751454 - RNA, 19 nt, Artificial Sequence
  Description of Artificial Sequence: Synthetic oligonucleotide
ucuuacgggcuuuguccca

SEQ ID NO: 751455 - RNA, 19 nt, Artificial Sequence
  Description of Artificial Sequence: Synthetic oligonucleotide
cacacuacacacacacaca

SEQ ID NO: 751456 - RNA, 19 nt, Artificial Sequence
  Description of Artificial Sequence: Synthetic oligonucleotide
gggaccaaugaugaggcug

SEQ ID NO: 751457 - RNA, 19 nt, Artificial Sequence
  Description of Artificial Sequence: Synthetic oligonucleotide
gguaccgcuggguagacaa

SEQ ID NO: 751458 - RNA, 19 nt, Artificial Sequence
  Description of Artificial Sequence: Synthetic oligonucleotide
agaccucaggugugaauga

SEQ ID NO: 751459 - RNA, 19 nt, Artificial Sequence
  Description of Artificial Sequence: Synthetic oligonucleotide
uuccguauugguaccucuu

SEQ ID NO: 751460 - RNA, 19 nt, Artificial Sequence
  Description of Artificial Sequence: Synthetic oligonucleotide
ugagucaguaaugcugaua

SEQ ID NO: 751461 - RNA, 19 nt, Artificial Sequence
  Description of Artificial Sequence: Synthetic oligonucleotide
cacacacacacacuacaca

SEQ ID NO: 751462 - RNA, 19 nt, Artificial Sequence
  Description of Artificial Sequence: Synthetic oligonucleotide
acccauucguaagaaagaa

SEQ ID NO: 751463 - RNA, 19 nt, Artificial Sequence
  Description of Artificial Sequence: Synthetic oligonucleotide
gagucaugaauaaguuaca

SEQ ID NO: 751464 - RNA, 19 nt, Artificial Sequence
  Description of Artificial Sequence: Synthetic oligonucleotide
acacacacacacacaccac

SEQ ID NO: 751465 - RNA, 19 nt, Artificial Sequence
  Description of Artificial Sequence: Synthetic oligonucleotide
cagacuuccccaccagcac

SEQ ID NO: 751466 - RNA, 19 nt, Artificial Sequence
  Description of Artificial Sequence: Synthetic oligonucleotide
uagggugcggacagacuuc

SEQ ID NO: 751467 - RNA, 19 nt, Artificial Sequence
  Description of Artificial Sequence: Synthetic oligonucleotide
cacggagugauauuugggu

SEQ ID NO: 751468 - RNA, 19 nt, Artificial Sequence
  Description of Artificial Sequence: Synthetic oligonucleotide
ccauaccuucaacauaggc

SEQ ID NO: 751469 - RNA, 19 nt, Artificial Sequence
  Description of Artificial Sequence: Synthetic oligonucleotide
cacacacacacuacacaca

SEQ ID NO: 751470 - RNA, 19 nt, Artificial Sequence
  Description of Artificial Sequence: Synthetic oligonucleotide
guacuggauccuugcuucc

SEQ ID NO: 751471 - RNA, 19 nt, Artificial Sequence
  Description of Artificial Sequence: Synthetic oligonucleotide
ugcggacagacuuccccac

SEQ ID NO: 751472 - RNA, 19 nt, Artificial Sequence
  Description of Artificial Sequence: Synthetic oligonucleotide
gaggacggaaaccagcuuu

SEQ ID NO: 751473 - RNA, 19 nt, Artificial Sequence
  Description of Artificial Sequence: Synthetic oligonucleotide
aggugugaaugaaaagccu

SEQ ID NO: 751474 - RNA, 19 nt, Artificial Sequence
  Description of Artificial Sequence: Synthetic oligonucleotide
cucgcagaccucaggugug

SEQ ID NO: 751475 - RNA, 19 nt, Artificial Sequence
  Description of Artificial Sequence: Synthetic oligonucleotide
aggacuugguugacagagg

SEQ ID NO: 751476 - RNA, 19 nt, Artificial Sequence
  Description of Artificial Sequence: Synthetic oligonucleotide
cacauuuagggugcggaca

SEQ ID NO: 751477 - RNA, 19 nt, Artificial Sequence
  Description of Artificial Sequence: Synthetic oligonucleotide
aucuucggcugauuugcaa

SEQ ID NO: 751478 - RNA, 19 nt, Artificial Sequence
  Description of Artificial Sequence: Synthetic oligonucleotide
aggacggaaaccagcuuug

SEQ ID NO: 751479 - RNA, 19 nt, Artificial Sequence
  Description of Artificial Sequence: Synthetic oligonucleotide
cuagacacagcacacuaau

SEQ ID NO: 751480 - RNA, 19 nt, Artificial Sequence
  Description of Artificial Sequence: Synthetic oligonucleotide
uccucgagcgauccccauc

SEQ ID NO: 751481 - RNA, 19 nt, Artificial Sequence
  Description of Artificial Sequence: Synthetic oligonucleotide
uaccuucaacauaggccac

SEQ ID NO: 751482 - RNA, 19 nt, Artificial Sequence
  Description of Artificial Sequence: Synthetic oligonucleotide
cuacacacacacacacaca

SEQ ID NO: 751483 - RNA, 19 nt, Artificial Sequence
  Description of Artificial Sequence: Synthetic oligonucleotide
aagcacacacacacacaca

SEQ ID NO: 751484 - RNA, 19 nt, Artificial Sequence
  Description of Artificial Sequence: Synthetic oligonucleotide
uacuggauccuugcuuccu

SEQ ID NO: 751485 - RNA, 19 nt, Artificial Sequence
  Description of Artificial Sequence: Synthetic oligonucleotide
cugcuucuccuguacucac

SEQ ID NO: 751486 - RNA, 19 nt, Artificial Sequence
  Description of Artificial Sequence: Synthetic oligonucleotide
gucggguuucucaagacua

SEQ ID NO: 751487 - RNA, 19 nt, Artificial Sequence
  Description of Artificial Sequence: Synthetic oligonucleotide
gcugacuuggccaccacac

SEQ ID NO: 751488 - RNA, 19 nt, Artificial Sequence
  Description of Artificial Sequence: Synthetic oligonucleotide
ucugaacgugaagauucau

SEQ ID NO: 751489 - RNA, 19 nt, Artificial Sequence
  Description of Artificial Sequence: Synthetic oligonucleotide
aggacgguccuuagcuuuc

SEQ ID NO: 751490 - RNA, 19 nt, Artificial Sequence
  Description of Artificial Sequence: Synthetic oligonucleotide
gaggguuccuugguaccgc

SEQ ID NO: 751491 - RNA, 19 nt, Artificial Sequence
  Description of Artificial Sequence: Synthetic oligonucleotide
uucaacccagaggacggaa

SEQ ID NO: 751492 - RNA, 19 nt, Artificial Sequence
  Description of Artificial Sequence: Synthetic oligonucleotide
uuucaacccagaggacgga

SEQ ID NO: 751493 - RNA, 19 nt, Artificial Sequence
  Description of Artificial Sequence: Synthetic oligonucleotide
aggugaacccaagucuacu

SEQ ID NO: 751494 - RNA, 19 nt, Artificial Sequence
  Description of Artificial Sequence: Synthetic oligonucleotide
gguagcuaauuaggcuugg

SEQ ID NO: 751495 - RNA, 19 nt, Artificial Sequence
  Description of Artificial Sequence: Synthetic oligonucleotide
cccagguacuuugauaccc

SEQ ID NO: 751496 - RNA, 19 nt, Artificial Sequence
  Description of Artificial Sequence: Synthetic oligonucleotide
gcagaucggagcagcaggg

SEQ ID NO: 751497 - RNA, 19 nt, Artificial Sequence
  Description of Artificial Sequence: Synthetic oligonucleotide
auuaggcuugguaauucuu

SEQ ID NO: 751498 - RNA, 19 nt, Artificial Sequence
  Description of Artificial Sequence: Synthetic oligonucleotide
gggaguaaaguaucuugaa

SEQ ID NO: 751499 - RNA, 19 nt, Artificial Sequence
  Description of Artificial Sequence: Synthetic oligonucleotide
cacuacacacacacacaca

SEQ ID NO: 751500 - RNA, 19 nt, Artificial Sequence
  Description of Artificial Sequence: Synthetic oligonucleotide
gcauccucgagcgaucccc

SEQ ID NO: 751501 - RNA, 19 nt, Artificial Sequence
  Description of Artificial Sequence: Synthetic oligonucleotide
cugcagaucggagcagcag

SEQ ID NO: 751502 - RNA, 19 nt, Artificial Sequence
  Description of Artificial Sequence: Synthetic oligonucleotide
ugccccugucuuacgggcu

SEQ ID NO: 751503 - RNA, 19 nt, Artificial Sequence
  Description of Artificial Sequence: Synthetic oligonucleotide
cuacaauaugagucaugaa

SEQ ID NO: 751504 - RNA, 19 nt, Artificial Sequence
  Description of Artificial Sequence: Synthetic oligonucleotide
uggcuggugcaaugaacau

SEQ ID NO: 751505 - RNA, 19 nt, Artificial Sequence
  Description of Artificial Sequence: Synthetic oligonucleotide
cucaagacuagaaguacuu

SEQ ID NO: 751506 - RNA, 19 nt, Artificial Sequence
  Description of Artificial Sequence: Synthetic oligonucleotide
aucugaacgugaagauuca

SEQ ID NO: 751507 - RNA, 19 nt, Artificial Sequence
  Description of Artificial Sequence: Synthetic oligonucleotide
ccaguaugcuucuucgcuc

SEQ ID NO: 751508 - RNA, 19 nt, Artificial Sequence
  Description of Artificial Sequence: Synthetic oligonucleotide
cuguaccguuggaagacca

SEQ ID NO: 751509 - RNA, 19 nt, Artificial Sequence
  Description of Artificial Sequence: Synthetic oligonucleotide
gucaucucauuaacagauc

SEQ ID NO: 751510 - RNA, 19 nt, Artificial Sequence
  Description of Artificial Sequence: Synthetic oligonucleotide
gcacauuuagggugcggac

SEQ ID NO: 751511 - RNA, 19 nt, Artificial Sequence
  Description of Artificial Sequence: Synthetic oligonucleotide
gcaugauuguccuuaucua

SEQ ID NO: 751512 - RNA, 19 nt, Artificial Sequence
  Description of Artificial Sequence: Synthetic oligonucleotide
gcuguaucgacaaggcaga

SEQ ID NO: 751513 - RNA, 19 nt, Artificial Sequence
  Description of Artificial Sequence: Synthetic oligonucleotide
ccuugguaccgcuggguag

SEQ ID NO: 751514 - RNA, 19 nt, Artificial Sequence
  Description of Artificial Sequence: Synthetic oligonucleotide
cgagcgauccccaucagca

SEQ ID NO: 751515 - RNA, 19 nt, Artificial Sequence
  Description of Artificial Sequence: Synthetic oligonucleotide
ugaacaucuucggcugauu

SEQ ID NO: 751516 - RNA, 19 nt, Artificial Sequence
  Description of Artificial Sequence: Synthetic oligonucleotide
auucuauaauugggaguaa

SEQ ID NO: 751517 - RNA, 19 nt, Artificial Sequence
  Description of Artificial Sequence: Synthetic oligonucleotide
ggcagaauuccguauuggu

SEQ ID NO: 751518 - RNA, 19 nt, Artificial Sequence
  Description of Artificial Sequence: Synthetic oligonucleotide
acacacacacacacacaca

SEQ ID NO: 751519 - RNA, 19 nt, Artificial Sequence
  Description of Artificial Sequence: Synthetic oligonucleotide
acacacacacacacacacu

SEQ ID NO: 751520 - RNA, 19 nt, Artificial Sequence
  Description of Artificial Sequence: Synthetic oligonucleotide
cacacacuacacacacaca

SEQ ID NO: 751521 - RNA, 19 nt, Artificial Sequence
  Description of Artificial Sequence: Synthetic oligonucleotide
gaguccaagccaagaaagu

SEQ ID NO: 751522 - RNA, 19 nt, Artificial Sequence
  Description of Artificial Sequence: Synthetic oligonucleotide
cagcauccucgagcgaucc

SEQ ID NO: 751523 - RNA, 19 nt, Artificial Sequence
  Description of Artificial Sequence: Synthetic oligonucleotide
guaccguuggaagaccaua

SEQ ID NO: 751524 - RNA, 19 nt, Artificial Sequence
  Description of Artificial Sequence: Synthetic oligonucleotide
guagacaacuggcguucaa

SEQ ID NO: 751525 - RNA, 19 nt, Artificial Sequence
  Description of Artificial Sequence: Synthetic oligonucleotide
ggauucaucugaacgugaa

SEQ ID NO: 751526 - RNA, 19 nt, Artificial Sequence
  Description of Artificial Sequence: Synthetic oligonucleotide
ggucuauggucagauuuga

SEQ ID NO: 751527 - RNA, 19 nt, Artificial Sequence
  Description of Artificial Sequence: Synthetic oligonucleotide
cacacacacuacacacaca

SEQ ID NO: 751528 - RNA, 19 nt, Artificial Sequence
  Description of Artificial Sequence: Synthetic oligonucleotide
ggguagacaacuggcguuc

SEQ ID NO: 751529 - RNA, 19 nt, Artificial Sequence
  Description of Artificial Sequence: Synthetic oligonucleotide
  modified_base (3)..(3): a, c, u, g, unknown or other
gunaggcagagcaugccau

SEQ ID NO: 751530 - RNA, 19 nt, Artificial Sequence
  Description of Artificial Sequence: Synthetic oligonucleotide
gaauuccguauugguaccu

SEQ ID NO: 751531 - RNA, 19 nt, Artificial Sequence
  Description of Artificial Sequence: Synthetic oligonucleotide
cagcuguaucgacaaggca

SEQ ID NO: 751532 - RNA, 19 nt, Artificial Sequence
  Description of Artificial Sequence: Synthetic oligonucleotide
cauccucgagcgaucccca

SEQ ID NO: 751533 - RNA, 19 nt, Artificial Sequence
  Description of Artificial Sequence: Synthetic oligonucleotide
acgggcuuugucccaggua

SEQ ID NO: 751534 - RNA, 19 nt, Artificial Sequence
  Description of Artificial Sequence: Synthetic oligonucleotide
cuaauuaggcuugguaauu

SEQ ID NO: 751535 - RNA, 19 nt, Artificial Sequence
  Description of Artificial Sequence: Synthetic oligonucleotide
caucuucggcugauuugca

SEQ ID NO: 751536 - RNA, 19 nt, Artificial Sequence
  Description of Artificial Sequence: Synthetic oligonucleotide
gagugauauuuggguucug

SEQ ID NO: 751537 - RNA, 19 nt, Artificial Sequence
  Description of Artificial Sequence: Synthetic oligonucleotide
guuuaggaucaaaaugguu

SEQ ID NO: 751538 - RNA, 19 nt, Artificial Sequence
  Description of Artificial Sequence: Synthetic oligonucleotide
auucaccgcagggaacaaa

SEQ ID NO: 751539 - RNA, 19 nt, Artificial Sequence
  Description of Artificial Sequence: Synthetic oligonucleotide
guccuccuuuggaggacgg

SEQ ID NO: 751540 - RNA, 19 nt, Artificial Sequence
  Description of Artificial Sequence: Synthetic oligonucleotide
ggacucgcagaccucaggu

SEQ ID NO: 751541 - RNA, 19 nt, Artificial Sequence
  Description of Artificial Sequence: Synthetic oligonucleotide
ccucgagcgauccccauca

SEQ ID NO: 751542 - RNA, 19 nt, Artificial Sequence
  Description of Artificial Sequence: Synthetic oligonucleotide
ggugugaaugaaaagccuu

SEQ ID NO: 751543 - RNA, 19 nt, Artificial Sequence
  Description of Artificial Sequence: Synthetic oligonucleotide
cucgagcgauccccaucag

SEQ ID NO: 751544 - RNA, 19 nt, Artificial Sequence
  Description of Artificial Sequence: Synthetic oligonucleotide
ggguuucucaagacuagaa

SEQ ID NO: 751545 - RNA, 19 nt, Artificial Sequence
  Description of Artificial Sequence: Synthetic oligonucleotide
auccagugacccaauucua

SEQ ID NO: 751546 - RNA, 19 nt, Artificial Sequence
  Description of Artificial Sequence: Synthetic oligonucleotide
uugguaccgcuggguagac

SEQ ID NO: 751547 - RNA, 19 nt, Artificial Sequence
  Description of Artificial Sequence: Synthetic oligonucleotide
cuggugccggccaagacuu

SEQ ID NO: 751548 - RNA, 19 nt, Artificial Sequence
  Description of Artificial Sequence: Synthetic oligonucleotide
ccauucuauaauugggagu

SEQ ID NO: 751549 - RNA, 19 nt, Artificial Sequence
  Description of Artificial Sequence: Synthetic oligonucleotide
gucuauggucagauuugaa

SEQ ID NO: 751550 - RNA, 19 nt, Artificial Sequence
  Description of Artificial Sequence: Synthetic oligonucleotide
ggugguggacucgcagacc

SEQ ID NO: 751551 - RNA, 19 nt, Artificial Sequence
  Description of Artificial Sequence: Synthetic oligonucleotide
auccucgagcgauccccau

SEQ ID NO: 751552 - RNA, 19 nt, Artificial Sequence
  Description of Artificial Sequence: Synthetic oligonucleotide
ugguaccgcuggguagaca

SEQ ID NO: 751553 - RNA, 19 nt, Artificial Sequence
  Description of Artificial Sequence: Synthetic oligonucleotide
guagcuaauuaggcuuggu

SEQ ID NO: 751554 - RNA, 19 nt, Artificial Sequence
  Description of Artificial Sequence: Synthetic oligonucleotide
cacacacacacaccacggu

SEQ ID NO: 751555 - RNA, 19 nt, Artificial Sequence
  Description of Artificial Sequence: Synthetic oligonucleotide
gcugaacaacuuuuggguu

SEQ ID NO: 751556 - RNA, 19 nt, Artificial Sequence
  Description of Artificial Sequence: Synthetic oligonucleotide
gacuuccccaccagcacau

SEQ ID NO: 751557 - RNA, 19 nt, Artificial Sequence
  Description of Artificial Sequence: Synthetic oligonucleotide
guaccgcuggguagacaac

SEQ ID NO: 751558 - RNA, 19 nt, Artificial Sequence
  Description of Artificial Sequence: Synthetic oligonucleotide
ccacgguacuggauccuug

SEQ ID NO: 751559 - RNA, 19 nt, Artificial Sequence
  Description of Artificial Sequence: Synthetic oligonucleotide
cagaucggagcagcaggga

SEQ ID NO: 751560 - RNA, 19 nt, Artificial Sequence
  Description of Artificial Sequence: Synthetic oligonucleotide
gcuucacacggagugauau

SEQ ID NO: 751561 - RNA, 19 nt, Artificial Sequence
  Description of Artificial Sequence: Synthetic oligonucleotide
  modified_base (8)..(8): a, c, u, g, unknown or other
cacaggunaggcagagcau

SEQ ID NO: 751562 - RNA, 19 nt, Artificial Sequence
  Description of Artificial Sequence: Synthetic oligonucleotide
gguggugaacuguggucua

SEQ ID NO: 751563 - RNA, 19 nt, Artificial Sequence
  Description of Artificial Sequence: Synthetic oligonucleotide
ccguuggaagaccauaccu

SEQ ID NO: 751564 - RNA, 19 nt, Artificial Sequence
  Description of Artificial Sequence: Synthetic oligonucleotide
uggugccggccaagacuuc

SEQ ID NO: 751565 - RNA, 19 nt, Artificial Sequence
  Description of Artificial Sequence: Synthetic oligonucleotide
cuucacacggagugauauu

SEQ ID NO: 751566 - RNA, 19 nt, Artificial Sequence
  Description of Artificial Sequence: Synthetic oligonucleotide
gguagacaacuggcguuca

SEQ ID NO: 751567 - RNA, 19 nt, Artificial Sequence
  Description of Artificial Sequence: Synthetic oligonucleotide
gcacacacacacacacaca

SEQ ID NO: 751568 - RNA, 19 nt, Artificial Sequence
  Description of Artificial Sequence: Synthetic oligonucleotide
ggcguucaagucugcagau

SEQ ID NO: 751569 - RNA, 19 nt, Artificial Sequence
  Description of Artificial Sequence: Synthetic oligonucleotide
gcguucaagucugcagauc

SEQ ID NO: 751570 - RNA, 19 nt, Artificial Sequence
  Description of Artificial Sequence: Synthetic oligonucleotide
cguuggaagaccauaccuu

SEQ ID NO: 751571 - RNA, 19 nt, Artificial Sequence
  Description of Artificial Sequence: Synthetic oligonucleotide
ggauccuugcuuccuucuu

SEQ ID NO: 751572 - RNA, 19 nt, Artificial Sequence
  Description of Artificial Sequence: Synthetic oligonucleotide
ggugccggccaagacuucu

SEQ ID NO: 751573 - RNA, 19 nt, Artificial Sequence
  Description of Artificial Sequence: Synthetic oligonucleotide
cccauucguaagaaagaau

SEQ ID NO: 751574 - RNA, 19 nt, Artificial Sequence
  Description of Artificial Sequence: Synthetic oligonucleotide
gggagacaaugaacuguaa

SEQ ID NO: 751575 - RNA, 19 nt, Artificial Sequence
  Description of Artificial Sequence: Synthetic oligonucleotide
ccccaacaucaggaguccc

SEQ ID NO: 751576 - RNA, 19 nt, Artificial Sequence
  Description of Artificial Sequence: Synthetic oligonucleotide
gcagaccucaggugugaau

SEQ ID NO: 751577 - RNA, 19 nt, Artificial Sequence
  Description of Artificial Sequence: Synthetic oligonucleotide
ggaggacgguccuuagcuu

SEQ ID NO: 751578 - RNA, 19 nt, Artificial Sequence
  Description of Artificial Sequence: Synthetic oligonucleotide
cguauugguaccucuucuu

SEQ ID NO: 751579 - RNA, 19 nt, Artificial Sequence
  Description of Artificial Sequence: Synthetic oligonucleotide
gggugcggacagacuuccc

SEQ ID NO: 751580 - RNA, 19 nt, Artificial Sequence
  Description of Artificial Sequence: Synthetic oligonucleotide
cggguuucucaagacuaga

SEQ ID NO: 751581 - RNA, 19 nt, Artificial Sequence
  Description of Artificial Sequence: Synthetic oligonucleotide
ggacgguccuuagcuuucu

SEQ ID NO: 751582 - RNA, 19 nt, Artificial Sequence
  Description of Artificial Sequence: Synthetic oligonucleotide
cuggugcaaugaacaucuu

SEQ ID NO: 751583 - RNA, 19 nt, Artificial Sequence
  Description of Artificial Sequence: Synthetic oligonucleotide
cuuaauacuaacuggaaag

SEQ ID NO: 751584 - RNA, 19 nt, Artificial Sequence
  Description of Artificial Sequence: Synthetic oligonucleotide
ucuacuauguucuggaagc

SEQ ID NO: 751585 - RNA, 19 nt, Artificial Sequence
  Description of Artificial Sequence: Synthetic oligonucleotide
agaucaguggcuuaaacag

SEQ ID NO: 751586 - RNA, 19 nt, Artificial Sequence
  Description of Artificial Sequence: Synthetic oligonucleotide
ugcauuaccagacucuggg

SEQ ID NO: 751587 - RNA, 19 nt, Artificial Sequence
  Description of Artificial Sequence: Synthetic oligonucleotide
uucaggguaugguagaucg

SEQ ID NO: 751588 - RNA, 19 nt, Artificial Sequence
  Description of Artificial Sequence: Synthetic oligonucleotide
auguggaucaccauggucc

SEQ ID NO: 751589 - RNA, 19 nt, Artificial Sequence
  Description of Artificial Sequence: Synthetic oligonucleotide
uuaucucucgguaaguccc

SEQ ID NO: 751590 - RNA, 19 nt, Artificial Sequence
  Description of Artificial Sequence: Synthetic oligonucleotide
gacacaaacgcccugguac

SEQ ID NO: 751591 - RNA, 19 nt, Artificial Sequence
  Description of Artificial Sequence: Synthetic oligonucleotide
ugaggauucacucaucaaa

SEQ ID NO: 751592 - RNA, 19 nt, Artificial Sequence
  Description of Artificial Sequence: Synthetic oligonucleotide
aaucaggcacuucuggguc

SEQ ID NO: 751593 - RNA, 19 nt, Artificial Sequence
  Description of Artificial Sequence: Synthetic oligonucleotide
acuguaucccuuucugucc

SEQ ID NO: 751594 - RNA, 19 nt, Artificial Sequence
  Description of Artificial Sequence: Synthetic oligonucleotide
acuccgaacaugcaggccg

SEQ ID NO: 751595 - RNA, 19 nt, Artificial Sequence
  Description of Artificial Sequence: Synthetic oligonucleotide
agggaugcuaugcugggcc

SEQ ID NO: 751596 - RNA, 19 nt, Artificial Sequence
  Description of Artificial Sequence: Synthetic oligonucleotide
aguguaaccggauugcgug

SEQ ID NO: 751597 - RNA, 19 nt, Artificial Sequence
  Description of Artificial Sequence: Synthetic oligonucleotide
ucuuaauacuaacuggaaa

SEQ ID NO: 751598 - RNA, 19 nt, Artificial Sequence
  Description of Artificial Sequence: Synthetic oligonucleotide
uaugcucaaaggagaaggg

SEQ ID NO: 751599 - RNA, 19 nt, Artificial Sequence
  Description of Artificial Sequence: Synthetic oligonucleotide
cuaccuaaaugacucacgg

SEQ ID NO: 751600 - RNA, 19 nt, Artificial Sequence
  Description of Artificial Sequence: Synthetic oligonucleotide
ucccucuuaauacuaacug

SEQ ID NO: 751601 - RNA, 19 nt, Artificial Sequence
  Description of Artificial Sequence: Synthetic oligonucleotide
aaccguagaaccacgugcc

SEQ ID NO: 751602 - RNA, 19 nt, Artificial Sequence
  Description of Artificial Sequence: Synthetic oligonucleotide
gaaccguagaaccacgugc

SEQ ID NO: 751603 - RNA, 19 nt, Artificial Sequence
  Description of Artificial Sequence: Synthetic oligonucleotide
uaaucuaaggucgggaagc

SEQ ID NO: 751604 - RNA, 19 nt, Artificial Sequence
  Description of Artificial Sequence: Synthetic oligonucleotide
ugagagacccuccauaauc

SEQ ID NO: 751605 - RNA, 19 nt, Artificial Sequence
  Description of Artificial Sequence: Synthetic oligonucleotide
agaucaucgauccugguau

SEQ ID NO: 751606 - RNA, 19 nt, Artificial Sequence
  Description of Artificial Sequence: Synthetic oligonucleotide
ucuaaggucgggaagcccu

SEQ ID NO: 751607 - RNA, 19 nt, Artificial Sequence
  Description of Artificial Sequence: Synthetic oligonucleotide
aguugauuagacuuucccu

SEQ ID NO: 751608 - RNA, 19 nt, Artificial Sequence
  Description of Artificial Sequence: Synthetic oligonucleotide
aacagugcgaacccuccag

SEQ ID NO: 751609 - RNA, 19 nt, Artificial Sequence
  Description of Artificial Sequence: Synthetic oligonucleotide
cuaggugugaccaagaacu

SEQ ID NO: 751610 - RNA, 19 nt, Artificial Sequence
  Description of Artificial Sequence: Synthetic oligonucleotide
acacaaacgcccugguacc

SEQ ID NO: 751611 - RNA, 19 nt, Artificial Sequence
  Description of Artificial Sequence: Synthetic oligonucleotide
ucuauguugcacagguuca

SEQ ID NO: 751612 - RNA, 19 nt, Artificial Sequence
  Description of Artificial Sequence: Synthetic oligonucleotide
gaauagggcugucuguccg

SEQ ID NO: 751613 - RNA, 19 nt, Artificial Sequence
  Description of Artificial Sequence: Synthetic oligonucleotide
uuugauugagaaccaucug

SEQ ID NO: 751614 - RNA, 19 nt, Artificial Sequence
  Description of Artificial Sequence: Synthetic oligonucleotide
aaugacucacggcggggac

SEQ ID NO: 751615 - RNA, 19 nt, Artificial Sequence
  Description of Artificial Sequence: Synthetic oligonucleotide
ugggucacgucuauguugc

SEQ ID NO: 751616 - RNA, 19 nt, Artificial Sequence
  Description of Artificial Sequence: Synthetic oligonucleotide
agaauagggcugucugucc

SEQ ID NO: 751617 - RNA, 19 nt, Artificial Sequence
  Description of Artificial Sequence: Synthetic oligonucleotide
uaaaccauguccccuacua

SEQ ID NO: 751618 - RNA, 19 nt, Artificial Sequence
  Description of Artificial Sequence: Synthetic oligonucleotide
aaaccauguccccuacuag

SEQ ID NO: 751619 - RNA, 19 nt, Artificial Sequence
  Description of Artificial Sequence: Synthetic oligonucleotide
agggaucacaaccaacagg

SEQ ID NO: 751620 - RNA, 19 nt, Artificial Sequence
  Description of Artificial Sequence: Synthetic oligonucleotide
cugguauugacuccggaag

SEQ ID NO: 751621 - RNA, 19 nt, Artificial Sequence
  Description of Artificial Sequence: Synthetic oligonucleotide
gaaaccuggggucauugug

SEQ ID NO: 751622 - RNA, 19 nt, Artificial Sequence
  Description of Artificial Sequence: Synthetic oligonucleotide
auucccucuuaauacuaac

SEQ ID NO: 751623 - RNA, 19 nt, Artificial Sequence
  Description of Artificial Sequence: Synthetic oligonucleotide
gaccuuugggaugacaagg

SEQ ID NO: 751624 - RNA, 19 nt, Artificial Sequence
  Description of Artificial Sequence: Synthetic oligonucleotide
gaugaaccagacccgaaug

SEQ ID NO: 751625 - RNA, 19 nt, Artificial Sequence
  Description of Artificial Sequence: Synthetic oligonucleotide
uguucuuagcagcugccug

SEQ ID NO: 751626 - RNA, 19 nt, Artificial Sequence
  Description of Artificial Sequence: Synthetic oligonucleotide
cuaaaugacucacggcggg

SEQ ID NO: 751627 - RNA, 19 nt, Artificial Sequence
  Description of Artificial Sequence: Synthetic oligonucleotide
gcuuaaacagcaccaaggg

SEQ ID NO: 751628 - RNA, 19 nt, Artificial Sequence
  Description of Artificial Sequence: Synthetic oligonucleotide
aucuuccgcaccuugauga

SEQ ID NO: 751629 - RNA, 19 nt, Artificial Sequence
  Description of Artificial Sequence: Synthetic oligonucleotide
aacaugcaggccgaugugg

SEQ ID NO: 751630 - RNA, 19 nt, Artificial Sequence
  Description of Artificial Sequence: Synthetic oligonucleotide
ucugcguccucugaguggg

SEQ ID NO: 751631 - RNA, 19 nt, Artificial Sequence
  Description of Artificial Sequence: Synthetic oligonucleotide
ucucgguaagucccaaucc

SEQ ID NO: 751632 - RNA, 19 nt, Artificial Sequence
  Description of Artificial Sequence: Synthetic oligonucleotide
ggcagaaccaaccuuacug

SEQ ID NO: 751633 - RNA, 19 nt, Artificial Sequence
  Description of Artificial Sequence: Synthetic oligonucleotide
uuccgcaccuugaugaacc

SEQ ID NO: 751634 - RNA, 19 nt, Artificial Sequence
  Description of Artificial Sequence: Synthetic oligonucleotide
guaaucuaaggucgggaag

SEQ ID NO: 751635 - RNA, 19 nt, Artificial Sequence
  Description of Artificial Sequence: Synthetic oligonucleotide
acgucuauguugcacaggu

SEQ ID NO: 751636 - RNA, 19 nt, Artificial Sequence
  Description of Artificial Sequence: Synthetic oligonucleotide
agugggauauauuccauaa

SEQ ID NO: 751637 - RNA, 19 nt, Artificial Sequence
  Description of Artificial Sequence: Synthetic oligonucleotide
uggucaugcugaauuaucu

SEQ ID NO: 751638 - RNA, 19 nt, Artificial Sequence
  Description of Artificial Sequence: Synthetic oligonucleotide
acacagagaaucaccaugg

SEQ ID NO: 751639 - RNA, 19 nt, Artificial Sequence
  Description of Artificial Sequence: Synthetic oligonucleotide
aacucgggacugaagaggg

SEQ ID NO: 751640 - RNA, 19 nt, Artificial Sequence
  Description of Artificial Sequence: Synthetic oligonucleotide
ugguauugacuccggaagc

SEQ ID NO: 751641 - RNA, 19 nt, Artificial Sequence
  Description of Artificial Sequence: Synthetic oligonucleotide
uagaucgccuucaucuucc

SEQ ID NO: 751642 - RNA, 19 nt, Artificial Sequence
  Description of Artificial Sequence: Synthetic oligonucleotide
aacccucuggcgguggucc

SEQ ID NO: 751643 - RNA, 19 nt, Artificial Sequence
  Description of Artificial Sequence: Synthetic oligonucleotide
gggaucacaaccaacaggc

SEQ ID NO: 751644 - RNA, 19 nt, Artificial Sequence
  Description of Artificial Sequence: Synthetic oligonucleotide
cacagucgcagguaggagg

SEQ ID NO: 751645 - RNA, 19 nt, Artificial Sequence
  Description of Artificial Sequence: Synthetic oligonucleotide
auaaucagcaggauggcca

SEQ ID NO: 751646 - RNA, 19 nt, Artificial Sequence
  Description of Artificial Sequence: Synthetic oligonucleotide
gauggggccaucugaauuc

SEQ ID NO: 751647 - RNA, 19 nt, Artificial Sequence
  Description of Artificial Sequence: Synthetic oligonucleotide
acgugccucuucuaagugc

SEQ ID NO: 751648 - RNA, 19 nt, Artificial Sequence
  Description of Artificial Sequence: Synthetic oligonucleotide
acagugcgaacccuccagc

SEQ ID NO: 751649 - RNA, 19 nt, Artificial Sequence
  Description of Artificial Sequence: Synthetic oligonucleotide
aagguaaucuaaggucggg

SEQ ID NO: 751650 - RNA, 19 nt, Artificial Sequence
  Description of Artificial Sequence: Synthetic oligonucleotide
uucccucuuaauacuaacu

SEQ ID NO: 751651 - RNA, 19 nt, Artificial Sequence
  Description of Artificial Sequence: Synthetic oligonucleotide
uguccgcaaagucaaacuc

SEQ ID NO: 751652 - RNA, 19 nt, Artificial Sequence
  Description of Artificial Sequence: Synthetic oligonucleotide
ugaauuaucucagcauccu

SEQ ID NO: 751653 - RNA, 19 nt, Artificial Sequence
  Description of Artificial Sequence: Synthetic oligonucleotide
ucgauccugguauugacuc

SEQ ID NO: 751654 - RNA, 19 nt, Artificial Sequence
  Description of Artificial Sequence: Synthetic oligonucleotide
acugaugggcgcaagauca

SEQ ID NO: 751655 - RNA, 19 nt, Artificial Sequence
  Description of Artificial Sequence: Synthetic oligonucleotide
aaguacuuccgagagcugu

SEQ ID NO: 751656 - RNA, 19 nt, Artificial Sequence
  Description of Artificial Sequence: Synthetic oligonucleotide
aaccggauugcguggagga

SEQ ID NO: 751657 - RNA, 19 nt, Artificial Sequence
  Description of Artificial Sequence: Synthetic oligonucleotide
ugaugaaccagacccgaau

SEQ ID NO: 751658 - RNA, 19 nt, Artificial Sequence
  Description of Artificial Sequence: Synthetic oligonucleotide
ugacuaugcagguuggcuc

SEQ ID NO: 751659 - RNA, 19 nt, Artificial Sequence
  Description of Artificial Sequence: Synthetic oligonucleotide
gaucacaaccaacaggcaa

SEQ ID NO: 751660 - RNA, 19 nt, Artificial Sequence
  Description of Artificial Sequence: Synthetic oligonucleotide
ugcacaaguugauuagacu

SEQ ID NO: 751661 - RNA, 19 nt, Artificial Sequence
  Description of Artificial Sequence: Synthetic oligonucleotide
agaaccacgugccucuucu

SEQ ID NO: 751662 - RNA, 19 nt, Artificial Sequence
  Description of Artificial Sequence: Synthetic oligonucleotide
acuaacuggaaaggcgugg

SEQ ID NO: 751663 - RNA, 19 nt, Artificial Sequence
  Description of Artificial Sequence: Synthetic oligonucleotide
uguccggaggccaggaggc

SEQ ID NO: 751664 - RNA, 19 nt, Artificial Sequence
  Description of Artificial Sequence: Synthetic oligonucleotide
uugcauuaccagacucugg

SEQ ID NO: 751665 - RNA, 19 nt, Artificial Sequence
  Description of Artificial Sequence: Synthetic oligonucleotide
ugcugaauuaucucagcau

SEQ ID NO: 751666 - RNA, 19 nt, Artificial Sequence
  Description of Artificial Sequence: Synthetic oligonucleotide
ggcuuaaacagcaccaagg

SEQ ID NO: 751667 - RNA, 19 nt, Artificial Sequence
  Description of Artificial Sequence: Synthetic oligonucleotide
ugguccaaaguacuuccga

SEQ ID NO: 751668 - RNA, 19 nt, Artificial Sequence
  Description of Artificial Sequence: Synthetic oligonucleotide
ccgaauaugcucaaaggag

SEQ ID NO: 751669 - RNA, 19 nt, Artificial Sequence
  Description of Artificial Sequence: Synthetic oligonucleotide
cuaacuggaaaggcguggg

SEQ ID NO: 751670 - RNA, 19 nt, Artificial Sequence
  Description of Artificial Sequence: Synthetic oligonucleotide
ucgguaagucccaauccca

SEQ ID NO: 751671 - RNA, 19 nt, Artificial Sequence
  Description of Artificial Sequence: Synthetic oligonucleotide
acuugaaaccggccccggc

SEQ ID NO: 751672 - RNA, 19 nt, Artificial Sequence
  Description of Artificial Sequence: Synthetic oligonucleotide
cugugcacaaguugauuag

SEQ ID NO: 751673 - RNA, 19 nt, Artificial Sequence
  Description of Artificial Sequence: Synthetic oligonucleotide
gacccgaauguucuuagca

SEQ ID NO: 751674 - RNA, 19 nt, Artificial Sequence
  Description of Artificial Sequence: Synthetic oligonucleotide
agcaucuacuauguucugg

SEQ ID NO: 751675 - RNA, 19 nt, Artificial Sequence
  Description of Artificial Sequence: Synthetic oligonucleotide
uucugcguccucugagugg

SEQ ID NO: 751676 - RNA, 19 nt, Artificial Sequence
  Description of Artificial Sequence: Synthetic oligonucleotide
auauuccauaaaccauguc

SEQ ID NO: 751677 - RNA, 19 nt, Artificial Sequence
  Description of Artificial Sequence: Synthetic oligonucleotide
uaccuaaaugacucacggc

SEQ ID NO: 751678 - RNA, 19 nt, Artificial Sequence
  Description of Artificial Sequence: Synthetic oligonucleotide
uaaaugacucacggcgggg

SEQ ID NO: 751679 - RNA, 19 nt, Artificial Sequence
  Description of Artificial Sequence: Synthetic oligonucleotide
aggucgggaagcccugugc

SEQ ID NO: 751680 - RNA, 19 nt, Artificial Sequence
  Description of Artificial Sequence: Synthetic oligonucleotide
caggguaugguagaucgcc

SEQ ID NO: 751681 - RNA, 19 nt, Artificial Sequence
  Description of Artificial Sequence: Synthetic oligonucleotide
ugcuaugcugggccaacag

SEQ ID NO: 751682 - RNA, 19 nt, Artificial Sequence
  Description of Artificial Sequence: Synthetic oligonucleotide
ucagauacugaugggcgca

SEQ ID NO: 751683 - RNA, 19 nt, Artificial Sequence
  Description of Artificial Sequence: Synthetic oligonucleotide
accuaccuaaaugacucac

SEQ ID NO: 751684 - RNA, 19 nt, Artificial Sequence
  Description of Artificial Sequence: Synthetic oligonucleotide
cucagauacugaugggcgc

SEQ ID NO: 751685 - RNA, 19 nt, Artificial Sequence
  Description of Artificial Sequence: Synthetic oligonucleotide
uacuaacuggaaaggcgug

SEQ ID NO: 751686 - RNA, 19 nt, Artificial Sequence
  Description of Artificial Sequence: Synthetic oligonucleotide
ccuacuaggaggaaaccag

SEQ ID NO: 751687 - RNA, 19 nt, Artificial Sequence
  Description of Artificial Sequence: Synthetic oligonucleotide
ucccauaagcaucuacuau

SEQ ID NO: 751688 - RNA, 19 nt, Artificial Sequence
  Description of Artificial Sequence: Synthetic oligonucleotide
gauguaguguggggcaagg

SEQ ID NO: 751689 - RNA, 19 nt, Artificial Sequence
  Description of Artificial Sequence: Synthetic oligonucleotide
ugcugguuauccugggacc

SEQ ID NO: 751690 - RNA, 19 nt, Artificial Sequence
  Description of Artificial Sequence: Synthetic oligonucleotide
aggguggugcugguuaucc

SEQ ID NO: 751691 - RNA, 19 nt, Artificial Sequence
  Description of Artificial Sequence: Synthetic oligonucleotide
aagacugguguuguuggga

SEQ ID NO: 751692 - RNA, 19 nt, Artificial Sequence
  Description of Artificial Sequence: Synthetic oligonucleotide
gauguggaucaccaugguc

SEQ ID NO: 751693 - RNA, 19 nt, Artificial Sequence
  Description of Artificial Sequence: Synthetic oligonucleotide
cuucuaagugcaaacugga

SEQ ID NO: 751694 - RNA, 19 nt, Artificial Sequence
  Description of Artificial Sequence: Synthetic oligonucleotide
gauacugaugggcgcaaga

SEQ ID NO: 751695 - RNA, 19 nt, Artificial Sequence
  Description of Artificial Sequence: Synthetic oligonucleotide
aaaugacucacggcgggga

SEQ ID NO: 751696 - RNA, 19 nt, Artificial Sequence
  Description of Artificial Sequence: Synthetic oligonucleotide
gaagccgugugugaacuug

SEQ ID NO: 751697 - RNA, 19 nt, Artificial Sequence
  Description of Artificial Sequence: Synthetic oligonucleotide
cuguccggaggccaggagg

SEQ ID NO: 751698 - RNA, 19 nt, Artificial Sequence
  Description of Artificial Sequence: Synthetic oligonucleotide
acgaugaggaaacacugua

SEQ ID NO: 751699 - RNA, 19 nt, Artificial Sequence
  Description of Artificial Sequence: Synthetic oligonucleotide
acuaggaggaaaccaguuu

SEQ ID NO: 751700 - RNA, 19 nt, Artificial Sequence
  Description of Artificial Sequence: Synthetic oligonucleotide
aaccagacccgaauguucu

SEQ ID NO: 751701 - RNA, 19 nt, Artificial Sequence
  Description of Artificial Sequence: Synthetic oligonucleotide
uacugaugggcgcaagauc

SEQ ID NO: 751702 - RNA, 19 nt, Artificial Sequence
  Description of Artificial Sequence: Synthetic oligonucleotide
agggauucgacuccugaaa

SEQ ID NO: 751703 - RNA, 19 nt, Artificial Sequence
  Description of Artificial Sequence: Synthetic oligonucleotide
gguccaaaguacuuccgag

SEQ ID NO: 751704 - RNA, 19 nt, Artificial Sequence
  Description of Artificial Sequence: Synthetic oligonucleotide
cacccaugugacuaugcag

SEQ ID NO: 751705 - RNA, 19 nt, Artificial Sequence
  Description of Artificial Sequence: Synthetic oligonucleotide
acucacggcggggacaggc

SEQ ID NO: 751706 - RNA, 19 nt, Artificial Sequence
  Description of Artificial Sequence: Synthetic oligonucleotide
guuugauugagaaccaucu

SEQ ID NO: 751707 - RNA, 19 nt, Artificial Sequence
  Description of Artificial Sequence: Synthetic oligonucleotide
cccucuuaauacuaacugg

SEQ ID NO: 751708 - RNA, 19 nt, Artificial Sequence
  Description of Artificial Sequence: Synthetic oligonucleotide
uauugacuccggaagccau

SEQ ID NO: 751709 - RNA, 19 nt, Artificial Sequence
  Description of Artificial Sequence: Synthetic oligonucleotide
ggcauagaauuuauucugg

SEQ ID NO: 751710 - RNA, 19 nt, Artificial Sequence
  Description of Artificial Sequence: Synthetic oligonucleotide
ugugcacaaguugauuaga

SEQ ID NO: 751711 - RNA, 19 nt, Artificial Sequence
  Description of Artificial Sequence: Synthetic oligonucleotide
uaaccggauugcguggagg

SEQ ID NO: 751712 - RNA, 19 nt, Artificial Sequence
  Description of Artificial Sequence: Synthetic oligonucleotide
accacgaugaggaaacacu

SEQ ID NO: 751713 - RNA, 19 nt, Artificial Sequence
  Description of Artificial Sequence: Synthetic oligonucleotide
ucaucgauccugguauuga

SEQ ID NO: 751714 - RNA, 19 nt, Artificial Sequence
  Description of Artificial Sequence: Synthetic oligonucleotide
aggugugaccaagaacucg

SEQ ID NO: 751715 - RNA, 19 nt, Artificial Sequence
  Description of Artificial Sequence: Synthetic oligonucleotide
cuuaaacagcaccaaggga

SEQ ID NO: 751716 - RNA, 19 nt, Artificial Sequence
  Description of Artificial Sequence: Synthetic oligonucleotide
caaaucaaggcaggccugc

SEQ ID NO: 751717 - RNA, 19 nt, Artificial Sequence
  Description of Artificial Sequence: Synthetic oligonucleotide
aguugagaguucccagaug

SEQ ID NO: 751718 - RNA, 19 nt, Artificial Sequence
  Description of Artificial Sequence: Synthetic oligonucleotide
ugcagaacccucuggcggu

SEQ ID NO: 751719 - RNA, 19 nt, Artificial Sequence
  Description of Artificial Sequence: Synthetic oligonucleotide
ccuaaaugacucacggcgg

SEQ ID NO: 751720 - RNA, 19 nt, Artificial Sequence
  Description of Artificial Sequence: Synthetic oligonucleotide
gaugggcgcaagaucagug

SEQ ID NO: 751721 - RNA, 19 nt, Artificial Sequence
  Description of Artificial Sequence: Synthetic oligonucleotide
gugcgaacccuccagccag

SEQ ID NO: 751722 - RNA, 19 nt, Artificial Sequence
  Description of Artificial Sequence: Synthetic oligonucleotide
guguaaccggauugcgugg

SEQ ID NO: 751723 - RNA, 19 nt, Artificial Sequence
  Description of Artificial Sequence: Synthetic oligonucleotide
accaaaguugagaguuccc

SEQ ID NO: 751724 - RNA, 19 nt, Artificial Sequence
  Description of Artificial Sequence: Synthetic oligonucleotide
ucaggguaugguagaucgc

SEQ ID NO: 751725 - RNA, 19 nt, Artificial Sequence
  Description of Artificial Sequence: Synthetic oligonucleotide
agugcgaacccuccagcca

SEQ ID NO: 751726 - RNA, 19 nt, Artificial Sequence
  Description of Artificial Sequence: Synthetic oligonucleotide
aacuaucagugggcaaauc

SEQ ID NO: 751727 - RNA, 19 nt, Artificial Sequence
  Description of Artificial Sequence: Synthetic oligonucleotide
aaccaaccuuacugaccac

SEQ ID NO: 751728 - RNA, 19 nt, Artificial Sequence
  Description of Artificial Sequence: Synthetic oligonucleotide
gaacaugcaggccgaugug

SEQ ID NO: 751729 - RNA, 19 nt, Artificial Sequence
  Description of Artificial Sequence: Synthetic oligonucleotide
ucgggacugaagagggacc

SEQ ID NO: 751730 - RNA, 19 nt, Artificial Sequence
  Description of Artificial Sequence: Synthetic oligonucleotide
ugaccuuuccugccaggga

SEQ ID NO: 751731 - RNA, 19 nt, Artificial Sequence
  Description of Artificial Sequence: Synthetic oligonucleotide
aucacaaccaacaggcaaa

SEQ ID NO: 751732 - RNA, 19 nt, Artificial Sequence
  Description of Artificial Sequence: Synthetic oligonucleotide
caucgauccugguauugac

SEQ ID NO: 751733 - RNA, 19 nt, Artificial Sequence
  Description of Artificial Sequence: Synthetic oligonucleotide
gauucgacuccugaaaccu

SEQ ID NO: 751734 - RNA, 19 nt, Artificial Sequence
  Description of Artificial Sequence: Synthetic oligonucleotide
ugacucacggcggggacag

SEQ ID NO: 751735 - RNA, 19 nt, Artificial Sequence
  Description of Artificial Sequence: Synthetic oligonucleotide
agauggggccaucugaauu

SEQ ID NO: 751736 - RNA, 19 nt, Artificial Sequence
  Description of Artificial Sequence: Synthetic oligonucleotide
ccgauguggaucaccaugg

SEQ ID NO: 751737 - RNA, 19 nt, Artificial Sequence
  Description of Artificial Sequence: Synthetic oligonucleotide
gaaaccggccccggcauag

SEQ ID NO: 751738 - RNA, 19 nt, Artificial Sequence
  Description of Artificial Sequence: Synthetic oligonucleotide
aauucccucuuaauacuaa

SEQ ID NO: 751739 - RNA, 19 nt, Artificial Sequence
  Description of Artificial Sequence: Synthetic oligonucleotide
uaugguagaucgccuucau

SEQ ID NO: 751740 - RNA, 19 nt, Artificial Sequence
  Description of Artificial Sequence: Synthetic oligonucleotide
ugaaaccuggggucauugu

SEQ ID NO: 751741 - RNA, 19 nt, Artificial Sequence
  Description of Artificial Sequence: Synthetic oligonucleotide
uguaaccggauugcgugga

SEQ ID NO: 751742 - RNA, 19 nt, Artificial Sequence
  Description of Artificial Sequence: Synthetic oligonucleotide
aucccauaagcaucuacua

SEQ ID NO: 751743 - RNA, 19 nt, Artificial Sequence
  Description of Artificial Sequence: Synthetic oligonucleotide
ccucuuaauacuaacugga

SEQ ID NO: 751744 - RNA, 19 nt, Artificial Sequence
  Description of Artificial Sequence: Synthetic oligonucleotide
aaggucgggaagcccugug

SEQ ID NO: 751745 - RNA, 19 nt, Artificial Sequence
  Description of Artificial Sequence: Synthetic oligonucleotide
ggauucgacuccugaaacc

SEQ ID NO: 751746 - RNA, 19 nt, Artificial Sequence
  Description of Artificial Sequence: Synthetic oligonucleotide
guuuaucucucgguaaguc

SEQ ID NO: 751747 - RNA, 19 nt, Artificial Sequence
  Description of Artificial Sequence: Synthetic oligonucleotide
cagacccgaauguucuuag

SEQ ID NO: 751748 - RNA, 19 nt, Artificial Sequence
  Description of Artificial Sequence: Synthetic oligonucleotide
cuauguucuggaagccgug

SEQ ID NO: 751749 - RNA, 19 nt, Artificial Sequence
  Description of Artificial Sequence: Synthetic oligonucleotide
cccggcauagaauuuauuc

SEQ ID NO: 751750 - RNA, 19 nt, Artificial Sequence
  Description of Artificial Sequence: Synthetic oligonucleotide
ugggcacgagcccugcuga

SEQ ID NO: 751751 - RNA, 19 nt, Artificial Sequence
  Description of Artificial Sequence: Synthetic oligonucleotide
agacugguguuguugggau

SEQ ID NO: 751752 - RNA, 19 nt, Artificial Sequence
  Description of Artificial Sequence: Synthetic oligonucleotide
uugaaaccggccccggcau

SEQ ID NO: 751753 - RNA, 19 nt, Artificial Sequence
  Description of Artificial Sequence: Synthetic oligonucleotide
cagugcgaacccuccagcc

SEQ ID NO: 751754 - RNA, 19 nt, Artificial Sequence
  Description of Artificial Sequence: Synthetic oligonucleotide
uggaucaccaugguccaaa

SEQ ID NO: 751755 - RNA, 19 nt, Artificial Sequence
  Description of Artificial Sequence: Synthetic oligonucleotide
caggggugacacaaacgcc

SEQ ID NO: 751756 - RNA, 19 nt, Artificial Sequence
  Description of Artificial Sequence: Synthetic oligonucleotide
gguauugacuccggaagcc

SEQ ID NO: 751757 - RNA, 19 nt, Artificial Sequence
  Description of Artificial Sequence: Synthetic oligonucleotide
cugauuugucugcauccug

SEQ ID NO: 751758 - RNA, 19 nt, Artificial Sequence
  Description of Artificial Sequence: Synthetic oligonucleotide
cauaaaccauguccccuac

SEQ ID NO: 751759 - RNA, 19 nt, Artificial Sequence
  Description of Artificial Sequence: Synthetic oligonucleotide
auaaaccauguccccuacu

SEQ ID NO: 751760 - RNA, 19 nt, Artificial Sequence
  Description of Artificial Sequence: Synthetic oligonucleotide
gaaccagacccgaauguuc

SEQ ID NO: 751761 - RNA, 19 nt, Artificial Sequence
  Description of Artificial Sequence: Synthetic oligonucleotide
uuccuaggugugaccaaga

SEQ ID NO: 751762 - RNA, 19 nt, Artificial Sequence
  Description of Artificial Sequence: Synthetic oligonucleotide
ugugacuaugcagguuggc

SEQ ID NO: 751763 - RNA, 19 nt, Artificial Sequence
  Description of Artificial Sequence: Synthetic oligonucleotide
cuacuauguucuggaagcc

SEQ ID NO: 751764 - RNA, 19 nt, Artificial Sequence
  Description of Artificial Sequence: Synthetic oligonucleotide
agcaccuaccuaaaugacu

SEQ ID NO: 751765 - RNA, 19 nt, Artificial Sequence
  Description of Artificial Sequence: Synthetic oligonucleotide
uguaucccuuucuguccag

SEQ ID NO: 751766 - RNA, 19 nt, Artificial Sequence
  Description of Artificial Sequence: Synthetic oligonucleotide
cucgggacugaagagggac

SEQ ID NO: 751767 - RNA, 19 nt, Artificial Sequence
  Description of Artificial Sequence: Synthetic oligonucleotide
gguaaucuaaggucgggaa

SEQ ID NO: 751768 - RNA, 19 nt, Artificial Sequence
  Description of Artificial Sequence: Synthetic oligonucleotide
uggaagccgugugugaacu

SEQ ID NO: 751769 - RNA, 19 nt, Artificial Sequence
  Description of Artificial Sequence: Synthetic oligonucleotide
accaaccuuacugaccaca

SEQ ID NO: 751770 - RNA, 19 nt, Artificial Sequence
  Description of Artificial Sequence: Synthetic oligonucleotide
gccagcaccuaccuaaaug

SEQ ID NO: 751771 - RNA, 19 nt, Artificial Sequence
  Description of Artificial Sequence: Synthetic oligonucleotide
ggggaggaacuugaaaccg

SEQ ID NO: 751772 - RNA, 19 nt, Artificial Sequence
  Description of Artificial Sequence: Synthetic oligonucleotide
gguuuaaccucugccuggg

SEQ ID NO: 751773 - RNA, 19 nt, Artificial Sequence
  Description of Artificial Sequence: Synthetic oligonucleotide
uaggugugaccaagaacuc

SEQ ID NO: 751774 - RNA, 19 nt, Artificial Sequence
  Description of Artificial Sequence: Synthetic oligonucleotide
ugguccucuguuugauuga

SEQ ID NO: 751775 - RNA, 19 nt, Artificial Sequence
  Description of Artificial Sequence: Synthetic oligonucleotide
ggggagucugauuugucug

SEQ ID NO: 751776 - RNA, 19 nt, Artificial Sequence
  Description of Artificial Sequence: Synthetic oligonucleotide
auacugaugggcgcaagau

SEQ ID NO: 751777 - RNA, 19 nt, Artificial Sequence
  Description of Artificial Sequence: Synthetic oligonucleotide
agguaaucuaaggucggga

SEQ ID NO: 751778 - RNA, 19 nt, Artificial Sequence
  Description of Artificial Sequence: Synthetic oligonucleotide
cuucugcguccucugagug

SEQ ID NO: 751779 - RNA, 19 nt, Artificial Sequence
  Description of Artificial Sequence: Synthetic oligonucleotide
gguuggcucaccagcaagg

SEQ ID NO: 751780 - RNA, 19 nt, Artificial Sequence
  Description of Artificial Sequence: Synthetic oligonucleotide
aguacuuccgagagcugug

SEQ ID NO: 751781 - RNA, 19 nt, Artificial Sequence
  Description of Artificial Sequence: Synthetic oligonucleotide
agaucgccuucaucuuccg

SEQ ID NO: 751782 - RNA, 19 nt, Artificial Sequence
  Description of Artificial Sequence: Synthetic oligonucleotide
ucuguccggaggccaggag

SEQ ID NO: 751783 - RNA, 19 nt, Artificial Sequence
  Description of Artificial Sequence: Synthetic oligonucleotide
gaggaacuaucagugggca

SEQ ID NO: 751784 - RNA, 19 nt, Artificial Sequence
  Description of Artificial Sequence: Synthetic oligonucleotide
ggaacuaucagugggcaaa

SEQ ID NO: 751785 - RNA, 19 nt, Artificial Sequence
  Description of Artificial Sequence: Synthetic oligonucleotide
aucaucgauccugguauug

SEQ ID NO: 751786 - RNA, 19 nt, Artificial Sequence
  Description of Artificial Sequence: Synthetic oligonucleotide
ccaacaggcaaaaggaaca

SEQ ID NO: 751787 - RNA, 19 nt, Artificial Sequence
  Description of Artificial Sequence: Synthetic oligonucleotide
gugcacaaguugauuagac

SEQ ID NO: 751788 - RNA, 19 nt, Artificial Sequence
  Description of Artificial Sequence: Synthetic oligonucleotide
ggcaaaucaaggcaggccu

SEQ ID NO: 751789 - RNA, 19 nt, Artificial Sequence
  Description of Artificial Sequence: Synthetic oligonucleotide
gaggaacuugaaaccggcc

SEQ ID NO: 751790 - RNA, 19 nt, Artificial Sequence
  Description of Artificial Sequence: Synthetic oligonucleotide
agucgcagguaggaggcag

SEQ ID NO: 751791 - RNA, 19 nt, Artificial Sequence
  Description of Artificial Sequence: Synthetic oligonucleotide
cuugaugaaccagacccga

SEQ ID NO: 751792 - RNA, 19 nt, Artificial Sequence
  Description of Artificial Sequence: Synthetic oligonucleotide
gcaccuaccuaaaugacuc

SEQ ID NO: 751793 - RNA, 19 nt, Artificial Sequence
  Description of Artificial Sequence: Synthetic oligonucleotide
cacucaucaaacuuccccu

SEQ ID NO: 751794 - RNA, 19 nt, Artificial Sequence
  Description of Artificial Sequence: Synthetic oligonucleotide
gaugcuaugcugggccaac

SEQ ID NO: 751795 - RNA, 19 nt, Artificial Sequence
  Description of Artificial Sequence: Synthetic oligonucleotide
ccguugcccacccugaucc

SEQ ID NO: 751796 - RNA, 19 nt, Artificial Sequence
  Description of Artificial Sequence: Synthetic oligonucleotide
gagugggauauauuccaua

SEQ ID NO: 751797 - RNA, 19 nt, Artificial Sequence
  Description of Artificial Sequence: Synthetic oligonucleotide
ggaaccguagaaccacgug

SEQ ID NO: 751798 - RNA, 19 nt, Artificial Sequence
  Description of Artificial Sequence: Synthetic oligonucleotide
uguggguccguugcccacc

SEQ ID NO: 751799 - RNA, 19 nt, Artificial Sequence
  Description of Artificial Sequence: Synthetic oligonucleotide
ccacgaugaggaaacacug

SEQ ID NO: 751800 - RNA, 19 nt, Artificial Sequence
  Description of Artificial Sequence: Synthetic oligonucleotide
ucaggguggcaaaggcggu

SEQ ID NO: 751801 - RNA, 19 nt, Artificial Sequence
  Description of Artificial Sequence: Synthetic oligonucleotide
ggucaugcugaauuaucuc

SEQ ID NO: 751802 - RNA, 19 nt, Artificial Sequence
  Description of Artificial Sequence: Synthetic oligonucleotide
guagaauagggcugucugu

SEQ ID NO: 751803 - RNA, 19 nt, Artificial Sequence
  Description of Artificial Sequence: Synthetic oligonucleotide
cuaggaggaaaccaguuuu

SEQ ID NO: 751804 - RNA, 19 nt, Artificial Sequence
  Description of Artificial Sequence: Synthetic oligonucleotide
acuaugcagguuggcucac

SEQ ID NO: 751805 - RNA, 19 nt, Artificial Sequence
  Description of Artificial Sequence: Synthetic oligonucleotide
guaaccggauugcguggag

SEQ ID NO: 751806 - RNA, 19 nt, Artificial Sequence
  Description of Artificial Sequence: Synthetic oligonucleotide
aaaguacuuccgagagcug

SEQ ID NO: 751807 - RNA, 19 nt, Artificial Sequence
  Description of Artificial Sequence: Synthetic oligonucleotide
gaacagugcgaacccucca

SEQ ID NO: 751808 - RNA, 19 nt, Artificial Sequence
  Description of Artificial Sequence: Synthetic oligonucleotide
uccguugcccacccugauc

SEQ ID NO: 751809 - RNA, 19 nt, Artificial Sequence
  Description of Artificial Sequence: Synthetic oligonucleotide
ggcaaaaggaacacagaga

SEQ ID NO: 751810 - RNA, 19 nt, Artificial Sequence
  Description of Artificial Sequence: Synthetic oligonucleotide
ccugccggcagaaccaacc

SEQ ID NO: 751811 - RNA, 19 nt, Artificial Sequence
  Description of Artificial Sequence: Synthetic oligonucleotide
caaucaggcacuucugggu

SEQ ID NO: 751812 - RNA, 19 nt, Artificial Sequence
  Description of Artificial Sequence: Synthetic oligonucleotide
ugaugggcgcaagaucagu

SEQ ID NO: 751813 - RNA, 19 nt, Artificial Sequence
  Description of Artificial Sequence: Synthetic oligonucleotide
cuguaucccuuucugucca

SEQ ID NO: 751814 - RNA, 19 nt, Artificial Sequence
  Description of Artificial Sequence: Synthetic oligonucleotide
uccugccagggauucgacu

SEQ ID NO: 751815 - RNA, 19 nt, Artificial Sequence
  Description of Artificial Sequence: Synthetic oligonucleotide
ugcuaacuggagugggaua

SEQ ID NO: 751816 - RNA, 19 nt, Artificial Sequence
  Description of Artificial Sequence: Synthetic oligonucleotide
guauugacuccggaagcca

SEQ ID NO: 751817 - RNA, 19 nt, Artificial Sequence
  Description of Artificial Sequence: Synthetic oligonucleotide
cgaauaugcucaaaggaga

SEQ ID NO: 751818 - RNA, 19 nt, Artificial Sequence
  Description of Artificial Sequence: Synthetic oligonucleotide
ccuaggugugaccaagaac

SEQ ID NO: 751819 - RNA, 19 nt, Artificial Sequence
  Description of Artificial Sequence: Synthetic oligonucleotide
ugcguccucugagugggug

SEQ ID NO: 751820 - RNA, 19 nt, Artificial Sequence
  Description of Artificial Sequence: Synthetic oligonucleotide
gugugaccaagaacucggg

SEQ ID NO: 751821 - RNA, 19 nt, Artificial Sequence
  Description of Artificial Sequence: Synthetic oligonucleotide
agcuggucaugcugaauua

SEQ ID NO: 751822 - RNA, 19 nt, Artificial Sequence
  Description of Artificial Sequence: Synthetic oligonucleotide
cacgucuauguugcacagg

SEQ ID NO: 751823 - RNA, 19 nt, Artificial Sequence
  Description of Artificial Sequence: Synthetic oligonucleotide
gacuccgaacaugcaggcc

SEQ ID NO: 751824 - RNA, 19 nt, Artificial Sequence
  Description of Artificial Sequence: Synthetic oligonucleotide
accuuacugaccacagccu

SEQ ID NO: 751825 - RNA, 19 nt, Artificial Sequence
  Description of Artificial Sequence: Synthetic oligonucleotide
accguagaaccacgugccu

SEQ ID NO: 751826 - RNA, 19 nt, Artificial Sequence
  Description of Artificial Sequence: Synthetic oligonucleotide
ggcggggacaggcuggcag

SEQ ID NO: 751827 - RNA, 19 nt, Artificial Sequence
  Description of Artificial Sequence: Synthetic oligonucleotide
cacaaacgcccugguaccc

SEQ ID NO: 751828 - RNA, 19 nt, Artificial Sequence
  Description of Artificial Sequence: Synthetic oligonucleotide
aaacgcccugguacccagg

SEQ ID NO: 751829 - RNA, 19 nt, Artificial Sequence
  Description of Artificial Sequence: Synthetic oligonucleotide
gguguccgcaaagucaaac

SEQ ID NO: 751830 - RNA, 19 nt, Artificial Sequence
  Description of Artificial Sequence: Synthetic oligonucleotide
caguacucgauggugugga

SEQ ID NO: 751831 - RNA, 19 nt, Artificial Sequence
  Description of Artificial Sequence: Synthetic oligonucleotide
auucgacuccugaaaccug

SEQ ID NO: 751832 - RNA, 19 nt, Artificial Sequence
  Description of Artificial Sequence: Synthetic oligonucleotide
gcgaccacgaugaggaaac

SEQ ID NO: 751833 - RNA, 19 nt, Artificial Sequence
  Description of Artificial Sequence: Synthetic oligonucleotide
ugcgaacccuccagccaga

SEQ ID NO: 751834 - RNA, 19 nt, Artificial Sequence
  Description of Artificial Sequence: Synthetic oligonucleotide
acaaacgcccugguaccca

SEQ ID NO: 751835 - RNA, 19 nt, Artificial Sequence
  Description of Artificial Sequence: Synthetic oligonucleotide
ggcggugguccucuguuug

SEQ ID NO: 751836 - RNA, 19 nt, Artificial Sequence
  Description of Artificial Sequence: Synthetic oligonucleotide
cacaaguugauuagacuuu

SEQ ID NO: 751837 - RNA, 19 nt, Artificial Sequence
  Description of Artificial Sequence: Synthetic oligonucleotide
cagggauucgacuccugaa

SEQ ID NO: 751838 - RNA, 19 nt, Artificial Sequence
  Description of Artificial Sequence: Synthetic oligonucleotide
guuggcucaccagcaagga

SEQ ID NO: 751839 - RNA, 19 nt, Artificial Sequence
  Description of Artificial Sequence: Synthetic oligonucleotide
gugacuaugcagguuggcu

SEQ ID NO: 751840 - RNA, 19 nt, Artificial Sequence
  Description of Artificial Sequence: Synthetic oligonucleotide
cuacuaggaggaaaccagu

SEQ ID NO: 751841 - RNA, 19 nt, Artificial Sequence
  Description of Artificial Sequence: Synthetic oligonucleotide
aguacucgaugguguggau

SEQ ID NO: 751842 - RNA, 19 nt, Artificial Sequence
  Description of Artificial Sequence: Synthetic oligonucleotide
ggguccguugcccacccug

SEQ ID NO: 751843 - RNA, 19 nt, Artificial Sequence
  Description of Artificial Sequence: Synthetic oligonucleotide
aacuggagugggauauauu

SEQ ID NO: 751844 - RNA, 19 nt, Artificial Sequence
  Description of Artificial Sequence: Synthetic oligonucleotide
ugaaaccggccccggcaua

SEQ ID NO: 751845 - RNA, 19 nt, Artificial Sequence
  Description of Artificial Sequence: Synthetic oligonucleotide
cuaugcagguuggcucacc

SEQ ID NO: 751846 - RNA, 19 nt, Artificial Sequence
  Description of Artificial Sequence: Synthetic oligonucleotide
augacucacggcggggaca

SEQ ID NO: 751847 - RNA, 19 nt, Artificial Sequence
  Description of Artificial Sequence: Synthetic oligonucleotide
gauggguaucaggcacagc

SEQ ID NO: 751848 - RNA, 19 nt, Artificial Sequence
  Description of Artificial Sequence: Synthetic oligonucleotide
ccaaaguugagaguuccca

SEQ ID NO: 751849 - RNA, 19 nt, Artificial Sequence
  Description of Artificial Sequence: Synthetic oligonucleotide
gcguccucugagugggugg

SEQ ID NO: 751850 - RNA, 19 nt, Artificial Sequence
  Description of Artificial Sequence: Synthetic oligonucleotide
cccaguguaaccggauugc

SEQ ID NO: 751851 - RNA, 19 nt, Artificial Sequence
  Description of Artificial Sequence: Synthetic oligonucleotide
ugccggcagaaccaaccuu

SEQ ID NO: 751852 - RNA, 19 nt, Artificial Sequence
  Description of Artificial Sequence: Synthetic oligonucleotide
caggccgauguggaucacc

SEQ ID NO: 751853 - RNA, 19 nt, Artificial Sequence
  Description of Artificial Sequence: Synthetic oligonucleotide
ccugugcacaaguugauua

SEQ ID NO: 751854 - RNA, 19 nt, Artificial Sequence
  Description of Artificial Sequence: Synthetic oligonucleotide
aggccaagacugguguugu

SEQ ID NO: 751855 - RNA, 19 nt, Artificial Sequence
  Description of Artificial Sequence: Synthetic oligonucleotide
cugcucugggcacgagccc

SEQ ID NO: 751856 - RNA, 19 nt, Artificial Sequence
  Description of Artificial Sequence: Synthetic oligonucleotide
ggucacgucuauguugcac

SEQ ID NO: 751857 - RNA, 19 nt, Artificial Sequence
  Description of Artificial Sequence: Synthetic oligonucleotide
aggguaugguagaucgccu

SEQ ID NO: 751858 - RNA, 19 nt, Artificial Sequence
  Description of Artificial Sequence: Synthetic oligonucleotide
caucuacuauguucuggaa

SEQ ID NO: 751859 - RNA, 19 nt, Artificial Sequence
  Description of Artificial Sequence: Synthetic oligonucleotide
gaguagaauagggcugucu

SEQ ID NO: 751860 - RNA, 19 nt, Artificial Sequence
  Description of Artificial Sequence: Synthetic oligonucleotide
uaaggucgggaagcccugu

SEQ ID NO: 751861 - RNA, 19 nt, Artificial Sequence
  Description of Artificial Sequence: Synthetic oligonucleotide
aggaaccguagaaccacgu

SEQ ID NO: 751862 - RNA, 19 nt, Artificial Sequence
  Description of Artificial Sequence: Synthetic oligonucleotide
ccaguguaaccggauugcg

SEQ ID NO: 751863 - RNA, 19 nt, Artificial Sequence
  Description of Artificial Sequence: Synthetic oligonucleotide
cuguggguccguugcccac

SEQ ID NO: 751864 - RNA, 19 nt, Artificial Sequence
  Description of Artificial Sequence: Synthetic oligonucleotide
cggauugcguggaggaagg

SEQ ID NO: 751865 - RNA, 19 nt, Artificial Sequence
  Description of Artificial Sequence: Synthetic oligonucleotide
cacgaugaggaaacacugu

SEQ ID NO: 751866 - RNA, 19 nt, Artificial Sequence
  Description of Artificial Sequence: Synthetic oligonucleotide
ggauguaguguggggcaag

SEQ ID NO: 751867 - RNA, 19 nt, Artificial Sequence
  Description of Artificial Sequence: Synthetic oligonucleotide
ccugguauugacuccggaa

SEQ ID NO: 751868 - RNA, 19 nt, Artificial Sequence
  Description of Artificial Sequence: Synthetic oligonucleotide
ccggauugcguggaggaag

SEQ ID NO: 751869 - RNA, 19 nt, Artificial Sequence
  Description of Artificial Sequence: Synthetic oligonucleotide
caaacuuccccucccgaau

SEQ ID NO: 751870 - RNA, 19 nt, Artificial Sequence
  Description of Artificial Sequence: Synthetic oligonucleotide
guggguccguugcccaccc

SEQ ID NO: 751871 - RNA, 19 nt, Artificial Sequence
  Description of Artificial Sequence: Synthetic oligonucleotide
ggcacgagcccugcugagg

SEQ ID NO: 751872 - RNA, 19 nt, Artificial Sequence
  Description of Artificial Sequence: Synthetic oligonucleotide
cuccgaacaugcaggccga

SEQ ID NO: 751873 - RNA, 19 nt, Artificial Sequence
  Description of Artificial Sequence: Synthetic oligonucleotide
caguguaaccggauugcgu

SEQ ID NO: 751874 - RNA, 19 nt, Artificial Sequence
  Description of Artificial Sequence: Synthetic oligonucleotide
guuuaaccucugccuggga

SEQ ID NO: 751875 - RNA, 19 nt, Artificial Sequence
  Description of Artificial Sequence: Synthetic oligonucleotide
caccuaccuaaaugacuca

SEQ ID NO: 751876 - RNA, 19 nt, Artificial Sequence
  Description of Artificial Sequence: Synthetic oligonucleotide
gcacgagcccugcugagga

SEQ ID NO: 751877 - RNA, 19 nt, Artificial Sequence
  Description of Artificial Sequence: Synthetic oligonucleotide
cauguuuaugagggaaagu

SEQ ID NO: 751878 - RNA, 19 nt, Artificial Sequence
  Description of Artificial Sequence: Synthetic oligonucleotide
ccaaccaaaguugagaguu

SEQ ID NO: 751879 - RNA, 19 nt, Artificial Sequence
  Description of Artificial Sequence: Synthetic oligonucleotide
ugguguccgcaaagucaaa

SEQ ID NO: 751880 - RNA, 19 nt, Artificial Sequence
  Description of Artificial Sequence: Synthetic oligonucleotide
aaaccggccccggcauaga

SEQ ID NO: 751881 - RNA, 19 nt, Artificial Sequence
  Description of Artificial Sequence: Synthetic oligonucleotide
gcuaacuggagugggauau

SEQ ID NO: 751882 - RNA, 19 nt, Artificial Sequence
  Description of Artificial Sequence: Synthetic oligonucleotide
cagaacccucuggcggugg

SEQ ID NO: 751883 - RNA, 19 nt, Artificial Sequence
  Description of Artificial Sequence: Synthetic oligonucleotide
aggcccauucaugcagacu

SEQ ID NO: 751884 - RNA, 19 nt, Artificial Sequence
  Description of Artificial Sequence: Synthetic oligonucleotide
augcuaugcugggccaaca

SEQ ID NO: 751885 - RNA, 19 nt, Artificial Sequence
  Description of Artificial Sequence: Synthetic oligonucleotide
gaacuaucagugggcaaau

SEQ ID NO: 751886 - RNA, 19 nt, Artificial Sequence
  Description of Artificial Sequence: Synthetic oligonucleotide
cacuucugggucacgucua

SEQ ID NO: 751887 - RNA, 19 nt, Artificial Sequence
  Description of Artificial Sequence: Synthetic oligonucleotide
accagacccgaauguucuu

SEQ ID NO: 751888 - RNA, 19 nt, Artificial Sequence
  Description of Artificial Sequence: Synthetic oligonucleotide
gcacuucugggucacgucu

SEQ ID NO: 751889 - RNA, 19 nt, Artificial Sequence
  Description of Artificial Sequence: Synthetic oligonucleotide
gaacccucuggcggugguc

SEQ ID NO: 751890 - RNA, 19 nt, Artificial Sequence
  Description of Artificial Sequence: Synthetic oligonucleotide
gaucaucgauccugguauu

SEQ ID NO: 751891 - RNA, 19 nt, Artificial Sequence
  Description of Artificial Sequence: Synthetic oligonucleotide
gaaccacgugccucuucua

SEQ ID NO: 751892 - RNA, 19 nt, Artificial Sequence
  Description of Artificial Sequence: Synthetic oligonucleotide
gaggguggugcugguuauc

SEQ ID NO: 751893 - RNA, 19 nt, Artificial Sequence
  Description of Artificial Sequence: Synthetic oligonucleotide
gguuauccugggaccuuug

SEQ ID NO: 751894 - RNA, 19 nt, Artificial Sequence
  Description of Artificial Sequence: Synthetic oligonucleotide
ccugcuaacuggaguggga

SEQ ID NO: 751895 - RNA, 19 nt, Artificial Sequence
  Description of Artificial Sequence: Synthetic oligonucleotide
gccggcagaaccaaccuua

SEQ ID NO: 751896 - RNA, 19 nt, Artificial Sequence
  Description of Artificial Sequence: Synthetic oligonucleotide
ggguaucaggcacagccau

SEQ ID NO: 751897 - RNA, 19 nt, Artificial Sequence
  Description of Artificial Sequence: Synthetic oligonucleotide
ccagggauucgacuccuga

SEQ ID NO: 751898 - RNA, 19 nt, Artificial Sequence
  Description of Artificial Sequence: Synthetic oligonucleotide
ccggcagaaccaaccuuac

SEQ ID NO: 751899 - RNA, 19 nt, Artificial Sequence
  Description of Artificial Sequence: Synthetic oligonucleotide
uguccccuacuaggaggaa

SEQ ID NO: 751900 - RNA, 19 nt, Artificial Sequence
  Description of Artificial Sequence: Synthetic oligonucleotide
cgaacaugcaggccgaugu

SEQ ID NO: 751901 - RNA, 19 nt, Artificial Sequence
  Description of Artificial Sequence: Synthetic oligonucleotide
ggaucacaaccaacaggca

SEQ ID NO: 751902 - RNA, 19 nt, Artificial Sequence
  Description of Artificial Sequence: Synthetic oligonucleotide
ggcgaccacgaugaggaaa

SEQ ID NO: 751903 - RNA, 19 nt, Artificial Sequence
  Description of Artificial Sequence: Synthetic oligonucleotide
cuaacuggagugggauaua

SEQ ID NO: 751904 - RNA, 19 nt, Artificial Sequence
  Description of Artificial Sequence: Synthetic oligonucleotide
ccguagaaccacgugccuc

SEQ ID NO: 751905 - RNA, 19 nt, Artificial Sequence
  Description of Artificial Sequence: Synthetic oligonucleotide
cugcuaacuggagugggau

SEQ ID NO: 751906 - RNA, 19 nt, Artificial Sequence
  Description of Artificial Sequence: Synthetic oligonucleotide
guggaccaugguguccgca

SEQ ID NO: 751907 - RNA, 19 nt, Artificial Sequence
  Description of Artificial Sequence: Synthetic oligonucleotide
uggcgaccacgaugaggaa

SEQ ID NO: 751908 - RNA, 19 nt, Artificial Sequence
  Description of Artificial Sequence: Synthetic oligonucleotide
uccgaacaugcaggccgau

SEQ ID NO: 751909 - RNA, 19 nt, Artificial Sequence
  Description of Artificial Sequence: Synthetic oligonucleotide
uggguccguugcccacccu

SEQ ID NO: 751910 - RNA, 19 nt, Artificial Sequence
  Description of Artificial Sequence: Synthetic oligonucleotide
ggauugcguggaggaaggc

SEQ ID NO: 751911 - RNA, 19 nt, Artificial Sequence
  Description of Artificial Sequence: Synthetic oligonucleotide
gguccguugcccacccuga

SEQ ID NO: 751912 - RNA, 19 nt, Artificial Sequence
  Description of Artificial Sequence: Synthetic oligonucleotide
gacucacggcggggacagg

SEQ ID NO: 751913 - RNA, 19 nt, Artificial Sequence
  Description of Artificial Sequence: Synthetic oligonucleotide
cccacagucgcagguagga

SEQ ID NO: 751914 - RNA, 19 nt, Artificial Sequence
  Description of Artificial Sequence: Synthetic oligonucleotide
cugagagacccuccauaau

SEQ ID NO: 751915 - RNA, 19 nt, Artificial Sequence
  Description of Artificial Sequence: Synthetic oligonucleotide
ccgcaaagucaaacucuuc

SEQ ID NO: 751916 - RNA, 19 nt, Artificial Sequence
  Description of Artificial Sequence: Synthetic oligonucleotide
caugcaggccgauguggau

SEQ ID NO: 751917 - RNA, 19 nt, Artificial Sequence
  Description of Artificial Sequence: Synthetic oligonucleotide
cucacggcggggacaggcu

SEQ ID NO: 751918 - RNA, 19 nt, Artificial Sequence
  Description of Artificial Sequence: Synthetic oligonucleotide
caaaggcggugaagaugaa

SEQ ID NO: 751919 - RNA, 19 nt, Artificial Sequence
  Description of Artificial Sequence: Synthetic oligonucleotide
ggguaugguagaucgccuu

SEQ ID NO: 751920 - RNA, 19 nt, Artificial Sequence
  Description of Artificial Sequence: Synthetic oligonucleotide
ggaugcuaugcugggccaa

SEQ ID NO: 751921 - RNA, 19 nt, Artificial Sequence
  Description of Artificial Sequence: Synthetic oligonucleotide
gagcugcucugggcacgag

SEQ ID NO: 751922 - RNA, 19 nt, Artificial Sequence
  Description of Artificial Sequence: Synthetic oligonucleotide
ccgaacaugcaggccgaug

SEQ ID NO: 751923 - RNA, 19 nt, Artificial Sequence
  Description of Artificial Sequence: Synthetic oligonucleotide
accggccccggcauagaau

SEQ ID NO: 751924 - RNA, 19 nt, Artificial Sequence
  Description of Artificial Sequence: Synthetic oligonucleotide
agccgugugugaacuuguu

SEQ ID NO: 751925 - RNA, 19 nt, Artificial Sequence
  Description of Artificial Sequence: Synthetic oligonucleotide
ccccuacuaggaggaaacc

SEQ ID NO: 751926 - RNA, 19 nt, Artificial Sequence
  Description of Artificial Sequence: Synthetic oligonucleotide
ggagaucaucgauccuggu

SEQ ID NO: 751927 - RNA, 19 nt, Artificial Sequence
  Description of Artificial Sequence: Synthetic oligonucleotide
gucgcagguaggaggcagu

SEQ ID NO: 751928 - RNA, 19 nt, Artificial Sequence
  Description of Artificial Sequence: Synthetic oligonucleotide
cgcaagaucaguggcuuaa

SEQ ID NO: 751929 - RNA, 19 nt, Artificial Sequence
  Description of Artificial Sequence: Synthetic oligonucleotide
gcucaccagcaaggaguag

SEQ ID NO: 751930 - RNA, 19 nt, Artificial Sequence
  Description of Artificial Sequence: Synthetic oligonucleotide
gcuggucaugcugaauuau

SEQ ID NO: 751931 - RNA, 19 nt, Artificial Sequence
  Description of Artificial Sequence: Synthetic oligonucleotide
guggaucaccaugguccaa

SEQ ID NO: 751932 - RNA, 19 nt, Artificial Sequence
  Description of Artificial Sequence: Synthetic oligonucleotide
ggcgcaagaucaguggcuu

SEQ ID NO: 751933 - RNA, 19 nt, Artificial Sequence
  Description of Artificial Sequence: Synthetic oligonucleotide
gggcgcaagaucaguggcu

SEQ ID NO: 751934 - RNA, 19 nt, Artificial Sequence
  Description of Artificial Sequence: Synthetic oligonucleotide
ccugauccccaaccaaagu

SEQ ID NO: 751935 - RNA, 19 nt, Artificial Sequence
  Description of Artificial Sequence: Synthetic oligonucleotide
gggucacgucuauguugca

SEQ ID NO: 751936 - RNA, 19 nt, Artificial Sequence
  Description of Artificial Sequence: Synthetic oligonucleotide
ggugguccucuguuugauu

SEQ ID NO: 751937 - RNA, 19 nt, Artificial Sequence
  Description of Artificial Sequence: Synthetic oligonucleotide
ccggccccggcauagaauu

SEQ ID NO: 751938 - RNA, 19 nt, Artificial Sequence
  Description of Artificial Sequence: Synthetic oligonucleotide
gcgcaagaucaguggcuua

SEQ ID NO: 751939 - RNA, 19 nt, Artificial Sequence
  Description of Artificial Sequence: Synthetic oligonucleotide
cgguaagucccaaucccau

SEQ ID NO: 751940 - RNA, 19 nt, Artificial Sequence
  Description of Artificial Sequence: Synthetic oligonucleotide
cacgagcccugcugaggau

SEQ ID NO: 751941 - RNA, 19 nt, Artificial Sequence
  Description of Artificial Sequence: Synthetic oligonucleotide
cgggaagcccugugcacaa

SEQ ID NO: 751942 - RNA, 19 nt, Artificial Sequence
  Description of Artificial Sequence: Synthetic oligonucleotide
ggccugccggcagaaccaa

SEQ ID NO: 751943 - RNA, 19 nt, Artificial Sequence
  Description of Artificial Sequence: Synthetic oligonucleotide
gccugccggcagaaccaac

SEQ ID NO: 751944 - RNA, 19 nt, Artificial Sequence
  Description of Artificial Sequence: Synthetic oligonucleotide
cccucccgaauaugcucaa

SEQ ID NO: 751945 - RNA, 19 nt, Artificial Sequence
  Description of Artificial Sequence: Synthetic oligonucleotide
ggccaagacugguguuguu

SEQ ID NO: 751946 - RNA, 19 nt, Artificial Sequence
  Description of Artificial Sequence: Synthetic oligonucleotide
cgauguggaucaccauggu

SEQ ID NO: 751947 - RNA, 19 nt, Artificial Sequence
  Description of Artificial Sequence: Synthetic oligonucleotide
gccccggcauagaauuuau

SEQ ID NO: 751948 - RNA, 19 nt, Artificial Sequence
  Description of Artificial Sequence: Synthetic oligonucleotide
cgucuauguugcacagguu

SEQ ID NO: 751949 - RNA, 19 nt, Artificial Sequence
  Description of Artificial Sequence: Synthetic oligonucleotide
ccccggcauagaauuuauu

SEQ ID NO: 751950 - RNA, 19 nt, Artificial Sequence
  Description of Artificial Sequence: Synthetic oligonucleotide
aaaauguuugacgucaucc

SEQ ID NO: 751951 - RNA, 19 nt, Artificial Sequence
  Description of Artificial Sequence: Synthetic oligonucleotide
aaauuugggagccaguacg

SEQ ID NO: 751952 - RNA, 19 nt, Artificial Sequence
  Description of Artificial Sequence: Synthetic oligonucleotide
gauaguguaaacugaaucc

SEQ ID NO: 751953 - RNA, 19 nt, Artificial Sequence
  Description of Artificial Sequence: Synthetic oligonucleotide
uguagaaguaugaacaccc

SEQ ID NO: 751954 - RNA, 19 nt, Artificial Sequence
  Description of Artificial Sequence: Synthetic oligonucleotide
uaaguuauuguguugcagg

SEQ ID NO: 751955 - RNA, 19 nt, Artificial Sequence
  Description of Artificial Sequence: Synthetic oligonucleotide
uugauuagcgcuuugcagg

SEQ ID NO: 751956 - RNA, 19 nt, Artificial Sequence
  Description of Artificial Sequence: Synthetic oligonucleotide
aaauccuuugauuagcgcu

SEQ ID NO: 751957 - RNA, 19 nt, Artificial Sequence
  Description of Artificial Sequence: Synthetic oligonucleotide
auugcucggaucuuguucc

SEQ ID NO: 751958 - RNA, 19 nt, Artificial Sequence
  Description of Artificial Sequence: Synthetic oligonucleotide
uuaagauauccacacgagg

SEQ ID NO: 751959 - RNA, 19 nt, Artificial Sequence
  Description of Artificial Sequence: Synthetic oligonucleotide
aaaauccuuugauuagcgc

SEQ ID NO: 751960 - RNA, 19 nt, Artificial Sequence
  Description of Artificial Sequence: Synthetic oligonucleotide
guuaauucggucuaagccc

SEQ ID NO: 751961 - RNA, 19 nt, Artificial Sequence
  Description of Artificial Sequence: Synthetic oligonucleotide
aguguuaaucucuggagac

SEQ ID NO: 751962 - RNA, 19 nt, Artificial Sequence
  Description of Artificial Sequence: Synthetic oligonucleotide
agugaaauguuccugcguc

SEQ ID NO: 751963 - RNA, 19 nt, Artificial Sequence
  Description of Artificial Sequence: Synthetic oligonucleotide
auuauucucaaugcgacac

SEQ ID NO: 751964 - RNA, 19 nt, Artificial Sequence
  Description of Artificial Sequence: Synthetic oligonucleotide
uuuaagauauccacacgag

SEQ ID NO: 751965 - RNA, 19 nt, Artificial Sequence
  Description of Artificial Sequence: Synthetic oligonucleotide
uuauuauucucaaugcgac

SEQ ID NO: 751966 - RNA, 19 nt, Artificial Sequence
  Description of Artificial Sequence: Synthetic oligonucleotide
aguaauuuggugcugagaa

SEQ ID NO: 751967 - RNA, 19 nt, Artificial Sequence
  Description of Artificial Sequence: Synthetic oligonucleotide
ucaauauccagcaaguuuu

SEQ ID NO: 751968 - RNA, 19 nt, Artificial Sequence
  Description of Artificial Sequence: Synthetic oligonucleotide
ucauuaaccuaucuagaag

SEQ ID NO: 751969 - RNA, 19 nt, Artificial Sequence
  Description of Artificial Sequence: Synthetic oligonucleotide
aaaaggcauacccaaaaga

SEQ ID NO: 751970 - RNA, 19 nt, Artificial Sequence
  Description of Artificial Sequence: Synthetic oligonucleotide
uaaccuaucuagaaguccc

SEQ ID NO: 751971 - RNA, 19 nt, Artificial Sequence
  Description of Artificial Sequence: Synthetic oligonucleotide
aguauagacuagcauuagc

SEQ ID NO: 751972 - RNA, 19 nt, Artificial Sequence
  Description of Artificial Sequence: Synthetic oligonucleotide
ucaagucaaagaauugucc

SEQ ID NO: 751973 - RNA, 19 nt, Artificial Sequence
  Description of Artificial Sequence: Synthetic oligonucleotide
uuugauuagcgcuuugcag

SEQ ID NO: 751974 - RNA, 19 nt, Artificial Sequence
  Description of Artificial Sequence: Synthetic oligonucleotide
ugauaguguaaacugaauc

SEQ ID NO: 751975 - RNA, 19 nt, Artificial Sequence
  Description of Artificial Sequence: Synthetic oligonucleotide
aaauguuugacgucaucca

SEQ ID NO: 751976 - RNA, 19 nt, Artificial Sequence
  Description of Artificial Sequence: Synthetic oligonucleotide
uaacauugcaguauagacu

SEQ ID NO: 751977 - RNA, 19 nt, Artificial Sequence
  Description of Artificial Sequence: Synthetic oligonucleotide
agauguugaggacauuuac

SEQ ID NO: 751978 - RNA, 19 nt, Artificial Sequence
  Description of Artificial Sequence: Synthetic oligonucleotide
aguuuauuaucucucccuc

SEQ ID NO: 751979 - RNA, 19 nt, Artificial Sequence
  Description of Artificial Sequence: Synthetic oligonucleotide
guaaagaauuuucaaggcc

SEQ ID NO: 751980 - RNA, 19 nt, Artificial Sequence
  Description of Artificial Sequence: Synthetic oligonucleotide
aaauaguccuuauuuaguu

SEQ ID NO: 751981 - RNA, 19 nt, Artificial Sequence
  Description of Artificial Sequence: Synthetic oligonucleotide
aaucggucuaauuuucuga

SEQ ID NO: 751982 - RNA, 19 nt, Artificial Sequence
  Description of Artificial Sequence: Synthetic oligonucleotide
cauucgauacugaaguacc

SEQ ID NO: 751983 - RNA, 19 nt, Artificial Sequence
  Description of Artificial Sequence: Synthetic oligonucleotide
gaaaacauguucauucccc

SEQ ID NO: 751984 - RNA, 19 nt, Artificial Sequence
  Description of Artificial Sequence: Synthetic oligonucleotide
uagaguguuaaucucugga

SEQ ID NO: 751985 - RNA, 19 nt, Artificial Sequence
  Description of Artificial Sequence: Synthetic oligonucleotide
aaaguuuucguguccagua

SEQ ID NO: 751986 - RNA, 19 nt, Artificial Sequence
  Description of Artificial Sequence: Synthetic oligonucleotide
agguguuuaaucaccaccc

SEQ ID NO: 751987 - RNA, 19 nt, Artificial Sequence
  Description of Artificial Sequence: Synthetic oligonucleotide
ugcaguauagacuagcauu

SEQ ID NO: 751988 - RNA, 19 nt, Artificial Sequence
  Description of Artificial Sequence: Synthetic oligonucleotide
uguuagaugucuacauuca

SEQ ID NO: 751989 - RNA, 19 nt, Artificial Sequence
  Description of Artificial Sequence: Synthetic oligonucleotide
auuacugccguugcugucc

SEQ ID NO: 751990 - RNA, 19 nt, Artificial Sequence
  Description of Artificial Sequence: Synthetic oligonucleotide
agaaauuagacaaaguuuu

SEQ ID NO: 751991 - RNA, 19 nt, Artificial Sequence
  Description of Artificial Sequence: Synthetic oligonucleotide
aguauagacaauaaguuau

SEQ ID NO: 751992 - RNA, 19 nt, Artificial Sequence
  Description of Artificial Sequence: Synthetic oligonucleotide
uguugguucaucagugcag

SEQ ID NO: 751993 - RNA, 19 nt, Artificial Sequence
  Description of Artificial Sequence: Synthetic oligonucleotide
aagaaauuagacaaaguuu

SEQ ID NO: 751994 - RNA, 19 nt, Artificial Sequence
  Description of Artificial Sequence: Synthetic oligonucleotide
ugccuaauucaguuuauag

SEQ ID NO: 751995 - RNA, 19 nt, Artificial Sequence
  Description of Artificial Sequence: Synthetic oligonucleotide
aaguuauuguguugcagga

SEQ ID NO: 751996 - RNA, 19 nt, Artificial Sequence
  Description of Artificial Sequence: Synthetic oligonucleotide
uuuagugcugcacuguaaa

SEQ ID NO: 751997 - RNA, 19 nt, Artificial Sequence
  Description of Artificial Sequence: Synthetic oligonucleotide
uucauuaaccuaucuagaa

SEQ ID NO: 751998 - RNA, 19 nt, Artificial Sequence
  Description of Artificial Sequence: Synthetic oligonucleotide
ucuagaguguuaaucucug

SEQ ID NO: 751999 - RNA, 19 nt, Artificial Sequence
  Description of Artificial Sequence: Synthetic oligonucleotide
aacggcagcgaccagguga

SEQ ID NO: 752000 - RNA, 19 nt, Artificial Sequence
  Description of Artificial Sequence: Synthetic oligonucleotide
uuaauucggucuaagcccu

SEQ ID NO: 752001 - RNA, 19 nt, Artificial Sequence
  Description of Artificial Sequence: Synthetic oligonucleotide
ugcuuuuaagauauccaca

SEQ ID NO: 752002 - RNA, 19 nt, Artificial Sequence
  Description of Artificial Sequence: Synthetic oligonucleotide
ugauuagcgcuuugcaggg

SEQ ID NO: 752003 - RNA, 19 nt, Artificial Sequence
  Description of Artificial Sequence: Synthetic oligonucleotide
ugaaaauccuuugauuagc

SEQ ID NO: 752004 - RNA, 19 nt, Artificial Sequence
  Description of Artificial Sequence: Synthetic oligonucleotide
uaaacguacaauagaguau

SEQ ID NO: 752005 - RNA, 19 nt, Artificial Sequence
  Description of Artificial Sequence: Synthetic oligonucleotide
uagcuuucguuuuaaaacu

SEQ ID NO: 752006 - RNA, 19 nt, Artificial Sequence
  Description of Artificial Sequence: Synthetic oligonucleotide
aaggcauacccaaaagagg

SEQ ID NO: 752007 - RNA, 19 nt, Artificial Sequence
  Description of Artificial Sequence: Synthetic oligonucleotide
ggaagucacauacagcugg

SEQ ID NO: 752008 - RNA, 19 nt, Artificial Sequence
  Description of Artificial Sequence: Synthetic oligonucleotide
uaguuuauuaucucucccu

SEQ ID NO: 752009 - RNA, 19 nt, Artificial Sequence
  Description of Artificial Sequence: Synthetic oligonucleotide
ugccguuagucucugaggc

SEQ ID NO: 752010 - RNA, 19 nt, Artificial Sequence
  Description of Artificial Sequence: Synthetic oligonucleotide
uaucuagaagucccuagug

SEQ ID NO: 752011 - RNA, 19 nt, Artificial Sequence
  Description of Artificial Sequence: Synthetic oligonucleotide
guaaacguacaauagagua

SEQ ID NO: 752012 - RNA, 19 nt, Artificial Sequence
  Description of Artificial Sequence: Synthetic oligonucleotide
aauguuugacgucauccau

SEQ ID NO: 752013 - RNA, 19 nt, Artificial Sequence
  Description of Artificial Sequence: Synthetic oligonucleotide
ucggaguauagacaauaag

SEQ ID NO: 752014 - RNA, 19 nt, Artificial Sequence
  Description of Artificial Sequence: Synthetic oligonucleotide
gaacugagaacacucuggc

SEQ ID NO: 752015 - RNA, 19 nt, Artificial Sequence
  Description of Artificial Sequence: Synthetic oligonucleotide
agaugcagcaaucccauca

SEQ ID NO: 752016 - RNA, 19 nt, Artificial Sequence
  Description of Artificial Sequence: Synthetic oligonucleotide
cuguuagaugucuacauuc

SEQ ID NO: 752017 - RNA, 19 nt, Artificial Sequence
  Description of Artificial Sequence: Synthetic oligonucleotide
uuaaccuaucuagaagucc

SEQ ID NO: 752018 - RNA, 19 nt, Artificial Sequence
  Description of Artificial Sequence: Synthetic oligonucleotide
uccgucaaauccaucuucc

SEQ ID NO: 752019 - RNA, 19 nt, Artificial Sequence
  Description of Artificial Sequence: Synthetic oligonucleotide
aaucgaagcacccucuguu

SEQ ID NO: 752020 - RNA, 19 nt, Artificial Sequence
  Description of Artificial Sequence: Synthetic oligonucleotide
guuauuauucucaaugcga

SEQ ID NO: 752021 - RNA, 19 nt, Artificial Sequence
  Description of Artificial Sequence: Synthetic oligonucleotide
gaagaaucgaagcacccuc

SEQ ID NO: 752022 - RNA, 19 nt, Artificial Sequence
  Description of Artificial Sequence: Synthetic oligonucleotide
auagaguauaagaaauuag

SEQ ID NO: 752023 - RNA, 19 nt, Artificial Sequence
  Description of Artificial Sequence: Synthetic oligonucleotide
uauugcucggaucuuguuc

SEQ ID NO: 752024 - RNA, 19 nt, Artificial Sequence
  Description of Artificial Sequence: Synthetic oligonucleotide
cauccucucguuaauucgg

SEQ ID NO: 752025 - RNA, 19 nt, Artificial Sequence
  Description of Artificial Sequence: Synthetic oligonucleotide
ucuuauguuguggugaaaa

SEQ ID NO: 752026 - RNA, 19 nt, Artificial Sequence
  Description of Artificial Sequence: Synthetic oligonucleotide
gaagcuagugaucuuaugu

SEQ ID NO: 752027 - RNA, 19 nt, Artificial Sequence
  Description of Artificial Sequence: Synthetic oligonucleotide
aauaguccuuauuuaguuu

SEQ ID NO: 752028 - RNA, 19 nt, Artificial Sequence
  Description of Artificial Sequence: Synthetic oligonucleotide
gguaaagaauuuucaaggc

SEQ ID NO: 752029 - RNA, 19 nt, Artificial Sequence
  Description of Artificial Sequence: Synthetic oligonucleotide
agugaauaggaagugguca

SEQ ID NO: 752030 - RNA, 19 nt, Artificial Sequence
  Description of Artificial Sequence: Synthetic oligonucleotide
agacaaaccaccauguaca

SEQ ID NO: 752031 - RNA, 19 nt, Artificial Sequence
  Description of Artificial Sequence: Synthetic oligonucleotide
agugcugcacuguaaacgu

SEQ ID NO: 752032 - RNA, 19 nt, Artificial Sequence
  Description of Artificial Sequence: Synthetic oligonucleotide
aagcuagugaucuuauguu

SEQ ID NO: 752033 - RNA, 19 nt, Artificial Sequence
  Description of Artificial Sequence: Synthetic oligonucleotide
uuuucaaggcccacaaaua

SEQ ID NO: 752034 - RNA, 19 nt, Artificial Sequence
  Description of Artificial Sequence: Synthetic oligonucleotide
agcuagugaucuuauguug

SEQ ID NO: 752035 - RNA, 19 nt, Artificial Sequence
  Description of Artificial Sequence: Synthetic oligonucleotide
auagccauugucugacaag

SEQ ID NO: 752036 - RNA, 19 nt, Artificial Sequence
  Description of Artificial Sequence: Synthetic oligonucleotide
uauuauucucaaugcgaca

SEQ ID NO: 752037 - RNA, 19 nt, Artificial Sequence
  Description of Artificial Sequence: Synthetic oligonucleotide
aacuguugguucaucagug

SEQ ID NO: 752038 - RNA, 19 nt, Artificial Sequence
  Description of Artificial Sequence: Synthetic oligonucleotide
agcuggauaacuguagaag

SEQ ID NO: 752039 - RNA, 19 nt, Artificial Sequence
  Description of Artificial Sequence: Synthetic oligonucleotide
uucgccucuucgaagcuag

SEQ ID NO: 752040 - RNA, 19 nt, Artificial Sequence
  Description of Artificial Sequence: Synthetic oligonucleotide
ugggcccauaagcaggugg

SEQ ID NO: 752041 - RNA, 19 nt, Artificial Sequence
  Description of Artificial Sequence: Synthetic oligonucleotide
uugggagccaguacggaug

SEQ ID NO: 752042 - RNA, 19 nt, Artificial Sequence
  Description of Artificial Sequence: Synthetic oligonucleotide
uagacaaaguuuucguguc

SEQ ID NO: 752043 - RNA, 19 nt, Artificial Sequence
  Description of Artificial Sequence: Synthetic oligonucleotide
aggcaucauaaacacguuc

SEQ ID NO: 752044 - RNA, 19 nt, Artificial Sequence
  Description of Artificial Sequence: Synthetic oligonucleotide
auaaguuauuguguugcag

SEQ ID NO: 752045 - RNA, 19 nt, Artificial Sequence
  Description of Artificial Sequence: Synthetic oligonucleotide
gaacacucuggccauuuug

SEQ ID NO: 752046 - RNA, 19 nt, Artificial Sequence
  Description of Artificial Sequence: Synthetic oligonucleotide
gaguguuaaucucuggaga

SEQ ID NO: 752047 - RNA, 19 nt, Artificial Sequence
  Description of Artificial Sequence: Synthetic oligonucleotide
uauagacuagcauuagcuu

SEQ ID NO: 752048 - RNA, 19 nt, Artificial Sequence
  Description of Artificial Sequence: Synthetic oligonucleotide
acaugcgguacccugcguc

SEQ ID NO: 752049 - RNA, 19 nt, Artificial Sequence
  Description of Artificial Sequence: Synthetic oligonucleotide
acacaggaacuguugguuc

SEQ ID NO: 752050 - RNA, 19 nt, Artificial Sequence
  Description of Artificial Sequence: Synthetic oligonucleotide
uuuguuguuguuguuguua

SEQ ID NO: 752051 - RNA, 19 nt, Artificial Sequence
  Description of Artificial Sequence: Synthetic oligonucleotide
ucguuaauucggucuaagc

SEQ ID NO: 752052 - RNA, 19 nt, Artificial Sequence
  Description of Artificial Sequence: Synthetic oligonucleotide
uugaaucggucuaauuuuc

SEQ ID NO: 752053 - RNA, 19 nt, Artificial Sequence
  Description of Artificial Sequence: Synthetic oligonucleotide
cauuuugccuauugcucgg

SEQ ID NO: 752054 - RNA, 19 nt, Artificial Sequence
  Description of Artificial Sequence: Synthetic oligonucleotide
auuaaccuaucuagaaguc

SEQ ID NO: 752055 - RNA, 19 nt, Artificial Sequence
  Description of Artificial Sequence: Synthetic oligonucleotide
cauuaaccuaucuagaagu

SEQ ID NO: 752056 - RNA, 19 nt, Artificial Sequence
  Description of Artificial Sequence: Synthetic oligonucleotide
gugaauaggaaguggucac

SEQ ID NO: 752057 - RNA, 19 nt, Artificial Sequence
  Description of Artificial Sequence: Synthetic oligonucleotide
ugguucuuugaaucggucu

SEQ ID NO: 752058 - RNA, 19 nt, Artificial Sequence
  Description of Artificial Sequence: Synthetic oligonucleotide
uccugucgaagaaucgaag

SEQ ID NO: 752059 - RNA, 19 nt, Artificial Sequence
  Description of Artificial Sequence: Synthetic oligonucleotide
uacucuguuagaugucuac

SEQ ID NO: 752060 - RNA, 19 nt, Artificial Sequence
  Description of Artificial Sequence: Synthetic oligonucleotide
uuguuguuguuguuguuaa

SEQ ID NO: 752061 - RNA, 19 nt, Artificial Sequence
  Description of Artificial Sequence: Synthetic oligonucleotide
agaugugcuuuuaagauau

SEQ ID NO: 752062 - RNA, 19 nt, Artificial Sequence
  Description of Artificial Sequence: Synthetic oligonucleotide
cagucgaaggcauccauac

SEQ ID NO: 752063 - RNA, 19 nt, Artificial Sequence
  Description of Artificial Sequence: Synthetic oligonucleotide
uuauucucaaugcgacacu

SEQ ID NO: 752064 - RNA, 19 nt, Artificial Sequence
  Description of Artificial Sequence: Synthetic oligonucleotide
caguaggaaaacauguuca

SEQ ID NO: 752065 - RNA, 19 nt, Artificial Sequence
  Description of Artificial Sequence: Synthetic oligonucleotide
aaguuuucguguccaguaa

SEQ ID NO: 752066 - RNA, 19 nt, Artificial Sequence
  Description of Artificial Sequence: Synthetic oligonucleotide
aggcauacccaaaagaggu

SEQ ID NO: 752067 - RNA, 19 nt, Artificial Sequence
  Description of Artificial Sequence: Synthetic oligonucleotide
cuagugaucuuauguugug

SEQ ID NO: 752068 - RNA, 19 nt, Artificial Sequence
  Description of Artificial Sequence: Synthetic oligonucleotide
cuagaguguuaaucucugg

SEQ ID NO: 752069 - RNA, 19 nt, Artificial Sequence
  Description of Artificial Sequence: Synthetic oligonucleotide
aucucugcgagguggcauc

SEQ ID NO: 752070 - RNA, 19 nt, Artificial Sequence
  Description of Artificial Sequence: Synthetic oligonucleotide
guuaagguuggcgucggag

SEQ ID NO: 752071 - RNA, 19 nt, Artificial Sequence
  Description of Artificial Sequence: Synthetic oligonucleotide
gucaucuagaguguuaauc

SEQ ID NO: 752072 - RNA, 19 nt, Artificial Sequence
  Description of Artificial Sequence: Synthetic oligonucleotide
ugcacuguaaacguacaau

SEQ ID NO: 752073 - RNA, 19 nt, Artificial Sequence
  Description of Artificial Sequence: Synthetic oligonucleotide
aaucccaucaugaccugca

SEQ ID NO: 752074 - RNA, 19 nt, Artificial Sequence
  Description of Artificial Sequence: Synthetic oligonucleotide
uaacagaauaaaaggccuu

SEQ ID NO: 752075 - RNA, 19 nt, Artificial Sequence
  Description of Artificial Sequence: Synthetic oligonucleotide
aucggucuaauuuucugau

SEQ ID NO: 752076 - RNA, 19 nt, Artificial Sequence
  Description of Artificial Sequence: Synthetic oligonucleotide
guuuauagccauugucuga

SEQ ID NO: 752077 - RNA, 19 nt, Artificial Sequence
  Description of Artificial Sequence: Synthetic oligonucleotide
aauccuuugauuagcgcuu

SEQ ID NO: 752078 - RNA, 19 nt, Artificial Sequence
  Description of Artificial Sequence: Synthetic oligonucleotide
ugcgacacuuuccuccagc

SEQ ID NO: 752079 - RNA, 19 nt, Artificial Sequence
  Description of Artificial Sequence: Synthetic oligonucleotide
guauagacuagcauuagcu

SEQ ID NO: 752080 - RNA, 19 nt, Artificial Sequence
  Description of Artificial Sequence: Synthetic oligonucleotide
uggccauuuugccuauugc

SEQ ID NO: 752081 - RNA, 19 nt, Artificial Sequence
  Description of Artificial Sequence: Synthetic oligonucleotide
aguacggauggggagagca

SEQ ID NO: 752082 - RNA, 19 nt, Artificial Sequence
  Description of Artificial Sequence: Synthetic oligonucleotide
gcgagagccuuguugaugg

SEQ ID NO: 752083 - RNA, 19 nt, Artificial Sequence
  Description of Artificial Sequence: Synthetic oligonucleotide
uucauuccccuaacauugc

SEQ ID NO: 752084 - RNA, 19 nt, Artificial Sequence
  Description of Artificial Sequence: Synthetic oligonucleotide
guugguucaucagugcagc

SEQ ID NO: 752085 - RNA, 19 nt, Artificial Sequence
  Description of Artificial Sequence: Synthetic oligonucleotide
uuccugucgaagaaucgaa

SEQ ID NO: 752086 - RNA, 19 nt, Artificial Sequence
  Description of Artificial Sequence: Synthetic oligonucleotide
cugagaugcagcaauccca

SEQ ID NO: 752087 - RNA, 19 nt, Artificial Sequence
  Description of Artificial Sequence: Synthetic oligonucleotide
guacaugcgguacccugcg

SEQ ID NO: 752088 - RNA, 19 nt, Artificial Sequence
  Description of Artificial Sequence: Synthetic oligonucleotide
caucuagaguguuaaucuc

SEQ ID NO: 752089 - RNA, 19 nt, Artificial Sequence
  Description of Artificial Sequence: Synthetic oligonucleotide
ucauuccccuaacauugca

SEQ ID NO: 752090 - RNA, 19 nt, Artificial Sequence
  Description of Artificial Sequence: Synthetic oligonucleotide
agaaucgaagcacccucug

SEQ ID NO: 752091 - RNA, 19 nt, Artificial Sequence
  Description of Artificial Sequence: Synthetic oligonucleotide
uuacugccguugcuguccg

SEQ ID NO: 752092 - RNA, 19 nt, Artificial Sequence
  Description of Artificial Sequence: Synthetic oligonucleotide
uuugggagccaguacggau

SEQ ID NO: 752093 - RNA, 19 nt, Artificial Sequence
  Description of Artificial Sequence: Synthetic oligonucleotide
acguacaauagaguauaag

SEQ ID NO: 752094 - RNA, 19 nt, Artificial Sequence
  Description of Artificial Sequence: Synthetic oligonucleotide
cguacaauagaguauaaga

SEQ ID NO: 752095 - RNA, 19 nt, Artificial Sequence
  Description of Artificial Sequence: Synthetic oligonucleotide
caugcgguacccugcgucc

SEQ ID NO: 752096 - RNA, 19 nt, Artificial Sequence
  Description of Artificial Sequence: Synthetic oligonucleotide
uugcaguauagacuagcau

SEQ ID NO: 752097 - RNA, 19 nt, Artificial Sequence
  Description of Artificial Sequence: Synthetic oligonucleotide
aagcccuucgccucuucga

SEQ ID NO: 752098 - RNA, 19 nt, Artificial Sequence
  Description of Artificial Sequence: Synthetic oligonucleotide
cuguacaugcgguacccug

SEQ ID NO: 752099 - RNA, 19 nt, Artificial Sequence
  Description of Artificial Sequence: Synthetic oligonucleotide
gugaucuuauguuguggug

SEQ ID NO: 752100 - RNA, 19 nt, Artificial Sequence
  Description of Artificial Sequence: Synthetic oligonucleotide
ggaguuaagguuggcgucg

SEQ ID NO: 752101 - RNA, 19 nt, Artificial Sequence
  Description of Artificial Sequence: Synthetic oligonucleotide
ugcgucuucucauuuccaa

SEQ ID NO: 752102 - RNA, 19 nt, Artificial Sequence
  Description of Artificial Sequence: Synthetic oligonucleotide
gugccguuagucucugagg

SEQ ID NO: 752103 - RNA, 19 nt, Artificial Sequence
  Description of Artificial Sequence: Synthetic oligonucleotide
ucggucuaauuuucugaug

SEQ ID NO: 752104 - RNA, 19 nt, Artificial Sequence
  Description of Artificial Sequence: Synthetic oligonucleotide
aggugguucuuugaaucgg

SEQ ID NO: 752105 - RNA, 19 nt, Artificial Sequence
  Description of Artificial Sequence: Synthetic oligonucleotide
ucccuagugcaguaggaaa

SEQ ID NO: 752106 - RNA, 19 nt, Artificial Sequence
  Description of Artificial Sequence: Synthetic oligonucleotide
acacguucugaauacuuua

SEQ ID NO: 752107 - RNA, 19 nt, Artificial Sequence
  Description of Artificial Sequence: Synthetic oligonucleotide
ugaauaggaaguggucacu

SEQ ID NO: 752108 - RNA, 19 nt, Artificial Sequence
  Description of Artificial Sequence: Synthetic oligonucleotide
aagaaucgaagcacccucu

SEQ ID NO: 752109 - RNA, 19 nt, Artificial Sequence
  Description of Artificial Sequence: Synthetic oligonucleotide
guguuuaaucaccacccuc

SEQ ID NO: 752110 - RNA, 19 nt, Artificial Sequence
  Description of Artificial Sequence: Synthetic oligonucleotide
gaacuguugguucaucagu

SEQ ID NO: 752111 - RNA, 19 nt, Artificial Sequence
  Description of Artificial Sequence: Synthetic oligonucleotide
ugcuauuacugccguugcu

SEQ ID NO: 752112 - RNA, 19 nt, Artificial Sequence
  Description of Artificial Sequence: Synthetic oligonucleotide
ccuuaucaauaaauagucc

SEQ ID NO: 752113 - RNA, 19 nt, Artificial Sequence
  Description of Artificial Sequence: Synthetic oligonucleotide
ccugucgaagaaucgaagc

SEQ ID NO: 752114 - RNA, 19 nt, Artificial Sequence
  Description of Artificial Sequence: Synthetic oligonucleotide
gcaguaggaaaacauguuc

SEQ ID NO: 752115 - RNA, 19 nt, Artificial Sequence
  Description of Artificial Sequence: Synthetic oligonucleotide
aacacguucugaauacuuu

SEQ ID NO: 752116 - RNA, 19 nt, Artificial Sequence
  Description of Artificial Sequence: Synthetic oligonucleotide
accgucagaggcaagaaaa

SEQ ID NO: 752117 - RNA, 19 nt, Artificial Sequence
  Description of Artificial Sequence: Synthetic oligonucleotide
gaaguacccucugucaaca

SEQ ID NO: 752118 - RNA, 19 nt, Artificial Sequence
  Description of Artificial Sequence: Synthetic oligonucleotide
uagaagucccuagugcagu

SEQ ID NO: 752119 - RNA, 19 nt, Artificial Sequence
  Description of Artificial Sequence: Synthetic oligonucleotide
uauucucaaugcgacacuu

SEQ ID NO: 752120 - RNA, 19 nt, Artificial Sequence
  Description of Artificial Sequence: Synthetic oligonucleotide
auuagcgcuuugcaggguu

SEQ ID NO: 752121 - RNA, 19 nt, Artificial Sequence
  Description of Artificial Sequence: Synthetic oligonucleotide
guagaaguaugaacacccc

SEQ ID NO: 752122 - RNA, 19 nt, Artificial Sequence
  Description of Artificial Sequence: Synthetic oligonucleotide
gcuauuacugccguugcug

SEQ ID NO: 752123 - RNA, 19 nt, Artificial Sequence
  Description of Artificial Sequence: Synthetic oligonucleotide
ucuuugaaucggucuaauu

SEQ ID NO: 752124 - RNA, 19 nt, Artificial Sequence
  Description of Artificial Sequence: Synthetic oligonucleotide
gcugcuauuacugccguug

SEQ ID NO: 752125 - RNA, 19 nt, Artificial Sequence
  Description of Artificial Sequence: Synthetic oligonucleotide
ugucaacauaguccccuaa

SEQ ID NO: 752126 - RNA, 19 nt, Artificial Sequence
  Description of Artificial Sequence: Synthetic oligonucleotide
ucgaagcuagugaucuuau

SEQ ID NO: 752127 - RNA, 19 nt, Artificial Sequence
  Description of Artificial Sequence: Synthetic oligonucleotide
gagguagcgaguguuggca

SEQ ID NO: 752128 - RNA, 19 nt, Artificial Sequence
  Description of Artificial Sequence: Synthetic oligonucleotide
acucuguuagaugucuaca

SEQ ID NO: 752129 - RNA, 19 nt, Artificial Sequence
  Description of Artificial Sequence: Synthetic oligonucleotide
uuggcgucggagggcaugg

SEQ ID NO: 752130 - RNA, 19 nt, Artificial Sequence
  Description of Artificial Sequence: Synthetic oligonucleotide
gaguuaagguuggcgucgg

SEQ ID NO: 752131 - RNA, 19 nt, Artificial Sequence
  Description of Artificial Sequence: Synthetic oligonucleotide
gaguguuggcaggcgaucc

SEQ ID NO: 752132 - RNA, 19 nt, Artificial Sequence
  Description of Artificial Sequence: Synthetic oligonucleotide
agguagcgaguguuggcag

SEQ ID NO: 752133 - RNA, 19 nt, Artificial Sequence
  Description of Artificial Sequence: Synthetic oligonucleotide
uauuacugccguugcuguc

SEQ ID NO: 752134 - RNA, 19 nt, Artificial Sequence
  Description of Artificial Sequence: Synthetic oligonucleotide
ccuaucuagaagucccuag

SEQ ID NO: 752135 - RNA, 19 nt, Artificial Sequence
  Description of Artificial Sequence: Synthetic oligonucleotide
uuauagccauugucugaca

SEQ ID NO: 752136 - RNA, 19 nt, Artificial Sequence
  Description of Artificial Sequence: Synthetic oligonucleotide
gguagcgaguguuggcagg

SEQ ID NO: 752137 - RNA, 19 nt, Artificial Sequence
  Description of Artificial Sequence: Synthetic oligonucleotide
uacggauggggagagcagu

SEQ ID NO: 752138 - RNA, 19 nt, Artificial Sequence
  Description of Artificial Sequence: Synthetic oligonucleotide
ggggcaucaauauccagca

SEQ ID NO: 752139 - RNA, 19 nt, Artificial Sequence
  Description of Artificial Sequence: Synthetic oligonucleotide
cuccgucaaauccaucuuc

SEQ ID NO: 752140 - RNA, 19 nt, Artificial Sequence
  Description of Artificial Sequence: Synthetic oligonucleotide
ugacuggggcaucaauauc

SEQ ID NO: 752141 - RNA, 19 nt, Artificial Sequence
  Description of Artificial Sequence: Synthetic oligonucleotide
aguguuggcaggcgauccu

SEQ ID NO: 752142 - RNA, 19 nt, Artificial Sequence
  Description of Artificial Sequence: Synthetic oligonucleotide
cucguuaauucggucuaag

SEQ ID NO: 752143 - RNA, 19 nt, Artificial Sequence
  Description of Artificial Sequence: Synthetic oligonucleotide
agacuagcauuagcuuucg

SEQ ID NO: 752144 - RNA, 19 nt, Artificial Sequence
  Description of Artificial Sequence: Synthetic oligonucleotide
uaccgucagaggcaagaaa

SEQ ID NO: 752145 - RNA, 19 nt, Artificial Sequence
  Description of Artificial Sequence: Synthetic oligonucleotide
cucaaugcgacacuuuccu

SEQ ID NO: 752146 - RNA, 19 nt, Artificial Sequence
  Description of Artificial Sequence: Synthetic oligonucleotide
acaguguuuuggguaaaga

SEQ ID NO: 752147 - RNA, 19 nt, Artificial Sequence
  Description of Artificial Sequence: Synthetic oligonucleotide
agcgcuuugcaggguuugc

SEQ ID NO: 752148 - RNA, 19 nt, Artificial Sequence
  Description of Artificial Sequence: Synthetic oligonucleotide
caagaguagcaaaaccuua

SEQ ID NO: 752149 - RNA, 19 nt, Artificial Sequence
  Description of Artificial Sequence: Synthetic oligonucleotide
acguucugaauacuuuauu

SEQ ID NO: 752150 - RNA, 19 nt, Artificial Sequence
  Description of Artificial Sequence: Synthetic oligonucleotide
ucaaugcgacacuuuccuc

SEQ ID NO: 752151 - RNA, 19 nt, Artificial Sequence
  Description of Artificial Sequence: Synthetic oligonucleotide
uuuuguuguuguuguuguu

SEQ ID NO: 752152 - RNA, 19 nt, Artificial Sequence
  Description of Artificial Sequence: Synthetic oligonucleotide
auuuggugcugagaaaauu

SEQ ID NO: 752153 - RNA, 19 nt, Artificial Sequence
  Description of Artificial Sequence: Synthetic oligonucleotide
cucuucgaagcuagugauc

SEQ ID NO: 752154 - RNA, 19 nt, Artificial Sequence
  Description of Artificial Sequence: Synthetic oligonucleotide
ucugaggcgagagccuugu

SEQ ID NO: 752155 - RNA, 19 nt, Artificial Sequence
  Description of Artificial Sequence: Synthetic oligonucleotide
cagcgaccaggugaaaacg

SEQ ID NO: 752156 - RNA, 19 nt, Artificial Sequence
  Description of Artificial Sequence: Synthetic oligonucleotide
aaccuaucuagaagucccu

SEQ ID NO: 752157 - RNA, 19 nt, Artificial Sequence
  Description of Artificial Sequence: Synthetic oligonucleotide
caguauagacuagcauuag

SEQ ID NO: 752158 - RNA, 19 nt, Artificial Sequence
  Description of Artificial Sequence: Synthetic oligonucleotide
gaaguggucacugaauauu

SEQ ID NO: 752159 - RNA, 19 nt, Artificial Sequence
  Description of Artificial Sequence: Synthetic oligonucleotide
aucgaagcacccucuguua

SEQ ID NO: 752160 - RNA, 19 nt, Artificial Sequence
  Description of Artificial Sequence: Synthetic oligonucleotide
uuccccuaacauugcagua

SEQ ID NO: 752161 - RNA, 19 nt, Artificial Sequence
  Description of Artificial Sequence: Synthetic oligonucleotide
gcagcgaccaggugaaaac

SEQ ID NO: 752162 - RNA, 19 nt, Artificial Sequence
  Description of Artificial Sequence: Synthetic oligonucleotide
cacacgaggcuucccauca

SEQ ID NO: 752163 - RNA, 19 nt, Artificial Sequence
  Description of Artificial Sequence: Synthetic oligonucleotide
acugaauauugcugcuauu

SEQ ID NO: 752164 - RNA, 19 nt, Artificial Sequence
  Description of Artificial Sequence: Synthetic oligonucleotide
ucgugggcucggaguauag

SEQ ID NO: 752165 - RNA, 19 nt, Artificial Sequence
  Description of Artificial Sequence: Synthetic oligonucleotide
uccugcgucuucucauuuc

SEQ ID NO: 752166 - RNA, 19 nt, Artificial Sequence
  Description of Artificial Sequence: Synthetic oligonucleotide
uuagcgcuuugcaggguuu

SEQ ID NO: 752167 - RNA, 19 nt, Artificial Sequence
  Description of Artificial Sequence: Synthetic oligonucleotide
ugcgguacccugcguccug

SEQ ID NO: 752168 - RNA, 19 nt, Artificial Sequence
  Description of Artificial Sequence: Synthetic oligonucleotide
ggcauccucucguuaauuc

SEQ ID NO: 752169 - RNA, 19 nt, Artificial Sequence
  Description of Artificial Sequence: Synthetic oligonucleotide
cucggaguauagacaauaa

SEQ ID NO: 752170 - RNA, 19 nt, Artificial Sequence
  Description of Artificial Sequence: Synthetic oligonucleotide
ggcaucauaaacacguucu

SEQ ID NO: 752171 - RNA, 19 nt, Artificial Sequence
  Description of Artificial Sequence: Synthetic oligonucleotide
aaacggcagcgaccaggug

SEQ ID NO: 752172 - RNA, 19 nt, Artificial Sequence
  Description of Artificial Sequence: Synthetic oligonucleotide
uccucucguuaauucgguc

SEQ ID NO: 752173 - RNA, 19 nt, Artificial Sequence
  Description of Artificial Sequence: Synthetic oligonucleotide
gccucuucgaagcuaguga

SEQ ID NO: 752174 - RNA, 19 nt, Artificial Sequence
  Description of Artificial Sequence: Synthetic oligonucleotide
aacguacaauagaguauaa

SEQ ID NO: 752175 - RNA, 19 nt, Artificial Sequence
  Description of Artificial Sequence: Synthetic oligonucleotide
gugacuggggcaucaauau

SEQ ID NO: 752176 - RNA, 19 nt, Artificial Sequence
  Description of Artificial Sequence: Synthetic oligonucleotide
auuugggagccaguacgga

SEQ ID NO: 752177 - RNA, 19 nt, Artificial Sequence
  Description of Artificial Sequence: Synthetic oligonucleotide
ggucuaauuuucugauguc

SEQ ID NO: 752178 - RNA, 19 nt, Artificial Sequence
  Description of Artificial Sequence: Synthetic oligonucleotide
aagcuaccgucagaggcaa

SEQ ID NO: 752179 - RNA, 19 nt, Artificial Sequence
  Description of Artificial Sequence: Synthetic oligonucleotide
gguggcauccucucguuaa

SEQ ID NO: 752180 - RNA, 19 nt, Artificial Sequence
  Description of Artificial Sequence: Synthetic oligonucleotide
uucaugagaugugcuuuua

SEQ ID NO: 752181 - RNA, 19 nt, Artificial Sequence
  Description of Artificial Sequence: Synthetic oligonucleotide
auacccaaaagagguguuu

SEQ ID NO: 752182 - RNA, 19 nt, Artificial Sequence
  Description of Artificial Sequence: Synthetic oligonucleotide
gccguuagucucugaggcg

SEQ ID NO: 752183 - RNA, 19 nt, Artificial Sequence
  Description of Artificial Sequence: Synthetic oligonucleotide
cucucguuaauucggucua

SEQ ID NO: 752184 - RNA, 19 nt, Artificial Sequence
  Description of Artificial Sequence: Synthetic oligonucleotide
cuauuacugccguugcugu

SEQ ID NO: 752185 - RNA, 19 nt, Artificial Sequence
  Description of Artificial Sequence: Synthetic oligonucleotide
guuagaugucuacauucau

SEQ ID NO: 752186 - RNA, 19 nt, Artificial Sequence
  Description of Artificial Sequence: Synthetic oligonucleotide
auguuguggugaaaauccu

SEQ ID NO: 752187 - RNA, 19 nt, Artificial Sequence
  Description of Artificial Sequence: Synthetic oligonucleotide
cagauguugaggacauuua

SEQ ID NO: 752188 - RNA, 19 nt, Artificial Sequence
  Description of Artificial Sequence: Synthetic oligonucleotide
uagcgcuuugcaggguuug

SEQ ID NO: 752189 - RNA, 19 nt, Artificial Sequence
  Description of Artificial Sequence: Synthetic oligonucleotide
ucguguccaguaacagaau

SEQ ID NO: 752190 - RNA, 19 nt, Artificial Sequence
  Description of Artificial Sequence: Synthetic oligonucleotide
cggaguauagacaauaagu

SEQ ID NO: 752191 - RNA, 19 nt, Artificial Sequence
  Description of Artificial Sequence: Synthetic oligonucleotide
ccaugauaguguaaacuga

SEQ ID NO: 752192 - RNA, 19 nt, Artificial Sequence
  Description of Artificial Sequence: Synthetic oligonucleotide
ucucguuaauucggucuaa

SEQ ID NO: 752193 - RNA, 19 nt, Artificial Sequence
  Description of Artificial Sequence: Synthetic oligonucleotide
guacggauggggagagcag

SEQ ID NO: 752194 - RNA, 19 nt, Artificial Sequence
  Description of Artificial Sequence: Synthetic oligonucleotide
ucucugcgagguggcaucc

SEQ ID NO: 752195 - RNA, 19 nt, Artificial Sequence
  Description of Artificial Sequence: Synthetic oligonucleotide
ggucuaagcccuucgccuc

SEQ ID NO: 752196 - RNA, 19 nt, Artificial Sequence
  Description of Artificial Sequence: Synthetic oligonucleotide
agcgaccaggugaaaacgu

SEQ ID NO: 752197 - RNA, 19 nt, Artificial Sequence
  Description of Artificial Sequence: Synthetic oligonucleotide
gcgacacuuuccuccagcc

SEQ ID NO: 752198 - RNA, 19 nt, Artificial Sequence
  Description of Artificial Sequence: Synthetic oligonucleotide
uacaugcgguacccugcgu

SEQ ID NO: 752199 - RNA, 19 nt, Artificial Sequence
  Description of Artificial Sequence: Synthetic oligonucleotide
ccagagcaaagcuaccguc

SEQ ID NO: 752200 - RNA, 19 nt, Artificial Sequence
  Description of Artificial Sequence: Synthetic oligonucleotide
cucguacuucaacacugca

SEQ ID NO: 752201 - RNA, 19 nt, Artificial Sequence
  Description of Artificial Sequence: Synthetic oligonucleotide
cacgccacuggggagcaug

SEQ ID NO: 752202 - RNA, 19 nt, Artificial Sequence
  Description of Artificial Sequence: Synthetic oligonucleotide
aguuaagguuggcgucgga

SEQ ID NO: 752203 - RNA, 19 nt, Artificial Sequence
  Description of Artificial Sequence: Synthetic oligonucleotide
gggcucggaguauagacaa

SEQ ID NO: 752204 - RNA, 19 nt, Artificial Sequence
  Description of Artificial Sequence: Synthetic oligonucleotide
agucccuagugcaguagga

SEQ ID NO: 752205 - RNA, 19 nt, Artificial Sequence
  Description of Artificial Sequence: Synthetic oligonucleotide
cgugccguuagucucugag

SEQ ID NO: 752206 - RNA, 19 nt, Artificial Sequence
  Description of Artificial Sequence: Synthetic oligonucleotide
uacccugcguccugggcuu

SEQ ID NO: 752207 - RNA, 19 nt, Artificial Sequence
  Description of Artificial Sequence: Synthetic oligonucleotide
gagaugcagcaaucccauc

SEQ ID NO: 752208 - RNA, 19 nt, Artificial Sequence
  Description of Artificial Sequence: Synthetic oligonucleotide
gcuaccgucagaggcaaga

SEQ ID NO: 752209 - RNA, 19 nt, Artificial Sequence
  Description of Artificial Sequence: Synthetic oligonucleotide
augcgacacuuuccuccag

SEQ ID NO: 752210 - RNA, 19 nt, Artificial Sequence
  Description of Artificial Sequence: Synthetic oligonucleotide
auccucucguuaauucggu

SEQ ID NO: 752211 - RNA, 19 nt, Artificial Sequence
  Description of Artificial Sequence: Synthetic oligonucleotide
uucgugggcucggaguaua

SEQ ID NO: 752212 - RNA, 19 nt, Artificial Sequence
  Description of Artificial Sequence: Synthetic oligonucleotide
acugccuaauucaguuuau

SEQ ID NO: 752213 - RNA, 19 nt, Artificial Sequence
  Description of Artificial Sequence: Synthetic oligonucleotide
ccccagagcaaagcuaccg

SEQ ID NO: 752214 - RNA, 19 nt, Artificial Sequence
  Description of Artificial Sequence: Synthetic oligonucleotide
cugcacuguaaacguacaa

SEQ ID NO: 752215 - RNA, 19 nt, Artificial Sequence
  Description of Artificial Sequence: Synthetic oligonucleotide
accuaucuagaagucccua

SEQ ID NO: 752216 - RNA, 19 nt, Artificial Sequence
  Description of Artificial Sequence: Synthetic oligonucleotide
cacguucugaauacuuuau

SEQ ID NO: 752217 - RNA, 19 nt, Artificial Sequence
  Description of Artificial Sequence: Synthetic oligonucleotide
acggcagcgaccaggugaa

SEQ ID NO: 752218 - RNA, 19 nt, Artificial Sequence
  Description of Artificial Sequence: Synthetic oligonucleotide
gcgagguggcauccucucg

SEQ ID NO: 752219 - RNA, 19 nt, Artificial Sequence
  Description of Artificial Sequence: Synthetic oligonucleotide
agcaugccuguugggguca

SEQ ID NO: 752220 - RNA, 19 nt, Artificial Sequence
  Description of Artificial Sequence: Synthetic oligonucleotide
gguguuuaaucaccacccu

SEQ ID NO: 752221 - RNA, 19 nt, Artificial Sequence
  Description of Artificial Sequence: Synthetic oligonucleotide
ugcuguccgugccguuagu

SEQ ID NO: 752222 - RNA, 19 nt, Artificial Sequence
  Description of Artificial Sequence: Synthetic oligonucleotide
acgaggcuucccaucauua

SEQ ID NO: 752223 - RNA, 19 nt, Artificial Sequence
  Description of Artificial Sequence: Synthetic oligonucleotide
gcauacccaaaagaggugu

SEQ ID NO: 752224 - RNA, 19 nt, Artificial Sequence
  Description of Artificial Sequence: Synthetic oligonucleotide
uggcauccucucguuaauu

SEQ ID NO: 752225 - RNA, 19 nt, Artificial Sequence
  Description of Artificial Sequence: Synthetic oligonucleotide
gcucggaguauagacaaua

SEQ ID NO: 752226 - RNA, 19 nt, Artificial Sequence
  Description of Artificial Sequence: Synthetic oligonucleotide
gccaguacggauggggaga

SEQ ID NO: 752227 - RNA, 19 nt, Artificial Sequence
  Description of Artificial Sequence: Synthetic oligonucleotide
ucgccucuucgaagcuagu

SEQ ID NO: 752228 - RNA, 19 nt, Artificial Sequence
  Description of Artificial Sequence: Synthetic oligonucleotide
cuaagcccuucgccucuuc

SEQ ID NO: 752229 - RNA, 19 nt, Artificial Sequence
  Description of Artificial Sequence: Synthetic oligonucleotide
cggucuaauuuucugaugu

SEQ ID NO: 752230 - RNA, 19 nt, Artificial Sequence
  Description of Artificial Sequence: Synthetic oligonucleotide
ggcauccauacaggcauca

SEQ ID NO: 752231 - RNA, 19 nt, Artificial Sequence
  Description of Artificial Sequence: Synthetic oligonucleotide
augcgguacccugcguccu

SEQ ID NO: 752232 - RNA, 19 nt, Artificial Sequence
  Description of Artificial Sequence: Synthetic oligonucleotide
ucuaagcccuucgccucuu

SEQ ID NO: 752233 - RNA, 19 nt, Artificial Sequence
  Description of Artificial Sequence: Synthetic oligonucleotide
ccaguacggauggggagag

SEQ ID NO: 752234 - RNA, 19 nt, Artificial Sequence
  Description of Artificial Sequence: Synthetic oligonucleotide
cauacccaaaagagguguu

SEQ ID NO: 752235 - RNA, 19 nt, Artificial Sequence
  Description of Artificial Sequence: Synthetic oligonucleotide
cugccuaauucaguuuaua

SEQ ID NO: 752236 - RNA, 19 nt, Artificial Sequence
  Description of Artificial Sequence: Synthetic oligonucleotide
uggcuccgucaaauccauc

SEQ ID NO: 752237 - RNA, 19 nt, Artificial Sequence
  Description of Artificial Sequence: Synthetic oligonucleotide
gcgaccaggugaaaacguc

SEQ ID NO: 752238 - RNA, 19 nt, Artificial Sequence
  Description of Artificial Sequence: Synthetic oligonucleotide
gacuagcauuagcuuucgu

SEQ ID NO: 752239 - RNA, 19 nt, Artificial Sequence
  Description of Artificial Sequence: Synthetic oligonucleotide
ccacacgaggcuucccauc

SEQ ID NO: 752240 - RNA, 19 nt, Artificial Sequence
  Description of Artificial Sequence: Synthetic oligonucleotide
ggcuucgugggcucggagu

SEQ ID NO: 752241 - RNA, 19 nt, Artificial Sequence
  Description of Artificial Sequence: Synthetic oligonucleotide
cugcguccugggcuucgug

SEQ ID NO: 752242 - RNA, 19 nt, Artificial Sequence
  Description of Artificial Sequence: Synthetic oligonucleotide
cguuagucucugaggcgag

SEQ ID NO: 752243 - RNA, 19 nt, Artificial Sequence
  Description of Artificial Sequence: Synthetic oligonucleotide
gauuagcgcuuugcagggu

SEQ ID NO: 752244 - RNA, 19 nt, Artificial Sequence
  Description of Artificial Sequence: Synthetic oligonucleotide
caguacggauggggagagc

SEQ ID NO: 752245 - RNA, 19 nt, Artificial Sequence
  Description of Artificial Sequence: Synthetic oligonucleotide
gcuguccgugccguuaguc

SEQ ID NO: 752246 - RNA, 19 nt, Artificial Sequence
  Description of Artificial Sequence: Synthetic oligonucleotide
cuauugcucggaucuuguu

SEQ ID NO: 752247 - RNA, 19 nt, Artificial Sequence
  Description of Artificial Sequence: Synthetic oligonucleotide
agccuguuguuuggcuuuu

SEQ ID NO: 752248 - RNA, 19 nt, Artificial Sequence
  Description of Artificial Sequence: Synthetic oligonucleotide
ccucuucgaagcuagugau

SEQ ID NO: 752249 - RNA, 19 nt, Artificial Sequence
  Description of Artificial Sequence: Synthetic oligonucleotide
gcagucgaaggcauccaua

SEQ ID NO: 752250 - RNA, 19 nt, Artificial Sequence
  Description of Artificial Sequence: Synthetic oligonucleotide
gccuuucauuaaccuaucu

SEQ ID NO: 752251 - RNA, 19 nt, Artificial Sequence
  Description of Artificial Sequence: Synthetic oligonucleotide
agcagauguugaggacauu

SEQ ID NO: 752252 - RNA, 19 nt, Artificial Sequence
  Description of Artificial Sequence: Synthetic oligonucleotide
agcuaccgucagaggcaag

SEQ ID NO: 752253 - RNA, 19 nt, Artificial Sequence
  Description of Artificial Sequence: Synthetic oligonucleotide
cgucggagggcauggcauc

SEQ ID NO: 752254 - RNA, 19 nt, Artificial Sequence
  Description of Artificial Sequence: Synthetic oligonucleotide
cacgaggcuucccaucauu

SEQ ID NO: 752255 - RNA, 19 nt, Artificial Sequence
  Description of Artificial Sequence: Synthetic oligonucleotide
cggucuaagcccuucgccu

SEQ ID NO: 752256 - RNA, 19 nt, Artificial Sequence
  Description of Artificial Sequence: Synthetic oligonucleotide
guuugacgucauccauuuu

SEQ ID NO: 752257 - RNA, 19 nt, Artificial Sequence
  Description of Artificial Sequence: Synthetic oligonucleotide
gcuccgucaaauccaucuu

SEQ ID NO: 752258 - RNA, 19 nt, Artificial Sequence
  Description of Artificial Sequence: Synthetic oligonucleotide
ccgucagaggcaagaaaau

SEQ ID NO: 752259 - RNA, 19 nt, Artificial Sequence
  Description of Artificial Sequence: Synthetic oligonucleotide
cgaagaaucgaagcacccu

SEQ ID NO: 752260 - RNA, 19 nt, Artificial Sequence
  Description of Artificial Sequence: Synthetic oligonucleotide
ccaggggaaggcagucgaa

SEQ ID NO: 752261 - RNA, 19 nt, Artificial Sequence
  Description of Artificial Sequence: Synthetic oligonucleotide
cuucgugggcucggaguau

SEQ ID NO: 752262 - RNA, 19 nt, Artificial Sequence
  Description of Artificial Sequence: Synthetic oligonucleotide
cgugggcucggaguauaga

SEQ ID NO: 752263 - RNA, 19 nt, Artificial Sequence
  Description of Artificial Sequence: Synthetic oligonucleotide
ccuucgccucuucgaagcu

SEQ ID NO: 752264 - RNA, 19 nt, Artificial Sequence
  Description of Artificial Sequence: Synthetic oligonucleotide
ggcucggaguauagacaau

SEQ ID NO: 752265 - RNA, 19 nt, Artificial Sequence
  Description of Artificial Sequence: Synthetic oligonucleotide
ccgugccguuagucucuga

SEQ ID NO: 752266 - RNA, 19 nt, Artificial Sequence
  Description of Artificial Sequence: Synthetic oligonucleotide
cguugcuguccgugccguu

SEQ ID NO: 752267 - RNA, 19 nt, Artificial Sequence
  Description of Artificial Sequence: Synthetic oligonucleotide
gcacgccacuggggagcau

SEQ ID NO: 752268 - RNA, 19 nt, Artificial Sequence
  Description of Artificial Sequence: Synthetic oligonucleotide
  modified_base (5)..(5): a, c, u, g, unknown or other
aaucnguuaaauuccaugc

SEQ ID NO: 752269 - RNA, 19 nt, Artificial Sequence
  Description of Artificial Sequence: Synthetic oligonucleotide
acaaacaugauauagcuuc

SEQ ID NO: 752270 - RNA, 19 nt, Artificial Sequence
  Description of Artificial Sequence: Synthetic oligonucleotide
aguaauaucggagagaacg

SEQ ID NO: 752271 - RNA, 19 nt, Artificial Sequence
  Description of Artificial Sequence: Synthetic oligonucleotide
  modified_base (2)..(2): a, c, u, g, unknown or other
unaagggucauccagaaga

SEQ ID NO: 752272 - RNA, 19 nt, Artificial Sequence
  Description of Artificial Sequence: Synthetic oligonucleotide
  modified_base (6)..(6): a, c, u, g, unknown or other
aauuunaagggucauccag

SEQ ID NO: 752273 - RNA, 19 nt, Artificial Sequence
  Description of Artificial Sequence: Synthetic oligonucleotide
aaauguaccguagauaccg

SEQ ID NO: 752274 - RNA, 19 nt, Artificial Sequence
  Description of Artificial Sequence: Synthetic oligonucleotide
  modified_base (8)..(8): a, c, u, g, unknown or other
agaauuunaagggucaucc

SEQ ID NO: 752275 - RNA, 19 nt, Artificial Sequence
  Description of Artificial Sequence: Synthetic oligonucleotide
aaugcuacuggccuaugac

SEQ ID NO: 752276 - RNA, 19 nt, Artificial Sequence
  Description of Artificial Sequence: Synthetic oligonucleotide
cauagaauaaugcaacagg

SEQ ID NO: 752277 - RNA, 19 nt, Artificial Sequence
  Description of Artificial Sequence: Synthetic oligonucleotide
uuaucuaacugaaaugggc

SEQ ID NO: 752278 - RNA, 19 nt, Artificial Sequence
  Description of Artificial Sequence: Synthetic oligonucleotide
aaauggaauagaaagaaca

SEQ ID NO: 752279 - RNA, 19 nt, Artificial Sequence
  Description of Artificial Sequence: Synthetic oligonucleotide
ugauauagcuucaucauac

SEQ ID NO: 752280 - RNA, 19 nt, Artificial Sequence
  Description of Artificial Sequence: Synthetic oligonucleotide
  modified_base (4)..(4): a, c, u, g, unknown or other
aucnguuaaauuccaugcc

SEQ ID NO: 752281 - RNA, 19 nt, Artificial Sequence
  Description of Artificial Sequence: Synthetic oligonucleotide
ucuuacguuauuaugaaau

SEQ ID NO: 752282 - RNA, 19 nt, Artificial Sequence
  Description of Artificial Sequence: Synthetic oligonucleotide
cuaaguacaaaugaauucc

SEQ ID NO: 752283 - RNA, 19 nt, Artificial Sequence
  Description of Artificial Sequence: Synthetic oligonucleotide
uggccuaugacucaacggg

SEQ ID NO: 752284 - RNA, 19 nt, Artificial Sequence
  Description of Artificial Sequence: Synthetic oligonucleotide
auacauguaaugcuacugg

SEQ ID NO: 752285 - RNA, 19 nt, Artificial Sequence
  Description of Artificial Sequence: Synthetic oligonucleotide
aauuccuaguucccucugc

SEQ ID NO: 752286 - RNA, 19 nt, Artificial Sequence
  Description of Artificial Sequence: Synthetic oligonucleotide
uacguuauuaugaaauaga

SEQ ID NO: 752287 - RNA, 19 nt, Artificial Sequence
  Description of Artificial Sequence: Synthetic oligonucleotide
aacaugauauagcuucauc

SEQ ID NO: 752288 - RNA, 19 nt, Artificial Sequence
  Description of Artificial Sequence: Synthetic oligonucleotide
aaugcaauugcuaaauacu

SEQ ID NO: 752289 - RNA, 19 nt, Artificial Sequence
  Description of Artificial Sequence: Synthetic oligonucleotide
uccaaguagauauuuacac

SEQ ID NO: 752290 - RNA, 19 nt, Artificial Sequence
  Description of Artificial Sequence: Synthetic oligonucleotide
  modified_base (3)..(3): a, c, u, g, unknown or other
ucnguuaaauuccaugccu

SEQ ID NO: 752291 - RNA, 19 nt, Artificial Sequence
  Description of Artificial Sequence: Synthetic oligonucleotide
uaucuaacugaaaugggca

SEQ ID NO: 752292 - RNA, 19 nt, Artificial Sequence
  Description of Artificial Sequence: Synthetic oligonucleotide
uugcuuaaugucuccaucg

SEQ ID NO: 752293 - RNA, 19 nt, Artificial Sequence
  Description of Artificial Sequence: Synthetic oligonucleotide
auuaucuuacguuauuaug

SEQ ID NO: 752294 - RNA, 19 nt, Artificial Sequence
  Description of Artificial Sequence: Synthetic oligonucleotide
cuuaaugucuccaucgaac

SEQ ID NO: 752295 - RNA, 19 nt, Artificial Sequence
  Description of Artificial Sequence: Synthetic oligonucleotide
aaaggaucaugacauguca

SEQ ID NO: 752296 - RNA, 19 nt, Artificial Sequence
  Description of Artificial Sequence: Synthetic oligonucleotide
aacccguaggaccccaucc

SEQ ID NO: 752297 - RNA, 19 nt, Artificial Sequence
  Description of Artificial Sequence: Synthetic oligonucleotide
aaucauaugcaaaaucucu

SEQ ID NO: 752298 - RNA, 19 nt, Artificial Sequence
  Description of Artificial Sequence: Synthetic oligonucleotide
auuacucccacccacccuc

SEQ ID NO: 752299 - RNA, 19 nt, Artificial Sequence
  Description of Artificial Sequence: Synthetic oligonucleotide
agaaaggcgaagcacgggg

SEQ ID NO: 752300 - RNA, 19 nt, Artificial Sequence
  Description of Artificial Sequence: Synthetic oligonucleotide
uguaaagcgaaauggaaua

SEQ ID NO: 752301 - RNA, 19 nt, Artificial Sequence
  Description of Artificial Sequence: Synthetic oligonucleotide
agaauuacaggguucagaa

SEQ ID NO: 752302 - RNA, 19 nt, Artificial Sequence
  Description of Artificial Sequence: Synthetic oligonucleotide
ucaucuguaaagcgaaaug

SEQ ID NO: 752303 - RNA, 19 nt, Artificial Sequence
  Description of Artificial Sequence: Synthetic oligonucleotide
gaaugucuagauuacuccc

SEQ ID NO: 752304 - RNA, 19 nt, Artificial Sequence
  Description of Artificial Sequence: Synthetic oligonucleotide
uaaagugcgcaguccaugg

SEQ ID NO: 752305 - RNA, 19 nt, Artificial Sequence
  Description of Artificial Sequence: Synthetic oligonucleotide
  modified_base (10)..(10): a, c, u, g, unknown or other
ggcucaaucnguuaaauuc

SEQ ID NO: 752306 - RNA, 19 nt, Artificial Sequence
  Description of Artificial Sequence: Synthetic oligonucleotide
ucugguauggacugagaag

SEQ ID NO: 752307 - RNA, 19 nt, Artificial Sequence
  Description of Artificial Sequence: Synthetic oligonucleotide
auuccuaguucccucugcc

SEQ ID NO: 752308 - RNA, 19 nt, Artificial Sequence
  Description of Artificial Sequence: Synthetic oligonucleotide
gagagaacggcuaaguuug

SEQ ID NO: 752309 - RNA, 19 nt, Artificial Sequence
  Description of Artificial Sequence: Synthetic oligonucleotide
ugauuacucaaaauucaga

SEQ ID NO: 752310 - RNA, 19 nt, Artificial Sequence
  Description of Artificial Sequence: Synthetic oligonucleotide
uuuuaguacacguagccuu

SEQ ID NO: 752311 - RNA, 19 nt, Artificial Sequence
  Description of Artificial Sequence: Synthetic oligonucleotide
uggugauuacucaaaauuc

SEQ ID NO: 752312 - RNA, 19 nt, Artificial Sequence
  Description of Artificial Sequence: Synthetic oligonucleotide
  modified_base (6)..(6): a, c, u, g, unknown or other
caaucnguuaaauuccaug

SEQ ID NO: 752313 - RNA, 19 nt, Artificial Sequence
  Description of Artificial Sequence: Synthetic oligonucleotide
cauagaacugccuggggcc

SEQ ID NO: 752314 - RNA, 19 nt, Artificial Sequence
  Description of Artificial Sequence: Synthetic oligonucleotide
  modified_base (14)..(14): a, c, u, g, unknown or other
uucaggcucaaucnguuaa

SEQ ID NO: 752315 - RNA, 19 nt, Artificial Sequence
  Description of Artificial Sequence: Synthetic oligonucleotide
aaaauuaucuuacguuauu

SEQ ID NO: 752316 - RNA, 19 nt, Artificial Sequence
  Description of Artificial Sequence: Synthetic oligonucleotide
aacuuaaaggguugacucu

SEQ ID NO: 752317 - RNA, 19 nt, Artificial Sequence
  Description of Artificial Sequence: Synthetic oligonucleotide
gucuagauuacucccaccc

SEQ ID NO: 752318 - RNA, 19 nt, Artificial Sequence
  Description of Artificial Sequence: Synthetic oligonucleotide
aaggguugacucuuggcug

SEQ ID NO: 752319 - RNA, 19 nt, Artificial Sequence
  Description of Artificial Sequence: Synthetic oligonucleotide
aaagugcgcaguccauggc

SEQ ID NO: 752320 - RNA, 19 nt, Artificial Sequence
  Description of Artificial Sequence: Synthetic oligonucleotide
ugccauuuacaguagauau

SEQ ID NO: 752321 - RNA, 19 nt, Artificial Sequence
  Description of Artificial Sequence: Synthetic oligonucleotide
cagaaaacccguaggaccc

SEQ ID NO: 752322 - RNA, 19 nt, Artificial Sequence
  Description of Artificial Sequence: Synthetic oligonucleotide
agauuacucccacccaccc

SEQ ID NO: 752323 - RNA, 19 nt, Artificial Sequence
  Description of Artificial Sequence: Synthetic oligonucleotide
accgagaaaauuaucuuac

SEQ ID NO: 752324 - RNA, 19 nt, Artificial Sequence
  Description of Artificial Sequence: Synthetic oligonucleotide
auacagaaaacccguagga

SEQ ID NO: 752325 - RNA, 19 nt, Artificial Sequence
  Description of Artificial Sequence: Synthetic oligonucleotide
  modified_base (4)..(4): a, c, u, g, unknown or other
uuunaagggucauccagaa

SEQ ID NO: 752326 - RNA, 19 nt, Artificial Sequence
  Description of Artificial Sequence: Synthetic oligonucleotide
ucuccaucgaacuucucug

SEQ ID NO: 752327 - RNA, 19 nt, Artificial Sequence
  Description of Artificial Sequence: Synthetic oligonucleotide
cuguuacacagaaugaaug

SEQ ID NO: 752328 - RNA, 19 nt, Artificial Sequence
  Description of Artificial Sequence: Synthetic oligonucleotide
agcuaggcacuucugaauc

SEQ ID NO: 752329 - RNA, 19 nt, Artificial Sequence
  Description of Artificial Sequence: Synthetic oligonucleotide
ugguguuguguucauagac

SEQ ID NO: 752330 - RNA, 19 nt, Artificial Sequence
  Description of Artificial Sequence: Synthetic oligonucleotide
uauccuuuacaagucaucu

SEQ ID NO: 752331 - RNA, 19 nt, Artificial Sequence
  Description of Artificial Sequence: Synthetic oligonucleotide
agacaucugccguugguac

SEQ ID NO: 752332 - RNA, 19 nt, Artificial Sequence
  Description of Artificial Sequence: Synthetic oligonucleotide
uagaauaaugcaacaggaa

SEQ ID NO: 752333 - RNA, 19 nt, Artificial Sequence
  Description of Artificial Sequence: Synthetic oligonucleotide
ucaugacaugucauuaucu

SEQ ID NO: 752334 - RNA, 19 nt, Artificial Sequence
  Description of Artificial Sequence: Synthetic oligonucleotide
uguaccguagauaccgaga

SEQ ID NO: 752335 - RNA, 19 nt, Artificial Sequence
  Description of Artificial Sequence: Synthetic oligonucleotide
aggguugacucuuggcugc

SEQ ID NO: 752336 - RNA, 19 nt, Artificial Sequence
  Description of Artificial Sequence: Synthetic oligonucleotide
augucuagauuacucccac

SEQ ID NO: 752337 - RNA, 19 nt, Artificial Sequence
  Description of Artificial Sequence: Synthetic oligonucleotide
ucuuauccuuuacaaguca

SEQ ID NO: 752338 - RNA, 19 nt, Artificial Sequence
  Description of Artificial Sequence: Synthetic oligonucleotide
ugaacuuaaaggguugacu

SEQ ID NO: 752339 - RNA, 19 nt, Artificial Sequence
  Description of Artificial Sequence: Synthetic oligonucleotide
ugcgccuccaaccauggug

SEQ ID NO: 752340 - RNA, 19 nt, Artificial Sequence
  Description of Artificial Sequence: Synthetic oligonucleotide
ugcucaaggcaaauggucu

SEQ ID NO: 752341 - RNA, 19 nt, Artificial Sequence
  Description of Artificial Sequence: Synthetic oligonucleotide
cacccucaaauaaagugcg

SEQ ID NO: 752342 - RNA, 19 nt, Artificial Sequence
  Description of Artificial Sequence: Synthetic oligonucleotide
aagaauuacaggguucaga

SEQ ID NO: 752343 - RNA, 19 nt, Artificial Sequence
  Description of Artificial Sequence: Synthetic oligonucleotide
cucaacgggagccagaguc

SEQ ID NO: 752344 - RNA, 19 nt, Artificial Sequence
  Description of Artificial Sequence: Synthetic oligonucleotide
uguagacauaccucucucc

SEQ ID NO: 752345 - RNA, 19 nt, Artificial Sequence
  Description of Artificial Sequence: Synthetic oligonucleotide
ugucacugguuuuaguaca

SEQ ID NO: 752346 - RNA, 19 nt, Artificial Sequence
  Description of Artificial Sequence: Synthetic oligonucleotide
uguguucauagacuggguc

SEQ ID NO: 752347 - RNA, 19 nt, Artificial Sequence
  Description of Artificial Sequence: Synthetic oligonucleotide
cuagauuacucccacccac

SEQ ID NO: 752348 - RNA, 19 nt, Artificial Sequence
  Description of Artificial Sequence: Synthetic oligonucleotide
ucgacgaaaucuguggucc

SEQ ID NO: 752349 - RNA, 19 nt, Artificial Sequence
  Description of Artificial Sequence: Synthetic oligonucleotide
uguacugaaacagcaagau

SEQ ID NO: 752350 - RNA, 19 nt, Artificial Sequence
  Description of Artificial Sequence: Synthetic oligonucleotide
aaacaugcagccuuccguu

SEQ ID NO: 752351 - RNA, 19 nt, Artificial Sequence
  Description of Artificial Sequence: Synthetic oligonucleotide
ucauauaaauggaguggca

SEQ ID NO: 752352 - RNA, 19 nt, Artificial Sequence
  Description of Artificial Sequence: Synthetic oligonucleotide
gguuuuaguacacguagcc

SEQ ID NO: 752353 - RNA, 19 nt, Artificial Sequence
  Description of Artificial Sequence: Synthetic oligonucleotide
guaauaucggagagaacgg

SEQ ID NO: 752354 - RNA, 19 nt, Artificial Sequence
  Description of Artificial Sequence: Synthetic oligonucleotide
aaagcgaaauggaauagaa

SEQ ID NO: 752355 - RNA, 19 nt, Artificial Sequence
  Description of Artificial Sequence: Synthetic oligonucleotide
ugccucauauaaauggagu

SEQ ID NO: 752356 - RNA, 19 nt, Artificial Sequence
  Description of Artificial Sequence: Synthetic oligonucleotide
ucuagauuacucccaccca

SEQ ID NO: 752357 - RNA, 19 nt, Artificial Sequence
  Description of Artificial Sequence: Synthetic oligonucleotide
  modified_base (3)..(3): a, c, u, g, unknown or other
uunaagggucauccagaag

SEQ ID NO: 752358 - RNA, 19 nt, Artificial Sequence
  Description of Artificial Sequence: Synthetic oligonucleotide
uucuuauccuuuacaaguc

SEQ ID NO: 752359 - RNA, 19 nt, Artificial Sequence
  Description of Artificial Sequence: Synthetic oligonucleotide
aaacgucaguaaugguggg

SEQ ID NO: 752360 - RNA, 19 nt, Artificial Sequence
  Description of Artificial Sequence: Synthetic oligonucleotide
uagauuacucccacccacc

SEQ ID NO: 752361 - RNA, 19 nt, Artificial Sequence
  Description of Artificial Sequence: Synthetic oligonucleotide
acugaaaugggcauugaca

SEQ ID NO: 752362 - RNA, 19 nt, Artificial Sequence
  Description of Artificial Sequence: Synthetic oligonucleotide
uccaaaauugugccccuca

SEQ ID NO: 752363 - RNA, 19 nt, Artificial Sequence
  Description of Artificial Sequence: Synthetic oligonucleotide
  modified_base (7)..(7): a, c, u, g, unknown or other
gaauuunaagggucaucca

SEQ ID NO: 752364 - RNA, 19 nt, Artificial Sequence
  Description of Artificial Sequence: Synthetic oligonucleotide
uuccguucugcuuggauga

SEQ ID NO: 752365 - RNA, 19 nt, Artificial Sequence
  Description of Artificial Sequence: Synthetic oligonucleotide
aaugucuagauuacuccca

SEQ ID NO: 752366 - RNA, 19 nt, Artificial Sequence
  Description of Artificial Sequence: Synthetic oligonucleotide
ugguuuuaguacacguagc

SEQ ID NO: 752367 - RNA, 19 nt, Artificial Sequence
  Description of Artificial Sequence: Synthetic oligonucleotide
aauaucggagagaacggcu

SEQ ID NO: 752368 - RNA, 19 nt, Artificial Sequence
  Description of Artificial Sequence: Synthetic oligonucleotide
aacaugcagccuuccguuc

SEQ ID NO: 752369 - RNA, 19 nt, Artificial Sequence
  Description of Artificial Sequence: Synthetic oligonucleotide
uagauaccgagaaaauuau

SEQ ID NO: 752370 - RNA, 19 nt, Artificial Sequence
  Description of Artificial Sequence: Synthetic oligonucleotide
caagccuaaguacaaauga

SEQ ID NO: 752371 - RNA, 19 nt, Artificial Sequence
  Description of Artificial Sequence: Synthetic oligonucleotide
ucugccguugguacacagg

SEQ ID NO: 752372 - RNA, 19 nt, Artificial Sequence
  Description of Artificial Sequence: Synthetic oligonucleotide
acuggccuaugacucaacg

SEQ ID NO: 752373 - RNA, 19 nt, Artificial Sequence
  Description of Artificial Sequence: Synthetic oligonucleotide
guagccuucguuguagggg

SEQ ID NO: 752374 - RNA, 19 nt, Artificial Sequence
  Description of Artificial Sequence: Synthetic oligonucleotide
ugcuacuggccuaugacuc

SEQ ID NO: 752375 - RNA, 19 nt, Artificial Sequence
  Description of Artificial Sequence: Synthetic oligonucleotide
aucaaaucaaauguaccgu

SEQ ID NO: 752376 - RNA, 19 nt, Artificial Sequence
  Description of Artificial Sequence: Synthetic oligonucleotide
cagaccauagaauaaugca

SEQ ID NO: 752377 - RNA, 19 nt, Artificial Sequence
  Description of Artificial Sequence: Synthetic oligonucleotide
guagauaccgagaaaauua

SEQ ID NO: 752378 - RNA, 19 nt, Artificial Sequence
  Description of Artificial Sequence: Synthetic oligonucleotide
cuuccguucugcuuggaug

SEQ ID NO: 752379 - RNA, 19 nt, Artificial Sequence
  Description of Artificial Sequence: Synthetic oligonucleotide
ccugcuuaaagccuugugg

SEQ ID NO: 752380 - RNA, 19 nt, Artificial Sequence
  Description of Artificial Sequence: Synthetic oligonucleotide
uaaagcgaaauggaauaga

SEQ ID NO: 752381 - RNA, 19 nt, Artificial Sequence
  Description of Artificial Sequence: Synthetic oligonucleotide
ugauccucgccucugguau

SEQ ID NO: 752382 - RNA, 19 nt, Artificial Sequence
  Description of Artificial Sequence: Synthetic oligonucleotide
aaacccguaggaccccauc

SEQ ID NO: 752383 - RNA, 19 nt, Artificial Sequence
  Description of Artificial Sequence: Synthetic oligonucleotide
uaauaucggagagaacggc

SEQ ID NO: 752384 - RNA, 19 nt, Artificial Sequence
  Description of Artificial Sequence: Synthetic oligonucleotide
gugauuacucaaaauucag

SEQ ID NO: 752385 - RNA, 19 nt, Artificial Sequence
  Description of Artificial Sequence: Synthetic oligonucleotide
uaccgagaaaauuaucuua

SEQ ID NO: 752386 - RNA, 19 nt, Artificial Sequence
  Description of Artificial Sequence: Synthetic oligonucleotide
  modified_base (5)..(5): a, c, u, g, unknown or other
auuunaagggucauccaga

SEQ ID NO: 752387 - RNA, 19 nt, Artificial Sequence
  Description of Artificial Sequence: Synthetic oligonucleotide
guauguggguccuucccgg

SEQ ID NO: 752388 - RNA, 19 nt, Artificial Sequence
  Description of Artificial Sequence: Synthetic oligonucleotide
aagccuucuugccucauau

SEQ ID NO: 752389 - RNA, 19 nt, Artificial Sequence
  Description of Artificial Sequence: Synthetic oligonucleotide
cuaugacucaacgggagcc

SEQ ID NO: 752390 - RNA, 19 nt, Artificial Sequence
  Description of Artificial Sequence: Synthetic oligonucleotide
uccgucuucagcagugggc

SEQ ID NO: 752391 - RNA, 19 nt, Artificial Sequence
  Description of Artificial Sequence: Synthetic oligonucleotide
  modified_base (7)..(7): a, c, u, g, unknown or other
ucaaucnguuaaauuccau

SEQ ID NO: 752392 - RNA, 19 nt, Artificial Sequence
  Description of Artificial Sequence: Synthetic oligonucleotide
gaaaagaauuacaggguuc

SEQ ID NO: 752393 - RNA, 19 nt, Artificial Sequence
  Description of Artificial Sequence: Synthetic oligonucleotide
cauugacauauucaaaaga

SEQ ID NO: 752394 - RNA, 19 nt, Artificial Sequence
  Description of Artificial Sequence: Synthetic oligonucleotide
gaaugaaugucuagauuac

SEQ ID NO: 752395 - RNA, 19 nt, Artificial Sequence
  Description of Artificial Sequence: Synthetic oligonucleotide
ugguauguggguccuuccc

SEQ ID NO: 752396 - RNA, 19 nt, Artificial Sequence
  Description of Artificial Sequence: Synthetic oligonucleotide
cucgccucugguauguggg

SEQ ID NO: 752397 - RNA, 19 nt, Artificial Sequence
  Description of Artificial Sequence: Synthetic oligonucleotide
uaaugcuacuggccuauga

SEQ ID NO: 752398 - RNA, 19 nt, Artificial Sequence
  Description of Artificial Sequence: Synthetic oligonucleotide
uguugaucccagauuuaac

SEQ ID NO: 752399 - RNA, 19 nt, Artificial Sequence
  Description of Artificial Sequence: Synthetic oligonucleotide
ugcuuaaagccuuguggug

SEQ ID NO: 752400 - RNA, 19 nt, Artificial Sequence
  Description of Artificial Sequence: Synthetic oligonucleotide
ucggcaaaggaggaaaaga

SEQ ID NO: 752401 - RNA, 19 nt, Artificial Sequence
  Description of Artificial Sequence: Synthetic oligonucleotide
guagacauaccucucucca

SEQ ID NO: 752402 - RNA, 19 nt, Artificial Sequence
  Description of Artificial Sequence: Synthetic oligonucleotide
  modified_base (2)..(2): a, c, u, g, unknown or other
cnguuaaauuccaugccuc

SEQ ID NO: 752403 - RNA, 19 nt, Artificial Sequence
  Description of Artificial Sequence: Synthetic oligonucleotide
cuggccuaugacucaacgg

SEQ ID NO: 752404 - RNA, 19 nt, Artificial Sequence
  Description of Artificial Sequence: Synthetic oligonucleotide
acagucguggugauuacuc

SEQ ID NO: 752405 - RNA, 19 nt, Artificial Sequence
  Description of Artificial Sequence: Synthetic oligonucleotide
ugucgacgaaaucuguggu

SEQ ID NO: 752406 - RNA, 19 nt, Artificial Sequence
  Description of Artificial Sequence: Synthetic oligonucleotide
uacagaaaacccguaggac

SEQ ID NO: 752407 - RNA, 19 nt, Artificial Sequence
  Description of Artificial Sequence: Synthetic oligonucleotide
gcgaaaacgucaguaaugg

SEQ ID NO: 752408 - RNA, 19 nt, Artificial Sequence
  Description of Artificial Sequence: Synthetic oligonucleotide
accguagauaccgagaaaa

SEQ ID NO: 752409 - RNA, 19 nt, Artificial Sequence
  Description of Artificial Sequence: Synthetic oligonucleotide
aacagcaagauggcaccag

SEQ ID NO: 752410 - RNA, 19 nt, Artificial Sequence
  Description of Artificial Sequence: Synthetic oligonucleotide
cuucugaucauaggcacug

SEQ ID NO: 752411 - RNA, 19 nt, Artificial Sequence
  Description of Artificial Sequence: Synthetic oligonucleotide
gccguugguacacaggacg

SEQ ID NO: 752412 - RNA, 19 nt, Artificial Sequence
  Description of Artificial Sequence: Synthetic oligonucleotide
uugugccccucauuuacag

SEQ ID NO: 752413 - RNA, 19 nt, Artificial Sequence
  Description of Artificial Sequence: Synthetic oligonucleotide
ugccccucauuuacagucg

SEQ ID NO: 752414 - RNA, 19 nt, Artificial Sequence
  Description of Artificial Sequence: Synthetic oligonucleotide
guaaagcgaaauggaauag

SEQ ID NO: 752415 - RNA, 19 nt, Artificial Sequence
  Description of Artificial Sequence: Synthetic oligonucleotide
  modified_base (10)..(10): a, c, u, g, unknown or other
ugagaauuunaagggucau

SEQ ID NO: 752416 - RNA, 19 nt, Artificial Sequence
  Description of Artificial Sequence: Synthetic oligonucleotide
gguauguggguccuucccg

SEQ ID NO: 752417 - RNA, 19 nt, Artificial Sequence
  Description of Artificial Sequence: Synthetic oligonucleotide
guaguugcugucugguaug

SEQ ID NO: 752418 - RNA, 19 nt, Artificial Sequence
  Description of Artificial Sequence: Synthetic oligonucleotide
augauauagcuucaucaua

SEQ ID NO: 752419 - RNA, 19 nt, Artificial Sequence
  Description of Artificial Sequence: Synthetic oligonucleotide
guacugaaacagcaagaug

SEQ ID NO: 752420 - RNA, 19 nt, Artificial Sequence
  Description of Artificial Sequence: Synthetic oligonucleotide
ugauucccuucucauagua

SEQ ID NO: 752421 - RNA, 19 nt, Artificial Sequence
  Description of Artificial Sequence: Synthetic oligonucleotide
auguaccguagauaccgag

SEQ ID NO: 752422 - RNA, 19 nt, Artificial Sequence
  Description of Artificial Sequence: Synthetic oligonucleotide
  modified_base (11)..(11): a, c, u, g, unknown or other
augagaauuunaaggguca

SEQ ID NO: 752423 - RNA, 19 nt, Artificial Sequence
  Description of Artificial Sequence: Synthetic oligonucleotide
aagccuaaguacaaaugaa

SEQ ID NO: 752424 - RNA, 19 nt, Artificial Sequence
  Description of Artificial Sequence: Synthetic oligonucleotide
aagcugucgacgaaaucug

SEQ ID NO: 752425 - RNA, 19 nt, Artificial Sequence
  Description of Artificial Sequence: Synthetic oligonucleotide
aggaucaugacaugucauu

SEQ ID NO: 752426 - RNA, 19 nt, Artificial Sequence
  Description of Artificial Sequence: Synthetic oligonucleotide
acguuauuaugaaauagaa

SEQ ID NO: 752427 - RNA, 19 nt, Artificial Sequence
  Description of Artificial Sequence: Synthetic oligonucleotide
aucuguaaagcgaaaugga

SEQ ID NO: 752428 - RNA, 19 nt, Artificial Sequence
  Description of Artificial Sequence: Synthetic oligonucleotide
aucgaacuucucuggaaca

SEQ ID NO: 752429 - RNA, 19 nt, Artificial Sequence
  Description of Artificial Sequence: Synthetic oligonucleotide
  modified_base (9)..(9): a, c, u, g, unknown or other
gcucaaucnguuaaauucc

SEQ ID NO: 752430 - RNA, 19 nt, Artificial Sequence
  Description of Artificial Sequence: Synthetic oligonucleotide
ccucauauaaauggagugg

SEQ ID NO: 752431 - RNA, 19 nt, Artificial Sequence
  Description of Artificial Sequence: Synthetic oligonucleotide
  modified_base (9)..(9): a, c, u, g, unknown or other
gagaauuunaagggucauc

SEQ ID NO: 752432 - RNA, 19 nt, Artificial Sequence
  Description of Artificial Sequence: Synthetic oligonucleotide
guggugauuacucaaaauu

SEQ ID NO: 752433 - RNA, 19 nt, Artificial Sequence
  Description of Artificial Sequence: Synthetic oligonucleotide
ucccagauuuaacaacuua

SEQ ID NO: 752434 - RNA, 19 nt, Artificial Sequence
  Description of Artificial Sequence: Synthetic oligonucleotide
ugucuagauuacucccacc

SEQ ID NO: 752435 - RNA, 19 nt, Artificial Sequence
  Description of Artificial Sequence: Synthetic oligonucleotide
aauaaagugcgcaguccau

SEQ ID NO: 752436 - RNA, 19 nt, Artificial Sequence
  Description of Artificial Sequence: Synthetic oligonucleotide
guaccguagauaccgagaa

SEQ ID NO: 752437 - RNA, 19 nt, Artificial Sequence
  Description of Artificial Sequence: Synthetic oligonucleotide
cugaaaugggcauugacau

SEQ ID NO: 752438 - RNA, 19 nt, Artificial Sequence
  Description of Artificial Sequence: Synthetic oligonucleotide
ucagaaagcugucgacgaa

SEQ ID NO: 752439 - RNA, 19 nt, Artificial Sequence
  Description of Artificial Sequence: Synthetic oligonucleotide
agaaaacccguaggacccc

SEQ ID NO: 752440 - RNA, 19 nt, Artificial Sequence
  Description of Artificial Sequence: Synthetic oligonucleotide
uaugacucaacgggagcca

SEQ ID NO: 752441 - RNA, 19 nt, Artificial Sequence
  Description of Artificial Sequence: Synthetic oligonucleotide
uuccuaguucccucugccc

SEQ ID NO: 752442 - RNA, 19 nt, Artificial Sequence
  Description of Artificial Sequence: Synthetic oligonucleotide
ucguggugauuacucaaaa

SEQ ID NO: 752443 - RNA, 19 nt, Artificial Sequence
  Description of Artificial Sequence: Synthetic oligonucleotide
uggcaccagauacauguaa

SEQ ID NO: 752444 - RNA, 19 nt, Artificial Sequence
  Description of Artificial Sequence: Synthetic oligonucleotide
guaguggagacacuggagu

SEQ ID NO: 752445 - RNA, 19 nt, Artificial Sequence
  Description of Artificial Sequence: Synthetic oligonucleotide
  modified_base (8)..(8): a, c, u, g, unknown or other
cucaaucnguuaaauucca

SEQ ID NO: 752446 - RNA, 19 nt, Artificial Sequence
  Description of Artificial Sequence: Synthetic oligonucleotide
caucauacagaaaacccgu

SEQ ID NO: 752447 - RNA, 19 nt, Artificial Sequence
  Description of Artificial Sequence: Synthetic oligonucleotide
acaugcagccuuccguucu

SEQ ID NO: 752448 - RNA, 19 nt, Artificial Sequence
  Description of Artificial Sequence: Synthetic oligonucleotide
ucuaacugaaaugggcauu

SEQ ID NO: 752449 - RNA, 19 nt, Artificial Sequence
  Description of Artificial Sequence: Synthetic oligonucleotide
caagauggcaccagauaca

SEQ ID NO: 752450 - RNA, 19 nt, Artificial Sequence
  Description of Artificial Sequence: Synthetic oligonucleotide
aucaaauguaccguagaua

SEQ ID NO: 752451 - RNA, 19 nt, Artificial Sequence
  Description of Artificial Sequence: Synthetic oligonucleotide
agauaccgagaaaauuauc

SEQ ID NO: 752452 - RNA, 19 nt, Artificial Sequence
  Description of Artificial Sequence: Synthetic oligonucleotide
ugguauggacugagaagga

SEQ ID NO: 752453 - RNA, 19 nt, Artificial Sequence
  Description of Artificial Sequence: Synthetic oligonucleotide
ggagaugcaugauguagug

SEQ ID NO: 752454 - RNA, 19 nt, Artificial Sequence
  Description of Artificial Sequence: Synthetic oligonucleotide
agucguggugauuacucaa

SEQ ID NO: 752455 - RNA, 19 nt, Artificial Sequence
  Description of Artificial Sequence: Synthetic oligonucleotide
caugauauagcuucaucau

SEQ ID NO: 752456 - RNA, 19 nt, Artificial Sequence
  Description of Artificial Sequence: Synthetic oligonucleotide
acaccugcgaaaacgucag

SEQ ID NO: 752457 - RNA, 19 nt, Artificial Sequence
  Description of Artificial Sequence: Synthetic oligonucleotide
ugaaugccccaacgccggg

SEQ ID NO: 752458 - RNA, 19 nt, Artificial Sequence
  Description of Artificial Sequence: Synthetic oligonucleotide
aagcgaaauggaauagaaa

SEQ ID NO: 752459 - RNA, 19 nt, Artificial Sequence
  Description of Artificial Sequence: Synthetic oligonucleotide
aaguacaaaugaauuccua

SEQ ID NO: 752460 - RNA, 19 nt, Artificial Sequence
  Description of Artificial Sequence: Synthetic oligonucleotide
ggagacacuggaguacugg

SEQ ID NO: 752461 - RNA, 19 nt, Artificial Sequence
  Description of Artificial Sequence: Synthetic oligonucleotide
cugccguugguacacagga

SEQ ID NO: 752462 - RNA, 19 nt, Artificial Sequence
  Description of Artificial Sequence: Synthetic oligonucleotide
aaacugccauuuacaguag

SEQ ID NO: 752463 - RNA, 19 nt, Artificial Sequence
  Description of Artificial Sequence: Synthetic oligonucleotide
ccauagaauaaugcaacag

SEQ ID NO: 752464 - RNA, 19 nt, Artificial Sequence
  Description of Artificial Sequence: Synthetic oligonucleotide
cugcuuaaagccuuguggu

SEQ ID NO: 752465 - RNA, 19 nt, Artificial Sequence
  Description of Artificial Sequence: Synthetic oligonucleotide
agccuaaguacaaaugaau

SEQ ID NO: 752466 - RNA, 19 nt, Artificial Sequence
  Description of Artificial Sequence: Synthetic oligonucleotide
augggguaguugcugucug

SEQ ID NO: 752467 - RNA, 19 nt, Artificial Sequence
  Description of Artificial Sequence: Synthetic oligonucleotide
ugucugguauggacugaga

SEQ ID NO: 752468 - RNA, 19 nt, Artificial Sequence
  Description of Artificial Sequence: Synthetic oligonucleotide
aucuuacguuauuaugaaa

SEQ ID NO: 752469 - RNA, 19 nt, Artificial Sequence
  Description of Artificial Sequence: Synthetic oligonucleotide
gucgacgaaaucugugguc

SEQ ID NO: 752470 - RNA, 19 nt, Artificial Sequence
  Description of Artificial Sequence: Synthetic oligonucleotide
gacaucugccguugguaca

SEQ ID NO: 752471 - RNA, 19 nt, Artificial Sequence
  Description of Artificial Sequence: Synthetic oligonucleotide
gaucaugacaugucauuau

SEQ ID NO: 752472 - RNA, 19 nt, Artificial Sequence
  Description of Artificial Sequence: Synthetic oligonucleotide
aguccaaaauugugccccu

SEQ ID NO: 752473 - RNA, 19 nt, Artificial Sequence
  Description of Artificial Sequence: Synthetic oligonucleotide
auguacgccaugcucucau

SEQ ID NO: 752474 - RNA, 19 nt, Artificial Sequence
  Description of Artificial Sequence: Synthetic oligonucleotide
cccucauuuacagucgugg

SEQ ID NO: 752475 - RNA, 19 nt, Artificial Sequence
  Description of Artificial Sequence: Synthetic oligonucleotide
ucggaguaugaguuguguu

SEQ ID NO: 752476 - RNA, 19 nt, Artificial Sequence
  Description of Artificial Sequence: Synthetic oligonucleotide
aauguaccguagauaccga

SEQ ID NO: 752477 - RNA, 19 nt, Artificial Sequence
  Description of Artificial Sequence: Synthetic oligonucleotide
cugaacuuaaaggguugac

SEQ ID NO: 752478 - RNA, 19 nt, Artificial Sequence
  Description of Artificial Sequence: Synthetic oligonucleotide
gucuccaucgaacuucucu

SEQ ID NO: 752479 - RNA, 19 nt, Artificial Sequence
  Description of Artificial Sequence: Synthetic oligonucleotide
cugguauguggguccuucc

SEQ ID NO: 752480 - RNA, 19 nt, Artificial Sequence
  Description of Artificial Sequence: Synthetic oligonucleotide
ccgagaaaauuaucuuacg

SEQ ID NO: 752481 - RNA, 19 nt, Artificial Sequence
  Description of Artificial Sequence: Synthetic oligonucleotide
augauucccuucucauagu

SEQ ID NO: 752482 - RNA, 19 nt, Artificial Sequence
  Description of Artificial Sequence: Synthetic oligonucleotide
cugucugguauggacugag

SEQ ID NO: 752483 - RNA, 19 nt, Artificial Sequence
  Description of Artificial Sequence: Synthetic oligonucleotide
uaaagccuuguggugggaa

SEQ ID NO: 752484 - RNA, 19 nt, Artificial Sequence
  Description of Artificial Sequence: Synthetic oligonucleotide
ccaagccuaaguacaaaug

SEQ ID NO: 752485 - RNA, 19 nt, Artificial Sequence
  Description of Artificial Sequence: Synthetic oligonucleotide
uuacagucguggugauuac

SEQ ID NO: 752486 - RNA, 19 nt, Artificial Sequence
  Description of Artificial Sequence: Synthetic oligonucleotide
ugcuugacugucacugguu

SEQ ID NO: 752487 - RNA, 19 nt, Artificial Sequence
  Description of Artificial Sequence: Synthetic oligonucleotide
acccucaaauaaagugcgc

SEQ ID NO: 752488 - RNA, 19 nt, Artificial Sequence
  Description of Artificial Sequence: Synthetic oligonucleotide
aucugccguugguacacag

SEQ ID NO: 752489 - RNA, 19 nt, Artificial Sequence
  Description of Artificial Sequence: Synthetic oligonucleotide
agugcgcaguccauggcag

SEQ ID NO: 752490 - RNA, 19 nt, Artificial Sequence
  Description of Artificial Sequence: Synthetic oligonucleotide
gucggcaaaggaggaaaag

SEQ ID NO: 752491 - RNA, 19 nt, Artificial Sequence
  Description of Artificial Sequence: Synthetic oligonucleotide
ugugccccucauuuacagu

SEQ ID NO: 752492 - RNA, 19 nt, Artificial Sequence
  Description of Artificial Sequence: Synthetic oligonucleotide
uauguggguccuucccggu

SEQ ID NO: 752493 - RNA, 19 nt, Artificial Sequence
  Description of Artificial Sequence: Synthetic oligonucleotide
cugcccacaauuauucuua

SEQ ID NO: 752494 - RNA, 19 nt, Artificial Sequence
  Description of Artificial Sequence: Synthetic oligonucleotide
ccgaguucugaacaugggc

SEQ ID NO: 752495 - RNA, 19 nt, Artificial Sequence
  Description of Artificial Sequence: Synthetic oligonucleotide
agcugaacuuaaaggguug

SEQ ID NO: 752496 - RNA, 19 nt, Artificial Sequence
  Description of Artificial Sequence: Synthetic oligonucleotide
  modified_base (11)..(11): a, c, u, g, unknown or other
aggcucaaucnguuaaauu

SEQ ID NO: 752497 - RNA, 19 nt, Artificial Sequence
  Description of Artificial Sequence: Synthetic oligonucleotide
uaccguagauaccgagaaa

SEQ ID NO: 752498 - RNA, 19 nt, Artificial Sequence
  Description of Artificial Sequence: Synthetic oligonucleotide
agugggcgcugguuauccg

SEQ ID NO: 752499 - RNA, 19 nt, Artificial Sequence
  Description of Artificial Sequence: Synthetic oligonucleotide
gauccucgccucugguaug

SEQ ID NO: 752500 - RNA, 19 nt, Artificial Sequence
  Description of Artificial Sequence: Synthetic oligonucleotide
cagacgaauuuguagacau

SEQ ID NO: 752501 - RNA, 19 nt, Artificial Sequence
  Description of Artificial Sequence: Synthetic oligonucleotide
acgaaaucugugguccaug

SEQ ID NO: 752502 - RNA, 19 nt, Artificial Sequence
  Description of Artificial Sequence: Synthetic oligonucleotide
uacagucguggugauuacu

SEQ ID NO: 752503 - RNA, 19 nt, Artificial Sequence
  Description of Artificial Sequence: Synthetic oligonucleotide
aucggagagaacggcuaag

SEQ ID NO: 752504 - RNA, 19 nt, Artificial Sequence
  Description of Artificial Sequence: Synthetic oligonucleotide
cccagauuuaacaacuuaa

SEQ ID NO: 752505 - RNA, 19 nt, Artificial Sequence
  Description of Artificial Sequence: Synthetic oligonucleotide
aggcacuucugaaucauau

SEQ ID NO: 752506 - RNA, 19 nt, Artificial Sequence
  Description of Artificial Sequence: Synthetic oligonucleotide
ggccugucagguuucggag

SEQ ID NO: 752507 - RNA, 19 nt, Artificial Sequence
  Description of Artificial Sequence: Synthetic oligonucleotide
gucacugguuuuaguacac

SEQ ID NO: 752508 - RNA, 19 nt, Artificial Sequence
  Description of Artificial Sequence: Synthetic oligonucleotide
ggaaaagaauuacaggguu

SEQ ID NO: 752509 - RNA, 19 nt, Artificial Sequence
  Description of Artificial Sequence: Synthetic oligonucleotide
gccaccuuuugcaugauuc

SEQ ID NO: 752510 - RNA, 19 nt, Artificial Sequence
  Description of Artificial Sequence: Synthetic oligonucleotide
agaaagcugucgacgaaau

SEQ ID NO: 752511 - RNA, 19 nt, Artificial Sequence
  Description of Artificial Sequence: Synthetic oligonucleotide
accugcgaaaacgucagua

SEQ ID NO: 752512 - RNA, 19 nt, Artificial Sequence
  Description of Artificial Sequence: Synthetic oligonucleotide
auaucggagagaacggcua

SEQ ID NO: 752513 - RNA, 19 nt, Artificial Sequence
  Description of Artificial Sequence: Synthetic oligonucleotide
auguccgucuucagcagug

SEQ ID NO: 752514 - RNA, 19 nt, Artificial Sequence
  Description of Artificial Sequence: Synthetic oligonucleotide
cacaauuauucuuauccuu

SEQ ID NO: 752515 - RNA, 19 nt, Artificial Sequence
  Description of Artificial Sequence: Synthetic oligonucleotide
cuucguuguaggggugggg

SEQ ID NO: 752516 - RNA, 19 nt, Artificial Sequence
  Description of Artificial Sequence: Synthetic oligonucleotide
guuuuaguacacguagccu

SEQ ID NO: 752517 - RNA, 19 nt, Artificial Sequence
  Description of Artificial Sequence: Synthetic oligonucleotide
gacccgaguucugaacaug

SEQ ID NO: 752518 - RNA, 19 nt, Artificial Sequence
  Description of Artificial Sequence: Synthetic oligonucleotide
ccgucuucagcagugggcg

SEQ ID NO: 752519 - RNA, 19 nt, Artificial Sequence
  Description of Artificial Sequence: Synthetic oligonucleotide
ucauucccaguguggcuuc

SEQ ID NO: 752520 - RNA, 19 nt, Artificial Sequence
  Description of Artificial Sequence: Synthetic oligonucleotide
gcgaaauggaauagaaaga

SEQ ID NO: 752521 - RNA, 19 nt, Artificial Sequence
  Description of Artificial Sequence: Synthetic oligonucleotide
ccuaugacucaacgggagc

SEQ ID NO: 752522 - RNA, 19 nt, Artificial Sequence
  Description of Artificial Sequence: Synthetic oligonucleotide
guuucggaguaugaguugu

SEQ ID NO: 752523 - RNA, 19 nt, Artificial Sequence
  Description of Artificial Sequence: Synthetic oligonucleotide
cagguuucggaguaugagu

SEQ ID NO: 752524 - RNA, 19 nt, Artificial Sequence
  Description of Artificial Sequence: Synthetic oligonucleotide
caaugucggcaaaggagga

SEQ ID NO: 752525 - RNA, 19 nt, Artificial Sequence
  Description of Artificial Sequence: Synthetic oligonucleotide
gagaacggcuaaguuuguc

SEQ ID NO: 752526 - RNA, 19 nt, Artificial Sequence
  Description of Artificial Sequence: Synthetic oligonucleotide
cucaaauaaagugcgcagu

SEQ ID NO: 752527 - RNA, 19 nt, Artificial Sequence
  Description of Artificial Sequence: Synthetic oligonucleotide
gauuacucccacccacccu

SEQ ID NO: 752528 - RNA, 19 nt, Artificial Sequence
  Description of Artificial Sequence: Synthetic oligonucleotide
acaggacgcccuucccuug

SEQ ID NO: 752529 - RNA, 19 nt, Artificial Sequence
  Description of Artificial Sequence: Synthetic oligonucleotide
cagugggcgcugguuaucc

SEQ ID NO: 752530 - RNA, 19 nt, Artificial Sequence
  Description of Artificial Sequence: Synthetic oligonucleotide
uggcagcuaggcacuucug

SEQ ID NO: 752531 - RNA, 19 nt, Artificial Sequence
  Description of Artificial Sequence: Synthetic oligonucleotide
gucaguaaugguggggaaa

SEQ ID NO: 752532 - RNA, 19 nt, Artificial Sequence
  Description of Artificial Sequence: Synthetic oligonucleotide
ccaguguggcuucugauca

SEQ ID NO: 752533 - RNA, 19 nt, Artificial Sequence
  Description of Artificial Sequence: Synthetic oligonucleotide
cacugguuuuaguacacgu

SEQ ID NO: 752534 - RNA, 19 nt, Artificial Sequence
  Description of Artificial Sequence: Synthetic oligonucleotide
auugugccccucauuuaca

SEQ ID NO: 752535 - RNA, 19 nt, Artificial Sequence
  Description of Artificial Sequence: Synthetic oligonucleotide
ccugcuugacugucacugg

SEQ ID NO: 752536 - RNA, 19 nt, Artificial Sequence
  Description of Artificial Sequence: Synthetic oligonucleotide
ucguccaguccaggcaaug

SEQ ID NO: 752537 - RNA, 19 nt, Artificial Sequence
  Description of Artificial Sequence: Synthetic oligonucleotide
gccuaugacucaacgggag

SEQ ID NO: 752538 - RNA, 19 nt, Artificial Sequence
  Description of Artificial Sequence: Synthetic oligonucleotide
aagcacggggugcccugcu

SEQ ID NO: 752539 - RNA, 19 nt, Artificial Sequence
  Description of Artificial Sequence: Synthetic oligonucleotide
cagaaagcugucgacgaaa

SEQ ID NO: 752540 - RNA, 19 nt, Artificial Sequence
  Description of Artificial Sequence: Synthetic oligonucleotide
uccguucugcuuggaugag

SEQ ID NO: 752541 - RNA, 19 nt, Artificial Sequence
  Description of Artificial Sequence: Synthetic oligonucleotide
gcugucgacgaaaucugug

SEQ ID NO: 752542 - RNA, 19 nt, Artificial Sequence
  Description of Artificial Sequence: Synthetic oligonucleotide
uucuggcauguacgccaug

SEQ ID NO: 752543 - RNA, 19 nt, Artificial Sequence
  Description of Artificial Sequence: Synthetic oligonucleotide
ggaucaugacaugucauua

SEQ ID NO: 752544 - RNA, 19 nt, Artificial Sequence
  Description of Artificial Sequence: Synthetic oligonucleotide
gguguuguguucauagacu

SEQ ID NO: 752545 - RNA, 19 nt, Artificial Sequence
  Description of Artificial Sequence: Synthetic oligonucleotide
ucccaagccuaaguacaaa

SEQ ID NO: 752546 - RNA, 19 nt, Artificial Sequence
  Description of Artificial Sequence: Synthetic oligonucleotide
gucguggugauuacucaaa

SEQ ID NO: 752547 - RNA, 19 nt, Artificial Sequence
  Description of Artificial Sequence: Synthetic oligonucleotide
gggccugucagguuucgga

SEQ ID NO: 752548 - RNA, 19 nt, Artificial Sequence
  Description of Artificial Sequence: Synthetic oligonucleotide
cccgguacauuccuggcuc

SEQ ID NO: 752549 - RNA, 19 nt, Artificial Sequence
  Description of Artificial Sequence: Synthetic oligonucleotide
cccgaguucugaacauggg

SEQ ID NO: 752550 - RNA, 19 nt, Artificial Sequence
  Description of Artificial Sequence: Synthetic oligonucleotide
aucauacagaaaacccgua

SEQ ID NO: 752551 - RNA, 19 nt, Artificial Sequence
  Description of Artificial Sequence: Synthetic oligonucleotide
acgcccuucccuuggcaau

SEQ ID NO: 752552 - RNA, 19 nt, Artificial Sequence
  Description of Artificial Sequence: Synthetic oligonucleotide
gaaaggcgaagcacggggu

SEQ ID NO: 752553 - RNA, 19 nt, Artificial Sequence
  Description of Artificial Sequence: Synthetic oligonucleotide
caguaaugguggggaaaug

SEQ ID NO: 752554 - RNA, 19 nt, Artificial Sequence
  Description of Artificial Sequence: Synthetic oligonucleotide
ccugcgaaaacgucaguaa

SEQ ID NO: 752555 - RNA, 19 nt, Artificial Sequence
  Description of Artificial Sequence: Synthetic oligonucleotide
acucaacgggagccagagu

SEQ ID NO: 752556 - RNA, 19 nt, Artificial Sequence
  Description of Artificial Sequence: Synthetic oligonucleotide
ccucgccucugguaugugg

SEQ ID NO: 752557 - RNA, 19 nt, Artificial Sequence
  Description of Artificial Sequence: Synthetic oligonucleotide
aucccaagccuaaguacaa

SEQ ID NO: 752558 - RNA, 19 nt, Artificial Sequence
  Description of Artificial Sequence: Synthetic oligonucleotide
ugagggccucauucccagu

SEQ ID NO: 752559 - RNA, 19 nt, Artificial Sequence
  Description of Artificial Sequence: Synthetic oligonucleotide
cccucaaauaaagugcgca

SEQ ID NO: 752560 - RNA, 19 nt, Artificial Sequence
  Description of Artificial Sequence: Synthetic oligonucleotide
gcauguacgccaugcucuc

SEQ ID NO: 752561 - RNA, 19 nt, Artificial Sequence
  Description of Artificial Sequence: Synthetic oligonucleotide
agccuucuugccucauaua

SEQ ID NO: 752562 - RNA, 19 nt, Artificial Sequence
  Description of Artificial Sequence: Synthetic oligonucleotide
cugcgaaaacgucaguaau

SEQ ID NO: 752563 - RNA, 19 nt, Artificial Sequence
  Description of Artificial Sequence: Synthetic oligonucleotide
  modified_base (15)..(15): a, c, u, g, unknown or other
cuucaggcucaaucnguua

SEQ ID NO: 752564 - RNA, 19 nt, Artificial Sequence
  Description of Artificial Sequence: Synthetic oligonucleotide
agcugucgacgaaaucugu

SEQ ID NO: 752565 - RNA, 19 nt, Artificial Sequence
  Description of Artificial Sequence: Synthetic oligonucleotide
cguaggaccccaucccaag

SEQ ID NO: 752566 - RNA, 19 nt, Artificial Sequence
  Description of Artificial Sequence: Synthetic oligonucleotide
ugucuccaucgaacuucuc

SEQ ID NO: 752567 - RNA, 19 nt, Artificial Sequence
  Description of Artificial Sequence: Synthetic oligonucleotide
gcacggggugcccugcuug

SEQ ID NO: 752568 - RNA, 19 nt, Artificial Sequence
  Description of Artificial Sequence: Synthetic oligonucleotide
accccaucccaagccuaag

SEQ ID NO: 752569 - RNA, 19 nt, Artificial Sequence
  Description of Artificial Sequence: Synthetic oligonucleotide
agagaacggcuaaguuugu

SEQ ID NO: 752570 - RNA, 19 nt, Artificial Sequence
  Description of Artificial Sequence: Synthetic oligonucleotide
gcugcgccuccaaccaugg

SEQ ID NO: 752571 - RNA, 19 nt, Artificial Sequence
  Description of Artificial Sequence: Synthetic oligonucleotide
gccucguccaguccaggca

SEQ ID NO: 752572 - RNA, 19 nt, Artificial Sequence
  Description of Artificial Sequence: Synthetic oligonucleotide
cuacuggccuaugacucaa

SEQ ID NO: 752573 - RNA, 19 nt, Artificial Sequence
  Description of Artificial Sequence: Synthetic oligonucleotide
caugggguaguugcugucu

SEQ ID NO: 752574 - RNA, 19 nt, Artificial Sequence
  Description of Artificial Sequence: Synthetic oligonucleotide
cacggggugcccugcuuga

SEQ ID NO: 752575 - RNA, 19 nt, Artificial Sequence
  Description of Artificial Sequence: Synthetic oligonucleotide
ccuucguuguagggguggg

SEQ ID NO: 752576 - RNA, 19 nt, Artificial Sequence
  Description of Artificial Sequence: Synthetic oligonucleotide
ggccuaugacucaacggga

SEQ ID NO: 752577 - RNA, 19 nt, Artificial Sequence
  Description of Artificial Sequence: Synthetic oligonucleotide
ccggaaaggccauggagaa

SEQ ID NO: 752578 - RNA, 19 nt, Artificial Sequence
  Description of Artificial Sequence: Synthetic oligonucleotide
uggcugcgccuccaaccau

SEQ ID NO: 752579 - RNA, 19 nt, Artificial Sequence
  Description of Artificial Sequence: Synthetic oligonucleotide
gugcgcaguccauggcaga

SEQ ID NO: 752580 - RNA, 19 nt, Artificial Sequence
  Description of Artificial Sequence: Synthetic oligonucleotide
gguugacucuuggcugcag

SEQ ID NO: 752581 - RNA, 19 nt, Artificial Sequence
  Description of Artificial Sequence: Synthetic oligonucleotide
ccuuuacaagucaucugua

SEQ ID NO: 752582 - RNA, 19 nt, Artificial Sequence
  Description of Artificial Sequence: Synthetic oligonucleotide
cguugguacacaggacgcc

SEQ ID NO: 752583 - RNA, 19 nt, Artificial Sequence
  Description of Artificial Sequence: Synthetic oligonucleotide
cauguacgccaugcucuca

SEQ ID NO: 752584 - RNA, 19 nt, Artificial Sequence
  Description of Artificial Sequence: Synthetic oligonucleotide
ggcaccagauacauguaau

SEQ ID NO: 752585 - RNA, 19 nt, Artificial Sequence
  Description of Artificial Sequence: Synthetic oligonucleotide
auggcaccagauacaugua

SEQ ID NO: 752586 - RNA, 19 nt, Artificial Sequence
  Description of Artificial Sequence: Synthetic oligonucleotide
agccuucguuguaggggug

SEQ ID NO: 752587 - RNA, 19 nt, Artificial Sequence
  Description of Artificial Sequence: Synthetic oligonucleotide
ccucauuuacagucguggu

SEQ ID NO: 752588 - RNA, 19 nt, Artificial Sequence
  Description of Artificial Sequence: Synthetic oligonucleotide
  modified_base (12)..(12): a, c, u, g, unknown or other
caggcucaaucnguuaaau

SEQ ID NO: 752589 - RNA, 19 nt, Artificial Sequence
  Description of Artificial Sequence: Synthetic oligonucleotide
gggguaguugcugucuggu

SEQ ID NO: 752590 - RNA, 19 nt, Artificial Sequence
  Description of Artificial Sequence: Synthetic oligonucleotide
cccaagccuaaguacaaau

SEQ ID NO: 752591 - RNA, 19 nt, Artificial Sequence
  Description of Artificial Sequence: Synthetic oligonucleotide
gcccauucacccaccaucu

SEQ ID NO: 752592 - RNA, 19 nt, Artificial Sequence
  Description of Artificial Sequence: Synthetic oligonucleotide
cggaguaugaguuguguuu

SEQ ID NO: 752593 - RNA, 19 nt, Artificial Sequence
  Description of Artificial Sequence: Synthetic oligonucleotide
ggcucagacaucugccguu

SEQ ID NO: 752594 - RNA, 19 nt, Artificial Sequence
  Description of Artificial Sequence: Synthetic oligonucleotide
ccguaggaccccaucccaa

SEQ ID NO: 752595 - RNA, 19 nt, Artificial Sequence
  Description of Artificial Sequence: Synthetic oligonucleotide
ccguagauaccgagaaaau

SEQ ID NO: 752596 - RNA, 19 nt, Artificial Sequence
  Description of Artificial Sequence: Synthetic oligonucleotide
cguagauaccgagaaaauu

SEQ ID NO: 752597 - RNA, 19 nt, Artificial Sequence
  Description of Artificial Sequence: Synthetic oligonucleotide
cgacgaaaucuguggucca

SEQ ID NO: 752598 - RNA, 19 nt, Artificial Sequence
  Description of Artificial Sequence: Synthetic oligonucleotide
cucguccaguccaggcaau

SEQ ID NO: 752599 - RNA, 19 nt, Artificial Sequence
  Description of Artificial Sequence: Synthetic oligonucleotide
cgcccuucccuuggcaaug

SEQ ID NO: 752600 - RNA, 19 nt, Artificial Sequence
  Description of Artificial Sequence: Synthetic oligonucleotide
caccugcgaaaacgucagu

SEQ ID NO: 752601 - RNA, 19 nt, Artificial Sequence
  Description of Artificial Sequence: Synthetic oligonucleotide
ccccaucccaagccuaagu

SEQ ID NO: 752602 - RNA, 19 nt, Artificial Sequence
  Description of Artificial Sequence: Synthetic oligonucleotide
augggcuggugggguucuu

SEQ ID NO: 752603 - RNA, 19 nt, Artificial Sequence
  Description of Artificial Sequence: Synthetic oligonucleotide
cugcgccuccaaccauggu

SEQ ID NO: 752604 - RNA, 19 nt, Artificial Sequence
  Description of Artificial Sequence: Synthetic oligonucleotide
uuauauaacaaauuggcag

SEQ ID NO: 752605 - RNA, 19 nt, Artificial Sequence
  Description of Artificial Sequence: Synthetic oligonucleotide
uauuauguacuucugagag

SEQ ID NO: 752606 - RNA, 19 nt, Artificial Sequence
  Description of Artificial Sequence: Synthetic oligonucleotide
cuuauauugacccugguag

SEQ ID NO: 752607 - RNA, 19 nt, Artificial Sequence
  Description of Artificial Sequence: Synthetic oligonucleotide
acagcaacaucucugaucg

SEQ ID NO: 752608 - RNA, 19 nt, Artificial Sequence
  Description of Artificial Sequence: Synthetic oligonucleotide
aucuuaaacaaccuuuccc

SEQ ID NO: 752609 - RNA, 19 nt, Artificial Sequence
  Description of Artificial Sequence: Synthetic oligonucleotide
ucuuguaaauucuuugucg

SEQ ID NO: 752610 - RNA, 19 nt, Artificial Sequence
  Description of Artificial Sequence: Synthetic oligonucleotide
ucuauuauguacuucugag

SEQ ID NO: 752611 - RNA, 19 nt, Artificial Sequence
  Description of Artificial Sequence: Synthetic oligonucleotide
uaaacaaccuuucccaagg

SEQ ID NO: 752612 - RNA, 19 nt, Artificial Sequence
  Description of Artificial Sequence: Synthetic oligonucleotide
ugguuguuaauuauuagag

SEQ ID NO: 752613 - RNA, 19 nt, Artificial Sequence
  Description of Artificial Sequence: Synthetic oligonucleotide
acaaauaguuuucggaagc

SEQ ID NO: 752614 - RNA, 19 nt, Artificial Sequence
  Description of Artificial Sequence: Synthetic oligonucleotide
uauuagaggaaggacaucg

SEQ ID NO: 752615 - RNA, 19 nt, Artificial Sequence
  Description of Artificial Sequence: Synthetic oligonucleotide
auaucugugaggaagauuc

SEQ ID NO: 752616 - RNA, 19 nt, Artificial Sequence
  Description of Artificial Sequence: Synthetic oligonucleotide
ugggaguaauuccagaugg

SEQ ID NO: 752617 - RNA, 19 nt, Artificial Sequence
  Description of Artificial Sequence: Synthetic oligonucleotide
gagcaguacaaucacaugg

SEQ ID NO: 752618 - RNA, 19 nt, Artificial Sequence
  Description of Artificial Sequence: Synthetic oligonucleotide
ucuuaaacaaccuuuccca

SEQ ID NO: 752619 - RNA, 19 nt, Artificial Sequence
  Description of Artificial Sequence: Synthetic oligonucleotide
ugcuaagugaugcagacug

SEQ ID NO: 752620 - RNA, 19 nt, Artificial Sequence
  Description of Artificial Sequence: Synthetic oligonucleotide
aacaaauaguuuucggaag

SEQ ID NO: 752621 - RNA, 19 nt, Artificial Sequence
  Description of Artificial Sequence: Synthetic oligonucleotide
auuccaacaacauugagaa

SEQ ID NO: 752622 - RNA, 19 nt, Artificial Sequence
  Description of Artificial Sequence: Synthetic oligonucleotide
ugaagaaguucucauacug

SEQ ID NO: 752623 - RNA, 19 nt, Artificial Sequence
  Description of Artificial Sequence: Synthetic oligonucleotide
guuguuaauuauuagagga

SEQ ID NO: 752624 - RNA, 19 nt, Artificial Sequence
  Description of Artificial Sequence: Synthetic oligonucleotide
ugucauuacagcaaccgcc

SEQ ID NO: 752625 - RNA, 19 nt, Artificial Sequence
  Description of Artificial Sequence: Synthetic oligonucleotide
auaagagccuuacugguac

SEQ ID NO: 752626 - RNA, 19 nt, Artificial Sequence
  Description of Artificial Sequence: Synthetic oligonucleotide
uguggaucgagugacauag

SEQ ID NO: 752627 - RNA, 19 nt, Artificial Sequence
  Description of Artificial Sequence: Synthetic oligonucleotide
gaucauaucugugaggaag

SEQ ID NO: 752628 - RNA, 19 nt, Artificial Sequence
  Description of Artificial Sequence: Synthetic oligonucleotide
uccaacaacauugagaauc

SEQ ID NO: 752629 - RNA, 19 nt, Artificial Sequence
  Description of Artificial Sequence: Synthetic oligonucleotide
aaacuggguuugcuuaucc

SEQ ID NO: 752630 - RNA, 19 nt, Artificial Sequence
  Description of Artificial Sequence: Synthetic oligonucleotide
gaucgagugacauaguuga

SEQ ID NO: 752631 - RNA, 19 nt, Artificial Sequence
  Description of Artificial Sequence: Synthetic oligonucleotide
agcacuucgauggaguugc

SEQ ID NO: 752632 - RNA, 19 nt, Artificial Sequence
  Description of Artificial Sequence: Synthetic oligonucleotide
ucgcaaguaagcaaauucc

SEQ ID NO: 752633 - RNA, 19 nt, Artificial Sequence
  Description of Artificial Sequence: Synthetic oligonucleotide
uuccaagccaaacaaauuc

SEQ ID NO: 752634 - RNA, 19 nt, Artificial Sequence
  Description of Artificial Sequence: Synthetic oligonucleotide
uuuggugaugccucgagug

SEQ ID NO: 752635 - RNA, 19 nt, Artificial Sequence
  Description of Artificial Sequence: Synthetic oligonucleotide
agaucuguggcugugaaag

SEQ ID NO: 752636 - RNA, 19 nt, Artificial Sequence
  Description of Artificial Sequence: Synthetic oligonucleotide
uucgcaaguaagcaaauuc

SEQ ID NO: 752637 - RNA, 19 nt, Artificial Sequence
  Description of Artificial Sequence: Synthetic oligonucleotide
aucgcaaacaaauaguuuu

SEQ ID NO: 752638 - RNA, 19 nt, Artificial Sequence
  Description of Artificial Sequence: Synthetic oligonucleotide
ugaagcauuguuccguuca

SEQ ID NO: 752639 - RNA, 19 nt, Artificial Sequence
  Description of Artificial Sequence: Synthetic oligonucleotide
uaaugugccgguuucuucc

SEQ ID NO: 752640 - RNA, 19 nt, Artificial Sequence
  Description of Artificial Sequence: Synthetic oligonucleotide
auucgcaucucauuccaac

SEQ ID NO: 752641 - RNA, 19 nt, Artificial Sequence
  Description of Artificial Sequence: Synthetic oligonucleotide
aaagguucucuccccgugg

SEQ ID NO: 752642 - RNA, 19 nt, Artificial Sequence
  Description of Artificial Sequence: Synthetic oligonucleotide
uugcuuauccugcgaaucg

SEQ ID NO: 752643 - RNA, 19 nt, Artificial Sequence
  Description of Artificial Sequence: Synthetic oligonucleotide
aucaccauacacauuggcc

SEQ ID NO: 752644 - RNA, 19 nt, Artificial Sequence
  Description of Artificial Sequence: Synthetic oligonucleotide
aucgccuucuuauauugac

SEQ ID NO: 752645 - RNA, 19 nt, Artificial Sequence
  Description of Artificial Sequence: Synthetic oligonucleotide
guuaauuauuagaggaagg

SEQ ID NO: 752646 - RNA, 19 nt, Artificial Sequence
  Description of Artificial Sequence: Synthetic oligonucleotide
uucuauuauguacuucuga

SEQ ID NO: 752647 - RNA, 19 nt, Artificial Sequence
  Description of Artificial Sequence: Synthetic oligonucleotide
ucauuaaugcagaagcgau

SEQ ID NO: 752648 - RNA, 19 nt, Artificial Sequence
  Description of Artificial Sequence: Synthetic oligonucleotide
ugggaaauucacaaacaug

SEQ ID NO: 752649 - RNA, 19 nt, Artificial Sequence
  Description of Artificial Sequence: Synthetic oligonucleotide
uuuccaguagcauuucaca

SEQ ID NO: 752650 - RNA, 19 nt, Artificial Sequence
  Description of Artificial Sequence: Synthetic oligonucleotide
gagccuuacugguacaggg

SEQ ID NO: 752651 - RNA, 19 nt, Artificial Sequence
  Description of Artificial Sequence: Synthetic oligonucleotide
uuucggaagcaguuuacag

SEQ ID NO: 752652 - RNA, 19 nt, Artificial Sequence
  Description of Artificial Sequence: Synthetic oligonucleotide
aaaagguucucuccccgug

SEQ ID NO: 752653 - RNA, 19 nt, Artificial Sequence
  Description of Artificial Sequence: Synthetic oligonucleotide
ucaggaaaagguucucucc

SEQ ID NO: 752654 - RNA, 19 nt, Artificial Sequence
  Description of Artificial Sequence: Synthetic oligonucleotide
gaaagggauccuuggagag

SEQ ID NO: 752655 - RNA, 19 nt, Artificial Sequence
  Description of Artificial Sequence: Synthetic oligonucleotide
guuccguucaccuuuccag

SEQ ID NO: 752656 - RNA, 19 nt, Artificial Sequence
  Description of Artificial Sequence: Synthetic oligonucleotide
ugaaagggauccuuggaga

SEQ ID NO: 752657 - RNA, 19 nt, Artificial Sequence
  Description of Artificial Sequence: Synthetic oligonucleotide
gaagcgaugcaguaccacc

SEQ ID NO: 752658 - RNA, 19 nt, Artificial Sequence
  Description of Artificial Sequence: Synthetic oligonucleotide
aggcaaucgaacaucaugg

SEQ ID NO: 752659 - RNA, 19 nt, Artificial Sequence
  Description of Artificial Sequence: Synthetic oligonucleotide
ugcgaaucguuccucagug

SEQ ID NO: 752660 - RNA, 19 nt, Artificial Sequence
  Description of Artificial Sequence: Synthetic oligonucleotide
agcaguacaaucacauggc

SEQ ID NO: 752661 - RNA, 19 nt, Artificial Sequence
  Description of Artificial Sequence: Synthetic oligonucleotide
uggaacgcacucuugaaga

SEQ ID NO: 752662 - RNA, 19 nt, Artificial Sequence
  Description of Artificial Sequence: Synthetic oligonucleotide
auccuguauggguaguacc

SEQ ID NO: 752663 - RNA, 19 nt, Artificial Sequence
  Description of Artificial Sequence: Synthetic oligonucleotide
uuauccugcgaaucguucc

SEQ ID NO: 752664 - RNA, 19 nt, Artificial Sequence
  Description of Artificial Sequence: Synthetic oligonucleotide
aagaccagcaucguggagu

SEQ ID NO: 752665 - RNA, 19 nt, Artificial Sequence
  Description of Artificial Sequence: Synthetic oligonucleotide
ucucugaucguuccaacgu

SEQ ID NO: 752666 - RNA, 19 nt, Artificial Sequence
  Description of Artificial Sequence: Synthetic oligonucleotide
ucuuauauugacccuggua

SEQ ID NO: 752667 - RNA, 19 nt, Artificial Sequence
  Description of Artificial Sequence: Synthetic oligonucleotide
auuacagcaaccgccccgc

SEQ ID NO: 752668 - RNA, 19 nt, Artificial Sequence
  Description of Artificial Sequence: Synthetic oligonucleotide
ugcuggagcaguacaauca

SEQ ID NO: 752669 - RNA, 19 nt, Artificial Sequence
  Description of Artificial Sequence: Synthetic oligonucleotide
gguaguaccauguagcaca

SEQ ID NO: 752670 - RNA, 19 nt, Artificial Sequence
  Description of Artificial Sequence: Synthetic oligonucleotide
gguuguuaauuauuagagg

SEQ ID NO: 752671 - RNA, 19 nt, Artificial Sequence
  Description of Artificial Sequence: Synthetic oligonucleotide
uuugggaguaauuccagau

SEQ ID NO: 752672 - RNA, 19 nt, Artificial Sequence
  Description of Artificial Sequence: Synthetic oligonucleotide
gugaaagggauccuuggag

SEQ ID NO: 752673 - RNA, 19 nt, Artificial Sequence
  Description of Artificial Sequence: Synthetic oligonucleotide
uugggaguaauuccagaug

SEQ ID NO: 752674 - RNA, 19 nt, Artificial Sequence
  Description of Artificial Sequence: Synthetic oligonucleotide
ggcguuaggaccuuggaag

SEQ ID NO: 752675 - RNA, 19 nt, Artificial Sequence
  Description of Artificial Sequence: Synthetic oligonucleotide
ggcauaagagccuuacugg

SEQ ID NO: 752676 - RNA, 19 nt, Artificial Sequence
  Description of Artificial Sequence: Synthetic oligonucleotide
uccaagccaaacaaauucu

SEQ ID NO: 752677 - RNA, 19 nt, Artificial Sequence
  Description of Artificial Sequence: Synthetic oligonucleotide
guuggcgugagccucacug

SEQ ID NO: 752678 - RNA, 19 nt, Artificial Sequence
  Description of Artificial Sequence: Synthetic oligonucleotide
uuauauugacccugguaga

SEQ ID NO: 752679 - RNA, 19 nt, Artificial Sequence
  Description of Artificial Sequence: Synthetic oligonucleotide
caugucauucuguacuccc

SEQ ID NO: 752680 - RNA, 19 nt, Artificial Sequence
  Description of Artificial Sequence: Synthetic oligonucleotide
accagugggaccuggcucg

SEQ ID NO: 752681 - RNA, 19 nt, Artificial Sequence
  Description of Artificial Sequence: Synthetic oligonucleotide
aaaucuuacugauggcuuu

SEQ ID NO: 752682 - RNA, 19 nt, Artificial Sequence
  Description of Artificial Sequence: Synthetic oligonucleotide
aacguguugaagcauuguu

SEQ ID NO: 752683 - RNA, 19 nt, Artificial Sequence
  Description of Artificial Sequence: Synthetic oligonucleotide
cuuuacugacaauaaugug

SEQ ID NO: 752684 - RNA, 19 nt, Artificial Sequence
  Description of Artificial Sequence: Synthetic oligonucleotide
agaguuacguuugcugggc

SEQ ID NO: 752685 - RNA, 19 nt, Artificial Sequence
  Description of Artificial Sequence: Synthetic oligonucleotide
aacuguguggaucgaguga

SEQ ID NO: 752686 - RNA, 19 nt, Artificial Sequence
  Description of Artificial Sequence: Synthetic oligonucleotide
agugacauaguugauguaa

SEQ ID NO: 752687 - RNA, 19 nt, Artificial Sequence
  Description of Artificial Sequence: Synthetic oligonucleotide
uacuggaacgcacucuuga

SEQ ID NO: 752688 - RNA, 19 nt, Artificial Sequence
  Description of Artificial Sequence: Synthetic oligonucleotide
cacgcuagcaucaagugca

SEQ ID NO: 752689 - RNA, 19 nt, Artificial Sequence
  Description of Artificial Sequence: Synthetic oligonucleotide
caugguuguuaauuauuag

SEQ ID NO: 752690 - RNA, 19 nt, Artificial Sequence
  Description of Artificial Sequence: Synthetic oligonucleotide
uuuuauaguuggcgugagc

SEQ ID NO: 752691 - RNA, 19 nt, Artificial Sequence
  Description of Artificial Sequence: Synthetic oligonucleotide
cuaucgccuucuuauauug

SEQ ID NO: 752692 - RNA, 19 nt, Artificial Sequence
  Description of Artificial Sequence: Synthetic oligonucleotide
ggacaucgcaaacaaauag

SEQ ID NO: 752693 - RNA, 19 nt, Artificial Sequence
  Description of Artificial Sequence: Synthetic oligonucleotide
ggcaguacggcauaagagc

SEQ ID NO: 752694 - RNA, 19 nt, Artificial Sequence
  Description of Artificial Sequence: Synthetic oligonucleotide
cauuaaugcagaagcgaug

SEQ ID NO: 752695 - RNA, 19 nt, Artificial Sequence
  Description of Artificial Sequence: Synthetic oligonucleotide
ugccauucgcaucucauuc

SEQ ID NO: 752696 - RNA, 19 nt, Artificial Sequence
  Description of Artificial Sequence: Synthetic oligonucleotide
cuuacugcgaucaacuucu

SEQ ID NO: 752697 - RNA, 19 nt, Artificial Sequence
  Description of Artificial Sequence: Synthetic oligonucleotide
agucaguccuucuauuaug

SEQ ID NO: 752698 - RNA, 19 nt, Artificial Sequence
  Description of Artificial Sequence: Synthetic oligonucleotide
uguaugugcuuacugcgau

SEQ ID NO: 752699 - RNA, 19 nt, Artificial Sequence
  Description of Artificial Sequence: Synthetic oligonucleotide
gaugccucgagugacugug

SEQ ID NO: 752700 - RNA, 19 nt, Artificial Sequence
  Description of Artificial Sequence: Synthetic oligonucleotide
aaccuuuucuaaacuuggg

SEQ ID NO: 752701 - RNA, 19 nt, Artificial Sequence
  Description of Artificial Sequence: Synthetic oligonucleotide
ugcugggcgacauuaaauc

SEQ ID NO: 752702 - RNA, 19 nt, Artificial Sequence
  Description of Artificial Sequence: Synthetic oligonucleotide
ucgagugacauaguugaug

SEQ ID NO: 752703 - RNA, 19 nt, Artificial Sequence
  Description of Artificial Sequence: Synthetic oligonucleotide
gaucguuccaacguguuga

SEQ ID NO: 752704 - RNA, 19 nt, Artificial Sequence
  Description of Artificial Sequence: Synthetic oligonucleotide
gcgacauuaaaucagaugu

SEQ ID NO: 752705 - RNA, 19 nt, Artificial Sequence
  Description of Artificial Sequence: Synthetic oligonucleotide
ucuccccucagcuaguuuc

SEQ ID NO: 752706 - RNA, 19 nt, Artificial Sequence
  Description of Artificial Sequence: Synthetic oligonucleotide
auuagaggaaggacaucgc

SEQ ID NO: 752707 - RNA, 19 nt, Artificial Sequence
  Description of Artificial Sequence: Synthetic oligonucleotide
ucugaucguuccaacgugu

SEQ ID NO: 752708 - RNA, 19 nt, Artificial Sequence
  Description of Artificial Sequence: Synthetic oligonucleotide
gggaugauuucucagucag

SEQ ID NO: 752709 - RNA, 19 nt, Artificial Sequence
  Description of Artificial Sequence: Synthetic oligonucleotide
gucgaggaauuccagggag

SEQ ID NO: 752710 - RNA, 19 nt, Artificial Sequence
  Description of Artificial Sequence: Synthetic oligonucleotide
uuugcuuauccugcgaauc

SEQ ID NO: 752711 - RNA, 19 nt, Artificial Sequence
  Description of Artificial Sequence: Synthetic oligonucleotide
uccuggguucgcaaguaag

SEQ ID NO: 752712 - RNA, 19 nt, Artificial Sequence
  Description of Artificial Sequence: Synthetic oligonucleotide
ucgcaaacaaauaguuuuc

SEQ ID NO: 752713 - RNA, 19 nt, Artificial Sequence
  Description of Artificial Sequence: Synthetic oligonucleotide
aacgcacucuugaagaaga

SEQ ID NO: 752714 - RNA, 19 nt, Artificial Sequence
  Description of Artificial Sequence: Synthetic oligonucleotide
uguguggugcuugaugagc

SEQ ID NO: 752715 - RNA, 19 nt, Artificial Sequence
  Description of Artificial Sequence: Synthetic oligonucleotide
ugggcgacauuaaaucaga

SEQ ID NO: 752716 - RNA, 19 nt, Artificial Sequence
  Description of Artificial Sequence: Synthetic oligonucleotide
uauccugcgaaucguuccu

SEQ ID NO: 752717 - RNA, 19 nt, Artificial Sequence
  Description of Artificial Sequence: Synthetic oligonucleotide
ugucagucuuccaagccaa

SEQ ID NO: 752718 - RNA, 19 nt, Artificial Sequence
  Description of Artificial Sequence: Synthetic oligonucleotide
acguguugaagcauuguuc

SEQ ID NO: 752719 - RNA, 19 nt, Artificial Sequence
  Description of Artificial Sequence: Synthetic oligonucleotide
ucucacaugucauucugua

SEQ ID NO: 752720 - RNA, 19 nt, Artificial Sequence
  Description of Artificial Sequence: Synthetic oligonucleotide
cuauuauguacuucugaga

SEQ ID NO: 752721 - RNA, 19 nt, Artificial Sequence
  Description of Artificial Sequence: Synthetic oligonucleotide
aacuggguuugcuuauccu

SEQ ID NO: 752722 - RNA, 19 nt, Artificial Sequence
  Description of Artificial Sequence: Synthetic oligonucleotide
uucgucucccuuuauccac

SEQ ID NO: 752723 - RNA, 19 nt, Artificial Sequence
  Description of Artificial Sequence: Synthetic oligonucleotide
cuuuguucaaguauuuaua

SEQ ID NO: 752724 - RNA, 19 nt, Artificial Sequence
  Description of Artificial Sequence: Synthetic oligonucleotide
gaucuguggcugugaaagg

SEQ ID NO: 752725 - RNA, 19 nt, Artificial Sequence
  Description of Artificial Sequence: Synthetic oligonucleotide
uuuucggaagcaguuuaca

SEQ ID NO: 752726 - RNA, 19 nt, Artificial Sequence
  Description of Artificial Sequence: Synthetic oligonucleotide
uauaguuggcgugagccuc

SEQ ID NO: 752727 - RNA, 19 nt, Artificial Sequence
  Description of Artificial Sequence: Synthetic oligonucleotide
aguugcugagcucagcuuu

SEQ ID NO: 752728 - RNA, 19 nt, Artificial Sequence
  Description of Artificial Sequence: Synthetic oligonucleotide
gucauuacagcaaccgccc

SEQ ID NO: 752729 - RNA, 19 nt, Artificial Sequence
  Description of Artificial Sequence: Synthetic oligonucleotide
agugggaccuggcucgggg

SEQ ID NO: 752730 - RNA, 19 nt, Artificial Sequence
  Description of Artificial Sequence: Synthetic oligonucleotide
ugucgaggaauuccaggga

SEQ ID NO: 752731 - RNA, 19 nt, Artificial Sequence
  Description of Artificial Sequence: Synthetic oligonucleotide
ucuacaaucugggaugauu

SEQ ID NO: 752732 - RNA, 19 nt, Artificial Sequence
  Description of Artificial Sequence: Synthetic oligonucleotide
gauggaucuucccuccuuc

SEQ ID NO: 752733 - RNA, 19 nt, Artificial Sequence
  Description of Artificial Sequence: Synthetic oligonucleotide
ugauguuaugauacugauu

SEQ ID NO: 752734 - RNA, 19 nt, Artificial Sequence
  Description of Artificial Sequence: Synthetic oligonucleotide
gguugaaccacugucucag

SEQ ID NO: 752735 - RNA, 19 nt, Artificial Sequence
  Description of Artificial Sequence: Synthetic oligonucleotide
ggaaaagguucucuccccg

SEQ ID NO: 752736 - RNA, 19 nt, Artificial Sequence
  Description of Artificial Sequence: Synthetic oligonucleotide
uggaucgagugacauaguu

SEQ ID NO: 752737 - RNA, 19 nt, Artificial Sequence
  Description of Artificial Sequence: Synthetic oligonucleotide
gcgaucaacuucuacauca

SEQ ID NO: 752738 - RNA, 19 nt, Artificial Sequence
  Description of Artificial Sequence: Synthetic oligonucleotide
cuggaacgcacucuugaag

SEQ ID NO: 752739 - RNA, 19 nt, Artificial Sequence
  Description of Artificial Sequence: Synthetic oligonucleotide
augcugauuuuccaacugu

SEQ ID NO: 752740 - RNA, 19 nt, Artificial Sequence
  Description of Artificial Sequence: Synthetic oligonucleotide
caucagguucucuccacag

SEQ ID NO: 752741 - RNA, 19 nt, Artificial Sequence
  Description of Artificial Sequence: Synthetic oligonucleotide
cuguaugcugcugauguac

SEQ ID NO: 752742 - RNA, 19 nt, Artificial Sequence
  Description of Artificial Sequence: Synthetic oligonucleotide
caaauuggcaggcaaucga

SEQ ID NO: 752743 - RNA, 19 nt, Artificial Sequence
  Description of Artificial Sequence: Synthetic oligonucleotide
ucauacuggaaguuuccuu

SEQ ID NO: 752744 - RNA, 19 nt, Artificial Sequence
  Description of Artificial Sequence: Synthetic oligonucleotide
guagaugaucauaucugug

SEQ ID NO: 752745 - RNA, 19 nt, Artificial Sequence
  Description of Artificial Sequence: Synthetic oligonucleotide
agaagcgaugcaguaccac

SEQ ID NO: 752746 - RNA, 19 nt, Artificial Sequence
  Description of Artificial Sequence: Synthetic oligonucleotide
cuuugucgaggaauuccag

SEQ ID NO: 752747 - RNA, 19 nt, Artificial Sequence
  Description of Artificial Sequence: Synthetic oligonucleotide
ucauguaccugcagagcuc

SEQ ID NO: 752748 - RNA, 19 nt, Artificial Sequence
  Description of Artificial Sequence: Synthetic oligonucleotide
guuccaacguguugaagca

SEQ ID NO: 752749 - RNA, 19 nt, Artificial Sequence
  Description of Artificial Sequence: Synthetic oligonucleotide
gaacgcacucuugaagaag

SEQ ID NO: 752750 - RNA, 19 nt, Artificial Sequence
  Description of Artificial Sequence: Synthetic oligonucleotide
cucauuaaugcagaagcga

SEQ ID NO: 752751 - RNA, 19 nt, Artificial Sequence
  Description of Artificial Sequence: Synthetic oligonucleotide
ucauuacagcaaccgcccc

SEQ ID NO: 752752 - RNA, 19 nt, Artificial Sequence
  Description of Artificial Sequence: Synthetic oligonucleotide
cucacaugucauucuguac

SEQ ID NO: 752753 - RNA, 19 nt, Artificial Sequence
  Description of Artificial Sequence: Synthetic oligonucleotide
agaagaccagcaucgugga

SEQ ID NO: 752754 - RNA, 19 nt, Artificial Sequence
  Description of Artificial Sequence: Synthetic oligonucleotide
caacuguguggaucgagug

SEQ ID NO: 752755 - RNA, 19 nt, Artificial Sequence
  Description of Artificial Sequence: Synthetic oligonucleotide
gaguuacguuugcugggcg

SEQ ID NO: 752756 - RNA, 19 nt, Artificial Sequence
  Description of Artificial Sequence: Synthetic oligonucleotide
ggcgacauuaaaucagaug

SEQ ID NO: 752757 - RNA, 19 nt, Artificial Sequence
  Description of Artificial Sequence: Synthetic oligonucleotide
guuugaagcucuccagcac

SEQ ID NO: 752758 - RNA, 19 nt, Artificial Sequence
  Description of Artificial Sequence: Synthetic oligonucleotide
ucgaggaauuccagggagu

SEQ ID NO: 752759 - RNA, 19 nt, Artificial Sequence
  Description of Artificial Sequence: Synthetic oligonucleotide
uugcugggcgacauuaaau

SEQ ID NO: 752760 - RNA, 19 nt, Artificial Sequence
  Description of Artificial Sequence: Synthetic oligonucleotide
gacauuaaaucagauguau

SEQ ID NO: 752761 - RNA, 19 nt, Artificial Sequence
  Description of Artificial Sequence: Synthetic oligonucleotide
aggaaggacaucgcaaaca

SEQ ID NO: 752762 - RNA, 19 nt, Artificial Sequence
  Description of Artificial Sequence: Synthetic oligonucleotide
cagggaagcgucucagaag

SEQ ID NO: 752763 - RNA, 19 nt, Artificial Sequence
  Description of Artificial Sequence: Synthetic oligonucleotide
cauagcugaagaaguucuc

SEQ ID NO: 752764 - RNA, 19 nt, Artificial Sequence
  Description of Artificial Sequence: Synthetic oligonucleotide
cacaugucauucuguacuc

SEQ ID NO: 752765 - RNA, 19 nt, Artificial Sequence
  Description of Artificial Sequence: Synthetic oligonucleotide
ugguugaaccacugucuca

SEQ ID NO: 752766 - RNA, 19 nt, Artificial Sequence
  Description of Artificial Sequence: Synthetic oligonucleotide
ucuaucaggucagggucug

SEQ ID NO: 752767 - RNA, 19 nt, Artificial Sequence
  Description of Artificial Sequence: Synthetic oligonucleotide
cucugaucguuccaacgug

SEQ ID NO: 752768 - RNA, 19 nt, Artificial Sequence
  Description of Artificial Sequence: Synthetic oligonucleotide
cuggcaaaucuuacugaug

SEQ ID NO: 752769 - RNA, 19 nt, Artificial Sequence
  Description of Artificial Sequence: Synthetic oligonucleotide
cuguauggguaguaccaug

SEQ ID NO: 752770 - RNA, 19 nt, Artificial Sequence
  Description of Artificial Sequence: Synthetic oligonucleotide
uggguucgcaaguaagcaa

SEQ ID NO: 752771 - RNA, 19 nt, Artificial Sequence
  Description of Artificial Sequence: Synthetic oligonucleotide
agagccuuacugguacagg

SEQ ID NO: 752772 - RNA, 19 nt, Artificial Sequence
  Description of Artificial Sequence: Synthetic oligonucleotide
gaccuggcguuccauggcc

SEQ ID NO: 752773 - RNA, 19 nt, Artificial Sequence
  Description of Artificial Sequence: Synthetic oligonucleotide
uggcccaaugccaugucau

SEQ ID NO: 752774 - RNA, 19 nt, Artificial Sequence
  Description of Artificial Sequence: Synthetic oligonucleotide
cuuaaacaaccuuucccaa

SEQ ID NO: 752775 - RNA, 19 nt, Artificial Sequence
  Description of Artificial Sequence: Synthetic oligonucleotide
uccaacuguguggaucgag

SEQ ID NO: 752776 - RNA, 19 nt, Artificial Sequence
  Description of Artificial Sequence: Synthetic oligonucleotide
gaagcgucucagaagcaac

SEQ ID NO: 752777 - RNA, 19 nt, Artificial Sequence
  Description of Artificial Sequence: Synthetic oligonucleotide
cucauuccaacaacauuga

SEQ ID NO: 752778 - RNA, 19 nt, Artificial Sequence
  Description of Artificial Sequence: Synthetic oligonucleotide
uguggcugugaaagggauc

SEQ ID NO: 752779 - RNA, 19 nt, Artificial Sequence
  Description of Artificial Sequence: Synthetic oligonucleotide
cagcuuaaagcacgcuagc

SEQ ID NO: 752780 - RNA, 19 nt, Artificial Sequence
  Description of Artificial Sequence: Synthetic oligonucleotide
agcaacaucucugaucguu

SEQ ID NO: 752781 - RNA, 19 nt, Artificial Sequence
  Description of Artificial Sequence: Synthetic oligonucleotide
agcuuaaagcacgcuagca

SEQ ID NO: 752782 - RNA, 19 nt, Artificial Sequence
  Description of Artificial Sequence: Synthetic oligonucleotide
gaauuccagggaguagagc

SEQ ID NO: 752783 - RNA, 19 nt, Artificial Sequence
  Description of Artificial Sequence: Synthetic oligonucleotide
guuacguuugcugggcgac

SEQ ID NO: 752784 - RNA, 19 nt, Artificial Sequence
  Description of Artificial Sequence: Synthetic oligonucleotide
ucuuguguaugugcuuacu

SEQ ID NO: 752785 - RNA, 19 nt, Artificial Sequence
  Description of Artificial Sequence: Synthetic oligonucleotide
ugcgaucaacuucuacauc

SEQ ID NO: 752786 - RNA, 19 nt, Artificial Sequence
  Description of Artificial Sequence: Synthetic oligonucleotide
ggugucagucuuccaagcc

SEQ ID NO: 752787 - RNA, 19 nt, Artificial Sequence
  Description of Artificial Sequence: Synthetic oligonucleotide
caugguugaaccacugucu

SEQ ID NO: 752788 - RNA, 19 nt, Artificial Sequence
  Description of Artificial Sequence: Synthetic oligonucleotide
cacagcgggagaccuggcg

SEQ ID NO: 752789 - RNA, 19 nt, Artificial Sequence
  Description of Artificial Sequence: Synthetic oligonucleotide
uaagagccuuacugguaca

SEQ ID NO: 752790 - RNA, 19 nt, Artificial Sequence
  Description of Artificial Sequence: Synthetic oligonucleotide
uccugcgaaucguuccuca

SEQ ID NO: 752791 - RNA, 19 nt, Artificial Sequence
  Description of Artificial Sequence: Synthetic oligonucleotide
cuccccucagcuaguuucc

SEQ ID NO: 752792 - RNA, 19 nt, Artificial Sequence
  Description of Artificial Sequence: Synthetic oligonucleotide
ugaucauaucugugaggaa

SEQ ID NO: 752793 - RNA, 19 nt, Artificial Sequence
  Description of Artificial Sequence: Synthetic oligonucleotide
ccuggguucgcaaguaagc

SEQ ID NO: 752794 - RNA, 19 nt, Artificial Sequence
  Description of Artificial Sequence: Synthetic oligonucleotide
agcgucucagaagcaacag

SEQ ID NO: 752795 - RNA, 19 nt, Artificial Sequence
  Description of Artificial Sequence: Synthetic oligonucleotide
cuggcuaucgccuucuuau

SEQ ID NO: 752796 - RNA, 19 nt, Artificial Sequence
  Description of Artificial Sequence: Synthetic oligonucleotide
auuguuccguucaccuuuc

SEQ ID NO: 752797 - RNA, 19 nt, Artificial Sequence
  Description of Artificial Sequence: Synthetic oligonucleotide
caucucugaucguuccaac

SEQ ID NO: 752798 - RNA, 19 nt, Artificial Sequence
  Description of Artificial Sequence: Synthetic oligonucleotide
ggaucgagugacauaguug

SEQ ID NO: 752799 - RNA, 19 nt, Artificial Sequence
  Description of Artificial Sequence: Synthetic oligonucleotide
uuauuagaggaaggacauc

SEQ ID NO: 752800 - RNA, 19 nt, Artificial Sequence
  Description of Artificial Sequence: Synthetic oligonucleotide
cucauguaccugcagagcu

SEQ ID NO: 752801 - RNA, 19 nt, Artificial Sequence
  Description of Artificial Sequence: Synthetic oligonucleotide
uggugaugccucgagugac

SEQ ID NO: 752802 - RNA, 19 nt, Artificial Sequence
  Description of Artificial Sequence: Synthetic oligonucleotide
cuagcagcgcuuccccaag

SEQ ID NO: 752803 - RNA, 19 nt, Artificial Sequence
  Description of Artificial Sequence: Synthetic oligonucleotide
ccauguagcacaucagguc

SEQ ID NO: 752804 - RNA, 19 nt, Artificial Sequence
  Description of Artificial Sequence: Synthetic oligonucleotide
cauccuguauggguaguac

SEQ ID NO: 752805 - RNA, 19 nt, Artificial Sequence
  Description of Artificial Sequence: Synthetic oligonucleotide
gguguucuaaaguccccug

SEQ ID NO: 752806 - RNA, 19 nt, Artificial Sequence
  Description of Artificial Sequence: Synthetic oligonucleotide
gcaguacggcauaagagcc

SEQ ID NO: 752807 - RNA, 19 nt, Artificial Sequence
  Description of Artificial Sequence: Synthetic oligonucleotide
gcaugccuugguuugggag

SEQ ID NO: 752808 - RNA, 19 nt, Artificial Sequence
  Description of Artificial Sequence: Synthetic oligonucleotide
cauaagagccuuacuggua

SEQ ID NO: 752809 - RNA, 19 nt, Artificial Sequence
  Description of Artificial Sequence: Synthetic oligonucleotide
gaugagcaugccuugguuu

SEQ ID NO: 752810 - RNA, 19 nt, Artificial Sequence
  Description of Artificial Sequence: Synthetic oligonucleotide
gcugauguuaugauacuga

SEQ ID NO: 752811 - RNA, 19 nt, Artificial Sequence
  Description of Artificial Sequence: Synthetic oligonucleotide
ggagcaguacaaucacaug

SEQ ID NO: 752812 - RNA, 19 nt, Artificial Sequence
  Description of Artificial Sequence: Synthetic oligonucleotide
guaugucacugcagcuucg

SEQ ID NO: 752813 - RNA, 19 nt, Artificial Sequence
  Description of Artificial Sequence: Synthetic oligonucleotide
uccguucaccuuuccagua

SEQ ID NO: 752814 - RNA, 19 nt, Artificial Sequence
  Description of Artificial Sequence: Synthetic oligonucleotide
cugacaauaaugugccggu

SEQ ID NO: 752815 - RNA, 19 nt, Artificial Sequence
  Description of Artificial Sequence: Synthetic oligonucleotide
uugaagcauuguuccguuc

SEQ ID NO: 752816 - RNA, 19 nt, Artificial Sequence
  Description of Artificial Sequence: Synthetic oligonucleotide
aguacggcauaagagccuu

SEQ ID NO: 752817 - RNA, 19 nt, Artificial Sequence
  Description of Artificial Sequence: Synthetic oligonucleotide
gaaaagguucucuccccgu

SEQ ID NO: 752818 - RNA, 19 nt, Artificial Sequence
  Description of Artificial Sequence: Synthetic oligonucleotide
cuuacugguacagggcaga

SEQ ID NO: 752819 - RNA, 19 nt, Artificial Sequence
  Description of Artificial Sequence: Synthetic oligonucleotide
guaugugcuuacugcgauc

SEQ ID NO: 752820 - RNA, 19 nt, Artificial Sequence
  Description of Artificial Sequence: Synthetic oligonucleotide
cggcauaagagccuuacug

SEQ ID NO: 752821 - RNA, 19 nt, Artificial Sequence
  Description of Artificial Sequence: Synthetic oligonucleotide
uccccguggccacuccugc

SEQ ID NO: 752822 - RNA, 19 nt, Artificial Sequence
  Description of Artificial Sequence: Synthetic oligonucleotide
gcuuuacugacaauaaugu

SEQ ID NO: 752823 - RNA, 19 nt, Artificial Sequence
  Description of Artificial Sequence: Synthetic oligonucleotide
gcacgcuagcaucaagugc

SEQ ID NO: 752824 - RNA, 19 nt, Artificial Sequence
  Description of Artificial Sequence: Synthetic oligonucleotide
gccauucgcaucucauucc

SEQ ID NO: 752825 - RNA, 19 nt, Artificial Sequence
  Description of Artificial Sequence: Synthetic oligonucleotide
caguagcauuucacacugg

SEQ ID NO: 752826 - RNA, 19 nt, Artificial Sequence
  Description of Artificial Sequence: Synthetic oligonucleotide
agcgaugcaguaccaccau

SEQ ID NO: 752827 - RNA, 19 nt, Artificial Sequence
  Description of Artificial Sequence: Synthetic oligonucleotide
ugcuuacugcgaucaacuu

SEQ ID NO: 752828 - RNA, 19 nt, Artificial Sequence
  Description of Artificial Sequence: Synthetic oligonucleotide
uuacguuugcugggcgaca

SEQ ID NO: 752829 - RNA, 19 nt, Artificial Sequence
  Description of Artificial Sequence: Synthetic oligonucleotide
gguuugcuuauccugcgaa

SEQ ID NO: 752830 - RNA, 19 nt, Artificial Sequence
  Description of Artificial Sequence: Synthetic oligonucleotide
aucguuccaacguguugaa

SEQ ID NO: 752831 - RNA, 19 nt, Artificial Sequence
  Description of Artificial Sequence: Synthetic oligonucleotide
caggacuuucucacauguc

SEQ ID NO: 752832 - RNA, 19 nt, Artificial Sequence
  Description of Artificial Sequence: Synthetic oligonucleotide
cuggguucgcaaguaagca

SEQ ID NO: 752833 - RNA, 19 nt, Artificial Sequence
  Description of Artificial Sequence: Synthetic oligonucleotide
acuggcuaucgccuucuua

SEQ ID NO: 752834 - RNA, 19 nt, Artificial Sequence
  Description of Artificial Sequence: Synthetic oligonucleotide
cugauguuaugauacugau

SEQ ID NO: 752835 - RNA, 19 nt, Artificial Sequence
  Description of Artificial Sequence: Synthetic oligonucleotide
guuuccuugcuggcaaauc

SEQ ID NO: 752836 - RNA, 19 nt, Artificial Sequence
  Description of Artificial Sequence: Synthetic oligonucleotide
uacguuugcugggcgacau

SEQ ID NO: 752837 - RNA, 19 nt, Artificial Sequence
  Description of Artificial Sequence: Synthetic oligonucleotide
gagaucuguggcugugaaa

SEQ ID NO: 752838 - RNA, 19 nt, Artificial Sequence
  Description of Artificial Sequence: Synthetic oligonucleotide
cugggaaauucacaaacau

SEQ ID NO: 752839 - RNA, 19 nt, Artificial Sequence
  Description of Artificial Sequence: Synthetic oligonucleotide
agcugcuaagugaugcaga

SEQ ID NO: 752840 - RNA, 19 nt, Artificial Sequence
  Description of Artificial Sequence: Synthetic oligonucleotide
gccucgagugacugugugg

SEQ ID NO: 752841 - RNA, 19 nt, Artificial Sequence
  Description of Artificial Sequence: Synthetic oligonucleotide
uucucuccccucagcuagu

SEQ ID NO: 752842 - RNA, 19 nt, Artificial Sequence
  Description of Artificial Sequence: Synthetic oligonucleotide
gcuaagugaugcagacugg

SEQ ID NO: 752843 - RNA, 19 nt, Artificial Sequence
  Description of Artificial Sequence: Synthetic oligonucleotide
gccuuacugguacagggca

SEQ ID NO: 752844 - RNA, 19 nt, Artificial Sequence
  Description of Artificial Sequence: Synthetic oligonucleotide
ucucagcuuaaagcacgcu

SEQ ID NO: 752845 - RNA, 19 nt, Artificial Sequence
  Description of Artificial Sequence: Synthetic oligonucleotide
gcugggcgacauuaaauca

SEQ ID NO: 752846 - RNA, 19 nt, Artificial Sequence
  Description of Artificial Sequence: Synthetic oligonucleotide
uggcucggggcguuaggac

SEQ ID NO: 752847 - RNA, 19 nt, Artificial Sequence
  Description of Artificial Sequence: Synthetic oligonucleotide
acgcacucuugaagaagac

SEQ ID NO: 752848 - RNA, 19 nt, Artificial Sequence
  Description of Artificial Sequence: Synthetic oligonucleotide
auaguuggcgugagccuca

SEQ ID NO: 752849 - RNA, 19 nt, Artificial Sequence
  Description of Artificial Sequence: Synthetic oligonucleotide
cguggaguacagcacuugg

SEQ ID NO: 752850 - RNA, 19 nt, Artificial Sequence
  Description of Artificial Sequence: Synthetic oligonucleotide
cugaagaaguucucauacu

SEQ ID NO: 752851 - RNA, 19 nt, Artificial Sequence
  Description of Artificial Sequence: Synthetic oligonucleotide
gugaugccucgagugacug

SEQ ID NO: 752852 - RNA, 19 nt, Artificial Sequence
  Description of Artificial Sequence: Synthetic oligonucleotide
caucguggaguacagcacu

SEQ ID NO: 752853 - RNA, 19 nt, Artificial Sequence
  Description of Artificial Sequence: Synthetic oligonucleotide
ggagaguuucaaauaagcu

SEQ ID NO: 752854 - RNA, 19 nt, Artificial Sequence
  Description of Artificial Sequence: Synthetic oligonucleotide
gugcaguaugucacugcag

SEQ ID NO: 752855 - RNA, 19 nt, Artificial Sequence
  Description of Artificial Sequence: Synthetic oligonucleotide
ugacaauaaugugccgguu

SEQ ID NO: 752856 - RNA, 19 nt, Artificial Sequence
  Description of Artificial Sequence: Synthetic oligonucleotide
cgcaaacaaauaguuuucg

SEQ ID NO: 752857 - RNA, 19 nt, Artificial Sequence
  Description of Artificial Sequence: Synthetic oligonucleotide
ccuuacugguacagggcag

SEQ ID NO: 752858 - RNA, 19 nt, Artificial Sequence
  Description of Artificial Sequence: Synthetic oligonucleotide
aggacaucgcaaacaaaua

SEQ ID NO: 752859 - RNA, 19 nt, Artificial Sequence
  Description of Artificial Sequence: Synthetic oligonucleotide
auccaccugccauucgcau

SEQ ID NO: 752860 - RNA, 19 nt, Artificial Sequence
  Description of Artificial Sequence: Synthetic oligonucleotide
uggcuaucgccuucuuaua

SEQ ID NO: 752861 - RNA, 19 nt, Artificial Sequence
  Description of Artificial Sequence: Synthetic oligonucleotide
auccugcgaaucguuccuc

SEQ ID NO: 752862 - RNA, 19 nt, Artificial Sequence
  Description of Artificial Sequence: Synthetic oligonucleotide
ccccagugcaaagugacag

SEQ ID NO: 752863 - RNA, 19 nt, Artificial Sequence
  Description of Artificial Sequence: Synthetic oligonucleotide
gcuuaaagcacgcuagcau

SEQ ID NO: 752864 - RNA, 19 nt, Artificial Sequence
  Description of Artificial Sequence: Synthetic oligonucleotide
cucgagugacuguguggug

SEQ ID NO: 752865 - RNA, 19 nt, Artificial Sequence
  Description of Artificial Sequence: Synthetic oligonucleotide
uggcuguaugcugcugaug

SEQ ID NO: 752866 - RNA, 19 nt, Artificial Sequence
  Description of Artificial Sequence: Synthetic oligonucleotide
caucaugguuguuaauuau

SEQ ID NO: 752867 - RNA, 19 nt, Artificial Sequence
  Description of Artificial Sequence: Synthetic oligonucleotide
ccaacguguugaagcauug

SEQ ID NO: 752868 - RNA, 19 nt, Artificial Sequence
  Description of Artificial Sequence: Synthetic oligonucleotide
guuugcuuauccugcgaau

SEQ ID NO: 752869 - RNA, 19 nt, Artificial Sequence
  Description of Artificial Sequence: Synthetic oligonucleotide
ggguucgcaaguaagcaaa

SEQ ID NO: 752870 - RNA, 19 nt, Artificial Sequence
  Description of Artificial Sequence: Synthetic oligonucleotide
uuccaacguguugaagcau

SEQ ID NO: 752871 - RNA, 19 nt, Artificial Sequence
  Description of Artificial Sequence: Synthetic oligonucleotide
agcgggagaccuggcguuc

SEQ ID NO: 752872 - RNA, 19 nt, Artificial Sequence
  Description of Artificial Sequence: Synthetic oligonucleotide
uuacagcaaccgccccgcu

SEQ ID NO: 752873 - RNA, 19 nt, Artificial Sequence
  Description of Artificial Sequence: Synthetic oligonucleotide
cagugcugauguuaugaua

SEQ ID NO: 752874 - RNA, 19 nt, Artificial Sequence
  Description of Artificial Sequence: Synthetic oligonucleotide
augccaugucaucucuguu

SEQ ID NO: 752875 - RNA, 19 nt, Artificial Sequence
  Description of Artificial Sequence: Synthetic oligonucleotide
guacuggaacgcacucuug

SEQ ID NO: 752876 - RNA, 19 nt, Artificial Sequence
  Description of Artificial Sequence: Synthetic oligonucleotide
gcguuaggaccuuggaaga

SEQ ID NO: 752877 - RNA, 19 nt, Artificial Sequence
  Description of Artificial Sequence: Synthetic oligonucleotide
agcaaccgccccgcugugg

SEQ ID NO: 752878 - RNA, 19 nt, Artificial Sequence
  Description of Artificial Sequence: Synthetic oligonucleotide
gcugauguacuggaacgca

SEQ ID NO: 752879 - RNA, 19 nt, Artificial Sequence
  Description of Artificial Sequence: Synthetic oligonucleotide
gcaacaucucugaucguuc

SEQ ID NO: 752880 - RNA, 19 nt, Artificial Sequence
  Description of Artificial Sequence: Synthetic oligonucleotide
caucgcaaacaaauaguuu

SEQ ID NO: 752881 - RNA, 19 nt, Artificial Sequence
  Description of Artificial Sequence: Synthetic oligonucleotide
ccugcgaaucguuccucag

SEQ ID NO: 752882 - RNA, 19 nt, Artificial Sequence
  Description of Artificial Sequence: Synthetic oligonucleotide
gcuggcaaaucuuacugau

SEQ ID NO: 752883 - RNA, 19 nt, Artificial Sequence
  Description of Artificial Sequence: Synthetic oligonucleotide
uuacugcgaucaacuucua

SEQ ID NO: 752884 - RNA, 19 nt, Artificial Sequence
  Description of Artificial Sequence: Synthetic oligonucleotide
guaucuugugcaccuugau

SEQ ID NO: 752885 - RNA, 19 nt, Artificial Sequence
  Description of Artificial Sequence: Synthetic oligonucleotide
gcucucccuggccaguuug

SEQ ID NO: 752886 - RNA, 19 nt, Artificial Sequence
  Description of Artificial Sequence: Synthetic oligonucleotide
gcgaaucguuccucagugc

SEQ ID NO: 752887 - RNA, 19 nt, Artificial Sequence
  Description of Artificial Sequence: Synthetic oligonucleotide
ggaguaauuccagauggau

SEQ ID NO: 752888 - RNA, 19 nt, Artificial Sequence
  Description of Artificial Sequence: Synthetic oligonucleotide
cagaagcgaugcaguacca

SEQ ID NO: 752889 - RNA, 19 nt, Artificial Sequence
  Description of Artificial Sequence: Synthetic oligonucleotide
ccaacaacauugagaaucu

SEQ ID NO: 752890 - RNA, 19 nt, Artificial Sequence
  Description of Artificial Sequence: Synthetic oligonucleotide
guguggaucgagugacaua

SEQ ID NO: 752891 - RNA, 19 nt, Artificial Sequence
  Description of Artificial Sequence: Synthetic oligonucleotide
acgcuagcaucaagugcag

SEQ ID NO: 752892 - RNA, 19 nt, Artificial Sequence
  Description of Artificial Sequence: Synthetic oligonucleotide
cuguaaaagcucucagcuu

SEQ ID NO: 752893 - RNA, 19 nt, Artificial Sequence
  Description of Artificial Sequence: Synthetic oligonucleotide
gggcguuaggaccuuggaa

SEQ ID NO: 752894 - RNA, 19 nt, Artificial Sequence
  Description of Artificial Sequence: Synthetic oligonucleotide
gcaaccgccccgcugugga

SEQ ID NO: 752895 - RNA, 19 nt, Artificial Sequence
  Description of Artificial Sequence: Synthetic oligonucleotide
ggcccaaugccaugucauc

SEQ ID NO: 752896 - RNA, 19 nt, Artificial Sequence
  Description of Artificial Sequence: Synthetic oligonucleotide
guuugcugggcgacauuaa

SEQ ID NO: 752897 - RNA, 19 nt, Artificial Sequence
  Description of Artificial Sequence: Synthetic oligonucleotide
ccgggagaguuucaaauaa

SEQ ID NO: 752898 - RNA, 19 nt, Artificial Sequence
  Description of Artificial Sequence: Synthetic oligonucleotide
ggcaaucgaacaucauggu

SEQ ID NO: 752899 - RNA, 19 nt, Artificial Sequence
  Description of Artificial Sequence: Synthetic oligonucleotide
ccuggcguuccauggccag

SEQ ID NO: 752900 - RNA, 19 nt, Artificial Sequence
  Description of Artificial Sequence: Synthetic oligonucleotide
cgcacucuugaagaagacc

SEQ ID NO: 752901 - RNA, 19 nt, Artificial Sequence
  Description of Artificial Sequence: Synthetic oligonucleotide
cugcgaaucguuccucagu

SEQ ID NO: 752902 - RNA, 19 nt, Artificial Sequence
  Description of Artificial Sequence: Synthetic oligonucleotide
cuggcucggggcguuagga

SEQ ID NO: 752903 - RNA, 19 nt, Artificial Sequence
  Description of Artificial Sequence: Synthetic oligonucleotide
caguacggcauaagagccu

SEQ ID NO: 752904 - RNA, 19 nt, Artificial Sequence
  Description of Artificial Sequence: Synthetic oligonucleotide
gcaaucgaacaucaugguu

SEQ ID NO: 752905 - RNA, 19 nt, Artificial Sequence
  Description of Artificial Sequence: Synthetic oligonucleotide
aucgagugacauaguugau

SEQ ID NO: 752906 - RNA, 19 nt, Artificial Sequence
  Description of Artificial Sequence: Synthetic oligonucleotide
gcgugagccucacugucga

SEQ ID NO: 752907 - RNA, 19 nt, Artificial Sequence
  Description of Artificial Sequence: Synthetic oligonucleotide
caauaaugugccgguuucu

SEQ ID NO: 752908 - RNA, 19 nt, Artificial Sequence
  Description of Artificial Sequence: Synthetic oligonucleotide
uaguaccauguagcacauc

SEQ ID NO: 752909 - RNA, 19 nt, Artificial Sequence
  Description of Artificial Sequence: Synthetic oligonucleotide
ggggcguuaggaccuugga

SEQ ID NO: 752910 - RNA, 19 nt, Artificial Sequence
  Description of Artificial Sequence: Synthetic oligonucleotide
gacccugguagaugaucau

SEQ ID NO: 752911 - RNA, 19 nt, Artificial Sequence
  Description of Artificial Sequence: Synthetic oligonucleotide
gggcuggucugggaaauuc

SEQ ID NO: 752912 - RNA, 19 nt, Artificial Sequence
  Description of Artificial Sequence: Synthetic oligonucleotide
cuuccuggguucgcaagua

SEQ ID NO: 752913 - RNA, 19 nt, Artificial Sequence
  Description of Artificial Sequence: Synthetic oligonucleotide
ccaacuguguggaucgagu

SEQ ID NO: 752914 - RNA, 19 nt, Artificial Sequence
  Description of Artificial Sequence: Synthetic oligonucleotide
gcuaucgccuucuuauauu

SEQ ID NO: 752915 - RNA, 19 nt, Artificial Sequence
  Description of Artificial Sequence: Synthetic oligonucleotide
accuggcguuccauggcca

SEQ ID NO: 752916 - RNA, 19 nt, Artificial Sequence
  Description of Artificial Sequence: Synthetic oligonucleotide
cugaucguuccaacguguu

SEQ ID NO: 752917 - RNA, 19 nt, Artificial Sequence
  Description of Artificial Sequence: Synthetic oligonucleotide
cacugucucagggaagcgu

SEQ ID NO: 752918 - RNA, 19 nt, Artificial Sequence
  Description of Artificial Sequence: Synthetic oligonucleotide
guaguaccauguagcacau

SEQ ID NO: 752919 - RNA, 19 nt, Artificial Sequence
  Description of Artificial Sequence: Synthetic oligonucleotide
gcccgggagaguuucaaau

SEQ ID NO: 752920 - RNA, 19 nt, Artificial Sequence
  Description of Artificial Sequence: Synthetic oligonucleotide
ccuggcucggggcguuagg

SEQ ID NO: 752921 - RNA, 19 nt, Artificial Sequence
  Description of Artificial Sequence: Synthetic oligonucleotide
ucggggcguuaggaccuug

SEQ ID NO: 752922 - RNA, 19 nt, Artificial Sequence
  Description of Artificial Sequence: Synthetic oligonucleotide
augccucgagugacugugu

SEQ ID NO: 752923 - RNA, 19 nt, Artificial Sequence
  Description of Artificial Sequence: Synthetic oligonucleotide
caacguguugaagcauugu

SEQ ID NO: 752924 - RNA, 19 nt, Artificial Sequence
  Description of Artificial Sequence: Synthetic oligonucleotide
cggggcguuaggaccuugg

SEQ ID NO: 752925 - RNA, 19 nt, Artificial Sequence
  Description of Artificial Sequence: Synthetic oligonucleotide
gucagucuuccaagccaaa

SEQ ID NO: 752926 - RNA, 19 nt, Artificial Sequence
  Description of Artificial Sequence: Synthetic oligonucleotide
cccgggagaguuucaaaua

SEQ ID NO: 752927 - RNA, 19 nt, Artificial Sequence
  Description of Artificial Sequence: Synthetic oligonucleotide
cagcaaccgccccgcugug

SEQ ID NO: 752928 - RNA, 19 nt, Artificial Sequence
  Description of Artificial Sequence: Synthetic oligonucleotide
ccagugcaaagugacaggu

SEQ ID NO: 752929 - RNA, 19 nt, Artificial Sequence
  Description of Artificial Sequence: Synthetic oligonucleotide
ccuuuauccaccugccauu

SEQ ID NO: 752930 - RNA, 19 nt, Artificial Sequence
  Description of Artificial Sequence: Synthetic oligonucleotide
ggugaugccucgagugacu

SEQ ID NO: 752931 - RNA, 19 nt, Artificial Sequence
  Description of Artificial Sequence: Synthetic oligonucleotide
guaccaccaucagguucuc

SEQ ID NO: 752932 - RNA, 19 nt, Artificial Sequence
  Description of Artificial Sequence: Synthetic oligonucleotide
gacccggcccgggagaguu

SEQ ID NO: 752933 - RNA, 19 nt, Artificial Sequence
  Description of Artificial Sequence: Synthetic oligonucleotide
gguucgcaaguaagcaaau

SEQ ID NO: 752934 - RNA, 19 nt, Artificial Sequence
  Description of Artificial Sequence: Synthetic oligonucleotide
ccgcuguggaaguccucuc

SEQ ID NO: 752935 - RNA, 19 nt, Artificial Sequence
  Description of Artificial Sequence: Synthetic oligonucleotide
guggaucgagugacauagu

SEQ ID NO: 752936 - RNA, 19 nt, Artificial Sequence
  Description of Artificial Sequence: Synthetic oligonucleotide
guacggcauaagagccuua

SEQ ID NO: 752937 - RNA, 19 nt, Artificial Sequence
  Description of Artificial Sequence: Synthetic oligonucleotide
gucuacaaucugggaugau

SEQ ID NO: 752938 - RNA, 19 nt, Artificial Sequence
  Description of Artificial Sequence: Synthetic oligonucleotide
cccaugguugaaccacugu

SEQ ID NO: 752939 - RNA, 19 nt, Artificial Sequence
  Description of Artificial Sequence: Synthetic oligonucleotide
cccgcuguggaaguccucu

SEQ ID NO: 752940 - RNA, 19 nt, Artificial Sequence
  Description of Artificial Sequence: Synthetic oligonucleotide
cgccccgcuguggaagucc

SEQ ID NO: 752941 - RNA, 19 nt, Artificial Sequence
  Description of Artificial Sequence: Synthetic oligonucleotide
cucuccccucagcuaguuu

SEQ ID NO: 752942 - RNA, 19 nt, Artificial Sequence
  Description of Artificial Sequence: Synthetic oligonucleotide
gccuugguuugggaguaau

SEQ ID NO: 752943 - RNA, 19 nt, Artificial Sequence
  Description of Artificial Sequence: Synthetic oligonucleotide
gaccuggcucggggcguua

SEQ ID NO: 752944 - RNA, 19 nt, Artificial Sequence
  Description of Artificial Sequence: Synthetic oligonucleotide
ccccuguccugagaucugu

SEQ ID NO: 752945 - RNA, 19 nt, Artificial Sequence
  Description of Artificial Sequence: Synthetic oligonucleotide
ccggcccgggagaguuuca

SEQ ID NO: 752946 - RNA, 19 nt, Artificial Sequence
  Description of Artificial Sequence: Synthetic oligonucleotide
cccauccuguauggguagu

SEQ ID NO: 752947 - RNA, 19 nt, Artificial Sequence
  Description of Artificial Sequence: Synthetic oligonucleotide
ccccguggccacuccugcu

SEQ ID NO: 752948 - RNA, 19 nt, Artificial Sequence
  Description of Artificial Sequence: Synthetic oligonucleotide
ggacccggcccgggagagu

SEQ ID NO: 752949 - RNA, 19 nt, Artificial Sequence
  Description of Artificial Sequence: Synthetic oligonucleotide
aauaaaggauuccugagag

SEQ ID NO: 752950 - RNA, 19 nt, Artificial Sequence
  Description of Artificial Sequence: Synthetic oligonucleotide
aaucauuaguguuggauuc

SEQ ID NO: 752951 - RNA, 19 nt, Artificial Sequence
  Description of Artificial Sequence: Synthetic oligonucleotide
aaauaaguguuaaacuucc

SEQ ID NO: 752952 - RNA, 19 nt, Artificial Sequence
  Description of Artificial Sequence: Synthetic oligonucleotide
aaugccaugccaugcgugc

SEQ ID NO: 752953 - RNA, 19 nt, Artificial Sequence
  Description of Artificial Sequence: Synthetic oligonucleotide
aagaauaaaggauuccuga

SEQ ID NO: 752954 - RNA, 19 nt, Artificial Sequence
  Description of Artificial Sequence: Synthetic oligonucleotide
gaccuugcaagucagaggg

SEQ ID NO: 752955 - RNA, 19 nt, Artificial Sequence
  Description of Artificial Sequence: Synthetic oligonucleotide
uuugacaggacucaucccc

SEQ ID NO: 752956 - RNA, 19 nt, Artificial Sequence
  Description of Artificial Sequence: Synthetic oligonucleotide
aggaagauuccucaguagc

SEQ ID NO: 752957 - RNA, 19 nt, Artificial Sequence
  Description of Artificial Sequence: Synthetic oligonucleotide
aacuggcuaauccuaggcc

SEQ ID NO: 752958 - RNA, 19 nt, Artificial Sequence
  Description of Artificial Sequence: Synthetic oligonucleotide
auaaucaucgcgcucagga

SEQ ID NO: 752959 - RNA, 19 nt, Artificial Sequence
  Description of Artificial Sequence: Synthetic oligonucleotide
uccuauaucgaagaggacc

SEQ ID NO: 752960 - RNA, 19 nt, Artificial Sequence
  Description of Artificial Sequence: Synthetic oligonucleotide
acuuaaguaggacccaggg

SEQ ID NO: 752961 - RNA, 19 nt, Artificial Sequence
  Description of Artificial Sequence: Synthetic oligonucleotide
cuugauucccucaugguug

SEQ ID NO: 752962 - RNA, 19 nt, Artificial Sequence
  Description of Artificial Sequence: Synthetic oligonucleotide
gaagcaaucauuaguguug

SEQ ID NO: 752963 - RNA, 19 nt, Artificial Sequence
  Description of Artificial Sequence: Synthetic oligonucleotide
aaugugagcacugcaugac

SEQ ID NO: 752964 - RNA, 19 nt, Artificial Sequence
  Description of Artificial Sequence: Synthetic oligonucleotide
aaggagaacccacuuaagu

SEQ ID NO: 752965 - RNA, 19 nt, Artificial Sequence
  Description of Artificial Sequence: Synthetic oligonucleotide
ggggauuaaaccuacaagc

SEQ ID NO: 752966 - RNA, 19 nt, Artificial Sequence
  Description of Artificial Sequence: Synthetic oligonucleotide
uggggauuaaaccuacaag

SEQ ID NO: 752967 - RNA, 19 nt, Artificial Sequence
  Description of Artificial Sequence: Synthetic oligonucleotide
aaaggagcgguugugagug

SEQ ID NO: 752968 - RNA, 19 nt, Artificial Sequence
  Description of Artificial Sequence: Synthetic oligonucleotide
ucaugguugacccucacau

SEQ ID NO: 752969 - RNA, 19 nt, Artificial Sequence
  Description of Artificial Sequence: Synthetic oligonucleotide
uucuuguggcuaaugaacc

SEQ ID NO: 752970 - RNA, 19 nt, Artificial Sequence
  Description of Artificial Sequence: Synthetic oligonucleotide
aaaugugagcacugcauga

SEQ ID NO: 752971 - RNA, 19 nt, Artificial Sequence
  Description of Artificial Sequence: Synthetic oligonucleotide
cuggucaagggcuacaggc

SEQ ID NO: 752972 - RNA, 19 nt, Artificial Sequence
  Description of Artificial Sequence: Synthetic oligonucleotide
aauaaguguuaaacuuccc

SEQ ID NO: 752973 - RNA, 19 nt, Artificial Sequence
  Description of Artificial Sequence: Synthetic oligonucleotide
ugugagugaaaacuguguc

SEQ ID NO: 752974 - RNA, 19 nt, Artificial Sequence
  Description of Artificial Sequence: Synthetic oligonucleotide
ugaaaacugugucacacau

SEQ ID NO: 752975 - RNA, 19 nt, Artificial Sequence
  Description of Artificial Sequence: Synthetic oligonucleotide
aauacuaggccagaaccca

SEQ ID NO: 752976 - RNA, 19 nt, Artificial Sequence
  Description of Artificial Sequence: Synthetic oligonucleotide
ugagugaaaacugugucac

SEQ ID NO: 752977 - RNA, 19 nt, Artificial Sequence
  Description of Artificial Sequence: Synthetic oligonucleotide
uauagaucagguugggagu

SEQ ID NO: 752978 - RNA, 19 nt, Artificial Sequence
  Description of Artificial Sequence: Synthetic oligonucleotide
ucuuguggcuaaugaaccg

SEQ ID NO: 752979 - RNA, 19 nt, Artificial Sequence
  Description of Artificial Sequence: Synthetic oligonucleotide
cacuagaauccucaaaagc

SEQ ID NO: 752980 - RNA, 19 nt, Artificial Sequence
  Description of Artificial Sequence: Synthetic oligonucleotide
aagcaaucauuaguguugg

SEQ ID NO: 752981 - RNA, 19 nt, Artificial Sequence
  Description of Artificial Sequence: Synthetic oligonucleotide
aaucaucgcgcucaggaaa

SEQ ID NO: 752982 - RNA, 19 nt, Artificial Sequence
  Description of Artificial Sequence: Synthetic oligonucleotide
cuucaugugagccacauaa

SEQ ID NO: 752983 - RNA, 19 nt, Artificial Sequence
  Description of Artificial Sequence: Synthetic oligonucleotide
ugcgcuuucccucugugca

SEQ ID NO: 752984 - RNA, 19 nt, Artificial Sequence
  Description of Artificial Sequence: Synthetic oligonucleotide
uaauccuaggccugggacc

SEQ ID NO: 752985 - RNA, 19 nt, Artificial Sequence
  Description of Artificial Sequence: Synthetic oligonucleotide
gucacuagaauccucaaaa

SEQ ID NO: 752986 - RNA, 19 nt, Artificial Sequence
  Description of Artificial Sequence: Synthetic oligonucleotide
ucacuagaauccucaaaag

SEQ ID NO: 752987 - RNA, 19 nt, Artificial Sequence
  Description of Artificial Sequence: Synthetic oligonucleotide
acuacaagaauaaaggauu

SEQ ID NO: 752988 - RNA, 19 nt, Artificial Sequence
  Description of Artificial Sequence: Synthetic oligonucleotide
aucagacgacuacugaagg

SEQ ID NO: 752989 - RNA, 19 nt, Artificial Sequence
  Description of Artificial Sequence: Synthetic oligonucleotide
acccacuuaaguaggaccc

SEQ ID NO: 752990 - RNA, 19 nt, Artificial Sequence
  Description of Artificial Sequence: Synthetic oligonucleotide
uugugagugaaaacugugu

SEQ ID NO: 752991 - RNA, 19 nt, Artificial Sequence
  Description of Artificial Sequence: Synthetic oligonucleotide
agggcuacaggccucauga

SEQ ID NO: 752992 - RNA, 19 nt, Artificial Sequence
  Description of Artificial Sequence: Synthetic oligonucleotide
ugcuccuauaucgaagagg

SEQ ID NO: 752993 - RNA, 19 nt, Artificial Sequence
  Description of Artificial Sequence: Synthetic oligonucleotide
acuggcuaauccuaggccu

SEQ ID NO: 752994 - RNA, 19 nt, Artificial Sequence
  Description of Artificial Sequence: Synthetic oligonucleotide
cucacuguuaguauuauua

SEQ ID NO: 752995 - RNA, 19 nt, Artificial Sequence
  Description of Artificial Sequence: Synthetic oligonucleotide
auucagagggcuaucacag

SEQ ID NO: 752996 - RNA, 19 nt, Artificial Sequence
  Description of Artificial Sequence: Synthetic oligonucleotide
agauucagagggcuaucac

SEQ ID NO: 752997 - RNA, 19 nt, Artificial Sequence
  Description of Artificial Sequence: Synthetic oligonucleotide
aaagacgcugacacgcugg

SEQ ID NO: 752998 - RNA, 19 nt, Artificial Sequence
  Description of Artificial Sequence: Synthetic oligonucleotide
ccuauaucgaagaggaccg

SEQ ID NO: 752999 - RNA, 19 nt, Artificial Sequence
  Description of Artificial Sequence: Synthetic oligonucleotide
gaacuggcuaauccuaggc

SEQ ID NO: 753000 - RNA, 19 nt, Artificial Sequence
  Description of Artificial Sequence: Synthetic oligonucleotide
ggauuaaaccuacaagcag

SEQ ID NO: 753001 - RNA, 19 nt, Artificial Sequence
  Description of Artificial Sequence: Synthetic oligonucleotide
ugccaaugaguguuagagg

SEQ ID NO: 753002 - RNA, 19 nt, Artificial Sequence
  Description of Artificial Sequence: Synthetic oligonucleotide
gaggagggaauacuaggcc

SEQ ID NO: 753003 - RNA, 19 nt, Artificial Sequence
  Description of Artificial Sequence: Synthetic oligonucleotide
uaucgaagaggaccguggc

SEQ ID NO: 753004 - RNA, 19 nt, Artificial Sequence
  Description of Artificial Sequence: Synthetic oligonucleotide
cuguuaguauuauuacuac

SEQ ID NO: 753005 - RNA, 19 nt, Artificial Sequence
  Description of Artificial Sequence: Synthetic oligonucleotide
gagccacauaaucaucgcg

SEQ ID NO: 753006 - RNA, 19 nt, Artificial Sequence
  Description of Artificial Sequence: Synthetic oligonucleotide
accuaguuguccccacugc

SEQ ID NO: 753007 - RNA, 19 nt, Artificial Sequence
  Description of Artificial Sequence: Synthetic oligonucleotide
  modified_base (2)..(2): a, c, u, g, unknown or other
cnccccuugccaaacaggc

SEQ ID NO: 753008 - RNA, 19 nt, Artificial Sequence
  Description of Artificial Sequence: Synthetic oligonucleotide
cucacauggcgucucaggc

SEQ ID NO: 753009 - RNA, 19 nt, Artificial Sequence
  Description of Artificial Sequence: Synthetic oligonucleotide
cuuguggcuaaugaaccgg

SEQ ID NO: 753010 - RNA, 19 nt, Artificial Sequence
  Description of Artificial Sequence: Synthetic oligonucleotide
ugugagcacugcaugacaa

SEQ ID NO: 753011 - RNA, 19 nt, Artificial Sequence
  Description of Artificial Sequence: Synthetic oligonucleotide
gacacuuaaagacgcugac

SEQ ID NO: 753012 - RNA, 19 nt, Artificial Sequence
  Description of Artificial Sequence: Synthetic oligonucleotide
auaucgaagaggaccgugg

SEQ ID NO: 753013 - RNA, 19 nt, Artificial Sequence
  Description of Artificial Sequence: Synthetic oligonucleotide
gauuaaaccuacaagcagu

SEQ ID NO: 753014 - RNA, 19 nt, Artificial Sequence
  Description of Artificial Sequence: Synthetic oligonucleotide
ugaccaaaugugagcacug

SEQ ID NO: 753015 - RNA, 19 nt, Artificial Sequence
  Description of Artificial Sequence: Synthetic oligonucleotide
uccaggaucagacgacuac

SEQ ID NO: 753016 - RNA, 19 nt, Artificial Sequence
  Description of Artificial Sequence: Synthetic oligonucleotide
aauccuaggccugggaccu

SEQ ID NO: 753017 - RNA, 19 nt, Artificial Sequence
  Description of Artificial Sequence: Synthetic oligonucleotide
uauaucgaagaggaccgug

SEQ ID NO: 753018 - RNA, 19 nt, Artificial Sequence
  Description of Artificial Sequence: Synthetic oligonucleotide
ucauuaguguuggauucag

SEQ ID NO: 753019 - RNA, 19 nt, Artificial Sequence
  Description of Artificial Sequence: Synthetic oligonucleotide
acugaugagugcucuugag

SEQ ID NO: 753020 - RNA, 19 nt, Artificial Sequence
  Description of Artificial Sequence: Synthetic oligonucleotide
uaaagacgcugacacgcug

SEQ ID NO: 753021 - RNA, 19 nt, Artificial Sequence
  Description of Artificial Sequence: Synthetic oligonucleotide
aagacccuuguccuucgug

SEQ ID NO: 753022 - RNA, 19 nt, Artificial Sequence
  Description of Artificial Sequence: Synthetic oligonucleotide
uguuagaggagggaauacu

SEQ ID NO: 753023 - RNA, 19 nt, Artificial Sequence
  Description of Artificial Sequence: Synthetic oligonucleotide
uaaugguagaggaggugac

SEQ ID NO: 753024 - RNA, 19 nt, Artificial Sequence
  Description of Artificial Sequence: Synthetic oligonucleotide
aggagggaauacuaggcca

SEQ ID NO: 753025 - RNA, 19 nt, Artificial Sequence
  Description of Artificial Sequence: Synthetic oligonucleotide
agcguaacggaggagcuuc

SEQ ID NO: 753026 - RNA, 19 nt, Artificial Sequence
  Description of Artificial Sequence: Synthetic oligonucleotide
aaugggucuugagauucag

SEQ ID NO: 753027 - RNA, 19 nt, Artificial Sequence
  Description of Artificial Sequence: Synthetic oligonucleotide
cuaaugaaccgguggcggc

SEQ ID NO: 753028 - RNA, 19 nt, Artificial Sequence
  Description of Artificial Sequence: Synthetic oligonucleotide
ugucgggcccugaugaaug

SEQ ID NO: 753029 - RNA, 19 nt, Artificial Sequence
  Description of Artificial Sequence: Synthetic oligonucleotide
aagaaaggagcgguuguga

SEQ ID NO: 753030 - RNA, 19 nt, Artificial Sequence
  Description of Artificial Sequence: Synthetic oligonucleotide
ucucucacuguuaguauua

SEQ ID NO: 753031 - RNA, 19 nt, Artificial Sequence
  Description of Artificial Sequence: Synthetic oligonucleotide
agauuccucaguagcaggg

SEQ ID NO: 753032 - RNA, 19 nt, Artificial Sequence
  Description of Artificial Sequence: Synthetic oligonucleotide
caugagucagaagacuggc

SEQ ID NO: 753033 - RNA, 19 nt, Artificial Sequence
  Description of Artificial Sequence: Synthetic oligonucleotide
aggaccguggccuccugac

SEQ ID NO: 753034 - RNA, 19 nt, Artificial Sequence
  Description of Artificial Sequence: Synthetic oligonucleotide
ucagacgacuacugaaggu

SEQ ID NO: 753035 - RNA, 19 nt, Artificial Sequence
  Description of Artificial Sequence: Synthetic oligonucleotide
cuguaguaaugguagagga

SEQ ID NO: 753036 - RNA, 19 nt, Artificial Sequence
  Description of Artificial Sequence: Synthetic oligonucleotide
uugacaggacucaucccca

SEQ ID NO: 753037 - RNA, 19 nt, Artificial Sequence
  Description of Artificial Sequence: Synthetic oligonucleotide
uggguaaacucucuugauu

SEQ ID NO: 753038 - RNA, 19 nt, Artificial Sequence
  Description of Artificial Sequence: Synthetic oligonucleotide
agcgguugugagugaaaac

SEQ ID NO: 753039 - RNA, 19 nt, Artificial Sequence
  Description of Artificial Sequence: Synthetic oligonucleotide
cagagcguaacggaggagc

SEQ ID NO: 753040 - RNA, 19 nt, Artificial Sequence
  Description of Artificial Sequence: Synthetic oligonucleotide
cagacgacuacugaaggug

SEQ ID NO: 753041 - RNA, 19 nt, Artificial Sequence
  Description of Artificial Sequence: Synthetic oligonucleotide
gccaaugaguguuagagga

SEQ ID NO: 753042 - RNA, 19 nt, Artificial Sequence
  Description of Artificial Sequence: Synthetic oligonucleotide
guaaugguagaggagguga

SEQ ID NO: 753043 - RNA, 19 nt, Artificial Sequence
  Description of Artificial Sequence: Synthetic oligonucleotide
agacgacuacugaaggugc

SEQ ID NO: 753044 - RNA, 19 nt, Artificial Sequence
  Description of Artificial Sequence: Synthetic oligonucleotide
aaugguagaggaggugaca

SEQ ID NO: 753045 - RNA, 19 nt, Artificial Sequence
  Description of Artificial Sequence: Synthetic oligonucleotide
aaccgguggcggcucaagg

SEQ ID NO: 753046 - RNA, 19 nt, Artificial Sequence
  Description of Artificial Sequence: Synthetic oligonucleotide
caccccuagauuucugggg

SEQ ID NO: 753047 - RNA, 19 nt, Artificial Sequence
  Description of Artificial Sequence: Synthetic oligonucleotide
gucggggucguuugguugg

SEQ ID NO: 753048 - RNA, 19 nt, Artificial Sequence
  Description of Artificial Sequence: Synthetic oligonucleotide
auagaucagguugggagug

SEQ ID NO: 753049 - RNA, 19 nt, Artificial Sequence
  Description of Artificial Sequence: Synthetic oligonucleotide
aaacugugucacacauggc

SEQ ID NO: 753050 - RNA, 19 nt, Artificial Sequence
  Description of Artificial Sequence: Synthetic oligonucleotide
cucugcccgagacacagcc

SEQ ID NO: 753051 - RNA, 19 nt, Artificial Sequence
  Description of Artificial Sequence: Synthetic oligonucleotide
acgacuacugaaggugcgc

SEQ ID NO: 753052 - RNA, 19 nt, Artificial Sequence
  Description of Artificial Sequence: Synthetic oligonucleotide
uguggcuaaugaaccggug

SEQ ID NO: 753053 - RNA, 19 nt, Artificial Sequence
  Description of Artificial Sequence: Synthetic oligonucleotide
aaugaaccgguggcggcuc

SEQ ID NO: 753054 - RNA, 19 nt, Artificial Sequence
  Description of Artificial Sequence: Synthetic oligonucleotide
gucgaagugugaagaaagg

SEQ ID NO: 753055 - RNA, 19 nt, Artificial Sequence
  Description of Artificial Sequence: Synthetic oligonucleotide
gaccuaguuguccccacug

SEQ ID NO: 753056 - RNA, 19 nt, Artificial Sequence
  Description of Artificial Sequence: Synthetic oligonucleotide
cgaagugugaagaaaggag

SEQ ID NO: 753057 - RNA, 19 nt, Artificial Sequence
  Description of Artificial Sequence: Synthetic oligonucleotide
uugauucccucaugguuga

SEQ ID NO: 753058 - RNA, 19 nt, Artificial Sequence
  Description of Artificial Sequence: Synthetic oligonucleotide
aucaucgcgcucaggaaac

SEQ ID NO: 753059 - RNA, 19 nt, Artificial Sequence
  Description of Artificial Sequence: Synthetic oligonucleotide
uuguggcuaaugaaccggu

SEQ ID NO: 753060 - RNA, 19 nt, Artificial Sequence
  Description of Artificial Sequence: Synthetic oligonucleotide
  modified_base (16)..(16): a, c, u, g, unknown or other
ggaggugacagccccnccc

SEQ ID NO: 753061 - RNA, 19 nt, Artificial Sequence
  Description of Artificial Sequence: Synthetic oligonucleotide
ggucgaagugugaagaaag

SEQ ID NO: 753062 - RNA, 19 nt, Artificial Sequence
  Description of Artificial Sequence: Synthetic oligonucleotide
agcccagggaguugacagc

SEQ ID NO: 753063 - RNA, 19 nt, Artificial Sequence
  Description of Artificial Sequence: Synthetic oligonucleotide
uugagauucagagggcuau

SEQ ID NO: 753064 - RNA, 19 nt, Artificial Sequence
  Description of Artificial Sequence: Synthetic oligonucleotide
uaaucaucgcgcucaggaa

SEQ ID NO: 753065 - RNA, 19 nt, Artificial Sequence
  Description of Artificial Sequence: Synthetic oligonucleotide
cacugcuccuauaucgaag

SEQ ID NO: 753066 - RNA, 19 nt, Artificial Sequence
  Description of Artificial Sequence: Synthetic oligonucleotide
augccggacuuggacaugc

SEQ ID NO: 753067 - RNA, 19 nt, Artificial Sequence
  Description of Artificial Sequence: Synthetic oligonucleotide
cugggucagagcguaacgg

SEQ ID NO: 753068 - RNA, 19 nt, Artificial Sequence
  Description of Artificial Sequence: Synthetic oligonucleotide
ugugaagaaaggagcgguu

SEQ ID NO: 753069 - RNA, 19 nt, Artificial Sequence
  Description of Artificial Sequence: Synthetic oligonucleotide
gacgacuacugaaggugcg

SEQ ID NO: 753070 - RNA, 19 nt, Artificial Sequence
  Description of Artificial Sequence: Synthetic oligonucleotide
uccuucgugcucacgggca

SEQ ID NO: 753071 - RNA, 19 nt, Artificial Sequence
  Description of Artificial Sequence: Synthetic oligonucleotide
ggaacgcucacacaggcga

SEQ ID NO: 753072 - RNA, 19 nt, Artificial Sequence
  Description of Artificial Sequence: Synthetic oligonucleotide
ugguugacccucacauggc

SEQ ID NO: 753073 - RNA, 19 nt, Artificial Sequence
  Description of Artificial Sequence: Synthetic oligonucleotide
uucaugugagccacauaau

SEQ ID NO: 753074 - RNA, 19 nt, Artificial Sequence
  Description of Artificial Sequence: Synthetic oligonucleotide
aggccucaugaccaaaugu

SEQ ID NO: 753075 - RNA, 19 nt, Artificial Sequence
  Description of Artificial Sequence: Synthetic oligonucleotide
caggaucagacgacuacug

SEQ ID NO: 753076 - RNA, 19 nt, Artificial Sequence
  Description of Artificial Sequence: Synthetic oligonucleotide
uugacccucacauggcguc

SEQ ID NO: 753077 - RNA, 19 nt, Artificial Sequence
  Description of Artificial Sequence: Synthetic oligonucleotide
uaaugaaccgguggcggcu

SEQ ID NO: 753078 - RNA, 19 nt, Artificial Sequence
  Description of Artificial Sequence: Synthetic oligonucleotide
gguugacccucacauggcg

SEQ ID NO: 753079 - RNA, 19 nt, Artificial Sequence
  Description of Artificial Sequence: Synthetic oligonucleotide
gcuaaugaaccgguggcgg

SEQ ID NO: 753080 - RNA, 19 nt, Artificial Sequence
  Description of Artificial Sequence: Synthetic oligonucleotide
gaauccucaaaagccuuuc

SEQ ID NO: 753081 - RNA, 19 nt, Artificial Sequence
  Description of Artificial Sequence: Synthetic oligonucleotide
cacgcuggggcaacaagug

SEQ ID NO: 753082 - RNA, 19 nt, Artificial Sequence
  Description of Artificial Sequence: Synthetic oligonucleotide
cuggcuaauccuaggccug

SEQ ID NO: 753083 - RNA, 19 nt, Artificial Sequence
  Description of Artificial Sequence: Synthetic oligonucleotide
uucagagggcuaucacagc

SEQ ID NO: 753084 - RNA, 19 nt, Artificial Sequence
  Description of Artificial Sequence: Synthetic oligonucleotide
guaacggaggagcuucuuc

SEQ ID NO: 753085 - RNA, 19 nt, Artificial Sequence
  Description of Artificial Sequence: Synthetic oligonucleotide
gauuggggcgggguguuag

SEQ ID NO: 753086 - RNA, 19 nt, Artificial Sequence
  Description of Artificial Sequence: Synthetic oligonucleotide
aguguuagaggagggaaua

SEQ ID NO: 753087 - RNA, 19 nt, Artificial Sequence
  Description of Artificial Sequence: Synthetic oligonucleotide
gaaugccaugccaugcgug

SEQ ID NO: 753088 - RNA, 19 nt, Artificial Sequence
  Description of Artificial Sequence: Synthetic oligonucleotide
aucauuaguguuggauuca

SEQ ID NO: 753089 - RNA, 19 nt, Artificial Sequence
  Description of Artificial Sequence: Synthetic oligonucleotide
gacugaugagugcucuuga

SEQ ID NO: 753090 - RNA, 19 nt, Artificial Sequence
  Description of Artificial Sequence: Synthetic oligonucleotide
agugccaaugaguguuaga

SEQ ID NO: 753091 - RNA, 19 nt, Artificial Sequence
  Description of Artificial Sequence: Synthetic oligonucleotide
auggguaaacucucuugau

SEQ ID NO: 753092 - RNA, 19 nt, Artificial Sequence
  Description of Artificial Sequence: Synthetic oligonucleotide
ggcuacaggccucaugacc

SEQ ID NO: 753093 - RNA, 19 nt, Artificial Sequence
  Description of Artificial Sequence: Synthetic oligonucleotide
ggcacacuuauagaucagg

SEQ ID NO: 753094 - RNA, 19 nt, Artificial Sequence
  Description of Artificial Sequence: Synthetic oligonucleotide
uggcuaauccuaggccugg

SEQ ID NO: 753095 - RNA, 19 nt, Artificial Sequence
  Description of Artificial Sequence: Synthetic oligonucleotide
aacggaggagcuucuucuu

SEQ ID NO: 753096 - RNA, 19 nt, Artificial Sequence
  Description of Artificial Sequence: Synthetic oligonucleotide
  modified_base (17)..(17): a, c, u, g, unknown or other
aggaggugacagccccncc

SEQ ID NO: 753097 - RNA, 19 nt, Artificial Sequence
  Description of Artificial Sequence: Synthetic oligonucleotide
uggaccccauuugacagga

SEQ ID NO: 753098 - RNA, 19 nt, Artificial Sequence
  Description of Artificial Sequence: Synthetic oligonucleotide
acaggcaaggccagagguc

SEQ ID NO: 753099 - RNA, 19 nt, Artificial Sequence
  Description of Artificial Sequence: Synthetic oligonucleotide
ccucaugaccaaaugugag

SEQ ID NO: 753100 - RNA, 19 nt, Artificial Sequence
  Description of Artificial Sequence: Synthetic oligonucleotide
gagauucagagggcuauca

SEQ ID NO: 753101 - RNA, 19 nt, Artificial Sequence
  Description of Artificial Sequence: Synthetic oligonucleotide
acccuuguccuucgugcuc

SEQ ID NO: 753102 - RNA, 19 nt, Artificial Sequence
  Description of Artificial Sequence: Synthetic oligonucleotide
uucgugcucacgggcaugc

SEQ ID NO: 753103 - RNA, 19 nt, Artificial Sequence
  Description of Artificial Sequence: Synthetic oligonucleotide
gggauuaaaccuacaagca

SEQ ID NO: 753104 - RNA, 19 nt, Artificial Sequence
  Description of Artificial Sequence: Synthetic oligonucleotide
uuagugccaaugaguguua

SEQ ID NO: 753105 - RNA, 19 nt, Artificial Sequence
  Description of Artificial Sequence: Synthetic oligonucleotide
accuacaagcaguuuuaau

SEQ ID NO: 753106 - RNA, 19 nt, Artificial Sequence
  Description of Artificial Sequence: Synthetic oligonucleotide
ggguguuagugccaaugag

SEQ ID NO: 753107 - RNA, 19 nt, Artificial Sequence
  Description of Artificial Sequence: Synthetic oligonucleotide
gaacccacuuaaguaggac

SEQ ID NO: 753108 - RNA, 19 nt, Artificial Sequence
  Description of Artificial Sequence: Synthetic oligonucleotide
auaccugcauggguaaacu

SEQ ID NO: 753109 - RNA, 19 nt, Artificial Sequence
  Description of Artificial Sequence: Synthetic oligonucleotide
aaaugggucuugagauuca

SEQ ID NO: 753110 - RNA, 19 nt, Artificial Sequence
  Description of Artificial Sequence: Synthetic oligonucleotide
ggucagagcguaacggagg

SEQ ID NO: 753111 - RNA, 19 nt, Artificial Sequence
  Description of Artificial Sequence: Synthetic oligonucleotide
caaucauuaguguuggauu

SEQ ID NO: 753112 - RNA, 19 nt, Artificial Sequence
  Description of Artificial Sequence: Synthetic oligonucleotide
ggagggaauacuaggccag

SEQ ID NO: 753113 - RNA, 19 nt, Artificial Sequence
  Description of Artificial Sequence: Synthetic oligonucleotide
gggucguuugguugggcgg

SEQ ID NO: 753114 - RNA, 19 nt, Artificial Sequence
  Description of Artificial Sequence: Synthetic oligonucleotide
acuacugaaggugcgcuuu

SEQ ID NO: 753115 - RNA, 19 nt, Artificial Sequence
  Description of Artificial Sequence: Synthetic oligonucleotide
ucccucaugguugacccuc

SEQ ID NO: 753116 - RNA, 19 nt, Artificial Sequence
  Description of Artificial Sequence: Synthetic oligonucleotide
ggggucguuugguugggcg

SEQ ID NO: 753117 - RNA, 19 nt, Artificial Sequence
  Description of Artificial Sequence: Synthetic oligonucleotide
guuaaacuucccagcccag

SEQ ID NO: 753118 - RNA, 19 nt, Artificial Sequence
  Description of Artificial Sequence: Synthetic oligonucleotide
ugacaggacucauccccac

SEQ ID NO: 753119 - RNA, 19 nt, Artificial Sequence
  Description of Artificial Sequence: Synthetic oligonucleotide
ccuugcaagucagagggcc

SEQ ID NO: 753120 - RNA, 19 nt, Artificial Sequence
  Description of Artificial Sequence: Synthetic oligonucleotide
cauaaucaucgcgcucagg

SEQ ID NO: 753121 - RNA, 19 nt, Artificial Sequence
  Description of Artificial Sequence: Synthetic oligonucleotide
cacauggcacacuuauaga

SEQ ID NO: 753122 - RNA, 19 nt, Artificial Sequence
  Description of Artificial Sequence: Synthetic oligonucleotide
caagucagagggccuccag

SEQ ID NO: 753123 - RNA, 19 nt, Artificial Sequence
  Description of Artificial Sequence: Synthetic oligonucleotide
ugccagaaggggacugggu

SEQ ID NO: 753124 - RNA, 19 nt, Artificial Sequence
  Description of Artificial Sequence: Synthetic oligonucleotide
ucucacuguuaguauuauu

SEQ ID NO: 753125 - RNA, 19 nt, Artificial Sequence
  Description of Artificial Sequence: Synthetic oligonucleotide
agacuggcggcguuuccgu

SEQ ID NO: 753126 - RNA, 19 nt, Artificial Sequence
  Description of Artificial Sequence: Synthetic oligonucleotide
uaccugcauggguaaacuc

SEQ ID NO: 753127 - RNA, 19 nt, Artificial Sequence
  Description of Artificial Sequence: Synthetic oligonucleotide
auacuaggccagaacccag

SEQ ID NO: 753128 - RNA, 19 nt, Artificial Sequence
  Description of Artificial Sequence: Synthetic oligonucleotide
  modified_base (18)..(18): a, c, u, g, unknown or other
gaggaggugacagccccnc

SEQ ID NO: 753129 - RNA, 19 nt, Artificial Sequence
  Description of Artificial Sequence: Synthetic oligonucleotide
ggucguuugguugggcggg

SEQ ID NO: 753130 - RNA, 19 nt, Artificial Sequence
  Description of Artificial Sequence: Synthetic oligonucleotide
gcccugaugaaugccaugc

SEQ ID NO: 753131 - RNA, 19 nt, Artificial Sequence
  Description of Artificial Sequence: Synthetic oligonucleotide
caggccucaugaccaaaug

SEQ ID NO: 753132 - RNA, 19 nt, Artificial Sequence
  Description of Artificial Sequence: Synthetic oligonucleotide
cugaugaaugccaugccau

SEQ ID NO: 753133 - RNA, 19 nt, Artificial Sequence
  Description of Artificial Sequence: Synthetic oligonucleotide
ucccugucgggcccugaug

SEQ ID NO: 753134 - RNA, 19 nt, Artificial Sequence
  Description of Artificial Sequence: Synthetic oligonucleotide
guguuggauucagaaagga

SEQ ID NO: 753135 - RNA, 19 nt, Artificial Sequence
  Description of Artificial Sequence: Synthetic oligonucleotide
agguugggagugguagcac

SEQ ID NO: 753136 - RNA, 19 nt, Artificial Sequence
  Description of Artificial Sequence: Synthetic oligonucleotide
  modified_base (11)..(11): a, c, u, g, unknown or other
ugacagccccnccccuugc

SEQ ID NO: 753137 - RNA, 19 nt, Artificial Sequence
  Description of Artificial Sequence: Synthetic oligonucleotide
aaggcacugcagggauugg

SEQ ID NO: 753138 - RNA, 19 nt, Artificial Sequence
  Description of Artificial Sequence: Synthetic oligonucleotide
  modified_base (9)..(9): a, c, u, g, unknown or other
acagccccnccccuugcca

SEQ ID NO: 753139 - RNA, 19 nt, Artificial Sequence
  Description of Artificial Sequence: Synthetic oligonucleotide
ccucacauggcgucucagg

SEQ ID NO: 753140 - RNA, 19 nt, Artificial Sequence
  Description of Artificial Sequence: Synthetic oligonucleotide
ccggacuuggacaugcuuc

SEQ ID NO: 753141 - RNA, 19 nt, Artificial Sequence
  Description of Artificial Sequence: Synthetic oligonucleotide
ggacugaugagugcucuug

SEQ ID NO: 753142 - RNA, 19 nt, Artificial Sequence
  Description of Artificial Sequence: Synthetic oligonucleotide
cugggaccuaguugucccc

SEQ ID NO: 753143 - RNA, 19 nt, Artificial Sequence
  Description of Artificial Sequence: Synthetic oligonucleotide
gugcgcuuucccucugugc

SEQ ID NO: 753144 - RNA, 19 nt, Artificial Sequence
  Description of Artificial Sequence: Synthetic oligonucleotide
ugggaccuaguugucccca

SEQ ID NO: 753145 - RNA, 19 nt, Artificial Sequence
  Description of Artificial Sequence: Synthetic oligonucleotide
cugcuccuauaucgaagag

SEQ ID NO: 753146 - RNA, 19 nt, Artificial Sequence
  Description of Artificial Sequence: Synthetic oligonucleotide
caugcgugcggaaaugggu

SEQ ID NO: 753147 - RNA, 19 nt, Artificial Sequence
  Description of Artificial Sequence: Synthetic oligonucleotide
gggugugaugucuggcugc

SEQ ID NO: 753148 - RNA, 19 nt, Artificial Sequence
  Description of Artificial Sequence: Synthetic oligonucleotide
accuugcaagucagagggc

SEQ ID NO: 753149 - RNA, 19 nt, Artificial Sequence
  Description of Artificial Sequence: Synthetic oligonucleotide
cuccuauaucgaagaggac

SEQ ID NO: 753150 - RNA, 19 nt, Artificial Sequence
  Description of Artificial Sequence: Synthetic oligonucleotide
guguuagaggagggaauac

SEQ ID NO: 753151 - RNA, 19 nt, Artificial Sequence
  Description of Artificial Sequence: Synthetic oligonucleotide
gguguuagugccaaugagu

SEQ ID NO: 753152 - RNA, 19 nt, Artificial Sequence
  Description of Artificial Sequence: Synthetic oligonucleotide
aguggggugcaagucacua

SEQ ID NO: 753153 - RNA, 19 nt, Artificial Sequence
  Description of Artificial Sequence: Synthetic oligonucleotide
ucccgucggggucguuugg

SEQ ID NO: 753154 - RNA, 19 nt, Artificial Sequence
  Description of Artificial Sequence: Synthetic oligonucleotide
ugccaugcgugcggaaaug

SEQ ID NO: 753155 - RNA, 19 nt, Artificial Sequence
  Description of Artificial Sequence: Synthetic oligonucleotide
cauggcgucucaggcuggg

SEQ ID NO: 753156 - RNA, 19 nt, Artificial Sequence
  Description of Artificial Sequence: Synthetic oligonucleotide
acgcugacacgcuggggca

SEQ ID NO: 753157 - RNA, 19 nt, Artificial Sequence
  Description of Artificial Sequence: Synthetic oligonucleotide
gggucagagcguaacggag

SEQ ID NO: 753158 - RNA, 19 nt, Artificial Sequence
  Description of Artificial Sequence: Synthetic oligonucleotide
gagccucgcaccagagugc

SEQ ID NO: 753159 - RNA, 19 nt, Artificial Sequence
  Description of Artificial Sequence: Synthetic oligonucleotide
ggacacuuaaagacgcuga

SEQ ID NO: 753160 - RNA, 19 nt, Artificial Sequence
  Description of Artificial Sequence: Synthetic oligonucleotide
gguugggagugguagcaca

SEQ ID NO: 753161 - RNA, 19 nt, Artificial Sequence
  Description of Artificial Sequence: Synthetic oligonucleotide
ccaugcgugcggaaauggg

SEQ ID NO: 753162 - RNA, 19 nt, Artificial Sequence
  Description of Artificial Sequence: Synthetic oligonucleotide
gugugaagaaaggagcggu

SEQ ID NO: 753163 - RNA, 19 nt, Artificial Sequence
  Description of Artificial Sequence: Synthetic oligonucleotide
ccaccccuagauuucuggg

SEQ ID NO: 753164 - RNA, 19 nt, Artificial Sequence
  Description of Artificial Sequence: Synthetic oligonucleotide
ucaucgcgcucaggaaacc

SEQ ID NO: 753165 - RNA, 19 nt, Artificial Sequence
  Description of Artificial Sequence: Synthetic oligonucleotide
agaauccucaaaagccuuu

SEQ ID NO: 753166 - RNA, 19 nt, Artificial Sequence
  Description of Artificial Sequence: Synthetic oligonucleotide
gaaccgguggcggcucaag

SEQ ID NO: 753167 - RNA, 19 nt, Artificial Sequence
  Description of Artificial Sequence: Synthetic oligonucleotide
gaacgcucacacaggcgac

SEQ ID NO: 753168 - RNA, 19 nt, Artificial Sequence
  Description of Artificial Sequence: Synthetic oligonucleotide
gggguguuagugccaauga

SEQ ID NO: 753169 - RNA, 19 nt, Artificial Sequence
  Description of Artificial Sequence: Synthetic oligonucleotide
ggcaacaagugcuggucga

SEQ ID NO: 753170 - RNA, 19 nt, Artificial Sequence
  Description of Artificial Sequence: Synthetic oligonucleotide
  modified_base (3)..(3): a, c, u, g, unknown or other
ccnccccuugccaaacagg

SEQ ID NO: 753171 - RNA, 19 nt, Artificial Sequence
  Description of Artificial Sequence: Synthetic oligonucleotide
gcgguugugagugaaaacu

SEQ ID NO: 753172 - RNA, 19 nt, Artificial Sequence
  Description of Artificial Sequence: Synthetic oligonucleotide
ugacccucacauggcgucu

SEQ ID NO: 753173 - RNA, 19 nt, Artificial Sequence
  Description of Artificial Sequence: Synthetic oligonucleotide
cagguugggagugguagca

SEQ ID NO: 753174 - RNA, 19 nt, Artificial Sequence
  Description of Artificial Sequence: Synthetic oligonucleotide
uucccucaugguugacccu

SEQ ID NO: 753175 - RNA, 19 nt, Artificial Sequence
  Description of Artificial Sequence: Synthetic oligonucleotide
agggaauacuaggccagaa

SEQ ID NO: 753176 - RNA, 19 nt, Artificial Sequence
  Description of Artificial Sequence: Synthetic oligonucleotide
gcaaucauuaguguuggau

SEQ ID NO: 753177 - RNA, 19 nt, Artificial Sequence
  Description of Artificial Sequence: Synthetic oligonucleotide
uugcuucccaggucccguc

SEQ ID NO: 753178 - RNA, 19 nt, Artificial Sequence
  Description of Artificial Sequence: Synthetic oligonucleotide
gucguuugguugggcgggg

SEQ ID NO: 753179 - RNA, 19 nt, Artificial Sequence
  Description of Artificial Sequence: Synthetic oligonucleotide
caugccaugcgugcggaaa

SEQ ID NO: 753180 - RNA, 19 nt, Artificial Sequence
  Description of Artificial Sequence: Synthetic oligonucleotide
aggcguccggacugaugag

SEQ ID NO: 753181 - RNA, 19 nt, Artificial Sequence
  Description of Artificial Sequence: Synthetic oligonucleotide
ggugcgcuuucccucugug

SEQ ID NO: 753182 - RNA, 19 nt, Artificial Sequence
  Description of Artificial Sequence: Synthetic oligonucleotide
ggacugggucccaaggggc

SEQ ID NO: 753183 - RNA, 19 nt, Artificial Sequence
  Description of Artificial Sequence: Synthetic oligonucleotide
gccaugcgugcggaaaugg

SEQ ID NO: 753184 - RNA, 19 nt, Artificial Sequence
  Description of Artificial Sequence: Synthetic oligonucleotide
accguggccuccugaccca

SEQ ID NO: 753185 - RNA, 19 nt, Artificial Sequence
  Description of Artificial Sequence: Synthetic oligonucleotide
gaggaccguggccuccuga

SEQ ID NO: 753186 - RNA, 19 nt, Artificial Sequence
  Description of Artificial Sequence: Synthetic oligonucleotide
ccgguggcggcucaaggag

SEQ ID NO: 753187 - RNA, 19 nt, Artificial Sequence
  Description of Artificial Sequence: Synthetic oligonucleotide
cuugcaagucagagggccu

SEQ ID NO: 753188 - RNA, 19 nt, Artificial Sequence
  Description of Artificial Sequence: Synthetic oligonucleotide
ccacuuaaguaggacccag

SEQ ID NO: 753189 - RNA, 19 nt, Artificial Sequence
  Description of Artificial Sequence: Synthetic oligonucleotide
  modified_base (7)..(7): a, c, u, g, unknown or other
agccccnccccuugccaaa

SEQ ID NO: 753190 - RNA, 19 nt, Artificial Sequence
  Description of Artificial Sequence: Synthetic oligonucleotide
ugacacgcuggggcaacaa

SEQ ID NO: 753191 - RNA, 19 nt, Artificial Sequence
  Description of Artificial Sequence: Synthetic oligonucleotide
gccucaugaccaaauguga

SEQ ID NO: 753192 - RNA, 19 nt, Artificial Sequence
  Description of Artificial Sequence: Synthetic oligonucleotide
gcuaauccuaggccuggga

SEQ ID NO: 753193 - RNA, 19 nt, Artificial Sequence
  Description of Artificial Sequence: Synthetic oligonucleotide
ggucaagggcuacaggccu

SEQ ID NO: 753194 - RNA, 19 nt, Artificial Sequence
  Description of Artificial Sequence: Synthetic oligonucleotide
gucagagggccuccagaaa

SEQ ID NO: 753195 - RNA, 19 nt, Artificial Sequence
  Description of Artificial Sequence: Synthetic oligonucleotide
gguugugagugaaaacugu

SEQ ID NO: 753196 - RNA, 19 nt, Artificial Sequence
  Description of Artificial Sequence: Synthetic oligonucleotide
gugcuggucgaagugugaa

SEQ ID NO: 753197 - RNA, 19 nt, Artificial Sequence
  Description of Artificial Sequence: Synthetic oligonucleotide
gacuggcggcguuuccguc

SEQ ID NO: 753198 - RNA, 19 nt, Artificial Sequence
  Description of Artificial Sequence: Synthetic oligonucleotide
cuucgugcucacgggcaug

SEQ ID NO: 753199 - RNA, 19 nt, Artificial Sequence
  Description of Artificial Sequence: Synthetic oligonucleotide
acccucacauggcgucuca

SEQ ID NO: 753200 - RNA, 19 nt, Artificial Sequence
  Description of Artificial Sequence: Synthetic oligonucleotide
  modified_base (4)..(4): a, c, u, g, unknown or other
cccnccccuugccaaacag

SEQ ID NO: 753201 - RNA, 19 nt, Artificial Sequence
  Description of Artificial Sequence: Synthetic oligonucleotide
ggcuaauccuaggccuggg

SEQ ID NO: 753202 - RNA, 19 nt, Artificial Sequence
  Description of Artificial Sequence: Synthetic oligonucleotide
guuuccguccuggccccug

SEQ ID NO: 753203 - RNA, 19 nt, Artificial Sequence
  Description of Artificial Sequence: Synthetic oligonucleotide
caagugcuggucgaagugu

SEQ ID NO: 753204 - RNA, 19 nt, Artificial Sequence
  Description of Artificial Sequence: Synthetic oligonucleotide
ugaaccgguggcggcucaa

SEQ ID NO: 753205 - RNA, 19 nt, Artificial Sequence
  Description of Artificial Sequence: Synthetic oligonucleotide
gacccucacauggcgucuc

SEQ ID NO: 753206 - RNA, 19 nt, Artificial Sequence
  Description of Artificial Sequence: Synthetic oligonucleotide
caucgcgcucaggaaacca

SEQ ID NO: 753207 - RNA, 19 nt, Artificial Sequence
  Description of Artificial Sequence: Synthetic oligonucleotide
caucuggucaagggcuaca

SEQ ID NO: 753208 - RNA, 19 nt, Artificial Sequence
  Description of Artificial Sequence: Synthetic oligonucleotide
ccacauaaucaucgcgcuc

SEQ ID NO: 753209 - RNA, 19 nt, Artificial Sequence
  Description of Artificial Sequence: Synthetic oligonucleotide
ugauucccucaugguugac

SEQ ID NO: 753210 - RNA, 19 nt, Artificial Sequence
  Description of Artificial Sequence: Synthetic oligonucleotide
gcguccggacugaugagug

SEQ ID NO: 753211 - RNA, 19 nt, Artificial Sequence
  Description of Artificial Sequence: Synthetic oligonucleotide
gggaccuaguuguccccac

SEQ ID NO: 753212 - RNA, 19 nt, Artificial Sequence
  Description of Artificial Sequence: Synthetic oligonucleotide
gagugguagcacaggggcu

SEQ ID NO: 753213 - RNA, 19 nt, Artificial Sequence
  Description of Artificial Sequence: Synthetic oligonucleotide
ggcggcucaaggagccagg

SEQ ID NO: 753214 - RNA, 19 nt, Artificial Sequence
  Description of Artificial Sequence: Synthetic oligonucleotide
gccacagaccuugcaaguc

SEQ ID NO: 753215 - RNA, 19 nt, Artificial Sequence
  Description of Artificial Sequence: Synthetic oligonucleotide
cccugucgggcccugauga

SEQ ID NO: 753216 - RNA, 19 nt, Artificial Sequence
  Description of Artificial Sequence: Synthetic oligonucleotide
gcguuuccguccuggcccc

SEQ ID NO: 753217 - RNA, 19 nt, Artificial Sequence
  Description of Artificial Sequence: Synthetic oligonucleotide
ucgcaccagagugccuccu

SEQ ID NO: 753218 - RNA, 19 nt, Artificial Sequence
  Description of Artificial Sequence: Synthetic oligonucleotide
gccugggaccuaguugucc

SEQ ID NO: 753219 - RNA, 19 nt, Artificial Sequence
  Description of Artificial Sequence: Synthetic oligonucleotide
cugcauggguaaacucucu

SEQ ID NO: 753220 - RNA, 19 nt, Artificial Sequence
  Description of Artificial Sequence: Synthetic oligonucleotide
cguuugguugggcggggag

SEQ ID NO: 753221 - RNA, 19 nt, Artificial Sequence
  Description of Artificial Sequence: Synthetic oligonucleotide
ccgcccuucucuucuugug

SEQ ID NO: 753222 - RNA, 19 nt, Artificial Sequence
  Description of Artificial Sequence: Synthetic oligonucleotide
gggcuacaggccucaugac

SEQ ID NO: 753223 - RNA, 19 nt, Artificial Sequence
  Description of Artificial Sequence: Synthetic oligonucleotide
cgucggggucguuugguug

SEQ ID NO: 753224 - RNA, 19 nt, Artificial Sequence
  Description of Artificial Sequence: Synthetic oligonucleotide
gggugcaagucacuagaau

SEQ ID NO: 753225 - RNA, 19 nt, Artificial Sequence
  Description of Artificial Sequence: Synthetic oligonucleotide
gucagaagacuggcggcgu

SEQ ID NO: 753226 - RNA, 19 nt, Artificial Sequence
  Description of Artificial Sequence: Synthetic oligonucleotide
  modified_base (8)..(8): a, c, u, g, unknown or other
cagccccnccccuugccaa

SEQ ID NO: 753227 - RNA, 19 nt, Artificial Sequence
  Description of Artificial Sequence: Synthetic oligonucleotide
gcggcguuuccguccuggc

SEQ ID NO: 753228 - RNA, 19 nt, Artificial Sequence
  Description of Artificial Sequence: Synthetic oligonucleotide
acccucugggucagagcgu

SEQ ID NO: 753229 - RNA, 19 nt, Artificial Sequence
  Description of Artificial Sequence: Synthetic oligonucleotide
cuauaucgaagaggaccgu

SEQ ID NO: 753230 - RNA, 19 nt, Artificial Sequence
  Description of Artificial Sequence: Synthetic oligonucleotide
ccaccacaaugcucuguuc

SEQ ID NO: 753231 - RNA, 19 nt, Artificial Sequence
  Description of Artificial Sequence: Synthetic oligonucleotide
ccccauuugacaggacuca

SEQ ID NO: 753232 - RNA, 19 nt, Artificial Sequence
  Description of Artificial Sequence: Synthetic oligonucleotide
ccaggcguccggacugaug

SEQ ID NO: 753233 - RNA, 19 nt, Artificial Sequence
  Description of Artificial Sequence: Synthetic oligonucleotide
cauccacccucaggcccac

SEQ ID NO: 753234 - RNA, 19 nt, Artificial Sequence
  Description of Artificial Sequence: Synthetic oligonucleotide
ggaccuaguuguccccacu

SEQ ID NO: 753235 - RNA, 19 nt, Artificial Sequence
  Description of Artificial Sequence: Synthetic oligonucleotide
cucucacuguuaguauuau

SEQ ID NO: 753236 - RNA, 19 nt, Artificial Sequence
  Description of Artificial Sequence: Synthetic oligonucleotide
cuggcggcguuuccguccu

SEQ ID NO: 753237 - RNA, 19 nt, Artificial Sequence
  Description of Artificial Sequence: Synthetic oligonucleotide
ccacugcuccuauaucgaa

SEQ ID NO: 753238 - RNA, 19 nt, Artificial Sequence
  Description of Artificial Sequence: Synthetic oligonucleotide
ccaggaucagacgacuacu

SEQ ID NO: 753239 - RNA, 19 nt, Artificial Sequence
  Description of Artificial Sequence: Synthetic oligonucleotide
gcaagccaugccggacuug

SEQ ID NO: 753240 - RNA, 19 nt, Artificial Sequence
  Description of Artificial Sequence: Synthetic oligonucleotide
cugacacgcuggggcaaca

SEQ ID NO: 753241 - RNA, 19 nt, Artificial Sequence
  Description of Artificial Sequence: Synthetic oligonucleotide
gagcguaacggaggagcuu

SEQ ID NO: 753242 - RNA, 19 nt, Artificial Sequence
  Description of Artificial Sequence: Synthetic oligonucleotide
ggcgggguguuagugccaa

SEQ ID NO: 753243 - RNA, 19 nt, Artificial Sequence
  Description of Artificial Sequence: Synthetic oligonucleotide
cccacuuaaguaggaccca

SEQ ID NO: 753244 - RNA, 19 nt, Artificial Sequence
  Description of Artificial Sequence: Synthetic oligonucleotide
cccucacauggcgucucag

SEQ ID NO: 753245 - RNA, 19 nt, Artificial Sequence
  Description of Artificial Sequence: Synthetic oligonucleotide
ggcguccggacugaugagu

SEQ ID NO: 753246 - RNA, 19 nt, Artificial Sequence
  Description of Artificial Sequence: Synthetic oligonucleotide
cugucgggcccugaugaau

SEQ ID NO: 753247 - RNA, 19 nt, Artificial Sequence
  Description of Artificial Sequence: Synthetic oligonucleotide
ggccagaacccagcccaga

SEQ ID NO: 753248 - RNA, 19 nt, Artificial Sequence
  Description of Artificial Sequence: Synthetic oligonucleotide
  modified_base (6)..(6): a, c, u, g, unknown or other
gccccnccccuugccaaac

SEQ ID NO: 753249 - RNA, 19 nt, Artificial Sequence
  Description of Artificial Sequence: Synthetic oligonucleotide
ccugucgggcccugaugaa

SEQ ID NO: 753250 - RNA, 19 nt, Artificial Sequence
  Description of Artificial Sequence: Synthetic oligonucleotide
ggaccccauuugacaggac

SEQ ID NO: 753251 - RNA, 19 nt, Artificial Sequence
  Description of Artificial Sequence: Synthetic oligonucleotide
gccggacuuggacaugcuu

SEQ ID NO: 753252 - RNA, 19 nt, Artificial Sequence
  Description of Artificial Sequence: Synthetic oligonucleotide
ccguccuggccccugggcu

SEQ ID NO: 753253 - RNA, 19 nt, Artificial Sequence
  Description of Artificial Sequence: Synthetic oligonucleotide
ggucccgucggggucguuu

SEQ ID NO: 753254 - RNA, 19 nt, Artificial Sequence
  Description of Artificial Sequence: Synthetic oligonucleotide
cacugcugcgugccaccau

SEQ ID NO: 753255 - RNA, 19 nt, Artificial Sequence
  Description of Artificial Sequence: Synthetic oligonucleotide
cacaggcgacaggggaacu

SEQ ID NO: 753256 - RNA, 19 nt, Artificial Sequence
  Description of Artificial Sequence: Synthetic oligonucleotide
ccuucgugcucacgggcau

SEQ ID NO: 753257 - RNA, 19 nt, Artificial Sequence
  Description of Artificial Sequence: Synthetic oligonucleotide
ccggacugaugagugcucu

SEQ ID NO: 753258 - RNA, 19 nt, Artificial Sequence
  Description of Artificial Sequence: Synthetic oligonucleotide
cgacuacugaaggugcgcu

SEQ ID NO: 753259 - RNA, 19 nt, Artificial Sequence
  Description of Artificial Sequence: Synthetic oligonucleotide
cccgcccuucucuucuugu

SEQ ID NO: 753260 - RNA, 19 nt, Artificial Sequence
  Description of Artificial Sequence: Synthetic oligonucleotide
cccauuugacaggacucau

SEQ ID NO: 753261 - RNA, 19 nt, Artificial Sequence
  Description of Artificial Sequence: Synthetic oligonucleotide
ccaugccaugcgugcggaa

SEQ ID NO: 753262 - RNA, 19 nt, Artificial Sequence
  Description of Artificial Sequence: Synthetic oligonucleotide
cccauccgccauccccaga

SEQ ID NO: 753263 - RNA, 19 nt, Artificial Sequence
  Description of Artificial Sequence: Synthetic oligonucleotide
gccaccccucagggacuug

SEQ ID NO: 753264 - RNA, 19 nt, Artificial Sequence
  Description of Artificial Sequence: Synthetic oligonucleotide
caagggcuacaggccucau

SEQ ID NO: 753265 - RNA, 19 nt, Artificial Sequence
  Description of Artificial Sequence: Synthetic oligonucleotide
cccgucggggucguuuggu

SEQ ID NO: 753266 - RNA, 19 nt, Artificial Sequence
  Description of Artificial Sequence: Synthetic oligonucleotide
gcgggguguuagugccaau

SEQ ID NO: 753267 - RNA, 19 nt, Artificial Sequence
  Description of Artificial Sequence: Synthetic oligonucleotide
ccucccugucgggcccuga

SEQ ID NO: 753268 - RNA, 19 nt, Artificial Sequence
  Description of Artificial Sequence: Synthetic oligonucleotide
cccaggcguccggacugau

SEQ ID NO: 753269 - RNA, 19 nt, Artificial Sequence
  Description of Artificial Sequence: Synthetic oligonucleotide
cguuuccguccuggccccu

SEQ ID NO: 753270 - RNA, 19 nt, Artificial Sequence
  Description of Artificial Sequence: Synthetic oligonucleotide
ucgaauaaaacucaaguga

SEQ ID NO: 753271 - RNA, 19 nt, Artificial Sequence
  Description of Artificial Sequence: Synthetic oligonucleotide
uauugauuuacaucuaucc

SEQ ID NO: 753272 - RNA, 19 nt, Artificial Sequence
  Description of Artificial Sequence: Synthetic oligonucleotide
cuuauaaucgccauuuccc

SEQ ID NO: 753273 - RNA, 19 nt, Artificial Sequence
  Description of Artificial Sequence: Synthetic oligonucleotide
aaaaucaggagugugcagg

SEQ ID NO: 753274 - RNA, 19 nt, Artificial Sequence
  Description of Artificial Sequence: Synthetic oligonucleotide
aaucgaugcacagaaacac

SEQ ID NO: 753275 - RNA, 19 nt, Artificial Sequence
  Description of Artificial Sequence: Synthetic oligonucleotide
aauaaaacucaagugaaca

SEQ ID NO: 753276 - RNA, 19 nt, Artificial Sequence
  Description of Artificial Sequence: Synthetic oligonucleotide
aaacauaccuuguuaguag

SEQ ID NO: 753277 - RNA, 19 nt, Artificial Sequence
  Description of Artificial Sequence: Synthetic oligonucleotide
aagcauucgaguucccucc

SEQ ID NO: 753278 - RNA, 19 nt, Artificial Sequence
  Description of Artificial Sequence: Synthetic oligonucleotide
auaaaacucaagugaacac

SEQ ID NO: 753279 - RNA, 19 nt, Artificial Sequence
  Description of Artificial Sequence: Synthetic oligonucleotide
aggauuaagagccguagcg

SEQ ID NO: 753280 - RNA, 19 nt, Artificial Sequence
  Description of Artificial Sequence: Synthetic oligonucleotide
ugaacugcgccauaucugg

SEQ ID NO: 753281 - RNA, 19 nt, Artificial Sequence
  Description of Artificial Sequence: Synthetic oligonucleotide
aguagacuugacuuucucc

SEQ ID NO: 753282 - RNA, 19 nt, Artificial Sequence
  Description of Artificial Sequence: Synthetic oligonucleotide
aacauaccuuguuaguagg

SEQ ID NO: 753283 - RNA, 19 nt, Artificial Sequence
  Description of Artificial Sequence: Synthetic oligonucleotide
aaagcaaagcuccacuaca

SEQ ID NO: 753284 - RNA, 19 nt, Artificial Sequence
  Description of Artificial Sequence: Synthetic oligonucleotide
guagacuugacuuucuccc

SEQ ID NO: 753285 - RNA, 19 nt, Artificial Sequence
  Description of Artificial Sequence: Synthetic oligonucleotide
aucgaauaaaacucaagug

SEQ ID NO: 753286 - RNA, 19 nt, Artificial Sequence
  Description of Artificial Sequence: Synthetic oligonucleotide
aguaugacuccucuggguc

SEQ ID NO: 753287 - RNA, 19 nt, Artificial Sequence
  Description of Artificial Sequence: Synthetic oligonucleotide
uaaaacucaagugaacacc

SEQ ID NO: 753288 - RNA, 19 nt, Artificial Sequence
  Description of Artificial Sequence: Synthetic oligonucleotide
aacaauggacuccuccuuc

SEQ ID NO: 753289 - RNA, 19 nt, Artificial Sequence
  Description of Artificial Sequence: Synthetic oligonucleotide
uucgaauccagcuccgugg

SEQ ID NO: 753290 - RNA, 19 nt, Artificial Sequence
  Description of Artificial Sequence: Synthetic oligonucleotide
auccguauugccaacaggc

SEQ ID NO: 753291 - RNA, 19 nt, Artificial Sequence
  Description of Artificial Sequence: Synthetic oligonucleotide
aacucaagugaacaccaag

SEQ ID NO: 753292 - RNA, 19 nt, Artificial Sequence
  Description of Artificial Sequence: Synthetic oligonucleotide
gacgucaugacuccauugg

SEQ ID NO: 753293 - RNA, 19 nt, Artificial Sequence
  Description of Artificial Sequence: Synthetic oligonucleotide
uuauaaucgccauuucccc

SEQ ID NO: 753294 - RNA, 19 nt, Artificial Sequence
  Description of Artificial Sequence: Synthetic oligonucleotide
agccaaaugacuuuauuga

SEQ ID NO: 753295 - RNA, 19 nt, Artificial Sequence
  Description of Artificial Sequence: Synthetic oligonucleotide
uauaaucgccauuuccccg

SEQ ID NO: 753296 - RNA, 19 nt, Artificial Sequence
  Description of Artificial Sequence: Synthetic oligonucleotide
uccauuauauuuagaaguc

SEQ ID NO: 753297 - RNA, 19 nt, Artificial Sequence
  Description of Artificial Sequence: Synthetic oligonucleotide
ucaucgaaaagaucugcag

SEQ ID NO: 753298 - RNA, 19 nt, Artificial Sequence
  Description of Artificial Sequence: Synthetic oligonucleotide
aaagcuccacuacagagaa

SEQ ID NO: 753299 - RNA, 19 nt, Artificial Sequence
  Description of Artificial Sequence: Synthetic oligonucleotide
ugaaggaugcauucgucag

SEQ ID NO: 753300 - RNA, 19 nt, Artificial Sequence
  Description of Artificial Sequence: Synthetic oligonucleotide
agaaggaugaagcauucga

SEQ ID NO: 753301 - RNA, 19 nt, Artificial Sequence
  Description of Artificial Sequence: Synthetic oligonucleotide
gaagcugaaaccaagacua

SEQ ID NO: 753302 - RNA, 19 nt, Artificial Sequence
  Description of Artificial Sequence: Synthetic oligonucleotide
auaccuuguuaguaggcac

SEQ ID NO: 753303 - RNA, 19 nt, Artificial Sequence
  Description of Artificial Sequence: Synthetic oligonucleotide
uuaagagccguagcgaucc

SEQ ID NO: 753304 - RNA, 19 nt, Artificial Sequence
  Description of Artificial Sequence: Synthetic oligonucleotide
aacugcgccauaucugggg

SEQ ID NO: 753305 - RNA, 19 nt, Artificial Sequence
  Description of Artificial Sequence: Synthetic oligonucleotide
gaucgaauaaaacucaagu

SEQ ID NO: 753306 - RNA, 19 nt, Artificial Sequence
  Description of Artificial Sequence: Synthetic oligonucleotide
aaggaauugccucguaacu

SEQ ID NO: 753307 - RNA, 19 nt, Artificial Sequence
  Description of Artificial Sequence: Synthetic oligonucleotide
cuaaaccagaaaugaaagc

SEQ ID NO: 753308 - RNA, 19 nt, Artificial Sequence
  Description of Artificial Sequence: Synthetic oligonucleotide
auagggucaucaaaguacc

SEQ ID NO: 753309 - RNA, 19 nt, Artificial Sequence
  Description of Artificial Sequence: Synthetic oligonucleotide
cauuggcaaagacagagag

SEQ ID NO: 753310 - RNA, 19 nt, Artificial Sequence
  Description of Artificial Sequence: Synthetic oligonucleotide
gaaguaugacuccucuggg

SEQ ID NO: 753311 - RNA, 19 nt, Artificial Sequence
  Description of Artificial Sequence: Synthetic oligonucleotide
cugaguuguguccugaagc

SEQ ID NO: 753312 - RNA, 19 nt, Artificial Sequence
  Description of Artificial Sequence: Synthetic oligonucleotide
gaugaagcauucgaguucc

SEQ ID NO: 753313 - RNA, 19 nt, Artificial Sequence
  Description of Artificial Sequence: Synthetic oligonucleotide
ugggagaugccacuccugg

SEQ ID NO: 753314 - RNA, 19 nt, Artificial Sequence
  Description of Artificial Sequence: Synthetic oligonucleotide
uuuaccaggucggacacag

SEQ ID NO: 753315 - RNA, 19 nt, Artificial Sequence
  Description of Artificial Sequence: Synthetic oligonucleotide
cugaaguagaguuuuacca

SEQ ID NO: 753316 - RNA, 19 nt, Artificial Sequence
  Description of Artificial Sequence: Synthetic oligonucleotide
uuauugauuuacaucuauc

SEQ ID NO: 753317 - RNA, 19 nt, Artificial Sequence
  Description of Artificial Sequence: Synthetic oligonucleotide
ucgaucucagugaaggaug

SEQ ID NO: 753318 - RNA, 19 nt, Artificial Sequence
  Description of Artificial Sequence: Synthetic oligonucleotide
gagcuuauggaggagcugg

SEQ ID NO: 753319 - RNA, 19 nt, Artificial Sequence
  Description of Artificial Sequence: Synthetic oligonucleotide
cuuguuaguaggcaccgag

SEQ ID NO: 753320 - RNA, 19 nt, Artificial Sequence
  Description of Artificial Sequence: Synthetic oligonucleotide
ugcuuuucgaucucaguga

SEQ ID NO: 753321 - RNA, 19 nt, Artificial Sequence
  Description of Artificial Sequence: Synthetic oligonucleotide
aaguacaugucugaggaaa
